United States Patent Application Publication US 2025/0101403 A1 - sequence listing, part 2

SEQ ID NO: 4119 - protein, 469 aa, synthetic construct
MHYTTPVRAAVYLRISEDRSGEQLGVARQREDCLKLCDQRKWVPVEYLDNDVSASTGKRRPAYEQMLADITAGKIAAVVAWDLDRLHRRPVELEAFMSLADEKRLALATVAGDVDLATPQGRLVARLKGSVAAHETEHKKARQRRAARQKAERGHPNWSKAFGYLPGPNGPEPDPRTAPLVKQAYANILAGASLGDVCRQWNDAGAFTITGRPWTTTTLSKFLRKPRNAGLRAYKGARYGPVDRDAIVGKARWSPLVDEATFWAAQAVLDAPGRAPGRKSVRRHLLTGLAGCGKCGNHLAGSYRTDGKVVYVCKACHGVAILADNIEPILYHIVAERLAMPDAVDLLRREIHDAAEAETIRLELETLCGELDRLAVERAEGLLTARQVKISTDIVNAKITKLQARQLDQERLRVFDGIPLGTQQVAGMIAELSPDRFRAVLDVLAEVVVQPVGKGGRIFNPERVQVNWR

SEQ ID NO: 4120 - protein, 452 aa, synthetic construct
MKAAIYIRVSTREQVENYSIQAQTEKLTALCRSKDWDVYDIFIDGGYSGSNMNRPALNEMLSKLREIDAVVVYRLDRLSRSQRDTITLIEEHFLKNNVEFVSLSETLDTSSPFGRAMIGILSVFAQLERETIRDRMVMGKIKRIEAGLPLTTAKGRTFGYDVIDTRLYINEEEAKQLQLIYDIFEEEQSITFLQRRLKELGFRVRTYNCYNNWLTNDLYCGYVSYKDKVHVKGIHEPIVSEEQFYRVQEIFTRVGKNPNMNRDSASLLNNLVVCSKCGLGFVHRRKDTTSRGKKYHYRYYSCKTYKHIHELEKCGNKIWRADKLEELIINRVNNYSFASRNVDKEDELDSLSEKLKIEHAKRKRLFDLYINGSYEVSELDSMMNGIDAQINYYESQIEAIEELKKNKKIQENLADLATVDYDSLEFREKQLYLKSLINKIYIDGEQVTIEWL

SEQ ID NO: 4121 - protein, 485 aa, synthetic construct
MTKKVAIYTRVSTTNQAEEGFSIDEQIDRLTKYAEAMGWQVSDTYTDAGFSGAKLERPAMQRLINDIENMAFDTVLVYKLDRLSRSVRDTLYLVKDVFTKNKIDFISLSESIDTSSAMGSLFLTILSAINEFERENIKERMAMGKLGRAKSGKSMMWTKTAFGYYHNRKTGILEIVPLQATIVEQIFTDYLSGISLTKLRDKLNESGHIGKDIPWSYRTLRQTLDNPVYCGYIKFKDSLFEGMHKPIIPYETYLKVQKELEERQQQTYERNNNPRPFQAKYMLSGMARCGYCGAPLKIVLGHKRKDGSRTMRYHCANRFPRKTKGVTVYNDNKKCDSGTYDLSNLENTVVDTLIGFQENNDSLLKLINGNNQPILDTSSFKKQISQIDKKIQKNSDLYLNDFITMDELKDRTDSLQAEKKLLKAKISENKLNDSTDVFELVKTQLGSIPINELSYDNKKKIVNNLVSKVDVTADNVDIIFKFQLA

SEQ ID NO: 4122 - protein, 452 aa, synthetic construct
MKAAIYIRVSTREQVENYSIQAQTEKLTALCRSKDWDVYDIFIDGGYSGSNTNRPALNEMLSKLHEIDAVVVYRLDRLSRSQRDTITLIEEYFLKNNVEFVSLSETLDTSSPFGRAMIGILSVFAQLERETIRDRMVMGKIKRIEAGLPLTTAKGRTFGYDVIDTKLYINEEEAKQLRLIYDIFEEVQSITFLQKRLKKLGFKVRTYNRYNNWLTNDLYCGYVSYKDKVHVKGIHEPIISEEQFHRVQGIFARMGKNPNMNRGSASLLNNLVVCSKCGLSFVHRRKDIMSRGKKYHYRYYSCKTYKHIHELEKCGNKIWRADKLEELIISRVNNYSLASRNVDKEDELDSLKEKLKIEHAKKKRLFDLYVNGSFEVSELDSVMKDIDAQINYYESQIGANEELKKNKKIQENLANLAAVDFDSLEFREKQLYLKSLINKIYIDGEQVTIEWL

SEQ ID NO: 4123 - protein, 485 aa, synthetic construct
MTKKVAIYTRVSTINQAEEGFSIDEQIDRLTKYAEAMGWQVSDTYTDAGFSGAKLERPAMQRLINDIENKAFDTVLVYKLDRLSRSVRDTLYLVKDVFTKNKIDFISLNESIDTSSAMGSLFLTILSAINEFERENIKERMTMGKLGRAKSGKSMMWTKTAFGYYHNRETGILEIAPLQATIVEQIFTDYLSGISLTKLRDKLNESGHIGKDIPWSYRTLRQTLDNPVYCGYIKFKDSLFEGMHKPIIPYETYLKVQKELEERQQQTYERNNNPRPFQAKYMLSGMARCGYCGAPLKIVLGHKRKDGSRTMKYHCANRFPRKTKGVTVYNDNKKCDSGTYDLSNLENTVIDNLIGFQENNDSLLKIINGNNRLILDTSSSKEQISQIDKKIQKNSELYLNDFITMDELKERTDGLQAEKKLLKAKISENKFNDSTDVFELVKTRLGSIPISELSYDDKKKIVNNLVSKVDVTADNVDIIFKFQLA

SEQ ID NO: 4124 - protein, 452 aa, synthetic construct
MKAAIYIRVSTREQVENYSIQAQTEKLTALCRSKDWDVYDIFIDGGYSGSNMNRPALNEMLNKLHEIDAVVVYRLDRLSRSQRDTITLIEEYFLKNNVEFVSLSETLDTSSPFGRAMIGILSVFAQLERETIRDRMVMGKIKRIEAGLPLTTAKGRTFGYDVIDTKLYINEEEAKQLQLIYDIFEEEQSITSLQKRLKKLGFKVRTYNRYNNWLTNDLYCGYVSYKDKVHVKGIHEPIISEEQFYRVQEIFTRMGKNPNMNRDSASLLNNLVVCGKCGLGFVHRRKDTTSRGKKYHYRYYSCKTYKHTHELEKCGNKIWRADKLEELIINRVNNYSFASRNVDKEDELDSLNEKLKVEHAKKKRLFDLYINGSYEVSELDSMMSDIDAQINYYESQIEANGELKKNKKIQENLASLATVDFDSLEFREKQLYLKSLINKIYIDGEQVTIEWL

SEQ ID NO: 4125 - protein, 485 aa, synthetic construct
MTKKVAIYTRVSTTNQAEEGFSIDEQIDRLTKYAEAMGWQVSDTYTDAGFSGAKVERPAMQRLINDIENKAFDTVLVYKLDRLSRSVRDTLYLVKDVFTKNKIDFISLNESIDTSSAMGSLFLTILSAINEFERENIKERMTMGKLGRAKSGKSMMWTKTAFGYNHNRETGILEIVPLQATIVEQIFTDYLSGISLTKLRDKLNESGHIGKDIPWSYRTLRQTLDNPVYCGYIKFKGSLFEGMHKPIIPYETYLKVQKELEERQQQTYERNNNPRPFQAKYMLSGMARCGYCGAPLRIVLGRRRKDGSRTMKYHCANRFPRKTRGVTVYNDNKKCDSGTYDLSNLENTVIDNLIGFQENNDSLLKIINGINQPILDTSSFKKQISQIDKKIQKNSDLYLNDFITMDELKDRTDSLQAEKKLLKAKISENKFNDSTDVFELVKTQLGSIPINELSYDNKKRIVNNLVSKVDVTADNVDIIFKFQLA

SEQ ID NO: 4126 - protein, 452 aa, synthetic construct
MKAAIYIRVSTQEQVENYSIQAQTEKLTALCRSKDWDVYDIFIDGGYSGSNVNRPALNEMLSKLHEIDAVVVYRLDRLSRSQRDTTTLIEEYFLKNNVEFVSLSETLDTSSPFGRAMIGILSVFAQLERETIRDRTVMGKIKRVEAGLPLTTAKGRTFGYDVIDTKLYINEEEARQLQLIYDIFEEEQSITCLQKRLKKLGFKVHTYNRYNSWLTNDLYCGYVSYKDKVHVKGIHEPIISEEQFYRVQEIFARMGKNPNMNRDSASLLSNLVVCSKCGLGFVHRSKDTMSRGKKYHYRYYSCKTYKHTHELEKCGNKTWRADKLEELIINRVNNYSFAGRNVDKEDELDSLNEKLKIEHAKKKRLFDLYINGSYEVSELDNMMNDIDAQINYYESQIEANEELRRNKKIQENLADLAAVDFDSLEFREKQLYLKSLINKIYIDGEQVTIEWL

SEQ ID NO: 4127 - protein, 469 aa, synthetic construct
MSYTTPVRAAVYLRISEDRSGEQLGVARQREDCLKLCGQRKWEPVEYLDNDVSASTGKRRPAYEQMLADITAGKIAAVVAWDLDRLHRRPIELEAFMSLADEKRLALATVAGDVDLATPQGRLVARLKGSVAAHETEHKKARQRRAARQKAERGYPNWSKAFGYLPGPNGPEPDPRTAPLVRQAYADILAGASLGDVCRQWNNAGAFTITGRPWTATTLSKFLRKPRNAGLRTYRGARYGPADRDAIVGKAQWGPLVDEATFWAAQAVLDAPGRAPGRKSVRRHLLTGLAGCGKCGNHLAGSYRTDGRVVYVCKACHGVAILADNIEPILYHIVAERLAMPDAVDLLRREIYDAAEAETIRLELETLYGELDRLAVERAEGLLTARQVKISTDIVNAKITKLQARQLDQERLRVFDGIPLGTPQVAGKIAELSPDRFRAVLDVLAEVVVQPVGKGGGIFNPERVQVNWR

SEQ ID NO: 4128 - protein, 469 aa, synthetic construct
MSYTTPVRAAVYLRISEDRSGEQLGVARQREDCLELCDQRKWVPVEYLDNDVSASTGKRRPAYEQMLADITAGKIAAVVAWDLDRLHRRPIELEAFMSLADEKRLALATVAGDVDLATPQGRLVARLKGSVAAHETEHKKARQRRAARQKAERGHPNWSKAFGYLPGPNGPEPDPRTAPLVKQAYADILAGASLGDVCRQWNDAGALTITGRPWTTTTLSKFLRKPRNAGLRAYKGARYGPVDRDAIVGKAQWSPLVDEATFWAAQAVLDAPGRAPGRKSVRRHLLTGLAGCGKCGNHLAGSYRTDGRVVYVCKACHGVAILADNIEPILYHIVAERLAMPDAVDLLRREIHDAAEAETIRLELETLYDELDRLAVERADGLLTARQVKVCTDIVNAKITKLQARQLDQERLRVFGGIPLGTPRVAGMIAELSPDRFRAVLDVLAEVVVQPVGKSGRIFNPERVQVNWR

SEQ ID NO: 4129 - protein, 452 aa, synthetic construct
MKAAIYIRVSTREQVENYSIQAQTEKLTALCRSKDWDVYDIFIDGGYSGSNMNRPALNEMLSKLHEIDAVVVYRLDRLSRSQRDTITLIEEYFLKNNVEFVSLSETLDTSSPFGRAMIGILSVFAQLERETIRDRMVMGKIKRVEAGLPLTTAKGRTFGYDVIDTKLYINEEEAKQLQLIYDIFEEEQSITFLQKRLKKLGFKVRTYNRYNNWLTNDLYCGYVSYKDKVRVKGIHEPIISEEQFYRVQEIFARMGKNPNMNRDSASLLNNLVVCSKCGLGFVHRRKDTRSRGKKYHYRYYSCKTYKHTHELEKCGNKIWRADKLEELIINRVNNYSFASRNVDKEDELDSLNEKLKIEHEKKKRLFDLYINGSYEVSELDCMMNDIDAQINYYESQIEANEELKKDKKIQESLANLATVDYDSLEFREKQLYLKSLINKIYIDGEQVTIEWL

SEQ ID NO: 4130 - protein, 452 aa, synthetic construct
MKAAIYIRVSTREQVENYSIQAQTEKLTALCRSKDWDVYDTFIDGGYSGSNMNRPALNEMLSKLHEIDAVVVYRLDRLSRSQRDTITLIEEYFLKNNVEFVSLSETLDTSSPFGRAMIGILSVFAQLERETIRDRMVMGKIKRIEAGLPLTTAKGRTFGYDVIDTKLYINEEEAKQLQLIYDIFEEEQSITFLQKRLKKLGFKVRTYNRYNNWLTNDLYCGYVSYKDKVHVKGIHEPIISEEQFYRVQEIFTRMGKNPNMNRDSASLLNNLVVCSKCGLGFVHRRKDAMSRDKKYHYRYYSCKTYKHIHELEKCGNKIWRADKLEELVINRVNDYSIASRNVDKEDELDSLNEKLKIEHAKKKRLFELYINGSYEASGLDSMMNDIDAQINYYESQIEANEELKRDKKIQENLANLATVDFDSLEFREKQLYLKSLINKIYIDGEQVTIEWL

SEQ ID NO: 4131 - protein, 452 aa, synthetic construct
MKAAIYIRVSTREQVENYSIQAQTEKLTALCRSKDWDVYDIFIDGGYSGSNMNRPALNEMLSKLHEIDAVVVYRLDRLSRSQRDTITLIEEYFLKNNVEFVSLSETLDTSSPFGRAMIGILSVFAQLERETIRDRMVMGKIKRIEAGLPLTTAKGRTFGYDVIDTKLYINEEEAKQLQLIYDIFEEEQSITSLQKRLKKLGFKVRTYSCYNNWLTNDLYCGYVSYKDKVHVKGIHEPIISEEQFYRVQEIFARMGKNPNMNRDSASLLNNLVVCSKCGLGFVHRRKDAMSRDKKYHYRYYSCKTYKHIHELEKCGNKIWRADKLEELIINRVNSYSFASRNADKEDELDRLDEKLKIEQAKKKRLFDLYLNGSYEVSELDSMMSDIDAQINYYESQIGANEGLKKNKKIQENLADLATVDFDSLEFREKQLYLKSLINKIYIDGEQVTIEWL

SEQ ID NO: 4132 - protein, 452 aa, synthetic construct
MKAAIYIRVSTREQVENYSIQAQTEKLTALCRSKDWDVYDVFIDGGYSGSNMNRPALNEMLSKLHEIDAVVVYRLDRLSRSQRDTITLIEEYFLKNNVEFVSLSETLDTSSPFGRAMIGILSVFAQLERETIRDRMVMGKIKRIEAGLPLTTAKGRTFGYDVIDTKLYINEEEAKQLQLIYDIFEEEQSITLLQKRLKNLGFKVRTYNCYNNWLTNDLYCGYVSYKDKVHVKGIHEPIISEEQFYRVQEIFARMGKNPNMNRGSASLLNNLVVCSKCGLGFVHRRKDIMSRGKKYHYRYYSCKTYKHIHELEKCGNKIWRADKLEELIINRVNNYSIATRNVDKEDELDSLNEKLKIEHAKKKRLFDLYINGSYEVSELDSLMSDIDAQINYYESQIEASEELKKNKKIQENLADLATVDFDSLEFREKQRYLKSLINKIYIDGEQVTIEWL

SEQ ID NO: 4133 - protein, 452 aa, synthetic construct
MKAAIYIRVSTREQVENYSIQAQTEKLTALCRSKDWDVYDIFIDGGYSGSNMNRPALNEMLSKLHEIDAVVVYRLDRLSRSQRDTITLIEEHFLKNNVEFVSLSETLDTSSPFGRAMIGILSVFAQLERETIRDRMVMGKIKRVEAGLPLTTAKGRTFGYDVIDTKLYVNEEEAKQLQLIYDIFEEEQSITLLQKRLKQLGFRVRSYNRYNNWLTNDLYCGYVSYKDKVHVKGIHEPIVSEEQFYRVQEIFTRMGKNPNMNRDSASLLSNLVVCSKCGLGFVHRRKDTMSRGKKYHYRYYSCKTYKHTHELEKCGNKIWRADKLEELIINRVNNYNSAGRNMDKEDELDCLNEKLKIEHAKRKRLFDLYINGSYEVSELDSMMNDIDAQINYYESQIEANEELKRNKKIQENLANLATVDYDSLEFREKQLYLKSLISKIYIDGEQVTIEWL

SEQ ID NO: 4134 - protein, 452 aa, synthetic construct
MKAAIYIRVSTREQVENYSIQAQTEKLTALCRSKDWDVYDVFIDGGYSGSNMNRPALNEMLSKLHEIDAVVVYRLDRLSRSQRDTITLIEEYFLKNNVEFVSLSETLDTSSPFGRAMIGILSVFAQLERETIRDRMVMGKVKRVEAGLPLTTAKGRTFGYDVIDTKLYINEEEARQLQLIYDIFEEEQSITFLQKRLKKLGFKVRTYNCYNNWLTNDLYCGYVSYKDKVHVKGIHEPIISEEQFYRVQEIFTRMGKNPNMNRDSASLLNNLVVCGKCGLGFVHRRKDAMSRDKKYHYRYYSCKTYKHIHELEKCGNKIWRADKLEELIINRVNSYSLASRNVDKEDELDSLNEKLKIEHAKKKRLFELYINGRYEVSELDSMMNDIDAQINYYESQIEANEELKKNKKIQENLAYLATVDFDSLEFREKQLYLKSLINKIYIDGEQVTIEWL

SEQ ID NO: 4135 - protein, 452 aa, synthetic construct
MKAAIYIRVSTREQVENYSIQAQTEKLTALCRSKDWDVYDIFIDGGYSGSNMNRPALNEMLSKLHEIDAVVVYRLDRLSRSQRDTITLIEEYLLKNNVEFVSLSETLDTSSPFGRAMIGILSVFAQLERETIRDRMVMGKIKRIEAGLPLTTAKGRTFGYDVIDTKLYINEEEAKQLRLIYDIFEEEKSITFLQKRLKKLGFKVRTYSRYNNWLTNDLYCGYVSYKDKVHVKGIHEPIISEEQFYRVQEIFARMGKNPNMNRGSASLLNNLVVCSKCGLGFVHRRKDTMSRDKKYHYRYYSCKTYKHIHELEKCGNKIWRADKLEELIINRVNNYSVASRNVDKEDELDSLNEKLKTEHAKKKRLFDLYINGSYEVSELDRMMSDIDAQINYYESQIEANEELKKNKRIQENLAYLATVDFASLEFREKQLYLKSLINKIYIDGEQVTIEWL

SEQ ID NO: 4136 - protein, 452 aa, synthetic construct
MKAAIYIRVSTREQVENYSIQAQTEKLTALCRSKDWDVYDIFIDGGYSGSNMNRPALNEMLSKLHEIDAVVVYRLDRLSRSQRDTITLIEEYFLKNNVEFVSLSETLDTSSPFGRAMIGILSVFAQLERETIRDRMVMGKIKRIEAGLPLTTAKGRTFGYDVIDTKLYINEEEAKQLRQIYDIFEEEQSITFLQKRLKKLGFKVHTYNRYNNWLTNDLYCGYVSYKDKVHVKGIHEPIISEEQFYRVQEIFTRMGKNPNMNRGSASLLNNLVVCGKCGLGFVHRRKDAMSRDKKYHYRYYSCKTYKHIHELEKCGNKIWRADKLEELIINRVNNYSLASRNVDKEDELDSLNEKLKIEHAKKKRLFDLYINGRYEVSELDCLMNEIDAQINYYESQIEANEELKKNKKIQENLADLATADFDSLEFREKQLYLKSLINKIYIDGDQVTIEWL

SEQ ID NO: 4137 - protein, 485 aa, synthetic construct
MTKKVAIYTRVSTTNQAEEGFSIDEQIDRLTKYAEAMGWQVSDTYTDAGCSGAKLERPAMRRLINDIENKAFDTVLVYKLDRLSRSVRDTLYLVKDVFTKNKIDFISLNESIDTSSAMGSLFLTILSAINEFERENIKERMTMGKLGRAKSGKSMMWTKTAFGYYHNRKTGILEIVPLQATIVEQIFTDYLSGISLTKLRDKLNESGHIGKDIPWSYRTLRQTLDNPVYCGYIKFKGSLFEGMHKPIIPYETYLKVQKELEERQQQTYERNNNPRPFQAKYMLSGMARCGYCGAPLKIVLGHKRKDGSRSMKYHCANRFPRKAKGVTVYNDNKKCDSGTYDLSNLENTVIDNLIGFQEDNDSLLRIINGNNQPTLDTSSFKEQITQIDKKIQKNSDLYLNDFITMDELKERTDSLQAEKKLLKAKISENKLNDSTGVFELVKTQLGSIPINELSYDNKKKIVNNLVSKVDVTADNVDIIFKFQLA

SEQ ID NO: 4138 - protein, 452 aa, synthetic construct
MKAAIYIRVSTQEQVGNYSIQAQTEKLTALCRSKDWDVYDIFIDGGYSGSNMNRPALNEMLSKLHEIDAVVVYRLDRLSRSQRDTTTLIEEYFLKNNVEFVSLSETLDTSSPFGRAMIGILSVFAQLERETIRDRMVMGKIKRIEAGLPLTTAKGRTFGYDVIDTKLYINEEEAKQLRLIYDIFEEEQSITSLQKRLKKLGFKVRSYNRYNNWLTNDLYCGYVSYKDKVHVKGIHEPIISEEQFYRVQEIFTRMGKNPNMNRDSASLLNSLVVCSKCGLSFVHRSKDTMSRGKRYHYRYYSCKTYKHTHELEKCGNKIWRADKLEELIINRVNNYSFASRNVDKEDELDSLNEKLKIEHAKKKRLFDLYIDGSYEVSELDSLMNDIDAQINYYESQIEANEELKKNKKIQENLADLATVDFDSLEFREKQLYLKSLINKIYIDGEQVTIEWL

SEQ ID NO: 4139 - protein, 469 aa, synthetic construct
MCYTTPVRAAVYLRISEDRSGEQLGVARQREDCLKLCDQRKWVPVEYLDNDVSASTGKRRPAYEQMLADITAGKIAAVVAWDLDRLHRRPIELEAFMSLADAKRLALATVAGDVDLATPQGRLVARLKGSVAAHETEHKRARQRRAARQKAERGHPNWSKAFGYLPGPNGPEPDPRTAPLVKQAYADILAGASLGDVCRRWNDVGAFTITGRVWTTTTLSKFLRKPRNAGLRAYKGARYGPVDRDAIVGKAQWSPLVDEATFWAAQAVLDAPGRAPGRKSVRRHLLTGLAGCGKCSNHLAGSYRTDGRVVYVCKACHGVAILADNIEPILYHIVAERLAMPDAVNLLRREIHDAAEAETIRLELETLYGELDRLAVERAEGLLTARQVKISTDIVNAKITKLQARQLDQERLRVLDGIPLGTPQVAGIIAELSPDRFRAVIDVLAEVVVQPVGKGGRIFNPERVQVNWR

SEQ ID NO: 4140 - protein, 485 aa, synthetic construct
MTKKVAIYTRVSTTNQAEEGFSIDEQIDRLTKYAEAMGWQVSDTYTDAGLSGAKLERPAMQRLINDIENKTFDTVLVYKLDRLSRSVRDTLYLVKDVFTKNKIDFISLNESIDTSSAMGSLFLTILSAINEFERENIKERMTMGKLGRAKSGKSMMWTKTAFGYYHNRKTGILEIVPLQATIVKQIFADYLSGISLTKLRDKLNESGHIGKDIPWSYRTLRQTLDNPVYCGYIKFKDSLFEGMHKPIIPYETYLKVQRELEERQQQTYERNNNPRPFQAKYMLSGMARCGYCGAPLRIVLGHKRKDGSRTMKYHCANRFPRKTRGVTVYNDNKKCDSGTYDLSSLENTVIDNLIGFQENNDSLLKIINGNNQPILDTSSFKEQISQIDKKIQKNSDLYLNDFITMDELKDRTDSLQAEKKLLKAKISENKFNDSTDVLELVKTQLGSIPINELSYDNKKKIVNNLVSRVDVTADSVDIIFKFQLA

SEQ ID NO: 4141 - protein, 452 aa, synthetic construct
MKAAIYIRVSTREQVENYSIQAQTEKLTALCRSKGWDVYDIFIDGGYSGSNMNRPALNEMLSKLHEIDAVVVYRLDRLSRSQRDTITLIEEYFLKNNVEFVSLSETLDTSSPFGRAMIGILSVFAQLERETIRDRMVMGKIKRIEAGLPLTTAKGRTFGYDVIDTKLYINEEEAKQLRLIYDIFEEEQSITFLQRRLKKLGYKVRTYSRYNSWLTNDLYCGYVSYKDKVHVKGIHEPIISEEQFYRVQEIFTRMGKNPNMNRDSASLLNNLVVCSKCGLGFVHRRKDTMSRGKKYHYRYYSCKTYKHTHELEKCGNKIWRADKLEELIINRVNNYSFASRNADKEVELDSLNEKLKIEHAKKTRLFDLYINGSYEVSELDSMMIDIDAQIDYYESQIEANEELKKNKKIQENLANLATVDYDSLEFREKQLYLKSLINKIYIDGEQVTIEWL

SEQ ID NO: 4142 - protein, 452 aa, synthetic construct
MKAAIYIRVSTREQVENYSIQAQTEKLTALCRSKDWDVYDIFIDGGYSGSDMNRPALNEMLSKLHEIDAVVVYRLDRLSRSQRDTITLIEEYFLKNSVEFVSLSETLDTSSPFGRAMIGILSVFAQLERETIRDRMVMGKIKRIEAGLPLTTAKGRTFGYDVIDTKLYINEEEAKQLQRIYDIFEEEQSITLLQKRLKKLGFKVRTYSRYNSWLTNDLYCGYVSYKDKVHVKGIHEPIISEEQFYRVQEIFARMGKSPNMNRGSASLLNNLVVCSKCGLGFVHRRKDTMSRGKKYHYRYYSCKTYKHTHELEKCGNKIWRADKLEELIINRVNDYSFAGRNVDIEDELDSLNEKLKTEHAKKRRLFDLYINGSYEVNELDSMMNDIDAQINDYESQIEANVELRKNKKIQENLADLATVDYDSLEFREKQLYLKSLINKIYIDGEQVTIEWL

SEQ ID NO: 4143 - protein, 452 aa, synthetic construct
MKAAIYIRVSTREQVENYSIQAQTEKLTALCRSKDWDVYDIFIDGGYSGSNMNRPALNEMLSRLHEIDAVVVYRLDRLSRSQRDTITLIEEYFLRNNVEFVSLSETLDTSSPFGRAMIGILSVFAQLERETIRDRMVMGKIKRIEAGLPLTTAKGRTFGYDVIDTKLYINEEEAKQLQLIYDIFEEEQSITFLQKRLKELGFKVRTYNCYNNWLTNDLYCGYVSYKDKVRVKGIHEPIISEEQFYRVQEIFTRMGKNPNMNRDSASLLNNLVVCSKCGLGFVHRRKDAMSRDKKYHYRYYSCKTYKHIHELEKCGNKIWRADKLEELIINRVNDYSLACRNVDKEDELDSLNEKLRIEHAKKKRLFDLYLNGSYEVSELDSMMYDIDAQISYYESQIEANEALIKNKKIQENLAYLATVDFDSLEFREKQLYLKSLINKIYIDGEQVTIEWL

SEQ ID NO: 4144 - protein, 452 aa, synthetic construct
MKAAIYIRVSTREQVENYSIQAQTEKLTALCRSKDWDVYDIFVDGGYSGSNMNRPALNEMLSKLHEIDAVVVYRLDRLSRSQRDTITLVEEYFLKNNVEFVSLSETLDTSSPFGRAMIGILSVFAQLERETIRDRMVMGKIKRVEAGLPLTTAKGRTFGYDVIDTKLYINEEEAKQLQLIYDIFEEEQSITFLQKRLKKLGFKVRTYNCYYNWLTNDLYCGYVSYKDKVHVKGIHEPIISEEQFHRVQEVLTRMGKNPNMNRDSASLLNNLVVCSKCGLGFVHRRKDTTSRGKKYHYRYYSCKTYKHTHELEKCGNKIWRADKLEELIINRVNNYSSAGRNVDKEDGLDSLNEKLKIEHAKKKRLFDLYINGSYEVSELDCMMNDIDALINYYESQIEANEELKKDKKIQENLANLATVDYDSLEFREKQLYLKSLINKIYIDGEQVTIEWL

SEQ ID NO: 4145 - protein, 452 aa, synthetic construct
MKAAIYIRVSTQEQVGNYSIQAQTEKLTALCRSKDWDVYDIFIDGGYSGSNMNRPALNEMLSKLHEIDAVVVYRLDRLSRSQRDTTTLIEEYFLKNNVEFVSLSETLDTSSPFGRAMIGILSVFAQLERETIRDRTVMGKIKRIEAGLPLTTAKGRTFGYDVIDTKLYINEEEAKQLQLIYDIFEEEQSITSLQKRLKKLGFKVRTYNRYNNWLTNDLYCGYVSYKDKVHVRGIHEPIISEEQFYRVQEIFTRTGKNPNMNRDSASLLNNLVVCSKCGLGFVHRRKDTMSGGKKYHYRYYSCKTYKHTHVLEKCGNKVWRADKLEELVINRVNNYSLASRNVDKEGELDSLNEKLKIEHAKRKRLLDLYINGSYEVGELDSMMNDIDAQINYYESQIGANEELKKNKKIQENLADLTTVDFDSLEFHEKQLYLKSLINKIYIDGEQVTIEWL

SEQ ID NO: 4146 - protein, 452 aa, synthetic construct
MKAAIYIRVSTREQVENYSIQAQTEKLTALCRSKDWDVYDIFIDGGYSGSNMNRPALNEMLSKLHEIDAVVVYRLDRLSRSQRDTITLIEEYFLKNNVEFVSLSETLDTSSPFGRAMIGILSVFAQLERETIRDRMVMGKIKRIESGLPLTTAKGRTFGYDVIDTKLYINEEEAKQLQLIYDIFEEEQSITSLQKRLKKLGFKVHTYNRYNNWLTNDLYCGYVSYKDKVHVKGIHEPIISEEQFYRVQEIFTRMGKNPNMNRDSASLLNNLVVCSKCGLGFVHRRKDATSRDKKYHYRYYSCKTYKHIHELEKCGNKIWRADKLEELIINRVNNYSVASRNVDKEDELDSLSEKLKIEHAKKRRLFDLYINGRFEVSELDSMMNDIDTQINYYERQIEANEELKKNKKIQENLANLATVDFDSLEFREKQLYLKSLINKIYIDGEQVTIEWL

SEQ ID NO: 4147 - protein, 469 aa, synthetic construct
MSYTTPVRAAVYLRISEDRSGEQLGVARQREDCLKLCDQRRWVPVEYLDNDVSASTGKRRPAYEQMLADITAGKIAAVVAWDLDRLHRRPIELEAFMSLADEKRLALATVAGDVDLATPQGRLVARLKGSVAAHETEHKKARQRRAARQKAERGYPNWSKAFGYLPGPSGPEPDPRTAPLVRQAYADILAGVSLGDVCRQWNDAGAFTITGRPWTTTTLSRFLRKPRNAGLRAYKGARYGPVDRDAIVGKAQWSPLVDEATFWAAQAVLDAPGRAPGRKSVRRHLLTGLAGCGKCGNHLAGSYRTDGRVVYVCKACHGVAILADNIEPILYHIVAERLAMPDAVGLLRSEIHDAAEAETARQELETLYGELDRLAVERAEGLLTARQVKISTDIVNAKITKLQARQLDQERLRVLDGIPLGTPQVAGMIAELSPDRFRAVLDVLAEVVVQPVGKSGRIFNPERVQVNWR

SEQ ID NO: 4148 - protein, 469 aa, synthetic construct
MSYTTPVRAAVYLRISEDRSGEQLGVARQREDCLKLCDQRKWVPVEYLDNDVSASTGKRRPAYEQMLADITAGKIAAVVAWDLDRLHRRPVELEAFMSLADEKRLALATVAGDVDLATPQGRLVARLKGCVAAHETEHKKARQRRAARQKAERGLPNWSKAFGYLPGPNGPEPDPRTAPLVKQAYADILAGASLGDVCRQWNDAGAFTITGRPWTTTTLSKFLRKPRNAGLRAYKGARYGPVDRDAIVGRAQWSPLVDEATFWAAQAVLDAPGRAPGRKSVRRHLLTGLAGCGKCGSHLAGSYRTDGRVVYVCKACYGVAILADNIEPILYRIVTERLAMPDAVDLLRREIHDAAEAEPIRLELETLYGELDRLAVERAEGLLTARQVKISTDIVNAKITKLQARQLDQERLRVFDGIPLGTPQVAGMIAELSPDRFRAVLDVLVEVVVQPVGKGGRIFNSERVQVNWR

SEQ ID NO: 4149 - protein, 452 aa, synthetic construct
MKAAIYIRVSTQEQVGNYSIQAQTEKLTALCRSKDWDVYDIFVDGGYSGSNMNRPALNEMLSKLHEIDAVVVYRLDRLSRSQRDTTTLIEEYFLKNNVEFVSLSETLDTSSPFGRAMIGILSVFAQLERETIRDRMVMGKIKRIEAGLPLTTAKGRTFGYDVIDTKLYINEEEAKQLQLIYDIFEEEQSITFLQKRLKKLGFKVRTYNRYNNWLTNNLYCGYVSYKDKVCVKGIHEPIISEEQFYRVQEIFTRMGKNPNMNRDSASLLSNLVVCSKCGLGFVHRSKDTMSRGKKYHYRYYSCKTYKHTHELEKCGNKTWRADKLEELIINRVNNYSFASRNVDKEDELDSLNEKLKTEHAKKRRLFDLYINGSYEVSELDSMMNDIDAQINYYESQIEANEELKKNKKIQENLADLATVDFDSLEFREKQLYLKSLINKIYIDGEQVTIEWL

SEQ ID NO: 4150 - protein, 452 aa, synthetic construct
MKAAIYIRVSTREQVENYSIQAQTEKLTALCRSKDWDVYDIFIDGGYSGSNMNRPALNEMLSKLHEIDAVVVYRLDRLSRSQRDTITLIEEYFLKNNVEFVSLSETLDTSSPFGRAMIGILSVFAQLERETIRDRMVMGKIKRIEAGLPLTTAKGRTFGYDVIDTKLYINEEEAKQLRLIYDIFEEEQSITFLQKRLKKLGFKVRTYNRYNNWLTNDLYCGYVSYKDKVHVKGIHEPIISEEQFYRVQEIFTRIGKNPNMNRGSASLLNNLVVCGKCGLGFVHRRKDAMSRDKKYHYRYYSCKTYKHIHELEKCGNKIWRADKLEELVINRVNNYSLASRNEDKGDELDSLSEKLKIEHAKKKRLFDLYINGSYEVSELDSTMKDIDAQINYYESQIKANEELKKNKKIQENLAYLATVDFDSLEFREKQLYLKSLINKIYIDGEQVTIEWL

SEQ ID NO: 4151 - protein, 452 aa, synthetic construct
MKAAIYIRVSTQEQVENYSIQAQTEKLTALCRSKDWDVYDIFIDGGYSGSNMNRPALNEMLSRLHEIDAVVVYRLDRLSRSQRDTTTLIEEYFLKNNVEFVSLSETLDTSSPFGRAMIGILSVFAQLERETIRDRMVMGKIKRIEAGLPLTTAKGRTFGYDVIDTKLYINEEEAKQLRLIYDIFEEEQSITSLQKRLKKLGFKVRTYNRYNNWLTNDLYCGYVSYKDKVRVKGIHEPIISEEQFYRVQEIFTRMGKSPNMNRDSASLLNNLVVCSKCGLGFVHRRKDTVSGGKKYHYRYYSCKTYKHAHELEKCGNKTWRADKLEELIINRVNNYSFASRNVDKEDELDCLNEKLKIEHAKRKRLFDLYINGSYEVSELDSMMNDIDAQINHYESQIEANEELKKNKKIQENLADLATVDFDSLEFREKRLYLKSLINKIYIDGEQVTIEWL

SEQ ID NO: 4152 - protein, 485 aa, synthetic construct
MTKKVAIYTRVSTTNQAEEGFSIDEQIDRLTRYAEAMGWQVSDTYTDAGLSGAKLERPAMQRLINDIENKAFDTVLVYKLDRLSRSVRDTLYLVKDVFTKNKIDFISLNESIDTSSAMGSLFLTILSAINEFERENIKERMTMGKLGRAKSGKSMMWTKTAFGYYHNRKTGILEIVPLQATIVEQIFTDYLSGISLTKLRDKLNESGHIGKDIPWSYRTLRQTLDNPVYCGYIKFKDSLFEGMHKPIIPYETYLKVQKELEGRQQQTYERNNNPRPFQAKYMLSGMARCGYCGAPLRIVLGHKRKDGSRTMKYHCANRFPRKTKGVTVYNDNKKCDSGTYDLSNLENAVIDILIGFQENNDSLLKIINGNNQPILGTSSLKKQISQIDKKIQKNSELYLNDFITMDELKDRTDSLQAEKKLLKAKISENKFNVSTDVFELVKTQLGSIPINELSYDDKKKIVNNLVSKVGVTADNVDIIFKFQLA

SEQ ID NO: 4153 - protein, 452 aa, synthetic construct
MKAAIYIRVSTREQVENYSIQAQTEKLTALCRSKDWDVYDIFIDGGYSGSNMNRPALNEMLSKLHEIDAVVVYRLDRLSRSQRDTITLIEEYFLRNNVEFVSLSETLDTSSPFGRAMIGILSVFAQLERETIRDRMVMGKIKRIEAGLPLTTAKGRTFGYDVIDTKLYINEEEAKQLRLIYDIFEEEQSITFLQKRLKKLGFKVRTYNRYNNWLTNDLYCGYVSYKDKVHVKGIHEPIISEEQFYRVQEIFARMGKNPNMNRDSASLLSNLVVCSKCGLSFVHRRKDTMSRGKKYHYRYYSCKTYKHTHELEKCGNKIWRADKLEELIIDRVNNYCLASRNVDKEDELDSLDEKLKIEHAKKKRLFDLYINGSYEVSELDSMMNDIDAQINYYESQIEANEGLKEDKKIQENLANLATMDYDSLEFREKQLYLKSLINKIYIDGEQVTIEWL

SEQ ID NO: 4154 - protein, 469 aa, synthetic construct
MSYTTPVRAAVYLRISEDRSGEQLGVARQREDCLKLCGQRKWVPVEYLDNDVSASTGKRRPAYEQMLADITAGKIAAVVAWDLDRLHRRPIELEAFMSLADEKRLALATVAGDVDLATPQGRLVARLKGSVAAHETEHKKARQRRAARQKAERGHPNWSKAFGYLPGPNGPEPDPRTAPLVKQAYADILAGASLGDVCRQWNDAGAFTITGKPWTTTTLSKFLRKPRNAGLRAYKGARYGPVDRDAIVGKAQWSPLVDEATFWAAQAVLDAPGRAPGRKSVRRHLLTGLAGCGKCGSHLAGSYRTDGQVVYVCKACHGVAILAGNIEPILYHIVAERLAMPDAVDLLRREIHDAAEAETIRLELEALYGELDRLAVERAEGLLTARQVKISTDIVNAKITKLQARQLDQERLRVLDGIPLGTPQVADMIAELSPDRFRAVLDVLAEVVVQPVGKRGGVFNPERVQVNWR

SEQ ID NO: 4155 - protein, 469 aa, synthetic construct
MSYTTPVRAAVYLRISEDRSGEQLGVARQREDCLKLCGQRKWVPVEYLDNDVSASTGKRRPAYEQMLADITAGKIAAVVAWDLDRLHRRPVELEAFMSLADEKRLALATVAGDVDLATPQGRLVARLKGCVAAHETEHKKARQRRAARQKAERGHPNWSKAFGYLPGPNGPEPDPRTAPLVKQAYADILAGASLGDVCRRWNDAGAFTITGRPWTTTTLSKFLRKPRNAGLRAYKGARYGPVDRGAIVGKAQWSPLVDEATFWAAQAVLDAPGRAPGRKSVRRHLLTGLAGCGKCGNHLAGSYRTDGRVVYVCKACHGVVILADNIEPILYHIVAERLAMPDAVDLLRREIHDAAEAETIRLELETLYGELDRLAVERAEGLLTARQVKISTDVVNAKITKLQARQLDQERLRVLDGIPLGTPQVAGMIAELSPDRFRAVLDVLAEVVVQPVGKSGRALNPERVQVNWR

SEQ ID NO: 4156 - protein, 485 aa, synthetic construct
MTKKVAIYTRVSTTNQAEEGFSIDEQIDRLTKYAEAMGWQVSDTYTDAGFSGAKLERPAMQRLINDIGDRAFDTVLVYKLDRLSRSVRDTLYLVKDVFTKNKIDFISLNENIDTSSAMGSLFLTILCAINEFERENIKERMTMGKLGRAKSGKSMMWTKTAFGYYHNRKTGILEIVPLQAAIVEQIFTDYLSGISLTKLRDKLNESGHIGKDIPWSYRTLRQTLDNPVYCGYIRFKGSLFEGMHKPIIPYETYLKVQKELEERQQQTYERNNNPRPFQAKYMLSGMARCGYCGAPLKIVLGHKRKDGSRTMKYHCANRFPRKTKGVTVYNDNEKCDSGTYDLSNLENTVIDNLIGFQENNDSLLKIINGNNQPILDTSSFERQISQIDKKIRKNSDLYLNDFITMDELKDRTDSLQAEKKLLKARISENKFNDSTDVFELVKTQLGSIPINELSYDNKKKIVNNLVSKVDVTADNVDIIFKFQLA

SEQ ID NO: 4157 - protein, 485 aa, synthetic construct
MTKKVAIYTRVSTTNQAEEGFSIDEQIDRLTKYAEAMGWQVSDTYTDAGLSGAKLERPAMQRLINDIENKAFDTVLVYKLDRLSRSVRDTLYLVKDVFTKNKIDFISLNESIDTSSAMGSLFLTILSAINEFERENIKERMTMGKLGRAKSGKSMMWTRTAFGYYHNRKTGILEIVPLQATIVEQIFTDYLSGISLTKLRDKLNESGHIGRDIPWSYRTLRQTLDNPVYCGYIKFKGSLFEGMHEPIIPYETYLKVRKELEERQQQTYERNNNPRPFQAKYMLSGVARCGYCGAPLKIVLGHKRKDGSRTMKYHCANRFPRRTKGVTVYNDNKKCDSGTYDLNNLENTVIDNLIGFQENNDSLLKIINGNNQPILDTSSFKKQISQIDKKIQKNSDLYLNDFITMDELKARTNSLQAEKKLLKAKISENKFNDSTDVFELVKTQLGSIPINELSYDNKKKIVNNLVSKVDVTTDNVDIIFKFQLA

SEQ ID NO: 4158 - protein, 469 aa, synthetic construct
MSYTTPMRAAVYLRISEDRSGEQLGVARQREDCLKLCDQRKWVPVEYLDNDVSASTGIRRPAYEQMLADITAGKIAAVVAWDLDRLHRRPIELEAFMSLADEKRLALATVAGDVDLATPQGRLVARLKGSVAAHETEHKKARQRRAARQKAERGHPNWSKAFGYLPGPNGPEPDPRTAPLVKQAYADILAGASLGDVCRQWNDAGASTITGRPWTTTTLSKFLRKPRNAGLRAYKGARYGPVDRDAIVGKAQWSPLVDEATFWAAQAVLDAPGRAPGRKSVRRHLLTGLAGCGKCGNHLAGSYRTDGRVVYVCKACHGVAILADNIEPILYRTVAERLAMPDAVDLLRREIHDAAEAEAIRLELETLYGELDRLAVERAEGLLTARQVKISTDIVNAKITKLQACQLDQERLRVLDGIPLGTPQVAGMIEELSPDRFRAVLDVLAEVVVQPAGKGGRIFNPERVRVNWR

SEQ ID NO: 4159 - protein, 485 aa, synthetic construct
MTKKVAIYTRVSTTNQAEEGFSIDEQIDRLTKYAEAMGWRVSDTYTDAGFSGAKLERPAMQRLINDIENKAFDTVLVYKLDRLSRSVRDTLYLVKDVFTKNKIDFISLNESIDTSSAMGSLFLTILSAINEFERENIKERMTMGKLGRAKSGKSMMWTKTAFGYYHNRKTGILEIVPLQATIVEQIFTDYLSGVSLTKLRDKLNESGHIGKDIPWSYRTLRQTLDNPVYCGYIKFKDSLFEGMHKPIIPYETYLKVQKELEVRQQQTYERNNNPRPFQAKYMLSGMARCGYCGAPLRIVLGHKRKDGSRTMKYHCANRFPRKTKGVTVYNGNKKCDSGTYDLSDLENTVIDNLIGLQENDDSLLKIINGNNQPNLDTSSFKKQISQIDKKIQKNSDLYLNDFITMDELKDRTDSLRAEKKLLKAKISENKFNDSTDVFELVKTQLGSIPINELSYDNKKKIVNNLVSKVDVTADNVDIIFKFQLA

SEQ ID NO: 4160 - protein, 452 aa, synthetic construct
MKAAIYIRVSTQEQVGNYSIQAQTEKLTALCRSKDWDVYDIFVDGGYSGSNMNRPALNEMLSKLHEIDAVVVYRLDRLSRSQRDTTTLIEEYFLKNNVEFVSLSETLDTSSPFGRAMIGILSVFAQLERETIRDRMVMGKIKRIEAGLPLTTAKGRTFGYDVIDTKLYINEEEAKQLQLIYDIFEEEQSITFLQKRLKKLGIKVRAYNRYSNWLTNDLYCGYVSYKDKVHVKGIHEPIISEEQFYRVQEIFTRMGKNPNMNRESASLLNNLVVCSKCGLGFVHRRKDTMSGGKKYHYRYYSCKTYKHTHELEKCGNKTWRADKLEELIINRVNNYSFASRYVGKEDELDSLYEKLKIEHAKKKRLFDLYINGSCEVSELDSMMNDVDAQINYYESQIEANEELRKGRKIQENLADLATVDFDSLEFREKQQYLKSLINKIYIDGDQVTIEWL

SEQ ID NO: 4161 - protein, 469 aa, synthetic construct
MSYTTPVRAAVYLRISEDRSGEQLGVARQREDCLKLCGQRKWVPVEYLDNDVSASTGKRRPAYEQMLADITAGKIAAVVAWDLDRLHRRPIELEAFMSLADEKRLALATVAGDVDLATPQGRLVARLKGCVAAHETEHKKARQRRAARQKAERGHPNWSKAFGYLPGPNGPEPDPRTAPLVRQAYADILAGASLGDVCRQWNDAGAFTITGRPWTTTTLSKFLRKPRNAGLRAYKGARYGPVDRDAIVGKAQWSPLVDEATFWAAQTVLDAPGRAPGRKSVRRHLLTGLAGCGKCGNHLAGSYRTDGQVVYVCKVCHGVSILAVNIVPILYHIVAERLAMPDAVDLLRREIHDAAEAETIRLELETLYGELDRLAVERAEGLLTARQVKISTDIVNAKITKLQARQLDQERLRVFDGIPLGTPRAAGMIAELSPDRFRAVLDVLAEVVVQPVGKRGRIFSPERVQVNWR

SEQ ID NO: 4162 - protein, 452 aa, synthetic construct
MKAAIYIRVSTREQVENYSIQAQTEKLTALCRSKDWDVYDIFIDGGYSGSNMSRPALNEMLSKLHEIDAVVVYRLDRLSRSQRDTITLIEEHFLKNNVEFVSLSETLDTSSPFGRAMIGILSVFAQLERETIRDRMVMGKIKRVEAGLPLTTAKGRTFGYDVIDTKLYINEEEAKQLRLIYDIFEEEQSITFLQKRLKKLGFKVRTYNRYNNWLTNDLYCGYVSYKDKVHVKGIHEPIISEEQFYRVQEIFTRMGRNPNMNRDSASLLNSLVVCSKCGLGFVHRRKDTMSRGKKYHYRYYSCKTYKHTHELEKCGNKIWRADKLEELIINRVNNYSFASRNEDKEDELDSLNEKLKIEHAKKKRLFDLYINGSYGVSELDSMMSDIDAQINYYESQIEANEELKKNKKIQENLANLATVDFDGLEFREKQLYLKSLINKIYIDGEQVTIVWL

SEQ ID NO: 4163 - protein, 485 aa, synthetic construct
MTKKVAIYTRVSTTNQAEEGFSIDEQIDRLTKYAEAMGWQVSDTYTDAGFSGAKLERPAMQRLINDIENKAFDTVLVYKLDRLSRSVRDTLYLVKDVFTKNKIDFISLNESINTSSAMGSLFLTILSAINEFERENIKERMTMGKLGRAKSGKSMMWTKTAFGYYHNRKTGILEIVPLQATIVEQIFTDYLSGISLTKLRDKLNESGHIGKDIPWSYRTLRQTLDNPVYCGYIKFKDSLFEGMHKPIIPYETYLKVQKELEERQQQAYERNNNPRPFQAKYMLSGMARCGYCGAPLRVVLGHKRKDGSRTMKYHCANRFPRKTKGVTVYNDNKKCDSGAYDLSNLESAVIDNLIGFQENNDSLLKIINGNNQPILETSGLKKQISQIDKKIQKNSDLYLNDFITMDELKDRTDSLQAEKKLLRAKISENKFNDSTDVFELVKTQLGSIPINELSYVNKKKIVNNLVSKVDVTADNVDIIFKFQLA

SEQ ID NO: 4164 - protein, 452 aa, synthetic construct
MKAAIYIRVSTREQVENYSIQAQTEKLTALCRSKDWDVYDIFIDGGYSGSNMNRPALNEMLSKLHEIDAVVVYRLDRLSRSQRDTITLIEEYFLKNNVEFVSLSETLDTSSPFGRAMIGILSVFAQLERETIRDRMVMGKIKRIEAGLPLTTAKGRTFGYDVIDTKLYINEEEAKQLQLIYDIFEEEQSITFLQKRLKELGFKVRTYNCYNNWLTNDLYCGYVSYKDKVHVKGIHEPIISEEQFYRVQEIFTRMGKNPNMNRDSASLLNNLVVCGKCGLGFVHRRKDIMSRDKKYHYRYYSCKTYKHIHELEKCGNKIWRADKLEELVINRVNNYSFASRNAGKEDELDSLNEKLKIEHARKKRLFDLYISGRYEVSELDSMMNDIDAQINYYEGQIEANEELKKTKKIRENLANLATVDFDSLEFREKQLYLKSLINKIYIDGEQVTIEWL

SEQ ID NO: 4165 - protein, 452 aa, synthetic construct
MKAAIYIRVSTQEQVGNYSIQAQTEKLTALCRSKGWDVYDIFIDGGYSGSNMNRPALNEMLSKLHEIDAVVVYRLDRLSRSQRDTTTLIEEYFLKNNVEFVSLSETLDTSSPFGRAMIGILSVFAQLERETIRDRMVMGKIKRIEAGLPLTTAKGRTFGYDVIDTKLYINEEEAKQLQLIYDIFEEEQSITSLQKRLKKLGFKVRTYNRYNNWLTNDLYCGYVSYKDKVHVKGIHEPIISEEQFYRVQEIFTRMGKNPNMNRESASLLSNLVVCSKCGLGFVHRSKDTMSRGKKYHYRYYSCKTYKHTHELEKCGNKIWRADRLEELVVNRVNSYSFASRNMDKEDELDSLNEKLKIEHAKKKRLFDLYINGGYEVSELDSMMSNIDAQINYYESQIEANEELKKNRKIQENLADLATVDFDSLEFREKQLYLKSLISKIYIDGERVTIEWL

SEQ ID NO: 4166 - protein, 452 aa, synthetic construct
MKAAIYIRVSTREQVENYSIQAQTEKLTALCRSKDWDVYDIFIDGGYSGSNMNRPALNEMLSKLHEIDAVVVYRLDRLSRSQRDTITLIEEYFLKNNVEFVSLSETLDTSSPFGRAMIGILSVFAQLERETIRDRMVMGKIKRIEAGLPLTTAKGRTFGYDVIDTKLYINEEEARQLQLIYDIFEEEQSITSLQKRLKKLGFKVRTYSRYNNWLTNDLYCGYVSYKDKVHVKGIHEPIISEEQFYRVQEIFTRMGKNPNMNRDSASLLNNLVVCSKCGLGFVHRRKDTMSRGKKYHYRYYSCKTYKHTHELEKCGNKIWRADRLEELIINRVNNYSLGSRNVDKEDELDSLNERLETEHAKKKRLFDLYINGNYEVSELDSMMNDIDAQINYYEGQIEANEELKKNRKIQENLADLATVDFDSLEFREKQLYLKSLINKIYIDGEQVTIEWL

SEQ ID NO: 4167 - protein, 469 aa, synthetic construct
MSYTTPVRAAVYLRISEDRSGEQLGVARQREDCLKLCGQRKWVPVEYLDNDVSASTGKRRPAYEQMLADITAGKIAAVVAWDLDRLHRRPIELEAFMSLADEKRLALATVAGDVDLATPQGRLVARLKGCVAAHETEHKKARQRRAARQKAERGLPNWSKAFGYLPGPNGPEPDPRIAPLVKQAYADILAGASLGDVCRQWNDAGAFTITGRPWTTTALSKFLRKPRNAGLRAYKGARYGPVDRDAIVGKAQWSPLVDEATFWAAQAVLDAPGRAPGRKSVRRHLLTGLAGCGKCGSHLAGSYRTDGRVVYVCKACHGVAILADNIEPILYHIVAERLAMPDAVDLLCREVHDAAEAETIRLELETLYGELDRLAVERAEGLLTARQVKISTDVVNAKITELQARQLDQERLRVFDGIPLGTPQVAGVIAELSPDRFRAVLDVLAEVVVQPVGKSGRIFNPERVQVNWR

SEQ ID NO: 4168 - protein, 485 aa, synthetic construct
MTRKVAIYTRVSTTNQAEEGFSIDEQVDRLTKYAEAMGWQVSDTYTDAGFSGAKLERPAIQRLINDIKNKAFDTVLVYKLDRLSRNVRDTLYLVKDVFTKNKIDFISLNESIDTSSAMGSLFLTILSAINEFERENIKERMTMGKLGRAKSGKSMMWTKTAFGYCHNRKTGILEIVPLQATIVEQIFTDYLSGISLTKLRDKLNESGHIGKDIPWSYRTLRQTLDNPVYCGYIKFKGSLFEGMHKPIIPYETYLKVQRELEERQQQTYERNNNPRPFQAKYMLSGMARCGYCGAPLKIVLGHKRKDGSRTMKYHCANRFPRKTKGVTVYNDNKKCDSGTYDLSNLENTVIDNLIGFQEDNDSLLKIINGNNQPILDTSSFKKQISQIDKKIQKNSDLYLNDFITMDELKERTDSLQAEKELLKAKISENKFNDSTDVFELVKTQLGSIPINELSYDNKKKIVNNLVSKVDVTADNVDIIFKFQLA

SEQ ID NO: 4169 - protein, 469 aa, synthetic construct
MCYTTPVRAAVYLRISEDRSGEQLGVARQREDCLKLCDQRKWVPVEYLDNDVSASTGKRRPAYEQMLADITADKIAAVVAWDLDRLHRRPIELEAFMSLADEKRLALATVAGDVDLATPQGRLVARLKGSVAAHETEHKKARQRRAARQKAERGHPNWSKAFGYLPGPNGPEPDPRTAPLVKQAYADILAGASLGDVCRQWNDAGAFTITGRPWATTALSKFLRKPRNAGLRTYKGARYGPVDRDAIVGKAQWSPLVDEATFWAAQAVLDAPGRAPGRKSVRRHLLTGLAGCGKCGNHLAGSYRADGRVVYVCKACHGVAILADNIEPILYHIVAERLAMPDAVDLLRREIQDAAEAETIRLELETLHGELDRLAVERAEGLLTARQVKISTDIVNAKITKLQARQLDQERLRVFDGIPLGTPQVAGMIAELSPARFRAVLDVLAEVVVQPVGKSGRIFNPERVQVNWR

SEQ ID NO: 4170 - protein, 452 aa, synthetic construct
MKAAIYIRVSTQEQVENYSIQAQTEKLTALCRSKGWDVYDIFIDGGYSGSNMNRPALNEMLSKLHEIDAVVVYRLDRLSRSQRDTTTLIEEYFLKNNVEFVSLSETLDTSSPFGRAMIGILSVFAQLERETIRDRMVMGKIKRIEAGLPLTTAKGRTFGYDVIDTKLYINEEEAKQLQLIYDIFEEEQSITFLQKRLKKLGFKVRTYNRYNSWLTNDLYCGYVSYKDKVHVKGIHEPIISEEQFYRVQEIFTRMGKNPNMNRDSASLLSNLVVCSKCGLGFVHRSKDTMSRGKKYHYRYYSCKTYKHTHELEKCGNKTWRADKLEELIISRVNNYSFASRSVDKEDELDSLNEKLKIEHAKKKRLFDLYINGSYEVSELDSMMNDIDAQINYYESQIEANGELKKNKKILENLAGLATVDFDSLEFREKQLYLKSLINKIYIDGEQVTIEWL

SEQ ID NO: 4171 - protein, 452 aa, synthetic construct
MKAAIYIRVSTREQVENYSIQAQTEKLTALCRSKGWDVYDIFIDGGYSGSNMNRPALNEMLSKLHEIDAVVVYRLDRLSRSQRDTITLIEEYFLKNNVEFVSLSETLDTSSPFGRAMIGILSVFAQLERETIRDRMVMGKIKRIEAGLPLTTAKGRTFGYDVIDTKLYINEEEAKQLQLIYDIFEEEQSITFLQKRLKKLGFKVRTYNCYNNWLTNDLYCGYVSYKDKVHVKGIHEPIISEEQFYRVQEIFTRMGKSPNMNRDSASLLNNLVVCSKCGLSFVHRRKDTMSRGKKYHYRYYSCKSYKHTHELEKCGNKIWRADKLEELIINRVNNYSLTSRNVDKEDELDSLNEKLKIEQAKKKRLFDLYINGSYDVSELDSMMNDIDAQINYYESQIEANEELKKDKKIQETLADLATVDFDGLEFREKQLYLKSLINKIYIDGEQVTIEWL

SEQ ID NO: 4172 - protein, 452 aa, synthetic construct
MKAAIYIRVSTREQVENYSIQAQTEKLTALCRSKDWDVYDIFIDGGYSGSNMNRPALNEMLSKLHEIDAVVVYRLDRLSRSQRDTITLIEEYFLKNNVEFVSLSETLDTSSPFGRAMIGILSVFAQLERETIRDRMVMGKIKRIEAGLPLTTARGRTFGYDVIDTKLYINEEEAKQLQLIYDIFEEEQSITSLQKRLKKLGFKVRTYNRYNNWLTNDLYCGYVSYKDKVHVKGIHEPIISEEQFYRVQEIFTRMGKNPNMNRGSASLLNNLVVCSKCGLGFVHRRKDTVSRGKKYHYRYYSCKTYKHTHELERCGNKIWRADKLEELIINRVNNYSFASRNADKGGELDSLNEKLKTEHARRKRLFDQYINGSYEVSELDSMMNDIGAQINYYESQIEASKELKKKQKIQENLAVLATVDFDSLEFREKQLYLKSLINKIYIDGEQVTIEWL

SEQ ID NO: 4173 - protein, 452 aa, synthetic construct
MKAAIYIRVSTREQVENYSIQAQTERLTALCRSKDWDVYDIFIDGGYSGSNMNRPALNEMLSKLHEIDAVVVYRLDRLSRSQRDTITLIEEYFLKNNVEFVSLSETLDTSSPFGRAMIGILSVFAQLERETIRDRMVMGKIKRIEAGLPLTTAKGRTFGYDVIDSKLYINEEEAKQLQLIYDIFEEEQSITFLQKRLKKLGFKVRTYNRYNNWLTNDLYCGYVSYKDKVHVKGIHEPIISEEQFYRVQEIFTRMGKNPNMNRDSASLLNNLVVCGKCGLGFVHRRKDAMSRDKKYHYRYYSCKTYKHIHELEKCGNKIWRADKLEELIIDRVNNYSFASRNADKEGELDSLNEKLKIEHAKKKRLFDLYINGSYEVSELDSMMNDIDAQINYYESQIEASEELKRNKKVQENLAYLATVDFDSLEFREKQLYLKSLINKIYIDGEQVTIEWL

SEQ ID NO: 4174 - protein, 452 aa, synthetic construct
MKAAIYIRVSTREQVENYSIQAQTEKLTALCRSKDWDVYDIFVDGGYSGSNMNRPALNEMLSKLHEIDAVVVYRLDRLSRSQRDTITLIEEYFLKNNVEFVSLSETLDTSSPFGRAMIGILSVFAQLERETIRDRMVMGKIKRIEAGLPLTTAKGRTFGYDVIDTKLYINEEEAKQLRLIYDIFEEEQSITFLQKRLKKLGFKVRSYSRYNNWLTNDLYCGYVSYKDKVHVKGIHEPIISEEQFYRVQEIFTRMGKSPNMNRDSASLLNNLVVCSKCGLGFVHRRKDAMSRDKKYHYRYYSCKTYKHIHELEKCGNKIWRADKLEELIINRVNNYSLASRNVDKEDELDSLNEKLKIEHAKKKRLFDLYINGSYEVSELDSMMNDIDAQINYYESQIEANEELKKNKKIQENLAHLATVDFGSLEFREKQQYLKSLINKIYIDGEQVTIEWL

SEQ ID NO: 4175 - protein, 452 aa, synthetic construct
MKAAIYIRVSTQEQVGNYSIQAQTEKLTALCRGKDWDVYDIFIDGGYSGSNMNRPALNEMLSKLHEIDAVVVYRLDRLSRSQRDTTTLIEEYFLKNNVEFVSLSETLDTSSPFGRAMIGILSVFAQLERETIRDRMVMGKIKRIESGLPLTTAKGRTFGYDVIDTKLYINEEEAKQLQLIYDIFEEEQSITSLQKRLKKLGLKVRTYNRYNNWLTNDLYCGYVSYKDKVHVKGIHEPIISEEQFYRVQEIFTRMGKNPNMNRDSASLLNNLVVCSKCGLSFVHRSKDTMSRGKKYHYRYYSCKTYKHTHELEKCGNKTWRADKLEELIINRVSNYSFASRDVDKEDELNSLNERLKIEHAKKKRLFDLYINGSYEVSELDSMMNDIDAQINYYEGQIEANEELKKNRKIQENLADLATVDFDSLEFREKQLYLKSLISKIYIDGEQVTIEWL

SEQ ID NO: 4176 - protein, 469 aa, synthetic construct
MSYTTPVRAAVYLRISEDRSGEQLGVARQREDCLKLCGQRKWEPVEYLDNDVSASTGKRRPAYEQMLADISAGKIAAVVAWDLDRLHRRPIELEAFMSLADEKRLALATVAGDVDLATPQGRLVARLKGSVAAHETEHKKARQRRAARQKAERGHPNWSKAFGYLPGPNGPEPDPRTAPLVKQAYADILAGASLGDVCRRWNDAGAFTITGRPWATTTLSKFLRKPRNAGLRAYKGARYGPVDRDAIVGKAQWSPLVDEATFWAAQAVLDAPGRAPGRKSVRRHLLTGLAGCGKCGHHLAGSYRTDGRVVYVCKVCHGVAILADNIEPILYHIVAERLAMPDAVDLLRREIHDAAEAETTRLELETLYGELDRLAVERAEGLLTARQVKISTDIVNAKITKLQACQLDQERLRVFDGIPLGTPQVAGMIAELSPDRFRAVLDVLAEVVVQPVGKSGRIFNPERVQVNWR

SEQ ID NO: 4177 - protein, 452 aa, synthetic construct
MKAAIYIRVSTREQVENYSIQAQTEKLTALCRSKDWDVYDVFIDGGYSGSNMNRPALNEMLSKLHEIDAVVVYRLDRLSRSQRDTITLIEEYFLKNNVEFVSLSETLDTSSPFGRAMIGILSVFAQLERETIRDRMVMGKIKRIEAGLPLTTAKGRTFGYDVIDTKLYINEEEAKQLRLIYDIFEEEQSITFLQKRLKKLGFKVRTYNRYNNWLTNDLYCGYVSYKDKVHVKGIHEPIISEEQFYRVQEIFTRMGKSPNMNRDSASLLNNLVVCSKCGLGFVHRRKDAMSRDKKYHYRYYSCKTYKHIHELEKCGNKIWRADKLEELIIDRVNNYSLASRDADKEDELGSLNEKLKIEHAKKKRLFELYISGSYEVSELDSMMSDIVAQISYYESQIKANEELKKNKKIQENLANLATVDFDSLEFREKQLYLKSLINKIYIDGEQVTIEWL

SEQ ID NO: 4178 - protein, 469 aa, synthetic construct
MSYTTPVRAAVYLRISEDRSGEQLGVARQREDCLKLCDQRKWVPVEYLDNDVSASTGKRRPAYEQMLADITAGKIAAVVAWDLDRLHRRPIELEAFMSLADEKRLALATVAGDVDLATPQGRLVARLKGSVAAHETEHKKARQRRAARQKAERGHPNWSKAFGYLPGPNGPEPDPRTAPLVKQAYADILAGASLGDVCRQWNGAGAFTITGRPWTTTTLSKFLRKPRNAGLRAYKGAHYGPVDRDAIVGKARWSPLVDEATFWAAQAVLDAPGRAPGRKSVRRHLLTGLAGCGKCGNHLAGSYRADGRVVYVCKACHGVAILADNIEPILYHTVAERLAMPDAVHLLRREIHDAAEAETIRLELETLYGELDRLAVERAEGLLTARQVKISTDIVNAKITKLQARQLDQERLRVFDGIPLGTPQVAGTIAELSPDRFRAVLDVLAEVVVQPVGKSGRIFNPERVQVNWR

SEQ ID NO: 4179 - protein, 452 aa, synthetic construct
MKAAIYIRVSTREQVENYSIQAQTEKLTALCRSKDWDVYDIFIDGGYSGSNMNRPALNEMLSKLREIDAVVVYRLDRLSRSQRDTITLIEEYFLKNNVEFVSLSETLDTSSPFGRAMIGILSVFAQLERETIRDRMVMGKIKRIEAGLPLTTAKGRTFGYDVIDTKLYINEEEAKQLQLIYDIFEEEQSITFLQKRLKKLGLKVRTYNRYNNWLTNDLYCGYVSYKDKVHVKGIHEPIISEEQFYRVQEIFTRMGKNPNVNRDSASLLNNLVVCSKCGLGFVHRRKDIMSRGKKYHYRYYSCKTYKHIHELEKCGNKIWRADKLEELIISRVNNYSVAGRDVDKEDELDSLNEKLKIERAKKKRLFELYINGSYEVSELDSMMNDIDAQINYYESQIEASEELKKNKKIQENLANLATVDFDSLGFREKQLYLKSLINKIYIDGEQVTIEWL

SEQ ID NO: 4180 - protein, 485 aa, synthetic construct
MTKKVAIYTRVSTTNQAEEGFSIDEQIDRLTKYAGAMGWQVSDTYTDAGFSGAKLERPAMQRLINDIENKAFDTVLVYKLDRLSRSVRDTLYLVKDVFTKNKIDFISLNESIDTSSAMGSLFLTILSAINEFERENIKERMTMGKLGRAKSGKSMMWTKTAFGYYHNRKTGILEIVPLQATIVEQIFTDYLSGISLTKLRDKLNESGHIGKDIPWSYRTLRQTLDNPVYCGYIKFKGSLFEGMHKPIIPYETYLKVQEELEERQQQTYERNNNPRPFQAKYMLSGMARCGYCGAPLKIVLGHKRKDGSRTMKYHCANRFPRKTKGVTVYNDNKKCDSGTYDLSNLENTVIDILIGFQENNDSLLKIINGNNQPILDTSSFKKQISQIDKKIQKNSDLYLNDFITMDELRTRTDSLQAEKKLLKAKISENKFNDSTDVFEQVKTQLGSIPINKLSYDNKKKIVNNLVSKVDVTADNVDIIFKFQLA

SEQ ID NO: 4181 - protein, 469 aa, synthetic construct
MHYTTPVRAAVYLRISEDRSGEQLGVARQREDCLELCDQRKWVPVEYLDNDVSASTGKRRPAYEQMLADITAGKIAAVVAWDLDRLHRRPIELEAFMSLADEKRLALATVAGDVDLATPQGRLVARLKGSVAAHETEHKKARQRRAARQKAERGHPNWSKAFGYLPGPNGPEPDPRTAPLVKQAYADILAGASLGEVCRQWNDAGAFTITGRPWTTTTLSKFLRKPRNAGLRAYKGARYGPVDRNAIVGKAQWSPLVDEATFWAAQTVLDAPGRAPGRKSVRRHLLTGLAGCGKCGSHLAGSYRTDGRVVYVCKACHGVAILADNIEPILYHIVAERLAMPDAVDLLRREIHDAAEAETIRLELESLYGELDCLAVERAEGLLTARQVKISTDIVNAKITKLQARQQDQERLRVLDGIPLGTPQVADVIAELSPDRFRAVLDVLAEVVVQPVGKSGRIFNPERVQVNWR

SEQ ID NO: 4182 - protein, 452 aa, synthetic construct
MKAAIYIRVSTQEQVGNYSIQAQTEKLTALCRSKDWDVYDIFIDGGYSGSNMNRPALNEMLSKLHEIDAVVVYRLDRLSRSQRDTTTLIEEYFLKNNVEFVSLSETLDTSSPFGRAMIGILSVFAQLERETIRDRMVMGKIKRIEAGLPLTTAKGRTFGYDVIDTKLYINEEEAKQLQLIYDIFEEVQSITSLQKRLKKLGFKVRTYNRYSNWLTNDLYCGYVSYKDKVHVKGIHEPIISEEQFYRVQEIFTRMGKKPNMNRDSASLLSNLVVCSKCGLGFVHRSKDTMSRGKKYHYRYYSCKTYKHTHELEKCGNKTWRADKLEELIINRVNNYSFASRNVDKEGELDSLNEKLKIEHAKKRRLFDLYINGSYEVSELDSMMNGIDAQISYYESQIEANEELKKTKKIQEILADLATVDFDSLEFREKQQYLKSLINKIYVDGEQVTIEWL

SEQ ID NO: 4183 - protein, 452 aa, synthetic construct
MKAAIYIRVSTREQVENYSIQAQTEKLTALCRSKDWDVYDIFIDGGYSGSNMNRPALNEMLSKLHEIDAVVVYRLDRLSRSQRDTITLIEEYFLKNNVEFVSLSETLDTSSPFGRAMIGILSVFAQLERETIRDRMVMGKIKRIEAGLPLTTAKGRTFGYDVIDTKLYINEEEAKQLRLIYDIFEEEQSITFLQKRLKELGFKVRTYNRYNNWLTNDLYCGYVSYKDKVHVKGIHEPIISEEQFYRVQEIFTRMGKNPNMNRDSASLLNNLVVCSKCGLGFVHRRKDAMSRGKKYRYRYYSCKTYKHIHELEKCGNKIWRADKLEELVINRVNDYSLASRNVDKEDELDSLNEKLRTEHAKKKRLFDLYINGSYEVSELDSMMNDIDAQINHYESQIEANEELKKNKKIQENLANLATVDFDSLGFREKQLYLKSLISKIYIDGEQVTIEWL

SEQ ID NO: 4184 - protein, 452 aa, synthetic construct
MKAAIYIRVSTREQVENYSIQAQTEKLTALCRSKGWDVYDIFIDGGYSGSNMNRPALNEMLSKLHEIDAVVVYRLDRLSRSQRDTITLIEEYFLKNNVEFVSLSETLDTSSPFGRAMIGILSVFAQLERETIRDRMVMGKIKRVEAGLPLTTAKGRTFGYDVIDTKLYINEEEAKQLQLIYDIFEEEQSITFLQKRLKKLGFKVRTYNCYNNWLTNDLYCGYVSYKDKVHVKGIHEPIISEEQFYRVQEIFTRMGKNPNMNRDSASLLNNLVVCSKCGLGFVHRRKDAMSRDKKYHYRYYSCKTYKHIHELEKCGNKIWRADKLEELIINRVNNYSVASRNVDKEDELDSLNEKLKIEHAKKKRLFDLYVNGSYEVSELDRMMSDIDAQINYYESQIEANEELKKNKKIQENLAHLATVDFDGLEFREKQLYLKSLINKIYIDGEQVTIEWL

SEQ ID NO: 4185 - protein, 452 aa, synthetic construct
MKAAIYIRVSTREQVENYSIQAQTERLTALCRSKDWDVYDIFIDGGYSGSNMNRPALNEMLSKLHEIDAVVVYRLDRLSRSQRDTITLIEEYFLKNNVEFVSLSETLDTSSPFGRAMIGILSVFAQLERETIRDRMVMGKIKRIEAGLPLTTAKGRTFGYDVIDTKLYINEEEAKQLRLIYDIFEEEQSITSLQKRLKKLGFKVHTYNRYNSWLTNDLYCGYVSYKDKVHVKGIHEPIISEEQFHRVQEIFTRMGKNPNMNRDSASLLNSLVVCSKCGLGFVHRRKDTMSRGKKYHYRYYSCKTYKHTYELEKCGNKIWRADKLEELIIDRVNNYSFASRNVDKEDELDSLNEKLKIEHAKKKRLFDLYINGSYEVSELDSMMSDIEAQINYYESQIEANGELKKSKKIQENLAYLATVDYDSLEFREKQLYLKSLINKIYIDGEQVTIEWL

SEQ ID NO: 4186 - protein, 484 aa, synthetic construct
MTRKVAIYTRVSTTNQAEEGFSIDEQIDRLTKYAEAMGWQVSDTYTDAGSSGAKLERPAMQRLINDIENKAFDTVLVYKLDRLSRSVRDTLYLVKDVFTKNKIDFISLNESIDTSSAMGSLFLTILSAINEFERENIKERMTMGKLGRAKSGKSMMWTKTAFGYYHNRKTGILEIVPLQATIVEQIFTDYLSGISLTKLRDKLNESGHIGKDIPWSYRTLRQTLDNPVYCGYIKFKDSLFEGMHKPIIPYETYLKVQKELEKRQQQTYERNNNPRPFQAKYMLSGMARCGYCGAPLRIVLGHKRKDGSRAMKYHCANRFPRKTKGVTVYNDNKKCDSGTYDLSDLENTVIDNLIGFQENSDSLLKIINGNNQPIPDTSSFKKQISQIDKKIQKNSDLYLNDFITMDELKGRTDSLQAEKKLLIAKISENKFNDSTDVFELVKTQLGSIPINELSYDNKKKIVNNLVSKVDVTADNVYITFKFLA

SEQ ID NO: 4187 - protein, 469 aa, synthetic construct
MSYTTPVCAAVYLRISEDRSGEQLGVARQREDCLKLCDQRKWVPVEYLDNDVSASTGKRRPAYEQMLADIAAGKIAAVVAWDLDRLHRRPIELEAFMSLADEKRLALATVAGDVDLATPQGRLVARLKGSVAAHETEHKKARQRRAARQKAERGYPNWSKAFGYLPGPNGPEPDPRAAPLVKQAYAGILAGASLGDVCRQWNDAGAFTITGRPWTTTTLSKFLRKPRNAGLRAYKGARYGPVDRDAIVGKAQWSPLVDEATFWAAQAVLDAPGRAPGRKSVRRHLLTGLAGCGKCGNHLAGSYRTDGRVVYVCKACHGVAILADNIEPILYHIVAERLAKPDAVDLLRRGIHDAAEAETIRLELETLYGELDRLAVERAEGLLTARQVKISTDIVNAKITKLQACQLDQERLRVFDGIPLGTPQVAGMIAELSPDRFRAVLDVLAEVVVQPVGKSGRIFNPERVQVNWR

SEQ ID NO: 4188 - protein, 485 aa, synthetic construct
MTKKVAIYTRVSTTNQAEEGFSIDEQTDRLTKYAEAMGWQVSDTYTDAGFSGAKLERPAMQRLINDIENKAFDTVLVYKLDRLSRSVRDTLYLVKDVFTKNKIDFISLNESIDTSSAMGSLFLTILSAINEFERENIKERMTMGKLGRAKSGKSMMWTKTAFGYYHNRKTGILEIVPLQATIVEQIFTDYLSGISLTKLRDKLNESGHIGKDIPWSYRTLRQTLDNPVYCGYIKFKDSLFEGMHKPIIPYETYLKVQKELEERQQQTYERNNNPRPFQAKYMLSGMARCGYCGAPLRIVLGHKRKDGSRTMKYHCANRFPRKTKGVTVYNDNKKCDSGTYDLSNLENAVIDNLIGFQENNDSLLKIINGNNQPILDTSSFKKRISQIDKKIQKNSDLYLNDFITMDELKDRTDSLQAEKKLLKAKISENKFNDSTDVFELVKTQLGSIPINELSYDNKKKIVNNLVSKVDVTADNVDIIFKFQLA

SEQ ID NO: 4189 - protein, 452 aa, synthetic construct
MKAAIYIRVSTQEQVGNYSIQAQTEKLTALCRSKGWDVYDIFIDGGYSGSNMNRPALNEMLSKLHEIDAVVVYRLDRLSRSQRDTTTLIEEYFLKNNVEFVSLSETLDTSSPFGRAMIGILSVFAQLERETIRDRMVMGKIKRIEAGLPLTTAKGRTFGYDVIDTKLYINEEEAKQLRLIYDIFEEEQSITSLQKRLKKLGFKVRTYNRYNNWLTNDLYCGYVSYKDKVHVKGIHEPIISEEQFYRVQEIFTRMGKNPNMNRDSASLLNNLVVCNKCGLGFVHRSKDTMSRGKRYHYRYYSCKTYKHTHELEKCGNKTWRADKLEELIINRVNNYSFASRNVDKEDELDSLNKKLKIEHAKKKRLFDLYINGSYEVSELDSMMNDIDAQINYYESQIEAYEELKKNKKIQENLAGLATVDFDSLEFREKRLYLKSLINKIYIDGEQVTIEWL

SEQ ID NO: 4190 - protein, 485 aa, synthetic construct
MTKKVAIYTRVSTTNQAEEGFSIDEQIDRLTKYAEAMGWQVSDTYIDAGFSGAKLERPAMQRLINDIENKAFDTVLVYKLDRLSRSVRDTLHLVKDVFTKNKIDFISLNESIDTSSAMGSLFLTILSAINEFERENIKERMTMGKLGRAKSGKSMMWTRTAFGYYHNRKTGILEIVPLQATIVEQIFTDYLSGISLTKLRDKLNESGHIGKDIPWSYRTLRQTLDNPVYCGYIKFKGSLFEGMHKPIISYEAYLKVQKELEERQQQTYERNNNPRPFQAKYMLSGMARCGYCGAPLRIVLGHKRKDGSRTMKYHCANRFPRKTEGITVYNDNKKCDSGTYDLSDLENTVIDSLIGFQENNDSLLKIINGNNQPILDTSSLKKQISQIDKKIQRNSDLYLNDFITMDELKDRTDSLQAEIKLLKAKISENKFNDSTDVFELVKTQLGSIPINELSYDDKKKIVNNLVSKVDVTADNVDIIFKFQLA

SEQ ID NO: 4191 - protein, 469 aa, synthetic construct
MSYTTPVRAAVYLRISEDRSGEQLGVARQREDCLKLCGQRKWVPVEYLDNDVSASTGKRRPAYEQMLADITAGKIAAVVAWDLDRLHRRPVELEAFMSLADERRLALATVAGDVDLATPQGRLVARLKGSVAAHETEHKKARQRRAARQKAERGLPNWSKAFGYLPGPNGPEPDPRTAPLVRQAYADILAGASLGDVCRQWNGAGAFTITGRPWATTTLSKFLRKPRNAGLRAYKGARYGPVDRDAIVGKAQWSPLVDEATFWAAQAVLDAPGRAPGRKSVRRHLLTGLAGCGKCGNHLAGSCRTDGRVVYVCKACHGVAILADNIEPILYHIVAERLAMPNAVGLLRREIHDVAEAETIRLELETLYGELDCLAVERAEGLLTARQVKISTDIVNAKISKLQARQLDQERLRVFDGIPLGTPQVAGMIAELSPDRFRAVLDVLAEVVVQPVGKSGRIFNPERVQVNWR

SEQ ID NO: 4192 - protein, 485 aa, synthetic construct
MTKKVAIYTRVSTTNQAEEGFSIDEQIDRLTKYAEAMGWQVSDTYTDAGFSGAKLERPAMQRLINDIENKAFDTVLVYKLDRLSRSVRDTLYLVKEVFTKNKIGFISLNESIDTSSAMGSLFLTILSAINEFERENIKERMTMGKLGRAKSGKSMMWTKTAFGYYHNRKTGILEIVPLQATIVEQIFTDYLSGISLTKLRDKLNESGHIGKDIPWSYRTLRQTLDNPVYCGYIKFKGSLFEGMHKPIIPYETYLKVQKELEERQQQTYERNNNPRPFQAKYMLSGMARCGYCGAPLKIVLGHRRKDGSRTMKYHCANRFPRKTKGVTVYNDNKKCDSGTYDLSNLENTVIDSLIGLQENNDSLLKIINGNNQPILDTSSFKEQVSQIDKKIQKNGDLYLNDFITMDELRDRTESLRAERKLLKAKISENKFNDSTDVFELVRTQLGSIPVNELSYDNKKKIVNNLVSKVDVTADSVDIIFKFQLA

SEQ ID NO: 4193 - protein, 452 aa, synthetic construct
MKAAIYIRVSTREQVENYSIQAQTEKLTALCRSKDWDVYDIFIDGGYSGSNMNRPALNEMLSKLHEIDAVVVYRLDRLSRSQRDTITLIEEYFLKNNVEFVSLSETLDTSSPFGRAMIGILSVFAQLERETIRDRMVMGKIKRIEAGLPLTTAKGRTFGYDVIDTKLYINEEEAKQLRLIYDIFEEEQSITFLQKRLKELGFKVRAYNRYNNWLTNDLYCGYVSYKDKVHVKGIHEPIISEEQFYRVQEIFTRMGKNPNMNRDSASLLSNLVVCSKCGLGFVHRRKDIMSRGKKYHYRYYSCKTYKHIHELEKCGNKIWRADKLEELIIDRVNNYSFASRDADKEDELDSLNERLKIEHAKKKRLFDLYINGSYEVSELDSMMSDIDAQINYYESQIGANGELKKNEKIQETLANLATVDFDSLEFREKQLYLKSLINKIYIDGEQVTIEWL

SEQ ID NO: 4194 - protein, 452 aa, synthetic construct
MKAAIYIRVSTQEQVENYSIQAQTEKLTALCRSKDWDVYDIFIDGGYSGSNMNRPALNEMLSKLHEIDAVVVYRLDRLSRSQRDTITLIEEYFLKNNVEFVSLSETLDTSSPFGRAMIGILSVFAQLERETIRDRMVMGKIKRIEAGLPLTTAKGRTFGYDVIDTKLYINEEEAKQLQLIYDIFEEEQSITFLQKRLKKLGFKVRTYSCYNNWLTNDLYCGYVSYKDKVHVKGIHEPIISEEQFYRVQEIFARMGKNPNMNRDSASLLNNLVVCSKCGLGFVHRRKDTMSRGKKYHYRYYSCKTYKHIHELEKCGNKIWRADKLEELIINRVNNYSFASRNVDKEDELDSLNEKLKTERAKRKRLFDLYINGSYEVSELDSMMNDIDAQINYYESQIEANEELKRNKKTQENLADLATVDFDSLEFREKQLYLKSLINKIYIDGEQVTIEWL

SEQ ID NO: 4195 - protein, 485 aa, synthetic construct
MTRKVAIYTRVSTTNQAEEGFSIDEQISRLTKYAEAMGWQVSDTYTDAGFSGAKLGRPAMQRLINDIENKAFDTVLVYKLDRLSRSVRDTLYLVKDVFTKNKIDFISLNECIDTSSAMGSLFLTILSAINEFERENIKERMTMGKLGRAKSGKSMMWTKTAFGYYHNRKTGILEIVPLQATIVEQIFTDYLSGTSLTKLRDKLNESGHIGKDIPWSYRTLRQTLDNPVYCGYIKFKDSLFEGMHKPIIPYETYLKVQKELEERQRQTYERNNNPRPFQAKYMLSGMARCGYCGAPLKIVLGHKRKDGSRTMKYHCANRFPRKAKGVTVYNGNKKCDSGTYDLSNLENTVIGNLIGFQENNDSLLKIINGNNQPILDTSSLKKQISQIDKKIQKNSDLYLNDFITMDELRDRTDSLQAEKKLLKAKISENKFNDGTDVLELVKTQLGSIPINELSYDNKKKIVNSLVSKVDVTADNVDIIFKFQLA

SEQ ID NO: 4196 - protein, 485 aa, synthetic construct
MTKKVAIYTRVSTTNQAEEGFSINEQIDRLTKYAEAMGWQVSDTYTDAGFSGAKLERPAMQRLINDIENKAFDTVLVYKLDRLSRSVRDTLYLVKEVFTRNKIDFISLNESINTSSAMGSLFLTILSAINEFERENIKERMTMGKLGRAKSGKSMMWTKTAFGYYHNRKTGILEIVPPQATIVEQIFTDYLSGISLTKLRDKLNESGHIGKDIPWSYRTLRQTLDNPVYCGYIKFKDSLFEGMHKPIIPHETYLKVQKELEERQRQTYERNNNPRPFQAKYMLSGMARCGYCGAPLRIVLGHKRKDGSRTMRYHCVNRFPRKTKGVTVYNDNKKCDSGTYDLSNLENTVIDNLIGLQENDDSLLKIINGNNQPILDTCSFKKQISQIDKKIQKNSDLYLNDFITMDELKDRTDSLQAEKKLLKAKISENKFNDSTDVFELVKTQLGSIPINELSYDNKKKIVNNLVSKVDVTADNVDIIFKFQLA

SEQ ID NO: 4197 - protein, 452 aa, synthetic construct
MKAAIYIRVSTREQVENYSIQAQTEKLTALCRSKGWDVYDIFIDGGYSGSNMNRPALNEMLSKLHEIDAVVVYRLDRLSRSQRDTITLIEEYFLKNNVEFVSLSETLDTSSPFGRAMIGILSVFAQLERETIRDRMVMGKIKRIEAGLPLTTAKGRTFGYDVIGTKLYINEEEAKQLRLIYDIFEEEQSITFLQKRLKELGFKVRTYNRYNNWLTNDLYCGYVSYKDKVHVKGIHEPIISEEQFYRVQEIFTRMGKNPNMNRDSASLLNNLVVCSKCGLSFVHRRKDTMRRGKKYHYRYYSCKTYKHAHELEKCGNKIWRADKLEELIINRVNNYSLASRNVDKEDELDSLSEKLKIEHAKKKRLFDLYINGSYEVSELDSMMNDIDAQINYYESQIEANKELKKNKKIQESLADLATVDFDSLEFREKQLYLKSLISKIYIDGEQVTIEWL

SEQ ID NO: 4198 - protein, 469 aa, synthetic construct
MSYTIPVRAAVYLRISEDRSGEQLGVARQREDCLKLCDQRKWVPVEYLDNDMSASTGKRRPAYEQMLADITAGKIAAVVAWDLDRLHRRPIELETFMSLADEKRLALATVAGDVDLATPQGRLVARLKGSVAAHETEHKKARQRRAARQKAERGHPNWSKAFGYLPGPNGPEPDPRTAPLVKQAYADILAGASLGDVCWQWNAAGAFTITGRPWTTTTLSKFLRKPRNAGLRAYKGACYGPVDRDAIVGKAQWSPLVDEATFWAAQAVLDAPGRAPGRKSVRRHLLTGLAGCGKCGNHLAGSYRTDGRVVYVCKACHGVAILADNIEPILYHIVAERLAMPDAVDLLRREIHDAAEAEAIRLELETLHGELDRLAVERAEGLLTARQVKISTDIVNAKITKLQARQLDQERLRVFDGIPLGTPQVAGMIAELSPDRFRAVLDVLAEVVVQPVGKGGRIFNPERVQVNWR

SEQ ID NO: 4199 - protein, 485 aa, synthetic construct
MTKKVAIYTRVSTTNQAEEGFSIDEQIDRLTKYAEAMGWQVSDTYTDAGLSGAKLERPAMQRLINDIENKAFDTVLVYKLDRLSRSVRDTLYLVKDVFTKNKIDFISLNESIDTSSAMGSLFLTILSAINEFERENIKERMTMGKLGRAKSGKSMMWTKTAFGYYHNRKTGILEIVPLQATIVEQIFTDYLSGISLTKLRDKLNESGHIGKDIPWSYRTLRQTLDNPVYCGYIKFKDSLFEGMHKPIIPYETYLKVQKELEERQQQTYERNNNPRPFQAKYMLSGMARCGYCGAPLRIVLGHRRKDGSRTMKYHCANRFPRKTKGVTVYNDNKKCDSGTYDLSYLENTVIDNLIGFQENNDSLLKIINGNNQPILDTGSIKKQISQIDKKIQKNSDLYLNDFITMDELKDRTDRLQAEKKLLKAKISENKFDDSTGVFELVKTQLGSIPINELSYDNKKKIVNNLVSKVDVTADNVGIIFKFQLA

SEQ ID NO: 4200 - protein, 452 aa, synthetic construct
MKAAIYIRVSTREQVENYSIQAQTEKLTALCRSKDWDVYDIFIDGGYSGSNMNRPALNEMLSKLHEIDAVVVYRLDRLSRSQRDTITLIEEYFLKNNVEFVSLSETLDTSSPFGRAMIGILSVFAQLERETIRDRMVMGKIKRIEAGLPLTTAKGRTFGYDVIDTKLYVNEEEARQLQLIYDIFEEEQSITFLQKRLKELGFKVRTYNRYNNWLTNDLYCGYVSYKDKVHVKGIHEPIISEEQFYRVQEIFARMGKNPNMNRDSASLLNNLVVCSKCGLGFVHRRKDIVSRGKKYHYRYYSCKTYKHIHELEKCGNKIWRADELEELVINRVNSYSVASRNAGKEDELDSLNEKLKIEHAKKKRLFDLYINGSYEVSELDSMMNDINAQISYYESQIEANEELRKNKKIQENLADLATVDFDSLEFREKQLYLKSLINKIYIDGEQVTIEWL

SEQ ID NO: 4201 - protein, 485 aa, synthetic construct
MTKKVAIYTRVSTPNQAEEGFSIDEQIDRLTKYAEAMGWQVSDTYTDAGFSGAKLERPAMQRLINDIENKAFDTVLVYKLDRLSRSVRDTLYLVKEVFTKNKIDFISLSESIDTSSAMGSLFLTILSAINEFERENIKERMTMGKLGRAKSGKSMMWTKTAFGYYHNRKTGILEIAPLQAAIVEQIFTDYLSGISLTKLRDKLNESGHIGKDIPWSYRTLRQTLDNPVYCGYIKFKDSLFEGMHKPIIPYETYLKVQKELEERQRQTYERNNNPRPFQAKYMLSGMARCGYCGAPLRIVLGHKRKDGSRTMKYHCANRFPRKTKGVTVYNDNKKCDSGTYDLSDLENTVIDNLIGLQENNDSLLKIINGNDQPTLDTSSLKKQISQIDKKIQKNSDLYLNDFITMDELKDRTDSLQAEKRLLKAKISENKFNDSTDVFELVKTQLGSIPINELSYDSKKKIVNNLVSKVDVTADNVDIIFKFQLA

SEQ ID NO: 4202 - protein, 485 aa, synthetic construct
MTKKVAIYTRVSTTNQAEEGFSIDEQVDRLTKYAEAMGWQVSDTYTDAGFSGAKLERPAMQRLINDIENKAFDTVLVYRLDRLSRSVRDTLHLVKDVFTKNKIDFISLNESIDTSSAMGSLFLTILSAINEFERENIKERMTMGKLGRAKSGKSMMWTKTAFGYYHNRKTGILEIVPLQATIVEQIFTDYLSGISLTKLRDKLNESGHIGKDIPWSYRTLRQTLDNPVYCGYIKFKDSLFEGMHEPIIPYETYLKVQKELEERQQQTYERNNNPRPFQAKYMLSGMARCGYCGAPLRIVLGRKRKDGSRTMKYHCANRFPRKTKGVTVYNDNKKCDSGTYDLSNLENTVIDNLIGLQENNDSLLKIINGNNQPILDISSFEKQISQIDKKIQKNSDLYLNDFITMDELKDRTDSLQAEKRLLKAKISENKLNVSTDVFELVKTQLGSIPINELSYDDKKKIVNNLVSKVDVTADNVDIIFKFQPA

SEQ ID NO: 4203 - protein, 485 aa, synthetic construct
MTKKVAIYTRVSTINQAEEGFSIDEQIDRLTKYAEAMGWQVSDTYTDAGFSGAKLERPAMQRLINDIENKAFDTVLVYKLDRLSRSVRDTLYLVKEVFTKNKIDFISLSESIDTSSAMGSLFLTILSAINEFERENIKERMTMGKLGRAKSGKSMMWTKTAFGYYHNRKTGILEIVPLQATIVEQIFTDYLSGISLTKLRDKLNESGHIGKDIPWSYRTLRQTLDNPVYCGYIRFKDSLFEGMHKPIIPYETYLKVQKELEERQQQTYERNNNPRPFQAKYMLSGLARCGYCGAPLRIVLGHKRKDGGRAMKYHCANRFPRKTKGVTVYNDNKKCDSGTYDLSNLENTVIDNLAGFQENNDSLLKIINGNNQPILDTSSFEKQISQIDKKIQKHSDLYLNDFITMDELKDRADSLQAEKKLLKAKISGTKFNDRTGVFELVKTQLGSIPINELSYDNKKKIVNNLVSKVDVTADNVDIIFKFQQA

SEQ ID NO: 4204 - protein, 469 aa, synthetic construct
MSYTTPVRAAVYLRISEDRSGEQLGVARQREDCLKLCDQRKWEPVEYLDNDVSASTGKRRPAYEQMLADITAGKIAAVVAWDLDRLHRRPVELEAFMSLADEKRLALATVAGDVDLATPQGRLVARLKGSVAAHETEHKKARQRRAARQKAERGYPNWSKAFGYLPGPNGPEPDPRTAPLVKQAYADILAGASLGDVCRQWNDAGAFTITGRPWTTTTLSKFLRKPRNAGLRAYKGARYGPVDRDAIVGKAQWSPLVDEATFWAAQAVLDAPGRAPGRKSVRRHLLTGLAGCGKCGSHLAGSYRTDGRVVYVCKACHGVAILADNIEPILYHIVAERLVMPDAVDLLHREIHDAAEAETIRLELETLYGELDRLAVERAEGLLTARQVKISTDIVNAKITKLQAHQLDQERLRVLDGIPLGTPQVAGKIAELSPDRFRTVLDVLAEVVVQPVGKSGRIFNPERVQVNWR

SEQ ID NO: 4205 - protein, 469 aa, synthetic construct
MSYTTPVRAAVYLRISEDRSGEQLGVARQREDCLKLCGQRKWVPVEYLDNDVSASTGKRRPAYEQMLADITAGKIAAVVAWDLDRLHRRPIELEAFMSLADEKRLALATVAGDVDLATPQGRLVARLKGSVAAHETEHKKARQRRAARQKAERGYPNWSKAFGYLPGPNGPEPDPRTAPLVKQAYADILAGASLGDVCRQWNDAGAFTITGRPWTTTALSKFLRKPRNAGLRAYKGARYGPVDRDAIVGKAQWSPLVDEATFWAAQAVLDAPGRAPGRKSVRRHLLTGLAGCGKCGNHLAGSYRTDGRVVYVCKACHGVAILADIIEPILYHIVAERLAMPDAVDLLRREIHDAAEAETIRLELETLYGELDRLAVERAEGLLTARQVKISTDIVSEKITKLQARQLDQERLRVFDGIPLGTPQVAGMIAELSPDRFRAVLDVLAEVVVQPVGRSGRIFNPERVQVNWR

SEQ ID NO: 4206 - protein, 452 aa, synthetic construct
MKAAIYIRVSTQEQVGNYSIQAQTEKLTALCRSKDWDVYDIFIDGGYSGSNMNRPALNEMLSKLHEIDAVVVYRLDRLSRSQRDTTTLIEEYFLKNNVEFVSLSETLDTSSPFGRAMIGILSVFAQLERETIRDRMVMGKIKRIEAGLPLTTAKGRTFGYDVIDTKLYINEEEAKQLQLIYDIFEEEQSITFLQKRLKKLGFKVRSYNRYNSWLTNDLYCGYVSYKDKVHVKGIHEPIISEEQFYRVQEIFTRMGKNPNMNRDSASLLNNLVVCSKCGLSFVHRSKDTTSRGKKYHYRYYSCKTYKHTHELEKCGNKTWRADKLEELIINRVNNYSFASRNADKEDELDGLNEKLKIEHAKRKRLFDLYINGGYEVSELDSMMNDIDAQINYYESQIKANEELKENKKIQGNLADLATVDFDSLEFREKQLYLKSLINKIYIDGEQVTIEWL

SEQ ID NO: 4207 - protein, 469 aa, synthetic construct
MSYSTPVRAAVYLRISEDRSGEQLGVARQREDCLKLCDQRKWVPVEYLDNDVSASTGKRRPAYERMLADITAGKIAAVVAWDLDRLHRRPIELEAFMSLADEKRLALATVAGDVDLATPQGRLVARLKGCVAAHETEHKKARQRRAARQKAERGHPNWSKAFGYLPGPNGPEPDPRTAPLVKQAYADILAGARLGDVCRQWNDAGAFTITGRLWTTTTLSKFLRKPRNAGLRAYKGARYGPVDRHAIVGKAQWSPLVDEATFWAAQAVLDAPGRAPGRKSVRRHLLTGLAGCGKCGSHLAGSYRTDGRVVYVCKACHGVTILADNIEPILYHIVAERLAMPDAVDLLRREIHDAAEAEAIRLELETLRGELDRLAVERAEGLLTARQVKISTGIVNAKITKLQARQLDQERLRVFEGIPLGTPQVAGAIAELSPNRFRAVLDVLAEVIVRPAGKSGKISNPERVQVNWR

SEQ ID NO: 4208 - protein, 469 aa, synthetic construct
MCYTTPVRAAVYLRISEDRSGEQLGVARQREDCLKLCGQRKWEPVEYLDNDVSASTGKRRPAYEQMLADITAGKIAAVVAWDLDRLHRRPIELEAFMSLADEKRLALATVAGDVDLATPQGRLVARLKGSVAAHETEHKKARQRRAARQKAERGHPNWSRAFGYLPGPNGPEPDPRTAPLVKQAYADILAGASLGDVCRQWNDAGAFTITGRPWTSTTLSKFLRKPRNAGLRAYKGARYGPVDRDAIVGKAQWSPLVDEATFWAAQAVLDAPGRAPGRKSVRRHLLTGLAGCGKCGNHLAGSYRTDGRVAYVCKACHGVAILADNIEPILYHIVAERLAMPDAGDLLRCEIHDVAEAETIRLELEALYGELDRLAVERAEGLLTARQVKISTDIVNAKITKLQARQQDRERLRVLDGIPLGTPQVADVIAELSPDRFRAVLDVLVDVVVQPVGKGGRIFNLERVQVNWR

SEQ ID NO: 4209 - protein, 452 aa, synthetic construct
MKAAIYIRVSTREQVENYSIQAQTEKLTALCRSKDWDVYDIFIDGGYSGSNMNRPALNEMLSKLHEIDAVVVYRLDRLSRSQRDTITLIEEYFLKNNVEFVSLSETLDTSSPFGRAMIGILSVFAQLERETIRDRMVMGKIKRIEAGLPLTTAKGRTFGYDVIDTKLYINEEEAKQLQLIYDIFEEEQSITLLQRRLKKLGFKVRTYSRYNHWLTNDLYCGYVRYKDKVHVKGIHEPIISEEQFYRVQEIFARMGKNPNMNRDSASLLNNLVVCSKCGLGFVHRRKDTVSRGKKYHYRYYSCKTYKHIHELEKCGNKIWRADKLEELIIDRVNNYSFASRNVDKEDELDSLNEKLKIEHAKKKRLFDLYINGSYEVSELDCMMNDIDAQINYYESQIEANEELKKDKKIQESLANLATVDYDSLEFREKQLYLKSLINKIYIDGEQVTIEWL

SEQ ID NO: 4210 - protein, 452 aa, synthetic construct
MKAAIYIRVSTREQVENYSIQAQTEKLTALCRSKDWDVYDIFIDGGYSGSNMKRPALNEMLSKLHEIDAVVVYRLDRLSRSQRDTITLIEEYFLKNNVEFVSLSETLDTSSPFGRAMIGILSVFAQLERETIRDRMVMGKIKRIEAGLPLTTAKGRTFGYDVIDTKLYINEEEAKQLQLIYDIFEEEQSITFLQRRLEKLGFKVRTYSRYNSWLTNDLYCGYVSYKDKVRVKGIHEPIISEEQFYRVQEIFTRMGKNPNMNRESASLLNNLVVCSKCGLGFVHRRKDTTSRGKKYHYRYYSCKTYKHIHELEKCGNKIWRADKLEELIINRVNNYSLASRNVDKEDELDSLNEKLKIERAKKKRLFDLYINGSYEVCELDSLMNDIDAQINYYESQIEANEELKKNKKIQENLADLATVDFGSLEFREKQLYLKGLINKIYIDGEQVTIEWL

SEQ ID NO: 4211 - protein, 452 aa, synthetic construct
MKAAIYIRVSTQEQVGNYSIQAQTEKLTALCRSKDWDVYDIFIDGGYSGSNMNRPALNEMLSKLHEIDAVVVYRLDRLSRSQRDTTTLIEEYFLKNDVEFVSLSETLDTSSPFGRAMIGILSVFAQLERETIRDRMVMGKIKRIEAGLPLTTAKGRTFGYDVIDTKLYINEEEAKQLQLIYDIFEEEQSITSLQKRLKKLGFKVRTYNRYNSWLTNDLYCGYVSYKDKVHVKGIHEPIISEEQFYRVQEIFTRMGKNPNMNRDSASLLSNLVVCSKCGLGFVHRSKDTMSRGKKYHYRYYSCKTYKHTHELEKCGNKTWRADKLEELIINRVNNYSFASRNVDKEGELDSLNEKLKTEHAKKRRLFDLYINGSYEVSELDSMMNGIDAQISYYESQIEANEELKENKKIQENLAELATVDFDSLEFREKQLYLKSLINKIYIDGEQVTIEWL

SEQ ID NO: 4212 - protein, 452 aa, synthetic construct
MKAAIYIRVSTQEQVGNYSIQAQTEKLTALCRSKDWDVYDIFIDGGYSGSNMNRPALNEMLSKLHEIDAVVVYRLDRLSRSQRDTTTLIEEYFLKNNVEFVSLSETLDTSSPFGRAMIGILSVFAQLERETIRDRMVMGKIKRIEAGLPLTTAKGRTFGYDVIDTKLYINEEEAKQLQLIYDIFEEEQSITSLQKRLKKLGFKVRTYNRYNNWLTNDLYCGYVSYKDKVHVKGIHEPIISEEQFYRVQEIFTRMGKKPNMNRDSASLLNNLVVCSKCGLGFVHRSKDTMSRGKKYHYRYYSCKTYKHTHELEKCGNKTWRADKLEELIINRVNNYSFASRNVGKEDELDSLNEKLRIEHAKKKRLFDLYINGSYEVSELDSMMNDIDAQINYYESQIEAIEELKKTKKIRENLADLAAVDFDSLEFREKQLYLKSLINKIYIDGEQVTIEWL

SEQ ID NO: 4213 - protein, 452 aa, synthetic construct
MKAAIYIRVSTREQVENYSIQAQTEKLTALCRSKDWDVYDIFIDGGYSGSNMNRPALNEMLSKLHKIDAVVVYRLDRLSRSQRDTITLIEEYFLKNNVEFVSLSETLDTSSPFGRAMIGILSVFAQLERETIRDRMVMGKIKRIEAGLPLTTAKGRTFGYDVIDTKLYINEEEAKQLQLIYDIFEEEQSITSLQKRLKKLGFKVRTYNCYNNWLTNDLYCGYVSYKDKVHVKGIHEPIISEEQFYRVQEIFTRMGKNPNMNRDSASLLNNLVVCSKCGLGFVHRRKDAMSRDKKYHYRYYSCKTYKHIHELEKCGNKIWRADKLEELIINRVNSYSLVSRNVDKEDELDSLNEKLKIEHAKKKRLFELYINGSYEVSELDSMMNDIDAQINYYESQIEANEGLRKNRKIQENLAHLASVDFDSLEFREKQLYLKSLINKIYIDGEQVTIEWL

SEQ ID NO: 4214 - protein, 452 aa, synthetic construct
MKAAIYIRVSTREQVENYSIQAQAEKLTALCRSKDWDVYDIFVDGGYSGSNMNRPALNEMLSKLHEIDAVVVYRLDRLSRSQRDTITLIEEYFLKNNVEFVSLSETLDTSSPFGRAMIGILSVFAQLERETIRDRMVMGKIKRIEAGLPLTTAKGRTFGYDVIDTKLYINEEEAKQLRLIYDIFEEEQSITFLQKRLKKLGFKVRTYNRYNNWLTNDLYCGYVSYKDKVHVKGIHEPIISEEQFYRVQEIFTRMGKNPNMNRNSASLLNNLVVCSKCGLGFVHRRKDAMSRGKKYHYRYYCCKTYKHIHELEKCGNKIWRADELEELVINRVNSYSVASRNVDKEDELDSLNEKLKIEHAKKKRLFDLYINGSYEVSELDSMMNDINAQISYYESQIEANEELRRNKKIQENLADLATVDFDSLEFREKQLYLKSLINKIYIDGEQVTIEWQ

SEQ ID NO: 4215 - protein, 452 aa, synthetic construct
MKAAIYIRVSTREQVENYSIQAQTEKLTALCRSKDWDVYDIFIDGGYSGSNMNRPALNEMLSKLHDIDAVVVYRLDRLSRSQRDTITLIEEYFLKNNVEFVSLSETLDTSSPFGRAMIGILSVFAQLERETIRDRMVMGKIKRIEAGLPLTTAKGRTFGYDVIDTKLYINEEEAKQLQLIYDIFEEEQSITFLQKRLKKLGFKVRTYSRYNSWLTNDLYCGYVSYKDKVHVKGIHEPIISEEQFYRVQEIFTRMGKNPNMNRDSASLLSNLVVCNKCGLGFVHRRKDTTSRGKKYRYRYYSCKTYKHTHELEKCGNKIWRADKLEELIINRVNNYSFASRNVDKEDELDSLNEKLKIEHAKKKRLFDLYINGSYEVSELDSMMNDIDARINYYESQIEANEELKKNKKIQENLADLATVDYDSLEFREKQLYLKSLINKIYIDGEQVTIEWL

SEQ ID NO: 4216 - protein, 452 aa, synthetic construct
MKAAIYIRVSTREQVENYSIQAQTEKLTALCRSKDWDVYDIFVDGGYSGSNMNRPALNEMLSKLHEIDAVVVYRLDRLSRSQRDTITLIEEYFLKNNVEFVSLSETLDTSSPFGRAMIGILSVFAQLERETIRDRMVMGKIKRIEAGLPLTTAKGRTFGYDVIDTKLYINKEEAKQLQLIYDIFEEEQSITFLQKRLKKLGFKVRTYNCYNNWLTNDLYCGYVSYKDKVHVKGIHEPIISEEQFYRVQEIFTRMGKNPNMNRDSASLLNNLVVCSKCGLGFVHRRKDAMSRDKKYHYRYYSCKTYKHIHELEKCGNKIWRADKLEELVIKRVSNYSFASRNVDKEDELDSLSEKLKIEHAKKKRLFDLYINGSYEVSELDSMMKDIDAQINYYESRIEANEELRKNKKIQENLADLATMDFDSLGFREKQLYLKSLINKIYIDGEQVTIEWL

SEQ ID NO: 4217 - protein, 485 aa, synthetic construct
MTKKVAIYTRVSTTNQAEEGFSIDEQTDRLTKYAEAMGWQVSDTYTDAGLSGAKLERPAMQRLINDIETRAFDTVLVYKLDRLSRSVRDTLYLVKDVFTKNKIDFISLNESIDTSSAMGSLFLTILSAINEFERENIKERMTMGKLGRAKSGKSMMWTRTAFGYYHNRKTGVLEIVPLQATIVEQIFTDYLSGISLTKLRDKLNESGHIGKDIPWSYRTLRQTLDNPVYCGYIKFKDSLFEGMHKPIISYETYLRVQKELEERQQQTYERNNNPRPFQAKYMLSGMARCGYCGAPLRIVLGHKRKDGSRTMKYHCANRFPRKAKGVTVYNDNKKCDSGTYDLSNLENTVIDHLIGFQENNDCLLKIINGNNQPILDTSSFKKQISQIDKKIQKNSDLYLNDFITMDELKDRTDSLQAEKKLLEAKISENKFNDSTDVFELVKTQLGSIPINELSYDNKKKIVNNLVSKVDVTADNVDIIFKFQLA

SEQ ID NO: 4218 - protein, 485 aa, synthetic construct
MTKKVAIYTRVSTTNQAEEGFSIDEQVDRLTKYVEAMGWLVSDTYTDAGFSGAKLERPAMQRLINDIETKAFDTVLVYKLDRLSRSVRDTLYLVKDVFTKNKIDFISLNESIDTSSAMGSLFLTILSAINEFERENIKERMTMGKLGRAKSGKSMMWTKTAFGYYHNRKTGILEIVPLQATIVEQIFTDYLSGISLTKLRDKLNESGHIGKDIPWSYRTLRQTLDNPVYCGYIKFKDSLFEGMHKPIIPYETYLKVQKELEERQQQTYERNNNPRPFQAKYMLSGMARCGYCGAPLRIVLGHKRKDGSRTMKYHCANRFPRKTKGITVYNDNKKCDSGTYDLSNLENTVIDNLIGLQENNDSLLKIINGNNQPIQDTSSIKKQISQIDKKIQKNSDLYLNDFITMDELRDRTDSLQAEKRLLKAKISENKFNDNTDVFELVKTQLGSIPINELSYDNKKKIVNNLVSKVDVTADNVDIIFKFQLA

SEQ ID NO: 4219 - protein, 452 aa, synthetic construct
MKAAIYIRVSTREQVENYSIQAQTEKLTALCRSKDWDVYDIFIDGGYSGSNMNRPALNEMLSKLHEIDAVVVYRLDRLSRSQRDTITLIEEHFLKNNVEFVSLSETLDTSSPFGRAMIGILSVFAQLERETIRDRMVMGKIKRIEAGLPLTTAKGRTFGYDVIDTKLYINEEEAKQLQLIYDIFEEEQSITFLQKRLKKLGFKVRTYSRYNSWLTNDLYCGYVSYKDKVHVKGIHEPIISEEQFHRVQEIFARMGRNPNMNRDSASLLNNLVVCSKCGLGFVHRRKDTMSRGKKYHYRYYSCKTYKHTHELEKCGNKIWRADKLEELIINRVNNYSLASRNVDKEDELDSLNEKLKIEHAKKKRLFDLYINGSYEVGELDSMMSDIDAQINCYESQIEANEELKKNKKIQENLADLATVDFDSLGFREKQLYLKSLINKIYIDGEQVTIEWL

SEQ ID NO: 4220 - protein, 485 aa, synthetic construct
MTKKVAIYTRVSTTNQAEEGFSIDEQIDRLTKYAEAMGWQVSDTYTDAGFSGAKLERPAMQRLINDIENKAFDTVLVYKLDRLSRSVRDTLYLVKDVFTKNKIDFISLNECIDTSSAMGSLFLTILSAINEFERENIKERMTMGKLGRAKSGKSMMWTKTAFGYYHNRKTGILEIVPLQATIVEQIFTDYLSGISLSKLRDKLNESGHIGKDIPWSYRTLRQTLDNPVYCGYIKFKDSLFEGMHKPIIPYETYLKVQKELEERQQQAYERNNNPRPFQAKYMLSGMARCGYCGAPLKVVLGHKRKDGSRTMKYHCANRFPRKTKGVTVYNDNRKCDSGTYDLSNLESTVIDSLIGFQENNDSLLKIINGNNQPILDTSSFEKQISQIDKKIQKSSDLYLNDFITMDELKDRTDSLQAEKKLLKAKISENKFNDSTDVFELVKTQLGSIPINELSYGNKKKIVNNLVSKVDVTADNVDIIFKFRLA

SEQ ID NO: 4221 - protein, 452 aa, synthetic construct
MKAAIYIRVSTQEQVENYSIQAQTEKLTALCRSKDWDVYDIFIDGGYSGSNMNRPALNEMLSKLHEIDAVVVYRLDRLSRSQRDTTTLIEEYFLKNNVEFVSLSETLDTSSPFGRAMIGILSVFAQLERETIRDRMVMGKIKRIEAGLPLTTAKGRTFGYDVIDTKLYINEEEAKQLQLIYDIFEEEQSITSLQKRLKKLGFKVRTYNRYNNWLTNDLYCGYVSYKDKVHVKGIHEPIISEEQFYRVQEIFTRMGKNPNMNRDSASLLSNLVVCSKCGLGFVHRSKDTMSRGKKYHYRYYSCKTYKHTHELEKCGNKTWRADKLEELIINRVNNYSFASRNADKEDELDSLNEKLRVEHAKKKRLFDLYINGSYEVSELDSMMNDIDAQINYYESRIEANEELKRNKKIQENLAGLATVDFDSLEFREKQLYLKSLINKIYIDGEQVTIEWL

SEQ ID NO: 4222 - protein, 452 aa, synthetic construct
MKAAIYIRVSTREQVENYSIQAQTEKLTALCRSKDWDVYDIFVDGGYSGSNMNRPALNEMLSKLHEIDAVVVYRLDRLSRSQRDTITLIEEYFLKNNVEFVSLSETLDTSSPFGRAMIGILSVFAQLERETIRERMVMGKIKRIEAGLPLTTAKGRTFGYDVIDTRLYINEEEAKQLQLIYDIFEEEQSITFLQKRLKKLGFKVHTYNRYNNWLTNDLYCGYVSYKDKVHVKGIHEPIISEEQFYRVQEIFTRMGKNPNMNRDSASLLNNLVVCSKCGLGFVHRRKDAMSRDKKYHYRYYSCKTYKHIHELEKCGNKIWRADKLEELIINRVNSYSLVSRNVDKEDELDSLNEKLKIEHAKKKRLFDLYINGGCEVSELDSMMNDIDAQIDYYESQIEANEELRKSKKIQENLAHLATVDFDSLEFREKQLYLKSLINKIYIDGEQVTIEWL

SEQ ID NO: 4223 - protein, 485 aa, synthetic construct
MTKKVAIYTRVSTTNQAEEGFSIDEQIDRLTKYAEAMGWQVSDTYTDAGLSGAKLERPAMQRLINDIENKAFDTVLVYKLDRLSRSVRDTLYLVKDVFTKNEIDFISLNESIDTSSAMGSLFLTILSAINEFERENIKERMTMGKLGRAKSGKSMMWTKTAFGYYHNRKTGILEIVPLQATIVKQIFTDYLSGISLTKLRDKLNESGHIGKDIPWSYRSLRQTLDNPVYCGYIKFKGSLFEGMHKPIIPYETYLKVQKELEERQQQTYERNNNPRPFQAKYMLSGMARCGYCGAPLRIVLGHKRKDGSRTTKYHCANRFPRKTKGVTVYNDNKKCDSGTYDLSDLENTVIDNLIGFQENNDSLLKIINGNNRPILDTCSFEKQISQIDKKIQKNSDLYLNDFITMDELKERTDSLQAEKKLLKAKISENKFNDSTDVFELVKTQLGSIPINELSYDNKKKIVNSLVSKVDVTADSVDIIFKFQLA

SEQ ID NO: 4224 - protein, 485 aa, synthetic construct
MTKKVAIYTRVSTTNQAEEGFSIDEQIDRLTKYAEAMGWQVSDTYTDAGFSGAKLERPAMQRLINDIENKAFDTVLVYKLDRLSRSVRDTLYLVKDVFTKNKIDFISLNESINTSSAMGSLFLTILSAINEFERENIKERMTMGKLGRAKSGKSMMWTKTAFGYYHNRKTGVLEIVPLQATIVEQIFTDYLSGISLTKLRDKLNESGHIGKDIPWSYRTLRQTLDNPVYCGYIKFKDSLFEGMHKPIIPYETYLKVQKELEERQQQTYERNNNPRPFQAKYMLSGMARCGYCGAPLKIVLGHKRKDGSRTMKYHCANRFPCKTKGVTVYNDNKKCDSGTYDLSDLENTVIDNLIGFQENNDSLLKIINGNNQPILDTSSFKEQISQIDKKIQKNSDLYLNDFITMDELRDRTDSLQAEKKLLKAKISENKFDDSTGVFELVKTQLGSIPINELSYDNKKKIVNNLVSKVDVTADNVDIIFKFQLA

SEQ ID NO: 4225 - protein, 452 aa, synthetic construct
MKAAIYIRVSTREQVENYSIQAQTEKLTALCRSKDWDVYDIFIDGGYSGSNMNRPALNEMLGKLQEIDAVVVYRLDRLSRSQRDTITLIEEYFLKNNVEFVSLSETLDTSSPFGRAMIGILSVFAQLERETIRDRMVMGKIKRVEAGLPLTTAKGRTFGYDVIDTKLYINEEEAKQLQLIYDIFEEEQSITFLQKRLKKLGFKVRSYNRYNSWLTNDLYCGYVSYKDKVHVKGIHEPIISEEQFYRVQEIFTRMGKNPNMNRDSASLLNNLVVCSKCGLGFVHRRKDTVSRGKKYHYRYYSCKTYKHIHELEKCGNKIWRADKLEELIINRVSNYSFAGRNVDKEDELDSLNEKLKIEHAKKKRLFDLYINGSYEVSELDGMMNDIDAQINYYESQIEANKELKKNKKIQENLADLATVDFDSLEFRKKQLYLKSLINKIYIDGEQVTIEWL

SEQ ID NO: 4226 - protein, 485 aa, synthetic construct; identical to SEQ ID NO: 3984

SEQ ID NO: 4227 - protein, 452 aa, synthetic construct
MKAAIYIRVSTREQVENYSIQAQTEKLTALCRSKGWDVYDIFIDGGYSGSNMNRPALNEMLSKLHEIDAVVVYRLDRLSRSQRDTITLIEEYFLKNNVEFVSLSEALDTSSPFGRAMIGILSVFAQLERETIRDRMVMGKIKRIEAGLPLTTAKGRTFGYNVIDTKLYINEEEAKQLQLIYDIFEEEQSITFLQKRMKELGFKVRTYNRYNNWLTNDLYCGYVSYKDKVHVKGIHEPIISEEQFYRVQEIFTRMGKNPNMNRDSASLLNNLVVCSKCGLGYVHRRKDATSRDKKYHYRYYSCKTYKHIHELEKCGNKIWRADKLEELIINYVNNYSLASRDADKEDELDSLNEKLKIEHAKKKRLFDLYINGSYEVSELDSMMSDIDAQINYYESQIEANEELKKNKKIQENLADLATVDFDSLEFREKQLYLKSLINKIYIDGEQVTIEWL

SEQ ID NO: 4228 - protein, 485 aa, synthetic construct
MTKKVAIYTRVSTTNQAEEGFSIDEQIDRLTKYAEAMGWQVSDTYTDAGISGAKLERPAMQRLINDIENKAFDTVLVYKLDRLSRSVRDTLHLVKDVFTKNKIDFISLNESIDTSSAMGSLFLTILSAINEFERENIKERMTMGKLGRAKSGKSMMWTKTAFGYYHNRKTGILEIVPLQATIVEQIFTDYLSGISLTKLRDKLNEGGHIGKDIPWSYRTLRQTLDNPVYCGYIKFKDSLFEGMHKPIIPYETYLRVQKELEERQQQTYERNNNPRPFQAKYMLSGMARCGYCGAPLRIVLGHKRKDGNRTMKYHCANRFPRKTKGVTVYNDNKKCDSGTYDLRSLENTVIDNLIGFQENNDSLLKIINGNNHPILDTSSFKKQISQIDKKIQKNSDLYLNDFITMDELKDRTDSLQAEKKLLKAKISENKSNDSTDVFELVKTQLGSIPINELSYDNKKKIVNNLVSKVDVTADNVDIIFKFQLA

SEQ ID NO: 4229 - protein, 452 aa, synthetic construct
MKAAIYIRVSTREQVENYSIQAQTEKLTALCRSKDWEVYDIFIDGGYSGSNMNRPALIEMLSKLHEIDAVVVYRLDRLSRSQRDTITLIEEYFLKNNVEFVSLSETLDTSSPFGRAMVGILSVFAQLERETIRDRMVMGKIKRIEAGLPLTTAKGRTFGYDVIDTKLYINEEEAKQLQLIYDIFEEEQSITFLQRRLKELGFKVRTYNRYNNWLTNDLYCGYVSYKDKVHVKGIHEPIISEEQFYRVQEIFTRMGKNPNMNRDSASLLNNLVVCSKCGLGFVHRRKDTMSRGKKYHYRYYSCKTYKHTHELEKCGNKIWRANKLEELVINRVNNYSLASRNVDKEDELDSLNEKLKIEHAKKKRLFDLYINGSYEVSELDSMMNDIDAQINYYESQIEANEGLKRNKKIQENLTELATVDFDSLEFREKQLYLKSLINKIYIDGEQVTIEWL

SEQ ID NO: 4230 - protein, 469 aa, synthetic construct
MSYTTPVRAAVYLRISEDRSGEQLGVARQREDCLKLCDQRKWAPVEYLDNDVSASTGERRPAYEQMLADITAGKIAAVVAWDLDRLHRRPIELEAFMSLADEKRLALATVAGDVDLATPQGRLVARLKGCVAAHETEHKKARQRRAARQKAERGYPNWSKAFGYLPGPNGPEPDPRTAPLVKQAYADILAGASLGDMCRQWNDAGAFTITGRPWTTTALSKFLRKPRNAGLRAYRGARYGPVDRDAIVGKAQWSPLVDEATFWAAQAVLDAPGRAPGRKSVRRHLLTGLAGCGKCGNHLAGSYRTNGRVVYVCKACHGVSILADNIEPILYRIVAERLAMPDAVDLLRREIHDAAEAETIRLELETLYGELDRLAVERAEGLLTARQVKISTDIVNAKITKLQARQLDQERLRVLDGIPLGTPQVAGMIAELSPDRFRAVLDVLAEVVVQPAGKSGRIFNPERVQVNWR

SEQ ID NO: 4231 - protein, 469 aa, synthetic construct
MSYTTPVCAAVYLRISEDRSGEQLGVARQREDCLKLCGQHKWVPVEYLDNDVSASTGKRRPAYEQMLADITAGKIAAVVAWDLDRLHRRPVELEAFMSLADEKRLALATVAGDVDLATPQGRLVARLKGCVAAHETEHKKARQRRAARQKAERGLPNWSKAFGYLPGPNGPEPDPRTAPLVKQAYADILAGASLGDVCRQWNDAGAFTVTGRPWTTTALSKFLRKPRNAGLRAYKGARYGPVDRDAIVGKAQWSPLVDEATFWAAQAVLDAPGRAPGRKSVRRHLLTGLAGCGKCGNHLAGSYRTDGRVVYVCKACHGVAILADNIEPILYHIVAERLAMPDAVDLLRREIQDAAEAETIRLELETLNGELDRLAVERAEGLLTARQVKISTDIVNAKITKLQAHQLDQERLRVFDGIPLGTPQVAGMIAELSPDRFRAVLDVLAEVVVQPVGKSGRVFNPERVQVHWR

SEQ ID NO: 4232 - protein, 485 aa, synthetic construct
MTKKVAIYTRVSTTNQAEEGFSIDEQVDRLTKYAEAMGWQVSDTYTDAGCSGAKLERPAMQRLINDIENKAFDTVLVYKLDRLSRSVRDTLYLVKDVFTKNRVDFISLNESIDTSSAMGSLFLTILSAINEFERENIKERMTMGKLGRAKSGKSMMWTKTAFGYHHNRKTGILEIVPLQATIVEQIFTDYLSGISLTKLRDKLNESGHIGKDIPWSYRTLRQTLDNPVYCGYIKFKGSLFEGMHKPIIPYETYLKVQKELEERQQQAYERNNNPRPFQAKYMLSGMARCGYCGAPLRIVLGHKRKDGSRTMKYHCANRFPRKTKGVTVYNDNKKCDSGVYDLSDLENTVIDNLIGFQENNDSLLKIINGNNQPILDTSSFKKQISQIDKKIQKNSDLYLNDFITMDELKERTDSLQAEKKLLKAKISEDKFNDSTDVFELVKTQLGSIPINELSYDNKKKIVNSLVSKVDVTADHVDIIFKFQLA

SEQ ID NO: 4233 - protein, 452 aa, synthetic construct
MKAAIYIRVSTREQVENYSIQAQTEKLTALCRSKDWDVYDIFIDGGYSGSNMNRPALNEMLSKLHEIDAVVVYRLDRLSRSQRDTITLIEEYFLKNNVEFVSLSETLDTSSPFGRAMIGILSVFAQLERETIRDRMVMGKIKRIEAGLPLTTAKGRTFGYDVIDTKLYINEEEAKQLQLIYDIFEEEQSITSLQKRLKKLGFKVRTYNRYNNWLTNDLYCGYVSYKDEVRVKGIHEPIISEEQFYRVQEIFTRMGKNPNMNRDSASLLSSLVVCSKCGLGFVHRRKDTTSRGKKYHYRYYSCKTYKHTHELEKCGNKIWRADELEELIINRVNNYSLASRNVDKEDELDSLNEKLKIEHAKKKRLFDLYINGSYEVSELGSMMNDIDAQINYYESQIEANEELKRNKKIQENLANLATVDYDSLEFREKQLYLKSLINKIYVDGEQVTIEWL

SEQ ID NO: 4234 - protein, 452 aa, synthetic construct
MKAAIYIRVSTREQVENYSIQAQTEKLTALCRSKDWDVYDIFIDGGYSGSNMNRPALSEMLSKLHEIDAVVVYRLDRLSRSQRDTITLIEEYFLKNNVEFVSLSETLDTSSPFGRAMIGILSVFAQLERETIRDRMVMGKIKRTEAGLPLTTAKGRTFGYDVIDTKLYINEEEAKQLRLIYDIFEEEQSITSLQKRLKKLGFKVRTYNRYNSWLTNDLYCGYVSYKDKVHVKGIHEPIISEEQFYRVQEIFTRMGKNPNMNRDSASLLNNLVVCSKCGLGFVHRRKDTTSRGKKYHYRYYSCKTYKHTHELEKCGNKIWRADKLEELIVNRVNNYSFASRIVDKEDELDSLNEKLKIEHAKKKRLFDLYINGSYEVSELDCMMNDIDAQINYYESQIEANEELKKNKKIQENLADLATVDYDSLEFREKQLYLKSLINKIYVDGEQVTIEWL

SEQ ID NO: 4235 - protein, 485 aa, synthetic construct
MTKKVAIYTRVSTTNQAEEGFSIDEQTDRLTKYAEAMGWQVSDTYTDAGFSGAKLERPAMQRLINDIENKAFDTVLVYRLDRLSRSVRDTLYLVKDVFTKNKIDFISLSESIDTSSAMGSLFLTILSAINEFERENIKERMTMGKLGRAKSGKSMMWTKTAFGYYHNRKTGILEIVPLQATIVEQIFTDYLSGISLTKLRDKLNESGHIGKDIPWSYRTLRQTLDNPVYCGYIKFKDSLYEGMHKPIIPYETYLKVQKELEERQQQAYERNNNPRPFQAKYMLSGMARCGYCGAPLKIVLGHKRKDGSRTMKYHCANRFPRKTKGVTVYNDNKKCDSGTYDLSDLENTVIDNLTGFQENNDSLLKVINGNNQPILDTSSFREQISQIDKKIQKYSDLYLNDFITMDELKDRTDSLQAEKKLLKAKISEDKFNDSTDVFELVKTQLGSIPINELSYDNKKKIVNNLVSKVDVTADNVDIIFKFQLA

SEQ ID NO: 4236 - protein, 485 aa, synthetic construct
MTRKVAIYTRVSTTNQAEEGFSIDEQVDRLTKYAEAMGWQVSDTYTDAGSSGAKLERPAMQRLINDIENKAFDTVLVYKLDRLSRSVRDTLYLVKDVFTKNKIDFISLNESIDTSSAMGSLFLTILSAINEFERENIKERMTMGKLGRAKSGKSMMWTKTAFGYYHNRKTGILEIVPLQATIVEQIFTDYLSGISLTKLRDKLNESGHIGKDIPWSYRTLRQTLGNPVYCGYIRFKDSLFEGMHKPIIPYETYLRVQKELEERQQQAYERNNNPRPFQAKYMLSGMARCGYCGAPLRIVLGHKRKDGSRTMKYHCANRFPRETEGVTVYNGNKKCDSGTYDLSNLENTVIDSLVGFQENNDSLLKIINGNNQPILDTSSFKKQISQIDKKIQKNSDLYLNDFITMDELKGRTDSLQAEKELLKAKISENKFNDRTDVFELVKTQLGSIPINELSYDNKKKIVNNLVSKVDVTADNVDIIFKFQLA

SEQ ID NO: 4237 - protein, 485 aa, synthetic construct
MTRKVAIYTRVSTTNQAEEGFSIDEQIDRLTKYAEAMGWQVSDTYTDAGISGAKLERPAMQRLINDIENKAFDTVLVYKLDRLSRSVRDTLYLVKDVFTKNKIDFISLSESIDTSSAMGSLFLTILSAINEFERENIKERMTMGKLGRAKSGKSMMWTKTAFGYYHNRKTGILEIVPLQATIVEQIFTDYLSGISLTKLRDKLNESGHIGKDIPWSYRTLRQTLDNPVYCGYIKFKDSLFEGMHKPIVSYETYLKVQKELEKRQQQTYERNNNPRPFQAKYMLSGIARCGYCGAPLKIVLGHKRKNGSRTMKYHCANRFPRKTKGVTVYNDNKKCDSGTYDLSNLENTVIDNLVGFQEDNDSLLKIINGNSQPILDTSSLKKQISQIDKKIQKNSDLYLNDFITMDELKDRTDSLQAEKKLLTAKISENKFNDSTDVFELVKTQLGSIPINELSYDNKKKIVNNLVSKVDVTADNVDIIFKFQLA

SEQ ID NO: 4238 - protein, 469 aa, synthetic construct
MSYTTPVRAAVYLRISEDRSGEQLGVARQREDCLKLCGQRKWVPVEYLDNDVSASTGKRRPAYEQMLADITAGKIAAVVAWDLDRLHRRPVELEAFMSLADEKRLALATVAGDVDLATPQGRLVARLKGCVAAHETEHKKARQRRAARQKAERGHPNWSKAFGYLPGPNGPEPDPRTAPLVKQAYADILAGASLGDVCRRWNGAGAFTITGRPWTTTALSKFLRKPRNAGLRAYKGARYGPVDRDAIVGKAQWSPLVDEATFWAAQAVLDAPGRAPGRKSVRRHLLTGLVGCGKCGNHLAGSYRTDGRVVYVCKACHGVAILADNIEPILYHIVAERLAMPDAVDLLRREIHDAAEAATIRLELETLYGELDRLAVERAEGLLTARQVKISTDIVNAKITKLQARQLDQERLRVFDGIPLGTPQVAGMIAQLSPGRFRAVLDVLAEVVVQPVGKSGRIFNPERVQVNWR

SEQ ID NO: 4239 - protein, 485 aa, synthetic construct
MTKKVAIYTRVSTTNQAEEGFSIDEQIDRLTKYAEAMGWQVSDTYTDAGSSGAKLERPAMQRLINDIENKAFDTVLVYKLDRLSRSVRDTLYLVKDVFTKNKIDFISLNESIDTSSAMGSLFLTILSAINEFERENIKERMTMGKLGRAKSGKSMMWTKTAFGYYHNRKTGILEIVPLQATIVEQIFTDYLSGISLTKLRDKLNESGHIGKDIPWSYRTLRQTLDNPVYCGYIRFKDSLFEGMHKPIIPYETYLKVQKELEERQQQTYERNNNPRPFQAKYMLSGMARCGYCGAPLRIVLGRKRKDGSRTMKYHCANRFPRKTKGVTVYNDNKKCDSGTYDLSNLESTVIDNLIGFQEDNGSLLRIINGNNQPILDTSSLKEQISQIDKKIQKNSDLYLNDFITMDVLKDRTDSLQAEKKLLKAKISGNKLNDSTDVFELVKTQLGNIPINELSYDSKKKIVNNLVSKVDVTADNVNIIFKFQLA

SEQ ID NO: 4240 - protein, 485 aa, synthetic construct
MTRKVAIYTRVSTTNQAEEGFSIDEQVDRLTKYAEAMGWQVSDTYADAGFSGAKLERPAMRRLINDVENKAFDTVLVYKLDRLSRSVRDTLYLVREVFTKNKIDFISLSESIDTSSALGSLFLTILSAINEFERENIKERMTMGKLGRAKSGKSMMWTKTAFGYYHNRKTGILEIVPLQATIVEQIFTDYLSGISLTKLRDKLNESGHIGKDIPWSYRTLRQTLDNPVYCGYIKFKGSLFEGMHKPIIPYETYLKVQKELEERQQQTYERNNNPRPFQAKYMLSGMARCGYCGAPLKIVLGHRRKDGSRTMKYHCANRFPRKTKGVTVHNDNKKCDSGTYDLSNLENTVIDNLIGFQENNDSLLKIINGNNQPILDTSSFKEQISQIDKKIQKNSDLYLNDFITMDELRDRTDSLQAEKKLLEAKISENKFNDSTDVFELVKAQLGSIPINELSYDNKKKIVNNLVSKVDVTADSVDIIFKFQLA

SEQ ID NO: 4241 - protein, 469 aa, synthetic construct
MSYTTPVRAAVYLRISEDRSGEQLGVARQREDCLKLCGQRRWVPVEYLDNDVSASTGKRRPAYEQMLADITAGKIAAVVAWDLDRLHRRPIELEAFMSLADEKRLALATVAGDVDLATPQGRLVARLKGCVAAHETEHKKARQRRAARQKAERGHPNWSKAFGYLPGPNGPEPDPRTAPLVKQAYADILAGASLGDVCRQWNDAGAFTITGRPWTTTTLSKFLRKPRNAGLRAYKGARYGPVDRDAIVGKAQWSPLVDEATFWAAQAVLDAPGRAPGRKSVRRHLLTGLAGCGKCGNHLAGSYRTDGRVVYVCKACHGVAILADNIEPILYRIVAERLAMPDAADLLRREVHDAAEAETTRLELETLYGELDRLAVERAEGLLTARQVKISTDIVNAKITKLQACQLDQERLRVLDGIPLGTPQVTGTIAELSPDRFRAVLDVLAEVVVQPVGKCGRVSNPERVQVNWR

SEQ ID NO: 4242 - protein, 485 aa, synthetic construct
MTKKVAIYTRVSTTNQAEEGFSIDEQVDRLSKYAEAMGWQVSDTYTDAGFSGAKLERPAMQRLINDIENKAFDTVLVYKLDRLSRSVRDTLHLVKDVFTKNKIDFISLNECIDTSSAMGSLFLTILSAINEFERENIKERMTMGKLGRAKSGKSMMWTKTAFGYYHNRKTGILEVVPLQATIVEQIFTDYLSGISLTKLRDKLNESGHIGKDIPWSYRTLRQTLDNPVYCGYIKFKGSLFEGMHKPIISYETYLKVQKELEERQQQTYERNNNPRPFQAKYMLSGVARCGYCGAPLKIVLGHKRKDGSRTMKYHCANRFPRKTKGITVYNDNKKCDSGTYDLSNLENTVIDNLIGFQENNDSLLKIINGNNQPILDTSSFKKQISQIDKKIQKISDLYLNDFITMDELKDRTDSLQAEKKLLKAKISENKFNDSTDVFELVKTQLGSIPISELSYDNKKKIVNSLVSKVGVTADNVDIIFKFQLA

SEQ ID NO: 4243 - protein, 452 aa, synthetic construct
MKAAIYIRVSTREQVENYSIQAQTEKLTALCRSKDWDVYDIFIDGGYSGSNMNRPALNEMLSKLHEIDAVVVYRLDRLSRSQRDTITLIEEYFLKNNVEFVSLSETLDTSSPFGRAMIGILSVFAQLERETIRDRMVMGRIKRVEAGLPLTTAKGRTFGYDVVDTKLYINEEEAKQLQLIYDIFEEEQSITFLQKRLKELGFKVRTYNCYNNWLTNDLYCGYVSYKDKVHVKGIHEPIISEEQFYRVQEIFTRMGKNPNMNRDSASLLNNLVVCSKCGLGFVHRRKDTMSRGKKYHYRYYSCKTYKHTHELEKCGNKIWRADKLEELIINRVNNYSFASRNVDKEDELDSLNEKLKIEHAKKRRLFELYINGSYEVSELGSMMSDIDAQINYYESQIEAKGELKKNKKIQENLADLATVDFDSLEFREKQLYLKSLINKIYIDGEQVTIEWL

SEQ ID NO: 4244 - protein, 469 aa, synthetic construct
MSYTTPVRAAVYLRISEDRSGEQLGVARQREDCLELCDQRKWEPVEYLDNDVSASTGKRRPAYEQMLADITAGKITAVVAWDLDRLHRRPIELEAFMSLADEKRLALATVAGDVDLATPQGRLVARLKGSVAAHETEHKKARQRRAARQKAERGHPNWSKAFGYLPGPNGPEPDPRTAPLVKQAYADILAGASLGDVCRRWNDAGAFTITGRPWATTTLSKFIRKPRNAGLRTYKGARYGPVDRDAIVGKAQWSPLVDEATFWAAQAVLDAPGRAPGRKSVRRHLLTGLAGCGKCGNHLAGSYRTDGRVVYVCKACHGVAILADNIEPILYRIVAERLAMPDAVDLLRREIQDAAEAETIRLELEILYGELDRLAVERAEGLLTARQVKISSDIVNAKITKLQARQLDQERLRVLDGIPLGTPQVAGMIAELSPDRFRAVLDVLAEVVVQPVGKSGRIFNPERVQVNWR

SEQ ID NO: 4245 - protein, 469 aa, synthetic construct
MSYTTPVRAAVYLRISEDRSGEQLGVARQREDCLKLCDQRKWAPVEYLDNDVSASTGKRRPAYEQMLADITAGKIAAVVAWDLDRLHRRPIELEAFMSLADEKRLALATVAGDVDLATPQGRLVARLKGSVAAHETEHKKARQRRAARQKAERGYPNWSKAFGYLPGPNGPEPDPRTAPLVKQAYADILAGASLGDVCRQWNAAGAFTITGRPWTTAALSKFLRKPRNAGLRAYKGARYGPVDRDAIVGKAQWSPLVDEATFWAAQAVLDAPGRAPGRKSVRRHLLTGLAGCGKCGYHLSGSYRTDGRVVYVCKACHGVAILADNIEPILYHIVAGRLAMPDAVDLLRREIHDAAEAEAIRLELETLYGELDRLAVERAEGLLTARQVKISTDIVNAKITKLQARQLDQERLRVFDGVPLGTPQVAGMIAKLSPDRFRAVLGVLAEVVVQPVGKSGRIFNPERVQVNWR

SEQ ID NO: 4246 - protein, 469 aa, synthetic construct
MSYTTPVRAAVYLRISEDRSGEQLGVARQREDCLKLCGQRKWVPVEYLDNDVSASTGKRRPAYEQMLADITAGKIAAVVAWDLDRLHRRPIELEAFMSLADEKRLALATVAGDVDLATPQGRLVARLKGCVAAHETEHKKARQRRAARQKAERGHPNWSKAFGYLPGPNGPEPDPRTASLVKQAYADILAGASLGDVCRQWNDAGALTITGRPWTTTTLSKFLRKPRNAGLRAYKGARYGPVDRDAIVGKAQWSPLVDEATFWAAQAVLDAPGRAPGRKSVRRHLLTGLAGCGKCGNHLAGSYRTDGRVVYVCKACHGVAILAENIEPVLYHIVAERLAMPDAMDLLRREIHDAAEAETIRLELETLYGELDRLAVERAEGLLTARQVKISTDIVNAKITKLQARQLDQERLRVFDGIPLGTPQVAGMIAELSPDRFRAVLDVLAEVVVQPVGKSGRIFNPERVQVNWR

SEQ ID NO: 4247 - protein, 469 aa, synthetic construct
MCYTTPVRAAVYLRISEDRSGEQLGVARQREDCLKLCDQRKWVPMEYLDNDVSASTGKHRPAYEQMLADITAGKIAAVVAWDLDRLHRRPIELEAFMSLADEKRLALATVAGDVDLATPQGRLVARLKGSVAAHETEHKKARQRRAARQKAERGHPNWSRAFGYLPGPNGPEPDPRTAPLVKRAYADILAGASLGDVCRQWNDAGAFTITGRPWTSTTLSKFLRKPRNAGLRTYKGARYGPVDRDAIVGKARWSPLVDEATFWAAQAVLDAPGRAPGRKSVRRHLLTGLAGCGKCGNHLAGSYRTDGRVVYVCKACHGVAILADNIVPILYHIVAERLAMPDAVDLLRREIHDAAEAETIRLELETLYGELDRLAVERAEGLLTARQVKISTDIVNAKITKLQARRQDQERLRVLGGIPLGTPQVAGMIAELSPDRFRAVLDVLAEVVVQPVGKSGRIFNPERVQVNWR

SEQ ID NO: 4248 - protein, 452 aa, synthetic construct
MKAAIYIRVSTREQVENYSIQAQTEKLTALCRSKDWDVYDIFIDGGYSGSNMNRPALNEMLSKLHEIDAVVVYRLDRLSRSQRDTITLIEEYFLKNNVEFVSLSETLDTSSPFGRAMIGILSVFAQLERETIRDRMVMGKIKRVEAGLPLTTAKGRTFGYDVIDTKLYINEEEAKQLQLIYDIFEEEQSITFLQKRLKKLGFKVRTYNRYSSWLTNDLYCGYVSYKDKVHVKGIHEPIISEEQFYRVQEIFTRMGKNPNMNRDSASLLNNLVVCSKCGLGFVHRRKDTMSRGKKYHYRYYSCKTYKHTHELERCGNKIWRADKLEELIINRVNNYSLASRNVDKEDELDSLNEKLKIEHAKKKRLFDLYINGSYEVSELDSMMNDIDAQISYYESQIEANEELIKNKKIQENLANLATVDYDSLGFREKQLYLKGLINKIYIDGEQVTIEWL

SEQ ID NO: 4249 - protein, 452 aa, synthetic construct
MKAAIYIRVSTREQVENYSIQAQTEKLTALCRSKDWDVYDIFIDGGYSGSNMNRPALNEMLSKLHEIDAVVVYRLDRLSRSQRDTITLIEEYFLKNSVEFVSLSETLDTSSPFGRAMIGILSVFAQLERETIRDRMVMGKIKRIEAGLPLTTAKGRTFGYDVIDTKLYINEEEARQLRLIYDIFEEERSITSLQKRLKKLGFKVRTYNRYNNWLTNDLYCGYVSYKDKVHVKGIHEPIISEEQFYRVQEIFTRMGKNPSMNRDSASLLNNLVVCSKCGLGFVHRRKDTTSRGKKYHYRYYSCKTYKHIHELEKCGNKIWRADKLEALIIDRVDNYSFASRSVDKEDELDSLNEKLKIEHAKKKRLFDLYINGSYEVSELDSMMNDIDAQINYYESQIEANEGLKKDKKIQENLANLATMDYDSLEFREKQLYLKSLINKIYIDGEQVTIEWL

SEQ ID NO: 4250 - protein, 452 aa, synthetic construct
MKAAIYIRVSTREQVENYSIQAQTEKLTALCRSKDWDVYDIFIDGGYSGSNMNRPALNEMLSKLHEIDAVVVYRLDRLSRSQRDTITLIEEYFLKNNVEFVSLSETLDTSSPFGRAMIGILSVFAQLERETIRDRMVMGKIKRIEAGLPLTTAKGRTFGYDVIDTKLYINEEEAKQLQLIYDVFEEEQSITFLQKRLKKLGFKVRTYSCYNNWLTNDLYCGYVSYKDKVHVKGIHEPIISEEQFYRVQEIFTRMGKNPNMNRDSASLLNNLVVCSKCGLGFVHRRKDTTSRGKKYHYRYYSCKTYKYTHELEKCGNKIWRADKLEELIIDRVNNYGIASRNVDKEDELDSLNEKLKIEHGKKKRLFDLYINGSYEVSELDSMMNDIDAQINYYESQIEANEELKKSKKIQENLANLATVDYDSLEFREKQLYLKSLINKIYIDGEQVTIEWR

SEQ ID NO: 4251 - protein, 485 aa, synthetic construct
MTKRVAIYTRVSTTNQAEEGFSIDEQIDRLTKYAEAMGWQVSDTYTDAGFSGAKLERPAMQRLINDIENKAFDTVLVYKLDRLSRSVRDTLYLVKDVFTKNKIDFISLNESIDTSSAMGSLFLTILSAINEFERENIKERMTMGKLGRAKSGKSMMWTKTAFGYYHNRKTGILEIVPLQATIVEQIFTDYLSGISLTKLRDKLNESGHIGKDIPWSYRTLRQTLDNPVYCGYIKFKDSLFEGMHKPIIPYETYLKVQKELEERQQQTYERNNNPRPFQAKYMLSGMARCGYCGAPLRIVLGRKRKDGSRTMKYHCANRFPRKTKGVTVYNDNKKCDSGIYDLSSLEHTVIDNLIGFQENHDSLLKIIDGNNQPILGTSSFKKQISQIDKKIQKNSDLYLNDFITMDELKDRTESLQTEKKLLEAKISENKFNDSTDVFELVKTQLGSIPINELSYDNKKKIVNNLVSKVDVTADNVDIIFKFQLA

SEQ ID NO: 4252 - protein, 452 aa, synthetic construct
MKAAIYIRVSTQEQVGNYSIQAQTEKLTALCRSKDWDVYDIFVDGGYSGSNMNRPALNEMLSKLHEIDAVVVYRLDRLSRSQRDTTTLIEEYFLKNNVEFVSLSETLDTSSPFGRAMIGILSVFAQLERETIRDRMVMGKIKRIEAGLPLTTAKGRTFGYDVIDTRLYINEEEAKQLQLIYDIFEEEQSITFLQKRLKKLGFRVRSYNRYNNWLTNDLYCGYVSYKDKVHVKGIHEPIISEEQFYRVQEIFTRMGKNPNMNRDSASLLNNLVVCSKCGLSFVHRSKDTMSRGKKYHYRYYSCKTYKHTHELEKCGNKTWRADKLEELVINRVNNYSLASRNVDKEEELDSLNEKLKIEHARKKRLFDLYINGSYEVSELDSMMNDIDAQINYYESQIEASEELKKNKKIQENLADLATVDFDSLEFREKQLYLKSLINKIYIDGEQVTIEWL

SEQ ID NO: 4253 - protein, 452 aa, synthetic construct
MKAAIYIRVSTREQVENYSIQAQTEKLTALCRSKDWDVYDIFIDGGYSGSNMNRPALNEMLSKLHEIDAVVVYRLDRLSRSQRDTITLIEEYFLKNNVEFVSLSETLDTSSPFGRAMIGILSVFAQLERETIRDRMVMGKIKRIEAGLPLTTAKGRTFGYDVIDTKLYINEEEAKQLQLIYDIFEEEQSITFLQKRLKKLGFKVRTYSRYNSWLTNDLYCGYVSYKDKVHVKGIHEPIISEEQFYRVQEIFTRMGKNPNMNRDSASLLNNLVVCSKCGLGFVHRRKDTMSRGKKYHYRYYSCKTYKHIHELEKCGNKIWRADKLEELIINRVNNYSFASRNVDKEDELDSLNEKLKIEHAKRKRLFDLYINGSYEVSELDSMMSDIDAQINYYESQIEANEELRKNKKIQKNLADLATVDYDSLEFREKQLYLKSLINKIYIDGEQVTIEWL

SEQ ID NO: 4254 - protein, 469 aa, synthetic construct
MSYTTPVRAAVYLRISEDRSGEQLGVARQREDCLKLCGQRKWVPVEYLDNDVSASTGKRRPAYEQMLADITEGKIAAVVAWDLDRLHRRPIELEAFMSLADEKRLALATVAGDVDLATPQGRLVARLKASVAAHETEHKKARQRRAARQKAERGYPNWSKAFGYLPGPNGPEPDPRTAPLVKQAYADILAGASLGDVCRQWNDAGAFTITGRPWTTTTLSKFLRKPRNAGLRAYKGARYGPVDRDAIVGKAQWSPLVDEATFWAAQAVLDAPGRAPGRKSVRRHLLTGLAGCGKCGSHLAGGYRTDGQVVYVCKACHGVAILADNIEPILYRIVAERLAMPDAVDLLRREVHDAAEAETIRLELETLHGELDRLAVERAEGLLTARQVKISTDIVNAKIAKLQARQLDQERLRVFDGIPLGTPQVAGMITELSPDRFRAVLDVLAEVVVRPVGKSGRIFNPERVQVNWR

SEQ ID NO: 4255 - protein, 452 aa, synthetic construct
MKAAIYIRVSTQEQVDNYSIQAQTEKLTALCRSKDWDVYDIFIDGGYSGSNMNRPALNEMLSKLHEIDAVVVYRLDRLSRSQRDTITLIEEYFLKNNVEFVSLSETLDTSSPFGRAMIGILSVFAQLERETIRDRMVMGKIKRIEAGLPLTTAKGRTYGYDVIDTKLYINEEEAKQLRLIYDIFEEEQSITFLQKRLKKLGFKVRTYSCYNNWLTNDLYCGYVSYKDKVHVKGIHEPIISEEQFYRVQEIFTRMGKNPNMNRDSASLLNNLVVCSKCGLGFVHRRKDTMSRGKKYHYRYYSCKTYKHTHELEKCGNKIWRADKLEELIISRVNNHCFASRNVDKEGELDSLNEKLKIEHTKKKRLFDLYVNGSYEVSELDSMMNDIDAQINYYESQIEANEELKRNKKIQESLANLATVDYDSLEFREKQLYLKSLINKIYIDGEQVTIEWL

SEQ ID NO: 4256 - protein, 485 aa, synthetic construct
MTKKVAIYTRVSTTNQAEEGFSIDEQIDRLTKYAEVMGWQVSDTYTDAGFSGAKLERPAMQRLINDIETKAFDTVLVYKLDRLSRSVRDTLYLVKDVFTKNKIDFISLNESIDTSSAMGSLFLTILSAINEFERENIKERMTMGKLGRAKSGKSMMWTKTAFGYYHNRKTGILEIVPLQATIVEQIFTDYLSGISLTKLRDKLNESGHIGKDIPWSYRTLRQTLDNPVYCGYIKFKDSLFEGMHKPIIPYETYLKVQKELEERQQQTYERNNNPRPFQAKYMLSGMARCGYCGAPLKIVLGRKRKDGSRTMKYHCANRFPRKTRGVTVYNDNKKCDSGTYDLSNLENTVIDNLIGFQESDDSLLKVINGNDQPILDTSSFEEQISQIDKKIQKNSDLYLNDLITMDELKDRTDSLQAEKKLLKAKISENKFNDSTDVFELVKTQLGGIPINELSYDNKKKIVNNLVSKVDVTADNVDIIFKFQLA

SEQ ID NO: 4257 - protein, 452 aa, synthetic construct
MKAAIYIRVSTREQVENYSIQAQTEKLTALCRSKDWDVYDIFIDGGYSGSNMNRPALNEMLSKLHEIDAVVVYRLDRLSRSQRDTITLIEEYFLKNNVEFVSLSETLDTSSPFGRAMIGILSVFAQLERETIRDRMVMGRIKRIEAGLPLTTAKGRTFGYDVIDTKLYINEEEARQLQLIYDIFEEEQSITFLQKRLKKLGFKVRTYSRYNSWLTNDLYCGYVSYKDKVHVKGVHEPIISEEQFYRVQEIFTRMGKNPNMNRDSASLLNNLVVCSKCGLGFVHRRKDTTSRGKKYHYRYYSCKTYKHTHELEKCGNKIWRADKLEELIINRVNSYSFASRNVDKEDGLDSLNEKLKIEHAKKKRLFDLYINGSYEVSELDSMMNDVDARINYYESQIEANEELKKSKKVQENLADLATVDYDSLEFREKQLYLKSLINKIYIDGEQVTIEWL

SEQ ID NO: 4258 - protein, 469 aa, synthetic construct
MSYTIPVRAAVYLRISEDRSGEQLGVARQREDCLKLCSQRKWVPVEYLDNDVSASTGKRRPAYERMLADITAGKIAAVVAWDLDRLHRRPIELEAFMSLADEKRLALATVAGDVDLATPQGRLVARLKGSVAAHETEHKKARQRRAARQKAERGHPNWSKAFGYLPGPNGPEPDPRTAPLVKQAYADILVGASLGDVCRQWNDAGAYTITGRPWTTTALSKFLRKPRNAGLRAYKGARYGPVDRDAIVGKAQWSPLVDEETFWAAQAVLDAPGRAPGRKSVRRHLLTGLASCGKCGSHLAGSYRTDGRVVYVCKACHGVAILADNIEPTLYHIVAERLAMPGAVDLLRREIHDAAEAETIRLELETLYGELDRLAVERAEGLLTARQVKISTGIVNAKITKLQARQLDQERLRVFGGIPLGTPQVAGMIAELSPDRFRAVLDALAEVVVQPVGKSGRIFNPERVQVNWR

SEQ ID NO: 4259 - protein, 452 aa, synthetic construct
MKAAIYIRVSTREQVENYSIQAQTEKLTALCRSKDWDVYDIFIDGGYSGSNTNRPALNEMLSKLHEIDAVVVYRLDRLSRSQRDTITLIEEYFLKNNVEFVSLSETLDTSSPFGRAMIGVLSVFAQLERETIRDRMVMGKIKRIEAGLPLTTAKGRTFGYDVIDTKLYINEEEAKQLRLIYDIFEEEQSITFLQKRLKKLGFKVRTYSRYNNWLTNDLYCGYVSYKDKVHVKGIHEPIISEEQFYRVQEIFTRMGKNPNMNRDSASLLNNLVVCSKCGLSFVHRRKDTTSRGKKYHYRYYSCKTYKHTHELEKCGNKIWRADKLEELIINRVNDHSFASRNVDKEDELDRLNEKLKIEHAKKKRLFDLYINGSYEVSELDGMMNVIDAQINYYESQIEANEELKKNKKIQETLADLATVDFDSLEFREKQLYLKSLINKIYIDGEQVTIDWL

SEQ ID NO: 4260 - protein, 452 aa, synthetic construct
MKAAIYIRVSTREQVENYSIQAQTEKLTALCRSKDWDVYDIFIDGGYSGSNMNRPALNEMLSKLHEIDAVVVYRLDRLSRSQRDTITLIEEYFLKNNVEFVSLSETLDTSSPFGRAMIGILSVFAQLERETIRDRMVMGKIKRVEAGLPLTTAKGRTFGYDVIDTKLYINEEEAKQLQLIYDIFEEEQSITLLQKRLKKLGFKVRTYSRYNNWLTNGLYCGYVSYKDKVHVKGIHEPIISEEQFYRVQEIFARMGKNPNMNRDSASLLNSLVVCSKCGLGFVHRRKDTKSRGKKYHYRYYSCKTYKHIHELEKCGNKIWRADKLEELIINRVNNYSFASRNVDKAEELDSLNEKLKVEHAKKKRLFDLYINGSYNVSELDSMMNDIDAQINYYVSQIEANEELKKNKKIQENLAGLATADFDSLEFREKQLYLKSLINKIYIDGEQVTIEWL

SEQ ID NO: 4261 - protein, 452 aa, synthetic construct
MKAAIYIRVSTREQVENYSIQAQTEKLTALCRSKDWDVYDIFIDGGYSGSNMNRPALNEMLSKLHEIDAVVVYRLDRLSRSQRDTITLIEEYFLKNNVEFVSLSETLDTSSPFGRAMIGILSVFAQLERETIRDRMVMGKIKRIEAGLPLTTAKGRTFGYDVVDTRLYINEEEAKQLQLIYDIFEEEQSITFLQKRLKKLGFKVRTYNRYNSWLTNDLYCGYVSYKDKVHVKGIHEPIISEEQFYRVQEIFTRMGKNPNMNRDSASLLNNLVVCSKCGLGFVHRRKDTVSRGKKYHYRYYSCKTYKHIHELEKCGNKIWRADKLEELIINRVNNHSIASRNVDKKDELDSLNGKLKIEHAKKKRLFDLYINGSYEVSELDSMMNDIDAQINYYESQIEANEELKKDKKIQEGLANLATVDYDSLEFREKQLYLRSLINKIYIDGEQVTIEWL

SEQ ID NO: 4262 - protein, 469 aa, synthetic construct
MSYTTPVRAAVYLRISEDRSGEQLGVARQREDCLKLCCQRKWVPVEYLDNDVSASTGKRRPAYEQMLADITAGKIAAVVAWDLDRLHRRPIELEAFMSLADEKRLALATVAGDVDLATPQGRLVARLKGSVAAHETEHKKARQRRAARQKAERGLPNWSKAFGYLPGPNGPEPDPRTAPLVKQAYADILAGASLGDVCRQWNDAGAFTITGRPWTTTTLSKFLRKPRNAGLRAYKGARYGPVDRDAIVGKAQWSPLVDEATFWAAQAVLDAPGRAPGRKSVRRHLLTGLAGCGKCGNHLAGSYRTDGRVVYVCKACHGVAILADNIEPILYHIVAERLAMPDAVDLLCREIHDAAEAETTRLELGALYGELDRLAVERAEGLLTARQVKISTDIVNAKITELQARQLDQERLRVFDGIPLGTPQVAGMIAVLSPDRFRAVLDVLAEVVVQPVGKNGRIFNPERVQVNWR

SEQ ID NO: 4263 - protein, 452 aa, synthetic construct
MKAAIYIRVSTREQVENYSIQAQTEKLTALCRSKDWDVYDIFIDGGYSGSNMNRPALNEMLSKLHEIDAVVVYRLDRLSRSQRDTITLIEEYFLKNNVEFVSLSETLDTSSPFGRAMIGILSVFAQLERETIRDRTVMGKIKRIEAGLPLTTAKGRTFGYDVIDTKLYINEEEAKQLQLIYDIFEEEQSITFLQKRLKKLGFKVRTYSCYNNWLTNDLYCGYVSYKDKVHVKGIHEPIISEEQFYRVQEIFARMGKNPNMNRDSASLLNNLVVCGKCGLGFVHRRKDTTSRGKRYHYRYYSCKTYKHIHELERCGNKIWRADKLEELIINRVKSYSLASRNVDKEGELDSLNEKLKIEHAKKKRLFDLYVNGSFEVSELDSMMNDIDAQVNYYESQIEANEELKKNKKIQENLAGLATVDFDSLEFREKQLYLKSLINKIYIDGEQVTIEWL

SEQ ID NO: 4264 - protein, 469 aa, synthetic construct
MSYTTPVRAAVYLRISEDRSGEQLGAARQREDCLELCGQRKWEPVEYLDNDVSASTGKRRPAYEQMLADITAGKIAAVVAWDLDRLHRRPIELEAFMSLADEKRLALATVAGDVDLATPQGRLVARLKGSVAAHETEHKRARQRRAARQKAERGHPNWSKAFGYLPGPTGPEPDPRTAPLVKQAYADILAGASLGDVCRQWNDAGAFTITGRPWTTTTLSKFLRKPRNAGLRAYKGARYGPVDRDAIVGKAQWSPLVDEATFWAAQAVLDAPGRAPGRKSVRRHLLTGLAGCGKCSNHLAGSYRTDGRVVYVCKACHGVAILADNIEPILYHIVAERLAMPDAVDLLRREIHDATEAETIRQELETLYGELDRLAVERAEGLLTARQVKISTDIVNAKITKLQARQLDQERLRVFDGIPLGTPQVAGVIAELSPNRFRAVLDVLAEVVVRPVGKSGRLFNPERVQVNWR

SEQ ID NO: 4265 - protein, 452 aa, synthetic construct
MKAAIYIRVSTREQVENYSIQAQTEKLTALCRSKDWDVYDIFIDGGCSGSNMNRPALNEMLSKLHEIDAVVVYRLDRLSRSQRDTITLIEEYFLKNNVEFVSLSETLDTSSPFGRAMIGILSVFAQLERETIRDRMVMGKIKRIEAGLPLTTAKGRTFGYDVIDTKLHINEEEAKQLRLIYDIFEEEQSITLLQKRLKKLGFKVRTYNRYNSWLTNDLYCGYVSYKDKVHVKGIHEPIISEEQFYRVQEIFTRMGKNPNMNRDSASLLNNLVVCSKCGLGFVHRRKDTVSRGKKYHYRYYSCKTYKHTHELEKCGNKIWRADKLEELIINRVNNYSFASRNVDKEDELDSLNEKLRTEHAKRKRLFDLYINGSYEVSELDSMMNDIDAQINYYESQIEANEELKKNKKIQENLANLASVDYDSLEFREKQLYLKSLINKIYIDGEQVTVEWL

SEQ ID NO: 4266 - protein, 469 aa, synthetic construct
MSYTTPVRAAVYLRISEDRSGEQLGVARQREDCLKLCDQRKWVPVEYLDNDVSASTGRRRPAYEQMLADITAGKIAAVVAWDLDRLHRRPIELEAFMSLADEKRLALATVAGDVDLATPQGRLVARLKGSVAAHETEHKKARQRRAARQKAERGHPNWSKAFGYLPGPNGPEPDPRTAPLVKQAYADILAGASLGDVCRQWNAAGAFTITGRPWTTTTLSKFLRKPRNAGLRAYKGARYGPVDRDAIVGKAQWSPLVDEATFWAAQAVLDAPGRAPGRKSVRRHLLTGLAGCGKCGNHLAGSYRTDGRVVYVCKACHGVTILADNIEPILYHIVAERLAMPDAVDLLRREIHDAAEAEAIRLELETLHGELDCLAVERAEGLLTARQVKISTDIVSAKITKLQTRQLDQERLRVLDGIPLGTPQVAGMIAELSPDRFRAVLDVLAEVVVQPVGKGGRIFNPKRVQVNWR

SEQ ID NO: 4267 - protein, 452 aa, synthetic construct
MKAAIYIRVSTREQVENYSIQAQTEKLTALCRSKDWDVYDIFIDGGYSGSNMNRPALNEMLSKLHEIDAVVVYRLDRLSRSQRDTITLIEEYFLKNNVEFVSLSETLDTSSPFGRAMIGILSVFAQLERETIRDRMVMGKIKRIEAGLPLTTAKGRTFGYDVIDTKLYINEEEAKQLQLIYDIFEEEQSITSLQKRLKKLGFKVRSYNRYNNWLTNDLYCGYVSYKDKVHVKGIHEPIISEEQFYRVQEIFARTGKNPNMNRDSASLLNNLVVCSKCGLGFVHRRKDAMSRDKKYHYRYYSCKTYKHIHELEKCGNKIWRADELEELIINRVNNYSLASRNVDKEDELDSLNEKLKTEHAKRKRLFDLYINGNYEVCELDSMMNDIDAQISYYESQIEATEELKKNKKIQENLAELATVDFDSLEFREKQLYLKSLINKIYIDGEQVTIEWL

SEQ ID NO: 4268 - protein, 452 aa, synthetic construct
MKAAIYIRVSTREQVENYSIQAQTEKLTALCRSKDWDVYDIFIDGGYSGSNMNRPALSEMLSKLHEIDAVVVYRLDRLSRSQRDTITLIEEYFLKNNVEFVSLSETLDTSSPFGRAMIGILSVFAQLERETIRDRMVMGKIKRIEAGLPLTTAKGRTFGYDVIDTKLYINEEEAKQLRLIYDIFEEERSITFLQKRLKELGFKVHTYNRYNNWLTNDLYCGYVSYKDKVHVKGIHEPIISEEQFYRVQEIFTRMGKNPNMNRDSASLLNNLVVCGKCGLGFVHRRKDAMSRGKEYHYRYYSCKTYKHIHELEKCGNKIWRADKLEELVINRVSSYSVASRNVDKEDELGSLNEKLKIEHAKKKRLFDLYINGSYEMSELDSMMNDIDAQINYYESQIEANEELEKNKKIQENLAYLATVDFDSLEFREKQLYLKSLINKIYIDGEQVTIEWL

SEQ ID NO: 4269 - protein, 485 aa, synthetic construct
MTKKVAIYTRVSTTNQAEEGFSIDEQIDRLTKYAEAMGWQVSDTYTDAGFSGAKLERPAMQRLINDIENKAFDTVLVYKLDRLSRSVRDTLYLVKDVFTKNKVDFISLNESINTSSAMGSLFLTILSAINEFERENIKERMTMGKLGRAKSGKSMMWTKTAFGYYHNRKTGILEIVPLQATIVEQIFTDYLSGISLTKLRDKLNESGHIGKDIPWSYRTLRQTLDNPVYCGYIKFKGSLFGGMHKPIIPYETYLKVQKELEERQQQTYERNNNPRPFQAKYMLSGMARCGYCGAPLKIVLGHKRKDGSRTMKYHCANRYPRKTKGVTVYNDNKKCDSGTYDLSNLENTVIDNLIGFQENNDSLLKIINGDNLPILDTSSFKEQISQIDKKIQKNSDLYLNDFITMDELRDRTDSLQAEKKLLKAKISENKFNDSTNVFELVKTQLGSIPINELSYDDKKKIVNNLVSKVDVTADNVDIIFKFQLA

SEQ ID NO: 4270 - protein, 485 aa, synthetic construct
MTKKVAIYTRVSTTNQAEEGFSIDEQIDRLTKYTEAMGWQVSGTYTDAGLSGAKLERPAMQRLINDIENKAFDTVLVYKLDRLSRSVRDTLYLVKDVFTKNKIDFISLNESIDTSSAMGSLFLTILSAINEFERENIKERMTMGKLGRAKSGKSMMWTKTAFGYYHNRKTGILEIVPLQATIVEQIFTDYLSGISLTKLRDKLNESGHIGKDIPWSYRTLRQTLDNPVYCGYIKFKDSLFEGVHKPIIPYETYLRVQKELEERQQQTYERNNNPRPFQAKYMLSGMARCGYCGAPLKIVLGHKRKDGSRTMKYHCANRFPRKTKGVTVYNDNKKCDSGTYDLSNLENTVIDNLIGFQENNDSLLKVINGNNQPILDTSSLKKQISQIDKKIQKNSDLYLNDFITMDELKDRTDSLQAEKKLLEAKISENRFNESTDVFELVNTQLGSIPINELSYDNKKKIVNNLVSKVDVTADNVDIIFKFQLA

SEQ ID NO: 4271 - protein, 485 aa, synthetic construct
MTKKVAIYTRVSTTNQAEEGFSIDEQVDRLTKYAEAMGWQVSDTYTDAGFSGAKLERPAMQRLINDIENKAFDTVLVYKLDRLSRSVRDTLYLVKDVFTKNKIDFISLNESINTSSAMGSLFLTILSAINEFERENIKERMTMGKLGRAKSGKSMMWTKTAFGYYHNRKTGILEIVPLQATIVEQIFTDYLNGISLTKLRDKLNESGHIGKDIPWSYRTLRQTLDNPVYCGYIKFKDSLFEGMHKPIIPYETYLKVQRELEERQQQTYERNNNPRPFQAKYMLSGMARCGYCGAPLRIVLGRKRKDGGRTMKYHCANRFPRKTKGVTVYNDNKKCDSGAYDLSNLENTVIDNLVGFQENNDSLLKIINGNNQPILDTSSLIKQISQIDKKIQKNSDLYLNDFITMDELKARTESLQAEKKLLKAKISENKFNDSTDVFELVKTQLGGIPINELSYDDKKKIVNSLVSKVDVTADNVDIIFKFQLA

SEQ ID NO: 4272 - protein, 452 aa, synthetic construct
MKAAIYIRVSTREQVENYSIQAQTEKLTALCRSKDWDVYDIFIDGGYSGSNMNRPALNEMLSKLHEIDAVVVYRLDRLSRSQRDTITLIEEYFLKNNVEFVSLSETLDTSSPFGRAMIGILSVFAQLERETIRDRMVMGKIKRIEAGLPLTTAKGRTFGYDVIDTKLYINEEEAKQLQLIYDIFEEEQSITFLQKRLRKLGFKVRAYSRYNSWLTNDLYCGYVSYKDKVRVKGIHEPIISEEQFRRVQEIFTRTGKNPNMNRDSASLLSGLVVCSKCGLGFVHRRKDTVSRGKKYHYRYYSCKTYKHTHELEKCGNKIWRADRLEELIINRVNNYSFAGRNVDKEDELDSLNEKLEIELARKKRLFDLYISGSYEVSELDSMMNDIDAQINYYESQIEANEELKKNKKIQENLAYLATVDFDSLEFREKQLYLKSLINKIYVDGEQVTIEWL

SEQ ID NO: 4273 - protein, 452 aa, synthetic construct
MKAAIYIRVSTQEQVGNYSIQAQTEKLTALCRSKDWDVYDIFVDGGYSGSNMNRPALNEMLSRLHEIDAVVVYRLDRLSRSQRDTTTLIEEYFLKNNVEFVSLSETLDTSSPFGRAMIGILSVFAQLERETIRDRMVMGKIKRIEAGLPLTTAKGRTFGYDVIDTKLYINEEEAKQLQLIYDIFEEVQSITFLQKRLKKLGFKVRTYNRYSNWLTNDLYCGYVSYKDKVHVKGIHEPIISEEQFYRVQEIFTRMGKKPNMNRDSASLLNNLVVCSKCGLGFVHRSKDTMSRGKKYHYRYYSCKTYKHTHELEKCGNKTWRADKLEELIINRVNNYSFAGRNADKEDELDSLNEKLKIEHAKKKRLFDLYINGSYEVSELDSMMNDIDAQISCYESQIEANEELKKNRKVQENLADLATVDFDSLEFREKQLYLKSLINKIYIDGEQVAIEWL

SEQ ID NO: 4274 - protein, 452 aa, synthetic construct
MKAAIYIRVSTREQVENYSIQAQTEKLTALCRSKDWDVYDIFIDGGYSGSNTNRPALNEMLSKLHEIDAVVVYRLDRLSRSQRDTITLIEEYFLKNNVEFVSLSETLDTSSPFGRAMIGILSVFAQLERETIRDRMVMGKIKRIEAGLPLTTAKGRTFGYDVIDTKLYINEEEAKQLQLIYDIFEEEQSITFLQKRLKKLGFKVRTYSCYNSWLTNDLYCGYVSYKDKVHVKGIHEPIISEEQFYRVQEIFTRMGKNPNMNRDSASLLNNLVVCSKCGLGFVHRRKDTMSRGKKYHYRYYSCKTYKHIHELEKCGNKIWRADELEELIINRVNNYSFASRNADKEDELDSLNEKLKIEHAKRKRLFDLYINGSYEVSELDSMMNDIDAQINYYESQIEANEELKKDKKIQEGLANLATVDYDSLELREKQLYLKSLINKIYIDGEQVTIEWL

SEQ ID NO: 4275 - protein, 485 aa, synthetic construct
MTKKVAIYTRVSTTNQAEEGFSIDEQIDRLTKYAEAMGWQVSDTYTDAGFSGAKLERPAMQRLINDIENKAFDTVLVYKLDRLSRSARDTLYLVKDVFTKNKIDFISLNESIDTSSAMGSLFLTILSAINEFERENIKERMTMGKLGRAKSGKSMMWTKTAFGYYHNRKTGILEIVPLQATIVEQIFTDYLSGISLTKLRDKLNESGHIGKDIPWSYRTLRQTLDNPVYCGYIKFKDSLFEGMHKPIIPYETYLKVQKELEKRQQQTYERNNNPRPFQAKYMLSGMARCGYCGAPLRIVLGHKRKDGSRAMKYHCANRFPRKTKGVTVYNDNKKCDSGTYDLSNLENTVIDNLIGLQGNDDSLLKIINGNNQPILDTSSVKKQISQIDKKIQKNSDLYLNDFITMDELKDRTDSLQAEKKLLKAKISENKFNDSADVLELVKTQLGSIPINELSYDDKKKIVNNLVSKVDVTADNVDIIFKFQLA

SEQ ID NO: 4276 - protein, 469 aa, synthetic construct
MSYTTPVRAAVYLRISEDRSGEQLGVARQREDCLELCDQRKWVPVEYLDNDVSASTGKHRPAYEQMLADITAGKIAAVVAWDLDRLHRRPIELEAFMSLADEKRLALATVAGDVDLATPQGRLVARLKGSVAAHETEHKKARQRRAARQKAERGYPNWSKAFGYLPGPNGPEPDPRTAPLVKQAYADILAGASLGDVCRQWNGAGAFTITGRPWTTTTLSKFLRKPRNAGLRAYRGARYGPADRDAIVGKAQWSPLVDEATFWAAQAVLDAPGRAPGRKSVRRHLLTGLAGCGKCGNHLAGSYRTDGRVVYVCKACHGVAILADNIEPILYHIVAERLAMPDAVDLLRREIHDAAEAETIRLELETLHGGLDRLAVERAEGLLTARQVKISTDIVNAKITELQARQQDQERLRVLDGIPLGTPQVADVIAELSPDRFRAVLDVLVDVVVQPVGKGGRIFNPERVQVNWR

SEQ ID NO: 4277 - protein, 452 aa, synthetic construct
MKAAIYIRVSTREQVENYSIQAQTEKLTALCRSKDWDVYDIFIDGGYSGSDMNRPALNEMLSKLREIDAVVVYRLDRLSRSQRDTITLIEEYFLKNNVEFVSLSETLDTSSPFGRAMIGILSVFAQLERETIRDRMVMGKIKRIEAGLPLTTAKGRTFGYDVIDTKLYINKEEAKQLQLIYDIFEEEQSITSLQKRLKKLGFKVHTYNRYNSWLTNDLYCGYVSYKDKVHVRGIHEPIISEEQFCRVQEIFTRMGKNPNMNRGSASLLNNLVVCSKCGLGFVHRRKDTMSRGKKYHYRYYSCKTYKHTHELEKCGNKIWRADKLEELIINRVNNYSFANRNADKEVELDSLNEKLNIEHAKKKRLFDLYINGSYEVSELDSMMNDIDAQINYYESQIKANEELKKNKKIRENLAVLATVNFDSLEFREKQLYLKSLINKIYIDGEQVTIEWL

SEQ ID NO: 4278 - protein, 452 aa, synthetic construct
MKAAIYIRVSTREQVENYSVQAQTEKLTALCRSKDWDVYDIFIDGGYSGSNMNRPALNEMLSKLHEIDAVVVYRLDRLSRSQRDTITLIEEYFLKNNVEFVSLSETLDTSSPFGRAMIGILSVFAQLERETIRDRMVMGKIKRIEAGLPLTTAKGRTFGYDVIDTKLYINEEEAKQLQLIYDIFEEEQSVTFLQKRLKKLGFKVRTYNRYNSWLTNDLYCGYVSYKDKVHVKGIHEPIISEEQFYRVQEIFTRMGKNPNMNRDSASLLNNLVVCSKCGLGFVHRRKDTMSRGKKYHYRYYSCKTYKHIHELERCGNKIWRADKLEELIINRVNNYSFASRNVDREDELDSLNEKLKNEHAKKKRLFDLYINGSYEVSELDSMMNDIDAQINHYESQIEANEELKKNKKIQENLADLATVDFDSLEFREKQLYLKSLINKIYIDGEQVTIEWL

SEQ ID NO: 4279 - protein, 452 aa, synthetic construct
MKAAIYIRVSTREQVENYSIQAQTEKLTALCRSKDWDVYDIFIDGGYSGSNMNRPALNEMLSKLHEIDAVVVYRLDRLSRSQRDTITLIEEYFLKNNVEFVSLSETLDTSSPFGRAMIGILSVFAQLERETIRDRMVMGKIKRIEAGLPLTTAKGRTFGYDVIDTKLYINEEEAKQLQLIYDIFEEEQSITFLQKRLKKLGFKVRTYNRYYNWLTNDLYCGYVSYKDKVHVKGIHEPIISEEQFCRVQEIFTRMGKNPNMNRDSASLLNNLVVCGKCGLGFVHRRKDAMSRSKKYHYRYYSCKTYKHIHELEKCGNKIWRADKLEELIISRVNDYSFASRNADKEDELDSLNEKLKIEHAKKKRLFDLYINGSYEVSELDSMMNDIDAQISYYESQIEANEELRKNKKIQENLADLATVDFDSLEFREKQRYLKSLINKIYIDGEQVTIEWL

SEQ ID NO: 4280 - protein, 452 aa, synthetic construct
MKAAIYIRVSTREQVENYSIQAQTEKLTALCRSKDWDVYDIFVDGGYSGSNMNRPALNEMLSKLHEIDAVVVYRLDRLSRSQRDTITLIEEYFLKNDVEFVSLSETLDTSSPFGRAMIGILSVFAQLERETIRDRMVMGKIKRIEAGLPLTTAKGRTFGYDVIDTKLYINEEEARQLQLIYDIFEEEQSITSLQKRLKELGFKVRTYNCYSNWLTNDLYCGYVSYKDKVHVRGIHEPIISEEQFYRVQEIFTRMGKNPNMNRDSASLLNNLVVCSKCGLGFVHRRKDAMSRDKKYHYRYYSCKTYKHIHELEKCGNKIWRADKLEELIINRVNNYSLASRNMDKEDELDSLNEKLKTEHAKKKRLFDLYINGSYEVSELDSMMKDIDAQINYYDSQIEASEELKKNKKIQEKLADLATVDFDSLEFREKQLYLKSLINKIYVDGEQVTIEWL

SEQ ID NO: 4281 - protein, 485 aa, synthetic construct
MTRKVAIYTRVSTTNQAEEGFSIDEQIDRLTKYAEAMGWQVSDTYTDAGFSGAKLGRPAMQRLINDIENKAFDTVLVYKLDRLSRSVRDTLYLVKDVFTKSKIDFISLNESIDTSSAMGSLFLTILSAINEFERENIKERMTMGKLGRAKSGKSMMWTKTAFGYYHNRKTGILEIVPLQATIVEQIFTDYLSGISLTKLRDKLNESGHIGKDIPWSYRTLRQTLDNPVYCGYIKFKGSLFEGMHKPIIPYETYLKVQKELDERQQQTYERNNNPRPFQAKYMLSGMARCGYCGAPLKIVLGHKRKDGSRTMKYHCANRFPRKTKGVTVYNDNKKCDSGTYDLSNLENTVIDNLIGFQENNDSLLKIINGNGQPILDTSGFKKQINQIDKKIQKNSDLYLNDFITMDELKDRTDSLQAEKKLLEAKISENKFNDSTDVFELVKTQLGSIPINELSYDDKKKIVNNLVSKVDVTAVNVDIIFKFQLA

SEQ ID NO: 4282 - protein, 485 aa, synthetic construct
MTKKVAIYTRVSTTNQAEEGFSIDEQIDRLTRYAEAMGWQVSGTYTDAGLSGAKLERPAMQRLINDIENKAFDTVLVYKLDRLSRSVRDTLYLVKDVFTKNKIDFISLNESIDTSSAMGSLFLTILSAINEFERDSIKERMAMGKLGRAKSGKSMMWTKTAFGYYHNRKTGVLEIVPLQATIVEQIFTDYLSGISLTKLRDKLNESGHIGKDIPWSYRTLRQTLDNPVYCGYIKFKGSLFEGMHKPIISYETYLKVQKELEERQQQTYERNNNPRPFQAKYMLSGMARCGYCGAPLKIVLGHRRKDGSRTMKYHCANRFPRKTKGVTVYNDNKKCDSGTYDLSNLENTVIDNLIGFQENNDSLLKIINGNNQPILDTSSFKKQISQIDKKIQKNSDLYLNDFITMDELKDRTDGLQAEKKLLKAKISENKFNDSTDVFELVKTQLGSIPINELSYDNKKKIVNNLVGKVDVTADNVDIIFKFQLA

SEQ ID NO: 4283 - protein, 485 aa, synthetic construct
MTKKVAIYTRVSTTSQAEEGFSIDEQVDRLTKYAEAMGWQVSDTYTDAGFSGAKLERPAMQRLINDIENKAFDTVLVYKLDRLSRSVRDTLYLVKDVFTKNKIDFISLNESIDTSSAMGSLFLTILSAINEFERENIKERMTMGKLGRAKSGKSMMWTKTAFGYYHNRKTGILEIVPLQATIVKQIFTDYLSGISLTKLRDKLNESGHIGKDIPWSYRTLRQTLGNPVYCGYIKFKDSLFEGMHKPIIPYETYLKVQKELEERQQQTYERNNNPRPFQAKYMLSGMARCGYCGAPLKIVLGHKRKDGSRTMKYHCVNRFPRKTKGIAVYNDNKKCDSGTYDLSNLENTVIDNLIGFQENNDSLLKIINGDNQPILDTSSFKKQISQIDKKIQKNSDLYLNDFITMDELKARTDSLQAEKKLLKAKISENKFNDSTDVFELVKTQLGSIPINELSYDNKKKIVNNLVSKVDVTADNVDIIFKFQLA

SEQ ID NO: 4284 - protein, 485 aa, synthetic construct
MTKKVAIYTRVSTTNQAEEGFSIDEQIDRLTKYAEAMGWQVSDTYTDAGFSGAKLERPAMLRLINDIENKAFDTVLVYKLDRLSRSVRDTLYLVKEVFTKNKIDFISLNESIDTSSAMGSLFLTILSAINEFERENIKERMTMGKLGRAKSGKSMMWTKTAFGYYHNRKTGILEIVPLQAAIVEQIFTDYLSGISLTKLRDKLNESGHIGKDIPWSYRTLRQTLDNPVYCGYIKFKDSLFEGMHKPIIPYETYLKVQKELEERQQQTYKRNNNPRPFQAKYMLSGMARCGYCGAPLRIVLGHKRKDGSRTMKYHCANRFPRKTKGVTVYNDNNKCDSGTYDLSNLENTVIDNLIGLQENNDSLLKTINGNNQPILDTGSFEKQISQIDKKIQKNSDLYLNDFITMDELKNRTGSLQAEKKLLKAKISENKFNDSTDVFELVKTQLGSIPINELSYDNKKRIVNNLVSKVDVTADNVDIIFKFQLA

SEQ ID NO: 4285 - protein, 485 aa, synthetic construct
MTKKVAIYTRVSTTNQAEEGFSIDEQIDRLTKYAEAMGWQVSDTYTDAGFSGAKLERPAMQRLINDIENKAFDTVLVYKLDRLSRSVRDTLYLVKDVFTRNKIDFISLNECIDTSSAMGSLFLTILSAINEFERENIKERMTMGKLGRAKSGKSMMWTKTAFGYYHNRKTGILEIVPLQATIVEQIFTDYLSGISLTKLRDKLNECGHIGKDIPWSYRTLRQTLDNPVYCGYIKFKDSLFEGMHKPIIPYETYLKVQKELEERQQQTYERNNNPRPFQAKYMLSGMARCGYCGAPLRVVLGHKRKDGSRTMKYHCANRFPRKTGGITVYNDNKKCDSGTYDLSNLENTVIDNLIGLQENNDSLLKIINGNNQPILDTSSFKRQISQIDKKIQKNSDLYLNDFITMDELKDRTDSLQAEKKLLEAKISENKFNDSTDVFELVKTQLGSIPINELSYDNKKKIVNNLVSKVDVTADNVDIIFKFQLA

SEQ ID NO: 4286 - protein, 485 aa, synthetic construct
MTKKVAIYTRVSTANQAEEGFSIDEQIDRLTKYAEAMGWQVSDTYTDAGFSGAKLERPAMQRLINDIGNKAFDTVLVYKLDRLSRSVRDTLYLVKDVFTKNKIDFISLNESIDTSSAMGSLFLTILSAINEFERENIKERMTMGKLGRAKSGKSMMWTKTAFGYYHNRKTGILEIVPPQATIVEQIFTDYLSGISLTKLRDKLNESGHIGKDIPWSYRTLRQTLDNPVYCGYIKFKDNLFEGMHKPIIPYETYLKVQKELEERQQQTYERNNNPRPFQAKYMLSGMARCGYCGAPLRIVLGHKRKDGSRTMKYHCANRFPRKTKGVTVYNDNKKCDSGTYDLINLENTVIDYLIGFQENNDSLLKIINGNNQPILDTSSFKEQIGQIDKKIQKNSDLYLNDLITMDELKNRTDSLQAEKRLLKAKISENKFNDSTDVFELVKTQLGSTPINELSYDNKKKIVNNLVSKVDVTADNVDIIFKFQLA

SEQ ID NO: 4287 - protein, 452 aa, synthetic construct
MKAAIYIRVSTQEQVGNYSIQAQTEKLTALCRSKGWDVYDIFIDGGYSGSNMNRPALNEMLSKLHEIDAVVVYRLDRLSRSQRDTTTLIEEYFLKNNVEFVSLSETLDTSSPFGRAMIGILSVFAQLERETIRDRMVMGKIKRIEAGLPLTTAKGRTFGYDVIDTKLYINEEEARQLQLIYDIFEEEQSITSLQKRLKRLGFKVRTYNRYNNWLTNDLYCGYVSYKDKVHVKGIHEPIISEEQFYRVQEIFTRMGKNPNMNRGSASLLNNLVVCSKCGLGFVHRRKDTMSRGKKYHYRYYSCKTYKHTHELEKCGNKTWRADKLEELIINRVNNYSFASRNVDKEDELDSLNEKLKIEHAKKKRLFDLYINGSYEMSELDSMMNDIDAQINYYESQIGANEELRKNKNIQESLADLATVDFDSLEFREKRLYLKSLINKIYIDGEQVTIEWL

SEQ ID NO: 4288 - protein, 469 aa, synthetic construct
MSYTTPVRAAVYLRISEDRSGEQLGVARQREDCLKLCGQRKWVPVEYLDNDVSASTGKRRPAYEQMLADIAAGKIAAVVAWDLDRLHRRPIELEAFMSLADEKRLALATVAGDVDLATPQGRLVARLKGSVAAHETEHKKARQRRAARQKAERGHPNWSKAFGYLPGPNGPEPDPRTAPLVKQAYADILAGASLGDVCRQWNDAGASTITGRPWTTTTLSKFLRKPRNAGLRAYKGARYGPVDRDAIVGKAQWSPLVDEATFWAAQAVLDAPGRAPGRKSVRRHLLTGLAGCGKCGNHLAGSYRTDGRVVYVCKACHGVAILADNIEPILYHIVVERLAMPDAVDLLRREIHDAAEAETIRLELETLYGELDLLAVERAEGLLTARQVKISTDIVNAKITKLQACQHDQERLRVLDGIPLGTPQVAGTIAELSPDRFRAVLDVLAEVVVQPVGKSGRIFNPERVQVNWR

SEQ ID NO: 4289 - protein, 485 aa, synthetic construct
MTKKVAIYTRVSTTNQAEEGFSIDEQIDRLTKYAEAMGWQVSDTYTDAGFSGAKLERPAMRRLINDIENKAFDTVLVYKLDRLSRSVRDTLYLVKDVLTKNKIDFISLNESIDTSSAMGSLFLTILSAINEFERENIKERMTMGKLGRAKSGKSMMWTKTAFGYYHNRKTGVLEIVPLQATIVEQIFTDYLSGISLTKLRDKLNEGGHIGKDIPWSYRTLRQTLDNPVYCGYIKFRGSLFEGMHKPIIPYETYLKVQKELEERQQQTYERNNNPRPFQAKYMLSGMARCGYCGAPLRIVLGHKRKDGSRTMKYHCANRFPRKTKGITVYNDNKKCDSGTYDLSNLENTVIDNLIGFQENNDSLLKIINGNNQPILDTSSFKRQISQIDKKIQKNSDLYLNDFITMDELKDRTDSLQAEKKLLKAKISENRLDDSTDVFELVKTQLGSIPINELSYDNKKKIVNNLVSKVDVTADNVDIIFKFQLA

SEQ ID NO: 4290 - protein, 485 aa, synthetic construct
MTKKVAIYTRVSTTNQAEEGFSIDEQIDRLTKYAEAMGWQVSDTYTDAGLSGAKLERPAMQRLINDIENKAFDTVLVYKLDRLSRSVRDTLYLVKDVFTKNKIDFISLNESIDTSSAMGSLFLTILSAINEFERENIKERMTMGKLGRAKSGKSMMWTKTAFGYYHNRKTGILEIVPLQATIVEQIFTDYLSGISLTRLRDKLNESGHIGKDIPWSYRTLRQTLDNPVYCGYIKFKGSLFEGMHKPIIPYETYLKVQKELEERQQQTYERNNNTRPFQAKYMLSGVARCGYCGAPLRIVLGHKRKDGSRTMKYHCTNRFPRKTKGVTVYNDNKKCDSGTYDLSNLENTVIDNLIGFQENNDSLLKIINGNNQPILDTSSFKKQISQIDKKIQKNSDLYLNDFITMDELKDRTDSLRAEKKLLEAKVSENKFNDSTDVFELVKTQLGSIPINELSYDNKKKIVNNLVSKVDVTADSVDIIFKFQLA

SEQ ID NO: 4291 - protein, 469 aa, synthetic construct
MSYTTPVRAAVYLRISEDRSGEQLGVARQREDCLKLCDQRKWVPVEYLDNDVSASTGKRRPAYEQMLADITAGKIAAVVAWDLDRLHRRPIELEAFMSLADEKRLALATVAGDVDLSTPQGRLVARLKGCVAAHETEHKKARQRRAARQKAERGLPNWNKAFGYLPGPNGPEPDPRTAPLVKQAYADILAGASLGDVCRQWNGAGAFTITGRPWTTTTLSKFLRKPRNAGLRAYKGARYGPVDRDAIVGKAQWSPLVDEATFWAAQAVLDAPGRAPGRKSVRRHLLTGLAGCGKCGNHLAGSYRTDGQIVYACKACHGVSILADNIEPILYHIVAERLAMPDAVDLLRREIHDAAVAETIRLELETLYGELDRLAVERAEGLLTARQVKISTDIVNAKITKLQARQLDQERLRVFNGIPLGTPQVAGVIAELSPDRFRAVLDVLAEVVVQPVGKGGRIFSPERVQVNWR

SEQ ID NO: 4292 - protein, 452 aa, synthetic construct
MKAAIYIRVSTREQVENYSIQAQTEKLTALCRSKDWDVYDIFIDGGYSGSNMNRPALNEMLSKLHEIDAVVVYRLDRLSRSQRDTITLIEEYFLKNNVEFVSLSETLDTSSPFGRAMIGILSVFAQLERETIRDRMVMGKIKRIEAGLPLTTAKGRTFGYDVIDTKLYINEEEAKQLQLIYDIFEEERSITFLQKRLKRLGFKVRTYSCYNNWLTNDLYCGYVSYKDKVHVKGIHEPIISEEQFYRVQEIFTRMGKNPNMNRDSASLLNNLVVCSKCGLGFVHRRKDIMSRGKKYHYRYYSCKTYKHIHELEKCGNKIWRADKLEELIINRVNNYSPASRNMDKEDELDSLNEKLRNEHAKKKRLFDLYINGSYEVSELDNMMNDIDAQIDYYESQIEANEELKKNKKIQENLAHLATVDFDSLEFREKQLYLKSLINKIYIDGDQVTIEWL

SEQ ID NO: 4293 - protein, 452 aa, synthetic construct
MKAAIYIRVSTREQVENYSIQAQTEKLTALCRSKDWDVYDIFVDGGYSGSNMNRPALNEMLSRLHEIDAVVVYRLDRLSRSQRDTITLIEEYFLKNNVEFVSLSETLDTSSPFGRAMIGILSVFAQLERETIRDRMVMGKIKRIEAGLPLTTAKGRTFGYDVIDTKLYINEEEAKQLQLIYDIFEEEQSITFLQKRLKKLGFKVRTYSCYSNWLTNDLYCGYVSYKDKVHVKGIHEPIISEEQFYRVQEIFTRMGKNPNMNRNSASLLNNLVVCSKCGLGFVHRRKDAMSRDKKYHYRYYSCKTYKHIHELEKCGNKIWRADKLEELIISRVNNYSLASRNVDKEDELDSLNEKLKIEHAKKKRLFDLYINGSYEVSELDSMMSDIDAQINYYESQIETNEELKKNKRIRENLALLATADFDSLEFREKQLYLKSLINKIYVDGEQVTIEWL

SEQ ID NO: 4294 - protein, 469 aa, synthetic construct
MSYTTLVRAAVYLRISEDRSGEQLGVARQREDCLKLCDQRKWVPVEYLDNDVSASTGKRRPAYEQMLADITAGKIAAVVAWDLDRLHRRPIELEAFMSLADERRLALATVAGDVDLATPQGRLVARLKGSVAAHETEHKKARQRRAARQKAERGHPNWSKAFGYLPGPNGPEPDPRTAPLVKQAYVDILAGASLGDVCRRWNGAGAFTITGRPWTTTTLSKFLRKPRNAGLRAYKGARYGPVDRDAIVGEAQWSPLVDEATFWAAQAVLDAPGRAPGRKSVRRHLLTGLAGCGKCGNHLAGSYRTDGRVVYVCKACHGVAILADNIEPILYRIVAERLAMPDAVDLLRREIHDAAEAETIRLDLETLYGELDRLAVERAEGLLTARQVKISTDVVNAKIAKLQARQLDQERLRVFNGIPLGTPQVAGMIAELSPDRFRAVLDVLAEVVVQPVGKSGRIFNPERVQVNWR

SEQ ID NO: 4295 - protein, 452 aa, synthetic construct
MKAAIYIRVSTREQVENYSIQAQTEKLTALCRSKDWDVYDIFIDGGYSGSNMNRPALNEMLSKLHEIDAVVVYRLDRLSRSQRDTITLIEEYFLKNNVEFVSLSETLDTSSPFGRAMIGILSVFAQLERETIRDRMVMGKIKRIEAGLPLTTAKGRTFGYDVIDTKLYVNEEEAKQLQLIYDIFEEEQSITFLQKRLKKLGFKVRTYNRYNNWLTNDLYCGYVSYKDKVHVKGIHEPIISEEQFYRVQEIFTRMGKNPNMNRDSASLLSNLVVCGKCGLGFVHRRKDTMSRDKKYHYRYYSCKTYKHIHELEKCGNKIWRADKLEELVINRVNNYSSASRNADKEDELDSLNEKLKIEHAKKKRLFDLYINGSYEVSELNSMMNDIDAQINYYESQIEASGELKENKKIQENLAHLATVDFDSLEFREKQLYLKSLINKIYIDGEQVTIEWL

SEQ ID NO: 4296 - protein, 452 aa, synthetic construct
MKAAIYIRVSTQEQVENYSIQAQTEKLTALCRSKDWDVYDIFIDGGYSGSNMNRPALNEMLSKLHEIDAVVVYRLDRLSRSQRDTTTLIEEYFLKNNVEFVSLSETLDTSSPFGRAMIGILSVFAQLERETIRDRMVMGKIKRIEAGLPLTTAKGRTFGYDVIDTKLYINEEEAKQLQLIYDIFEEEQSITSLQKRLKKLGFKVRTYNRYNNWLTNDLYCGYVSYKDKVHVKGIHEPIISEEQFYRVQEIFTRMGKNPNMNRDSASLLNNLVVCSKCGLSFVHRSKDTMSGGKKYHYRYYSCKTYKHTHELEKCGNKTWRADKLEELVINRVNNYSFASRNVDKEDELDSLYEKLKIEHAKKKRLFDLYINGSYEVSELDGMMSDIDAQINYYESRIKANGELKRNKKIQENLVDLTTVDFDSLEFREKQLYLKSLISKIYIDGEQVTIEWL

SEQ ID NO: 4297 - protein, 469 aa, synthetic construct
MSYTTPVRAAVYLRISEDRSGEQLGVARQREDCLKLCDQRKWVPVEYLDNDVSASTGKRRPAYEQMLADITAGKIAAVVAWDLDRLHRRPIELEAFMSLAEEQRLALATVAGDVDLATPQGRLVARLKGSVAAHETEHKKARQRRAARQKAERGHPNWSKAFGYLPGPNGPEPDPRTAPLVKQAYADILAGASLGDVCRRWNDAGAFTITGRPWTTTALSKFLRKPRNAGLRAYKGARYGPVDRDAIVGKAQWSPLVDEATFWAAQAVLDAPGRAPGRKSVRRHLLTGLAGCGKCGNHLAGSYRTDGKVVYVCKTCHGVAILADNIEPILYHIVAERLAMPDAVDLLRREIHDAAEAEAIHLELETLYGELDRLAVERAEGLLTARQVKISTDIVNAKITKLQARQQDQERLRVLDGIPLGTPQVAGMVAELSPDRFRAVLDVLAEVVVQPVGKSGRISNPERVRVNWR

SEQ ID NO: 4298 - protein, 485 aa, synthetic construct; identical to SEQ ID NO: 617

SEQ ID NO: 4299 - protein, 452 aa, synthetic construct
MKAAIYIRVSTREQVENYSIQAQTEKLTALCRSKDWDVYDIFIDGGYSGSNMNRPALNGMLSKLHEIDAVVVYRLDRLSRSQRDTITLIEEYFLKNNVEFVSLSETLDTSSPFGRAMIGILSVFAQLERETIRDRMVMGKIKRIEAGLPLTTAKGRTFGYDVIDTKLYINEEEAKQLQLIYDIFEEEQSITFLQKRLKKLGFKVRTYSRYNNWLTNDLYCGYVSYKDKVHVKGIHEPIISEEQFYRVQEIFTRKGKNPNMNRGSASLLNNLVVCGKCGLGFVHRRKDAMSRDKKYHYRYYSCKTYKHIHELEKCGNKIWRADELEELIINRVNNYSLASRNADKEDELDGLYEKLKIEHAKKKRLFDLYINGNYEVSELDSMMNDIDAQINYYESQIEANEGLKRNKKIQENLAYLATADFDSLEFREKQLYLKSLINKIYIDGEQVTIEWL

SEQ ID NO: 4300 - protein, 452 aa, synthetic construct
MKAAIYIRVSTQEQVENYSIQAQTEKLTALCRSKDWDVYDIFIDGGYSGSNMNRPALNEMLSKLHEIDAVVVYRLDRLSRSQRDTTTLIEEYFLKNNVEFVSLSETLDTSSPFGRAMIGILSVFAQLERETIRDRMVMGKIKRIEAGLPLTTAKGRTFGYDVIDTKLYINEEEAKQLRLIYDIFEEEQSITSLQKRLKKLGFKVRTYNRYSNWLTNDLYCGYVSYKDKVHVKGIHEPIISEEQFYRVQEIFTRMGKNPNMNRDSASLLNSLVVCSKCGLSFVHRSKDTMSRGKRYHYRYYSCKTYKHTHELEKCGNKTWRADKLEELIINRVNKYSFASRNVDKEDELDSLNEKLKIEHAKKKRLFDLYINGSYEVSELDSMMNDIDAQINYYESQIEANEELKKNKKIQENLADPATVDFDSLEFREKQLYLKSLINKIYIDGEQVTIEWL

SEQ ID NO: 4301 - protein, 486 aa, synthetic construct
MTKKVAIYTRVSTTNQAEEGFSIDEQIDRLTKYAEAMGWQVSDTYTDAGFSGAKLERPAMQRLINDIENRAFDTVLVYKLDRLSRSVRDTLYLVKDVFTKNKIDFISLSESIDTSSAMGSLFLTILSAINEFERENIKERMTMGKLGRAKSGKSMMWTKTAFGYYHNRKTGILEIVPLQATIVEQIFTDYLSGISLTKLRDKLNESGHIGKDIPWSYRTLRQTLDNPVYCGYIKFKDSLFEGMHKPIIPYETYLKVQKELEVRQQQTYERNNNPRPFQAKYMLSGMARCGYCGAPLRIVLGHKRKDGSRTMKYHCANRFPRKTRGVTVYNDNKKCDSGTYDLSNLENTVIDNLIGLQENNDSLLKIINGNNQPVLDTSSFKKQISQIDKKIQKNSDLYLNDFITMDELKDRTDSLQAEKKLLKAKISENKFNDSTDVFELVKTQLGSIPINELSYDNKKKIVNNLVSKVDVTADNVDIVFKFQLAQ

SEQ ID NO: 4302 - protein, 452 aa, synthetic construct
MKAAIYIRVSTREQVENYSIQAQTEKLTALCRSKDWDVYDIFIDGGYSGSNMNRPALNEMLSKLHEIDAVVVYRLDRLSRSQRDTITLIEEYFLKNNVEFVSLSETLDTSSPFGRAMIGILSVFAQLERETIRDRMVMGKIKRIEAGLPLTTAKGRTFGYDVIDTKLYINEEEARQLQLIYDVFEEEQSITFLQKRLKKLGFKVRSYNRYSNWLTNDLYCGYVSYKDKVHVKGIHEPIISEEQFYRVQEIFTRMGKNPNMNRDSASLLNSLVVCSKCGLGFVHRRKDTISRGKKYHYRYYCCKTYKHIHELEECGNKIWRADKLEELIINRVNNYSFASRNVDKEDELDSLNEKLKIEHAKKKRLFDLYINGSYEVSELDSMMNDIDAQINYYESQIEANEELKKNKKIQENLADLATVDYDSLEFREKQLYLKSLINKIYIDGEQVTIEWL

SEQ ID NO: 4303 - protein, 452 aa, synthetic construct
MKAAIYIRVSTREQVENYSIQAQTEKLTALCRSKDWDVYDVFIDGGYSGSNMNRPALNEMLSKLREIDAVVVYRLDRLSRSQRDTITLIEEYFLKNNVEFVSLSETLDTSSPFGRAMIGILSVFAQLERETIRDRMVMGKIKRIEAGLPLTTAKGRTFGYDVIDTKLYINEEEAKQLQLIYDIFEEEQSITFLQKRLKKLGFKVRTYNRYNNWLTNDLYCGYVSYKDKVHVKGIHEPIISEEQFYRVQEIFTRMGKNPNMNRDSASLLNNLVVCSKCGLGFVHRRKDAMSRDKKYHYRYYSCKTYKHIHELEKCGNKIWRADKLEELVINRVNSYSVASRSMGKEDELDSLNEKLKIEHAKKKRLFDLYINGSYEVSELDSMMNDINAQISYYESQIEANEELRKNKKIQENLADLATVDFDSLEFREKQLYLKSLINKIYIDGEQVTIEWL

SEQ ID NO: 4304 - protein, 452 aa, synthetic construct
MKAAIYIRVSTREQVENYSIQAQTEKLTALCRSKDWDVYDIFIDGGYSGSNMNRPALNEMLSKLHEIDAVVVYRLDRLSRSQRDTITLIEEYFLKNNVEFVSLSETLDTSSPFGRAMIGILSVFAQLERETIRDRMVMGKIKRIEAGLPLTTAKGRTFGYDVIDTKLYINEEEAKQLRLIYDIFEEEQSITFLQRRLKGLGFKVRTYNCYNNWLTNDLYCGYVSYKDKVRVKGIHEPIISEEQFYRVQEIFTRMGKNPNMNRDSASLLNNLVVCSKCGLGFVHRRKDAMSRDKKYHYRYYSCKTYKHIHELEKCGNKIWRADKLEELIVNRVNNYSLASRNVDKEDGLDSLNEKLKIEHAKKKRLFDLYLNGSYEVSELDSMMNDIDAQINYYESQIEANEELKKNKKIQESLAHLATADFDSLEFREKQLYLKSLISKIYIDGEQVTIEWL

SEQ ID NO: 4305 - protein, 452 aa, synthetic construct
MKAAIYIRVSTQEQVENYSIQAQTEKLTALCRSKGWDVYDIFIDGGYSGSNMNRPALNEMLSKLHEIDAVVVYRLDRLSRSQRDTTTLIEEYFLKNNVEFVSLSETLDTSSPFGRAMIGILSVFAQLERETIRDRMVMGKIKRIEAGLPLTTAKGRTFGYDVIDTRLYINEEEAKQLRLIYDIFEEEQSITSLQKRLKKLGFKVRTYNRYNNWLTNDLYCGYVSYKDKVHVKGIHEPIISEEQFYRVQEIFTRMGKNPNMNRDSASLLSNLVVCSKCGLGFVHRSKDTMSRGKRYHYRYYSCKTYKHTHELEKCGNRTWRADKLEELIINRVNNYSFASRNVDKEDELDGLNEKLKIEHAKKKRLFDLYINGSYEVSELDSMMNDIDAQIDYYESQIEAYEELKKNKKIQENLAGLATVDFDSLEFREKQLYLKSLINKIYIDGEQVTIEWL

SEQ ID NO: 4306 - protein, 452 aa, synthetic construct
MKAAIYIRVSTQEQVENYSIQAQTEKLTALCRSKDWDVYDIFIDGGYSGSNMDRPALNEMLSKLHEIDAVVVYRLDRLSRSQRDTITLIEEYFLKNNVEFVSLSETLDTSSPFGRAMIGILSVFAQLERETIRDRMVMGKIKRIEAGLPLTTAKGRTFGYDVIDTKLYINEEEAKQLQLIYDIFEEEQSITFLQKRLKKLGFKVRTYNRYNSWLTNDLYCGYVSYKDKVHVKGIHEPIISEEQFYRVQEIFTRMGKNPNMNRDSASLLNNLVVCSKCGLGFVHRRKDTVSRGKKYHYRYYSCKTYKHIHELEKCGNKIWRADKLEELIINRVNNYSLASRNVDKEDELDNLSEKLKVEHAKKKRLFELYINGSYEMGELGSMMNDIDAQINYYESQIEANEGLKRNKKIQENLAELATVDFDSLELREKQLYLKSLINKIYIDGEQVTIEWL

SEQ ID NO: 4307 - protein, 452 aa, synthetic construct
MKAAIYIRVSTREQVENYSIRAQTEKLTALCRSKDWDVYDIFIDGGYSGSNMNRPALNEMLSKLHEIDAVVVYRLDRLSRSQRDTITLIEEYFLKNNVEFVSLSETLDTSSPFGRAMIGILSVFAQLERETIRDRMVMGKIKRIEAGLPLTTAKGRTFGYDVVDTKLYINEEEAKQLQLIYDIFEEEQSITSLQKRLKKLGFKVHTYNRYNNWLTNDLYCGYVSYKDKVHVKGIHEPIISEEQFYRVQEIFTRMGKNPNMNRDSASLLNNLVVCSKCGLGFVHRRKDAMSRDKKYHYRYYSCKAYKHIHELEKCGNKIWRADKLEELIINRVNNYSLANRNVDKEDELDNLNEKLKIEHAKKKRLFDLYINGSYEVSELDSMMNDIDAQINYYESQIEANGELKKNKKIQENLAYLATVDFDSLEFREKQLYLKSLINKIYIDGEQVTIEWL

SEQ ID NO: 4308 - protein, 452 aa, synthetic construct
MKAAIYIRVSTQEQVGNYSIQAQTEKLTALCRSKDWDVYDIFIDGGYSGSNMNRPALNEMLSKLHEIDAVVVYRLDRLSRSQRDTTTLIEEYFLKNNVEFVSLSETLDTSSPFGRAMIGILSVFAQLERETIRDRMVMGKIKRIEAGLPLTTAKGRTFGYDVVDTKLYINEEEAKQLQLIYDIFEEEQSITFLQKRLKKLGFKVRTYNRYNNWLTNDLYCGYVSYKDKVHVKGIHEPIISEEQFYRVQEIFTRMGKSPNMNRDSASLLNNLVVCSKCGLGFVHRSKDTMSRGKKYHYRYYSCKTYKHTHELEKCGNKTWRADKLEELIINRVNNYSFASRNVDKEDELDSLNEKLKIEHAKKRRLFDLYINGSYEVSELDSMMNDIDAQINHYESQIEANEELRKNKGTQESLADLATVDFDSLEFREKQLYLKSLINKIYIDGEQVTIEWL

SEQ ID NO: 4309 - protein, 469 aa, synthetic construct
MSYTTPVRAAVYLRISEDRSGEQLGVARQREDCLKLCDQRKWVPVEYLDNDVSASTGKRRPAYEQMLADITAGKIAAVVAWDLDRLHRRPIELEAFMSLADEKRLALATVAGDVDLATPQGRLVARLKGSVAAHETEHKKARQRRAARQKAERGHPNWSKAFGYLPGPNGPEPDPRTAPLVKQAYADILAGASLGDVCRQWNDAGAFTITGRPWTTTALSKFLRKPRNAGLRAYKGARYGPVDRDAIVGKAQWSPLVDEATFWAAQAVLDAPGRAPGRKSVRRHLLTGLAGCGKCGNHLAGSYRTDGRVVYVCKACHGVAILADNIEPILYHIVAERLAMPNAVDLLRREIHDAAEAEAIRMELETLYGELDRLAVERAEGLLTARQVKISTDIVNAKITKLQARQLDQERLRVLDGIPLGTPQVAGVIAELSPDRFRAVLDVLAEVVVQPVGKSGRVFNPERVQVNWR

SEQ ID NO: 4310 - protein, 469 aa, synthetic construct
MSYTTPVRAAVYLRISEDRSGEQLGVARQREDCLKLCGQRKWVPVEYLDNDVSASTGKRRPAYEQMLADITAGRIAAVVAWDLDRLHRRPIELEAFMSLADEKRLALATVAGDVDLATPQGRLVARLKGCVAAHETEHKKARQRRAARQKAERGHPNWSKAFGYLPGPNGPEPDPRTAPLVKQAYADILAGASLGDVCKQWNDAGAFTITGRPWTTTALSKFLRKPRNAGLRTYKGARYGPVDRDAIVGKAQWSPLVDETTFWAAQAVLDAPGRAPGRKSVRRHLLTGLAGCGKCGNHLAGSYRTDGRVVYVCKACHGVTILADNIEPILYHIVAERLAMPDAVDLLRREIHDAAEAETVHLELETLYGELDRLAVERAEGLLTARQVKISTDIVDAKIAKLQARQLDQERLRVLDGIPLGTPQVAGMIAELSPDRFRAVLDVLAEVVVQPVGKSGRISNPERVQVNWR

SEQ ID NO: 4311 - protein, 452 aa, synthetic construct
MKAAIYIRVSTREQVENYSIQAQTEKLAALCRSKDWDVYDIFIDGGYSGSNMNRPALNEMLSKLHEIDAVVVYRLDRLSRSQRDTITLIEEYFLKNNVEFVSLSETLDTGSPFGRAMIGILSVFAQLERETIRDRMVMGKIKRIEAGLPLTTAKGRTFGYDVIDTKLYINEEEAKQLQLIYDIFEEVQSITFLQRRLKKLGFKVRTYSCYNNWLTNDLYCGYVSYKDKVHVKGIHEPIISEEQFNRVQEIFTRMGKNPNMNRDSASLLSSLVVCSKCGLGFVHRRKDTMSRGKKYHYRYYSCKTYKHTHELEKCGNKIWRADKLEELIINRVNNYSFASRNVDKDDELDSLNEKLKIEHAKKKRLFDLYINGSYEVSELDSMMNDIDAQINYYESQIEANEELKKNKKIQENLADLATVDFDSLEFREKQLYLKSLINKIYIDGELVTIEWL

SEQ ID NO: 4312 - protein, 469 aa, synthetic construct
MSYTTPVRAAVYLRISEDRSGEQLGVARQREDCLKLCGQRKWVPVEYLDNDVSASTGKRRPAYEQMLADITAGKIAAVVAWDLDRLHRRPVELEAFMSLADERRLALATVAGDVDLATPQGRLVARLKGIVAAHETEHKKARQRRAARQKAERGLPNWSKAFGYLPGPNGPEPDPRTAPLVRQAYANILAGASLGDVCRQWNDAGAFTITGRPWTTTTLSKFLRKPRNAGLRAYKGARYGPVDRDAIVGKAQWNPLVDEATFWATQAVLDAPGRAPGRKSVRRHLLTGLAGCGKCGNRLAGSYRTDGRIVYVCKACHGVSILAVNVEPILYRIVAERLAMPDAVDLLRREIHDAAEAETVRLELETLYGELDRMAVERAEGLLTARQVKISTDIVNAKITKLQARQLDQERLRVFDGIPLGTPQVAGMIAELSPDRFRAVLDVLAEVVVQPVGKSGRIFSPERVQVNWR

SEQ ID NO: 4313 - protein, 452 aa, synthetic construct
MKAAIYIRVSTREQVENYSIQAQTEKLTALCRSKDWDVYDIFIDGGYSGSNMNRPALNEMLSKLHEIDAVVVYRLDRLSRSQRDTITLIEEYFLKNNVEFVSLSETLDTSSPFGRAMIGILSVFAQLERETIRDRMVMGKIKRIEAGLPLTTAKGRTFGYDVIDTKLYINEEEAKQLQLIYDIFEEEQSITFLQKRLKKLGFKVRTYNRYNNWLTNDLYCGYVSYKDKVHVKGIHEPIISEEQFNRVQEIFTRMGKNPNMNRDSASLLNNLVVCSKCGLGFVHRRKDIMGRGKKYHYRYYSCKTYKHIHELEKCGNKIWRADKLEELIINRVNNYSLASRNTDKEDELDSLNEKLKIEHAKKRRLFELYINGRHEVSELDSMMNDIDAQINYYESQIEANEELKKNKKIQENLAGLATVDFDSLEFREKQLYLKSLISKIYIDGEQVTIEWL

SEQ ID NO: 4314 - protein, 485 aa, synthetic construct
MTKKVAIYTRVSTTNQAEEGFSIDEQVDRLTKYAEAMGWQVSDTYTDAGFSGAKLGRPAMQRLINDIENKAFDTVLVYKLDRLSRSVRDTLYLVKDVFTKNKIDFISLNESIDTSSAMGSLFLTILSAINEFERENIKERMTMGKLGRAKSGKSMMWTKTAFGYYHNRKTGILEIVPLQATIVEQIFTDYLSGISLTKLRDKLNESGHIGKDIPWSYRTLRQTLDNPVYCGYIKFKDSLFEGMHKPIIPYETYLKVQKELEERQQQTYERNNNPRPFQAKYMLSGMARCGYCGAPLRIVLGHKRKDGSRTMKYHCANRFPRKTKGVTVYNDNKRCDSGTYDLSNLETTVIDNLIGFQENNDSLLKIINGNNQPILDTSSFKKQISQIDKKIQKNSDLYLNDFITMDELKDRTDSLLAEKKLLKAKISENKFNDSTDVIELVKAQLGSIPINELSYDNKKKIVNNLVSKVDVTADNVDIIFKFQLA

SEQ ID NO: 4315 - protein, 452 aa, synthetic construct
MKAAIYIRVSTREQVENYSIQAQTEKLTALCRSKDWDVYDIFIDGGYSGSNMNRPALNEMLSKLHEIDAVVVYRLDRLSRSQRDTITLIEEYFLKNNVEFVSLSETLDTSSPFGRAMIGILSVFAQLERETIRDRMVMGKIRRVEAGLPLTTAKGRTFGYDVIDTKLYINEGEAKQLQLIYDIFEEEQSITSLQKRLKKLGFRVRTYNRYNSWLTNDLYCGYVSYKDKVHVKGIHEPIISEEQFYRVQEIFTRMGKNPNMNRDSASLLNNLVVCSKCGLGFVHRRKDTTSRGKKYHYRYYSCKTYKHTHELEKCGNKIWRADKLEELIINRVNNYSFASRNVDKEDELDSLNEKLKIEHAKKKRLFDLYINGSYEVSELDCMMNDINAQINYYESQIEANEELKKDKKIRESLANLATVDYDSLEFREKQLYLKSLINKIYIDGEQVTIEWL

SEQ ID NO: 4316 - protein, 452 aa, synthetic construct
MKAAIYIRVSTREQVENYSIQAQTEKLTALCRSKDWDVYDIFIDGGYSGSNMNRPALNEMLSKLHEIDAVVVYRLDRLSRSQRDTITLIEEYFLKNDVEFVSLSETLDTSSPFGRAMIGILSVFAQLERETIRDRMVMGKIKRVEAGLPLTTAKGRTFGYDVIDTKLYINEEEAKQLQLIYDIFEEEQSITSLQKRLKKLGLKVRTYSRYNNWLTNDLYCGYVSYKDKVHVKGIHEPIISEEQFYRVQEIFTRMGKNPNMNRDSASLLNNLVVCSKCGLGFVHRRKDTTSRGKKYHYRYYSCKTYKHIHELEKCGNKIWRADKLEELVINRVNNYSFASRNVDKEDELASLNEKLKIEHAKKKRLFDLYINGSYEVSELDSMMNDIDAQINYYESQIEANKELKKNEKIQENLADLATVDFDSLEFREKQLYLKSLINKIYIDGEQVTIEWL

SEQ ID NO: 4317 - protein, 452 aa, synthetic construct
MKAAIYIRVSTREQVENYSIQAQTEKLTALCRSKDWDVYDIFIDGGYSGSNMNRPALNEMLSKLHEIDAVVVYRLDRLSRSQRDTITLIEEYFLKNNVEFVSLSETLDTSSPFGRAMIGILSVFAQLERETIRDRMVMGKIKRIEAGLPLTTAKGRTFGYDVIDTRLYINEEEAKQLQLIYDIFEEEQSITFLQKRLKKLGFKVHTYNRYNNWLTNDLYCGYVSYKDKVHVKGIHEPIISEEQFYRVQEIFTRMGKNPNMNRDSASLLNNLVVCGKCGLGFVHRRKDAASRDKKYHYRYYSCKTYKHIHELEKCGNKIWRADKLEELIVNRVNNYSFASRNADKEDELDSLNEKLKTEHAKKKRLFDLYINGSFEVSELDSMMNDIDAQISYYESQIEANEELRKNKKVQENLAYLATVDFDSLEFREKQLYLKSLISKIYIDGEQVTIEWL

SEQ ID NO: 4318 - protein, 452 aa, synthetic construct
MKAAIYIRVSTREQVENYSIQAQTEKLTALCRSKDWDVYDIFVDGGYSGSNMNRPALNEMLSKLHEIDAVVVYRLDRLSRSQRDTITLIEEYFLKNNVEFVSLSETLDTSSPFGRAMIGILSVFAQLERETIRDRMVMGKIKRIEAGLPLTTAKGRTFGYDVIDTKLYINEEEAKQLRLIYDIFEEEQSITFLQRRLKKLGFKVRTYSCYNNWLTNDLYCGYVSYKDKVHVKGIHEPIISEEQFYRVQEIFARMGKNPNMNRDSASLLNSLVVCSKCGLSFVHRRKDTMSRGKKYHYRYYSCKTYKHIHELEKCGNKIWRADKLEELIINRVNNYSFASRNVDKEDELDSLNEKLKIEHAKRKRLFDLYINGSYEVSELDSMMNDIDAQISYYEGQIEANEELKKNRKIQENLADVATVDFGSLEFREKQLYLKSLINKIYIDGEQVTIEWL

SEQ ID NO: 4319 - protein, 452 aa, synthetic construct
MKAAIYIRVSTQEQVENYSIQAQTEKLTALCRSKDWDVYDIFIDGGYSGSNMNRPALNEMLSKLHEIDAVVVYRLDRLSRSQRDTITLIEEYFLKNNVEFVSLSETLDTSSPFGRAMIGILSVFAQLERETIRDRMVMGKIKRIEAGLPLTTAKGRTFGYDVIDTKLYINEEEAKQLQLIYDIFEEEQSITFLQKRLKRLGFKVHTYNRYNNWLTNDLYCGYVSYKDKVHVKGIHEPIISEEQFYRVQEIFTRMGKNPNMNRDSASLLSNLVVCSKCGLSFVHRRKDTTSRGKKYHYRYYSCKTYKHTHELEKCGNKIWRADKLEELIINRVNNYSFASRNVDKEDELDSLNEKLRIEHAKRKRLLDLYINGSYEVSELGSMMNDIDAQINYYESQIEANEELKRNKKIQENLANLASVDYDSLEFREKQLYLKSLINKIYIDGEQVTVEWL

SEQ ID NO: 4320 - protein, 469 aa, synthetic construct
MSYTTPVRAAVYLRISEDRSGEQLGVARQREDCLKLCGQRKWVPVEYLDNDVSASTGKRRPAYEQMLADITAGKIAAVVAWDLDRLHRRPIELETFMSLADEKRLALATVAGDVDLATPQGRLVARLKGCVAAHETEHKKARQRRAARQKAERGLPNWSKAFGYLPGPNGPEPDPRTAPLVKQAYADILAGASLGDVCRQWNGAGALTITGRPWTTTTLSKFLRKPRNAGLRAYKGARYGPVDRDAIVGKAQWSPLVDEATFWAAQAVLDAPGRAPGRKSVRRHLLTGLAGCGKCGNHLAGSYRTDGRVVYVCKACHGVAILAENIEPILYHVVAERLAMPDAVDLLRREVHDAAEAETIRLELETLYGELDRLAVERAEGLLTARQVKISTDIVNAKIARLQARQLDQERLRVFDGIPLGTPQVAGMIAELSPDRFRAVLDVLAEVVVQPVGKSGRIFNPERVQVNWR

SEQ ID NO: 4321 - protein, 452 aa, synthetic construct
MKAAIYIRVSTREQVENYSIQAQTEKLTALCRSKDWDVYDIFIDGGYSGSNMNRPALNEMLSKLHEIDAVVVYRLDRLSRSQRDTITLIEEYFLKNNVEFVSLSETLDTSSPFGRAMIGILSVFAQLERETIRDRMVMGKIKRIEAGLPLTTAKGRTFGYNVIDTKLYINEEEAKQLQLIYDIFEEEQSITFLQKRLKKLGFKVRTYNRYNSWLTNDLYCGYVSYKDKVHVKGIHEPIISEEQFYRVQEIFARMGKNPNINRDSASLLNNLVVCSKCGLGFVHRRKDTTSRGKKYHYRYYSCKTYKHTHELEKCGNKIWRADKLEELIINRVNNYSFASRNVDKEDELDSLNEKLKIEHAKKKRLFDLYINGSYEVSELDCMMNNIDAQINYYESQIEANEELKKDKKIQESLANLATVDYDSLEFREKQLYLKSLINKIYIDGEQVTIEWL

SEQ ID NO: 4322 - protein, 485 aa, synthetic construct
MTKKVAIYTRVSTTNQAEEGFSIDEQIDRLTKYAEAMGWQVSDTYTDAGLSGAKLERPAMQRLINDIENKAFDTVLVYKLDRLSRSVRDTLYLVKDVFTKSKVDFISLNESIDTSSAMGSLFLTILSAINEFERENIKERMTMGKLGRAKSGKSMMWTKTAFGYYHNRETGILEIAPLQATIVEQIFTDYLSGISLTKLRDKLNESGHIGKDIPWSYRTLRQTLDNPVYCGYIKFKDSLFEGMHKPIIPYETYLKVQKELEVRQQQTYERNNNPRPFQAKYMLSGMARCGYCGAPLRIVLGHKRKDGSRTMKYHCANRFPRKTEGVTVYNDNKRCDSGTYDLSNLENTVIDSLIGFQENNDSLLKIINGNNQPILDTSSFKKQISQIDKKIQKNSDLYLNDFITMDELKNRTDSLQAEKKLLEAKISENKFNERTDVFELVKTQLGSIPINELSYDNKKKIVNDLVSKVDVTADNVDIIFKFQLA

SEQ ID NO: 4323 - protein, 452 aa, synthetic construct
MKAAIYIRVSTREQVENYSIQAQTEKLTALCRSKDWDVYDIFIDGGYSGSNMNRPALSEMLSKLHEIDAVVVYRLDRLSRSQRDTITLIEEYFLKNNVEFVSLSETLDTSSPFGRAMIGILSVFAQLERETIRDRMVMGKIKRIEAGLPLTTAKGRTFGYDVIDTKLYINEEEAKQLQLIYDIFEEEQSITFLQKRLKKLGFKVHTYNRYNNWLTNDLYCGYVSYKDKVHVKGIHEPIISEEQFYRVQEIFARTGKNPNMNRNSASLLNNLVVCSKCGLGFVHRRKDTTSRGKKYHYRYYSCKTYKHTHELEKCGNKIWRADKLEELIINRVNNYSFASRNADKEDELDSLNEKLKIEHAKKKRLFDLYINGGYEVSELDSMMSDIDAQINYYESQIEANEELRKNKKIQENLANLATVDYDSLEFREKQLYLKSLINKIYIDGEQVTIEWL

SEQ ID NO: 4324 - protein, 485 aa, synthetic construct
MTKKVAIYTRVSTTNQAEEGFSIDEQIDRLTKYAEAMGWQVSGTYTDAGFSGAKLERPAMQRLINDIENKAFDTVLVYKLDRLSRSVRDTLYLVKDVFTKNRIDFISLNESINTSSAMGSLFLTILSAINEFERENIKERMTMGKLGRAKSGKSMMWTKTAFGYYHNRETGILEIVPLQATIVEQIFTDYLSGVSLTKLRDKLNESGHIGKDIPWSYRTLRQTLDNPVYCGYIKFKDSLFEGMHKPIIPYETYLKVQKELEERQQQTYERNNNPRPFQAKYMLSGMARCGYCGAPLKIVLGHKRKDGSRSMKYHCANRFPRKTEGVTVYNDNKKCDSGTYDLSYLENTVIDTLTGFQENNGSLLKIINGNNQPTLDTSSFKEQISQIDKKIQKNSDLYLNDFITMDELKDRTDSLQAEKKLLKARISEDKFNDSTDVFELVKTQLGSIPINELSYDNKKKIVNNLVSKVDVTADNVDIIFKFQLA

SEQ ID NO: 4325 - protein, 452 aa, synthetic construct
MKAAIYIRVSTQEQVENYSIQAQTEKLTALCRSKDWDVYDIFIDGGYSGSNMNRPALNEMLSKLHEIDAVVVYRLDRLSRSQRDTTTLIEEYFLKNNVEFVSLSETLDTSSPFGRAMIGILSVFAQLERETIRDRMVMGKIKRIEAGLPLTTAKGRTFGYDVIDTKLYVNEEEAKQLRLIYDIFEEEQSITLLQKRLKKLGFKVRTYNRYNSWLTNDLYCGYVSYKDEVHVKGIHEPIISEEQFYRVQEIFTRMGKNPNMNRDSASLLSNLVVCSKCGLGFVHRSKDTMSRGKKYHYRYYSCKTYKHTHELEKCGNKTWRADKLEELIINRVNNYSFASRNVDKEDGLDSLGEKLETERAKKKRLFDLYINGSYEASELDSMMNDIDAQINYYESQIEANEELRKNRKIQENLADLATVDFDGLEFRDKQLYLKSLINKIYIDGEQVTIEWL

SEQ ID NO: 4326 - protein, 452 aa, synthetic construct
MKAAIYIRVSTQEQVGNYSIQAQTEKLTALCRSKDWDVYDTFIDGGYSGSNMNRPALNEMLSKLHEIDAVVVYRLDRLSRSQRDTTTLIEEYFLKNNVEFVSLSETLDTSSPFGRAMIGILSVFAQLERETIRDRMVMGKIKRIEAGLPLTTAKGRTFGYDVIDTKLYINEEEARQLQLIYDIFEEEQSITYLQKRLKKLGFKVRTYNRYNSWLTNDLYCGYVSYKDKVHVKGIHEPIISEEQFYRVQEIFTRMGKNPNMNRDSASLLSNLVVCSKCGLGFVHRSKDTMSRGKKYHYRYYSCKTYKHTHELEKCGNKTWRADKLEELVINRVNNYSFASRNVDKEDELDSLNEKLKIEHAKKKRLFDLYINGSYEVSELDSMMNDIDAQINYYESQIVANEELKKNKKIQGSLANLATVDFDSLEFREKQLYLKSLINKIYIDGEQVTIEWL

SEQ ID NO: 4327 - protein, 485 aa, synthetic construct
MTKKVAIYTRVSTTNQAEEGFSIDEQIDRLTKYAEAMGWQVSDTYTDAGSSGAKLERPAMQRLISDIENKAFDTVLVYKLDRLSRSVRDTLYLVKDVFTKNKIDFISLNESIDTSSAMGSLFLTILSAINEFERENIKERMTMGKLGRAKSGKSMMWTKTAFGYYHNRKTGILEIVPLQATIVEQIFTDYLSGISLTKLRDKLNESGHIGKDIPWSYRTLRQTLGNPVYCGYIKFKGSLFEGLHKPIIPYETYLKVQKELEERQQQTYERNNNPRPFQAKYMLSGMARCGYCGAPLRIVLGHRRKDGSRTMKYHCANRFPRKTGGVTVYNDNKKCDSGTYDLSNLENTVIDNLIGLQENNDSLLKIINGNNQPILDTSSFKKQISQIDKRIQRNSDLYLNGFITMDELKDRTGSLQAEKKLLKAKISENKFNDSTDVFELVKTQLGSVPINELSYDNKKKIVNNLVSKVDVTADSVDIIFKFQLA

SEQ ID NO: 4328 - protein, 485 aa, synthetic construct
MTKKVAIYTRVSTANQAEEGFSIDEQIGRLTKYAEAMGWQVSDTYTDAGSSGAKLERPAMQRLINDIENKAFDTVLVYKLDRLSRSVRDTLYLVKDVFTKNKIDFISLNESIDTGSAMGSLFLTILSAINEFERENIKERMSMGKLGRAKSGKSMMWTKTAFGYYHNRKTGILEIVPLQATIVEQIFTDYLSGISLTKLRDKLNESGHIGKDIPWSYRTLRQTLDNPVYCGYIKFKDSLFEGMHKPIIPYETYLKVQKELGERQQQTYERNNNPRPFQAKYMLSGMARCGYCGAPLRIVLGRRRKDGSRTMKYHCANRFPRKTKGVTVYNDNKKCDSGTYDLSNLENTVIDNLIGFQENNDSLLKIINGNNQPIPDTSSLKKQISQIDKKIQKYSDLYLNDFITMDELKDRTDSLRAEKKLLKARISENKFNDSTDVFELVKTQLGSIPINELSYDNKKKIVNNLVSKVDVTADNVDIIFKFQLA

SEQ ID NO: 4329 - protein, 452 aa, synthetic construct
MKAAIYIRVSTREQAENYSIQAQTEKLTALCRSKDWDVYDIFIDGGYSGSNMNRPALNEMLSKLHEIDAVVVYRLDRLSRSQRDTITLIEEYFLKNNVEFVSLSETLDTSSPFGRAMIGILSVFAQLERETIRDRMVMGKIKRIEAGLPLTTAKGRTFGYDVIDTKLYINEEEAKQLQLIYDIFEEEQSITFLQKRLKKLGFKVRTYSCYNNWLTNDLYCGYVSYKDKVHVKGIHEPIISEEQFYRVQEIFTRMGKNPNMNRDSASLLNNLVVCSKCGLGFVHRRKDTTSRGKKYHYRYYSCKTYKHTHELEKCGNKIWRADKLEELIINRVNNYSFAGRNVDKEDELDSLNEKLKIEHAKKKRLFDLYINGSYEVSELDSMMSDIDAQISYYESQIEANKELKKNKKIQENLANLATVDYDSLEFREKQLYLKSLINKIYIDGEQVTIEWL

SEQ ID NO: 4330 - protein, 485 aa, synthetic construct
MIKKVAIYTRVSTTNQAEEGFSIDEQIDRLTKYAEAMGWQVSDTYTDAGFSGAKLERPAMQRLINDIENKAFDTVLVYKLDRLSRSVRDTLYLVKDVFTKNKIDFISLNESIDTSSAMGSLFLTILSAINEFERENIKERMTMGKLGRAKSGKSMMWTKTAFGYYHNRKTGILEIVPLQATIVEQIFTDYLSGISLTKLRDKLNESGHIGKDIPWSYRTLRQTLDNPVYCGYIKFKGSLFEGMHEPIIPYETYLKVQKELEERQQQTYERNNNPRPFQAKYMLSGMARCGYCGAPLKVVLGHKRKDGSRTMKYYCANRFPRKTKGVTVYNNNRKCDSGTYDLSNLETAVTDILIGFQENNDSLLKIVNGNNQPTLDTSSIKEQISQIDKKIQKNSDLYLNDFITMDELKDRTDSLQAEKKLLKAKISENKFNDSTDVFELVKTQLGSIPINELSYDDKKKIVNNLVSKVDVTAGNVDIIFKFQLA

SEQ ID NO: 4331 - protein, 452 aa, synthetic construct
MKAAIYIRVSTREQVENYSIQAQTEKLTALCRSKDWDVYDIFIDGGYSGSNMNRPALNEMLSKLHEIDAVVVYRLDRLSRSQRDTITLIEEYFLKNNVEFVSLSETLDTSSPFGRAMIGILSVFAQLERETIRDRMVMGKIKRIEAGLPLTTAKGRTFGYDVIDTKLYINEEEAKQLRLIYDIFEEEQSITSLQKRLKELGFKVRTYSRYSSWLTNDLYCGYVSYKDKVHVKGVHEPIISEEQFYRVQEIFTRMGKNPNMNRDSASLLNNLVVCSKCGLGFVHRRKDTMSRGKKYHYRYYSCKTYKHTHELEKCGNKIWRADKLEELIINRVNNYSFACRNADKEDELDSLNEKLKIEHAKKNRLFDLYINGSYNVSELDSMMNDIDAQINYYEGQIEANEELRKSKKIQENLAGLATVDFDSLEFGEKQLYLKSLINKIYIDGEQVTIEWL

SEQ ID NO: 4332 - protein, 485 aa, synthetic construct
MTKKVAIYTRVSTTNQAEEGFSIDEQIDRLTKYAEAMGWQVSDTYTDAGFSGANLGRPAMQRLINDIENKVFDTVLVYKLDRLSRSVRDTLYLVKDVFTKSKIDFISLTESIDTSSAMGSLFLTILSAINEFERENIKERMTMGKLGRAKSGKSMMWTKTAFGYYHNRVTGILEIVPLQATIVEQIFTDYLSGISLTKLRDKLNESGHIGKDIPWSYRTLRQTLDNPVYCGYIKFKDSLFEGMHKPIIPYETYLKVQKELEERQQQTYERNNNPRPFQAKYMLSGMARCGYCGAPLKIVLGHKRKDGGRTMKYHCANRFPRKTKGVTVYNDNKKCDSGTYDLSNLENTVIDNLIGFQENNDSLLKIINGNNQPIPDTSGFKKQISQIDKKIQKISDLYLNDFITMDELKDRTDSLQAEKKLLKAKISENKFNDSTDVFELVKTQLGSIPINELSYDNKKKIVNNLVSKVDVTADSVDIIFKFQLA

SEQ ID NO: 4333 - protein, 452 aa, synthetic construct
MKAAIYIRVSTREQVENYSIQAQTEKLTALCRSKDWDVYDIFIDGGYSGSNMNRPALNEMLSKLHEIDAVVVYRLDRLSRSQRDTITLIEEYFLKNNVEFVSLSETLDTSSPFGRAMIGILSVFAQLERETIRDRMVMGKIKRIEAGLPLTTAKGRTFGYDVIDTKLYINEEEARQLRLIYDIFEEEQSITFLQKRLKKLGSKVRTYNCYNNWLTNDLYCGYVSYKDKVHVKGIHEPIISEEQFYRVQEIFARMGKNPNMNRDSASLLNNLVVCSKCGLGFVHRRKDTMSRGKKYHYRYYSCKTYKHTHELEKCGNKIWRADKLEELIINRVNNYSLASRNVDKEDELDSLNEKLKIEHAKRKRLFDLYINGSYEVSELDSMMNDIDAQINYYESQIEANEELKKNKKIQENLADLATVDFDSLEFREKQLYLKSLINKIYIDGEQVTIEWL

SEQ ID NO: 4334 - protein, 452 aa, synthetic construct
MKAAIYIRVSTREQVENYSIQAQTEKLTALCRSKDWDVYDIFIDGGYSGSNMNRPALNEMLSKLHEIDAVVVYRLDRLSRSQRDTITLIEEYFLKNNVEFVSLSETLDTSSPFGRAMIGILSVFAQLERETIRDRMVMGKIKRIEAGLPLTTAKGRTFGYDVIDTKLYINEEEAKQLQLIYDIFEEEQSITLLQKRLKNLGFKVRTYNRYNSWLTNDLYCGYVSYKDKVRVKGIHEPIISEEQFYRVQEIFTRMGKNPNMNRDSASLLNNLVVCSKCGLGFVHRRKDTVSRGKKYHYRYYSCKTYKHIHELEKCGNKIWRADKLEELIINRVNNYSFASRDVDKEDELDSLNEKLKIEHAKKRRLFDLYINGSYEVSELDGMMSDIDAQINYYESQIEASEELKKNKKIQESLADLATVDFDSLEFREKQLYLKSLINKIYIDGEQVAIEWL

SEQ ID NO: 4335 - protein, 486 aa, synthetic construct
MTKKVAIYTRVSTTSQAEEGFSIDEQIDRLTKYAEAMGWQVSDTYTDAGFSGAKLERPAMQRLINDIENKAFDTVLVYKLDRLSRSVRDTLYLVKEVFTKNKIDFISLNESIDTSSAMGSLFLTILSAINEFERENIKERMTMGKLGRAKSGKSMMWTKTAFGYYHNRKTGILEIVPLQATIVEQIFTDYLSGISLTKLRDKLNESGHIGKDIPWSYRTLRQTLDNPVYCGYIKFKDCLFEGMHEPIIPYETYLKVQKELVERQQQAYERNNNPRPFQAKYMLSGMARCGYCGAPLRIVLGHKRKDGSRTMKYHCANRFPRKTRGITVYNDNKKCDSGTYDLSDLENTVIDNLIGFQENNESLLKIINGNNQPIPDTSSFEEQISQIDEKIQKNSDLYLNDLITMDELKDRTVSLQAEKKLLKAKISENKFNDSTDVFELVKTQLGSIPINELSYDNKKKIVNNLVSKVDVTADNVDIIFKFQLAQ

SEQ ID NO: 4336 - protein, 485 aa, synthetic construct
MTKKVAIYTRVSTTNQAEEGFSIDEQTDRLTKYAEAMGWQVSDTYTDAGFSGAKLGRPAMQRLINDIENKAFDTVLVYKLDRLSRSVRDTLYLVNDVFTKNKIDFISLSESIDTSSAMGSLFLTILSAINEFERENIKERMTMGKLGRAKSGKSMMWTKTAFGYYHNRKTGILEIVPLQAAIVEQIFTDYLSGISLTKLRDKLNESGHIGKDIPWSYRTLRQTLDNPVYCGYIKFKDCLFEGMHKPIIPYETYLKVQKELEERQQQTYERNNNPRPFQAKYMLSGMARCGYCGAPLKIVLGHKRKDGSRTMKYHCANRFPRKTKGVTVYNGNKKCDSGTYDLSNLENTVIDSLIGFQENNDSLLKIINGNNQPILDTCSFKKQISQIDKKIQKNSDLYLNDFITMDGLKDRTDSLRAEKKLLKAKISENKFNDSTDVFELVKTQLGSTPINELSYDNKKKIVNSLVSKVDVTADNVDIIFKFQLA

SEQ ID NO: 4337 - protein, 452 aa, synthetic construct
MKAAIYIRVSTQEQVGNYSIQAQTEKLTALCCSKGWDVYDIFIDGGYSGSNMNRPALNEMLSKLHEIDAVVVYRLDRLSRSQRDTTTLIEEYFLKNNVEFVSLSETLDTSSPFGRAMIGILSVFAQLERETIRDRMVMGKIKRIEAGLPLTTAKGRTFGYDVIDTKLYINEEEAKQLQLIYDIFEEEQSITLLQKRLKKLGFKVRTYNRYNNWLTNDLYCGYVSYKDKVHVKGIHEPIISEEQFYRVQEIFTRMGKNPNMNRDSASLLSNLVVCSKCGLGFVHRSKDTMSRGKKYHYRYYSCKTYKHTHELEKCGNKIWRADKLEELIINRVNNYSFVSRNVDKEDELDSLSEKLRIEHAKKKRLFDLYINGSYEVSELDSMMNDIDAQINYYESQIEANEGLRRNKKIQENLADLATVDFDSLEFREKQLYLKSLINKIYIDGEQVTIEWL

SEQ ID NO: 4338 - protein, 469 aa, synthetic construct
MSYTTPVRAAVYLRISEDRSGEQLGVARQREDCLELCGQRKWVPVEYLDNDVSASTGKRRPAYEQMLADITAGKIAAVVAWDLDRLHRRPIELEAFMSLADEKRLALATVAGDVDLATPQGRLVARLKGCVAAHETEHKKARQRRAARQKAERGLPNWSKAFGYLPGPNGPEPDPRTAPLVKQAYADILAGASLGDVCRQWNDAGAFTITGRPWTTTTLSKFLRKPRNAGLRAYKGARYGPVDRDAIVGKAQWSPLVDEATFWAAQAVLDAPGRAPGRKSVRRHLLTGLAGCGKCGNHLAGSYRTDGRVVYVCKACHGVAILADNIEPTLYHIVAERLAMPDAVDLLRREIHDAAEAETIRLELETLYGELDHLAVERAEGLLTARQVKIGTDIVNAKITKLRARRLDQERLRVFDGIPLGTPQVAGVIAELSPDRFRAVLDVLAEVAVQPVGKRGRISNPERVQVNWR

SEQ ID NO: 4339 - protein, 469 aa, synthetic construct
MSYTTPVRAAVYLRISEDRSGEQLGVARQREDCLKLCDQRKWVPVEYLDNDVSASTGKRRPAYEQMLADIIAGKIAAVVAWDLDRLHRRPVELEAFMSLADEKRLALATVAGDVDLATPQGRLVARLKASVAAHETEHKKARQRRAARQKAERGHPNWSKAFGYLPGPSGPEPDPRTAPLVKQAYADILAGASLGDVCRRWNDAGAFTITGRPWTTTTLSKFLRKPRNAGLRAYKGARYGPVDRDAIVGKAQWSPLVDEATFWAAQAVLDAPGRAPGRKSVRRHLLTGLAGCGKCGNRLAASYRTDGRVVYVCKACHGVAILADNIEPTLYHIVAERLAMPDAVDLLRREIHDAAEAETIRLELKTLYGELDRLAVERAEGLLTARQVKISTDIVNAKITKLQARQQDQERLRVLDGIPLGTPQVASAIAELSPDRFRAVLDVLAEVVVLPVGKSGRTSNPERVRVNWR

SEQ ID NO: 4340 - protein, 452 aa, synthetic construct
MKAAIYIRVSTREQVENYSIPAQTEKLTALCRSRDWDVYDIFVDGGYSGSNMNRPALNEMLSKLHEIDAVVVYRLDRLSRSQRDTITLIEEYFLKNNVEFVSLSETLDTSSPFGRAMIGILSVFAQLERETIRDRMVMGKIKRIEAGLPLTTAKGRTFGYDVIDTKLYINEEEARQLRLIYDIFEEEQSITFLQKRLKKLGFKVHTYNRYNNWLTNDLYCGYVSYKDKVHVKGIHEPIISEEQFYRVQEIFTRMGKNPNMNRDSASLLNNLVVCSRCGLGFVHRRKDAMSRDKKYHYRYYSCKTYKHVHELEKCGNKIWRADKLEELIISRVNDYSSASCNADKEDELDSLNEKLKIEHAKKKRLFDLYINGGYEVSELNSMMNGIDAQINYYESQIEANEELKKNKKIQENLANLATVDFDGLDFREKQLYLKSLINKIYIDGEQVTIEWL

SEQ ID NO: 4341 - protein, 485 aa, synthetic construct
MTKKVAIYTRVSTTNQAEEGFSIDEQIDRLTKYAEAMGWQVSDTYTDAGFSGAKLERPAMQRLINDIENKAFDTVLVYKLDRLSRSVRDTLYLVKDVFTKSKIDFISLNECIDTSSAMGSLFLTILSAINEFERENIKERMAMGKLGRAKSGKSMMWTKTAFGYYHNRKTGILEIVPLQATIVEQIFTDYLSGISLTKLRDKLNESGHIGKDIPWSYRTLRQTLDNPVYCGYIKFKDSLYEGMHKPIIPYETYLKVQKELEERQQQTYERNNNPRPFQAKYMLSGMARCGYCGAPLRIVLGRKRKDGSRTMKYHCANRFPRKTKGVTVYNDNKKCDSGTYDLSNLENTVIDNLIGFQENNNSLLKIINGSDQPILDTSSFKKQISQIDKKIQKNSDLYLNDFITMGELKDRTDSLQAEKKLLQAKISENKFNDSTDVLELVRTQLGSIPINELSYDNKKKIVNNLVSKVDVTADNVDITFKFQLA

SEQ ID NO: 4342 - protein, 486 aa, synthetic construct
MTKKVAIYTRVSTTNQAEEGFSIDEQIDRLTKYAEAMGWQVSDTYTDAGFSGAKLGRPAMQRLINDIENKAFDTVLVYKLDRLSRSVRDTLYLVKDVFAKNKIDFISLNESIDTSSAMGSLFLTILSAINEFERENIKERMTMGKLGRAKSGKSMMWTKTAFGYYHNRKTGILEIVPLQATIVEQIFTDYLSGVSLTKLRDKLNEGGHIGKDIPWSYRTLRQTLDNPVYCGYIKFKDSLFEGMHKPIIPYETYLKVQKELEERQQQTYERNNNPRPFQAKYMLSGMARCGYCGAPLRIVLGHKRKDGSRTMKYHCANRFPRKTKGVTVYNDNKKCDSGTYDLSYLENTVIDSLIGFQENNDSLLKIINGNNQPILDTSSFKKQISQIDKKIQKNSDLYLNDFITMDELKDRTDSLQAEKKLLKAKISENKFNDSTDVFELVKTRLGSIPINELSYDNKKKIVNNLVSKVDVTADNVDIIFKFQLAY

SEQ ID NO: 4343 - protein, 485 aa, synthetic construct
MTKKVAIYTRVSTTNQAEEGFSIDEQIDRLTKYAEAMGWQVSDTYTDAGSSGAKLERPAMQRLINDIENKAFDTVLVYKLDRLSRSVRDTLYLVKDVFTKNKIDFISLNESIDTSSAMGSLFLTILSAINEFERENIKERMTMGKLGRAKSGKSMMWTKTAFGYYHNRKTGILEVVPLQATIVEQIFTDYLSGISLTKLRDKLNESGHIGKDIPWSYRTLRQTLDNPVYCGYIKFKDSLFEGMHKPIIPYETYLKVQKELEERQQQTYERNNNPRPFQAKYMLSGMARCGYCGAPLRIVLGRKRKDGGRTMKYHCANRFPRKTKGVTVYNDNKKCDSGTYDLSNLENTVIDNLIGFQEDNDSLLKIINGNNQPILDTSSFREQISQIDKKIQKNSDLYLNDFITMDELKDRTDSLQAEKKLLKAKIGENKFNDSADVFELVKTQLGSVPINELSYDNKKKIVNNLVSKVDVTADNVDIIFKFQLA

SEQ ID NO: 4344 - protein, 485 aa, synthetic construct
MTKKVAIYTRVSTTNQAEEGFSVDEQIDRLTKYAEAMGWQVSDTYTDAGISGAKLERPAMQRLINDIENKAFDTVLVYKLDRLSRSVRDTLYLVKEVFTKNKIDFISLNESIDTSSAMGSLFLTILSAINEFERENIKERMTMGKLGRAKSGKSMMWTKTAFGYYHNRKTGILEIVPLQATIVEQIFTDYLSGISLTKLRDKLNESGHIGKDIPWSYRTLRQTLGNPVYCGYIKFKDSLFEGMHKPIIPYETYLKVQKELEERQQQAYERNNNPRPFQAKYMLSGMARCGYCGAPLRIVLGHKRKDGSRTMKYHCANRFPRKTRGVTVYNENKKCDSGTYDLRNLENTVIDNLIGFQENNDSLLKIINGNNQPILDTSSFKKQISQIDKKIRKNSDLYLNDFITMDELKGRTDSLQAEKKLLKAKISENKFSDGTDVFELVKAQLGSTPINELSYDNKKKIVNNLVSKVDVTADNVVITFKFQLA

SEQ ID NO: 4345 - protein, 452 aa, synthetic construct
MKAAIYIRVSTREQVENYSIQAQTEKLTALCRSKDWDVYDIFIDGGYSGSNMNRPALNEMLSKLHEIDAVVVYRLDRLSRSQRDTITLIEEYFLKNNVEFVSLSETLDTSSPFGRAMIGILSVFAQLERETIRDRMVMGKIKRIEAGLPLTTAKGRTFGYDVIDTKLYINEEEAKQLRLIYDIFEEEQSITFLQKRLKKLGFKVRTYNRYNNWLTNDLYCGYVSYKDKVHVKGIHEPIISEEQFYRVQEIFTRMGKSPNMNRDSASLLSNLVVCSKCGLGFVHRRKDTTSRGKKYHYRYYSCKTYKHTHELEKCGNKIWRADKLEELIINRVNSYSFASRNVDEEDELDSLNEKLKIEHAKKKRLFNPYINGSFGASELDSMMSDTDAQINYYESQIEANEELKKNKKIQENLANLATVDYDSLEFREKQLYLKSLINKIYIDGEQVTIEWL

SEQ ID NO: 4346 - protein, 452 aa, synthetic construct
MKAAIYIRVSTQEQVGNYSIQAQTEKLTALCRSKDWDVYDIFIDGGYSGSNMNRPALNEMLSKLHEIDAVVVYRLDRLSRSQRDTTTLIEEYFLKNNVEFVSLSETLDTSSPFGRAMIGILSVFAQLERETIRDRMVMGKIKRIEAGLPLTTAKGRTFGYDVIDTKLYINEEEAKQLQLIYDIFEEEQSITFLQKRLKKLGFKVRTYNRYNSWLTNDLYCGYVSYKDTVRVKGIHEPIISEEQFYRVQEIFTRTGKNPNMNRDSASLLNNLVVCSKCGLGFVHRSKDTMSRGKKYHYRYYSCKTYKHTHELEKCGNKTWRADKLEELVINRVNNYSFASRNVDKEGELDSLNEKLKIEHAKKKRLFDLYINGSYEVSELDSMMNDIDVQINYYESQIEANEELKKNKKVQENLAELATVDFDSLEFREKQLYLKSLINKIYIDGEQVTIEWL

SEQ ID NO: 4347 - protein, 485 aa, synthetic construct
MTKKVAIYTRVSTTNQAEEGFSIDEQIDRLTKYAEAMGWQVSDTYTDAGLSGAKLERPAMQRLINDTENKVFDTVLVYKLDRLSRSVRDTLYLVKDVFTKNKIDFISLNESIDTSSAMGSLFLTILSAINEFERENIKERMTMGKLGRAKSGKSMMWTKTAFGYYHNRKTGILEIVPLQATIVEQIFTDYLSGISLTKLRDKLNESGHIGKDIPWSYRTLRQTLDNPVYCGYIKFKDSLFEGMHKPIIPYETYLKVQKELEERQQQTYERNNNPRPFQAKYMLSGMARCGYCGAPLRIVLGHKRKDGSRTMKYHCANRFPRKTEGITVYNDNKRCDSGTYDLSNLENTVIDSLIGLQENNDSLLKIINGNNQPILDTSSFEKQISQIDKKIQKNGDLYLNDFITMDELKDRTDSLQAEKKLLEAKISENKFNDSTDVFELVRTQLGSIPINELGYDNKKKVVNNLVSKVDVTADNVDIIFKFQQA

SEQ ID NO: 4348 - protein, 452 aa, synthetic construct
MKAAIYIRVSTREQVENYSIQAQTEKLTALCRSKDWDVYDIFIDGGYSGSNMNRPALNEMLSKLHEIDAVVVYRLDRLSRSQRDTITLIEEYFLKNNVEFVSLSETLDTSSPFGRAMIGILSVFAQLERETIRDRMVMGKIKRIEAGLPLTTAKGRTFGYDVIDSKLYINEEEAKQLQLIYDIFEEEQSITFLQKRLKKLGLKVRTYSRYNNWLTNDLYCGYVSYKDKVHVKGIHEPIISEEQFYRVQEIFTRMGKNPNMNRDSASLLNNLVVCSKCGLGFVHRRKDTMSRGKKYHYRYYSCKTYKHIHELEKCGNKIWRADKLEELIINRVNNYSFASRNVDKEDELGSLNEKLRVEHAKKKRLFDLYINGSYEVSELDSMMSDIDAQINYYESQIGANEELKKNKKIQESLANLATVDYDSLEFREKQLYLKSLINKIYIDGEQVAIEWL

SEQ ID NO: 4349 - protein, 469 aa, synthetic construct
MSYTTPVRAAVYLRISEDRSGEQLGVARQREDCLKLCDQRKWVPVEYLDNDVSASTGKRRPAYEQMLADITAGKIAAVVAWDLDRLHRRPIELEAFMSLADEKRLALATVAGDVDLATPQGRLVARLKGSVAAHETEHKKARQRRAARQKAERGLPNWSKAFGYLPGPNGPEPDPRTAPLVKQAYADILAGASLGDVCRQWNDAGALTITGRPWTTTTLSKFLRKPRNAGLRAYKGARYGPVDRDAIVGKAQWSPLVDEATFWAAQAVLDAPGRAPGRKSVRRHLLTGLAGCGKCGNHLAGSYRTDGRVVYVCKACHGVAILADNIEPILYHIVAERLAMPDAVDLLRREIHDAAEAETIRLELETLYDELDRLAVERAEGLLTARQVKISTDIVNAKITKLQARQLDQERLRVLDGIPLGTPQVAGVIVELSPDRFRAVLDVLAEVVVRPVGKSGRIFNPERVQVNWR

SEQ ID NO: 4350 - protein, 469 aa, synthetic construct
MSYTTPVRAAVYLRISEDRSGEQLGVARQREDCLKLCGQRKWEPVEYLDNDVSASTGKRRPAYEQMLADITAGKIAAVVAWDLDRLHRRPIELEAFMSLADEKRLALATVAGDVDLATPQGRLVARLKGSVAAHETEHKRARQRRAARQKAERGHPNWSKAFGYLPGPNGPEPDPRTAPLVRQAYADILAGASLGDVCRRWNDAGAVTITGRPWTSTTLSKFLRKPRNAGLRAYKGARYGPVDRDAIVGKAQWSPLVDEATFWAAQAVLDAPGRAPGRKSVRRHLLTGLAGCGKCGNHLAGSYRTGGRVVYVCKACHGVAILADNIEPILYRIVAERLTMPDAVDLLRREIHDAVEAETIRLELETLYGELDRLAVERAEGLLTARQVKISTDVVNTKITKLQARQLDQERLRVFDGIPLGTPQVAGMIAELSPDRFRAVLDVLAEVVVQPVGKSGRIFNPERVQVNWR

SEQ ID NO: 4351 - protein, 452 aa, synthetic construct
MKAAIYIRVSTREQVENYSIQAQTEKLTALCRSKDWDVYDIFIDGGYSGSNMNRPALNEMLSKLREIDAVVVYRLDRLSRSQRDTITLIEEYFLKNNVEFVSLSETLDTSSPFGRAMIGILSVFAQLERETIRDRMVMGKIKRIEAGLPLTTAKGRTFGYDVIDTKLCINKEEAKQLQLIYDIFEEEQSITLLQKRLKKLGFKVRTYNRYNNWLTNDLYCGYVSYKDKVHVKGIHEPIISEEQFYRVQEIFTRMGKNPNMNRDSASLLNNLVVCSKCGLGFVHRRKDSMSRDKKYHYRYYSCKTYKHIHELEKCGNKIWRADKLEELIINRVNNYSFASRNADKEDELNSLNEKLKIEHAKKKRLFDLYINGSYEVSELDSMMSDIDAQINYYESQIEANEELKKNKKIQENLAYLATVDFDSLEFREKQLYLKSLISKIYIDGEQVTIEWL

SEQ ID NO: 4352 - protein, 470 aa, synthetic construct
MCYTTPVRAAVYLRISEDRSGEQLGVARQREDCLKLCGQRKWVPVEYLDNDVSASTGKRRPAYEQMLVDITAGKIAAVVAWDLDRLHRRPIELEAFMSLADEKHLALATVAGDVDLATPQGRLVARLKGSVAAHETEHKKARQRRAARQKAGRGHPNWSKAFGYLPGPNGPEPDPRTAPLVKQAYADILAGASLGDVCRQWNAAGAFTITGRLWTTTTLSKFLRKPRNAGLRTYKGARYGPVDRDAIVGKAQWSPLVDEATFWAAQAVLDAPGRAPGRKSVRRHLLTGLACCGKCGNHLAGSYRTDGRVVYVCKACHGVAILADNIEPILYHIVAERLAMPDAVDLLRREIHDAAEAETIRLELETLYDELDRLAVERAEGLLTARQVKISTDIVSAKITKLQARQLDQERLRVLDGIPLGTPQVAGVIAELSPDRFRAVLDVLAEVVVQPVGKSGRIFNPERVQVNWRQ

SEQ ID NO: 4353 - protein, 485 aa, synthetic construct
MTKKVAIYTRVSTTNQAEEGFSIDEQIDRLTKYAEAMGWQVSDTYTDAGLSGAKLERPAMQRLINDIENKAFDTVLVYKLDRLSRSVRDTLYLVKDVFTKNKIDFISLSESIDTSSAMGSLFLTILSAINEFERENIKERMTMGKLGRAKSGKSMMWTKTAFGYYHNRKTGILEIVPLQATIVEQIFTDYLSGISLTKLRDKLNESGHIGKDIPWSYRTLRQTLDNPVYCGYIKFKDSLFEGMHKPIIPYETYLKVQKELEERQQQTYERNNNPRPFQAKYMLSGMARCGYCGAPLRIVLGHRRKDGSRTMKYHCANRFPRKTRGVTVYNDNKKCDSGTYDLRNLENTVVDNLIGLQENDDSLLKIINGNNQPILDTSSFEEQISQIDKKIQKNSDLYLNDFITMDELKDRTDSLQAEKELLKAKISENKFNDGTDVFELVKAQLGSIPINELSYDNKKKIVNNLVSKVDVTADNVDIIFKFQLA

SEQ ID NO: 4354 - protein, 452 aa, synthetic construct
MKAAIYIRVSTREQVENYSIQAQTEKLTALCRSKDWDVYDVFIDGGYSGSNMNRPALNEMLSRLHEIDAVVVYRLDRLSRSQRDTVTLIEEYFLKNNVEFVSLSETLDTSSPFGRAMIGILSVFAQLERETIRDRMVMGKIKRVEAGLPLTTAKGRTFGYDVIDTKLYINEEEAKQLQLIYDIFEEEQSITSLQKRLKELGFKVRTYNRYNNWLTNDLYCGYVSYKDRVHVKGIHEPIISEEQFYRVQEIFARMGKNPNMNRDSASLLNNLVVCSKCGLGFVHRRKDAMSRDKKYHYRYYSCKTYKHIHELEKCGNKIWRADELEELIINRVNNYSFASRNVDKEGELDSLNEKLKIEHAKKKRLFDLYLNGSYEVSELDSMMNDIDAQISYYESQIEANEALIKNKKIQENLADLATVDFGSLEFREKQLYLKSLINKIYIDGEQVTIEWL

SEQ ID NO: 4355 - protein, 452 aa, synthetic construct
MKAAIYIRVSTREQVENYSIQAQTEKLTALCRSKDWDVYDIFIDGGYSGSNMNRPALNEMLSKLHEIDAVVVYRLDRLSRSQRDTITLIEEYFLKNNVEFVSLSETLDTSSPFGRAMIGILSVFAQLERETIRDRMVMGKIKRIEAGLPLTTAKGRTFGYDVIDTKLYINVEEAKQLQLIYDIFEEVQSITFLQKRLKELGFKVRTYNRYNNWLTNDLYCGYVSYKDKVHVKGIHEPIISEEQFYRVQEIFTRMGKNPNMNRGSASLLNNLVVCGKCGLGFVHRRKDATSRDKKYHYRYYCCKTYKHIHELEKCGNKIWRADELEGLIINRVNNYSFASRNVDKEGELDSLNEKLKAERAKKKRLFDLYINGNYEVSDLDSMMKDIDARINYYESQIEANEELRKNKKIQENQAHLATVDFDSLEFREKQRYLKSLINKIYIDGEQVTIEWL

SEQ ID NO: 4356 - protein, 452 aa, synthetic construct
MKAAIYIRVSTREQVENYSIQAQTEKLTALCRSKDWDVYDIFIDGGYSGSNMNRPALNEMLSKLHEIDAVVVYRLDRLSRSQRDTITLIEEYFLKNNVEFVSLSETLDTSSPFGRAMIGILSVFAQLERETIRDRMVMGKIKRIEAGLPLTTAKGRTFGYDVIDTKLHINEEEAKQLRLIYDIFEEEQSITSLQKRLKKLGFKVHTYNRYNNWLTNDLYCGYVSYKDKVHVKGIHEPIISEEQFYRVQEIFTRMGKNPNMNRDSASLLNNLVVCSKCGLGFVHRRKDAMSRDKKYHYRYYSCKTYKHIHELEKCGNKIWRADELEELIINRVNNYSLASRNVDKEGELDSLNEKLKIEHAKKKRLFDLYINGSYDVSELDSMMNDIDAQINYYESRIEANEELKRNKKIQENLAYLATVDFDSLEFREKQLYLKSLINKIYIDGEQVTIEWL

SEQ ID NO: 4357 - protein, 469 aa, synthetic construct
MSYTTPVRAAVYLRISEDRSGEQLGVARQREDCLKLCGQRKWVPVEYLDNDVSASTGKRRPAYEQMLADITAGKIAAVVAWDLDRLHRRPIELEAFMSLADEKRLALATVAGDVDLATPQGRLVARLKGSVAAHETEHKKARQRRAARQKAERGYPNWSKAFGYLPGPNGPEPDPRTAPLVKQAYADILAGASLGDVCRQWNDAGAFTITGRPWTTTTLSKFLRKPRNAGLRAYKGARHGPVDRDAIVGKAQWSPLVDEATFWAAQAVLDAPGRAPGRKSVRRHLLTGLAGCGKCGNHLAGSYRTDGRVVYVCKACHGVAILADNIEPILYHIVAERLAKPDAVDLLRREIHDAAEAETIRLELETLYGELDRLAVERAEGLLTARQVKISTDIVNAKITKLQARQLDQERLRVLDGIPLGTPQVAGMIAELSPDRFRAVLDVLVEVVVQPVGKSGRIFNPERVQVNWR

SEQ ID NO: 4358 - protein, 452 aa, synthetic construct
MKAAIYIRVSTREQVENYSIQAQTEKLTALCRSKDWDVYDIFIDGGYSGSNMNRPALNEMLSKLHEIDAVVVYRLDRLSRSQRDTITLIEEYFLKNNVEFVSLSETLDTSSPFGRAMIGILSVFAQLERETIRDRMVMGKIKRIEAGLPLTTAKGRTFGYDVIDAKLYINKEEAKQLQLIYDIFEEEQSITFLQKRLKKLGFKVHTYNRYNNWLTNDLYCGYVSYKDKVHVKGIHEPIISEEQFYRVQEIFARMGKNPNMNRDSASLLNNLVVCGKCGLGFVHRRKDAMSRDKKYHYRYYSCKTYKHIHELEKCGNKIWRADKLEELIINRVNNYSLASRNVDKEDELDSLNEKLKIEHAKKKRLFDLYINGSYEVSELDSMMNDIDVQINYCESRIEANEELRKSKKIQENLANLATVDFDSLEFREKQLYLKSLISKIYIDGEQVTIEWL

SEQ ID NO: 4359 - protein, 469 aa, synthetic construct
MSYTTPVRAAVYLRISEDRSGEQLGVARQREDCLKLCDQRKWVPVEYLDNDVSASTGKRRPAYEQMLADITAGKIAAVVAWDLDRLHRRPIELEAFMSLADEKRLALATVAGDVDLATPQGRLVARLKGCVAAHETEHKKARQRRAARQKAERGLPNWSKAFGYLPGPNGPEPDPRTAPLVKQAYADILAGASLGDVCRRWNDAGAFTITGRPWTTTALSKFLRKPRNAGLRAYKGTRYGPVDRDAIVCKAQWSPLVDEATFWAAQTVLDAPGRAPGRKSVRRHLLTGLAGCGKCGNHLAGSYRTDGRVVYVCKACHGVAILADYIEPILYRIVVERLAMPDAVDLLRREIHDAAEAETIRLELETLYGELDRLAVERAEGLLTARQVKISTDIVDAKIAKLQARQLDQERLRVFDGIPLGTPQVASMIAELSPDRFRAVLDVLAEVVVQPVGKSGRISNPERVQVNWR

SEQ ID NO: 4360 - protein, 452 aa, synthetic construct
MKAAIYIRVSTREQVENYSIQAQTEKLTALCRSKDWDVYDIFIDGGYSGSNMNRPALNEMLSKLHEIDAVVVYRLDRLSRSQRDTITLIEEYFLKNNVEFVSLSETLDTSSPFGRAMIGILSVFAQLERETIRDRMVMGKIKRVEAGLPLTTAKGRTFGYDVIDTKLYVNEEEAKQLQLIYDIFEEEQSITLLQKRLKKLGFKVRTYNRYNNWLTNDLYCGYVSYKDKVHVKGIHEPIISEEQFYRVQEIFARMGKNPNMNRDSASLLSNLLVCCKCGLGFVHRRKDTTSRGKKYHYRYYSCKTYKHTHELEKCGNKIWRADKLEELIINRVNNYSFASRNEDKEDELDSLNEKLKIEHAKKRRLFDLYINGSYEVSELDSMMNDIDAQINYYESQIEVNEELKRDKKIQEGLANLATVDYDSLEFREKQLYLKSLINKIYIDGEQVTIEWL

SEQ ID NO: 4361 - protein, 485 aa, synthetic construct
MTKKVAIYTRVSTTNQAEEGFSIDEQIDRLTKYAEAMGWQVSDTYTDAGFSGAKLERPAMQRLINDIEDKAFDTVLVYKLDRLSRSVRDTLYLVKDVFTKNKIDFISLNESIDTSSAMGSLFLTILSAINEFERENIKERMTMGKLGRAKSGKSMMWTKTAFGYYHNRETGILEIVPLQAAIVEQIFTDYLSGISLTKLRDKLNKGGHIGKDIPWSYRTLRQTLDNPVYCGYIKFKGSLFEGMHKPIIPYETYLKVQKELEERQQQTYERNNNPRPFQAKYMLSGMARCGYCGAPLRIVLGHKRKDGSRTMKYHCANRFPRKTKGVTVYNDNKKCDSGTYDLSDLESTVIDNLIGFQENNDSLLKIINGDNQPMLDTSSLKKQISQIDKKIQKNSDLYLNDFITMDELKDRTDSLRAEKKLLKAKISENKFNDSTDAFELVKTQLGSIPINELSYDNKKKIVNNLVSKVDVTADNVDIIFKFQLA

SEQ ID NO: 4362 - protein, 485 aa, synthetic construct
MTKKVAIYTRVSTTNQAEEGFSIDEQIDRLTKYAEAMGWQVSDTYTDAGSSGAKLERPAMQRLINDIENKAFDTVLVYKLDRLSRSVRDTLYLVKDVFTKNKIDFISLNESIDTSSAMGSLFLTILSAINEFERENIKERMTMGKLGRAKSGKSMMWTKTAFGYYHNRKTGILEIVPLQATIVEQIFTDYLSGISLTKLRDKLNESGHIGKDIPWSYRTLRQTLDNPVYCGYIKFKDSLFEGMHKPIIPYETYLKVQKELEERQQQTYERNNNPRPFQAKYMLSGMARCGYCGAPLRIVLGRKRKDGSRTMKYHCANRFPRKTKGVTVYNDNKKCDSGTYDLSNLENTVIDNLIGLQENNDSLLRIINGNNQPILDTSSFKKQISQIDKKIQKNSDLYLNDFITMDELKDRADSLLAEKKLLKAKISENKFNDSTDVFELVKTQLGSIPISELSYDNKKKIVNNLVSKVNVTADSVDIIFKFQLA

SEQ ID NO: 4363 - protein, 485 aa, synthetic construct
MTKKVAIYTRVSTTNQAEEGFSIDEQVDRLTKYAEAMGWQVSDTYTDAGCSGAKLERPAMQRLINDIENKAFDTVLVYKLDRLSRSVRDTLHLVKDVFTKNKIDFISLNESIDTSNAMGSLFLTILSAINEFERENIKERMTMGKLGRAKSGKSMMWTKTAFGYYHNRKTGILEIVPLQAAIVEQIFTDYLSGISLTRLRDKLNESGHIGKDIPWSYRTLRQILDNPVYCGYIKFKDSLFEGMHKPIIPYETYLKVQKELEERQQQTYERNNNPRPFQAKYMLSGMARCGYCGAPLKIVLGRKRRDGSRTMKYHCANRFPRKTKGVTVYNDNKRCGSGAYDLRNLENTVIGNLIGFQENNDSLLKIINGNNQPFLDTSSIKKQISQIDRKIQKNSDLYLNDFITMDELKDRTDSLQAEKKLLEAKISESKFNDSTDVFELVKTQLGSIPINELSYDNKKKIVNNLVRKVDVTADNVDIIFKFQLA

SEQ ID NO: 4364 - protein, 469 aa, synthetic construct
MSYTTPVRAAVYLRISEDRSGEQLGVARQREDCLKLCDQRKWEPVEYLDNDVSASTGKRRPAYEQMLADITAGKIAAVVAWDLDRLHRRPIELEAFMSLADEKRLALATVAGDVDLATPQGRLVARLKGSVAAHETEHKKARQRRAARQKAERGHPNWSKAFGYLPGPNGPEPDPRTAPLVKQAYADILAGASLGDVCRQWNDAGAFTITGRPWTTTALSKFLRKPRNAGLRAYKGARYGPVDRDAIVGKAQWSPLVDEATFWEAQAVLDAPGRAPGRKSVRRHLLTGLAGCGKCGNHLAGSYRTDGRVVYVCKACHGVAILADNIVPTLYHIVAERLAMPDAVDLLRCETHDAAEAETIRLELETLHGELDRLAVERAEGLLTARQVKISTDIVSAKITKLQARQQDQERLRVLDGIPLGTPQVAGMIAELSPDRFRAVLDVLAEVVVQPVGKSGRISNPERVQVNWR

SEQ ID NO: 4365 - protein, 452 aa, synthetic construct
MKAAIYIRVSTQEQVGNYSIQAQTEKLTALCRSKDWDVYNIFVDGGYSGSNMNRPALNEMLSKLHEIDAVVVYRLDRLSRSQRDTTTLIEEYFLKNNVEFVSLSETLDTSSPFGRAMIGILSVFAQLERETIRDRMVMGKIKRIEAGLPLTTAKGRTFGYDVIDTKLYINEEEAKQLQLIYDIFEEEQSITSLQKRLKKLGFKVRTYNRYNNWLTNDLYCGYVSYKDKVHVKGIHEPIISEEQFYRVQEIFTRMGKNPNMNRDSASLLSNLVVCSKCGLGFVHRSKDTMSRGKKYHYRYYSCKTYKHTHELEKCGNKTWRADKLEELIISRVNNYSFASRSVDKEDELDSLNEKLKIEHAKKKRLFDLYINGSYEVSELDSMMNDIDAQINYYESQIEVNEELKKTKKIQENLADLATVDFDSLEFREKQLYLKSLINKIYIDGEQVTIEWL

SEQ ID NO: 4366 - protein, 452 aa, synthetic construct
MKAAIYIRVSTREQVENYSIQAQTEKLTALCRSKDWDVYDIFIDGGYSGSNMNRPALNEMLSKLHEIDAVVVYRLDRLSRSQRDTVTLIEEYFLKNNVEFVSLSETLDTSSPFGRAMIGILSVFAQLERETIRDRMVMGKIKRIEAGLPLTTAKGRTFGYDVIDTKLYINEEEAKQLQLIYDIFEEEQSITFLQKRLKKLGFKVRTYNCYNNWLTNDLYCGYVSYKDRVHVKGIHEPIISEEQFYRVQEIFTRMGKNPNMNRDSASLLNNLVVCSKCGLGYVHRRKDAMSRDKKYHYRYYSCKTYKHIHELEKCGNKIWRADKLEELIINRVNDYSVASRNVDKEDELDSLNEKLKIEHAKKRRLFDLYINGSYEVSELDSMMNDIDAQINYYESQIEANEELKKNKKIQENLAYLATVDFDSLEFREKQLYLKSLINKIYIDGEQVTIEWL

SEQ ID NO: 4367 - protein, 452 aa, synthetic construct
MKAAIYIRVSTQEQVENYSIQAQTEKLTALCRSKDWDVYDIFIDGGYSGSNMNRPALNEMLSKLHEIDAVVVYRLDRLSRSQRDTTTLIEEYFLKNNVEFVSLSETLDTSSPFGRAMIGILSVFAQLERETIRDRMVMGKIKRIEAGLPLTTAKGRTFGYDVIDTKLYINGEEAKQLRLIYDIFEEEQSITSLQKRLKKLGFKVRTYNRYNNWLTNDLYCGYVSYKDQVHVKGIHEPIISEEQFYRVQEIFTRMGKNPNMNRDSASLLNNLVVCSKCGLGFVHRSKDTMSRDKKYHYRYYSCKTYKHTHELEKCGNKTWRADKLEELIINRVNNYGLASRNVDKEDELDSLNEKLKIEHAKKKRLFDLYINGSYEVSELDSMMNDIDAQISCYESQIEANEELKKNKKIQENLADLATVDFDSLEFREKQLYLKSLINKIYIDGEQVTIEWL

SEQ ID NO: 4368 - protein, 452 aa, synthetic construct
MKAAIYIRVSTREQVENYSIQAQTEKLTALCRSKDWDVYDIFIDGGYSGSNMNRPALNEMLSKLHEIDAVVVYRLDRLSRSQRDTITLIEEYFLKNNVEFVSLSETLDTSSPFGRAMIGILSVFAQLERETIRDRMVMGKIKRVEAGLPLTTAKGRTFGYNVIDTKLYINEEEAKQLQLIYDIFEEEQSITFLQKRLKKLGFKVRTYNRYINWLTNDLYCGYVSYKDKVHVKGIHEPIISEEQFYRVQEIFTRMGKNPNMNRNSASLLNNLVVCSKCGLGFVHRRKDTTSRGNKYHYRYYSCKTYKHTHELEKCGNKIWRADKLEELIINRVNNYSFASRNADKEDELDSLNEKLKIEHAKKKRLFDLYVSGSYEVSELDSLMNDIDEQINYYESQIEASEELRKNKKIQENLADLATVDFDSLEFREKQLYLKSLINKIYIDGEQVTIEWL

SEQ ID NO: 4369 - protein, 452 aa, synthetic construct
MKAAIYIRVSTQEQVENYSIQAQTEKLTALCRSKDWDVYDIFIDGGYSGSNMNRPALNGMLSKLHEIDAVVVYRLDRLSRSQRDTITLIEEYFLKNNVEFVSLSETLDTSSPFGRAMIGILSVFAQLERETIRDRMVMGKIKRIEAGLPLTTARGRTFGYDVIDTKLYINEEEAKQLQLIYDIFEEEQSITFLQKRLKKLGFKVRTYNRYNSWLTNDLYCGYVSYKDKVHVKGIHVPIISEEQFYRVQEIFTRKGKNPNMNRDSASLLNSLVVCSKCGLGFVHRRKDTVSRGKKYQYRYYSCKTYKHTHELEKCGNKIWRADKLEELIVSRVNNYSFASRNVDKEDELASLNEKLKIEHAKKKRLFDLYINGSYEVSELDSMMNVIDAQINYYESQIETNGELRKNRKIQENLADLATVDFDSLEFREKQLYLKSLINKIYIDGEQVTIEWL

SEQ ID NO: 4370 - protein, 452 aa, synthetic construct
MKAAIYIRVSTREQVENYSIQAQTEKLTALCRSKDWDVYDIFIDGGYSGSNMNRPALNEMLSKLHEIDAVVVYRLDRLSRSQRDTITLIEEYFLKNNVEFVSLSETLDTSSPFGRAMIGILSVFAQLERETIRDRMVMGKIKRIEAGLPLTTAKGRTFGYDVIDTKLYINEEEAKQLQLIYDIFEEEQSITFLQKRLKKLGFKVRTYNRYNNWLTNDLYCGYVSYKDKVHVKGIHEPIISEEQFYRVQEIFTRMGKNPNMNRGSASLLNNLVVCSKCGLGFVHRRKDVMSRDKKYHYRYYSCKTYKHIHELEKCGNKIWRADKLEELIINRVNNYSFASRNADKEDELDSLNEKLRIEHAKKKRLFDLYINGSFEVSELDSMMKDIDAQIDYYESQIGANEELKKNKRIQENLADLATVDFDSLEFREKQLYLKSLINKIYIDGEQVTIEWL

SEQ ID NO: 4371 - protein, 470 aa, synthetic construct
MCYTTPVRAAVYLRISEDRSGEQLGVARQREDCLKLCDQRKWVPVEYLDNDVSASTGKRRPAYEQMLADITAGKIAAVVAWDLDRLHRRPIELEAFMSLADEKRLALATVAGDVDLATPQGRLVARLKGSVAAHETEHKKARQRRAARQKAERGHPNWSKAFGYLPGPNGPEPDPRTAPLVKQAYADILAGASLGDVCRQWNDAGAFTITGRPWTTTTLSKFLRKPRNAGLRAYKGARYGPVDRDAIVGKAQWSPLVDEATFWAAQAVLDAPGRAPGRKSVRRHLLTGLAGCGKCGNHLAGSYRTDGRVVYVCKACHGVAILADNIEPMLYHIVAERLAMPNAVDLLRREIHDAAEAETMRLELETLYGELDRLAVERAEGLLTARQVKISTDIVNVKITKLRARQLDQERLRVLDGIPLGTPQVAGMIAELSPDRFRAVLDVLAEVVVQPVGKSGRTFNPERVQVNWRK

SEQ ID NO: 4372 - protein, 485 aa, synthetic construct
MTKKVAIYTRVSTTNQAEEGFSIDEQIDRLTKYAEAMGWQVSGTYTDAGLSGAKLERPAMQRLINDIENKAFDTVLVYKLDRLSRSVRDTLYLVKDVFTKNKIDFISLNESIDTSSAMGSLFLTILSAINEFERENIRERMTMGKLGRAKSGKSMMWAKTAFGYYHNRKTGILEIVPLQATIVEQIFTDYLSGISLTKLRDKLNESGHIGKDIPWSYRTLRQTLDNPVYCGYIKFKGSLFEGMHKPIIPYETYLKVQKELEERQQQTYERNNNPRPFQAKYMLSGMARCGYCGTPLKIVLGHKRKDGSRTMKYHCANRFPRKTKGITVYNDNKKCDSGTYDLSNLESTVIDNLIGFQENNDSLLKIINGNNQPILDISSYKERISQIDKKIQKNSDLYLNDFITMDELKDRTDSLQAEKKLLKAKMSENKFNDSTDVFELVKAQLGSIPINELSYDNKKKIVNNLVSKVDVTADNVDIIFKFQLA

SEQ ID NO: 4373 - protein, 452 aa, synthetic construct
MKAAIYIRVSTQEQVGNYSIQAQTEKLTALCRSKDWDVYDIFVDGGYSGSNMNRPALNEMLSKLHEIDAVVVYRLDRLSRSQRDTTTLIEEYFLKNNVEFVSLSETLDTSSPFGRAMIGILSVFAQLERETIRDRMVMGKIKRIEAGLPLTTAKGRTFGYDVIDTKLYINEEEAKQLQLIYDIFEEEQSITFLQKRLKKLGFKVRTYNRYNNWLTNDLYCGYVSYKDKVHVKGIHEPIISEEQFYRVQEIFTRMGKNPNMNRDSASLLSNLVVCSKCGLGFVHRSKDTMSRGKKYHYRYYSCKTYKHTHELEKCGNKTWRADKLEELIINRVSNYSFASRNVDKDDELDSLNEKLKIEHAKKRRLFDLYINGSYEVSELDSMMNDIDAQINYYESQIEANEKLRENKKIQENLADLAAVDFDSLEFREKRLYLKSLINKIYIDGEQVTIEWL

SEQ ID NO: 4374 - protein, 485 aa, synthetic construct; identical to SEQ ID NO: 1077

SEQ ID NO: 4375 - protein, 485 aa, synthetic construct
MTKKVAIYTRVSTTNQAEEGFSIDEQIDRLTKYAEAMGWQVSDTYTDAGFSGAKLERPAMQRLINDIETKAFDTVLVYRLDRLSRSVRDTLYLVKEVFTRNKIDFISLNESIDTSSAMGSLFLTILSAINEFERENIKERMTMGKLGRAKSGKSMMWTKTAFGYYHNRKTGILEIVPLQATIVEQIFTDYLSGISLTKLRDKLNESGHIGKDIPWSYRTLRQTLDNPVYCGYIKFKDSLFEGMHKPIIPYETYLKVQKELEERQQQTYERNNNPRPFQAKYMLSGMARCGYCGAPLRIVLGRKRKDGSRTMKYHCANRFPRRTKGITVYNDNKKCDSGTYDLSNLENTVIDNLIGFQENNDSLLKIINGNNKPILDTSSLKKQISQIDKKIQKNSDLYLNDFITMDELKDRTDSLQAEKKLLKAKISENRLNDSTDVFELVRTQLGSIPINELSYDNKKRIVNNLVSKVDVTADNVDIIFKFRPA

SEQ ID NO: 4376 - protein, 452 aa, synthetic construct
MKAAIYIRVSTREQVENYSIQAQTEKLTALCRSKDWDVYDIFIDGGYSGSNMNRPALNEMLSKLHEIDAVVVYRLDRLSRSQRDTITLIEEYFLKNNVEFVSLSETLDTSSPFGRAMIGILSVFAQLERETIRDRMVMGKIKRIEAGLPLTTAKGRTFGYDVIDTKLYINEEEAKQLQLIYDIFEEEQSITFLQKRLKKLGFKVHTYNRYNNWLTNDLYCGYVSYKDKVHVKGIHEPIISEEQFYRVQEIFTRMGKNPNVSRDSASLLNNLVVCSKCGLGFVHRRKDTMSRGKKYHYRYYSCKTYKHIHELEKCGNKIWRADKLEELIISRVNNYSSASRNVDEAEELDSLNEKLKVEHAKKKRLFDLYINGSYNVSELDSMMNDIDAQINYYESQIEANEELKKNKKIQENLAGLATVDFDSLEFCEKQLYLKSLINKIYIDGEQVTIEWL

SEQ ID NO: 4377 - protein, 469 aa, synthetic construct
MCYTTPVRAAVYLRISEDRSGEQLGVARQREDCLKLCGQRKWEPVEYLDNDVSASTGKRRPAYEQMLADIAAGKIAAVVAWDLDRLHRRPIELEAFMSLADEKRLALATVAGDVDLATPQGRLVARLKGSVAAHETEHKKARQRRAARQKAERGHPNWSKAFGYLPGPNGPEPDPRTAPLVKQAYADILAGASLGDVCRQWNDAGAFTITGRPWTTTALSKFLRKPRNAGLRAYKGARYGPVDRDAIVGKAQWSPLVDEATFWAAQAVLDAPGRAPGRKSVRRHLLTGLAGCGKCGNHLAGSYRTDARVVYVCKACHGVSILADNIEPILYHIVAERLAMPDAVDLLRRGIHDAAEAETIRLELEALYGELDRLAVERAEGLLTARQVKIGTDIVNAKITKLQARQLDQERLRVFGGIPLGTPQVAGMIAELSPDRFRAVLDVLAEVVVQPVGKSGRTSNPERVQVNWR

SEQ ID NO: 4378 - protein, 452 aa, synthetic construct
MKAAIYIRVSTQEQVENYSIQAQTEKLTALCRSKDWDVYDVFVDGGYSGSNLNRPALNEMLSKLHEIDAVVVYRLDRLSRSQRDTTTLIEEYFLKNNVEFVSLSETLDTSSPFGRAMIGILSVFAQLERETIRDRMVMGKIKRIEAGLPLTTAKGRTFGYDVIDTKLYINEEEAKQLRLIYDIFEEEQSITSLQKRLKKLGFKVRTYSRYNNWLTNDLYCGYVSYKDKVHVKGIHAPIISEEQFYRVQEIFTRMGENPNMNRGSASLLNNLVVCSKCGLGFVHRSKDTMSRGKKYHYRYYSCKTYKHTHELEKCGNKIWRADKLEELIINRVNDYSFESRNMDKEDELDSLNEKLKIEHAKKKRLFDLYINGSYEVSELDSMMIDIDAQINYYESRIEASGELKKNKKIQENLADLATVDFDSLGFREKQLYLKSLINKIYIDGEQVTIEWL

SEQ ID NO: 4379 - protein, 452 aa, synthetic construct
MKAAIYIRVSTREQVENYSIQAQTEKLTALCRSKDWDVYDIFIDGGYSGSNMNRPALSEMLSKLHEIDAVVVYRLDRLSRSQRDTITLIEEYFLKNNVEFVSLSETLDTSSPFGRAMIGILSVFAQLERETIRDRMVMGKIKRIEAGLPLTTAKGRTFGYDVIDTKLYINEEEAKQLQLIYDIFEEEQSITFLQKRLKKLGFKVRTYNRYNNWLTNDLYCGYVSYKDKVHVKGIHEPIISEEQFYRVQEIFTRMGKNPNMNRGSASLLNNLVVCGKCGLGFVHRRKDAMSRDKRYHYRYYSCKTYKHIHELEKCGNKTWRADKLEELIINRVNNYSFASRNKEKEDELDSLNEKLKIEHAKRKRLFDLYINGNYEVSELDSMMNDIDARINYYESQIEANEELKKTKKIQENLAYLATVDFDSLEFREKQLYLKSLINKIYIDGEQVTIEWL

SEQ ID NO: 4380 - protein, 452 aa, synthetic construct
MKAAIYIRVSTQEQVENFSIRAQTEKLTALCRSKDWDVYDIFIDGGYSGSNMNRPALNEMLSKLHEIDAVVVYRLDRLSRSQRDTTTLIEEYFLKNNVEFVSLSETLDTSSPFGRAMIGILSVFAQLERETIRDRMVMGKIKRIEAGLPLTTAKGRTFGYDVVDTKLYINEEEAKQLQLIYDIFEEEQSITLLQKRLKKLGLKVRTYNRYNNWLTNDLYCGYVSYKDKVHVKGIHEPIISEEQFYRVQEIFTRMGKNPNTNRDSASLLSNLVVCSKCGLGFVHRSKDTMSRGKKYHYRYYSCKTYKHTHELEKCGNKTWRADKLEELIINRVNNHSFASRNVDKEDELDSLNEKLKIEHAKKKRLFDLYINGSYEVSELDSMMNDIDAQINYYESQIEANEELKGNKKIQEHLADLATVGFDSLEFREKQLYLRSLINKIYIDGEQVTIEWL

SEQ ID NO: 4381 - protein, 452 aa, synthetic construct
MKAAIYIRVSTREQVGNYSIQAQTEKLTALCRSKDWDVYDIFIDGGYSGSNMNRPALNEMLNKLHEIDAVVVYRLDRLSRSQRDTTTLIEEYFLKNNVEFVSLSETLDTSSPFGRAMIGILSVFAQLERETIRDRMVMGKIKRIEAGLPLTTAKGRTFGYDVIDTKLYINEEEARQLQLIYDIFEEEQSITSLQKRLKKLGFKVRTYSRYNNWLTNDLYCGYVSYKDKVHVKGIHEPIISEEQFYRVQEIFTRMGKNPNMNRDSASLLNNLVVCSKCGLGFVHRSKDTMRRGKKYHYRYYSCKTYKHTHELEKCGNKTWRADKLEELVINRVNNYSFASRDADKEDELDSLSEKLKIEHARKKRLFDLYINGGYEVSELDSMMNDIDAQINYYESQIEANEELRENKKIQENLAELATVDFDSLEFREKQLYLKSLINKIYIDGEQVTIEWL

SEQ ID NO: 4382 - protein, 485 aa, synthetic construct
MTKKVAIYTRVSTTNQAEEGFSIDEQIDRLTKYAEAMGWQVSDTYTDAGFSGAKLERPAMQRLINDIENKAFDTVLVYKLDRLSRSVRDTLYLVKDVFTKNKIDFISLNESIDTSSAMGSLFLTILSAINEFERENIKERMTMGKLGRAKSGKSMMWTKTAFGYYHNRKTGILEIVPLQATIVEQIFTDYLSGISLTKLRDKLNESGHIGKDIPWSYRTLRQTLDNPVYCGYIKFKDSLFEGMHKPIIPYETYLKVQKELEERQQQTYERNNNPRPFQAKYMLSGMARCGYCGAPLRVVLGHKRKDGSRTMKYHCTNRFPRKTRGVTVYSDNKKCNSGTYDLSNLENTVIDNLIGFQKNNDSLLKIINGNNQPILDASSFKKQISQIDKKIQKNSDLYLNDFITMDELKERTDSLQAEKKLLKAKISENKFNDSTDVFELVKTQLGSIPINELSYDNKKKIVNNLVSKVDVTTDNVDIIFKFQLA

SEQ ID NO: 4383 - protein, 452 aa, synthetic construct
MKAAIYIRVSTREQVENYSIQAQTEKLTALCRSKDWDVYDVFIDGGYSGSNMNRPALNEMLSRLHEIDAVVVYRLDRLSRSQRDTITLIEEYFLKNNVEFVSLSETLDTSSPFGRAMIGILSVFAQLERETIRDRMVMGKIKRIEAGLPLTTAKGRTFGYDVIDTKLYINEEEAKQLQLIYDIFEVEQSITFLQKRLKKLGFKVRTYSCYNNWLTNDLYCGYVNYKDKVHVKGIHEPIISEEQFYRVQEIFTRMGKNPNMNRDSASLLNNLVVCSKCGLGFVHRRKDTTSRGKRYHYRYYSCKTYKHTHELEKCGNKIWRADNLEELIINRVNNYSLAGRNVDKEDELDSLSERLKVEHAKKKRLFELYINGSYEMGELDSMMNDIDAQINYYESQIEANEGQKGNKKIQENLAELATVDFDSLEFREKQLYLKSLINKIYIDGEQVTIEWL

SEQ ID NO: 4384 - protein, 485 aa, synthetic construct
MTKKVAIYTRVSTTNQAEEGFSIDEQIDRLTKYAEAMGWQVNDTYTDAGFSGAKLKRPAMQRLINDIENKAFDTVLVYKLDRLSRSVRDTLYLVKDVFTKNKIDFISLNESIDTSSAMGSLFLTILSAINEFERENIKERMTMGKLGRAKSGKSMMWTKTAFGYYHNRKTGILEIVPLQATIVEQIFTDYLSGISLTKLRDKLNESGHIGKDIPWSYRTLRQTLDNPVYCGYIKFKDSLFEGMHKPIIPYETYLKVQKELEVRQQQTYERNNNPRPFQAKYMLSGMARCGYCGAPLKIVLGHKRKDGSRTMKYHCANRFPRKTKGVTVYNDNKKCDSGTYDLGNLENTVIDYLIGLQENNDSLLKIINGNNQPILDTSSFKKQISQIDKKIQKNRDLYLNDFITMDELKDRTDSLQAEKKLLIAKISENKFNDSTDVFELVKTQLGSIPINELSYDNKKKIVNNLVSKVDVTADNVDIIFKFQLA

SEQ ID NO: 4385 - protein, 485 aa, synthetic construct
MTKKVAIYTRVSTTNQAEEGFSIDEQIDRLTKYAEAMGWQVSDTYTDAGLSGAKLERPAMQRLINDIENKTFDTVLVYKLDRLSRSVRDTLYLVKDVFTKNKIDFISLNESIDTSSAMGSLFLTILSAINEFERESIKERMTMGKLGRAKSGKSMMWTKTAFGYYHNRKTGILEIVPLQATIVEQIFTDYLSGISLTKLRDKLNKSGHIGKDIPWSYRTLRQTLDNPVYCGYIKFKGSLFEGMHKPIIPYETYLKVQKELEERQQQAYERNNNPRPFQAKYMLSGMARCGYCGAPLKIVLGHKRRDGSRTMKYHCANRFPRKTKGVTVYNDNKKCDSGTYDLDYLENTVIDNLIGFQENNDSLLKIINSNNQPILDTSGFKEQIRQIDKKIQKNSDLYLNDFITMDELKDRTDSLQAEKKLLKAKISENKFNDSTGVFELVKAQLGSIPINELSYDNKKKIVNSLVSKVDVTADNVDIIFKFQLA

SEQ ID NO: 4386 - protein, 452 aa, synthetic construct
MKAAIYIRVSTQEQVGNYSIQAQTEKLTALCRSKDWDVYDIFVDGGYSGSNMNRPALNEMLSKLHEIDAVVVYRLDRLSRSQRDTTTLIEEYFLKNNVEFVSLSETLDTSSPFGRAMIGILSVFAQLERETIRDRMVMGKIKRIEAGLPLTTAKGRTFGYDVIDTKLYINEEEAKQLQLIYDIFEEEQSITFLQKRLKKLGFKVRTYNRYNSWLTNDLYCGYVSYKDKVHVKGIHEPIISEEQFYRVQEIFTRTGKSPNMNRDSASLLNNLVVCSKCGLSFVHRSKDTMSRGKKYHYRYYSCKTYKHTHELEKCGNKTWRADKLEELIIDRVNNYSFASRNVDKEGELDSLNEKLKIEHAKKRRLFDLYINGSYEVSELDSMMNDIAAQINYYESQIEANEELRKNKKIQENLADLATVDFDSLEFREKQLYLKSLINKIYIDGEQVTIEWL

SEQ ID NO: 4387 - protein, 485 aa, synthetic construct
MTKKVAIYTRVSTTNQAEEGFSIDEQVDRLTKYAEAMGWQVSDTYTDAGLSGAKLERPAMQRLINDIENKAFDTVLVYKLDRLSRSVRDTLYLVKDVFTKNKIDFISLNESIDTSSAMGSLFLTILSAINEFERENIKERMTMGKLGRAKSGKSMMWTKTAFGYNHNRKTGILEIVPLQATIVEQIFTDYLSGISLTRLRDKLNESGHIGKDIPWSYRTLRQTLGNPVYCGYIKFKDSLFEGMHKPIIPYETYLKVQKELEERQQQTYERNNNPRPFQAKYMLSGMARCGYCGAPLKIVLGHKRKDGSRTMKYHCANRFPRKTKGVTVYNDNKKCDSGPYDLSNLENTVIDNLIGFQENNDSLLKIINGNNQPILDTSSFRKQIGQIDKKIQKISDLYLNDFITMDELKDRTDSLQAEKKLLKAKISENKFNDSTDVFELVKTQLGSIPINELSYDNKKKIVNNLVSKVDVTADNVDIIFKFQLA

SEQ ID NO: 4388 - protein, 452 aa, synthetic construct
MKAAIYIRVSTREQVENYSIQAQTEKLTALCRSKDWDVYDIFVDGGYSGSSMNRPALNEMLSKLHEIDAVVVYRLDRLSRSQRDTITLIEEYFLKNNVEFVSLSETLDTSSPFGRAMIGILSVFAQLERETIRDRMVMGKIKRIEAGLPLTTAKGRTFGYDVIDTKLYINEEEAKQLQLIYDIFEEEQSITSLQKRLKELGFKVRTYNRYNNWLTNDLYCGYVSYKDKVHVKGIHEPIISEEQFYRVQEIFTRMGKNPNMNRDSASLLNNLVVCSKCGLGFVHRRKDIMSRGKKYHYRYYSCKTYKHIHELEKCGNKIWRADKLEELIISRVNNYSIASRNADKEDELDSLNEKLKIEHAKKKRLFELYINGSYEVSELDSMMNDIDAQINYYESQIEANEELKKNKKIQENLADLATVDFDSLEFREKQLYLKSLINKIYIDGEQVTIEWL

SEQ ID NO: 4389 - protein, 469 aa, synthetic construct
MCYTTPVRAAVYLRISEDRSGEQLGVARQREDCLELCCQRKWVPVEYLDNDVSASTGKRRPAYEQMLADITAGKIAAVVAWDLDRLHRRPIELEAFMSLADEKRLALATVAGDVDLATPQGRLVARLKGSVAAHETEHKKARQRRAARQKAERGHPNWSKAFGYLPGPNGPEPDPRTAPLVKQAYADILAGASLGDVCRRWNGAGAFTITGRPWTTTALSKFLRKPRNAGLRAYKGARYGPVDRDAIVGKAQWSPLVDEATFWAAQAVLDAPGRAPGRKSVRRHLLTGLASCGKCGNHLAGSYRTDGKVVYVCKACHGVAILADNIEPILYHIVTERLAMPDAVDLLRREIHDAAEAETIRLELETLYGELDRLAVERAEGLLTARQVKIGTDIVNAKITKLQTCQLDQERLRVLDGIPLGTPQVAGTIAELSPDRFRAVLDVLAEVVVQPVGKSGGIFNPERVQVNWR

SEQ ID NO: 4390 - protein, 452 aa, synthetic construct
MKAAIYIRVSTREQVENYSIQAQTEKLTALCRSKGWDVYDIFIDGGYSGSNMNRPALNEMLSKLHEIDAVVVYRLDRLSRSQRDTITLIEEYFLKNNVEFVSLSETLDTSSPFGRAMIGILSVFAQLERETIRDRMVMGKIKRIEAGLPLTTAKGRTFGYDVIDTKLYINEEEAKQLRLIYDIFEEEQSITFLQKRLKKLGFKVRTYNRYNNWLTNDLYCGYVSYKDKVHVKGIHEPIISEEQFCRVQEIFTRMGKNPNMNRDSASLLNNLVVCGKCGLGFVHRRKDAMSRDKKYHYRYYSCKTYKHIHELEKCGNKIWRADELEELIINRVNNYSLASRNVDKEDGLDSLNEKLKIEHAKKKRLFDLYLNGSYEVSELDSMMNDIDAQISYYESQIEANEALIKNKKIQENLANLATVDFDGLEFREKQLYLKSLINKIYIDGEQVTIEWL

SEQ ID NO: 4391 - protein, 485 aa, synthetic construct
MTKKVAIYTRVSTTNQAEEGFSVDEQIDRLTKYAEAMGWRVSDTYTDAGFSGAKLERPAMQRLINDIENKAFDTVLVYKLDRLSRSVRDTLYLVKDVFTKNKIDFVSLNESIDTSSAMGSLFLTILSAINEFERENIKERMTMGKLGRAKSGKSMMWTKTAFGYYHNRKTGILEIVPLQATIVEQIFTDYLSGISLTKLRDKLNESGHVGKDIPWSYRTLRQTLDNPVYCGYIKFKDSLFEGMHKPIIPYETYLKVQKELEERQQQTYERNNNPRPFQAKYMLSGMARCGYCGAPLRIVLGHKRKDGSRTMKYHCANRFPRKTKGVTVYNDNKKCDSGTYDLSNLENTVIDNLIGLQENNDSLLRIINGNNQPILDTSSFKEQISQIDKKIQKNSDLYLNDFITMDELKDRTDSLQAEKKLLKAKISENKFNDSTDVFELVKTQLGSIPINELSYDNKKKIVNNLVSKVDVTADNVDIIFKFQLA

SEQ ID NO: 4392 - protein, 452 aa, synthetic construct
MKAAIYIRVSTQEQVGNYSIQAQTEKLTALCRSKDWDVYDIFIDGGYSGSNMNRPALSEMLSKLHEIDAVVVYRLDRLSRSQRDTTTLIEEYFLKNNVEFVSLSETLDTSSPFGRAMIGILSVFAQLERETIRDRMVMGKIKRIEAGLPLTTAKGRTFGYDVIDTKLYINEEEAKQLQLIYDIFEEEQSITLLQKRLKKLGLKVRTYNRYNNWLTNDLYCGYVSYKDKVHVKGIHEPIISEEQFYRVQEIFTRMGKNPNMNRDSASLLSNLVVCSKCGLGFVHRSKDTMSRGKKYHYRYYSCKTYKHTHELEKCGNKTWRADKLEELIINRVNNYSFASRNVDKEDELDGLNEKLKIEYAKKKRLFDLYINGSYGVSELDSMMNDIDAQINYYESQIGANEELKKTKKIQENLADLATVDFDSLEFREKQLYLKSLINKIYIDGEQVTIEWL

SEQ ID NO: 4393 - protein, 469 aa, synthetic construct
MHYTTPVRAAVYLRISEDRSGEQLGVARQREDCLKLCDQRKWVPVEYLDNDVSASTGKRRPAYEQMLADITAGKIAAVVAWDLDRLHRRPIELEAFMSLADEKRLALATVAGDVDLATPQGRLVARLKGSVAAHETEHKKARQRRAARQKAERGYPNWSKAFGYLPGPNGPEPDPRTAPLVRQAYANILAGASLGDVCRRWNDAGAFTITGRLWTTTTLSKFLRKPRNAGLRAYKGARYGPVDRDAIVGKAQWSPLVDEATFWAAQAVLDAPGRAPGRKSVRRHLLTGLAGCGKCGNHLAGSYRTDGKVAYVCKACHGVAILADNIEPILYHIVAERLAMPDAVDLLRREIHDAAEAEAIRLELETLYGELDRLAVERAEGLLTARQVKISTDIVNAKITELRARQLDQERLRVLDGIPLGTPQVAGVIAELSPDRFRAVLDVLAGVVVQPVGKGGRIFNPERVQVNWR

SEQ ID NO: 4394 - protein, 452 aa, synthetic construct
MKAAVYIRVSTREQVENYSIQAQTEKLTALCRSKDWDVYDIFIDGGYSGSSMNRPALNEMLSKLHEIDAVVVYRLDRLSRSQRDTITLIEEYFLKNNVEFVSLSETLDTSSPFGRAMIGILSVFAQLERETIRDRMVMGKIKRIEAGLPLTTAKGRTFGYDVIDTKLYINEEEAKQLQLIYDIFEEEQSITFLQRRLKKLGFKVRTYSCYNNWLTNDLYCGYVSYKDKVHVKGIHEPIISEEQFYRVQEIFTRTGKNPNMNRDSASLLNNLVVCSKCGLGFVHRRKDTMSRGKKYHYRYYSCKTYKHTHELEKCGNKIWRADRLEELIINRVNNYSFASRNADKEDELDGLNEKLKIEHAKRKRLFDLYINGSYEVSELDSMMNDIDAQINYYESQIEVNEELKKDKKIQESLANLATVDYDSLEFREKQLYLKSLINKIYIDGEQVTIEWL

SEQ ID NO: 4395 - protein, 469 aa, synthetic construct
MSYTTPVRAAVYLRISEDRSGEQLGVARQREDCLKLCDQRKWVPVEYLDNDVSASTGKHRPAYEQMLADITAGKIAAVVAWDLDRLHRRPIELEAFMSLADEKRLALATVAGDVDLATPQGRLVARLKGSVAAHETEHKKARQRRAARQKAERGHPNWSKAFGYLPGPNGPEPDPRTAPLVKRAYADILAGASLGDVCRRWNDAGAFTITGRPWTTTTLSKFLRKPRNAGLRTYKGARYGPVDRDAIVGRARWNPLVDEATFWAAQAVLDAPGRAPGRKSVRRHLLTGLAGCGKCGNHLAGSYRTDGRVVYVCKACHGVAILADNIEPILYHVVAERLAVPDAVDLLRREIHDAAEAETIRLELETLYGELDRLAVERAEGLLTARQVKISTDIVSAKIAKLQARQLDQERLRVFDGIPLGTPQVAGMIAELSPDRFRAVLDVLAEVVVQPVGKSGRAFNPERVQVNWR

SEQ ID NO: 4396 - protein, 485 aa, synthetic construct
MTKKVAIYTRVSTANQAEEGFSIDEQIDRLTKYAEAMGWQVSDTYTDAGFSGAKLERPAMQRLINDIENKAFDTVLVYKLDRLSRSVRDTLYLVKEVFTKNKIDFVSLNESIDTSSAMGSLFLTILSAINEFERENIKERMTMGKLGRAKSGKSMMWTKTAFGYYHNRKTGILEIVPLQATIVEQIFTDYLGGISLTKLRDKLNESGHIGKDIPWSYRTLRQTLDNPVYCGYIKFKGSLFEGMHKPIIPYETYLKVQKELEERQQQTYERNNNPRPFQAKYMLSGMARCGYCGAPLRIVLGHKRKDGSRTMKYHCANRFPRKTRGVTAYNDNKKCDSGTYDLSDLENTVIDNLIGFQENNDSLLKIINGNNQPILDTSSLKKQISQIDKKIQKNSELYLNDFITMDELKDRTDSLQAEKKLLKAKISENKLNDSTDVFELVKTQLGSIPINELSYDNKKKIVNNLVSKVDVTADNVDIIFKFQLA

SEQ ID NO: 4397 - protein, 452 aa, synthetic construct
MKAAIYIRVSTQEQVGNYSIQAQTEKLTALCRSKGWDVYDIFIDGGYSGSNMNRPALNEMLSKLHEIDAVVVYRLDRLSRSQRDTTTLIEEYFLKNNVEFVSLSETLDTSSPFGRAMIGILSVFAQLERETIRDRMVMGKIKRIEAGLPLTTAKGRTFGYDVIDTKLYINEEEAKQLQLIYDIFEEEQSITSLQKRLKKLGFKVRTYNRYNSWLTNDLYCGYVSYKDKVHVRGIHEPIISEEQFYRVQEIFTRMGKNPNMNRDSASLLSNLVVCSKCGLGFVHRSKDTMSRGKKYHYRYYSCKTYKHTHELEKCGNKIWRADKLEELIISRVNNYSFASRNVDKEDDLDSLNEKLKIEHAKKRRLFDLYINGSYEVSELDSMMNDIDAQISYYESQIEASEELKKNKKIQENLADLATVDFDSLEFREKQLYLKSLINKIYIDGEQVTIEWL

SEQ ID NO: 4398 - protein, 470 aa, synthetic construct
MSYTTPVRAAVYLRISEDRSGEQLGVARQREDCLKLCGQRKWEPVEYLDNDVSASTGKRRPAYEQMLADITAGKIAAVVAWDLDRLHRRPIELEAFMSLADEKRLALATVAGDVDLATPQGRLVARLKGSVAAHETEHKKARQRRAARQKAERGHPNWSKAFGYLPGPNGPEPDPRTAPLVKQAYADILAGASLGDVCRQWNDAGAFTITGRPWTTTTLSKFLRKPRNAGLRAYKGARYGPVDRDAIVGKAQWGPLVDEATFWAAQAVLDAPGRAPGRKSVRRHLLTGLAGCGKCGNHLAGSYRTDGKVVYVCKACHGVAILADNIEPILYHIVAERLAMPDAVDLLRREIHDAAEAETIRLELETLYGELDRLAVERAEGLLTARQVKISTDIVNAKITKLQARQLDQERLRVFDGIPLGTPQVAGMIAGLSPDRFRAVLDVLAEVVVLPVGKSGRVFNPERVQVNWRQ

SEQ ID NO: 4399 - protein, 469 aa, synthetic construct
MSYTTPVRAAVYLRISEDRSGEQLGVARQREDCLKLCDQRKWVPVEYLDNDVSASTGKRRPAYEQMLADITAGRIAAVVAWDLDRLHRRPIELEAFMSLADEKRLALATVAGDVDLATPQGRLVARLKGSVAAHETEHKKARQRRAARQKAERGHPNWSKAFGYLPGPNGPEPDPRTAPLVKQAYADILAGASLGDVCRRWNDAGAFTITGRPWTSTTLSKFLRKPRNAGLRAYKGARYGPVDRDAIVGKAQWSPLVDEATFWAAQAVLDAPGRAPGRKSVRRHLLTGLAGCGKCGSHLAGSYRTDGRVVYVCKACHGVAILADNIEPILYHIVAERLAMPDAVDLLRREIRDAAEAETIRLELETLYDELDRLAVERAEGLLTARQVKISTDIVDAKITKLRVRQLDQERLRVLDGIPLGTPQVAGTIAELSPDRFRAVLDVLAEVVVQPVGKSGRIFNPERVQVNWR

SEQ ID NO: 4400 - protein, 485 aa, synthetic construct
MTKKVAIYTRVSTTNQAEEGFSIDEQIDRLTKYAEAMGWQVSDTYTDAGSSGAKLVRPAMQRLINDIENKVFDTVLVYKLDRLSRSVRDTLYLVKDVFTKNKIDFISLNESIDTSSAMGSLFLTILSAINEFERENIKERMTMGKLGRAKSGKSMMWTKTAFGYYHNRKTGILEIVPLQATIVEQIFTDYLSGISLTKLRDKLNESGHIGKDIPWSYRTLRQTLDNPVYCGYIKFKGSLFEGMHKPIIPYETYLKVQKELEERQQQTYERNNNPRPFQAKYMLSGMARCGYCGAPLKIVLGHKRKDGSRTMKYHCANRFPRKTRGITVYNNNKKCDSGTYDLSNLENTVIDNLIGFQENNDSLLKIINGNNQPILDTSSLKKQLSQIDKKIQKNSDLYLNDFITMDELKDRTDSLQAEKKLLKAKISGNKFNDSTDVFELVKTQLGSIPINELSYDNKKKIVNNLVSKVDVTADNVDIIFKFQLA

SEQ ID NO: 4401 - protein, 485 aa, synthetic construct
MTKKVAIYTRVSTTNQAEEGFSIDEQIDRLTKYAEAMGWQVSDTYTDAGCSGAKLERPAMQRLINDIENKAFDTVLVYKLDRLSRSVRDTLYLVKDVFTKNKIDFISLNESIDTSSAMGSLFLTILSAINEFERENIKERMTMGKLGRAKSGKSMMWTKTAFGYYHNRKTGILEIVPLQATIVEQIFTDYLSGISLTKLRDKLNESGHIGKDIPWSYRTLRQTLDNPVYCGYIKFKDSLFEGMHKPIIPYETYLKVQKELEGRQQQTYERNNNPRPFQAKYMLSGMARCGYCGAPLRIVLGHKRKDGSRTMKYHCANRFPRKTKGVTVYNDNKKCDSGTYDLSDLENTVIDNLTGFQENNDSLLKVINGNNQPILDTSSFIKQISQIDKKIQKNSDLYLNDFITMDELKDRTDSLRAEKELLKAKISKNKFNDSTDVFELVKTQLGSIPINELSYDDKKKIVNNLVSKVDVTADNVDIIFKFQLA

SEQ ID NO: 4402 - protein, 469 aa, synthetic construct
MSYTTPVRAAVYLRISEDRSGEQLGVARQREDCLKLCDQRKWEPVEYLDNDVSASTGKRRPAYEQMLADITAGKIAAVVAWDLDRLHRRPIELEAFMSLADEKRLALATVAGDVDLATPQGRLVARLKGSVAAHETEHKKARQRRAARQKAERGYPNWSKAFGYLPGPSGPEPDPRTAPLVKQAYADILAGASLGDVCRQWNDAGAFTITGRPWTTTTLSKFLRKPRNAGLRAYKGAHYGPVDRDAIVGKAQWSPLVDEATFWAAQAVLDAPGRAPGRKSVRRHLLTGLAGCGKCGNHLAGSYRTDGRVVYVCKACHGVAILADNIVPILYRIVAERLAMPDAVDLLRREIHDAAEAETIRLELETLYGELDRLAVERAEGLLTARQVKISTDIVSAKITELQARQLDQERLRVLDGIPLGTPQVAGMIAKLSPDRFRAVLDVLAEVVVQPVGKSGRILNPKRVQVNWR

SEQ ID NO: 4403 - protein, 452 aa, synthetic construct
MKAAIYIRVSTREQVENYSIQAQTEKLTALCRSKDWDVYDTFIDGGYSGSNMNRPALNEMLSKLHEIDAVVVYRLDRLSRSQRDTITLIEEYFLKNNVEFVSLSETLDTSSPFGRAMIGILSVFAQLERETIRDRMVMGKIKRIEAGLPLTTAKGRTFGYDVIDTKLYINEEEAKQLQLIYDIFEEEQSITSLQKRLKKLGFKVRTYNRYNNWLTNDLYCGYVSYKDKVHVKGIHEPIISEEQFYRVQEIFTRMGKNPNMNRDSASLLNNLVVCSKCGLGFVHRRKDAMSRDKKYHYRYYSCKTYKHIHELEKCGNKIWRADKLEELIINRVNNYSIATRNVDKEDELDSLNEKLEIEHAKKKRLFDLYINGSYEVSELDSMMNDIDTQINYYESQIEANEELRKNKKIRENLANLATVDFDSLEFREKQLYLKSLINKIHIDGEQVTIEWL

SEQ ID NO: 4404 - protein, 485 aa, synthetic construct
MTKKVAIYTRVSTTNQAEEGFSIDEQVDRLTKYAEAMGWQVSDTYTDAGFSGAKLERPAMQRLINDIENRVFDTVLVYKLDRLSRSVRDTLYLVKDVFTKNKIDFISLSESIDTSSAMGSLFLTILSAINEFERENIKERMTMGKLGRAKSGKSMMWTKTAFGYYHNCKTGILEIVPLQATIVKQIFTDYLSGISLTKLRDKLNESGHIGKDIPWSYRTLRQTLDNPVYCGYIKFKDSLFEGMHKPIIPHETYLKVQKELEERQQQTYERNNNPRPFQAKYMLSGMARCGYCGAPLRVVLGHKRKDGSRTMKYHCANRFPRKTKGVTVYNDNKKCDSGTYDLSNLENTVIDNLIGFQENNDSLLKIINGNNQPILDTSSLKKQISQIDKKIQKNSDLYLNDFITMEELKDRTDSLQAEKRLLKAKICVNKFNDSTDVFELVKTQLGSIPINELSYDNKKKIVNNLVSKVDVTADNVDIIFKFQLA

SEQ ID NO: 4405 - protein, 452 aa, synthetic construct
MKAAIYIRVSTREQVENYSIQAQTEKLTALCRSKGWDVHDIFIDGGYSGSNMNRPALNEMLSKLHEIDAVVVYRLDRLSRSQRDTITLIEEYFLKNNVEFVSLSETLDTSSPFGRAMIGILSVFAQLERETIRDRMVMGKIKRIEAGLPLTTAKGRTFGYDVIDTKLYINEEEAKQLQLIYDIFEEEQSITSLQKRLKKLGFKVRTYNRYSSWLTNDLYCGYVSYKDKVHVKGIHEPIISEEQFYRVQEIFTRMGKNPSMNRDSASLLNSLVVCSKCGLGYVHRRKDTMSRGKKYHYRYYSCKTYKHTHELEKCGNKIWRADKLEELIINRVNDYSFASRNVDKEDELDSLNEKLKIEHAKKKRLFDLYINGGYEVSELDSMMSDIDAQINYYESQIEANEELRKNKKIQKSLADLATVDYDSLEFREKQLYLKSLINKIYIDGEQVTIEWL

SEQ ID NO: 4406 - protein, 485 aa, synthetic construct
MTKKVAIYTRVSTTNQAEEGFSIDEQIDRLTKYAEAMGWQVSDTYTDAGFSGAKLERPAMQRLINDIENKAFDTVLVYKLDRLSRSVRDTLYLVKDVFTKSKIDFISLNESIDTSSTMGSLFLTILSAINEFERENIKERMTMGKLGRAKSGKSMMWTKTAFGYYHNRKTGILEIVPLQATIVEQIFTDYLSGISLTKLRDKLNESGHIGKDIPWSYRTLRQTLDNPVYCGYIKFKDSLFEGMHKPIIPYETYLKVQKELEERQQQTYERNNNPRPFQAKYMLSGMARCGYCGAPLRIVLGHKRKDGSRTMKYHCANRFPRKTKGVTVYNDNKRCDSGTYDLSNLENTVIDNLIGFQENNDSLLKIINGNNQPILDTSSFKEQISQIDKKIQKNSDLYLNDFITMDELKVRTDSLQAEKKLLKAKISENKFNDSTDVFELVKTQLGSIPINELSYDNKKKIVSNLVSKVDVTADNVDIIFKFQLA

SEQ ID NO: 4407 - protein, 469 aa, synthetic construct
MSYTTPVRAAVYLRISEDRSGEQLGVARQREDCLKLCDQRKWVPVEYLDNDVSASTGKRRPAYEQMLVDITAGKIAAVVAWDLDRLHRRPMELEAFMSLADEKRLALATVAGDVDLATPQGRLVARLKGSVAAHETEHKKARQRRAARQKAERGYPNWSKAFGYLPGPNGPEPDPRTAPLVKQAYADILAGASLGDVCRQWNDAGAFTITGRPWATTTLSKFLRKPRNAGLRTYKGARYGPVDRDAIVGKAQWSPLVDEATFWAAQAVLDAPGRAPGRKSVRRHLLTGLAGCGKCGNHLAGSYRTDGRVVYVCKACHGVAILADNIEPILCHIVAERLAMPDAVDLLRREIHDAAEAETIRLELETLYGELDRLAVERAEGLLTARQVKISTDIVSAKITKLQARQLDQERLRVLDGIPLGTPQVAGMIAELSPDRFRAVLDVLAEVVVQPVGKSGRTFNPERVRVNWR

SEQ ID NO: 4408 - protein, 452 aa, synthetic construct
MKAAIYIRVSTREQVENYSIQAQTEKLTALCRSKDWDVYDIFIDGGYSGSNMNRPALNEMLSKLHEIDAVVVYRLDRLSRSQRDTITLIEEYFLKNNVEFASLSETLDTSSPFGRAMIGILSVFAQLERETIRDRMVMGKIKRIEAGLPLTTAKGRTFGYDVIDAKLYINEEEAKQLRLIYDIFEEEQSITFLQKRLKKLGFKVRTYSCYNNWLTNDLYCGYVSYKDKVHVKGIHEPIISEEQFYRVQEIFTRMGKNPNMNRGSASLLCNLVVCSKCGLGFVHRRKDTMSRGKRYHYRYYSCKTYKHTHELEKCGNKIWRADKLEELIINRVNNYSFASRNVDKEDELDSLNEKLKIERAKKKRLFDLYINGSYEVSELDSMMNDIDAQINYYESQIEANEGLRKNKTIQENLAELATVDLDSLEFREKQLYLKSLINKIYIDGEQVTIEWL

SEQ ID NO: 4409 - protein, 485 aa, synthetic construct
MTKKVAIYTRVSTTNQAEEGFSIDEQIDRLTKYVEAMGWQVSDTYTDAGLSGAKLERPAMQRLINDIENKAFDTVLVYKLDRLSRSVRDTLYLVKDVFTKNKIDFISLNESIDTSSAMGSLFLTILSAINEFERENIKERMTMGKLGRAKSGKSMMWTKTAFGYYHNRKTGILEIVPLQATIVEQIFTDYLSGISLTKLRDKLNESGHIGKDIPWSYRTLRQTLDNPVYCGYIKFKDSLFEGMHKPIIPYETYLKVQKELEERQQQAYERNNNPRPFQAKYMLSGMARCGYCGAPLRIVLGHKRKDGSRTMKYHCANRFPRKTKGVTVYNDNKKCDSGTYDLSNLENTVIDSLIGFQENNDSLLKIINGNNQPILDTSGFKKQISQIDKKIQKNSDLYLNGFITMDELKDRTDSLQAEKKLLKAKISENKFNDSTDVFELVKTQLGCIPINELSYDNKKKIVNNLVSKVDVTADNVDIIFKFQLA

SEQ ID NO: 4410 - protein, 469 aa, synthetic construct
MCYTTPVRAAVYLRISEDRSGEQLGVARQREDCLKLCGQRKWVPVEYLDNDVSASTGKRRPAYEQMLADITAGKIAAVVAWDLDRLHRRPIELEAFMSLADEKRLALATVAGDVDLATPQGRLVARLKGSVAAHETEHKKARQRRAARQKAERGHPNWSKAFGYLPGPNGPEPDPRTAPLVKQAYADILAGASLGDVCRQWNGAGAFTITGRPWTTTTLSKFLRKPRNAGLRAYKGARYGPVDRDAIVGKAQWSPLVDEATFWAAQAVLDAPGRAPGRKSVRRHLLTGLAGCGKCGNHLAGSYRTDGRVVYVCKACHGVAILADNIEPILYHIVAERLAMPDAEDLLRREIHDAAEAETIRLELETLYGELDRLAVERAEGLLTARQVKVSTDIVNAKIAKLQARQLDQERLRVFDGIPLGTPQVAGVIAELSPDRFRAVLDVLAEVVVQPVGKSGRIFNPGRVQVNWR

SEQ ID NO: 4411 - protein, 452 aa, synthetic construct
MKAAIYIRVSTREQVENYSIQAQTEKLTALCRSKDWDVYDIFIDGGYSGSNMNRPALNEMLSKLHEIDAVVVYRLDRLSRSQRDTITLIEEYFLKNNVEFVSLSETLDTSSPFGRAMIGILSVFAQLERETIRDRMVMGKIKRIEAGLPLTTAKGRTFGYDVIDTKLYINEEEAKQLQLIYDIFEEEQSITSLQKRLKELGFKVRTYNRYNNWLTNDLYCGYVSYTNKAHVKGIHEPIISEEQFYRVQEIFARMGKNPNMNRDSASLLNNLVVCSKCGLGFVHRRKDTTSRGKKYHYRYYSCKTYKHTHELEKCGNKIWRADRLEELIINRVNNYSFASCNVDKEDDLDSLNEKLKIERAKKRRLFDLYINGSYEVSELDSMMSDIDAQIDYYESQIEANEELKKNRKIQENLANLATVDYDSLEFREKQLYLKSLINKIYIDGEQVTIEWL

SEQ ID NO: 4412 - protein, 485 aa, synthetic construct
MTRKVAIYTRVSTTNQAEEGFSIDEQVDRLTKYAEAMGWQVSDTYTDAGFSGAKLERPAIQRLINDIENKAFDTVLVYKLDRLSRSVRDTLYLVKDVFTKNKIDFISLNECIDTSSAMGSLFLTILSAINEFERENIKERMAMGKLGRAKSGKSMMWTKTAFGYYHNRKTGILESVPLQATIVEQIFTDYLSGISLTKLRDKLNESGHIGKDIPWSYRTLRQILDNPVYCGYIKFKDSLFEGMHKPIIPYETYLRVQKELEERQQQTYERNNNPRPFQAKYMLSGMARCGYCGAPLRIVLGHKRKDGSRTMKYHCANRFPRKTKGVTVYNDNKKCNSGTYDLSDLENTVIDNLIGLQENNDSLLKIINGNNQPILDTSSFKEQISQIDKKIRKNSDLYLNDFITMDELKDRTDSLQAEKKLLKAKISEDKFNDGTDVLELVKTQLGSIPINELSYDNKKKIVNNLVSKVDVTADNVDIIFKFQLA

SEQ ID NO: 4413 - protein, 452 aa, synthetic construct
MKAAIYIRVSTREQVENYSIQAQTEKLTALCRSKDWDVYDIFIDGGYSGSNMNRPALNEMLSKLHEIDAVVVYRLDRLSRSQRDTITLIEEYFLKNNVEFVSLSETLDTSSPFGRAMIGILSVFAQLERETIRDRMVMGKIKRVEAGLPLTTAKGRTFGYDVIDTKLHINEGEAKQLQLIYDIFEEEQSITFLQKRLKKLGFKVRTYNRYISWLTNDLYCGYVSYKDKVHVKGIHEPIISEEQFYRVQEIFTRMGKNPNMNRDSASLLNNLVVCSKCGLGFVHRRKDTMSRGKKYHYRYYSCKTYKHIHELEKCGNKIWRADKLEELIINRVNNYSLASRNVDKEDGLDCLNEKLKIEHAKKRRLFDLYLSGSYEVSELDSMMNDIDAQINYYESQIEADEELKKNKKIRENLADLATVDFDSLEFREKQLYLKSLINKIYIDDEQVTIEWL

SEQ ID NO: 4414 - protein, 452 aa, synthetic construct
MKAAIYIRVSTREQVENYSIQAQTEKLTALCRSKDWDVYDIFIDGGYSGSNMNRPALNEMLSKLHEVDAVVVYRLDRLSRSQRDTITLIEEHFLKNNVEFVSLSETLDTSSPFGRAMIGILSVFAQLERETIRDRMVMGKIKRIEAGLPLTTAKGRTFGYDVIDTKLYINEEEAKQLQLIYDIFEEEQSITFLQKRLKKLGFKVRSYNRYSNWLTNDLYCGYVSYKDKVHVKGIHEPIISEEQFYRVQEIFTRMGKNPNMNRGSASLLNNLVVCGKCGLGFVHRRKDITSRGKKYHYRYYSCKTYKHIHELEKCGNKIWRADKLEELIIDRVNNYSLASRNVDKEDELGSLNEKLKAEHAKKKRLFDLYINGSYEVSELDSMMNDIDAQINYYEGQIEANEELKKNKKIQENLADLATVDFDSLEFREKQLYLKSLINKIYIDGEQVTIEWL

SEQ ID NO: 4415 - protein, 452 aa, synthetic construct
MKAAIYIRVSTQEQVGNYSIQAQTEKLTALCRSKDWDVYDIFIDGGYSGSNMNRPALNEMLSKLHEIDAVVVYRLDRLSRSQRDTTTLIEEYFLKNNVEFVSLSETLDTSSPFGRAMIGILSVFAQLERETIRDRMVMGKIKRIEAGLPLTTAKGRTFGYDVIDTKLYINEEEAKQLQLIYDIFEEEQSITFLQKRLKKLGFKVRTYNRYNNWLTNDLYCGYVSYKDKVHVKGIHEPIISEEQFYRVQEIFTRMGKNPNMNRDSASLLNNLVVCSKCGLGFVHRSKDTMSRGKKYRYRYYSCKTYKHTHELEKCGNKTWRADKLEELIISRVNNYSFASRNVDKEDELDSLNEKLKIEHARKKRLFDLYINGSYEVSELDSMMNDIDAQINYYESQIEANEGLKKNKKIQENLANLATVDFDSLEFREKQLYLKSLINKIYVDGEQVTIEWL

SEQ ID NO: 4416 - protein, 469 aa, synthetic construct
MSYTTPVRAAVYLRISEDRSGEQLGVARQREDCLKLCDQRKWVPVEYLDNDVSASTGRRRPAYEQMLADITAGKIAAVVAWDLDRLHRRPVELEAFMSLADERRLALATVAGDVDLATPQGRLVARLKGSVAAHETEHKKARQRRAARQKAERGLPNWSKAFGYLPGPNGPEPDPRTAPLVRQAYADILAGASLGDVCRQWNGAGAFTITGRPWATTTLSKFLRKPRNAGLRAYKGAHYGPVDRDAIVGKAQWSPLVDEATFWAAQAVLDAPGRAPGRKSVRRHLLTGLAGCGKCGNHLAGSYRTDGRVVYVCKACHGVAILADNIEPILYRIVAERLAMPDAVDLLRREIHDAAEAETIRLELETLYGELDRLAVERAEGLLTARQVKISTDVVNAKITKLQARQLDQERLRVFEGIPLGTPQVAGVIAELSPDRFRAVLDVLAEVVVQPVGRSGRIPNPERVQVNWR

SEQ ID NO: 4417 - protein, 485 aa, synthetic construct
MTKKVAIYTRVSTTNQAEEGFSIDEQINRLTKYAEAMGWQVSDTYTDAGFSGAKLERPAMQRLINDIENKAFDTVLVYKLDRLSRSVRDTLYLVKDVFTKNKIDFISLNESIDTSSAMGSLFLTILSAINEFERENIKERMTMGKLGRAKSGKSMMWTKTAFGYYHNRKTGILEIVPLQATVVKQIFTDYLSGISLTKLRDKLNESGHIGKDIPWSYRTLRQTLDNPVYCGYIKFKDSLFEGMHRPIIPYETYLKAQKELEERQQQTYERNNNPRPFQAKYMLSGMARCGYCGAPLRIVLGHKRKDGSRTMKYHCANRFPRRTRGVTVYNDNKKCDSGAYDLSDLENTVIGNLVGFQENNDSLLKIINGNDQTVLDTSGFKEQISQIDKKIQKNSDLYLNDFITLDELRDRTDSLQAEKKLLKAKISENKFNDSTDVFELVKAQLGSTPINELSYDNKKKIVNNLVSRVDVTADNVYIIFKFQLA

SEQ ID NO: 4418 - protein, 452 aa, synthetic construct
MKAAIYIRVSTREQVENYSIQAQTEKLTALCRSKDWDVYDIFIDGGYSGSNMNRPALNEMLSKLHEIDAVVVYRLDRLSRSQRDTITLIEEYFLKNNVEFVSLSETLDTSSPFGRAMIGILSVFAQLERETIRDRMVMGKIKRIEAGLPLTTAKGRTFGYDVIDTKLYINEEEAKQLQLIYDIFEEEQSITFLQKRLKKLGFKVRTYNRYNNWLTNDLYCGYVSYKDEVHVKGIHEPIISEEQFYRVQEIFTRMGKNPNMNRDSASLLNNLVVCSKCGLGFVHRRKDTMSRGKKYHYRYYSCKTYKHTHELEKCGNKIWRADKLEELIINRVNDHSFASHNVDKEDELDRLNEKLKIEHAKKKRLFDLYINGSYEVSELDGMMNVIDAQINYYESQIEANEELKKNKKIQENLAGLAAADFDSLEFREKQLYLKSLINKIYIDGEQVTIEWL

SEQ ID NO: 4419 - protein, 452 aa, synthetic construct
MKAAIYIRVSTHEQVANYSIQAQTEKLTALCRSKDWDVYDIFIDGGYSGSNMNRPALNEMLSKLHEIDAVVVYRLDRLSRSQRDTTTLIEEYFLKNNVEFVSLSETLDTSSPFGRAMIGILSVFAQLERETIRDRMVMGKIKRIEAGLPLTTAKGRTFGYDVIDTKLYINEEEAKQLQLIYDIFEEEQSITSLQKRLKKLGFKVRTYNRYNNWLTNDLYCGYVSYKDKVHVRGIHEPIISEEQFYRVQEIFTRMGKRPNMNRDSASLLNNLVVCSKCGLGFVHRSKDTMSRGKKYHYRYYSCKTYKHTHELEKCGNKTWRADKLEELIINRVNDYSSASRNVDKEDELDSLNEKLKIEHAKKKRLFDLYINGSYEMSELDSMMNDIDAQINYYESLIEANEELKKNRRIQEDLADLATVDFGCLEFREKQLYLKSLINKIYIDGEQVTIEWL

SEQ ID NO: 4420 - protein, 452 aa, synthetic construct
MKAAIYIRVSTREQVENYSIQAQTEKLTALCRSKDWDVYDIFIDGGYSGSNMNRPALSEMLSKLHEIDAVVVYRLDRLSRSQRDTITLIEEYFLKNNVEFVSLSETLDTSSPFGRAMIGILSVFAQLERETIRDRMVMGKIKRIEAGLPLTTAKGRTFGYDVIDSKLYINEEEAKQLQLIYDIFEEEQSITFLQKRLKKLGSKVRTYSCYNNWLTNDLYCGYVSYKDKVHVKGIHEPIISEEQFYRVQEIFARKGKNPNMNRDSASLLNNLVVCSKCGLGFVHRRKDTMSRGKKYRYRYYSCKTYKHTHELEKCGNKIWRADKLEELIINRVNNYSFASRNVDKEDELDSLNEKLKTEHTKKKRLFDLYINGSYEVSELDSMMNDIDAQINYYESQIEANEELKKNKKIQENLADLATVDFDSLEFREKRLHLKSLISKIYIDGEQVTIEWL

SEQ ID NO: 4421 - protein, 452 aa, synthetic construct
MKAAIYIRVSTREQVENYSIQAQTEKLTALCRSKDWDVYDIFIDGGYSGSNMNRPALNEMLSKLHEIDAVVVYRLDRLSRSQRDTITLIEEYFLRNNVEFVSLSETLDTSSPFGRAMIGILSVFAQLERETIRDRMVMGKIKRIEAGLPLTTAKGRTFGYDVIDTKLYINEEEAKQLRLIYDIFEEEQSITFLQKRLKKLGFKVHTYSRYNNWLTNDLYCGYVSYKDKVHVKGIHEPIVSEEQFYRVQEIFTRMGKNPNMNRDSASLLNNLVVCSKCGLGFVHRRKDIMSRDKKYHYRYYSCKTYKHIHELEKCGNKIWRADKLEELIIDRVNNYSFAGRNVDKGDELDSLNEKLRIEHAKRKRLFELYINGSYEVSELDSMMSDIDAQINYYESQIEANEELKKNKRVQENLAHLATVDFDSLEFREKQLYLKSLINKIYIDGEQVTIEWL

SEQ ID NO: 4422 - protein, 485 aa, synthetic construct
MTKKVAIYTRVSTTNQAEEGFSIDEQIDRLTKYAEAMGWQVSDTYTDAGLSGAKLERPAMQRLINDIENKAFDTVLVYKLDRLSRSVRDTLYLVKDVFTKNKIDFISLNESIDTSSAMGSLFLTILSAINEFERENIKERMTMGKLGRARSGKSMMWTKTAFGYYHNRKTGILEIVPLQATIVEQIFTDYLSGISLTKLRDKLNESGHIGKDIPWSYRTLRQTLDNPVYCGYIKFKGSLFEGMHKPIIPYETYLKVQKELEERQQQTYERNNNPRPFQAKYMLSGVARCGYCGAPLRIVLGHKRKDGSRTMKYHCANRFPRKTKGVTVYNDNKKCNSGTYDLSNLENTVIDNLIGFQENNDSLLKIINGNNQPTLDTSSHKKQISQIDKKIQKNSDLYLNDFITMDELKGRTDSLQAEKKLLKAKISENKFNDSTEVFELVKTQLGSIPINELSYDNKKKIVNDLVSKVDVTADNVDVIFKFQLA

SEQ ID NO: 4423 - protein, 452 aa, synthetic construct
MKAAIYIRVSTREQVENYSIQAQTEKLTALCRSKDWDVYDIFIDGGYSGSNMNRPALNEMLSKLHEIDAVVVYRLDRLSRSQRDTITLIEEHFLKNNVEFVSLSETLDTSSPFGRAMIGILSVFAQLERETIRDRMVMGIIKRIEAGLPLTTAKGRTFGYDVIDTKLYINEEEAKQLRLIYDIFEEEQSITFLQRRLKELGFKVRTYNRYSNWLTNDLYCGYVSYKDKVHVKGIHEPIISEEQFHRVQEIFTRMGKNPNMNRDSASLLNNLVVCGKCGQGFVHRRKDAMSRDKKYHYRYYSCKTYKHIHELEKCGNKIWRADKLEELIINRVNNYSLASRNVDKEDELDSLNERLKIEHAKKKRLFDLYINGRYEVSELDSMMNDIDAQINYYESQIEANEELRKNKKIQENLAHLATVDFDSLEFREKQLYLKSLINKIYIDGEQVTIEWL

SEQ ID NO: 4424 - protein, 485 aa, synthetic construct
MTKKVAIYTRVSTTNQAEEGFSIDEQVDRLTKYAEAMGWQVSDTYTDAGISGAKLERPAMQRLINDIESKAFDTVLVYKLDRLSRSVRDTLYLVKDVFTKNKIDFISLNESIDTSSAMGSLFLTILSAINEFERENIKERMTMGKLGRAKSGKSMMWTKTAFGYYHNRKTGILEIVPLQATIVEQIFTDYLSGISLTKLRDKLNESGHIGKDIPWSYRTLRQTLDNPVYCGYIKFKDSLFEGMHKPIIPYETYLKVQKELEGRQQQTYERNNNPRPFQAKYMLSGMARCGYCGAPLKIVLGHKRKDGSRTMKYHCANRFPRKTRGVTVYNDNKKCDSGAYDLRNLENTVIDNLIGFQEDNDSLLKIINGNNQPILDTSSFKEQISQIDKKIQKNSDLYLNDFITMDELKDRTDSLQAEKKLLKAKISENIFDDSTGVFELVKTQLGSIPINELSYDDKKKIVNNLVSKVDVTADNVDIIFKFQLA

SEQ ID NO: 4425 - protein, 485 aa, synthetic construct
MTKKVAIYTRVSTTNQAGEGFSIDEQIDRLTKYAEAMGWQVSDTYTDAGFSGAKLERPAMQRLINDIENKAFDTVLVYKLDRLSRSVRDTLYLVKDVFTKNKIDFISLSESIDTSSAMGSLFLTILSAINEFERENIKERMTMGKLGRARSGKSMMWTKTAFGYYHNRKTGILEIVPLQATIVEQIFTDYLSGISLTKLRDKLNESGHIGKDIPWSYRTLRQTLDNPVYCGYIKFKDSLFEGMHEPIIPYETYLRVQKELEERQQQTYERNNNPRPFQAKYMLSGMARCGYCGAPLRIVLGHKRKDGSRTMKYHCANRFPRKTKGITVYNDNKKCDSGTYDLSNLENTVIDNLIGFQENNDSLLKIINGNNQPILDTSSFKNQISQIDKKIQKNSDLYLNDFITMDELKDRTESLQAEKKLLKAKIRENNLNDSTDVFELVKTQLGSIPIDELSYDNKKKIVNNLVSKVDVTADNVDIIFKFQLA

SEQ ID NO: 4426 - protein, 452 aa, synthetic construct
MKAAIYIRVSTQEQVGNYSIQAQTEKLTALCRSKDWDVYDIFIDGGYSGSNMNRPALNEMLSKLHEIDAVVVYRLDRLSRSQRDTTTLIEEYFLKNNVEFVSLSETLDTSSPFGRAMIGILSVFAQLERETIRDRMVMGKIKRIEAGLPLTTAKGRTFGYDVIDTKLYINEEEAKQLQLIYDIFEEEQSITLLQKRLKKLGFKVRTYNRYNNWLTNDLYCGYVSYKDKVHVKGIHEPIISEEQFYRVQEIFTRTGKNPNMNRNSASLLNNLVVCSKCGLGFVHRSKDTMSRGRKYHYRYYSCKTYKHTHELEKCGNKTWRADKLEELIISRVNNYSSASRSVDKEDELDSLNEKLKTEHAKKKRLFDLYINGSYEVSELDSMMNDIDAQINYYESQIEANEELRKNKKIQENLADLATVDFDSLEFREKRLYLKSLINKIYIDGEQVIIEWL

SEQ ID NO: 4427 - protein, 485 aa, synthetic construct
MTRKVAIYTRVSTTNQAEEGFSIDEQIDRLTKYAEAMGWQVSDTYTDAGFSGAKLERPAMQRLINDIENKAYDTVLVYKLDRLSRSVRDTLYLVKEVFTKNKIDFISLNESIDTSSAMGSLFLTILSAINEFERENIKERMTMGKLGRAKSGKSMMWTKTAFGYYHNRKTGILEIVPLQAAIVEQIFTDYLSGISLTKLRDKLNESGHIGKDIPWSYRTLRQTLDNPVYCGYIKFKDSLFEGMHKPIIPHETYLKVQKELEERQQQTYERNNNPRPFQAKYMLSGMARCGYCGAPLRIVLGHKRKDGSRTMKYHCANRFPRRTKGVTVYNDNKKCDSGTYDLSNLENTVIDILIGFQENNDNLLKIINGNNQPILDTSSFKKQISQIDKKIQKNSDLYLNDFITMDELKDRTDSLQAEKKLLKAKISENRFNDSTDVFELVKTQLGSIPINELSYDNKKKIVNNLVSKVDVTADNVDIIFKFQLA

SEQ ID NO: 4428 - protein, 452 aa, synthetic construct
MKAAIYIRVSTREQVENYSIQAQTEKLTALCRSKDWDVYDIFIDGGYSGSNMNRPALNEMLSKLHEIDAVVVYRLDRLSRSQRDTITLIEEYFLKNNVEFVSLSETLDTSSPFGRAMIGILSVFAQLERETIRDRMVMGKIKRIEAGLPLTTAKGRTFGYDVVDTKLYINEEEAKQLQLIYDIFEEEQSITFLQKRLKKLGFKVRTYNRYNNWLTNDLYCGYVSYKDKVHVKGIHEPIISEEQFYRVQEIFTRMGKNPNMNRGSASLLNNLVVCSKCGLGFVHRRKDIMSRGKKYHYRYYSCKTYKHIHELEKCGNKIWRADKLEELIINRVNNYSFASRNADKEDELDSLYEKLKIEHAKKKRLFDLYINGNYEVSELDSMMHDIDAQINYYESQIEANEELRKSKKFQENLADLATVDFGSLEFREKQLYLKSLINKIYIDGEQVTIEWL

SEQ ID NO: 4429 - protein, 469 aa, synthetic construct
MSYTTPVRAAVYLRISEDRSGEQLGVARQREDCLKLCGQRKWEPVEYLDNDVSASTGKRRPAYEQMLADITAGKIAAVVAWDLDRLHRRPVELEAFMSLADEKRLALATVAGDVDLATPQGRLVARLKGSVAAHETEHKKARQRRAARQKAERGYPNWSKAFGYLPGPNGPEPDPRTAPLVKQAYADILAGASLGDVCRRWNDAGAFTITGRPWTSTTLSKFLRKPRNAGLRAYKGARYGPVDRDAIVGKAQWSPLVDEATFWAAQAVLDAPGRAPGRKSVRRHLLTGLAGCGKCGNHLAGSYRTDGRVVYVCKACHGVTILADNIEPILYHIVAEHLAMPDAVDLLRREVHDVAEAETIRLELETLYGELDRLAVERAEGLLTARQVKISTDIVNAKITKLQARQLDQERLRVLDGIPLGTPQVAGVIAELSPDRFRAVLDVLAEVIVRPVGKGGRIFNPERVQVNWR

SEQ ID NO: 4430 - protein, 452 aa, synthetic construct
MKAAIYIRVSTREQVENYSIQAQTEKLTALCHSKDWDVYDIFIDGGYSGSNMNRPALNEMLGKLHEIDAVVVYRLDRLSRSQRDTITLIEEYFLKNNVEFVSLSETLDTSSPFGRAMIGILSVFAQLERETIRDRMVMGKIKRIEAGLPLTTAKGRTFGYDVIDTRLYINEEEAKQLQLIYDIFEEVQSITFLQKRLKELGFKVRTYNRYNNWLTNDLYCGYVSYKDKVHVKGIHEPIISEEQFYRVQEIFARMGKNPNMNRDSASLLNNLVVCGKCGLGFVHRRKDAMSRDKKYHYRYYSCKTYKHIHELEKCGNKIWRADKLEELIINRVNNYSLASRNVDKEDELDSLNEKLKIEHAKKKRLFDLYINGRYEVSELDSMMNDIDAQINYYESQIEANEELKKNKQIQENLANLATVDFDSLEFREKQRYLKGLINKIYIDGEQVTIEWL

SEQ ID NO: 4431 - protein, 485 aa, synthetic construct
MTKKVAIYTRVSTTNQAEEGFSIDEQIDRLTKYVEAMGWQVSDTYTDAGLSGAKLERPAMQRLINDIENKAFDTVLVYKLDRLSRSVRDTLYLVKDVFTKNKIDFISLNESIDTSSAMGSLFLTILSAINEFERENIKERMTMGKLGRAKSGKSMMWTKTAFGYYHNRKTGILEIVPLQATIVEQIFTDYLSGISLTKLRDKLNESGHIGKDIPWSYRTLRQTLDNPVYCGYIKFKDSLFEGMHKPIIPYETYQKVQKELEERQQQTYERNNNPRPFQAKYMLSGMARCGYCGAPLRIVLGRKRKDGSRTMKYHCANRFPRKTKGVTVYNDNKKCDSGTYDLSNLENTVIDNLIGFQENSDSLLKIINGNNQPALDTSSFEKQISQIDKKIQKISDLYLNDFITMDELKGRTDSLQAEKRLLKAKISENKFNDSTDVFEQVKTQLGSIPINELSYDNKKKIVNNLVSKVDVTADNVDIIFKFQLA

SEQ ID NO: 4432 - protein, 484 aa, synthetic construct
MTKKVAIYTRVSTTNQADEGFSIDEQIDRLTKYAEAMGWQVSDTYTDAGFSGAKLERPAMQRLINDIENKAFDTVLVYKLDRLSRSVRDTLYLVKEVFTRNKIDFISLNESIDTSSAMGSLFLTILSAINEFERENIKERMTMGKLGRAKSGKSMMWTKTAFGYYHNRKTGILEIVPLQATIVEQIFTDYLSGISLTKLRDKLNKSGHIGKDIPWSYRTLRQTLDNPVYCGYIKFKGSLFEGMHKPIISYETYLKVQKELEERQQQTYERNNNPRPFQAKYMLSGMARCGYCGAPLIVVLGHKRKDGSRTMKYHCANRFPRKAKGVTVYNDNKKCDSGTYDLSNLENTVIDNLIGFQEDNDSLLKIINGNNQPILDTSSFREQISQIDKKIQKNGELYLNDFITMDELKDRTNSLAEKKLLKAKISENKLNDSTGVFELVKTQLGSVPINELSYDNKKKIVNNLVSKVDVTADNVDIIFKFQLA

SEQ ID NO: 4433 - protein, 452 aa, synthetic construct
MKAAIYIRVSTQEQVGNYSIQAQTEKLTALCRSKGWDVYDIFIDGGYSGSNMNRPALNEMLSKLHEIDAVVVYRLDRLSRSQRDTTTLIEEYFLKNNVEFVSLSETLDTSSPFGRAMIGILSVFAQLERETIRDRMVMGKIKRIESGLPLTTAKGRTFGYNVIDTKLYVNEEEAKQLQLIYDIFEEEQSITFLQKRLKKLGFKVRTYNRYNNWLTNDLYCGYVSYKDKVHVKGIHEPIISEEQFYRVQEIFTRMGKNPNMNRDSASLLNNLVVCGKCGLGFVHRRKDTMSGGKKYRYRYYSCKTYKHTHELEKCGNKTWRADKLEELIINRVNNYSFAGRNVDKEDELDSLNEKLKIEHAKKKRLFDLYINGSYEVSELDSMMNDIDAQINHYESQIEANEKLKRNKKIQDNLADLATVDFDSLEFREKQLYLKSLINKIYIDGEQVTIEWL

SEQ ID NO: 4434 - protein, 452 aa, synthetic construct
MKAAIYIRVSTREQVENYSIQAQTEKLTALCRSKDWDVYDIFIDGGYSGSNMNRPALNEMLSKLHEIDAVVVYRLDRLSRSQRDTITLIEEYFLKNNVEFVSLSETLDTSSPFGRAMIGILSVFAQLERETIRDRMVMGKIKRVEAGLPLTTAKGRTFGYDVIDAKLYINEEEAKQLQLIYDIFEEGQSITFLQKRLKKLGFKVRTYNRYNNWLTNDLYCGYVSYKDKVHVKGIHEPIISEEQFYRVQEIFTRMGKNPNMNRDSASLLNSLVVCSKCGLGFVHRRKDTVSRGKKYHYRYYSCKTYKHIHELEKCGNKIWRADRLEELIINRVNNYSLASHSVDEEDELDSLNEKLKIEHAKKKRLFDLYISGSYEVSELDSMMNDIDAQINYYESQIEANEELRKNKKIQENLADLATVDYDSLEFREKQLYLKSLISKIYIDGEQVTIEWL

SEQ ID NO: 4435 - protein, 452 aa, synthetic construct
MKAAIYIRVSTQEQVGNYSIQAQTEKLTALCRSKDWDVYDIFIDGGYSGSNMNRPALNEMLSKLHEIDAVVVYRLDRLSRSQRDTTTLIEEYFLKNNVEFVSLSETLDTSSPFGRAMIGILSVFAQLERETIRDRMVMGKIKRIEAGLPLTTAKGRTFGYDVIDTKLYINEEEAKQLRLIYDIFEEEQSITSLQKRLKKLGFRVHAYNRYNNWLTNDLYCGYVSYKDKVHVKGIHEPIISEEQFYRVQEIFTRTGKNPNMNRDSASLLNNLVVCSKCGLGFVHRSKDTMSRGKKYHYRYYSCKTYKHTHELEKCGNKIWRADKLEELIINRVNNYSFASRNVDKEDELDSLNEKLKIEHAKKKRLFDLYINGSYEVSELDSMMNDIDAQINYYESQIEANKELKKNKKIQENLADLATVDFDSLEFREKQLYLKSLINKIYIDGEQVTIEWL

SEQ ID NO: 4436 - protein, 485 aa, synthetic construct
MTKKVAIYTRVSTTNQAEEGFSIDEQIDRLTKYAEAMGWQVSDTYTDAGFSGAKLERPAMQRLINDIENKAFDTVLVYKLDRLSRSVRDTLYLVKEVFTKNKIDFISLNESINTSSAMGSLFLTILSAINEFERENIKERMTMGKLGRAKSGKSMMWTKTAFGYYHNRKTGILEIVPLQATIVEQIFTDYLSGISLTKLRDKLNDSGHIGKDIPWSYRTLRQTLDNPVYCGYIKFKDSLFEGMHKPIIPYETYLKAQKELEERQQQTYERNNNPRPFQAKYMLSGMARCGYCGAPLRIVLGHKRKDGSRTMKYHCTNRFPRKTKGVTVYNDNKKCDSGTYDLSNLENTVIDNLIGFQENNDSLLKIINGNNQPILDTSSFKKQISQIDKKIQKNSDLYLNDFITMDELKDRTDSLQAEKKLLKAKFSENKFNDSTDVFELVKTQLGSIPINELSYENKKKIVNNLVSRVDVTADNVDIIFKFQLA

SEQ ID NO: 4437 - protein, 452 aa, synthetic construct
MKAAIYIRVSTREQVENYSIQAQTEKLTALCRSKDWDVYDIFIDGGYSGSNMNRPALNEMLSKLHEIDAVVVYRLDRLSRSQRDTITLIEEYFLKNNVEFVSLSETLDTSSPFGRAMIGILSVFAQLERETIRDRMVMGKIKRIEAGLPLTTAKGRTFGYDVIDTKLYINEEEAKQLRLIYDIFEEEQSITSLQKRLKKLGFKVHTYNRYNNWLTNDLYCGYVSYKDKVHVKGIHEPIISEEQFYRVQEIFTRMGKSPNMNRDSASLLSSLVVCSKCGLGFVHRRKDATSRDKKYHYRYYSCKTYKHIHELEKCGNKIWRADKLEELIINRVNNYSFASRNAGKEDELDSLNERLKIEHAKKRRLFELYINGRYEVSELDSMMNDIDAQINYYESQIEANEELKENKKIQENLANLATVDFDSLEFREKQLYLKSLINKIYIDGEQVTIEWL

SEQ ID NO: 4438 - protein, 469 aa, synthetic construct
MSYTTPVRAAVYLRISEDRSGEQLGVARQREDCLKLCGQRKWVPVEYLDNDVSASTGKRRPAYEQMLADITAGKIAAVVAWDLDRLHRRPIELEAFMSLADEKRLALATVAGDVDLATPQGRLVARLKGCVAVHETEHKKARQRRAARQKAERGLPNWSKAFGYLPGPNGPEPDPRTAPLVKQAYADILAGASLGDVCRQWSDAGAFTVTGRPWTTTALSKFLRKPRNAGLRAYKGARYGPVDRDAIVGKAQWSPLVDEATFWAAQAVLDAPSRAPGRKSVRRHLLTGLAGCGKCGNHLAGSYRTDGRVVYVCKACHGVAILADNIEPILYRIVAERLAMLDAVDLLRREVHDTAEAETIRLELETLYGELDRLAVERAEGLLTARQVKISTDIVNAKITKLQARQLDQDRLRVFDGIPLGTPQVAGTIAELSPDRFRAVLDVLAEVVVQPVGKGGRIFNPERVQVNWR

SEQ ID NO: 4439 - protein, 485 aa, synthetic construct
MTKKVAIYTRVSTNNQAEEGFSIDEQIDRLTKYAEAMGWQVSDTYTDAGFSGAKLERPAMQRLINDIENRAFDTVLVYKLDRLSRSVRDTLYLVKDVFTKNKIDFISLNESINTSSAMGSLFLTILSAINEFERENIKERMTMGKLGRAKSGKSMMWAKTAFGYYHNRKTGVLEIVPLQATIVEQIFTDYLSGVSLTKLRDKLNESGHVGKDIPWSYRTLRQTLDNPVYCGYIKFKDSLFEGMHKPIIPYETYLKVQKELEERQQQAYERNNNPRPFQAKYMLSGMARCGYCGAPLRIVLGHKRKDGSRTMKYHCANRFPRKTEGVTVYNDNKKCDSGTYDLSNLENTVIDNLIGLQENNDSLLKIINGNNQPILDTSSFKKQISQIDKKIQKNSDLYLNDFITMDELKERTNSLQAEKKLLKAKISENKFNDSTDVFELVKTQLGSIPINELSYDNKKKIVNNLVSKVDVTADNVDIIFKFQLA

SEQ ID NO: 4440 - protein, 452 aa, synthetic construct
MKAAIYIRVSTREQVENYSIQAQTEKLTALCRSKGWDVYDIFIDGGYSGSNMNRPALNEMLSKLHEIDAVVVYRLDRLSRSQRDTITLIEEYFLKNNVEFVSLSETLDTSSPFGRAMIGILSVFAQLERETIRDRMVMGKIKRIEAGLPLTTAKGRTFGYDVIDTKLYINEEEAKQLQLIYDIFEEERSITFLQKRLKKLGFKVRTYNRYSNWLTNDLYCGYVSYKDKVHVKGIHEPIISEEQFYRVQEIFTRMGKNPNMNRDSASLLNNLVVCSKCGLGFVHRRKDAMSRDKKYHYRYYSCKTYKHIHELEKCGNKIWRADKLEELIISRVNNYSLASRNVDKEDELDSLNEKLKIEHAKKRRLFDLYINGRYEVSELDSMMNDIDAQISYYESQIEANEELKKNKKVQKNLANLATVDFDSLEFREKQLYLKSLINKIYIDGEQVTIEWL

SEQ ID NO: 4441 - protein, 452 aa, synthetic construct
MKAAIYIRVSTREQVENYSIQAQTEKLTALCRSKDWDVYDIFIDGGYSGSNMNRPALNEMLSKLHEIDAVVVYRLDRLSRSQRDTITLIEEYFLKNNVEFVSLSETLDTSSPFGRAMIGILSVFAQLERETIRDRMVMGKIKRIEAGLPLTTAKGRTFGYDVIDTRLYINEEEAKQLQLIYDIFEEEQSITFLQKRLKKLGFKVRTYSRYNNWLTNNLYCGYVSYKGKVHVKGIHEPIISEEQFYRVQEIFARMGKNPNMNRDSASLLNNLVVCSKCGLGFVHRRKDTTSRGKKYHYRYYSCKTYKHTHELEKCGNKIWRADKLEELIINRVNNYSFASRNVDKEDELDSLNEKLKIEHAKKRRLFDLYINGSYEVSELDSMMSDIDAQINYYESQIEANEELKKNKKIQENLANLASVDYDSLEFREKQLYLKSLINKIYIDGEQVTIEWL

SEQ ID NO: 4442 - protein, 452 aa, synthetic construct
MKAAIYIRVSTREQVENYSIQAQTEKLTALCRSKDWDVYDIFIDGGYSGSNMNRPALNEMLSKLREIDAVVVYRLDRLSRSQRDTITLIEEHFLKNNVEFVSLSETLDTSSPFGRAMIGILSVFAQLERETIRDRMVMGKIKRIEAGLPLTTAKGRTFGYDVIDTKLYINEEEAKQLQLIYDIFEEEQSITFLQKRLKELGFKVRTYNRYNNWLTNDLYCGYVSYKDKVHVKGIHEPIISEEQFNRVQEIFARMGKNPNMNRDSASLLNNLVVCGKCGLGFVHRRKDAMSRDKKYHYRYYSCKTYKHIHELEKCGNKIWRADKLEELIINRVNNYSLASRNVDKEDELDSLNEKLKIEHAKKKRLFDLYINGRYEVSELDSMMNDIDAQINYYESQIEANEELKRNKKIQENLANLATVDFDGLEFREKQLYLKSLINKIYIDGEQVTIEWL

SEQ ID NO: 4443 - protein, 452 aa, synthetic construct
MKAAIYIRVSTREQVENYSIQAQTEKLTALCRSKDWDVYDIFVDGGYSGSNMNRPALNEMLSKLHEIDAVVVYRLDRLSRSQRDTITLIEEYFLKNNVEFVSLSETLDTSSPFGRAMIGILSVFAQLERETIRDRMVMGKIKRIEAGLPLTTAKGRTFGYDVIDTKLYINEEEAKQLRLIYDIFEEEQSITFLQKRLKKLGFKVRTYNRYNNWLTNDLYCGYVSYKDKVHVKGIHEPIISEEQFYRVQEIFTRMGKNPNMNRDSASLLNNLVVCSKCGLGFVHRRKDAMSRDKKYHYRYYSCKTYKHIHELEKCGNKIWRADELEELIINRVNNYSLASRNMDKEDGLDSLNEKLKIEHAKKKRLFDLYLNGSYEVSELDSMMNDIDAQISYYESQIEANEALIKNKKIQENLANLATVDFDSLEFREKQLYLKSLINKIYIDGEQVTIEWL

SEQ ID NO: 4444 - protein, 469 aa, synthetic construct
MSYTTPVRAAVYLRISEDRSGEQLGVARQREDCLKLCGQRKWVPVEYLDNDVSASTGKRRPAYEQMLADITAGKIAAVVAWDLDRLHRRPIELEAFMSLADERRLALATVAGDVDLATPQGRLVARLKGSVAAHETEHKKARQRRAARQKAERGYPNWSKAFGYLPGPNGPEPDPRTAPLVKQAYADILAGASLGDVCRQWNDAGAFTITGRPWTTTTLSKFLRKPRNAGLRAYKGACYGPVDRNAIVGKAQWSPLVDEATFWAAQAVLDAPGRAPGRKSVRRHLLTGLAGCGKCGNHLAGSYRTDGQVVYVCKACHGVAILAGNIEPILYHMVAERLAMPDAVDLLRREIHDAVEAETVRLELETLYDELDRLAVERAEGLLTARQVKISTDIVNAKITKLQARQLDQERLRVFDGIPLGTPQVADTIAELSPDRFRAVLDVLAEVVVQPVGKSGRISNPERVQVNWR

SEQ ID NO: 4445 - protein, 452 aa, synthetic construct
MKAAIYIRVSTQEQVGNYSIQAQTEKLTALCRSKDWDVYDIFVDGGYSGSNMNRPALNEMLSKLHEIDAVVVYRLDRLSRSQRDTTTLIEEYFLKNNVEFVSLSETLDTSSPFGRAMIGILSVFAQLERETIRDRMVMGKIKRIEAGLPLTTAKGRTFGYDVIDTKLYINEEEAKQLQLIYDIFEEEQSITSLQKRLKKLGFKVRTYNRYNSWLTNDLYCGYVSYKDKVHVKGIHEPIISEEQFYRVQEIFTRMGKNPNMNRDSASLLSNLVVCSKCGLGFVHRSKDTMSRGKKYHYRYYSCKTYKHTHELEKCGNKTWRADKLEELIINRVNNYSFASRNVDKEDELDSLNEKLKIEHAKKKRLFDLYINGSYEVSELDSMMNDIDAQINYYESQIEACEELKKNKKIQENLADLATVDFDSLEFREKQLYLKSLINKIYIDGEQVTIEWL

SEQ ID NO: 4446 - protein, 452 aa, synthetic construct
MKAAIYIRVSTREQVENYSIQAQTEKLTALCRSKDWDVYDIFVDGGYSGSNMNRPALNEMLSKLHEIDAVVVYRLDRLSRSQRDTITLIEEYFLKNNVEFVSLSETLDTSSPFGRAMIGILSVFAQLERETIRDRMVMGKIKRVEAGLPLTTAKGRTFGYDVIDTKLYINEEEAKQLQLIYDIFEEEQSITFLQKRLKKLGFKVRTYNRYNSWLTNDLYCGYVSYKDKVHVKGIHEPIISEEQFYRVQEIFTRMGKNPNMNRGSASLLNNLVVCSKCGLGFVHRRKDTMSRGKKYHYRYYSCKTYKHIRELEKCGNKIWRADKLEELIINRVNNYGFASRNVDKEDELDSLNEKLEIERAKKKRLFDLYINGSYEASELDSMMNDIDAQINYYESQIEANEELKKNKKIQENLADLATVDYDSLEFREKQLYLKSLINKIYIDGEQVTIEWL

SEQ ID NO: 4447 - protein, 452 aa, synthetic construct
MKAAIYIRVSTQEQVGNYSIQAQTEKLTALCRSKDWDVYDIFIDGGYSGSNMNRPALNEMLSKLHEIDAVVVYRLDRLSRSQRDTTTLIEEYFLKNNVEFVSLSETLDTSSPFGRAMIGILSVFAQLERETIRDRMVMGKIKRIEAGLPLTTAKGRTFGYDVIDTKLYINEEEAKQLQLIYDIFEEEQSITFLQKRLKKLGFKVHTYNRYNNWLTNDLYCGYVSYKDKVHVKGIHEPIISEEQFYRVQEIFTRMGKNPNMNRDSASLLSNLVVCSKCGLGFVHRSKDTMCRGKKYHYRYYSCKTYKHTHELEKCGNKTWRADKLEELIINRVNDYSFASRNVDKEDELDSLNEKLKIEHAKKKRLFDLYINGSYEVSELDSMMSDVDAQINYYESQIKANGELKRNKKIQENLADQAAVDFDSLEFREKQLYLKSLISKIYIDGEQVTIEWL

SEQ ID NO: 4448 - protein, 452 aa, synthetic construct
MKAAIYIRVSTQEQVENYSIQAQTEKLTALCRSKDWDVYDIFIDGGYSGSNMNRPALNEMLSKLHEIDAVVVYRLDRLSRSQRDTITLIEEYFLKNNVEFVSLSETLDTSSPFGRAMIGILSVFAQLERETIRDRMVMGKIKRIEAGLPLTTAKGRTFGYDVIDTKLYINEEEAKQLQLIYDIFEEEQSITFLQKRLKKLGFKVCTYSRYNNWLTNDLYCGYVSYKDRVHVKGIHEPIISEEQFYRVQEIFARMGKNPNMNRDSASLLNNLVVCSKCGLGFVHRRKDTMSRGKKYHYRYYSCKTYKHIHELEKCGNKIWRADKLEELIISRVNNYSFASRNVDKEDELDSLNEKLKIEHAKRKRLFDLYINGSYNVSELDSMMNDIDAQINYYESQIEANEELKKDKKIQENLAGLATVDFDSLEFREKQLYLKSLINKIYIDGEQVTIEWL

SEQ ID NO: 4449 - protein, 469 aa, synthetic construct
MSYTTPVRAAVYLRISEDRSGEQLGVARQREDCLKLCGQRNWVPVEYLDNDVSASTGKRRPAYEQMLADITAGKIAAVVAWDLDRLHRRPIELEAFMSLADEKRLALATVAGDVDLATPQGRLVARLKGSVAAHETEHKKARQRRAARQKAERGHPNWSKAFGYLPGPNGPEPDPRTAPLVKQAYADILAGASLGDVCRQWNDAGASTITGRPWTTTTLSKFLRKPRNAGLRAYKGARYGPVDRGAIVGKAQWSPLVDEATFWAAQAVLDAPGRAPGRKSVRRHLLTGLAGCGKCGSHLAGSYRTDGRVVYVCKACHGVAILADNIVPILYHIVAERLAMPDAVDLLRREIHDAAEAETIRLELETLYGELDRLAVERAEGLLTARQVKISTDIVNAKITKLQARQLDQERLRVFDGIPLGTPQVAGMIAELSPDRFRAVLDVLAKVVVQPVGKSGRIFNPERVQVNWR

SEQ ID NO: 4450 - protein, 469 aa, synthetic construct
MSYTTPVRAAVYLRISEDRSGEQLGVARQREDCLKLCGQRKWVPVEYLDNDVSASTGKRRPAYEQMLADITAGKIAAVVAWDLDRLHRRPIELEAFMSLADEKRLALATVAGDVDLATPQGRLVARLKGCVAAHETEHKKARQRRAARQKAERGYPNWSKAFGYLPGPNGPEPDPRTAPLVKQAYADILAGASLGDVCRQWNDAGASTITGRPWTTTTLSKFLRKPRNAGLRAYKGARYGPVDRDAIVGKAQWSPLVDEATFWAAQAVLDAPGRAPGRKSVRRHLLTGLAGCGKCGNHLAGSYRTDGRIVYVCKACHGITILADNIEPILYHIVAERLAMPDAVALLRRETHDAAEAETIRLELETLYGELDRLAVERAEGLLTARQVKISTDIVNAKITKLQARQLDQERLRVFHGIPLGTPQVAGMIAELSPNRFRAVLDVLAEVVVQPVGKSGRIFNPERVQVNWR

SEQ ID NO: 4451 - protein, 452 aa, synthetic construct
MKAAIYIRVSTREQVENYSIQAQTEKLTALCRSKDWDVYDIFIDGGYSGSNMNRPALSEMLSKLREIDAVVVYRLDRLSRSQRDTITLIEEYFLKNNVEFVSLSETLDTSSPFGRAMIGILSVFAQLERETIRDRMVMGKIKRVEAGLPLTTAKGRTFGYDVIDTKLHINEEEAKQLQLIYDIFEEEQSITFLQKRLKKLGFKVHPYNRYNNWLTNDLYCGYVSYKDKVHVKGIHEPIISEEQFYRVQEIFTRMGKNPNMNRDSASLLNNLVVCSRCGLGFVHRRKDTMSRGKKYHYRYYSCKTYKHTHELEKCGNKIWRADKLEELIINRVNNYSLASRNVDKKDELDSLNEKLKIEHAKKRRLFDLYINGSYEVSELDSMMDDIDAQINYYESQIEANEELKKNKKIQENLADLATVDFDSLEFREKQLYLKSLINKIYIDGEQVTIEWL

SEQ ID NO: 4452 - protein, 485 aa, synthetic construct
MTKKAAIYTRVSTTNQAEEGFSIDEQIDRLTKYAEAMGWQVSDTYTDAGFSGAKLERPAMQRLINDIENKAFDTVLVHKLDRLSRSVRDTLYLVKDVFTKNKIDFISLNESINTSSAMGSLFLTILSAINEFERENIKERMTMGKLGRAKSGKSMMWTKTAFGYYHNRKTGILEIVPLQATIVEQIFTDYLSGISLTKLRDKLNESGHIGKDIPWSYRTLRQTLDNPVYCGYIKFKGSLFEGMHKPIIPYETYLKVQKELEERQQQTYERNNNPRPFQAKYMLSGMARCGYCGAPLRVVLGHKRKDGSRSMKYHCANRFPRKTKGITVYNDNRKCDSGAYDLSNLENTVIESLIGFQEDDDSLLKIINGDNQPILDTSSFEKQISQIDKKIQKNSDLYLNDFITMDELKDRTDSLQAEKRLLKARISENKFNDSTDVFELVKTQLGSIPINELSYDNKKKIVNNLVSKVDVTADSVDIIFKFQLA

SEQ ID NO: 4453 - protein, 469 aa, synthetic construct
MSYTTPVRAAVYLRISEDRSGEQLGVARQREDCLKLCDQRKWMPVEYLDNDVSASTGKRRPAYEQMLADITAGKIAAVVAWDLDRLHRRPIELEAFMCLADEKRLALATVAGDVDLATPQGRLVARLKGSVAAHETEHKRARQRRAARQKAERGHPNWSKAFGYLPGPNGPEPDPRTAPLVKQAYADILAGASLGDVCRQWNAAGAFTITGRPWTTTTLSKFLRRPRNAGLRAYKGARYGPVDRDAIVGKAQWRPLVNEATFWAAQAVLDAPGRAPGRKSVRRHLLTGLAGCGKCGNHLAGSYRTDGRVVYVCKACHGVAILADNIEPILYHIVAERLAMPDAVDLLRREIHDAAEAETIHLELETLHGELDRLAVERAEGLLTARQVKISTGIVNAKITKLQARQLDQERLRVFDGIPLGTPQVAGMIAELSPDRFRAVLNVLAEVVVQPVGKSGRIFNPERVQVNWR

SEQ ID NO: 4454 - protein, 485 aa, synthetic construct
MTKKVAIYTRVSTTNQAEEGFSIDEQTDRLTKYAEAMGWQVSDTYTDAGLSGAKLERPAMQRLINDIENKAFDAVLVYKLDRLSRSVRDTLYLVKDVFTKNKIDFISLNESIDTSSAMGSLFLTILSAINEFERENIKERMTMGKLGRAKSGKSMMWTKTAFGYYHNRKTGILEIVPLQATIVEQIFTDYLSGISLTKLRDKLNESGHIGKDIPWSYRTLRQTLDNPVYCGYIKFKDGLFEGMHKPIIPYETYLKVQKELEERQQQTYERNNNPRPFQAKYMLSGMARCGYCGAPLRIVLGHKRKDGSRSMKYHCANRFPRKTKGITVYNDNKKCDSGTYDLSDLENTVIGNLIGFQEDNDSLLKIINGNNQPILDTSSFERQISQIDKKIQKNSELYLNDFITMDELKDRTDSLQAEKRLLKVKISENKFSDSTDVFELVKTQLGSIPINELSYDNKKKIVNNLVSKVDVTADNVDIIFKFQLA

SEQ ID NO: 4455 - protein, 485 aa, synthetic construct
MTKKVAIYTRVSTTNQAEEGFSIDEQIDRLTKYAEAMGWQVSDTYTDAGFSGAKLERPAMQRLINDIENKAFDTVLVYKLDRLSRSVRDTLYLVKDVFTKNKIDFISLNECIDTSNAMGSLFLTILSAINEFERENIKERMTMGKLGRAKSGKSMMWTKTAFGYYHNRKTGILEIVPLQATIVEQIFTDYLSGISLTKLRDKLNESGHIGKDIPWSYRTLRQTLDNPVYCGYIKFKDSLFEGMHKPIIPYETYLKVQRELEERQRQTYERNNNPRPFQAKYMLSGMARCGYCGAPLRIVLGHKRKDGSRTMKYHCANRFPRKTKGVTVYNDNEKCDSGTYDLSNLENTVIDSLIGFQENDDSLLKIINGNNQPTLDTSSLKKQISQIDKKIQKNSDLYLNDFITMDELKDRTDSLQAEKKLLKAKISENKFNDSPDVFELVKTQLGSTPINELSYDNKKKIVNSLVSKVDVTADNVDIIFKFQLA

SEQ ID NO: 4456 - protein, 452 aa, synthetic construct
MKAAIYIRVSTREQVENYSIQAQTEKLTALCRSKDWDVYDIFIDGGYSGSNMNRPALNEMLSKLHEIDAVVVYRLDRLSRSQRDTITLIEEYFLKNNVEFVSLSETLDTSSPFGRAMIGILSVFAQLERETIRDRMVMGKIKRIEAGLPLTTAKGRTFGYDVIDTKLHINEEEAKQLQLIYDIFEEEQSITFLQKRLKKLGFKVRSYNRYNNWLTNDLYCGYVSYKDKVQVKGIHEPIISEEQFYRVQEIFTRMGKNPNMNRDSASLLNSLVVCSKCGLGFVHRRKDTMSRDKKYHYRYYSCKTYKHIHELEKCGNKIWRADKLEELVINRVNNYSLASRNVDKEDELDSLNEKLKIEHAKKKRLFDLYVNGSYEVSELGSMMNDIDAQINYYESQIEANEELKKNKKIQENLAYLATVDFDSLEFREKQRYLKSLINKIYIDGEQVTIEWL

SEQ ID NO: 4457 - protein, 452 aa, synthetic construct
MKAAIYIRVSTREQVENYSIQAQTEKLTALCRSKDWDVYDIFIDGGYSGGNMNRPALNEMLSKLHEIDAVVVYRLDRLSRSPRDTITLIEEYFLKNNVEFVSLSETLDTSSPFGRAMIGILSVFAQLERETIRDRMVMGKIKRIEAGLPLTTAKGRTFGYDVIDTKLYINEEEARQLQLIYDIFEEEQSITFLQKRLKELGFKVRTYNRYISWLTNDLYCGYVSYKDKVHVKGIHEPIISEEQFYRVQEIFTRMGKNPNMNRDSASLLNNLVVCSKCGLGFVHRRKDTKSRGKKYHYRYYSCKTYKHIHELEKCGNKIWRADKLEELIINRVNDYSLASRNVDKEDELDSLNEKLKVEHAKRKRLFDLYINGSYNVSELDSIMNDIDAQINYYESQIETNEELKKNKKIQENLADLATVDFDSLEFREKQLYLKSLINKIYIDGEQVTVEWL

SEQ ID NO: 4458 - protein, 485 aa, synthetic construct
MTKKVAIYTRVSTTNQAEEGFSIDEQIDRLTKYAEAMGWQVSDTYTDAGFSGAKLERPAMQRLINDIENKAFDTVLVYKLDRLSRSVRDTLYLVKDVFTKNKIDFISLNESIDTSSAMGSLFLTILSAINEFERENIKERMTMGKLGRAKSGKSMMWTKTAFGYYHNRKTGILEIVPLQATIVEQIFTDYLSGISLTKLRDKLNESGHIGKDIPWSYRTLRQTLDNPVYCGYIKFKDSLFEGMHKPIIPYETYLKVQKELEERQQQTYERNNNPRPFQAKYMLSGMARCGYCGAPLRIVLGHKRKDGSRTMKYHCANRFPRKTKGVTVYNDNKKCDSGTYDLSNLENTVIDNLIGFQENNDSLLKIINGNNQPILDTSSFKKQISQIDKKIQKNSDLYLNDFITMDELKARTDSLQAEKKLLKAKISENKFNDSTDVFELVKTQLGSIPINELSYDNKKKIVNNLVSKVDVTADNVDIIFKFQLA

SEQ ID NO: 4459 - protein, 469 aa, synthetic construct
MSYTTPVRAAVYLRISEDRSGEQLGVARQREDCLKLCGQRKWEPVEYLDNDVSASTGKRRPAYEQMLADIAAGKIAAVVAWDLDRLHRRPMELEAFMSLADEKRLALATVAGDVDLATPQGRLVARLKGSVAAHETEHKKARQRRAARQKAERGYPNWSRAFGYLPGPNGPEPDPRTAPLVKQAYADILAGASLGDVCRQWNDAGALTITGRPWTTTTLSKFLRKPRNAGLRAYKGACYGPVDRDAIVGKARWSPLVDEATFWAAQAVLDAPGRAPGRKSVRRHLLTGLAGCGKCGNHLAGSYRTDGRVVYVCKACHGVAILADNIEPILYHIVVERLAMPNAVDLLRREVHDAAEAEAIRLELETLYGVLDRLAVERAEGLLTARQVKISTDIVNAKITKLQARQLDQERLRVFEGIPLGTPRVAGMIAGLSPGRFRAVLDVLAEVVVQPVGKSGRIFNPERVQVNWR

SEQ ID NO: 4460 - protein, 452 aa, synthetic construct
MKAAIYIRVSTREQVENYSIQAQTEKLTALCRSKDWDVYDIFIDGGYSGSNTNRPALNEMLSKLHEIDAVVVYRLDRLSRSQRDTITLIEEYFLKNNVEFVSLSETLDTSSPFGRAMIGILSVFAQLERETIRDRMVMGKIKRIEAGLPLTTAKGRTFGYDVIDTKLYINEEEARQLQLIYDIFEEERSITSLQKRLKKLGFKVRTYNRYNNWLTNDLYCGYVSYKDKVHVKGIHEPIISEEQFYRVQEIFARMGKNPNMNRDSASLLNNLVVCSKCGLGFVHRRKDTMSRDKKYHYRYYSCKTYKHIHELEKCGNKIWRADKLEELIINRVNNYSLASRNVDKEDELDSLNEKLKIEHAKKKRLFDLYINGRYEVSELDSMMNDIDAQINYYESQIEANEELKKNKKIQENLAHLATVDFDSLEFREKQLYLKSLINKIYIDGEQVTIEWL

SEQ ID NO: 4461 - protein, 452 aa, synthetic construct
MKAAIYIRVSTQEQVGNYSIQAQTEKLTALCRSKGWDVYDIFIDGGYSGSNMNRPALNEMLSKLHEIDAVVVYRLDRLSRSQRDTTTLIEEYFLKNNVEFVSLSETLDTSSPFGRAMIGILSVFAQLERETIRDRMVMGKIKRIEAGLPLTTAKGRTFGYDVIDTKLYINEEEAKQLRLIYDIFEEEQSITFLQKRLKRLGFKVRTYNRYNSWLTNDLYCGYVSYKDKVHVKGVHEPIISEEQFYRVQEIFTRMGKNPNMNRDSASLLNNLVVCSKCGLGFVHRCKDTMSGGKKYHYRYYSCKTYKHTHELEKCGNKTWRADKLEELIINRVNNYSFASRNVDKEDELDSLNEKLEIEHAKKKRLFDLYINGSYEVSELDSMMNDIDAQINYYESQIEANEKLKKNKKIQENLADLATVDFDSLEFREKQLYLKSLINKIYIDGEQVTIEWL

SEQ ID NO: 4462 - protein, 452 aa, synthetic construct
MKAAIYIRVSTQEQVGNYSIQAQTEKLTALCRSKDWDVYDIFIDGGYSGSTMNRPALNEMLSKLHEIDAVVVYRLDRLSRSQRDTTTLIEEYFLKNNVEFVSLSETLDTSSPFGRAMIGILSVFAQLERETIRDRMVMGKIKRIEAGLPLTTAKGRTFGYDVIDTKLYINEEEAKQLQLIYDIFEEEQSITSLQKRLKKLGFKVRTYNRYSNWLTNDLYCGYVSYKDKVHVKGIHEPIISEEQFYRVQEIFTRMGKNPNMNRDSASLLSNLVVCSKCGLGFVHRSKDTMSRGKKYHYRYYSCKTYKHTHELEKCGNKTWRADKLEELIINRVNNYSFASRNADKGDELDSLNEKLKIEHARKKRLFDLYINGSYEVSELDSMMNDIDAQISYYESQIEASEELKRNKKIQGNLADLATVDFDSLEFREKQLYLKSLINKIYIDGEQVTIEWL

SEQ ID NO: 4463 - protein, 452 aa, synthetic construct
MKAAIYIRVSTREQVENYSIQAQTEKLTALCRSKDWDVYDIFVDGGYSGSNLNRPALNEMLSKLHEIDAVVVYRLDRLSRSQRDTITLIEEYFLKNNVEFVSLSETLDTSSPFGRAMIGILSVFAQLERETIRDRMVMGKIKRIEAGLPLTTAKGRTFGYDVIDTKLYINEEEARQLQLIYDIFEEEQSITFLQKRLKKLGLKVHTYNRYNNWLTNDLYCGYVSYKDKVHVKGIHEPIISEEQFYRVQEIFTRMGKNPNMNRDSASLLNSLVVCGRCGLGFVHRRKDTMSRGKKYHYRYYSCKTYKHTHELEKCGNKIWRADKLEELIINRVNNYSLASRNVDKEDELDSLNEKLKVEHAKKKRLFDLYINGSYEVSELGSMMNDIDAQINYYESQIEANEELKKNKKIQEDLANLATVDYDSLEFREKQLYLKSLINKIYIDGEQVTIEWL

SEQ ID NO: 4464 - protein, 452 aa, synthetic construct
MKAAIYIRVSTREQVENYSIQAQTEKLTALCRSKDWDVYDIFIDGGYSGSNMNRPALNEMLSKLHEIDAVVVYRLDRLSRSQRDTITLIEEYFLKNNVEFVSLSETLDTSSPFGRAMIGILSVFAQLERETIRDRMVMGKIKRIEAGLPLTTAKGRTFGYDVIDTRLYINEEEAKQLQLIYDIFEEEQSITFLQKRLKKLGFKVRTYSRYSNWLTNDLYCGYVSYKDKVHVKGIHEPIISEEQFYRVQEIFTRMGKNPNMNRDSASLLNNLVVCGKCGLGFVHRRKDTTSRGKRYHYRYYSCKTYKHTHELEKCGNKIWRADKLEELIINRVNNYSFASRNVDKEDELDSLSEKLKIEHAKKKRLFELYINGSYEVSELDSMMNDIDAQINYYEGQIEANEELKENKKIQENLAYLATVDFDSLEFREKQLYLKSLINKIYIDGEQVTIEWL

SEQ ID NO: 4465 - protein, 485 aa, synthetic construct
MTKKVAIYTRVSTTNQAEEGFSIDEQIDRLTKYAEAMGWQVSDTYTDAGISGAKLERPAMQRLINDIENKAFDTVLVYKLDRLSRSVRDTLYLVKDVFTKNKIDFISLNESIDTSSAMGSLFLTILSAINEFERENIKERMTMGKLGRAKSGKSMMWTKTAFGYYHNRKTGILEIVPLQATIVEQIFTDYLSGISLTKLRDKLNESGHIGKDIPWSYRTLRQTLDNPVYCGYIKFKDSLFEGMHKPIIPYETYLKVQRELEERQQQTYERNNNPRPFQAKYMLSGMARCGYCGAPLRIVLGHKRKDGSRTMKYHCANRFPRKTKGITVYNDNKKCDSGTYDLSNLENTVIDNLIGFQENNDSLLEIINGNNQPILDTSSFKKQISQIDKKIQKNSDLYLNDFITMDELKDRTDSLQAEKKLLKAKISENKFNDSTDVFELVRTQLGSIPINELSYDNKKKIVNNLVSKVDVTADNVDIIFKFQLA

SEQ ID NO: 4466 - protein, 452 aa, synthetic construct
MKAAIYIRVSTQEQVENYSIQAQTEKLTALCRSKGWDVYDIFIDGGYSGSNMNRPALNEMLSKLHEIDAVVVYRLDRLSRSQRDTITLIEEYFLKNNVEFVSLSETLDTSSPFGRAMIGILSVFAQLERETIRERMVMGKIKRIEAGLPLTTAKGRTFGYDVIDTKLYINEEEAKQLQLIYDIFEEEQSITLLQKRLKKLGFKVCTYSRYNNWLTNDLYCGYVSYKDKVHVKGIHEPIISEEQFYRVQEIFTRMGKSPNMNRDCASLLNSLVVCSKCGLGFVHRRKDTVSRGKKYHYRYYSCKTYKHTHELEKCGNKIWRADKLEELIINRVNNYSFASRSVDKGDELDSLNEKLKIERAKRKRLFDLYINGSYEVSELDSMMSDIDAQINYYESQIEANEELRNNKKIQEILANLATVDFDSLEFREKQLYLKSLINKIYIDGEQVTIEWL

SEQ ID NO: 4467 - protein, 485 aa, synthetic construct
MTKKVAIYTRVSTTNQAEEGFSIDEQIDRLTKYAEAMGWQVSDTYTDAGLSGAKLERPAMQRLINDIENKAFDTVLVYKLDRLSRSVRDTLYLVKDVFTKNKIDFISLNESIDTSSAMGSLFLTILSAINEFERENIKERMTMGKLGRAKSGKSMMWTKTAFGYHHNRKTGILEIVPLQATIVEQIFTDYLSGISLTKLRDKLNESGHIGKDIPWSYRTLRQILDNPVYCGYIKFKDGLFEGMHKPIIPHETYLKVQKELEERQQQTYERNNNPRPFQAKYMLSGMARCGYCGAPLRIVLGHKRKDGGRTMKYHCANRFPRRTKGVTVYNDNRKCDSGTYDLSNLENTVIDNLIDFQENNDSLLRIINGNNQPTLDTSSFRKQISQIDKKIQKNSDLYLNDFITMDELKDRTDSLQAEKKLLKAKISENKFNDSTDVLELVKTQLGSIPINELSYDNKKKIVNNLVSKVDVTADNVDIIFKFQLA

SEQ ID NO: 4468 - protein, 485 aa, synthetic construct
MTKKVAIYTRVSTTNQAEEGFSIDEQIDRLTKYAEAMGWQVSDTYTDAGLSGAKLERPAMQRLINDIENKAFDTVLVYKLDRLSRSVRDTLYLVKDVFTKNKIDFISLNESIDTSSAMGSLFLTILSAINEFERENIKERMTMGKLGRAKSGKSMMWTKTAFGYYHNRKTGILEIVPLQATIVEQIFTDYLSGISLTKLRDKLNESGHIGKDIPWSYRTLRQTLDNPVYCGYIKFKDSLFGGMHKPIIPYETYLKVQKELEERQQQTYERNNNPRPFQAKYMLSGMARCGYCGAPLKIVLGHKRKDGSRTMKYHCANRFPRKTKGITVYNDNKKCDSGTYDLSNLENTVIDNLIGFQENDDSLLKVINGNNHPILDTSSFKEQISQIDKKIQKNSDLYLNDFITMDELKDRTDSLQAEKKLLKAKISENKFNDSTNVFELVKTQLGSIPINELSYDDKKKIVNNLVSKVDVTADSVDIIFKFQLA

SEQ ID NO: 4469 - protein, 485 aa, synthetic construct
MTKKVAIYTRVSTTNQAEEGFSIDEQIDRLTKYAEAMGWQVSDTYTDAGLSGAKLERPAMQRLINDIENKAFDTVLVYKLDRLSRSVRDTLYLVKDVFTKNKIDFISLNESIDTSSAMGSLFLTILSAINEFERENIKERMTMGKLGRAKSGKSMMWTKTAFGYYHNRKTGILEIVPQQATIVEQIFTDYLSGISLTKLRDKLNEGGHIGKDIPWSYRTLRQTLDNPVYCGYIKFKDSLFEGMHKPIIPYEAYLKVQKELEERQQQTYERNNNPRPFQAKYMLSGMARCGYCGAPLKIVLGHKRKDGSRTMKYHCANRFPRKTKGVTVYNDSKKCDSGTYDLSNLEDTVIDNLIGFQENNDSLLSIINGNNQPILDTSSFKKQISQIDKKIQKNSDLYLNDFITLDELKDRTDSLQAEKKLLKAKISENEFNDRTDVFELVKTQLGSIPINELSYDNKKKIVNNLVSKVDVTADNVDIIFKFQLA

SEQ ID NO: 4470 - protein, 452 aa, synthetic construct
MKAAIYIRVSTREQVENYSIQAQTEKLTALCRSKDWDVYDIFIDGGYSGSNMNRPALNEMLSKLHEIDAVVVYRLDRLSRSQRDTITLIEEYFLKNNVEFVSLSETLDTSSPFGRAMIGILSVFAQLERETIRDRMVMGKIKRIEAGLPLTTAKGRTFGYDVIDTKLYINEEEAKQLQLIYDIFEEERSITFLQKRLKKLGFKVHSYNRYNNWLTNDLYCGYVSYKDKVHVKGIHEPIISEEQFYRVQEIFTRMGKNPNMNRDSASLLNNLVVCSKCGLGFVHRRKDAMSRDKRYHYRYYSCKTYKHIHELEKCGNKIWRADKLEELIINRVNNYSLASRNVDREDELDSLNEKLKIEHAKKKRLFDLYINGSYEVSELDSMMNEIDAQINYYESQIEANGELKKSKRIQENLANLATVDFDSLEFREKQLYLKSLINKIYIDGEQVTIEWL

SEQ ID NO: 4471 - protein, 484 aa, synthetic construct
MTKKVAIYTRVSTTNQAEEGFSIDEQIDRLTKYAEAMGWQVSDTYTDAGFSGAKLERPAMQRLINDIENKAFDTVLVYKLDRLSRSVRDTLHLVKDVFTKSKIDFISLNESIDTSSAMGSLFLTILSAINEFERENIKERMTMGKLGRAKSGKSMMWTKTAFGYYHNRKTGILEIVPLQATIVEIFTDYLSGISLTKLRDKLNESGHIGKDIPWSYRTLRQTLDNPVYCGYIKFKGSLFEGMHKPIIPYGTYLKVQKELEERQQQTYERNNNPRPFQARYMLSGMARCGYCGAPLRIVLGHKRKDGSRTMKYHCANRFPRKTKGVTVYNDNKKCDSGTYDLSKLENTVIDTLIGFQENNDRLLKIINGNNQPILDTSSFKKQISQIDKKIQKNSDLYLNDFITMDELKDRTDSLQAEKKLLEAKISENKFDDSTDVFEQVKTQLGSIPINELSYDNKKKIVNNLVSKVDVTADNVDIIFRFQLA

SEQ ID NO: 4472 - protein, 469 aa, synthetic construct
MSYTTPVRAAVYLRISEDRSGEQLGVARQREDCLKLCGQRKWEPVEYLDNDVSASTGKRRPAYEQMLADITAGKIAAVVAWDLDRLHRRPIELEAFMSLADEKRLALATVAGDVDLATPQGRLVARLKGSVAAHETEHKKARQRRAARQKAERGHPNWSKAFGYLPGPDGPEPDPRTAPLVKQAYADILAGASLGDVCRRWNDAGAFTITGRPWTTTALSKFLRKPRNAGLRAYKGARYGPVDRDAIVGKAQWSPLVDEATFWAAQAVLDAPGRAPGRKSVRRHLLTGLAGCGKCGNHLAGSYRTDGRVVYVCKACHGVAILADNIEPILYHIMAERLAMPDAVDLLRRETHDAAEAETIRLELETLYGELDRLAVERAEGLLTARQVKISTDIVNAKITKLQACQLDQERLRVFGGIPLGTPQVAGMIAELSPDRFRAVLDVLVEVVVQPVGKGGRIFNPERVQVNWR

SEQ ID NO: 4473 - protein, 485 aa, synthetic construct
MTKKVAIYTRVSTTNQAEEGFSIDEQIDRLTKYAEAMGWQVSGTYTDAGFSGAKLERPAMRRLVNDIENEAFDTVLVYKLDRLSRSVRDTLYLVKDVFTKNKIDFISLNESIDTSSAMGSLFLTILSAINEFERENIKERMTMGKLGRAKSGKSMMWTKTAFGYYHNRKTGILEIVPLQATIVEQIFTDYLSGISLTKLRDKLNESGHIGKDIPWSYRTLRQTLDNPVYCGYIKFKGSLFEGMHKPIIPYETYLKVQKELEERQQQTYERNNNPRPFQAKYMLSGMARCGYCGAPLKIVLSRKRKDGSRTMKYHCANRFPRKTKGVTVYNDNKKCDSGTYDLSSLENTVIDSLIGFQENNDSLLKIINGNNQPILDTNSFKKQISQIDKKIQKNSDLYLNDFITMDELKDRTDSLQAEKKLLKAKIGENKFNDSTDVFELVRTQLGSIPINELSYDNKKKIVNNLVSKVDVTADNVDIIFKFQLA

SEQ ID NO: 4474 - protein, 452 aa, synthetic construct
MKAAIYIRVSTREQVENYSIQAQTEKLTALCRSKDWDVYDIFIDGGYSGGNMNRPALNEMLSKLHEIDAVVVYRLDRLSRSQRDTITLIEEYFLKNNVEFVSLSETLDTSSPFGRAMIGILSVFAQLERETIRDRMVMGKIKRVEAGLPLTTAKGRTFGYDVIDTKLYINEEEARQLQLIYDIFEEEQSITFLQKRLKKLGFKVRTYSRYNNWLTNDLYCGYVSYKDKVHVKGIHEPIISEEQFYRVQEIFTRMGKNPNMNRDSASLLNNLVVCSKCGLGFVHRRKDTTSRGKKYHYRYYSCKTYKHTHELEKCGNKIWRADKLEELIIDRVNNYSFASRNVDKEDELDSLNEKLKIEHAKRKRLFDLYINGSCEVGELDSMMNDIDAQINYYESQIEANEELKKNKKIQENLANLATVDYDSLEFREKQLYLKSLINKIYIDGEQVTIEWL

SEQ ID NO: 4475 - protein, 452 aa, synthetic construct
MKAAIYIRVSTREQVENYSIQAQTEKLTALCRSKDWDVYDIFIDGGYSGSNMNRPALNEMLSRLHEIDAVVVYRLDRLSRSQRDTITLIEEYFLKNNVEFVSLSETLDTSSPFGRAMIGILSVFAQLERETIRDRMVMGKIKRIEAGLPLTTAKGRTFGYDVVDTKLYINEEEAKQLRLIYDIFEEEQSITFLQKRLKKLGLKVRTYNCYNNWLTNDLYCGYVSYKDKVRVKGIHEPIISEEQFYRVQEIFTRMGKNPNMNRDSASLLNNLVVCSKCGLGFVHRRKDTMSRGKKYHYRYYSCKTYKHTHELEKCGNKIWRADKLEELIINRVNDYSFASRNADKEDELDSLYEKLEIEHTKKKRLFDLYINGSYEVSELDSMMIDIDAQINYYEGQIEANEELRKNKKIQESLAGLATMDFDSLEFREKQLYLKSLINKIYIDGEQVTIEWL

SEQ ID NO: 4476 - protein, 485 aa, synthetic construct
MTKKVAIYTRVSTTNQAEEGFSIDEQIDRLTKFAEAMGWQVSDTYTDAGFSGAKLERPAMQRLINDIENEAFDTVLVYKLDRLSRSVRDTLHLVKDVFTKNKIDFISLNESIDTSSAMGSLFLTILSAINEFERENIKERMTMGKLGRAKSGKSMMWTKTAFGYYHNRKTGILEIMPLQATIVEQIFTDYLSGLSLTKLRDKLNECGHIGKDIPWSYRTLRQTLDNPVYCGYIKFKDSLFEGMHKPIIPYETYLKVQKELEERQQQAYERNNNPRPFQAKYMLSGMARCGYCGAPLRIVLGHKRKDGSRTMKYHCANRFPRKTKGVTVYNDNKKCDSGTYDLSNLENTVIDNLIGLQENNDSLLKIINGNNQPILDTSSFKEQISQIDKKIQKNSDLYLNDFITMDELKDRTDGLQAEKKLLEAKISENRFNDSTDVFELVKTQLGSTPLNELSYDNKKKIVNNLVSKVDVTADNVDIIFKFQLT

SEQ ID NO: 4477 - protein, 469 aa, synthetic construct
MCYTTPVRAAVYLRISEDRSGEQLGVARQREDCLKLCVQRKWVPVEYLDNDVSASTGKRRPAYEQMLADITAGKIAAVVAWDLDRLHRRPVELEAFMSLADEKRLALATVAGDVDLATPQGRLVARLKGSVAAHETEHKKARQRRAARQKAERGHPNWSKAFGYLPGPNGPEPDPRTAPLVKQAYADILAGASLGDVCRQWNDAGAFTITGRPWTTTALSKFLRKPRNAGLRAYKGACYGPVDRDAIVGKAQWSPLVDEATFWAAQAVLDAPGRAPGRKSVRRHLLTGLAGCGKCGNHLAGSYRTDGRVVYVCKACHGVAILADNIEPTLYRIVAERLAMPDAVDLLRREVHDAAEAETIRLELETLYGELDYLAVERAEGLLTARQVKISTEIVNAKITKLQARQLDQERLRVFDGIPLGTPQVAGKIADLSPDRFRAVLDVLAEVVVQPVGKSGRIFNPERVQVYWR

SEQ ID NO: 4478 - protein, 452 aa, synthetic construct
MKAAIYIRVSTQEQVGNYSIQAQTEKLTALCRSKDWDVYDIFIDGGFSGSNMNRPALNEMLSKLHEIDAVVVYRLDRLSRSQRDTIILIEEYFLKNNVEFVSLSETLDTSSPFGRAMIGILSVFAQLERETIRDRMVMGKIKRIEAGLPLTTAKGRTFGYDVIDTKLYINEEEAKQLQLIYDIFEEEQSITSLQKRLKKLGFRVHTYNRYNNWLTNDLYCGYVSYKDKVHVKGIHEPIISEEQFYRVQEVFARMGKNPNMNRDSASLLNNLVVCSKCGLGFVHRRKDTMSRGKKYHYRYYSCKTYKHIHELERCGNKIWRADKLEELIINRVSNYSLASRDVDKEDELDSLNEKLKIEHAKKRRLFDLYINGSYEVSELDSMMNDIDAQINYYESQIEANEELKKNKKIQENLADLATVDFDSLGFREKQRYLKSLINKIYIDGEQVTIEWL

SEQ ID NO: 4479 - protein, 485 aa, synthetic construct
MTKKVAIYTRVSTTNQAEEGFSIDEQVDRLTKYAEAMGWQVSGTYTDAGFSGAKLERPAMQRLINDIENKAFDTVLVYKLDRLSRSVRDTLYLVKDVFTKNKIDFISLNESIDTSSAMGSLFLTILSAINEFERENIKERMTMGKLGRAKSGKSMMWTKTAFGYYHNRKTGILEIVPLQATIVEQIFTDYLSGISLTKLRDKLNESGHIGKDIPWSYRTLRQTLDNPVYCGYIKFRGSLSEGMHKPIIPYETYLKVQKELEERQQQTYERNNNPRPFQAKYMLSGMARCGYCGAPLRIVLGRKRKDGSRTMKYHCTNRFPRKTKGITVYNDNKKCDSGTYDLSNLENTVIDSLIGFQENNDSLLKIINGNNQPILDTSSFKKQISQIDKKIQKNTDLYLNDFITMDELKDRTDSLQAEKKLLKAKISENKFSDSTDVFELVKTQLGSIPINELSYDNKKKIVNNLVSKVDVTADNVDIIFKFQLA

SEQ ID NO: 4480 - protein, 452 aa, synthetic construct
MKAAIYIRVSTREQVENYSIQAQTEKLTALCRSKDWDVYDIFIDGGYSGSNMNRPALNEMLSKLHEIDAVVVYRLDRLSRSQRDTITLIEEYFLKNNVEFVSLSETLDTSSPFGRAMIGILSVFAQLERETIRDRMVMGKIKRIEAGLPLTTAKGRTFGYDVINTKLYINEEEAKQLQLIYDIFEEEQSITFLQKRLKKLGLKVRTYNRYNNWLTNDLYCGYVSYKDKVHVKGIHEPIISEEQFYRVQEIFARMGKNPNMNRDSASLLNNLVVCSKCGLGFVHRRKDAMSRDKRYHYRYYSCKTYKHIHELEKCGNKIWRADKLEELIINRVNDYSLASRNVDREDELDSLNKRLKIEHAKKKRLFDLYINGSYEVSELDSMMNDVDAQINYYESQIEANEELKKNKKIQENLAYLATVDFDSLEFREKQLYLKSLINKIYIDGEQVTIEWL

SEQ ID NO: 4481 - protein, 452 aa, synthetic construct
MRAAIYIRVSTREQVENYSIQAQTEKLTALCRSKDWDVYDIFIDGGYSGSNMNRPALNEMLSKLHEIDAVVVYRLDRLSRSQRDTITLIEEYFLKNNVEFVSLSETLDTSSPFGRAMIGILSVFAQLERETIRDRMVMGKIKRIEAGLPLTTAKGRTFGYDVIGTKLYINEEEAKQLQLIYDIFEEEQSITFLQKRLKKLGFKVRTYSRYNNWLTNDLYCGYVSYKDKVHVKGIHEPIISEEQFYRVQEIFTRMGKNPNMNRDSASLLNNLVVCSKCGLSFVHRRKDTMSRGKKYHYRYYSCKTYKHTHELEKCGNKIWRADKLEELIINRVNNYSFASRNVDKEDELDSLNEKLKIEHAKKKRLFDLYINGSYEVSELDSMMNDIDAQISYYESQIEANEELKKDKKIQENLAYLATVDYDSLEFREKQLYLKSLINKIYIDGEQVTIEWL

SEQ ID NO: 4482 - protein, 469 aa, synthetic construct
MSYTTPVRAAVYLRISEDRSGEQLGVARQREDCLKLCGQRKWVPVEYLDNDVSASTGKRRPAYEQMLADITAGKIAAVVAWDLDRLHRRPIELEAFMSLADEKRLALATVAGDVDLATPQGRLVARLKASVAAHETEHKKARQRRAARQKAERGHPNWSKAFGYLSGPNGPEPDPRTAPLVKQAYADILAGASLGDVCRQWNDAGAFTITGRPWTTTALSKFLRKPRNAGLRAYKGARYGPVDRDAIVGKAQWSPLVDEATFWAAQAVLDAPGRAPGRKSVRRHLLTGLAGCGKCGNHLAGSYRADGRVVYVCKACHGVAILADNIEPILYHIVAERLAMPDAVDMLRREIHDAAEAETIRLELETLYGELDRLAVERAEGLLTARQVKISTDIVNAKITKLRARQLDQERLRVFGGIPLGTPQVAGVIAELSPDRFRAVLDVLAEVVVQPVGKSGRIFNPERVQVNWR

SEQ ID NO: 4483 - protein, 452 aa, synthetic construct
MKAAIYIRVSTQEQVENYSIQAQTEKLTALCRSKGWDVYDIFIDGGYSGSNMNRPALSEMLSKLHEIDAVVVYRLDRLSRSQRDTITLIEEYFLKNNVEFVSLGETLDTSSPFGRAMIGILSVFAQLERETIRDRMVMGKIKRIEAGLPLTTAKGRTFGYDVVDTKLYINEEEAKQLQLIYDIFEEERSITFLQKRLKKLGFKVRTYSRYNSWLTNDLYCGYVSYKDKVHVKGIHEPIISEEQFYRVQEIFTRMGKNPNMNRDSASLLNNLVVCSKCGLGFVHRRKDTMSRGKKYHYRYYSCKTYKHTHELEKCGNKIWRADKLEELIINRVNNYSFASRNVDIEDELDSLNEKLKIEHAKRKRLFDLYINGSYEVSELDSMMNDIDAQINYYVSQIEANVELKKNKKIQENLANLATVDYDSLEFREKQLYLKSLINKIYIDGEQVTIEWL

SEQ ID NO: 4484 - protein, 452 aa, synthetic construct
MKAAIYIRVSTREQVENYSIQAQTDKLTALCRSKDWDVYDIFIDGGYSGSNMNRPALNEMLSKLHEIDAVVVYRLDRLSRSQRDTITLIEEYFLKNNVEFVSLSETLDTSSPFGRAMIGILSVFAQLERETIRDRMVMGKIKRIEAGLPLTTAKGRTFGYDVIDTKLYINEEEAKQLRLIYDIFEEGRSITFLQRRLKELGLKVRTYNRYNNWLTNDLYCGYVSYKDKVHVKGIHEPIISEEQFYRVQEIFARMGKNPNMNRDSASLLNNLVVCSKCGLGFVHRRKDAMGRDKKYHYRYYSCKTYKHIHELEKCGNKIWRADELEELIINRVSNYSLASRNVGKEDELDSLNEKLKIEHAKKKRLFDLYINGSYEVSELDSMMKDIDAQINYYESRIEASEELKKNKKIQEKLADLATVDFDSLEFREKQLYLKSLINKIYVDGEQVTIEWL

SEQ ID NO: 4485 - protein, 452 aa, synthetic construct
MKAAIYIRVSTREQVENYSIQAQTEKLTALCRSKDWDVYDIFIDGGYSGSNMNRPALNEMLSKLHEIDAVVVYRLDRLSRSQRDTITLIEEYFLKNNVEFVSLSETLDTSSPFGRAMIGILSVFAQLERETIHDRMVMGKIKRIEAGLPLTTAKGRTFGYDVIDTKLYVNEEEAKQLQLIYDIFEEEQSITFLQKRLKKLGFKVRTYNRYNNWLTNDLYCGYVSYKDKVRVKGIHEPIISEEQFYRVQEIFTRMGKNPNMNRDSASLLNNLVVCSKCGLGFVHRRKDIVSRGKKYHYRYYSCKTYKHIHELEKCGNKIWRADKLEELVINRVNNYSLASRNVGKEDELDSLNEKLKIEHAKKKRLFDLYINGRYEVSELDSMMNDIDAQINYYEGQIEANEELKKNKKIQENLADLATADFDSLEFREKQLYLKSLINKIYIDGEQVTIEWL

SEQ ID NO: 4486 - protein, 452 aa, synthetic construct
MKAAIYIRVSTQEQVENYSIQAQTEKLTALCRSKDWDVYDIFIDGGYSGSNTNRPALNEMLSKLHEIDAVVVYRLDRLSRSQRDTITLIEEYFLKNNVEFVSLSETLDTSSPFGRAMIGILSVFAQLERETIRDRMVMGKIKRIEAGLPLTTAKGRTFGYDVIDTKLYINEEEAKQLQLIYDIFEEEQSITLLQKRLKKLGFKVRTYSRYNNWLTNDLYCGYVSYKDKVHVKGIHEPIISEEQFYRVQEIFTRMGKNPNMNRDSASLLNNLVVCSKCGLGFVHRRKDTTSRGKKYHYRYYSCKTYKHIHELEKCGNKIWRADELEKLIINRVNNYSFASRNVDKEDELDSLNEKLKVEHAKRKRLFDLYINGSYEVSELDSMMNVIDAQINYYESQIEANEELKKNKKIQESLANLATVDYDSLEFREKQLYLKSLINKIYIDGEQVTIEWL

SEQ ID NO: 4487 - protein, 452 aa, synthetic construct
MKAAIYIRVSTREQVENYSIQAQTEKLTALCRSKDWDVYDIFIDGGYSGSNMNRPALNEMLSKLHEIDAVVVYRLDRLSRSQRDTITLIEEHFLRNNVEFVSLSETLDTSSPFGRAMIGILSVFAQLERETIRDRMVMGKIKRIEAGLPLTTAKGRTFGYDVIDTRLYVNEEEARQLQLIYDIFEEEQSITFLQKRLKELGFKVRTYNRYNNWLTNDLYCGYVSYKDKVHVKGIHEPIISEEQFYRVQEIFARMGKNPNMNRDSASLLNNLVVCSKCGLGFVHRRKDAMSRDKKYHYRYYSCKTYKHIHELEKCGNKIWRADKLEELIINRVNNYSLASRNVDKEGVLDSLNEKLKIEHAKKKRLFDLYVNGSYEVSELDRMMSDIDAQINYYESQIEANEELKKNKKIQENLAHLATVDFDSLEFREKQLYLKSLINKIYIDGEQVTIEWL

SEQ ID NO: 4488 - protein, 469 aa, synthetic construct
MSYTTPVRAAVYLRISEDRSGEQLGVARQREDCLKLCGQRKWVPVEYLDNDVSASTGKRRPAYEQMLADITAGKIGAVVAWDLDRLHRRPIELEAFMSLADEKRLALATVAGDVDLATPQGRLVARLKGCVAAHETEHKKARQRRAARQKAERGHPNWSKAFGYLPGPSGPEPDPRTAPLVKQAYADILAGASLGDVCRQWNDAGAFTITGRPWTTTTLSKFLRKPRNAGLRAYKGARYGPVDRDAIVGKARWSPLVDEATFWAAQAVLDAPGRAPGRKSVRRHLLTGLAGCGKCGNHLAGSYRTDGRVVYVCKACHGVSILADNIVPILYHIVAERLAMPDAADLLRREIHDVAEAETIRLELETLCGELDRLAVERAEGLLTARQVKISTDIVNAKITRLRARQLDQERLRVLDGIPLGTPQVAGMIAELSPDRFRAVLDVLAEVVVQPVGKRGGISDPERVQVNWR

SEQ ID NO: 4489 - protein, 469 aa, synthetic construct
MSYTTPVRAAVYLRISEDRSGEQLGVARQREDCLKLCDQRKWVPVEYLDNDVSASTGKRRPAYEQMLADITAGKVAAVVAWDLDRLHRRPIELEAFMSLADEKRLALATVAGDVDLATPQGRLVARLKGSVAAHETEHKKARQRRAARQKAERGHPNWSKAFGYLPGPNGPEPDPQTAPLVKQAYADILAGASLGDVCRRWNDAGAFTITGRPWTTTALSKFLRKPRNAGLRAYKGARYGPVDREAIVGKAQWGPLVDEATFWAAQAVLDEPGRAPGRKSVRRHLLTGLAGCGKCGNHLAGSYRTDGRVVYVCKACHGVAILADNIEPILYHIVAERLAMPNAVDLLRREIHDAAEAEAIRLELETLYGELDRLAVERAEGLLTARQVKISTDIVNAKITKLQARQLDQERLRVLDGVPLGTPQVAGMIAELSPDRFRAVLDVLAEVIVRPVGKSGRIFNPERVQVNWR

SEQ ID NO: 4490 - protein, 485 aa, synthetic construct
MTKKVAIYTRVSTTNQAEEGFSIDEQIDRLTKYAEAMGWQVSSTYTDAGFSGAKLERPAMQRLINDIENKAFDTVLVYKLDRLSRSVRDTLYLVKDVFTKNKIDFISLSESIDTSSAMGSLFLTILSAINEFERENIKERMTMGKLGRARSGKSMMWTKTAFGYYHNRKTGILEIVPLQATIVEQIFTDYLSGMSLTKLRDKLNESGHIGKDIPWSYRTLRQTLDNPVYCGYIKFKDSLFEGMHKPIIPYGTYLKVQKELEERQQQTYERNNNPRPFQAKYMLSGMARCGYCGAPLRIVLGHKRKDGSRTMKYHCSNRFPRKTKGVTVYNDNKKCDSGAYDLSNLESTVIDNLIGFQENNGSLLKIINGNNQPILDTSSFKEQISQIDKKIQKNSDLYLNDFITMDELKDRTDSLQAEKKLLKAKISENKFNDSTDVFELVKTQLGSIPINELSYDNKKKIVNNLVSKVDVTADNVDIIFKFQLA

SEQ ID NO: 4491 - protein, 452 aa, synthetic construct
MKAAIYIRVSTREQVENYSIQAQTEKLTALCRSKDWDVYDIFVDGGYSGSNMNRPALNEMLSKLHEIDAVVVYRLDRLSRSQRDTITLIEEHFLKNNVEFVSLSETLDTSSPFGRAMIGILSVFAQLERETIRDRMVMGKIKRIEAGLPLTTAKGRTFGYDVIDTKLYINEEEAKQLRLIYDIFEEEQSITFLQKRLKKLGFKVRTYNCYSNWLTNDLYCGYVSYKDKVHVKGIHEPIISEEQFYRVQEIFTRMGKNPNMNRNSASLLNNLVVCSKCGLGFVHRRKDIMSHGKKYHYRYYSCKTYKHIHELEKCGNKIWRADKLEELIINRVNNYSLASRNVDKEDELDSLNEKLKTEHAKKKRLFDLYINGGYEVSELDSMMNDIDAQINYYESQIEANEELKKNRKIQENLADLATVDLDSLEFREKQLYLKSLINKIYIDGEQVTIEWL

SEQ ID NO: 4492 - protein, 485 aa, synthetic construct
MTKKVAIYTRVSTTNQAEEGFSINEQIDRLTKYAEAMGWQVSDTYTDAGFSGAKLGRPAMQRLINDIENKAFDTVLVYKLDRLSRSVRDTLHLVKDVFTKNKIDFISLNESIDTSSAMGSLFLTILSAINEFERENIKERMTMGKLGRAKSGKSMMWTKTAFGYYHNRKTGILEIVPLQATIVEQIFTDYLSGISLTKLRDKLNESGHIGKDIPWSYRTLRQTLDNPVYCGYIKFKGSLFEGMHKPIIPYETYLKVQKELEERQQQTYERNNNPRPFQAKYMLSGMARCGYCGAPLKIVLGHKRKDGSRTMKYHCANRFPRKAKGVTVYNDNKKCDSGTHDLSDLENTVIDNLIGFQENDDSLLKIINGNNQPILDTSSFRKQISQIDKKIQKNSDLYLNDFITMDELKDRTDSLRAEKRLLKAKISENKFNDSTDVFELVKTQLGSIPINELSYDNKKKIVNNLVSKVDVTADNVDIIFKFQLA

SEQ ID NO: 4493 - protein, 485 aa, synthetic construct
MTKKVAIYTRVSTTNQAEEGFSIDEQTDRLTKYAEAMGWQVSDTYTDAGSSGAKLDRPAMQRLINDIENKAFDTVLVYKLDRLSRSVRDTLYLVKDVFTKNKIDFISLNECIDTSSAMGSLFLTILSAINEFERENIKERMTMGKLGRAKSGKSMMWTKTAFGYYHNRKTGILEIVPLQATIVEQIFTDYLSGISLTKLRDKLNESGHIGKDIPWSYRTLRQTLDNPVYCGYIKFKDSLFEGMHKPIIPYETYLKVQKELEERQQQAYERNNNPRPFQAKYMLSGMARCGYCGAPLKIVLGHKRKDGSRTMKYHCANRFPRRTKGVTVYNDNKKCGSGTYDLSSLENTVIDILIGFQEDNDSLLKIINGNNQPILDTSSFREQISQIDKKIQKNSDLYLNDFITMDELKDRTDSLQAEKKLLKAKISENKFNDSTDVFELVKTQLGSIPINELSYDNKKKIVNNLVSKVDVTADNVDIIFKFQRA

SEQ ID NO: 4494 - protein, 452 aa, synthetic construct
MRAAIYIRVSTREQVENYSIQAQTEKLTALCRSKDWDVYDIFIDGGYSGSNMNRPALNEMLSKLHEIDAVVVYRLDRLSRSQRDTITLIEEYFLKNNVEFVSLSETLDTSSPFGRAMIGILSVFAQLERETIRDRMVMGKIKRIEAGLPLTTAKGRTFGYDVIDTKLYINEEEAKQLQLIYDIFEEEQSITFLQKRLKKLGFKVRTYSCYNNWLTNDLYCGYVSYKDKVHVKGIHEPIISEEQFYRVQEILTRMGKNPNMNRDSASLLNNLVVCSKCGLSFVHRRKDTISRGKKYHYRYYSCKTYKHTHELEKCGNKIWRADKLEELIINRVNNYSFASRNVDKGDELDSLNEKLKIEHAKKKRLFDLYINGSYEVGELDCMMNDIDAQINYYESQIEANEELKKDKKIQESLANLATVDYDSLEFREKQLYLKSLINKIYIDGEQVTIEWL

SEQ ID NO: 4495 - protein, 452 aa, synthetic construct
MKAAIYIRVSTREQVENYSIQAQTDKLTALCRSKDWDVYDIFIDGGYSGSNMNRPALNEMLSKLHEIDAVVVYRLDRLSRSQRDTITLIEEYFLKNNVEFVSLSETLDTSSPFGRAMIGILSVFAQLERETIRDRMVMGKIKRIEAGLPLTTAKGRTFGYDVVDTKLYVNEEEAKQLQLIYDIFEEEQSITFLQKRLKKLGFKVRTYNCYNNWLTNDLYCGYVSYKDKVHVKGIHEPIISEEQFYRVQEIFTRMGKNPNMNRDSASLLNNLVVCSKCGLGFVHRRKDAMSRDKKYHYRYYSCKTYKHIHELEKCGNKIWRADKLEELIINRVNSYSLASRNLDKEDELDSLNEKLKIEHAKKKRLFDLYINGRYEVSELDSMMNDIDAQINYYEGQIEANEELKRNKKIQESLADLATVDFDSLEFREKQLYLKSLINKIYIDGEQVTIEWL

SEQ ID NO: 4496 - protein, 452 aa, synthetic construct
MKAAIYIRVSTREQVENYSIQAQTEKLTALCRSKGWDVYDIFIDGGYSGSNMNRPALNEMLSKLHEIDAVVVYRLDRLSRSQRDTITLIEEYFLKNNVEFVSLSETLDTSSPFGRAMIGILSVFAQLERETIRDRMVMGKIKRTEAGLPLTTAKGRTFGYDVIDTKLYVNEEEAKQLQLIYDIFEEGQSITFLQKRLRKLGFKVRTYSRYNNWLTNDLYCGYVSYKDKVHVKGIHEPIISEEQFYRVQEIFARMGKNPNMNRDSASLLNNLVVCSKCGLGFVHRRKDTTSRGKKYHYRYYSCKTYKHIHELEKCGNKIWRADKLEELIISRVNNYSSASRNVDKEDELDSLNEKLKIEHAKKKRLFDLYINGSYDVSELDIMMNDIDARINYYESQIEANEELKKNKKIQENLADLATVDFDSLEFREKQLHLKSLINKIYIDGEQVTIEWL

SEQ ID NO: 4497 - protein, 452 aa, synthetic construct
MKAAIYIRVSTQEQVENYSIQAQTEKLTALCRSKDWDVYDIFIDGGYSGSNMNRPALNEMLSNLHEIDAVVVYRLDRLSRSQRDTITLIEEYFLKNNVEFVSLSETLDTSSPFGRAMIGILSVFAQLERETIRDRMVMGKIKRIEAGLPLTTAKGRTFGYDVIDTKLYINEEEAKQLQLIYDIFEEEQSITLLQKRLKKLGVKVRTYNRYHNWLTNDLYCGYVSYKDKVHVKGIHEPIISEEQFYRVQEIFTRMGKNPNMNRDSASLLNNLVVCSKCGLGFVHRRKDTMSRGKKYHYRYYSCKTYKHIHELEKCGNKIWRADKLEELIINRVNDYSFASRNMDKEDELDSLNEKLKVEHAKKKRLFDLYINGSYEVSELDSMMNDIDAQIGYYESQIEANEELKRNKKIQENLADLATVDFDSLEFREKQLYLKSLINKIYIDGEQVTIEWL

SEQ ID NO: 4498 - protein, 452 aa, synthetic construct
MKAAIYIRVSTREQVENYSIQAQTEKLTALCRSKDWDVYDIFVDGGYSGSNMNRPALNEMLSKLHEIDAVVVYRLDRLSRSQRDTITLIEEYFLKNNVEFVSLSETLDTSSPFGRAMIGILSVFAQLERETIRDRMVMGKIKRIEAGLPLTTAKGRTFGYDVIDTKLYINEEEAKQLQLIYDIFEEEQSITSLQKRLKKLGFKVRTYNRYNNWLTNDLYCGYVSYKDKVHVKGIHEPIISEEQFYRVQEIFTRTGKNPNMNRDSASLLNNLVVCSKCGQGFVHRRKDAKSRDKKYHYRYYSCKTYKHIHELEKCGNKIWRADKLEELIINRVNNYSLASRNTDKEDELDSLNEKLKIEHAKKKRLFELYINGSYEVSELDSMMSDIDAQINYYEGQIEANEELRKDRKIQENLAYLATVDFDSLEFREKQLYLKGLINKIYIDGDQVTIEWL

SEQ ID NO: 4499 - protein, 452 aa, synthetic construct
MKAAIYIRVSTREQVENYSIQAQTEKLTALCRSKDWDVYDIFVDGGYSGSNMNRPALNEMLSKLHEIDAVVVYRLDRLSRSQRDTITLIEEYFLKNNVEFVSLSETLDTSSPFGRAMIGILSVFAQLERETIRDRMVMGKIKRIEAGLPLTTAKGRTFGYDVIDTKLYINEEEAKQLQLIYDIFEEEQSITFLQKRLKELGFKVHTYNRYNNWLTNDLYCGYVSYKDKVHVKGIHEPIISEEQFYRVQEIFTRMGKNPNMNRDSASLLNNLVVCSKCGLGFVHRRKDTTSRGKKYRYRYYSCKTYKHTHELKKCGNKIWRADKLEELIINRVNNYSLASRSVDKEDELDSLNEKLKTEHAKKKRLFDLYINGSYEVSELDSMMNDIDAQINYYESQIEANEELKKNKKIQESLANLATVDYDSLEFREKQLYLKSLINKIYIDGEQVTIEWL

SEQ ID NO: 4500 - protein, 469 aa, synthetic construct
MSYTTPVRAAVYLRISEDRSGEQLGVARQREDCLKLCDQRRWVPVEYLDNDVSASTGKRRPAYEQMLADITAGKIAAVVAWDLDRLHRRPIELEAFMSLADEKRLALATVAGDVDLATPQGRLVARLKGSVAAHETEHKKARQRRAARQKAERGLPNWSKAFGYLPGPNGPEPDPRTAPLVEQAYADILAGASLGDVCRQWNDAGAFTITGRPWTTTTLSKFLRKPRNAGLRAYKGARYGPVDRDAIVGKAQWSPLVDEATFWAAQAVLDAPGRAPGRKSVRRHLLTGLAGCGKCGNHLAGSYRTDGRVVYVCKACYGVVILADNIEPILYHIVTERLAMPGAVDLLRREIHDAAEAETIRLELETLYGELDRLAVERAEGLLTARQVKICTDIVNAKITRLQARQLDQERLRVFDGIPLGTPQVAGMIAELSPDRFRAVLDVLAEVVVQPVSKSGGIFNPERVQVNWR

SEQ ID NO: 4501 - protein, 452 aa, synthetic construct
MKAAIYIRVSTREQVENYSIQAQTEKLTALCRSKDWDVYDIFIDGGYSGSNMNRPALNEMLSKLHEIDAVVVYRLDRLSRSQRDTITLIEAYFLKNNVEFVSLSETLDTSSPFGRAMIGILSVFAQLERETIRDRMVMGKIKRIEAGLPLTTAKGRTFGYDVIDTKLYINEEEAKQLRLIYDIFEEEQSIAFLQKRLKKLGFKVRTYNRYISWLTNDLYCGYVSYKDKVHVKGIHEPIISEEQFYRVQEIFTRMGKNPNMNRDSASLLNNLVVCSKCGLGFVHRRKDTMSRGKKYHYRYYSCKTYKHTHELEKCGNKIWRADKLEELIINCVNNYSFASRNVDKEDELDSLNEKLKIEHAKKRRLFDLYINGSYEVSELDSMMNDIDAQINYYESQIEANEGLKKNKKIQENLANLATVDYDSLEFREKQLYLKSLINKIYIDGEQVTIEWL

SEQ ID NO: 4502 - protein, 485 aa, synthetic construct
MTKKVAIYTRVSTTNQAEEGFSIDEQIDRLTKYAEAMGWQVSDTYTDAGSSGAKLERPAMQRLINDIENKAFDTVLVYKLDRLSRSVRDTLYLVKDVFTKNKIDFISLNESIDTSSAMGSLFLTILSAINEFERENIKERMTMGKLGRAKSGKSMMWTKTAFGYYHNRKTGILEIVPLQATIVEQIFTDYLSGISLTKLRDKLNESGHIGKDIPWSYRTLRQTLDNPVYCGYIKFKDSLFEGMHKPIIPYETYLKVQKELEERQQQAYERNNNPRPFQAKYMLSGMARCGYCGAPLRIVLGHKRKDGSRTMKYHCANRFPRKTKGVTVYNDNKKCDSGTYDLRNLENTVIDNLIGFQENSDSLLKVINGSNPPILDTSSLKKQISQIDKKIQKNSDLYLNDFITMDELKDRTDSLQAEKKLLKAKISENKFSDSTDVFELVKTQLGSIPISELSYDNKKKIVNNLVSKVDVTADNVDIIFKFQLA

SEQ ID NO: 4503 - protein, 452 aa, synthetic construct
MKAAIYIRVSTREQVENYSIQAQTEKLTALCRSKDWDVYDIFIDGGYSGSNLNRPALNEMLSKLHEIDAVVVYRLDRLSRSQRDTIILIEEYFLKNNVEFVSLSETLDTSSPFGRAMIGILSVFAQLERETIRDRMAMGKIKRIEAGLPLTTAKGRTFGYDVIDTKLYINEEEARQLQLIYDIFEEEQSITFLQRRLKKLGFKVRSYNRYNNWLTNDLYCGYVSYKDKVHVKGIHEPIISEEQFYRVQEIFTRTGKNPNMNRDSASLLNNLVVCSKCGLGYVHRRKDTVSRGKKYHYRYYSCKTYKHIHELEKCGNKIWRADKLEELIINRVNNYSFASRDVDKEDELDSLDEKLKIEQAKRKRLFDLYINGSYNVSELDSMTNDIDAQINYYESQIEANGELKKNKKIQEDLADLATVDFDSLEFREKQLYLKSLINKIYIDGEQVTIEWL

SEQ ID NO: 4504 - protein, 485 aa, synthetic construct
MTKKVAIYTRVSTTNQAEEGFSIDEQIDRLTKYAEAMGWQVSDTYTDAGFSGAKLERPAMQRLINDTENKAFDTVLVYKLDRLSRSVRDTLYLVKDVFTKNKIDFISLNESINTSSAMGSLFLTILSAINEFERENIKERMTMGKLGRAKSGKSMMWTKTAFGYYHNRKTGILEIVPLQATIVEQIFTDYLSGISLTKLRDKLNESGHIGKDVPWSYRTLRQTLDNPVYCGYIKFKDSLFEGMHKPIIPYETYLKVQKELEERQQRTYERNNNPRPFQAKYMLSGMARCGYCGAPLRIVLGHKRKDGSRTMRYHCANRFPRKTRGVTVYNDNKKCNSGTYDLSKLENIVIDTLIGFQENNDSLLKIINGNNQPILDTSSFKNQISQIDRRIQKISDLYLNDFITMDELKDRTDSLQAEKKLLKAKISENKFNDSTDVFELVKTQLGSIPINELSYDNKKRIVNNLVSKVDVTADSVDIIFKFQLA

SEQ ID NO: 4505 - protein, 452 aa, synthetic construct
MKAAIYIRVSTQEQVGNYSIQAQTEKLAALCRSKGWDVYDIFIDGGYSGSNMNRPALNEMLSKLHEVDAVVVYRLDRLSRSQRDTTTLIEEYFLKNNVEFVSLSETLDTSSPFGRAMIGILSVFAQLERETIRDRMVMGKIKRIEAGLPLTTAKGRTFGYDVIDTKLYINEEEAKQLQLIYDIFEEEQSITFLQKRLKKLGFKVRTYNRYSNWLTNDLYCGYVSYKDKVHVKGIHEPIISEEQFYRVQEIFARMGRNPNMNRDSASLLNSLVVCSKCGLGFVHRSKDTMSRGKKYHYRYYSCKTYKHTHELEKCGNKTWRADKLEELIINRVNNYSFASRNVDKGDELDGLNEKLKIEHAKKKRLFDLYINGSYEVSELDSMMNDIDAQINYYESQIEAKEELRKNKKIQENLADLATVDFDGLEFREKRLYLKSLINKIYIDGEQVTIEWL

SEQ ID NO: 4506 - protein, 485 aa, synthetic construct
MTKKVAIYTRVSTTNQAEEGFSIDEQIDRLTKYAEAMGWQVSDTYTDAGFSGAKLERPAMQRLINDIETKAFDTVLVYKLDRLSRSVRDTLYLVKDVFTKNKIDFISLNESIDTSSAMGSLFLTILSAINEFERENIKERMTMGKLGRAKSGKSMMWTKTAFGYYHNRETGILEIVPLQATVVEQIFTDYLSGISLTKLRDKLNESGHIGKDIPWSYRTLRQTLDNPVYCGYIKFKDSLFVGMHKPIIPYETYLKVQKELDERQQQTYERNNNPRPFQAKYMLSGMARCGYCGAPLKIVLGHKRKDGSRTMKYHCANRFPRKTKGVTVYNDNKRCDSGTYDLSNLENTVIDNLIGFQEDNDSLLKIINGNNQPIQDTSSFKKQISQIDKKIQKNSDLYLNDFITMDELKDRTDSLQAERKLLEAKISENKFNGSTDVFELVKTQLGSIPINELSYDNKKKIVNNLVSKVDVTADNVDIIFKFQLA

SEQ ID NO: 4507 - protein, 485 aa, synthetic construct
MTKKVAIYTRVSTTNQAEEGFSIDEQIDRLTKYAEAMGWQVSDTYTDAGFSGAKLERPAMQRLINDIENKAFDTVLVYKLDRLSRSVRDTLYLVKDVFTKNKIDFISLNESIDTSSAMGSLFLTILSAINEFERENIKERMTMGKLGRAKGGKSMMWTKTAFGYYHNRKTGILEIVPLQAAIVVQIFTDYLSGISLTKLRDKLNESGHIGKDIPWSYRTLRQTLDNPVYCGYIKFKDSLYEGMHKPIIPYETYLNVQKELEERQQQTYERNNNPRPFQAKYMLSGMARCGYCGAPLRIVLGHKRKDGSRTMKYHCANRFPRKTKGVTVYNDNKKCDSGTYDLSNLENTVIDSLIDFQENNDSLLKIINGNSQPILDTSSFKKQISQIDKKIQKNSDLYLNDFITMDELKDRTGSLQAEKKLLKAKISENKFNDSTDVFELVRTQLGSIPINELSYDNKKKIVNSLVSKVDVTADNVDIIFKFQLA

SEQ ID NO: 4508 - protein, 485 aa, synthetic construct
MTKKVAIYTRVSTTNQAEEGFSVDEQIDRLTKYAEAMGWQVSDTYTDAGCSGAKLERPAMQRLINDIENKAFDTVLVYKLDRLSRSVRDTLYLVKDVFTKNKIDFISLNESIDTSSAMGSLFLTILSAINEFERENIKERMTMGKLGRAKSGKSMMWTKTAFGYYHNRKTGILEIVPLQATIVEQIFTDYLSGISLTKLRDKLNESGHIGKDIPWSYRTLRQTLDNPVYCGYIKFKDSLFEGMHKPIISYETYLKVQKELEERQQQTYERNNNPRPFQAKYMLSGMARCGYCGAPLKIVLGHRRKDGSRTMKYHCANRFPRKTKGVTVYNDNKKCDSGTYDLSNLENTVIDNLIGFQENNDSLLKIINGNNQPILDTSSFKEQISQIDKKIQKNSDLYLNDFITMDELKDRTDSLQAEKKLLKAKFSENKFNDSTDVFELVKTQLGSIPINELSYDNKKKIVNNLVSKVDVTADNVDIIFKFQLA

SEQ ID NO: 4509 - protein, 469 aa, synthetic construct
MSYTTPVRAAVYLRISEDRSGEQLGAARQREDCLELCCQRKWVPVEYLDNDVSASTGKHRPAYEQMLADITAGKIAAVVAWDLDRLHRRPIELEAFMSLADEKRLALATVAGDVDLATPQGRLVARLKGSVAAHETEHKKARQRRAARQKAERGLPNWSKAFGYLPGPNGPEPDPRTAPLVKQAYADILAGASLGDVCRQWNDAGAFTITGRPWTTTTLSKFLRKPRNAGLRAYKGARYGPVDRDAIVGKAQWSPLVDEATFWAARAVLDAPGRAPGRKSVRRHLLTGLAGCGKCGNHLAGSYRTDGRVVYVCKTCHGVAILADNIEPILYHIVAERLAMPDAVDLLRREIHDAAEAETIRLELETLYGELDRLAVERAEGLLTARQVKISTDIVNAKITKLQARQLDQERLRVLDGIPLGTPQVAGMIAELSPDRFRAVLDVLAEVVVQPVGKGGRVFNPERVQVNWR

SEQ ID NO: 4510 - protein, 452 aa, synthetic construct
MKAAIYIRVSTREQVENYSIQAQTEKLTALCRSKDWDVYDIFIDGGYSGSNMNRPALNEMLSKLHEIDAVVVYRLDRLSRSQRDTITLIEEYFLKNNVEFVSLSETLDTSSPFGRAMIGILSVFAQLERETIRDRMVMGKIKRIEAGLPLTTAKGRTFGYDVIDTKLYVNEEEAKQLRLIYDIFEEEQSITLLQKRLKGLGFKVRTYNRYNSWLTNDLYCGYVSYKDKVHVKGIHEPIISEEQFYRVQEIFTRMGKNPNMNRDSASLLSNLVVCSKCGLGFVHRRKGTMSRGKKYHYRYYSCKTYKHTHELEKCGNKIWRADKLEELIINRVNNYSFASRNVDKEDELDSLNEKLKIEHVRKKRLFDLYINGSYEVSELDSMMNDIDAQINYYESQIEANAELKKDKKIQESLANLATVDYDSLEFREKQLYLKSLINKIYIDGEQVTIEWL

SEQ ID NO: 4511 - protein, 485 aa, synthetic construct
MTKKVAIYTRVSTTNQAEEGFSIDEQVDRLTKYAEAMGWQVSDTYTDAGFSGAKLERPAMQRLINDIENKAFDTVLVYKLDRLSRSVRDTLYLVKEAFTKNKIDFISLSESIDTSSAMGSLFLTILSAINEFERENIKERMTMGKLGRAKSGKSMMWTKTAFGYYHNRKTGILEIVPLQATIVEQIFTDYLSGISLTKLRDKLNESGHIGKDIPWSYRTLRQTLDNPVYCGYIKFKGSLFGGMHKPIIPYETYLKVQKELEERQQQAYGRNNNPRPFQAKYMLSGMARCGYCGAPLRIVLGHKRKDGSRTMKYHCANRFPRKTKGVTVYNDNKKCDSGAYDLSNLENTVIDNLIGFQENNDSLLKIIDGNNQPILDTSSLKKQISQIDKKIQKNSDLYLNDFITMDELKVRTDSLQAEKELLKAKISEDKFNDGTDVFELVKTQLGSIPINELSYDNKKKIVNNLVSKVDVTADNVDIIFKFQLA

SEQ ID NO: 4512 - protein, 485 aa, synthetic construct
MTKKVAIYTRVSTTSQAEEGFSIDEQVDRLTKYAEAMGWQVSDTYTDAGFSGAKLERPAMQRLINDIENKAFDTVLVYKLDRLSRSVRDTLYLVKDVFTKNKIDFISLNESINTSSAMGSLFLTILSAINEFERENIKERMTMGKLGRAKSGKSMMWTKTAFGYYHNRRTGILEIVPLQATIVEQIFADYLGGISLTKLRDKLNESGHIGKDIPWSYRTLRQTLDNPVYCGYIKFKGSLFEGMHKPIIPYETYLKVQKELEERQQQTYERNNNPRPFQAKYMLSGMARCGYCGAPLRIVLGHKRKDGSRTMKYHCANRFPRKTKGVTVYNDNKKCDSGIYDLSNLENTVIDNLIGFQENNDSLLKIINGNNQPILDTSSFKKQISQIDKKIQKNSDLYLNDFITMDELKDRTDSLQAEKKLLKAKISENKFNDSTDVFELVKTQLGSIPINELSYDNKKKIVNNLVSKVDVTADNVDIIFKFQLT

SEQ ID NO: 4513 - protein, 485 aa, synthetic construct
MTKKVAIYTRVSTTNQAEEGFSIDEQIDRLTKYAEAMGWQVSDTYTDAGLSGAKLERPAMQRLINDIGNKAFDTVLVYKLDRLSRSVRDTLYLVKDVFTKNKIDFISLSESIDTSSAMGSLFLTILSAINEFERENIKERMTMGKLGRAKSGKSMMWTKTAFGYYHNRKTGILEIVPLQATIVEQIFTDYLSGISLTKLRDKLNESGHIGKDIPWSYRTLRQTLDNPVYCGYIKFKDSLFKGMHKPIIPYETYLKVQKELEERQQQTYERNNNPRPFQAKYMLSGMARCGYCGAPLRIVLGHKRKDGSRTMKYHCANRFPRKTKGVTVYNDNKRCDSGTYDLSSLENTVIDNLIGFQENNDSLLKIINGNNQPILDTSSFKKQISQIDKKIQKNSDLYLDDFITMDELKDRTDSLLAEKKLLKAKISENKFNDSTDVFELVKTQLGSIPINELSYDSKKKIVNNLVSKVDVTADSVDIIFKFQLA

SEQ ID NO: 4514 - protein, 485 aa, synthetic construct
MTKKVAIYTRVSTTNQAEEGFSIDEQTDRLTKYAEAMGWQVSDTYTDAGFSGAKLERPAMQRLINDIENKAFDTVLVYKLDRLSRSVRDTLYLVKDVFTKNKIDFISLNESIDTSSAMGSLFLTILSAINEFERENIRERMAMGKLGRAKSGKSMMWTKTAFGYYHNRETGILEVVPLQAAIVEQIFTDYLSGISLTKLRDKLNESGHIGKDIPWSYRTLRQTLDNPVYCGYIKFKGSLFEGMHKPIIPYETYLKVQKELEERQQQTYKRNNNPRPFQAKYMLSGMARCGYCGAPLRIVLGHKRKDGSRTMKYHCANRFPRKTRGVTVYNDNKKCDSGTYDLSNLENTVIDSLIGFQENNDGLLRIINGNSQPIQDTSSFKEQISQIDKKIQKNSDLYLNDFITMDELKDRTDSLQAEKKLLKAKISGNKFNDSTDVFELVKTQLGSIPINELSYDNKKKIVNNLVSKVDVTADNVDIIFKFQLA

SEQ ID NO: 4515 - protein, 452 aa, synthetic construct
MKAAIYIRVSTREQVENYSIQAQTEKLTALCRSKDWDVYDIFIDGGYSGSNMNRPALNEMLSKLHEIDAVVVYRLDRLSRSQRDTITLIEEYFLKNNVEFVSLSETLDTSSPFGRAMIGILSVFAQLERETIRDRMVMGKIKRIEAGLPLTTAKGRTFGYDVIDTKLYINEEEAKQLRLIYDIFEEEQSITFLQKRLKELGFKVRTYNRYNNWLTNDLYCGYVSYKDKVHVKGIHEPIISEDQFYRVQEIFARMGKNPNMNRDSASLLNNLVVCSKCGLGFVHRRKDAMSRDKKYHYRYYSCKTYKHIHELEKCGNKIWRADKLEELIINRVNNYSVASRNVDKEDELDSLNEKLRIEHAKKRRLFDLYINGSYEVSELDSMMSDIDAQISYYESQIEANEGLKKNQRIQENLAELATVDFDRLEFREKQLYLKSLINKIYIDGEQVTIEWL

SEQ ID NO: 4516 - protein, 452 aa, synthetic construct
MKAAIYIRVSTQDQVENYSIQAQTEKLTALCRGKDWDVYDIFIDGGYSGSNMNRPALNEMLSKLHEIDAVVVYRLDRLSRNQRDTVTLIEEYFLKNNVEFVSLSETLDTSSPFGRAMIGILSVFAQLERETIRDRMVMGKIKRIEAGLPLTTAKGRTFGYDVIDTKLYINEEEAKQLQLIYDIFEEEQSITFLQKRLKKLGFKVHTYSRYNNWLTNDLYCGYVSYKDKVRVKGIHEPIISEEQFYRVQEIFTRMGKNPNMNRVSASLLNNLVVCSKCGLGFVHRRKDTMSRGKKYHYRYYSCKTYKHTHELEKCGNKIWRADKLEELIISRVNNYSLASRNVDKEDELDSLNEKLKIEHAKKKRLFDLYINGSYEVSELDSMMSDIDAQINYYESQIEANEELKKDKKIQESLANLATVDYDSLEFREKQLYLKSLINKIYIDGEQVTIEWL

SEQ ID NO: 4517 - protein, 452 aa, synthetic construct
MKAAIYIRVSTREQVENYSIQAQTEKLTALCRSKDWDVYDTFIDGGYSGSNMNRPALNEMLSKLHEIDAVVVYRLDRLSRSQRDTITLIEEYFLKNNVEFVSLSETLDTSSPFGRAMIGILSVFAQLERETIRDRMVMGKIKRIEAGLPLTTAKGRTFGYDVIDTKLYINEEEAKQLQLIYDIFEEEQSITFLQKRLKKLGFKVRTYNRYNSWLTNDLYCGYVSYKDKVHVKGIHEPIISEEQFRRVQEIFTRTGKNPNTNRDSASLLNNLVVCSKCGLGFVHRRKDTMSRGKKYHYRYYSCKTYKHTHELERCGNKIWRADKLEELIINRMNNYSFASRNVDKEDELASLNEKLKTEHAKKRRLFDLYLNGSYEVSELDSMMNDIDAQINYYESQIEANEKLKRNKKIQENLANLATVDYDSLEFREKQLYLKSLINKIYIDGEQVTIDWL

SEQ ID NO: 4518 - protein, 485 aa, synthetic construct
MTKKVAIYTRVSTTNQAEEGFSIDEQIDRLTKYAEAMGWQVSGTYTDAGLSGAKLERPAMQRLINDIENKAFDTVLVYKLDRLSRSVRDTLYLVKDVFTKNKIDFISLNESIDTSSAMGSLFLTILSAINEFERENIKERMTMGKLGRAKSGKSMMWTRTAFGYYHNRKTGILEIVPLQATIVEQIFTDYLSGISLTKLRDKLNESGHIGKDIPWSYRTLRQTLDNPVYCGYIKFKDSLFEGMHKPIIPYETYLKVQKELEERQQQAYERNNNPRPFQAKYMLSGMARCGYCGAPLRIVLGHKRKDGSRTMKYHCANRFPRKTKGITVYNDNKKCDSGTYDLSNLENTVIDNLIGFQENNDSLLKIINGNNQPILDTSSFKKQISQIDKKIQKNSDLYLNDFITMDELKDRTDSLQAEKKLLRAKISENKFNDSTDVFELVKTQLGSIPINELSYDNKKKIVNNLVSKVDVTADNVDIIFKFQLA

SEQ ID NO: 4519 - protein, 469 aa, synthetic construct
MSYTTPVRAAVYLRISEDRSGEQLGVARQREDCLKLCGQRRWVPVEYLDNDVSASTGKRRPAYEQMLADITAGKIAAVVAWDLDRLHRRPIELEAFMSLADEKRLALATVAGDVDLATPQGRLVARLKGCVAAHETEHKKARQRRAARQKAERGHPNWSKAFGYLPGPNGPEPDPRTAPLVKQAYADILAGASLGDVCRQWNDAGAFTITGRPWTTTTLSKFLRKPRNAGLRAYKGARYGPVDRDAIVGKAQWSPLVDEATFWAAQAVLDAPGRAPGRKSVRRHLLTGLAGCGKCGSHLAGSYRTDGRVVYVCKACHGVAILADNIEPILYHIVAERLAMPDAMDLLRREIHDAAEAETIRLELETLHGELDRLAVERAEGLLTARQVKISTDIVNAKITKLQARQLDQERLRVLDGIPLGTPQVAGMIAELSPDRFRAVLDVLAEVVVQPVGKSGRILNPERVQVNWR

SEQ ID NO: 4520 - protein, 452 aa, synthetic construct
MKAAIYIRVSTQEQVGNYSIQAQTEKLTALCRSKDWDVYDIFVDGGYSGSNMNRPALNEMLSKLHEIDAVVVYRLDRLSRSQRDTTTLIEEYFLKNNVEFVSLSETLDTSSPFGRAMIGILSVFAQLERETIRDRMVMGKIKRIEAGLPLTTAKGRTFGYDVIDTKLYINEEEAKQLRLIYDIFEEEQSITSLQKRLKKLGFKVRTYNRYNNWLTNDLYCGYVSYKDKVHVKGIHEPIISEEQFYRVQEIFTRMGKNPNMNRDGASLLNNLVVCSKCGLGFVHRSKDTMSRGKKYHYRYYSCKTYKHTHELEKCGNKTWRADKLEELIINRVNNYSIAGRNVDKEDELGSLNEKLKIEHAKKKRLFDLYINGSYEVSELDCMMNDIDAQINHYESQIEANEELRRNKKIQENLADLAAVDFDSLEFREKQLYLKSLINKIYIDGEQVTIEWL

SEQ ID NO: 4521 - protein, 485 aa, synthetic construct
MTKKVAIYTRVSTTNQAEEGFSIDEQIDRLTKYAEAMGWQVSDTYTDAGFSGAKLERPAMQRLINDIENKAFDTVLVYKLDRLSRSVRDTLHLVEDVFTKNKIDFISLNESIDTSSAMGSLFLTILSAINEFERENIKERMTMGKLGRAKSGKSMMWTKTAFGYYHNRKTGILEIVPLQATIVEQIFTDYLSGISLTKLRDKLNESGHIGKDIPWSYRTLRQTLDNPVYCGYIKFKGSLFEGMHKPIIPYETYLKVQKGLEERQQQTYERNNNPRPFQAKYMLSGMARCGYCGAPLRIVLGHKRKDGSRTMKYHCANRFPRKTKGVTVYNDNKKCDSGTYDLSNLENTVIDNLIGLQENNDSLLRIINGNNQPILDTSSFKKQISQIDKKIQKNSDLYLNDFITMDELKDRTDSLQAEKKLLEAKISENKFNDSTDVFELVKTQLGSIPINELSYDNKKKIVNNLVSKVEVTADNVDIIFKFQLA

SEQ ID NO: 4522 - protein, 452 aa, synthetic construct
MKAAIYIRVSTREQVENYSIQAQTEKLTALCRSKDWDVYDIFIDGGYSGSNMNRPALNEMLSKLHEIDAVVVYRLDRLSRSQRDTITLIEEYFLKNNVEFVSLSETLDTSSPFGRAMIGILSVFAQLERETIRDRMVMGKIKRIEAGLPLTTAKGRTFGYDVIDTRLYINEEEAKQLQLIYDIFEEEQSITFLQKRLKKLGFKVRTYSRYNNWLTNDLYCGYVSYKDKVHVKGIHEPIISEEQFYRVQEIFTRMGKNPNMNRDSASLLNNLVVCSKCGLGFVHRRKDTMSRGKKYHYRYYSCKTYKHTHELEKCGNKIWRADKLEELIINRVNNYSFASRNADKEDELDSLNEKLKIEHAKRKRLFDLYINGSYEVSELDSMMNDIDAQINYYESQIEANEGLKKNKKIQENLANLATVDYDSLEFREKQLYLKSLINKIYIDGEQVTIEWL

SEQ ID NO: 4523 - protein, 485 aa, synthetic construct
MTKKVAIYTRVSTTNQVEEGFSIDEQIDRLTKYAEAMGWQVSDTYTDAGLSGAKLERPAMQRLISDIENKAFDTVLVYKLDRLSRSVRDTLYLVKDVFTKNKIDFISLNESIDTSSAMGSLFLTILSAINEFERENIKERMTMGKLGRAKSGKSMMWTKTAFGYYHNRKTGILEVVPQQATIVEQIFTDYLSGISLTKLRDKLNESGHIGKDIPWSYRTLRQTLDNPVYCGYIKFKDSLFEGMHKPIIPYETYLKVQKELEERQRQTYERNNNPRPFQAKYMLSGMARCGYCGAPLRIVLGHKRKDGSRTMKYHCANRFPRKTKGVTVYNDNEKCDSGTYDLSNLESTVIDYLIGFQEDDDSLLKIINGNDQPILDTSSFKKQISQIDKKIQKNSDLYLNDFITMDELKDRTDSLQAEKRLLKAKISENKFNDSTDVFELVRTQLGSIPINELSYDNKKKIVNNLVSKVDVTADNVDIIFKFQLA

SEQ ID NO: 4524 - protein, 452 aa, synthetic construct
MKAAIYIRVSTREQVENYSIQAQTEKLTALCRSKDWDVYDIFIDGGYSGSNMNRPALNEMLSKLHEIDAVVVYRLDRLSRSQRDTITLIEEYFLRNNVEFVSLSETLDTSSPFGRAMIGILSVFAQLERETIRDRMVMGKIKRIEAGLPLTTAKGRTFGYDVVDTKLYINEEEAEQLRLIYDIFEEEQSITLLQKRLKKLGLKVRTYNCYNNWLTNDLYCGYVSYKDKVHVKGIHEPIISEEQFYRVQEIFTRMGKNPNMNRDSASLLNNLVVCSKCGLSFVHRRKDATSRDKKYHYRYYSCKTYKHIHELEKCGNKIWRADKLEELIINRVNNYSLAGRNVDKEGELGSLNEKLKIEHAKKKRLFDLYINGSCEVSELDSMMNDIDAQINYYESQIEANEELKKNKKIRENLAHLATVDFDSLEFREKQLYLKSLINKIYIDGEQVTIEWL

SEQ ID NO: 4525 - protein, 452 aa, synthetic construct
MKAAIYIRVSTREQVENYSIQAQTEKLTALCRSKDWDVYDIFIDGGYSGSNMNRPALNEMLSKLHEIDAVVVYRLDRLSRSQRDTITLIEEYFLKNNVEFVSLSETLDTSSPFGRAMIGILSVFAQLERETIRDRMVMGKIKRIEAGLPQTTAKGRTFGYDVIDTKLYINEEEAKQLRLIYDIFEEEQSITFLQRRLKELGFKVRTYNRYNNWLTNDLYCGYVSYKDKVHVKGIHEPIISEEQFYRVQEIFARMGKSPNMNRDSASLLNNLVVCGKCGLGFVHRRKGTMSRDKKYHYRYYSCKTYKHIHELEKCGNKIWRADKLEELIINRVNNYSLASRNADKEDELDSLNEKLKIEHAKKKRLFDLYINGIYEVSELDSMMNDIDAQINYYESQIEANEELKKNKKIQENLADLATVDFDSLEFREKQLYLKSLINKIYIDGEQVTIEWL

SEQ ID NO: 4526 - protein, 452 aa, synthetic construct
MKAAIYIRVSTREQVENYSIQAQTEKLTALCRSKDWDVYDIFIDGGYSGSNMNRPALNEMLSKLHEIDAVVVYRLDRLSRSQRDTITLIEEYFLKNNVEFVSLSETLDTSSPFGRAMIGILSVFAQLERETIRDRMVMGKIKRIEAGLPLTTAKGRTFGYDVIDTKLYINEEEAKQLRLIYDIFEEGQSITFLQKRLKELGFKVHTYNRYNNWLTNDLYCGYVSYKDKVHVKGIHEPIISEEQFYRVQEIFTRMGKNPNMNRDSASLLNNLVVCSKCGLGFVHRRKDTMSRGKKYRYRYYSCKTYKHTHELEKCGNKIWRADKLEELIINCVNNYSFASRNVDKEDELDSLNEKLKVEHAKKKRLFDLYINGSYEVSELDSMMNDIDAQINYYESQIEANEELKKNKKVQENLANLATVDYDSLEFREKQLYLKSLINKIYIDGEQVTIEWL

SEQ ID NO: 4527 - protein, 452 aa, synthetic construct
MKAAIYIRVSTREQVENYSIQAQTEKLTALCRSKDWDVYDIFIDGGYSGSNMNRPALNEMLSKLHEIDAVVVYRLDRLSRSQRDTITLIEEYFLKNNVEFVSLSETLDTSSPFGRAMIGILSVFAQLERETIRDRMVMGKIKRIEAGLPLTTAKGRTFGYDVIDTKLYINEEEARQLQLIYDIFEEEQSITFLQKRLKKLGFKVRTYNRYNNWLTNDLYCGYVSYKDKVHVKGIHEPIISEEQFYRVQEIFTRMGKNPNMNRGSASLLNNLVVCSKCGLGFVHRRKDAMSRDKKYHYRYYSCKTYKHIHELEKCGNKIWRADKLEELIINRVNDYSLVSRNVDKEDELDSLNEKLKIEHAKKKRLFDLYINGSYEVSELDSMMSDIDAQINYYESRIEANEELRKNKKIQENLADLATVDFDSLEFREKQLYLKSLINKIYIDGEQVTIEWL

SEQ ID NO: 4528 - protein, 485 aa, synthetic construct
MTRKVAIYTRVSTTNQAEEGFSIDEQIDRLTKYAEAMGWQVSDTYTDAGFSGAKLERPAMQRLISDIENKAFDTVLVYKLDRLSRSVRDTLYLVKGVFTKNKIDFISLNESIDTSSAMGSLFLTILSAINEFERENIKERMTMGKLGRAKSGKSMMWTKTAFGYYHNRKTGILEIVPLQATIVEQIFTDYLSGISLTKLRDKLNESGHIGKDIPWSYRTLRQTLDNPVYCGYIKFKDSLFEGMHKPIIPYETYQKVQKELEERQQQTYERNNNPRPFQAKYMLSGMARCGYCGAPLRVVLGHKRKDGSRTMKYHCANRFPRKTKGVTVYNDNKKCDSGTYDLSNLENTVIDNLIGFQENNDSLLKIINGNNQPTLDTSSFKKQISQIDKKIQKNSDLYLNDFITMDELKARTDSLQAEKKLLKAKISENKFSDSIDVFELVKTQLGSIPINELSYDNKKKIVNNLVSKVDVTADNVDIIFKFQLA

SEQ ID NO: 4529 - protein, 469 aa, synthetic construct
MSYTTPVRAAVYLRISEDRSGEQLGVARQREDCLELCGQRKWVPVEYLDNDVSASTGKRRPAYEQMLADIAAGKIAAVVAWDLDRLHRRPVELEAFMSLADEKRLALATVAGDVNLATPQGRLVARLKGSVAAHETEHKKARQRRAARQKAERGLPNWSKAFGYLPGPNGPEPDPRTAPLVKQAYADILAGASLGDVCRQWNAAGAFTITGRPWTTTALSKFLRKPRNAGLRAYKGARYGPVDRDAIVGKAQWSPLVDEATFWAAQAVLDAPGRAPGRKSVRRHLLTGLAGCGKCGNHLAGSYRTDGQVVYVCKACYGVAILADNIVPILYHVVAERLAMPDAVDLLRREIHDAAEAEAIRLELETLYGELDRLAVERAEGLLTARQVKISTDIVNAKITKLQARQLDQERLRVFNGIPLGTPQVAGVIAELSPDRFRAVLDVLAEVVVQPVGKGGRIFNPERVQVNWR

SEQ ID NO: 4530 - protein, 469 aa, synthetic construct
MSYTTPVRAAVYLRISEDRSGEQLGVARQREDCLKLCGQRKWVPVEYLDNDVSASTGKRRPAYEQMLADITAGKIAAVVAWDLDRLHRRPIELEAFMSLADEKRLALATVAGDVDLATPQGRLVARLKGSVAAHETEHKKARQRRAARQKAERGHPNWSKAFGYLPGPNGPEPDPRTAPLVKQAYADILAGASLGDVCRQWNGAGAFTITGRPWATTTLSKFLRKPRNAGLRAYKGARYGPVDRDAIVGKAQWSPLVDEATFWAAQAVLDAPGRAPGRKSVRRHLLTGLAGCGKCGNHLSGSYRTDGKVVYVCKACHGVAILADNIEPILYRIVAERLAMPDAVDLLRREIHDAAEAETIRLGLETLYGELDHLAVERAEGLLTARQVKISTDIVNAKIIKLQARQLDQERLRVFDGIPLGTPQVAGVIAKLSPDRFRAVLDVLAEVVVQPVGKSGRIFNPERVQVNWR

SEQ ID NO: 4531 - protein, 469 aa, synthetic construct
MSYTTPVRAAVYLRISEDRSGEQLGVARQREDCLKLCDQRKWVPVEYLDNDVSASTGKRRPAYERMLADISAGKIAAVVAWDLDRLHRRPIELEAFMSLADEKRLALATVAGDVDLATPQGRLVARLKGCVAAHETEHKKARQRRAARQKAERGHPNWSKAFGYLPGPNGPEPDPRTAPLVKQAYADILAGASLGDVCRQWNDAGAFTVTGRPWTTTALSKFLRKPRNAGLRAYKGARYGPVDRDAIVGKAQWSPLVDEATFWAAQAVLDAPGRAPGRKSVRRHLLTGLAGCGKCGNHLAGSYRTNGRVVYVCKACHGVAILADNIEPILYHIVAERLAMPDAVDLLRREIHDAAEAETIRLGLETLYGELDRLAVERAEGLLTARQVKISTDIVNAKITKLQARQLDQERLRVFEGIPLGTPQVAGVISELSPDRFRAVLDVLAEVVVQPVGKSGRIFNPERVQVNWR

SEQ ID NO: 4532 - protein, 452 aa, synthetic construct
MKAAIYIRVSTQEQVENYSIQAQTEKLTALCRSKDWDVYDIFIDGGYSGSNMNRPALNEMLSKLHEIDAVVVYRLDRLSRSQRDTITLIEEYFLKNSVEFVSLSETLDTSSPFGRAMIGILSVFAQLERETIRDRMVTGKIKRIEAGLPLTTAKGRTFGYDVIDTKLYINEEEAKQLRLIYDIFEEEQSITFLQKRLKKLGFKVRTYSCYNNWLTNDLYCGYVSYKDKVHVRGIHEPIISEEQFYRVQEIFARMGKNPNMNRDSASLLNSLVVCSKCGLGFVHRRKDTMSRGKKYHYRYYSCKTYKHTHELEKCGNKIWRADKLEELIINRVNNYSFASRNVDKEDELDSLSEKLKIEHAKKKRLFDLYINGSYEVSELDSMMNDIDAQINYYESRIEANEELRKNKKIQENLANRATVDYDSLEFREKQLYLKSLINKIYIDGEQVTIEWL

SEQ ID NO: 4533 - protein, 485 aa, synthetic construct
MTKKVAIYTRVSTTNQAEEGFSIDEQIDRLTKYAEAMGWQVGDTYTDAGFSGAKLERPAMQRLINDIENRAFDTVLVYKLDRLSRSVRDTLYLVKDVFTKNKIDFISLNESINTSSAMGSLFLTILSAINEFERENIKERMTMGKLGRAKSGKSMMWTKTAFGYYHNRKTGILEIVPLQATIVEQIFTDYLSGISLTKLRDKLNEGGHIGKDIPWSYRTLRQTLDNPVYCGYIKFKGSLFEGMHKPIIPYETYLKVQKELEERQQQTYERNNNPRPFQAKYMLSGMARCGYCGAPLRIVLGHKRKDGSRTMKYHCANRFPRKTKGVTVYNDNKKCDSGTYDLSNLENTVVDNLIGLQENNDSLLRIINGNNQPILDTSSFKKQISQIDKKIQKNSDLYLNDFITMDELKDRTDSLQAEKKLLKAKISENKFNDSTDVSELVKAQLGSIPINELSYDSKKKIVNNLVSKVVVTADNVDIIFKFQLA

SEQ ID NO: 4534 - protein, 485 aa, synthetic construct
MTKKVAIYTRVSTTNQAEEGFSIDEQIDRLTKYAEAMGWRVSDTYTDAGCSGAKLERPAMQRLINDIENEAFDTVLVYKLDRLSRSVRDTLYLVKDVFAKNKIDFISLNESIDTSSAMGSLFLTILSAINEFERENIKERMTMGKLGRAKSGKSMMWTKTAFGYYHNRKTGILEIVPLQATIVEQIFTDYLSGISLTKLRDRLNESGHIGKDIPWSYRTLRQTLGNPVYCGYIKFKDSLFEGMHKPIIPYETYLKVQKELEERQQQTYERNNNPRPFQAKYMLSGMARCGYCGAPLRIVLGRKRKDGSRTMEYHCANRFPRKTKGVTVYNDNKKCDSGTYDLSNLENTVIDNLIGFQENNDSLLKIINGNNQPILDTSSFKKQISQIDKKIQKNSDLYLNDFITMDELKDRTDGLQAEKRLLKAKISENKFNDSTDVFELVKTQLGSIPINELSYDDKKKIVNNLVSKVDVTADNVDIIFKFQLA

SEQ ID NO: 4535 - protein, 452 aa, synthetic construct
MKAAIYIRVSTQEQVGNYSIQAQTEKLTALCRSKDWDVYDIFIDGGYSGSNMNRPALNEMLSKLHEIDAVVVYRLDRLSRSQRDTTTLIEEYFLKNNVEFVSLSETLDTSSPFGRAMIGILSVFAQLERETIRDRMVMGKIKRIEAGLPLTTAKGRTFGYDVIDTKLYINEEEAKQLQLIYDIFEEEQSITSLQKRLKKLGFKVRTYNRYNNWLTNDLYCGYVSYKDKVHVKGIHEPIISEEQFYRVQEIFARMGKNPNMNRDSASLLNNLVVCGKCGLGFVHRRKDTMSGGKKYHYRYYSCKTYKHTHELEKCGNKTWRADKLEELVINRVNNYSLASRNVDKEDELDSLNEKLKIEHAKKKRLFDLYINGSYEVSELDSMMNDIDAQINYYESQIEANEELEENKKIQENLADLATVDFDNLEFREKQLYLKSLINKIYIDGEQVTIDWL

SEQ ID NO: 4536 - protein, 485 aa, synthetic construct
MTKKVAIYTRVSTTNQADEGFSIDEQIDRLTKYAEAMGWQVSDTYTDAGFSGAKLERPAMQRLINDIENKAFDTVLVYKLDRLSRSVRDTLHLVKDVFTKNKIDFISLNESIDTSSAMGSLFLTILSAINEFERENIKERMTMGKLGRAKSGKSMMWTKTAFGYYHNRKTGILEIVPLQATIVEQIFTGYLSGVSLTKLRDKLNESGHIGKDIPWSYRTLRQTLDNPVYCGYIKFKDSLFEGMHKPIIPYETYQKVQKELEERQQQTYDRNNNPRPFQAKYMLSGMARCGYCGAPLKIVLGRKRKDGSRTMKYHCANRFPRKTKGVTVYNGNKKCDSGTYDLSNLENAVIDILIGFQENNDSLLKIINSNNQPILDTSSFKKQISQIDKKIQKNSDLYLNDFITMDELKDRTDSLQAEKKLLKAKISEDKFNDSTEVFELVKTQLGSIPINELSYDNKKKIVNNLVSKVDVTADSVDIIFKFQLA

SEQ ID NO: 4537 - protein, 469 aa, synthetic construct
MSYTTPVRAAVYLRISEDRSGEQLGVARQREDCLKLCGQRKWVPVEYLDNDVSASTGKRRPAYEQMLADITAGKIAAVVAWDLDRLHRRPVELEAFMSLADEKRLALATVAGDVDLATPQGRLVARLKGSVAAHETEHKRARQRRAARQKAERGYPNWSKAFGYLPGPNGPEPDPRTAPLVKQAYADILAGASLGDVCRQWNDAGAFTITGRPWTTTTLSKFLRKPRNAGLRAYKGARYGPVDRDAIVGRAQWSPLVDEATFWAAQAVLDAPGRAPGRKSVRRHLLTGLAGCGKCGNRLAGSYRTDGQVVYVCKACHGVSILADNIEPILYHIVAERLAMPDAVDLLRREIHDAAEAETIRQELETLYGELDRLAVERAEGLLTARQVKISTDIVNAKITKLQTRQLDQERLRVLDGIPLGTPQVAGTIAELSPNRFRAVLDVLAEVVVQPVGKGGRIFNPDRVQVHWR

SEQ ID NO: 4538 - protein, 452 aa, synthetic construct
MKAAIYIRVSTQEQVENYSIQAQTEKLTALCRSKDWDVYDIFIDGGYSGSNMNRPALNEMLSRLHEIDAVVVYRLDRLSRSQRDTTTLIEEYFLKNNVEFVSLSETLDTSSPFGRAMIGILSVFAQLERETIRDRMVMGKIKRIEAGLPLTTAKGRTFGYDVIDTKLYINEEEAKQLRLIYDIFEEEQSITFLQKRLKKLGFKVRTYNRYNNWLTNDLYCGYVSYKDKVHVKGIHEPIISEEQFYRVQEIFTRMGKNPNMNRDSASLLNNLVVCSKCGLGFVHRRKDTMSGGKKYHYRYYSCKTYKHTHELEKCGNKTWRADKLEELIINRVNNYSFASRNVDKEDELDSLNEKLKIEHAKKRRLFDLYINGSYVVSELDSMMNDIDAQINYYESQIEANEELRKNKKIQENLADLAAVDFDSLEFREKQLYLKSLINKIYIDGEQVTIDWL

SEQ ID NO: 4539 - protein, 485 aa, synthetic construct
MTKKVAIYTRVSTTNQAEEGFSIDEQIDRLTKYAEAMGWQVSDTYTDAGFSGAKLERPAMQRLINDIENKAFDTVLVHKLDRLSRSVRDTLYLVKDVFTKNKIDFISLSESIDTSSAMGSLFLTILSAINEFERENIKERMTMGKLGRAKSGKSMMWTKTAFGYYHNRKTGILEIVPLQATIVEQIFTDYLSGISLTKLRDKLNESGHIGKDIPWSYRTLRQTLDNPVYCGYIKFKDSLFEGMHKPIIPYETYLKVQKELEERQQQTYERNNNPRPFQAKYMLSGMARCGYCGAPLRIVLGHKRKDGSRTMKYHCANRFPRKTKGVTVYNDNKKCDSGTYDLSNLENTVIDNLIGFQVNNDSLLKIINGNNQPNLDTSSFRKQISQIDKKIQKNSDLYLNDFITMDELKERTDSLQAEKKLLKAKISENRLNDSTDVFGLVKTQLGSIPINELSYDNKKKIVNNLVSKVDVTADNVDIIFRFQLA

SEQ ID NO: 4540 - protein, 452 aa, synthetic construct
MKAAIYIRVSTQEQVENYSIQAQTEKLTALCRSKDWDVYDIFVDGGYSGSNMNRPALNEMLSKLHEIDAVVVYRLDRLSRSQRDTTTLIEEYFLKNNVEFVSLSETLDTSSPFGRAMIGILSVFAQLERETIRDRMVMGKIKRIEAGLPLTTAKGRTFGYDVIDTKLYINEEEAKQLQLIYDIFEEEQSITLLQKRLKKLGFKVRTYNRYNNWLTNDLYCGYVSYKDKVHVKGIHEPIISEEQFHRVQEIFTRMGKNPNMNRDSASLLNNLVVCSKCGLGFVHRSKDTMSRGKKYHYRYYSCKTYKHTHELEKCGNKTWRADKLEELIINRVNNYSFASRNVDKEGELDSLNEKLKIEHAKKRRLFDLYINGSYEVSELDSMMNDIDAQISYYESQIEANEELKKNKKIQENLADLATVDFDSLEFREKQLYLKSLINKIYIDGEQVTIEWL

SEQ ID NO: 4541 - protein, 452 aa, synthetic construct
MKAAIYIRVSTREQVENYSIQAQTEKLTALCRSKDWDVYDIFVDGGYSGSNMNRPALNEMLSKLHEIDAVVVYRLDRLSRSQRDTITLIEEYFLKNNVEFVSLSETLDTSSPFGRAMIGILSVFAQLERETIRDRMVMGKIKRIEAGLPLTTAKGRTFGYDVIDTKLYINEEEARQLQLIYDIFEEEQSITFLQKRLKKLGFKVRTYNRYNNWLTNDLYCGYVSYKDKVHVKGIHEPIISEEQFYRVQEIFTRMGKNPNMNRDSASLLNNLVVCSKCGLGFVHRRKDIMSRGKKYHYRYYSCKTYKHIHELEKCGNKIWRADKLEELVINRVNNYSVASRNVDKGDELDSLNEKLRIEHAKKKRLFDLYINGSYDVSELDSMMSDIDAQISYYESQIEANEELKKNKKIQENLANLATVDFDSLEFREKQLYLKSLINKIYIDGEQVTIEWL

SEQ ID NO: 4542 - protein, 485 aa, synthetic construct
MTKKVAIYTRVSTTSQAEEGFSIDEQIDRLTKYAEAMGWQVSDTYTDAGFSGAKLVRPAMQRLINDIENKAFDTVLVYKLDRLSRSVRDTLYLVKDVFTKNKIDFISLNESIDTSSAMGSLFLTILSAINEFERENIKERMTMGKLGRAKSGKSMMWTKTAFGYYHNCKTGILEIVPLQATIVEQIFTDYLSGISLTKLRDKLNESGHIGKDIPWSYRTLRQTLDNPVYCGYIKFKDSLFEGMHTPIIPYETYLKVQKELEERQQQTYERNNNPRPFQAKYMLSGVARCGYCGAPLRIVLGHKRKDGSRTMKYHCANRFPRKTRGVTVYNDNKKCDSGTYDLSNLENTVIGNLVGFQENNDSLLKIINGNNQPILDTSSFKKQISQIDKRIQKNSDLYLNDFITMDELKDRTDSLQAEKKLLKAKISENKFNDSTDVFELVKSQLGSIPINELSYDNKKKIVNNLVSKVDVTADSVDIIFKFQLA

SEQ ID NO: 4543 - protein, 452 aa, synthetic construct
MKAAIYIRVSTQEQVGNYSIQAQTEKLTALCRSKDWDVYDIFIDGGYSGSNMNRPALNEMLSKLHEIDAVVVYRLDRLSRSQRDTTTLIEEYFLKNNVEFVSLSETLDTSSPFGRAMIGILSVFAQLERETIRDRMVMGKIKRIEAGLPLTTAKGRTFGYDVIDTKLYINEEEAKQLQLIYDIFEEVQSITFLQKRLKKLGFKVRTYNRYSNWLTNDLYCGYVSYKDKVHVKGIHEPIISEEQFYRVQEIFTRMGKNPNMNRDSASLLSNLVVCSKCGLGFVHRSKDTMSRGKKYHYRYYSCKTYKHTHELEKCGNKTWRADKLEELIINRVNNYSFASRNMVKEDELDSLNEKLKIEHAKKKRLFDLYINGSYEVSELDSMMNDIDAQINHYESQIEANEELKKNKKIQENLADLATVDFDSLEFREKQLYLKSLINKIYIDGEQVTIEWL

SEQ ID NO: 4544 - protein, 485 aa, synthetic construct
MTKKVAIYTRVSTTNQAEEGFSIDEQIDRLTKYAEAMGWQVSDTYTDAGFSGAKLERPAMQRLINDIENKAFDTVLVYKLDRLSRSVRDTLYLVKDAFTKNKIDFISLNESIDTSSAMGSLFLTILSAINEFERENIKERMTMGKLGRAKSGKSMMWTKTAFGYYHNRKTGILEIVPLQATIVEQIFTDYLSGISLTKLRDKLNESGHIGKDIPWSYRTLRQTLDNPVYCGYIKFKGSLFEGMHKPIIPYETYLKVQKELEERQQQTYERNNNPRPFQAKYMLSGMARCGYCGAPLRIVLGHKRKDGSRTMKYHCANRFPRKTKGVTVYNDNKKCDSGTYDLSNLENTVIDNLIGFQENNDSLLKIINGNNQPILDTSSFKEQISQIDKKIQKNSDLYLNDFITMDELKDRTDSLQAEKKLLKAKISENKFNDSTDVFELVKAQLGSIPINELSYDNKKKIVNNLVSKVDVTADNVDIIFKFQLA

SEQ ID NO: 4545 - protein, 452 aa, synthetic construct
MKAAIYIRVSTREQVENYSIQAQTEKLTALCRSKDWDVYDIFIDGGYSGSNMNRPALNEMLGKLHEIDAVVVYRLDRLSRSQRDTITLIEEYFLKNNVEFVSLSETLDTSSPFGRAMIGILSVFAQLERETIRERMVMGKIKRIEAGLPLTTAKGRTFGYDVIDTKLYINEEEAKQLQLIYDIFEEEQSITFLQKRLKKLGFKVHTYNRYNNWLTNDLYCGYVGYKDKVHVKGIHEPIISEEQFYRVQEIFTRMGKNPNMNRGSASLLNNLVVCSKCGLGFVHRRKDAMSRDKKYHYRYYSCKTYKHIHELEKCGNKIWRADKLEELIINRVNNYSFASRNVDKEDELNSLNEKLKTEHAKKRRLFDLYINGSFEVSELDSMMNDIDAQINYYESQIEANEELKKSKKIQENLADLATVDFGSLEFREKQLYLKSLINKIYIDGERVTIEWL

SEQ ID NO: 4546 - protein, 452 aa, synthetic construct
MKAAIYIRVSTREQVENYSIQAQTEKLTALCRSKDWDVYDIFIDGGYSGSNMNRPALNEMLSKLHEIDAVVVYRLDRLSRSQRDTITLIEEYFLKNNVEFVSLSETLDTSSPFGRAMIGILSVFAQLERETIRDRMVMGKIKRIEAGLPLTTAKGRTFGYDVIDTKLYINEEEAKQLQLIYDIFEEEQSITFLQKRLRKLGFKVRTYNRYNNWLTNDLYCGYVSYKDKVHVKGIHEPIISEEQFYRVQGIFARMGKNPNMNRDSASLLSNLVVCSKCGLGFVHRRKDTTSRGKKYHYRYYSCKTYKHTHELEKCGNKIWRADILEELIISRVNNYSFASRNVDKEDELDSLNEKLKIEHAKKKRLFDLYINGRYGVSELDSMMNDIDAQINYYESQIEANEELRKSKKIQENLADLATVDFDSLEFRKKQLYLKSLINKIYIDGEQVTIEWL

SEQ ID NO: 4547 - protein, 452 aa, synthetic construct
MKAAIYIRVSTREQVENYSIQAQTEKLTALCRSKDWDVYDIFIDGGYSGSNMNRPALNEMLSKLHEIDAVVVYRLDRLSRSQRDTITLIEEYFLKNNVEFVSLSETLDTSSPFGRAMIGILSVFAQLERETIRDRMVMGKIKRIEAGLPLTTAKGRTFGYDVIDTKLYINEEEAKQLQLIYDIFEEEQSITFLQKRLKKLGFKVRTYNCYNNWLTNDLYCGYVSYKDKVHVKGIHEPIISEEQFYRVQEIFTRMGKNPNMNRDSASLLNNLVVCSKCGLGFVHRRKDAMSRDKKYHYRYYSCKTYKHIHELEKCGNKIWRADKLEELVINRVNSYSLASRNVDKEDELDSLNEKLKIEHAKKKRLFDLYINGNYEVSELDSMMNDIDAQINYYESQIEANEELKKNKKVQDNLAYLATVDFDSLEFREKQLYLKSLINKIYIDGEQVTIEWL

SEQ ID NO: 4548 - protein, 452 aa, synthetic construct
MKAAIYIRVSTREQVENYSIQAQTEKLTALCRSKDWDVYDIFIDGGYSGSNMNRPALNEMLSKLHEIDAVVVYRLDRLSRSQRDTITLIEEYFLKNNVEFVSLSETLDTSSPFGRAMIGILSVFAQLERETIRDRMVMGKIKRIEAGLPLTTAKGRTFGYDVIDTKLYINEEEAKQLQLIYDIFEEEQSITFLQKRLKELGFKVRTYNCYNNWLTNDLYCGYVSYKDKVHVKGIHEPIISEEQFYRVQEIFTRMGKNPNMNRGSASLLNNLVVCSKCGLGFVHRRKDVMSRDKKYHYRYYSCKTYKHIHELEKCGNKIWRADKLEELIINRVNDYSLASRNVDKEDELDSLSEKLKIEHARKKRLFDLYINGSYEVSELDSMMNDIDAQINYYESQIEANEELKKNKKIQEDLAHLAAVDFDSLEFREKQLYLKSLINKIYIDGEQVTIEWL

SEQ ID NO: 4549 - protein, 452 aa, synthetic construct
MKAAIYIRVSTREQVENYSIQAQTEKLTALCRSKDWDVYDIFIDGGYSGSNMNRPALNEMLSKLHDIDAVVVYRLDRLSRSQRDTITLIEEYFLKNNVEFVSLSETLDTSSPFGRAMIGILSVFAQLERETIRDRMVMGKIKRVEAGLPLTTAKGRTFGYDVIDTKLYINEEEAKQLQLIYDIFEEEQSITFLQKRLKKLGLKVRSYSRYNNWLTNDLYCGYVSYKDKVHVKGIHEPIISEEQFYRVQEIFTRMGKNPNMNRDSASLLSGLVVCSKCGLGFVHRRKDTTSRGKKYHYRYYSCKTYKHIHELEKCGNKIWRADKLEELIINRANNYSFASRNVDKEDELGSLNEKLKIEHAKRKRLFDLYVNGSYEVSELDSMMSDIDAQINYYESQIEAYEELKKNKKIQENLANLATVDYDSLEFREKQLYLKSLINKIYIDGEQVTIEWL

SEQ ID NO: 4550 - protein, 452 aa, synthetic construct
MKAAIYIRVSTQEQVENYSIQAQTERLTALCRSKDWDVYDIFIDGGYSGSNMNRPALNEMLSKLHEIDAVVVYRLDRLSRSQRDTTTLIEEYFLKNNVEFVSLSETLDTSSPFGRAMIGILSVFAQLERETIRDRMVMGKIKRIEAGLPLTTAKGRTFGYDVIDTKLYINEGEARQLRLIYDIFEEEQSITSLQKRLKKLGFKVRAYNRYNNWLTNDLYCGYVSYKDKVHVKGIHEPIISEEQFYRVQEIFTRMGKKPNMNRDSASLLNNLVVCSKCGLSFVHRSKDTMSRGKKYHYRYYSCKTYKHTHELEKCGNKTWRADKLEELIISRVNNYSFASRNVDKEDELDSLNEKLKIEHAKKKRLFDLYINGSYEVSELDSMMNDIDAQINYYESQIEANEELRKNRKIQENLADLATVDFDGLEFRDKQLYLKSLINKIYIDGERVTIEWL

SEQ ID NO: 4551 - protein, 452 aa, synthetic construct
MKAAIYIRVSTREQVENYSIQAQTEKLTALCRSKDWDVYDIFIDGGYSGSNMNRPALNEMLGKLHEIDAVVVYRLDRLSRSQRDTITLIEEYFLKNNVEFVSLSETLDTSSPFGRAMIGILSVFAQLERETIRDRMVMGKIKRIEAGLPLTTAKGRTFGYDVIGTKLYINEEEAKQLQLIYDIFEEEQSITFLQKRLKKLGFKVRTYSCYNNWLTNDLYCGYVSYKDKVHVKGIHEPIISEEQFYRVQEIFTRMGKNPNMNRDSASLLNNLVVCSKCGLGFVHRRKDAMSRDKKYHYRYYSCKTYKHIHELEKCGNKIWRADKLEELIISRVNNYSLASRNVDKEDELDSLNEKLQIEHAKKKRLFDLYINGSYEVSELDSMMSDIDAQISYYESQIEANEELKRNKKIQENLADLATVDFDSLEFREKQLYLKSLINKIYIDGEQVTIEWL

SEQ ID NO: 4552 - protein, 485 aa, synthetic construct
MTKKVAIYTRVSTANQAEEGFSIDEQVDRLTKYAEAMGWQVCDTYTDAGFSGAKLERPAMQRLINDIGNKAFDTVLVYKLDRLSRSVRDTLYLVKDVFTKNKIDFISLNESIDTSSAMGSLFLTILSAINEFERENIKERMTMGKLGRAKSGKSMMWTKTAFGYNHNRKTGILEIVPLQATIVEQIFTDYLSGTSLTKLRDKLNESGHIGKEIPWSYRTLRQTLDNPVYCGYIKFKDSLFEGMHKPIIPYETYLKVQKALEERQQQTYERNNNPRPFQAKYMLSGMARCGYCGAPLKIVLGHKRKDGSRTMKYHCANRFPRKTKGITVYNDNKKCDSGTYDLSNLEDTVIGNLIGLQENNGSLLKIINGNNQPILDTSSFKKQISQIDKKIQKNSDLYLNDFITMDELKDRTDSLQAEKKRLKAKISENRFNDSTDVFELVKTQLGSIPINELSYDNKKKIVNNLVSKVDVTADNVDIIFKFQLA

SEQ ID NO: 4553 - protein, 452 aa, synthetic construct
MKAAIYIRVSTREQVENYSIQAQTEKLTALCRSKDWDVYDIFIDGGYSGSNMNRPALNEMLSRLHEIDAVVVYRLDRLSRSQRDTITLIEEYFLKNNVEFVSLSETLDTSSPFGRAMIGILSVFAQLERETIRDRMVMGKIKRIEAGLPLTTAKGRTFGYDVVDTKLYINEEEAKQLQLIYDIFEEEQSIAFLQKRLKKLGFKVHTYSRYNNWLTNDLYCGYVSYKDKVHVKGIHEPIISEEQFYRVQEIFTRMGKNPNMNRDSASLLSNLVVCSKCGLGFVHRRKDTMSRGKKYHYRYYSCKTYKHTHELEKCGNKIWRADKLEELIINRVNNYSFANRNADKGDELDSLNEKLKIEHAKKKRLFDLYINGSYNVSELDSMMSDIDAQINYYESQIEANGELKKNKKIQENLADLATVDFDSLEFREKQLYLKSLINKIYIDGEQVTIEWL

SEQ ID NO: 4554 - protein, 452 aa, synthetic construct
MKAAIYIRVSTQEQVGNYSIQAQTEKLTALCRSKDWDVYDIFIDGGYSGSNMNRPALNEMLSKLHEIDAVVVYRLDRLSRSQRDTTTLIEEYFLKNNVEFVSLSETLDTSSPFGRAMIGILSVFAQLERETIRDRMVMGKIKRIEAGLPLTTAKGRTFGYDVIDTKLYINEEEAKQLQLIYDIFEEEQSITFLQKRLKKLGFRVRTYNRYNSWLTNDLYCGYVSYKDKVHVKGIHEPIISEEQFYRVQEIFTRMGKNPNVNRDSASLLNNLVVCSKCGLGFVHRSKDTMSRGKKYHYRYYSCKTYKHTHELEKCGNKTWRADKLEELIINRVNNYSFASRNVDKEDELDSLNEKLKIEHAKKKRLFDLYINGSYEVSELDSMMNDIDAQINYYESQIEANEELKKNKKIQENLADLATVDFDSLEFREKQLYLKSLINKIYIDGEQVTIEWL

SEQ ID NO: 4555 - protein, 485 aa, synthetic construct
MTKKVAIYTRVSTTNQAEEGFSIDEQVDRLTKYAEAMGWQVSDTYTDAGFSGAKLERPAMQRLINDIENKAFDTVLVYKLDRLTRSVRDTLYLVKDVFTKNKIDFISLNESIDTSSAMGSLFLTILSAINEFERENIRERMTMGKLGRAKSGKSMMWTKTAFGYYHNRKTGILEIVPLQATIVEQIFTDYLSGISLTKLRDKLNESGHIGKDIPWSYRTLRQTLDNPVYCGYIKFKGSLFEGMHKPIIPYETYLKVQKELEERQQQAYERNNNPRPFQAKYMLSGMARCGYCGAPLRIVLGHKRKDGSRTMRYHCANRFPRKTKGITVYNDNKKCDSGTYDLSNLENTVIDSLIGFQEDDDSLLRIINGNNQPILDTSSFKEQISQIDKKIQKNSDLYLNDFITMDELKDRTDSLQAEKKLLKAKISENKFNDSTDVLELVKTQLGSIPINELSYDSKKKIVNNLVSKVDVTADNVDIIFKFQLA

SEQ ID NO: 4556 - protein, 452 aa, synthetic construct
MKAAIYIRVSTQEQVGNYSIQAQTEKLTALCRSKDWDVYDIFIDGGYSGSNMNRPALNEMLSKLHEIDAVVVYRLDRLSRSQRDTTTLIEEYFLKNNVEFVSLSETLDTSSPFGRAMIGILSVFAQLERETIRDRMVMGKIKRIEAGLPLTTAKGRTFGYDVIDTKLYINEEEAKQLQLIYDIFEEEQSITFLQKRLKKLGFKVRTYNRYSSWLTNDLYCGYVSYKDKVHVKGIHEPIISEEQFYRVQEIFTRMGKNPNMNRDSASLLSNLVVCSKCGLGFVHRSKDTMSRGKKYHYRYYSCKTYKHTHELEKCGNKTWRADKLEELIINRVNNYSFASRNADKEGELDSLNEKLKIEHAKKRRLFDLYINGGYEASELDSMMNDIDAQINYYESQIEANEEQKKNKKIQENLADLATVDFGSLEFREKQLYLKSLINKIYIDGEQVTIEWL

SEQ ID NO: 4557 - protein, 469 aa, synthetic construct
MSYTTPVRAAVYLRISEDRSGEQLGVARQREDCLKLCDQRKWVPVEYLDNDVSASTGKRRPAYEQMLADITAGKIAAVVAWDLDRLHRRPIELEAFMSLADEKRLALATIAGDVDLATPQGRLVARLKGSVAAHETEHKKARQRRAARQKAERGHPNWSKAFGYLPGPNGPEPDPRTAPLVKQAYADILAGASLGDVCRRWNDAGAFTITGRPWATTTLSKFLRKPRNAGLRAYKGARYGPVDRDAIVGKAQWSPLVDEATFWAAQAVLDAPGRAPGRKSVRRHLLTGLAGCGKCGNHLAGSYRADGRVVYVCKACHGVAILADNIEPILYHIVAERLAMPDAEDLLRREIHDGAEAETIRLELETLYGELDRLAVERAEGLLTARQVKISTDIVNAKITKLQARQLDQERLRVFDGIPLGTPQVAGKIAELSPDRFRAVLDVLAEVVVQPVGKSGRIFNPERVQVNWR

SEQ ID NO: 4558 - protein, 452 aa, synthetic construct
MKAAIYIRVSTQEQVENYSIQAQTEKLTALCRSKDWDVYDIFIDGGYSGSNMNRPALNEMLSKLHEIDAVVVYRLDRLSRSQRDTTTLIEEYFLKNNVEFVSLSETLDTSSPFGRAMIGILSVFAQLERETIRDRMVMGKIKRIEAGLPLTTAKGRTFGYDVIDTRLYINEEEAKQLRLIYDIFEEEQSITFLQKRLKKLGFKVRTYNRYNNWLTNDLYCGYVSYKDKVHVKGIHEPIISEEQFYRVQEIFARMGKNPNMNRDNASLLSNLVVCSKCGLGFVHRSKDTMSRGKKYHYRYYSCKTYKHTHELEKCGNKTWRADKLEELIISRVNNHSFASRNVDKEDELDSLNEKLKIEHARKKRLFDLYINGGYEVSELDSMMNDIDAQINYYESRIEANEELKKNKKIQENLADLATVDFDSLEFREKQLYLKSLINKIYIDGERVTIEWL

SEQ ID NO: 4559 - protein, 469 aa, synthetic construct
MSYTTPVRAAVYLRISEDRSGEQLGVARQREDCLKLCDQRKWVPVEYLDNDVSASTGKRRPAYEQMLADITAGKIAAVVAWDLDRLHRRPIELEAFMSLADEKCLALATVAGDVDLATPQGRLVARLKGCVAAHETEHKKVRQRRAARQKAERGYPNWSKAFGYLPGPNGPEPDPRTAPLVRQAYADILAGASLGDVCRQWNDAGAFTITGRPWTTTTLSKFLRKPRNAGLRAYKGARYGPVDRDAIVGKARWSPLVDEATFWAAQAVLDAPGRAPGRKSVRRHLLTGLAGCGKCGNHLAGSYRTDGRVVYVCKACHGVAILADNIEPILYHIVAERLAMPDAVDLLRCEIHDAAEAETIRQELETLYGELDRLAVERAEGLLTARQVKISTDIVNAKITKLQASQLDQERLRVLDGIPLGTPQVAGTIAELSPDRFRAVLDVLAKVVVQPVGKRGRIFNPERVQVNWR

SEQ ID NO: 4560 - protein, 485 aa, synthetic construct
MTKKVAIYTRVSTTNQAEEGFSIDEQIDRLTKYAEAMGWQVSDTYTDAGYSGAKLERPAMQRLINGIENKAFDTVLVYKLDRLSRSVRDTLYLVKDVFTKNEIDFISLSESIDTSSAMGSLFLTILSAINEFERENIKERMTMGKLGRAKSGKSMMWTKTAFGYYHNRKTGILEIVPLQATIVEQIFTDYLSGISLTKLRDKLNESGHIGKDIPWSYRTLRQTLDNPVYCGYIKFKDSLFEGMHKPIIPYETYLKVQKELEERQQQTYERNNNPRPFQAKYMLSGMARCGYCGAPLKIVLGHKRKDGSRTMKYHCANRFPRKTKGVTVYNDNKKCDSGTYDLSDLENTVIDNLIGFQENNDSLLKIINGNNQPILDTSSFREQISQIDKKIQKNSDLYLNDFITMDELKVRTDSLQAEKRLLKAKISENKFNNSTDVFELVKTQLGSIPINELSYDNKKKIVNNLVSKVDVTADNVDIIFKFQLA

SEQ ID NO: 4561 - protein, 469 aa, synthetic construct
MSYTTPVRAAVYLRISEDRSGEQLGVARQREDCLKLCDQRKWVPVEYLDNDVSASTGKRRPAYEQMLADITAGKIAAVVAWDLDRLHRRPIELEAFMSLADEKRLALATVAGDVDLATPQGRLVARLKGSVAAHETEHKKARQRRAARQKAERGYPNWSKAFGYLPGPNGPEPDPRTAPLVKRAYADILAGASLGDVCRQWNDAGAFTITGRPWATTTLSKFLRKPRNAGLRTYKGARYGPVDRDAIVGKAQWSPLVDEATFWAAQAVLDAPGRAPGRKSVRRHLLTGLAGCGKCGNHLAGSYRTDGRVVYVCKACYGIAILADNIEPILYHIVAERLAMPDAVDLLRREIHDAAEAETIRLELETLCGELDRLAVERAEGLLTARQVKISTDIVNAKITKLRARQLDQERLRVLDGIPLGTPQVAGMIAELSPDRFRAVLDVLAEVVVQPVGKRGGISDPERVQVNWR

SEQ ID NO: 4562 - protein, 452 aa, synthetic construct
MKAAIYIRVSTREQVENYSIQAQTEKLTALCRSKDWDVYDIFVDGGYSGSNMNRPALNEMLSKLHEIDAVVVYRLDRLSRSQRDTITLIEEYFLKNNVEFVSLSETLDTSSPFGRAMIGILSVFAQLERETIRDRMVMGKIKRIEAGLPLTTAKGRTFGYDVIDTRLYINEEEAKQLRLIYDIFEEEQSITFLQKRLKKLGFKVRTYSRYNNWLTNDLYCGYVSYKDKVRVKGIHEPIISEEQFHRVQEIFARMGKNPNMNRDSASLLNNLVVCSKCGLGFVHRRKDTVSRGKKYHYRYYSCKTYKHNHELEKCGNKIWRADKLEELIINRVNNYSFAGRNADKEDELDSLNEKLKTEHAKKKRLFDLYISGSYEVSELDSMMNDIDAQINYYESQIEANEELKKNKRIQENLANLATVDFDSLEFREKQLYLKSLINKIYIDGEQVTIEWL

SEQ ID NO: 4563 - protein, 485 aa, synthetic construct
MTKKVAIYTRVSTTNQAEEGFSIDEQIDRLTKYAEAMGWQVSDTYTDAGFSGAKLERPAMQRLISDIENKAFDTVLVYKLDRLSRSVRDTLYLVKDVFTKNKIDFISLNESINTSSAMGSLFLTILSAINEFERENIKERMTMGKLGRAKSGKSMMWTKTAFGYYHNRKTGILEIVPLQATVVEQIFTDYLSGISLTKLRDKLNESGHIGKDIPWSYRTLRQTLDNPVYCGYIKYKDSLFEGMHKPIIPYETYLKVQKELEERQQQTYERNNNPRPFQAKYMLSGMARCGYCGAPLRIVLGRKRKDGSRTMKYHCANRFPRKTKGVTVYNDNEKCDSGTYDLSNLENTVIDNLIGFQENNDSLLKIINGNNQPTLDTSSFRKQISQIDKKIQKNSDLYLNDFITMDELKERTDSLQAEKKLLKAKISKNKFNDSTDVFELVKTQLGSIPINELSYDNKKKIVNNLVSKVDVTADNVDIIFKFRLA

SEQ ID NO: 4564 - protein, 469 aa, synthetic construct
MCYTTPVRAAVYLRISEDRSGEQLGVARQREDCLKLCGQRKWEPVEYLDNDVSASTGRRRPAYEQMLADITAGKIAAVVAWDLDRLHRRPIELEAFMSLADEKRLALATVAGDVDLATPQGRLVARLKGSVAAHETEHKKARQRRAARQKAERGHPNWSKAFGYLPGPNGPEPDPRTAPLVEQAYADILAGASLGDVCRQWNGAGAFTITGRPWTTTALSKFLRKPRNAGLRAYKGAPYGPVDRDAIVGKAQWSPLVDEATFWAAQAVLDAPGRAPGRKSVRRHLLTGLAGCGKCGNYLAGSYRTDGRVVYVCKACHGVAILADNIEPILYHIVAERLAMPDAVDLLRREIHDAAEAEAIHLELETLYGELDRLAVERAEGLLTARQVKISTDIVSAKITKLQAHQQDQERLRVLDGIPLGTPQVAGVIAELSPNRFRAVLDVLAEVVVQPVGKSGRTFNPERVQVNWR

SEQ ID NO: 4565 - protein, 452 aa, synthetic construct
MKAAIYIRVSTQEQMENYSIQAQTEKLTALCRSKDWDVYDIFIDGGYSGSNMNRPALNEMLSKLHEIDAVVVYRLDRLSRSQRDTTTLIEEYFLKNNVEFVSLSETLDTSSPFGRAMIGILSVFAQLERETIRDRMVMGKIKRIEAGLPLTTAKGRTFGYDVIDTKLYINEEEAKQLRLIYDIFEEEQSITSLQKRLKKLGFKVRTYNRYNNWLTNDLYCGYVSYKDKVHVKGIHEPIISEEQFYRVQEIFTRMGKNPNMNRDSASLLSNLVVCSKCGLGFVHRSKDTMSRGKKYHYRYYSCKTYKHTHELEKCGNKTWRADKLEELIIDRVNNYSFASRNVDKVDELDSLNEKLKIEHAKKKRLFDLYINGSYEVSELDSMMDDIDAQINYYESQIEANGELRKNKKIQENLAGLATVDFDSLGFREKQLYLKSLINKIYIDGEQVTIEWL

SEQ ID NO: 4566 - protein, 452 aa, synthetic construct
MKAAIYIRVSTQEQVGNYSIQAQTEKLTALCRSKDWDVYDIFIDGGYSGSNMNRPALNEMLSKLHEIDAVVVYRLDRLSRSQRDTTTLIEEYFLKNNVEFVSLSETLDTSSPFGRAMIGILSVFAQLERETIRDRMVMGKIKRIEAGLPLTTAKGRTFGYDVIDTKLYINEEEAKQLQLIYDIFEEEQSITSLQKRLKKMGFKVRTYNRYNNWLTNDLYCGYVSYKDRVHVKGVHEPIISEEQFYRVQEIFTRMGKNPNMNRDSASLLNNLVVCSKCGLGFVHRRKDTMSGGKKYRYRYYSCKTYKHTHELEKCGNKTWRADKLEELIINRVNNYSFASRNADKGDELDSLNEKLKIEHARKKRLFDLYINGSYEVSELDSMMNDIDAQINYYESQIEANEGLRKNKKIQENLADLATVDFDSLEFREKQQYLKSLINKIYIDGEQVTIEWL

SEQ ID NO: 4567 - protein, 485 aa, synthetic construct
MTKKVAIYTRVSTTNQAEEGFSIDEQIDRLTKYAEAMGWQVSDTYTDAGISGAKLERPAMRRLINDIENKAFDTVLVYKLDRLSRSVRDTLYLVKDVFTRNKIDFISLNESIDTSSAMGSLFLTILSAINEFERENIKERMTMGKLGRAKSGKSMMWTKTAFGYYHNRKTGILEIVPLQATIVEQIFTDYLSGISLTKLRDKLNESGHIGKDIPWSYRTLRQTLDNPVYCGYIKFRGNLFEGMHKPIIPYETYLKVQKELEERQQQTYERNNNPRPFQARYMLSGTARCGYCGAPLRIVLGHKRKDGSRTMKYHCANRFPRRTKGVTVYNDNKKCDSGTYDLSNLENTVIDYLIGFQEDNDSLLKIINGNNQPILDTSSFKKQISQIDKKIQKNSDLYLNDLITMDELKNRTDSLQAEKKLLKAKVSENKFNDSTDVFELVKTQLGSIPINELSYDNKKKIVNNLVSKVDVTADNVDIIFKFQLV

SEQ ID NO: 4568 - protein, 469 aa, synthetic construct
MCYTTPVRAAVYLRISEDRSGEQLGVARQREDCLKLCDQRKWVPVEYLDNDVSASTGKRRPAYEQMLADITAGKIAAVVAWDLDRLHRRPIELEAFMSLADEKRLALATVAGDVDLATPQGRLVARLKGSVAAHETEHKKARQRRAARQKAERGLPNWSRAFGYLPGPNGPEPDPRTAPLVKQAYADILAGASLGDVCRQWNDAGAFTITGRPWTTTTLSKFLRKPRNAGLRAYKGARYGPVDRDAIVGKAQWSPLVDEATFWAVQAVLDAPGRAPGRKSVRRHLLTGLAGCGKCGNRLAGSYRTDGRVVYVCKACHGIAILADNIVPILYRIVAERLAMPDAVCLLRREIHDAAEAETIRLGLETLYGELDRLAVERAEGLLTARQVKISTDIVNAKIAKLQARQLDQERLRVFGGIPLGTPQVAGMIAELSPDRFRAVLDVLVEVVVQPVGKSGRIFNPERVQVNWR

SEQ ID NO: 4569 - protein, 452 aa, synthetic construct
MKAAIYIRVSTREQVENYSIQAQTEKLTALCRSKDWDVYDIFVDGGYSGSNMNRPALNEMLSKLHEIDAVVVYRLDRLSRSQRDTITLIEEYFLKNNVEFVSLSETLDTSSPFGRAMIGILSVFAQLERETIRDRMVMGKIKRIEAGLPLTTAKGRTFGYDVIDTKLYINEEEAKQLQLIYDIFEEEQSITFLQKRLKQLGFRVRTYSCYNNWLTNDLYCGYVSYKDKVHVKGIHEPIISEEQFYRVQEIFTRMGKNPNMNRDSASLLNNLVVCGKCGLGFVHRRKDAMSRDKKYHYRYYSCKTYKHIHELEKCGNKIWRADKLEELIINRVNNYSLASRNVDKEDELDSLNEKLKIEHAKKKRLFDLYINGRYEVSELDSMMNDIDAQINYYESQIEANEELKKNKQIQENLANLATVDFDSLEFREKQRYLKSLINKIYIDGEQVTIEWL

SEQ ID NO: 4570 - protein, 452 aa, synthetic construct
MKAAIYIRVSTQEQVGNYSIQAQTEKLTALCRSKDWDVYDIFIDGGYSGSNMNRPALNEMLSKLHEIDAVVVYRLDRLSRSQRDTTTLIEEYFLKNNVEFVSLSETLDTSSPFGRAMIGILSVFAQLERETIRDRMVMGKIKRIEAGLPLTTAKGRTFGYDVIDTKLYINEEEAKQLRLIYDIFEEEQSITSLQKRLKKLGFKVRTYNRYSNWLTNDLYCGYVSYKDKVHVKGIHEPIISEEQFYRVQEIFTRMGKNPNMNRGSASLLNNLVVCSKCGLAFVHRSKDTMSRGKKYHYRYYSCKTYKHTHELEKCGNKTWRADKLEELIINRVNNYSFASRNVDKEDELDSLNEKLKIEYARKKRLFDLYINGSYEVSELDSMMNDIDAQINYYESQIEANEELKKNKKIQENLADLATVDFDSLEFREKQLYLKSLINKIYIDGEQVTIEWL

SEQ ID NO: 4571 - protein, 452 aa, synthetic construct
MKAAIYIRVSTQEQVGNYSIQAQTEKLTALCRSKDWDVYDIFIDGGYSGSNMNRPALNEMLSKLHEIDAVVVYRLDRLSRSQRDTTTLIEEYFLKNNVEFVSLSETLDTSSPFGRAMIGILSVFAQLERETIRDRMVMGKIKRIEAGLPLTTAKGRTFGYDVIGTKLYINEEEAKQLQLIYDIFEEEQSITFLQKRLKKLGFKVRTYNRYNNWLTNDLYCGYVSYKDKVHVKGIHEPIISEEQFYRVQEIFTRMGKNPNMNRDSASLLNNLVVCSKCGLSFVHRSKDTMSGGKKYHYRYYSCKTYKHAHELEKCGNKTWRADKLEELIINRVNNYSFASRNMAKEDELDSLNEKLKIEHAKKKRLFDLYINGSYEMGELDNMMNDIDAQINYYESQIEANEELRRNKKIQENLADPATVDFDSLEFREKRLYLKSLINKIYIDGEQVTIEWL

SEQ ID NO: 4572 - protein, 452 aa, synthetic construct
MKAAIYIRVSTREQVENYSIQAQTEKLTALCRSKGWDVYDIFIDGGYSGSSMNRPALNEMLSKLHEIDAVVVYRLDRLSRSQRDTITLIEEYFLKNNVEFVSLSETLDTSSPFGRAMIGILSVFAQLERETIRDRMVMGKVKRIEAGLPLTTAKGRTFGYDVIDTKLYINEEEAKQLQLIYDIFEEEQSITFLQKRLKKLGFKVRTYNRYNNWLTNDLYCGYVSYKDKVHVKGIHEPIISEEQFYRVQEIFTRMGKNPNMNRDSASLLNNLVVCSKCGLGFVHRRKDIMSRGKEYHYRYYSCKTYKHIHELEKCGNKIWRADKLEELIINRVNNYSLASRNVDKEDELDSLSEKLKIEHAKKKRLFDLYINGSYEVSELDSMMNDIDAQINYYETQIEANEELRKSKKIQENLADLATVDFDSLGFREKQLYLKSLINKIYIDGEQVTIEWL

SEQ ID NO: 4573 - protein, 485 aa, synthetic construct
MTKKVAIYTRVSTTNQAEEGFSIDEQIDRLTKYAEAMGWQVSDTYTDAGFSGAKLERPAMQRMINDIENKAFDTVLVYKLDRLSRSVRDTLYLVKDVFTKNKIDFISLNESINTSSAMGSLFLTILSAINEFERENIKERMTMGKLGRAKSGKSMMWTKTAFGYYHNRKTGILEIVPLQATIVEQIFTDYLSGISLTKLRDKLNESGHIGKDIPWSYRTLRQTLDNPVYCGYIKFKDSLFEGMHKPIIPYETYLKVQKELRERQQQTYERNNNPRPFQAKYMLSGMARCGYCGAPLKIVLGHKRKDGSRAMKYHCTNRFPRKTKGITVYNDNKKCDSGAYDLSNLENAVIDNLIGFQENNDSLLKIINGDNQLILDTCNFKKQISQIDKKIQKNSDLYLNDFITMDELKDRTDSLQAEKKLLKAKISENKFNDSTDVFEQVKTQLGSIPINELSYDNKKKIVNNLVSKVDVTADNVDIIFKFQLA

SEQ ID NO: 4574 - protein, 452 aa, synthetic construct
MKAAIYIRVSTQEQVENYSIQAQTEKLTALCRSKDWDVYDIFIDGGYSGSNMNRPALNEMLSKLHEIDAVVVYRLDRLSRSQRDTTTLIEEYFLKNNVEFVSLSETLDTSSPFGRAMIGILSVFAQLERETIRDRTVMGKIKRIESGLPLTTAKGRTFGYDVIDTKLYINEEEAKQLQLIYDIFEEEQSITSLQKRLKKLGFKVRTYNRYNSWLTNDLYCGYVSYKDKVRVKGIHEPIISEEQFYRVQEIFTRMGKNPNMNRDSASLLNSLVVCSKCGLSFVHRSKDTMSRGKKYHYRYYSCKTYKHTHELEKCGNKTWRADKLEELVINRVNNYSFANRNVDKEDELDSLSEKLEAERAKKKRLFDLYINGSYEVSELDSMMNDIDAQINYYESQIEANEELRKNRKIQENLADLATVDFDGLEFRDKQLYLKSLINKIYIDGEQVTIEWL

SEQ ID NO: 4575 - protein, 485 aa, synthetic construct
MTKKVAIYTRVSTTNQADEGFSIDEQTDRLTKYAEAMGWRVSDTYTDAGFSGAKLGRPAMQRLINDIENKTFDTVLVYKLDRLSRSVRDTLYLVKDVFTKNRIDFISLNESIDTSSTMGSLFLTILSAINEFERENIKERMTMGKLGRAKSGKSMMWAKTAFGYYHNRKTGILEIVPLQATIVEQIFTDYLSGISLTKLRDKLNESGHIGKDIPWSYRTLRQTLDNPVYCGYIKFKGSLFEGMHKPIIPYETYLKVQKELEERQQQTYERNNNPRPFQAKYMLSGMVRCGYCGAPLRIVLGHKRKDGSRTMKYHCANRFPRKTKGVTVYNDNKKCDSGTYDLSNLENTVIDNLIGFQENNDSLLRIINGDNQPILDTSSFEKQISQIDKKIQKNSDLYLNDFITMDELKNRTDSLQAEKKLLKAKISENKFNDSTDVFELVKTQLGSIPINELSYDNKKKIVNNLVCKVDVTADNVDIIFKFQLA

SEQ ID NO: 4576 - protein, 469 aa, synthetic construct
MSYTTPVRAAVYLRISEDRSGEQLGVARQREDCLKLCDQRKWVPVEYLDNDVSASTGKRRPAYEQMLADITAGKIAAVVAWDLDRLHRRPIELEAFMSLADEKRLALATVAGDVDLATPQGRLVARLKGSVAAHETEHKKARQRRAARQKAERGHPNWSKAFGYLPGPNGPEPDPRTAPLVKQAYADILAGASLGDVCRQWSDAGALTITGRPWTTTTLSKFLRKPRNAGLRAYKGARYGPVDRDAIVGKAQWSPLVDEATFWAAQAVLDAPGRAPGRKSVRRHLLTGLAGCGKCGNHLAGSYRTDGRVVYVCKACHGVAILADNIEPILYHIVTERLTMPDAVDLLRREIHDAAEAETIRLELETLYGELDRLAVERAEGLLTARQVKISTDIVNAKITRLQARQLDQERLRVFDGIPLGTPQVAGTIAELSPDRFRAVLDVLAEVVVQPVGKSGRIFNPERVQVNWR

SEQ ID NO: 4577 - protein, 469 aa, synthetic construct
MSYTTPVRAAVYLRISEDRSGEQLGVARQREDCLKLCDQRKWVPVEYLDNDVSASTGKRRPAYEQMLADITAGKIAAVVAWDLDRLHRRPVELEAFMSLADEKRLALATVAGDVDLATPQGRLVARLKGCVAAHETEHKKARQRRAARQKAERGLPNWSKAFGYLPGPNGPEPDPRTAPLVKQAYADILAGASLGDVCRQWNDAGAFTITDRPWTTTTLSKFLRKPRNAGLRAYKGARYGPVDRDAIVGKAQWSPLVDEATFWAAQAVLDAPGRAPGRKSVRRHLLTGLAGCGKCGNHLAGSYRTDGRIVYVCKACHGVAILAENIEPILYHIVAERLAMPDAVDLLRREIHDAAEAETIRLGLETLYGELDRLAVERAEGLLTARQVKISTDIVNAKIAQLQARQLDQERLRVFDGIPLGTPQVAGVIAGLSPDRFRAVLDVLAEVVVQPVGKSSRIFNPERVRVNWR

SEQ ID NO: 4578 - protein, 452 aa, synthetic construct
MKAAIYIRVSTREQVENYSIQAQTEKLTALCRSKDWDVYDIFIDGGYSGSNMNRPALNEMLSKLHEIDAVVVYRLDRLSRSQRDTITLIEEYFLKNNVDFVSLSETLDTSSPFGRAMIGILSVFAQLERETIRDRMVMGKIKRIEAGLPLTTAKGRTFGYDVIDTKLYINEEEARQLQLIYDIFEEEQSITFLQKRLKKLGFKVRTYNRYSNWLTNDLYCGYVSYKDKVHVKGIHEPIISEEQFYRVQEIFTRMGKNPNMNRDSASLLNNLVVCSKCGLGFVHRRKDIMSRGKKYHYRYYSCKTYKHIHELEKCGNKIWRADKLEELIINRVNNYSLASRNVDKEDELDSLNEKLKIEHAKKKRLFDLYINGSYEVSELDSMMSDIDAQINHYESQIEANEELKKNKKTQENLAYLATVDFDSLEFREKQLYLKSLINKIYIDGEQVTIEWL

SEQ ID NO: 4579 - protein, 452 aa, synthetic construct
MKAAIYIRVSTREQVENYSIQAQTEKLTALCRSKDWDVYDIFIDGGYSGSNMNRPALNEMLSKLHEIDAVVVYRLDRLSRSQRDTITLIEEYFLKNNVEFVSLSETLDTSSPFGRAMIGILSVFAQLERETIRDRMVMGKIKRIEAGLPLTTAKGRTFGYDVIDTKLYINKEEAKQLQLIYDIFEEEQSITFLQKRLKKLGFKVHTYNRYNNWLTNDLYCGYVSYKDKVHVKGIHEPIISEEQFYRVQEIFTRMGKNPNMNRDSASLLNNLVVCSKCGLGFVHRRKDAMSRDKKYHYRYYSCKTYKHIHELEKCGNRIWRADKLEELIIDRVNNYSLASRDVDKEGELNSLSEKLKIEHAKKKRLFDLYINGRYEVSELDSMMNDIDAQINYYESQIEAIGELKKNKKIQETLADLATVDFDSLEFREKQLYLKSLINKIYIDGEQVTIEWL

SEQ ID NO: 4580 - protein, 452 aa, synthetic construct
MKAAIYIRVSTREQVENYSIQAQTEKLTALCRSKDWDVYDIFIDGGYSGSNMNRPALNEMLSKLHEIDAVVVYRLDRLSRSQRDTITLIEEYFLKNNVEFVSLSETLDTSSPFGRAMIGILSVFAQLERETIRDRMVMGKIKRIEAGLPLTTAKGRTFGYDVIDTKLYINEEEAKQLQLIYDIFEEEQSITFLQKRLKKLGFRVRTYNCYSNWLTNDLYCGYVSYKDKVHVKGIHEPIISEEQFYRVQEIFTRMGKNPNMNRGSASLLNSLVVCGKCGLGFVHRRKDTTSRGKKYHYRYYSCKTYKHVHELEKCGNKIWRADKLEELIINRVNNYSFASRNVDKEDELDSLSEKLKIEHAKKERLLDLYINGSYDVSELGSMMNDIDAQINYYESQIEANEELKKSKKIQENLADLATVDFDSLEFREKRLYLKSLISKIYIDGEQVTIEWL

SEQ ID NO: 4581 - protein, 469 aa, synthetic construct
MCYTTPVRAAVYLRISEDRSGEQLGVARQREDCLKLCGQRKWVPVEYLDNDVSASTGKRRPAYEQMLADITAGKIAAVVAWDLDRLHRRPIELEAFMSLADEKRLALATVAGDVDLATPQGRLVARLKGCVAAHETEHKKARQRRAARQKAERGLPNWSKAFGYLPGPNGPEPDPRTAPLVKQAYADILAGASLGDVCRQWNGAGAFTITGRPWTTTTLSKFLRKPRNAGLRAYKGARYGPVDRDAIVGKAQWSPLVDEATFWAAQAVLDAPGRAPGRKSVRRHLLTGLAGCGKCGNHLAGSYRTDGRVVYVCKACHGVAILADNIEPILYHTVAERLAMPDAVDLLRREIHDAAEAETIRLELETLYGELDRLAVERAEGLLTARQVKISTDIVNAKITKLQARQLDQERLRVFDGIPLGTPQVAGTIAELSPDRFRAVLDVLAEVVVQPVGKSGRIFNPERVRVNWR

SEQ ID NO: 4582 - protein, 485 aa, synthetic construct
MTKKVAIYTRVSTTNQAEEGFSIDEQIDRLTKYAEAMGWQVSDTYTDAGLSGAKLERPAMQRLINDIENKAFDTVLVYKLDRLSRSVRDTLYLVKEVFTKNKIDFISLNESIDTSSAMGSLFLTILSAINEFERENIKERMTMGKLGRAKSGKSMMWTKTAFGYYHNRKTGILEIVPLQATIVEQIFTDYLSGISLTKLRDKLNESGHIGKDIPWSYRTLRQTLDNPVYCGYIKFKDSLFEGMHRPIIPYETYLKVQKELEERQQQTYERNNNPRPFQAKYMLSGMARCGYCGAPLRIVLGHKRKDGSRTVKYHCANRFPRKTKGVTVYNDNKKCDSGTYGLSNLENTVIDNLIGFQENNDSLLKIINGNNQPILDTSSFKKQISQIDKKIQKYSDLYLNDFITMDELKDRTDSLQAEKKLLRAKISENKLNDSADVFELVKTQLGSIPINELSYDNKKKIVNNLVSKVVVTADNVDIIFKFQLA

SEQ ID NO: 4583 - protein, 485 aa, synthetic construct
MTKKVAIYTRVSTTNQAEEGFSIDEQIDRLTKYAEAMGWQVSDTYTDAGFSGAKLERPAMQRLINDIENKAFDTVLVYKLDRLSRSVRDTLYLVKDVFTKSKIDFVSLNESINTSSAMGSLFLTILSAINEFERENIKERMAMGKLGRAKSGKSMMWTKTAFGYYHNRKTGILEIVPLQATIVEQIFTDYLSGISLTKLRDKLNESGHIGKDIPWSYRTLRQTLGNPVYCGYIKFKDSLFEGMHKPIIPYETYLKVQKELEERQQQTYARNNNPRPFQAKYMLSGMARCGYCGAPLKIVLGRKRKDGSRTMKYHCANRFPRKTKGVTVYNDNKKCDSGTYDLSNLENTVIDNLIGFQENNDSLLKIINGNNQPILDTGSFKKQISQIDKKIQKNSDLYLNDLITMDELKDRTDSLRAEKKLLKAKISENKFNDSTDAFELVKTQLGSIPINELSYDNKKKIVNNLVSKVDVTADNVDIIFKFQLA

SEQ ID NO: 4584 - protein, 452 aa, synthetic construct
MKAAIYIRVSTREQVENYSIQAQTEKLTALCRSKDWDVYDIFIDGGYSGSNMNRPALSEMLSKLHEIDAVVVYRLDRLSRSQRDTIALIEEYFLKNNVEFVSLSETLDTSSPFGRAMIGILSVFAQLERETIRDRMVMGKIKRIEAGLPLTTAKGRTFGYDVIDTKLYINEEEAKQLQLIYDIFEEEQSITFLQKRLKKLGFKVRTYSCYNNWLTNDLYCGYVSYKDKVHVKGIHEPIISEEQFYRVQEIFTRMGKNPNMNRDSASLLNSLVVCSKCGLGFVHRRKDTTSRGKKYHYRYYSCRTYKHIHELEKCGNKIWRADKLEELIINRVNNYSLASRVADREDEQDSLNEKLKIEHAKKKRLFELYINGSYEVSELDSMMNDIDAQINYYESQIEANEEQRKNKKIQESLANLATVDYDSLEFREKQLYLKSLINKIYIDGEQVTIEWL

SEQ ID NO: 4585 - protein, 469 aa, synthetic construct
MSYTTPVRAAVYLRISEDRSGEQLGVARQREDCLKLCGQRKWVPVEYLDNDVSASTGKRRPAYEQMLADITAGKIAAVVAWDLDRLHRRPIELEAFMSLADEKRLALATVAGDVDLATPQGRLVARLKGCVAAHETEHKKARQRRAARQKAERGYPNWSKAFGYLPGPNGPEPDPRAAPLVEQAYADILAGASLGDVCRQWNDAGAFTITGRPWTTTTLSKFLRKPRNAGLRAYKGARYGPVDRDAIVGKAQWSPLVDEATFWAAQAVLDAPGRAPGRKSVRRHLLTGLAGCGKCGNHLAGSYRTDGRVVYVCKACHGVAILADNIEPILYHIVAERLAMPDAVDLLRREIHDAAEAETIRLELETLYGELDRLAVERAEGLLTARQVKISTDIVNAKITKLQARQLDQERLRVFDGIPLGTPQVAGMIAELSPDRFRAVLDVLAEVVVQPVGKSGRIFNPERVQVNWR

SEQ ID NO: 4586 - protein, 485 aa, synthetic construct
MTKKVAIYTRVSTTNQAEEGFSIDEQIDRLTKYAEAMGWQVSDTYTDAGFSGAKLERPAMQRLINDIEDKAFDTVLVYKLDRLSRSVRDTLYLVKDVFTKNKIDFISLNESIDTSSAMGSLFLTILSAINEFERENIKERMTMGKLGRAKSGKSMMWTKTAFGYYHNRKTGILEIVPLQATIVEQIFTDYLSGISLTKLRDKLNESGHIGKDIPWSYRTLRQTLDNPVYCGYIKFKGSLFEGMHKPIIPYEIYLKVQKELEERQQQIYERNNNPRPFQAKYMLSGMARCGYCGAPLRIVLGHKRKDGGRTMKYHCANRFPRKTKGVTVYNNNKKCDSGTYDLSNLETTVIDNLIGFQENNDSLLKIINGNNQPILDTSSFKKQISQIDKKIQKNSDLYLNDFITMDELKDRTESLQAEKKLLKAKISENKFNDSTDVFELVKTQLGSIPINELSYDNRKKIVNNLVSKVDVTADNVDIIFKFQLA

SEQ ID NO: 4587 - protein, 452 aa, synthetic construct
MKAAIYIRVSTREQVENYSIQAQTEKLTALCRSKDWDVYDIFVDGGYSGSNMNRPALNEMLSKLHEIDAVVVYRLDRLSRSQRDTITLIEEYLLKNNVEFVSLSETLDTSSPFGRAMIGILSVFAQLERETIRDRMVMGKIKRIEAGLPLTTAKGRTFGYDVIDTKLYINEEEAKQLQLIYDIFEEEQSITFLQKRLKKLGFKVRTYNCYNNWLTNDLYCGYVSYKGKVHVKGIHEPIISEEQFYRVQEIFTRMGKNPNMNRDSASLLNNLVVCSKCGLGFVHRRKDAMSRDKKYHYRYYSCKTYKHIHELEKCGNKIWRADKLEELVINRVNNYSFASRNADKEDELDSLNEKLKIEHAKKKRLFDLYINGSYEVSELDSMMNDIDAQIGYYESQIEANEALIKNKKIQENLAYLATVDFDSLEFREKQLYLKSLINKIYIDGEQVTIEWL

SEQ ID NO: 4588 - protein, 452 aa, synthetic construct
MKAAIYIRVSTREQVENYSIQAQTEKLTALCRSKDWDVYDIFIDGGYSGSNMNRPALNEMLSKLHEIDAVVVYRLDRLSRSQRDTITLIEEYFLKNDVEFVSLSETLDTSSPFGRAMIGILSVFAQLERETIRDRMVMGKIKRIEAGLPLTTAKGRTFGYDVIDTKLYINEEEAKQLQLIYDIFEEEQSITSLQKRLKKLGFKVRTYSRYNNWLTNDLYCGYVSYKDKVHVKGIHEPIISEEQFYRVQEIFTRMGKNPNMNRDSASLLNNLVVCSKCGLGFVHRRKDTVSRGKKYHYRYYSCKTYKHTHELEKCGNKIWRADKLEELIVNRVNNYSFASRDVDKENELDSLNEKLKIERAKKKRLFDLYINGSYEVSELDGMMNDIDAQINYYESQIEANEELKKDKKIQESLANLATVDYDSLEFREKQLYLKSLINKIYIDGEQVTIEWL

SEQ ID NO: 4589 - protein, 469 aa, synthetic construct
MSYTTPVRAAVYLRISEDRSGEQLGVARQREDCLKLCDQRKWVPVEYLDNDVSASTGKRRPAYEQMLADITAGKIAAVVAWDLDRLHRRPIELEAFMCLADEKRLALATVAGDVDLATPQGRLVARLKGSVAAHETEHKKARQRRAARQKAERGCPNWSKAFGYLPGPNGPEPDPRTAPLVKQAYADILAGASLGDVCRQWNDAGASTITGRPWTTTTLSKFLRKPRNAGLRAYKGARYGPVDRDAIVGKAQWSPLVDEATFWAAQAVLDAPGRAPGRKSVRRHLLTGLAGCGKCGNHLAGSYRTDGKVVYVCKACHGVAILADNIVPILYHVVAERLAMPDAVDLLRREIHDAAEAETIRLELETLYGELDRLAVERAEGLLTARQVKISTDIVNAKITKLRAHQLDQERLRVFDGIPLGTPQVADVIAELSPDRFRAVLDVLAEVVVQPVGKSGRIFSPERVQVNWR

SEQ ID NO: 4590 - protein, 452 aa, synthetic construct
MKAAIYIRVSTREQVENYSIQAQTEKLTALCRSKDWDVYDVFIDGGYSGSNMNRPALNEMLSKLHEIDAVVVYRLDRLSRSQRDTITLIEEYFLKNNVEFVSLSETLDTSSPFGRAMIGILSVFAQLERETIRDRMVMGKIKRIEAGLPLTTAKGRTFGYDVIDTKLYINEEEAKQLRLIYDIFEEEQSITFLQKRLKKLGFKVRTYNRYNNWLTNDLYCGYVSYKDKVHVKGIHEPIISEEQFYRVQEIFARMGKNPNMNRDSASLLNNLVVCSKCGLGFVHRRKDIMSRGKRYHYRYYSCKTYKHIHELEKCGNKIWRADKLEELIINRVNNYSLASRNVDKEDELDSLNEKLKIEHAKKKRLFDLYINGSYEVSELDSMMNDIDAQINHYESQIEANEGLKRNKKIQENLANLATMDFDSLEFREKQLYLKSLINKIYIDGEQVTIEWL

SEQ ID NO: 4591 - protein, 452 aa, synthetic construct
MKAAIYIRVSTREQVENYSIQAQTEKLTALCRSKDWDVYDIFVDGGYSGCNMNRPALNEMLSKLHEIDAVVVYRLDRLSRSQRDTITLIEEYFLKNNVEFVSLSETLDTSSPFGRAMIGILSVFAQLERETIRDRMVMGKIKRIEAGLPLTTAKGRTFGYDVIDTKLYINEEEAKQLQLIYDIFEEEQSITFLQKRLKKLGFKVRTYNRYNNWLTNDLYCGYVSYKDKVHVKGIHEPIISEEQFYRVQEIFTRMGKSPNVNRDSASLLNNLVVCSKCGLGFVHRRKDTTSRGKKYHYRYYSCKTYKHIHELEKCGNKIWRADKLEELIINRVNNYSFASRNVDKEDELDSLNEKLKIEHAKKKRLFDLYINGSYEASELDSMMSDIDAQINYYESQIEAYEELRKNKKIQENLGDLATVDFDSLEFREKQLYLKSLINKIYIDGEQVTIEWL

SEQ ID NO: 4592 - protein, 485 aa, synthetic construct
MTKKVAIYTRVSTTNQAEEGFSIDEQIDRLTKYAEAMGWQVSDTYTDAGFSGAKLERPAMQRLINDIENKAFDTVLVYRLDRLSRSVRDTLYLVKDVFTKNKIDFISLNESIDTSSAMGSLFLTILSAINEFERENIKERMTMGKLGRAKSGKSMMWTKTAFGYYHNRKTGILEIVPLQATIVEQIFTDYLSGISLTKLRDKLNESGHIGKDIPWSYRTLRQTLDNPVYCGYIKFKDSLFEGAHKPIIPYETYLKVQKELGERQQQAYERNNNPRPFQAKYMLSGVARCGYCGAPLRIVLGHKRKDGSRTMKYHCANRFPRKTKGVTVYNDNKRCDSGTYDLSNLENTVIDNLIGFQENNDSLLKIINGNNQPILDTSSFKKQISQIDKKIQKNSDLYLNDFITMDELKGRTDSLQAEKELLKAKISENKFNDSTDVFELVKTQLGSIPINELSYDNKKKMVNNLVSRVDVTADNVDIIFKFQLA

SEQ ID NO: 4593 - protein, 452 aa, synthetic construct
MKAAIYIRVSTREQVENYSIQAQTEKLTALCRSRDWDVYDIFIDGGYSGSNMNRPALNEMLSKLHEIDAVVVYRLDRLSRSQRDTITLIEEYFLKNNVEFVSLSETLDTSSPFGRAMIGILSVFAQLERETIRDRMAMGKIKRVEAGLPLTTAKGRTFGYDVIDTKLYINEEEAKQLQLIYDIFEEEQSITSLQKRLKKLGFKVRTYNRYNNWLTNDLYCGYVSYKDKVHVKGIHEPIISEEQFYRVQEIFTRMGKNPNMNRDSASLLNSLVVCSKCGLGFVHRRKDTVSRGKKYQYRYYSCKTYKHTHELEKCGNKIWRADKLEELIINSVSNYSVASRSVGKEDELDSLNEKLKIEHAKKKRLFDLYINGSYNVSELDSMMNDIDAQINYYESQIEANEELKKNKKIQENLAGLATVDFDSLEFREKQLYLKSLINKIYIDGEQVTIEWL

SEQ ID NO: 4594 - protein, 469 aa, synthetic construct
MSYTTPVRAAVYLRISEDRSGEQLGVARQREDCLKLCDQRKWVPVEYLDNDVSASTGKRRPAYEQMLADITAGKIAAVVAWDLDRLHRRPVELETFMSLADEKRLALATVAGDVDLATPQGRLVARLKGSVAAHETEHKKARQRRAARQKAERGHPNWSKAFGYLPGPNGPEPDPRTAPLVKQAYAGILAGASLGDVCRQWNDAGAFTITGRPWTTTTLSKFLRKPRNAGLRAYKGARYGPVDRDAIVGKAQWSPLVDEATFWAAQAVLDAPGRAPGRKSVRRHLLTGLAGCGKCGNHLAGSYRTDGRVVYVCKACHGVAILADNIEPILYHIVAERLAMPDAVDLLRREIHDAAEAETIRLELDTLYGELDRLAVERAEGLLTARQVKIGTDIVSAKITKLQARQLDQERLRVFDGIPLGTPQVADMIAGLSPDRFRAVLDVLAEVVVQPVGKSGRIFNPERVQVNWR

SEQ ID NO: 4595 - protein, 452 aa, synthetic construct
MKAAIYIRVSTREQVENYSIQAQTEKLTALCRSKDWDVYDVFIDGGYSGSNMNRPALNEMLSKLHEIDAVVVYRLDRLSRSQRDTITLIEEYFLKNNVEFVSLSETLDTSSPFGRAMIGILSVFAQLERETIRDRMVMGKIKRIEAGLPLTTAKGRTFGYDVIDAKLYINEEEAKQLQLIYDIFEEEQSITFLQKRLKKLGFKVHTYNRYNNWLTNDLYCGYVSYKDKVHVKGIHEPIISEEQFYRVQEIFTRMGKNPNMNRGSASLLNNLVVCSKCGLGFVHRRKDAMSRDKKYHYRYYSCKTYKHIHELEKCGNKIWRADKLEELIINRVNNYSLASRNVDKEDELDSLNERLKIEHAKKRRLFDLYINGSYEVSELDSMMNDIDAQINYYESQIEANEELKKNKKIQGNLAYLATVDFDSLEFREKQLYLKSLINKIYIDGEQVTIEWL

SEQ ID NO: 4596 - protein, 452 aa, synthetic construct
MKAAIYIRVSTQEQVENYSIQAQTEKLTALCRSKGWDVYDIFIDGGYSGSNMNRPALIEMLSKLHEIDAVVVYRLDRLSRSQRDTTTLIEEYFLKNNVEFVSLSETLDTSSPFGRAMIGILSVFAQLERETIRDRMVMGKIKRIEAGLPLTTAKGRTFGYDVIDTKLYINEEEAKQLQLIYDIFEEVQSITFLQKRLKKLGFKVRTYNRYCNWLTNDLYCGYVSYKDKVHVKGIHEPIISEEQFYRVQEIFTRMGKSPNTNRDSASLLNNLVVCSKCGLGFVHRSKDTMSRGKKYHYRYYSCKTYKHTHELEKCDNKTWRADKLEELIINRVNHYSFASRDADKEDELDSLNEKLKIEHAKKKRLFDLYINGSYEAGELDGMMNDIDAQINYYESQIEANEGLKKNKKIQENLADLATVDFDSLEFREKQLYLKSLINKIYIDGEQVTIEWL

SEQ ID NO: 4597 - protein, 452 aa, synthetic construct
MKAAIYIRVSTQEQMENYSIQAQTEKLTALCRSKDWDVYDIFIDGGYSGSNMNRPALNEMLSKLHEIDAVVVYRLDRLSRSQRDTTTLIEEYFLKNNVEFVSLSETLDTSSPFGRAMIGILSVFAQLERETIRDRMVMGKIKRIEAGLPLTTAKGRTFGYDVIDTKLYINEEEAKQLRLIYDIFEEEQSITSLQKRLKKLGFKVRTYNRYSNWLTNDLYCGYVSYKDKVHVKGIHEPIISEEQFYRVQEIFTRMGKNPNVNRDSASLLNNLVVCSKCGLSFVHRSKDTMSRGKKYHYRYYSCKTYKHTHELEKCGNKTWRADKLEELIINRVNNYSFASRNVDKEDELDSLNEKLKIEHAKKKRLFDLYINGSYEVSELDSMMNDIDAQINYYESQIEANEELKKNKKIQENLADLATVDFDSLGFREKQLYLKSLINKIYIDGEQVTIEWL

SEQ ID NO: 4598 - protein, 452 aa, synthetic construct
MKAAIYIRVSTQEQVGNYSIQAQTEKLTALCRSKGWDVYDIFIDGGYSGSNMNRPALNEMLSKLHEIDAVVVYRLDRLSRSQRDTTTLIEEYFLKNNVEFVSLSETLDTSSPFGRAMIGILSVFAQLERETIRDRMVMGKIKRIEAGLPLTTAKGRTFGYDVIDTKLYINEEEANQLRLIYDIFEEEQSITSLQKRLKKLGFKVRTYNRYNNWLTNDLYCGYVSYKDKVHVKGIHEPIISEEQFYRVQEIFTRMGKKPNMNRDSASLLNNLVVCSKCGLGFVHRSKDTMSRGKKYHYRYYSCKTYKHTHELEKCGNKIWRADKLEELIINRVNSYSFASRNVDKEDELDSLNKKLETERAKKKRLFDLYINGSYEVSELDSMMNDIDAQINYYESQIEANEELKKNKKIQENLADLATADFDSLEFREKQLYLKSLINKIYIDGEQVTIEWL

SEQ ID NO: 4599 - protein, 452 aa, synthetic construct
MKAAIYIRVSTREQVENYSIQAQTEKLTALCRSKDWDVYDIFIDGGYSGSNMNRPALNEMLSKLHEIDAVVVYRLDRLSRSQRDTITLIEEYFLKNNVEFVSLCETLDTSSPFGRAMIGILSVFAQLERETIRDRMVMGKIKRIEAGLPLTTAKGRTFGYDVIDTKLYINEEEAKQLQLIYDIFEEEQSITSLQKRLKKLGFKVRTYNRYNNWLTNDLYCGYVSYKDKVHVKGVHEPIISEEQFYRVQEIFARIGKNPNMNRDSASLLNNLVVCSKCGLSFVHRRKDATSRCKKYHYRYYSCKTYKHIHELEKCGNKIWRADKLEELIINRVNNYSIANRNVDKEDELDSLNEKLKIEHVKKKRLFDLYINGSYEVSELDSMMNDIDAQINYYESQIEANEELRKSKKIQENLAHLATVDFDSLEFREKQLYLKSLINKIYIDGEQVTIEWL

SEQ ID NO: 4600 - protein, 485 aa, synthetic construct
MTKKVAIYTRVSTTNQAEEGFSIEEQIDRLTKYAEAMGWQVSDTYTDAGLSGAKLERPAMQRLINDIENKAFDTVLVYKLDRLSRSVRDTLYLVKDVFTKNKIDFISLNESIDTSSAMGSLFLTILSAINEFERENIKERMTMGKLGRAKSGKSMMWTKTAFGYYHNRKTGILEIVPQQATIVEQIFTDYLSGISLTKLRDKLNDSGHIGKDIPWSYRTLRQTLDNPVYCGYIKFKDSLFEGMHKPIIPYETYLKVQKELEERQQQTYERNNNPRPFQAKYMLSGMARCGYCGAPLRIVLGHKRKDGSRSMKYHCANRFPRKTKGVTVYNDNKKCDSGTYDLSNLENTVIDNLISFQENNDSLLKIINGNNQPILDTSSFKKQISQIDEKIQKNSDLYLNDFITMDELKDRTDSLQAEKRLLIAKISENKFNDSTDVFELVKTQLGSIPINELSYDNKKKIVNNLVSKVDVTADNVDIIFKFQLA

SEQ ID NO: 4601 - protein, 452 aa, synthetic construct
MKAAIYIRVSTREQVENYSIQAQTEKLTALCRSKDWDVYDVFIDGGYSGSNMNRPALNEMLSKLHEIDAVVVYRLDRLSRSQRDTITLIEEYFLKNNVEFVSLSETLDTSSPFGRAMIGILSVFAQLERETIRDRMVMGKIKRIEAGLPLTTAKGRTFGYDVIDTKLYINEEEAKQLQLIYDIFEEEQSITFLQKRLKKLGFKVRTYSCYNNWLTNDLYCGYVSYKDKVHVKGIHEPIISEEQFYRVQEIFARMGKNPNMNRDSASLLNNLVVCGRCGLGFVHRRKDAMSRSKKYHYRYYSCKTYKHIHELEKCGNKIWRADKLEELIIDRVNNYSLASRNVDKEDELDGLKEKLKIEHAKKKRLFELYINGSYEVSELDSMMSDIDAQINYYEGQIEANEELRKNKKTQENLANLATVDFDSLEFREKQLYLKSLINKIYIDGEQVTIEWL

SEQ ID NO: 4602 - protein, 469 aa, synthetic construct
MSYTTPVRAAVYLRISEDRSGDQLGVARQREDCLKLCGQRKWVPVEYLDNDVSASTGKRRPAYEQMLADITAGKIAAVVAWDLDRLHRRPIELEAFMSLADEKRLALATVAGDVDLATPQGRLVARLKGCVAAHETEHKKARQRRAARQKAERGHPNWSKAFGYLPGPNGPEPDPRTAPLVKQAYADILAGASLGDVCRRWNDAGALTITGRPWTTTTLSKFLRKPRNAGLRAYKGARYGPVDRDAIVGKAQWDPLVDEATFWAAQAVLDAPGRAPGRKSVRRHLLTGLAGCGKCGNHLAGSYRTDGQITYVCKACHGVSILADNIEPILYHIVAERLAMPDAVNLLCREIHDAAEAETIRLELETLYGELDRLAVERAEGLLTARQVKISTDIVNAKIAKLQARQLDQGRLRVLDGIPLGTPQVAGVIAGLSPDRFRAVLDVLAEVVVQPVGKGGRIFNPERVRVNWR

SEQ ID NO: 4603 - protein, 452 aa, synthetic construct
MKAAIYIRVSTQEQVGNYSIQAQTEKLTALCRSKDWDVYDIFIDGGYSGSNMNRPALNVMLSKLHEIDAVVVYRLDRLSRSQRDTTTLIEEYFLKNNVEFVSLSETLDTSSPFGRAMIGILSVFAQLERETIRDRMVMGKIKRIEAGLPLTTAKGRTFGYDVIDTKLYINEEEAKQLQLIYDIFEEERSITLLQKRLKKLGFKVRTYNRYNSWLTNDLYCGYVSYKDKVRVKGIHEPIISEEQFYRVQEIFTRMGKNPNMNRDSASLLNNLVVCSRCGLGFVHRSKDTMNRGRKYHYRYYSCKTYKHTHELEKCGNKTWRADKLEELIINRVNNYSFASRNVDKEDELDSLNEKLKVEHAKKKRLFDLYINGSYEVSELDSMMNDIDARINYYESQIEANDELKKNKKIQENLADLATVDFDSLEFREKQLYLKSLINKIYIDGEQVTIEWL

SEQ ID NO: 4604 - protein, 469 aa, synthetic construct
MSYTTPVRAAVYLRISEDRRGEQLGVARQREDCLKLCDQREWVPVEYLDNDVSASTGKRRPAYEQMLADITAGKIAAVVAWDLDRLHRRPIELEAFMSLADEKRLALATVAGDVDLATPQGRLVARLKGSVAAHETEHKRARQCRAARQKAERGHPNWSKAFGYLPGPNGPEPDPRTAPLVKQAYADILAGASLGDVCRQWNVAGAFTITGRPWTTTTLSKFLRKPRNAGLRAYKGARYGPVDRDAIVGKAQWSPLVDEATFWAAQAVLDAPGRAPGRKSVRRHLLTGLAGCGKCGNHLAGSYRTDGRVVYVCKACHGVAILADNIEPILYHIVAERLAMPDAVDLLRREIHDAAEAETIRQELETLYGELDRLAVERAEGLLTARQVKISTDIVNAKITKLRARQLDQERLRVLDGIPLGTPQVAGMIAELSPDRFRAVLDVLAKVVVQPVGKRGRIFNPGRVQVNWR

SEQ ID NO: 4605 - protein, 469 aa, synthetic construct
MNYTTPVRAAVYLRISEDRSGEQLGVARQREDCLKLCDQRKWVPVEYLDNDVSASTGKRRPAYEQMLADITAGKIAAVVAWDLDRLHRRPVELEAFMSLADEKRLALATVAGDVDLATPQGRLVARLKGSVAAHETEHKKARQRRAARQKAERGYPNWSKAFGYLPGPNGPEPDPRTAPLVKQAYADILAGASLGDVCRRWNDAGAFTITGRPWTTTTLSKFLRKPRNAGLRAYKGARYGPVDRDAIVGKAQWSPLVDEATFWAAQAVLDAPGRAPGRKSVRRHLLTGLAGCGKCGNHLAGSYRTDGRVVYVCKACYGIAILADNIEPILYHIVAERLAMPDAVDLLCREIHDAAEAETIRLELETLCGELDRLAVERAEGLLTARQVKISTDIVNAKITKLRARQLDQERLRVLDGIPLGTPQVAGMIAELSPDRFRAVLDVLAEVVVQPVGKRGGISDPERVQVNWR

SEQ ID NO: 4606 - protein, 485 aa, synthetic construct; identical to SEQ ID NO: 2323

SEQ ID NO: 4607 - protein, 452 aa, synthetic construct
MKAAIYIRVSTREQVENYSIQAQTEKLTALCRSKDWDVYDIFIDGGYSGSNMNRPALNEMLSKLHEIDAVVVYRLDRLSRSQRDTITLIEEYFLKNNVEFVSLSETLDTSSPFGRAMIGILSVFAQLERETIRDRMVMGKIKRIEAGLPLTTAKGRTFGYDVIDTKLHINEEEAKQLQLIYDIFEEEQSITFLQKRLKELGLKVRTYNRYNNWLTNDLYCGYVSYKDKVHVKGIHEPIISEEQFYRVQEIFTRMGKNPNMNRESASLLNNLVVCSKCGLGFVHRRKDATSRGKKYHYRYYSCKTYKHIHELEKCGNKIWRADKLEELVINRVNNYSLASRNVDKEDELDSLNEKLRTEHAKKKRLFDLYINGSYEVSELDSMMNDIDAQINYYESRIEANEKLRKNKKVRENLANLATVDFDSLEFREKQLYLKSLINKIYIDGEQVTIEWL

SEQ ID NO: 4608 - protein, 485 aa, synthetic construct; identical to SEQ ID NO: 3573

SEQ ID NO: 4609 - protein, 469 aa, synthetic construct; identical to SEQ ID NO: 4264

SEQ ID NO: 4610 - protein, 452 aa, synthetic construct
MKAAIYIRVSTREQVENYSIQAQTEKLTALCRSKDWDVYDIFIDGGYSGSNMNRPALNEMLSKLHEIDAVVVYRLDRLSRSQRDTITLIEEYFLKNNVEFVSLSETLDTSSPFGRAMIGILSVFAQLERETIRDRMVMGKIKRIEAGLPLTTAKGRTFGYDVIDTKLYINEEEAKQLQLIYDIFEEEQSITFLQKRLKKLGFKVHTYNRYSNWLTNDLYCGYVSYKDKVHVKGIHEPIISEEQFYRVQEIFARMGKNPNMNRDSASLLNNLVVCSRCGLGFVHRRKDTMSRGKRYHYRYYSCKTYKHTHELEKCGNKIWRADKLEELIINRVNNYSFASRNVDKEDELDSLNEKLKIEHAKKKRLFDLYINGSYEVGELDCMMNDIDAQINYYESQIEANEELKKDKKIQESLANLATVDYDSLEFREKQLYLKSLINKIYIDGEQVTIEWL

SEQ ID NO: 4611 - protein, 452 aa, synthetic construct
MKAAIYIRVSTREQVENYSIQAQTEKLTALCRSKDWDVYDIFIDGGFSGSSMNRPALNEMLSKLHEIDAVVVYRLDRLSRSQRDTITLIEEYFLKNNVEFVSLSETLDTSSPFGRAMIGILSVFAQLERETIRDRMVMGKIKRVEAGLPLTTAKGRTFGYDVIDTKLYVNEEEAKQLQLVYDIFEEEQSITSLQKRLKKLGFKVHTYNRYNNWLTNDLYCGYVSYKDKVHVKGIHEPIISEEQFYRVQEIFTGMGKNPNMNRDSASLLNSLVVCSKCGLGFVHRRKDTTSRGKKYHYRYYSCKTYKHTHELEKCGNKIWRADKLEELIINRVNNYSFASRNVDKEDELDSLNEKLRIEHAKRKRLFDLYINGSYEVSELDSMMNDIDAQINYYEGQIEANEELKKNKKIQENLADLATVDYDSLEFREKQLYLKSLINKIYIDGEQVTIEWL

SEQ ID NO: 4612 - protein, 452 aa, synthetic construct
MKAAIYIRVSTQEQVGNYSIQAQTEKLTALCRSKDWDVYDIFIDGGYSGSNMNRPALNEMLGKLHEIDAVVVYRLDRLSRSQRDTTTLIEEYFLKNNVEFVSLSETLDTSSPFGRAMVGILSVFAQLERETIRDRMVMGKIKRIEAGLPLTTAKGRTFGYDVIDTKLYINEEEAKQLQLIYDIFEEEQSITSLQKRLKKLGFKVRTYNRYNSWLTNDLYCGYVSYKDKVHVKGIHEPIISEEQFYRVQEIFTRMGKNPNMNRDSASLLSNLVVCSKCGLGFVHRSKDTMSRGKKYHYRYYSCKTYKHTHELEKCGNKTWRADKLEELIIDRVNNYNFASRNVDKEDELDSLNERLKIEHAKKKRLFDLYINGSYEVSELDSMMSDIDAQINHYESQIEANEKLKKNKKIQENLADLATMDFDSLEFREKQLYLKSLINKIYIDDEQVTIEWL

SEQ ID NO: 4613 - protein, 452 aa, synthetic construct
MKAAIYIRVSTQEQVGNYSIQAQTEKLTALCRSKDWDVYDIFVDGGYSGSNMNRPALNEMLSKLHEIDAVVVYRLDRLSRSQRDTTTLIEEYFLKNNVEFVSLSETLDTSSPFGRAMIGILSVFAQLERETIRDRMVMGKIKRIEAGLPLTTAKGRTFGYDVIDTRLYINEEEAKQLRLIYDIFEEEQSITSLQKRLKKLGFKVRTYNRYSNWLTNDLYCGYVSYKDKVHVKGIHEPIISEEQFYRVQEIITRMGKSPNMNRDSASLLNNLVVCGKCGLGFVHRRKDTMSGGKKYHYRYYSCKTYKHTHELEKCGNKTWRADKLEELIISRVNDYSLASRSMVKEGELDSLNGKLKIERAKKKRLFDLYINGSCEVSELDSMMNDIDAQINYYESQIEAKEELRKNKKIQENLADLATVDFDSLEFREKQLYLRGLINKIYIDGEQVTIEWL

SEQ ID NO: 4614 - protein, 469 aa, synthetic construct
MSYTTPVRAAVYLRISEDRSGEQLGVARQREDCLKLCDQRKWVPVEYLDNDVSASTGKRRPAYEQMLADIAAGKVAAVVAWDLDRLHRRPIELEAFMSLADEKHLALATVAGDVDLATPQGRLVARLKGCVAAHETEHKKARQRRAARQKAERGYPNWSKAFGYLPGPNGPEPDPRTAPLVKQAYADILAGASLGDVCRQWNAAGAFTITGRPWTTTALSKFLRKPRNAGLRAYKGARCGPVDRDAIVGKAQWSPLVDEATFWAAQAVLDAPGRAPGRKSVRRHLLTGLAGCGKCGEHLAGSYRTDGRIVYVCKTCHGVAILADNIEPILYHIVAERLAMPDAVDLLRCEIHDAAEAETVRLELETLYGELDRLAVERAEGLLTARQVKISTDIVNAKITKLQACQLDQERLRVLDGIPLGTPQVTGTIAELSPDRFRAVLDVLAEVVVQPVGKCGRVSNPERVQVNWR

SEQ ID NO: 4615 - protein, 485 aa, synthetic construct
MTKKVAVYTRVSTTNQAEEGFSIDEQIDRLTKYAEAMGWQVSDTYTDAGLSGAKLERPAMQRLINDIENKAFDTVLVYKLDRLSRSVRDTLYLVKDVFTKNKIDFISLSESIDTSSAMGSLFLTILSAINEFERENIKERMTMGKLGRAKSGKSMMWTKTAFGYYHNRKTGILEIVPQQATIVEQIFTDYLSGISLTKLRDKLNESGHIGKDIPWSYRTLRQTLDNPVYCGYIKFKDSLFKGMHRPIIPYETYLKVQKELEERQQQTYERNNNPRPFQAKYMLSGMARCGYCGAPLRIVLGRKRKDGSRTMKYHCANRFPRKTKGVTVYNDSKKCDSGTYDLSNLENTVIDYLTGFQENNDSLLKVINGNNQPILDTSSFKKQISQIDKKIQKNSDLYLNDFITMDELKDRTDSLQAEKKLLEAKINENKFNDSTDVFELVKAQLGSIPINELSYDNKKKIVNNLVSKVDVTADNVDIIFKFQLA

SEQ ID NO: 4616 - protein, 469 aa, synthetic construct
MSYTTPVRAAVYLRISEDRSGEQLGVARQREDCLKLCGQRKWVPVEYLDNDVSASTGRRRPAYEQMLADITAGKIAAVVAWDLDRLHRRPIELEAFMSLADEKRLALATVAGDVDLATPQGRLVARLKGSVAAHETEHKKARQRRAARQKAERGHPNWSKAFGYLPGPNGPEPDPRTAPLVKQAYADILAGASLGDVCRRWNDAGAFTITGRPWTTTTLSKFLRKPRNAGLRAYKGARYGPVDRDAIVGKARWSPLVDEATFWAAQAVLDAPGRAPGRKSVRRHLLTGLAGCGKCGNHLAGSYRADGRVVYVCKACHGVAILADNIEPILYHTVAERLAMPDAVDLLRREFHDVAEAETIRLELEILYGELDRLAVERAEGLLTARQVKISTDIVNGEIAKLQARQLDQERLRVFDGIPLGTPQVAGMIAELSPNRFRAVLDVLAEVVVQPVGKSGRIFNPERVQVNWR

SEQ ID NO: 4617 - protein, 452 aa, synthetic construct
MKAAIYIRVSTREQVENYSIQAQTEKLTALCRSKGWDVYDIFIDGGYSGSNMNRPALNKMLSKLHEIDAVVVYRLDRLSRSQRDTITLIEEYFLKNNVEFVSLSETLDTSSPFGRAMIGILSVFAQLERETIRDRMVMGKIKRIEAGLPLTTAKGRTFGYDVIDTKLYINEEEAKQLRLIYDIFEEVQSITFLQKRLKELGFRVRTYSRYNNWLTNDLYCGYVSYKDKVHVKGIHEPIISEEQFYRVQEIFTRMGKNPNMNRDSASLLNNLVVCSKCGLGFVHRRKDTMSRGKKYHYRYYSCKTYKHIHELEKCGNKIWRADKLEELIINRVNNYSLASRNVDKEDELDSLNEKLKNEHAKKKRLFDLYVNGSYNVGELDSMMNDIDAQISYYESQIETNEELKEDKKIQESLANLATVDYGSLEFREKQLYLKSLINKIYIDGEQVTIEWL

SEQ ID NO: 4618 - protein, 485 aa, synthetic construct
MTKKVAIYTRVSTTNQAKEGFSIDEQVDRLTKYAEAMGWQVSGTYTDAGLSGAKLERPAMQRLINDIENKAFDTVLVYKLDRLSRSVRDTLYLVKDVFTKNKIDFISLNESIDTSSAMGSLFLTILSAINEFERENIKERMTMGKLGRAKSGKSMMWTKTAFGYYHNRRTGILEIVPLQATIVEQIFTDYLSGISLTKLRDKLNESGHIGKDIPWSYRTLRQTLDNPVYCGYIKFKDSLFEGMHKPIIPYETYLKVQKELEERQQQTYERNNNPRPFQAKYMLSGMARCGYCGAPLRIVLGHKRKDGSRTMKYHCANRFPRKTKGVTVYNDNKKCDSGTYDLSNLENTVIDSLIGFQENNDSLLKITNGNNQPILDTSSFEKQISQIDKKIQKNSDLYLNDFITMDELKGRTDSLQAEKKLLEAKISENKFNDSTDVFELVKTQLGSIPISELSYDNKKKIVNNLVSKVDVTADSVDIIFKFQLA

SEQ ID NO: 4619 - protein, 469 aa, synthetic construct
MSYTTPVRAAVYLRISEDRSGEQLGVARQREDCLKLCGQRKWEPVEYLDNDVSASTGKRRPAYEQMLADVAAGKIAAVVAWDLDRLHRRPIELEAFMSLADEKHLALATVAGDVDLATPQGRLVARLKGSVAAHETEHKKARQRRAARQKAERGLPNWSKAFGYLPGPNGPEPDPRTAPLVKQAYADILAGASLGDVCRQWNDAGAFTITGRPWTTTTLSKFLRKPRNAGLRAYKGARYGPVDRDAIVGKAQWSPLVDEATFWAAQAVLDAPGRAPGRKSVRRHLLTGLAGCGKCGNHLAGSYRTDGRVVYVCKACHGVAILADNIEPILYHIVAERLAMPDAVDLLRREIHDAAEAETIRLELETLYGELDCLAVERAEGLLTARQVKICTDIVNAKITKLQARQQDQERLRVLDGIPLGTPRVAGVIAELSPDRFRAVLDVLAEVVVQPVGKSGRVFNPERVQVNWR

SEQ ID NO: 4620 - protein, 485 aa, synthetic construct
MTKKVAIYTRVSTINQAEEGFSIDEQIDRLTKYAEAMGWQVSDTYTDAGFSGAKLERPAMQRLINDIENKAFDTVLVYKLDRLSRSVRDTLYLVKDVFTKNKIDFISLNESIDTSSAMGSLFLTILSAINEFERENIKERMTMGKLGRARSGKSMMWTKTAFGYYHNRKTGILEIVPLQATIVKQIFTDYLSGISLTKLRDKLNESGHIGKDIPWSYRTLRQTLGNPVYCGYIKFKGSLFEGMHKPIIPYETYLKVQKELEERQQQTYERNNNPRPFQAKYMLSGMARCGYCGAPLRIVLGHKRKDGSRTMKYHCVNRFPRRTKGVTVYNDNKKCDSGTYDLGDLENTIIDNLIGFQENSDSLLKIINGNNQPILDTSSFKKRISQIDKKIQKNSDLYLNDFITMDELRARTDSLQAEKKLLKAKISENKFNDSTDVFELVKTQLGSIPINELSYDDKKKIVNNLVSKVDVTADNVDIIFKFQLA

SEQ ID NO: 4621 - protein, 469 aa, synthetic construct; identical to SEQ ID NO: 197

SEQ ID NO: 4622 - protein, 485 aa, synthetic construct
MTKKVAIYTRVSTTNQAEEGFSIDEQIDRLTKYAEAMGWQVSGTYTDAGFSGARLERPAMQRLINDIENKAFDTVLVYKLDRLSRSVRDTLYLVKDVFTKNKIDFISLSESIDTSSAMGSLFLTILSAINEFERENIKERMTMGKLGRAKSGKSMMWTKTAFGYYHNRKTGILEIVPLQATIVEQIFTDYLSGISLTKLRDKLNESGHIGKDIPWSYRTLRQTLDNPVYCGYIKFKGSLFEGMHKPIIPYETYLKVQKELEERQQQTYERNNNPRPFQTKYMLSGMARCGYCGAPLRIVLGHKRKDGSRTMKYHCANRFPRKTKGVTVYNDNKKCDSGAYDLSNLENTVIDNLIGFQENNDSLLKIINGSNQPILDTSSFKKQISQIDKKIQKNSDLYLNDFITLDELKGRTDSLQAEKELLKAKISENKFNDSTDVFELVKTQLGSIPINELSYDNKKKIVNNLVSKVDVTADNVDIIFKFQLA

SEQ ID NO: 4623 - protein, 469 aa, synthetic construct
MSYTTPVRAAVYLRISEDRSGEQLGVARQREDCLKLCGLRRWVPVEYLDNDVSASTGKRRPAYEQMLADITAGKIAAVVAWDLDRLHRRPIELEAFMSLADEKRLALATVAGDVDLATPQGRLVARLKGSVAAHETEHKKARQRRAARQKAERGYPNWSKAFGYLPGPNGPEPDPRTAPLVKQAYADILAGASLGDVCRQWNDAGAFTITGRPWTTTTLSKFLRKPRNAGLRAYKGARYGPVDRDAIVGKAQWSPLVDEATFWAAQAVLDAPGRAPGRKSVRRHLLTGLAGCGKCGNHLAGSYRTDGQVVYVCKACHGVAILADNIEPMLYHIVAERLAMPNAVDLLRREIHDAAEAETIRLELETLYGELDRLAVERAEGLLTARQVKICTDIVNAKITKLQARQLDQERLRVLDGIPLGTPQVAGTIAELSPDRFRAVLDVLAEVVVQPVGKGGRIFSPERVQVNWR

SEQ ID NO: 4624 - protein, 452 aa, synthetic construct
MKAAIYIRVSTQEQVGNYSIQAQTEKLTALCRSKDWDVYDIFIDGGYSGSNMNRPALNEMLSKLHEIDAVVVYRLDRLSRSQRDTTTLIEEYFLKNNVEFVSLSETLDTSSPFGRAMIGILSVFAQLERETIRDRMVMGKIKRIEAGLPLTTAKGRTFGYDVIDTKLYINEEEARQLQLIYDIFEEEQSITLLQKRLKKLGFKVRTYNRYSNWLTNDLYCGYVSYKDKVHVKGIHEPIISEEQFDRVQAIFTRMGKNPNMNRDSASLLNNLVVCSKCGLGFVHRSKDTMCRGKKYHYRYYSCKTYKHTHELEKCGNKTWRADKLEELIINRVNNYSFASRNVDKEDELDSLNEKLETERAKKKRLFDLYINGSYEVSELDSMMNDIDAQINYYESQIEANEELKKNKKIQENLADLATVDFDSLEFREKQLYLKSLINKIHIDGEQVTIEWL

SEQ ID NO: 4625 - protein, 452 aa, synthetic construct
MKAAIYIRVSTREQVENYSIQAQTEKLTALCRSKDWDVYDIFIDGGYSGSNMNRPALNEMLSKLHEIDAVVVYRLDRLSRSQRDTITLIEEYFLKNNVEFVSLSETLDTSSPFGRAMIGILSVFAQLERETIRDRMVMGKIKRVEAGLPLTTAKGRTFGYDVIDTKLYINEEEAKQLQLIYDIFEEEQSITFLQKRLKKLGFKVRTYSRYNNWLTNDLYCGYVSYKDKVHVKGIHEPIISEEQFYRVQEIFTRMGKNPNMNRDSASLLNNLVVCSKCGLGFVHRRKDTRSRGKKYHYRYYSCKTYKHTHELEKCGNKIWRADELEELIINRVNNYSFASRNVDKDDELDSLNEKLKIEHAKKKRLFDLYINGSYEVGELDSMMNDIDAQINYYESQIEANEDLKKDKKIQESLANLATVDYDSLEFREKQLYLKSLINKIYIDGEQVTIEWL

SEQ ID NO: 4626 - protein, 469 aa, synthetic construct
MSYTTPVRAAVYLRISEDRSGEQLGVARQREDCLKLCGERKWEPVEYLDNDVSASTGKRRPAYEQMLADITAGKIAAVVAWDLDRLHRRPIELEVFMSLADEKRLALATVAGDVDLATPQGRLVARLKGSVAAHETEHKKARQRRAARQKAERGHPNWSKAFGYLPGPNGPVPDPRTAPLVKQAYADILAGASLGDVCRQWNGAGAFTITGRPWTTTTLSKFLRKPRNAGLRAYRGTCYGPVDRDAIVGKAQWSPLVDEATFWAAQAVLDAPGRAPGRKSVRRHLLTGLAGCGKCGNHLAGSYRTDGRVVYVCKACHGVAILADNIEPILYRIVAERLAMPGAVDLLRREIHDVAEAETIRLELEALYGELDRLAVERAEGLLTARQVKISTDVVNAKITKLQAHQLDQERLRVLDGIPLGTPQVAGMIAELSPDRFRAVLDVLVEVVVQPVGKGGRIFNPERVQVNWR

SEQ ID NO: 4627 - protein, 485 aa, synthetic construct
MTKKVAIYTRVSTTNQAEEGFSIDEQVDRLTKYAEAMDWQVSDTYTDAGFSGAKLERPAMQCLINDIENRAFDTVLVYKLDRLSRSVRDTLYLVKDVFTKNKVDFISLNESIDTSSAMGSLFLTILSAINEFERENIKERMTMGKLGRARSGKSMMWTKTAFGYYHNRKTGILEIVPLQATIVEQIFTDYLSGISLTKLRDKLNESGHIGKDIPWSYRTLRQTLDNPVYCGYIKFKDSLFEGMHKPIIPYETYLKVQKELGERQQQTYERNNNPRPFQAKYMLSGMARCGYCGAPLRIVLGHRRKDGSRTMKYHCANRFPRKTEGATVYNDNKKCDSGTYDLSNLENTVIDNLIGFQENNDSLLKIINGNNQPILDTSSFKKQISQIDKKIQKNSDLYLNDFITMDELRNRTDSLQAEKRLLKAKISENKSNDSTDVFEQVKTQLGSIPINELSYDDKKEIVNNLVSKVDVTADNVDIIFKFQLA

SEQ ID NO: 4628 - protein, 469 aa, synthetic construct
MSYTTPVRAAVYLRISEDRSGEQLGVARQREDCLKLCGQRKWVPVEYLDNDVSASTGKRRPAYEQMLADITAGKIAAVVAWDLDRLHRRPIELEAFMSLADEKRLALATVAGDVDLATPQGRLVARLKGSVAAHETEHKKARQRRAARQKAERGLPNWSKAFGYLPGPNGPEPDPRTAPLVKQAYADILAGASLGDVCRQWNDAGAFTITGRPWTTTTLSKFLRKPRNAGLRAYKGAHYGPVDRDAIVGKAQWSPLVDEATFWAAQAVLDAPGRAPGRKSVRRHLLTGLAGCGKCGYHLAGSYRTDGRVVYVCKACHGVAILADNIEPILYHIVAGRLAMPDAVDLLRREIHDAAEAETVRLELEALYGELDRLAVERAEGLLTARQVKIGTDIVNAKITELQTRQLDQERLRVFDGIPLGTPQVAGVIAELSPDRFRAVLDVLAEVVVQPVGKSGRIFNTERVQVNWR

SEQ ID NO: 4629 - protein, 452 aa, synthetic construct
MKAAIYIRVSTQEQVGNYSIQAQAEKLTALCRSKDWDVYDIFIDGGYSGSNMNRPALNEMLSKLHEIDAVVVYRLDRLSRSQRDTTTLIEEYFLKNNVEFVSLSETLDTSSPFGRAMIGILSVFAQLERETIRDRMVMGKIKRIEAGLPLTTAKGRTFGYDVIDTRLYINEEEAKQLQLIYDIFEEEQSITFLQKRLKKLGFKVRSYNRYNNWLTNDLYCGYVSYKDKVHVKGIHEPIISEEQFYRVQEIFTRMGKNPNMNRDSASLLSNLVVCSKCGLGFVHRSKDTMSRGKKYHYRYYSCKTYKHTHELEKCGNKTWRADKLEELIINRVNNYSFASRNVDKEDELDSLREKLETERAKKKRLFDLYINGSYEVSELDSMMNDIDAQINYYESQIVANEELKKNKKIQEGLANLATVDFDSLEFREKQLYLKSLINKIYIDGEQVTIEWL

SEQ ID NO: 4630 - protein, 452 aa, synthetic construct
MRAAIYIRVSTREQVENYSIQAQTEKLTALCRSKDWDVYDIFIDGGYSGSNMNRPALNEMLSKLHEIDAVVVYRLDRLSRSQRDTITLIEEYFLKNNVEFVSLSETLDTSSPFGRAMIGILSVFAQLERETIRDRMVMGKIKRVEAGLPLTTAKGRTFGYDVIDTKLYINKEEARQLQLIYDIFEEERSITFLQKRLKKLGFKVHTYNRYNNWLTNDLYCGYVSYKDKVHVKGIHEPIISEEQFYRVQEIFTRMGKNPNMNRDSASLLSNLVVCSKCGLGFVHRRKDTMSRGKKYHYRYYSCKTYKHTHELEKCGNKIWRADKLEELIINRVSNYSLANRNVDKEDELDSLNEKLKTEHAKKKRLFDLYINGSYEVSELDSMMNDIDAQISYYEGQIEANEELKKNKKIRENLANLATVDFDSLEFREKQLYLKSLINKIYVDGEQVTIEWL

SEQ ID NO: 4631 - protein, 452 aa, synthetic construct
MKAAIYIRVSTREQVENYSIQAQTEKLTALCRSKDWDVYDIFIDGGYSGSNMNRPALNEMLSKLHEIDAVVVYRLDRLSRSQRDTITLIEEYFLKNNVEFVSLSETLDTSSPFGRAMIGILSVFAQLERETIRDRMVMGKIKRIEAGLPLTTAKGRTFGYDVIDTKLYINEEEAKQLQLIYDIFEEERSITFLQKRLKKLGFKVRTYSCYNNWLTNDLYCGYVSYKDKVYVKGIHEPIISEEQFHRVQEIFAHMGKNPNMNRDSASLLNNLVVCSKCGLGFVHRRKDTMSRGKKYHYRYYSCKTYKHTHELEKCGNKIWRADKLEELIINRVNNYSFASRNVDKAEELDSLNEKLKVEHAKKKRLFDLYINGSYNVSELDSMMNDIDAQINYYESQIEANEELKKNKKIQENLAGLATVDFGSLEFREKQLYLKSLIDKIYIDGEQVTIEWL

SEQ ID NO: 4632 - protein, 452 aa, synthetic construct
MKAAIYIRVSTQEQVGNYSIQAQTEKLTALCRSKGWDVYDIFIDGGYSGSNMNRPALNEMLSKLHEIDAVVVYRLDRLSRSQRDTTTLIEEYFLKNNVEFVSLSETLDTSSPFGRAMIGILSVFAQLERETIRDRTVMGKIKRVEAGLPLTTAKGRTFGYDVIDTKLYINEEEAKQLQLIYDIFEEEQSITSLQKRLKKLGFKVRSYNRYNNWLTNDLYCGYVSYKDKVHVKGIHEPIISEEQFYRVQEIFTRMGKNPNMNRDSASLLSNLVVCSKCGLGFVHRSKDTMSRGKKYHYRYYSCKTYKHTHELEKCGNKTWRADKLEGLIINRVNNYSFASRNVDKEDELVSLNEKLKIEHAKKQRLFDLYINGSYEASELDSMMNDIDAQINYYESQIEANEELKKTKKIQENLADLATVDFDNLEFREKQLYLKSLINKIYIDGEQVTIEWL

SEQ ID NO: 4633 - protein, 485 aa, synthetic construct
MTKKVAIYTRVSTTNQAEEGFSIDEQIDRLTKYAEAMGWQVSDTYTDAGFSGAKLERPAMQRLINDIEDKAFDTVLVYKLDRLSRSVRDTLYLVKDVFTKNKIDFISLNESIDTSSAMGSLFLTILSAINEFERENIKERMTMGKLGRAKSGKSMMWAKTAFGYYHNRKTGILEIVPLQATIVEQIFADYLSGISLTRLRDKLNESGHIGKDIPWSYRTLRQTLDNPVYCGYIKFKGSLFEGMHKPIIPYETYLKVQKELEERQQQTYGRNNNPRPFQAKYMLSGMARCGYCGAPLRIVLGHKRKDGSRTMKYHCANRFPRKTQGVTVYNDNKKCDSGTYDLSNLENTVIDILIGLQENNDSLLKIVNGNNQPILDTSSFKEQISQIDKKIQKNSDLYLNDFITMDELKDRTDSLQAEKKLLEAKISENKFNDSTDAFELVKTQLGSIPINELSYDNKKKIVNNLVSKVDVTADNVDIIFKFQLA

SEQ ID NO: 4634 - protein, 452 aa, synthetic construct
MKAAIYIRVSTREQVENYSIQAQTEKLTALCRSKDWDVYDIFIDGGYSGSNMNRPALNEMLSKLHEIDAVVVYRLDRLSRSQRDTITLIEEYFLKNNVEFVSLSETLDTSSPFGRAMIGILSVFAQLERETIRDRMVMGKIKRIEAGLPLTTAKGRTFGYDVIDTKLYINKEEARQLQLIYDIFEEEQSITFLQKRLKKLGFKVRTYNRYNNWLTNDLYCGYVSYKDKVHVKGIHEPIISEEQFYRVQEIFTRMGKNPNMNRDSASLLNNLVVCSKCGLGFVHRRKDIMSRGKKYHYRYYSCKTYKHIHELEKCGNKIWRADKLEELIINRVNNYSLAGRNVDKEDELDSLNEKLRIEHAKKKRLFDLYINGNYEVSELDSVMNDIDAQINYYESQIEANKELKKNKKIQENLAYLATVDFDSLEFREKQLYLKSLINKIYIDGEQVTIEWL

SEQ ID NO: 4635 - protein, 452 aa, synthetic construct
MKAAIYIRVSTQEQVENYSIQAQTEKLTALCRSKGWDVYDIFIDGGYSGSNMNRPALNEMLSKLHEIDAVVVHRLDRLSRSQRDTTTLIEEYFLKNNVEFVSLSETLDTSSPFGRAMIGILSVFAQLERETIRDRMVMGKIKRIEAGLPLTTAKGRTFGYDVIDTKLYINEEEARQLQLIYDIFEEEQSITSLQKRLKKLGFKVRTYNRYNSWLTNDLYCGYVSYKDKVHVKGIHEPIISEEQFYRVQEIFTRMGKNPNMNRDSASLLSNLVVCSKCGLGFVHRSKDTMSRGKKYHYRYYSCKTYKHTHELEKCGNKTWRADKLEELIINRVNNYSFASRNVGKEDELDSLNEKLKIEHAKKKRLFDLYINGSYEVSELDSMMDDIDAQINYYESQIEANEELKRNKKIQENLVDLATVDFDSLEFREKQLYLKSLINKIYIDGEQVTIEWL

SEQ ID NO: 4636 - protein, 469 aa, synthetic construct
MCYTTPVRAAVYLRISEDRSGEQLGVARQREDCLKLCDQRKWVPVEYLDNDVSASTGKRRPAYEQMLADITAGKIAAVVAWDLDRLHRRPIELEAFMSLADEKRLALATVAGDVDLATPQGRLVARLKGSVAAHETEHKRARQRRAARQKAERGYPNWSKAFGYLPGPNGPEPDPRTAPLVKQAYADILAGASLGDVCRQWNDAGAFTITGRPWTTTALSKFLRKPRNAGLRAYKGARYGPVDRDAIVGKAQWSPLVDEATFWAAQAVLDAPGRAPGRKSVRRHLLTGLAGCGKCGNHLAGSCRADGRVVYVCKACHGVAILADNIEPILYHIVAERLAKPDAVDLLRREIHDAAEAEAIRLELETLYGELDRLAVERAEGLLTARQVKISTDIVNAKITKLQARQLDQERLRVFDGIPLGTPQVAGVIAELSPDRFRAVLDVLAEVVVQPVGKGGRIFNPERVQVDWR

SEQ ID NO: 4637 - protein, 485 aa, synthetic construct
MTKKVAIYTRVSTTNQAEEGFSIDEQIDRLTKYAEAMGWQVSDTYTDAGLSGAKLERPAMQRLINDIENKAFDTVLVYKLDRLSRSVRDTLYLVKDVFTKNKIDFISLNESIDTSSAMGSLFLTILSAINEFERENIKERMTMGKLGRAKSGKSMMWTKTAFGYRHNRRTGILEIVPLQATIVEQIFTDYLSGISLTKLRDKLNESGHIGKDIPWSYRTLRQTLDNPVYCGYIKFKDSLFEGMHKPIIPYETYLKVQKELEERQQQTYERNNNPRPFQAKYMLSGMARCGYCGAPLRVVLGHKRKDGSRTMKYHCVNRFPRKTKGITVYNDNKKCDSGTYDLSNLENIVIDNLIGFQENNDSLLKIINGDNRPILDTSSFKKQISQIDKKIRKNSDLYLNDFITMDELKDRTDSLQAEKKLLEAKISENKFNDSTDVFELVKTQLGSIPINELSYDSKKKIVNNLVSKVDVTADNVDIIFKFQLA

SEQ ID NO: 4638 - protein, 469 aa, synthetic construct
MSYTTPVRAAVYLRISEDRSGEQLGVARQREDCLKLCGQRKWVPVEYLDNDVSASTGKRRPAYEQMLADITAGKIAAVVAWDLDRLHRRPIELEAFMSLADEKRLALATVAGDVDLATPQGRLVARLKGCVAAHETEHKKARQRRAARQKAERGLPNWSKAFGYLPGPNGPEPDPQTAPLVKQAYADILAGASLGDVCRQWNDAGAFTITGRPWTTTTLSKFLRKPRNAGLRAYKGARYGPVDRDAIVGKAQWSPLVDEATFWAAQAVLDAPGRAPGRKSVRRHLLTGLAGCGKCGNHLAGSYRTDGRVVYVCKACHGVAILADNIEPILYHAVVERLAMPDAVDLLRREIHDAAEADTVRLELEALYGELDRLAVERAEGLLTARQVKISTDIVNAEITKLQARQLDQERLRVFDGIPLGTPQVAGTIAELSPNRFRAVLDVLAEVVVQPVSKGGRILNPERVQVNWR

SEQ ID NO: 4639 - protein, 452 aa, synthetic construct
MKAAIYIRVSTREQVENYSIQAQTEKLTALCRSKDWDVYDIFIDGGYSGSNMNRPALNEMLSKLHEIDAVVVYRLDRLSRSQRDTITLIEEYFLKNNVEFVSLSETLDTSSPFGRAMIGILSVFAQLERETIRDRMVMGKIKRIEAGLPLTTAKGRTFGYDVIDTKLYINEEEAKQLQLIYDIFEEEQSITFLQKRLKKLGFKVRTYSRYNSWLTNDLYCGYVSYKDKVHVKGIHEPIISEEQFYRVQEIFTRMGKNPNMNRGSASLLNSLVVCGKCGLSFVHRRKDTMSRGKKYHYRYYSCKTYKHIHELEKCGNKIWRADKLEELIINRVNNYSFANRNVDKEDELDSLNEKLKIEHAKKERLFDLYINGSYEVSELDSMMDDIDAQINYYESQIEANEELKKNKKIQESLADLATVDFDSLEFREKQLYLKSLINKIYIDGEQVTIEWL

SEQ ID NO: 4640 - protein, 452 aa, synthetic construct
MKAAIYIRVSTREQVENYSIRAQTEKLTALCRSKDWDVYDIFIDGGYSGSNMNRPALNEMLSKLHEIDAVVVYRLDRLSRSQRDTITLIEEYFLKNNVEFVSLSETLDTSSPFGRAMIGILSVFAQLERETIRDRTVMGKIKRIEAGLPLTTAKGRTFGYDVIDTKLYINEEEAKQLQLIYDIFEEEQSITSLQKRLKKLGFKVRTYSRYNDWLTNDLYCGYVSYKDKVHVKGIHEPIISEEQFYRVQEIFTRMGRSPNMNRDSASLLNNLVVCGKCGLGFVHRRKDTMSRGKKYHYRYYSCKTYKHIHELEKCGNKIWRADKLEELIINRVNNYSLASRNVDKGDELDSLNEKLKIEHAKKKRLFDLYINGSYEASELDSMMNDIDAQINYYESQIEASEELKRNKRTQESLADLTAVDFDSLEFREKQLYLKSLINKIYIDGEQVTIEWL

SEQ ID NO: 4641 - protein, 452 aa, synthetic construct
MKAAIYIRVSTQEQVGNYSIQAQTEKLTALCCSKGWDVYDIFIDGGYSGSNMNRPALNEMLSRLHEIDAVVVYRLDRLSRSQRDTTTLIEEYFLKNNVEFVSLSETLDTSSPFGRAMIGILSVFAQLERETIRDRMVMGKIKRIEAGLPLTTAKGRTFGYDVIDTKLYINEEEAKQLRLIYDIFEEEQSITSLQKRLKKLGFKVRTYNRYYNWLTNDLYCGYVSYKDKVHVKGIHEPIISEEQFYRVQEIFTRMGKKPNMNRDSASLLNNLVVCSKCGLGFVHRSKDTMSRGKKYHYRYYSCKTYKHTHELEKCGNKIWRADKLEELIINRVNSYSFASRSVDKEDELDSLNEKLKIEHAKRKRLFDLYINGSYEVSELDSMMDDIDAQINYYESQIVANGELKKNKKIQENLADLATVDFDSLGFREKQLYLKSLINKIYIDGEQVTIEWQ

SEQ ID NO: 4642 - protein, 469 aa, synthetic construct
MSYTTPVRAAVYLRISEDRSGEQLGVARQREDCLNLCDQRKWEPVEYLDNDVSASTGKRRPAYEQMLADITAGKIAAVVAWDLDRLHRRPIELEAFMSLADEKRLALATVAGDVDLATPQGRLVARLKGSVAAHETEHKKARQRRAARQKAERGHPNWSKAFGYLPGPNGPEPDPQTAPLVEQAYADILAGASLGDVCRQWNDAGAFTITGRPWTTTTLSKFLRKPRNAGLRAYKSAPYGPVDRDAIVGKAQWDPLVDEATFWAAQAVLDAPGRAPGRKSVRRHLLTGLAGCGKCGNHLAGSYRTDGRVVYVCKACHGVTILADNIEPILYHVVAERLAMPDAVDLLRREIHDATEAETIRLELETLYGELDRLAVERAEGLLTARQVKTCTDIVNVKITKLQARQLDQERLRVFDGIPLGTPQVAGMIAKLSPDRFRAVLDVLAEVVVQPVGKSGRIFNPERVQVNWR

SEQ ID NO: 4643 - protein, 485 aa, synthetic construct
MTKKVAIYTRVSTTSQAEEGFSIDEQIDRLTKYAEAMGWQVSDTYTDAGLSGAKLERPAMQRLINDIENKAFDTVLVYKLDRLSRSVRDTLYLVKDVFTRNKIDFISLNESIDTSSAMGSLFLTILSAINEFERENIKERMTMGKLGRAKSGKSMMWTKTAFGYYHNRKTGILEIVPLQATIVEQIFTDYLSGISLTKLRDKLNESGHIGKDVPWSYRTLRQTLDNPVYCGYIKFKDSLFEGMHKPIIPHETYLKVQKELEERQQQTYERNNNPRPFQAKYMLSGMARCGYCGAPLKIVLGHKRKDGSRTMKYHCANRFPRKTKGVTVYNDNKKCDSGAYDLSNLENTVIDSLIGFQENNDSLLKIINGNNQQILDTSSFKEQISQIDKKIQKNSDLYLNDFITMDELKDRTDSLQAEKELLKAKISENKFNDSTDVFELVKTQLGSIPINELSYDNKKKIVNNLVSKVDVTADNVDIIFKFQLA

SEQ ID NO: 4644 - protein, 452 aa, synthetic construct
MKAAIYIRVSTREQVENYSIQAQTEKLTALCRSKDWEVYDIFIDGGYSGSNMNRPALNEMLSKLHEIDAVVVYRLDRLSRSQRDTITLIEEYFLKNNVEFVSLSETLDTSSPFGRAMIGILSVFAQLERETIRDRMVMGKIKRIEAGLPLTTAKGRTFGYDVIDTKLYINEEEARQLQLIYDIFEEEQSITFLQKRLKKLGFKVRTYSRYNSWLTNDLYCGYVSYKDKVHVKGIHEPIISEEQFYRVQEIFTRMGKNPNMNRDSASLLNNLVVCSKCGLGFVHRRKDTTSRGKRYHYRYYSCKTYKHTHELEKCGNKIWHADKLEELIINRVNNYSFASRNVDKEDELDSLNEKLKIEHAKKKRLFDLYINGSYEVSELDSMMNDIDAQINYYESRIEANEELKKNKKIQENLAELATVDFDSLEFREKQLYLKSLINRIYIDGEQVTIEWL

SEQ ID NO: 4645 - protein, 485 aa, synthetic construct
MTKKVAIYTRVSTTNQAEEGFSIDEQIDRLTKYAEAMGWQVSDTYTDAGFSGAKLERPAMQRLINDIENKAFDTVLVYKLDRLSRSVRDTLYLVKDVFTKNKIDFISLNESINTSSAMGSLFLTILSAINEFERENIKERMTMGKLGRAKSGKSMMWTKTAFGYYHNRKTGILEIVPLQATIVEQIFTDYLSGISLTKLRDKLNESGHIGKDIPWSYRTLRQTLDNPVYCGYIKFKDSLFEGMHKPIIPYETYLKVQKELEERQQQTYERNNNPRPFQAKYMLSGMARCGYCGAPLKIVLGHKRKDGGRTMKYHCANRFPRKTKGITVYNDNKKCDSGTYDLSNLENAVIDNLIGFQENDDSLLKIINGNNQPILDTSSVKKQISQIDKKIQKSSDLYLNDFITMDELKDRTDSLQAEKKLLKAKISENKFNDSTDVFELVKTQLGSIPINELSYGDKKRIVNNLVSKVDVTADSVDIIFKFQLA

SEQ ID NO: 4646 - protein, 469 aa, synthetic construct
MSYTTPVRAAVYLRISEDRSGEQLGVARQREDCLKLCGQRKWVPVEYLDNDVSASTGKRRPAYEQMLADITAGKIAAVVAWDLDRLHRRPVELEAFMSLADEKRLALATVAGDVDLATPQGRLVARLKGCVAAHETEHKKARQRRAARQKAERGYPNWSKAFGYLPGPNGPEPDPRTSPLVKQAYADILAGASLGDVCRRWNDAGAFTITGKPWTTTTLSKFLRKPRNAGLRAYKGARYGPVDRDAIVGKAQWSPLVDEATFWAAQAVLDAPGRAPGRKSVRRHLLTGLAGCGKCGNHLAGSYRTDGRVVYVCKACHGVAILADNIEPILYQIVAERLAMPDAVDLLRREIYDAVEAETIRLELETLCGELDRLAVERAEGLLTARQVKISTDIVNAKITKLQARQLDQERLRVLDGIPLGTPQVAGMIAELSPDRFRAVLDVLAEVVVQPVGKSGRIFNPERVQVNWR

SEQ ID NO: 4647 - protein, 485 aa, synthetic construct
MTKKVAIYTRVSTTNQAEEGFSIDEQIDRLTKYAEAMGWQVSDTYTDAGFSGAKLERPAMQRLINDIENKAFDTVLVYKLDRLSRSVRDTLYLVKDVFTKNKIDFISLNESINTSSAMGSLFLTILSAINEFERENIKERMTMGKLGRAKSGKSMMWTKTAFGYYHNRKTGILEIVPLQATIVEQIFTDYLSGISLTKLRDKLNESGHIGKDIPWSYRTLRQTLDNPVYCGYIKFKDSLFEGMHKPIIPYETYLKVQKELEERQQQTYERNNNPRPFQAKYMLSGMARCGYCGAPLRIVLGHKRKDGSRTMKYHCANRFPRKTKGVTVYNDSKKCDSGTYDLSNLENTVIDNLIGFQRNNDSLLKIISGNNQPILDTSSFKRQISQIDKKIQKNSDLYLNDFITMDELKARTDSLQAEKKLLKAKISENKFNDNTDVFELVKTQLGSIPINELSYDNKRKIVDNLVSKVDVTADNVDIIFKFQLA

SEQ ID NO: 4648 - protein, 452 aa, synthetic construct
MKAAIYIRVSTREQVENYSIQAQTEKLTALCRSKDWDVYDIFIDGGYSGSNMNRPALNEMLSKLHEIDAVVVYRLDRLSRSQRDTITLIEEYFLKNSVEFVSLSETLDTSSPFGRAMIGILSVFAQLERETIRDRMVMGKIKRIEAGLPLTTAKGRTFGYDVIDTKLYINEEEAKQLRLIYDIFEEEQSITFLQKRLKELGFKVRTYNRYNNWLTNDLYCGYVSYKDKVHVKGIHEPIISEEQFYRVQEIITRMGKNPNMNRDSASLLNNLVVCSKCGLGFVHRRKDAMSRDKKYHYRYYSCKTYKHIHELEKCGNKIWRADKLEELIINRVNDYSVASRNVDKEDELDSLNEKLKIEHAKKRRLFDLYINGSYEVNELDSMMNDIDAQINYYESQIEANEELKKNKKIQENLAYLATVGFDSLEFREKQLYLKSLINKIYIDGEQVTIEWL

SEQ ID NO: 4649 - protein, 452 aa, synthetic construct
MKAAIYIRVSTREQVENYSIQAQTEKLTALCRSKDWDVYDIFVDGGYSGSNTNRPALNEMLSKLHEIDAVVVYRLDRLSRSQRDTITLIEEHFLKNNVEFVSLSETLDTSSPFGRAMIGILSVFAQLERETIRDRMVMGKIKRIEAGLPLTTAKGRTFGYDVIDTRLYINEEEAKQLQLIYDIFEEEQSITFLQKRLKKLGLKVHTYSRYNSWLTNDLYCGYVSYKDKVHVKGIHEPIISEEQFYRVQEIFARMGKNPNMNRDSASLLNNLVVCSKCGLGFVHRRKDTMSRGKKYHYRYYSCKTYKHIHELEKCGNKIWRADKLEELIIDRVNNYSVASRNVDEEDALDSLNEKLKIEHAKKKRLFDLYINGSYEVGELDSMMSDIDTQINYYESQIGANEGLKKDRKVQENLADLATVDFGSLEFREKQRYLKSLISKIYIDGEQVTIEWL

SEQ ID NO: 4650 - protein, 485 aa, synthetic construct
MTKKVAIYTRVSTTNQAEEGFSIDEQIDRLTKYAEAMGWQVSDTYTDAGLSGAKLERPAMQRLINDIENKAFDTVLVYKLDRLSRSVRDTLYLVKDVFTKNKIDLISLNESIDTSSAMGSLFLTILSAINEFERENIKERTTMGKLGRARSGKSMMWTKTAFGYYHNRETGILEIVPLQATIVEQIFTDYLSGISLTKLRDKLNESGHIGKDIPWSYRTLRQTLDNPVYCGYIKFKDSLYEGMHKPIIPYETYLKVQKELEERQQQTYERNNNPRPFQAKYMLSGMARCGYCGAPLRIVLGHKRKDGSRTMKYHCANRFPRKTKGVTVYNDNKKCDSGTYDLSYLENTVIDNLIGFQENNDSLLKIINGNNQPILDTSSFKKRINQIDKKIQKNSDLYLNDFITMDELKDRTDSLQAEKKLLKAKISENKFNDSTDVFELVKTQLGSIPINELSYDNKKKIVNNLVSKVDVTADNVDIIFKFQLG

SEQ ID NO: 4651 - protein, 452 aa, synthetic construct
MKAAIYIRVSTREQVENYSIQAQTEKLTALCRSKDWDVYDIFIDGGYSGSNMNRPALNEMLSKLHEIDAVVVYRLDRLSRSQRDTITLIEEYFLKNNVEFVSLSETLDTSSPFGRAMIGILSVFAQLERETIRDRMVMGKIKRIEAGLPLTTAKGRTFGYDVIDTKLYINEEEAKQLQLIYDIFEEEQSITFLQKRLKKLGFKVRTYNCYSNWLTNDLYCGYVSYKDKVHVKGIHEPIISEEQFYRVQEIFTRMGKSPNMNRESASLLNNLVVCGKCGLGFVHRRKDATSRDKKYHYRYYSCRTYKHIHELEKCGNKIWRADKLEELIINRVNNYSIVSRNADKEDELDSLNEKLKIEHAKKKRLFELYINGSYEVSELDGMMNDIDAQINYYESQIEANKELKKNKKILENLAYLATVDFDSLEFREKQLYLKSLINKIYIDGEQVTIEWL

SEQ ID NO: 4652 - protein, 452 aa, synthetic construct
MKAAIYIRVSTREQVENYSIQAQTEKLTALCRSRDWDVYDVFIDGGYSGSNMNRPALNEMLSRLHEIDAVVVYRLDRLSRSQRDTITLIEEYFLKNNVEFVSLSETLDTSSPFGRAMIGILSVFAQLERETIRDRMVMGKIKRIEAGLPLTTAKGRTFGYDVIGAKLYINEEEAKQLQLIYDIFEEEQSITFLQKRLKKLGFKVHTYNRYNNWLTNDLYCGYVSYKDKVHVKGIHEPIISEEQFYRVQEIFTRMGKNPNMNRDSASLLNNLVVCSKCGLGFVHRRKDAMSRDKKYHYRYYSCKTYKHIHELEKCGNKIWRADKLEELIINRVNNYSLANRNVDKGDELDSLNEKLKIEHAKKRRLFELYINGRYEVSELDSMMNDIDAQINYYESQIEANEELKKNKKIPESLAHLATVDFDSLEFREKQLYLRSLINKIYIDGEQVTIEWL

SEQ ID NO: 4653 - protein, 452 aa, synthetic construct
MKAAIYIRVSTREQVENYSIQAQTEKLTALCRSKDWDVYDIFIDGGYSGSNMNRPALNEMLSKLHEIDAVVVYRLDRLSRSQRDTITLIEEYFLKNNVEFVSLSETLDTSSPFGRAMIGILSVFAQLERETIRDRMVMGKIKRVEAGLPLTTAKGRTFGYDVVDTRLYINEEEARQLQLIYDIFEEEQSITFLQKRLKKLGFKVRTYGCYNDWLTNDLYCGYVSYKDKVHVKGIHEPIISEEQFYRVQEIFTRMGRNPNMNRDSASLLNNLVVCSKCGLGFVHRRKDTMNRGKKYHYRYYSCKTYKHIHELEKCGNKIWRADKLEELIINRVNNYSSAGRNVDEEDELDSLNEKLKIEHAKKKRLFDLYINGSYEVSELDSMMNDIDAQINYYESQIEANEELKKNEKIQENLADLATVDFDSLEFREKQLYLKSLINKIYIDGEQVTIEWL

SEQ ID NO: 4654 - protein, 469 aa, synthetic construct
MSYTTPVCAAVYLRISEDRSGEQLGVARQREDCLKLCGQRKWVPVEYLDNDVSASTGKRRPAYEQMLADITAGKIAAVVAWDLDRLHRRPVELEAFMSLADEKRLALATVAGDVDLATPQGRLVARLKGCVAAHETEHKKARQRRAARQKAERGLPNWSKAFGYLPGPNGPEPDPRTAPLVKQAYADILAGASLGDVCRQWNNAGALTITGRPWTTTALSKFLRKPRNAGLRAYKGARYGPVDRDAIVGKAQWSPLVDEATFWAAQAVLDAPGRAPGRKSVRRHLLTGLAGCGRCGSHLAGSYRTDGRVVYVCKACHGVAILADNIEPILYHIVAERLAMPDAVNLLRREIHDAADAETIRLELETLYGELDRLAVERAEGLLTARQVKIGTDIVNAKITKLQARQLDQERLRVFDGIPLGTPQVAGMIAELSPNRFRAVLDVLAEVVVQPVGKNGRIFNPERVQVNWR

SEQ ID NO: 4655 - protein, 452 aa, synthetic construct
MKAAIYIRVSTREQVENYSIQAQTEKLTALCRSKDWDVYDIFIDGGYSGSNMNRPALNEMLSKLHEIDAVVVYRLDRLSRSQRDTITLIEEHFLKNNVEFVSLSETLDTSSPFGRAMIGILSVFAQLERETIRDRMVMGKIKRIEAGLPLTTAKGRTFGYDVIDTKLYINEEEAKQLQLIYDIFEEEQSITFLQKRLKKLGFKVHTYNRYNNWLTNDLYCGYVSYKDKVHVKGIHEPIISEEQFYRVQEIFTRMGKNPNMNRDSASLLNNLVVCSKCGLGFVHRRKDAMSRDKKYHYRYYSCKTYKHIHELEKCGNKIWRADKLEELIINRVSNYSIASRSVDKEDELDSLNEKLKIEHAKKKRLFDLYINGSYEVSELDSMMNDIDAQINYYESQIEANEELKKNKKVQENLAYLATVDFDSLEFREKQLYLKSLINKIYVDGEQVTIEWL

SEQ ID NO: 4656 - protein, 452 aa, synthetic construct
MKAAIYIRVSTREQVENYSIQAQTEKLTALCRSKDWDVYDIFIDGGYSGSNMNRPALNEMLSKLHEIDAVVVYRLDRLSRSQRDTITLIEEYFLKNNVEFVSLSETLDTSSPFGRAMIGILSVFAQLERETIRDRMVMGKIKRIEAGLPLTTAKGRTFGYDVIDTKLYINEEEAKQLQLIYDIFEEEQSITFLQKRLKKLGFKVRTYSRYNSWLTNDLYCGYVSYKDKVHVKGIHEPIISEEQFHRVQEIFTRMGKNPNMNRDSASLLNNLVVCSKCGLGFVHRRKDTMSRGKKYRYRYYSCKTYKHTHELEKCGNKIWRADKLEELIINRVNNYSFASRNVDKEDELDSLNEKLKIEHEKKKRLFDLYINGSYEVSELDCMMNDIDAQINYYESQIEANKELKKDKRIQESLANLATVDYDSLEFREKQLYLKSLINKIYIDGEQVTIEWL

SEQ ID NO: 4657 - protein, 452 aa, synthetic construct
MKAAIYIRVSTREQVENYSIQAQTEKLTALCRSKDWDVYDIFIDGGYSGSNMNRPALNEMLSKLHEIDAVVVYRLDRLSRSQRDTITLIEEYFLKNNVEFVSLSETLDTSSPFGRAMIGILSVFAQLERETIRDRMVMGKIKRIEAGLPLTTAKGRTFGYDVIGTKLYINEEEAEQLQLIYDIFEEEQSITFLQKRLKKLGYKVRTYSRYNSWLTNDLYCGYVSYKDKVHVKGIHEPIISEEQFYRVQEIFTRMGKNPNMNRDSASLLNNLVVCSKCGLGFVHRRKDTMSRGKKYHYRYYSCKTYKHTHELEKCGNKIWRADKLEELIINRVNNYSLTSRDVDKEGELGSLNEKLKVEHAKKKRLFDLYINGSCEVNELDSMMNDIDAQINYYESQIEASEERKKNKKIQENLAELATVDFDSLEFRDKQLYLKSLINKIYIDGEQVTIEWL

SEQ ID NO: 4658 - protein, 452 aa, synthetic construct
MKAAIYIRVSTREQVENYSIQAQTEKLTALCRSKDWDVYDIFIDGGYSGSNMNRPALNEMLSKLHEIDAVVVYRLDRLSRSQRDTITLIEEYFLKNNVEFVSLSETLDTSSPFGRAMIGILSVFAQLERETIRDRMVMGKIKRIEAGLPLTTAKGRTFGYDVIDTKLYINEEEAKQLQLIYDIFEEEQSITFLQKRLKKLGFEVHTYNRYNNWLTNDLYCGYVSYKDKVHVKGIHEPIISEEQFYRVQEIFTRMGKNPNTNRDSASLLNNLVVCSKCGLGFVHRRKDTMSRGKKYHYRYYSCKTYKHTHELEKCGNKIWRADKLEELVINRVNNYSFASRNVDKEDELASLNEKLKIEHAKKKRLFDLYINGSYEVSELDSMMNDIDAQINYYESQIEANEELRKNKKIQENLANRATVDYDSLEFREKQLYLKSLINKIYIDGEQVTIEWL

SEQ ID NO: 4659 - protein, 485 aa, synthetic construct
MTKKVAIYTRVSTTNQAEEGFSIDEQIDRLTKYAEAMGWQVSDTYTDAGFSGAKLGRPAMQRLINDIETKAFDTVLVYKLDRLSRSVRDTLHLVKDVFTKNKIDFISLNESIDTSSAMGSLFLTILSAINEFERENIKERMTMGKLGRAKSGKSMMWTKTAFGYYHNRKTGILEIVPLQAAIVEQIFTDYLSGISLTRLRDKLNESGHIGKDIPWSYRTLRQTLDNPVYCGYIKFKDSLFEGMHKPIIPYETYLKVQKELEERQQQTYERNNNPRPFQAKYMLSGMARCGYCGAPLRIVLGRKRKDGSRTMKYHCANRFPRKTKGVTVYNDNKKCDSGTYDLSSLENTVIDNLIGFQENNDSLLKIINGNSQPILDTSSFEKQISQIDKKIQKNSDLYLNDFITMDELKGRTDSLQAEKKLLKAKISENKFNDSTDVFELVKTQLGSIPINELSYDNKKKIVNNLVSKVDVTADNVDIIFKFQLA

SEQ ID NO: 4660 - protein, 485 aa, synthetic construct
MTKKVAIYTRVSTTNQAEEGFSIDEQIDRLTKYAEAMGWQVSHTYTDAGSSGAKLERPAMQRLINDIENKAFDTVLVHKLDRLSRSVRDTLYLVKDVFTKNKIDFISLNESIDTSSAMGSLFLTILSAINEFERENIKERMTMGKLGRAKSGKSMMWTKTAFGYYHNRKTGILEIVPLQATIVEQIFTDYLSGISLTKLRDKLNESGHIGKDIPWSYRTLRQTLDNPVYCGYIRFKDSLFEGMHKPIIPYATYLKVQKELEERQRQTYERNNNPRPFQAKYMLSGMARCGYCGAPLRIVLGHKRKDGSRTMKYHCANRFPRKTKGVTVYNDNKKCDSGTYDLSNLENTVIDILIGFQENNDSLLKIINANNQPILDTSNLKKQISQIDKKIQRNSDLYLNDFITMDELKDRTDSLQAEKRLLKAKICENKFNGSTDVFELVKAQLGSIPINELSYDNKKKIVNNLVSKVDVTADNVDIIFKFQLT

SEQ ID NO: 4661 - protein, 469 aa, synthetic construct
MSYTTPVRAAVYLRISEDRSGEQLGVARQREDCLELCDQRKWVPVEYLDNDVSASTGKRRPAYEQMLADITAGKIAAVVAWDLDRLHRRPIELEAFMSLADEKRLALATVAGDVDLATPQGRLVARLKGSVAAHETEHKKARQRRAARQKAERGLPNWSKAFGYLPGPNGPEPDPRTAPLVKQAYADILAGASLGDVCRRWNDAGALTITGRPWTTTTLSKFLRKPRNAGLRAYKGARYGPVDRDAIVGKAQWSPLVDEATFWAAQAALDAPGRAPGRKSVRRHLLTGLAGCGKCGNHLAGSHRTDGRVVYVCKACHGVAILADSIEPILYHVVAERLAMPDAVDLLRREFHDAAEAETIRLELETLYGELDRLAVERAEGLLTARQVKVSTDIVSAKITKLQARQLDQERLRVFDGIPLGTPQVAGMIAELSPDRFRAVLDVLAEVVVQPVGKSGRIFNPERVQVNWR

SEQ ID NO: 4662 - protein, 452 aa, synthetic construct
MKAAIYIRVSTQEQVGNYSIQAQTEKLTALCRSKDWDVYDIFIDGGYSGSNMNRPALNEMLSKLHEIDAVVVYRLDRLSRSQRDTTTLIEEYFLKNNVEFVSLCETLDTSSPFGRAMIGILSVFAQLERETIRDRMVMGKIKRIEAGLPLTTAKGRTFGYDVIDTKLYINEEEAKQLQLIYDIFEEEQSITSLQKRLKKLGFKVRTYNRYNNWLTNDLYCGYVSYKDKVHVKGIHEPIISEEQFYRVQEIFTRMGKNPNMNRDSASLLNSLVVCSKCGLSFVHRSKDTMSRGKKYHYRYYSCKTYKHTHELEKCGNKTWRADKLEELIINRVNNYSFASRNVDKEDELDSLNEKLKIEHAKKRRLFDLYINGSYEVSELDSMMNDIDAQINYYESRIVANEELKKTKKIQVSLANLATVDFDSLEFREKQLYLKSLINKIYIDGEQVTIEWL

SEQ ID NO: 4663 - protein, 485 aa, synthetic construct
MTRKVAIYTRVSTTNQAEEGFSIDEQIDRLTKYAEAMGWQVSDTYTDAGFSGAKLERPAMRRLINNIENKAFDTVLVYKLDRLSRSVRDTLYLVREVFAKNKIDFISLNESIDTSSAMGSLFLTILSAINEFERENIKERMTMGKLGRAKSGKSMMWTKTAFGYYHSRKTGILEIVPLQATIVEQIFTDYLSGTSLTKLRDKLNESGHIGKDIPWSYRTLRQTLNNPVYCGYIKFKDSLFEGMHKPIISYETYLKVQKELEERQQQTYERNNNPRPFQAKYMLSGVARCGYCGAPLRIVLGHKRKDGSRTMKYHCANRFPRKTKGVTVYNDNKKCDSGTYDLRNLEDTVIDNLIGFQENNDILLKIINGNNQPILDTSSFERQVSQIDKKIQKNSDLYLNDFITMDELKDRTDSLQAEKKLLKAKISENKFNDNTDVFELVKTQLGSIPINELSYDNKKKIVNNLVSKVDVTADSVDIIFKFQLA

SEQ ID NO: 4664 - protein, 469 aa, synthetic construct
MSYTAPVRAAVYLRISEDRSGEQLGAARQREDCLKLCDQRKWVPVEYLDNDVSASTGKRRPAYEQMLADITAGKIAAVVAWDLDRLHRRPIELEAFMSLADEKRLALATVAGDVDLATPQGRLVARLKGSVAAHETEHKKARQRRAARQKAERGHPNWSKAFGYLPGPNGPEPDPRTAPLVKQAYADILAGASLGDVCRQWNDAGAFTITGRPWTTTTLSKFLRKPRNAGLRAYKGARYGPVDRDAIVGKAQWSPVVDEATFWAAQAVLDAPGRAPGRKSVRRHLLTGLAGCGKCGYHLAGSYRTDGKVVYVCKACHGVAILADNIEPILYHIVAERLALPNAVDLLRREIHDVAEAETIRLELETLYGELDRLAVERAEGLLTARQVKICTDIVNAKITKLQAYQLDQERLRVLDGIPLGTPQVAGVIAELSPDRFRAVLDVLAEVVVRPVGKSGRIFNPERVQVNWR

SEQ ID NO: 4665 - protein, 485 aa, synthetic construct
MTKKVAIYTRVSTTNQAEEGFSIDEQIDRLTKYAEAMGWQVSDTYTDGGFSGAKLERPAMQRLINDIENKAFDTVLVYKLDRLSRSVRDTLYLVKDVFTKNKIDFISLNESIDTSSAMGSLFLTILSAINEFERENIKERMTMGKLGRAKSGKSMMWTKTAFGYYHNRKTGILEIVPLQATIVEQIFTDYLSGISLTKLRDKLNESGHIGKDIPWSYRTLRQTLDNPVYCGYIKFKDNLFEGMHKPIIPYETYLKVQKELEERQQQAYVRNNNPRPFQAKYMLSGMARCGYCGAPLRIVLGHKRKDGSRTMKYHCANRYPRKTKGVTVYNDNKKCDSGTYDLSKLENTVIDILIGLQENNDSLLKIINGNNQPILDTSCFKRQISQIDKKIQKNSDLYLNDFITMDELKDRTDSLQAEKKLLKAKISENKCNDSTDVFELVKTQLGTIPINELSYDNKKKVVNNLVSKVDVTADNVDIIFKFQLA

SEQ ID NO: 4666 - protein, 452 aa, synthetic construct
MKAAIYIRVSTQEQVGNYSIQAQTEKLTALCRSKDWDVYDIFIDGGYSGSNMNRPALNEMLSKLHEIDAVVVYRLDRLSRSQRDTTTLIEEYFLKNNVEFVSLSETLDTSSPFGRAMIGILSVFAQLERETIRDRMVMGKIKRIEAGLPLTTAKGRTFGYDVIDTKLYINEEEAKQLQLIYDIFEEVQSITSLQKRLKKLGFKVRTYNRYSNWLTNDLYCGYVSYKDKVHVKGIHEPIISEEQFYRVQEIFTRMGKNPNMNRDSASLLSNLVVCSKCGLSFVHRSKDTMSRGKKYHYRYYSCKTYKHTHELEKCGNKTWRADKLEELIINRVNNYSLASRNVDREDELDSLNEKLQIERAKRKRLFDLYINGGYEVSELDSMMSDIDAQINYYESRIEANEELEKNKKIQENLADLATVDFNSLELREKQLYLKSLINKIYIDGEQVTIEWL

SEQ ID NO: 4667 - protein, 452 aa, synthetic construct
MKAAIYIRVSTREQVENYSIQAQTEKLTALCRSKDWDVYDIFIDGGYSGSNMNRPALNEMLSKLHEIDAVVVYRLDRLSRSQRDTITLIEEYFLKNNVEFVSLSETLDTSSPFGRAMIGILSVFAQLERETIRDRMVMGKIKRIEAGLPLTTAKGRTFGYDVIDTKLCINEEEARQLQLIYDIFEEEQSITFLQKRLKKLGFKVRTYNCYNNWLTNDLYCGYVSYKDKVHVKGIHEPIISEEQFYRVQEIFTRTGKNPNMNRDSASLLNSLVVCSKCGLGFVHRRKDTTSRGKKYHYRYYSCKTYKHTHELEKCGNKIWRADKLEELIINRVNNYSFASRNVDKEDELDSLNEKLRTEHAKRKRLFDLYINGSHEVSELDSMMNDIDAQINYYEGQIEANEELKKNKKIQENLAGLATVDFDSLEFREKQLYLKSLINKIYIDGEQVTIEWL

SEQ ID NO: 4668 - protein, 452 aa, synthetic construct
MKAAIYIRVSTREQVENYSIQAQTERLTALCRSKDWDVYDIFIDGGYSGSNMNRPALSEMLSKLHEIDAVVVYRLDRLSRSQRDTITLIEEYFLKNNVEFVSLSETLDTSSPFGRAMIGILSVFAQLERETIRDRMVMGKIKRIEAGLPLTTAKGRTFGYDVIDTKLYINEEEAKQLQLIYDIFEEEQSITSLQKRLKKLGFKVRTYNRYNNWLTNDLYCGYVSYKDKVHVKGIHEPIISEEQFYRVQEIFTRMGKNPNMNRDSASLLNNLVVCSKCGLGFVHRRKDAMSRDKKYHYRYYSCKTYKHIHELEKCGNKIWRADKLEELIINRVNNYSLASRNVDKEDELDSLNEKLKVEHAKRKRLFDLYINGNYEVSELDSMMNDIDAQINYYESQNEAKEELRKNKKIQENLAYLATVDFDSLEFREKQLYLKSLINKIYIDGEQVTIEWL

SEQ ID NO: 4669 - protein, 452 aa, synthetic construct
MKAAIYIRVSTREQVENYSIQAQTEKLTALCRSKDWDVYDIFIDGGYSGSNMNRPALNEMLSRLHEIDAVVVYRLDRLSRSQRDTITLIEEYFLKNNVEFVSLSETLDTSSPFGRAMIGILSVFAQLERETIRDRMVMGKIKRVEAGLPLTTAKGRTFGYDVIDTKLYTNEEEAKQLQLIYDIFEEERSITFLQKRLKKLGFKVHTYNRYNNWLTNDLYCGYVSYKDKVHVKGIHEPIISEDQFYRVQEIFTRMGKNPNMNRDSASLLNNLVVCSKCGLGFVHRRKDTMSRGKKYHYRYYSCKTYKHIHELEKCGNKIWRADKLEELIINRVNNYSLASRNVDKEDELDSLNEKLKIEHAKKRRLFELYINGSYEVSVLDSMMNDIDAQINYYESQIEANEELKKNKKIQENLANLAAVDYDSLEFREKQLYLKSLINKIYIDGEQVTIEWL

SEQ ID NO: 4670 - protein, 452 aa, synthetic construct
MKAAIYIRVSTREQVENYSIQAQTEKLTALCRSKDWDVYDIFIDGGYSGSNMNRPALNEMLSKLHEIDAVVVYRLDRLSRSQRDTITLIEEYFLKNNVEFVSLSETLDTSSPFGRAMIGILSVFAQLERETIRDRMVMGKIKRVEAGLPLTTAKGRTFGYDVIDTKLYINEDEAKQLQLIYDIFEEEQSITFLQKRLKKLGLKVRTYNRYNNWLTNDLYCGYVSYKDKVHVKGIHEPIISEEQFYRVQEIFARMGKNPNMNRDSESLLNNLVVCSKCGLGFVHRRKDTTSRGKKYHYRYYSCKTYKHIHELEKCGNKIWRADRLEELIINRVNSYSFASRDVDKEDELDSLNEKLKIEHAKKKRLFDLYINGSYGVSELDGMMNNIDAQINYYESQIEANEELKKNKEIRESLADLATVDFDSLEFREKQLYLKSLISKIYIDGEQVIIEWL

SEQ ID NO: 4671 - protein, 452 aa, synthetic construct
MKAAIYIRVSTREQVENYSIQAQTEKLTALCRSKDWDVYDIFIDGGYSGSNMNRPALNEMLSKLHEIDAVVVYRLDRLSRSQRDTITLIEEYFLKNNVEFVSLCETLDTSSPFGRAMIGILSVFAQLERETIRDRMVMGKIKRIEAGLPLTTAKGRTFGYDVIDTKLYINEEEAKQLQLIYDIFEEERSITSLQKRLKKLGFKVHTYNRYNNWLTNDLYCGYVSYKDKVHVKGIHEPIISEEQFHRVQEIFTRMGKNPNMNRDSASLLNNLVVCSKCGLGFVHRRKDTTSRGKKYRYRYYSCKTYKHTHELEKCGNKIWRADKLEELVINRANNYSLVRRNVDKEDKLDSLNEKLKIEHAKKRRLFDLYINGSYNVSELDSMMNDIDAQINYYVSQIEANEELKKNKKIQENLAGLATVDFDSLEFREKQLYLKSLINKIYIDGEQVTIEWL

SEQ ID NO: 4672 - protein, 452 aa, synthetic construct
MKAAIYIRVSTREQVENYSIQAQTEKLTALCRSKDWDVYDIFVDGGYSGSNMNRPALNEMLSKLHEIDAVVVYRLDRLSRSQRDTITLIEEYFLKNNVEFVSLSETLDTSSPFGRAMIGILSVFAQLERETIRDRMVMGKIKRIEAGLPLTTAKGRTFGYDVIDAKLYINEEEAKQLQLIYDIFEEEQSITFLQKRLKKLGFKVRTYNRYNNWLTNDLYCGYVSYKDKVHVKGIHEPIISEEQFYRVQEIFTRMGKNPNMNRGSASLLNNLVVCGKCGLGFVHRRKDAMSRDKKYHYRYYSCKTYKHIHELEKCGNKIWRADELEELIINRVNNYSLASRNVDKEDGLDSLNEKLKIEHAKKKRLFDLYLNGSYEVSELDSMMNDIDAQISYYESQIEANEALIKNKKIQENLAHLATVDFDSLEFREKQLYLKSLIHKIYIDGEQVTIEWL

SEQ ID NO: 4673 - protein, 452 aa, synthetic construct
MKAAIYIRVSTQEQVENYSIQAQTEKLTALCRSKDWDVYDIFIDGGYSGSNMNRPALNEMLSKLHEIDAVVVYRLDRLSRSQRDTTTLIEEYFLKNNVEFVSLSETLDTSSPFGRAMIGILSVFAQLERETIRDRMVMGKIKRIEAGLPLTTAKGRTFGYDVIDTKLYINEEEAKQLRLIYDIFEEEQSITFLQKRLKKLGLKVRTYNRYNNWLTNDLYCGYVSYKDKVHVKGIHEPIISEEQFYRVQEIFTRMGKNPNMNRDSASLLNNLVVCSKCGLGFVHRSKDTMSRGKKYHYRYYSCRTYKHTHELEKCGNKTWRADKLEELIISRVNNYSFASRNVDKEDELDSLNEKLKIEHAKKKRLFDLYINGSYEVSELDSMMNDIDAQINYYESQIEANEELKKNKKIQENLADLPTVDFDSLEFREKQLYLKSLINKIYIDGEQVTIEWL

SEQ ID NO: 4674 - protein, 452 aa, synthetic construct
MKAAIYIRVSTREQVENYSIQAQTEKLTALCRSKDWDVYDIFIDGGYSGSNMNRPALNEMLSKLREIDAVVVYRLDRLSRSQRDTITLIEEYFLKNNVEFVSLSETLDTSSPFGRAMIGILSVFAQLERETIRDRMVMGKIKRIEAGLPLTTAKGRTFGYDVIDTKLYINEEEAKQLRLIYDIFEEEQSITFLQKRLKRLGFKVRTYNRYNNWLTNDLYCGYVSYKDKVHVKGIHEPIISEEQFHRVQEIFARMGKNPNMNRDSASLLNNLVVCSKCGLGFVHRRKDAKSRDKKYHYRYYSCKTYKHIHELEKCGNKIWRADKLEELIINRVNNYSLASRNVDKEDELDSLNEKLKIEHAKKKRLFDLYINGRYEVSELDSMMNDIDAQINYYESQIEANEELKKNKQIQENLTNLATVDFDSLEFREKQRYLKSLINKIYIDGEQVTIEWL

SEQ ID NO: 4675 - protein, 485 aa, synthetic construct
MTKKVAIYTRVSTTNQAEEGFSIDEQIDRLTKYAEAMGWQVSGTYTDAGFSGAKLERPAMQRLINDIENKAFDTVLVYKLDRLSRSVRDTLYLVKDVFTKNKIDFISLNESIDTSSAMGSLFLTILSAINEFERENIKERMTMGKLGRAKSGKSMMWTKTAFGYYHNRKTGILEIVPLQATIVEQIFTDYLSGISLTKLRDKLNVGGHIGKDIPWSYRTLRQTLDNPVYCGYIKFKDSLFEGMHKPIIPYETYLKVQKELERRQQQTYERNNNPRPFQAKYMLSGMARCGYCGAPLKIVLGHKRRDGSRTMKYHCANRFPRKTKGVTVYNDSKKCNSGTYDLSNLESTVIDTLIGLQGNDDSLLKIINGNNRPVLDTSNFKKQISQIDKKIQKNSDLYLNDFITMDELKARTDSLQAEKKLLKAKISENKFNDSTDVFELVRTQLGSIPINELSYDNKKKIVNNLVSKVDVTADNVDIVFKFQLA

SEQ ID NO: 4676 - protein, 452 aa, synthetic construct
MKAAIYIRVSTREQVENYSIQAQTEKLTALCRSKDWDVYDIFVDGGYSGSNMNRPALNEMLSKLHEIDAVVVYRLDRLSRSQRDTITLIEEYFLKNNVEFVSLSETLDTSSPFGRAMIGILGVFAQLERETIRDRMVMGKIKRIEAGLPLTTAKGRTFGYDVIDTKLYINEEEAKQLQLIYDIFEEEQSITFLQKRLKKLSFKVRTYSCYNNWLTNDLYCGYVSYKDKVHVKGIHEPIISEEQFYRVQEIFTRMGKNPNMNRDSASLLNNLVVCSKCGLGFVHRRKDTMSRGKKYHYRYYSCKTYKHTHELEKCGNKIWRADKLEELVINRANNYSLESRNVDKEDELDSLNEKLKIEHAKKKRLFDLYINGSYEVSELDCMMSDIDAQINYYESQIEANEELKKDKKIQESLANLATVDYDSLEFREKQLYLKSLINKIYIDGEQVTIEWL

SEQ ID NO: 4677 - protein, 452 aa, synthetic construct
MKAAIYIRVSTQEQVENYSIQAQTEKLTALCRSKDWDVYDIFIDGGYSGSNMNRPALNEMLSKLREIDAVVVYRLDRLSRSQRDTITLIEEYFLKNSVEFVSLSETLDTSSPFGRAMIGILSVFAQLERETIRDRMVMGKIKRIEAGLPLTTAKGRTFGYDVIDTKLYINEEEAKQLRLIYDIFEEEQSITFLQKRLKRLGFKVRAYSRYNNWLTNDLYCGYVSYKDKVHVKGIHEPIISEEQFHRVQEIFTRMGKNPNMNRDSASLLNNLVVCSKCGLGFVHRRKDTKSRGKKYHYRYYSCKTYKHIHELEKCGNKIWRADKLEELIINRVNNYSFASRNVDKEDELDSLNEKLKIEHAKRKRLFDLYINGSYEVSELDSMMSDIDAQINYYESQIEANEELKKNKKIQENLANLATVDYDSLEFREKQLYLKSLINKIYIDGEQVTIEWL

SEQ ID NO: 4678 - protein, 452 aa, synthetic construct
MKAAIYIRVSTREQVENYSIQAQTEKLTALCRSKDWDVYDIFIDGGYSGSNMNRPALNEMLSKLHEIDAVVVYRLDRLSRSQRDTITLIEEYFLKNNVEFVSLSETLDTSSPFGRAMIGILSVFAQLERETIRDRMVMGKIKRIEAGLPLTTAKGRTFGYDVIDTKLYINEEEAKQLQLIYDIFEEEQSITFLQKRLKKLGFKVHTYNRYNNWLTNDLYCGYVSYKDKVHVKGIHEPIISEEQFYRVQEIFTRMGKNPNMNRDSASLLNNLVVCSKCGLGFVHRRKDTMSRGKKYHYRYYSCKTYKHTHELEKCGNKIWRADKLEELIINRVNNYSFASRNVDKEDELDSLNEKLEIERAKKKRLFDLYISGSYKVSELDSMMNDIDAQINYYESRIEANEELRKNKKIQENLADLATVDFDSLEFREKQLYLKSLINKIYIDGEQVTIEWL

SEQ ID NO: 4679 - protein, 452 aa, synthetic construct
MKAAIYIRVSTREQVENYSIQAQTEKLTALCRSKGWDVYDIFIDGGYSGSNMNRPALNEMLSKLHEIDAVVVYRLDRLSRSQRDTITLIEEYFLKNNVEFVSLSETLDTSSPFGRAMIGILSVFAQLERETIRDRMVMGKIKRIEAGLPLTTAKGRTFGYDVIDTKLYINEEEAKQLQLIYDIFEEEQSITFLQKRLKELGFKVRTYNCYNNWLTNDLYCGYVSYKDKVRVKGIHEPIISEEQFYRVQEIFTRMGKSPNMNRDSASLLNNLVVCSKCGLGFVHRRKDTMSRDKKYHYRYYSCKTYKHIHELEKCGNKIWRADKLEELIINRVNNYSLAGRNVDKEDELDSLNEKLKIEHAKKKRLFDLYINGNYEVSELDSMMNGIDAQINYYESQIEANEELKKNKKIQENLADLATVDFDSLEFREKQLYLKSLINKIYIDGEQVTIEWL

SEQ ID NO: 4680 - protein, 452 aa, synthetic construct
MKAAIYIRVSTREQVENYSIQAQTERLTALCRSKDWDVYDIFIDGGYSGSNMNRPALNEMLSKLHEIDAVVVYRLDRLSRSQRDTITLIEEYFLKNNVEFVSLSETLDTSSPFGRAMIGILSVFAQLERETIRDRMVMGKIKRIEAGLPLTTAKGRTFGYDVIDTKLYINEEEAKQLRLIYDIFEEEQSITFLQKRLKKLGFKVRTYNRYNNWLTNDLYCGYVSYKDKVHVKGIHEPIISEEQFYRVQEIFTRMGRNPNMNRGSASLLNNLVVCGKCGLGFVHRRKDAMSRDKKYHYRYYSCKTYKHIHELEKCGNKIWRADVLEELIINRVNNYSLASRNVDKEDGLDSLNEKLKTEHAKKKRLFDLYLNGSYEVSELDSMMNDIDAQINYYESQIEANEELKKNKKIQENLAHLATVDFDSLEFREKQLYLKSLINKIYIDGEQVTIEWL

SEQ ID NO: 4681 - protein, 452 aa, synthetic construct
MKAAIYIRVSTREQVENYSIQAQTEKLTALCRSKDWDVYDIFVDGGYSGSNMNRPALNEMLSKLHEIDAVVVYRLDRLSRSQRDTITLIEEYFLKNNVEFVSLSETLDTSSPFGRAMIGILSVFAQLERETIRDRMVMGKIKRIEAGLPLTTAKGRTFGYDVIDTKLYINEEEAKQLRLIYDIFEEEQSITLLQKRLKKLGFKVRTYNCYSNWLTNDLYCGYVSYRDKVHVKGIHEPIISEEQFYRVQEIFTRMGKNPNMNRDSASLLNNLVVCSKCGLGFVHRRKDTVSRGKKYHYRYYSCKTYKHIHELEKCGNKIWRADKLEELIINRVNNYGLARRNVDKEDELDSLNEKLKIEHAKKKRLFDLYINGSYEVSELDSMMNDIDAQINYYESQIEANGELKRNKKIQESLADLASVDYDSLEFREKQLYLKSLINKIYIDGEQVTIEWL

SEQ ID NO: 4682 - protein, 485 aa, synthetic construct
MTKKVAIYTRVSTTNQAEEGFSIDEQIDRLTKYAEAMGWQVSDTYTDAGLSGAKLERPAMQRLINDIEHKAFDTVLVYKLDRLSRSVRDTLYLVKDVFTKNKIDFISLSESIDTSSAMGSLFLTILSAINEFERENIKERMTMGKLGRAKSGKSMMWTKTAFGYYHNRKTGILEIVPLQATIVEQIFTDYLSGISLTKLRDKLNESGHIGKDIPWSYRTLRQTLDNPVYCGYIKFKDSLFEGMHKPIIPYETYLKVQKELEERQRQTYERNNNPRPFRAKYMLSGMARCGYCGAPLRIVLGRKRKDGSRTMKYHCANRFPRKTKGVTVYNDNKKCDSGTYDLSNLENTVIDNLIGFQENNDSLLKIINGNNQPILDTSSFKKQISQIDKKIQKNSDLYLNDFITMDELKNRTDSLLAEKKLLKAKISENKPNDSTDVFELVKTQLGSIPINELSYDNKKKIVNNLVSKVDVTADSVDIIFKFQLA

SEQ ID NO: 4683 - protein, 452 aa, synthetic construct
MKAAIYIRVSTREQVENYSIQAQTEKLTALCRSKDWDVYDIFIDGGYSGSNMNRPALNEMLSKLHEIDAVVVYRLDRLSRSQRDTITLIEEYFLKNNVEFVSLSETLDTSSPFGRAMIGILSVFAQLERETIRDRMVMGKIKRVEAGLPLTTAKGRTFGYDVIDSKLYINEEEAKQLQLIYDIFEEEQSITFLQKRLKKLGFKVRTYNRYNNWLTNDLYCGYVSYKDKVHVKGIHEPIISEEQFYRVQEIFTRMGKNPNMNRDSASLLNNLVVCSKCGLGFVHRRKDAMSRDKKYHYRYYSCKTYKHIHELEKCGNKIWRADKLEELIINRVNNYSLASRNVDKEDELVSLSEKLKIEQAKKKRLFDLYINGSYEMSELDSMMNDIDAQINYYESQIEANEELKRNKKIQENLANLATVDFDSLEFRDKQLYLKSLINKIYIDGEQVTIEWL

SEQ ID NO: 4684 - protein, 485 aa, synthetic construct
MTRKVAIYTRVSTTNQAEEGFSIDEQVDRLTKYAEAMGWQVSDTYTDAGSSGAKLERPAMQRLINDIENEAFDTVLVYKLDRLSRSVRDTLYLVKDVFTKNKIDFISLNESIDTSSAMGSLFLTILSAVNEFERENIKERMTMGKLGRAKSGKSMMWTKTAFGYYHNRKTGILEVVPLQATIVEQIFTDYLSGISLTKLRDKLNESGHTGKDIPWSYRTLRQTLDNPVYCGYIKFKDSLFEGMHEPIIPYETYQKVQKELEERQQQTYERNNNPRPFQAKYMLSGMARCGYCGAPLRIVLGRKRKDGSRTMKYHCANRFPRKTKGITVYNDNKKCDSGTYDLSNLEDTVIDNLIGFQENNDSLLKIINGNNQPILDTNSFKKRISQIDKKIQKNSDLYLNDFITMDELKARTDSLQAEKRLLKAKISENKFNDSTDVFELVKTQLGSIPINELSYDSKKKIVNNLVSKVDVTADNVVIIFKFQLA

SEQ ID NO: 4685 - protein, 452 aa, synthetic construct
MKAAIYIRVSTREQVENYSIQAQTEKLTALCRSKDWDVYDIFIDGGYSGSNMNRPALNEMLSKLHEIDAVVVYRLDRLSRSQRDTITLIEEYFLKNNVEFVSLSETLDTSSPFGRAMIGILSVFAQLEHETIRDRMVMGKIKRIEAGLPLTTAKGRTFGYDVIDTKLYINEEEAKQLRLIYDIFEEEQSITFLQKRLKKLGFKVHTYNRYNNWLTNDLYCGYVSYKDKVHVKGIHEPIISEEQFYRVQEIFTRIGRNPNMSRDSASLLNNLVVCSKCGLGFVHRRKDTTSRGKKYHYRYYSCRTYKHTHELEKCGNKIWRADKLEELIINRVNNYSLASRNVDKEDELDSLNEKLKIEHAKKKRLFDLYINGSYEVCELDSMMNDIDAQINYYESQIETNEELKKNKKIQENLANLATVDYDSLEFREKRLYLKSLINKIYIDGEQVTIEWL

SEQ ID NO: 4686 - protein, 452 aa, synthetic construct
MKAAIYIRVSTREQVENYSIQAQTEKLTALCRSKDWDVYDTFIDGGYSGSNMNRPALNEMLSKLHEIDAVVVYRLDRLSRSQRDTITLIEEYFLKNNVEFVSLSETLDTSSPFGRAMIGILSVFAQLERETIRDRMVMGKIKRIEAGLPLTTAKGRTFGYDVIDTKLYINEEEAKQLQLIYDIFEEEQSITFLQKRLKKLGFKVRTYNCYNSWLTNDLYCGYVSYKDKVHVKGIHEPIISEEQFYRVQEIFTRMGKSPNMNRDSASLLNNLVVCGKCGLGFVHRRKDTTSRGKKYHYRYYSCKTYKHTHELERCGNKIWRADRLEELIINRVNNYSLASRNVDKEDELDSLNEKLKVEHAKKKRLFDLYINGSYEVSELDSMMNDIDAQISYYESQIEASGELRKSKKIQENLADLATVDFGSLGFREKQLYLKSLINKIYIDGEQVTIEWL

SEQ ID NO: 4687 - protein, 469 aa, synthetic construct
MSYTTPVRAAVYLRISEDRSGEQLGVARQREDCLKLCGQRKWVPVEYLDNDVSASTGKRRPAYEQMLADITAGKIAAVVAWDLDRLHRRPVELEAFMSLADEKRLALATVAGDVDLATPQGRLVARLKGCVAAHETEHKKARQRRAARQKAERGHPNWSKAFGYLPGPNGPEPDPRTAPLVKQAYADILAGASLGDVCRQWNDAGAFTITGRPWTTTTLSKFLRKPRNAGLRAYKGARYGPVDRDAIVGKARWSPLVDEATFWAAQAVLDAPGRAPGRKSVRRHLLTGLAGCGKCGNHLAGSYRTDGRVVYVCKACHGVAILADIIEPILYHIVAERLAMPDAVDLLRREIHDAAEAETIRLELETLYGELDRLAVERAEGLLTARQVKISTDIVNAKITKLQARQLDQERLRVLDGIPLGTPQVAAMIAELSPDRFRAVLDVLAEVVVQPVGKSGRIFNPERVQVNWR

SEQ ID NO: 4688 - protein, 485 aa, synthetic construct
MTKKVAIYTRVSTINQAEEGFSIDEQIDRLTRYAEAMGWQVSDTYTDAGFSGAKLERPAMQRLINDIENKAFDTVLVYKLDRLSRSVRNTLYLVKDVFTRNKIDFISLNESIDTSSAMGSLFLTILSAINEFERENIKERMTMGKLGRAKSGKSMMWAKTAFGYYHNRKTGILEIVPLQAAIVEQIFTDYLSGISLTKLRDKLNEGGHIGKDIPWSYRTLRQTLDNPVYCGYIKFKDSLFEGMHKPIIPHETYLKVQKELKERQQQTYGRNNNPRPFQAKYMLSGMARCGYCGAPLRIVLGHKRKDGSRTMKYHCANRFPRKTKGVTVYNDNKKCDSGTYDLSSLENTVIDNLIGFQENNDSLLKIINGNSQPVLDTSGLEKQISQIDKKVQKNSDLYLNDFITMDELKDRTDSLQAEKKLLNTKISENKFNNSTDVFELVKTQLGSIPINELSYDDKKKIVSNLVSKVDVTADSVDIIFKFQLA

SEQ ID NO: 4689 - protein, 452 aa, synthetic construct
MKAAIYIRVSTQEQVGNYSIQAQTEKLTALCHSKDWDVYDIFIDGGYSGSNMNRPALSEMLSKLHEIDAVVVYRLDRLSRSQRDTTTLIEEYFLKNNVEFVSLSETLDTSSPFGRAMIGILSVFAQLERETIRDRMVMGKIKRIEAGLPLTTAKGRTFGYDVIDTKLYINEEEAKQLRLIYDIFEEEQSITSLQKRLKKLGFKVRTYNRYSNWLTNDLYCGYVSYKDKVHVKGIHEPIISEEQFHRVQEIFTRMGKNPNMNRDSASLLSNLVVCSKCGLGFVHRSKDTTSRGKKYHYRYYSCKTYKHTHELEKCGNKTWRADKLEELVINRVDNYSFASHNADREDELDSLNEKLKIEHARKKRLFDLYINGSYEVSELDSMMNDIDAQINYYESQIEASEELKKNKKIQENLADLATVDFDSLEFREKQLYLKSLINRIYIDGEQVTIEWL

SEQ ID NO: 4690 - protein, 469 aa, synthetic construct
MCYTTLVRAAVYLRISEDRSGEQLGVARQREDCLKLCDQRKWVPVEYLDNDVSASTGKRRPAYEQMLADITAGKIAAVVAWDLDRLHRRPIELEAFMSLADEKRLALATVAGDVDLATPQGRLVARLKGSVAAHETEHKKARQRRAARQKAKRGHPNWSKAFGYLPGPNGPEPDPRTAPLVKQAYADILAGASLGDVCRQWNDAGAFTITGRSWTPTTLSKFLRKPRNAGLRTYKGACYGPVDRDAIVGKAQWSPLVDEATFWAAQAVLDAPGRAPGRKSVRRHLLTGLAGCGKCGYHLAGSYRTDGRVVYVCKACHGVAILADNIEPILYHIVAERLAMPDAVDLLRREIHDAAEAETIRLELETLYGELDRLAVERAEGLLTARQVKISTDIVNAKITKLQARQLDQERLRVFDGIPLGTPQVAGMIAELSPDRFRAVLDVLAEVVVQPVGKSGGIFSPERVQVNWR

SEQ ID NO: 4691 - protein, 469 aa, synthetic construct
MSYTTPVRAAVYLRISEDRSGEQLGVARQREDCLKLCAQRKWVPVEYLDNDVSASTGKRRPAYEQMLADITAGKIAAVVAWDLDRLHRRPIELEAFMSLADEKRLALATVAGDVDLATPQGRLVARLKGSVAAHETEHKKARQRRAARQKAERGHPNWSKAFGYLPGPNGPEPDPRTAPLVKQAYADILAGASLGDVCRQWNDAGAFTITGRPWTTTALSKFLRKPRNAGLREYKGARYGPVDRDAIVGKAQWSPLVDEATFWAAQAVLDAPGRAPGRKSVRRHLLTGLAGCGKCGNHLAGNYRTDGRVVYVCKACHGVAILADNIEPILYHIVAERLATPDAVDLLRREIHDAAEAETIRLELETLYGELDRLAVERAEGLLTARQVKISTDIVNAKITKLQTRQLDQERLRVLDGIPLGTPQAAGMTAELSPDRFRAVLDVLAEVVVQPVGKSGRIFNPERVRVNWR

SEQ ID NO: 4692 - protein, 485 aa, synthetic construct
MTKKVAIYTRVSTTNQAEEGFSIDEQIDRLTKYAEAMGWQVSDIYTDAGLSGAKLERPAMQRLINDIETKAFDTVLVYKLDRLSRSVRDTLYLVKDVFTKNKIDFISLNESIDTSSAMGSLFLTILSAINEFERENIKERMTMGKLGRAKSGKSMMWTKTAFGYYHNRKTGILEIVPLQATIVEQIFTDYLSGISLTKLRDKLNESGHIGKDIPWSYRTLRQTLDNPVYCGYIKFKDSLFEGMHKPIIPYETYLKVQKELEERQQQTYERNNNPRPFQAKYMLSGMARCGYCGAPLKIVLGHKRKDGNRTMKYHCANRFPRKTKGVTVHNDNKKCDSGTYDLSSLENTVIDSLIGFQENNDSLLRIINGNNQPILDTSSFKKQISQIDKKIQKNSDLYLNDFITMDELKDRTDSLQAEKKLLKAKISESKFNYSTDVFERVKTQLGSVPINELSYDNKKKIVNNLVSKVDVTADNVDIIFKFQLA

SEQ ID NO: 4693 - protein, 469 aa, synthetic construct
MSYTTPVRAAVYLRISEDRSGEQLGVARQREDCLKLCGQRKWVPVEYLDNDVSASTGNRRPAYEQMLADITAGKIAAVVAWDLDRLHRRPIELEAFMCLADEKRLALATVAGDVDLATPQGRLVARLKASVAAHETEHKKARQRRAARQKAERGLPNWSKAFGYLPGPNGPEPDPRTAPLVKQAYADILAGASLGDVCRQWNDAGAFTITGRPWTTTTLSKFLRKPRNAGLRAYKGTRYGPVDRDAIVGKAQWSPLVDEATFWAAQAVLDAPGRTPGRKSVRRHLLTGLAGCGKCGNHLAGSYRTDGRVVYVCKACHGVAILADNIEPILYHTVAERLAMPDAVDLLRRETHDATEAEIIRLELETLYGVLDRLAVERAEGLLTARQVKISTDIVNAKITKLQAHQLDQERLRVFDGIPLGTPQVAGVIAELSPDRFRAVLDVLAEVVVQPVGKSGRIFNPERVRVNWR

SEQ ID NO: 4694 - protein, 469 aa, synthetic construct
MCYTTPVRAAVYLRISEDRSGEQLGVARQREDCLKLCDQRKWVPVEYLDNDVSASTGKRRPAYEQMLADITAGKIAAVVAWDLDRLHRRPIELEAFMSLADEKRLALATVAGDVDLATPQGRLVARLKGSVAAHETEHKKARQRRAARQKAERGYPNWSKAFGYLPGPNGPEPDPRTAPLVKQAYEDILAGASLGDVCRQWNTAGAFTITGRLWTTTTLSKFLRKPRNAGLRAYKGARYGPVDRGAIVGKAQWSPLVDEATFWAAQAVLDTPGRAPGRKSVRRHLLTGLAGCGKCGNHLAGSYRTDGRVVYVCKACHGVAILADNIEPILYHIVAERLAMPDAVDLLRREIHDAAEAETIRLELETLYGELDRLAVERAEGLLTARQVKISTDIVNAKITKLQARQQDQDRLRVLGGIPLGTPQVAGMIAELSPDRFRAVLDVLVEVVVQPVGKSGRIFNPERVQVNWR

SEQ ID NO: 4695 - protein, 452 aa, synthetic construct
MKAAIYIRVSTREQVENYSIRAQTERLTALCRSKGWDVYDIFIDGGYSGSNMNRPALNEMLSKLHEIDAVVVYRLDRLSRSQRDTITLIEEYFLKNNVEFVSLSETLDTSSPFGRAMIGILSVFAQLERETIRDRMVMGKIKRIEAGLPLTTAKGRTFGYDVIDTKLYVNEEEAKQLQLIYDIFEEEQSITFLQKRLKKLGFKVRTYSRYNNWLTNDLYCGYVSYKDKVHVKGIHEPIISEEQFYRVQEIFTRMGKNPNMNRDSASLLNNLVVCSKCGLGYVHRRKDTMSRGKKYHYRYYSCKTYKHTHELEKCGNKIWRADKLEELIINRVNNYSFASRNVDEEDELGSLNEKLKIEHAKRKRLFDLYINGSYEVSELDSMMSDIDAQINYYESQIEANEELKKNKKIRENLADLATVDFDSLEFREKQRYLKSLINKIYIDGEQVTIEWL

SEQ ID NO: 4696 - protein, 469 aa, synthetic construct
MSYTTPVRAAVYLRISEDRSGEQLGVARQREDCLKLCDQRKWVPVEYLDNDVSASTGKRRPAYEQMLADITAGKIAAVVAWDLDRLHRRPIELEAFMSLADEKRLALATVAGDVDLATPQGRLVARLKGSVAAHETEHKKARQRRAARQKAERGHPNWSKAFGYLPGPSGPEPDPRTAPLVKQAYADILAGASLGDVCRQWNAAGAFTITGRPWTTTTLSKFLRKPRNAGLRAYKGARYGPVDRDAIVGKAQWSPLVDEATFWAAQAVLDAPGRAPGRKSVRRHLLTGLAGCGKCGNHLAGSYRTDGRVVYVCKACHGVAILADNIEPILYHIVAERLAMPDAVDLLRREVHDAAEAETIRLELETLYGELDRLAVERAEGLLTARQVKISTDIVNAKITKLQTRRLDQERLRVFDGIPLGTPQVAGVIAELSLDRFRAVLDVLAEVVVQPVGKSGRIFNPERVQVNWR

SEQ ID NO: 4697 - protein, 469 aa, synthetic construct
MSYTTPVRAAVYLRISEDRSGEQLGVARQREDCLKLCGQRKWVPVEYLDNDVSASTGKRRPAYEQMLADITAGKIAAVVAWDLDRLHRRPIELEAFMSLADEKRLALATVAGDVDLSTPQGRLVARLKGSVAAHETEHKKARQRRAARQKAERGLPNWSKAFGYLPGPNGPEPDPRTAPLVTQAYADILAGASLGDVCRQWNDAGAFTITGRPWTTTTLSKFLRKPRNAGLRAYKGARYGSVDRDAIVGKAQWSPLVDEATFWAAQAVLDAPGRAPGRKSVRRHLLTGLAGCGKCGNHLAGSYRTDGRVVYVCKACHGVAILADIIEPILYHIVAERLAMPNAVDLLRREIHDAAEAETIRLELETLYGELDRLAVERAEGLLTARQVKISTDIVNAKITKLQARQLDQERLRVFDGIPLGTPQVAGMIAGLSPNRFRAVLDVLAEVVVQPVGKRGRIFNPERVQVNWR

SEQ ID NO: 4698 - protein, 469 aa, synthetic construct
MSYTTPVRAAVYLRISEDRSGEQLGVARQREDCLKLCGQRNWVPVEYLDNDVSASTGKRRPAYEQMLADITAGKIAAVVAWDLDRLHRRPVELEAFMSLADEKRLALATVAGDVDLATPQGRLVARLKGCVAAHETEHKKARQRRAARQKAERGHPNWSKAFGYLTGPNGPEPDPRTAPLVKQAYADILAGASLGDVCRRWNDAGALTITGRPWTTTTLSKFLRKPRNAGLRAYKGARYGPVDRDAIVGKAQWDPLVDEATFWAAQAVLDAPGRAPGRKSVRRHLLTGLAGCGKCGNHLAGSYRTDGQVVYVCKACHGVSILAVNIEPILYHIVAERLAMPDAVDLLRREIHDAAEVETTRLELETLYGELDRLAVERAEGLLTARQVKISTDIVNAKITKLQARQLDQERPRVLDGIPLGTPQVASTIAELSPDRFRAVLDVLAEVVVQPVGKSVGTFNPERVQVNWR

SEQ ID NO: 4699 - protein, 452 aa, synthetic construct
MKAAIYIRVSTREQVENYSIQAQTEKLTALCRSKDWDVYDIFIDGGYSGSNMNRPALNEMLSKLHEIDAVVVYRLDRLSRSQRDTITLVEEYFLKNNVEFVSLSETLDTSSPFGRAMIGILSVFAQLERETIRDRMVMGKIKRIEAGLPLTTAKGRTFGYDVIDTKLYINEEEAKQLQLIYDIFEEEQSITSLQKRLKKLGFKVRTYSRYSSWLTNDLYCGYVSYKDKVHVKGIHEPIISEEQFYRVQEIFTRMGKNPNMNRGSASLLNNLVVCSKCGLGFVHRRKDTVSRGKKYHYRYYSCKTYKHIHELERCGNKIWRADKLEELIINRVNNYSFASRNVDKEDELDSLNEKLKIEHAKKKRLFDLYINGSYEVSELVSMMNDIDAQINYYESQIEANEELKKNEKIQENLAELATVDFDSLEFREKQLYLKSLINKIYIDGEQVTIEWL

SEQ ID NO: 4700 - protein, 452 aa, synthetic construct
MKAAIYIRVSTQEQVGNYSIQAQTEKLTALCRSKDWDVYDIFIDGGYSGSNMNRPALNEMLSKLHEIDAVVVYRLDRLSRSQRDTTTLIEEHFLKNNVEFVSLSETLDTSSPFGRAMIGILSVFAQLERETIRDRMVMGKIKRIEAGLPLTTAKGRTFGYDVIDTKLYVNEEEARQLQLIYDIFEEEQSITFLQKRLKELGYKVRSYNRYNNWLTNDLYCGYVSYKDKVHVKGIHEPIISEEQFYRVQEIFTRMGKKPNMNRDSASLLNNLVVCSKCGLGFVHRSKDTMSRGKKYHYRYYSCKTYKHAHELEKCGNKTWRADKLEELIVSRVNNYSFASRSVDKEDELDSLNEKLKIEHAKRKRLFDLYINGSYEVSELDSMMNDIDVQISYYESQIEANEELKKNKRIQENLADLATVDFDSLEFREKQLYLKSLINKIYIDGEQVTIEWL

SEQ ID NO: 4701 - protein, 485 aa, synthetic construct
MTKKVAIYTRVSTTNQAEEGFSIDEQIDRLTKYAEVMGWQVSDTYTDAGFSGAKLVRPAMQRLINDIENKAFDTVLVYRLDRLSRSVRDTLYLVKDVFTKNKIDFISLNESIDTSSAMGSLFLTILSAINEFERENIKERMTMGKLGRAKSGKSMMWTKTAFGYYHNRETGILEIVPLQATIVEQIFTDYLNGISLTKLRDKLNESGHIGKDIPWSYRTLRQTLDNPVYCGYIKFKDSLFEGMHKPIIPYETYLKVQKELEERQQQAYERNNNPRPFQAKYMLSGTARCGYCGAPLRIVLGHKRKDGGRTMKYHCANRFPRKTKGITVYNDNRKCDSGTYDLSNLENTVIDTLIGFQENNDSLLKIINGNNQPILDTSSFKKQISQIDKKIQKNSDLYLNDFITMDELKDRTDSLQAEKKLLKAKISENKFNGSTDVFELVKTQLGSIPINELSYDNKKKIVNNLVSKVDVTADNVDIIFKFQLA

SEQ ID NO: 4702 - protein, 469 aa, synthetic construct
MCYTTPVRAAVYLRISEDRSGEQLGVARQREDCLKLCDQRKWEPVEYLDNDVSASTSKRRPAYEQMLADITAGKIAAVVAWDLDRLHRRPIELEAFMSLADEKRLALATVAGDVDLATPQGRLVARLKGSVAAHETEHKKARQRRAARQKAERGHPNWSKAFGYLSGPNGPEPDPRTAPLVKQAYADILAGASLGDVCRQWNDAGAFTITGRPWTTTTLSKFLRKPRNAGLRAYKGARYGPVDRDAIVGKAQWSPLVDEAAFWAAQAVLDAPGRAPGRKSVRRHLLTGLAGCGKCGNHLAGSYRTDGRVVYVCKACHGVAILADNIEPILYHIVAERLAMPDAVHLLHREIHDAAEAETIRLELETLYGELDRLAVERAEGLLTARQVKISTDIVDAKIAKLQARQLDQERLRVFEGVPLGTPQVAGVIAELSPDRFRAVLDVLAEVVVQPVGKSGRIFNPERVQVNWR

SEQ ID NO: 4703 - protein, 452 aa, synthetic construct
MKAAIYIRVSTREQVENYSIQAQTEKLTALCRSKDWDVYDIFIDGGYSGSNMNRPALNEMLSKLHEIDAVVVYRLDRLSRSQRDTITLIEEYFLKNSVEFVSLSETLDTSSPFGRAMIGILSVFAQLERETIRDRMVMGKIKRVEAGLPLTTAKGRTFGYDVIDTKLYINEEEAKQLQLIYDIFEEEQSITSLQKRLKKLGFKVRTYNRYNNWLTNDLYCGYVSYKDKVHVKGIHEPIISEEQFCRVQEIFTRMGKNPNMNRDSASLLNNLVVCSKCGLGFVHRRKDTMSRGKKYHYRYYSCKTYKHIHELEKCGNKIWRADKLEELIINRVHNFSLASRNVDKEDGLDSLNEKLKIEHAKKKRLFDLYINGSYNVSELDSMMSDIDAQINYYESQIEANEELKRNKKIQENLADLASVDYDSLEFREKQLYLKSLINKIYIDGEQVTIEWL

SEQ ID NO: 4704 - protein, 452 aa, synthetic construct
MKAAIYIRVSTREQVENYSIQAQTEKLTALCRSKDWDVYDIFIDGGYSGSNMNRPALNEMLSKLHEIDAVVVYRLDRLSRSQRDTITLIEEYFLKNNVEFVSLSETLDTSSPFGRAMIGILSVFAQLERETIRDRMVMGKIKRIEAGLPLTTAKGRTFGYDVIDTKLYINEEEAKQLQLIYNIFEEEQSITFLQKRLKELGFKVRTYNCYNNWLTNDLYCGYVSYKDKVHVKGIHEPIISEEQFYRVQEIFTRMGKNPNMNRGSASLLNNLVVCSKCGLGFVHRRKDAMSRDKKYHYRYYSCKTYKHIHELEKCGNKIWRADKLEELVINRVNNYSLAGRNVDKEDELGSLNEKLKIEHAKKKRLFDLYINGSYEVSELDSMMCDIDAQINYYESQIEANEELKKSKKIQENLAYLAAVDFDSLEFREKQLYLKSLINKIYIDGEQVTIEWL

SEQ ID NO: 4705 - protein, 452 aa, synthetic construct
MKAAIYIRVSTREQVENYSIQAQTERLTALCRSKDWDVYDIFIDGGYSGSNMNRPALNEMLSKLHEIDAVVVYRLDRLSRSQRDTITLIEEYFLKNNVEFVSLSETLDTSSPFGRAMIGILSVFAQLERETIRDRMVMGKIKRIEAGLPLTTAKGRTFGYDVIDTKLYINEEEAKQLRLIYDIFEEEQSITSLQKRLKELGFKVRTYNRYNGWLTNDLYCGYVSYKDKVHVKGIHEPIISEEQFYRVQEIFARMGKNPNMNRDSASLLNNLVVCSKCGQGFVHRRKDTMSRGKKYHYRYYSCKTYKHTHELEKCGNKIWRADKLEELIINRVNNYSLVSRNVDKEDELDSLNEKLKIEHAKKRRLFELYINGSYEVSELDSMMNDIDAQINYYESQIEANEELRKNKKIQKNLADLATVDYDSLEFREKQLYLKSLINKIYIDGEQVTIEWL

SEQ ID NO: 4706 - protein, 452 aa, synthetic construct
MKAAIYIRVSTREQVENYSIQAQTEKLTALCRSKDWDVYDIFIDGGYSGSNMDRPALNEMLSKLHEIDAVVVYRLDRLSRSQRDTITLIEEYFLKNNVEFVSLSETLDTSSPFGRAMIGILSVFAQLERETIRDRMVMGKIKRIEAGLPLTTAKGRTFGYDVIDTKLYINEEEAKQLRLIYDIFEEEQSITFLQKRLKKLGFKVRTYNCYNNWLTNDLYCGYVSYKDKVHVKGIHEPIISEEQFYRVQEIFTRMGKNPNMNRDSASLLNNLVVCSKCGLGFVHRRKATLSGGKKYHYRYYSCKTYKHIHELEKCGNKIWRADKLEELIINRVNSYSLVSRNMDKEDELDSLNEKLKIEHAKKKRLFDLYINGNYEVSELDSMMNDIDAQINYYESQIEANEELKKSKKIQENLAYLAAVDFDSLEFREKQLYLKSLINKIYIDGEQVTIEWL

SEQ ID NO: 4707 - protein, 452 aa, synthetic construct
MKAAIYIRVSTREQVENYSIQAQTEKLTALCRSKDWDVYDIFIDGGYSGSNMNRPALNEMLSKLHEIDAVVVYRLDRLSRSQRDTITLIEEYFLKNNVEFVSLSETLDTSSPFGRAMIGILSVFAQLERETIRDRMVMGKIKRIEAGLPLTTAKGRTFGYDVIDTKLYINEEEAKQLQLIYDIFEEEQSITFLQKRLKKLGFKVRTYNRYNNWLTNDLYCGYVSYKDKVHVKGIHEPIISEEQFYRVQEIFTRMGKNPNMNRDSASLLNNLVVCSKCGLGFVHRRKDAMSRDKKYHYRYYSCKTYKHIHELEKCGNKIWRADKLEELIINRVNNYSLASRNVDKEDELDSLNEKLKIEHAKKKRLFGLYINGSYEVSELDSMMNDIDAQISYYESQIEANEGLKRSKKIQENLAHLATVDFDSLEFREKQLYLKSLINKIYIDGEQVTIEWL

SEQ ID NO: 4708 - protein, 452 aa, synthetic construct
MKAAIYIRVSTREQVENYSIQAQTEKLTALCRSKDWDVYDIFIDGGYSGSNMNRPALNEMLSKLHEIDAVVVYRLDRLSRSQRDTITLIEEYFLKNNVEFVSLSETLDTSSPFGRAMIGILSVFAQLERETIRDRMVMGKIKRIEAGLPLTTAKGRTFGYDVIDTKLYINEEEAKQLQLIYDIFEEEQSITFLQGRLKKLGFKVHTYSRYNSWLTNDLYCGYVSYKDKVHVKGIHEPIISEEQFYRVQEIFTRMGKNPNMNRDSASLLNNLVVCSKCGLGFVHRRKDTMSRGKRYHYRYYSCKTYKHTHELEKCGNKIWRADKLEELIINRVNNYSFASRSADKEDELDSLNEKLRIEHAKKKRLFDLYINGSYEVSELDSMMNDVDAQINYYESQIEANEELRRNKRIQENLADLATVDFDSLEFREKQLYLKSLINKIYIDGEQVTIEWL

SEQ ID NO: 4709 - protein, 469 aa, synthetic construct
MSYTAPMRAAVYLRISEDRSGEQLGVARQREDCLKLCGQRKWVPVEYLDNDVSASTGKRRPAYEQMLADITAGKITAVVAWDLDRLHRRPIELEAFMSLADEKRLALATVAGDVDLATPQGRLVARLKGSVAAHETEHKKARQRRAARQKAERGLPNWSKAFGYLPGPNGPEPDPQTAPLVKQAYADILAGASLGDVCRQWNDAGAFTITGRPWTTTTLSKFLRKPRNAGLRAYKGARYGPVDRDAIVGKAQWSPLVDEATFWAAQAVLDAPGRAPGRKSVRRHLLTGLAGCGKCGNHLAGSYRTDGRVVYVCKACHGVAILADNIEPFLYHIVTERLAMPDAVDLLRREIHDAAEAETIRLELETLYGELDRLAVERAEGLLTARQVKISTDIVNAKIAKLQARQLDQERLRVFDGIPLGTPQVAGMIAELSPDRFRAVLDVLAEVVVQPVGKGGRIFNPERVQVNWR

SEQ ID NO: 4710 - protein, 452 aa, synthetic construct
MKAAIYIRVSTQEQVGNYSIQAQTEKLTALCRSKDWDVYDIFIDGGYSGSNMNRPALNEMLSKLHEIDAVVVYRLDRLSRSQRDTTTLIEEYFLKNSVEFVSLSETLDTSSPFGRAMIGILSVFAQLERETIRDRMVMGKIKRIEAGLPLTTAKGRTFGYDVIDTKLYINEEEAKQLQLIYDIFEEEQSITSLQKRLKKLGFRVRSYNRYNNWLTNDLYCGYVSYKDKVHVKGIHEPIISEEQFYRVQEIFTRMGKNPNMNRDSASLLNNLVVCSKCGLGFVHRSKDTMCRGKKYHYRYYSCKTYKHTHELEKCGNKTWRADKLEELIINCVNNYSFASRNADKEDELDSLNEKLKIEHAKKRRLFDLYINGSYEVSELDSMMSDIDAQISYYESQIEANEELRENKKIQENLADLATVDFDSLEFREKQLYLKSLINKIYIDGEQVTVEWL

SEQ ID NO: 4711 - protein, 452 aa, synthetic construct
MKAAIYIRVSTQEQVENYSIQAQTEKLTALCRSKDWDVYDIFIDGGYSGSNMNRPALNEMLSKLHEIDAVVVYRLDRLSRSQRDTTTLIEEYFLKNNVEFVSLSETLDTSSPFGRAMIGILSVFAQLERETIRDRMVMGKIKRIEAGLPLTTAKGRTFGYDVIDTKLYINEEEAKQLQLIYDIFEEVQSITSLQKRLKKLGFKVRTYNRYNNWLTNDLYCGYVSYKDKVHVKGIHEPIISEEQFYRVQEIFTRMGKSPNMNRDSASLLSSLVVCSKCGLGFVHRSKDTMSRGKKYHYRYYSCKTYKHTHELEKCGNKTWRADKLEELIINRVNNYSFASRNADKEDELDSLNGKLKIEHARKKRLFDLYINGSYEVSELDSMMNDIDAQINYYEGQIEANEELRRNKKIQENLADLATVDFDSLEFREKQLYLKSLINKIYIDGEQVTIEWL

SEQ ID NO: 4712 - protein, 452 aa, synthetic construct
MKAAIYIRVSTQEQVGNYSIQAQTEKLTALCRSKDWDVYDIFVDGGYSGSNMNRPALNEMLSKLHEIDAVVVYRLDRLSRSQRDTTTLIEEYFLKNNVEFVSLSETLDTSSPFGRAMIGILSVFAQLERETIRDRMVMGKIKRVEAGLPLTTAKGRTFGYDVIDTKLYINEEEAKQLQLIYDIFEEEQSITSLQKRLKKLGFKVRTYNRYNSWLTNDLYCGYVSYKDKVHVKGIHEPIISEEQFYRVQEIFTRMGKNPNMNRDSASLLSNLVVCSKCGLGFVHRSKDTMSRGKKYHYRYYSCKTYKHTHELVKCGNKTWRADKLEELIINRANNYSVASRNVDKEDELDSLNEKLTIEHAKKKRLFDLYINGSYEVSELDSMMNDIGAQIDYYEGQIEAIEELRKNKKIQENLADLATVDFDSLEFREKQQYLKSLINKIYIDGEQVTIEWL

SEQ ID NO: 4713 - protein, 485 aa, synthetic construct
MTKKVAIYTRVSTINQAEEGFSIDEQTDRLTKYAEAMGWQVSDTYTDAGFSGAKLERPAMQRLINDIENKAFDTVLVYKLDRLSRSVRDTLYLVKDVFTKNKIDFISLNESIDTSSAMGSLFLTILSAINEFERENIKERMTMGKLGRAKSGKSMMWTKTAFGYYHNRKTGILEIVPLQAVIVEQIFTDYLSGISLTKLRDKLNESGHIGKDTPWSYRTLRQTLDNPVYCGYIKFKDSLFEGMHKPIIPYETYLKVQKELEERQQQAYERNNNPRPFQAKYMLSGMARCGYCGAPLKIVLGHKRKDGSRTMKYHCANRFPRKTKGVTVYNDNKKCDSGTYDLSNLENTVIDNLIGFQENNDSLLKIINGNNQPILDTSSFKKQISQIDKKIQKNSDLYLNDFITMDELKDRTDSLQAEKKLLEAKISENKFNDSTDVFELVKTQLGSIPINELSYDDKKKIVNNLVSKVDVTADNVDIIFKFQLA

SEQ ID NO: 4714 - protein, 469 aa, synthetic construct
MSYTTPVRAAVYLRISEDRSGEQLGVARQREDCLKLCDQRKWVPVEYLDNDVSASTGKRRPAYEQMLADITAGKIAAVVAWDLDRLHRRPVELEAFMSLADEKRLALATVAGDVDLATPQGRLVARLKGVVAAHETEHKKARQRRAARQKAERGLPNWSKAFGYLPSPNGPEPDPRTAPLVKQAYADILAGASLGDVCRQWNGAGAFTITGRPWTTTTLSKFLRKPRNAGLRAYKGARYGPVDRDAIVGKAQWSPIVDEVTFWAAQAVLDAPGRAPGRKSVRRHLLTGLAGCGKCGNHLAGSCRTDGRVVYVCKACHGVAILADNIEPILYHTVAERLAMPDAVDLLRREIHDAAEAETIRLELETLHGELDCLAVERAEGLLTARQVKISTDIVNAKIAKLQARQLNQERLRVFDGIPLGTPQVAGTIAELSPNRFRAVLDVLAEVVVQPVGKSGRTFNPERVQVNWR

SEQ ID NO: 4715 - protein, 485 aa, synthetic construct
MTKKVAIYTRVSTTNQAEEGFSIDEQIDRLTKYAEAMGWRVSDTYTDAGISGAKLERPAMQRLINDIENKAFDTVLVYKLDRLSRSVRDTLYLVKDVFTKNKIDFISLSESIDTSSAMGSLFLTILSAINEFERENIKERMTMGKLGRAKSGKSMMWTKTAFGYYHNRKTGILEIVPLQATVVEQIFTDYLSGISLTKLRDKLNESGHIGKDIPWSYRTLRQTLDNPVYCGYIRFKDSLFEGMHKPIIPCETYLKVQKELEERQQQTYERNNNPRPFQAKYMLSGMARCGYCGAPLKIVLGHKRKDGSRTMKYHCANRFPRKTKGVTVYNDNKKCDSGTYDLSNLENTVIDNLIGFQENNDRLLEVINGNNQPILDTSSFKKQISQIDKKIQKNSDLYPNDFITMDELKDRTDSLQAEKKLLKAKISENKFNDRTDVFELVKTQLGSIPINELGYDDKKKIVNNLVSKVDVTADNVDIIFKFQLA

SEQ ID NO: 4716 - protein, 452 aa, synthetic construct
MKAAIYIRVSTREQVENYSIQAQTEKLTALCRSKDWDVYDIFIDGGYSGSNMNRPALNEMLSKLHEIDAVVVYRLDRLSRSQRDTITLVEEYFLKNNVEFVSLCETLDTSSPFGRAMVGILSVFAQLERETIRDRMVMGKIKRIEAGLPLTTAKGRTFGYDVIDTKLYINEEEAKQLQLIYDIFEEERSITSLQKRLKKLGFKVRTYSRYNNWLTNDLYCGYVSYKDKVHVKGIHEPIISEEQFYRVQEIFTRMGKNPNMNRDSASLLSNLVVCCKCGLGFVHRRKDTTSRGKKYHYRYYSCKTYKHTHELEKCGNKIWRADKLEELIINRVNNYSFASRNADKEGELDSLNEKLKIEHAKKKRLFDLYINGSYEVCELDSMMNDIDAQINYYESQIEANEELKKNKKIQENLADLASVDYDSLEFRGKQLYLKSLINKIYIDGDQVTIEWL

SEQ ID NO: 4717 - protein, 452 aa, synthetic construct
MKAAIYIRVSTREQVENYSIQAQTEKLTALCRSKDWDVYDIFIDGGYSGSNMNRPALNEMLSKLHEIDAVVVYRLDRLSRSQRDTITLIEEYFLKNNVEFVSLSETLDTSSPFGRAMIGILSVFAQLERETIRDRMVMGKIKRIEAGLPLTTAKGRTFGYDVIDTKLYINEEEAKQLQLIYDIFEEEQSITFLQKRLKKLGFKVRTYNCYNNWLTNDLYCGYVSYKDKVHVKGIHEPIISEEQFYRVQEIFTRMGKNPNMNRESASLLNNLVVCSKCGLGFVHRRKDAMSRDKKYHYRYYSCKTYKHIHELEKCGNKIWRADKLEELIIDRVNNYSFASRNADKEDELDSLNEKLKIEHAKKKRLFDLYINGSYEVSELDSMMNDIDAQINYYESQIEANEELRKNKKIQENLADLATVDFDSLGFREKQLYLKSLINKIYIDGEQVTIEWL

SEQ ID NO: 4718 - protein, 452 aa, synthetic construct
MKAAIYIRVSTREQVENYSIQAQTEKLTALCRSKDWDVYDIFIDGGYSGSNMNRPALNEMLSKLHEIDAVVVYRLDRLSRSQRDTITLIEEYFLKNNVEFVSLSETLDTSSPFGRAMIGILSVFAQLERETIRDRMVMGKIKRIEAGLPLTTAKGRTFGYDVIDTKLYINEEEAKQLQLIYDIFEEEQSITFLQKRLKKLGFKVRTYSRYNSWLTNDLYCGYVSYKDKVHVKGIHEPIISEEQFYRVQEIFTRMGKNPNMNRDSASLLNNLVVCSKCGLGFVHRRKDTTSRGKKYHYRYYSCKTYKHIHELEKCGNKIWRADKLEELIINRVTNYSFASRNVAKEDELDSLNEKLKVEHAKKKRLFDLYINGSYEVSELDSMMNDIDAQINHYESQIEANGELKKNKKIQENLADLATVDFDSLGFREKQLYLKSLINKIYIDGEQVTIEWL

SEQ ID NO: 4719 - protein, 469 aa, synthetic construct
MSYTTPVRAAVYLRISEDRSGEQLGVARQREDCLKLCDQRKWVPVEYLDNDVSASTGKRRPAYEQMLADIAAGKIAAVVAWDLDRLHRRPIELEAFMSLADEKRLALATVAGDIDLATPQGRLVARLKGSVAAHETEHKKARQRRAARQKAERGYPNWSKAFGYLPGPNGPEPDPRTAPLVKQAYADILAGASLGDVCRQWNGAGAFTITGRPWTTTTLSKFLRKPRNAGLRAYKGARYGPVDRDAIVGKAQWSPLVDEATFWAAQAVLDAPGRAPGRKSVRRHLLTGLAGCGKCGNHLAGSYRADGRVVYVCKACHGVAILADNIEPILYHIVAERLAMPDAVDLLRREIHDAAEAETIRLELETLYGELDRLAAERAEGLLTARQVKISTDIVNAKITKLQARQLDQERLRVFDGVPLGTPQVAGVIAELSPDRFRAVLDVLAKVVVQPVGKSGRILNPERVQVNWR

SEQ ID NO: 4720 - protein, 452 aa, synthetic construct
MKAAIYIRVSTREQVENYSIQAQTEKLTALCRSKDWDVYDIFIDGGYSGSNMNRPALNEMLSKLHEIDAVVVYRLDRLSRSQRDTITLIEEYFLKNNVEFVSLSETLDTSSPFGRAMIGILSVFAQLERETIRDRMVMGKIKRIEAGLPLTTAKGRTFGYDVIDTKLYINEEEAKQLQLIYDIFEEEQSITFLQKRLKKLGFKVRTYSCYNNWLTNDLYCGYVSYKDKVHVKGIHEPIISEEQFYRVQEVFTRMGKNPNMNRDSASLLNNLVVCSKCGLGFVHRRKDTMSRGKKYHYRYYSCKTYKHTHELEKCGNKIWRADKLEELVINRVNNYSLAGRNVDKEDKLDTLSKKLKIEHAKKKRLFDLYINGSYEVSELDSMMNDIDAQISYYGSQIEANEELKRNKKIQENLADLATVDYDSLELRDKQLYLKSLINKIYIDGEQVTIEWL

SEQ ID NO: 4721 - protein, 452 aa, synthetic construct
MKAAIYIRVSTREQVENYSIQAQTEKLTALCRSKDWDVYDIFVDGGYSGSNMNRPALNEMLSKLHEIDAVVVYRLDRLSRSQRDTITLIEEYFLKNNVEFVSLSETLDTSSPFGRAMIGILSVFAQLERETIRDRMVMGKIKRIEAGLPLTTAKGRTFGYDVIDTKLYVNEEEAKQLQLIYDIFEEEQSITFLQKRLKKLGFKVRTYSRYNNWLTNDLYCGYVSYKDKVHVKGIHEPIISEEQFYRVQEIFARMGKNPNMNRDSASLLNNLVVCSKCGLGFVHRRKDAMSRDKKYHYRYYSCKTYKHIHELEKCGNKIWRADKLEELIINRVNGYSLASRNVDKEDELDSLNEKLKVEHAKKKRLFDLYINGSYEVSELNSMMNDIDAQINYYESQIEANEELKRNKKIQENLADLATVDFDSLEFREKQRYLKSLINKIYIDGEQVTIEWL

SEQ ID NO: 4722 - protein, 452 aa, synthetic construct
MKAAIYIRVSTREQVENYSIQAQTEKLTALCRSKDWDVYDIFIDGGYSGSNMNRPALNEMLSKLHEIDAVVVYRLDRLSRSQRDTITLIEEHFLKNNVEFVSLSETLDTSSPFGRAMIGILSVFAQLERETIRDRMVMGKIKRIEAGLPLTTAKGRTFGYDVIDTKLYTNEEEARQLRLIYDIFEEEQSITLLQKRLKKLGFKVRTYSRYNSWLTNDLYCGYVSYKDKVHVKGIHEPIISEEQFYRVQEIFARMGKNPNMNRDSASLLNNLVVCSKCGLGFVHRRKDTTSRGKKYHYRYYSCKTYKHTHELEKCGNKIWRADKLEELIINRVDNYSLASRNVDKEDELDSLNEKLEIEHAKKKRLFDLYINGSYEVSELDSMMNDIDAQISYYESQIGANEELKKSKKIQENLADLATVDFDSLEFREKQLYLKSLINKIYIDGEQVTIEWL

SEQ ID NO: 4723 - protein, 485 aa, synthetic construct
MTKKVAIYTRVSTTNQAEEGFSIDEQVDRLTKYAEAMGWQVSDTYTDAGSSGAKLERPAMQRLINDIENKAFDTVLVYKLDRLSRSVRDTLYLVKDVFTKNKIDFISLNESIDTSSAMGSLFLTILSAINEFERENIKERMTMGKLGRAKSGKSMMWTKTAFGYYHNRKTGILEIVPLQATIVEQIFTDYLSGISLTKLRDKLNESGHIGKDIPWSYRTLRQTLDNPVYCGYIKFKGSLFEGMHKPIIPYETYLKVQKELEERQQQAYERNNNPRPFQAKYMLSGMARCGYCGAPLRIVLGHKRKDGSRTMKYHCANRFPRKTKGVTVYNDNKKCDSGTYDLSNLENTVIDNLIGFQESDDSLLKIINGNNQPILDTSSFKKQISQIDEKIQKNSDLYLNDFITMDELKGRTDSLQAEKKLLEAKISESKFNDSADVFELVKTQLGSIPINELSYDSKKKIVNNLVSKVDVTADNVDIIFKFQLA

SEQ ID NO: 4724 - protein, 452 aa, synthetic construct
MKAAIYIRVSTQEQVENYSIQAQTEKLTALCRSKDWDVYDIFIDGGYSGSNMNRPALNEMLSKLHEIDAVVVYRLDRLSRSQRDTTTLIEEYFLKNNVEFVSLSETLDTSSPFGRAMIGILSVFAQLERETIRDRMVMGKIKRIEAGLPLTTAKGRTFGYDVIDTKLYINEEEAKQLRLIYDIFEEEQSITFLQKRLKKLGFKVRTYNRYNNWLTNDLYCGYVSYKDKVHVKGIHEPIISEEQFYRVQEIFTRMGKNPNMNRDNASLLSNLVVCSKCGLGFVHRSKDTMSRGKKYHYRYYSCKTYKHTHELEKCGNKTWRADKLEELIINRVNNYSFASRNADKEDELDSLNEKLKIEHARKKRLFDLYINGSYEVSELDSMMNDIDAQIDYYESQIEANEELKKNKKIQENLADLATVDFDSLEFREKQLYLKSLINKIYIDGEQVTIEWL

SEQ ID NO: 4725 - protein, 452 aa, synthetic construct
MKAAIYIRVSTREQVENYSIQAQTEKLTALCRSKDWDVYDTFIDGGYSGSNMNRPALNGMLSKLHEIDAVVVYRLDRLSRNQRDTITLIEEYFLKNNVEFVSLSETLDTSSPFGRAMIGILSVFAQLERETIRDRMVMGKIKRIEAGLPLTTAKGRTFGYDVIDTKLYINEEEAKQLQLIYDIFEEEQSITFLQKRLKKLGFKVRSYNRYNNWLTNDLYCGYVSYKDKVHVKGIHEPIISEEQFYRVQKIFTRMGKNPNMNRDSASLLNNLVVCSKCGLGFVHRRKDTVSRGKKYHYRYYSCKTYKHIHELEKCGNKIWRADKLEELIINRVNNRSIASRNVDKEDELDSLNEKLKIEHAKKKRLFDLYINGSYEVNELDSMMNDIDAQISYYESQIEANEELKKNKKIQENLANLATVDYDGLEFREKQLYLKSLINKIYIDGEQVTIEWL

SEQ ID NO: 4726 - protein, 452 aa, synthetic construct
MKAAIYIRVSTQEQVENYSIQAQTEKLTALCRSKDWDVYDIFIDGGYSGSNMNRPALNEMLSKLHEIDAVVVYRLDRLSRSQRDTTTLIEEYFLKNNVEFVSLSETLDTSSPFGRAMIGILSVFAQLERETIRDRMVMGKIKRIEAGLPLTTAKGRTFGYDVIDTKLYINEEEAKQLQLIYDIFEEEQSITSLQKRLKKLGFKVRTYNRYNNWLTNDLYCGYVSYKDKVHVKGIHEPIISEEQFYRVQEIFTRMGRKPNTNRDSASLLSNLVVCSKCGLGFVHRSKDTMSRGKKYHYRYYSCKTYKHTHELEKCGNKTWRADKLEELIINRVNNYSSASRNVDKEDELDSLNEKLKIEHAKKKRLFDLYVNGSYEVSELDSVMNDIDAQINYYESQIEANEELKKNKKIQENLADLATVDFDSLEFREKQLYLKSLINKIYIDGEQVTIEWL

SEQ ID NO: 4727 - protein, 452 aa, synthetic construct
MKAAIYIRVSTREQVENYSIQAQTEKLTALCRSKDWDVYDIFIDGGYSGSNMNRPALNEMLSKLHEIDAVVVYRLDRLSRSQRDTITLIEEYFLKNNVEFVSLSETLDTSSPFGRAMIGILSVFAQLERETIRDRMVMGKIKRVEAGLPLTTAKGRTFGYDVIDTKLYINEEEAKQLQLIYDIFEEERSITFLQKRLKKLGFKVRTYNCYNNWLTNDLYCGYVSYKDKVHVKGIHEPIISEEQFYRVQEIFTRMGKNPNMNRDSASLLNNLVVCSKCGLGFVHRRKDTMSRGKKYHYRYYSCKTYKHTHELEKCGNKIWRADKLEELIINRVNNYSFASRNVDKEDELDSLNEKLKIEHERKKRLFDLYINGSYEVSELDCMMNDIDAQINYYESQIEANEELKKDKKIQESLANLATVDYDSLEFREKQLYLKSLINKIYIDGEQVTIEWL

SEQ ID NO: 4728 - protein, 452 aa, synthetic construct
MKAAIYIRVSTQEQVENYSIQAQTEKLTALCRSKGWDVYDIFIDGGYSGSNMNRPALNEMLSKLHEIDAVVVYRLDRLSRSQRDTTTLIEEYFLKNNVEFVSLSETLDTSSPFGRAMIGILSVFAQLERETIRDRMVMGKIKRIEAGLPLTTAKGRTFGYDVIDTKLYINEEEAKQLQLIYDIFEEEQSITSLQKRLKKLGFKVRTYNRYNNWLTNDLYCGYVSYKDKVHVKGIHEPIISEEQFYRVQEIFTRMGKNPNMNRDNASLLSNLVVCSKCGLGFVHRSKDTMSRGKKYHYRYYSCKTYKHTHELEKCGNKTWRADKLEELIINRVNNYSFAGRNVDKEDELDSLNEKLKIEHAKKKRLFDLYINGSYEVSELDNMMNDIDAQINYYESQIEANEELRRNKKIQENLADLATVDFDSLEFREKQLYLKSLINKIYIDGEQVTIEWL

SEQ ID NO: 4729 - protein, 452 aa, synthetic construct
MKAAIYIRVSTREQVENYSIQAQTEKLTALCRSKDWDVYDIFIDGGYSGSNMNRPALNEMLSKLHEIDAVVVYRLDRLSRSQRDTITMIEEYFLKNNVEFVSLSETLDTSSPFGRAMIGILSVFAQLERETIRDRMVMGRIKRVEAGLPLTTAKGRTFGYDVIDTKLYINEGEAKQLQLIYDIFEEEQSITFLQKRLKKLGFKVRTYNRYNSWLTNDLYCGYVSYKDKVHVKGIHEPIISEEQFYRVQEIFTRMGKNPNMNRDSASLLNNLVVCGKCGLGFVHRRKDTMSRGKKYHYRYYSCKTYKHIHELEKCGNKIWRADRLEELIINHVNNYSFASRNVVKEDELASLNEKLKIEHAKKRRLFDLYINGSYEMSELDSMMNDIDAQIDYYEGQIEANEELRKNKKIQENLADLATVDYDSLEFREKQLYLKGLINKIYIDGEQVTIEWL

SEQ ID NO: 4730 - protein, 469 aa, synthetic construct
MSYTTPVRAAVYLRISEDRSGEQLGVARQREDCLKLCGQRKWVPVEYLDNDVSASTGKRRPAYEQMLADITAGKIAAVVAWDLDRLHRRPIELEAFMSLADEKRLALATVAGDVDLATPQGRLVARLKGCVAAHETEHKKARQRRAARQKAERGYPNWSKAFGYLPGPNGPEPDPRTAPLVKQAYADILAGASLGDVCRQWNDAGAFTITGRPWTTTTLSKFLRKPRNAGLRAYKGARYGPVDRGAIVGEAQWSPLVDEATFWAAQAVLDAPGRAPGRKSVRRHLLTGLAGCGKCGSHLAGSYRTDGRVVYVCKACHGVAILADNIEPVLYHIVAERLAMPDAVDVLRREFHDAAEAEAIRLELETLYGELDRLAVERAEGLLTARQVKISTDIVNAKITKLQARQLDQERLRVFDGIPLGTPQVAGMIAELSPDRFRAVLDVLTEVVVQPVGKGGRIFNPERVQVNWR

SEQ ID NO: 4731 - protein, 485 aa, synthetic construct
MTKKVAIYTRVSTTNQAEEGFSIDEQIDRLTKYAEAMGWQVSDTYTDAGFSGAKLERPAMQRLINDIENKAFDTVLVYKLDRLSRSVRDTLYLVKDVFTKNKIDFISLNESIDTSSAMGSLFLTILGAINEFERENIKERMTMGKLGRAKSGKSMMWTKTAFGYYHNRKTGILEIVPPQATVVEQIFTDYLSGISLTKLRDKLNESGHIGKDIPWSYRTLRQTLDNPVYCGYIKFKDSLFEGMHKPIIPYETYLKVQKELEERQQQTYERNNNPRPFQAKYMLSGMARCGYCGAPLRIVLGHKRKDGSRTMKYHCANRFPRKTKGVTVYNDNKKCDSGTYDLSNLENTVIDSLIGFQENNDSLLKIINGNNQPILDTSSFKKQISQIDRRIQKNSDLYLNDFITMDELRARTDSLQAEKKLLKAKISENKFDDSTDVFELVKTQLGSIPINELSYDDKKRIVNNLVSKVDVTADNVDIIFKFQLA

SEQ ID NO: 4732 - protein, 485 aa, synthetic construct
MTKKVAIYTRVSTTNQAEEGFSIDEQIDRLTKYAEAMGWQVSDTYTDAGLSGAKLERPAMQRLINDIENKAFDTVLVYKLDRLSRSVRDTLYLVKDVFTRNKIDFISLNESIDTSSAMGSLFLTILSAINEFERENIKERMTMGKLGRAKSGKSMMWTKTAFGYYHNRKTGILEIAPLQATIVEQIFTDYLSGISLTKLRDKLNESGHIGKDIPWSYRTLRQTLDNPVYCGYIKFKDSLFEGLHKPIIPYETYLKVQKELEERQQQTYERNNNPRPFQAKYMLSGMARCGYCGAPLRIVLGHKRKDGSRTMKYHCANRFPRKTKGVTVYNDNKKCDSGTYDLSNLENTVIDNLIGFQENNDGLLKIINGNNQPILDTSSLKKQISQIDKKIQKNSDLYLNDFITMGELKDRTDSLQAEKKLLKAKISENKFNDSTDVFELVKTQLGSIPINELSYDDKKKIVNNLVSKVDVTADNVDIIFKFQLA

SEQ ID NO: 4733 - protein, 452 aa, synthetic construct
MKAAIYIRVSTQEQVENYSIQAQTEKLTALCRSKDWDVYDIFIDGGYSGSNMNRPALNEMLSKLHEIDAVVVYRLDRLSRSQRDTITLIEEHFLKNNVEFVSLSETLDTSSPFGRAMIGILSVFAQLERETIRDRMVMGKIKRIEAGLPLTTAKGRTFGYDVIDTKLYINEEEAKQLQLIYDIFEEEQSITFLQKRLKKLGFKVRAYSRYNSWLTNDLYCGYVSYKDKVHVKGIHEPIISEEQFQRVQEIFARMGKNPNMNRDSASLLNNLVVCSKCGLGFVHRRKDTMSRGKKYHYRYYSCKTYKHIHELEKCGNKIWRADKLEELVINRVNNYSFASRSEDKEDELDSLNEKLKIEHAKKRRLFDLYINGSYEVSELDSMMNDIDAQINYYESQIEANEELKKNKKIQENLANLATMDYDSLEFREKQLYLKSLINKIYIDGEQVTIEWL

SEQ ID NO: 4734 - protein, 485 aa, synthetic construct
MTRKVAIYTRVSTTNQAEEGFSIDEQIDRLTKYAEAMGWQVSDTYTDAGFSGAKLERPAMQRLINDIENKAFDTVLVYKLDRLSRSVRDTLYLVKDVFTKNKIDFISLNESIDTSSAMGSLFLTILSAINEFERENIKERMTMGKLGRAKSGKSMMWTKTAFGYYHNRKTGILEIVPLQATIVEQIFTDYLSGISLTKLRDKLNESGHIGKDIPWSYRTLRQTLGNPVYCGYIKFKDSLFEGMHKPIIPYETYLKVQKELEERQQQTYERSNNPRPFQAKYMLSGMARCGYCGAPLRIVLGHKRRDGSRTMRYHCANRFPRKTKGVTVYNGNKKCDSGTYDLSNLENTVIDNLIGFQENNDSLLKIISGNNQPILDTSCFKKQISQIDKKIRKNSDLYLNGFITMDELKDRTDSLRAEKKLLEAKISENKFNDSTDVFELVKTQLGSIPINELSYDNKKKIVNNLVSKVDVTADNVDIIFKFQLA

SEQ ID NO: 4735 - protein, 452 aa, synthetic construct
MKAAIYIRVSTREQVENYSIQAQTEKLTALCRSKDWDVYDIFIDGGYSGSNMNRPALNEMLSKLHEIDAVVVYRLDRLSRSQRDTITLIEEYFLKNNVEFVSLSETLDTSSPFGRAMIGILSVFAQLERETIRDRMVMGKIKRIEAGLPLTTAKGRTFGYDVIDTKLYINEEEAKQLQLIYDIFEEEQSITLLQKRLKKLGFKVRTYNRYNNWLTNDLYCGYVSYKDKVHVKGIHEPIISEEQFYRVQEIFAHMGKNPNVNRDSASLLNNLVVCSKCGLGFVHRRKDIMSRGKKYHYRYYSCKTYKHIHELEKCGNKIWRADKLEELIINRVNNYSFAGRNADKEDELDSLNEKLKIEHAKKKRLFDLYINGSYGVSELDSMMNDIDAQINYYESQIEANEELRKNKKIQENLAHLATVGFDSLEFREKQLYLKSLINKIYIDGEQVTIEWL

SEQ ID NO: 4736 - protein, 485 aa, synthetic construct
MTKKVAIYTRVSTTNQAEEGFSIDEQIDRLTKYAEAMGWQVSDTYTDAGISGAKLERPAMQRLINDIENKAFDTVLVYKLDRLSRSVRDTLYLVKEVFAKNKIDFISLNESIDTSSAVGSLFLTVLSAINEFERENIKERMTMGKLGRAKSGKSMMWTKTAFGYYHNRKTGILEIVPLQATIVEQIFTDYLSGISLTKLRDKLNESGHIGKDIPWSYRTLRQTLDNPVYCGYIKFKDSLFEGMHKPIIPYETYLKVQKELEERQQQTYERNNNPRPFQAKYMLSGMARCGYCGAPLRIVLGHKRKDGSRTMKYHCANRFPRKTKGVTVYNDNKKCDSGTYDLSNLEDTVIDNLIGFQESNDSLLKIINGNNQPILDTSSFKKQISQIDKKIQKNSDLYLNDFITMDELKDRTDSLQAEKKLLKAKISENKFNDSTDVFELVKTQLGSIPINELSYDNKKKIVNSLVSKVDVTADNVDIIFKFQLA

SEQ ID NO: 4737 - protein, 452 aa, synthetic construct
MKAAIYIRVSTREQVENYSIQAQTEKLTALCRSKDWDVYDIFIDGGYSGSNMNRPALNEMLSKLHEIDAVVVYRLDRLSRSQRDTITLIEEYFLKNNVEFVSLSETLDTSSPFGRAMIGILSVFAQLERETIRDRMVMGKIKRIEAGLPLTTAKGRTFGYDVIDAKLYINEEEAKQLQLIYDIFEEEQSITFLQKRLKKLGFKVRTYSRYNNWLTNDLYCGYVSYKDKVHVKGIHEPIISEEQFYRVQEIFTLMGKNPNMNRDSASLLNNLVVCSKCGLGFVHRRKDTTSRGKKYHYRYYSCKTYKHIHELEKCGNKIWRADKLEELVINRVSNYSIASRNVDKEDELDSLNEKLKIEHAKKKRLFDLYINGSYEVSELDSMMNDIDAQINYYESQIEANEELKKNKKIQENLANLAAVDYDSLEFREKQLYLKSLINKIYIDGEQVTIEWL

SEQ ID NO: 4738 - protein, 469 aa, synthetic construct
MCYTTPVRAAVYLRISEDRSGEQLGVARQREDCLKLCGQRNWVPVEYLDNDVSASTGKRRPAYEQMLADITAGKIAAVVAWDLDRLHRRPIELEAFMSLADEKRLALATVAGDVDLATPQGRLVARLKGSVAAHETEHKKARQRRAARQKAERGHPNWRKAFGYLPGPNGPEPDPRTAPLVKQAYADILAGASLGDVCRQWNGAGAFTITGRPWTTTSLSKFLRKPRNAGLRAYRGAPYGPVDRDAIVGRAQWSPLVDEATFWAAQAVLDAPGRAPGRKSVRRHLLTGLAGCGKCGNHLAGSYRTGGRVVYVCKACHGVAILADNIEPILYHIVAERLAMPDAVDLLRREVHDAAEAETIRLELETLYGELDRLAVERAEGLLTARQVKISTDIVSAKITKLQARQLDQERLRVFDGIPLGTPLVAGVIAGLSPDRFRAVLDVLAEVVVQPVGKSGRIFNPERVQVNWR

SEQ ID NO: 4739 - protein, 452 aa, synthetic construct
MKAAIYIRVSTQEQVENYSTQAQTEKLTALCRSKDWDVYDIFIDGGYSGSNMNRPALNEMLSKLHEIDAVVVYRLDRLSRSQRDTITLIEEYFLKNNVEFVSLSETLDTSSPFGRAMIGILSVFAQLERETIRDRMVMGKIKRIEAGLPLTTAKGRTFGYDVIDTKLYINEEEAKQLQLIYDIFEEEQSITSLQKRLKKLGFKVRTYSCYNNWLTNDLYCGYVSYKDKVHVKGIHEPIISEEQFYRVQEIFTRMGKNPNMNRDSASLLNNLVVCSKCGLGFVHRRKDTMSRGKRYHYRYYSCKTYKHTHELEKCGNKIWRADKLEELIINRVNNYSFASRNVEKEDELDSLNEKLKIEHAKRKRLFDLYINGSYEVSELDSMMSDIDAQINYYESQIEANEELRKNKKIQKNLADLATVDYDSLEFCEKQLYLKSLINKIYIDGEQVTIEWL

SEQ ID NO: 4740 - protein, 452 aa, synthetic construct
MKAAIYIRVSTQEQVENYSIQAQTEKLTALCRSKDWDVYDIFVDGGYSGSNMNRPALNEMLSKLHEIDAVVVYRLDRLSRSQRDTTTLIEEYFLKNNVEFVSLSETLDTSSPFGRAMIGILSVFAQLERETIRDRMVMGKIKRIEAGLPLTTAKGRTFGYDVIDTKLYINEEEAKQLQLIYDIFEEEQSITSLQKRLKKLGFKVRTYNRYNNWLTNDLYCGYVSYKDKVHVKGIHEPIISEEQFYRVQEIFTRMGKNPNMNRDSASLLNNLVVCSKCGLSFVHRSKDTTSRGKKYHYRYYSCKTYKHTHELERCGNKTWRADKLEELIINRVNNYSFASRSMVKEDELDSLNEKLKIEHAKKKRLFDLYINGSYEVSELDSMMNDIDAQINYYECQIEANEELKKNKKIQENLADLATVDFDSLEFREKQLYLKSLINKIYIDGEQVTIEWL

SEQ ID NO: 4741 - protein, 452 aa, synthetic construct
MKAAIYIRVSTREQVENYSIQAQTEKLTALCRSKDWDVYDIFVDGGYSGSNMNRPALNEMLSKLHEIDAVVVYRLDRLSRSQRDTITLIEEHFLKNNVEFVSLSETLDTSSPFGRAMIGILSVFAQLERETIRDRMVMGKIKRIEAGLPLTTAKGRTFGYDVIDTKLYINEEEAKQLQLIYDIFEEEQSITFLQKRLKKLGFKVHTYNRYNNWLTNDLYCGYVSYKDKVHVKGIHEPIISEEQFYRVQEIFARMGKNPNMNRDSASLLNNLVVCSKCGLGFVHRRKDAMSRDKKYHYRYYSCKTYKHIHELEKCGNKIWRADKLEELIINRVNNYSLASRNVDKEDELDSLNEKLKVEHAKKKRLFDLYINGSYEVSELDSLMSDIDAQISNYESQIEANEELKKNKKIQESLADLATVDFDSLEFREKQLYLKSLINKIYIDGEQVTIEWL

SEQ ID NO: 4742 - protein, 485 aa, synthetic construct
MTKKVAIYTRVSTTNQAEEGFSIDEQIDRLTKYAEAMGWLVSDTYTDAGFSGAKLERPAMQRLISDIENKAFDTVLVYKLDRLSRSVRDTLYLVKDVFTKNKIDFISLNESIDTSSAMGSLFLTILSAINEFERENIKERMTMGKLGRAKSGKSMMWTKTAFGYYHNRKTGILEIVPLQATIVEQIFTDYLSGISLTKLRDKLNESGHIGKDIPWSYRTLRQTLDNPVYCGYIKFKDSLFEGMHKPIIPYETYLKVQKELEERQQQTYERNNNPRPFQAKYMLSGMARCGYCGAPLRIVLGHKRKDGSRTMKYHCTNRFPRKTKGVTVYNDNKKCDSGTYDLSNLENTVIDNLIGFQENNDSLLKIINGNNQPILDTSSFKRQISQIDKKIQKNSDLYLNDLITMDELKDRTESLQAEKKLLKAKISENRFNDSTDVFELVKTQLGSIPINELSYDNKKKIVNNLVSKVDVTADNVDIIFKFQLA

SEQ ID NO: 4743 - protein, 452 aa, synthetic construct
MKAAIYIRVSTREQVENYSIQAQTEKLTALCRSKDWDVYDIFVDGGYSGSNMNRPALNEMLSKLHEIDAVVVYRLDRLSRSQRDTITLIEEYFLKNNVEFVSLSETLDTSSPFGRAMIGILSVFAQLERETIRDRMVMGKIKRIEAGLPLTTAKGRTFGYDVIDTKLYINEEEAKQLQLIYDIFEEEQSITSLQKRLKKLGFRVRTYNRYNNWLTNDLYCGYVSYKDKVHVKGIHEPIISEEQFYRVQEIFTRMGKNPNMNRDSASLLNNLVVCGKCGLGFVHRRKDAMSRDKKYHYRYYSCKTYKHIHELEKCGNKIWRADELEELVINRVNSYSVASRNVDKEDELDSLNEKLKIEHAKKKRLFDLYINGSYEVSELDSMMNDIDAQINYYENQIEANEELRKTKKIQENLANLATVDFDSLEFREKQLYLKGLINKIYIDGEQVTIEWL

SEQ ID NO: 4744 - protein, 452 aa, synthetic construct
MKAAIYIRVSTREQVENYSIQAQTEKLTALCRSKDWDVYDIFVDGGYSGSNMNRPALNEMLSKLHEIDAVVVYRLDRLSRSQRDTITLIEEYFLKNNVEFVSLSETLDTSSPFGRAMIGILSVFAQLERETIRDRMVMGKIKRIEAGLPLTTAKGRTFGYDVIDTKLYINEEEAKQLQLIYDIFEEERSITFLQKRLKKLGFKVHTYSRYNNWLTNDLYCGYVSYKDKVHVKGIHEPIISEEQFYRVQEIFTRMGKNPNMNRDSASLLSNLVVCSKCGLGFVHRRKDTMSRGKKYHYRYYSCKTYKHTYELEKCGNKIWRADKLEELIIDRVNNYSFASRNVDKEDELDSLNEKLKIERAKKKRLFDLYINGSYEVSELDSMMNDIDAQINYYESQIEANEELKKNKKIQENLADLATVDFDSLEFREKQLYLKSLISKIYIDGEQVTIEWL

SEQ ID NO: 4745 - protein, 452 aa, synthetic construct
MKAAIYIRVSTREQVENYSIQAQTEKLTALCRSKGWDVYDIFIDGGYSGGNMNRPALNEMLSKLHEIDAVVVYRLDRLSRSQRDTITLIEEYFLKNNVEFVSLSETLDTSSPFGRAMIGILSVFAQLERETIRDRMVMGKIKRIEAGLPLTTAKGRTFGYDVIDTKLYINEEEAKQLRLIYDIFEEERSITSLQRRLKELGLKVRTYNRYNSWLTNDLYCGYVSYKDKVHVKGIHEPIISEEQFYRVQEIFTRMGKNPNMNRDSASLLNNLVVCSKCGLGFVHRRKDAMSRDKKYHYRYYSCKTYKHIHELEKCGNKIWRADKLEELIINRVNSYSLAGRNVDKEDELDSLNEKLKMEHVKKKRLFDLYINGSYEVSELDSMMNDIDAQINYYESQIEANEELKKNKRIRENLAGLATVDFDSLEFREKQLYLKSLINKIYIDGEQVTIEWL

SEQ ID NO: 4746 - protein, 452 aa, synthetic construct
MKAAIYIRVSTREQVENYSIQAQTEKLTALCRSKDWDVYDIFIDGGYSGSNMNRPALNEMLSKLHEIDAVVVYRLDRLSRSQRDTITLIEEYFLKNNVEFVSLSETLDTSSPFGRAMIGILSVFAQLERETIRDRMVMGKIKRIEAGLPLTTAKGRTFGYDVVDTKLYINEEEAKQLQLIYDIFEEEQSITFLQKRLKKLGFKVRTYSRYNNWLTNDLYCGYVSYKDKVHVKGIHEPIISEEQFYRVQEIFTRMGKNPNMNRESASLLNNLVVCSKCGLGFVHRRKDTMSRGKKYHYRYYSCKTYKHTHELEKCGNKIWRADKLEELIISRVNNYSLASRNVDKEDELDSLNEKLKIEHAKKKRLFDLYINGSYEVSELGSMMNDIDAQINYYESQIEANEELKRNKKIQENLADLATVDYDSLEFREKQLYLKSLINKIYIDGEQVTIEWL

SEQ ID NO: 4747 - protein, 452 aa, synthetic construct; identical to SEQ ID NO: 3925

SEQ ID NO: 4748 - protein, 469 aa, synthetic construct
MSYTTPVRAAVYLRISEDRSGEQLGVARQREDCLKLCDQRKWVPVEYLDNDVSASTGKRRPAYEQMLADITAGKIAAVVAWDLDRLHRRPIELEAFMSLADEKRLALATVAGDVDLATPQGRLVARLKGCVAAHETEHKKARQRRAARQKAERGHPNWSKAFGYLPGPNGPEPDPRTAPLVKQAYADILAGASLGDVCRQWNDADAFTITGRPWTTTTLSKFLRKPRNAGLRAYKGARYGPVDRNAIVGKALWSPLVDEATFWAAQAVLDAPGRAPGRKSVRRHLLTGLAGCGKCGNHLAGSYRADGRVVYVCKACHGVAILADNIEPFLYHIVAERLAKPDAVDLLRCGVHDAAEAETIRQELESLYGELDRLAVERAEGLLTARQVKVGTDIVNAKITKLQARQQDQERLRVLDGIPLGTPQVAGTIAELSPDRFRAVLDVLAEVVVQPVGKSGRIFNPERVQVNWR

SEQ ID NO: 4749 - protein, 469 aa, synthetic construct
MSYTTPVRAAVYLRISEDRSGEQLGVARQREDCLKLCDQRKWVPVEYLDNDVSASTGKRRPAYEQMLADITAGKIAAVVAWDLDRLHRRPIELEAFMNLADEKRLALATVAGDIDLATPQGRLVARLKGSVAAHETEHKKARQRRAARQKAERGYPNWSKAFGYLPGPNGPEPDPRTAPLVKQAYADILAGESLGHVCRQWNDAGAFTITGRPWATTTLSKFLRKPRNAGLRAYKGARYGPVDRDAIVGKAQWSPLVDEATFWAAQAVLDAPGRAPGRKSVRRHLLTGLVGCGKCGNHLAGSYRTDGQVVYVCKACHGVAILADNIEPILYRIVAERLAMPDAVDLLRREVHDAAEAETIRLELETLYGELDRLAVERAEGLLTARQVKISTDIVNAKITKLQARQLDQERLRVLDGIPLGTPQVAGMIAELSPDRFRAVLDVLAEVVVQPVGKSGRTPNPERVQVNWR

SEQ ID NO: 4750 - protein, 452 aa, synthetic construct
MKAAIYIRVSTQEQVENYSIQAQTEKLTALCRSKDWDVYDIFIDGGYSGSNMNRPALNEMLSKLHEIDAVVVYRLDRLSRSQRDTTTLIEEYFLKNNVEFVSLSETLDTSSPFGRAMIGILSVFAQLERETIRDRMVMGKIKRIEAGLPLTTAKGRTFGYDVIDTKLYINEEEAKQLQLIYDIFEEEQSITFLQKRLKELGFKVRTYNRYNNWLTNDLYCGYVSYKDKVHVKGIHEPIISEEQFYRVQEIFTRMGKNPNMNRDSASLLNNLVVCSKCGLGFVHRSKDTMSRGKKYHYRYYSCKTYKHTHELEKCGNKTWRADKLEELIINRVNNYSFASRNVDKEDELDSLNEKLKIEHAKKKRLFDLYINGSYEVSELDSMMNGIDAQINYYESQIEANEELKKNKKIQENLADLATVDFDSLGFREKQLYLKSLINKIYIDGEQVTIEWL

SEQ ID NO: 4751 - protein, 485 aa, synthetic construct
MTKKVAIYTRVSTTNQAEEGFSIDEQVDRLTKYAEAMGWQVSDTYTDAGFSGAKLGRPAMQRLINDIENKAFDTVLVYKLDRLSRSVRDTLYLVKDVFTKNKIDFISLNESIDTSSAMGSLFLTILSAINEFERENIKERMTMGKLGRAKSGKSMMWTKTAFGYCHNRKTGILEIVPLQATIVEQIFTDYLSGISLTKLRDKLNESGHIGKDIPWSYRTLRQTLDNPVYCGYIKFKDSLFEGMHKPIIPYETYLRVQKELEERQQQTYERNNNPRPFQAKYMLSGMARCGYCGAPLRIVLGHKRKDGSRTTKYHCANRFPRKTKGVTVYNDNKKCDSGTYDLSNLENTVIDNLIGLQENNDSLLKIINGNNRPILDTSSVKEQISQIDKKIQRNSDLYLNDFITMDELKDRTDSLQAEKKLLKAKISENKSNDSTDVFKQVKTQLGSIPINELSYDNKKKIVNNLVSKVDVTADNVDIIFKFQLA

SEQ ID NO: 4752 - protein, 452 aa, synthetic construct
MKAAIYIRVSTQEQVGNYSIQAQTEKLTALCRSKDWDVYDIFVDGGYSGSNMNRPALNEMLSKLHEIDAVVVYRLDRLSRSQRDTTTLIEEYFLKNNVEFVSLSETLDTSSPFGRAMIGILSVFAQLERETIRDRMVMGKIKRIEAGLPLTTAKGRTFGYDVIDTKLYINEEEAKQLQLIYDIFEEERSITFLQKRLKKLGFKVRTYNCYNNWLTNDLYCGYVSYKDKVHVKGIHEPIISEEQFCRVQEIFTRMGKNPNMNRDSASLLNNLVVCSKCGLGFVHRRKDTMSGGKKYHYRYYSCKTYKHTHELEKCGNKTWRADKLEELIINRVNNYSFASRNVDREDELDSLNEKLKIEHARKKRLFDLYINGSYEVSELDSMMNDIDAQINYYESQIEANEELRKNRKIQENLADLATVDFDSLEFREKQRYLKSLINKIYIDGEQVTIEWL

SEQ ID NO: 4753 - protein, 452 aa, synthetic construct
MKAAIYIRVSTREQVENYSIQAQTEKLTALCRSKDWDVYDIFIDGGYSGSNMNRPALNEMLSKLHEIDAVVVYRLDRLSRSQRDTVTLIEEYFLKNNVEFVSLSETLDTSSPFGRAMIGILSVFAQLERETIRDRMVMGKIKRIEAGLPLTTAKGRTFGYDVIDTKLYINEEEAKQLQLIYDIFEEERSITFLQKRLKKLGFKVRAYNRYYNWLTNDLYCGYVSYKDKVHVKGIHEPIISEEQFYRVQEIFTRMGKNPNMNRDSASLLNNLVVCSKCGLGFVHRRKDTMSRGKKYHYRYYSCKTYKHTHELEKCGNKIWRADKLEELIINRVNNYSLASRNVDKEDELGSLNEKLKIEHAKKKRLFDLYINGSYDVSELDNMMSDIDAQINYYESRIEANEELKKNKKIQEDLADLATMDFDSLEFREKQLYLKSLINKIYIDGEQVTIEWL

SEQ ID NO: 4754 - protein, 485 aa, synthetic construct
MTKKVAIYTRVSTTNQAEEGFSIDEQVDRLTKYAEAMGWQVSETYTDAGFSGAKLERPAMQRLINDIENKAFDTVLVYKLDRLSRSVRDTLYLVKEVFTKNKIDFISLNESIDTSSAMGSLFLTILSAINEFERENIKERMTMGKLGRAKSGKSMMWTKTAFGYYHNRKTGILEIVPLQATIVEQIFTDYLSGISLTKLRDKLNESGHIGKDIPWSYRTLRQTLDNPVYCGYIKFKGSLFEGTHKPIIPYETYLKVQKELEERQQQTYERNNNPRPFQAKYMLSGMARCGYCGAPLRIVLGHKRKDGSRTMKYHCANRFPRKTKGVTVYNDNKKCDSGTYDLGNLENTVIDNLIGLQEDNDSLLKIINGSNQPILDTSSFKKRISQIDKKIQKDSDLYLNDFITMDELKERTDSLQAEKKLLKAKISENKFNDSTDVFELVKTQLGSIPINELSYDDKKKIVNNLVSKVDVTADNVGIIFKFQLA

SEQ ID NO: 4755 - protein, 452 aa, synthetic construct
MKAAIYIRVSTREQVENYSIQAQTEKLTALCRSKDWDVYDIFIDGGYSGSNMNRPALNEMLSKLHEIGAVVVYRLDRLSRSQRDTITLIEEYFLKNNVEFVSLSETLDTSSPFGRAMIGILSVFAQLERETIRDRMVMGKIKRIEAGLPLTTAKGRTFGYDVIDAKLYINEEEAKQLQLIYDIFEEEQSITFLQKRLKKLGFKVRTYNRYNSWLTNDLYCGYVSYKDKVHVKGIHEPIISEEQFYRVQEIFARMGKNPNMNRDSASLLSNLVVCSKCGLGFVHRRKDTTSRGKKYHYRYYSCKTYKHTHELEKCGNKIWRADKLEELVISRVNNYSFASRNVDKEDELASLNEKLKIEHAKKKRLFDLYINGSYEAGELDSMMNDIDAQINYYESRIEASEELKKNKKIQESLANLATVDYDSLEFREKQLYLKSLINKIYIDGEQVTIEWL

SEQ ID NO: 4756 - protein, 469 aa, synthetic construct
MSYTTPVRAAVYLRISEDRSGEQLGVARQREDCLKLCGQRKWEPVEYLDNDVSASTGKRRPAYEQMLADIAAGKIAAVVAWDLDRLHRRPMELEAFMSLADEKRLALATVAGDVDLATPQGRLVARLKGSVAAHETEHKKARQRRAARQKAERGHPNWSKAFGYLPGPNGPEPDPRTAPLVKQAYADILAGASLGDVCRQWNDAGAFTITGRPWTTTTLSKFLRKPRNAGLRAYKGARYGPVDRDAIVGKAQWSPLVDEATFWAAQAVLDAPGRAPGRKSVRRHLLTGLAGCGKCGNHLAGSYRTDGRVVYVCKACHGVAILADNIEPTLYRIVAERLAMPDAVDLLRREIHDAAEAETIRLELETLYGELDRLAVERAEGLLTARQVKISTDIVNAKITKLQARQLDQERLHVFNGIPLGTPQVAGMIAELSPDRFRAVLDVLAEVVVQPVGKSGRIFNPERVQVNWR

SEQ ID NO: 4757 - protein, 469 aa, synthetic construct
MSNTTPVRAAVYLRISEDRSGEQLGVARQREDCLKLCDQRKWVPVEYLDNDVSASTGKRRPAYEQMLADITAGKIAAVVAWDLDRLHRRPVELEAFMSLADEKRLALATVAGDVDLATPQGRLVARLKGSVAAHETEHKKARQRRAARQKAERGHPNWSKAFGYLPGPNGPEPDPQTAPLVKQAYADILAGASLGDVCRQWNDAGAFTITGRPWTTTTLSKFLRKPRNAGLRAYKGARYGPVDRDAIVGKAQWSPLVDETTFWAAQAVLDAPGRAPGRKSVRRHLLTGLAGCGKCGNHLAGSYRTDGRVAYVCKACHGVAILADNIEPFLYHIVAERLAMPDAVDLLRREIHNAAEAETIRLELEALYGELDRLAVERAEGLLTARQVKISTDIVNAKVTKLQARQLDQERLRVFDGIPLGTPQVAGMIAELSPDRFRAVLDVLAEVVVQPVGKSGRIFNPERVQVNWR

SEQ ID NO: 4758 - protein, 452 aa, synthetic construct
MKAAIYIRVSTQEQVGNYSIQAQTEKLTALCRSKDWDVYDIFVDGGYSGSNMNRPALNEMLSKLHEIDAVVVYRLDRLSRSQRDTTTLIEEYFLKNNVEFVSLSETLDTSSPFGRAMIGILSVFAQLERETIRDRMVMGKIKRIEAGLPLTTAKGRTFGYDVIDTKLYINEEEAKQLRLIYDIFEEEQSITSLQKRLKKLGFKVRTYNRYNNWLTNDLYCGYVSYKDKVHVKGIHEPIISEEQFYRVQEIFTRMGKNPNMNRDSASLLNNLVVCSKCGLGFVHRSKDTMSRGKKYHYRYYSCKTYKHTHELEKCGNKTWRADKLEELIINRVNNYSFASRNMVKEDELDSLNEKLKIEHAKKKRLFDLYINGGYEASELDSVMNDIDAQINYYESQIEANEELRRNKKIQENLADLATADFDSLEFREKQLYLRGLISKIYIDDEQVTIEWL

SEQ ID NO: 4759 - protein, 469 aa, synthetic construct
MSYTTPVRAAVYLRISEDRSGEQLGVARQREDCLKLCDQRKWVPVEYLDNDVSASTGKRRPAYEQMLADITAGKVAAVVAWDLDRLHRRPIELEAFMSLADEKRLALATVAGDVDLATPQGRLVARLKGSVAAHETEHKKARQRRAARQKAERGYPNWNKAFGYLPGPNGPEPDPRTAPLVKQAYADILAGASLGDVCRRWNDAGAFTITGRPWTTTTLSKFLRKPRNAGLRAYKGARYGPVDRDAIVGKARWSPLVDEATFWAAQAVLDAPGRAPGRKSVRRHLLTGLAGCGKCGHHLAGSYRTDGRVVYVCKACHGVAILADNIEPTLYHIVAERLGMPDAVNLLRREIHDTAEAETIHLELETLYGELDRLAVERAEGLLTARQVKISTDIVNAKITKLQACQLDQERLRVLDGIPLGTPQVADMIAELSPDRFRAVLDVLADVVVQPVGKSGRIFNPERVQVNWR

SEQ ID NO: 4760 - protein, 452 aa, synthetic construct
MKAAIYIRVSTREQVENYSIQAQTEKLTALCRSKDWDVYDIFIDGGYSGSNMNRPALNEMLSKLHEIDAVVVYRLDRLSRSQRDTITLIEEYFLKNNVEFVSLSETLDTSSPFGRAMIGILSVFAQLERETIRDRMVMGKIKRIEAGLPLTTAKGRTFGYDVIGTKLYINEEEAKQLQLIYDIFEEVQSITSLQKRLKKLGFKVRTYNRYNSWLTNDLYCGYVSYKDKVHVKGIHEPIISEEQFYRVQEIFTRMGKNPNMNRGSASLLNNLVVCGKCGLGFVHRRKDAMSRDKKYHYRYYSCKTYKHIHELEKCGNKIWRADKLEGLIIDRVNNYSLASRNVDKEDELDSLNEKLKIEHAKKKRLFDLYINGSYDVSELDSMMNDIDAQINYYESQIEANEELRKNKEIQDDLAYLATVDFDSLEFREKQLYLKSLINKIYIDGEQVTIEWL

SEQ ID NO: 4761 - protein, 452 aa, synthetic construct
MKAAIYIRVSTREQVENYSIQAQTEKLTALCRSKDWDVYDIFIDGGYSGSNMNRPALNEMLSKLHEIDAVVVYRLDRLSRSQRDTITLIEEYFLRNNVEFVSLSETLDTSSPFGRAMIGILSVFAQLERETIRDRMVMGKIKRIEAGLPLTTAKGRTFGYDVIGAKLYINEEEAKQLQLIYDIFEEEQSITLLQKRLKKLGFRVRTYNRYNSWLTNDLYCGYVSYKDKVHVKGIHEPIISEEQFYRVQEIFTRMGKNPNMNRDSASLLNNLVVCSKCGLGFVHRRKDTMSRGKKYHYRYYSCKTYKHTHELEKCGNKIWRADKLEELIINRVNNYGFASRSVNKEDELDSLNEKLKIEHAKKKRLFDLYINGSYNVSELDSMMNDIDAQINYYKSQIEANEELKKNKKIQENLAGLATVDFDSLEFREKQLYLKSLINKIYIDGEQVTIEWL

SEQ ID NO: 4762 - protein, 469 aa, synthetic construct
MSYTTPVRAAVYLRISEDRSGEQLGVARQREDCLKLCDQRKWVPVEYLDNDVSASTGKRRPAYEQMLADITAGKIAAVVAWDLDRLHRRPIELEAFMSLADEKRLALATVAGDVDLATPQGRLVARLKGSVAAHETEHKKARQRRAARQKAERGHPNWSKAFGYLPGPTGPEPDPRTAPLVKQAYADILAGASLGDVCRQWNGAGAFTITGRPWTTTALSKFLRKPRNAGLRAYKGARYGPVDRDAIVGKAQWSPLVDEATFWAAQAVLDAPGRAPGRKSVRRHLLTGLAGCGKCGNHLAGSYRTDGRVVYVCKACHGVSILADNIEPILYHIVAERLAMPDAVDLLRREIHDAAEAETIRLELETLHGELDRLAVERAEGLLTARQVKISTDIVNAKISKLQARQQDQERLRVLDGIPLGTPQVAGKIAELSPDRFRAVLDVLAEVVVQPVGKSGRVFNPERVQVNWR

SEQ ID NO: 4763 - protein, 469 aa, synthetic construct
MSYTTPVRAAVYLRISEDRSGEQLGVARQREDCLKLCGQRKWVPVEYLDNDVSASTGKRRPAYEQMLADITAGKIAAVVAWDLDRLHRRPIELEAFMSLADEKRLALATVAGDVDLATPQGRLVARLKGCVAAHETEHKKARQRRAARQKAERGLPNWSKAFGYLPGPNGPEPDPRTAPLVKQAYADILAGASLGDVCRQWNGASAFTITGRPWTTTTLSKFLRKPRNAGLRAYKGARYGPVDRDAIVGKAQWSPLVDEATFWAAQAVLDAPGRAPGRKSVRRHLLTGLAGCGKCGNHLAGSYRTDGRVVYVCKACHGVAILADNIEPILYHIVAERLAMPDAEDLLRREIHDVAEAETIRLELETLYGELDRLAAERAEGLLTARQVKISTDIVSAKITKLQARQLNQERLRVLDGIPLGTPQAAGMIAELSPDRFRAVLDVLAEVVVQPVGKSGRIFNPERVQVNWR

SEQ ID NO: 4764 - protein, 452 aa, synthetic construct
MKAAIYIRVSTREQVENYSIQAQTEKLTALCRSRDWDVYDIFIDGGYSGGNMNRPALNEMLSKLHEIDAVVVYRLDRLSRSQRDTITLIEEYFLKNNVEFVSLSETLDTSSPFGRAMIGILSVFAQLERETIRDRMVMGKIKRIEAGLPLTTAKGRTFGYDVIDTKLYINEEEARQLQLIYDIFEEEQSITFLQKRLKKLGFKVRTYNRYNNWLTNDLYCGYVSYKDKVHVRGIHEPIISEEQFYRVQEIFARMGKNPNMNRGSASLLNNLVVCSKCGLGFVHRRKDAMSRDKKYHYRYYSCKTYKHIHELEKCGNKIWRADELEELVINRVNSYSVASRNVDKEDELDSLNEKLKIEHAKKKRLFDLYINGGYEMSELDSVMNDIDAQINYYESQIEANEELKKSKKIQENLAYLAAVDFDSLEFREKQLYLKSLINKIYIDGEQVTIEWL

SEQ ID NO: 4765 - protein, 452 aa, synthetic construct
MKAAIYIRVSTREQVENYSIQAQTEKLTALCRSKDWDVYDIFIDGGYSGSNMNRPALNEMLSKLHEIDAVVVYRLDRLSRSQRDTITLIEEYFLKNNVEFVSLSETLDTSSPFGRAMIGILSVFAQLERETIRDRMVMGKIKRVEAGLPLTTAKGRTFGYDVIDTKLYINEEEAKQLQLIYDIFEEEQSITFLQKRLKKLGFKVRTYSLYNNWLTNDLYCGYVSYKDKVHVKGIHEPIISEEQFYRVQEIFTRMGKSPNMNRDSASLLNNLVVCGKCGLGFVHRRKDTMSRGKKYHYRYYSCKTYKHTHELEKCGNKIWRADKLEELIINRVNNYSLASRNVDKEDELDSLNEKLKIEHAKKKRLFDLYINGSYEVSELDSMMNDIDAQINYYESRIEANEELKKNKKIQVNLADLATVDFDSLEFREKQLYLKSLINKIYIDGEQVTIEWL

SEQ ID NO: 4766 - protein, 452 aa, synthetic construct
MKAAIYIRVSTQEQVGNYSIQAQTEKLTALCRSKDWDVYDIFIDGGYSGSNMNRPALNEMLSKLHEIDAVVVYRLDRLSRSQRDTTTLIEEYFLKNNVEFVSLSETLDTSSPFGRAMIGILSVFAQLERETIRDRMVMGKIKRIEAGLPLTTAKGRTFGYDVIDTKLYINEEEAKQLRLIYDIFEEEQSITFLQKRLKKLGFKVRTYNRYNNWLTNDLYCGYVSYKDKVHVKGIHEPIISEEQFYRVQEIFTRMGKNPNMNRDSASLLNNLVVCSKCGLSFVHRSKDTMSRGKKYHYRYYSCKTYKHTHELEKCGNKTWRADKLEELIINRVNNYSFASRNVDKEDELDSLNEKLKIEHAKKKRLFDLYINGSYEVSELDSMMNDIDAQINYYEGQIEANEELKKNKKIQENLADLATVDFGGLEFREKQLYLKSLINKIYIDGEQVTIEWL

SEQ ID NO: 4767 - protein, 485 aa, synthetic construct
MTKKVAIYTRVSTTSQAEEGFSIDEQIDRLTKYAEAMGWQVSNTYTDAGFSGAKLERPEMQRLINDIENKAFDTVLVYKLDRLSRSVRDTLHLVKDVFTKNKIDFISLNESIDTSSTMGSLFLTILSAINEFERENIKERMTMGKLGRAKSGKSMMWTKTAFGYYHNRKTGILEIVPLQATIVEQIFTDYLSGISLTKLRDKLNESGHIGKDIPWSYRTLRQTLDNPVYCGYIKFKGSLFEGMHKPIIPYETYLKVQKELEKRQQQTYERNNNPRPFQAKYMLSGMARCGYCGAPLRIVLGHKRKDGSRTMKYHCANRFPRKTKGITAYNDNKKCDSGTYDLSNLESTVIGSLIGFQENNDSLLKIINGNNQPTLDTSSIKKQISQIDKKIQKNSDLYLNDFITMDELRDRTDSLQAEKKLLKAKISENKFNDSTDVFEQVKTQLGSIPINELSYDNKKKIVNNLVSKVDVTADGVDIIFKFQLT

SEQ ID NO: 4768 - protein, 452 aa, synthetic construct
MKAAIYIRVSTREQVENYSIQAQTEKLTALCRSKDWDVYDIFIDGGYSGSNMNRPALNEMLSKLHEIDAVVVYRLDRLSRSQRDTITLIEEYFLKNNVEFVSLSETLDTSSPFGRAMIGILSVFAQLERETIRDRMVMGKIKRVEAGLPLTTAKGRTFGYDVIDTKLYINEEEAKQLQLIYDIFEEEQSITFLQKRLKKLGFKVRTYNRYNSWLTNDLYCGYVSYKDKVHVKGIHEPIISEEQFNRVQEIFARMGKNPNMNRDSASLLNNLVVCSKCGLGFVHRRKDTTSRGKKYHYRYYSCKTYKHIHELEKCGNKIWRADELEELIINRVNNYSFASHNVDKEDELDSLNEKLKIEHAKKKRLFDLYINGSYEVSELDSMMNDTVAQINYYESQVEAIGELKKNKKIQESLAGLATVDFDGLEFREKQLYLKSLINKIYIDGEQVTIEWL

SEQ ID NO: 4769 - protein, 469 aa, synthetic construct
MCYTTPVRAAVYLRISEDRSGEQLGVARQREDCLKLCDQRKWVPVEYLDNDVSASTGKRRPAYEQMLADITAGKIAAVVAWDLDRLHRRPIELEAFMCLADEKRLALATVAGDVDLATPQGRLVARLKGSVAAHETEHKKARQRRAARQKAERGHPNWSRAFGYLPGPDGPEPDPRTAPLVKQAYADILAGASLGDVCRQWNGAGAFTITGRPWTTTTLSKFLRKPRNAGLRAYKGARYGPVDRDAIVGKAQWSPLVDEATFWAAQAVLDAPGRAPGRKSVRRHLLTGLAGCGKCGNHLAGSYRTDGRVVYVCKACHGVAILADNIEPILHHIVAERLAMPGAVDLLRREIHDAAEAETIRLELETLYGELDRLAVERAEGLLTARQVKISTDIVNAKITKLQARQLDQERLRVLDGIPLGTPQAAGMIAELSPDRFRAVLDVLAEVVVQPVGKSGRILNPERVQVNWR

SEQ ID NO: 4770 - protein, 452 aa, synthetic construct
MKAAIYIRVSTREQVENYSIQAQTEKLTALCRSKDWDVYDIFIDGGYSGSNMNRPALNEMLSKLHEIDAVVVYRLDRLSRSQRDTITLIEEYFLKNNVEFVSLSETLDTSSPFGRAMIGILSVFAQLERETIRDRMVMGKIKRIEAGLPLTTAKGRTFGYDVIDTKLYINEEEAKQLRLIYDIFEEEQSITFLQKRLKKLGFKVRTYNRYNNWLTNDLYCGYVSYKDKVHVKGIHEPIISEEQFYRVQEIFTRMGKNPNMNRDSASLLNNLVVCSKCGLGFVHRRKDAMSRSKKYHYRYYSCKTYKHIHELEKCGNKIWRADELEELVINRVNNYSLASRNVDKEDELDSLNEKLKAEHAKKKRLFDLYINGSYEVSELDSMMNDIDAQINYYESQIEANEELKKNKKIQDNLAELATVDFDSLEFREKQRYLKSLINRIYIDGEQVTIEWL

SEQ ID NO: 4771 - protein, 485 aa, synthetic construct
MTKKVAIYTRVSTTNQAEDGFSIDEQVDRLTKYAEAMGWQVSDTYTDAGFSGAKLERPAMQRLINDIENKAFDTVLVYKLDRLSRSVRDTLYLVKDVFTKNKIDFISLNESIDTSSAMGSLFLTILSAINEFERENIRERMTMGKLGRARSGKSMMWTKTAFGYYHNRKTGILEVVPLQATIVEQIFTDYLSGISLTKLRDKLNESGHIGKDIPWSYRTLRQTLDNPVYCGYIKFKDSLFEGMHKPIIPYETYLKVQKELEERQQQTYERNNNPRPFQAKYMLSGMARCGYCGAPLKIVLGHKRKDGSRTMKYHCANRFPRKTKGVTVYNDNKKCDSGTYDLSNLENTVIDNLIGFQENNDSLLKIINGNNQPILDAGSFKKQISQIDKKIQKNSDLYLNDFITMDELKERTDSLQAEKKLLKAKISENKFNDSTDVFELVKTQLGSIPINELSYDNKKKIVNNLVSKVDVTADNVDIIFKFQLA

SEQ ID NO: 4772 - protein, 452 aa, synthetic construct
MKAAIYIRVSTREQVENYSIQAQTEKLTALCRSKDWDVYDIFIDGGYSGSNMNRPALIEMLSKLHEIDAVVVYRLDRLSRSQRDTITLIEEYFLKNNVEFVSLSETLDTSSPFGRAMIGILSVFAQLERETIRDRMVMGKIKRIEAGLPPTTAKGRTFGYDVIDTKLYINEEEAKQLQLIYDIFEEEQSITFLQKRLKKLGFKVRTYNRYSNWLTNDLYCGYVSYKDKVHVKGIHEPIISEEQFYRVQEIFTRMGKNPNMNRDSASLLNNLVVCSKCGLGFVHRRKDAMSRDKKYHYRYYSCKTYKHIHELEKCGNKIWRADKLEALIINRVNNYSLASRNVDKEDELDSLNEKLKIEHAKKKRLFDLYINGSYEVSELDSMMNDIDAQINYYESQIEANEELRKSKKIQENLANLATVDFDSLEFREKQLYLKSLISKIYIDGEQVTIEWL

SEQ ID NO: 4773 - protein, 469 aa, synthetic construct
MCYTTPVRAAVYLRISEDRSGEQLGVARQREDCLKLCDQRKWAPVEYLDNDVSASTDKRRPAYEQMLADITAGKIAAVVAWDLDRLHRRPIELEVFMSLADEKRLALATVAGDIDLATPQGRLVARLKGSVAAHETEHKKARQRRAARQKAERGHPNWSKAFGYLPGPNGPEPDPRTAPLVKQAYADILAGASLGEVCRRWNDAGAFTITGRPWTTTTLSKFLRKPRNAGLRAYKGARYGPVDRDAIVGKAQWSPLVDEATFWAAQAVLDAPGRAPGRKSVRRHLLTGLAGCGKCGNHLAGSYRTDGRVVYVCKACHGVAILADNIVPILYHIVAERLAMPNAVDLLRREIHDAAEAEAIRLELETLYGELDRLAIERAEGLLTARQVKISTDIVNTKIAKLQARQLDQERLRVLDGIPLGTPQVAGMIAELSPDRFRAVLDVLAEVVVQSVGKSGRISNPERVQVNWR

SEQ ID NO: 4774 - protein, 452 aa, synthetic construct
MKAAIYIRVSTREQVENYSIQAQTEKLTALCRSKDWDVYDIFIDGGYSGSNMNRPALNEMLSRLHEIDAVVVYRLDRLSRSQRDTITLIEEYFLKNNVEFVSLSETLDTSSPFGRAMIGILSVFAQLERETIRDRMVMGKIKRIEAGLPLTTAKGRTFGYDVIDTRLYINEEEAKQLQLIYDIFEEEQSITFLQKRLKKLGLKVHTYSRYNSWLTNDLYCGYVSYKDKVHVKGIHEPIISEEQFYRVQEIFTRMGKNPNMNRDSASLLNNLVVCSKCGLGFVHRRKDTMSRGKKYRYRYYSCKTYKHIHELEKCGNKIWRADKLEELIINRVNNYSFASRSVDKEDELDSLYEKLKIEHAKKKRLFDLYTNGSYNVSELDSMMNDIDAQINYYESQIEANEELKKNRKIQENLADLATVDFDSLEFREKQLYLKSLINKIYIDGEQVTIEWL

SEQ ID NO: 4775 - protein, 452 aa, synthetic construct
MKAAIYIRVSTREQVENYSIQAQTEKLTALCRSKDWDVYDIFIDGGYSGSNMNRPALNEMLSKLHEIDAVVVYRLDRLSRSQRDTITLIEEYFLKNNVEFVSLSETLDTSSPFGRAMIGILSVFAQLERETIRDRMVMGKIKRIEAGLPLTTAKGRTFGYDVIDTKLYINEEEAKQLQLIYDIFEEEQSITFLQKRLKKLGFKVHTYNRYNNWLTNDLYCGYVSYKDKVHVKGIHEPIISEEQFYRVQEIFTRMGKNPNMNRDSASLLNNLVVCGKCGLGFVHRRKDAMSRDKKYHYRYYSCKTYKHIHELEKCGNKIWRADKLEELIINRVNNYSFASRNADKEDELDSLNEKLKIEHAKKKRLFDLYINGRYEVSELDCMMNDIDAQINYYESQIEANGELKKNKKIQENLAYLATVDFDSLEFREKQLYLKSLINKIYIDGEQVTIEWL

SEQ ID NO: 4776 - protein, 485 aa, synthetic construct
MTKKVAIYTRVSTTNQAEEGFSIDEQIGRLTKCAEAMGWQVSDTYTDAGFSGAKLERPAMQRLINDIENKAFDTVLVYKLDRLSRSVRDTLYLVKDVFTKNKIDFISLSESINTSSAMGSLFLTILSAINEFERENIKERMTMGKLGRAKSGKSMMWTKTAFGYYHNRKTGILEIVPLQAAIVEQIFTDYLSGISLTKLRDKLNESGHIGKDIPWSYRTLRQTLDNPVYCGYIKFKDSLFEGMHKPIIPYETYLKVQKELEERQQQTYERNNNPRPFQAKYMLSGMARCGYCGAPLRIVLGHKRKDGSRTMKYHCANRFPRKTKGVTVYNDNRKCDSGTYDLSNLENTVIDNLIGFQENNDSLLKIINGDNQPILDTSSFKEQISQIDKKIQKNSDLYLNDFITMDELKDRTDSLQAEKKLLKAKISENKFNNSTDVFELVKTQLGSIPINELSYDNKKKIVNNLVSKVDVTADSVDIIFKFQLA

SEQ ID NO: 4777 - protein, 452 aa, synthetic construct
MKAAIYIRVSTQEQVENYSIQAQTEKLTALCRSKDWDVYGIFIDGGYSGSNMNRPALNEMLSKLHEIDAVVVYRLDRLSRSQRDTITLIEEYFLKNNVEFVSLSETLDTSSPFGRAMIGILSVFAQLERETIRDRMVMGKIKRVEAGLPLTTAKGRTFGYDVIDTKLHINEEEAKQLQLIYDIFEEEQSITLLQKRLKKLGLKVRTYNRYNNWLTNDLYCGYVSYKDKVHVKGIHEPIISEEQFYRVQEIFTRMGKNPNMNRGSASLLNNLVVCSKCGLGFVHRRKDTVSRGKKYHYRYYSCKTYKHIHELEKCGNKIWRADKLEELIINRVNNYSFASRNVDKEDELDSLNEKLRIEHAKRKRLFDLYINGSYEVSELDSMMNDIDAQINYYEGQIEANKELKKNKKIQENLANLATVDFGSLAFREKQLYLKSLINKIYIDGEQVTIEWL

SEQ ID NO: 4778 - protein, 452 aa, synthetic construct
MKAAIYIRVSTREQVENYSIQAQTEKLTALCRSKDWDVYDIFIDGGYSGSNMNRPALNEMLSKLHEIDAVVVYRLDRLSRSQRDTITLIEEYFLKNNVEFVSLSETLDTSSPFGRAMIGILSVFAQLERETIRDRMVMGKIKRIEAGLPLTTAKGRTFGYDVIDTKLYINEEEAKQLQLIYDIFEEEQSITFLQKRLKELGFKVRTYNCYNNWLTNDLYCGYVSYKDKVHVKGIHEPIISEEQFCRVQEIFARMGKNPNMNRDSASLLNNLVVCGKCGLGFVHRRKDAASRDKKYHYRYYSCKTYKHIHELEKCGNKIWRADKLEELIISRVCNYSFAGRNADKEDELDSLNEKLKIEHAKKRRLFDLYINGSYEVSELDSMMNDIDAQISYYESQIEANEALIKNKKVQENLANLATVDFDSLEFREKQLYLKSLINKIYIDGEQVTIEWL

SEQ ID NO: 4779 - protein, 452 aa, synthetic construct
MKAAIYIRVSTREQVENYSIQAQTEKLTALCRSKGWDVYDIFIDGGYSGSNMNRPALNEMLSKLHEIDAVVVYRLDRLSRSQRDTITLIEEYFLKNNVEFVSLSETLDTCSPFGRAMIGILSVFAQLERETIRDRMVMGKIKRIEAGLPLTTAKGRTFGYDVIDTKLYINEEEAKQLQLIYDIFEEEQSITFLQKRLKKLGFKVRTYNRYNNWLTNDLYCGYVSYKDKVHVKGIHEPIISEEQFYRVQEIFTRMGKNPNMNRDSASLLNNLVVCSKCGLGFVHRRKDAASRDKKYHYRYYSCKTYKHIHELEKCGNKIWRADELEELVINRVNSYSVASRNVDKEDELDSLNEKLKIEHAKKKRLFDLYINGSYEVSELDSMMNDINAQINYYERQIEANEELKKNKKIQENLAYLATVDFDSLEFREKQLYLKSLINKIYIDGEQVTIEWL

SEQ ID NO: 4780 - protein, 485 aa, synthetic construct
MTKKVAIYTRVSTTNQAEEGFSIDEQTDRLTKYAEAMGWQVSDTYTDAGFSGAKLERPAMQRLINDIENKAFDTVLVYKLDRLSRSVRDTLYLVKDVFTKNKIDFVSLNESIDTSSAMGSLFLTILSAINEFERENIKERMTMGKLGRAKSGKSMMWTKTAFGYYHNRKTGILEIVPLQATIVEQIFTDYLSGISLTKLRDKLNESGHIGKDIPWSYRTLRQTLDNPVYCGYIKFKDSLFEGMHKPIIPYETYLKVQKELEERQQQTYERNNNPRPFQAKYMLSGMARCGYCGAPLKIVLGHKRKDGSRTMKYHCANRFPRKIKGVTVYNDNKKCDSGTYDLSDLENTVIDNLIGFQGNNDGLLKIINGNNQPILDTSSFKKQISQIDKKIQKNSDLYLNDFITMDELKERTDSLQAEKKLLKAKISENKFNDSTDVFELVKAQLGSIPINELSYDNKKKIVNNLVSKVDVTADNVVIIFKFQLA

SEQ ID NO: 4781 - protein, 469 aa, synthetic construct
MSYTTPVHAAVYLRISEDRSGEQLGVARQREDCLELCAQRKWVPVEYLDNDVSASTGKRRPAYEQMLADITAGKIAAVVAWDLDRLHRRPIELEAFMSLADEKRLALATVAGDVDLATPQGRLVARLKGSVAAHETEHKKARQRRAARQKAERGHPNWSKAFGYLPGPNGPEPDPRTAPLVKQAYADILAGASLGDVCRQWNGAGAFTITGRPWTTTTLSKFLRKPRNAGLRAYKGARYGPVDRDAIVGKAQWSPLVDEATFWAAQAVLDAPGRAPGRKSVRRHLLTGLAGCGKCGNHLAGSHRTDGRVVYVCKACHGVAILADNIEPILYHIVAERLAMPDAVDLLRREIQDAAEAETIRLELETLHGELDRLAVERAEGLLTARQVKISTDIVNAKITELQARQLDQDRLRVFDGIPLGTPQVAGMIAKLSPDRFRAVLDVLAEVVVQPVGKSGRIFNPERVQVNWR

SEQ ID NO: 4782 - protein, 452 aa, synthetic construct
MKAAIYIRVSTREQVENYSIQAQTEKLTALCRSKDWDVYDIFIDGGYSGSNMNRPALNKMLSKLHEIDAVVVYRLDRLSRSQRDTITLIEEYFLKNNVEFVSLSETLDTSSPFGRAMIGILSVFAQLERETIRDRMVMGKIKRIEAGLPLTTAKGRTFGYDVIDTKLYINEEEAKQLRLIYDIFEEEQSITFLQKRLKELGFKVRTYSCYNNWLANDLYCGYVSYKDKVHVKGIHEPIISEEQFYRVQEIFARMGKNPNMNRDSASLLNNLVVCSKCGLGFVHRRKDAMSRDKKYHYRYYSCKTYKHIHELEKCGNKIWRADKLEELIINRVNNYSLASRNVDKEDELCSLNEKLKIEHAKKKRLFELYINGSYEVSELDSMMSDIDAQISYYESQIAANEELKKNKKIQENLADLATVDFDSLEFREKQLYLKSLINKIYIDGEQVTIEWL

SEQ ID NO: 4783 - protein, 469 aa, synthetic construct
MSYTTPVRAAVYLRISEDRSGEQLGVARQREDCLDLCAQRKWVPVEYLDNDVSASTGKRRPAYEQMLADITAGKIAAVVAWDLDRLHRRPIELEAFMSLADEKRLALATVAGDVDLATPQGRLVARLKGSVAAHETEHKKARQRRAARQKAERGHPNWSKAFGYLPGPNGPEPDPRTAPLVKQAYADILAGASLGDVCRQWNGAGAFTITGRPWTTTALSKFLRKPRNAGLRAYKGARYGPVDRDAIVGKAQWSPLVDEATFWAAQAVLDAPGRAPGRKSVRRHLLTGLAGCGKCGNHLAGSYRTDGRVVYVCKACHGVAILAENIEPILYHIVAERLEMPDAVDLLRREIHDAAEAETIRLELETLYGELDLLAVERAEGLLTARQVKISTDIVNAKITKLQACQLDQERLRVLDGIPLGTPQVAGMIAELSPDRFRAVLDVLAEVVVQPVGKSGRIFNPERVQVNWR

SEQ ID NO: 4784 - protein, 452 aa, synthetic construct
MKAAIYIRVSTREQVENYSIQAQTEKLTALCRSKDWDVYDIFVDGGYSGSNMNRPALNEMLSRLHEIDAVVVYRLDRLSRSQRDTITLIEEYFLKNNVEFVSLSETLDTSSPFGRAMIGILSVFAQLERETIRDRMVMGKIKRIEAGLPLTTAKGRTFGYDVIDTKLYINEEEAKQLQLIYDIFEEEQSITSLQKRLKKLGFKVHTYNRYNNWLTNDLYCGYVSYKDKVHVKGIHEPIISEEQFYRVQEIFTRMGKNPNMNRDSASLLNNLVVCSKCGLGFVHRRKDAMSRDKKYHYRYYSCKTYKHIHELEKCGNKIWRADKLEELIINRVNNYSLASRNVDKEDELDSLNERLKIEHAKKKRLFDLYINGRYEVSELDSMMNDIDAQINYYESQIEANEELKKNKKIQENLVYLATVDFDSLEFREKQLYLKSLINKIYIDGEQVTIEWL

SEQ ID NO: 4785 - protein, 452 aa, synthetic construct
MKAAIYIRVSTREQVENYSIQAQTEKLTALCRSKDWDVYDIFIDGGYSGSNMNRPALNEMLSKLHEIDAVVVYRLDRLSRSQRDTITLIEEYFLKNNVEFVSLSETLDTSSPFGRAMIGILSVFAQLERETIRDRMVMGKIKRIEAGLPLTTAKGRTFGYDVIDTKLYINEEEARQLQLIYDIFEEEQSITFLQKRLKKLGFKVRTYSRYNNWLTNDLYCGYVSYKDKVHVKGIHEPIISEEQFYRVQEIFARMGKSPNMNRESASLLNNLVVCSKCGLGFVHRRKDAKSRDKKYHYRYYSCKTYKHIHELEKCGNKIWRADKLEELIINRVSSYSIASRNADKEDELDSLNEKLKIEHAKEKRLFDLYINGSYEVSELDGLMNDIDAQINYYESQIEANEELKKNKKIQENLAYLATVDFDSLEFREKQLYLRSLISKIYIDGEQVTIEWL

SEQ ID NO: 4786 - protein, 469 aa, synthetic construct
MSYTTPVRAAVYLRISEDRSGEQLGVARQREDCLKLCDQRKWEPVEYLDNDVSASTGKRRPAYEQMLADITAGKIAAVVAWDLDRLHRRPIELEAFMSLADEKRLALATVAGDVDLATPQGRLVARLKGSVAAHETEHKKARQRRAARQKAERGHPNWSKAFGYLPGPSGPEPDPRTAPLVKQAYADILAGASLGDVCRRWNGAGAFTITGRPWTTTTLSKFLRKPRNAGLRAYKGARYGPVDRDAIVGKARWSPLVDEATFWAAQAVLDAPGRAPGRKSVRRHLLTGLAGCGKCGNHLAGSCRTDGRVVYVCKACHGVAILADNIEPILYRIVAERLGMPDALDLLRREIHDAAEAETIRLELETLYGELDRLAVERAEGLLTARQVKISTDIVNAKIAKLQAHQLDQERLRVLDGIPLGTPQVAGMIAELSPDRFRAVLDVLAEVVVQPVGKSGRIFNPERVQVNWR

SEQ ID NO: 4787 - protein, 485 aa, synthetic construct
MTKKVAIYTRVSTTNQAEEGFSIDEQIDRLTKYAEAMGWQVSDTYTDAGLSGAKLERPAMQRLINDIENKAFDTVLVYKLDRLSRSVRDTLYLVKDVFTKNKIDFISLNECIDTSSAMGSLFLTILSAINEFERENIKERMTMGKLGRAKSGKSMMWAKTAFGYYHNRETGILEIVPLQATIVEQIFTDYLSGISLTKLRDKLNECGHIGKDIPWSYRTLRQTLDNPVYCGYIKFKGSLFEGMHKPIIPYETYLKVQKELEERQQQTYERNNNPRPFQAKYMLSGMARCGYCGAPLRIVLGHKRKDGSRTMKYHCANRFPRKTRGVTVYNDNKKCDSGTYDLSNLENTVIDNLIGLQENNDSLLKIINGNNQPILDTSSFKKQISQIDKKIQKNSDLYLNDFITMDELKERTDSLQAEKKLLEAKISENKSNDSTDVFELVKTQLGSIPINELSYDNKKRIVNNLVSKVDVTADNVDIIFKFQLA

SEQ ID NO: 4788 - protein, 452 aa, synthetic construct
MKAAIYIRVSTREQVENYSIQAQTEKLTALCRSKDWDVYDIFIDGGYSGSNMNRPALNEMLSKLHEIDVVVVYRLDRLSRSQRDTITLIEEYFLKNNVEFVSLSETLDTSSPFGRAMIGILSVFAQLERETIRDRMVMGKIKRIEAGLPLTTAKGRTFGYDVIDTKLYINEEEAKQLQLIYDIFEEEQSITFLQKRLKKLGFKVRTYSRYYGWLTNDLYCGYVSYKDKVHVKGIHEPIISEEQFYRVQEIFTRMGKSPNMNRDSASLLNNLVVCSKCGLGFVHRRKDTMSRGKKYHYRYYSCKTYKHIHELEKCGNKIWRADKLEELIINRVNNYSLASRNVDKEDELDSLNEKLEIEHAKKKRLFGLYINGSYEVSELDSMMNDIDAQINYYESQIVANEELKRNKKIQENLVDLATVDFDSLGFREKQLYLKSLINKIYIDGEQVTIEWL

SEQ ID NO: 4789 - protein, 452 aa, synthetic construct
MKAAIYIRVSTREQVENYSIQAQTEKLTALCRSKDWEVYDIYIDGGYSGSNMNRPALNEMLSKLHEIDAVVVYRLDRLSRSQRDTITLIEEYFLKNNVEFVSLSETLDTSSPFGRAMIGILSVFAQLERETIRDRMVMGKIKRIEAGLPLTTAKGRTFGYDVIDTKLYINEEEAKQLQLIYDIFEEEQSITFLQKRLKKLGFKVRTYNRYSNWLTNDLYCGYVSYKDKVHVKGIHEPIISEEQFYRVQEIFTRMGKNPNMNRDSASLLSNLVVCSKCGLSFVHRRKDTMSRGKKYHYRYYSCRTYKHTHELEKCGNKIWRADKLEELIISRVNNYSFACRNVDKEDELDSLNEKLKIEHAKKKRLFDLYINGSYEVSELDSMMSDIEAQINYYESQIEANEELKKSKKIQENLANLATVDYDSLEFREKQLYLKSLINKIYIDGEQVTIEWL

SEQ ID NO: 4790 - protein, 485 aa, synthetic construct
MTKKVAIYTRVSTTSQAEEGFSIDEQIDRLTKYAEVMGWQVSDTYTDAGFSGAKLERPAMQRLINDIENKAFDTVLVYKLDRLSRSVRDTLYLVKDVFTKNRIDFISLNESIDTSSAMGSLFLAILSAINEFERENIKERMTMGKLGRAKSGKSMMWTKTAFGYYHNRKTGILEIVPLQATIVEQIFTDYLSGISLTRLRDKLNESGHIGKDIPWSYRTLRQTLDNPVYCGYIKFKDSLYEGMHKPIIPHETYLKVQKELEERQQQTYERNNNPRPFQAKYMLSGMARCGYCGAPLRIVLGHKRKDGSRTMKYHCANRFPRKTKGTTVYNDNKKCDSGTYDLSNLENTVIDNLIGLQENNDSLLKIINDHNQPILDTSSLKKQISQIDKEIQKNSDLYLNDFITMDELKVRTDSLQAEKKLLRAKISENKFNDSTEVFELVKTQLGSVPINELSYDSKKKIVNNLVSKVDVTADSVDIIFKFQLA

SEQ ID NO: 4791 - protein, 469 aa, synthetic construct
MSYTTPVRAAVYLRISEDRSGEQLGVARQREDCLKLCGQRKWVPVEYLDNDVSASTGKRRPAYEQMLADITAGKITAVVAWDLDRLHRRPIELEAFMSLADEKRLALATVAGDVDLATPQGRLVARLKGSVAAHETEHKKARQRRAARQKAERGHPNWSKAFGYLPGPNGPEPDPRTAPLVKQAYADILAGASLGDVCRRWNDAGAFTITGRPWATTTLSKFLRKPRNAGLRAYKGARYGPVDRDAIVGKAQWSPLVDEATFWAAQAVLDAPGRAPGRKSVRRHLLTGLAGCGKCGNHLAGSYRTDGQVVYVCKACHGVAILADNIEPILYHVVTERLAMPDAVDLLRREIHDAAEAETIRLELETLYGELDRLAVERAEGLLTARQVKISTDIVNAKITKLQARQLDQERLRVFDGIPLGTPQVACMIAELSPDRFRAVLDVLAEVVVRPVGKSGRIFNPERVQVNWR

SEQ ID NO: 4792 - protein, 452 aa, synthetic construct
MKAAIYIRVSTREQVENYSIQAQTEKLTALCRSKDWDVYDIFVDGGYSGSNMNRPALNEMLSKLHEIDAVVVYRLDRLSRSQRDTITLIEEYFLKNNVEFVSLSETLDTSSPFGRAMIGILSVFAQLERETIRDRMVMGKIKRIEAGLPLTTAKGRTFGYDVIDTKLYINEEEAKQLRLIYDIFEEEQSITFLQKRLKKLGFKVRTYNRYNNWLTNDLYCGYVSYKDKVHVKGIHEPIISEEQFYRVQEIFTRMGKNPNMNRDSASLLNNLVVCSKCGLSFVHRRKDAMGRDKKYHYRYYSCKTYKHIHELEKCGNKVWRADKLEELIINRVNNYSLAGRNVDKEDELDSLNEKLKIEHAKKKRLFELYINGSYEVSELDSMMNDIDAQINYYESQIETNEELRKNKKIQENLAYLATVDFDSLEFREKQLYLKSLINKIYIDGEQVTIEWL

SEQ ID NO: 4793 - protein, 485 aa, synthetic construct
MTKKVAIYTRVSTTNQAEEGFSIDEQIDRLTKYAEAMGWQVSDIYTDAGLSGAKLERPAMQRLINDIENKAFDTVLVYKLDRLSRSVRDTLYLVKDVFTKNKIDFISLNESIDTSSAMGSLFLTILSAINEFERENIKERMTMGKLGRAKSGKSMMWTKTAFGYYHNRKTGILEIVPLQATIVEQIFTDYLSGISLTKLRDKLNESGHIGKDIPWSYRTLRQTLDNPVYCGYIKFKDSLFEGMHKPIIPYETYLKVQEELEERQQQTYERNNNPRPFQAKYMLSGMARCGYCGAPLKIVLGHKRKDGSRTMKYHCANRFPRKTKGITVYNDNRKCDSGTYDLSNLENTVIDNLIGFQENNDSLLKIINGDNQPILDTSGFKKQISQIDKKIQKNSDLYLNDFITMDELKARTDSLQAEKKLLKAKISENKFNGSTDVFELVKTQLGSIPINELSYDNKKKIVNNLVSKVDVTADNVDIIFKFQLA

SEQ ID NO: 4794 - protein, 485 aa, synthetic construct
MTKKVAIYTRVSTTNQAEEGFSIDEQIDRLTKYAEAMGWQVSDTYTDAGLSGAKLERPAMQRLINDIENKAFDTVLVYRLDRLSRSVRDTLYLVKDVFTKNKIDFISLNESIDTSSAMGSLFLTILSAINEFERENIKERMTMGKLGRAKSGKSMMWTKTAFGYYHNRKTGILEIVPLQATIVEQIFTDYLSGISLTKLRDRLNESGHIGKDIPWSYRTLRQTLDNPVYCGYIKFKDSLFEGMHKPIISYETYLKVQKELEERQQQTYERNNNPRPFQAKYMLSGKARCGYCGAPLKIVLGHKRKDGSRTMKYHCANRFPRKTKGITVYNDNKKCNSGTYDLCNLENTVIDNLIGFQENNDSLLKIINGNNQPILDTSSYREQISQIDKKIQKISDLYLNDFITMDELKDRTDSLRAEKKLLKAKISENKFNDSTDMFELVKTQLGSIPINELSYDNKKRIVNNLVSKVDVTADNVDIIFKFQLA

SEQ ID NO: 4795 - protein, 452 aa, synthetic construct
MKAAIYIRVSTQEQVENYSIQAQTEKLTALCRSKDWDVYDIFIDGGYSGSNMNRPALNEMLSKLHEIDAVVVYRLDRLSRSQRDTITLVEEYFLKNNVEFVSLSETLDTSSPFGRAMIGILSVFAQLERETIRDRMVMGKIKRIEAGLPLTTAKGRTFGYDVIDTKLYINEEEAKQLQLIYDIFEEVQSITFLQKRLKKLGFKVRTYNCYNNWLTNDLYCGYVSYKDKVHVKGIHEPIISEEQFYRVQEIFARMGKNPNMNRESASLLNNLVVCSKCGLGFVHRRKDTTSRGKKYHYRYYSCKTYKHTHELEKCGNKIWRADKLEELIINRVSNYSFASRNVDKEVELDSLNEKLKIEHAKKKRLFDLYINGSYEVSELDSMMNDIDAQIDYYESQIEANEELRKNKKIQENLANLATVDYDSLEFREKQLYLRSLINKIYIDGEQVTIEWL

SEQ ID NO: 4796 - protein, 485 aa, synthetic construct
MTRKVAIYTRVSTTNQAEEGFSIDEQVDRLTKYAEAMGWQVSDTYTDAGFSGAKLERPAMQRLINDIENKAFDTVLVYKLDRLSRSVRDTLYLVKDVFTKNRIDFISLNESIDTSSAMGSLFLTILSAINEFERENIKERMTMGKLGRAKSGKSMMWTKTAFGYYHNRKTGILEIVPLQATIVEQIFTDYLSGISLTKLRDKLNESGHIGKDIPWSYRTLRQTLDNPVYCGYIKFKDSLFEGMHKPIIPYETYLRVQEELEERQQQTYERNNNPRPFQAKYMLSGMARCGYCGAPLRIVLGHKRKDGSRTMKYHCANRFPRKTKGVTVYNDNKKCDSGTYDLSNLENTVIDNLIGFQENNDSLLKIINGNNQPILDTSSFKKQISQIDKKIQKNSDLYLNGFITMDELKDRTESLRAEKKLLKAKISENKFNDSTDVFELVKTQLGSIPINELSYDNKKRIVNNLVGKVDVTADNVDIIFKFQLA

SEQ ID NO: 4797 - protein, 452 aa, synthetic construct
MKAAVYIRVSTREQVENYSIQAQTEKLTALCRSKDWDVYDIFIDGGYSGSNMNRPALNEMLSKLHEIDAVVVYRLDRLSRSQRDTITLIEEYFLKNNVEFVSLSETLDTSSPFGRAMIGILSVFAQLERETIRDRMVMGKIKRIEAGLPLTTAKGRTFGYDVIDTKLYINEEEAKQLRLIYDIFEEEQSITFLQKRLKKLGFKVRTYNRYYNWLTNDLYCGYVSYKDKVHVKGIHEPVISEEQFYRVQEIFTRMGKNPNMNRDSASLLNNLVVCGKCGLGFVHRRKDAMSRDKKYHYRYYSCKTYKHIHELEKCGNKIWRADKLEELIINRVNDYSLASRNVDKEDELDSLNEKLKIEHAKKRRLFDLYINGSYEVSELDSMMNDIDAQINYYESQIEANEELKKNKKIQETLADLATVDFDSLEFREKQLYLKSLINKIYIDGEQVTIEWL

SEQ ID NO: 4798 - protein, 452 aa, synthetic construct
MKAAIYIRVSTREQVENYSIQAQTEKLTALCRSKDWDVYDIFIDGGYSGNNMNRPALNEMLSKLHEIDAVVVYRLDRLSRSQRDTITLVEEYFLKNNVEFVSLSETLDTSSPFGRAMIGILSVFAQLERETIRDRMVMGKIKRIEAGLPLTTAKGRTFGYDVIDTKLYINEEEAKQLQLIYDIFEEEQSITSLQKRLKKLGFKVHTYNRYNNWLTNDLYCGYVSYKDRVHVKGIHEPIISEEQFYRVQEIFTRMGKNPNMNRDSASLLNGLVVCSKCGLGFVHRRKDTTSRGKKYHYRYYSCKTYKHIHELEKCGNKIWRADKLEELIINRVNNYSFASRNVDKEDGLDSLNEKLKIERAKKKRLFDLYINGSYEVSELDSMMNDIDAQINYYEGQIEVNEELKKNKKIQENLANLATVDYDSLEFREKQLYLKSLVNKIYIDGEQVTIEWL

SEQ ID NO: 4799 - protein, 469 aa, synthetic construct
MCYTTPVRAAVYLRISEDRSGEQLGVARQREDCLKLCDQRKWVPVEYLDNDVSASTGKRRPAYEQMLADITAGKIAAVVAWDLDRLHRRPIELEAFMSLADEKRLALATVAGDVDLATPQGRLVARLKGSVAAHETEHKKARQRRAARQKAERGLPNWSKAFGYLPGPNGPEPDPRTAPLVKQAYEDILAGASLGDVCRRWNDAGAFTITGRPWTTTTLSKFLRKPRNAGLRAYKGARYGPADRDAIVGKAQWSPLVDEATFWAAQAVLDAPGRAPGRKSVRRHLLTGLAGCGKCGNHLAGSYRTDGRVVYVCKACHGVAILADNIEPILYHIVAERLAMPDAVDLLRREIHDAAEAETIRLELETLYGELDRLAVERAEGLLTARQVKISTDIVNAKITKLQGCQLDQERLRVFDGIPLGTPQVAGVITELSPDRFRAVLDVLMEVVVQPVGKNGRVFNPERVQVNWR

SEQ ID NO: 4800 - protein, 486 aa, synthetic construct
MTKKVVIYTRVSTTNQAEEGFSIDEQIDRLTKYAEAMGWQVSDTYTDAGFSGAKLERPAMQRLINDIENKAFDTVLVYKLDRLSRSVRDTLYLVKDVFTKNKIDFISLNESIDTSSAMGSLFLTILSAINEFERENIKERMTMGKLGRAKSGKSMMWTKTAFGYYHNRKTGILEIVPLQATIVEQIFTDYLSGISLTKLRDKLNESGHIGKDIPWSYRALRQTLDNPVYCGYIKFKDSLFEGMHKPIIPYETYLKVQKELEERQQQTYERNNNPRPFQAKYMLSGMARCGYCGAPLRIVLGHKRKDGSRTMKYHCANRFPRKTKGVTVYNDNKKCDSGTYDLSSLENTVIDSLIGFQEDNDSLLKIINGNNQPILDTSSFKKQISQIDKKIQKNSDLYLNDLITMDELKDRTDSLQAEKKLLKAKISENKFNDSADVFELVKTQLGSIPINELSYDNKKKIVNNLVSKVDVTADNVDIIFKFQLAQ

SEQ ID NO: 4801 - protein, 485 aa, synthetic construct
MTKKVAIYTRVSTTNQAEEGFSIDEQIDRLTKYAEAMGWQVSDTYTDAGFSGAKLERPAMQRLINDIENKAFDTVLVYKLDRLSRSVRDTLYLVKDVFTKNKIDFISLNECIDTSSAMGSLFLTILSAINEFERENIKERMTMGKLGRAKSGKSMMWTKTAFGYYHNRKTGILEIVPLQATIVEQIFTDYLSGISLTKLRDKLNKSGHIGKDIPWSYRTLRQTLDNPVYCGYIKFKDSLFEGLHKPIIPYETYLKVQKELEERQQQTCERNNNPRPFQAKYMLSGMARCGYCGAPLRIVLGRKRKDGSRTMKYHCANRFPRKTKGVTVYNDNKKCDSGTYDLSNLENAVIDNLIGFQENNDSLLKIINGNNQPILDTSSLKEQISQIDKKIQKNSDLYLNDFITMDELKDRTDSLQAEKKLLKAKISENKFSDSADVFELVKTQLGSIPINELSYDNKKKIVNDLVSKVDVTADNVDIIFKFQLA

SEQ ID NO: 4802 - protein, 452 aa, synthetic construct
MKAAIYIRVSTQEQVGNYSIQAQTEKLTALCRSKDWDVYDIFVDGGYSGSNMNRPALNEMLSKLHEIDAVVVYRLDRLSRSQRDTTTLIEEYFLKNNVEFVSLSETLDTSSPFGRAMIGILSVFAQLERETIRDRMVMGKIKRIEAGLPLTTAKGRTFGYDVIDTKLYINEGEAKQLRLIYDIFEEEQSITSLQKRLKKLGFKVRTYNRYNSWLTNDLYCGYVSYKDKVHVKGIHEPIISEEQFHRVQEIFTRMGKNPNMNRDSASLLNNLVVCSKCGLGFVHRSKDTMCRGKKYHYRYYSCKAYKHTHELEKCGNKTWRADKLEELIINRVNNYSFASRNADKEDELDSLNEKLKIEHARKKRLFDLYINGSYEVSELDSMMNDIDAQINYYESQIEANEELKKNKKIQENLADLATVDFDSLEFREKQLYLKSLINKIYIDGEQVTIEWL

SEQ ID NO: 4803 - protein, 485 aa, synthetic construct
MNKKVAIYTRVSTTNQAEEGFSIDEQIDRLTKYAEAMGWQVSDTYTDAGLSGAKLERPAMQRLINDIENKAFDTVLVYKLDRLSRSVRDTLYLVKDVFTKNKIDFISLNESIDTSSAMGSLFLTILSAINEFERENIKERMTMGKLGRAKSGKSMMWAKTAFGYYHNRKTGILEIVPLQATIVEQIFTDYLSGISLTKLRDKLNESGHIGKDIPWSYRTLRQTLDNPVYCGYIKFKDSLFEGMHKPIIPYETYLKVQRELEERQQQAYERNNNPRPFQAKYMLSGMARCGYCGAPLKIVLGHKRKDGSRTMKYHCANRFPRKTKGVTVYNDNKKCDSGTYDLSNLENTVIDSLIGFQENNDSLLKIINGNNQPILDTSSFREQISQIDKKIQKNSDLYLNDFITMDELKDRTDSLQAEKKLLKAKISESKFNDSTDVFELVKTQLGSVPINELSYDNKKKIVDNLVSKVDVTADNVDIIFKFQLA

SEQ ID NO: 4804 - protein, 452 aa, synthetic construct
MKAAIYIRVSTREQVENYSIQAQTEKLTALCRSKDWDVYDIFIDGGYSGSNMNRPALNEMLSKLHEIDAVVVYRLDRLSRSQRDTITLIEEYFLKNNVEFVSLSETLDTSSPFGRAMIGILSVFAQLERETIRDRMVMGKIKRIEAGLPLTTAKGRTFGYDVIDTKLYINEEEARQLQLIYDIFEEEQSITLLQKRLKKLGFKVRTYNRYNSWLTNDLYCGYVSYKDKVHVKGIHEPIISEEQFYRVQEIFTRMSKSPNMNRDSASLLNNLVVCCKCGLGFVHRRKDVTSRGKKYHYRYYSCKTYKHIHELEKCGNKIWRADELEELVINRVNSYSVASRNVDKEDELDSLNEKLKIEHVKKKRLFDLYINGSYEVSELDSMMNDINAQISYYESQIEANEGLKKNKKIQENLAHLATMDFDSLEFREKQLYLKSLINKIYIDGEQVTIEWL

SEQ ID NO: 4805 - protein, 452 aa, synthetic construct
MKAAIYIRVSTQEQVGNYSIQAQTEKLTALCRSKDWDVYDIFIDGGYSGSNMNRPALNEMLSKLHEIDAVVVYRLDRLSRSQRDTTTLIEEYFLKNNVEFVSLSETLDTSSPFGRAMIGILSVFAQLERETIRDRMVMGKIKRIEAGLPLTTAKGRTFGYDVVDTKLYINEGEAKQLQLIYDIFEEEQSITSLQKRLKKLGFKVRTYNRYNSWLTNDLYCGYVSYKDKVRVKGIHEPIISEEQFYRVQEIFTRMGKNPNMNRDSASLLNSLVVCSKCGLSFVHRSKDTMSRGKKYHYRYYSCKTYKHTHELEKCGNKTWRADKLEELIINRVNNYSFASRNADKEGELDSLNEKLKIEHAKKRRLFDLYINGGYEASELDSMMNDIDAQINYYESQIEANEEQKKNKKIQENLADLATVDFGSLEFREKQLYLKSLINKIYIDGEQVTIEWL

SEQ ID NO: 4806 - protein, 452 aa, synthetic construct
MKAAIYIRVSTREQVENYSIQAQTEKLTALCRSKDWDVYDIFIDGGYSGSNMNRPALNEMLSKLREIDAVVVYRLDRLSRSQRDTITLIEEYFLKNNVEFVSLSETLDTSSPFGRAMIGILSVFAQLERETIRDRMVMGKIKRIEAGLPLTTAKGRTFGYDVIDTKLYINEGEARQLQLIYDIFEEEQSITFLQKRLKKLGFKVRTYNRYNSWLTNDLYCGYVSYKDKVHVKGIHEPIISEEQFYRVQEIFTRMGKNPNMNRDSASLLNNLVVCGKCGLGFVHRRKDTMSRSKKYHYRYYSCKTYKHTHELEKCGNKIWRADKLEELIINRVNNYSFASRNVDKEDELDSLNEKLKIEHAKKKRLFDLYINGSYGVSELDSMMNDIDAQINYYESQIEANEELKKNKKIQENLANLAAVDFDSLEFREKQLYLKSLINKIYIDGEQVTIEWL

SEQ ID NO: 4807 - protein, 452 aa, synthetic construct
MKAAIYIRVSTREQVENYSIQAQTEKLTALCRSKDWDVYDIFIDGGYSGSSMNRPALNEMLSKLHEIDAVVVYRLDRLSRSQRDTITLIEEYFLKNNVEFVSLSETLDTSSPFGRAMIGILSVFAQLERETIRDRMVMGKIKRIEAGLPLTTAKGRTFGYDVIDTKLYINEEEAKQLQLIYDIFEEEQSITFLQRRLKKLGFKVHTYNRYSNWLTNDLYCGYVSYKDKVHVKGIHEPIISEEQFYRVQEIFTRMGKNPNMNRDSASLLNNLVVCSKCGLGFVHRRKDTKSRGKKYHYRYYSCKTYKHTHELEKCGNKIWRADKLEELIINRVNNYSLASRNVDKEDELDSLNEKLKIEHAKKKRLFDLYINGSYEVSELDSMMNAIDAQINYYESQIEANEGLKKNEKIQENLADLATVDFDSLEFREKQLYLKSLINKIYIDGEQVTIEWL

SEQ ID NO: 4808 - protein, 452 aa, synthetic construct
MKAAIYIRVSTREQVENYSIQAQTEKLTALCRSKDWDVYDIFIDGGYSGSNMNRPALNEMLSKLHEIDAVVVYRLDRLSRSQRDTITLIEEYFLKNNVEFVSLSETLDTSSPFGRAMIGILSVFAQLERETIRDRMVMGKIKRIEAGLPLTTAKGRTFGYDVIDTKLYINEEEAKQLRLIYDIFEEEQSITFLQKRLKKLGFKVHTYNRYNNWLTNDLYCGYVSYKDKVHVRGIHEPIISEEQFYRVQEIFTRMGKNPNMNRGSASLLNNLVVCSKCGLGFVHRRKDAMSRDKKYHYRYYSCKTYKHIHELEKCGNKIWRADKLEELIINRVNNYSVASRNVDKEDELDSLNEKLRIEHAKKKRLFDLYINGSYEVSELDSMMSDIDAQISYYESQIEANEGLKKNKRIQENLAELATVDFDSLEFREKQLYLKSLINKIYIDGEQVTIEWL

SEQ ID NO: 4809 - protein, 452 aa, synthetic construct
MKAAIYIRVSTREQVENYSIQAQTEKLTALCRSKDWDVYDIFIDGGYSGSNMNRPALNEMLSKLHEIDAVVVYRLDRLSRSQRDTITLIEGYFLKNNVEFVSLSETLDTSSPFGRAMIGILSVFAQLERETIRDRMVMGKIKRIEAGLPLTTAKGRTFGYDVIDTKLYINEEEARQLQLIYDIFEEEQSITSLQKRLKKLGLKVRSYNRYNNWLTNDLYCGYVSYKDKVHVKGIHEPIISEEQFYRVQEIFARMGKNPNMNRDSASLLNNLVVCGKCGLGFVHRRKDTMSRDKKYHYRYYSCKTYKHIHELEKCGNKIWRADKLEELIIDRVNNYSFASRNADKEGELDSLNEKLKIEHAKKKRLFDLYINGSYEVSELDSMMNDINAQINYYESQIEANEELKKSKKIQENLADLATVDFDSLEFREKQLYLKSLINKIYIDGEQVTIEWL

SEQ ID NO: 4810 - protein, 452 aa, synthetic construct
MKAAIYIRVSTREQVENYSIQAQTEKLTALCRSKDWDVYDIFVDGGYSGSNMNRPALNEMLGKLHEIDAVVVYRLDRLSRSQRDTITLIEEYFLKNNVEFVSLSETLDTSSPFGRAMIGILSVFAQLERETIRDRMVMGKIKRIEAGLPLTTAKGRTFGYDVIDTKLYINEEEAKQLQLIYDIFEEEQSITFLQKRLKKLGFKVRTYNCYNNWLTNDLYCGYVSYKDKVHVKGIHEPIISEEQFYRVQEIFTRMGKNPNMNRDSASLLNNLVVCSKCGLGFVHRRKDIMSHGKKYHYRYYSCKTYKHIHELEKCGNKTWRADKLEELIIDRVNNYSLASRNVDKEDELDSLNEKLKIEHAKKKRLFDLYINGSYDVSELDSMMNNIDAQINYYESQIEANEELKKNKKIQEDLAHLATVDFDSLEFREKQLYLKSLINKIYIDGEQVTIEWL

SEQ ID NO: 4811 - protein, 485 aa, synthetic construct
MTKKVAIYTRVSTTNQAEEGFSIDEQIDRLTKYAEAMGWQVSDTYTDAGFSGAKLERPAMQRLINDIENKAFDTVLVYKLDRLSRSVRDTLYLVKDVFTKNKIDFISLNESIDTSSAMGSLFLTILSAINEFERENIKERMTMGKLGRAKSGKSMMWTKTAFGYHHNRKTGILEIVPLQAAIVEQIFTDYLSGISLTKLRDKLNESGHIGKDIPWSYRTLRQTLDNPVYCGYIKFKDSLFEGMHKPIIQYETYLKVQKELEERQRQTCGRNNNPRPFQAKYMLSGMARCGYCGAPLRIVLGHKRKDGSRTMKYHCANRFPRKTKGVTVYNDNKKCDSGAYDLSNLENTVIDNLIGFQENNDSLLKIINGNNQPILDTSSFKEQISQIDKKIQKNSDLYLNDFITMDELKDRTDSLRAEKKLLKARISENKFNDSTDVFELVKTQLGSIPINELSYDNKKKIVNNLVSKVDVTADNVDIIFKFQLA

SEQ ID NO: 4812 - protein, 452 aa, synthetic construct
MKAAIYIRVSTREQVENYSIQAQTEKLTALCRSKDWDVYDIFIDGGYSGSNMNRPALNEMLSKLHEIDAVVVYRLDRLSRSQRDTITLIEEYFLKNGVEFVSLSETLDTSSPFGRAMIGILSVFAQLERETIRDRMVMGKIKRIEAGLPLTTAKGRTFGYDVIDTKLYINAGEAKQLQLIYDIFEEEQSITFLQKRLKKLGFKVHTYNRYNNWLTNDLYCGYVSYKDKVHVKGIHEPIISEEQFYRVQEIFTRMGKNPNMNRDSASLLSGLVVCSKCGLGFVHRRKDTMSRGKKYHYRYYSCKTYKHTHELEKCGNKIWRADKLEELIINRVNDYSLASRNVDKEDKLDSLNENLKIEHAKKKRLFDLYINGSYDMSELDSMMNDIDAQINYYESQIEANEELKKNKKIQENLAGLATVDFDSLEFREKQLYLKSLINKIYIDGEQVTIEWL

SEQ ID NO: 4813 - protein, 469 aa, synthetic construct
MCYTTPVRAAVYLRISEDRSGEQLGVARQREDCLKLCDQRKWVPVEYLDNDVSASTGKRRPAYEQMLADITAGKIAAVVAWDLDRLHRRPIELEAFMSLADEKRLALATVAGDVDLATPQGRLVARLKGSVAAHETEHKKARQRRAARQKAERGHPNWSRAFGYLPGPNGPVPDPRTAPLVKQAYAGILAGASLGDVCRRWNDAGAFTITGRPWTTTTLSKFLRKPRNAGLRAYKGARYGPVDRDAIVGKAQWSPLVDEATFWAAQAVLDAPGRAPGRKSVRRHLLTGLAGCGKCGNHLAGSYRTDGRVVYVCKACHGVAILADNIEPILYHIVAERLAMPDAVDLLRREIHDAAEAETIRLELETLYGELDRLAVERAEGLLTARQVKISTDIVNAKITKLQARQLDQERLRVFDGIPLGTPQVAGMIAELSPNRFRAVLDVLAEVVVQPVGKGGRIFNPERVQVNWR

SEQ ID NO: 4814 - protein, 452 aa, synthetic construct
MKAAIYIRVSTREQVENYSIQAQTEKLTALCRSKDWDVYDIFIDGGYSGSNMNRPALNEMLSKLHEIDAVVVYRLDRLSRSQRDTITLIEEYFLKNNVEFVSLSETLDTSSPFGRAMIGILSVFAQLERETIRDRMVMGKIKRIEAGLPLTTAKGRTFGYDVIDTKLYINEEEAKQLQLIYDIFEEEQSITFLQKRLKKLGLKVRSYSRYNNWLTNDLYCGYVSYKDRVHVKGIHEPIISEEQFYRVQEIFTRMGKNPNMNRDSASLLNNLVVCSKCGLGFVHRRKDTMSRGKKYHYRYYSCKTYKHIHELEKCGNKIWRADKLEELVINRVNNYSIVSRNVDREDELGSLNEKLKIEHAKKRRLFDLYINGSYEVSELDSMMNDIDAQINYYESQIEANEELRKNKKIQENLANLATVGYDSLEFREKQLYLKSLINKIYIDGEQVTIEWL

SEQ ID NO: 4815 - protein, 452 aa, synthetic construct
MKAAIYIRVSTREQVENYSIQAQTEKLTALCRSKDWDVYDFFIDGGYSGSNMNRPALNEMLSKLHEIDAVVVYRLDRLSRSQRDTITLIEEYFLKNNVEFVSLSETLDTSSPFGRAMIGILSVFAQLERETIRDRMVMGKIKRIEAGLPLTTAKGRTFGYDVIDTKLYINEEEAKQLQLIYDIFEEEQSITSLQKRLKKLGFKVHTYNRYNNWLTNDLYCGYVSYKDKVHVKGIHEPIISEEQFYRVQEIFTRMGKNPNMNRDSASLLNNLVVCSKCGLGFVHRRKDAMSRDKKYHYRYYSCKTYKHIHELEKCGNKIWRADKLEELVIDRVNSYSLVSRNVDKEDELDSLNEKLKIEHAKKKRLLDLYINGNYEVSELDSMMNDIDAQINYYESQIEANEELKKSKKIQENLANLATVDFDSLEFREKQLYLKSLINKVYIDGEQVTIEWL

SEQ ID NO: 4816 - protein, 452 aa, synthetic construct
MKAAIYIRVSTREQVENYSIQAQTEKLTALCRSKDWDVYDIFIDGGYSGSNMNRPALNEMLSKLHEIDAVVVYRLDRLSRSQRDTITLIEEYFLKNNVEFVSLSETLDTSSPFGRAMIGILSVFAQLERETIRDRMVMGKIKRIEAGLPLTTAEGRTFGYDVIDTKLYINEEEAKQLQLIYDIFEEEQSITLLQKRLKKLGFKVRSYNRYNNWLTNDLYCGYVSYKDKVHVKGIHEPIISEEQFYRVQEIFTRMGKNPNMNRDSASLLSNLVVCSKCGLGFVHRRKDTTSRGKKYHYRYYSCKTYKHIHELEKCGNKIWRADRLEELIINRVNNYGFASRNVDKEDELDSLNEKLKTEHAKKKRLFDLYINGSYEVSELDSMMNDIDARIGYYESQIEANEELKKSKKIQENLADLATVDFDSLEFREKQLYLKSLINKIYIDGEQVTIEWL

SEQ ID NO: 4817 - protein, 469 aa, synthetic construct
MCYTTPVRAAVYLRISEDRSGEQLGVARQREDCLKLCDQRKWVPVEYLDNDVSASTGKRRPAYEQMLADITAGKIAAVVAWDLDRLHRRPIELEAFMSLADEKRLALATVAGDVDLATPQGRLVARLKGSVAAHETEHKRARQRRAARQKAERGYPNWSKAFGYLPGPNGPEPDPRTAPLVKQAYADILAGASLGDVCRQWNAAGAFTITGRPWTTTTLSKFLRKPRNAGLRAYKGARYGPVDRDAIVGKAQWSPLVDEATFWAAQAVLDAPGRAPGRKSVRRHLLTGLAGCGKCGNHLAGSYRTDGRVVYVCKACHGVAILADSIEPILYHIVAERLAMPDAVDLLRREIRDAAEAETIRLELETLYGELDRLAVERAEGLLTARQVKISTDIVNAKITKLRARQLDQERLRVFDGIPLGTPQVAGTIAELSPDRFRAVLDVLAEVVVQPVGKSGRIFSPERVRVNWR

SEQ ID NO: 4818 - protein, 469 aa, synthetic construct
MSYITPVRAAVYLRISEDRSGEQLGVARQREDCLKLCGQRKWEPVEYLDNDVSASTGKRRPAYEQMLADITAGKIAAVVAWDLDRLHRRPIELEAFMSLADEKRLALATVAGDVDLATPQGRLVARLKASVAAHETEHKKARQRRAARQKAERGLPNWSKAFGYLPGPNGPEPDPRTAPLVKQAYADILAGASLGDVCRQWNDAGAFTITGRPWTTTTLSKFLRKPRNAGLRAYKGARYGPVDRDAIVGKAQWSPLVDEATFWAAQAVLDAPGRAPGRKSVRRHLLTGLAGCGKCGNHLAGSYRTDGQVVYVCKACHGVSILAVIIEPILYHVVAERLAMPDAVDLLRREIHDAAEAETIRLKLETLYGELDRLAIERAEGLLTARQVKISTDIVSAKITKLQAHQLDQERLRVFDGIPLGTPQVADAIAELSPDRFRAVLDVLAEVVVQPVGKGGRIFNPERVQVNWR

SEQ ID NO: 4819 - protein, 452 aa, synthetic construct
MKAAIYIRVSTREQVENYSIQAQTEKLTALCRSKDWDVYDIFIDGGYSGSNMNRPALNEMLSKLHEIDAVVVYRLDRLSRSQRDTITLIEEHFLKNNVEFVSLSETLDTSSPFGRAMIGILSVFAQLERETIRDRMVMGKIKRIEAGLPLTTAKGRTFGYDVIDTKLHINEEEAKQLRLIYDIFEEEQSITFLQKRLKKLGFKVRTYNRYNNWLTNDLYCGYVSYKDKVHVKGIHEPIISEEQFYRVQEIFARMGESPNMNRESASLLNNLVVCSKCGLGFVHRRKDAMSRDKKYHYRYYSCKTYKHIHELEKCGNKIWRADKLEELIISRVNSYSLASRNVDKEDGLESLNEKLKIEHAKKKRLFDLYLNGSYEVSELDSMMSDIDAQINYYESQIEANEELTKNRKIQENLAYLATVDFDSLEFREKQLYLKSLINKIYIDGEQVTIEWL

SEQ ID NO: 4820 - protein, 469 aa, synthetic construct
MCYTTPVRAAVYLRISEDRSGEQLGVARQREDCLKLCDQRKWEPVEYLDNDVSASTGKRRPAYEQMLADITAGKIAAVVAWDLDRLHRRPIELEAFMSLADEKRLALATVAGDVDLATPQGRLVARLKGSVAAHETEHKKARQRRAARQKAERGLPNWSKAFGYLPGPNGPELDPRTAPLVKQAYADILAGASLGDVCRQWNDAGAFTITGRPWTTTTLSKFLRKPRNAGLRAYKGARYGPVDRDAIVGKAQWGPLVDEATFWAAQAVLDAPGRAPGRKSVRRHLLTGLAGCGKCGNHLAGSYRTDGRVVYVCKACHGVAILADNIESILYHIVAERLAKPDAVDLLRREIHDVAEAETIRLELEALYGELDRLAVERAEGLLTARQVKISTDIVNAKITELQARQLDQERLRVFDGIPLGTPQVASMIAGLSPDRFRAVLDVLAEVVVQPVGKGGRIFNLERVQVNWR

SEQ ID NO: 4821 - protein, 452 aa, synthetic construct
MKAAIYIRVSTREQVENYSIQAQTEKLTALCRSKDWDVYDIFIDGGYSGSNMNRPALNEMLSKLHEIDAVVVYRLDRLSRSQRDTITLIEEYFLKNNVEFVSLSETLDTSSPFGRAMIGILSVFAQLERETIRDRMVMGKIKRIEAGLPLTTAKGRTFGYDVIDTKLYINEEEAKQLRLIYDIFEEEQSITFLQKRLKKLGFKVRSYNRYNNWLTNDLYCGYVSYKDKVHVKGIHEPIISEEQFYRVQEIFTRMGKNPNVNRDSASLLNNLVVCSKCGLGFVHRRKDTMSRGKKYHYRYYSCKTYKHIHELEKCGNKIWRADKLEELVINRVNNYSSASRNADKEDELDSLNEKLKIEHAKKKRLFDLYINGSYEVSELDSMMSDIGAQISYYESQMEANEELRKNKKIQENLAGLATMDFDSLEFRDKQLYLKSLINKIYIDGEQVTIEWL

SEQ ID NO: 4822 - protein, 452 aa, synthetic construct
MKAAIYIRVSTQEQVENYSIQAQTEKLTALCRSKDWDVYDIFVDGGYSGSNMNRPALNEMLSKLHEIDAVVVYRLDRLSRSQRDTTTLIEEYFLKNNVEFVSLSETLDTSSPFGRAMIGILSVFAQLERETIRDRMVMGKIKRVEAGLPLTTAKGRTFGYDVIDTKLYINEEEAKQLQLIYDIFEEEQSITSLQKRLKKLGFKVRTYNRYNSWLTNDLYCGYVSYKDKVHVKGIHEPIISEEQFYRVQEIFTRMGKNPNMNRDSASLLNNLVVCSKCGLGFVHRSKDTMCRGKKYHYRYYSCKTYKHTHELEKCGNKIWRADKLEELVINRVSNYSFASRNVDKEDELDSLNEKLKIEHAKKKRLFDLYINGSYEVSELDSMMNDIDAQINYYESQIEANEELKRNKEIQENLADLATVDFDSLEFREKQLYLKSLINKIYIDGEQVTIEWL

SEQ ID NO: 4823 - protein, 452 aa, synthetic construct
MKAAIYIRVSTQEQVENYSIQAQTEKLTALCRSKDWDVYDIFIDGGYSGSNMNRPALNEMLSKLHEIDAVVVYRLDRLSRSQRDTITLIEDYFLKNNVEFVSLSETLDTSSPFGRAMIGILSVFAQLERETIRDRMVMGKIKRIEAGLPLTTAKGRTFGYDVVDTKLYINEEEAKQLQLIYDIFEEEQSITSLQKRLKKLGFKVRTYNRYNSWLTNDLYCGYVSYKDKVHVKGIHEPIISEEQFYRVQEIFTRMGKNPNMNRDSASLLNNLVVCSKCGLGFVHRRKDTMSRGKKYHYRYYSCKTYKHTHELEKCGNKIWRADKLEELIIDRVNNYSFASRNVDKEDELDSLNEKLKIEHAKRRRLFDLYINGSYEVSELDSMMNDIDAQINYYGGQIEANEELKRNKKIQEILADLATVDFDSLEFREKQLYLKSLINKIYIDGDQVTIEWL

SEQ ID NO: 4824 - protein, 469 aa, synthetic construct
MSYTTPVRAAVYLRISEDRSGEQLGVSRQREDCLKLCGQRKWVPVEYLDNDVSASTGKRRPAYEQMLADITAGKIAAVVAWDLDRLHRRPVELEAFMSLADEKRLALATVAGDVDLATPQGRLVARLKASVAVHETEHKKARQRRAARQKAERGHPNWSKAFGYLPGPNGPEPDPRTAPLVKQAYAAILAGASLGDVCRQWNDAGAFTITGRPWTTTILSKFLRKPRNAGLRTYKGARYGPVDRDAIVGKAQWSPLVDEATFWAAQAVLDAPGRAPGRKSVRRHLLTGLAGCGKCGNHLAGSYRTDGRVVYVCKACHGVAILADNIEPILYHIVAERLAMPDAVDLLRREIHDAAEAETIRLELETLYDELDRLAVERAEGLLTARQVKISTDIVNAKITKLQARQLDQERLRVFDGVPLGTPQVAGMIAELSPDRFRAVLDVLAEVVVQPVGKSGRIFNPERVQVNWR

SEQ ID NO: 4825 - protein, 452 aa, synthetic construct
MKAAIYIRVSTQEQVENYSIQAQTEKLTALCRSKDWDVYDIFIDGGYSGSNMNRPALNEMLSKLHEIDAVVVYRLDRLSRSQRDTTTLIEEYFLKNNVEFVSLSETLDTSSPFGRAMIGILSVFAQLERETIRDRMVMGKIKRIEAGLPLTTAKGRTFGYDVIDTKLYINEEEAKQLQLIYDIFEEEQSITFLQKRLKKLGFKVRTYNRYNNWLTNDLYCGYVSYKDKVHVKGIHEPIISEEQFYRVQEIFTRMGKNPNMNRGSASLLNNLVVCSKCGLGFVHRSKDTMSRGKKYHYRYYSCKTHKHTHELEKCGNKTWRADKLEELIINRVNNYSFASRNADKVDELDSLNEKLKIEHARKRRLFDLYINGSYEVSELDSMMNDIDAQINYYESQIEANEKLKKNKKIQENLADLATVDFDSLEFREKQQYLKSLINKIYIDGEQVTIEWL

SEQ ID NO: 4826 - protein, 452 aa, synthetic construct
MKAAIYIRVSTREQVENYSIQAQTEKLTALCRSKDWDVYDIFIDGGYSGSNMNRPALNEMLSKLHEIDAVVVYRLDRLSRSQRDTITLIEEYFLKNNVEFVSLSETLDTSSPFGRAMIGILSVFAQLERETIRDRMVMGKIKRIEAGLPLTTAKGRTFGYDVIDTKLYINEEEAKQLQLIYDIFEEEQSITFLQKRLKELGFKVRTYNRYHSWLTNDLYCGYVSYKDKVHVKGIHEPIISEEQFYRVQEIFTRMGKNPNMNRDSASLLNNLVVCSKCGLGFVHRRKDAASRDKKYHYRYYSCKTYKHIHELEKCGNKIWRADKLEELIISRVNNYSLASRNVDKEDKLDSLNEKLKIEHAKKKRLFDLYINGRYEVSELDSMMNDIDAQINYYESQIEANEELKKSKRIQENLADLATVDFDSLEFREKQRYLKSLINKIYIDGEQVTIEWL

SEQ ID NO: 4827 - protein, 452 aa, synthetic construct
MKAAIYIRVSTREQVENYSIQAQTEKLTALCRSKDWDVYDIFIDGGYSGSNMNRPALNEMLSKLHEIDAVVVYRLDRLSRSQRDTITLIEEYFLKNNVEFVSLSETLDTSSPFGRAMIGILSVFAQLERETIRDRMVMGKIKRIEAGLPLTTAKGRTFGYDVIDTRLYINEEEAKQLQLIYDIFEEVQSITFLQKRLKKLGFKVRTYNRYNSWLTNDLYCGYVSYKDKVHVKGIHEPIISEEQFYRVQEIFTRMGRNPNMNRDSASLLNSLVVCSKCGLGFVHRRKDTMSRGKKYHYRYYSCKTYKHIHELEKCGNKIWRADKLEELIINRVNNYSSASRNVDKEDELDSLNEKLKIEHAKKKRLFDLYLNGSYEVSELDSMMSDIDAQINYYESQIEANEELKRSKKIQEDLADLATVDFDSLEFREKQLYLKSLINKIYIDGEQVTIEWL

SEQ ID NO: 4828 - protein, 452 aa, synthetic construct
MKAAIYIRVSTQEQVGNYSIQAQTEKLTALCRSKDWDVYDIFIDGGYSGSNMNRPALNEMLSKLHEIDAVVVYRLDRLSRSQRDTTTLIEEYFLKNNVEFVSLSETLDTSSPFGRAMIGILSVFAQLERETIRDRMVMGKIKRIEAGLPLTTAKGRTFGYDVIDTKLYINEEEAKQLQLIYDIFEEEQSITSLQKRLKKLGFKVRTYNRYNNWLTNDLYCGYVSYKDKVHVKGIHEPIISEEQFYRVQEIFTRMGKNPNMNRDSASLLSNLVVCSKCGLGFVHRSKDTMSRGKKYHYRYYSCKTYKHTHELEKCGNKTWRADKLEELIINRVNNYSFASRDVDKENELDNLNEKLKIEHAKKRRLFDLYINGSYEVSELDSMMNDIDAQINYYESQIEANKELKKNKKIQENLADLATVDFDSLEFREKQLYLKSLINKIYIDGEQVTIEWL

SEQ ID NO: 4829 - protein, 452 aa, synthetic construct
MKAAIYIRVSTQEQVGNYSIQAQTEKLTALCRSKGWDVYDIFIDGGYSGSNMNRPALNEMLSKLHEIDAVVVYRLDRLSRSQRDTTTLIEEYFLKNNVEFVSLSETLDTSSPFGRAMIGILSVFAQLERETIRDRMVMGKIKRIEAGLPLTTAKGRTFGYDVIDTKLYINEEEAKQLQLIYDIFEEEQSITSLQKRLKKLGFKVRTYNRYNNWLTNDLYCGYVSYKDKVHVKGIHEPIISEEQFYRVQEIFTRMGKKPNMNRDSASLLNNLVVCSKCGLGFVHRSKDTMSRGKKYHYRYYSCKTYKHTHELEKCGNKIWRADELEELIINRVNNYSFASRDVGKEDELDSLNEKLKIEHAKRKRLFDLYINGSYEVSELDSMMNDIDAQINYYESQIEANEELKKNKKIQENLADLATVDFDSLGFREKQLYLKSLINKIYIDGEQVTIEWL

SEQ ID NO: 4830 - protein, 452 aa, synthetic construct
MKAAIYIRVSTQEQVENYSIQAQTEKLTALCRSKDWDVYDIFIDGGYSGSNMNRPALNEMLSKLHEIDAVVVYRLDRLSRSQRDTTTLIEEYFLKNNVEFVSLSETLDTSSPFGRAMIGILSVFAQLERETIRDRMVMGKIKRIEAGLPLTTAKGRTFGYDVIDTKLYINEEEAKQLRLIYDIFEEEQSITFLQKRLKKLGFKVRTYNRYNNWLTNDLYCGYVSYKDKVHVKGIHEPIISEEQFHRVQEILTRMGKNPNMNRDSASLLNNLVVCSKCGLGFVHRSKDTMSRGKKYHYRYYSCKTYKHTHELEKCGNKTWRADKLEELIINRVNNYSFASRNVDTEGGLDSLNEKLKIEHAKKRRLFDLYINGSYEVSELDSMMNDIDAQISYYESQIEANEELKKNKKIQENLANLATVDFDSLEFREKQLYLKSLINKIYIDGEQVTIEWL

SEQ ID NO: 4831 - protein, 452 aa, synthetic construct
MKAAIYIRVSTQEQVGNYSIQAQTEKLTALCRSKGWDVYDIFIDGGYSGSNMNRPALNEMLSKLHEIDAVVVYRLDRLSRSQRDTTTLIEEYFLKNNVEFVSLSETLDTSSPFGRAMIGILSVFAQLERETIRDRMVMGKIKRIEAGLPLTTAKGRTFGYDVIDTKLYINEEEAKQLQLIYDIFEEEQSITFLQKRLKKLGFKVRTYNRYNNWLTNDLYCGYVSYKDKVHVKGIHEPIISEEQFYRVQEIFTRMGRNPNMNRDSASLLNNLVVCSKCGLSFVHRRKDTTSRGKKYHYRYYSCKTYKHTHELEKCGNKTWRADKLEELIINRVNNYSFASRNVDKEDELDGLNEKLKIEHAKKKRLFDLYINGSYEVSELDSMMNDIDAQINCYESQIEANEELKKSKKIQENLADLATVDFDSLVFREKQLYLRSLINKIYIDGEQVTIEWL

SEQ ID NO: 4832 - protein, 452 aa, synthetic construct
MKAAIYIRVSTQEQVGNYSIQAQTEKLTALCRSKDWDVYDIFIDGGYSGSNMNRPALNEMLSKLHEIDAVVVYRLDRLSRSQRDTTTLIEEYFLKNNVEFVSMSETLDTSSPFGRAMIGILSVFAQLERETIRDRMVMGKIKRIEAGLPLTTAKGRTFGYDVIDTKLYINEEEAKQLRLIYDIFEEEQSITFLQKRLKKLGFRVRSYNRYNNWLTNDLYCGYVSYKDKVHVKGIHEPIISEEQFYRVQEIFTRMGKNPNMNRDSASLLNNLVVCSKCGLGFVHRRKDTMSGGKKYHYRYYSCKTYKHTHELEKCGNKTWRADKLEELIINRVNNYSFASRNVDKEDELDSLNEKLKIEHAKKRRLFDLYINGSYEVSELDSMMNDIDAQINYYESQIEANEELKKNKEVQENLAGLATVDFDSLEFREKQLYLKSLINKIYIDGEQVTIEWL

SEQ ID NO: 4833 - protein, 452 aa, synthetic construct
MKAAIYIRVSTREQVENYSIQAQTERLTALCRSKDWDVYDIFIDGGYSGSNMNRPALNGMLSKLHEIDAVVVYRLDRLSRSQRDTVTLIEEYFLKNNVEFVSLSETLDTSSPFGRAMIGILSVFAQLERETIRDRMVMGKIKRIEAGLPLTTARGRTFGYDVIDTKLYINEEEAKQLQLIYDIFEEEQSITFLQKRLKELGFKVHTYNRYNNWLTNDLYCGYVSYKDKVHVKGIHEPIISEEQFYRVQDIFTRMGKNPNMNRDSASLLNNLVVCSKCGLGFVHRRKDTVSRGKKYHYRYYSCKTYKHPHELGKCGNKIWRADKLEELIINRVNNYSFASRNMDKEDELDSLNEKLKIEHAKKRRLFDLYINGSYEVSELDGMMNDIDAQINYYESQIEANEGLKKNKKIQENLADLAAVDFDSLEFREKQLYLKSLINKIYIDGEQVTIEWL

SEQ ID NO: 4834 - protein, 485 aa, synthetic construct
MTKKVAIYTRVSTTNQAEEGFSIDEQIDRLTKYAEAMGWQVSDTYTDAGFSGAKLERPAMQRLINDIENKAFDTVLVYKLDRLSRSVRDTLYLVKEVFTKNKIDFISLNESIDTSSAMGSLFLTILSAINEFERENIKERMTMGKLGRAKSGKSMMWTRTAFGYYHNRKTGILEIVPLQATIVEQIFTDYLSGISLTKLRDKLNESGHIGKDIPWSYRTLRQTLDNPVYCGYIKFKGSLFEGMHKPIIPYETYLKVQKELEERQQQTYERNNNPRPFQAKYMLSGMARCGYCGAPLRIVLGHKRKDGSRTMKYHCANRFPRKTKGVTVYNDNKKCDSGTYDLSNLENTVIDILIGFQENNDSLQKIINGSNQPILDTSSFKKQISQIDRKIQKNSDLYLNDFITMDELKDRTDSLQAEKKLLEAKISENKFNDSTDVFGLVRTQLGSIPINELSYENKKKIVNNLVSKVDVTADNVDIIFKFQLA

SEQ ID NO: 4835 - protein, 469 aa, synthetic construct
MSYTTPVRAAVYLRISEDRSGEQLGVARQREDCLKLCDQRKWVPVEYLDNDVSASTGKRRPAYEQMLADITAGKIAAVVAWDLDRLHRRPTELEAFMCLADEKRLALATVAGDVDLATPQGRLVARLKGSVAAHETEHKKARQRRAARQKAERGYPNWSKAFGYLPGPNGPEPDPRTAPLVKQAYADILAGASLGDVCRQWNDAGAFTITGRPWTTTALSKFLRKPRNAGLRAYKGARYGPVDRDAIVGKAQWSPLVDEATFWAAQAVLDAPGRAPGRKSVRRHLLTGLAGCGKCGNHLAGSYRTDGRVVYVCKACHGVAILADNIEPILYHIVAERLAKPGAVDLLRREIHDAAEAETIRLELETLYGELDRLAVERAEGLLTARQVKISTDIVNAKITKLQARQLDQERLRVLDGIPLGTPQVAGMIAELSPDRFRAVLDVLAEVVVQPVGKSGRIFNPERVQVNWR

SEQ ID NO: 4836 - protein, 469 aa, synthetic construct
MCYTTPVRAAVYLRISEDRSGEQLGVARQREDCLKLCGQRKWVPVEYLDNDVSASTGKRRPAYEQMLADITAGKIAAVVAWDLDRLHRRPIELEAFMSLADEKRLALATVAGDVDLATPQGRLVARLKGSVAAHETEHKKARQRRAARQKAERGYPNWSKAFGYLPGPNGPEPDPRTAPLVEQAYADILAGASLGDVCRQWNDAGAFTITGRPWTTTTLSKFLRKPRNAGLRAYKGARYGPVDRDAIVGKAQWSPLVDEATFWATQAVLDAPGRAPGRKSVRRHLLTGLAGCGKCGNHLAGSYRTDGRVAYVCKACHGVAILADNIEPFLYHIVAERLAMPDAVDLLRREIHDAAEAETIRLELETLYGELDRLAVERAEGLLTARQVKISTDIVSAKITRLQARQLDQERLRVFDGIPLGTPQVAGMIAKLSPDRFRAVLDVLAEVVVQPVGKGGRIFNPERVQVNWR

SEQ ID NO: 4837 - protein, 469 aa, synthetic construct
MSYTTPARAAVYLRISEDRSGEQLGVARQREDCLKLCSQRNWVPVEYLDNDVSASTGKHRPAYEQMLADITAGKIAAVVAWDLDRLHRRPIELEAFMSLADERRLALATVAGDVDLATPQGRLVARLKGSVAAHETEHKKARQRRAARQKAERGYPNWSKAFGYLPGPNGPEPDPRTAPLVKQAYADILAGASLGDVCRQWNDAGAYTITGRPWTTTALSKFLRKPRNAGLRAYKGARYGPVDRDAIVGKAQWSPLVDEATFWAAQAVLDAPGRAPGRKSVRRHLLTGLVGCGKCGNHLAGSYRTDGQVVYVCKACHGVAIRADNIEPILYRIVAGRLAMPDAVDLLRREIHDAAEAETIRLELETLCGELDRLAVERAEGLLTARQVKISTDIVNAKITKLQARQLDQERLRVFDGIPLGTPQVAGMIAELSPDRFRAVLDVLAEVVVQPVGKGGRIFNPERVQVSWR

SEQ ID NO: 4838 - protein, 452 aa, synthetic construct
MKAAIYIRVSTREQVENYSIQAQTEKLTALCRSKDWDVYDIFVDGGYSGSNMNRPALNEMLSKLHEIDAVVVYRLDRLSRSQRDTITLIEEYFLKNNVEFVSLSETLDTSSPFGRAMIGILSVFAQLERETIRDRMVMGKIKRIEAGLPLTTAKGRTFGYDVIDTKLYINEEEAKQLQLIYDIFEEEQSITFLQKRLKELGFKVRTYNRYNNWLTNDLYCGYVSYKDKVHVKGIHEPIISEEQFYRVQEIFTRMGKNPNMNRGSASLLNNLVVCGKCGLGFVHRRKDIMSRGKKYHYRYYSCKTYKHIHELEKCGNKIWRADKLEELIINRVNNYSLASRNADKEDGLDSLNEKLRIEHAKRKRLFDLYINGSYDVSELDSMMNDIDAQINYYESQIEANEELKKDKRVQENLAHLATVDFDSLEFREKQRYLKSLINKIYIDGEQVTIEWL

SEQ ID NO: 4839 - protein, 485 aa, synthetic construct
MTKKVAIYTRVSTTNQAEEGFSIDEQIDRLTKYAEAMGWQVSDTYTDAGLSGAKLERPAMQCLINDIENKAFDTVLVYKLDRLSRSVRDTLYLVKDVFTKNKIDFISLNESIDTSSAMGSLFLTILSAINEFERENIKERMTMGKLGRAKSGKSMMWTKTAFGYYHNRKTGILEIVPRQATIVEQIFTDYLSGISLTKLRDKLNESGHIGKDIPWSYRTLRQTLDNPVYCGYIKFKGSLFEGMHKPIIPYETYLKVQKELEKRQQQTYERNNNPRPFQAKYMLSGMARCGYCGAPLRIVLGHKRKDGSRTMKYHCANRFPRKTKGVTVYNDNKKCDSGTYDLSNLENTVIDNLIGFQENNDSLLKIINGNNQPILDTSGFKEQISQIDKKIQKNSDLYLNDLITMDELKDRTDSLQAEKKLLRAKISEYKFNDSADVFELVKTQLGSIPINELSYDNKKKIVNNLVSKVDVTADNVDIIFKFQLA

SEQ ID NO: 4840 - protein, 470 aa, synthetic construct
MSYTTPVRAAVYLRISEDRSGEQLGVARQREDCLKLCDQRKWVPVEYLDNDVSASTGKRRPAYEQMLADITAGKIAAVVAWDLDRLHRRPIELEAFMSLADEKRLALATVAGDVDLATPQGRLVARLKGSVAAHETEHKKARQRRAARQKAERGHPNWSKAFGYLPGPNGPEPDPRTAPLVKQAYADILAGASLGDVCRQWNDAGAFTITGRPWSTTALSKFLRKPRNAGLRAYKGARYGPVDRDAIVGKAQWSPLVDEATFWAAQAVLDAPGRAPGRKSVRRHLLTGLAGCGKCGHHLAGSYRTDGRVVYVCKACYGVAILADNIEPILYHIVAERLAMPDAVDLLRREIHDAAEAETVRLELETLCGELDRLAVERAEGLLTARQVKISTDIVNAKIAKLQARQLDQERLRVLDGIPLGTPQVAGMIAELSPDRFRAVLDVLAEVVVQPVGKSGRIFNPERVQVNWRQ

SEQ ID NO: 4841 - protein, 452 aa, synthetic construct
MKAAIYIRVSTREQVENYSIQAQTEKLTALCRSKDWDVYDIFIDGGYSGSNMNRPALNEMLSKLHEIDAVVVYRLDRLSRSQRDTITLIEEYFLKNNVEFVSLSETLDTSSPFGRAMIGILSVFAQLERETIRDRMVMGKIKRIEAGLPLTTAKGRTFGYDVIDTKLYINEEEAKQLQLIYDIFEEEQSITFLQKRLKELGFKVRTYNRYNNWLTNDLYCGYVSYKDKVRVKGIHEPIISEEQFYRVQEIFTRMGKNPNMNRDSASLLNSLVVCSKCGLGFVHRRKDIKSRGKKYHYRYYSCKTYKHIHELEKCGNKIWRADKLEELIINRVNNYSLASRNVDKEDELDSLNEKLKIEHAKKKRLFDLYINGRYEVSELGSMMNDIDAQINYYECQIEANEELKKNKQIQENLANLATVDFDSLEFREKQRYLKSLINKIYIDGEQVTIEWL

SEQ ID NO: 4842 - protein, 452 aa, synthetic construct
MKAAIYIRVSTQEQVGNYSIQAQTEKLTALCRSKDWDVYDIFIDGGYSGSNMNRPALNEMLSKLHEIDAVVVYRLDRLSRSQRDTTTLIEEYFLKNNVEFVSLSETLDTSSPFGRAMIGILSVFAQLERETIRDRMVMGKIKRIEAGLPLTTAKGRTFGYDVIDTKLYINEEEAKQLQLIYDIFEEEQSITSLQKRLKKLGFKVRTYNRYNNWLTNDLYCGYVSYKDKVHVKGIHEPIISEEQFYRVQEIFTRMGKNPNMNRDSASLLSNLVVCSKCGLSFVHRSKDTMSRGKKYHYRYYSCKTYKHTHELEKCGNKTWRADKLEELIINRVNDYSLASRNVDREDELDSLNEKLQIERAKRKRLFDLYINGGYEVSELDSMMSDIDAQVNYYESQIEAIEGLKKNRKIQENLADLATVDFDSLEFREKQLYLKSLINKIYIDGEQVTIEWL

SEQ ID NO: 4843 - protein, 485 aa, synthetic construct
MTKKVAIYTRVSTTNQAEEGFSIDEQIDRLTKYAEAMGWQVSDTYTDAGFSGAKLERPAMQRLINDIENKTFDTVLVYKLDRLSRSVRDTLYLVKDVFTKNKIDFISLNESIDTSSAMGSLFLTILSAINEFERENIKERMTMGKLGRAKSGKSMMWTKTAFGYYHNRKTGILEIVPLQATIVEQIFTDYLSGISLTKLRDKLNESGHIGKDIPWSYRTLRQTLDNPVYCGYIKFKDSLFEGMHKPIIPYETYLKVQKELEERQQQTYERNNNPRPFQAKYMLSGVARCGYCGAPLRIVLGHKRKDGSRTMKYHCANRFPRKTTGVTVYNDNKKCDSGTYDLSNLESTVIDSLIGFQENNDSLLKIINGNNQPILDTSSFKKQISQIDKKIQKNSDLYLNDFITVDELKDRTVSLQAEKKLLKAKISENRFNDSTDVFELVRAQLGSIPINELSYDNKKKIVNNLVSKVDVTADNVDIIFKFQLA

SEQ ID NO: 4844 - protein, 452 aa, synthetic construct
MRAAIYIRVSTREQVENYSIQAQTEKLTALCRSKDWDVYDIFVDGGYSGSNMNRPALNEMLSKLHEIDAVVVYRLDRLSRSQRDTITLIEEYFLKNNVEFVSLSETLDTSSPFGRAMIGILSVFAQLERETIRDRMVMGKIKRIEAGLPLTTAKGRTFGYDVIDTKLYINEEEAKQLQLIYDIFEEEQSITFLQKRLKELGFKVRTYNCYNNWLTNDLYCGYVSYKDKVHVKGIHEPIISEEQFYRVQEIFTRMGKNPNMNRDSASLLNNLVVCSKCGLGFVHRRKDAMSRDKKYHYRYYSCKTYKHIHELEKCGNKIWRADKLEELIINRVNNYSFASRNADKEDELDSLNEKLKIEHAKKKRLFDLYINGSYEVSELDSMMNDIDAQINYYESQVEASEELRKNKKIQENLADLATVDFDSLEFREKQLYLKSLINKIYIDGEQVTIEWL

SEQ ID NO: 4845 - protein, 452 aa, synthetic construct
MKAAIYIRVSTQEQVGNYSIQAQTEKLTALCRSKGWDVYDIFIDGGYSGSNMNRPALNEMLSKLHEIDAVVVYRLDRLSRSQRDTTTLIEEYFLKNNVEFVSLSETLDTSSPFGRAMIGILSAFAQLERETIRDRMVMGKIKRIEAGLPLTTAKGRTFGYDVIDTKLYINEEEARQLQLIYDIFEEEQSITSLQKRLKKLGFKVRTYNRYNNWLTNDLYCGYVSYKDKVHVKGIHEPIISEEQFYRVQEIFTRMGKNPNMNRDSASLLNNLVVCNKCGLGFVHRSKDTMSRGKKYHYRYYSCKTYKHTHELEKCGNRTWRADKLEELIINRVNDYSFASRNVDKDDELDSLNEKLKIEHAKKKRLFDLYINGSYEVSELDGMMSDIDAQISYYESQIEANEELRKNRRIQENLAGLATVDFDSLEFREKQLYLKSLINKIYIDGEQVTIEWL

SEQ ID NO: 4846 - protein, 452 aa, synthetic construct
MKAAIYIRVSTREQVENYSIQAQTEKLTALCRSKDWDVYDIFIDGGYSGSNMNRPALNEMLSKLHEIDAVVVYRLDRLSRSQRDTITLIEEYFLKNNVEFVSLSETLDTSSPFGRAMIGILSVFAQLERETIRDRMVMGKIKRIEAGLPLTTAKGRTFGYDVIDTKLYINEEEAKQLQLIYDIFEEEQSITFLQKRLKELGFKVRTYNCYNNWLTNDLYCGYVSYKDKVRVKGIHEPIISEEQFYRVQEIFTRMGKNPNMNRDSASLLNNLVVCSKCGLGFVHRRKDAMSRDKKYHYRYYSCKTYKHIHELEKCGNKIWRADKLEELIINRVNSYSLANRNVDKEDELDSLNEKLKIEHAKKKRLFDLYINGNYEGSELDSMMNDIDAQINYYESQIEANEELKKNKKIQENLAYLATVDFDSLEFREKQLYLKSLINKIYIDGEQVTIEWL

SEQ ID NO: 4847 - protein, 452 aa, synthetic construct
MKAAIYIRVSTREQVENYSIQAQTEKLTALCRSKDWDVYDIFIDGGYSGSNMNRPALNEMLSKLHEIDAVVVYRLDRLSRSQRDTITLIEEYFLKNNVEFVSLSETLDTSSPFGRAMIGILSVFAQLERETIRDRMVMGKIKRIEAGLPLTTAKGRTFGYDVIDTKLYINEEEARQLRLIYDIFEEVQSITSLQKRLKKLGFKVHTYNRYNNWLTNDLYCGYVSYKDKVHVKGIHEPIISEEQFYRVQEIFARMGKSPNMNRDSASLLNNLVVCSKCGLGFVHRRKDAMSRDKKYHYRYYSCKTYKHIHELEKCGNKIWRADKLEELIINRVNNYSLASRNVDKEGELDSLNGKLKIEHAKKRRLFDLYIDGSYEVSELDSMMNVIDAQINYYESQIVANEELKKNKKIQENLAELAAVDFDSLEFREKQLYLKSLISKIYIDGEQVTIEWL

SEQ ID NO: 4848 - protein, 452 aa, synthetic construct
MKAAIYIRVSTREQVENYSIQAQTEKLTALCRSKGWDVYDIFIDGGYSGSNMNRPALNEMLSKLHEIDAVVVYRLDRLSRSQRDTITLIEEYFLKNNVEFVSLSETLDTSSPFGRAMIGILSVFAQLERETIRDRMVMGKIKRIEAGLPLTTAKGRTFGYDVIDTKLYINEEEAKQLRLIYDIFEEEQSITFLQKRLKELGFKVRTYNRYNNWLTNDLYCGYVSYKDKVHVKGIHEPIISEEQFYRVQEIFTRMGKNPNMNRDSASLLNNLVVCGKCGLGFVHRRKDIMSRGKKYHYRYYSCKTYKHIHELEKCGNKIWRADKLEELIINRVNDYSVASRNVDKGDELDSLNEKLKIEHAKKRRLFDLYINGSYEVSELNSMMNDIDAQINYYESQIEANEELKKNKKIQENLADLATVDFDSLEFREKQLYLRSLINKIYIDGEQVTIEWL

SEQ ID NO: 4849 - protein, 485 aa, synthetic construct
MTKKVAIYTRVSTTNQAEEGFSIDEQIDRLTKYAEAMGWQVSDTYTDAGFSGAKLERPAMQRLINDIENKAFDTVLVYKLDRLSRSVRDTLYLVKDVFTKNKIDFISLNECIDTSSAMGSLFLTILSAINEFERENIKERMTMGKLGRAKSGKSMMWAKTAFGYYHNRETGILEIVPLQATIVEQIFTDYLSGISLTKLRDKLNGSGHIGKDIPWSYRTLRQTLDNPVYCGYIKFKDSLFEGMHKPIIPYETYLKVQKELEERQQQACERNNNPRPFQAKYMLSGMARCGYCGAPLRIVLGHRRKDGSRTMKYHCANRFPRKTKGVTVYNDNKKCDSGTYDLSNLENTVIDSLIGFQENSDSLLKIINGNNQPILDTSSFKKQISQIDKKIQKNSDLYLNDFITMDELKARTDSLQAEKKLLKAKISENKFNDSADVFELVKTQLGSIPINELSYDNKKKIVNNLVSKVDVTADNVDIIFKFQLA

SEQ ID NO: 4850 - protein, 452 aa, synthetic construct
MKAAIYIRVSTREQVENYSIQAQTEKLTALCRSKDWDVYDIFIDGGYSGSNMNRPALNEMLSKLHEIDAVVVYRLDRLSRSQRDTITLIEEYFLKNNVEFVSLSETLDTSSPFGRAMIGILSVFAQLERETIRDRMVMGKIKRIEAGLPLTTAKGRTFGYDVIDTKLYINEEEAKQLRLIYDIFEEEQSITFLQKRLKKLGFKVRTYNRYNNWLTNDLYCGYVSYKDKVHVKGIHEPIISEEQFNRVQEIFTRMGKNPNMNRDSASLLNNLVVCSKCGLGFVHRRKDATSRDKKYHYRYYSCKTYKHIHELEKCGNKIWRADKLEELIINRVNNYSLANRNMDKGNELDSLNEKLKIEHAKKKRLFDLYISGSYKVSELDSMMNDVDAQINYYESQIEANEELRKNKKIQENLAYLATVDFDSLEFREKQLYLKSLISKIYIDGEQVTIEWL

SEQ ID NO: 4851 - protein, 469 aa, synthetic construct
MSYTTPVRAAVYLRISEDRSGEQLGVARQREDCLELCGRRKWVPVEYLDNDVSASTGKRRPAYEQMLADITAGRIAAVVAWDLDRLHRRPIELEAFMSLADEKRLALATVAGDVDLATPQGRLVARLKGCVAAHETEHKKARQRRAARQKAERGLPNWSKAFGYLPGPNGPEPDPRTAPLVKQAYAGILAGASLGDVCRQWNDAGAFTITGRPWTTAALSKFLRKPRNAGLRAYKGARYGPVDRDAIVGKAQWSPLVDEATFWAAQAVLDAPGRAPGRKSVRRHLLTGLAGCGKCGNHLAGSYRTDGQVVYVCKACHGVSILAVNIVPILYHIVAERLAMPDAADLLCREIHDAAEAETIRLELEALYGELDRLAVERAEGLLTARQVKISTDIVNAKITKLQARQLDQERLRVFDGIPLGTPQVVGMIAELSPDRFRAVLDVLAEVIVQPVGKSGRIFNPGRVQVNWR

SEQ ID NO: 4852 - protein, 452 aa, synthetic construct
MKAAIYIRVSTREQVENYSIQAQTEKLTALCRSKDWDVYDIFIDGGYSGSNMNRPALNEMLSKLHEIDAVVVYRLDRLSRSQRDTITLIEEYFLKNNVEFVSLSETLDTSSPFGRAMIGILSVFAQLERETIRDRMVMGKIKRIEAGLPLTTAKGRTFGYDVIDTKLYINEEEAKQLQLIYDIFEEEQSITFLQKRLKRLGFKVHTYNRYNNWLTNDLYCGYVSYKDKVHVKGIHEPIISEEQFHRVQEIFTRMGKNPNMNRDSASLLNGLVVCSKCGLGFVHRRKDTMSRDKKYHYRYYSCKTYKHIHELEKCGNKIWRADKLEELIINRVNNYSLASRNVDKDDELDSLNERLKMEHAKKKRLFDLYINGGYEVSELDSMMNDIDAQINYYESQIEANEELKKNKKIQENLADLATVDFDSLGFREKQLYLKSLINKIYIDGEQVTIEWL

SEQ ID NO: 4853 - protein, 485 aa, synthetic construct
MTKKVAIYTRVSTTNQAEEGFSIDEQVDRLTKYAEAMGWQVSDTYTDAGLSGAKLDRPAMQRLINDIENKAFDTVLVYKLDRLSRSVRDTLYLVKEVFTKNKIDFISLNESIDTSSAMGSLFLTILSAINEFERENIKERMTMGKLGRAKSGKSMMWTKTAFGYYHNRKTGILEIVPLQATIVEQIFTDYLSGISLTKLRDKLNESGHIGKDIPWSYRTLRQTLDNPVYCGYIKFKDTLFEGMHKPIIPYETFLKVQKELEERQQQTYERNNNPRPFQAKYMLSGMARCGYCGAPLRIVLGHKRKDGSRTMKYHCANRFPRKTKGVTVYNDNKKCDSGTYDLCNLENTVIDNLIGFQENNDSLLKIISGNNQPILDTSSFKKQISQIDKKIQKNSDLYLNDFITMDELKDRTDSLQAEKKLLKAKISESKLNDSTDVFELVKTQLGSIPINELSYDNKKKIVNNLVSKVDVTADNVDIIFKFQLA

SEQ ID NO: 4854 - protein, 452 aa, synthetic construct
MKAAIYIRVSTREQVENYSIQAQTEKLTALCRSKDWDVYDIFTDGGYSGSNMNRPALNEMLSKLHEIDAVVVYRLDRLSRSQRDTITLIEEYFLKNNVEFVSLSETLDTSSPFGRAMIGILSVFAQLERETIRDRMVMGKIKRIEAGLPLTTAKGRTFGYDVIDTKLYINEEEAKQLQLIYDIFEEEQSITFLQKRLKKLGFKVRTYSCYNNWLTNDLYCGYVSYKDKVHVKGIHEPIISEEQFYRVQEIFARVGKNPNMNRDSASLLNNLVVCSKCGLGFVHRRKDAMSRDKKYHYRYYSCKTYKHIHELEKCGNKIWRADKLEELIINRVNSYSLVSRNMDKEDELDSLSEKLKIEHAKKKRLFDLYINGNYEVSELDSMMSDIDAQVNYYESQIEANEELKKNKKIQENLAHLATVDFDSLEFREKQLYLKSLINKIYIDGEQVTIEWL

SEQ ID NO: 4855 - protein, 469 aa, synthetic construct
MSYTTPVRAAVYLRISEDRSGEQLGVARQREDCLELCDQRKWVPVEYLDNDVSASTGKRRPAYEQMLADITAGKIAAVVAWDLDRLHRRPVELEAFMSLADEKRLALATVAGDVDLATPQGRLVARLKGCVAAHETEHKKARQRRAARQKAERGHPNWSKAFGYLPGPNGPEPDPRTAPLVRQAYADILAGASLGDVCRQWNDAGAFTITGRLWTTTTLSKFLRKPRNAGLRAYKGARYGPVDRDAIVGKAQWSPLVDEATFWAAQAVLDAPGRAPGRKSVRRHLLTGLAGCGKCGNHLAGSYRTDGRVVYVCKACHGVAILANNIEPILYHIVAERLAMPDAVDLLHREIHDAAEAETIRLELESLYDELDHLAVERAEGLLTARQVKISTDIVNAKITKLQARQLDQERLRVLDGIPLGTPQVAGMIAELSPDRFRAVLDVLAEVVVQPVGKRGRIFNPERVQVNWR

SEQ ID NO: 4856 - protein, 469 aa, synthetic construct
MCYTTPVRAAVYLRISEDRSGEQLGVARQREDCLKLCDQRKWEPVEYLDNDVSASTGKRRPAYEQMLADITAGKIAAVVAWDLDRLHRRPIELEAFMSLADEKRLALATVAGDVDLATPQGRLVARLKGSVAAHETEHKKARQRRAARQKAERGYPNWSKAFGYLPGPNGPEPDPRTAPLVKQAYADILAGASLGDVCRRWNDAGAFTITGRPWTTTTLSKFLRKPRNAGLRAYKGARYGPVDRDAIVGKAQWSPLVDEATFWAAQAVLDAPGRAPGRKSVRRHLLTGLAGCGKCGNHLAGSYRTDGRVVYVCKACYGVAILADNIEPILYHIVAERLAMPDAVGLLRREIHDAAEAETIRLELETLYGELDRLAVERAEGLLTARQVKISTDIVNAKITKLQACQQDQERLRVLDGIPLGTPQVAGMIAELSPDRFRAVLDVLAEVVVQPVGKSGRIFNPERVQVNWR

SEQ ID NO: 4857 - protein, 452 aa, synthetic construct
MKAAIYIRVSTQEQVGNYSIQAQTEKLTALCRSKDWDVYDIFIDGGYSGSNMNRPALNEMLSKLHEIDAVVVYRLDRLSRSQRDTTTLIEEYFLKNNVEFVSLSETLDTSSPFGRAMIGILSVFAQLERETIRDRMVMGKIKRIESGLPLTTAKGRTFGYDVIDTKLYINEEEAKQLQLIYDIFEEEQSITSLQKRLKKLGFKVRAYNRYNNWLTNDLYCGYVSYKDKVHVKGIHEPIISEEQFYRVQEIFTRMGKNPNMNRDSASLLNNLVVCSKCGLGFVHRSKDTMSRGKKYHYRYYSCKTYKHTHELEKCGNKIWRADKLEELIINRVNNYSFASRNVDKEGELDSLNEKLKIEHAKKRRLFDLYINGSYEVSELDSMMNDIDAQINYYESRIEASEELKKNKKIQENLANLATVDFDSLEFREKQLYLKSLINKIYIDGEQVAIEWL

SEQ ID NO: 4858 - protein, 469 aa, synthetic construct
MSYTTPVRAAVYLRISEDRSGEQLGVARQREDCLKLCGQRKWVPVEYLDNDVSASTGKRRPAYEQMLADITAGKIAAVVAWDLDRLHRRPIELEAFMSLADEKRLALATVAGDVDLATPQGRLVARLKGCVAAHETEHKKARQRRAARQKAERGLPNWSRAFGYLPGPNGPEPDPRTAPLVKQAYADILAGASLGDVCRQWNSAGALTITGRPWTTTTLSKFLRKPRNAGLRAYKGARYGPVDRDAIVGKAQWSPLVDETTFWAAQAVLDAPGRAPSRKSVRRHLLTGLAGCGKCGNHLAGSYRTDGQVVYVCKACHGVAILAVNIEPILYHIVAERLAMPDAVDLLRREVHDAAEAETIRLELEALYGELDRLAVERAEGLLTARQVKISTDIVNAKITKLQARQLDQERLRVLGGIPLGTPQVAGMIAELSPDRFRAVLDVLVEVVVQPVGKGGRISNPERVQVNWR

SEQ ID NO: 4859 - protein, 452 aa, synthetic construct
MKAAIYIRVSTQEQVENYSIQAQTEKLTALCCSKGWDVYDIFIDGGYSGSNMNRPALNEMLSKLHEIDAVVVYRLDRLSRSQRDTTTLIEEYFLKNNVEFVSLSETLDTSSPFGRAMIGILSVFAQLERETIRDRMVMGKIKRIEAGLPLTTAKGRTFGYDVIDTKLYINEEEAKQLQLIYDIFEEEQSITSLQKRLKKLGFKVRTYNRYNSWLTNDLYCGYVSYKDKVHVKGIHEPIISEEQFYRVQEIFTRMGKNPNMNRDSASLLSNLVVCSKCGLGFVHRSKDTMSRGKKYHYRYYSCKTYKHTHELEKCGNKTWRADKLEELIISRVNNYSFASRSVDKEGELDSLNEKLKIEHAKKKRLFDLYINGSYEVSELDSMMNDINAQISYYESQIEANEELKENKKIQENLAELATVDFDSLEFREKQLHLKSLINKIYIDGEQVTIEWL

SEQ ID NO: 4860 - protein, 452 aa, synthetic construct
MKAAIYIRVSTQEQVENYSIQAQTEKLTALCRSKGWDVYDIFIDGGYSGSNMNRPALNEMLSKLHEIDAVVVYRLDRLSRSQRDTTTLIEEYFLKNNVEFVSLSETLDTSSPFGRAMIGILSVFAQLERETIRDRMVMGKIKRIEAGLPLTTAKGRTFGYDVIDTRLYINEEEAKQLQLIYDIFEEEQSITFLQKRLKKLGFKVRTYNRYNNWLTNDLYCGYVSYKDKVHVKGIHEPIISEEQFYRVQEIFTRMGKNPNMNRDSASLLSNLVVCSKCGLGFVHRSKDTMSRGKKYHYRYYSCKTYKHTHELEKCGNKTWRADKLEELIISRVNNYSFASRNADKEDELDSLNEKLKIEHAKKKRLFDLYINGSYEVSELDSMMSDIDAQINYYESQIGAYEELKKTKKIQENLADLATVDFDSLEFRDKQLYLKSLINKIYVDGEQVTIEWL

SEQ ID NO: 4861 - protein, 485 aa, synthetic construct
MTKKVAIYTRVSTTNQAEEGFSIDEQIDRLTKYAEAMGWQVSDTYTDAGFSGAKLERPAMQRLISDIENKAFDTVLVYKLDRLSRSVHDTLYLVKDVFTKNKIDFISLNESINTSSAMGSLFLTILSAINEFERENIKDRMTMGKLGRAKSGKSMMWTKTAFGYYHNRKTGILEIVPLQATIVEQIFTDYLSGISLTKLRDKLNESGHIGKDIPWSYRTLRQTLDNPVYCGYIKFKGSLFKGMHKPIIPYETYLKVQKELEERQQQTYERNNNPRPFQAKYMLSGMARCGYCGAPLRIVLGHKRKDGSRTMKYHCANRFPRKTKGVTVYNGNKKCDSGTYDLSNLENTVIDNLIGFQENNDSLLKIISGNNQPIPDTSSFKKQISQIDKKIQKNSDLYLNDFITMDELKERTDSLQAEKKLLKAKISENKFNDSTDVFELVKTQLGSIPIDELSYDDKKKIVNNLVSKVDVTADNVDIIFKFQLA

SEQ ID NO: 4862 - protein, 452 aa, synthetic construct
MKAAIYIRVSTREQVENYSIQAQTEKLTALCRSKDWDVYDIFIDGGYSGSNMNRPALNEMLSKLHEIDAVVVYRLDRLSRSQRDTITLIEEYFLKNNVEFVSLSETLDTSSPFGRAMIGILSVFAQLERETIRDRMVMGKIKRIEAGLPLTTAKGRTFGYDVIDTRLYINEEEAKQLQLIYDIFEEEQSITFLQKRLKELGFKVRSYNRYNNWLTNDLYCGYVSYKDKVHVKGIHEPIISEEQFYRVQEIFTRMGKNPNMNRDSASLLNNLVVCSKCGLGFVHRRKDAKSRDKRYHYRYYSCKTYKHIHELEKCGNKIWRADKLEELIINRVNDYSFASRNADKEDELDSLNEKLKVEHAKKKRLFDLYVNGSYEVSELDSMMNDIDAQINYYESQIEANKELKRNKKIQENLAYLATVDFDSLEFREKQLYLKSLINKIYIDGEQVTIEWL

SEQ ID NO: 4863 - protein, 452 aa, synthetic construct
MKAAIYIRVSTREQVENYSIQAQTEKLTALCRSKDWDVYDIFIDGGYSGSNMNRPALYEMLSKLHEIDAVVVYRLDRLSRSQRDTITLIEEYFLKNNVEFVSLSETLDTSSPFGRAMIGILSVFAQLERETIRDRMVMGKIKRIEAGLPLTTAKGRTFGYDVIDTKLYINEEEAKQLQLIYDIFEEEQSITFLQKRLKKLGFKVHSYNRYNNWLTNDLYCGYVSYKDKVHVKGVHEPIISEEQFRRVQEIFTRVGKNPNMNRDSASLLNNLVVCSKCGLGFVHRRKDTMSRGKKYHYRYYSCKTYKHTHELEKCGNKIWRADKLEELIINRVNNYSFASRNADKEDELDSLNEKLKVEHAKKKRLFDLYINGSYEVSELDSMMNDIDAQINYYESQIEANEELRKDKKIQENLANQATMDYDSLEFREKQLYLKSLINKIYIDGEQVAIEWL

SEQ ID NO: 4864 - protein, 485 aa, synthetic construct
MTKKVAIYTRVSTTNQAEEGFSIDEQIDRLTKYAEAMGWQVSDTYTDAGLSGAKLERPAMQRLINDIENNAFDTVLVYKLDRLSRSVRDTLYLVKDVFTKNKIDFISLNESIDTSSAMGGLFLTILSAINEFERENIKERMTMGKLGRAKSGKSMMWTKTAFGYYHNRKTGILEIVPLQATIVEQIFTDYLSGISLTKLRDKLNESGHIGKDIPWSYRTLRQTLANPVYCGYIKFKGSLFEGMHKPIIPYETYLKVQKELEERQQQTYVRNNNPRPFQAKYMLSGMARCGYCGAPLRIVLGHKRKDGSRTMKYHCANRFPRKTKGVTVYNDNKKCDSGTYDLSNLENAVIDNLIGFQEDNDSLLKIINGNNQPIPDTSSFEKQISQIDKKIQKNSDLYLNDLITMDELKDRTDSLQAEKKLLKAKISENKFNDSTDVFELVKTQLGSIPINELSYDNKKKIVNNLVSKVDVTADNVDIILKFQLV

SEQ ID NO: 4865 - protein, 452 aa, synthetic construct
MKAAIYIRVSTQEQVENYSIQAQTEKLTALCRSKDWDVYDIFIDGGYSGSNMNRPALNEMLSKLHEIDAVVVYRLDRLSRSQRDTTTLIEEYFLKNNVEFVSLSETLDTSSPFGRAMIGILSVFAQLERETIRDRMVMGKIKRIEAGLPLTTAKGRTFGYDVIDTKLYINEEEAKQLQLIYDIFEEEQSITFLQKRLKKLGFKVRTYNRYNSWLTNDLYCGYVSYKDKVHVKGIHEPIISEEQFYRVQEIFTRMGKNPNMNRDSASLLNNLVVCSKCGLSFVHRSKDTMSGGKKYHYRYYSCKTYKHAHELEKCGNKTWRADKLEELIINRVNNYSFASRNVDKEDELDSLNEKLKIEHARKRRLFDLYINGSYEVSELGSMMNDIDAQINYYESQIEANEELRKNKKIQENLADLAAVDFDSLEFREKRLYLKSLINKIYIDGEQVTIEWL

SEQ ID NO: 4866 - protein, 452 aa, synthetic construct
MKAAIYIRVSTREQVENYSIQAQTEKLTALCRSKDWDVYDIFIDGGYSGSNMNRPALNEMLSKLHEIDAVVVYRLDRLSRSQRDTITLIEEYFLKNNVEFVSLSETLDTSSPFGRAMIGILSVFAQLERETIRDRMVMGKIKRIEAGLPLTTAKGRTFGYDVIDTKLYINEEEARQLQLIYDIFEEEQSITFLQKRLKKLGFKVRTYSCYNNWLTNDLYCGYVSYKDKVHVKGIHEPIISEEQFYRVQEIFTRMGKNPNMNRDSASLLNNLVVCSKCGLGFVHRRKDAMSRDKKYHYRYYSCKTYKHIHELEKCGNKIWRADKLEELIINRVNNYSFASRNADEEDELDSLNEKLRIEHAKKRRLFDLYINGSYEVSELDSMMNDIDAQINCYESQIEANEELKKNKKIQENLAELATVDFDGLEFREKQLYLKSLINKIYIDGEQVTIEWL

SEQ ID NO: 4867 - protein, 452 aa, synthetic construct
MKAAIYIRVSTREQVDNYSIQAQTEKLTALCRSKDWDVYDIFIDGGYSGSNMNRPALNEMLSKLHEIDAVVVYRLDRLSRSQRDTITLIEEYFLKNNVEFVSLSETLDTSSPFGRAMIGILSVFAQLERETIRDRMVMGKIKRVEAGLPLTTAKGRTFGYDVIDTKLYINEEEAKQLQLIYDIFEEERSITSLQKRLKKLGFKVRTYSCYSNWLTNDLYCGYVSYKDIVHVKGIHEPIISEEQFYRVQGIFTRMGKNPNMNRDSASLLNNLVVCSRCGLSFVHRRKDTMSRGKKYHYRYYSCKTYKHIHELEKCGNKIWRADKLEELIISRVNNYSFASRNVDKEDELDSLNEKLKIEHAKKKRLFDLYINGSYEASELDSMMYDIDAQINYYESQIEANEELRKNRKIQESLAYLATVDFDSLEFREKQLYLKSLINKIYIDGEQVTIEWL

SEQ ID NO: 4868 - protein, 452 aa, synthetic construct
MKAAIYIRVSTQEQVGNYSIQAQTEKLTALCRSKDWDVYDIFIDGGYSGSNMNRPALNEMLSKLHEIDAVVVYRLDRLSRSQRDTTTLIEEYFLKNNVEFVSLSETLDTSSPFGRAMIGILSVFAQLERETIRDRMVMGKIKRIEAGLPLTTAKGRTFGYDVIDTKLYINEEEAKQLQLIYDIFEEERSITLLQKRLKKLGFKVRTYNRYNNWLTNDLYCGYVSYKDKVRVKGIHEPIISEEQFYRVQEIFTRMGKNPNMNRDSASLLNNLVVCSKCGLGFVHRSKDTMSRGRKYHYRYYSCKTYKHTHELEKCGNKTWRADILEELIINRVNNYSLASRNVDKEDELDSLNEKLKIEHAKKKRLFDLYINGSCEVSELDSMMDDIDAQINYYEGQIEANEELKKDKKIQENLADLATVDFDSLEFREKQLYLKSLINKIYIDGEQVTIEWR

SEQ ID NO: 4869 - protein, 452 aa, synthetic construct
MKAAIYIRVSTREQVENYSIQAQTEKLTALCRSKDWDVYDIFIDGGYSGSNMNRPALNEMLSKLHEIDAVVVYRLDRLSRSQRDTITLIEEYFLKNNVEFVSLSETLDTSSPFGRAMIGILSVFAQLERETIRDRMVMGKIKRIEAGLPLTTAKGRTFGYDVIDTKLYINEEEAKQLQLIYDIFEEEQSITFLQKRLKKLGFKVRTYNRYNNWLTNDLYCGYVSYKDKVHVKGIHEPIISEEQFHRVQEIFARMGKNPNMNRGSASLLNNLVVCSKCGLGFVHRRKDAMSRDKKYHYRYYSCKTYKHIHELEKCGNKIWRADKLEELIINRVNNYSLASRNVDKEDELDSLNEKLKIEHAKKRRLFDLYINGRYEVSELDSMMNDIDAQINYYESQIEANEGLRKNKKIQENLADLATVDFDSLEFREKQLYLKGLINKIYIDGEQVTIEWL

SEQ ID NO: 4870 - protein, 452 aa, synthetic construct
MKAAIYIRVSTREQVENYSIQAQTEKLTALCRSKDWDVYDIFVDGGYSGSNMNRPALNEMLSKLHEIDAVVVYRLDRLSRSQRDTITLIEEYFLKNNVEFVSLSETLDTSSPFGRAMIGILSVFAQLERETIRDRMVMGKIKRIEAGLPLTTAKGRTFGYDVIDTKLYINEEEAKQLQLIYDIFEEEQSITSLQKRLKKLGLKVHTYNRYNNWLTNDLYCGYVSYKDKVHVKGIHEPIISEEQFYRVQEIFTRMGKNPNMNRDSASLLNNLVVCSKCGLGFVHRRKDAMSRDKKYHYRYYSCKTYKHIHELKKCGNKIWRADELEELIINRVNNYSLASRSVDKEDELDSLNEKLKIEYVKKKRLFDLYINGSYEVSELDSMMNDIDAQISYYESQIEANEELRKNKKIQENLADLATVDFDSLEFREKQRYLKSLINKIYIDGEQVTIEWL

SEQ ID NO: 4871 - protein, 452 aa, synthetic construct
MKAAIYIRVSTREQVENYSIQAQTEKLTALCRSKDWDVYDIFIDGGYSGSNMNRPALNEMLSKLHEIDAVVVYRLDRLSRSQRDTITLIEEYFLKNNVEFVSLSETLDTSSPFGRAMIGILSVFAQLERETIRDRMVMGKIKRIEAGLPLTTAKGRTFGYDVIDTKLYINEEEAKQLQLIYDIFEEEQSITFLQKRLKKLGFKVRTYNRYNNWLTNDLYCGYVSYKDKVHVKGIHEPIISEEQFYRVQEIFTRMGKNPNMNRESASLLNNLVVCSKCGLGFVHRRKDAMSRDKKYHYRYYSCKTYKHIHELEKCGNKIWRADKLEELVINRVNNYSFASRNADKEDELDSLNEKLKVEHAKKKRLFDLYISGRYEVSELDSMMSDIDAQINYYESQIEANEKLKKNKKIQENLANLATVDFDSLEFREKQLYLKSLINKIYIDGEQVTIEWL

SEQ ID NO: 4872 - protein, 485 aa, synthetic construct
MTKKVAIYTRVSTTNQAEEGFSIDEQIDRLTKYAEAMGWQVSDTYTDAGFSGAKLERPAMQRLINDIENKAFDTVLVYKLDRLSRSVRDTLYLVKDVFTKNKIDFISLNESIDTSSAMGSLFLTILSAINEFERENIKERMTMGKLGRAKSGKSMMWTKTAFGYYHNRKTGILEVVPLQATIVEQIFTDYLSGISLTKLRDKLNESGHIGKDIPWSYRTLRQTLDNPVYCGYIKFKGSLFEGMHRPIIPYETYLKVQKELEERQQQTYERNNNPRPFQAKYMLSGMARCGYCGAPLRIVLGHKRKDGSRTMKYHCANRFPRKTSGVTVYNDNKKCDSGTYDLSNLENTVIDNLIGFQENNDSLLKIINGNNQPILDTSSFKEQISQIDKKIQKNSDLYLNDFITMDELKDRTDSLQAEKKLLKAKISENKFSDSTGVFELVKTQLGSIPINELSYDNKKKIVNNLVSKVDVTADNVDIIFKFQLA

SEQ ID NO: 4873 - protein, 485 aa, synthetic construct
MTKKVAIYTRVSTTNQAEEGFSVDEQIDRLTKYAEAMGWQVSDTYTDAGFSGAKLERPAMQRLINDIGNKAFDTVLVYKLDRLSRSVRDTLYLVKDVFAKNKIDFVSLNECIDTSSAMGSLFLTILSAINEFERENIKERMTMGKLGRAKSGKSMMWTRTAFGYYHSRKTGILEIVPLQATIVEQIFTDYLSGISLTKLRDKLNESGHIGKDIPWSYRTLRQTLDNPVYCGYIKFKDSLFEGMHKPIIPYETYLKVQKELEERQQQTYERNNNPRPFQAKYMLSGMARCGYCGAPLKIVLGHKRRDGSRTMKYHCANRFPRKTKGVTVYNDNKKCNSGTYDLSNLENTVIDNLIGFQKNNDSLLKIINGNNQPILDTSSFKKQISQIDKRIQKNSDLYLNDFITMDELKARTDSLQAEKKLLKAKISENKFSDSADVFELVKTQLGSIPINELSYDDKKKIVNNLVSKVDVTADNVDIIFKFQLA

SEQ ID NO: 4874 - protein, 452 aa, synthetic construct
MKAAIYIRVSTREQVENYSIQAQTEKLTALCRSKDWDVYDIFIDGGYSGSNMNRPALNEMLSKLHEIDAVVVYRLDRLSRSQRDTITLIEEYFLKNNVEFVSLSETLDTSSPFGRAMIGILSVFAQLERETIRDRMVMGKIKRIEAGLPLTTAKGRTFGYDVIDAKLYINEEEAKQLRLIYDIFEEEQSITSLQKRLKKLGFKVRTYSRYNNWLTNDLYCGYVSYKDKVHVRGIHEPIISEEQFYRVQEIFTRMGKNPNMNRDSASLLNNLVVCSKCGLGFVHRRKDTTSRGKKYHYRYYSCKTYKHTHELEKCGNKIWRADELEELIISRVNDYSFACRNMDKEDELDSLNEKLKIEHAKKKRLFDLYINGSYEVSELDCMMNDIDAQINYYESQIEANEELKKDKKIQESLANLATVDYDSLEFREKQLYLKSLINKIYIDGEQVTIEWL

SEQ ID NO: 4875 - protein, 469 aa, synthetic construct
MSYTTPVRAAVYLRISEDRSGEQLGVARQREDCLKLCGQRKWEPVEYLDNDVSASTGKRRPAYEQMLADITAGKIAAVVAWDLDRLHRRPIELEAFMSLADEKRLALATVAGDVDLATPQGRLVARLKGSVAAHETEHKKARQRRAARQKAELGYPNWSKAFGYLPGPNGPEPDPRTAPLVKQAYADILAGASFGDVCRQWNAAGAFTITGRPWTTTTLSKFLRKPRNAGLRAYKGARYGPVDRDAIVGKAQWSPLVDEATFWAAQAVLDAPGRAPGRKSVRRHLLTGLAGCGKCGNHLAGSYRTDGRVVYVCKACHGVAILADNIEPILYHIVAERLAMPDAVDLLRREIHDAAEAETIRLELEVLYGELDHLAVERAEGLLTARQVKISTDIVNAKIIKLQARRLDQERLRVFDGIPLGTPQVADMIAELSPDRFRAVLDVLAEVVVQPVGKGGRIFNPERVQVNWR

SEQ ID NO: 4876 - protein, 452 aa, synthetic construct
MKAAIYIRVSTREQVENYSIQAQTEKLTALCRSKGWDVYDIFIDGGYSGSNMNRPALNEMLSKLHEIDAVVVYRLDRLSRSQRDTITLIEEYFLKNNVEFVSLSETLDTSSPFGRAMIGILSVFAQLERETIRDRMVMGKIKRIEAGLPLTTAKGRTFGYDVIDTKLYINEEEAKQLQLIYDIFEEEQSITFLQKRLKKLGFKVRTYSCYNNWLTNDLYCGYVSYKDKVHVKGIHEPIISEEQFYRVQEIFTRMGKNPNMNRDSASLLNNLVVCSKCGLGFVHRRKDAMSRDKKYHYRYYSCKTYKHIHELEKCGNKIWRADKLEELIINRVNDYSLASRNVDKEDGLDSLNEKLKIEHAKKKRLFDLYINGSYEVSELDSMMNDIDAQINYYEGQIEANEELRKNKKIQENLADLATVDFDSLEFCEKQRYLKSLINKIYIDGEQVTIEWL

SEQ ID NO: 4877 - protein, 452 aa, synthetic construct
MKAAIYIRVSTREQVENYSIQAQAEKLTALCRSKDWDVYDIFIDGGFSGSNMNRPALNEMLSKLHEIDAVVVYRLDRLSRSQRDTITLIEEYFLKNNVEFVSLSETLDTSSPFGRAMIGILSVFAQLERETIRDRMVMGKIKRIEAGLPLTTAKGRTFGYDVIDTKLYINEEEAKQLQLIYDIFEEEQSITFLQKRLKKLGFKVRTYNRYNSWLTNELYCGYVSYKDKVHVKGIHEPIISEEQFYRVQEIFTRMGKNPNMNRDSASLLNNLVVCSKCGLGYVHRRKDTMSRGKKYHYRYYSCKTYKHIHELERCGNKIWRADKLEELIINRVNNYSLASRNVDKEDELDSLNEKLKIEHAKKRRLFDLYINGSYEVSELDSMMNDIDAQINYYESQIEANEELKKNKRIQENLVHLATVDFDSLEFREKQLYLKSLINKIYIDGEQVTIEWL

SEQ ID NO: 4878 - protein, 469 aa, synthetic construct
MCYTTPVRAAVYLRISEDRSGEQLGVARQREDCLKLCDQRKWVPVEYLDNDVSASTGKRRPAYEQMLADITAGKIAAVVAWDLDRLHRRPIELEAFMSLADEKRLALATVAGDVDLATPQGRLVARLKGSVAAHETEHKKARQRRAARQRAERGLPNWSKAFGYLPGPNGPEPDPRTAPLVKQAYADILAGASLGDVCRQWNDASAFTITGRPWTTTTLSKFLRKPRNAGLRAYKGARYGPVDRDAIVGKAQWSPLVDEATFWAAQAVLDAPGRAPGRKSVRRHLLTGLAGCGKCGNHLAGSYRTNGRVVYVCKACHGVAILADNIEPILYHIVAERLAMPDAVDLLRREIHDVAEAETIRLELETLYGELDRLAVERAEGLLTARQVKISTDIVNAKITKLQARQQDQERLRVLDGIPLGTPQVAGTIAELSPDRFRVVLDVLAEVVVQPVGKSGRAFNPERVQVNWR

SEQ ID NO: 4879 - protein, 485 aa, synthetic construct
MTKKVAIYTRVSTTNQAEEGFSIDEQIDRLTKYAEAMGWEVSDTYTDAGSSGAKLERPAMQRLINDIENKAFDTVLVYKLDRLSRSVRDTLYLVKDVFTKNKIDFISLNESVDTSSAMGSLFLTILSAINEFERENIKERMTMGKLGRAKSGKSMMWTKTAFGYYHNRKTGILEIVPLQAAVVEQIFTDYLSGISLTKLRDKLNESGHIGKDIPWSYRTLRQTLDNPVYCGYIKFKDSLFEGMHKPIIPYETYLKVQKELEERQQQTYERNNNPRPFQAKYMLSGMARCGYCGAPLRIVLGHKRKDGSRTMKYHCANRFPRKTRGVTVYDDNKKCDSGTYDLSNLENTVIGNLIGFQENNDSLLKIINGSNQPILDTSSFKKQISQIDKKIQKISDLYLNDFITLDELKDRTDSLQAEKKQLKAKISENKFNDSTDVFELVKTQLGSIPINELSYDNKKKIVNNLVSKVDVTADNVDIIFKFQLA

SEQ ID NO: 4880 - protein, 469 aa, synthetic construct
MSYTTPVRAAVYLRISEDRSGEQLGVARQREDCLKLCDQRKWVPVEYLDNDVSASTGRRRPAYEQMLADITAGKIAAVVAWDLDRLHRRPIELEAFMCLADEKRLALATVAGDVDLATPQGRLVARLKGSVAAHETEHKKARQRRAARQKAERGFPNWSKAFGYLPGPNGPEPDPRTAPLVKQAYADILAGASLGDVCRQWNDVGAFTITGRPWTTTTLSKFLRKPRNAGLRAYKGARYGPVDRDAIVGKAQWSPLVDEATFWAAQAVLDAPGRAPGRKSVRRHLLTGLAGCGKCGNHLAGSYRTDGRVVYVCKACHGVAILADNIEQILYHIVAERLAVPDAVDLLRREIHDAAEAETIRLELETLYGELDRLAVERAEGLLTARQVKISTDIVNAKITKLQACQLDQERLRVFDGIPLGTPQVAGVIAELSPDRFRAVLDVLAEVVVQPVGKSGRIFNPERVQVNWR

SEQ ID NO: 4881 - protein, 469 aa, synthetic construct
MSYTTPVRAAVYLRISEDRSGEQLGVARQREDCLKLCDQRKWVPVEYLDNDVSASTGKRRPAYEQMLADITAGKIAAVVAWDLDRLHRRPMELEAFMSLADEKRLALATVAGDVDLATPQGRLVARLKGSVAAHETEHKKARQRRAARQKAERGYPNWSKAFGYLPGPNGPEPDPRTAPLVRQAYADILAGASLGDVCRQWNGAGAFTITGRPWTTSTLSKFLRKPRNAGLRAYKGARYGPVDRDAIVGKAQWSPLVDEATFWAAQAVLDAPGRAPGRKSVRRHLLTGLAGCGKCGNHLAGSYRTDGRVVYVCKACHGVAILADNIEPILYHIVAERLAKPDAVDLLRREIHDAAEAETIRLELETLYGELDRLAVERAEGLLTARQVKISTDIVDAKIAKLQARQLDQERLRVLDGIPLGTPQVAGMIAGLSPDRFRAVLDVLAEVVVQPVGRSGRIFNPERVQVNWR

SEQ ID NO: 4882 - protein, 452 aa, synthetic construct
MKAAIYIRVSTREQVENYSIQAQTEKLTALCRSKDWDVYDIFIDGGYSGSNMNRPALNEMLSKLHEIDAVVVYRLDRLSRSQRDTITLIEEYFLKNNVEFVSLSETLDTSSPFGRAMIGILSVFAQLERETIRDRMVMGKIKRIEAGLPLTTAKGRTFGYDVIDTKLYINEEEAKQLRLIYDIFEEEQSITFLQKRLKKLGFKVRTYNRYNNWLTNDLYCGYVSYKDKVHVKGIHEPIISEEQFYRVQEIFTRMGKNPNMNRGSASLLNNLVVCSKCGLGFVHRRKDIMSRDKKYHYRYYSCKTYKHIHELKKCGNKIWRADKLEELVINRVNNYSFASRNADKEDELDSLNEKLKVEHAKKKRLFDLYISGRYEVSELDSMMNDIDAQINYYESQIEANEELRRNKKIQENLAHLATVDFDSLEFREKQLYLKSLIHKIYIDGEQVTIEWL

SEQ ID NO: 4883 - protein, 469 aa, synthetic construct
MSYTTPVRAAVYLRISEDRSGEQLGVARQREDCLKLCDQRKWVPVEYLDNDVSASTGKRRPAYEQMLADITAGKIAAVVAWDLDRLHRRPIELEAFMSLADEKRLALATVAGDVDLATPQGRLVARLKGSVAAHETEHKKARQRRAARQKAERGYPNWSKAFGYLPGPNGPEPDPRTAPLVKQAYADILAGASLGDVCRQWNDAGAFTITGRPWTTTTLSKFLRKPRNAGLRAYKGARYGPVDRDAIVGKAQWSPLVDEGTFWAAQAVLDAPGRAPGRKSVRRHLLAGLAGCGKCGNHLAGSYRTDGQIVYVCKACHGVSILAVNIEPILYHIVAERLAMPDAVDLLRREIHDAAEAETIRLELETLYGELDRLAVERAEGLLTARQVKISTDIVNAKITKLQARQLDQERLRVFDGIPLGTPQVAGMIAELSPNRFRAVLDVLAEVVVQPVGKSGRIFNPERVQVNWR

SEQ ID NO: 4884 - protein, 485 aa, synthetic construct
MTKKVAIYTRVSTTNQAEEGFSIDEQVDRLTKYAEAMGWQVSDTYTDAGFSGAKLERPAMQRLINDIENKAFDTVLVYKLDRLSRSVRDTLYLVKDVFTKNKIDFISLNESIDTSSAMGSLFLTILSAINEFERENIKERMTMGKLGRAKSGKSMMWTKTAFGYYHNRKTGILEIVPLQATIVEQIFTDYLSGISLTKLRDKLNESGHIGKDIPWSYRTLRQTLDNPVYCGYIKFKGSLFVGMHKPIIPYETYLKVQKELKERQQRTYERNNNPRPFQAKYMLSGMARCGYCGAPLRIVLGRKRKDGSRTMKYHCANRFPRKTKGITVYNDNKKCDSGTYDLSNLENTVIDNLVGFQENNDSLLKIINGNNQLILDTSSLEKQISQIDKKIQKNSDLYLNDFISMDELKGRTDSLQAEKKLLKAKISENKFNDSTDVFELVKTQLGSIPINELSYDDKKKIVNNLVSKVDVTADNVDIIFKFQLA

SEQ ID NO: 4885 - protein, 452 aa, synthetic construct
MKAAIYIRVSTREQVENYSIQAQTEKLTALCRSKDWDVYDIFIDGGYSGSNMNRPALNEMLSKLHEIDAVVVYRLDRLSRSQRDTITLIEEYFLRNNVEFVSLSETLDTSSPFGRAMIGILSVFAQLERETIRDRMVMGKIKRAEAGLPLTTAKGRTFGYDVIDTKLYINEEEAKHLQLVYDIFEEEQSITFLQKRLKELGFKVRTYSRYNNWLTNDLYCGYVSYKDKVHVKGIHEPIISEEQFYRVQEIFTRMGKNPNMNRDSASLLNNLVVCSKCGLGYVHRRKDTMSRGKKYHYRYYSCKTYKHTHELEKCGNKIWRADKLEELVINRVNNYSFASRDVDKEDGLDNLNEKLKIEHAKKKRLFDLYVNGSYEVSELDSMMNDIDAQINYYESQIEANGELRKNKKIQENLADLATVDYDSLEFREKQLYLKSLINKIYIDGEQVTIEWL

SEQ ID NO: 4886 - protein, 452 aa, synthetic construct
MKAAIYIRVSTQEQVGNYSIQAQTEKLTALCRSKDWDVYDIFIDGGYSGSNMNRPALNEMLSKLHEIDAVVVYRLDRLSRSQRDTTTLIEEYFLKNNVEFVSLSETLDTSSPFGRAMIGILSVFAQLERETIRDRMVMGKIKRIEAGLPLTTAKGRTFGYDVVDTKLYINEEEAKQLQLIYDIFEEERSITSLQKRLKKLGFKVRTYNRYNNWLTNDLYCGYVSYKDKVHVKGIHEPIISEEQFYRVQEIFTRMGKNPNMNRDSASLLNSLVVCSKCGLSFVHRSKDTMSRGKRYHYRYYSCKTYKHTHELEKCGNKTWRADKLEELIINRVNNYSFASRNADKEDELDSLNEKLKIEHAKRKRLFDLYINGSYEVSELDSMMSDIDAQINYYECQIEATVEQKKNKRIQGNLAGLATVDFDSLEFREKQLYLKSLINKIYIDGEQVTIEWL

SEQ ID NO: 4887 - protein, 469 aa, synthetic construct
MSYTTPVRAAVYLRISEDRSGEQLGVARQREDCLKLCDQRKWVPVEYLDNDVSASTGKRRPAYEQMLADITAGEIAAVVAWDLDRLHRRPIELEAFMSLADEKRLALATVAGDVDLATPQGRLVARLKGCVAAHETEHKKARQRRAARQKAERGLPNWSKAFGYLPGPNGPEPDPRTAPLVKQAYADILAGASLGDVCRQWNDAGAFTITGRPWATTTLSKFLRKPRNAGLRAYRGARYGPVDRDAIVGKAQWSPLVDEATFWAAQAVLDAPGRAPGRKSVRRHLLTGLAGCGKCGNHLAGSYRTDGRVVYVCKACHGVSILADNIVPILYHIVAERLAMPDAVGLLRRETHDAAEAETIRLELETLYGELDRLAVERAEGLLTARQVKISTDIVNAKITKLQARQLDQERLRVFDGIPLGTPQVAGVIAELSPDRFRAVLGVLAEVVVQPVGKSGRISNPERVQVNWR

SEQ ID NO: 4888 - protein, 452 aa, synthetic construct
MKAAIYIRVSTREQVENYSIQAQTEKLTALCRSKDWDVYGIFIDGGYSGSNMNRPALNEMLSKLHEIDAVVVYRLDRLSRSQRDTITLIEEYFLKNNVEFVSLSETLDTSSPFGRAMIGILSVFAQLERETIRDRMVMGKIKRIEAGLPLTTAKGRTFGYDVIDTKLYINEEEAKQLQLIYDIFEEEQSITFLQRRLKELGFKVHTYNRYNSWLTNDLYCGYVSYKDKVHVKGIHEPIISEEQFYRVQEIFTRTGKNPNMNRDSASLLNNLVVCSKCGLGFVHRRKDTVSRGKKYHYRYYSCKTYKHTHELEKCGNKIWRADKLEELIINRVNNYSFASRNVDKEDELDSLNEKLKIEHAKRKRLFDLYINGCYEVSELDSMMNDIDAQINYYESQIEANEELKKNEKIQESLAKLATVDYDSLEFREKQLYLKSLINKIYIDGEQVTIVWL

SEQ ID NO: 4889 - protein, 452 aa, synthetic construct
MKAAIYIRVSTREQVENYSIQAQTEKLTALCRSKDWDVYDIFIDGGYSGSNMNRPALNEMLSKLHEIDAVVVYRLDRLSRSQRDTITLIEEYFLKNDVEFVSLSETLDTSSPFGRAMIGILSVFAQLERETIRDRMVMGKIKRIEAGLPLTTAKGRTFGYDVIDTKLYINEEEAKQLQLIYDIFEEEQSITFLQKRLKKLGFKVRTYNRYNNWLTNDLYCGYVSYKDKVHVKGIHEPIISEEQFYRVQEIFTRMGKNPNMNRDSASLLNNLVVCSKCGLSFVHRRKDAVSRDKKYHYRYYTCRTYKHIHELEKCGNKIWRADKLEELIINHVRNYSLASRNVDKGDELDSLNEKLKIEHAKKKRLFDLYINGSYEVSELDSMMSDIDAQINYYESQIEANEELKKDKKIQENLAHLATVDFDSLEFREKQLYLKSLINKIYIDGEQVTIEWL

SEQ ID NO: 4890 - protein, 469 aa, synthetic construct
MSYTTPVRAAVYLRISEDRSGEQLGVARQREDCLELCDQRKWVPVEYLDNDVSASAGKRRPAYEQMLADIIAGKIAAVVAWDLDRLHRRPIELEAFMSLADEKRLALATVAGDVDLATPQGRLVARLKGCVAAHETEHKKARQRRAARQKAERGLPNWSKAFGYLPGPNGPEPNPRTAPLVKQAYADILAGASLGDVCRQWNGAGAFTITGRPWTTTTLSKFLRKPRNAGLRAYKGARYGPVDRDAIVGKAQWSPLVDEATFWAAQAVLDAPGRAPGRKSVRRHLLTGLAGCGKCGNHLAGSYRTDGRVVYVCKACHGVAILADNIEPILYHVVAERLAMPDAVDLLRREIHDAAEAETIRLGLDTLYGELDRLAVERAEGLLTARQVKISTDIVNAKITKLQARQLDQERLRVFDGIPLGTPQVAGVIAKLSPDRFRAVLDVLAEVVVQPVGKSGRIFNPERVQVNWR

SEQ ID NO: 4891 - protein, 485 aa, synthetic construct
MTKKVAIYTRVSTTNQAEEGFSIDEQIDRLTKYAEAMGWQVGDTYTDAGFSGAKLERPAMQRLINDIENKAFDTVLVYKLDRLSRSVRDTLYLVKDVFTKNKIDFISLSESIDTSSAMGSLFLTILSAINEFERENIKERMTMGKLGRAKSGKSMMWTKTAFGYYHNRKTGILEIVPLQATIVEQIFTDYLSGISLTKLRDKLNESGHIGKDIPWSYRTLRQTLDNPVYCGYIKFKDSLFEGMHKPIIPYETYLKVQKELEERQQQTYERNNNPRPFQAKYMLSGMARCGYCGAPLRIVLGRKRKDGSRTMKYHCANRFPRKTKGVTVYNDNKKCDSGTYDLSSLENTVIDNLVGFQENNDSLLKIINGNNQPILDTSSFEKQISQIDKKIQKNSDLYLNDFITMDELNDRTDSLQAEKKLLKAKTSENKLNDSTGVFELVKSQLGSIPINELSYDNKKKIVNNLVSKVDVTADNVDIIFKFQLA

SEQ ID NO: 4892 - protein, 452 aa, synthetic construct
MKAAIYIRVSTREQVENYSIQAQTEKLTALCRSKGWDVYDIFIDGGYSGSNMNRPALNEMLSKLHEIDAVVVYRLDRLSRSQRDTITLIEEYFLKNNVEFVSLSETLDTSSPFGRAMIGILSVFAQLERETIRDRMVMGKIKRIEAGLPLTTAKGRTFGYDVIDTKLYINEEEAKQLQLIYDIFEEEQSITFLQKRLKKLGLKVRTYNRYNNWLTNDLYCGYVSYKDKVHVKGIHEPIISEEQFYRVQEIFARMGKNPNMNRDSASLLNNLVVCSKCGLGFVHRRKDIMSHGKKYHYRYYSCKTYKHIHELEKCGNKIWRADKLEELIINRVNSYSLASRNVDKEDELDSLSEKLRIEHAKKKRLFDLYINGSYEVSELDSMMNDIDAQINYYESQIEANEELKRNKKIQENLANLATVDFDSLEFREKQLYLKSLINKIYIDGEQVTIEWL

SEQ ID NO: 4893 - protein, 452 aa, synthetic construct
MKAAIYIRVSTREQVENYSIQAQTEKLTALCRSKDWDVYDIFIDGGYSGSNMNRPALNEMLSKLPEIDAVVVYRLDRLSRSQRDTITLIEEYFLKNNVEFVSLSETLDTSSPFGRAMIGILSVFAQLERETIRDRMVMGKIKRVEAGLPLTTARGRTFGYDVIDTKLYINEEEAKQLQLIYDIFEEEQSITFLQKRLKKLGFKVRTYNRYNNWLTNDLYCGYVSYKDKVHVKGIHEPIISEEQFYRVQAIFARMGKNPNINRESASLLNNLVVCSKCGLGFVHRRKDTTSRGKKYHYRYYSCKTYKHTHELEKCGNKIWRADKLEELIINRVNNYSLASRNVDKEDELDSLNEKLKIEHAKKKRLFDLYINGSYNVSELDNMMNDIDAQINYYENQIEANEELKKNKKIQEIRADLATVDFGSLEFREKQLYLKSLINKIYIDGEQVTIEWL

SEQ ID NO: 4894 - protein, 485 aa, synthetic construct
MTKKVAIYTRVSTTNQAEEGFSIDEQVDRLTKYAEAMGWQVSDTYTDAGISGAKLERPAMQRLISDIEYKAFDTVLVYKLDRLSRSVRDTLYLVKDVFTKNKIDLISLNESIDTSSAMGSLFLTILSAINEFERENIKERMTMGKLGRAKSGKSMMWTKTAFGYYHNRKTGILEIVPLQATIVEQIFTDYLSGISLTKLRDKLNESGHIGKDIPWSYRTLRQTLDNPVYCGYIKFKDSLFEGMHKPIIPYETYLKVQKELEERQQQTYERNNNPRPFQAKYMLSGMARCGYCGAPLKIVLGHKRKDGSRTMKYHCANRFPRKTKGVTVYNDNKKCDSGTYDLSNLENTVIDNLIGLQENNDSLLKIINGNNQPILDISSFKDQISQIDKKIQKNSDLYLNDLITMDELKDRTDSLQAEKKLLKAKISENKFNDSTDVFELVKTQLGSIPINELSYDNKKRIVNNLVSKVDVTADNVDIIFRFQLA

SEQ ID NO: 4895 - protein, 452 aa, synthetic construct
MKAAIYIRVSTREQVENYSIQAQTEKLTALCRSKDWDVYDIFIDGGYSGSNMNRPALNEMLSKLHEIDAVVVYRLDRLSRSQRDTITLIEEYFLKNNVEFVSLSETLDTSSPFGRAMIGILSVFAQLERETIRDRMVMGKIKRIEAGLPLTTAKGRTFGYDVIDAKLYINEEEAKQLQLIYDIFEEEQSITLLQKRLKKLGFKVRSYNRYNNWLTNDLYCGYVSYKDKVHVKGIHEPIISEEQFYRVQEIFTRMGKNPNMNRDSASLLNNLVVCSRCGLGFVHRRKDATSRDKKYHYRYYSCKTYKHIHELEKCGNKIWRADKLEELIINRVNNYSLASRNVDKEDELDSLNEKLKIEHVKKKRLFDLYINGSYDVSELDSMMNDIDAQINYYESQIEANEELKKNKKVQENLAYLATVDFNSLEFREKQLYLKSLINKIYIDGEQVTIEWL

SEQ ID NO: 4896 - protein, 452 aa, synthetic construct
MKAAIYIRVSTREQVENYSIQAQTEKLTALCRSKDWDVYDIFIDGGYSGSNMNRPALSEMLSKLHEIDAVVVYRLDRLSRSQRDTITLIEEYFLKNNVEFVSLSETLDTSSPFGRAMIGILSVFAQLERETIRDRMVMGKIKRTEAGLPLTTAKGRTFGYDVIDTKLYINEEEAKQLQLIYDIFEEEQSITFLQKRLKKLGFKVHTYNRYNNWLTNDLYCGYVSYKDKVHVKGIHEPIVSEEQFYRVQEIFTRMGKNPNMNRDSASLLNNLVVCSKCGLGFVHRRKDTMSRGKKYHYRYYSCKTYKHIHELEKCGNKIWRADKLEELIISRVDNYSLASRNVDKEDELDSLNEKLKIEHAKKKRLFDLYVNGSYEVSELDSMMSDIDAQIDHYESQIEANEELKKNKKIQESLANLATVDYDSLEFREKQLYLKSLINKIYIDGEQVTIEWL

SEQ ID NO: 4897 - protein, 452 aa, synthetic construct
MKAAIYIRVSTQEQVENYSIQAQTEKLTALCRSKDWDVYDIFIDGGYSGSNMNRPALNEMLSKLHEIDAVVVYRLDRLSRSQRDTTTLIEEYFLKNNVEFVSLSETLDTSSPFGRAMIGILSVFAQLERETIRDRMVMGKIKRIEAGLPLTTAKGRTFGYDVIDTKLYINEEEAKQLQLIYDIFEEEQSITSLQRRLKKLGFKVHTYNRYNNWLTNDLYCGYVSYKDEVHVKGIHEPIISEEQFYRVQEIFTRMGKSPNMNRDSASLLSNLVVCSKCGLGFVHRSKDTMSRGKKYHYRYYSCKTYKHTHELEKCGNKTWRADKLEELVINRVNNYSFASRNVDKEDELDSLNEKLKIERAKKKRLFDLYINGSYEVGELDSMMSDIDAQINYYESRIEANEELKRNKEIQENLAGLATVDFDSLEFREKQLYLKSLINKIYIDGEQVTIEWL

SEQ ID NO: 4898 - protein, 485 aa, synthetic construct
MTKKVAIYTRVSTTNQAEEGFSIDEQIDRLTKYAEAMGWQVSDTYTDAGFSGAKLERPAMQRLISDIENKAFDTVLVYKLDRLSRSVRDTLYLVKDVFTKNKIDFISLNECIDTSSAMGSLFLTILSAINEFERENIKERMTMGKLGRAKSGKSMMWTKTAFGYYHNRETGILEIVPLQAAIVEQIFTDYLSGISLTKLRDKLNESGHIGKDIPWSYRTLRQTLDNPVYCGYIKFKGILFEGMHKPIVPYETYLKVQKELEERQQQTYERNNNPRPFQAKYMLSGMARCGYCGAPLRIVLGHKRKDGSRTMKYHCANRFPRKTKGVTAYNDNKKCDSGAYDLSNLENTVIDNLISFQENNDSLLKIINGNNQPILDASSFEKQISQIDKKIQKNSDLYLNDFITMDELKDRTDSLQAEKRLLKAKISENKFNNSTDVFELVKTQLGSIPINELSYDNKKKIVNNLVGKVDVTADNVDIIFKFQLA

SEQ ID NO: 4899 - protein, 452 aa, synthetic construct
MKAAIYIRVSTREQVENYSIQAQTEKLTALCRSKDWDVYDIFIDGGYSGSNTNRPALNEMLSKLHEIDAVVVYRLDRLSRSQRDTITLIEEYFLKNNVEFVSLSETLDTSSPFGRAMIGILSVFAQLERETIRDRMVMGKIKRIEAGLPLTTAKGRTFGYDVIDTKLYINEEEAKQLQLIYDIFEEEQSITFLQKRLKKLGFKVRTYNRYNNWLTNDLYCGYVSYKDKVHVKGIHEPIISEEQFYRVQEIFTRMGKNPNMNRDSASLLNNLVVCSRCGLGFVHRRKDIVSRGKKYHYRYYSCKTYKHIHELEKCGNKIWRADKLEELVISRVNNYSFASRNADKEDELDSLNEKLKTEHAKKRRLFDLYLNGSYEVSELDSMMNDIDEQINYYESQIGANEELRRNKKVQENLAYLSAVDFDSLEFREKRLYLKSLINKIYIDGEQVTIEWL

SEQ ID NO: 4900 - protein, 452 aa, synthetic construct
MKAAIYIRVSTREQVENYSIQAQTEKLTALCRSKDWDVYDIFIDGGYSGSNMNRPALNEMLSKLHEIDAVVVYRLDRLSRSQRDTITLIEEYFLKNNVEFVSLSETLDTSSPFGRAMIGILSVFAQLERETIRDRMVMGKIKRIEAGLPLTTAKGRTFGYDAIDTKLYINEEEAKQLQLIYDIFEEERSITFLQKRLKKLGFKVRTYNCYNNWLTNDLYCGYVSYKDKVHVKGIHEPIISEEQFYRVQEIFTRMGKNPNMNRDSASLLNNLVVCGKCGLGFVHRRKDIMGRGKKYHYRYYSCKTYKHIHELEKCGNKIWRADKLEELIINRVNNYSLEGRNTGKEDELDSLNEKLRIEHAKKKRLFDLYINGSYEVSELDSMMSDIDAQINYYESRIEANEELRKNKKIQENLADLATVDFDSLEFREKQLYLKSLINKIYIDGEQVTIEWL

SEQ ID NO: 4901 - protein, 469 aa, synthetic construct
MSYTTPVRAAVYLRISEDRSGEQLGVARQREDCLKLCDQRKWVPVEYLDNDVSASTGKRRPAYEQMLADITAGKIAAVVAWDLDRLHRRPVELEAFMSLADEKRLALATVAGDVDLATPQGRLVARLKGCVAAHETEHKKARQRRAARQKAERGLPNWSKAFGYLPGPDGPEPDPRTAPLVKQAYADILAGASLGDVCRQWNDAGAFTITGRPWTTTTLSKFLRKPRNAGLRAYKGARYGPVDRDAIVGKAQWSPLVNEATFWAAQAVLDAPGRAPGRKSVRRHLLTGLAGCGKCGNHLAGSYRTDGRVVYVCKACHGVSILADNIVPILYHIVAERLAMPDAADLLRREVHDAAEAETIRLELETLYGELDRLAVERAEGLLTARQVKISADIVNAKITKLQARQLDQERLRVLDGIPLGTPQVAGMIAELSPDRFRAVLDVLAEVVVQPVGKSGRIFNPGRVQVNWR

SEQ ID NO: 4902 - protein, 469 aa, synthetic construct
MCYTTPVRAAVYLRISEDRSGEQLGVARQREDCLKLCDQRKWVPVEYLDNDVSASTGKRRPAYEQMLADITAGKIAAVVAWDLDRLHRRPIELEAFMSLADEKRLALATVAGDIDLATPQGRLVARLKGSVAAHETEHKKARQRRAARQKAERGHPNWSKAFGYLPGLNGPEPDPRTAPLVKQAYADILAGASLGDVCRRWNDAGAFTITGRPWSTTALSKFLRKPRNAGLRAYKGARYGPVDRDAIVGKAQWSPLVDEATFWAAQAVLDAPGRAPGRKSVRRHLLTGLAGCGKCGNHLAGSYRTDGRVVYVCKACHGVAILADNIEPILYHIVAERLAMPDAVDLLRREIHDAAEAETIRLELETLYGELDRLAVERAEGLLTARQVKISTDIVNAKITKLQARQLDQERLRVFDGIPLGTPQVAGTIAELSPNRFRAVLDVLAEVVVQPVGKGGRIFNPERVQVNWR

SEQ ID NO: 4903 - protein, 452 aa, synthetic construct
MKAAIYIRVSTQEQVGNYSIQAQTEKLTALCCSKGWDVYDIFIDGGYSGSNMNRPALNEMLSKLHEIDAVVVYRLDRLSRSQRDTTTLIEEYFLKNNVEFVSLSETLDTSSPFGRAMIGILSVFAQLERETIRDRMVMGKIKRIEAGLPLTTAKGRTFGYDVIDTKLYINEGEAKQLQLIYDIFEEEQSITSLQKRLKKLGFKVRTYNRYNNWLTNDLYCGYVSYKDQVHVKGIHEPIISEEQFYRVQEIFTRMGKNPNMNRDSASLLNNLVVCSKCGLSFVHRSKDTMSRGKKYHYRYYSCKTYKHTHELEKCGNKTWRADKLEELIINRVNNYSFASRNVDEEDKLDSLNGRLKTEHAKKKRLFDLYINGSYEVSELDSMMNDIDAQINYYESKIEANEELRKNQKIQENLAALATVDFDSLEFREKQLYLKSLISKIYIDGEQVTIEWL

SEQ ID NO: 4904 - protein, 485 aa, synthetic construct
MTKKVAIYTRVSTTNQADEGFSIDEQIDRLTKYAEAMGWQVSDTYTDAGFSGAKLERPAMQRLINDIENKAFDTVLVYKLDRLSRSVRDTLYLVKDVFTKNKIDFISLNESIDTSSAMGSLFLTILSAVNEFERENIKERMTMGKLGRAKSGKSMMWTKTAFGYYHNRKTGILEIVPLQATIVEQIFTDYLSGISLTKLRDKLNEGGHIGKDIPWSYRTLRQTLDNPVYCGYIKFKDSLFEGMHKPIIPYETYLKVQKELEERQQQTYERNNNPRPFQAKYMLSGMARCGYCGAPLRIVLGHKRKDGSRSMKYHCANRFPRKTKGVTVYNDNKKCDSGTYDLSNLENTVIDNLIGYQENNDSLLKIINGNNQPILDTSSFKERISQIDKKIQKNSDLYLNDFITMDELKDRTDSLQAEKKLLKAKISENKLNDSSGVFELVKAQLGSIPINELSYDDKKKIVNNLVSKVDVTADNVDIIFKFQLA

SEQ ID NO: 4905 - protein, 485 aa, synthetic construct
MTKKVAIYTRVSTTNQAEEGFSIDEQIDRLTKYAEAMGWQVSDTYTDAGFSGAKLERPAMQRLINDIENKAFDTVLVYKLDRLSRSVRDTLYLVKDVFTKNKIDFISLSESINTSSAMGSLFLTILSAINEFERENIKERMTMGKLGRAKSGKSMMWTKTAFGYYHNRKTGILEIVPLQAAIVEQIFADYLSGISLTKLRDKLNESGHIGKDIPWSYRTLRQTLDNPVYCGYIKFKDSLFEGMHRPIIPYETYLKVQKELEERQQQTYERNNNPRPFQAKYMLSGMARCGYCGAPLRIVLGHKRKDGSRTMKYHCANRFPRKTKGVTVYNDNKKCGSGTYDLNNLENTVIDNLIGFQENNDSLLKTINGNNQPILDTSSFKKQISQIDKKIQKNSDLYLNDFITMDELRDRTDSLQAEKKLLKAKISENKSNDSTDVFELVKTQLGSIPINELSYDDKKKIVNNLVSKVDVTADNVDIIFKFQLA

SEQ ID NO: 4906 - protein, 452 aa, synthetic construct; identical to SEQ ID NO: 4279

SEQ ID NO: 4907 - protein, 452 aa, synthetic construct
MKAAIYIRVSTREQVENYSIQAQTEKLTALCRSKDWDVYDIFIDGGYSGSNMNRPALNEMLSKLHEIDAVVVYRLDRLSRSQRDTITLIEEYFLKNNVEFVSLSETLDTSSPFGRAMIGILSVFAQLERETIRDRMVMGKIKRIEAGLPLTTAKGRTFGYDVIDTKLYINEEEAKQLQLIYDIFEEEQSITSLQKRLKKLGFKVRTYNRYNNWLTNDLYCGYVSYKDKVHVKGIHEPIISEEQFYRVQEIFARMGKNPNMNRDSASLLSNLVVCSKCGLGFVHRRKDTMSRGKKYHYRYYSCKTYKHTHELDKCGNKIWRADKLEELIINRVNNYSFASRNVDKEDELDSLNEKLKIEHAKKKRLFDLYINGSYEVSELDSMMSDIDAQINYYESQIEANEELKKNKKIQENLADLATVDFDSLEFREKQQYLKSLINKIYIDGEQVTIEWL

SEQ ID NO: 4908 - protein, 452 aa, synthetic construct
MKAAIYIRVSTREQVENYSIQAQTEKLTALCRSKDWDVYDIFIDGGYSGSNMNRPALNEMLSKLHEIDAVVVYRLDRLSRSQRDTITLIEEYFLKNNVEFVSLSETLDTSSPFGRAMIGILSVFAQLERETIRDRMVMGKIKRIEAGLPLTTAKGRTFGYDVIDTKLYVNEEEARQLQLIYDIFEEEQSITFLQRRLKKLGLKVRTYNCYNNWLTNDLYCGYVSYKDKVHVKGIHEPIISEEQFYRVQEIFTRMGKNPNMNRGSASLLNNLVVCSKCGLGFVHRRKDIVSRGKKYHYRYYSCKTYKHIHELEKCGNKIWRADRLEELIIDRVNNYSFASRNADKEDELDSLNEKLKIEHAKKKRLFDLYVNGSYEVSELDSMMKDIDAQINYYESQIEANEELKKNKKIQENLAHLATVDFDSLEFRKKQLYLKSLINKIYIEGEQVTIEWL

SEQ ID NO: 4909 - protein, 452 aa, synthetic construct
MKAAIYIRVSTQEQVGNYSIQAQTEKLTALCRSKDWDVYDIFIDGGYSGSNMNRPALNEMLGKLHEIDAVVVYRLDRLSRSQRDTTTLIEEYFLKNNVEFVSLSETLDTSSPFGRAMIGILSVFAQLERETIRDRMVMGKIKRIEAGLPLTTAKGRTFGYDVIDTKLYINEEEAKQLQLIYDIFEEEQSITSLQKRLKKLGFKVRTYNRYNNWLTNDLYCGYVSYKDKVHVKGIHEPIISEEQFYRVQEIFTRMGKNPNMNRDSASLLSNLVVCSKCGLGFVHRSKDTMSRGKKYHYRYYSCKTYKHTHELEKCGNKTWRADKLEELIINRVNNYSFASRNVDKEDELDSLNEKLKIEHAKKKRLFDLCINGSYEVSELDSMMNDIDAQINYYESQIEANGGLKKNKKIQENLADLAAVDFDSLEFREKQLYLKSLISKIYIDGEQVTIEWL

SEQ ID NO: 4910 - protein, 452 aa, synthetic construct
MKAAIYIRVSTREQVENYSIQAQTEKLTALCRSKDWDVYDVFIDGGYSGSNMNRPALNEMLSKLHEIDAVVVYRLDRLSRSQRDTITLIEEYFLKNNVEFVSLSETLDTSSPFGRAMIGILSVFAQLERETIRDRMVMGKIKRIEAGLPLTTAKGRTFGYDVIDTKLYINEEEAKQLQLIYDIFEEEQSITFLQKRLKKLGFKVRTYNRYSNWLTNDLYCGYVSYKDKVHVKGIHEPIISEEQFYRVQEIFTRMGKNPNMNRDSASLLNNLVVCSKCGLGFVHRRKDAMSRDKKYHYRYYSCKTYKHIHELEKCGNKIWRADKLEELIIDRVNNYSLASRNVDKEDELGSLNEKLKAEHAKKKRLFDLYINGSYEVSELDSMMSDIDAQINYYESQIEANEELKKNKKIQENLAYLATVDFDSLEFREKQLYLKSLINKIYIDGEQVTIEWL

SEQ ID NO: 4911 - protein, 452 aa, synthetic construct
MKAAIYIRVSTREQVENYSIQAQTEKLTALCRSKDWDVYDIFIDGGYSGSNMNRPALNEMLSKLHEIDAVVVYRLDRLSRSQRDTITLIEEYFLKNNVEFVSLSETLDTSSPFGRAMIGILSVFAQLERETIRDRMVMGKIKRIEAGLPLTTAKGRTFGYDVIDTKLYINEEEAKQLQLIYDIFEEEQSITFLQKRLKRQGFKVHTYSRYNSWLTNDLYCGYVSYKDKVHVKGIHEPIISEEQFYRVQEIFTRMGKNPNMNRDSASLLNNLVVCSKCGLGFVHRRKDTVSRGKKYHYRYYSCKTYKHIHELEKCGNKIWRADKLEELIINRVNNYSFASRNADKEDELDSLNEKLKIEHAKRKRLFDLYINGSYEVSELDSMMNDIDAQINYYESQIEANEELRKNKKIQEDLANLATVDFNSLEFREKQLYLKSLINKIYIDGEQVTIEWL

SEQ ID NO: 4912 - protein, 452 aa, synthetic construct
MKAAIYIRVSTQEQVGNYSIQAQTEKLTALCRSKDWDVYDIFVDGGYSGSNMNRPALNEMLSKLREIDAVVVYRLDRLSRSQRDTTTLIEEYFLKNNVEFVSLSETLDTSSPFGRAMIGILSVFAQLERETIRDRMVMGKIKRIEAGLPLTTAKGRTFGYDVIDTKLYINEEEAKQLRLIYDIFEEEQSITLLQKRLKKLGFKVRTYNRYNNWLTNDLYCGYVSYKDKVRVKGIHEPIISEEQFYRVQEIFTRMGKNPNMNRDSASLLNNLVVCGKCGLSFVHRSKDTMSRGKKYHYRYYSCKTYKHTHELEKCGNKTWRADKLEELIINRVNNYSFASRNVGKEDELDSLNEKLKIEHAKKKRLFDLYINGSYEVSELDSMMNDIDAQINYYESQIVANEELKKNKKIQEGLANLATVDFDSLEFREKQLYLKSLINKIYIDGEQVTIEWL

SEQ ID NO: 4913 - protein, 469 aa, synthetic construct
MCYTTPVRAAVYLRISEDRSGEQLGVARQREDCLKLCDQRKWEPVEYLDNDVSASTGKRRPAYEQMLADITAGKIAAVVAWDLDRLHRRPIELEAFMSLADEKRLALATVAGDVDLATPQGRLVARLKGSVAAHETEHKKARQRRAARQKAERGHPNWSKAFGYLPGPNGPEPDPRTAPLVKQAYANILAGASLGDVRRQWNDAGAFTITGRPWTTTTLSKFLRKPRNAGLRAYKGARYGPVDRDAIVGKAQWSPLVDEATFWAAQAVLDAPGRAPGRKSVRRHLLTGLAGCGKCGNHLAGSYRTDGRVVYVCKACHGVAILADNIEPILYHIVAERLATPDAVDLLRREIHDAAEAEAIRLELETLYGELDRLAVERAEGLLTARQVKISTDIVNAKITKLQARQQDQERLRVLDGIPLGTPQVAGVIAELSPDRFRAVLDVLAEVVVQPVGKSGRIFNPERVQVNWR

SEQ ID NO: 4914 - protein, 452 aa, synthetic construct
MKAAIYIRVSTREQVENYSIQAQTEKLTALCRSKDWDVYDIFIDGGYSGSNMNRPALNEMLSKLHKIDAVVVYRLDRLSRSQRDTITLIEEYFLKNNVEFVSLSETLDTSSPFGRAMIGILSVFAQLERETIRDRMVMGKIKRIEAGLPLTTAKGRTFGYDVIDTKLYINGEEAKQLQLIYDIFEEEQSITFLQKRLKKLGFKVHTYNRYNNWLTNDLYCGYVSYKDKVHVKGIHEPIISEEQFYRVQEIFTRMGKNPNMNRDSASLLNNLVVCSKCGLGFVHRRKDTTSRGKKYHYRYYSCKTYKHTHELEKCGNKIWRADKLEELIINRVNNYSFASRNVDKEDELDSLNEKLKIEHAKKKRLFDLYINGSYEVSELDSMMNDIDAQISYYESQIEANEELKKNKKIQENLADLATVDYDSLEFREKQLYLKSLINKIYIDGEQVTIEWL

SEQ ID NO: 4915 - protein, 485 aa, synthetic construct
MTKKVAIYTRVSTTNQAEEGFSIDEQIGRLTKYAEAMGWQVSDTYTDAGFSGAKLERPAMQRLINDIENKAFDTVLVYKLDRLSRSVRDTLYLVKDVFTRNKIDFISLNESIDTSSAMGSLFLTILSAINEFERENIKERMTMGKLGRAKSGKSMMWTKTAFGYYHNRKTGILEIVPLQATIVEQIFTDYLSGISLTKLRDKLNESGHIGKDIPWSYRTLRQTLDNPVYCGYIKFKGSLFGGMHKPIIPYETYLKVQKELEERQQQTYERNNNPRPFQAKYMLSGMARCGYCGAPLKIVLGHKRRDGSRTMKYHCANRFPRKAKGVTVYNDNKKCDSGTYDLSNLESTVIDTLVGFQENNDSLLKIINGNDQPILDTSSFKKQISQIDKKIQKNSDLYLNDLITMDELRGRIDGLQAEKKLLKAKISENKFNDSTDVFELVKTQLGSIPINELSYDNKKKIVNNLVSKVDVTADNVDIIFKFQLA

SEQ ID NO: 4916 - protein, 469 aa, synthetic construct
MCYTIPVRAAVYLRISEDRSGEQLGVARQREDCLKLCDQRKWVPVEYLDNDVSASTGKRRPAYEQMLADITAGKIAAVVAWDLDRLHRRPIELEAFMSLADEKRLALATVAGDVDLATPQGRLVARLKGSVAAHETEHKKARQRRAARQKAERGHPNWSKAFGYLPGPNGPEPDLRTAPLVKQAYADILAGASLGDVCRQWNDAGAFTITGRLWTTTTLSKFLRKPRNAGLRAYKGARYGPVDRDAIVGKAQWNPLVDEATFWAAQAVLDAPGRAPGRKSVRRHLLTGLAGCGKCGNHLAGSYRTDGRVVYVCKACYGVAILADNIEPILYHIVAERLAMPDAVGLLRREIHDAAEAETIRLELETLYGELDRLAVERAEGLLTARQVKISTDIVNAKITKLQACQQDQERLRVLDGIPLGTPQVAGMIAELSPDRFRAVLDVLAEVVVQPVGKSGRIFNPERVQVNWR

SEQ ID NO: 4917 - protein, 485 aa, synthetic construct
MTKKVAIYTRVSTTNQAEEGFSIDEQIDRLTKYAEAMGWQVSDTYTDAGFSGAKLDRPAMQRLINDIENKAFDTVLVYKLDRLSRCVRDTLYLVKDVFTKNKIDFISLNESIDTSSAMGSLFLTILSAINEFERENIKERMTMGKLGRAKSGKSMMWTKTAFGYYHNRKTGILEIVPLQATIVEQIFTDYLSGISLTKLRDILNESGHIGKDIPWSYRTLRQTLDNPVYCGYIKFKGSLFEGMHKPIIPYETYLKVQKELEERQQQTYERNNNPRPFQAKYMLSGMARCGYCGAPLRIVLGHKRKDGSRTMKYHCANRFPRKTKGITVCNDNKKCDSGTYDLGNLENTVIDNLIGFQENNDSLLKIINCNNQPILDTSSLKEQISQIDKKIQKNSDLYLNDFITMDELKARTDSLQAEKKLLKAKVSENKFNDSTDVFELVKAQLGSIPINELSYDNKKKIVNNLVSKVDVTADNVDIIFKFQLA

SEQ ID NO: 4918 - protein, 452 aa, synthetic construct
MKAAIYIRVSTREQVENYSIQAQTEKLTALCRSKDWDVYDIFIDGGYSGSNMNRPALSEMLSKLHEIDAVVVYRLDRLSRSQRDTITLIEEYFLKNNVEFVSLSETLDTSSPFGRAMIGILSVFAQLERETIRDRMVMGKIKRIEAGLPLTTAKGRTFGYDVIDTKLYINEEEAKQLQLIYDIFEEEQSITFLQKRLKKLGFKVRTYSCYSNWLTNDLYCGYVSYKDKVHVKGIHDPIISEEQFYRVQEIFTRMGRNPNMNRDSASLLNNLVVCSKCGLGFVHRRKDTVSRGKKYHYRYYSCKTYKHIHELEKCGNKIWRADKLEELIINRVNSYSFASRNADKEDELDSLNEKLKIEHAKRKRLFDLYINGSYEVSELDSMMNDIDTQINYYESQIEANEELKKNKKIQENLANLATVDYDSLEFREKQLYLKSLINKIYIDGEQVTIEWL

SEQ ID NO: 4919 - protein, 485 aa, synthetic construct
MTRKVAIYTRVSTTNQAEEGFSIDEQIDRLTKYAEAMGWQVSDTYTDAGLSGAKLERPAMQRLINDIENRAFDTVLVYKLDRLSRSVRDTLYLVKDVFTKNKIDFISLNESIDTGSAMGSLFLTILSAINEFERENIRERMTMGKLGRAKSGKSMMWTKTAFGYYHNRKTGILEIVPLQATIVEQIFTDYLSGISLTKLRDKLNESGHIGKDIPWSYRTLRQTLDNPVYCGYIKFKGSLFEGMHKPIIPYETYLKVQKELGERQQQAYERNNNPRPFQAKYMLSGMARCGYCGAPLRIVLGHKRKDGSRTMKYQCANRFQRKTKGVTVYNDNKKCDSGTYDLSSLENTVIDSLIGFQEDDDSLLKIINGNNQPILDTSSFKEQISQIDKKIQKNSELYLNDFITMDELKDRTDSLQAERKLLKAKISENKFNDGTDVFELAKTQLGSIPINELSYDNKKKIVNNLVSKVDVTADNVDIIFKFQLA

SEQ ID NO: 4920 - protein, 469 aa, synthetic construct
MSYTTPVRAAVYLRISEDRSGEQLGVARQREDCLKLCDQRKWVPVEYLDNDVSASTGKRRPAYEQMLADITAGKIAAVVAWDLDRLHRRPIELEAFMSLADEKRLALATVAGDVDLATPQGRLVARLKGSVAAHETEHKRARQRRAARQKAERGYPNWSKAFGYLPGPNGPEPDPRTAPLVKQAYVDILVGASLGDVCRQWNDAGALTITGRPWTTTALSKFLRKPRNAGLRAYKGARYGPVDRDAIVGKAQWSPLVDEATFWAAQAVLDAPGRAPGRKSVRRHLLTGLAGCGKCGNRLAGSYRTDGRVVYVCKACHGVAILAGNIEPILYHIVAERLAMPDAVDLLRREIHDTVEAETIRLELKTLYGELDRLAVERAEGLLTARQVKVSTDIVNAKITKLQARQLDQERLHVFDGIPLGTPQVAGMIAELSPNRFRAVLDALAEVVVRPVGKGGRILNPERVQVNWR

SEQ ID NO: 4921 - protein, 452 aa, synthetic construct
MKAAIYIRVSTREQVENYSIQAQTEKLTALCRSKDWDVYDIFIDGGYSGSNMNRPALNEMLSKLHEIDAVVVYRLDRLSRSQRDTITLIEEYFLKNNVEFMSLSETLDTSSPFGRAMIGILSVFAQLERETIRDRMVMGKIKRVEAGLPLTTAKGRTFGYDVIDTKLYINEEEAKQLQLIYDIFEEEQSITFLQKRLKKLGFKVRTYNCYNNWLTNDLYCGYVSYKDKVHVKGIHEPIISEEQFHRVQKIFTRMGKNPNMNRDSASLLNNLVVCSKCGLGFVHRRKDTTSRGKKYHYRYYSCKTYKHIHELEKCGNKIWRADKLEELIINRVNNYSFASRSVDKEDELDSLNEKLKIEHAKKKRLFDLYINGSYEVSELDSMMNGIDAQINYYESQIEANEELRKSKKIQENLADLATVDYDSLEFREKQRYLKSLINKIYIDGEQVTIEWL

SEQ ID NO: 4922 - protein, 452 aa, synthetic construct
MKAAIYIRVSTQEQVGNYSIQAQTEKLTALCRSKGWDVYDIFIDGGYSGSNMNRPALNEMLSKLHEIDAVVVYRLDRLSRSQRDTTTLIEEYFLKNNVEFVSLSETLDTSSPFGRAMIGILSVFAQLERETIRDRMVMGKIKRIEAGLPLTTAKGRTFGYDVIDTKLYINKEEAKQLRLIYDIFEEEQSITSLQKRLKKLGFKVRTYNRYNNWLTNDLYCGYVSYKDKVHVKGIHEPIISEEQFYRVQEIFARMGKNSNMNRDSASLLNNLVVCSKCGLGFVHRSKDTMSRGKKYHYRYYSCKTYKHTHELEKCGNKTWRADKLEELIINRVSNYSFASRNVDKEDELDSLNEKLRIERAKKKRLLDLYINGSYEVSELDSMMSDIDAQINHYESQIEANEKLKKNKKIQENLADLATMDFDGLEFREKQLYLKSLINKIYIDGEQVTIEWL

SEQ ID NO: 4923 - protein, 452 aa, synthetic construct
MKAAIYIRVSTREQVENYSIQAQTEKLTALCRSKDWDVYDIFIDGGYSGSNMNRPALNEMLSRLHEIDAVVVYRLDRLSRSQRDTITLIEEYFLKNNVEFVSLSETLDTSSPFGRAMIGILSVFAQLERETIRDRMVMGKIKRIEAGLPLTTAKGRTFGYDVIDTKLYINEEEAKQLQLIYDIFEEEQSITFLQKRLKKLGFKVRTYSRYNNWLTNDLYCGYVSYKDKVHVKGIHEPIISEEQFYRVQEIFTRMGKNPNMNRDSASLLNNLVVCSKCGLGFVHRRKDTVSRGKKYHYRYYSCKTYKHTHELEKCGNKIWRADKLEELIINRVNNYSFVSRNAEKEDELDSLNEKLKLEHAKKKRLFDLYINGSYEVSELDSMMSDIDAQISYYESQIEANEELKRNKKIQENLADLATVDYDSLEFREKQLYLKSLINKIYIDGEQVTIEWL

SEQ ID NO: 4924 - protein, 485 aa, synthetic construct
MTKKVAIYTRVSTTNQAEEGFSIDEQIDRLTKYAEAMGWQVSDTYTDAGLSGAKLERPAMQRLINDIENRAFDTVLVYKLDRLSRSVRDTLYLVKDVFTKNKIDFISLNESIDTSSAMGSLFLTILSAINEFERENIKERMTMGKLGRAKSGKSMMWAKTAFGYYHNRKTGILEIVPLQATIVEQIFTDYLSGVSLTKLRDKLNESGHIGKDIPWSHRTLRQTLDNPVYCGYIKFKDSLFEGMHKPIIPYETYLKVQKELEERQRQTYERNNNPRPFQAKYMLSGMARCGYCGAPLRIVLGHKRRDGSRTMKYHCANRFPRKTKGVTVYNDNKKCDSGTYDLSNLENTVIDILVGFQENNDSLLEIINGDNQPILDASSFKEQISQIDKKIQKNSDLYLNDFITMDELKNRTDSLQAEKKLLKAKISEDKFSDSTDVFELVRTQLGSIPIDELSYDNKKKIVNNLVSKVDVTADNVDIIFKFQLA

SEQ ID NO: 4925 - protein, 485 aa, synthetic construct
MTKKVAIYTRVSTTNQAEEGFSIDEQIDRLTKYAEAMGWQVSDTYTDAGFSGAKLERPAMQRLINDIEDKAFDTVLVYKLDRLSRSVRDTLYLVKDVFTKNKIDFISLNESIDTSSAMGSLFLTILSAINEFERENIKERMTMGKLGRAKSGKSMMWTKTAFGYYHNRKTGILEIVPLQATIVEQIFTDYLSGISLTKLRDKLNESGHIGKDIPWSYRTLRQTLDNPVYCGYIKFKGSLFEGMHKPIIPYETYLKVQKELEERQQQTCVRNNNPRPFQAKYMLSGMARCGYCGAPLRIVLGHKRKDGSRTMKYHCANRFPRKTKGVTVYNDNKKCDSGTYDLSNLENTVIDNLIGFQENNDSLLKIINGNNQPIPDTSSFKKQISQIDKKIQKNSDLYLNDVITMDELKGRTDSLQAEKKLLEAKISENKFNDNTDVFELVKTQLGSIPINELSYDNKKKIVNSLVSKVDVTADNVDIIFKFQLA

SEQ ID NO: 4926 - protein, 452 aa, synthetic construct
MKAAIYIRVSTQEQVGNYSIQAQTEKLTALCRSKDWDVYDIFIDGGYSGSNMNRPALNEMLSKLHEIDAVVVYRLDRLSRSQRDTTTLIEEYFLKNNVEFVSLSETLDTSSPFGRAMIGILSVFAQLERETIRDRMVMGKIKRIEAGLPLTTAKGRTFGYDVIDTKLYINEEEAKQLQLIYDIFEEEQSITSLQKRLKKLGFKVRTYNRYNNWLTNDLYCGYVSYKDKVHVKGIHEPIISEEQFYRVQEIFTRKGKKPNMNRDSASLLNNLVVCSKCGLGFVHRSKDTMSRGKKYHYRYYSCKTYKHTHELEKCGNKIWRADKLEELIINRVNSYSFASRSVDKEDELDSLNERLKIERAKRKRLFDLYINGSYEVSELDSMMNDIDAQINYYESQIEANEELKTNKKIQENLADLATVDFDSLEFREKQLYLKSLINKIYIDGEQVTIEWL

SEQ ID NO: 4927 - protein, 452 aa, synthetic construct
MKAAIYIRVSTQEQVGNYSIQAQTEKLTALCRSKDWDVYDIFVDGGYSGSNMNRPALNEMLSKLQEIDAVVVYRLDRLSRSQRDTTTLIEEYFLKNNVEFVSLSETLDTSSPFGRAMIGILSVFAQLERETIRDRMVMGKIKRIEAGLPLTTAKGRTFGYDVIDTKLYINEEEARQLQLIYDIFEEEQSITSLQKRLKKLGFKVRTYNRYNNWLTNDLYCGYVSYKDKVHVKGIHEPIISEEQFYRVQEIFTRIGKNPNMNRDSASLLNNLVVCGKCGLSFVHRSKDTMSRGKKYHYRYYSCKTYKHTHELEKCGNKTWRADKLEELIINRVNSYSFAGRNVDKEDELDGLNEKLKIEHAKKKRLFDLYINGSYEVSELDSMMNDIDAQINYYESQIEAKEELRKNKKIQENLADLATVDFDSLEFREKQLYLKSLINKIYIDGEQVTIEWL

SEQ ID NO: 4928 - protein, 485 aa, synthetic construct
MTKKVAIYTRVSTTNQAEEGFSIDEQIDRLTKYAEAMGWQVSDTYTDAGFSGAKLERPAMQRLINDIENKAFDTVLVYKLDRLSRSVRDTLYLVKDVFTKNKIDFISLNESINTSSAMGSLFLTILSAINEFERENIKERMTMGKLGRAKSGKSMMWTKTAFGYYHNRKTGILEIVPLQATIVEQIFTDYLSGISLTKLRDKLNESGHIGKDIPWSYRTLRQTLDNPVYCGYIKFKGSLFEGMHKPIIPYETYLKVRKELEERQQQTYERNNNPRPFQAKYMLSGMARCGYCGAPLRIVLGHKRKDGSRTMKYHCANRFPRKTKGITVYNDNKKCDSGAYDLRNLENTVIDNLIGFQENNDSLLKIINGNNQPILDTSSFKEQISQIDKKIQKNSDLYLNDFITMDELKDRTDSLQAEKKLLKAKISENKFNDSTDVFELVKTQLGSIPINELSYDNKKKIVNNLVSKVDVTADNVDIIFKFQLA

SEQ ID NO: 4929 - protein, 452 aa, synthetic construct
MRAAIYIRVSTQEQVENYSIQAQTEKLTALCRSKDWDVYDIFIDGGYSGSNMNRPALNEMLSKLHEIDAVVVYRLDRLSRSQRDTITLIEEYFLKNNVEFVSLSETLDTSSPFGRAMIGILSVFAQLERETIRDRMVMGKIKRIEAGLPLTTAKGRTFGYDVIDTKLYVNEEEAKQLQLIYDIFEEEQSITLLQKRLKKLGFKVRTYSRYNNWLTNDLYCGYVSYKDKVHVKGIHEPIISEEQFYRVQEIFTRTGKNPNMNRDSASLLNNLVVCSKCGLGFVHRRKDTMSRGKKYHYRYYSCKTYKHIHELEKCGNKIWRADKLEELIIDRVNNYNFASRNVDKDDELDSLNEKLKIEHAKKRRLFELYINGGYEVSELDSMMNDIDAQINYYESKIEANEELRKNKKIQEDLANLAAVDFGSLEFREKQLYLKSLISKIYIDGEQVTIEWL

SEQ ID NO: 4930 - protein, 452 aa, synthetic construct
MKAAIYIRVSTREQVENYSIQAQTERLTALCRSKDWDVYDIFTDGGYSGSNMNRPALNEMLGRLHEIDAVVVYRLDRLSRSQRDTITLIEEYFLKNNVEFVSLSETLDTSSPFGRAMIGILSVFAQLERETIRDRMVMGKIKRIEAGLPLTTAKGRTFGYDVIDTKLYINEEEAKQLRLIYDIFEEEQSITFLQKRLKKLGFKVRTYNRYNNWLTNDLYCGYVSYKDKVHVKGIHEPIISEEQFHRVQEIFARMGKNPNMNRGSASLLNNLVVCSKCGLGFVHRRKDAMSRDKKYHYRYYSCKTYKHIHELEKCGNKIWRADELEELVINRVNNYSLAGRNVDKEDELDSLNEKLKIEHAKKKRLFDLYINGSYEVSELDSMMNDIDAQINYYESRIEANEKLKKDKKIQENLADLATVDFDSLEFREKQLYLKSLINKIYIDGEQVTIEWL

SEQ ID NO: 4931 - protein, 485 aa, synthetic construct
MTKKVAIYTRVSTTNQAEEGFSIDEQIDRLTKYAEAMGWQVSDTYTDAGLSGAKLERPAMQRLINDIENKAFDTVLVYKLDRLSRSVRDTLYLVKDVFTKNKIDFISLSESIDTSSAMGSLFLTILSAINEFERENIKERMTMGKLGRAKSGRSMMWTKTAFGYYHNRKTGILEIVPLQATIVEQIFTDYLSGISLTKLRDKLNESGHIGKDIPWSYRTLRQTLDNPVYCGYIKFKDSLFEGMHEPIIPYETYLKVQKELGERQQQTYERNNNPRPFQAKYMLSGMARCGYCGAPLRIVLGHKRKDGSRTMKYHCANRFPRKTKGVTVYNDNKKCDSGTYDLSNLENTVIDNLIGLQENNDSLLEIISGNNQPTLDTSSFKEQISQIDKKIQRNSDLYLNDFITMDELKDRTDSLQAEKRLLKAKISENKFNDSTDVFELVKTQLGSIPINELSYDNKKKIVNSLVSKVDVTADNVDIIFKFQLA

SEQ ID NO: 4932 - protein, 452 aa, synthetic construct
MKAAIYIRVSTREQVENYSIQAQTEKLTALCRSKGWDVYDIFIDGGYSGGNMNRPALNEMLSRLHEIDAVVVYRLDRLSRSQRDTITLIEEYFLKNNVEFVSLSETLDTSSPFGRAMIGILSVFAQLERETIRDRMVMGKIKRIEAGLPLTTAKGRTFGYDVIDTKLYINEEEAKQLQLIYDIFEEEQSITFLQKRLKELGFKVRTYSRYNNWLTNDLYCGYVSYKDKVHVKGIHEPIISEEQFNRVQEIFTRMGKNPNMNRASASLLNNLVVCGKCGLGFVHRRKDAMSRDKKYHYRYYSCKTYKHIHELEKCGNKIWRADKLEELIINRVNSYSSASRNADKEDELDSLNEKLKIEHAKKKRLFDLYINGSYEVSELDSMMNDIDVQINYYESQIEANEELKKNKKIQENLAHLATVDFDSLEFREKQLYLKSLINKIYIDGEQVTIEWL

SEQ ID NO: 4933 - protein, 485 aa, synthetic construct
MSKKVAIYTRVSTTNQAEEGFSIDEQIDRLTKYAEAMGWQVSDTYTDAGLSGAKLERPAMQRLINDIENKAFDTVLVYKLDRLSRSVRDTLYLVKDVFTKNKIDFISLNESIDTSSAMGSLFLTILSAINEFERENIKERMTMGKLGRAKSGKSMMWTRTAFGYYHNRKTGILEIVPLQATIVEQIFTDYLSGISLTKLRDKLNESGHIGKDIPWSYRTLRQTLDNPVYCGYIKFKGSLFEGMHEPIIPYETYLKVQRELEERQQQTYERNNNPRPFQAKYMLSGMARCGYCGAPLKIVLGHKRKDGSRTMKYHCANRFPRKTKGVTVYNDNKKCDSGTYDLSDLENTVIDNLIGFQENNDSLLKIINGNNQPILDTSSFKNQISQIDKKIQKNSDLYLNDFITMDELKNRTDSLQAEKKLLKARISENKFNDSTDVFELVKTQLGSIPINELSYDNKKKIVNNLVSKVDVTADNVDIIFKFQLA

SEQ ID NO: 4934 - protein, 452 aa, synthetic construct
MKAAIYIRVSTQEQVENYSIQAQTEKLTALCRSKDWDVYDIFIDGGYSGSNMNRPALNEMLSKLHEIDAVVVYRLDRLSRSQRDTTTLIEEYFLKNNVEFVSLSETLDTSSPFGRAMIGILSVFAQLERETIRDRMVMGKIKRIEAGLPLTTAKGRTFGYDVIDTKLYINEEEAKQLQLIYDIFEEEQSITSLQKRLKKLGFKVRTYNRYNSWLTNDLYCGYVSYKDKVHVKGIHEPIISEEQFYRVQEIFTRTGKNPNMNRDSASLLNNLVVCSKCGLSFVHRSKDTMSRGKKYHYRYYSCKTYKHTHELEKCGNKTWRADKLEELVINRVNNYSFASRSVDKEDELDSLNEKLKIEHAKKKRLFDLYINGSYEVSELDSMMNDIDAQINYYESQIEADKELKKNKKILENLADLATVDFDSLEFREKQLYLKSLINKIYIDGEQVTIEWL

SEQ ID NO: 4935 - protein, 485 aa, synthetic construct
MTKKVAIYTRVSTTNQAEEGFSIDEQIDRLTKYAEAMGWQVSGTYTDAGLSGAKLERPAMQRLINDIENKAFDTVLVYKLDRLSRSVRDTLYLVKDVFTKNKIDFISLNESIDTSSAMGSLFLTILSAINEFERENIKERMTMGKLGRAKSGKSMMWTKTAFGYYHNRKTGILEIVPLQATIVEQIFTDYLSGISLTKLRDKLNESGHIGKDIPWSYRTLRQTLDNPVYCGYIKFKDSLFEGMHKPIIPYETYLKVQKELEERQQQAYERNNNPRPFQAKYMLSGMARCGYCGAPLKIVLGHKRKDGSRTMKYHCTNRFPRKTKGITVYNDNKKCDSGTYDLSNLENTVIDNLIGFQENNDSLLKIINGNNQPILDTSRFKEQISQIDEKIQRNSDLYLNDFITMDELKDRTDSLQAEKKLLEAKISENKFNDSTDVFELVKTQLGSIPINELSYDNKKKIVNNLVSKVDVTADNVDIIFKFQLA

SEQ ID NO: 4936 - protein, 452 aa, synthetic construct
MKAAIYIRVSTQEQVGNYSIQAQTEKLTALCRSKGWDVYDIFIDGGYSGSNMNRPALNEMLSKLHEIDAVVVYRLDRLSRSQRDTTTLIEEYFLKNNVEFVSLSETLDTSSPFGRAMIGILSVFAQLERETIRDRMVMGKIKRIEAGLPLTTAKGRTFGYDVIDTKLYINEEEAKQLQLIYDIFEEEQSITSLQKRLKKLGFKVRTYNRYNNWLTNDLYCGYVSYKDKVHVKGIHEPIISEEQFYRVQEIFTRMGKNPNMNRDSASLLNNLVVCSKCGLSFVHRSKDTMSRGKKYHYRYYSCKTHKHTHELEKCGNKTWRADKLEELIINRVSNYSFASRNVVKEDELDSLNEKLKIEHAKKKRLFDLYINGSYEVSELDSMMNDIDAQINYYESQIEANEELKKDKKIQENLADLATADFDSLEFREKQLYLKSLINKIYIDGEQVTIEWL

SEQ ID NO: 4937 - protein, 469 aa, synthetic construct
MCYTTPVRAAVYLRISEDRSGEQLGVARQREDCLKLCGQRKWEPVEYLDNDVSASTGKRRPAYEQMLADITAGKIAAVVAWDLDRLHRRPIELEAFMSLADEKRLALATVAGDVDLATPQGRLVARLKGSVAAHETEHKRARQRRAARQKAERGYPNWSRAFGYLPGPSGPEPDPRTAPLVKQAYADILAGASLGDVCRQWNDAGASTITGRPWTTTTLSKFLRKPRNAGLRTYKGARYGPVDRDAIVGKAQWSPLVDEATFWAAQAVLDAPGRAPGRKSVRRHLLTGLAGCGKCGSHLAGSYRTDGRVVYVCKACHGVAILADIIEPILYHIVAERLAMPDAADLLRREIHDAAEAETIRLELETLYGELDCLAVERAEGLLTARQVKISTDIVNAKITKLQARQLDQERLRVFDGIPLGTPQVAGMIAELSPNRFRAVLDVLAEVVVQPVGKSGRIFNPERVQVNWR

SEQ ID NO: 4938 - protein, 470 aa, synthetic construct
MSYTTPVRAAVYLRISEDRSGEQLGVARQREDCLKLCGQRKWVPVEYLDNDVSASTGKRRPAYEQMLADIAAGKIAAVVAWDLDRLHRRPIELEAFMSLADERRLALATVAGDVDLATPQGRLVARLKGSVAAHETEHKKARQRRAARQKAERGHPNWSKAFGYLPGPSGPEPDPRTAPLVKQAYADILAGASLGDVCRQWNDAGAVTITGRPWTITALSKFLRKPRNAGLRTYKGARYGPVDRDAIVGKAQWSPLVDEATFWAAQAVLDAPGRAPGRKSVRRHLLTGLAGCGKCGNHLAGSYRADGRVVYVCKTCHGVAILADNIEPILYHIVAERLAMPDAVDLLRREIHDAAEAEAIHLELETLCGELDRLAVERAEGLLTARQVKISTDIVNAKITKLRARQLDQERLRVLDGIPLGTPQVAGMIAELSPDRFRAVLDVLAEVVVQPVGKSGRIFNPERVQVNWRQ

SEQ ID NO: 4939 - protein, 452 aa, synthetic construct
MKAAIYIRVSTQEQVGNYSIQAQTEKLTALCRSKDWDVYDVFVDGGYSGSNMSRPALNEMLSKLHEIDAVVVYRLDRLSRSQRDTTTLIEEYFLKNNVEFVSLSETLDTSSPFGRAMIGILSVFAQLERETIRDRMVMGKIKRIEAGLPLTTAKGRTFGYDVIDTKLYINEEEAKQLQLIYDIFEEERSITSLQKRLKKLGFKVRTYNRYNNWLTNDLYCGYVSYKDKVHVKGIHEPIISEEQFYRVQEIFTRMGKNPSMNRDSASLLSNLVVCSKCGLGFVHRSKDTMSRGKKYHYRYYSCKTYKHTHELEKCGNKIWRADKLEELIINRVNNYSFASRNADKEDELDSLNEKLKIEHARKKRLFDLYINGSYEVSELNSMMNDIDAQINYYESQIEASEELKKNKKIQENLADLATVDFDSLEFREKQLYLKSLINKIYIDGEQVTIDWL

SEQ ID NO: 4940 - protein, 485 aa, synthetic construct
MTKKVAIYTRVSTTNQAEEGFSIDEQIDRLTKYAEAMGWQVSDTYTDAGFSGAKLERPAMQRLINDIENKAFDTVLVYKLDRLSRSVRDTLYLVKDVFTKNKIDFISLSESIDTSSAMGSLFLTILSAINEFERENIKERMTMGKLGRAKSGKSMMWTKTAFGYYHNRKTGILEIVPLQATIVEQIFADYLSGISLTKLRDKLNESGHIGKDIPWSYRTLRQTLDNPVYCGYIKFKDSLFEGMHKPIIPYETYLKVQKELEERQQQTYERNNNPRPFQAKYMLSGMARCGYCGAPLKIVLGHRRKDGSRTMKYHCANRFPRKTKGVTVYNDNKKCDSGTYDLSNLENIVIDNLIGFQENNDSLLKIINGNNRPILDTSSFKKQISQIDKKIQKNSDLYLNDFITMDELKDRTDSLQAEKKLLKAKISENKFNNSTDVFELVKTQLGGIPINELSYDNKKKIVNNLVSKVDVTADNVDIIFKFQLA

SEQ ID NO: 4941 - protein, 452 aa, synthetic construct
MKAAIYIRVSTREQVENYSIQAQTEKLTALCRSKDWDVYDIFIDGGYSGSNMNRPALNEMLSKLHEIDAVVVYRLDRLSRSQRDTITLIEEYFLKNNVEFVSLSETLDTSSPFGRAMIGILSVFAQLERETIRDRMVTGKIKRIEAGLPLTTAKGRTFGYDVIDTKLYINEEEAKQLQLVYDIFEEERSITFLQKRLKTLGVKVHTYNRYNNWLTNDLYCGYVSYKDKVHVKGIHEPIISEEQFYRVQEIFTRMGKNPNMNRDSASLLNNLVVCSKCGLGFVHRRKDTTSRGKKYHYRYYSCKTYKHTHELEKCGNKIWRADKLEELIINRVNNYSFASRNVDKEDELDSLNEKLKTEHAEKKRLFDLYINGSYEVSELDSMMSDIDARINYYEGQIEANEELKKNKKIQENLANLATVDYDSLEFREKQLYLKSLINKIYIDGEQVTIEWL

SEQ ID NO: 4942 - protein, 485 aa, synthetic construct
MTKKVAIYTRVSTTNQAEEGFSIDEQIDRLTKYAEAMGWQVSDTYTDAGFSGAKLERPAMQRLINDIENKAFDTVLVYKLDRLSRSVRDTLYLVKDVFTKNKIDFISLNESIDTSSAMGSLFLTILSAINEFERENIKERMTMGKLGRAKSGKSMMWSKTAFGYYHNRKTGILEIVPLQATIVEQIFTDYLSGISLTKLRDKLNESGHIGKDIPWSYRTLRQTLDNPVYCGYIKFKDSLFEGMHKPIIPYETYLKVQKELEKRQQQTYERNNNPRPFQAKYMLSGMARCGYCGAPLRIVLGHKRKDGSRTMKYHCANRFPRKTKGVTVYNDNKKCDSGTYDLSDLENSVIDNLIGFQENNDSLLGIINGNNRPILDTSSFREQISQIDKKIQKNSDLYLNDFITMDELKGRTDSLQAEKKLLKARISEDKFNDSTDVFELVKTQLGSIPINELSYDNKKKIVNNLVSKVDVTADNVDIIFKFQLA

SEQ ID NO: 4943 - protein, 452 aa, synthetic construct
MKAAIYIRVSTREQVENYSIQAQTEKLTALCRSKDWDVYDIFIDGGYSGSNMNRPALNEMLSKLHEIDAVVVYRLDRLSRSQRDTITLIEEYFLKNNVEFVSLSETLDTSSPFGRAMIGILSVFAQLERETIRDRMVMGKIKRIEAGLPQTTAKGRTFGYDVIDTKLYINEEEAKQLQLIYDIFEEEQSITFLQKRLKKLGFKVRTYNCYNNWLTNDLYCGYVSYKDKVHVKGIHEPIISEEQFYRVQEIFTRMSKNPNMNRDSASLLNNLVVCSKCGLGFVHRRKDAMSRSKKYHYRYYSCKTYKHIHELEKCGNKIWRADKLEELIISRVNNYSLASRNADKEDELDSLNEKLKIEHAKKKRLFDLYINGRYEVSELDSMMNDIDAQINYYESQIEANEELKKSKKIQENLAYLATVDFDSLEFREKQLYLKSLINKIYIDGEQVTIEWL

SEQ ID NO: 4944 - protein, 452 aa, synthetic construct
MKAAIYIRVSTQEQVGNYSIQAQTEKLTALCRSKDWDVYDIFIDGGYSGSNMNRPALNEMLSKLHEIDAVVVYRLDRLSRSQRDTTTLIEEYFLKNNVEFVSLSETLDTSSPFGRAMIGILSVFAQLERETIRDRMVMGKIKRIEAGLPLTTAKGRTFGYDVIDTKLYINEEEAKQLRLIYDIFEEEQSITSLQKRLKKLGLKVHTYNRYNSWLTNDLYCGYVSYKDKVHVKGIHEPIISEEQFYRVQEIFTRMGKNPNMNRDSASLLSNLVVCSKCGLGFVHRSKDTMSRGKKYHYRYYSCKTYKHTHELEKCGNTTWRADKLEELIINRVNNYSFASRNVDKEDELDSLNEKLRIEHAKKKRLFDLYINGSYEVSELDSMMSDIDAQINHYESQIEANEKLKKNKKVQENLADLATVDFDSLGFREKQLYLKSLINKIYIDGEQVTIEWL

SEQ ID NO: 4945 - protein, 469 aa, synthetic construct
MSYTTPVRAAVYLRISEDRSGEQLGVARQREDCLKLCDQRKWVPVEYLDNDVSASTGKRRPAYEQMLADITAGKIAAVVAWDLDRLHRRPIELEAFMSLADERRLALATVAGDVDLATPQGRLVARLKGSVAAHETEHKRARQRRAARQKAERGHPNWSKAFGYLPGPNGPEPDPRTAPLVKQAYADILAGASLGDVCRQWNDVGAFTITGRPWTVTTLSKFLRKPRNAGLRAYKGARYGPVDRDAIVGKAQWSPLVDEATFWAAQVVLDAPGRAPGRKSVRRHLLTGLAGCGKCGNHLAGSYRTDGRVVYVCKACHGVAILADNIEPILYHIVAERLAMPDAVDLLRREIHDAAEAETTRLELETLYGELDRLAVERAEGLLTARQVKISTDIVNAKITKLQARQQDQERLRVLDGIPLGTPQVAGTIAELSPDRFRAVLDVLAEVVVQPVGKSGRIFNPERVQVNWR

SEQ ID NO: 4946 - protein, 469 aa, synthetic construct
MSYTTPVRAAVYLRISEDRSGEQLGAARQREDCLKLCDQRRWVPVEYLDNDVSASTGKRRPAYEQMLADITAGKIAAVVAWDLDRLHRRPTELEAFMSLADEKRLALATVAGDVDLATPQGRLVARLKGCVAAHETEHKKARQRRAARQKAERGLPNWSKAFGYLPGPNGPEPDPRTAPLVKRAYADILAGASLGDVCRQWNDAGAFTITGRPWTTTTLSKFLRKPRNAGLRAYKGARYGPVDRDAIVGRAQWSPLVDEATFWAAQAVLDAPGRAPGRKSVRRHLLTGLAGCGKCGNHLAGSYRTDGRVVYVCKACHGVAILADNIEPILYHIVAERLAMPGAVDLLRRENHDAAEAEAIRLELETLYGELDRLAVERAEGLLTARQVKISTDIVNAKIAKLQARQLNQERLRVLDGIPLGTPQVAGAIAELSPDRFRAVLDVLAEVVVQPVGRSGRVFNPERVQVNWR

SEQ ID NO: 4947 - protein, 485 aa, synthetic construct
MTKKVAIYTRVSTTNQAEEGFSIDEQIDRLTKYAEAMGWLVSDTYTDAGFSGAKLERPAMQRLINDIGNKAFDTVLVYKLDRLSRSVRDTLYLVKDVFTKNRIDFISLSESIDTSSAMGSLFLTILSAINEFERENIKERMTMGKLGRAKSGKSMMWTKTAFGYYHNRKTGILEIVPLQATIVEQIFTDYLSGISLTKLRDKLNESGHVGKDIPWSYRTLRQTLDNPVYCGYIKFKDSLFEGMHKPIIPYETYLKVQKELEERQQQTYERNNNPRPFQAKYMLSGMARCGYCGAPLKIVLGHKRKDGSRTMKYHCANRFPRKTKGVTVYNDNKKCDSGTYDLSSLENTVIDSLIGFQGNNDSLLKLINGNNQPILDASSFKNQINQIDKKIQKNSDLYLNDFITMDELRDRTDSLQAEKKLLKAKISENKFNDSTDVFELVKTQLGSVPINELSYDNKKKIVNNLVSKVDVTADNVDIIFKFQLA

SEQ ID NO: 4948 - protein, 452 aa, synthetic construct
MKAAIYIRVSTREQVENYSIQAQTEKLTALCRSKDWDVYDIFIDGGYSGSNMNRPALNEMLSKLHEIDAVVVYRLDRLSRSQRDTITLIEEYFLKNNVEFVSLSETLDTSSPFGRAMIGILSVFAQLERETIRDRMVMGKIKRIEAGLPLTTAKGRTFGYDVIDTKLYVNGEEAKQLQLIYDIFEEEQSITFLQKRLKKLGFKVRTYNRYNNWLTNDLYCGYVSYKDKVHVKGIHEPIISEEQFYRVQEIFTRMGKNPNMNRDSASLLNNLVVCSKCGLGFVHRRKDAMSRDKKYHYRYYSCKTYKHIHELEKCGNKIWRADKLEELIINRVNNYSLASRNVDKEDELDSLNEKLKTEHAKKKRLFDLYINGSYEVSELDSMMNDIDAQINYYESQIEANEELKRNKKIQENLAYLATVDFDSLEFREKQLYLKSLINKIYIDGEQVTIEWL

SEQ ID NO: 4949 - protein, 452 aa, synthetic construct
MKAAIYIRVSTREQVENYSIQAQTEKLTALCRSKDWDVYDIFIDGGYSGSNMNRPALNEMLSKLHEIDAVVVYRLDRLSRSQRDTITLIEEHFLKNNVEFVSLSETLDTSSPFGRAMIGILSVFAQLERETIRDRMVMGKIKRIEAGLPLTTAKGRTFGYDVIDTKLYINEEEAKQLQLIYDIFEEEQSITFLQKRLKKLGFKVRTYNRYNNWLTNDLYCGYVSYKDKVHVRGIHEPIISEEQFNRVQEIFTRMGKNPNMNRDSASLLNNLVVCSKCGLGFVHRRKDSMSRDKKYHYRYYSCKTYKHIHELEKCGNKIWRADKLEELIIDRVNNYSFASRNADKEDELDSLYEKLKIEHAKKKRLFDLYINGSYEVSELDSMMKDIDAQINYYESQIKANEELKKNKKIQENLAYLATVDFESLEFREKQLYLKSLINKIYIDGEQVTIEWL

SEQ ID NO: 4950 - protein, 452 aa, synthetic construct
MKAAIYIRVSTREQVENFSIQAQTEKLTALCRSKDWDVYDIFIDGGYSGSNMNRPALNEMLSKLHEIDAVVVYRLDRLSRSQRDTITLIEEHFLKNNVEFVSLSETLDTSSPFGRAMIGILSVFAQLERETIRDRMVMGKIKRIEAGLPLTTAKGRTFGYDVIDTKLYINEEEAKQLRLIYDIFEEEQSITFLQKRLKKLGFKVRTYNRYNSWLTNDLYCGYVSYKDKVHVKGIHEPIISEEQFYRVQEIFTRMGKNPNMNRDSASLLNNLVVCSKCGLGFVHRRKDTMSRGKKYHYRYYSCKTYKHIHELEKCGNKIWRADKLEELIIDRVNNYSFASRNVDKEDELDSLSEELKIEHAKRKRLFDLYINGSYEVSELDSMMNDIDAQINYYESQIVANEELKRNKKIQENLANLATVDYDSLEFREKQLYLKSLINKIYIDGEQVIIEWL

SEQ ID NO: 4951 - protein, 452 aa, synthetic construct
MKAAIYIRVSTQEQVENYSIQAQTEKLTALCRSKDWDVYDIFIDGGYSGSNMNRPALNEMLSKLHEIDAVVVYRLDRLSRSQRDTTTLIEEYFLKNNVEFVSLSETLDTSSPFGRAMIGILSVFAQLERETIRDRTVMGKIKRVEAGLPLTTAKGRTFGYDVIDTKLYINKEEARQLQLIYDIFEEEQSITSLQKRLKKLGFKVRAYNRYNNWLTNDLYCGYVSYKDKVHVKGIHEPIISEEQFYRVQEIFTRMGKSPNTNRDSASLLNNLVVCSKCGLGFVHRSKDTMSRGKKYHYRYYSCKTYKHTHELEKCGNKTWRADKLEELIIHRVNSYSFASRDADKEDELDSLNEKLKIEHAKKKRLFDLYINGSYEVSELESMMNDIDAQINYYESQIEANEGLKKNKKIQENLADLAAVDFDSLEFREKQLYLKSLINKIYIDGEQVTIEWL

SEQ ID NO: 4952 - protein, 452 aa, synthetic construct
MKAAIYIRVSTQEQVGNYSIQAQTEKLTALCRSKDWDVYDIFIDGGYSGSNMNRPALNEMLSKLHEIDAVVVYRLDRLSRSQRDTTTLIEEYFLKNNVEFVSLSETLDTSSPFGRAMIGILSVFAQLERETIRDRMVMGKIKRVEAGLPLTTAKGRTFGYDVIDTKLYINEEEAKQLQLIYDIFEEEQSITFLQKRLKKLGFKVRTYNRYNSWLTNDLYCGYVSYKDKVHVKGIHEPIISEEQFYRVQEIFTRMGKNPNMNRDSASLLNNLVVCSKCGLGFVHRSKDTMCRGKKYHYRYYSCKTYKHTHELEKCGNKTWRADKLEELIISRVNNYSLASRNVDKEDELDCLNEKLKIEHAKKKRLFDLYINGSYEVSELDSMMDDIDAQINYYESQIEASEELKKNKKILENLAGLAAVDFDSLEFREKQLYLKSLINKVYIDGEQVTIEWL

SEQ ID NO: 4953 - protein, 452 aa, synthetic construct
MKAAIYIRVSTQEQVGNYSIQAQTEKLTALCRSKDWDVYDIFVDGGYSGSNMNRPALNEMLSKLHEIDAVVVYRLDRLSRSQRDTTTLIEEYFLKNNVEFVSLSETLDTSSPFGRAMIGILSVFAQLERETIRDRMVMGKIKRIEAGLPLTTAKGRTFGYDVIDTKLYINEEEAKQLQLIYDIFEEEQSITFLQKRLKKLGFRVRSYNRYNNWLTNDLYCGYVSYKDKVHVKGIHEPIISEEQFYRVQEIFTRMGKNPNMNRDSASLLNSLVVCSKCGLSFVHRSKDTMSRGKKYHYRYYSCKTYKHTHELEKCGNKIWRADKLEELIIDRVNNYSFASRNVDKEGELDSLSEKLKIEHAKKRRLFDLYINGSYEVSELDSMMNDIDAQINYYESQIEANEELKKNKRIRENLADLATVDFDSLEFREKQLYLKSLINKIYIDGEQVTIEWL

SEQ ID NO: 4954 - protein, 485 aa, synthetic construct
MTKKVAIYTRVSTTNQAEEGFSIDEQIDRLTKYAEAMGWQVSDTYTDAGSSGAKLERPAMQRLINDIENKAFDTVLVYKLDRLSRSVRDTLYLVKDVFTKNKIDFISLNESIDTSSAMGSLFLTILSAINEFERENIKERMTMGKLGRAKSGKSMMWTKTAFGYYHNRKTGILEIVPLQAAIVEQIFTDYLSGISLTKLRDKLNESGHIGKDIPWSYRTLRQTLDNPVYCGYIKFKDSLFEGMHKPIIPYETYLKVQKELEERQQQTYERNNNPRPFQAKYMLSGMARCGYCGAPLKIVLGHKRKDGSRTMKYHCANRFPRKTKGVTVYNDNKKCDSGTYDLRNLENTVIDNLTGFQENNDSLLKIINGNNQPILDTSSLKKQISQIDKKIQKNSDLYLNDFITMDELKDRTDSLQAEKKLLKAKISENKFNDSTDVFELVKTQLGSIPINELSYDNKKKIVNNLVSKVDVTADNVDIIFKFRLA

SEQ ID NO: 4955 - protein, 452 aa, synthetic construct
MKAAIYIRVSTQEQVENYSIQAQTEKLTALCRSKDWDVYDIFIDGGYSGSNMNRPALNEMLSKLHEIDAVVVYRLDRLSRSQRDTTTLIEEYFLKNNVEFVSLSETLDTSSPFGRAMIGILSVFAQLERETIRDRMVMGKIKRIEAGLPLTTAKGRTFGYDVIDTKLYINEEEAKQLRLIYDIFEEEQSITSLQKRLKKLGFKVRTYNRYNNWLTNDLYCGYVSYKDKVHVKGIHEPIISEEQFYRVQEIFARMGKNPNMNRDSASLLNNLVVCSKCGLGFVHRSKDTMSRGKKYHYRYYSCKTYKHTHELEKCGNKIWRADKLEELIINRVNNYSFASRNADREDELGNLNEKLKIEHAKKKRLFDLCINGSYEVSELDSMMNDIDAQVNYYESQIVANEELKKNKKIQESLANLATVDFDSLEFREKQLYLKSLINKIYIDGEQVTIEWL

SEQ ID NO: 4956 - protein, 469 aa, synthetic construct
MSYTTPVRAAVYLRISEDRSGEQLGVARQREDCLKLCGQRKWVPVEYLDNDVSASTGKRRPAYEQMLADIAAGRIAAVVAWDLDRLHRRPIELEAFMSLADEKRLALATVAGDVDLATPQGRLVARLKGSVAAHETEHKKARQRRAARQKAERGLPNWSKAFGYLPGPNGPEPDPRIAPLVKQAYADILAGASLGDVCRQWNDAGAFTITGRPWTTTALSKFLRKPRNAGLRAYKGARYGPVDRDAIVGKAQWSPLVDEATFWAAQAVLDAPGRAPGRKSVRRHLLTGLAGCGKCGNHLAGSYRTNGRVVYVCKACHGVAILADNIEPILYHIVAERLAMPDAVDSLRREIHDAAEAETIRLELETLYGELDRLAVERAEGLLTARQVKISTDIVNAKITKLQARQLDQERLRVLDGIPLGTPQVAGMIAELSPDRFRAVLDVLAEVVVQPVGKSGRILNPERVQVNWR

SEQ ID NO: 4957 - protein, 485 aa, synthetic construct
MTKKVAIYTRVSTTNQAEEGFSIDEQIDRLTKYAEAMGWQVSDTYTDAGLSGAKLERPAMQRLINDIENKAFDTVLVYKLDRLSRSVRDTLYLVKDVFTKNKIDFISLNESIDTSSAMGSLFLTILSAINEFERENIKERMTMGKLGRAKSGKSMMWTKTAFGYYHNRKTGILEIEPLQATIVEQIFTDYLSGISLTKLRDKLNESGHIGKDIPWSYRTLRQTLDNPVYCGYIKFKDSLFEGMHKPIIPYETYLRVQKELEERQQQTYERNNNPRPFQAKYMLSGMARCGYCGAPLRIVLGRKRKDGSRTMKYHCANRFPRKTKGITVYNDNKKCDSGTYDLRNLENIVIGNLIGFQENNDSLLKIINGNNQPILDTSSFKKQISQIDKKIQKNSDLYLNDFITMDELKDRTDSLQAEKKLLKAKISENRFNDSTDVFELVKTQLGSIPINELSYDNKKRIVNNLVSKVDVTANNVDIIFKFQLA

SEQ ID NO: 4958 - protein, 452 aa, synthetic construct
MKAAIYIRVSTREQVENYSIQAQTEKLTALCRSKGWDVYDIFIDGGYSGSNMNRPALNEMLSKLHEIDAVVVYRLDRLSRSQRDTITLIEEYFLKNNVEFVSLSETLDTSSPFGRAMIGILSVFAQLERETIRDRMVMGKIKRIEAGLPLTTARGRTFGYDVIDTKLYINEEEAKQLRLIYDIFEEERSITFLQKRLKELGFKVRTYNRYNNWLTNDLYCGYVSYKDKVHVKGIHEPIISEEQFYRVQEIFTRMGKNPNMNRDSASLLNNLVVCSKCGLGFVHRRKDAMSRDKKYHYRYYSCKTYKHIHELEKCGNKIWRADKLEELIIDRVNNYSFASRNADKEDELDSLNEKLKIEHAKKKRLFDLYINGSYEVSELDSMMNDIDAQISYYESQIEANEELRKSKRIQENLANLATVDFDSLEFREKQLYLKSLINKIYIDDEQVTIEWL

SEQ ID NO: 4959 - protein, 452 aa, synthetic construct
MKAAIYIRVSTREQVENYSIQAQTEKLTALCRSKDWDVYDIFIDGGYSGSNMNRPALNEMLSKLHEIDAVVVYRLDRLSRSQRDTITLIEEYFLKNNVEFVSLSETLDTSSPFGRAMIGILSVFAQLERETIRDRMVMGKIKRIEAGLPLTTAKGRTFGYDVIDTKLYINEEEAKQLQLIYDIFEEEQSITFLQKRLKELGLKVRTYSRYNSWLTNDLYCGYVSYKDKVHVKGIHEPIISEEQFYRVQEIFARMGKNPNMNRDSASLLNSLVVCSKCGLGFVHRRKDTMSRGKKYHYRYYSCKTYKHTHELEKCGNKIWRADKLEELIINRVNNYSFASRNVDKEDELDSLNEKLKVEHAKRKRLFDLYINGSYEVSELDSMMNDIDAQINYYESQIEASEELKKNEKIQENPAALATVDFDSLKFREKQLYLKSLINKIYIDGEQVTIEWL

SEQ ID NO: 4960 - protein, 485 aa, synthetic construct
MTKKVAIYTRVSTTNQAEEGFSIDEQIDRLTKYAEAMGWQVSDTYTDAGISGAKLERPAMQRLIDDIENKAFDTVLVYKLDRLSRSVRDTLYLVKDVFTKNKIDFISLNESIDTSSAMGSLFLTILSAINEFERENIKERMTMGKLGRAKSGKSMMWTKTAFGYYHNRKTGILEIVPLQASIVEQIFTDYLSGISLTKLRDKLNESGHIGKDIPWSYRTLRQTLDNPVYCGYIKFKDSLFKGMHKPIIPYETYLKVQKELEERQQQTYERNNNPRPFQAKYMLSGMARCGYCGAPLGIVLGHKRKDGSRTMKYHCANRFPRKTKGVTVYNDNKKCDSGTYDLSNLENTVIDNLIGLQENNDSLLKIINGDNQPILDTSSFKKQISQIDKKIQKNSDLYLNDFITMDELKDRTDSLQAEKKLLKAKISENKFNDRTDVFELVKTQLGSIPINELSYDNKKKIVNNLVSKVDVTADNVDIIFKFQLA

SEQ ID NO: 4961 - protein, 469 aa, synthetic construct
MSYTTPVRAAVYLRISEDRSGEQLGVARQREDCLKLCGQRKWVPVEYLDNDVSASTGKRRPAYEQMLADITAGKIAAVVAWDLDRLHRRPIELEAFMSLADEKRLALATVAGDVDLATPQGRLVARLKASVAAHETEHKKARQRRAARQKAERGHPNWSKAFGYLPGPNGPEPDPRTAPLVKQAYADILAGASLGDVCRQWNDAGAFTITGRPWTTTTLSKFLRKPRNAGLRAYKGARYGPVDRDAIVGKAQWSPLVDEATFWAAQAVLDAPGRAPGRKSVRRHLLTGLAGCGKCGNHLAGSYRTDGQIVYVCKACHGVAILADNIEPILYHIVAERLAMPDAVDLLRRETHDAAEAEIIRLELETLYGELDRLAVERAEGLLTARQVKISTDIVSAKITKLQARQLDQERLRVFDGIPLGTPQVAGTIAELSPDRFRAVLDVLAEVVVQPVGKSGRIFNPERVQVNWR

SEQ ID NO: 4962 - protein, 469 aa, synthetic construct
MSYTTPVRAAVYLRISEDRSGEQLGVARQREDCLKLCDQRKWVPVEYLDNDVSASTGRRRPAYEQMLADITAGKIAAVVAWDLDRLHRRPIELEAFMSLADEKRLALATVAGDVDLATPQGRLVARLKGCVAAHETEHKKARQRRAARQKAERGHPNWSKAFGYLPGPSGPEPDPRTAPLVKQAYADILAGASLGDVCRQWNDAGAFTITGRPWTTTTLSKFLRKPRNAGLRAYKGARYGPVDRNAIVGKAQWSPLVDEATFWAAQAVLDAPGRAPGRKSVRRHLLTGLAGCGKCGNHLAGSYRTDGRVVYVCKACHGVSILAVNIEPILYHTVAERLAMPDVVDLLRREIHDAAEAETIRLELETLYDELDRLAVERAEGLLTARQVKISTDIVNAKITKLQACQLDQERLRVLDGIPLGTPQVAGVIAELSPDRFRAVLDVLAEVVVQPVGKCGRIFNPERVQVNWR

SEQ ID NO: 4963 - protein, 452 aa, synthetic construct
MKAAIYIRVSTREQVENYSIQAQTEKLTALCRSKDWDVYDIFVDGGYSGSNMNRPALTEMLSKLHEIDAVVVFRLDRLSRSQRDTITLIEEYFLKNNVEFVSLSETLDTSSPFGRAMIGILSVFAQLERETIRDRMVMGKIKRVEAGLPLTTAKGRTFGYDVVDTRLYINEEEARQLQLIYDIFEEEQSITFLQKRLKKLGFKVRTYSCYNNWLTNDLYCGYVSYKDKVHVKGIHEPIISEEQFYRVQEIFTRMGKNPNMNRDSASLLHNLVVCSKCGLGFVHRRKDTMSRGKRYHYRYYSCKTYKHIHELEKCGNKIWRADELEELIIDRVNNYSFASRNADKEDELDSLNEKLKVEHAKKKRLFDLHISGSYEVSELDSMMSDIDAQISYCESQIEANEELRKNKKIQENLADLATVDFDSLEFREKQLYLKSLINKIYIDGEQVTIEWL

SEQ ID NO: 4964 - protein, 485 aa, synthetic construct
MTKKVAIYTRVSTTNQTEEGFSIDEQIDRLTKYAEAMGWQVSDTYTDAGFSGAKLERPAMQRLINDIENKAFDTVLVYKLDRLSRSVRDTLYLVKDVFTKNKIDFISLNESIDTSSAMGSLFLTILSAINEFERENIKERMSMGKLGRAKSGKSMMWTKTAFGYSHNRKTGILEIVPLQATIVEQIFTDYLSGISLTKLRDKLNESGHIGKDIPWSYRTLRQTLDNPVYCGYIKFKGSLFKGMHKPIIPYEIYLKVQKELEERQQQTYERNNNPRPFQAKYMLSGMARCGYCGAPLRIVLGHKRKDGSRTMKYHCANRFPRKTRGVTVYNDNKKCDSGTYDLSNLENTVIENLIGFQENNDSLLKIINGNNQPILDTSSFKERISQIDKKIQKNSDLYLNDLITMDELRERTDSLQAEKKLLKAKVSENKFNDSTDVFELVKTQLGSIPISELSYDNKKKIVNNLVSKVDVTADNVDIIFKFQLA

SEQ ID NO: 4965 - protein, 469 aa, synthetic construct
MCYTTPVRAAVYLRISEDRSGEQLGVARQREDCLKLCDQRKWVPVEYLDNDVSASTGRRRPAYEQMLADITAGKIAAVVAWDLDRLHRRPIELEAFMSLADEKHLALATVAGDVDLATPQGRLVARLKGSVAAHETEHKKARQRRAARQKAERGYPNWSKAFGYLPGPNGPEPDPRTAPLVEQAYADVLAGASLGDVCRQWNDVGAFTITGRPWTTTTLSKFLRKPRNAGLRAYKGARYGPVDRDAIVGKAQWSPLVDEATFWAAQAVLDAPGRAPGRKSVRRHLLTGLAGCGKCGNHLAGSYRTDGRVVYVCKACHGVAILADNIESILYHIVAERLAMPDAVDLLRREIHDAAEAETIRLELETLYGELDRLAVERAEGLLTARQVKISTDIVNAKITKLRACQLDQERLRVFAGIPLGTPRVAGMIAGLSPDRFRAVLDVLVEVVVQPVGKSGRIFNPERVQVNWR

SEQ ID NO: 4966 - protein, 452 aa, synthetic construct
MKAAIYIRVSTQEQVENYSIQAQTEKLTALCRSKGWDVYDIFIDGGYSGSNMNRPALNEMLSKLHEIDAVVVYRLDRLSRSQRDTTTLIEEYFLKNNVEFVSLSETLDTSSPFGRAMIGILSVFAQLERETIRDRMVMGKIKRIEAGLPLTTAKGRTFGYDVIDTKLYINEEEAKQLQLIYDIFEEEQSITSLQKRLKRLGFKVRTYNRYNNWLTNDLYCGYVSYKDKVHVKGIHEPIISEEQFYRVQEIFTRMGKNPNMNRDSASLLNSLVVCSKCGLGFVHRSKDTMSRGKKYHYRYYSCKTYKHTHELEKCGNKIWRADKLEELIINRVNNYSLASRNVDREDELDSLNEKLQIERAKRKRLFDLYINGSYEVSELDSMMSDIDAQINHYENQIEANEKLEKNKKIQENLADLATVDFDSLEFRDKQLYLKSLINKIYIDGEQVTIEWL

SEQ ID NO: 4967 - protein, 469 aa, synthetic construct
MSYTTPARAAVYLRISEDRSGEQLGVARQREDCLKLCVQRKWVPVEYLDNDVSASTGKRRPAYEQMLADIAAGKIAAVVAWDLDRLHRRPVELEAFMSLADEKRLALATVAGDVDLATPQGRLVARLKGCVAAHETEHKKARQRRAARQKAERGLPNWSKAFGYLPGPNGPEPDPRAAPLVKQAYADILAGASLGDVCRQWNDAGAFTITGRPWTTATLSKFLRKPRNAGLRAYKGARYGPVDRDAIVGKAQWGPLVDEATFWAAQAVLDAPGRAPGRKSVRRHLLTGLAGCGKCGNHLAGSYRTDGRVVYVCKACHGIAILADNIEPILYHIVAERLAMPDAVDLLRREIHDAAEAEAIRLELETLYGELDHLAVERAEGLLTARQVKISTDIVNAKITKLQARQLDQERLRVFGGIPLGTPQVAGVIAELSSDRFRAVLDVLAEVVVQPVGKSGRNFNPERVQVNWR

SEQ ID NO: 4968 - protein, 485 aa, synthetic construct
MTKKVAIYTRVSTTNQAEEGFSIDEQIDRLTKYAEAMGWQVSDTYTDAGLSGAKLERPAMQRLINDIENKAFDTVLVYKLDRLSRSVRDTLYLVKDVFTKNKIDFISLNESIDTSSAMGSLFLTILSAINEFERENIKERMTMGKLGRAKSGKSMMWAKTAFGYYHNRKTGILEIVPLQAAIVEQIFTDYLSGISLTKLRDKLNESGHIGKDIPWSYRTLRQTLDNPVYCGYIKFKDSLFEGLHKPIIPYGTYLKVQKELEERQRQAYERNNNPRPFQAKYMLSGMARCGYCGAPLRIVLGRKRKDGSRTMKYHCANRFPRKTKGITVYNDNKKCDSGAYDLSNLENTVIDNLIGFQENNDSLLKIINGNNQPILDTSSLKEQISQIDKKIQKNSDLYLNDFITMDELRDRTDSLQAEKKQLKAKISENKSNDSTGVFELVKTQLGSIPINELSYENKKKIVNNLVSKVDVTADDVDIIFKFQLA

SEQ ID NO: 4969 - protein, 485 aa, synthetic construct
MTKKVAIYTRVSTTNQAEEGFSIDEQTDRLTKYAEAMGWQVSDTYTDAGFSGAKLERPAMQRLINDIENKAFDTVLVYKLDRLSRSVRDTLYLVKDVFTKNNIDFISLSESIDTSSAMGSLFLTILSAINEFERENIRERMTMGKLGRAKSGKSMMWTKTAFGYYHNRKTGILEIVPLQAAIVEQIFTDYLSGISLTKLRDKLNESGHIGKVIPWSYRTLRQTLDNPVYCGYIKFKDSLFEGMHKPIIPYETYLKVQKELEERQQQTYERNNNPRPFQAKYMLSGMARCGYCGAPLRIVLGHKRKDGSRTMKYHCANRFPRKTKGVTVYNDNKKCDSGTYDLSNLEDTVIDNLIGFQKNNDSLLKIINCNNRPILDTGSFKEQISQIDKKIQKNSDLYLNDLITMDELKDRTDSLQAEKKLLKAKISENKFNDSTDVFELVKTQLGSIPINELSYGNKKKIVNNLVSKVDVTADSVDIIYKFQQA

SEQ ID NO: 4970 - protein, 452 aa, synthetic construct
MKAAIYIRVSTREQVENYSIQAQTEKLTALCRSKDWDVYDIFIDGGYSGSNMNRPALNEMLSKLHEIDAVVVYRLDRLSRSQRDTITLIEEYFLKNNVEFVSLSETLDTSSPFGRAMIGILSVFAQLERETIRDRMVMGRIKRIEAGLPLTTAKGRTFGYDVIDTKLYINEDEAKQLQLIYDIFEEEQSITSLQKRLKELGFKVRTYNRYNNWLTNDLYCGYVSYKDKVHVKGIHEPIISEEQFYRVQEIFTRMGKNPNMNRDSASLLNNLVVCSKCGLGFVHRRKDTTSRGKKYHYRYYSCKTYKHIHELERCGNKIWRADKLEELIINRVSNYSFASRNVDKEDELDSLNEKLEIEHAKKKRLFDLYINGSYEVSELDSVMNDIDAQINYYEGQIEASEELRKNKKIQENLADLATVDFDSLEFREKQLYLKSLINKIYIDGEQVTIEWL

SEQ ID NO: 4971 - protein, 452 aa, synthetic construct
MKAAIYIRVSTREQVENYSIQAQTEKLTALCRSKDWDVYDTFIDGGYSGSNMNRPALNEMLSKLHEIDAVVVYRLDRLSRSQRDTITLIEEYFLKNNVEFVSLSETLDTSSPFGRAMIGILSVFAQLERETIRDRMVMGKVKRVEAGLPLTTAKGRTFGYDVIDAKLYINEEEAKQLQLIYDIFEEEQSITSLQKRLKKLGFKVRTYNCYNNWLTNDLYCGYVSYKDKVHVKGIHEPIISEEQFYRVQEIFARMGRNPNMNRDSASLLNNLVVCSKCGLGFVHRRKDTTSRGKKYHYRYYSCKTYKHTHELEKCGNKIWRADKLEELIINRVNNYSFASRNVDKEDELASLNEKLKIEHAKKKRLFDLYINGSYEVSELDSMMNDIDAQVNYYESQIEANEELKRNKKIQENLANLATVDYDSLEFREKQLYLKSLINKIYIDGELVTIEWL

SEQ ID NO: 4972 - protein, 452 aa, synthetic construct
MKAAIYIRVSTREQVENYSIQAQTEKLTALCRSKDWDVYDIFIDGGYSGSNMNRPALNEMLSKLHEIDAVVVYRLDRLSRSQRDTITLIEEYFLKNNVEFVSLSETLDTSSPFGRAMIGILSVFAQLERETIRDRMVMGKIKRIEAGLPLTTAKGRTFGYDVIDTKLYINEEEAKQLQLIYDIFEEEQSITFLQKRLKKLGLKVHTYNRYNNWLTNDLYCGYVSYKDRVHVKGIHEPIISEEQFYRVQEIFTRMGKNPNMNRDSASLLNNLVVCSKCGLGFVHRRKDAMSRDKKYHYRYYSCKTYKHIHELEKCGNKIWRADKLEELIISRVNSYSFASRNADKEDELDSLNEKLKIEHAKKKRLFDLYINGNYEVSELDSMMNNIDAQINYYESQIEANEGLKKNKRIQENLADLATVDFDSLEFREKQRYLKSLINKIYIDGEQVTIEWL

SEQ ID NO: 4973 - protein, 452 aa, synthetic construct
MKAAIYIRVSTREQVENYSIQAQTEKLTALCRSKDWDVYDIFIDGGYSGSNMNRPALNEMLSKLHEIDAVVVYRLDRLSRSQRDTITLIEEYFLKNNVEFVSLSETLDTSSPFGRAMIGILSVFAQLERETIRDRMVMGKIKRIEAGLPLTTAKGRTFGYDVIDTKLYINEEEAKQLQLIYDIFEEEQSITFLQKRLKKLGFKVRTYSCYNNWLTNDLYCGYVSYKDKVHVKGIHEPIISEEQFYRVQEIFARMGKNPNMNRDSASLLNNLVVCSKCGLGFVHRRKDIMSRGKEYHYRYYCCKTYKHIHELEKCGNKIWRADKLEELIINRVNNYSLASRNVGKEDELDSLNEKLKIEHAKKRRLFELYINGRYEVSELDSMMNDIDAQINYYEGQIEANEELKKNKKIQENLAHLATVDFDSLEFREKQLYLKSLINKIYIDGEQVTIEWL

SEQ ID NO: 4974 - protein, 469 aa, synthetic construct
MSYTTPVRAAVYLRISEDRSGEQLGVARQREDCLKLCGQRKWVPVEYLDNDVSASTGKRRPAYEQMLADITAGKIAAVVAWDLDRLHRRPIELEAFMSLADEKRLALATVAGDVDLATPQGRLVARLKASVAAHETEHKKARQRRAARQKAERGHPNWSKAFGYLPGPNGPEPDPRTAPLVKQAYADILAGASLGDVCRQWNDAGAFTITGRPWTTTTLSKFLRKPRNAGLRAYKGARYGPVDRDAIVGKAQWSPLADEATFWAAQAVLDAPGRAPGRKSVRRHLLTGLAGCGKCGNHLAGSYRTDGRVVYVCKACHGVAILADNIEPILYHIVAERLAAPNAVDLLRRETHDAAEAETIRLELETLYGELDRLAVERAEGLLTARQVKISTDIVNAKITKLQARQLDQERLRVFGGIPLGTPQVTGVIAELSPDRFRAVLDVLAEVVVQPVGKSGRIFNPERVRVNWR

SEQ ID NO: 4975 - protein, 452 aa, synthetic construct
MKAAIYIRVSTREQVENYSIQAQTEKLTALCRSKDWDVYDIFIDGGYSGSNMNRPALNEMLSKLHEIDAVVVYRLDRLSRSQRDTITLIEEYFLKNNVEFVSLSETLDTSSPFGRAMIGILSVFAQLERETIRDRMVMGKIKRIEAGLPLTTAKGRTFGYDVIDTKLYINEEEAKQLRLIYDIFEEEQSITLLQKRLKKLGFKVRTYSRYNSWLTNDLYCGYVSYKDKVHVKGIHEPIISEEQFYRVQEIFTRMGKNPNMNRDSASLLSNLVVCSKCGLGFVHRRKDTMSRGKKYHYRYYSCKTYKHIHELEKCGNKIWRADKLEELIINRVSNYSFASRNVDKEDELDSLNEKLKIEHAKKRRLFELYINGSYEVSELDSMMNDIDAQINHYESQIEANEELKENKKIQENLADLATVDFDSLEFREKQLYLKSLIDKIYIDGEQVTIEWL

SEQ ID NO: 4976 - protein, 452 aa, synthetic construct
MKAAIYIRVSTREQVENYSIQAQTEKLTALCRSKDWDVYDIFIDGGYSGSNMDRPALNEMLSKLHEIDAVVVYRLDRLSRSQRDTITLIEGYFLKNNVEFVSLSETLDTSSPFGRAMIGILSVFAQLERETIRDRMVMGKIKRIEAGLPLTTAKGRTFGYDVIDTKLYINKEEARQLQLIYDIFEEEQSITSLQKRLKKLGFKVRTYSRYNNWLTNDLYCGYVSYKDKVHVKGIHEPIISEEQFYRVQEIFTRMGKNPNMNRDSASLLNNLVVCSKCGLGFVHRRKDTMSRGKKYHYRYYSCKTYKHIHELEKCGNKIWRADKLEELIISRVNNYSVASRNVDKEDELDSLNEKLKIEHAKKKRLFELYIDGSYGVSELDSMMNDIDAQINYYESQIAASEGLKKNKKIQENLADLATVDFESLEFREKQLYLKSLINKIYIDGEQVTIEWL

SEQ ID NO: 4977 - protein, 469 aa, synthetic construct
MSYTTPVRAAVYLRISEDRSGEQLGVARQREDCLKLCDQRKWVPVEYLDNDVSASTGKRRPAYEQMLADITAGKIEAVVAWDLDRLHRRPIELEAFMSLADEKRLALATVAGDVDLATPQGRLVARLKGSVAAHETEHKKARQRRAARQKAERGHPNWSKAFGYLPGPNGPEPDPRTAPLVKQAYADILAGASLGDVCRQWNDAGALTITGRPWTTTTLSKFLRKPRNAGLRTYKGARYGPVDRDAIVGKAQWSPLVDEATFWAAQAVLDAPGRAPGRKSVRRHLLTGLAGCGKCGNHLAGSYRTDGRVVYVCKACHGVAILADNIEPILCHIVAERLAMPDAVDLLRREFHDAAEAVAIRLELETLYGELDRLAVERAEGLLTARQVKISTDIVNAKITKLQARQLDQERLRVFGGIPLGTPQVAGVIAELSPDRFRAVLDVLAEVVVQPVGKSGRIFNPERVQVNWR

SEQ ID NO: 4978 - protein, 452 aa, synthetic construct
MKAAIYIRVSTREQVENYSIQAQTEKLTALCRSKDWDVYDIFIDGGYSGSNMNRPALNEMLSKLHEIDAVVVYRLDRLSRSQRDTITLIEEYFLKNNVEFVSLSETLDTSSPFGRAMIGILSVFAQLERETIRDRMVMGKIKRIEAGLPLTTAKGRTFGYDVIDAKLYINEEEAKQLRLIYDIFEEEQSITFLQKRLKELGFKVRTYNCYNNWLTNDLYCGYVSYKDKVHVKGIHEPIISEEQFYRVQEIFTRMGKNPNMNRDSASLLNNLVVCSKCGLGFVHRRKDAMSRDKKYHYRYYSCKTYKHIHELEKCGNKIWRADKLEELIINRVNNYSLASRNVDKEDELDSLNEKLKIEHAKKKRLFDLYVNGSYEMSELDSMMNDIDAQINYYESQIEANEELKKNKKIQENLAELATVDFDSLEFREKQLYLKSLISKIYIDGEQVTIEWL

SEQ ID NO: 4979 - protein, 469 aa, synthetic construct
MSYTTPVRAAVYLRISEDRSGEQLGVARQREDCLKLCDQRKWVPVEYLDNDVSASTGKRRPAYEQMLADITAGKIAAVVAWDLDRLHRRPIELEAFMSLADEKRLALATVAGDVDLATPQGRLVARLKGCVAAHETEHKKARQRRAARQKAERGHPNWSKAFGYLPGPNGPEPDPRTAPLVKQAYADILAGASLGDVCRQWNDAGAFTITGRPWTTTTLSKFLRKPRNAGLRAYKGARYGPVDRDAIVGKAQWSPLVDEATFWAAQAVLDAPGRAPGRKSVRRHLLTGLAGCGKCGNHLAGSYRTDGRVVYVCKACHGVAILADNIEPILYHIVAERLAMPDAVDLLRREIHDAAEAETTRLELVTLYGELDRLAVERAEGLLTARQVKISTDIVDAKIAKLQARQLDQERLRVFDGIPLGTPQAAGMVAELSPDRFRAVLDVLAEVVVQPVGKSGRIFNPERVQVNWR

SEQ ID NO: 4980 - protein, 469 aa, synthetic construct
MCYTTPVRAAVYLRISEDRSGEQLGVARQREDCLKLCDQRKWVPVEYLDNDVSASTGKHRPAYEQMLADITAGKIAAVVAWDLDRLHRRPIELEAFMSLADEKRLALATVAGDVDLATPQGRLVARLKGSVAAHETEHKKARQRRAARQKAERGLPNWSKAFGYLPGPNGPEPDPRTAPLVKQAYADILAGASLGDVCRQWNDAGASTVTGRPWTTTTLSKFLRKPRNAGLRAYKGARYGPVDRDAIVGKAQWSPLVDEATFWAAQAVLDAPGRAPGRKSVRRHLLTGLAGCGKCGHHLAGSYRTDGRVVYVCKACHGVAILAGNIEPILYHIVAERLAMPDAVDLLRREIHDAAEAETIRLELETLYGELDRLAVERAEGLLTARQVKISTDIVNAKITELQARQLDQERLRVFDGIPLGTPRVAGMIAELSPDRFRAVLDVLAEVVVQPVGKSGRIFSPERVQVNWR

SEQ ID NO: 4981 - protein, 469 aa, synthetic construct
MSYTTPVRAAVYLRISEDRSGEQLGVARQREDCLKLCGQRKWVPVEYLDNDVSASTGKRRPAYEQMLADITAGKIAAVVAWDLDRLHRRPIELEAFMSLADEKRLALATVAGDVDLATPQGRLVARLKGCVAAHETEHKKARQRRAARQKAERGHPNWSKAFGYLPGPNGPEPDPRTAPLVKQAYADILAGASLGDVCRQWNDAGAFTITGRPWTTTALSKFLRKPRNAGLRAYKGARYGPVDRDAIVGKAQWSPLVDEATFWAAQAVLDAPGRAPGRKSVRRHLLTGLAGCGKCGNHLAGSYRTDGRVVYVCKACHGVAILADNIEPILYHTVAERLAMPDAVDLLRRETHDAAEAETIRLELETLYGELDRLAVERAEGLLTARQVKISTDIVNAKITKLQARQQDQERLRVFDGIPLGTPQVAGMIAELSPDRFRAVLDVLAEVVVQPVGKSGRIFNPERVQVSWR

SEQ ID NO: 4982 - protein, 452 aa, synthetic construct
MKAAIYIRVSTREQVENYSIQAQTEKLTALCRSKDWDVYDIFIDGGYSGSNMNRPALNEMLSKLHEIDAVVVYRLDRLSRSQRDTITLIEEYFLKNNVEFVSLSETLDTSSPFGRAMIGILSVFAQLERETIRDRMVMGKIKRVEAGLPLTTAKGRTFGYDVIDTKLYINEEEARQLQLIYDIFEEEQSITFLQKRLKKLGFKVRTYSRYNNWLTNDLYCGYVSYKDEVHVKGVHEPIISEEQFYRVQEIFTRMGKNPNMNRDSASLLNNLVVCSKCGLGFVHRRKDTTSRGKKYHYRYYSCKTYKHIHELEKCGNKIWRADELEELIINRVNNYSLASRNVDKEDELDSLSEKLKIEHAKKKRLFDLYINGSFEVSELDSMMNDIDTQISYYESQIEANEELKKNKKIQENLAELATVDFDSLEFREKQLYLKSLINKIYIDGEQVTIEWL

SEQ ID NO: 4983 - protein, 452 aa, synthetic construct
MKAAIYIRVSTREQVENYSIQAQTEKLTALCRSKDWDVYDIFIDGGYSGSNMNRPALNEMLSKLQEIDAVVVYRLDRLSRSQRDTITLIEEYFLKNNVEFVSLSETLDTSSPFGRAMIGILSVFAQLERETIRDRMVMGKIKRIEAGLPLTTAKGRTFGYDVIDTKLYINEEEAKQLQLIYDIFEEEQSITLLQKRLKKLGFKVRTYSCYNNWLTNDLYCGYVSYKDKVHVKGIHEPIISEEQFCRVQEIFTRMGKNPNMNRDSASLLNNLVVCSKCGLGFVHRRKDTMSRGKKYHYRYYSCKTYKHIHELEKCGNKIWRADKLEELIINRVNNYSFASRNADKEDELDCLNEKLKIEHAKKKRLFDLYINGSYEVSELDSMMNDIDAQINYYEGQIEANEELRKNKEIQENLANLATVDYDSLEFREKQLYLKSLINKIYIDGEQVTIEWL

SEQ ID NO: 4984 - protein, 485 aa, synthetic construct
MTKKVAIYTRVSTTNQAEEGFSIDEQIDRLTKYAEAMGWQVSDTYTDAGFSGAKLERPAMQRLINDIENKAFDTVLVYKLDRLSRSVRDTLYLVKEVFTKNEIDFISLNESIDTSSAMGSLFLTILSAINEFERENIKERMTMGKLGRAKSGKSMMWTKTAFGYYHNRKTGILEIVPLQATIVEQIFTDYLGGISLTKLRDKLNESGHIGKDIPWSYRTLRQTLDNPVYCGYIKFKDSLFGGMHKPIIPYETYLKAQKELEERQQQAYDRNNNPRPFQAKYMLSGMARCGYCGAPLRIVLGHKRKDGSRTMKYHCANRFPRKTKGVTVYNDNEKCDSGTYDLSNLENTVIDSLIGFQENNDSLLKIVNGNNQPILDTSSFKRQISQIDKKIQKISDLYLNDFITMDELKDRTDSLQAEKKLLEAKISENKFNDSADVFELVKTQLGSIPINELSYDNKKKIVNNLVSKVDVTADNVDIIFKFQLA

SEQ ID NO: 4985 - protein, 485 aa, synthetic construct
MTKKVAIYTRVSTANQAEEGFSIDEQVDRLTKYAEAMGWQVSDTYTDAGFSGAKLERPAMRRLINDIENKAFDTVLVYKLDRLSRSVRDTLYLVKDVFTRSKIDFISLNECIDTSSAMGSLFLTILSAINEFERENIKERMTMGKLGRAKSGKSMMWTKTAFGYYHNRETGILEIVPLQATIVEQIFTDYLSGISLTKLRDKLNESGHIGKDIPWSYRTLRQTLDNPVYCGYIKFKDSLFEGMHKPIIPYETYLKVQKELEERQQQTYERNNNPRPFQAKYMLSGMARCGYCGAPLRIVLGHRRKDGSRTMKYHCANRFPRKTKGVTVYNDNKKCDSGTYDLSNLENTVIDILIGFQGDNDSLLKIINGNNQPILDTSSLKKRISQIDKKIQKNSDLYLDDFITMDELKDRTDSLQAEKKLLRARISENKFNDSTDVFELVKTQLGSIPINELSYDNKKKIVNNLVSKVDVTADNVDIIFKFQLA

SEQ ID NO: 4986 - protein, 485 aa, synthetic construct
MTKKVAIYTRVSTTNQAEEGFSIDEQIDRLTKYAEAMGWQVSDTYTDAGFSGAKLERPAMQRLINDIENGAFDTVLVYKLDRLSRSVRDTLYLVKDVFTKNKIDFISLNESIDTSSAMGSLFLTILSAINEFERENIKERMTMGKLGRAKSGKSMMWTKTAFGYYHNRKTGILEIVPLQATIVEQIFTDYLSGISLTKLRDKLNESGHIGKDIPWSYRTLRQTLDNPVYCGYIKFKDSLFEGMHKPIIPYEIYLKVQKELKERQQQTYERNNNPRPFQAKYMLSGMARCGYCGAPLRIVLGHKRKDGSRTMKYHCANRFPRKTKGVTVYNDNKKCDSGTYDLSNLENTVIDNLIGFQENNDSLLKIINGSNQPILDTSSFKEQISQIDKKIQKNSDLYLNDFITMDELKDRTDSLQAEKKLLKAKISENKFNDSTDVFELVKTQLGSIPINELSYDNKKKIVNNLVSKVDVTADNVDIIFKFQLA

SEQ ID NO: 4987 - protein, 469 aa, synthetic construct
MSYTTPVRAAVYLRISEDRSGEQLGVARQREDCLKLCGQRRWVPVEYLDNDVSASTGKRRPAYEQMLADIAAGKIAAVVAWDLDRLHRRPIELEAFMCLADEKRLALATVAGDVDLATPQGRLVARLKGCVAAHETEHKKARQRRAARQKAERGHPNWSKAFGYLPGPNGPEPDPRTAPLVKQAYADILAGASLGDVCRQWNDAGAFTITGGLWTTTTLSKFLRKPRNAGLRAYKGARYGPVDRDAIVGKAQWSPLVDEATFWAAQAVLDAPGRAPGRKSVRRHLLTGLAGCGKCGNHLAGSYRTDGRVVYVCKACHGVAILADNIEPILYHIVAERLAMPDAVDLLRREIHDAAEAEIIRLELETLYGELDRLAVERAEGLLTARQVKISTDIVNAKITELQARRLDQERLRVCDGIPLGTPQVAGMIAELSPDRFRAVLDVLAEVVVQPVGKSGRIFNPERVQVSWR

SEQ ID NO: 4988 - protein, 452 aa, synthetic construct
MKAAIYIRVSTREQVENYSIQAQTEKLTALCRSKGWDVYDIFIDGGYSGSNMNRPALNEMLSKLHEIDAVVVYRLDRLSRSQRDTITLIEEYFLKNNVEFVSLSETLDTSSPFGRAMIGILSVFAQLERETIRDRMVMGKIKRIEAGLPLTTAKGRTFGYDVIDTKLYINEEEAKQLQLVYDIFEEEQSITFLQKRLKKLGFKVHTYNRYNNWLTNDLYCGYVSYKDKVHVKGIHEPIISEEQFYRVQEIFTRMGKNPNMNRDSASLLNNLVVCSKCGLGFVHRRKDTMSRGKKYHYRYYSCKTYKHIHELEKCGNKIWRADKLEELVINRVNNYSFASRNVDKEDELDSLNEKLKIEHAKKKRLFDLYINGSYEVSELDSMMNDIDAQISYYESQIEASEELKKNKKIQENLADLATVDFGSLEFREKQLYLKSLINKIYIDGEQVTIEWL

SEQ ID NO: 4989 - protein, 485 aa, synthetic construct
MTKKVAIYTRVSTTNQAEEGFSIDEQIDRLTKYAEAMGWQVSGTYTDAGLSGAKLERPAMRRLINDIANKAFDTVLVYKLDRLSRSVRDTLYLVKDVFTKNKIDFISLNESIDTSSAMGSLFLTILSAINEFERENIKERMTMGKLGRAKSGKSMMWTKTAFGYYHNRKTGILEIVPLQATIVEQIFTDYLSGISLTKLRDKLNESGHIGKDIPWSYRTLRQTLDNPVYCGYIKFKDSLFEGMHKPIIPYETYLKVQKELEERQQQTYERNNNPRPFQAKYMLSGMARCGYCGAPLRIVLGHKRKDGSRTMKYHCANRFPRKTKGVTVYNDNKKCDSGTYDLSSLEYTVIDSLIGFQENNDSLLKIINGNNQPILDTSSFKEQISQIDKKIQKNSDLYLNGFITMDELKARTDSLQAEKKLLKAKISENKFNDSTDVFELVRTQLGSIPINELSYDNKKKIVNNLVSKVDVTADNVDIIFKFQLA

SEQ ID NO: 4990 - protein, 452 aa, synthetic construct
MKAAIYIRVSTREQVENYSIQAQTEKLTALCRSKDWDVYDVFIDGGYSGSNMNRPALNEMLSKLHEIDAVVVYRLDRLSRSQRDTITLIEEYFLKNNVEFVSLSETLDTSSPFGRAMIGILSVFAQLERETIRDRMVMGKIKRIEAGLPLTTAKGRTFGYDVIDTKLYINEEEAEQLQLIYDIFEEEQSITFLQKRLKKLGFKVRTYSCYNSWLTNDLYCGYVSYKDKVHVKGIHEPIISEEQFYRVQEIFTRMGKNPNMNRDSASLLNNLVVCNKCGLGFVHRRKDTTSRGKKYHYRYYSCKTYKHTHELEKCGNKIWRADKLEELIINRVNDYSFAGRNVDKEDELDSLNEKLKIEHAKKKRLFDLYINGSYEVSELDSLMNDIDARINYYEGQIEANEELKKDKKIQENLAELATVDFDSLEFREKQLYLKSLINKIYIDGEQVTIEWL

SEQ ID NO: 4991 - protein, 485 aa, synthetic construct
MTKKVAIYTRVSTTNQAEEGFSIDEQIGRLTKYAEAMGWQVSDTYTDAGLSGAKLERPAMQRLINDIENKTFDTVLVYKLDRLSRSVRDTLYLVKDVFTRNKIDFISLNESIDTSSAMGSLFLTILSAINEFERENIKERMTMGKLGRAKSGKSMMWTKTAFGYNHNRETGILEIVPLQATIVEQIFTDYLSGISLTKLRDKLNESGHIGKDIPWSYRTLRQTLDNPVYCGYIKFKDSLFEGMHKPIIPYETYLKVQKELEERQQQTYERNNNPRPFQAKYMLSGMARCGYCGAPLRIVLGHRRKDGSRTMKYHCANRFPRKTKGVTVYNDNKKCDSGTYDLSNLENTVIDILIGFQENNDSLLKIINGSNQPILDTSSFKKQISQIDKKIQKISDLYLNDFITMEELKDRTDSLQAEKKLLKAKISENKFNDSTDVFELVRTQLGSIPINELSYDNKKRIVNNLVSRVDVTADNVDIIFKFQLA

SEQ ID NO: 4992 - protein, 452 aa, synthetic construct
MKAAIYIRVSTQEQVENYSIQAQTEKLTALCRSKGWDVYDIFIDGGYSGSNMNRPALNEMLSKLHEIDAVVVYRLDRLSRSQRDTTTLIEEYFLKNNVEFVSLSETLDTSSPFGRAMIGILSVFAQLERETIRDRMVMGKIKRIEAGLPLTTAKGRTFGYDVIDTKLYINEEEAKQLRLIYDIFEEEQSITFLQKRLKKLGFKVRTYNRYNNWLTNDLYCGYVSYKDKVHVKGIHEPIISEEQFYRVQEIFTRMGKNPNMNRDSASLLNNLVVCSKCGLSFVHRSKDTMSRGKRYHYRYYSCKTYKHTHELEKCGNKTWRADKLEELIINRVNNYSFASRDVDKEDELDSLNEKLKIEHAKKKRLLDLYINGSYEVSELDSMMNDIDAQINYYESQTVANEELKENKKTQENLADLATVDFDSLEFREKQQYLKSLINKIYIDGEQVTIEWL

SEQ ID NO: 4993 - protein, 452 aa, synthetic construct
MKAAIYIRVSTREQVENYSIQAQTERLTALCRSKDWDVYDIFIDGGYSGSNMNRPALNEMLSKLDEIDTVVVYRLDRLSRSQRDTITLIEEYFLKNNVEFVSLSETLDTSSPFGRAMIGILSVFAQLERETIRDRIVMGKIKRIEAGLPLTTAKGRTFGYDVIDTKLYINEEEAKQLRLIYDIFEEEQSITFLQRRLKELGFKVRTYNRYNNWLTNDLYCGYVSYKDKVHVKGIHEPIISEEQFYRVQEIFTRMGKNPNMNRGSASLLNNLVVCSKCGLGFVHRRKDIMSRGKKYHYRYYSCKTYKHIHELEKCGNKIWRADKLEELIINRVNSYSVASRNVDKEDELDSLNEKLKVEHAKKKRLFDLYINGNYEVSELDSMMNDIDAQINCYESQIEANEELKRNREIQENLAYLATVDFNSLEFREKQLYLKSLISKIYIDGEQVTIEWL

SEQ ID NO: 4994 - protein, 452 aa, synthetic construct
MKAAIYIRVSTREQVENYSIQAQTEKLTALCRSKDWDVYDIFIDGGYSGSNMNRPALNEMLSKLHEIDAVVVYRLDRLSRSQRDTITLIEEYFLKNNVEFVSLSETLDTSSPFGRAMIGILSVFAQLERETIRDRMVMGKIKRIEAGLPLTTAKGRTFGYDVIDTKLYINEEEAKQLQLIYDIFEEEQSITFLQKRLKKLGFKVHTYNRYNNWLTNDLYCGYVSYKDRVHVKGIHEPIISEEQFYRVQEIFTRMGKNPNMNRDSASLLSNLVVCSKCGLSFVHRRKDTMSRGKKYHYRYYSCKTYKHTHELEKCGNKIWRADELEELIINRVNNYSFASRNVDKEDELDSLNGKLKIEHAKRERLFDLYINGSYEVSELDSLMNDIDAQINYYESQIEANEELKKDKKIQEGLANLATVDYDSLEFREKQLYLKSLINKIYIDGEQVTIEWL

SEQ ID NO: 4995 - protein, 485 aa, synthetic construct
MTKKVAIYTRVSTTNQAEEGFSIDEQIDRLTKYAEAMGWQVSDTYTDAGLSGAKLERPAMQRLINDIEDKAFDTVLVYKLDRLSRSVRDTLYLVKDVFTKNKIDFISLNESIDTSSAMGSLFLTILSAINEFERENIKERMTMGKLGRAKSGKSMMWTKTAFGYYHNRKTGILEIVPLQATIVEQIFTEYLSGISLTKLRDKLNERGHVGKDIPWSYRTLRQTLDNPVYCGYIKFKDSLFEGMHKPIIPYETYLKVQKELEVRQQQTYERNNNPRPFQAKYMLSGMARCGYCGAPLKIVLGHKRKDGSRTMKYHCANRFPRKTKGVTVYNDNKKCDSGTYDLSNLENTVVGNLIGFQENNDSLLKIINGNNQPILDTSSLKKQISRIDKKIQKNSELYLNDFITMDELKDRTDSLQAEKKLLKAKISENILNDSTDVFELVKTQLGSIPINELSYDNKKKIVNSLVSKVDVTADNVDIIFKFQLA

SEQ ID NO: 4996 - protein, 469 aa, synthetic construct
MSYTTPVRAAVYLRISEDRSGEQLGVARQREDCLELCDQRKWEPVEYLDNDVSASTGKRRPAYEQMLADITAGKIAAVVAWDLDRLHRRPIELEAFMSLADEKRLALATVAGDVDLATPQGRLVARLKGSVAAHETEHKKARQRRAARQKAERGYPNWSKAFGYLPGPNGPEPDPRTAPLVKQAYADILAGASLGDVCRRWNDAGAFTITGRPWTTTALSKFLRKPRNAGLRAYKGARYGPVDRNAIVGKAQWSPLVDEATFWAAQAVLDAPGRAPGRKSVRRHLLTGLAGCGKCGNHLAGSYRTDGRVVYVCKACHGVAILADNIEPILYHIVAERLAMPDAVSLLRREIHDAAEAETIRLELETLYGELDRLAVERAEGLLTARQVKISTDIVNAKITKLQARQLDQERLRVFDGIPLGTPQVGGMIAELSPDRFRAVLDVLAEVVVQPVGKSGRIFNPERVRVNWR

SEQ ID NO: 4997 - protein, 452 aa, synthetic construct
MKAAIYIRVSTQEQVGNYSIQAQTEKLTALCRSKDWDVYDIFIDGGYSGSNMNRPALNEMLSKLHEIDAVVVYRLDRLSRSQRDTTTLIEEYFLKNNVEFVSLSETLDTSSPFGRAMIGILSVFAQLERETIRDRMVMGKIKRIEAGLPLTTAKGRTFGYDVIDTKLYINEEEAKQLQLIYDIFEEEQSITALQKRLKKLGFKVRTYNRYNNWLTNDLYCGYVSYKDKVHVKGIHEPIISEEQFYRVQEIFTRMGKNPNMNRDSASLLSNLVVCSKCGLSFVHRSKDTMSRGKKYHYRYYSCKTYKHTHELEKCGNKTWRADKLEELIINRVNNYSFASRNGDKEDELDSLNEKLKIEHAKKKRLFDLYINGSYEVSELVSMMNDIDAQINYYESQIEANGELKENKKIQENLAELATVDFDSLEFREKQLYLKSLINKIYIDGEQVTIEWL

SEQ ID NO: 4998 - protein, 469 aa, synthetic construct
MSYTTPVRAAVYLRISEDRSGEQLGVARQREDCLKLCDQRKWVPVEYLDNDVSASTGKRRPAYEQMLADITAGKIAAVVAWDLDRLHRRPVELEAFMSLADEKRLALATVAGDVDLATPQGRLVARLKGCVAAHETEHKKARQRRAARQKAERGLPNWSKAFGYLPGPNGPEPDPRTAPLVRQAYADILAGASLGDVCRQWNDAGAFTITGRPWTTTTLSKFLRKPRNAGLRAYKGARYGPVDRDAIVGKAQWSPLVDEATFWAAQAVLDAPGRAPGRKSVRRHLLTGLAGCGKCGNHLAGSYRTDGRVVYVCKACHGVAILADNIEPILYHIVAERLAMPDAVGLLRREIHDAAEAEAVRLELETLYGELDRLAVERAEGLLTARQVKISTDIVNAKITELQARRLDQERLRVFDGIPLGTPQVAGMIAGLSPDRFRAVLDVLAEVVVQPVGKSGRIFNPERVQVNWR

SEQ ID NO: 4999 - protein, 485 aa, synthetic construct
MTKKVAIYTRVSTANQAEEGFSIDEQIDRLTKYAEAMGWQVSDIYTDAGFSGAKLERPAVQRLINDIESKAFDTVLVYKLDRLSRSVRDTLYLVKEVFTRNEIDFISLSESIDTSSAMGSLFLTILSAINEFERENIKERMTMGKLGRAKSGKSMMWTKTAFGYYHNRKTGILEIVPLQATIVEQIFTDYLSGISLTKLRDKLNESGHIGKDIPWSYRTLRQTLDNPVYCGYIKFKDSLFEGMHKPIIPYGTYLKVQKELEERQQQTYERNNNPRPFQAKYMLSGMARCGYCGAPLKIVLGHKRKDGSRTMKYHCANRFPRKTKGVTVYNDNKKCDSGTYDLGDLENTVIDDLIGFQENNDSLLKIINGVNQPILDTSSLKRQISQIDKKIQKNSDLYLNDFITMDELKDRTDSLQAEKKLLKAKISGNKLNDCTDVFELVKTQLGSIPINELSYDNKKKIVNNLVSKVDVTADNVDIIFKFQLA

SEQ ID NO: 5000 - protein, 469 aa, synthetic construct
MSYITPVCAAVYLRISEDRSGEQLGVARQREDCLKLCDQRKWVPVEYLDNDVSASTGKRRPAYEQMLADITAGKIAAVVAWDLDRLHRRPIELEAFMSLADEKRLALATVAGDVDLATPQGRLVARLKGSVAAHETEHKKARQRRAARQKAERGHPNWSKAFGYLPGPNGPEPDPRTAPLVKQAYADILAGASLGDVCRQWNDAGAFTITGRSWTTTTLSKFLRKPRNAGLRAYKGARYGPVDRDAIVGKAQWSPLVDEATFWAAQAVLDAPGRAPGRKSVRRHLLTGLAGCGKCGNHLAGSYRTDGRVVYVCKACHGVAILADNIEPILYHIVAERLAMPDAVHLLRREFHDAAEAATVRLELETLYGELDRLAVERAEGLLTARQVKIGTDIVNAKITKLQARQLDQERLRVFDGIPLGTPQVAGMIAELSPDRFRAVLDVLAEVVVQPVGKSGRIFNPERVQVNWR

SEQ ID NO: 5001 - protein, 469 aa, synthetic construct
MSYTTPVRAAVYLRISEDRSGEQLGVARQREDCLKLCGQRKWVPVEYLDNDVSASTGKRRPAYEQMLADITAGKIAAVVAWDLDRLHRRPVELEAFMSLADENRLALATVAGDVDLATPQGRLVARLKASVAAHETEHKKARQRRAARQKAERGHPNWSRAFGYLPGPNGPEPDPRTAPLVKQAYADILAGASLGDVCRQWNDGGAFTITGRPWTTTTLSKFLRKPRNAGLRAYKGARYGPVDRDAIVGKAQWSPLVDEATFWAAQAVLDAPGRAPGRKSVRRHLLTGLAGCGKCGNHLAGSYRTDGRVVYVCKACHGVAILADNIEPILYHIVAERLAMPDAVGLLRREIHDAAEAETIRLELETLYGELDRLAVERAGGLLTARQVKIGTDIVNAKITKLQARQLDQERLRVFDGIPLGTPQVAGVIAELSPGRFRAVLDVLAEVVVQPVGKSGRIFNPERVQVNWR

SEQ ID NO: 5002 - protein, 452 aa, synthetic construct
MKAAIYIRVSTREQVENYSIQAQTEKLTALCRSKGWDVYDIFIDGGYSGSNMNRPALSEMLSKLHEIDAVVVYRLDRLSRSQRDTITLIEEYFLKNNVEFVSLSETLDTSSPFGRAMIGILSVFAQLERETIRDRMVMGKIKRIEAGLPLTTAKGRTFGYDVIDTKLYINKEEAKQLQLIYDIFEEEQSITFLQKRLKKLGFKVRTYNRYNNWLTNDLYCGYVSYKDKVRVKGIHEPIISEEQFYRVQEIFTRMGKNPNMNRDSASLLNNLVVCSKCGLGFVHRRKDAMSRDKKYHYRYYSCKTYKHIHELEKCGNKIWRADKLEELIINRVNNYSIASRNADKEDDLDSLNEKLKIEHAKKKRLFDLYINGSYEVSELDSMMCDIDAQISYYESQIEANEELKKNKKIQENLADLATVDFDSLEFREKQLYLKSLINKIYIDGEQVTIEWL

SEQ ID NO: 5003 - protein, 485 aa, synthetic construct
MTKKVAIYTRVSTTNQAEEGFSIDEQIDRLTKYAEAMGWQVSDTYTDAGSSGARLERPAMQRLINDIENKAFDTVLVYKLDRLSRSVRDTLYLVKDVFTKNKIDFISLNESIDTSSAMGSLFLTILSAINEFERENIKERMTMGKLGRAKSGKSMMWTKTAFGYYHNRKTGILEIVPLQATIVEQIFTDYLSGISLTKLRDKLNESGHIGKDIPWSYRTLRQTLDNPVYCGYIKFKDSLFEGMHKPIIPYETYLKVQKELEERQRQTYERNNNPRPFQAKYMLSGMARCGYCGAPLKIVLGHKRKDGSRTMRYHCANRFPRKTKGVTVYNDNKKCDSGTYDLSNLENTVIDSLIGFQENNDSLLKIINGSNQPILDTSSFKKQISQIDKKIQKNSDLYLNDFITMDELKDRTDSLQAEKKLLKAKISENKFNDSTDVFELVKTQLGSIPINELSYDNKKKIVNNLVSKVDVTADNVDIIFKFQLA

SEQ ID NO: 5004 - protein, 485 aa, synthetic construct
MTKKVAIYTRVSTTSQAEEGFSIDEQIDRLTKYAEAMGWQVSDTYTDAGFSGAKLERPAMQRLINDIENKAFDTVLVYKLDRLSRSVRDTLYLVKDVFTKNKIDFISLNESIDTSSAMGSLFLTILSAINEFERENIKERMTMGKLGRAKSGKSMMWTKTAFGYHHNRKTGILEIVPLQATIVEQIFTDYLSGISLTKLRDKLNESGHIGKDIPWSYRTLRQTLDNPVYCGYIKFKDSLFEGMHKPIIPYETYLKVQEELEERQQQTCERNNNPRPFQAKYMLSGMARCGYCGAPLRIALGHKRKDGSRTMKYHCANRFPRKTKGVTVYNDNKKCDSGTYDLSNLENTVIDNLIGFQENNDSLLKIINGNNQPILDTSSFKKQISQIDKKIQKNSDLYLNDFITMDELKDRTNSLQAEKKLLKAKISENKFNDITDVFELVKTQLGSIPINELSYDNKKKIVNNLVSKVDVTADNVDIIFKFQLA

SEQ ID NO: 5005 - protein, 452 aa, synthetic construct
MKAAIYIRVSTQEQVENYSIQAQTEKLTALCRSKDWDVYDIFIDGGYSGSNMNRPALNEMLSKLHEIDAVVVYRLDRLSRSQRDTTTLIEEYFLKNNVEFVSLSETLDTSSPFGRAMIGILSVFAQLERETIRDRMVMGKIKRIESGLPLTTAKGRTFGYDVIDTKLYINEEEAKQLQLIYDIFEEEQSITFLQKRLKKLGFKVRTYNRYHNWLTNDLYCGYVSYKDKVHVKGIHEPIISEEQFYRVQEIFTRMGKNPNMNRDSASLLNNLVVCSKCGLGFVHRSKDTMCRDKKYHYRYYSCKTYKHTYELEKCGNKTWRADKLEELIINRVNNYSFASRNVDKEDELDSLNEKLKIEHAKKKRLFDLYINGSYEVSELDSMMNDIDAQINHYESQIEANEELKKNKKIQENLADLATVDFDSLGFREKQLYLKSLINKIYIDGEQVTIEWL

SEQ ID NO: 5006 - protein, 485 aa, synthetic construct
MTKKVAIYTRVSTTNQAEEGFSIDEQIDRLTKYAEAMGWQVSDTYTDAGFSGAKLERPAMQRLINDIENKAFDTVLVYKLDRLSRSVRDTLYLVKDVFTKNKIDFISLNESIDTSSAMGSLFLTILSAINEFERENIKERMTMGKLGRAKSGKSMMWTRTAFGYYHNRKTGILEIVPLQATIVEQIFTDYLSGISLTKLRDKLNESGHIGKDIPWSYRTLRQTLDNPVYCGYIKFKGSLFEGVHKPIIPYETYLKVQKELEERQQQTYERNNNPRPFQAKYMLSGMARCGYCGAPLRIVLGHKRKDGSRTMKYHCANRFPRKTRGVTVYNDNKKCDSGTYDLSNLENAVIDILIGFQENNDSLLKTINSNNQPILDTSSFRKQISQIDKKIKKNSDLYLNDFITMDELKNRTDSLQAEKKLLEAKISENRFNDSTDVFELVKTQLGSIPINELSYDNKKRIVNDLVSKVVVTADNVDIIFKFQLA

SEQ ID NO: 5007 - protein, 452 aa, synthetic construct
MKAAIYIRVSTREQVENYSIQAQTEKLTALCRSKDWDVYDIFIDGGYSGSNMNRPALNEMLSKLHEIDAVVVYRLDRLSRSQRDTITLIEEYFLKNNVEFVSLSETLDTSSPFGRAMIGILSVFAQLERETIRDRMVMGKIKRIEAGLPLTTAKGRTFGYDVIDTKLYINEEEAKQLRLIYDIFEEEQSITSLQRRLKKLGFEVRTYSRYNNWLTNDLYCGYVSYKDKVHVKGIHEPIISEEQFYRVQEIFTRMSKNPNMNRDSASLLNGLVVCSKCGLGFVHRRKDTTSRGKKYHYRYYSCKTYKHTHELEKCGNKIWRADRLEELIINRVNNYSLVSRNVDKEDELDSLSEKLRIEHAKKRRLFDLYINGSYEVSELDCMMNDIDAQINYYESRIEANEELKKDKKVQENLADLATVDFDSLEFREKQLYLKSLINKIYIDGEQVTVEWL

SEQ ID NO: 5008 - protein, 452 aa, synthetic construct
MKAAIYIRVSTREQVENYSIQAQTEKLTALCRSKDWDVYDIFIDGGYSGSNMNRPALNEMLSKLREIDAVVVYRLDRLSRSQRDTITLIEEYFLKNNVEFVSLSETLDTSSPFGRAMIGILSVFAQLERETIRDRMVMGKIKRIEAGLPLTTAKGRTFGYDVIDTKLYINEEEAKQLRLIYDIFEEEQSITFLQKRLKKLGFKVRTYSCYNNWLTNDLYCGYVSYKDKVHVKGIHEPIISEEQFYRVQEIFTRTGKNPNMNRDSASLLNNLVVCSKCGLGFVHRRKDTVSRGKKYHYRYYSCKTYKHTYELEKCGNKIWRADKLEELIINHVNNYSFASRNADKEDELDSLNEKLKIEHAKKRRLFDLYLSGSYEVSELDSMMNDIDAQINYYESQIEANEELKKNKKIQENLADLATVDFDSLGFREKQLYLKSLINKIYIDGEQVTIEWL

SEQ ID NO: 5009 - protein, 485 aa, synthetic construct
MTKKVAIYTRVSTTNQAEEGFSIDEQIDRLTKYAEAMGWQVSDTYTDAGLSGAKLERPAMQRLINDIENKAFDTVLVYKLDRLSRSVRDTLHLVKDVFTKNKIDFISLNESIDTSSAMGSLFLTILSAINEFERENIKERMTMGKLGRARSGKSMMWTKTAFGYYHNRKTGILEIVPLQATIVEQIFTDYLSGISLTKLRDKLNESGHIGKDIPWSYRTLRQTLGNPVYCGYIKFKDSLFEGMHKPIIPYETYLKVQKELEERQQQTYERNNNPRPFQAKYMLSGMARCGYCGAPLKIVLGHKRKDGSRTMKYHCANRFPRKTKGVTVYNDNKKCDSGTYDLSNLENTVIDNLIGFQENNDSLLKIINGNNQPIPDTSSFKKQISQIDRKIQKNSDLYLNDFITMDELKDRTDSLQAEKKLLKAKISENKFNDSTDVFELVKTQLGSIPINELSYDNKKKIVNNLVSKVDVTADNVDIIFKFQLA

SEQ ID NO: 5010 - protein, 452 aa, synthetic construct
MKAAIYIRVSTREQVENYSIQAQTEKLTALCRSKDWDVYDIFIDGGYSGSNMNRPALNEMLSKLHEIDAVVVYRLDRLSRSQRDTITLIEEYFLKNNVEFVSLSETLDTSSPFGRAMIGILSVFAQLERETIRDRMVMGKIKRIEAGLPLTTAKGRTFGYDVIDTKLYINEEEARQLQLIYDIFEEEQSITFLQKRLKKLGFKVRTYNRYNNWLTNDLYCGYVSYKDKVHVKGIHEPIISEEQFYRVQEIFARMGKNPNMNRDSASLLNNLVVCGKCGLGFVHRRKDAMSRSKKYHYRYYSCRTYKHIHELEKCGNKIWRADKLEELVINRVNNYSLASRNVDKEDELDSLNEKLKTEHAKKKRLFELYINGSYEVSELDSMMNGIDAQINYYESQIEANEELKRNKRIQENLADLAAVDFDSLEFREKQLYLKSLINKIYIDGDQVTIEWL

SEQ ID NO: 5011 - protein, 469 aa, synthetic construct
MSYTTPVRAAVYLRISEDRSGEQLGVARQREDCLKLCGQRKWVPVEYLDNDVSASTGKRRPAYERMLADITAGKIAAVVAWDLDRLHRRPIELEAFMSLADEKRLALATVAGDVDLATPQGRLVARLKGSVAAHETEHKKARQRRAARQKAERGYPNWSKAFGYLPGPNGPEPDPRTAPLVKRAYADILAGASLGDVCRQWNDAGAFTITGRPWATTTLSKFLRKPRNAGLRAYKGARYGPVDRDAIVGKARWSPLVDEATFWAAQAVLDAPGRAPGRKSVRRHLLTGLAGCGKCGYHLAGSYRTDGRVVYVCKACHGVAILADNIEPTLYHIVAERLAMPDAVDLLRRETHDAAEAEAIRLELEALYGELDRLAVERAEGLLTARQVKISTDIVNAKITKLQARQLDQERLRVFDGIPLGTPQVAGMIAELSPNRFRAVLDVLAEVVVQPVGRSGRIFNPERVQVNWR

SEQ ID NO: 5012 - protein, 452 aa, synthetic construct
MKAAIYIRVSTREQVENYSIQAQTEKLTALCRSKDWDVYDIFIDGGYSGSNMNRPALNEMLSKLHKIDAVVVYRLDRLSRSQRDTITLIEEYFLKNNVEFVSLSETLDTSSPFGRAMIGILSVFAQLERETIRDRMVMGKIKRVEAGLPLTTAKGRTFGYDVIDTKLYINEEEAKQLQLIYDIFEEEQSITFLQKRLKKLGFKVRTYNRYNSWLTNDLYCGYVSYKDKVHVKGIHEPIISEEQFYRVQEIFTRMGKNPNMNRDSASLLNNLVVCSKCGLGFVHRRKDTVSRGKKYHYRYYSCKTYKHIHELEKCGNKIWRADILEELIISRVNNYSFASRNVDKEDELDSLKEKLKVEHAKRKRLFDLYINGSYEVSELDSTMNDIDAQINYYESQIEANEELKKNKKIQENLANLATVDYDSLEFREKQLYLKSLINKIYIDGEQVTIEWL

SEQ ID NO: 5013 - protein, 485 aa, synthetic construct
MTKKVAIYTRVSTTNQAEEGFSIDEQIDRLTKYAEAMGWQVSDTYTDAGFSGAKLERPAMQRLINDIENKAFDTVLVYKLDRLSRSVRDTLYLVKDVFTKNKIDFISLNESINTSSATGSLFLTILSAINEFERENIKERMTMGKLGRAKSGKSMMWTKTAFGYHHNRRTGILEIVPPQAAIVEQIFTDYLSGISLTKLRDKLNESGHIGKDIPWSYRTLRQTLDNPVYCGYIKFKGSLFEGMHKPIIPYETYLKVQKELEVRQQQTYERNNNPRPFQAKYMLSGMARCGYCGAPLKIVLGRKRRDGSRTMRYHCANRFPRKTKGVTVYNDNKKCDSGTYDLSSLENTVIDNLIGFQENNDSLLKIINGDNQPILDTSSFKKQISQIDKKIQKNSDLYLNDFITMDELKARTDSLQAEKKLLKAKISENRFNDSTDVFELVKTQLGSIPINELSYDNKKKIVNNLVSKVDVTADNVDIIFKFQLA

SEQ ID NO: 5014 - protein, 469 aa, synthetic construct
MSYTTPVRAAVYLRISEDRSGEQLGVARQREDCLELCDQRKWVPVEYLDNDVSASTGKRRPAYEQMLADITAGKIAAVVAWDLDRLHRRPVELEAFMSLADEKRLALATVAGDVDLATPQGRLVARLKGCVAAHETEHKKARQRRAARQKAERGLPNWSKAFGYLPGPNGPEPDPRTAPLVKQAYTDILAGASLGDVCRQWNDAGVFTITGRPWTTTTLSKFLRKPRNAGLRAYKGARYGPVDRDAIVGKAQWSPLVDEGTFWAAQAVLDAPGRAPGRKSVRRHLLTGLAGCGKCGNHLAGSCRTDGRVVYVCKACHGVSILAVNIEPILYHIVAERLAKPDAVDLLRREIHDAAEAETIRLELETLYGELDRLAVERAEGLLTARQVKISTDIVNVKITELQARQLDQERLRVFDGIPLGTPQVAGMIAELSPNRFRAVLDALAEVVVQPVGKSCRNFNPERVQVNWR

SEQ ID NO: 5015 - protein, 452 aa, synthetic construct
MKAAIYIRVSTREQVENYSIQAQTEKLTALCRSKDWDVYDIFIDGGYSGSNMNRPALNEMLSKLHEIDAVVVYRLDRLSRSQRDTITLIEEYFLKNNVEFVSLSETLDTSSPFGRAMIGILSVFAQLERETIRDRMVMGKIKRIEAGLPLTTAKGRTFGYDVIDSKLYINEEEAKQLQLIYDIFEEEQSITFLQRRLKKLGFKVRTYSRYNNWLTNDLYCGYVSYKDKVHVKGIHEPIISEEQFYRVQEIFARMGKNPNMNRDSASLLNNLVVCSRCGLGFVHRRKDTTSRGKKYHYRYYSCKTYKHTYELEKCGNKIWRADKLEELIIDRVNNYSFASRNVDKEDEQDSLNEKLKIEHARRKRLFDLYINGSYEVSELDCMMNDIDAQINYYESQIEANEELKKDKKIQESLAHLATVDYDSLEFREKQLYLKSLINKIYIDGEQVTIEWL

SEQ ID NO: 5016 - protein, 452 aa, synthetic construct
MKAAIYIRVSTREQVENYSIQAQTEKLTALCRSKDWDVYDIFIDGGYSGSNMNRPALNEMLSKLHEIDAVVVYRLDRLSRSQRDTITLIEEYFLKNNVEFVSLSETLDTSSPFGRAMIGILSVFAQLERETIRDRMVMGKIKRIEAGLPLITAKGRTFGYDVIDTKLYINEEEAKQLQLIYDIFEEEQSITFLQKRLKKLGFRVRTYNCYNNWLTNDLYCGYVSYKDKVHVKGIHEPIISEEQFYRVQEIFARMGKNPNMNRDSASLLNNLVVCSKCGLGFVHRRKDTVSRGKKYHYRYYSCKTYKHIHELEKCGNKIWRADKLEELIINRVNNYSFASRNVDKEGELDSLNEKLRIEHAKKKRLFDLYINGGYEVSELDSLMDDIDAQINHYESQIGASEELKKNKKIQENLADLATVDYDSLEFREKQLYLKSLINKIYIDGEQVTIEWL

SEQ ID NO: 5017 - protein, 452 aa, synthetic construct
MKAAIYIRVSTREQVENYSIQAQTEKLTALCRSKDWDVYDIFIDGGYSGSNMNRPALNEMLSKLHEIDAVVVYRLDRLSRSQRDTITLIEEYFLKNNVEFVSLSETLDTSSPFGRAMIGILSVFAQLERETIRDRMVMGKIKRIEAGLPLTTAKGRTFGYDVIDTKLYINEEEAKQLQLIYDIFEEEQSITFLQKRLKKLGFKVRTYNRYNNWLTNDLYCGYVSYKDKVHVKGIHEPIISEEQFYRVQEIFTRMGKNPNMNRDSASLLNNLVVCSKCGLGFVHRRKDAMSRDKKYHYRYYSCKTYKHIHELEKCGNKIWRADKLEELIINRVNNYSLASRNMDKEGELDSLNEKLKIEHARKRRLFDLYINGRYEVSELDSMMNDIDAQINYYESQIEANEELKKNKRIQENLADLATVDFDSLEFREKQLYLKSLINKIYIDGEQVTIEWL

SEQ ID NO: 5018 - protein, 452 aa, synthetic construct
MKAAIYIRVSTREQVENYSIQAQTEKLTALCRSKDWDVYDIFIDGGYSGSNMSRPALNEMLSKLHEIDAVVVYRLDRLSRSQRDTITLIEEYFLKNNVEFVSLSETLDTSSPFGRAMIGILSVFAQLERETIRDRMVMGKIKRIEAGLPLTTAKGRTFGYDVIDTKLYINEGEAKQLQLIYDIFEEEQSITFLQKRLKKLGFKVHTYSRYNNWLTNDLYCGYVSYKDKVHVKGIHEPIISEEQFYRVQEIFARMGKNPNVNRDSASLLNNLVVCSKCGLGFVHRRKDTVSRGKKYHYRYYSCKTYKHTHELEKCGNKIWRADKLEELIINRVNNHSFASRNVDKEDGLDSLNEKLKIEHAKKKRLFDLYVNGSYEVSELDSMMNDIDAQINYYESQIEANEELRKNQRIQENLADLATVDFGSLEFREKQLYLKSLINKIYIDGEQVTIEWL

SEQ ID NO: 5019 - protein, 469 aa, synthetic construct
MSYTTPVRAAVYLRISEDRSGEQLGVARQREDCLKLCGQHRWVPVEYLDNDVSASTGKRRPAYEQMLADITAGKIAAVVAWDLDRLHRRPVELEAFMSLADEKRLALATVAGDVDLATPQGRLVARLKGCVAAHETEHKKARQRRAARQKAERGHPNWSKAFGYLPGPNGPEPDPRTAPLVKQAYANILAGASLGDVCRQWNDAGAFTITGRPWTTTALSKFLRKPRNAGLRAYKGARYGPVDRDAIVGKAQWSPLVDEATFWAAQAVLDAPGRAPGRKSVRRHLLTGLAGCGKCGNHLAGSYRTDGRVVYVCKACHGVSILADNIEPILYRIVAERLAMPDAVDLLRREIHDAAEAETIRLELEILYGELDRLAVERAEGLLTARQVKISTDIVNAKITKLQARQLDQERLRVLGGIPLGTPQVAGMIAELSPDRFRAVLDVLAEVVVQPVGKSGRIFNPERVQVNWR

SEQ ID NO: 5020 - protein, 469 aa, synthetic construct
MSYTTPVRAAVYLRISEDRSGEQLGVARQREDCLKLCGQRRWVPVEYLDNDVSASTGKRRPAYERMLADITAGKVAAVVAWDLDRLHRRPLELEAFMSLADEKHLALATVAGDVDLATPQGRLVARLKGSVAAHETEHKKARQRRAARQKAERGYPNWSKAFGYLPGPNGPEPDPRTAPLVKQAYADILAGASLGDVCRQWNDAGAFTITGRPWTTTTLSKFLRKPRNAGLREYRGARYGPVDRDAIVGKAQWSPLVDEATFWAAQAVLDAPGRAPGRKSVRRHLLTGLAGCGKCGNHLAGSYRTDGRVVYVCKACHGVAILADNIEPVLYHIVAERLAMPDAVDLLRREIHDAAEAETTRLELETLYGELDRLAVERAEGLLTARQVKISTDIVNAKIAKLRARQLDQERLRVLDGIPLGTPQAAGMIAELSPDRFRAVLDVLAEVVVQPVGKSSRIFNPERVQVNWR

SEQ ID NO: 5021 - protein, 485 aa, synthetic construct
MTKKVAIYTRVSTTNQAEEGFSIDEQIDRLTKYAEAMGWQVSDTYTDAGFSGAKLERPAMQRLINDIENKAFDTVLVYKLDRLSRSVRDTLYLVKDVFTKNKIDFISLNECIDTSSAMGSLFLTILSAINEFERENIKERMTMGKLGRAKSGKSMMWTKTAFGYYHNRKTGILEIVPLQATIVEQIFTDYLSGISLTKLRDKLNESGHIGKDIPWSYRTLRQTLDNPVYCGYIKFKDSLFEGMHKPIIPYETYLKVQKELEERQQQTYERNNNPRPFQAKYMLSGMARCGYCGAPLRIVLGHKRKDGSRTMKYHCANRFPRKTRGVTVYNDNKKCDSGTYDLSSLENTVIDNLIGLQENNDSLLEIINGNNQPILDTSSFEKQISQIDKKIQRNSDLYLNDLITMDELKDRTDSLQAEKKLLKAKISENKFNDSTDVFELVKTQLGSIPINELSYDNKRKIVNNLVSKVDVTADNVDIIFKFQLA

SEQ ID NO: 5022 - protein, 452 aa, synthetic construct
MKAAIYIRVSTREQVENYSIQAQTEKLTALCRSKDWDVYDIFIDGGYSGSNMNRPALNEMLSKLHEIDAVVVYRLDRLSRSQRDTITLIEEYFLKNNVEFVSLSETLDTSSPFGRAMIGILSVFAQLERETIRDRMVMGKIKRIEAGLPLTTAKGRTFGYDVIDTKLYINEEEAKQLQLIYDIFEEEQSITFLQKRLKRLGFKVRSYNRYNNWLTNDLYCGYVSYKDKVHVKGIHEPIISEEQFYRVQEIFTRMGKNPNMNRGSASLLNNLVVCSKCGLGFVHRRKDIMSHGKEYHYRYYSCKTYKHIHELEKCGNKIWRADKLEELIISRVNSYSVTSRNVDKEDGLDSLNEKLKIEHAKKKRLFDLYLNGSYEVSELDSMMNDIDAQINYYESQIEANEELKKNKKILENLAHLATVDFDSLEFREKQLYLKSLINKIYIDGEQVTIEWL

SEQ ID NO: 5023 - protein, 452 aa, synthetic construct
MKAAIYIRVSTREQVENYSIQAQTEKLTALCRSKGWDVYDIFIDGGYSGGSMNRPALNEMLSKLHEIDAVVVYRLDRLSRSQRDTITLIEEYFLKNNVEFVSLSETLDTSSPFGRAMIGILSVFAQLERETIRDRMVMGKIKRIEAGLPLTTAKGRTFGYDVIDTKLYINEEEAKQLRLIYDIFEEEQSITFLQKRLKKLGFKVRTYNRYNNWLTNDLYCGYVSYKDKVHVKGIHEPIISEEQFYRVQEIFTRMGKNPNMNRDSASLLNNLVVCSKCGLGFVHRRKDTMSRDKKYHYRYYSCKTYKHIHELEKCGNKIWRADKLEELIIHRVNNYSVASRNVDKGDELDSLNEKLKIEHAKRKRLFDLYINGSYEVSELDSMMSDIDAQINYYESQIEANEELKKNKKIQENLAHLATVDFDSLEFREKQLYLKSLINKIYIDGDQVTIEWQ

SEQ ID NO: 5024 - protein, 452 aa, synthetic construct
MKAAIYIRVSTQEQVGNYSIQAQTEKLTALCRSKDWDVYDIFVDGGYSGSNMNRPALNEMLSKLHEIDAVVVYRLDRLSRSQRDTTTLIEEYFLKNNVEFVSLSETLDTSSPFGRAMIGILSVFAQLERETIRDRMVMGKIKRIEAGLPLTTAKGRTFGYDVIDTKLYINEEEARQLRLIYDIFEEERSITYLQKRLKKLGFKVRTYNRYNNWLTNDLYCGYVSYKDKVHVKGIHEPIISEEQFYRVQEIFTRMGKNPNMNRDSASLLNNLVVCSKCGLGFVHRSKDTMCRGKKYHYRYYSCKTYKHTHELEKCGNKTWRADKLEELIINRVNNYSFASRNVDKEDELDSLNEKLRIEHGKKKRLFDLYINGSYEASELDSMMNDIDAQINYYESQIEANEELKKNKKIQENLADLATVDFDGLEFREKQLYLKSLINKIYIDGEQVTIEWL

SEQ ID NO: 5025 - protein, 452 aa, synthetic construct
MKAAIYIRVSTQEQVENYSIQAQTEKLTALCRSKDWDVYDIFIDGGYSGSNMNRPALNEMLSRLHEIDAVVVYRLDRLSRSQRDTTTLIEEYFLKNNVEFVSLSETLDTSSPFGRAMIGILSVFAQLERETIRDRMVMGKIKRIEAGLPLTTAKGRTFGYDVIDTKLYINEEEAKQLQLIYDIFEEEQSITALQKRLKKLGFKVRTYNRYNNWLTNDLYCGYVSYKDKVHVKGIHEPIISEEQFYRVQGIFARMGKNPNMNRDNASLLSNLVVCSRCGLGFVHRSKDTMSRGKKYHYRYYSCKTYKHTHELEKCGNKTWRADKLEELIISRVNNYSFASRSVDKEDELDSLNEKLKIEHAKKKRLFDLYINGSHEVSELDSMMNDINAQINYYESQIEANEELKENKKIQENLAELATVDFDSLEFREKQLYLKSLINKIYIDGEQVTIEWL

SEQ ID NO: 5026 - protein, 452 aa, synthetic construct
MKAAIYIRVSTREQVENYSIQAQTEKLTALCRSKDWDVYDIFIDGGYSGSNMNRPALNEMLSKLHEIDAVVVYRLDRLSRSQRDTITLIEEYFLKNNVEFVSLSETLDTSSPFGRAMIGILSVFAQLERETIRDRMVMGKIKRIEAGLPLTTAKGRTFGYDVIDTKLYINEEEAKQLQLIYDIFEEERSITLLQKRLKKLGFKVRTYSCYNSWLTNDLYCGYVSYKDKVHVKGIHEPIISEEQFYRVQEIFARMGKDPNMNRDSASLLNNLVVCSKCGLGFVHRRKDTMSRGKKYHYRYYSCKTYKHTHELEKCGNKIWRADKLEELIINRVNDYSLASRNVDKEDELDSLNEKLKVEHARRKRLFDLYINGSYNVSELDSMMSDIDAQVNYYESQIEASEELKKNKKIQENLADLATVDFDSLEFREKQLYLKSLINKIYIDGEQVTIEWL

SEQ ID NO: 5027 - protein, 469 aa, synthetic construct
MSYTTPVRAAVYLRISEDRSGEQLGVARQREDCLKLCDQRKWVPVEYLDNDVSASTGKRRPAYEQMLADITAGKIAAVVAWDLDRLHRRPIELEAFMSLADEKRLALATVAGDVDLATPQGRLVARLKGSVAAHETEHKKARQRRAARQKAERGYPNWSKAFGYLPGPNGPEPDPRTAPLVKQAYADILAGASLGDVCRQWNDAGAFTITGRLWTTTTLSKFLRKPRNAGLRAYKGARYGPVDRDAIVGKAQWSPLVDEVTFWAAQAVLDAPGRAPGRKSVRRHLLTGLAGCGKCGNHLAGSYRTDGRVVYVCKACHGVSILAVNIEPILYHIVAERLAMPDAVDLLRREIHDAAEAETIRLELETLYGELDRLAVERAEGLLTARQVKISTDIVNAKITKLQAHQLDQERLRVFDGIPLGTPQVAGMIAELSPDRFRAVLDVLAEVVVQPVGKSGRIFNPERVQVNWR

SEQ ID NO: 5028 - protein, 485 aa, synthetic construct; identical to SEQ ID NO: 4157

SEQ ID NO: 5029 - protein, 452 aa, synthetic construct
MKAAIYIRVSTREQVENYSIQAQTEKLTALCRSKDWDVYDIFIDGGYSGSNMNRPALNEMLSKLHGIDAVVVYRLDRLSRSQRDTITLIEEYFLKNNVEFVSLSETLDTSSPFGRAMIGILSVFAQLERETIRDRMVMGKIKRVEAGLPLTTAKGRTFGYDVIDTKLYINEEEAKQLQLIYDIFEEEQSIASLQKRLKKLGFKVRTYNRYSSWLTNDLYCGYVSYKDKVRVKGIHEPIISEEQFYRVQEIFTRMGKNPNMNRDSASLLNNLVVCSKCGLGFVHRRKDTTSRGKKYRYRYYSCKTYKHIHELEKCGNKIWRADKLEELVINRVNNYSLASRNVDKEDELDSLNGKLKIEHAKKKRLFDLYTNGSYEVSELDSMMNDIDAQINYYESQIEANEELKRNKKIQENLAVLATVDFDSLEFREKQLYLKSLINKIYIDGEQVTIVWL

SEQ ID NO: 5030 - protein, 452 aa, synthetic construct
MKAAIYIRVSTREQVENYSIQAQTEKLTALCRSKDWDVYDIFIDGGYSGSNMNRPALNEMLSKLHEIDAVVVYRLDRLSRSQRDTITLIEEYFLKNNVEFVSLSETLDTSSPFGRAMIGILSVFAQLERETIRDRMVMGKIKRIEAGLPLTTAKGRTFGYDVIDTKLYINKEEAKQLQLIYDIFEEEQSITFLQKRLKRLGFKVHTYSRYNNWLTNDLYCGYVSYKDKVHVKGIHEPIISEEQFYRVQEIFTRMGKNPNMNRGSASLLNNLVVCSKCGLSFVHRRKDAVSRDKKYHYRYYTCKTYKHIHELEKCGNKIWRADKLEELIINRVNNYSLASRNVDKEDGLDSLNEKLKIEHAKKKRLFDLYLNGSYEVSELDSMMNDIDAQISYYESQIETNEALIKNKKIQENLADLATVDFDSLEFREKQLYLKSLINKIYIDGEQVTIEWL

SEQ ID NO: 5031 - protein, 469 aa, synthetic construct
MSYTTPVRAAVYLRISEDRSGEQLGVARQREDCLKLCDQRKWVPVEYLDNDVSASTGKRRPAYEQMLADITAGKIAAVVAWDLDRLHRRPIELEAFMSLADEKRLALATVAGDVDLATPQGRLVARLKGSVAAHETEHKKARQRRAARQKAERGHPNWSKAFGYLPGPNGPEPDPRTAPLVKQAYADILAGASLGDVCRRWNDAGAFTITGRLWTTTALSKFLRKPRNAGLRAYKGARYGPVDRDAIVGKAQWSPLVDEAAFWAAQAVLDAPGRAPGRKSVRRHLLTGLAGCGKCGNHLAGSYRADGRVVYVCKACHGVAILADNIEPILYHIVAERLAMPDAVDLLRREIHDAAEAETIRLELETLYGELDRLAVERAEGLLTARQVKISTDIVNAKITKLQARQLDQERLRVFDGIPLGTPQVAGMIAELSPDRFRAVLDVLAEVVVRPVGKGGRIFNPERVQVNWR

SEQ ID NO: 5032 - protein, 452 aa, synthetic construct
MKAAIYIRVSTREQVENYSIQAQTEKLTALCRSKDWDVYDIFVDGGYSGSNMNRPALNEMLSKLHEIDAVVVYRLDRLSRSQRDTITLIEEYFLKNNVEFVSLSETLDTSSPFGRAMIGVLSVFAQLERETIRDRMVMGKIKRIEAGLPLTTAKGRTFGYDVIDTKLYINEEEAKQLQLIYDIFEEEQSITSLQKRLKKLGLKVRTYSRYNNWLTNDLYCGYVSYKDKVHVKGIHEPIISEEQFYRVQEIFTRMGKNPNMNRDSASLLNNLVVCGKCGLGFVHRRKDTMSRGKKYHYRYYSCKTYKHIHELEKCGNKIWRADKLEELVINRVNNYSFASRNVDKEDELDSLNDKLKIEHAKKKRLLDLYINGSYDVSELDSMMNGIDAQINYYESQIGANEELKRSKKIQENLADLATVDFDSLEFREKQLYLKSLINKIYIDGEQVTIEWL

SEQ ID NO: 5033 - protein, 452 aa, synthetic construct
MKAAIYIRVSTQEQVGNYSIQAQTEKLTALCRSKDWDVYDIFIDGGYSGSNMNRPALNEMLSKLHEIDAVVVYRLDRLSRSQRDTTTLIEEYFLKNSVEFVSLSETLDTSSPFGRAMIGILSVFAQLERETIRDRMVMGKIKRIEAGLPLTTAKGRTFGYDVIDTKLYVNEEEAKQLRLIYDIFEEEQSITFLQKRLKKLGFKVRTYNRYNNWLTNDLYCGYVSYKDKVHVKGIHEPIISEEQFYRVQEIFTRMGKNPNMNRDSASLLNNLVVCSKCGLSFVHRSKDTMSRGKKYHYRYYSCKTYKHTHELEKCGNKTWRADELEELIINRVNSYSFASRNVDKEDELDSLNEKLKIEHAKKRRLFDLYINGSYEVSELDSMMNDIDAQINHYESQIEANEELKKNKKIQENLADLATVDFDSLEFREKQLYLKSLINKIYIDGEQVTIEWL

SEQ ID NO: 5034 - protein, 452 aa, synthetic construct
MKAAIYIRVSTREQVENYSIQAQTEKLTALCRSKDWDVYDIFVDGGYSGSNMNRPALNEMLGKLHEIDAVVVYRLDRLSRSQRDTITLIEEYFLKNNVEFVSLSETLDTSSPFGRAMIGILSVFAQLERETIRDRMVMGKIKRIEAGLPLTTAKGRTFGYDVIDTKLYINEEEAKQLQLIYDIFEEEQSITFLQKRLKKLGFKVRTYNCYNNWLTNDLYCGYVSYKDKVHVKGIHEPIISEEQFYRVQEIFARMGKNPNMNRDSASLLNNLVVCSKCGLGFVHRRKDTMSRDKKYHYRYYSCKTYKHIHELEKCGNKIWRADELEELIINRVNNYSLASRNVDKEDGLDSLNEKLKIEHAKKKRLFDLYLNGSYEVSELDGMMDDIDAQISYYESQIETNEALIKNKKIQENLANLATVDFDSLEFREKQLYLKSLINKIYIDGEQVTIEWL

SEQ ID NO: 5035 - protein, 452 aa, synthetic construct
MKAAIYIRVSTREQVENYSIQAQTEKLTALCRSKDWDVYDIFIDGGYSGSNMNRPALNEMLSKLHEIDAVVVYRLDRLSRSQRDTITLIEEYFLKNNVEFVSLSETLDTSSPFGRAMIGILSVFAQLERETIRDRMVMGKIKRIEAGLPLTTAKGRTFGYDVIDTKLYINEEEARQLQLIYDIFEEEQSITFLQKRLKKLGFKVRTYNCYNSWLTNDLYCGYVSYKDKVHVKGIHEPIISEEQFYRVQEIFTRMGKNPNMNRDSASLLNNLVVCSKCGLGFVHRRKDTTSRGKKYHYRYYSCKTYKHIHELEKCGNKIWRADKLEELIINRVNNYSFASRNVDKEDELDSLSEKLKIEHAKKKRLFELYINGSYEVSELDSMMNDIDAQINYYESQIEANEELKKNKKIQENLANLASVDYDSLEFREKQLYLKSLINKIYIDGEQVTIEWL

SEQ ID NO: 5036 - protein, 452 aa, synthetic construct
MKAAVYIRVSTREQVENYSIQAQTEKLTALCRSKDWDVYDIFIDGGYSGSNMNRPALNEMLSKLHEIDAVVVYRLDRLSRSQRDTITLIEEYFLKNNVEFVSLSETLDTSSPFGRAMIGILSVFAQLERETIRDRMVMGKIKRIEAGLPLTTAKGRTFGYDVIDTKLYINEEEAKQLQLIYDIFEGEQSITFLQKRLKKLGFKVRTYNRYRNWLTNDLYCGYVSYKDKVHVKGIHEPIISEEQFYRVQEIFTRMGKSPNMNRDSASLLNNLVVCSKCGLGFVHRRKDAMSRDKKYHYRYYSCKTYKHIHELEKCGNKIWRADKLEELIINRLNNYSVASRNVDKEDELDSLNEKLRIEHAKKKRLFDLYINGSYEVSELDSMMNDIDAQINYYESQVEASEELRKNKKIQENLADLATVDFDSLEFREKQLYLKSLINKIYIDGEQVTIEWL

SEQ ID NO: 5037 - protein, 452 aa, synthetic construct
MKAAIYIRVSTREQVENYSIQAQTEKLTALCRSKDWDVYDIFIDGGYSGSNMNRPALNEMLSKLHKIDAVVVYRLDRLSRSQRDTITLIEEYFLKNNVEFVSLSETLDTSSPFGRAMIGILSVFAQLERETIRDRMVMGKIKRIEAGLPLTTAKGRTFGYDVIDTKLYINEEEAKQLQLIYDIFEEEQSITSLQKRLKKLGSKVHTYNRYNNWLTNDLYCGYVSYKDKVHVKGIHEPIISEEQFYRVQEIFTRMGKNPNMNRDSASLLNNLVVCSKCGLGFVHRRKDAMSRDKKYHYRYYSCKTYKHIHELEKCGNKIWRADKLEELIINRVNNYSLASRNVDKEDELDSLNEKLKIEHAKKKRLFDLYINGRYEVSELDSMMNDIDAQINYYESQIEANEELKKNKKIQENLADLATVDLDSLEFREKQLYLKSLINKIYVDGEQVTIEWL

SEQ ID NO: 5038 - protein, 469 aa, synthetic construct
MSYTTPVRAAVYLRISEDRSGEQLGVARQREDCLKLCDQRKWVPVEYLDNDVSASTGKRRPAYEQMLADITAGKIAAVVAWDLDRLHRRPIELEAFMSLADEKRLALATVAGDVDLATPQGRLVARLKGSVAAHETEHKKARQRRAARQKAERGLPNWSKAFGYLPGPNGPEPDPRTAPLVKQAYADILAGASLGDVCRQWNGAGALTITGRPWTTTALSKFLRKPRNAGLRAYKGARYGPVDRDAIVGKAQWSPLVDEATFWAAQAVLDAPGRAPGRKSVRRHLLTGLAGCGKCGNHLAGSYRTDGRVVYVCKACHGVAILAENIEPILYHIVAERLAMPDAVDLLRREIHDAAEAETIRLELETLYGELDRLAVERAEGLLTARQVKISTDVVNAKITKLQARQLDQERLRVFNGIPLGTPQVAGMIAELSPDRFRAVLDVLAEVVVQPVRKRGRIFNPERVQVNWR

SEQ ID NO: 5039 - protein, 469 aa, synthetic construct
MSYTTLVRAAVYLRISEDRSGEQLGVARQREDCLKLCDQRKWVPVEYLDNDVSASTGKRRPAYEQMLADITAGKIAAVVAWDLDRLHRRPIELEAFMSLADEKRLALATVAGDVDLATPQGRLVARLKGSVAAHETEHKKARQRRAARQKAERGHPNWSKAFGYLPGPNGPEPDPRTAPLVKQAYADILAGASLGDVCRRWNGAGAFTITGRPWTTTTLSKFLRKPRNAGLRAYKGARYGPVDRDAIVGKAQWSPLVDEATFWAAQAVLDAPGRAPGRKSVRRHLLTGLAGCGKCGNHLAGSYRTDGRVVYVCKACHGVAILADNIEPILYHIVAERLAMPDAVDLLRREIHDAAEAETIRLELETLYGELDHLAVERAEGLLTARQVKISTDIVNAKITKLQARQLDQERLRVLDGIPLGTPQVAGMIAELSPDRFRAVLDVLAEVVVRPVGKSGRIFNPERVRVNWR

SEQ ID NO: 5040 - protein, 452 aa, synthetic construct
MKAAIYIRVSTREQVENYSIQAQTEKLTALCRSKDWDVYDIFIDGGYSGSNMNRPALNEMLSKLHEIDAVVVYRLDRLSRSQRDTITLIEEYFLKNNVEFVSLSETLDTSSPFGRAMIGILSVFAQLERETIRDRMVMGKIKRIEAGLPLTTAKGRTFGYDVIDTKLYVNEEEAKQLQLIYDIFEEEQSITFLQKRLKELGFKVRTYNRYNNWLTNDLYCGYVSYKDKVHVKGIHEPIISEEQFYRVQEIFTRMGKNPNMNRDSASLLNNLVVCSKCGLGFVHRRKDAVSRDKKYHYRYYSCKTYKHIHELEKCGNKIWRADKLEELVINRVNDYSLASRNVDKEGELDSLNEKLKIEHAKKRRLFELYINGRYEVSELDSMMNDIDAQINYYESQIEANEGLKKNEKTQENLAYLATVDFDSLEFREKQLYLKSLINKIYIDGEQVTIEWL

SEQ ID NO: 5041 - protein, 452 aa, synthetic construct
MKAAIYIRVSTQEQVGNYSIQAQTEKLTALCRSKDWDVYDIFIDGGYSGSNMNRPALNEMLSKLHEIDAVVVYRLDRLSRSQRDTTTLIEEYFLKNNVEFVSLSETLDTSSPFGRAMIGILSVFAQLERETIRDRMVMGKIKRIEAGLPLTTAKGRTFGYDVIDTKLYVNEEEAKQLRLIYDIFEEERSITSLQKRLKKLGFRVHAYNRYNNWLTNDLYCGYVSYKDKVHVKGIHEPIISEEQFYRVQEIFTRMGKNPNMNRDSASLLSNLVVCSKCGLGFVHRSKDTMSRGKKYHYRYYSCKTYKHTHELEKCGNKTWRADKLEELIINRVNNYSFASRNVDKVDELDSLNEKLKIEHARKKRLFDLYINGSYEVSELDSMMNDIDAQINYYESQIKANEGLKKNKKIQEDLAELATADFDSLEFRGKQLYLKSLISKIYIDGEQVTIEWL

SEQ ID NO: 5042 - protein, 469 aa, synthetic construct
MSYTTPVRAAVYLRISEDRSGEQLGVARQREDCLKLCGQRGWVPVEYLDNDVSASTGKRRPAYEQMLADISAGKIAAVVAWDLDRLHRRPIELEAFMCLADEKRLALATVAGDVDLATPQGRLVARLKGSVAAHETEHKKARQRRAARQKAERGHPNWSKAFGYLPGPNGPEPDPRTAPLVKQAYADILAGASLGDVCRQWNDAGAFTITGRPWTTTTLSKFLRKPRNAGLRAYKGARYGPVDRDAIVGRAQWSPLVDEATFWAAQAVLDAPGRAPGRKSVRRHLLTGLAGCGKCGNHLAGSYRTDGRVVYVCKACHGVAILADNIEPILYHIVAERLAMPDAVDLLRREIHDAAEAETIRLELEALYGELDRLAVERAEGLLTARQVKISTDIVNAKITKLQACQLDQERLRVFDGIPLGTPQVAGIIAELSPDRFRAVLDVLAEVVVQPVGKSGRIFNPERVQVNWR

SEQ ID NO: 5043 - protein, 452 aa, synthetic construct
MKAAIYIRVSTREQVENYSIQAQTEKLTALCRSRDWDVYDIFIDGGYSGSNMNRPALNEMLSKLHEIDAVVVYRLDRLSRSQRDTITLIEEYFLKNNVEFVSLSETLDTSSPFGRAMIGILSVFAQLERETIRDRMVMGKIKRIEAGLPLTTAKGRTFGYDVIDTKLYINEEEAKQLRLIYDIFEEEQSITFLQKRLKKLGFKVRTYNRYNNWLTNDLYCGYVSYKDKVRVKGIHEPIISEEQFYRVQEIFTRMGKNPNMNRDSASLLNNLVVCSKCGLGFVHRRKDIMSRGKKYHYRYYSCKTYKHIHELEKCGNKIWRADKLEELIINRVNNYSLASRNVDKEDELDSLNEKLKIEYAKKKRLFDLYINGSFEVSELDSMMNDIDAQINYYESQIEANEELRKNKKIQENLADLATVDFDSLEFREKQLYLKSLISKIYIDGEQVTIEWL

SEQ ID NO: 5044 - protein, 452 aa, synthetic construct
MKAAIYIRVSTREQVENYSIQAQTEKLTALCRSKDWDVYDIFIDGGYSGSNMNRPALSEMLSRLHEIDAVVVYRLDRLSRSQRDTITLIEEYFLKNNVEFVSLSETLDTSSPFGRAMIGILSVFAQLERETIRDRMVMGKIKRIEAGLPLTTAKGRTFGYDVIGTRLYINEEEARQLQLIYDIFEEEQSITSLQKRLKKLGFKVRTYNRYNNWLTNDLYCGYVSYKDKVHVKGIHEPIISEEQFYRVQEIFARMGKNPNMNRDSASLLNSLVVCSRCGLGFVHRRKDIMSHGKKYHYRYYSCKTYKHIHELEKCGNKIWRADKLEELIINRVNNYSLASRNVGKEDELDSLNEKLKIEHAKKKRLFDLYINGSYKVSELDSMMNDVDAQINYYESQIEANEELRKNKKIQENLAYLATVDFDSLEFREKQLYLKSLINKIYIDGEQVTIEWL

SEQ ID NO: 5045 - protein, 485 aa, synthetic construct
MTKKVAIYTRVSTTNQAEEGFSIDEQVDRLTKYAEAMGWQVSDTYTDAGFSGAKLERPAMQRLINDIENKAFDTVLVYKLDRLSRSVRDTLYLVKDVFTKNKIDFISLNESINTGSAMGSLFLTILSAINEFERENIKERMTMGKLGRAKSGKSMMWTKTAFGYHHNRKTGILEIVPLQATVVEQIFTEYLSGISLTKLRDKLNESGHVGKDIPWSYRTLRQTLDNPVYCGYIKFKDSLFEGMHKPIISYETYLKVQKELEERQQQAYERNNNPRPFQAKYMLSGMARCGYCGAPLRIVLGHKRKDGSRTMKYHCANRFPRKTKGVTVYNDNKRCDSGTYDLSNLENTVIDNLIGFQEDNDSLLKIINGNNQPILDTSSFKEQISQIDKKIQKNSDLYLNDFITMDELKDRTDSLQAEKKLLKAKISENKFNDSTDVFELVKTQLGSIPINELSYDSKKKIVNNLVSKVDVTADNVDIIFKFQLA

SEQ ID NO: 5046 - protein, 452 aa, synthetic construct
MKAAIYIRVSTREQVENYSIQAQTEKLTALCRSKGWDVYDIFIDGGYSGSNMNRPALNEMLSKLHEIDAVVVYRLDRLSRSQRDTITLIEEYFLKNNVEFVSLSETLDTSSPFGRAMIGILSVFAQLERETIRDRMVMGKIKRIEAGLPLTTAKGRTFGYDVIDTKLYINEEEAKQLRLIYDIFEEEQSITFLQKRLKKLGFKVRTYNRYNNWLTNDLYCGYVSYKDKVHVKGIHEPIISEEQFYRVQEIFARMGKNPNMNRDSASLLNNLVVCSKCGLGFVHRRKDIMSHGKRYHYRYYSCKTYKHIHELEKCGNKIWRADRLEELIINRVNNYSLASRNVDKEDELDSLNEKLKTEHAKKRRLFDLYINGSYEVSELDSMMKDIDAQISYYESQIEANGELRKNKKIQENLAGLATVDFDDLEFREKQLYLKSLINKIYIDGEQVTIEWL

SEQ ID NO: 5047 - protein, 452 aa, synthetic construct
MKAAIYIRVSTREQVENYSIQAQTEKLTALCRSKDWDVYDIFIDGGYSGSNMNRPALNEMLSRLHEIDAVVVYRLDRLSRSQRDTITLIEEYFLKNNVEFVSLSETLDTSSPFGRAMIGILSVFAQLERETIRDRMVMGKIKRIEAGLPLTTAKGRTFGYDVIDTKLYVNEEEAKQLQLIYDIFEEEQSITFLQKRLKKLGFKVHTYNRYNNWLTNDLYCGYVSYKDKVHVRGIHEPIINEEQFYRVQEIFARMGKNPNMNRDSASLLNNLVVCGKCGLGFVHRRKDAMSRSKKYHYRYYSCKTYKHIHELEKCGNKIWRADKLEELIIDRVNNYSFASRNADKEGELDSLNEKLKIEHAKKKRLFDLYISGRYEVSELDSMMNDIDAQINYYESQIEANEELKKNKKIQETLADLATVDFDSLEFREKQLYLKSLINKIYVDGEQVTIEWL

SEQ ID NO: 5048 - protein, 452 aa, synthetic construct
MKAAIYIRVSTREQVENYSIQAQTERLTALCRSKDWDVYDIFVDGGYSGSNMNRPALNEMLSKLHVIDAVVVYRLDRLSRSQRDTITLIEEYFLKNNVEFVSLSETLDTSSPFGRAMIGILSVFAQLERETIRDRMVMGKIKRIEAGLPLTTAKGRTFGYDVIDTKLYINEEEAKQLQLIYDIFEEEQSITFLQKRLKKLGFKVRTYNCYNNWLTNDLYCGYVSYKDKVHVKGIHEPIISEEQFYRVQEIFTRMGKNPNMNRDSASLLNNLVVCSKCGLGFVHRRKDAMSRDKKYHYRYYSCKTYKHIHELEKCGNKIWRADKLEELIINRVNDYSVASRNVDKEDELDSLNEKLKIEHAKKRRLFDLYINGSYEVSELDSMMNDIDAQINYYESQIEANEELKKNKKIQENLAHLATVDFDSLEFREKQLYLKSLINKIYIDGEQVTIEWL

SEQ ID NO: 5049 - protein, 485 aa, synthetic construct
MTKKVAIYTRVSTTNQAEEGFSIDEQIDRLTKYAEAMGWQVSDTYTDAGFSGAKLERPAMQRLINDIENKAFDTVLVYKLDRLSRSVRDTLYLVKDVFTKNKVDFISLNESINTSSAMGSLFLTILSAINEFERENIKERMTMGKLGRAKSGKSMMWTKTAFGYNHNRKTGILEIVPQQATIVEQIFTDYLSGISLTKLRDKLNESGHIGKDIPWSYRTLRQTLDNPVYCGYIKFKDSLFEGMHKPIIPYETYLKVQKELEERQQQTYERNNNPRPFQAKYMLSGMARCGYCGAPLKIVLGRKRKDGSRTMKYHCANRFPRKTKGITVYNDNKKCDSGTYDLSNLENTVIDSLIGFQENNDSLLKIINGNNQPILDTSSFREQISQIDKKIQKNSDLYLNDFITMDELKDRTDSLQAEKKLLKAKISEGKFNDSTDVFELVKTQLGSIPINELSYDNKKKIVDNLVSKVDVTADSVDIIFKFQLA

SEQ ID NO: 5050 - protein, 452 aa, synthetic construct
MKAAIYIRVSTREQVENYSIQAQTEKLTALCRSKGWDVYDIFIDGGYSGSNMNRPALNEMLSKLHEIDAVVVYRLDRLSRSQRDTITLIEEYFLKNNVEFVSLSETLDTSSPFGRAMIGILSVFAQLERETIRDRMVMGKIKRIEAGLPLTTAKGRTFGYDVIDTKLFINEEEAKQLQLIYDIFEEVQSITFLQKRLKKLGFKVRTYNRYNNWLTNDLYCGYVSYKDKVHVRGIHEPIISEEQFYRVQEIFTRMGKNPNMNRDSASLLNNLVVCSKCGLGFVHRRKDAMSRDKKYHYRYYSCKTYKHIHELEKCGNKIWRADKLEELIIKRVNNYSLASRNVDKEDELDSLSEKLKIEHAKKKRLFDLYINGSYEVSELDSMMNDIDAQISYYESQIEANEELKKDKKIQENLAYLATVDFDSLEFREKQLYLKSLINKIYIDGEQVTIEWL

SEQ ID NO: 5051 - protein, 452 aa, synthetic construct
MKAAIYIRVSTQEQVGNYSIQAQTEKLTALCRSKDWDVYDIFIDGGYSGSNMNRPALNEMLSKLHEIDAVVVYRLDRLSRSQRDTTTLIEEYFLKNNVEFVSLSETLDTSSPFGRAMIGILSVFAQLERETIRDRMVMGKIKRIEAGLPLTTAKGRTFGYDVIDTKLYINEEEARQLQLIYDIFEEEQSITLLQKRLKKLGFKVRTYNRYNNWLTNDLYCGYVSYKDKVHVKGIHEPIISEEQFYRVQEIFTRMGKKPNMNRDSASLLNNLVVCSKCGLSFVHRSKDTMSRGKKYHYRYYSCKTYKHTHELEKCGNKTWRADRLEELIINRVNNYSSASRNVDKEDELERLNEKLKIEHAKKKRLFDLYINGSYEASELDSMMNDIDAQINYYESQIEANEELKKNRKIQENLADLATVDFDSLEFREKQLYLKSLISKIYIDGEQVTIEWL

SEQ ID NO: 5052 - protein, 452 aa, synthetic construct
MKAAIYIRVSTQEQVENYSIQAQTEKLTALCRSKDWDVYDIFIDGGYSGSNMNRPALNEMLSKLHEIDAVVVYRLDRLSRSQRDTTTLIEEYFLKNNVEFVSLSETLDTSSPFGRAMIGILSVFAQLERETIRDRMVMGKIKRIEAGLPLTTAKGRTFGYDVIDTKLYINEEEARQLQLIYDIFEEVQSITFLQKRLKKLGFKVRTYNRYNNWLTNDLYCGYVSYKDKVHVKGIHEPIISEEQFYRVQEIFTRMGKNPNMNRDSASLLNNLVVCSKCGLGFVHRSKDTMSRGKKYHYRYYSCKTYKHTHELEKCGNKTWRADKLEELIINRVNNYSFASRNMVKEDELDSLNEKLKIEHAKKKRLFDLYINGSYEVSELDSMMNDIDAQINYYESQIEASEELRRNKKIQENLADLATADFDSLEFREKQLYLRSLINKIYIDGEQVTIEWL

SEQ ID NO: 5053 - protein, 469 aa, synthetic construct
MSYTTPVRAAVYLRISEDRSGEQLGVARQREDCLKLCGQRKWVPVEYLDNDVSASTGKRRPAYEQMLADITAGKIAAVVAWDLDRLHRRPIELEAFMSLADEKRLALATVAGDVDLATPQGRLVARLKGSVAAHETEHKKARQRRAARQKAERGLPNWSKAFGYLPGPNGPEPDPRTAPLVKQAYADILAGASLGDVCRQWNDAGALTITGRPWTTTALSKFLRKPRNAGLRAYKGARYGPVDRDAIVGKAQWSPLVDEATFWAAQAVLDAPGRAPGRKSVRRHLLTGLAGCGKCGNHLAGSYRTDGRVVYVCKACHGVAILADNIEPILYHIVAERLAMPDAVDLLRREIYDAAEAETIRLELETLYGELDRLAVERAEGLLTARQVKISTDIVNAKITKLQAHQLDQERLRVFDGIPLGTPQVAGVIAELSPDRFRAVLDVLAEVVVQPVGKGGRIFNPERVQVNWR

SEQ ID NO: 5054 - protein, 469 aa, synthetic construct
MSYTTPVRAAVYLRISEDRSGEQLGVARQREDCLKLCDQRQWVPVEYLDNDVSASTGKRRPAYEQMLADITAGKIAAVVAWDLDRLHRRPIELEAFMSLADEKRLALATVAGDVDLATPQGRLVARLKGSVAAHETEHKKARQRRAARQKAERGLPNWSEAFGYLPGPNGPEPDPRTAPLVKQAYADILAGASLGDVCRQWNDAGAFTITGRPWTTTTLSKFLRKPRNAGLRAYKGARYGPVDRDAIVGKAQWSPLVDEATFWAAQAELDAPGRAPGRKSVRRHLLTGLAGCGKCGNHLAGSYRTDGRVVYVCKACHGVAILADNIEPVLYHIVAERLAMPDAVDLLRCEIHDAAEAETIRLELETLYGELDCLAVERAEGLLTARQVKISTDIVNAKITKLQARQQDQERLRVLDGIPLGTPQVAGTIAELSPDRFRAVLDVLAEVVVQPVGKSGRMFNPERVQVNWR

SEQ ID NO: 5055 - protein, 469 aa, synthetic construct
MCYTTLVRAAVYLRISEDRSGEQLGVARQREDCLKLCGQRKWEPVEYLDNDVSASTGKRRPAYEQMLADITAGKIAAVVAWDLDRLHRRPIELEAFMSLADEKRLALATVAGDVDLATPQGRLIARLKGSVAAHETEHKKARQRRAARQKAERGYPNWSKAFGYLPGLNGPEPDPRTAPLVRQAYADILAGASLGDVCRRWNDAGAFTITGRPWTTTTLSKFLRKPRNAGLRAYKGARYGPVDRDAIVGKAQWSPLVDEATFWAAQAVLDAPGRAPGRKSVRRHLLTGLAGCGKCGNHLAGSYRTDGRVVYVCKACHGIAILADNIEPILYHIVAERLAMPDAVDLLRREIHDAAEAETIRLELETLHGELDRLAVERGEGLLTARQVKISTDIVNAKIAKLQACQLDQERLRVLDGIPLGTPQVAGVIAGLSPNRFRAVLDVLAEVVVQPVGKSGRIFNPERVQVNWR

SEQ ID NO: 5056 - protein, 485 aa, synthetic construct
MTKKVAIYTRVSTTNQAEEGFSIDEQIDRLTKYAEAMGWQVSGTYTDAGSSGAKLERPAMQRLINDIENKAFDTVLVYKLDRLSRSVRDTLYLVKDVFTKNKIDFISLSESIDTSSAMGSLFLTILSAINEFERENIKERMTMGKLGRAKSGKSMMWTKTAFGYYHNRKTGILEIVPLQATIVEQIFTDYLSGISLTKLRDKLNESGHIGKDIPWSYRTLRQTLDNPVYCGYIKFKDSLFEGMHKPIIPYETYLKVQKELEERQQQTYERNNNPRPFQAKYMLSGMARCGYCGAPLKIVLGHKRKDGSRTMKYHCANRFPRKTKGVTVYNDNKKCDSGTYDLGDLENTVIDNLIGFQENNDSLLKIINGNNQPILDTSSFKEQISRIDKKIQKNGDLYLNDFITMDELKDRTDSLQAEKKLLKAKISENKSNDSTDVFELVKTQLGSIPINELSYDNKKKIVNNLVSKVDVTADNVDIVFKFQLA

SEQ ID NO: 5057 - protein, 452 aa, synthetic construct
MKAAIYIRVSTREQVENYSIQAQTERLTALCRSKDWDVYDIFIDGGYSGSNMNRPALNEMLSKLHEVDAVVVYRLDRLSRSQRDTITLIEEYFLKNNVEFVSLSETLDTSSPFGRAMIGILSVFAQLERETIRDRMVMGKIKRIEAGLPLTTAKGRTFGYDVIDTKLYINEEEARQLQLIYDIFEEEQSITSLQKRLKKLGFKVRAYNRYNNWLTNDLYCGYVSYKDKVHVKGIHEPIISEEQFYRVQEIFTRMGKNPNMNRDSASLLNNLVVCSKCGLGFVHRRKDTTSRGKKYHYRYYSCKTYKHIHELEKCGNKIWRADKLEELIVNRVNDHSSASRNVDKEDELDRLNEKLKIEHAKKKRLFDLYINGSYEVSELDSMMNDIDAQINYYESQIEANEELRKNKKIQKNLADLATVDYDSLEFREKQLYLKSLINKIYIDGEQVTIEWL

SEQ ID NO: 5058 - protein, 469 aa, synthetic construct
MSYTTPVRAAVYLRISEDRSGEQLGVARQREDCLKLCDQRKWVPVEYLDNDVSASTGKRRPAYEQMLADISAGKIAAVVAWDLDRLHRRPIELEAFMSLADEKRLALATVAGDVDLATPQGRLVARLKGSVAAHETEHKKARQRRAARQKAERGLPNWSKAFGYLPGPNGPEPDPRTAPLVKQAYADILAGASLGDVCRQWNGAGAFTITGRPWTTTTLSKFLRKPRNAGLRAYKGARYGPVDRDAIVGRAQWSPLVDEATFWAAQAVLDAPGRAPGRKSVRRHLLTGLAGCGKCGNHLAGSYRTDGRVVYVCKACHGVAILADNIEPVLYHIVAERLAMPDAVDLLRREIHDTVEAETIRQELETLYGELDRLAVERAEGLLTARQVKISTDIVNAKITRLQARQLDQERLRVFDGIPLGTPQVAGMIAKLSPDRFRAVLDVLAEVVVQPVGKGGKIFNPERVQVNWR

SEQ ID NO: 5059 - protein, 452 aa, synthetic construct
MKAAIYIRVSTREQVENYSIQAQTEKLTALCRSKDWDVYDIFIDGGYSGSNMNRPALNEMLSKLHEIDAVVVYRLDRLSRSQRDTITLIEEYFLKNNVEFVSLSETLDTSSPFGRAMIGILSVFAQLERETIRDRMVMGKIKRIEAGLPLTTAKGRTFGYDVIDTKLYINEEEARQLQLIYDIFEEEQSITFLQKRLKKLGFKVRTYSCYSNWLTNDLYCGYVSYKDKVHVKGIHEPIISEEQFYRVQEIFTRMGKNPNMNRGSASLLNNLVVCSKCGLGFVHRRKDTMSRGKKYHYRYYSCKTYKHTHELEKCGNKIWRADKLEELIIDCVNNYSLASRNVDKEDELYSLNEKLKIEHAKKKRLFDLYINGSYEVSELDSMMNDIDVQINYYESQIGANEELKKNKKIQENLADLATVDFGSLEFREKQLYLKSLINKIYIDGEQVTIEWL

SEQ ID NO: 5060 - protein, 452 aa, synthetic construct
MKAAIYIRVSTQEQVGNYSIQAQTEKLTALCRSKDWDVYDIFIDGGYSGSNMNRPALNEMLSKLHEIDAVVVYRLDRLSRSQRDTTTLIEEYFLKNNVEFVSLSETLDTSSPFGRAMIGILSVFAQLERETIRDRMVMGKIKRIEAGLPLTTAKGRTFGYDVIDTKLYINEEEAKQLQLIYDIFEEVQSITSLQKRLKKLGFKVRTYNRYSNWLTNDLYCGYVSYKDKVHVKGIHEPIISEEQFYRVQEIFTRMGKNPNMNRGSASLLNNLVVCSKCGLGFVHRSKDTMSRGKKYHYRYYSCKTYKHTHELEKCGNKTWRADKLEELIISRVNNYSFASRNVDKDDELDSLNEKLKIERAKKRRLFDLYINGSYEVSELDSMMSDIDAQISHYESQIEANEELKKNKKIQENLADLATVDFDSLEFRERQLYLKSLINKIYIDGEQVTIEWL

SEQ ID NO: 5061 - protein, 485 aa, synthetic construct
MTKKVAIYTRVSTTNQAEEGFSIDEQIYRLTKYAEAMGWQVSDTYTDAGFSGAKLERPAMQRLINDIENKAFDTVLVYKLDRLSRSVRDTLYLVKDVFTRNKIDFISLNESIDTSSAMGSLFLTILSAINEFERENIKERMTMGKLGRAKSGKSMMWTKTAFGYYHNRETGILEIVPLQATIVEQIFTDYLSGISLTKLRDKLNESGHIGKDIPWSYRTLRQTLDNPVYCGYIKFKDSLFEGMHKPIIPYETYLKVQRELEGRQQQTYERNNNPRPFQAKYMLSGMARCGYCGAPLKIVLGHKRKDGSRTMKYHCANRFPRKTKGVTVYNDNKKCDSGTYDLSNLENTVIDNLTGFQENSDSLLKIINSNNQPIPDTSSFKEQISQIDKKIRKNSDLYLNDFITMDELRDRTDSLQAEKKLLKAKISENKFDDSTDVFELVKTQLGSIPINELSYDNKKKIVNNLVSKVDVTADNVDIIFKFQLT

SEQ ID NO: 5062 - protein, 452 aa, synthetic construct
MKAAIYIRVSTREQVENYSIQAQTEKLTALCRSKDWDVYDIFIDGGYSGSNMNRPALNEMLSKLHEIDAVVVYRLDRLSRSQRDTITLIEEYFLKNNVEFVSLSETLDTSSPFGRAMIGILSVFAQLERETIRDRMVMGKIKRIEAGLPLTTAKGRTFGYDVIDTKLYINEEEAKQLQLIYDIFEEEQSITFLQKRLKKLGFKVRTYNRYNNWLTNDLYCGYVSYKDKVHVRGIHEPIISEEQFYRVQEIFTRMGKNPNMNRDSASLLNNLVVCSKCGLGFVHRRKDAKSRDKKYHYRYYCCKTYKHIHELEKCGNKIWRADELEGLIINRVNDYSFASRNVGKEDELDSLNEKLKAERAKKKRLFELYINGRYEVSELDSMMNDIDARINYYESQIEANEELKENKKIQENLANLATVDFDSLEFREKQLYLKSLIDKIYIDGEQVTIEWL

SEQ ID NO: 5063 - protein, 485 aa, synthetic construct
MTKKVAIYTRVSTTNQAEEGFSVDEQIDRLTKYAEAMGWQVSDTYTDAGFSGAKLERPAMQRLINDIENKAFDTVLVYKLDRLSRSVRDTLYLVKDVFTKNKIDFISLNESIDTSSAMGSLFLTILSAINEFERENIKERMTMGKLGRAKSGKSMMWTKTAFGYYHNRKTGILEIVPLQATIVEQIFTDYLSGISLTKLRDKLNESGHIGKDIPWSYRTLRQTLDNPVYCGYIKFKGSLFEGMHRPIIPYGTYLKVQKELEERQQQTYERNNNPRPFQAKYMLSGMARCGYCGAPLRIVLGHKRKDGSRTMKYHCANRFPRKTKGVTVYNDNKKCDSGTYDLSNLENTVIDNLTGFQENNDSLLKIINGDNQPILDTSSLKKQISQIDKKIQKYSDLYLNDFITMDELKDRTDSLLAEKKLLEAKISENKFNDSTDVFELVKTQLGSIPINELSYDNKKKIVNNLVSKVDVTADSVDIIFKFQLA

SEQ ID NO: 5064 - protein, 452 aa, synthetic construct
MKAAIYIRVSTREQVENYSIQAQTEKLTALCRSKDWDVYDVFIDGGYSGSNMNRPALNEMLSKLHEIDAVVVYRLDRLSRSQRDTITLIEEYFLKNNVEFVSLSETLDTSSPFGRAMIGILSVFAQLERETIRDRMVMGKIKRIEAGLPLTTAKGRTFGYDVIDTKLYINEEEARQLQLIYDIFEEEQSITFLQKRLKKLGFKVHTYNRYNNWLTNDLYCGYVSYKDKVHVKGIHEPIISEEQFYRVQEIFTRMGKNPNMNRDSASLLNNLVVCSKCGLGFVHRRKDAMSRDKKYHYRYYSCKTYKHIHELEKCGNKIWRADKLEELIIDRVNSYSLVSRNVDKEDELDSLNEKLKIEHAKKKRLFDLYINGNYEVSELDSMMNDIDAQINYYESQIEANEELKKSKKIQENLAYLAAVDFDSLEFREKQLYLKSLINKIYIDGEQVTIEWL

SEQ ID NO: 5065 - protein, 485 aa, synthetic construct
MTKKVAIYTRVSTTNQAEEGFSIDEQVDRLTKYAEAMGWQVSDTYTDAGFSGAKLERPAMQRLINDIENKAFDTVLVYKLDRLSRSVRDTLHLVKDVFTKNKIDFISLNESINTSSAMGSLFLTILSAINEFERENIKERMTMGKLGRAKSGKSMMWTKTAFGYHHNRKTGILEIVPLQATIVEQIFTDYLSGISLTKLRDKLNEGGHIGKDIPWSYRTLRRTLDNPVYCGYIKFKDSLFEGMHKPIIPYETYLRVQKELVERQQQTYERNNNPRPFQAKYMLSGMARCGYCGAPLRVVLGHKRKDGSRTMKYHCANRFPRKTKGITVYNDNKKCDSGTYDLSNLENTVIDNLIGFQENSDSLLKIINGSNQPILDTSSFEKQISQIDKKIQKNSDLYLNDFITMDELRDRTDSLQAEKKLLKAKISENKFNDSIDVFELVKTQLGSTPINELSYDNKKKIVNNLVSKVDVTADNVDIIFKFQLA

SEQ ID NO: 5066 - protein, 469 aa, synthetic construct
MSYTTPVRAAVYLRISEDRSGEQLGVARQREDCLKLCGQRKWEPVEYLDNDVSASTGKRRPAYEQMLADITAGKIAAVVAWDLDRLHRRPIELEAFMSLADEKRLALATVAGDVDLATPQGRLVARLKGSVAAHETEHKKARQRRAARQKAERGHPNWSKAFGYLPGPNGPEPDPRTAPLVKQAYADILAGASLGDVCRQWNDAGAFTITGRPWTTTALSKFLRKPRNAGLRAYKGARYGPVDRDAIVGKAQWGPLVDEATFWAAQAVLDAPGRAPGRKSVRRHLLTGLAGCGKCGNHLAGSYRTDGRVVYVCKACHGVAILADNIEPILYHIVAERLAMPDAVDLLRREIHDAAEAETIRLELETLYGELDRLAVERAEGLLTARQVKISTDIVNAKITKLQARQQDQERLRVLDGIPLGTLQVAGMIAELSPDRFRAVLDVLAEVVVQPVGKGGRIFNPERVQVNWR

SEQ ID NO: 5067 - protein, 485 aa, synthetic construct
MTRKVAIYTRVSTTNQAEEGFSIDEQVDRLTKYAEAMGWQVSDTYTDAGFSGAKLERPAMQRLINGIENKAFDTVLVYKLDRLSRSVRDTLYLVKDVFTKNKIDFISLNESIDTSSAMGSLFLTILSAINEFERENIKERMTMGKLGRAKSGKSMMWTKTAFGYYHNRKTGILEIVPLQATIVEQIFTDYLSGISLTKLRDKLNESGHIGKDIPWSYRTLRQTLDNPVYCGYIKFKGSLFEGMHKPIIPYETYLKVQKELEERQQQTYERNNNPRPFRAKYMLSGVARCGYCGAPLRIVLGHKRKDGSRTMKYHCANRFPRKTKGVTVYNDNEKCDSGTYDLSNLENTVIDNLIGFQENNDSLLKIINGNNQPILDTSSFKEQISQIDKKIQKNSDLYLNDFITMDELKDRTDSLQAEKKLLEAKISENRFNDSTDVFELVKTQLGSIPINELGYDSKKRIVNNLVSKVDVTADNVDIIFKFQLA

SEQ ID NO: 5068 - protein, 469 aa, synthetic construct
MSYTTPVRAAVYLRISEDRSGEQLGVARQREDCLKLCDQHKWVPVEYLDNDVSASTGKRRPAYEQMLADITAGKIAAVVAWDLDRLHRRPIELEAFMSLADEKRLALATVAGDVDLATPQGRLVARLKGCVAAHETEHKRARQRRAARQKAERGLPNWSKAFGYLPGPNGPEPDPRTAPLVKQAYADILAGASLGDVCRQWNDAGAFTVTGRPWTTTALSKFLRKPRNAGLRAYKGARYGPVDRDAIVGKAQWSPLVDEATFWAAQAVLDAPGRAPGRKSVRRHLLTGLAGCGKCGNHLAGSYRTDGRVVYVCKACHGVAILADNIEPILYRIVAERLAMPNAVDLSRREIHGAAEAETIRLELETLYGELDRLAVERAEGLLTARQVKISTDVVNAKVTKLQARQLDQERLRVFDGIPLGTPQVAGMIAELSPNRFRAVLDVLAEVVVQPVGKRGRIFNPERVQVNWR

SEQ ID NO: 5069 - protein, 485 aa, synthetic construct
MTKKVAIYTRVSTTNQAEEGFSIDEQIDRLTKYAEAMGWQVSDTYTDAGFSGAKLERPAMQRLINDIENKAFDTVLVYKLDRLSRSVRDTLYLVKDVFTKNKIDFISLNESINTSSAMGSLFLTILSAINEFERENIKDRMTMGKLGRAKSGKSMMWTKTAFGYYHNRKTGILEIVPMQATIVEQIFTDYLSGISLTKLRDKLNESGHIGKDIPWSYRTLRQTLDNPVYCGYIKFKDSLFEGMHKPIIPYETYLKVQKELEERQQQAYERNNNPRPFQAKYMLSGTARCGYCGAPLRIVLGHKRKDGSRTMKYHCANRFPRKTKGVTVYNDNKKCDSGTYDLSNLENTVIDNLIGFQENNDSLLRIINGNNQPILDTSSLKKQISQIDEKIQRNSDLYLNDFITMDELRDRADSLQAEKKLLEAKISENKFNDSTDVFELVKTQLGSIPINELSYDNKKKIVNNLVSKVDVTADNVDIIFKFQLA

SEQ ID NO: 5070 - protein, 452 aa, synthetic construct
MKAAIYIRVSTREQVENYSIQAQTEKLTALCRSKDWDVYDIFIDGGYSGSNMNRPALNEMLSKLREIDAVVVYRLDRLSRSQRDTITLIEEYFLKNNVEFVSLSETLDTSSPFGRAMIGILSVFAQLERETIRDRMVMGKIKRIEAGLPLTTAKGRTFGYDVIDAKLYINEEEAKQLQLIYDIFEEEQSITFLQKRLKKLGHKVRTYNRYNNWLTNDLYCGYVSYKDKVHVKGIHEPIISEEQFYRVQEIFTRMGKNPNMNRNSASLLNNLVVCSKCGLGFVHRRKDSMSRDKKYHYRYYSCKTYKHIHELEKCGNKIWRADKLEELIIYRVNNYSLASRNVDKEDELDSLNEKLKTERAKKKRLFDLYISGSYEVSELDGMMSDIDARINYYEGQIEANEELRRNKRIQEKLADLATVDFDNLEFREKQLYLKSLINKIYIDGEQVTIEWL

SEQ ID NO: 5071 - protein, 452 aa, synthetic construct
MKAAIYIRVSTREQVENYSIQAQTEKLTALCRSKDWDVYDIFVDGGYSGSNMNRPALNEMLSKLHEIDAVVVYRLDRLSRSQRDTITLIEEYFLKNNVEFVSLSETLDTSSPFGRAMIGILSVFAQLERETIRDRMVMGKIKRIEAGLPLTTAKGRTFGYDVIDTKLYINEEEARQLQLIYDIFEEEQSITSLQKRLKKLGFKVHTYNRYNNWLTNDLYCGYVSYKDKVHVKGIHEPIISEEQFYRVQEIFTRMGKNPNMNRDSASLLNNLVVCSKCGLGFVHRRKDAMSRDKKYHYRYYSCKTYKHIHELEKCGNKIWRADKLEELIINRVNNYSVASRNVVKEDELDSLNEKLKIERAKKKRMFDLYINGSYEVSELDSMMSDIDAQINYYESQIEANEELKKNKKVQENLANLATVDFDSLEFREKQLYLKSLINKIYIDGEQVTIEWL

SEQ ID NO: 5072 - protein, 452 aa, synthetic construct
MKAAIYIRVSTQEQVGNYSIQAQTEKLTALCRSKDWDVYDIFIDGGYSGSNMNRPALNEMLSKLHEIDAVVVYRLDRLSRSQRDTTTLIEEYFLKNNVEFVSLSETLDTSSPFGRAMIGILSVFAQLERETIRDRMVMGKIKRIEAGLPLTTAKGRTFGYDVIDTKLYINEEEAKQLQLIYDIFEEEQSITFLQKRLKKLGFKVRAYNRYNSWLTNDLYCGYVSYKDKVHVKGIHEPIISEEQFYRVQEIFTRMGKNPNMNRDSASLLNNLVVCSKCGLGFVHRSKDTMSRGKKYHYRYYSCKTYKHTHELEKCGNKTWRADKLEELIINRVNNYSFASRNVDKEDELDSLNEKLKIEHAKKRRLFDLYINGSYEVSELDSMMSDIDAQINHYESQIEANEELKKNKKIQENLADLATVDFDSLEFREKQLYLKSLINKIYIDGEQVTIEWL

SEQ ID NO: 5073 - protein, 485 aa, synthetic construct
MTKKVAIYTRVSTTNQAEEGFSIDEQIDRLTKYAEAMGWQVSDTYTDAGISGAKLERPAMQRLINDIENKAFDTVLVYKLDRLSRSVRDTLYLVKDVFTKNKIDFISLNESIDTSSAMGSLFLTILSAINEFERENIKERMTMGKLGRAKSGKSMMWTKTAFGYYHNRKTGILEIVPLQATIVEQIFTDYLSGISLTKLRDKLNESGHIGKDIPWSYRTLRQTLGNPVYCGYIKFKDSLFEGMHKPIIPYETYLKVQKELEKRQQQTYERNNNPRPFQAKYMLSGMARCGYCGAPLRIVLGHKRKDGSRTMKYHCANRFPCKTKGITVYNDNKKCNSGTYGLSNLENTVIDYLIGFQENNDSLLKIINGNNQPILDTSSFKKQISQIDKKIQKNSDLYLNDFITMDELKDRTDSLRAEKKLLEAKISENKFNDNTDVFELVKTQLGSIPINELSYDDKKKIVNSLVSKVDVTADNVDIIFKFQLA

SEQ ID NO: 5074 - protein, 469 aa, synthetic construct
MSNTTPVRAAVYLRISEDRSGEQLGVARQREDCLKLCGQRKWVPVEYLDNDVSASTGKRRPAYEQMLADITAGKIAAVVAWDLDRLHRRPIELEAFMSLADEKRLALATVAGDVDLATPQGRLVARLKGCVAAHETEHKKARQRRAARQKAERGHPNWSKAFGYLPGPNGPEPDPRTAPLVKQAYADILAGASLGDVCRQWNDAGAFTITGRPWTTTTLSKFLRKPRNAGLRAYKGARYGPVDRDAIVGKAQWGPLVDEATFWAAQAVLDAPGRAPGRKSVRRHLLTGLAGCGKCGNHLAGSYRTDGRVVYVCKACHGVAILADNIEPILYHIVAERLARPDAVDLLRREIHDAAEAEAIRLELETLYGELDRLAVERAEGLLTARQVKISTDIVNAKITKLQARQLDQERLRVLDGIPLGTPQVAGMIVELSPDRFRAVLDVLAEVVVQPVGKSGRISSPERVQVNWR

SEQ ID NO: 5075 - protein, 485 aa, synthetic construct
MTKKVAIYTRVSTTNQAEEGFSIDEQIDRLTKYAEAMGWQVSDTYTDAGFSGAKLERPAMQRLISDIENKAFDTVLVYKLDRLSRSVRDTLYLVKDVFTRSKIDFISLSESINTSSAMGSLFLTILSAINEFERENIKERMTMGKLGRAKSGKSMMWTKTAFGYYHNRKTGILEIVPLQATIVEQIFTDYLSGISLTKLRDKLNEGGHIGKDIPWSYRTLRQILDNPVYCGYIKFKGGLFEGMHKPIIPYETYLKVQKELEERQQQTYERNNNPRPFQAKYMLSGMARCGYCGAPLRIVLGRKRKDGSRTMKYHCANRSPRKTKGVTVYNDNKKCDSGTYDLSNLENTVIDNLIGFQENSDSLLKIINGNNQPILDTSSLKKQISQIDKKIQKNSDLYLNDFITMDELKERTDSLQAEKKLLKAKISENKFNDGTDVFEQVKTQLGSIPINELSYDNKKKIVNNLVSKVDVTADNVDIIFKFQLA

SEQ ID NO: 5076 - protein, 485 aa, synthetic construct
MTKKVAIYTRVSTTNQAEEGFSIDEQIDRLTKYAEAMGWQVSDTYTDAGFSGAKLKRPAMQRLINDIETKAFDTVLVYKLDRLSRSVRDTLYLVKDVFTKNKIDFISLNESIDTSSAMGSLFLTILSAINEFERENIKERMTMGKLGRAKSGKSMMWTKTAFGYYHNRKTGILEIVPLQASIVEQIFTDYLSGISLTKLRDKLNESGHIGKDIPWSYRTLRQTLDNPVYCGYIKFKGGLFEGMHKPIIPYETYLKVQKELEERQQQTYERNNNPRPFQAKYMLSGMARCGYCGAPLRIVLGHKRKDGSRTMKYHCANRFPRKTRGVTVYNDNKKCDSGTYDLSNLENTVIDNLVGLQENNDSLLKIINGNSQPILDTSSFKKQISQIDKKIQKNSDLYLNDFITMDELKDRTDSLQAEKKLLKAKISENKFNDSTDVFELVKTQLGSIPINELSYDNKKKIVNSLVSKVDVTADNVDIIFKFQLA

SEQ ID NO: 5077 - protein, 452 aa, synthetic construct
MKAAIYIRVSTREQVENYSIQAQTEKLTALCRSKDWDVYDIFIDGGYSGSNMNRPALNEMLSKLHEIDAVVVYRLDRLSRSQRDTITLIEEYFLKNNVEFVSLSETLDTSSPFGRAMIGILSVFAQLERETIRDRMVMGKIKRIEAGLPLTTAKGRTFGYDVIDTKLYINEEEAKQLQLIYDIFEEEQSITFLQKRLKKLGFKVRTYNRYNNWLTNDLYCGYVSYKDKVHVKGIHEPIISEEQFYRVQEIFTRMGKNPNMNRDSASLLSNLVVCSKCGLGFVHRRKDTKSRGKKYHYRYYSCKTYKHTYELEKCGNKIWRADKLEELIINRVNNYSFAGRNVDKEDELDSLNEKLKIERAKKKRLFDLYINGSYEVSELDSVMNDIDAQINYYESQIEANEELKKNKKIQENLADLATVDYDSLEFREKQLYLKSLINKIYIDGEQVTIEWL

SEQ ID NO: 5078 - protein, 452 aa, synthetic construct
MKAAIYIRVSTREQVENYSIQAQTEKLTALCRSKDWDVYDIFIDGGYSGSNMNRPALNEMLSKLHEIDAVVVYRLDRLSRSQRDTITLIEEYFLKNNVEFVSLSETLDTSSPFGRAMIGILSVFAQLERETIRDRMVMGKIKRIEAGLPLTTAKGRTFGYDVIDTRLYINEEEAKQLQLIYDIFEEEQSITFLQRRLKKLGYKVRTYNRYNNWLTNDLYCGYVSYKDKVHVRGIHEPIISEEQFYRVQEIFTRMGKNPNMNRDSASLLNNLVVCSRCGLGFVHRRKDAMSRDKKYHYRYYSCKTYKHIHELEKCGNKIWRADELEELIINRVNNYSLASRNVDKEDGLDSLNEKLKIEHVRKKRLFDLYLNGSYEVSELDSMMNDIDAQISYYESQIEANEALIKNKRIQENLANLATVDFDSLEFREKQLYLKSLINKIYIDGEQVTIEWL

SEQ ID NO: 5079 - protein, 452 aa, synthetic construct; identical to SEQ ID NO: 3630

SEQ ID NO: 5080 - protein, 485 aa, synthetic construct
MTKEVAIYTRVSTTNQAEEGFSIDEQIDRLTKYAEAMGWQVSGTYTDAGFSGAKLERPAMQCLINDIENKAFDTVLVYKLDRLSRSVRDTLYLVKDVFTKNKIDFISLSESINTSSAMGSLFLTILSAINEFERENIKERMTMGKLGRAKSGKSMMWTKTAFGYYHNRETGILEIVPLQATIVEQIFTDYLSGISLTKLRDKLNESGHIGKDIPWSYRTLRQTLDNPVYCGYIKFKDSLFEGMHKPIIPYETYLKVQKELEERQQQTYERNNNPRPFQAKYMLSGMARCGYCGAPLRIVLGHIRKDGSRTMKYHCANRFPRKTKGVTVYNDNKKCDSGTYDLSNLENAVIDILIGFQENNDSLLKIINGNNQPILDTSSFKKQISQIDKKIQKNSDLYLNDFITMDELKDRTDSLQAEKKLLKAKISENKFNDSTDVLELVKTQLGSIPINELSYDNKKKIVNNLVSKVDVTADNVDIIFKFQLA

SEQ ID NO: 5081 - protein, 452 aa, synthetic construct
MKAAIYIRVSTQEQVGNYSIQAQTEKLTALCRSKDWDVYDIFIDGGYSGSNMNRPALNEMLSKLHEIDAVVVYRLDRLSRSQRDTTTLIEEYFLKNNVEFVSLSETLDTSSPFGRAMIGILSVFAQLERETIRDRMVMGKIKRIEAGLPLTTAKGRTFGYDVIDTKLYINEEEAKQLQLIYDIFEEEQSITSLQKRLKKLGFKVRTYNRYSNWLTNDLYCGYVSYKDKVHVKGIHEPIISEEQFYRVQEIFTRMGKNPNMNRDSASLLNSLVVCSRCGLSFVHRSKDTMSRGKKYHYRYYSCKTYKHTHELEKCGNKIWRADRLEELIINRVNSYSFASRNVDKEDELDSLNEKLKIEHAKKKRLFDLYINGSYEVSELDSMTNDIDAQINYYESQIEANKELKKNKKIQENLANLATVDFDSLEFREKQLYLKSLINKIYIDGEQVTIEWL

SEQ ID NO: 5082 - protein, 452 aa, synthetic construct
MKAAIYIRVSTREQVENYSIQAQTEKLTALCRSKDWDVYDIFVDGGYSGSNMNRPALNEMLSKLHEIDAVVVYRLDRLSRSQRDTITLIEEYFLKNNVEFVSLSETLDTSSPFGRAMIGILSVFAQLERETIRDRMVMGKIKRIEAGLPLTTAKGRTFGYDVVDTRLYINEEEARQLQLIYDIFEEEQSITFLQKRLKKLGFKVRTYNCYNNWLTNDLYCGYVSYKDKVHVKGIHEPIISEEQFYRVQEIFTRTGKNPNMNRDSASLLNNLVVCSKCGLNFVHRRKDTMSRGKKYHYRYYSCKTYKHIHELERCGNKIWRADKLEELVINRVNNYSFASRNADKEDGRDSLNEKLKIEHAKRKRLFDLYINGSYEVSELDSMMNDIDAQINYYESQIEANEELRKNKKIQENLADLATVDFDSLEFREKQLYLKGLISKIYIDGEQVTIEWL

SEQ ID NO: 5083 - protein, 452 aa, synthetic construct
MKAAIYIRVSTREQVENYSIQAQTEKLTALCRSRDWDVYDIFIDGGYSGSNMNRPALNEMLSKLHEIDAVVVYRLDRLSRSQRDTITLIEEHFLKNNVEFVSLSETLDTSSPFGRAMIGILSVFAQLERETIRDRMVMGKIKRIEAGLPLTTAKGRTFGYDVIDTKLYINEEEAKQLRLIYDIFEEEQSITFLQKRLKKLGFKVRTYSRYSNWLTNDLYCGYVSYKDKVHVKGIHEPIISEEQFYRVQEIFTRMGKNPNMNRDSASLLNNLVVCSKCGLGFVHRRKDTTSRGKKYHYRYYSCKTYKHIHELEKCGNKIWRADRLEELIINRVNNYSFASRNADKEDELDSLNERLKTEHAKKKRLFDLYINGSYEVSELDSMMNDIDAQINYYESQIEANEELKKNKKIQENLANLATVDFDSLEFREKQLYLKSLINKIYIDGEQVTIEWL

SEQ ID NO: 5084 - protein, 452 aa, synthetic construct
MKAAIYIRVSTQEQVGNYSIQAQTEKLTALCRSKDWDVYDIFVDGGYSGSNMNRPALNEMLSKLHEIDAVVVYRLDRLSRSQRDTTTLIEEYFLKNNVEFVSLSETLDTSSPFGRAMIGILSVFAQLERETIRDRMVMGKIKRIEAGLPLTTAKGRTFGYDVIDTKLYINEEEAKQLQLIYDIFEEEQSITLLQKRLKKLGFKVRTYNRYHSWLTNDLYCGYVSYKDKVHVRGIHEPIISEEQFYRVQEIFTRTGKNPNMNRDSASLLSNLVVCSKCGLGFVHRSKDTMSRGKKYHYRYYSCKTYKHTHELEKCGNKTWRADKLEELIINRVNNYSFASRNVDKEDELDSLNEKLRIEHAKKKRLFDLYINGSYEVSELDSMMSDIDAQINHYESQIEANEKLKKNKKIQENLADLATMDFDSLEFREKQLYLKSLINKIYIDGEQVTIEWL

SEQ ID NO: 5085 - protein, 452 aa, synthetic construct
MKAAIYIRVSTREQVENYSIQAQTEKLTALCRSKDWDVYDIFIDGGYSGSNMNRPALNEMLSKLHEIDAVVVYRLDRLSRSQRDTVTLIEEYFLKNNVEFVSLSETLDTSSPFGRAMIGILSVFAQLERETIRDRMVMGKIKRIEAGLPLTTAKGRTFGYDVIDARLYVNEEEAKQLQLIYDIFEEEQSITFLQKRLKKLGFKVRTYNRYSNWLTNDLYCGYVSYKDKVHVKGIHEPIISEEQFYRVQEIFTRMGKNPNMNRASASLLNNLVVCSKCGLGFVHRRKDAMSRDKKYHYRYYSCKTYKHIHELEKCGNKIWRADKLEELIINRVNNYSLASRNVDKEDELDSLNEKLKIEHAKKRRLLDLYINGSYGVSELDSLMSDIDAQINYYESQIEANEGLKRNRKIQENLADLAIVDFDSLEFREKQLYLKSLINKIYIDGEQVTIEWL

SEQ ID NO: 5086 - protein, 485 aa, synthetic construct
MTKKVAIYTRVSTTNQAEEGFSIDEQIDRLTKYAEAMGWQVSDTYTDAGFSGAKLERPAMQRLINDIENKAFDTVLVYKLDRLSRSVRDTLYLVKDVFTKNKIDFVSLNESINTSSAMGSLFLTILSAINEFERENIKERMAMGKLGRAKSGKSMMWSKTAFGYYHNRKTGILEIVPLQATIVEQIFTDYLSGISLTKLRDKLNGSGHIGKDIPWSYRALRQTLDNPVYCGYIKFKGSLFEGMHKPIIPYETYLKVQKELEERQQQTYERNNNPRPFQAKYMLSGMARCGYCGAPLRIVLGHKRKDGSRTMKYHCANRFPRRTKGVTVYNDNKKCDSGAYDLSNLENTVIDNLIGFQENNDSLLKIINGNNQPILDTSGFKKQISLIDKKIQKNGDLYLNDFITMDELKDRTDSLQAEKRLLKAKISENKFNDSTDVYERVKTQLGSIPINELSYDNKKKIVNNLVSKVDVTADNVDIIFKFQLA

SEQ ID NO: 5087 - protein, 469 aa, synthetic construct
MCYTTPVRAAVYLRISEDRSGEQLGVARQREDCLKLCDQRKWVPVEYLDNDVSASTGKRRPAYEQMLADITAGKIAAVVAWDLDRLHRRPIELEAFMSLADEKRLALATVAGDVDLATPQGRLVARLKGSVAAHETEHKRARQRRAARQKAERGLPNWSKAFGYLPGPNGPEPDPRTAPLVKQAYADILAGASLGDVRRQWNDAGAFTITGRPWTTTTLSKFLRKPRNAGLRAYKGARYGPVDRDAIVGKAQWSPLVDEATFWAAQAILDAPGRAPGRKSVRRHLLTGLAGCGKCGNHLAGSYRTDGRVVYVCKACHGVAILADNIEPILYHTVAERLAMPDAVDLLRREVHDAAEAETVRLELEALYGELDRLAVERAEGLLTARQVKISTDIVSVKITKLQARQLDQERLRVFDGIPLGTPQVAGVIAELSPDRFRAVLDALAEVVVQPVGKGSRIFNPERVQVNWR

SEQ ID NO: 5088 - protein, 469 aa, synthetic construct
MSYTTPVRAAVYLRISEDRSGEQLGVARQREDCLKLCGQRKWVPVEYLDNDVSASTGKRRPAYEQMLADITAGKIAAVVAWDLDRLHRRPIELEAFMSLADEKHLALATVAGDVDLATPQGRLVARLKGSVAAHETEHKRARQRRAARQKAERGYPNWSKAFGYLPGPNGPEPDPRTAPLVKQAYADILAGASLGDVCRQWNDAGAFTITGRPWTATTLSKFLRKPRNAGLRAYKGARYGPVDRDAIVGKAQWSPLVDEATFWAAQAVLDAPGRAPGRKSVRRHLLTGLAGCGKCGNHLAGSYRTDGRVVYVCKACHGVAILADNIEPILYHIVAERLAMPDAVDLLRREIRDAGEAETIRLELETLYGELDRLAVERAEGLLTARQVKISTDIVNAKITKLQAHQLDQERLRVLDGIPLGTPQVAGMIAELSPNRFRAVLDVLAEVVVQPVGKSGRTFSPERVQVSWR

SEQ ID NO: 5089 - protein, 485 aa, synthetic construct
MTKKVAIYTRVSTTNQAEEGFSIDEQIDRLTKYAEAMGWQVSGTYTDAGFSGAKLERPAMQRLINDIENKAFDTVLVYKLDRLSRSVRDTLYLVKDVFTKNKIDFISLNESINTSSAMGSLFLTILSAINEFERENIKERMTMGKLGRAKSGKSMMWTKTAFGYYHNRKTGILEIVPLQATIVEQIFTDYLSGISLTKLRDKLNESGHIGKDIPWSYRTLRQTLDNPVYCGYIKFKGSLFEGMHKPIIPYETYLKVQKELEERQQQTYERNNNPRPFQAKYMLSGMARCGYCGAPLKIVLGHKRKDGSRTMKYHCANRFPRKTKGVTVYNDNKKCDSGTYDLRDLENTVIDNLIGFQENNDSLLKIINGSNQPILDTSSLEKQISQIDKKIQKNSDLYLNNFITMDELKDRTDSLQAEKQLLKAKISENKFNDSTDVFELVKTQLGSIPINELSYDNKKKIVNNLVSKVDVTADNVDIIFKLQLA

SEQ ID NO: 5090 - protein, 469 aa, synthetic construct
MSYTTPVRAAVYLRISEDRSGEQLGVARQREDCLKLCDQRKWVPVEYLDNDVSASTGKRRPAYEQMLADITAGRIAAVVAWDLDRLHRRPVELEAFMSLADEKRLALATVAGDVDLATPQGRLVARLKGSVAAHETEHKKARQRRAARQKAERGHPNWSKAFGYLPGPNGPEPDPRTAPLVKQAYADILAGASLGDVCRRWNDAGAFTITGRPWTTTTLSKFLRKPRNAGLRAYKGARYGPVDRDAIVGKARWSPLVDEATFWAAQAVLDAPGRAPGRKSVRRHLLTGLAGCGKCGNHLAGSYRTDGRVVYVCKACHGVAILADNIEPILYHIVAERLAMPDAVDLLRREIHDAAEAETIRLELETLYGELDRLAVERAEGLLTARQVRISTDIVSAKITKLQARQLDQERLRVFDGIPLGTPQVAGMIAELSPDRFRAVLDVLAEVVVQPVGKNGRIFNPERVQVNWR

SEQ ID NO: 5091 - protein, 452 aa, synthetic construct
MKAAIYIRVSTQEQVGNYSIQAQTEKLTALCRSKDWDVYDIFIDGGYSGSNMNRPALNEMLSKLHEIDAVVVYRLDRLSRSQRDTTTLIEEYFLKNNVEFVSLSETLDTSSPFGRAMIGILSVFAQLERETIRDRMVMGKIKRIEAGLPLTTAKGRTFGYDVIDTKLYINEEEAKQLQLIYDIFEEEQSITFLQKRLKRLGFKVRAYNRYSNWLTNDLYCGYVSYKDKVHVKGIHEPIISEEQFYRVQEIFTRMGKNPNMNRESASLLNNLVVCSKCGLSFVHRSKDTMSRGKKYHYRYYSCKTYKHTHELEKCGNKTWRADKLEELIINRVNNYSFAGRNVDKEDEPDNLNEKLKIEHAKKKRLFDLYINGSYEVSELDNMMNDIDAQINYYESQIEASEELRRNKKIQENLADLATVDFDSLEFREKQLYLKSRINKIYIDGEQVTIEWL

SEQ ID NO: 5092 - protein, 485 aa, synthetic construct
MTKKVAIYTRVSTTNQAEEGFSIDEQIDRLTKYAEAMGWQVSDTYTDAGSSGAKLERPAMQRLINDIENKAFDTVLVYKLDRLSRSVRDTLYLVKDVFTKNKIDFISLNESIDTSSAMGSLFLTILSAINEFERENIKERMTMGKLGRAKSGKSMMWTKTAFGYYHNRKTGILEIVPLQATIVEQIFTDYLSGISLTKLRDKLNASGHIGKDIPWSYRTLRQTLDNPVYCGYIKFKGSLFEGMHKPIIPYETYLKVQKELEERQQQTYERNNNPRPFQAKYMLSGMARCGYCGAPLRIVLGHKRKDGSRTMKYHCANRFPRKTRGVTVYNDNKKCDSGTYDLSNLENTVIDSLIGFQENNDSLLKIINGSNQPILDTSSFKERISQIDKKIQKNSDLYLNDFITMDELKDRTDTLQAEKKLLKAQISENKFNDSTDVFELVKTQLGSIPISELSYDNKKRIVNNLVSKVDVTADNVDIIFKFRLA

SEQ ID NO: 5093 - protein, 452 aa, synthetic construct
MKAAIYIRVSTREQVENYSIQAQTEKLTALCRSKDWDVYDIFIDGGYSGSNMNRPALNEMLSKLHEIDAVVVYRLDRLSRSQRDTITLIEEYFLKNNVEFVSLSETLDTSSPFGRAMIGILSVFAQLERETIRDRMVMGKIKRIEAGLPLTTAKGRTFGYDVIDSKLYINEEEAKQLQLIYDIFEEEQSITFLQKRLKKLGFKVRTYSCYNSWLTNDLYCGYVSYKDKVHVKGIHEPIISEEQFYRVQEIFTRMGKNPNMNRDSASLLNNLVVCSKCGLGFVHRRKDTMSRGKKYHYRYYSCKTYKHTHELEKCGNKIWRADKLEELIINRVNDYSFASRNVDEEDELDSLYEKLRIEHAKKKRLFDLYINGSYEVSELASMANDIDAQINYYESQIGANEELKKNKKIQENLANLATVDYDSLEFREKQLYLKSLINKIYIDGEQVTIEWL

SEQ ID NO: 5094 - protein, 452 aa, synthetic construct
MKAAIYIRVSTQEQAENYSIQAQTERLAALCRSKDWDVYDIFIDGGYSGSNMNRPALNEMLSKLHEIDAVVVYRLDRLSRSQRDTTTLIEEYFLKNNVEFVSLSETLDTSSPFGRAMIGILSVFAQLERETIRDRMVMGKIKRIEAGLPLTTAKGRTFGYDVIDTKLYINEEEAKQLRLIYDIFEEEQSITSLQKRLKKLGFKVRTYNRYNNWLTNDLYCGYVSYKDKVHVKGIHEPIISEEQFYRVQEIFTRMGKNPNMNRDSASLLSNLVVCSKCSLGFVHRSKDTMSRGKKYHYRYYSCKTYKHTHELEKCGNKTWRADKLEELIINRVNNYSFASRNVDIEDELDSLNEKLKIEHAKKKRLFDLYINGSYEVSELDSMMNVIDAQINYYESQIEANEELRKNKKIQGNLADLATVDFDSLGFREKQLYLKSLINKIYIDGEQVTIEWL

SEQ ID NO: 5095 - protein, 452 aa, synthetic construct
MKAAIYIRVSTQEQVGNYSIQAQTEKLTALCRSKDWDVYDIFVDGGYSGSNMNRPALNEMLSKLHEIDAVVVYRLDRLSRSQRDTTTLIEEYFLKNNVEFVSLSETLDTSSPFGRAMIGILSVFAQLERETIRDRMVMGKIKRIEAGLPLTTAKGRTFGYDVIDTKLYINEEEAKQLQLIYDIFEEEQSITFLQKRLKKLGFRVRTYNRYNSWLTNDLYCGYVSYKDKVHVKGIHEPIISEEQFYRVQEIFTRMGKNPNMNRDSASLLNNLVVCSKCGLGFVHRSKDTMSRGKRYHYRYYSCKTYKHTHELEKCGNKTWRADTLEELIISRVNNYSFASRGVDKEDELDSLDEKLKIEHAKKKRLFDLYINGSYEVSELDSMMNDIDAQINYYESQIEANEELKENKKIQENLAELATVDFDSLEFREKQLYLKSLINKIYIDGEQVTIEWL

SEQ ID NO: 5096 - protein, 452 aa, synthetic construct
MKAAIYIRVSTREQVENYSIQAQTEKLTALCRSKDWDVYDIFIDGGYSGSNMNRPALNEMLSKLHEIDAVVVYRLDRLSRSQRDTITLIEEYFLKNNVEFVSLSETLDTSSPFGRAMIGILSVFAQLERETIRDRMVMGKIKRIEAGLPLTTAKGRTFGYDVIDTKLYINEEEARQLQLIYDIFEEEQSITFLQKRLKKLGFKVRTYSCYNNWLTNDLYCGYVSYKDKVHVKGIHEPIISEEQFYRVQEIFTRMGKSPNMNRDSASLLNNLVVCSKCGLGFVHRRKDTTSRGKKYHYRYYSCKTYKHPHELEKCGNKIWRADKLEELIVNRVSNYSFASRNADKEDELDSLNEKLKIEHAKKKRLFDLYINGSYEVSELDSMMNDIDAQINYYESQIEANEELEKNKKIQENLANLATVDYDSLEFREKQLYLKSLINKIYIDGEQVTIEWL

SEQ ID NO: 5097 - protein, 452 aa, synthetic construct
MKAAIYIRVSTREQVENYSIQAQTEKLTALCRSKDWDVYDIFIDGGYSGSNMNRPALNEMLSKLHEIDAVVVYRLDRLSRSQRDTITLIEEYFLKNNVEFVSLSETLDTSSPFGRAMIGILSVFAQLERETIRDRMVMGKIKRIEAGLPLTTAKGRTFGYDVIDTRLYINEGEAKQLQLIYDIFEEEQSITFLQKRLKELGFKVRTYDRYNSWLTNDLYCGYVSYKDKVHVKGIHEPIISEEQFYRVQEIFTRMGRNPNMNRDSASLLNNLVVCSKCGLGFVHRRKDTTSRGKKYHYRYYSCKTYKHIHELEKCGNKIWRADKLEELVINRVNNYSSASRNVDKEGELDSLNEKLKIEHAKKKRLFDLYINGSYEVCELDSMMSDIDAQINYYESQIEANEELRKNKKIQENLANLATVDYDSLEFREKQLYLKSLINKIYIDGEQVTIEWL

SEQ ID NO: 5098 - protein, 469 aa, synthetic construct
MSYTTPVRAAVYLRISEDRSGEQLGVARQREDCLKLCDQRKWVPVEYLDNDVSASTGKRRPAYEQMLADITAGKIAAVVAWDLDRLHRRPVELEAFMSLADEKRLALATVAGDVDLATPQGRLVARLKGSVAAHETEHKKARQRRAARQKAERGYPNWSKAFGYLPGPNGPEPDPRTAPLVKQAYADILAGASLGDVCRRWNDAGAFTITGRPWTTTTLSKFLRKPRNAGLRAYKGARYGPVDRDAIVGKAQWSPLVDEATFWAAQAVLDAPGRAPGRKSVRRHLLTGLAGCGKCGNHLAGSYRTDGRVVYVCKACHGVAILADNIEPILYHIVAERLAMPDAVDLLRCEIHDAAEAETIRLELETLYGELDRLAVERAEGLLTARQVKISTDIVDAKITKLQARQLDQERLRVFDGIPLGTPQVAGMIAELSPDRFRAVLDVLAEVVVQPVGKSGRVFNPERVQVNWR

SEQ ID NO: 5099 - protein, 452 aa, synthetic construct
MKAAIYIRVSTREQVENYSIQAQTEKLTALCRSKDWDVYDIFIDGGYSGSNMNRPALNEMLSKLHEIDAVVVYRLDRLSRSQRDTITLIEEYFLKNNVAFVSLSETLDTSSPFGRAMIGILSVFAQLERETIRDRMVMGKIKRIEAGLPLTTAKGRTFGYDVIDTKLYINEEEAKQLQLIYDIFEEEQSITSLQKRLKKLGLKVRTYNRYSNWLTNDLYCGYVSYKDKVHVKGIHEPIISEEQFYRVQEILARMGKNPNMNRDSASLLSNLVVCSKCGLGFVHRCKDTTSRGKKYHYRYYSCKTYKHIHELEKCGNKIWRADKLEELIIDRVNNYSFAGRNADKEDELDSLNEKLKIEQTKRKRLLDLYINGSYDVSELDSMMNDIDAQINYYESQIEANEELKKNKKIQENLADLATVDFDSLEFREKQLYLKSLINKIYIDGEQVTIEWL

SEQ ID NO: 5100 - protein, 452 aa, synthetic construct
MKAAIYIRVSTREQVENYSIQAQTEKLTALCRSKDWDVYDIFVDGGYSGSNMNRPALNEMLSKLHEIDAVVVYRLDRLSRSQRDTITLIEEYFLKNNVEFVSLSETLDTSSPFGRAMIGILSVFAQLERETIRDRMVMGKIKRIEAGLPLTTAKGRTFGYDVIDTRLHINKEEAKQLQLIYDIFEEEQSITFLQKRLKKLGFKVRTYNRYNNWLTNDLYCGYVSYKDKVHVKGIHEPIISEEQFYRVQEIFTRMGKNPNMNRDSASLLNNLVVCGKCGLGFVHRRKDAMSRDKKYHYRYYSCKTYKHIHELEKCGNKIWRADKLEELVINRVNDYSLASRNVDKEDELDSLNEKLKIEHAKKKRLFDLYINGSYEVSELDSMMNDIDTQISYYESRIEANEELKRNKKIQENLAYLATVDFDSLEFREKQLYLKSLINKIYIDGEQVTIEWL

SEQ ID NO: 5101 - protein, 452 aa, synthetic construct
MKAAIYIRVSTQEQVGNYSIQAQTEKLTALCRSKDWDVYDIFIDGGYSGSNMNRPALNEMLSKLPEIDVVVVYRLDRLSRSQRDTTTLIEEYFLKNNVEFVSLSETLDTSSPFGRAMIGILSVFAQLERETIRDRMVMGKIKRIEAGLPLTTAKGRTFGYDVIDTKLYINEEEAKQLQLIYDIFEEEQSITSLQKRLKKLGFKVRTYNCYNNWLTNDLYCGYVSYKDKVHVKGIHEPIISEEQFHRVQEIFTRMGKNPNMNRDSASLLSNLVVCSKCGLGFVHRSKDTMSRGKKYHYRYYSCKTYKHTHELEKCGNKTWRADRLEELIINRVNNYSFASRNVDKEDELDSLNEKLKIEHARKKRLFDLYINGSYEVSELDSMMNDIDAQINYYEGQIEANEELKKNKKIQGNLADLATVDFDSLEFREKQLYLKSLISKIYIDGEQVTIEWL

SEQ ID NO: 5102 - protein, 452 aa, synthetic construct
MKAAIYIRVSTREQVENYSIQAQTEKLTALCRSKDWDVYDTFVDGGYSGSNMNRPALNEMLSKLHEVDAVVVYRLDRLSRSQRDTLTLIEEHFLKNNVEFVSLSETLDTSSPFGRAMIGILSVFAQLERETIRDRMVMGKIKRIEAGLPLTTAKGRTFGYDVIDTKLYINEEEAKQLQLIYDIFEEEQSITSLQKRLKKLGFKVHTYNRYNNWLTNDLYCGYVSYKDKVHVKGIHEPIISEEQFYRVQEIFARMGKNPNMNRESASLLNNLVVCSKCGLGFVHRRKDAMSRDKKYHYRYYSCKTYKHIHELEKCGNKIWRADKLEELIIDRVNNYSLASRNVDKDDELGSLNEKLKAEHAKKKRLFELYINGSYEVSELDSMMSDIDAQINYYESQIEANEELKKNKKIQENLANLATVDFDSLEFREKQLYLKSLINKIYIDGEQVTIEWL

SEQ ID NO: 5103 - protein, 452 aa, synthetic construct
MKAAIYIRVSTREQVENYSIQAQTEKLTALCRSKDWDVYDIFIDGGYSGSNMNRPALNEMLSKLHEIDAVVVYRLDRLSRSQRDTITLIEEYFLKNDVEFVSLSETLDTSSPFGRAMIGILSVFAQLERETIRERMVMGKIKRVEAGLPLTTAKGRTFGYDVIDAKLYINEEEAKQLQLIYDIFEEEQSITFLQKRLKKLGFKVRTYNCYNNWLTNDLYCGYVSYKDKVHVKGIHEPIISEEQFYRVQEIFTRMGKNPNMNRDSASLLNNLVVCSKCGLGFVHRRKDTMSRGKKYHYRYYSCKTYKHTHELEKCGNKIWRADKLEELIINRVNNYSLASRNVDKEDELDSLYEKLKIEHAKKKRLFDLYINGSYEVSELDSMMGDIEAQINYYESQIEANEELKKSKKIQENLANLATVDYDSLEFREKQLYLKSLINKIYIDGEQVTIEWL

SEQ ID NO: 5104 - protein, 469 aa, synthetic construct
MSYTTPVRAAVYLRISEDRSGEQLGVARQREDCLKLCDQRKWVPVEYLDNDVSASTGKRRPAYEQMLADITAGKIAAVVAWDLDRLHRRPIELEAFMSLADEKRLALATVAGDVDLATPQGRLVARLKGSVAAHETEHKKARQRRAARQKAERGLPNWSKAFGYLPGPNGPEPDPRTAPLVKQAYADILAGASLGDVRRQWNAAGAFTITGRPWTTTALSKFLRKPRNAGLRAYKGARYGPVDRDAIVGKAQWSPLVDEATFWAAQAVLDAPGRAPGRKSVRRHLLTGLAGCGKCGSHLAGSYRTDGRVVYVCKACHGVAILADNIEPMLYHIVAERLAVPNAVDLLRREIHDAAEAETIRLELETLYGELDRLAVERAEGLLTARQVKISTDVVNAKITKLQARQQDQERLRVFDGIPLGTPQVAGMIAELSPDRFRAVLDVLAEVVVLPVGKSGRIFNPERVQVNWR

SEQ ID NO: 5105 - protein, 469 aa, synthetic construct
MSYTTPVRAAVYLRISEDRSGEQLGVARQREDCLKLCGQHKWVPVEYLDNDVSASTGKRRPAYEQMLADITAGKIAAVVAWDLDRLHRRPVELEAFMSLADEKRLALATVAGDVDLATPQGRLVARLKGCVAAHETEHKKARQRRAARQKAERGLPNWSKAFGYLPGPNGPEPDPRTAPLVEQAYADILAGASLGDVCRQWNDAGAFTITGRPWTTTTLSKFLRKPRNAGLRAYKGARYGPVDRDAIVGKAQWSPLVDEATFWAAQAVLDAPGRAPGRKSVRRHLLTGLAGCGKCGNHLAGSYRTDGRVVYVCKACYGIAILADNIEPILYHIVAERLAMPDAVDLLHREIHDAAEAETIRLELETLYGELDRLAVERAEGLLTARQVKISTDIVNAKITKLQARQLDQERLRVLDGIPLGTPQVAGVIAGLSPDRFRAVLDVLAEVVVQPVGKSGRIFSPERVQVNWR

SEQ ID NO: 5106 - protein, 452 aa, synthetic construct
MKAAIYIRVSTREQVENYSIQAQAEKLTALCRSKDWDVYDIFIDGGYSGSNMNRPALNEMLSKLHEIDAVVVYRLDRLSRSQRDTITLIEEYFLKNNVEFVSLSETLDTSSPFGRAMIGILSVFAQLERETIRDRMVMGKIKRVEAGLPLTTAKGRTFGYDVIDTKLYINEEEAKQLQLIYDIFEEEQSITFLQKRLKKLGFKVRTYSCYNNWLTNDLYCGYVSYKDKVHVKGVHEPIISEEQFYRVQEIFARMGKNPNMNRDSASLLNNLVVCSKCGLGFVHRRKGTMSRGKKYHYRYYSCKTYKHTHELEKCGNKIWRADKLEGLIINRVNNYSTASRNVDKEDELDSLNEKLKIEHTKKKRLFELYINGSYEVSELDSMMNDIDAQINYYESQIEANEELKKNKKIQESLANLATVDYDSLEFREKQLYLKSLINKIYIDGEQVTIEWL

SEQ ID NO: 5107 - protein, 485 aa, synthetic construct
MTRKVAIYTRVSTTNQAEEGFSIDEQIDRLTKYAEAMGWQVSDTYTDAGFSGAKLERPAMQRLINDIENRAFDTVLVYKLDRLSRSVRDTLHLAKDVFTKNKIDFISLSESIDTSSAMGSLFLTILSAINEFERENIKERMTMGKLGRAKSGKSMMWTKTAFGYYHNRKTGILEIVPLQATIVEQIFTDYLSGISLTKLRDKLNESGHIGKDIPWSYRTLRQTLDNPVYCGYIKFKDSLFEGMHKPIIPYETYLKVQKELEERQQQTYERNNNPRPFQAKYMLSGIARCGYCGAPLKIVLGHKRKDGSRTMKYHCANRFPRKTKGVTVYNDNKKCDSGTYDLGNLENTVIDNLIGFQENNDSLLKIINGNNQSIPDTSSFEEQISQIDKKIQKNSDLYLNDFFTMDELKDRTDSLQAEKKLLKAKISENKFNDSTDVFELVKAQLGSIPINELSYEDKKKIVNDLVSKVDVTADNVDIIFKFQLA

SEQ ID NO: 5108 - protein, 452 aa, synthetic construct
MKAAIYIRVSTREQVENYSIQAQTEKLTALCRSKDWDVYDIFIDGGYSGSNMNRPALNEMLSKLHEIDAVVVYRLDRLSRSQRDTITLIEEYFLKNNVEFVSLSETLDTSSPFGRAMIGILSVFAQLERETIRDRMVTGKIKRIEAGLPLTTAKGRTFGYDVIDTKLYVNEEEAKQLRLIYDIFEEEQSITFLQKRLKELGFKVRTYNCYNNWLTNDLYCGYVSYKDKVHVKGIHEPIISEEQFYRVQEIFTRMGKNPNMNRDSASLLNNLVVCSKCGLGFVHRRKDTMSRGKKYHYRYYSCKTYKHIHELEKCGNKIWRADKLEELIINRVNNYSFASRNEDKVDELDSLNEKLKVEHAKKKRLFDLYVSGSYKVSELDSMMNDIDAQINYYESQIEANEELRKNKKIQENLANLATVGYDSLEFREKQLYLKSLINKIYIDGEQVTIEWL

SEQ ID NO: 5109 - protein, 485 aa, synthetic construct
MTKKVAIYTRVSTTNQAEEGFSIDEQIDRLTKYAEAMGWQVSDTYTDAGLSGAKLERPAMQRLIDDIENKAFDTVLVYKLDRLSRSVRDTLYLVKDVFTKNKIDFISLNESIDTSSAMGSLFLTILSAINEFERENIKERMTMGKLGRAKSGKSMMWTKTAFGYYHNRETGILEIVPLQATIVEQIFTDYLSGISLTKLRDKLNESGHIGKDIPWSYRTLRQTLDNPVYCGYIKFKDSLFEGMHKPIIPYETYLKVQKELKERQQQTYGRNNNPRPFQAKYMLSGMVRCGYCGAPLKIVLGHKRKDGSRTMKYHCANRFPRKTKGVTVYNDNKKCDSGTYDLSDLENTVIDNLIGFQENNDSLLKIINGNNQPILDTSSFKKQISQIDKKIQKNSDLYLNDFITMDELKDRTDSLQAEKRLLKAKISENKFNDSTDVFELVKTQLGSIPINELSYDNKKKIVNNLVSKVDVTADNVDIIFKFQLA

SEQ ID NO: 5110 - protein, 485 aa, synthetic construct
MTKKVAIYTRVSTTNQAEEGFSIDEQVDRLTKYAEAMGWQVSGTYTDAGFSGAKLERPAMQRLINDIEDKAFDTVLVYKLDRLSRSVRDTLYLVKDVFTKNKIDFISLNESIDTSSAMGSLFLTILSAINEFERENIKERMAMGKLGRAKSGKSMMWTKTAFGYNHNRKTGILEIVPLQATIVEQIFTDYLSGISLTKLRDKLNESGHIGKDVPWSYRTLRQTLDNPVYCGYIKFKDSLFEGIHKPIIPYETYLKVQKELEERQQQTYERNNNPRPFQAKYMLSGMARCGYCGAPLKIVLGHKRKDGSRTMKYHCANRFPRKTKGVTVYNDNKKCDSGTYDLSNLENTVIDNLIGFQENNDSLLKIINGNNQPILDTSSFKKQISQIDKKIQKHSDLYLNDFITMDELKDRTDSLQAEKKLLKAKISENKFNDSTDVFGLVKTQLGSTPINELNYDDKKKIVNNLVSKVDVTADNVEIIFKFQLA

SEQ ID NO: 5111 - protein, 485 aa, synthetic construct
MTKKVAIYTRVSTTNQAEEGFSIDEQIDRLTKYAEAMGWQVSDTYTDAGFSGAKLERPAMQRLINDIESKAFDTVLVYKLDRLSRSVRDTLHLVKDVFTKNRIDFISLNESIDTSSAMGSLFLTILSAINEFERENIKERMTMGKLGRAKSGKSMMWTKTAFGYYHNRKTGVLEVVPLQATIVEQIFTEYLSGISLTKLRDKLNESGHIGKDIPWSYRTLRQTLDNPVYCGYIKFKDSLFEGMHKPIIPYETYLKVQKELEERQQQTYERNNNPRPFQAKYMLSGMARCGYCGAPLRIVLGHKRKDGSRTMKYHCANRFPRKTKGVTVYNDNKKCDSGTYDLGSLENTVIDNLIGLQENNDGLLKIINGNNQPILDTSSFKKQISQIDKKIQKNSDLYLNDFITMDELKHRTDSLQAEKKLLKAKISENKFNDSTDVFELVKTQLGSIPINELSYDNKKKIVNNLVSKVDVTADNVDIIFKFQLA

SEQ ID NO: 5112 - protein, 485 aa, synthetic construct
MTKKVAIYTRVSTTNQAEEGFSIDEQIDRLTKYAEAMGWQVSDTYTDAGVSGAKLERPAMQRLINDIENKAFDTVLVYKLDRLSRSVRDTLYLVKDVFTKNKIDFISLNESINTSSAMGSLFLTILSAINEFERENIKERMTMGKLGRAKSGKSMMWTKTAFGYYHNRRTGILEIVPLQATIVEQIFTDYLSGISLTKLRDKLNESGHIGKDIPWSYRTLRQTLDNPVYCGYIKFKGSLFEGMHEPIIPYETYLKVQKELEERQQQTYERNNNPRPFQAKYMLSSMARCGYCGAPLRIVLGHKRKDGSRTMKYHCANRFPRKTKGATVYNDNKKCDSGTYDLSNLENTVIDNLIGFQENNDSLLKVINSINQPILDTSSFKKQISQIDKKIQKNSDLYLNDFITMDELKDRTDSLQAEKKLLKAKISENKFNDSTDVFELVKTQLGSIPINELSYEDKKKIVNNLVSKVDVTADNVNIIFKFQLA

SEQ ID NO: 5113 - protein, 469 aa, synthetic construct
MSYTTPVRAAVYLRISEDRSGEQLGVARQREDCLKLCGQRKWEPVEYLDNDVSASTGKRRPAYEQMLADIFAGKIAAVVAWDLDRLHRRPIELEAFMSLADEKRLALATVAGDVDLATPQGRLVARLKGSVAAHETEHKKARQRRAARQKAERGLPNWSKAFGYLPGPNGPEPDPRTAPLVKQAYANILAGASLGDVCRQWNGAGAFTITGRSWTPTTLSKFLRKPRNAGLRTYKGARYGPVDRDAIVGKARWSPLVDEATFWAAQAVLDAPGRAPGRKSVRRHLLTGLAGCGKCGNHLAGSYRTDGRVVYVCKACHGVAILADNIEPILYHIVAERLAMPDAVDLLRRETHDAAEAETIRLELETLYDELDRLAVERAEGLLTARQVKISTDIVNAKITKLQVRQLDQERLRVFDGIPLGTPQVAGMIAELSPDRFRAVLDVLAEVVVQPVGKSGRIFNPERVQVDWR

SEQ ID NO: 5114 - protein, 453 aa, synthetic construct
MKAAIYIRVSTREQVENYSIQAQTEKLTALCRSRDWDVYDIFIDGGYSGSNMNRPALNEMLSKLHEIDAVVVYRLDRLSRSQRDTITLIEEYFLKNNVEFVSLSETLDTSSPFGRAMIGILSVFAQLERETIRDRMVMGKIKRIEAGLPLTTAKGRTFGYDVIDTKLYINEEEAKQLQLIYDIFEEEQSITFLQKRLKKLGFKVRTYSCYNNWLTNDLYCGYVSYKDKVHVKGIHEPIISEEQFYRVQEIFTRMGKNPNMNRDSASLLSNLVVCSKCGLGFVHRRKDTMSRGKKYHYRYYSCKTYKHTHELEKCGNKIWRADKLEELIISRVNNYSFASRNVDKEDELDSLNEKLKIEQAKKKRLFDLYINGSYEASELDSMMNDIDAQINYYESQIEANEELKKNKKIQENLADLATVDFDSLEFREKRQYLKSLISKIYIDGEQVTIEWLQ

SEQ ID NO: 5115 - protein, 469 aa, synthetic construct
MSYTTPVRAAVYLRISEDRSGEQLGVARQREDCLKLCDQRKWVPVEYLDNDVSASTGKRRPAYEQMLADITAGKIAAVVAWDLDRLHRRPIELEAFMSLADEKRLALATVAGDVDLATPQGRLVARLKGSVAAHETEHKKARQRRAARQKAERGHPNWSKAFGYLPGPNGPEPDPRTAPLVKQAYADILAGASLGDVCRQWNDAGAFTITGRPWTTTTLSKFLRKPRNAGLRAYKGARYGPVDRDAIVGKAQWSPLVDEATFWAAQAVLDAPGRAPGRKSVRRHLLTGLAGCGKCGNHLAGSYRTDGKVVYVCKACHGVAILADNIEPILYHIVAERLAMPDAVDLLRREIHDAAEAETIRLELETLHGELDRLAVERAEGLLTARQVKISTDIVNAKITKLQACQLDQERLRVLDGIPLGTPQVAGMIAELSPDRFRAVLDVLAEVVVQPVGKSGRIFNPERVQVNWR

SEQ ID NO: 5116 - protein, 452 aa, synthetic construct
MKAAIYIRVSTREQVENYSIQAQTEKLTALCRSKDWDVYDIFIDGGYSGSNMNRPALNEMLNKLHEIDAVVVYRLDRLSRSQRDTITLIEEYFLKNNVEFVSLSETLDTSSPFGRAMIGILSVFAQLERETIRDRMVMGKIKRIEAGLPLTTAKGRTFGYDVIDTKLYINEEEAKQLRLIYDIFEEEQSITFLQKRLKKLGFKVRTYNRYNSWLTNDLYCGYVSYKDRVHVKGIHEPIISEEQFYRVQEIFTRMGKNPNMNRDSASLLNNLVVCSKCGLGFVHRRKDTTSRGKKYHYRYYSCKTYKHIHELEKCGNKIWRADKLEELIINRVNDHSFASRNVDKEDELDSLNEKLKIEHAKRKRLFDLYINGSYEVSELDSMMNDIDAQINYYESQIEANEELKKNKKIQENLANLATVDYDSLEFREKQLYLKSLINKIYIDGEQVTIEWL

SEQ ID NO: 5117 - protein, 469 aa, synthetic construct
MCYTTPVRAAVYLRISEDRSGEQLGVARQREDCLELCSQRKWVPVEYLDNDVSASTGKRRPAYEQMLADIAAGKIAAVVAWDLDRLHRRPIELEAFMSLADEKRLALATVAGDVDLATPQGRLVARLKGSVAAHETEHKKARQRRAARQKAERGHPNWSKAFGYLPGPSGPEPDPRTAPLVKQAYADILAGASLGDVCRQWNDAGAFTITGRPWTTTTLSKFLRKPRNAGLRAYKGARYGPVDRDAIVGKAQWSPLVDEATFWAAQAVLDAPGRAPGRKSVRRHLLTGLAGCGKCGYHLAGSYRTDGRVVYVCKACHGVAILADNIEPILYHIVAERLAMPDAVDLLRREIHDAAEAETIRLELETLYGELDRLAVERAEGLLTARQVKISTDIVSAKITKLQACQLDQERLRVFDGIPLGTPQVAGMIAELSPDRFRAVLDVLAEVVVQPVGKSGRIFNPERVQVNWR

SEQ ID NO: 5118 - protein, 452 aa, synthetic construct
MKAAIYIRVSTREQVENYSIQAQTEKLTALCRSKDWDVYDIFIDGGYSGSNMNRPALNEMLSKLHEIDAVVVYRLDRLSRSQRDTLTLIEEYFLKNNVEFVSLSETLDTSSPFGRAMIGILSVFAQLERETIRDRMVMGKIKRIEAGLPLTTAKGRTFGYDVIDTKLYINEEEANQLQLIYDIFEEEQSITFLQKRLKKLGFKVRTYSRYNNWLTNDLYCGYVSYKDKVHVKGIHEPIISEEQFYRVQEIFTRMGKNPNMSRDSASLLNNLVVCGKCGLGFVHRRKDTMSRGKKYHYRYYSCKTYKHIHELEKCGNKIWRADKLEELIINRVNNYSFASRNVDKEDELDSLNEKLKIEHAKKKRLFDLYINGSYEVSELDSMMSDIDAQINYYESQIEANEELKKNKKIQENLANLATVDYDSLEFREKQLYLKSLINKIYIDGEQVTIEWL

SEQ ID NO: 5119 - protein, 469 aa, synthetic construct
MSYTTPVRAAVYLRISEDRSGEQLGVARQREDCLKLCVQRKWVPVEYLDNDVSASTGKRRPAYEQMLADITAGKIAAVVAWDLDRLHRRPIELEAFMSLADEKRLALATVAGDVDLATPQGRLVARLKGCVAAHETEHKKARQRRAARQKAERGLPNWSKAFGYLPGPNGPEPDPRTAPLVKQAYADILAGASLGDVCRQWNDAGAFTITGRPWTTTTLSKFLRKPRNAGLRAYKGARYGPVDRDAIVGKARWSPLVDEATFWAAQAVLDAPGRAPGRKSVRRHLLTGLAGCGKCGNHLAGSYRTDGRVVYVCKVCHGVSILADNIVPILYHIVAERLAMPDAVDLLRREIHDAAEAEAIRLELETLYGELDRLAVERAEGLLTARQVKIGTDIVNAEITELQARQLDQERLRVFDGIPLGTPQVAGMIAELSPSRFRAVLDVLAEVVVQPVGRSGRTFNPERVRVNWR

SEQ ID NO: 5120 - protein, 469 aa, synthetic construct
MSYTTPVRAAVYLRISEDRSGEQLGVARQREDCLKLCDQRKWVPVEYLDNDVSASTGKRRPAYEQMLADITAGKIAAVVAWDLDRLHRRPIELEAFMSLADERRLALATVAGDVDLATPQGRLVARLKGSVAAHETEHKKARQRRAAKQKAERGHPNWSKAFGYLPGPNGPEPDPRTAPLVKQAYADILAGASLGDVCRQWNDAGAFTITGRPWTTTTLSKFLRKPRNAGLRAYKGARYGPVDRDAIVGKAQWSPLVDEATFWAAQAVLDAPGRAPGRKSVRRHLLTGLAGCGKCGNHLAGSYRTDGRVVYVCKACHGVAILADNIEPILCHIVAERLAMPDAVDLLRREIHDAAEAESIRLELETLHGELDRLAVERAEGLLTARQVKISTDIVNAKIIKLQARQLDQERLRVFDGIPLGTPQVAGMITELSPNRFRAVLDVLAEVVVQPVGKSGRIFNPERVQVNWR

SEQ ID NO: 5121 - protein, 452 aa, synthetic construct
MKAAIYIRVSTREQVENYSIQAQTEKLTALCRSKDWDVYDIFIDGGYSGSNMNRPALNEMLSKLHEIDAVVVYRLDRLSRSQRDTITLIEEYFLKNNVEFVSLSETLDTSSPFGRAMIGILSVFAQLERETIRDRMVMGKIKRIEAGLPLTTAKGRTFGYDVVDAKLYINEEEAKQLQLIYDIFEEEQSITSLQKRLKKLGFKVRTYSRYNNWLTNDLYCGYVSYKDKVHVKGIHEPIISEEQFYRVQEIFARMGKNPNMNRDSASLLNNLVVCSKCGLGFVHRRKDTTSRGKKYHYRYYSCKTYKHTHELEKCGNKIWRADKLEELIINRVNNYSFAGRSVDKEDELDSLNEKLKIEHTKKRRLFDLYINGSYEVSELDSMMNDIDAQISYYESQTEANEELKKNKKIQENLANLATVDYDSLEFREKQLYLRSLINKIYIDGEQVTIEWL

SEQ ID NO: 5122 - protein, 469 aa, synthetic construct
MSYTTPVRAAVYLRISEDRSGEQLGVARQREDCLKLCDQRKWVPVEYLDNDVSASTGKRRPAYEQMLADIAAGKIAAVVAWDLDRLHRRPIELEAFMSLADEKRLALATVAGDVDLATPQGRLVARLKGSVAAHETEHKKARQRRAARQKAERGHPNWSKAFGYLPGPNGPEPDPRTAPLVKQAYADILAGASLGDVCRQWNDAGAFTITGRPWTTTTLSKFLRKPRNAGLRTYKGARYGPVDRDAIVGKAQWSPLVDEATFWAAQAVLDAPGRAPGRKSVRRHLLTGLAGCGKCGNHLAGSYRTDGRVVYVCKACHGIAILAGNIEPILYHVIAERLAMPDAEDLLRREIHDAAEAETIRLELGTLYGELDRLAVERAEGLLTARQVKISTDIVNAKITKLQARQLDQERLRVLNGIPLGTPQVAGMIAELSPDRFRAVLDVLAEVVVQPVGKSGRIFNPERVQVNWR

SEQ ID NO: 5123 - protein, 452 aa, synthetic construct
MKAAIYIRVSTREQVENYSIQAQTEKLTALCRSKDWDVYDIFIDGGYSGSNMNRPALNEMLSKLHEIDAVVVYRLDRLSRSQRDTITLIEEYFLKNNVEFVSLSETLDTSSPFGRAMIGILSVFAQLERETIRDRMVMGKIKRIEAGLPLTTAKGRTFGYDVIDTKLYINEEEARQLQLIYDIFEEEQSITFLQKRLKKLGFKVRTYSCYNNWLTNDLYCGYVSYKDKVHVKGIHEPIISEEQFYRVQEIFTRMGKNPNMNRDSASLLNNLVVCSKCGLGFVHRRKDTVSRGKKYHYRYYSCKTYKHIHELEKCGNKIWRADKLEELIINRVNNYSLASRNVDKEDELDSLSEKLKVEHAKKKRLFELYINGSYEVSELDSMMSDIDAQINYHESQIEANEELKKNKKIRENLADLATVDYDSLEFREKQLYLKSLINKIYIDGEQVTIEWL

SEQ ID NO: 5124 - protein, 485 aa, synthetic construct
MTKKVAIYTRVSTTNQAEEGFSIDEQIDRLTKYAEAMGWQVSDTYTDAGFSGAKLERPAMQRLINDVENKAFDTVLVYKLDRLSRSVRDTLYLVKDVFTRNKIDFISLNESIDTSSAMGSLFLTILSAINEFERENIKERMSMGKLGRAKSGKSMMWTKTAFGYYHNRKTGVLEIVPLQATIVEQIFTDYLSGTSLTKLRDKLNESGHIGKDIPWSYRTLRQTLDNPVYCGYIKFKDSLFEGMHKPIIPYETYLKVQKELEERQQQTYERNNNPRPFQAKYMLSGMARCGYCGAPLRIVLGHKRKDGSRTMKYHCANRFPRKTKGVTVYNDNKKCDSGTYDLSDLENTVIGILVGFQEDNGSLLKITNGSNQPILDTCSFKEQISQIDKKIRKNSDLYLNDFITMDELKDRTDSLQAEKKLLEAKISETKFNDGTDVFELVKTQLGSIPINELSYDNKKKIVNSLVSKVDVTADNVDIIFKFQLA

SEQ ID NO: 5125 - protein, 452 aa, synthetic construct
MKAAIYIRVSTQEQVGNYSIQAQTEKLTALCRSKDWDVYDIFIDGGYSGSNMNRPALNEMLSKLHEIDAVVVYRLDRLSRSQRDTTTLIEEYFLKNNVEFVSLSETLDTSSPFGRAMIGILSVFAQLERETIRDRMVMGKIKRIEAGLPLTTAKGRTFGYDVIDTRLYINEEEAKQLRLIYDIFEEEQSITFLQKRLKKLGFKVRTYNRYNNWLTNDLYCGYVSYKDKVHVKGIHEPIISEEQFYRVQEIFTRMGKNPNMNRDSASLLNNLVVCSKCGLGFVHRRKDTMSGGKKYHYRYYSCKTYKHTHELEKCGNKIWRADKLEELIIDRVNNYSFASRNVDKEGELDSLNEKLKIEHAKKKRLFNLYINGSYEVSELDSMMNDIDAQINYYESQIEANEELKKNKKIQENLADLATVDFDSLEFREKQQYLKSLISKIYIDGEQVTIEWL

SEQ ID NO: 5126 - protein, 452 aa, synthetic construct
MKAAIYIRVSTREQVENYSIQAQTEKLTALCRSKDWDVYDIFIDGGYSGSNMNRPALNEMLSKLREIDAVVVYRLDRLSRSQRDTITLIEEYFLKNNVEFVSLSETLDTSSPFGRAMIGILSVFAQLERETIRDRMVMGKIKRIEAGLPLTTAKGRTFGYDVIDSKLYINEEEAKQLQLIYDIFEEEQSITSLQKRLKKLGFKVHTYNRYNNWLTNDLYCGYVSYKDKVHVKGIHEPIISEEQFYRVQEIFTRMGKNPNMNRDSASLLNNLVVCSKCGLGFVHRRKDAMSRDKKYHYRYYSCKTYKHIHELEKCGNKIWRADKLEELIINRVNSYSLAGRNVGKEDELDSLNEKLNIEHAKKKRLFDLYINGSYEVSELDSMMNDINAQISYYESQIEANEELRKNKKIQENLAYLATVDFDSLEFREKQLYLKSLINKIYIDGEQVTIEWL

SEQ ID NO: 5127 - protein, 485 aa, synthetic construct
MTKKVAIYTRVSTTNQAEEGFSIDEQIDRLTKYAEAMGWQVSGTYTDAGFSGAKLERPAMQRLINDIESKAFDTVLVYKLDRLSRSVRDTLYLVKDVFTKNKIDFISLNESISTSSAMGSLFLTILSAINEFERENIKERMTMGKLGRAKSGKSMMWTKTAFGYYHNRKTGILEIVPLQATIVEQIFTDYLSGISLTKLRDKLNESGHIGKDIPWSYRTLRQTLDNPVYCGYIKFKGSLFEGMHKPIIPYETYLKVQKELEERQRQTYERNNNPRPFQAKYMLSGMARCGYCGAPLKVVLGHKRKDGSRTMKYHCANRSPRKTKGVTVYNDNKKCDSGSYDLSNLENTVIDNLIGFQENNDSLLKIINGNNQPILDTSSLKKQISQIDKKIQKNSDLYLNDFITMDELKDRTDSLQAEKSLLKAKISENKFNDSTDVFELVKTQLGSIPINELSYDNKKKIVNNLVSKVDVTADNVDIIFKFQLA

SEQ ID NO: 5128 - protein, 452 aa, synthetic construct
MKAAIYIRVSTQEQVGNYSIQAQTEKLTALCRSKDWDVYDIFIDGGYSGSNMNRPALNEMLSKLHEIDAVVVYRLDRLSRSQRDTTTLIEEYFLKNDVEFVSLSETLDTSSPFGRAMIGILSVFAQLERETIRDRMVMGKIKRIEAGLPLTTAKGRTFGYDVIDTKLYVNEEEAKQLRLIYDIFEEEQSITFLQKRLKKLGFKVHTYNRYNNWLTNDLYCGYVSYKDKVHVKGIHEPIISEEQFYRVQEIFTRMGKNPNMNRDSASLLNNLVVCSKCGLSFVHRSKDTMSRGKKYHYRYYSCKTYKHTHELEKCGNKIWRADKLEELIINRVNSYSFASRNVDKEDELDSLNEKLKIEHAKKKRLFDLYINGSYEVSELDSMMNDIDAQINYYESQIEAIEELKKDKKIQENLADLAAVDFDSLEFREKQLYLKSLISKIYIDGEQVTIEWL

SEQ ID NO: 5129 - protein, 452 aa, synthetic construct
MKAAIYIRVSTQEQVGNYSIQAQTEKLTALCRSKDWDVYDIFIDGGYSGSNMNRPALNEMLSKLHEIDAVVVYRLDRLSRSQRDTTTLIEEYFLKNNVEFVSLSETLDTSSPFGRAMIGILSVFAQLERETIRDRMVMGKIKRIEAGLPLTTAKGRTFGYDVIDTKLYVNEEEAKLLRLIYDIFEEEQSITSLQKRLKKLGFKVRTYNRYNNWLTNDLYCGYVSYKDKVHVKGIHEPIISEEQFYRVQEIFTRMGKNPNMNRDSASLLNNLVVCSKCGLGFVHRSKDTMSRGKKYHYRYYSCKTYKHTHELEKCGNKTWRADKLEELIINRVNNYSFASRNVDKEGELDSLNEKLKIEHAKKRRLFDLYINGSYEVSELDSMMNDIDAQINHYESQIEANEELKKNKKIQENLADLATVDFDSLEFREKQLYLKSLINKIYIDGEQVTIEWL

SEQ ID NO: 5130 - protein, 452 aa, synthetic construct
MKAAIYIRVSTREQVENYSIQAQTEKLTALCRSKDWDVYDIFIDGGYSGSNMNRPALGEMLSKLHEIDAVVVYRLDRLSRSQRDTITLIEEYFLKNNVEFVSLSETLDTSSPFGRAMIGILSVFAQLERETIRDRMVMGKIKRIEAGLPLTTARGRTFGYDVIDAKLYINEEEAKQLQLIYDIFEEEQSITFLQKRLKKLGFKVRTYNRYNNWLTNDLYCGYVSYKDKVHVKGIHEPIISEEQFYRVQEIFTRMGKNPNMNRDSASLLNNLVVCSKCGRGFVHRRKDAKSRDKKYHYRYYSCKTYKHIHELEKCGNKIWRADKLEELIINRVNDYSVASRNVDKEDELDSLNEKLKIEHAKKRRLFDLYINGRYEVSELDSMMNDIDAQISYYESQIEANEELKKNKRIQENLADLATVDFDSLEFREKQLYLKSLIHKIYIDGEQVTIEWL

SEQ ID NO: 5131 - protein, 485 aa, synthetic construct
MTKKVAIYTRVSTTNQAEEGFSIDEQIDRLTKYAEAMGWQVSDTYTDAGFSGAKLVRPAMQRLINDIENKAFDTVLVYKLDRLSRSVRDTLYLVKDVFTKNKIDFISLNESIDTSSAMGSLFLTILSAINEFERENIKERMTMGKLGRAKSGKSMMWTKTAFGYYHNRKTGILEIVPLQATIVEQIFTDYLSGISLTKLRDKLNESGHIGKDIPWSYRTLRQTLDNPVYCGYIKFKDSLFEGMHKPIIPYETYLKVQKELEERQQQTYERNNNPRPFQAKYMLSGLARCGYCGAPLRIVLGHKRKDGSRTMKYHCANRFPRKTRGVTVYNDNKKCDSGTYDLSSLENTVIDSLIGLQENNDSLLKIINGNNPPILDTSSFKEQISQIDKKIQKNSELYLNDFITMDELKERTDSLQAEKKLLKAKISGNKFNDSTDVFELVKTQLGSIPINELSCDNKKKIVNNLVSKVDVTADNVDIIFKFQLA

SEQ ID NO: 5132 - protein, 452 aa, synthetic construct
MKAAIYIRVSTREQVENYSIQAQTEKLTALCRSKDWDVYDIFIDGGYSGSNMNRPALNEMLSKLHEIDAVVVYRLDRLSRSQRDTITLIEEYFLKNNVEFVSLSETLDTSSPFGRAMIGILSVFAQLERETIRDRMVMGKIKRIEAGLPLTTAKGRTFGYDVIDTKLYINEEEAKQLQLIYDIFEEEQSITFLQKRLKKLGFKVRTYSCYNNWLTNDLYCGYVSYKDKVHVKGIHEPIISEEQFYRVQEIFTRMGKNPNTNRDSASLLNNLVVCSKCGLGFVHRRKDTMGRGKKYHYRYYSCKTYKHTHELEKCGNKIWRADKLEELIIDRVNNYSFASRNVDKEDELDSLNEKLKIEHAKKKRLFDLYINGSYEVSELDCMMNDIDAQINYYESQIEANEELKKDKKIQESLANLATVDYDSLEFREKQLYLKSLINKIYIDGEQVTIEWL

SEQ ID NO: 5133 - protein, 485 aa, synthetic construct
MTKKVAIYTRVSTTNQAEEGFSIDEQIDRLTKYAEAMGWQVSDTYTDAGFSGAKLERPAMQRLIIDIENKAFDTVLVYKLDRLSRSVRDTLYLVKDVFTKNKIDFISLSESIDTSSAMGSLFLTILSAINEFERENIKERMTMGKLGRAKSGKSMMWTKTAFGYYHNRKTGILEIVPLQATIVEQIFTDYLSGISLTKLRDKLNESGHIGKDIPWSYRTLRQTLDNPVYCGYIKFKDSLFEGMHKPIIPYETYLNVQKELEERQQQTYERNNNPRPFQAKYMLSGMARCGYCGAPLRIVLGHKRKDGSRAMKYHCANRFPRKTKGVTVYNDNKKCDSGTYDLSDLENAVIDSLVGFQENNDSLLKIINGNNQPILDTSSFKKRISQIDKKIQKNSDLYLDDFITMDELKVRTDSLQAEKKLLKAKISENKFNDSTDVFELVKTQLGSIPINELSYDNKKKIVNNLVSKVDVTADNVDIIFKFQLA

SEQ ID NO: 5134 - protein, 469 aa, synthetic construct
MSYTTPVRAAVYLRISEDRSGEQLGVARQREDCLKLCGQRNWAPVEYLDNDVSASTGKRRPAYEQMLADITAGKIAAVVAWDLDRLHRRPIELEAFMSLADEKRLALATVAGDVDLATPQGRLVARLKGSVAAHETEHKKARQRRAARQKAERGHPNWSKAFGYLPGPNGPEPDPRTAPLVKQAYANILAGASLGDVCRQWNDAGAFTITGRPWTTTTLSKFLRKPRNAGLRAYKGARYGPVDRDAIVGKAQWSPLVDEATFWAAQAVLDAPGRAPGRKSVRRHLLTGLAGCGKCGNHLSGSYRTDGRVVYVCKACHGVAILADNIEPILYHIVAERLAMPDAVDLLRREIHDAAEAETIRLELETLYDELDRLAVERAEGLLTARQVKISTDIVGAKITKLQARQLDQERLRVLDGIPLGTPRVAGMIAELSPDRFRAVLDVLAEVVVQPVGKGGRIFNPERVQVNWR

SEQ ID NO: 5135 - protein, 469 aa, synthetic construct
MSYTTPVRAAVYLRISEDRSGEQLGVARQREDCLKLCGQRKWVPVEYLDNDVSASTGKRRPAYEQMLADITAGKIAAVVAWDLDRLHRRPIELEAFMSLADEKRLALATVAGDVDLATPQGRLVARLKGCVAAHETEHKKARQRRAARQKAERGLPNWSKAFGYLPGPNGPEPDPRTAPLVKQAYADILAGASLGDVCRQWNDAGALTITGRPWTTTTLSKFLRKPRNAGLRAYKGARYGPVDRDAIVGKAQWSPLVDEATFWAAQAVLDAPGRAPGRKSVRRHLLTGLAGCGKCGNHLAGSYRTDGRVAYVCKACHGVAILADNIEPFLYHIVAERLAMPDAVDLLRCEIHDAAEAETIRQELETLHGELDRLAVERAEGLLTARQVKISTDIVNAKITKLQARQLDQERLRVFGGIPLGTPQVAGVIVELSPDRFRAVLDVLAEVVVQPVGKGGRTFNPERVQVNWR

SEQ ID NO: 5136 - protein, 469 aa, synthetic construct
MSYTTPVRAAVYLRISEDRSGEQLGVARQREDCLKLCGQRKWVPVEYLDNDVSASTGKRRPAYEQMLADITAGKIAAVVAWDLDRLHRRPIELEAFMSLADEKRLALATVAGDVDLATPQGRLVARLKGCVAAHETEHKKARQRRAARQKAERGHPNWSKAFGYLPGPNGPEPDPRTAPLVRQAYADILAGASLGDVCRQWNDAGAFTITGRPWTTTTLSKFLRKPRNAGLREYKGARYGPVDRDAIVGKAQWSPLVDEATFWAAQAVLDAPGRAPGRKSVRRHLLTGLAGCGKCGNHLAGSYRTDGRVVYVCKVCHGVAILADNIEPILYHIVVERLAMPDAVDLLRREIHDAAEGETIRLELETLYGELDRLAVERAEGLLTARQVKISTDIVNAKITKLQARQLDQERLRVLDGIPLGTPQVAAMIAELSPDRFRAVLDVLAEVVVQPAGKSGRIFNPERVQVNWR

SEQ ID NO: 5137 - protein, 485 aa, synthetic construct
MTKKVAIYTRVSTTNQAEEGFSIDEQIDRLTKYAEVMGWQVSDTYTDAGLSGAKLERPAMQRLINDIENKAFDTVLVYKLDRLSRSVRDTLYLVKDVFTKNKIDFISLSESIDTSSAMGSLFLTILSAINEFERENIKERMTMGKLGRAKSGKSMMWTKTAFGYYHNRKTGILEIVPLQAAIVEQIFTDYLSGISLTKLRDKLNESGHIGKDIPWSYRALRQTLDNPVYCGYIKFKDSLFEGMHKPIIPYETYLKVQKELEERQQQAYERNNNPRPFQAKYMLSGMARCGYCGAPLRIVLGHKRKDGSRTMRYHCANRFPRKTKGVTVYNDNKKCDSGTYDLSNLENTVIDNLIGFQENNDSLLKIINGNNQPILDTSSLKKQVSQIDKKIRKNSDLYLNDFITMDELKDRTDSLQAEKKLLKAKISENKFNDSTDVFELVKTQLGSIPINELSYDNKKKIVNNLVSKVDVTAGNVDIIFKFQLA

SEQ ID NO: 5138 - protein, 452 aa, synthetic construct
MKAAIYIRVSTQEQVENYSIQAQTEKLTALCRSKDWDVYDIFIDGGYSGSNMNRPALNEMLSKLHEIDAVVVYRLDRLSRSQRDTITLIEEYFLKNNVEFVSLSETLDTSSPFGRAMIGILSVFAQLERETIRDRTVMGKIKRVEAGLPLTTAKGRTFGYDVIDTKLYINEEEAKQLQLIYDIFEEEQSITSLQRRLKELGLKVRTYSRYSNWLTNDLYCGYVSYKDKVHVKGIHEPIISEEQFYRVQEIFTRMGKNPNMNRDSASLLNNLVVCSKCGLGFVHRRKDTMSRGKKYHYRYYSCKTYKHTHELEKCGNKIWRADKLEELIISRVNNYNLASRNVDKEDELDSLSEKLEVEHAKKRRLFDLYINGSYEVSELNSMMNDIDAQINYYEGQIEANEELRKNKKIQESLANLATVDYDSLEFREKQLYLKSLINKIYIDGERVTIEWL

SEQ ID NO: 5139 - protein, 452 aa, synthetic construct
MKAAIYIRVSTREQVENYSIQAQTEKLTALCRSKDWDVYDIFIDGGYSGSNMNRPALNEMLSKLHEIDAVVVYRLDRLSRSQRDTITLIEEYFLKNNVEFVSLSETLDTSSPFGRAMIGILSVFAQLERETIRDRMVMGKIKRIEAGLPLTTAKGRTFGYDVIGTKLYINEEEAKQLRLIYDIFEEEQSITFLQRRLKKLGFKVRTYNRYNNWLTNDLYCGYVSYKDKVHVKGIHEPIISEEQFYRVQEIFTRMGKNPNMNRDSASLLNNLVVCSKCGLGFVHRRKDAMSRDKKYHYRYYSCKTYKHIHELEKCGNKIWRADKLEELVINRVNNYSLASRNVDKEDELDSLNEKLKIEHAKKKRLFDLYINGSYEVSELDSMMNDIDAQINYYESQIEANEELKKNKKIQENLANLATADFDSLEFREKQRYLKSLINKIYIDGEQVTIEWL

SEQ ID NO: 5140 - protein, 452 aa, synthetic construct
MKAAIYIRVSTREQVENYSIQAQTEKLTALCRSKGWDVYDIFIDGGYSGSNMNRPALNEMLSKLHEIDAVVVYRLDRLSRSQRDTITLIEEYFLKNNVEFVSLSETLDTSSPFGRAMIGILSVFAQLERETIRDRMVMGKIKRIEAGLPLTTAKGRTFGYDVIDTRLYINEEEAKQLQLIYDIFEEEQSITFLQKRLKKLGFKVRTYNCYNNWLTNDLYCGYVSYKDKVHVKGIHEPIISEEQFYRVQEIFARMGKNPNMNRDSASLLNNLVVCSKCGLSFVHRRKDATSRCKKYHYRYYSCKTYKHIHELEKCGNKIWRADKLEELIINRVNNYSIASRNADKEDELDSLNEKLKIEHAKKKRLFDLYINGRYEVSELDSMMNDIDAQINYYESQIEANEELKKNKKIQENLAYLATVDFDSLEFREKQLYLKSLINKIYIDGEQVTIEWL

SEQ ID NO: 5141 - protein, 452 aa, synthetic construct
MKAAIYIRVSTREQVENYSIQAQTEKLTALCRSKDWDVYDIFIDGGYSGSNMNRPALNEMLSKLHEIDAVVVYRLDRLSRSQRDTITLIEEYFLKNNVEFVSLSETLDTSSPFGRAMIGILSVFAQLERETIRDRMVMGKIKRTEAGLPLTTAKGRTFGYDVIDTKLYINEEEAKQLQLIYDIFEEEQSITFLQKRLKKLGFKVRTYNRYNDWLTNDLYCGYVSYKDKVHVKGIHEPIISEEQFHRVQEIFARMGKNPNMNRDSASLLNNLVVCSKCGLGFVHRRKDTKSRGKKYHYRYYSCRTYKHIHELEKCGNKIWRADKLEELIINRVSNYSLASRNADKEDDLDSLNEKLKTEHAKKKRLFDLYINGSYEVSELDNMMNDIDAQINYYESQIGANEELKKNKKIQEDLADLATVDFDSLEFREKQLYLKSLINKIYIDGEQVTIEWL

SEQ ID NO: 5142 - protein, 469 aa, synthetic construct
MSYTTPVRAAVYLRISEDRSGEQLGVARQREDCLKLCGQRKWVPVEYLDNDVSASTGKRRPAYEQMLADITAGKIAAVVAWDLDRLHRRPIELEAFMSLADEKRLALATVAGDVDLATPQGRLVARLKGSVAAHETEHKKARQRRAARQKAERGHPNWSKAFGYLPGPNGPEPDPRTAPLVKQAYADILAGASLGDVCRQWNDAGAFTITGRPWTTTALSKFLRKPRNAGLRAYKGARYGPVDRDAIVGRAQWSPLVDEATFWAAQAVLDAPGRAPGRKSVRRHLLTGLAGCGKCGNHLAGSYRTDGRVVYVCKACHGVAILADNIEPILYHIVAERLAMPDAVDLLRREIHDAAEAETIRLELETLYGELDRLAVERAEGLLTARQVKISTDIVNAKITRLQARQLDQERLRVLDGIPLGTPQVAGMIAELSPDRFRAVLDVLAEVVVQPVGKSARIFNPERVQVSWR

SEQ ID NO: 5143 - protein, 469 aa, synthetic construct
MSYTTPVRAAVYLRISEDRSGEQLGVARQREDCLKLCDQRKWVPVEYLDNDVSASTGKRRPAYEQMLADITAGKIAAVVAWDLDRLHRRPIELEAFMSLADEKHLALATVAGDVDLATPQGRLVARLKGSVAAHETEHKKARQRRAARQKAERGHPNWSKAFGYLPGPNGPEPDPRTAPLVKQAYADILAGASLGDVCGQWNDAGAFTITGRPWTTTTLSKFLRKPRNAGLRAYKGARYGPVDRDAIVGKAQWSPLVDEATFWAAQAVLDAPGRAPGRKSVRRHLLTGLAGCGKCGSHLAGSYRTDGRVVYVCKACHGVVILADNIVPFLYQIVAERLAMPNAVDLLRREIHDAAEAETIRLELETLYGELDRLAVERAEGLLTARQVKISTDIVNAKITQLQARQLDQERLRVLDGIPLGTPQVAGMIAELSPDRFRAVLDVLAEVVVQPVGKSGRVFNPERVQVNWR

SEQ ID NO: 5144 - protein, 452 aa, synthetic construct
MKAAIYIRVSTQEQVGNYSIQAQTEKLTALCRSKDWDVYDIFVDGGYSGSNMNRPALNEMLSKLHEIDAVVVYRLDRLSRSQRDTTTLIEEYFLKNNVEFVSLSETLDTSSPFGRAMIGILSVFAQLERETIRDRMVMGKIKRIEAGLPLTTAKGRTFGYDVIDTKLYINEEEARQLQLIYDIFEEEQSITFLQKRLKKLGFKVRTYNRYNSWLTNDLYCGYVSYKDKVHVKGIHEPIISEEQFYRVQEIFTRMGKNPNMNRDSASLLNNLVVCSKCGLGFVHRSKDTMSRGKRYHYRYYSCKTYKHTHELEKCGNKTWRADKLEELVINRVNNYSFASRNVDKEDELDSLNEKLKIEHAKKKRLFDLYISGSYEVSELDSMMNDIDAQINYYESQIEANEELRKNKKIQENLADLATVDFDSLEFREKQLYLKSLINKIYIDGEQVTIEWL

SEQ ID NO: 5145 - protein, 469 aa, synthetic construct
MSYTTPVRAAVYLRISEDRSGEQLGVARQREDCLKLCDQRKWVPVEYLDNDVSASTGKRRPAYEQMLADITAGKIAAVVAWDLDRLHRRPIELEAFMSLADEKRLALATVAGDVDLATPQGRLVARLKGCVAAHETEHKKARQRRAARQKAERGHPNWSKAFGYQPGPNGPEPDPRTAPLVKQAYADILAGASLGDVCRQWNAAGAFTITGRPWTTTTLSKFLRKPRNAGLRAYKGARYGPVDRDAIVGKAQWSPLVDEATFWAAQTVLDAPGRAPGRKSVRRHLLTGLAGCGKCGNHLAGSYRTDGRVVYVCKACHGVAILADNIEPILYHIVAERLAMPDAVDLLRREIHDAAEAETVRLELETLYGELDRLAVERAEGLLTARQVKISTDIVNAKITKLQTRQLDQERLRVFDGIPLGTPQVAGMIAELSPNRFRAVLDVLAEVVVQPVGKGGRVFNLERVQVYWR

SEQ ID NO: 5146 - protein, 469 aa, synthetic construct
MSYTTPVRAAVYLRISEDRSGEQLGVARQREDCLKLCGQRKWVPVEYLDNDVSASTGKRRPAYEQMLADITAGKIAAVVAWDLDRLHRRPVELEAFMSLADEKRLALATVAGDVDLATPQGRLVARLKGCVAAHETEHKKARQRRAARQKAERGLPNWSKAFGYLPGPNGPELNPRTAPLVKQAYADILAGASLGDVCRQWNAAGAFTITGRPWTTTALSKFLRKPRNAGLRAYKGARYGPVDRDAIVGKAQWSPLVDEATFWAAQAVLDAPGRAPGRKSVRRHLLTGLAGCGKCGNHLAGSYRTDGRVVYVCKACHGVSIPADNIVPILYHVVAERLAMPDAVDLLRHEIHDAAEAEAIRLELETLYGELDRLAVERAEGSLTARQVKISTDIVNAKITKLQARQLDQERLRVFNGIPLGTPQVAGVIAELSPDRFRAVLVVLAEVVVQPVGKGGRIFNPERVQVNWR

SEQ ID NO: 5147 - protein, 452 aa, synthetic construct
MKAAIYIRVSTREQVENYSIQAQTEKLTALCRSKDWDVYDIFIDGGYSGSNMNRPALNEMLSKLHEIDAVVVYRLDRLSRSQRDTITLIEEYFLKNNVEFVSLSETLDTSSPFGRAMIGILSVFAQLERETIRDRMVMGKIKRIEAGLPLTTAKGRTFGYDVIDTKLYINEEEAKQLQLIYDIFEEEQSITFLQKRLKKLGIKVRTYNRYISWLTNDLYCGYVSYKDKVHVKGIHEPIISEEQFYRVQEIFARMGKNPNMNRDSASLLNNLVVCSKCGLGFVHRRKDTTSRGKKYHYRYYSCKTYKHTHELEKCGNKIWRADKLEELIINRVNNYSIASRNVDKEDELDSLNEELKIEHAKKKRLFDLYINGSYEMSELDSMMNDIDAQIDYYESQIEANEELKKNKKIQEDLADLATVDFDSLEFREKQLYLKSLINKIYIDGEQVTIEWL

SEQ ID NO: 5148 - protein, 469 aa, synthetic construct
MSYTTPVRAAVYLRISEDRSGEQLGVARQREDCLKLCDQRKWVPVEYLDNDVSASTGKRRPAYEQMLADITAGKIAAVVAWDLDRLHRRPVELEAFMSLADEKRLALATVAGDIDLATPQGRLVARLKGSVAAHETEHKKARQRRAARQKAERGHPNWSKAFGYLPGPNGPEPDPRTAPLVKQAYADILAGASLGDVCRRWNDAGAFTITGRPWATTTLSKFLRKPRNAGLRAYKGARYGPVDRDAIVGKAQWSPLVDEATFWAAQAVLDAPGRAPGRKSVRRHLLTGLAGCGKCGNHLAGSYRTDGRVVYVCKACHGVAILADNIEPILYHIVAERLAMPDAVYLLRREIHDAAEAETIRLELETLYGELDRLAVERAEGLLTARQVKISTDIVNAKITKLQARQQDQERLRVLDGIPLGTPQVAGVIAELSPDRFRAVLDVLAEVVVQPVGKSDRIFSPRRVQVNWR

SEQ ID NO: 5149 - protein, 452 aa, synthetic construct
MKAAIYIRVSTREQVENYSIQAQTEKLTALCRSKDWDVYDIFIDGGYSGSNMNRPALNEMLSKLHEIDAVVVYRLDRLSRSQRDTITLIEEYFLKNNVEFVSLSETLDTSSPFGRAMIGILSVFAQLERETIRDRMVMGKIKRIEAGLPLTTAKGRTFGYDVIDTKLYINEEEAKQLRLIYDIFEEEQSITFLQKRLKKLGFKVRTYNRYNNWLTNDLYCGYVSYKDKVHVKGIHEPIISEEQFYRVQEIFTRMGKNPNMNRDSASLLNNLVVCSRCGLGFVHRRKDTMSRDKKYHYRYYSCKTYKHIHELEKCGNKIWRADKLEELIISRVNNYSFASRNADKEDELGSLNEKLKIEHAKKKRLFDLYINGRYEVSELDSMMNDIDAQINYYESQIEANEELKKNKKIQENLAYLATVDFDSLEFREKQLYLKSLINKIYIDGEQVTIEWL

SEQ ID NO: 5150 - protein, 485 aa, synthetic construct
MTKKVAIYTRVSTTNQAEEGFSIDEQIDRLTKYAEAMGWQVSDTYTDAGFSGAKLERPAMQRLINDIENKAFDTVLVYKLDRLSRSVRDTLYLVKDVLTKNKIDFISLNESIDTSSAMGSLFLTILSAINEFERENIKERMTMGKLGRAKSGKSMMWTKTAFGYYHNRKTGILEIVPLQATIVEQIFTDYLSGISLTKLRDKLNESGHIGKDIPWSYRTLRQTLDNPVYCGYIKFKGSLFEGMHKPIIPYETYLKVQKELEERQQQTYERNNNPRPFQAKYMLSGMARCGYCGAPLKVVLGHKRKDGSRTMKYHCANRFPRKTKGVTVYNDNKKCDSGTYDLSNLENTVIDNLIGFQENNDSLLKIINGNNQPIQDTSSFKEQISQIDKKIQKNSDLYLNDFITMDELKDRTDSLQAEKKLLKAKISENKFNDSADVFEQVKTQLGSIPINELSYVNKKKIVNNLVSKVDVTADNVDIIFKFQLA

SEQ ID NO: 5151 - protein, 452 aa, synthetic construct
MKAAIYIRVSTREQVENYSIQAQTEKLTALCRSKDWDVYDIFIDGGYSGSNMNRPALNEMLSKLHEIDAVVVYRLDRLSRSQRDTITLIEEYFLKNNVEFVSLSETLDTSSPFGRAMIGILSVFAQLERETIRDRMVMGKIKRVEAGLPLTTAKGRTFGYDVIDTKLYINEEEAKQLQLIYDIFEEEQSITSLQKRLKKLGFKVRAYNRYNSWLTNDLYCGYVSYKDKVHVKGIHEPIISEEQFYRVQEIFTRMGKHPNMNRDSASLLNNLVVCSKCGLGFVHRRKDTVSRGKKYHYRYYSCKTYKHIHELEKCGNKIWRADKLEELIINRVNNYSLASRNVDKEDELDSPNEKLKIEHAKKKRLFGLYINGSYEVSELDSMMNDIDAQINYYESQIEANEELKKNKKIQENLANLATVDYDSLEFREKQLYLKSLINKIYIDGEQVTIEWL

SEQ ID NO: 5152 - protein, 452 aa, synthetic construct
MKAAIYIRVSTREQVENYSIQAQTEKLTALCRSKDWDVYDIFVDGGYSGSNMNRPALNEMLSKLHEIDAVVVYRLDRLSRSQRDTITLIEEYFLKNNVEFVSLSETLDTSSPFGRAMIGILSVFAQLERETIRDRMVMGKIKRIEAGLPLTTAKGRTFGYDVIDTKLYINEEEAKQLQLIYDIFEEEQSITFLQKRLKKLGLKVHTYNRYNNWLTNDLYCGYVSYKDKVHVKGIHEPIISEEQFYRVQEIFTRMGKNPNMNRDSASLLNNLVVCSKCGLGFVHRRKDTVSRGKKYHYRYYSCKTYKHTHELEKCGNKIWRADKLEELIIDRVDNYSLASRNVDKEDELDSLNEKLKIEHAKKKRLFDLYINGSYEVSELDSMMSDIDAQINYYESQIEANEELRKNKKIQKNLADLATVDYDSLEFREKQLYLKSLINKIYIDGEQVTIEWL

SEQ ID NO: 5153 - protein, 469 aa, synthetic construct
MSYTTPVRAAVYLRISEDRSGEQLGVARQREDCLKLCGQRKWVPVEYLDNDMSASTGKRRPAYEQMLADIAAGEIAAVVAWDLDRLHRRPIELEAFMSLADEKRLALATVAGDVDLATPQGRLVARLKGSVAAHETEHKKARQRRAARQKAERGHPNWNKAFGYLPGPNGPELDPRAAPLVKQAYADILAGASLGDVCRQWNDAGAFTITGRPWTSTTLSKFLRKPRNAGLRTYKGVPYGPVDRDAIVGKAQWSPLVDEATFWAAQAVLDAPGRAPGRKSVRRHLLTGLAGCGKCGYHLAGSYRTDGQVVYVCKACHGVAILADNIEPILYHIVAERLAMPDAVDLLHREIHDAAEAETIRLELETLYGELDHLAVERAEGLLTARQVKISTDIVDAKIAKLQARQLDQERLRVFDGIPLGTPQVAGVIAELSPDRFRAVLDVLAEVVVQPVGKSGRIFNPERVQVNWR

SEQ ID NO: 5154 - protein, 485 aa, synthetic construct
MTKKVAIYTRVSTTNQAEEGFSIDEQIDRLTKYAEAMGWQVSDTYTDAGSSGAKLERPAMQRLINDIENKAFDTVLVYKLDRLSRSVRDTLYLVKDVFTKNKIDFISLNESIDTSSAMGSLFLTILSAINEFERENIKERMTMGKLGRAKSGKSMMWTKTAFGYYHNRKTGILEIVPLQATIVEQIFTDYLSGTSLTKLRDKLNESGHIGKDIPWSYRTLRQTLDNPVYCGYIKFKDSLFVGMHKPIIPYETYLKVQKELKERQQQTYERNNNPRPFQAKYMLSGMARCGYCGAPLRIVLGHKRKDGSRTMKYHCANRFPRKTKGVTVYNDNKKCDSGSYDLCDLEDTVIDNLIGFQENNGSLLKIINGNNQPILDTSSLEEQISQIDKKIQKNSDLYLNDFITMDELKDRTDSLQAEKKLLKAKISENKFNDSTDVFELVKTQLGSIPINELSYDDKKKIVNNLVSKVDVTADNVDIIFKFQLA

SEQ ID NO: 5155 - protein, 452 aa, synthetic construct
MKAAIYIRVSTQEQVGNYSIQAQTEKLTALCRSKDWDVYDIFVDGGYSGSNMNRPALNEMLSKLHEIDAVAVYRLDRLSRSQRDTTTLIEEYFLKNNVEFVSLSETLDTSSPFGRAMIGILSVFAQLERETIRDRMVMGKIKRIEAGLPLTTAKGRTFGYNVIDTKLYINEEEAKQLQLIYDIFEEERSITLLQKRLKKLGFKVRSYNRYNNWLTNDLYCGYVSYKDKVHVKGIHEPIISEEQFYRVQEIFTRMGKNPNMNRDSASLLNNLVVCSKCGLGFVHRRKDTMSGGKKYHYRYYSCKTYKHTYELEKCGNKIWRADKLEELIINSVNNYSFASRNVDKEGELDSLNEKLKIEHAKKRRLFDLYINGSYEVSELDSMMNDIDAQISYYESQIEANEELKKNKKIQENLANLATVDFDSLEFREKQLYLKSLINKIYIDGEQVAIEWL

SEQ ID NO: 5156 - protein, 469 aa, synthetic construct
MSYTTPVRAAVYLRISEDRSGEQLGVARQREDCLKLCDQRKWVPVEYLDNDVSASTGKRRPAYEQMLADIAAGKIAAVVAWDLDRLHRRPIELEAFMSLADEKRLALATVAGDVDLATPQGRLVARLKGSVAAHETEHKKARQRRAARQKAERGHPNWSKAFGYLPGPNGPEPDPRTAPLVKQAYADILAGASLGDVCRRWNDAGAFTITGRSWTTTTLSKFLRKPRNAGLRAYKGARYGPVDRDAIVGKAQWGPLVDEATFWAAQAVLDAPGRAPGRKSVRRHLLTGLAGCGKCGNHLAGSYRTDGKVVYVCKACHGVAILADNIEPILYRVVAERLAMPDAVDLLRHEIHDAAEAETIRLELETLHGELDRLAVERAEGLLTARQVKISTDIVNAKITKLQARQLDQERLRVFDGIPLGTPQVAGTIAELSPDRLRAVLDVLAEVVVQPVGKSGRIFNPERVQVNWR

SEQ ID NO: 5157 - protein, 452 aa, synthetic construct
MKVAIYIRVSTQEQVGNYSIQAQTEKLTALCRSKDWDVYDVFVDGGYSGSNMNRPALNEMLSKLHEIDAVVVYRLDRLSRSQRDTTTLIEEYFLKNNVEFVSLSETLDTSSPFGRAMIGILSVFAQLERETIRDRMVMGKIKRIEAGLPLTTAKGRTFGYDVIDTKLYINEEEAKQLQLIYDIFEEEQSITFLQKRLKKLGFKVRTYNRYNSWLTNDLYCGYVSYKDKVHVKGIHEPIISEEQFYRVQEIFARMGRNPNMNRDSASLLSNLVVCSKCGLGFVHRSKDTMSRGKKYHYRYYSCKTYKHAHELEKCGNKTWRADKLEELIINRVNNYSFASRNADKEDELDSLNEKLKTEHAKKKRLFDLYINGSYEVSELDSMMNDIDAQINYYESQIEANEELKKNKKIQENLAELATVDFDSLGFREKQLYLKSLINKIYIDGEQVTIEWL

SEQ ID NO: 5158 - protein, 452 aa, synthetic construct
MKAAIYIRVSTREQVENYSIQAQTEKLTALCRSKDWDVYDIFIDGGYSGSNMNRPALNEMLSKLHEIDAVVVYRLDRLSRSQRDTITLIEEYFLKNNVEFVSLSETLDTSSPFGRAMIGILSVFAQLERETIRDRMVMGKIKRIEAGLPLTTAKGRTFGYDVIDSKLYINEEEAKQLQLIYDIFEEERSITFLQRRLKKLGFKVRTYNRYNNWLTNDLYCGYVSYKDKVHVKGIHEPIISEEQFYRVQEIFTRMGKNPNMNRASASLLNNLVVCGKCGLGFVHRRKDAMSRDKKYHYRYYSCKTYKHIHELEKCGNKIWRADKLEELIISRVNNYSLASRNVDKEGELDSLNEKLKIEHAKKKRLFDLYINGSYEMSELDSMMNDIDAQINYYESQIEANEELRKNRKIQENLADLATVDFDSLKFRERQLYLKSLINKIYIDGEQVTIEWL

SEQ ID NO: 5159 - protein, 452 aa, synthetic construct
MKAAIYIRVSTREQVENYSIKAQTEKLTALCRSKDWDVYDIFIDGGYSGSNMNRPALNEMLSKLHEIDAVVVYRLDRLSRSQRDTITLIEEYFLKNNVEFVSLSETLDTSSPFGRAMIGILSVFAQLERETIRDRMVMGKIKRVEAGLPLTTAKGRTFGYDVIDTKLYINEEEAKQLRLIYDIFEEEQSITLLQKRLKKLGFIVRTYSRYNNWLTNDLYCGYVSYKDKVHVKGIHEPIISEEQFNRVQEIFTRMGKNPNMNRDSASLLNNLVVCSKCGLGFVHRRKDTMSRGKKYHYRYYSCKTYKHIHELEKCGNKIWRADKLEELIINRVNNYSLASRNVDKEDELDSLSEKLKVEHAKKKRLFELYINGSYEMGELDSMMNDIDAQINYYESQIEANEGLKRNKKIQENLAELATVDFDSLEFREKQLYLKSLINKIYIDGEQVTIEWL

SEQ ID NO: 5160 - protein, 452 aa, synthetic construct
MKAAIYIRVSTREQVENYSIQAQTEKLTALCRSKDWDVYDIFVDGGYSGSNMNRPALNEMLSKLHEIDAVVVYRLDRLSRSQRDTITLIEEYFLKNNVDFVSLSETLDTSSPFGRAMIGILSVFAQLERETIRDRMVMGKIKRIEAGLPLTTAKGRTFGYDVIDTKLYINEEEAKQLRLIYDIFEEEKSITFLQKRLKKLGFKVRTYNRYNNWLTNDLYCGYVSYKDKVHVKGIHEPIISEEQFYRVQEIFTRMGKNPNMNRDSASLLSNLVVCSKCGLGFVHRRKDAMSRDKKYHYRYYSCKTYKHIHELEKCGNKIWRADKLEELIINRVNNYSIAGRNAGKEDELDSLNEKLKVEHAKKKRLFDLYINGRYEVSELDSMMNDIDAQINYYESQIEANEELKKNKQIQENLTNLATVDFDSLEFREKQRYLKSLINKIYIDGEQVTIEWL

SEQ ID NO: 5161 - protein, 485 aa, synthetic construct
MTKKVAIYTRVSTTNQAEEGFSIDEQIDRLTKYAEAMGWQVSDTYTDAGLSGAKLERPAMQRLINDIENKAFDTVLVYKLDRLSRSVRDTLYLVKEVFTKNKIDFISLNESIDTSSAMGSLFLTILSAINEFERENIKERMTMGKLGRAKSGKSMMWTKTAFGYCHNRKTGILEIVPLQATIVEQIFTDYLSGISLTKLRDKLNESGHIGKDIPWSYRTLRQTLDNPVYCGYIKFKDSLFEGMHKPIIPYETYLKVQKELEERQQQTYERNNNPHPFQAKYMLSGMARCGYCGAPLKIVLGHKRKDGSRTKKYHCANRFPRKTKGVTVYNDNKKCDSGTYDMSNLENTVIDCLIGFQENNDSLLKIINSNNQPNLDTSSFEKQISQIDKRIQKNSDLYLNDFITMDELKDRTDGLQAEKKLLKAKISENKFNDSTDVFELVRTQLGSVPINELSYDNKKKIVNNLVSKVDVTADNVDVIFKFQLA

SEQ ID NO: 5162 - protein, 485 aa, synthetic construct
MTKKVAIYTRVSTTNQAEEGFSIDEQIDRLTKYAEAMGWQVSDTYTDAGLSGAKLERPAMQRLINDIENKAFDTVLVYKLDRLSRSVRDTLYLVKDVFTKNKIDFISLNESIDTSSAMGSLFLTILSAINEFERENIRERMTMGKLGRAKSGKSMMWTKTAFGYYHNRKTGILEIVPLQATIVEQIFTDYLSGISLTKLRDKLNESGHIGKDIPWSYRTLRQTLDNPVYCGYIKFKGSLFEGMHKPIIPYEIYLKVQKELEERQQQTYERNNNPRPFQAKYMLSGMARCGYCGAPLRIVLGHRRKDGSRTMKYHCANRFPRKTEGVTVYNDSKKCDSGTYDLSNLENTVIDNLIGFQENNDSLLKVINGNNQPILDTSSFRRQISQIDKKIQKNSDLYLNDFITMDELRDRTDSLQAEKKLLKAKISENKFNDSTDVFELVKTQLGSIPINELSYDNKKKIVNNLVSKVDVTADNVDIIFKFQLA

SEQ ID NO: 5163 - protein, 452 aa, synthetic construct
MKAAIYIRVSTQEQVENYSIQAQTEKLTALCRSKDWDVYDIFIDGGYSGSNMNRPALNEMLSKLHEIDAVVVYRLDRLSRSQRDTTTLIEEYFLKNNVEFVSLSETLDTSSPFGRAMIGILSVFAQLERETIRDRMVMGKIKRIESGLPLTTAKGRTFGYDVIDTKLYINEEEARQLQLIYDIFEEEQSITSLQKRLKKLGFKVRTYNRYNNWLTNDLYCGYVSYKDKVHVKGIHEPIISEEQFYRVQEIFTRMGKSPNMNRESASLLSNLVVCSKCGLGFVHRSKDTMSRGKKYHYRYYSCKTYKHTHELEKCGNKTWRADKLEELIINRVNNYSFASRNADKEDELDSLNEKLKIEHARKKRLFDLYINGSYEVSELDSMMNDIDAQINYYESQIEANEELKKNKKIQESLADLATVDFDSLEFREKQQYLKSLINKIYIDGEQVTIEWL

SEQ ID NO: 5164 - protein, 469 aa, synthetic construct
MCYTTPVRAAVYLRISEDRSGEQLGVARQREDCLKLCGQRKWVPVEYLDNDVSASTGKRRPAYEQMLADITAGKIAAVVAWDLDRLHRRPIELEAFMSLADEKRLALATVAGDVDLATPQGRLVARLKGCVAAHETEHKKARQRRAARQKAERGHPNWSKAFGYLPGPNGPEPDPRTAPLVKQAYADILAGASLGDVCRQWNAAGAFTITGRPWTTTTLSKFLRKPRNAGLRAYKGARYGPVDRDAIVGKAQWSPLVDEATFWAAQAVLDAPGRAPGRKSVRRHLLTGLAGCGKCGNHLAGSYRTDGQVVYVCKICHGVAILADNIEPILYHTVAERLAMPDAVDLLRCEIHDAAEAETIRLELETLYGELDRLAVERAEGLLTARQVKISTDIVNAKITKLQARQLDQERLRVFDGIPLGTPQVAGMIAELSPNRFRAVLDVLAEVVVQPVGKSGRTFNPERVQVNWR

SEQ ID NO: 5165 - protein, 469 aa, synthetic construct
MSYTTPVRAAVYLRISEDRSGEQLGVARQREDCLKLCDQRKWVPVEYLDNDVSASTGKRRPAYEQMLADITAGKIAAVVAWDLDRLHRRPIELEAFMSLADEKRLALATVAGDVDLATPQGRLVARLKGSVAAHETEHKKARQRRAARQKAERGYPNWSKAFGYLPGPNGPEPDPRTAPLVKQAYADILAGASLGDVCRQWNDAGALTITGRPWTTTTLSKFLRKPRNAGLRAYKGARYGPVDRDAIVGKARWSPLVDEATFWAAQAVLDAPGRAPGRKSVRRHLLTGLAGCGKCGNHLAGSYRTDGRVVYVCKACHGVSILADNIEPILYRIVAERLAMPDAVDLLRREIHDAAEAETIRLELEILYGELDRLAVERAEGLLTARQVKISTDIVNAKITKLQARQLDQERLRVLDGIPLGTPQVAGMIAGLSPDRFRAVLDVLAEVVVQPVGKSGRIFNPERVQVNWR

SEQ ID NO: 5166 - protein, 452 aa, synthetic construct
MKAAIYIRVSTREQVENYSIQAQTEKLTALCRSKDWDVYDTFIDGGYSGSNMNRPALNEMLGKLHEIDAVVVYRLDRLSRSQRDTITLIEEYFLKNNVEFVSLSETLDTSSPFGRAMIGILSVFAQLERETIRDRMVMGKIRRIEAGLPLTTAKGRTFGYDVIDTKLYINEEEAKQLQLIYDIFEEEQSITSLQKRLKKLGFKVRTYNRYNDWLTNDLYCGYVSYKDKVHVKGIHEPIISEEQFYRVQEIFTRMGKNPNMNRDSASLLNNLVVCSKCGLGFVHRRKDTTSRGKKYHYRYYSCKTYKHIHELEKCGNKIWRADKLEELIINRVSNYSFAGRSVDKEDELDSLNEKLKIEHAKRKRLFDLYVNGSYEVSELDSMMNDIDAQINYYESQIEANEELKKNKKIQENLADLATVDYDSLEFREKQLYLKSLISKIYIDGEQVTIEWL

SEQ ID NO: 5167 - protein, 485 aa, synthetic construct
MTKKVAIYTRVSTTNQAEEGFSIDEQIDRLTKYAEAMGWQVSDTYTDAGFSGAKLERPAMQRLINDIENKAFDTVLVYKLDRLSRSVRDTLYLVKDVFTKNKIDFISLSESIDTSSAMGSLFLTILSAINEFERENIRERMTMGKLGRAKSGKSMMWTKTAFGYYHNRKTGILEIVPLQATIVEQIFTDYLSGISLTKLRDKLNESGHIGKDIPWSYRTLRQTLDNPVYCGYIKFKDSLFEGMHKPIIPYETYLKVQKELEERQQQTYERNNNPRPFQAKYMLSGMARCGYCGAPLRIVLGHKRKDGSRTMKYHCANRFPRKTKGVTVYNDNKKCDSGTYDLSNLEDTVIDNLIGFQENNDSLLKIINGNNQPILDTSSFKEQISQIDKKIQKNSDLYLNDFITMDELKDRTDSLQAEKKLLKAKISENKFNDSTDVFELVKTQLGSIPINELSYDNKKKIVNNLVSKVDVTADNVDIIFKFQLA

SEQ ID NO: 5168 - protein, 452 aa, synthetic construct
MKAAIYIRVSTREQVENYSIQAQTEKLTALCRSKDWDVYDVFIDGGYSGSNMNRPALNEMLSKLHEIDAVVVYRLDRLSRSQRDTITLIEEYFLKNNVEFVSLSETLDTSSPFGRAMIGILSVFAQLERETIRDRMVMGKIKRIEAGLPLTTAKGRTFGYNVIDTKLYINEEEAKQLQLIYDIFEEEQSITFLQKRLKKLGFKVRTYNRYNSWLTNDLYCGYVSYKDKVHVKGIHEPIISEEQFYRVQEIFARMGKNPNMNRDSASLLNNLVVCSKCGLGFVHRRKDATSRDKKYHYRYYSCKTYKHIHELEKCGNKIWRADELEELVINRVNSYSVASRNVDKEDELDSLNEKLKIEHAKKKRLFDLYINGRYEVSELDSMMNDIDAQISYYESQIEASEELKKNKKIQENLADLATVDFDSLEFREKQLYLKSLINKIYIDGEQVTIEWL

SEQ ID NO: 5169 - protein, 469 aa, synthetic construct
MCYTTPVRAAVYLRISEDRSGEQLGVARQREDCLKLCGQRKWVPVEYLDNDVSASTGKRRPAYEQMLADITAGKIAAVVAWDLDRLHRRPMELEAFMSLADEKRLALATVAGDVDLATPQGRLVARLKGSVAAHETEHKKARQRRAARQKAERGLPNWSRAFGYLPGPNGPEPDPRTAPLVKRAYADILAGASLGDVCRQWNDAGAFTITGRPWTTTALSKFLRKPRNAGLRAYKGARYGPVDRDAIVGKAQWSPLVDEATFWAAQAVLDAPGRAPGRKSVRRHLLTGLAGCGKCGNHLAGSYRTDGRVVYVCKACHGVAILADNIEAILYHIVAERLAMPDAVDLLRREIHDAAEAETIRLELETLYGELDRLAVERAEGLLTARQVKISTDIVNAKITKLQARQLDQERLRVLDGIPLGTPQVASMIAELSPDRFRAVLDVLAEVVVQPVGKGGRIFNPERVQVNWR

SEQ ID NO: 5170 - protein, 485 aa, synthetic construct
MTKKVAIYTRVSTTNQAEEGFSIDEQIDRLTKYAEAMGWQVSDTYTDAGFSGAKLERPAMQRLINDIENKAFDTVLVYKLDRLSRSVRDTLHLVKDVFTKNKIDFISLNESIDTSSAMGSLFLTILSAINEFERENIKERMTMGKLGRAKSGKSMMWTKTAFGYYHNRKTGILEIVPLQATIVEQIFTDYLSGISLTKLRDKLNEGGHIGKDIPWSYRTLRQTLDNPVYCGYIKFKGSLFEGMHKPIIPYETYLKVQKELEERQQQTYERNNNPRPFQAKYMLSGMARCGYCGAPLRIVLGHKRKDGSRTMKYHCANRFPRKTKGVTVYNDNKKCDSGTYDLSNLENTVIDNLIGFQENNDNLLKIINGNNLPILDTSSFKKQISQIDKKIQKNSDLYLNDFITMDELKERTDSLQAEKKLLKAKISGNKFNDSTDVFELVKTQLGSIPINELSYDNKKKIVNNLVSKVDVTADNVNIIFKFQLA

SEQ ID NO: 5171 - protein, 452 aa, synthetic construct
MKAAIYIRVSTQEQVGNYSIQAQTEKLTALCRSKDWDVYDIFIDGGYSGSNMNRPALNEMLSKLHEIDAVVVYRLDRLSRSQRDTTTLIEEYFLKNNVEFVSLSETLDTSSPFGRAMIGILSVFAQLERETIRDRMVMGKIKRIEAGLPLTTAKGRTFGYDVIDTKLYINEEEAKQLQLIYDIFEEEQSITSLQKRLKKLGFKVRTYNRYNNWLTNDLYCGYVSYKDKVHVKGIHEPIISEEQFYRVQEIFTRMGKNPNMNRDSASLLNNLVVCGKCGLGFVHRRKDTMSRGKKYHYRYYSCKTYKHTHELEKCGNKTWRADKLEELIINRVNNYSFASRNVDKEDELDSLNEKLKIEHAKKKRLFDLYINGSYEVSELDSIMNDIDAQINYYESQIEANEELRKDKKIQEGLANLATVDFDSLEFREKQLYLKSLINKIYIDGEQVTIEWL

SEQ ID NO: 5172 - protein, 485 aa, synthetic construct
MTKKVAIYTRVSTTNQAKEGFSIDEQIDRLTKYAEAMGWQVSDTYTDAGFSGAKLGRPAMQRLINDIENKAFDTVLVYKLDRLSRSVRDTLYLVKDVFTKNKIDFISLNECIDTSSAMGSLFLTILSAINEFERESIKERMTMGKLGRAKSGKSMMWTKTAFGYYHNRKTGILEVVPQQATIVEQIFTDYLSGISLTKLRDKLNESGHIGKDIPWSYRTLRQTLDNPVYCGYIKFKDSLFEGMHKPIIPYETFLKVQKELEERQQQTYERNNNPRPFQAKYMLSGMARCGYCGAPLKIVLGRKRKDGSRTMKYHCANRFPRKTKGITVYNDNKKCDSGTYDLSNLENTVIDILIGFQENNDSLLKIINGNNQPIPDTSSFKKQISQIDKKIQKNSDLYLNDFITMDELKDRTDSLQAEKKLLEAKISENKFNDSTDVFELVKTQLGSIPINELSYDNKKKIVNNLVSKVDVTADSVDIIFKFQLA

SEQ ID NO: 5173 - protein, 485 aa, synthetic construct
MTKKVAIYTRVSTTNQAEEGFSIDEQIDRLTKYAEAMGWQVSDTYTDAGFSGAKLERPAMQRLINDIETKAFDTVLVYKLDRLSRSVRDTLHLVKDVFAKNKIDFISLNESIDTSSAMGSLFLTILSAINEFERENIKERMTMGKLGRAKSGKSMMWTKTAFGYHHNRKTGVLEIVPLQATIVEQIFTDYLSGTSLTKLRDKLNESGHIGKDIPWSYRTLRQTLDNPVYCGYIKFKGSLFEGMHKPIIPYETYLKVQKELEERQQQTYERNNNPRPFQAKYMLSGMARCGYCGAPLRIVLGHKRKDGSRTMKYHCANRFPRKTKGVTVYNDNKKCDSGTYDLSNLENTVIDNLIGFQVNSDSLLKIINGNNQPILDTSSFKKQINQIDKKIQKNSDLYLNDFITMDELKDRTDSLQAEKKLLEAKISENKFNDSTDVFELMKTQLGSIPINELSYDNKKKIVNNLVSKVDVTADNVDIIFKFQLA

SEQ ID NO: 5174 - protein, 452 aa, synthetic construct
MKAAIYIRVSTREQVENYSIQAQTEKLTALCRSKDWDVYDIFIDGGYSGSNMNRPALNEMLSKLHEIDAVVVYRLDRLSRSQRDTITLIEEYFLKNNVEFVSLSETLDTSSPFGRAMIGILSVFAQLERETIRDRMVMGKIKRIEAGLPLTTAKGRTFGYDVIDTKLYINEEEAKQLQLIYDIFEEEQSITLLQKRLKKLGFKVRTYSRYNNWLTNDLYCGYVSYKDKVHVKGIHEPIISEEQFYRVQEIFARMGKNPNMNRDSASLLNSLVVCSKCGLGFVHRRKDTMCRGKKYHYRYYSCKTYKHIHELERCGNKIWRADKLEELIIDCVNNYSLASRDVDKEDELGSLNEELKIERAKRKRLFDLYINGSYEVSELDSMMNDIDAQISYYESQIEANEELRKSKKIQENLADLATVDYDSLEFREKQLYLKSLINKIYIDGEQVTIEWL

SEQ ID NO: 5175 - protein, 485 aa, synthetic construct
MTKKVAIYTRVSTTYQAEEGFSIDEQIDRLTKYAEAMGWQVSETYTDAGLSGAKLERPAMQRLINDIENKAFDTVLVYKLDRLSRSVRDTLYLVKDVFTKNKVDFISLNESIDTSSAMGSLFLTILSAINEFERENIKERMTMGKLGRAKSGKSMMWTKTAFGYYHNRKTGILEIVPLQATIVEQIFTDYLSGISLTKLRDKLNESGHIGKDIPWSYRTLRQTLDNPVYCGYIKFKDSLFEGMHKPIIPYETYLKVQKELEERQRQAYERNNNPRPFQAKYMLSGMARCGYCGAPLKIVLGHKRKDGSRTMKYHCANRFPRKTGGVTVYNDNKKCDSGTYDLSNLENTVIDILIGFQENNDSLLKIINGNNQPILDTSSFKKQISQIDKKIQKNSDLYLNDFITMDELKDRTDSLQAEKKLLKAKISENKSSDSTDVFELVKTQLGSIPISELSYDSQKRIVNNLVSKVDVTADNVDIIFKFQLA

SEQ ID NO: 5176 - protein, 485 aa, synthetic construct
MTKKVAIYTRVSTTNQAEEGFSIDEQIDRLTKYAEAMGWQVSDTYTDAGFSGAKLERPAMQRLINDIGDKAFDTVLVYKLDRLSRSVRDTLYLVEDVFTKNKIDFISLNESIDTSSAMGSLFLTILSAINEFERENIKERMTMGKLGRAKSGKSMMWTKTAFGYYHNRKTGILEIVPLQATIVEQIFTDYLSGISLTKLRDKLNESGHIGKDIPWSYRTLRQTLDNPVYCGYIKFKDSLFEGMHKPIIPYETYLKVQKELEVRQQQTYERNNNPRPFQAKYMLSGMARCGYCGAPLKIVLGRKRKDGSRTLKYHCVNRFPRKTKGITVYNDNKKCDSGTYDLSNLENTVIDNLIGFQENDDSLLKIINGNNQPILDTSSLKKQISQIDKKIQKNSDLYLNDFITMDELRGRTDSLQAEKKLLKAKISENKFNDSTDVFELVKTQLGSIPINELSYDNKKKIVNNLVSKVDVTADNVDIIFKFQLA

SEQ ID NO: 5177 - protein, 452 aa, synthetic construct
MKAAIYIRVSTREQVENYSIQAQTEKLTALCRSKDWDVYDIFIDGGYSGSNMNRPALNEMLSKLHEIDAVVVYRLDRLSRSQRDTITLIEEYFLKNNVEFVSLSETLDTSSPFGRAMIGILSVFAQLERETIRDRMVMGKIKRVEAGLPLTTAKGRTFGYDVIDTKLYINEEEAKQLQLIYDIFEEGQSITSLQKRLKKLGFKVRTYSCYNNWLTNDLYCGYVSYKDTVHVKGIHEPIISEEQFYRVQEIFTRMGRNPNMNRDSASLLNNLVVCGKCGLGFVHRRKDTISRGKKYHYRYYSCKTYKHTHELEKCGNKIWRADKLEELIVNRVNNYSLASRNVDKGDELDSLSEKLKIEHAKKKRLFDLYINGSYEASELDSMMNDIDAQINYYESQIEANEELRKNKKIQENLAYLATVDFDSLEFREKQLYLKSLINKIYIDGEQVTIEWL

SEQ ID NO: 5178 - protein, 452 aa, synthetic construct
MKAAIYIRVSTQEQVGNYSIQAQTEKLTALCHSKDWDVYDIFIDGGYSGSNMNRPALNEMLSKLHEIDAVVVYRLDRLSRSQRDTTTLIEEYFLKNNVEFVSLSETLDTSSPFGRAMIGILSVFAQLERETIRDRMVMGKIKRIEAGLPLTTAKGRTFGYDVIDTKLYVNEEEAKQLRLIYDIFEEEQSITFLQKRLKKLGFKVRTYNRYNSWLTNDLYCGYVSYKDKVHVKGIHEPIISEEQFYRVQEIFTRMGKNPNMNRDSASLLSNLVVCSKCGLGFVHRSKDTMSRGKKYHYRYYSCKTYKHAHELEKCGNKTWRAEILEELIINRVNNYSFASRNMVKEDELDSLNEKLKIEYAKKKRLFDLYINGSYEVSELDSMMDDIDAQINYYESQIGANEGLKKDRKIQENLAGLATVDFGSLEFREKQLYLKSLINKIYIDGEQVTIEWL

SEQ ID NO: 5179 - protein, 469 aa, synthetic construct
MSYTTPVRAAVYLRISEDRSGEQLGVARQREDCLKLCGQRNWVPVEYLDNDVSASTGKRRPAYEQMLADITAGKIAAVVAWDLDRLHRRPIELEAFMSLADEKRLALATVAGDVDLATPQGRLVARLKGSVAAHETEHKKARQRRAARQKAERGHPNWNKAFGYLPGPNGPEPDPRTAPLVKQAYVDILAGASLGDVCRQWNDAGAFTITGRPWTTTTLSKFLRKPRNAGLRAYKGARYGPVDRDAIVGKAQWSPLVDEATFWAAQAVLDAPGRAPGRKSVRRHLLTGLAGCGKCGNHLAGSYRADGRVVYVCKACHGVAILADNIEPILYHIVAERLAMPDAVDLLRREIHDAAEAETIRLELETLYGELDRLAVERAEGLLTARQVKISTDIVNAKITNLQARQLDQERLRVFDGIPLGTPQVAGMIAELSPNRFRAVLDVLAEVVVQPVGKSGRVSNPERVQVNWR

SEQ ID NO: 5180 - protein, 452 aa, synthetic construct
MKAAIYIRVSTREQVENYSIQTQTEKLTALCRSKDWDVYDIFIDGGYSGSNMNRPALNGMLSKLHEIDAVVVYRLDRLSRSQRDTITLIEEYFLKNNVEFVSLSETLDTSSPFGRAMIGILSVFAQLERETIRDRMVMGKIKRIEAGLPLTTAKGRTFGYDVIDTKLYINEEEAKQLRLIYDIFEEEQSITFLQKRLKELGFKVRTYNRYNSWLTNDLYCGYVSYKDKVHVKGIHEPIISEEQFYRVQEIFTRTGKNPNMNRDSASLLNNLVVCSKCGLNFVHRRKDTMSRGKKYHYRYYSCKTYKHTHELKKCGNKIWRADKLEELIINRVNNYSFASRNVDKEDELDSLNEKLRIEHAKKKRLFELYINGSYEVSELDSMMNDIDAQINYYESRIEANEELKKNKKIQENLADLAAVDFDSLEFREKQLYLRSLINKIYIDGEQVTIEWL

SEQ ID NO: 5181 - protein, 485 aa, synthetic construct
MTKKVAIYTRVSTTNQAEEGSSIDEQTDRLTKYAEAMGWQVSDTYTDAGFSGAKLERPAMQRLINDIENKAFDTVLVYKLDRLSRSVRDTLYLVKDVFTKNKIDFISLNESIDTSSAMGSLFLTILSAINEFERENIKERMTMGKLGRAKSGKSMMWTKTAFGYYHNRKTGILEIVPLQATIVEQIFTDYLSGISLTKLRDKLNESGHIGKDIPWSYRTLRQTLDNPVYCGYIKFKGSLFEGMHKPIIPYETYLKVQKELEERQQQTYERNNNPRPFQAKYMLSGMARCGYCGAPLRIVLGHKRKDGSRTMNYHCANRFPRKTKGVTVYNDNKKCDSGTYDLSNLENTVIDNLIGFQENNDSLLKIINGNNQPILDTSSFKKQISQIDKKIQKNSDLYLNDFITMDELKDRTDSLQAEKKLLKAKISENKFNDSTDVFELVKTQLGSIPINELSYDDKKKIVNNLVSKVDVTADNVDIIFKFQLA

SEQ ID NO: 5182 - protein, 452 aa, synthetic construct
MKAAIYIRVSTQEQVENYSIQAQTEKLTALCRSKDWDVYDIFVDGGYSGSNMNRPALNEMLSKLHEIDAVVVYRLDRLSRSQRDTTTLIEEYFLKNNVEFVSLSETLDTSSPFGRAMIGILSVFAQLERETIRDRMVMGKIKRIEAGLPLTTAKGRTFGYDVIDTKLYINEEEAKQLRLIYDIFEEEQSITFLQKRLKRLGFKVRTYNRYNSWLTNDLYCGYVSYKDKVHVKGIHEPIISEEQFYRVQEIFTRMGKNPNMNRDSASLLNNLVVCSKCGLGFVHRSKDTMYRGKKYHYRYYSCKTYKHTHELEKCGNKTWRADKLEELIINRVNNYSFASRNVDKEDELESLNEKLKIEHAKKKRLFDLYINGSYEVSELDSMMNDIDAQINYYESQIEADEELKKNKKIQENLADLATVDFDSLEFREKQLYLKSLISKIYIDGEQVTIEWL

SEQ ID NO: 5183 - protein, 452 aa, synthetic construct
MKAAIYIRVSTREQVENYSIQAQTEKLTALCRSKDWDVYDIFIDGGYSGSNMNRPALNEMLSKLHEIDAVVVYRLDRLSRSQRDTITLIEEYFLKNNVEFVSLSETLDTSSPFGRAMIGILSVFAQLERETIRDRMAMGKIKRIEAGLPLTTAKGRTFGYDVIDTKLYINEEEAKQLQLIYDIFEEEQSITFLQKRLKRLGFKVRTYNCYNNWLTNDLYCGYVSYKDKVHVKGIHEPIISEEQFYRVQEIFTRMGKNPNMNRDSASLLNNLVVCSKCGLGFVHRRKDTMNRDKKYHYRYYSCKTYKHIHELEKCGNKIWRADKLEELIINRVNNYSFASRNADKGDELDSLNEKLKIEHAKKKRLFDLYINGSYEVSELDSMMSDIDTQINYYESQIEANEELRKNKKIQENLADLATVDFDSLEFREKQLYLKSLINKIYIDGEQVTIEWL

SEQ ID NO: 5184 - protein, 485 aa, synthetic construct
MTKKVAIYTRVSTTNQAEEGFSIDEQIDRLTKYAEAMGWQVSDTYIDAGFSGAKLERPAMQRLINDIENKAFDTVLVYKLDRLSRSVRDTLYLVKDVFTKNKIDFISLNESIDTSSAMGSLFLTILSAINEFERENIKERMTMGKLGRAKSGKSMMWTKTAFGYYHNRKTGILEIVPLQATIVEQIFTDYLSGISLTKLRNKLNKNGHIGKDIPWSYRTLRQTLDNPVYCGYIKFKDNLFEGMHKPIVPYETYLKVQKELEERQQQAYERNNNPRPFQAKYMLSGMARCGYCGAPLRIVLGRKRKDGSRTMKYHCANRFPRKTKGVTVYNDNKKCDSGTYDLSDLENTVIDNLIGFQENNDSLLKIINGNNQPILDTSSFKKQISQIDKKIRKYSDLYLNDFITMDELKDRTDSLQAEKKLLKAKISENKFNDSTDVFELVRTQLGSTPINELSYDDKKKIVNNLVSKVDVTADNVDIIFNFQLA

SEQ ID NO: 5185 - protein, 452 aa, synthetic construct
MKAAIYIRVSTREQVENYSIQAQTEKLTALCRSKDWDVYDTFIDGGYSGSNMNRPALNEMLSKLHEIDAVVVYRLDRLSRSQRDTITLIEEYFLKNNVEFVSLSETLDTSSPFGRAMIGILSVFAQLERETIRDRMVMGKIKRIEAGLPLTTAKGRTFGYDVIDTKLYINEEEARQLQLIYDIFEEEQSITFLQKRLKELGFKVRTYNRYNNWLTNDLYCGYVSYKDKVHVKGIHEPIISEEQFYRVQEIFTRMGKNPNMNRGSASLLNNLVVCSKCGLGFVHRRKDAMSRDKKYHYRYYSCKTYKHIHELEKCGNKIWRADKLEELIINRVNNYSLAGRNVGKEDELDSLNEKLKIEQAKKKRLFDLYINGSYEVSELDSMMNDIDAQINYYVSQIEANEELKKNKKIQENLADLATVDFDSLEFREKQLYLKSLINRIYIDGEQVTIEWL

SEQ ID NO: 5186 - protein, 485 aa, synthetic construct
MTKKVAIYTRVSTTNQAEEGFSIDEQIDRLTKYAEAMGWQVSDTYTDAGFSGAKLERPAMQRLISDIENKAFDTVLVYKLDRLSRSVRDTLYLVKDVFTKSKIDFISLSESIDTSSAMGSLFLTILSAINEFERENIRERMTMGKLGRAKSGKSMMWTKTAFGYYHNRKTGILEIVPLQATIVEQIFTDYLSGISLTKLRDKLNESGHIGKDIPWSYRTLRQTLDNPVYCGYIKFKDSLFEGMHKPIISYETYLKVQKELEERQQQTYERNNNPRPFQAKYMLSGMARCGYCGAPLRIVLGHKRKDGSRTMKYHCANRFPRKTKGVTVYNDNKKCDSGTYDLSNLENTVIDNLIGFQEDNDSLLKIINGNSQPILDTSSFEEQISQIDKKIQKNGDLYLNDFITMDELKDRTDSLQAEKKLLKARISESKFNDSTDVFELVKTQLGSIPINELSYDNKKKIVNNLVSKVDVTADNVDIIFKFQLV

SEQ ID NO: 5187 - protein, 485 aa, synthetic construct
MTKKVAIYTRVSTTNQAEEGFSIDEQIDRLTKYAEAMGWQVSDTYTDAGFSGAKLERPAMQRLINNIETKAFDTVLVYKLDRLSRSVRDTLYLVKDVFTKNKIDFISLNESINTSSAMGSLFLTILSAINEFERENIKERMTMGKLGRAKSGKSMMWTKTAFGYYHNRKTGILEIVPQQATIVEQIFTDYLSGISLTKLRDKLNESGHIGKDIPWSYRTLRQTLDNPVYCGYIKFKDSLFEGMHKPIIPYETYLKVQKELEERQQQTYERNNNPRPFQAKYMLSGVARCGYCGAPLKIVLGHKRKDGSRTMKYHCANRFPHKTKGVTVYNDNKKCDSGTYDLSNLESTVIDNLIGFQENNDSLLKIINGDNQPILDTSSFKKQISQIDKKIQKNSDLYLNDFITMDELKDRTDSLQAEKKLLKAKISENKFNDSTDVFELVKTQLGSIPINELSYDNKKKIVNNLVSKVDVTADNVDIIFKFQLA

SEQ ID NO: 5188 - protein, 452 aa, synthetic construct
MKAAIYIRVSTREQVENYSIQAQTEKLTALCRSKDWDVYDIFIDGGYSGSNMNRPALNEMLSKLHEIDAVVVYRLDRLSRSQRDTITLIEEYFLKNNVEFVSLSETLDTSSPFGRAMIGILSVFAQLERETIRDRMVMGKIKRIEAGLPLTTAKGRTFGYDVIDTKLYINEEEARQLQLIYDIFEEEQSITFLQKRLKRLGFKVHTYNRYNSWLTNDLYCGYVSYKDKVHVKGIHEPIISEEQFYRVQEIFTRMGKSPNMNRGSASLLNNLVVCSKCGLGFVHRRKDTTSRGKKYHYRYYSCKTYKHTHELEKCGNKIWRADKLEELIIDRVGNYSLASRNVDKEDELDSLNEKLKIEHAKKKRLFDLYVNGSYEVSELDSTMNDIDAQINYYESQIEANEELRKNKKIQESLANLATVDYDSLEFREKQLYLKSLINKIYIDGEQVTIEWL

SEQ ID NO: 5189 - protein, 452 aa, synthetic construct
MKAAIYIRVSTREQVENYSIQAQTEKLTALCRSKDWDVYDIFIDGGYSGSNMNRPALNEMLSKLHEIDAVVVYRLDRLSRSQRDTITLIEEYFLKNNVEFVSLSETLDTSSPFGRAMIGILSVFAQLERETIRDRMVMGKIKRVEAGLPLTTAKGRTFGYDVIDTKLYINEEEAKQLQLIYDIFEEEQSITFLQKRLKKLGFKVRSYNRYNNWLTNDLYCGYVSYKDKVHVRGIHEPIISEEQFYRVQEIFARMGKNPNMNRDSASLLNNLVVCSKCGLGFVHRRKDTTSRGKKYHYRYYSCKTYKHTHELEKCGNKIWRADKLEELIINRVNDYSLASCNVDKEDELDSLNEKLKVEHARRKRLFDLYINGSYNVSELDSMMSDIDAQINYYESQIEANEELKRNKKIRENLAVLATVDFDSLEFREKQLYLKSLINKIYIDGEQVTVEWL

SEQ ID NO: 5190 - protein, 452 aa, synthetic construct
MKAAIYIRVSTREQVENYSIQAQTEKLTALCRSKDWDVYDIFVDGGYSGSNMNRPALNEMLSRLHEIDAVVVYRLDRLSRSQRDTITLIEEYFLKNNVEFVSLSETLDTSSPFGRAMIGILSVFAQLERETIRDRMVMGKIKRVEAGLPLTTAKGRTFGYDVIDAKLYINEEEARQLQLIYDIFEEEQSITFLQKRLKKLGFKVRTYSRYNNWLTNDLYCGYVSYKDKVHVKGIHEPIISEEQFYRVQEIFTRMGKNPNMNRDSASLLNNLVVCSKCGLRFVHRRKDTTSRGKKYHYRYYSCKTYKHPHELEKCGNKIWRADKLEELIINRVSNYSFAGRSVDKEDELDSLNEKLETEHAKRKRLFDLYINGSYEVSELGSMMNDIDAQINYYESQIEANEELKKNKKIQEDLANLATVDFDSLEFREKQLYLKSLINKIYIDGEQVTIEWL

SEQ ID NO: 5191 - protein, 452 aa, synthetic construct
MKAAIYIRVSTREQVENYSIQAQTEKLTALCRSKDWDVYDIFIDGGYSGSNMNRPALNEMLSKLHEIDAVVVYRLDRLSRSQRDTITLIEEYFLKNNVEFVSLSETLDTSSPFGRAMIGILSVFAQLERETIRDRMVMGKIKRIEAGLPLTTAKGRTFGYDVIDTKLYINEEEAKQLQLIYDIFEEEQSITFLQKRLKKLGFKVHTYNRYNNWLTNDLYCGYVSYKDKVHVKGIHEPIISEEQFYRVQEIFTRTGKNPNMNRDSASLLNNLVVCSKCGLGFVHRRKDTMSRGKKYHYRYYSCKTYKHTHELEKCGNKIWRADKLEELIINRVNNYSFASRNVDKEDELDSLNEKLKIEHVKKKRLFALYINGSCEVGELDSMVSDIDAQINYYESQIEASEELKGNKKIQENLAHLATVDFDSLEFREKQLYLKSLISKIHIDGEQVTIEWL

SEQ ID NO: 5192 - protein, 452 aa, synthetic construct
MKAAIYIRVSTREQVENYSIRAQTEKLTALCRSKDWDVYDIFIDGGYSGSNMNRPALNEMLSKLHEIDAVVVYRLDRLSRSQRDTLTLIEEYFLKNNVEFVSLSETLDTSSPFGRAMIGILSVFAQLERETIRDRLVMGKIKRIEAGLPLTTAKGRTFGYDVIDTKLYINEEEAKQLQLIYDIFEEEQSITFLQKRLKKLGFKVRTYSCYNNWLTNDLYCGYVSYKDKVHVKGIHEPIISEEQFYRVQEIFTRMGKNPNMNRDSASLLNSLVVCSKCGLGFVHRRKDTMSRGKKYHYRYYSCKTYKHTHELEKCGNKIWRADKLEELIINRVSNYSFASRNVDKEDELDSLNAKLRIEHAKKRRLFDLYINGSYEVSELDSMMNDIDAQINYYESQIEANEELRRNKKIQENLANLATVDYDSLEFREKQLYLKSLINKIYIDGEQVTIEWL

SEQ ID NO: 5193 - protein, 485 aa, synthetic construct
MTKKVAIYTRVSTTNQAEEGFSIDEQIDRLTKYAEAMGWQVSDTYTDAGLSGAKLERPAMQRLINDIENKAFDTVLVYKLDRLSRSVRDTLYLVKDVFTKNKIDFISLNESIDTSSAMGSLFLTILSAINEFERENIKERMTMGKLGRAKSGKSMMWTKTAFGYYHNRKTGILEIVPLQATIVEQIFTDYLSGISLTKLRDKLNESGHIGKDIPWSYRTLRQTLDNPVYCGYIKFKDSLFEGMHKPIVPYETYLKVQKELEERQQQTYERNNNPRPFQAKYMLSGMARCGYCGAPLRIVLGHKRKDGSRTMKYHCANRFPRKTKGVTVYNDNKKCDSGTYDLSNLENTVIDNLIGFQENDDSLLKIINGNNQPVLDTSSFEKQISQIDEKIQKNSDLYLNDFITMDELKDRTDSLQAEKKLLKAKISENKSNDSTDVFELVKTQLGSIPINELSYDNKKKIVNDLVSKVDVTADNVDIIFKFQLA

SEQ ID NO: 5194 - protein, 452 aa, synthetic construct
MKAAIYIRVSTREQVENYSIQAQTEKLTALCRSKGWDVYDIFIDGGYSGSNMNRPALNEMLSRLREIDAVVVYRLDRLSRSQRDTITLIEEYFLKNNVEFVSLSETLDTSSPFGRAMIGILSVFAQLERETIRDRMVMGKIKRIEAGLPLTTAKGRTFGYDVIDTKLYVNEEEAKQLQLIYDIFEEEQSITFLQKRLKELGCKVRTYNRYNNWLTNDLYCGYVSYKDKVHVKGIHEPIISEEQFYRVQEIFARMGKNPNMNRDSASLLNNLVVCGKCGRGFVHRRKDIMSRDKKYHYRYYSCKTYKHIHELEKCGNKIWRADKLEELIINRVNNYSLASRNTGKEDELGSLNEKLKIEHAKKKRLFDLYINGSYKVSELDSMMSDIDAQINYYESQIEANEELRKNKKIQENLANLAAVDFESLEFREKQLYLKSLINKIYIDGEQVTIEWL

SEQ ID NO: 5195 - protein, 485 aa, synthetic construct
MTKKVAIYTRVSTTNQAEEGFSVDEQIDRLTKYAEAMGWQVSDTYTDAGFSGAKLERPAMQRLINDIETKAFDTVLVYKLDRLSRSVRDTLYLVKDVFTKNKIDFISLSESIDTSSAMGSLFLTILSAINEFERENIKERMTMGKLGRAKSGKSMMWTKTAFGYHHNRKTGILEIVPLQATIVEQIFTDYLSGISLTKLRDKLNESGHIGKDIPWSYRTLRQTLDNPVYCGYIKFKDSLFEGMHEPIIPYETYLKVQRELEERQQQTYERNNNPRPFQAKYMLSGMARCGYCGAPLKIVLGHKRKDGSRTMKYHCANRFPRKTKGVTVYNDNKNCDSGTYDLSYLENTVIDHLIGFQEDNDSLLKIINGNNQPILDTSSFKKQISQIDKKIQKNSDLYLNDFITMDELKGRTDSLQAEKKLLKAKISENKFNNSTDVFELVKTQLGSIPINELSYDNKKKIVNNLVSKVDVTADKVDIIFKFQLA

SEQ ID NO: 5196 - protein, 485 aa, synthetic construct
MTKKVAIYTRVSTTNQAEEGFSIDEQIDRLTKYAEAMGWQVSDTYTDAGLSGAKLERPAMQRLISDIENKAFDTVLVYKLDRLSRSVRDTLYLVKDVFTKNKIDFISLNESIDTSSAMGSLFLTILSAINEFERENIKERMTMGKLGRAKSGKSMMWTKTAFGYYHNRKTGILEIVPLQATIVEQIFTDYLSGISLTKLRDKLNESGHIGKDIPWSYRTLRQTLDNPVYCGYIKFKDSLFEGMHKPIIPYETYLKVQKELEARQQQTYERNNNPRPFQAKYMLSGMARCGYCGAPLKIVLGRKRKDGSRTMKYHCANRFPRKTKGVTAYNDNKRCDSGTYDLSNLENTVIDNLIGFQEDNDSLLKIINGNNQPILDTSSFKRQISQIDKKIQKNSDLYLNDFITMDELKDRTDSLQAEKKLLEAKISENKFDDSTDVFELVKTQLGSIPINKLSYDNKKKIVNNLVSKVDVTADSVDIIFKFQLA

SEQ ID NO: 5197 - protein, 452 aa, synthetic construct; identical to SEQ ID NO: 3858

SEQ ID NO: 5198 - protein, 485 aa, synthetic construct
MTKKVAIYTRVSTTNQAEEGFSIDEQVDRLTKYAEAMGWQVSDTYTDAGISGAKLERPAMQRLINDIENKAFDTVLVYKLDRLSRSVRDTLYLVKDVFTKNRIDFISLNESIDTSSAMGSLFLTILSAINEFERENIKERMTMGKLGRAKSGKSMMWTKTAFGYYHNRKTGILEIVPLQATIVEQIFTDYLSGISLTKLRDKLNESGHIGKDIPWSYRTLRQTLDNPVYCGYIKFKDSLFEGMHKPIIPYETYLKVQKELEERRRQTYERNNNPRPFQAKYMLSGMARCGYCGAPLRVVLGHKRKDGSRTMKYHCANRFPRKTKGVTVYNDNKKCDSGTYDLSDLENTVIDNLIGFQEDNDSLLRIINGNNQPILDTSSFKKQISQIDKKIQRNSDLYLNDFITMDELRDRTDSLQAEKKLLKAKISENKFNDGTDAFELVKTQLGSIPISELSYDNKKKIVNNLVSKVDVTADNVDIIFKFQLA

SEQ ID NO: 5199 - protein, 452 aa, synthetic construct
MKAAIYIRVSTREQVENYSIQAQTEKLTALCRSKDWDVYDIFIDGGYSGSNMNRPALNEMLSKLHEIDAVVVYRLDRLSRSQRDTITLIEEYFLKNDVEFVSLSETLDTSSPFGRAMIGILSVFAQLERETIRDRMVMGKIKRVEAGLPLTTAKGRTFGYDVIDTKLYINEEEAKQLQLIYDIFEEEQSITFLQKRLKKLGFKVRTYNRYNSWLTNDLYCGYVSYKDKVHVKGIHEPIISEEQFYRVQEIFTRMGKNPNMNRDSASLLNNLVVCSKCGLSFVHRRKDTTSRGKKYHYRYYSCKTYKHTHELEKCGNKIWRADKLEELIINRVNNYSFASRNVDKEDELDSLNERLKIEHAKKKRLFDLYINGSYEVSELDSMMNDIDAQINYYESLIEANEELRKNKKIQENLADLATVDFGSLEFREKQLYLKSLINKIYIDGEQVTIEWL

SEQ ID NO: 5200 - protein, 452 aa, synthetic construct
MKAAIYIRVSTREQVENYSIQAQTEKLTALCRSKDWDVYDIFIDGGYSGSNMNRPALNEMLGKLHEIDAVVVYRLDRLSRSQRDTITLIEEYFLKNNVEFVSLSETLDTSSPFGRAMIGILSVFAQLERETIRDRMVMGKIKRIEVGLPLTTAKGRTFGYDVIDTKLYINEEEAKQLQLIYDIFEEEQSITFLQKRLKKLGFRVHTYNRYNNWLTNDLYCGYVSYKDKVHVKGIHEPIISEEQFYRVQEIFTRMGKNPNMNRDSASLLNNLVVCSKCGLGFVHRRKDATSRDKKYHYRYYSCKTYKHIHELEKCGNKIWRADKLEELIINRVNNYSLASRNVDKEDELDSLNEKLKIEHAKKKRLFDLYINGRYEVSELDSMMSDIDAQINYYESQIEANEELKKNKKIQGNLAHLATVDFGSLEFREKQLYLKSLINKIYIDGEQVTIEWL

SEQ ID NO: 5201 - protein, 452 aa, synthetic construct
MKAAIYIRVSTREQVENYSIQAQTEKLTALCRSKDWDVYDIFIDGGYSGSNMNRPALNEMLSKLHEIDAVVVYRLDRLSRSQRDTITLIEEYFLKNNVEFVSLSETLDTSSPFGRAMIGILSVFAQLERETIRDRMVMGKIKRIEAGLPLTTAKGRTFGYDVIDTKLYINEEEAKQLRLIYDIFEEEQSITFLQKRLKKLGFKVRTYSRYNSWLTNDLYCGYVSYKDKVHVKGIHEPIISEEQFCRVQEIFTRMGKNPNVNRDSASLLNNLVVCGKCGLGFVHRRKDTTSRGKKYHYRYYSCKTYKHTHELEKCGNKIWRADKLEELIIDRVNNYSFASRNADKEDELDGLNEKLKTEHAKRRRLFDLYINGNCEVSELDSMMNDIDAQINYYESQIEANEELKKTKKIQENLADLATADYDSLEFREKQLYLKSLINKIYIDGEQVTIEWL

SEQ ID NO: 5202 - protein, 452 aa, synthetic construct
MKAAIYIRVSTREQVENYSIQAQTEKLTALCRSKDWDVYDIFIDGGYSGSNMNRPALNEMLSKLHEIDAVVVYRLDRLSRSQRDTITLIEEYFLKNNVEFVSLSETLDTCSPFGRAMIGILSVFAQLERETIRDRMVMGKIKRIEAGLPLTTAKGRTFGYDVIDAKLYINEEEAKQLQLIYDIFEEERSITFLQKRLKKLGFKVRTYNCYNNWLTNDLYCGYVSYKDKVHVKGIHEPIISEEQFYRVQEIFTRMGKNPNMNRDSASLLNNLVVCSKCGLGFVHRRKDIMSRGKKYHYRYYSCKTYKHIHELEKCGNKIWRADKLEELIINCVNNYSLAGRNVGKEDELDSLNEKLKIERAKKRRLFDLYVNGSYEVSELDSMMNDIDAQINYYESRIEANEELKKSKRIQENLAHLATVDFDSLEFREKQLYLKSLINKIYIDGEQVTIEWL

SEQ ID NO: 5203 - protein, 452 aa, synthetic construct
MKAAIYIRVSTREQVENYSIQAQTEKLTALCRSKDWDVYDIFIDGGYSGSNMNRPALNEMLSKLHEIDAVVVYRLDRLSRSQRDTITLIEEYFLKNNVEFVSLSETLDTSSPFGRAMIGILSVFAQLERETIRDRMVMGKIKRIEAGLPLTTAKGRTFGYDVIDTKLYINEEEAKQLQLIYDIFEEEQSITFLQKRLKKLGFKVRTYNRYNNWLTNDLYCGYVSYKDKVHVKGIHEPIISEEQFYRVQEIFTRMGKNPNMNRGSASLLNNLVVCGKCGLGFVHRRKDAASRDKKYHYRYYSCKTYKHIHELEKCGNKIWRADKLEELIINRVNNYSLASRNVDKEDELDSLNEKLKVEHAKKKRLFDLYINGSYEVSELDSMMYDIDAQINCYESQIEANEELKKNKKIQENLARLATVDFDSLEFREKQLYLKSLINKIYIDGEQVTIEWL

SEQ ID NO: 5204 - protein, 452 aa, synthetic construct
MKAAIYIRVSTREQVDNYSIQAQTEKLTALCRSKDWDVYDIFIDGGYSGSNMNRPALNEMLSKLHEIDAVVVYRLDRLSRSQRDTITLIEEYFLRNNVEFVSLSETLDTSSPFGRAMIGILSVFAQLERETIRDRMVMGKIKRIEAGLPLTTAKGRTFGYDVIDTRLYINEEEAKQLQLIYDIFEEEQSITFLQKRLKKLGFKVRTYNRYNSWLTNDLYCGYVSYKDKVHVKGIHEPIISEEQFYRVQEIFARMGKNPNMNRDSASLLNNLVVCSKCGLGFVHRRKDAMSRDKKYHYRYYSCKTYKHIHELEKCGNKIWRADKLEELVINRVNNYSFASRNADKEDELDSLNEKLKVEHAKKKRLFDLYISGRYEVSELDSMMNDIDAQINYYESQIEANEELKKNKKIQENLADLATVDFDSLEFREKQLYLKSLINKIYIDGEQVTIEWL

SEQ ID NO: 5205 - protein, 452 aa, synthetic construct
MKAAIYIRVSTREQVENYSIQAQTEKLTALCRSKDWDVYDIFIDGGYSGSNMNRPALNEMLSKLHEIDAVVVYRLDRLSRSQRDTITLIEEYFLKNNVEFVSLSETLDTSSPFGRAMIGILSVFAQLERETIRDRMVMGKIKRIEAGLPLTTAKGRTFGYDVIDTKLYINEEEAKQLQLIYDIFEEEQSITFLQKRLKKLGFKVRTYNRYNNWLTNDLYCGYVSYKDKVHVKGIHEPIISEEQFYRVQEIFTRMGKNPNMNRDSASLLNNLVVCSKCGLGFVHRRKDTMSRGKKYHYRYYSCKTYKHTHELEKCGNKIWRADKLEELIINRVNNYSFASRNADKEGELDSLNEKLKIEHAKKKRLFDLYINGSYEVSELDSMMNDIDAQINYYESQIEASEELKKNKKIQENLANLATVDYDSLEFREKQLYLKSLINKIYIDDEQVSIEWL

SEQ ID NO: 5206 - protein, 485 aa, synthetic construct
MTKKVAIYTRVSTTNQAEEGFSIDEQIDRLTKYAEAMGWQVSDTYTDAGFSGAKLERPAMQRLINDIENKAFDTVLVYKLDRLSRSVRDTLYLVKDVFTKNKIDFISLNESISTSSAMGSLFLTILSAINEFERENIKERMTMGKLGRAKSGKSMMWTKTAFGYYHNRKTGILEIAPLQATIVEQIFTDYLSGISLTKLRDKLNESGHIGKDIPWSYRTLRQTLDNPVYCGYIRFKDSLFEGMHKPIIPYETYLKVQKELEERQQQTYERNNNPRPFQAKYMLSGVARCGYCGAPLRIVLGHKRKDGSRAMKYHCANRFPRKTKGVTVYNDNKKCDSGTYDLSNLENTVIDNLIGFQENNDSLLKIINGNNQPTLDTSSFKKQISQIDKKIQKNSELYLNDFITMDELKDRIDSLQAEKKLLKAKISENKFNDSTDVLELVKTQLGSIPINELSYDNKKKIVNNLVSKVDVTADNVDIIFKFQLA

SEQ ID NO: 5207 - protein, 469 aa, synthetic construct
MCYTTPVRAAVYLRISEDRSGEQLGVARQREDCLKLCDQRKWVPVEYLDNDVSASTSKRRPAYEQMLADITAGKIAAVVAWDLDRLHRRPIELEAFMSLADEKRLALATVAGDVDLATPQGRLVARLKGSVAAHETEHKKARQRRAARQKAERGYPNWSKAFGYLPGPDGPEPDPRTAPLVKQAYADILAGASLGDVCRQWNDAGAFTITGRPWTTAALSKFLRKPRNAGLRAYKGARYGPVDRDAIVGKAQWSPLVDEATFWAAQAVLDAPGRTPGRKSVRRHLLTGLAGCGKCGNHLAGSYRTDGRVVYVCKACHGVAILADNIEPVLYHIVAERLAKPDAVDLLRREIHDAAEAETIRLELETLHGELDRLAVERAEGLLTARQVKISTDIVSAKITKLQARQLDQERLRVLDGIPLGTPQAAGMIVELSPNRFRAVLDVLAEVVVQPVGKSGRIFNPERVQVNWR

SEQ ID NO: 5208 - protein, 452 aa, synthetic construct
MKAAIYIRVSTREQVENYSIQAQTEKLTALCRSKDWDVYDIFIDGGYSGSNMNRPALNEMLSKLHEIDAVVVYRLDRLSRSQRDTITLIEEYFLKNNVEFVSLSETLDTSSPFGRAMIGILSVFAQLERETIRDRMMMGKIKRVEAGLPLTTAKGRTFGYDVIDTKLYINEEEAKQLQLIYDIFEEEQSITLLQKRLKKLGFKVRTYNRYNNWLTNDLYCGYVSYKDKVHVKGIHEPIISEEQFYRVQEIFTRMGKNPNMNRDSASLLSNLVVCSKCGLSFVHRRKDTMSRGKKYHYRYYSCKTYKHTHELEKCGNKIWRADKLEELIISRVNNYSFASRNVDKEDELDSLNEKLKIEHAKKKRLFDLYINGSYEMSELDSMMNDIDAQIDYYESRIEGNEELKKNKKIQENLANLATVDYDSLGFREKQLYLKGLINKIYIDGEQVTIEWL

SEQ ID NO: 5209 - protein, 485 aa, synthetic construct
MTRKVAIYTRVSTTNQAEEGFSIGEQIDRLTRYAEAMGWQVSETYTDAGFSGAKLERPAMQRLINDIENKAFDTVLVYKLDRLSRSVRDTLYLVKDVFTKNKIDFISLNESINTSSAMGSLFLTILSAINEFERENIKERMTMGKLGRAKSGKSMMWTRTAFGYYHNRETGILEIVPLQATIVEQIFTDYLSGISLTKLRDKLNESGHIGKDIPWSYRTLRQTLDNPVYCGYIRFKDSLFEGMHKPIIPYETFLKVQKELEERQQQTCERNNNPRPFQAKYMLSGMARCGYCGAPLKVVLGHKRKDGSRTMKYHCANRFPRKTKGVTVYNDNKKCDSGTYDLSNLENTVIDSLIGFQEDNDSLLKIINGNNQPILDTSSFKKQISQIDKKIQKNSDLYLNDFITMDELKDRTDRLQAEKKLLKAKISETKSNDSTDVFELVKTQLGSIPINELSYDNKKKIVNNLVSKVDVTADNVDIIFKFQLA

SEQ ID NO: 5210 - protein, 485 aa, synthetic construct
MTKKVAIYTRVSTTNQAEEGFSIDEQIDRLTKYAEAMGWQVSDTYTDAGLSGAKLERPAMQRLINDIENKAFDTVLVYKLDRLSRSVRDTLYLVKDVFTKNKIDFISLNESIDTSSAMGSLFLTILSAINEFERENIKERMTMGKLGRAKSGKSMMWTKTAFGYYHNRKTGILEIVPLQATIVKQIFTDYLSGISLTKLRDKLNESGHIGKDIPWSYRTLRQTLDNPVYCGYIKFKDSLFEGMHKPIIPYETYLKVQKELEERQQQTYERNNNPRPFQAKYMLSGMARCGYCGAPLRVVLGHKRKDGSRTMKYHCANRFPRKTKGVTVYNDNKKCDSGTYDLSNLENTVIDNLIGFQESSDSLLKIINGNNQPILDTSSFKEQISQIDKKIQKNSDLYLNDFITMDELKDRTDSLQAEKKLLKAKISENKFNDSTDVFELVKTQLGSIPINELSYDNKKKIVNNLVSKVDVTADNVDIIFKFQLA

SEQ ID NO: 5211 - protein, 485 aa, synthetic construct
MTKKVAIYTRVSTTNQAEEGFSIDEQVDRLTKYAEAMGWQVSDTYTDAGYSGAKLERPAMQRLINDIENKAFDTVLVYKLDRLSRSVRDTLYLVKDVFTKNKIDFISLSESIDTSSAMGSLFLTILSAINEFERENIKERMTMGKLGRAKSGKSMMWTKTAFGYYHNRKTGILEIVPLQAAIVEQIFTDYLSGISLTKLRDKLNESGHIGKDIPWSYRTLRQTLDNPVYCGYIKFKDSLFEGMHKPIIPRETYLMVQKELEIRQQQTYERNNNPRPFQAKYMLSGMARCGYCGAPLRIVLGHKRKDGSRTMKYHCANRFPRKTKGVTAYNDNKKCDSGTYDLGNLENTVIDNLIGLQEDNDSLLKIINGNNQPILDTSSFKEQISQIDKKIQKNSDLYLNDFITMDELKVRTDGLQAEKKLLEAKISENKSNDSTDVLELVKTRLGSIPINELSYDNKKKIVNNLVSKVDVTADNVDIIFKFQLA

SEQ ID NO: 5212 - protein, 452 aa, synthetic construct
MKAAIYIRVSTREQVENYSIQAQTEKLTALCRSKDWDVYDIFIDGGYSGSNMNRPALNEMLSKLHEIDAVVVYRLDRLSRSQRDTITLIEEYFLKNNVEFVSLSETLDTSSPFGRAMIGILSVFAQLERETIRDRMVMGKIKRIEAGLPLTTAKGRTFGYDVIDTKLYINEEEAKQLQLIYDIFEEEQSITFLQKRLKELGFKVHTYNRYNNWLTNDLYCGYVSYKDKVHVKGIHEPIISEEQFYRVQEIFTRMGKNPNMNRGSASLLNNLVVCSKCGLGFVHRRKDTVSRGKKYHYRYYSCKTYKHIHELEKCGNKIWRADKLEELIINRVNNYSFASRNVDIEDELDSLNEKLKIEHAKKKRLFDLYISGSYEVSELDSMMNDIDAQINYYESQIEANEELKKNKKIQENLADLATVDYDSLEFRGKQLYLKSLINKIYIDGEQVTIEWL

SEQ ID NO: 5213 - protein, 485 aa, synthetic construct
MTKKVAIYTRVSTTNQAEEGFSIDEQIDRLTKYAEAMGWQVSGTYTDAGFSGAKLERPAMQRLINDIENKAFDTVLVYKLDRLSRSVRDTLHLVKDVFTKNKIDFISLNESIDTSSAMGSLFLTILSAINEFERENIKERMTMGKLGRAKSGKSMMWTKTAFGYYHNRKTGILEIVPLQATIVEQIFTDYLSGISLTKLRDKLNESGHIGKDIPWSYRTLRQTLDNPVYCGYIKFKDSLFEGMHKPIIPYETYLKVQKELEERQQQTYERNNNPRPFQAKYMLSGMARCGYCGAPLKIVLGHKRKDGSRTMKYHCGNRFPRKTKGVTVYNDNKKCDSGTYDLSNLEDTVIDNLIGFQENNDSLLKIINGNNQPILDTSSFKKQISLIDKKIQKNSDLYLNDFITMDELKDRTNSLLAEKKLLKAKISENNINDGTDVFELVKTQLGSIPINELSYDNKKKIVNNLVSKVDVTADNVDIIFKFQLA

SEQ ID NO: 5214 - protein, 485 aa, synthetic construct
MTKKVAIYTRVSTTSQAEEGFSIDEQIDRLTKYAEAMGWQVSDTYTDAGFSGAKLERPAMQRLINDIENKAFDTVLVYKLDRLSRSVRDTLHLVKDVFTKNKIDFISLNECIDTSSAMGSLFLTILSAINEFERENIKERMTMGKLGRAKSGKSMMWTKTAFGYCHNRKTGILEIVPLQATIVEQIFTDYLSGISLTKLRDKLNESGHIGKDIPWSYRTLRQTLDNPVYCGYIKFKDSLFEGMHKPIIPYETYLKVQKELEERQQQAYERNNNPRPFQAKYMLSGMARCGYCGAPLRIVLGHKRKDGGRTMKYHCANRFPRKTKGVTVYNDNKKCDSGTYDLSNLEDTVIDNLIGFQENNDSLLKIINGNNQPILDTSSLKEQISQIDKKIQKNTDLYLNDFITMDELKDRTDSLQAEKKLLKAKISEDKFNDSTDVFELVKTQLGSIPINELSYDNKKKIVNNLVSKVDVTADNVDIIFKFQLA

SEQ ID NO: 5215 - protein, 469 aa, synthetic construct
MSYTTPVRAAVYLRISEDRSGEQLGVARQREDCLKLCDQRKWVPVEYLDNDVSASTGKRRPAYEQMLADITAGKIAAVVAWDLDRLHRRPVELEAFMSLADEKRLALATVAGDVDLATPQGRLVARLKGSVAAHETEHKRARQRRAARQKAERGHPNWSKAFGYLPGPNGPEPDPRTAPLVKQAYADILAGASLGDVCRQWNGAGASTITGRPWTTTTLSKFLRKPRNAGLRAYKGARYGPVDRDAIVGKAQWSPLVDEATFWAAQAVLDAPGRAPGRKSVRRHLLTGLAGCGKCGNHLAGSYRTDGRVVYVCKACHGVAILADNIEPILYRTVAERLAMPDAVDLLRREIHDAAEAETLRLELETLYGELDRLAVERAEGLLTARQVKISTDIVCAKITKLQARQLDQERLRVFDGIPLGTPQVAGVIAELSPNRFRAVLDVLAEVVVQPVGKSGRIFNPERVQVNWR

SEQ ID NO: 5216 - protein, 485 aa, synthetic construct
MTKKVAIYTRVSTTNQAEEGFSIDEQIDRLTKYAEAMGWQVSGTYTDAGFSGAKLERPAMQRLINDIENKAFDTVLVYKLDRLSRSVRDTLYLVKDVFTKNKVDFISLNESIDTSSAMGSLFLTILSAINEFERENIKERMTMGKLGRAKSGKSMMWTKTAFGYYHNRKTGILEIVPLQATIVEQIFTDYLSGISLTKLRDKLNESGHIGKDIPWSYRTLRQTLDNPVYCGYIKFKGSLFEGMHKPIIPYETYLKVQKELEERQQQTYERNNNPRPFQAKYMLSGMARCGYCGAPLKIVLGHKRKDGSRTMKYHCTNRFPRKTKGVTVYNDSKKCDSGTYDLNYLEDTVIDNLIGLQENNDSLLRIIDGNSQPVPDTSSFKEQISQIDKKIQKNSELYLNDFITMDELKDRTDSLQAEKKLLKAKISENKFNDSTDVFELVKTQLGSIPINELSYDNKKKIVNNLVSKVDVTADNVDIIFKFQLA

SEQ ID NO: 5217 - protein, 469 aa, synthetic construct
MSYTTPVRAAVYLRISEDRSGEQLGVARQREDCLELCGQRKWVPVEYLDNDVSASTSKRRPAYEQMLADIAAGKIAAVVAWDLDRLHRRPIELEAFMSLADEKRLALATAAGDVDLATPQGRLVARLKGCVAAHETEHKKARQRRAARQKAERGHPNWSKAFGYLPGPNGPEPDPRTAPLVKQAYADILAGASLGDVCRQWNDAGAFTITGRPWTTTTLSKFLRKPRNAGLRAYKGARYGPVDRDAIVGKAQWSPLVDEATFWAAQAVLDAPGRAPGRKSVRRHLLTGLAGCGKCGNHLAGSYRTDGRVVYVCKACHGVAILAENIEPILYHIVAERLAMPDAVDLLRREIHDAAEAGTIRLELETLYGELDRLAVERAEGLLTARQVKISTDIVNAKITKLQARQLDQERLRVLDGIPLGTPQVAGMIAELSPDRFRAVLDVLAEVVVQPVSKSGRIFNPERVQVNWR

SEQ ID NO: 5218 - protein, 485 aa, synthetic construct
MTKKVAIYTRVSTTNQAEEGFSIDEQTDRLTKYAEAMGWQVSDTYTDAGFSGAKLERPAMQRLINDIENKAFDTVLVYKLDRLSRSVRDTLYLVKDVFTKNKIDFISLNESINTSSAMGSLFLTILSAINEFERENIKERMTMGKLGRAKSGKSMMWTKTAFGYYHNRKTGILEIVPLQATIVEQIFTDYLSGISLTKLRDKLNGSGHIGKDIPWSYRTLRQTLDNPVYCGYIKFKDSLFEGMHKPIISYETYLKVQKELEERQQQTYERNNNPRPFQAKYMLSGMARCGYCGAPLRIVLGHKRKDGSRTMKYHCANRFPRKTKGVTVYNDNKKCDSGTYDLSSLENTVIDNLIGFQESDDSLLKIINGNNQPILDTSSFKRQISQIDKKIQKNSDLYLNDFITMGELKDRTDSLQAEKKLLKAKISENKFNDSTDVFELVKTQLGSIPINELSYDSKKKIVNNLVSKVDVTADNVDIIFKFQLA

SEQ ID NO: 5219 - protein, 485 aa, synthetic construct
MTKKVAIYTRVSTTNQAEEGFSIDEQVDRLTKYAEAMGWQVNDTYTDAGFSGAKLERPAMQRLINDIENKAFDTVLVYKLDRLSRSVRDTLYLVKDVFTKNKIDFISLNECIDTSSAMGSLFLTILSAINEFERENIKERMTMGKLGRAKSGKSMMWAKTAFGYYHNRKTGILEIVPLQATIVGQIFTDYLSGISLTKLRDKLNESGHIGKDIPWSYRTLRQTLDNPVYCGYIKFKDSLFEGMHKPIIPYETYLKVQKELEERQQQTYERNNNPRPFQAKYMLSGMARCGYCGAPLRVVLGHKRKDGSRTMKYHCANRFPRKTKGVTVYNDNKKCDSGTYDLSNLENTVIDNLIGFQENNDSLLKIINGNNQPILDTSSFKEQISQIDKKIQKNSDLYLNDFITMDELKDRTDSLQAEKKLLKAKISENKFNDSTDVFELVKTQLGSIPINELSYDNKKKIVNNLVSKVDVTADNVDIIFKFQLA

SEQ ID NO: 5220 - protein, 452 aa, synthetic construct
MKAAIYIRVSTREQVENYSIQAQTEKLTALCRSKDWDVYDIFIDGGYSGSNMNRPALNEMLSKLHEIDAVVVYRLDRLSRSQRDTITLIEEYFLKNNVEFVSLSETLDTSSPFGRAMIGILSVFAQLERETIRDRMVMGKIKRIEAGLPLTTAKGRTFGYDVIDTKLYINEEEAKQLQLIYDIFEEEQSITFLQKRLKKLGFKVRTYSCYNNWLTNDLYCGYVSYKDKVHVKGIHEPIISEEQFYRVQEIFARMGKNPNMNRDSASLLNNLVVCSKCGLGFVHRRKDTMGRGKKYHYRYYSCKTYKHTHELEKCGNKIWRADKLEELIIDRVNNYGLASRNVGKEDELNSLNEKLRIEHAKKKRLFDLYINGGYEVSELDSMMNDIDAQINYYESQIEANEELKKNKKIQENLANLATVDYDSLEFREKQLYLKSLINKIYIDGEQVTIEWL

SEQ ID NO: 5221 - protein, 452 aa, synthetic construct
MKAAIYIRVSTREQVENYSIQAQTEKLTALCRSKDWDVYDIFIDGGYSGSNMNRPALNEMLSKLHEIDAVVVYRLDRLSRSQRDTITLIEEYFLKNNVEFVSLSETLDTSSPFGRAMIGILSVFAQLERETIRDRMVMGKIKRTEAGLPLTTAKGRTFGYDVIDTKLYINEEEAKQLQLIYDIFEEEQSITFLQKRLKELGLKVRTYNRYNNWLTNDLYCGYVSYKDKVHVKGIHEPIISEEQFYRVQEIFTRMGKYPNMNRDSASLLNNLVVCGKCGLGFVHRRKDAMSRDKKYHYRYYSCKTYKHIHELEKCGNKIWRADELEELIINRVNNYSLASRNVDKEDGLDSLNEKLKIEHAKKKRLFDLYLNGSYEVSELDSMMYDIDAQISYYESQIEANEELRKNKKIQENLADLATVDFGSLEFREKQLYLKSLINKIYIDGEQVTIEWL

SEQ ID NO: 5222 - protein, 452 aa, synthetic construct
MKAAIYIRVSTREQVENYSIQAQTEKLTALCRSKDWDVYDIFVDGGYSGSNMNRPALNEMLSKLHEIDAVVVYRLDRLSRSQRDTITLIEEYFLKNNVEFVSLSETLDTSSPFGRAMIGILSVFAQLERETIRDRMVMGKIKRIEAGLPLTTAKGRTFGYDVIDTKLYINEEEAKQLQLIYDIFEEEQSITFLQKRLKKLGFKVRTYNRYNSWLTNDLYCGYVSYKDKVHVKGIHEPIISEEQFYRVQEVFTRMGKNPNMNRDSASLLNNLVVCSKCGLGFVHRRKDTTSRGKKYHYRYYSCKTYKHTHELEKCGNKIWRADRLEELIINRVNNYSFASRNVDKEDELGSLNEKLKIEHTKKKRLFDLYINGSYEVSELDSMMNDIDAQISYYESQIEANEELRKNKKIQENLANLATVDYDSLEFREKQLYLKSLINKIYIDGERVTIEWL

SEQ ID NO: 5223 - protein, 452 aa, synthetic construct
MKAAIYIRVSTREQVENYSIQAQTEKLTALCRSKDWDVYDIFIDGGYSGSNMNRPALNEMLSKLHEIDAVVVYRLDRLSRSQRDTITLIEEYFLKNNVEFVSLSETLDTSSPFGRAMIGILSVFAQLERETIRDRMVMGKIKRIEAGLPLTTAKGRTFGYDVIDTRLYINEEEAKQLQLIYDIFEEEQSITFLQKRLKKLGFKVHTYNRYNNWLTNDLYCGYVSYKDKVHVKGIHEPIISEEQFYRVQEIFTRMGKNPNMNRGSASLLNNLVVCGKCGLGFVHRRKDAMSRDKKYHYRYYSCKTYKHIHELEKCGNKIWRADELEELIINRVTNYSLASRNVNKEDGLDSLNGKLKIEHAKKKRLFDLYLNGSYEVSELDSMMNDIDAQISYYESQIEANEALIKNKKIQENLANLATVDFDSLEFREKQLYLKSLINKIYIDGEQVTIEWL

SEQ ID NO: 5224 - protein, 452 aa, synthetic construct
MKAAIYIRVSTREQVENYSIQAQTEKLTALCRSKDWDVYDIFIDGGYSGSNMNRPALNEMLSKLHEIDAVVVYRLDRLSRSQRDTVTLIEEYFLKNNVEFVSLSETLDTSSPFGRAMIGILSVFAQLERETIRDRMVMGKIKRIEAGLPLTTAKGRTFGYDVIDTKLYINEEEAKQLQLIYDIFEEEQSITFLQKRLKKLGFKVRTYNCYSNWLTNDLYCGYVSYKDKVHVKGIHEPIISEEQFYRVQEIFTRMGKNPNMNRNSASLLNNLVVCSKCGLGFVHRRKDIMSHGKKYHYRYYSCKTYKHIHELEKCGNKIWRANKLEELIINRVNDYSLASRNVDKEDELDSLNERLKIEHAKKKRLFELYINGSYEVSELDSMMSDIDAQINYYESQIEANEELKKNKKIQENLANLATVDFDSLEFREKQLYLKSLINKIYIDGEQVTIEWL

SEQ ID NO: 5225 - protein, 452 aa, synthetic construct
MKAAIYIRVSTREQVENYSIQAQTEKLTALCRSKDWDVYDIFVDGGYSGSNMNRPALNEMLSKLHEIDAVVVYRLDRLSRSQRDTITLIEEYFLKNNVEFVSLSETLDTSSPFGRAMIGILSVFAQLERETIRDRMVMGKIKRIEAGLPLTTAKGRTFGYDVIDTKLYINEEEAKHLQLIYDIFEEEQSITFLQKRLKKLGFKVRTYNRYNNWLTNDLYCGYVSYKDKVHVKGIHEPIISEEQFYRVQEIFTRMGKNPNMNRGSASLLNNLVVCGKCGLGFVHRRKDAMSRDKKYHYRYYSCKTYKHIHELEKCGNKIWRADKLEELVINRVNDYSLASRSVDKEDELDSLNEKLKIEHAKKKRLFDLYISGSYEVSELDSMMNDIDAQINYYESQIEANKELKENKKIQENLANLATVDFDSLEFHEKQLYLKSLINKIYIDGEQVTIEWL

SEQ ID NO: 5226 - protein, 452 aa, synthetic construct
MRAAIYIRVSTREQVENYSIQAQTEKLTALCRSKDWDVYDIFIDGGYSGSNMNRPALNEMLSKLHEIDAVVVYRLDRLSRSQRDTITLIEEYFLKNNVEFVSLSETLDTSSPFGRAMIGILSVFAQLERETIRDRMVMGKIKRIEAGLPLTTAKGRTFGYDVIDTKLYINEEEAKQLQLIYDIFEEEQSITFLQKRLKKLGFRVRTYNCYNNWLTNDLYCGYVSYKDKVHVKGIHEPIISEEQFCRVQEIFTRMGRNPNMNRDSASLLNNLVVCGKCGLGFVHRRKDAMSRSKKYHYRYYSCKTYKHIHELEKCGNKIWRADKLEELIINRVNDYSLASRNVDKEDELDSLNEKLKIEHAKKKRLFDLYINGGCEVSELDSMMNDINAQINYYESQIEANEELRKNKKIRENLANLATVDFDSLEFREKQLYLKSLINKIHIDGEQVTIEWL

SEQ ID NO: 5227 - protein, 452 aa, synthetic construct
MKAAIYIRVSTREQVENYSIQAQTEKLTALCRSKGWDVYDIFIDGGYSGSNMNRPALNEMLSKLHEIDAVVVYRLDRLSRSQRDTITLIEEYFLKNNVEFVSLSETLDTSSPFGRAMIGILSVFAQLERETIRDRMVMGKIKRIEAGLPLTTAKGRTFGYDVIDSRLYINEEEAKQLQLIYDIFEEEQSITSLQKRLKKLGFKVRTYSRYNSWLTNDLYCGYVSYKDKVHVKGIHEPIISEEQFYRVQEIFTRMGKNPNVNRDSASLLNNLVVCSKCGLGFVHRRKDTTSRGKKYHYRYYSCKTYKHIHELERCGNKIWRADKLEELIINRVNNYSFASRNVGKEDELDSLNEKLKTEHAKKKRLFDLYINGSYEVSELDSMMNDIDAQINYYESQIEANEELKKNKKIQENPAVLAAVDFDSLEFREKQLYLKSLINKIYIDGEQVTIEWL

SEQ ID NO: 5228 - protein, 452 aa, synthetic construct
MKAAIYIRVSTREQVENYSIQAQTEKLTALCRSKDWDVYDIFIDGGYSGSNMNRPALNEMLSKLHEIDAVVVYRLDRLSRSQRDTITLIEEYFLKNNVAFVSLSETLDTSSPFGRAMIGILSVFAQLERETIRDRMVMGKIKRIEAGLPLTTAKGRTFGYDVIDTKLYINEEEAKQLQLIYDIFEEEQSITFLQKRLKKLGFKVRTYSRYNNWLTNDLYCGYVSYKDKVHVKGIHEPIISEEQFYRVQEIFTRMGKSPNMNRDSASLLNGLVVCSKCGLGFVHRRKDTTSRGKKYHYRYYSCKTFKHTHELEKCGNKIWRADKLEELIINRVNNYSFAGRNADKEDELDSLGEKLKIEHAKKKRLFDLYINGSYEVSELDSLMNDIDAQINYYESQIEANEELRKNKKIQENLANLATVDYDSLEFREKQLYLKSLINKIYIDGEQVTVEWL

SEQ ID NO: 5229 - protein, 469 aa, synthetic construct
MSYTTPVRAAVYLRISEDRSGEQLGVARQREDCLKLCGQRKWVPVEYLDNDVSASTGKRRPAYEQMLADITAGKIAAVVAWDLDRLHRRPIELEAFMSLADEKRLALATVAGDVDLATPQGRLVARLKGCVAAHETEHKKARQRRAARQKAERGLPNWSKAFGYLPGPNGPEPDPRTAPLVKQAYADILAGASLGDVCRQWNDAGAFTITGRPWTTTTLSKFLRKPRNAGLRAYRGARYGPVDRDAIVGKAQWSPLVDEATFWAAQAVLDAPGRAPGRKSVRRHLLTGLAGCGKCGNHLAGSYRTDGRVVYVCKACYGIAILADNIEPILYHIVAERLAMPDAVDLLCREIHDAAEAETIHLELETLYGELDRLAVERAEGLLTARQVKISTDVVNAKITKLQAHQLDQERLRVFDGIPLGTPQVAGVIAELSPDRFRAVLDVLAEVVVQPVGKSGRIFNPERVQVNWR

SEQ ID NO: 5230 - protein, 452 aa, synthetic construct
MKAAIYIRVSTREQMENYSIQAQTEKLTALCRSKDWDVYDIFIDGGYSGSNMNRPALNEMLSKLHEIDAVVVYRLDRLSRSQRDTITLIEEYFLKNNVEFVSLSETLDTSSPFGRAMIGILSVFAQLERETIRDRMVMGKIKRIEAGLPLTTAKGRTFGYDVIDTKLYVNEEEAKQLRLIYDIFEEEQSITFLQKRLKKLGFKVRTYNRYNNWLTNDLYCGYVSYKDKVHVKGIHEPIISEEQFYRVQEIFTRMGKNPNMNRGSASLLNNLVVCGKCGLGFVHRRKDAMSRDKRYHYRYYSCKTYKHIHELEKCGNKIWRADKLEELIINRVNNYSLTSRNVDKEDELDSLSEKLKTEHAKKKRLFDLYINGSYKVSELDSMMNDIDAQINYYESQIEASEELKRNKKIQETLADLATVDFDSLEFREKQLYLKSLINKIYIDGEQVTIEWL

SEQ ID NO: 5231 - protein, 452 aa, synthetic construct
MKAAIYIRVSTREQVENYSIQAQTEKLTALCRSKDWDVYDIFIDGGYSGSNMNRPALNEMLGKLHEIDAVVVYRLDRLSRSQRDTITLIEEYFLKNNVEFVSLSETLDTSSPFGRAMIGILSVFAQLERETIRDRMVMGKIKRIEAGLPLTTAKGRTFGYDVIDTKLYINEEEAKQLRLIYDIFEEEQSITFLQKRLKKLGFKVRTYNRYNNWLTNDLYCGYVSYKDKVHVKGIHEPIISEEQFYRVQEIFTRMGKNPNMNRDSASLLNNLVVCSKCGLGFVHRRKDAMSRDKKYHYRYYSCRTYKHIHELEKCGNKIWRADKLEELIINRVNDYSLASRNVDKENELDSLNEKLKAEHAKKKRLFDLYINGSYEVSELDSMMNDIDAQINYYESQIEANEELRKNKKIQENLADLATVDFDSLEFREKQLYLKSLINKIYIDGEQVTIEWL

SEQ ID NO: 5232 - protein, 452 aa, synthetic construct
MKAAIYIRVSTREQVENYSIQAQTEKLTALCRSKDWDVYDIFIDGGYSGSNMNRPALNEMLSKLHEIDAVVVYRLDRLSRSQRDTITLIEEYFLKNNVEFVSLSETLDTSSPFGRAMIGILSVFAQLERETIRDRMVMGKIKRIEAGLPLTTAKGRTFGYDVIDTKLYINEEEAKQLQLIYDIFEEEQSITFLQKRLKKLGFKVRTYNRYNSWLTNDLYCGYVSYKDKVHVRGIHEPIISEEQFYRVQEIFTRMGKNPNMNRDSASLLSNLVVCSKCGLGFVHRRKDTMSRGKKYHYRYYSCKTYKHVHELEKCGNKIWRADKLEELIIDRVNNYSLASCNVDKEDGLDSLNEKLKIERAKKKRLFDLYINGSYNVSELDSMMNDIDAQINYYESQIEANEELKKNKKIQENLAGLATVDFDSLEFREKQLYLKSLISKIYIDGEQVTIEWL

SEQ ID NO: 5233 - protein, 469 aa, synthetic construct
MSYTTPVRAAVYLRISEDRSGEQLGVTRQREDCLKLCDQRKWVPVEYLDNDVSASTGKRRPAYEQMLADITAGKIAAVVAWDLDRLHRRPVELEAFMSLADEKRLALATVAGDVDLATPQGRLVARLKGSVAAHETEHKKARQRRAARQKAERGYPNWSKAFGYLPGPNGPEPDPRTAPLVKQAYADILAGASLGDVCRQWNVAGAFTITGRPWTTTTLSKFLRKPRNAGLRAYKGARYGPVDRDAIVGKAQWSPLVDEATFWAAQAVLDAPGRAPGRKSVRRHLLTGLAGCGKCGNHLAGSYRTDGRVVYVCKACHGVAILADNIEPFLYHIVAERLAMPDAVDLLRREVHDVAEAETIRLELETLYGELDRLAVERAEGLLTARQVKISTDIVYAKITKLQARQLDRERLRVLDGIPLGTPQVADMIAELSPDRFRAVLDVLAEVVVQPVGKSGRIFNPERVRVNWR

SEQ ID NO: 5234 - protein, 452 aa, synthetic construct
MKAAIYIRVSTREQVENYSIQAQTEKLTALCRSKGWDVYDIFIDGGYSGSNMNRPALNEMLSKLHEIDAVVVYRLDRLSRSQRDTITLIEEYFLKNNVEFVSLSETLDTSSPFGRAMIGILSVFAQLERETIRDRMVMGKIKRIEAGLPLTTAKGRTFGYDVIDTKLYVNEEEARQLQLIYDIFEEEQSITFLQKRLKELGYKVRTYNRYNNWLTNDLYCGYVSYKDKVHVKGIHEPIISEEQFYRVQEIFTRMGKNPNMNRDSASLLNNLVVCSKCGLSFVHRRKDAVSRDKKYHYRYYSCKTYKHIHELEKCGNKIWRADKLEGLIINRVNNYSFASRNADKEDELDSLNEKLKIEHAKKKRLFDLYINGSYEVSELDSMMNDIDAQINYYESQIEANEELKKNKKIQENLANLATVDFDSLEFREKQLYLKSLISKIYIDGEQVTIEWL

SEQ ID NO: 5235 - protein, 485 aa, synthetic construct
MTKKVAIYTRVSTANQAEEGFSIDEQIDRLTKYAEAMGWQVSDTYTDAGSSGAKLERPAMQRLINDIENKAFDTVLVYKLDRLSRSVRDTLYLVKDVFTKNKIDFISLSESIDTSSAMGSLFLTILSAINEFERENIKERMTMGKLGRARSGKSMMWTKTAFGYYHNHKTGILEIVPLQATIVEQIFTDYLSGISLTKLRDKLNESGHIGKDIPWSYRTLRQTLDNPVYCGYIKFKDSLFEGMHEPIIPYETYLKVQKELEERQQQTYERNNNPRPFQAKYMLSGMARCGYCGAPLKIVLGHKRKDGSRTMKYHCTNRFPRKTKGVTVYNDNKKCDSGTYDLSNLENTVIDILIGFQENNDSLLKIINGNNQPILDTSSFKEQISQIDKKIRKNSDLYLNDFITMDELKDRTDSLQAEKKLLKAKISENRFNDSTDVFELVKTQLGCIPINELSYDNKKKIVNNLVSKVDVTADNVDIIFKFQLA

SEQ ID NO: 5236 - protein, 452 aa, synthetic construct
MKAAIYIRVSTREQVENYSIQAQTEKLTALCRSKDWDVYDIFIDGGYSGSNMNRPALNEMLSKLHEIDAVVVYRLDRLSRSQRDTITLIEEYFLKNNVEFVSLSEALDTSSPFGRAMIGILSVFAQLERETIRDRMVMGKIKRIEAGLPLTTAKGRTFGYDVIDTKLYINEEEAKQLQLIYDIFEEEQSITFLQKRLKKLGFKVHTYNRYNNWLTNDLYCGYVSYKDKVHVKGIHEPIISEEQFSRVQEIFTRMGKNPNMNRDSASLLSNLVVCSKCGLGFVHRRKDTTSRGKKYHYRYYSCKTYKHTHELEKCGNKIWRADKLEELIINRVNNYSFASRNVDKEDELNSLNEKLKIEQAKKKRLFDLYINGSYEVGELDSMMNDIDAQINYYESQIEANEGLKKNKKIRENLADLATVDYDSLEFREKQLYLKSLINKIYIDGEQVTIEWL

SEQ ID NO: 5237 - protein, 485 aa, synthetic construct
MTKKVAIYTRVSTTNQAEEGFSIDEQIDRLTKYAEAMGWQVSDTYTDAGFSGAKLERPAMQRLINDIENKAFDTVLVYKLDRLSRSVRDTLHLVKDVFTKNKIDFISLSESIDTSSAMGSLFLTILSAINEFERENIKERMTMGKLGRAKSGKSMMWTKTAFGYYHNRKTGILEIVPLQATIVEQIFTDYLSGISLTKLRDKLNESGHIGKDIPWSYRTLRQTLDNPVYCGYIKFKDSLFEGLHKPIIPYETYLKVQKELEERQQQTYERNNNPRPFQAKYMLSGVARCGYCGAPLRIVLGHKRKDGSRTMRYHCANRFPRKTKGVTVYNDNKKCDSGTYDLSSLENTVIDNLIGFQENNDSLLKIINGNNQPIPDTGSFKKQISQIDKKIQKNSDLYLNDFITMDELKDRTDSLQAEKKLLKAKISENKFNDSTDVFELVKTQLGSIPINELSYDNKKKIVNNLVSKVDVTADNVDIIFKFQLA

SEQ ID NO: 5238 - protein, 485 aa, synthetic construct
MTKKVAIYTRVSTTNQAEEGFSIDEQIDRLTKYAEAMGWQVSDTYTDAGCSGAKLERPAMQRLISDIENKAFDTVLVYKLDRLSRSVRDTLYLVKDVFTKNKIDFISLNESIDTSNAMGSLFLAILSAINEFERENIKERMTMGKLGRAKSGKSMMWTKTAFGYYHNRKTGILEVVPQQATIVEQIFTDYLSGISLTKLRDKLNESGHIGKDIPWSYRTLRQTLDNPVYCGYIKFKDSLFEGMHKPIIPYETYLKVQKELEERQQQTYERNNNPRPFQAKYMLSGMARCGYCGAPLRIVLGHKRKDGSRTMKYHCANRFPRKTKGVTVYNDNKKCDSGTYDLSNLENTVIDNLIGFQENNDSLLEIINGNNRPILDTSSLEKQISQIDKKIQKNSDLYLNDFITMEELKDRTDSLQAEKKLLKAKISESKLNGNSDALELVKTQLGSIPINELSYDDKKKIVNNLVSKVDVTADNVDIIFKFQLA

SEQ ID NO: 5239 - protein, 452 aa, synthetic construct
MKAAIYIRVSTREQVENYSIQAQTEKLTALCRSKDWDVYDIFVDGGYSGSNMNRPALNEMLSKLHEIDAVVVYRLDRLSRSQRDTITLIEEYFLKNNVEFVSLSETLDTSSPFGRAMIGILSVFAQLERETIRDRMVMGKIKRIEAGLPLTTAKGRTFGYDVIDTKLYINEEEAKQLQLIYDIFEEEQSITFLQKRLKKLGFKVRTYNRYNNWLTNDLYCGYVSYKDKVHVKGIHEPIISEEQFYRVQEIFTRMGKNPNMNRDSASLLNNLVVCSKCGLGFVHRRKDAMSRDKKYHYRYYSCKTYKHIHELEKCGNKIWRADKLEELIINRVNNYSFASRNADKEDELDSLNEKLKIEHAKKKRLFDLYINGRYEVSELDSMMSDIDAQINYYESQIEANEELRKNKKIQENLAYLATVDFDSLEFREKQLYLKSLINKIYIDGEQVTIEWL

SEQ ID NO: 5240 - protein, 469 aa, synthetic construct
MSYTTPVRAAVYLRISEDRSGEQLGVARQREDCLKLCGQRKWVPVEYLDNDVSASTGKRRPAYEQMLADITAGRIAAVVAWDLDRLHRRPVELEAFMSLADEKHLALATVAGDVDLATPQGRLVARLKGCVAAHETEHKKARQRRAARQKAERGLPNWSEAFGYLPGPNGPEPDPRTAPLVKRAYADILAGASLGDVCRQWNDAGAFTITGRLWTTTALSKFLRKPRNAGLRAYKGARYGPVDRDAIVGKAQWSPLVDEATFWAAQAVLDAPGRAPGRKSVRRHLLTGLAGCGKCGNHLAGSYRTDGRVVYVCKTCHGVAILADNIEPILYRIVAERLAMPDAVDLLRREIHDAAEAETIRLELETLYGELDRLAVERAEGLLTARQVKISTDIVNAKITKLRARQLDQERLRVFDGIPLGTPQVAGMIAELSPDRFRAVLDVLAEVVVQPVGKSGRIFNPERVQVNWR

SEQ ID NO: 5241 - protein, 485 aa, synthetic construct
MTKKVAIYTRVSTTNQAEEGFSIDEQIDRLTKYAEAMGWQVSNTYTDAGFSGAKLERPAMQRLINDIESKAFDTVLVYKLDRLSRSVRDTLYLAKDVFTKNKIDFISLSESIDTSSAMGSLFLTILSAINEFERENIKERMTMGKLGRAKSGKSMMWAKTAFGYYHNRKTGILEIVPLQATIVEQIFTDYLSGISLTKLRDKLNESGHIGKDIPWSYRTLRQTLGNPVYCGYIKFKDSLFEGMHKPIIPYETYLKVQKELEERQQQTYERNNNPRPFQAKYMLSGMARCGYCGAPLRIVLGHRRKDGSRTMKYHCANRFPRKTKGVTVYNDNKKCDSGTYDLSNLENTVIDNLIGLQENNDSLLKVINGSNQPTLDASGLKKQISQIDKKIQKNSDLYLNDFITMDELKDRTDSLQAEKKLLKAKISENKFNDSTDVFELVKTQLGSTPINELSYDNKKEIVNNLVSKVDVTADNVDIIFKFQLT

SEQ ID NO: 5242 - protein, 485 aa, synthetic construct
MTKKVAIYTRVSTTNQAEEGFSIDEQIDRLTKYAEAMGWQTSDTYTDAGFSGAKLERPAMQRLINDIENKAFDTVLVYKLDRLSRSVRDTLYLVKEVFTKNKIDFISLNESIDTSSAMGSLFLTILSAINEFERENIKERMTMGKLGRAKSGKSMMWTKTAFGYYHNRKTGILEIVPLQAAIVEQIFTDYLSGISLTKLRDKLNESGHIGKDIPWSYRTLRQTLDNPVYCGYIKFKDSLFEGMHKPIIPYETYLKVQKELEERQQQTYERNNNPRPFQAKYMLSGMARCGYCGAPLRIVLGHKRKDGSRTMKYHCANRFPRKTKGVTVYNDNKKCDSGTYDLSDLENIVIDNLIGLQENNGSLLKVINGSNQPIPDTSSLKKQISQIDKKIQKNSDLYLNDFITMEELKDRTDSLQAEKELLKAKISENKFNDSTDMFEQVKAQLGSIPINELSYDNKKKIVNNLVSKVDVTADNVDIIFKFQLA

SEQ ID NO: 5243 - protein, 485 aa, synthetic construct
MTKKVAIYTRVSTTNQAEEGFSIDEQIDRLTKYAEAMGWQVSDTYTDAGFSGAKLERPAMQRLINDIENKAFDTVLVYKLDRLSRSVRDTLYLVKDVFTKNKIDFISLNESINTSSAMGSLFLTILSAINEFERENIKERMTMGKLGRAKSGKSMMWTKTAFGYYHNRKTGILEIVPLQAAIVEQIFTDYLSGISLTKLRDKLNESGHIGKDIPWSYRTLRQTLDNPVYCGYIKFKDSLFEGMHKPIIPYETYLKVQKELEERQQQTYERNNNPRPFQAKYMLSGMARCGYCGAPLRIVLGHKRKDGSRTMKYHCANRFPRKTKGITVYNDNKKCDSGTYDLSNLESTVIDILIGFQENNDSLLKIINGNNQPILDTSSFEKQISQIDKKIQKNSDLYLNDFITMDELRDRTDSLQAEKKLLKAKIGENKFNDGTDVFELVKTQLGRIPINELSYDNKKKIVNNLVSKVDVTADNVDIIFKFQLA

SEQ ID NO: 5244 - protein, 452 aa, synthetic construct
MKAAIYIRVSTREQVENYSIQAQTEKLTALCRSKGWDVYDIFIDGGYSGSNMNRPALNEMLSRLHEIDAVVVYRLDRLSRSQRDTITLIEEYFLKNNVEFVSLSETLDTSSPFGRAMIGILSVFAQLERETIRDRMVMGKIKRIEAGLPLTTAKGRTFGYDVIDTKLYINEEEAKQLQLIYDIFEEEQSITSLQKRLKKLGFKVRTYNRYNNWLTNDLYCGYVSYKDKVHVKGIHEPIISEEQFNRVQEIFTRMGKNPNMNRDSASLLNNLVVCSKCGLGFVHRRKDAMSRDKKYHYRYYSCKTYKHIHELEKCGNKIWRADKLEELIISRVNNYSLASRNVDKEDELDSLNEKLKIEHAKKKRLFDLYINGRYEVSELDSMMNDIDAQINYYESQIEANEGLKKNKKIQENLADLATVDFDSLEFREKQLYLKSLINKIYIDGEQVTIEWL

SEQ ID NO: 5245 - protein, 469 aa, synthetic construct
MCYTTPVRAAVYLRISEDRSGEQLGVARQREDCLKLCDQRKWVPVEYLDNDVSASTGKRRPAYEQMLADITAGKVAAVVAWDLDRLHRRPIELEAFMSLADEKRLALATVAGDVDLATPQGRLVARLKGSVAAHETEHKKARQRRAARQKAERGHPNWSKAFGYLPGPNGPEPDPRTAPLVKQAYADILAGASLGDVCRRWNDAGAFTITGRPWTTTTLSKFLRKPRNAGLRAYKGARYGPVDRDAIVGKAQWGPLVDEATFWAAQAVLDAPGRAPGRKSVRRHLLTGLAGCGKCGNHLSGSYRTDGKVVYVCKACHGVAILAENIEPVLYHIVAERLAMPDAVGLLRREIHDATEAETIRLGLGVLYGELDRLAVERAEGLLTARQVKISTDIVNAKITKLRARQLDQERLRVFDGIPLGTPQVAGIIAELSPDRFRAVLDVLAEVVVQPVGKSGRIFNPERVQVNWR

SEQ ID NO: 5246 - protein, 452 aa, synthetic construct
MKAAIYIRVSTREQVENYSIQAQTEKLTALCRSKGWDVYDTFIDGGYSGSNMNRPALNEMLSKLHEIDAVVVYRLDRLSRSQRDTITLIEEYFLKNSVEFVSLSETLDTSSPFGRAMIGILSVFAQLERETIRDRMVMGKIKRIEAGLPLTTAKGRTFGYDVIDTKLYINEEEAEQLQLIYDIFEEERSITFLQKRLKKLGFKVRTYNCYNNWLTNDLYCGYVSYKDKVHVKGIHEPIISEEQFYRVQEIFTRMGKNPNMNRDSASLLNNLVVCSKCGLGFVHRRKDAMSRDKKYHYRYYSCKTYKHIHELEKCGNKIWRADKLEELIISRVNNYSLASRNVDKEDELDSLNEKLKIEHAKKRRLFDLYINGRYEVSELDSMMNDIDAQISYYESQIEANEELKKNKKIQKNLVNLATVDFDSLEFREKQLYLKSLINKIYIDGEQVTIEWL

SEQ ID NO: 5247 - protein, 485 aa, synthetic construct
MTKKVAIYTRVSTTNQAEEGFSIDEQVDRLTKYAEAMGWQVSDTYTDAGFSGAKLERPAMQRLINDIENKAFDTVLVYKLDRLSRSVRDTLYLVKDVFTKNKIDFISLNESIDTSSAMGSLFLTILSAINEFERENIKERMTMGKLGRAKSGKSMMWTKTAFGYYHNRKTGILEIVPLQATIVEQIFTDYLSGISLTKLRDKLNESGHIGKDIPWSYRTLRQTLDNPVYCGYIKFKDCLFEGMHKPIIPYETYLKVQKELEERQQQTYERNNNPRPFQAKYMLSGMARCGYCGAPLKIVLGHKRKDGSRTMKYHCANRFPRKTKGVTVYNDNKKCDSGTYDLSNLENTVIDNLIGFQENNDSLLKIINGNNQSILDTSSFEKQISQIDKKIQKNTDLYLNDYITMDELKDRTDSLQAEKKLLKAKISENKFNDGTDVFELVKTQLGRIPINELSYDNKKKVVNNLVSKVDVTADNVDIIFKFQLT

SEQ ID NO: 5248 - protein, 469 aa, synthetic construct
MSYTTPVRAAVYLRISEDRSGEQLGVARQREDCLKLCDQRKWVPVEYLDNDVSASTGKRRPAYEQMLADITAGKIAAVVAWDLDRLHRRPIELEAFMSLADEKRLALATVAGDVDLATPQGRLVARLKGSVAAHETEHKKARQRRAARQKAERGYPNWSKAFGYLPGPNGPEPDPRTAPLVKQAYADILAGASLGDVCRQWNDAGAFTITGRPWTTTTLSKFLRKPRNAGLRAYRGARYGPVDRDAIVGKAQWSPLVDEATFWAAQAVLDAPGRAPGRKSVRRHLLTGLAGCGKCGNHLSGSYRTDGRVVYVCKACHGVAILADNIEPILYHIVAERLAMPDAVDLLRREIHDAAEAGTIRLELEALYGELDRLAVERAEGLLTARQVKISTDIVNAKIAKLQARQLDQERLRVFDGIPLGTPQVAGKIAELSPDRFRAVLDVLAEVVVQPVGKSGRVFNPERVQVNWR

SEQ ID NO: 5249 - protein, 452 aa, synthetic construct
MKAAIYIRVSTREQVENYSIRAQTEKLTALCRSKDWDVYDIFIDGGYSGSNMNRPALNEMLSKLHEIDAVVVYRLDRLSRSQRDTITLIEEYFLKNNVEFVSLSETLDTSSPFGRAMIGILSVFAQLERETIRDRMVMGKIKRIEAGLPLTTAKGRTFGYDVIDTKLYVNEEEAKQLQLIYDIFEEEQSITFLQKRLKKLGFKVRTYNRYYNWLTNDLYCGYVSYKDKVHVKGIHEPIVSEEQFYRVQEIFTRMGKNPNMNRDSASLLSSLVVCSRCGLGFVHRRKDTMSRGKKYHYRYYSCKTYKHTHELEKCGNKIWRADKLEELIINRVNSYSSASRNVAKEDELDSLNEKLRIEHAKKKRLFDLYINGNYEVSELDSIMNGIDAQINYYESQIEANEKLRRNKKVQENLAELVTVDFDSLEFREKQLYLKSLINKIYIDGEQVTIVWL

SEQ ID NO: 5250 - protein, 469 aa, synthetic construct
MSYTTPVRAAVYLRISEDRSGEQLGVARQREDCLKLCDQRKWVPVEYLDNDVSASTGKRRPAYEQMLADITTGKIAAVVAWDLDRLHRRPIELEAFMSLADEKRLALATVAGDVDLATPQGRLVARLKGSVAAHETEHKKARQRRAARQKAERGYPNWSKAFGYLPGPSGPEPDPRTAPLVKQAYADILAGASLGDVCRQWNDAGAFTITGRPWTTTTLSKFLRKPRNAGLRAYKGARYGPVDRDAIVGKAQWSPLVDEATFWAAQAVLDAPGRAPGRKSVRRHLLTGLAGCGKCGNHLSGSYRTDGRVVYVCKACHGVAILADNIEPILYHIVAERLATPDAVDLLRREIHDAAEAETIRLELETLYGELDRLAVERAEGLLTARQVKISTGIVNAKITKLQARQLDQERLRVFDGIPLGTPQVAGMIAELSPGRFRAVLDVLAEVVVQPVGKSGRVFNPGRVQVNWR

SEQ ID NO: 5251 - protein, 452 aa, synthetic construct
MKAAIYIRVSTREQVENYSIQAQTEKLTALCRSKDWDVYDIFIDGGYSGSNMNRPALNEMLSKLHEIDAVVVYRLDRLSRSQRDTITLIEEYFLKNNVEFVSLSETLDTSSPFGRAMIGILSVFAQLERETIRDRMVMGKIKRIEAGLPLTTAKGRTFGYDVIDTKLYINEEEAKQLQLIYDIFEEERSITFLQKRLKKLGFKVRTYSRYNSWLTNDLYCGYVSYKDKVHVKGIHEPIISEEQFYRVQEIFTRMGKNPNMNRDSASLLNNLVVCGKCGLGFVHRRKDTVSRGKKYHYRYYSCKTYKHTHELEKCGNKIWRADKLEELIIDRVNNYSSASRNVDKEDELDSLNEKLKIEHAKKKRLFDRYINGRCEVSELDSMMNDIDAQINYYESQIEANEEPKRNKKIQENLANLAAVDYDSLEFREKQLYLKSLINKIYIDGELVTIEWL

SEQ ID NO: 5252 - protein, 452 aa, synthetic construct
MKAAIYIRVSTREQVENYSIQAQTEKLTALCRSKDWDVYDIFIDGGYSGSNMNRPALNEMLSKLHEIDAVVVYRLDRLSRSQRDTVTLIEEYFLKNNVEFVSLSETLDTSSPFGRAMIGILSVFAQLERETIRDRMVMGKIKRIEAGLPLTTAKGRTFGYDVIDTKLYINEEEAKQLQLIYDIFEEEQSITSLQKRLKKLGFKVHTYNRYNNWLTNDLYCGYVSYKDKVHVKGIHEPIISEEQFYRVQEIFTRMGKNPNMNRDSASLLNNLVVCSKCGLGFVHRRKDAMSRDKKYHYRYYSCKTYKHIHELEKCGNKIWRADKLEELIINRVNNYSLASRNVDKEGELDSLNEKLKTEHARKKRLFDLYINGNYEVSELDSMMNDIDAQINRYESQIEANEELKKNKKIQENLADLATVDFDGLEFREKQLYLKSLINKIYIDGEQVTIEWL

SEQ ID NO: 5253 - protein, 452 aa, synthetic construct
MKAAIYIRVSTREQVENYSIQAQTERLTALCRSKDWDVYDIFIDGGYSGSNMNRPALNEMLSKLHEIDAVVVYRLDRLSRSQRDTITLIEEYFLKNNVEFVSLSETLDTSSPFGRAMIGILSVFAQLERETIRDRMVMGKIKRIEAGLPLTTAKGRTFGYDVIDTKLYINEEEAKQLQLIYDIFEEERSITFLQKRLKKLGFKVRTYSCYNNWLTNDLYCGYVSYKDKVHVKGIHEPIISEEQFYRVQEIFTRMGKNPNMNRDSASLLNNLVVCGKCGLGFVHRRKDAMSRDKKYHYRYYSCKTYKHIHELEKCGNKIWRADKLEELIINRVNNYSLASRNVDKGDELDSLNEKLKIEHAKKKRLFELYINGSFEVSELDSMMNDIDAQISYYESQIEANEGLKKNKKIQENLADLATVDFDSLEFREKQLYLKSLINKIYIDGEQVTIEWL

SEQ ID NO: 5254 - protein, 452 aa, synthetic construct
MKAAIYIRVSTREQVENYSIQAQTEKLTALCRSKDWDVYDIFIDGGYSGSNMNRPALNEMLSKLHEIDAVVVYRLDRLSRSQRDTITLIEEYFLKNNVEFVSLSETLDTSSPFGRAMIGILSVFAQLERETIRDRMVMGKIKRVEAGLPLTTAKGRTFGYDVVDTKLYINEEEAKQLQLIYDIFEEEQSITFLQKRLKKLGFKVRTYNRYNSWLTNDLYCGYVSYKDKVHVKGIHEPIISEEQFYRVQEIFARMGKNPNMNRDSASLLNSLVVCSKCGLGFVHRRKDTVSRGKKYHYRYYSCKTYKHTHELEKCGNKIWRADKLEELIINRVNNCSLASRNVDKGDELDSLSEKLKVEHAKKKRLFELYINGSYEVSELDSMMNDIDAQINYYESRIEANEELKKNKKIQENLANLATVDYDSLEFREKQLYLKSLINKIYIDGEQVTIEWL

SEQ ID NO: 5255 - protein, 469 aa, synthetic construct
MSYTTPVRAAVYLRISEDRSGEQLGVARQREDCLKLCGQRKWVPVEYLDNDVSASTGKRRPAYEQMLADITAGEIAAVVAWDLDRLHRRPVELEAFMSLADEKRLALATVAGDVDLATPQGRLVARLKGSVAAHETEHKKARQRRAARQKAERGYPNWSKAFGYLPGPNGPEPDPRTAPLVKQAYADILAGASLGDVCRQWNDAGAFTITGRPWTTTTLSKFLRKPRNAGLRAYKGARYGPVDRDAVVGKAQWSPLVDEATFWAAQAVLDAPGRAPGRKSVRRHLLTGLVGCGKCGNHLAGSYRTDGRVVYVCKACHGVAILADNIEPVLYHIVAERLAMPDAVDLLRREIHDAAEADTIRLELETLYGELDRLAVERAEGLLTARQVKISTDIVNAKITKLQARQLDQERLRVFDGIPLGTPQVAGMIAELSPDRFRAVLDVLAEVVVRPVGKGGRIFNPERVQVNWR

SEQ ID NO: 5256 - protein, 452 aa, synthetic construct
MKAAIYIRVSTREQVENYSIQAQTEKLTALCRSKDWDVYDIFIDGGYSGSNMDRPALNEMLSKLHEIDAVVVYRLDRLSRSQRDTITLIEEYFLKNNVEFVSLSETLDTSSPFGRAMIGILSVFAQLERETIRDRMVMGKIKRIEAGLPLTTAKGRTFGYDVIDTKLYINEEEAKQLRLIYDIFEEEQSITLLQKRLKKLGFKVRTYSCYNNWLTNDLYCGYVSYKDKVHVKGIHEPIISEEQFYRVQEIFTRMGKNPNMNRDSASLLNGLVVCSKCGLGFVHRRKDTMCRGKKYHYRYYSCKTYKHIHELERCGNKIWRADKLEELIINRVNNYSFASRNVDKEGELDSLNEKLKAEHAKKRRLFDLYINGSYEVSELDSMMSDIDAQINYYESQIEANEELKKNKKIQENLANLATVDYDSLEFREKQLYLKSLINKIYIDGEQVTIEWL

SEQ ID NO: 5257 - protein, 485 aa, synthetic construct
MTKKVAIYTRVSTTNQAEEGFSIDEQIGRLTKYAEAMGWQVSDTYTDAGFSGAKLERPAMQRLINDIESKAFDTVLVYKLDRLSRSVRDTLYLVKDVFTKNKIDFISLNESIDTSSAMGSLFLTILSAINEFERENIKERMAMGKLGRAKSGKSMMWTKTAFGYYHNRKTGILEIVPLQATIVEQIFTDYLSGISLTKLRDKLNESGHIGKDVPWSYRTLRQTLDNPVYCGYIKFKDSLFEGMHKPIIPYETYLRVQKELGERQQQAYERNNNPRPFQAKYMLSGMARCGYCGAPLKIVLGHKRKDGSRTMKYHCANRFPRKTKGVTVYNDNKKCDSGTYDLSNLENTVIDNLIGFQENNDSLLKIINGNNQPTLDTSSFEEQISQIDKKIQKNSDLYLNDFITMDELKDRTDSLQAEKKLLKAKISENRFNDSTDVFELVKTQLGSIPINELSYDNKKKIVNNLVSKVDVTADDVDIIFKFQLA

SEQ ID NO: 5258 - protein, 485 aa, synthetic construct
MTKKVAIYTRVSTTNQAEEGFSIDEQIDRLTKYVEAMGWQVSDTYTDAGLSGAKLERPAMQRLINDIENKAFDTVLVYKLDRLSRSVRDTLYLVKDVFTKNKIDFISLNESIDTSSAMGSLFLTILSAINEFERENIKERMTMGKLGRAKSGKSMMWTRTAFGYYHNRKTGILEIVPLQATIVEQIFTDYLSGISLTKLRDKLNESGHIGKDIPWSYRTLRQTLDNPVYCGYIKFKGSLFEGMHKPIIPYETYLKVQKELEERQQQTYERNNNPRPFQAKYMLSGMARCGYCGAPLRIVLGHRRKDGSRTMKYHCANRFPRKTRGITVYNDNKKCDSGTYDLSNLENTVIDNLVGFQENNDSLLKIINGNNQPIPDTSSIKKQISQIDKKIQKNSDLYLNDFITMDELKNRTDSLQAEKKLLKAKISENKFNDSTDVFELVKTQLGSTPINELSYDNKKKIVNNLVSKVDVTADNVDIIFKFQLA

SEQ ID NO: 5259 - protein, 469 aa, synthetic construct
MSYTTPVRAAVYLRISEDRSGEQLGVARQREDCLKLCGQRKWVPVEYLDNDVSASTGKRRPAYEQMLADITAGKIAAVVAWDLDRLHRRPIELEAFMSLADEKRLALATVAGDVNLATPQGRLVARLKGSVAAHETEHKKARQRRAARQKAERGHPNWSKAFGYLPGPNGPEPDPRTAPLVKQAYADILAGASLGDVCRQWNDAGAFTITGRPWTTTTLSKFLRKPRNAGLRAYKGARYGPVDRDAIVGKAQWSPLVDEATFWAAQAVLDAPGRAPGRKSVRRHLLTGLAGCGKCGNHLAGSYRTDGRVVYVCKACHGVAILADNIEPILYHIVAERLAMPDAVDLLRREIRDAAEAETIRLELETLYGELDRLAVERAEGLLTARQVKICTDIVSAKITKLQARQLDQERLRVLDGIPLGTPRVAGMIAELSPDRFRAVLDVLAKVVVQPVGKGGRSLNPERVQVNWR

SEQ ID NO: 5260 - protein, 485 aa, synthetic construct
MTKKVAIYTRVSTTNQAEEGFSIDEQIDRLTKYAEAMGWQVSDTYTDAGFSGAKLGRPAMQRLINDIENKAFDTVLVYKLDRLSRSVRDTLYLVKDVFTKNKIDFISLSESIDTSSAMGSLFLTILSAINEFERENIKERMTMGKLGRAKSGKSMMWTKTAFGYYHNRKTGILEIVPLQATIVEQIFTDYLSGISLTKLRDKLNESGHIGKDIPWSYRTLRQTLDNPVYCGYIKFKGSLFEGMHKPIIPYETYLKVQKELEERQQQTYERNNNPRPFQAKYMLSGMARCGYCGAPLKIVLGHKRKDGSRTMNYHCANRFPRKTKGVTVYNDNKKCDSGTYDLSNLENTVIDNLIGFQENNDSLLKIINGNNQPILDTSSFKRRINQIDKKIQKNTDLYLNDFITMDELKIRTDSLRAEKKLLKAKISENKFNDSTDVFELVKTQLGSIPINELSYDNKKKIVNNLVSKVDVTADNVDIIFKFQLA

SEQ ID NO: 5261 - protein, 452 aa, synthetic construct
MKAAIYIRVSTREQVENYSIQAQTEKLTALCRSKDWDVYDIFVDGGYSGSNMNRPALNEMLSKLHEIDAVVVYRLDRLSRSQRDTITLIEEYFLKNNVEFVSLSETLDTSSPFGRAMIGILSVFAQLERETIRDRMVMGKIKRIEAGLPLTTAKGRTFGYDVIDTKLYINEEEAKQLRLIYDIFEEEQSITFLQKRLKKLGFKVRTYNCYNNWLTNDLYCGYVSYKDKVHVKGIHEPIISEEQFYRVQEIFTRMGKNPNMNRDSASLLNNLVVCSKCGLGFVHRRKDAMSRDKKYHYRYYSCKTYKHIHELEKCGNKIWRADKLEELIINRVNNYSIASRNADKEDELDSLNEKLKIEHAKKKRLFDLYINGSYEVSELDSMMNDIDAQINYYESQIEANKELKKNRKIQENLADLATVDFDSLEFREKQLYLKSLINKIYIDGEQVTIEWL

SEQ ID NO: 5262 - protein, 452 aa, synthetic construct
MKAAIYIRVSTREQVENYSIQAQTEKLTALCRSKDWDVYDIFVDGGYSGSNMNRPALNEMLSRLHEIDAVVVYRLDRLSRSQRDTITLIEEYFLKNNVEFVSLSETLDTSSPFGRAMIGILSVFAQLERETIRDRMVMGKIKRIEAGLPLTTAKGRTFGYDVIDTKLYINEEEAKQLQLIYDIFEEEQSITFLQKRLKKLGFKVRTYNRYNNWLTNDLYCGYVSYKDKVHVKGIHEPIISEEQFYRVQEIFTRMGKNPNMNRDSASLLNNLVVCSKCGLGFVHRRKDAMSRDKKYHYRYYSCKTYKHIHELEKCGNKIWRADKLEELIINRVNNYSLASRNVDKEDELDSLNEKLKIEHAKKKRLFDLYINGSYEVSELDGMMSDIDAQINYYESQIEAGEELKRNKKIQETLADLATVDFDSLEFREKQLYLKSLINKIYIDGEQVTIEWL

SEQ ID NO: 5263 - protein, 452 aa, synthetic construct
MKAAIYIRVSTREQVENYSIQAQTEKLTALCRSKDWDVYDIFIDGGYSGSNMNRPALNEMLSKLHEIDAVVVYRLDRLSRSQRDTITLIEEYFLKNNVEFVSLSETLDTSSPFGRAMIGILSVFAQLERETIRDRMVMGKIKRIEAGLPLTTAKGRTFGYDVIDAKLYINEEEAKQLQLIYDIFEEEQSITFLQKRLKKLGFRVRTYSCYNNWLTNDLYCGYVSYKDKVHVKGIHEPIISEEQFYRVQEIFTRMGKNPNMNRDSASLLSNLVVCSKCGLGFVHRRKDTMSRGKKYHYRYYSCKTYKHIHELEKCGNKIWRADKLEELVINRVNNYSFASRNVDKEDELDSLNEKLKIEHAKKKRLFDLYINGSYEVSELDCMMNDIDAQINYYESQIEAHEELKKDKKIQESLANLATVDYDSLEFREKQLYLKSLINKIYIDGEQVTIEWL

SEQ ID NO: 5264 - protein, 452 aa, synthetic construct
MKAAIYIRVSTREQVENYSIQAQTEKLTALCRSKDWDVYDIFIDGGYSGSNMNRPALNEMLSRLHEIDAVVVYRLDRLSRSQRDTITLIEEYFLKNNVEFVSLSETLDTSSPFGRAMIGILSVFAQLERETIRDRMVMGKIKRIEAGLPLTTAKGRTFGYDVIDTKLYINEEEAKQLQLIYDIFEEEQSITSLQKRLKKLGFKVRTYSCYNNWLTNDLYCGYVSYKDTVHVKGIHEPIISEEQFYRVQEIFTRMGRNPNMNRDSASLLNNLVVCGKCGLGFVHRRKDTISRGKKYHYRYYSCKTYKHTHELEKCGNKIWRADKLEELIINRVNDYSLASRSADKEDELDSLNEKLKIEHAKRKRLFDLYINGSYEVSELGSMMNDIDAQINYYESQIEVNEELKKDKKIQESLANLATVDYDSLEFREKQLYLKSLINKIYIDGEQVTIEWL

SEQ ID NO: 5265 - protein, 452 aa, synthetic construct
MKAAIYIRVSTQEQVGNYSIQAQTEKLTALCRSKDWDVYDVFVDGGYSGSNMNRPALNEMLSKLHEIDAVVVYRLDRLSRSQRDTTTLIEEYFLKNNVEFVSLSETLDTSSPFGRAMIGILSVFAQLERETIRDRMVMGKIKRIEAGLPLTTAKGRTFGYDVTDTKLYINEEEAKQLQLIYDIFEEEQSITFLQKRLKKLGFKVRTYNRYSSWLTNDLYCGYVSYKDKVHVKGIHEPIISEEQFYRVQEIFTRMGKNPNMNRDSASLLNSLVVCSKCGLGFVHRSKDTMCRGKKYHYRYYSCKTYKHTHELEKCGNKTWRADKLEELIINRVNSYSSASRNVDKEDELNSLNEKLKIEHAKKKRLFDLYINGSYEVSELDSMMNDIDAQINYYESQIEANEELKKNKKIQENLADLATVDFDSLEFREKQLYLKSLINKIYIDGEQVTIEWL

SEQ ID NO: 5266 - protein, 452 aa, synthetic construct
MKAAIYIRVSTREQVENYSIQAQTEKLTALCRSKDWDVYDIFIDGGYSGSNMNRPALNEMLSKLHEIDAVVVYRLDRLSRSQRDTVTLIEEYFLKNNVEFVSLSETLDTSSPFGRAMIGILSVFAQLERETIRDRMVMGKIKRIEAGLPLTTAKGRTFGYDVIDTKLYINEEEAKQLQLIYDIFEEVQSITFLQKRLKELGFKARTYNCYNNWLTNDLYCGYVSYKDKVHVKGIHEPIISEEQFYRVQEIFARMGKNPNMNRDSASLLNNLVVCSKCGLGFVHRRKDTMSRDKKYHYRYYSCKTYKHIHELEKCGNKIWRADKLEELIINRVNNYSFASRNVDKEDELDSLNEKLKIEHAKKKRLFDLYINGRYEVSELDSMMNGIDAQISYYEGQIEASEELKKNKKIPENLAYLATVDFDSLEFREKQLYLKSLINKIYIDGEQVTIEWL

SEQ ID NO: 5267 - protein, 469 aa, synthetic construct
MSYTTPVRAAVYLRISEDRSGEQLGVARQREDCLKLCGQRGWVPVEYLDNDVSASTGKRRPAYEQMLADITAGKIAAVVAWDLDRLHRRPVELEAFMSLADEKRLALATVAGDIDLATPQGRLVARMKGCVAAHETEHKKARQRRAARQKAERGLPNWSKAFGYLPGPNGPEPDPRTAPLVKQAYADILAGASLGDVCRQWNDAGALTITGRPWTTTTLSKFLRKPRSAGLRAYKGARYGPVDRDAIVGKAQWGPLVDEATFWAAQAVLDAPGRAPGRKSVRRHLLTGLAGCGKCGNHLAGSYRTDGRVVYVCKACHGVAILADNIEPILYHIVAERLAMPDAVDLLRREIHDAAEAETIRLELEILYGELDRLAVERAEGLLTARQVKISTDIVNAKIAKLRARQLDQERLRVFDGIPLGTPQVAGTIAELSPDRFRAVLDVLAEVVVQPVGKSGRIFNPERVQVNWR

SEQ ID NO: 5268 - protein, 485 aa, synthetic construct
MTRKVAIYTRVSTTNQAEEGFSIDEQIDRLTKYAEAMGWQVSDTYTDAGLSGAKLERPAMQRLINDIENKAFDTVLVYKLDRLSRSVRDTLYLVKDVFTKNKIDFISLNESIDTSSAMGSLFLTILSAINEFERENIKERMTMGKLGRAKSGKSMMWAKTAFGYYHNRKTGILEIVPLQAAIVEQIFTDYLSGISLTKLRDKLNESGHIGKDIPWSYRTLRQTLDNPVYCGYIKFKDSLFEGMHKPIIPYETYLRVQKELEGRQQQTYERNNNPRPFQAKYMLSGMARCGYCGAPLRIVLGHKRKDGSRTMRYHCANRFPRKTKGITVYNDNKKCNSGTYDLSNLENTVIDNLIGFQENNDSLLEIINGNNQPILDTSSFKKQISQIDKKIQKNSDLYLNDFITMDELKARTDSLQAEKRLLKAKISENKFNDSTDVFELVRTQLGSIPINELSYDDKKKIVNNLVSEVDVTADNVDIIFKFQLA

SEQ ID NO: 5269 - protein, 452 aa, synthetic construct
MKAAIYIRVSTREQVENYSIQAQTEKLTALCRSKDWDVYGIFIDGGYSGSNMNRPALNEMLSKLHEIDAVVVYRLDRLSRSQRDTITLIEEYFLKNNVEFVSLSETLDTSSPFGRAMIGILSVFAQLERETIRDRMVMGKIKRIEAGLPLTTAKGRTFGYDVIDTKLYINEEEAKQLQLIYDIFEEEQSITFLQKRLKKLGFKVHTYNRYNSWLTNDLYCGYVSYKDKVHVKGIHEPIISEEQFYRVQEIFTRMGKNPNMNRDSASLLNNLVVCSKCGLGFVHRRKDTTSRGKKYRYRYYSCKTYKHIHELEKCGNKIWRADKLEELIINRVNNYCFASRNVDKDDELDSLNEKLKIEHAKKERLFDLYVNGSYEVSELDSMMNDIGAQISYYESQIEANEELRKNKKIQEDLADLATVDFDSLEFREKQLYLKSLINKIYIDGEQVTIEWL

SEQ ID NO: 5270 - protein, 452 aa, synthetic construct
MKAAIYIRVSTREQVENYSIQAQTEKLTALCRSKDWDVYDIFIDGGYSGSNMDRPALNEMLSKLHEIDAVVVYRLDRLSRSQRDTITMIEEYFLKNNVEFVSLSETLDTSSPFGRAMIGILSVFAQLERETIRDRMVMGKIKRIEAGLPLTTAKGRTFGYDVIDTKLYINEEEAKQLRLIYDIFEEEQSITFLQKRLKKLGFKVRTYNRYNNWLTNDLYCGYVSYKDKVHVKGIHEPIISEEQFYRVQEIFARMGKNPNMNRGSASLLNNLVVCSKCGLSFVHRRKDTMSRGKKYHYRYYSCKTYKHTHELEKCGNKIWRADKLEELIINRVNNYSFAGRNVDKEDELDSLHEKLKIEHAKKKRLFDLYINGSYEVSELDSLMNDIDARINYYESQIEANEELKKNKKIQENLANLATVDFDSLEFREKQLYLKSLINKIYIDGEQVTIEWL

SEQ ID NO: 5271 - protein, 469 aa, synthetic construct
MSYTTPVRAAVYLRISEDRSGEQLGVARQREDCLKLCGQHKWVPVEYLDNDVSASTGKRRPAYEQMLADITAGKIAAVVAWDLDRLHRRPIELEAFMSLADERRLALATVAGDVDLATPQGRLVARLKGCVAAHETEHKKARQRRAARQKAERGYPNWSKAFGYLPGPNGPEPDPRTAPLVKQAYADILAGASLGDVCRQWNDAGAFTITGRLWTTTTLSKFLRKPRNAGLRAYKGARYGPVDRDAIVGKAQWGPLVDEATFWAAQAVLDAPGRAPGRKSVRRHLLTGLAGCGKCGNHLAGSYRTDGRVVYVCKACHGVAILADNIEPILYHIVAERLAMPDAVDLLRREIHDAAEAETTRLELETLYGELDRLAVERAEGLLTARQVKISTDIVNAKITKLQARQLDQERLRVLDGIPLGTPQVAGMIAELSPDRFRAVLDVLAEVVVQPVGKSGRIFSPERVQVNWR

SEQ ID NO: 5272 - protein, 469 aa, synthetic construct
MSYTTPVRAAVYLRISEDRSGEQLGVARQREDCLRLCDQRKWVPVEYLDNDVSASTGKRRPAYEQMLADITAGKIAAVVAWDLDRLHRRPIELEAFMCLADEKRLALATVAGDVDLATPQGRLVARLKGCVAAHETEHKKARQRRAARQKAERGYPNWSKAFGYLPGPNGPEPDPQTAPLVKQAYADILAGASLGDVCRQWNDAGAFTITGRPWTTTTLSKFLRKPRNAGLRAYKGARYGPVDRDAIVGKAQWSPLVDEATFWAAQAVLDAPGRAPGRKSVRRHLLTGLAGCGKCGNHLAGSYRTDGRVVYVCKACHGVAILADNIEPILYHIVAERLAMPDAVDLLRREIHDAAEAETIRLELETLYGELDRLAVERAEGLLTARQVKISTDIVNAKITELRARQLDQERLRVFDGIPLGTPQVAGMVAELSPDRFRAVLDVLAEVVVRPVGKSGRIFNPERVQVNWR

SEQ ID NO: 5273 - protein, 452 aa, synthetic construct
MKAAIYIRVSTREQVENYSIQAQTEKLTALCRSKDWDVYDIFIDGGYSGSNMNRPALNEMLSKLHEIDAVVVYRLDRLSRSQRDTITLIEEYFLKNNVEFVSLSETLDTSSPFGRAMIGILSVFAQLERETIRDRMVMGKIKRIEAGLPLTTAKGRTFGYDVIDTKLYINEEEAKQLQLIYDIFEEEQSITFLQKRLKKLGFKVRTYNCYNNWLTNDLYCGYVSYKDKVHVKGIHEPIISEEQFYRVQEIFTRMGKSPNMNRDSASLLNNLVVCGKCGLGFVHRRKDTTGRGKKYHYRYYSCKTYKHTHELEKCGNKIWRADKLEELIINRVNNYSFAGRNVDKEDELDSLNEKLKIEHAKKKRLFDLYINGNYDVSELDSMMNDIDAQIDYYESQIEANEELKKDKKIQENLANLATVDYDSLEFREKQLYLKSLINKIYIDGEQVTIEWL

SEQ ID NO: 5274 - protein, 452 aa, synthetic construct
MKAAIYIRVSTQEQVGNYSIQAQTEKLTALCRSKDWDVYDIFIDGGYSGSNMNRPALNEMLSKLHEIDAVVVYRLDRLSRSQRDTTTLIEEYFLKNNVEFVSLSETLDTSSPFGRAMIGILSVFAQLERETIRDRMVMGKIKRIEAGLPLTTAKGRTFGYNVIDTKLYINEDEAKQLQLIYDIFEEEQSITSLQKRLKKLGFKVRTYNRYNNWLTNDLYCGYVSYKDIVHVKGIHEPIISEEQFYRVQEIFTRMGKNPNMNRDNASLLNNLVVCSKCGLSFVHRSKDTTSRGKKYHYRYYSCKTYKHTHELEKCGNKTWRADKLEELVINRVNNYSFASRNVDKEDELDSLNEKLEIEHARKKRLFDLYINGSYEVSELDSMMNDIDAQINYYESQIEASEGLKKNKKIQENLADLATVDFDSLEFREKQLYLKSLINKIYIDGEQVTIEWL

SEQ ID NO: 5275 - protein, 452 aa, synthetic construct
MKAAIYIRVSTREQVENYSIQAQTEKLTALCRSKDWDVYDIFIDGGYSGSNMNRPALNEMLSKLHEIDAVVVYRLDRLSRSQRDTITLIEEYFLKNNVEFVSLSETLDTSSPFGRAMIGILSVFAQLERETIRDRMVMGKIKRIEAGLPLTTAKGRTFGYDVIDTKLYINEEEARQLQLIYDIFEEEQSITFLQKRLKKLGFKVRTYNRYNSWLTNDLYCGYVSYKDKVHVKGIHEPIISEEQFYRVQEIFTRMGKNPNMNRDSASLLNSLVVCSKCGLGFVHRRKDTVSRGKKYHYRYYSCKTYKHIHELEKCGNKIWRADKLEELIINRVNNYSFASRNADKEDELDGLNEKLKIEHAKKKRLFDLYINGSYEVSELDSMMNDIDAQINYYESQIEANEELKKNKRIQEKLAGLATVDFDSLEFREKQLYLKSLINKIYIDGEQVTIEWL

SEQ ID NO: 5276 - protein, 485 aa, synthetic construct
MTKKVAIYTRVSTTNQAEEGFSIDEQIDRLTKYAEAMGWQVSNTYTDAGFSGAKLVRPAMQRLINDIENKAFDTVLVYKLDRLSRSVRDTLYLVKEVFTKNKIDFISLNESIDTSCAIGSLFLTILSAINEFERENIKERMTMGKLGRAKSGKSMMWTKTAFGYYHNRKTGILEIVPLQATIVEQIFTDYLSGISLTKLRDKLNENGHIGKDIPWSYRTLRQTLDNPVYCGYIKFKDSLFEGMHRPIIPYETYLKVQKELEKRQQQTYERNNNPRPFQAKYMLSGMARCGYCGAPLRIVLGRKRKDGSRTMKYHCANRFPRKTKGVTAYNDNKKCDSGTYDLSNLENTVIDNLIGFQENNDSLLKIINGNNQPILDTSSFKKQISQIDKKIQKNSDLYLNDFITMDELKDRTDSLQAEKKLLRAKISENKFNDSTDVFELVKTQLGSIPINELSYDNKKKIVNILVSKVDVTADNVDIIFKFQLA

SEQ ID NO: 5277 - protein, 486 aa, synthetic construct
MTKKVAIYTRVSTTNQAEEGFSIDEQIDRLTKYAEAMGWQVSGTYTDAGLSGAKLERPAMQRLINDIENKAFDTVLVYKLDRLSRSVRDTLYLVKDVFTKNKIDFISLNESIDTSSAMGSLFLTILSAINEFERENIKERMTMGKLGRAKSGKSMMWTKTAFGYHHNRKTGILEVVPLQATIVEQIFTDYLSGISLTKLRDKLNESGHIGKDIPWSYRTLRQTLDNPVYCGYIKFKDSLFEGMHKPIIPYETYLKVQKELEERQQQAYERNNNPRPFQAKYMLSGMARCGYCGAPLRIVLGHKRKDGSRTMKYHCANRFPRKAKGVTVYNDNKKCDSGTYDLSNLENTVIDYLIGYQENNDSLLKIINGNNQPILDASSFKKQISQIDKKIQKNSDLYLNDFITMDELKDRTDSLQAEKKLLKAKIGENKFNDSTDVFELVKTQLGSIPINELSYDSKKKVVNNLVSKVDVTADNVVIIFKFQLAQ

SEQ ID NO: 5278 - protein, 485 aa, synthetic construct
MTKKVAIYTRVSTTNQAEEGFSIDEQIDRLTKYAEAMGWQVSDTYTDAGISGAKLERPAMQRLINDIENKAFDTVLVYKLDRLSRNVRDTLYLVKDVFTKNKIDFISLNESIDTSSAMGSLFLTILSAINEFERENIKERMTMGKLGRAKSGKSMMWTKTAFGYYHNRKTGILEIVPLQATIVEQIFTDYLSGISLTKLRDKLNESGHIGKDIPWSYRTLRQTLDNPVYCGYIKFKDSLFEGMHKPIIPYETYLKVQKELEGRQQQTYERNNNPRPFQAKYMLSGMARCGYCGAPLKIVLGHKRKDGSRTMRYHCANRFPRKTKGITVYNDNKKCDSGTYDLSNLENTVIDNLISFQENNDSLLKIINGNNQPALDTSGFKERISQIDKKIQKNSDLYLNDFITMDELKARTDSLQAEKKLLKAKISENKPNDSTDVFELVKTQLGSIPINELSYDNKKKIVNNLVSKVDVTADNVDIIFKFRLA

SEQ ID NO: 5279 - protein, 485 aa, synthetic construct
MTKKVAIYTRVSTTNQAEEGFSIDEQIDRLTKYAEAMGWQVSDTYTDAGISGAKLERPAMQRLINDIENKAFDTVLVYKLDRLSRSVRDTLYLVKDVFTKNKIDFISLNESIDTSSAMGSLFLTILSAINEFERENIKERMTMGKLGRAKSGKSMMWTKTAFGYYHNRKTGILEIVPLQATVVEQIFTDYLSGISLTKLRDKLNESGHIGKDIPWSYRTLRQTLDNPVYCGYIKFKGSLFEGMHKPIIPYETYLKVQKELEERQQQTYERNNNPRPFQAKYMLSGIARCGYCGAPLRIVLGHKRKDGSRTMKYHCANRFPRKTKGVTVYNDNRKCDSGTYDLSNLENTVIGNLIGFQENNDSLLKIINGNNQPILDTSSLKEQISQIDKKIQKNSDLYLNDFITMDELKDRTDSLQAEKKLLEAEISENKFNDSTDVFELVKTQLGSIPIDELSYDNKKKIVNNLVSKVDVTADNVDIIFKFQLA

SEQ ID NO: 5280 - protein, 452 aa, synthetic construct
MKAAIYIRVSTREQVENYSIQAQTEKLTALCRSKGWDVYDIFIDGGYSGSNMNRPALNEMLSKLHEIDAVVVYRLDRLSRSQRDTITLIEEYFLKNNVEFVSLSETLDTSSPFGRAMIGILSVFAQLERETIRDRMVMGKIKRIEAGLPLTTAKGRTFGYDVIDTKLYINEEEAKQLRLIYDIFEEEQSITFLQKRLKKLGFKVRTYNRYNNWLTNDLYCGYVSYKDKVHVKGIHEPIISEEQFYRVQEIFTRMGKNPNMNRDSASLLNSLVVCSKCGLGFVHRRKDTMSHGKKYHYRYYSCKTYKHIHELEKCGNKIWRADRLEELIISRVNSYSVASRNVDKEDELDSLNEKLKIEHAKKKRLFDLYINGSYEVSELDSMMNDINAQIDYYESQIEANEELKKNKKIQEDLAYLATVDFDSLEFREKQLYLKSLINKIYIDGEQVTIEWL

SEQ ID NO: 5281 - protein, 452 aa, synthetic construct
MKAAIYIRVSTREQVENYSIQAQTEKLTALCRSKDWDVYDIFVDGGYSGSNMNRPALNEMLSKLHEIDAVVVYRLDRLSRSQRDTITLIEEYFLKNNVEFVSLSETLDTSSPFGRAMIGILSVFAQLERETIRDRMVMGKIKRIEAGLPLTTAKGRTFGYDVIDTKLYVNEEEAKQLRLIYDIFEEEQSITFLQKRLKKLGFKVRTYNRYNNWLTNDLYCGYVSYKDKVHVKGIHEPIISEEQFYRVQEIFARMGKNPNMNRDSASLLNNLVVCSKCGLGFVHRRKDAMSRDKKYHYRYYSCKTYKHIHELEKCGNKIWRADKLEELIINRVNNYSITSRNADKEDELDSLSEKLKIEHAKKKRLLDLYINGSYDVSELDSMMNDIDAQINYYESRIEANEELKKSKRIQETLADLATVDFDSLEFREKQLYLKSLINKIYIDGEQVTIEWL

SEQ ID NO: 5282 - protein, 485 aa, synthetic construct
MTKKVAIYTRVSTTNQAEEGFSIDEQIDRLTKYAEAMGWQVSDTYTDAGLSGAKLERPAMQRLINDVENKAFDTVLVYKLDRLSRSVRDTLYLVKDVFTKNKIDFISLNESIDTSSAMGSLFLTILSAINEFERENIKERMTMGKLGRAKSGKSMMWTKTAFGYYHNRKTGILEIVPLQATIVEQIFTDYLSGISLTKLRDKLNESGHIGKDIPWSYRTLRQTLDNPVYCGYIKFKGSLFEGMHKPIIPYETYLKVQKELEERQQQTYERNNNPRPFQAKYMLSGMARCGYCGAPLRIVLGHKRKDGSRTMKYHCANRFPRKTKGVTVYNDNKRCDSSTYDLSNLEDTVIDNLIGFQENNDSLLKMINGNNQPILDTSSFKKQISQIDKKIQKNSDLYLNDFITMDELKDRTDSLQAEKKLLEAKISEDKLNDSTDVFELVKTQLGSIPINELSYDNKKKIVNNLVSKVDVTADNVDIIFKFQLV

SEQ ID NO: 5283 - protein, 452 aa, synthetic construct
MKAAIYIRVSTREQVENYSIQAQTEKLTALCRSKDWDVYDIFVDGGYSGSNMNRPALNEMLSKLHEIDAVVVYRLDRLSRSQRDTITLIEEYFLKNNVEFVSLSETLDTSSPFGRAMIGILSVFAQLERETIRDRMVMGKIKRIEAGLPLTTAKGRTFGYDVIDTKLYINEEEAKQLQLIYDIFEEEQSITFLQKRLKKLGFKVRTYNRYSNWLTNDLYCGYVSYKDKVHVKGIHEPIISEEQFNRVQEIFARMGKNPNVNRDSASLLNNLVVCSKCGLGFVHRRKDTVSRGKKYHYRYYSCKTYKHIHELEKCGNKIWRADKLEELIINRVNNYSLASRNVDKEDELDSLSEKLKVEHAKKKRLFELYINGSYEMGELDSMMNDIDAQINYYESQIEANEGLKRNKKIQENLAELATVDFDSLEFREKQLYLKSLIDKIYIDGEQVTIEWL

SEQ ID NO: 5284 - protein, 452 aa, synthetic construct
MKAAIYIRVSTREQVENYSIQAQTEKLTALCRSKGWDVYDIFIDGGYSGSNMNRPALNEMLSKLHEIDAVVVYRLDRLSRSQRDTITLIEEYFLKNNVEFVSLSETLDTSSPFGRAMIGILSVFAQLERETIRDRMVMGKIKRIEAGLPLTTAKGRTFGYDVIDTKLYINEEEARQLRLIYDIFEEVQSITFLQKRLKKLGFKVRTYNRYNNWLTNDLYCGYVSYKDKVHVKGIHEPIISEEQFYRVQEIFTRMGKSPNMNRGSASLLNNLVVCSKCGLGFVHRRKDAMSRDKKYHYRYYSCKTYKHIHELEKCGNKIWRADRLEELIIDRVNNYSLAGRNVDKEDELNSLNEKLKIEHAKKKRLFDLYISGSYEVSELDSMMNDIDAQINYYEGQIEANEELRKNKKIQENLADLATVDFDSLEFREKQLYLKSLINKIYIDGEQVTIEWL

SEQ ID NO: 5285 - protein, 452 aa, synthetic construct
MKAAIYIRVSTREQVENYSIQAQTEKLTALCRSKGWDVYDIFIDGGYSGSNMNRPALNEMLSKLHEIGAVVVYRLDRLSRSQRDTITLVEEYFLKNNVEFVSLSETLDTSSPFGRAMIGILSVFAQLERETIRDRMVMGKIKRIEAGLPLTTAKGRTFGYDVIDTKLYINEEEAKQLRLIYDIFEEEQSITFLQKRLKELGYKVRTYNRYNNWLTNDLYCGYVSYKDIVHVKGIHEPIISEEQFYRVQEIFTRMGKNPNMNRDRASLLSNLVVCSKCGLGFVHRSKDTTSRGKKYHYRYYSCKTYKHTHELEKCGNKTWRADKLEELIISRVNNYSFASRSVDKEDELDSLNEKLKIEHAKKKRLFDLYINGSYEVSELDSMMNDIDAQINYYEGQIEANEELRRDKKIQENLADLATVDFDSLEFREKQLYLKSLISKIYIDGEQVTIEWL

SEQ ID NO: 5286 - protein, 452 aa, synthetic construct
MKAAIYIRVSTREQVENYSIQAQTEKLTALCRSKDWDVYDIFIDGGYSGSNMNRPALNEMLSKLHEIDAVVVYRLDRLSRSQRDTITLIEEYFLKNNVEFVSLSETLDTSSPFGRAMIGILSVFAQLERETIRDRMVMGKIKRVEAGLPLTTAKGRTFGYDVIDTKLYINEVEAKQLQLIYDIFEEEQSITSLQKRLKKLGFKVRTYNRYSNWLTNDLYCGYVSYKDKVHVKGIHEPIISEEQFYRVQEIFTRMGKNPNMNRDSASLLNNLVVCSKCGLGFVHRRKDTMSRGKKYHYRYYSCKTYKHIHELEKCGNKIWRADKLEELIINRVNNYSFASRNVDKEDELDSLNEKLKIEHAKKKRLFDLYINGSYEVSELDSMMNDIDAQINYYESQIEANEELKKNKKIQENLANLATVDFDSLEFREKQLYLKSLINKIYIDGEQVTIEWL

SEQ ID NO: 5287 - protein, 452 aa, synthetic construct
MKAAIYIRVSTREQVDNYSVQAQTEKLTALCRSKDWDVYDIFIDGGYSGSNMNRPALNEMLSKLQEIDAVVVYRLDRLSRSQRDTITLIEEYFLKNNVEFVSLSETLDTSSPFGRAMIGILSVFAQLERETIRDRMVMGKIKRIEAGLPLTTAKGRTFGYDVIGTKLYINEEEAKQLQLIYDIFEEEQSITFLQKRLKKLGFKVRTYNRYNNWLTNDLYCGYVSYKDKVHVKGIHEPIISEEQFYRVQEIFTRMGKNPNMNRGSASLLNNLVVCGKCGLGFVHRRKDAMSRDKKYHYRYYSCKTYKHIHELEKCGNKIWRADKLEELIINRVNNYSFASRNADKEDELDSLNEKLKIERAKKKRLFELYINGSHEVSELDSMMNDIDAQINYYESQIEANEELRKNRKIQENLAHLATVDFDSLEFREKQLYLKSLINKIYIDGEQVTIEWL

SEQ ID NO: 5288 - protein, 452 aa, synthetic construct
MKAAIYIRVSTREQVENYSTQAQTEKLTALCRSKDWDVYDIFIDGGYSGSNMNRPALNEMLSKLHEIDAVVVYRLDRLSRSQRDTITLIEEYFLKNNVEFVSLSETLDTSSPFGRAMIGILSVFAQLERETIRDRMAMGKIKRIEAGLPLTTAKGRTFGYDVIDTKLYINEEEAKQLQLIYDIFEEEQSITFLQKRLKKLGFKVRTYSRYHSWLTNDLYCGYVSYKDKVHVKGIHEPIISEEQFYRVQEIFARMGKNPNMNRDSASLLNNLVVCSKCGLGFVHRRKDTMSRGKKYHYRYYSCKTYKHIHELEKCGNKIWRADRLEELIINRVNNYSLASRNVDKEDELDSLNEKLKIEHAKKKRLFDLYINGSYEVSELDSMMNDIDAQINYYESQIEAKEELKKNKKIQENQADLATVDFDSLEFREKQLYLKSLINKIYIDGEQVTIEWL

SEQ ID NO: 5289 - protein, 452 aa, synthetic construct
MKAAIYIRVSTREQVENYSIQAQTEKLTALCRSKDWDVYDIFIDGGYSGSNMNRPALNEMLSKLHEIDAVVVYRLDRLSRSQRDTITLIEEYFLKNNVEFVSLSETLDTSSPFGRAMIGILSVFAQLERETIRDRMVMGKIKRIEAGLPLTTAKGRTFGYDVIDTKLYINEEEAKQLQLIYDIFEEEQSITSLQKRLKKLGFKVRTYNRYNNWLTNDLYCGYVSYKDKVHVKGIHEPIISEEQFYRVQEIFTRMGKNPNMNRDSASLLNSLVVCSKCGLGFVHRRKDTTSRGKKYHYRYYSCKTYKHTHELEKCGNKIWRADKLEELIINRVNNYSFASRNVDKEDELDSLYEKLKIEHAKKKRLFNLYINGSYEVSELDSMMNDIDARINYYESQIEANEELRKNKKIQENLADQATVDFDSLEFREKQLYLKSLINKIYIDGEQVTIEWL

SEQ ID NO: 5290 - protein, 485 aa, synthetic construct
MTKKVAIYTRVSTTNQAEEGFSIDEQIDRLTKYAEAMGWQVSDTYTDAGCSGAKLERPAMQRLINDIENKAFDTVLVYKLDRLSRSVRDTLYLVKDVFTKNKIDFISLNESIDTSSAMGSLFLTILSAINEFERENIKERMTMGKLGRAKSGKSMMWTKTAFGYYHNRKTGILEIVPPQATIVEQIFTDYLSGISLTKLRDKLNESGHIGKDIPWSYRTLRQTLDNPVYCGYIKFKDRLFEGMHKPIIPYETYLKVQKELEERQQQAYERNNNQRPFQAKYMLSGMARCGYCGAPLRIVLGRKRKDGSRTMKYYCANRFPRKTKGVTVYNDNKKCDSGTYDLSNLENTVIDTLIGFQENNDSLLKIINGNNQPILDTSSFKKQISQIDKKIQKNSDLYLNDFITMDELKDRTDSLQAEKKLLKAKISENKFNDSTDVFELVKTQLGSIPINELSYDNKKKIVNNLVSKVDVTADNVDIIFKFQLA

SEQ ID NO: 5291 - protein, 452 aa, synthetic construct
MKAAIYIRVSTREQVENYSIQAQTEKLTALCRSKDWDVYDIFIDGGYSGSNMDRPALNEMLSKLHEIDAVVVYRLDRLSRSQRDTITLIEEYFLKNNVEFVSLSETLDTSSPFGRAMIGILSVFAQLERETIRDRMVMGKIKRIEAGLPLTTAKGRTFGYDVIDAKLYINEEEAKQLQLIYDIFEEEQSITSLQKRLKKLGFKVHTYNRYNNWLTNDLYCGYVSYKDKVHVKGIHEPIISEEQFYRVQEIFTRMGKNPNMNRDSASLLNNLVVCSKCGLGFVHRRKDATSRDKKYHYRYYSCKTYKHIHELEKCGNKIWRADKLEELIINRVNSYSLVSRNVDKEDELDSLNEKLKIEHAKKKRLFDLYINGNYEVSELDSMMNDIDAQINYYESQIEANEELKKGKKIQENLAYLAAVDFDSLEFREKQLYLKSLINKIYIDGEQVTIEWL

SEQ ID NO: 5292 - protein, 452 aa, synthetic construct
MKAAIYIRVSTREQVENYSIQAQTEKLTALCRSKGWDVYDIFIDGGYSGSNMNRPALNEMLSKLHEIDAVVVYRLDRLSRSQRDTITLIEEYFLKNNVEFVSLSETLDTSSPFGRAMIGILSVFAQLERETIRDRMVMGKIKRIEAGLPLTTAKGRTFGYDVIDTKLHINEEEAKQLQLIYDIFEEEQSITFLQKRLKKLGFKVRTYNRYNNWLTNDLYCGYVSYKDKVHVKGIHEPIISEEQFYRVQEIFARMGKNPNMNRDSASLLNNLVVCSKCGLGFVHRRKDAMSRDKKYHYRYYSCKTYKHIHELEKCGNKIWRADKLEELIINRVNNYSLASRNEDKEDELDSLNEKLKVEHAKKKRLFDLYINGSYEVSELDSMMNDIDAQINYYESQIEANEELKKNKKIQENLADLATVDFDSLEFREKQLYLKSLINKIYIDGEQVTIEWL

SEQ ID NO: 5293 - protein, 485 aa, synthetic construct
MTKKVAIYTRVSTTNQAEEGFSIDEQIDRLTKYAEAMGWQVSDTYTDAGFSGAKLERPAMQRLISDIENKAFDTVLVYKLDRLSRSVRDTLYLVKEVFTKNKIDFISLNESIDTSSAMGSLFLTILSAINEFERENIKERMTMGKLGRAKSGKSMMWTKTAFGYYHNRKTGILEIVPLQATIVEQIFTDYLSGISLTKLRDKLNESGHIGKDIPWSYRALRQTLDNPVYCGYIKFKGSLFEGMHKPIIPYETYLKVQKELEERQQQTYERNNNPRPFQAKYMLSGMARCGYCGAPLRIVLGRKRKDGSRTMKYHCANRFPRKTKGVTVYNDNKKCDSGTYDLSNLENTVIDNLIGFQENNESLLKIINGSNQPILDTSSFKKQISQIDKKIQKNSDLYLNDFITMDELRDRTDSLRAEKKLLKAKISENKFNDSTDVFELVKTQLGSIPINELSYDYKKKIVNNLVSKVDVTADNVNIIFKFQLA

SEQ ID NO: 5294 - protein, 452 aa, synthetic construct
MKAAIYIRVSTQEQVENYSIQAQTEKLTALCRSKDWDVYDIFIDGGYSGSNMNRPALNEMLSKLHEIDAVVVYRLDRLSRSQRDTITLIEEYFLKNNVEFVSLSETLDTSSPFGRAMIGILSVFAQLERETIRDRMVMGKIKRIEAGLPLTTAKGRTFGYDVIDTKLYINEEEAKQLRLIYDIFEEEQSITFLQKRLKKLGFKVRTYNRYNSWLTNDLYCGYVSYKDKVHVKGIHEPIISEEQFYRVQEIFTRMGKNPNMNRDSASLLNNLVVCSKCGLGFVHRRKDTMSRGKKYHYRYYSCKTYKHTHELEKCGNKIWRADKLEELIINRVNNYSLASRNVDKEDELDSLNEKLKIEHAKRKRLFDLYINGSYEVSELDSMMNDIDAQINYYESQIEANEELKKNKKIQANLADLATVDFDSLEFREKQLYLKSLINKIYIDGEQVTIEWL

SEQ ID NO: 5295 - protein, 452 aa, synthetic construct
MKAAIYIRVSTQEQVGNYSIQAQTEKLTALCRSKDWDVYDIFIDGGYSGSNMNRPALNEMLSKLHEIDAVVVYRLDRLSRSQRDTTTLIEEYFLKNNVEFVSLSETLDTSSPFGRAMIGILSVFAQLERETIRDRMVMGKIKRVEAGLPLTTAKGRTFGYDVIDTKLYINEEEAKQLRLIYDIFEEEQSITSLQKRLKELGFKVRSYNRYNNWLTNDLYCGYVSYKDKVHVKGIHEPIISEEQFYRVQEIFTRMGKNPNMSRDSASLLNNLVVCGKCGLGFVHRSKDTMSRGKKYHYRYYSCKTYKHTHELEKCGNKTWRADKLEELIINRVNNYSLASRNVDKGDELDSLNEKLKIEHAKKRRLFDLYINGSYEVSELDSMMNDIDVQINYYESQIEANEELKKNKKIQENLADLATVDFDSLEFRDKQLYLKSLINKIYIDGEQVTIEWL

SEQ ID NO: 5296 - protein, 452 aa, synthetic construct
MKAAIYIRVSTREQVENYSIRAQTERLSALCRSKDWDVYDIFIDGGYSGSNMNRPALNEMLSKLHEIDAVVVYRLDRLSRSQRDTITLIEEYFLKNNVEFVSLSETLDTSSPFGRAMIGILSVFAQLERETIRDRMVMGKIKRVEAGLPLTTAKGRTFGYDVIDTKLYINEEEAKQLQLIYDIFEEEQSITSLQKRLKKLGFKVRTYSRYNSWLTNDLYCGYVSYKDKVHVKGVHEPIISEEQFYRVQEIFTRMGKNPNMNRDSASLLNNLVVCSRCGLGFVHRRKDTMSRGKKYHYRYYSCKTYKHIHELEKCGNKIWRADKLEELIINRVNNYSFASRNVDEAEELDSLNEKLKVEHAKKKRLFDLYISGSYNVSELDSMMNDIDARINYYESQIEANEELKKNKKIQENLANLATVDFDSLEFREKQLYLKSLINKIYIDGEQVTIEWL

SEQ ID NO: 5297 - protein, 452 aa, synthetic construct
MKAAIYIRVSTREQVENYSIQAQTEKLTALCRSKGWDVYDIFIDGGYSGSNMNRPALNEMLSKLHEIDAVVVYRLDRLSRSQRDTITLIEEYFLKNNVEFVSLSETLDTSSPFGRAMIGILSVFAQLERETIRDRMVMGKIKRIEAGLPLTTAKGRTFGYDVIDTKLYINEEEAKQLQLIYDIFEEEQSITFLQKRLKKLGFKVRSYNRYNNWLTNDLYCGYVSYKDKVHVKGIHEPIISEEQFYRVQEIFTRMGKNPNMNRDSASLLNNLVVCSKCGLGFVHRRKDAMSRDKKYHYRYYSCKTYKHIHELEKCGNKIWRADKLEELIINRVNNYSLASRNVDKEDELDSLNEKLKIEHAKKRRLFDLYISGRYEVSELDSMMNDIDAQINYYESQIEANEELNRNKKIQENLAYLATVDFDSLEFREKQLYLKSLINKIYIDGEQVTIEWL

SEQ ID NO: 5298 - protein, 452 aa, synthetic construct
MKAAIYIRVSTREQVENYSIQAQTEKLTALCRSKGWDVYDIFIDGGYSGSNMNRPALNEMLSKLHEIDAVVVYRLDRLSRSQRDTITLIEEYFLKNSVEFVSLSETLDTSSPFGRAMIGILSVFAQLERETIRDRMVMGKIKRIEAGLPLTTAKGRTFGYDVIDTKLYINEEEARQLRLIYDIFEEERSITFLQKRLKKLGFKVRTYNRYNNWLTNDLYCGYVRYKDKVHVKGIHEPIISEEQFYRVQEIFARMGKNPNMNRDSASLLNNLVVCSKCGLGFVHRRKDVMSHGKKYHYRYYSCKTYKHIHELEKCGNKIWRADKLEELIINRVNSYSLAGRNVDKEDELDSLNGKLKIEHAKKKRLFDLYINGSYEVSELDSMMNDIDAQINYYESQIEANEELRKNRKIQENLAHLATVDFDSLEFREKQLYLKSLISKIYIDGEQVTIEWL

SEQ ID NO: 5299 - protein, 469 aa, synthetic construct
MSYTTPVRAAVYLRISEDRSGEQLGVARQREDCLKLCGQRKWVPVEYLDNDVSASTGKRRPAYEQMLADITAGKIAAVVAWDLDRLHRRPIELEAFMSLADEKRLALATVAGDVDLATPQGRLVARLKGCVAAHETEHKKARQRRAARQKAERGYPNWSKAFGYLPGPNGPEPDPRTAPLVKQAYADILAGASLGDVCRQWNDVGAFTITGRPWTTTALSKFLRKPRNAGLRAYKGARYGPVDRDAIVGKAQWSPLVDEATFWAAQAVLDAPGRAPGRKSVRRHLLTGLAGCGKCGNHLAGSYRTDGRVVYVCKACHGVAILADNIEPILYRIVAERLAMPDAVDLLRREIHDAAEAETIRQELETLYGELDRLAVERAEGLLTARQVKISTDIVNAKITKLQARQLDQERLRVLDGIPLGTPQVAGMIAELSPDRFRAVLDVLAKVVVQPVGKRDRIFNPERVQVNWR

SEQ ID NO: 5300 - protein, 469 aa, synthetic construct
MCYTTPVRAAVYLRISEDRSGEQLGVARQREDCLELCDQRKWVPVEYLDNDVSASTGKRRPAYEQMLADITAGKIAAVVAWDLDRLHRRPIELEAFMSLADEKRLALATVAGDVDLATPQGRLVARLKGSVAAHETEHKKARQRRAARQKAERGLPNWSKAFGYLPGPNGPEPDPRTAPLVKQAYADILAGASLGDVCRRWNSAGAFTITGRPWITTTLSKFLRKPRNAGLRAYKGARYGPVDRDAIVGRAQWSPLVDEATFWAAQAVLDAPGRAPGRKSVRRHLLTGLAGCGKCGNHLAGSYRTDGRVVYVCKACHGVAILADNIEPILYHIVAERLAMPDAVDLLRREIHNAAEAETIRLELDTLYGELDRLAVERAEGLLTARQVKISTDIVNAKIAKLQTRQLDQERLRVLDGIPLGTPQVAGMIAELSPDRFRAVLNVLAEVVVQPVGKGGRVFNPERVQVNWR

SEQ ID NO: 5301 - protein, 469 aa, synthetic construct
MSYTTPVRAAVYLRISEDRSGEQLGVARQREDCLKLCDQRKWEPVEYLDNDVSASTGKRRPAYEQMLADITAGKIAAVVAWDLDRLHRRPIELEAFMSLADEKRLALATVAGDVDLATPQGRLVARLKGSVAAHETEHKKARQRRAARQKAERGYPNWSKAFGYLPGPNGPEPDPRTAPLVEQAYANILAGASLGDVCRQWNDAGAFTITGRPWTTTTLSKFLRKPRNAGLRAYKGARYGPVDRDAIVGKAQWGPLVDEATFWAAQAALDAPGRAPGRKSVRRHLLTGLAGCGKCGNHLAGSYRTDGRVVYVCKACHGVTILADNIEPILYHIVAERLAMPDAVDLLRREIHDAAEAETIRLELESLYGELDRLAVERAEGLLTARQVKISTDIVNAKITKLQARQLDQDRLRVLDGIPLGTQQVAGVIAELSPDRFRAVLDVLAEVIVQPVGKGGRIFNPERVQVNWR

SEQ ID NO: 5302 - protein, 452 aa, synthetic construct
MKAAIYIRVSTREQVENYSIQAQTEKLTALCRSKDWDVYDIFIDGGYSGSNMNRPALNEMLSKLHEIDAVVVYRLDRLSRSQRDTITLIEEYFLKNNVEFVSLSETLDTSSPFGRAMIGILSVFAQLERETIRDRMVMGKIKRIEAGLPLTTAKGRTFGYDVVDTKLYINEEEAKQLRLIYDIFEEEQSITSLQKRLKGLGFKVRTYNRYNNWLTNDLYCGYVSYKDKVHVKGVHEPIISEEQFYRVQEIFTRMGKNPNMNRDSASLLNNLVVCSKCGLGFVHRRKDAMSRDKKYHYRYYCCKTYKHIHELEKCGNKIWRADKLEELIINRVNNHSLASRNADKEDELDSLNEKLKTEHAKKKRLFDLYINGSYEVSELDSMMNGIDAQINYYESQIEASEELKKNKKVQENLAELATVDFDSLEFREKQLYLKSLINKIYIDGEQVTVEWL

SEQ ID NO: 5303 - protein, 485 aa, synthetic construct
MTKKVAIYTRVSTTNQVEEGFSIDEQIDRLTKYAEAMGWQVSDTYTDAGSSGAKLERPAMQRLINDIENKAFDTVLVYKLDRLSRSVRDTLYLVKDVFTKNKIDFISLNESIDTSSAMGSLFLTILSAINEFERENIKERMTMGKLGRAKSGKSMMWTKTAFGYYHNRKTGILEVVPLQATIVEQIFTDYLSGISLTKLRDKLNESGHIGKDIPWSYRTLRQTLDNPVYCGYIKFKDSLFEGMHRPIVPYETYLKVQRELEERQQQAYERNNNPRPFQAKYMLSGMARCGYCGAPLKIVLGHKRKDGSRTMKYHCANRFPRKTKGITVYNDNKKCDSGTYDLSNLENTVIDNLIGLQENNDSLLKIINGNNQPILDTSSFKKQISQIDKKIQKNSDLYLNDFITMDELKDRTNSLQAKKKLLKAKISENKFNDSTDVFELVKTQLGSIPINELGYDDKKKIVNNLVSKVDVTADNVDIIFKFQLA

SEQ ID NO: 5304 - protein, 469 aa, synthetic construct
MSYTTPVRAAVYLRISEDRSGEQLGVARQREDCLKLCGQRKWVPVEYLDNDVSASTGKRRPAYEQMLADITAGKIAAVVAWDLDRLHRRPIELEAFMSLADEKRLALATVAGDVDLSTPQGRLVARLKGSVAAHETEHKKARQRRAARQKAERGHPNWSKAFGYLPGPNGPEPDPRTAPLVKQAYADILAGASLGDVCRQWNDAGAFTITGRPWTTTTLSKFLRKPRNAGLRAYKGARYGPVDRDAIVGKARWSPLVDEATFWAAQAVLDAPGRAPGRKSVRRHLLTGLAGCGKCGNHLAGSYRTDGRVVYVCKACYGVAILADNIEPILYHIVAERLAMPDAVDLLRREIHDAAEAETIRLELETLYGELDRLAVERAEGLLTARQVKISTDVVNAKITKLQARQLDQERLRVLDGIPLGTPQVAGMIAGLSPDRFRAVLDVLAEVVVQPVGKSGKIFSPERVQVNWR

SEQ ID NO: 5305 - protein, 452 aa, synthetic construct
MKAAIYIRVSTQEQVENYSIQAQTEKLTALCRSKDWDVYDIFIDGGYSGSNMNRPALNEMLSKLHEIDAVVVYRLDRLSRSQRDTITLIEEYFLKNNVEFVSLSETLDTSSPFGRAMIGILSVFAQLERETIRDRMVMGKIKRIEAGLPLTTAKGRTFGYDVIDTKLYINEEEAKQLRLIYDIFEEEQSITFLQKRLKELGFKVRTYNCYNNWLTNDLYCGYVSYKDKVHVKGIHEPIISEEQFYRVQEIFTRMGKNPNMNRDSASLLNNLVVCSKCGLGFVHRRKDTTSRGKKYHYRYYSCKTYKHTHELEKCGNKIWRADKLEELIINRVNNYSFASRNVDKEDELDSLNEKLKIEHAKKKRLFDLYINGSYEVSELDSMMNDIDAQINYYESQIEANEELRKNKKIQENLANLATVDYDSLEFREKQLYLKSLINKIYIDGEQVTIEWL

SEQ ID NO: 5306 - protein, 452 aa, synthetic construct
MKAAIYIRVSTREQVENYSIQAQTEKLTALCRSKDWDVYDIFIDGGYSGSNLNRPALNEMLSKLHEIDAVVVYRLDRLSRSQRDTVTLIEEYFLKNNVEFVSLSETLDTSSPFGRAMIGILSVFAQLERETIRDRMVMGKIKRIEAGLPLTTAKGRTFGYDVIDTKLYINEEEAKQLQLVYDIFEEEQSITILQKRLKKLGFKVRTYSRYNNWLTNDLYCGYVSYKDKVQVKGIHEPIISEEQFYRVQEIFTRMGKNPNMNRDSASLLNNLVVCSKCGLGFVHRRKDTTSRGKKYHYRYYSCKTYKHPHELEKCGNKIWRADKLEELIINRVSSYSFASRNADKEDELDSLNEKLKIEHAKKKRLFDLYINGSYEVSELDGMMNDIDAQINYYESQIEANEELKKNKKIQENLANPATVDYDSLEFREKQLYLKSLINKIYIDGEQVTIEWL

SEQ ID NO: 5307 - protein, 452 aa, synthetic construct
MKAAIYIRVSTREQVENYSIQAQTEKLTALCRSKDWDVYDIFIDGGYSGSNMNRPALNEMLSKLHEIDAVVVYRLDRLSRSQRDTITLIEEYFLKNNVEFVSLCETLDTSSPFGRAMIGILSVFAQLERETIRDRMVMGKIKRIEAGLPLTTAKGRTFGYDVIDTKLYINEEEAKQLRLIYDIFEEEQSITSLQKRLKKLGFKVRTYSRYNNWLTNDLYCGYVSYKDKVHVKGIHEPIISEEQFYRVQEIFTRMGKNPNMNRDSASLLNNLVVCSKCGLGFVHRRKDAMSRDKKYHYRYYSCKTYKHIHELEKCGNKIWRADKLEELIIDRVNNYSLASRNVDKEDELDSLNEKLKIEHARKRRLFDLYLNGSYEMSELDSMMNDIDAQINYYESQIEANEELKKNKKIQENLADLATVDFDSLEFREKQRYLKSLINKIYIDGEQVTIEWL

SEQ ID NO: 5308 - protein, 485 aa, synthetic construct; identical to SEQ ID NO: 2582

SEQ ID NO: 5309 - protein, 485 aa, synthetic construct
MTKKVAIYTRVSTTSQAEEGFSVDEQIDRLTKYAEAMGWQVGDTYTDAGFSGAKLERPAMQRLINDIENKAFDTVLVYKLDRLSRSVRDTLYLVKDVFTKNKIDFISLNESIDTSSAMGSLFLTILSAINEFERENIKERMTMGKLGRAKSGKSMMWTKTAFGYYHNRKTGILEIVPLQATIVEQIFTDYLSGISLTKLRDKLNESGHIGKDIPWSYRTLRQTLDNPVYCGYIKFKDGLFEGMHKPIIPYETYLKVQKELEERQQQTYERNNNPRPFQAKYMLSGMARCGYCGAPLRIVLGHRRKDGSRTMKYHCANRFPRKTKGVTVYNDNKKCDSGTYDLSDLENTVIDNLIGLQENNDSLLKIINGNNQPILDTSSFKKQISQIDKKIQKNSELYLNDFITMDELKDRTDGLQAEKKLLKAKISENKFNDSTNVFELVKTQLGSIPINELSYDNKKKIVNNLVSKVDVTADNVDIVFKFQLA

SEQ ID NO: 5310 - protein, 485 aa, synthetic construct
MTKKVAIYTRVSTTNQAEEGFSIDEQIDRLTKYAEAMGWQVSDTYTDAGVSGAKLERPAMQRLINDIENKAFDTVLVYKLDRLSRSVRDTLYLVKDVFTKNKIDFISLNESIDTSSAMGSLFLTILSAINEFERENIKERMTMGKLGRAKSGKSMMWTKTAFGYYHNRKTGILEIVPLQAAIVEQIFTDYLSGISLTKLRDKLNESGHIGKDIPWSYRTLRQTLDNPVYCGYIKFKDSLFEGMHKPIIPYETYLKVQKELEERQQQTYERNNNPRPFQAKYMLSGMARCGYCGAPLRIALGHKRKDGSRTMKYHCANRFPHKTKGVTVYNDNKKCDSGTYDLSNLENTVIDNLIGFQENNDSLLKIINGNNQPILDTSSFKKQISQIDKKIQKNSDLYLNDFITMDELKARTDSLQAEKKLLKAKISENKFNDSTDVFELVKTQLGSIPISELSYDNKKKIVNNLVSKVDVTADNVDIIFKFQLV

SEQ ID NO: 5311 - protein, 485 aa, synthetic construct
MTKKVAIYTRVSTTNQAEEGFSIDEQTDRLTKYAEAMGWQVSDTYTDAGFSGAKLERPAMQRLINDIENKAFDTVLVYKLDRLSRSVRDTLYLVKDVFTKNKIDFISLNESINTGSAMGSLFLTILSAINEFERENIKERMTMGKLGRAKSGKSMMWTKTAFGYYHNRKTGILEIVPLQATIVEQIFTDYLSGISLTKLRDKLNESGHIGKDIPWSYRTLRQTLDNPVYCGYIKFKDSLFEGMHKPIIPYETYLRVQKELEERQQQTYERNNNPRPFQAKYMLSGMARCGYCGAPLRIVLGHKRKDGSRTMKYHCANRFPRKTKGVTVYNDNKKCDSGTYDLSNLENTVIDNLIGLQENNDSLLKIINGNNQPILDTSSFEKQISQIDKKIQKNSDLYLSDFITMDELKDRTDSLQAEKKLLKAKISENKFNDGTDVFELVKTQLGSTPINELSYDNKKKIVNNLVSKVDVTADSVDIIFKFQLA

SEQ ID NO: 5312 - protein, 485 aa, synthetic construct
MTRKVAIYTRVSTTNQAEEGFSIDEQIDRLTKYAEAMGWQVSDTYTDAGSSGAKLERPAMQRLINDIENKAFDTVLVYKLDRLSRSVRDTLYLVKDVFTKNKIDFISLNESIDTSSAMGSLFLTILSAINEFERENIKERMTMGKLGRAKSGKSMMWTKTAFGYYHNRKTGILEIVPLQATIVEQIFTDYLSGISLTKLRDKLNESGHIGKDIPWSYRTLRQTLDNPVYCGYIKFKDSLFEGMHKPIIPYETYLKVQRELKERQQQTYERNNNPRPFQAKYMLSGMARCGYCGAPLRIVLGHKRKDGSRTMRYHCANRFPRKTRGVTVYNDNKKCGSGAYDLRNLENTVIDNLIGFQENNDSLLKIINGNNQPILDTSSFKKQISEIDKKIQKNSELYLNDFITMDELKDRTDSLQAEKKLLKAKISENKFNDSTDVFELVKAQLGSIPINELSYDDKKKIVNNLVSKVDVTADNVDIIFKFQLA

SEQ ID NO: 5313 - protein, 452 aa, synthetic construct
MKAAIYIRVSTQEQVGNYSIQAQTEKLTALCRSKDWDVYDIFIDGGYSGSNMNRPALNEMLSKLHEIDAVVVYRLDRLSRSQRDTTTLIEEYFLKNNVEFVSLSETLDTSSPFGRAMIGILSVFAQLERETIRDRTVMGKIKRIEAGLPLTTAKGRTFGYDVIDTKLYINEEEAKQLQLIYDIFEEEQSITSLQKRLKKLGFKVRTYNRYNNWLTNDLYCGYVSYKDKVHVKGIHEPIISEEQFYRVQEIFTRMGKNPNMNRDSASLLNNLVVCSKCGLSFVHRSKDTMSGGKKYHYRYYSCKTYKHTHELEKCGNKTWRADKLEELIIDRVNNYSFASCDVDKEDELDSLNEKLKTEHAKKKRLFDLYINGSYEVSELDSMMNDIDAQINYYESQIEASEELRRNKKIQENLADLATVDFDSLGFREKQLYLKSLINKIYVDGEQVTIEWL

SEQ ID NO: 5314 - protein, 485 aa, synthetic construct
MTKKVAIYTRVSTTNQAEEGFSIDEQIDRLTKYAEAMGWQVSDTYTDAGYSGAKLERPAMQRLINDIENNAFDTVLVYKLDRLSRSVRDTLYLVRDVFTKNKIDFISLNESIDTSSAMGSLFLTILSAINEYERENIKERMTMGKLGRAKSGKSMMWTKTAFGYYHNRKTGILEIVPLQAAIVEQIFTDYLSGISLTKLRDKLNESGHIGKDIPWSYRTLRQTLDNPVYCGYIKFKDSLFEGMHKPIIPYETYLKVQKELEERQQQTYERNNNPRPFQAKYMLSGMARCGYCGAPLKIVLGHKRKDGSRTMKYHCANRFPRKTKGITVYNDNKKCDSGTYDLSDLENTVIDNLVGLQENNDSLLKIINGNNQPIPDISSFKKQISQIDKKIQKNSDLYLNDFITMDELKDRTDSLQAEKKLLKAKISESKLNDSTDVFELVKTQLGSIPISGLSYDSKRKIVNNLVSKVDVTADNVDIIFKFQLA

SEQ ID NO: 5315 - protein, 485 aa, synthetic construct
MTKKVAIYTRVSTTNQAEEGFSIDEQIDRLTKYAEAMGWQVSDTYTDAGLSGAKLERPAMQRLINDIENKAFDTVLVYKLDRLSRSVRDTLYLVKDVFTKNKIDFISLNESIDTSSAMGSLFLTILSAVNEFERENIKERMTMGKLGRAKSGKSMMWTKTAFGYYHNRKTGILEIVPLQAAIVEQIFTDYLSGISLTKLRDKLNESGHIGKDIPWSYRTLRQTLDNPVYCGYIKFKDSLFEGMHKPIIPYETYLKVQKELEERQQQTYKRNNNPRPFQAKYMLSGVARCGYCGAPLKIVLGHKRKDGSRTMKYHCANRFPRKTKGVTAYNDNKKCDSGTYDLSNLENTVIDNLIGFQENNDSLLKIINGNNQPILDTSGFEKQISQIDKKIQKNSDLYLNDFITMDELKDRTDSLQAEKKLLKAKISENKFNDSTDVFELVKTQLGSIPINELSYDNKKKIVNNLVSKVDVTADNVDVIFKFQLA

SEQ ID NO: 5316 - protein, 469 aa, synthetic construct
MSYTTPVRAAVYLRISEDRSGEQLGVARQREDCLKLCDQRKWVPVEYLDNDVSASTGKRRPAYEQMLADITAGKIAAVVAWDLDRLHRRPVELEAFMSLADEKRLALATVAGDVDLATPQGRLVARLKGCVAAHETEHKKARQRRAARQKAERGHPNWSKAFGYLPGPNGPEPDPRTAPLVKQAYADILAGASLGDVRRQWNDAGAFTITGRPWTTTALSKFLRKPRNAGLRAYRGARYGPVDRDAIVGKAQWSPLVDEATFWAAQAVLDAPGRAPGRKSVRRHLLTGLAGCGKCGNHLAGSYRTDGRVVYVCKACHGVAILADNIEPILYHIVAERLAMPDAVDLLRREVHDAAEAETIRLELETLYGELDRLAVERAEGLLTARQVKISTDIVNAKITKLQARQQDRERLRVLGGIPLGTPQVAGMIAELSPDRFRAVLDVLAEVVVQPVGKSGRIPNPERVQVNWR

SEQ ID NO: 5317 - protein, 452 aa, synthetic construct
MKAAIYIRVSTREQVENYSIQAQTEKLTALCRSKDWDVYDIFIDGGYSGSNMNRPALNEMLSKLHEIDAVVVYRLDRLSRSQRDTITLIEEYFLKNNVEFVSLSETLDTSSPFGRAMIGILSVFAQLERETIRDRMVMGKIKRIEAGLPLTTAKGRTFGYDVIDTKLYINEEEANQLQLIYDIFEEVQSITSLQRRLKKLGFKVRTYNRYNNWLTNDLYCGYVSYKDKVHVRGIHEPIISEEQFYRVQEIYTRMGKNPNMNRDSASLLNNLVVCSKCGLGFVHRRKDTMSRGKKYHYRYYSCKTYKHTHELEKCGNKIWRADKLEELIINRVCNYSLASRNVDKEGELDSLNEKLKVEQAKKRRLFDLYINGSYEVSELDSMMNDIDAQINYYESQIEANEELKKNKKIQENLANLATVDYDSLEFREKQLYLKSLINKIYIDGEQVTIEWR

SEQ ID NO: 5318 - protein, 452 aa, synthetic construct
MKAAIYIRVSTREQVENYSIQAQTEKLTALCRSKDWDVYDIFIDGGYSGSNMNRPALNEMLSKLHEIDAVVVYRLDRLSRSQRDTITLIEEYFLKNNVEFVSLSETLDTSSPFGRAMIGILSVFAQLERETIRDRMVMGKIKRIEAGLPLTTAKGRTFGYDVIDTKLYVNEEEAKQLQLIYDIFEEEQSITFLQKRLKELGFKVRTYNRYNSWLTNDLYCGYVSYKDKVHVKGIHEPIISEEQFYRVQEIFTRMGKNPNMNRDSASLLNNLVVCSKCGLGFVHRRKDTVSRGKKYHYRYYSCKTYKHTHELEKCGNKIWRADKLEELIINRVNNYSLASRNVDKEDELDSLSEKLKVEHAKKKRLFELYINGSYEVSELDSMMIDIDAQINYYESQIEANEELKKNKKIQENLANLATVDYDSLGFREKQLYLKGLINKIYIDGEQVTIEWL

SEQ ID NO: 5319 - protein, 452 aa, synthetic construct
MKAAIYIRVSTQEQVGNYSIQAQTEQLTALCRSKDWDVYDIFVDGGYSGSNMNRPALNEMLSKLHEIDAVVVYRLDRLSRSQRDTTTLIEEYFLKNNVEFVSLSETLDTSSPFGRAMIGILSVFAQLERETIRDRMEMGKIKRIEAGLPLTTAKGRTFGYDVIDTKLYINEEEAKQLQLIYDIFEEEQSITLLQKRLKKLGFKVRTYNRYNNWLTNDLYCGYVSYKDKVHVKGIHEPIISEEQFYRVQEIFTRMGKNPNMNRDNASLLSNLVVCSKCGLGFVHRSKDTMSRGKKYHYRYYSCKTYKHTHELEKCGNKTWRADKLEELIINRVNNYSFASRNADKEDELDSLNEKLKVEHARKKRLFDLYINGSYEVSELDSMMNDIDAQINYYESQIEASEELKKHKKIQENLADLATVDFDSLEFREKQLYLKSLINKIYIDGDQVTIDWL

SEQ ID NO: 5320 - protein, 452 aa, synthetic construct
MKAAIYIRVSTQEQVENYSIQAQTEKLTALCRSKDWDVYDIFIDGGYSGSNMNRPALNEMLSKLHEIDAVVVYRLDRLSRSQRDTTTLIEEYFLKNNVEFVSLSETLDTSSPFGRAMIGILSVFAQLERETIRDRMVMGKIKRIEAGLPLTTAKGRTFGYDVIDTKLYINEEEAKQLRLIYDIFEEEQSITSLQKRLKKLGFKVRTYNRYNSWLTNDLYCGYVSYKDKVHVKGIHEPIISEEQFYRVQEIFTRMGKNPNMNRDSASLLNNLVVCSRCGLGFVHRSKDTMSRGRKYHYRYYSCKTYKHTHELEKCGNKTWRADKLEELIINRVNNHSFASRNVDKEGELDSLNDKLKIEHAKKRRLFDLYINGSYEVSELDSMMNDIDARINYYESQIGANEGLKESKKIQENLADLATVDFDSLEFREKQLYLKSLINKIYIDGEQVTIEWL

SEQ ID NO: 5321 - protein, 485 aa, synthetic construct
MTKKVAIYTRVSTTNQAEEGFSIDEQVDRLTRYAEAMGWQVSGTYTDAGFSGAKLERPAMQRLINDIEDKAFDTVLVYKLDRLSRSVRDTLYLVKDVFTKNKIDFISLNESIDTSSAMGSLFLTILSAINEFERENIKERMTMGKLGRAKSGKSMMWTKTAFGYYHNRKTGILEIVPLQATIVEQIFTDYLSGVSLTKLRDKLNESGHIGKDIPWSYRTLRQTLGNPVYCGYIKFKDSLFEGMHRPIIPYETYLKVQKELEERQQQTYERNNNPRPFQAKYMLSGTARCGYCGAPLRIVLGHKRKDGSRTMKYHCANRFPRKTKGVTVYNDNRRCDSGTYDLRDLENTVIGNLIGFQENNDSLLEIINGNNQPILDTSSFKEQISQIDKKIQKNSDLYLNDFITMDELKDRTDSLQAEKKLLKAKISENKFNDSTGVFERVKTQLGSIPINELSYDNKKKIVNNLVSKVDVTADNVDIIFKFQLA

SEQ ID NO: 5322 - protein, 452 aa, synthetic construct
MKAAIYIRVSTREQVENYSIQAQTEKLTALCRSKDWDVYDIFIDGGYSGSNMNRPALNEMLSKLHEIDAVVVYRLDRLSRSQRDTITLIEEYFLKNNVEFVSLSETLDTSSPFGRAMIGILSVFAQLERETIRDRMVMGKIKRVEAGLPLTTAKGRTFGYDVIDTKLYINEEEAKQLQLIYDIFEEEQSITFLQQRLKKLGFKVRTYNRYKDWLTNDLYCGYVSYKDKVHVKGIHEPIISEEQFYRVQEIFTRMGKNPNMNRDSASLLSNLVVCSKCGLSFVHRRKDTMSRGKKYHYRYYSCKTYKHTHELEKCGNKIWRADKLEELIINRVNNYSFASRNVDKEDELDGLNERLKIEHAKKKRLFDLYINGSYEVSELDSMMNDIDAQINYYESQIEANEELKKNKKIQENLANLATVDYDSLEFREKQLYLKSLINKIYIDGEQVTIEWL

SEQ ID NO: 5323 - protein, 485 aa, synthetic construct
MTKKVAIYTRVSTTNQAEEGFSIDEQIDRLTKYAEAMGWQVSDTYTDAGLSGAKLERPAMQRLINDIENKAFDTVLVYKLDRLSRSVRDTLYLVKEVFTKNKIDFISLNESIDTSSAMGSLFLTILSAINEFERENIKERMTMGKLGRAKSGKSMMWTKTAFGYYHNRKTGILEIVPLQATIVEQIFTDYLSGISLTKLRDKLNESGHIGKDIPWSYRTLRQTLDNPVYCGYIKFKDSLFEGMHKPIIPYETYLRVQRELEERQRQTYERNNNPRPFQAKYMLSGMARCGYCGAPLRIVLGHKRKDGSRTMKYHCANRFPRKTKGVTVYNDNKKCDSGTYDLSNLENTVIDSLIGFQENNDSLLKIINGNNHPVLDTSSFRKQISQIDKKIQKNGDLYLNDFITMDELKDRTDSLQAEKKRLKAIISEDKFNDSNDVFELVKTQLGSVPINELSYDNKKKIVNNLVSKVDVTADNVDIIFKFQLS

SEQ ID NO: 5324 - protein, 469 aa, synthetic construct
MSYTTPVRAAVYLRISEDRSGEQLGVARQREDCLKLCGQRKWAPVEYLDNDVSASTGKRRPAYEQMLADITAGKIAAVVAWDLDRLHRRPVELEAFMSLADERRLALATVAGDVDLATPQGRLVARLKGSVAAHETEHKKARQRRAARQKAERGLPNWSKAFGYLPGPNGPEPDPRTAPLVRQAYADILAGASLGDVCRQWNDAGAFTITGRPWTTTTLSKFLRKPRNAGLRAYKGARYGPVDRDAIVGKAQWSPLVDEATFWAAQAVLDAPGRAPGRKSVRRHLLTGLAGCGKCGNHLAGSYRTDGRVVYVCKACHGVTILAENIEPILYHIVAERLAMPDAVDLLRREIHDAAEAETIRLELETLYGELDCLAVERAEGLLTARQVRISTDIVNAKITKLQARQLDQERLRVFDGIPLGTPQVAAVIAELSPDRFRAVLDVLAEVVVQPVGKSGRIFNPERVQVNWR

SEQ ID NO: 5325 - protein, 485 aa, synthetic construct
MTKKVAIYTRVSTTSQAEEGFSIDEQIDRLTKYAEAMGWQVSDTYTDAGSSGAKLERPAMQRLINDIEDKAFDTVLVYKLDRLSRSVRDTLYLVKDVFTKNKIDFISLNESIDTSSAMGSLFLTILSAINEFERENIKERMTMGKLGRAKSGKSMMWTKTAFGYYHNRKTGILEIVPLQATIVEQIFTDYLSGISLTKLRDKLNESGHIGKDIPWSYRTLRQTLDNPVYCGYIKFRGSLFEGMHKPIIPYETYLKVQKELEERQQQAYERNNNPRPFQAKYMLSGMARCGYCGAPLKIVLGHKRKDGSRTMKYHCANRFPRKTKGVTVYNDNKKCDSGTYDLSNLENTVIDILIGFQENNDSLLKIINGNNQPILDTSSFKKQISQIDKKIQKNSDLYLNDFITMDELKDRTDSLQAEKKLLKAKISENKFNNSTDVFELVKTQLGSIPINELSYDNKKKIVNNLVSKVDVTADNVDIIFKFQLA

SEQ ID NO: 5326 - protein, 469 aa, synthetic construct
MSYTIPVRAAVYLRISEDRSGEQLGVARQREDCLKLCDQRKWVPVEYLDNDVSASTGKHRPAYEQMLVDIAAGKIAAVVAWDLDRLHRRPIELEAFMSLADEKRLALATVAGDVDLATPQGRLVARLRGSVAAHEIEHKKARQRRAARQKAERGYPNWSKAFGYLPGPNGPEPDPRTAPLVSQAYADILAGASLGDVCRRWNNAGAFTITGRPWATTTLSKFLRKPRNAGLRAYKGARYGPVDRDAIVGKAQWSPLVDEATFWAAQAVLDAPGRAPGRKSVRRHLLTGLAGCGKCGSHLAGSYRTDGRVVYVCKACHGVAILADNIEPILYHIVAERLAMPDAVDLLRREIHDAVEAETIRLELETLYGELDRLAVERAEGLLTARQVKISTDIVNAKITKLQARQLDQERLRVLDGIPLGTPQVVGMVAELSPDRFRAVLDVLAEVVVQPVGKSGRIFNPERVQVNWR

SEQ ID NO: 5327 - protein, 452 aa, synthetic construct
MKAAIYIRVSTREQVENYSIQAQTEKLTALCRSKDWDVYDIFIDGGYSGSNMNRPALNEMLSKLHEIDAVVVYRLDRLSRSQRDTITLIEEYFLKNNVEFVSLSETLDTSSPFGRAMIGILSVFAQLERETIRDRMVMGKIKRIEAGLPLTIAKGRTFGYDVVDTRLYINEEEARQLQLIYDIFEEEQSITFLQKRLKKLGFKVRTYSCYNNWLTNDLYCGYVSYKDKVHVKGIHEPIISEEQFYRVQEIFTRMGKNPNMNRDSASLLNNLVVCSKCGLGFVHRRKDTMSRGKKYHYRYYSCKTYKHIHELEKCGNKIWRADKLEELIINRVNNYSFASRNVDKEDELDSLNERLKIEHAKKKRLFNLYINGSYEVSELDSMMSDIDAQINYYESQIEANEELRKNRKIQENLAGLATVDFDSLEFREKQLYLRSLINKIYIDGEQVTIEWL

SEQ ID NO: 5328 - protein, 452 aa, synthetic construct
MKAAIYIRVSTREQVENYSIQAQTEKLTALCRSKDWDVYDIFIDGGYSGSSMNRPALNEMLSKLHEIDAVVVYRLDRLSRSQRDTITLIEEYFLKNNVEFVSLSETLDTSSPFGRAMIGILSVFAQLERETIRDRMVMGKIKRIEAGLPLTTAKGRTFGYDVIDTKLYINEEEAKQLRLIYDIFEEEQSITLLQKRLKKLGFKVRTYNRYSNWLTNDLYCGYVSYKDKVHVKGIHEPIISEEQFYRVQEIFARMDRNPNMNRDSASLLNSLVVCSKCGLGFVHRRKDTMSRGKKYHYRYYSCKTYKHTHELEKCGNKIWRADKLEELIINRVNNYSFASRDVDKGDELDSLNEKLKIEHAKKKRLFDLYINGSYNVSELDSMMNDIDAQINYYESQIEANEELKKNKKIQENLAGLATVDFDSLEFREKQLYLKSLINKIYIDGEQVTIEWL

SEQ ID NO: 5329 - protein, 485 aa, synthetic construct
MTKKVAIYTRVSTTNQAEEGFSIDEQVDRLTKYAEAMGWQVSDTYTDAGYSGAKLERPAMQRLINDIENKAFDTVLVYKLDRLSRSVRDTLYLVKDVFTKNKIDFISLNESINTSSAMGSLFLTILSAINEFERENIKERMTMGKLGRAKSGKSMMWTKTAFGYNHNRKTGILEIVPLQATIVEQIFTDYLSGISLTKLRDKLNESGHIGKDIPWSYRTLRQTLDNPVYCGYIKFKDSLFEGMHKPIIPYETYLKVQKELEERQQQAYERNNNPRPFQTKYMLSGMARCGYCGAPLKIVLGHKRKDGSRTMKYHCANRFPRKTKGVTVYNDNKKCDSGTYDLSNLENTVIDNLIGFQENNDSLLKIINGNNQPILDTSSFKKQISQIDKKIQKNSDLYLNDFITMDELKDRTNSLQAEKKLLKAKISENKFNDSTDVFELVKTQLGSIPISELSYDNKKRIVNNLVSKVDVTADNVDIIFKFQLA

SEQ ID NO: 5330 - protein, 469 aa, synthetic construct
MSYTTPVRAAVYLRISEDRSGEQLGVARQREDCLKLCGQRKWVPVEYLDNDVSASTGKRRPAYEQMLADITAGKIAAVVAWDLDRLHRRPIELEAFMSLADEKRLALATVAGDVDLATPQGRLVARLKGCVAAHETEHKKARQRRAARQKAERGLPNWSKAFGYLPGPNGPEPDPRTAPLVKQAYADILAGASLGDVCRQWNDAGAFTITGRPWTTTTLSKFLRKPRNAGLRAYKGARYGPVDRDAIVGKAQWSPLVDEATFWAAQAVLDAPGRAPGRKSVRRHLLTGLAGCGKCGNHLAGSYRTDGRVVYVCKACHGVAILADNIEPILYRIVAERLAMPDAVDLLRREIHDAAEAETIRLELDTLCGELDRLAVERAEGLLTARQVKISTDIVNAKITKLQARQLDQERLRVLDGIPLGTPQVAGMIAELSPDRFRAVLDVLAEVVVQPVGKGGRIFSPERVQVNWR

SEQ ID NO: 5331 - protein, 469 aa, synthetic construct
MSYTTPVRAAVYLRISEDRSGEQLGVARQREDCLKLCDQRKWVPVEYLDNDVSASSGKRRPAYEQMLADITAGKIAAVVAWDLDRLHRRPVELEAFMSLADEKRLALATVAGDVDLATPQGRLVARLKGSVAAHETEHKKARQRRAARQKAERGYPNWSKAFGYLPGPNGPGPDPRTAPLVKQAYADILAGASLGDVCRQWNDAGAFTITGRPWTTSALSKFLRKPRNAGLRAYKGARYGPVDRDAIVGKAQWSPLVDEATFWAAQAVLDAPGRAPGRKSVRRHLLTGLVGCGKCGNHLAGSYRTDGRVVYVCKTCHGVTIRADNIEPILYHIVAERLAMPDAVGLLRREIHDAAEAETIRLELETLYGELDRLAVERAEGLLTARQVKICTDIVNAKISKLRARQLDQERLRVFEGIPLGTPQVAGMIAELSPDRFRAVLDVLAEVVVQPVGKSGRIFNPERVQVNWR

SEQ ID NO: 5332 - protein, 485 aa, synthetic construct
MTKKVAIYTRVSTTNQAEEGFSIDEQIDRLTKYAEAMGWQVSDTYTDAGVSGAKLERPAMQRLINDIANKAFDTVLVYKLDRLSRSVRDTLYLVKDVFTKNKIDFISLNESIDTSSAMGSLFLTILSAINEFERENIKERMTMGKLGRAKSGKSMMWTKTAFGYYHNRKTGILEIVPLQATIVEQIFTDYLSGISLTKLRDKLNESGHIGKDIPWSYRTLRQTLDNPVYCGYIKFKDSLFEGMHKPIIPYETYLKVQKELEERQQQTYERNNNPRPFQAKYMLSGMARCGYCGAPLRIVLGHKRRDGSRTMKYHCANRFPRKTKGVTVYNDNKKCDSGTYDLSNLENTVIDSLIGFQENNDSLLKIINGSNQPILDTSSLKKQISQIDRKIQKTSDLYLNDFITMDELRDRTDSLQAEKKLLKAKISENKFDDSTDVFELVKTQLGSIPINELSYDNKKKIVNNLVSKVDVTADNVDIIFKFQLA

SEQ ID NO: 5333 - protein, 452 aa, synthetic construct
MKAAIYIRVSTREQVENYSIQAQTERLTALCRSKDWDVYDIFIDGGYSGSNMNRPALNEMLSKLHEIDAVVVYRLDRLSRSQRDTITLIEEYFLKNNVEFVSLSETLDTSSPFGRAMIGILSVFAQLERETIRDRMVMGKIKRIEAGLPLTTAKGRTFGYDVIDTKLYINEEEAKQLQLIYDIFEEEQSITFLQKRLKKLGLKVHTYNRYSSWLTNDLYCGYVSYKDKVHVKGIHESIISEEQFYRVQEIFTRMGKNPNMNRDSASLLNNLVVCSKCGLGFVHRRKDTTSRGKKYHYRYYSCKTYKHIHELERCGNKIWRADKLEELIINRVNNYSLASRNVVKEDELDSLNEKLKIEHAKKKRLFDLYINGSYDVSVLDSMMNDINAQINYYESRIEANEELKKNKKTQENLAELATVDFDSLEFREKQLYLKSLINKIYIDGEQVTIEWL

SEQ ID NO: 5334 - protein, 452 aa, synthetic construct
MKAAIYIRVSTQEQVGNYSIQAQTEKLTALCRSKDWDVYDIFVDGGYSGSNMNRPALNEMLSKLHEIDAVVVYRLDRLSRSQRDTTTLIEEYFLKNNVEFVSLSETLDTSSPFGRAMIGILSVFAQLERETIRDRMVMGKIKRIEAGLPLTTAKGRTFGYDVIDTKLYINEEEAKQLQLIYDIFEEEQSITSLQKRLKKLGFKVRTYNRYNSWLTNDLYCGYVSYKDKVHVKGIHEPIISEEQFYRVQEIFTRMGKNPNMNRDSASLLNSLVVCGKCGLSFVHRSKDTMSRGKKYHYRYYSCKTYKHTHELEKCGNKTWRADKLEELIINRVNNYSFASRNVDKEGELDGLNEKLKIEHAKKKRLFDLYINGSYEVSELDSMMNDIDAQINYYESQIEANEELKRNKKIQGNLADLATVDFDSLGFREKQLYLKSLINKIYIDGEQVTIEWL

SEQ ID NO: 5335 - protein, 485 aa, synthetic construct
MTKKVAIYTRVSTTNQAEEGFSIDEQVDRLTKYAEAMGWQVSDTYTDAGFSGAKLERPAMQRLINDIENKAFDTVLVYKLDRLSRSVRDTLHLVKDVFTKSKIDFISLNESIDTSSAMGSLFLTILSAINEFERENIKERMTMGKLGRARSGKSMMWTKTAFGYYHNRKTGILEIVPLQATIVEQIFTDYLSGISLTKLRDKLNESGHIGKDIPWSYRTLRQTLDNPVYCGYIKFKDSLFEGMHKPIIPYETYLKVQRELEERQQQTYERNNNPRPFQAKYMLSGMARCGYCGAPLKIVLGHRRKDGNRTMKYHCANRFPRKTKGVTVYNDNRKCDSGTYDLSNLENTVIDNLIGFQENNDSLLKIINGNNQPILDASSFKKQISQIDKKIQKNSDLYLNGFITMDELKDRTESLQAEKKLLKAKISENKLNDSADVFELVKTQLGNIPINELSYDSKKRIVNNLVSKVDVTADNVDIIFKFQLA

SEQ ID NO: 5336 - protein, 452 aa, synthetic construct
MKAAIYIRVSTREQVENYSIQAQTEKLTALCRSKDWDVYDIFIDGGYSGSNMNRPALNEMLSKLHEIDAVVVYRLDRLSRSQRDTITLIEEHFLKNNVEFVSLSETLDTSSPFGRAMIGILSVFAQLERETIRDRMVMGKIKRIEAGLPLTTAKGRTFGYDVIDTKLYINEEEAKQLQLIYDIFEEEQSITSLQKRLKELGFKVRTYNRYNNWLTNDLYCGYVSYKDKVHVKGIHEPIISEEQFYRVQEIFTRMGKNPNMNRDSASLLSNLVVCSKCGLSFVHRRKDTMSRGKKYHYRYYSCKTYKHTHELEKCGNKIWRADKLEELIIDRVNNYSLASRSVVKEDELDSLNEKLKIEHAKKKRLFDLYINGSYEVSELDSMMNDIDAQINYYESQIEANEELRKNKKIQENLADLATVDYDSLEFREKQLHLKSLINKIYIDGEQVTIEWL

SEQ ID NO: 5337 - protein, 485 aa, synthetic construct
MTKKVAIYTRVSTTNQAEEGFSIDEQIDRLTKYAEAMGWQVSDTYTDAGFSGAKLERPAMQRLINDIENKAFDTVLVYKLDRLSRSVRDTLYLVKDVFTKSEIDFISLSESIDTSSAMGSLFLTILSAINEFERENIKERMTMGKLGRAKSGKSMMWTKTAFGYYHNRKTGILEIVPLQATIVEQIFTDYLSGISLTKLRDKLNESGHIGKDIPWSYRTLRQTLDNPVYCGYIKFKDSLFEGMHKPIIPYETYLKVQKELEERQQQTYERNNNPRPFQAKYMLSGMARCGYCGAPLRIVLGHKRKDGSRTMKYHCANRFPRKTKGVTVYNDNKKCDSGTYDLSNLENIVIDNLIGFQEDNESLLKIISGNNQPVLDTSSFKKQISQIDKKIQKNSELYLNDFITMDELKDRTNSLQAEKKLLKAKISENKFNDSTDVFGLVKAQLGSIPINELSYDNKKKIVNNLVSKVDVTADSVDIIFKFQLA

SEQ ID NO: 5338 - protein, 485 aa, synthetic construct
MTKKVAIYTRVSTTNQAEEGFSIDEQIDRLTKYAEAMGWQVSDTYTDAGLSGAKLERPAMQRLINDIENKAFDTVLVYKLDRLSRSVRDTLYLVKDVFTKNKIDFVSLNESIDTSSAMGSLFLTILSAINEFERENIKERMTMGKLGRAKSGKSMMWTKTAFGYYHNRKTGILEIVPLQATIVEQIFTDYLSGTSLTKLRDKLNESGHIGKDIPWSYRTLRQTLDNPVYCGYIKFKDSLFEGMHKPIIPYETYLKVQKELEERQQQTYERNNNPRPFQAKYMLSGMARCGYCGAPLKIVLGHKRKDGSRAMKYHCANRFPRKTKGVTVYNDNKECDSGTYDLSNLENTVIDSLIGFQENDESLLKIINGNNQPVLDTSSFKEQISQIDKKIQKNSDLYLNDFITMDELKDRTDSLQAEKKLLKAKISENKFNDRTDVFELVKTQLGNVPINELSYDNKKKIVNNLVSKVDVTADNVDIIFKFQLT

SEQ ID NO: 5339 - protein, 452 aa, synthetic construct
MKAAIYIRVSTREQVENYSIQAQTEKLTALCRSKDWDVYDIFIDGGYSGSNMNRPALNEMLSKLHEIDAVVVYRLDRLSRSQRDTITLIEEYFLKNNVEFVSLSETLDTSSPFGRAMIGILSVFAQLERETIRDRMVMGKIKRVEAGLPLTTAKGRTFGYDVIDTKLYINEEEAKQLQLIYDIFEEEQSITFLQKRLKKLGFKVRTYSCYNNWLTNDLYCGYVSYKDKVHVKGIHEPIISEEQFYRVQEIFTRMGKNPNMNRDSASLLNGLVVCSKCGLGFVHRRKDTMSRGKKYHYRYYSCKTYKHTYELEKCGNKIWRADKLEELITNRVNNYSFASRNADKEDELDSLNEKLKIEHAKKKRLFDLYINGSYEVSELDSMMNDIDAQINYYESQIEANEELKKNKKIQENLANLATVDYDSLEFREKQLYLKSLISKIYIDGEQVTIEWL

SEQ ID NO: 5340 - protein, 452 aa, synthetic construct
MKAAIYIRVSTREQVENYSIQAQTEKLTALCRSKDWDVYDIFIDGGYSGSNMNRPALNEMLSKLHEIDAVVVYRLDRLSRSQRDTITLIEEYFLKNNVEFVSLSETLDTSSPFGRAMIGILSVFAQLERETIRDRMVMGKIKRIEAGLPLTTAKGRTFGYDVIDTKLYINEEEAEQLQLIYDIFEEEQSITFLQKRLKKLGFKVRTYSCYNNWLTNDLYCGYVSYKDKVHVKGIHEPIISEEQFYRVQEIFTRMGKNPNMNRDSASLLNNMVVCSKCGLGFVHRRKDTMSRGKKYHYRYYSCKTYKHIHELEKCGNKIWRADKLEELIINRVNSYSFASRNVDKEDELDSLNEKLKIEHAKKKRLFDLYINGSYEVSELDSMMNDIDAQINYYEGQIEVNEELKKNKKIQENLADLATVDFDSLEFREKQLYLKSLINKIYIDGEQVTIEWL

SEQ ID NO: 5341 - protein, 469 aa, synthetic construct
MSYTTPVRAAVYLRISEDRSGEQLGVARQREDCLKLCGQRKWVPVEYLDNDVSASTGKRRPAYEQMLADITAGKIEAVVAWDLDRLHRRPIELEAFMSLADEKRLALATVAGDVDLATPQGRLVARLKGCVAAHETEHKKARQRRAARQKAERGHPNWSKAFGYLPGPNGPEPDPRTAPLVKQAYADILAGASLGDVCRQWNDAGAFTITGRPWTTTALSKFLRKPRNAGLRAYKGARYGPVDRDAIVGKAQWSPLVDEATFWATQAVLDAPGRAPGRKSVRRHLLTGLAGCGKCGNHLAGSYRTDGRIVYVCKACHGVSILAVNIEPILYHIVAERLAMPDAVDLLCREIHDAAGAEAIRLELETLYGELDRLAVERAEGLLTARQVKISTDIVNAKITKLQARQLDQERLRVFDGIPLGTPQVAGVIAELSPDRFRAVLGVLAEVVVQPVGKSGRILNPERVQVNWR

SEQ ID NO: 5342 - protein, 470 aa, synthetic construct
MSYTTPVRAAVYLRISEDRSGEQLGVARQREDCLKLCGQRKWVPVEYLDNDVSASTGKRRPAYEQMLADITAGKIAAVVAWDLDRLHRRPIELEAFMSLADEKRLALATVAGDVDLATPQGRLVARLKGSVAAHETEHKRARQRRAARQKAERGHPNWSKAFGYLPGPNGPEPDPRTAPLVKQAYADILAGASLGDVCRQWNDAGAFTITGRPWTTTTLSKFLRKPRNAGLRAYKGARYGPVDRDAIVGKALWSPLVNEATFWAAQAVLDAPGRAPGRKSVRRHLLTGLAGCGKCGNHLAGSYRTDGRVVYVCKTCHGVAILADNIEPTLYHIVAERLAMPDAVDLLCREVHDVAEAETIRLELETLYSELDRLAVERAEGLLTARQVKISTDIVNAKITRLQARQLDQERLRVFEGIPLGTPQVTGAIAGLSPDRFRAVLDVLAEVVVQPVGKSGRIFNPERVQVNWRQ

SEQ ID NO: 5343 - protein, 452 aa, synthetic construct
MKAAIYIRVSTQEQVGNYSIQAQTEKLTALCRSKGWDVYDIFIDGGYSGSNMNRPALNEMLSKLHEIDAVVVYRLDRLSRSQRDTTTLIEEYFLKNNVEFVSLSETLDTSSPFGRAMIGILSVFAQLERETIRDRMVMGKIKRIEAGLPLTTAKGRTFGYDVIDTKLYINEEEAKQLQLIYDIFEEEQSITSLQKRLKKLGFKVRTYNRYNNWLTNDLYCGYVSYKDKVHVKGIHEPIISEEQFYRVQEIFTRMGKNPNMNRGSASLLNNLVVCSKCGLGFVHRSKDTMSGGKKYHYRYYSCKTYKHTHELEKCGNKIWRADKLEELIINRVNNYSSASRNVDKDDELDSLNEKLKIEHAKKKRLFDLYINGSYEVSELDSMMNDIDAQINYYESQIEANEELKKNKKIQEDLADLATVDFDSLEFREKQLYLKSLINKIYIDGERVTIEWL

SEQ ID NO: 5344 - protein, 452 aa, synthetic construct; identical to SEQ ID NO: 5294

SEQ ID NO: 5345 - protein, 452 aa, synthetic construct
MKAAIYIRVSTREQVENYSIQAQTEKLTALCRSKDWDVYDIFIDGGYSGSNMNRPALNEMLSRLHEIDAVVVYRLDRLSRSQRDTITLIEEYFLKNNVEFVSLSETLDTSSPFGRAMIGILSVFAQLERETIRDRMVMGKIKRIEAGLPLTTAKGRTFGYDVIDTKLYINEEEAKQLQLIYDIFEEEQSITFLQKRLKKLGFKVRTYNRYNSWLTNDLYCGYVSYKDKVHVKGIHEPIISEEQFYRVQEIFTRMGKNPNMNRDSASLLNNLVVCSKCGLGFVHRRKDTTSRGKKYHYRYYSCKTYKHTHELEKCGNKIWRADKLEELIINRVNNYSFASRNVDEVDEPDNLNEKLKVEHAKRKRLFDLYINGSYNVSELDSMMNDIDAQINYYESQIEANEELKKSKKIQENLASLATADFDSLEFREKQLYLKSLINKIYIDGEQVTIEWL

SEQ ID NO: 5346 - protein, 452 aa, synthetic construct
MRAAIYIRVSTREQVENYSIQAQIEKLTALCRSKDWDVYDIFVDGGYSGSNMNRPALNEMLSKLHEIDAVVVYRLDRLSRSQRDTITLIEEYFLKNNVEFVSLSETLDTSSPFGRAMIGILSVFAQLERETIRDRMVMGKIKRIEAGLPLTTAKGRTFGYDVIDAKLYINEEEAKQLQLIYDIFEEEQSITFLQKRLKELGFKVRTYSRYNSWLTNDLYCGYVSYKDKVHVKGIHEPIISEEQFYRVQEIFTRMGKNPNMNRDSASLLNNLVVCSKCGLGFVHRRKDTTSRGKKYHYRYYSCKTYKHTHELEKCGNKIWRADKLEELIINRVNNYSSASRNVDKEDELDGLNEKLKIEHAKKKRLFDLYINGSYEVSELDSKMNDIDAQINYYESQIEANEELKKNKKIQENLANLATVDYDSLEFREKQLYLKSLINKIYIDGEQVTIEWL

SEQ ID NO: 5347 - protein, 452 aa, synthetic construct
MKAAIYIRVSTREQVENYSIQAQTEKLTALCRSKDWDVYDIFIDGGYSGSNMNRPALNEMLSKLHEIDAVVVYRLDRLSRSQRDTITLIEEYFLKNNVEFVSLSETLDTSSPFGRAMIGILSVFAQLERETIRDRMVMGKIKRVEAGLPLTTAKGRTFGYDVIDTKLYINEEEAKQLQLIYDIFEEEQSITFLQKRLKKLGFKVRTYSRYNSWLTNDLYCGYVSYKDIVHVKGIHEPIISEEQFYRVQEIFTRTGENPNMNRDSASLLNNLVVCSKCGLGFVHRRKDTMSRGKKYHYRYYSCKTYKHTHELEKCGNKIWRADRLEELIINRVNNYSFASRNADKEDELDSLNGKLKIEHAKKKRLFDLYINGSYEVSELDSMMNDIDAQINYYEGQIEANEELKKNRKIQENLANLATVDYDSLEFREKQLYLKSLINKIYIDGEQVTIEWL

SEQ ID NO: 5348 - protein, 485 aa, synthetic construct
MTKKVAIYTRVSTTNQAEEGFSIDEQIDRLTKYAEAMGWQVSDTYTDAGFSGAKLGRPAMQRLINDIENKAFDTVLVYKLDRLSRSVRDTLYLVKDVFTKNKIDFVSLNESIDTSSAMGSLFLTILSAINEFERENIKERMTMGKLGRAKSGKSMMWTKTAFGYYHNRKTGILEIVPLQATIVEQIFTDYLSGISLTKLRDKLNESGHIGKDIPWSYRTLRQTLDNPVYCGYIKFKDSLFEGMHRPIIPYETYLRVQKELEERQQQTYERNNNPRPFQAKYMLSGIARCGYCGAPLRIVLGHKRKDGSRTMKYHCANRFPRKTKGITEYNDNKKCDSGTYDLSNLEDTVIDNLIGFQEDNDSLLKIINGNNQPILGTSSLKKQISQIDKKIQKNSDLYLNDFITMDELKDRTDSLQAEKKLLKARISENKFGDSTDVFELVKTQLGSIPINELSYDNKKKIVNNLVSKVDVTADNVDIIFKFQLA

SEQ ID NO: 5349 - protein, 469 aa, synthetic construct
MSYTTPVRAAVYLRISEDRSGEQLGVARQREDCLKLCGQRNWEPVEYLDNDVSASTGKRRPAYEQMLADITAGKIAAVVAWDLDRLHRRPIELEAFMSLADEKRLALATVAGDVDLATPQGRLVARLKGSVAAHETEHKKARQRRAARQKAERGHPNWSKAFGYLPGPNGPEPDPRTAPLVKQAYTDILAGASLGDVCRRWNDAGAFTITGRPWTTTILSKFLRKPRNAGLRAYKGARYGPVDRDAIVGKAQWSPLVDEATFWAAQAVLDAPGRAPGRKSVRRHLLTGLAGCGKCGNHLAGSYRTDGRVVYVCKACHGVAILADNIEPILYHIVAERLAMPDAVDLLRREIHDAAEAETIRLELETLYDELDRLAVERAEGLLTARQVKISTGIVNAKITKLQARQLDQERLRVFDGIPLGTPQVAGMIAELSPDRFRAVLDVLAEVVVQPVGKGGRVSNPERVRVNWR

SEQ ID NO: 5350 - protein, 452 aa, synthetic construct
MKAAIYIRVSTREQVENYSIRAQTEKLTALCRSKDWDVYDIFIDGGYSGSNMNRPALNEMLNKLHEIDAVVVYRLDRLSRSQRDTITLIEEYFLKNNVEFVSLSETLDTSSPFGRAMIGILSVFAQLERETIRDRMVMGKIKRIEAGLPLTTAKGRTFGYDVIDTKLYINEEEAKQLQLIYDIFEEEQSITFLQKRLKKLGFKVHTYNRYNNWLTNDLYCGYVSYKDKVHAKGVHEPIISEEQFYRVQEIFTRMGRNPNMNRDSASLLNNLVVCGKCGLGFVHRRKDAASRDKKYHYRYYSCKTYKHIHELEKCGNKIWRADKLEELIVNRVNNYSFASRNADKEDELDSLNEKLKTEHAKKKRLFDLYINGSFEVSELDSMMNDIDAQISYYESQIEANEELKKSKRIQENLANLATVDFDSLEFREKQLYLKSLINKIYIDGEQVTIEWL

SEQ ID NO: 5351 - protein, 469 aa, synthetic construct
MSYTTPVRAAVYLRISEDRSGEQLGVARQREDCLKLCDQRKWVPVEYLDNDVSASTGKRRPAYEQMLADITAGKIAAVVAWDLDRLHRRPIELEAFMSLADEKRLALATVAGDIDLATPQGRLVARLKGSVAAHETEHKKARQRRAARQKAERGLPNWSKAFGYLPGPNGPEPDPRTAPLVKQAYADILAGASLGDVCRRWNDAGAFTITGRPWTTTTLSKFLRKPRNAGLRAYKGARYGPVDRDAIVGKAQWSPLVDEATFWAAQAVLDAPGRAPGRKSVRRHLLTGLAGCGKCGNHLAGSYRTDGRVVYVCKACHGVAILADNIEPILYHIVAERLAMPDAVDLLCREIHDAVEAETIRLELETLYGELDRLAVERAEGLLTARQVKISTDIVNAKITKLRARRLDQERLRVFDGIPLGTPQVAGMIAELSPDRFRAVLDVLAEVVVQPVGKSGRISNPERVQVNWR

SEQ ID NO: 5352 - protein, 452 aa, synthetic construct
MKAAIYIRVSTREQVENYSIQAQTEKLTALCRSKDWDVYDIFIDGGYSGSNMNRPALNDMLSRLHEIDAVVVYRLDRLSRSQRDTITLIEEYFLKNNVEFVSLSETLDTSSPFGRAMIGILSVFAQLERETIRDRMVMGKIKRIEAGLPLTTAKGRTFGYDVIDTKLYINEEEARQLQLVYDIFEEEQSITFLQKRLKKLGFKVRTYSRYNNWLTNDLYCGYVSYKDKVHVKGIHEPIISEEQFNRVQEIFTRMGKNPNMNRDSASLLNNLVVCSKCGLGFVHRRKDTVSRGKKYHYRYYSCKTYKHTHELEKCGNKIWRADKLEELIINRVNNYSLASRNVDKEDELDSLNEKLKIEHAKKKRLFALYINGSCEVGELDSMMNDIDAQINYYESQIEASEELKRNKKTQENLAELATVDFDSLEFREKQLYLKSLIYKVYIDGEQVTIEWL

SEQ ID NO: 5353 - protein, 452 aa, synthetic construct
MKAAIYIRVSTQEQVGNYSIQAQTEKLTALCRSKDWDVYDIFIDGGYSGSNMNRPALNKMLSKLHEIDAVVVYRLDRLSRSQRDTTTLIEEYFLKNNVEFVSLSETLDTSSPFGRAMIGILSVFAQLERETIRDRMVMGKIKRIEAGLPLTTAKGRTFGYDVIDTKLYINEEEAKHLQLIYDIFEEEQSITFLQKRLKKLGFKVRTYNRYHNWLTNDLYCGYVSYKDKVHVKGIHEPIISEEQFYRVQEIFTRMGKNPNMNRDSASLLNNLVVCSKCGLGFVHRSKDTMSRGKKYHYRYYSCKTYKHTHELEKCGNKTWRADKLEELIINRVNSYSFASRNVDKEDELDSLNEKLKIEHAKRKRLFDLYINGSYEVSELDSMMNDIDAQINYYESQIEANEELRRNKKIQENLADLATVDFDSLVFREKQLYLKSLINKIYIDGEQVTIEWL

SEQ ID NO: 5354 - protein, 452 aa, synthetic construct
MKAAIYIRVSTREQVENYSIQAQTEKLTALCRSKDWDVYDIFIDGGYSGSNMNRPALNEMLSKLHEIDAVVVYRLDRLSRSQRDTITLIEEYFLKNNVEFVSLSETLDTSSPFGRAMIGILSVFAQLERETIRDRMVMGKIKRIEAGLPLTTAKGRTFGYDVIDTKLYINEEEAKQLQLIYDIFEEEQSITLLQKRLKELGFKVRTYNRYNNWLTNDLYCGYVSYKDKVHVKGIHEPIISEEQFYRVQEIFTRMGKNPNMNRGSASLLSNLVVCGKCGLGFVHRRKDAMSRDKKYHYRYYSCKTYKHIHELEKCGNKIWRADKLEELVINRVNNYSLASRNVDKEDELDSLNEKLKIEHAKKKRLFDLYINGSYEVSELDSMMNDIDAQINYYESQIGANEELRKDKKIQENLAHLATVDFDSLEFREKQLYLKSLINKIYIDGEQVTIEWL

SEQ ID NO: 5355 - protein, 469 aa, synthetic construct
MSYTTPVRAAVYLRISEDRSGEQLGVARQREDCLKLCGQRKWVPVEYLDNDVSASTGKRRPAYEQMLADITAGKIAAVVAWDLDRLHRRPVELEAFMSLADEKHLALATVAGDVDLATPQGRLVARLKGCVAAHETEHKKARQRRAARQKAERGLPNWSKAFGYLPGPNGPEPDPRTAPLVEQAYADILAGASLGDVCRQWNDAGASTITGRPWTTTALSKFLRKPRNAGLREYKGARYGPVDRDAIVGKAQWSPLVDEATFWAAQAVLDAPGRAPGRKSVRRHLLTGLAGCGKCGDHLAGSYRTDGRVVYVCKTCHGVAILADNIEPILYHIVAERLAMPDAVDLLRREIHDAAEAETIRLELETLYGELDRLAVERAEGLLTARQVKISTDIVDAKITKLRARQLDQERLRVLDGIPLGTPQVADMIAELSPNRFRAVLDVLAEVVVQPVGKSGRIFNPERVQVNWR

SEQ ID NO: 5356 - protein, 485 aa, synthetic construct; identical to SEQ ID NO: 4458

SEQ ID NO: 5357 - protein, 469 aa, synthetic construct
MCYTTPVRAAVYLRISEDRSGEQLGVARQREDCLKLCDQRKWVPVEYLDNDVSASTGKRRPAYEQMLADIAAGKIAAVVAWDLDRLHRRPIELEAFMSLADEKRLALATVAGDVDLATPQGRLVARLKGSVAAHETEHKRARQRRAARQKAERGHPNWSKAFGYLPGPNGPEPDPRTAPLVKQAYADILAGASLGDVCRQWNDAGAFTLTGRPWTTTTLSKFLRKPRNAGLRAYKGARYGPVDRDAIVGKAQWSPLVDEATFWAAQAVLDAPGRAPGRKSVRRHLLTGLAGCGKCGNHLAGSYRTDGRVVYVCKACHGVAILADNIEPILYHTVAERLVMPDAVDLLRREIHDAAEAETIRLELETLYGELDRLAVERAEGLLTARQVRICTDIVSAKITKLQARQLDQERLRVLDGIPLGTPQVAGMIAELSPDRFRAVLDVLAEVVVQPVGKSGRIFNPERVQVNWR

SEQ ID NO: 5358 - protein, 452 aa, synthetic construct
MKAAIYIRVSTREQVENYSIQAQTEKLTALCRSKDWDVYDIFIDGGYSGSNMNRPALNEMLSKLHEIDAVVVYRLDRLSRSQRDTITLIEEYFLKNNVEFVSLSETLDTSSPFGRAMIGILSVFAQLERETIRDRMMMGKIKRVEAGLPLTTAKGRTFGYDVIDTKLYINEEEAKQLQLIYDIFEEEQSITFLQKRLKKLGFKVRTYNRYNSWLTNDLYCGYVSYKGKVHVKGIHEPIISEEQFYRVQEIFTRMGKNPNMNRDSASLLNNLVVCSKCGLGFVHRRKDTTSRGKKYHYRYYSCKTYKHTHELEKCGNKIWRADKLEELIINRVNNYSLASRNVDKEDELDSLNEKLKTERARKKRLFDLYINGSYEVSELDSMMNDIDAQINYYESQIEANEELKRNKKIQENLADLATVDFDSLEFREKQLYLKSLINKIYVDGEQVTIEWL

SEQ ID NO: 5359 - protein, 469 aa, synthetic construct
MSYTTPVRAAVYLRISEDRSGEQLGVARQREDCLKLCDQRKWVPVEYLDNDVSASTGKRRPAYEQMLADITAGKIAAVVAWDLDRLHRRPIELEAFMSLADEKRLALATVAGDVDLATPQGRLVARLKGSVAAHETEHKKARQRRAARQKAERGLPNWSKAFGYLPGPNGPEPDPRTAPLVKQAYADILAGASLGDVCRQWNGAGAFTITGRSWTPTTLSKFLRKPRNAGLRAYKGARYGPVDCDAIVGKAQWSPLVDEATFWAAQAVLDAPGRAPGRKSVRRHLLTGLAGCGKCGNHLAGSYRTDGRVVYVCKACYGVAILADNIEPILYRIVTERLAMPDAVDLLRREIHDAAEAEPIRLELETLYGELDRLAVERAEGLLTARQVKISTDIVNAKITKLQARQLDQERLRVFDGIPLGTPQVAGTIAELSPDRFRAVLDVLAEVVVQPVGKGGRIFNSERVQVNWR

SEQ ID NO: 5360 - protein, 452 aa, synthetic construct
MKAAIYIRVSTREQVENYSIQAQTEKLTALCRSKGWDVYDIFIDGGYSGSNMNRPALNEMLSKLREIDAVVVYRLDRLSRSQRDTITLIEEYFLKNNVEFVSLSETLDTSSPFGRAMIGILSVFAQLERETIRDRMVMGKIKRIEAGLPLTTAKGRTFGYDVIGTKLYINEEEAKQLQLIYDIFEEEQSITFLQKRLKKLGFKVRTYNRYNNWLTNDLYCGYVSYKDKVHVKGIHEPIISEEQFYRVQEIFARMGKNPNMNRDSASLLNNLVVCSKCGLGFVHRRKDIMSRGKKYHYRYYSCKTYKHIHELEKCGNKIWRADKLEELIINRVNSYSLASRNVDKEDELDSLNEKLKTEHAKKKRLFDLYINGNYEVSELDSMMNDIDAQINYYESQIEANEELKKNKKVQEDLANLATVDFDSLEFREKQLYLKSLINKIYIDGEQVTIEWL

SEQ ID NO: 5361 - protein, 485 aa, synthetic construct
MTRKVAIYTRVSTTNQAEEGFSIDEQIDRLTKYAEAMGWQVSVTYTDAGSSGAKLERPAMQRLINDIENKAFDTVLVYKLDRLSRSVRDTLYLVKDVFTKNKIDFISLNESIDTSSAMGSLFLTILSAINEFERENIKERMSMGKLGRAKSGKSMMWTKTAFGYYHNRKTGILEIVPLQAAIVEQIFTDYLNGISLTKLRDKLNEGGHIGKDMPWSYRTLRQTLDNPVYCGYIKFKDSLFEGMHKPIIPYETYLKVQKELEERQQQAYERNNNPRPFQAKYMLSGMARCGYCGAPLRVVLGHKRKDGSRTMKYHCANRFPRKTKGVTVYNDNKKCDSGTYDLSNLEDTVIDNLIGFQENNDSLLKIINGNNQPVLDTSSFKKQISQIDKKIQKNSDLYLNDFITMDELKDRTDSLQAEKKLLKAKISENNFNGSTDVFELVKAQLGSIPINELSYDNKKKIVNNLVSKVDVTADNVDITFKFQLA

SEQ ID NO: 5362 - protein, 452 aa, synthetic construct
MKAAIYIRVSTREQVENYSIQAQTEKLTALCRSKDWDVYDIFIDGGYSGSNMNRPALNEMLSKLHEIDAVVVYRLDRLSRSQRDTITLIEEYFLKNNVEFVSLSETLDTSSPFGRAMIGILSVFAQLERETIRDRMVMGKIKRIEAGLPLTTAKGRTFGYDVIDTKLYINEEEAKQLQLIYDIFEEEQSITFLQKRLKKLGFKVRTYNRYNNWLTNDLYCGYVSYKDKVHVKGIHEPIISEEQFYRVQEIFTRMGKNPNMNRDSASLLNNLVVCSKCGLGFVHRRKDAMSRDKKYHYRYYSCKTYKHIHELEKCGNKIWRADKLEELIINRVNNYSLTSRNVDKEDELDSLNEKLKAEHAKKKRLFDLYINGSYGVSELDSMMNDIDAQINYYESQIEANEELKKNKRIQENLAYLATVDFDSLEFREKQLYLKSLINKIYIDGEQVTIEWL

SEQ ID NO: 5363 - protein, 485 aa, synthetic construct
MTKKVAIYTRVSTTNQAEEGFSIDEQIDRLTKYAEAMGWQVSDTYTDAGLSGAKLERPAMQRLINDIENKAFDTVLVYKLDRLSRSVRDTLYLVKDVFTKNKIDFISLNESIDTSSAMGSLFLTILSAINEFERENIKERMTMGKLGRAKSGKSMMWTKTAFGYYHNRKTGILEVVPLQATIVEQIFTDYLSGISLTKLRDKLNESGHIGKDIPWSYRTLRQTLDNPVYCGYIKFKDSLFEGMHKPIIPYETYLKVQKELEERQQQAYERNNNPRPFQAKYMLSGMARCGYCGAPLRIVLGHKRKDGSRTMRYHCANRFPRKTRGVTVYNDNKKCDSGTYDLSNLENTVIDNLIGFQENNDSLLKIINGNNQPILDSSSFKKQISEIDKKIQKNSDLYLNDFITMDELKDRTDSLQAEKRLLIAKISENKFNDSTDVFELVKTQLGGIPINELSYDNKKKIVNNLVSKVDVTADNVDIIFKFQLA

SEQ ID NO: 5364 - protein, 485 aa, synthetic construct
MTKKVAIYTRVSTTNQAEEGFSIDEQIDRLTKYAEAMGWQVSDTYTDAGFSGAKLERPAMQRLINDIENKAFDTVLVYKLDRLSRSVRDTLHLVKDVFTKNKIDFISLNESIDTSSAMGSLFLTILSAINEFERENIKERMTMGKLGRAKSGKSMMWTKTAFGYYHNRKTGILEIVPLQATIVEQIFTDYLSGISLTKLRDKLNESGHIGKDIPWSYRTLRQTLDNPVYCGYIKFKDSLFEGMHKPIIPYETYLKVQKELEERQQQTYERNNNPRPFQAKYMLSGMARCGHCGAPLRIVLGHKRKDGSRTMKYHCANRFPRKTKGVTVYNDNKKCDSGTYDLSSLENTVIDNLIGFQENNDSLLRIINGNNQPILDTSSLKNQISQIDKKIQKNSDLYLNDFITMDELKDRTDSLQAEKKLLKAKISENKFNDSTDVFELVKTQLGSTPINELSYDNKKKIVNNLVSKVDVTADNVDIIFKFQLA

SEQ ID NO: 5365 - protein, 452 aa, synthetic construct
MKAAIYIRVSTQEQVENYSIQAQTEKLTALCRSKDWDVYDIFVDGGYSGSNMNRPALNEMLSKLHEIDAVVVYRLDRLSRSQRDTTTLIEEYFLKNNVEFVSLSETLDTSSPFGRAMIGILSVFAQLERETIRDRMVMGKIKRIEAGLPLTTAKGRTFGYDVIDTKLYINEEEAKQLQLIYDIFEEEQSITSLQRRLKKLGFKVRSYNRYNNWLTNDLYCGYVSYKDKVHVKGIHEPIISEEQFYRVQEIFTRMGKNPNMNRDSASLLSSLVVCSKCGLGFVHRRKDTMSGGKKYHYRYYSCKTYKHTHELEKCGNKTWRADKLEELIINRVNNYSFASRNVDKEDELDGLNEKLKIEHAKKKRLFDLYINGSYEVSELDSMMNDIDAQINYYESQIEANEELKKNRKIQENLADLATVDFDSLEFREKQLYLKGLINRIYIDGEQVTIEWL

SEQ ID NO: 5366 - protein, 485 aa, synthetic construct
MTKKVAIYTRVSTTNQAEEGFSIDEQIDRLTKYAEAMGWQVSDTYTDAGVSGAKLERPAMQRLINDIENKAFDTVLVYKLDRLSRSVRDTLYLVKDVFTKNKIDFISLNESIDTSSAMGSLFLTILSAINEFERENIKERMTMGKLGRAKSGKSMMWAKTAFGYYHNRRTGILEIVPLQATIVEQIFTDYLSGISLTKLRDKLNESGHIGKDIPWSYRTLRQTLDNPVYCGYIKFKDSLFEGMHKPIIPYETYLKVQKELEERQQQTYERNNNPRPFQAKYMLSGMARCGYCGAPLRIVLGHKRKDGSRTTKYHCANRFPRKTKGVTVYNDNKKCDSGTYDLSNLENTVIDNLIGFQENNDSLLKIINGNNQPILDTSSFKEQISQIDKKIQKNSDLYLNDFITMDELKDRTDSLQAEKKLLEAKISENKFSDSTDVFELVKTQLGSVPINELSYDNKKKIVNNLVSKVDVTADNVDIIFKFQLA

SEQ ID NO: 5367 - protein, 452 aa, synthetic construct
MKAAIYIRVSTREQVENYSIQAQTEKLTALCHSKDWDVYDIFIDGGYSGSNMNRPALNEMLSKLHEIDAVVVYRLDRLSRSQRDTITLIEEYFLKNNVEFVSLSETLDTSSPFGRAMIGILSVFAQLERETIRDRMVMGKIKRVEAGLPLTTAKGRTFGYDVIDTKLYINEEEAKQLQLIYDIFEEEQSITFLQKRLKKLGFKVRTYNCYNNWLTNDLYCGYVSYKDKVHVKGIHEPIISEEQFNRVQEIFTRMGKNPNMNRGNASLLNNLVVCSKCGLGFVHRRKDAMSRDKKYHYRYYSCKTYKHIHELEKCGNKIWRADKLEELVINRVNNYSRASRNVDKEDGLDSLNEKLKIEHAKKKRLFDLYINGSYEVSELDSMMSDIDAQINYYESQIEANEELKKNKKIQENLAHLATVDFDSLEFREKQLYLKSLINKIYIDGEQVTIEWL

SEQ ID NO: 5368 - protein, 452 aa, synthetic construct
MKAAIYIRVSTREQVENYSIQAQTEKLTALCRSKDWDVYDIFIDGGYSGSNMNRPALNEMLSKLHEIDAVVVYRLDRLSRSQRDTITLIEEYFLKNNVEFVSLSETLDTSSPFGRAMIGILSVFAQLERETIRDRMVMGKIKRVEAGLPLTTAKGRTFGYDVIDTKLYINEEEAKQLRLIYDIFEEEQSITSLQKRLKKLGFKVRTYSRYNDWLTNDLYCGYVSYKDKVHVKGIHEPIISEEQFYRVQEIFARMGKNPNMNRDSASLLNNLVVCSKCGLGFVHRRKDTMSRGKKYHYRYYSCKTYKHIHELEKCGNKIWRADKLEELIIDRVNSYSFASRNVDKEDELDSLSEKLKIEHEKKKRLFDLYINGSYEVSELDSMMNDIDAQINYYESQIEANEELKKSKKIQEDLADLATVDFDSLEFREKQRYLKSLINKIYIDGEQVTIEWL

SEQ ID NO: 5369 - protein, 469 aa, synthetic construct
MSYTTPVRAAVYLRISEDRSGEQLGVARQREDCLKLCDQRKWVPVEYLDNDVSASTGKRRPAYEQMLADITAGKIAAVVAWDLDRLHRRPIELEAFMSLADEKRLALATVAGDVDLATPQGRLVARLKGSVAAHETEHKKARQRRAARQKAERGHPNWSKAFGYLPGPNGPEPDPRTAPLVKQAYAEILAGASLGDVCRQWNDAGAFTITGRPWTTATLSKFLRKPRNAGLRAYKGARYGPVDRDAIVGKAQWSPLVDEATFWAAQAVLDAPGRAPGRKSVRRHLLTGLAGCGKCGNHLGGSYRTDGRVVYVCKTCHGVAILADNIEPILYHIVAGRLAMPDAVNLLRREIHDAAEAETIRLELETLYGELDRLAVERAEGLLTARQVKISTDIVNAKITKLQARQLDQERLRVFDGIPLGTPQVAGMIAELSPNRFRAVLDVLAEVVVQPVGKSGRVFNPERVQVNWR

SEQ ID NO: 5370 - protein, 452 aa, synthetic construct
MKAAIYIRVSTREQVENYSIQAQTEKLTALCRSKDWDVYDIFIDGGYSGSNMNRPALNEMLSKLHEIDAVVVYRLDRLSRSQRDTITLIEEYFLKNNVEFVSLSETLDTGSPFGRAMIGILSVFAQLERETIRDRMVMGKIKRIEAGLPLTTAKGRTFGYDVIDTKLYINEEEAKQLQLIYDIFEEEQSITFLQKRLKKLGFKVRTYNRYNNWLTNDLYCGYVSYKDKVHVKGIHEPIISEEQFYRVQEIFARMGKNPNMNRDSASLLNNLVVCSKCGLGYVHRRKDAMSRDKKYHYRYYSCKTYKHIHELEKCGNKIWRADKLEELIINRVNNYSLASRNVDKEDELDSLNEKLKIEHAKKKRLFELYISGSYEVSELDSMMSDIDAQISYYESRIKANEELKKNKKIQENLADLATVDFDSLEFREKQLYLKSLISRIYIDGEQVTIEWL

SEQ ID NO: 5371 - protein, 452 aa, synthetic construct
MKAAIYIRVSTQEQVENYSIQAQTEKLTALCRSKGWDVYDIFIDGGYSGSNMNRPALNEMLSKLHEIDAVVVYRLDRLSRSQRDTTTLIEEYFLKNNVEFVSLSETLDTSSPFGRAMIGILSVFAQLERETIRDRMVMGKIKRIEAGLPLTTAKGRTFGYDVIDTKLYINEEEAKQLQLIYDIFEEEQSITSLQKRLKKLGFKVRTYNRYNNWLTNDLYCGYVSYKDKVHVKGIHEPIISEEQFYRVQEIFTRMGKNPNMNRDSASLLSNLVVCSKCGLGFVHRSKDTMSRGKKYHYRYYSCKTYKHTHELEKCGNKTWRADKLEELIINRVNNYSFASRNVVKEDELDSLNEKLRIEHAKKKRLFDLYINGSYEVSELDSMMSDIDAQINHYESQIEANEKLKKNKKIQENLADLATMDFDSLEFREKQLYLKSLINKIYIDGEQVTIEWL

SEQ ID NO: 5372 - protein, 452 aa, synthetic construct
MKAAIYIRVSTREQVENYSIQAQTEKLTALCRSKDWDVYDIFIDGGYSGSNMNRPALNEMLSKLHEIDAVVVYRLDRLSRSQRDTITLIEEYFLKNNVEFVSLSETLDTSSPFGRAMIGILSVFAQLERETIRDRMVMGKIKRVEAGLPLTTAKGRTFGYDVVDTKLYINEEEARQLQLIYDIFEEEQSITFLQKRLKKLGLKVHTYSRYNSWLTNDLYCGYVSYKDKVHVKGIHEPIISEEQFYRVQEIFTRVGKNPNMNRGSASLLNNLVVCSKCGLGFVHRRKDTMSRGKKYHYRYYSCKTYKHIHELEKCGNKIWRADKLEELIINRVNNYSLASRNVDKEDELDSLSEKLKVEHAKKKRLFDLYINGSYEVSELDSMMNDVDAQINYYESQIEANEELKKNKKIQENLANLATVDYDSLEFREKQLYLKSLINKIHIDGEQVTIEWL

SEQ ID NO: 5373 - protein, 452 aa, synthetic construct
MKAAIYIRVSTREQVENYSIQAQTEKLTALCRSKDWDVYDIFIDGGYSGSNMNRPALNEMLSRLHEIDAVVVYRLDRLSRSQRDTITLIEEYFLKNNVEFVSLSETLDTSSPFGRAMIGILSVFAQLERETIRDRMVMGKIKRIEAGLPLTTAKGRTFGYDVIDTKLYVNEEEAKQLQLIYDIFEEEQSITFLQKRLKKLGFKVRTYNRYNNWLTNDLYCGYVSYRDRVHVKGIHEPIISEEQFYRVQEIFTRMGKNPNMNRDSASLLNNLVVCSKCGLGFVHRRKDAMSRDKKYHYRYYSCKTYKHIHELEKCGNKIWRADKLEELIINRVNSYSLVSRNVDKEDELDSLNEKLRIEHAKKKRLFDLYINGRYEVSELDSMMSDIDAQINYYESQIEANEGLKRNKKIQENLADLAAVDFDCLEFREKQLYLKSLINKIYIDGEQVTIEWL

SEQ ID NO: 5374 - protein, 485 aa, synthetic construct
MTKKVAIYTRVSTTNQAEEGFSIDEQIDRLTKYAEAMGWQVSDTYTDAGLSGAKLERPAMQRLINDIENKAFDTVLVYKLDRLSRSVRDTLYLVKDVFTKNKIDFISLNESIDTSSAMGSLFLTILSAINEFERENIKERMTMGKLGRAKSGKSMMWTKTAFGYYHNRKTGILEIVPLQAAIVEQIFTDYLSGISLTKLRDKLNESGHIGKDIPWSYRTLRQTLDNPVYCGYIKFKGSLFEGTHKPIIPYETYLKVQKELEERQQQTYERNNNPRPFQAKYMLSGMARCGYCGAPLKIVLGHKRKDGSRTMKYHCTNRFPRETKGVTVYNDNKTCDSGTYDLSSLESTVIDNLIGLQENNDSLLKIINGNNQPILDTSSFEKQISQIDKKIQKNSDLYLNDFITMDELKDRTDGLQAEKKLLEAKISENKFNDSTDVFELVKTQLGSTPINELSYDDKKKIVNSLVSKVVVTADNVDIIFKFQLA

SEQ ID NO: 5375 - protein, 452 aa, synthetic construct
MKAAIYIRVSTQEQVGNYSIQAQTEKLTALCRSKGWDVYDIFIDGGYSGSNMNRPALNEMLSKLHEIDAVVVYRLDRLSRSQRDTTTLIEEYFLKNNVEFVSLSETLDTSSPFGRAMIGILSVFAQLERETIRDRMVMGKIKRIEAGLPLTTAKGRTFGYDVIDTKLYINEEEAKQLQLIYDIFEEEQSITFLQKRLKKLGFKVRTYNRYNSWLTNDLYCGYVSYKDKVHVKGIHEPIISEEQFYRVQEIFTRMGKNPNMNRDSASLLSNLVVCSKCGLGFVHRSKDTMSRGKKYHYRYYSCKTYKHTHELEKCGNKIWRADKLEELIIDRVNSYSFASRNVDKEDELDSLNEKLKIEHARKKRLFDLYINGSYEVSELDSMMNNIDAQINYYESQIEANEEPKKDKKIQENLAGLATVDFDSLEFREKQLYLKSLINKIYIDGEQVTIEWL

SEQ ID NO: 5376 - protein, 452 aa, synthetic construct
MKAAIYIRVSTQEQVGNYSIQAQTEKLTALCRSKDWDVYDIFIDGGYSGSNMNRPALNEMLSKLHEIDAVVVYRLDRLSRSQRDTTTLIEEYFLKNNVEFVSLSETLDTSSPFGRAMIGILSVFAQLERETIRDRMVMGKIKRIEAGLPLTTAKGRTFGYDVIDTKLYINEEEAKQLQLIYDIFEEERSITSLQKRLKKLGLKVRTYNRYNNWLTNDLYCGYVSYKDKVHVRGIHEPIISEEQFYRVQEILTRTGKNPNMNRGSASLLNNLVVCGKCGLSFVHRSKDTMSRGKRYHYRYYSCKTYKHTHELEKCGNKTWRADKLEELIINRVNNYSFVSRDVDKEDELDSLNEKLKIEHAKKKRLFDLYINGSYEVSELDSMMNDIDAQINYYESQIKANEELKKDKKIQESLADLATVDFDSLEFREKQLYLKSLINKIYIDGEQVTIEWL

SEQ ID NO: 5377 - protein, 452 aa, synthetic construct
MKAAIYIRVSTREQVENYSIKAQTEKLTALCRSKDWDVYDIFIDGGYSGSNMNRPALNEMLSKLHEIDAVAVYRLDRLSRSQRDTITLIEEYFLKNNVEFVSLSETLDTSSPFGRAMIGILSVFAQLERETIRDRMVMGKIKRIEAGLPLTTAKGRTFGYDVIDTRLYTNEEEAKQLRLIYDIFEEEQSITFLQRRLKKLGFKVHTYSRYSNWLTNDLYCGYVSYKDKVHVKGIHEPIISEEQFYRVQEIFARMGKSPNMNRDSASLLNNLVVCSKCGLGFVHRRKDTMSRGKKYHYRYYSCKTYKHTHELEKCGNKIWRADKLEELVISRVSNYSFASRNVDKEDELDSLNEKLKIEHAKKKRLFDLYINGSYEVSELDSLMNDIDAQINYYESQIEANGELKKNKKIQENLADLATVDFGSLEFREKQLYLKSLINKIYIDGEQVTIEWL

SEQ ID NO: 5378 - protein, 452 aa, synthetic construct
MKAAIYIRVSTREQVENYSIQAQTEKLTALCRSKDWDVYDIFIDGGYSGSNMNRPALNEMLSKLHEVDAVVVYRLDRLSRSQRDTITLIEEYFLKNNVEFVSLSETLDTSSPFGRAMIGILSVFAQLERETIRDRMVMGKIKRIEAGLPLTTAKGRTFGYDVIDTRLYINEAEAKQLQLIYDIFEEEQSITSLQKRLKKLGFKVRTYNRYHNWLTNDLYCGYVSYKDKVHVKGIHEPIISEEQFYRVQEIFTRTGKNPNMNRDSASLLNSLVVCSKCGLGFVHRRKDTMSRGKKYHYRYYSCKTYKHTHELEKCGNKIWRADKLEELIINRVNSYSFASRNVDKEDELDGLNEKLKIEHAKKKRLFDLYINGSYEVSELDSMMDDIDAQINYYESQIKANEELKKDKKIQENLAELATVDFDSLEFREKQLYLKSLINKIYIDGEQVTIEWL

SEQ ID NO: 5379 - protein, 469 aa, synthetic construct
MSYTTPVRAAVYLRISEDRSGEQLGVARQREDCLKLCGQRKWVPVEYLDNDVSASTGKRRPAYEQMLADITAGKIAAVVAWDLDRLHRRPIELEAFMSLADEKRLALATVAGDIDLATPQGRLVARLKGSVAAHETEHKKARQRRAARQKAERGHPNWSKAFGYLPGPNGPEPDPRTAPLVKQAYADILAGASLGDVCRQWNDAGAFTITGRPWTTTTLSKFLRKPRNAGLRAYKGARYGPVDRDAIVGKAQWSPLVDEATFWAAQAVLDAPGRAPGRKSVRRHLLTGLAGCGKCGNHLAGSYRTDGRVVYVCKACHGVAILADSIEPILYHIVAERLAMPDAVDLLRREIRDAAEAETIRLELETLHGELDRLAVERAEGLLTARQVKISTDIVNAKITKLQARQLDQERLRVLDGIPLGTPQVAGKIAELSPDRFRAVLDVLAEVVVQPVGKSGRIFNPERVQVNWR

SEQ ID NO: 5380 - protein, 485 aa, synthetic construct
MTKKVAIYTRVSTTNQAEEGFSIDEQVDRLTKYAEAMGWQVSDTYTDAGFSGAKLERPAMQRLINDIENKAFDTVLVYKLDRLSRSVRDTLYLVKEVFTKNKIDFISLNESIDTSSAMGSLFLTILSAINEFERENIKERMTMGKLGRAKSGKSMMWTKTAFGYYHNRKTGILEIVPLQATIVEQIFTDYLSGISLTKLRDKLNKSGHIGKDIPWSYRTLRQTLDNPVYCGYIKFKDSLFEGMHKPIIPYETFLKVQKELEERQQQSYARNNNPRPFQAKYMLSGVARCGYCGAPLRIVLGHKRKDGSRTMKYHCANRFPRKTKGVTVYNDNKKCDSGTYDLSDLENAVIDILISFQENNDSLLKIINGNNQPILDASSLKKQISQIDKKIQKNSDLYLNDFITMDELKDRTDSLQAEKKLLKAKISENKFNDSADVFELVKTQLGSIPINELNYDNKKKIVNNLVSKVDVTADSVDIIFKFQLA

SEQ ID NO: 5381 - protein, 452 aa, synthetic construct
MKAAIYIRVSTREQVENYSIQAQTEKLTALCRSKDWDVYDTFIDGGYSGSNMNRPALNEMLSKLHEIDAVVVYRLDRLSRSQRDTITLIEEYFLKNNVEFVSLSETLDTSSPFGRAMIGILSVFAQLERETIRDRMVMGKIKRIEAGLPLTTAKGRTFGYDVIDTKLYINEEEAKQLQLIYDIFEEEQSITSLQKRLKKLGFKVRTYNRYNNWLTNDLYCGYVSYKDKVHVKGIHEPIISEEQFYRVQEIFTRMGKNPNMNRDSASLLNNLVVCGKCGLGFVHRRKDAMSRDKKYHYRYYSCKTYKHTHELEKCGNKIWRADKLEELIINRVNNYSFASRNADKEDELDSLNEKLKIEHAKKKRLFDLYINGSYEVSELDSMMNGIDAQINYYESQIEANEELKKNKKIRENLAYLATVDFDSLEFREKQLYLKSLINKIYIDGEQVTIEWL

SEQ ID NO: 5382 - protein, 485 aa, synthetic construct
MTKKVAIYTRVSTTNQAEEGFSIDEQIDRLTKYAEAMGWQVSDTYTDAGFSGAKLERPAMQRLINNIENKAFDTVLVYKLDRLSRSVRDTLYLVKEVFTKNKIDFISLNESIDTSSAMGSLFLTILSAINEFERENIKERMTMGKLGRAKSGKSMMWTKTAFGYYHNRKTGILEIVPLQATVVEQIFADYLSGISLTKLRDKLNESGHIGKDIPWSYRTLRQTLDNPVYCGYIKFKDSLFEGMHKPIIPYETYLKVQKELEERQQQAYERNNNPRPFQAKYMLSGMARCGYCGAPLRIVLGHKRKDGSRTMKYHCANRFPRKTKGITVYNDNKKCDSGTYDLSNLENTVIDNLIGFQENNDSLLKIINGNNQPIPDTSSFKKQISQIDKKIQKNSDLYLNDFITMDELKARTDSLQAEKKLLKAKISENKSNDNTDVFELVKTQLGSIPINELSYDNKKKIVNNLVSKVDVTADNVDIIFKFQLA

SEQ ID NO: 5383 - protein, 485 aa, synthetic construct
MTKKVAIYTRVSTTNQAEEGFSIDEQIDRLSKYAEAMGWQVSDTYTDAGFSGAKLGRPAMQRLINDIENKAFDTVLVYKLDRLSRSVRDTLYLVKDVLTKNKIDFISLNESIDTSSAMGNLFLTILSAINEFERENIKERMTMGKLGRAKSGKSMMWTKTAFGYYHNRKTGILEIAPLQATIVEQIFTDYLSGISLTKLRDKLNESGHIGKDIPWSYRTLRQTLDNPVYCGYIKFKNSLFEGMHKPIVPYETYLKVQKELEKRQQQTYERNNNPRPFQAKYMLSGMARCGYCGAPLRIVLGHKRKDGSRTMKYHCANRFPRKTKGVTMYNDNKKCDSGTYDLSNLENTVIDILIGFQENSDSLLKIINGNNQPTLDPSSFKKQISQIDKKIQKNSDLYLNDFITMDELKGRTDSLRAEKKLLRAKISENKFNDSTDVFEQVKAQLGSIPINELSYDNKKKIVNNLVSKVDVTADNVDIIFKFQLA

SEQ ID NO: 5384 - protein, 469 aa, synthetic construct
MSYTTPVRAAVYLRISEDRSGEQLGVARQREDCLKLCDQRKWVPVEYLDNDVSASTGKRRPAYEQMLADITAGKIAAVVAWDLDRLHRRPIELEAFMSLADEKRLALATVAGDVDLATPQGRLVARLKGSVAAHETEHKKARQRRAARQKAERGYPNWSKAFGYLPGPNGPEPDPRTAPLVKQAYADILAGASLGDVCRQWNDAGAFTITGRPWTSTTLSKFLRKSRNAGLRAYKGARYGPVDRDAIVGKAQWSPLVDEATFWAAQAVLDAPGRAPGRKSVRRHLLTGLAGCGKCGNHLAGSYRTDGRVVYVCKACHGVAILADNIEPILYHIVAERLAMPDAVDLLCREIHDAAEAETIRLELETLYGELDRLAVERAEGLLTARQVKISTDIVNAKITKLQARQQDQERLRVLDGIPLGTPQVAGVIAELSPDRFRAVLDVLAEVVVQPVGKSGGIFNPERVQVNWR

SEQ ID NO: 5385 - protein, 452 aa, synthetic construct
MKAAIYIRVSTQEQVGNYSIQAQTEKLTALCRSKDWDVYDIFIDGGYSGSNMNRPALNKMLSRLHEIDAVVVYRLDRLSRSQRDTTTLIEEYFLKNNVEFVSLSETLDTSSPFGRAMIGILSVFAQLERETIRDRMVMGKIKRIESGLPLTTAKGRTFGYDVIDTKLYVNEEEAKQLRLIYDIFEEEQSITSLQKRLKKLGFKVRTYNRYNNWLTNDLYCGYVSYKDKVHVKGIHEPIISEEQFYRVQEIFTRMGKNPNMNRDSASLLNNLVVCSKCGLGFVHRSKDTMSRGKKYHYRYYSCKTYKHTHELEKCGNKTWRADKLEELIINRVNNYSFASRNVDKEGELDSLNEKLKIEHAKKRRLFDLYINGSYEVSELDSMMNDIDAQINYYEGQIEANEELKKNKKIQENLADLATVDFDSLEFREKQMYLKSLINRIYIDGEQVTIEWL

SEQ ID NO: 5386 - protein, 451 aa, synthetic construct
MKAAIYIRVSTREQVENYSIQAQTEKLTALCRSKGWDVYDIFIDGGYSGSNMNRPALNEMLGKLHEIDAVVVYRLDRLSRSQRDTITLIEEYFLKNNVEFVSLSETLDTSSPFGRAMIGILSVFAQLERETIRDRMVMGKIKRIEAGLPLTTAKGRTFGYDVIDTKLYINEEEAKQLQLIYDIFEEEQSITSLQKRLKKLGFKVRSYSRYNNWLTNDLYCGYVSYKDKVHVKGIHEPIISEEQFYRVQEIFTRMGKNPNMNRDSASLLNNLVVCSKCGLGFVHRRKDIMSRGKKYHYRYYSCKTYKHIHELEKCGNKIWRADKLEELIINRVNNYGLASRNAGKEDELDSLNEKLKIEHAKKRRLFELYINGRYEVSELDSMMNDIDARINYYESIEANEGLKENKKIQESLANLATVDFDSLEFREKQLYLKSLINKIYIDGEQVTIEWL

SEQ ID NO: 5387 - protein, 452 aa, synthetic construct
MKAAIYIRVSTREQVENYSIQAQTEKLTALCRSKDWDVYDIFIDGGYSGSNMNRPALNEMLSKLHEIDAVVVYRLDRLSRSQRDTITLIEEYFLKNNVEFVSLSETLDTSSPFGRAMIGILSVFAQLERETIRDRMVMGKIKRIEAGLPLTTARGRTFGYDVIDTKLYINEEEAEQLRLIYDIFEEEQSITFLQKRLKKLGFKVRTYNCYNNWLTNDLYCGYVSYKDKVRVKGIHEPIISEEQFYRVQEIFTRMGKNPNMNRGSASLLNNLVVCSKCGLGFVHRRKDAMSRDKKYHYRYYSCKTYKHIHELEKCGNKVWRADKLEELIISRVNNYSLASRNADKEDELDSLNEKLQIEHAKKRRLFDLYISGSYEVSELDSMMSDIDAQISYYESQIEANEELKKNKKIQEDLADSATVDFDSLEFREKQLYLKSLINKIYIDGEQVTIEWL

SEQ ID NO: 5388 - protein, 485 aa, synthetic construct
MTKKVAIYTRVSTTNQAEEGFSIDEQIDRLTKYVEAMGWQVSDTYTDAGFSGAKLERPAMQRLINDIENKAFDTVLVYKLDRLSRSVRDTLYLVKDVFTKNKIDFISLNESINTSSAMGSLFLTILSAINEFERENIKERMTMGKLGRAKSGKSMMWTKTAFGYYHNRKTGILEIVPLQATIVEQIFADYLSGISLTKLRDKLNESGHIGKDIPWSYRTLRQTLDNPVYCGYIKFKDSLFEGMHKPIIPYETYLKVQKELEERQQQTYERNNNPRPFQAKYMLSGMARCGYCGAPLKIVLGHKRKDGSRTMKYHCANRFPRKTKGITVYNDNKKCDSGTYDLSSLENTVIDNLVGFQENDDSLLKIINGNNQPILDTSSFKKQISQIDKKIQKNSDLYLNDFITMDELKDRTDSLQAEKKLLKAKISENKFNDSTDVFEQVKTRLGSIPINELSYDNKKKIVNNLVSKVDVTADNVDIIFKFQLA

SEQ ID NO: 5389 - protein, 469 aa, synthetic construct
MSYTTPVRAAVYLRISEDRSGEQLGVARQREDCLKLCDQRKWVPVEYLDNDVSASTGKRRPAYEQMLADITAGKIAAVVAWDLDRLHRRPIELEAFMSLADEKRLALATVAGDVDLATPQGRLVARLKGCVAAHETEHKKARQRRAARQKAERGHPNWSKAFGYLPGPNGPEPDPRTAPLVKQAYVDILAGASLGDVCRQWNDAGAFTITGRPWATTTLSKFLRKPRNAGLRAYKGARYGPVDRDAIVGKAQWSPLVDEATFWAAQAVLDAPGRAPGRKSVRRHLLTGLAGCGKCGNRLAGSYRTGGKVVYVCKACHGVAILADNIEPILYHIVAERLAMPDTVDLLRREIHDAAEAEAIRLELETLCGELDRLAVERAEGLLTARQVKISTDIVNAKITKLQARQLDQERVRVFDGIPLGTPQVAGMIAELSPDRFRAVLDVLAEVVVQPVGKSGRIFNPERVQVNWR

SEQ ID NO: 5390 - protein, 452 aa, synthetic construct
MKAAIYIRVSTQEQVENYSIQAQTEKLTALCRSKDWDVYDIFIDGGYSGSNMNRPALNEMLSKLHEIDAVVVYRLDRLSRSQRDTITLVEEYFLKNNVEFVSLSETLDTSSPFGRAMIGILSVFAQLERETIRDRMVMGKIKRIEAGLPLTTAKGRTFGYDVIDTRLYINEEEAKQLQLIYDIFEEEQSITFLQKRLKKLGFKVRTYSRYNNWLTNDLYCGYVSYKDKVHVKGIHEPIISEEQFYRVQEIFTRMGKNPNMNRDSASLLNNLVVCSKCGLGFVHRRKDTTSRGKKYHYRYYSCKTYKHIHELEKCGNKIWRADKLEELVINRVNNYSFASRNVDKEDALDSLNEKLKIEHAKKKRLFDLYINGSYEVSELDSMMNDIDAQISYYESQIEANEELKKDKKIQENLANLATVDYDSLEFREKQLYLKSLINKIHIDDEQVTIEWL

SEQ ID NO: 5391 - protein, 486 aa, synthetic construct
MTKKVAIYTRVSTSNQAEEGFSIDEQIDRLTKYAEAMGWQVSDTYTDAGFSGAKLERPAMQRLINDIENRAFDTVLVYKLDRLSRSVRDTLYLVKDVFTKNKIDFISLNECIDTSSAMGSLFLTILSAINEFERENIKERMTMGKLGRAKSGKSMMWTKTAFGYYHNRKTGILEIVPRQAAIVEQIFTDYLSGISLTKLRDKLNESGHIGKDIPWSYRTLRQTLDNPVYCGYIKFKGSLFEGMHKPIIPYETYLKVQKELEERQQQTYERNNNPRPFQAKYMLSGMARCGYCGAPLRIVLGHKRKDGSRTMKYHCANRFPRKTKGVTVYDDNRKCDSGTYDLSNLENTVIDNLISFQENNDSLLKIINGNNQPILDTSSFEKQISQIDKKIQKSSDLYLNDFITMDELKDRTDSLQAEKKLLKAKISENKFNDSADVFELVRTQLGSIPINELSYDNKKRIVNNLVSKVDVTADTVDIIFKFQLAQ

SEQ ID NO: 5392 - protein, 452 aa, synthetic construct
MKAAIYIRVSTREQVENYSIQAQTEKLTALCRSKDWDVYDIFIDGGYSGSNMNRPALNEMLSKLHEIDAVVVYRLDRLSRSQRDTITLIEEYFLKNNVEFVSLSETLDTSSPFGRAMIGILSVFAQLERETIRDRIVMGKIKRIEAGLPLTTAKGRTFGYDVIDTKLYINEEEAKQLQLIYDIFEEEQSITFLQKRLKKLGFKVRTYSRYNNWLTNDLYCGYVSYKDKVHVKGIHEPIISEEQFYRVQEIFTRMGKNPNMNRDSASLLNNLVVCSKCGLGFVHRRKDTMSRGKKYHYRYYSCKTYKHTHELEKCGNKIWRADKLEELIINRVNDYSFARRNVDKEDELDGLNEKLKIEHAKKKRLFDLYINGSYEVSELDSMMNDIDAQINYYESQIEANEELKKNKKIQENLANLATVDYDSLEFREKQLYLKSLINKIYIDGEQVTIEWL

SEQ ID NO: 5393 - protein, 452 aa, synthetic construct
MKAAIYIRVSTQEQVGNYSIQAQTEKLTALCRSKGWDVYDIFIDGGYSGSNMNRPALNEMLSKLHEIDAVVVYRLDRLSRSQRDTTTLIEEYFLKNNVEFVSLSETLDTSSPFGRAMIGILSVFAQLERETIRDRMVMGKIKRIEAGLPLTTAKGRTFGYDVIDTKLYINEEEAKQLQLIYDIFEEEQSITFLQKRLKKLGFKVRTYNRYNNWLTNDLYCGYVSYKDKVHVKGIHEPIISEEQFYRVQEIFTRMGKNPNMNRGSASLLNNLVVCSKCGLAFVHRRKDTMSGGKKYHYRYYSCKTYKYTHELEKCGNKTWRADKLEELIINRVNNYSFASRNVDKEDELDSPNEKLKIEHAKKKRLFDLYINGSYEVSELDSMMNDIDAQINYYESQIEANEELKKNKKIQENLADLATVDFDSLEFREKRLYLKSLINKIYIDGERVTIEWL

SEQ ID NO: 5394 - protein, 485 aa, synthetic construct
MTKKVAIYTRVSTTNQAEEGFSIDEQVDRLTKYAEAMGWQVSDIYTDAGLSGTKLERPAMQRLINDIENKAFDTVLVYKLDRLSRSVRDTLYLVKDVFTKNKIDFISLNESIDTSSAMGSLFLTILSAINEFERENIKERMTMGKLGRAKSGKSMMWTKTAFGYYHNRETGILEIVPLQATIVEQIFTDYLSGISLTKLRDKLNESGHIGKDIPWSYRTLRQTLDNPVYCGYIKFKDSLFEGMHKPIIPYETYLKVQKELEERQQQAYERNNNPRPFQAKYMLSGMARCGYCGAPLKIVLGHKRKDGSRTMKYHCANRFPRETKGVTVYNDNKKCDSGTYDLSSLENTVIDNLIGLQENNGSLLKIINGNNQPILDTSSFKEQISQIDKKIQKNSDLYLNDFITMDELKDRTASLQAEKKLLKAKISENKFTDSTDVFELVKTQLGSIPINELSYDNKKKIVNNLVSKVDVTADNVDIIFKFQLA

SEQ ID NO: 5395 - protein, 485 aa, synthetic construct
MTKKVAIYTRVSTTNQAEEGFSIDEQADRLTKYAEAMGWQVSDTYTDAGFSGAKLERPAMQRLINDIGNKAFDTVLVYKLDRLSRSVRDTLYLVKDVFAKNKIDFISLNESIDTSSAMGSLFLTILSAINEFERENIKERMTMGKLGRAKSGKSMMWTKTAFGYYHNRETGILEIVPLQATIVEQIFTDYLSGISLTKLRDKLNESGHIGKDIPWSYRTLRQTLDNPVYCGYIKFKDSLFEGMHKPIIPYETYLKVQKELEERQQQTYERNNNPRPFQAKYMLSGIARCSYCGAPLRIVLGRKRKDGSRTMKYHCANRFPRKARGVTVYNDNKKCDSGTYDLSNLENTVIDSLIGFQENNDSLLKIINGNNQPVLDTSSFKKQISQIDKKIQKNSDLYLNDFITMDELKDRTDSLQAEKKLLKAKISENKFNDSTDVFELVKTQLGSIPINELSYDNKKKIVNNLVSKVDVTADSVDIIFKFQLA

SEQ ID NO: 5396 - protein, 469 aa, synthetic construct
MSYTTPVRAAVYLRISEDRSGEQLGIARQREDCLKLCDQRKWVPVEYLDNDVSASAGKRRPAYEQMLADITAGKIAAVVAWDLDRLHRRPIELEAFMCLADEKRLALATVAGDVDLATPQGRLVARLKGSVAAHETEHKKARQRRAARQKAERGYPNWSKAFGYLPGPNGPEPDPRTAPLVKQAYADILAGASLGDVCRQWNDAGAFTITGRPWTTTTLSKFLRKPRNAGLRAYKGARYGPVDRDAIVGKARWSPLVDEATFWAAQAVLDAPGRAPGRKSVRRHLLTGLAGCGKCGNHLAGSYRTDGRVVYVCKACHGVAILADNIEPILYHVVAERLAMPDAVDLLRREIHDAAEAETIRLELETLYGELDRLAVERAEGLLTARQVKISTDIVSAKITKLQARQLDQERLRVFDGIPLGTPQVASMIAELSPDRFRAVLDVLAEVVVQPVGKGGRIPNPERVQVNWR

SEQ ID NO: 5397 - protein, 485 aa, synthetic construct
MTKKVAIYTRVSTANQAEEGFSIDEQIDRLTKYAEAMGWQVSDTYTDAGFSGAKLERPAMQRLINDIENKAFDTVLVYKLDRLSRSVRDTLYLVKDVFTKNKIDFISLNESIDTSSAMGSLFLTILSAINEFERENIKERMTMGKLGRAKSGKSMMWTKTAFGYYHNRKTGILEIVPLQATIVEQIFTDYLSGISLTKLRDKLNESGHIGKDIPWSYRTLRQTLDNPVYCGYIKFKDSLFEGMHKPIIPYETYLKVQKELEERQQQTYERNNNPRPFQAKYMLSGMARCGYCGAPLKIVLGHKRKDGSRAMKYHCANRLPRKTKGVTVYNDNKKCDSGTYDLSNLENTVIDNLIGFQEDNDSLLKIINGNNQPILDTSSFKKQISQIDKKIQKISDLYLNDFITMDELKGRTDSLQAEKKLLEAKISENKFNDSTDVFELVKTQLGSIPINELSYDNKKKIVNNLVSKVDVTADNVDIIFKFQLA

SEQ ID NO: 5398 - protein, 452 aa, synthetic construct
MKAAIYIRVSTREQVENYSIQAQTERLTALCRSKGWDVYDIFIDGGYSGSNMNRPALNEMLSKLHEIDAVVVYRLDRLSRSQRDTITLIEEYFLKNNVEFVSLSETLDTSSPFGRAMIGILSVFAQLERETIRDRMVMGKIKRIEAGLPLTTAKGRTFGYDVIDTKLYINEEEAKQLQLIYDIFEEEQSITFLQKRLKELGFKVRTYNRYNNWLTNDLYCGYVSYKDKVHVKGIHEPIISEEQFYRVQEIFTRMGKNPNMNRDSASLLNNLVVCSKCGLSFVHRRKDIMSRDKKYHYRYYSCKTYKHIHELEKCGNKIWRADKLEELIINRVNNYSFASRNADKEDELDSLNEKLKIERAKKKRLFDLYINGSYEVSELDGMMNDIDAQINYYESQIAANEELKKNKKIQENLADLATVDFDSLGFREKQLYLKSLINKIYIDGEQVTIEWL

SEQ ID NO: 5399 - protein, 452 aa, synthetic construct
MKAAIYIRVSTREQVENYSIQAQTEKLTALCRSKDWDVYDIFIDGGYSGSNMNRPALNEMLSKLHEIDAVVVYRLDRLSRSQRDTITLIEEYFLKNNVEFVSLSETLDTSSPFGRAMIGILSVFAQLERETIRDRMVMGKIKRIEAGLPLTTAKGRTFGYDVIDTKLYINEEEAKQLQLIYDIFEEEQSITFLQKRLKKLGFKVRTYNRYSNWLTNDLYCGYVSYKDKVHVKGIHEPIISEEQFYRVQEIFARMGKNPNMNRDSASLLNSLVVCSKCGQGFVHRRKDAMSRDKKYHYRYYSCKTYKHIHELEKCGNKIWRADKLEELIINRVNNYSLASRNVDKEDELDSLNEKLKIEHAKKKRLFDLYINGSYEVSELDGMMNDIDAQINYYESQIEANEELKRNKKIQENLADLATVDFDSLEFREKQRYLKSLINKIYIDGEQVTIEWL

SEQ ID NO: 5400 - protein, 485 aa, synthetic construct
MTKKVAIYTRVSTTNQAEEGFSIDEQIDRLTKYAEAMGWQVSDTYTDAGLSGAKLERPAMQRLINDIENKAFDTVLVYKLDRLSRSVRDTLYLVKDVFTKNKIDFISLSESIDTSSAMGSLFLTILSAINEFERENIKERMTMGKLGRAKSGKSMMWAKTAFGYYHNRKTGILEIVPLQAAIVEQIFTDYLSGISLTKLRDKLNESGHIGKDIPWSYRTLRQTLDNPVYCGYIKFKDSLFEGMHEPIIPYETYLKVQKELEERQQQTYERNNNPRPFQAKYMLSGMARCGYCGAPLRIVLGRKRKDGSRTMKYHCANRSPRKTKGVTVYNDNKKCDSGTYDLSNLENTVIGNLIGFQENNDSLLKIINGNNQPILDTSSFKRQISQIDKKIQKNSDLYLNDFITMDELKDRTDSLQAEKKLLEAKISENKFNDSADVFELVKIQLGSIPINELSYDNKKKIVNDLVSKVDVTADNVDIVFKFQLA

SEQ ID NO: 5401 - protein, 452 aa, synthetic construct
MKAAIYIRVSTREQVENYSIQAQTEKLTALCRSKDWDVYDIFIDGGYSGSNMNRPALNEMLSKLHEIDAVVVYRLDRLSRSQRDTITLIEEYFLKNNVEFVSLCETLDTSSPFGRAMIGILSVFAQLERETIRDRMVMGKIKRVEAGLPLTTAKGRTFGYDVIDTKLYINEEEAKQLQLIYDIFEEEQSITFLQKRLKKLGFKVRTYSCYNNWLTNDLYCGYVSYKDEVHVKGIHEPIISEEQFYRVQEIFTRMGKNPNTNRDSASLLNSLVVCSKCGLGFVHRRKDTMCRGKKYHYRYYSCKTYKHTHELEKCGNKIWRADKLEELIINRVNSYSFASRNVDKEDELDSLNEKLKVEHAKKKRLFELYINGSYEVSELDSMMNDIDAQINYYESQIEANEELKKNKKIRENLADLATVDFDSLEFREKQLYLKSLINKIYIDGEQVTIEWL

SEQ ID NO: 5402 - protein, 485 aa, synthetic construct
MTKKVAIYTRVSTTNQAEEGFSIDEQIDRLTKYAEAMGWQVGDTYTDAGFSGAKLERPAMQRLINDIENKAFDTVLVYKLDRLSRSVRDTLYLVKEVFTKNKIDFISLNESIDTSSAMGSLFLTILSAINEFERENIKGRMTMGKLGRAKSGKSMMWTKTAFGYHHNRKTGILEIVPLQAAIVGQIFTDYLSGISLTKLRDKLNESGHIGKDIPWSYRTLRQTLDNPVYCGYIKFKDSLFEGMHKPIIPYETYLKVQKELEERQQQTYVRNNNPRPFQAKYMLSGMARCGYCGAPLRIVLGHKRKDGSRTMKYHCANRFPRKTKGVTVYNDNKKCDSGTYDLSNLENTVIDNLIGLQENNDSLLKIINGNNQPILDTSSFKEQISLIDKKIQKNSDLYLNDLITMDELKDRTDSLQAEKKLLKAKISENKCSDSTDVFELVKTQLGSIPINELSYDNKKKIVNNLVSKVDVTADDVDIIFKFQLA

SEQ ID NO: 5403 - protein, 452 aa, synthetic construct
MKAAIYIRVSTREQVENYSIQAQTEKLTALCRSKDWDVYDIFIDGGYSGSNMNRPALNEMLSKLHEIDAVVVYRLDRLSRSQRDTITLIEEYFLKNNVEFVSLSETLDTSSPFGRAMIGILSVFAQLERETIRDRMVMGKIKRIEAGLPLTTAKGRTFGYDVVDTKLYINEEEAKQLQLIYDIFEEEQSITFLQKRLKKLGFKVHTYNRYNNWLTNDLYCGYVSYKDKVHVKGIHEPIISEEQFYRVQEIFTRMGKDPNMNRDSASLLNNLVVCSKCGLSFVHRRKDAMGRDKKYHYRYYSCKTYKHIHELEKCGNKIWRADKLEELIINRVNNYSFASRNAGKEDELDSLNEKLKIEHAKKRRLFELYINGRYEVSELDSMMNDIDAQINYYESQIEANEGLKENKKIQENLANLATVDFDSLEFREKQLYLKSLINKIYIDGEQVTIEWL

SEQ ID NO: 5404 - protein, 452 aa, synthetic construct
MKAAIYIRVSTQEQVGNYSIQAQTEKLTALCRSKDWDVYDIFIDGGYSGSNMNRPALNEMLSKLHEIDAVVVYRLDRLSRSQRDTTTLIEEYFLKNNVEFVSLSETLDTSSPFGRAMIGILSVFAQLERETIRDRMVMGKIKRIEAGLPLTTAKGRTFGYDVIDTKLYINEEEAKQLQLIYDIFEEEQSITFLQKRLKKLGFKVRTYNRYSSWLTNDLYCGYVSYKDKVHVKGIHEPIISEEQFYRVQEIFTRMGKNPNMNRDSASLLSNLVVCSKCGLGFVHRSKDTMSRGKKYHYRYYSCKTYKHTHELEKCGNKTWRADILEELIINRVNNYSLASRNVDREDELDSLNEKLKIEHAKKKRLFDLYINGNYEVSELDSMMNDIDAQINYYESQIEASEELKKNKKIQEDLAGLATVDFDNLEFREKQLYLKSLINKIYIDGEQVTIEWL

SEQ ID NO: 5405 - protein, 452 aa, synthetic construct
MKAAIYIRVSTREQVENYSIQAQTERLTALCRSKDWDVYDIFVDGGYSGSNMNRPALNEMLSKLHEIDAVVVYRLDRLSRSQRDTITLIEEYFLKNNVEFVSLSETLDTSSPFGRAMIGILSVFAQLERETIRDRMVMGKIKRIEAGLPLTTAKGRTFGYDVIDTKLYINEKEAKQLQLIYDIFEEEQSITFLQKRLKELGFKVRTYNRYNNWLTNDLYCGYVSYKDKVHVKGIHEPIISEEQFYRVQEIFTRMGKNPNMNRDSASLLNNLVVCSKCGLGFVHRRKDTMSRGKKYHYRYYSCKTYKHTHELEKCGNKIWRADKLEELIINRVNNYSFASRNADKEDELDSLNEKLKIEHAKKKRLFDLYINGSYEVGELDSMMNVIDAQINCYESQIEANEELRKNKKIQENLANLATVDYDSLEFREKQLYLKSLINKIYIDGEQVTIEWL

SEQ ID NO: 5406 - protein, 485 aa, synthetic construct
MTKKVAIYTRVSTTNQAEEGFSIDEQIDRLTKYAEAMGWQVSDTYTDAGFSGAKLERPAMQRLINDIENKAFDTVLVYKLDRLSRSVRDTLYLVKDVFTKNKIDFISLNESIDTSSAMGSLFLTILSAINEFERENIKERMTMGKLGRAKSGKSMMWTKTAFGYYHNRKTGILEIVPPQATIVEQIFTDYLSGVSLTKLRDKLNESGHIGKDIPWSYRTLRQTLDNPVYCGYIKFKDSLFEGMHKPIIPCETYLKVQKELEERQQQTYERNNNPRPFQAKYMLSGMARCGYCGAPLRIVLGHKRKDGSRTMKYHCANRFPRKTRGVTVYNDNKKCDSGAYDLRNLENTVIENLIGFQENNDSLLKIINGNNQPILDTSSFEKQISQIDKKIQKNSDLYLNDFITMDELKDRTDSLQAEKKLLKAKISENKFNDSTDVFELVKTQLGSIPINELSYDNKKKIVNSLVSKVDVTADNVDIIFKFQLA

SEQ ID NO: 5407 - protein, 485 aa, synthetic construct
MTKKVAIYTRVSTTNQAEEGFSIDEQIDRLTKYAEAMGWQVSDTYTDAGFSGAKLERPAMQRLINDIENKAFDTVLVYKLDRLSRSVRDTLHLVKEVFTKNKIDFISLNESIDTSSAMGSLFLTILSAINEFERENIKERMTMGKLGRAKSGKSMMWTKTAFGYHHNRKTGILEIVPLQATIVEQIFTDYLSGISLTKLRDRLNESGHIGKDIPWSYRTLRQTLDNPVYCGYIKFKGSLFEGVHKPIIPYETYLKVQKELEERQQQTYERNNNPRPFQAKYMLSGMARCGYCGAPLRIVLGHKRKDGSRTMKYHCANRFPRKTKGITVYNDNKKCDSGTYDLSNLENTVIDNLIGFQEDNDSLLKIINGNNQPILDTSSFKEQISRIDKKIQKNSDLYLNDFITMDELKDRTDSLQAEKKLLKAKISENKFNDGTDVFELVKTQLGSIPIDELSYDNKKKIVNNLVSKVDVTADNVDIIFKFQLA

SEQ ID NO: 5408 - protein, 452 aa, synthetic construct
MKAAIYIRVSTQEQVGNYSIQAQTEKLTALCRSKDWDVYDIFIDGGYSGSNMNRPALNEMLSKLHEIDAVVVYRLDRLSRSQRDTTTLIEEYFLKNNVEFVSLSETLDTSSPFGRAMIGILSVFAQLERETIRDRMVMGKIKRIEAGLPLTTAKGRTFGYDVIDTKLYINEEEAKQLRLIYDIFEEEQSITSLQKRLKKLGFKVRTYNRYNNWLTNDLYCGYVSYKDKVHVKGIHEPIISEEQFYRVQEIFTRMGKNPNMNRDSASLLSNLVVCSKCGLGFVHRSKDTMSRGKKYHYRYYSCKTYKHTHELEKCGNKTWRADKLEELIINRVNNYSFASRNADKEDELDSLNEKLKIEHAKKRRLFDLYINGSYEVSELDSMMNDIDAQINYYESQIEANEELRKNKKIQENLAGLATVDFDSLEFREKQLYLKSLINKIYIDGEQVAIEWL

SEQ ID NO: 5409 - protein, 452 aa, synthetic construct
MKAAIYIRVSTREQVENYSIQAQTEKLTALCRSKGWDVYDIFIDGGYSGSNMNRPALNEMLSKLHEIDAVVVYRLDRLSRSQRDTITLIEEYFLKNNVEFVSLSETLDTSSPFGRAMIGILSVFAQLERETIRDRMVMGKIKRIEAGLPLTTAKGRTFGYDVIDTKLYINEEEAKQLQLIYDIFEEEQSITFLQKRLKKLGFKVHTYNRYNNWLTNDLYCGYVSYKDKVHVKGIHEPIISEEQFYRVQEIFTRMGKNPNMNRDSASLLSNLVVCSKCGLGFVHRRKDTTSRGKKYHYRYYSCKTYKHTHELEKCGNKIWRADKLEELIINRVNNYSFASRNVDKAEELDSLSEKLKVEHAKKERLFDLYINGSYNVSELDSMMNDIDAQINYYESQIEANEGLKKNKKIQENLAGLATVDFDSLEFREKQLYLKSLINKIYIDGEQVTIEWL

SEQ ID NO: 5410 - protein, 485 aa, synthetic construct
MTKKVAIYTRVSTTNQAEEGFSIDEQVDRLTKYAEAVGWQVSDTYTDAGFSGAKLERPAMQRLINDIENKAFDTVLVYQLDRLSRSVRDTLYLVKDVFTKNKIDFISLNESIDTSSAMGSLFLTILSAINEFERENIKERMTMGKLGRAKSGKSMMWTKTAFGYYHNRKTGILEIVPLQATIVEQIFTDYLSGISLTKLRDKLNESGHIGKDIPWSYRTLRQTLDNPVYCGYIKFKGSLFEGMHKPIIPYETYLKVQKELEERQQQTYERNNNPRPFQAKYMLSGMARCGYCGAPLKIVLGHKRKNGSRTMKYHCANRFPRKTKGVTVYNDNKKCDSGAYDLSKLENTVIDNLIDFQENNDSLLKIINGNNQPILDTSSFEKQISQIDKKIQKNSDLYLNDFITMDELRDRTDSLRAEKKLLKAKISENKFNDSTDVFELVKTQLGSIPINELSYDNKKKIVNNLVSKVDVTADNVDIIFKFQLA

SEQ ID NO: 5411 - protein, 485 aa, synthetic construct
MTKKVAIYTRVSTTNQAEEGFSIDEQIDRLTKYAEAMGWQVSDTYTDAGFSGAKLGRPAMQRLINDIENKAFDTVLVYKLDRLSRSVRDTLYLVKDVFTKNRIDFISLNESIDTSSAMGSLFLTILSAINEFERENIKERMTMGKLGRAKSGKSMMWTKTAFGYYHNRKTGILEIVPLQATIVEQIFTDYLSGISLTRLRDKLNKSGHIGKDIPWSYRTLRQTLGNPVYCGYIKFKDSLFEGMHKPIIPYETYLKVQKELEERQQRTYERNNNPRPFQAKYMLSGTARCGYCGAPLRIVLGHKRKDGSRTMKYHCANRFPRKTKGITVYNDNKKCDSGTYDLSNLENTVIDNLISFQENNDSLLKIINGNNQPILDTSSFKKQISQIDKKIQKNSDLYLNDFITMDELKDRTDSLQAEKKLLKAKISETKFNDSTDVFEQVKTQLGSTPINELSYDNKKKIVNNLVSKVDVTADNVDIIFKFQLA

SEQ ID NO: 5412 - protein, 452 aa, synthetic construct
MKAAIYIRVSTREQVENYSIQAQTEKLTALCRSKDWDVYDIFIDGGYSGSNMNRPALNEMLSKLHEIDAVVVYRLDRLSRSQRDTITLIEEYFLKNNVEFVSLSETLDTSSPFGRAMIGILSVFAQLERETIRDRMVMGKIKRIEAGLPLTTAKGRTFGYDVIDTKLYINEEEAKQLQLIYDIFEEERSITFLQKRLKKLGFKVRTYNRYNNWLTNDLYCGYVSYKDKVHVKGIHEPIISEEQFYRVQEIFTRMGKNPNMNRDSASLLNNLVVCSKCGLGFVHRRKDAMSRDKKYHYRYYSCKTYKHIHELEKCGNKIWRADKLEELIINRVNNYSFASRSADKEDELDSLNEKLKIEHAKKKRLFDLYINGSYKVSELDNMMKDIDAQINYYESQIEANEELRKNKKIQETLADLATVDFDSLEFREKQLYLKSLINKIYIDGEQVTIEWL

SEQ ID NO: 5413 - protein, 452 aa, synthetic construct
MKAAIYIRVSTREQVENYSIQVQTEKLTALCRSKGWDVYDIFIDGGYSGSNMNRPALNEMLSKLHEIDAVVVYRLDRLSRSQRDTITLIEEYFLKNNVEFVSLSETLDTSSPFGRAMIGILSVFAQLERETIRDRMVMGKIKRIEAGLPLTTAKGRTFGYDVIDTKLYINEEEAKQLQLIYDIFEEEQSITFLQKRLKKLGFKVHAYNRYNNWLTNDLYCGYVSYKDRVHVKGIHEPIISEEQFYRVQEIFTRMGKNPNMNRDSASLLNNLVVCSKCGLGYVHRRKDTTSRGKKYHYRYYSCKTYKHTHELEKCGNKIWRADKLEELIINRVNDYSSAGRNVDKEDELDSLNEKLKIEHAKKERLFDLYINGSYEVSELDSMTNDIDAQINNYESQIEANEELKKNEKIQESLADLATVDFDGLEFREKQLYLKSLISKIYIDGEQVTIEWL

SEQ ID NO: 5414 - protein, 485 aa, synthetic construct
MTKKVAIYTRVSTTNQAEEGFSIDEQIDRLTKYAEAMGWQVSDTYTDAGSSGAKLERPAMQRLINDIENKAFDTVLVYKLDRLSRNVRDTLYLVKDVFTRNKIDFISLNESIDTSSAMGSLFLTILSAINEFERENIKERMTMGKLGRARSGKSMMWTKTAFGYYHNRKTGILEIVPLQATIVEQIFSDYLSGISLTKLRDKLNESGHIGKDIPWSYRTLRQTLDNPVYCGYIKFKDSLFEGMHKPIIPYETYLKVQKELEERQQQTYERNNNPRPFQAKYMLSGMARCGYCGAPLRIVLGHKRRDGSRTMKYHCANRFPRRTKGVTVYNDNKKCDSGTYDLSNLENTVIDILIGFQENDDSLLEIINGNNQPILDTSSFEEQISQIDKKIQKNSDLYLNDFITMDELEDRTDSLQAEKKLLKAKISGNKFNDSTDVFELVKTQLGSTPINELSYDNKKKIVNNLVSKVDVTADNVDIIFKFQLA

SEQ ID NO: 5415 - protein, 452 aa, synthetic construct
MKAAIYIRVSTREQVENYSIQAQTERLTALCRSKDWDVYDIFIDGGYSGSNMNRPALNEMLSKLHEIDAVVVYRLDRLSRSQRDTITLIEEYFLKNSVEFVSLSETLDTSSPFGRAMIGILSVFAQLERETIRDRMVMGKIKRIEAGLPLTTAKGRTFGYDVIDTKLYINEEEAKQLQLIYDIFEEERSITFLQKRLKKLGFKVRTYNCYNNWLTNDLYCGYVSYKDKVHVKGIHEPIISEEQFYRVQEIFTRMGKNPNMNRDSASLLNNLVVCSKCGLGFVHRRKDTTSRGKKYHYRYYSCKTYKHIHELEKCGNKIWRADKLEELVINRVNNYSSASRNVDKEDELDSLSEKLKIEHAKKKRLFDLYISGSYEVSELDSMMNDIDAQINYYEGRIEANEELRKNKKIQENLANLATVDYDSLEFREKQLYLKSLINKIYIDDEQVTIEWL

SEQ ID NO: 5416 - protein, 469 aa, synthetic construct
MNYTTPVRAAVYLRISEDRSGEQLGVARQREDCLKLCGQHKWVPVEYLDNDVSASTGKRRPAYEQMLADITAGKIAAVVAWDLDRLHRRPIELEAFMSLADEKHLALATVAGDVDLATPQGRLVARLKGSVAAHETEHKKARQRRAARQKAERGLPNWSKAFGYLPGPNGPEPDPRTAPLVEQAYADILAGASLGDVCRQWNDAGAFTITGRPWTTTTLSKFLRKPRNAGLRAYKGARYGPVDRDAIVGKAQWSPLVDEATFWAAQAVLDAPGRAPGRKSVRRHLLTGLAGCGKCGNHLAGSYRTDGQVVYVCKACYGVAILADNIVPILYHVVAERLAMPDAVDLLRHEIHDAAEAEAIRLELETLYGELDRLAVERAEGLLTARQVKISTDIVNAKITKLQARQLDQERQRVFNGIPLGTPQVAGVIEELSPNRFRAVLDVLAEVVVQPVGKRGRIFNPERVQVNWR

SEQ ID NO: 5417 - protein, 452 aa, synthetic construct
MKAAIYIRVSTQEQVGNYSIQAQTEKLTALCRSKDWDVYDIFIDGGYSGSNMNRPALNEMLSKLHEIDAVVVYRLDRLSRSQRDTTTLIEEYFLKNNVEFVSLSETLDTSSPFGRAMIGILSVFAQLERETIRDRMVMGKIKRIEAGLPLTTAKGRTFGYDVIDTKLYINEEEAKQLRLIYDIFEEEQSITFLQKRLKKLGLKVRTYNRYNSWLTNDLYCGYVSYKDKVHVKGIHEPIISEEQFYRVQEIFTRMGKSPNMNRDSASLLSNLVVCSKCGLGFVHRSKDTMSRGKKYHYRYYSCKTYKHTHELEKCGNKTWRADKLEELIINRVNNYSFASRNVDKEGELDSLNEKLKIEHAKKRRLFDLYINGSYEVSELDSMMNDIDAQISYYESQIEANEELKKNKKIQENLANLATVDFDSLEFREKQLYLKSLINRIYIDGEQVTIEWL

SEQ ID NO: 5418 - protein, 452 aa, synthetic construct
MKAAIYIRVSTREQVENYSIQAQTEKLTALCRSKDWDVYDIFIDGGYSGSNMNRPALNEMLSKLHEVDAVVVYRLDRLSRSQRDTITLIEEYFLKNNVEFVSLSETLDTSNPFGRAMIGILSVFAQLERETIRDRMVMGKIKRIEAGLPLTTAKGRTFGYDVIDTKLYINEEEAKQLQLIYDIFEEVQSITFLQKRLKKLGFKVRTYNRYNSWLTNDLYCGYVSYKDKVHVKGIHEPIISEEQFYRVQEIFTRMGKNPNMNRGSASLLNNLVVCSKCGLGFVHRRKDTTSRGKKYHYRYYSCKTYKHIHELEKCGNKIWRADKLEELVINRVNNYSFASRNVDKAEELDSLNEKLKVEHAKRKRLFDLYINGSYEVSELDSMMNDIDAQINYYESQIEANEELKKNKKIQENLADLATVDFDSLGFREKQLYLRSLINKIYIDGEQVSIEWL

SEQ ID NO: 5419 - protein, 485 aa, synthetic construct
MTKKVAIYTRVSTTNQAEEGFSIDEQIDRLTKYAEAMGWQVSDTYTDAGFSGAKLERPAMQRLINDIEDKAFDTVLVYKLDRLSRSVRDTLYLVKDVFTKNKIDFISLNECIDTSSAMGSLFLTILSAINEFERENIKERLTMGKLGRAKSGKSMMWTKTAFGYYHNRKTGILEIVPLQAAIVEQIFTDYLSGISLTKLRDKLNESGHIGKDIPWSYRTLRQTLDNPVYCGYIKFKDSLFEGMHKPIIPYETYLKVQKELEERQQQTYERNNNPRPFQAKYMLSGMARCGYCGAPLRIVLGHKRKDGSRTMKYHCANRFPRKTKGVTVYNDNKKCDSGTYDLSNLENTVIDSLIGFQENNDSLLKIINGNNQPILDTSSLKKQISQIDKKIQKNNDLYLNDFITMDELKDRTDSLQAEKKLLKAKISENKFNDSTDVFELVKTQLGNIPINELSYDDKKKIVNNLVSKVDVTADNVDIIFKFQLA

SEQ ID NO: 5420 - protein, 452 aa, synthetic construct; identical to SEQ ID NO: 2167

SEQ ID NO: 5421 - protein, 452 aa, synthetic construct
MKAAIYIRVSTREQVENYSIQAQTEKLTALCRSKDWDVYDIFVDGGYSGSNMNRPALNEMLSKLHEIDAVVVYRLDRLSRSQRDTITLIEEYFLKNNVEFVSLSETLDTSSPFGRAMIGILSVFAQLERETIRDRMVMGKIKRIEAGLPLTTAKGRTFGYDVIDTKLYINEEEAKQLRLIYDIFEEEQSITFLQKRLKKLGFRVRTYNCYNNWLTNDLYCGYVSYKDKVHVKGIHEPIISVEQFYRVQEIFTRMGKNPNMNRGSASLLNNLVVCSKCGLGFVHRRKDAMSRDKKYHYRYYSCKTYKHIHELEKCGNKIWRADKLEELIIDRVNNYSLASRNVDKEDELDSLNEKLRIEHAKKKRLFDLYINGSYEVSELDSMMNDIDAQINYYESQIEANEELRKNKKIREDLAVLATVDFDSLEFREKQLYLKSLINKIYIDGEQVTIEWL

SEQ ID NO: 5422 - protein, 469 aa, synthetic construct
MSYTTPVRAAVYLRISEDRSGEQLGVARQREDCLKLCDQRKWVPVEYLDNDVSASTGKRRPAYEQMLADITAGKIAAVVAWDLDRLHRRPIELEAFMSLADEKRLALATVAGDVDLATPQGRLVARLKGSVAAHETEHKKARQRRAARQKAELGHPNWSKAFGYLPGPNGPEPDPRTAPLVKQAYTDILAGASLGDVCRQWNAAGAFTITGRLWTTATLSKFLRKPRNAGLRAYKGARYGPVDRDAIVGKAQWSPLVDETTFWAAQAVLDAPGRAPGRKSVRRHLLTGLAGCGKCGNHLAGSYRTDGRVVYVCKTCHGVAILADNIEPILYHIVAERLAMPDAVDLLRREIHDAAEAEAIHLELETLYGELDRLAVERAEGLLTARQVRISTDIVNAKITKLQAHQQDQERLRVLDGIPLGTPQVAGVIAELSPNRFRAVLDVLAEVVVQPVGKSGKIFNPERVQVSWR

SEQ ID NO: 5423 - protein, 485 aa, synthetic construct
MTKKVAIYTRVSTTNQAEEGFSIDEQIDCLTKYAEAMGWQVSDTYTDAGHSGAKLGRPAMQRLINDIENKAFDTVLVYKLDRLSRSVRDTLYLVKDVFTKNKIDFISLNESIDTSSAMGSLFLTILSAINEFERENIKERMTMGKLGRAKSGKSMMWTKTAFGYYHNRKTGILEIVPLQAAIVEQIFTDYQSGISLTKLRDKLNESGHIGKDIPWSYRTLRQTLDNPVYCGYIKFKGSLFEGMHKPIIPYETYLKVQKELKERQQQTYERNNNPRPFQAKYMLSGMARCGYCGAPLKIVLGHKRKDGSRTMKYHCANRFPRKTKGVTVYNDNKKCDSGTYDLSNLENTVIDNLIGFQENNDSLLKIINGNNQPILDTSSFKKQISQIDKKIQKNSDLYLNDFITMDELKDRTDSLLAEKKLLKAKISENKFNDSTDVFELVKTQLGSIPINELSYDNKKKIVNNLVSKVDVTADNVDIIFKFQLA

SEQ ID NO: 5424 - protein, 452 aa, synthetic construct
MKAAIYIRVSTREQVENYSIQAQTEKLTALCRSKDWDVYDIFIDGGYSGSNMNRPALNEMLSKLHEIDAVVVYRLDRLSRSQRDTITLIEEYFLKNNVEFVSLSETLDTSSPFGRAMIGILSVFAQLERETIRDRMVMGKIKRIEAGLPLTTAKGRTFGYDVIDTKLYINEEEARQLQLIYDIFEEERSITSLQKRLKKLGFKVHTYGRYNNWLTNDLYCGYVSYRDKVHVKGIHEPIISEEQFYRVQEIFTRMGKNPNMNRDSASLLNSLVVCSKCGLSFVHRRKDTMSRGKKYHYRYYSCKTYKHTHELEKCGNKIWRADKLEELIINRVNNYSLASRNVGKEDGLDCLNEKLKIEHAKKRRLFDLYLSGSYEVSELDSMMNDIDAQINYYESQIGANEELKKNKKIQENLANLATVDYDSLEFREKQLYLKSLINKIYIDGEQVTIEWL

SEQ ID NO: 5425 - protein, 485 aa, synthetic construct
MTKKVAIYTRVSTINQAEEGFSIDEQIDRLTKYAEAMGWQVSDTYTDAGLSGAKLERPAMQRLISDIENKAFDTVLVYKLDRLSRSVRDTLYLVKDVFTKNKIDFISLNESIDTSSAMGSLFLTILSAINEFERENIKERMTMGKLGRAKSGKSMMWTKTAFGYYHNRKTGILEIVPLQATIVEQIFTDYLSGISLTKLRDKLNESGHIGKDIPWSYRTLRQTLDNPVYCGYIKFKDSLFEGMHKPIIPYETYLKVQKELEERQQQTYERNNNPRPFQAKYMLSGMARCGYCGAPLRIVLGHKRKDGSRTMKYHCTNRFPRKTKGITVYNDNKKCDSGTYDLSNLENTVIDNLIGFQENNDSLLKIINGNNQPILDTSSFKKQISQIDKKIQKNSDLYLNDFITMDELKDRTDSLQAEKKLLKAKISENKFNDSTDVFELVKTQLGSIPINELSYDNKKKIVTNLVSKVDVTADNVDIIFKFQLA

SEQ ID NO: 5426 - protein, 452 aa, synthetic construct
MKAAIYIRVSTREQVENYSVQAQTEKLTALCRSKDWDVYDIFIDGGYSGSNMNRPALNGMLSKLHEIDAVVVYRLDRLSRSQRDTITLIEEYFLKNNVEFVSLSETLDTSSPFGRAMIGILSVFAQLERETIRDRMVMGKIKRIEAGLPLTTAKGRTFGYDVIDTKLYINEEEARQLQLIYDIFEEEQSITFLQKRLKKLGFKVRSYNRYNNWLTNDLYCGYVSYKDKVHVKGIHEPIISEEQFYRVQEIFTRMGKNPNMNRDSASLLNNLVVCGKCGLGFVHRRKDTMSRDKKYHYRYYSCKTYKHIHELEKCGNKIWRADKLEELIIDRVNNYSFASRNADKEDELDSLDEKLEIEHAKKRRLFELYINGSYEVSELDSMMSDIDAQINYYEGQIEANEELRKNKKIQENLANLATVDFDSLEFREKQLYLKSLINKIYIDGEQVTIEWL

SEQ ID NO: 5427 - protein, 452 aa, synthetic construct
MKAAIYIRVSTQEQVGNYSIQAQTEKLTALCRSKDWDVYDIFVDGGYSGSNMNRPALNEMLSKLHEIDAVVVYRLDRLSRSQRDTTTLIEEYFLKNNVEFVSLSETLDTSSPFGRAMIGILSVFAQLERETIRDRMVMGKIKRIEAGLPLTTAKGRTFGYDVIDTKLYINEEEAKQLQLIYDIFEEEQSITSLQKRLKKLGFKVRTYNRYNNWLTNDLYCGYVSYKDKVHVKGIHEPIISEEQFYRVQEIFTRMGKNPNMNRDSASLLSNLVVCSKCGLGFVHRSKDTMSRGKKYHYRYYSCKTYKHTHELEKCGNKIWRADKLEELIISRVNNYSFASRNVDKEDELDSLNEKLKIERAKKKRLFDLYINGGYEVSELDSMMNDIDAQINYYESQIEANEELKKNKKIQENLADLATVDFDSLEFREKQLYLKGLINKIYIDGEQVTIEWL

SEQ ID NO: 5428 - protein, 469 aa, synthetic construct; identical to SEQ ID NO: 1971

SEQ ID NO: 5429 - protein, 485 aa, synthetic construct
MTKKVAIYTRVSTTNQAEEGFSIDEQVDRLTKYAEAMGWQVSGTYTDAGISGAKLERPAMQRLISDIENKAFDTVLVYKLDRLSRSVRDTLYLVKDVFTKNKIDFISLNESIDTSSAMGSLFLTILSAINEFERENIKERMTMGKLGRAKSGKSMMWTKTAFGYYHNRKTGILEIVPLQATIVEQIFTDYLSGISLTKLRDKLNEGGHIGKDIPWSYRTLRQTLDNPVYCGYIKFRGSLFEGMHKPIIPYETYLKVQKELEERQQQTYERNNNPRPFQAKYMLSGMARCGYCGAPLRIVLGHRRKDGSRTMKYHCANRFPRKTKGVTVYNDNKKCDSGTYDLSNLENTVIDILIGFQENNDSLLKIINDNNQPILDTSSFKEQISQIDKKIQKNSDLYLNDFITMDELRDRTDSLQAEKKLLKAKISENKFNDSADVFELVKTQLGSIPISELSYDNKKKIVNNLVSKVDVTADNVDIIFKFQLG

SEQ ID NO: 5430 - protein, 452 aa, synthetic construct
MKAAIYIRVSTQEQVENYSIQAQTEKLTALCRSKDWDVYDIFIDGGYSGSNMNRPALNEMLSKLHEIDAVVVYRLDRLSRSQRDTTTLIEEYFLKNNVEFVSLSETLDTSSPFGRAMIGILSVFAQLERETIRDRMVMGKIKRIEAGLPLTTAKGRTFGYDVIDTKLYINEEEAKQLQLIYDIFEEEQSITSLQKRLKKLGFKVRTYNRYNNWLTNDLYCGYVSYKDKVHVKGIHEPIISEEQFYRVQEIFTRMGKKPNMNRDSASLLNNLVVCSKCGLGFVHRSKDTMSRGKKYHYRYYSCKTYKHTHELEKCGNKIWRADKLEELIINRVNSYSFASRNVDKEDELDSLNEKLKIEHAKKKRLFDLYINGSYEVSELDSMMNDIDAQINYYESQIEANEELKENKKIQENLAELATVDFDSLEFREKQLYLKSLINKIYIDGEQVTIEWL

SEQ ID NO: 5431 - protein, 452 aa, synthetic construct
MKAAIYIRVSTREQVENYSIQAQTEKLTALCRSKDWDVYDIFIDGGYSGSNMNRPALNKMLSKLHEIDAVVVYRLDRLSRSQRDTITLIEEYFLKNNVEFVSLSETLDTSSPFGRAMIGILSVFAQLERETIRDRMVMGKIKRIEAGLPLTTAKGRTFGYDVIDTKLYINEEEAKQLQLIYDIFEEEQSITFLQKRLKRLGFKVRTYNRYNNWLTNDLYCGYVSYKDKVHVKGIHEPIISEEQFYRVQEIFTRMGKNPNMNRESASLLNNLVVCSKCGLGFVHCRKDAMSRDKKYHYRYYSCKTYKHIHELEKCGNKIWRADKLEELIINRVNNYSFASRNKEKEDELDSLNEKLRIEHAKKKRLFDLYINGSYEVSELDSMMNDIDAQISYYESQIVANEELRKNKKIQGNLAHLATVDFDSLEFREKQLYLKSLINKIYIDGEQVTIEWL

SEQ ID NO: 5432 - protein, 452 aa, synthetic construct
MKAAIYIRVSTREQVENYSIQAQTEKLTALCRSKDWDVYDIFIDGGYSGSNMNRPALNEMLSKLHEIDAVVVYRLDRLSRSQRDTITLIEEYFLKNNVEFVSLSETLDTSSPFGRAMIGILSVFAQLERETIRDRMVMGKIKRIEAGLPLTTARGRTFGYDVIDTKLYINEEEARQLRLIYDIFEEEQSITFLQKRLKKLGFKVRTYNRYSNWLTNDLYCGYVSYKDRVHVKGIHEPIISEEQFYRVQEIFTRMGKNPNMNRDSASLLNNLVVCSKCGLGFVHRRKDIMSHGKKYHYRYYSCKTYKHIHELEKCGNKIWRADKLEELIISRVNNYSLTSRNVDKEDELDSLNEKLEIEHAKKRRLFDLYINGSYEVSELDSMMYDIDAQINYYESQIEANEELKKNKKIQENLAHLATVDFDSLEFREKQLYLKSLINKIYIDGEQVTIEWL

SEQ ID NO: 5433 - protein, 469 aa, synthetic construct
MSYTTPVRAAVYLRISEDRSGEQLGVARQREDCLKLCGQRKWVPVEYLDNDVSASTGKRRPAYEQMLADITAGKIAAVVAWDLDRLHRRPVELEAFMSLADEKRLALATVAGDVDLATPQGRLVARLKGSVAAHETEHKKARQRRAARQKAERGLPNWSKAFGYLPGPNGPEPDPRTAPLVRQAYADILAGASLGDVCRQWNSAGAFTITGRPWTTTALSKFLRKPRNAGLRAYKGARYGPVDRDAIVGKAQWSPLVDEATFWAAQAVLDAPGRAPGRKSVRRHLLTGLAGCGKCGNHLAGSYRTDGQVVYVCKACHGVSILADNIEPILYHIVAERLAMPDAVDLLRREIHDAAEAETIRLELETLYGELDRLAVERAEGLLTARQVKISTDIVNAKITKLQARQLDQERLRVLDGIPLGTPQVAAMIAELSPDRFRAVLDVLAEVVVQPVGKSGRIFNPERVQVNWR

SEQ ID NO: 5434 - protein, 452 aa, synthetic construct
MKAAIYIRVSTREQVENYSIQAQTEKLTALCRSKDWDVYDTFIDGGYSGSNMNRPALNEMLSKLHEIDAVVVYRLDRLSRSQRDTITLIEEYFLKNNVEFVSLSETLDTSSPFGRAMIGILSVFAQLERETIRDRMVMGKIKRIEAGLPLTTAKGRTFGYDVIDTKLYINEEEARQLQLIYDIFEEEQSITFLQKRLKKLGFKVRTYNRYNNWLTNDLYCGYVSYKDKVHVKGIHEPIISEEQFHRVQEIFTRMGENPNMNRDSASLLNNLVVCSKCGLGFVHRRKDAMSRDKKYHYRYYSCKTYKHIHELEKCGNKIWRADKLEELIISRVNNYSLASRNVDKEDELDSLNEKLKIEHAKKKRLFDLYINGSYEVSELDSMMNDIDAQINYYEGRIKANEELRKNKKIQENLADLATVDFDSLEFREKQLYLKSLINKIYIDGEQVTIEWL

SEQ ID NO: 5435 - protein, 469 aa, synthetic construct; identical to SEQ ID NO: 1361

SEQ ID NO: 5436 - protein, 469 aa, synthetic construct
MSYTTPVRAAVYLRISEDRSGEQLGVARQREDCLKLCDQRKWVPVEYLDNDVSASTGKRRPAYEQMLADITAGKITAVVAWDLDRLHRRPIELEAFMSLADEKRLALATVAGDVDLATPQGRLVARLKGSVAAHETEHKKARQRRAARQKAERGHPNWSKAFGYLPGPNGPEPDPRTAPLVKQAYADILAGASLGEVCRQWNGAGAFTITGRPWTTATLSKFLRKPRNAGLRAYKGARYGPVDRDAIVGKAQWSPLVDEATFWAAQAVLDAPGRAPGRKSVRRHLLTGLAGCGKCGNHLAGSYRTDGQVVYVCKACYGVAILADNIVPILYHVVAERLAMPDAVDLLRREIHDAAEAEAIRLELETLYGELDRLAVERAEGLLTARQVKISTDIVNAKITKLQARQLDQERLRVFNGIPLGTPQVAGVIAELSPDRFRAVLDVLAEVVVQPVGKGGRIFNPERVQVNWR

SEQ ID NO: 5437 - protein, 485 aa, synthetic construct
MTKKVAIYTRVSTTNQAEEGFSIDEQIDRLTKYAEAMGWQVSDTYTDAAFSGAKLERPAMQRLINDIENKAFDTVLVYKLDRLSRSVRDTLYLVKDVFTKNKIDFISLNESIDTSSAMGSLFLTILSAINEFERENIKERMAMGKLGRAKSGRSMMWTKTAFGYYHNRKTGILEIVPLQAAIVEQIFTDYLSGISLTKLRDKLNESGHIGKDIPWSYRTLRQTLDNPVYCGYIKFKDSLFEGMHKPIIPYETYLKVQKELEERQQQAYERYNNPRPFQAKYMLSGMARCGYCGAPLRIVLGHKRKDGSRTMKYHCANRFPRKTKGVTVYNDNKKCDSGTYDLSNLENTVIDNLIGFQENNDSLLKIINGNNQPILDTSSFKKQISQIDKKIQKNSDLYLNDFITMDELKDRTDRLQAEKKLLKAKISENKFNDSTDVFELVRTQLGSIPINELSYDNKKKIVNNLVSKVDVTADNVDIIFKFQLA

SEQ ID NO: 5438 - protein, 452 aa, synthetic construct
MKAAIYIRVSTREQVENYSIQAQTERLTALCRSKDWDVYDIFIDGGYSGSNMNRPALNEMLSKLHEIDAVVVYRLDRLSRSQRDTITLIEEYFLKNNVEFVSLNETLDTSSPFGRAMIGILSVFAQLERETIRDRMVMGKIKRIEAGLPLTTAKGRTFGYDVIDTKLYINEEEAKQLQLIYDIFEEEQSITFLQKRLKKLGFKVRTYSCYNNWLTNDLYCGYVSYKDKVHVKGIHEPLISEEQFYRVQEIFTRMGKNPNMNRDSASLLNNLVVCSKCGLGFVHRRKDTMSRGKKYHYRYYSCKTYKHTHELEKCGNKIWRADELEELIINRVNDYSLASRNVDKEDELDSLNEKLKVEHAKKKRLFDLYINGSYNVSELDSMMNDIDAQINYYESQIEANEELKKNKKIQENLANLATVDFDRLEFRERQLYLKSLINKIYIDGEQVTIEWL

SEQ ID NO: 5439 - protein, 485 aa, synthetic construct
MTRKVAIYTRVSTTNQAEEGFSIDEQSDRLTKYAEAMGWQVSDTYTDAGFSGAKLERPAMQRLINDIENKAFDTVLVYKLDRLSRSVRDTLHLVKDVFTKNKIDFISLNESIDTSSAMGSLFLTILSAINEFERENIKERMTMGKLGRAKSGKSMMWTKTAFGYYHNRKTGILEIAPLQATIVEQIFTDYLSGISLTKLRDKLNESGHIGKDIPWSYRTLRQTLDNPVYCGYIKFKGSLFEGMHKPIIPYETYLKVQKELEERQRQTYERNNNPRPFQAKYMLSGMARCGYCGAPLKIVLGHKRKDGSRTMKYHCANRFPRKTKGVTVYNDNKKCDSGTYDLRNLENTVIDNLIGLQENNDSLLKIVNGNNQPILDTSSFKKQISQIDKKIQKNSDLYLNDFITMDELKDRTDSLQAEKKLLKARISENKFNDSTDVFELVKTQLGSIPINELSYDNKKRIVNNLVSKVDVTADNVDIIFKFQQA

SEQ ID NO: 5440 - protein, 452 aa, synthetic construct
MKAAIYIRVSTREQVENYSIQAQAEKLTALCRSKDWDVYDIFIDGGYSGSNMNRPALNEMLSKLHEIDAVVVYRLDRLSRSQRDTITLIEEYFLKNNVEFVSLSETLDTSSPFGRAMIGILSVFAQLERETIRDRMVMGKIKRIEAGLPLTTAKGRTFGYDVIDTKLYINEEEAKQLRLIYDIFEEEQSITFLQKRLKELGLKVRTYNRYNNWLTNDLYCGYVSYKDKVHVKGIHEPIISEEQFNRVQEIFTRTGKNPNMNRGSASLLNNLVVCSKCGLGFVHRRKDAMSRDKKYHYRYYSCKTYKHIHELEKCGNKIWRADKLEELIINRVNSYSLASRNVDKEDELDSLNEKLKAEHAKKKRLFDLYINGSYEVSELDSMMNDIDAQINYYESQIEANEELRRNKKIQENLAYLATVDFDSLEFREKQLYLKSLINKIHIDGEQVTIEWL

SEQ ID NO: 5441 - protein, 452 aa, synthetic construct
MKAAIYIRVSTREQVENYSIQAQTEKLTALCRSKDWDVYDIFIDGGYSGSNMNRPALNEMLSKLHEIDAVVVYRLDRLSRSQRDTITLIEEYFLKNNVEFVSLSETLDTSSPFGRAMIGILSVFAQLERETIRDRMVMGKIKRVEAGLPLTTAKGRTFGYDVIDTKLYINEEEAKQLQLIYDIFEEEQSITLLQKRLKKLGFKVRTYNRYNSWLTNDLYCGYVSYKDKVHVKGIHEPIISEEQFYRVQEIFARMGKNPNMNRDGASLLNNLVVCSKCGLGFVHRRKDTMSRGKKYHYRYYSCKTYKHIHELEKCGNKIWRADKLEELIINRVNNHSIASRNVDKEDELDSLNEKLKIEHAKKKRLFDLYINGSYEVSELDSMMNDIDAQINYYESQIEANEELKKNKKIQENLANLAAVDFDSLEFREKQLYLKSLINKIYIDGEQVTIEWL

SEQ ID NO: 5442 - protein, 469 aa, synthetic construct
MSYTTPVRAAVYLRISEDRSGEQLGVARQREDCLKLCDQRKWVPVEYLDNDVSASTGKRRPAYEQMLADITAGKIAAVVAWDLDRLHRRPIELEAFMSLAEEKRLALATVAGDVDLATPQGRLVARLKGCVAAHETEHKKARQRRAARQKAERGHPNWSKAFGYLPGPDGPEPDPRTAPLVKQAYADILAGASLGDVCRQWNDAGAFTITGRPWTTTTLSKFLRKPRNAGLRAYKGARYGPVDRDAIVGKAQWGPLVDEATFWAAQAVLDAPGRAPGRKSVRRHLLTGLAGCGKCGNHLAGSYRTDGRVVYVCKACHGIAILADNIEPILYHIVAERLATPNAVDLLRRDIHDAAEAETIRLELETLYGELDRLAVERAEGLLTARQVKISTDIANAKITKLQARQLDQERLRVFDGIPLGTPQVAGTIAELSPDRFRAVLDVLAEVVVQPVGKGGRTFNPERVRVNWR

SEQ ID NO: 5443 - protein, 452 aa, synthetic construct
MKAAIYIRVSTREQVENYSIQAQTEKLTALCRSKDWDVYDIFIDGGYSGSNMNRPALNEMLSKLHEIDAVVVYRLDRLSRSQRDTITLIEEYFLKNNVEFVSLSETLDTSSPFGRAMIGILSVFAQLERETIRDRMVMGKIKRIEAGLPLTTAKGRTFGYDVIDTKLYINEEEAKQLRLIYDIFEEEQSITFLQKRLKKLGFKVRTYNRYNNWLTNDLYCGYVSYKDKVHVKGIHEPIISEEQFYRVQEIFTRMGKNPNMNRDSASLLNNLVVCGKCGLGFVHRRKDIMSHGKKYHYRYYSCKTYKHIHELEKCGNKIWRADKLEELVINRVNNYSLASRNVDKEDELDSLNEKLKIEHAKKRRLFDLYINGSYDVSELDSMMSDIDAQINHYESQIEANEELKKSKKIQENLADLATVDFGSLEFRGKQLYLKSLINKIYIDGEQVTIKWL

SEQ ID NO: 5444 - protein, 452 aa, synthetic construct
MKAAIYIRVSTQEQVGNYSIQAQTEKLTALCRSKDWDVYDIFIDGGYSGSNMNRPALNEMLSRLHEIDAVVVYRLDRLSRSQRDTTTLIEEYFLKNNVEFVSLSETLDTSSPFGRAMIGILSVFAQLERETIRDRMMMGKIKRIEAGLPLTTAKGRTFGYDVIDTKLYINEEEARQLQLIYDIFEEEQSITSLQKRLKKLGFKVRTYNRYSNWLTNDLYCGYVSYKDKVHVKGIHEPIISEEQFYRVQEIFTRMGKSPNMNRDSASLLSNLVVCSKCGLGFVHRSKDTMSRGKKYHYRYYSCKTYKHTHELEKCGNKTWRADKLEELIINRVNNYSSASRNGDKEGELDSLNEKLKIEHAKKKRLFDLYINGNYEVSELDSMMGDIDAQINYYESQIEANEGLKKDKKIQENLAGLATVDFDSLEFREKQLYLKNLINKIYIDGEQVTIEWL

SEQ ID NO: 5445 - protein, 469 aa, synthetic construct
MSYTTPVRAAVYLRISEDRSGEQLGVARQREDCLKLCDQRKWVPVEYLDNDVSASTGRRRPAYEQMLADITAGRIAAVVAWDLDRLHRRPVELEAFMSLADEKRLALATVAGDVDLATPQGRLVARLKGCVAAHETEHKKARQRRAARQKAERGYPNWSKAFGYLPGPNGPEPDPRTAPLVKQAYADILAGASLGDVCRQWNAAGAFTITGRPWTTTTLSKFLRKPRNAGLRAYKGARYGPVDRDAIVGKAQWSPLVDEATFWAAQAVLDAPGRAPGRKSVRRHLLTGLAGCGKCGNHLAGSYRTDGRVVYVCKACHGVAILADNIEPILYHIVAERLAMPDAVDLLRREIHDAAEAETIRLELETLYGELDRLAVERAEGLLTARQVRICTDIVNAKITKLQARQLDQERLRVFDGIPLGTPQVAGMIAELSPDRFRAVLDVLAEVVVQPVGKSGRIFNPERVQVNWR

SEQ ID NO: 5446 - protein, 452 aa, synthetic construct
MKAAIYIRVSTREQVENYSIQAQTEKLTALCRSKDWDVYDIFIDGGYSGSNMNRPALNEMLSKLHEIDAVVVYRLDRLSRSQRDTITLIEEYFLKNNVEFVSLSETLDTSSPFGRAMIGILSVFAQLERETIRDRMVMGKIKRIEAGLPLTTAKGRTFGYDVIDTKLYINEEEAKQLQLIYDIFEEEQSITFLQKRLKKLGFKVRTYSCYNNWLTNDLYCGYVSYKDKVHVKGIHEPIISEEQFYRVQEIFTRMGKNPNMNRDSASLLNNLVVCSKCGLGFVHRRKDTTSRGKKYHYRYYSCKTYKHIHELEKCGNKIWRADKLEELIINRVNNYSFASRNVDKEDELDSLSEKPKIEHAKKKRLFELYINGSYEVSELDSMMNDIDAQINYYESQIEANEELKKNKKIQEILANLATVDYDSLEFREKQLYLKSLINKIYIDGDQVTIEWL

SEQ ID NO: 5447 - protein, 452 aa, synthetic construct
MKAAIYIRVSTREQVENYSIQAQTEKLTALCRSKDWDVYDIFIDGGYSGSNMDRPALNEMLSKLHEIDAVVVYRLDRLSRSQRDTITLIEEYFLKNNVEFVSLSETLDTSSPFGRAMIGILSVFAQLERETIRDRMVMGKIKRIEAGLPLTTAKGRTFGYDVIDTKLYINEEEARQLQLIYDIFEEEQSITFLQKRLKKLGFKVRSYNRYNNWLTNDLYCGYVSYKDKVHVKGIHEPIISEEQFYRVQEIFTRMGKNPNMNRDSASLLNNLVVCSKCGLGFVHRRKDATSRGKKYHYRYYSCKTYKHIHELEKCGNKIWRADKLEELIINRVNNYSLASRNVDKEDELDSLSEKLKIEHAKKKRLIDLYINGGYEVSELDSMMNDIDAQINYYESQIEANEELKRNKKIQENLADLATVDFDSLEFREKQRYLKSLINKIYIDGEQVTIEWL

SEQ ID NO: 5448 - protein, 452 aa, synthetic construct
MKAAIYIRVSTREQVENYSIQAQTEKLTALCRSKDWDVYDIFIDGGYSGSNMNRPALNEMLSKLHEIDAVVVYRLDRLSRSQRDTITLIEEYFLKNNVEFVSLSETLDTSSPFGRAMIGILSVFAQLERETIRDRMVMGKIKRVEAGLPLTTAKGRTFGYDVIDTKLYINEEEAKQLQLIYDIFEEEQSITSLQKRLKKLGFKVRSYNRYNNWLTNDLYCGYVSYKDKVHVKGIHEPIISEEQFYRVQEIFTRMGKNPNMNRDSASLLNNLVVCSKCGLGFVHRRKDTMSRGKKYHYRYYSCKTYKHIHELEKCGNKIWRADKLEELIINRVNNHSIASRNVDKEDEQDSLNEKLKIEHAKKKRLFDLYVNGSYEVSELDSMMNDIDAQINYYESQIEANEELRKNKKIQESLANLATVDYDSLEFREKQLYLKSLINKIYIDGEQVTIEWL

SEQ ID NO: 5449 - protein, 485 aa, synthetic construct
MTKKVAIYTRVSTTNQAEEGFSIDEQIDRLTKYAEAMGWQVSDTYTDAGISGAKLERPAMQRLINDIENKAFDTVLVYKLDRLSRSVRDTLYLVKDVFTKNEIDFISLNESIDTSSAMGSLFLTILSAINEFERENIKERMTMGKLGRAKSGKSMMWTKTAFGYYHNRKTGILEIVPPQATIVEQIFTDYLSGISLTKLRDKLNESGHIGKDIPWSYRTLRQTLDNPVYCGYIKFKDSLFEGMHKPIIPYETYLKVQKELEKRQQQTYERNNNPRPFQAKYMLSGMARCGYCGAPLRVVLGHKRKDGSRTMKYHCANRFPRKTKGVTVYNDNKKCDSGTYDLSNLENTVIDNLIGFQENNDSLLKIINGNNQPILDTSSCEKQISQIDKKIQKNSDLYLNDFITMDELKDRTDSLQAEKKLLKAKISENKFIDSTDVFELVKTQLGSIPINELSYDNKKKIVNNLVSKVDVTADNVDIIFKFQRA

SEQ ID NO: 5450 - protein, 452 aa, synthetic construct
MKAAIYIRVSTREQVENYSIQAQTEKLTALCRSKDWDVYDIFIDGGYSGSNMNRPALNEMLSKLHEIDAVVVYRLDRLSRSQRDTITLIEEYFLKNNVEFVSLSETLDTSSPFGRAMIGILSVFAQLERETIRDRMVMGKIKRIEAGLPLTTAKGRTFGYDVIDTKLYINEEEAKQLQLIYDIFEEEQSITFLQKRLKKLGFKVRTYSRYNSWLTNDLYCGYVSYKDKVHVKGIHEPIISEEQFYRVQEIFARMGKNPNMSRDSASLLNNLVVCSKCGLGFVHRRKDTTSRGKKYHYRYYSCKTYKHIHELERCGNKIWRADKLEELIINRVNNYSLASRNVDKEDELDSLNEKLKIEHAKKKRLFDLYINGSYDVSELDSMMNDIDAQINYYESQIEANGELKRNKKIQENLADLATVDYDSLEFRDKQLYLKSLINKIYIDGEQVTIEWL

SEQ ID NO: 5451 - protein, 485 aa, synthetic construct
MTKKVAIYTRVSTTNQAEEGFSIDEQIDRLTKYAEAMGWQVSDTYTDAGFSGAKLERPAMQRLINDIDNKAFDTVLVYKLDRLSRSVRDTLYLVKDVFTKSKIDFISLNESIDTSSAMGSLFLTILSAINEFERENIKERMTMGKLGRARSGKSMMWTKTAFGYYHNRKTGILEIVPLQATIVEQIFTDYLSGISLTKLRDKLNESGHIGKDIPWSYRTLRQTLDNPVYCGYIKFKDSLFEGMHKPIIPYETYLKVQKELEERQQQTYERNNNPRPFQAKYMLSGMARCGYCGAPLRIVLGHKRKDGSRAMKYHCANRFPRKTKGVTVYNDNKKCDSGTYDLCNLENTVIDSLIGFQENNDSLLKVINGNNQPILDTSSFKKQISQIDKKIQKNSDLYLNDFIIMDELKGRTDSLQAEKKLLKAKISENKFSDSADVFELVKTQLGSIPINELSYDDKKKIVNNLVSKVDVTADNVDIIFKFQLA

SEQ ID NO: 5452 - protein, 452 aa, synthetic construct
MKAAIYIRVSTREQVENYSIQAQTEKLTALCRSKDWDVYDIFIDGGYSGSNMNRPALNEMLSKLHEIDAVVVYRLDRLSRSQRDTITLIEEYFLKNNVEFVSLSETLDTSSPFGRAMIGILSVFAQLERETIRDRMVMGKIKRIEAGLPLTTAKGRTFGYDVIDTKLYINEEEAKQLQLIYDIFEEEQSITFLQKRLKKLGFKVRTYSRYNSWLTNDLYCGYVSYKDKVHVKGIHEPIISEEQFHRVQEIFARMGKNPNMNRDSASLLNNLVVCSKCGLGFVHRRKDTTSRGKKYHYRYYSCKTYKHIHELEKCGNKIWRADKLEELVINRVNNYSFASRNVDKEGELDSLNEKLKIEHAKKKRLFDLYINGSYEVSELDSMMSDIDAQISYYESQIEANEELRKNKKIQENLADLATVDFDSLEFREKQLYLKSLINKIYIDGEQVTIEWL

SEQ ID NO: 5453 - protein, 452 aa, synthetic construct
MKAAIYIRVSTREQVENYSIQAQTEKLTALCRSKDWDVYGIFIDGGYSGSNMNRPALNEMLSKLHEIDAVVVYRLDRLSRSQRDTITLIEEYFLKNNVEFVSLSETLDTSSPFGRAMIGILSVFAQLERETIRDRMVMGKIKRIEAGLPLTTAKGRTFGYDVIDTKLYINEEEAKQLQLIYDIFEEEQSITSLQKRLKKLGFKVHTYNRYNNWLTNDLYCGYVSYKDKVHVKGIHEPIISEEQFYRVQEIFTRMGKNPNMNRDSASLLNNLVVCSKCGLGFVHRRKDAMSRDKKYHYRYYSCKTYKHIHELEKCGNKIWCADKLEELIINRVNSYSLVSRNMDKEDELDSLNEKLKIEHAKKKRLFDLYLNGSYEVSELDSMMNDIDTQINYYESQIEANEELKKNKKIQENLAHLATVDFDSLEFREKQLYLKSLINKIYIDGEQVTIEWL

SEQ ID NO: 5454 - protein, 452 aa, synthetic construct
MKAAIYIRVSTREQVENYSIQAQTEKLTALCRSKDWDVYDIFIDGGYSGSNMNRPALNEMLSKLHEIDAVVVYRLDRLSRSQRDTITLIEEYFLKNNVEFVSLSETLDTSSPFGRAMIGILSVFAQLERETIRDRMVMGKIKRIEAGLPLTTAKGRTFGYDVIDTKLYINEEEAKQLQLIYDIFEEVQSITFLQKRLKKLGFKVRTYNRYNNWLTNDLYCGYVSYKDKVHVKGIHEPIISEEQFYRVQEIFTRMGKNPNMNRDSASLLNNLVVCSKCGLGFVHRRKDAMSRDKKYHYRYYSCKTYKHIHELEKCGNKIWRADKLEELIINRVNNYSLANRNVDKEDELDSLNEKLKIEHAKKKRLFDLYINGSYEVSELDSMMNDIDAQINCYESQIEANGELKRNKKIQENLAHLATVDFDSLEFREKQLYLKSLINKIYIDGEQVTIEWL

SEQ ID NO: 5455 - protein, 485 aa, synthetic construct
MSKKVAIYTRVSTTNQAEEGFSIDEQIDRLTKYAEAMGWQVSDTYTDAGFSGARLERPAMQRLINDIENKAFDTVLVYKLDRLSRSVRDTLYLVKDVFTKNKIDFISLNESINTSSAMGSLFLTILSAINEFERENIKERMTMGKLGRAKSGKSMMWTKTAFGYYHNRKTGILEIVPLQATIVEQIFTDYLSGISLTKLRDKLNESGHIGKDIPWSYRTLRQTLDNPVYCGYIKFKDSLFEGMHKPIIPCETYLKVQKELEERQQQAYERNNNPRPFQAKYMLSGMARCGYCGAPLRVVLGHKRKDGSRTMKYHCANRFPRKTKGVTVYNDNKKCDSGTYDLSNLEDTVIDNLIGFQENNDSLLKIINGNNQPIPDISSFKKQISQIDKKIQKNSDLYLNDFITMDELKDRTDRLQAEKKLLKAKISENKFNNSTDVFELVKTQLGSIPINELSYENKKKIVNNLVSKVDVTADNVDIIFKFQLA

SEQ ID NO: 5456 - protein, 485 aa, synthetic construct; identical to SEQ ID NO: 390

SEQ ID NO: 5457 - protein, 485 aa, synthetic construct
MTKKVAIYTRVSTTNQAEEGFSIDEQVDRLTKYAEAMGWQVCDTYTDAGFSGAKLERPAMQRLINDIENKAFDTVLVYKLDRLSRSVRDTLYLVKDVFTKNKIDFISLNESIDTSSAMGSLFLTILSAINEFERENIKERMTMGKLGRAKSGKSMMWTKTAFGYYHNRETGILEIVPLQAAIVEQIFTDYLSGISLTKLRDKLNESGHIGKDIPWSYRTLRQTLDNPVYCGYIKFKDSLFEGMHKPIIPYETYLKVQKELEERQQQTYERNNNPRPFQAKYMLSGMARCGYCGAPLRIVLGHKRKDGSRTMKYHCANRFPRKTKGVTVYNDNKKCDSGTYDLSNLEDTVIDNLIGFQENNDSLLKIINGNNQPILDTSSFKKQISQIDKKIQKYSDLYLNDFITMDELKDRTDSLQAEKKLLNAKISENKFNDSTDVFELVKTQLGSIPINELSYDNKKKIVNNLVSKVDVTADNVDIIFKFQLA

SEQ ID NO: 5458 - protein, 485 aa, synthetic construct
MTKKVAIYTRVSTTNQAEEGFSIDEQIDRLTKYAEAMGWQVSDTYTDAGLSGAKLERPAMQRLINDIENKAFDTVLVYKLDRLSRSVRDTLYLVKDVFTKNKIDFISLNESIDTSSAMGSLFLTILSAINEFERENIKERMTMGKLGRAKSGKSMMWTKTAFGYYHNRKTGILEIVPLQATIVEQIFTDYLSGISLTKLRDKLNESGHIGKDIPWSYRTLRQTLDNPVYCGYIKFKDSLFEGLHKPIIPYETYLKVQKELEERQQQTYERNNNPRPFQAKYMLSGMARCGYCGAPLKIVLGHKRKDGSRTMKYHCANRFPRKTKGITVYNDNKKCDSGTYDLSNLENTVIDNLIGFQENNDSLLKIINGNDQPILDTSSFKKQISQIDKKIQRYSDLYLNDFITMDELKDRTDSLQAEKKLLKAKISENKFNDSTDVFELVKTQLGSIPINELSYDNKKKIVNNLVSKVDVTADNVDIIFKFQLA

SEQ ID NO: 5459 - protein, 452 aa, synthetic construct
MKAAIYIRVSTREQVENYSIQAQTEKLTALCRSKDWDVYDIFVDGGYSGSNMNRPALNEMLSKLHEIDAVVVYRLDRLSRSQRDTITLIEEYFLKNNVEFVSLSETLDTSSPFGRAMIGILSVFAQLERETIRDRMVMGKIKRVEAGLPLTTAKGRTFGYDVIDTKLYINEEEAKQLRLIYDIFEEEQSITFLQKRLKELGFKVRTYNRYNSWLTNDLYCGYVSYKDKVHVKGIHEPIISEEQFYRVQEIFTRMGKNPNMNRDSASLLNNLVVCSKCGLGFVHRRKDTVSRGKKYHYRYYSCKTYKHIYELEKCGNKIWRADKLEELIVNRVNNRSFASRNVDKEDELDSLSEKLKIEHAKMKRLFDLYINGSYEVSELDSMVNDIDAQINYYESQIEANEELKKNRKIQENLANLASVDYDSLEFREKQLYLKGLINKIYIDGEQVTIEWL

SEQ ID NO: 5460 - protein, 452 aa, synthetic construct
MKAAIYIRVSTREQVENYSIQAQTEKLTALCRSKDWDVYDIFVDGGYSGSNMNRPALNEMLSKLHEIDAVVVYRLDRLSRSQRDTITLIEEYFLKNNVEFVSLSETLDTSSPFGRAMIGILSVFAQLERETIRDRMVMGKIKRIEAGLPLTTAKGRTFGYDVIDTKLYINEEEARQLQLIYDIFEEEQSITFLQRRLKELGFKVRTYNRYHNWLTNDLYCGYVSYKDKVHVKGIHEPIISEEQFCRVQEIFTRMGRNPNMNRGSASLLNNLVVCSKCGLGFVHRRKDIMGRDKKYHYRYYSCKTYKHIHELEKCGNKVWRADKLEELIINRVNNYSVASRNVDKEDELDSLNEKLKIEHAKRKRLFDLYINGSYAVSELDSMMSDIDAQINYYESQIEANEELKKNKKIQENLAYLATVDFDSLEFREKQLYLKSLINKIYIDGEQVTIEWL

SEQ ID NO: 5461 - protein, 469 aa, synthetic construct
MCYTTPVRAAVYLRISEDRSGEQLGVARQREDCLKLCGQRKWEPVEYLDNDVSASTGKRRPAYEQMLADITAGKIAAVVAWDLDRLHRRPIELEAFMSLADEKRLALATVAGDVDLATPQGRLVARLKGSVAAHETEHKKARQRRAARQKAERGHPNWSKAFGYLPGPNGPEPDPRTAPLVRQAYVDILAGASLGDVCRRWNDAGALTITGRPWTTTTLSKFLRKPRNAGLRAYKGARYGPVDRDAIVGKAQWSPLVDEATFWAAQAVLDAPGRAPGRKSVRRHLLTGLAGCGKCGNHLAGSYRTDGRVVYVCKACHGVAILADNIEPILYHIVAERLAMPDAVDLLRREIHDAAEAETIRLELETLYGELDRLAVERAEGLLTARQVKISTDIVNAKITKLQARQLDQERLRVLDGIPLGTPQVAGMIAELSPDRFRAVLDVLAEVVVQPVGKSGRIFNPERVRVNWR

SEQ ID NO: 5462 - protein, 469 aa, synthetic construct
MSYITPARAAVYLRISEDRSGEQLGVARQREDCLKLCDQRKWVPVEYLDNDVSASTGKRRPAYEQMLADITAGKIAAVVAWDLDRLHRRPIELEAFMSLADEKRLALATVAGDVDLATPQGRLVARLKGSVAAHETEHKKARQRRAARQKAERGHPNWSKAFGYLPGPNGPGPDPRTAPLVEQAYADILAGASLGDVCRRWNDAGAFTITGRPWTTTTLSKFLRKPRNAGLRAYKGARYGPVDRDAIVGKAQWSPLVDEATFWAAQAVLDAPGRAPGRKSVRRHLLTGLAGCGKCGNHLAGSYRTDGRVVYVCKTCHGVAILADNIEPILYHIVAERLAMPDAVDLLRREIHDAAEAEAIHLELETLYGELDRLAVERAEGLLTARQVKISTDIVNAKITKLQAHQQDQERLRVLDGIPLGTPQVAGVIAELSPNRFRAVLDVLAEVVVQPVGKSGRIFNPERVQVSWR

SEQ ID NO: 5463 - protein, 485 aa, synthetic construct
MTKKVAIYTRVSTTNQAEEGFSIDEQIDRLTKYAEAMGWQVSDTYTDAGFSGAKLERPAMQRLINDIESKAFDTVLVYKLDRLSRSVRDTLYLVKDVFTKNKIDFISLNESINTSSAMGSLFLTILSAINEFERENIKERMTMGKLGRAKSGKSMMWTKTAFGYHHNRKTGILEIVPLQATIVEQIFTDYLSGISLTKLRDKLNESGHIGKDIPWSYRTLRQTLDNPVYCGYIKFKDSLFEGMHKPIIPYETYLKVQKELEERQQQTYERNNNPRPFQAKYMLSGMARCGYCGAPLKIVLGRKRKDGSRTMKYHCANRFPRKTKGVTVYNDNKKCDSGTYDLSNLENTVIDNLVGFQKNNDSLLKIIRGNNQSILDTSSFKKQISQIDKKIQKNGDLYLNDFITIDELKDRTDSLQAEKKLLKAKISENKFNDSTDVFELVKTQLGSIPINELSYDNKKKIVNNLVSKVDVTADNVDIIFKFQRA

SEQ ID NO: 5464 - protein, 452 aa, synthetic construct
MKAAIYIRVSTREQVENYSIQAQTEKLTALCRSKDWDVYDIFIDGGYSGSNMNRPALNEMLSRLHEIDAVVVYRLDRLSRSQRDTITLIEEYFLKNNVEFVSLSETLDTSSPFGRAMIGILSVFAQLERETIRDRMVMGKIKRIEAGLPLTTAKGRTFGYDVIDTRLYINEEEAKQLQLIYDIFEEEQSITFLQKRLKKLGFKVRTYSCYNNWLTNDLYCGYVSYKDKVHVKGIHEPIINEEQFYRVQEIFTRMGKNPNTNRDSASLLNNLVVCSKCGLGFVHRRKDTMSRGKKYRYRYYSCKTYKHTHELEKCGNKIWRADKLEELIINRVNNYSFASRNADKEDELDSLNEKLKIEHAKKKRLFDLYINGSYEVSELDSMMNDIDAQINYYESQIEANEELKKTKKIQENLADLATVDFDSLEFREKQLYLKSLINKIYIDGEQVTIEWL

SEQ ID NO: 5465 - protein, 485 aa, synthetic construct
MTKKVAIYTRVSTTNQAEEGFSIDEQIDRLTKYAEAMGWQVSDTYTDAGVSGAKLERPAMQRLINDIENKAFDTVLVYKLDRLSRSVRDTLYLVKDVFTKNKIDFISLNESIDTSSAMGSLFLTILSAINEFERENIKERMTMGKLGRAKSGKSMMWTKTAFGYYHNRKTGILEIVPLQATIVEQIFTDYLSGISLTKLRDKLNESGHIGKDIPWSYRTLRQTLDNPVYCGYIKFKDSLFEGMHKPIIPYETYLKVQKELEERQQQTYERNNNPRPFQAKYMLSGMARCGYCGAPLRIVLGHKRKDGSRTMKYHCANRFPRKTKGVTVYNDNKKCDSGTYDLSNLENTVIDNLIGFQENNDSLLKIINGNNQPILDTSSFKKQISQIDKKIQRISDLYLNDFITMDELKDRTDSLQAEKKLLKAKISENKFNDSTDVFELVKTQLGSIPINELSYDNKKKIVNNLVSKVDVTADNVNIIFKFQLA

SEQ ID NO: 5466 - protein, 469 aa, synthetic construct
MCYTTPVRAAVYLRISEDRSGEQLGVARQREDCLELCGQRKWEPVEYLDNDVSASTGKRRPAYEQMLADITAGKIAAVVAWDLDRLHRRPIELEAFMSLADEKRLALATVAGDVDLATPQGRLVARLKGSVAAHETEHKKARQRRAARQKAERGHPNWSKAFGYLPGPNGPEPDPRTAPLVKQAYADVLAGASLGDVCRQWNDAGAFTITGRPWTTTTLSKFLRKPRNAGLRAYKGARYGPVDRDAIVGKAQWSPLVDEATFWAAQAVLDAPGRAPGRKSVRRHLLTGLAGCGKCGNHLAGSYRTDGRVVYVCKTCHGVAILADNIEPILYHIVAERLAMPDAVDLLRREIHDAAEAEAIHLELETLYGELDRLAVERAEGLLTARQVKISTDIVNAKIIKLQAHQQDQERLRVLDGIPLGTPQVAGVIAELSPNRFRAVLDVLAEVVVQPVGKSGRIFNPERVRVNWR

SEQ ID NO: 5467 - protein, 452 aa, synthetic construct
MKAAIYIRVSTREQVENYSIQAQTEKLTALCRSKDWDVYDIFIDGGYSGSNMNRPALNEMLSKLHEIDAVVVYRLDRLSRSQRDTITLIEEYFLKNNVEFVSLSETLDTSSPFGRAMIGILSVFAQLERETIRDRMVMGKIKRIEAGLPLTTAKGRTFGYDVIGTKLYINEEEAKQLRLIYDIFEEEQSITFLQKRLKKLGFKVRTYNRYNNWLTNDLYCGYVSYKDKVHVKGIHEPIISEEQFYRVQEIFTRMGKNPNMNRDSASLLNNLVVCGKCGLGFVHRRKDAMSRDKKYHYRYYSCKTYKHIHELEKCGNKIWRADKLEELIINRVNNYSFASRNVDKEDELDSLNEKLKIEHAKKRRLFDLYINGSYEVSELDSMMNDIDAQINYYESQIEANEGLKKNKKIQENLAYLATVDFDSLEFREKQLYLKSLINKIYIDGEQVTIEWL

SEQ ID NO: 5468 - protein, 469 aa, synthetic construct
MSYTTPVRAAVYLRISEDRSGEQLGVARQREDCLELCGQRKWVPVEYLDNDVSASTGKRRPAYEQMLADISAGKIAAVVAWDLDRLHRRPIELEAFMSLADEKRLALATVAGDVDLATPQGRLVARLKGSVAAHETEHKRARQRRAARQKAERGHPNWSKAFGYLPGPNGPEPDPRTAPLVKQAYADILAGASLGDVCRQWNDAGAFTITGRPWTTTTLSKFLRKPRNAGLRAYKGARYGPVDRDAIVGKAQWSPLVDEATFWAAQAVLDAPGRAPGRKSVRRHLLTGLAGCGKCGNHLSGSYRTDGRVVYVCKACHGVAILADNIEPILYHIVAERLAMPDAVDLLRREIHDAAEAGTIRLELEALYGELDRLAVERAEGLLTARQVKISTDIVNAKITKLQARQLDQERLHVLDGIPLGTPQVAGMIAELSPDRFRAVLDVLVEVVVQPVGKSGRIFNPERVQVNWR

SEQ ID NO: 5469 - protein, 469 aa, synthetic construct
MSYTTPVRAAVYLRISEDRSGEQLGVARQREDCLKLCDQRKWVPVEYLDNDVSASTGRRRPAYEQMLADITAGKIAAVVAWDLDRLHRRPIELEAFMSLADEKRLALATVAGDVDLATPQGRLVARLKGSVAAHETEHKKARQRRAARQKAERGHPNWSKAFGYLPGPNGPEPDPRTAPLVKQAYADILAGASLGDVCRQWNDAGAFTITGRPWTTTTLSKFLRKPRNAGLRAYKGARYGPVDRDAIVGKAQWSPLVDEATFWAAQAVLDAPGRAPGRKSVRRHLLTGLAGCGKCGNHLAGSYRTDGRVVYVCKACHGVAILADNIEPILYHIVAERLAMPDAVDLLRREIHDAAEAETIRLELETLYGELDHLAVERAEGLLTARQVRISTDIVNAKIAKLQARQLDQERLRVLDGIPLGTPQVAGMIAELSPDRFRAVLDVLAEVVVQPVGKSGRIFNPERVQVNWR

SEQ ID NO: 5470 - protein, 452 aa, synthetic construct
MKAAIYIRVSTREQVENYSIQAQTEKLTALCRSKDWDVYDIFIDGGYSGSNMNRPALNEMLSKLHEIDAVVVYRLDRLSRSQRDTVTLIEEYFLKNNVEFVSLSETLDTSSPFGRAMIGILSVFAQLERETIRDRMAMGKIKRIEAGLPLTTAKGRTFGYDVIDTKLYINEEEARQLQLIYDIFEEEQSITFLQKRLKKLGFKVRTYNCYNNWLTNDLYCGYVSYGDKVHVKGIHEPIISEEQFYRVQEIFARMGKNPNMNRDSASLLNNLVVCGKCGLGFVHRRKDTMSRGKKYHYRYYSCKTYKHIHELEKCGNKIWRADKLEELIINRVNNYSLASRNVDKEDELDSLSEKLKVEHAKKKRLFELYINGSYEMGELDSMMNDIDAQINYYEGQIEANEGLKRNKKIQENLAELATVDFDSLEFREKQLYLKSLINKIYIDGEQVTIEWL

SEQ ID NO: 5471 - protein, 452 aa, synthetic construct
MKAAIYIRVSTREQVENYSIQAQTEKLTALCRSKDWDVYDIFIDGGYSGSNMNRPALNAMLSKLHEIDAVVVYRLDRLSRSQRDTITLIEEYFLKNNVEFVSLSETLDTSSPFGRAMIGILSVFAQLERETIRDRMVMGKIKRIEAGLPLTTAKGRTFGYDVIDTKLYINEEEARQLQLIYDIFEEEQSITFLQKRLKKLGFKVRTYSRYNNWLTNDLYCGYVSYKDKVHVKGIHEPIISEEQFYRVQEIFTRMGKNPNMNRDSASLLNNLVVCSKCGLGFVHRRKDTMSRGKKYHYRYYSCKTYKHTHELEKCGNKIWRADKLEELIINRVNDYSSASRNADKEDELDSLNEKLKIEHSKKRRLFDLYINGSYEVSELDSMMNDIDAQINHYESQIEANGELRKSKKIQETLADLATVDFDSLEFREKQLYLKSLINKIYIDGEQVTIEWL

SEQ ID NO: 5472 - protein, 452 aa, synthetic construct
MKAAIYIRVSTREQVENYSIQAQTEKLTALCRSKDWDVYDIFIDGGYSGSNMNRPALNEMLSRLHEIDAVVVYRLDRLSRSQRDTITLIEEYFLKNNVEFVSLSETLDTSSPFGRAMIGILSVFAQLERETIRDRMVMGKIKRIEAGLPLTTARGRTFGYDVVDTKLYINEEEAKQLQLIYDIFEEEQSITFLQKRLKKLGFKVRTYNRYNNWLTNDLYCGYVSYKDKVHVKGIHEPIISEEQFYRVQEIFTRMGKNPNMNRDSASLLNNLVVCGKCGLSFVHRRKDAMSRDKKYHYRYYSCKTYKHIHELEKCGNKIWRADKLEELIINRVSNYSFASRNADKEDGLDSLNEKLKIEHAKKKRLFDLYINGRYEVSELDSMMGDIDAQINYYESQIEANEELKKNKKIQENLADLATVDFDSLEFREKQLYLKSLINKIYIDGEQVTIEWL

SEQ ID NO: 5473 - protein, 452 aa, synthetic construct
MKAAIYIRVSTREQVENYSIQAQTEKLTALCRSKDWDVYDIFIDGGYSGSNMNRPALNEMLSKLHEIDAVVVYRLDRLSRSQRDTITLIEEYFLKNNVEFVSLSETLDTSSPFGRAMIGILSVFAQLERETIRDRMVMGKIKRIEAGLPLTTAKGRTFGYDVIDTKLYINEEEAKQLQLIYDIFEEEQSITFLQKRLKKLGFKVHTYNRYNNWLTNDLYCGYVSYKDKVHVKGIHEPIISEEQFYRVQEIFTRMGKNPNMNRDSASLLNNLVVCSKCGLGFVHRRKDAMSRDKKYHYRYYSCKTYKHIHELEKCGNKIWRADKLEELIINRVNNYSLASRNVDKEDELDSLNEKLKVEHAKKKRLFDLYINGSYEVSELDSMMNDIDAQINYYESQIEANEELKKSKRIQENLAYLATVDFDSLEFREKQLYLKSLINKIYIDGEQVTIEWL

SEQ ID NO: 5474 - protein, 469 aa, synthetic construct
MSYTTPVRAAVYLRISEDRGGEQLGVARQREDCLKLCGQRKWEPVEYLDNDVSASTGKRRPAYEQMLADITAGKIAAVVAWDLDRLHRRPIELEAFMSLADEKRLALATVAGDVDLATPQGRLVARLKGSVAAHETEHKKARQRRAARQKAERGLPNWSKAFGYLPGPNGPEPDPRTAPLVKQAYADILAGASLGDVCRQWNDAGAFTITGRPWTTTTLSKFLRKPRNAGLRAYKGARYGPVDRDAIVGKARWSPLVDEATFWAAQAVLDAPGRAPGRKSVRRHLLTGLAGCGKCGNHLAGSYRTDGRVVYVCKACHGVAILADNIEPILYHIVAERLAMPDAVDLLRREVHDAAEAETIRLEQETLYGELDRLAVERAEGLLTARQVKISTDIVNAKITKLQARRLDQERLRVFDGIPLGTPQVAGMIAGLSPDRFRAVLDVLAEVVVQPVGKSGRIFNPERVQVNWR

SEQ ID NO: 5475 - protein, 452 aa, synthetic construct
MKAAIYIRVSTREQVENYSIQAQTEKLTALCRSKGWDVYDIFIDGGYSGSNMNRPALNEMLGKLHEIDAVVVYRLDRLSRSQRDTITLIEEYFLKNNVEFVSLSETLDTSSPFGRAMIGILSVFAQLERETIRDRMVMGKIKRIEAGLPLTTAKGRTFGYDVVDTKLYINEEEAKQLQLIYDIFEEEQSITFLQKRLRKLGFKVHTYNRYNNWLTNDLYCGYVSYKDKVRVKGIHEPIISEEQFYRVQEIFTRMGKNPNMNRDSASLLNSLVVCSKCGLGFVHRRKDTTSRGKKYHYRYYSCKTYKHTYELEKCGNKIWRADKLEELIINRVNNYSFASRNVDKEDELDSLNEKLKIEHAKKRRLFDLYINGSYEVSELDSMMNDIDAQINYYESQVEASEELKKSKKIQENLADLATVDFDSLEFREKQLYLKSLINKIYIDGEQVTIEWL

SEQ ID NO: 5476 - protein, 469 aa, synthetic construct
MSFTTPVRAAVYLRISEDRSGEQLGVARQREDCLKLCGQRNWVPVEYLDNDVSASTGKRRPAYKQMLADITAGKIAAVVAWDLDRLHRRPMELEAFMSLADEKRLALATVAGDVDLATPQGRLVARLKGSVAAHETEHKKARQRRAARQKAERGHPNWSKAFGYLPGPNGPEPDPRTAPLVKQAYADILAGASLGDVCRQWNDAGAFTITGRPWTTTTLSKFLRKPRNAGLRAYKGARYGPVDRDAIVGKAQWSPLVDEATFWAAQAVLDAPGRAPGRKSVRRHLLTGLAGCGKCGNHLAGSYRTDGRVVYVCKACHGVAILADNIEPILYHIVAERLARPDAVDLLRREIHDAAEAETVRLELETLYGELDRLAVERAEGLLTARQVKISTDIVNAKITKLQTRQLDQERLRVFDGIPLGTPQVAGMIAELSPDRFRAVLDVLAEVVVQPVGKSGRIFNPERVQVNWR

SEQ ID NO: 5477 - protein, 452 aa, synthetic construct
MKAAIYIRVSTREQVENYSIQAQTEKLTALCRSKDWDVYDIFIDGGYSGSNMNRPALSEMLSKLHEIDAVVVYRLDRLSRSQRDTITLIEEYFLKNNVEFVSLSETLDTSSPFGRAMIGILSVFAQLERETIRDRMVMGKIKRIEAGLPLTTAKGRTFGYDVIDTKLYINEEEAKQLRLIYDIFEEEQSITLLQKRLKKLGFKVRTYNRYNNWLTNDLYCGYVSYKDRVHVKGIHEPIISEEQFYRVQEIFTRMGKNPNMNRDSASLLNNLVVCSKCGLSFVHRRKDAVSRDKKYHYRYYSCKTYKHIHELEKCGNKIWRADKLEELIINRVNNYSLASRNVDKEDELDSLNEKLKIEHAKKKRLFDLYINGSYEVSELDSMMNDIDAQINYYESQIEANEELKRNKKIQENLADLATVDFDSLEFREKQRYLKSLINKIYIDGEQVTIEWL

SEQ ID NO: 5478 - protein, 469 aa, synthetic construct
MCYTTPVRAAVYLRISEDRSGEQLGVARQREDCLKLCDQRKWVPVEYLDNDVSASTGKRRPAYEQMLADITAGKIAAVVAWDLDRLHRRPIELEAFMSLADEKRLALATVAGDVDLATPQGRLVARLKGSVAAHETEHKKARQRRAARQKAERGHPNWSKAFGYLPGPNGPEPDPRTAPLVKQAYADILAGASLGDVCRRWNDAGAFTITGRPWTTTTLSKFLRKPRNAGLRAYKGARYGPVDRDAIVGKAQWNPLVDEATFWAAQAVLDAPGRAPGRKSVRRHLLTGLAGCGKCGNHLAGSYRTDGRVVYVCKACHGVAILADNIEPILYHIVAERLAMPDAVDLLRREIHDAAEAETIRLELETLYDELDRLAVERAEGLLTARQVKISTDIVNAKITKLQARQLDQERLRVLDGIPLGTPQVAGMIAELSPDRFRAVLDVLAEVVVQPVGKSGRIFNPDRVQVNWR

SEQ ID NO: 5479 - protein, 469 aa, synthetic construct
MSYTTPVCAAVYLRISEDRSGEQLGVARQREDCLKLCDQRKWVPVEYLDNDVSASTGKRRPAYEQMLADITAGKIAAVVAWDLDRLHRRPIELEAFMSLADEKRLALATVAGDVDLATPQGRLVARLKGSVAAHETEHKRARQRRAARQKAERGLPNWSKAFGYLPGPNGPEPDPRTAPLVKQAYADILAGASLGDVCRRWNDVGAFTITGRPWTTATLSKFLRKPRNAGLRAYKGARYGPVDRNAIVGKAQWSPLVDEATFWAAQAVLDAPGRAPGRKSVRRHLLTGLAGCGKCGSHLAGSYRTDGRVVYVCKACHGVAILADNIEPILYHIVAERLAMPDAVDLLRREIHDAAEAETIRLELETLYDELDRLAVERAEGLLTARQVKISTDIVNAKITKLQARQLDRERLRMFDGIPLGTPRVAGVIAELSPDRFRAVLDVLAEVVVQPVGKSGRIFNPERVQVNWR

SEQ ID NO: 5480 - protein, 452 aa, synthetic construct
MKAAIYIRVSTQEQVENYSIQAQTEKLTALCRSKDWDVYDIFVDGGYSGSNMNRPALNEMLSKLHEIDAVVVYRLDRLSRSQRDTITLIEEYFLKNNVEFVSLSETLDTGSPFGRAMIGILSVFAQLERETIRDRMVMGKIKRIEAGLPLTTAKGRTFGYDVIDTKLYVNEEEAKQLRLIYDIFEEERSITLLQKRLKELGFKVRTYNRYNNWLTNDLYCGYVSYKDKVHVKGIHEPIISEEQFNRVQEIFTRMGKNPNTNRDSASLLSNLVVCSKCGLGFVHRRKDTMSRGKKYHYRYYSCKTYKHTHELEKCGNKIWRADKLEELIINRVNNYSFASHNVDKEDELDSLNEKLKIEHAKKRRLLDLYINGSYEVSELDSMMNDIDAQINYYESQIEANEELKKNKKIQENLADLAAVDYDSLEFREKQLYLKSLINKIYIDGEQVTIEWL

SEQ ID NO: 5481 - protein, 452 aa, synthetic construct
MKAAIYIRVSTREQVENYSIQAQTEKLTALCRSKDWDVYDIFIDGGYSGSNMNRPALNEMLSKLHEIDAVVVYRLDRLSRSQRDTITLIEEHFLKNNVEFVSLSETLDTSSPFGRAMIGILSVFAQLERETIRDRMVMGKIKRIEAGLPLTTAKGRTFGYDVIDSKLYINEEEAKQLRLIYDIFEEEQSITSLQKRLKKLGFKVRTYSRYNNWLTNDLYCGYVSYKDKVHVKGIHEPIISEEQFYRVQEIFTRMGKNPNMNRDSASLLNNLVVCSKCGLGFVHRRKDTTSRGKKYHYRYYSCKTYKHTHELEKCGNKIWRADKLEELIVDRVNNYSFASRNVDKGDELDSLNEKLKNEHAKKKRLFDLYINGSYNVGELDSMMDDIDAQISYYESQIEANEELKKDKKIQESLANLATVDYDSLEFREKQLYLKSLINKIYIDGEQVTIEWL

SEQ ID NO: 5482 - protein, 452 aa, synthetic construct
MKAAIYIRVSTREQVENYSIQAQAERLTALCRSKDWDVYDIFIDGGYSGSNMNRPALNEMLSKLHEIDAVVVYRLDRLSRSQRDTSTLIEEYFLKNNVEFVSLSEALDTSSPFGRAMIGILSVFAQLERETIRDRMVMGKIKRVEAGLPLTTAKGRTFGYDVIDTKLYINEEEAKQLQLIYDIFEEVQSITFLQKRLKKLGFKVRTYNRYSNWLTNDLYCGYVSYKDKVHVKGIHEPIISEEQFYRVQEIFTRMGKNPNMNRASASLLSNLVVCSKCGLGFVHRSKDTMSRGKKYHYRYYSCKTYKHTHELERCGNKIWRADKLEELIINCVNNCNLASRDVDKEDELASLNEKLKIEHAKKRRLFDLYINGSYEVSELDSMMSDIDAQINYYECQIEATEEQKKNKRIQENLAGLATVDFDSLEFREKQLYLKSLINKIYIDGEQVTIEWL

SEQ ID NO: 5483 - protein, 452 aa, synthetic construct
MKAAIYIRVSTQEQVENYSIQAQTEKLTALCRSKDWDVYDIFVDGGYSGSNMNRPALNEMLNKLHEIDAVVVYRLDRLSRSQRDTITLIEEYFLKNNVEFVSLSETLDTSSPFGRAMIGILSVFAQLERETIRDRMVMGKIKRIEAGLPLTTAKGRTFGYDVIDTKLYINEEEAKQLQLIYDIFEEEQSITFLQKRLKELGFKVRTYNHYNSWLTNDLYCGYVSYKDKVHVKGIHEPIISEEQFYRVQEIFTRMGKNPNMNRDSASLLNNLVVCSKCGLGFVHRRKDTMSRGKKYRYRYYSCKTYKHTHELEKCGNKIWRADKLEELIINRVNNYSLTSRNVDKEDELDSLNEKLKIEHAKKKRLFDLYINGSYEVSELDSMMNDIDAQINHYESQIEANEELKKNKKIQENLANLATVDYDSLEFREKQLYLKSLINKIYIDGEQVTIEWL

SEQ ID NO: 5484 - protein, 485 aa, synthetic construct
MTKKVAIYTRVSTTNQAEEGFSIDEQIDRLTKYAEAMGWQVSDTYTDAGFSGAKLGRPAMQRLINDIENEAFDTVLVYKLDRLSRSVRDTLYLVKDVFTKNKIDFISLNESIDTSSAMGSLFLTILSAINEFERENIKERMTMGKLGRAKSGKSMMWTKTAFGYYHNRKTGILEIVPLQATIVEQIFTDYLSGISLTKLRDKLNESGHIGKDIPWSYRTLRQTLDNPVYCGYIKFKDSLFEGMHKPIIPYETYLKVQKELEERQQQTYERNNNPRPFQAKYMLSGMARCGYCGAPLKIVLGHKRKDGSRTVKYHCANRFPRKTRGVTVYNDNKKCDSGTYDLSSLENTVIDNLIGFQENNDSLLKIINGNNQPIPDTSSFEKQISQIDKKIQKNSDLYLNDFITMDELKDRTDSLQAEKKLLKAKISENKFNDSTDVFELVKTQLGSIPINELSYDNKKKIVNNLVSKVDVTADNVDIIFKFQLA

SEQ ID NO: 5485 - protein, 452 aa, synthetic construct
MKAAIYIRVSTREQVENYSIQAQTEKLTALCRSKDWEVYDIFIDGGYSGSNMNRPALNEMLSKLHEIDAVVVYRLDRLSRSQRDTITLIEEYFLKNSVEFVSLSETLDTSSPFGRAMIGILSVFAQLERETIRDRMVMGKIKRIEAGLPLTTAKGRTFGYDVIDTKLYINEEEAKQLQLIYDIFEEEQSITFLQKRLKKLGFKVRTYSCYSNWLTNDLYCGYVSYKDKVHVKGIHEPIISEEQFYRVQEIFTRMGKNPNMNRDSASLLNNLVVCSKCGLGFVHRRKDTTSRGKKYHYRYYSCKTYKHIHELEKCGNKIWRADKLEELIINRVNNYSLASRNVDKEDELDSLNEKLKIEHAKKKRLFDLYINGSYEVSELDCMMNDIDAQINYYESQIEASEELKKDKKIRESLANLATVDYDSLGFREKQLYLKSLINKIYIDGEQVTIEWL

SEQ ID NO: 5486 - protein, 452 aa, synthetic construct
MKAAIYIRVSTREQVENYSIQAQTEKLTALCRSKDWDVYDIFIDGGYSGSNMNRPALNEMLGKLHEIDAVVVYRLDRLSRSQRDTITLIEEYFLKNNVEFVSLSETLDTSSPFGRAMIGILSVFAQLERETIRDRMVMGKIKRIEAGLPLTTAKGRTFGYDVIDTKLYINEEEAKQLQLIYDIFEEERSITFLQKRLKKLGFKVRTYNCYNNWLTNDLYCGYVSYKDKVHVKGIHEPIISEEQFYRVQEIFTRMGKNPNMNRDSASLLNNLVVCSKCGLGFVHRRKDAMSRDKKYHYRYYSCKTYKHIHELEKCGNKIWRADKLEELIIDRVNNYSFASRNADKEGELDSLNEKLKIEHAKKKRLFDLYINGSYEVSELDSMMNDINAQINYYESQIEANEELKKSKKIQENLADLATVDFDSLEFREKQLYLKSLINKIYIDGEQVTIEWL

SEQ ID NO: 5487 - protein, 469 aa, synthetic construct
MCYTTPVRAAVYLRISEDRSGEQLGVARQREDCLKLCGQRKWEPVEYLDNDVSASTGKRRPAYEQMLADITAGKIAAVVAWDLDRLHRRPTELEAFMCLADEKRLALATVAGDVDLATPQGRLVARLKGSVAAHETEHKKARQRRAARQKAERGYPNWSKAFGYLPGPNGPEPDPRTAPLVKQAYADILAGASLGDVCRQWNDAGAFTITGRPWTTTTLSKFLRKPRNAGLRAYKGARYGPVDRDAIVGKARWSPLVDEATFWAAQAVLDAPGRAPGRKSVRRHLLTGLAGCGKCGNHLAGSYRTDGKVVYVCKACHGVAILADNIEPILYHVVAERLAMPDAVDLLRREIHDAAEAEAIRLELETLYGELDHLAVERAEGLLTARQVKISTDIVNAKITKLQAHRQDQERLRVLDGIPLGTPQVAGVIAELSPNRFRAVLDVLAEVVVQPVGKSGRISNPERVQVNWR

SEQ ID NO: 5488 - protein, 469 aa, synthetic construct
MSYTTPVRAAVYLRISEDRSGEQLGVARQREDCLKLCGQRKWVPVEYLDNDVSASTGKRRPAYEQMLADITAGKIAAVVAWDLDRLHRRPIELEAFMSLADEKRLALATVAGDVDLATPQGRLVARLKGCVAAHETEHKKARQRRAARQKAERGHPNWSKAFGYLPGPNGPEPDPRTAPLVKQAYADILAGASLGDVCRRWNDAGAFTITGRPWTTTTLSKFLRKPRNAGLRAYKGARYGPVDRDAIVGKAQWSPLVDEATFWAAQAVLDAPGRAPGRKSVRRHLLTGLAGCGKCGNHLAGSYRTDGQVVYVCKVCHGVSILAVNIVPILYHIVAERLAMPDAVDLLCREIHDAAGAETIRLELETLYGELDRLAVERAEGLLTARQVKISTDVVNAKITKLQARQLDQERLRVFDGIPLGTPQVAGVIAELSPDRFRAVLDVLAEVVVQPVGKSGRIFNPERVQVNWR

SEQ ID NO: 5489 - protein, 452 aa, synthetic construct
MKAAIYIRVSTREQVENYSIQAQTEKLTALCRSKDWDVYDIFIDGGYSGSNTNRPALNEMLSKLHEIDAVVVYRLDRLSRSQRDTITLIEEYFLKNNVEFVSLSETLDTSSPFGRAMIGILSVFAQLERETIRDRMVMGKIKRIEAGLPLTTAKGRTFGYDVIDTKLYINEEEAKQLQLIYDIFEEEQSITSLQKRLKKLGFKVRTYNRYNNWLTNDLYCGYVSYKDKVHVKGIHEPIISEEQFYRVQEIFTRMGKNPNMNRDSASLLNNLVVCSKCGLGFVHRRKDIMSRDKKYHYRYYSCKTYKHIHELEKCGNKIWRADKLEELIINRVNNYSLASRNVDKEDELDSLNEKLKIEHAKKKRLFDLYINGGYEVSELDSMMNDIDAQINYYESQIEANEELKRNKKIQENLADLATVDFDSLEFREKQLYLKSLINKIYVDGEQVTIEWL

SEQ ID NO: 5490 - protein, 485 aa, synthetic construct
MTKKVAIYTRVSTTNQAEEGFSIDEQVDRLTKYAEAMGWQVRDTYTDAGFSGAKLERPAMQRLINDIENKAFDTVLVYKLDRLSRSVRDTLYLVKDVFTKNKIDFISLSESIDTSSAMGSLFLTILSAINEFERENIKERMTMGKLGRAKSGKSMMWTKTAFGYYHNRETGILEIVPLQATIVEQIFTDYLSGISLTKLRDKLNESGHIGKDIPWSYRTLRQTLDNPVYCGYIKFKDSLFEGMHKPIIPYETYLKVQKELEERQQRTYERNNNPRPFQAKYMLSGTARCGYCGAPLRIVLGHKRKDGSRTMKYHCANRFPRRTKGVTVYNDNKKCDSGTYDLSNLENTVIDSLIGFQENNDSLLKIINGNNQPILDTSSFEKQISQIDKKIQKNSDLYLNDFITMDELKDRTDSLQAEKKLLKAKISENKFNDSTDVFELVKTQLGSIPINELSYDNKKKIVNNLVSKVDVTADNVDIIFKFQLA

SEQ ID NO: 5491 - protein, 452 aa, synthetic construct
MKAAIYIRVSTREQAENYSIPAQTEKLTALCRSRDWDVYDIFVDGGYSGSNLNRPALNEMLSKLHEIDAVVVYRLDRLSRSQRDTITLIEEYFLKNNVEFVSLCETLDTSSPFGRAMIGILSVFAQLERETIRDRMVMGKIKRIEAGLPLTTAKGRTFGYDVIDTKLYVNEEEARQLQLIYDIFEEEQSITFLQKRLKELGFKVRTYNRYNNWLTNDLYCGYVSYKDKVHVKGIHEPIISEEQFYRVQEIFARMGKNPNMNRDSASLLNNLVVCSKCGLGFVHRRKDAMSRDKKYHYRYYSCKSYKHIHELEKCGNKIWRADKLEELIINRVNNYSLASRNVDKEDELDNLNEKLRIEHAKKKRLFDLYINGSYEVSELDSMMSDIDAQINYYESQIEANEGLKKDKKIRENLADLATVDFDSLEFREKQLYLKSLINKIYIDGEQVTIEWL

SEQ ID NO: 5492 - protein, 469 aa, synthetic construct
MSYTTPVRAAVYLRISEDRSGEQLGVARQREDCLKLCSQRRWVPVEYLDNDVSASTGKRRPAYEQMLADITAGKIAAVVAWDLDRLHRRPVELEAFMSLADEKRLALATVAGDVDLATPQGRLVARLKGCVAAHETEHKKARQRRAARQKAERGLPNWGKAFGYLPGPNGPEPDPRTAPLVRQAYADILAGASLGDVCRQWNDAGAFTITGRPWTTTTLSKFLRKPRNAGLRAYKGARYGPVDRDAIVGKAQWSPLVDEATFWAAQAVLDAPGRAPGRKSVRRHLLTGLAGCGKCGNHLAGSYRADGRVVYVCKACHGVAILADNIEPILYHIVAERLAMPDAVDLLRREIHDAAEAETIRLELETLYGELDRLAVERAEGLLTARQVKISTDIVNAKITKLQARQLDQERLRVFDGIPLGTPQVAGTIAELSPNRFRAVIDVLAEVVVQPVGKSGRIFNPERVQVNWR

SEQ ID NO: 5493 - protein, 485 aa, synthetic construct; identical to SEQ ID NO: 1572

SEQ ID NO: 5494 - protein, 469 aa, synthetic construct
MSYTTPVRAAVYLRISEDRSGEQLGVARQREDCLKLCDQRKWVPVEYLDNDVSASTGKRRPAYEQMLADITAGKIAAVVAWDLDRLHRRPIELEAFMSLADEKRLALATVAGDVDLATPQGRLVARLKGSVAAHETEHKKARQRRAAKQKAERGHPNWSKAFGYLPGPNGPEPDPRTAPLVRQAYADILAGASLGDVCRQWNDAGAFTITGRPWATTTLSKFLRKPRNAGLRAYKGARYGPVDRDAIVGKAQWSPLVDEATFWAAQAVLDAPGRAPGRKSVRRHLLTGLAGCGKCGNHLAGSYRTDGRVVYVCKACHGVAILADNIEPVLYHIVAERLAMPDAVDLLRREIHDAAEAETTRLELETLYGELDRLAVERAEGLLTARQVKIGTDIVYAKITKLQARQLDQERLRVLDGIPLGTPQVAGAIAELSPDRFRAVLDVLAEVVVQPVGKGGRIFNPERVQVNWR

SEQ ID NO: 5495 - protein, 469 aa, synthetic construct
MSYTTPVRAAVYLRISEDRSGEQLGVARQREDCLKLCDQRKWVPVEYLDNDVSASTGKRRPAYERMLADITAGKIAAVVAWDLDRLHRRPIELETFMSLADEKRLALATVAGDVDLATPQGRLVARLKGSVAAHETEHKKARQRRAARQKAERGYPNWSKAFGYLPGPNGPEPDPRTAPLVEQAYADILAGASLGDVCRQWNDAGAFTITGRPWTTTTLSKFLRKPRNAGLRAYKGARYGPVDRDAIVGKARWSPLVDEATFWAAQAVLDAPGRAPGRKSVRRHLLTGLAGCGKCGNHLAGSYRADGRVVYVCKACHGVAILADNIEPFLYHIMAERLAMPDAVDLLRCEVHDAAEAETIRLELETLYGELDRLAVERAEGLLTARQVKISTDIVNAKITKLQARQLDQERLRVFDGIPLGTPQVAGKIAELSPDRFRAVLDVLAEVVVQPVGKSGRIFNPERVQVNWR

SEQ ID NO: 5496 - protein, 452 aa, synthetic construct
MKAAIYIRVSTREQVDNYSIQAQTEKLTALCRSKDWDVYDIFIDGGYSGSNMNRPALNEMLSKLHEIDAVVVYRLDRLSRSQRDTITLIEEYFLKNNVEFVSLSETLDTSSPFGRAMIGILSVFAQLERETIRDRMVMGKIKRVEAGLPLTTAKGRTFGYDVIDTKLYINEEEAKQLQLIYDIFEEVQSITFLQRRLKKLGFKVRTYSRYNNWLTNDLYCGYVSYKDKVHVKGIHEPIISEEQFYRVQEIFTRMGKNPNMSRDSASLLSNLVVCSKCGLGFVHRRKDTMSRGKKYHYRYYSCKTYKHTHELEKCGNKIWRADKLEELIINRVNNYSLASRNVDKEDGLDSLNEKLKIEHVKKKRLFDLYINGSYEVSELDSMMNDIDAQISYYESQIEANEGLKRSKKIQENLANLATVDYDSLEFREKQLYLKSLINKIYIDGEQVTIEWL

SEQ ID NO: 5497 - protein, 452 aa, synthetic construct
MKAAIYIRVSTREQVENYSIQAQTEKLTALCRSKGWDVYDIFIDGGYSGSNMNRPALNEMLNKLHEIDAVVVYRLDRLSRSQRDTITLIEEYFLKNNVEFVSLSETLDTSSPFGRAMIGILSVFAQLERETIRDRMVMGRIKRVEAGLPLTTAKGRTFGYDVIDAKLYINEEEAKQLQLIYDIFEEERSITFLQKRLKELGFKVRTYNCYNNWLTNDLYCGYVSYKDKVHVKGIHEPIISEEQFYRVQEIFTRVGKNPNMNRDSASLLNNLVVCSKCGLGFVHRRKDTMSRGKKYHYRYYSCKTYKHTHELEKCGNKIWRADKLEELIINRVNNYSLASRNVDKEGELDSLNEKLKIEHAKKKRLFDLYINGSYEVSELDSMMSDIDAQINYHESQIEANEELRKNKKIQENLADLATVDFDSLEFREKQLYLKSLINKIYIDGEQVTIEWL

SEQ ID NO: 5498 - protein, 452 aa, synthetic construct
MKAAIYIRVSTQEQVGNYSIQAQTEKLTALCRSKDWDVYDIFIDGGYSGSNMNRPALNEMLSKLHEIDAVVVYRLDRLSRSQRDTTTLIEEYFLKNNVEFVSLSETLDTSSPFGRAMIGILSVFAQLERETIRDRMVMGKIKRIEAGLPLTTAKGRTFGYDVIDTKLYINEEEAKQLQLIYDIFEEEQSITSLQKRLKKLGFKVRTYNRYSNWLTNDLYCGYVSYKDKVHVKGIHEPIISEEQFYRVQEIFTRMGKNPNMNRDGASLLNNLVVCSKCGLGFVHRSKDTMSRGKKYHYRYYSCKTYKHTHELEKCGNKTWRADKLEELIINRVNNYSFASRNADKEDELDSLNEKLKIEHAKRKRLFDLYINGGYEVSELDSMMNDIDAQINYYESQIEADEELKKNKKIQETLADLAAVDFDSLEFREKQLYLKSLISKIYIDGEQVTIEWL

SEQ ID NO: 5499 - protein, 452 aa, synthetic construct
MKAAIYVRVSTQEQVENYSIQAQTEKLTALCRSKDWDVYDIFIDGGYSGSNMNRPALNEMLGKLHEIDAVVVYRLDRLSRSQRDTITLIEEYFLKNSVEFVSLSETLDTSSPFGRAMIGILSVFAQLERETIRDRMVMGKIKRIEAGLPLTTAKGRTFGYDVIDTKLYINEEEAKQLRLIYDIFEEERSITLLQKRLKKLGFKVRTYNRYNNWLTNDLYCGYVSYKDKVHVKGIHEPIISEEQFYRVQEIFTRMGKNPNMNRDSASLLNNLVVCSRCGLGFVHRRKDTTSRGKKYHYRYYSCKTYKHIHELEKCGNKIWRADKLEELIINCVNNYSLASRNVDKEDELDSLNEKLKIEHAKKKRLFDLYINGSYEVSELDSMMNVVDAQINYYESQIEAYEELKKSKKVQENLANLATVDYDSLEFREKQLYLKSLINKIYIDGEQVTIEWL

SEQ ID NO: 5500 - protein, 452 aa, synthetic construct
MKAAIYIRVSTREQVENYSIQAQTEKLTALCRSKDWDVYDIFIDGGYSGSNMNRPALNEMLSKLHEIDAVVVYRLDRLSRSQRDTITLIEEYFLKNNVEFVSLSETLDTSSPFGRAMIGILSVFAQLERETIRDRMVMGKIKRIEAGLPLTTAKGRTFGYDVIDTKLYINEEEAKQLQLIYDIFEEEQSITFLQRRLKELGFKVRTYNRYNNWLTNDLYCGYVSYKDRVHVKGIHEPIISEEQFYRVQEIFTRMGKNPNMNRDSASLLNNLVVCSKCGLGFVHRRKDAMSRDKKYHYRYYSCKTYKHIHELEKCGNKIWRADKLEELIINRVNNYSLASRNVDKEDELDSLDEKLKIEHAKKKRLFDLYINGSYEVSELDSMMNDIDARINYYESQIEANEELKKNEKIQENLAHLATVDFDSLEFREKQLYLKSLINKIYIDGEQVTIEWL

SEQ ID NO: 5501 - protein, 452 aa, synthetic construct
MKAAIYIRVSTQEQVENYSIQAQTEKLTALCRSKDWDVYDIFIDGGYSGSNMNRPALNEMLSKLHEIDAVVVYRLDRLSRSQRDTTTLIEEYFLKNNVEFVSLSETLDTSSPFGRAMIGILSVFAQLERETIRDRTVMGKIKRIEAGLPLTTAKGRTFGYDVIDTKLYVNEEEARQLQLIYDIFEEEQSITFLQKRLKELGFKVRSYNRYNNWLTNDLYCGYVSYKDKVHVKGIHEPIISEEQFYRVQEIFTRMGKNPNMNRDSASLLNNLVVCSKCGLGFVHRSKDTMCRGKKYHYRYYSCKTYKHTHELEKCGNKTWRADKLEELIINRVNNYSFASRDVDKEDELDSLNEKLKIEHAKKKRLFDLYINGSYEVSELDSMMNDIDAQINYYESQIEANEELKRNKKIQENLADLATVDFGSLEFREKQLYLKSLISKIYIDGEQVTIEWL

SEQ ID NO: 5502 - protein, 469 aa, synthetic construct
MSYTTPVRAAVYLRISEDRSGEQLGVARQREDCLKLCGQRKWVPAEYLDNDVSASTGKRRPAYEQMLADITAGKIAAVVAWDLDRLHRRPVELEAFMSLADEKRLALATVAGDVDLATPQGRLVARLKGIVAAHETEHKKARQRRAARQKAERGHPNWSKAFGYLPSPNGPEPDPRTAPLVKQAYADILAGASLGDVCRQWNDAGAFTITGRPWTTTTLSKFLRKPRNAGLRAYKGARYGPVDRDAIVGKAQWSPLVDEATFWAAQAVLDAPGRAPGRKSVRRHLLTGLAGCGKCGNRLAGSYRTDGRVVYVCKACHGVAILADKIEPILYHIVAERLAMPDAVDLLCREIHDAAEAETIRLELETLYGELDRLAVERAEGLLTARQVKISTDIVNAKIAKLQARQLDQERLRVFDGIPLGTPQVAGMIAELSPDRFRAVLDALAEVVVQPVGKSGRIFNPERVRVNWR

SEQ ID NO: 5503 - protein, 469 aa, synthetic construct
MSYTTRVRAAVYLRISEDRSGEQLGVARQREDCLKLCDQRKWVPVEYLDNDVSASTGKRRPAYEQMLADITAGKIAAVVAWDLDRLHRRPMELEAFMSLADEKRLALATVAGDVDLATPQGRLVARLKGGVAAHETEHKKARQRRAARQKAERGHPNWSKAFGYLPGPNGPEPDPRTAPLVKQAYADILAGASLGDVCRRWNGAGAFTITGRPWTTTTLSKFLRKPRNAGLRAYKGARYGPVDRDAIVGKAQWSPLVDEATFWAAQAVLDAPGRAPGRKSVRRHLLTGLAGCGKCGNHLAGSYRTDGRVVYVCKACHGVAILADNVEPILYHIVAERLAMPDAVDLLRREIHDVAEAETIRLELETLYGELDRLAVERAEGLLTARQVKISTDIVNAKITKLQARQLDQERLRVLDGIPLGTPKVAGVIAELSPDRFRAVLDVLAEVVVQPVGKGGRIFNPERVQVNWR

SEQ ID NO: 5504 - protein, 452 aa, synthetic construct
MKAAIYIRVSTQEQVGNYSIQAQTEKLTALCRSKDWDVYDVFVDGGYSGSNMNRPALNEMLSKLHEIDAVVVYRLDRLSRSQRDTTTLIEEYFLKNNVEFVSLSETLDTSSPFGRAMIGILSVFAQLERETIRDRMVMGKIKRIEAGLPLTTAKGRTFGYDVIDTKLYVNEEEAKQLQLIYDIFEEEQSITFLQKRLKKLGFKVRTYNRYNNWLTNDLYCGYVSYKDKVHVKGIHEPIISEEQFYRVQEIFTRMGKNPNMNRGSASLLSNLVVCSKCGLGFVHRSKDTMSRGKKYHYRYYSCKTYKHTHELEKCGNKIWRADKLEELIIDRVNNYSFASRNVDKEGELDSLYEKLKIEHAKKKRLFDLYINGSFEVSELDSMMNDIDAQINYYESQIEANEELKKNRKIQENLADLATVDFDSLGLREKQLYLKSLINKIYIDGEQVTIEWL

SEQ ID NO: 5505 - protein, 452 aa, synthetic construct
MKAAIYIRVSTREQVENYSIQAQTEKLTALCRSKDWDVYDIFIDGGYSGSNMNRPALNEMLSKLHEIDAVVVYRLDRLSRSQRDTITLIEEYFLKNNVEFVSLSETLDTSSPFGRAMIGILSVFAQLERETIRDRMVMGKIKRIEAGLPLTTAKGRTFGYDVIDTKLYINEEEAKQLQLIYDIFEEEQSITFLQKRLKKLGFKVRTYNRYNNWLTNDLYCGYVSYKDKVHVKGIHEPIISEEQFHRVQEIFARMGKNPNMNRDSASLLNNLVVCSKCGLSFVHRRKDAMGRDKKYHYRYYSCKTYKHIHELEKCGNKIWRADKLEELIINRVNNYSVASRNVDKEDELDSLNEKLRIEHAKKRRLFDLYISGRYVVSELDSMMNDIDAQISYYESQIEANEELRKNKEIQENLAHLATVDFDSLEFREKQLYLKSLINKIYIDGEQVTIEWL

SEQ ID NO: 5506 - protein, 485 aa, synthetic construct
MTKKVAIYTRVSTTNQAEEGFSIDEQIDRLTKYAEAMGWQVSDTYTDAGFSGAKLERPAMQRLINDIENKAFDTVLVYKLDRLSRSVRDTLYLVKDVFTKNKIDFISLNESINTSSAMGSLFLTILSAINEFERENIKERMTMGKLGRAKSGKSMMWTKTAFGYYHNRKTGILEIVPLQATIVEQIFTDYLSGISLTKLRDKLNESGHIGKDIPWSYRTLRQTLDNPVYCGYIKFKDSLFEGMHKPIIPYETYLKVQKELEERQQQTYERNNNSRPFQAKYMLSGMARCGYCGAPLRVVLGHKRKDGSRTVKYHCANRFPRKTKGITVYNDNKKCDSGTYDLSNLENTVIDNLIGFQENDDSLLKIINGNSQPILDTCSLKKQISQIDKKIQKNGDLYLNDFITMDELKDRTDSLQAEKRLLKAKISENRFNDSTDVFELVKTQLGSIPINELSYDNKKKIVNNLVSKVDVTADNVDIIFKFQLA

SEQ ID NO: 5507 - protein, 452 aa, synthetic construct
MKAAIYIRVSTQEQVENYSIQAQTEKLTALCRSKDWDVYDIFIDGGYSGSNMNRPALNEMLSKLHEIDAVVVYRLDRLSRSQRDTITLIEEHFLKNNVEFVSLSETMDTSSPFGRAMIGILSVFAQLERETIRDRMVMGKIKRIEAGLPLTTAKGRTFGYDVIDTKLYINEEEAKQLRLIYDIFEEEQSITLLQKRLKKLGFKVRTYNRYNNWLTNDLYCGYVSYKDKVHVKGIHEPIISEEQFYRVQEIFTRMGKNPNMNRDSASLLNSLVVCSKCGLGFVHRRKDTMSRGKKYHYRYYSCKTYKHTHELEKCGNKIWRADKLEELIINRVSNYSFASRNVDKEDELDSLNEKLKIEQAKKKRLFDLYVNGSYEVSELDSMMNDIDAQISYYESQIEANEELKKNKKIQENLADLATVDFDSLEFREKQLYLKSLINKIYIDGEQVTIEWL

SEQ ID NO: 5508 - protein, 485 aa, synthetic construct
MTKKVAIYTRVSTTNQAEEGFSIDEQTDRLTKYAEAMGWQVSDTYTDAGFSGAKLERPAMQRLINDIENKAFDTVLVYKLDRLSRSVRDTLYLVKDVFTKNKIDFISLNESINTSSAMGSLFLTILSAINEFERENIKERMTMGKLGRAKSGKSMMWTKTAFGYYHNRKTGILEIVPLQATIVEQIFTDYLSGISLTKLRDKLNESGHIGKDIPWSYRTLRQTLDNPVYCGYIKFKDSLFEGMHKPIIPYETYLKVQKELEERQQQTYERNNNPRPFQAKYMLSGMARCGYCGAPLKIVLGHKRKDGSRTMKYHCANRFPRKTKGDTVYNDNKKCDSGAYDLSNLENTVIDNLIGFQENNDSLLKIINGNNQPIPDTSSFEKQISQIDKKIQKNSDLYLNDFITMDELKDRTDSLQAEKKLLKAKISENKFNDSTDVFGLVKTQLGSIPINELSYDNKKRIVNNLVSKVDVTADNVDIIFKFQLA

SEQ ID NO: 5509 - protein, 469 aa, synthetic construct
MCYTTPVRAAVYLRISEDRSGEQLGVARQREDCLKLCDQRKWVPVEYLDNDVSASTGRRRPAYEQMLADITAGKIAAVVAWDLDRLHRRPIELEAFMCLADEKRLALATVAGDVDLATPQGRLVARLKGSVAAHETEHKKARQRRAARQKAERGHPNWSKAFGYLPGPNGPEPDPRTAPLVKQAYADILAGASLGDVCRQWNDAGASTITGRPWTTTTLSKFLRKPRNAGLRTYKGARYGPVDRDAIVGKAQWSPLVDEATFWAAQAVLDAPGRAPGRKSVRRHLLTGLAGCGKCGNHLAGSYRTDGRVVYVCKACHGVAILADNIEPILYHVVAERLAMPDAVDLLRREIHDAAEAETIRLELATLYGELDRLAVERAEGLLTARQVKISTDIVNAKITKLQAHQLDQERLRVLDGIPLGTPQVAGVIAELSPDRFRAVLDVLAEVVVQPVGKSGRIFNPERVQVNWR

SEQ ID NO: 5510 - protein, 452 aa, synthetic construct
MKAAIYIRVSTQEQVENYSIQAQTEKLTALCRSKGWDVYDIFIDGGYSGSNMSRPALNEMLSKLHEIDAVVVYRLDRLSRSQRDTTTLIEEYFLKNNVEFVSLSETLDTSSPFGRAMIGILSVFAQLERETIRDRMVMGKIKRIEAGLPLTTAKGRTFGYDVIDTKLYVNEEEAKQLRLIYDIFEEEQSITSLQKRLKKLGFKVRTYNRYNRWLTNDLYCGYVSYKDKVHVKGIHEPIISEEQFYRVQEIFARMGKNPNMNRDSASLLNGLVVCSKCGMGFVHRSKDTMNRGKKYHYRYYSCKTYKHAHELEKCGNKTWRADKLEELIINRVNNYSFASRNMDNEDELDSLNEKLKIEHAKKKRLFDLYINGSYEVSELDSMMNDIDAQISYYESQIEANEELKKNKKIQENLANLATVDFDSLEFREKQLYLKSLINKIYIDGEQVTIEWL

SEQ ID NO: 5511 - protein, 485 aa, synthetic construct
MTKKVAIYTRVSTTNQAEEGFSIDEQIDRLTKYAEAMGWQVSDTYTDAGLSGAKLERPAMQRLINDIENKAFDTVLVYKLDRLSRSVRDTLYLVKEVFTKNKIDFISLNESIDTSSAMGSLFLTILSAINEFERENIKERMTMGKLGRAKSGKSMMWTKTAFGYYHNRKTGILEIVPLQATIVEQIFTDYLSGISLTKLRDKLNESGHIGKDIPWSYRTLRQTLDNPVYCGYIKFKGSLFEGMHKPIIPYETYLKVQKELKERQQQTYERNNNPRPFQAKYMLSGMARCGYCGAPLRIVLGHKRKDGSRTMKYHCANRFPRKTKGVTVYNDNKKCDSGTYDLSKLENTVIDTLIGFQENNDSLLKIINGNNQPILDTSSFKKQISRIDKKIQRNSDLYLNDFITMDELKNRTDSLQAEKKLLKAKISENKFNDSTDVFELVKTQLGSIPINELSYDNKKKIVNNLVSKVDVTADNVDIIFKFQLA

SEQ ID NO: 5512 - protein, 469 aa, synthetic construct
MSYTTPVRAAVYLRISEDRSGEQLGVARQREDCLKLCGQRKWEPVEYLDNDVSASTGKRRPAYERMLADITAGKIAAVVAWDLDRLHRRPIELEAFMSLADEKRLALATVAGDVDLATPQGRLVARLKGSVAAHETEHKRARQRRAARQKAERGYPNWSKAFGYLPGPNGPEPDPRTAPLVKQAYADILAGASLGDVCRQWNDAGAFTITGRPWTTTALSKFLRKPRNAGLRAYKGARYGPVDRDAIVGKAQWSPLVDEATFWAAQAVLDAPGRAPGRKSVRRHLLTGLAGCGKCGNHLAGSYRTDGRVVYVCKACHGVAILADNIEPILYHVVAERLAMPDAVDLLRREIHDAAEAETIRLELETLYGELDRLAVERAEGLLTARQVKISTDIVNAKITKLQARQLDQERLRVLEGIPLGTPQVAGMIAELSPDRFRAVLDVLAEVVVQPVGKSGRIFNPERVQVNWR

SEQ ID NO: 5513 - protein, 485 aa, synthetic construct
MTKKVAIYIRVSTTNQAEEGFSIDEQIDRLAKYAEAMGWQVSDTYTDAGFSGAKLERPAMQRLINDIENKAFDTVLVYKLDRLSRSVRDTLYLVKDVFTKNKIDFISLNESINTSSAMGSLFLTILSAINEFERENIKERMTMGKLGRAKSGKSMMWTKTAFGYYHSRKTGILEIVPLQATIVEQIFTDYLSGISLTKLRDKLNEGGHIGKDIPWSYRTLRQTLDNPVYCGYIKFKDSLFEGMHKPIIPYETYLKVQKELEERQQQTYERNNNPRPFQAKYMLSGMARCGYCGAPLKIVLGHKRKDGSRTMKYHCANRFPRKTKGVTVYNDNKKCDSGTYDLSNLENTVIDNLIGLQENNDSLLKIINGNNRPTLDTSSLKKQIGQIDKKIQRNSDLYLNDFITMDELRDRTDSLQAEKKLLKAKISEDKFNDSTDVFELVKTQLGSIPINELSYENKKKIVNSLVSKVDVTADNVDITFKFQLA

SEQ ID NO: 5514 - protein, 452 aa, synthetic construct
MKAAIYIRVSTREQVENYSIQAQTEKLTALCRSKDWDVYDIFIDGGYSGSNMNRPALNEMLSKLHEIDAVVVYRLDRLSRSQRDTITLIEEYFLKNNVEFVSLSETLDTSSPFGRAMIGILSVFAQLERETIRDRMVMGKIKRVEAGLPLTTAKGRTFGYDVIDTKLYINEEEAKQLQLIYDIFEEEQSITSLQKRLKKLGFKVRTYNRYNSWLTNDLYCGYVSYKDKVHVKGIHEPIISEEQFYRVQEIFARMGKNPNMNRDSASLLSNLVVCSKCGLGFVHRRKDTTSRGKKYHYRYYSCKTYKHTHELEKCGNKIWRADKLEELIINRVNSYSFASRNVDKEDELDSLNEKLKIEHVKKKRLFDLYINGSYEVSELDSMMSDIDAQINYYESRIEANEELKKNKKIRENLADLATVDYDSLEFREKQLYLKSLISKIYIDGEQVTIEWL

SEQ ID NO: 5515 - protein, 485 aa, synthetic construct
MTKKVAIYTRVSTTNQAEEGFSIDEQIDRLTKYAEAMGWQVSDTYTDAGFSGAKLERPAMQRLINDIENKAFDTVLVYKLDRLSRSVRDTLYLVKEVFTKNKIDFISLNESINTSSAMGSLFLTILSAINEFERENIKERMTMGKLGRAKSGKSMMWTKTAFGYYHNRKTGILEIVPLQATIVEQIFTDYLSGISLTKLRDKLNESGHIGKDIPWSYRTLRQTLDNPVYCGYIKFKDSLFEGMHKPIIPYETYLKVQKELEERQQQTYERNNNPRPFQAKYMLSGMARCGYCGAPLKIVLGHKRKDGSRTMKYHCANRFPRKTKGVTVYNDNKKCDSGTYDLSNLENTVIDNLVGFQENNDSLLKIINGDNQPILDTSSFEKQISQIDKKIQRNSDLYLNDFITMDELKERTDSLQAEKKLLKAKISENKFNDSVDVFELVKTQLGSIPINELSYDNKKKIVNNLVSKVDVTADNVDIIFKFQLA

SEQ ID NO: 5516 - protein, 452 aa, synthetic construct
MKAAIYIRVSTQEQVENYSIQAQTEKLTALCRSKDWDVYDIFIDGGYSGSNMNRPALNEMLSKLHEIDAVVVYRLDRLSRSQRDTTTLIEEYFLKNNVEFVSLSETLDTSSPFGRAMIGILSVFAQLERETIRDRMVMGKIKRIEAGLPLTTAKGRTFGYDVIDTKLYINEEEAKQLRLIYDIFEEEQSITSLQKRLKKLGLKVHTYNRYNNWLTNDLYCGYVSYKDKVHVKGIHEPIISEEQFYRVQEIFTRMGKNPNMNRDSASLLSSLVVCSKCGLGFVHRSKDTMNRGKKYHYRYYSCKTYKHTHELEKCGNKTWRADKLEELIINRVNNYSFASRNMVKEDELDSLNEKLKIEHAKKKRLFDLYINGSYEVSELDSMMNDIDAQINHYESQIEANEELKKNKKIRENLADLATVDFDSLEFREKQLYLKSLINKIYIDGEQVTIEWL

SEQ ID NO: 5517 - protein, 469 aa, synthetic construct
MNYTTPVRAAVYLRISEDRSGEQLGVARQREDCLKLCGQRKWVPVEYLDNDVSASTGKRRPAYEQMLADITAGKIAAVVAWDLDRLHRRPVELEAFMSLADEKRLALATVAGDVDLATPQGRLVARLKGCVAAHETEHKKARQRRAARQKAERGLPNWSKAFGYLPGPNGPEPDPRTAPLVKQAYADILAGASLGDVCRQWNDAGAFTITGRPWTSTTLSKFLRKPRNAGLRAYKGARYGPVDRDAIVGKAQWSPLVDEATFWAAQAVLDAPGRAPGRKSVRRHLLTGLAGCGKCGNHLAGSYRTDGQVVYVCKVCHGVSILAVNIVPILYHIVAERLAMPDAVDLLRREIHDAAEAETIRLELETLYGELDRLAVERAEGLLTARQVKISTDIVNAKITKLQARQLDQERLRVFDGIPLGTPQVAGMIAELSPDRFRAVLDVLAEVVVQPVGKSGRIFNPERVQVNWR

SEQ ID NO: 5518 - protein, 469 aa, synthetic construct
MSYTTPVRAAVYLRISEDRSGEQLGVARQREDCLKLCDQRKWVPVEYLDNDVSASTGKRRPAYEQMLADITAGKIAAVVAWDLDRLHRRPIELEAFMSLADEKRLALATVAGDVDLATPQGRLVARLKGSVAAHETEHKKARQRRAARQKAERGLPNWSRAFGYLPGPNGPEPDPRTAPLVKRAYVDILAGASLGDVCRQWNDAGAFTITGRPWTTTTLSKFLRKPRNAGLRAYKGARYGPVDRDAIVGKAQWSPLVDEATFWAAQAVLDAPGRAPGRKSVRRHLLTGLAGCGKCGNHLAGSYRTDGQVVYVCKACHGVAILADNIEPILYHIVAERLAMPDAVDLLRCEIHDAAEAETIRLELETLYGELDRLAVERAEGLLTGRQVKIGTDIVNAKIAKLQARQLDQERLRVFDGIPLGTPQVAGMIAELSPDRFRAVLGVLAEVVVQPVGKRGRIFNPERVQVNWR

SEQ ID NO: 5519 - protein, 485 aa, synthetic construct
MTKKVAIYTRVSTTNQAEEGFSIDEQVDRLTKYAEAMGWQVSDTYTDAGFSGAKLERPAMQRLINDIESKAFDTVLVYRLDRLSRSVRDTLYLVKDVFTKNKIDFISLNESIDTSSAMGSLFLTILSAINEFERENIKERMTMGKLGRAKSGKSMMWTKTAFGYYHSRKTGILEIVPLQATIVEQIFTDYLSGISLTKLRDKLNESGHIGKDIPWSYRTLRQTLDNPVYCGYIRFKGSLFEGMHKPIIPYETYLRVQKELEERQQQTYERNNNPRPFQAKYMLSGMARCGYCGAPLRIVLGHKRKDGSRTMKYHCANRFPRKTKGVTVYNDNRKCDSGTYDLSNLETTVIDNLIGFQENNDSLLKIINGNNQPILDASSLKKQISQIDKKIQKNSDLYLNDFITMDELKDRTDSLQAEKKLLKAKISENKFNDSADVFELVKTQLGSIPINELSYDNKKKIVNNLVSKVDVTADNVDIIFKFQLA

SEQ ID NO: 5520 - protein, 469 aa, synthetic construct
MSYTTPVRAAVYLRVSEDRSGEQLGVTRQREDCLELCGQRKWVPVEYLDNDVSASTGKRRPAYERMLADITAGKIAAVVAWDLDRLHRRPIELEAFMSLADEKRLALATVAGDVDLATPQGRLVARLKGSVAAHETEHKKARQRRAARQKAERGLPNWSKAFGYLPGPNGPEPDPRTAPLVKQAYADILAGASLGDVCRQWNDAGAFTITGRPWTTTTLSKFLRKPRNAGLRAYKGARYGPVDRDAIVGKAQWSPLVDEATFWAAQAVLDAPGRAPGRKSVRRHLLTGLAGCGKCGNHLAGSYRTDGRVVYVCKVCHGVAILADNIEPILYHIVAERLAMPDAVNLLRREFHDAAEAETIRLELETLYGELDRLAVERAEGLLTARQVKISTDIVDAKITKLQARQLDQERLRVLDGIPLGTPQVAGTIAELSPDRFRAVLDVLAEVVVQPVGKSGRIFNPERVQVNWR

SEQ ID NO: 5521 - protein, 469 aa, synthetic construct
MSYTTPVRAAVYLRISEDRSGEQLGVARQREDCLKLCDQRKWVPVEYLDNDVSASTGKRRPAYEQMLADITAGKIAAVVAWDLDRLHRRPIELEAFMSLADEKRLALATVAGDVDLATPQGRLVARLKGSVAAHETEHKKARQRRAARQKAERGYPNWSKAFGYLPGPDGPEPDPRTAPLVKQAYTDILAGASLGDVCRQWNDAGAFTITGRPWTTTTLSKFLRKPRNAGLRAYKGARYGPVDRDAIVGKAQWSPLVDEATFWAAQAVLDAPGRAPGRKSVRRHLLTGLASCGKCGYHLAGSYRTDGRVVYVCKACHGVAILADNIEPILYHIVAERLAMPDAVDLLRREIHDAAEAEAIRLELETLHGELDRLAVERAEGLLTARQVKISTDIVNAKITKLQARQLDQERLRVLGGIPLGTPQVAGMIAELSPDHFRAVLDVLVEVVVQPVGKGGRISNPERVQVNWR

SEQ ID NO: 5522 - protein, 452 aa, synthetic construct
MKAAIYIRVSTREQVENYSIQAQTEKLTALCRSKGWDVYDIFIDGGYSGSNMNRPALSEMLSKLHEIDAVVVYRLDRLSRSQRDTITLIEEYFLKNNVEFVSLSETLDTSSPFGRAMIGILSVFAQLERETIRDRMVMGKIKRIEAGLPLTTAKGRTFGYDVIDTKLYINEEEAKQLQLIYDIFEEEQSITFLQKRLKKLGFKVRTYNRYNNWLTNDLYCGYVSYKDKVHVKGIHEPIISEEQFYRVQEIFARMGKNPNMNRDSASLLNNLVVCSKCGLGFVHRRKDAMSRDKKYHYRYYSCKTYKHIHELEKCGNKIWRADKLEELIINRVNNYSFASRNADKEDELGSLNEKLKVEHAKKKRLFDLYINGNYEVSELDSMMSDIDAQINYYESRIEANEELKKNKKIQENLAELATVDFDSLEFREKQRYLKSLINKIYIDGEQVTIEWL

SEQ ID NO: 5523 - protein, 452 aa, synthetic construct
MKAAIYIRVSTREQVENYSIRAQTEKLTALCRSKDWDVYDIFIDGGYSGSNMNRPALNEMLSKLHEIDAVVVYRLDRLSRSQRDTITLIEEYFLKNNVEFVSLSETLDTSSPFGRAMIGILSVFAQLERETIRDRMVMGKIKRIEAGLPLTTAKGRTFGYDVIDTKLYINEEEAKQLQLIYDIFEEERSITFLQKRLKKLGFKVRTYNRYNNWLTNDLYCGYVSYKDKVHVKGIHEPIISEEQFYRVQEIFARMGKNPNMNRDSASLLNNLVVCGKCGLGFVHRRKDVMSRGKKYHYRYYSCKTYKHIHELEKCGNKIWRADKLEELIINRVNNYSLANRNVDKEDELDSLNEKLKIEHAKKRRLFELYVNGRYEVSELDSMMNDIDAQINYYESQIEANEELRENKKTQENLANLATVDFDSLEFREKQLYLKSLINKIYIDGEQVTIEWL

SEQ ID NO: 5524 - protein, 452 aa, synthetic construct
MKAAIYIRVSTREQVENYSIQAQTEKLTALCRSKDWDVYDIFIDGGYSGSNMNRPALNEMLSKLHEIDAVVVYRLDRLSRSQRDTITLIEEYFLKNNVEFVSLSETLDTSSPFGRAMIGILSVFAQLERETIRDRMVMGKIKRIEAGLPLTTAKGRTFGYDVIDTKLYINEDEAKQLRLIYDIFEEEQSITFLQKRLKKLGYKVRTYNRYNNWLTNDLYCGYVSYKDKVHVKGIHEPIISEEQFYRVQEIFTRMGKNPNMNRDSASLLNNLVVCSKCGRGFVHRRKDAKSRDKKYHYRYYSCKTYKHIHELEKCGNKIWRADKLEELIINRVNNYSFASRNADKEDELDSLNEKLKIEHAKKKRLFDLYINGSYDVSELDSMMNDIDAQINYYESQIEANAELKRNRKVQESLAYLATVDFDSLEFREKRLYLKSLINKIYIDGEQVTIEWL

SEQ ID NO: 5525 - protein, 469 aa, synthetic construct
MSYTTPVRAAVYLRVSEDRSGEQLGVARQREDCLKLCDQRKWVPVEYLDNDVSASTGKRRPAYEQMLADITAGKIAAVVAWDLDRLHRRPIELEAFMSLADEKRLALATVAGDVDLATPQGRLVARLKGCVAAHETEHKKARQRRAARQKAERGYPNWSKAFGYLPGPNGPEPDPRTAPLVKQAYADILAGASLGDVCRQWNDAGAFTITGRPWATTALSKFLRKPRNAGLRAYKGARYGPVDRDAIVGKAQWSPLVDEATFWAAQAVLDAPGRAPGRKSVRRHLLTGLAGCGKCGNHLAGSYRTDGRVVYVCKACHGVAILADNIEPILYHIVAERLATPDAVDLLRREIHDAAEAETIRLELETLYGELDRLAVERAEGLLTARQVKISTDIVNAKITKLQARQLDQERLRVFNGIPLGTPQVAGMIAELSPDRFRAVLDVLAEVVVQPVGKSGRTFSPERVQVNWR

SEQ ID NO: 5526 - protein, 452 aa, synthetic construct
MKAAIYIRVSTQEQVENYSIQAQTERLTALCRSKDWDVYDIFIDGGYSGSNMNRPALNEMLSKLHEIDAVVVYRLDRLSRSQRDTTTLIEEYFLKNNVEFVSLSETLDTSSPFGRAMIGILSVFAQLERETIRDRMVMGKIKRIEAGLPLTTAKGRTFGYDVIDTKLYINEEEARQLRLIYDIFEEEQSITFLQKRLKKLGFKVRTYNRYNNWLTNDLYCGYVSYKDKVHVKGIHEPIISEEQFHRVQEIFTRMGKNPNMNRDSASLLSNLVVCSKCGLGFVHRSKDTMSRGKKYHYRYYSCKTYKHTHELEKCGNKTWRADKLEELIISRVNNYSFASRNADKEDELDSLNEKLKIEHARKKRLFDLYINGSYEVSELDCMMNDIDAQINYYESQIEANEELRKNRKIQENLADLATVDFDRLEFREKQLYLKSLINKIYIDGEQVTIEWL

SEQ ID NO: 5527 - protein, 485 aa, synthetic construct
MTKKVAIYTRVSTTNQAEEGFSIDEQIDRLTKYAEAMGWQVSDTYTDAGSSGAKLERPAMQRLINDIENKAFDTVLVYKLDRLSRSVRDTLYLVKDVFTKNKIDFISLNESIDTSSAMGSLFLTILSAINEFERENIKERMTMGKLGRAKSGKSMMWTKTAFGYCHNRKTGILEIVPLQATIVEQIFTDYLSGISLTKLRDKLNESGHIGKDIPWSYRTLRQTLDNPVYCGYIKFKDSLFEGMHKPIIPYETYLKVQEELEERQQQTYERNNNPRPFQAKYMLSGMARCGYCGAPLRIVLGRKRKDGSRTTKYHCTNRFPRKTKGITVYNDNKKCDSGTYDLSNLENTVIDSLIGFQENNDSLLKIINGNNQPIPDTSSLKKQISQIDKKIQKNSDLYLNDFITLDELKDRTDSLRAEKKLLKAKISENKLNDSTDVFELVKTQLGSIPINELSYDNKKKIVNNLVSKVDVTADNVDIIFKFQLA

SEQ ID NO: 5528 - protein, 452 aa, synthetic construct
MKAAIYIRVSTQEQVGNYSIQAQTEKLTALCRSKDWDVYDIFIDGGYSGSNMNRPALNEMLSKLHEIDAVVVYRLDRLSRSQRDTTTLIEGYFLKNNVEFVSLSETLDTSSPFGRAMIGILSVFAQLERETIRDRMVMGKIKRIEAGLPLTTAKGRTFGYDVIDTKLYINEEEAKQLQLIYDIFEEEQSITLLQKRLKKLGFKVRTYNRYNNWLTNDLYCGYVSYKDKVHVKGIHEPIISEEQFYRVQEIFTRMGKNPNMNRDNASLLSNLVVCSKCGLGFVHRSKDTMSRGKKYHYRYYSCKTYKHAHELEKCGNKTWRADKLEELIINRVNDYSFASRNVDKEDELDSLNEKLKIEHAKKKRLLDLYINGSYEVSELDSMMNDIDAQITYYESQIEANEELEENKKIQEGLAELATVDFDSLEFREKQLYLKSLINKIYIDGEQVTIEWL

SEQ ID NO: 5529 - protein, 485 aa, synthetic construct
MTKKVAIYTRVSTTNQAEEGFSIDEQVDRLTKYAEAMGWQVSDTYTDAGFSGAKLERPALQRLINDIENKAFDTVLVYKLDRLSRSVRDTLYLVKEVFTKNKIDFISLSESINTSSAMGSLFLTILSAINEFERENIKERMTMGKLGRAKSGKSMMWTKTAFGYYHNRETGILEIVPLQAAIVEQIFTDYLSGISLTKLRDKLNASGHIGKDIPWSYRTLRQTLDNPVYCGYIKFKGSLFEGMHKPIIPYETYLKVQRELEVRQQQTYERNNNPRPFQAKYMLSGVARCGYCGAPLRIVLGHKRKDGSRTMKYHCANRFPRKTKGVTVYNDNKKCDSGTYDLSNLENTVIDSLIGLQENNDSLLKVINGNNQPILDTSSFKKQISQIDKKIQKISDLYLNDFITMDELKDRTDSLQAEKKLLKAKISENKFNDSTDVFELVKTQLGSIPINELSYDNKKKIVNNLVSKVDVTADNVDIIFKFQLA

SEQ ID NO: 5530 - protein, 485 aa, synthetic construct
MTKKVAIYTRVSTTNQAEEGFSIDEQIDRLTKYAEAMGWQVSDTYTDAGFSGAKLERPAVQRLINDIESKAFDTVLVYKLDRLSRSVRDTLYLVKDVFTKNKIDFISLNESINTSSAMGSLFLTILSAINEFERENIKERMTMGKLGRAKSGKSMMWTKTAFGYFHNRETGILEIVPLQATIVEQIFTDYLSGISLTKLRDKLNESGHIGKDIPWSYRTLRQTLDNPVYCGYIKFKDSLFEGMHKPIIPYETYLKVQKELEDRQQQTYERNNNPRPFQAKYMLSGMARCGYCGAPLRIVLGHKRKDGSRTMKYHCANRFPRKTKGVTVYNDNKKCDSGTYDLSNLENTVIDSLIGFQENNDSLLKIINGNNQPILDTSSFKKQISQIDEKIQKNSDLYLNGFITMDELKGRTDSLQAEKKLLKAKISENKFNDSTDVFELVKTQLGSIPINELSYDNKKKIVNNLVSKVDVTADNVDIIFKFQLA

SEQ ID NO: 5531 - protein, 452 aa, synthetic construct
MKAAIYIRVSTQEQVGNYSIQAQTEKLTALCRSKGWDVYDIFIDGGYSGSNMNRPALNEMLSKLHEIDAVVVYRLDRLSRSQRDTTTLIEEYFLKNNVEFVSLSETLDTSSPFGRAMIGILSVFAQLERETIRDRMVMGKIKRIEAGLPLTTAKGRTFGYDVIDTKLYINEEEAKQLQLIYDIFEEEQSITSLQKRLKKLGFKVRTYNRYNSWLTNDLYCGYVSYKDKVHVKGIHEPIISEEQFHRVQEIFTRMGKNPNMNRDSASLLSNLVVCSKCGRGFVHRSKDTMSRGKKYHYRYYSCKTYKHTHELEKCGNKTWRADKLEELIINRVNDYSSASRNVDREDELDSLNEKLKIERAKKRRLFDLYINGSYEVSELDSMMNDIDAQINHYESQIEANEGLKENKKIQENLAGLATVDFDGLEFREKQLHLKSLINKIYIDGEQVTIEWL

SEQ ID NO: 5532 - protein, 452 aa, synthetic construct
MKAAIYIRVSTQEQVENYSIQAQTEKLTALCRSKDWDVYDIFVDGGYSGSNMNRPALNEMLSKLHEIDAVVVYRLDRLSRSQRDTTTLIEEYFLKNNVEFVSLSETLDTSSPFGRAMIGILSVFAQLERETIRDRMVMGKIKRIESGLPLTTAKGRTFGYDVIDTKLYINEEEARQLQLIYDIFEEEQSITSLQKRLKKLGFKVRTYNRYNNWLTNDLYCGYVSYKDKVHVKGIHEPIISEEQFYRVQEIFTRMGKNPNMNRGSASLLSNLVVCSKCGLGFVHRSKDTMCRGKKYHYRYYSCKTYKHTHELEKCGNKIWRADKLEELIINRVNNYSFVSRNVDKEDELDSLSEKLKIEHAKKRRLFDLYINGSYEVSELDSMMNDIDAQINYYESQIEANEELKKNKKVQEDLADLATVDFNSLEFREKQLYLKSLINKIYIDGEQVTIEWL

SEQ ID NO: 5533 - protein, 452 aa, synthetic construct
MKAAIYIRVSTREQVENYSIQAQTEKLTALCRSKDWDVYDVFIDGGYSGSNMNRPALNEMLSKLHEIDAVVVYRLDRLSRSQRDTITLIEEYFLKNNVEFVSLSETLDTSSPFGRAMIGILSVFAQLERETIRDRMVMGKIKRIEAGLPLTTAKGRTFGYDVIDTKLYINEEEAEQLQLIYDIFEEEQSITFLQKRLKKLGFKVRTYNCYNNWLTNDLYCGYVSYKDKVHVKGIHEPIISEEQFYRVQEIFARMGKNPNMNRDSASLLNNLVVCSKCGLGFVHRRKDTMSRGKKYHYRYYSCKTYKHTHELEKCGNKIWRADKLEELIINHVNDYSFASRNVDKEDELDSLNEKLKIEHAKKRRLFDLYINGSYEVSELDSMMNDIDARINYYESQIEANEELKKNKKIQENLANLATVDYDSLEFREKQLYLKSLINKIYIDGEQVTIDWL

SEQ ID NO: 5534 - protein, 452 aa, synthetic construct
MKAAIYIRVSTREQVENYSIQAQTDKLTALCRSKDWDVYDIFIDGGYSGSNMNRPALNEMLSKLHEIDAVVVYRLDRLSRSQRDTITLIEEYFLKNNVEFVSLSETLDTSSPFGRAMIGILSVFAQLERETIRDRMVMGKIKRIEAGLPLTTAKGRTFGYDVIDTRLYINEEEAKQLQLIYDIFEEEQSITSLQKRLKKLGFKVRTYNRYNSWLTNDLYCGYVSYKDKVRVKGIHEPIISEEQFYRVQEIFTRMGKNPNVNRDSASLLNNLVVCSKCGLGFVHRRKDTMSRGKKYHYRYYSCKTYKHTHELEKCGNKIWRADKLEELIIYRVNNYSFASRNADKEDELDGLNEKLKIEHAKKKRLFDLYINGSYEVSELDSMMNDIDAQINYYESQIEANEELKKNKKIQENLAGLATVDFDSLEFREKQLYLKSLINKIYIDGEQVTIEWL

SEQ ID NO: 5535 - protein, 469 aa, synthetic construct
MSYTTPVRAAVYLRISEDRSGEQLGVARQREDCLKLCVQRKWVPVEYLDNDVSASTGKRRPAYEQMLADITAGKIAAVVAWDLDRLHRRPIELEAFMSLADEKRLALATVAGDVDLATPQGRLVARLKGVVAAHETEHKKARQRRAARQKAERGHPNWRKAFGYLPGPNGPEPDPRIAPLVKQAYADILAGASLGDVCRQWNDVGAFTITGRPWTTTTLSKFLRKPRNAGLRAYKGARYGPVDRDAIVGKAQWSPLVDEATFWAAQAVLDAPGRAPGRKSMRRHLLTGLAGCGKCGNHLAGSYRTDGRVVYVCKACHGVAILADNIEPILYHTVAERLAMPNAVDLLRRGINDAAEAETIRLELETLYGELDRLAVERAEGLLTARQVKISTDIVNAKITKLQARQLDQERLRVFNGIPLGTPQVAGVIAELSPDRFRAVLDVLAEVVVQPVGKGGRIFNRERVQVNWR

SEQ ID NO: 5536 - protein, 452 aa, synthetic construct
MKAAIYIRVSTREQVENYSIQAQTEKLTALCRSKDWDVYDVFIDGGYSGSNMNRPALNEMLSKLHEIDAVVVYRLDRLSRSQRDTITLIEEYFLKNNVEFVSLSETLDTSSPFGRAMIGILSVFAQLERETIRDRMVMGKIKRIEAGLPLTTAKGRTFGYDVIDTKLCINEEEAKQLRLIYDIFEEEQSITFLQKRLKKLGFKVRTYNCYNNWLTNDLYCGYVSYKDKVHVKGIHEPIISEEQFYRVQEIFTRMGKNPNMNRDSASLLNNLVVCSKCGLGFVHRRKDVMSRGKKYHYRYYSCKTYKHIHELEKCGNKIWRADKLEELVINRVNNYSLASRNVDKENELESLNEKLKTEHAKKKRLFDLYINGSYEVSELDSMMNDIDAQINYYESQIEANKELKKSKRIEENLADLATVDFDSLEFREKQLYLKSLINKIYIDGEQVTIEWL

SEQ ID NO: 5537 - protein, 469 aa, synthetic construct
MSYTTPVRAAVYLRISEDRSGEQLGVARQREDCLELCGQRKWVPVEYLDNDVSASTGKRRPAYEQMLADITAGKIAAVVAWDLDRLHRRPIELEAFMCLADEKRLALATVAGDVDLATPQGRLVARLKGSVAAHETEHKRARQRRAARQKAERGYPNWSKAFGYLPGPNGPEPDPRTAPLVKQAYAGILAGASLGDVCRQWNDAGAFTITGRPWTTTTLSKFLRKPRNAGLRAYKGARYGPVDHDAIVGKARWSPLVDEATFWAAQAVLDAPGRAPGRKSVRRHLLTGLAGCGKCGNHLAGSYRTDGRVVYVCKACHGVAILADNIEPILYHTVAERLAMPDAVDLLRCEIHDAAEAETIRLELETLYGELDCLAVERAEGLLTARQVKISTDIVNAKIAKLQARQLDQERLRVFDGIPLGTPQVAGTIAELSPDRFRAVLDVLAEVVVQPVGKSGRISSPERVQVNWR

SEQ ID NO: 5538 - protein, 452 aa, synthetic construct
MKAAIYIRVSTQEQVENYSIQAQTEKLTALCRSKDWDVYDIFIDGGYSGSNMNRPALNEMLSKLHEIDAVVVYRLDRLSRSQRDTTTLIEEYFLKNNVEFVSLSETLDTSSPFGRAMIGILSVFAQLERETIRDRMVMGKIKRIEAGLPLTTAKGRTFGYNVIDTKLYINEEEAKQLQLIYDIFEEEQSITFLQKRLKELGFKVRTYNRYSNWLTNDLYCGYVSYKDKVHVKGIHEPIISEEQFYRVQEIFTRMGKNPNMNRDSASLLSNLVVCSKCGLGFVHRSKDTRSRGKKYHYRYYSCKTYKHTHELEKCGNKTWRADKLEELIINRVNNYSFASRNVDKEDELDSLNEKLKIEHAKKRRLFDLYINGSYEVSELDSMMNDIDAQINYYESQIEANEELKKNKRIQENLADLATVDFDSLEFREKQLYLKSLINKIYIDGEQVTIEWL

SEQ ID NO: 5539 - protein, 452 aa, synthetic construct; identical to SEQ ID NO: 4579

SEQ ID NO: 5540 - protein, 469 aa, synthetic construct
MSYTTPVRAAVYLRISEDRSGEQLGVARQREDCLNLCDQRKWEPVEYLDNDVSASTGKRRPAYEQMLADITAGKIGAVVAWDLDRLHRRPIELEAFMSLADEKHLALATVAGDVDLATPQGRLVARLKGCVAAHETEHKKARQRRAARQKAERGHPNWSKAFGYLPGPNGPEPDPRTAPLVKQAYADILAGASLGDVCRQWNGAGAFTITGRPWTTTALSKFLRKPRNAALRAYKGARYGPVDRDAIVGKAQWSPLVDEGTFWAAQAVLDAPGRAPGGKSVRRHLLTGLAGCGKCGNHLAGSCRTDGRVVYVCKACHGVSILAVNIEPILYHIVAERLAKPDAVDLLRREIHDAAEAETIRLELETLYGELDRLAVERAEGLLTARQVKISTDIVNAKVTKLQARQLDQERLRVFDGIPLGTPQVAGMIAELSPNRFRAVLDVLAEVVVQPVGKRGRIFNPERVQVNWR

SEQ ID NO: 5541 - protein, 452 aa, synthetic construct
MKAAIYIRVSTREQVENYSIQAQTEKLTALCRSKGWDVYDIFIDGGYSGSNMNRPALNEMLSKLHEIDAVVVYRLDRLSRSQRDTITLIEEYFLKNNVEFVSLSETLDTSSPFGRAMIGILSVFAQLERETIRDRMVMGKIKRIEAGLPLTTAKGRTFGYDVIDTKLYINEEEAKQLRLIYDIFEEEQSITFLQKRLKKLGFKVRTYNRYNNWLTNDLYCGYVSYKDKVHVRGIHEPIISEEQFYRVQEIFARMGKNPNMNRDSASLLNNLVVCSKCGLGFVHRRKDIMSRGKKYHYRYYSCKTYKHIHELEKCGNKIWRADKLEELVINRVNDYSFAGRNVDKEDELDSLNEKLKIELAKKRRLFDLYINDSYEVSELDSMMNDIDVQINYYERQIEANEELKKNKKIQENLAYLATVDFDSLEFREKQLYLKSLINKIYIDGEQVTIEWL

SEQ ID NO: 5542 - protein, 485 aa, synthetic construct
MTKKVAIYTRVSTTNQAEEGFSIDEQIDRLTKYAEAMGWQVSDTYTDAGLSGAKLERPAMQRLINDIENKAFDTVLVYKLDRLSRSVRDTLYLVKDVFTKNKIDFISLNESIDTSSAMGSLFLTILSAINEFERENIKERMTMGKLGRARSGKSMMWTKTAFGYYHNRKTGILEIVPLQATIVEQIFTDYLSGISLTKLRDKLNESGHIGKDIPWSYRTLRQTLDNPVYCGYIKFKGSLFEGMHKPIIPYGTYQKVQKELEERQQQTYERNNNPRPFQAKYMLSGMARCGYCGAPLRIVLGRKRKDGSRTMKYHCANRFPRKTKGITVYNDNKKCDSGTYDLSNLENTVIDILIGFQEDNDSLLKIISGNNQPILDTSSFKKQISQIDKKIQKNSDLYLNDFITMDELKDRTDSLLAEKKLLKAKISENKFNDSTDVFELVKTQLGSIPINELSYDNKKKIVNNLVSKVDVTTDNVDIIFKFQLA

SEQ ID NO: 5543 - protein, 452 aa, synthetic construct
MKAAIYIRVSTQEQVGNYSIQAQTEKLTALCRSKDWDVYDIFIDGGYSGSNMDRPALNEMLSKLHEIDAVVVYRLDRLSRSQRDTTTLIEEYFLKNNVEFVSLSETLDTSSPFGRAMIGILSVFAQLERETIRDRMVMGKIKRIEAGLPLTTAKGRTFGYDVIDTKLYINEEEAKQLRLIYDIFEEEQSITLLQKRLKKLGFKVRTYNRYNNWLTNDLYCGYVSYKDKVHVKGIHEPIISEEQFYRVQEIFTRMGKSPNMNRDSASLLNNLVVCSKCGLSFVHRSKDTMSRGKKYHYRYYSCKTYKHTHELEKCGNKTWRADKLEELIINRVNNYSFASRNVDKEDELDSLNEKLKIEQAKKKRLFDLYINGSYEVSELDSMMNDIDAQINYYESQIKANGELKKNKKIQENLAGLATVDFDSLEFREKQLYLKSLINKIYIDGEQVTIEWL

SEQ ID NO: 5544 - protein, 452 aa, synthetic construct
MKAAIYIRVSTREQVENYSIQAQTEKLTALCRSKDWDVYDIFIDGGYSGSNMNRPALNEMLSKLHEIDAVVVYRLDRLSRSQRDTITLIEEYFLKNNVEFVSLSETLDTSSPFGRAMIGILSVFAQLERETIRDRMVMGKIKRIEAGLPLTTAKGRTFGYDVIDTRLYINEEEAKQLQLIYDIFEEEQSITFLQKRLKKLGFKVRTYNRYNNWLTNDLYCGYVSYKDKVHVKGIHEPIISEEQFYRVQEIFTRMGKSPNMNRDSASLLNNLVVCSKCGLGFVHRRKDATSRDKKYHYRYYSCKTYKHIHELEKCGNKIWRADKLEELIINRVNNYSLASRNVDKEDELDSLNEKLKAEHSKKRRLFDLYINGSYEVSELDSMMNDIDAQISYYESQIEANEELKKNKNIQENLAHLATVDFDSLEFREKQLYLKSLINKIYIDGEQVTIEWL

SEQ ID NO: 5545 - protein, 452 aa, synthetic construct
MKAAIYIRVSTREQVENYSIQAQTEKLTALCRSKDWDVYDIFTDGGYSGSNMNRPALNEMLSKLREIDAVVVYRLDRLSRSQRDTITLIEEYFLKNNVEFVSLSETLDTSSPFGRAMIGILSVFAQLERETIRDRMVMGKIKRVEAGLPLTTAKGRTFGYDVIDTKLYINEGEAKQLQLIYDIFEEEQSITFLQKRLKKLGFKVRTYNRYNSWLTNDLYCGYVSYKDKVHVKGIHEPIISEEQFYRVQEIFTRMGKNPNMNRGSASLLSNLVVCSKCGLGFVHRRKDTMSRGKKYHYRYYSCKTYKHTHELEKCGNKIWRADKLEELIINRVNNYSIASRIVDKEDELDSLNEKLKIEHAKKKRLFDLYINGSYEVSELDSTMNDIDAQINYYESQIEASEELKKNKKIQENLANLATVDYDSLGFREKQLYLKGLINKIYVDGEQVTIEWL

SEQ ID NO: 5546 - protein, 469 aa, synthetic construct
MSYTTPVRAAVYLRISEDRSGEQLGVARQREDCLKLCGQRKWVPVEYLDNDVSASTGKRRPAYEQMLADITAGKIAAVVAWDLDRLHRRPIELEAFMSLADEKRLALATVAGDVDLATPQGRLVARLKGCVAAHETEHKKARQRRAARQKAERGHPNWSKAFGYLPGSNGPEPDPRTAPLVKQAYADILAGASLGDVCRQWNGAGAFTITGRPWTTTALSKFLRKPRNAGLRAYKGARYGPVDRDAIVGKAQWSPLVDEATFWAAQAVLDAPGRAPGRKSVRRHLLTGLAGCGKCGNHLAGSYRADGRVVYVCKACHGVAILADNIEPILYHIVTERLAMPDAVNLLRREFHDAAEAETIRMELEILYGELDRLAVERAEGLLTARQVKISTDIVNAKITKLQARQLDQERLRVLDGIPLGTPQVAGTIAGLGPDRFRAVLDVLAEVVVQPVGKSGRIFNPERVQVNWR

SEQ ID NO: 5547 - protein, 452 aa, synthetic construct
MKAAIYIRVSTQEQVENYSIQAQTEKLTALCRSKDWDVYDIFIDGGYSGSNMNRPALNEMLSKLHEIDAVVVYRLDRLSRSQRDTTTLIEEYFLKNNVEFVSLSETLDTSSPFGRAMIGILSVFAQLERETIRDRMMMGKIKRIEAGLPLTTAKGRTFGYDVIDTKLYINEEEARQLQLIYDIFEEEQSITSLQKRLKKLGFKVRAYNRYNNWLTNDLYCGYVSYKDKVHVKGIHEPIISEEQFYRVQEIFTRMGKNPNMNRDSASLLNNLVVCSKCGLGFVHRRKDTMCRGKKYHYRYYSCKTYKHTHELEKCGNKTWRADKLEELIINRVNNYSFASRDMDKEDELDSLREKLRIEHAKKKRLFDLYINGSYEASELDGMMSDIDAQINYYESQIEANEELKKNKKIQENLADLATVDFDSLEFREKQLYLKSLISKIYIDGEQVTIEWL

SEQ ID NO: 5548 - protein, 452 aa, synthetic construct
MKAAIYIRVSTREQVENYSIQAQTEKLTALCRSKDWDVYDIFTDGGYSGSNMNRPALNEMLSKLHEIDAVVVYRLDRLSRSQRDTITLIEEYFLKNNVEFVSLSETLDTSSPFGRAMIGILSVFAQLERETIRDRMVMGKIKRIEAGLPLTTAKGRTFGYDVIDSKLYINEEEAKQLQLIYDIFEEEQSITFLQKRLKKLGFKVRTYNRYNNWLTNDLYCGYVSYKDKVHVKGIHEPIISEEQFYRVQEIFTRMGKNPNMNRDSASLLNNLVVCSKCGLGFVHRRKDTMSRDKKYHYRYYSCKTYKHIHELEKCGNKIWRADKLEELIINRVNNYSVASRNVDKEDELDSLNEKLKIEHAKKKRLFELYINGSYEVSELDSMMNDIDAQIGYYESQIEANNGLRKNKKIQENLVNLATVDFDSLEFREKQLYLRSLINKIYIDGEQVTIEWL

SEQ ID NO: 5549 - protein, 485 aa, synthetic construct
MTKKVGIYTRVSTTNQAEEGFSIDEQIDRLTKYAEAMGWQVSGTYTDAGFSGAKLERPAMQRLINDIENKAFDTVLVYKLDRLSRSVRDTLYLVKDVFTKNKIDFISLNECIDTSSAMGSLFLTILSAINEFERENIKERMTMGKLGRAKSGKSMMWTKTAFGYHHNRKTGILEIVPLQATIVEQIFTDYLSGISLTKLRDKLNESGHIGKDIPWSYRTLRQTLDNPVYCGYIKFKDSLFEGMHKPIIPYETYLKVQKELKERQQQTYERNNNPRPFQAKYMLSGMARCGYCGAPLKIVLGHKRKDGSRTMKYHCANRFPRKTKGVTVYNDNKKCDSGTYDLSNLENTVIDNLIGFQESNDSLLKVINGNNQPILDTSSFEEQISQIDKKIRKNSDLYLNDFITMDELKDRTDSLQAEKKLLRAKISENEFNDSTDVFELVKTQLGSIPINELSYDNKKKIVNNLVSKVDVTADNVDIIFKFQLA

SEQ ID NO: 5550 - protein, 452 aa, synthetic construct
MKAAIYIRVSTREQVENYSIQAQTEKLTALCRSKGWDVYDTFVDGGYSGSNMNRPALNEMLSKLHEIDAVVVYRLDRLSRSQRDTITLIEEYFLKNNVEFVSLSETLDTSSPFGRAMIGILSVFAQLERETIRDRMVMGKIKRIEAGLPLTTAKGRTFGYDVIDTKLYINEEEAKQLQLIYDIFEEEQSITFLQKRLKKLGFKVRTYNRYNNWLTNDLYCGYVSYKDKVHVKGIHEPIISEEQFYRVQEIFTRMGKNPNMNRDSASLLNNLVVCSKCGLGFVHRRKDAMSRDKKYHYRYYSCKTYKHIHELEKCGNKTWRADKLEELIINRVNNYSLASRNVDKEDELDSLNEKLKIEHAKKKRLFDLYINGRYEVSELDSMMNDIDAQINYYESQIEANEELKKNKQIQENLANLATVDFDSLEFREKQRYLKSLINKIYIDGEQVTIEWK

SEQ ID NO: 5551 - protein, 485 aa, synthetic construct
MTKKVAIYTRVSTTNQAEEGFSIDEQIDRLTKYAEAMGWQVSDTYTDAGFSGTKLERPAMQRLISDIENKAFDTVLVYKLDRLSRSVRDTLYLVKDVFTKNKIDFISLNESIDTSSAMGSLFLTILSAINEFERENIKERMTMGKLGRAKSGKSMMWTKTAFGYYHNRKTGILEIVPLQATIVEQIFTDYLSGISLTKLRDKLNESGHIGKDVPWSYRTLRQTLDNPVYCGYIKFKDSLFEGMHKPIIPYETYLKVQKELEERQQQAYERNNNPRPFQAKYMLSGMARCGYCGAPLKIVLGHKRKDGSRTMKYHCANRFPRKTKGVTVYNDNKKCDSGTYDLSNLENTVIDNLIGFQENNESLLKIINGNNQPIPDTSSFEEQISQIDEKIQKNSDLYLNDFITMDELKDRTVSLQAEKKLLKAKISENKFNDSTDVFELVKTQLGSIPINELSYDNKKKIVNNLVSKVDVTADNVDIIFKFQLA

SEQ ID NO: 5552 - protein, 452 aa, synthetic construct
MKAAIYIRVSTQEQVGNYSIQAQTEKLTALCRSKDWDVYDIFIDGGYSGSNMNRPALNEMLSKLHEIDAVVVYRLDRLSRSQRDTTTLIEEYFLKNNVEFVSLSETLDTSSPFGRAMIGILSVFAQLERETIRDRMVMGKIKRIEAGLPLTTAKGRTFGYDVIDTKLYINEEEAKQLRLIYDIFEEEQSITFLQKRLKKLGFKVRTYNRYNNWLTNDLYCGYVSYKDKVHVKGIHEPIISEEQFYRVQEIFTRMGKNPNMNRDSASLLNNLVVCSKCGLGFVHRSKDTMSRGKKYHYRYYSCKTYKHTHELEKCGNKTWRADKLEELIINRVSNYSFVSRNVDKEDELDSLNEKLKIEHAKKKRLFDLYINGSYEVSELDSMMNVIDAQINYYESQIEANEELRKNKKIQENLADLVTVDFDSLEFREKRLYLKSLINKIYIDGEQVTIEWL

SEQ ID NO: 5553 - protein, 485 aa, synthetic construct
MTKKVAIYTRVSTTNQAEEGFSIDEQIDRLTKYAEAMGWRVSDTYTDAGSSGAKLERPAMQRLINDIENKAFDTVLVYKLDRLSRSVRDTLYLVKDVFTKNKIDFISLNESIDTSSAMGSLFLTILSAINEFERENIKERMTMGKLGRAKSGKSMMWTKTAFGYYHNRKTGILEIVPLQATIVEQIFTDYLSGISLTKLRDKLNESGHIGKDIPWSYRTLRQTLDNPVYCGYIKFKDSLFEGMHKPIIPYETYLKVQKELEERQQQTYERNNNPRPFQAKYMLSGMARCGYCGAPLKIVLGHKRKDGSRTMKYHCANRFPRKTKGATVYNDNKKCDSGTYDLSNLENTVIDNLIGFQENNDSLLKIINGGNQPILDTSSFKKRISQIDKEIQKNSDLYLNDFITMDELKDRTDSLQAEKKLLKAKISENKLNDSTDVFELVKTQLGSIPINELSYDNKKKIVNSLVSKVDVTADNVDIIFKFRLA

SEQ ID NO: 5554 - protein, 485 aa, synthetic construct
MTRKVAIYTRVSTTNQAEEGFSIDEQIDRLTKYAEAMGWQVSDTYTDAGLSGAKLKRPAMQRLINDIENKAFDTVLVYKLDRLSRSVRDTLYLVKDVFTKNKIDFISLNESIDTSSAMGSLFLTILSAINEFERENIKERMTMGKLGRAKSGKSMMWTKTAFGYYHNRKTGILEIVPPQAAIVEQIFTDYLSGISLTKLRDKLNESGHIGKDIPWSYRTLRQTLDNPVYCGYIKFKGSLFEGMHKPIIPYETYLKVQRELEERQQQTYERNNNPRPFQAKYMLSGMARCGYCGAPLRIVLGHKRKDGSRTMKYHCANRFPRKTNGVTVYNDNKKCDSGTYDLSDLENTVIDNLIGFQENNDSLLKIINGNNQPILDTSSLKKQISQIDKKIQKNSDLYLNDFITMDELKDRTDSLQAEKKLLKAKICENKFNDSTDVFELVKTQLGSIPINELSYDNKKKIVNNLVSKVDVTADNVDIIFKFQLA

SEQ ID NO: 5555 - protein, 452 aa, synthetic construct
MKAAIYIRVSTREQVENYSIQAQTEKLTALCRSKDWDVYDIFVDGGYSGSNMNRPALNEMLSKLHEIDAVVVYRLDRLSRSQRDTITLIEEYFLKNNVEFVSLSETLDTSSPFGRAMIGILSVFAQLERETIRDRMVMGKIRRIEAGLPLTTAKGRTFGYDVVDTKLYINEEEAKQLQLIYDIFEEERSITFLQKRLKKLGFKVRTYSRYNSWLTNDLYCGYVSYKDKVHVKGIHEPIISEEQFYRVQEIFTRMGKNPNMNRDSASLLSNLVVCSRCGLGFVHRRKDTTSRGKKYHYRYYSCKTYKHTHELEKCGNKIWRADILEELIINRVNNYSFASRNVDKEGELDSLNEKLKIEHAKKMRLFDLYINGSYEVSELDSMMNDIDAQINYYESQIEANEELKKNKKIQENLANLATVDYDSLEFREKQLYLKSLINKIYIDGEQVTIEWL

SEQ ID NO: 5556 - protein, 485 aa, synthetic construct
MTKKVAIYTRVSTINQAEEGFSIDEQIDRLTKYAGAMGWQVSGTYTDAGLSGAKLERPAMQRLINDIENKAFDTVLVYKLDRLSRSVRDTLYLVKDVFTKNKIDFISLNESIDTSSAMGSLFLTILSAINEFERENIKERMTMGKLGRAKSGKSMMWTKTAFGYYHNRKTGILEIVPLQATIVEQIFTDYLSGISLTKLRDKLNESGHIGKDIPWSNRTLRQILDNPVYCGYIKFKGSLFEGMHKPIIPYETYLKVQKELEERQQQTYERNNNPRPFQAKYMLSGMARCGYCGAPLRIVLGHKRKDGSRTMKYHCANRFPRKTKGVTVYNDNKKCDSGTYDLSNLENTVIDSLIGFQENNDSLLKIINGNNQPILDTSSFKKQISQIDKKIQKNSDLYLNDFITMDELKDRTDSLQAEKKLLKAKISENKFNDSTDVFELVKTQLGSIPINELSYDNKKKIVNNLVSKVDVTADNVDIIFKFQLA

SEQ ID NO: 5557 - protein, 452 aa, synthetic construct
MKAAIYIRVSTQEQVGNYSIQAQTEKLTALCRSKDWDVYDIFIDGGYSGSNMNRPALNEMLSKLHEIDAVVVYRLDRLSRSQRDTTTLIEEYFLKNNVEFVSLSETLDTSSPFGRAMIGILSVFAQLERETIRDRMVMGKIKRIEAGLPLTTAKGRTFGYDVIDTKLYINEEEARQLQLIYDIFEEEQSITFLQKRLKKLGFKVRTYNRYNSWLTNDLYCGYVSYKDKVHVKGIHEPIISEEQFYRVQEIFTRMGKNPNMNRDSASLLSNLVVCSKCGLGFVHRSKDTMSRGKKYHYRYYSCKTYKHTHELEKCGNKTWRADKLEELIINRVNDYSFASRNVDKEDELDSLNEKLKIEHAKKKRLFDLYISGSYEVSELDSMMNDIDVQINYYENQIEANEELKKNKKIQENLADLATVDFDSLEFREKQLYLKSLINKIYIDGEQVTIEWL

SEQ ID NO: 5558 - protein, 485 aa, synthetic construct; identical to SEQ ID NO: 2485

SEQ ID NO: 5559 - protein, 452 aa, synthetic construct
MKAAIYIRVSTQEQVENYSIQAQTEKLTALCRSKDWDVYDIFIDGGYSGSNMNRPALNEMLSRLHEIDAVVVYRLDRLSRSQRDTTTLIEEYFLKNNVEFVSLSETLDTSSPFGRAMIGILSVFAQLERETIRDRMVMGKIKRIEAGLPLTTAKGRTFGYDVIDTKLYINEEEAKQLQLIYDIFEEVQSITSLQKRLKKLGFKVRTYNRYNSWLTNDLYCGYVSYKDKVHVKGIHEPIISEEQFYRVQEIFTRMGKNPNMNRDSASLLNNLVVCSKCGLGFVHRSKDTMCRGKKYHYRYYSCKTYKHTHELEKCGNKTWRADKLEELIINRVNSYSFASRNVDKEDELDSLNEKLKIEHAKKKRLFDLYINGSYEVSELDSMMNDIDAQINHYESQIEANEELNKNKKIQENLADLATVDFDSLEFREKQLYLKSLINKIYIDGEQVTIEWL

SEQ ID NO: 5560 - protein, 485 aa, synthetic construct
MTKKVAIYTRVSTTNQAEEGFSIDEQIDRLTKYAEAMGWQVSDTYTDAGFSGAKLERPAMRRLINDIENKAFDTVLVYKLDRLSRSVRDTLYLVKDVLTKNKIDFISLSESIDTSSAMGSLFLTILSAINEFERENIKERMTMGKLGRAKSGKSMMWTKTAFGYYHNHETGILEIVPLQATIVEQIFTDYLSGISLTKLRDKLNESGHIGKDIPWSYRTLRQTLDNPVYCGYIKFKDSLFEGMHEPIIPYETYLKVQKELEERQRQAYERNNNPRPFQAKYMLSGMARCGYCGAPLRIVLGHKRKDGSRTMKYHCANRFPRKTKGVTVYNDNKKCDSGTYDLSNLENTVIDNLIGFQEDNGSLLKIINGNNQPILDTSSFEKQISQIDKKIQKNSDLYLNDFITMDELKDRTDSLQAEKKLLKAKISENKFNDSTDVFELVKAQLGSIPINKLSYDNKKKIVNNLVSKVDVTADSVDIIFKFQLA

SEQ ID NO: 5561 - protein, 485 aa, synthetic construct
MTKKVAIYTRVSTTNQAEEGFSIDEQIDRLTKYVEAMGWQVSDTYTDAGLSGAKLERPAMQRLINDIENKAFNTVLVYKLDRLSRSVRDTLYLVKDVFTKNKIDFISLNESIDTSSAMGSLFLTILSAINEFERENIKERMTMGKLGRAKSGKSMMWTKTAFGYHHNRKTGILEIVPLQAAIVEQIFTDYLSGISLTKLRDKLNESGHIGKDIPWSYRTLRQTLDNPVYCGYIKFKDSLFEGMHKPIIPYETYLKVQKELEERQQQTYERNNNPRPFQAKYMLSGMARCGYCGAPLRIVLGHKRKDGSRTMKYHCANRFPRKTKGATVYNDNKKCDSGTYDLSNLESAVIDNLIGFQENNDSLLEIINGNNQPILDTSSFKGRISQIDKKIQKNSDLYLNDLITMDELKDRTDSLQAEKKLLKAKISENKFNDSTDVFELVKTQLGSIPINELSYDDKKRIVNNLVSKVDVTADNVDIIFKFQLA

SEQ ID NO: 5562 - protein, 452 aa, synthetic construct
MKAAIYIRVSTREQVENYSIQAQAEKLTALCRSKDWDVYDIFIDGGYSGSNMNRPALNEMLSKLHEIDAVVVYRLDRLSRSQRDTITLIEEYFLKNNVEFVSLSETLDTSSPFGRAMIGILSVFAQLERETIRDRMVMGKIKRIEAGLPLTTAKGRTFGYDVIDTKLYINEEEAKQLQLIYDIFEEEQSITSLQKRLKKLGFKVRTYSRYNNWLTNDLYCGYVSYKDKVHVKGIHEPIISEEQFHRVQEILTRMGKSPNMNRDSASLLNNLVVCSKCGLGFVHRRKDTMSRGKKYHYRYYSCKTYKHIHELEKCGNKIWRADKLEELIINRVNNYSFASRNVDKEDELDSLNEKLKIEHAKKKRLFDLYINGSYEVSELDSMMNDIDAQISYYESQIEANEELKKNKKIQENLANLATVDYDSLEFREKQLYLKSLINKIYIDGEQVTIEWL

SEQ ID NO: 5563 - protein, 452 aa, synthetic construct
MKAAIYIRVSTQEQVGNYSIQAQTEKLTALCRSKGWDVYDIFIDGGYSGSNMNRPALNEMLSKLHEIDAVVVYRLDRLSRSQRDTTTLIEEYFLKNNVEFVSLSETLDTSSPFGRAMIGILSVFAQLERETIRDRMVMGKIKRIEAGLPLTTAKGRTFGYDVIDTKLYINEEEAKQLQLIYDIFEEVQSITSLQKRLKKLGFKVRTYNRYSNWLTNDLYCGYVSYKDKVHVKGIHEPIISEEQFYRVQEIFTRMGKNPNMNRGSASLLNNLVVCSKCGLGFVHRRKDTMCRGKKYHYRYYSCKTYKHTHELEKCGNKTWRADELEELIISRVNNYSFASRSVDKEDELDSLNEKLKTEHAKKKRLFDLYINGSYEVSELDSMMNDIDAQINYYESQIEANEELKENKKIQENLAELATVDFDSLEFREKQLYLKSLINKIYVDGEQVTIEWL

SEQ ID NO: 5564 - protein, 485 aa, synthetic construct
MTKKVAIYTRVSTTNQAEEGFSIDEQIDRLTKYAEAMGWQVSDTYTDAGLSGAKLERPAMQRLINDTENKAFDTVLVYKLDRLSRSVRDTLYLVKDVFTKNKIDFISLNESIDTSSAMGSLFLTILSAINEFERENIKERMTMGKLGRAKSGKSMMWTKTAFGYYHNRKTGILEIVPLQATIVEQIFSDYLSGISLTKLRDKLNESGHIGKDIPWSYRTLRQTLDNPVYCGYIKFKDSLFEGMHKPIIPYETYLKVQKELEERQQQAYERNNNPRPFQAKYMLSGMARCGYCGAPLKIVLGHKRKDGSRTMKYHCANRFPRKTDGITVYNDNKKCDSGTYDLSNLENTVIDNLIGFQENNDSLLKIINGNNQSILDTSSYKEQISQIDKKIQKNSELYLNDFITMDELKARTDSLQAEKKLLKAKISENEFNDCTDVFELVKTQLGSIPINELSYDNKKKIVNNLVSKVDVTADNVDIIFKFQLA

SEQ ID NO: 5565 - protein, 485 aa, synthetic construct; identical to SEQ ID NO: 4790

SEQ ID NO: 5566 - protein, 452 aa, synthetic construct
MKAAIYIRVSTREQVENYSIQAQTEKLTALCRSKDWDVYDIFIDGGYSGSNMNRPALNEMLSRLHEIDAVVVYRLDRLSRSQRDTITLIEEYFLKNNVEFVSLSETLDTSSPFGRAMIGILSVFAQLERETIRDRMVMGKIKRVEAGLPLTTAKGRTFGYDVIDTKLYINEEEAKQLQLIYDIFEEEQSITSLQKRLKKLGFKVRTYSRYNNWLTNDLYCGYVSYKDKVHVKGIHEPIISEEQFYRVQEIFTRMGRNPNMNRGSASLLNNLVVCSKCGLGFVHRRKDTMSRGKKYHYRYYSCKTYKHTHELEKCGNKIWRADKLEELIINRVNNYSFASRNVGKEDELDSLNERLKIEHAKKSRLFDLYINGSYEVSELDSMMNDIDAQINYYESQIEANEELKKSKKIQENLADLATVDYDSLEFREKQLYLKSLINKIYIDGEQVTIEWL

SEQ ID NO: 5567 - protein, 485 aa, synthetic construct
MTKKVAIYTRVSTTNQAEEGFSIDEQIDRLTKYAEAMGWQVSGTYTDAGLSGAKLERPAMQRLINDIENKAFDTVLVYKLDRLSRSVRDTLYLVKDVFTKNKIDFISLNESIDTSGAMGSLFLTILSAINEFERENIKERMTMGKLGRAKSGKSMMWTKTAFGYYHNRKTGILEIVPLQATIVEQIFTDYLSGISLTKLRDRLNESGHIGKDIPWSYRTLRQTLDNPVYCGYIKFKDSLFEGMHKPIIPYETYLKVQKELEERQQQTYERNNNPRPFQAKYMLSGVARCGYCGAPLKIVLGHKRKDGSRTTKYHCANRFPRKTRGVTVYNDNKKCDSGAYDLNNLESTVIDNLIGLQENNDSLLKIINGNNQPILDTSSIEKQISQIDKKIQKNSDLYLNDFITMDELRDRTDSLQAEKKLLKAKISENKFNDSADVFELVKTQLGSIPINELSYDNKKKIVNNLVSKVDVTADNVDIIFKFQQT

SEQ ID NO: 5568 - protein, 485 aa, synthetic construct
MTKKVAIYTRVSTTNQAEEGFSIDEQIDRLTKYAEAMGWQVSDTYTDAGFSGAKLERPAMQRLINDIENKAFDTVLVYKLDRLSRSVRDTLYLVKEVFTKNKIDFISLNESIDTSSAMGSLFLTILSAINEFERENIKERMTMGKLGRAKCGKSMMWTKTAFGYYHNRKTGILEIVPQQATIVEQIFTDYLSGISLTKLRDQLNESGHIGKDIPWSYRTLRQTLDNPVYCGYIKFKDSLFVGMHKPIIPYETYLKVQKELEERQQQTYERNNNPRPFQAKYMLSGMARCGYCGAPLRIVLGRKRKDGSRTMKYHCANRFPRKTKGVTVYNDNKKCDSGAYDLSNLEDTVIDNLIGFQENNDSLLKIINGNNRPILDTSSFEKQISQIDKKIQKNSDLYLNDFITMDELKDRTDSLQAEKRLLKAKISEDKFNDSTDVFELVKTQLGSIPINELSYDNKKKIVNNLVSKVDVTADNVDIIFKFQQA

SEQ ID NO: 5569 - protein, 452 aa, synthetic construct
MKAAIYIRVSTREQVENYSIQAQTEKLTALCRSKDWDVYDIFIDGGYSGSNMNRPALNEMLSKLHEIDAVVVYRLDRLSRSQRDTITLIEEYFLKNNVEFVSLSETLDTSSPFGRAMIGILSVFAQLERETIRDRMVMGKIKRIEAGLPLTTAKGRTFGYDVIDTKLYINEEEAKQLQLIYDIFEEEQSITFLQKRLKKLGFKVHTYSRYNNWLTNDLYCGYVSYKDKVHVKGIHEPIISEEQFYRVQEIFTRMGKNPNMNRDCASLLNNLVVCSRCGLGFVHRRKDTMSRGKRYHYRYYSCKTYKHTHELEKCGNKIWRADKLEELIINRVNNYSFASRNVDKEDELDSLNEKLKIEHAKKKRLFDLYINGSYEVSELDSMMGDIEAQINYYESQIEANEELKKSKKIQENLANLATVDYDSLEFREKQLYLKSLINKIYIDGEQVTIEWL

SEQ ID NO: 5570 - protein, 469 aa, synthetic construct
MSYTTPVRAAMYLRISEDRSGEQLGVARQREDCLKLCDQRKWVPVEYLDNDVSASTGKRRPAYEQMLADITAGKIAAVVAWDLDRLHRRPIELEAFMSLADEKRLALATVAGDVDLATPQGRLVARLRGSVAAHETEHKKARQRRAARQKAERGYPNWSKAFGYLLGPNGPEPDPRTAPLVKQAYADILAGASLGDVCRRWNDAGAFTITGRPWTTTTLSKFLRKPRNAGLRAYKGARYGPVDRDAIVGKAQWSPLVDEATFWAAQAVLDAPGRAPGRKSVRRHLLTGLAGCGKCGNHLAGSYRTNGRVVYVCKACHGVAILADNIEPILYHIVAERLAMPDAVDLLRREIHDAAEAETIRLELETLNGELDRLAVERAEGLLTARQVKISTDIVNAKITKLQARQLDQERLRVLDGIPLGTPQVAGAIAELSPDRFRAVLDVLAEVVVQPVGKSGRVFNPERVQVNWR

SEQ ID NO: 5571 - protein, 452 aa, synthetic construct
MKAAIYIRVSTQEQVENYSIQAQTEKLTALCRSKDWDVYDIFIDGGYSGSNMNRPALNEMLSKLHEIDAVVVYRLDRLSRSQRDTTTLIEEYFLKNNVEFVSLSETLDTSSPFGRAMIGILSVFAQLERETIRDRMVMGKIKRIEAGLPLTTAKGRTFGYDVIDTKLYINEEEAKQLQLIYDIFEEERSITSLQKRLKKLGFKVRTYNRYNNWLTNDLYCGYVSYKDKVHVKGIHEPIISEEQFYRVQEIFTRMGKNPNMNRDSASLLSNLVVCSKCGLGFVHRSKDTMSRGKKYHYRYYSCKTYKHTHELEKCGNKTWRADKLEELIINRVNNYSLASRNVDKEDELDSLNEKLKIEHGKKKRLFDLYINGSYEVSELDSMMNDIDAQINYYESQIEAIEELKKNKKIQENLADLATVDFDSLEFREKQLYLKSLINKIYIDGERVTIEWL

SEQ ID NO: 5572 - protein, 485 aa, synthetic construct
MTKKVAIYTRVSTTNQAEEGFSIDEQIDRLTKYAEAMGWQVSDTYTDAGFSGAKLERPAMQRLINDIENKAFDTVLVYKLDRLSRSVRDTLYLVKDVFTKNKIDFISLNESIDTSSAMGSLFLTILSAINEFERENIKERMTMGKLGRAKSGKSMMWTKTAFGYYHNRKTGILEIVPLQASIVEQIFTDYLSGISLTKLRDKLNESGHIGKDIPWSYRTLRQTLDNPVYCGYIKFKDSLFEGMHKPIIPYETYLKVQRELEERQQQAYERNNNPRPFQAKYMLSGMARCGYCGAPLRIVLGHKRKDGSRTMKYHCANRFPRKTKGVTVYNDNKKCDSGTYDLSSLENTVIDSLIGFQENDDSLLKIINGNNQPILDTSSFKKQVSQIDKKIQKNSDLYLNDLITMDELKGRTDSLQAEKKLLKAKISENKFNDSTDVFELVKTQLGSIPINELSYDNKKKIVNNLVSKVDVTAGNVDIIFKFQLA

SEQ ID NO: 5573 - protein, 452 aa, synthetic construct
MKAAIYIRVSTQEQVENYSIQAQTEKLTALCRSKDWDVYDIFIDGGYSGSNMNRPALNEMLSKLHEIDAVVVYRLDRLSRSQRDTITLVEEYFLKNNVEFVSLSETLDTSSPFGRAMIGILSVFAQLERETIRDRMVMGKIKRIEAGLPLTTAKGRTFGYDVIDTKLYINEEEAKHLQLIYDIFEEEQSITFLQKRLKKLGFKVRTYNRYNNWLTNDLYCGYVSYKDKVHVKGIHEPIISEEQFYRVQEIFTRMGKNPNMNRDSASLLNNLVVCSKCGLGFVHRRKDTTSRGKKYHYRYYSCKTYKHTHELEKCGNKIWRADKLEELIINRVNNYSFASRNVDKAEELDSLNEKLKVEHAEKKRLLDLYINGSYNVSELVRMMNDIDAQINYYVSQIEAYEELKKNKKIQENLAGLATVDFDSLEFREKQLYLKSLISKIYIDGEQVTIEWL

SEQ ID NO: 5574 - protein, 452 aa, synthetic construct
MKAAIYIRVSTQEQVGNYSIQAQTEKLTALCRSKGWDVYDIFIDGGYSGSNMNRPALNEMLSKLHEIDAVVVYRLDRLSRSQRDTTTLIEEYFLKNNVEFVSLSETLDTSSPFGRAMIGILSVFAQLERETIRDRMVMGKIKRIEAGLPLTTAKGRTFGYDVIDTKLYINEEEAKQLQLIYDIFEEEQSITFLQKRLKKLGFKVRTYNRYNSWLTNDLYCGYVSYKDKVHVKGIHEPIISEEQFYRVQEIFTRMGKNPNMNRDCASLLNNLVVCSKCGLGFVHRSKDTMSRGKKYHYRYYSCKTYKHTHELEKCGNKTWRADKLEELIINRVNNYSLASRNVDKEDELDGLNEKLKIEYAKKKRLFDLYINGSYEVSELDSTMNDIDAQIDYYEGQIEAIEELKKNKKIQENLADLATVDFDSLEFREKQLYLKGLINKIYIDGEQVTIEWL

SEQ ID NO: 5575 - protein, 452 aa, synthetic construct
MKAAIYIRVSTREQVENYSIQAQTEKLTALCRSKDWDVYDIFIDGGYSGSNMNRPALNEMLSKLHEIDAVVVYRLDRLSRSQRDTITLIEEYFLKNNVEFVSLSETLDTSSPFGRAMIGILSVFAQLERETIRDRMVMGKIKRIEAGLPLTTAKGRTFGYDVIDTKLYINEEEAKQLQLIYDIFEEEQSITFLQKRLKKLGYKVHTYNRYSNWLTNDLYCGYVSYKDKVHVKGIHEPIISEEQFYRVQEIFARMGKNPNMNRDSASLLSNLVVCSKCGLGFVHRRKDTTSRGKKYHYRYYSCKTYKHTHELEKCGNKIWRADKLEELVINRVNNYSFANRNADKEDELDSLNEKLKIEHAKKKRLFDLYINGSYNVSELDSMMSDIGAQINYYESQIGANEELKKHKKIQENLADLATVDFDSLGFREKQLYLKSLINKIYIDGEQVTIEWL

SEQ ID NO: 5576 - protein, 452 aa, synthetic construct
MKAAIYIRVSTREQVENYSIQAQTEKLTALCRSKDWDVYDIFIDGGYSGSNMNRPALNEMLSKLHEIDAVVVYRLDRLSRSQRDTITLIEEYFLKNNVEFVSLSETLDTSSPFGRAMIGILSVFAQLERETIRERMVMGKIKRIEAGLPLTTAKGRTFGYDVIDAKLYINEEEAKQLRLIYDIFEEERSITFLQKRLKKLGFKVRTYSCYNNWLTNDLYCGYVSYKDKVHVKGIHEPIISEEQFYRVQEIFTRMGRNPNMNRDSASLLSNLVVCSKCGLGFVHRRKDTMSRGKKYHYRYYSCKTYKHTHELEKCGNKIWRADKLEELIINRVNNYSCASRNVDKEDELDSLNEQLKIEHAKKKRLFDLYINGSYEVSELVSMMNDIGAQISYYESQIEANEELKKNKKIQESLANLATVDYDSLEFREKQLYLKSLINKIYIDGEQVTIEWL

SEQ ID NO: 5577 - protein, 452 aa, synthetic construct
MKAAIYIRVSTREQVENYSIQAQTEKLTALCRSKDWDVYDVFIDGGYSGSNMNRPALNEMLSKLHEIDAVVVYRLDRLSRSQRDTITLIEEYFLKNNVEFVSLSETLDTSSPFGRAMIGILSVFAQLERETIRDRMVMGKIKRIEAGLPLTTAKGRTFGYDVIDTKLYINEEEAKQLQLIYDIFEEELSITFLQKRLKKLGFKVRSYNRYSNWLTNDLYCGYVSYKDKVHVKGIHEPIISEEQFYRVQEIFTRMGKSPNMNRGSASLLNNLVVCSKCGLGFVHRRKDAMSRDKKYHYRYYSCKTYKHIHELEKCGNKIWRADELEELIINRVNSYSLASRNVDKEDELDSLNEKLKIEHAKKKRLFDLYINGSYEVSELDSMMSDIDAQINYYESQIEANEELKKNKKIQETLADLATVDFDSLEFREKQLYLKSLINKIYVDGEQVTIEWL

SEQ ID NO: 5578 - protein, 485 aa, synthetic construct
MTRKVAIYTRVSTTNQAEEGFSIDEQIDRLTKYAEAMGWQVSDTYTDAGISGAKLERPAMQRLINDIENKAFDTVLVYKLDRLSRSVRDTLYLVKEVLAKNKIDFISLNESIDTSSAMGSLFLTILSAINEFERENIKERMTMGKLGRAKSGKSMMWTKTAFGYYHNRKTGILEIVPLQATIVEQIFADYLSGISLTKLRDKLNESGHIGKDIPWSYRTLRQTLDNPVYCGYIKFKDSLFEGMHKPIIPYETYLKVQKELEERQQQTYERNNNPRPFQAKYMLSGMARCGYCGAPLRIVLGHKRKDGIRTMKYHCANRFPRKTKGVTVYNDNKKCDSGTYDLSNLENIVIDNLIGLQENNDSLLKIINGNNQPILDTNSFKKQISQIDKKIQKNSDLYLNDLITMDELKDRTNSLQAEKKLLQAKISENKFNDSTDVFELVKTQLGSIPINELSYDDKKKIVNNLVSKVDVTADNVDIIFKFQLA

SEQ ID NO: 5579 - protein, 452 aa, synthetic construct
MKAAIYIRVSTREQVENYSIQAQSEKLTALCRSKDWDVYDIFIDGGYSGSNMNRPALNEMLSKLHEIDAVVVYRLDRLSRSQRDTITLIEEYFLKNNVEFVSLSETLDTSSPFGRAMIGILSVFAQLERETIRDRMVMGKIKRIEAGLPLTTAKGRTFGYDVIDTKLYINEEEAKQLQLIYDIFEEEQSITSLQKRLKKLGFKVRTYSRYNSWLTNDLYCGYVSYKDKVHVKGIHEPIISEEQFYRVQEIFTRVGKNPNMNRDSASLLSNLVVCSKCGLGFVHRRKDTSSRGKKYHYRYYSCKTYKHTHELEKCGNKIWRADKLEELIINRVNNYSFASRNVDKEDELDSLNEKLKIEHAKKKRLFDLYINGSYEVSELDSTMSDIDAQINYYESQIEANEGLKRNKKIQENLANLATVDYDSLEFREKQLYLKSLINKIYIDGEQVTIEWL

SEQ ID NO: 5580 - protein, 469 aa, synthetic construct
MCYTTPVRAAVYLRISEDRSGEQLGVARQREDCLKLCGQREWVPVEYLDNDVSASTGKRRPAYEQMLADITAGKIAAVVAWDLDRLHRRPIELEAFMSLADEKRLALATVAGDVDLATPQGRLVARLKGCVAAHETEHKKARQRRAARQKAERGLPNWSKAFGYLPGPNGPEPDPRTAPLVKQAYADILAGASLGDVCRQWNDAGAFTITGRPWSTTTLSKFLRKPRNAGLRAYKGARYGPVDRDAIVGKAQWSPLVDEATFWAAQAVLDAPGRAPGRKSVRRHLLTGLAVCGKCGNHLAGSYRTDGRVVYVCKACHGVAILADSIEPILYHIVAERLAMPDAVDLLRREIHDAAEAETIRLELETLYGELDRLAVERAEGLLTARQVKISTDIVNAKITKLQARQLDQERLRVFEGIPLGTPQVAGIIAGLSPDRFRAVLDVLAEVVVQPVGKSGSIFNPERVQVNWR

SEQ ID NO: 5581 - protein, 452 aa, synthetic construct
MKAAIYIRVSTREQVENYSIQAQTEKLTALCRSKDWDVYDIFIDGGYSGSNMNRPALNEMLSKLHEIDAVVVYRLDRLSRSQRDTITLIEEYFLKNNVEFVSLSETLDTSSPFGRAMIGILSVFAQLERETIRDRMVMGKIKRIEAGLPLTTAKGRTFGYDVIDTKLYINEEEAKQLQLIYDIFEEEQSITFLQKRLKKLGFKVRTYSCYNNWLTNDLYCGYVSYKDKVHVKGIHEPIISEEQFYRVQEIFTRMGKNPNMNRDSASLLNNLVVCSKCGLGFVHRRKDTMSRGKKYHYRYYSCKTYKHTHELEKCGNKIWRADKLEELIISRVNNYSFASRNVDKEDELDGLNEKLKIEHAKKKRLFDLYINGSYAVSELDSMMNDIDAQINYYESQIEANEELKKNKKIQENLADLATVDYDSLEFREKQLYLKSLINKIYIDGEQVTIEWL

SEQ ID NO: 5582 - protein, 452 aa, synthetic construct
MKAAIYIRVSTQEQVGNYSIQAQTEKLTALCRSKDWDVYDIFIDGGYSGSNMNRPALNEMLSKLHEIDAVVVYRLDRLSRSQRDTTTLIEEYFLKNNVEFVSLSETLDTSSPFGRAMIGILSVFAQLERETIRDRMVMGKIKRVEAGLPLTTAKGRTFGYDVINTKLYINEEEAKHLQLIYDIFEEEQSITSLQKRLKKLGFKVRTYNRYNNWLTNDLYCGYVSYKDKVHVKGIHEPIISEDQFYRVQEIFTRMGRNPNMNRGSASLLNNLVVCGKCGLGFVHRSKDTMSRGKKYHYRYYSCKTYKHTHELEKCGNKTWRADKLEELIISRVNNYSFASRSVDKEDELDSLNEKLKIERAKKKRLFDLYINGSYEVSELDSMMNDIDAQINYYESQIEANEELKKNKRIQESLADLAAVDFGSLEFREKRLYLKSLINKIYIDGEQVTIEWL

SEQ ID NO: 5583 - protein, 469 aa, synthetic construct
MSYTTPVRAAVYLRISEDRSGEQLGVARQREDCLKLCDQRKWVPVEYLDNDVSASTGKRRPAYEQMLADITAGKIAAVVAWDLDRLHRRPIELEAFMRLADEKRLALATVAGDVDLATPQGRLVARLKGSVAAHETEHKKARQRRAARQKAERGYPNWSKAFGYLPGLNGPEPDPRTAPLVKQAYADILAGASLGDVCRQWNDAGAFTITGRPWTTTTLSKFLRKPRNAGLRAYKGARYGPVDRDAIVGKAQWSPLVDGATFWAAQAVLDAPGRAPGRKSVRRHLLTGLAGCGKCGNHLAGSYRTDGRVVYVCKTCHGVAILADNIEPILYHIVAERLAMPDAVDLLRREILDAAEAETIRLELETLYGELDRLAVERAEGLLTARQVKISTDIVNAKITKLQARQLDQERLRVFDGIPLGTPRVAGMIAELSPNRFRAVLDVLAEVVVQPVGKSGRIFNPERVQVNWR

SEQ ID NO: 5584 - protein, 469 aa, synthetic construct
MYYTTPMRAAMYLRISEDRSGEQLGVARQREDCLKLCAQRKWVPVEYLDNDVSASTGKRRPAYEQMLADITAGKIAAVVAWDLDRLHRRPVELEAFMSLADEKRLALATVAGDVDLATPQGRLVARLKGCVAAHETEHKKARQRRAARQKAERGHPNWSKAFGYLPGPNGPEPDPRTAPLVKQAYADILAGASLGDVCRRWNDADAFTITGRPWTTTTLSKFLRKPRNAGLRAYKGARYGPVDRDAIVGKALWSPLVDEATFWAAQAVLDAPGRAPGRKSVRRHLLTGLAGCGKCGSHLAGSYRTDGQIVYVCKACHGVSILAVNIEPILYHIVAERLAMPDAVDLLRREIHDAAEAETIRLELGTLYGELDCLAVERAEGLLTARQVKISTDIVNAKIAKLQARQLDQERLRVFDGIPLGTPQVAGMIAELSPDRFRAVLDVLAEVVVQPVGKSGRIFNPERVQVNWR

SEQ ID NO: 5585 - protein, 452 aa, synthetic construct
MKAAIYIRVSTREQVENYSIQAQTEKLTALCRSKDWDVYDIFIDGGYSGSNMNRPALNEMLSKLHEIDAVVVYRLDRLSRSQRDTITLIEEYFLKNNVEFVSLSETLDTSSPFGRAMIGILSVFAQLERETIRDRMVMGKIKRIEAGLPLTTAKGRTFGYDVIDTKLYINEEEAKQLQLIYDIFEEEQSITFLQKRLKELGFKVRTYSRYNNWLTNDLYCGYVSYKDKVHVKGVHEPIISEEQFYRVQEIFARMGKYPNMNRDSASLLNNLVVCSKCGLSFVHRRKDTMSRGKKYHYRYYSCKTYKHIHELEKCGNKIWRADKLEELIINRVNNYSFASRNVDKEDELDSLNEKLKIEHAKKKRLFDLYINGSYDVSELDSMMNDIDAQINYYESQIEANEELKKNKKIQENLANLATVDYDSLEFREKQLYLKSLINKIYIDGEQVTIEWL

SEQ ID NO: 5586 - protein, 469 aa, synthetic construct
MCYTTPVHAAVYLRISEDRSGEQLGVARQREDCLKLCDQRKWVPVEYLDNDVSASTGKRRPAYEQMLADITAGKIVAVVAWDLDRLHRRPIELEAFMSLADEKRLALATVAGDVDLATPQGRLVARLKGSVAAHETEHKKARQRRAARQKAERGHPNWSKAFGYLPGPNGPEPDPRTAPLVKQAYADILAGASLGDVCRQWNDAGAFTITGRPWTTTTLSKFLRKPRNAGLRAYKGARYGPVDRDAIVGKAQWSPLVDEATFWAAQAVLDAPGRAPGRKSVRRHLLTGLAGCGKCGNHLAGSYRTDGKVVYVCKACHGVAILADNIEPILYHIVAERLAMPDAVDLLRREIHDAAEAETIRLGLETLYGELDRLAVERAEGLLTARQVKISTDIVNAKITKLQARQLDQERLRVFDGIPLGTPRVAGMIAELSPDRFRAVLDVLAEVVVQPVGKGGRTFNPERVQVNWR

SEQ ID NO: 5587 - protein, 452 aa, synthetic construct
MKAAIYIRVSTQEQVGNYSIQAQTEKLTALCRSKDWDVYDIFIDGGYSGSNMNRPALNEMLSKLHEIDAVVVYRLDRLSRSQRDTTTLIEEYFLKNNVEFVSLSETLDTSSPFGRAMIGILSVFAQLERETIRDRMVMGKIKRIEAGLPLTTAKGRTFGYDVIDTKLYINEEEAKQLRLIYDIFEEEQSITFLQKRLKKLGFKVRTYSRYYNWLTNDLYCGYVSYKDKVHVKGIHEPIISEEQFYRVQEIFTRMGKNPNMNRDSASLLSNLVVCSKCGLGFVHRSKDTMSRGKKYHYRYYSCKTYKHTHELEKCGNKTWRADKLEELIINRVNNHSFAGRNVDKEDELDSLNEKLKTERAKKKRLFDLYINGSYEVSELDSMMNDIDAQINYYESQIEANEELRKNGKIQENLANLATVDFDSLEFREKQLYLKSLINKIYIDGEQVTIEWL

SEQ ID NO: 5588 - protein, 469 aa, synthetic construct
MSYTTPVRAAVYLRISEDRSGEQLGVARQREDCLKLCDQRKWVPVEYLDNDVSASTGKRRPAYEQMLADITAGKIAAVVAWDLDRLHRRPIELEAFMSLADEKRLALATVAGDVDLATPQGRLVARLKGSVAAHETEHKKARQRRAARQKAERGYPNWSKAFGYLPGPNGPEPDPRTAPLVKQAYADILAGASLGDVCRQWNGAGAFTITGRPWTTTALSKFLRKPRNAGLRAYKGARYGPVDRDAIVGNAQWSPLVDEATFWAAQAVLDAPGRAPGRKSVRRHLLTGLAGCGKCGNHLAGSYRTDGRVVYVCKACHGVAILADNIEPILYHIVAERLAMPDAVDLLRREIHDAAEAETIRLELETLYGELDRLAVERAEGLLTARQVKISTDIVNAKITKLQARQLDQERLRVLDGIPLGTPQVAGMIAELSPDRFRAVLDVLAEVVVQPVGKSGRIFNPERVQVNWR

SEQ ID NO: 5589 - protein, 452 aa, synthetic construct
MKAAIYIRVSTQEQVGNYSIQAQTEKLTALCRSKDWDVYDIFIDGGYSGSNMNRPALNEMLSKLHEIDAVVVYRLDRLSRSQRDTTTLIEEYFLKNNVEFVSLSETLDTSSPFGRAMIGILSVFAQLERETIRDRMVMGKIKRIEAGLPLTTAKGRTFGYDVIDTKLYINEEEAKQLQLIYDIFEEEQSITSLQKRLKKLGFKVRTYNRYNSWLTNDLYCGYVSYKDKVHVKGIHEPIISEEQFYRVQEIFTRMGKNPNMNRDSASLLNNLVVCSKCGLGFVHRSKDTMCRGKKYHYRYYSCKTYKHTHELEKCGNKTWRADKLEELIINRVNNYSFASRNVDKEDELDSLNEKLKIEHAKKRRLFDLYINGSYEVSELDSMMNDIDAQINYYESRIEANEELKENKKVQESLAELATVDFDSLEFREKQLYLKSLINKIYIDGEQVTIEWL

SEQ ID NO: 5590 - protein, 452 aa, synthetic construct
MKAAIYIRVSTQEQVGNYSIQAQTEKLTALCRSKDWDVYDIFVDGGYSGSNMNRPALNEMLSKLHEIDAVVVYRLDRLSRSQRDTTTLIEEYFLKNNVEFVSLSETLDTSSPFGRAMIGILSVFAQLERETIRDRMVMGKIKRIEAGLPLTTAKGRTFGYDVIDTKLYINEEEAKQLRLIYDIFEEEQSITSLQKRLKKLGFKVRTYNRYNNWLTNDLYCGYVSYKDKVHVKGIHEPIISEEQFYRVQEIFTRMGKNPNMNRDSASLLSNLVVCSKCGLGFVHRSKDTMSRGKKYHYRYYSCKTYKHTHELEKCGNKTWRADKLEELIINRVTNYSFASRNADKEDELDSLNEKLKIEHARKKRLFDLYINGSYEVSELDSMMNNIDAQINYYESQIEASEELKKNKKIQENLADLATVDFDSLEFREKQLYLKSLINKIYIDGEQVTIEWL

SEQ ID NO: 5591 - protein, 469 aa, synthetic construct
MSYTTPVRAAVYLRISEDRSGEQLGVARQREDCLKLCDQRKWVPVEYLDNDVSASTGKRRPAYEQMLADITAGKIAAVVAWDLDRLHRRPMELEAFMSLADEKRLALATVAGDVDLATPQGRLVARLKGSVAAHETEHKKARQRRAARQKAERGYPNWSKAFGYLPGPNGPEPDPRTAPLVRQAYADILAGASLGDVCRQWNDAGAFTITGRPWTATALSKFLRKPRNAGLRAYKGARYGPVDRDAIVGKAQWSPLVDEATFWAAQAVLDAPGRAPGRKSVRRHLLTGLAGCGKCGNHLAGSYRTDGRVVYVCKACHGVAILADNIEPILYHIVAERLATPGAVDLLRREIRDATEAETIRLELETLYGELDRLAVERAEGLLTARQVKISTDIVNAKIAKLQARQLDQERLHVFDGIPLGTPRVAGMIAELSPDRFRAVLDVLAEVIVQPVGKSGRIFNPERVQVNWR

SEQ ID NO: 5592 - protein, 485 aa, synthetic construct
MTKKVAIYTRVSTTNQAEEGFSIDEQIDRLTKYAEAMGWQVSDTYTDAGFSGAKLERPAMQRLINDIENRAFDTVLVYKLDRLSRSVRDTLYLVKDVFTKNKIDFVSLNESINTSSAMGSLFLTILSAINEFERENIKERMTMGKLGRAKSGKSMMWTKTAFGYYHNRKTGILEIVPLQATIVEQIFTDYLSGISLTKLRDKLNESGHIGKDIPWSYRTLRQTLGNPVYCGYIKFKDSLFEGLHKPIIPYETYLKVQKELEERQQQTYERNNNPRPFQAKYMLSGMARCGYCGAPLKIVLGHERKDGSRTMKYHCANRFPRKTKGVTVYNDNKKCDSGAYDLCNLENTVIDNLIGFQENNDSLLKIINGNNQPILDTSSFEKQISQIDKKIQRNSDLYLNDFITMDELKGRTDSLQAEKKLLKAKISENKFNDSTDVIELVKTQLGSIPINELSYDDKKKIVNNLVSKVDVTADNVDIIFKFQLA

SEQ ID NO: 5593 - protein, 469 aa, synthetic construct
MSYTTPVRAAVYLRISEDRSGEQLGVARQREDCLKLCDQRKWVPVEYLDNDVSASTGKRRPAYEQMLADITAGKIAAVVAWDLDRLHRRPIELEAFMSLADEKRLALATVAGDVDLATPQGRLVARLKGSVAAHETEHKKARQRRAARQKAERGYPNWSRAFGYLPGPNGPEPDPRTAPLVKQAYADILAGASLGDVCRQWNTAGAFTITGRPWTTTTLSKFLRKPRNAGLRAYKGARYGPVDRDAIVGKAQWSPLVDEATFWAAQAVLDAPGRAPGRKSVRRHLLTGLAGCGKCGNHLAGSYRTDGRVVYVCKACHGVVILADNIEPILYHIVADRLAMPDAVDLLRREVHDTAEAETIRLELETLHGELDRLAVERAEGLLTARQVKISTDIVNAKITKLQARQLDQERLRVFDGIPLGTPQVAGVIAELGPNRFRAVLDVLAEVVVRPVGKSGRIFNPERVQVNWR

SEQ ID NO: 5594 - protein, 469 aa, synthetic construct
MSYTTPVRAAVYLRISEDRSGEQLGVARQREDCLKLCDQRKWVPVEYLDNDVSASTGKRRPAYEQMLADITAGRIAAVVAWDLDRLHRRPIELEAFMCLADEKRLALATVAGDVDLATPQGRLVARLKGSVAAHETEHKKARQRRAARQKAERGYPNWSKAFGYLPGPNGPEPDPRTAPLVKQAYADILAGASLGDVCRQWNDAGAFTITGRPWTITTLSKFLRKPRNAGLRTYKGARYGPVDRDAIVGKAQWSPLVDEATFWAAQAVLDAPGRAPGRKSVRRHLLTGLAGCGKCGNHLAGSYRTDGRVVYVCKTCHGVAILADNIEPILYHIVAERLAMPDAVDLLRREIHDAAEAEAIHLELETLYGELDRLAVERAEGLLTARQVKICTDIVNAKITKLQAHQQDQERLRVLDGIPLGTPQVAGVIAELSPNRFRAVLDVLAEVVVQPVGKSGRIFNPERVQVNWR

SEQ ID NO: 5595 - protein, 485 aa, synthetic construct
MTKKVAIYTRVSTTNQAEEGFSIDEQIDRLTKYAEAMGWQVSDTYTDAGSSGAKLERPAMQRLINDIENKAFDTVLVYKLDRLSRSVRDTLYLVKDVFTKNKIDFISLNESIDTSSAMGSLFLTILSAINEFERENIKERMTMGKLGRAKSGKSMMWTKTAFGYYHNRETGILEIVPLQATIVEQIFTDYLSGISLTKLRDKLNESGHIGKDIPWSYRTLRQTLDNPVYCGYIKFKDSLFEGMHKPIIPYETYLKVQKELEERQQQTYERNNNPRPFQAKYMLSGMARCGYCGAPLRIVLGHKRKDGSRTMKYHCANRFPRKTKGVTVYNDNKKCDSGTYDLSNLENTVIDSLIGFQENDDSLLKIINGNNQPILDTSSFKKQISQIDKKIQKNSDLYLNDFITMDELKDRTDSLQAEKKLLKAKISENKFNDSADVFELVKTQLGSVPINELSYDNKKKIVNNLVGKVDVTADNVDIIFKFQLA

SEQ ID NO: 5596 - protein, 485 aa, synthetic construct
MTKKVAIYTRVSTINQAEEGFSIDEQVDRLTKYAEAMGWQVSDTYTDAGFSGAKLERPAMQRLINDIENGAFDTVLVYKLDRLSRSVRDTLYLVKEAFTKNKIDFISLSESIDTSSAMGSLFLTILSAINEFERENIKERMTMGKLGRAKSGKSMMWTKTAFGYYHNRKTGILEIVPLQAAIVEQIFTDYLSGISLTKLRDKLNESGHIGKDTPWSYRTLRQTLDNPVYCGYIKFKGSLFEGMHKPIIPYETYLEVQRELEERQQQTYERNNNPRPFQAKYMLSGMARCGYCGAPLRIVLGHKRKDGSRTMKYHCANRFPRKTKGVTVYNDNRKCDSGTYDLSDLENTVIDNLIGFQENNDSLLKTINGNNQPILDTSNFKEQISQIDKKIQKNSDLYLNDFITMDELKDRTDSLQAEKKLLKAKISENKFNDGADVFELVKTQLGSIPINELSYDNKKKIVNNLVSRVDVTADNVDIIFKFQLA

SEQ ID NO: 5597 - protein, 452 aa, synthetic construct
MKAAIYIRVSTQEQVENYSIQAQTEKLTALCRSKDWDVYDIFIDGGYSGSNMNRPALNEMLSKLHEIDAVVVYRLDRLSRSQRDTTTLIEEYFLKNNVEFVSLSETLDTSSPFGRAMIGILSVFAQLERETIRDRMVMGKIKRIEAGLPLTTAKGRTFGYDVIDTKLYINEEEAKQLRLIYDIFEEEQSITFLQKRLKKLGFKVRTYNRYSSWLTNDLYCGYVSYKDKVHVKGIHEPIISEEQFYRVQEIFTRMGKSPNMNRDSASLLNNLVVCSKCGLGFVHRCKDTTSRGKKYHYRYYSCKTYKHTHELEKCGNKTWRADKLEELIINRVNNYSFASRNVDKEDELDSLNEKLEIEHAKKRRLFDLYINGSYEVSELDSMMNDIDAQINYYESQIEANGELKKNKKIQENLADLATVDYDSLEFREKQLYLKSLINKIYIDGEQVTIEWL

SEQ ID NO: 5598 - protein, 469 aa, synthetic construct
MSYTTPVRAAVYLRISEDRSGEQLGVARQREDCLNLCDQRKWVPVEYLDNDVSASTGKRRPAYEQMLADITAGKIAAVVAWDLDRLHRRPIELEAFMSLADEKRLALATVAGDVDLATPQGRLVARLKGSVAAHETEHKKARQRRAARQKAERGHPNWSKAFGYLPGPNGPEPDPRTAPLVKRAYADILAGASLGDVCRQWNDAGAFTITGRPWTTTTLSKFLRKPRNAGLRAYKGARYGPVDRDAIVGKAQWSPLVDEATFWAAQAVLDAPGRAPGRKSVRRHLLTGLAGCGKCGYHLAGSHRTDGRVVYVCKACHGVAILADNIEPILYHIVAERLAMPGAVDLLRREIHDAAEAEAFRLELETLYGELDRLAVERAEGLLTARQVKISTDIVSAKIAKLQARQLDQERLRVFDGIPLGTPQVAGMIAELSPNRFRAVLDVLAEVVVQPVGKSGRIFNPERVQVTWR

SEQ ID NO: 5599 - protein, 452 aa, synthetic construct
MKAAIYIRVSTREQVENYSIQAQTEKLTALCRSKDWDVYDIFIDGGYSGSNMNRPALNEMLSKLHEIDAVVVYRLDRLSRSQRDTVTLIEEYFLKNNVEFVSLSETLDTSSPFGRAMIGILSVFAQLERETIRDRMVMGKIKRIEAGLSLTTAKGRTFGYDVIDTKLYINEEEAKQLQLIYDIFEEEQSITFLQKRLKELGFKVRTYNRYNNWLTNDLYCGYVSYKDKVHVKGIHEPIISEEQFYRVQEIFTRMGKNPNMNRDSASLLNNLVVCSKCGLGFVHRRKDAMSRDKKYHYRYYSCKTYKHIHELEKCGNKIWRADKLEELIINRVNNYSLASRNTGKEDELDSLNEKLKIEHAKKKRLFDLYISGSYEASELDGMMNDIDAQINYYESQIEANEELKKNKKIQDNLAHLATVDFDSLEFREKQLYLKSLINKIYIDGEQVTIEWL

SEQ ID NO: 5600 - protein, 452 aa, synthetic construct; identical to SEQ ID NO: 489

SEQ ID NO: 5601 - protein, 452 aa, synthetic construct
MKAAIYIRVSTREQVENYSIQAQTEKLTALCRSKDWDVYDIFIDGGYSGSNMNRPALNEMLSKLHEIDAVAVYRLDRLSRSQRDTITLIEEYFLKNNVEFVSLSETLDTSSPFGRAMIGILSVFAQLERETIRDRMVMGKIKRVEAGLPLTTAKGRTFGYNVIDTKLYINEEEAKQLRLIYDIFEEERSIAFLQKRLKKLGFKVHTYNRYNNWLTNDLYCGYVSYKDKVHVKGIHEPIISEEQFYRVQEIFTRMGKNPNMNRDSASLLNNLVVCSKCGLGFVHRRKDTMSRGKKYHYRYYSCKTYKHTHELEKCGNKIWRADKLEELIINRVNNYSFASRNADKEDELDSLNEKLKIEHTKKKRLFDLYINGSYEVGELDSMMSDIDAQINYYESQIEASEELKRTKKIQGSLADLASVDYDSLEFREKQLYLKSLINKIYIDGELVTIEWL

SEQ ID NO: 5602 - protein, 485 aa, synthetic construct
MTKKVAIYTRVSTANQAEEGFSIDEQTDRLTKYAEAMGWQVSDTYTDAGFSGAKLERPAMQRLINDIENKAFDTVLVYKLDRLSRSVRDTLYLVKDVFTKNKIDFISLNECIDTSSAMGSLFLTILSAINEFERENIKERMTMGKLGRAKSGKSMMWTKTAFGYYHNRKTGILEIVPLQATIVEQIFTDYLSGISLTKLRDKLNESGHIGKDIPWSYRTLRQTLDNPVYCGYIKFKGSLFEGMHKPIIPYETYLKVQKELEERQQQTYERNNNPRPFQAKYMLSGIARCGYCGAPLRIVLGHKRKDGSRTMKYHCANRFPRKTKGVTVYNDNKKCDSGTYDLSNLENTVIDNLIGFQENNDSLLKIINGNNQPILDTSSFKKQISQIDKKIQKNSDLYLNDFITMDELKDRTDSLQAEKKLLKAKISENKFSGSTDVFELVKTQLGSIPINELSYDNKKKIVNNLVSKVDVTADNVDIIFKFQLA

SEQ ID NO: 5603 - protein, 452 aa, synthetic construct
MKAAIYIRVSTQEQVENYSIQAQTEKLTALCRSKGWDVYDIFIDGGYSGSNMNRPALNEMLSKLHEIDAVVVYRLDRLSRSQRDTATLIEEYFLKNNVEFVSLSETLDTSSPFGRAMIGILGVFAQLERETIRDRMMMGKIKRIEAGLPLTTAKGRTFGYDVIDTKLYINEEEARQLQLIYDIFEEEQSITSLQKRLKKLGFKVRTYNRYSNWLTNDLYCGYVSYKDKVHVKGIHEPIISEEQFYRVQEIFTRMGKNPNMNRDSASLLNNLVVCGKCGLGFVHRRKDTMSRGKKYHYRYYSCKTYKHTHELEKCGNKTWRADKLEELIINRVNNYSFASRNADKEDELDSLYEKLKIEHARKKRLFDLYINGSYEVSELDSMMSDIDAQVNYYESQIEENEGLKKNKKIQEDLADLATVDFDSLEFREKQQYLKSLINKIYIDGEQVTIEWL

SEQ ID NO: 5604 - protein, 452 aa, synthetic construct
MKAAIYIRVSTREQVENYSIQAQTEKLTALCRSKDWDVYDIFIDGGYSGSNMNRPALNEMLSKLHEIDAVVVYRLDRLSRSQRDTITLIEEYFLKNNVEFVSLSETLDTSSPFGRAMIGILSVFAQLERETIRDRMVMGKIKRIEAGLPLTTAKGRTFGYDVIDTKLYINEEEAKQLRLIYDIFEEEQSITFLQKRLKKLGFKVRTYNRYNSWLTNDLYCGYVSYKDKVRVKGIHEPIISEEQFYRVQEIFTRMGKNPNMNRGSASLLNNLVVCGKCGLGFVHRRKDAMSRDKKYHYRYYSCKTYKHIHELERCGNKIWRADELEELIINRVNNYSLASRNVDKEDELDSLNEKLKIEHAKKKRLFDLYINGSYEMSELDSMMNDIDTQINYYESQIEANEELKKNKKIQENLADLATVDFDRLEFREKQLYLKSLINKIYVDGEQVTIEWL

SEQ ID NO: 5605 - protein, 452 aa, synthetic construct
MKAAIYIRVSTQEQVGNYSIQAQTEKLTALCRSKDWDVYDIFIDGGYSGSNMNRPALNEMLSKLHEIDAVVVYRLDRLSRSQRDTTTLIEEYFLKNNVEFVSLSETLDTSSPFGRAMIGILSVFAQLERETIRDRMVMGKIKRIEAGLPLTTAKGRTFGYDVIDTKLYVNEEEAKQLRLIYDIFEEEQSITSLQKRLKKLGFKVRAYNRYNNWLTNDLYCGYVSYKDKVHVKGIHEPIISEGQFYRVQEIFTRMGKNPNMNRDSASLLNGLVVCSKCGLSFVHRSKDAMSRGKKYHYRYYSCKTYKLTHELEKCGNKTWRADKLEELIINRVNNYSFASRNVDKEDELDSLNEKLETERAKKKRLFDLYINGSYEVSELDSMMNDIDAQINYYESQIEANEELKKNKKIQENLAGLATVDFDSLEFREKQLYLKSLINKIYIDGEQVTIEWL

SEQ ID NO: 5606 - protein, 469 aa, synthetic construct
MSFTTPVRAAVYLRISEDRSGEQLGVARQREDCLKLCDQRKWVPVEYLDNDVSASTGKRRPAYEQMLADIAAGKIAAVVAWDLDRLHRRPIELEAFMGLADEKRLALATVAGDVDLATPQGRLVARLKGSVAAHETEHKKARQRRAARQKAERGYPNWSRAFGYLPGPNGPEPDPRTAPLVKQAYVDILAGASLGDVCRQWNDAGAFTITGRPWTTTTLSKFLRKPRNAGLRAYKGARYGPVDRDAIVGKAQWSPLVDEATFWAAQAVLDAPGRAPGRKSVRRHLLTGLAGCGKCGNHLAGSYRTDGRVVYVCKACHGVAILADNIEPILYHIVAERLATPDAVDLLRREIHDAAEAETIRLELETLYGELDCLAVERAEGLLTGRQVKISTDIVNAKIAKLQARQLDQERLRVFDGIPLGTPQAAGMIAELSPDRFRAVLDALAEVVVQPVGKGGRIFNPERVQVNWR

SEQ ID NO: 5607 - protein, 485 aa, synthetic construct
MTKKVAIYTRVSTTNQAEEGFSIDEQIDRLTKYAEAMGWQVSDTYTDAGFSGAKLGRPAMQRLINDIEDKAFDTVLVYKLDRLSRSVRDTLYLVKEVFTKNKIDFISLNESIDTSSAMGSLFLTILSAINEFERENIKERMTMGKLGRAKSGKSMMWTKTAFGYYHNRKTGILEIVPLQATIVEQIFTDYLSGISLTKLRDKLNESGHIGKDIPWSYRTLRQTLDNPVYCGYIKFKGSLFEGMHKPIIPYETYLKVQKELEERQQQTYARNNNPRPFQAKYMLSGMARCGYCGAPLRIVLGHKRKDGSRTMKYHCANRFPRKTKGVTVYNDNKKCDSGTYDLSNLENTVIDNLIGFQENNDSLLRIINGDNQPILDTSSFKEQISQIDREIQKNSDLYLNDFITMDELKDRTDSLQAEKKLLRAKISENKFNDSTDVFELVKTQLGSIPINELSYDDKKKIVNNLVSKVDVTADNVDIIFRFQLA

SEQ ID NO: 5608 - protein, 469 aa, synthetic construct
MSYTTPVRAAVYLRISEDRSGEQLGVARQREDCLKLCAQRKWVPVEYLDNDVSASTGKRRPAYEQMLADITAGKIAAVVAWDLDRLHRRPVELEAFMSLADEKRLALATVAGDVDLATPQGRLVARLKGCVAAHETEHKKARQRRAARQKAERGLPNWSKAFGYLPGPNGPEPDPRTAPLVRQAYADILAGASLGDVCRQWNDAGAFTITGRPWTTTTLSKFLRKPRNAALRAYKGARYGPVDRDAIVGKAQWSPLVDEATFWAAQAVLDAPGRAPGRKSVRRHLLTGLAGCGKCGNHLAGSYRTDGRVVYVCKACHGVAILADNIEPILYHIVAERLAMPDAVDLLRREIHDAAEAETIRLELETLYGELDRLAVERVEGLLTARQVKISTDIVNAKITELQARQLDQERLRVLDGIPLCTPQVAGMIAELSPDRFRAVLDVLAEVVVQPVGKRGRIFNPERVQVNWR

SEQ ID NO: 5609 - protein, 469 aa, synthetic construct
MSYTTPVRAAVYLRISEDRSGEQLGVARQREDCLKLCGQRKWVPVEYLDNDVSASTGKRRPAYEQMLADIAAGKIAAVVAWDLDRLHRRPIELEAFMSLADEKRLALATVAGDVDLATPQGRLVARLKASVAAHETEHKKARQRRAARQKAERGLPNWSEAFGYLPGPNGPEPDPRTAPLVKQAYADILAGASLGDVCRQWNDAGAFTITGRPWTTTTLSKFLRKPRNAGLRAYKGARYGPVDRDAIVGKAQWSPLVDEATFWAAQAVLDAPGRAPGRKSVRRHLLTGLAGCGKCGNHLAGSYRTDGRVVYVCKACHGVAILADNIEPILYHIVAERLEMPDAVDLLRREIHDVAEAETIRLELETLYGELDRLAVERAEGLLTARQVKISTDIVNAKITKLQARQLDQERLRVFDGIPLGTPQVAGMIAELSPNRFRAVLDVLAEVVVQPVGKSGRIFNPVRVQVNWR

SEQ ID NO: 5610 - protein, 452 aa, synthetic construct
MKAAIYIRVSTQEQVENYSIQAQTEKLTALCRSKDWDVYDIFIDGGYSGSNMNRPALNDMLSKLHEIDAVVVYRLDRLSRSQRDTVTLIEEYFLKNNVEFVSLSETLDTSSPFGRAMIGILSVFAQLERETIRDRMVMGKIKRIEAGLPLTTAKGRTFGYDVIDTKLYINEEEAKQLQLIYDIFEEEQSITLLQKRLKKLGFKVHTYNRYNNWLTNDLYCGYVSYKDKVHVKGIHEPIISEEQFCRVQEIFTRMGKSPNMNRDSASLLNSLVVCSKCGLSFVHRRKDTMSRGKRYHYRYYSCKTYKHTHELEKCGNKIWRADKLEELIINRVSNYSFASRNVDKEDELDSLNEKLRIEHAKKRRLFDLYINGSYEVSELDSMMNDIDAQINYYESQIEANEELKKNKKIQEDLTDLATVDFDSLEFREKQLYLKSLVNKIYIDGERVTIEWL

SEQ ID NO: 5611 - protein, 485 aa, synthetic construct
MTKKVAIYTRVSTTNQAEEGFSIDEQVDRLTKYAEAMGWQVSDTYTDAGFSGAKLERPAMQRLINDIENKAFDTVLVYKLDRLSRSVRDTLYLVKDVFTENEIDFISLNESISTSSAMGSLFLTILSAINEFERENIKERMTMGKLGRAKSGKSMMWTKTAFGYYHNRKTGILEIVPLQATIVEQIFTDYLSGISLTKLRDKLNESGHIGKDIPWSYRTLRQTLDNPVYCGYIKFKGTLFEGMHKPIIPYETYLKVQKELEERQQQTYERNNNPRPFQAKYMLSGMARCGYCGAPLRIVLGHKRKDGSRTMKYHCANRFPRKTKGVTVYNDNKKCDSGTYDLSNLENTVIDNLIGFQENNDSLLKIINGNNQPILDTSSFEKQISQIDKEIQKNSDLYLNDFITMDELKDRTDSLQAEKKLLKAKISENKFNDGTDVFELVKTQLGSIPINELSYDNKKKIVNNLVSKVDVTAGNVDIIFKFQLA

SEQ ID NO: 5612 - protein, 452 aa, synthetic construct
MKAAIYIRVSTQEQVGNYSIQAQTEKLTALCRSKDWDVYDIFIDGGYSGSNMNRPALNEMLSKLHEIDAVVVYRLDRLSRSQRDTTTLIEEYFLKNNVEFVSLSETLDTSSPFGRAMIGILSVFAQLERETIRDRMVMGKIKRIEAGLPLTTAKGRTFGYDVIDTKLYINEEEAKQLQLIYDIFEEEQSITFLQKRLKKLGFKVRTYNRYNKWLTNDLYCGYVSYKDKVHVKGIHEPIISEEQFYRVQEIFTRMGKNPNMNRDSASLLNNLVVCSKCGLGFVHRSKDTMSRGKKYHYRYYSCKTYKHTYELEKCGNKTWRADKLEELVISRVNNYSFASRSVDKEDELDSLNEKLKIEHARKKRLFDLYINGSYEVCELDSMMNNIDAQINYYESQIEASEELKRNKKIQENLADLAAVDFDSLEFREKQLYLKSLINKIYIDGEQVTIEWL

SEQ ID NO: 5613 - protein, 485 aa, synthetic construct
MTKKVAIYTRVSTTNQAEEGFSINEQIDRLTKYAEAMGWQVSGTYTDAGLSGAKLERPAMQRLINDIESKAFDTVLVYKLDRLSRSVRDTLYLVKDVFTKYKIDFISLSESIDTSSAMGSLFLTILSAINEFERENIKERMTMGKLGRAKSGKSMMWTKTAFGYYHNRKTGILEIVPLQATIVEQIFTDYLSGISLTKLRDKLNESGHIGKDIPWSYRTLRQTLDNPVYCGYIKFKDSLFEGMHKPIIPYETYLKVQKELEERQRQTYERNNNPRPFQAKYMLSGMARCGYCGAPLKIVLGHKRKDGSRTMKYHCANRFPRKTKGVTVYNDNKKCDSGTYDLSNLENTVIDTLIGFQENNDSLLKIINGNNQPTPDTSSFKKQISQIDKKIQKNSDLYLNDFITMDELKDRTDSLQAEKKLLKAKISENKFNDSTDVFELVKTQLGSIPINELSYDNKKKIVNNLVSKVDVTADNVDIIFKFQLA

SEQ ID NO: 5614 - protein, 452 aa, synthetic construct
MKAAIYIRVSTREQVENYSIQAQTEKLTALCRSKGWDVYDIFIDGGYSGSNMSRPALNEMLSKLHEVDAVVVYRLDRLSRSQRDTITLIEEHFLKNNVEFVSLSETLDTSSPFGRAMIGILSVFAQLERETIRDRMVMGKIKRVEAGLPLTTAKGRTFGYDVIGTKLYINEEEAEQLQLIYDIFEEEQSITFLQKRLKKLGYKVRTYSRYNSWLTNDLYCGYVSYKDKVHVKGIHEPIISEEQFYRVQEIFARMGKNPNMNRDSASLLNSLVVCGKCGLGFVHRRKDTMSRGKKYHYRYYSCKTYKHIHELEKCGNKIWRADKLEELIINRVNNYSSASRSVDKDDGLDNLNEKLKIEHAKKKRLFDLYIDGSYEVSELDCMMNDIDAQINYYESQIEANEELKKDKKIQESLANLATVDYDSLEFREKQLYLKSLINKIYIDGEQVTIEWL

SEQ ID NO: 5615 - protein, 452 aa, synthetic construct
MKAAIYIRVSTREQVENYSIQAQTEKLTALCRSKDWDVYDIFIDGGYSGSNMNRPALSEMLSKLHEIDAVVVYRLDRLSRSQRDTITLIEEYFLKNNVAFVSLSETLDTSSPFGRAMIGILSVFAQLERETIRDRMVMGKIKRVEAGLPLTTAKGRTFGYDVIDTKLYINEEEAKQLRLIYDIFEEEQSITFLQKRLKKLGFKVRTYSRYNSWLTNDLYCGYVSYKDKVHVKGIHEPIISEEQFYRVQEIFARMGKNPNTNRDSASLLNNLVVCSKCGLGFVHRRKDTMSRGKKYHYRYYSCKTYKHTHELEKCGNKIWRADKLEELIINRVNNYSFASRNVDKEDELGSLNEKLKIEHTKKKRLFDLYINGSYEVSELDSMMNDIDAQISYYESQIEANEELKKNRKIQENLANLATVDYDSLEFREKQLYLKSLINKIYIDGEQVTIEWL

SEQ ID NO: 5616 - protein, 485 aa, synthetic construct
MTKKVAIYTRVSTTNQAEEGFSIDEQVDRLTKYAEAMGWQVSDTYTDAGLSGAKLERPAMQRLINDIENKAFDTVLVYKLDRLSRSVRDTLYLVKDVFTKNKVDFISLNESIDTSSAMGSLFLTILSAINEFERENIKERMTMGKLGRAKSGKSMMWTKTAFGYYHNRKTGILEIVPLQATIVEQIFTDYLSGISLTKLRDKLNESGHIGKDIPWSYRTLRQTLDNPVYCGYIKFKGSLFEGMHKPIIPYETYLKVQKELEERQQQAYGRNNNPRPFQAKYMLSGMARCGYCGAPLRIVLGHKRKDGSRTMKYHCANRFPRKTKGVTVYNDNKKCDSGTYDLSNLENTVIDNLIGFQENNDSLLKIINGNNQPIPDTSSFKKQISQIDKKIQKNSDLYLNDSITMEELKDRTDSLQAEKKLLKVKISENKFNDSTDVFELVKTQLGSIPINELSYDNKKKIVNNLVSKVDVTADNVDIIFKFQLA

SEQ ID NO: 5617 - protein, 485 aa, synthetic construct
MTKKVAIYTRVSTTNQAEEGFSIDEQIDRLTKYAEAMGWQVSDTYTDAGSSGAKLERPAMQRLINDIENKAFDTVLVYKLDRLSRSVRDTLYLVKDVFTKNKIDFISLNESIDTSSAMGSLFLTILSAINEFERENIKERMTMGKLGRARSGKSMMWTKTAFGYYHNRRTGILEIVPLQATIVEQIFTDYLSGISLTKLRDKLNESGHIGKDIPWSCRTLRQTLDNPVYCGYIKFKGSLFEGMHKPIIPYETYLKVQKELGERQQQTYERNNNPRPFQAKYMLSGMARCGYCGAPLKIVLGHKRKDGSRTMKYHCANRFPRKTKGVTVYNDNKKCDSGAYDLSSLENTVIDNLIGFQENNDSLLKIINGNNQPILDTSSFKKQISQIDKKIQKNSDLYLNDFITMDELKDRTDSLQAEKKLLKAKISENKFNDSTDVFELVKAQLGSIPINELSYDDKKKIVNNLVSKVDVTADNVDIIFKFQLA

SEQ ID NO: 5618 - protein, 485 aa, synthetic construct
MTKKVAIYTRVSTTNQAEEGFSIDEQIDRLTKYAEAMGWQVSDTYTDAGFSGAKLERPAMQRLINDIENKAFDTVLVYKLDRLSRSVRNTLYLVKDVFAKNKIDFISLNESIDTSSAMGSLFLTILSAINEFERENIKERMTMGKLGRAKSGKSMMWTKTAFGYYHNRKTGILEIVPLQATIVEQIFTDYLSGISLTKLRDKLNESGHIGKDIPWSYRTLRQTLDNPVYCGYIKFKDSLFEGMHKPIIPYETYLKVQKELEERQQQTYERNNNPRPFQAKYMLSGMARCGYCGAPLKIVLGHKRKDGSRTRKYHCANRFPRKTKGVTVYNDNKKCDSGTYDLSNLEDTVIDYLVGFQENNDSLLKIINGNNQPILDTSSFKKQISQIDKKIQRNSDLYLNDFITMDELKDRTDSLQAEKKLLKAKISEDKFNDRTDVFELVKTQLGSIPINELSYDNKKKIVNNLVSKVDVTADNVDIIFKLQLA

SEQ ID NO: 5619 - protein, 452 aa, synthetic construct
MKAAIYIRVSTREQVENYSIQAQTEKLTALCRSKDWDVYDIFIDGGYSGSNTNRPALNEMLSKLHEIDAVVVYRLDRLSRSQRDTITLIEEYFLKNNVEFVSLSETLDTSSPFGRAMIGILSVFAQLERETIRDRMVMGKIKRIEAGLPLTTAKGRTFGYDVIDTKLYINEEEAKQLRLIYDIFEEEQSITSLQRRLKKLGFKVRTYNCYNNWLTNDLYCGYVSYKDKVHVKGIHEPIISEEQFRRVQEIFARMGKNPNMNRDSASLLNSLVVCGKCGLGFVHRRKDTMSRGKKYHYRYYSCKTYKHTHELEKCGNKIWRADKLEELIINRVNNYSSASRDVDKEDELDSLDEKLKIEQAKRKRLFDLYINDSYNVSELDSMMNDIDAQIDYYESQIEANEELRKSKKIQENLAYLATVDFDSLEFREKQLYLKSLIHKIYIDGEQVTIEWL

SEQ ID NO: 5620 - protein, 469 aa, synthetic construct
MSYTTPVRAAVYLRISEDRSGEQLGVARQREDCLKLCVQHKWVPVEYLDNDVSASTGKRRPAYEQMLADITAGKIAAVVAWDLDRLHRRPIELEAFMSLADEKRLALATVAGDVDLATPQGRLVARLKGSVAAHETEHKRARQCRAARQKAERGHPNWSKAFGYLPGPNGPEPDPRTAPLVKQAYADILAGASLGDVCRQWNVAGAFTITGRPWTTTTLSKFLRKPRNAGLRAYKGARYGPVDRDAIVGKAQWSPLVDEATFWAAQAVLDAPGRAPGRKSVRRHLLTGLAGCGKCGNHLAGSYRTDGRVVYVCKACHGVAILADNIEPILYHIVAERLAMPDAVGLLRREIHDAAEAETIRLELETLYGELDRLAVERAEGLLTARQVKISTDIVNAKITKLRARQLDQERLRVFDGIPLGTPQVADMIAELSPNRFRAVLDVLAEVVVQPVGKSGRIFNPERVQVNWR

SEQ ID NO: 5621 - protein, 485 aa, synthetic construct
MTKKVAIYTRVSTTNQAEEGFSIDEQIDRLTKYAEAMGWQVSDTYTDAGSSGAKLERPAMQRLINDIENKAFDTVLVYKLDRLSRSVRDTLYLVKDVFTKNKIDFISLNESIDTSSAMGSLFLTILSAINEFERENIKERMTMGKLGRAKSGKSMMWTKTAFGYYHNRKTGILEIVPLQATIVEQIFTDYLSGISLTKLRDKLNESGHIGKDIPWSYRTLRQTLDNPVYCGYIKFKDSLFEGMHKPIIPYETYLKVQKELRERQQQTYERNNNPRPFQAKYMLSGMARCGYCGAPLRIVLGHKRKDGSRTMKYHCANRFPRKTRGVTVYNDNKKCDSGTYDLSNLETTVIDSLIGFQENNDSLLKIINGNNQPILDTSSFKKQVSQIDKKIQKNSDLYLNDFITMDELKNRIDSLQAEKKLLKAKISENKFNDSTDVFELVKAQLGSVPINELSYDNKKKIVNNLVSKVDVTADNVDIIFKFQLA

SEQ ID NO: 5622 - protein, 485 aa, synthetic construct
MTKKVAIYTRVSTTNQAEEGFSIDEQTDRLTRYAEAMGWQVSDTYTDAGFSGAKLERPAMQRLINDIENKAFDTVLVYKLDRLSRSVRDTLYLVKDVFTKNKIDFISLNESIDTSSAMGSLFLTILSAINEFERENIKERMTMGKLGRAKSGKSMMWTKTAFGYYHNRKTGILEIVPLQATIVEQIFTDYLSGISLTKLRDKLNESGHIGKDIPWSYRTLRQTLDNPVYCGCIKFKDSLFEGMHKPIIPYETYLKVQKELEERQQQTYERNSNPRPFQAKYMLSGMARCGYCGAPLRIVLGRKRKDGSRTMKYHCANRFPRKTKGVTVYNDNKKCDSGTYDLSDLENTVIDNLIGLQENNDSLLKIINGNNQPILDTSSFKRQISQIDKKIQKNSDLYLNDFITMDELKDRTDRLQAEKKLLEAKISENKFNDSTDVFELVKTQLGSIPINELSYDNKKKIVNNLVSKVDVTADNVDIIFKFQLA

SEQ ID NO: 5623 - protein, 452 aa, synthetic construct
MKAAIYIRVSTREQVENYSIQAQTEKLTALCRSKGWDVYDIFIDGGYSGSNMNRPALNEMLSKLHEIDAVVVYRLDRLSRSQRDTITLIEEYFLKNNVEFVSLSETLDTSSPFGRAMIGILSVFAQLERETIRDRMVMGKIKRIEAGLPLTTAKGRTFGYDVIDTKLYINEEEAKQLQLIYDIFEEEQSITFLQKRLKKLGFKVRTYNRYNSWLTNDLYCGYVRYKDKVHVKGIHEPIISEEQFYRVQEIFTRMGKNPNMNRDSASLLNNLVVCSKCGLGFVHRRKDTVSRGKKYHYRYYSCKTYKHTHELEKCGNKIWRADKLEELIINRVNNHSFASRNVDKEDELGSLNEKLKIEHAKKKRLFDLYINGSYEVSELDGMMNNIDAQISYYESQIEANVELKRNKKIQETLADLATVGFDSLEFREKQLYLKSLINKIYIDGEQVTIDWL

SEQ ID NO: 5624 - protein, 485 aa, synthetic construct
MTKKVAIYTRVSTTNQAEEGFSIGEQIDRLTKYAEAMGWQVSDTYTDAGFSGARLERPAMQRLINDIESKAFDTVLVYKLDRLSRSVRDTLYLVKDVFTKNKIGFISLSESIDTSSAMGSLFLTILSAINEFERENIKERMTMGKLGRAKSGKSMMWTKTAFGYYHNRKTGILEIVPPQATIVEQIFTDYLSGISLTKLRDKLNESGHIGKDIPWSYRTLRQTLDNPVYCGYIKFKDSLFEGMHKPIIPYETYLKVQKELEERQQQTYERNNNPRPFQAKYMLSGMARCGYCGAPLKIVLGHKRKDGSRTMKYHCANRFPRKTKGVTVYNDNKKCDSGTYDLSNLENAVIDNLIGFQENSDSLLKIINGDNQPILDTSSFKKRISQIDKKIQKNSDLYLNDFITMDELKDRTDSLQAERKLLKAKISENKFNDSADVFELVRTQLGSVPINELSYDNKKKIVNNLVSKVDVTADNVDIIFKFQSA

SEQ ID NO: 5625 - protein, 485 aa, synthetic construct
MTKKVAIYTRVSTTNQAEEGFSIDEQIDRLTKYAEAMGWQVSDTYTDAGSSGAKLERPAMQRLINDIENKAFDTVLVYKLDRLSRSVRDTLYLVKDVFTKNKIDFISLNESIDTSSAMGSLFLTILSAINEFERENIKERMTMGKLGRAKSGKSMMWTKTAFGYYHNRKTGILEIVPLQATIVEQIFTDYLSGISLTKLRDKLNESGHIGKDIPWSYRTLRQTLDNPVYCGYIKFKDSLFEGMHKPIIPYETYLKVQKELEERQQQTYERNNNPRPFQAKYMLSGMARCGYCGAPLRIVLGHKRKDGSRTMKYHCANRFPRKTKGVTVYNDSKKCDSGAYDLSNLENTVIGNLIGFQENNDSLLKIINGNNQPILDTSSFKKQISQIDKKIQKNSDLYLNDFITMDELKDRTDSLQAEKKLLKAKISENKFNGSTDVFEQVKTQLGSIPINELSYDNKKKVVNNLVSKVDVTADSVDIIFKFQLA

SEQ ID NO: 5626 - protein, 469 aa, synthetic construct
MSYTTPVRAAVYLRISEDRSGEQLGVARQREDCLELCDQRKWVPVEYLDNDVSASTGKRRPAYEQMLADITAGKIAAVVAWDLDRLHRRPIELEAFMSLADEKRLALATVAGDVDLATPQGRLVARLKGCVAAHETEHKKARQRRAARQKAERGYPNWSKAFGYLPGPNGPEPDPRIAPLVKQAYADILAGASLGDVCRQWNDAGAFTITGRPWTTTTLSKFLRKPRNAGLRAYKGARYGPVDRDAIVGKAQWSPLVDEATFWAAQAVLDAPGRAPGRKSVRRHLLTGLAGCGKCGNHLAGSYRTDGQIVYVCKACHGVSILAVNIEPILYRIVAERLAMPGAVDLLRREIHDAAEAETIRLELETLYGELDRLAVERAEGLLTARQVKISTDTVNAKITKLQARQLDQERLRVFDGIPLGTPQVAGMIAGLSPDRFRAVLDVLAEVVVQPVGKSGRIFDPERVQVNWR

SEQ ID NO: 5627 - protein, 452 aa, synthetic construct
MKAAIYIRVSTREQTENYSIQAQTEKLTALCRSKDWDVYDIFIDGGYSGSNMNRPALNEMLSKLHEIDAVVVYRLDRLSRSQRDTITLIEEYFLKNNVEFVSLSETLDTSSPFGRAMIGILSVFAQLERETIRDRMVMGKIKRIEAGLPLTTAKGRTFGYDVIDTKLYINEEEAKQLQLIYDIFEEEQSITLLQKRLKKLGFKVRTYSRYNNWLTNDLYCGYVSYKDKVHVKGIHEPVISEEQFYRVQEIFTRMGKNPNMNRSSASLLNNLVVCSKCGLGFVHRRKDTKSRGKKYHYRYYSCKTYKHTHELEKCGNKIWRADKLEELIIDRVNNYSLASRNVDKEDGLDSLNEKLKIEHAKKKRLFDLYINGSYNVSELDSIMNDIDAQINYYESQIEANEELKKNKKIQENLAELASVDFDSLEFREKQLYLKSLINKIYIDGEQVTIEWL

SEQ ID NO: 5628 - protein, 469 aa, synthetic construct
MSYTTPVRAAVYLRISEDRSGEQLGVARQREDCLKLCGQRKWVPVEYLDNDVSASTGKRRPAYEQMLADITAGKIAAVVAWDLDRLHRRPIELEAFMSLADEKRLALATVAGDVDLATPQGRLVARLKGCVAAHETEHKKARQRRAARQKAERGHPNWSKAFGYLSGPNGPEPDPRTAPLVKQAYANILAGASLGDVCRQWNDAGAFTITGRPWTTTTLSKFLRKPRNAGLRAYKGARYGPVDRDAIVGKAQWSPLVDEATFWAAQAVLDAPGRAPGRKSVRRHLLTGLAGCGKCGNHLAGSYRTDGRVVYVCKACHGVAILADNIEPILYHIVAERLAMPDAVNLLRREIHDAAEAETIRLELETLYGELDRLAVERAEGLLTARQVKISTDIVNAKITKLQARQLDQERLRVLDGIPLGTPQVAGMIAELSPDRFRAVLDVLAEVVVQPVGKRGRIFNPERVQVNWR

SEQ ID NO: 5629 - protein, 452 aa, synthetic construct
MKAAIYIRVSTQEQVENYSIQAQTEKLTALCRSKDWDVYDIFIDGGYSGSNMNRPALNEMLSKLHEIDAVVVYRLDRLSRSQRDTITLIEEYFLKNNVEFVSLSETLDTSSPFGRAMIGILSVFAQLERETIRDRMVMGKIKRIEAGLPLTTAKGRTFGYDVIDTKLYINEEEAKQLQLIYDIFEEEQSITFLQKRLKRLGFKVRTYSCYNSWLTNDLYCGYVSYKDKVHVKGIHEPIISEEQFYRVQEIFTRMGKNPNMNRDSASLLNNLVVCSKCGLGFVHRRKDTTSRGKKYHYRYYSCKTYKHTHELEKCGNKIWRADKLEELIINRVNNYGLARRNVDKEDELDSLNEKLKIEHAKKKRLFDLYINGSYEVSELDSMMNDIDAQISYYESQIEANEELKRNKKIQENLADLAAVDYDSLEFRDKQLYLKSLINKIYIDGEQVTIEWL

SEQ ID NO: 5630 - protein, 452 aa, synthetic construct
MKAAIYIRVSTREQVENYSIQAQTEKLTALCRSKDWDVYDIFIDGGYSGSNMNRPALNEMLSKLHEIDAVVVYRLDRLSRSQRDTITLIEEYFLKNNVEFVSLSETLDTSSPFGRAMIGILSVFAQLERETIRDRMVMGKIKRIEAGLPLTTAKGRTFGYDVIDSKLHINEEEAKQLQLIYDIFEEEQSITFLQKRLKKLGFKVRTYNRYSNWLTNDLYCGYVSYKDRVHVKGIHEPIISEEQFYRVQEIFTRMGKNPNMNRDSASLLNNLVVCSKCGLGFVHRRKDTMSRGKKYHYRYYSCKTYKHTHELEKCGNKIWRADKLEELIINRVNNYSIASRNVDKEDELDSLNEKLKIEHAKRKRLFDLYINGSYEVSELDSMMNDIDAQISYYESQIEANEELKRDKKIQENLADLATVDYDSLEFREKQLYLKSLINKIYIDGEQVTIEWL

SEQ ID NO: 5631 - protein, 452 aa, synthetic construct
MKAAIYIRVSTREQVENYSIQAQTEKLTALCRSKDWDVYDIFIDGGYSGSNMNRPALNEMLSKLHEIDAVVVYRLDRLSRSQRDTITLIEEYFLKNNVEFVSLSETLDTSSPFGRAMIGILSVFAQLERETIRDRMVMGKIKRIEAGLPLTTAKGRTFGYDVIDTKLYINEEEAKQLQLIYDIFEEEQSITSLQKRLKKLGFKVRTYSRYSNWLTNDLYCGYVSYKDKVHVKGIHEPIISEEQFYRVQEIFTRMGKNPNMNRDSASLLNNLVVCGKCGLGFVHRRKDAMSRDKKYHYRYYSCKTYKHIHELEKCGNKIWRADKLEELIINRVNSYSLASRNVDKEDELNSLNEKLKIEHAKKKRLFDLYIDGRYEVSELDSMMNDIDAQINYYESQIEANEELKKNKKTQENLADLATVDFDSLEFREKQLYLKSLINKIYIDGEQVTIEWL

SEQ ID NO: 5632 - protein, 485 aa, synthetic construct
MTKKVAIYTRVSTANQAEEGFSIDEQIDRLTKYVEAMGWQVSDTYTDAGFSGAKLERPAMQRLINDIGNKTFDTVLVYKLDRLSRSVRDTLYLVKDVFTKNKIDFVSLNESIDTSSAMGSLFLTILSAINEFERENIKERMTMGKLGRAKSGKSMMWTKTAFGYYHNRKTGILEIVPLQATIVEQIFTDYLSGISLTKLRDKLNESGHIGKDIPWSYRTLRQTLDNPVYCGYIKFKDSLFEGMHKPIIPYETYLKVQKELEERQQQTYERNNNPRPFQAKYMLSGMARCGYCGAPLKIVLGHKRKDGSRTMKYHCANRFPRRTRGITVYNDNKKCDSGTYDLRNLENTVVDNLIGFQENDDSLLKIISGNNQPILDTSSFKKQISQIDKKIQKNSDLYLNDFITMDELKDRTDSLQAEKKLLKAKISENKFNDSTDVFGLVKTQLGSIPINELSYDNKRKIVNNLVSKVDVTADNVDIIFKFQLA

SEQ ID NO: 5633 - protein, 452 aa, synthetic construct
MKAAIYIRVSTQEQVGNYSIQAQTEKLTALCRSKGWDVYDIFIDGGYSGSNMNRPALNEMLSKLHEIDAVVVYRLDRLSRSQRDTTTLIEEYFLKNNVEFVSLSETLDTSSPFGRAMIGILSVFAQLERETIRDRMVMGKIKRIEAGLPLTTAKGRTFGYDVIDTKLYINEEEAKQLQLIYDIFEEEQSITFLQKRLKKLGFKVRTYNRYNSWLTNDLYCGYVSYKDKVHVRGIHEPIISEEQFYRVQEIFTRMGKNPNMNRDSASLLNNLVVCSKCGLGFVHRSKDTMCRGKKYHYRYYSCKTYKHTHELEKCGNKTWRADKLEELIISRVNNYSFASRNVNKEDELDSLNEKLKIEHAKKKRLFDLYINGSYEVSELDSMMNDIDAQINYYESQIEASEELKKNKKIQENLADLATVDFDSLGFREKQLYLKSLINKIYIDGEQVTIEWL

SEQ ID NO: 5634 - protein, 452 aa, synthetic construct
MKAAIYIRVSTREQVENYSIQAQTEKLTALCRSKDWDVYDIFIDGGYSGSNMNRPALNEMLSKLHEIDAVVVYRLDRLSRSQRDTITLIEEYFLKNNVEFVSLSETLDTSSPFGRAMIGILSVFAQLERETIRDRMVMGKIKRIEAGLPLTTAKGRTFGYDVIDTKLYINEEEAKQLQLIYDIFEEEQSITFLQKRLKKLGFKVCTYNRYNNWLTNDLYCGYVSYKDKVHVKGIHEPIISEEQFYRVQEIFTRMGKSPNMNRDSASLLNNLVVCSKCGLGFVHRRKDAMSRSKKYHYRYYSCKTYKHIHELEKCGNKIWRADKLEELVINRVNNYSLASRNVDKEDELDSLNEKLKIEHAKKKRLFDLYISGSYEVSKLDSLMCDIDAQINYYESQIEANGELKKNKKIQGNLADLATVDFDSLEFREKQLYLKSLINKIYIDGEQVTIEWL

SEQ ID NO: 5635 - protein, 485 aa, synthetic construct
MTKKVAIYTRVSTTNQAEEGFSIDEQIDRLTKYVEAMGWQVSDTYTDAGLSGAKLERPAMQRLIDDIENKAFDTVLVYKLDRLSRSVRDTLYLVKDVFTKNKIDFISLNESIDTSSAMGSLFLTILSAINEFERENIKERMTMGKLGRAKSGKSMMWTKTAFGYYHNRKTGILEIVPLQATIVEQIFTDYLSGISLTKLRDKLNESGHIGKDIPWSYRTLRQTLDNPVYCGYIKFKGSLFEGMHKPIIPYETYLKVQKELEERQQQTYERNNNPRPFQAKYMLSGMARCGYCGAPLRIVLGHKRKDGSRTMKYHCANRFPRKTKGITVYNDNKKCDSGTYDLSNLENTVIDRLIGFQEDNDSLLRIINGNNQPILGTSSIKKQISQIDKKIQKNSDLYLNDFITMDELKDRTDSLQAEKKLLEARISENKFNDSTDVFELVKTQLGSIPINELSYDNKKKIVNNLVSKVDVTADNVDIIFKFQLA

SEQ ID NO: 5636 - protein, 485 aa, synthetic construct
MTKKVAIYTRVSTTNQAEEGFSIDEQIDRLTKYAEAMGWQVSDTYTDAGSSGAKLERPAMQRLINDIENKAFDTVLVYKLDRLSRSVRDTLYLVKDVFTKNKIDFISLNESIDTSSAMGSLFLTILSAINEFERENIKERMTMGKLGRAKSGKSMMWTKTAFGYYHNRKTGILEIVPLQATIVEQIFTDYLSGISLTKLRDKLNESGHIGKDIPWSYRALRQTLDNPVYCGYIKFKDSLFEGMHKPIIPYETYLKVQKELEERQQQTYERNNNPRPFQAKYMLSGMARCGYCGAPLRIVLGHKRKDGSRTMKYHCANRFPRKTKGVTVYNDNKKCDSGTYDLCNLENTVIDNLIGFQESNDSLLKIINGNNQPILDTSSFEKQISQIDKKIQKNSDLYLNDFITMDELKDRTDSLQAEKKLLKAKISENKFNDSADVFELVKTQLGSIPINELSYDDKKKIVNNLVSKVDVTADNVDIIFKFQLA

SEQ ID NO: 5637 - protein, 452 aa, synthetic construct
MKAAIYIRVSTREQVENYSIQAQTEKLTALCRSKDWDVYDIFIDGGYSGSNMNRPALNEMLSKLHEIDAVVVYRLDRLSRSQRDTITLIEEYFLKNNVEFVSLSETLDTSSPFGRAMIGILSVFAQLERETIRDRMVMGKIKRVEAGLPLTTAKGRTFGYDVIDTKLYINEGEAKQLQLIYDIFEEEQSVTSLQKRLKKLGFKVHTYNRYSNWLTNDLYCGYVSYKDRVHVKGIHEPIISEEQFYRVQEIFTRMGKNPNMNRDSASLLNGLVVCSKCGLGFVHRRKDTTSRGKKYHYRYYSCKTYKHTHELEKCGNKIWRADELEELIINRVNNYSLTSRNVDKGDELDSLNEKLKIEHAKKKRLFDLYINGSYEVSELDSMMNDIDAQINYYESQIKANEELKKNKKIQENLANLATVDYDSLEFREKQLYLKSLINKIYIDGEQVIIEWL

SEQ ID NO: 5638 - protein, 485 aa, synthetic construct
MTKKVAIYTRVSTTNQAEEGFSIDEQIDRLTKYAEAMGWQVSDTYTDAGFSGAKLERPAMQRLINDIENKAFDTVLVYKLDRLSRSVRDTLYLVKDVFAKNKVDFISLNESIDTSSAMGSLFLTILSAINEFERENIKERMTMGKLGRAKSGKSMMWTKTAFGYYHNRNTGILEIVPLQATIVEQIFTDYLSGISLTKLRDKLNESGHIGKDIPWSYRTLRQTLDNPVYCGYIKFKDSLFEGMHKPIIPYETYLKVQKELEERQQQTYERNNNPRPFQAKYMLSGMARCGYCGAPLRIVLGHKRKDGSRTMKYHCANRFPRKTKGVTVYNDNKKCDSGTYDLINLENTVVDNLIGLQENSDSLLKIINGNNQPIPDTSSFKEQISQIDKKIQKNSDLYLNDFITMDELKDRTDSLQAEKKLLEAKISENKFNDSTDVFELVKTQLGSISINELSYDNKRKIVNNLVSKVDVTADNVDIIFKFQLA

SEQ ID NO: 5639 - protein, 469 aa, synthetic construct
MCYTIPVRAAVYLRISEDRSGEQLGVARQREDCLKLCDQRKWVPVEYLDNDVSASTGKRRPAYEQMLADITAGKIAAVVAWDLDRLHRRPIELEAFMSLADEKRLALATVAGDVDLATPQGRLVARLKGSVAAHETEHKKARQRRAARQKAERGHPNWSKAFGYLPGPNGPEPDPRTAPLVKQAYADILAGASLGDVCRQWNDAGAFTITGRPWTTTALSKFLRKPRNAGLRAYKGVRYGPVDRDAIVGKAQWSPLVDEATFWAAQAVLDAPGRAPGRKSVRRHLLTGLAGCGKCGNHLAGSYRTDGRVVYVCKACHGVAILADNLEPILYHIVAERLAMPDAVDLLRREIHDAAEAETIRLELETLHGELDRLAVERAEGLLTARQVKISTDIVNAKITELQARQLDQERLRVLDGIPLGTPQVAGMIAELSPDRFRAVLDVLAEVVVQPVGKSGGVFNPERVQVNWR

SEQ ID NO: 5640 - protein, 452 aa, synthetic construct
MKAAIYIRVSTREQVENYSIQAQTEKLTALCRSKDWDVYDIFIDGGYSGSNMNRPALNEMLSKLHDIDAVVVYRLDRLSRSQRDTITLVEEYFLKNNIEFVSLSETLDTSSPFGRAMIGILSVFAQLERETIRDRMVMGKIKRIEAGLPLTTAKGRTFGYDVIDTKLYINEEEAKQLQLIYDIFEEEQSITFLQKRLKKLGFKVRTYNCYNNWLTNDLYCGYVSYKDKVHVKGIHEPIISEEQFYRVQEIFARMGKNPNMNRDSASLLNNLVVCSKCGLGFVHRRKDTMGRGKKYHYRYYSCKTYKHTHELEKCGNKIWRADKLEELIINRVNNYSLARRNVDKEDELDSLNEKLKIEHAKKKRLFDLYINGSYEVSELDSMMNDIDAQISYYESQIEANEELRRNKKIQESLADLASVDYDSLEFREKQLYLRSLINKIYIDGEQVTIEWL

SEQ ID NO: 5641 - protein, 485 aa, synthetic construct
MTKKVAIYTRVSTTNQAEEGFSIDEQIDRLTKYAEAMGWQVSDTYTDAGFSGAKLERPAMRRLINDIENRAFDTVLVYKLDRLSRSVRDTLYLVKDVFTKNKVDFISLNESIDTSSAMGSLFLTILSAINEFERENIKERMTMGKLGRAKSGKSMMWTKTAFGYYHNRKTGILEIVPLQATIVEQIFTDYLSGISLTKLRDKLNESGHIGKDIPWSYRTLRQTLDNPVYCGYIKFKGSLFEGMHKPIIPYETYLKVQKELEERQQQTYERNNNPRPFQAKYMLSGMARCGYCGAPLRIVLGHKRRDGSRTMKYHCANRFPRKTEGITAYNDNKRCDSGTYDLSNLENTVIGYLIGFQENNGSLLKIINGNNQPILDTSSLKKQISQIDKKIQKNSDLYLNDFITMDELKGRTDSLQAEKKLLKAKISENKFNDSTDVFELVKTQLGSIPINELSYDNKKKIVNNLVSKVDVTAGNVDIIFKFQLA

SEQ ID NO: 5642 - protein, 452 aa, synthetic construct
MKAAIYIRVSTREQVENYSIQAQTEKLTALCRSKDWDVYDIFTDGGYSGSNMNRPALNEMLSKLHEIDAVVVYRLDRLSRSQRDTITLIEEYFLRNNVEFVSLSETLDTSSPFGRAMIGILSVFAQLERETIRDRMVMGKIKRIEAGLPLTTAKGRTFGYDVIDTKLYINEEEAKQLQLIYDIFEEEQSITSLQKRLKKLGFKVRTYNRYNSWLTNDLYCGYVSYKDKVHVKGIHEPIISEEQFYRVQEIFARMGKNPNMNRDSASLLNNLVVCSKCGLGFVHRRKDTTSRGKKYHYRYYSCKTYKHAHELEKCGNKIWRADKLEELIINRVNNYSFASRNVDKEGELDSLNEKLKIEHAKRKRLFDLYINGSYEVSELDSMMNDIDAQINYYESQIEANEELKKNKKIQESLANLATVDYDSLEFREKQLYLKSLINKIYIDGEQVTIEWL

SEQ ID NO: 5643 - protein, 452 aa, synthetic construct
MKAAIYIRVSTREQVENYSIQAQTEKLTALCRSKDWDVYDIFIDGGYSGSNMNRPALNEMLSKLHEIDAVVVYRLDRLSRSQRDTITLIEEYFLKNNVEFVSLSETLDTSSPFGRAMIGILSVFAQLERETIRDRMVMGKIKRVEAGLPLTTAKGRTFGYDVIGTKLYINEEEAKQLQLIYDIFEEEQSITLLQKRLKKLGFKVRTYSRYNNWLTNDLYCGYVSYKDKVHVKGIHEPIISEEQFYRVQEIFTRMGKSPNMNRDSASLLNNLVVCSKCGLGFVHRRKDTVSRGKKYHYRYYSCKTYKHTHELEKCGNKIWRADKLEELIINRVNNYSLASRNVDKEDELDSLNERLKIEHAKKKRLFDLYINGGYEVSELDSMMSDIDAQINHYESRIEANEELKKDKKIQESLANLATVDYDSLEFREKQRYLKSLINKIYIDGEQVTIEWL

SEQ ID NO: 5644 - protein, 452 aa, synthetic construct
MKAAIYIRVSTQEQVGNYSIQAQTEKLTALCRSKDWDVYDIFIDGGYSGSNMNRPALNEMLSKLHEIDAVVVYRLDRLSRSQRDTTTLIEEYFLKNNVEFVSLSETLDTSSPFGRAMIGILSVFAQLERETIRDRMVMGKIKRIEAGLPLTTAKGRTFGYDVIDTKLYINEEEAKQLQLIYDIFEEEQSITFLQKRLKKLGFKVRTYNRYNNWLTNDLYCGYVSYKDKVRVKGVHEPIISEEQFYRVQEIFARMGKNPNMNRGSASLLNNLVVCSKCGLGFVHRRKDTMSGGKKYRYRYYSCKTYKHTHELEKCGNKTWRADKLEELIINRVNNYSFASRNVDKEDELDSLNEKLKIEHAKKRRLFDLYINGSYEVSELDSMMNDIDAQINYYESQIEANEEQKKNKKIQENLADLATVDFGSLEFREKQLYLKSLISKIYIDGEQVTIEWL

SEQ ID NO: 5645 - protein, 452 aa, synthetic construct
MKAAIYIRVSTQEQVENYSIQAQTEKLTALCRSKDWDVYDIFIDGGYSGSNMNRPALNEMLSKLHEIDAVVVYRLDRLSRSQRDTTTLIEEYFLKNNVEFVSLSETLDTSSPFGRAMIGILSVFAQLERETIRDRMVMGKIKRIEAGLPLTTAKGRTFGYDVIDTKLYVNEEEAKQLQLIYDIFEEEQSITFLQKRLKKLGLKVHTYNRYNNWLTNDLYCGYVSYKDKVHVKGVHEPIISEEQFYRVQEIFTRMGKNPNMNRDNASLLSNLVVCSKCGLGFVHRSKDTMSRGKKYHYRYYSCKTYKHTHELEKCGNKTWRADKLEELIINRVNNYSFASRNADKEDELDSLNEKLKIEHARKKRLFDLYINGSYEVSELDSMMNDIDAQINYYESQIEASEELKNNKKIQENLADLATVDFDSLEFREKQLYLKSLINKIYIDGEQVAIDWL

SEQ ID NO: 5646 - protein, 452 aa, synthetic construct
MKAAIYIRVSTREQVENYSIQAQTEKLTALCRSKDWDVYDIFIDGGYSGSNMNRPALNEMLSKLHEIDAVVVYRLDRLSRSQRDTITLIEEYFLKNNVEFVSLSETLDTSSPFGRAMIGILSVFAQLERETIRDRMVMGKIKRIEAGLPLTTAKGRTFGYDVIDTKLYINEEEAKQLRLIYDIFEEEQSITFLQRRLRKLGLKVRTYNRYNNWLTNDLYCGYVSYKDKVHVKGIHEPIISEEQFYRVQEIFTRMGKNPNMNRDSASLLNNLVVCGKCGLGFVHRRKDAMSRDKKYRYRYYSCKTYKHIHELEKCGNKIWRADKLEELIINRVNNYSLASRNVDKEDELDSLNEKLRIEHAKKKRLFDLYINGRYEVSELDSMMNDIDTQINYYESQIEANEELKKNKKIQGNLADLAAVDFDSLEFREKQLYLKSLINKIYIDGEQVTIEWL

SEQ ID NO: 5647 - protein, 485 aa, synthetic construct
MTKKVAIYTRVSTTNQAEEGFSVDEQIDRLTKYAEAMGWQVSDTYTDAGISGAKLERPAMQRLINDIENKAFDTVLVYKLDRLSRSVRDTLYLVKDVFTKNKIDFISLNESIDTSSAMGSLFLTILSAINEFERENIKERMTMGKLGRAKSGKSMMWTKTAFGYCHNRKTGILEIVPLQATIVEQIFTDYLSGISLTRLRDKLNESGHIGKDIPWSYRTLRQTLDNPVYCGYIKFKDSLFEGLHKPIIPYETYLKVQKELEERQQQTYERNNNPRPFQAKYMLSGVARCGYCGAPLKVVLGHKRKDGSRTMKYHCANRFPRKTEGVTVYNDNKKCDSGTYDLSNLENTVIDNLIGFQENNDSLLKIINGNNQPTPDTSSFKEQISQIDKKIQKNSDLYLNDFITMDELKDRTDSLQAEKKLLKAKISENKFNDSTDVFELVKTQLGSIPINELSYDNKKKIVNNLVSKVDVTADNVDIIFKFQLA

SEQ ID NO: 5648 - protein, 485 aa, synthetic construct
MTKKVAIYTRVSTTNQAEEGFSIDEQIDRLTKYAEAMGWQVSDTYTDAGFSGAKLERPAMQRLINDIENKAFDTVLVYKLDRLSRSVRDTLYLVKDVFTKNKIDFISLNESINTSSAMGSLFLTILSAVNEFERENIKERMAMGKLGRAKSGKSMMWTKTAFGYYHNRKTGILEIVPLQAAIVEQIFTDYLSGISLTKLRDKLNESGHIGKDIPWSYRTLRQTLDNPVYCGYIRFKDSLFEGMHKPIIPYETYLKVQKELEERQQQTYERNNNPRPFQAKYMLSGMARCGYCGAPLRIVLGHKRKDGSRTMKYHCANRFPRRTKGVTVYNDNKRCDSGTYDLGNLENTVIDNLIGFQENNDSLLKIINGNNQPILDTSSFKKQISQIDKKIQKNSDLYLNDFITMDELKDRTDSLQAEKKLLKAKISENKFSNSTDVFELVKTQLGSIPINELSYDDKKKIVNNLVSKVDVTADNVNIIFKFQLA

SEQ ID NO: 5649 - protein, 469 aa, synthetic construct
MSYTTPVRAAVYLRISEDRSGEQLGVARQREDCLKLCGQRKWVPVEYLDNDVSASTGKRRPAYEQMLADITAGKIAAVVAWDLDRLHRRPIELEAFMSLADEKRLALATVAGDVDLATPQGRLVARLKASVAAHETEHKKARQRRAARQKAERGHPNWSKAFGYLPGPNGPEPDPRTAPLVKQAYADILAGASLGEVCRQWNDAGAFTITGRPWTTTTLSKFLRKPRNAGLRAYKGARYGPVDRDAIVGKAQWSPLVDEATFWAAQAVLDAPGRAPGRKSVRRHLLTGLASCGKCGNHLAGSYRTDGQVVYVCKACHGVAILADNIVPILYHTVAERLAMPDAVDLLRREIHDTAEAETIRLELETLYGELDRLAVERAEGLLTARQVKISTDIVNARITKLQARQLDQERLRVFDGIPLGTPQVAGMIAGLSPDRFRAVLDVLAEVVVQPVGKSGGTSNPERVQVNWR

SEQ ID NO: 5650 - protein, 469 aa, synthetic construct
MSYTTPVRAAVYLRISEDRSGEQLGVARQREDCLKLCDQRKWVPVEYLDNDVSASTGKRRPAYEQMLADIAAGKIAAVVAWDLDRLHRRPIELEAFMSLADEKRLALATVAGDVDLATPQGRLVARLKGSVAAHETEHKKARQRRAARQKAERGLPNWSKAFGYLPGPNGPEPDPRTAPLVKQAYADILAGASLGDVCRQWNDAGAFTITGRPWTTTTLSKFLRKPRNAGLRAYKGVRYGPVDRDAIVGKAQWSPLVDEATFWAAQAVLDAPGRAPGRKSVRRHLLTGLAGCGRCGNHLAGSYRTDGRVVYVCKACHGVAILADNIEPILYHIVAERLAMPDAVDLLRREVHDAAEAETIRLELETLYGELDRLAVERAEGLLTARQVKISTDIVNAKITKLQACQLDQERLRVFDGIPLGTPQVAGMIAGLSPDRFRAVLDVLAEVVVQPVGKGGRIFNPERVQVNWR

SEQ ID NO: 5651 - protein, 469 aa, synthetic construct
MSYTTPVRAAVYLRISEDRSGEQLGVARQREDCLKLCGQRKWEPVEYLDNDVSASTGKRRPAYEQMLADITAGKIAAVVAWDLDRLHRRPIELEVFMSLADEKRLALATVAGDVDLATPQGRLVARLKGSVAAHETEHKKARQRRAARQKAERGHPNWSKAFGYLPGPDGPEPDPRTAPLVKQAYADILAGASLGDVCRQWNDAGAFTITGRPWTATALSKFLRKPRNAGLRAYKGARYGPVDRDAIVGKAQWSPLVDEATFWAAQAVLDAPGRAPGRKSVRRHLLTGLAGCGKCGNHLAGSYRTDGRVVYVCKACHGVAILADNIEPILYHIVAERLATPDAVDLLRRVIHDAAEAETIRLELGTLYGELDRLAVERAEGLLTARQVKISTDIVSAKIAKLQARQLDQERLRVFDGIPLGTPQVAGMIAELSPDRFRAVLDVLAEVVVQPVGKSGRIFNPERVQVNWR

SEQ ID NO: 5652 - protein, 452 aa, synthetic construct
MKAAIYIRVSTREQVENYSIQAQTEKLTALCRSKDWDVYDIFIDGGYSGSNMNRPALNEMLSKLHEIDAVVVYRLDRLSRSQRDTITLIEEYFLKNNVEFVSLSETLDTSSPFGRAMIGILSVFAQLERETIRDRMVMGKIKRVEAGLPLTTAKGRTFGYDVIDTKLYINEEEARQLRLIYDIFEEEQSIAFLQKRLKRLGFKVRTYNRYISWLTNDLYCGYVSYKDKVHVKGIHEPIISEEQFYRVQEIFTRMGKNPNMNRDSASLLNNLVVCSKCGLGFVHRRKDTMSRGKKYHYRYYSCKTYKHTHELEKCGNKIWRADKLEELIINRVSNYSFASRNVDKEDELDSLNEKLKIERAKKKRLFDLYINGSYEVSELDSMMNDIDAQINYYESQIEVNEELKKDKKIQENLANLATVDFDSLEFREKQLYLKSLINKIYIDGEQVTIEWL

SEQ ID NO: 5653 - protein, 452 aa, synthetic construct
MKAAIYIRVSTHEQVANYSIQAQTEKLIALCRSKDWDVYDIFIDGGYSGSNMNRPALNEMLSKLHEIDAVVVYRLDRLSRSQRDTTTLIEEYFLKNNVEFVSLSETLDTSSPFGRAMIGILSVFAQLERETIRDRMVMGKIKRIEAGLPLTTAKGRTFGYDVIDTKLYINEEEAKQLRLIYDIFEEEQSITFLQKRLKKLGLKVRTYNRYNNWLTNDLYCGYVSYKDKVHVKGIHEPIISEEQFYRVQEIFTRTGKNPNMNRDSASLLNNLVVCSKCGLSFVHRSKDTMSRGKKYHYRYYSCKTYKHTHELEKCGNKTWRADKLEELVINRVNNYSFASRNVDKEDELDSLNEKLEIEHAKKKRLFDLYINGSYEMSELDSMMNDIDAQIDYYESLIEANEELKKNKKIQENLADLAVVDFDSLEFREKQLYLKSLINKIYIDGEQVTIEWL

SEQ ID NO: 5654 - protein, 452 aa, synthetic construct
MKAAIYIRVSTREQVENYSIQAQTEKLTALCRSKDWDVYDIFIDGGYSGSNMNRPALNEMLSKLHEIDAVVVYRLDRLSRSQRDTITLIEEYFLKNNVEFVSLSETLDTSSPFGRAMIGILSVFAQLERETIRDRMVMGKIKRIEAGLPLTTAKGRTFGYDVIDTKLYINEEEAKQLQLIYDIFEEEQSITFLQKRLKKLGFKVHTYNRYNNWLSNDLYCGYVSYKDKVHVKGIHEPIISEEQFYRVQEIFTRMGKNPNMNRDSASLLSNLVVCGKCGLGFVHRRKDAASRDKKYHYRYYSCKTYKHIHELEKCGNKIWRADKLEELIIDRVNNYSLANRNVDKADELDSLNEKLKIEHAKRRRLFDLYINGSYEVSELDSMMNDIDAQINYYESQIEANEELKKDRKIQENLANLATVDFDSLEFREKQLYLKSLINKIYIDGEQVTIEWL

SEQ ID NO: 5655 - protein, 452 aa, synthetic construct
MKAAIYIRVSTREQVENYSIQAQTEKLTALCRSKDWDVYDIFIDGGYSGSNMNRPALSEMLSKLHEIDAVVVYRLDRLSRSQRDTITLIEEYFLKNNVEFVSLSETLDTSSPFGRAMIGILSVFAQLERETIRDRMVMGKIKRVEAGLPLTTAKGRTFGYDVIDTKLYINEEEARQLRLIYDIFEEEQSITFLQKRLKRLGFKVRTYNRYNSWLTNDLYCGYVSYKDKVHVKGIHEPIISEEQFYRVQEIFTRMGKNPNMNRDSASLLNNLVVCGKCGLGFVHRRKDTLSRGKKYHYRYYSCKTYKHIHELEKCGNKIWRADKLEELIINRVNDYSLASRNVDEEDELDSLNEKLRIEHAKKKRLFDLYINGSYEVSELDCKMNDIDAQINYYESQIEANEELKKDKKIQESLANLATVDYDSLEFREKQLYLKSLINKIYIDGEQVTIEWL

SEQ ID NO: 5656 - protein, 452 aa, synthetic construct
MKAAIYIRVSTQEQVENYSIQAQTEKLTALCRSKDWDVYDIFIDGGYSGSNMNRPALNEMLSKLHEIDAVVVYRLDRLSRSQRDTTTLIEEYFLKNNVEFVSLSETLDTSSPFGRAMIGILSVFAQLERETIRDRMVMGKIKRIEAGLPLTTAKGRTFGYDVIDTKLYINEEEAKQLQLIYDIFEEVQSITSLQKRLKKLGFKVRTYNRYNNWLTNDLYCGYVSYKDKVHVKGIHEPIISEVQFYRVQEIFTRMGKNPNMNRDSASLLNNLVVCSKCGLGFVHRSKDTMSRGKKYHYRYYSCKTYKHTHELEKCGNKTWRADKLEELIINRVNNYSFASRNADKEDELDSLNEKLKIEHARKKRLFDLYISGSYEVSELDSMMNDIDAQINYYECQIEASEELKKNKKVQENLADPTTVDFDSLEFREKQLYLKSLINKIYIDGEQVTIEWL

SEQ ID NO: 5657 - protein, 485 aa, synthetic construct
MTKKVAIYTRVSTTSQAEEGFSIDEQTDRLTKYAEAMGWQVSDTYTDAGFSGAKLERPAMQRLINDIENKAFDTVLVYKLDRLSRSVRDTLYLVKDVFTKNKIDFISLNECIDTSSAMGSLFLTILSAINEFERENIKERMTMGKLGRAKSGKSMMWTKTAFGYYHNRKTGILEIVPLQATIVEQIFTDYLSGISLTKLRDKLNESGHIGKDIPWSYRTLRQTLDNPVYCGYIKFKDSLFEGMHKPIIPYETYLRVQKELEERQQQTYERNNNPRPFQAKYMLSGMARCGYCGAPLRIVLGHKRKDGSRTMKYHCANRFPRKTKGVTVYNDNKKCDSGTYDLSNLENIVIDNLIGFQENNDSLLKIINGNNRPILDTSSFKKQISQIDKKIQKNSDLYLNDFITLDELKDRTDSLQAEKKLLKAKISENKFNDSADVFELVKTQLGSIPINELSYDDKKKIVNNLVSKVDVTADNVDIIFKFQLA

SEQ ID NO: 5658 - protein, 452 aa, synthetic construct
MKAAIYIRVSTREQVENYSIQAQTEKLTALCRSKDWDVYDIFIDGGYSGSNMNRPALNEMLSKLHEIDAVVVYRLDRLSRSQRDTITLIEEYFLKNNVEFVSLSETLDTSSPFGRAMIGILSVFAQLERETIRDRMVMGKIKRIEAGLPLTTAKGRTFGYDVIDSKLYINEEEAKQLQLIYDIFEEEQSITFLQKRLKKLGFKVRTYSCYNNWLTNDLYCGYVSYKDKVHVKGIHEPIISEEQFYRVQEIFTRMGKNPNMNRDSASLLNSLVVCSKCGLGFVHRRKDTVSRGKKYHYRYYSCKTYKHIHELEKCGNKIWRADKLEELIINRVNNYSFASRNVDKEDELDSLNEKLKNEHAKRKRLFDLYINGSYNVSELDSMMNDIDAQINYYESQIEANEELKKNKRIQEDLADLATVDFDSLEFREKQLYLKGLINKIYIDGEQVTIEWL

SEQ ID NO: 5659 - protein, 452 aa, synthetic construct
MKAAIYIRVSTREQVENYSIQAQTEKLTALCRSKDWDVYDIFIDGGYSGSNMNRPALNEMLSKLHEIDAVVVYRLDRLSRSQRDTITLIEEYFLKNNVEFVSLSETLDTSSPFGRAMIGILSVFAQLERETIRDRMVMGKIKRIEAGLPLTTAKGRTFGYDVIDTKLYINEEEAKQLQLIYDIFEEEQSITFLQKRLKKLGFKVRTYSCYNNWLTNDLYCGYVSYKDKVHVKGIHEPIISEEQFYRVQEIFTRMGKNPNMNRDSASLLNNLVVCSKCGLGFVHRRKDTMSRGKKYHYRYYSCKTYKHIHELEKCGNKIWRADKLEELIINRVNNYSLASRNVDKEDELDSLSEKLKVEHAKKKRLFELYINGSYEVSELDSLMNDIDAQINYYESQIEANEELKKSKKIQENLADLATVDFDGLEFREKQLYLKSLINKIYIDGEQVTIEWL

SEQ ID NO: 5660 - protein, 452 aa, synthetic construct
MKAAIYIRVSTREQVENYSIQAQTEKLTALCRSKDWDVCDIFVDGGYSGSNMNRPALNEMLSKLHEIDAVVVYRLDRLSRSQRDTITLIEEYFLKNNVEFVSLSETLDTSSPFGRAMIGILSVFAQLERETIRDRMVMGKIKRIEAGLPLTTAKGRTFGYDVIDTKLYINEEEAKQLQLIYDIFEEERSITFLQKRLKKLGFKVHTYNRYNNWLTNDLYCGYVSYKDKVHVKGIHEPIISEEQFYRVQEIFARMGKNPNMNRDSASLLNSLVVCSKCGLGFVHRRKDTMSRGKKYHYRYYSCKTYKHTHELEKCGNKIWRADKLEELIINRVNNYSFASRNVDKEDELDSLNEKLKTEHARKKRLFDLYINGSYEVSELDSMMNDIDAQISYYESQIEANEELRKNKKIQENLADLATVDFDSLEFREKQQYLKSLINKIYIDDEQVTIEWL

SEQ ID NO: 5661 - protein, 469 aa, synthetic construct
MSYTTPVRAAVYLRISEDRSGEQLGVARQREDCLKLCDQRKWVPVEYLDNDVSASTGKRRPAYEQMLADIAAGKIAAVVAWDLDRLHRRPIELEAFMSLADEKRLALATVAGDVDLATPQGRLVARLKGCVAAHETEHKKARQRRAARQKAERGLPNWSRAFGYLPGPNGPEPDPRAAPLVKQAYADILAGASLGDVCRQWNDAGAFTITGRPWTTTTLSKFLRKPRNAGLRAYKGARYGPVDRDAIVGKAQWSPLVDEATFWAAQAVLDAPGRAPGRKSVRRHLLTGLAGCGKCGNHLAGSYRTDGRVVYVCKACHGVAILADNIEPILYHIVAERLAMPDAVDLLRREIHDAAEAETIRLELETLYGELDRLAVERAEGLLTARQVRISTDIVSAKITKLQARQLDQERLRVFDGIPLGTPQVAGTIAELSPDRFRAVLDVLAEVVVQPVGKGGGIFNPERVQVNWR

SEQ ID NO: 5662 - protein, 485 aa, synthetic construct
MTKKVAIYTRVSTTNQAEEGFSIDEQIDRLTKYAEAMGWQVSDTYTDAGLSGAKLERPAMQRLINDIENKAFDTVLVYKLDRLSRSVRDTLYLVKDVFTKNKIDFISLSESIDTSSAMGSLFLTILSAINEFERENIKERMTMGKLGRAKSGKSMMWTKTAFGYYHNRKTGILEIVPLQATIVEQIFTDYLSGISLTKLRDKLNESGHIGKDIPWSYRTLRQTLDNPVYCGYIKFKDSLFEGLHKPIIPYETYLKVQKELEERQQRTYERNNNPRPFQAKYMLSGTARCGYCGSPLRIVLGHKRKDGSRTMKYHCANRFPRKTKGITVYNDNKKCDSGTYDLRDLENTVIDNLIGFQENNDSLLKIINGNNQPILDTSSLEKQISQIDKKIQKNSDLYLNNFITMDELKDRTDSLQAERKLLKAKISENKFNDSTDVFELVKTQLGSIPINELSYDNKKKIVNNLVSKVDVTADNVGIIFKFQLA

SEQ ID NO: 5663 - protein, 452 aa, synthetic construct
MKTAIYIRVSTREQVENYSIQAQTEKLTALCRSKDWDVYDIFIDGGYSGSNMNRPALNEMLSKLHEIDAVAVYRLDRLSRSQRDTITLIEEYFLKNNVEFVSLSETLDTSSPFGRAMIGILSVFAQLERETIRDRMVMGRIKRVEAGLPLTTAKGRTFGYDVIDTKLYINEEEARQLQLIYDIFEEEQSITSLQKRLKKLGFKVRTYSRYNNWLTNDLYCGYVSYKDKVHVKGIHEPIISEEQFYRVQEIFTRMGKNPNMNRDSASLLNNLVVCSKCGLGFVHRRKDTTSRGKKYHYRYYSCKTYKHIHELERCGNKIWRADKLEELIINRVSNYSFASRNVDKEDELDSLNEKLEIEHAKKKRLFDLYINGSYEVSELDSMMNDIDAQINYYEGQIEANEELRKNKKIQENLVDLATVDFDSLEFREKQLYLKSLINKIYIDGEQVTIEWL

SEQ ID NO: 5664 - protein, 484 aa, synthetic construct
MTKKVAIYTRVSTTNQAEEGFSIDEQVDRLTKYAEAMGWRVSDTYTDAGSSGAKLERPAMQRLINDIEHKAFDTVLVYKLDRLSRSVRDTLYLVKDVFTKNKIDFISLSESIDTSSAMGSLFLTILSAINEFERENIKERMTMGKLGRAKSGKSMMWTKTAFGYYHNRKTGILEIVPLQATIVEQIFTDYLSGISLTKLRDKLNESGHIGKDIPWSYRTLRQTLDNPVYCGYIKFKGSLFEGMHKPIIPYETYLKVQKELEERQQTYERNNNPRPFQAKYMLSGMARCGYCGAPLRIVLGHKRKDGSRTMKYHCANRFPRKTKGVTVYNDNKKCDSGTYDLSNLENTVINNLIGFQEDDDSLLKIINGNNQPILDTSSFKKQISQIDKKIQKISDLYLNDFITMDELKDRTDSLQAEKKLLEAKISENKFNDSTDVFELVKTQLGSIPINELSYDNKKKIVNNLVSKVDVTADSVDIIFKFQLA

SEQ ID NO: 5665 - protein, 452 aa, synthetic construct
MKAAIYIRVSTQEQVENYSIQAQTEKLTALCRSKDWDVYDIFIDGGYSGSNMNRPALNEMLGKLHEIDAVVVYRLDRLSRSQRDTITLVEEYFLKNNVEFVSLSETLDTSSPFGRAMIGILSVFAQLERETIRDRMVMGKIKRVEAGLPLTTAKGRTFGYDVIDTKLYINDEEAKQLQLIYDIFEEERSITFLQKRLKKLGFKVRTYSCYNNWLTNDLYCGYVSYKDKVHVKGVHEPIISEEQFYRVQEIFTRMGKNPNMNRDSASLLNNLVVCSKCGLGFVHRRKDTVSRGKKYHYRYYSCKTYKHIHELEKCGNKIWRADKLEELIINRVNNYSFASRNADKEDELDSLNEKLKIEHAKKKRLVDLYINGSYEVSELDSMMSDIDAQISYYESQIEANEELRKNKKIQENLADLATVDFDSLEFREKRLYLKSLINKIYIDDEQVTIEWL

SEQ ID NO: 5666 - protein, 485 aa, synthetic construct
MTKKVAIYTRVSTTNQAEEGFSVDEQIDRLTKYAEAMGWQVSDTYTDAGFSGAKLERPAMQRLINDIENKAFDTVLVYKLDRLSRSVRDTLYLVKDVFTKNKIDFISLSESIDTSSAMGSLFLTILSAINEFERENIKERMTMGKLGRAKSGKSMMWTKTAFGYYHNRKTGILEIVPLQATIVEQIFTDYLSGISLTKLRDKLNESGHIGKDIPWSYRTLRQTLDNPVYCGYIKFKDSLFEGMHKPIIPYETYLKVQKELEERQQQTYERNNNPRPFQAKYMLSGMARCGYCGAPLKIVLGHKRKDGSRTMKYHCANRFPRKTKGVTVYNDNKKCDSGTYDLSSLENTVIDNLTGFQENNDSLLKIINGNNQPTLDTSSFKKQISQIDKKIQKNSDLYLNDFITMDELKDRTDRLQAEKKLLKAKISENKLNDSTDVLELVKTQLGSIPINELSYDNKKKIVNNLVSKVDVTADNVDIIFKFQLA

SEQ ID NO: 5667 - protein, 469 aa, synthetic construct
MSYTTPVRAAVYLRISEDRSGEQLGVARQREDCLELCDQRKWVPVEYLDNDVSASTGKRRPAYEQMLADITAGKIAAVVAWDLDRLHRRPIELEAFMSLADEKRLALATVAGDVDLATPQGRLVARLKGSVAAHETEHKRARQRRAARQKAERGLPNWSKAFGYLSGPNGPEPDPRTAPLVKQAYADILAGASLGDVCRQWNAAGAFTITGRPWATTTLSKFLRKPRNAGLRAYKGARYGPVDRDAIVGKAQWSPLVDEATFWAAQAVLDAPGRAPGRKSVRRHLLTGLAGCGKCGNHLAGSYRTDGKVVYVCKTCHGVAILADNIEPILYHIVAARLAMPDAVDLLRREIHDAAEAETIRLELETLYDELDRLAVERTEGLLTARQVKISTDIVNAKITKLQARQLDQERLRVFDGIPLGTPQVAGMIAELSPDRFRAVLDVLAEVVVQPVGKSGRTFNPERVQVNWR

SEQ ID NO: 5668 - protein, 469 aa, synthetic construct
MRYTTPVRAAVYLRISEDRSGEQLGVARQREDCLKLCGQRKWVPVEYLDNDVSASTSKRRPAYEQMLADITAGKIEAVVAWDLDRLHRRPIELEAFMSLADEKHLALATVAGDVDLATPQGRLVARLKGCVAAHETEHKKARQRRAARQKAERGLPNWSRAFGYLPGPNGPEPDPRTAPLVKQAYADILAGASLGDVCRQWNDAGAFTITGRPWTSTTLSKFLRKPRNAGLRAYKGARYGPVDRDAIVGKAQWSPLVEEATFWAAQAVLDAPGRAPGRKSVRRHLLTGLAGCGKCGNHLAGSYRTDGRVVYVCKACHGVSILAVNIEPILYRIVAGRLAMPDAVDLLRREIHDAAEAETIRLGLETLYGELDRLAVERAEGLLTARQVKISTDIVNAKIAKLQARQLDQERLRVFDGIPLGTPQVAGMIAELSPDRFRAVLDVLAEVVVQPVGKSGRIFSPERVQVNWR

SEQ ID NO: 5669 - protein, 485 aa, synthetic construct
MTKKVAIYTRVSTTNQAEEGFSIDEQIDRLTKYAEAMGWQVSDTYTDAGFSGAKLERPAMQRLINDIENKAFDTVLVYKLDRLSRSVRDTLYLVKGVFTKNKIDFISLNESINTSSAMGSLFLTILSAINEFEHENIKERMTMGKLGRAKSGKSMMWTKTAFGYYHNRKTGILEIVPLQATIVEQIFTDYLSGISLTKLRDKLNESGHIGKDIPWSYRTLRQTLDNPVYCGYIKFKGSLFEGMHKPIIPYETYLKVQKELEERQQQTYERNNNPRPFQAKYMLSGMARCGYCGAPLRIVLGHKRKDGSRTMKYHCVNRFPRKTKGITVYNDNKKCDSGTYDLSNLENAVIDNLIGFQENNDSLLKIINGNDQPILDTSGLKNQISQIDKKIQKNSELYLNDFITMDELKDRTDSLQAEKKLLKAKISENKFDDSTDVFELVKTQLGNIPINELSYDDKKKIVNNLVSKVDVTADNVNIIFKFQLA

SEQ ID NO: 5670 - protein, 452 aa, synthetic construct
MKAAIYIRVSTREQVENYSIQAQTEKLTALCRSKDWDVYDIFIDGGYSGSNMNRPALNEMLSKLHEIDAVVVYRLDRLSRSQRDTTTLIEEYFLKNNVEFVSLSETLDTSSPFGRAMIGILSVFAQLERETIRDRTVMGKIKRIEAGLPLTTAKGRTFGYDVIDTKLYINEEEAKQLQLIYDIFEEERSITSLQKRLKKLGFKVRTYNRYNNWLTNDLYCGYVSYKDKVHVKGIHEPIISEEQFYRVQEIFARMGKNPNMNRDSASLLSNLVVCSKCGLSFVHRRKDTMSRGKKYHYRYYSCKTYKHTHELEKCGNKTWRADKLEELIINRVNNYSFASRNADKEDELDSLNEKPKIEHARKKRLFDLCINGSCEVSELDSIMNEIDAQINYYESQIVANEELKKNKKIQESLANLATVDFDSLEFREKQLYLKSLINKIYIDGEQVTIEWL

SEQ ID NO: 5671 - protein, 469 aa, synthetic construct
MSYITPVRAAVYLRISEDRSGEQLGVARQREDCLKLCGQRKWVPVEYLDNDVSASTGKRRPAYEQMLADITAGKIAAVVAWDLDRLHRRPIELEAFMSLADEKRLALATVAGDVDLATPQGRLVARLKGCVAAHETEHKKARQRRAARQKAERGLPNWSKAFGYLPGPNGPEPDPRTAPLVEQAYADILAGASLGDVCRQWNDAGAFTITGRPWTTTTLSKFLRKPRNAGLRAYKGARYGPVDRDAIVGKAQWSPLVDEATFWAAQAVLDAPGRAPGRKSVRRHLLTGLASCGKCGNHLAGSYRTDGRVVYVCKACHGVAILADNIEPILYRIVVERLAMPDAVDLLCREIHDAAEAETIRLELETLYGELDRLAVERAEGLLTARQVKISADIVNAKITKLQARQLDQERLRVFDGIPLGTPQVAGMIAELSPDRFRAVLDVLAEVVVQPVGKSGGIFNPERVQVNWR

SEQ ID NO: 5672 - protein, 469 aa, synthetic construct
MSYTTPVRAAVYLRISEDRSGEQLGVARQREDCLKLCDQRKWEPVEYLDNDVSASTGKRRPAYERMLADITAGKIVAVVAWDLDRLHRRPIELEAFMSLADEKRLALATVAGDVDLATPQGRLVARLKGSVAAHETEHKKARQRRAARQKAERGYPNWSKAFGYLPGPNGPEPDPRTAPLVKQAYADILAGASLGDVCRQWNDAGASTITGRPWTTTTLSKFLRKPRNAGLRAYKGARYGPVDRDAIVGKAQWSPLVDEATFWAAQAVLDAPGRAPGRKSVRRHLLTGLAGCGKCGNHLSGSYRTDGRVVYVCKACHGVAILADNIEPILYHIVAERLAMPDAVGLLRREIHDAAEAETIRLELETLHDELDRLAVERAEGLLTARQVKISTDIVNAKITKLQTRQLDQERLRVFDGIPLGTPQVAGMIAELSPDRFRAVLDVLAEVVVQPVGKGGRIFNSERVQVNWR

SEQ ID NO: 5673 - protein, 452 aa, synthetic construct
MKAAIYIRVSTREQVENYSIQAQTEKLTALCRSKDWEVYDIFIDGGYSGSNMNRPALNEMLSKLHEIDAVVVYRLDRLSRSQRDTITLIEEYFLKNNVEFVSLSETLDTSSPFGRAMIGILSVFAQLERETIRDRMVMGKIKRIEAGLPLTTAKGRTFGYDVIDTKLYINEEEAKQLQLIYDIFEEEQSITFLQKRLKELGFKVRSYNRYNNWLTNDLYCGYVSYKDKVHVKGIHEPIISEEQFYRVQEIFTRMGKNPNMNRDSASLLNNLVVCSKCGLGFVHRRKDAKSRDKRYHYRYYSCKTYKHIHELEKCGNKIWRADKLEELIINRVNDYSFASRNVDKEGELNSLNEKLKIEHAKKKRLFDLYINGSYEVGELDSLMSDIDAQINYYESRIEANEELKENKKIQEDLADLATVDFDSLEFREKQLYLKSLINKIYIDGEQVTIEWL

SEQ ID NO: 5674 - protein, 452 aa, synthetic construct
MKAAIYIRVSTQEQVENYSIQAQTEKLTALCRSKDWDVYDIFIDGGYSGSNMNRPALNEMLSKLHEIDAVVVYRLDRLSRSQRDTTTLIEEYFLKNNVEFVSLSETLDTSSPFGRAMIGILSVFAQLERETIRDRMVMGKIKRIEAGLPLTTAKGRTFGYDVIDTKLYINEEEAKQLQLIYDVFEEEQSITSLQKRLKKLGFKVRTYNCYNSWLTNDLYCGYVSYKDKVHVKGIHEPIISEEQFYRVQEIFTRMGKNPNMNRVSASLLNNLVVCSKCGLGFVHRRKDTVSGGKKYHYRYYSCRTYKHTHELEKCGNKTWRADKLEELVINRVNNYSFAGRNVDKEDELDSLNEKLKIEHAKRKRLFDLYINGSYEVSELDSMMNDIDAQINYYESQIEANEELKKNRKIQENLADLATVDFDSLEFREKQLYLKSLINKIYIDGEQVTIEWL

SEQ ID NO: 5675 - protein, 452 aa, synthetic construct
MKAAIYIRVSTREQVENYSIQAQTEKLTALCRSKDWGVYDIFIDGGYSGSNMNRPALNEMLSKLHEIDAVVVYRLDRLSRSQRDTITLIEEYFLKNNVEFVSLSETLDTSSPFGRAMIGILSVFAQLERETIRDRMVMGKIKRIEAGLPLTTAKGRTFGYDVIDTKLYINEEEAKQLRLVYDIFEEEQSITFLQKRLKKLGFKVRTYNRYNNWLTNDLYCGYVSYKDKVHVKGIHEPIISEEQFYRVQEIFARMGKNPNMNRDSASLLNNLVVCSKCGLGFVHRRKDIMSRGKKYHYRYYSCKTYKHIHELEKCGNKIWRADKLEELIIDRVNNYSFAGRNADKEDELDSLNEKLKIEHAKKKRLFDLYINGSYEVSELDSMMKDIDAQINYYESQIEANEELKKNKKIQENLANLATVDFDSLEFREKQLYLKSLISKIYIDGEQVTIEWL

SEQ ID NO: 5676 - protein, 452 aa, synthetic construct
MKAAIYIRVSTQEQVENYSIQAQTEKLTALCRSKDWDVYDIFIDGGYSGSNMNRPALNEMLSKLHEIDAVVVYRLDRLSRSQRDTITLIEEYFLKNDVEFVSLSETLDTSSPFGRAMIGILSVFAQLERETIRERMVMGKIKRIEAGLPLTTAKGRTFGYDVIDTKLHINEEEAKQLRLIYDIFEEEQSITFLQKRLKELGFKVHTYSRYNNWLTNDLYCGYVSYKDKVHVKGIHEPIISEEQFYRVQEIFARMGKSPNMNRDSASLLSNLVVCSKCGLGFVHRRKDTMSRGKKYHYRYYSCKTYKHTHELEKCGNKIWRADKLEELIINRVNSYSFASRNVDKEDELDSLNEKLKIEHAKKKRLFDLYVNGSYEVSELDSMMNDIDAQINYYESQIEANEEPRKNKKIQESLANLATVDYDSLEFREKQLYLKSLINKIYIDGEQVTIEWL

SEQ ID NO: 5677 - protein, 469 aa, synthetic construct
MSYTTPVRAAMYLRISEDRSGEQLGVARQREDCLKLCNQRKWEPVEYLDNDVSASTGKRRPAYEQMLADITAGKIAAVVAWDLDRLHRRPIELETFMSLADEKRLALATVAGDVDLATPQGRLVARLKGSVAAHETEHKRARQRRAARQKAERGHPNWSKAFGYLPGPNGPEPDPRTAPLVKQAYADILAGASLGDVCRQWNDAGAFTITGRPWTTTTLSKFLRKPRNAGLRAYKGARYGPVDRDAIVGKAQWSPLVDEATFWAAQAVLDAPGRAPGRKSVRRHLLTGLAGCGKCGNHLAGSYRTDGRVVYVCKACHGVAILADNIEPILYHIVAERLAMPNAVDLLRREIHDAAEAETIRLELEALYGELDCLAVERAEGLLTARQVKISTDIVNAKITKLQARQLDQERLRVFGGIPLGTPQVAGMIAELSPDRFRAVLDVLAEVVVQPVGKSGRIFNPERVQVNWR

SEQ ID NO: 5678 - protein, 469 aa, synthetic construct
MCYTTPVCAAVYLRISEDRSGEQLGVARQREDCLKLCDQRKWVPVEYLDNDVSASTGKRRPAYEQMLADITAGKIAAVVAWDLDRLHRRPIELEAFMSLADEKRLALATIAGDIDLATPQGRLVARLKGSVAAHETEHKKARQRRAARQKAERGYPNWSKAFGYLPGPNGPEPDPRTAPLVKQAYADILAGASLGDVCRQWNGAGAFTITGRPWTTTTLSKFLRKPRNAGLRAYKGARYGPVDRDAIVGKARWSPLVDEATFWAAQAVLDAPGRAPGRKSVRRHLLTGLAGCGKCGNHLAGSYRTDGRIVYVCKACHGVAILADNIEPVLYRIVAERLAMPDAVGLLRREIHDAAEAETTRLELETLYGELDCLAVERAEGLLTARQVKICTDIVNAKITKLQARQQDQERLRVLDGIPLGTPQVADTIAELSPDRFRAVLDVLAEVVVQPVGKSGSIFNPERVQVNWR

SEQ ID NO: 5679 - protein, 452 aa, synthetic construct
MKAAIYIRVSTQEQVGNYSIQAQTEKLTALCRSKGWDVYDIFIDGGYSGSNMNRPALNEMLSKLHEIDAVVVYRLDRLSRSQRDTTTLIEEYFLKNNVEFVSLSETLDTSSPFGRAMIGILSVFAQLERETIRDRMVMGKIKRIEAGLPLTTAKGRTFGYDVIDTKLYINEEEAKQLQLIYDIFEEEQSITSLQKRLKKLGFKVRTYNRYNNWLTNDLYCGYVSYKDKVHVKGIHEPIISEEQFYRVQEIFTRMGKNPNMNRGSASLLSNLVVCSKCGLGFVHRSKDTMSRGKKYHYRYYSCKTYKHTHELEKCGNKTWRADKLEELIISRVNNYSFASRSVDKEDELDGLNEKLKIEHAKRKRLFDLYINGSYEVSELDSMMNDIDAQINYYESQIEANEELKENKKIQENLAELATVDFDSLEFREKQLYLKSLINKIYIDGEQVTIEWL

SEQ ID NO: 5680 - protein, 452 aa, synthetic construct
MKAAIYIRVSTREQVENYSIQAQTEKLTALCRSKDWDVYDIFIDGGYSGSNMNRPALNEMLSKLHEIDAVVVYRLDRLSRSQRDTITLIEEYFLKNNVEFVSLSETLDTSSPFGRAMIGILSVFAQLERETIRDRMVMGKIKRIEAGLPLTTAKGRTFGYDVIGTKLYINEEEAKQLQLIYDIFEEEQSITFLQKRLKELGFKVRTYNCYNNWLTNDLYCGYVSYKDKVHVKGIHEPIISEEQFYRVQEIFTRMGKNPNMNRDSASLLNNLVVCSKCGLSFVHRRKDAMSRDKKYHYRYYSCKTYKHIHELEKCGNKIWRADKLEELIINHVNSYSLASRNVDKEDELDSLSEKLRVEHAKKKRLFDLYINGSYEVSELDSVMNDIDAQINYYESQIKANEELKRNKKIQENLAHLATVDFDSLEFREKQLYLKSLINKIYIDGEQVTIEWL

SEQ ID NO: 5681 - protein, 485 aa, synthetic construct
MTRKVAIYTRVSTTNQAEEGFSIDEQIDRLTKYAEAMGWQVSDTYTDAGLSGAKLERPAMQRLINDIEDKAFDTVLVYKLDRLSRSVRDTLYLVKDVFTKNKIDFISLNESIDTSSAMGSLFLTILSAINEFERENIKERMTMGKLGRAKSGKSMMWTKTAFGYYHNRKTGILEIVPLQATIVEQIFTDYLSGISLTKLRDKLNESGHIGKDIPWSYRTLRQTLDNPVYCGYIKFKGSLFEGMHKPIIPYETYLKVQKELEERQQQTYERNNNPRPFQAKYMLSGMARCGYCGAPLKVVLGHKRKDGSRTMKYHCANRFPRKTEGVTVYNDNKKCESGTYDLSDLENTVIDNLIGLQENNDSLLKIINGNNQPILDTSSFEKQISQIDKKIQKNSDLYLNDFITMDELKDRTDSLQAEKKLLKAKISETKFNDSADVFELVKAQLGSIPINELSYDNKKKIVNNLVSKVDVTADNVDIIFKFQLA

SEQ ID NO: 5682 - protein, 469 aa, synthetic construct
MSYTTPVRAAVYLRISEDRSGEQLGVARQREDCLKLCDQRKWVPVEYLDNDVSASTGKRRPAYEQMLADITAGKIAAVVAWDLDRLHRRPIELEAFMSLADEKRLALATVAGDVDLATPQGRLVARLKGSVAAHETEHKKERQRRAARQKAERGHPNWSKAFGYLPGPNGPEPDPRAAPLVKQAYADILAGASLGDVCRQWNDAGAFTITGRPWTTTALSKFLRKPRNAGLRAYKGARYGPVDRDAIVGKAQWSPLVDEATFWAAQAVLDAPGRAPGRKSVRRHLLTGLACCGKCGNHLAGSRRTDGQVAYVCKACHGVAILADNIEPILYHIVAERLAMPDAVGLLHREIHDAAEAETIRLELETLYGELDLLAVERAEGLLTARQVKIGTDIVNAKITKLQARRLDQERLRVFDGIPLGTPQVAGMIAELSPDRFRAVLDVLAEVVVQPVGKGGRIFNPERVQVNWR

SEQ ID NO: 5683 - protein, 469 aa, synthetic construct
MSYTTPVRAAVYLRISEDRSGEQLGVARQREDCLKLCDQRKWVPVEYLDNDVSASTGKRRPAYERMLADITAGKIAAVVAWDLDRLHRRPIELEAFMSLADEKRLALATVAGDVDLATPQGRLVARLKGSVAAHETEHKKARQRRAARQKAERGHPNWSKAFGYLPGPNGPEPDPRTAPLVRQAYADILAGASLGDVCRQWNDAGAFTITGRPWTTTALSKFLRKPRNAGLREYKGARYGPVDRDAIVGKAQWSPLVDEATFWAAQAVLDAPGRAPGRKSVRRHLLTGLAGCGKCGDHLAGSYRTDGRVVYVCKACHGVAILADNIEPILYHIVAERLAMPDAVDLLRREIHDAAEAETIRLELETLYGELDRLAIERAEGLLTARQVKISTDIVNAKITRLQARQLDQERLRVFDGIPLGTPRVGGMIAELSPDRFRAVLDVLAEVVVQPAGKSGRIFNPERVQVNWR

SEQ ID NO: 5684 - protein, 469 aa, synthetic construct
MCYTTPVRAAVYLRISEDRSGEQLGVARQREDCLKLCDQRKWVPVEYLDNDVSASTGKRRPAYEQMLADITAGKIAAVVAWDLDRLHRRPIELEAFMSLADEKRLALATVAGDVDLATPQGRLIARLKGSVAAHETEHKKARQRRAARQKAERGHPNWSKAFGYLPGPNGPEPDPRTAPLVKQAYADILAGASLGDVCRQWNDAGAFTITGRPWTTTTLSKFLRKPRNAGLRAYRGARYGPVDRDAIVGKAQWGPLVDEATFWAAQAVLDAPGRAPGRKSVRRHLLTGLAGCGKCGNHLAGSYRTDGKVVYVCKACHGVAILADNIEPILYHIVAERLAMPDAVDLLRREIHDAAEAETIRLELETLYGELDRLAVERAEGLLTARQVKISTDIVNAKITRLQARQQDQERLRVLDGIPLGTPQVAGMIAELSPDRFRAVLDVLAKVVVQPVGKGGRIFNPERVQVNWR

SEQ ID NO: 5685 - protein, 452 aa, synthetic construct
MKAAIYIRVSTREQVENYSIQAQTEKLTALCRSKDWDVYDVFIDGGYSGSNMNRPALNEMLSRLHEIDAVVVYRLDRLSRSQRDTITLIEEYFLRNNVEFVSLSETLDTSSPFGRAMIGILSVFAQLERETIRDRMVMGKIKRIEAGLPLTTAKGRTFGYDVIDTKLYINEEEAKQLQLIYDIFEEVQSITFLQKRLKELGFRVRTYNRYNNWLTNDLYCGYVSYKDKVHVKGIHEPIISEEQFYRVQEIFTRMGKNPNMNRDSASLLNNLVVCGKCGLGFVHRRKDAMSRDKKYHYRYYSCKTYKHIHELEKCGNKIWRADELEELVINRVNSYSVASRNVDKEDELGSLNEKLKIEHAKKKRLFDLYIDGRYEVSELDSMMSDIDAQINYYESQIEANEELKKNKKIQENLAYLATVDFDSLEFREKQLYLKSLINKIYIDGEQVTIDWL

SEQ ID NO: 5686 - protein, 469 aa, synthetic construct
MSYTTPVRAAVYLRISEDRSGEQLGVARQREDCLKLCDQRKWVPVEYLDNDVSASTGKRRPAYEQMLADITAGKIAAVVAWDLDRLHRRPIELEAFMSLADEKHLALATVAGDVDLATPQGRLVARLKGSVAAHETEHKRARQRRAARQKAERGLPNWSKAFGYLPGPNGPEPDPRTAPLVKQAYADILAGASLGDVCRQWNDAGALTTTGRPWTTTALSKFLRKPRNAGLRAYNGARYGPVDRDAIVGKAQWSPLVDEATFWAAQAVLDAPGRAPGRKSVRRHLLTGLAGCGKCGNHLAGSYRTDGRVAYVCKACRGVSILADNIEPILYHIVAERLAMPDAVDLLRREIHDAAEAEAIRLELETLYGELDRLAVERAEGLLTARQVKISTDIVNAKITKLQARQLDQERLRVFNGIPLGTPQVAGVIAELSPDRFRAVLDVLAEVVVQPVGKGGRIFNPERVQVNWR

SEQ ID NO: 5687 - protein, 469 aa, synthetic construct
MCYTTPVRAAVYLRISEDRSGEQLGVARQREDCLKLCGQRKWEPVEYLDNDVSASTGKRRPAYEQMLADITAGKIAAVVAWDLDRLHRRPIELEAFMSLADEKRLALATVAGDVDLATPQGRLVARLKGSVAAHETEHKKARQRRAARQKAERGHPNWSKAFGYLPGPNGPEPDPRTAPLVKQAYVDILAGASLGDVCRQWNDAGAFTITGRPWTTTTLSKFLRKPRNAGLRAYKGARFGPVDRDAIVGKAQWSPLVDEATFWAAQAVLDAPGRAPGRKSVRRHLLTGLAGCGKCGNHLGGSYRTDGRVAYVCKTCHGVAILADNIVPILYHIVAERLAMPDAVDLLRREIHDAAEAEAIRLELETLHGELDRLAVERAEGLLTARQVKISTDIVSAKITKLQARLQDQERLRVLDGIPLGTPQVAGKIAELSPNRFRAVLDVLAEVVVQPVGKSGRVFNPERVQVNWR

SEQ ID NO: 5688 - protein, 452 aa, synthetic construct
MKAAIYIRVSTREQVENYSIQAQTEKLTALCRSKDWDVYDIFIDGGYSGSNVNRPALNEMLGKLHEIDAVVVYRLDRLSRSQRDTVTLIEEYFLKNNVEFVSLSEALDTSSPFGRAMIGILSVFAQLERETIRDRMVMGKIKRIEAGLPLTTAKGRTFGYDVIDTKLYINEEEAKQLQLIYDIFEEERSITSLQKRLKKLGFKVRTYSRYYGWLTNDLYCGYVSYKDKVHVEGIHEPIISEEQFYRVQEIFTRMGKNPNMNRDSASLLNNLVVCSKCGLGFVHRRKDTMSRGKKYHYRYYSCKTYKHPHELEKCGNKIWRADKLEELIINRVNNYSFASRNVDKEDELDSLNEKLKVEHAKRKRLFDLYINGSYEVSELDSMMNVIDAQINYYESQIEANEELKKNKKIQESLANLATVDYDSLEFREKQLYLKSLINKIYIDGEQVTIEWL

SEQ ID NO: 5689 - protein, 469 aa, synthetic construct
MSYTTPVRAAVYLRISEDRSGEQLGVARQREDCLKLCGQRKWVPVEYLDNDVSASTGRRRPAYEQMLADITAGKIAAVVAWDLDRLHRRPIELEAFMSLADEKRLALATVAGDVDLATPQGRLVARLKGCVAAHETEHKKARQRRAARQKAERGHPNWSKAFGYLPGPNGPEPDPRTAPLVKQAYADILAGASLGDVCRRWNNAGAFTITGRPWTTTTLSKFLRKPRNAGLRAYKGARYGPVDRDAIVGKAQWSPLVDEGTFWAAQAVLDAPGRAPGRKSVRRHLLTGLAGCGKCGNHLAGSCRTDGRVVYVCKACHGVSILAVNIEPILYYIVAERLAMPDAVDLLRCGVHDAAEAETIRQELETLYGELDRLAVERAEGLLTARQVKVGTDIVNAKITKLQARQLDQERLRVFDGIPLGTPQVAGMIAELSPDRFRAVLDVLAEVVVQPVGKSGRILNPERVQVNWR

SEQ ID NO: 5690 - protein, 485 aa, synthetic construct
MTKKVAIYTRVSTTNQAEEGFSIDEQTDRLTKYAEAMGWQVSDTYTDAGFSGAKLERPAMQRLISDIENKAFDTVLVYKLDRLSRSVRDTLHLVKDVFTKNKIDFISLNESIDTSSAMGSLFLTILSAINEFERENIKERMTMGKLGRAKSGKSMMWAKTAFGYYHNRKTGILEIVPLQATIVEQIFTDYLSGISLTKLRDKLNESGHIGKDIPWSYRTLRQTLDNPVYCGYIKFKGSLFEGMHKPIVPYETYLKVQKELEERQQQTYERNNNPRPFQAKYMLSGMARCGYCGAPLKIVLGHKRKDGSRTMKYHCANRFPRRTKGVTVYNENKKCDSGTYDLRNLESTVIDNLIGFQENDDSLLKIINGNNQPILDTSSFEEQISQIDKKIQKNSDLYLNDFITMDELKDRTDSLQAEKKLLKAKISENKFNDSTDVFELVKTQLGSIPINELSYDNKKKIVNNLVSKVDVTADNVDIIFKFQLA

SEQ ID NO: 5691 - protein, 452 aa, synthetic construct
MKAAIYIRVSTQEQVENYSIQAQTEKLTALCRSKDWDVYDIFIDGGYSGSNMNRPALNEMLSKLHEIDAVVVYRLDRLSRSQRDTTTLIEEYFLKNNVEFVSLSETLDTSSPFGRAMIGILSVFAQLERETIRDRMVMGKIKRIEAGLPLTTARGRTFGYDVIDTKLYINEEEAKQLQLIYDIFEEEQSITSLQKRLKKLGFKVRTYNRYNNWLTNDLYCGYVSYKDKVHVKGIHEPIISEEQFYRVQEIFTRMGKNPNMNRDSASLLNGLVVCSKCGLSFVHRSKDTMSRGKKYHYRYYSCKTYKHTHELEKCGNKTWRADKLEELIINRVNNYSHASRNVDKENELDGLNEKLKVEHAKKKRLFDLYINGSYEVSELDSMMNDIDAQINYYEGQIEANEELKKNKKIQESLANLATVDFDSLEFREKQLYLKSLINKIYIDGEQVTIEWL

SEQ ID NO: 5692 - protein, 452 aa, synthetic construct
MKAAIYIRVSTREQVENYSIQAQTEKLTALCRSKGWDVYDIFIDGGYSGSNMNRPALNEMLSKLHEIDAVVVYRLDRLSRSQRDTITLIEEYFLKNSVEFVSLSETLDTSSPFGRAMIGILSVFAQLERETIRDRMVMGKIKRIEAGLPLTTAKGRTFGYDVIDAKLYINEEEAKQLQLIYDIFEEEQSITFLQKRLKKLGFKVHTYNRYNNWLTNDLYCGYVSYKDKVHVKGIHEPIISEEQFYRVQEIFTRMGKNPNMNRGSASLLNNLVVCSKCGLGFVHRRKDAMSRDKKYHYRYYSCKTYKHIHELEKCGNKIWRADELEELIINRVNNYSLASRNVDKEDELDSLNEKLKIEHAKKKRLFELYINGSYDVSELDSMMNDIDAQINYYESQIEANEELKRNKKIQENLAHLATMDFDSLEFREKRLYLKSLINKIYIDGEQVTIEWL

SEQ ID NO: 5693 - protein, 485 aa, synthetic construct
MTKKVAIYTRVSTTNQAEEGFSIDEQIDRLTKYAEAMGWQVSDTYTDAGLSGAKLERPAMQRLINDIENKAFDTVLVYKLDRLSRSVRDTLYLVKDVFTKNKIDFISLNESIDTSSAMGSLFLTILSAINEFERENIKERMTMGKLGRAKSGKSMMWTKTAFGYYHNRKTGILEIVPLQATIVEQIFTDYLSGISLTKLRDRLNESGHIGKDIPWSYRTLRQTLDNPVYCGYIKFKGSLFEGMHKPIIPYETYLKVQKELEERQQQAYGRNNNPRPFQAKYMLSGMARCGYCGAPLKIVLGHKRKDGSRTMKYHCASRFPRKTKGVTVYNDNKKCDSGTYDLSNLENTVIDNLIGFQENNDSLLKIINGSNQPILDTSSLKKQISQIDKKIQKNTDLYLNDFITMDELKARTDSLQAEKKLLKAKISENKFNDSTDVFELVKTQLGSIPINELSYDDKKKVVNNLVSKVDVTADNVDIIFKFQLA

SEQ ID NO: 5694 - protein, 469 aa, synthetic construct
MSYTTPVRAAVYLRISEDRSGEQLGVARQREDCLKLCDQREWVPVEYLDNDVSASTGKRRPAYEQMLADITAGKIAAVVAWDLDRLHRRPIELEAFMSLADEKRLALATVAGDVDLATPQGRLVARLKGSVAAHETEHKKARQRRAARQKAERGYPNWSKAFGYLPGPNGPEPDPRTAPLVKQAYADILAGASLGDVCRRWNAAGAFTVTGRPWTTTTLSKFLRKPRNAGLRAYKGAHYGPVDRDAIVGRAQWSPLVDEATFWAAQAVLDAPGRAPGRKSVRRHLLTGLAGCGKCGNHLAGSYRTDGRVVYVCKACHGIAILADNIEPILYHIVAERLAMPDAVDLLRREIHDAAEAETIRLELETLYGELDRLAVERAEGLLTARQVKISTDIVNAKITKLQARQLDQERLRVLDGIPLGTPQVAGMIAELSPDRFRAVLDVLAEVVVQPVGKSGRIFNPERVQVNWR

SEQ ID NO: 5695 - protein, 452 aa, synthetic construct
MKAAIYIRVSTREQVENYSIQAQTEKLTALCRSKDWDVYDIFIDGGYSGSNMNRPALNEMLSKLHEIDAVVVYRLDRLSRSQRDTITLIEEYFLKNNVEFVSLSETLDTSSPFGRAMIGILSVFAQLERETIRDRMVMGKIKRIEAGLPLTTAKGRTFGYDVIDTKLYINEEEAKQLQLIYDIFEEEQSITLLQKRLKKLGFKVRTYSRYNNWLTNDLYCGYVSYKDKVHVKGIHEPIISEEQFYRVQEIFARMGKNPNMNRDSASLLSNLVVCSKCGLGFVHRRKDTMSRGKKYHYRYYSCKTYKHTHELEKCGNKIWRADKLEELVINRVNNYSFASRDVDKEDGLDNLNEKLKIEHAKKKRLFDLYINGSYEVSELDSMMNDIDAQINYYESQIEANEELKKNKRIQESPANLATVDFDSLEFREKQMYLKSLISKIYIDGEQVTIEWL

SEQ ID NO: 5696 - protein, 452 aa, synthetic construct
MKAAIYIRVSTREQVENYSIQAQTEKLTALCRSKGWDVYDIFIDGGYSGSNMNRPALNEMLSKLHEIDAVVVYRLDRLSRSQRDTITLIEEYFLKNNVEFVSLSETLDTSSPFGRAMIGILSVFAQLERETIRDRMVMGKIKRIEAGLPLTTAKGRTFGYDVIDTKLYINEEEAKQLQLIYDIFEEEQSITFLQKRLKKLGFKVRTYSCYNNWLTNDLYCGYVSYKDKVHVKGIHEPIISEEQFYRVQEIFARMDNNPNMNRDSASLLNSLVVCSKCGLGFVHRRKDTTSRGKKYHYRYYSCKTYKHIHELEKCGNKIWRADKLEELIINRVNNYSLASRSVDKEDELDGLNEKLKVEHAKKRRLFDLYINGSYEVSELDSMMNDIDAQINYYESQIEANEELKKNKKIQENLANLATVDYDSLEFREKQLYLKSLINKIYIDGEQVTIEWL

SEQ ID NO: 5697 - protein, 485 aa, synthetic construct
MTKKVAIYTRVSTTNQAEEGFSIDEQIDRLTKYAEAMGWQVSDTYTDAGFSGAKLERPAMQRLINDIENKAFDTVLVYKLDRLSRSVRDTLYLVKDVFTKNKIDFISLCESIDTSSAMGSLFLTILSAINEFERENIKERMTMGKLGRAKSGKSMMWTKTAFGYYHNRETGILEIVPLQAAIVEQIFTDYLSGISLTKLRDKLNESGHIGKDIPWSYRTLRQTLDNPVYCGYIKFKDSLFEGMHKPIIPYETYLKVQKELEERQQQTYERNNNQRPFQAKYMLSGMARCGYCGAPLRIVLGHKRKDGSRTMKYHCANRFPRKTKGVTVYNDNKKCDSGTYDLSNLENTVIDNLIGLQENSDSLLKIINGNNQPTLDTSGIKKQISQIDKKIQKNSDLYLNDFITMDELKDRTDSLQAEKKLLEAKISENKFNDSTDVFELVKTQLGGIPINELSYDNKKKIVNNLVSRVDVTADNVDIVFKFQLA

SEQ ID NO: 5698 - protein, 452 aa, synthetic construct
MKAAIYIRVSTQEQVGNYSIQAQTEKLTALCRSKDWDVYDIFVDGGYSGSNMKRPALNEMLSKLHEIDAVVVYRLDRLSRSQRDTTTLIEEYFLKNNVEFVSLSETLDTSSPFGRAMIGILSVFAQLERETIRDRMVMGKIKRIEAGLPLTTAKGRTFGYDVIDTKLYINEEEAKQLRLIYDIFEEEQSITFLQKRLKKLGFKVRTYNRYNNWLTNDLYCGYVSYKDKVHVKGIHEPIISEEQFYRVQEIFTRTGKNPNMNRDSASLLNNLVVCSKCGLGFVHRSKDTMSRGKKYHYRYYSCKTYKHTHELEKCGNKTWRADKLEELIINRVNNYGFASRDADKEDELDSLNEKLKIEHAKKKRLFDLYINGSYEVSELDSMMNDIDAQINYYESQIEANEELKKNKKIQENLANLATVDFDSLEFREKQLYLKSLINKIYIDGEQVTIEWL

SEQ ID NO: 5699 - protein, 452 aa, synthetic construct
MKAAIYIRVSTQEQVGNYSIQAQTEKLTALCRSKGWDVYDIFIDGGYSGSNMNRPALNEMLSKLHEIDAVVVYRLDRLSRSQRDTTTLIEEYFLKNNVEFVSLSETLDTSSPFGRAMIGILSVFAQLERETIRDRMVMGKIKRIEAGLPLTTAKGRTFGYDVIDTKLYINEEEAKQLRLIYDIFEEEQSITSLQKRLKKLGFKVRTYNRYNNWLTNDLYCGYVSYKDKVHVKGIHEPIISEEQFYRVQEIFTRMGKNPNMNRDSASLLNNLVVCSKCGLGFVHRSKDTMCRGKKYHYRYYSCKTYKHTHELEKCGNKTWRADKLEELIINRVNNYSFASRNVDKEDELDSLSEKLKIEHAKRKRLFDLYINGSYDVSELDSMMNDIDAQINYYESQIGANEELRKNKKIQENLADLATVDFDSLEFREKQLYLKSLINKIYIDGELVTIEWL

SEQ ID NO: 5700 - protein, 485 aa, synthetic construct
MTKKVAIYTRVSTTNQAEEGFSIDEQIDRLTKYAEAMGWQVSDTYTDAGLSGAKLERPAMQRLINDIENKAFDTVLVYKLDRLSRSVRDTLYLVKDVFTKNKIDFISLNESIDTSSAMGSLFLTILSAINEFERENIKERMTMGKLGRAKSGKSMMWTKTAFGYHHNRKTGILEIVPLQATIVEQIFTDYLSGISLTKLRDKLNESGHIGKDIPWSYRTLRQTLDNPVYCGYIKFKGSLFEGMHKPIIPYETYLKVQKELEERQQQTYERNNNPRPFQAKYMLSGMARCGYCGAPLRIVLGHKRKDGSRTMKYHCANRFPRKTKGITVYNDNKKCDSGTYDLSNLENTVIDNLIGFQENNDSLLKIINGNNQPILDISGFKKQISQIDKKIQKNSDLYLNDFITMDELKDRTDSLQAEKKLLKAKISENKFNDSTEVFELVKTQLGSIPINELSYDNKKKIVNNLVSKVDVTADNVDIIFKFQLA

SEQ ID NO: 5701 - protein, 452 aa, synthetic construct
MKAAIYIRVSTREQVENYSIQAQTEKLTALCRSKDWDVYDIFIDGGYSGSNMNRPALNEMLSKLHEIDAVVVYRLDRLSRSQRDTITLIEGYFLKNNVEFVSLSETLDTSSPFGRAMIGILSVFAQLERETIRDRMVMGKIKRIEAGLPLTTAKGRTFGYDVIDAKLYINEEEAKQLQLIYDIFEEERSITSLQKRLKKLGFKVRTYSRYYGWLTNDLYCGYVSYKDKVHVKGIHEPIISEEQFNRVQEIFTRMGKNPNMNRDSASLLNNLVVCSKCGLGFVHRRKDTVSRGKKYHYRYYSCKTFKHTHELEKCGNKIWRADKLEELIINRVNNYSLASRNVDKEDELDSLNEKLKIEHAKKKRLFDLYINGSYEVGELNSLMNDIDAQINYYESQIEANGELKKNKRIQENLADLATVDFDSLEFREKQLYLKSLINKIYIDGEQVTIEWL

SEQ ID NO: 5702 - protein, 452 aa, synthetic construct
MKAAIYIRVSTREQVENYSIQAQTEKLTALCRSKGWDVYDIFIDGGYSGSNMNRPALNEMLSKLHEIGAVVVYRLDRLSRSQRDTITLIEEYFLKNNVEFVSLSETLDTSSPFGRAMIGILSVFAQLERETIRDRMVMGKIKRIEAGLPLTTAKGRTFGYDVIDSKLYVNEEEAKQLQLIYDIFEEEQSITSLQKRLKKLGLKVRTYNRYNNWLTNDLYCGYVSYKDKVHVKGIHKPIISEEQFYRVQEIFTRMGKNPNMNRDSASLLNNLVVCSKCGLGFVHRRKDAMSRDKKYHYRYYSCKTYKHIHELEKCGNRIWRADKLEELIIDRVNNYSLASRNVDKEDELDSLNEKLKIEHAKKKRLFDLYINGSYEVSELDSMMNDIDAQISYYESQIEANEALIKNKKIQENLANLATVDFDSLEFREKQLYLKSLINKIYIDGEQVTIEWL

SEQ ID NO: 5703 - protein, 452 aa, synthetic construct
MKAAIYIRVSTQEQVENYSIQAQTEKLTALCRSKDWDVYDIFIDGGYSGSNMNRPALNEMLSKLHEIDAVVVYRLDRLSRSQRDTITLIEEYFLKNNVEFVSLSETLDTSSPFGRAMIGILSVFAQLERETIRDRMVMGKIKRVEAGLPLTTAKGRTFGYDVIDTKLYINEEEAKQLQLVYDIFEEEQSITFLQKRLKKLGFKVRTYNRYISWLTNDLYCGYVRYKDKVHVKGIHEPIISEEQFYRVQEIFTRMGRNPNMNRGSASLLNNLVVCSKCGLGFVHRRKDTMSRGKKYHYRYYSCKTYKHTHELEKCGNKIWRADKLEELIINRVNNYSFASRNVDKEDELDSLNERLKIEHAKKKRLFDLYINGSYEVSELDSMMNDIDARISYYECQIEANEELRKNKKIQENLANLATVDYDSLEFREKQLYLKSLINKIYIDGEQVTIEWL

SEQ ID NO: 5704 - protein, 452 aa, synthetic construct
MKAAIYIRVSTREQVENYSIQAQTEKLTALCRSKDWDVYDIFIDGGYSGSNMNRPALNEMLSRLHEIDAVVVYRLDRLSRSQRDTITLIEEYFLKNNVEFVSLSETLDTSSPFGRAMIGILSVFAQLERETIRDRMVMGKIKRIEAGLPLTTAKGRTFGYDVIDAKLYINEEEAKQLQLIYDIFEEEQSITFLQKRLKKLGFKVHTYNRYNNWLTNDLYCGYVSYKDKVHVKGIHEPIISEEQFYRVQEIFARMGKNPNMNRDSASLLNNLVVCGKCGLGFVHRRKDAMGRDKKYHYRYYSCKTYKHIHELEKCGNKIWRADKLEEQVINRVNNYSIASRNADKEDELDSLNEKLKIEHAKKKRLFELYINGSYEVSELGGMMSDIDAQINYYESQIEASEELRKSKRVQENLAYLATVDFDSLEFREKQLYLKSLINKIYIDGEQVTIEWL

SEQ ID NO: 5705 - protein, 485 aa, synthetic construct
MTKKVAIYTRVSTTNQAEEGFSIDEQVDRLTKYAEAMGWQVSDTYTDAGFSGAKLGRPAMQRLINDIENKAFDTVLVYKLDRLSRSVRDTLYLVKDVFTKNKIDFISLNESIDTSSAMGSLFLTILSAINEFERENIKERMTMGKLGRAKSGKSMMWTKTAFGYYHNRKTGILEIVPLQATIVEQIFTDYLSGISLTKLRDKLNESGHIGKDIPWSYRTLRQTLDNPVYCGYIKFKDSLFEGMHKPIIPYETYLKVQKELEERQQQTYERNNNPRPFQAKYMLSGVARCGYCGAPLRIVLGHKRKDGSRTMKYHCTNRFPRKTKGITVYNDNKKCDSGTYDLSNLENTVIDNLIGFQENNDSLLKIINGNDQPILDTSSFKKQISQIDKKIQKNSDLYLNGFITMDELKDRTDSLQAEKKLLKAKISENKFNDSTDVFELVKTQLGSIPINELSYDNKKKIVNNLVSKVDVTADNVDIIFKFQLA

SEQ ID NO: 5706 - protein, 485 aa, synthetic construct
MTKKVAIYTRVSTTNQAEEGFSIDEQIDRLTKYAEAMGWQVSDTYTDAGFSGAKLDRPAMQRLINDIENKAFDTVLVYKLDRLSRSVRDTLYLVKDVFTKNKIDFISLNESINTSSAMGSLFLTILSAINEFERENIKERMTMGKLGRAKSGKSMMWTKTAFGYYHNRKTGILEIVPLQATIVEQIFTDYLSGISLTKLRDKLNESGHIGKDIPWSYRTLRQTLDNPVYCGYIKFKDSLFEGMHKPIIPYETYLKVQKELEERQQQAYERNNNPRPFQAKYMLSGIARCGYCGAPLRIVLGRKRKDGSRTMKYHCANRFPRKTKGVTVYNDNKKCDSGTYGLSNLENTVIDNLIGFQESSDSLLKIINGNNQPILDTSSFEEQISQIDKKIQKNSDLYLNDFITMDELKDRTDSLQAEKKLLKAKISENKFNDSTDVFELVKTQLGSIPINELSYDNKKKIVNNLVNKVDVTADNVDIIFKFQLA

SEQ ID NO: 5707 - protein, 469 aa, synthetic construct
MCYITPVRAAVYLRISEDRSGEQLGVARQREDCLRLCDQRKWVPVEYLDNDVSASTGKRRPAYEQMLADIAAGKIAAVVAWDLDRLHRRPIELEAFMSLADEKRLALATVAGDVDLSTPQGRLVARLKGSVAAHETEHKKARQRRAARQKAERGHPNWSKAFGYLPGPNGPEPDPRTAPLVKQAYADILAGASLGDVCRQWNDAGASTITGRPWTTTTLSKFLRKPRNAGLRAYKGARYGPVDRDAIVGKAQWSPLVDEATFWAAQAVLDAPGRAPGRKSVRRHLLTGLAGCGKCGNHLAGSYRADGQVVYVCKVCHGVSILAVNIVPILYHIVAERLAMPDAVDLLCREIHDAAGAETIRLELEALYGELDRLAVERAEGLLTARQVKISTDIVNAKITKLQARQLDQERLRVFDGIPLGTPQVAGMIAELSPDRFRAVLDVLAEVVVQPVGKGGRIFNPERVQVNWR

SEQ ID NO: 5708 - protein, 485 aa, synthetic construct
MTKKVAIYTRVSTTNQAEEGFSIDEQIDRLTKYAEAMGWQVSDTYTDAGFSGAKLERPAMQRLINDIENEAFDTVLVYKLDRLSRSVRDTLYLVKDVFTKNKIDFISLSESIDTSSAMGSLFLTILSAINEFERESIKERMTMGKLGRAKSGKSMMWTKTAFGYYHNRKTGILEIVPLQATIVEQIFTDYLSGTSLTKLRDKLNESGHIGKDIPWSYRTLRQTLDNPVYCGYIKFKGSLFEGMHKPIIPYETYLKVQKELEERQQQTYERNNNPRPFQAKYMLSGMARCGYCGAPLKIVLGHKRRDGSRTMKYHCANRFPRKTKGVTVYNDNKKCDSGTYDLSNLEDTVIDSLIGFQENNDSLLKIISGNKQPILDTNSFKKQISQIDKKIQKNSELYLNDFITLDELKDRTDSLRAEKKLLKAKISENKFNDSSDVFELVKTQLGSIPINELSYDNKKKIVNNLVSKVDVTADNVDIIFKFQLA

SEQ ID NO: 5709 - protein, 452 aa, synthetic construct
MKAAIYIRVSTREQVENYSIQAQTEKLTALCRSKDWDVYDIFIDGGYSGSNMNRPALNEMLSKLHEIDAVVVYRLDRLSRSQRDTITLIEEYFLKNNVEFVSLSETLDTSSPFGRAMIGILSVFAQLERETIRDRMVMGKIKRIEAGLPLTTAKGRTFGYDVIDTRLYINEEEAKQLQLIYDIFEEEQSITFLQKRLKKLGFKVRTYNRYNSWLTNDLYCGYVSYKDKVHVKGIHEPIISEEQFYRVQEIFTRMGKNPNMNRDSASLLNNLVVCSKCGLGFVHRRKDTMSRGKKYHYRYYSCKTYKHIHELEKCGNKIWRADKLEELIINRVNNYSFASRNVDKEDELDSLNEKLRIEHAKKKRLFDLYINGSYGVSELDSMMDDIDAQINYYESQIEANEELKKNKKIQENLADLATVDFDSLGFREKQLYLKSLINKIYIDGEQVTIEWL

SEQ ID NO: 5710 - protein, 469 aa, synthetic construct
MCYTTPVRAAVYLRISEDRSGEQLGVARQREDCLELCDRHKWVPVEYLDNDVSASTGKRRPAYEQMLADITAGKIAAVVAWDLDRLHRRPIELEAFMCLADEKRLALATVAGDVDLATPQGRLVARLKGSVAAHETEHKKARQRRAARQKAERGLPNWSKAFGYLPGPNGPEPDPRTAPLVKQAYADILAGASLGDVCRQWNDAGAFTITGRPWTTTALSKFLRKPRNAGLRAYKGARYGPVDRDAIVGKAQWSPLVDEATFWAAQAVLDAPGRAPGRKSVRRHLLTGLAGCGKCGYHLAGSYRTGGRVVYVCKACHGVAILADNIEPILYHIVAERLAMPDAVDLLRREIHDAAEAETIRLELETLYGELDRLAVERAEGLLTARQVKVSTDIVNAKITKLQAHQQDQERLRVLDGIPLGTPQVAGTIAELSPDRFRAVLDVLAEVVVQPVGKSGRVFNPERVQVNWR

SEQ ID NO: 5711 - protein, 452 aa, synthetic construct
MKAAIYIRVSTREQVENYSIQAQTEKLTALCRSKDWDVYDIFIDGGYSGSNMNRPALNEMLSILHEIDAVVVYRLDRLSRSQRDTITLIEEYFLKNNVEFVSLSETLDTSSPFGRAMIGILSVFAQLERETIRDRMVMGKIKRVEAGLPLTTAKGRTFGYDVIDTKLYINEEEAKQLRLIYDIFEEERSITFLQKRLKKLGFKVHTYNRYNNWLTNDLYCGYVSYKDKVHVKGIHEPIISEEQFYRVQEIFTRMGKNPNMNRDSASLLNNLVVCGKCGLGFVHRRKDTMSRGKKYHYRYYSCKTYKHTHELEKCGNKIWRADKLEELIINRVNNYSSASRDVDKEDELDSLNEKLKIEHAKKKRLFELYINGSYEVSELDSMMNDIDAQINYYESQIEANVKLKKDKKIQENLADLATVDYDSLEFREKQLYLKSLINKIYIDGEQVTIEWL

SEQ ID NO: 5712 - protein, 469 aa, synthetic construct
MNFTTPVRAAVYLRISEDRSGEQLGVARQREDCLKLCDQRKWVPVEYLDNDVSASTGKRRPAYEQMLADIAAGKIAAVVAWDLDRLHRRPIELETFMSLADEKRLALATVAGDVDLATPQGRLVARLKGSVAAHETEHKKARQRRAARQKAERGHPNWSKAFGYLPGPNGPEPDPRTAPLVKQAYADILAGASLGDVCRQWNDAGAFTITGRPWTTTTLSKFLRKPRNAGLRAYKGARYGPVDRDAIVGKAQWSPLVDEATFWAAQAVLDAPGRAPGRKSVRRHLLTGLAGCGKCGNHLAGSYRTDGRVVYVCKACHGVSILADIIEPILYRIVAERLAMPDAVDLLRREIHDAAEAETTRLELETLYGELDCLAVERAEGLLTARQVKISTDIVNAKITKLRARQLDQERLRVFDGIPLGTPQVAGVIAELSPDRFRAVLDVLAEVVVQPVGKSGRIFNPERVQVNWR

SEQ ID NO: 5713 - protein, 452 aa, synthetic construct
MKAAIYIRVSTREQVENYSIQAQTEKLTALCRSKDWDVYDIFIDGGYSGSNMNRPALNEMLSKLHEIDAVVVYRLDRLSRSQRDTITLIEEYFLKNNVEFVSLSETLDTSSPFGRAMIGILSVFAQLERETIRDRMVMGKIKRIEAGLPLTTAKGRTFGYDVIDTKLYINEEEAKQLQLIYDIFEEEQSITFLQKRLKKLGFKVRTYSRYNSWLTNDLYCGYVSYKDKVHVKGIHEPIISEEQFYRVQEIFTRMGKNPNMNRDSASLLNNLVVCSKCGLGFVHRRKDTTSRGKKYHYRYYSCKTYKHTHELEKCGNKIWRADKLEELIINRVNNYSFVSRNMDKEDELDSLNEKLKIEHAKKKRLFDLYINGSYEVSELDSMMNDIDAQINYYESQIEANEELKKDKKIQENLAELATVDYDSLEFREKQLYLKSLINKIYIDGEQVTIEWL

SEQ ID NO: 5714 - protein, 485 aa, synthetic construct
MTKKVAIYTRVSTANQAEEGFSIDEQIDRLTKYAEAMGWQVSDTYTDAGFSGAKLERPAMQRLINDIENKVFDTVLVYKLDRLSRSVRDTLYLVKDVFTKNKIDFISLNESINTSSAMGSLFLTILSAINEFERENIKERMTMGKLGRAKSGKSMMWTKTAFGYYHNRKTGILEIVPLQATIVEQIFTDYLSGISLTKLRDKLNESGHIGKDIPWSYRTLRQTLDNPVYCGYIKFKDSLFEGMHKPIIPYETYLKVQKELEERQQQTYERNNNPRPFQAKYMLSGMARCGYCGAPLRIVLGHKRKDGSRTMKYHCANRFPRKTKGVTVYNDNKKCDSGTYDLSDLENTVIDNLIGFQENNDSLLKVINGNNQPILDTSSFKEQISQIDKKIQKNSDLYLNDFITMDELRDRTDSLQAEKKLLRAKISENKFNDSTDVFELVKTQLGSIPINELSYDNKKKIVNNLVSKVDVTADNVDIIFKFQLA

SEQ ID NO: 5715 - protein, 452 aa, synthetic construct
MKAAIYIRVSTREQVENYSVQAQTEKLTALCRSKDWDVYDIFIDGGYSGSNMNRPALNEMLSKLHEIDAVVVYRLDRLSRSQRDTITLIEEYFLKNSVEFVSLSETLDTSSPFGRAMIGILSVFAQLERETIRDRMVMGKIKRIEAGLPLTTAKGRTFGYDVVDTKLYINEEEAKQLQLIYDIFEEEQSITFLQKRLKKLGFKVRTYNRYSNWLTNDLYCGYVSYKDKVHVKGIHEPIISEEQFYRVQEIFTRMGKNPNMNRDSASLLNNLVVCSKCGLGFVHRRKDAMSRNKKYHYRYYSCKTYKHIHELEKCGNKIWRADILEELIISRVNNYSVASRNVDKEDELDSLNEKLKIEHAKKKRLFELYINGSYEVSELDSMMNDIDAQIGYYESQIEANKGLKKNKKIQENLADLATVDFDSLEFREKQLYLKSLINKIYIDGEQVTIEWL

SEQ ID NO: 5716 - protein, 452 aa, synthetic construct
MKAAIYIRVSTREQVENYSIQAQTEKLTALCRSKDWDVYDIFIDGGYSGSNMNRPALNEMLSKLHEIDAVVVYRLDRLSRSQRDTITLIEEHFLKNNVEFVSLSETLDTSSPFGRAMIGILSVFAQLERETIRDRMVMGKIKRIEAGLPLTTAKGRTFGYDVIDSKLYINEEEAKQLQLIYDIFEEEQSIAFLQKRLKKLGFKVRTYSRYNSWLTNDLYCGYVSYKDKVHVKGIHEPIISEEQFYRVQEIFTRMGKNPNMNRDSASLLNNLVVCSKCGLGFVHRRKDTTSRGKKYHYRYYSCKTYKHTHELEKCGNKIWRADKLEELVINRVNNYSFASRNVDKEDELASLNEKLKIEHAKKKRLFDLYINGSYEVSELDSMMNDIDAQINYYESQIEANEELKRNKKIQENLANLATVDYDSLEFREKQLYLKSLINKIYIDGELVTIEWL

SEQ ID NO: 5717 - protein, 469 aa, synthetic construct
MSYTTPVRAAVYLRISEDRSGEQLGVARQREDCLKLCGQRKWVPVEYLDNDVSASTGKRRPAYEQMLADIAAGRIAAVVAWDLDRLHRRPIELEAFMSLADEKRLALATVAGDVDLATPQGRLVARLKGCVAAHETEHKKARQRRAARQKAERGLPNWSKAFGYLPGPNGPDPDPRTAPLVKQAYADILAGASLGDVCKQWNDAGAFTITGRPWTTTTLSKFLRKPRNAGLRAYKGARYGPVDRDAIVGKAQWSPLVDETTFWAAQAVLDAPGRAPGRKSVRRHLLTGLAGCGKCGNHLAGSYRTDGQVVYVCKACYGVSILAVNIVPILYRIVAERLAMPDAVDLLRREIHDAAEAETIRLELETLYGELDRLAVERAEGLLTARQVKIGTDIVNAKITKLQARRLDQERLRVLDGIPLGTPRVAGAIAELSPDRFRAVLDVLAEVVVQPVGKSGRVFNPERVQVNWR

SEQ ID NO: 5718 - protein, 469 aa, synthetic construct; identical to SEQ ID NO: 4258

SEQ ID NO: 5719 - protein, 469 aa, synthetic construct
MSYTTPVRAAVYLRISEDRSGEQLGVARQREDCLKLCGQRKWVPVEYLDNDVSASTGKRRPAYEQMLADITAGKIAAVVAWDLDRLHRRPIELEAFMSLADERRLALATVAGDVDLATPQGRLVARLKGSVAAHETEHKKARQRRAARQKAERGYPNWSKAFGYLPGPNGPEPDPRTAPLVKQAYADILAGASLGDVCRQWNDAGAFTITGRPWTTTTLSKFLRKPRNAGLRAYKGARYGPVDRDAIVGKAQWSPLVDEGTFWAAQAVLDAPGRAPGRKSVRRHLLTGLAGCGKCGNHLAGSCRTDGRVVYVCKACHGVSILAVNIEPILYHIVAERLAMPDAVDLLRREVHDVAEAETIRLELGTLYGELDRLAVERAEGLLTARQVKISTDIVNAKITKLQARQLDHERLRVFDGIPLGTPQVAGMIAELSPDRFRAVLDVLAEVVVQPVGKGSRIFNPERVQVNWR

SEQ ID NO: 5720 - protein, 485 aa, synthetic construct
MTKKVAIYTRVSTTSQAEEGFSIDEQINRLTKYAEAMGWQVSDTYTDAGFSGAKLERPAMQRLINDIENKAFDTVLVYKLDRLSRSVRDTLHLVKDVFTRNKIDFISLNESINTSSAMGSLFLTILSAINEFERENIKERMTMGKLGRAKSGKSMMWTKTAFGYYHNRKTGILEIVPLQAAIVEQIFTDYLSGISLTKLRDKLNGSGHIGKDIPWSYRTLRQTLDNPVYCGYIKFKDSLFEGMHKPIIPYETYLRVQNELAERQQQAYERNNNPRPFQAKYMLSGMARCGYCGAPLKIVLGRKRKDGSRTMKYHCANRFPRKTKGVTVYNDNKKCDSGTYDLSNLENTVIDNLIGLQENNDSLLKIINGNNQPILDTSSFKKQISQIDKKIQKNSDLYLNDFITMDELKDRTDSLQAEKKLLEAKISETKFNDSTDVFELVKTQLGSIPINELSYDNKKKIVNNLVSKVDVTADNVDIIFKFQLA

SEQ ID NO: 5721 - protein, 452 aa, synthetic construct
MKAAIYIRVSTQEQVGNYSIQAQTEKLTALCRSKGWDVYDIFIDGGYSGSNMNRPALNEMLSKLHEIDAVVVYRLDRLSRSQRDTTTLIEEYFLKNNVEFVSLSETLDTSSPFGRAMIGILSVFAQLERETIRDRMVMGKIKRIEAGLPLTTAKGRTFGYDVIDTKLYINEEEAKQLQLIYDIFEEEQSITFLQKRLKKLGFKVRTYNRYNNWLTNDLYCGYVSYKDKVHVKGIHEPIISEEQFYRVQEIFTRMGKNPNMNRDSASLLSNLVVCSKCGLSFVHRSKDTTSRGKKYHYRYYSCKTYKHAHELEKCGNKTWRADKLEELIINRVSGYSFASRNVDKEDELDSLNEKLKIEHAKKRRLFELYIDGSYEVSELDSMMNDIDAQISYYESQIEANEELVKNRKIQENLADLATVDFDSLEFREKQLYLKSLINKIYIDGEQVTIEWL

SEQ ID NO: 5722 - protein, 469 aa, synthetic construct
MSYATPVRAAVYLRISEDRSGEQLGVARQRDDCLKLCGQRKWEPVEYLDNDVSASTGKRRPAYEQMLADITAGKIAAVVAWDLDRLHRRPIELEAFMSLADEKRLALATVAGDVDLATPQGRLVARLKGSVAAHEIEHKKARQRRAARQKAERGHPNWSKAFGYQPGPNGPEPDPRTAPLVKQAYADILAGASLGDVCRQWNDAGAFTITGRPWATTTLSKFLRKPRNAGLRAYKGARYGPVDRDAIVGKAQWSPLVDEATFWAAQAVLDAPGRAPSRKSVRRHLLTGLAGCGKCGNHLAGSYRTDGRVVYVCKACHGVAILANNIEPILYHTVAERLAMSDAVDLLRREIHDAAEAEAIRLELETLYGELDRLAVERAEGLLTARQVKISTDIVNAKITKLQARQLDQERLRVFDGIPLGTPQVAGVIAGLSPDRFRAVLDVLAEVVVQPVGKSGRIFNPERVQVNWR

SEQ ID NO: 5723 - protein, 485 aa, synthetic construct
MTKKVAIYTRVSTTNQAEEGFSIDEQIDRLTKYAEAMGWQVSDTYTDAGFSGAKLERPAMQRLINDTENKAFDTVLVYKLDRLSRSVRDTLYLVKDVFTKNKIDFISLSESIDTSSAMGSLFLTILSAINEFERENIKERMTMGKLGRAKSGKSMMWTRTAFGYYHNRKTGILEIVPLQATIVEQIFTDYLSGISLTKLRDKLNESGHIGKDIPWSYRTLRQTLDNPVYCGYIKFKDSLFKGMHKPIIPYETYLKVQRELEERQQQTYERNNNPRPFQAKYMLSGMARCGYCGAPLRIVLGHKRKDGSRTMKYHCVNRFPRKTKGVTVYNDNKKCDSGTYDLSILENTVIDILIGFQENNDSLLKIINGNDQPILDTSSFEKQISQIDKKIQKNSDLYLNDFITMDELKDRTDSLQAEKKLLEAKISENKFNDSTGVFELVKTQLGSIPINELSYDNKKKVVNNLVSKVDVTADNVDIIFKFQLA

SEQ ID NO: 5724 - protein, 469 aa, synthetic construct
MSYITPVRAAVYLRISEDRSGEQLGVARQREDCLKLCGQREWVPVEYLDNDVSASTGKRRPAYEQMLADITAGKIAAVVAWDLDRLHRRPIELETFMSLADEKRLALATVAGDVDLATPQGRLVARLKGSVAAHETEHKKARQRRAARQKAERGYPNWSKAFGYLPGPNGPEPDPRTAPLVKQAYADILAGASLGDVCRQWNDVGAFTITGRPWTTTTLSKFLRKPRNAGLRAYKGARYGPVDRDAIVGKAQWNPLVDEATFWAAQAVLDAPGRAPGRKSVRRHLLTGLAGCGKCGNHLAGSYRTDGRVVYVCKACHGIAILADNIEPILYRIVAERLAMPDAVDLLRREIHDAAEAETIRLELGTLYGELDCLAVERAEGLLTARQVKISTDIVNAKITKLQARRLDQERLRVFDGIPLGTPQVAGMIAELSPDRFRAVLDVLAEVVVQPVGKSGRIFNPERVQVNWR

SEQ ID NO: 5725 - protein, 469 aa, synthetic construct
MSYTTPVRAAVYLRISEDRSGEQLGVARQREDCLKLCDQRKWVPVEYLDNDVSASTGKRRPAYEQMLADITAGKIAAVVAWDLDRLHRRPIELEAFMSLADEKRLALATVAGDVDLATPQGRLVARLKGSVAAHETEHKKARQRRAARQKAERGHPNWSKAFGYQPGPNGPEPDPRTAPLVGQAYADILAGASLGDVCRRWNDAGAFTITGRPWTTTALSKFLRKPRNAGLRAYRGARYGPVDRDAIVGKARWSPLVDEATFWAAQAVLDAPGRAPGRKSVRRHLLTGLAGCGKCGHHLSGSYRTDGRVVYVCKACHGVAILADNIEPILYHIAAERLAMPDAVDLLRREIHDAAEAETIRLELETLYDELDRLAVERAEGLLTARQVKISTDIVNAKITKLQACQLDQERLRVFDGIPLGTPQVAGIIAELSPDRFRAVLDVLAEVVVQPVGKSGRIFNPERVQVNWR

SEQ ID NO: 5726 - protein, 452 aa, synthetic construct
MKAAIYIRVSTREQVENYSIQAQTEKLTALCRSKDWDVYDIFIDGGYSGSNMNRPALNEMLSKLHEIDAVVVYRLDRLSRSQRDTITLIEEYFLKNNVEFVSLSETLDTSSPFGRAMIGILSVFAQLERETIRDRMVMGKIKRIEAGLPLTTAKGRTFGYDVIDTKLYINEEEAKQLQLIYDIFEEEQSITFLQKRLKKLGFKVHTYNRYNNWLTNDLYCGYVSYKDKAHVKGIHEPIISEEQFYRVQEIFTRMGKNPNMNRDSASLLNNLVVCSKCGLGFVHRRKDAMSRDKKYHYRYYSCKTYKHIHELEKCGNKIWRADKLEELVINRVNNYSLASRDVGKEAELDSLNEKLKTEHAKKKRLFDLYINGSYEVSELDSMMSVIDAQINHYESQIEANEELKKNKKIQENLVYLATVDFDSLEFREKQLYLKSLINKIYIDGEQVTIEWL

SEQ ID NO: 5727 - protein, 469 aa, synthetic construct
MCYTTPVRAAVYLRISEDRSGEQLGVARQREDCLKLCDQRKWVPVEYLDNDVSASTGKRRPAYEQMLADITAGKIAAVVAWDLDRLHRRPVELEAFMSLADEKRLALATVAGDVDLATPQGRLVARLKGSVAAHETEHKKARQRRAARQKAERGHPNWSKAFGYLPGPNGPEPDPRTAPLVKQAYADILAGASLGDVCRQWNDAGAFTITGRPWITTTLSKFLRKPRNAGLRAYKGARYGPVDRGAIVGKAQWSPLVDEATFWAAQAVLDAPGRAPGRKSVRRHLLTGLAGCGKCGNHLAGSYRTNGRVVYVCKACHGVAILADNIEPILYHIVAERLAMPDAVDLLRREIHDAAEAETIRLELETLYGELDRLAVERAEGLLTARQVKVSTDIVNAKITKLQARQLDQERLRVFEGIPLGTPQVAGMIAELSPNRFRAVLDVLAEVVVQPVGKSGRIFNPERVQVNWR

SEQ ID NO: 5728 - protein, 469 aa, synthetic construct
MCYTTPVRAAVYLRISEDRSGEQLGVARQREDCLKLCGQRKWVPVEYLDNDVSASTGKRRPAYEQMLADIAAGKIAAVVAWDLDRLHRRPIELEAFMSLADEKRLALATVAGDVDLATPQGRLVARLKGSVAAHETEHKKARQRRAARQKAERGLPNWSKAFGYLPGPNGPEPDPRTAPLVRQAYADILAGASLGDVCRKWNGAGAYTITGRPWTTTTLSKFLRKPRNAGLRAYKGARYGPVDRDAIVGKAQWSPLVDEATFWAAQAVLDAPGRAPGRKSVRRHLLTGLAGCGKCGNHLAGSYRTDGRVVYVCKACHGIAILAENIEPILYHIVAERLAMPDAVNLLCREIHDAAEAETIRLELEALYGELDRLAVERAEGLLTARQVKISTDIVNAKITKLRARQLDQERLRVFDGIPLGTPQVAGMIAELSPDRFRAVLDVLAEVVVQPVGKRGRIFNPERVQVNWR

SEQ ID NO: 5729 - protein, 469 aa, synthetic construct
MSYTTPVRAAVYLRISEDRSGGQLGVARQREDCLKLCDQRKWEPVEYLDNDVSASTGKRRPAYEQMLADITAGKIAAVVAWDLDRLHRRPIELEAFMSLADEKRLALATVAGDVDLATPQGRLVARLKGSVAAHETEHKKARQRRAARQKAERGYPNWSKAFGYLPGPSGPEPDPRTAPLVKQAYADILAGASLGDVCRQWNDAGALTITGRPWTTTALSKFLRKPRNAGLRAYKGARYGPVDRDAIVGKAQWSPLVDEATFWAAQAVLDAPGRAPGRKSVRRHLLTGLAGCGKCGNHLAGSYRTDGKVVYVCKACYGVAILADNIEPILYHIVAERLAMPDAVDLLRREIHDAAEAETIRLELETLYGELDCLAVERAEGLLTARQVKISTDIVNAKITKLQAYQLDQERLRVLDGIPLGTPQVAGMIAELSPDRFRAVLDVLAEVVVQPVGKSGRIFNPERVQVNWR

SEQ ID NO: 5730 - protein, 452 aa, synthetic construct
MKAAIYIRVSTREQVENYSIQAQTEKLTALCRSKDWDVYDIFIDGGYSGSNMNRPALNEMLSKLHEIDAVVVYRLDRLSRSQRDTITLIEEYFLKNSVEFVSLSETLDTSSPFGRAMIGILSVFAQLERETIRDRMVMGKIKRVEAGLPLTTAKGRTFGYDVIDTKLYINEEEAKQLQLIYDIFEEEQSITFLQKRLKKLGFKVRTYNCYNNWLTNDLYCGYVSYKDKVHVKGIHEPIISEEQFYRVQEIFTRMGKNPNMNRESASLLSSLVVCSKCGLGFVHRRKDTKSRGKKYHYRYYSCKTYKHTHELEKCGNKIWRADKLEELIINRVNNYSFASRNVDKAEELDSLNEKLKVEHAKKKRLFGLYINGSYEVSELDSMMNDIDAQINYYVSQIEANVELKKNEKIQENLANLATVDYDSLEFREKQQYLKSLINKIYIDGEQVTIEWL

SEQ ID NO: 5731 - protein, 452 aa, synthetic construct
MKAAIYIRVSTQEQVGNYSIQAQTEKLTALCRSKDWDVYDIFIDGGYSGSNMNRPALNEMLSKLHEIDAVVVYRLDRLSRSQRDTTTLIEEYFLKNNVEFVSLSETLDTSSPFGRAMIGILSVFAQLERETIRDRMVMGKIKRIEAGLPLTTAKGRTFGYDVIDTKLYINEEEAKQLQLIYDIFEEEQSITSLQKRLKKLGFKVRTYNRYNNWLTNDLYCGYVSYKDKVHVKGIHEPIISEEQFYRVQEIFTRMGKNPNMNRDSASLLNNLVVCSKCGLGFVHRSKDTMSRGKKYHYRYYSCKTYKHTHELEKCGNKTWRADRLEELIINCVNNRNLASRNVDKEDELASLNEKLKIEHAKKRRLFDLYINGSYEVSELDSMMNDIDAQINYYESQIEANEELKKNKKIQEDLADLATVDFDSLEFPEKQLYLKSLINKIYIDGEQVTIEWL

SEQ ID NO: 5732 - protein, 452 aa, synthetic construct
MKAAIYIRVSTQEQVGNYSIQAQTEKLTALCRSKDWDVYDIFIDGGYSGSNMNRPALNEMLSKLHEIDAVVVYRLDRLSRSQRDTTTLIEEYFLKNNVEFVSLSETLDTSSPFGRAMIGILSVFAQLERETIRDRMVMGKIKRIEAGLPLTTAKGRTFGYDVIDTKLYINEEEAKQLQLIYDIFEEEQSITFLQKRLKKLGFKVRTYNRYNNWLTNDLYCGYVSYKDKVHVKGIHEPIISEEQFYRVQEIFTRMGKNPNMNRDSASLLNNLVVCSKCGLGFVHRSKDTMSRGKKYHYRYYSCKTYKHTHELEKCGNKTWRADKLEELIINRVNNYSFASRNVDKEDELDGLNEKLKIEHAKKRRLFDLYINGSYEVSELDSMMNDIDAQINYYESQIEAIEGLKKNRKIQENLADLATVDFDSLEFREKQLYLKSLINKIYIDGEQVTIEWL

SEQ ID NO: 5733 - protein, 485 aa, synthetic construct
MTKKVAIYTRVSTTNQAEEGFSIDEQTDRLTKYAEAMGWQVSDTYTDAGFSGAKLERPAMRRLINDIENKAFDTVLVYKLDRLSRSVRDTLYLVKDVFTKNKIDFVSLNESIDTSSAMGSLFLTILSAINEFERENIKERMAMGKLGRAKSGKSMMWTKTAFGYYHNRKTGILEIVPLQATIVEQIFTDYLSGISLTKLRDKLNESGHIGKDIPWSYRTLRQTLDNPVYCGYIKFKDSLFEGMHKPIIPYETYLKVQKELEERQQQAYERNNNPRPFQAKYMLSGMARCGYCGAPLRIVLGRKRKDGSRTMKYHCTNRFPRKTKGVTVYNDNKKCDSGTYDLGNLENTVIDNLIGLQENNDSLLKIINGNNQPILDTSSFKKQISQIDKKIQKNSDLYLNDFITMDELKDRTDSLQAEKKLLKARISENKFNDSTDVFELVKTQLGSIPINELSYDNKKKIVNNLVSKVDVTADNVDIIFKFQLA

SEQ ID NO: 5734 - protein, 452 aa, synthetic construct
MKAAIYIRVSTQEQVGNYSIQAQTEKLTALCRSKDWDVYDIFIDGGYSGSNMNRPALNEMLSKLHEIDAVVVYRLDRLSRSQRDTTTLIEEYFLKNNVEFVSLSETLDTSSPFGRAMIGILSVFAQLERETIRDRMVMGKIKRIEAGLPLTTAKGRTFGYDVIDTKLYVNEEEAKQLRLIYDIFEEEQSITSLQKRLKKLGFKVRTYNRYNNWLTNDLYCGYVSYKDKVHVKGIHEPIISEEQFYRVQEIFTRMGKNPNMNRDSASLLNNLVVCSKCGLGFVHRRKDTMSGGKKYHYRYYSCKTYKHTHELEKCGNKTWRADKLEELIINRVNNYSFASRNVDKEDELDGLNEKLKIEHAKKKRLFDLYINGSYEVSELDSMRSDIDAQINYYECQIEANKELKKNKKIQENLADLATVDFDSLEFREKQLYLKSLINKIYIDGEQVTIEWL

SEQ ID NO: 5735 - protein, 485 aa, synthetic construct
MTKKVAIYTRVSTTNQAEEGFSIDEQIDRLTKYAEAMGWQVSDTYTDAGYSGAKLDRPAMQRLINDIENKAFDTVLVYKLDRLSRSVRDTLYLVKEVFTKNMIDFISLNESIDTSSAMGSLFLTILSAINEFERENIKERMTMGKLGRAKSGKSMMWTKAAFGYYHNHKTGILEIVPLQATIVEQIFTDYLSGISLTKLRDKLNESGHIGKDIPWSYRTLRQTLDNPVYCGYIKFKDSLFEGMHKPIIPYETYLKVQKELEERQQQTYVRNNNPRPFQAKYMLSGTARCGYCGAPLKIVLGHKRKDGSRTMKYHCANRFPRKTKGVTVYNDNKKCDSGTYDLSDLENTVTDSLIGFQVNNDSLLKIINGNNQPILDTSSFEKQISQIDKKIQRYSDLYLNDLINMDELKDRTGSLRAEKKLLKAKISENKFNDSTDVFELVKTQLGSIPINELSYDNKKKIVNNLVSKVDVTADNVDIIFKFQLA

SEQ ID NO: 5736 - protein, 485 aa, synthetic construct
MTKKVAIYTRVSTTNQAEEGFSIDEQIDRLTKYAEAMGWQVSDTYTDAGSSGAKLERPAMQRLINDIENKAFDTVLVYKLDRLSRSVRDTLYLVKDVFTKNKIDFISLNESIDTSSAMGSLFLTILSAINEFERENIKERMTMGKLGRAKSGKSMMWTKTAFGYYHNRKTGILEIVPLQATIVEQIFTDYLSGISLTKLRDKLNESGHIGKDIPWSYRTLRQTLDNPVYCGYIKFKDSLFEGMHKPIIPYETYLKVQKELEERQQQTYERNNNPRPFQAKYMLSGMARCGYCGAPLRIVLGRKRKDGSRTMKYHCANRFPRKTKGITVYNDNKRCDSGTYDLSNLENTVIDNLIGFQENNDSLLKIINGNNQPILDTSSFKKQISQIDKKIQKNSDLYLNDFITMDELKDRTDSLQAEKKLLKAKISENKFNDSTDVFELVKAQLGSIPINELSYDDKKKIVNNLVSKVDVTADNVDIIFKFQLA

SEQ ID NO: 5737 - protein, 452 aa, synthetic construct
MKAAIYIRVSTREQVENYSIQAQTEKLTALCRSKDWDVYDIFIDGGYSGSNMNRPALNEMLSKLHEIDAVVVYRLDRLSRSQRDTITLIEEYFLKNNVEFVSLSETLDTSSPFGRAMIGILSVFAQLERETIRDRMVMGKIKRIEAGLPLTTAKGRTFGYDVIDTKLYINEEEAKQLQLIYDIFEEEQSITFLQKRLKELGFKVRTYNRYNNWLTNDLYCGYVSYKDKVHVKGIHEPIISEEQFYRVQEIFARMGKNPNMNRDSASLLNNLVVCSKCGLGFVHRRKDAMSRDKKYHYRYYSCKTYKHIHELEKCGNKIWRADKLEELIISRVNNYSLASRNVDKEDELDSLNEKLKIEHAKKRRLFDLYINGSYEVSELDSMMNDIDAQISYYESQIEANKGLRKNKKIQENLANLATVDFDSLEFREKQLYLKSLINKIYIDGEQVTIEWL

SEQ ID NO: 5738 - protein, 452 aa, synthetic construct
MKAAIYIRVSTREQVENYSIQAQTEKLTALCRSKDWEVYDIFIDGGYSGSNMNRPALNEMLSKLHEIDAVVVYRLDRLSRSQRDTITLIEEYFLKNNVEFVSLSETLDTSSPFGRAMIGILSVFAQLERETIRDRMVMGKIKRIEAGLPLTTAKGRTFGYDVIDAKLYINEEEARQLRLIYDIFEEERSITFLQKRLKKLGFKVRTYNRYNNWLTNDLYCGYVSYKDKVHVKGIHEPIISEEQFYRVQEIFTRMGKNPNMNRGSASLLNNLVVCGKCGLGFVHRRKDAMSRDKKYHYRYYSCKTYKHIHELEKCGNKIWRADKLEELIINRVNNYSLASRNVDKEGELDCLNEKLKIEHVKKKRLFDLYINGSYDVSELDSMMNDIDAQINYYESQIEANEELKKNKKVQENLAHLATVDFDSLEFREKQLYLKSLINKIYIDGEQVTIEWL

SEQ ID NO: 5739 - protein, 469 aa, synthetic construct
MSYTTRVRAAVYLRISEDRSGEQLGVARQREDCLKLCDQRKWVPVEYLDNDVSASTGKRRPAYERMLADITAGKIAAVVAWDLDRLHRRPIELEAFMSLADEKRLALATVAGDVDLATPQGRLVARLKGSVAAHETEHKKARQRRAARQKAELGHPNWSKAFGYLPGPNGPEPDPRTAPLVKQAYADILAGASLGDVCRQWNDAGAFTITGRPWATTTLSKFLRKPRNAGLRAYKGARYGPVDRDAIVGKAQWGPLVDEATFWAAQAVLDAPGRTPGRKSVRRHLLTGLAGCGKCGNHLAGSCRTDGKVVYVCKACHGVAILADNIVPILYRIVTERLAMPNAVDLLRREVHDAAEAETIRLELETLHGELDRLAVERAEGLLTARQVKISTDIVNAKIAKLQARQLDQERLRVFDGIPLGTPQVADTIAELSPDRFRAVLDVLAEVVVQPVGKSGRIFNPERVQVSWR

SEQ ID NO: 5740 - protein, 452 aa, synthetic construct
MKAAIYIRVSTQEQVENYSIQAQTEKLTALCRSKDWDVYDIFIDGGYSGSNMNRPALNEMLSKLHEIDAVVVYRLDRLSRSQRDTITLIEEYFLKNNVEFVSLSETLDTSSPFGRAMIGILSVFAQLERETIRDRMVMGKIKRVEAGLPLTTAKGRTFGYDVIDTKLYINEEEAKQLQLIYDIFEEEQSITFLQKRLKKQGFKVHTYNRYNNWLTNDLYCGYVSYKDKVRVKGIHEPIISEEQFYRVQEIFTRMGKNPNMNRDSASLLNSLVVCSKCGLGFVHRRKDTMSRGKKYHYRYYSCKTYKHTHELEKCGNKIWRADKLEELIINRVNNYSFASRNVDKEDELDSLNEKLEIEHTKKKRLFELYINGSYEMGELNSMMNDIDAQINYYESQIEANRELEKNKKIQENLANLASVDYDSLEFREKQLYLKSLINKIYIDGEQVTVEWL

SEQ ID NO: 5741 - protein, 452 aa, synthetic construct
MKAAIYIRVSTQEQVGNYSIQAQTEKLTALCRSKDWDVYDIFIDGGYSGSNMNRPALNEMLSKLHEIDAVAVYRLDRLSRSQRDTTTLIEEYFLKNNVEFVSLSETLDTSSPFGRAMIGILSVFAQLERETIRDRMVMGKIKRIEAGLPLTTAKGRTFGYDVIDTKLYINEEEARQLQLIYDIFEEEQSITSLQKRLKKLGFKVRTYNRYNNWLTNDLYCGYVSYKDKVHVKGIHEPIISEEQFYRVQEIFTRMGRNPNMNRDSASLLSNLVVCSKCGLGFVHRSKDTMSRGKKYHYRYYSCKTYKHTHELEKCGNKTWRADKLEELVINRVNSYSLASRDVDKEDELDSLNEILNIEHAKKKRLFDLYINGSYGVSELDSMMDDIDAQINYYESQIEANEELKKDKKIQENLANLATVDFDSLEFREKQLYLKSLINKIYIDGEQVTIEWL

SEQ ID NO: 5742 - protein, 452 aa, synthetic construct
MKAAIYIRVSTREQVENYSIQAQTEKLTALCRSKDWDVYDIFIDGGYSGSNMNRPALNEMLSKLHEIDAVVVYRLDRLSRSQRDTITLIEEYFLKNNVEFVSLSETLDTSSPFGRAMIGILSVFAQLERETIRDRMVMGKIKRIEAGLPLTTAKGRTFGYDVIDSKLYINEEEARQLQLIYDIFEEEQSITFLQKRLKKLGFKVRTYNRYNNWLTNDLYCGYVSYKDKVHVKGIHEPIISEEQFYRVQEIFTRMGKNPNMNRDSASLLNNLVVCGKCGLGFVHRRKDAMSRDKKYHYRYYSCKTYKHIHELEKCGNKIWRADKLEELIINRVNDYSLASRNVDKEDELDSLNEKLKIEHAKKRRLFDLYINGSYEVSELDSMMNDIDAQINYYESQIEANEELRKNKKIRENLAGLATVNFDSLEFREKQLYLKSLINKIYIDGEQVTIEWL

SEQ ID NO: 5743 - protein, 452 aa, synthetic construct
MKAAIYIRVSTREQVENYSIQAQTEKLTALCRSKDWDVYDIFVDGGYSGSNMNRPALNEMLSKLHEIDAVVVYRLDRLSRSQRDTITLIEEYFLKNNVEFVSLSETLDTSSPFGRAMIGILSVFAQLERETIRDRMVMGKIKRIEAGLPLTTAKGRTFGYDVIDTKLYINEEEAKQLRLIYDIFEEEQSITFLQKRLKKLGFKVHTYNRYNNWLTNDLYCGYVSYKDKVHVKGIHEPIISEEQFYRVQEIFTRMGKNPNMNRGSASLLNNLVVCSKCGLGFVHRRKDIVSRGKKYHYRYYCCKTYKHIHELEKCGNKIWRADKLEELIINRVNNYSFASRNKEKEDELDSLNEKLKIEHAKKKRLFDLYINGSYEVSELDGMMSDIDAQINYYESQIEANEELRKNKKIQENLAHLATVDFDSLEFREKQLYLKSLINKIYIDGEQVTIEWL

SEQ ID NO: 5744 - protein, 452 aa, synthetic construct
MKAAIYIRVSTREQVENYSIQAQTEKLTALCRSKDWDVYDIFIDGGYSGSNMNRPALNEMLSKLHEIDAVVVYRLDRLSRSQRDTITLIEEYFLKNNVEFVSLSETLDTSSPFGRAMIGILSVFAQLERETIRDRMVMGKIKRIEAGLPLTTAKGRTFGYDVIDTKLYINEEEAKQLRLIYDIFEEEQSITFLQKRLKKLGFKVRTYSRYNNWLTNDLYCGYVSYKDRVHVKGIHEPIISEEQFHRVQEIFTRMGKNPNMNRDSASLLSNLVVCSKCGLGFVHRRKDTMSRGKKYHYRYYSCKTYKHVHELEKCGNKIWRADKLEELIISRVNNYSFASRNVDKEDELDSLNEKLKIEHAKKKRLFDLYINGGYNVGELDSMMNDIDAQINYYESQIEANEELKKNKKIQGDLASLATVDFDSLEFREKQLYLKSLINKIYIDGEQVTIEWL

SEQ ID NO: 5745 - protein, 452 aa, synthetic construct
MKAAIYIRVSTREQVENYSIQAQTERLTALCRSKDWDVYDIFIDGGYSGSNMNRPALNEMLSKLHEIDAVVVYRLDRLSRSQRDTITLIEEYFLKNNVEFVSLSETLDTSSPFGRAMIGILSVFAQLERETIRDRMVMGKIKRIEAGLPLTTAKGRTFGYDVIDTKLYVNVEEAKQLQLIYDIFEEEQSITFLQKRLKKLGFKVRTYNRYISWLTNDLYCGYVSYKDKVHVKGIHEPIISEEQFYRVQEIFTRMGKNPNMNRDSASLLNNLVVCSKCGLGFVHRRKDTTSRGKKYHYRYYSCKTYKHIHELEKCGNKIWRADRLEELIIDRVNNYSFAGRNVDKEDELDSLNEKLKIEHAKKRRLFDLYINGSYEVSELDSMMSDIEAQINYYESQIEANEELKKNKKIQENLADLATVDYDSLEFREKQLYLKSLINKIYIDGEQVTIEWL

SEQ ID NO: 5746 - protein, 452 aa, synthetic construct
MKAAIYIRVSTREQVENYSIQAQTEKLTALCRSKDWDVYDIFIDGGYSGGNMNRPALNEMLSKLHEIDAVVVYRLDRLSRSQRDTITLIEEYFLKNNVEFVSLSETLDTSSPFGRAMIGILSVFAQLERETIRDRMVMGKIKRIEAGLPLTTAKGRTFGYDVIDTKLYINEEEARQLQLIYDIFEEEQSITFLQKRLKKLGFKVRTYSCYSNWLTNDLYCGYVSYKDKVHVKGIHEPIISEEQFYRVQEIFTRMGKNPNMNRDSASLLNNLVVCSKCGLGFVHRRKDAMSRDKKYHYRYYSCKTYKHIHELEKCGNKIWRADKLEELVISRVNNYSLACRDADKEGELDSLNEKLKIEHAKKKRLFDLYINGNYDVSELDSMMNDIDAQINYYESQIEAGEELKKNKKIQENLAYLATVDFDSLEFREKQLYLKSLINKIYIDGEQVTIEWL

SEQ ID NO: 5747 - protein, 485 aa, synthetic construct
MTKKVAIYTRVSTTNQAEEGFSIDEQIDRLTKYAEAMGWQVSDTYTDAGFSGAKLERPAMQRLISDIENKAFDTVLVYKLDRLSRSVRDTLYLVKDVFTKNEIDFISLNESIDTSSAMGSLFLTILSAISEFERENIKERMTMGKLGRAKSGKSMMWTKTAFGYHHNRKTGILEIVPPQATIVEQIFTDYLSGISLTKLRDKLNESGHIGKEIPWSYRTLRQTLDNPVYCGYIKFKDSLFEGMHKPIIPYETYLKVQKELEERQQQTYERNNNPRPFQAKYMLSGMARCGYCGAPLRIVLGHKRKDGSRTMKYHCANRFPRKTKGVTVYNDNKKCDSGTYDLSNLENTVIDNLIGLQENNDSLLKIINGNNQPILDTSSFKEQISQIDKKIQKNSDLYLNDFITMDELKGRTDSLQAEKKLLRAKISENKFNDSTDVFELVKTQLGSIPINELSYDSKKKIVNNLVSKVDVTADNVDIIFKFQLA

SEQ ID NO: 5748 - protein, 452 aa, synthetic construct
MKAAIYIRVSTQEQVGNYSIQAQTEKLTALCRSKDWDVYDIFIDGGYSGSNMNRPALNEMLSKLHEIDAVVVYRLDRLSRSQRDTTTLIEEYFLKNNVEFVSLSETLDTSSPFGRAMIGILSVFAQLERETIRDRMVMGKIKRIEAGLPLTTAKGRTFGYDVIDTKLYINEEEAKQLQLIYDIFEEEQSITFLQKRLKKLGFKVRTYNRYNSWLTNDLYCGYVSYKDKVHVRGIHEPIISEEQFYRVQEIFTRMGKNPNMNRDSASLLSNLVVCSKCGLGFVHRSKDTMSRGKKYHYRYYSCKTYKHTHELEKCGNKTWRADKLEELIINRVNNYSFASRNVDKEDELDSLNEKLKIEHAKKKRLFDLYINGSYEVSELDSMMNDIDAQINYYESQIEASEELKKNKKIQENLADLATVDFDSLEFREKRLYLKSLINKIYIDGERVTIEWL

SEQ ID NO: 5749 - protein, 469 aa, synthetic construct
MSYTTPVRAAVYLRISEDRSGEQLGVARQREDCLKLCGQRKWVPVEYLDNDVSASTGKRRPAYEQMLADITAGKIAAVVAWDLDRLHRRPIELEAFMSLADERRLALATVAGDVDLATPQGRLVARLKGCVAAHETEHKKARQRRAARQKAERGYPNWSKAFGYLPGPNGPEPDPRTAPLVKQAYADILAGASLGDVCRQWNDAGAFTITGRPWTTTTLSKFLRKPRNAGLRAYKGARYGPVDRDAIVGKAQWSPLVDEATFWAAQAVLDAPGRAPGRKSVRRHLLTGLAGCGKCGNHLAGSYRTDGRVVYVCKACHGVAILADNIVPILYHVVAERLAMPDAVDLLRHEIHDAAEAEAIRLELETLYGELDRLAVERAEGLLTARQVKISTDIVNAKITKLQARQLDQERLRVFNGIPLGTPQVAGVIAELSPDRFRAVLDVLVEVVVQPVGKGGRIFNPERVQVNWR

SEQ ID NO: 5750 - protein, 469 aa, synthetic construct
MSYTTPVRAAVYLRISEDRSGEQLGVARQREDCLKLCDQRKWVPVEYLDNDVSASTGKRRPAYEQMLADITAGKIAAVVAWDLDRLHRRPIELETFMSLADEKRLALATVAGDVDLATPQGRLVARLKGSVAAHETEHKKARQRRAARQKAERGHPNWSKAFGYLPGPNGPEPDPRTAPLVKQAYADILAGASLGDVCRRWNNAGALTITGRPWTSTTLSKFLRKPRNAGLRAYKGARYGPVDRDAIVGKAQWSPLVDEATFWAAQAVLDAPGRAPGRKSVRRHLLTGLAGCGKCGSHLAGSYRTDGRVVYVCKACHGVAILADNIEPILYHIVAERLAMPDAVDLLRREIHDTAEAETIRLELETLHGELDRLAVERAEGLLTARQVKISTDIVNAKITKLQARQLDQERMRVLDGIPLGTPQVAGMIAELSPDRFRAALDVLAEVVVQPVGKGGRILNPERVQVIWR

SEQ ID NO: 5751 - protein, 452 aa, synthetic construct
MKAAIYIRVSTREQVENYSIQAQTEKLTALCRCKDWDVYDIFIDGGYSGSNMNRPALNEMLSKLHEIDAVVVYRLDRLSRSQRDTITLIEEYFLKNNVEFVSLSETLDTSSPFGRAMIGILSVFAQLERETIRDRMVMGKIKRIEAGLPLTTAKGRTFGYDVIDTKLYINEEEAKQLQLIYDIFEEEQSITFLQKRLKKLGFKVRTYSRYNSWLTNDLYCGYVSYKDKVHVKGIHEPIISEEQFYRVQEIFTRTGKNPNMNRDSASLLNNLVVCSKCGLGFVHRRKDTMSRGKKYHYRYYSCKTYKHTHELEKCGNKIWRADRLEELIINRVNNYSFASRNADKEDELDSLNEKLKIEHAKRKRLFDLYINGSYEVSELDSMMNDIDAQINYYESQIEVNEELKKDKKIQESLANLATVDYDSLEFREKQLYLKSLINKIYIDGEQVTIEWL

SEQ ID NO: 5752 - protein, 452 aa, synthetic construct
MKAAIYIRVSTREQVENYSIQAQTEKLTALCRSKDWDVYDIFVDGGYSGSNLNRPALNEMLSKLHEIDAVVVYRLDRLSRSQRDTITLIEEYFLKNNVEFVSLSETLDTSSPFGRAMIGILSVFAQLERETIRDRMVMGKIKRIEAGLPLTTAKGRTFGYDVIDTKLYINEEEAKQLQLIYDIFEEEQSITFLQKRLKKLGFKVRTYNRYNSWLTNDLYCGYVSYKDIVHVKGIHEPIISEEQFYRVQEIFTRMGKNPNMNRDSASLLNNLVVCSKCGLGFVHRRKDTMSRGKKYHYRYYSCKTYKHIHELEKCGNKIWRADKLEELIIDRVNNYSLASRDVDKEDELDGLNEKLKIEHAKRKRLFDLYINGSYEVSELDSMMNDIDAQINYYESQIEANEELKRNKKIQENLAELATVDFDSLEFREKQLYLKSLINKIYIDGEQVTIEWL

SEQ ID NO: 5753 - protein, 452 aa, synthetic construct
MKAAIYIRVSTQEQVENYSIQAQTERLTALCRSKDWDVYDIFIDGGYSGSNMNRPALNEMLSKLHEIDAVVVYRLDRLSRSQRDTITLIEEYFLKNNVEFVSLSETLDTSSPFGRAMIGILSVFAQLERETIRDRMVMGKIKRIEAGLPLTTAKGRTFGYNVIDTKLYINEEEAKQLQLIYDIFEEEQSITFLQKRLKKLGFKVRTYSCYNNWLTNDLYCGYVSYKDKVRVRGIHEPIISEEQFYRVQEIFTRMGKNPNTNRDSASLLNNLVVCRKCGLGFVHRRKDTTSRGKKYHYRYYSCKTYKHTHELEKCGNKIWRADKLEELIIDRVNNYSFASRNADKEDELDSLNEKLKTEHAKKKRLFDLYINGSYEVSELDSMMNDIDAQINYYESQIEANEKLKRNKKVQENLADLVTVDFDSLEFREKQLYLKSLINKIYIDGERVTIEWL

SEQ ID NO: 5754 - protein, 452 aa, synthetic construct
MKAAIYIRVSTREQVENYSIQAQTEKLTALCRSKDWDVYDIFIDGGYSGSNMNRPALNEMLSKLHEIDAVVVYRLDRLSRSQRDTITLIEEYFLKNSVEFVSLSETLDTSSPFGRAMIGILSVFAQLERETIRDRMVMGKIKRIEAGLPLTTAKGRTFGYDVIDTKLYINEEEAKQLRLIYDIFEEEQSITFLQKRLKKLGFKVRTYNRYSNWLTNDLYCGYVSYRDKVHVKGIHEPIISEEQFYRVQEIFTRMGRNPNMNRDSASLLNNLVVCSKCGLGFVHRRKDAMSRDKKYHYRYYSCKTYKHIHELEKCGNKIWRADKLEELIIDRVNNYSLASRNVDKEDELDSLNEKLKTEHAKKKRLFDLYINGSYEVSELDSMMNDIDAQINYYESQIEANEELKKNKKIQENLAHLATVDFDSLEFREKQLYLKSLINKIYIDGEQVTIEWL

SEQ ID NO: 5755 - protein, 452 aa, synthetic construct
MKAAIYIRVSTQEQVGNYSIQAQTEKLTALCRSKDWDVYDIFIDGGYSGSNMNRPALNEMLSKLHEIDAVVVYRLDRLSRSQRDTTTLIEEYFLKNNVEFVSLSETLDTSSPFGRAMIGILSVFAQLERETIRDRMVMGKIKRVEAGLPLTTAKGRTFGYDVIDTRLYVNEEEARQLQLIYDIFEEEQSITFLQKRLKKLGFKVRSYNRYNNWLTNDLYCGYVSYKDKVHVKGIHEPIISEEQFYRVQEIFTRMGKNPNMNRDSASLLSNLVVCSKCGLSFVHRSKDTVSRGKRYHYRYYSCKTYKHTHELEKCGNKTWRADKLEELIINRVNNYSFASRNVDKEDELDGLNEKLKIERAKKKRLFDLYINGSYEVSELDSMMNDIDAQINYYESQIEANEELEKNKKVQESLAELATVDFDSLEFREKQLYLKSLINKIYIDGEQVTIEWL

SEQ ID NO: 5756 - protein, 452 aa, synthetic construct
MKAAIYIRVSTREQVENYSIQAQTEKLTALCRSKDWDVYDIFIDGGYSGSNMNRPALNEMLSKLHEIDAVVVYRLDRLSRSQRDTITLIEEYFLKNNVEFVSLSETLDTSSPFGRAMIGILSVFAQLERETIRDRMVMGKVKRIEAGLPLTTAKGRTFGYDVIDTKLYINEEEAKQLQLVYDIFEEEQSITFLQKRLKKLGFKVRTYSCYNNWLTNDLYCGYVSYKDKVHVKGIHEPIISEEQFYRVQEIFTHMGKNPNMNRDSASLLNNLVVCSKCGLGFVHRRKDTMSRGKKYHYRYYSCKTYKHTHELEKCGNKIWRADKLEELIINRVRNYRFASRNADKEDELDGLNEKLKIEHAKRKRLFDLYINGSYEVGELDSMMNDIDAQINYYESQIEANEELKKNKKIQEDLANLATVDYDSLEFREKQLYLKSLINKIYIDGEQVTIEWL

SEQ ID NO: 5757 - protein, 452 aa, synthetic construct
MKAAIYIRVSTREQVENYSIQAQTEKLTALCRSKDWDVYDIFIDGGYSGSNMNRPALNEMLSKLHEIDAVVVYRLDRLSRSQRDTITLIEEYFLKNNVEFVSLSETLDTSSPFGRAMIGILSVFAQLERETIRDRMVMGKIKRVEAGLPLTTAKGRTFGYDVIDTKLYINEEEAKQLQLIYDIFEEEQSITFLQKRLKKLGFKVRTYNLYSSWLTNDLYCGYVSYKDKVHVKGIHEPIISEEQFYRVQEIFARMGKNPNMNRDSASLLNNLVVCGKCGLGFVHRRKDTTSRGKKYHYRYYSCKTYKHTHELERCGNKIWRADKLEELIINRVNNYSIASRDVDKEDELDSLNEKLRIEHAKKRRLFDLYLNGSYEVSELDSMMNDIDAQINYYESQIEANEELKKNKKIQENLADLATVDFDSLEFREKQLYLKSLINKIYIDGEQVTIEWL

SEQ ID NO: 5758 - protein, 452 aa, synthetic construct
MKAAIYIRVSTREQVENYSIQAQTEKLTALCRSKDWDVYDIFIDGGYSGSNMNRPALNEMLGKLHEIDAVVVYRLDRLSRSQRDTITLIEEYFLKNNVEFVSLSETLDTSSPFGRAMIGILSVFAQLERETIRDRMVMGKIKRIEAGLPLTTAKGRTFGYDVVDTRLYINEEEARQLQLIYDIFEEEQSITFLQKRLKKLGFKVHTYNRYNNWLTNGLYCGYVSYKDKVHVKGIHEPIISEEQFYRVQEIFTRMGKNPNMNRDSASLLNNLVVCSKCGLGFVHRRKDTTSRGKKYHYRYYSCKTYKHTHELEKCGNKIWRADKLEELIISHVNNYSFASRNVDKEDELDSLNEKLKIEHAKRKRLFDLYINGSYEVSELDSMMNDIDAQINYYESQIEANEELRKNKKVQENLADLAAVDYDSLEFREKQLYLKSLINKIYIDGEQVTIEWL

SEQ ID NO: 5759 - protein, 452 aa, synthetic construct
MKAAIYIRVSTREQVENYSIQAQTEKLTALCRSKDWDVYDIFIDGGYSGSNMNRPALNEMLSKLHEIDAVVVYRLDRLSRSQRDTITLIEEHFLKNNVEFVSLSETLDTSSPFGRAMIGILSVFAQLERETIRDRMVMGKIKRVEAGLPLTTAKGRTFGYDVIDTKLYINEEEAKQLQLIYDIFEEGQSITFLQKRLKKLGFKVHTYSRYNNWLTNDLYCGYVSYKDKVHVKGIHEPIISEEQFYRVQEIFTRMGKNPNMNRDSASLLNNLVVCSKCGLGFVHRRKDTVSRGKKYHYRYYSCKTYKHTHELEKCGNKIWRADKLEELIINRVNNHSIVSRNADREDELDSLNEKLKIEHAKKKRLFDLYINGSYEVSELDSMMNDIDAQIDYYGSQIETNEELKKNKKIQENLANLATVDFDSLEFREKQLYLKSLINKIYIDGEQVTIEWL

SEQ ID NO: 5760 - protein, 469 aa, synthetic construct
MSYTTPVRAAVYLRVSEDRSGEQLGVARQREDCLKLCDQRKWVPVEYLDNDVSASTGKRRPAYEQMLADIAAGKIAAVVAWDLDRLHRRPIELEAFMSLADEKRLALATVAGDVDLATPQGRLVARLKGSVAAHETEHKKARQRRAARQKAERGYPNWSKAFGYLPGPNGPEPDPRTAPLVKQAYADILAGASLGDVCRQWNDAGAFTITGRPWTSTTLSKFLRKPRNAGLRAYKGARYGPVDRDAIVGKAQWSPLVDEATFWAAQAVLDAPGRAPGRKSVRRHLLTGLAGCGKCGNHLAGSYRTDGKVVYVCKACHGVTILADNIEPILYHIVAERLAMPDAVDLLRRETHDAAEAETIRLELETLYGELDRLAVERAEGLLTARQVKISTDIVNAKITKLQARQQDQERLCVLDGIPLGTPQVAGMIAELSPDRFRAVLDVLAEVVVQPVGKGGRIFNPERVQVNWR

SEQ ID NO: 5761 - protein, 469 aa, synthetic construct
MSYTTPVRAAVYLRISEDRSGEQLGVARQREDCLKLCDQRKWVPVEYLDNDVSASTGKRRPAYEQMLADITAGKIAAVVAWDLDRLHRRPVELEAFMSLADEKRLALATVAGDVDLATPQGRLVARLKGCVAAHETEHKKARQRRAARQKAERGLPNWSKAFGYLPGPNGPEPDPRTAPLVKQAYADILAGASLGDVCRQWNDVGAFTITGRPWTSTTLSKFLRKPRNAGLRAYKGARYGPVDRDAIVGKAQWSPLVDEATFWAAQAVLDAPGRAPGRKSVRRHLLTGLAGCGKCGNHLAGSYRTDGQVVYVCKACHGVSILAVNIEPILYHTVAERLAMPDAVDLLRREIHDAAEAETIRLELETLHGELDRLAVERAEGLLTARQVKISTDIVNAKITKLQARQLDQERLRVFDGIPLGTPQVAGMIAELSPDRFRAVLDVLAEIVVQPVGKSGRIFNPERVQVNWR

SEQ ID NO: 5762 - protein, 452 aa, synthetic construct
MKAAIYIRVSTREQVENYSIQAQTERLTALCRSKDWDVYDIFIDGGYSGSNMNRPALNEMLSKLHEIDAVVVYRLDRLSRSQRDTITLIEEYFLKNNVEFVSLSETLDTSSPFGRAMIGILSVFAQLERETIRDRMVMGKIKRVEAGLPLTTAKGRTFGYDVIDTKLYINEEEAKQLQLIYDIFEEEQSITFLQKRLKKLGFKVRTYNRYNSWLTNDLYCGYVSYKDKVHVKGIHEPIISEEQFYRVQEIFTRMGKYPNMNRDSASLLNNLVVCGRCGLGFVHRRKDTMSRGKKYHYRYYSCKTYKHIHELEKCGNKIWRADKLEELIINRVDNYSLASRNVDKEDELDSLNEKLKIEHAKKKRLFDLYINGSYEVSELDSMMSDIDAQINYYESQIEANEELKRNKKVQENLADLATVDFDSLEFREKQLYLKSLINKIYIDGEQVTIEWL

SEQ ID NO: 5763 - protein, 485 aa, synthetic construct
MTKKVAIYTRVSTTNQAEEGFSIDEQIDRLTKYAEAMGWQVSDTYTDAGSSGAKLERPAMQRLINDIENKAFDTVLVYKLDRLSRSVRDTLYLVKDVFTKNKIDFISLNESIDTSSAMGSLFLTILSAINEFERENIKERMTMGKLGRAKSGKSMMWTKTAFGYYHNRKTGVLEIVPLQATIVEQIFTDYLSGISLTKLRDKLNESGHIGKDIPWSYRTLRQTLDNPVYCGYIKFKDSLFEGMHKPIIPYETYLKVQKELEERQQQAYERNNNPRPFQAKYMLSGMARCGYCGAPLRIVLGRKRKDGSRTMKYHCANRFPRKTKGVTVYNDNKKCGSGTYDLRNLENAVIDNLIGFQENSDSLLKIINGNNQPILDTSSFKKQISQIDKKIQKNSDLYLNDFITMDELKDRTDSLQAEKKLLKAKISENKFNDSTDVFELVKARLGSIPINELSYDNKKKIVNDLVSKVDVTADNVDIIFKFQLA

SEQ ID NO: 5764 - protein, 452 aa, synthetic construct
MKAAIYIRVSTREQVENYSIQAQTEKLTALCRSKDWDVYDIFIDGGYSGSNMNRPALNEMLSKLHEIDAVVVYRLDRLSRSQRDTITLIEEYFLKNNVEFVSLSETLDTSSPFGRAMIGILSVFAQLERETIRDRMVMGKIKRIEAGLPLTTAKGRTFGYDVVDTRLYINEEEARQLQLIYDIFEEEQSITFLQKRLKKLGFKVRTYSCYNNWLTNDLYCGYVSYKDKVHVKGIHEPIISEEQFYRVQEIFTRMGKNPNMNRDSASLLNNLVVCSKCGLGFVHRRKDTMSRGKKYHYRYYSCKTYKHTHELEKCGNKIWRADKLEELIINRVNNYSSASRNVDKEDELDSLNEKLKIEHAKRKRLFDLYINGSYEVSELDSMMNDIDAQIDYYESQIEANEGLKKDKKIQENLANLATMDYDSLEFREKQLYLKSLINKIYIDGEQVTIEWL

SEQ ID NO: 5765 - protein, 485 aa, synthetic construct
MTKKVAIYTRVSTINQAEEGFSIDEQIDRLTKYAEAMGWQVSDTYTDAGLSGAKLERPAMQRLINDIENKAFDTVLVYKLDRLSRSVRDTLYLVKDVFTKNKIDFISLSESIDTSSAMGSLFLTILSAINEFERENIKERMTMGKLGRAKSGKSMMWTKTAFGYYHNRKTGILEIVPLQATIVEQIFTDYLSGISLTKLRDKLNESGHIGKDIPWSYRTLRQTLDNPVYCGYIKFKGSLFEGMHKPIIPYETYLKVQKELEERQQQTYKRNNNPRPFQAKYMLSGMARCGYCGAPLKIVLGHKRKDGSRTMKYHCANRFPRRTKGVTVYNNNKKCDSGTYDLSSLENTVIDNLIGFQGNNDSLLKIINGNNQPILDTSSFKKQISRIDKKIQKNSDLYLNDFITMDELKDRTDSLQAEKKLLKAKISENKFNDSTDVFELVKTQLGSIPINELSYDNKKKIVNNLVSKVDVTADNVDIIFKFQLA

SEQ ID NO: 5766 - protein, 485 aa, synthetic construct
MTKKVAIYTRVSTTNQAEEGFSIDEQIDRLTRYAEAMGWQVSDTYTDAGFSGAKLERPAMQRLINDIENNAFDTVLVYKLDRLSRSVRDTLHLVKDVFTKNKIDFISLNESIDTSSAMGSLFLTILSAINEFERENIKERMTMGKLGRAKSGKSMMWTKTAFGYYHNRKTGILEIVPLQATIVEQIFTDYLSGISLTKLRDKLNESGHIGKDIPWSYRTLRQTLDNPVYCGYIKFKDSLFEGMHKPIIPYETYLKVQKELEERQQQTYERNNNPRPFQAKYMLSGMARCGYCGAPLRIVLGHRRKDGSRTMKYHCANRFPRKTEGVTVYNDNKKCDSGTYDLSSLENTVIDILIGFQENNDSLLKIINGNSRPILDTSSFKKQVSQIDKKIQKNSDLYLNDFITMDELKERTDSLQAEKKLLKAKISENKFNDSTDVFELVKTQLGSIPINELSYDSRKKIVNSLVSKVDVTADNVDIIFKFQLA

SEQ ID NO: 5767 - protein, 452 aa, synthetic construct
MKAAIYIRVSTREQVENYSIQAQTEKLTALCRSKDWDVYDIFIDGGYSGSNMNRPALNEMLSKLHEIDAVVVYRLDRLSRSQRDTITLIEEYFLKNNVEFVSLSETLDTSSPFGRAMIGILSVFAQLERETIRDRMVMGKIKRIEAGLPLTTAKGRTFGYDVIDTKLYINEEEAKQLQLIYDIFEEEQSITRLQKRLRELGFKVRTYNRYNSWLTNDLYCGYVSYKDKVHVKGIHEPIISEEQFYRVQEIFTRMGKNPNMNRDSASLLNNLVVCSKCGLGFVHRRKDTMSRGKKYHYRYYSCKTYKHIHELEKCGNKIWRADKLEELVINRVNNYSFASRNVDKEDELDSLNEKLKIEHAKKKRLFDLYINGSYEVSELDSMMSDIDAQINYYESQIEANEGLKRDKKIQEGLADLATVDFDSLEFREKQLYLKSLINKIYIDGEQVTIEWL

SEQ ID NO: 5768 - protein, 452 aa, synthetic construct; identical to SEQ ID NO: 4515

SEQ ID NO: 5769 - protein, 452 aa, synthetic construct
MKAAIYIRVSTREQVENYSIQAQTEKLTALCRSKDWDVYDIFIDGGYSGSNMNRPALNEMLSKLHEIDAVVVYRLDRLSRSQRDTITLIEEYFLKNNVEFVSLSETLDTSSPFGRAMIGILSVFAQLERETIRDRMVMGKIKRIEAGLPPTTAKGRTFGYDVIDTKLYINEEEARQLQLIYDIFEEEQSITFLQKRLKKLGFKVRTYSCYNNWLTNDLYCGYVSYKDKVHVKGIHEPIISEEQFHRVQEIFARVGKNPNMNRDSASLLNNLVVCGKCGLGFVHRRKDTMSRGKKYHYRYYSCKTYKHIHELEKCGNKIWRADKLEELIINRVNNYSFASRNVGKVDELDSLNEKLKIEHVKKRRLFDLYINGSYEVSELDSMMNDIDAQISYYESQIEANEELKENKKIQENLADLATVDFDSLEFREKQLYLKSLINKIYIDGEQVTIEWL

SEQ ID NO: 5770 - protein, 469 aa, synthetic construct
MSYTTPVRAAVYLRISEDRSGEQLGVARQREDCLKLCDQRKWVPVEYLDNDVSASTGKRRPAYEQMLADITAGKIAAVVAWDLDRLHRRPVELEAFMSLADEKRLALATVAGDVDLATPQGRLVARLKGCVAAHETEHKKARQRRAARQKAERGHPNWSKAFGYLPGPDGPEPDPRTAPLVKQAYADILAGASLGDVCRQWNDAGAFTITGRPWTTTTLSKFLRKPRNAGLRAYKGARYGPVDRDAIVGKAQWSPLVDEATFWAAQAVLDAPGRAPGRKSVRRHLLTGLAGCGKCGNHLAGSYRTDGRVVYVCKACHGIAILADNIEPILYHIVAERLAMPDAEDLLRREIHDTAEAETIRLELETLYGELDRLAVERAEGLLTARQVKISTDIVNAKITRLQARQLDQERLRVFDGIPLGTPQVAGVIAGLSPDRFRAVLDVLAEVVVQPVGKSGRISNPERVQVNWR

SEQ ID NO: 5771 - protein, 485 aa, synthetic construct
MTKKVAIYTRVSTTNQAEEGFSIDEQVDRLTKYAEAMGWQVSDTYTDAGFSGAKLERPAMQRLINDIENKAFDTVLVYKLDRLSRSVRDTLYLVKDVFTKNKIDFISLSEGIDTSSAMGSLFLTILSAINEFERENIKERMTMGKLGRAKSGKSMMWTKTAFGYYHNRKTGILEIVPLQATIVEQIFTDYLSGISLTKLRDKLNESGHIGKDIPWSYRTLRQTLDNPVYCGYIKFKDSLFEGMHKPIIPYETYLKVQKELEERQQQTYERNNNPRPFQAKYMLSGMARCGYCGAPLRIVLGHKRKDGSRTMKYHCANRFPRKTKGVTVYNDNKKCDSGTYDLSNLENTVIDNLIGFQENNDSLLKIINGDNQPILDTSSFKKQISQIDKKIQKNSDLYLNDFITMDELKDRTDSLQAEKKLLEAKISGNKFNGSTDVFEQVKTQLGSIPINELSYDNKKKIVNNLVSKVDVTADNVDIIFKFQLA

SEQ ID NO: 5772 - protein, 469 aa, synthetic construct
MSYTTPVRAAVYLRISEDRSGEQLGVARQREDCLRLCDQHKWVPVEYLDNDVSASTGKRRPAYEQMLADITAGEIAAVVAWDLDRLHRRPTELEAFMSLADEKRLALATVAGDVDLATPQGRLVARLKGCVAAHETEHKKARQRRAARQKAERGLPNWSKAFGYLPGPNGPEPDPRTAPLVKQAYADILAGASLGDVCRQWNDAGAFTITGRPWTTTTLSKFLRKPRNAGLRAYKGARYGPVDRDAIVGKAQWSPLVDEATFWAAQAVLDAPGRAPGRKSVRRHLLTGLAGCGKCGNYLAGSYRTDGRVVYVCKACHGVSILADNIEPILYHTVVERLAMPDAVDLLRREIHDGAEAETIRLELETLYGELDRLAAERAEGLLTARQVKISTDIVNAKITELQARQLDQERLCVFDGVPLGTPQVAGVIAELSPDRFRAVLDVLAEVVVQPVGKSGRIFNPERVQVNWR

SEQ ID NO: 5773 - protein, 452 aa, synthetic construct
MKAAIYIRVSTREQVENYSIQAQTEKLTALCRSKDWDVYDIFIDGGYSGSNMNRPALNEMLSKLHEIDAVVVYRLDRLSRSQRDTITLIEEYFLKNNVEFVSLSETLDTSSPFGRAMIGILSVFAQLERETIRDRMVMGKIKRIEAGLPLTTAKGRTFGYDVIDTKLYINEEEAKQLQLIYDIFEEEQSITFLQKRLKKLGFKVRSYNRYNNWLTNDLYCGYVSYKDKVHVKGIHEPIISEEQFYRVQEIFTRMGKNPNMNRDSASLLNNLVVCSKCGLGFVHRRKDAMSRDKKYHYRYYSCKTYKHIHELEKCGNKIWRADKLEELIINRVNNYSFASRNVDKEDELDSLNEKLKIEHAKKRRLFDLYINGNYEVSELDSMMNDIDAQINYYESQIEANEELKKNKKIQENLAELATVDFDSLEFREKQLYLKSLINKIYIDGEQVTIEWL

SEQ ID NO: 5774 - protein, 452 aa, synthetic construct
MKAAIYIRVSTREQVENYSIQAQTEKLTALCRSKDWDVYDVFIDGGYSGGNMNRPALNEMLSKLHEIDAVVVYRLDRLSRSQRDTITLIEEYFLKNSVEFVSLSETLDTSSPFGRAMIGILSVFAQLERETIRDRMVMGKIKRIEAGLPLTTAKGRTFGYDVIDTKLYINEEEAKQLQLIYDIFEEEQSITFLQKRLKKLGFKVRTYSCYNNWLTNELYCGYVSYKDKVHVKGIHEPIISEEQFYRVQEIFTRMGKNTNMNRDSASLLNNLVVCSKCGLGFVHRRKDTMRRGKKYHYRYYSCKTYKHIHELEKCGNKIWRADKLEELIINCVNNYSFASRNVDKEDELDSLNEKLKIEHAKKKRLFDLYINGSYEVSELESMMNDIDAQINYYESQIEANEELKKNKKIQENLANLASVDYDSLEFREKQLYLKGLINKIYIDGEQVTIEWL

SEQ ID NO: 5775 - protein, 452 aa, synthetic construct
MKAAIYIRVSSREQVENYSIQAQTEKLTALCRSKDWDVYDIFIDGGYSGSNMNRPALNEMLSKLHEIDAVVVYRLDRLSRSQRDTITLIEEYFLKNNVEFVSLSETLDTSSPFGRAMIGILSVFAQLERETIRDRMVMGKIKRIEAGLPLTTAKGRTFGYDVIDTKLYINEEEAKQLQLIYDIFEEEQSITFLQKRLKKLGFKVRTYNRYSNWLTNDLYCGYVSYKDKVHVRGIHEPIISEEQFYRVQEIFTRMGKNPNMNRDSASLLNNLVVCSKCGLGFVHRRKDAMGRDKKYHYRYYSCKTYKHIHELEKCGNKIWRADELEELIINRVNNYSVANRNVDKEEELDSLNEKLKIEHAKKKRLFDLYINGSYEVSELDSMMSDIDAQISHYESQIEANEELKKNKKIQENLADLATVDFDSLEFREKQLYLKSLINKIYIDGEQVTIEWL

SEQ ID NO: 5776 - protein, 452 aa, synthetic construct
MKAAIYIRVSTREQVENYSIQAQTEKLTALCRSKDWDVYDIFIDGGYSGSNMNRPALNEMLSKLHEIDAVVVYRLDRLSRSQRDTITLIEEYFLKNNVEFVSLSETLDTSSPFGRAMIGILGVFAQLERETIRDRMVMGKIKRVEAGLPLTTAKGRTFGYDVIDTKLYINEEEAKQLQLIYDIFEEEQSITFLQKRLKKLGFKVRTYSRYNNWLTNDLYCGYVSYKDKVHVKGIHEPIISEEQFYRVQEIFTRMGKNPNMNRDSASLLNNLVVCSKCGLGFVHRRKDTMSRGKKYHYRYYSCKTYKHIHELEKCGNKIWRADKLEELIINRVNNYSFASRNVDKEDELGSLYEKLKIEHAKKRRLFDLYINGSYEVSELDSMMNDIDAQINYYESQIEANEELKKNKKIQENLAYLATVDFDSLEFRAKQLYLKSLINKIYIDGEQVTIEWL

SEQ ID NO: 5777 - protein, 452 aa, synthetic construct
MKAAIYIRVSTQEQVENYSIQAQTEKLTALCRSKDWDVYDIFIDGGYSGSNMNRPALNDMLSKLHEIDAVVVYRLDRLSRSQRDTITLIEEYFLKNNVEFVSLSETLDTSSPFGRAMIGILSVFAQLERETIRDRMVMGKIKRIEAGLPLTTAKGRTFGYDVIDSRLYINEEEAKQLQLIYDIFEEEQSITFLQKRLKKLGFKVRTYSRYNSWLTNDLYCGYVSYKDKVHVKGIHDPIISEEQFYRVQEIFTRMGKNPNMNRDSASLLNNLVVCSKCGLGFVHRRKDTISRGKKYHYRYYSCKTYKHIHELEKCGNKIWRADKLEELIVNHVNNYSFASRNVDKEGELDSLNEKLKIEHAKKKRLFDLYINGSYEVSELDSMMNDIDAQINYYESQIEASEELRKNKKIQENLADLAAVDYDSLEFREKQLYLKSLINKIYIDGEQVTIEWL

SEQ ID NO: 5778 - protein, 452 aa, synthetic construct
MKAAIYIRVSTREQVENFSIQAQTEKLTALCRSKDWDVYDIFIDGGYSGSNMNRPALNEMLSKLHEIDAVVVYRLDRLSRSQRDTITLIEEYFLKNNVEFVSLSETLDTSSPFGRAMIGILSVFAQLERETIRDRMVMGKIKRIEAGLPLTTAKGRTFGYDVIDTKLYINEEEAKQLQLIYDIFEEEQSITSLQKRLKKLGFKVHTYNRYNSWLTNELYCGYVSYKDKVHVKGIHEPIISEEQFYRVQEIFTRMGKNPNINRDSASLLNNLVVCSKCGLSFVHRRKDTMSRGKKYHYRYYSCKTYKHVHELEKCGNKIWRADKLEELIIDRVNNYSLASRNVDKDDGLDSLNEKLKIEHAKKKRLFDLYINGSYNVSELDSMMNDIDAQINYYESQIEANEELKKNKKIQESLAGLATVDFDSLEFREKQLYLKSLINKIYIDGEQVTIEWL

SEQ ID NO: 5779 - protein, 452 aa, synthetic construct
MKAAIYIRVSTQEQVGNYSIQAQTEKLTALCRSKGWDVYDIFIDGGYSGSNMNRPALNEMLSKLHEIDAVVVYRLDRLSRSQRDTTTLIEEYFLKNNVEFVSLSETLDTSSPFGRAMIGILSVFAQLERETIRDRMVMGKIKRIEAGLPLTTAKGRTFGYDVIDTKLYINEEEAKQLQLIYDIFEEEQSITSLQKRLKKLGFKVRTYNRYNRWLTNDLYCGYVSYKDKVHVKGIHEPIISEEQFYRVQEIFTRMGKNPNMNRDSASLLNNLVVCSKCGLGFVHRSKDTMCRGKKYHYRYYSCKTYKHTHELEKCGNKTWRADKLEELIINRVSNYSFASRNVDKDDELDSLNEKLKTEHAKKKRLFDLYINGSHEVSELDSMMNDINAQINHYESQIEANEELRKNKKIQENLADLATVDFDSLEFREKQLYLKSLINKIYIDGEQVTIEWL

SEQ ID NO: 5780 - protein, 452 aa, synthetic construct
MKAAIYIRVSTREQVENYSIQAQTEKLTALCRSKDWDVYDIFIDGGYSGSNLDRPALSEMLSKLHEIDAVVVYRLDRLSRSQRDTITLIEEYFLKNNVEFVSLSETLDTSSPFGRAMIGILSVFAQLERETIRDRMVMGKIKRIEAGLPLITAKGRTFGYDVIDTKLYINEEEAKQLQLIYDIFEEEQSITSLQKRLKKLGFKVRTYSRYSNWLTNDLYCGYVSYKDKVHVKGIHEPIISEEQFYRVQEIFTRMGKNPNMNRDSASLLSNLVVCSRCGLGFVHRRKDTMSRGKKYHYRYYSCKTYKHTHELEKCGNKIWRADKLEELIINRVNNYSFASRNVDKEDELDSLSEKLKIEHAKKRRLFDLYINGSYEVRELDSMMNDIDAQISYYESQIEANEELKKNKKIRENLADLAAVDYDSLEFREKQLYLKSLINKIYIDGEQVTIEWL

SEQ ID NO: 5781 - protein, 452 aa, synthetic construct
MKAAIYIRVSTREQVENYSIQAQTEKLTALCRSKDWDVYDIFVDGGYSGSNMNRPALNEMLGKLHEIDAVVVYRLDRLSRSQRDTITLIEEYFLKNNVEFVSLSETLDTSSPFGRAMIGILSVFAQLERETIRDRMVMGKIKRIEAGLPLTTAKGRTFGYDVIDTKLYINEEEAKQLQLIYDIFEEERSITFLQKRLKELGFEVRTYNRYNNWLTNDLYCGYVSYKDKVHVKGIHEPIISEEQFYRVQEIFTRMGKNPNMNRDSASLLNNLVVCSKCGLSFVHRRKDAMGRDKKYHYRYYSCKTYKHIHELEKCGNKIWRADKLEELIIDRVNNYSVASRNVDKEDELDSLNEKLKIEHAKKKRLFDLYISGSYEVSELDSMMNDIDAQINYYESLIEANEELKRNKKIQENLAELVTVDFDSLEFREKQLYLKSLISKIYIDGEQVTIEWL

SEQ ID NO: 5782 - protein, 469 aa, synthetic construct
MSYTTPVRAAVYLRISEDRSGEQLGVARQREDCLKLCDLRKWVPVEYLDNDVSASTGKRRPAYEQMLADITAGKIAAVVAWDLDRLHRRPIELEAFMSLADEKRLALATVAGDVDLATPQGRLVARLKGCVAAHETEHKKARQRRAARQKAERGLPNWSKAFGYLPGPNGPEPDPRTAPLVKQAYADILAGASLGDVCRQWNDAGAFTITGRPWTTTTLSKFLRKPRNAGLRAYKGARYGPVDRDAIVGKAQWSPLVDEATFWAAQAVLDAPGRAPGRKSVRRHLLTGLAGCGKCGNHLAGSYRTDGRVVYVCKACHGVAILAENIEPILYHVVAERLAMPDAADLLRREIHDAAEAEPIRQELETLYGELDRLAVERAEGLLTARQVKISTDIVNAKITKLQARQLDQERLRVFDGIPLGTPQVAGMIAELSSDRFRAVLDALAEVVVQPVGKGGRIFNPERVQVNWR

SEQ ID NO: 5783 - protein, 469 aa, synthetic construct
MCYTTPVRAAVYLRISEDRSGEQLGVARQREDCLKLCGQRKWVPVEYLDNDVSASTGKRRPAYEQMLADITAGKIAAVVAWDLDRLHRRPVELEAFMSLADEKRLALATVAGDVDLATPQGRLVARLKGCVAAHETEHKKARQRRAARQKAERGHPNWSKAFGYLPGPNGPEPDPRTAPLVKQAYADILAGASLGDVCRQWNDAGAFTITGRPWTTTALSKFLRKPRNAGLRAYKGARYGPVDRDAIVGKAQWSPLVDEATFWAAQAVLDAPGRAPGRKSVRRHLLTGLAGCGKCGNHLAGSYRTDGRIVYVCKACHGIAILADNIEPILYHIVAERLAMPDAVDLLRRETHDAAETETIRLELEALYGELDRLAVERAEGLLTARQVKISTDIVNAKITKLQARQLGQERLRVLDGIPLGTPQVAGAIAGLSPDRFRAVLDVLAEVVVRPVSKSGRIFNPERVQVNWR

SEQ ID NO: 5784 - protein, 452 aa, synthetic construct
MKAAIYIRVSTREQVENYSIQAQTEKLTALCRSKDWDVYDVFIDGGYSGSNMNRPALNEMLSKLHEIDAVVVYRLDRLSRSQRDTITLIEEYFLKNNVEFVSLSETLDTSSPFGRAMIGILSVFAQLERETIRDRMVMGKIKRIEAGLPLTTAKGRTFGYDVVDTKLYINEEEAKQLQLIYDIFEEEQSITFLQKRLKKLGLKVRTYSRYNSWLTNDLYCGYVSYKDKVHVKGVHEPIISEEQFNRVQEIFARMGKNPNMNRDSASLLNNLVVCRKCGLGFVHRRKDTTSRGKKYHYRYYSCKTYKHTHELEKCGNKIWRADKLEELIINRVNNYSFASRNVDKEDELDSLNEKLEIERAKKKRLFDLYISGSYEVSELDSMMNDIDAQINYYESQIEANEELKKNKKIQENLADLAAVDYDSLEFREKQLYLKSLINKIYIDGEQVTIEWL

SEQ ID NO: 5785 - protein, 485 aa, synthetic construct
MTKKVAIYTRVSTTNQAEEGFSIDEQIDRLTKYAEAMGWQVSDTYTDAGSSGAKLERPAMQRLINDIENKAFDTVLVYKLDRLSRSVRDTLYLVKDVFTKNKIDFISLNESIDTSSAMGNLFLTILSAINEFERENIKERMTMGKLGRAKSGKSMMWTKTAFGYYHNRETGLLEIVPLQATIVEQIFTDYLSGISLTKLRDKLNESGHIGKDIPWSYRTLRQTLDNPVYCGYIKFKGSLFEGMHKPIISYETYLKVQKELEERQQQTYERNNNPRPFQAKYMLSGMARCGYCGAPLKIVLGHKRKDGSRTMKYHCANRFPRKTKGVTVYNDNKKCDSGTYDLSNLENTVIDNLIGFQENNDSLLKIINGNNQPILDTSSFKEQISQIDKKIQKNSDLYLNDFITMDELKDRTDSLQAEKKLLKAKISENKFNDSTGVFELVKTQLGSIPINELSYDNKKKIVNNLVSKVDVTADNVDIIFKFQLA

SEQ ID NO: 5786 - protein, 452 aa, synthetic construct
MKAAIYIRVSTQEQVGNYSIQAQTEKLTALCRSKGWDVYDIFIDGGYSGSNMNRPALNEMLSKLHEIDAVVVYRLDRLSRSQRDTTTLIEEYFLKNNVEFVSLSETLDTSSPFGRAMIGILSVFAQLERETIRDRMVMGKIKRIEAGLPLTTAKGRTFGYDVIDTKLYINEEEAKQLQLIYDIFEEEQSITSLQKRLKKLGFKVRTYNRYSNWLTNDLYCGYVSYKDKVHVKGIHEPIISEEQFYRVQEIFTRMGKNPNMNRGSASLLSNLVVCSKCGLGFVHRSKDTMSRGKKYHYRYYSCKTYKHTHELEKCGNKTWRADKLEELIINRVNNYSFASRNADKEDELDSLNEKLRIERAKKKRLFDLYINGSYEVSELDGMMNDIDAQINYYESQIEANEELEKNKKIQENLADLATVDFDSLEFREKQLYLKSLINKIYIDGEQVTIEWL

SEQ ID NO: 5787 - protein, 469 aa, synthetic construct
MSYTTPVRAAVYLRISEDRSGEQLGVARQREDCLKLCAQRRWVPVEYLDNDVSASTGKRRPAYEQMLADITAGKIAAVVAWDLDRLHRRPIELEAFMSLADEKRLALATVAGDVDLATPQGRLVARLKGCVAAHETEHKKARQRRAARQKAERGYPNWSKAFGYLPGPNGPEPDPRTAPLVKQAYADVLAGASLGDVCRQWNGAGAFTITGRPWTTTTLSKFLRKPRNAGLRAYKGARYGPVDRDAIVGKAQWSPLVDEATFWAAQAVLDAPGRAPGRKSVRRHLLTGLAGCGKCGSRLAGSYRTDGQVVYVCKACHGISILAVNIEPILYHVVAERLAMPDAVDLLRREIHDAAEAETIRLELETLYGELDRLAVERAEGLLTARQVKISTDIVNAKITKLQARQLDQERLRVFDGIPLGTPQVAGMIAELSPDRFRAVLDVLAEVVVRPVGKRGRIFNPERVQVNWR

SEQ ID NO: 5788 - protein, 452 aa, synthetic construct
MKAAIYIRVSTQEQVENYSIQAQTEKLTALCRSKDWDVYDIFIDGGYSGSNMNRPALNEMLSKLHEIDAVVVYRLDRLSRSQRDTTTLIEEYFLKNNVEFVSLSETLDTSSPFGRAMIGILSVFAQLERETIRDRMVMGKIKRIEAGLPLTTAKGRTFGYDVIDTKLYVNEEEAKQLRLIYDIFEEEQSITFLQKHLKKLGFKVRTYNRYHNWLTNDLYCGYVSYKDKVHVKGIHEPIISEEQFYRVQEIFTRMGKNPNMNRDSASLLSNLVVCSKCGLGFVHRSKDTMSRGKKYHYRYYSCKTYKHTHELEKCGNKIWRADKLEELIINRVNNYSFVSRNVDKGDELVSLNEKLKIEHAKKKRLFDLYINGSYEVSELDSMMNDIDAQINYYESQIEANEELKKSKKIQENLADLATVDFDSLEFREKQLYLKSLINKIYIDGEQVTIEWL

SEQ ID NO: 5789 - protein, 469 aa, synthetic construct
MCYTTPVRAAVYLRISEDRSGEQLGVARQREDCLKLCDQREWVPVEYLDNDVSASTGKRRPAYEQMLADITAGKIAAVVAWDLDRLHRRPIELEAFMSLADEKRLALATVAGDVDLATPQGRLVARLKGSVAAHETEHKKARQRRAARQKAERGYPNWSKAFGYLPGPNGPEPDPRTAPLVKQAYADILAGASLGDVCRQWNDVGAYTITGRPWTTTTLSKFLRKPRNAGLRAYRGARYGPVDRDAIVGKAQWSPLVDEATFWAAQAVLDAPGRAPGRKSVRRHLLTGLAGCGKCGNHLAGSYRTDGRVVYVCKACHGVAILADNIEPILYHIVAERLAMPDAVDLLRREIHDVAEAEAIRLELEALYGELDRLAVERAEGLLTARQVKISTDIVNAKITKLQARQLDQERLRVLDGIPLGTPQVADKIAELSPDRFRAVLDVLAEVVVQPVGKSGRVFNPERVQVNWR

SEQ ID NO: 5790 - protein, 469 aa, synthetic construct
MSYTTPVRAAVYLRISEDRSGEQLGVARQREDCLKLCDQRKWVPEEYLDNDVSASTGKRRPAYEQMLADITAGKIAAVVAWDLDRLHRRPIELEAFMSLADERRLALATVAGDVDLATPQGRLVARLKGSVAAHETEHKKARQRRAARQKAERGLPNWSKAFGYLPGPNGPEPDPRTAPLVKQAYADILAGASLGDVCRQWNDAGAFTITGRPWTTTTLSKFLRKPRNAGLRAYKGARYGPADRDAIVGKAQWSPLVDEATFWAAQAVLDAPGRAPGRKSVRRHLLTGLAGCGKCGNHLAGSYRTDGRVVYVCKACHGVAILADNIEPFLYHIVAERLAMPDAVDLLRREVHDAAEAETIRPELETLYGELDRLAVERAEGLLTARQVKISTDIVNAKITKLQARQLDQERLRVFDGIPLGTPHVAGMIAELSPDRFRAVLDVLAEVVVRPVGKGGRIFNPERVQVNWR

SEQ ID NO: 5791 - protein, 452 aa, synthetic construct
MKAAIYIRVSTQEQVENYSIQAQTEKLTALCRSKDWDVYDIFIDGGYSGSNMNRPALNEMLSKLHEIDAVVVYRLDRLSRSQRDTTTLIEEYFLKNNVEFVSLSETLDTSSPFGRAMIGILSVFAQLERETIRDRMVMGKIKRIEAGLPLTTAKGRTFGYDVIDTKLYINEEEAKQLRLIYDIFEEEQSITFLQKRLKKLGFKVRTYNRYNNWLTNDLYCGYVSYKDKVHVKGIHEPIISEEQFYRVQEIFARMGKNPNMNRGSASLLNNLVVCSKCGLGYVHRSKDTMCRGKKYHYRYYSCKTYKHTHELEKCGNKIWRADKLEELIINRVNNYSFTSRNVDKEDELDGLNEKLKIEHAKKKRLFDLYINGSYEVSELDSMMNDIDAQINYYESQIEAVEGLKKNRKIQENLADLATVDFDSLEFREKQLYLKSLINKIYIDGEQVTIEWL

SEQ ID NO: 5792 - protein, 452 aa, synthetic construct
MKAAIYIRVSTREQVENYSIQAQTEKLTALCRSKGWDVYDTFIDGGYSGSNMNRPALNEMLSKLHEIDAVVVYRLDRLSRSQRDTITLIEEYFLKNNVEFVSLSETLDTSSPFGRAMIGILSVFAQLERETIRDRMVMGKIKRIEAGLPLTTAKGRTFGYDVIDTKLYINEEEAKQLQLIYDIFEEEQSITFLQKRLKKLGFKVRAYNRYNNWLTNDLYCGYVSYKDKVHVKGIHEPIISEEQFYRVQEIFARLGKNPNMNRDSASLLNNLVVCGKCGLSFVHRRKGTMSHGKKYHYRYYSCKTYKHIHELEKCGNKIWRADKLEELIINRVNNYSLASRNVDKEDELDSLNEKLKIEHAKKKRLFDLYINGSYEVSELDSMMNDIDAQINYYESQIEANEELKKDKKIQESLAYLATVDFDSLEFREKQLYLKSLINKIYIDGEQVTIEWL

SEQ ID NO: 5793 - protein, 485 aa, synthetic construct
MTKKVAIYTRVSTTNQAEEGFSIDEQIDRLTKYAEAMGWQVSDTYTDAGFSGAKLERPAMQRLINDIENKAFDTVLVYKLDRLSRSVRDTLYLVKEVFTKNKIDFISLSESIDTSSAMGSLFLTILSAINEFERENIKERMTMGKLGRAKSGKSMMWTKTAFGYYHNRKTGILEIVPLQATIVEQIFTDYLSGISLTKLRDKLNESGHIGKDIPWSYRTLRQTLDNPVYCGYIKFKDSLFEGLHKPIIPYETYLKVQKELEVRQQRTYERNNNPRPFQAKYMLSGMARCGYCGAPLRIVLGRKRKDGSRTMKYHCANRFPRKTRGVTVYNDNNKCDSGTYDLGDLENTVIDILIGFQENNDSLLKIINGNNQPILDTSSFKERISQIDKKIQKNGDLYLNDFITMDELRDRTDSLQAEKKLLKAKISESKFNDSTDVFELVKTQLGSIPINELSYDNKKKIVNNLVSKVDVTADNVDIIFKFQLA

SEQ ID NO: 5794 - protein, 452 aa, synthetic construct
MKAAIYIRVSTREQVENYSIQAQTEKLTALCRSKDWDVYDIFIDGGYSGSNMNRPALNEMLSKLHEIDAVVVYRLDRLSRSQRDTITLIEEYFLKNNVEFVSLSETLDTSSPFGRAMIGILSVFAQLERETIRDRMVMGKIKRIEAGLPLTTAKGRTFGYDVIDTKLYINEEEAKQLQLIYDIFEEEQSITFLQKRLKELGFKVRTYSRYNNWLTNDLYCGYVSYKDKVHVKGIHEPIISEEQFYRVQEIFTRMGKNPNMNRDSASLLNNLVVCGKCGLGFVHRRKDAMSRDKKYHYRYYSCKTYKHIHELEKCGNKIWRADKLEELIINRVNNYSLTSRNADKEDELDSLNEKLKIEHAKKKRLFDLYINGSYEVSELDSMMNDIDAQISYYESQIEANEELRKNKKIRENLAELATVDFDSLEFREKQLYLKSLINKIYIDGEQVTIEWL

SEQ ID NO: 5795 - protein, 452 aa, synthetic construct
MKAAIYIRVSTREQVENYSIQAQTEKLTALCRSKDWDVYDIFIDGGYSGSNMNRPALNEMLSKLHEIDAVVVYRLDRLSRSQRDTITLIEEHFLKNNVEFVSLSETLDTSSPFGRAMIGILSVFAQLERETIRDRMVMGKIKRIEAGLPLTTAKGRTFGYDVIDTKLYINEEEAKQLRLIYDIFEEEQSITLLQKHLKKLGFKVRTYNRYHNWLTNDLYCGYVSYKDKVHVKGIHEPIISEEQFYRVQEIFTRMGKNPNMNRGSASLLNNLVVCGKCGLGFVHRRKDAMSRDKKYHYRYYSCKTYKHIHELEKCGNKIWRADELEELIINRVNNYSLASRNVDKEDGLDSLNEKLKIEHAKKKRLFDLYLNGSYEVSELDSMMDDIDAQISYYESQMEANEALIKNKKIQENLANLATVDFDSLEFREKQLYLKSLINKIYIDGEQVTIEWL

SEQ ID NO: 5796 - protein, 452 aa, synthetic construct
MKAAIYIRVSTREQVENYSIQAQTEKLTALCRSKDWDVYDIFIDGGYSGSNMNRPALNEMLSKLHEIDAVVVYRLDRLSRSQRDTITLIEEHFLKNNVEFVSLSETLDTSSPFGRAMIGILSVFAQLERETIRDRMVMGKIKRIEAGLPLTTAKGRTFGYDVIDTRLYINEEEAKQLQLIYDIFEEERSITFLQKRLKKLGFKVRTYNCYNNWLTNDLYCGYVSYKDKVHVRGIHEPIISEEQFYRVQEIFTRMGKNPNMNRDSASLLNNLVVCSKCGLGFVHRRKDTMSRGKKYHYRYYSCKTYKHIHELEKCGNKIWRADKLEELIINRVNNYSFASRSVDKEDELASLNEKLKIEHAKKRRLFDLYLNGSHEVSELDSMMNDIDAQINYYESQIEANEELRRNKKIQESLAGLATVDFGSLEFREKQLYLKSLINKIYIDGEQVTIEWL

SEQ ID NO: 5797 - protein, 469 aa, synthetic construct
MSYTTPVRAAVYLRISEDRSGEQLGVARQREDCLKLCDQRKWQPVEYLDNDVSASTGKRRPAYEQMLADITAGKIAAVVAWDLDRLHRRPIELEAFMGLADEKRLALATAAGDVDLATPQGRLVARLKGSVAAHETEHKKARQRRAARQKAERGYPNWSKAFGYLPGPNGPEPDPRTAPLVRQAYADILAGASLGDVCRRWNDAGAFTITGRPWSTTTLSKFLRKPRNAGLRAYKGARYGPVDRDAIVGKAQWSPLVDEATFWAAQAVLDAPGRAPGRKSVRRHLLTGLAGCGKCGNHLAGSYRTDGRVVYVCKACYGVAILADNIEPILYHIVAERLAMPDAVDLLRREIHDAAEAETIRLELEALYGELDRLAVERAEGLLTARQVKISTDIVNAKITKLQAHQLDRERLRVFDGIPLGTPQVADVIAELSPDRFRAVLDVLAEVVVQPVGKSGRTFNPERVQVNWR

SEQ ID NO: 5798 - protein, 452 aa, synthetic construct
MKAAIYIRVSTQEQVENYSIQAQTEKLTALCRSKDWDVYDIFVDGGYSGSNMNRPALNEMLSKLHEIDAVVVYRLDRLSRSQRDTTTLIEEYFLKNNVEFVSLSETLDTSSPFGRAMIGILSVFAQLERETIRDRMVMGKIKRIEAGLPLTTAKGRTFGYDVIDTKLYINEEEAKQLQLIYDIFEEEQSITSLQKRLKKLGFKVRTYNRYNNWLTNDLYCGYVSYKGKVHVKGIHEPIISEEQFYRVQEIFTRMGKNPNMNRDSASLLSNLVVCSKCGLGFVHRSKDTMSRGKKYHYRYYSCKTYKHTHELEKCGNKTWRADKLEELIINRVNNYSFASRNVDKEDELDSLNEKLKIEHAKKRRLFDLYINGGYEVSELDSMMNDTDAQINYYESQIEANEGLKKNKNIQENLADLATVDFDSLGFREKQLYLKSLINKIYIDGEQVTVEWL

SEQ ID NO: 5799 - protein, 485 aa, synthetic construct
MTKKVAIYTRVSTTNQAEEGFSIDEQIDRLTKYAEAMGWQVSDTYTDAGFSGAKLERPAMQRLINDIENKAFDTVLVYKLDRLSRSVRDTLYLVKDVFTRNKIDFISLNECIDTSSAMGSLFLTILSAINEFERENIKERMTMGKLGRAKSGKSMMWAKTAFGYYHNRKTGILEIVPLQATIVEQIFTDYLSGISLTKLRDKLNESGHIGKDIPWSYRTLRQTLDNPVYCGYIKFKDSLFEGMHKPIIPYETYLKVQKELEERQQQTYERNNNPRPFQAKYMLSGMARCGYCGAPLRIVLGHRRKDGSRTKKYHCANRFPRKTKGITVYNDNKKCDSGTYDLSSLENTVIDNLIGFQENDDSLLKIINGNNQPILDTSSFKKQIGQIDKKIQKNSDLYLNDFITMDELKDRTDSLQAEKKLLEAKISENKFNDSTDVFELVKTQLGSIPINELSYDNKKKIVNSLVSKVDVTADNVDIIFKFRLA

SEQ ID NO: 5800 - protein, 485 aa, synthetic construct
MTKKVAIYTRVSTTNQAEEGFSIGEQIDRLTKYAEAMGWQVSDTYTDTGFSGAKLERPAMQRLISDIENKAFDTVLVYKLDRLSRSVRDTLYLVKDVFTKNKIDFISLNESINTSSAMGSLFLTILSAINEFERENIKERMTMGKLGRAKSGKSMMWTKTAFGYYHNRNTGILEIVPLQATIVKQIFTDYLCGISLTKLRDKLNESGHIGKDIPWSYRTLRQTLDNPVYCGYIRFKDSLFEGMHKPIIPYETYQKVQKELEERQQQTYERNNNPRPFQAKYMLSGMARCGYCGAPLRIVLGRKRKDGSRTMRYHCANRFPRKTKGVTVYNDNKKCDSGTYDLSNLENTVIDNLIGFQENDDSLLEIINGNNQPIPDTSSFKKQISLIDKKIQKNSDLYLNDFITMDELKDRTDSLQAEKKLLKAKISENKFNDSTDVFELVKTQLGSIPINELSYDNKKKIVNNLVSKVDVTADNVDIIFKFQLA

SEQ ID NO: 5801 - protein, 485 aa, synthetic construct
MTKKVAIYTRVSTTNQAEEGFSIDEQIDRLTKYAEAMGWQVSDTYTDAGLSGAKLERPAMQRLINDIENKAFDTVLVYKLDRLSRSVRDTLYLVKDVFTKNKIDFISLNESIDTSSAMGSLFLTILSAINEFERENIKERMTMGKLGRAKSGKSMMWTKTAFGYYHNRKTGILEIVPLQATIVEQIFTDYLSGISLTKLRDKLNESGHIGKDIPWSYRTLRQTLDNPVYCGYIKFKDSLFEGMHKPIIPYETYLKVQKELEERQQQTYERNNNPRPFQAKYMLSGMARCGYCGAPLKIVLGHKRKDGSRTMKYHCANRFPRKTKGITVYNDNKKCDSGTYDLSDLENTVIDNLIGFQEDNDSLLKIINGDNQPILDTSSFKKQISQIDKKIQKNSDLYLNDFITMDELKDRTDSLQAEKKLLKAKISENKSNDSTDVFELVKTQLGSIPINELSYDNKKKIVNNLVSKVDVTADNVDIIFKFQLA

SEQ ID NO: 5802 - protein, 485 aa, synthetic construct
MTKKVAIYTRVSTANQAEEGFSIDEQIDRLTKYAEAMGWQVSDTYTDAGFSGAKLERPAMQRLINDIKNKAFDTVLVYKLDRLSRSVRDTLYLVKDVFTKSKIDFISLNESIDTSSAMGSLFLTILSAINEFERENIKERMAMGKLGRAKSGKSMMWTKTAFGYYHNRETGILEIVPLQATIVEQIFTDYLSGISLTKLRDKLNESGHIGKDIPWSYRTLRQTLDNPVYCGYIKFKDSLFEGMHKPIIPYETYLKVQKELEERQQQTYERNNNPRPFQAKYMLSGMARCGYCGAPLRIVLGHKRKDGSRTMKYHCANRFPRKTKGVTVYNDNKKCDSGTYDLSNLENTVIDNLIGFQENSDSLLKIINGNNQPILDTSSFKKQISQIDKRIQKNSDLYLNDFITMDELKDRTDSLQAEKKLLKAKISENKFNDITDVFELVKTQLGSIPINELSYDDKKKIVNNLVSKVDVTADNVDIIFKFQLA

SEQ ID NO: 5803 - protein, 485 aa, synthetic construct
MTKKVAIYTRVSTTNQAEEGFSIDEQIDRLTKYAEAMGWQVSDAYTDAGFSGAKLERPAMQRLINDIETKAFDTVLVYKLDRLSRSVRDTLYLVKEVFTKNKIDFISLNESIDTSSAMGSLFLTILSAINEFERENIKERMTMGKLGRAKSGKSMMWTKTAFGYCHNRKTGILEIEPLQATIVEQIFTDYLSGVSLTKLRDKLNESGHIGKDIPWSYRTLRQTLDNPVYCGYIKFKDSLFEGMHKPIIPYETYLKVQKELEERQQQTYERNNNPRPFQAKYMLSGMARCGYCGAPLRIVLGHKRRDGSRTMKYHCANRFPRKTKGVAVYNDNKKCDSGTYDLSNLENTVIDILIGFQGNNDSLLKIINGNNQPILDTSSFKNHISQIDKQIRKNSDLYLNDLITMDELKDRTDSLRAEKKLLEAKISENKFNDSTDVFELVKTQLGSIPINELSYDSKKKIVNNLVSKVDVTADNVDIIFKFQLA

SEQ ID NO: 5804 - protein, 469 aa, synthetic construct
MSYTTPVRAAVYLRISEDRSGEQLGVARQREDCLKLCGQRKWVPVEYLDNDVSASTGKRRPAYEQMLADITAGKIAAVVAWDLDRLHRRPVELEAFMSLADEKRLALATVAGDVDLATPQGRLVARLKGCVAAHETEHKKARQRRAARQKAERGYPNWSKAFGYLPGPNGPEPDPRTAPLVKQAYADILAGASLGDVCRQWNDAGAFTITGRPWTTTTLSKFLRKPRNAGLRAYKGARYGPVDRDAIVGKAQWSPLVDEATFWAAQAVLDAPGRAPGRKSVRRHLLTGLAGCGKCGNHLAGSYRTDGRVVYVCKACHGVSILADNIEPILYHIVTERLAMPDAVDLLRREIHDAAEAETIRLEMETLYGELDRLAVERAEGLLTARQVKISTDIVSAKITKLRAHQLDQERLRVFDGIPLGTPQVAGMIAELSPDRFRAVLDVLAEVVVQPVGKSGRIFSPERVQVNWR

SEQ ID NO: 5805 - protein, 452 aa, synthetic construct
MKAAIYIRVSTQEQVGNYSIQAQTEKLTALCRSKDWDVYDIFVDGGYSGSNMNRPALNEMLSKLHEIDAVVVYRLDRLSRSQRDTTTLIEEYFLKNNVEFVSLSETLDTSSPFGRAMIGILSVFAQLERETIRDRMVMGKIKRIEAGLPLTTAKGRTFGYDVIDTKLYINEGEAKQLQLIYDIFEEEQSITSLQKRLKKLGLKVHAYNRYNNWLTNDLYCGYVSYKDKVHVKGIHEPIISEEQFYRVQEIFTRMGKNPNMNRDSASLLSNLVVCSKCGLGFVHRSKDTMSRGKKYHYRYYSCKTYKHTHELEKCGNKTWRADKLEELIINRVNNYSFVSRNVDKEDELDSLNEKLKIEHAKKKRLFDLYINGSYEVSELDNMMNDIDAQIDYYESQIEASEELKRNKKIQENLADLATVDFDSLEFREKQLYLKSLINKIYIDGEQVTIEWL

SEQ ID NO: 5806 - protein, 452 aa, synthetic construct
MKAAIYIRVSTREQVENYSIQAQTEKLTALCRSKDWDVYDIFIDGGYSGSNMNRPALNEMLSKLHEIDAVVVYRLDRLSRSQRDTITLIEEYFLKNNVEFVSLSETLDTSSPFGRAMIGILSVFAQLERETIRDRMVMGKIKRIEAGLPQTTAKGRTFGYDVIDTKLYINEEEAKQLRLIYDIFEEEQSITFLQKRLKKLGFKVRTYNCYNNWLTNDLYCGYVSYKDKAHVKGIHEPIISEEQFYRVQEIFTRMGKSPNMNRDSASLLNNLVVCSKCGLGFVHRRKDAMSRDKKYHYRYYSCKTYKHIHELEKCGNKIWRADKLEELIINRVNNYSLASRNTGKEDELDSLNEKLKIEHAKKKRLFDLYINGSYEVSELDSMMSDIDAQINYYESQIEANEELRKNKKIQENLAELATVDFDSLEFREKQLYLKSLINKIYIDGEQVTIEWL

SEQ ID NO: 5807 - protein, 452 aa, synthetic construct
MKAAIYIRVSTREQVENYSIQAQTEKLTALCRSKDWDVYDVFIDGGYSGSNMNRPALNEMLSKLHEIDAVVVYRLDRLSRSQRDTITLIEEYFLKNNVEFVSLSETLDTSSPFGRAMIGILSVFAQLERETIRDRMVMGKIKRIEAGLPLTTAKGRTFGYDVIDSKLYINEEEAKQLQLIYDIFEEEQSITFLQKRLKKLGLKVRTYNCYNSWLTNDLYCGYVSYKDKVHVKGIHEPIISEEQFYRVQEIFTRMGKSPNMNRDSASLLNNLVVCSKCGLGFVHRRKDTMSRGKKYHYRYYSCKTYKHTHELEKCGNKIWRADKLEELIINRVNNYSFASRNVDKEDELDSLNEKLKIEHARKKRLFDLYINGSYEVSELDSLMSDIDAQINYYESQIEAGEELKKSKKIQENLANLATVDYDSLEFREKQLYLKSLINKIYIDGDQVTIEWL

SEQ ID NO: 5808 - protein, 452 aa, synthetic construct
MKAAIYIRVSTREQVENYSIQAQTERLTALCRSKDWDVYDIFIDGGYSGSNMNRPALNEMLSKLHEIDAVVVYRLDRLSRSQRDTITLIEEYFLKNNVEFVSLSETLDTSSPFGRAMIGILSVFAQLERETIRDRMVMGKIKRIEAGLPLTTARGRTFGYDVIDTKLYINEEEAKQLQLIYDIFEEEQSITFLQKRLKKLGFKVHTYNRYNNWLTNDLYCGYVSYKDKVHVKGIHEPIISEEQFYRVQEIFARIGKNPNMNRESASLLSSLVVCSKCGLGFVHRRKDTMSRGKKYHYRYYSCKTYKHIHELEKCGNKIWRADRLEELIINRVNNYSFASRNVDKEDELDSLNEKLKIEHAKKRRLFDLYINGSYEVSGLDSMMNDIDAQINYYESQIEANEELKKSKKIQENLAELATVDFDSLEFREKQLYLKSLINKIYIDGEQVTIEWL

SEQ ID NO: 5809 - protein, 485 aa, synthetic construct
MTKKVAIYTRVSTTNQAEEGFSIDEQVDRLTKYAEAMGWQVSDTYTDAGFSGAKLERPAMQRLINDIENKAFDTVLVYKLDRLSRSVRDTLYLVKDVFTKSRIDFISLNECIDTSSAMGSLFLTILSAINEFERENIKERMTMGKLGRAKSGKSMMWTKTAFGYYHNRKTGILEIVPLQATIVEQIFTDYLSGISLTKLRDKLNESGHIGKDIPWSYRTLRQTLGNPVYCGCIKFKGSLFEGMHKPIIPYETYLKVQKELEERQQQTYERNNNPRPFQAKYMLSGMARCGYCGAPLRIVLGRRRKDGSRTMKYHCANRFPRKTKGVTVYNDNKKCDSGTYDLSNLENTVIDNLIGFQEDNDSLLKIINGNNQPILDTSSFEKQISQIDKKIQKNSDLYLNDFITMDELKDRTDSLQAEKKLLKAKISENKFNDSTDVFELVKTQLGSIPINELSYDDKKKIVNNLVSKVDVTADNVDIIFKFQLA

SEQ ID NO: 5810 - protein, 469 aa, synthetic construct; identical to SEQ ID NO: 4594

SEQ ID NO: 5811 - protein, 485 aa, synthetic construct
MTKKVAIYTRVSTTNQAEEGFSIDEQVDRLTKYAEAMGWQVSDTYTDAGFSGAKLERPAMQRLINDIENKAFDTVLVYKLDRLSRSVRDTLHLVKDVFTKNKIDFISLNESIDTSSAMGSLFLTILSAINEFERENIKERMTMGKLGRAKSGKSMMWTKTAFGYHHNRKTGILEIVPLQATIVEQIFTDYLSGISLTKLRDKLNESGHIGKDIPWSYRTLRQTLDNPVYCGYIRFKDSLFEGMHEPIIPYETYLKVQKELEERQQQTYGRNNNPRPFQAKYMLSGMARCGYCGAPLRIVLGHKRKDGSRTMKYHCANRFPRKTKGVTVYNDNKKCDSGTYDLSNLENIVIDNLIGFQENNDSLLRIINGNNQPIMDTSSLKEQISQIDKKIQKNSDLYLNDFITMDELKDRTGSLQAEKKLLKAKISENKFNDSTDVFELVKTQLGSIPINELSYDNKKKIVNNLVSKVDVTADNVDIIFKFQLA

SEQ ID NO: 5812 - protein, 452 aa, synthetic construct
MKAAIYIRVSTREQVENYSIQAQTEKLTALCRSKDWDVYDIFIDGGYSGSNMNRPALNEMLSKLHEIDAVVVYRLDRLSRSQRDTITLIEEHFLKNNVEFVSLSETLDTSSPFGRAMIGILSVFAQLERETIRDRMVMGKIKRIEAGLPLTTAKGRTFGYDVVDTKLYINEEEARQLQLIYDIFEEEQSITFLQKRLKKLGFKVRTYSRYNSWLTNDLYCGYVSYKDKVHVKGIHEPIISEEQFYRVQEIFTRMGKNPNMNRDSASLLSNLVVCSKCGLGFVHRRKDTMSRGKKYHYRYYSCKTYKHIHELEKCGNKIWRADKLEELIIDRVNNYSFASRNVDKGGELDSLNEKLKIEHAKKKRLFDLYINGSYEVSELDSMMNDIDAQINYYESQIEANEELKKNKKIQENLANLATVDYDSLEFREKQLYLKSLINKIYIDGEQVTIEWL

SEQ ID NO: 5813 - protein, 469 aa, synthetic construct
MSYTTPVRAAVYLRISEDRSGEQLGVARQREDCLKLCDQHKWVPVEYLDNDVSASTGKRRPAYEQMLADITAGKIAAVVAWDLDRLHRRPIELEAFMCLADEKRLALATVAGDVDLATPQGRLVARLKGSVAAHETEHKKARQRRAARQKAERGHPNWSKAFGYQPGPNGPEPDPRTAPLVKQAYADILAGASLGDVCRQWNDAGALTITGRPWTTTTLSKFLRKPRNAGLRAYKGARYGPVDRDAIVGKAQWSPLVDEATFWAAQAVLDAPGRAPGRKSVRRHLLTGLAGCGKCGNHLAGSYRTDGRVVYVCKACHGVAILADNIEPILYHIVAERLAMPDAVDLLRRGIHDAAEAETIRLELETLYDELDRLAVERAEGLLTARQVKISTDIVNAKITKLRARQLDQERLRVFDGIPLGTPQVAGVIAELSPDRFRAVLDVLAEVVVQPVGKSGRIFNPERVRVNWR

SEQ ID NO: 5814 - protein, 469 aa, synthetic construct
MSYTTPVRAAVYLRISEDRSGEQLGVARQREDCLKLCGQRKWVPVEYLDNDVSASTSKRRPAYEQMLADITAGKIAAVVAWDLDRLHRRPIELEAFMSLADEKRLALATVAGDVDLATPQGRLVARLKGSVAAHETEHKKARQRRAARQKAERGHPNWSKAFGYLPGPNGPEPDPRTAPLVKQAYADILAGASLGDVCRQWNDAGVFTITGRPWTTTTLSKFLRKPRNAGLRAYKGARYGPVDRDAIVGKAQWSPLVDEATFWAAQAVLDAPGRAPGRKSVRRHLLTGLAGCGKCGNHLAGSYRTDGRVVYVCKACHGVAILADNIEPILYRIVVERLAMPDAVDLLRREIHDAAEAETIRLELETLYGELDRLAVERAEGLLTARQVKISTDIVNAKITKLQARQLDQERLRVFDGIPLGTPQVAGMIAELSPNRFRAVLDVLAEVVVQPVGKSGRIFNPERVQVNWR

SEQ ID NO: 5815 - protein, 469 aa, synthetic construct
MSYTTPVRAAVYLRISEDRSGEQLGVARQREDCLKLCDQRKWVPVEYLDNDVSASTGKRRPAYEQMLADITAGKIAAVVAWDLDRLHRRPIELEAFMSLADEKRLALATVAGDVDLATPQGRLVARLKGSVAAHETEHKKARQRRAARQKAERGHPNWSKAFGYLPGPNGPEPDPRTALLVKQAYADILAGASLGDVCRQWNDAGAFTITGRPWTTTTLSKFLRKPRNAGLRAYKGARYGPVDRDAIVGKAQWSPLVDEATFWAAQAVLDAPGRAPGRKSVRRHLLTGLAGCGKCGNHLAGSYRTDGRVVYVCKACHGVAILADNIEPILYRIVTERLAMPEAVDLLRRETHDAAEAETIRLELETLYAELDRLAVERAEGLLTARQVKISTDIVNAKITKLQARQLDQERLHVFDGIPLGTPQVTGMIAELSPDRFRAVLDVLAVVVVQPVGKSGRIFNPERVQVNWR

SEQ ID NO: 5816 - protein, 485 aa, synthetic construct
MTKKVAIYTRVSTTNQAEEGFSIDEQIDRLTKYAEAMGWQVSDTYTDAGFSGAKLERPAMQRLINDIENKAFDTVLVYKLDRLSRSVRDTLYLVKDVFTKNKIDFISLNESINTSSAMGSLFLTILSAINEFERENIKERMTMGKLGRAKSGKSMMWTKTAFGYYHNHKTGILEIVPLQATIVEQIFTDYLSGISLTKLRDKLNEGGHIGKDIPWSYRTLRQTLDNPVYCGYIRFKDSLFEGMHKPIIPYETYLKVQKELEERQQQTYERNNNPRPFQAKYMLSGMARCGYCGAPLKIVLGHKRKDGSRTMKYHCANRFPRKTKGVTMYNDNKKCDSGAYDLSDLENTVIDNLIGFQENNDSLLKIINDNNQPILDTSSFKKQISQIDKKIQKNSDLYLNDFITMDELKDRTDSLQAEKKQLKAKISENKFNDSTGVFELVKTQLGSIPINELSYDDKKKIVNNLVSKVDVTADNVDIIFKFQLA

SEQ ID NO: 5817 - protein, 452 aa, synthetic construct
MKAAIYIRVSTREQVENYSIQAQTEKLTALCRSKDWDVYDIFIDGGYSGSNMNRPALNEMLSKLHEIDAVVVYRLDRLSRSQRDTITLIEEYFLKNNVEFVSLSETLDTSSPFGRAMIGILSVFAQLERETIRDRMVMGKIKRIEAGLPLTTAKGRTFGYDVIDTKLYINDEEAKQLQLIYDIFEEEQSITLLQKRLKKLGFRVRTYSCYNNWLTNDLYCGYVSYKDKVHVKGIHEPIISEEQFYRVQEIFTRMGKNPNMNRDSASLLNNLVVCSKCGLGYVHRRKDTTSRGKKYHYRYYSCKTYKHIHELEKCGNKIWRADKLEELVINHVNNYSFASRDVDKEGELDSLYEKLKIEHAKKKRLFDLYINGSCEVSELDCMMNDIDAQINYYESQIEANEELKKDKKIQETLADLATVDYDSLEFREKQLYLKSLINKIYIDGEQVTIEWL

SEQ ID NO: 5818 - protein, 452 aa, synthetic construct
MKAAIYIRVSTQEQVENYSIQAQTEKLTALCRSKDWDVYDIFIDGGYSGSNMNRPALNEMLSKLHEIDAVVVYRLDRLSRSQRDTITLIEEYFLKNNVEFVSLSETLDTSSPFGRAMIGILSVFAQLERETIRDRMVMGKIKRIEAGLPLTTAKGRTFGYDVIDTKLYINEEEAKQLQLIYDIFEEERSITSLQKRLKKLGFKVRTYNRYNSWLTNDLYCGYVSYKDKVHVKGIHEPIISEEQFYRVQEIFTRMGKNPNMNRDSASLLSNLVVCSKCGLGFVHRRKDTMSRGKKYHYRYYSCKTYKHIHELEKCGNKIWRADKLEELIINRVNNYSFVSRNADKEDELDSLNEKLKIEHVKKRRLFHLYINGSYEVSELDSMMNDIDAQINYYESQIEANEELKKNKKIQENLADLATVDFDSLEFREKQLYLKSLINKVYIDGEQVTIEWL

SEQ ID NO: 5819 - protein, 452 aa, synthetic construct
MKAAIYIRVSTREQVENYSIQAQTEKLTALCRSKDWDVYDIFIDGGYSGSNMNRPALNEMLSKLHEIDAVVVYRLDRLSRSQRDTITLIEEYFLKNNVEFVSLSETLDTSSPFGRAMIGILSVFAQLERETIRDRMVMGKIKRIEAGLPLTTAKGRTFGYDVIDTKLYINEEEAKQLRLIYDIFEEEQSITFLQKRLKKLGFKVRTYNRYNNWLTNDLYCGYVSYKDKVHVKGIHEPIISEEQFNRVQEIFTRMGKNPNMNRDSASLLNNLVVCSKCGLGFVHRRKDIMSRGKKYHYRYYTCKTYKHIHELEKCGNKIWRADKLEELIINRVNNYSLTSRNVDKEDELDGLNEKLKIEHAKKKRLFDLYINGSYEVSELDSMMNDIDAQINYYESQIEANEELKRNKKIQENLAYLATVDFDSLEFREKQLYLKSLINKIYIDGEQVTIEWL

SEQ ID NO: 5820 - protein, 452 aa, synthetic construct
MKAAIYIRVSTREQVENYSIQAQTEKLTALCRSKDWDVYDIFIDGGYSGSNMNRPALNEMLSKLHEIDAVVVYRLDRLSRSQRDTITLIEEYFLKNNVEFVSLSETLDTSSPFGRAMIGILSVFAQLERETIRDRMVMGKIKRIEAGLPLTTAKGRTFGYDVIDTKLYINEEEAKQLQLIYDIFEEEQSITFLQKRLKELGFKVHTYNRYNNWLTNDLYCGYVSYKDKVHVRGIHEPIISEEQFYRVQEIFTRMGKNPNMNRDSASLLNNLVVCSKCGLGFVHRRKDAMSRDKKYHYRYYSCKTYKHIHELEKCGNKIWRADKLEELIINRVNNYSFASRNVDKGDELDSLNEKLKTEHAKKRRLFDLYINGSFEVSELDSMMNDIDAQINYYESQIEANEELKKNKKIQENLAYLATVDFDSLEFREKQLYLKSLINKIYIDGEQVTIEWL

SEQ ID NO: 5821 - protein, 469 aa, synthetic construct
MSYTTPVRAAVYLRISEDRSGEQLGVARQREDCLKLCGQRKWEPVEYLDNDVSASTGKRRPAYEQMLADITAGKIAAVVAWDLDRLHRRPIELEAFMSLADEKRLALATVAGDVDLATPQGRLVARLKGSVAAHETEHKKARQRRAARQKAERGHPNWSKAFGYLPGPNGPEPDPRTAPLVKQAYADILAGASLGDVCRRWNAASAFTITGRPWTTTTLSKFLRKPRNAGLRAYKGARYGPVDRDAIVGNARWSPLVDEATFWAAQAVLDAPGRAPGRKSVRRHLLTGLAGCGKCGNHLAGSYRTDGRVVYVCKACHGIAILADNIEPILYHIVAERLAMPDAVDLLRREIHDAAEAEAIRLGLETLYGELDRLAVERAEGLLTARQVKISTDIVNAKITKLQARQQDQERLRVLDGIPLGTPQVADMIAELSPDRFRAVLDVLVEVVVQPVGKGGRVFNPERVQVNWR

SEQ ID NO: 5822 - protein, 452 aa, synthetic construct
MKAAIYIRVSTREQVENYSIQTQTEKLTALCRSKDWDVYDIFIDGGYSGSNMNRPALNEMLSKLHEIDAVVVYRLDRLSRSQRDTITLIEEYFLKNNVEFVSLSETLDTSSPFGRAMIGILSVFAQLERETIRDRMVMGKIKRIEAGLPLTTAKGRTFGYDVIDTKLYINEEEAKQLRLIYDIFEEEQSITFLQKRLKKLGFKVHTYNRYNSWLTNDLYCGYVSYKDKVHVKGIHEPIISEEQFYRVQEIFARMGKNPNMNRDSASLLNNLVVCSKCGLGFVHRRKDTMSRGKKYHYRYYSCKTYKHIHELEKCGNKIWRADKLEELIINRVNNYSFASRNVDKEDELDSLNEKLKIEHAKKKRLFDLYINGSYEVSELDSMMNDIDAQINYYESQIEANEERKKNKKSQENLAVLATVDFDSLEFREKQLYLKSLINKIYIDGEQVTIEWL

SEQ ID NO: 5823 - protein, 485 aa, synthetic construct
MTKKVAIYTRVSTTNQAEEGFSIDEQIDRLTKYAEAMGWQVSDTYTDAGFSGAKLERPAMQRLINDIENKAFDTVLVYKLDRLSRSVRDTLYLVKDVFTKNKIDFISLNESIDTSSAMGSLFLTILSAINEFERENIKERMTMGKLGRAKSGKSMMWTKTAFGYYHNRKTGILEIVPLQATIVEQIFTDYLSGISLTKLRDKLNESGHIGKDIPWSYRTLRQTLDNPVYCGYIKFKDSLFKGMHKPIIPYETYLKVQKELEERQQQTYERNNNPRPFQAKYMLSGVARCGYCGAPLRIVLGHKRKDGSRTMKYHCANRFPRKTKGVTVYNDNKKCDSGTYDLSNLENTVIDNLTGFQENNDSLLKIINGNNQPILDTSSLKKQISQIDKKIQKNSDLYLNDFITMDELKDRTDSLQAEKKLLKAKISENKFNDSTDVFELVKTQLGSIPINELSYDNKKKIVNNLVSKVDVTADNVDIIFKFQLA

SEQ ID NO: 5824 - protein, 485 aa, synthetic construct
MTKKVAIYTRVSTANQAEEGFSIDEQIDRLTKYAEAMGWQVSGTYTDAGISGAKLERPAMQRLINDIENKAFDTVLVYKLDRLSRSVRDTLYLVKDVFTKNEIDFISLNESIDTSSAMGSLFLTILSAINEFERENIKERMTMGKLGRAKSGKSMMWTKTAFGYYHNRKTGILEIVPLQATIVEQIFTDYLSGISLTKLRDKLNESGHIGKDIPWSYRTLRQTLDNPVYCGYIKFKGSLFEGMHKPIIPYETYLKVQNELEERQRQTYERNNNPRPFQAKYMLSGMARCGYCGAPLRIVLGHRRKDGSRTMKYHCANRFPRKTKGVTVYNDNKKCDSGTYDLGNLENTVIDNLIGFQEDNDSLLKIISGNNQPILDTSSFKKQISQIDKKIQKNSDLYLNDFITMDELKDRTDSLQAEKKLLIAKISENKFNDSTDVFELVKTQLGSTPINELSYDNKKKIVNNLVSKVDVTADNVDIIFKFQLA

SEQ ID NO: 5825 - protein, 485 aa, synthetic construct
MTKRVAIYTRVSTTNQAEEGFSIDEQIDRLTKYAEAMGWQVSDTYTDAGFSGAKLERPAMQRLISDIENKAFDTVLVYKLDRLSRSVRDTLYLVKDVFTKNKIDFISLNESINTSSAMGSLFLTILSAINEFERENIKERMTMGKLGRAKSGKSMMWTKTAFGYYHNRKTGILEIVPLQATIVEQIFTDYLSGISLTKLRDKLNEGGHIGKDIPWSYRTLRQTLDNPVYCGYIKFKDSLFEGMHKPIIPYETYLKVQKELEERQQQTYERNNNPRPFQAKYMLSGMARCGYCGAPLKIVLGHKRKDGSRTMKYHCANRFPRKTKGVTVYNDNKKCVSGTYDLSNLENIVIDNLIGLQEDNDSLLKIINSNNRPIPDTSSLKKQISQIDKKIQKNSDLYLNDFITMDELKDRTDSLLAEKKLLEAKISENKFNDSTDVFELVKTQLGSIPINELSYDNKKKIVNNLVSKVDVTADNVDIIFKFQLA

SEQ ID NO: 5826 - protein, 452 aa, synthetic construct
MKAAIYIRVSTREQVENYSIQAQTEKLTALCRSKDWDVYDIFIDGGYSGSNMNRPALNEMLSKLHEIDAVVVYRLDRLSRSQRDTITLIEEYFLKNNVEFVSLSETLDTSSPFGRAMIGILSVFAQLERETIRDRMVMGKIKRIEAGLPLTTAKGRTFGYDVIDTKLYINEEEAKQLQLIYDIFEEEQSITLLQKRLKKLGFKVRTYNRYNNWLTNDLYCGYVSYKDKVHVKGIHEPIISEEQFCRVQEIFTRMGKNPNMNRDSASLLNNLVVCGKCGLGFVHRRKDAMSRDKKYHYRYYSCKTYKHIHELEKCGNKIWRADKLEELIINRVNNYSLASRNVGKEGELDSLNEKLKIEHAKKRRLFDLYINGSYEVSELDSMMNDIDAQINYYESQIEANEELKKNKRIQENLANLATVDFDSLEFREKQLYLKSLINKIYIDGEQVTIEWL

SEQ ID NO: 5827 - protein, 485 aa, synthetic construct
MTRKVAIYTRVSTTNQAEEGFSIDEQIDRLTKYAEAMGWQVSDTYTDAGCSGAKLERPAMQRLINDIENKAFDTVLVYKLDRLSRSVRDTLYLVKDVFTKNKIDFVSLNESIDTSSAMGSLFLTILSAINEFERENIKERMTMGKLGRAKSGKSMMWTRTAFGYYHNRKTGILEIVPLQATIVEQIFTDYLSGISLTKLRDKLNESGHIGKDIPWSYRTLRQTLDNPVYCGYIKFKDSLFEGMHKPIIPYETYLKVQKELEERQQQTYERNNNPRPFQAKYMLSGMARCGYCGAPLRIVLGHKRKDGSRTMKYHCANRFPRKTKGVTVYNDNKKCDSGTYELSNLENTVIDNLIGFQENDDSLLKIINGYSQPILDTNSLKKQISQIDEKIQKNSDLYLNDFITMDELKDRTDSLQAEKKLLKAKISGNKFDDSTDVFELVKTQLGSIPINELSYDNKKKIVNNLVSKVDVTADNVDIIFKFQLG

SEQ ID NO: 5828 - protein, 452 aa, synthetic construct
MKAAIYIRVSTREQVENYSIQAQTEKLTALCRSKDWDVYDIFIDGGYSGSNMNRPALNEMLSKLHEIDAVVVYRLDRLSRSQRDTITLIEEYFLKNNVEFVSLSETLDTSSPFGRAMIGILSVFAQLERETIRERMVMGKIKRIEAGLPLTTAKGRTFGYDVVDTKLYINEEEAKQLQLIYDIFEEEQSITFLQKRLKKLGFKVRTYNRYNSWLTNDLYCGYVSYKDKVHVKGIHEPIISEEQFYRVQEIFARMGKNPNMNRDSASLLSNLVVCSKCGLGFVHRRKDTKSRGKKYHYRYYSCKTYKHTHELEKCGNKIWRADKLEELIINRVNNYSFASRNVDKEDELDSLNEKLRIEHAKKKRLFDLYINGSYEVSELDNMMNDIDAQISYYESQIEANEEQKKNKKIQENLANLATVDYDSLEFREKQLYLKSLINKIYIDGEQVTIEWL

SEQ ID NO: 5829 - protein, 452 aa, synthetic construct
MKAAIYIRVSTQEQVGNYSIQAQTEKLTALCRSKDWDVYDIFIDGGYSGSNMNRPALNEMLSKLHEIDAVVVYRLDRLSRSQRDTTTLIEEYFLKNNVEFVSLSETLDTSSPFGRAMIGILSVFAQLERETIRDRMVMGKIKRIEAGLPLTTAKGRTFGYDVIDTKLYINEEEAKQLQLIYDIFEEEQSITLLQKRLNKLGFKVRTYNRYNSWLTNDLYCGYVSYKDKVHVKGIHEPIISEEQFYRVQEIFTRMGKNPNMNRDSASLLSNLVVCSKCGLGFVHRSKDTMSRGKKYHYRYYSCKTYKHTHELEKCGNKIWRADKLEELIISRVNNYSFASRNEDKEDELDSLNEKLKIEHARKKRLFDLYINGSYEVSELDSMMNDIDAQINYYESQIGANEEPKKNKKIQENLANLATVDFDSLEFREKQLYLKSLINKIYIDGEQVTIEWL

SEQ ID NO: 5830 - protein, 452 aa, synthetic construct
MKAAIYIRVSTREQVENYSIQAQTERLTALCHSKDWDVYDIFIDGGYSGSNMNRPALNEMLSKLHEIDAVVVYRLDRLSRSQRDTITLIEEYFLKNNVEFVSLSETLDTSSPFGRAMIGILSVFAQLERETIRDRMVMGKIKRVEAGLPLTTAKGRTFGYDVIDTKLYINEEEAEHLQLIYDIFEEEQSITFLQKRLKKLGFKVHTYSRYNNWLTNDLYCGYVSYKDKVHVKGIHEPIISEEQFYRVQEIFARTGKNPNMNRDSASLLNNLVVCSKCGLGYVHRRKDTMSRGKKYHYRYYSCKTYKHIHELEKCGNKIWRADKLEELIINRVNNYSFASRDVDKEDGLGSLNEKLKIEHTKKKRLFDLYINGSYEVSELDSMMNDIDAQISYYESQIEANEELKKNRKIQENLANLATVDYDSLEFREKQLYLKSLINKIYIDGEQVTIEWL

SEQ ID NO: 5831 - protein, 452 aa, synthetic construct
MKAAIYIRVSTREQVENYSIQAQTEKLTALCRSKDWDVYDIFVDGGYSGSNMNRPALNEMLSKLHEIDAVVVYRLDRLSRSQRDTITLIEEYFLKNNVEFVSLSETLDTSSPFGRAMIGILSVFAQLERETIRDRMVMGKIKRVEAGLPLTTAKGRTFGYDVIDTKLYINEEEAKQLQLIYDIFEEEQSITFLQKRLKKLGFKVRTYSRYNNWLTNDLYCGYVSYKDKVHVKGIHEPIISEEQFYRVQEIFTRMGKNPNMNRDSASLLNNLVVCSKCGLGFVHRRKDTMSRGKKYHYRYYSCKTYKHTHELERCGNKIWRADKLEELIINRVSNYSFASRNVDKEDELDSLNEKLKTEHAKRKRLFDLYINGGYEVSELDSMMNDIDAQINYYESQIEANEELKKNKKIQENLANLATVDYDSLEFREKQLYLKSLINKIYIDGEQVTIEWL

SEQ ID NO: 5832 - protein, 485 aa, synthetic construct
MTKKVAIYTRVSTTNQAEEGFSINEQIDRLTKYAEAMGWQVSDTYTDAGFSGAKLERPAMQRLINDIENKAFDTVLVYKLDRLSRSVRDTLYLVKDVFTKNKIDFISLNESIDTSSAMGSLFLTILSAINEFERENIKERMTMGKLGRAKSGKSMMWTKTAFGYYHNRKTGILEIVPLQATIVEQIFTDYLSGISLTKLRDKLNESGHIGKDIPWSYRTLRQTLDNPVYCGYIKFKDGLFEGMHKPIIPYETYLKVQKELEERQQQTYERNNNPRPFQAKYMLSGMARCGYCGAPLRIVLGHKRKDGSRTMKYHCANRFPRKTKGVTVYNDNKKCDSGAYDLSNLENTVIDNLIGFQENNDSLLKIINGNNQPILDTSSFKRQISQIDKKIQKNSDLYLNDFITMDELKGRTDSLQAEKKLLEAKISESKFNDSTDVFEQVKTQLGSIPINELSYDDKKKIVNNLVSKVDVTADNVDIIFKFQLA

SEQ ID NO: 5833 - protein, 469 aa, synthetic construct
MSYTTPVRAAVYLRISEDRSGEQLGVARQREDCLKLCGQRKWVPVEYLDNDVSASTGKRRPAYEQMLADITAGKIAAVVAWDLDRLHRRPIELEAFMSLADEKRLALATVAGDVDLATPQGRLVARLKGSVAAHETEHKKARQRRAARQKAERGLPNWSKAFGYLPGPNGPEPDPRTAPLVKQAYADILAGASLGDVCRQWNDAGAFTITGRPWTTTTLSKFLRKPRNAGLRAYKGARYGPVDRDAIVGKAQWSPLVDEATFWAAQAVLDAPGRAPGRKSVRRHLLTGLAGCGKCGNHLAGSYRADGRVVYVCKACHGVAILADNIEPTLYHIVAERLAMPDAVDLLRREIHDAAEAEAVSLELETLYGELDCLAVERAEGLLTARQVKIGTDIVNAKITKLQAHQLDQERLRVFDGIPLGTPQVAGKIAELSPDRFRAVLDVLAEVVVQPVGKRGRIFNPERVQVNWR

SEQ ID NO: 5834 - protein, 452 aa, synthetic construct
MKAAIYIRVSTREQVENYSIQAQTEKLTALCRSKDWDVYDIFVDGGYSGSNLNRPALNEMLSKLHEIDAVVVYRLDRLSRSQRDTITLIEEYFLKNNVEFVSLSETLDTSSPFGRAMIGILSVFAQLERETIRDRMVMGKIKRIEAGLPLTTAKGRTFGYDVIDTKLYINEEEAKQLQLIYDIFEEEQSITFLQKRLKKLGFKVRTYSRYNNWLTNDLYCGYVSYKDKVHVKGIHEPIISEEQFYRVQEIFTRMGKNPNMNRDSASLLNNLVVCSKCGLGFVHRRKDTMSRGKKYHYRYYSCKTYKHIHELEKCGNKIWRADKLEELIINRVNDYSFASRNVDKEDELNSLNEKLRIEHAKKKRLFDLYINGSYEVSELDSMMNDIDAQINYYESQVEANEELRRNKKIQETLADLATVDYDSLEFREKQLYLKSLINKIYIDGEQVTIEWL

SEQ ID NO: 5835 - protein, 452 aa, synthetic construct
MKAAIYIRVSTREQVENYSIQAQTEKLTALCRSKDWDVYDIFIDGGYSGSNMNRPALNEMLSKLHEIDAVVVYRLDRLSRSQRDTITLIEEYFLKNNVEFVSLSETLDTSSPFGRAMIGILSVFAQLERETIRDRMVMGKIKRIEAGLPLTTAKGRTFGYDVIDTKLYINEEEAKQLQLIYDIFEEEQSITFLQKRLKKLGFKVRTYSCYNNWLTNDLYCGYVSYKDKVHVKGIHEPIISEEQFYRVQEIFTRMGKNPNMNRGSASLLNNLVVCSKCGLGFVHRRKDTMSRGKKYHYRYYSCKTYKHIHELEKCGNKIWRADKLEELVINRVNNYSLASRNVDKEDELDSLNEKLKIEHAKKKRLFDLYINGSYEVSELDSMMNDIDAQISYYESQIEANEEQKKSKKIQENLANLATVDYDSLEFREKQLYLKSLINKIYIDGEQVTIEWL

SEQ ID NO: 5836 - protein, 452 aa, synthetic construct
MKAAIYIRVSTREQVENYSIQAQTEKLTALCRSKGWDVYDIFIDGGYSGSNMNRPALNKMLSKLHEIDAVVVYRLDRLSRSQRDTITLIEEYFLKNNVEFVSLSETLDTSSPFGRAMIGILSVFAQLERETIRDRMVMGKIKRIEAGLPLTTAKGRTFGYDVIDTKLYINEEEARQLQLIYDIFEEEQSITFLQKRLKKLGFKVRTYNRYNSWLTNDLYCGYVSYKDKVHVKGIHEPIISEEQFYRVQEIFARMGKNPNMNRDSASLLNNLVVCSKCGLGFVHRRKDTTSRGKKYHYRYYSCKTYKHTHELEKCGNKIWRADKLEELVINRVNNYSFAGRNVDKEDELNSLNEKLKIEHAKKKRLFDLYINGSYEVSELDSMLSDIDAQINYYESQIEANEELKRNKKIQENLANLATVDYDSLEFREKQLYLKSLINKIYIDGEQVTIEWL

SEQ ID NO: 5837 - protein, 485 aa, synthetic construct
MTKKVAIYTRVSTTNQAEEGFSIDEQIDRLTKYAEAMGWQVSGTYTDAGLSGAKLERPAMQRLINDIENKAFDTVLVYKLDRLSRSVRDTLYLVKDVFTKNKIDFISLNESIDTSSAMGSLFLTILSAINEFERENIKERMTMGKLGRAKSGKSMMWTKTAFGYYHNRKTGILEIVPLQATIVEQIFTDYLSGISLTKLRDKLNESGHIGKDIPWSYRTLRQTLDNPVYCGYIKFKDSLFEGMHKPIIPYETYLKVQKELEERQQQTYERNNNPRPFQAKYMLSGMARCGYCGAPLRIVLGHKRKDGSRTMKYHCANRFPRKTRGVTVYNDNKKCDSGTYDLSNLENTVIDNLIGFQENNDSLLKIINGYNQPILDTSSLEKQISQIDKKIQKNSDLYLNDFITMDELKNRTDSLQAEKELLKAKISGNKSNDSTDVLELVKTQLGSIPINELSYDNKKKIVNNLVSKVDVTADNVDIIFKFQLA

SEQ ID NO: 5838 - protein, 485 aa, synthetic construct
MTKKVAIYTRVSTTNQAEEGFSIDEQIDRLTKYAEAMGWQVSDTYTDAGLSGAKLERPAMQRLINDIENKAFDTVLVYKLDRLSRSVRDTLYLVKDVFTKNKIDFISLNESIDTSSAMGSLFLTILSAINEFERENIKERMTMGKLGRAKSGKSMMWTKTAFGYYHNRKTGILEIVPLQAAVVEQIFTDYLNGISLTKLRDKLNESGHIGKDIPWSYRALRQTLDNPVYCGYIKFKGSLFEGMHKPIIPYETYLKVQKELKERQQQTYERNNNPRPFQAKYMLSGMARCGYCGAPLRIVLGHKRKDGSRTMKYHCANRFPRKTKGVSVYNDNKKCDSGTYDLGNLENTVIDNLIGFQENNDSLLKIINGNSQPILDTSSFKKQISQIDKKIQKISDLYLNDFITMDELKDRTDSLQAEKELLKAKVSENKFNDSTDVLELVKTQLGSIPINELSYDNKKKIVNSLVSKVDVTADNVDIVFKFQLP

SEQ ID NO: 5839 - protein, 452 aa, synthetic construct
MKAAIYIRVSTREQVENYSIQAQTEKLTALCRSKDWDVYGIFIDGGYSGSNMNRPALNEMLSKLHEIDAVAVYRLDRLSRSQRDTITLIEEYFLKNNVEFVSLSETLDTSSPFGRAMIGILSVFAQLERETIRDRMVMGKIKRIEAGLPLTTAKGRTFGYDVIDTKLYINEEEAKQLQLIYDIFEEEQSITFLQKRLKKLGFKVRTYNCYNNWLTNDLYCGYVSYKDKVHVKGIHEPIISEEQFYRVQEIFTRMGKNPNMNRDSASLLNGLVVCSKCGLGFVHRRKDTTSRGKKYHYRYYSCKTFKHTHELEKCGNKIWRADKLEELIINRVNDYSFARRNVDKEDELNSLNEKLRIEHAKKKRLFDLYINGSYEVSELDSMMSDIDAQISYYESQIEANEEQKKNKKIQENLANLATVDYDSLEFREKQLYLKSLINKIYIDGEQVTIEWL

SEQ ID NO: 5840 - protein, 452 aa, synthetic construct
MKAAIYIRVSTREQVENYSIQAQTEKLTALCRSKDWDVYDIFIDGGYSGSNMNRPALNEMLSKLHEIDAVVVYRLDRLSRSQRDTITLIEEYFLKNNVEFVSLSETLDTSSPFGRAMIGILSVFAQLERETIRDRMVMGKIKRIEAGLPLTTAKGRTFGYDVIDAKLYINEEEAKQLQLIYDIFEEEQSITFLQKRLKKLGFKVHTYNRYNNWLTNDLYCGYVSYKDKVHVKGIHEPIISEEQFYRVQEIFTRMGKNPNMNRGSASLLNNLVVCSKCGLGFVHRRKDAMSRDKKYHYRYYSCKTYKHIHELEKCGNKIWRADKLEELIINRVNNYSVASRNVDKEDELDSLNEKLRIEHAKKKRLFDLYINGRYEVSELDCMMNDIDAQINYYESQIEANEELKKNKEIRENLAYLATVDFDSLGFREKQLYLKSLINKIYIDGEQVTIEWL

SEQ ID NO: 5841 - protein, 452 aa, synthetic construct
MKAAIYIRVSTREQVENYSIQAQTEKLTALCRSKDWDVYDIFIDGGCSGSNMNRPALNEMLSKLHEIDAVVVYRLDRLSRSQRDTITLIEEYFLKNNVEFVSLSETLDTSSPFGRAMIGILSVFAQLERETIRDRMVMGKIKRIEAGLPLTTAKGRTFGYDVIDTKLYINEEEAKQLQLIYDIFEEEQSITFLQKRLKKLGFRVHTYNRYNNWLTNDLYCGYVSYKDKVHVKGIHEPIISEEQFYRVQEIFTRMGKNPNMNRDSASLLNNLVVCSKCGLGFVHRRKDAMSRDKKYHYRYYSCKTYKHIHELEKCGNKIWRADKLEELIINRVNNYSLASRNVDKEDELDSLNEKLKIEHAKKKRLFDLYINGSYEVSELDSMMNDIDAQINHYESQIKANGELKKNKKIQENLADLATVDFDSLEFREKQLYLKSLINKIYIDGEQVTIEWL

SEQ ID NO: 5842 - protein, 469 aa, synthetic construct
MSYTTPMRAAVYLRISEDRSGEQLGVARQREDCLKLCDQRKWVPVEYLDNDVSASTGKRRPAYEQMLADITAGKIAAVVAWDLDRLHRRPIELEAFMSLADEKRLALATVAGDVDLATPQGRLVARLKGSVAAHETEHKKARQRRAARQKAERGHPNWSKAFGYLPGPNGPEPDPRTAPLVKQAYADILAGASLGDVCRQWNDAGAFTITGRPWTTTTLSKFLRKPRNAGLRAYKGARYGPVDRDAIVGKAQWSPLVDEATFWAAQAVLDAPGRAPGRKSVRRHLLTGLAGCGKCGNHLSGSYRTEGRIVYVCKACHGVAILADNIEPILYHTVAERLAMPDAVDLLRREIHDAAEEEAIRLELETLYGELDHLAVERAEGLLTARQVKISTDIVNAKITKLQARQLDQERLRVFDGIPLGTPQVAGMIAELSPDRFRAVLDVLAEVVVQPVGKSSRIFNPERVQVNWR

SEQ ID NO: 5843 - protein, 485 aa, synthetic construct
MTKKVAIYTRVSTTNQAEEGFSIDEQIDRLTKYAEAMGWQVSDTYTDAGISGAKLERPAMQRLINDIENKAFDTVLVYKLDRLSRSVRDTLHLVKDVFTRNKIDFISLNESIDTSSAMGSLFLTILSAINEFERENIKERMTMGKLGRAKSGKSMMWTKTAFGYYHNRKTGILEIVPLQATIVEQIFTDYLSGISLTKLRDKLNESGHIGKDIPWSYRTLRQTLDNPVYCGYIKFKGSLFEGMHKPIIPYETYLKVQKELEERQQQTYERNNNPRPFQAKYMLSGVARCGYCGAPLRIVLGRKRKDGSRTMKYHCANRFPRKTKGVTVYNDNKKCDSGTYDLSNLENTVIDNLIGFQKNNDSLLKIINGNNQPTLDTSSFKKQISQIDKKIQKNSDLYLNDLITMDELKDRTDSLQAEKKLLKAKISENKFNDSTDVFELVKTQLGSIPINELSYDNKKKIVNNLVSKVDVTADNVDIIFKFQLA

SEQ ID NO: 5844 - protein, 452 aa, synthetic construct
MKAAIYIRVSTQEQVENYSIQAQTEKLIALCRSKDWDVYDIFIDGGYSGSNMNRPALNEMLSKLHEIDAVVVYRLDRLSRSQRDTTTLIEEYFLKNNVEFVSLSETLDTSSPFGRAMIGILSVFAQLERETIRDRMVMGKIKRIEAGLPLTTAKGRTFGYDVIDTKLYINEEEAKQLQLIYDIFEEEQSITSLQRRLKKLGFKVRTYNRYNNWLTNDLYCGYVSYKDKVHVKGIHEPIISEEQFYRVQEIFTRMGKNPNMNRDSASLLSNLVVCSKCGLSFVHRSKDTMSRGKKYHYRYYSCKTYKHTHELEKCGNKTWRADKLEELIINRVNNYGFESRNVDKEDELDSLNEKLKIEHAKKRRLFDLYINGGYEVSELDSMMNDINAQINYYESQIEANEELKENKKIQENLADLATVDFDSLEFREKQLYLKSLINKIYIDGEQVTIEWL

SEQ ID NO: 5845 - protein, 452 aa, synthetic construct
MKAAIYIRVSTREQVENYSIQAQTEKLTALCRSKDWDVYDIFIDGGYSGSNMNRPALNEMLSKLHEIDAVVVYRLDRLSRSQRDTITLIEEYFLKNNVEFVSLSETLDTSSPFGRAMIGILSVFAQLERETIRDRMVMGKIKRIEAGLPLTTAKGRTFGYDVIDTKLYINEEEAKQLRLIYDIFEEGQSITFLQKRLKELGFKVRTYNRYNNWLTNDLYCGYVSYKDKVHVKGIHEPIISEEQFNRVQEIFARMGKNPNMNRDSASLLNNLVVCSKCGLGFVHRRKDAMSRDKKYHYRYYSCKTYKHIHELEKCGNKIWRADKLEELIINRVNNYSLASRNVDKEDELDSLNEKLKIEHAKKKRLFDLYINGRYKVSELDSMMDDIDAQINYYESQIEANEELKKNKKIQENLAHLATVDFDSLEFREKQLYLKSLINKIYIDGEQVTIEWL

SEQ ID NO: 5846 - protein, 452 aa, synthetic construct
MKAAIYIRVSTREQVENYSIQAQTERLTALCRSKDWDVYDIFIDGGYSGSNMNRPALNEMLSKLHEIDAVVVYRLDRLSRSQRDTITLIEEYFLKNNVEFVSLSETLDTSSPFGRAMIGILSVFAQLERETIRDRMVMGKIKRIEAGLPLTTAKGRTFGYDVIDTKLYINEEEAKQLRLIYDVFEEEQSITSLQKRLKKLGFKVRTYNRYNNWLTNDLYCGYVSYKDKVHVKGIHEPIISEEQFYRVQEIFTRMGKNPNMNRDSASLLNNLVVCSKCGLGFVHRRKDAMSRDKKYHYRYYSCKTYKHIHELEKCGNKIWRADKLEELIINRVNNYSFASRNVDKEDELNSLNEKLKIEHAKKKRLFDLYINGRYKVSELDSMMSDIDAQINYYESQIEANEGLKRNKKIQENLADLAAVDFDSLEFREKQLYLKSLINKIYIDGEQVTIEWL

SEQ ID NO: 5847 - protein, 452 aa, synthetic construct
MKAAIYIRVSTREQVENYSIQAQTEKLTALCRSKDWDVYDIFIDGGYSGSNMNRPALNEMLSKLHEIDAVVVYRLDRLSRSQRDTITLIEEYFLKNNVEFVSLSETLDTSSPFGRAMIGILSVFAQLERETIRDRMVMGKIKRIEAGLPLTTAKGRTFGYDVIDTKLYINEEEAKQLQLIYDIFEEEQSVTFLQKRLKKLGFKVRTYNRYNNWLTNDLYCGYVSYKDKVHVKGIHEPIISEEQFYRVQEIFTRMGKNPNMNRDSASLLNNLVVCSKCGLGFVHRRKDAMSRDKKYHYRYYSCKTYKHIHELEKCGNKIWRADKLEELVINRVNNYSLASRNVDKEDELDSLSEKLKIEHAKKRRLFDLYINGSYEVSELDSMMSDIDAQISHYESQIEANEELKKSKKIQESLAHLATVDFDSLEFREKQLYLKSLINKIYIDGEQVTIEWL

SEQ ID NO: 5848 - protein, 485 aa, synthetic construct
MTKKVAIYTRVSTTNQAEEGFSIDEQIDRLTKYAEAMGWQVSDTYTDAGLSGAKLERPAMQRLINDIENKAFDTVLVYKLDRLSRSVRDTLYLVKDVFTKNKIDFISLNESIDTSSAMGSLFLTILSAINEFERENIKERMTMGKLGRAKSGKSMMWAKTAFGYYHNRKTGILEIVPPQAAIVEQIFTDYLSGLSLTKLRDKLNESGHIGKDIPWSYRTLRQTLDNPVYCGYIKFKDSLFEGMHKPIIPYETYLKVQKELEERQQQTYERNNNPRPFQAKYMLSGMARCGYCGAPLRIVLGHKRKDGSRTMKYHCANRFPRKTKGVTVYNDNKKCDSGTYDLSNLENTVIDNLIGLQENNDSLLKIINGNNQQILDTSSFKEQISQIDKKIQKNGDLYLNDFITMDELKDRTDSLQAEKKLLKAKISENKFNDSTDVFELVKTQLGSIPINELSYDNKKKIVNSLVSKVDVTADNVDIIFKFQLA

SEQ ID NO: 5849 - protein, 469 aa, synthetic construct
MSYTTPVRAAVYLRISEDRSGEQLGVARQREDCLKLCGQRNWMPVEYLDNDVSASTGKRRPAYEQMLVDITAGKIAAVVAWDLDRLHRRPIELEAFMSLADEKRLALATVAGDVDLATPQGRLVARLKGSVAAHETEHKKARQRRAARQKAERGYPNWSKAFGYLPGPNGPEPDPRTAPLVKQAYADILAGASLGDVCRQWNDAGAFTITGRPWTTTALSKFLRKPRNAGLRAYKGARYGPVDRDAIVGKAQWSPLVDEATFWAAQAVLDAPGRAPGRKSVRRHLLTGLAGCGKCGNHLAGSYRADGRVVYVCKACHGVTVLADNIEPILHHIVAERLAMPDAVDLLRREIHDATETETIRLELETLYGELDRLAVERAEGLLTARQVKISTDIVNAKITKLQARRLDQERLRVLDGIPLGTPQVAGVIAKLSPDRFRAVLDVLAVVVVQPVGKSGSIFNPERVQVNWR

SEQ ID NO: 5850 - protein, 485 aa, synthetic construct
MTKKVAIYTRVSTTNQAEEGFSIDEQTDRLTKYAEAMGWQVSDTYTDAGSSGAKLERPAMQRLINDIENKAFDTVLVYKLDRLSRSVRDTLYLVKDVFAKNNIDFISLNESIDTSSAMGSLFLTILSAINEFERENIKERMTMGKLGRAKSGKSMMWTKTAFGYYHNRKTGILEIVPLQATIVEQIFTDYLSGISLTKLRDKLNESGHIGKDIPWSYRTLRQTLDNPVYCGYIKFKDSLFEGMHRPIIPYETYQKVQKELEERQQQTYERNNNPRPFQAKYMLSGMARCGYCGAPLRIVLGHKRKDGSRTMKYHCANRFPRKTKGITVYNDDKKCDSGTYDLSDLENTVIDNLIGLQENNDSLLKIINGSNQPIPDTSSLKKQINQIDKKIQKNSDLYLSDFITMDELKDRTDSLQAKKKLLEAKISENKSNDSTDVFELVKTQLGSIPINELSYDDKKKIVNNLVSKVDVTADNVDIIFKFQLA

SEQ ID NO: 5851 - protein, 452 aa, synthetic construct
MKAAIYIRVSTQEQVGNYSIQAQTEKLTALCRSKGWDVYDIFIDGGYSGSNMNRPALNEMLSKLHEIDAVVVYRLDRLSRSQRDTTTLIEEYFLKNNVEFVSLSETLDTSSPFGRAMIGILSVFAQLERETIRDRMVMGKIKRIEAGLPLTTAKGRTFGYDVIDTKLYVNEEEAKQLRLIYDIFEEEQSITSLQKRLKKLGFKVRTYNRYNNWLTNDLYCGYVSYKDKVHVKGIHEPIISEEQFYRVQEIFTRMGKNPNMNRDSASLLNNLVVCSKCGLGFVHRSKDTMSRGKKYHYRYYSCKTYKHTHELEKCGNKTWRADKLEELIINRVNNYSFASRNVDKEGELDSLNEKLKVEHAKKRRLFDLYINGSYEVSELDSMMNDIDAQISYYESQIEANEELRKNKKIQENLADLATVDFDSLEFREKQLYLRSLINKIYIDGEQVTIEWL

SEQ ID NO: 5852 - protein, 485 aa, synthetic construct
MTKKVAIYTRVSTTNQAEEGFSIDEQIDRLTKYAGAMGWQVSDTYTDAGFSGAKLGRPAMQRLINDIENKAFDTVLVYRLDRLSRSVRDTLYLVKDVFTKNKIDFISLNESIDTSSAMGSLFLTILSAINEFERENIKERMTMGKLGRAKSGKSMMWTKTAFGYYHNRKTGILEIVPLQATIVEQIFTDYLSGISLTRLRDKLNESGHIGKDIPWSYRTLRQTLDNPVYCGYIKFKGSLFEGMHKPIIPYETYLKVQKELEERQQQTYERNNNPRPFQAKYMLSGMARCGYCGAPLRIVLGHKRKDGSRTMKYHCANRFPRKTKGVTVYNDNKKCDSGTYDLSNLENTVIDNLISFQEDNDSLLKVINGNNQPILDTSSFKKQISQIDKKIQKNSDLYLNDFITMDELKDRTDSLQAEKELLKAKISENKLNDRTNVFELVKTQLGSIPINELSYDNKKKIVNSLVSKVDVTADNVDIIFKFQLG

SEQ ID NO: 5853 - protein, 469 aa, synthetic construct
MSYTTPVRAAVYLRISEDRSGEQLGVARQREDCLKLCNQHKWVPVEYLDNDVSASTGKRRPAYEQMLADITAGKIAAVVAWDLDRLHRRPVELEAFMSLADEKRLALATVAGDVDLATPQGRLVARLKGCVAAHETEHKKARQRRAARQKAERGHPNWSKAFGYLPGPNGPEPDPRTAPLVKQAYADILAGASLGDVCRRWNDAGALTITGRPWTTTTLSKFLRKPRNAGLRAYKGARYGPVDRDAIVGKAQWSPLVDEATFWAAQAVLDAPGRAPGRKSVRRHLLTGLAGCGKCGNHLAGSHRTDGRVVYVCKACHGVAILADNIEPILYHIVAERLAMPDAMDLLRCEIHDAAEAETIRLELDTLNGELDRLAVERAEGLLTARQVKISTDIVNAKITKLQARQLDQGRLRVFDGIPLGTPQVAGVIAELSPDRFRAVLDVLAEVVVQPVGKSGRIFSPERVQVNWR

SEQ ID NO: 5854 - protein, 452 aa, synthetic construct
MKAAIYIRVSTREQVENYSIQAQTEKLTALCRSKDWDVYDIFIDGGYSGSNLNRPALNEMLSKLHEIDAVVVYRLDRLSRSQRDTITLIEEYFLRNNVEFVSLSETLDTSSPFGRAMIGILSVFAQLERETIRDRMVMGKIKRIEAGLPLTTAKGRTFGYDVIDTKLYINKEEAKQLQLIYDIFEEEQSITFLQKRLKKLGFKVRTYSRYNNWLTNDLYCGYVSYKDRVHVKGIHEPIISEEQFYRVQEIFTRMGKNPNMNRDSASLLNNLVVCSKCGLSFVHRRKDTMSRGKKYHYRYYSCKTYKHTHELEKCGNKIWRADKLEELIINRVNNYSLASRSVVKEDELDSLNEKLKIEHAKKKRLFDLYINGSYEASELDSMMNDIDAQINYYESQIEANEELKKNKKIQENLANLATVDYDSLEFREKQLYLKSLINKIYIDGEQVTIEWL

SEQ ID NO: 5855 - protein, 469 aa, synthetic construct
MHYTTPVRAAVYLRISEDRSGEQLGVARQREDCLKLCGQRNWVPVEYLDNDVSASTGKRRPAYEQMLADITAGKIAAVVAWDLDRLHRRPMELEAFMSLADEKRLALATVAGDVDLATPQGRLVARLKGSVAAHETEHKKARQRRAARQKAERGYPNWSKAFGYLPGPNGPEPDPRTAPLVKQAYADILAGASLGDVCRQWNDAGAFTITGRPWTTTTLSKFLRKPRNAGLRAYKGARYGPVDRDAIVGKAQWSPLVDEATFWAAQAVLDAPGRAPGRKSVRRHLLTGLASCGKCGNHLAGSYRTDGRVVYVCKACHGVAILADNIEPILYHIVAERLAMPDAVDLLRREIQDAAEAETIRLELETLYGELDCLAVERAEGLLTARQVKISTDIVNAKITKLQARQQDQERLRVLDGIPLGTPQVADMIAELSPDRFRAVLDVLVEVVVQPVSKSGRVFNPERVQVNWR

SEQ ID NO: 5856 - protein, 452 aa, synthetic construct
MKAAIYIRVSTREQVENYSIQAQTEKLTALCRSKDWDVYDIFIDGGYSGSNMNRPALNEMLGKLHEIDAVVVYRLDRLSRSQRDTITLIEEYFLKNNVEFVSLSETLDTSSPFGRAMIGILSVFAQLERETIRDRMVMGKIKRIEAGLPLTTAKGRTFGYDVIDTKLYINEEEAKQLQLIYDIFEEEQSITFLQKRLKELGFKVRTYNRYNNWLTNDLYCGYVSYKDKVHVKGIHEPIISEEQFYRVQEIFTRMGKNPNMNRGSASLLNNLVVCGKCGLGFVHRRKDAMSRDKKYHYRYYSCKTYKHIHELEKCGNKIWRADKLEELVINRVNNYSLASRNVDKEDELDSLNEKLKIERAKKKRLFDLYINGSYEVSELDSMMSDIDAQINYYESQIEANEELKKNKKIQENLAHLATVDFDSLEFREKQLYLKGLINKIYIDGEQVTIEWL

SEQ ID NO: 5857 - protein, 452 aa, synthetic construct
MKAAIYIRVSTREQVENYSIQAQTEKLTALCRSKDWDVYGIFIDGGYSGSNMNRPALNEMLSKLHEIDAVVVYRLDRLSRSQRDTITLIEEYFLKNNVEFVSLSETLDTSSPFGRAMIGILSVFAQLERETIRDRMVMGKIKRIEAGLPLTTAKGRTFGYDVIDTKLYINEEEAKQLQLIYDIFEEGQSITFLQKRLKKLGFKVHTYNRYNGWLTNDLYCGYVSYKDKVHVKGIHEPIISEEQFYRVQEIFNRMGKNPNMNRDSASLLNNLVVCSKCGLGFVHRRKDTMSRGKKYHYRYYSCKTYKHTHELEKCGNKIWRADKLEELIIDRVNNYSFASRNVDKEGELDSLSEKLRIEHAKKKRLFDLYINGSYEVSELDSMMNDIDAQINYYESQIEANEELKKNKKIQEDLADLATVDFDSLEFREKQRYLRSLINKIYIDGEQVTIEWL

SEQ ID NO: 5858 - protein, 469 aa, synthetic construct
MSYTTPVRAAVYLRISEDRSGEQLGVARQREDCLKLCDQRKWEPVEYLDNDVSASTGRRRPAYEQMLADITVGKIAAVVAWDLDRLHRRPVELEAFMSLADEKRLALATVAGDVDLATPQGRLVARLKGSVAAHETEHKKARQRRAARQKAERGYPNWCKAFGYLPGPNGPEPDPRTAPLVKQAYADILAGASLGDVCRRWNGAGAFTITGRPWTTTTLSKFLRKPRNAGLRAYKGARYGPVDRDAIVGKAQWSPLVDEATFWAAQAALDAPGRAPGRKSVRRHLLTGLAGCGKCGNHLAGSYRTDGRVVYVCKACHGVAILADNIEPILYHIVAERLAMSDAVDLLRREIHDAAEAETIRLELKTLYGELDRLAVERAEGLLTARQVKISTDIVNAKITKLQARQLDQERLRVLDGIPLGTPQVEGMIAELSPDRFRAVLDVLAEVVVQPVGKSGRIFNPERVQVNWR

SEQ ID NO: 5859 - protein, 485 aa, synthetic construct
MTKKVAIYTRVSTTNQAEEGFSIDEQIDRLTKYAEAMGWQVSDTYTDAGLSGAKLERPAMQRLISDIENKAFDTVLVYKLDRLSRSVRDTLYLVKDVFTKNKIDFISLNESIDTSSAMGSLFLTILSAINEFERENIKERMTMGKLGRAKSGKSMMWTKTAFGYYHNRKTGILEIVPLQATIVEQIFTDYLSGISLTKLRDKLNESGHIGKDIPWSYRTLRQTLDNPVYCGYIKFKGSLFEGLHKPIIPYETYLKVQKELEERQQQAYERNNNPRPFQAKYMLSGMARCGYCGAPLKIVLGHRRKDGSRTMKYHCANRFPRKTKGVTVYNDNKKCDSGTYDLSNLENTVINNLIGLQENNDSLLKIINGNNQPIPDTSSLKKQISQIGKKIQKNSDLYLNDFITMDELKDRTDSLQAEKKLLKAKISENEFNDSTDVFELVKTQLGSIPINELSYDNKKKIVNNLVSKVDVTADNVDIIFKFQLA

SEQ ID NO: 5860 - protein, 469 aa, synthetic construct
MSYTTPVCAAVYLRISEDRSGEQLGVARQREDCLKLCGQRNWEPVEYLDNDVSASTGKRRPAYEQMLADITAGKIAAVVAWDLDRLHRRPIELEAFMCLADEKRLALATVAGDVDLATPQGRLVARLKGSVAAHETEHKKARQRRAARQKAERGHPNWSKAFGYLPGPNGPEPDPRTAPLVKQAYADILAGASLGDVCRQWNDAGAFTITGRPWTTTTLSKFLRKPRNAGLRAYKGARYGPVDRDAIVGKAQWSPLVDEATFWAAQAVLDAPGRAPGRKSVRRHLLTGLAGCGKCGNHLAGSYRADGRVVYVCKACHGVAILADNIEPILHHIVAERLAMPDAVDLLRREIHDAAEAETIRLELETLYGELDRLAVERAEGLLTARQVKISTDIVSAKISKLQARQLDQERLRVFDGIPLGTPQVAGMIAELSPNRFRAVLDVLAEVVVQPVGKSGRISNPERVQVNWR

SEQ ID NO: 5861 - protein, 452 aa, synthetic construct
MKAAIYIRVSTREQVENYSIQAQTEKLTALCRSKDWDVYDIFIDGGYSGSNMNRPALNEMLSKLHEIDAVVVYRLDRLSRSQRDTITLVEEYFLKNNVEFVSLSETLDTSSPFGRAMVGILSVFAQLERETIRDRMVMGKIKRIEAGLPLTTAKGRTFGYDVIDTRLYINEEEAKQLQLIYDIFEEEQSITFLQKRLKKLGFKVRTYNCYNNWLTNDLYCGYVSYKDKVHVKGIHEPIISEEQFYRVQEIFTRMGKNPNMNRDSASLLNGLVVCSKCGLGFVHRRKDTTSRGKKYHYRYYSCKTFKHTHELEKCGNKIWRADKLEELIINRVNNYSFAGRNADKEDELDSLGEKLKIEHAKKKRLFDLYINGSYEVSELDSMMNDIDAQINYYESQIGANEELKRNKKIQETLADLATVDFDSLEFREKQLYLKSLINKIYVDGEQVTIEWL

SEQ ID NO: 5862 - protein, 485 aa, synthetic construct
MTKKVAIYTRVSTTNQAEEGFSIDGQIDRLTKYAEAMGWQVSDTYTDAGFSGAKLERPAMQRLINDIENKAFDTVLVYKLDRLSRSVRDTLHLVKDVFTKNKIDFISLNESIDTSSAMGSLFLTILSAINEFERENIKERMTMGKLGRAKSGKSMMWTKTAFGYCHNRITGILEIVPLQAAIVEQIFTDYLSGISLTKLRDKLNESGHIGKDIPWSYRTLRQTLDNPVYCGYIKFKGSLFEGMHEPIIPYETYLKVQKELEERQQQTYERNNNPRPFQAKYMLSGMARCGYCGAPLRIVLGHKREDGSRAMKYHCANRFPRKTKGVTVYNDNKKCDSGTYDLSNLENTVIDNLIGLQENDDSLLKIINGNNQPIPDTSSFKKQISLIDKKIQKNSDLYLNDFITMDELKDRTDSLLAEKKLLKAKISENKSNDSTDVFELVKTQLGSIPINELSYDNKKKIVNNLVSKVDVTADNVDIIFKFQLA

SEQ ID NO: 5863 - protein, 452 aa, synthetic construct
MKAAIYIRVSTQEQVENYSIQAQTEKLTALCRSKDWDVYDIFIDGGYSGSNMNRPALNEMLSKLHEIDAVVVYRLDRLSRSQRDTTTLIEEYFLKNNVEFVSLSETLDTSSPFGRAMIGVLSVFAQLERETIRDRMVMGKIKRIEAGLPLTTAKGRTFGYDVIDTKLYINEEEARQLQLIYDIFEEERSITSLQKRLKKLGFKVRTYNRYNSWLTNDLYCGYVSYKDKVHVKGIHEPIISEEQFYRVQEIFTRMGKNPNMNRDSASLLSNLVVCSRCGLGFVHRSKDTMSRGKKYHYRYYSCKTYKHTHELEKCGNKTWRADKLEELIINRVNNYSFASRNVDKEGEPDSLKEKLKIEHAKKRRLFDLYINGSYEVSELDSMMNDIDAQISYYESQIEANEELKRNKKIQENLAGLATVDFDSLEFREKQLYLKSLINKIYIDGEQVTIEWL

SEQ ID NO: 5864 - protein, 469 aa, synthetic construct
MSHTTPVRAAVYLRISEDRSGEQLGVARQREDCLKLCGQRKWVPVEYLDNDVSASTGKRRPAYEQMLADISAGKIAAVVAWDLDRLHRRPIELEAFMSLADEKRLALATVAGDVDLATPQGRLVARLKGSVAAHETEHKKARQRRAARQKAERGHPNWSKAFGYLPGPNGPEPDPRTAPLVKQAYADILAGASLGDVCRQWNDAGAFTITGRLWTTTTLSKFLRKPRNAGLRAYKGARYGPVDRDAIVGKAQWSPLVDEATFWAAQAVLDAPGRAPGRKSVRRHLLTGLAGCGKCGNHLAGSYRTDGRVVYVCKACHGVAILADNIEPILYHLVAERLAMPDAVDLLRREIHDAAEAETIRLELEALNGELDRLAVERAEGLLTARQVKISTEIVNAKITKLQARQLDQERLRVFDGIPLGTPQVAGVIAELSPDRFRAVLDVLAEVVVQPVGKSGRIFNPERVQVNWR

SEQ ID NO: 5865 - protein, 485 aa, synthetic construct
MTKKVAIYTRVSTTNQAEEGFSIDEQIDRLTKYAEAMGWQVSDTYTDAGCSGAKLERPAMQRLINDIENKAFDTVLVYKLDRLSRSVRDTLYLMKDVFTKNKIDFISLNESINTSSAMGSLFLTILSAINEFERENIKERMTMGKLGRAKSGKSMMWTKTAFGYYHNRKTGILEIVPLQAAIVEQIFTDYLSGISLTKLRDKLNEGGHIGKDIPWSYRTLRQTLDNPVYCGYIKFKDSLFEGMHKPIIPYETYLKAQKELEERQQQTYERNNNPRPFQAKYMLSGMARCGYCGAPLRIVLGHKRKDGSRTMKYHCANRFPRKTKGVTVYNDNKKCDSGTYDLSNLEDTVVNNLIGFQEDNDSLLKIINGNNQPILDTSSFKKQISQIDKKIQKNSDLYLNDFITMDELKERTDSLRAEKKLLKAKISENKFDDSADVFELVKTQLGSIPINELSYDDKKKIVNNLVSKVDVTADSVDIIFKFQLV

SEQ ID NO: 5866 - protein, 452 aa, synthetic construct
MKAAIYIRVSTREQVENYSIQAQTEKLTALCRSKDWDVYDIFTDGGYSGSNMNRPALNEMLSKLHEIDAVVVYRLDRLSRSQRDTITLIEEYFLRNNVEFVSLSETLDTSSPFGRAMIGILSVFAQLERETIRDRMVMGKIKRVEAGLPLTTAKGRTFGYDVIDTKLYINEEEAKQLRLIYDIFEEEQSITFLQKRLKKLGFKVHTYNRYNSWLTNDLYCGYVSYKDKVHVKGIHEPIISEEQFHRVQEIFTRMGKNPNMNRDSASLLNNLVVCSKCGLGFVHRRKDTMRHGKKYHYRYYSCKTYKHIHELEKCGNKIWRADKLEELIINRVNNYSFASRNVDKEDELDSLNEKLKIEHAKKKRLFDLYINGSYEVSELDSMMNDIDAQINYYESQIEANEELKKNKKIQENLANLATVDYDSLEFREKQLYLKSLINKIYIDGEQVTIEWL

SEQ ID NO: 5867 - protein, 485 aa, synthetic construct
MTKKVAIYTRVSTTNQAEEGFSIDEQIDRLTKYAEAMGWQVSGTYTDAGFSGAKLERPAMQRLINDIEDKAFDTVLVYRLDRLSRSVRDTLYLVKDVFTKNKIDFISLNESIDTSSAMGSLFLTILSAINEFERENIKERMTMGKLGRAKSGKSMMWTKTAFGYYHNRKTGILEIVPLQATIVEQIFTDYLSGISLTQLRDKLNESGHIGKDIPWSYRTLRQTLDNPVYCGYIKFKGSLFEGMHKPIIPYETYLKVQKELEERQQQAYERNNNPRPFQAKYMLSGMARCGYCGAPLRIVLGHKRKDGSRTMKYHCANRFPRKTKGVTVYNDNKKCDSGTYDLSNLENTVIDNLVGFQENNDSLLKVINGNNQPILDTSSFEKQISQIDKKIQKNSDLYLNDFITMDELKERTDSLQAEKKLLKAKISENKFNDSTGVFELVKAQLGSIPINELSYDNKKKIVNNLVSKVDVTADNVDIIFKFQLA

SEQ ID NO: 5868 - protein, 485 aa, synthetic construct
MTKKVAIYTRVSTINQAEEGFSIDEQIDRLTKYAEAMGWQVSDTYTDAGLSGAKLERPAMQRLIDDIETKAFDTVLVYKLDRLSRSVRDTLYLVKDVFTKNKIDFISLNESIDTSSAMGSLFLTILSAINEFERENIKERMTMGKLGRAKSGKSMMWTKTAFGYYHNRKTGILEIVPLQATIVEQIFTDYLSGISLTKLRDKLNESGHIGKDIPWSYRTLRQTLGNPVYCGYIKFKDSLFEGMHKPIIPYETYLRVQKELEERQQQTYERNNNPRPFQAKYMLSGMARCGYCGAPLRIVLGHRRKDGSRTMKYHCANRFPRKTKGVTVYNDNKKCDSGTYDLSNLENTVIGNLIGIQENNDSLLKIINGNDQPILDTSSFKKRISQIDKKIQKNSDLYLNDFITMDELKDRTDSLQAEKKLLKAKISENKFNDSADVFELVKTQLGSIPINELSYDNKKKIVNNLVSKVDVTADNVDIIFKFQLA

SEQ ID NO: 5869 - protein, 452 aa, synthetic construct
MKAAIYIRVSTREQVENYSIQAQTEKLTALCHSKDWDVYDIFIDGGYSGSNMNRPALNEMLSKLHEIDAVVVYRLDRLSRSQRDTITLIEEYFLKNNVEFVSLSETLDTSSPFGRAMIGILSVFAQLERETIRDRMVMGKIKRVEAGLPLTTAKGRTFGYDVVDTKLYVNEEEAKQLQLIYDIFEEEQSITFLQKRLKKLGFKVRTYNCYNNWLTNDLYCGYVSYKDKVHVKGIHEPIISEEQFYRVQEIFTRMGKNQNMNRDSASLLNNLVVCSKCGLGFVHRRKDAMSRDKKYHYRYYSCKTYKHIHELEKCGNKIWRADKLEELIINRVNNYSLAGRNVDKGDELDSLNEKLKIEHAKKKRLFELYINGSYEVSELDSMMNDIDAQINYYESQIEANEELRKNRKIQENLAHLATVDFDSLEFREKQLYLKSLINKIYIDGEQVTIEWL

SEQ ID NO: 5870 - protein, 452 aa, synthetic construct
MKAAIYIRVSTQEQVENYSIQAQTEKLTALCRSKDWDVYDIFIDGGYSGSNMNRPALNEMLSKLHEIDAVVVYRLDRLSRSQRDTTTLIEEYFLKNNVEFVSLSETLDTSSPFGRAMIGILSVFAQLERETIRDRMVMGKIKRIEAGLPLTTAKGRTFGYDVIDTKLYINEEEAKQLQLIYDIFEEEQSITSLQKRLKELGFKVRTYNRYNNWLTNDLYCGYVSYKDKVHVKGIHEPIISEEQFYRVQEIFTRMGKNPNMNRDRASLLNNLVVCSKCGLGFVHRSKDTMSRGKKYHYRYYSCKTYKHTHELEKCGNKTWRADKLEELIINRVNDYSFASRNVDKEDELDSLNEKLKIEHAKKRRLFDLYINGSYEVSELDSMMDDIDAQINYYESQIEANEELRKNKKIQENLAELATVDFDSLEFREKQLYLKSLINKIYIDGERVTIEWL

SEQ ID NO: 5871 - protein, 469 aa, synthetic construct
MCYITPVRAAVYLRISEDRSGEQLGVTRQREDCLKLCGQRKWEPVEYLDNDVSASTGKRRPAYEQMLADITAGKIAAVVAWDLDRLHRRPIELEAFMSLADEKRLALATVAGDVDLATPQGRLVARLKGSVAAHETEHKKARQRRAARQKAERGHPNWSKAFGYLPGPNGPEPDPRTAPLVKQAYVDILAGASLGDVCRQWNDAGAFTITGRPWITTTLSKFLRKPRNAGLRAYKGARYGPVDRDAIVGKAQWSPLVDEATFWAVQAVLDAPGRAPGRKSVRRHLLTGLAGCGKCGNHLAGSYRTDGRIVYVCKACHGVAILADNIEPILYHIVAERLAMPDAVDLLRREIHDAAEAETIRLELDTLYGELDRLAVERAEGLLTARQVKISTDIVNAKITKLQARQQDQERLRVLDGIPLGTPQVAGIIAELSPDRFRAVLDVLAEVVVQPVGKSGRIFNPERVQVNWR

SEQ ID NO: 5872 - protein, 469 aa, synthetic construct
MSYTTPMRAAVYLRISEDRSGEQLGVARQREDCLKLCDQRKWVPVEYLDNDVSASTGKRRPAYEQMLADITAGKIAAVVAWDLDRLHRRPIELETFMSLADEKRLALATVAGDVDLATPQGRLVARLKGSVAAHETEHKKARQRRAARQKAERGHPNWSKAFGYLPGPNGPEPDPRAAPLVKQAYADILAGASLGDVCRRWNDAGAFTITGRPWTTTALSKFLRKPRNAGLRAYKGARYGPVDRDAIVGKAQWSPLVDEATFWAAQAVLDAPGRAPGRKSVRRHLLTGLAGCGKCGNHLAGSYRADGRVVYVCKACHGVSILADNIVPILYRIVAERLAMPDAVDLLRREVHDAAEAETIRLELETLYGELDRLAVERAEGLLTARQVKISTDIVNAKITELQARQQDQERLRVLDGIPLGTPQVAGMIAELSPDRFRAVLDVLAEVVVQPVGKGGRIFNPERVQVNWR

SEQ ID NO: 5873 - protein, 485 aa, synthetic construct
MTKKVAIYTRVSTTNQAEEGFSIDEQIDRLTKYAEAMGWQVSDTYTDAGLSGARLERPAMQRLINDIENKAFDTVLVYKLDRLSRSVRDTLYLVKDVFTKNKIDFISLNENIDTSSAMGSLFLTILSAINEFERENIKERMTMGKLGRAKSGKSMMWTKTAFGYYHNRKTGILEIVPLQATIVEQIFTDYLSGISLTKLRDKLNESGHIGKDIPWSYRTLRQTLDNPVYCGYIKFKGSLFEGMHKPIIPYETYLKAQKELGERQQQTYERNNNPRPFQAKYMLSGKARCGYCGAPLRIVLGHKRKDGSRTMKYHCANRFPRRTKGVTVYNNNKKCDSGTYDLSNLETTVIDNLIGLQENNDSLLKIINGNNQPILDTSSFKKQISQIDKKIQKNSDLYLNDFITMDELKDRTDSLQAEKKLLKAKISENEFNDSTDVFELVKTQLGSIPINELSYDNKKRIVNNLVSKVDVTADNVDIIFKFQLA

SEQ ID NO: 5874 - protein, 452 aa, synthetic construct
MKAAIYIRVSTREQVENYSIQAQTEKLTALCRSKDWDVYDIFIDGGYSGSNMNRPALNEMLSKLHEIDAVVVYRLDRLSRSQRDTITLIEEYFLKNNVEFVSLSETLDTSSPFGRAMIGILSVFAQLERETIRDRMVMGKIRRIEAGLPLTTAKGRTFGYDVIDTRLYINEEEAKQLRLIYDIFEEEQSITSLQKRLKKLGFKVRTYNRYNNWLTNDLYCGYVSYKDKVHVKGIHEPIISEEQFYRVQEIFTRMGKNPNMNRDSASLLNNLVVCSKCGLGFVHRRKDTMSRGKKYHYRYYSCKTYKHIHELEKCGNKIWRADKLEELIINRVNNYSYASRNVDKEGELDSLNEKLKVEHAKKKRLFDLYINGSYEVSELDSMMNDIDAQINYYESQIEANEELRKNKKIQENLANLAAVDFDSLEFREKQLYLKSLINKIYIDGEQVTIEWL

SEQ ID NO: 5875 - protein, 452 aa, synthetic construct
MKAAIYIRVSTREQVENYSIQAQTEKLTALCRSKDWDVYDIFVDGGYSGSNMNRPALNEMLSKLHEIDAVVVYRLDRLSRSQRDTITLIEEYFLKNNVEFVSLSETLDTSSPFGRAMIGILSVFAQLERETIRDRMVMGKIKRIEAGLPLTTAKGRTFGYDVIDTKLYINEEEAKQLQLIYDIFEEEQSITFLQKRLKKLGLKVRTYNRYRNWLTNDLYCGYVSYKDKVHVKGIHKPIISEEQFYRVQEIFARMGKNPNMNRDSASLLNNLVVCGKCGLGFVHHRKDAMSRDKKYHYRYYSCKTYKHIHELEKCGNKIWRADKLEELVINRVNNYSLASRNVDKEDELDSLNEKLKIEHAKKKRLLDLYINGSYDVSELDSMMSDIDAQINYYEGQIEANEELKKNKKIQENLAHLATVDFDSLEFREKQLYLKSLINKIYIDGDQVTIEWL

SEQ ID NO: 5876 - protein, 452 aa, synthetic construct
MKAAIYIRVSTREQVENYSIQAQTEKLTALCRSKDWDVYDIFIDGGYSGSNMNRPALNEMLSKLHEIDAVVVYRLDRLSRSQRDTITLIEEYFLKNNVEFVSLSETLDTSSPFGRAMIGILSVFAQLERETIRDRMVMGKIKRIEAGLPLTTAKGRTFGYDVIDTKLYINEEEAKQLQLIYDIFEEEQSITFLQKRLKELGFKVHTYNRYNNWLTNDLYCGYVSYKDKVHVKGIHEPIISEEQFYRVQEIFTRMGKNPNVNRDSASLLNNLVVCSKCGLGFVHRRKDAMSRDKKYHYRYYSCKTYKHIHELEKCGNKIWRADKLEELIINRVNDYSVASRNVDKEDELGSLNEKLKIEHAKRKRLFDLYINGRYEVSELDSMMNDIDAQINYYESRIEAIEELRKDKKIQENLAGLATVDFGSLEFREKQLYLKSLINKIYIDGEQVTIEWL

SEQ ID NO: 5877 - protein, 452 aa, synthetic construct
MKAAIYIRVSTREQVENYSIQAQTEKLTALCRSKDWDVYDIFIDGGYSGSNMNRPALNEMLSKLHEIDAVVVYRLDRLSRSQRDTITLIEEYFLRNNVEFVSLSETLDTSSPFGRAMIGILSVFAQLERETIRDRMVMGKIKRIEAGLPLTTAKGRTFGYDVIDTKLYINEEEAKQLQLIYDIFEEEQSITFLQKRLKKLGFKVRTYNRYNNWLTNDLYCGYVSYKDKVHVKGIHEPIISEEQFYRVQEIFTRMGKNPNMNRGSASLLNNLVVCSKCGLGFVHRRKDATSRDKKYHYRYYSCKTYKHIHELEKCGNKIWRADELEELVINRVNNYSSASRNADKEDELDSLNEKLKIEHAKKKRLFDLYINGGYEVCELDGMMNDIDAQINYYEGQIGANEELRKNKKIQENLANLATVDFDSLEFREKQLYLKSLINKIYIDGEQVTIEWL

SEQ ID NO: 5878 - protein, 452 aa, synthetic construct
MKAAIYIRVSTREQVENYSIQAQTEKLTALCRSKDWDVYDIFIDGGYSGSNMNRPALNEMLSKLHEIDAVVVYRLDRLSRSQRDTITLIEEYFLKNNVEFVSLSETLDTSSPFGRAMIGILSVFAQLERETIRDRMVMGKIKRIEAGLPLTTAKGRTFGYDVIDTKLYINEEEAKQLQLIYDIFEEVQSITFLQKRLKKLGFKVRTYNRYNNWLTNDLYCGYVSYKDKVHVKGIHEPIISEEQFYRVQEIFARMGKNPNMNRDSASLLNNLVVCSKCGLGFVHRRKDAMSRDKKYHYRYYSCKTYKHIHELEKCGNKIWRADKLEELIINRVNNYSFASRNADKEGELDSLNEKLKIEHAKKKRLFDLYINGSYEVSELDSMMNDINAQINYYESQIEANEELKKSKKIQENLADLATVDFDSLEFREKQLYLKSLINKIYIDGEQVTIEWL

SEQ ID NO: 5879 - protein, 485 aa, synthetic construct
MTKKVAIYTRVSTANQAEEGFSIDEQIDRLTKYAEAMGWQVSDTYTDAGFSGAKLERPAMQRLINDIENKAFDTVLVYKLDRLSRSVRDTLYLVKDVFTRNKIDFISLNESIDTSSAMGSLFLTILSAINEFERENIKERMTMGKLGRAKSGKSMMWTKTAFGYHHNRKTGILEIVPLQATIVEQIFTDYLSGTSLTKLRDKLNESGHIGKDIPWSYRTLRQTLDNPVYCGYIKFKDSLFEGMHKPIIPYETYLKVQKELEERQQQAYERNNNPRPFQAKYMLSGMARCGYCGAPLKIVLGHKRKDGSRTMKYHCANRFPRKTKGVTVYNDNKKCDSGTYDLSNLENTVIDNLIGFQENNDSLLKIINGNNQPILDTSSFKKQISQIDKKIQKNSDLYLNDFITMDELKDRTDSLQAEKKLLKAKISENKFNDGTDAFELVRTQLGSIPINELSYDNKKKIVNNLVSKVDVTADSVDIIFKFQLA

SEQ ID NO: 5880 - protein, 452 aa, synthetic construct
MKAAIYIRVSTREQVENYSIQAQTEKLTALCRSKDWDVYDIFIDGGYSGSNMNRPALNEMLSKLHEIDAVVVYRLDRLSRSQRDTITLIEEYFLKNNVEFVSLSETLDTSSPFGRAMIGILSVFAQLERETIRDRMVMGKIKRIEAGLPLTTAKGRTFGYDVIDTKLYINGEEAKQLQLIYDIFEEEQSITSLQKRLKKLGFKVRTYNRYNNWLTNDLYCGYVSYKDKVHVKGIHEPIISEEQFYRVQEIFTRMGKNPNMNRDSASLLNNLVVCGKCGLGFVHRRKDAMSRDKKYHYRYYSCKTYKHIHELEKCGNKIWRADKLEELIINRVNNYSFASRNVDKEDELDSLNEKLKAEHAKKRRLFDLYINGSYEVSELDSMMNDIDAQINYYESQIEANERLKKNKKIQENLANLATVDFDSLEFREKQLYLKSLINKIYIDGEQVTIEWL

SEQ ID NO: 5881 - protein, 469 aa, synthetic construct
MSYTTPVRAAVYLRISEDRSGEQLGVARQREDCLKLCDQRKWVPVEYLDNDVSASTGKHRPAYEQMLADITAGKIAAVVAWDLDRLHRRPIELEAFMSLADEKRLALATVAGDVDLATPQGRLVARLKGCVAAHETEHKKARQRRAARQKAERGYPNWSKAFGYLPGPNGPEPDPRTAPLVKQAYADILAGASLGDVCRRWNDAGALTITGRPWTTTTLSKFLRKPRNAGLRAYKGARYGPVDRDAIVGKAQWSPLVDEATFWAAQAVLDAPGRAPGRKSVRRHLLTGLAGCGKCGNHLAGSYRTDGKVVYVCKACHGVAILADNIEPILYHIVAERLAMPDAVDLLRREIHDAAEAETVRLELETLHGELDRLAVERAEGLLTARQVKISTDIVNAKITKLQARQLDQERLRVFDGIPLGTPQVAGMIAELSPNRFRAVLDVLAEVVVQPVGKSGGIFNPERVQVNWR

SEQ ID NO: 5882 - protein, 485 aa, synthetic construct
MTKKVAIYTRVSTTNQAEEGFSIDEQIDRLTKYAEAMGWQVSDTYTDAGFSGARLERPAMQRLINDIENKAFDTVLVYKLDRLSRSVRDTLYLVKDVFTKNKIDFISLNESIDTSSAMGSLFLAILSAINEFERENIKERMTMGKLGRAKSGKSMMWTKTAFGYYHNRKTGILEIVPLQATIVEQIFTDYLSGISLAKLRDKLNESGHIGKDIPWSYRTLRQTLDNPVYCGYIKFKDSLFEGKHKPIIPYETYLKVQKELEERQQQTYERNNNPRPFQAKYMLSGIARCGYCGAPLRIVLGHKRKDGSRTMKYHCANRFPRRTKGITVYNDNKKCDSGTYDLSNLENAVIDNLIGFQEDNDSLLKIINGNNQPILDTSSFEKQISRIDRKIQKNSDLYLNDFITMDELKDRTDSLQAEKKLLRAKISESKFNDSTDVFELVKTQLGSIPINELSYDNKKEIVNNLVSKVDVTADNVDIIFKFQLA

SEQ ID NO: 5883 - protein, 469 aa, synthetic construct
MRYTTPVRAAVYLRISEDRSGEQLGVARQREDCLKLCDQRKWVPVEYLDNDVSASTGKRRPAYEQMLADITAGKIAAVVAWDLDRLHRRPIELEAFMSLADEKRLALATVAGDVDLATPQGRLVARLKGSVAAHETEHKKARQRRAARQKAERGYPNWSKAFGYLPGPNGPEPDPRTAPLVKQAYADILAGASLGDVCRQWNDAGALTITGRPWTSTTLSKFLRKPRNAGLRAYKGARYGPVDRDAIVGKAQWSPLVDEATFWAAQAVLDAPGRAPGRKSVRRHLLTGLAGCGKCGNRLAGSYRTDGQVVYVCKACHGVSILADNIEPILYHIVAERLAMPDAVDLLRREIHDAAEAETIRLELETQYDELDRLAVERAEGLLTARQVKISTDIVNAKITKLQARQLDRERLRVFDGIPLGTPQVAGMIAELSPDRFRAVLDVLAEVVVQPVGKGGRIFNPERVQVSWR

SEQ ID NO: 5884 - protein, 452 aa, synthetic construct
MKAAIYIRVSTREQVENYSIQAQTEKLTALCRSKDWDVYDIFIDGGYSGSNMNRPALNEMLSKLHEIDAVVVYRLDRLSRSQRDTITLIEEHFLRNNVEFVSLSETLDTSSPFGRAMIGILSVFAQLERETIRDRMVMGKIKRVEAGLPLTTAKGRTFGYDVIDTKLYINEEEAKQLRLIYDIFEEEQSITFLQKRLKKLGFKVRTYNRYNNWLTNDLYCGYVSYKDKVHVKGIHEPIISEEQFYRVQEIFTRMGKNPNMNRDSASLLSNLVVCNKCGLGFVHRRKGTTSRGKKYHYRYYSCKTYKHTHELEKCGNKIWRADKLEELIINRVNNYSFASRNVDKEDELGSLSEKLKIEHAKKKRLFDLYINGSYEMSELDSMMNDIDAQINYYESQIEANEELRKNKKIQENLADLATVDYDSLEFREKQLYLKSLINKIYIDGEQVTIEWL

SEQ ID NO: 5885 - protein, 485 aa, synthetic construct
MTKKVAIYTRVSTTNQAEEGFSIDEQIDRLTKYAEAMGWQVSDTYTDAGFSGAKLERPAMQRLINDIENKAFDTVLVYKLDRLSRSVRDTLYLVKDVFTKNKIDFISLNESINTSSAMGSLFLTILSAINEFERENIKERMTMGKLGRAKSGKSMMWTKTAFGYYHNRKTGILEIVPLQATIVEQIFTDYLSGISLTKLRDKLNESGHIGKDIPWSYRTLRQTLDNPVYCGYIKFKDSLFEGMHKPIIPYETYLKVQKELEERQQQTYVRNNNPRPFQAKYMLSGMARCGYCGAPLRIVLGHKRKDGSRTMKYHCANRFPRKTKGVTVYNNNKKCDSGSYDLSNLEDAVIDNLIGFQENSDSLLKIINGNNQSILDTSSFKKQISQIDKKIQKNSDLYLNDFITMDELKDRTDSLQAEKKLLKAKISENKFNDSTDVFELVKTQLGSIPINELSYDNKKKIVNNLVSKVDVTADNVDITFKFQLA

SEQ ID NO: 5886 - protein, 452 aa, synthetic construct
MKAAIYIRVSTQEQVGNYSIQAQTEKLTALCRSKDWDVYDIFIDGGYSGSNMNRPALNEMLSKLHEIDAVVVYRLDRLSRSQRDTTTLIEEYFLKNNVEFVSLSETLDTSSPFGRAMIGILSVFAQLERETIRDRMVMGKIKRIEAGLPLTTAKGRTFGYDVIDTKLYINEEEAKQLQLIYDIFEEEQSITSLQKRLKKLGFKVRTYNRYNNWLTNDLYCGYVSYKDKVHVKGIHEPIISEEQFHRVQEIFTRMGKNPNMNRDSASLLNNLVVCSKCGLSFVHRSKDTMSRGKKYHYRYYSCKTYKHTHELEKCGNKIWRADKLEELIINRVNNYSFASRNVDKEDELDSLNEKLKIEHAKKKRLFDLYINGGYEVSELDSMMNDIDAQINYYESQIEANEELKKNKKVRENLVDLATVDFDSLEFREKQQYLKSLISRIYIDGEQVTIEWL

SEQ ID NO: 5887 - protein, 452 aa, synthetic construct
MKAAIYIRVSTQEQVGNYSIQAQTEKLTALCRSKDWDVYDIFVDGGYSGSNMNRPALNEMLSKLHEIDAVVVYRLDRLSRSQRDTTTLIEEYFLKNNVEFVSLSETLDTSSPFGRAMIGILSVFAQLERETIRDRMVMGKIKRIEAGLPLTTAKGRTFGYDVIDTKLYINEEEAKQLQLIYDIFEEEQSITSLQKRLKKLGFKVRTYNRYNNWLTNDLYCGYVSYKDKVHVKGIHEPIISEEQFYRVQEIFTRMGKNPNMNRDSASLLSNLVVCSKCGLGFVHRSKDTMSRGKKYHYRYYSCKTYKHTHELEKCGNKTWRADKLEELIINRVNNYSFASRNVDKEGELDSLNEKLKIEHAKKKRLFDLYINGSYEVSELDSMMNDIDAQINYYESQIGASEELKKNKKVQENLADLATVDFDSLEFREKRLYLKSLINKIYIDGEQVTIEWL

SEQ ID NO: 5888 - protein, 485 aa, synthetic construct
MTKKVAIYTRVSTTNQAEEGFSIDEQIDRLTKYAEAMGWQVSDTYTDAGFSGAKLERPAMQRLINDIGNKAFDTVLVYKLDRLSRSVRDTLYLVKDVFTKNKIDFISLSESIDTSSAMGSLFLTILSAINEFERENIKERMTMGKLGRAKSGKSMMWTKTAFGYYHNRKTGILEIVPLQATIVEQIFTDYLSGISLTKLRDKLNESGHIGKDIPWSYRTLRQTLDNPVYCGYIKFKGSLFEGMHKPIIPYETYLKVQKELEERQQQTYERNNNPRPFQAKYMLSGVARCGYCGAPLRIVLGHKRKDGSRTMKYHCANRFPRKTKGVTVYNDNKKCDSGTYDLSNLENAVIDNLIGFQENNDSLLRIINGNNQPILDTSSFKKQISQIDKKIQKNSDLYLNDFITMDELRDRTDSLQAEKKLLKAKISENKFSDSTDVFELVRTQLGSIPINELSYDNKKKIVNNLVSKVDVTADNVDIIFKFQLA

SEQ ID NO: 5889 - protein, 452 aa, synthetic construct
MKAAIYIRVSTREQVENYSIQAQTEKLTALCRSKDWDVYDIFIDGGYSGSNMNRPALNEMLSKLHEIDAVVVYRLDRLSRSQRDTITLIEEYFLKNNVEFVSLSETLDTSSPFGRAMIGILSVFAQLEREAIRDRMVMGKIKRVEAGLPLTTAKGRTFGYDVIDTKLYINEEEAKQLQLIYDIFEEEQSITFLQKRLKKLGFKVRTYSCYNNWLTNDLYCGYVSYKDKVHVKGIHEPIISEEQFYRVQEIFTRMGKNPNVNRDSASLLNNLVVCSKCGLGFVHRRKDTTSRGKKYHYRYYSCKTYKHIHELEKCGNKIWRADKLEELIINRVNNYSSASRDMDKEDELDSLNEKLKIEHAKKKRLFDLYINGSYEVSELDSMMNDIDAQINYYESQIEANEELKKNKKIQENLADLATVDFDSLEFREKQLHLKSLINKIYIDGEQVTIEWL

SEQ ID NO: 5890 - protein, 452 aa, synthetic construct
MKAAIYIRVSTREQVENYSIQAQTEKLTALCRSKDWDVYDIFIDGGYSGSNMNRPALNEMLSKLHEIDAVVVYRLDRLSRSQRDTITLIEEYFLKNNVEFVSLSETLDTSSPFGRAMIGILSVFAQLERETIRDRMVMGKIKRVEAGLPLTTAKGRTFGYDVIDTKLYINEEEAKQLQLIYDIFEEEQSITFLQKRLKKLGFKVRTYNRYNNWLTNDLYCGYVSYKDKVHVKGIHEPIISEEQFYRVQEIFTRMGKNPNMNRDSASLLNGLVVCGKCGLGFVHRRKDIMGRDKKYHYRYYSCKTYKHIHELEKCGNKIWRADKLEELVINRVNNYSFASRNADKEDEPDSLNEKLRIEHAKKRRLLDLYINGSYEVSELDSMMNDIDAQINYYESQIEANEELKKSKRIQENLANLATVNFDSLEFREKQLYLKSLINKIYIDGEQVTIEWL

SEQ ID NO: 5891 - protein, 469 aa, synthetic construct
MSYTTPVRAAVYLRISEDRSGEQLGVARQREDCLKLCGQRKWVPVEYLDNDVSASTGKRRPAYEQMLADITAGKIAAVVAWDLDRLHRRPIELEAFMSLADEKRLALATVAGDVDLSTPQGRLVARLKGSVAAHETEHKKARQRRAARQKAERGLPNWSKAFGYLPGPNGPEPDPRTAPLVKQAYVDILAGASLGDVCRQWNDAGAFTITGRPWTTTTLSKFLRKPRNAGLRAYKGARYGPVDRDAIVGKAQWSPLVDEATFWAAQAVLDAPGRAPGRKSVRRHLLTGLAGCGKCGNHLAGSYRTDGQIVYVCKACHGVSILAVNIEPILYHIVAERLAMPDAVDLLRREIHDAAEAETIRLELETLYSELDRLAVERAEGLLTARQVRISTDIVNAKITKLQACQLDQERLRALDGIPLGTPQVASTIAELSPDRFRAVLDVLAEVVVQPVGKSGRIFNPERVQVNWR

SEQ ID NO: 5892 - protein, 469 aa, synthetic construct
MSYTTPVRAAVYLRISEDRSGEQLGVARQREDCLKLCDQRKWVPVEYLDNDVSASTGKRRPAYEQMLADITAGKIAAVVAWDLDRLHRRPIELEAFMSLADEKRLALATVAGDVDLATPQGRLVARLKGCVAAHETEHKKARQRRAARQKAERGHPNWSKAFGYLPGPNGPEPDPRTAPLVKQAYADILAGASLGNVCRQWNDAGAFTITGRPWTTTTLSKFLRKPRNAGLRAYKGARYGPVDRDAIVGKAQWSPLVDEATFWAAQAVLDAPGRAPGRKSVRRHLLTGLAGCGKCGNHLAGSYRTDGRVVYVCKACHGVSILADNIVPILYHIVAERLAMPDAVDLLCREIHDAAEAETIRLELEALYSELDRLAVERAEGLLTARQVKISTDIVDAKIAKLQARQLDQGRLRVLDGIPLGTPQVAGVIAGLSPDRFRAVLDVLAEVVVQPADKGGRIFNPERVQVSWR

SEQ ID NO: 5893 - protein, 452 aa, synthetic construct
MKAAIYIRVSTREQVENYSIQAQTEKLTALCRSKDWDVYDIFIDGGFSGSNMNRPALNEMLSKLHEIDAVVVYRLDRLSRSQRDTITLIEEYFLKNNVEFVSLSETLDTSSPFGRAMIGILSVFAQLERETIRDRMVMGKIKRIEAGLPLTTAKGRTFGYDVIDTKLYINEEEAKQLQLIYDIFEEEQSITFLQKRLKKLGFKVRTYNRYNSWLTNDLYCGYVSYKDKVHVKGIHEPIISEEQFYRVQEIFTRMGKNPNMNRDSASLLNNLVVCSKCGLGFVHRRKDTVSRGKKYHYRYYSCKTYKHIHELEKCGNKIWRADKLEELIINRVNNYSFASRNVDKEDELDSLNEKLKIEHAKKKRLFDLYVNGSYEVSELDCMMNDIDALINYYESQIEANEELKKDKKIQESLANLATVDYDSLEFREKQLYLKSLINKIYIDGEQVTIEWL

SEQ ID NO: 5894 - protein, 452 aa, synthetic construct
MKAAIYIRVSTREQVENYSIQAQTEKLTALCRSKDWDVYDIFVDGGYSGSNMNRPALSEMLSKLHEIDAVVVYRLDRLSRSQRDTITLIEEYFLKNNVEFVSLSETLDTSSPFGRAMIGILSVFAQLERETIRDRMVMGKIKRIEAGLPLTTAKGRTFGYDVIDTKLYINEEEAKQLQLIYDIFEEEQSITFLQKRLKKLGFKVRTYNRYNNWLTNDLYCGYVSYKDKVHVKGIHEPIISEEQFYRVQEIFTRMGRNPNMNRDSASLLNNLVVCSKCGLGFVHRRKDAMSRDKKYHYRYYSCKTYKHIHELEKCGNKIWRADKLEELIINRVNNYSLASRNVDKEDELDSLNEKLKIEHAKKKRLFDLYINGSYEMSELDSMMNDIDAQISYYESQIEANEELKKNKKIQENLADLATVDFESLEFREKQLYLKSLINKIYIDGEQVTIEWL

SEQ ID NO: 5895 - protein, 485 aa, synthetic construct
MTKKVAIYTRVSTTNQAEEGFSIDEQVDRLTKYAEAMGWQVSDTYTDAGTSGAKLERPAMQRLINDIENKAFDTVLVYKLDRLSRSVRDTLYLVKEVFTKNKIDFISLNESIDTSSAMGSLFLTILSAINEFERENIKERMTMGKLGRAKSGKSMMWTKTAFGYYHNRKTGILEVVPLQATIVRQIFTDYLSGISLTKLRDKLNESGHIGKDIPWSYRTLRQTLDNPVYCGYIKFKDSLFEGMHKPIIPYETYLKVQKELEERQQQAYERNNNPRPFQAKYMLSGMARCGYCGAPLRIVLGRKRKDGSRTMKYHCANRFPRKTKGVTVYNDNKKCDSGTYDLSNLENIVIGNLIGFQENNDSLLKIINGNNQPIQDTSSFKKQISQIDKKIQKNSDLYLNDFITMDELKDRTDSLQAEKKLLKAKISENKFNDCTDVFELVKTQLGSIPINDLSYDDKKKIVNNLVSKVDVTADNVDIVFKFQLA

SEQ ID NO: 5896 - protein, 485 aa, synthetic construct
MTKKVAIYTRVSTTNQAEEGFSIDEQTDRLTKYAEAMGWQVSDTYTDAGFSGAKLERPAMQRLINDIESKAFDTVLVYKLDRLSRSVRDTLYLVKDVFTKNKIDFISLSESIDTSSAMGSLFLTILSAINEFERENIKERMTMGKLGRAKSGKSMMWTKTAFGYYHNRKTGILEIVPLQAAIVEQIFTDYLSGISLTKLRDKLNESGHIGKDIPWSYRTLRQTLDNPVYCGYIKFKDSLFEGMHKPIIPYETYLKVQKELEERQQQTYERNNNPRPFQAKYMLSGMARCGYCGAPLKIVLGHKRKDGSRTMKYHCANRFPRKTKGVTVYNDNRKCDSGTYDLSNLENTVIDSLIGLQENNDSLLKIINGNNQPILDTSSFKKQISLIDKKIQRNSDLYLNDFITMDELKDRTDSLQAEKKLLKAKISENKLNDSADVFELVKTQLGSIPINELSYDNKKKIVNNLVSKVDVTADNVDIIFKFQLA

SEQ ID NO: 5897 - protein, 452 aa, synthetic construct
MKAAIYIRVSTQEQVGNYSIQAQTEKLTALCRSKDWDVYDIFIDGGYSGSNMNRPALNEMLSRLHEIDAVVVYRLDRLSRSQRDTTTLIEEYFLKNNVEFVSLSETLDTSSPFGRAMIGILSVFAQLERETIRDRMVMGKIKRIEAGLPLTTAKGRTFGYDVIDTKLYVNEEEAKQLRLIYDIFEEEQSITFLQKRLKKLGFKVRTYNRYNNWLTNDLYCGYVSYKDKVHVKGIHEPIISEEQFYRVQEIFTRMGKNPNMNRDSASLLNSLVVCSKCGLSFVHRSKDTMSRGKKYHYRYYSCKTYKLTHELEKCGNKIWRADKLEELVINRVNNYNFASRNVDKEDELDNLNKKLKIEHAKKKRLFDLYINGSYEVSELNSMMNDIDAQINYYESQIEANEELRKNQKIQESLADLATVDFDSLEFREKQLYLKSLINKIYIDGEQVTIEWL

SEQ ID NO: 5898 - protein, 452 aa, synthetic construct
MKAAIYIRVSTREQVENYSIQAQTEKLTALCRSKDWDVYDIFVDGGYSGSNMNRPALNEMLCKLHEIDAVVVYRLDRLSRSQRDTITLIEEYFLKNNVEFVSLSETLDTSSPFGRAMIGILSVFAQLERETIRDRMVMGKIKRIEAGLPLTTAKGRTFGYDVIDTKLYINEEEAKQLQLIYDIFEEERSITFLQKRLKKLGFKVRTYNCYNNWLTNDLYCGYVSYKDKVHVKGIHEPIISEEQFYRVQEIFTRMGKSPNMNRDSASLLNNLVVCSKCGLGFVHRRKDIMSHGKKYHYRYYSCKTYKHIHELEKCGNKIWRADRLEELIINRVNNYSFASRNTDKEDELDSLNEKLKIEHAKKKRLFELYINGSYEVSELDSMMSDIDAQISYYESQIEANEELRRSRKIQENLAYLATVDFDSLEFREKRLYLKSLINKIYIDGEQVTIEWL

SEQ ID NO: 5899 - protein, 469 aa, synthetic construct
MSYTTPVRAAVYLRISEDRSGEQLGVARQREDCLKLCDQRKWVPVEYLDNDVSASTGKRRPAYEQMLADITAGKIAAVVAWDLDRLHRRPIELEAFMSLADEKRLALATVAGDVDLATPQGRLVARLKGSVAAHETEHKKARQRRAARQKAERGHPNWSKAFGYLPGPNGPEPDPRTAPLVEQAYADILAGASLGDVCRRWNSAGAFTITGRPWTTTTLSKFLRKPRNAGLRAYKGARYGPVDRDAIVGKAQWSPLVDEATFWAAQAVLDAPGRAPGRKSVRRHLLTGLAGCGKCGNHLAGSYRTDGRVVYVCKACHGVAILAGDIEPILYHLVAERLAMPDAVDLLRREIHDAAEAETIRLELETLYGELDRLAVERAEGLLTARQVKISTDIVNAKITKLQARQLDQERLRVLDGIPLGTPQVAGMIAELSPDRFRAVLDVLAEVVVQPVGRGSRILNPERVRVNWR

SEQ ID NO: 5900 - protein, 452 aa, synthetic construct
MKAAVYIRVSTQEQVENYSIQAQTEKLTALCRSKDWDVYDIFIDGGYSGSNMNRPALNEMLSKLHEIDAVVVYRLDRLSRSQRDTITLIEEYFLKNNVEFVSLSETLDTSSPFGRAMIGILSVFAQLERETIRDRMAMGKIKRIEAGLPLTTAKGRTFGYDVIDTKLYINEEEAKQLQLIYDIFEEEQSITFLQKRLKELGFKVRTYNCYNSWLTNDLYCGYVSYKDKVHVRGIHEPIISEEQFYRVQEIFTRMGKNPNMNRDSASLLNNLVVCSKCGLGFVHRRKDTMSRGRRYHYRYYSCKTYKHTHELEKCGNKIWRADKLEELIINRVNNYSFANRDADKEDELDSLNEKLKIEHAKKKRLFDLYINGSYEVSELDSMMNDIDAQINYYESQIEANEELKKNKKIQESLANLATVDYDSLEFREKQLYLKSLINKIYIDGEQVTIEWL

SEQ ID NO: 5901 - protein, 485 aa, synthetic construct; identical to SEQ ID NO: 3541

SEQ ID NO: 5902 - protein, 452 aa, synthetic construct
MKAAIYIRVSTREQVENYSIQAQTEKLTALCRSKDWDVYDIFIDGGYSGSNMNRPALNEMLNKLHEIDAVVVYRLDRLSRSQRDTITLIEEYFLKNNVEFVSLSETLDTSSPFGRAMIGILSVFAQLERETIRDRMVMGKIKRIEAGLPLTTAKGRTFGYDVIDTKLYINEEEAKQLQLIYDIFEEEQSITFLQKRLKELGFKVHTYNRYNNWLTNDLYCGYVSYKDKVHVKGIHEPIISEEQFYRVQEIFTRMGKNPNTNRDSASLLSNLVVCSKCGLGFVHRRKDAMSRDKKYHYRYYSCKTYKHIHELEKCGNKIWRADKLEELIINRVNNYSLANRNVDKEDELDSLNEKLKMEHAKKKRLFDLYINGSYEVSELDSMMNDIDVQISYYESQIEANEELKKNKEIRENLAHLATVDFDSLEFREKQLYLKSLINKIYIDGEQVTIEWL

SEQ ID NO: 5903 - protein, 485 aa, synthetic construct
MTKKVAIYTRVSTTNQAEEGFSIDEQIDRLTKYAEAMGWQVSDTYTDAGFSGAKLERPAMQRLINDIENRAFDTVLVYKLDRLSRSVRDTLYLVKDVFTKNKIDFISLNESIDTSSAMGSLFLTILSAINEFERENIKERMTMGKLGRAKSGKSMMWTKTAFGYYHNRKTGILEIVPLQATIVEQIFTDYLSGISLTKLRDKLNESGHVGKDIPWSYRTLRQTLDNPVYCGYIKFKDSLFEGMHKPIIPYEIYLKVQKELEVRQQQTYERNDNPRPFQAKYMLSGMARCGYCGAPLRIVLGRKRKDGSRTMKYHCANRFPRKTKGVTVYNDNKKCDSGTYGLSNLENTVIDNLIGLQENNDSLLKIIHGNNQPILDTSSFKKQISQIDKKIQKNSDLYLNDFITMDELRDRTDSLQAEKKLLKAKISENKFNDSTDVFELVKTQLGSIPINELSYENKKKIVNSLVSKVDVTADNVDIIFKFQLA

SEQ ID NO: 5904 - protein, 469 aa, synthetic construct
MSYTTPVRAAVYLRISEDRSGEQLGVARQREDCLKLCDQRKWVPVEYLDNDVSASTGKRRPAYEQMLADITAGKIAAVVAWDLDRLHRRPIELEAFMSLADAKRLALATVAGDVDLATPQGRLIARLKGSVAAHETEHKKARQRRAARQKAERGYPNWSKAFGYLPGPYGPEPDPRTAPLVKQAYADILAGASLGDVCRQWNDAGAFTITGRPWTTTALSKFLRKPRNAGLRAYKGARYGPVDRNAIVGKAQWSPLVDETTFWAAQAVLDAPGRAPGRKSVRRHLLTGLAGCGKCGNHLAGSYRTDGRVVYVCKACHGIAILADNIEPILYNIVAERLAMPDAVDLLRREIHDAAEAETIRLELETLYSELDRLAVERAEGLLTARQVKISTDIVNAKITKLQARQLDQERQRVFDGIPLGTPQVAGAIAELSPNRFRAVFDVLAEVVVQPVGKSGRIFNPERVQVNWR

SEQ ID NO: 5905 - protein, 469 aa, synthetic construct
MSYITPVRAAVYLRISEDRSGEQLGVARQREDCLKLCGQRKWVPVEYLDNDVSASTGKRRPAYEQMLADITAGKIAAVVAWDLDRLHRRPIELEAFMSLADEKRLALATVAGDVDLATPQGRLVARLKGSVAAHETEHKRARQRRAARQRAERGLPNWSKAFGYLPGPNGPEPDPRTAPLVKQAYADILAGASLGDVCRQWNGAGAFTITGRPWTTTTLSKFLRKPRNAGLRAYKGARYGPVDRDAIVGKAQWSPLVDEATFWAAQAVLDAPGRAPGRKSVRRHLLTGLAGCGKCGNHLAGSYRTDGQIVYVCKACHGVSILAVNIEPILYHVVAERLAMPDAVDLLRREIHDAAEAETVRLELETLYGELDRLAVERAEGLLTARQVKISTDIVNARITKLQARQLDQERLRVFDGIPLGTPQVAGMIAELSPDRFRAVLDVLVEVVVQPVGKGGRISNPERVQVNWR

SEQ ID NO: 5906 - protein, 452 aa, synthetic construct
MKAAIYIRVSTREQVENYSIQAQTEKLTALCRSKDWDVYDIFIDGGYSGSNMNRPALNEMLSKLHEIDAVVVYRLDRLSRSQRDTITLIEEYFLKNNVEFVSLSETLDTSSPFGRAMIGILSVFAQLERETIRDRMVMGKIKRIEAGLPLTTAKGRTFGYDVIDTKLYINEEEAKQLQLIYDIFEEEQSITFLQKRLKKLGFKVHTYNRYSNWLTNDLYCGYVSYKDKVHVKGIHEPIISEEQFYRVQEIFARMGKNPNMNRDSASLLSNLVVCSKCGLGFVHRRKDTMSRGKKYHYRYYSCKTYKHTHELEKCGNKIWRADKLEELIINRVNNYNLASRNVDKEDELDSLNEKLKIEHAKKKRLFDLYINGSYEVSELDSMMNDIDAQINYYESQIEANEELKKNKKIQENLADLATVDFDSLEFREKQLYLKSLINKIYIDGEQVTIEWL

SEQ ID NO: 5907 - protein, 469 aa, synthetic construct
MSYTTPVRAAVYLRISEDRSGEQLGVARQREDCLKLCGQRKWEPVEYLDNDVSASTGKRRPAYEQMLADITAGKIAAVVAWDLDRLHRRPIELEAFMCLADEKRLALATVAGDVDLATPQGRLVARLKGCVAAHETEHKKARQRRAARQKAERGHPNWSKAFGYLPGPNGPEPDPRTAPLVKQAYADILAGASLGDVCRQWNDAGAFTITGRPWTTTTLSKFLRKPRNAGLRAYKGARYGPVDRDAIVGKAQWSPLVDEATFWAAQAVLDAPGRAPGRKSVRRHLLTGLAGCGKCGNHLAGSYRTDGQVVYVCKACHGVAILADNIEPILYHIVAERLAMPDAVDLLRREIHDAADAETIRLELETLYGELDRLAVERAEGLLTARQVKISTDIVNAKITKLQACQLDQERLRVFDGIPLGTPQVAGVIAELSPDRFRAVLDVLAEVVVQPVGKGGRTFNPERVQVNWR

SEQ ID NO: 5908 - protein, 452 aa, synthetic construct
MKAAIYIRVSTQEQVENYSIQAQTEKLTALCRSKDWDVYDIFIDGGYSGSNMNRPALNEMLSKLHEIDAVVVYRLDRLSRSQRDTTTLIEEHFLKNNVEFVSLSETLDTSSPFGRAMIGILSVFAQLERETIRDRMEMGKIKRVEAGLPLTTAKGRTFGYDVIDTKLYINEEEAKQLQLIYDIFEEEQSITSLQKRLKKLGFKVRTYNRYSNWLTNDLYCGYVSYKDKVHVKGIHEPIISEEQFYRVQEIFTRMGKNPNMNRDSASLLSGLVVCSKCGRSFVHRSKDTMSRGKKYHYRYYSCKTYKHTHELEKCGNKTWRADKLEELIINRVNNYSFASRNADKEDELDSLNEKLKIEHARKKRLFDLYINGSYEVSELDSMMNDIDAQINYYESQIEAHEELKKNKKIQENLADLATVDFDSLEFREKQLYLKSLINKIYIDGEQVTIEWL

SEQ ID NO: 5909 - protein, 452 aa, synthetic construct
MKAAIYIRVSTREQVENYSIQAQTEKLTALCRSKDWDVYDIFIDGGYSGSNMNRPALNEMLSKLHEIDAVVVYRLDRLSRSQRDTITLIEEYFLRNNVEFVSLSETLDTSSPFGRAMIGILSVFAQLERETIRDRTVMGKIKRVEAGLPLTTAKGRTFGYDVIDTKLYINEEEAKQLQLIYDIFEEEQSITFLQKRLKKLGLKVHTYNRYNNWLTNDLYCGYVSYKDKVHVKGIHEPIISEEQFCRVQEIFTRMGKNPNMNRDSASLLNNLVVCCKCGLGFVHRRKDTMSRGKKYHYRYYSCKTYKHIHELERCGNKIWRADELEELIINRVSNYSFASRSVDKEDELDSLNEKLKIEHAKKKRLFDLYINGSYNVGELDSMMNDIDAQINCYESQIEANEELKKNKKIQENLADLATVDFDSLEFREKQLYLKSLINKIYIDGEQVTIEWL

SEQ ID NO: 5910 - protein, 469 aa, synthetic construct
MSYTTPVRAAMYLRISEDRSGEQLGAVRQREDCLKLCVQRKWVPVEYLDNDVSASTGKRRPAYEQMLADITAGKIAAVVAWDLDRLHRRPIELEAFMSLADEKRLALATVAGDVDLATPQGRLVARLKGSVAAHETEHKKARQRRAARQKAERGYPNWSRAFGYLPGPNGPEPDPRTAPLVKQAYADILAGASLGDVCRQWNDAGAFTITGRPWTTTTLSKFLRKPRNAGLRAYRGARYGPVDRDAIVGKAQWSPLVDEATFWAAQAVLDAPGRAPGRKSVRRHLLTGLAGCGKCGNHLAGSYRTDGQIVYVCKACHGVSILAVNIEPILYRIVAERLAMPDAVDLLRRGAHDAAEAGTIRLELETLYGELDRLAVERAEGLLTARQVKISTDIVNTKITKLQARQLDQERLRVFDGIPLGTPQVAGMIAELSPDRFRAVLDVLAEVVVQPVGKSGRTLNPERVQVNWR

SEQ ID NO: 5911 - protein, 486 aa, synthetic construct
MTKKVAIYTRVSTTNQAEEGFSTDEQADRLTKYAEAMGWQVSDTYTDAGFSGAKLERPAMQRLINDIENKAFDTVLVYKLDRLSRSVRDTLYLVKDVFTKNKIDFISLSESIDTSSAMGSLFLTILSAINEFERENIKERMTMGKLGRAKSGKSMMWTKTAFGYYHNRKTGILEIVPLQATIVEQIFTDYLSGISLTKLRDKLNESGHIGKDIPWSYRTLRQTLDNPVYCGYIKFKDSLFEGMHKPIIPYETYLKVQKELEERQQQTYERNNNPRPFQAKYMLSGMARCGYCGAPLKIVLGHKRKDGSRTTKYHCANRFPRKTKGVTVYNDNKKCDSGTYDLSNLENTVIDSLIGFQENSDSLLKIINGSNQPILDTSSLKKQISQIDKKIQKNSDLYLNDFITMDELKDRTDSLQAEKKLLKAKISENKFNDSTDVFELVKTQLGSIPINELSYDNKKKIVNNLVSKVDVTADNVDIIFKFQLAQ

SEQ ID NO: 5912 - protein, 452 aa, synthetic construct
MKAAIYIRVSTREQVENYSIQAQTEKLTALCRSKDWDVYDIFIDGGYSGSNMNRPALNEMLSKLHEIDAVVVYRLDRLSRSQRDTITLIEEYFLKNNVEFVSLSETLDTSSPFGRAMIGILSVFAQLERETIRDRMVMGKIKRIEAGLPLTTAKGRTFGYDVIDTKLYINEEEAKQLQLIYDIFEEEQSITFLQKRLKKLGFKVRTYNRYNNWLTNDLYCGYVSYKDKVHVKGIHEPIISEEQFYRVQEIFTRMGKNPNMNRDSASLLNNLVVCGKCGLGFVHRRKDIMSHGKKYHYRYYSCKTYKHIHELEKCGNKIWRADKLEELIINRVNNYSVAGRDVDKEDELDSLNEKLKIEHAKKKRLFELYINGSYEVSELDSMMNDIDAQINYYESQIEASEELKKNKKIQENLANLATVDFDSLEFREKQLYLKSLINKIYIDGEQVTIEWL

SEQ ID NO: 5913 - protein, 452 aa, synthetic construct
MKAAIYIRVSTREQVENYSIQAQTEKLTALCRSKDWDVYDIFIDGGYSGSNMNRPALNEMLSKLHEIDAVVVYRLDRLSRSQRDTVTLIEEYFLKNNVEFVSLSETLDTSSPFGRAMIGILSVFAQLERETIRDRMVMGKIKRIEAGLPLTTAKGRTFGYDVIDTKLYINEEEAKQLRLIYDIFEEEQSITSLQKRLKKLGFKVRTYNRYNNWLTNDLYCGYVSYKDKVHVKGIHEPIISEEQFYRVQEIFTRMGKNPNMNRDSASLLNNLVVCGKCGLSFVHRRKGAMSRDKKYHYRYYSCKTYKHIHELEKCGNKIWRADKLEELIINRVNNYSFASRNAGKEDELDSLNEKLKIEHAKKRRLFELYINGRYEVSELDSMMNDIDARINYYESQIEANGGLKENKKIQENLANLATVDFDSLEFREKQLYLKSLINKIYIDGEQVTIEWL

SEQ ID NO: 5914 - protein, 469 aa, synthetic construct
MSYITPVRAAVYLRISEDRSGEQLGVARQREDCLKLCGQRKWVPVEYLDNDVSASTGRRRPAYEQMLADITAGKIAAVVAWDLDRLHRRPVELEAFMSLADEKHLALATVAGDIDLATPQGRLVARLKGSVAAHETEHKKARQRRAARQKAERGYPNWSKAFGYLPGPNGPEPDPRTAPLVKQAYADILAGASLGDVCRQWNDAGAFTITGRLWTTTTLSKFLRKPRNAGLRAYKGARYGPVDRDAIVGKAQWSPLVDEATFWAAQAVLDAPGRAPGRKSVRRHLLTGLAGCGKCGNHLAGSYRTDGRVVYVCKACHGVAILADNIEPILYHIVAERLAMPDAVDLLRREIHDAAEAETVRLELETLYGELDRLAVERAEGLLTARQVKISTDIVNAKITKLQARQLDQERLRVFDGIPLGTPRVAGMIAELSPDRFRAVLDVLAEVVVQPVGKSGRIFNPERVQVNWR

SEQ ID NO: 5915 - protein, 485 aa, synthetic construct
MTKKVAIYTRVSTTNQAEEGFSIDEQIDRLTKYAEAMGWQVSDTYTDAGFSGAKLERPAMQRLINDIENKAFDTVLVYKLDRLSRSVRDTLYLVKDVFTKNKIDFISLNESINTSSAMGSLFLTILSAINEFERENIKERMTMGKLGRAKSGKSMMWTKTAFGYYHNRKTGILEVVPLQAAIVEQIFTDYLSGISLTKLRDKLNESGHIGKDIPWSYRTLRQTLDNPVYCGYIKFKDSLFEGMHKPIIPYETYLKVQKELEERQQQAYERNNNPRPFQAKYMLSGMARCGYCGAPLRIVLGRKRKDGSRIMKYHCANRFPRKIKGITVYNDNKKCDSGTYDLSDLENTVIDNLIGFQENNDSLLKIINGNNQPILDTSSFKKQISQIDKKIQKNSDLYLNDFITMDELKGRTDSLQAEKKLLKAKISENKFNDSTDVFELVKAQLGSIPINELSYDNKKKIVNNLVSKVDVTADNVDIIFKFQLA

SEQ ID NO: 5916 - protein, 452 aa, synthetic construct
MKAAIYIRVSTREQVENYSIQAQTEKLTALCRSKDWDVYDIFIDGGYSGSNMNRPALNEMLSKLHEIDAVVVYRLDRLSRSQRDTITLIEEYFLKNNVEFVSLSETLDTSSPFGRAMIGILSVFAQLERETIRDRMVMGKIKRIEAGLPLTTAKGRTFGYDVIDAKLYINEEEAKQLQLIYDIFEEEQSITFLQKRLKKLGFKVRTYNRYNNWLTNDLYCGYVSYKDKVHVKGIHEPIISEEQFYRVQEIFTRMGKNPNMNRGSASLLNNLVVCSKCGLGFVHRRKDAMSRDKKYHYRYYSCKTYKHIHELEKCGNKIWRADKLEELIINRVNNYSLASRNVGKEDELDSLNEKLKIEHAKKKRLFDLYINGSYEVSELDSMMNDIDAQISYYESQIEANEELKKNKKIQESLASLATVDFDSLEFREKQLYLKSLINKIYIDGEQVTIEWL

SEQ ID NO: 5917 - protein, 452 aa, synthetic construct
MKAAIYIRVSTREQVENYSIQAQTEKLTALCRSKDWDVYDIFIDGGYSGGNMNRPALNEMLSKLHEIDAVVVYRLDRLSRSQRDTITLIEEHFLKNSVEFVSLSETLDTSSPFGRAMIGILSVFAQLERETIRDRMVMGKIKRIEAGLPLTTAKGRTFGYDVIDTKLYINEEEAKQLQLIYDIFEEEQSITSLQKRLKELGFKVRTYNRYNNWLTNDLYCGYVSYKDKVHVKGIHEPIISEEQFYRVQEIFTRMGKNPNMNRDSASLLNNLVVCSKCGLGFVHRRKDAMSRDKKYHYRYYSCKTYKHIHELEKCGNKIWRADKLEELIINRVNNYSIASRNADKEDELDSLNEKLKIEHAKKKRLFELYINGSYVVSELDSMMNDIDAQINYYEGQIEANEELRKNRKIQENLAHLATVDFDSLEFREKQLYLKSLINKIYIDGEQVTIEWL

SEQ ID NO: 5918 - protein, 485 aa, synthetic construct
MTKKVAIYTRVSTTNQAEEGFSIDEQIDRLTKYAEAMGWQVSDTYTDAGLSGAKLERPAMQRLINDIENKAFDTVLVYKLDRLSRSVRDTLYLVKDVFTKNKIDFISLNESIDTSSAMGSLFLTILSAINEFERENIKERMTMGKLGRAKSGKSMMWTKTAFGYYHNRKTGILEIVPLQATIVQQIFTDYLSGISLTKLRDKLNESGHIGKDIPWSYRTLRQTLDNPVYCGYIKFKDSLFEGLHKPIIPYETYLKVQKELEERQQKTYERNNNPRPSQAKYMLSGMARCGYCGAPLKIVLGHKRKDGSRTMKYHCANRFPRKTQGVTVYNDNKKCDSGTYDLSNLENTVIDNLIGFQENNDSLLKVISGNNQPILDTSSFKEQISQIDKKIQKNRDLYLNDFITMDELKDRTSSLQAEKKLLKAKISENKFNDSTDVFELVKTQLGSIPINELSYDSKKKIVNNLVSKVDVTADNVDIIFKFQLA

SEQ ID NO: 5919 - protein, 469 aa, synthetic construct
MSYTTPVRAAVYLRISEDRSGEQLGVARQREDCLKLCGQRKWVPVEYLDNDVSASTGKRRPAYEQMLADITAGKIAAVVAWDLDRLHRRPVELEAFMSLADEKRLALATVAGDVDLATPQGRLVARLKGCVAAHETEHKKARQRRAARQKAERGLPNWSKAFGYLPGPNGPEPDPRTAPLVKQAYADILAGASLGDVCRQWNGAGAFTITGRPWTITTLSKFLRKPRNAGLRAYKGARYGPVDRDAIVGKAQWSPLVDEATFWAAQAVLDAPGRAPGRKSVRRHLLTGLAGCGKCGNHLAGSYRTDGRVVYVCKACHGVAILADNIEPILYHIVAERLAMPDAVDLLRREIHDAAEAETIRLELGTLYGELDRLAVERAEGLLTARQVKISTDIVNAKITKLQARQLDQERLRVLDGIPLGTPQVASVTAELSPDRFRAVLDVLAEVIVQPVGKSGRISNPERVQVNWR

SEQ ID NO: 5920 - protein, 452 aa, synthetic construct
MKAAIYIRVSTREQVENYSIQAQTEKLTALCRSKDWDVYDIFIDGGYSGSNMNRPALNEMLSKLHEIDAVVVYRLDRLSRSQRDTITLIEEYFLKNNVEFVSLSETLDTSSPFGRAMIGILSVFAQLERETIRDRMVMGKIKRIEAGLPLSTAKGRTFGYDVIDTKLYINEEEAKQLQLIYDIFEEEQSITFLQKRLKKLGFKVRTYNRYNNWLTNDLYCGYVSYKDKVHVKGIHEPIISEEQFYRVQEIFTRMGKNPNMNRDSASLLNNLVVCSKCGLGFVHRRKDTMSRGKKYHYRYYSCKTYKHTHELEKCGNKIWRADKLEELIINRVNNCSFASRNANKAEELDSLNEKLKVEHAKKKRLFDLYINGSYNVSELNSMMNDIDAQINYYESQIEANEELKKSKKIQENLAGLATVDFGSLEFREKQLYLKSLINKIYIDGEQVTIEWL

SEQ ID NO: 5921 - protein, 469 aa, synthetic construct
MSYTTPVRAAVYLRISEDRSGEQLGVARQREDCLKLCGQRKWVPVEYLDNDVSASTGKRRPAYEQMLADITAGRIAAVVAWDLDRLHRRPIELEAFMSLADEKRLALATVAGDVDLATPQGRLVARLKGSVAAHETEHKKARQRRAARQKAERGHPNWSKAFGYLSGPNGPEPDPRTAPLVKQAYADILAGASLGDVCRQWNGAGALTITGRPWTTTTLSKFLRKPRNAGLRAYKGARYGPVDRDAIVGKAQWSPLVDEATFWAAQAVLDAPGRAPGRKSVRRHLLTGLAGCGKCGNHLAGSYRADGRVVYVCKACHGVAILADNIEPILYHVVAERLAMPDAADLLRREIHDAAEAETIRLELETLYGELDRLAVERAEGLLTARQVKISTDIVNAKITKLQARQLDQERLRVLDGIPLGTPQVAGMIAELSPDRFRAVLDVLAEVVVQPVGKSGRIFSPERVQVNWR

SEQ ID NO: 5922 - protein, 485 aa, synthetic construct
MTKKVAIYTRVSTTNQAEEGFSIDEQIDRLTKYAEAMGWQVSDTYTDAGFSGAKLERPAMQRLINDIENKAFDTVLVYKLDRLSRSVRDTLYLVKDVFTKNKIDFISLSESINTSSAMGSLFLTILSAINEFERENIKERMTMGKLGRAKSGKSMMWTKTAFGYYHNRKTGILEIVPLQATIVEQIFTDYLSGISLTKLRDKLNESGHIGKDIPWSYRTLRQTLDNPVYCGYIKFKDSLFEGMHKPIIPYETYLKVQKELEKRQQQTYERNNNPRPFQAKYMLSGMARCGYCGAPLRIVLGHKRKDGSRTMKYHCANRFPRKTKGVTVYNDNKKCDSGTYDLSILENTVIDNLIGFQENNDSLLKIINGNNQPILDTSSFKEQISQIDKKIQKNSDLYLNGFITMDELRDRTESLRAEKKLLKARISENKFNDSTDVFELVKTQLGSIPINELSYDNKKKIVNNLVSKVDVTADNVDIIFKFQLA

SEQ ID NO: 5923 - protein, 485 aa, synthetic construct
MTKKVAIYTRVSTTNQAEEGSSIDEQVDRLTKYAEAMGWQVSDTYTDAGLSGAKLERPAMQRLINDIENKAFDTVLVYKLDRLSRSVRDTLYLVKDVFTKNKIDFISLNESIDTSSAMGSLFLTILSAINEFERENIKERMTMGKLGRAKSGKSMMWTKTAFGYYHNRKTGILEIVPLQATIVEQIFTDYLSGISLTKLRDKLNESGHIGKDIPWSYRTLRQTLDNPVYCGYIKFKGSLFEGMHKPIIPYETYLKVQKELEERQQQTYERNNNPRPFQAKYMLSGMARCGYCGAPLRIVLGHKRKDGSRTMKYHCANRFPRKTKGVTVYNDNKKCDSGTYDLSNLENTVIDNLIDFQENNDRLLKIINGNNQPILDTSSFKKQISQIDKKIQKNSDLYLNDFITMDELKGRTDSLQAEKRLLKAKISENRFNDSTDVFELVKTQLGSIPINELSYDNKKKIVNNLVSKVDVTADNVDIIFKFQLA

SEQ ID NO: 5924 - protein, 485 aa, synthetic construct
MTKKVAIYTRVSTTNQAEEGFSIDEQIDRLTKYAEAMGWQVSDTYTDAGLSGAKLERPAMQRLINDIENKAFDTVLVYKLDRLSRSVRDTLYLVKDVFTKNKIDFISLNESIDTSSAMGSLFLTILSAINEFERENIKERMTMGKLGRAKSGKSMMWTKTAFGYYHNRKTGILEIVPLQATIVKQIFTDYLSGISLTKLRDKLNESGHIGKDIPWSYRTLRQTLDNPVYCGYIKFKDSLFEGMHKPIIPYETYLKVQKELEERQQLAYERNNNPRPFQAKYMLSGMARCGYCGAPLRIVLGHKRKDGSRTMRYHCANRFPRKTKGITVYNDNKKCDSGSYDLSNLENTVIDNLIGFQENNDSLLKIINGNNQPILDTSSFKEQISQIDKKIQRNSDLYLNGFITMDELKDRTDSLQAERKLLKAKISENKFNDRTDVFELVKTQLGSIPINELSYDNKKTIVNNLVSKVDVTADNVDIIFKFQLA

SEQ ID NO: 5925 - protein, 469 aa, synthetic construct
MSHTTPVRAAVYLRISEDRSGEQLGVARQREDCLKLCDQRKWVPVEYLDNDVSASTGKRRPAYEQMLADITAGKIAAVVAWDLDRLHRRPIELEAFMSLADEKRLALATVAGDVDLATPQGRLVARLKGSVAAHETEHKKARQRRAARQKAERGYPNWSKAFGYLPGPNGPEPDPRTAPLVRQAYADILAGASLGDVCRRWNGAGAFTITGRPWTTTTLSKFLRKPRNAGLRAYKGARYGPVDRDAIVGKAQWSPLVDEATFWAAQAVLDAPGRAPGRKSVRRHLLTGLAGCGKCGNHLAGSYRTDGRVVYVCKACYGVAILADNIEPILYRTVAERLAMPDAADLLRREIHDAAEAETIRLELETLYGELDRLAVERAEGLLTARQVKISTDIVSAKITKLQARQLDQERLRVFAGIPLGTPQVAGMIAELSPDRFRAVLDVLAEVVVQPVGKSGRIFNPERVQVNWR

SEQ ID NO: 5926 - protein, 452 aa, synthetic construct
MKAAIYIRVSTREQVENYSIQAQTEKLTALCRSKDWDVYDIFIDGGYSGSNMNRPALIEMLSKLHEIDAVVVYRLDRLSRSQRDTITLIEEYFLKNNVEFVSLSETLDTSSPFGRAMIGILSVFAQLERETIRDRMVMGKIKRIEAGLPLTTAKGRTFGYDVIDTKLYINEEEAKQLQLIYDIFEEEQSITFLQKRLKKLGFKVRTYNRYNNWLTNDLYCGYVSYKDKVHVKGIHEPIISEEQFYRVQEIFTRMGKNPNMNRDSASLLNNLVVCSKCGLGFVHRRKDIMSRDKKYHYRYYSCKTYKHIHELEKCGNKIWRADKLEELIINRVNNYSLASRNVDKEDELDSLNEKLKIEHAKKRRLFDLYINGSYEVSELDSMMNDIDAQINYYESRIEANEELKRNKKVQENLAYLATVDFDSLEFREKQLYLKSLINKIYIDGEQVTIEWL

SEQ ID NO: 5927 - protein, 452 aa, synthetic construct
MKAAIYIRVSTREQVENYSIQAQTEKLTALCRSKDWDVYDVFIDGGYSGSNMNRPALNEMLSKLHEIDAVVVYRLDRLSRSQRDTITLIEEYFLKNNVEFVSLSETLDTSSPFGRAMIGILSVFAQLERETIRDRMVMGKIKRIEAGLPLTTAKGRTFGYDVIDTKLYINEEEAKQLQLIYDIFEEEQSITFLQKRLKKLGFKVRTYNRYNNWLTNDLYCGYVSYKDKVHVKGIHEPIISEEQFYRVQEIFTRMGKNPNMNRGSASLLNNLVVCSKCGLSFVHRRKDAMGRDKKYHYRYYSCKTYKHIHELEKCGNKIWRADKLEELIINRVNNYSLASRNVDKEDELDSLNEKLKIEHAKKKRLFDLYINGSYEVSELDSMMNDIDAQINYYESQIEAKEELKRNKKIQENLADLATVDFDSLEFREKQRYLKSLINKIYIDGEQVTIEWL

SEQ ID NO: 5928 - protein, 469 aa, synthetic construct; identical to SEQ ID NO: 504

SEQ ID NO: 5929 - protein, 452 aa, synthetic construct
MKAAIYIRVSTREQVENYSIQAQTEKLTALCRSKDWDVYDIFIDGGYSGSNMNRPALNEMLSKLHEIDAVVVYRLDRLSRSQRDTITLIEEYFLKNSVEFVSLSETLDTSSPFGRAMIGILSVFAQLERETIRDRMVMGKIKRIEAGLPLTTAKGRTFGYDVIDTKLYINEEEAKQLQLIYDIFEEEQSITFLQKRLKKLGFKVHTYSRYNNWLTNDLYCGYVSYKDRVHVKGIHEPIISEEQFYRVQEIFTRMGKSPNMNRDSASLLSSLVVCSKCGLGFVHRRKDATSRDKKYHYRYYSCKTYKHIHELEKCGNKIWRADKLEELVINHVNNYSLANRNVDKEDELDSLNKKLKIEHTKKKRLFDLYINGSYEVSELDSMMNDIDAQINYYEGQIEANEELRKNKKIQENLAELATVDFDSLEFREKQLYLKSLINKIYIDGEQVTIEWL

SEQ ID NO: 5930 - protein, 452 aa, synthetic construct
MKAAIYIRVSTREQVENYSIQAQTEKLTALCRSKDWDVYDIFIDGGYSGSNMNRPALSEMLSKLHEIDAVVVYRLDRLSRSQRDTITLIEEYFLKNNVEFVSLSETLDTSSPFGRAMIGILSVFAQLERETIRDRMVMGKIKRIEAGLPLTTAKGRTFGYDVIDTKLYINEDEAKQLRLIYDIFEEEQSITFLQKRLKKLGFKVRTYNRYNSWLTNDLYCGYVSYKDKVHVKGIHEPIISEEQFYRVQEIFTRMGKNPNMNRDSASLLNGLVVCSKCGLGFVHRRKDTVSRGKKYHYRYYSCKTYKHTHELKKCGNKIWRADKLEELIINRVNNYSFAGRNVDREDELDSLNEKLKIEHVKKKRLFDLYINGSYEVSELDSMMSDIDAQINYYESQIEANEELKKNKKIQENLADLATVDFDSLEFREKQLYLKSLINKIYIDGEQVTIEWL

SEQ ID NO: 5931 - protein, 452 aa, synthetic construct
MKAAIYIRVSTREQVENYSIQAQTEKLTALCRSKDWDVYDIFIDGGYSGSNTNRPALNEMLSKLHEIDAVVVYRLDRLSRSQRDTITLIEEYFLKNNVEFVSLSETLDTSSPFGRAMIGILSVFAQLERETIRDRMVMGKIKRIEAGLPLTTAKGRTFGYDVIDTKLYINEEEAKQLQLIYDIFEEEQSITFLQKRLKKLGFKVRTYNRYNSWLTNDLYCGYVSYKDKVHVKGIHEPIISEEQFYRVQEIFTRMGKSPNMNRDSASLLNNLVVCSKCGLGFVHRRKDTKSRGKKYHYRYYSCKTYKHTHELEKCGNKIWRADKLEELIINRVNNYSFASRNVDKEDELDSLNEKLKIEHAKKKRLFDLYINGSYEVSELDSMMNDIDARINYYESQIEANEELKKNKKIQENLADLATVDFDSLEFREKQLYLKSLINKIYIDGEQVTIEWL

SEQ ID NO: 5932 - protein, 452 aa, synthetic construct
MKAAIYIRVSTQEQVENYSIQAQTEKLTALCRSKGWDVYDIFIDGGYSGSNMNRPALNEMLSKLHEIDAVVVYRLDRLSRSQRDTITLIEEYFLKNNVEFVSLSETLDTSNPFGRAMIGILSVFAQLERETIRDRMVMGKIKRIEAGLPLTTAKGRTFGYDVIDTKLYINEEEAKQLQLIYDIFEEEQSITFLQKRLKKLGFKVRTYSRYNNWLTNDLYCGYVSYKDKVHVKGIHEPIISEEQFNRVQEIFTRMGKNPNMNRDSASLLNNLVVCSKCGLGFVHRRKDTMSRGKKYHYRYYSCKTYKHTHELEKCGNKIWRADKLEELIINRVNNYSSASRNVDKEDELDSLNEKLKIEHAKKKRLFDLYINGSYEVSELDSMMSDIDAQINYYESQIEANEELRKNKKIQENLADLATADFDSLEFREKQLYLKSLINKIYIDGEQVTIEWL

SEQ ID NO: 5933 - protein, 452 aa, synthetic construct
MKAAIYIRVSTREQVENYSIQAQTEKLTALCRSKDWDVYDIFIDGGYSGSNMNRPALNEMLSKLHEIDAVVVYRLDRLSRSQRDTITLIEEYFLKNNVEFVSLSETLDTSSPFGRAMIGILSVFAQLERETIRDRMVMGKIKRIEAGLPLTTAKGRTFGYDVIDTKLYINEEEAKQLQLIYDIFEEERSITFLQKRLKKLGFKVRTYNCYNNWLTNDLYCGYVSYKDKVHVKGIHEPIISEEQFYRVQEIFARMGKNPNMNRDSASLLNNLVVCSKCGLGFVHRRKDAMSRDKKYHYRYYSCKTYKHIHELEKCGNKIWRADKLEELVINRVNNYSFASRNVDKEDELDSLNEKLRIEHAKKKRLFDLYISGRYEVSELDSMMNDIDAQINYYESQIEANEELRKNKKILENLADLATVDFDSLEFREKQLYLKSLINKIYIDGEQVTIEWL

SEQ ID NO: 5934 - protein, 452 aa, synthetic construct
MKAAIYIRVSTREQVENYSIQAQTEKLTALCRSKDWDVYDIFIDGGYSGSNMNRPALNEMLSKLHEIDAVVVYRLDRLSRSQRDTITLIEEYFLKNNVEFVSLSETLDTSSPFGRAMIGILSVFAQLERETIRDRMVMGKIKRIEAGLPLTTAKGRTFGYDVIDTKLYINEEEAKQLRLIYDIFEEEQSITLLQKRLKKLGFKVRTYNRYNNWLTNDLYCGYVSYKDKVHVKGIHEPIISEEQFYRVQEIFARMGKNPNMNRDSASLLNNLVVCSKCGLGFVHRRKDIMSRGKKYHYRYYSCKTYKHIHELEKCGNKIWRADKLEELIINRVNNYSLASRNVDKEDELDSLNEKLKIEHAKKKRLFDLYINGSYEVSELDSMMNDIDAQINYYESQIKANEELRKNKEIQENLAHLATVDFDSLEFREKQLYLKSLINKIYIDGERVTIEWL

SEQ ID NO: 5935 - protein, 485 aa, synthetic construct
MTKKVAIYTRVSTTNQAEEGFSIDEQIDRLTKYAEAMGWQVSDTYTDAGSSGAKLERPAMQRLINDIENKAFDTVLVYKLDRLSRSVRDTLYLVKDVFTKNKIDFISLNESIDTSSAMGSLFLTILSAINEFERENIKERMTMGKLGRAKSGRSMMWTKTAFGYYHNRKTGILEIVPLQATIVEQIFTDYLSGISLTKLRDKLNESGHIGKDVPWSYRTLRQTLDNPVYCGYIKFKDSLFEGMHKPIIPYETYLKVQKELEERQQQTYERNNNPRPFQAKYMLSGMARCGYCGAPLRIVLGRKRKDGSRTLKYHCANRFPRKTKGVTVYNDNKKCDSGTYDLSDLENTVIGNLIGFQEDSDSLLKIINGNNQPILDTSSLKKQISQIDKKIQKNSDLYLNDLITLDELKDRTDSLQAEKKLLKAKISENKFSDSTDVLELVKTQLGSIPINELSYDNKKKIVNNLVSKVDVTADNVDIIFRFQLA

SEQ ID NO: 5936 - protein, 452 aa, synthetic construct
MKAAIYIRVSTQEQVGNYSIQAQTEKLTALCHSKDWDVYGIFVDGGYSGSNMNRPALNEMLSKLHEIDAVVVYRLDRLSRSQRDTTTLIEEYFLKNNVEFVSLSETLDTSSPFGRAMIGILSVFAQLERETIRDRMVMGKIKRIEAGLPLTTAKGRTFGYDVIDTKLYINEEEAKQLQLIYDIFEEEQSITSLQKRLKKLGFKVRTYNRYNSWLTNDLYCGYVSYKDKVHVKGIHEPIISEEQFYRVQEIFTRMGKNPNMNRDSASLLNNLVVCSKCGLGFVHRSKDTMSRGKKYHYRYYSCKTYKHTHELEKCGNKTWRADKLEELIINRVNNYSLASRNVGREDELDSLHEKLKIEHAKKKRLFDLYINGSYEVSELDSMMNDIDAQINYYESQVEASEELKKNKKIQENLADLATVDFDSLEFREKQLYLKSLINKIYIDGEQVTIEWL

SEQ ID NO: 5937 - protein, 469 aa, synthetic construct
MCYTTPVRAAVYLRISEDRSGEQLGVARQREDCLKLCDQRKWVPVEYLDNDVSASTGKRRPAYEQMLADITAGKIAAVVAWDLDRLHRRPIELEAFMSLADEKRLALATAAGDVDLATPQGRLVARLKGSVAAHETEHKKARQRRAARQKAERGLPNWSKAFGYLPGPNGPEPDPRTAPLVKQAYADILAGASLGDVCRQWNDAGAFTITGRPWTTTTLSKFLRKPRNAGLRAYKGARYGPVDRDAIVGKAQWRPLVDEAIFWAAQAVLDAPGRAPGRKSVRRHLLTGLAGCGKCGNHLSGSYRTDGRVVYVCKACHGVAILADNIEPILYHIVAERLAMPDAVDLLRREIHDAAEAETIRLELETLYGELDCLAVERAEGLLTARQVKISTDIVNAKIAKLQTRQQDQERLRVLDGIPLGTPQVAGMIAELSPDRFRAVLDVLAEVVVQPVGKSGGIFNPERVQVNWR

SEQ ID NO: 5938 - protein, 485 aa, synthetic construct
MTKKVAIYTRVSTTNQAEEGFSIDEQIDRLTKYAEAMGWQVSDTYTDAGVSGAKLERPAMQRLINDIENKVFDTVLVYKLDRLSRSVRDTLYLVKDVFTRNKIDFVSLNESIDTSSAMGSLFLTILSAINEFERENIKERMTMGKLGRAKSGKSMMWTKTAFGYYHNRKTGILEIVPLQATIVEQIFTDYLSGISLTKLRDKLNESGHIGKDIPWSYRTLRQTLDNPVYCGYIKFKGSLFEGMHKPIIPYETYLKVQKELEERQQQTYERNNNPRPFQAKYMLSGMARCGYCGAPLKVVLGRKRKDGSRTMKYHCANRFPRKTKGVTVYNDSKKCDSGTYDLSNLENTVIDNLIGLQENSDSLLKIINGNNQPILDTSSFKEQISQIDEKIQKNGDLYLNDLITMDELKDRTDSLQAEKKLLIAKISENKFNDSTDVFELVKTQLGSIPINELSYDNKKKIVNNLVSKVDVTADNVDIIFKFQLA

SEQ ID NO: 5939 - protein, 452 aa, synthetic construct
MKAAIYIRVSTREQVENYSIQAQTEKLTALCRSKDWDVYDIFIDGGYSGSNMNRPALNEMLSKLHEIDAVVVYRLDRLSRSQRDTITLIEEYFLKNNVEFVSLSETLDTSSPFGRAMIGILSVFAQLERETIRDRMVMGKIKRVEAGLPLTTAKGRTFGYDVIDTKLYINEEEAKQLQLIYDIFEEEQSITSLQRRLKKLGFKVRSYSRYNSWLTNDLYCGYVSYKDKVHVKGIHEPIISEEQFYRVQEIFARMGKNPNMNRDSASLLNNLVVCSKCGLGFVHRRKDTTSRGKKYHYRYYSCKTYKHTHELEKCGNKIWRADKLEELIINRVNNYSFASRNVGKEDELDSLNERLKIEHAKKKRLFDLYINGSYEVSELDCMMDDIDAQINYYESQIEANEELKKDKKIQESLANLATEDYDSLEFREKQLYLKGLINKIYVDGEQVTIEWL

SEQ ID NO: 5940 - protein, 452 aa, synthetic construct
MKAAIYIRVSTREQVENYSIQAQTEKLTALCRSKDWDVYDIFIDGGYSGSNMNRPALNEMLGKLHEIDAVVVYRLDRLSRSQRDTITLIEEYFLKNNVEFVSLSETLDTSSPFGRAMIGILSVFAQLERETIRDRMVMGKIKRVEAGLPLTTAKGRTFGYDVIDTKLYINEEEAKQLQLIYDIFEEEQSITFLQKRLKKLGFKVRTYSRYNSWLTNDLYCGYVSYKDKVHVKGIHEPIISEEQFYRVQEIFTRMGKNPNMNRDSASLLNNLVVCGKCGLGFVHRRKDTMSRGKKYHYRYYSCKTYKHIHELEKCGNKIWRADKLEELIINRVHNYSFASRNMDKEDELDSLNEKLKIEHAKRKRLFDLYISGSYEVSELDSMMNDIDAQINYYEGQIEANEELKKNKKIQENLADLATVDFDSLEFREKQLYLKSLINKIYIDGEQVTIEWL

SEQ ID NO: 5941 - protein, 485 aa, synthetic construct
MTKKVAIYTRVSTTNQAEEGFSIDGQIDRLTKYAEAMGWQVSDTYTDAGCSGAKLERPAMQRLINDIENKAFDTVLVYKLDRLSRSVRDTLYLVKDVFTKNKVDFISLSESIDTSSAMGSLFLTILSAINEFERENIKERMTMGKLGRAKSGKSMMWTKTAFGYYHNRKTGILEIVPLQATIVEQIFTDYLSGISLTKLRDKLNESGHIGKDIPWSYRALRQTLDNPVYCGYIKFKDSLFEGMHKPIIPYETYLKVQKELEERQQQTYERNNNPRPFQAKYMLSGMARCGYCGAPLRIVLGHKRKDGSRTMKYHCANRFPRKTKGVTVYNDNKKCDSGTYDLSNLESIVIGTLIGFQENNDSLLKIINGNNQPILDTSSFKKQISQIDKKIQKNSDLYLNDFITMDELKDRTDSLQAEKKLLKAKISENKFNDSTDVFELVKAQLGSIPINELSYDNKKEIVNNLVSKVDVTADNVDIIFKFQLA

SEQ ID NO: 5942 - protein, 452 aa, synthetic construct
MKAAIYIRVSTREQVENYSIQAQTEKLTALCHSKDWDVYDIFIDGGYSGSNMNRPALNEMLSKLHEIDAVVVYRLDRLSRSQRDTITLIEEYFLKNNVEFVSLSETLDTSSPFGRAMIGILSVFAQLERETIRDRMVMGKIKRVEAGLPLTTAKGRTFGYDVIDTRLYINEEEAKQLQLIYDIFEEEQSITFLQKRLKKLGFKVHTYNRYNNWLTNDLYCGYVSYKDKVHVKGIHEPIISEEQFYRVQEIFTRMGKNPNTNRDSASLLNNLVVCSKCGLGFVHRRKDTVSRGKKYHYRYYSCKTYKHIHELEKCGNKIWRADKLEELIINRVNNYSFASRNVDKEDELDSLNEKLKIEHAKKKRLFDLYINGSYEVSELDCMMNDIDAQINYYESQIEANEELKKDKKIQESLANLATVGYDSLEFREKQLYLKSLINKIYIDGEQVTIEWL

SEQ ID NO: 5943 - protein, 452 aa, synthetic construct
MKAAIYIRVSTQEQVENYSIQAQTEKLTALCRSKDWDVYDIFIDGGYSGSNMNRPALNEMLSKLHEIDAVVVYRLDRLSRSQRDTTTLIEEYFLKNNVEFVSLSETLDTSSPFGRAMIGILSVFAQLERETIRDRMVMGKIKRIEAGLPLTTAKGRTFGYDVIDTKLYINEEEAKQLRLIYDIFEEEQSITFLQKRLKKLGFKVRTYNRYNSWLTNDLYCGYVSYKDKVHVKGIHEPIISEEQFYRVQEIFTRMGKNPNMNRDSASLLSNLVVCSKCGLGFVHRSKDTMSRGKKYHYRYYSCKTYKHTHELEKCGNKTWRADKLEELIISRVNNYSFASRSVDKEDELDSLNEKLKIERAKKKRLFDLYINGSYEVSELDSMMNDIDAQINHYESQIEANEELKENKKIQENLADLTTVDFDSLEFREKQLYLKSLINKIYIDGERVTIEWL

SEQ ID NO: 5944 - protein, 452 aa, synthetic construct
MKAAIYIRVSTREQVENYSIQAQTEKLTALCRSKDWDVYDIFIDGGYSGSNMNRPALNEMLSKLHEIDAVVVYRLDRLSRSQRDTITLIEEYFLKNNVEFVSLSETLDTSSPFGRAMIGILSVFAQLERETIRDRMVMGKIKRIEAGLPLTTAKGRTFGYDVIDTKLYINEEEAKQLQLIYDIFEEEQSITFLQKRLKKLGFKVRTYSRYNNWLTNNLYCGYVSYKDKVHVKGIHEPIISEEQFYRVQEIFTRMGKNPNMNRDSASLLNNLVVCSKCGLGFVHRRKDTMSRGKKYHYRYYSCKTYKHIHELEKCGNKIWRADKLEELIINRVNSYSFASRNVDKEDELDSLNEKLKIEHAKKKRLFDLYINGSYNVSELDSMMNDIDAQINYYESQIEANGELKKNKKIQENLADLATVDFDSLEFREKQLYLKSLINKIYIDGEQVTIEWL

SEQ ID NO: 5945 - protein, 469 aa, synthetic construct
MSYTTPVRAAVYLRISEDRSGEQLGVARQREDCLKLCGQHRWEPVEYLDNDVSASTGKRRPAYEQMLADITAGKIAAVVAWDLDRLHRRPIELEAFMSLADEKRLALATVAGDVDLATPQGRLVARLKGSVAAHETEHKKARQRRAARQKAERGHPNWSKAFGYLPGPNGPEPDPRTAPLVKQAYTDILAGASLGDVCRQWNGAGAFTITGRPWTTTTLSKFLRKPRNAGLRAYKGARYGPVDRDAIVGKAQWSPLVDEATFWAAQAVLDAPGRAPGRKSVRRHLLTGLAGCGKCGNHLAGSYRTDGRVAYVCKACHGVAILADNIEPILYLIVAERLAMPNAVDLLRREIHDVAEAETIRLELETLYGELDRLAVERAEGLLTARQVKISTDIVNAKITKLQACQLDQERLRVFDGIPLGTPQVAGKIAELSPDRFRAVLDVLAEVVVQPVGKSGRIFNPERVQVNWR

SEQ ID NO: 5946 - protein, 485 aa, synthetic construct
MTKKVAIYTRVSTTNQAEEGFSIDEQIDRLTKYAEAMGWQVSDTYTDAGLSGAKLERPAMQRLINDIENKAFDTVLVYKLDRLSRSVRDTLYLVKDVFTKNKIDFISLNESIDTSSAMGSLFLTILSAINEFERENIKERMTMGKLGRAKSGKSMMWTKTAFGYYHNRKTGILEIVPLQAAIVEQIFTDYLSGISLTKLRDKLNESGHIGKDIPWSYRTLRQTLDNPVYCGYIKFKGSLFEGMHKPIIPYGTYLKVQKELEERQQQTYERNNNPRPFQAKYMLSGMARCGYCGAPLRIVLGHKRKDGSRTTKYHCVNRFSRKTKGVTVYNDNKKCDSGTYDLSNLENTVIDNLIGFQENNDSLLKIINGNNQPILDTSSLKKRISQIDEKIQKNSDLYLNGFITMDELKDRTDSLQAEKKLLKAKISENKFNGSTDVFELVKTQLGSIPINELSYDNKKKIVNNLVSKVDVTADSVDIIFKFQLA

SEQ ID NO: 5947 - protein, 485 aa, synthetic construct
MTKKVAVYTRVSTTNQAEEGFSIDEQVDRLTKYAEAMGWQVSDTYTDAGFSGAKLERPAMRRLIDDIENKAFDTVLVYKLDRLSRSVRDTLYLVKDVFTKNKIDFISLNESIDTSSAMGSLFLTILSAINEFERENIKERMTMGKLGRAKSGKSMMWTKTAFGYYHNRKTGILEIVPLQAAIVEQIFTDYLSGISLTKLRDKLNESGHIGKDIPWSYRTLRQTLDNPVYCGYIKFKDSLFEGMHQPIIPYETFLKVQKELEERQQQTYERNNNPRPFQAKYMLSGMARCGYCGAPLRIVLGHRRKDGSRTMKYHCANRFPRKTKGVTVYNDNKKCDSGTYDLRNLESTVIDNLIGFQENSDSLLKIINGNNQPILDTSSFKKRISQIDKKIQKNSDLYLNDFITMDELRDRTDSLQAEKKLLKAKISENKFNDSANVFELVKTQLGSIPINELSYDNKKKIVNNLVSKVDVTADSVDIIFKFQLA

SEQ ID NO: 5948 - protein, 452 aa, synthetic construct
MKAAIYIRVSTQEQVENYSIQAQTEKLTALCRSKDWDVYDIFIDGGYSGSNMNRPALNEMLSKLHEIDAVVVYRLDRLSRSQRDTTTLIEEYFLKNNVEFVSLSETLDTSSPFGRAMIGILSVFAQLERETIRDRMVMGKIKRIEAGLPLTTAKGRTFGYDVIDTKLYINEEEAKQLRLIYDIFEEEQSITFLQKRLKKLGLKVRTYNRYNNWLTNDLYCGYVSYKDEVHVKGIHEPIISEEQFYRVQEIFTRMGKNPNMNRGSASLLNNLVVCSKCGLSFVHRSKDTMSRGKKYHYRYYSCKTYKHTHELEKCGNKIWRADKLEELIIDRVNNYSFASRGVDEEGELDSLNEKLKTEHAKKRRLFNLYINGSYEVSELDSMMNDIDAQINYYESQIEASEELKKNKKIQENLADLATVDFDSLEFREKQLYLKSLINKIYIDGEQVTIEWL

SEQ ID NO: 5949 - protein, 452 aa, synthetic construct
MKAAIYIRVSTREQVENYSIQAQTEKLTALCRSKDWDVYDIFIDGGYSGSNMNRPALNEMLSKLHEIDAVVVYRLDRLSRSQRDTITLIEEYFLKNNVEFVSLSETLDTSSPFGRAMIGILSVFAQLERETIRDRMVMGKIKRIEAGLPLTTAKGRTFGYDVIDTKLYINEEEAKQLRLIYDIFEEEQSITSLQKRLKKLGFKVRTYNRYISWLTNDLYCGYVSYKDKVHVRGIHEPIISEEQFYRVQEIFTRMGKNPNMNRGSASLLNNLVVCSKCGLGFVHRRKDTMSRGKKYHYRYYSCKTYKHTHELEKCGNKIWRADKLEELIINRVNNRSLTSRNVDKEDELDCLNEKLKIEHAKKRRLFDLYINGSYEVSELDSLMDDIDARINYYESQIEANEELKKNKKIQENLANLATVDYDSQEFREKQLYLKSLINKIYIDGEQVTIEWL

SEQ ID NO: 5950 - protein, 452 aa, synthetic construct
MKAAIYIRVSTREQVENYSIQAQTEKLTALCRSKDWDVYDIFIDGGYSGSNMNRPALNEMLSKLHEIDAVVVYRLDRLSRSQRDTITLIEEYFLKSNVEFVSLSETLDTSSPFGRAMIGILSVFAQLERETIRDRMVMGKIKRIEAGLPLTTAKGRTFGYDVIDTKLYINEEEAKQLRLIYDIFEEEQSITFLQKRLKKLGFKVRTYSCYNNWLTNDLYCGYVSYKDKVHVKGIHEPIISEEQFYRVQEIFTRMGKNPNMNRESASLLNNLVVCSKCGLGFVHRRKDAMSRDKKYHYRYYSCKTYKHIHELEKCGNKIWRADKLEELIINHVNNYSFASRNVDKEDELDSLNEKLKIEHAKKKRLFDLYVNGNYEVSELDSMMNDIDAQINYYESQIEANEELKKNRKIQEDLANLATVDFDSLEFREKQLYLKSLINKIYIDGEQVTIEWL

SEQ ID NO: 5951 - protein, 452 aa, synthetic construct
MKAAIYIRVSTQEQVENYSIQAQTEKLTALCRSKDWDVYDIFIDGGYSGSNMNRPALNEMLSKLHEIDAVVVYRLDRLSRSQHDTSTLIEEYFLKNNVEFVSLSEALDTSSPFGRAMIGILSVFAQLERETIRDRMVMGKIKRIEAGLPLTTAKGRTFGYDVIDTKLYINEEEAKQLQLIYDIFEEEQSITFLQKRLKKLGFKVHTYNRYNNWLTNDLYCGYVRYKDKVHVKGIHEPIISEEQFYRVQEIFTRMGKNPNMNRDSASLLNNLVVCSKCGLSFVHRSKDTMSRGKKYHYRYYSCKTYKHTHELEKCGNKTWRADKLEELVINRVINYNLAGRNVDKEDELDSLNEKLKIEHAKKKRLFDLYINGSYEVSELDSMMNDIDAQINYYGSQIEANGELRRNKKIQENLADLATVDFDSLGFREKQLYLKSLINKIYIDGEQVTIEWL

SEQ ID NO: 5952 - protein, 452 aa, synthetic construct
MKAAIYIRVSTREQVENYSIQAQTEKLTALCRSKDWDVYDIFIDGGYSGSNMNRPALTEMLSKLHEIDAVVVYRLDRLSRSQRDTITLIEEYFLKNNVEFVSLSETLDTSSPFGRAMIGILSVFAQLERETIRERMVMGKIKRIEAGLPLTTAKGRTFGYDVIDTKLYVNEEEAKQLQLIYDIFEEEQSITFLQKRLKKLGFKVRTYNCYNNWLTNDLYCGYVSYKDKVHVKGIHEPIISEEQFYRVQEIFARMGKNPNMNRDSASLLNNLVVCSKCGLGFVHRRKDTTSRGKRYHYRYYSCKTYKHIHELEKCGNKIWRADKLEELIINRVSNYSLASRDVDKEDELDSLNERLKIEHAKKKRLFDLYINGSYEVSELDSMMNDIDAQINYYESQIEASEELKKNKKIQENLAVLATVDFDSLEFREKQLYLKSLINKIYIDGEQVTIEWL

SEQ ID NO: 5953 - protein, 469 aa, synthetic construct
MSYTTPVRAAVYLRISEDRSGEQLGVARQREDCLKLCDQRKWVPVEYLDNDVSASTGKRRPAYEQMLADITAGRIAAVVAWDLDRLHRRPIELEAFMSLADEKRLALATVAGDVDLATPQGRLVARLKGSVAAHETEHKKARQRRAARQKAERGYPNWSKAFGYLPGPNGPEPDPRTAPLVKQAYADILAGASLGDVCRQWNDAGAFTITGRPWTTTTLSKFLRKPRNAGLRAYKGARYGPVDRDAIVGKAQWSPLVDEAAFWAAQAVLDAPGRAPGRKSVRRHLLTGLAGCGKCGNHLSGSYRADGQVVYVCKACHGVAILADNIEPILYHIVAERLAMPDAVDLLRREIHDAAEAETIRLELESLYGELDRLAIERAEGLLTARQVKISTDIVNAKITKLQARQLDQERLRVFDGIPLGTPQVAGKIAELSPDRFRAVLDVLAEVAVRPVGKSGRTFNPERVQVNWR

SEQ ID NO: 5954 - protein, 485 aa, synthetic construct
MIKKVAIYTRVSTTNQAEEGFSIDEQIDRLTKYAKAMGWQVSDTYTDAGLSGAKLERPAMQRLINDIENKAFDTVLVYKLDRLSRSVRDTLYLVKDVFTKNKIDFISLNESIDTSSAMGSLFLTILSAINEFERENIKERMTMGKLGRAKSGKSMMWTKTAFGYYHNRKTGILEIVPLQATIVEQIFTDYLSGISLTKLRDKLNESGHIGKDIPWSYRTLRQTLDNPVYCGYIKFKDSLFEGMHKPIIPYETYLKVQKELEERQQQTYERNNNPRPFQAKYMLSGMARCGYCGAPLRIVLGHKRKDGSRTMKYHCANRSPRKTKGVTVYNDNKKCDSGTYDLSNLENTVINNLIGFQENNDSLLKIINGNNQPIPDTSCFKKQISQIDKKIQKNSDLYLNDFITMDELKDRTDSLLAEKKLLKAKISENKFNDSTDVFELVKTQLGSIPINELSYDNKKKIVNNLVSKVDVTADNVDIIFKFQLA

SEQ ID NO: 5955 - protein, 452 aa, synthetic construct
MKAAIYIRVSTREQVENYSIQAQTEKLTALCRSKDWDVYDIFIDGGYSGSNMNRPALNEMLGKLHEIDAVVVYRLDRLSRSQRDTITLIEEYFLKNNVEFVSLSETLDTSSPFGRAMIGILSVFAQLERETIRDRMMMGKIKRIEAGLPLTTAKGRTFGYDVIDTKLYINEEEAKQLQLIYDIFEEEQSITFLQKRLKKLGFKVRTYNRYNNWLTNDLYCGYVSYKDKVHVKGIHEPIISEEQFHRVQEIFTRMGKNPNMNRDSASLLSGLVVCSKCGLGFVHRRKDTVSRGKKYHYRYYSCKTYKHIHELEKCGNKIWRADKLEELIINRVNNHSIASRNVDKEDELDSLNEKLKIEHAKKKRLFDLYINGSYEVSELDSMMNDIDAQINYYESQIEANEELKKNKKIQENLANLATVDYDSLEFREKQLYLKSLINKIYIDGEQVTIEWL

SEQ ID NO: 5956 - protein, 485 aa, synthetic construct
MTKKVAIYTRVSTTNQAEEGFSIDEQIDRMTKYAEAMGWQVSDTYIDAGLSGAKLERPAMQRLINDIENKAFDTVLVYKLDRLSRSVRDTLYLVKDVFTKNKIDFISLNESIDTSSAMGSLFLTILSAINEFERENIKERMTMGKLGRAKSGKSMMWTKTAFGYYHNRKTGILEIVPLQATIVEQIFTDYLSGISLTKLRDKLNESGHIGKDIPWSYRTLRQTLDNPVYCGYIKFKDGLFEGMHKPIIPYETYLKVQRELEERQQQTYERNNNPRPFQAKYMLSGMARCGYCGAPLRIVLGHKRKDGSRTTKYHCANRFPRKTKGVTVYNDNKKCDSGTYDLCNLENTVIDNLIGFQENEDSLLKIINGNNQPILDTSSFKKQISQIDKKIQKNSDLYLNDFITMDELKDRTESLQAEKKLLKAKISENKSNDSTDVFELVKTQLGSIPINELSYDNKKKIVNNLVSKVDVTADNVDIIFKFQLA

SEQ ID NO: 5957 - protein, 452 aa, synthetic construct
MKAAIYIRVSTREQVENYSIQAQTEKLTALCRSKGWGVYDIFTDGGYSGSNMNRPALNEMLSKLHEIDAVVVYRLDRLSRSQRDTITLIEEYFLKNNVEFVSLSETLDTSSPFGRAMIGILSVFAQLERETIRDRMVMGKIKRIEAGLPLTTAKGRTFGYDVIDTKLYINEEEAKQLQLIYDIFEEEQSITLLQRRLKKLGFKVRTYSRYNNWLTNDLYCGYVSYKDKVHVKGIHEPIISEEQFYRVQEIFTRMGKNPNMNRDSASLLNGLVVCSKCGLGFVHRRKDTMSRGKKYHYRYYSCKTYKHTYELEKCGNKIWRADKLEELIIDRVNNYSFASRNVDKEDELDSLNEKLKIEHAKKRRLFDLYINGSYEVSELDSMMSDIEAQINYYESQIEANEELKKNKKIQENLANLATVDYDSLEFREKQLYLKSLINKIYIDGEQVTIEWL

SEQ ID NO: 5958 - protein, 469 aa, synthetic construct
MSYTTPVRAAVYLRISEDRSGEQLGVARQREDCLELCGQRKWVPVEYLDNDVSASTGKRRPAYEQMLADITAGKIAAVVAWDLDRLHRRPIELEAFMSLADEKRLALATVAGDVDLATPQGRLVARLKGSVAAHETEHKKARQRRAARQKAERGHPNWSKAFGYLPGPNGPEPDPRTAPLVKQAYADILAGASLGDVCRRWNDAGAFTITGRPWTTTTLSKFLRKPRNAGLRAYKGARYGPVDRDAIVGKAQWSPLVDEATFWAAQAVLDAPGRAPGRKSVRRHLLTGLAGCGKCGNHLAGSYRTDGRVVYVCKACHGVAILADNIEPTLYHIVAERLAMPDAVNLLRREIHDAAEAEAIRLELETLYGELDRLAVERAEGLLTARQVKISTDIVNAKITKLQARQLDQERLRVFDGIPLGTPQVAGMIAELSPDRFRAVLGVLAEVVVRPVGKSGKPFNPERVQVNWR

SEQ ID NO: 5959 - protein, 452 aa, synthetic construct
MKAAIYIRVSTREQVENYSIQAQTEKLTALCRSKDWDVYDIFIDGGYSGSNMNRPALNEMLSKLHEIDAVVVYRLDRLSRSQRDTITLIEEYFLKNNVEFVSLSETLDTSSPFGRAMIGILSVFAQLERETIRDRMVMGKIKRIEAGLPLTTAKGRTFGYDVVDTKLYINEEEAKQLQLIYDIFEEEQSITFLQKRLKKLGFKVRTYNRYNNWLTNDLYCGYVSYKDKVHVKGIHEPIISEEQFYRVQEIFTHMGKNPNMNRDSASLLNNLVVCSKCGLGFVHRRKDAASRDKKYHYRYYSCKTYKHIHELEKCGNKVWRADKLEELIINRVNSYSIASRNADKEDELGSLNEKLKVEHAKKKRLFDLYINGNYEVSELDSMMSDIDAQISYYESQIEANEELKKNKKIQENLANLSTVDFDSLEFREKQLYLKSLINKIYIDGEQVTIEWL

SEQ ID NO: 5960 - protein, 452 aa, synthetic construct
MKAAIYIRVSTREQVENYSIQAQTEKLTALCRSKDWDVYDIFIDGGYSGSNMNRPALNEMLSKLHEIDAVVVYRLDRLSRSQRDTITLIEEYFLKNNVEFVSLSETLDTSSPFGRAMIGILSVFAQLERETIRDRMVMGKIKRIEAGLPLTTAKGRTFGYDVIDTKLYVNEEEAKQLQLIYDIFEEEQSITFLQKRLKNLGFKVCTYNRYNNWLTNDLYCGYVSYKDKVRVKGIHEPIISEEQFYRVQEIFTRMGKNPNMNRDSASLLNNLVVCSKCGLGFVHRRKDTMSRGKKYHYRYYSCKTYKHIHELEKCGNKIWRADKLEELVINRVNNYSFASRNVDKEDELDSLKEKLKIEHAKKKRLFDLYINGSYEVSELDGMMNDVDTQINYYESQIEANDEQKKNKEIQENLANPATVDFDSLEFREKQRYLKSLINKIYIDGEQVTIEWL

SEQ ID NO: 5961 - protein, 452 aa, synthetic construct
MKAAIYIRVSTREQVENYSIQAQTEKLTALCRSKDWDVYDIFIDGGYSGSNMNRPALNEMLSKLHEIDAVVVYRLDRLSRSQRDTITLIEEYFLKNNVEFVSLSETLDTSSPFGRAMIGILSVFAQLERETIRDRLVMGKIKRIEAGLPLTTAKGRTFGYDVIDTKLYINEEEAKQLQLIYDIFEEEQSITFLQKRLKKLGFKVRTYNRYNSWLTNDLYCGYVSYKDKVHVKGIHEPIISEEQFHRVQEIFTRMGKNPNTNRDSASLLNNLVVCSKCGLGFVHRRKDTTSRGKKYHYRYYSCKTYKHIHELEKCGNKIWRADKLEELIIDRVNNYSFASRNVDKEEGLDSLNEKLKIEHAKKKRLFDLYINGGYEVSELDCMMNDIDAQINYYESQIEAYEELKKDKKIQESLANLATVDYDSLEFREKQLYLKSLINKIYIDGEQVTIEWL

SEQ ID NO: 5962 - protein, 452 aa, synthetic construct
MKAAIYIRVSTREQVGNYSIQAQTEKLTALCRSKDWDVYDIFVDGGYSGSNMNRPALNEMLNKLHEIDAVVVYRLDRLSRSQRDTITLIEEYFLKNNVEFVSLSETLDTSSPFGRAMIGILSVFAQLERETIRDRMVMGKIKRIEAGLPLTTAKGRTFGYDVIDAKLYINEEEARQLRLIYDIFEEEQSITFLQKRLKELGFKVRTYNRYNNWLTNDLYCGYVSYKDKVHVKGIHEPIISEEQFYRVQEIFTRMGKNPNMNRDSASLLNNLVVCGKCGLGFVHRRKDAMSRDKKYHYRYYSCKTYKHIHELEKCGNKIWRADKLEELIINRVSNYSVASRNVDKEDELNSLNGKLKIEHAKRKRLFDLYINGSYEVSELDSMMNDIDAQINYYESQIEASEELKKNKKIQENLADLATVDFDSLEFREKQLYLKSLISKIYIDGEQVTIEWL

SEQ ID NO: 5963 - protein, 485 aa, synthetic construct
MSKKVAIYTRVSTTNQAEEGFSIDEQIDRLTKYAEAMGWQVSDTYTDAGLSGAKLERPAIQRLINDIKSKAFDTVLVYKLDRLSRSVRDTLYLVKDVFTKNKIDFISLSESIDTSSAMGSLFLTILSAINEFERENIKERMTMGKLGRAKSGKSMMWTKTAFGYHHNRQTGILEIVPLQATIVEQIFTDYLSGISLTKLRDKLNESGHIGKDIPWSYRTLRQTLDNPVYCGYIKFKDSLFEGMHKPIIPYETYLKVQRELEERQQQTYERNNNPRPFQAKYMLSGMARCGYCGAPLRIVLGHKRKDGSRTMKYHCANRLPRKTKGVTVYNDNKRCDSGTYDLSNLESTVIDSLIGLQENNDSLLKIINGDNQPILDTSSFKEQISQIDKKIQKNSDLYLNDFITMGELKDRTDSLQAEKKLLKAKISENKFNDSTGVFELVKAQLGSIPINELSYDNKKKIVNNLVSKVDVTADNVDIIFKFQLA

SEQ ID NO: 5964 - protein, 485 aa, synthetic construct
MTKKVAIYTRVSTTNQAEEGFSIDEQIDRLTKYAEAMGWQVSDTYTDAGFSGAKLKRPAMQRLINDIENKAFDTVLVYKLDRLSRSVRDTLYLVKDVFTKNKIDFISLNESIDTSSAMGSLFLTILSAINEFERENIKERMTMGKLGRAKSGKSMMWTKTAFGYYHNRKTGILEIVPLQATIVEQIFTDYLSGISLTKLRDKLNESGHIGKDIPWSYRTLRQTLDNPVYCGYIKFKGSLFEGMHKPIIPYETYLKVQKELEERQQQTYERNNNPRPFQAKYMLSGMARCGYCSAPLRIVQGRKRKDGSRTMKYHCANRFPRKTKGVTVYNDNKKCDSGTYDLSNLEDTVIDNLIGFQEDNDSLLEIINGNNQPILDTSSFKKQISQIDKKIQKNSDLYLNDFITMDELKDRTDSLQAEKKLLKAKISENKLNDSTDVFELVKTQLGSIPINELSYDNKKKIVNNLVSKVDVTADNVEIIFKFQLA

SEQ ID NO: 5965 - protein, 452 aa, synthetic construct
MKAAIYIRVSTQEQVENYSIQAQTERLTALCRSKGWDVYDIFIDGGYSGSNMNRPALNEMLSKLHEIDAVVVYRLDRLSRSQRDTTTLIEEYFLKNNVEFVSLSETLDTSSPFGRAMIGILSVFAQLERETIRDRMVMGKIKRIEAGLPLTTAKGRTFGYDVIDTKLYINEEEAKQLRLIYDIFEEEQSITFLQKRLKELGFKVRTYNRYNNWLTNDLYCGYVSYKDKVHVKGIHEPIISEEQFYRVQEIFTRTGKNPNMNRDSASLLNNLVVCSKCGLGYVHRSKDTMSRGKKYHYRYYSCKTYKHTHELEKCGNKTWRADKLEELIINRVNNYSFASRNVDKEDELDGLNEKLKIEHAKKKRLFDLYINGSYEVSELDSVMNDVDAQINYYESQIEASEELKKDKKIQENLADLAAVDFDSLEFREKQLYLKSLINKIYIDGEQVTIEWL

SEQ ID NO: 5966 - protein, 452 aa, synthetic construct
MKAAIYIRVSTREQVENYSIQAQTEKLTALCRSKDWDVYDIFIDGGYSGSNMNRPALNEMLSKLHEIDAVVVYRLDRLSRSQRDTITLVEEYFLKNNVEFVSLSETLDTSSPFGRAMIGILSVFAQLERETIRDRMVMGKIKRIEAGLPLTTAKGRTFGYDVIDTKLYINEEEAKQLQLIYDIFEEEQSITFLQKRLKNLGFKVRTYSRYNNWLTNDLYCGYVSYKDKVHVKGIHEPIISEEQFYRVQEIFTRMGKNPNMNRDSASLLNSLVVCSRCGLGFVHRRKDTTSRGKKYHYRYYSCKTYKHTHELEKCGNKIWRADKLEELIINRVNNYSLASRNVDKEDELDSLNEKLKIEHAKKKRLFDLYINGSYEVSELDCMMNDIDAQINYYESQIEAIEELKKDKKIQESLANLATVDYDSLEFREKQLYLKSLINKIYIDGEQVTIDWL

SEQ ID NO: 5967 - protein, 469 aa, synthetic construct
MSYTTPVRAAVYLRISEDRSGEQLGVARQREDCLELCDQRKWVPVEYLDNDVSASTGKRRPAYEQMLADIAAGKIAAVVAWDLDRLHRRPIELEAFMSLADEKRLALATVAGDVDLATPQGRLVARLKGSVAAHETEHKKARQRRAARQKAERGYPNWSKAFGYLPGPNGPEPDPRAAPLVKQAYADILAGASLGDVCRQWNDAGAFTITGRPWTTTTLSKFLRKPRNAGLRAYKGARYGPVDRDAIVGKAQWSPLVDEATFWAAQAVLDAPGRAPGRKSVRRHLLTGLAGCGKCGNHLAGSYRTDGRVVYVCKACHGVAILADNIEPILYRIVAERLAMPDAVDLLRREIHDAAEAEAIRLELETLYGELDRLAVERAEGLLTARQVKISTDIVNAKITKLQARQQDQERLRVLDSIPLGTPQVAGTIAELSPDRFRAVLDVLAEVVVQPVGKSGRIFNPERVQVNWR

SEQ ID NO: 5968 - protein, 469 aa, synthetic construct
MSYTTPVRAAVYLRISEDRSGEQLGVARQREDCLKLCGQRKWVPVEYLDNDVSASTGKRRPAYEQMLADITAGKIAAVVAWDLDRLHRRPVELEAFMSLADEKRLALATVAGDVDLATPQGRLVARLKGCVAAHETEHKKARQRRAARQKAERGHPNWSKAFGYLPGPNGPEPDPRTAPLVKQAYADILAGASLGDVCRQWNDVGAFTITGRPWTTTALSKFLRKPRNAGLRAYKGARYGPVDRDAIVGKAQWSPLVDEATFWAAQAVLDAPGRAPGRKSVRRHLLTGLAGCGKCGNHLAGSYRTDGRVVYVCKACHGVSILADNIEPILYRIVAERLAKPDAVDLLRRETHDAAEAETIRLELETLYGELDRLAVERAEGLLTARQVKIGTDIVNAEITKLQARQLDQERLRVLDGIPLGTPQVAGAIAELSPDRFRAVLDVLAEVVVQPVGKRGRIFNLERAQVNWR

SEQ ID NO: 5969 - protein, 485 aa, synthetic construct
MTKKVAIYTRVSTTNQAEEGFSIDEQIDRLTKYAEAMGWQVSDTYTDAGLSGAKLERPAMQRLINDIESKAFDTVLVYKLDRLSRSVRDTLYLVKDVFTKNKIDFISLNESIDTSSAMGSLFLTILSAINEFERENIKERMTMGKLGRAKSGKSMMWTKTAFGYYHNRKTGILEIVPLQATIVEQIFTDYLSGISLTKLRDKLNESGHIGKDIPWSYRTLRQTLDNPVYCGYIKFKGSLFEGMHKPIIPYETYLKVQKELEERQQQAYERNNNPRPFQAKYMLSGMARCGYCGAPLKIALGHKRKDGSRTMKYHCANRFPRKTKGVTVYNDNKKCDSGTYDLSNLENTVIDNLIGFQENNDSLLKIINGNNQPILDTSSFKKQISQIDKKIQKNSDLYLNDFITMDELKDRTDSLQAEKKLLEAKINENKFDDSTDVFELVRTQLGSIPINELSYGNKKKIVNNLVSKVDVTADNVDIIFKFQLA

SEQ ID NO: 5970 - protein, 485 aa, synthetic construct
MTKKVAIYTRVSTTNQAEEGFSIDEQIDRLTKYAEAMGWQVSDTYTDAGSSGAKLERPAMRRLINDIENKAFDTVLVYKLDRLSRSVRDTLYLVKDVFTKNKIDFISLNESIDTSSAMGSLFLTILSAINEFERENIKERMTMGKLGRAKSGKSMMWTKTAFGYYHNRKTGILEVVPLQATIVEQIFTDYLSGISLTKLRDKLNESGHIGKDIPWSYRTLRQTLDNPVYCGYIKFKDSLFEGMHKPIIPYETYLKVQKELEERQQQTYERNNNPRPFQAKYMLSGMARCGYCGAPLRIVLGRKRKDGSRTMKYHCANRFPRKTKGVTVYNDNKRCDSGTYDLSSLENAVIDNLIGFQENNDSLLKIINGINQPILDTSSFKKQISQIDKKIQKNSDLYLNDFITMGELKERTDSLQAEKRLLKAKISENKFNDNTDVFELVKTQLGSIPINELSYDDKKKIVNNLVSKVDVTADNVDIIFKFQLA

SEQ ID NO: 5971 - protein, 452 aa, synthetic construct
MKAAIYIRVSTQEQVGNYSIQAQTEKLTALCRSKDWDVYDIFIDGGYSGSNMNRPALNDMLSKLHEIDAVVVYRLDRLSRSQRDTTTLIEEYFLKNNVEFVSLSETLDTSSPFGRAMIGILSVFAQLERETIRDRMVMGKIKRIEAGLPLTTAKGRTFGYDVIDTRLYINEEEAKQLQLIYDIFEEEQSITFLQKRLKKLGFKVRTYNRYNSWLTNDLYCGYVSYKDKVHVKGIHEPIISEEQFNRVQEIFARMGKNPNMNRDSASLLNNLVVCSKCGLSFVHRSKDTMSRGKKYHYRYYSCKTYKHTHELEKCGNKTWRADKLEELIINRVNNYSFASRNVDKEDELDSLNEKLKIEHAKKKRLFDLYINGSYEVSELDSMMNDIDAQINYYESQIEANEELKKNKKIQENLADLAAVDFDSLEFREKQLYLKSLINKIYIDGEQVTIEWL

SEQ ID NO: 5972 - protein, 452 aa, synthetic construct
MKAAIYIRVSTQEQVGNYSIQAQTEKLTALCRSKDWDVYDIFIDGGYSGSNMNRPALNEMLSKLHEIDAVVVYRLDRLSRSQRDTTTLIEEYFLKNNVEFVSLSETLDTSSPFGRAMIGILSVFAQLERETIRDRMMMGKIKRIEAGLPLTTAKGRTFGYDVIDTKLYINEEEAKQLRLIYDIFEEEQSITSLQKRLKKLGFKVRTYNRYNNWLTNDLYCGYVSYKDKVHVKGIHEPIISEEQFYRVQEIFARMGKNPNMNRDSASLLSNLVVCSKCGLGFVHRSKDTMSRGKKYHYRYYSCKTYKHTHELEKCGNKTWRADKLEELIINRVNNYSFASRNADKEDELDSLNEKLKIEHARKKRLFDLYINGGYEVSELDSMMNDIDAQINYYESRIEANEELKRNKKIQENLADLATVDFDSLEFREKQLYLKSLINKIYIDGEQVTIEWL

SEQ ID NO: 5973 - protein, 485 aa, synthetic construct
MTKKVAIYTRVSTTNQAEEGFSIDEQIDRLTKYAEAMGWQVSDTYTDAGFSGAKLERPAMQRLVNDIEGKAFDTVLVYKLDRLSRSVRDTLYLVKDVFTKNKIDFISLNESIDTSSAMGSLFLTILSAINEFERENIKERMTMGKLGRAKSGKSMMWTKTAFGYYHNRKTGILEIVPLQATIVEQIFTDYLSGISLTKLRDKLNESGHIGKDIPWSYRTLRQTLDNPVYCGYIKFKGSLFEGMHKPIIPYETYLKVQKELEVRQQQTYERNNNPRPFQAKYMLSGTARCGYCGAPLKIVLGHKRKDGSRTMKYHCANRFPRKTKGVTVYNDNKKCDSGTYDLSSLENTVIDNLIGFQENNDSLLKIINGNNQPILDTSSFEKQISQIDKKIQKNSNLYLNDFITMDELKDRTDSLQAERKLLKAKISENKVNDSTDVLELVRTQLGSIPINELSYDNKKKIVNNLVSKVDVTADNVDIIFKFQLA

SEQ ID NO: 5974 - protein, 469 aa, synthetic construct
MSYTTPVHAAVYLRISEDRSGEQLGVARQREDCLKLCDQRKWVPVEYLDNDVSASTGKRRPAYEQMLADITAGKIAAVVAWDLDRLHRRPIELEAFMSLADEKRLALATVAGDVDLATPQGRLVARLKGSVAAHETEHKKARQRRAARQKAERGYPNWSKAFGYLPGPNGPEPDPRTAPLVKQAYADILAGASLGDVCRQWNDAGALTITGRPWTTTTLSKFLRKPRNAGLRAYKGARYGPVDRDAIVGKARWSPLVDEAIFWAAQAVLDAPGRAPGRKSVRRHLLTGLAGCGKCGNHLAGSYRTDGRVVYVCKACHGVTILADNIEPILYHVVAERLAMPDAVDLLRREIHDAAEAETIHLELETLYGELDRLAVERAEGLLTARQVKISTDIVNAKITKLQARQLDQERLRVFDGIPLGTPQVAGMIAELSPDRFRAVLDVLAEVVVRPVGKSGRIFNPERVQVNWR

SEQ ID NO: 5975 - protein, 452 aa, synthetic construct
MKAAIYIRVSTQEQVENYSIQAQTEKLTALCRSKDWDVYDIFIDGGYSGSNMNRPALNKMLSKLHEIDAVVVYRLDRLSRSQRDTITLIEEYFLKNNVGFVSLSETLDTSSPFGRAMIGILSVFAQLERETIRDRMVMGKIKRVEAGLPLTTAKGRTFGYDVIDTKLYINEEEAKQLQLIYDIFEEEQSITFLQKRLKKLGLKVHTYNRYSNWLTNDLYCGYVSYKDKVHVKGIHEPIISEEQFYRVQEIFTRMGKNPNTNRDSASLLNNLVVCSKCGLGFVHRRKDTTSRGKKYHYRYYSCKTYKHIYELEKCGNKIWRADKLEELIINRVNNYSFASRSVDKEDELGSLNEKLKIEHAKRKRLFDLYINGSYEVSELDSMMSDIDAQINYYESQIEANEELKKNKKIQGILANLATVDFDSLEFREKQLYLKSLINKIYIDGEQVTIEWL

SEQ ID NO: 5976 - protein, 469 aa, synthetic construct
MSYTTPVRAAVYLRISEDRSGEQLGVARQREDCLKLCGQHKWVPVEYLDNDVSASTGKRRPAYEQMLADIAAGKIAAVVAWDLDRLHRRPVELEAFMSLADEKRLALATVAGDVDLATPQGRLVARLKGCVAAHETEHKKARQRRAARQKAERGLPNWSKAFGYLPGPNGPEPDSRTAPLVKQAYADILAGASLGDVCRQWNDAGAFTITGRPWTTTTLSKFLRKPRNAGLRAYKGARYGPVDRDAIVGKAQWSPLVDEATFWAAQAVLDAPGRAPGRKSVRRHLLTGLAGCGKCGNHLAGSYRTDGRVVYVCKACHGVAILADNIEPILYHIVVERLAMPDAVDLLRREVHDAAEAETIRLELETLYGELDRLAVERAEGLLTARQVRISTDVVNAKITRLQARQLDQERLRVFDGIPLGTPQVAGMIAELSPDRFRAVLDVLAEVVVQPVGKSGRIFNPERVQVNWR

SEQ ID NO: 5977 - protein, 485 aa, synthetic construct
MTKKVAIYTRVSTTNQAEEGFSIDEQIDRLTKYAEAMGWQVSDTYTDAGFSGAKLERPAMQRLINDIENKAFDTVLVYKLDRLSRSVRDTLYLVKDVFTKNKIDFISLNESINTSSAMGSLFLTILSAINEFERENIKERMTMGKLGRAKSGKSMMWTKTAFGYYHNRKTGILEIAPLQATIVEQIFTDYLSGISLTKLRDRLNESGHIGKDIPWSYRTLRQTLGNPVYCGYIKFKDSLFEGMHKPIIPYETYLKVQKELEERQQQTYERNNNPRPFQAKYMLSGTARCGYCGAPLRIVLGRKRKDGSRTMKYHCANRFPRKTKGVTVYNDNKKCDSGTYDLSNLENTVIDNLIGFQENNDSLLKITNGNNQPILDTSSFEKQISQIDKKIQKNSDLYLNDFITMDELRDRTDSLRAEKKLLKAKISENKFNDSTDVFELVKTQLGSIPINELSYDNKKKIVNNLVSKVDVTADSVDIIFKFQLA

SEQ ID NO: 5978 - protein, 485 aa, synthetic construct
MTRKVAIYTRVSTTNQAEEGFSIDEQIDRLTKYAEAMGWQVSDTYTDAGFSGAKLERPAMQRLINDIENKAFDTVLVYKLDRLSRSVRDTLYLVKDVFTKNKIDFISLSESIDTSSTMGSLFLTILSAINEFERENIKERMTMGKLGRAKSGKSMMWTKTAFGYYHNRKTGILEIVPLQATIVEQIFTDYLSGISLTKLRDKLNESGHIGKDIPWSYRTLRQTLDNPVYCGYIKFKDSLFEGMHKPIIPYETYLKVQKELEERQQQTYERNNNPRPFQAKYMLSGMARCGYCGAPLKIVLGHKRKDGSRTMKYHCANRFPRKTKGITVYNDNKKCDSGTYDLSDLENIVIDNLIGFQGDNDSLLKIINGNNQPILDTSSFKEQISQIDKKIQKNSDLYLNDFITMDELKDRTDSLRAEKKLLKAKIGENKFNDSTDVFELVKTQLGSIPINELSYDNKKKIVNNLVSKVDVTADNVDIIFKFQLA

SEQ ID NO: 5979 - protein, 452 aa, synthetic construct
MKAAIYIRVSTREQVENYSIQAQTEKLTALCRSKDWDVYDIFIDGGYSGSNMNRPALNEMLSKLHEIDAVVVYRLDRLSRSQRDTITLIEEYFLKNNVEFVSLSETLDTSSPFGRAMIGILSVFAQLERETIRDRMVMGKIKRIEAGLPLTTARGRTFGYDVIDTKLYINEEEAKQLQLIYDIFEEEQSITLLQKRLKKLGFKVRTYNRYNNWLTNDLYCGYVSYKDRVHVKGIHEPIISEEQFHRVQEIFTRMGKNPNMNRDSASLLNNLVVCSKCGLGFVHRRKDAMSRDKKYHYRYYSCKTYKHIHELEKCGNKIWRADKLEELIISRVNNYSLASRNVDKEDELDGLNEKLKIEHAKKRRLFDLYINGSFEVSELDSMMNDIDAQISYYESQIEASEEPKKNKKIQENLAYLATVDFDSLEFREKQLYLKSLINKIYIDGEQVTIEWL

SEQ ID NO: 5980 - protein, 469 aa, synthetic construct
MSYTTPVCAAVYLRISEDRSGEQLGVARQREDCLKLCDQRKWVPVEYLDNDVSASTGKRRPAYEQMLADITAGKVAAVVAWDLDRLHRRPIELEAFMSLADEKRLALATVAGDVDLATPQGRLVARLKGSVAAHETEHKKARQRRAARQKAERGHPNWSKAFGYLPGPNGPEPDPRTAPLVKQAYADILAGASLGDVCRQWNDAGAFTITGRPWTTTTLSKFLRKPRNAGLRAYKGARYGPVDRDAIVGKALWSPLVDEATFWAAQAVLDAPGRAPGRKSVRRHLLTGLVGCGKCGNHLAGSCRTDGRVVYVCKACHGVAILAVNVEPILYRIVAERLAMPDAVDLLRREIHDAAEAETIRLELETLYGELDRLAVERAEGLLTARQVKISTDIVNAKITKLQARQLDQERLRVFDGIPLGTPQVAGVIAELSPDRFRAVLDVLAEVVVQPVGKSGSIFNPERVQVNWR

SEQ ID NO: 5981 - protein, 485 aa, synthetic construct
MTKKVAIYTRVSTTNQAEEGFSIDEQIDRLTKYAEAMGWQVSGTYTDAGISGAKLERPAMQRLINDIENRAFDTVLVYKLDRLSRSVRDTLYLVKDVFTKNKIDFISLNESIDTSSAMGSLFLTILSAINEFERENIKERMTMGKLGRAKSGKSMMWTKTAFGYCHNRKTGILEVVPLQATIVEQIFTDYLSGISLTKLRDKLNESGHIGKDIPWSYRTLRQTLDNPVYCGYIKFKDSLLEGMHEPIIPYETYLKVQRELEKRQQQTYERNNNPRPFQAKYMLSGMARCGYCGAPLRIVLGHKRKDGSRTMKYHCANRFPRKTKGVTVYNDNKKCDSGTYDLSNLENTVIDNLIGFQENNDSLLKIINGNNQPILDTSSFKEQISQIDKKIQKNSDLYLNDFITMDELKDRTDSLQAEKRLLKAKISENEFNDSTDVFELVKTQLGSIPINELSYDNKKRIVNNLVSKVDVTADNVDIIFKFQLA

SEQ ID NO: 5982 - protein, 452 aa, synthetic construct
MKAAIYIRVSTREQVENYSIQAQTEKLTALCRSKDWDVYDVFIDGGYSGSNMNRPALNEMLSKLHEIDAVVVYRLDRLSRSQRDTITLIEEYFLKNNVEFVSLSETLDTSSPFGRAMIGILSVFAQLERETIRDRMAMGKIKRIEAGLPLTTAKGRTFGYDVVDTKLYINEEEAKQLRLIYDIFEEEQSITSLQKRLKELGFKVRTYNRYNNWLTNDLYCGYVSYKDKVHVKGIHEPIISEEQFYRVQEIFTRMGKNPNMNRDSASLLNNLVVCSKCGLGFVHRRKDAMSRDKKYRYRYYSCKTYKHIHELEKCGNKIWRADKLEELVINRVNNYSLASRNVDKEDELDSLNEKLKIEHAKKKRLFDLYINGSYDVSELDSMMSDIDAQINHYESQIEANEELKKSKKIQESLADLATVDFDSLEFREKQLYLKSLISKIYIDGEQVTIEWL

SEQ ID NO: 5983 - protein, 452 aa, synthetic construct
MKAAIYIRVSTREQVENYSIQAQTEKLTALCRSKDWDVYDIFIDGGYSGSNMNRPALNEMLSKLHEIDAVVVYRLDRLSRSQRDTITLIEEYFLKNNVEFVSLSETLDTSSPFGRAMIGILSVFAQLERETIRDRMVMGKIKRIEAGLPLTTAKGRTFGYDVIDTKLYINEEEAKQLQLIYDIFEEEQSITFLQKRLKKLGFKVRTYSCYNNWLTNDLYCGYVSYKDKVHVKGIHEPIISEEQFYRVQEIFTRMGKNPNMNRDSASLLSNLVVCSKCGLGFVHRRKDTMSRGKKYHYRYYSCKTYKHTHELEKCGNKIWRADKLEELVINRVNNYSFASRNVDKEDELDSLNEKLEVEHAKKRRLFDLYINGSYEVSELDSMMNDIDAQINYYESQIGANEELKRNKKIQENLANLATVDYDSLEFREKQLYLKSLINKIYIDGEQVTIEWL

SEQ ID NO: 5984 - protein, 485 aa, synthetic construct
MTKKVAIYTRVSTTNQAEEGFSIDEQIDRLTKYAEAMGWRVSDTYTDAGFSGAKLERPAMQRLINDIENKAFDTVLVYKLDRLSRSVRDTLYLVKDVFTKNKIDFISLNESIDTSSAMGSLFLTILSAINEFERENIKERMTMGKLSRAKSGKSMMWTKTAFGYYHNRKTGILEIVPLQATIVKQIFTDYLSGISLTKLRDKLNESGHIGKDIPWSYRTLRQTLDNPVYCGYIKFKDGLFEGMHKPIIPYETYLKVQKELEKRQQQTYERNNNPRPFQAKYMLSGMARCGYCGAPLRIVLGHKRKDGSRTMKYHCTNRFPRKTKGITVYNDNKKCDSGTYDLSDLENAVIDNLIGFQENNDSLLKIINGINQPILDTSSFKEQISQIDKKIQKNSDLYLNDFITMDELKDRTDSLQAEKKLLKAKISENRFNDSTDVFELVKTQLGSIPINELSYDNKKKIVNNLVSKVDVTADNVDIIFKFQLA

SEQ ID NO: 5985 - protein, 469 aa, synthetic construct; identical to SEQ ID NO: 5678

SEQ ID NO: 5986 - protein, 452 aa, synthetic construct
MKAAIYIRVSTREQVENYSIQAQTEKLTALCRSKDWDVYDIFIDGGYSGSNMNRPALNEMLSKLHEIDAVVVYRLDRLSRSQRDTITLIEEYFLKNNVEFVSLSETLDTSSPFGRAMIGILSVFAQLERETIRDRMVMGKIKRIEAGLPLTTAKGRTFGYDVIDTKLYINEEEAKQLQLIYDIFEEEQSITFLQKRLKKLGFKVRTYNRYNNWLTNDLYCGYVSYKDKVHVKGIHEPIISEEQFYRVQEIFARMGKNPNMNRDSASLLNNLVVCSKCGLGFVHRRKDTTSRGKKYHYRYYSCKTYKHTHELEKCGNKIWRADKLEELIINRVNNYSFASRNEDKEDELDSLNEKLKIEHAKKKRLFDLYINGSYEVSELDSMMSDIDAQINYYESLIEANEGLKKNKKIQENLADPATVDYDSLEFREKQLYLKSLINKIYIDGEQVTIEWL

SEQ ID NO: 5987 - protein, 452 aa, synthetic construct
MKAAIYIRVSTREQVENYSIQAQTEKLTALCRSKDWDVYDIFIDGGYSGSNMNRPALNEMLSKLHEIDAVVVYRLDRLSRSQRDTITLIEEYFLKNNVEFVSLSETLDTSSPFGRAMIGILSVFAQLERETIRDRMVMGKIKRIEAGLPLTTAKGRTFGYDVIDTKLYINEEEAKQLRLIYDIFEEEQSITFLQRRLKELGFKVRTYNRYNNWLTNDLYCGYVSYKDKVHVRGIHEPIISEEQFYRVQEIFTRMGKNPNMNRDSASLLNNLVVCGKCGLGFVHRRKDAMSRDKKYHYRYYSCKTYKHIHELEKCGNKIWRADKLEELIINRVNNYSLASRNVDKEDELDSLNEKLKIEHAKKKRLFDLYINGSYEVSELDSMMNDIDAQISYYESQIEANEELKKNKKIQENLAYLATVDFDGLEFREKQLYLRSLINKIYIDGEQVTIEWL

SEQ ID NO: 5988 - protein, 452 aa, synthetic construct
MKAAIYIRVSTREQVENYSIQAQTEKLTALCRSKDWDVYDIFIDGGYSGSNMNRPALNEMLSKLHEIDAVVVYRLDRLSRSQRDTITLIEEYFLKNNVEFVSLSETLDTSSPFGRAMIGILSVFAQLERETIRDRMVMGKIKRIEAGLPLTTAKGRTFGYDVIDTRLYINEEEARQLQLIYDIFEEEQSITFLQKRLKKLGFKVRTYSCYNNWLTNDLYCGYVSYKDKVHVKGIHEPIISEEQFYRVQEIFTRMGKDRNMNRDSASLLNNLVVCSKCGLGFVHRRKDTMSRGKRYHYRYYSCKTYKHTHELEKCGNKIWRADKLEELIIDRVNNYSLASRNVDKKDELDSLNEKLKIEHAKKRRLFDLYINGSYGMGELDSMMNDIDAQINCYESQIEASEGLKGNKKIQENLAELATVDFDSLEFREKQRYLKSLINKIYIDGEQVTIEWL

SEQ ID NO: 5989 - protein, 452 aa, synthetic construct
MKAAIYIRVSTREQVENYSIQAQTEKLTALCRSKDWDVYDIFIDGGYSGSNMNRPALNEMLSKLHEVDAVVVYRLDRLSRSQRDTITLIEEYFLKNNVEFVSLSETLDTSSPFGRAMIGILSVFAQLERETIRDRMVMGKIKRVEAGLPLTTAKGRTFGYDVIDTKLYINEEEAKQLQLIYDIFEEEQSITFLQKRLKKLGFKVRTYNRYNNWLTNDLYCGYVSYKDKVHVKGIHEPIISEEQFYRVQEIFARMGKNPNMNRDSASLLNNLVVCSKCGLGFVHRRKDTTSRGKKYHYRYYSCKTYKHIHELEKCGNKIWRADKLEELVVNRVNNYSIVSRNVDKEDELDSLNEKLKIEHEKKRRLFDLYINGSYEVSELDSMMNDIDAQINYYESQIEANEELKKNKEIQENLANLATVDFDSLEFREKQRYLKSLINKIYIDGEQVTIEWL

SEQ ID NO: 5990 - protein, 452 aa, synthetic construct
MKAAIYIRVSTREQVENYSIQAQTEKLTALCRSKDWDVYDIFIDGGYSGSNMNRPALNEMLSKLHEIDAVVVYRLDRLSRSQRDTITLIEEHFLKNNVEFVSLSETLDTSSPFGRAMIGILSVFAQLERETIRDRMVMGKIKRIEAGLPLTTAKGRTFGYDVIDTKLYINEEEAKQLQLVYDIFEEEQSITFLQKRLKKLGFKVRTYNCYNSWLTNDLYCGYVSYKDKVHVKGIHEPIISEEQFYRVQEIFARMGKNPNMNRDSASLLNNLVVCSKCGLGFVHRRKDTMSRGKKYHYRYYSCKTYKHTHELEKCGNKIWRADKLEELIINRVNNYSFASRNVDKEDELGSLNEKLKIEHTKKKRLFDLYINGSYEVSELDSMMNDIDAQISYYESQIEANEELKKNKKIQENLANLATVDYDSLEFREKQLYLKSLINKIYVDGEQVTIEWL

SEQ ID NO: 5991 - protein, 469 aa, synthetic construct
MSYTTPVRAAVYLRISEDRSGEQLGVARQREDCLKLCDQRKWVPVEYLDNDVSASTGKRRPAYEQMLADITAGKIAAVVAWDLDRLHRRPIELEAFMSLADEKRLALATVAGDVDLATPQGRLVARLKGSVAAHETEHKKARQRRAARQKAERGYPNWSKAFGYLPGPNGPEPDPRTAPLVKQAYADILAGASLGDVCRQWNDAGAFTITGRPWTTTTLSKFLRKPRNAGLRAYKGARYGPVDRDAIVGKAQWSPLVDEATFWAAQAVLDAPGRAPGRKSVRRHLLTGLAGCGKCGNHLAGSYRTDGRVVYVCKACHGVAILADNIEPILYHIVAERLAMPDAVDLLCREIHDAAEAETIRLELETLYGELDRLAVERAEGLLTARQVKISTDIVNAKITKLQARQLDQERLRVFDGIPLGTPQVAGMIAELSPDRFRAVLDVLAEVVVQPVGKSGRIFNPERVQVNWR

SEQ ID NO: 5992 - protein, 469 aa, synthetic construct
MSYTTPVRAAVYLRISEDRSGEQLGVARQREDCLKLCGQRKWVPVEYLDNDVSASTGKRRPAYEQMLADITAGKIAAVVAWDLDRLHRRPIELEAFMSLADEKRLALATVAGDVDLATPQGRLVARLKGCVAAHETEHKKARQRRAARQKAERGYPNWSKAFGYLPGPNGPEPDPRTAPLVKQAYADILAGASLGDVCRQWNDAGAFTITGRPWTTTTLSKFLRKPRNAGLRAYKGARYGPVDRDAIVGKAQWSPLVDEATFWAAQAVLDAPGRAPGRKSVRRHLLTGLAGCGKCGNHLAGSYRADGRVVYVCKACHGVAILADNIEPILYHIVAERLAMPDAVDLLRREIHDAAEAETSRLELETLYGELDRLAVERAEGLLTARQVKISTDIVNAKITDLQARQLDQERLRVFDGIPLGTPQVAGMIAELSPDRFRAVLDVLAEVVVQPVGKGGRIFNPERVQVNWR

SEQ ID NO: 5993 - protein, 469 aa, synthetic construct
MSYTTPVRAAVYLRISEDRSGEQLGVARQREDCLKLCDQRKWVPVEYLDNDVSASTGKRRPAYEQMLADITAGKIAAVVAWDLDRLHRRPIELEAFMSLADEKRLALATVAGDVDLATPQGRLVARLKGSVAAHETEHKKARQRRAARQKAERGHPNWSKAFGYLPGPNGPEPDPRTAPLVKQAYVDILAGASLGDVCRRWNDAGVFTITGRPWTTTALSKFLRKPRNAGLRAYKGARYGPVDRDAIVGKAQWSPLVDEATFWAAQAVLDAPGRAPGRKSVRRHLLTGLAGCGKCGNHLAGSYRTDGRVVYVCKACYGVAILADNIEPILYHIVAERLAMPNAVDLLRREIHDAAEAETIRLELETLNGELDRLAVERAEGLLTARQVKISTDIVNAKITKLQARQLDQERLRVFDGIPLGTPQVAGMIAELSPDRFRAVLDVLAEVVVQPVGKSGRIFNPERVQVNWR

SEQ ID NO: 5994 - protein, 452 aa, synthetic construct
MKAAIYIRVSTREQVENYSIQAQTEKLTALCRSKDWDVYDIFIDGGYSGSNMNRPALNEMLSKLHEIDAVVVYRLDRLSRSQRDTITLIEEYFLKNNVEFVSLSETLDTSSPFGRAMIGILSVFAQLERETIRDRMVMGKIKRIEAGLPLTTAKGRTFGYDVIDTKLYINEEEAKQLQLIYDIFEEVQSITFLQKRLKKLGFKVRTYNCYNNWLTNDLYCGYVSYKDKVHVKGIHEPIISEEQFYRVQEIFTRMGKNPNMNRDSASLLNNLVVCSKCGLGFVHRRKDTTSRGKKYHYRYYSCKTYKHTHELEKCGNKIWRADKLEELIINRVSNYSFASRNVDKVDELDSLNEKLEIEHARKKRLFDLYINGSYEVSELDSMMNDIDAQINYYESQIEANEELKRNKKIQENLADLASVDYDSLEFSEKQLYLRSLINKIYIDGEQVTIEWL

SEQ ID NO: 5995 - protein, 452 aa, synthetic construct
MKAAIYIRVSTREQVENYSIQAQAEKLTALCRSKDWDVYDIFIDGGFSGSNMNRPALNEMLSKLHEIDAVVVYRLDRLSRSQRDTITLIEEYFLKNNVEFVSLSETLDTSSPFGRAMIGILSVFAQLERETIRDRMVMGKIKRIEAGLPLTTAKGRTFGYDVIDTKLYINEEEAKQLQLVYDIFEEEQSITFLQKRLKKLGLKVRTYSRYNSWLTNDLYCGYVSYKDKVHVKGIHEPIISEEQFYRVQEIFTRMGKNPNMNRDSASLLNNLVVCSKCGLGFVHRRKDTTSRGKKYRYRYYSCKTYKHIHELEKCGNKTWRADKLEELIINRVNNYNFASRNVDKEDELDSLNEKLKIEHAKKKRLFDLYINGSYGASELDSMMNDIDAQINYYESRIEANEELKKNKKIQESLANLATVDYDSLEFREKQLYLKSLINKIYIDGEQVTIEWL

SEQ ID NO: 5996 - protein, 485 aa, synthetic construct
MTKKVAIYTRVSTTNQAEEGFSIDEQIDRLTKYAEAMGWQVSDTYTDAGLSGAKLERPAMQRLINDIENKAFDTVLVYKLDRLSRSVRDTLYLVKDVFTKNKIDFISLNESIDTSSAMGSLFLTILSAINEFERENIKERMTMGKLGRAKSGKSMMWTKTAFGYYHNRGTGILEIVPQQATIVEQIFTDYLSGISLTKLRDKLNESGHIGKDIPWSYRTLRQTLDNPVYCGYIKFKDGLYEGMHKPIIPYETYLKVQKELEGRQQQTYERNNNPRPFQAKYMLSGVARCGYCGAPLRIVLGHKRKDGSRTMKYHCANRFPRKTKGVTVYNDNKKCDSGTYDLSDLENTVIDTLIGLQENNDSLLEIINGNNQPTLDTSSFKKQISLIDKKIQRNSDLYLNDFITMDELKDRTDSLRAEKKLLKAKISENKFNDSTDVFELVKTQLGSIPINELSYDNKKKIVNNLVSKVGVTADNVDIIFKFQLA

SEQ ID NO: 5997 - protein, 452 aa, synthetic construct
MKAAIYIRVSTREQVENYSIQAQTEKLTALCRSKDWDVYDIFIDGGYSGSNMNRPALNEMLSKLHEIDAVVVYRLDRLSRSQRDTITLIEEYFLKNNVEFVSLSETLDTSSPFGRAMIGILSVFAQLERETIRDRMVMGKIKRIEAGLPLTTAKGRTFGYDVVDTKLYINEEEAKQLQLIYDIFEEEQSITSLQKRLKKLGFKVRTYNRYNSWLTNDLYCGYVSYKDKVHVKGIHEPIISEEQFYRVQEIFARMGRGPNMNRDSASLLNNLVVCSKCGLSFVHRRKDTTSRGKKYHYRYYSCKTYKHTHELEKCGNKIWRADKLEELIINRVNNYSLASRNVDKEDELDSLNEKLKIEHAKKKRLFDLYINGNYEVSELDSMMGGIDAQINYYGSQIEANEEQKKNKKIQEDLADLATVDFDSLEFREKQLYLKSLINKIYIDGEQVTIEWL

SEQ ID NO: 5998 - protein, 452 aa, synthetic construct
MKAAIYIRVSTREQVENYSIQAQTEKLTALCRSKDWDVYDIFIDGGYSGSNMNRPALNEMLSKLHEIDAVVVYRLDRLSRSQRDTITLIEEYFLKNNVEFVSLSETLDTSSPFGRAMIGILSVFAQLERETIRDRMVMGKIKRIEAGLPLTTAKGRTFGYDVIDTKLYINEEEAKQLQLIYDIFEEEQSITFLQKRLKKLGFKVRSYNRYHNWLTNDLYCGYVSYKDKVHVKGIHEPIISEEQFYRVQEIFTRMGKNPNMNRDSASLLNNLVVCSKCGLGFVHRRKDAMSRDKKYHYRYYSCKTYKHIHELEKCGNKIWRADKLEELIISRVSSYSLASRNVDKEDELESLNEKLKIEHAKKKRLFDLYIDGSYEVSELDSMMNDIDAQINYYEGQIEANEELKKTKKIQENLAHLATVDFDSLEFREKQLYLKSLINKIYIDGEQVTIEWL

SEQ ID NO: 5999 - protein, 452 aa, synthetic construct
MKAAIYIRVSTREQVENYSIQAQTEKLTALCRSKDWDVYDIFIDGGYSGSNMNRPALNEMLSKLHEIDAVVVYRLDRLSRSQRDTITLIEEYFLKNNVEFVSLSETLDTSSPFGRAMVGILSVFAQLERETIRDRMVMGKIKRIEAGLPLTTAKGRTFGYDVIDTKLYINEEEAKQLQLIYDIFEEEQSITFLQKRLKKLGFKVRTYSRYNNWLTNDLYCGYVSYKDKVHVKGIHEPIISEEQFYRVQEIFTRMGKNPNMNRDSASLLNNLVVCSRCGLGFVHRRKGTMSRGKKYHYRYYSCKTYKHTYELEKCGNKIWRADKLEELIINRVNNYSFASRNVDKEDELDSLNEKLKIEHAKKKRLFDLYINGSYEVSELDSMMSDIDAQINYYESQIEANEELKKNKKIQENLADLATVDFDSLEFREKQLYLKSLINKIHIDGEQVTIEWL

SEQ ID NO: 6000 - protein, 452 aa, synthetic construct
MKAAIYIRVSTREQVENYSIQAQTEKLTALCRSKDWDVYDIFVDGGYSGSNMNRPALNEMLSKLHEIDAVVVYRLDRLSRSQRDTITLIEEYFLKNNVEFVSLSETLDTSSPFGRAMIGILSVFAQLERETIRDRMVMGKIKRIEAGLPLTTAKGRTFGYDVIDTKLYINEEEAKQLQLIYDIFEEEQSITFLQKRLKKLGLKVRTYSRYNNWLTNDLYCGYVSYKDKVHVKGIHEPIISEEQFYRVQEIFTRMGKNPNMNRDSASLLNNLVVCSKCGLGFVHRRKDTMSRGKKYHYRYYSCKTYKHTHELEKCGNKIWRADKLEELIINRVNNYSFASRNVDKEDELDSLNERLKIEHAKKKRLFDLYINGSYEVSELDSMMNDIDAQINYYESQIEANEELKKNKKIQENLADLAAVDFDSLEFREKQLYLRSLINKIYIDGEQVTIEWL

SEQ ID NO: 6001 - protein, 452 aa, synthetic construct
MKAAIYIRVSTREQVENYSIQAQTEKLTALCRSKDWDVYDIFIDGGYSGSNMNRPALNEMLSKLHEIDAVVVYRLDRLSRSQRDTITLIEEYFLKNNVEFVSLSETLDTSSPFGRAMIGILSVFAQLERETIRDRMVMGKIKRIEAGLPLTTAKGRTFGYDVIDTKLYVNEEEARQLQLIYDIFEEEQSITFLQKRLKELGFKVRTYNRYNNWLTNDLYCGYVSYKDKVHVKGIHEPIISEEQFYRVQEIFARMGKNPNMNRDSASLLNNLVVCSKCGLGFVHRRKDAMSRDKKYHYRYYSCKTYKHIHELEKCGNKIWRADKLEELIINRVNNYSFASRNADKEDELDSLNEKLKIEHAKKKRLFDLYINGRYEVSELDSMMSDIDAQINYYESQIEANEELKKNKKIQENLAGLATVDFDSLEFREKQLYLKSLINKIYIDGEQVTIEWL

SEQ ID NO: 6002 - protein, 485 aa, synthetic construct
MTKKVAIYTRVSTTSQAEEGFSIDEQIDRLTKYAEAMGWQVSDTYTDAGFSGAKLERPAMQRLINDIENKAFDTVLVYKLDRLSRSVRDTLYLVKEVFTKNKIDFISLNESIDTSSAMGSLFLTILSAINEFERENIKERMTMGKLGRAKSGKSMMWAKTAFGYYHNRKTGILEIVPLQATIVEQIFTDYLSGMSLTKLRDKLNESGHIGKDIPWSYRTLRQTLDNPVYCGYIRFKDSLFEGMHKPIIPYETYLKVQKELEERQQQTYERNNNPRPFQAKYMLSGMARCGYCGAPLRIVLGHKRKDGSRTMKYHCANRFPRKTKGITVYNDNKKCDSGTYDLSNLETTVIGNLIGFQENDDSLLKIINGNNQPILDTSSFKKQISQIDKKIQKNSDLYLNDFITMDELKDRTDSLQAEKKLLEAKISENKFNDSTDVFELVKTQLGSIPINELSYDNKKKIVNNLVSKVDVTADNVDIIFKFQLA

SEQ ID NO: 6003 - protein, 452 aa, synthetic construct
MKAAIYIRVSTQEQVGNYSIQAQTEKLTALCHSKDWDVYDIFIDGGYSGSNMNRPALNEMLSKLHEIDAVVVYRLDRLSRSQRDTTTLIEEYFLKNNVEFVSLSETLDTSSPFGRAMIGILSVFAQLERETIRDRMVMGKIKRIEAGLPLTTAKGRTFGYDVIDTKLYINEEEAKQLQLIYDIFEEEQSITFLQKRLKKLGFKVHTYNRYNNWLTNDLYCGYVSYKDKVHVKGIHEPIISEEQFYRVQEIFTRMGKNPNMNRDSASLLNGLVVCSKCGLGFVHRSKDTMNRGKKYHYRYYSCKTYKHAHELEKCGNKTWRADKLEELIINRVNNYSFASRNVDKGGELDSLNEKLKIEHAKKKRLFDLYINGSYEMSELDSMMNDIDAQINYYESQIEANGELRKNKKIQENLAGLATVDFDSLGFREKRLYLKSLINKIYIDGEQVTIAWL

SEQ ID NO: 6004 - protein, 452 aa, synthetic construct
MKAAIYIRVSTREQVENYSIQAQTEKLTALCRSKDWDVYDIFIDGGYSGSNMNRPALNEMLSKLHEIDAVVVYRLDRLSRSQRDTITLIEEYFLKNNVEFVSLSETLDTSSPFGRAMIGILSVFAQLERETIRDRMVMGKIKRIEAGLPLTTAKGRTFGYDVIDTKLYINEEEAKQLQLIYDIFEEEQSITSLQKRLKKLGFKVHTYNRYNNWLTNDLYCGYVSYKDKVHVKGIHEPIISEEQFYRVQEIFTRMGKNPNMNRNSASLLNNLVVCSKCGLGFVHRRKDAMSRDKKYHYRYYSCKTYKHIHELEKCGNKIWRADKLEELIINRVNNYSLASRNVDKEDELDSLNEKLQIEHAKKKRLFDLYINGSYEVSELDSMMSDIDAQISYYESQIEANEELKRNKKIQENLAELATVDFDSLEFREKQLYLKSLINKIYIDGEQVTIEWL

SEQ ID NO: 6005 - protein, 485 aa, synthetic construct
MTKKVAIYTRVSTTNQAEEGFSIDEQIDRLTKYAKAMGWQVSDTYTDAGFSGAKLERPAMQRLINDIENKAFDTVLVYKLDRLSRSVRDTLHLVKDVFTKNKIDFISLSESIDTSSAMGSLFLTILSAINEFERENIKERMTMGKLGRAKSGKSMMWTKTAFGYYHNRKTGILEIVPLQATIVEQIFADYLSGISLTKLRDKLNESGHIGKDIPWSYRTLRQTLDNPVYCGYIKFKDSLFEGMHKPIIPYETYLKVQKELEERQQQTYVRNNNPRPFQAKYMLSGVARCGYCGAPLRIVLGHKRKDGSRTMKYHCTNRFPRKTKGVTVYNDNKKCDSGTYDLSNLENTVIDSLIGFQENNDSLLKIINGNNQPILDTSSFKKQISQIDKKIQKNSDLYLNDFITMDELRDRTDSLQAEKKLLEAKISENKFNDSTDVFELVKTQLGSIPINELSYDNKKKIVNDLVSKVDVTADNVDIIFKFQLA

SEQ ID NO: 6006 - protein, 485 aa, synthetic construct
MTKKVAIYTRVSTTNQAEEGFSIDEQIDRLTKYAEAMGWQVSDTYTDAGFSGAKLERPAMQRLINDIENRAFDTVLVYKLDRLSRSVRDTLYLVKDVFTKNKIDFISLNESIDTSSAMGSLFLTILSAINEFERENIKERMTMGKLGRAKSGKSMMWTKTAFGYYHNRKTGILEIVPLQATIVEQIFTDYLSGISLTKLRDKLNESGHIGKDIPWSYRTLRQTLDNPVYCGYIKFKDSLFEGMHKPIIPYETYLRVQKELEERQQQTYERNNNPRPFQAKYMLSGMARCGYCGAPLKIVLGHKRKDGSRTMKYHCANRFPRKTKGVTVYNDNKKCDSGTYDLSNLENTVIDNLMGFQENNDSLLKIINGNNQPILDTNRFKEQISQIDKKIQKNSDLYLNDLITMDELKARTEGLQAEKKLLKAKISEDKFNDSTDVFELVKTQLGNIPINELSYDNKKIIVSNLVSKVDVTADNVDIIFKFQLA

SEQ ID NO: 6007 - protein, 469 aa, synthetic construct
MSYTTPVRAAVYLRISEDRSGEQLGVARQREDCLKLCGQRKWVPVEYLDNDVSASTGKRRPAYEQMLADITAGKIAAVVAWDLDRLHRRPIELEAFMSLADEKRLALATVAGDVDLATPQGRLVARLKGSVAAHETEHKKARQRRAARQKAERGYPNWSKAFGYLPGPNGPEPDPRTAPLVKQAYADILAGASLGDVCRRWNDAGAFTITGRPWTTTALSKFLRKPRNAGLRAYKGARYGPVDRDAIVGKAQWSPLVDEAIFWAAQAVLDAPGRAPGRKSVRRHLLTGLAGCGKCGNHLAGSYRTDGRVVYVCKACHGVAILADSIEPILYHIVAERLAMPNAVDLLRREIHDAAEAETIRLELETLYGELDRLAVERAEGLLTARQVKISTDIVNAKITKLQARQLDQERLRVLDGIPLGTPQVAGMIAELSPDRLRAVLDVLAEVVVQPVGKSGRVFNPGRVQVNWR

SEQ ID NO: 6008 - protein, 485 aa, synthetic construct
MTKKVAIYTRVSTTNQAEEGFSIDEQIDRLTKYAEAMGWQVCDAYTDAGFSGAKLKRPAMQRLINDIETKAFDTVLVYKLDRLSRSVRDTLYLVKDVFTKNKIDFISLNESIDTSSAMGSLFLTILSAINEFERENIKERMTMGKLGRAKSGKSMMWTKTAFGYYHNRKTGILEIVPLQATIVEQIFTDYLSGISLTKLRDKLNESGHIGKDIPWSYRTLRQTLGNPVYCGYIKFKDSLFEGMHKPIIPYETYLKVQKELEERQQQTYERNNNPRPFQAKYMLSGMARCGYCGAPLRIVLGHKRKDGSRTMKYHCANRFPRKTRGVTVYNDNKKCDSGTYDLSNLENTVIDNLVGLQENDDSLLKIINGNNQPILDTSGLKKQISQIDKKIQKNSDLYLNDFITMDELKDRTDSLQAEKKLLKAKISENKFNDCTHVFELVKTQLGSIPINELSYDNKKKIVNNLVSKVDVTADNVDIIFKFQLA

SEQ ID NO: 6009 - protein, 469 aa, synthetic construct
MSYTTPVRAAVYLRISEDRSGEQLGVARQREDCLELCGQRKWVPVEYLDNDVSASTGKRRPAYEQMLADITAGKIAAVVAWDLDRLHRRPIELEAFMSLADEKRLALATVAGDVDLATPQGRLVARLKGSVAAHETEHKKARQRRAARQKAERGHPNWSKAFGYLPGPNGPEPDPRTAPLVKQAYADILAGASLGDVCRQWNDAGAFTITGRPWTTTTLSKFLRKPRNAGLRAYKGARYGPVDRDAIVGKAQWSPLVDEATFWAAQAVLDAPGRAPGRKSVRRHLLTGLAGCGKCGNHLAGSYRTNGRVVYVCKACHGVSILADNIEPILYRIVAERLAMPDAVDLLRREIHDAAEAETIRLELETLYGELDRLAVERAEGLLTARQVKISTDIVNAKITKLQARQLDQERLRVLDGVPLGTPQVAGIIAELSPDRFRAVLGVLADVVVQPVGKSGRIFSPERVQVNWR

SEQ ID NO: 6010 - protein, 469 aa, synthetic construct
MSYTTPVRAAVYLRISEDRSGEQLGVARQREDCLKLCDQRRWVPVEYLDNDVSASTGKRRPAYEQMLADITAGKIAAVVAWDLDRLHRRPIELEAFMSLADEKRLALATVAGDVDLATPQGRLVARLKGCVAAHETEHKKARQRRAARQKAERGLPNWSKAFGYLPGPNGPEPDPRTAPLVKQAYADILAGASLGDVCRQWNDAGAFTITGRPWTTTTLSKFLRKPRNAGLRAYKGARYGPVDRDAIVGKAQWSPLVDEATFWAAQAVLDAPGRAPGRKSVRRHLLTGLAGCGKCGNHLAGSYRTDGRVVYVCKVCHGVAILADNIEPILYHIVAERLAMPDAVDLLRREIHDAAEAETIRLELETLYGELDRLAVERAEGLLTARQVKISTDIVNAKITKLQARQLDQERLRVFDGIPLGTPQVAGMIAELSPDRFRAVLDVLAEVVVQPVGNSGRVFNPERVQVNWR

SEQ ID NO: 6011 - protein, 452 aa, synthetic construct
MKAAIYIRVSTREQVENYSIQAQTEKLSALCRSKDWDVYDIFIDGGYSGSNMNRPALNEMLSRLHEIDAVVVYRLDRLSRSQRDTITLIEEYFLKNNVEFVSLSETLDTSSPFGRAMIGILSVFAQLERETIRDRMVMGKIKRIEAGLPLTTAKGRTFGYDVIDTKLYINEEEAKQLRLIYDIFEEERSITFLQKRLKKLGFKVRTYNCYNNWLTNDLYCGYVSYKDKVHVKGIHEPIISEEQFYRVQEIFTRMGKNPNMNRGSASLLNNLVVCSKCGLGFVHRRKDAMSRDKKYHYRYYSCKTYKHIHELEKCGNKIWRADELEELVINRVNSYSVASRNVDKEDELDSLNEKLKTEHAKKKRLFDLYINGGYEVSELDSMMNDINAQINYYESQIEANEELKKNKRIQENLAELATVDFDSLEFREKQLYLKSLINKIYIDGEQVTIEWL

SEQ ID NO: 6012 - protein, 469 aa, synthetic construct
MSYTTPVRAAVYLRISEDRSGEQLGAARQREDCLKLCDQRKWVPVEYLDNDVSASTGKRRPAYEQMLADITAGKIAAVVAWDLDRLHRRPIELEAFMSLADEKHLALATVAGDVDLATPQGRLVARLKGSVAAHETEHKKARQRRAARQKAERGHPNWSKAFGYLPGPNGPEPDPRTAPLVKQAYADILVGASLGDVCRQWNGAGAFTITGRPWTTTALSKFLRKPRNAGLRAYKGARYGPVDRDAIVGKAQWSPLVDEATFWAAQAVLDAPGRAPGRKSVRRHLLTGLAGCGKCGNHLAGSYRTDGRVVYVCKACYGVAILADNIEPILYRTVAERLAMPDAADLLRREIHDAAEAETIRLELETLYGELDRLAVERAEGLLTARQVKISTDIVNVKITKLQARQLDQERLRVFDGIPLGTPQVAGMIAELSPDRFRAVLDVLAEVVVQPVGKGGRTSNPGRVQVNWR

SEQ ID NO: 6013 - protein, 469 aa, synthetic construct
MSYTTPVRAAVYLRISEDRSGEQLGVARQREDCLKLCDLRKWVPVEYLDNDVSASSGKCRPAYEQMLADITAGKIAAVVAWDLDRLHRRPIELEAFMSLADEKRLALATVAGDVDLATPQGRLVARLKGSVAAHETEHKKARQRRAARQKAERGLPNWSKAFGYLPGPNGPEPDPRTAPLVKQAYADILAGASLGDVCRQWNDAGAFTITGRPWTTTTLSKFLRKPRNAGLRAYKGARYGPVDRDAIVGKAQWSPLVDGATFWAAQAVLDAPGRAPGRKSVRRHLLTGLAGCGKCGNHLAGSNRADGRVVYVCKACHGVAILADNIEPILYHIVAERLAMPDAVDLLRCEIHDAAEAETIRQELETLYGELDRLAVERAEGLLTARQVKISTDIVNAKITKLQARQLDQERLRVFDGVPLGTPQVAGVIAELSPDRFRAVLDVLAEVVVQPVGKGGRTFNPERLQVNWR

SEQ ID NO: 6014 - protein, 452 aa, synthetic construct
MKAAIYIRVSTREQVENYSIQAQTEKLTALCRSKDWDVYDIFIDGGYSGSNMNRPALNEMLSKLHEIDAVVVYRLDRLSRSQRDTITLIEEYFLKNNVEFVSLSETLDTSSPFGRAMIGILSVFAQLERETIRDRMVMGKIKRVEAGLPLTTAKGRTFGYDVIDTKLYINEEEAKQLQLIYDIFEEEQSITFLQKRLKKLGFKVRTYNRYNNWLTNDLYCGYVSYKDKVHVKGIHEPIISEEQFYRVQEIFTRMGRNPNMNRDSASLLNNLVVCSRCGLGFVHRRKDTMSRGKKYHYRYYSCKTYKHIHELEKCGNKIWRADKLEELIINRVNNYSFASRNVDKEDELDSLNEKLKIEHAKKKRLFDLYINGSYEVSELDSMMNDIDAQINYYESRIEANEELKKNKKIQENLANLATVDYDSLEFREKQLYLKSLINKIYIDGEQVTIEWL

SEQ ID NO: 6015 - protein, 452 aa, synthetic construct
MKAAIYIRVSTREQVENYSIQAQTEKLTALCRSKDWDVYDIFIDGGYSGSNMNRPALNEMLGKLHEIDAVVVYRLDRLSRSQRDTITLIEEYFLKNDVEFVSLSETLDTSSPFGRAMIGILSVFAQLERETIRDRMVLGKIKRVEAGLPLTTAKGRTFGYDVVDTKLYINEEEAKQLRLIYDIFEEEQSITFLQKRLKKLGFKVRTYSRYNNWLTNDLYCGYVSYKDKVHVKGIHEPIISEEQFYRVQEIFTRMGKNPNMNRDSASLLSNLVVCSKCGLGFVHRRKDTMSRGKKYHYRYYSCKTYKHIHELEKCGNKIWRADKLEELIINRVNNYSFASRNVDKEDELDSLNEKLKLEHAKKKRLFDLYINGSYEASELDSMMIDIDARINYYESQIEANGELKKNKKVQENLADLATVDFDSLEFREKQLYLKSLINKIYIDGEQVTVEWL

SEQ ID NO: 6016 - protein, 452 aa, synthetic construct
MKAAIYIRVSTREQVENYSIQAQTEKLTALCRSKDWDVYGIFIDGGYSGSNMNRPALNEMLSKLHEIDAVVVYRLDRLSRSQRDTITLIEEHFLKNNVEFVSLSETLDTSSPFGRAMIGILSVFAQLERETIRDRMVMGKIKRIEAGLPLTTAKGRTFGYDVIDTKLYINEEEAKQLRLIYDIFEKEQSITFLQKRLKKLGFKVRTYNRYNNWLTNDLYCGYVSYKDKVHVKGIHEPIISEEQFYRVQEIFTRMGKNPNMNRDSASLLNNLVVCSKCGLGFVHRRKDAMSRDKKYHYRYYSCKTYKHIHELEKCGNKIWRADKLEELIINRVNNYSLASRNVDKEDELDSLNEKLKIEHAKKKRLFDLYINGSYEVSELDSMMNDIDAQINYYESQIEANEELKRNKKIQENLADLATVDFDSLEFREKQRYLKSLINKIYIDGEQVTIEWL

SEQ ID NO: 6017 - protein, 452 aa, synthetic construct
MKAAIYIRVSTREQVENYSIQAQTEKLTALCRSKDWDVYDIFIDGGYSGSNMNRPALNEMLSKLHEIDAVVVYRLDRLSRSQRDTITLIEEYFLKNNVEFVSLSETLDTSSPFGRAMIGILSVFAQLERETIRDRMVMGKIKRIEAGLPLTTAKGRTFGYDVIDTKLYINEEEAKQLQLIYDIFEEVQSITFLQKRLKELGFKVRTYNRYNNWLTNDLYCGYVSYKDKVHVKGIHEPIISEEQFYRVQEIFTRMGKNPNMNRDSASLLNNLVVCSKCGLGFVHRRKDAMSRDKKYHYRYYSCKTYKHIHELEKCGNKIWRADKLEELIIERVNNYSLASRNVDKEDELDSLNEKLKIEHAKKKRLVDLYINGSYEVSELDSMMNDIDAQINYYESRIEANEELRKNKKIQENLAVLATVDFDSLEFREKQLYLKSLINKIYIDGEQVTIEWL

SEQ ID NO: 6018 - protein, 469 aa, synthetic construct
MSYTTPVRAAVYLRISEDRSGEQLGVARQREDCLKLCDQRKWVPVEYLDNDVSASTGKRRPAYEQMLADITAGKIAAVVAWDLDRLHRRPIELEAFMSLADEKRLALATIAGDVDLATPQGRLVARLKGSVAAHETEHKKARQRRAARQKAERGYPNWNKAFGYLPGPNGPEPDPRTAPLVKQAYANILAGASLGDVCRQWNAAGAFTITGRPWSTTTLSKFLRKPRNAGLRAYKGARYGPVDRDAIVGKAQWSPLVDEATFWAAQAVLDAPGRAPGRKSVRRHLLTGLAGCGKCGNHLAGSYRTDGRVVYVCKACHGVAILADNIEPILYRIVAERLAVPDAVDLLRREVHDAAEAETTRLELETLYGELDRLAVERAEGLLTARQVKISTDIVNAKITKLQARQQDQERLRVLDGIPLGTPQVAGVIAELSPDRFRAVLDVLAEVVVQPVGKSGRVFNPERVQVNWR

SEQ ID NO: 6019 - protein, 469 aa, synthetic construct
MSYTTPVRAAVYLRISEDRSGEQLGVARQREDCLKLCDQRKWVPVEYLDNDVSASTGKRRPAYEQMLADITAGKIAAVVAWDLDRLHRRPVELEAFMSLADEKRLALATVAGDVDLATPQGRLVARLKGCVAAHETEHKKARQRRAARQKAERGLPNWSKAFGYQPGPNGPEPDPRTAPLVKQAYADILAGASLGDVCRQWNDAGAFTITGRPWTTTTLSKFLRKPRNAGLRAYKGARYGPVDRDAIVGKAQWSPLVDEATFWAAQAVLDAPGRAPGRKSVRRHLLTGLAGCGKCGNHLAGSYRTDGRVAYVCKACHGVSILADNIEPVLYHIVAERLAMPDAVGLLRREIRDAAEAETIRLELETLYGELDRLAVERAEGLLTARQVRISTDIVNAKITKLQARQLDQERLRVFDGIPLGTPQVAGMIAELSPDRFRAVLDVLAEVVVQPVGKSGRILNPERVQVNWR

SEQ ID NO: 6020 - protein, 452 aa, synthetic construct
MKAAIYIRVSTREQVENYSIQAQTEKLTALCRSKDWDVYDIFIDGGYSGSNMNRPALNEMLSKLHEIDAVVVYRLDRLSRSQRDTITLIEEYFLKNNVEFVSLSETLDTSSPFGRAMIGILSVFAQLERETIRDRMVMGKIKRIEAGLPLTTAKGRTFGYDVIDTKLYVNEEEAKQLQLIYDIFEEERSITFLQKRLKKLGFKVRTYSCYNNWLTNDLYCGYVSYKDKVHVRGIHEPIISEEQFYRVQEIFTRMGKNPNMNRDSASLLNNLVVCSKCGLGFVHRRKGAMSRDKKYHYRYYSCKTYKHIHELEKCGNKIWRADKLEELIINRVNNYSIASRNADKEDELDNLIEKLKIEHAKKKRLFDLYINGSYEVSELDSMMNDIDAQINYYESQIEANEELKKNKKIQETLADLATVDFDSLEFREKQLYLKSLINKIYIDGEQVTIEWL

SEQ ID NO: 6021 - protein, 469 aa, synthetic construct
MSYTTSVRAAVYLRISEDRSGEQLGVARQREDCLKLCDQRKWVPVEYLDNDVSASTGKRRPAYEQMLADITAGKIAAVVAWDLDRLHRRPIELEAFMSLADEKRLALATVAGDVDLATPQGRLVARLKGSVAAHETEHKKARQRRAARQKAERGHPNWSKAFGYLPGPHGPEPDPRTAPLVKQAYADILAGASLGDVCRRWNDAGAFTITGRPWTTTTLSKFLRKPRNAGLRAYKGARYGPVDRNAIVGKAQWSPLVDEATFWAAQAVLDAPGRAPGRKSVRRHLLTGLAGCGKCGNHLAGSYRTDGRVVYVCKACHGVAILADNIEPILQHIVAERLAMPDAVDLLRREIHDAAEAETIRLELETLYDELDRLAVERAEGLLTARQVKISTDIVNAKITRLQARQLDQERLRVFDGIPLGTPQVAGMIAELSPDRFRAVLDVLAEVVVQPVGKGGRIFNPKRVQVNWR

SEQ ID NO: 6022 - protein, 469 aa, synthetic construct
MSYTTPVRAAVYLRISEDRSGEQLGVARQREDCLKLCGQRKWVPVEYLDNDVSASTGKRRPAYEQMLADITAGKIAAVVAWDLDRLHRRPIELEAFMSLADEKRLALATVAGDVDLATPQGRLVARLKGSVAAHETEHKKARQRRAARQKAERGHPNWSKAFGYLPGPNGPEPDPRTAPLVKQAYADILAGASLGDVCRRWNGAGALTITGRPWTATTLSKFLRKPRNAGLRTYKGARYGPVDRDAIVGKAQWSPLVDEATFWAAQAVLDAPGRAPGRKSVRRHLLTGLAGCGKCGHHLAGSYRTDGRVVYVCKACYGVAILADNIEPILYHIVAERLAMPDAVDLLRREVHDAAEAETIRLELETLYGELDRLAVERAEGLLTASQVKISTDIVNAKITKLQARQLDQERLRVFDGIPLGTPQVAGMIAELSPDRFRAVLDVLAEVVVQPVGKSGRIFNPERVQVNWR

SEQ ID NO: 6023 - protein, 452 aa, synthetic construct
MKAAIYIRVSTQEQVENYSIRAQTEKLTALCRSKDWDVYDIFVDGGYSGSNMNRPALNEMLSKLHEIDAVVVYRLDRLSRSQRDTTTLIEEYFLKNNVEFVSLSETLDTSSPFGRAMIGILSVFAQLERETIRDRMVMGKIKRIESGLPLTTAKGRTFGYDVIDTKLYINEEEAKQLQLIYDIFEEEQSIALLQKRLKKLGFKVRTYNRYNNWLTNDLYCGYVSYKDKVHVKGIHEPIISEEQFHRVQEIFTRMGKNPNMNRDSASLLNNLVVCSKCGLSFVHRSKDTMSRGKKYHYRYYSCKTYKHTHELEKCGNKTWRADKLEELIINRVNDYSFASRDVDKVDELDSLNEKLKIEHAKKKRLFDLYINGSYEVSELDSMMNDIDAQINYYESRIDANEELKENKRIQENLANLATVDFDSLEFREKQLYLKSLINKVYIDGEQVTIEWL

SEQ ID NO: 6024 - protein, 485 aa, synthetic construct
MTKKVAIYTRVSTTNQAEEGFSIDEQIDRLTKYAEAMGWQVSDTYTDAGSSGAKLERPAMRRLINDIENKAFDTVLVYKLDRLSRSVRDTLYLVKDVFTKNKIDFISLNESIDTSSAMGSLFLTILSAINEFERENIKERMTMGKLGRAKSGKSMMWTKTAFGYYHNRKTGILEIVPLQATIVEQIFTDYLSGISLTKLRDKLNESGHIGKDIPWSYRTLRQTLDNPVYCGYIKFKDSLFEGMHKPIIPYETYLKVQKELEERQQQTYERNNNPRPFQAKYMLSGMARCGYCGAPLKIVLGHKRKDGSRTMKYHCANRFPRKTKGVTVYNDNERCDSGTYDLSNLENTVIDNLIGFQENNDSLLKIINGNNQPILDTSSLKKQISQIDKKIQKNSDLYLNDFITMDELKDRTDSLQAEKKLLKAKISENKFNDSTDVFELVKTQLGNIPINELSYDDKKKIVNNLVSKVDVTADNVDIIFKFQLA

SEQ ID NO: 6025 - protein, 485 aa, synthetic construct
MTKKVAIYTRVSTTNQAEEGFSIDEQIDRLTKYTEAMGWQVSGTYTDAGISGAKLERPAMQRLINDIENKAFDTVLVYKLDRLSRSVRDTLYLVKDVFTKNKIDFISLNESIDTSSAMGSLFLTILSAINEFERENIKERMTMGKLGRARSGKSMMWTKTAFGYYHNRKTGILEIVPLQATIVEQIFTDYLSGISLTKLRDKLNESGHIGKDIPWSYRTLRQTLDNPVYCGYIKFKDSLFEGMHKPIIPYETYLKVQKELEERQQQTYERNNNPRPFQAKYMLSGMARCGYCGAPLRIVLGHKRKDGSRTMKYHCANRFPRKTQGVTVYNGNKKCDSGTYDLSDLENTVIDNLIGFQENDDSLLKIINGNNQPILDTSCFKKQISQIDKKIQKNSDLYLNDFITMDELKDRTDSLQAEKKLLRAKISENEFNDSTDVFELVKTQLGSIPINELSYDNKKKIVNNLVSKVDVTADNVDIIFKFQLA

SEQ ID NO: 6026 - protein, 452 aa, synthetic construct
MKAAIYIRVSTQEQVGNYSIQAQTEKLTALCRSKDWDVYDIFVDGGYSGSNMNRPALNEMLSKLHEIDAVVVYRLDRLSRSQRDTTTLIEEYFLKNNVEFVSLSETLDTSSPFGRAMIGILSVFAQLERETIRDRMVMGKIKRIEAGLPLTTAKGRTFGYDVIDTKLYINEEEARQLQLIYDIFEEEQSITSLQKRLKKLGFKVRTYNRYNNWLTNDLYCGYVSYKDKVHVKGIHEPIISEEQFYRVQEIFTRMGKNPNMNRDSASLLSNLVVCSKCGLGFVHRSKNTMSHGKKYYYRYYSCKTYKHTHELEKCGNRTWRADKLEELIISRVNNYSFAGRSVDKEDELDSLNEKLKIEHAKKKRLFDLYINGSYEVSELDSMMNDIDAQISYYESQIEANEELKENKKIQENLAELATVDFDSLEFREKQLYLKSLINKIYIDGEQVTIEWL

SEQ ID NO: 6027 - protein, 452 aa, synthetic construct
MKAAIYIRVSTREQVENYSIQAQTEKLTALCRSKDWDVYDIFIDGGYSGSNMNRPALNEMLSKLHEIDAVVVYRLDRLSRSQRDTITLIEEYFLKNNVEFVSLSETLDTSSPFGRAMIGILSVFAQLERETIRDRMVMGKIKRIEAGLPLTTAKGRTFGYDVIDTRLYINEEEAKQLQLIYDIFEEEQSITLLQKRLKKLGFKVRTYNRYNNWLTNDLYCGYVSYKDKVHVKGIHEPIISEEQFYRVQEIFTRMGKNPNVNRDSASLLNNLVVCSKCGLGFVHRRKDTISRGKKYHYRYYSCKTYKHIHELEKCGNKIWRADKLEELVINRVNNYSLASRNVDKEDELDSLNEKLKIEHAKKKRLFDLYINGSYEVSELDSMMNDIDAQINYYESQIEANEELRKNKKIQVNLVDLATVDFDSLEFREKQLYLKSLINKIYIDGEQVTIEWL

SEQ ID NO: 6028 - protein, 452 aa, synthetic construct
MKAAIYIRVSTREQVENYSIQAQTEKLTALCRSKDWDVYDIFIDGGYSGSNMNRPALNEMLSKLHEIDAVVVYRLDRLSRSQRDTITLIEEHFLKNNVEFVSLSETLDTSSPFGRAMIGILSVFAQLERETIRDRMVMGKIKRIEAGLPLTTAKGRTFGYDVIDTKLYINEEEAKQLQLIYDIFEEEQSITLLQKRLKKLGFKVRTYNRYSNWLTNDLYCGYVSYKDKVHVKGIHEPIISEEQFYRVQEIFTRMGKNPNMNRGSASLLNNLVVCGKCGLGFVHRRKDTMSRGKKYHYRYYSCKTYKHVHELEKCGNKIWRADKLEELIINCVNNHSFASRNVDKEDELDSLNEKLKIEQAKKKRLFDLYINGGYEVSELDSMMNDIDAQINYYESQIEANEELRKNKKIQENLADLATVDYDSLEFREKQLYLKSLINKIYIDGEQVTIEWL

SEQ ID NO: 6029 - protein, 452 aa, synthetic construct
MKAAIYIRVSTREQVENYSIQAQTEKLTALCRSKDWDVYDIFIDGGYSGSSMNRPALNEMLSKLHEIDAVVVYRLDRLSRSQRDTITLIEEYFLKNNVEFVSLSETLDTSSPFGRAMIGILSVFAQLERETIRDRMVMGKIKRIEAGLPLTTAKGRTFGYDVIDTKLYVNEEEAKQLQLIYDIFEEERSITLLQKRLKKLGFKVRTYNRYNSWLTNDLYCGYVSYKDKVHVKGIHEPIISEEQFYRVQEIFTRMGKNPNMNRDSASLLNNLVVCSKCGLGFVHRRKDTISRGKKYHYRYYSCKTYKHTHELEKCGNKIWRADKLEELIINRVNNYSFASRSVDKEDELAGLNEKLKIEHAKKRRLLDLYINDNYEVSELDSMMNGIDAQINYYESQIEANEELRKNKKIQENLADLATVDYDSLEFREKQLYLKSLINKIYIDGEQVTIEWL

SEQ ID NO: 6030 - protein, 485 aa, synthetic construct
MTKKVAIYTRVSTTNQAEEGFSIDEQIDRLTKYAEAMGWQVSDTYTDAGSSGAKLERPAMQRLINDIENKAFDTVLVYKLDRLSRSVRDTLYLVKDVFTKNKIDFISLNESIDTSSAMGSLFLTILSAINEFERENIKERMTMGKLGRAKGGKSMMWTKTAFGYYHNRETGILEIVPLQATIVEQIFTDYLSGISLTKLRDKLNESGHIGKDIPWSYRTLRQTLDNPVYCGYIKFKDSLFEGMHKPIIPYETYLKVQKELEERQQQTYERNNNPRPFQAKYMLSGMARCGYCGAPLRIVLGHKRKDGSRTMKYHCANRFPRKTKGVTVYNDNKKCDSGTYDLSSLENTVIDNLIGFQENNDSLLKIINGNNQPILDTSSFKEQISQIDKKIQKYSDLYLNDLITMDELKDRTDSLQAEKKLLKAKINENKFNDSTDVFELVKTQLGSIPINELSYDDKKKIVNNLVSKVDVTADNVDIIFKFQLA

SEQ ID NO: 6031 - protein, 485 aa, synthetic construct
MTKKVAIYTRVSTTNQAEEGFSIDEQVDRLTKYAEAMGWQVSDTYTDAGFSGAKLERPAMQRLINDIETKAFDTVLVYKLDRLSRSVRDTLYLVKDAFTKNKIDFISLNESIDTSSAMGSLFLTILSAINEFERENIKERMAMGKLGRAKSGKSMMWTKTAFGYYHNRKTGILEIVPLQATIVEQIFTDYLSGISLTRLRDKLNESGHIGKDIPWSYRTLRQTLDNPVYCGYIKFKDSLFEGMHKPIIPYETYLKVQKELEERQQQTYERNNNPRPFQAKYMLSGMARCGYCGAPLKIVLGHKRKDGSRTMKYHCANRFPRKTKGITVYNDNKKCDSGTYDLSNLENTVIDNLIGFQENDDSLLKIINGNNQPILDTSSFEKQISQIDKKIQRNSDLYLNDFITMDELKDRTDSLQAEKKLLKAKISENKFNDSIDVFKLVKTQLGSIPINELSYDNKKKIVNNLVSKVDVTADNVDIIFKFQPA

SEQ ID NO: 6032 - protein, 485 aa, synthetic construct
MTKKVAIYTRVSTANQAEEGFSIDEQIDRLTKYAEAMGWQVSDTYTDAGSSGAKLERPAMQRLINDIENKAFDTVLVYKLDRLSRSVRDTLYLVKDVFTRNKIDFISLNESIDTSSAMGSLFLTILSAINEFERENIKERMTMGKLGRAKSGKSMMWTKTAFGYYHNRETGILEIVPLQATIVEQIFTDYLSGISLTKLRDKLNESGHIGKDIPWSYRTLRQTLDNPVYCGYIKFKDSLFEGMHKPIIPYETYLKVQKELEERQQQAYERNNNPRPFQAKYMLSGMARCGYCGAPLRIVLGRKRKDGSRTMKYHCANRFPRKTKGVTVYNDNKKCDSGTYDLSNLENTVIDSLIGFQEDNDSLLKIINGNNQPIPDTSSFKNQISQIDKKIQKSSDLYLNDFITMDELKDRTDSLQAEKKLLKAKISENKFNDSTDVFELVKTQLGSIPINELSYDDKKKIVNNLVSKVDVTADNVDIIFKFQLA

SEQ ID NO: 6033 - protein, 452 aa, synthetic construct
MKAAIYIRVSTREQVENYSIQAQTEKLTALCRSKDWDVYDIFVDGGYSGSNMNRPALNEMLSKLREIDAVVVYRLDRLSRSQRDTITLIEEYFLKNNVEFVSLSETLDTSSPFGRAMIGILSVFAQLERETIRDRMVMGKIKRIEAGLPLTTAKGRTFGYDVIDTKLYINEEEAKQLQLIYDIFEEEQSITFLQKRLKKLGFKVRTYNCYNNWLTNDLYCGYVSYKDKVHVKGIHEPIISEEQFYRVQEIFTRMGRNPNMNRDSASLLNNLVVCSKCGLGFVHRRKDAMSRDKKYHYRYYSCKTYKHIHELEKCGNKIWRADKLEELIINRVNNYSLASRNVDKEGELDSLNERLKIEHAKKKRLLDLYINGRYEVSELDSMMNDIDAQINYYERQIEANEELKKNKKIQENLAYLATVDFDSLEFREKQLYLKSLINKIYIDGEQVTIEWL

SEQ ID NO: 6034 - protein, 469 aa, synthetic construct
MSYTTPVRAAVYLRISEDRSGEQLGVARQREDCLELCDQRKWVPVEYLDNDVSASTGKRRPAYEQMLADITAGKIAAVVAWDLDRLHRRPVELEAFMSLADEKRLALATVAGDVDLATPQGRLVARLKGCVAAHETEHKKARQRRAARQKAERGLPNWSKAFGYLPGPNGPEPDPRTAPLVKQAYADILAGASLGDVCRRWNDAGASTITGRPWTTTTLSKFLRKPRNAGLRAYKGARYGPVDRDAIVGKAQWSPLVDEATFWAAQAVLDAPGRAPGRKSVRRHLLTGLAGCGKCGYHLAGSYRTDGRVVYVCKVCHGVAILADNIEPILYHIVAERLAMPDAVDLLHREIHDAAEAETIRLELETLYGELDRLAVERAEGLLTARQVKIGTDIVNAKITKLQARQLDQERLRVFDGIPLGTPQAAGMIAELSPDRFRAVLNVLAEVVVQPVGRSGRIFNPERVQVNWR

SEQ ID NO: 6035 - protein, 469 aa, synthetic construct
MSYTTPVRAAVYLRISEDRSGEQLGVARQREDCLKLCGQRKWEPVEYLDNDVSASTGKRRPAYEQMLADITAGKIAAVVAWDLDRLHRRPMELEAFMSLADEKRLALATVAGDVDLATPQGRLVARLKGSVAAHETEHKKARQRRAARQKAERGHPNWNKAFGYLPGPNGPEPDPRTAPLVKQAYADILAGASLGDVCRQWNAAGAFTITGRPWTTTTLSKFLRKPRNAGLRAYKGARYGPVDRDAIVGKAQWSPLVDEATFWAAQAVLDAPGRAPGRKSVRRHLLTGLAGCGKCGSHLAGSYRTDGRVVYVCKACYGVAILADNIEPILYHIVVERLAMPDAVDLLRRETHDAAEAETIRLELETLYGELDRLAVERAEGLLTARQVKISTDIVNAKITKLQARQLDQERLRVFNGIPLGTPQVAGMIAELSPDRFRAVLDVLAKVAVQPVGKGGRIFNPKRVRVDWR

SEQ ID NO: 6036 - protein, 485 aa, synthetic construct
MTKKVAIYTRVSTTIQAEEGFSIDEQIDRLTKYAEAMGWQVSDTYTDAGFSGAKLERPAMQRLINDIENKAFDTVLVYKLDRLSRSVRDTLYLVKDVFTKNKIDFISLNESIDTSSAMGSLFLTILSAINEFERENIKERMTMGKLGRAKSGKSMMWTKTAFGYYHNRKTGILEIVPLQATIVEQIFTDYLSGISLTKLRDKLNESGHIGKDIPWSYRTLRQTLDNPVYCGYIKFKGSLFEGVHKPIIPYETYLRVQKELEERQRQTYKRNNNPRPFQAKYMLSGKARCGYCGAPLQIVLGHKRKDGSRTMKYHCANRYPRKTKGITMYNDNKKCDSGTYDLSNLENTVIDNLIGLQEDNDSLLKLINGNNQPILDTSSFKKQISQIDKKIQKNSDLYLNDFITMDELKDRTDSLQAEKKLLEAKISENKFNDSTDVFELVKTQLGSIPINGLSYDNKKKIVNNLVSKVDVTADNVDIIFKFQLA

SEQ ID NO: 6037 - protein, 452 aa, synthetic construct
MKAAIYIRVSTQEQVENYSIQAQTEKLTALCRSKDWDVYDIFVDGGYSGSNMNRPALNKMLSKLHEIDAVVVYRLDRLSRSQRDTTTLIEEYFLKNNVEFVSLSETLDTSSPFGRAMIGILSVFAQLERETIRDRMVMGKIKRIEAGLPLTTAKGRTFGYDVIDTKLYINEEEAKQLQLIYDIFEEEQSITFLQKRLKKLGFKVRAYNRYNNWLTNDLYCGYVSYKDKVHVKGIHEPIISEEQFYRVQEIFTRMGKNPNMNRDSASLLNSLVVCSKCGLSFVHRSKDTMSRGKKYHYRYYSCKTYKHTHELEKCGNKTWRADKLEELVINRVNNYSFASRNVDREDELDSLNEKLRIEHAKKKRLFDLYINGSYEVSELNSMMSDIDAQINHYESQIEANEELKKNKKIQENLADLATMDFDSLEFREKQLYLKSLINKIYIDGEQVTIEWL

SEQ ID NO: 6038 - protein, 452 aa, synthetic construct
MKAAIYIRVSTREQVENYSIQAQTEKLTALCRSKDWDVYDIFIDGGYSGSNMNRPALNGMLSKLHEIDAVVVYRLDRLSRSQRDTITLIEEYFLKNNVEFVSLSETLDTSSPFGRAMIGILSVFAQLERETIRDRMVMGKIKRIEAGLPLTTAKGRTFGYDVIDTKLYINEEEAKQLQLIYDIFEEEQSITFLQKRLKKLGFKVRTYSCYNNWLTNDLYCGYVSYKDKVYVKGIHEPIISEEQFYRVQEIFTRMCKNPNMNRDSASLLNNLVVCSKCGLGFVHRRKDTMSRGKKYHYRYYSCKTYKHIHELEKCGNKIWRADKLEELIINCVNNYSFASRNVDKEDELDSLSEKLKIEHAKKKRLFELYINGGYEVSELDSMMNDIDAQINYYESQIEANEELKKNKKTQENLADLATVDFDSLEFREKQLYLKSLINKIYIDGEQVTIEWL

SEQ ID NO: 6039 - protein, 485 aa, synthetic construct; identical to SEQ ID NO: 1284

SEQ ID NO: 6040 - protein, 469 aa, synthetic construct; identical to SEQ ID NO: 1886

SEQ ID NO: 6041 - protein, 452 aa, synthetic construct
MKAAIYIRVSTQEQVENYSIQAQTEKLTALCRSKDWDVYDIFIDGGYSGSNMNRPALNEMLSKLHEIDAVVVYRLDRLSRSQRDTITLVEEYFLKNNVEFVSLSETLDTSSPFGRAMIGILSVFAQLERETIRDRMVMGKIKRIEAGLPLTTAKGRTFGYDVIDTKLYINEEEAKQLQLIYDIFEEEQSITFLQKRLKKLGFKVHTYNRYNNWLTNDLYCGYVSYKDKVHVKGIHEPIISEGQFYRVQEIFARMGKNPNMNRDSASLLNNLVVCSKCGLGFVHRRKDTMSRGKKYHYRYYSCKTYKHTHELEKCGNKIWRADKLEELIIDRVNNYSLASRNVDKEDELDSLNEKLKIEHAKKKRLSDLYINGSYEVSELDSMMNDIDAQINYYESQIEANEELKKNKKIQENLANLATVDYDSLEFRERQLYLKSLINKIYIDGEQVTIEWL

SEQ ID NO: 6042 - protein, 452 aa, synthetic construct
MKAAIYIRVSTQEQVENYSIQAQTEKLTALCRSKDWDVYDVFIDGGYSGSNMNRPALNEMLSKLHEIDAVVVYRLDRLSRSQRDTTTLIEEYFLKNDVEFVSLSETLDTSSPFGRAMIGILSVFAQLERETIRDRMVMGKIKRIEAGLPLTTAKGRTFGYDVIDTKLYINKEEAKQLQLIYDIFEEEQSITSLQKRLKKLGFKVRTYNRYNSWLTNDLYCGYVSYKDKVHVKGIHEPIISEEQFYRVQEIFTRMGKNPNMNRDSASLLNNLVVCSKCGLGFVHRSKDTMCRGKKYHYRYYSCKTYKHTHELEKCGNKTWRADKLEELIINRVNNYSFASRNMVKEDELASLNEKLKIEHAKKKRLFDLYINGSYEVSELDSMMNDIDAQINYYEGQIEANEELKKNKKIQENLADLATVDFDSLEFREKQLYLKSLINKIYIDGEQVTIEWL

SEQ ID NO: 6043 - protein, 485 aa, synthetic construct
MTKKVAIYTRVSTTNQAEEGFSIDEQTDRLTKYAEAMGWQVSDTYTDAGVSGAKLERPAMQRLINDIENKAFDTVLVYKLDRLSRSVRDTLYLVKDVFTKNKIDFISLNESIDTSSAMGSLFLTILSAINEFERENIKERMTMGKLGRAKSGKSMMWTKTAFGYYHNRKTGILEIVPLQATIVEQIFTDYLSGISLTKLRDKLNESGHIGKDIPWSYRTLRQTLDNPVYCGYIKFKDSLFEGMHKPIIPHETYLKVQKELEERQQQTYERNNNPRPFQAKYMLSGMARCGYCGAPLKIVLGHKRKDGSRTMKYHCANRLPRKTKGVTVYNDNKKCDSGTYDLSNLENTVIDNLIGFQEDNDSLLKIINGNNQPILDTSSFEKQISQIDKKIQRNNDLYLNDFITMDELKNRTDSLQAEKKLLKAKISENKLNDSTDVFELVKTQLGSIPINELSYDNKKKIVNNLVSKVDVTADNVEIIFKFQLA

SEQ ID NO: 6044 - protein, 452 aa, synthetic construct
MKAAIYIRVSTQEQVGNYSIQAQTEKLTALCRSKDWDVYDIFIDGGYSGSNMNRPALNEMLSKLHEIDAVVVYRLDRLSRSQRDTTTLIEEYFLKNNVEFVSLSETLDTSSPFGRAMIGILSVFAQLERETIRDRMVMGKIKRIEAGLPLTTAKGRTFGYDVIDTKLYINEEEAKQLQLIYDIFEEEQSITFLQKRLKKLGFKVRAYNRYNNWLTNDLYCGYVSYKDKVHVRGIHEPIISEEQFYRVQEIFTRMGKKPNMNRDSASLLNNLVVCSKCGLSFVHRSKDTMSRGKKYHYRYYSCKTYKHTHELEKCGNKTWRADILEELIINRVNNYSPASRNVDKEDELDSLNEKLKVEHAKKRRLFDLYINGSYEVSELDSMMNDIDAQINYYESQIEANEELKKNEKIQENLANLAAVDFGSLEFREKQQYLKSLINKIYIDGEQVTIEWL

SEQ ID NO: 6045 - protein, 452 aa, synthetic construct
MKAAIYIRVSTREQVENYSIQAQTEKLTALCRSKGWDVYDIFTDGGYSGSNMNRPALNEMLSKLHEIDAVVVYRLDRLSRSQRDTITLIEEYFLKNNVEFVSLSETLDTSSPFGRAMIGILSVFAQLERETIRDRMVMGKIKRIEAGLPLTTAKGRTFGYDVIDTKLYINEEEAKQLQLIYDIFEEEQSITFLQKRLKKLGFKVRTYNRYNNWLTNDLYCGYVSYKDKVHVKGIHEPIISEEQFYRVQEIFTRMGKNPNMNRESASLLNNLVVCSKCGLGFVHRRKDTTSRGKKYHYRYYSCKTYKHTHELEKCGNKIWRADKLEELIINRVNNYSFAGRNVDKEDVLDSLNEKLKIEHAKKKRLFDLYINGSYEVSELDSMMNDIDAQINYYESQIEANGELKKNKKIQESLANLATVDYDSLEFREKQLYLKSLINKIYIDGEQVTIEWL

SEQ ID NO: 6046 - protein, 469 aa, synthetic construct
MSYTTPVRAAVYLRISEDRSGEQLGVARQREDCLKLCGQRKWVPVEYLDNDVSASTGKRRPAYEQMLADITAGKIAAVVAWDLDRLHRRPIELEAFMSLADEKRLALATVAGDVDLATPQGRLVARLKGCVAAHETEHKKARQRRAARQKAERGLPNWSKAFGYLPGPNGPEPDPRTAPLVKQAYADILAGASLGDVCRQWNDAGAFTITGRPWTTTTLSKFLRKPRNAGLRAYKGARYGPVDRDAIVGRARWSPLVDEATFWAAQAVLDAPGRAPGRKSVRRHLLTGLAGCGKCGNHLAGSYRTDGRVVYVCKACYGVAILADNIEPILYRIVTERLAMPDAVDLLRREIHDAAEAEPIRLELETLYGELDRLAVERAEGLLTARQVKISTDIVNAKITKLQARQLDQERLRVFDGIPLGTSQVAGTIAELSPDRFRAVLDVLAEVVVQPVGKSGRIFNPERVQVNWR

SEQ ID NO: 6047 - protein, 469 aa, synthetic construct
MCYTTPVRAAVYLRISEDRSGEQLGVARQREDCLKLCDQRKWVPVEYLDNDVSASTGKRRPAYEQMLADITAGKIAAVVAWDLDRLHRRPIELEAFMSLADEKRLALATVAGDVDLATPQGRLVARLKGSVAAHETEHKKARQRRAARQKAERGYPNWSKAFGYLPGPNGPEPDPRTAPLVKQAYVDILAGASLGDVCRRWNDAGAFTITGRPWTTTTLSKFLRKPRNAGLRAYKGACYGPVDRDAIVGKAQWSPLVDEATFWAAQAVLDAPGRAPGRKSVRRHLLTGLAGCGKCGNHLAGSYRTDGKVVYVCKACHGVAILADNIEPILYHIVAERLAMPDAVDLLRGEFHDAAEAEIIRLELETLYGELDCLAVERAEGLLTARQVKISTDIVNAKITKLQARQLDQERLRVLDGIPLGTPQVAGMIAELSPDRFRAVLDVLAEVVVRPVGKGGRIFNPERVQVNWR

SEQ ID NO: 6048 - protein, 452 aa, synthetic construct
MKAAIYIRVSTQEQVGNYSIQAQTDKLTALCRSKGWDVYDIFIDGGYSGSNMNRPALNEMLSKLHEIDAVVVYRLDRLSRSQRDTTTLIEEYFLKNNVEFVSLSETLDTSSPFGRAMIGILSVFAQLERETIRDRMVMGKIKRIEAGLPLTTAKGRTFGYDVIDTKLYINEEEAKQLQLIYDIFEEEQSITFLQKRLKKLGFKVRTYNRYNNWLTNDLYCGYVSYKDKVHVKGIHEPIISEEQFYRVQEIFTRMGKNPNMNRDSASLLSNLVVCSKCGLGFVHRSKDTMSRGKKYHYRYYSCKTYKHTHELEKCGNKTWRADKLEELVINRVNNYSFASRDVDKEDELDGLNEKLKIEYAKKKRLFDLYINGSYEVSELDSMMNDIDAQINYYESQIGANEELKKTKKIQENLADLATVDFDSLEFREKQLYLKSLINKIYIDGEQVTIEWL

SEQ ID NO: 6049 - protein, 452 aa, synthetic construct
MKAAIYIRVSTREQVENYSIQAQTEKLTALCRSKDWDVYDTFIDGGYSGSNMNRPALNEMLSKLHEIDAVVVYRLDRLSRSQRDTITLIEEYFLKNNVEFVSLSETLDTSSPFGRAMIGILSVFAQLERETIRDRMVMGKIKRIEAGLPLTTAKGRTFGYDVIDTKLYINEEEAKLLQLIYDIFEEEQSITFLQRRLKKLGFKVRTYNCYNNWLTNDLYCGYVRYKDKVRVKGIHEPIISEEQFYRVQEIFTRMGKNPNMNRDSASLLNNLVVCSKCGRGFVHRRKDAKSRDKKYHYRYYSCKTYKHIHELEKCGNKIWRADKLEKLIINRVNNYSIASRNADKEDELDSLNEKLKIEHAKKKRLFELYINGSYEVSELDSMMNDIDAQINYYESQIEANKELKKNKKIQENLADLATVDFDSLEFREKQLYLKSLINKIYIDGEQVTIEWL

SEQ ID NO: 6050 - protein, 452 aa, synthetic construct
MKAAIYIRVSTREQVENYSIQAQTEKLTALCRSKDWDVYDIFIDGGYSGSNMNRPALNEMLSRLHEIDAVVVYRLDRLSRSQRDTITLIEEHFLKNNVEFVSLSETLDTSSPFGRAMIGILSVFAQLERETIRDRMVMGKIKRIEAGLPLTTAKGRTFGYDVIDTKLHINEEEAKQLQLVYDIFEEEQSITFLQKRLKKLGFKVHTYNRYNNWLTNDLYCGYVSYKDKVRVKGIHEPIISEEQFYRVQEIFTRVGKNPNMNRGSASLLNNLVVCSKCGQGFVHRRKDITSRGKKYHYRYYSCRTYKHIHELEKCGNKIWRADKLEELIINRVNNYSLASRNVGKEDELDSLNEKLKVEHAKKKRLFDLYINGSYEMSELDSMMDDIDAQINCYESQIEANEKLKKNKKIQENLADLATVDFDSLEFREKQLYLKSLINKIYIDGEQVTIEWL

SEQ ID NO: 6051 - protein, 485 aa, synthetic construct
MTKKVAIYTRVSTTNQAEEGFSIDEQIDRLTKYAEAMGWQVSDTYTDAGFSGAKLERPAMQRLINDIENKAFDTVLVYKLDRLSRSVRDTLYLVKDVFTKNKIDFISLNESINTSSAMGSLFLTILSAINEFERENIKERMTMGKLGRAKSGKSMMWTKTAFGYYHNRKTGILEIEPLQAAIVEQIFTDYLSGISLTKLRDKLNESGHIGKDIPWSYRTLRQTLDNPVYCGYIKFKDSLFEGMHKPIIPHETYLKAQKELEERQQQAYERNNNPRPFQAKYMLSGMARCGYCGAPLKIVLGHKRRDGSRTMKYHCANRFPRKTKGVTVYNDNKKCDSGTYDLSNLENTVIDNLIGLQENNDSLLKIINGNNQPILDTSSFKKQISQIDKKIQKNSDLYLNDFITMDELKDRTDSLQAEKKLLKAKISENKFNDSTDVFELVKTQLGSVPINELSYDNKKKIVNNLVSKVDVTADNVDIVFKFQLS

SEQ ID NO: 6052 - protein, 452 aa, synthetic construct
MKAAIYIRVSTQEQVGNYSIQAQTEKLTALCRSKDWDVYDIFIDGGYSGSNMNRPALNEMLSKLHEIDAVVVYRLDRLSRSQRDTTTLIEEYFLKNNVEFVSLSETLDTSSPFGRAMIGILSVFAQLERETIRDRMVMGKIKRIEAGLPLTTAKGRTFGYDVIDTKLYINEEEAKQLRLIYDIFEEEQSITSLQRRLKKLGFRVRTYNRYNNWLTNDLYCGYVSYKDKVHVKGIHEPIISEEQFYRVQEIFTRMGKKPNMNRDSASLLNNLVVCGKCGLSFVHRRKDTMSRGKKYHYRYYSCKTYKHTHVLEKCGNKTWRADKLEELIINHVNNYSFASRNADREGELDSLNEKLKIEHAKKRRLFDLYINGSYEVSVLDSMMSDIDAQINYYESQIEANEELKKNKKIQESLANLATVDFDSLEFREKQLYLKSLINKIYIDGEQVTIEWL

SEQ ID NO: 6053 - protein, 485 aa, synthetic construct
MTKKVAIYTRVSTTNQAEEGFSIDEQIDRLTKYAEAMGWQVSDTYTDAGSSGAKLERPAMQRLINDIENKAFDTVLVYKLDRLSRSVRDTLYLVKDVFTKNKIDFISLNESIDTSSAMGSLFLTILSAINEFERENIRERMTMGKLGRAKSGKSMMWTKTAFGYYHNRKTGILEIVPLQATIVEQIFTDYLSGISLTKLRDKLNESGHIGKDIPWSYRTLRQTLDNPVYCGYIKFKDSLFEGMHKPIIPYETYLKVQKELEERQQQTYERNNNPRPFQAKYMLSGMARCGYCGAPLRIVLGHKRKDGSRTMKYHCANRFPRKTEGITVYNDNKKCDSGTYDLSSLENTVIDNLVGFQGNNDSLLKIINGNNQPILDTSSFKEQISRIDKKIQKNSELYLNDFITMDELKDRTDSLQAEKKLLKAKINESKFNDSTDVFELVRTQLGSIPINELSYDSKKKIVNNLVSRVDVTADNVDIIFKFQLA

SEQ ID NO: 6054 - protein, 452 aa, synthetic construct
MKAAIYIRVSTQEQVGNYSIQAQTEKLTALCRSKDWDVYDIFIDGGYSGSNMNRPALSEMLSKLHEIDAVVVYRLDRLSRSQRDTTTLIEEYFLKNNVEFVSLSETLDTSSPFGRAMIGILSVFAQLERETIRDRMVMGKIKRIEAGLPLTTAKGRTFGYDVIDTKLYINEEEAKQLQLIYDIFEEVQSITFLQKRLKKLGFKVRTYNRYSNWLTNDLYCGYVSYKDKVHVKGIHEPIISEEQFYRVQEIFTRMGKNPNMNRDSASLLSNLVVCSKCGLGFVHRSKDTMSRGKKYHYRYYSCKTYKHTHELEKCGNKTWRADKLEELIINRVNNYSFASRNVDKEDELDSLNEKLKTERAKKKRLFDLYINGSYEVSELDSMMNDIDAQISYYESQIEANEELSKNRKIQENLADLATVDFDGLEFRDKQLYLKSLINKIYIDGEQVTIEWL

SEQ ID NO: 6055 - protein, 469 aa, synthetic construct
MSYTTPVRAAVYLRISEDRSGEQLGIARQREDCLKLCDQRKWVPVEYLDNDVSASTGKRRPAYEQMLADITAGKIAAVVAWDLDRLHRRPIELEAFMSLADERRLALATVAGDVDLATPQGRLVARLKGSVAAHETEHKKARQRRAARQKAERGHPNWSKAFGYLPGPNGPEPDPRTAPLVKQAYADILAGASLGDVCRQWNDAGALTITGRPWTTTTLSKFLRKPRNAGLRAYKGARYGPVDRGAIVGKAQWSPLVDEATFWAAQAVLDAPGRAPGRKSVRRHLLTGLAGCGKCGSHLAGSYRTDGRVVYVCKACHGVAILADNIEPILYHIVAERLAMPDAVDLLRREIHDVAEAETIRLELEALHGELDRLAVERAEGLLTARQVKISTDIVNAKITKLQARQLDQERLRVFDGIPLGTPQVAGVIAELSPNRFRAVLDVLAEVVVHPVGKSGRIFNPERVQVNWR

SEQ ID NO: 6056 - protein, 469 aa, synthetic construct
MCYTTPVRAAVYLRISEDRSGEQLGVARQREDCLKLCDQRKWEPVEYLDNDVSASTGKRRPAYEQMLADITAGKIAAVVAWDLDRLHRRPIELEAFMCLADEKRLALATVAGDVDLATPQGRLVARLKGSVAAHETEHKKARQRRAARQKAERGHPNWSKAFGYLPGPNGPEPDPRTAPLVKQAYADILAGASLGDVCRQWNDTGALTITGRPWTTTTLSKFLRKPRNAGLRAYKGARYGPVDRDAIVGKAQWSPLVDEATFWAAQAVLDAPGRAPGRKSVRRHLLTGLAGCGKCGSHLAGSYRTDGQVVYVCKACHGVAILADNIVPILYHIVAERLAMPDAVDLLRREIHDAAEAEAIRLELETLYGELDHLAVERAEGLLTARQVKISTDIVNAKITKLQARQLDQERLRVFDGIPLGTPQVAGMIAELSPDRFRAVLDVLAEVVVHPVGKGGRIFNPERVQVNWR

SEQ ID NO: 6057 - protein, 469 aa, synthetic construct
MSYTTPVRAAVYLRISEDRSGEQLGVARQREDCLKLCDQRKWVPVEYLDNDVSASTGKRRPAYEQMLADITAGKIAAVVAWDLDRLHRRPIELEAFMSLADEKRLALATVAGDVDLATPQGRLVARLKGCVAAHETEHKKARQRRAARQKAERGHPNWSKAFGYLPGPNGPEPDPRTAPLVKQAYADILAGASLGDVCRQWNDAGALTITGRPWTTTTLSKFLRKPRNAGLRAYKGARYGPVDRDAIVGMAQWSPLVDEATFWAAQAVLDAPGRAPGRKSVRRHLLTGLAGCGKCGNHLAGSYRTDGRVVYVCKACHGVAILADNIEPVLYHIVAERLAMPDAVDLLRREIHDAAEAETIRLELETLYGELDRLAVERAEGLLTARQVKISTDIVNAKITKLQARQLDQERLRVLDGIPLGTPQVAGMIAELSPDRFRAVLDVLAEVVVQPVGKGGRILNPERVQVNWR

SEQ ID NO: 6058 - protein, 452 aa, synthetic construct
MKAAIYIRVSTREQVENYSIQAQTEKLTALCRSKDWDVYDIFIDGGYSGSNMNRPALNEMLSKLHEIDAVVVYRLDRLSRSQRDTITLIEEYFLKNNVEFVSLSETLDTSSPFGRAMIGILSVFAQLERETIRDRMVMGKIKRIEAGLPLTTAKGRTFGYDVIDTKLYINEEEAKQLQLIYDIFEEEQSITFLQKRLKKLGFKVRTYNRYNSWLTNDLYCGYVSYKDKVHVKGIHEPIISEEQFYRVQEIFTRMGKSPNMNRDSASLLSNLVVCSKCGLGFVHRRKDTMSRGKKYHYRYYSCKTYKHTHELEKCGNKIWRADKLEELVINHVNNYSFASRDVDKEDELDSLNEKLKIEHAKKKRLFDLYINGSYEVSELDCMMNDIDAQINYYESQIEANEELKKSKKIQENLAGLATVDFDSLEFREKQLYLKSLINKIYIDGEQVTIEWL

SEQ ID NO: 6059 - protein, 469 aa, synthetic construct
MSYTTPVRAAVYLRISEDRSGEQLGVARQREDCLKLCDQRKWVPVEYLDNDVSASTGRRRPAYEQMLADITAGKIAAVVAWDLDRLHRRPVELEAFMSLADEKRLALATVAGDVDLATPQGRLVARLKGCVAAHETEHKKARQRRAARQKAERGLPNWSKAFGYLPGPNGPEPDPRTAPLVERAYADILAGASLGDVCRRWNDAGALTITGRPWTTTTLSKFLRKPRNAGLRAYKGARYGPVDRDAIVGKAQWSPLVDEATFWAAQAVLDAPGRAPGRKSVRRHLLTGLAGCGKCGNHLAGSYRADGRVVYVCKACHGVAILADNIEPILYHIVAERLAMPDAVDLLRREIHDAAEAETVRLELETLYGELDRLAVERAEGLLTARQVKISTDIVNAKITKLQARQLDQERLRVLDGIPLGTPQVAGMIAELSPDRFRAVLDVLAEVVVRPVGKSGRTLNPERVQVNWR

SEQ ID NO: 6060 - protein, 485 aa, synthetic construct
MTKKVAIYTRVSTTNQAEEGFSIDEQIDRLTKYAEAMGWQVSDTYTDAGLSGAKLERPAMQRLINDIETKAFDTVLVYKLDRLSRSVRDTLYLVKDVFTKNKIDFISLNESIDTSSAMGSLFLTILSAINEFERENIKERMTMGKLGRAKSGKSMMWTKTAFGYYHNRRTGILEIVPLQATIVEQIFTDYLSGISLTKLRDKLNESGHIGKDIPWSYRTLRQTLDNPVYCGYIKFKDSMFEGMHRPIIPYETYLKVQKELEERQQQTYDRNNNPRPFQAKYMLSGMARCGYCGAPLRIVLGHKRKDGSRTMKYHCANRFPRKTKGVTVYNDDKKCDSGTYDLRNLEDTVIDNLIGFQENDDSLLKIINGNNQPILDTSSFEKQISQIDKKIQKNSDLYLNDFITMDELKDRTDSLQAEKKLLKAKISENKFSGSTHVFELVKTQLGSIPINELSYDNKKKIVNNLVSKVDVTADNVDIIFKFQLA

SEQ ID NO: 6061 - protein, 452 aa, synthetic construct
MKAAIYIRVSTREQVENYSIQAQTERLTALCRSKDWDVYDIFIDGGYSGSNMNRPALNEMLSKLHEIDAVVVYRLDRLSRSQRDTITLIEEYFLKNNVEFVSLSETLDTSSPFGRAMIGILSVFAQLERETIRDRMVMGKIKRIEAGLPLTTAKGRTFGYDVIDTKLYINEEEAKQLQLIYDIFEEEQSITFLQKRLKKLGFKVRAYNCYNSWLTNDLYCGYVSYKDKVHVKGIHEPIISEEQFYRVQEIFTRMGKNPNMNRDSASLLNNLVACSKCGLSFVHRRKDTMSRGKKYHYRYYSCKTYKHTHELEKCGNKIWRADKLEELIINRVNNYSFASRNADKEDELDSLNEKLKIEHAKRKRLFDLYINGSYEVSELDSMMNDIDAQINYYESQIEANEELKRNKKIQENLAGLATVDFDSLEFREKQLYLKSLINKIYIDGEQVTIEWL

SEQ ID NO: 6062 - protein, 452 aa, synthetic construct
MKAAIYIRVSTREQVENYSIQAQTEKLTALCRSKDWDVYDIFIDGGYSGSNMNRPALNEMLSKLHEIDAVVVYRLDRLSRSQRDTITLIEEYFLKNNVEFVSLSETLDTSSPFGRAMIGILSVFAQLERETIRDRMVMGKIKRIEAGLPLTTAKGRTFGYDVIDTKLYINEEEAKQLRLIYDIFEEEQSITFLQKRLKKLGFKVRTYNRYNNWLTNDLYCGYVSYKDKVHVKGIHEPIISEEQFYRVQEIFARMGKNPNMNRDSASLLNNLVVCSKCGLGFVHRRKDTMSRDKKYHYRYYSCKTYKHIHELEKCGNKIWRADKLEELIINRVNNYSLASRNAGKEDELDSLSEKLKNEHAKKRRLFELYINGRYEVSELDSMMSDIDARISYYESRIKANEELKKNKKIQENLADLATVDFDSLEFREKQLYLKSLIDKIYIDGEQVTIEWL

SEQ ID NO: 6063 - protein, 452 aa, synthetic construct
MKAAIYIRVSTREQVENYSIRAQTEKLTALCRSKDWDVYDIFIDGGYSGSNMNRPALNEMLNKLHEIDAVVVYRLDRLSRSQRDTITLIEEYFLKNNVEFVSLSETLDTSSPFGRAMIGILSVFAQLERETIRDRMVMGKIKRIEAGLPLTTAKGRTFGYDVIDTKLYINEEEAKQLRLIYDIFEEEQSITFLQKRLKKLGFKVRTYNRYNNWLTNDLYCGYVSYKDKVHVKGIHEPIISEEQFNRVQEIFTRMSKNPNMNRASASLLNNLVVCGKCGLGFVHRRKDAMSRDKKYRYRYYSCKTYKHIHELEKCGNKIWRADKLEELIINRVNNYSFVSRNADKEDELDSLNEKLKIEHAKKKRLFDLYINGSYEVSELDSMMNDIDAQINYYESQIEANEELKKNKKIQENLANLATVDFDSLEFREKQLYLKSLISKIYIDGEQVTIEWL

SEQ ID NO: 6064 - protein, 469 aa, synthetic construct
MSYTTPVRAAVYLRISEDRSGEQLGVARQREDCLKLCGQRKWVPVEYLDNDVSASTGKRRPAYEQMLADITAGKIAAVVAWDLDRLHRRPIELEAFMSLADEKRLALATVAGDVDLATPQGRLVARLKGSVAAHETEHKRARQRRAARQKAERGHPNWSKAFGYLPGPNGPEPDPRTAPLVKQAYADILAGASLGDVRRQWNDAGAFTITGRPWTTTTLSKFLRKPRNAGLRAYKGARYGPVDRDAIVGKAQWSPLVDEATFWAAQAVLDAPGRAPGRKSVRRHLLTGLAGCGKCGNHLAGSYRTDGRVVYVCKACHGVVILADNIEPILYHIVAERLAMPDAVDLLRREIHDAAEAETIRLELETLYGELDRLAVERAEGLLTARQVKISTDIVNAKITKLQARQLDQERLRVFNGIPLGTPQVAGMIAGLSPDRFRAVLDVLAEVVVQPVGKSGRIFNPERVHVNWR

SEQ ID NO: 6065 - protein, 485 aa, synthetic construct
MTKKVAIYTRVSTTNQAEEGFSIDEQIGRLTKYAEAMGWQVSDTYTDAGFSGAKLERPAMQRLINDIENKAFDTVLVYKLDRLSRSVRDTLYLVKDVFTKNKIDFISLNECIDTSSAMGSLFLTILSAINEFERENIKERMTMGKLGRAKSGKSMMWTKTAFGYYHNRKTGILEIVPLQATIVEQIFTDYLSGISLTKLRDKLNGSGHIGKDIPWSYRTLRQTLDNPVYCGYIKFKDRLFEGMHKPIIPYETYLKVQKELEERQQQTYERNNNPRPFQAKYMLSGMARCGYCGAPLKIVLGHKRKDGSRTMKYHCANRFPRKTKGVTVYNDNKKCDSGTYDLSNLENTVIDYLIGFQEDNDSLLKIINGNNQPILDTSSFKEQISQIDEKIQKNSDLYLNDFITMDELKDRTDSLQAEKKLLKAKISENKFNNSTDVFELVKTQLGSIPINELSYDNKKKIVNNLVSKVDVTADNVDIIFKFQLA

SEQ ID NO: 6066 - protein, 485 aa, synthetic construct
MTKKVAIYTRVSTTNQAEEGFSIDEQIDRLTKYAEAMGWQVSDTYTDAGFSGAKLERPAMQRLFNDIENKAFDTVLVYKLDRLSRSVRDTLYLVKDVFTKNKIDFISLNESIDTSSAMGSLFLTILSAINEFERENIKERMTMGKLGRAKSGKSMMWTKTAFGYYHNRKTGILEIVPLQAAIVEQIFTDYLSGISLTKLRDKLNESGHIGKDIPWSYRTLRQTLDNPVYCGYIKFKDSLFEGMHKPIIPYETYLKVQKELEERQQQTYERNNNPRPFQAKYMLSGMARCGYCGAPLRIVLGHKRKDGSRTMKYHCANRFPRKTKGVTVYNDNKKCDSGTYDLSDLENTVIDNLIGFQENNDSLLKIINGNSQPILDTSSFKEQISQIDKKIQKNSDLYLNDFITMDELKDRTDSLQAEKKLLKAKISENKFNGSTDVFELVKTQLGSIPINELSYDNKKKIVNNLVSKVDVTADNVDIIFKFQLA

SEQ ID NO: 6067 - protein, 469 aa, synthetic construct
MCYTTPVRAAVYLRISEDRSGEQLGVARQREDCLELCGQRKWVPVEYLDNDVSASTGKRRPAYEQMLADIAAGKIAAVVAWDLDRLHRRPIELEAFMSLADEKRLALATVAGDVDLATPQGRLVARLKGSVAAHETEHKKARQRRAARQKAERGYPNWSKAFGYLPGPNGPEPDPRTAPLVKQAYADILAGASLGDVCRQWNGAGAFTITGRPWTTTTLSKFLRKPRNAGLRAYKGARYGPVDRDAIVGKAQWSPLVDEATFWAAQAVLDAPGRAPGRKSVRRHLLTGLAGCGKCGNHLAGSYRTDGRVVYVCKACHGVAILADNIEPILYHIVAERLAMPDAVDLLRREIHDAAEAVTFRLELDTLYGELDRLAVERAEGLLTARQVKISTDIVNAKITKLQARQLDQERLRVFDGIPLGTPQVAGVIADLSSNRFRAVLDVLAEVVVQPVGKSGRIFNPERVQVNWR

SEQ ID NO: 6068 - protein, 485 aa, synthetic construct
MTKKVAIYTRVSTTNQAEEGFSIDEQIDRLTKYAEAMGWQVSDTYTDAGFSGAKLERPAMQRLINDIENKAFDTVLVYKLDRLSRSVRDTLYLVKDVFTKNEIDFISLNESIDTSSAMGSLFLTILSAINEFERENIKERMTMGKLGRAKSGKSMMWTKTAFGYYHNRKTGILEIVPLQATIVEQIFTDYLSGISLTKLRDKLNESGHIGKDIPWSYRTLRQTLDNPVYCGYIKFKDSLFEGMHKPIIPYETYLGVQKELEERQQQTYERNNNPRPFQAKYMLSGMARCGYCGAPLRIVLGHKRKDGSRTMKYHCANRFPRKTKGVTVYNDNKKCDSGAYDLSNLENTVIDNLIGFQEDNDSLLKIINGNNQPILDTSSFKQRISQIDKEIQKNSDLYLNDFITMDELKDRTDGLQAEKKLLKAKISENKFNVSTDVFELVKTQLGSIPINELSYDNKKKIVNNLVSKVDVTADNVDIIFKFQLA

SEQ ID NO: 6069 - protein, 469 aa, synthetic construct
MCYTTPVRAAVYLRISEDRSGEQLGVARQREDCLKLCDQRKWVPVEYLDNDVSASTGRRRPAYEQMLADITAGKIAAVVAWDLDRLHRRPIELEAFMSLADEKRLALATVAGDVDLATPQGRLVARLKGSVAAHETEHKKARQRRAARQKAERGHPNWSKAFGYLPGPNGPEPDPRTAPLVKQAYADILAGASLGDVRRQWNDAGAFTITGRPWTTTALSKFLRKPRNAGLRAYKGARYGPVDRDAIVGKAQWSPLVDEATFWAAQAVLDAPGRAPGRKSVRRHLLTGLAGCGKCGNHLAGSYRTDGRVVYVCKACHGVAILADNIEPILYHIVAERLAMPDAVDLLRREVHDVAEAETIRLELETLYGELDRLAVERAEGLLTARQVKISTDIVNAKITKLQACQLDQERLRVFDGIPLGTPQVAGMIAELSPDRFRAVLDVLAEVVVQPVGKSGRIFNPERVQVNWR

SEQ ID NO: 6070 - protein, 452 aa, synthetic construct
MKAAIYIRVSTREQVENYSIQAQTEKLTALCRSKDWDVYDIFVDGGYSGSNMNRPALNEMLSKLHEIDAVVVYRLDRLSRSQRDTITLIEEYFLKNNVEFVSLSETLDTSSPFGRAMIGILSVFAQLERETIRDRMVMGKIKRIEAGLPLTTAKGRTFGYDVIDTKLYINEEEAKQLRLIYDIFEEEQSITFLQKRLKKLGFKVRSYNCYNNWLTNDLYCGYVSYKDRVHVKGIHEPIISEEQFYRVQEIFARMGKNPNMNRGSASLLNNLVVCSKCGLGFVHRRKDITSRGKKYHYRYYSCKTYKHIHELEKCGNKIWRADKLEELVVNRVNNYSLASRNVDKEDELDSLNEKLKIEHAKRKRLFDLYVNGSYEVSELDSMMNDIDAQINYYESQIEANEELKRNKKIRENLANLATVDFDSLEFREKQLYLKSLINKIYIDGEQVTIEWL

SEQ ID NO: 6071 - protein, 452 aa, synthetic construct
MKAAIYIRVSTREQVENYSIQAQTERLTALCRSKDWDVYDIFIDGGYSGSNMNRPALNEMLSKLHEIDAVVVYRLDRLSRSQRDTITLIEEYFLKNNVEFVSLSETLDTSSPFGRAMIGILSVFAQLERETIRDRMVMGKIKRIEAGLPLTTAKGRTFGYDVIDSRLYINEEEAKQLQLIYDIFEEEQSITFLQKRLKKLGFKVHTYNRYNNWLTNDLYCGYVSYKDKVHVKGIHEPIISEEQFYRVQEIFTRMGKNPNVNRDSASLLNNLVVCSKCGLGFVHRRKDTTSRGKKYHYRYYSCKTYKHTHELEKCGNKIWRADKLEELIIDRVNNYSLASRNVDKKDELDSLNEKLEIEHAKKRRLFDLYINGSYEVSELDSMMNDIDAQINCYESQIEANEELKKNKKIQEILADLATVDFDSLEFREKQLYLKSLINKIYIDGEQVTIEWL

SEQ ID NO: 6072 - protein, 452 aa, synthetic construct
MKAAIYIRVSTREQVENYSIQAQTEKLTALCRSKDWDVYDIFIDGGYSGSNMNRPALNEMLSKLHEIDAVVVYRLDRLSRSQRDTITLIEEYFLKNNVEFVSLSETLDTSSPFGRAMIGILSVFAQLERETIRDRMVMGKIKRIEAGLPLTTAKGRTFGYDVIDTKLYINEEEAKQLQLIYDIFEEEQSITFLQKRLKKQGFKVHAYNRYNNWLTNDLYCGYVSYKDKVHVRGIHEPIISEEQFYRVQEIFARMGKNPNMNRGSASLLNNLVVCSKCGLGFVHRRKDIVSRGKKYHYRYYSCKTYKHIHELEKCGNKIWRADKLEELIINRVNSYSIATRDVDREDELGSLNEKLKIEHAKKKRLFDLYVNGSYEVSELDSMMNDIDAQINYYESQIEANEGLKKDKKIQEILANLATVDFGSLEFREKQLYLKSLINKIYIDGEQVTIEWL

SEQ ID NO: 6073 - protein, 469 aa, synthetic construct
MCHTTPVRAAMYLRISEDRSGEQLGVARQREDCLKLCDQRKWVPVEYLDNDVSASTGRRRPAYEQMLADITAGKIAAVVAWDLDRLHRRPIELEAFMSLADEKRLALATVAGDVDLATPQGRLVARLKGSVAAHETEHKKARQRRAARQKAERGHPNWSKAFGYLPGPSGPEPDPRTAPLVKQAYADILAGASLGDVCRQWNDAGAFTITGRPWTTTTLSKFLRKPRNAGLRAYKGARYGPVDRDAIVGKAQWSPLVDEATFWAAQVVLDAPGRAPGRKSVRRHLLTGLAGCGKCGNHLAGSYRTDGRVVYVCKACHGVAILADNIEPILYHIVAERLAMPDAVDLLRREIHDVAEAEAIRLELETLYGELDRLAVERAEGLLTARQVKICTDIVDAKITKLQARQLDQERLRVFDGIPLGTPQVAGTIAELSPDRFRAVLDVLAEVVVQPVGKSGRIFNPERVQVNWR

SEQ ID NO: 6074 - protein, 469 aa, synthetic construct
MSYTTPVRAAVYLRISEDRSGEQLGVARQREDCLKLCDQRKWVPVEYLDNDVSASTGKRRPAYEQMLADITAGKIAAVVAWDLDRLHRRPIELEAFMSLADEKRLALATVAGDVDLATPQGRLVARLKGSVAAHETEHKKARQRRAARQKAERGHPNWSKAFGYLPGPNGPEPDPRTAPLVKQAYADILAGASLGDVCRRWNDASAFTITGRPWTTTALSKFLRKPRNAGLRAYKGARYGPVDRDAIVGKAQWSPLVDEATFWAAQAVLDAPGRAPGRKSVRRHLLTGLAGCGKCGNHLAGSYRTDGRVVYVCKACHGVAILADNIEPILYHTVAERLAMPDAVDLLRREIHDAAEAETIRLELETLYGELDHLAVERAEGLLTARQVKISTDIVNAKITKLQARQLDQERLRVFDGIPLGTPQVAGMIAELSPDRFRAVLDVLAEVVVQPVGKSGRIFNPERVQVNWR

SEQ ID NO: 6075 - protein, 452 aa, synthetic construct; identical to SEQ ID NO: 6070

SEQ ID NO: 6076 - protein, 452 aa, synthetic construct
MKAAIYIRVSTREQVENYSIQAQTEKLTALCRSKDWDVYDIYIDGGYSGSNMNRPALSEMLSKLHEIDAVVVYRLDRLSRSQRDTITLIEEYFLKNNVEFVSLSETLDTSSPFGRAMIGILSVFAQLERETIRDRMVMGKIKRIEAGLPLTTAKGRTFGYDVIDTKLYINEEEAKQLQLIYDIFEEEQSITFLQKRLKELGFKVRTYNRYSNWLTNDLYCGYVSYKDKVHVKGIHEPIISEEQFYRVQEIFTRMGKNPNMNRDSASLLNSLVVCSKCGLGFVHRRKDIMSHGKKYHYRYYSCKTYKHIHELEKCGNKIWRADKLEELIINRVNNYSIASRNADKEDELDSLNEKLKIEHAKKKRLFELYINGSYEVSELDSMMNDIDAQISYYESQIEANEALIKNKKIRENLADLGTVDFGSLEFREKQRYLKSLINKIYIDGEQVTIEWL

SEQ ID NO: 6077 - protein, 452 aa, synthetic construct
MKAAIYIRVSTREQVENYSIQAQTEKLTALCRSKDWDVYDIFIDGGYSGSNMNRPALNEMLSKLHEIDAVVVYRLDRLSRSQRDTITLIEEYFLKNNVEFVSLSETLDTSSPFGRAMIGILSVFAQLERETIRDRMVMGKIKRIEAGLPLTTAKGRTFGYDVIDTKLYINEEEAKQLQLIYDIFEEEQSITSLQKRLKKLGFKVRTYSCYNNWLTNDLYCGYVSYKDKVHVKGIHEPIISEEQFYRVQEIFTRMGKNPNMNRDSASLLNNLVVCSKCGLGFVHRRKDTISRGKKYHYRYYSCKTYKHTHELEKCGNKIWRADKLEELIINRVNNYSLASRNVDKEDELDSLNEKLKIEHAKKKRLFDLYINGSYEVSELDSMMNDIDAQINYYESQIEANEELKRNKKIQENLANLATVDYDSLEFREKQLYLKSLINKIYIDGELVTIEWL

SEQ ID NO: 6078 - protein, 485 aa, synthetic construct; identical to SEQ ID NO: 2544

SEQ ID NO: 6079 - protein, 452 aa, synthetic construct
MKAAIYIRVSTREQVENYSIQAQTEKLTALCRSKGWDVYDIFIDGGYSGSNMNRPALNEMLSKLHEIDAVVVYRLDRLSRSQRDTITLIEEYFLKNNVEFVSLSETLDTSSPFGRAMIGILSVFAQLERETIRDRMVMGKIKRIEAGLPLTTAKGRTFGYDVIDTKLYINEEEAKQLQLIYDIFEEEQSITFLQKRLKKLGFKVRTYSRYNSWLTNDLYCGYVSYKDKVHVKGIHEPIISEEQFYRVQEIFARMGKNPNMNRDSASLLNNLVVCSRCGLGFVHRRKDTTSRGKKYHYRYYSCKTYKHIHELEKCGNKIWRADKLEELIINRVDNHSIASRNEDKEDELDSLNEKLKIEHAKKKRLFDLYVNGSYEVSELDSMMNDIDAQINYYESQIEANEELKKNKKIQENLANLATVDYDSLEFREKQLYLKSLINKIYIDGEQVTIEWL

SEQ ID NO: 6080 - protein, 452 aa, synthetic construct
MKAAIYIRVSTREQVENYSIQAQTEKLTALCRSKDWDVYDIFIDGGYSGSNMNRPALNEMLSKLHEIDAVVVYRLDRLSRSQRDTITLIEEYFLKNNVEFVSLSETLDTSSPFGRAMIGILSVFAQLERETIRDRMVMGKIKRIEAGLPLTTAKGRTFGYDVIDTKLYINEEEAKQLQLIYDIFEEEQSITSLQKRLKKLGFKVRTYNRYNNWLTNDLYCGYVSYKDKVHVKGIHEPIISEEQFNRVQEIFTRMGKNPNMNRESASLLNNLVVCSKCGLSFVHRRKDAMGRDKKYHYRYYSCKTYKHIHELEKCGNKIWRADKLEELIINRVNNYSLANRNVDKEDELDSLNEKLKIEHAKKRRLFDLYINGRYEVSELDSMMNDIDAQINYYESQIEANEELRKNKKIRENLAGLATVDFDSLEFREKQLYLKSLINKIYIDGEQVTIEWL

SEQ ID NO: 6081 - protein, 452 aa, synthetic construct
MKAAIYIRVSTQEQVENYSIQAQTDKLTALCRSKDWDVYDIFIDGGYSGSNMNRPALNEMLSKLHEIDAVVVYRLDRLSRSQRDTITLIEEYFLKNNVEFVSLSETLDTSSPFGRAMIGILSVFAQLERETIRDRMVMGKIKRIEAGLPLTTAKGRTFGYDVIDTKLYINEEEARQLRLIYDIFEEERSITFLQKRLKKLGFKVRTYSRYNNWLTNDLYCGYVSYKDKVHVKGIHEPIISEEQFYRVQEIFTRMGKNPNMNRDSASLLNNLVVCSKCGLGFVHRRKDTMSRGKKYHYRYYSCKTYKHTHELEKCGNKIWRADKLEELIINRVNDHSFASRNVDKEDELDRLNEKLKIEHAKKKRLFDLYINGSYEVSELDGMMNVIDAQINYYESQIEANEELKKNKKIQEDLAALATVDFDSLEFREKQLYLKSLINKIYIDGEQVTIEWL

SEQ ID NO: 6082 - protein, 452 aa, synthetic construct
MKAAIYIRVSTREQVENYSIQAQTEKLTALCRSKDWDVYDIFIDGGYSGSNMNRPALNEMLSKLHEIDAVVVYRLDRLSRSQRDTITLIEEYFLKNNVEFVSLSETLDTSSPFGRAMIGILSVFAQLERETIRDRMVMGKIKRIEAGLPLTTAKGRTFGYDVIDTKLYINEEEAKQLQLIYDIFEEEQSITFLQKRLKKLGFKVHTYSRYNNWLTNDLYCGYVSYKDKVHVKGIHEPIISEEQFYRVQEIFTRMGKNPNMNRDSASLLNNLVVCSKCGLGFVHRRKDTMSRGKKYHYRYYSCKTYKHTHELEKCGNKIWRADKLEELIIGRVSNYSFASRNADKKDELDSLSEKLKIEHAKKKRLFDLYISGSYEVSELDSMMSDIDAQINYYESQIEANEEPRKNKKIQENLADLAAVDFNSLEFREKQLYLKSLINKIYIDGEQVTIDWL

SEQ ID NO: 6083 - protein, 452 aa, synthetic construct
MKAAIYIRVSTREQVENYSIQAQTEKLTALCRSKDWDVYDIFIDGGYSGSNMNRPALNEMLSKLHEIDAVVVYRLDRLSRSQRDTITLIEEYFLKNNVEFVSLSETLDTSSPFGRAMIGILSVFAQLERETIRDRMVMGKIKRIEAGLPLTTAKGRTFGYDVIDTKLYVNEEEARQLQLIYDIFEEEQSITFLQKRLKELGFKVRTYNRYNNWLTNDLYCGYVSYKDKVHVKGIHEPIISEEQFYRVQEIFTRMGKNPNMNRDSASLLNNLVVCSKCGLGFVHRRKDAMSRDKKYHYRYYSCKTYKHIHELEKCGNKIWRADKLEELIINRVNNYSLASRNVDKEDELDSLNEKLKIEHAKKKRLFDLYINGSYEVSELDSMMSDIDAQINHYESQIEANEELKKNKKIQENLADLATVDFDSLEFREKQLFLKSLINKIYIDGEQVTIEWL

SEQ ID NO: 6084 - protein, 452 aa, synthetic construct
MKAAIYIRVSTREQVENYSIQAQTEKLTALCRSKNWDVYDIFVDGGYSGSNMNRPALNEMLSKLHEIDAVVVYRLDRLSRSQRDTITLIEEYFLKNNVEFVSLSETLDTSSPFGRAMIGILSVFAQLERETIRDRMVMGKIKRIEAGLPLTTAKGRTFGYDVIDTKLYINEEEAKQLRLIYDIFEEEQSITFLQKRLKKLGFKVRTYNRYNNWLTNDLYCGYVSYKDKVHVKGIHEPIISEEQFYRVQEIFTRMGKNPNMNRDSASLLNNLVVCSKCGLGFVHRRKDAVSRDKKYHYRYYSCKTYKHIHELEKCGNKIWRADKLEELVINRVNNYSVASRNVDKEDELDSLNEKLKIEHAKKKRLFELYINGSYEVSELDSMMKDIDAQINYYESQIEASEELKKNKKIQEKLADLATVDFDSLEFREKQLYLKSLINKIYVDGEQVTIEWL

SEQ ID NO: 6085 - protein, 452 aa, synthetic construct
MKAAIYIRVSTREQVENYSIQAQTEKLTALCRSKDWDVYDIFIDGGYSGSNMNRPALNEMLSKLHEIDAVVVYRLDRLSRSQRDTITLIEEYFLKNNVEFVSLSETLDTSSPFGRAMIGILSVFAQLERETIRDRMVMGKIKRIEAGLPLTTAKGRTFGYDVIDTKLHINEEEAKQLQLIYDIFEEERSITFLQKRLKKLGFKVHTYSRYNNWLTNDLYCGYVSYKDKVHVKGIHEPIISEEQFYRVQEIFTRMGKNPNMNRDSASLLSNLVVCSKCGLSFVHRRKDTMSRGKKYHYRYYSCKTYKHIHELEKCGNKIWRADKLEELVINRVNNYSFASRNVDKEDELDSLNEKLKIEHAKKKRLFDLYINGSYEVSELDSMMNDIDAQISYYESQIEANEELRKNKKIQENLANLATVDYDSLEFREKQLYLKSLINKIYIDGEQVIIEWL

SEQ ID NO: 6086 - protein, 485 aa, synthetic construct; identical to SEQ ID NO: 3743

SEQ ID NO: 6087 - protein, 469 aa, synthetic construct
MSYTTPVRAAVYLRISEDRSGEQLGVARQREDCLKLCGQRKWVPVEYLDNDVSASTGKRRPAYEQMLADITAGKIAAVVAWDLDRLHRRPIELEAFMSLADEKRLALATVAGDVDLATPQGRLVARLKGSVAAHETEHKRARQRRAARQKAERGHPNWSKAFGYLPGPNGPEPDPRTAPLVKQAYADILAGASLGDVCRQWNDAGAFTITSRPWTTTTLSKFLRKPRNAGLRAYKGARYGPVDRDAIVGKAQWSPLVDEATFWAAQAVLDAPGRAPGRKSVRRHLLTGLAGCGKCGNHLAGSYRTDGQVAYVCKACHGVSILAVNIEPILYHIVAERLAMPDAADLLRRETHDAAEAEAIRLELETLYGELDHLAVERAEGLLTARQVKISTDIVNAKITKLRVRQLDQERQRVFDGIPLGTPQVAGMIAGLSPDRFRAVLDVLAEVVVQPVGKGGRIFSPERVRVNWR

SEQ ID NO: 6088 - protein, 469 aa, synthetic construct
MSYTTPVRAAVYLRISEDRSGEQLGVARQREDCLKLCDQRKWVPVEYLDNDVSASTGKRRPAYEQMLADITAGKIAAVVAWDLDRLHRRPIELEAFMSLADEKRLALATVTGDVDLATPQGRLVARLKGSVAAHETEHKKARQRRAARQKAERGHPNWSKAFGYLPGPNGPEPDPRTAPLVRQAYADILAGASLGDVCRQWNDAGAFTTTGRPWTTTTLSKFLRKPRNAGLRTYKGARYGPVDRDAIVGKAQWRPLVDEATFWAAQAVLDAPGRAPGRKSVRRHLLTGLAGCGKCGYHLAGSYRTDGRVVYVCKACHGVAILADNIEPILYHIVAERLAMPDAVDLLRREVHDVAEAETIRLELETLYGELDRLAVERAEGLLTARQVKISTDIVNAKIAKLQARQLDQERLRVFDGIPLGTPQVAGVIAELSPDRFRAVLDVLAEVVVQPVGKSGRTFNPERVQVNWR

SEQ ID NO: 6089 - protein, 485 aa, synthetic construct
MTKKVAIYTRVSTTNQAEEGFSIDEQTDRLTKYAEAMGWQVSDTYTDAGFSGAKLVRPAMQRLINDIENKAFDTVLVYRLDRLSRSVRDTLYLVKDVFAKNKIDFISLNESIDTSSAMGSLFLTILSAINEFERENIKERMTMGKLGRAKSGKSMMWTKTAFGYYHNRKTGILDIVPLQATIVEQIFTDYLSGISLTKLRDNLNESGHIGKDIPWSYRTLRQTLDNPVYCGYIKFKDSLFEGMHKPIIPYETYLRVQKELEERQQQAYERNNNPRPFQAKYMLSGMARCGYCGAPLKIVLGHKRKDGSRTMKYHCANRFPRKTKGITVYNDNKKCDSGTYDLSNLENTVLDTLIGLQENSDSLLKIINGNNQPIQDTSSFKKQISQIDKKIQKNSDLYLNDFITMDELKDRTDSLQAEKKLLEAKISENKFNDSADVFELVKTQLGSIPINELSYDNKKKIVNNLVSKVDVTADNVDIIFKFQLA

SEQ ID NO: 6090 - protein, 485 aa, synthetic construct
MTKKVAIYTRVSTTNQAEEGFSIDEQIDRLTKYAEAMGWQVSDTYTDAGFSGAKLERPAMQRLINDIENKAFDTVLVYKLDRLSRSVRDTLYLVKDVFTRNKIGFISLSESINTSSAMGSLFLTILSAINEFERENIKERMTMGKLGRAKSGKSMMWTKTAFGYYHNRKTGILEIVPLQATIVEQIFTDYLSGISLTKLRDKLNESGHIGKDIPWSYRTLRQTLDNPVYCGYIKFKDSLFKGMHKPIIPYETYLKVQKELEERQQQTYERNNNPRPFQAKYMLSGMARCGYCGAPLRIVLGRKRRDGSRTMKYHCANRFPRKTKGVTVYNDNKKCNSGTYDLSNLENTVIDYLIGFQENNDSLLRIINGNNQPILDTSSFKKQISQIDKKIQRNSDLYLNDFITMDELKDRTDSLQAEKKLLRAKISENKFNDSTDVFELVKTQLGSIPINELSYDNKKKIVNNLVSKVDVTADDVDIIFKFQLA

SEQ ID NO: 6091 - protein, 469 aa, synthetic construct
MSYTTPVRAAVYLRISEDRSGEQLGVARQREDCLKLCGQRKWVPVEYLDNDVSASTGKRRPAYEQMLADITAGKIAAVVAWDLDRLHRRPIELEAFMSLADEKRLALATVAGDVDLATPQGRLVARLKGSVAAHETEHKKARQRRAARQKAERGHPNWSKAFGYLPGPNGPEPDPRTAPLVKQAYADILAGASLGDVCRQWNAAGAFTITGRPWTTTTLSKFLRKPRNAGLRAYKGAPYGPVDRNAIVGKAQWSPLVDEATFWAAQAVLDAPGRAPGRKSVRRHLLTGLAGCGKCGNHLAGSYRIDGRVVYVCKACHGVAILADNIEPILYHIVAERLAMPDAVDLLRREIHDAAEAEAIRLELETLYGELDCLAVERAEGLLTARQVKISTDIVNAKITKLQARQQDQERLRVLDGIPLGTPQVADTIAELSPDRFRAVLDVLVEVVVQPVGKGGRIFNPERVQVNWR

SEQ ID NO: 6092 - protein, 485 aa, synthetic construct
MTKKVAIYTRVSTTNQAEEGFSIDEQIDRLTKYAEAMGWQVSDTYTDAGFSGAKLERPAMQRLINDIESKAFDTVLVYKLDRLSRSVRDTLYLVKDVFTKNKIDFISLNECIDTSSAMGSLFLTILSAINEFERENIKERMTMGKLGRAKSGKSMMWTKTAFGYYHNRKTGILEIVPLQATIVEQIFTDYLSGISLTKLRDKLNESGHIGKDIPWSYRTLRQTLDNPVYCGYIKFKDSLFEGMHKPIIPYETYLRVQKELGERQQQTYERNNNPRPFQAKYMLSGMARCGYCGAPLRIVLGHKRKDGSRTMKYHCANRFPRETEGVTVYNDNKKCDSGTYDLSNLENTVIDTLIGFQENNDSLLKIINGNNQPILDTSSSKKQISQIDKKIQKNSDLYLNDFITMDELKERTDSLQAEKKLLKAKISENKFSDSTDVFELVRTQLGSIPINELSYDNKKKIVNNLVSKVDVTADNVDIIFKFQLA

SEQ ID NO: 6093 - protein, 452 aa, synthetic construct
MKAAIYIRVSTQEQVENYSIQAQTEKLTALCRSKDWDVYDIFVDGGYSGSNMNRPALNEMLSKLHEIDAVVVYRLDRLSRSQRDTTTLIEEYFLKNNVEFVSLSETLDTSSPFGRAMIGILSVFAQLERETIRDRMVMGKIKRIEAGLPLTTAKGRTFGYDVIDTKLYINEEEAKQLRLIYDIFEEEQSITSLQKRLKKLGFKVRTYNRYNNWLTNDLYCGYVSYKDKVHVKGIHEPIISEEQFYRVQEIFTRMGKNPNMNRDSASLLSNLVVCSKCGLSFVHRSKDTMSRGKKYHYRYYSCKTYKHTHELEKCGNKTWRADKLEELIINRVNNYSFASRNADKEDELDSLNEKLKVEHGKKKRLFDLYINGSYEVSELDSMMNDIDAQINYYESRIGANEELKKNRKIQENLADLATVDFDSLEFREKQLYLKSLINKIYIDGEQVTIEWL

SEQ ID NO: 6094 - protein, 469 aa, synthetic construct
MSYTTPVRAAVYLRISEDRSGEQLGVARQREDCLELCGQRKWVPVEYLDNDVSASTGKRRPAYEQMLADIAAGKIAAVVAWDLDRLHRRPIELEAFMSLADEKRLALATVAGDVDLATPQGRLVARLKGSVAAHETEHKKARQRRAARQKAERGLPNWSKAFGYLPGPNGPEPDPRTAPLVKQAYADILAGASLGDVCRQWNDAGAFTITGRPWTTTALSKFLRKPRNAGLRAYKGARYGPVDRDAIVGKARWCPLVDEATFWAAQAVLDAPGRAPGRKSVRRHLLTGLAGCGKCGNHLAGSYRTDGRVVYVCKACHGVSILADNIVPILYHIVAERLAMPDAVDLLCREIHDAAEAETIRLELETLYGELDRLAVERAEGLLTARQVKISTDIVNAKITKLQACQLDQERLRVFDGIPLGTPQVAGMIAELSPDRFRAVLDALAEVVVQPVGKRGRIFNQERVQVNWR

SEQ ID NO: 6095 - protein, 452 aa, synthetic construct
MKAAIYIRVSTREQVENYSIQAQTEKLTALCRSKDWDVYDIFIDGGYSGSNMNRPALNEMLSKLHEIDAVVVYRLDRLSRSQRDTITLIEEYFLKNNVEFVSLSETLDTSSPFGRAMIGILSVFAQLERETIRDRMVMGKIKRIEAGLPLTTAKGRTFGYDVIDAKLYINEGEAKQLRLIYDIFEEVQSITFLQKRLKKLGLKVRTYNRYNNWLTNDLYCGYVSYKDKVHVKGIHEPIISEEQFYRVQEIFTRMGKNPNMNRDSASLLNNLVVCSKCGLSFVHRRKDTMSRDKKYHYRYYSCKTYKHIHELEKCGNKIWRADKLEELIVNRVNNYSLAGRNAGKEDELDSLNEKLKIEHAKKKRLFDLYINGSYEVSELDSMMNDIDAQINYYESQIEANEELRKNKKIQENLADLAAVDFDSLEFREKQLYLKSLINKIYIDGERVTIEWL

SEQ ID NO: 6096 - protein, 485 aa, synthetic construct
MTKKVAIYTRVSTTNQAEEGFSIDEQIDRLTKYAEAMGWQVSDTYTDAGFSGAKLERPAMQRLINDIENKAFDTVLVYKLDRLSRSVRDTLYLVKDVFTKNKIDFISLNESIDTSSAMGSLFLTILSAINEFERENIKERMTMGKLGRAKSGKSMMWTKTAFGYYHNRKTGILEIVPLQATIVEQIFTDYLSGMSLTKLRDKLNESGHIGKDIPWSYRTLRQTLDNPVYCGYIKFKGSLFEGMHKPIIPYETYLKVQKELEERQQQTYECNNNPRPFQAKYMLSGMARCGYCGAPLKIVLGHKRKDGSRTMKYHCANRFPRKTKGVTVYNDNKKCDSGTYDLSNLENTVIDSLIGFQENNDSLLEIINGDNQPILDTSSLKKQISQIDRKIQKNSDLYLNDFITMDELKDRTDSLQAEKKLLKAKISEYRFNDRTDVFELVKTQLGSIPINELSYGNKKKIVNNLVSKVDVTADNVDIIFKFQLA

SEQ ID NO: 6097 - protein, 485 aa, synthetic construct
MTKKVAIYTRVSTTNQAEEGFSIDEQIDRLTKYAEAMGWQVSDTYTDAGSSGAKLERPAMQRLINDIENKAFDTVLVYKLDRLSRSVRDTLYLVKDVFTKNKIDFISLNESIDTSSAMGSLFLTILSAINEFERENIKERMTMGKLGRARSGKSMMWTKTAFGYHHNRKTGILEIVPLQATIVEQIFTDYLSGISLTKLRDKLNESGHIGKDIPWSYRTLRQTLDNPVYCGYIKFKDSLFEGMHKPIIPYETYLKVQKELEVRQQQAYERNNNPRPFQAKYMLSGVARCGYCGAPLRIVLGHKRKDGSRTMRYHCANRFPRKAKGITVYNDNKKCDSGTYDLSNLENTVIGNLIGLQENDDSLLKIINGNNQPILDTSSLKKQISQIDKKIQKNSDLYLNDFIAMDELKDRTDSLQAEKKLLKAKISENKFNDSTDVFELVKTQLGSIPINELSYDNKKKIVNHLVSKVDVTADNVDIIFKFQLA

SEQ ID NO: 6098 - protein, 485 aa, synthetic construct
MTKKVAIYTRVSTTNQAEEGFSIDEQIDRLTKYAEAMGWQVSDTYTDAGSSGAKLERPAMQRLINDIENKAFDTVLVYKLDRLSRSVRDTLYLVKDVFTKNKIDFISLNESIDTSSAMGSLFLTILSAINEFERENIKERMTMGKLGRARSGKSMMWTKTAFGYYHNRKTGTLEIVPLQATIVEQIFTDYLSGISLTKLRDKLNESGHIGKDIPWSYRTLRQTLDNPVYCGYIKFKDSLFEGMHRPIIPYETYLKVQKELEERQQQTYERNNNPRPFQAKYMLSGMARCGYCGAPLRIVLGHKRKDGSRTMKYHCANRFPRKTKGVTVYNDNKKCDSGTYDLSNLESTVIDNLIGFQEDNDSLLKVINGNNQPILDTSSFKEQISQIDKKIQKNSDLYLNDLITMDELKGRTGSLQAEKKLLEAKISENKLNDSTDVFELVKTQLGSIPINELSYDDKKKIVNNLVSKVDVTADNVDIIFKFQLA

SEQ ID NO: 6099 - protein, 469 aa, synthetic construct
MCYTTPVRAAMYLRISEDRSGEQLGVARQREDCLKLCDQRKWVPVEYLDNDVSASTGKRRPAYEQMLADITAGKIAAVVAWDLDRLHRRPIELEAFMSLADEKRLALATVAGDVDLATPQGRLVARLKGSVAAHETEHKKARQRRAARQKAERGYPNWSKAFGYLPGPNGPEPDPRTAPLVKQAYADILAGASLGDVCRQWNDAGAFTITGRPWTTTTLSKFLRKPRNAGLRAYKGARYGPVDRDAIVGKARWSPLVDEATFWAAQAVLDAPGRAPGRKSVRRHLLTGLAGCGKCGNHLAGSYRTDGQVVYVCKACHGVSILADNIEPILYRIVAERLAMPDAVDLLRREVHDAAEAETIRLELETLYGELDRLAVERAEGLLTARQVKISTDIVNAKITRLQARQLDQERLRVLDGIPLGTPQVAGMIAELGPDRFRAVLDVLAEVVVQPVGKGGRIFNPERVQVSWR

SEQ ID NO: 6100 - protein, 485 aa, synthetic construct
MTKKVAIYTRVSTTNQAEEGFSIDEQIDRLTKYAEAMGWQVSDTYTDAGFSGAKLERPAMQRLINDIENKAFDTVLVYKLDRLSRSVRDTLYLVKDVFTKNKIDFISLNESIDTSSAMGSLFLTILSAINEFERENIKERMTMGKLGRAKSGKSMMWTKTAFGYYHNRKTGILEIVPLQATIVEQIFTDYLSGISLTKLRDKLNESGHIGKDIPWSYRTLRQTLDNPVYCGYIKFKGSLFEGMHKPIIPYETYLKVQKELEERQQQTYERNNNPRPFQAKYMLSGMARCGYCGAPLRIVLGHKRKDGSRTMKYHCANRFPRKTKGITVYNDNKKCDSGSYDMSNLENTVIDNLIGFQENNDSLLKIINGNNQPILDTSSFKEQISQIDKKIQKNSDLYLNDFITMDELKDRTDSLRAEKKLLKAKISENKFNDSTDVFELVKTQLGSIPINELSYDNKKKIVNNLVSKVDVTADNVDIIFKFQLA

SEQ ID NO: 6101 - protein, 469 aa, synthetic construct
MSYTTPVRAAVYLRISEDRSGEQLGVARQREDCLKLCGQHKWVPVEYLDNDVSASTGKRRPAYEQMLADITAGKIAAVVAWDLDRLHRRPVELEAFMSLADEKRLALATVAGDVDLATPQGRLVARLKGCVAAHETEHKKARQRRAARQKAERGLPNWSKAFGYLPGPNGPEPDPRTAPLVKQAYADILAGASLGDVCRQWNDAGAFTITDRPWTTTTLSKFLRKPRNAGLRAYKGARYGPVDRDAIVGKAQWSPLVDEATFWAAQAVLDAPGRAPGRKSVRRHLLTGLAGCGKCGNHLAGSYRTDGRVVYVCKACHGVAILADNIEPILYHIVAERLAKPDAVDLLCREVHDAAEAETIRLELEALYGELDRLAVERAEGLLTARQVKISTDIVNAKITKLQARQLDQERLRVFDGIPLGTPQVAGMIAELSPDRFRAVLDVLAEVVVQPVGKSGRVFNPERVQVNWR

SEQ ID NO: 6102 - protein, 485 aa, synthetic construct
MTRKVAIYTRVSTTNQAEEGFSIDEQIDRLTKYAEAMSWQVSDTYTDAGFSGAKLERPAMQRLINDIENKAYDTVLVYKLDRLSRSVRDTLYLVKDVFTKNKIDFISLNESIDTSSAMGSLFLTILSAINEFERENIKERMTMGKLGRAKSGKSMMWTKTAFGYYHNRKTGILEIVPLQATIVEQIFTDYLSGISLTKLRDKLNESGHIGKDIPWSYRTLRQTLDNPVYCGYIKFKDSLFKGMHKPIIPYETYLKVQKELEERQQQTYERNNNPRPFQAKYMLSGMARCGYCGAPLKIVLGHKRKDGSRTMKYHCANRFPRKTRGVTVYNDNKKCDSGTYDLRNLENTVIDNLIGLQESNGSLLKIINGNDQPILDTSSFEKQISQIDKKIQKNSDLYLNDFITMDELKDRTDSLQAEKKLLKAKISENKSNDSTDVFELVKTQLGSIPINELSYDNKKKIVNNLVSKVDVTADDVDIIFKFQLA

SEQ ID NO: 6103 - protein, 452 aa, synthetic construct
MKAAIYIRVSTQEQVENYSIQAQTEKLTALCRSKDWDVYDIFIDGGYSGSNMNRPALNKMLSKLHEIDAVVVYRLDRLSRSQRDTTTLIEEYFLKNNVEFVSLSETLDTSSPFGRAMIGILSVFAQLERETIRDRMVMGKIKRIEAGLPLTTAKGRTFGYDVIDTKLYINEEEAKQLRLIYDIFEEEQSITLLQKRLKKLGFKVRTYNRYNNWLTNDLYCGYVSYKDKVHVKGIHEPIISEEQFYRVQEIFTRMGKNPNMSRDSASLLSNLVVCSKCGLGFVHRSKDTMSRGKKYHYRYYSCKTYKHTHELEKCGNKTWRADKLEELIINRVNNYSFASRDVDKEDELDSLNEKLKIEHAKKKRLFDLYINGSYEVSELDSMMSDIDAQINYYESQIEANEELKENKKIQEILAELATVDFDSLELREKQLYLKSLINKIYIDGEQVTIEWL

SEQ ID NO: 6104 - protein, 452 aa, synthetic construct
MKAAIYIRVSTREQVENYSIQAQTEKLTALCRSKDWDVYDIFIDGGYSGSNMNRPALNEMLSKLHEIDAVVVYRLDRLSRSQRDTITLIEEYFLKNNVEFVSLSETLDTSSPFGRAMIGILSVFAQLERETIRDRMVMGKIKRIEAGLPLTTAKGRTFGYDVVDTKLYINEEEAKQLQLIYDIFEEERSITFLQKRLKKLGFKVRTYNCYNNWLTNDLYCGYVSYKDKVHVKGIHEPIISEEQFYRVQEIFTRMGKNPNMNRDSASLLNNLVVCSKCGLGFVHRRKDAMSRDKKYHYRYYSCKTYKHIHELERCGNKIWRADKLEELIINRVNNYSFAGRNADKEDELDSLNEKLKIEHAKKRRLFDLYINGSYEVSELDSMMNDIDAQINYYESQIEANEELRKNKKIQENLADLATVDFDSLGFREKQLYLKSLINKIYIDGEQVTIEWL

SEQ ID NO: 6105 - protein, 485 aa, synthetic construct
MTKKVAIYTRVSTTNQAEEGFSIDEQADRLTKYAEAMGWQVSGTYTDAGFSGAKLERPAMQRLINDIENRAFDTVLVYKLDRLSRSVRDTLYLVKDVFTKNRIDFISLNESIDTSSAMGSLFLTILSAINEFERENIKERMTMGKLGRAKSGKSMMWTKTAFGYYHNRKTGILEIVPLQATIVEQIFTDYLSGISLTKLRDKLNENGHIGKDIPWSYRTLRQTLDNPVYCGYIKFKGSLFEGMHKPIIPYETYLKVQKELEERQQQTYERNNNPRPFQAKYMLSGMVRCGYCGAPLRIVLGHKRKDGSRAMKYHCANRFPRKTKGVTVYNDNKKCDSGTYDLSNLENAVIDNLIGFQENNDSLLKIINGNNQPILDTSSFKEQISQIDKKIQKNSDLYLNDFITMDELKDRTDSLQAEKKLLEAKISENKLNDSTDVFELAKAQLGSIPINELSYDNKKKIVNNLVSKVDVTADNVDIIFKFQLA

SEQ ID NO: 6106 - protein, 452 aa, synthetic construct
MKAAIYIRVSTREQVENYSIQAQTEKLTALCRSKGWDVYDIFIDGGYSGSNMNRPALNEMLSKLHEIDAVVVYRLDRLSRSQRDTITLIEEYFLKNNVEFVSLSETLDTSSPFGRAMIGILSVFAQLERETIRDRMVMGKIKRIEAGLPLTTAKGRTFGYDVIDAKLYINEEEARQLRLIYDIFEEEQSITSLQKRLKKLGFKVRSYNRYSNWLTNDLYCGYVSYKDKVHVKGIHEPIISEEQFYRVQEIFARMGKNPNMNRDSASLLNNLVVCSKCGLGFVHRRKDIMSRDKKYHYRYYSCKTYKHIHELEKCGNKIWRADKLEELVINRVNNYSFASRNVDKEDELDSLSEKLKIEHAKKKRLFDLYVNGRYEVSELDSMMNDIDAQINYYESQIEANEELRKNKKIQENLANLATVDFDSLEFREKQLYLKSLINKIYIDDEQVTIEWL

SEQ ID NO: 6107 - protein, 452 aa, synthetic construct
MKAAIYIRVSTREQVENYSIQAQTEKLTALCRSKGWDVYDIFIDGGYSGSNMNRPALNEMLSKLHEIDAVVVYRLDRLSRSQRDTITLIEEYFLKNNVEFVSLSETLDTSSPFGRAMIGILSVFAQLERETIRDRMVMGKIKRIEAGLPLTTAKGRTFGYDVIDTKLYINEEEAKQLQLIYDIFEEEQSITFLQKRLKKLGFKVRTYNRYNDWLTNDLYCGYVSYKDKVHVKGIHEPIISEEQFYRVQEIFARMGKNPNMNRDSASLLNNLVVCSKCGLGFVHRRKDTVSRGKKYHYRYYSCKTYKHIHELEKCGNKIWRADKLEELIINRVNNYSFASRNVDKEDELDSLNEKLKIEHAKKKRLFDLYINGSYEASELDSMMSDIDAQINYYENQIGAIEELKRNRKIQENLANLATVDFDSLEFREKQQYLKSLISKIYIDGEQVTIEWL

SEQ ID NO: 6108 - protein, 452 aa, synthetic construct
MKAAIYIRVSTQEQVGNYSIQAQTEKLTALCRSKDWDVYDIFIDGGYSGSNMNRPALNEMLSKLHEIDAVVVYRLDRLSRSQRDTTTLIEEYFLKNNVEFVSLCETLDTSSPFGRAMIGILSVFAQLERETIRDRMVMGKIKRIESGLPLTTAKGRTFGYDVIDTKLYINEEEAKQLRLIYDIFEEEQSITSLQKRLKKLGFKVRTYNRYNNWLTNDLYCGYVSYKDKVHVKGIHEPIISEEQFYRVQEIFTRMGKNPNMSRDSASLLNNLVVCSKCGLGFVHRSKDTMSRGKKYHYRYYSCKTYKHTHELEKCGNKIWRADKLEELIINRVNSYSFASRNVDKEDELDSLNEKLRIEHAKKQRLFDLYINGSYEVSELDSMMSDIDAQINYYESQIKASEELKKNKKIQENLADPATVDFDSLEFREKQLYLKSLINKIYIDGEQVTIEWL

SEQ ID NO: 6109 - protein, 485 aa, synthetic construct
MTKKVAIYTRVSTTNQAEEGFSIDEQIDRLTKYAEAMGWQVSDTYTDAGFSGAKLERPAMQRLINDIENKAFDTVLVYKLDRLSRSVRDTLYLVKDVFTRNKVDFISLNESIDTSSAMGSLFLAILSAINEFERENIKERMTMGKLGRAKSGKSMMWTKTAFGYYHNRETGILEIVPQQATIVEQIFTDYLSGISLTKLRDKLNESGHIGKDIPWSYRTLRQTLDNPVYCGYIKFKDSLFEGMHKPIISYETYLRVQKELEERQQQTYERNNNPRPFQAKYMLSGMARCGYCGAPLRIVLGHKRKNGSRTMKYRCVNRFPRKTRGVTVYNDNKKCDSGTYDLSNLENAVIDILIGFQENNDRLLKIINGNSQPILDTSSFEKQISQIDKKIQENSDLYLNDFITMDELKDRTDSLQAEKKLLKAKISGNKLNDSTDVFELVKTQLGSIPINELSYDDKKKIVNNLVSKVDVTADNVDIIFKFQLA

SEQ ID NO: 6110 - protein, 485 aa, synthetic construct; identical to SEQ ID NO: 1819

SEQ ID NO: 6111 - protein, 485 aa, synthetic construct
MTKKVAIYTRVSTANQAEEGFSIDEQIERLTKYAEAMGWQVSDTYTDAGLSGAKLERPAMQRLINDIENKAFDTVLVYKLDRLSRSVRDTLYLVKDVFTKNKIDFISLNESIDTSSAMGSLFLTILSAINEFERENIKERMTMGKLGRAKSGKSMMWTKTAFGYYHNRKTGILEIVPLQATIVEQIFTDYLSGISLTKLRDKLNESGHIGKDIPWSYRTLRQTLDNPVYCGYIKFKDSLFEGMHKPIIPYETYLRVQKELEERQQQTYERNNNPRPFQAKYMLSGMARCGYCGAPLKIVLGHRRKDGSRTMKYHCANRFPRKTKGITVYNDNKKCDSGTYDLRNLENTVIDNLIGLQENNDSLLKIINGNNQPVLDTSSFKKQIGQIDKKIQKNSDLYLNDFITMDELRDRTDSLQAEKKLLKAKISENKFNNSTDVFELVKTQLGSIPINELSYDNKKKIVNNLVSKVDVTADNVDIIFKFQLA

SEQ ID NO: 6112 - protein, 469 aa, synthetic construct
MSYTTPVRAAVYLRISEDRSGEQLGVARQREDCLKLCDQRKWVPVEYLDNDVSASTGKRRPAYEQMLADITAGKIAAVVAWDLDRLHRRPIELEAFMSLADEKRLALATVAGDVDLATPQGRLVARLKGSVAAHETEHKKARQRRAARQKAERGHPNWSKAFGYLPGPNGPEPDPRTAPLVKQAYANILAGASLGDVCRRWNDAGAFTITGRPWTTTTLSKFLRKPRNAGLRAYKGARYGPVDRDAIVGKAQWSPLVDEATFWAAQAVLDAPGRAPGRKSVRRHLLTGLAGCGKCGNHLAGSYRTDGRVVYVCKACHGVAILADNIEPILYHIVAERLAMPDAVDLLRREIHDATEAEAIRLELETLYGELDRLAVERAEGLLTARQVKISTDIVNAKITKLLAHQLDQERLRVFEGIPLGTPQVAGMIAELSPDRFRAVLDVLAEVVVQPVGKSGRIFNPERVQVNWR

SEQ ID NO: 6113 - protein, 452 aa, synthetic construct
MKAAIYIRVSTREQVENYSIQAQTEKLTALCRSKDWDVYDIFVDGGYSGSNMNRPALNEMLSKLHEIDAVVVYRLDRLSRSQRDTITLIEEYFLKNNVEFVSLSETLDTSSPFGRAMIGILSVFAQLERETIRDRMVMGKIKRIEAGLPLTTAKGRTFGYDVIDTKLYINEEEAKQLQLIYDIFEEEQSITSLQKRLKKLGFKVRAYNRYNSWLTNDLYCGYVSYKDKVHVKGIHEPIISEEQFYRVQEIFTRVGKNPNMNRDSASLLNNLVVCSKCGLSFVHRRKDTMSRGKKYHYRYYSCKTYKHTHELEKCGNKIWRADKLEELIINRVSNYSFASRNVDKEDELDSLNEKLKIEHAKKKRLFDLYINGSYEVSELDSMMNDIDAQINYCESQIEVNGELKKNKKIQENLAGLATVDFDSLEFREKQLYLKSLINKIYIDGEQVTIEWL

SEQ ID NO: 6114 - protein, 485 aa, synthetic construct
MTKKVAIYTRVSTTNQAEEGFSIDEQIDRLTKYAEAMGWQVSGTYTDAGFSGAKLERPAMQRLINDIGNKAFDTVLVYKLDRLSRSVRDTLYLVKDVFTKNKIDFISLNESIDTSSAMGSLFLTILSAINEFERENIKERMTMGKLGRAKSGKSMMWTKTAFGYYHNRKTGILEIVPLQATIVEQIFTDYLSGISLTKLRDKLNESGHIGKDIPWSYRTLRQTLDNPVYCGYIKFKGSLFEGMHKPIIPYETYLKVQKELEERQQQTYERNNNPRPFRAKYMLSGMARCGYCGAPLRIVLGHKRKDGSRTMKYHCANRFPRKTKGVTVYNDNKKCDSGTYDLSNLENTVIDNLIGLQENNDSLLKIINGNNQPILDTSSFKEQISQIDKKIQKNSDLYLNDFITMDELKDRTDSLQAEKKLLQAKINENKFNDSTDVFELVKTQLGSIPINELSHDNKKKIVNNLVSKVDVTADNVDIIFKFQLA

SEQ ID NO: 6115 - protein, 452 aa, synthetic construct
MKAAIYIRVSTQEQVGNYSIQAQTEKLTALCRSKDWDVYDIFIDGGYSGSNMNRPALNEMLSKLHEIDAVVVYRLDRLSRSQRDTTTLIEEYFLKNNVEFVSLSETLDTSSPFGRAMIGILSVFAQLERETIRDRMVMGKIKRIEAGLPLTTAKGRTFGYDVIDTKLYINEEEAKQLQLIYDIFEEEQSITFLQKRLKKLGFKVRTYNRYNSWLTNDLYCGYVSYKDKVHVKGIHEPIISEEQFYRVQEIFTRMGKNPNMNRDSASLLNNLVVCSKCGLGFVHRSKDTMCRGKKYHYRYYSCKTYKHTHELEKCGNKTWRADKLEELVISRVNNYSFASRNVNKEDELDSLNEKLKTEHAKKKRLFDLYINGSYEVSELDSMMNDIDAQINYYESQIEASEELKKNKKIQENLADLATVDFDSLGFREKQLYLKSLINKIYIDGEQVTIEWL

SEQ ID NO: 6116 - protein, 485 aa, synthetic construct
MTKKVAIYTRVSTTNQAEEGFSIDEQIDRLTKYAEAMGWQVSDTYTDAGISGAKLDRPAMQRLINDIENKALDTVLVYKLDRLSRSVRDTLYLVKDVFTKNKIDFISLNECIDTSSAMGSLFLTILSAINEFERENIKERMTMGKLGRAKSGKSMMWTKTAFGYYHNRKTGILEVVPLQATIVEQIFADYLSGISLTKLRDKLNEGGHIGKDIPWSYRTLRQTLDNPVYCGYIKFKDSLFEGMHKPIIPYETYLKVQKELEERQQQTYERNNNPRPFQAKYMLSGMARCGYCGAPLRIVLGHKRKDGSRAMKYHCANRFPRKTKGVTVYNDNKKCDSGTYDLSNLENTVIDNLIGFQENNDSLLRIINDTNQPILDTSSFKKQISQIDKKIQKNSDLYLNDFITMDELKDRTDSLQAEKKLLKAKISENKFNDSTDVFELVKTQLGSIPINELSYDDKKKIVNNLVSKVDVTADNVDIIFKFQLA

SEQ ID NO: 6117 - protein, 452 aa, synthetic construct
MKAAIYIRVSTQEQVENYSIQAQTEKLTALCRSKDWDVYDIFIDGGYSGSNMNRPALNEMLSKLHEIDAVVVYRLDRLSRSQRDTTTLIEEYFLKNNVEFVSLSETLDTSSPFGRAMIGILSVFAQLERETIRDRMVMGKIKRIEAGLPLTTAKGRTFGYDVIDTKLYINEDEAKQLRLIYDIFEEEQSITFLQKRLKKLGFKVRTYNRYSNWLTNDLYCGYVSYKDEVHVKGIHEPIISEEQFYRVQEIFTRMGKNPNMNRDSASLLNSLVVCSKCGLSFVHRSKDTMSRGKKYHYRYYSCKTYKHTHELEKCGNKTWRADKLEELIINRVNNYSFASRNVGKEDELDSLYEKLEIEHAKKKRLFDLYINGSCEVSELDSMMNDVDAQINCYESQIEANEELKKTKKIQENLADLATVDFDSLEFREKQQYLKSLINKIYIDGEQVTIEWL

SEQ ID NO: 6118 - protein, 452 aa, synthetic construct
MKAAIYIRVSTREQVENYSIQAQTEKLTALCRSKDWDVYDIFIDGGYSGSNMNRPALNEMLSKLHEIDAVVVYRLDRLSRSQRDTITLIEEYFLKNNVEFVSLSETLDTSSPFGRAMIGILSVFAQLERETIRDRMVMGKIKRIEAGLPLTTARGRTFGYDVIDTKLYINEEEAKQLRLIYDIFEEEQSITFLQKRLKKLGLKVRTYNRYNNWLTNDLYCGYVSYKDKVHVKGIHEPIISEEQFYRVQEIFARMGKNPNMNRDSASLLNNLVVCGKCGLGFVHRRKDAMSRDKKYRYRYYSCKTYKHIHELEKCGNKIWRADELEELIINRVNNYSFASRNAGKEDELGSLNEKLKIEHAKKRRLFELYINGRYAVSELDSMMNDIDAQINYYESQIEANEELKENKKIQENLANLATVDFDSLEFREKQLYLKSLINKIYIDGEQVTIEWL

SEQ ID NO: 6119 - protein, 485 aa, synthetic construct
MTKKVAIYTRVSTTNQAEEGFSIDEQIDRLTKYAEAMGWQVSDTYTDAGLSGAKLERPAMQRLINDIENKAFDTVLVYKLDRLSRSVRDTLYLVKDVFTKNKIDFVSLNESIDTSSAMGSLFLTILSAINEFERENIKERMTMGKLGRAKSGKSMMWTKTAFGYYHNRKTGILEIVPLQATIVEQIFTDYLSGISLTKLRDKLNESGHIGKDIPWSYRTLRQILDNPVYCGYIKFKEGLFEGMHKPIIPYETYLKVQKELEKRQQQTYERNNNPRPFQAKYMLSGMARCGYCGAPLRIVLGHKRKDGSRTMRYHCANRFPRKTKGVTVYNDNKKCDSGTYDLSNLENTVIDNLIGFQDNNDSLLKIISGNHQPILDTSSIKKQISQIDKKIQKNSDLYLNDFITMDELKDRIDSLQAEKKLLKAKISENEFNDSTDVFELVKAQLGSIPINELSYDNKKKIVNNLVSKVDVTADNVDIIFKFQLA

SEQ ID NO: 6120 - protein, 469 aa, synthetic construct
MSYTTPVRAAVYLRISEDRSGEQLGVARQREDCLKLCDQRKWVPVEYLDNDVSASTGKRRPAYEQMLADITAGKIAAVVAWDLDRLHRRPIELEAFMSLADEKRLALATVAGDVDLATPQGRLVARLKGSVAAHETEHKKARQRRAARQKAERGHPNWSKAFGYLPGPNGPELDPRTAPLVRQAYADILAGASLGDVCRQWNGTGAFTITGRPWTTTTLSKFLRKPRNAGLRAYKGARYGPVDRDAIVGKAQWSPLVDEATFWAAQAVLDAPGRAPGRKSVRRHLLTGLAGCGKCGNHLAGSYRTDGRVVYVCKACYGVAILADNIEPILYHIVAERLAMPDAVGLLRREIHDAAEAETIRLELETLYGELDRLAVERAEGLLTARQVKISTDIVNAKITRLQARQQDQERSRVLDSIPLGTPQVAGVIAELSPDRFRAVLDVLAEVVVQPVGKSGRIFSPERVQVNWR

SEQ ID NO: 6121 - protein, 485 aa, synthetic construct
MTKKVAIYTRVSTTNQAEEGFSIGEQIDRLTKYAEAMGWQVSDTYTDAGFSGAKLERPAMQRLINDIGSKAFDTVLVYKLDRLSRSVRDTLYLVKDVFTKNKIDFISLSESIDTSSAMGSLFLTILSAINEFERENIKERMTMGKLGRAKSGKSMMWTKTAFGYYHNRKTGILEIVPPQAAIVEQIFTDYLSGISLTKLRDKLNESGHIGKDIPWSYRTLRQTLDNPVYCGYIKFKDSLFKGMHKPIVPYETYLKVQKELEERQQQAYVRNNNPRPFQAKYMLSGMARCGYCGAPLRIVLGHKRKDGSRTMKYHCANRFPRKTKGVTVYNDNKKCDSGTYDLSNLENTVIDNLIGFQENNDGLLKIINGNNRPILDASSFKKQISQIDKKIQKNSDLYLNDFITMDELKDRTDSLQAEKRLLKAKISENKFNDSTDVFELVKTQLGSIPINELSYDNKKKIVNNLVSKVDVTADNVDIIFKFQLA

SEQ ID NO: 6122 - protein, 469 aa, synthetic construct
MSYTTPVRAAVYLRISEDRSGEQLGVARQREDCLKLCDQRRWVPVEYLDNDVSASTGKRRPAYEQMLADITAGKIAAVVAWDLDRLHRRPIELEAFMSLADEKRLALATVAGDVDLATPQGRLVARLKGSVAAHETEHKKARQRRAARQKAERGLPNWSKAFGYLPGPNGPEPDPRTAPLVKQAYADILAGASLGDVCRQWNDAGAFTITGRPWTTTTLSKFLRKPRNAGLRAYKGARYGPVDRDAIVGKAQWSPLVDEVTFWAAQAVLDAPGRAPGRKSVRRHLLTGLAGCGKCGNRLAGSYRTDGRVVYVCKACHGVAILADNIEPILYHTVAERLAMPDAVDLLRREIHDAAEAEAIRLELETLYGELDRLAVERAEGLLTARQVKISTDIVNTKITKLQARQLDQERLRVFDGIPLGTPQVAGAIAELSPDRFRAVLDVLAEVVVQPVGRSGRIFNPERVQVNWR

SEQ ID NO: 6123 - protein, 452 aa, synthetic construct
MKAAIYIRVSTREQVENYSIQAQTEKLTALCRSKDWDVYDIFIDGGYSGSNMNRPALNEMLSKLHEIDAVVVYRLDRLSRSQRDTITLIEEYFLKNNVEFVSLSETLDTSSPFGRAMIGILSVFAQLERETIRDRMVMGKIKRIEAGLPLTTAKGRTFGYDVIDTKLYINEEEAKQLQLIYDIFEEEQSITFLQKRLKELGFKVRTYNRYNNWLTNDLYCGYVSYKDKVHVKGIHEPIISEEQFYRVQEIFTRMGKNPNMNRDSASLLNNLVVCSKCGLGFVHRRKDAMSRDKKYHYRYYSCKTYKHIHELEKCGNKIWRADKLEELIINRVNNYSVASRNVDKGDELDSLNEKLRIEHAKKKRLFDLYINGSYEVSELDSMMSDIDAQINCYESQIEANEELKKNEKFQDNLADLATVDFDSLEFREKQLYLKRLINKIYIDGEQVTIEWL

SEQ ID NO: 6124 - protein, 485 aa, synthetic construct
MTKKVAIYTRVSTTNQAEEGFSIDEQIDRLTKYAEAMGWQVSDTYTDAGLSGAKLERPAMQRLINDIENKAFDTVLVYKLDRLSRSVRDTLYLVKDVFTKNKIDFISLNESIDTSSAMGSLFLTILSAINEFERENIKERMTMGKLGRAKSGKSMMWTRTAFGYYHNRKTGILEIVPLQATIVEQIFTDYLSGISLTKLRDKLNESGHIGKDIPWSYRTLRQTLDNPVYCGYIKFKGSLFEGMHKPIIPYETYLKVQKELKKRQQQTYERNNNPRPFQAKYMLSGMARCGYCGAPLRIVLGHKRKDGSRTMKYHCANRFPRKTKGVTVYNDNKKCDSGTYDLRNLENTVIDILIGFQENNDSLLRIINGNNQPIQDTSSFKKQISRIDKKIQKNSDLYLNDFITMDELKDRTDSLQAEKKLLKAKISENKFNDSTEVFELVKTQLGSIPINELSYDNKKKIVNNLVSKVDVTAGNVDIIFKFQLA

SEQ ID NO: 6125 - protein, 452 aa, synthetic construct
MKAAIYIRVSTREQVENYSIQAQTEKLTALCRSKDWDVYDIFIDGGYSGSNMNRPALNEMLGKLHEIDAVVVYRLDRLSRSQRDTITLIEEYFLKNNVEFVSLSETLDTSSPFGRAMISILSVFAQLERETIRDRMVMGKIKRIEAGLPLTTAKGRTFGYDVIDTKLYINEEEAKQLQLIYDIFEEEQSITFLQKRLKKLGFKVRTYNRYNNWLTNDLYCGYVSYKDKVHVKGIHEPIISEEQFYRVQEIFTRMGKNPNMNRDSASLLNSLVVCSKCGLGFVHRRKDTMSHGRKYHYRYYCCKTYKHIHELEKCGNKIWRADKLEELIINRVSNYSLASRNVDKEDELDSLNEKLKIEHAKKKRLFDLYINGSYEVSELDSMMNDIDAQINYYESQIEANEELRKNKRIQEKLADLATADFDSLEFREKQLYLKSLINKIYIDGEQVTIEWL

SEQ ID NO: 6126 - protein, 485 aa, synthetic construct
MTKKVAIYTRVSTTNQAEEGFSIDEQIDRLTKYAEAMGWQVSDTYTDAGFSGAKLERPAMQRLINDIENKAFDTVLVYKLDRLSRSVRDTLYLVKDVFTKNKIDFISLNESIDTSSAMGSLFLTILSAINEFERENIKERMTMGKLGRAKSGKSMMWTKTAFGYYHNRKTGILEIVPLQATIVEQIFTDYLSGISLTKLRDKLNEGGHIGKDIPWSYRTLRQTLDNPVYCGYIRFKDSLFEGMHKPIIPYGTYLKVQKELEERQQQTYERNNNPRPFQAKYMLSGMARCGYCGAPLKIVLGHKRRDGSRTMKYHCANRFPRKTRGVTVYNNNKKCDSGTYDLSNLENTVIENLIGFQENNDSLLKIINGDNQPILDTSSFKKQISQIDKKIQKISDLYLNDFITMDELKDRTDSLQAEKKLLKAKISENKFNDSTDVFELVKTQLGSIPINELSYDNKKKIVNNLVSKVDVTADSVDIIFKFQLA

SEQ ID NO: 6127 - protein, 452 aa, synthetic construct
MKAAIYIRVSTQEQVGNYSIQAQTDKLTALCRSKGWDVYDIFIDGGYSGSNMNRPALNEMLSKLHEIDAVVVYRLDRLSRSQRDTTTLIEEYFLKNNVEFVSLSETLDTSSPFGRAMIGILSVFAQLERETIRDRMVMGKIKRIEAGLPLTTAKGRTFGYDVIDTRLYINEEEAKQLQLIYDIFEEEQSITSLQKRLKKLGFKVRTYNRYHNWLTNDLYCGYVSYKDKVHVKGIHEPIISEEQFYRVQEIFTRMGRNPNMNRDSASLLNSLVVCSKCGLGFVHRSKDTMSRGKKYHYRYYSCKTYKHTHELEKCGNKTWRADKLEELIINRVNSYSFASRNADREDELDSLNEKLKIEHAKKRRLFDLYINGSYEVSELDSTMNDIDAQINYYESQIEANEELKKNKKIQENLADLAAVDFDSLEFREKRLYLKSLINKIYIDDEQVTIEWL

SEQ ID NO: 6128 - protein, 452 aa, synthetic construct
MKAAIYIRVSTQEQVGNYSIQAQTEKLTALCRSKDWDVYDIFIDGGYSGSNMNRPALNEMLSKLHEIDAVVVYRLDRLSRSQRDTTTLIEEYFLKNNVEFVSLSETLDTSSPFGRAMIGILSVFAQLERETIRDRMVMGKIKRIEAGLPLTTAKGRTFGYDVIDTKLYINEEEAKQLQLIYDIFEEVQSITFLQKRLKKLGFKVRTYNRYSNWLTNDLYCGYVSYKDKVHVKGIHEPIISEEQFYRVQEIFTRMGKNPNMNRDSASLLNNLVVCGKCGLSFVHRSKDTMSRGKKYHYRYYSCKTYKHTHELEKCGNKTWRADKLEELIINRVNNYSFASRNVDKEGELDSLNEKLKIEHAKKRRLFDLYINGSYGVSELDSMMNDIDAQISYYESQIEANEELKKNKKIQENLANLATVDFDSLEFREKQLYLKSLINKIYIDGEQVTIEWL

SEQ ID NO: 6129 - protein, 452 aa, synthetic construct
MKAAIYIRVSTQEQVGNYSIQAQTEKLTALCRSKDWDVYDIFVDGGYSGSNMNRPALNEMLSKLHEIDAVVVYRLDRLSRSQRDTTTLIEEYFLKNNVEFVSLSETLDTSSPFGRAMIGILSVFAQLERETIRDRMMMGKIKRIEAGLPLTTAKGRTFGYDVIDTKLYINEEEAKQLQLIYDIFEEEQSITFLQKRLKKLGFRVRSYNRYNNWLTNDLYCGYVSYKDKVHVKGIHEPIISEEQFYRVQEIFTRMGRNPNMNRDSASLLNNLVVCGKCGLGFVHRSKDTMSRGKKYHYRYYSCKTYKHTHELEKCGNKTWRADKLEELIINRVNNYSFASRNVGREDELDSLHEKLKIEHAKKKRLFDLYINGGYEVSELDSMMSDIDAQINYYESQIEANEELKKNKKTQENLAELAAVDFDSLEFREKQLYLKSLINKIYIDDEQVTIEWL

SEQ ID NO: 6130 - protein, 452 aa, synthetic construct
MKAAIYIRVSTREQVENYSIQAQTEKLTALCRSKDWDVYDIFIDGGYSGSNMNRPALNEMLSKLQEIDAVVVYRLDRLSRSQRDTITLIEEYFLKNNVEFVSLSETLDTSSPFGRAMIGILSVFAQLERETIRDRMVMGKIKRIEAGLPLTTAKGRTFGYDVIDTRLYINEEEAKQLRLIYDIFEEEQSITFLQKRLKKLGFKVRSYNRYNNWLTNDLYCGYVSYKDKVHVKGIHEPIISEEQFYRVQEIFARMGKNPNMNRDSASLLNNLVVCSKCGLGFVHRRKDAMCRDKKYHYRYYSCKTYKHIHELEKCGNKIWRADKLEELIINRVNNYSIASRNADKEGELDSLNEKLKIGHAKKKRLFELYVNGSYEVSELDSMMNDIDAQIGYYESQIEANKGLRENKKIQENLANLATVDFDSLEFREKQLYLKSLISKIYIDGEQVTIEWL

SEQ ID NO: 6131 - protein, 452 aa, synthetic construct
MKAAIYIRVSTREQVENYSIQAQTEKLTALCRSKGWDVYDIFIDGGYSGSSMNRPALNEMLSKLHEIDAVVVYRLDRLSRSQRDTITLIEEHFLKNSVEFVSLSETLDTSSPFGRAMIGILSVFAQLERETIRDRMVMGKIKRIEAGLPLTTAKGRTFGYDVIDTKLYINEEEAKQLQLIYDIFEEEQSITFLQKRLKKLGFKVRTYNRYNNWLTNDLYCGYVSYKDKVHVKGIHEPIISEEQFYRVQEIFTRMGKNPNMNRDSASLLNNLVVCSRCGLGFVHRRKDAMSRDKKYHYRYYSCKTYKHIHELEKCGNKIWRADKLEELIINRVNNYSLASRNVDKEDELDSLNEKLKTEHAKKKRLFDLYINGSYDVSELDSMMNDIDAQINYYESQIEANEELKKNKKIQENLADLATVDFDSLEFREKQLYLKSLINKIYIDGEQVTIEWL

SEQ ID NO: 6132 - protein, 485 aa, synthetic construct
MTKKAAIYTRVSTTNQAEEGFSIDEQIDRLTKYAEAMGWQVSDTYTDAGFSGAKLERPAMQRLINDIENEAFDTVLVYKLDRLSRSVRDTLYLVKDVFTKNKIDFISLNESINTSSAMGSLFLTILSAINEFERENIKERMTMGKLGRAKSGKSMMWTKTAFGYYHNRKTGILEIVPLQATIVEQIFTDYLSGISLTKLRDKLNESGHIGKDIPWSYRTLRQTLDNPVYCGYIKFKGSLFEGMHKPIIPYETYLKVQKELEERQQQTYERNNNPRPFQAKYMLSGMARCGYCGAPLRIVLGHKRKDGSRTMKYHCANRFPRKTKGVTVYNGNKKCDSGTYDLSNLENTVIDNLIGFQENNDSLLKIINGNNQPILNTSSLKKQISQIDKKIQKNSDLYLNDFITMDELKNRTDSLQAEKKLLKAKISENKFNDGTDVFELVKTQLGSIPINELSYDNKKKIVNNLVSKVDVTADNVDIIFKFQLA

SEQ ID NO: 6133 - protein, 452 aa, synthetic construct
MKAAIYIRVSTREQVENYSIQAQTEKLTALCRSKDWDVYDIFIDGGYSGSNMNRPALNEMLSKLHEIDAVVVYRLDRLSRSQRDTITLIEEYFLKNNVEFVSLSETLDTSSPFGRAMIGILSVFAQLERETIRDRMVMGKIKRIEAGLPLTTAKGRTFGYDVIDTKLYINEEEAKQLQLIYDIFEEEQSITLLQKRLKILGFKVRTYNRYNNWLTNDLYCGYVSYKDKVHVKGIHEPIISEEQFYRVQEIFTRMGKNPNMNRGSASLLNNLVVCSKCGRGFVHRRKDAMSRDKKYRYRYYSCKTYKHIHELEKCGNKIWRADKLEELIINRVNNYSVASRNVDKEDELDSLNEKLKIEHAKKKRLFDLYINGSYEVSELDSMMSDIDAQISYYESQIEANVELKKNKKIQENLADLATVDFDSLEFREKQLYLKSLINKIYIDGEQVTIEWL

SEQ ID NO: 6134 - protein, 485 aa, synthetic construct
MTKKVAIYTRVSTTNQAEEGFSIDEQIDRLTKYAEAMGWQVSDTYTDAGFSGAKLERPAMQRLINDIESKAFDTVLVYKLDRLSRSVRDTLHLVKDVFTKNKIDFISLNESISTSSAMGSLFLTILSAINEFERENIKERMTMGKLGRAKSGKSMMWTKTAFGYYHNRETGILEIVPLQATIVEQIFTDYLSGISLTKLRDKLNESGHIGKDIPWSYRTLRQTLDNPVYCGYIKFKDSLFVGLHKPIIPYETYLEVQKELEERQQQTYERNNNPRPFQAKYMLSGMARCGYCGAPLKIVLGHKRKDGSRTMKYHCANRFPRKTKGVTVYNDNKKCDSGTYDLSNLENTVIDNLIGFQENNDSLLKIINGNNQPILDTSSLKKQISQIDKRIQKNSDLYLNDFITMDELKDRTDSLLAEKKLLKAKISENKFSDSTDVFELVKTQLGSVPINELSYDSKKKIVNSLVSKVDVTADNVDIIFKFQLA

SEQ ID NO: 6135 - protein, 469 aa, synthetic construct
MSYTTPVRAAVYLRISEDRSGEQLGVARQREDCLKLCDQRNWVPVEYLDNDVSASTGKRRPAYEQMLADITAGKIAAVVAWDLDRLHRRPIELEAFMSLADEKRLALATVAGDVDLATPQGRLVARLKGSVAAHETEHKKARQRRAARQKAERGHPNWSKAFGYLPGLNGPEPDPRTAPLVKQAYADILAGASLGDVCRQWNAAGAFTITGRPWTTTTLSKFLRKPRNAGLRAYKGARYGPVDRDAIVGEAQWSPLVDEATFWAAQAVLDAPGRAPGRKSVRRHLLTGLAGCGKCGNHLAGSYRTDGRVVYVCKACHGVTILADNIEPILYHIVAERLAMPDAVDLLRREIHDAAEAETVRLELETLYDELDRLAVERAEGLLTARQVKISTDIMNAKITKLQARQLDQERLRVFDGIPLGTPQVAGMIAELSPDRFRAVLDVLAEVVVQPVGKSGRIFNPERVQVNWR

SEQ ID NO: 6136 - protein, 452 aa, synthetic construct
MRAAIYIRVSTREQVENYSIQAQTEKLTALCRSKDWDVYDIFIDGGYSGSNMNRPALNDMLSKLHEIDAVVVYRLDRLSRSQRDTITLIEEYFLKNNVEFVSLSETLDTSSPFGRAMIGILSVFAQLERETIRDRMVMGKIKRVEAGLPLTTAKGRTFGYDVIDTKLYINEEEARQLRLIYDIFEEEQSITFLQKRLKQLGFKVRSYNRYNNWLTNDLYCGYVSYKDKVHVKGIHEPIISEEQFYRVQEIFTRMGKNPNMNRDSASLLSNLVVCSKCGLGFVHRRKDTVSRGKKYHYRYYSCKTYKHIHELEKCGNKIWRADKLEELIIDRVNNYSFASRNVDKEDELDSLNEKLRLEHAKKKRLLDLYINGSYEVSELDCMMNDIDAQISYYESQIEANEELKKDKKIQESLANLATVDYDSLEFREKQLYLKSLINKIYIDGEQVTIEWL

SEQ ID NO: 6137 - protein, 452 aa, synthetic construct
MKAAIYIRVSTREQVENYSIQAQTEKLTALCRSKDWDVYDIFIDGGYSGSNMNRPALNEMLSKLHEIDAVVVYRLDRLSRSQRDTITLIEEYFLKNNVEFVSLSETLDTSSPFGRAMIGILSVFAQLERETIRDRMVMGKIKRIEAGLPLTTAKGRTFGYDVIDTKLYINEEEARQLQLIYDIFEEEQSITFLQKRLKKLGFKVRTYNRYINWLTNDLYCGYVSYKDKVHVKGIHEPIISEEQFYRVQEIFTRMGKNPNMNRDSASLLNNLVVCSKCGLGFVHRRKDTMSHGKKYHYRYYSCKTYKHIHELEKCGNKIWRADKLEELVINRVNNYSFASRNADKEDELDSLNEKLKIEHAKKKRLFDLYINGSYEMSELDSMMNDIDAQINYYESQIEANEELKKNKKIQENLAYLATVDFDSLEFREKQLYLKSLINKIYIDGEQVTIEWL

SEQ ID NO: 6138 - protein, 469 aa, synthetic construct
MSYTTPVRAAVYLRISEDRSGEQLGVARQREDCLKLCGQRKWVPVEYLDNDVSASTGKRRPAYEQMLADITAGKIAAVVAWDLDRLHRRPIELEAFMSLADEKRLALATVAGDVDLATPQGRLVARLKGCVAAHETEHKKARQRRAARQKAERGLPNWSKAFGYLPGPNGPEPDPRTAPLVKQAYADILAGASLGDVCRQWNDAGAFTITGRPWTTTALSKFLRKPRNAGLRAYKGARYGPVDRDAIVGKAQWSPLVDEATFWAAQAVLDAPGRAPGRKSVRRHLLTGLAGCGKCGNHLAGSYRTDGRVVYVCKACHGVSILADNIEPILYRIVAERLAMPDAVDLLRREIHDAAGAETTRLELETLYGELDRLAVERAEGLLTARQVKISTDIVNAKITKLQARQLDQERLRVFGGIPLGTPQVAGVIAELSPDRFRAVLDVLAEVVVQPVGKSGRVFNPERVQVNWR

SEQ ID NO: 6139 - protein, 452 aa, synthetic construct
MKAAIYIRVSTQEQVENYSIQAQTEKLTALCRSKDWDVYDIFIDGGYSGSNMNRPALNEMLSKLHEIDAVVVYRLDRLSRSQRDTTTLIEEYFLKNNVEFVSLSETLDTSSPFGRAMIGILSVFAQLERETIRDRVVMGKIKRIEAGLPLTTAKGRTFGYDVIDTKLYINEEEAKQLRLIYDIFEEEQSITFLQKRLKKLGFKVRTYNRYNNWLTNDLYCGYVSYKDKVHVKGIHEPIISEEQFYRVQEIFTRMGKNPNMNRDSASLLSNLVVCSKCGLGFVHRSKDTMSRGKKYHYRYYSCKTYKHTHELEKCGNKTWRADKLEELIINRVNNYSFASRYVGREDELDSLNEKLKIEHAKKKRLFDLYINGSYEVSELDSMMNDIDAQINYYESQIEANEELKKNKKIQENLADLATVDFDSLEFREKQLYLKSLINKIYIDGEQVTIEWL

SEQ ID NO: 6140 - protein, 452 aa, synthetic construct
MKAAIYIRVSTQEQVGNYSIQAQTEKLTALCRSKDWDVYDIFIDGGYSGSNMNRPALNEMLSKLHEIDAVVVYRLDRLSRSQRDTTTLIEEYFLKNNVEFVSLSETLDTSSPFGRAMIGILSVFAQLERETIRDRMVMGKIKRIEAGLPLTTAKGRTFGYDVIDTKLYVNEEEAKQLRLIYDIFEEEQSITSLQKRLKKLGFKVRTYNRYNNWLTNDLYCGYVSYKDKVHVKGIHEPIISEEQFYRVQEIFTRMGKNPNVNRDSASLLNNLVVCSKCGLGFVHRSKDTMSRGKKYHYRYYSCKTYKHTYELEKCGNKTWRADKLEELIISRVNNYSFASRNVDKEDELDSLNEKLKIEHAKKKRLFDLYINGSYEVSELDSMMNDIDAQIDYYESQIEANEELKKNKKIQETLADLATVDFDSLEFREKQLYLKSLISKIYIDGEQVTIEWL

SEQ ID NO: 6141 - protein, 469 aa, synthetic construct
MSYTTPVRAAVYLRISEDRSGEQLGVARQREDCLKLCDQRKWVPVEYLDNDVSASTGKRRPAYEQMLADITAGKIAAVVAWDLDRLHRRPIELEAFMSLADEKRLALATVAGDVDLATPQGRLVARLKGSVAAHETEHKKARQRRAARQKAERGYPNWSKAFGYLPGPNGPEPDPRTAPLVKQAYADILAGASLGDVCRQWNDAGAFTITGRPWTTTTLSKFLRKPRNAGLRAYKGARYGPVDRDAIVGKAQWSPLVDEATFWAAQAVLDAPGRAPGRKSVRRHLLTGLAGCGKCGNHLAGSHRTDGRVVYVCKACHGVAILADNIEPILYHIVAERLAMPDAVDLLRHEIHDAAEAETIRLGLETLYGELDRLAVERAEGLLTARQVKISTDIVNAKITELQARQLDQERLRVLDGIPLGTPQVAGMIAELSPDRFRAVLDVLAEVVVQPVGKSGRIFNPKRVQVNWR

SEQ ID NO: 6142 - protein, 452 aa, synthetic construct
MKAAIYIRVSTREQVENYSIQAQTEKLTALCRSKDWDVYDIFIDGGYSGSNMNRPALNGMLSKLHEIDAVVVYRLDRLSRSQRDTITLIEEYFLKNNVEFVSLSETLDTSSPFGRAMIGILSVFAQLERETIRDRMVMGKIKRIEAGLPLTTAKGRTFGYDVIDTKLYINEEEARQLRLIYDIFEEEQSITFLQKRLKKLGFKVHTYNRYNNWLTNDLYCGYVSYKDRVHVKGIHEPIISEEQFYRVQEIFTRMGKNPNMNRDSASLLSNLVVCSKCGLGFVHRRKDTTSRGKKYHYRYYSCKTYKHIHELEKCGNKIWRADKLEELIINRVSNYSLASRNVDKEDELDSLNEKLRIEHARKKRLFDLYINGSYEVSELDSMMNDIDARINYYESQIEANEELEKNKKIQENLANLATVDYDSLEFREKQLYLKSLINKIYIDGEQVTIEWL

SEQ ID NO: 6143 - protein, 469 aa, synthetic construct
MSYTTPVRAAVYLRISEDRSGEQLGVARQREDCLKLCGQRKWEPVEYLDNDVSASTGKRRPAYEQMLADITAGKVAAVVAWDLDRLHRRPIELEAFMSLADEKRLALATVAGDVDLATPQGRLVARLKGSVAAHETEHKKARQRRAARQKAERGYPNWSKAFGYLPGPNGPEPDPRTAPLVKQAYADILAGASLGDVCRQWNDVGAFTITGRPWTTTTLSKFLRKPRNAGLRAYKGARYGPVDRDAIVGKAQWSPLVDEATFWAAQAVLDAPGRAPGRKSVRRHLLTGLAGCGKCGNHLAGSYRTDGRVVYVCKACHGVAILADNIEPILYHIVAERLAMPDAVDLLRREIHDAAEAETTRLELETLYGELDRLAVERAEGLLTARQVKISTDIVNAKITKLQARQQDQERLRVLDGIPLGTPRVAGMIAELSPDRFRAVLDVLAEVVVQPVGKGGRIFNPERVQVNWR

SEQ ID NO: 6144 - protein, 469 aa, synthetic construct
MSYTTLVHAAVYLRISEDRSGEQLGVARQREDCLKLCDQRKWVPVEYLDNDVSASTGKRRPAYEQMLADITAGKIAAVVAWDLDRLHRRPIELEAFMSLADEKRLALATVAGDVDLATPQGRLVARLKGSVAAHETEHKKARQRRAARQKAERGYPNWSKAFGYLPGPNGPEPDPRTAPLVKQAYADILAGASLGGVCRQWNDAGAFTITGRPWTTTTLSKFLRKPRNAGLRAYKGARYGPVDRDAIVGKAQWSPLVDEATFWAAQAVLDAPGRAPGRKSVRRHLLTGLAGCGKCGNHLAGSYRTDGRVVYVCKACHGVAILADNIEPILYHIVAERLAMPAAVDLLRREIRDGAEAETIRLELGTLYGELDRLAVERAEGLLTARQVKISTDIVNAKITKLQARQLDQERLRVLDGIPLGTSQVAGVIAELSPDRFRAVLDVLAEVVVQPVGKSGRIFNPERVQVNWR

SEQ ID NO: 6145 - protein, 469 aa, synthetic construct
MSYTTPVRAAVYLRISEDRSGEQLGVARQREDCLKLCDQRKWEPAEYLDNDVSASTGKRRPAYEQMLADITAGKIAAVVAWDLDRLHRRPIELEAFMSLADEKRLALATVAGDVDLATPQGRLVARLKGSVAAHETEHKKARQRRAARQKAERGHPNWSKAFGYLPGPNGPEPDPRTAPLVKQAYADILAGASLGDVCRQWNAAGAFTITGRPWTTTTLSKFLRKPRNAGLRAYKGARYGPVDRDAIVGKAQWCPLVDEATFWAAQAVLDAPGRAPGRKSVRRHLLTGLAGCGKCGNHLAGSYRTDGRVVYVCKACHGVAILADNIEPILYHIVAERLAKPDAVDLLRREVHDAAEAETIRLELETLYGELDCLAVERAEGLLTARQVKISTDIVNAKITKLQARQLDQERLRVFDGIPLGTPQVAGMIAELSPDRFRAVLGVLAEVVVRPVGKSGKIFNPDRVQVNWR

SEQ ID NO: 6146 - protein, 452 aa, synthetic construct
MKAAIYIRVSTQEQVGNYSIQAQTEKLTALCRSKGWDVYDIFIDGGYSGSNMNRPALNEMLSKLHEIDAVVVYRLDRLSRSQRDTTTLIEEYFLKNNVEFVSLSETLDTSSPFGRAMIGILSVFAQLERETIRDRMVMGKIKRIEAGLPLTTAKGRTFGYDVIDTKLYINEEEARQLQLIYDIFEEEQSITSLQKRLKQLGFKVRTYNRYNNWLTNDLYCGYVSYKDKVHVKGIHEPIISEEQFYRVQEIFARMGKNPNMNRDSASLLNNLVVCGKCGLGFVHRSKDTMSRGKRYHYRYYSCKTYKHTHELEKCGNKTWRADKLEELIINRVNNYSFASRNVDKEDELDGLNEKLKIEYAKKKRLFDLYINGSYEVSELDSMMNDIDAQIDYYEGQIEAIEEQKKNKKIQENLADLATVDFDSLEFREKQLYLKSLINKVYIDGEQVTIEWL

SEQ ID NO: 6147 - protein, 469 aa, synthetic construct
MSYTTPVRAAVYLRISEDRSGEQLGVARQREDCLKLCGQRKWVPVEYLDNDVSASTGKRRPAYEQMLADITAGKIAAVVAWDLDRLHRRPIELEAFMSLADEKRLALATVAGDVDLATPQGRLVARLKGCVAAHETEHKKARQRRAARQKAERGHPNWSKAFGYLPGPNGPEPDPRTAPLVKQAYADILAGASLGDVCRQWNDADAFTITGRPWTTTTLSKFLRKPRNAGLRAYKGARYGPVDRDAIVGKAQWSPLVDEATFWAAQAVLDAPGRAPGRKSVRRHLLTGLAGCGKCGSHLAGSYRTDGRVVYVCKACHGVSILADNIEPILYHIVAERLAMPNAVDLLRREIHGAAETETIRLELETLHGELDRLAIERAEGLLTARQVKISTDIMNAKITELQARQLDQERLRVFDGIPLGTPQVAGMIAELSPDRFRAVLDVLAEVVVRPVGKSGRIFNPERVQVNWR

SEQ ID NO: 6148 - protein, 452 aa, synthetic construct
MKAAIYIRVSTREQVENYSIQAQTEKLTALCRSKDWDVYDIFIDGGYSGSNMNRPALNEMLSKLHEIDAVVVYRLDRLSRSQRDTITLIEEYFLKNNVEFVSLSETLDTSSPFGRAMIGILSVFAQLERETIRDRMVMGKIKRIEAGLPLTTAKGRTFGYDVIDTKLYINEEEAKQLQLIYDIFEEEQSITFLQKRLKKLGFKVHTYNRYNNWLTNDLYCGYVSYKDKVHVKGIHEPIISEEQFYRVQEIFTRTGKNPNMNRDSASLLNNLVVCSKCGLGFVHRRKDTMSRGKKYHYRYYSCKTYKHTHELKKCGNKIWRADELEELIINRVKSYSLASRNVDKEDELDSLNEKLKIEHAKKRRLFDLYINGSYEVSELDCMMNDIDAQINYYESQIETNEELKKNKKIQENLADLATVDYDSLEFREKQLYLKSLINKIYIDGEQVTIEWL

SEQ ID NO: 6149 - protein, 452 aa, synthetic construct
MKAAIYIRVSTREQVENYSIQAQTEKLTALCRSKDWDVYDIFIDGGYSGSNMNRPALNEMLSKLHEIDAVVVYRLDRLSRSQRDTITLIEEYFLKNNVEFVSLSETLDTSSPFGRAMIGILSVFAQLERETIRDRMVMGKIKRIEAGLPLTTAKGRTFGYDVIDTKLYINEEEAKQLRLIYDIFEEEQSITFLQKRLKKLGFKVRTYNRYNNWLTNDLYCGYVSYKDKVHVKGIHEPIISEEQFYRVQEIFTRMGKNPNMNRDSASLLNNLVVCGKCGLGFVHRRKDIMSRGKKYHYRYYSCKTYKHIHELEKCGNKIWRADKLEELIINRVSNYSYASRNADKEDELDSLNEKLKIEHAKKKRLFDLYINGSYEVSELDSMMNDIDAQINNYESQIEANEELRKNKKIQENLAHLATVDFDSLEFREKQLYLKSLINKIYIDGEQVTIEWL

SEQ ID NO: 6150 - protein, 469 aa, synthetic construct
MSYTTPVRAAVYLRISEDRSGEQLGVTRQREDCLKLCDQRKWVPVEYLDNDVSASTGKRRPAYEQMLADITAGKIAAVVAWDLDRLHRRPIELEAFMSLADEKRLALATVAGDVNLATPQGRLVARLKGCVAAHETEHKKARQRRAARQKAERGHPNWSKAFGYLPGPNGPEPDPRTAPLVKRAYADILAGASLGDVCRQWNDAGAFTITGRPWTTTALSKFLRKPRNAGLRAYKGARYGPVDRDAIVGKAQWSPLVDEATFWAAQAVLDAPGRAPGRKSVRRHLLTGLAGCGKCGNHLAGSYRTDGQVVYVCKACHGVSILAVNIEPILYHVVAERLAMPDAVDLLRREIHDAAEAETIRLELETLYGELDRLAVERAEGLLTARQVKISTDIVNAKITKLQTRQLDQERLRVFDGIPLGTPQVAGTIAELSPDRFRAVLDVLAEVVVQPVGKSGRIFNPERVQVNWR

SEQ ID NO: 6151 - protein, 469 aa, synthetic construct
MSYTTPVRAAVYLRISEDRSGEQLGAARQREDCLELCGQRKWEPVEYLDNDVSASTGKRRPAYERMLADITAGKIAAVVAWDLDRLHRRPIELEAFMSLADEKRLALATVAGDVDLATPQGRLVARLKGSVAAHETEHKKARQRRAARQKAERGYPNWSKAFGYLPGPNGPEPDPRTAPLVKQAYADILAGASLGDVCRQWNDAGAFTITGRPWTTTTLSKFLRKPRNAGLRTYKGARYGPVDRDAIVGKAQWSPLVDGATFWAAQAVLDAPGRAPGRKSVRRHLLTGLAGCGKCGNRLAGSHRTDGRVVYVCKACHGVAILADNIEPILYHIVAERLAMPNAVDLLRREIHDAAEAETIRLELETLYGELDRLAVERAEGLLTARQVKISTDIVNAKITKLQTRLLDQERLRVLDGIPLGTPQVAGMIAELSPDRFRAVLDVLAEVVVQPVGKSGRIFNPERVQVNWR

SEQ ID NO: 6152 - protein, 469 aa, synthetic construct
MCYTTPVRAAVYLRISEDRSGEQLGVARQREDCLKLCGQRKWVPVEYLDNDVSASTGKRRPAYEQMLADITAGKIAAVVAWDLDRLHRRPTELEAFMSLADEKHLALATVAGDVDLATPQGRLVARLKASVAAHETEHKKARQRRAARQKAERGLPNWSKAFGYLPGPNGPEPDPRTAPLVKQAYADILAGASLGDVCRQWNDAGAFTITGRPWTTTTLSKFLRKPRNAGIRAYKGTRYGPVDRNAIVGKAQWSPLVDEAIFWAAQAVLDAPGRAPGRKSVRRHLLTGLAGCGKCGNHLAGSYRTDGRVVYVCKACHGVSILAVNIEPILYRIVAERLAMPDAVDLLRREIHDAAEAETIRLELETLYGELDRLAVERAEGLLTARQVKISTDIVNAKITKLQARQQDQERLRVLDGIPLGTPQVAGVIAELSPDRFRAVLDALAVVAVQPVGKGGKTSNPERVQVNWR

SEQ ID NO: 6153 - protein, 452 aa, synthetic construct
MKAAIYIRVSTREQVENYSIQAQTEKLTALCRSKDWDVYDIFIDGGYSGSNMNRPALNEMLSKLHEIDAVVVYRLDRLSRSQRDTITLIEEYFLKNNVEFVSLSETLDTSSPFGRAMIGILSVFAQLERETIRDRMVMGKIKRIEAGLPLTTAKGRTFGYDVIDTKLYVNEEEAKQLQLIYDIFEEEQSITFLQKRLKKLGFKVRTYSCYNNWLTNDLYCGYVSYKDKVHVKGIHEPIISEEQFYRVQEIFTRMGKNPNMNRDSASLLSNLVVCSKCGLGFVHRRKGTTSRGKKYHYRYYSCKTYKHIHELEKCGNKIWRADKLEELIINRVNNYSLTSRNVDKEDELDSLNEKLKIEHAKKKRLFDLYINGSYEVSELDSMMNDIDAQINYYESRIEANEELRKNKKIQESLANLATVDYDSLEFREKRLYLKSLINKIYIDGEQVTIEWL

SEQ ID NO: 6154 - protein, 452 aa, synthetic construct
MKAAIYIRVSTREQVENYSIQAQTEKLTALCRSKGWGVYDIFIDGGYSGSNMNRPALNEMLSKLHEIDAVVVYRLDRLSRSQRDTITLIEEYFLKNNVEFVSLSETLDTSSPFGRAMIGILSVFAQLERETIRDRMVMGKIKRIEAGLPLTTAKGRTFGYDVIDTKLYINEEEAEQLQLIYDIFEEEQSITFLQKRLKKLGFKVHTYNRYNGWLTNDLYCGYVSYKDKVHVKGIHEPIISEEQFYRVQEIFTRMGKNPNMNRDSASLLNNLVVCSKCGLGFVHRRKDTTSRGKRYHYRYYSCKTYKHIHELEKCGNKIWRADKLEELIINRVNNYSFASRSVDKEDELDSLNEKLKVERAKKKRLFDLYIDGSYEVSELDSMMNDIDAQINYYESQIEANEELRENKKIQENLADLATVDFDSLEFREKQLYLKSLINKIYIDGEQVTIEWL

SEQ ID NO: 6155 - protein, 452 aa, synthetic construct
MKAAIYIRVSTQEQVGNYSIQAQTEKLTALCRSKDWDVYDIFIDGGYSGSNMNRPALNEMLSRLHEIDAVVVYRLDRLSRSQRDTTTLIEEYFLKNNVEFVSLSETLDTSSPFGRAMIGILSVFAQLERETIRDRMVMGKIKRIESGLPLTTAKGRTFGYDVIDTKLYINEEEAKQLQLIYDIFEEERSITSLQKRLKKLGFKVRAYNRYNNWLTNDLYCGYVSYKDKVHVKGIHEPIISEEQFYRVQEILTRMGKNPNMNRDSASLLNNLVVCSKCGLGFVHRSKDTMSRGKKYHYRYYSCKTYKRTHELEKCGNKTWRADKLEELIINRVNNYSFASRNADKDDELDSLNEKLEIEHAKKRRLFDLYINGSYEVSELDSMMNDIDAQINYYESQIEANEELRKNRKIQESLAALATVDFGSLEFREKQLYLKSLINKIYIDGEQVTIEWL

SEQ ID NO: 6156 - protein, 452 aa, synthetic construct
MKAAIYIRVSTREQVENYSIQAQTEKLTALCRSKDWDVYDIFVDGGYSGSNMNRPALNEMLSKLHEIDAVVVYRLDRLSRSQRDTITLIEEYFLKNNVEFVSLSETLDTSSPFGRAMIGILSVFAQLERETIRDRMVMGKIKRIEAGLPLTTAKGRTFGYDVIDTKLYINEEEAKQLRLIYDIFEEEQSITSLQRRLKKLGFKVHTYNRYNNWLTNDLYCGYVSYKDKVHVKGIHEPIISEEQFYRVQEIFTRMGKNPNMNRDSASLLSNLVVCSKCGLGFVHRRKDAMSRDKKYHYRYYSCKTYKHIHELEKCGNKIWRADRLEELIINRVNSYSLASRNVDKEDELDSLNEKLKIEHAKKKRLFELYINGSYEVSELDSMMNDIDAQINYYESQIAANEELKKNKKIQENPADLATVDFDSLEFREKQLYLKSLINKIYIDGEQVTIEWL

SEQ ID NO: 6157 - protein, 485 aa, synthetic construct
MTKKVAIYTRVSTTNQAEEGFSIDEQIDRLTKYVEAMGWQVNDTYTDAGFSGAKLERPAMQRLINDIENKAFDTVLVYKLDRLSRSVRDTLYLVKDVFTKNKIDFISLNESINTSSAMGSLFLTILSAINEFERENIKERMTMGKLGRAKSGKSMMWTKTAFGYYHNRKTGILEIVPLQATIVEQIFTDYLSGISLTKLRDKLNESGHIGKDIPWSYRTLRQTLDNPVYCGYIKFKGSLFEGMHKPIIPYETYLKVQKELEERQQQTYERNNNPRPFQAKYMLSGMARCGYCGAPLKIVLGRKRKDGSRTMKYHCANRFPRKTKGVTVYNDNKKCGSGTYDLSNLENTVIDILIGFQENNASLLKIINGNNQPILDTSSFKKQISQIDKKIQKNSDLYLNDFITMDELKNRTDSLQAEKKLLKAKIGENKFNDSTDVFELVKTRLGSIPINELSYDNKKKIVNNLVSKVDVTADNVDIIFKFQLA

SEQ ID NO: 6158 - protein, 452 aa, synthetic construct
MKAAIYIRVSTREQVENYSIQAQTERLTALCRSKDWDVYDIFIDGGYSGSNMNRPALNEMLSKLHEIDAVVVYRLDRLSRSQRDTITLIEEYFLKNNVEFVSLSETLDTSSPFGRAMIGILSVFAQLERETIRDRTVMGKIKRVEAGLPLTTAKGRTFGYDVIDTKLYINEEEAKQLRLIYDIFEEEQSITFLQKRLKKLGFKVRTYSRYNNWLTNDLYCGYVSYKDKVHVKGIHEPIISEDQFYRVQEIFTRMGKNPNMNRDSASLLNNLVVCSKCGLGFVHRRKDTMSRGKKYHYRYYSCKTYKHIHELEKCGNKIWRADKLEELIINRVNNYSFASRNVDKEDELDSLNEKLKIEHAKKKRLFDLYINGSYEVGELDSMMNDINAQINYYESQIEANEELKKNKKIQENLAGLATVDYDSLEFREKQLYLKSLINKIYIDGEQVTIEWL

SEQ ID NO: 6159 - protein, 469 aa, synthetic construct
MSYTTPVRAAVYLRISEDRSGEQLGVARQREDCLKLCDQRKWVPVEYLDNDVSASTGKRRPAYEQMLADITAGKIAAVVAWDLDRLHRRPIELEAFMSLAEEKRLALATVAGDVDLATPQGRLVARLKGSVAAHETEHKKARQRRAARQKAERGYPNWSRAFGYLPGPNGPEPDPRTAPLVKQAYADILAGASLGDVCRQWNGAGAFTITGRSWTPTTLSKFLRKPRNAGLRAYKGARYGPVDRDAIVGKAQWSPLVDEATFWAAQAVLDAPGRAPGRKSVRRHLLTGLAGCGKCGHHLAGSYRTDGRVVYVCKACYGVAILADNIEPILYHIVAERLAMPNAVDLLRREIHDAAEAETIRLELEALYSELDRLAVERAEGLLTARQVKISTDTVNAKITKLQARQLDQERLRVFDGIPLGTPQVAGMIAELSPDRFRAVLDVLAEVVVQPVGKSGRIFNPERVQVNWR

SEQ ID NO: 6160 - protein, 452 aa, synthetic construct
MKAAIYIRVSTREQVENYSIQAQTEKLTALCRSKDWDVYDIFVDGGYSGSNMSRPALNEMLSKLHEIDAVVVYRLDRLSRSQRDTITLIEEYFLKNNVEFVSLSETLDTSSPFGRAMIGILSVFAQLERETIRDRMVMGKIKRIEAGLPLTTAKGRTFGYDVIDTKLYINEEEAKQLQLIYDIFEEEQSITSLQKRLKKLGFKVRTYNRYNSWLTNDLYCGYVSYKDKVHVKGIHEPIISEEQFYRVQEIFTRMGKNPNMNRDSASLLNNLVVCSKCGLGFVHRRKDTTSRGKKYHYRYYSCKTYKHTHELEKCGNKIWRADKLEELIINRVNNYSFASRNVDKEDELDSLNEKLKIEHAKRKRLLDLYINGSYEVSELDSMMSDIDAQINYYESQIEANEELKKNKKIQENLANLASVDYDSLEFREKQLYLKSLINKIYIDGEQVTVEWL

SEQ ID NO: 6161 - protein, 452 aa, synthetic construct
MKAAIYIRVSTREQVENYSIQAQTEKLAALCRSKDWDVYDTFIDGGYSGSNMNRPALNEMLSKLHEIDAVVVYRLDRLSRSQRDTITLIEEYFLKNNVEFVSLSETLDTSSPFGRAMIGILSVFAQLERETIRDRMVMGKIKRIEAGLPLTTAKGRTFGYDVIDTKLYINEEEAKQLQLIYDIFEEERSITFLQKRLKKLGFKVRTYNRYNSWLTNDLYCGYVSYKDKVHVKGIHEPIISEEQFYRVQEIFTRMGKNPNMNRDSASLLNNLVVCSKCGLGFVHRRKDTVSRGKKYRYRYYSCKTYKHTHELEKCGNKIWRADKLEELVINRVNNYSIVSRNVDKEDELDSLNEKLKIEHAKKRRLFDLYINGSYEVSELDSMMSDIDAQINYYESQIEANEELKKNKKIQENLADLAAVDYDSLEFREKQLYLKSLINKIYIDGEQVTIEWL

SEQ ID NO: 6162 - protein, 469 aa, synthetic construct
MSYTTPVRAAVYLRISEDRSGEQLGVARQREDCLKLCGQRKWVPVEYLDNDVSASTGKRRPAYEQMLADITAGKIAAVVAWDLDRLHRRPIELEAFMSLADEKRLALATVAGDVDLATPQGRLVARLKGCVAAHETEHKKARQRRAARQKAERGLPNWSKAFGYLPGPNGPEPDPRTAPLVKQAYADILAGASLGDVCRQWNDAGAFTITGRPWTTTALSKFLRKPRNAGLRAYKGARFGPVDRDAIVGKAQWSPLVDEATFWAAQAVLDAPGRAPGRKSVRRHLLTGLAGCGKCGNHLAGSYRTNGRVVYVCKACHGVAILADNIEPILYRIVAERLAMPDAVDLLRREVHDAAEAETIRLELETLYGELDRLAVERAEGLLTARQVKISTDIVNAKITKLQARQLDQERLRVLDGIPLGTPQVAGMIAELSPDRFRAVLDVLAEVIVQPVGKRGRVFNPERVQVNWR

SEQ ID NO: 6163 - protein, 469 aa, synthetic construct
MSYTTPVRAAVYLRISEDRSGEQLGVARQREDCLKLCDQRKWVPVEYLDNDVSASTGKRRPAYEQMLADITAGKIAAVVAWDLDRLHRRPIELEAFMSLADEKRLALATVAGDVDLATPQGRLVARLKGSVAAHETEHKKARQRRAARQKAERGHPNWSKAFGYLPGPNGPEPDPRTAPLVKQAYADILAGASLGDVCRRWNDAGAFTITGKPWTTTALSKFLRKPRNAGLRAYKGARYGPVDRDAIVGKAQWSPLVDEATFWAAQAVLDAPGRAPGRKSVRRHLLTGLAGCGKCGNHLAGSYRTDGRVVYVCKACHGVAILADNIEPILYHIVAERLAMPNAVDLLRREIHDVAEAETIRLELETLYGELDRLAVERAEGLLTARQVKISTDIVNAKITKLQARQLDQERLRVLDGIPLGTPLVAGMITELSPDRFRAVLDVLAEVVVQPVGKSGRIFNPERVQVNWR

SEQ ID NO: 6164 - protein, 485 aa, synthetic construct
MTKKVAIYTRVSTTNQAEEGFSIDEQIDRLTKYAEAMGWQVSDTYTDAGFSGAKLERPAMQRLINDIENKAFDTVLVYKLDRLSRSVRDTLHLVKDVFTKNKIDFISLNESIDTSSAMGSLFLTILSAINEFERENIKERMTMGKLGRAKSGKSMMWTKTAFGYYHNRKTGILEIVPLQASIVEQIFTDYLSGISLTKLRDKLNESGHIGKDIPWSYRTLRQTLDNPVYCGYIKFKDSLFEGMHKPIIPYETYLKVQKELEERQRQTYERNNNPRPFQAKYMLSGMARCGYCGAPLRIVLGHKRRDGSRTMKYHCANRFPRKTKGITVYNGNKKCDSGTYDLSNLENTVIDNLIGFQENNDSLLKIINGNNQPTLDTSSLKKQISQIDKKIQKNSDLYLNDFITMDELKDRTDSLQAEKKLLKAKISENKFNDSTDVFELVRTQLGSIPINELSYDNKKKIVNNLVSKVDVTADNVDIIFKFQLA

SEQ ID NO: 6165 - protein, 485 aa, synthetic construct
MTKKVAIYTRVSTTNQAEEGFSIDEQIDRLTKYAEAMGWQVSDTYTDAGFSGAKLERPAMQRLVNDIETKAFDTVLVYKLDRLSRSVRDTLYLVKDVFTKNKIDFVSLSESIDTSSAMGSLFLTILSAINEFERENIKERMTMGKLGRAKSGKSMMWTKTAFGYYHNRKTGILEIVPLQATIVEQIFTDYLSGISLTKLRDKLNESGHIGKDIPWSYRTLRQTLDNPVYCGYIKFKGSLFEGMHKPIIPYETYLKVQRELEERQQQTYERNNNPRPFQAKYMLSGMARCGYCGAPLRIVLGHKRKDGSRTMKYHCANRFPRKTKGVTVYNDNKKCDSGTYDLSNLENTVIDNLIGFQENNDSLLKIISGNNQPILDTSSIKKQISQIDKKIQKSSDLYLNDFITMDELKERTDSLQAEKKLLKAKISENKFNDSTDVFELVKTQLGSIPINKLSYDNKRKIVNNLVSKVDVTADNVDIIFKFQLA

SEQ ID NO: 6166 - protein, 485 aa, synthetic construct
MTKKVAIYTRVSTANQAEEGFSIDEQIDRLTKYAEAMGWQVSNTYTDAGFSGAKLERPAMRRLINDTENKAFDTVLVYKLDRLSRSVRDTLYLVKDVFTKNRIDFISLSESIDTSSAMGSLFLTILSAINEFERENIKERMTMGKLGRAKSGKSMMWTKTAFGYYHNRKTGILEIVPLQATIVEQIFTDYLSGISLTKLRDKLNESGHIGKDIPWSYRTLRQTLDNPVYCGYIKFKDSLFEGMHKPIIPYETYLMVQKELEIRQQQTYERNNNPRPFQAKYMLSGMARCGYCGAPLRIVLGHKRKDGSRTMKYHCANRFPRKTKGVTVYNNNKKCDSGTYDLCNLENTVIDNLIGFQEDNDSLLKIINGNNQPILDTSSLKKQISQIDKKIQRNSDLYLNDFITMDELKDRTDSLQAEKRLLKAKISENKLNDSTDVFELVKTQLGSIPINELSYDNKKKIVNNLVSKVDVTADNVDIIFKFRLA

SEQ ID NO: 6167 - protein, 452 aa, synthetic construct
MKAAIYIRVSTREQVENYSIQAQTEKLTALCRSKDWDVYDIFIDGGYSGSNMDRPALNEMLSKLHEIDAVVVYRLDRLSRSQRDTITLIEEYFLKNNVEFVSLSETLDTSSPFGRAMIGILSVFAQLERETIRDRMVMGKIKRIEAGLPLTTAKGRTFGYDVIDTKLYINEEEAKQLQLIYDIFEEEQSITFLQKRLKKLGFKVRTYNRYNNWLTNDLYCGYVSYKDKVHVKGIHEPIISEEQFYRVQEIFTRMGKNPNMNRDSASLLNNLVVCSKCGLGFVHRRKDTMSRDKKYHYRYYSCKTYKHIHELEKCGNKIWRADKLEELIISRVNDYSVASRNVDKEDELDSLNEKLKIEHAKKRRLFDLYINGSYEVSELDSMMNDIDAQINYYESQIEANEELKKNKKIQENLAELATVDFDSLEFREKQLYLKSLINKIYIDGEQVTIEWL

SEQ ID NO: 6168 - protein, 452 aa, synthetic construct
MKAAIYIRVSTREQVENYSIQAQTEKLTALCRSKDWDVYGIFIDGGYSGSNMNRPALNEMLSKLHEIDAVVVYRLDRLSRSQRDTITLIEEYFLKNNVEFVSLSETLDTSSPFGRAMIGILSVFAQLERETIRERMVMGKIKRIEAGLPLTTAKGRTFGYDVIDTRLYINEEEAKQLQLIYDIFEEEQSITSLQKRLKKLGFKVRTYNRYNNWLTNDLYCGYVSYKDKVHVKGIHEPIISEEQFYRVQEIFTRMGRNPNMNRDSASLLNNLVVCSKCGLGFVHRRKDTTSRGKKYHYRYYSCKTYKHIHELERCGNKIWRADKLEELIINRVNNYSLASRNVDKEDELDSLNEKLKIEHAKKKRLFDLYINGSYEVSELDSMMNDIDAQINYYESQIEANEELRKNKKIQENLADLATVDYDSLEFREKQLYLKSLINKIYIDGEQVTIEWL

SEQ ID NO: 6169 - protein, 485 aa, synthetic construct
MTKKVAIYTRVSTTNQAEEGFSIDEQIDRLTKYAEAMGWQVSDTYTDAGCSGAKLERPAMQRLINDIENKAFDTVLVYKLDRLSRSVRDTLYLVKDVFTKNKIDFISLNESINTSSAMGSLFLTILSAINEFERENIKERMTMGKLGRAKSGKSMMWTKTAFGYYHNRKTGILEIVPLQATIVKQIFTGYLSGISLTKLRDKLNESGHIGKDIPWSYRTLRQTLDNPVYCGYIKFKDSLFEGMHKPIIPYETYLKVQKELEERQQQTYERNNNPRPFQAKYMLSGMARCGYCGAPLRIVLGHKRKDGSRTMKYHCANRFPRKTKGVTVYNDNKKCDSGTYDLGNLENAVIDNLIGFQENNDSLLRIINGNNQPIQDTSSFKKQISQIDKKIQKNSDLYLNDFITMDELRGRTDSLQAEKELLKAKISENKLNDSTDVFALVKTQLGSIPINELSYDNKKKIVNNLVSKVDVTADNVDIIFKFQLA

SEQ ID NO: 6170 - protein, 485 aa, synthetic construct
MTKKVAIYTRVSTTNQAEEGFSIDEQTDRLTKYAEAMGWQVSGTYTDAGLSGAKLERPAMQRLINDIETKAFDTVLVYKLDRLSRSVRDTLYLVKDVFTKNKIDFISLNESIDTSSAMGSLFLTILSAINEFERENIKERMSMGKLGRAKSGKSMMWTKTAFGYYHNRKTGILEIVPLQATIVEQIFTDYLSGISLTKLRDKLNESGHIGKDIPWSYRTLRQTLDNPVYCGYIKFKDSLFEGMHKPIIPYETYLKVQKELEERQQQTYKRNNNPRPFQAKYMLSGMARCGYCGAPLRIVLGHKRKDGSRIMKYHCANRFPRKTKGVTVYNDNKKCDSGTYDLCNLENTVIDNLIGFQENNDSLLKIINGNNQPILDTSSFKKQVSQIDKKIQKNSDLYLNDFITMDELKDRTDSLQAEKKLPKAKISENKFNDSTDVFELVKTQLGSIPINELSYDNKKKIVNNLVSKVDVTADNVDIIFKFQLA

SEQ ID NO: 6171 - protein, 452 aa, synthetic construct
MKAAIYIRVSTREQVENYSIQAQTEKLTALCRSKDWDVYDIFIDGGYSGSNMNRPALNEMLSKLHEIDAVVVYRLDRLSRSQRDTITLIEEYFLKNNVEFVSLSETLDTSSPFGRAMIGILSVFAQLERETIRDRMVMGKIKRIEAGLPLTTAKGRTFGYDVIDTKLYINEEEAKQLQLIYDIFEEEQSITFLQKRLKKLGFKVRTYSCYNNWLTNDLYCGYVSYKDKVHVKGIHEPIISEEQFYRVREIFTRMGKNPNMNRDSASLLNNLVVCGKCGLGFVHRRKDTMSRGKKYHYRYYSCKTYKHIYELEKCGNKIWRADKLEELIINRVNNYSLASRNVDKGGELESLNEKLKIEHAKKKRLFDLYINGSYEVSELDSMMNDIDAQINYYESQIEANEELKKNKKIQENLAGLATVDFDSLEFREKQLYLKSLINKIYIDGEQVTIEWL

SEQ ID NO: 6172 - protein, 485 aa, synthetic construct
MTKKVAIYTRVSTTNQAEEGFSIDEQIDRLTKYAEAMGWQVSDTYTDAGFSGARLERPAMRRLINDIEDKAFDTVLVYKLDRLSRSVRDTLYLVKDVFTKNKIDFISLNESIDTSSAMGSLFLTILSAINEFERENIKERMTMGKLGRAKSGKSMMWTKTAFGYYHNRKTGILEVVPLQATIVEQIFTDYLSGISLTKLRDKLNESGHIGKDIPWSYRTLRQTLDNPVYCGYIKFKDSLFEGMHKPIIPYETYLKVQKELEERQQQTYGRNNNPRPFQAKYMLSGMARCGYCGAPLRIVLGHKRKDGSRTMKYHCANRFPRKTKGVTVYNDNKKCDSGTYDLSNLENTVIDNLIGFQENNDSLLKIINGNNQPILDTSSFKKQISQIDKKIQKNSDLYLNDFITMDELKARTDSLQAEKKLLKAKISENKFNDNTDVFELVKTQLGSIPINELSYDNKKKIVNNLVSKVDVTADNVDIIFKFQLT

SEQ ID NO: 6173 - protein, 485 aa, synthetic construct
MTKKVAIYTRVSTTNQAEEGFSIDEQIDRLTKYAEAMGWQVSDTYTDAGLSGAKLERPAMQRLINDIENKAFDTVLVYKLDRLSRSVRDTLYLVKDVFTKNKIDFISLNESIDTSSAMGSLFLTILSAINEFERESIRERMTMGKLGRAKSGKSMMWTKTAFGYYHNRKTGILEIVPPQATIVEQIFTDYLSGISLTKLRDKLNESGHIGKDIPWSYRTLRQTLDNPVYCGYIKFKDSLFEGMHKPIIPYETYLKVQKELEKRQQQTYERNNNPRPFQAKYMLSGMARCGYCGAPLKIVLGHKRKDGSRAKKYHCANRFPRKTKGVTVYNDNKKCDSGTYDLSNLENTVIDNLIGFQEDNDSLLKIINGSNQPTLDTSSFEKQISQIDKKIQKNSDLYLNDFITMDELKDRTDSLQAEKKLLKAKISENKFNDSTDVFELVKTQLGSIPINELSYDNKKKIVNNLVSKVDVTADNVDIIFKFQLA

SEQ ID NO: 6174 - protein, 469 aa, synthetic construct
MSYTTPVRAAVYLRISEDRSGEQLGVARQREDCLKLCDQRKWVPVEYLDNDVSASTGKRRPAYEQMLADITAGKIAAVVAWDLDRLHRRPVELEAFMSLADEKRLALATVAGDVDLATPQGRLVARLKGCVAAHETEHKKARQRRAARQKAERGYPNWSRAFGYLPGPDGPEPDPRTAPLVKQAYADILAGASLGDVCRQWNDAGAFTITGRPWTTTTLSKFLRKPRNAGLRAYKGARYGPVDRNAIVGKAQWSPLVDEATFWAAQAVLDAPGRAPGRKSVRRHLLTGLASCGKCGNHLAGSYRTDGQVVYVCKVCHGVSILADNIEPILYHIVAERLAMPDAVDLLRREIHDAAEAETIRLELETLYGELDRLAVERAEGLLTARQVKIGTDIVNAKITKLQARQLDQERLRVLDGIPLGTPQVAGAIAELSPDRFRAVLDVLAEVVVQPVGKRGRIFNPERVQVNWR

SEQ ID NO: 6175 - protein, 485 aa, synthetic construct
MTKKVAIYTRVSTTNQAEEGFSIDEQTDRLTKYAEAMGWQVSDIYTDAGFSGAKLERPAMQRLINDIENKAFDTVLVYKLDRLSRSVRDTLYLVKDVFTKNKIDFISLNESIDTSSAMGSLFLTILSAINEFERENIKERMTMGKLGRAKSGKSMMWTKTAFGYYHNRKTGILEIVPLQATIVEQIFTDYLSGISLTKLRDKLNESGHIGKDIPWSYRTLRQTLDNPVYCGYIKFKDSLFEGMHKPIIPYETYLKVQEELEERQQQTYERNNNPRPFQAKYMLSGMARCGYCGAPLRIVLGHKRKDGSRTMKYHCANRSPRKTKGVTVYNDNKKCNSGTYDLRNLENTVIDNLIGLQENNDSLLKIINGNNQPILDTSSFKKQISQIDKKIQKNSDLYLNDFITMDELKNRTDSLQAEKKLLKAKISENKFNDSTDVFELAKTQLGSIPINELSYDNKKKIVNNLVSKVDVTADNVDIIFKFQLA

SEQ ID NO: 6176 - protein, 452 aa, synthetic construct
MKAAIYIRVSTQEQVGNYSIQAQTEKLTALCRSKDWDVYDIFIDGGYSGSNMNRPALNEMLSKLHEIDAVVVYRLDRLSRSQRDTTTLIEEYFLKNNVEFVSLSETLDTSSPFGRAMIGILSVFAQLERETIRDRMVMGKIKRIEAGLPLTTAKGRTFGYDVIDTKLYINEEEAKQLRLIYDIFEEEQSITFLQKRLKKLGFKVRTYNRYNSWLTNDLYCGYVSYKDKVHVKGIHEPIISEEQFYRVQEIFTRTGKNPNMNRDSASLLNNLVVCSKCGLSFVHRSKDTMSRGKKYHYRYYSCKTYKHTHELEKCGNKTWRADKLEELIISRVNNYSFASRNVDKEDELDSLNEKLKIEHAKKRRLFDLYVNGSYGVSELDSMMNDIDAQINYYESQIEANEELRKNKKIQENLADLAAVDFDSLEFREKRLYLKSLINKIYIDGEQVTIEWL

SEQ ID NO: 6177 - protein, 469 aa, synthetic construct
MCYTTPVCAAVYLRISEDRSGEQLGVARQREDCLKLCDQRKWEPVEYLDNDVSASTGKRRPAYEQMLADIAAGRIAAVVAWDLDRLHRRPIELEAFMSLADEKRLALATVAGDVDLATPQGRLVARLKGSVAAHETEHKKARQRRAARQKAERGHPNWSKAFGYLPGPNGPEPDPRTAPLVKQAYADILAGASLGDVCRRWNDAGAFTITDRPWTTTALSKFLRKPRNAGLRTYKGARYGPVDRDAIVGKAQWSPLVDEATFWAAQAVLDAPGRAPGRKSVRRHLLTGLAGCGKCGNHLAGSYRTDGRVVYVCKACHGIAILADNIEPILYHIVAERLAMPDAEDLLRREIHDAAEAETIHLELETLYGELDRLAVERAEGLLTARQVKISTDIVNAKITKLQARQLDQERLRVFNGIPLGTPQVAGTIAGLSPDRFRAMLDVLAEVVVQPVGKGGRIFDPERVQVNWR

SEQ ID NO: 6178 - protein, 452 aa, synthetic construct
MKAAIYIRVSTREQVENYSIQAQTEKLTALCRSKDWDVYDIFIDGGYSGSNMNRPALNEMLSKLHEIDAVVVYRLDRLSRSQRDTITLIEEYFLKNNVEFVSLSETLDTSSPFGRAMIGILSVFAQLERETIRDRMVMGKIKRIEAGLPLTTAKGRTFGYDVIDTKLYINEEEAKQLQLIYDIFEEEQSITFLQRRLKKLGFKVRTYSCYNNWLTNDLYCGYVSYKDKVHVKGIHEPIISEEQFYRVQEIFTRMGKNPNMNRDSASLLNSLMVCSKCGLSFVHRRKDTMSRGKKYHYRYYSCKTYKHTHELEKCGNKIWRADKLEELIISRVNNYSFASRNVDKEDELDSLNEKLKIEHAKKKRLFDLYINGSYEASELDSMMNDIDAQINYYESQIEASEELKKNKKIQENLADLATVDYDSLEFREKQLYLKSLINKIYIDGEQVTIEWL

SEQ ID NO: 6179 - protein, 469 aa, synthetic construct
MSYITPVRAAVYLRISEDRSGEQLGVARQREDCLKLCGQRNWVPVEYLDNDVSASTGKRRPAYEQMLADITAGKIAAVVAWDLDRLHRRPIELEAFMSLADEKHLALATVAGDVDLATPQGRLVARLKASVAAHETEHKKARQRRAARQKAERGYPNWSKAFGYLPGPNGPEPDPRTAPLVKQAYADILAGASLGYVCRQWNVAGAFTITGRPWTTTTLSKFLRKPRNAGLRAYKGARYGPVDRDAIVGKAQWSPLVDEGTFWAAQAVLGAPGRAPGRKSVRRHLLTGLAGCGKCGNHLAGSCRTDGRVVYVCKACHGVAILADNLEPILYHIVAERLAMPDAVDLLRREVHDAAEAETTRLELGTLYGELDRLAVERAEGLLTARQVKISTDIVNAKIAKLQARQLDQERLRVFEGIPLGTPQVAGMIAELSPDRFRAVLDVLAEVVVQPVGKSGRILNPERVQVNWR

SEQ ID NO: 6180 - protein, 452 aa, synthetic construct
MKAAIYIRVSTREQVENYSIQAQTEKLTALCRSKDWDVYDIFIDGGYSGSNMNRPALNEMLSKLHEIDAVVVYRLDRLSRSQRDTITLIEEYFLKNNVEFVSLSETLDTSSPFGRAMIGILSVFAQLERETIRDRMVMGKIKRIEAGLPLTTAKGRTFGYDVIDTRLYINEEEAKQLQLIYDIFEEEQSITFLQKRLKKLGFKVRTYSRYNNWLTNDLYCGYVSYKDKVHVKGIHEPIISEEQFYRVQEIFARMGKNPNMNRDSASLLNNLAVCSKCGLGFVHRRKDAMSRDKKYHYRYYSCKTYKHIHELEKCGNKIWRADKLEELIINRVNDYSFASRNADKEDELDSLNEKLKIEHAKKKRLFDLYINGRYEVSELDNMMNDIDARISYYESQIEANEELRKNKKIQENLAHLAAVDFDSLEFREKQLYLKSLINKIYIDGEQVTIEWL

SEQ ID NO: 6181 - protein, 452 aa, synthetic construct
MKAAIYIRVSTQEQVENYSIQAQTEKLTALCRSKDWDVYDIFIDGGYSGSNMNRPALNEMLSKLHEIDAVVVYRLDRLSRSQRDTTTLIEEYFLKNNVEFVSLSETLDTSSPFGRAMIGILSVFAQLERETIRDRMVMGKIKRIEAGLPLTTAKGRTFGYDVIDTKLYINEEEAKQLQLIYDIFEEEQSITSLQKRLKKLGFKVRTYNRYNNWLTNDLYCGYVSYKDKVHVKGIHEPIISEEQFYRVQEIFTRMGKNPNMNRDGASLLNNLVVCSKCGLGFVHRRKDTMSGGKKYHYRYYSCKAYKHAHELDKCGNKTWRADKLEELIINRVNDYSFASRNVDKEDELDSLNEKLKVEHAKKKRLFDLYINGSYEMSELDSMMNDIDAQINYYESQIEANEELKKNEKIQENLADLATVDFDSLEFREKQLYLKSLISKIYIDGEQVTIEWL

SEQ ID NO: 6182 - protein, 485 aa, synthetic construct
MTKKVAIYTRVSTTNQAEEGFSIDEQIDRLTKYAEAMGWQVSDTYTDAGFSGAKLERPAMQRLINDIENKAFDTVLVYKLDRLSRSVRDTMYLVKDVFTENKIDFISLNESIDTSSAMGSLFLTILSAINEFERENIKERMTMGKLGRAKSGKSMMWTKTAFGYRHNRKTGILEIVPLQATIVEQIFTDYLSGISLTKLRDKLNESGHIGKDIPWSYRTLRQTLDNPVYCGYIKFKDSLFEGMHKPIIPYETYLKVQKELEERQQQAYERNNNPRPFQAKYMLSGMARCGYCGAPLRIVLGHKRKDGSRTMKYHCANRFPRKTKGVTVYNDNKKCDSGTYDLSNLENTVIDDLIGFQENNDSLLKIINGSNRPILDTSSLKKQISQIDKKIRKNSDLYLNDFITMDELKDRTDRLQAEKRLLKAKISENKFNDSTDVFELVKTQLGSIPINELSYDNKKKIVNNLVSKVDVTADNVDIVFKFQLA

SEQ ID NO: 6183 - protein, 452 aa, synthetic construct
MKAAIYIRVSTREQVENYSIQAQTEKLTALCRSKDWDVYDIFIDGGYSGSNMNRPALNEMLSKLHEIDAVVVYRLDRLSRSQRDTITLIEEYFLKNNVEFVSLSETLDTSSPFGRAMIGILSVFAQLERETIRDRMVMGKIKRIEAGLPLTTAKGRTFGYDVIDTRLYINEEEAKQLQLIYDIFEEEQSITFLQKRLKKLGFKVRSYSRYNNWLTNDLYCGYVSYKDKVHVKGIHEPIISEEQFYRVQEIFTRMGKNPNMNRDSASLLNNLVVCGKCGLGFVHRRKDTVSRGKKYHYRYYSCKTYKHTHELEKCGNKIWRADKLEELVINRVSDYSFAGRNVDKEDELDSLNEKLKIEHAKKKRLFDLYINGSYEVCELDSMMNDIDAQINYYESQIEANEELKKNKKIQENLADLATVDYDSLEFREKQLYLKGLINKIYIDGEQVTIEWL

SEQ ID NO: 6184 - protein, 485 aa, synthetic construct
MTKKVAIYIRVSTTNQAEEGFSIDEQIDRLTKYAEAMGWQVSDTYTDAGFSGAKLERPAMQRLINDIENKAFDTVLVYKLDRLSRSVRDTLYLVKDVFTKNKIDFISLNESIDTSSAMGSLFLTILSAINEFERENIKERMTMGKLGRAKSGKSMMWTKTAFGYYHNRKTGILEIVPLQATIVEQIFTDYLSGISLTKLRDKLNESGHIGKDIPWSYRTLRQTLDNPVYCGYIKFKDSLFKGMHKPIIPYETYLKVQKELEERQQQTYERNNNPRPFQAKYMLSGMARCGYCGAPLKIVLGRKRKDGSRTMKYHCANRFPRKTEGVTVYNGNKKCDSGTYDLSNLENTVIDILIGFQENNDSLLKIINGNNQPILDTSSFKKQISQIDKKIQKNSDLYLNDFITMDELKDRTDSLQAEKKLLKAKISENKFNDSTDVFELVKTQLGSIPINELSYDNKKKIVNNLVSRVDVTADNVDIIFKFQLA

SEQ ID NO: 6185 - protein, 485 aa, synthetic construct
MTKKVAIYTRVSTTNQAEEGFSIDEQIDRLTKYAEAMGWQVSDTYTDAGFSGAKLERPAMQRLINDIENRAFDTVLVYKLDRLSRSVRDTLYLVKDVFTKNKIDFISLNESIDTSSAMGSLFLTILSAINEFERENIKERMTMGKLGRAKSGKSMMWTKTAFGYYHNRKTGILEIVPLQATIVEQIFTDYLSGISLTKLRDKLNESGHIGKDIPWSYRTLRQTLDNPVYCGYIKFKGSLFEGMHKPIIPYETYLKVQKELEERQQQTYERNNNPRPFQAKYMLSGMARCGYCGAPLKVVLGHKRKDGSRTMKYHCANRFPRKTKGVTVYNDNKKCDSGTYDLSNLENTVIDNLTGFQENNDSLLKIISGNNQLILDTSSLKEQISQIDKKIQKNSDLYLNDFITMDELKDRTDSLQAEKKLLKAKVSENKFNDSTDVFELVKTQLGSIPINELSYDDKKKIVNNLVSKVDVTADNVDIIFKFQLA

SEQ ID NO: 6186 - protein, 469 aa, synthetic construct
MSYTTPVRAAVYLRISEDRSGEQLGVARQREDCLKLCDQRKWVPVEYLDNDVSASTGKRRPAYEQMLADITAGKIAAVVAWDLDRLHRRPIELEAFMSLADEKRLALATVAGDVDLATPQGRLVARLKGSVAAHETEHKKARQRRAARQKAERGHPNWSKAFGYLPGPNGPEPDPRTAPLVKQAYADILAGASLGDVCRRWNDAGAFTITGRPWTTTTLSKFLRKPRNAGLRAYKGARYGPVDRDAIVGKAQWGPLVDEATFWAAQAVLDAPGRAPGRKSVRRHLLTGLAGCGKCGNHLAGSYRTDGRVVYVCKACHGVAILADNIEPILYHIVAERLAMPDAVDLLRREIHDAAEAEAIRLELETLYGELDRLAVERAEGLLTARQVKISTDIVNAKITKLQARQLDQERLRVFDGIPLGTPQVASMIAELSPDRFRAVLDVLAEVVVQPVGKGSRIFNPERVQVNWR

SEQ ID NO: 6187 - protein, 484 aa, synthetic construct
MTRKVAIYTRVSTTNQAEEGFSIDEQIDRLTKYAEAMGWVSDTYTDAGLSGAKLERPAMQRLINDVENKAFDTVLVYKLDRLSRSVRDTLYLVKDVFTKNKIDFISLNESIDTGSAMGSLFLTILSAINEFERENIKERMTMGKLGRAKSGKSMMWTKTAFGYYHNRKTGILEIVPLQATIVEQIFTDYLSGISLTKLRDKLNESGHIGKDIPWSYRTLRQTLDNPVYCGYIKFKDSLFEGMHKPIIPYETYLKVQKELEERQQQTYERNNNPRPFQAKYMLSGMARCGYCGAPLRIVLGRKRKDGSRTMKYHCANRFPRKTKGVTVYNGNKKCNSGTYDLSSLENTVIDNLIGFQENNDSLLKIINGNNQPILDTSSLKKQISQIDKKIQKNSDLYLNDFITMDELKERTESLQAEKKLLKAKICENKFNDSTDVFELVKAQLGSIPINELSYDNKKKIVNNLVSKVDVTADNVDIIFKFQLA

SEQ ID NO: 6188 - protein, 452 aa, synthetic construct
MKAAIYIRVSTQEQVGNYSIQAQTEKLTALCRSKDWDVYDIFIDGGYSGSNMNRPALNEMLSKLHEIDAVVVYRLDRLSRSQRDTTTLIEEYFLKNNVEFVSLSETLDTSSPFGRAMIGILSVFAQLERETIRDRMVMGKIKRIEAGLPLTTAKGRTFGYDVIDTKLYINEEEAKQLRLIYDIFEEEQSITSLQKRLKKLGFKVHTYNRYNSWLTNDLYCGYVSYKDKVHVKGIHEPIISEEQFYRVQEIFTRMGKNPNMNRDSASLLSNLVVCSKCGLGFVHRSKDTMSRGKKYHYRYYSCKTYKHTHELEKCGNKTWRADKLEELIISRVNNYSFAGRSVDKEGELDSLNEKLKIEHAKKKRLFDLYINGSYEVSELDSMMNGINAQISYYESQIEANEELKENKKIQENLAELATVDFDSLEFREKQLYLKSLINKIYIDGEQVTIEWL

SEQ ID NO: 6189 - protein, 485 aa, synthetic construct
MTKKVAIYTRVSTANQAEEGFSIDEQIDRLTRYAEAMGWQVSDTYTDAGFSGAKLERPAMQRLINDIENKAFDTVLVYKLDRLSRSVRDTLYLVKDVFTKNKIDFISLNESINTSSAMGSLFLTILSAINEFERENIKERMTMGKLGRAKSGKSMMWTKTAFGYYHNRRTGILEIVPLQATIVEQIFTDYLSGISLTKLRDKLNESGHIGKDIPWSYRTLRQTLDNPVYCGYIKFKDSLFEGMHKPIIPYETYLKVQKELEERQQQTYERNNNPRPFQAKYMLSGMARCGYCGAPLRIVLGRKRKDGSRTMKYHCANRFPRKTKGVTVYNDNKKCDSGTYDLNNLENTVIDILIGFQENNESLLKIINGNNQPILDTSSFKKQISQIDKKIQKNSDLYLNDFITMDELRDRTDSLQAEKKLLKAKISENKFNDSTDVFELVKTQLGSIPINELSYDNKKKIVNNLVSKVDVTADNVDIIFKFQLA

SEQ ID NO: 6190 - protein, 469 aa, synthetic construct
MSYTTPVRAAVYLRISEDRSGEQLGVARQREDCLKLCGQRKWEPVEYLDNDVSASTGKRRPAYEQMLADITAGKIAAVVAWDLDRLHRRPIELEAFMSLADEKRLALATVAGDVDLATPQGRLVARLKGSVAAHETEHKKARQRRAARQKAERGYPNWGKAFGYLPGPNGPEPDPRAAPLVKQAYADILAGASLGDVCRQWNDAGAFTITGRPWTTTTLSKFLRKPRNAGLRAYKGARYGPVDRDAIVGKAQWSPLVDEATFWAAQAVLDAPGRAPGRKSVRRHLLTGLAGCGKCGNHLAGSYRTDGRIVYVCKACHGVAILADNIEPILYHIVAERLAMPDAVDLLRREIHDAAEAETIRLELETLYGELDHLAVERAEGLLTARQVKISTDIVSAKITKLRAHQLDQERLRVFDGIPLGTPQVAGMIAVLSPNRFRAVLDVLAEVVVRPVGKSGRVFNPERVQVNWR

SEQ ID NO: 6191 - protein, 485 aa, synthetic construct
MTRKVAIYTRVSTTNQAEEGFSIVEQIDRLTKYAEAMGWQVSDTYTDAGFSGAKLERPAMRRLINDIETKAFDTVLVYKLDRLSRSVRDTLYLVKDVFTKNKIDFISLNESIDTSSAMGSLFLTILSAINEFERENIKERMTMGKLGRAKSGKSMMWTKTAFGYYHNRKTGILEIVPLQATIVEQIFTDYLSGISLTKLRDKLNESGHIGKDIPWSYRTLRQTLDNPVYCGYIKFKDSLFEGTHKPIIPYETYLKVQKELEERQQQTYERNNNPRPFQAKYMLSGIARCGYCGAPLKIVLGHKRKDGSRTMKYHCANRFPRKTKGVTVYNDNKKCDSGTYDLSNLENTVIDNLIGFQENNDSLLKIINGNNQPVLDTSSLKEQISQIDKKIQKNSDLYLNDFITMDELKDRTNSLQAEKKLLKARISENKFNDSTDVFELVKTQLGSIPINELSYDNKKKIVNNLVSKVDVTADNVDIIFKFQLA

SEQ ID NO: 6192 - protein, 452 aa, synthetic construct
MKAAIYIRVSTQEQVGNYSIQAQTEKLTALCRSKDWDVYDIFIDGGYSGSNMNRPALNEMLSKLHEIDAVVVYRLDRLSRSQRDTTTLIEEYFLKNNVEFVSLSEALDSSSPFGRAMIGILSVFAQLERETIRDRMVMGKIKRIEAGLPLTTAKGRTFGYDVIDTKLYVNEEEAKQLRLIYDIFEEEQSITFLQKRLKKLGFKVHTYNRYNNWLTNDLYCGYVSYKDKVHVKGIHEPIISEEQFYRVQEIFTRMGKNPNMNRDSASLLNNLVVCSKCGLGFVHRSKDTMSRGKKYHYRYYSCKTYKHTHELEKCGNKTWRADKLEELIINRVNNYSFASRNADKEDELDSLNEKLKIEHARKKRLFDLYINGSYEVSELDSMMNDIDAQINYYESQIEASEELKKNKKIQENLADLATVDFDSLEFREKQLYLKSLINKIYIDGEQVTIEWL

SEQ ID NO: 6193 - protein, 452 aa, synthetic construct
MKAAIYIRVSTREQVENYSIQAQTEKLTALCRSKDWDVYDIFIDGGYSGSNMNRPALNEMLSKLHEIDAVVVYRLDRLSRSQRDTITLIEEYFLKNNVEFVSLSETLDTSSPFGRAMIGILSVFAQLERETIRDRMVMGKIKRVEAGLPLTTAKGRTFGYDVIDTKLYINEEEAKQLQLIYDIFEEERSITFLQKRLKKLGFKVRTYNRYNNWLTNDLYCGYVSYKDKVHVKGIHEPIISEEQFHRVQEIFTRMGKNPNMNRDSASLLNNLVVCSKCGLGFVHRRKDTMSRGKKYHYRYYSCKTYKHIHELEKCGNKIWRADKLEELIINRVNNYSFTSRNVDKEDELDSLNEKLKIEHAKKKRLFDLYINGSYEVCELDSMMNDIDAQINYYESQIEANEELKKNKKIQENLADLATVDFDSLEFREKQLYLKSLINKIYIDGEQVTIEWL

SEQ ID NO: 6194 - protein, 484 aa, synthetic construct
MTKKVAIYTRVSTANQAEEGFSIDEQIDRLTKYAEAMGWQVSDTYTDAGSSGAKLERPAMQRLINDIENKAFDTVLVYKLDRLSRSVRDTLYLVKDVFTKNKIDFISLNESIDTSSAMGSLFLTILSAINEFERENIKERMTMGKLGRAKSGKSMMWTKTAFGYYHNRKTGILEIVPLQATIVEQIFTDYLSGISLTKLRDKLNESGHIGKDIPWSYRTLRQTLDNPVYCGYIKFKGSLFEGMHKPIIPYETYLKVQKELEERQRQTYERNNNPRPFQAKYMLSGMARCGYCGAPLRIVLGHKRKDGSRTKKYHCANRFPRKTKGITVYNDNKECDSGTYDLSSLENTVIDNLIGLQENNDSLLKIINGNNQPILDTSSFKKQISQIDEKIRKNSDLYLNDFITMDELKDRTDSLQAEKKLLKAKVSENKFNDSTDVFELVKAQLGSTPINELSYDNKKIVNNLVSKVDVTADSVDIIFKFQLA

SEQ ID NO: 6195 - protein, 452 aa, synthetic construct
MKAAIYIRVSTREQVENYSIQAQTEKLTALCRSKDWDVYDIFVDGGYSGSNMNRPALNEMLSKLHEIDAVVVYRLDRLSRSQRDTVTLIEEYFLRNNVEFVSLSETLDTSSPFGRAMIGILSVFAQLERETIRDRMVMGKIKRIEAGLPLTTAKGRTFGYDVIDTKLYINEEEAKQLQLIYDIFEEEQSITFLQKRLKKLGFKVRSYNRYNNWLTNDLYCGYVSYKDKVHVKGIHEPIISEEQFYRVQEIFTRMGKNPNMNRDSASLLSNLVVCSKCGLGFVHRRKDTMSRGKKYHYRYYSCKTYKHIHELEKCGNKIWRADKLEELIINCVNNSSLASRNVDKEDELDSLNEKLKIEHAKRKRLFDLYVNGSCEVSELDSMMSDIDAQISYYESQIEANEELKKNKKIQENLADLATVDFDSLEFREKQLYLKSLINKIYIDGEQVTIEWL

SEQ ID NO: 6196 - protein, 452 aa, synthetic construct
MKAAIYIRVSTQEQVENYSIQAQTEKLTALCRSKDWDVYDIFIDGGYSGSNMNRPALNEMLSKLHEIDAVVVYRLDRLSRSQRDTTTLIEEYFLKNNVEFVSLSETLDTSSPFGRAMIGILSVFAQLERETIRDRMVMGKIKRVEAGLPLTTAKGRTFGYDVIDTKLYINEEEAKQLQLIYDIFEEEQSITFLQKRLKKLGFKVRTYNRYNNWLTNDLYCGYVSYKDKVHVKGIHEPIISEEQFYRVQEIFTRMGKSPNMNRDSASLLNNLVVCSKCGLGFVHRSKDTMSRGKKYHYRYYSCKTYKHTHELEKCGNKTWRADKLEELIINRVNNYGLASRNVDKEDELDSLNEKLKIEHAKKKRLFDLYINGSYEASELDSMMNDIDAQINYYESQIEANEELRKNKKIQENLADLAAVDFDNLEFREKRLYLKSLINKIYIDGEQVTIEWL

SEQ ID NO: 6197 - protein, 452 aa, synthetic construct
MKAAIYIRVSTREQVENYSIQAQTEKLTALCCSKGWDVYDIFIDGGYSGSNMNRPALNEMLSKLHEIDAVVVYRLDRLSRSQRDTITLIEEYFLKNNVEFVSLSETLDTSSPFGRAMIGILSVFAQLERETIRDRMVMGKIKRVEAGLPLTTAKGRTFGYDVIDTKLYINEEEAKQLQLIYDIFEEEQSITFLQKRLKKLGFKVRTYNRYSNWLTNDLYCGYVSYKDKVHVKGIHEPIISEEQFYRVQEIFTRMGKNPNMNRDSASLLNNLVVCSKCGLGFVHRRKDTVSRGKKYHYRYYSCKTYKHTHELEKCGNKIWRADKLEELIINRVNNYSFASRNVDKEDELGSLNEKLKIEHAKKKRLFDLYINGNYEVSELDSMMNDIDAQINYYESQIEANEELKKNKKIQENLADLATVDYDSLEFREKQLYLRSLINKIYIDGEQVTIEWL

SEQ ID NO: 6198 - protein, 469 aa, synthetic construct
MSYTTPVRAAVYLRISEDRSGEQLGVARQREDCLKLCDQRKWEPVEYLDNDVSASTGKRRPAYEQMLADITAGKIAAVVAWDLDRLHRRPIELEAFMSLADEKRLALATVAGDVDLATPQGRLVARLKGCVAAHETEHKKARQRRAARQKAERGHPNWSKAFGYLPGPNGPEPDPRTAPLVKQAYADILAGASLGDVCRQWNDADAFTITGRPWTTTTLSKFLRKPRNAGLRAYKGARYGPVDRDAIVGKAQWSPLVDEATFWAAQAVLDAPGRAPGRKSVRRHLLTGLAGCGKCGNHLAGSYRTDGQIVYVCKACHGVSILAVNIEPILYHIVAERLAMPDAVDLLRRGIHDAAEAETIRLELEALYGELDRLAVERAEGLLTARQVKISTDVVNAKITELQARRLDQERLRVLEGIPLGTPQVAGMIAELSPDRFRAVLDVLAEVVVQPVGKSGRIFNPERVQVNWR

SEQ ID NO: 6199 - protein, 469 aa, synthetic construct
MCYTTPVRAAVYLRISEDRSGEQLGVARQREDCLKLCGQRKWEPVEYLDNDVSASTGKRRPAYEQMLADITAGKIAAVVAWDLDRLHRRPIELEAFMSLADEKRLALATVAGDVDLATPQGRLVARLKGSVAAHETEHKKARQRRAARQKAERGHPNWSKAFGYLPGPNGPEPDPRTAPLVKQAYADILAGASLGDVCRQWNGAGAFTITGRPWTTTTLSKFLRKPRNAGLRAYKGARYGPVDRDAIVGKAQWSPLVDEATFWAAQAVLDAPGRAPGRKSVRRHLLTGLAGCGKCGNHLAGSYRTDGRVVYVCKACHGVAILADNIEPILYHIVAERLAMPDAVDLLRREIHDVAEAETIRLELEALYGELDHLAVERAEGLLTARQVKISTDIVNAKITKLQARQLDQERLRVFDGIPLGTPQVAGMIAELSPNRFRAVLDVLAEVVVQPVGKSGRIFNPERVQVNWR

SEQ ID NO: 6200 - protein, 452 aa, synthetic construct
MKAAIYIRVSTQEQVGNYSIQAQTEKLTALCRSKGWDVYDIFIDGGYSGSNMNRPALNEMLSKLHEIDAVVVYRLDRLSRSQRDTTTLIEEYFLKNNVEFVSLSETLDTSSPFGRAMIGILSVFAQLERETIRDRMVMGKIKRIEAGLPLTTAKGRTFGYDVIDTKLYINEEEAKQLQLIYDIFEEEQSITSLQKRLKKLGFKVRTYNRYNNWLTNDLYCGYVSYKDKVHVKGIHEPIISEEQFYRVQEIFTRMGKNPNMNRDSASLLSNLVVCSKCGLGFVHRSKDTMSRGKKYHYRYYSCKTYKHTHELEKCGNKTWRADKLEELIISRVNNYSFASRSVDKEYELDSLNEKLKIEHAKKKRLFDLYINGSYEVSELGSMMNDIDARINYYESQIEANEELKKNKKIQENLAGLATVDFDSLGFREKQLYLKSLINKIYIDGEQVTIEWL

SEQ ID NO: 6201 - protein, 452 aa, synthetic construct
MKAAIYIRVSTREQVENYSIQAQTEKLTALCRSKDWDVYDIFIDGGYSGSNMNRPALNEMLSKLHEIDAVVVYRLDRLSRSQRDTITLVEEHFLKNNVEFVSLSETLDTSSPFGRAMIGILSVFAQLERETIRDRMVMGKIKRVEAGLPLTTAKGRTFGYDVIDTKLYINEEEAKQLRLIYDIFEEEQSITFLQKRLKKLGFKVRTYNRYSNWLTNDLYCGYVSYKDKVHVKGIHEPIISEEQFYRVQEIFTRMGKNPNMNRDSASLLNNLVVCSKCGLGFVHRRKDTTSRGKKYHYRYYSCKTYKHTHELEKCGNKIWRADILEELIINRVNNYSFASRNVDKEDELDSLNEKLKTEHAKKKRLFDLYINGSYEVSELDCMMNDIDAQINYYEGQIEANEELKKGKKIQESLADLATVDYDSLEFREKQLYLKSLINKIYIDGEQVTIEWL

SEQ ID NO: 6202 - protein, 485 aa, synthetic construct
MSKKVAIYTRVSTTNQAEEGFSIDEQIDRLTKYAEAMGWQVSDTYTDAGLSGAKLERPAMQRLINDIENKAFDTVLVYKLDRLSRSVRDTLYLVKDVFTKNKIDFISLNESIDTSSAMGSLFLTILSAINEFERENIKERMTMGKLGRAKSGKSMMWTKTAFGYYHNRETGILEIVPLQATIVEQIFTDYLSGISLTRLRDKLNESGHIGKDIPWSYRTLRQTLDNPVYCGYIKFKDSLFEGMHKPIISYETYLKVQKELEERQQQTYERNNNPRPFQAKYMLSGMARCGYCGAPLKIVLGHKRRDGSRTMKYHCANRFPRKTKGITVYNDNKKCDSGTYDLSNLESTVIDNLIGLQENNDSLLKIINGNNQPILDTSSFKKQISQIDKKIQKNSDLYLNDFITMDELKDRTDSLQAEKKLLKAKISENKFNDSTDVFELVKTQLGSIPINELSYDDKKKIVNNLVSKVDVTADNVDIIFKFQLA

SEQ ID NO: 6203 - protein, 452 aa, synthetic construct
MKAAIYIRVSTREQVENYSIQAQTEKLTALCRSKDWDVYDIFIDGGYSGSNMNRPALNEMLSKLHEIDAVVVYRLDRLSRSQRDTITLIEEYFLKNNVEFVSLSETLDTSSPFGRAMIGILSVFAQLERETIRDRMVMGKIKRIEAGLPLTTAKGRTFGYDVIDTKLYINEEEARQLQLIYDIFEEEQSITFLQKRLKKLGFKVHTYNRYNSWLTNDLYCGYVSYKDKVHVKGIHEPIISEEQFYRVQEIFTRMGKNPNMNRDSASLLNNLVVCSKCGLGFVHRRKDTTSRGKKYHYRYYSCKTYKHIHELEKCGNKIWRADKLEELIINRVNNYSFASRDVDKEDELDSLDEKLKIEQAKRKRLFDLYINGSYNVSELDSMMNDIDAQINYYESQIEANGELKKNKKIQENLADLATVDFDSLEFREKQLYLKSLINKIYIDGEQVTIEWL

SEQ ID NO: 6204 - protein, 452 aa, synthetic construct
MKAAIYIRVSTQEQVENYSIQAQTEKLTALCRSKDWDVYDIFVDGGYSGSNMNRPALNEMLSKLHEIDAVVVYRLDRLSRSQRDTTTLIEEYFLKNNVEFVSLSETLDTSSPFGRAMIGILSVFAQLERETIRDRMVMGKIKRIEAGLPLTTAKGRTFGYDVIDTKLYINEEEAKQLQLIYDIFEEEQSITSLQKRLKKLGFKVRTYNRYNNWLTNDLYCGYVSYKDKVHVKGIHEPIISEEQFYRVQEIFTRMGKNPNMNRDSASLLNNLVVCSKCGLSFVHRSKDTMSRGKKYHYRYYSCKTYKHTHELEKCGNKTWRADKLEELIINRVNNYSFASRNVDKEDELDSLSEKLKIEHAKKKRLFDLYINGSYEVSELDSMMNDIDAQINYYESQIEANEELKKNKKIQENLADLATVDFDGLGFREKQLYLKSLINKIYIDGEQVTIEWL

SEQ ID NO: 6205 - protein, 452 aa, synthetic construct
MKAAIYIRVSTQEQVGNYSIQAQTEKLTALCRSKDWDVYDIFIDGGYSGSNMNRPALNEMLSKLHEIDAVVVYRLDRLSRSQRDTTTLIEEYFLKNNVEFVSLSETLDTSSPFGRAMIGILSVFAQLERETIRDRMVMGKIKRIEAGLPLTTAKGRTFGYDVIDTKLYINEAEAKQLQLIYDIFEEEQSITLLQKRLKKLGFKVRTYNRYNSWLTNDLYCGYVSYKDKVHVKGIHEPIISEEQFYRVQEIFTRMGKNPNMNRDSASLLNNLVVCNKCGLGFVHRSKDTMSRGKKYHYRYYSCKTYKHTHELEKCGNKTWRADKLEELIINRVNNYSFASRNVDKEDGLDCLNEKLRIEHAKKRRLFELYINGSYEVSELDSMMNDIDAQINYYESQIEANEGLRKNKKIQENLADLATVDFGSLEFREKQLYLKSLINKIYIDGEQVTIEWL

SEQ ID NO: 6206 - protein, 485 aa, synthetic construct
MTKKVAIYTRVSTTNQAEEGFSIDEQIDRLTKYAEAMGWQVSDTYTDAGASGAKLERPAMQRLINDIENKAFDTVLVYKLDRLSRSVRDTLYLVKDVFTKNKIDFISLNESIDTSSAMGSLFLTILSAINEFERENIKERMTMGKLGRAKSGKSMMWTKTAFGYYHNRKTGILEIVPLQATIVEQIFTDYLSGISLTRLRDKLNESGHIGKDIPWSYRTLRQTLDNPVYCGYIKFKGSLFEGMHKPIIPYETYLKVQKELEERQQQTYERNNNPRPFQAKYMLSGMARCGYCGAPLKIVLGRKRKDGSRTMKYHCANRFPRKTKGVTVYNDNKKCDSGAYDLSNLENAVIDSLIGFQEDNDSLLKIINGNNQPILDTSSFKKQISQIDKKILKNSDLYLNDFITMDELKARTDSLQAEKKLLKAKISENKFNDSTDVFGLVMAQLGSIPINELSYDDKKKIVNNLVSKVDVTADNVDIIFKFQLA

SEQ ID NO: 6207 - protein, 452 aa, synthetic construct
MKAAIYIRVSTREQVENYSIQAQTEKLTALCRSKDWDVYDIFTDGGYSGSNMNRPALNEMLSKLHEIDAVVVYRLDRLSRSQRDTITLIEEYFLKNNVEFVSLSETLDTSSPFGRAMIGILSVFAQLERETIRDRMVMGKIKRIEAGLPLTTAKGRTFGYDVIDTRLYINEEEAKQLQLIYDIFEEEQSITFLQKRLKKLGLKVRTYNCYNNWLTNDLYCGYVSYKDKVHVKGIHEPIISEEQFYRVQEIFTRTGKNPNMNRDSASLLNNLVVCSKCGLGFVHRRKDAISRDKKYHYRYYSCKTYKHIHELEKCGNKIWRADKLEELIINRVNDYSLASRNVDKEDELDSLNEKLKIEHAKKKRLFDLYINGSYEVSELDSMMNDIDAQINYYESQIEANEELKRNKKIQETLANLATVDFDSLEFREKQLYLKSLINKIYIDGEQVTIEWL

SEQ ID NO: 6208 - protein, 485 aa, synthetic construct
MTKKVAIYTRVSTTNQAEEGFSIDEQIDRLTKYAEAMGWQVGDTYTDAGFSGAKLERPAMQRLINDIENKAFDTVLVYKLDRLSRSVRDTLYLVKDVFTKNKIDFISLNESINTSSAMGSLFLTILSAINEFERENIKERMTMGKLGRAKSGKSMMWTKTAFGYYHNRKTGILEIVPLQATIVEQIFTDYLSGISLTKLRDKLNESGHIGKDIPWSYRTLRQTLDNPVYCGYIKFKDSLFEGMHKPIIPYETYLKVQEELKERQQQAYERDNNPRPFQAKYMLSGMARCGYCGAPLRIVLGHKRKDGSRTMKYHCANRFPRKTKGITVYNDNKKCDSGTYDLSNLENTVIDYLIGFQENDDSLLKIIGGNDQPILDTSSFKEQISQIDKKIQKNSDLYLNDFITMDELKDRTDSLQAEKKLLKAKISENKFNDSTDVFELVKTQLGSIPINELSYDNKKKIVNNLVSKVDVTADNVDIIFKFQLA

SEQ ID NO: 6209 - protein, 469 aa, synthetic construct
MCYTTPVRAAVYLRISEDRSGEQLGVARQREDCLKLCGQRKWVPVEYLDNDVSASTGKRRPAYEQMLADITAGKIAAVVAWDLDRLHRRPIELEAFMSLADEKRLALATVAGDVDLATPQGRLVARLKGSVAAHETEHKKARQRRAARQKAERGYPNWSKAFGYLPGPNGPEPDPRTAPLVKQAYADILAGASLGDVCRQWNDAGAFTITGRRWTTTTLSKFLRKPRNAGLRAYKGARYGPVDRDAIVGKAQWSPLVDEATFWAAQAVLDAPGRAPGRKSVRRHLLTGLAGCGKCGNHLAGSYRTDGKVVYVCKACHGVAILADNIEPILYHIVAERLAMPDAVDLLRREIHDAAEAETIRLELETLYDELDRLAVERAEGLLTARQVKISTDIVNAKITKLQACQQDQERLRVLDGIPLGTPQVAGVIAELSPDRFRAVLDVLAEVVVQPVGKSGRIFNPERVQVDWR

SEQ ID NO: 6210 - protein, 452 aa, synthetic construct
MKAAIYIRVSTREQVENYSIQAQTEKLTALCRSKDWDVYDIFIDGGYSGSNMNRPALNEMLSKLHEIDAVVVYRLDRLSRSQRDTITLIEEYFLKNNVEFVSLSETLDTSSPFGRAMIGILSVFAQLERETIRDRMVMGKIKRIEAGLPLTTAKGRTFGYDVIDTKLYINEEEAKQLQLIYDIFEEEQSITFLQKRLKKLGFKVRTYNCYNSWLTNDLYCGYVSYKDKVHVKGIHEPIISEEQFYRVQEIFTRMGKNPNMNRDSASLLNNLVVCSKCGLGFVHRRKDTMSRGKRYHYRYYSCKTYKHIHELEKCGNKIWRADKLEELIVNRVNNYSLASRDVDKEDELDSLNEKLKIEHAKKKRLFDLYINGSYEVSELDSMISGIGAQINYYESQIVANEELRKSKKIQENLADLATVDYDSLEFREKQLYLRSLINKIYIDGEQVTIEWL

SEQ ID NO: 6211 - protein, 452 aa, synthetic construct
MKAAIYIRVSTREQVENYSIQAQTEKLTALCRSKDWDVYDIFIDGGYSGSNMNRPALNEMLSKLHEIDAVVVYRLDRLSRSQRDTITLVEEYFLKNNVEFVSLSETLDTSSPFGRAMIGILSVFAQLERETIRDRMVMGKIKRIEAGLPLTTAKGRTYGYDVIDTKLYINEEEAKQLQLIYDIFEEEQSITFLQKRLKKLGFKVRTYSCYNNWLTNDLYCGYVSYKDKVHVKGIHEPIISEEQFYRVQEIFTRMGKNPNMNRDSASLLNNLVVCSKCGLGFVHRRKDTTSRGKKYHYRYYSCKTYKHTHELEKCGNKIWRADKLEELIINRVNNHSFASRNVDKEDELESLNEKLKIEYAKKKRLFDLYISGSYEVSELDSMMNDIDAQINYYESQIEANEGLKKNKKIQESLANLAAVDYDSLEFREKQLYLKSLINKIYIDGEQVTIEWL

SEQ ID NO: 6212 - protein, 452 aa, synthetic construct
MKAAIYIRVSTQEQVGNYSIQAQTEKLTALCRSKDWDVYDIFIDGGYSGSNMNRPALNEMLSKLHEIDAVVVYRLDRLSRSQRDTTTLIEEYFLKNNVEFVSLSETLDTSSPFGRAMIGILSVFAQLERETIRDRMVMGKIKRIEAGLPLTTAKGRTFGYDVIDTKLYINEEEARQLQLIYDIFEEEQSITFLQKRLKKLGFKVRTYNRYNNWLTNDLYCGYVSYKDKVHVKGIHEPIISEEQFYRVQEIFARMGKNPNMNRDSASLLSNLVVCSKCGLGFVHRSKDTMSRGKKYHYRYYSCKTYKHTHELERCGNKIWRADKLEELIINRVNNYSFVRRNVDKEDELDSLNEKLKIEHAKKKRLFGLYINGSYEVSELDSMMNDIDAQISYYESQIEANEEQKKNKKVQENLAELATVDFDSLEFREKQLYLKSLISKIYIDGEQVTIEWL

SEQ ID NO: 6213 - protein, 485 aa, synthetic construct
MTKKVAIYTRVSTTNQAEEGFSIDEQIDRLTKYAEAMGWQVSDTYTDAGLSGAKLERPAMQRLINDIENKAFDTVLVYKLDRLSRSVRDTLYLVKDVFTKNKIDFISLNESIDTSSAMGSLFLTILSAINEFERENIKERMTMGKLGRAKSGKSMMWTKTAFGYYHNRKTGILEIVPLQATIVEQIFTDYLSGISLTKLRDKLNESGHIGKDIPWSYRTLRQTLDNPVYCGYIKFKDSLFEGMHKPIIPYETYLKVQKELEERQQQTYERNNNPRPFQAKYMLSGMARCGYCGAPLRIVLGRKRKDGSRTMKYHCANRFPRKTKGITVYNDNEKCDSGTYDLSNLENTVIDILIGFQENNDSLLKIINGNNQPILNTSNFEKQISQIDKRIQKNSDLYLNDFITMDELKDRTDSLQAEKNLLKAKISENKFNESTDVFELVKTQLGSIPINELSYDNKKKIVNNLVSKVDVTADNVDIIFKFQLA

SEQ ID NO: 6214 - protein, 485 aa, synthetic construct
MTRKVAIYTRVSTTNQAEEGFSIDEQIDRLTKYAEAMGWQVNDTYTDAGFSGAKLERPAMQRLINDIENKAFDTVLVYKLDRLSRSVRDTLHLVKDVFTKNKIDFISLSESIDTSSAMGSLFLTILSAINEFERENIKERMTMGKLGRAKSGKSMMWTKTAFGYYHNRKTGILEIVPLQATIVEQIFTDYLSGISLTKLRDKLNESGHIGKDIPWSYRTLRQTLDNPVYCGYIKFKDSLFEGMHKPIIPYETYLKVQKELEERQQQTYERNNNPRPFQAKYMLSGMARCGYCGAPLRIVLGHKRKDGSRTMKYHCANRFPRKTKGVTVYNDNKKCGSGTYDLSNLENTVIDSLIGFQENNDSLLKIINGNNQPILDTSSLKEQISQIDKKIQKNGDLYLNDFITMDELKERTDSLQAEKRLLKAKISENKFNDSTDVFELVKTQLGSIPINELSYDSKKKIVNNLVSKVDVSADNVDIIFKFQLS

SEQ ID NO: 6215 - protein, 452 aa, synthetic construct
MKAAIYIRVSTREQVENYSIQAQTEKLTALCRSKDWDVYDIFIDGGYSGSNMNRPALNEMLSKLHEIDAVVVYRLDRLSRSQRDTITLIEEYFLKNNVEFVSLSETLDTSSPFGRAMIGILSVFAQLERETIRDRMVMGKIKRIEAGLPLTTAKGRTFGYDVIDTKLYINEEEAKQLQLIYDIFEEEQSITFLQKRLKKLGFKVHTYNRYNNWLTNDLYCGYVSYKDKVHVKGIHEPIISEEQFYRVQEIFTRMGKSPNMNRDSASLLNNLVVCSKCGLGFVHRRKDTTSRGKKYHYRYYSCKTYKHTHELEKCGNKIWRADKLEELVINRVNNYSFASRNVDKEDELDSLNEKLKIEHAKKRRLFDLYINGSYEVSELDSMMNDIDAQINYYESQIEANEELKKNKKIQENLADPATVDFDSLEFREKQLYLKSLINKIHIDGEQVTIEWL

SEQ ID NO: 6216 - protein, 452 aa, synthetic construct
MKAAIYIRVSTREQVENYSIQAQTEKLTALCRSKDWDVYDIFIDGGYSGSNMNRPALNEMLSKLHEIDTVVVYRLDRLSRSQRDTITLIEEYFLKNNVEFVSLSETLDTSSPFGRAMIGILSVFAQLERETIRDRMVMGKIKRIEAGLPLTTAKGRTFGYDVIDTKLYINEEEAKQLRLIYDIFEEGQSITFLQKRLKKLGFKVRTYNRYNNWLTNDLYCGYVSYKDKVRVKGIHEPIISEEQFYRVQEIFTRMGKNPNMNRDSASLLSNLVVCSKCGLGFVHRRKDTMSRGKKYHYRYYSCKTYKHIHELEKCGNKIWRADKLEELITNRVNNYSFASRNVDKAEELDSLNEKLKAEHAKKKRLFDLYINGSYNVSELDSMMNDIDAQINYYESQIEANEELKKNKKIQENLAGLATVDFDSLEFREKQLYLKSLINKIYIDGEQVTIEWL

SEQ ID NO: 6217 - protein, 452 aa, synthetic construct
MKAAIYIRVSTREQVENYSIQAQTEKLTALCRSKDWDVYDIFIDGGYSGSNMNRPALNEMLSKLHEIDAVVVYRLDRLSRSQRDTITLIEEYFLKNNVEFVSLSETLDTSSPFGRAMIGILSVFAQLERETIRDRMVMGKIKRVEAGLPLTTAKGRTFGYDVIDTKLYINEEEAKQLQLIYDIFEEERSITLLQKRLKKLGFKVRTYSRYNNWLTNDLYCGYVSYKDKVHVKGIHEPIISEEQFYRVQEIFTRMGKNPNMNRDSASLLNSLVVCSKCGLGFVHRRKDTTSRGKKYHYRYYSCKTYKHIHELEKCGNKIWRADKLEELVINRVNNYSFASRNVDKEDELDSLNEKLKIEHAKKRRLFDLYINGSYEVSELDSMMSDIDAQINYYESQIEANEELKKNKKIQENLADLATVDFDSLEFREKQLYLKSLINKIYIDGEQVTIEWL

SEQ ID NO: 6218 - protein, 452 aa, synthetic construct
MKAAIYIRVSTREQVENYSIQAQTEKLTALCRSKDWDVYDIFIDGGYSGSNMNRPALNEMLSKLHEIDAVVVYRLDRLSRSQRDTITLIEEYFLKNNVEFVSLSETLDTSSPFGRAMIGILSVFAQLERETIRDRMVMGKIKRIEAGLPLTTAKGRTFGYDVIDTKLYVNEEEAKQLRLIYDIFEEEQSITFLQKRLKKLGFKVRTYNRYNSWLTNDLYCGYVSYKDKVHVKGIHEPIISEEQFYRVQEIFTRMGKNPNMNRDSASLLNNLVVCSKCGLGFVHRRKDIMSHGKKYHYRYYSCKTYKHIHELEKCGNKIWRADKLEELIISRVNNYSLASRDVDKEDELDGLNEKLKIEHAKKKRLFDLYINGSYEVSELDSMMNDIDAQINHYESQIEANEGLKKNKKIQENLAYLATVDFDSLEFREKQLYLKSLINKIYIDGEQVTIEWL

SEQ ID NO: 6219 - protein, 452 aa, synthetic construct
MKAAIYIRVSTREQVENYSIQAQTEKLTALCRSKGWDVYDIFIDGGYSGSNMNRPALNEMLSKLHEIDAVVVYRLDRLSRSQRDTITLIEEYFLKNNVEFVSLSETLDTSSPFGRAMIGILSVFAQLERETIRDRMVMGKIKRIEAGLPLTTAKGRTFGYDVIDTKLYINEEEAKQLQLIYDIFEEEQSITFLQKRLKELGFKVRTYNRYNNWLTNDLYCGYVSYKDKVHVKGIHEPIISEEQFYRVQEIFTRMGKNPNMNRGSASLLNNLVVCGKCGLGFVHRRKDAMSRDKKYHYRYYSCKTYKHIHELEKCGNKIWRADKLEELIINRVNNYSLASRNVGKEGELDSLNEKLKIEHAKKKRLFDLYINGRYEVSELDSMMNDIDAQINYYESQIEANEELKKNKRTQENLADLATVDFDSLEFREKQLYLKSLINKIYIDGEQVTIEWL

SEQ ID NO: 6220 - protein, 485 aa, synthetic construct
MSKKVAIYTRVSTTNQAEEGFSIDEQIDRLTKYAEAMGWQVSDTYTDAGFSGAKLERPAMQRLINDIESKAFDTVLVYKLDRLSRSVRDTLYLVKDVFTKNKIDFISLSESIDTSSAMGSLFLTILSAINEFERENIKERMTMGKLGRAKSGKSMMWTKTAFGYYHNRKTGILEIVPLQATIVEQIFTDYLSGISLTKLRDKLNNSGHIGKDIPWSYRTLRQTLDNPVYCGYIKFKGSLFEGMHKPIIPYETYLKVQRELEERQQQTYERNNNPRPFQAKYMLSGMARCGYCGAPLRIVLGHKRKDGSRTMKYHCANRFPRKTKGVTVYNDNKKCDSGTYDLSNLENTVIDNLIGFQENNDSLLKIINGNNQPILDTSSFKKQISLIDKKIQKNSDLYLNDFITMDELKVRTDSLQAEKKLLKAKISENKFNDSTDVFELVKTQLGSIPINELSYDDKKKIVNNLVSKVDVTADNVDIIFKFQLA

SEQ ID NO: 6221 - protein, 469 aa, synthetic construct
MSYTTPVRAAVYLRISEDRSGEQLGVARQREDCLKLCSRRKWVPVEYLDNDVSASTGKRRPAYEQMLADIAAGKIAAVVAWDLDRLHRRPIELEAFMSLADEKRLALATVAGDVDLATPQGRLVARLKGSVAAHETEHKKARQRRAARQKAERGHPNWSKAFGYLPGPNGPEPDPRTAPLVKQAYADILAGASLGDVCRQWNGAGAFTITGRPWTTTTLSKFLRKPRNAGLRAYKGARYGPVDRDAIVGKAQWSPLVDEATFWAAQAVLDAPGRAPGRKSVRRHLLTGLAGCGKCGNHLAGSYRTDGQVVYVCKACYGVAILADNIVPILYHVVAERLAMPDAVGLLRHEIHDAAEAEAIRLELETLYGELDRLAVERAEGLLTARQVKISTDIVNAKITKLQAHQLDQERLRVLDGIPLGTPQVAGMLAELSPDRFRAVLDVLAEVVVQPVGKSGRIFNPERVQVNWR

SEQ ID NO: 6222 - protein, 452 aa, synthetic construct
MKAAIYIRVSTREQVENYSIQAQTEKLTALCRSKDWDVYDIFIDGGYSGSNMNRPALNEMLSKLHEIDAVVVYRLDRLSRSQRDTITLIEEYFLKNNVEFVSLSETLDTSSPFGRAMIGILSVFAQLERETIRDRMVMGKIKRIEAGLPLTTAKGRTFGYDVIDTKLYVNEEEAKQLQLIYDIFEEEQSITSLQKRLKKLGLKVRTYSRYNNWLTNDLYCGYVSYKDKVHVRGIHEPIISEEQFYRVQEIFTRMGKNPNMNRGSASLLNNLVVCSKCGLGFVHRRKDTKSRGKKYHYRYYSCKTYKHTHELEKCGNKIWRADKLEELIINRVNNYSFASRNVDKEDELDSLNEKLRIEHAKKKRLFDLYINGGYEVSELDSMMNDIDAQINHYESQIEANEELKKNKKIQENLANLATVDYDSLEFREKQLYLKSLINKIYIDGEQVTIEWL

SEQ ID NO: 6223 - protein, 485 aa, synthetic construct
MTRKVAIYTRVSTTNQAEEGFSIDEQIDRLTKYAEAMGWQVSDTYTDAGFSGAKLERPAMQRLINDIENKAFDTVLVYKLDRLSRSVRDTLYLVKDVFTKNKIDFISLNESINTSSAMGSLFLTILSAINEFERENIKERMTMGKLGRAKSGKSMMWTRAAFGYYHNRETGILDIVPLQATIVEQIFTDYLSGISLTKLRDKLNEGGHIGKDIPWSYRTLRQTLDNPVYCGYIKFKDSLFEGMHKPIIPYETYLKVQKELKERQQQTYERNNNPRPFQAKYMLSGMARCGYCGAPLKIVLGHKRKDGSRTMKYHCANRFPRKTKGVTVYNDNKKCDSGTYDLSNLENTVIDSLIGFQEDNDSLLKIINGNNQPILDTSSLKKQISQIDKKIQKNSDLYLNDFITMDELKDRTDSLQAEKKLLKAKISGNKFNDSTDVFELVKTRLGSIPINELSYDNKKKIVNNLVSKVDVTADNVDIIFKFQLA

SEQ ID NO: 6224 - protein, 452 aa, synthetic construct
MKAAIYIRVSTREQVENYSIQAQTEKLTALCRSKDWDVYDIFIDGGYSGSNMNRPALNEMLSKLHEIDAVVVYRLDRLSRSQRDTITLIEEYFLKNNVEFVSLSETLDTSSPFGRAMIGILSVFAQLERETIRDRMVMGKIKRIEAGLPLTTAKGRTFGYDVIDTKLYINEEEAKQLQLIYDIFEEEQSITFLQKRLKKLGFKVRTYNRYNNWLTNDLYCGYVSYKDKVRVKGIHEPIISEEQFYRVQEIFARMGKNPNMNRDSASLLNNLVVCGKCGLGFVHRRKDIMGRGKKYHYRYYSCKTYKHVHELEKCGNKIWRADKLEELVINRVNNYSFASRNADKEGELDSLNEKLKIEHAKKKRLFELYINGSYEVSELDSMMNDIDAQINYYESQIEANEELKKNKKIQENLANLATVDFDSLEFREKQLHLKSLINKIYIDGEQVTIEWL

SEQ ID NO: 6225 - protein, 452 aa, synthetic construct
MKAAIYIRVSTREQVENYSIQAQTEKLTALCRSKDWDVYDIFVDGGYSGSNMNRPALNEMLSKLHEIDAVVVYRLDRLSRSQRDTITLIEEYFLKNSVEFVSLSETLDTSSPFGRAMIGILSVFAQLERETIRERMVMGKIKRIEAGLPLTTAKGRTFGYDVIDTKLYVNEEEAKQLQLIYDIFEEEQSITFLQKRLKKLGFKVRTYSRYNSWLTNDLYCGYVSYKDKVRVKGIHEPIISEEQFYRVQEIFTRMGRNPNMNRDSASLLNNLVVCSRCGLGFVHRRKDTMSRGKKYHYRYYSCKTYKHIHELEKCGNKIWRADKLEELIINRVNNYSFASRNVDKEDELDSLNEKLKTEHAKKKRLFDLYINGSYEVSELDSMMNDIDAQINYYESQVEANEELKKNKKIQENLANLATVDYDSLEFREKQLYLKSLINKIYIDGEQVTIEWL

SEQ ID NO: 6226 - protein, 469 aa, synthetic construct
MSYTTPVRAAVYLRISEDRSGEQLGVARQREDCLKLCDQRKWVPVEYLDNDVSASTGKRRPAYEQLLADITAGKIAAVVAWDLDRLHRRPIELEAFMSLADEKRLALATVAGDVDLATPQGRLVARLKGCVAAHETEHKKARQRRAARQKAERGLPNWSKAFGYLPGPNGPEPDPRTAPLVKQAYADILAGASLGDVCRQWNDTGAFTITGRPWTTTTLSKFLRKPRNAGLRAYKGARYGPVDRDAIVGKAQWSPLVDEATFWAAQAVLDAPGRAPGRKSVRRHLLTGLAGCGKCGNHLAGSCRTDGQVVYVCKACHGVAILADIIEPMLYHIVAERLAMPDAVDLLRREIHDAAEAETIRLELETLYGELDRLAVERAEGLLTARQVKISTDIVNAKITRLQARQLDQERLRVFDGIPLGTPQVAGMIAELSPNRFRAVLGVLAEVVVQPVGKGGRIFNPERVQVNWR

SEQ ID NO: 6227 - protein, 452 aa, synthetic construct
MKAAIYIRVSTREQVENYSIQAQTEKLTALCRSKDWDVYDIFIDGGYSGSNMNRPALNEMLSKLHEIDAVVVYRLDRLSRSQRDTITLIEEYFLKNNVEFVSLSETLDTSSPFGRAMIGILSVFAQLERETIRDRMVMGKIKRIEAGLPLTTAKGRTFGYDVIDTKLYINEEEAKQLQLIYDIFEEEQSITFLQKRLKKLGFKVRTYNRYNNWLTNDLYCGYVSYKDKVHVKGIHEPIISEEQFYRVQEIFTRMGKNPNMNRDSASLLNNLVVCSKCGLSFVHRRKDAMGRDKKYHYRYYSCKTYKHIHELEKCGNKIWRADKLEELIINRVNNYSFASRNADKEDELDSLNERLKIEHAKKKRLFDLYINGSYDVSELDSMMNGIDAQINYYESQIEANEELKKNKKIQENLAHLATVDFDSLEFREKQLYLKSLINKIYIDGEQVTIEWL

SEQ ID NO: 6228 - protein, 452 aa, synthetic construct
MKAAIYIRVSTREQVENYSIQAQTEKLTALCRSKDWDVYDIFIDGGYSGSNMNRPALNEMLSKLHEIDAVVVYRLDRLSRSQRDTITLIEEYFLKNNVEFVSLSETLDTSSPFGRAMIGILSVFAQLERETIRDRMVMGKIKRIEAGLPLTTAKGRTFGYDVVDAKLYINEEEAKQLQLIYDIFEEEQSITFLQKRLKKLGFKVRTYNRYSNWLTNDLYCGYVSYKDKVHVKGIHEPIISEEQFYRVQEIFTRMGKNPNMNRDSASLLSNLVVCSKCGLGFVHRRKDTTSRGKKYHYRYYSCKTYKHTHELEKCGNKIWRADKLEELIINRVNDYSLASRNVDKEDELDSLNEKLKVEHAKRKRLFDLYINGSYNVSELDSIMNDIDAQINYYESQIEANEELKKSKKIQENLANLATVDFDSLEFREKQLYLKSLINKIYIDGEQVTIEWL

SEQ ID NO: 6229 - protein, 452 aa, synthetic construct
MKAAIYIRVSTREQVENYSIQAQIEKLTALCRSKDWDVYDTFVDGGYSGSNMNRPALNEMLSKLHEIDAVVVYRLDRLSRSQRDTITLIEEYFLKNNVEFVSLSETLDTSSPFGRAMIGILSVFAQLERETIRDRMVMGKIKRIEAGLPLTTAKGRTFGYDVIDTKLYINEEEAKQLRLIYDIFEEEQSITSLQKRLKKLGFKVHTYNRYNNWLTNDLYCGYVSYKDKVHVKGIHEPIISEEQFYRVQEIFTRMGRSPNMNRDSASLLNNLMVCSKCGLGFVHRRKDAMSRSKKYHYRYYCCKTYKHIHELEKCGNKIWRADKLEELIINRVNDYSLAGRNVDKEDELDSLNEKLKIEHAKKKRLFDLYINGSYEVSELDSMMNDIDAQINYYESQIEANEELMKNKRAQENLANLATVDFDSLEFREKQLYLKGLISKIYIDGEQVTIEWL

SEQ ID NO: 6230 - protein, 469 aa, synthetic construct
MSYTTPVRAAVYLRISEDRSGEQLGVARQREDCLKLCDQRKWVPVEYLDNDVSASTGKRRPAYEQMLADITAGKIAAVVAWDLDRLHRRPIELEAFMSLADEKRLALATVAGDVDLATPQGRLVARLKGSVAAHETEHKKARQRRAARQKAERGHPNWSKAFGYLPGPNGPEPDPRTAPLVKQAYADILAGASLGDVCRQWNDAGAFTITGRPWTTTTLSKFLRKPRNAGLRAYKGAPYGPVDRDAIVGKAQWSQLVDEATFWAAQAVLDAPGRAPGRKSVRRHLLTGLAGCGKCGNHLAGSYRTDGRVVYVCKSCHGVAILADNIEPILYHIVAERLAMPDAVDLLRREIHDAAEAETIRLELETLYGELDRLAVERAEGLLTARQVKISTDIVNAKITELQARQLDQERLRVLDGIPLGTPQVAGVIAGLSPDRFRAVLDVLAGVVVQPVGKSGRIFNPERVQVNWR

SEQ ID NO: 6231 - protein, 469 aa, synthetic construct
MSYTTPVRAAMYLRISEDRSGEQLGVARQREDCLKLCGQRKWEPVEYLDNDVSASTGKRRPAYEQMLADIAAGKIAAVVAWDLDRLHRRPIELEAFMSLADEKRLALATVAGDVDLATPQGRLVARLKGSVAAHETEHKRARQRRAARQKAERGHPNWSKAFGYLPGPNGPEPDPRTAPLVKQAYADILAGASLGDVCRRWNSAGAVTITGRPWTTTALSKFLRKPRNAGLRAYKGARYGPVDRDAIVGKAQWSPLVDEATFWAAQAVLDAPGRAPGRKSVRRHLLTGLAGCGKCGNHLAGSYRTDGRVVYVCKACHGVAILADNIEPILYRIVAERLTMPDAVNLLRREIHDAAEAETIRLELETLYGELDRLAVERAEGLLTARQVKISTDIVNAKITKLQARQLDQGRLRVLDGIPLGTPQVAGMIAELSPDRFRAVLDVLAEVVVQPVGKGGRIFNPERVQVNWR

SEQ ID NO: 6232 - protein, 452 aa, synthetic construct
MKAAIYIRVSTREQVENYSIQAQTEKLTALCRSKDWDVYDIFIDGGYSGSNMNRPALNEMLNKLHEIDAVVVYRLDRLSRSQRDTITLIEEYFLKNNVEFVSLSETLDTSSPFGRAMIGILSVFAQLERETIRDRMVMGKIKRIEAGLPLTTAKGRTFGYDVIDAKLYINEEEAKQLRLIYDIFEEERSITFLQKRLKKLGFKVRTYNRYNNWLTNDLYCGYVSYKDRVHVKGIHEPIISEEQFYRVQEIFTRMGKNPNMNRGSASLLNNLVVCSKCGLGFVHRRKDIMSRGKKYHYRYYSCKTYKHIHELEKCGNKIWRADKLEELIINRVNNYSLASRNTDKEDELDSLNEKLKIEHAKKKRLFELYINGSYEVSELDSMMSDIDAQINYYEGQIEANEELKKNKKVQESLAYLATVDFDSLEFREKQLYLKSLINKIYIDGEQVTIEWL

SEQ ID NO: 6233 - protein, 452 aa, synthetic construct
MKAAIYIRVSTREQVENYSIQAQTEKLTALCRSKGWDVYDIFIDGGYSGSNMNRPALNEMLSKLHEIDAVVVYRLDRLSRSQRDTIILIEEYFLKNNVEFVSLSETLDTSSPFGRAMVGILSVFAQLERETIRDRMVMGKIKRIEAGLPLTTAKGRTFGYDVIDTKLYINEEEAKQLQLIYDIFEEEQSITFLQKRLKKLGFKVRTYNRYNNWLTNDLYCGYVSYKDKVHVKGIHEPIISEEQFYRVQEIFTRMGKNPNMNRDSASLLNNLVVCSKCGLGFVHRRKDTMSRGKKYHYRYYSCKTYKHTHELEKCGNKIWRADKLEELIINRVNNYSFASRNVDEEDELNSLNEKLKIEHAKKKRLFDLYINGSYEVSELDSMMNGIDAQINYYESQIEANEELKKNKKIQENLAVLATVDFDSLEFREKQRYLKSLINRIYIDGEQVTIEWL

SEQ ID NO: 6234 - protein, 452 aa, synthetic construct
MKAAIYIRVSTREQVENYSIQAQTEKLTALCRSKDWDVYDIFIDGGYSGSNMNRPALNEMLSKLHEIDAVVVYRLDRLSRSQRDTITLIEEYFLKNNVEFVSLSETLDTSSPFGRAMIGILSVFAQLERETIRDRMVMGKIKRIEAGLPLTTAKGRTFGYDVIDTKLYINEEEARQLQLIYDIFEEEQSITFLQKRLKKLGFKVRTYNHYNNWLTNDLYCGYVSYKDKVHVKGIHEPIISEEQFYRVQEIFTRMGKNPNMNRDSASLLNNLVVCSKCGLGFVHRRKDTMSRGKKYHYRYYSCKTYKHTHELEKCGNKIWRADELEELIISRVNNYSFASRNVDKEDELDSLNEKLKIEHAKKKRLFELYINGSYEVSELDSMMNDIDAQINYYESQIEANEELRRNKKIQENLADLATVDYDSLEFREKQLYLKSLINKIYIDGEQVTIEWL

SEQ ID NO: 6235 - protein, 452 aa, synthetic construct
MKAAIYIRVSTQEQVENYSIQAQTEKLTALCRSKDWDVYDIFVDGGYSGSNMNRPALNEMLSKLHEIDAVVVYRLDRLSRSQRDTITLIEEYFLKNNVEFVSLSETLDTSSPFGRAMIGILSVFAQLERETIRDRMVMGKIKRIEAGLPLTTAKGRTFGYDVIDTKLYINEEEAKQLQLIYDIFEEEQSITFLQKRLKKLGFKVRTYNRYNNWLTNDLYCGYVSYKDIVHVKGIHEPIISEEQFYRVQEIFTRMGKNPNMSRDSASLLNNLVVCSKCGLGFVHRRKDTVSRGKRYHYRYYSCKTYKHTHELEKCGNKIWRADKLEELIINRVNDYSLASRNVDKEDELDSLNEKLKTEHAKKKRLFDLYINGSYEVSELDSMMNDIDAQINYYESQIEANEELKKNKKIQENLADLATVDFDSLEFREKQLYLKSLINKIYIDGEQVTIEWL

SEQ ID NO: 6236 - protein, 469 aa, synthetic construct
MSYITPVRAAVYLRISEDRSGEQLGVARQREDCLELCGQRKWVPVEYLDNDVSASTGKRRPAYEQMLADITAGKIAAVVAWDLDRLHRRPIELEAFMSLADEKRLALATVAGDVDLATPQGRLVARLKGCVAAHETEHKKARQRRAARQKAERGLPNWSKAFGYLPGPNGPEPDPRTAPLVKQAYADILAGASLGDVCRQWNDAGAFTITGRPWTTTTLSKFLRKPRNAGLRAYKGARYGPVDRDAIVGKAQWSPLVDEATFWAAQAVLDAPGRAPGRKSVRRHLLTGLAGCGKCGNHLAGSYRTDGRVVYVCKACHGVSILADNIEPILYHIVAERLAVPNAVDLLRRGIRDAAEAETIRLELETLYGELDRLAVERAEGLLTARQVKISTDIVSAKITKLQAHQLDQERQRVFDGIPLGTPQVADAIAELSPDRFRAVLDVLAEVVVQPVGKSGRTFNPERVQVNWR

SEQ ID NO: 6237 - protein, 452 aa, synthetic construct
MKAAIYIRVSTREQVENYSIQAQTEKLTALCRSKDWDVYDIFIDGGYSGSNMNRPALNEMLGKLHEIDAVVVYRLDRLSRSQRDTITLIEEYFLKNNVEFVSLSETLDTSSPFGRAMIGILSVFAQLERETIRDRMVMGKIKRIEAGLPLTTAKGRTFGYDVIDTKLYINEEEAKQLQLIYDIFEEERSITLLQKRLKKLGFKVHTYNRYNNWLTNDLYCGYVSYKDKVHVRGIHEPIISEEQFYRVQEIFARMGKNPNMNRDSASLLNNLVVCSKCGLGFVHRRKDTMSRGKKYHYRYYSCKTYKHTHELEKCGNKIWRADKLEELIIDRVNNYSFASRNVDKEDELGSLNEKLKIEHAKKRRLFDLYINGSYEANELDSMMNDIDAQINYYESQIEASEELKKNKKIQENLADLATVDFDSLEFREKQLYLKSLINKIYIDGEQVTIEWL

SEQ ID NO: 6238 - protein, 485 aa, synthetic construct
MTKKVAIYTRVSTTNQAEEGFSIDEQIDRLTKYAEAMGWQMSDTYTDAGFSGAKLERPAMQRLINDIESKAFDTVLVYKLDRLSRSVRDTLYLVKEVFTKNKIDFISLNESIDTSSAMGSLFLTILSAINEFERENIKERMTMGKLGRARSGKSMMWTKTAFGYYHNRKTGILEIVPLQATIVEQIFTDYLSGISLTKLRDKLNESGHIGKDIPWSYRTLRQTLDNPVYCGYIKFKGSLFEGMHKPIISYETYLRVQKELEERQQQTYERNDNPRPFQAKYMLSGMARCGYCGAPLRIVLGHKRRDGSRTMKYHCANRFPRRTKGVTVYNDSKKCDSGTYDLSSLENTVIDNLIGFQENNDSLLKIINGNNQPILDTSSFKKQISQIDKKIQKNSDLYLNDFITMDELKDRTDSLQAEKKLLKAKISENRFNNSTDVFELVKAQLGSIPINELSYDDKKKIVNNLVSKVEVTADNVVIIFKFQLA

SEQ ID NO: 6239 - protein, 452 aa, synthetic construct
MKAAIYIRVSTREQVENYSIQAQTEKLTALCRSKDWDVYDIFIDGGYSGSNMNRPALNEMLSKLHEIDAVVVYRLDRLSRSQRDTITLIEEYFLKNNVEFVSLSETLDTSSPFGRAMIGILSVFAQLERETIRDRMVMGKIKRIEAGLPLTTAKGRTFGYDVIDTKLYINEEEAKQLQLIYDIFEEEQSITFLQKRLKKLGFRVRTYSCYNNWLTNDLYCGYVSYKDKVHVKGIHEPIISEEQFYRVQEIFTRMGKNPNMNRDSASLLNNLVVCSKCGLGFVHRRKDTVSRGKKYRYRYYSCKTYKHTHELEKCGNKIWRADKLEELIINRVNNYSFASRNADKEDELDSLNEKLKVEHAKRKRLFDLYINGSYEESELDSMMNDIDAQINYYESQVEANEELKRNRRVQENLADLATVDFDSLEFREKQLYLKSLINKIYIDGEQVTIEWL

SEQ ID NO: 6240 - protein, 485 aa, synthetic construct
MTKKVAIYTRVSTTNQAEEGFSIDEQIDRLTKYAEAMGWQVSDTYTDAGFSGAKLGRPAMQRLINDIENKAFDTVLVYKLDRLSRSVRDTLYLVKDVFTKNKIDFISLNESIDTSSAMGSLFLTILSAINEFERENIKERMTMGKLGRAKSGKSMMWTKTAFGYYHNRKTGILEVVPLQATIVEQIFTDYLSGISLTKLRDKLNESGHIGKDIPWSYRTLRQTLDNPVYCGYIKFKDSLFEGMHKPIIPYETYLKVQKELEERQQQTYERNNNPRPFQAKYMLSGMARCGYCGAPLRIVLGHKRKDGSRTMRYHCANRFPRKTKGITVYNDNKKCDSGTYDLGDLENTVIDNLIGLQENNDSLLKIINGNNQPILDTSSFKKQISQIDKKIQKNSDLYLNDFITMDELKDRTDSLQAEKKLLKAKISENELNDSTDVFELVKTQLGSIPINELSYDNKKKIVNDLVSKVDVTADNVDIIFKFQLA

SEQ ID NO: 6241 - protein, 452 aa, synthetic construct
MKAAIYIRVSTREQVENYSIQAQTEKLTALCRSKDWDVYDIYIDGGYSGSNMNRPALNEMLSKLHEIDAVVVYRLDRLSRSQRDTITLIEEYFLKNNVEFVSLSETLDTSSPFGRAMIGILSVFAQLERETIRDRMVMGKIKRIEAGLPLTTAKGRTFGYDVIDTKLYINEEEAKQLQLIYDIFEEEQSITFLQKRLKKLGFKVRTYNRYSNWLTNDLYCGYVSYKDKVHVKGIHEPIISEEQFNRVQEIFTRMGKNPNTNHDSASLLNNLVVCSKCGLSFVHRRKDTMSRGKKYHYRYYSCKTYKHTHELEKCGNKIWRADKLEELIINRVNNHSLASRNVVKEDELDSLDEKLKIEQAKRKRLFDLYINGSYNVSELDSMMNDIDAQINYYESQIEANGELRKNKKIQENLADLATVDFDSLEFREKQLYLKSLINKIYIDGEQVTIEWL

SEQ ID NO: 6242 - protein, 485 aa, synthetic construct
MTKKVAIYTRVSTTNQAEEGFSIDEQIDRLTKYAEAMGWRVSDTYTDAGLSGAKLERPAMQRLINDIENKAFDTVLVYKLDRLSRSVRDTLYLVKDVFTKNKIDFISLNESIDTSSAMGSLFLTILSAINEFERENIKERMTMGKLGRAKSGKSMMWSKTAFGYYHNRKTGILEIVPLQATIVEQIFTDYLSGISLTKLRDKLNESGHIGKDIPWSYRTLRQTLDNPVYCGYIKFKDSLFEGMHKPIIPYETYLKVQKELEERQQQTYERNNNPRPFQAKYMLSGMARCGYCGAPLKIVLGHKRKDGSRTMKYHCANRFPRKTKGITVYNDNKKCDSGTYDLSNLENTVIDNLIGLQENDDSLLKVINGNNQPILDTSSLKKRISQIDKKIQKNSDLYLNDFITMDELKDRTGGLQAEKKLLKAKISENKFNDSTDVFELAKTQLGSIPINELSYDNKKKIVNNLVSKVDVTADNVDIIFKFQLA

SEQ ID NO: 6243 - protein, 452 aa, synthetic construct
MKAAIYIRVSTREQVENYSIQAQTEKLTALCRSKDWDVYDIFIDGGYSGSNMNRPALNEMLSKLHEIDAVVVYRLDRLSRSQRDTITLIEEYFLKNNVEFVSLSETLDTSSPFGRAMIGILSVFAQLERETIRDRMVLGKIKRIEAGLPLTTAKGRTFGYDVIDTKLYINEEEAKQLQLIYDIFEEEQSITFLQKRLKELGFKVRTYNRYNSWLTNDLYCGYVSYKDKVHVKGIHEPIISEEQFYRVQEIFTRMGKNPNMNRDSASLLNNLVVCSKCGLGFVHRRKDTTSRGKKYHYRYYSCKTYKHTHELEKCGNKIWRADKLEELIINRVNNHSLASRNVDKEDELDSLYEKLKIEHAKKRRLFDLYIDGSYEVGELDSMMNDIDAQINHYESQIEANEELKKNKKIQENLADLATVDFDSLEFREKQLYLKSLINKIYIDGEQVTIEWL

SEQ ID NO: 6244 - protein, 452 aa, synthetic construct
MKAAIYIRVSTREQVENYSIQAQTEKLTALCRSKDWDVYDIFVDGGYSGSNMNRPALNEMLSKLHEIDAVVVYRLDRLSRSQRDTITLIEEYFLKNNVEFVSLSETLDTSSPFGRAMIGILSVFAQLERETIRDRMVMGKIKRIEAGLPLTTAKGRTFGYDVIDTKLYINEEEAKQLQLIYDIFEEEQSITFLQKRLKKLGFKVRTYNRYNSWLTNDLYCGYVSYKDKVRVKGIHEPIISEEQFYRVQEIFTRMGKNPNMNRGSASLLNNLVVCSKCGLGFVHRRKDIMSHGKKYHYRYYSCKTYKHIHELEKCGNKIWRADKLEELIINRVNNYSLASRNVDKEDELDSLNEKLKIEHAKKKRLFELYINGSYEVSELDSMMNDIDAQINYYESQIEANKELKKNKKIQENLADLATVDFDSLEFREKQLYLKSLINKIYIDGEQVTIEWL

SEQ ID NO: 6245 - protein, 469 aa, synthetic construct
MSYTTPVRAAVYLRISEDRSGEQLGVARQREDCLKLCGQRKWVPVEYLDNDVSASTGKRRPAYEQMLADIAAGKIAAVVAWDLDRLHRRPIELEAFMSLADEKRLALATVAGDIDLATPQGRLVARLKASVAAHETEHKKARQRRAARQKAERGHPNWSKAFGYLPGPNGPEPDPRTAPLVKQAYADILTGASLGDVCRQWNVAGAFTITGRPWTTTTLSKFLRKPRNAGLRAYKGARYGPVDRDAIVGKAQWSPLVDEATFWAAQAVLDAPGRAPGRRSVRRHLLTGLAGCGKCGNHLAGSYRTDGQVVYVCKACHGVAILADNIEPILYHIVAERLATPDAVELLRREVHDAAEAETIRLELETLYGELDRLAVERAEGLLTGRQVKISTDIVNAKITKLQARQLDQERLRVLDGIPLGTPQVAGVVAELSPDRFRAVLDVLAEVVVQPVGKSGRIFNPGRVQVNWR

SEQ ID NO: 6246 - protein, 452 aa, synthetic construct
MKAAIYIRVSTQEQVGNYSIQAQTEKLTALCRSKDWDVYDIFIDGGYSGSNMNRPALNEMLSKLHEIDAVVVYRLDRLSRSQRDTTTLIEEYFLKNNVEFVSLSETLDTSSPFGRAMIGVLSVFAQLERETIRDRMVMGKIKRIEAGLPLTTAKGRTFGYDVIDTKLYINEEEAKQLQLIYDIFEEVQSITLLQKRLKKLGFKVRTYNRYNNWLTNDLYCGYVSYKDKVHVKGIHEPIISEEQFYRVQEIFTRTGKNPNMNRDSASLLNNLVVCNKCGLGFVHRSKDTMCRGKKYHYRYYSCKTYKHTHELEKCGNKTWRADKLEELIINRVNNYSSASRNVDKEDELNSLNEKLKIEHAKKKRLFDLYINGSYEVSELDSMMNDIDAQINYYESQIEANEELKENKKIQENLADLATVDFDSLEFREKQLYLRSLINKIYIDGEQVTIEWL

SEQ ID NO: 6247 - protein, 452 aa, synthetic construct
MKAAIYIRVSTQEQVENYSIQAQTEKLTALCRSKDWDVYDIFIDGGYSGSNMNRPALNEMLSKLHEVDAVVVYRLDRLSRSQRDTTTLIEEYFLKNNVEFVSLSETLDTSSPFGRAMIGILSVFAQLERETIRDRMVMGKIKRIEAGLPLTTAKGRTFGYDVIDTKLYINEEEAKQLQLIYDIFEEEQSITSLQKRLKKLGFKVRTYNRYNNWLTNDLYCGYVSYKDKVHVKGIHEPIISEEQFYRVQEIFTRMGKNPNMNRDNASLLSNLVVCSKCGLGFVHRSKDTMSRGKKYHYRYYSCKTYKHTHELEKCGNKTWRADKLEELIINRVNSYSFAGRNVDKEDELDSLNEKLKIEHAKKKRLFDLYINGSYEVSELDNMMNDIDAQINYYESRIEANEELRRNKKIQENLADLATVDFDSLEFREKQLYLKSLINKIYIDGEQVTIEWL

SEQ ID NO: 6248 - protein, 452 aa, synthetic construct
MKAAIYIRVSTREQVENYSIQAQTEKLTALCRSKDWDVYDIFIDGGYSGSNMNRPALNEMLSKLHEIDAVVVYRLDRLSRSQRDTITLIEEYFLKNNVEFVSLSETLDTSSPFGRAMIGILSVFAQLERETIRDRMVMGKIKRVEAGLPLTTAKGRTFGYDVIDTRLYINEEEAKQLQLIYDIFEEEQSITFLQKRLKKLGFKVRTYSRYTNWLTNDLYCGYVSYKDKVHVKGIHEPIISEEQFYRVQEIFTRMGKSPNMNRDSASLLNNLVVCSKCGLSFVHRRKDTMSRGKKYHYRYYSCKTYKHTHELEKCGNKIWRADKLEELIINRVNNYSFASRNVDKEDELASLNEKLKTEHAKKRRLFDLYINGSYEVSELDSMMSDIDAQINYYESRIAADEELREHKKIQENLADLATVDFDSLEFREKQLYLKSLINKIYIDGEQVTIEWL

SEQ ID NO: 6249 - protein, 452 aa, synthetic construct
MKAAIYIRVSTREQVENYSIQAQTEKLTALCRSKDWDVYDIFIDGGYSGSNMNRPALNEMLSKLHEIDAVVVYRLDRLSRSQRDTITLIEEYFLKNNVEFVSLSETLDTSSPFGRAMIGILSVFAQLERETIRDRMVMGKIKRIEAGLPLTTAKGRTFGYDVVDTKLYINEEEAKQLQLIYDIFEEERSITFLQKRLKKLGFKVRTYSCYNSWLTNDLYCGYVSYKDKVHVKGIHEPIISEEQFYRVQEIFTRMGKNPNMNRDSASLLNNLVVCGKCGLGFVHRRKDTMSRGKKYHYRYYSCKTYKHTHELEKCGNKIWRADKLEELIINRVNNYSLASRNVVKEDELDSLNEKLKIEHAKRKRLFDLYINGNYGVGELDSMMSDIDAQINYYESQIEANEGLKRNKKIQENLEELATVDFDSLEFREKQLYLKSLINKIYIDGEQVTIEWL

SEQ ID NO: 6250 - protein, 452 aa, synthetic construct
MKAAIYIRVSTREQVENYSIQAQAEKLTALCRSKDWDVYDIFIDGGYSGSNMNRPALNEMLSKLHEIDAVVVYRLDRLSRSQRDTITLIEEYFLKNNVEFVSLSETLDTSSPFGRAMIGILSVFAQLERETIRDRMVMGKIKRIEAGLPLTTAKGRTFGYDVIDTKLYINEEEAKQLQLIYDIFEEEQSITFLQKRLKKLGFRVRTYSRYSNWLTNDLYCGYVSYKDKVHVKGVHEPIISEEQFYRVQEIFTRMGKNPNMNRDSASLLNNLVVCSKCGLGFVHRRKDTASRGKKYHYRYYSCKTYKHTHELEKCGNKIWRADKLEELIINRVNNYSIASRNVDKEDELNSLNEKLKIEHAKKRRLFDLYVNGSYEVSELDSMMNDIDAQINYYESQIEANEELKKNKKIRENLANLAIVDYDSLGFREKQLYLKGLINKIYIDGEQVTIEWL

SEQ ID NO: 6251 - protein, 452 aa, synthetic construct
MKAAIYIRVSTREQVGNYSIQAQTERLTALCRSKGWDVYDIFIDGGYSGSNMNRPALNEMLSKLHEIDAVVVYRLDRLSRSQRDTITLIEEYFLKNNVEFVSLSETLDTSSPFGRAMIGILSVFAQLERETIRDRMVMGKIKRIEAGLPLTTAKGRTFGYDVIDTKLYINEEEAKQLQLIYDIFEEERSITFLQKRLKKLGFKVHTYNRYSNWLTNDLYCGYVSYKDKVHVKGIHEPIISEEQFYRVQEIFTRMGKNPNTNRDSASLLNNLVVCSKCGLGFVHRRKDTTSRGKKYHYRYYSCKTYKHIHELEKCGNKIWRADRLEELIINRVNNYSSASRNVDKEDELDSLNEKLKIEHAKKKRLFDLYINGSYEVSELDSMMNDIDAQINYYESQIEANEELKKNKKIQENLADLAAVDYDSLEFREKQLYLKSLINKIYIDGEQVTIEWL

SEQ ID NO: 6252 - protein, 469 aa, synthetic construct
MSYTTPVRAAVYLRISEDRSGEQLGVARQREDCLKLCDQRKWVPVEYLDNDVSASTGKRRPAYEQMLADITAGKIAAVVAWDLDRLHRRPIELEAFMSLADEKRLALATVAGDVDLATPQGRLVARLKGSVAAHETEHKKARQRRAARQKAERGLPNWSKAFGYLPGPNGPEPDPRTAPLVKQAYADILAGASLGDVCRQWNDAGAFTITGRPWATTTLSKFLRKPRNAGLRAYKGARYGPVDRDAIVGKAQWSPLVDEATFWAAQAVLDAPGRAPGRKSVRRHLLTGLAGCGKCGNHLAGSYRTDGRVVYVCKACHGVAILADNIEPTLYHIVAERLAMPDVMDLLRCEIHDAAEAETIRLELETLYGELDRLAVERAEGLLTARQVKICTDIVNAKITKLRARQLDQGRLRVFGGIPLGTPQVAGVIAELSPDRFRAVLDVLAEVVVQPVGKSGRTFNPERVQVNWR

SEQ ID NO: 6253 - protein, 469 aa, synthetic construct
MSYTTPVRAAVYLRISEDRSGEQLGVARQREDCLKLCDQRKWVPVEYLDNDVSASTGKRRPAYEQMLADITAGKIAAVVAWDLDRLHRRPMELEAFMSLADEKRLALATAAGDVDLATPQGRLVARLKGSVAAHETEHKKARQRRAARQKAERGHPNWSKAFGYLPGPNGPEPDPRTAPLVKQAYADILAGASLGDVCRRWNDVGAFTITGRPWTTTTLSKFLRKPRNAGLRAYKGARYGPVDRDAIVGKAQWSPLVDEATFWAAQAVLDAPGRAPGRKSVRRHLLTGLAGCGKCGNHLAGSYRTDGRVVYVCKACHGVAILADNIEPILYHIVAERLAMPDAVDLLRREIHDAAEAETIRLGLETLYGELDRLAVERAEGLLTARQVKISTDIVNAKITKLRACQLDQERLRVFAGIPLGTPRVAGMIAGLSPDRFRAVLDVLVEVVVQPVGKSGRIFNPKRVQVNWR

SEQ ID NO: 6254 - protein, 469 aa, synthetic construct
MSYTTPVRAAVYLRISEDRSGEQLGVARQREDCLKLCGQRKWVPVEYLDNDVSASTGKRRPAYEQMLADITAGKIAAVVAWDLDRLHRRPVELEAFMSLADEKRLALATVAGDVDLATPQGRLVARLKGSVAAHETEHKKARQRRAARQKAERGYPNWSKAFGYLSGPNGPEPDPRTAPLVKQAYADILAGASLGDVCRQWNGAGAFTITGRPWTTTTLSKFLRKPRNAGLRAYKGARYGPVDRDAIVGKAQWSPLVDEATFWAAQAVLDAPGRAPGRKSVRRHLLTGLAGCGKCGNHLAGSYRTDGKVVYVCKACHGVAILADNIEPILYHIVAERLAMPDAVGLLRREIHDVAEAETIRLELETLYGELDRLAVERAEGLLTARQVKISTDIVNGKITELQAHQLDQERLRVFDGIPLGTPQVAGMIAELSPDRFRAVLDVLAEVVVQPVGKSGRIFNPKRVQVNWR

SEQ ID NO: 6255 - protein, 452 aa, synthetic construct
MKAAIYIRVSTQEQVGNYSIQAQTEKLTALCRSKDWDVYDIFIDGGYSGSNMNRPALNEMLSKLHEIDAVVVYRLDRLSRSQRDTTTLIEEYFLKNNVEFVSLSETLDTSSPFGRAMIGILSVFAQLERETIRDRMVMGKIKRIEAGLPLTTAKGRTFGYDVIDTKLYVNEEEAKQLQLIYDIFEEEQSITSLQKRLKKLGFKVRTYNRYNNWLTNDLYCGYVSYKDRVHVKGIHEPIISEEQFYRVQEIFTRMGKNPNMNRDSASLLNSLVVCSKCGLGFVHRSKDTMSRGKRYHYRYYSCKTYKHTHELEKCGNKTWRADKLEELIVNRVNNYSFASRNADREDELDSLNEKLKIEHARKKRLFDLYINGSYEVSELDSMMNDIDAQINYYESQIEANKELKKNKKIQENLADLATVDFDSLEFREKQLYLKSLINKIYIDDEQVTIEWR

SEQ ID NO: 6256 - protein, 469 aa, synthetic construct
MSYTTPVRAAVYLRISEDRSGEQLGVARQREDCLKLCDQRKWVPVEYLDNDVSASTGKRRPAYEQMLADISAGKIAAVVAWDLDRLHRRPIELEAFMSLADEKRLALATVAGDVDLATPQGRLVARLKGSVAAHETEHKKARQRRAARQKAERGHPNWSKAFGYLPGPNGPEPDPRTAPLVKQAYADILAGASLGDVCRQWNDAGAFTITGRLWTTTTLSKFLRKPRNAGLRAYKGARYGPVDRDAIVGKAQWNPLVDEATFWAAQAVLDAPGRAPGRKSVRRHLLTGLAGCGKCGNHLAGSYRTDGRVVYVCKACHGVAILADNIEPILYHIVAERLAMPNAVDLLRRDTHDAAEAETIRLELETQYGELDRLAVERAEGLLTARQVKISTDIVNAKITELQARQLDQERLRVFDGIPLGTPQVADMIAELSPDRFRAVLDVLAEVVVQPVGKSGRIFNPERVQVNWR

SEQ ID NO: 6257 - protein, 452 aa, synthetic construct
MKAAIYIRVSTREQVENYSIQAQTEKLTALCRSKDWDVYDIFIDGGYSGSNMNRPALNEMLSKLHEIDAVVVYRLDRLSRSQRDTITLIEEYFLKNNVEFVSLSETLDTSSPFGRAMIGILSVFAQLERETIRDRMVMGKIKRVEAGLPLTTAKGRTFGYDVIDTKLYINEEEAKQLQLIYDIFEEEQSITFLQKRLKKLGFKVRTYSCYNNWLTNDLYCGYVSYKDKVHVKGIHEPIISEEQFCRVQEIFARMGKNPNMNRDSASLLNNLVVCSKCGLGFVHRRKDTMSRGKKYHYRYYSCKTYKHTHELEKCGNKIWRADKLEELIISRVNNYSFASRNVDREDELDSLNEKLKIEHAKKKRLFDLYINGSYEVSELDCMMNDIDAQINYYESRIEANEELKKDKKIQESLANLATVDYDSLEFREKQLYLKSLINKIYIDGEQVTIEWL

SEQ ID NO: 6258 - protein, 469 aa, synthetic construct
MSYTTPVRAAVYLRISEDRSGEQLGVARQREDCLKLCDQRKWVPVEYLDNDVSASTGKRRPAYEQMLADITAGKIAAVVAWDLDRLHRRPIELETFMSLADEKRLALATVAGDVDLATPQGRLVARLKGSVAAHETEHKKARQRRAARQKAERGLPNWSRAFGYLPGPNGPEPDPRTAPLVKQAYADILAGASLGDVCRRWNDAGAFTITGRPWTTTTLSKFLRKPRNAGLRAYKGARYGPVDRDAIVGKAQWSPLVDEATFWAAQAVLDAPGRAPGRKSVRRHLLTGLAGCGKCGYHLAGSYRTDGRVVYVCKACHGVAILADNIEPILYHIVAERLAMPDAVDLLRREIHDAAEAETIRLELETLYGELDRLAVERAEGLLTARQVRISTDIVNAKITKLQAHQLDQERLRVFDGIPLGTSQVVGMIAELSPNRFRAVLDVLAEVVVQPVGKSGRIFNPERVQVNWR

SEQ ID NO: 6259 - protein, 485 aa, synthetic construct
MTKKVAIYTRVSTTNQAEEGFSIDEQIDRLTKYAEAMGWQVSDTYTDAGLSGAKLERPAMQRLINDIENKAFDTVLVYKLDRLSRSVRDTLYLVKDVFTKNKIDFISLNESIDTSSAMGSLFLTILSAINEFERENIKERMTMGKLGRAKSGKSMMWTKTAFGYYHNRKTGILEIVPLQATIVEQIFTDYLSGISLTKLRDKLNESGHIGKDIPWSYRTLRQTLENPVYCGYIKFKGSLFEGMHKPIIPYETYLKVQKELEERQQQTYERNNNPRPFQAKYMLSGMARCGYCGAPLRIVLGRKRKDGGRTMKYHCANRFPRKTKGVTVYNDNKKCDSGTYDLSNLENTVIDNLVGFQENNDSLLKIINGNNQPILDTGSLEKQISQIDKKIQKNSDLYLNDFITMDELKDRTDSLQAEKKLLKAKISENKFNDSTDVFELVKTQLGSIPINELCYDNKKKIVNNLVSKVDVTADNVDIIFKFQLA

SEQ ID NO: 6260 - protein, 452 aa, synthetic construct
MKAAIYIRVSTREQVENYSIQAQTEKLTALCRSKDWDVYDIFIDGGYSGSNMNRPALNEMLSKLHEIDAVVVYRLDRLSRSQRDTITLIEEYFLKNNVEFVSLSETLDTSSPFGRAMIGILSVFAQLERETIRDRMVMGKIKRIEAGLPLTTAKGRTFGYDVIDTKLYINEEEAKQLQLIYDIFEEEQSITFLQKRLKKLGFKVRTYNCYNNWLTNDLYCGYVSYKDKVHVKGIHEPIISEEQFYRVQEIFTRMGKNPNMNRDSASLLNNLVVCSKCGLGFVHRRKDTTSRGKKYHYRYYSCKTYKRTHELEKCGNKIWRADKLEELIINRVNNYSFASRNVDKENELGSLYEKLNIEHAKKRRLFDLYINGSYEVSELDSMMNDIDAQINYYESQIEANEELKKNKEIQENLADLATVDFDSLEFREKQLYLKSLINKIYIDGEQVTIEWL

SEQ ID NO: 6261 - protein, 452 aa, synthetic construct
MKAAIYIRVSTREQVENYSIQAQTEKLTALCRSKGWGVYDIFIDGGYSGSNMNRPALNEMLSKLHEIDAVVVYRLDRLSRSQRDTITLIEEYFLKNNVEFVSLSETLDTSSPFGRAMIGILSVFAQLERETIRDRMVMGKIKRVEAGLPLTTAKGRTFGYDVIDTKLYINEEEAKQLQLIYDIFEEEQSITFLQKRLKKLGFKVRTYSCYNNWLTNDLYCGYVSYKDKVHVRGIHEPIISEEQFHRVQEIFTRMGKSPNMNRDSASLLNNLVVCSKCGLGFVHRRKDAMSRDKKYHYRYYSCKTYKHIHELEKCGNKIWRADKLEELIISRVNNYSLASRNVDKEDELDSLNEKLKIEHAKKKRLFDLYINGRYEVSELDSMMNDIDAQINYYESQIEANEELKKNKQIQENLANLATVDFDSLEFREKQRYLKSLINKIYIDGEQVTIEWL

SEQ ID NO: 6262 - protein, 452 aa, synthetic construct
MKAAIYIRVSTQEQVENYSIQAQTEKLTALCRSKGWDVYDSFIDGGYSGSNMNRPALNEMLNKLHEIDAVVVYRLDRLSRSQRDTITLIEEYFLKNDVEFVSLSETLDTSSPFGRAMIGILSVFAQLERETIRDRMVMGKIKRIEAGLPLTTAKGRTFGYDVIDTKLYINEEEAKQLQLIYDIFEEEQSITFLQKRLKKLGFKVRTYNRYNDWLTNDLYCGYVSYKDKVHVKGIHEPIISEEQFYRVQEIFTRMGKNPNMNRDSASLLNNLVVCSKCGLGYVHRRKDTMSRGKKYHYRYYSCKTYKHTHELEKCGNKIWRADKLEELIINRVNNYSFASRNVDKEDELDSLNEKLKIEHAKKKRLFDLYINGSYEVSELDSMMNDIDAQINYYESQIEANEGLRKNKKIQENLANLATVDFDSLEFREKQLYLKSLINKIYIDGEQVTIEWL

SEQ ID NO: 6263 - protein, 469 aa, synthetic construct
MSYTTPVRAAVYLRISEDRSGEQLGVARQREDCLKLCGQRKWEPVEYLDNDVSASTGKRRPAYERMLADITAGKIAAVVAWDLDRLHRRPIELEAFMSLADEKRLALATVAGDVDLATPQGRLVARLKGSVAAHETEHKKARQRRAARQKAERGHPNWSKAFGYLPGPNGPEPDPRTAPLVKQAYADILAGASLGDVCRQWNAAGAFTITGRPWTTTALSKFLRKPRNAGLRAYKGARYGPVDRDAIVGKAQWSPLVDEATFWAAQAVLDAPGRAPGRKSVRRHLLTGLAGCGKCGNHLAGSYRTDGQVVYVCKTCHGVAILADNIEPILYHIVAERLAMPDAVDLLRREIHDAAEAETIRLELETLYGELDSLAVERAEGLLTARQVKISTDIVNAKIIELQARQLDQERLRVFGGIPLGTPQVAGMIAELSPDRFRAVLDVLAEVVVQPVGKGGRVFNTERVQVNWR

SEQ ID NO: 6264 - protein, 469 aa, synthetic construct
MSYTTPMRAAVYLRISEDRSGEQLGVARQREDCLKLCDQRKWVPVEYLDNDMSASTGKRRPAYEQMLADITAGKIAAVVAWDLDRLHRRPIELEAFMSLADEKRLALATVAGDVDLATPQGRLVARLKGSVAAHETEHKKARQRRAARQKAERGLPNWSKAFGYLPGPNGPEPDPRTAPLVKQAYADILAGASLGDVCRQWNDAGASTITGRPWTTTTLSKFLRKPRNAGLRAYKGARYGPVDRDAIVGKAQWSPLVDEATFWAAQAVLDAPGRAPGRKSVRRHLLTGLAGCGKCGNHLAGSYRTDGRVVYVCKACHGVAILADNIVPTLYHTVAERLAMPGAVDLLRREIHDAAEAEAIRLELETLYGELDRLAVERAEGLLTARQVKISTDIVNAKITKLQARQLDQERLRVLDGIPLGTPQVAGMIAELSPDRFRAVLDVLAEVVVQPVGKRGRSFNPERVQVNWR

SEQ ID NO: 6265 - protein, 485 aa, synthetic construct
MSKKVAIYTRVSTTNQAEEGFSIDEQVDRLTRYAEAMGWQVSGTYTDAGISGAKLERPAMQRLINDIENKAFDTVLVYKLDRLSRSVRDTLYLVKDVFTKNKIDFISLNESIDTSSAMGSLFLTILSAINEFERENIKERMTMGKLGRAKSGKSMMWTKTAFGYYHNRETGILEVVPLQATIVEQIFTDYLSGISLTKLRDKLNESGHIGKDIPWSYRTLRQTLDNPVYCGYIKFKDSLFEGMHKPIIPYETYLKVQKELEERQQQTYGRNNNPRPFQAKYMLSGMARCGYCGAPLKIVLGRKRKDGSRTMKYHCANRFPRKTKGVTVYNDNKKCDSGTYDLSNLENTVIDTLIGFQENNDSLLKIINGNNQPILDTSSFKKQISQIDKKIQKNGDLYLNDFITMDELKNRTDSLQAEKKLLKAKISENKLNDSTNVFELVKTQLGSIPINELSYDNKKKIVNSLVGKVDVTADNVDIIFKFQLA

SEQ ID NO: 6266 - protein, 452 aa, synthetic construct
MKAAIYIRVSTREQVENYSIQAQTEKLTALCRSKDWDVYDIFIDGGYSGSNMNRPALNEMLSKLHEIDAVVVYRLDRLSRSQRDTITLIEEYFLKNNVEFVSLSETLDTSSPFGRAMIGILSVFAQLERETIRDRMVMGKIKRIEAGLPLTTAKGRTFGYDVIGTKLYINEEEAKQLQLIYDIFEEEQSITFLQKRLKELGYKVRTYNRYNNWLTNDLYCGYVSYKDKVRVKGIHEPIISEEQFYRVQEIFTRMGKNPNMNRDSASLLNNLVVCGKCGLGFVHRRKDAMSRDKKYHYRYYSCKTYKHIHELEKCGNKIWRADKLEELIINRVNNYSFASRNAGKEDELDSLNEKLKIEHAKKKRLFDLYINGNYEVSELDSMMSDIDAQINYYESRIEANEELKKNKKIQENLAELATVDFDSLEFREKQRYLKSLINKIYIDGEQVTIEWL

SEQ ID NO: 6267 - protein, 452 aa, synthetic construct
MKAAIYIRVSTREQVENYSIQAQTEKLTALCRSKDWDVYDIFIDGGYSGSNMNRPALNEMLSKLHEIDAVVVYRLDRLSRSQRDTITLIEEYFLKNNVEFVSLSETLDTSSPFGRAMIGILSVFAQLERETIRDRMVMGKIKRIEAGLPLTTAKGRTFGYDVIDTRLYINEEEAKQLQLIYDIFEEERSITSLQRRLKKLGFKVRTYNRYNNWLTNDLYCGYVSYKDKVHVKGIHEPIISEEQFYRVQEIFTRMGKNPNMNRGSASLLNNLVVCGKCGLSFVHRRKDAMSRDKKYHYRYYSCKTYKHIHELEKCGNKIWRADKLEELIINRVNNYSLASRNVVKEDELDSLNEKLRAEHAKKKRLFGLYISGSYEVSELDSMMNDIDAQINYYESQIEANEDLKKNKKIQENLAYLATVDFDSLEFREKQLYLKGLINKIYIDGEQVTIEWL

SEQ ID NO: 6268 - protein, 452 aa, synthetic construct
MKAAIYIRVSTQEQVGNYSIQAQTEKLTALCRSKDWDVYDIFIDGGYSGSNMNRPALNEMLSKLHEIDAVVVYRLDRLSRSQRDTTTLIEEYFLKNNVEFVSLSETLDTSSPFGRAMIGILSVFAQLERETIRDRMVMGKIKRIEAGLPLTTAKGRTFGYDVIDTKLYINEEEAKQLQLIYDIFEEEQSITSLQKRLKKLGFKVRTYNRYNNWLTNDLYCGYVSYKDKVHVKGIHEPIISEEQFYRVQEIFARMGKNPNMNRDNASLLSNLVVCSKCGLGFVHRSKDTMSRGKKYHYRYYSCKTYKHTHELEKCGNKIWRADKLEELIINRVNNYSFVSRNVDKEDELDSLNEKLKIEHAKKERLFDLYINGSYEVSELDSMMNDIDAQISYYEGLIGASEELRKDKKIQENLADLATVDFDSLEFREKQLYLKSLISKIYIDGEQVTIEWL

SEQ ID NO: 6269 - protein, 452 aa, synthetic construct
MKAAIYIRVSTREQVENYSIQAQTEKLTALCRSKGWDVYDIFIDGGYSGSNMNRPALNEMLSKLHEIDAVVVYRLDRLSRSQRDTITLIEEYFLKNNVEFVSLSETLDTSSPFGRAMIGILSVFAQLERETIRDRMTMGKIKRIEAGLPLTTAKGRTFGYDVIDTKLYINEEEAKQLRLIYDIFEEEQSITFLQKRLKKLGFKVRTYSCYNNWLTNDLYCGHVSYKDKVHVKGIHEPIISEEQFYRVQEIFTRMGKNPNMNRDSASLLNNLVVCSKCGLGFVHRRKDTMSRGKKYHYRYYSCKTYKHIHELEKCGNKIWRADKLEELIINRVNNYSLASRVADKEDELDSLNEKLKIEHAKKKRLFDLYINGSYEVSELDSMMNDIDAQINYYESQIVANEELKKNKKIQENLANLATVDYDSLEFREKQLYLKSLINKIYIDGEQVTIEWL

SEQ ID NO: 6270 - protein, 469 aa, synthetic construct
MNYTTPVRAAVYLRISEDRSGEQLGVARQREDCLKLCDQRKWVPVEYLDNDVSASTGKRRPAYEQMLADITAGKIAAVVAWDLDRLHRRPIELEAFMSLADEKRLALATVAGDVDLATPQGRLVARLKGSVAAHETEHKRARQRRAARQKAERGHPNWSRAFGYLPGPNGPEPDPRTAPLVKQAYADILAGASLGDVCRQWNGAGAFTITGRPWATTTLSKFLRKPRNAGLRAYKGARYGPVDRDAIVGKAQWSPLVDEATFWAAQAVLDAPGRAPGRKSVRRHLLTGLAGCGKCGNHLAGSYRTDGRVVYVCKACHGVAILADSIEPILYRVVAERLAMPDAVDLLRREIHDAAEAETIRLELETLYGELDRLAVERAEGLLTARQVKISTDIVNAKITKLQARQLDQERLRVFDGIPLGSPQVAGMIAKLSPDRFRAVLDVLAEVVVQPVGKSGRIFNPERVQVNWR

SEQ ID NO: 6271 - protein, 452 aa, synthetic construct
MKAAIYIRVSTREQVENYSIRAQTEKLTALCRSKDWDVYDIFIDGGYSGSNMNRPALNEMLSKLHEIDAVVVYRLDRLSRSQRDTITLIEEYFLKNNVEFVSLSETLDTSSPFGRAMIGILSVFAQLERETIRDRMVMGKIKRIEAGLPLTTAKGRTFGYDVIDTKLYINEEEAKQLQLIYDIFEEEQSITFLQKRLKKLGFKVHAYNRYNNWLTNDLYCGYVSYKDKVHVKGIHEPIISEEQFYRVQEIFTRMGKNPNMNRDSASLLNNLVVCSKCGLGFVHRRKDTTSRGRKYHYRYYSCKTYKHTHELEKCGNKIWRADKLEELIINRVNNYSFASRNVDKEDELDSLNEKLKVERAKKKRLFDLYINGSYEVSELDSMMNDIDAQINYYESQIEANEELKKDKKIQESLANLATVDYDSLEFREKQLYLKSLINKIYIDGEQVTIEWL

SEQ ID NO: 6272 - protein, 485 aa, synthetic construct
MTKKVAIYTRVSTTNQAEEGFSIDEQIDRLTKYAEAMGWQVSDTYTDAGFSGAKLVRPAMQRLINDIENKAFDTVLVYKLDRLSRSVRDTLYLVKDVFTKNKIDFISLNECIDTSSAMGSLFLTILSAINEFERENIKERMTMGKLGRAKSGKSMMWTKTAFGYHHNRKTGILEIVPLQATIVEQIFTDYLSGISLTKLRDKLNESGHIGKDIPWSYRTLRQTLDNPVYCGYIKFKDSLFEGMHKPIIPYETYLKVQKELEERQQQAYERNNNPRPFQAKYMLSGMARCGYCGAPLRIVLGHKRKDGSRTMKYHCANRFPRKTEGVTVYNDNKKCDSGTYDLSNLENTVIDSLVGIQENNDSLLKIISGNNQPILDTNSFKKQISQIDKKIQKNSELYLNDFITMDELRVRTDSLQAEKKLLKAKISENKFNDSTDVFELVKTQLGSTPINELSYDNKKRIVNNLVSKVDVTADNVDIIFKFQLA

SEQ ID NO: 6273 - protein, 485 aa, synthetic construct
MTKKVAIYTRVSTTNQAEEGFSIDEQIDRLTKYAEAMGWQVSDTYTDAGFSGAKLERPAMQRLINDVEDRAFDTVLVHKLDRLSRSVRDTLYLVKDVFTKNKIDFISLSESIDTSSAMGSLFLTILSAINEFERESIKERMTMGKLGRAKSGKSMMWTKTAFGYYHNRKTGILEIVPLQATIVEQIFTDYLSGISLSKLRDKLNESGHIGKDIPWSYRTLRQTLDNPVYCGYIKFKGSLFEGMHKPIIPYETYLKVQKELEERQQQAYERNNNPRPFQSKYMLSGMARCGYCGAPLRIVLGHKRKDGSRTMKYHCANRFPRKTKGVTVYNDNKKCDGGTYDLSNLENTVIDNLIGFQENNESLLKIINGNDQPIPDTSSLKKQISQIDKKIQKNSDLYLNDFITMDELKDRTDSLQAEKKLLKAKISGNNFNDSTDVFELVKTQLGSIPINELSYDNKKKIVNNLVSKVDVTADNVDIIFKFQLA

SEQ ID NO: 6274 - protein, 452 aa, synthetic construct
MKAAIYIRVSTQEQVENYSIQAQTEKLTALCRSKGWDVYDIFIDGGYSGSNMNRPALNEMLSKLHEIDAVVVYRLDRLSRSQRDTTTLIEEYFLKNNVEFVSLSETLDTSSPFGRAMIGILSVFAQLERETIRDRMVMGKIKRIEAGLPLTTAKGRTFGYDVIDTKLYINEEEAKQLRLIYDIFEEEQSITFLQKRLKKLGLKVRTYNRYNNWLTNDLYCGYVSYKDKVHVKGIHEPIISEEQFYRVQEIFTRMGKNPNMNRDSASLLNNLVVCGKCGLSFVHRSKDTMSRGKKYHYRYYSCKTYKHTHELEKCGNKTWRADKLEELIINRVNNYSFASRNVDKEDELDSLNEKLKIEHAKKKRLFDLYINGSYEVSELDSMMNDIDAQINYYESQIEANEELKKNKKIQENLADLATVDFDSLGFREKRLYLKSLINKIYIDGEQVTIEWL

SEQ ID NO: 6275 - protein, 452 aa, synthetic construct
MKAAIYIRVSTQEQVGNYSIQAQTEKLTALCRSKDWDVYDIFIDGGYSGSNMNRPALNEMLSKLHEIDAVVVYRLDRLSRSQRDTTTLIEEYFLKNNVEFVSLSETLDTSSPFGRAMIGILSVFAQLERETIRDRTVMGKIKRIEAGLPLTTAKGRTFGYDVIDTKLYINEEEAKQLQLIYDIFEEEQSITFLQKRLKKLGFRVRTYNRYNSWLTNDLYCGYVSYKDKVHVKGIHEPIISEEQFYRVQEIFTRMGRNPNMNRDSASLLNGLVVCSKCGLSFVHRSKDTMSRGKKYHYRYYSCKTYKHTHELEKCGNKTWRADKLEELIINRVSNYSFASRNVDKEDELDSLNGKLKIEHAKKKRLFDLYINGSYEVSELDSMMNDIDAQIDYYESQIEANEELKKDKKIQENLADLATVDFDSLEFREKQLYLKSLINKIYIDGEQVTIEWL

SEQ ID NO: 6276 - protein, 452 aa, synthetic construct; identical to SEQ ID NO: 4720

SEQ ID NO: 6277 - protein, 469 aa, synthetic construct
MSYTTPVRAAVYLRISEDRSGEQLGVARQREDCLTLCGQRKWVPVEYLDNDVSASTGKRRPAYEQMLADITAGKIAAVVAWDLDRLHRRPIELEAFMSLADEKRLALATVAGDVDLATPQGRLVARMKGCVAAHETEHKKARQRRAARQKAERGLPNWSKAFGYLPGPNGPEPDPRTAPLVKQAYADILAGASLGDVCRRWNNAGAFTITGRPWTTTTLSKFLRKPRNAGLRAYRGARYGPVDRDAIVGKAQWSPLVDEATFWAAQAVLDAPGRAPGRKSVRRHLLTGLAGCGKCGNHLAGSYRTDGQIVYVCKACHGVSILAVNIEPILYRIVAERLAMPDAVDLLRREIHDATEAETIRLELETLYGELDRLAVERAEGLLTARQVKISTDIVNAKITKLQARQLDQERLRVLDGIPLGTPQVAGMIAELSPDRFRAVLDVLAEVVVQPAGKSGRIFNPERVQVNWR

SEQ ID NO: 6278 - protein, 452 aa, synthetic construct
MKAAIYIRVSTQEQVENYSIQAQTEKLTALCRSKDWDVYDIFIDGGYSGSNMNRPALNEMLSKLHEIDAVVVYRLDRLSRSQRDTITLIEEYFLKNNVEFVSLSETLDTSSPFGRAMIGILSVFAQLERETIRDRMVMGKIKRIEAGLPLTTAKGRTFGYDVIDTKLYINEEEAKQLQLIYDIFEEEQSITFLQKRLKKLGFKVHTYNRYNSWLTNDLYCGYVSYKDKVHVKGIHEPIISEEQFYRVQEIFTRMSKNPNMNRDSASLLNNLVVCSKCGLGFVHRRKDTTSRGKKYHYRYYSCKTYKHTHELEKCGNKIWRADKLEELIINRVNNYSLASRNVDKEDELDSLYEKLKIEHAKKKRLFDLYINGSYEVSELDSIMNDIDAQINYYESQIEANEELKKSKKIQENLADLATVDYDSLEFREKQLYLKSLINKIYIDGEQVTIEWL

SEQ ID NO: 6279 - protein, 486 aa, synthetic construct
MTKKVAIYTRVSTTNQAEEGFSIDEQIDRLTKYAEAMGWQVSDTYTDAGFSGAKLERPAMQRLINDIENKAFDTVMVYKLDRLSRSVRDTLYLVKGVFTKNKIDFISLNESIDTSSAMGSLFLTILSAINEFERENIKERMTMGKLGRAKSGKSMMWTKTAFGYHHNRKTGILEIVPPQATIVEQIFTDYLSGISLTKLRDKLNESGHIGKDIPWSYRTLRQTLDNPVYCGYIKFKDSLFEGMHKPIIPYETYLKVQKELEERQQQTYERNNNPRPFQAKYMLSGMARCGYCGAPLRIVLGRKRKDGSRTMKYHCANRFPRKTKGVTVYNDNKKCDSGTYDLSNLENTVIDNLIGFQENNDSLLKIINGNNQPILDTSSFKKQISQIDKKIQKNSDLYLNDFITMDELKDRTDSLQVEKKLLEAKISENKFSDSTDVFELVKTQLGSVPINELSYDNKKKIVNNLVSKVDVTADNVDIIFKFQLAQ

SEQ ID NO: 6280 - protein, 452 aa, synthetic construct
MKAAIYIRVSTQEQVENYSIQAQTEKLTALCRSKDWDVYDIFIDGGYSGSNMNRPALNEMLSKLHEIDAVVVYRLDRLSRSQRDTITLIEEYFLKNNVEFVSLSETLDTSSPFGRAMIGILSVFAQLERETIRDRMVMGKVKRIEAGLPLTTAKGRTFGYDVIDTRLYVNKEEAKQLQLIYDIFEEEQSITFLQKRLKKLGLKVRTYNRYNSWLTNDLYCGYVSYKDKVHVKGIHEPIISEEQFYRVQEIFARMGKNPNMNRDSASLLNNLVVCSKCGLGFVHRRKDTMSRGKKYHYRYYSCKTYKHIHELEKCGNKIWRADKLEELIINRVNNYSFASRNVDKEDELDSLNEKLKIEHAKKKRLFDLYINGSYEVSELDSMLSDIDAQINYYESQIEAIEELKRNEKIQENLANLATVDYDSLEFREKQLYLKSLINKIYIDGEQVTIEWL

SEQ ID NO: 6281 - protein, 452 aa, synthetic construct
MKAAIYIRVSTREQVENYSIQAQTEKLTALCRSKDWDVYDIFIDGGYSGSNMNRPALNEMLSKLHEIDVVVVYRLDRLSRSQRDTITLIEEYFLKNNVEFVSLSETLDTSSPFGRAMIGILSVFAQLERETIRDRMVMGKIKRIEAGLPLTTAKGRTFGYDVIDTKLYINEEEAKQLRLIYDIFEEVQSITFLQQRLKKLGFKVRTYNRYNNWLTNDLYCGYVSYKDKVHVKGIHEPIISEEQFYRVQEIFTRMGKNPNMNRDSASLLNNLVVCSKCGLGFVHRRKDAVSRDKKYHYRYYSCKTYKHIHELEKCGNKIWRADKLEELIINRVNNYSLGSRNVDKEDELDSLNEKLKIEHAKKKRLFDLYINGSYEVSELDSMMKDIDAQISCYEGQIEANEGLKKSKKIQENLADLATVDFDSLEFREKQLYLKSLINKIYIDGEQVTIEWL

SEQ ID NO: 6282 - protein, 452 aa, synthetic construct
MKAAIYIRVSTREQVENYSIQAQTEKLTALCRSKDWDVYDIFIDGGYSGSNMNRPALNEMLSKLHEIDAVVVYRLDRLSRSQRDTITLIEEYFLKNNVEFVSLSETLDTSSPFGRAMIGILSVFAQLERETIRDRMVMGKIKRIEAGLPLTTAKGRTFGYDVIDTKLYINEEEAKQLQLIYDIFEEEQSITFLQKRLKKLGFKVRTYSRYNNWLTNDLYCGYVSYKDKVHVKGIHEPIISEEQFYRVQEIFARMGKNPNMNRDSASLLSNLVVCSKCGLGFVHRRKDTMSRGKKYRYRYYSCKTYKHTYELEKCGNKIWRADKLEELIINRVNDYSFAGRNADKEDELDSLNERLKIEHAKKKRLFDLYINGSYEVSELDSMMNDIDAQINYYESQIEANEELRKNKKIQENLADLATVDYDSLEFREKQLYLKSLISKIYIDGERVTIEWL

SEQ ID NO: 6283 - protein, 452 aa, synthetic construct
MKAAIYIRVSTREQVENYSIQAQTEKLTALCRSKDWDVYDIFIDGGYSGSNMNRPALNEMLSKLHEIDAVVVYRLDRLSRSQRDTITLIEEYFLKNNVEFVSLSETLDTSSPFGRAMIGILSVFAQLERETIRDRMVMGKIKRIEAGLPLTTAKGRTFGYDVIDTKLYINEEEAKQLRLIYDIFEEEQSITFLQKRLKKLGFKVRTYSCYNNWLTNDLYCGYVSYKDKVHVKGIHEPIISEEQFYRVQEIFTRMGKNPNMNRDSASLLNNLVVCSKCGLSFVHRRKDTMSRGKKYHYRYYSCKTYKHTHELEKCGNKIWRADKLEELIINRVHNYSLASRNVDKEDELDSLNEKLKIEHAKRKRLFGLYINGSYEMSELDSMMNDIDAQINYYESRIEANEELKKNKKIRENLANLATVDYDSLGFREKQLYLKGLINKIYIDGEQVTIEWL

SEQ ID NO: 6284 - protein, 452 aa, synthetic construct
MKAAIYIRVSTQEQVENYSIQAQTEKLTALCRSKDWDVYDIFIDGGYSGSNMNRPALNEMLSKLHEIDAVVVYRLDRLSRSQRDTTTLIEEYFLKNNVEFVSLSETLDTSSPFGRAMIGILSVFAQLERETIRDRMVMGKIKRIEAGLPLTTAKGRTFGYDVIDTKLYINEEEAKQLQLIYDIFEEEQSITSLQKRLKKLGFKVRTYNRYNNWLTNDLYCGYVSYKDKVHVKGIHEPIISEEQFYRVQEIFTRMGKNPNMNRDSASLLNNLVVCSKCGLSFVHRSKDTMSRGKKYHYRYYSCKTYKHTHELEKCGNKIWRADKLEELIINRVNNYSFVSRNVDKEDELDSLNEKLKIEHAKKKRLFDLYINGSYEVSELDSMMSDIDAQINYYESQIEANEELKKNKKIQESLADLATVDFDSLEFREKQLYLKSLINKIYIDGEQVTIEWL

SEQ ID NO: 6285 - protein, 452 aa, synthetic construct
MKAAIYIRVSTREQVENYSIQAQAEKLTALCRSKDWDVYDIFIDGGYSGSNMNRPALNEMLSKLHEIDAVVVYRLDRLSRSQRDTITLIEEYFLKNNVEFVSLSETLDTSSPFGRAMIGILSVFAQLERETIRDRMVMGKIKRIEAGLPLTTAKGRTFGYDVIDTKLYINEEEARQLQLIYDIFEEEQSITFLQKRLKKLGFKVRTYNRYNSWLTNDLYCGYVSYKDKVHVKGIHEPIISEEQFYRVQEIFTRMGKNPNMNRDSASLLNNLVVCSKCGLGFVHRRKDTMSRGKKYHYRYYSCKTYKHTHELEKCGNKIWRADKLEELIINRVNSYSFASRNVDKEDELDSLDEKLKIEQAKRKRLFDLYINGSYNVSELDSMMNDIDAQINYYESRIEANEELKKDKKIQGNLADLATVDFDSLEFREKQLYLKSLINKIYIDGEQVTIEWL

SEQ ID NO: 6286 - protein, 452 aa, synthetic construct
MKAAIYIRVSTREQVENYSIQAQTEKLTALCRSKDWDVYDIFVDGGYSGSNMNRPALNEMLSKLHEIDAVVVYRLDRLSRSQRDTITLIEEYFLKNNVEFVSLSETLDTSSPFGRAMIGILSVFAQLERETIRDRMVMGKIKRIEAGLPLTTAKGRTFGYDVIDTKLYVNEEEAKQLQLIYDIFEEEQSITFLQKRLKKLGFKVRSYNRYNNWLTNDLYCGYVSYKDKVHVKGIHEPIISEEQFYRVQEIFTRMGKNPNMNRDSASLLNNLVECSKCGLGFVHRRKDIMSRGKKYHYRYYSCKTYKHIHELEKCGNKIWRADKLEELITNRVNNYSLASRNVDKEDELDSLNEKLRTEHAKKKRLFDLYINGSYEVSELDSMMNDIDAQINYYESQIEANEELKKTKRIQENLAYLTTVDFDSLEFREKQQYLKSLISKIYIDGEQVTIEWL

SEQ ID NO: 6287 - protein, 485 aa, synthetic construct
MTKKVAIYTRVSTTNQAEEGFSIDEQIDRLTKYAEAMGWQVSDTYTDAGYSGAKLERPAMQRLINDIETKAFDTVLVYKLDRLSRSVRDTLYLVKGVFTKNRIDFISLNESIDTSSAMGSLFLTILSAINEFERENIKERMTMGKLGRAKSGKSMMWTKTAFGYYHNRETGILEIVPLQATIVEQIFTDYLGGLSLTKLRDKLNEGGHIGKDIPWSYRTLRQTLDNPVYCGYIKFKDSLFEGMHKPIIPYETYLKVQKELEERQQQTYERNNNPRPFQAKYMLSGMARCGYCGAPLRIVLGHKRKDGSRTMKYHCANRFPRKTKGVTVYNDNKKCDSGTYDLSNLENTVIDNLIGFQENDDSLLKIINGNNQPILDTSSIEKQVSQIDKKIQKNSDLYLNDFITMDELKGRTDCLQAEKKLLKAKISENKFNDSTVVFELVKTQLGSIPINELSYDDKKKIVNNLVSKVDVTADNVDIIFKFQLA

SEQ ID NO: 6288 - protein, 452 aa, synthetic construct
MKAAIYIRVSTREQVENYSIQAQTEKLTALCRSKDWDVYDIFIDGGYSGSNMNRPALSEMLSKLHEIDAVVVYRLDRLSRSQRDTITLIEEYFLKNNVEFVSLSETLDTSSPFGRAMIGILSVFAQLERETIRDRMVMGKIKRIEAGLPLTTAKGRTFGYDVIDTKLYINEEEAKQLQLIYDIFEEEQSITFLQKRLKRLGFKVRTYSCYNNWLTNDLYCGYVSYKDKVHVKGIHEPIISEEQFYRVQEIFTRMGKNPNMNRDSASLLNSLVVCSKCGLGFVHRRKDIMSRGKKYHYRYYSCKTYKHIHELEKCGNKIWRADKLEELIIDRVNNYSLASRNVDKEDELDSLNEKLEIEHAKKKRLFELYINGSYEVSELDSMMNDIDAQINYYESQIEASEELKKSKKIQENLAYLATVDFDSLEFREKQLYLKSLIDKIYIDGEQVTIEWL

SEQ ID NO: 6289 - protein, 485 aa, synthetic construct
MTKKVAIYTRVSTTNQAEEGFSIDEQIDRLTKYAEAMGWQVSDTYTDAGLSGAKLERPAMQRLINDIENKAFDTVLVYKLDRLSRSVRDTLYLVKDVFTKNKIDFISLNESIDTSSAMGSLFLTILSAINEFERENIKERMTMGKLGRAKSGKSMTWTKTAFGYYHNRKTGILEIVPLQATIVEQIFTDYLSGVSLTKLRDKLNESGHIGKDIPWSYRTLRQTLDNPVYCGYIKFKDSLFEGMHKPIIPYETYLKVQKELGERQQQAYERNNNPRPFQAKYMLSGMARCGYCGAPLRIVLGHKRRDGSRTMKYHCANRFPRKTKGVTVYNDNKKCDSGTYDLSNLENTVIDNLIDFQENSDSLLKIINGNNQPILDTSSFKKQISQIDKKIQKNSDLYLNDFITMDELRDRTDSLQAEKELLKAKISENKFNDSTDVFELVKTQLGSIPINELSYDNKKKIVNNLVSKVDVTADNVDIIFKFQLA

SEQ ID NO: 6290 - protein, 469 aa, synthetic construct
MSYTTPVRAAVYLRISEDRSGEQLGVARQREDCLKLCDQHKWVPVEYLDNDVSASTGKRRPAYEQMLVDITAGKIAAVVAWDLDRLHRRPIELEAFMSLADEKRLALATVAGDVDLATPQGRLVARLKGSVAAHETEHKKARQRRAARQKAERGYPNWSKAFGYLPGPNGPEPDPRTAPLVKRAYADILAGASLGDVCRQWNDAGAFTITGRQWTTTTLSKFLRKPRNAGLRAYKGARYGPVDRDAIVGKARWSPLVDEATFWAAQAVLDAPGRAPGRKSVRRHLLTGLAGCGKCGNHLAGSYRTDGRVVYVCKACYGVAILADNIEPILYHIVAERLAMPDAVGLLRREIHDAAEAETIRLELETLYGELDRLAVERAEGLLTARQVKISTDIVNAKITKLQARQLDQERLRVFDGVPLGTPQVAGVIAELSPDRFRAVLDVLAEVVVQPVGKSGRIFNPERVRVNWR

SEQ ID NO: 6291 - protein, 452 aa, synthetic construct
MKAAIYIRVSTREQVENYSIQAQTEKLTALCRSKDWDVYDIFIDGGYSGSNMNRPALNEMLGKLHEIDAVVVYRLDRLSRSQRDTITLIEEYFLKNNVEFVSLSETLDTSSPFGRAMIGILSVFAQLERETIRDRMVMGKIKRIEAGLPLTTAKGRTFGYDVIDTRLYINEEEAKQLRLIYNIFEEEQSITSLQKRLKELGFKVRPYNRYNNWLTNDLYCGYVSYKDRVHVKGIHEPIISEEQFYRVQEIFTRMGKNPNMNRNSASLLNNLVVCSKCGLGFVHRRKDAMSRDKKYHYRYYSCKTYKHIHELEKCGNKIWRADELEELVINRVNSYSVASRDVDKEDELDSLNEKLKTEHAKKKRLFDLYINGSYEVGELDSMMNDINAQINYYESQIEANEELKKNKKIQENLAYLATVDFDSLEFREKQLYLKSLINKIYIDGEQVTIEWL

SEQ ID NO: 6292 - protein, 452 aa, synthetic construct
MKAAIYIRVSTREQVENYSIQAQTEKLTALCRSKDWDVYDIFIDGGYSGSNMNRPALNEMLSKLHEIDAVVVYRLDRLSRSQRDTITLIEEYFLKNNVEFVSLCETLDTSSPFGRAMIGILSVFAQLERETIRDRMVMGKIKRIEAGLPLTTAKGRTFGYDVIDTKLYINEEEAKQLRLIYDIFEEEQSITFLQKRLKKLGFKVRSYNRYNNWLTNDLYCGYVSYKDKVHVKGIHEPIISEEQFYRVQEIFTRMGKNPNTNRDSASLLNNLVVCCKCGLGFVHRRKDTMSRGKKYHYRYYSCKTYKHTYELEKCGNKIWRADKLEELIINRVNNYSLASRNVDKGDELDSLNEKLKIEHAKKKRLFDLYINGSYEVSELDSMMNDIDVQINYYESQIEANEELRKNKKIQENLADLATVDYDNLGFREKQLYLKSLINKIYIDGEQVTIEWL

SEQ ID NO: 6293 - protein, 452 aa, synthetic construct
MKAAIYIRVSTQEQVGNYSIQAQTEKLTALCRSKDWDVYDIFIDGGYSGSNMNRPALNEMLSKLHEIDAVVVYRLDRLSRSQRDTTTLIEEYFLKNNVEFVSLSETLDTSSPFGRAMIGILSVFAQLERETIRDRMVMGKIKRIEAGLPLTTAKGRTFGYDVIDTKLYINEEEAKQLRLIYDIFEEEQSITFLQKRLKKLGLKVRTYNRYNSWLTNDLYCGYVSYKDKVHVKGIHEPIISEEQFCRVQEIFTRMGKNPNMNRDSASLLNNLVVCSKCGLGFVHRSKDTMCRGKKYHYRYYSCKTYKHTHELEKCGNKTWRADKLEELIINRVNNYSFASRNVDKEDELDSLNEKLKVEHAKKKRLFDLYINGSYEVSELDSVMNDIDAQINYYESQIEANEELKKNKKIQENLVDLATVDFDSLEFREKQLYLKSLINKIYIDGEQVTIEWL

SEQ ID NO: 6294 - protein, 452 aa, synthetic construct
MKAAIYIRVSTQEQVGNYSIQAQTEKLTALCRSKDWDVYDIFIDGGYSGSNMNRPALNEMLSKLHEIDAVVVYRLDRLSRSQRDTTTLIEEYFLKNNVEFVSLSETLDTSSPFGRAMIGILSVFAQLERETIRDRMVMGKIKRIEAGLPLTTAKGRTFGYDVIDTKLYINEEEAKQLQLIYDIFEEEQSITSLQKRLKKLGFKVRTYNRYSNWLTNDLYCGYVSYKDKVHVKGIHEPIISEEQFYRVQEIFTRMGKNPNMNRDSASLLSNLVVCSKCGLGFVHRSKDTMSRGKKYHYRYYSCKTYKHTHELEKCGNKTWRADKLEELIINRVNNYSFAGRNVDKEDELDSLNEKLKIEHAKKKRLFDLYINGSYEVSELDSMMNDIDAQINYYESRIEANEELKRNKKIQENLADLATVDFDSLEFREKQLYLKSLINKIYIDGEQVTIEWL

SEQ ID NO: 6295 - protein, 452 aa, synthetic construct
MKAAIYIRVSTREQVENYSIQAQTEKLTALCRSKGWDVCDIFIDGGYSGSNMNRPALNEMLSKLHEIDAVVVYRLDRLSRSQRDTITLIEEYFLKNNVEFVSLSETLDTSSPFGRAMIGILSVFAQLERETIRDRMVMGKIKRIEAGLPLTTAKGRTFGYDVIDTKLYVNEEEAKQLQLIYDIFEEEQSITLLQKRLKKLGFKVRTYSRYNNWLTNDLYCGYVSYKDKVHAKGIHEPIISEEQFYRVQEIFTRMGKNPNMNRDSASLLNNLVMCSKCGLGFVHRRKDTTSRGKKYHYRYYSCKTYKHIHELEKCGNKIWRADKLEELIINRVNNYSFASRNMDKEDELDSLNEKLKIEHAKKKRLFDLYINGSYEVSELDSMMYDIDAQINYYESQIEANEELKKNKKIQENLANLATVDYDSLEFREKQLYLKSLINKIYIDGEQVTIEWL

SEQ ID NO: 6296 - protein, 485 aa, synthetic construct
MTKKVAIYTRVSTTNQAEEGFSIDEQTDRLTKYAEAMGWQVSDTYTDAGFSGAKLERPAMQRLINDIENKAFDTVLVYKLDRLSRSVRDTLYLVKDVFTKNKIDFISLNECIDTSSAMGSLFLTILSAINEFERENIKERMTMGKLGRAKSGKSMMWTKTAFGYYHNRKTGILEIVPLQATIVKQIFTDYLSGISLTKLRDKLNESGHIGKDIPWSYRTLRQTLDNPVYCGYIKFKDSLFEGMHKPIIPYETYLKVQKELEERQQQTYERNNNPRPFQAKYMLSGMARCGYCGAPLKIVLGHKRKDGSRTMKYHCANRFPRKTKGVTVYNDNKKCDSGTYDLSNLENTVIDNLIGFQENNDSLLKIINGNDQPILDTSSFKKQISQIDKKIQKNSDLYLNDFITMDELKDRTDRLQAEKKRLKAKISENKFNDSTDVFELVKTQLGSIPINELSYDDKKKIVNNLVSKVDVTADNVDIIFKFQLA

SEQ ID NO: 6297 - protein, 486 aa, synthetic construct
MTKKVAIYTRVSTTNQAEEGFSIDEQTDRLTKYAEAMGWRVCDTYTDAGFSGAKLERPAMQRLINDIENKAFDTVLVYKLDRLSRSVRDTLYLVKDVFTKNKIDFISLNESINTSSAMGSLFLTILSAINEFERENIKERMTMGKLGRAKSGKSMMWTKTAFGYYHNRKTGILEIVPLQATIVEQIFTDYLSGISLTKLRDKLNESGHIGKDIPWSYRTLRQTLDNPVYCGYIKFKDSLFEGMHKPIIPYETYLKVQKELEERQQQTYERNNNPRPFQAKYMLSGKARCGYCGAPLRIVPGHKRKDGSRTMKYHCANRFPRKTKGVTVYNDNKKCDSGTYGLSDLETTVIDSLIGFQENNDSLLKIINGSNQPILDTGSFKKQISQIDKKIQKNGDLYLNDFITMDELKGRTDSLQAEKKLLEAKISENKFNDSTDVFEQVKTQLGSIPINELSYDNKKKIVNNLVSKVDVTADNVDIIFKFQLAQ

SEQ ID NO: 6298 - protein, 485 aa, synthetic construct
MIKKVAIYTRVSTTNQAEEGFSIDEQIDRLTKYAEAMGWQVSDTYTDAGFSGAKLERPAMQRLINDIENKAFDTVLVYKLDRLSRSVRDTLYLVKDVFTKNKIDFISLNESINTSSAMGSLFLTILSAINEFERENIKERMTMGKLGRAKSGKSMMWTKTAFGYYHNRRTGILEIVPLQATIVEQIFTDYLSGISLTKLRDKLNESGHIGKDIPWSYRTLRQTLGNPVYCGYIKFKGSQFEGMHKPIIPYETYLKVQKELEERQQQTYGRNNNPRPFQAKYMLSGMARCGYCGAPLRIVLGHKRKDGSRTMKYHCANRFPRKTKGITVYNDNKKCDSGTYDLSNLEDAVIDSLIGFQENDDSLLKIINGNNQPILDTSSFEKQISQIDKKIQKNSDLYLNDFITMDELKDRTDSLQAEKKLLRAKISGNKFNDSTDVFELVKTQLGSIPINELSYDNKKKIVNNLVSKVDVTADNVDIIFKFQLA

SEQ ID NO: 6299 - protein, 452 aa, synthetic construct
MKAAIYIRVSTREQVENYSIQAQTEKLTALCRSKDWDVYDIFIDGGYSGSNMNRPALNEMLSKLHEIDAVVVYRLDRLSRSQRDTITLIEEYFLKNDVEFVSLSETLDTSSPFGRAMIGILSVFAQLERETIRDRMVMGKIKRIEAGLPLTTAKGRTFGYDVIDTKLYINEEEAKQLQLIYDIFEEERSITFLQKRLKKLGFKVRTYSCYNNWLTNDLYCGYVSYKDKVHVKGIHEPIISEEQFYRVQEIFTRMGKNPNMNRDSASLLNNLVVCSKCGLGFVHRRKDTMSRGKKYHYRYYSCKTYKHTHELEKCGNKIWRADKLEELIISRVNNYSFAGRNADKEDELDSLNEKLKIEHAKRRRLFDLYINGSYEVSELDSMMNDIDAQINYYESQIEANEELKKDKKIQESLANLATVDYDSLEFREKQLYLKSLINKIYIDGEQVTIEWL

SEQ ID NO: 6300 - protein, 452 aa, synthetic construct
MKAAIYIRVSTQEQVENYSIQAQTEKLTALCRSKGWDVYDIFIDGGYSGSNMNRPALNEMLSKLHEIDAVVVYRLDRLSRSQRDTTTLIEEYFLKNNVEFVSLSETLDTSSPFGRAMIGILSVFAQLERETIRDRMVMGKIKRIEAGLPLTTAKGRTFGYDVIDTKLYINEEEAKQLQLIYDIFEEEQSITFLQKRLKKLGFKVRTYNRYNSWLTNDLYCGYVSYKDKVHVKGIHEPIISEEQFYRVQEIFTRMGKNPNMNRDSASLLNNLVVCSRCGLGFVHRRKDTMSGGKKYHYRYYSCKTYKHTHELEKCGNKTWRADKLEELIIDRVNNYSFASRNVDKEDELDSLNEKLKIEHAKKKRLFDLYINGSYEVSELDSMMNDIDAQINYYESQIEANGELRRNKIIQENLADLATADFDSLEFREKQLYLRSLINKIYIDGEQVTIEWL

SEQ ID NO: 6301 - protein, 469 aa, synthetic construct
MCYTTPVRAAVYLRISEDRSGEQLGVARQREDCLKLCDQHKWVPVEYLDNDVSASTGKRRPAYEQMLADITAGKIAAVVAWDLDRLHRRPIELEAFMSLADEKRLALATVAGDVDLATPQGRLVARLKGSVAAHETEHKKARQRRAARQKAERGLPNWSKAFGYLPGPNGPEPDPRTAPLVKQAYADILAGASLGDVCRQWNNAGASTITGRPWTTTTLSKFLRKPRNAGLRAYKGARYGPVDRDAIVGKAQWSPLVDEAAFWAAQAVLDAPGRAPGRKSVRRHLLTGLAGCGKCGNHLAGSYRTDGRVVYVCKACHGVAILADNIEPILYHIVAERLAMPDAVDLLRREIHDAAEAETVRLELETLYGELDRLAVERAEGLLTARQVKISTDIVNAKITKLQARQLDQERLRVFEGIPLGTPQVAGVIAKLSPDRFRAVLDVLAEVVVQPVGKSGRTFNPVRVQVNWR

SEQ ID NO: 6302 - protein, 452 aa, synthetic construct
MKAAIYIRVSTREQVENYSIQAQTEKLTALCRSKDWDVYDIFIDGGYSGSNMNRPALNEMLSKLHEIDAVAVYRLDRLSRSQRDTITLIEEYFLKNNVEFVSLSETLDTSSPFGRAMIGILSVFAQLERETIRDRTVMGKIKRVEAGLPLTTAKGRTFGYDVIDTKLYINEEEAKQLQLIYDIFEEEQSITFLQKRLKKLGFKVHTYNRYNNWLTNDLYCGYVSYKDKVHVKGIHEPIISEEQFHRVQGIIARMGKNPNMNRDSASLLNNLVVCSKCGLGFVHRRKDTVSRGKKYHYRYYSCKTYKHIHELEKCGNKIWRADKLEELVINRVNNYSFASRNVDKEDELDSLNEKLKIEHAKKKRLFELYINGSYEVGELDSMMNDIDAQIDYYESQIETNEELKKDKEIQVSLANLATVDYDSLEFREKQLYLKSLINKIYIDGEQVTIEWL

SEQ ID NO: 6303 - protein, 452 aa, synthetic construct
MKAAIYIRVSTQEQVGNYSIQAQTEKLTALCRSKGWDVYDIFIDGGYSGSNMNRPALNEMLSKLHEIDAVVVYRLDRLSRSQRDTTTLIEEYFLKNNVEFVSLSETLDTSSPFGRAMIGILSVFAQLERETIRDRMVMGKIKRIEAGLPLTTAKGRTFGYDVIDTKLYINEEEAKQLQLIYDIFEEEQSITSLQKRLKKLGFKVRTYNRYNNWLTNDLYCGYVSYKDKVHVKGIHEPIISEEQFYRVQEIFTRMGKNPNMNRESASLLSNLVVCSKCGLGFVHRSKDTMSRGKKYHYRYYSCKTYKHTHELEKCGNKIWRADKLEELIINRVNNYSFASRNVDKEDELDSLNEKLKIEHAKKRRLFDLYINGSYEVSELDSMMNEIDAQINYYESQIEANEELRKNKKIQENLADLATVDFGSLEFREKRLYLKSLINRIYIDGEQVTIEWL

SEQ ID NO: 6304 - protein, 452 aa, synthetic construct
MKAAIYIRVSTQEQVGNYSIQAQTEKLTALCRSKDWDVYDIFIDGGYSGSNMNRPALNEMLSKLHEIDAVVVYRLDRLSRSQRDTTTLIEEYFLKNNVEFVSLSETLDTSSPFGRAMIGILSVFAQLERETIRDRMVMGKIKRIEAGLPLTTAKGRTFGYDVIDTKLYINEEEARQLQLIYDIFEEEQSITSLQKRLKKLGFKVRTYNRYNNWLTNDLYCGYVSYKDKVHVKGIHEPIISEEQFYRVQEIFTRMGKNPNMNRDSASLLNNLVVCSKCGLGFVHRSKDTMCRGKKYHYRYYSCKTYKHTHELEKCGNKTWRADKLEELIINRVNNYSFASRNADKEDELDSLNEKLKIEHARKKRLFDLYINGSYEVSELDSMMNDIDAQINYYESQIEANEELKKNKKIQENLAGLATVDFDSLEFREKQLYLKSLINKIYIDGEQVTIEWL

SEQ ID NO: 6305 - protein, 452 aa, synthetic construct
MKAAIYIRVSTQEQVGNYSIQAQTEKLTALCRSKDWDVYDIFIDGGYSGSNMNRPALNEMLSKLHEIDAVVVYRLDRLSRSQRDTTTLIEEYFLKNNVEFVSLSETLDTSSPFGRAMIGILSVFAQLERETIRDRMVMGKIKRIEAGLPLTTAKGRTFGYDVIDTKLYINEEEARQLRLIYDIFEEEQSITFLQKRLKKLGFKVHTYNRYNNWLTNDLYCGYVSYKDKVHVKGIHEPIISEEQFYRVQEIFTRMGKNPNMNRDSASLLSNLVVCSKCGLGFVHRSKDTMSRGKKYHYRYYSCKTYKHTHELEKCGNKTWRADKLEELIINRVNNYSFASRNMVKEDELDSLNEKLKIEHAKKKRLFDLYINGSYEVSELDSMMNDIDAQINYYESQIEANEGLKKNRKIQENLADLATVDFDSLEFREKQLYLKSLINKIYIDGEQVTIEWL

SEQ ID NO: 6306 - protein, 485 aa, synthetic construct
MTKKVAIYTRVSTTNQAEEGFSIDEQIDRLTKYAEAMGWQVSDTYTDAGLSGAKLERPAMQRLINDIENKAFDTVLVYKLDRLSRSVRDTLYLVKDVFTNNKIDFISLNESIDTSSAMGSLFLTILSAVNEFERENIKERMTMGKLGRAKSGKSMMWTKTAFGYYHNRTTGILEIVPLQATIVEQIFTDYLSGVSLTKLRDKLNESGHIGKDIPWSYRALRQTLGNPVYCGYIKFKDSLFEGMHKPIIPYETYLKVQKELEERQQQTYARNNNPRPFQAKYMLSGMARCGYCGAPLRIVLGRKRKDGSRTMKYHCANRFPRKTKGVTVYNDNKKCDSGTYDLSNLENIVIDNLIGFQENNDSLLKIINGNNQPILDTSSFKKQISQIDRKIQKNSDLYLNDLITMDELKGRTDSLQAEKKLLKAKISENKFNDSTDVFELVKTQLGSIPINELSYDNKKKIVNNLVSRVDVTADSVDIIFKFQLA

SEQ ID NO: 6307 - protein, 452 aa, synthetic construct
MKAAIYIRVSTQEQVGNYSIQAQTEKLTALCRSKDWDVYDIFVDGGYSGSNMNRPALNEMLSKLHEIDAVVVYRLDRLSRSQRDTTTLIEEYFLKNNVEFVSLSETLDTSSPFGRAMIGILSVFAQLERETIRDRMVMGKIKRIEAGLPLTTAKGRTFGYDVIDTKLYINEEEAKQLRLIYDIFEEEQSITFLQKRLKKLGFKVRTYNRYSNWLTNDLYCGYVSYKDKVHVKGIHEPIISEEQFYRVQEIFTRMGKNPNMNRDNASLLSNLVVCSKCGLGFVHRSKDTMSRGKKYHYRYYSCKTYKHTHELEKCGNKTWRADELEGLIIDRVNNYSFASRNVDEEDELDSLNEKLKIEHAKKRRLFDLYINGSYEVSELDSMMNDIDAQINYYESQIEANDELKENKKIQENLADLATVDFDSLEFREKQLYLKSLINKIYIDGEQVTIDWL

SEQ ID NO: 6308 - protein, 469 aa, synthetic construct
MCYTTPVRAAVYLRISEDRSGEQLGVARQREDCLKLCGQRKWEPVEYLDNDVSASTGKRRPAYEQMLSDITAGKIAAVVAWDLDRLHRRPIELEAFMSLADEKRLALATVAGDVDLATPQGRLVARLKGSVAAHETEHKKARQRRAARQKAERGYPNWSKAFGYLPGPSGPEPDPRTAPLVKQAYADILAGASLGDVCRRWNDAGAFTITGRPWTTTALSKFLRKPRNAGLRAYKGARYGPVDRDAIVGKAQWSPLVDEATFWAAQAVLDAPGRAPGRKSVRRHLLTGLAGCGKCGSHLAGSYRTDGRVVYVCKACHGVAILADNIEPILYHIVAERLAMPDAVDLLRREVHDAAEAETIRLELETLYGELDRLAVERAEGLLTARQVKISTDIVNAKITKLLARQLDQERLRVFNGIPLGTPQVAGMIAELSPDRFRAVLDVLAEVVVQPVGKSGRTFNPERVQVNWR

SEQ ID NO: 6309 - protein, 452 aa, synthetic construct
MKAAIYIRVSTQEQVENYSIQAQTEKLTALCRSKDWDVYDIFIDGGYSGSNMNRPALNEMLSKLHEIDAVVVYRLDRLSRSQRDTITLIEEYFLKNNVEFVSLSETLDTSSPFGRAMIGILSVFAQLERETIRDRMVMGKIKRIEAGLPLTTAKGRTFGYDVVDTKLYINEEEAKQLRLIYDIFEEEQSITSLQKRLKKLGFKVRTYSRYNSWLTNDLYCGYVSYKDKVHVKGIHEPIISEEQFYRVQEIFTRMGKNPNMNRDSASLLNNLVVCSKCGLGFVHRRKDTTSRGKKYHYRYYSCKTYKHTHELEKCGNKIWRADKLEELIINRVSNYSLASRNVDKEDELDSLNEKLKIEHAKKKRLFDLYINGSYDVSELDSMMNDIDAQINYYESQIEANEELKKNKKIQENLADLATADFDSLGFREKQLYLKSLINKIYIDGEQVTIEWL

SEQ ID NO: 6310 - protein, 469 aa, synthetic construct
MSYTTPVRAAVYLRISEDRSGEQLGVARQREDCLKLCGQRKWVPVEYLDNDVSASTGRRRPAYERMLADITAGKIAAVVAWDLDRLHRRPIELEAFMSLADEKRLALATVAGDVDLSTPQGRLVARLKASVAAHETEHKKARQRRAARQKAERGLPNWSKAFGYLPGPNGPEPDPRTAPLVEQAYADILAGASLGDVCRQWNDAGAFTITGRPWTTTTLSKFLRKPRNAGLRAYKGACYGPVDRDAIVGKAQWSPLVDEATFWAAQAALDAPGRAPGRKSVRRHLLTGLAGCGKCGNHLAGSYRTDGRVVYVCKACHGVAILADNIEPILYHIVAERLAMPGAVDLLRREIHDAAEADAIRLKLETLYGELDRLAVERAEGLLTARQVKISTDIVNAKITKLQARQLDQERLRVFDGIPLGTPQVAGMIAELSPDRFRAVLDALAEVVVQPAGKSGRIFNPERVQVNWR

SEQ ID NO: 6311 - protein, 485 aa, synthetic construct
MTKKVAIYTRVSTTNQAEEGFSIDEQIDRLTKYAEAMGWQVSDTYTDAGFSGAKLERPAMQRLIDDIENKAFDTVLVYKLDRLSRSVRDTLYLVKEVFTKNKIDFISLNESIDTSSAMGSLFLTILSAINEFERENIKERTTMGKLGRAKSGKSMMWTKTAFGYHHNRKTGILEIVPLQATIVEQIFTDYLSGISLTKLRDKLNESGHIGKDIPWSYRTLRQTLDNPVYCGYIKFKDSLFEGMHKPIIPYETYLEVQKELEKRQQQTYERNNNPRPFQAKYMLSGMARCGYCGAPLKVVLGHKRKDGSHTMKYHCANRYPRKTKGVTVYNDNKKCDSGTYDLSNLENTVIDSLIGFQENNDSLLKLINSNNQPILDTSSLKEQISQIDKKIQKNSDLYLNDFITMDELKVRTDSLQAKKKLLKAKISENKFNDSTDVFGLVKAQLGSIPINELSYDNKKKIVNNLVSKVDVTADNVDIVFKFQLA

SEQ ID NO: 6312 - protein, 485 aa, synthetic construct
MTKKVAIYTRVSTTNQAEEGFSIDEQIDRLTKYAEAMGWQVSDTYTDAGFSGAKLERPAMQRLINDIENKAFDTVLVYKLDRLSRSVRDTLYLVKDVFTKNKIDFISLNESIDTSCAMGSLFLTILSAINEFERENIKERMTMGKLGRAKSGKSMMWTKTAFGYCHNRETGILEIVPLQATIVEQIFTDYLSGISLTKLRDKLNESGHIGKDIPWSYRTLRQTLDNPVYCGYIKFKGSLFEGMHKPIIPYETYLKVQKELEERQQQTYERNNNPRPFQAKYMLSGMARCGYCGAPLRIVLGHKRKDGSRTMKYHCANRFPRKTKGVTVYNDNKKCDSGTYDLSSLENTVIDILIGLQENNDSLLKIINGINQPIPDTSSFKKQISQIDKKIQKNSDLYLNDFITMDELKDRTDSLLAEKKLLKAKISENRFNDSADVFELVKTQLGSIPINELSYDDKKKIVNNLVSKVDVTADNVDIIFKFQLA

SEQ ID NO: 6313 - protein, 485 aa, synthetic construct
MTKKVAIYTRVSTTNQAEEGFSIDEQIDRLTKYAEAMGWQVSDTYTDAGFSGAKLERPAMQRLINDIETKAFDTVLVYKLDRLSRSVRDTLHLVKDVFTKNKIDFISLNESIDTSSAMGSLFLTILSAINEFERENIKERMTMGKLGRAKSGKSMMWTKTAFGYHHNRKTGILEIVPLQATIVEQIFTDYLSGISLTKLRDKLNESGHIGKDIPWSYRTLRQTLDNPVYCGYIKFKDSLFEGMHKPIIPYEIYLKVQKELEERQQQTYERNNNPRPFQAKYMLSGMARCGYCGAPLRIVLGHKRKDGSRTMKYHCANRFPRKTKGVTVYNDNKKCDSGTYDLSNLENTVIDILIGFQENNDSLLKIINDNNQPILETSSFKKQISQIDKKIQKNSDLYLNDLITMDELKDRTDSLQAEKKLLKAKISENKFNVGTDVFERVKTQLGSIPINELSYDNKKKIVNNLVSKVDVTADNVDIIFKFQLA

SEQ ID NO: 6314 - protein, 452 aa, synthetic construct
MKAAIYIRVSTREQVENYSIQAQTEKLTALCRSKDWDVYDIFIDGGYSGSNMNRPALNEMLSKLHEIDAVVVYRLDRLSRSQRDTITLIEEYFLKNNVEFVSLSETLDTSSPFGRAMIGILSVFAQLERETIRDRMVMGKIKRIEAGLPLTTAKGRTFGYDVIDTKLYINEEEAKQLRLIYDIFEEEQSITSLQKRVKKLGFKVRTYNRYNNWLTNDLYCGYVSYKDKVHVRGIHEPIISEEQFYRVQEIFTRMGKSPNMNRDSASLLNNLVVCSKCGLGFVHRRKDAMSRDKKYHYRYYSCKTYKHIHELEKCGNKIWRADKLEELIINRVNNHSSASRDADKGDGLDSLNEKLKIEHAKKKRLFDLYINGSYEVSELDSMMNDIDAQISYYESQIEANEELKKDKKIQENLAHLATVDFDSLEFREKQLYLKSLINKIYIDGEQVTIEWL

SEQ ID NO: 6315 - protein, 452 aa, synthetic construct
MKAAIYIRVSTREQVENYSIQAQTEKLTALCRSKDWDVYDIFIDGGYSGSNMNRPALNEMLSKLHEIDAVVVYRLDRLSRSQRDTITLIEEYFLKNNVEFVSLSETLDTSSPFGRAMIGILSVFAQLERETIRDRMVMGKIKRIEAGLPLTTAKGRTFGYDVIDTKLYINKEEAKQLQLIYDIFEEEQSITFLQKRLKKLGFKVHTYSRYNSWLTNDLYCGYVSYKDKVHVKGIHEPIISEEQFRRVQEIFTRMGKNPNMNRDSASLLNNLVVCSKCGLGFVHRRKDTTSRGKKYHYRYYSCKTYKHIHELEKCGNKIWRADRLEELIINRVNNYSFAGRNVDKEDELDSLNEKLKVEHAKKKRLFELYINGSYEMGELDSMMNDIDAQINYYESQIEANEELKKSKKIQENLADLATVDFDSLEFREKQLYLKSLINKIYIDGEQVTIEWL

SEQ ID NO: 6316 - protein, 452 aa, synthetic construct
MKAAIYIRVSTREQVENYSIQAQTEKLTALCRSKDWDVYDIFIDGGYSGSNMNRPALNEMLGKLHEIDAVVVYRLDRLSRSQRDTITLIEEYFLKNNVEFVSLSETLDTSSPFGRAMIGILSVFAQLERETIRDRMVMGKIKRIEAGLPLTTAKGRTFGYDVIDTKLYINEEEAKQLQLIYDIFEEVQSITFLQKRLKKLGFKVRTYNRYNNWLTNDLYCGYVSYKDKVHVKGIHEPIISEEQFYRVQEIFTRMGKNPNMNRGSASLLNNLVVCSKCGLGFVHRRKDAMSRDKKYHYRYYSCKTYKHIHELEKCGNKIWRADKLEELIIDRVNNYSLASRNADKEDELDSLSEKLKIEHAKKKRLFDLYINGGYEVSELDSMMNDIDAQINYYESQIEANEELKKNRKIQENLADLATVDFDSLEFREKQRYLKSLINKIYIDGEQVTIEWL

SEQ ID NO: 6317 - protein, 452 aa, synthetic construct
MKAAIYIRVSTREQVENYSIQAQTEKLTALCRSKDWDVYDVFIDGGYSGSNMNRPALNEMLSKLHEIDAVVVYRLDRLSRSQRDTITLIEEYFLKNNVEFVSLSETLDTSSPFGRAMIGILSVFAQLERETIRDRMVMGKIKRIEAGLPLTTAKGRTFGYDVIDTKLYINEEEARQLRLIYDIFEEEQSITFLQKRLKKLGFKVRTYNRYNNWLTNDLYCGYVSYKDKVHVKGIHEPIISEEQFYRVQEIFTRMGKNPNMNRDSASLLNNLVVCSKCGLGFVHRRKDAMSRDKKYHYRYYSCKTYKHIHELEKCGNKIWRADKLEELIINRVNNYSLASRNVDKEDELDSLNEKLKIEHAKKKRLLDLYINGRYEVSELDSMMNDIDAQIYYYESQIEANEELKKNKQIQENLADLATVDFDSLEFREKQLYLKSLINKIYIDGEQVTIEWL

SEQ ID NO: 6318 - protein, 452 aa, synthetic construct
MKAAIYIRVSTREQVENYSIQAQTEKLTALCRSKDWDVYDIFIDGGYSGGNMNRPALNEMLSKLHEIDAVVVYRLDRLSRSQRDTITLIEEYFLKNNVEFVSLSETLDTSSPFGRAMIGILSVFAQLERETIRDRMVMGKIKRIEAGLPLTTAKGRTFGYDVIDTKLYINEEEAKQLRLIYDIFEEEQSITSLQKRLKKLGFKVRTYNRYNSWLTNDLYCGHVSYKDKVHVKGIHEPIISEEQFYRVQEIFTRMGKNPNMNRDSASLLSNLVVCSKCGLGFVHRRKDTKSRGKKYHYRYYSCKTYKHTHELEKCGNKIWRADKLEELIINRVNNYGFASRNVDKEDELDSLNEKLKIERAKKKRLFDLYINGSYEVSELDSMMNDIDAQINYYESQIEANEGLKKNKKIQENLAELATVDFDNLEFREKQLYLKSLINKIYIDGEQVTIEWL

SEQ ID NO: 6319 - protein, 469 aa, synthetic construct
MSYTTPVRAAVYLRISEDRSGEQLGVARQREDCLKLCDQRKWVPVEYLDNDVSASTGKRRPAYEQMLADITAGKIAAVVAWDLDRLHRRPIELEVFMSLADEKRLALATVAGDVDLATPQGRLVARLKGSVAAHETEHKKARQRRAARQKAERGHPNWSKAFGYLPGPNGPEPDPRTAPLVKQAYADILAGASLGDVCRWWNDAGAFTITGRPWTATTLSKFLRKPRNAGLRTYKGARHGPVDRDAIVGKAQWSPLVDEATFWAAQAVLDAPGRAPGRKSVRRHLLTGLAGCGKCGNHLAGSYRTDGRVVYVCKACHGVAILADNIEPILYHIVAERLAMPDAVDLLRREIQDAAEAETIRLELETLHGELDRLAVERAEGLLTARQVKISTDIVNARITKLQARQLDQERLRVFDGIPLGTPQVAGMIAELSPDRFRAVLGVLADVVVQPVGKSGRVFNPERVQVNWR

SEQ ID NO: 6320 - protein, 485 aa, synthetic construct
MTKKVAIYTRVSTTNQAEEGFSIDEQIDRLTKYAEAMGWQVSDTYTDAGSSGAKLERPAMQRLINDIENKAFDTVLVYKLDRLSRSVRDTLYLVKDVFTKNKIDFISLNESIDTSSAMGSLFLTILSAINEFERENIKERMTMGKLGRAKSGKSMMWTKTAFGYYHNRKTGILEIVPLQATIVEQIFTDYLSGISLTKLRDKLNEGGHIGKDIPWSYRTLRQTLDNPVYCGYIKFKDSLFEGMHKPIIPYETYLKVQKELEERQQQTYERNNNPRPFQAKYMLSGMARCGYCGAPLKIVLGHKRKDGSRTMKYHCANRFPRKTKGITVYNDNKKCDSGTYDLSNLENTVIDNLIGFQENNDGLLKIINGNNQPILDTSSLKKQISQIDKKIQKNSELYLNDFITMDELKDRTDSLQAEKELLKAKISENKFNDSTDVFELVKTQLGSIPINELSYDDKKKIVNNLVSKVDVTADNVDIIFKFQLA

SEQ ID NO: 6321 - protein, 452 aa, synthetic construct
MKAAIYIRVSTREQVENYSIQAQTEKLTALCRSKDWDVYDIFIDGGYSGSNMNRPALNEMLSKLHEIDAVVVYRLDRLSRSQRDTITLIEEYFLKNNVEFVSLSETLDTSSPFGRAMIGILSVFAQLERETIRDRVVMGKIKRIEAGLPLTTAKGRTFGYDVIDTKLYINEEEARQLRLIYDIFEEEQSITFLQKRLKKLGFKVRTYNRYSNWLTNDLYCGYVSYKDKVHVKGIHEPIISEEQFYRVQEIFARMGKNPNMNRDSASLLNNLVVCSKCGLGFVHRRKDTVSRGKKYHYRYYSCKTYKHTHELEKCGNKIWRADKLEELIINRVNDYSFASRNVDKEDELDSLNEKLKIEHAKKKRLLDLYINGSYEVSELDSMMSDIDAQINYYESQIEANEELRRNKKIQETLADLATVDYDSLEFREKQLYLKGLINKIYIDGEQVTIEWL

SEQ ID NO: 6322 - protein, 452 aa, synthetic construct
MKAAIYIRVSTREQVENYSIQAQTEKLTALCRSKDWDVYDIFIDGGYSGSNMDRPALNKMLSKLHEIDAVVVYRLDRLSRSQRDTITLIEEYFLKNNVEFVSLGETLDTSSPFGRAMIGILSVFAQLERETIRDRMVMGKIKRVEAGLPLTTAKGRTFGYDVIDTKLYINEEEAKQLRLIYDIFEEEQSITSLQKRLKKLGFKVRTYNRYNSWLTNDLYCGYVSYKDKVHVKGVHEPIISEEQFYRVQEIFTRMGKNPNMNRDSASLLNNLVVCSRCGLGFVHRRKDTISRGKKYHYRYYSCKTYKHTHELEKCGNKIWRADKLEELIINRVNNYSFASRNVDKEDELDSLNEKLKIEHAKRRRLFDLYINGSYNVSELDSMMNDIDAQINYYESQIEANEELKKNKKVQENLAGLATVDFDSLEFREKQLYLKSLINKIYIDGEQVTIEWL

SEQ ID NO: 6323 - protein, 452 aa, synthetic construct
MKAAIYIRVSTQEQVGNYSIQAQTEKLTALCRSKDWDVYDIFIDGGYSGSNMNRPALNEMLSKLHEIDAVVVYRLDRLSRSQRDTTTLIEEYFLKNNVEFVSLSETLDTSSPFGRAMIGILSVFAQLERETIRDRMVMGKIKRIEAGLPLTTAKGRTFGYDVIDTKLYINEEEAKQLQLIYDIFEEEQSITFLQKRLKKLGFRVRSYNRYNNWLTNDLYCGYVSYKDKVHVKGIHEPIISEEQFYRVQEIFTRMGRNPNMNRDSASLLNNLVVCGKCGLGFVHRSKDTMSRGKKYHYRYYSCKTYKHTHELEKCGNKTWRADKLEELIINRVNNYSFASRNVDEEDKLDSLNEKLRIEHARKKRPFDLYINGGYEVSELDSMMNDIDAQINYYESQIEANEELKKNKKIQESLAGLATVDFDSLEFREKQLYLKSLINKIYIDGEQVTIEWL

SEQ ID NO: 6324 - protein, 485 aa, synthetic construct
MTKKVAIYTRVSTTNQAEEGFSIDGQIDRLTKYAEAMGWQVSDTYTDAGFSGAKLERPAMQRLINDIENKAFDTVLVYKLDRLSRSVRDTLYLVKDVFTKNKIDFISLSESIDTSSAMGSLFLTILSAINEFERENIKERMTMGKLGRAKSGKSMMWTKTAFGYYHNRKTGILEIVPLQATIVEQIFTDYLSGISLTKLRDKLNESGHIGKDIPWSYRTLRQTLDNPVYCGYIKFKDSLFEGMHKPIIPYETYLKVQKELGERQQQTYERNNNPRPFQAKYMLSGMARCGYCGAPLRIVLGHKRKDGSRTMKYHCANRFPRKTEGVTVYNDNKKCDSGTYDLSILENTVIDYLIGFQENNDSLLKIINSNNQPILDTSSFKKQISQIDKKIQKNSDLYLNDFITMDELKARTDSLQAEKKLLKAKISENKFNDSTDVFELVKTQLGSIPINELSYDNKKKIVNDLVSRVDVTADNVDIIFKFQLA

SEQ ID NO: 6325 - protein, 452 aa, synthetic construct
MKAAIYIRVSTREQVENYSIQAQTEKLTALCRSKDWDVYDIFIDGGYSGSNMNRPALNEMLSKLHEIDAVVVYRLDRLSRSQRDTITLIEEYFLKNNVEFVSLSETLDTSSPFGRAMIGILSVFAQLERETIRDRMVMGKIKRIEAGLPLTTAKGRTFGYDVIDTKLHINEEEAKQLRLIYDIFEEEQSITSLQKRLKELGFKVRTYNRYNNWLTNDLYCGYVSYKDKVHVKGIHEPIISEEQFYRVQEIFARMGKNPNMNRDSASLLNNLVVCGKCGLGFVHRRKDIMSRGKKYHYRYYSCKTYKHIHELEKCGNKIWRADKLEELIINRVNNYSLASRNVDKGDELDSLNEKLKIEHAKKKRLLELYINGSYEVSELDSMMNDIDAQINYYESQIEANEELKKSKKIQESLAHLATVDFDSLEFREKQLYLKSLINKIYIDGEQVTIEWL

SEQ ID NO: 6326 - protein, 452 aa, synthetic construct
MKAAIYIRVSTREQVENYSIQAQTEKLTALCRSKDWDVYDTFIDGGYSGSNMNRPALNEMLNKLHEIDAVVVYRLDRLSRSQRDTITLIEEYFLKNNVEFVSLSETLDTSSPFGRAMIGILSVFAQLERETIRDRMVMGKIKRVEAGLPLTTAKGRTFGYDVIDSKLYINEEEAKQLQLIYDIFEEEQSITFLQRRLKKLGFKVHTYSRYNNWLTNDLYCGYVSYKDKVHVKGIHEPIIREEQFYRVQEIFTRMGKSPNMNRDSASLLNNLVVCSKCGLGFVHRRKDTMSRGKKYHYRYYSCKTYKHTHELEKCGNKIWRADKLEGLIINRVNNYSFASRNVDKEDELDSLSEKLKIEHAKRKRLFDLYINGSYEVSELDSMMNDIDAQINYYESQIEANEELKKNRRIQGNLAVLATVDFDSLEFREKQLYLKSLINKIYIDGEQVTIEWL

SEQ ID NO: 6327 - protein, 485 aa, synthetic construct
MTKKVAIYTRVSTTNQAEDGFSIDEQIDRLTKYAEAMGWQVSDTYTDAGLSGAKLERPAMQRLINDIENKAFDTVLVYKLDRLSRSVRDTLYLVKDVFTKNKIDFISLSESIDTSSAMGSLFLTILSAINEFERENIKERMTMGKLGRAKSGKSMMWTKTAFGYYHNRKTGILEIVPLQATIVEQIFTDYLSGISLTKLRDKLNESGHIGKDIPWSYRTLRQTLDNPVYCGYIKFKDSLFEGMHKPIIPYETYLKVQEELEERQQQTYERNNNPRPFQAKYMLSGMARCGYCGAPLRIVLGHKRKDGSRTMKYHCANRFPRKTKGVTVYNDNKRCDSGTYDLSNLENTVIDNLIGLQENNDSLLEIINGNNQPILDTSSFKEQISQIDKKIQKISDLYLNDFITMNELKDRTDSLQAEKKLLKAKISENKSSDSTDVFELVKTQLGSTPINELNYDDKKKIVNNLVSKVDVTADNVDIIFKFQPA

SEQ ID NO: 6328 - protein, 452 aa, synthetic construct
MKAAIYIRVSTREQVENYSIQAQTERLTALCRSKDWDVYDIFIDGGYSGSNMNRPALNEMLSKLHEIDAVVVYRLDRLSRSQRDTITLIEEYFLKNNVEFVSLSETLDTSSPFGRAMIGILSVFAQLERETIRDRMVMGKIKRIEAGLPLTTAKGRTFGYDVIDTKLYINEEEAKQLQLIYDIFEEERSITSLQKRLKKLGFKVRTYSRYNNWLTNDLYCGYVSYKDKVHVKGIHEPIISEEQFYRVQEIFTRMGKNPNMNRDSASLLNNLVVCSRCGLGFVHRRKDTMSRGKKYHYRYYSCKTYKHTHELEKCGNKIWRADKLEELIINRVSNYSFASRNVDKVDELDSLNEKLKIEHAKKKRLFDLYINGSYEVSELDSMMNDIDAQINYYESQIEANEELKRNKKIQENLADLASVDYDSLEFREKQLYLKSLINKIYIDGEQVTIEWL

SEQ ID NO: 6329 - protein, 452 aa, synthetic construct
MKAAIYIRVSTREQVENYSIQAQTEKLTALCRSKDWDVYDIFIDGGYSGSNMNRPALSEMLSKLHEIDAVVVYRLDRLSRSQRDTITLIEEYFLKNSVEFVSLSETLDTSSPFGRAMIGILSVFAQLERETIRDRMVMGKIKRIEAGLPLTTAKGRTFGYDVIDTKLYINEEEAKQLRLIYDIFEEEQSITFLQKRLKKLGFKVRTYNRYNNWLTNDLYCGYVSYKDKVHVKGIHEPIISEEQFYRVQEIFARMGKNPNMNRDSASLLNNLVVCSKCGLGFVHRRKDAMSRDKKYHYRYYSCKTYKHIHELEKCGNKIWRADKLEELIIDRVNNYSLASRNVDKEGELDSLNEKLKIEHAKKKRLLDLYINGSYEVSELDSMMNDIDAQIDYYESQIEANEELKKNNQIQENLANLATVDFDSLEFREKQRYLKSLINKIYIDGEQVTIEWL

SEQ ID NO: 6330 - protein, 485 aa, synthetic construct
MTKKVAIYTRVSTTNQAEEGFSIDEQIDRLTKYAEAMGWQVSDTYTDAGSSGAKLERPAMQRLINDIEDKAFDTVLVYKLDRLSRSVRDTLYLVKDVFTKNKIDFISLNESIDTSSAMGSLFLTILSAINEFERENIKERMTMGKLGRAKSGKSMMWTKTAFGYYHNRKTGILEIVPLQATIVEQIFTDYLSGISLTKLRDKLNESGHIGKDIPWSYRTLRQTLDNPVYCGYIKFKDSLFEGMHRPIIPYETYLKVQKELEERQRQTYERNNNPRPFQAKYMLSGMARCGYCGAPLKIVLGHKRKDGSRTMKYHCANRFPRKTKGVTVYNDNKKCDSGTYDLSNLENTVIDSLIGFQENNDSLLKIINGNSRPILDTNSFKEQISQIDKKIQKNSDLYLNDIITMDELKDRTDSLQAEKKLLKAKISENKLNDSTDVFELVKTQLGSTPINELSYDNKKKIVNNLVSKVDVTADNVDIIFKFQLA

SEQ ID NO: 6331 - protein, 485 aa, synthetic construct
MTKKVAIYTRVSTTNQAEEGFSIDEQIDRLTKYAEAMGWQVSDTYTDAGFSGAKLERPAMQRLINDIENKAFDTVLVYKLDRLSRSVRDTLYLVKDVFTKNKIDFISLNESIDTSSAMGSLFLTILSAINEFERENIKERMTMGKLGRAKSGKSMMWTKTAFGYYHNRKTGILEIVPLQATIVEQIFTDYLSGISLTKLRDKLNESGHIGKDIPWSYRTLRQTLDNPVYCGYIKFKDSLFEGMHKPIIPYETYLKVQKELEERQQQTYERNNNPRPFQAKYMLSGMARCGYCGAPLKIVLGHKRKDGSRTMKYHCANRFPRKTKGVTVYNDNKKCDSGTYDLSNLENTVIDNLIGFQENNDSLLKIINGNNQPIPDTSSFKKQISQIDKKIQKNSDLYLNDFITMDELKDRTESLQAEKKLLEAKISENKFNDSTDVFELVKTQLGSIPINELSYDNRKKIVNNLVSKVDVTADNVDIIFKFQLA

SEQ ID NO: 6332 - protein, 452 aa, synthetic construct
MKAAIYIRVSTREQVENYSIQAQTEKLTALCRSKDWDVYDIFIDGGYSGSNMNRPALNEMLSKLHEIDAVVVYRLDRLSRSQRDTITLVEEYFLKNNVEFVSLSETLDTSSPFGRAMIGILSVFAQLERETIRDRMVMGKIKRIEAGLPLTTAKGRTFGYDVIDTKLYINEEEAKQLQLIYDIFEEEQSITFLQKRLKKLGFKVRTYNCYNNWLTNDLYCGYVSYKDRVHVKGIHEPIISEEQFYRVQEIFARMGKNPNMNRDSASLLNSLVVCSKCGLGFVHRRKDTTSRGKKYHYRYYSCKTYKHIHELEKCGNKIWRADELEELIVNRVNNYSLASRNVDKEDELDSLSEKLKIEHAKKKRLFDLYINGSYEVSELNSMMNDIDAQINYYESQIEANEELKKNKKIQENLADLATVDYDSLEFRDKQLYLKSLINKIYIDGEQVTIEWL

SEQ ID NO: 6333 - protein, 452 aa, synthetic construct
MKAAIYIRVSTREQVENYSIQAQTEKLTALCRSKDWDVYDIFIDGGYSGSNMNRPALNEMLSKLHEIDAVVVYRLDRLSRSQRDTITLIEEYFLKNNVEFVSLSETLDTSSPFGRAMIGILSVFAQLERETIRDRMVMGKIKRVEAGLPLTTAKGRTFGYDVIDTKLYINEEEANQLQLIYDIFEEEQSITFLQKRLKKLGFKVRTYNRYNDWLTNDLYCGYVSYKDKVHVKGIHEPIISEEQFYRVQEIFTRMGKNPNMNRDSASLLNNLVVCSKCGLGFVHRRKDTTSRGKKYHYRYYSCKTYKHTHELEKCGNKIWRADKLEELVINRVNDYSLASRNVDKEDKLDSLNEKLKIEHAKKKRLFDLYINGSYEVSELDSMMNGIDAQINYYESQIEANEELRESKKIQENLAYLATVDFDGLEFREKQLYLRSLINKIYIDGEQVTIDWL

SEQ ID NO: 6334 - protein, 469 aa, synthetic construct
MSYTTPVRAAVYLRISEDRSGEQLGIARQREDCLKLCGQRKWVPVEYLDNDVSASTGKRRPAYEQMLADITAGKIAAVVAWDLDRLHRRPMELEAFMSLADEKRLALATVAGDVDLATPQGRLVARLKGSVAAHETEHKKARQRRAARQKAERGYPNWSKAFGYLPGPNGPEPDPRTAPLVKQAYADILAGASLGDVCRQWNDAGALTITGRPWTTTALSKFLRKPRNAGLRAYKGARYGPVDRDAIVGKAQWSPLVDEATFWAAQAVLDAPGRAPGRKSVRRHLLTGLAGCGKCGNHLAGSYRADGRVVYVCKACHGVAILADNIEPILYHIVAERLAMPDAVDLLRREIHDVAEAEAIRLELETLHGELDRLAVERAEGLLTARQVKISTDIVNAKITKLQARRQDQERLRVLDGIPLGTPQVAGMIAELSPDRFRAVLDVLAEVVVQPVGKSGRIFNPKRVQVNWR

SEQ ID NO: 6335 - protein, 469 aa, synthetic construct
MCYTTLVRAAVYLRISEDRSGEQLGVARQREDCLKLCGQRKWVPVEYLDNDVSASTGKRRPAYEQMLADITAGKIAAVVAWDLDRLHRRPIELEAFMSLADEKRLALATVAGDVDLATPQGRLVARLKGCVAAHETEHKKARQRRAARQKAERGLPNWSKAFGYLPGPNGPEPDPRTAPLVKQAYVDILAGASLGDVCRQWNDAGASTITGRPWTTTTLSKFLRKPRNAGLRAYKGARYGPVDRDAIVGKAQWSPLVDEATFWAAQAVLDAPGRAPGRKSVRRHLLTGLAGCGKCGNHLAGSYRTDGRVVYVCKACYGVAILADNIEPFLYHIVAERLAMPDAVDLLRRETHDAAEAETTRLELETLYGELDRLAVERAEGLLTARQVKISTDIVNAKITKLQARQLDQERLRVFDGIPLGTPQVAGVIAELSPDRFRAVLDVLAEVAVQPVGKSGRIFNPERVQVNWR

SEQ ID NO: 6336 - protein, 485 aa, synthetic construct
MTKKVAIYTRVSTTNQAEEGFSIDEQIDRLTRYAEAMGWQVSDTYTDAGFSGAKLGRPAMQRLINDIENKAFDSVLVYRLDRLSRSVRDTLYLVKDVFTKNKIDFISLNESIDTSSAMGSLFLTILSAINEFDRENIKERMTMGKLGRAKSGKSMMWTKTAFGYYHNRKTGILEIVPLQATIVKQIFTDYLSGISLTKLRDKLNESGHIGKDIPWSYRTLRQTLDNPVYCGYIKFKGSLFEGMHRPIIPYETYLKVQRELEERQQQTYERNNNPRPFQAKYMLSGMARCGYCGAPLRIVLGHKRKDGSRTMKYHCANRFPRKTRGVTVYNDNKKCDSGTYDLSNLENTVIDSLVGFQENNDSLLKIINGSNQPILDTSSFKEQISQIDKKIQKNSDLYLNDFITMDELKDRTDRLQAEKKLLKVKISENKFNDSTDVFELVKTQLGSIPINELSYDDKKKIVNNLVSKVDVTADNVDIIFKFQLA

SEQ ID NO: 6337 - protein, 485 aa, synthetic construct
MTKKVAIYTRVSTTNQAEEGFSIDEQIDRLTKYAEAMGWQVSDTYTDAGFSGAKLERPAMQRLINDIENKAFDTVLVYKLDRLSRSVRDTLYLVNDVFTKNKIDFISLSESIDTSSAMGSLFLTILSAINEFERENIKERMTMGKLGRAKSGKSMMWTKTAFGYYHNRKTGILEIVPLQATIVEQIFTDYLSGISLTKLRDKLNESGHIGKDIPWSYRTLRQTLDNPVYCGYIKFKDSLFEGMHKPIIPYETYLKVQKELEERQQQTYERNNNPRPFQAKYMLSGMARCGYCGAPLRIVLGHKRKDGSRTMKYHCANRFPRKTKGVTVYNDNKKCDSGTYDLSNLENTVIDNLIGFQENNDSLLRIINGNNQPILDTSSLKKQISLIDKKIQKNSDLYLNDFITMDELKDRTDSLQAEKKLLKAKISENKFNDSTDVFELVRTQLGSTPINELSYDNKKKIVNNLVSKVDVTADNVDIIFKFQLA

SEQ ID NO: 6338 - protein, 469 aa, synthetic construct
MSYTTPVRAAMYLRISEDRSGEQLGVARQREDCLKLCGQRKWVPVEYLDNDVSASTGRRRPAYEQMLADITAGKIAAVVAWDLDRLHRRPVELEAFMSLADEKRLALATVAGDVDLATPQGRLVARLKGCVAAHETEHKKARQRRAARQKAERGLPNWSKAFGYLPGPNGPEPDPRTAPLVKQAYADILAGASLGDVCRQWNDAGAFTITGRPWTTTTLSKFLRKPRNAGLRAYKGACYGPVGRDAIVGKAQWSPLVDEATFWAAQAVLDAPGRAPGRKSVRRHLLTGLAGCGKCGNHLAGSYRTDGQVVYVCKVCHGVSILAVNIEPILYRIVAERLAMPDAVDLLRREFHDAAEAETIRLELETLYGELDRLAVERAEGLLTARQVKISTDVVNAKITELQARQLDQERLRVLDGIPLGTPLVAGMIAELSPDRFRAVLDVLAEVVVQPVGKSGRIFNPERVQVNWR

SEQ ID NO: 6339 - protein, 452 aa, synthetic construct
MKAAIYIRVSTREQVENYSIQAQTEKLTALCRSKDWDVYDIFIDGGYSGSNMNRPALNEMLSKLHEIDAVVVYRLDRLSRSQRDTITLIEEYFLKNNVEFVSLSETLDTSSPFGRAMIGILSVFAQLERETIRDRMVMGKIKRVEAGLPLTTAKGRTFGYDVIDTKLYINEEEAKQLQLIYDIFEEEQSITSLQKRLKKLGFKVHTYNRYNSWLTNDLYCGYVSYKDKVHVRGIHEPIISEEQFYRVQEIFTRMGKNPNMNRDSASLLNNLVVCSKCGLGFVHRRKDTMSRGKKYHYRYYSCKTYKHTHELEKCGNKIWRADKLEELIINRVNNYNFASRNVDKEDELDSLNEKLKVERAKKKRLFDLYINGSYEVSELDSMMNDIDAQINYYESQIEANEELKKDKKIQESLANLATVDYDSLEFREKQLYLKGLINKIYIDGEQVTIEWR

SEQ ID NO: 6340 - protein, 452 aa, synthetic construct
MKAAIYIRVSTQEQVENYSIQAQTEKLTALCRSKDWDVYDIFIDGGYSGSNMNRPALNEMLSKLHEIDAVVVYRLDRLSRSQRDTITLIEEYFLKNNVEFVSLSETLDTSSPFGRAMIGILSVFAQLERETIRDRMVMGKIKRIEAGLPLTTAKGRTFGYDVIDTKLYINEEEAKQLQLIYDIFEEEQSITFLQKRLKKLGLKVRTYSCYNNWLTNDLYCGYVSYKDKVHVKGIHEPIISEEQFYRVQEIFTRMRKNPNMNRDSASLLNNLVVCSKCGLSFVHRRKDTMSRGKKYHYRYYSCKTYKHTHELEKCGNKIWRADKLEELIVNRVNSYSIASRNADKEDELDSLNEKLKIEHAKKKRLFDLYINGSYEVSELDSMMNDIDAQINYYESQIEANGELKKNKKIQENLADLATVDYDSLEFREKQLYLKSLINKIYIDGEQVTIEWL

SEQ ID NO: 6341 - protein, 452 aa, synthetic construct
MKAAIYIRVSTREQVENYSIQAQTEKLTALCRSKDWDVYDIFIDGGYSGSNMNRPALNEMLSKLHEIDAVVVYRLDRLSRSQRDTITLIEEYFLKNNVEFVSLSETLDTSSPFGRAMIGILSVFAQLERETIRDRMVMGKIKRIEAGLPLTTAKGRTFGYDVIDTKLYINEEEAKQLQLIYDIFEEEQSITSLQKRLKKLGFKVRAYNRYNNWLTNDLYCGYVSYKDKVHVKGIHEPIISEEQFYRVQEIFTRMGKHPNMNRGSASLLNNLVVCSKCGLGFVHRRKDIMSRDKKYHYRYYSCKTYKHIHELEKCGNKIWRADKLEELVINRVNNYSLAGRNVDKEDELDSLNEKLKIEHAKKKRLFDLYINGSYEVSELDSMVGDIDAQINYYESQIEANEELRKNKKIQENLADLATVDFDSLEFREKQLYLKSLINKIYIDGEQVTIEWL

SEQ ID NO: 6342 - protein, 469 aa, synthetic construct
MSYTTPVRAAVYLRISEDRSGEQLGVARQREDCLKLCGQRKWVPVEYLDNDVSASTGKRRPAYEQMLADITAGKIAAVVTWDLDRLHRRPIELEAFMSLADEKRLALATVAGDVDLATPQGRLVARLKGCVAAHETEHKKARQRRAARQKAERGHPNWSKAFGYLPGPNGPEPDPRTAPLVKQAYADILAGASLGDVCRQWNDAGAFTITGRPWATTTLSKFLRKPRNAGLRAYKGARYGPVDRDAIVGKAQWSPLVDEATFWAAQAVLDAPGRAPGRKSVRRHLLTGLAGCGKCGNHLAGNYRTDGRVVYVCKACHGVSILADNIVPILYHIVAERLAMPDAVDLLRREIHDAAEAETIRLELETLYGELDRLAVERAEGLLTARQVKISTDIVDAKITKLQARQLDQERLRVLDGIPLGTPQVAGVIAELSPDRFRAVLDVLAEVVVQPVGKSGRIFSPERVQVNWR

SEQ ID NO: 6343 - protein, 452 aa, synthetic construct
MKAAIYIRVSTREQVENYSIQAQTEKLTALCRSKDWDVYDVFIDGGYSGSNMNRPALNEMLSKLHEIDAVVVYRLDRLSRSQRDTITLIEEYFLKNNVEFVSLSETLDTSSPFGRAMIGILSVFAQLERETIRDRMVMGKIKRIEAGLPLTTARGRTFGYDVIDTKLYINEEEARQLQLIYDIFEEEQSITFLQKRLKKLGFKVRTYNRYNNWLTNDLYCGYVSYKDKVHVKGIHEPIISEEQFYRVQEIFTRMGKNPNMNRDSASLLNNLVVCSKCGLGFVHRRKDIMSRGKKYHYRYYSCKTYKHIHELEKCGNKIWRADKLEELIIDRVNNYSLASRNVDKEDELDSLNEKLKIEHAKKKRLFDLYINGSYDVNELDSMMNDIDAQINYYESQIEGNEELKKDKKIQENLAYLAAVDFASLEFREKQLYLKSLINKIYIDGEQVTIEWL

SEQ ID NO: 6344 - protein, 452 aa, synthetic construct
MKAAIYIRVSTREQVENYSIQAQTEKLTALCRSKDWDVYDIFIDGGYSGSNMNRPALNEMLSKLHEIDAVVVYRLDRLSRSQRDTITLIEEYFLKNNVEFVSLSETLDTSSPFGRAMIGILSVFAQLERETIRDRMVMGKIKRVEAGLPLTTAKGRTFGYDVIDTKLYINEEEAKQLQLIYDIFEEEQSITFLQKRLKKLGFKVRTYSRYNNWLTNDLYCGYVSYKDKVHVKGIHEPIISEEQFYRVQKIFTRMGKNPNMNRDSASLLNNLVVCSKCGLGFVHRRKDTMSRGKKYHYRYYSCKTYKHTHELEKCGNKIWRADKLEELIINRVNNYSFASRNVDKEDELDSLNEKLKIEHAKKRRLFDLYINGSYEMSELDSMMNDIDAQISYYKSQIEANEELKKNKKIQENLADLATADFDSLEFREKQLYLKSLINKIYIDGEQVTIEWL

SEQ ID NO: 6345 - protein, 452 aa, synthetic construct
MKAAIYIRVSTQEQVENYSIQAQTEKLTALCRSKDWDVYDIFIDGGYSGSNMNRPALNEMLSKLHEIDAVVVYRLDRLSRSQRDTTTLIEEYFLKNNVEFVSLSETLDTSSPFGRAMIGILSVFAQLERETIRDRMVMGKIKRIEAGLPLTTAKGRTFGYDVIDTKLYINEEEAKQLQLIYDIFEEEQSITSLQKRLKKLGFKVRTYSRYNNWLTNDLYCGYVSYKDQVHVKGIHEPIISEEQFYRVQEIFTRMGKNPNMNRDNASLLNNLVVCSKCGLSFVHRSKDTTSRGKRYHYRYYSCKTYKHTHELEKCGNKTWRADKLEELIINRVNNYSFASRNVDKEDELDSLNEKLKIEHAKKKRLFDLYISGSYEVSELDSMMNDIDAQINCYESQIEANKGLKKNKKIQESLADLATVDFDSLEFREKQLYLKSLINKIYIDGEQVTIEWL

SEQ ID NO: 6346 - protein, 452 aa, synthetic construct
MKAAIYIRVSTREQVENYSIQAQTEKLTALCRSKDWDVYDIFIDGGYSGSNMNRPALNEMLSKLHEIDAVVVYRLDRLSRSQRDTITLIEEYFLKNNVEFVSLSETLDTSSPFGRAMIGILSVFAQLERETIRDRMVMGKIKRIEAGLPLTTARGRTFGYDVIDTRLYINEEEARQLQLIYDIFEEEQSITFLQKRLKKLGFKVRSYNRYNNWLTNDLYCGYVSYKDKVHVKGIHEPIISEEQFYRVQGIFTRMGKNPNMNRDSASLLNNLVVCSKCGLGFVHRRKDTVSRGKKYHYRYYSCKTYKHTHELEKCGNKIWRADKLEELVINRVNNYSFASRNVDKEDELDSLNEKLKIEHAKKKRLFDLYINGSHEMSELDSMMNDIDARINYYESQIEANEELRKNKKIQENLADLATVDYDSLEFREKQLYLKSLINKIYIDGEQVTIEWL

SEQ ID NO: 6347 - protein, 469 aa, synthetic construct
MSYTTPVRAAVYLRISEDRSGEQLGVARQREDCLKLCDQRKWVPVEYLDNDVSASTGERRPAYEQMLADITAGKIAAVVAWDLDRLHRRPIELEAFMSLADEKRLALATVAGDVDLATPQGRLVARLKGSVAAHETEHKKARQRRAARQKAERGYPNWSKAFGYLPGPNGPEPDPRTAPLVKQAYADILAGASLGDVCRQWNDAGAFTITGRPWTTTTLSKFLRKPRNAGLRAYKGARYGPVDRDAIVGKAQWSPLVDEATFWAAQAVLDAPGRAPGRKSVRRHLLTGLAGCGKCGNHLAGSYRTDGRVVYVCKACHGVAILADNIVPILYHIVAERLAMPDAVDLLRREIHDVAEAETVRLELETLYGELDRLAVERAEGLLTARQVKISTDIVNAKITKLQACQLDQERLRVFDGIPLGTPQVAGVIAELSPNRFRAVLDVLAEVVVQPVGKSGRIFNPERVQVNWR

SEQ ID NO: 6348 - protein, 485 aa, synthetic construct
MTKKVAIYTRVSTTSQAEEGFSIDEQIDRLTKYAEAMGWQVSDTYTDAGFSGAKLERPAMQRLINDIENKAFDTVLVYKLDRLSRSVRDTLYLVKDVFTKNKIDFISLNESINTSSAMGSLFLTILSAINEFERENIKERMTMGKLGRAKSGKSMMWTKTAFGYYHNRETGILETVPLQATIVKQIFTDYLSGISLTKLRDKLNESGHIGKDIPWSYRTLRQTLDNPVYCGYIKFKDSLFEGMHKPIIPYETYLKVQKELEERQQQAYERNNNPRPFQAKYMLSGMARCGYCGAPLRIVLGHKRKDGSRTMKYHCANRFPRKTKGVTVYNDNKKCDSGTYDLSNLENTVIDNLIGFQENNDSLLKIINGNNQPILDTSSFKKQISQIDKKIQKNSDLYLNDFITMDELKDRTDSLQAEKKLLKAKISENKFNDSTDVFELVKTQLGSIPINELSYDNKKKIVNNLVSKVDVTADNVDIIFKFQLA

SEQ ID NO: 6349 - protein, 452 aa, synthetic construct
MKAAIYIRVSTQEQVGNYSIQAQTEKLTALCRSKDWDVYDIFIDGGYSGSNMNRPALNEMLSKLHEIDAVVVYRLDRLSRSQRDTTTLIEEYFLKNNVEFVSLSETLDTSSPFGRAMIGILSVFAQLERETIRDRMVMGKIKRIEAGLPLTTAKGRTFGYDVIDTKLYINEEEAKQLRLIYDIFEEEQSITFLQKRLKKLGFKVRTYNRYNSWLTNDLYCGYVSYKDKVHVKGIHEPIISEEQFYRVQEIFTRMGKNPNMNRDSASLLNNLVVCSKCGLGFVHRSKDTMSRGKKYHYRYYSCKTCKHTHELEKCGNKTWRADKLEELIVNRVNNYSFASRNADKEDELDSLNVKLKIEHAKKKRLFDLYINGSYEVSELDSMMNDIDAQINCYKSQIEANEELKKNKKIQENLADLAAVDFDSLEFREKQLYLKSLINKIYIDGEQVTIEWL

SEQ ID NO: 6350 - protein, 452 aa, synthetic construct
MKAAIYIRVSTREQVENYSIRAQTEKLTALCRSKGWDVYDIFIDGGYSGSNMNRPALNEMLSKLHEIDAVVVYRLDRLSRSQRDTITLIEEYFLKNNVEFVSLSETLDTSSPFGRAMIGILSVFAQLERETIRDRMVMGKIKRIEAGLPLTTAKGRTFGYDVIDTKLYINEEEARQLQLMYDIFEEEQSITFLQKRLKKLGLKVRTYSCYNNWLTNDLYCGYVSYKDKVHVKGVHEPIISEEQFYRVQEIFTRMGKNPNMNRDSASLLNNLVVCSKCGLGFVHRRKDTVSRGKKYHYRYYSCKTYKHIHELEKCGNKIWRADKLEELIINRVNNYSFTSRNVDKAEGLDSLNEKLKVEHAKKKRLFDLYINGSYEVSELDSMMNDIDAQISYYESQVEANEELKKNKKIQENLVNLATMDFDSLEFREKQLYLKGLINKIYIDGEQVTIEWL

SEQ ID NO: 6351 - protein, 452 aa, synthetic construct
MKAAIYIRVSTREQVENYSIQAQTEKLTALCRSKDWDVYDIYIDGGYSGSNMNRPALNEMLSKLHEIDAVVVYRLDRLSRSQRDTITLIEEYFLKNNVEFVSLSETLDTSSPFGRAMIGILSVFAQLERETIRDRMVMGKIKRVEAGLPLTTAKGRTFGYDVIDTKLYINVEEAKQLQLIYDVFEEEQSITLLQKRLKKLGFKVRTYNRYNSWLTNDLYCGYVSYKDKVHVKGIHEPIISEEQFYRVQEIFTRMGKNPNMNRDSASLLNNLVVCSKCGLGFVHRRKDTVSRGKKYHYRYYSCKTYKHTHELEKCGNKIWRADKLEELIIDRVNNYSFASRNVDKGDELDSLNEKLKIEHAKKKRLFDLYINGSYEVSELDSMMNDIDAQINYYESQIEANEELKKNKKIQENLANLATVDYDSLEFREKQLYLKSLINKIYIDGEQVTIEWL

SEQ ID NO: 6352 - protein, 469 aa, synthetic construct
MSYTTPVRAAVYLRISEDRSGEQLGVARQREDCLKLCGQRKWVPVEYLDNDVSASTGKRRPAYEQMLVDITAGKIAAVVAWDLDRLHRRPIELEAFMSLADEKRLALATVAGDVDLSTPQGRLVARLKGCVAAHETEHKKARQRRAARQKAERGYPNWSKAFGYLPGPNGPEPDPRTAPLVKQAYADILAGASLGDVRRQWNDAGAFTITGRPWTTTTLSKFLRKPRNAGLRAYKGARYGPVDRNAIVGKAQWSPLVDEATFWAAQAVLDAPGRAPGRKSVRRHLLTGLAGCGKCGNHLAGSYRTDGRVVYVCKACHGVAVLADNIEPILYHIVAERLAMPDAVDLLRREIHDAAEAETIRLELETLYGELDRLAVERAEGLLTARQVKISTDIVNAKITKLQARQLDQERLRVLDGIPLGTPQVAGMIAELSPDRFRAVLDVLAEVVVQPVGKSGRISNPERVQVNWR

SEQ ID NO: 6353 - protein, 469 aa, synthetic construct
MSYTTPVRAAVYLRISEDRSGEQLGVARQREDCLKLCGQRRWVPVEYLDNDVSASTGKRRPAYEQMLADITAGKIAAVVAWDLDRLHRRPIELEAFMSLADEKRLALATVAGDVDLATPQGRLVARLKGSVAAHETEHKKARQRRAARQKAERGLPNWSKAFGYLPGPNGPEPDPRTAPLVKQAYADILAGASLGDVCRQWNDVGAFTITGRPWTTTTLSKFLRKPRNAGLRAYKGARYGPVDRDAIVGKAQWSPLVDEVTFWAAQAVLDAPGRAPGRKSVRRHLLTGLAGCGKCGNHLAGSYRTDGQVVYVCKACYGVAILADNIVPILYHVVAERLAMPDAVDLLRHEIHDAAEAEAIRLELETLYGELDRLAVERAEGLLTARQVKISTDIVNAKITKLQAHQLDQERLRVLDGIPLGTPQVASVIAELSPDRFRAVLDVLAEVIVQPVGKSGRISNPERVQVNWR

SEQ ID NO: 6354 - protein, 485 aa, synthetic construct
MTKKVAIYTRVSTTNQAEEGFSIDEQIDRLTKYAEAMGWQVSDTYTDAGISGAKLERPAMQRLINDIESKAFDTVLVYKLDRLSRSVRDTLYLVKDVFTKNKIDFISLNESIDTSSAMGSLFLTILSAINEFERENIKERMTMGKLGRAKSGKSMMWTKTAFGYYHNRRTGILEIVPLQATIVEQIFTDYLSGISLTKLRDKLNESGHIGKDIPWSYRTLRQTLDNPVYCGYIKFKDSLFEGMHKPIIPYETYLKVQKELEERQQQTYERNNNPRPFQAKYMLSGMARCGYCGAPLRIVLGHKRKDGSRTMKYHCANRFPRKTKGVTVYNDNEKCDSGTYDLSNLENTVIDNLIDFQENNDSLLKIINGNNQPILDTSSFKEQISRIDKKIQKNSDLYLNDFITMDELKDRTDSLQAEKKLLKAKISENKFNDSTDVFELVKTQLGSIPINELSYDNKKKIVNNLVSKVDVTADNVDIIFKFQLA

SEQ ID NO: 6355 - protein, 452 aa, synthetic construct
MKAAIYIRVSTQEQVENYSIQAQTEKLTALCRSKDWDVYDIFIDGGYSGSNMNRPALNKMLSKLHEIDAVVVYRLDRLSRSQRDTTTLIEEYFLKNNVEFVSLSETLDTSSPFGRAMIGILSVFAQLERETIRDRMVMGKIKRIEAGLPLTTAKGRTFGYDVIDTKLYINEEEAKQLQLIYDIFEEEQSITSLQKRLKKLGFKVRTYNRYNNWLTNDLYCGYVSYKDKVHVKGIHEPIISEEQFYRVQEIFTRMGKSPNMNRDSASLLNNLVVCSKCGLGFVHRSKDTMSRGKKYHYRYYSCKTYKHTHELEKCGNKTWRADKLEELIINRVNNYSFASRNADKEDELDSLNEKLKIEHARKKRLFDLYINGSYEVSELDSMMSDIDAQINYYESQIEANEELKRNKKIQESQADLATVDFDSLEFREKQLYLKSLINKIYIDGEQVTIEWL

SEQ ID NO: 6356 - protein, 452 aa, synthetic construct
MKAAIYIRVSTREQVENYSIQAQTEKLTALCRSKDWDVYDIFIDGGYSGSNMNRPALNEMLSKLHEIDVVVVYRLDRLSRSQRDTITLIEEYFLRNNVEFVSLSETLDTSSPFGRAMIGILSVFAQLERETIRDRMVMGKIKRIEAGLPLTTAKGRTFGYDVIDTKLYVNEEEAKQLQLIYDIFEEEQSITFLQKRLKRLGFKVHTYSRYNNWLTNDLYCGYVSYKDRVHVKGIHEPIISEEQFYRVQEIFTRMGKNSNTNRESASLLNNLVVCSKCGLGFVHRRKDTTSRGKKYQYRYYSCKTYKHIHELEKCGNKIWRADKLEELIINRVNNYSFASRNVDKEDELDSLNEKLKIEHAKKRRLFDLYINGSYEVSELDSMMNDIDAQINYYESQIEANEGLKKNKKIQENLADLATVDFDSLEFREKQLYLKSLINKIYIDGELVTIEWL

SEQ ID NO: 6357 - protein, 485 aa, synthetic construct
MTKKVAIYTRVSTTNQAEEGFSIDEQIDRLTKYAEAMGWQVSDTYTDAGLSGAKLERPAMQRLINDIENKAFDTVLVYKLDRLSRSVRDTLYLVKDVFTKNKIDFISLNESIDTSSAMGSLFLTILSAINEFERENIKERMTMGKLGRAKSGKSMMWTKTAFGYYHNRKTGILEIVPLQATIVEQIFTDYLSGISLTKLRDKLNESGHIGKDIPWSYRTLRQTLDNPVYCGYVKFKGSLFEGMHKPIIPYETYLKVQKELEERQQQTYERNNNPRPFQAKYMLSGMARCGYCGAALKIVLGHKRRDGSRTMKYHCANRFPRKTRGVTVYNDNKKCDSGTYDLSNLENTVIDNLVGFQENNDGLLKIINGNNQPILDTSSFKEQISQIDRKIQKNSDLYLNDLITMDELKGRTDSLQAEKKLLKAKISENKFNDSTDVFELVKTQLGSIPINKLSYDNKKKIVNNLVSKVDVTADNVDIIFKFQLA

SEQ ID NO: 6358 - protein, 452 aa, synthetic construct
MKAAIYIRVSTQEQVGNYSIQAQAEKLIALCRSKDWDVYDIFIDGGYSGSNMNRPALNEMLSKLHEIDAVVVYRLDRLSRSQRDTTTLIEEYFLKNNVEFVSLSETLDTSSPFGRAMIGILSVFAQLERETIRDRMVMGKIKRIEAGLPLTTAKGRTFGYDVIDTKLYINEEEAKQLQLIYDIFEEVQSITFLQKRLKKLGFKVRTYNRYSNWLTNDLYCGYVSYKDKVHVKGIHEPIISEEQFYRVQEIFTRMGKNPNMNRDSASLLSNLVVCSKCGLGFVHRSKDTMSRGKKYHYRYYSCKTYKHTHELEKCGNKTWRADKLEELIINRVNNYSFASRNVDKEDELDSLSEKLKIEHAKKKRLFDLYINGSYEVSELDSMMNDIDAQINYYESQIEANEELKKNKKIQENLADLATVDFDGLGFREKQLYLKSLINKIYIDGEQVTIEWL

SEQ ID NO: 6359 - protein, 452 aa, synthetic construct
MKAAIYIRVSTREQVENYSIQAQTEKLTALCRSKDWDVYDIFIDGGYSGSNMNRPALNEMLSKLHEIDAVVVYRLDRLSRSQRDTITLIEEYFLKNNVEFVSLSETLDTSSPFGRAMIGILSVFAQLERETIRDRMVMGRIKRIEAGLPLTTAKGRTFGYDVIDAKLYINEEEAKQLRLIYDIFEEEQSITFLQKRLKKLGFKVHTYNRYNNWLTNDLYCGYVSYKDKVHVKGIHEPIISEEQFNRVQEIFTRMGKNPNMNRDSASLLSNLVVCSKCGLGFVHRRKDTTSRGKKYHYRYYSCKTYKHTHELEKCGNKIWRADKLEELIINRVNNYSLAGRNVDKGDELDSLNEKLKIEHAKKKRLFDLYVNGSYEVSELDSMMSDIDAQIDHYESQIEANEELKKNKKIQESLANLATVDYDSLEFREKQLYLKSLINKIYIDGEQVTIEWL

SEQ ID NO: 6360 - protein, 452 aa, synthetic construct
MKAAIYIRVSTREQVENYSIQAQTEKLTALCRSKDWDVYDVFIDGGYSGSNMNRPALNEMLSKLHEIDAVVVYRLDRLSRSQRDTITLIEEYFLKNSVEFVSLSETLDTSSPFGRAMIGILSVFAQLERETIRDRMVMGKIKRIEAGLPLTTAKGRTFGYDVVDTKLYINEEEAKQLRLIYDIFEEEQSITFLQKRLKKLGFKVRSYNRYSNWLTNDLYCGYVSYKDRVHVKGIHEPIISEEQFYRVQEIFTRMGKNPNMNRGSASLLNNLVVCSKCGLGFVHRRKDTMSRSKKYHYRYYSCKTYKHIHELEKCGNKIWRADKLEELVINRVNSYSLASRNVDKEDELDSLNEKLKTEHAKKKRLFDLYINGSYEVSELDSMMNDINAQINYYESQIEANEELKKNKKIKENLAHLATVDFDSLEFRAKQLYLKSLINKIYIDGEQVTIEWL

SEQ ID NO: 6361 - protein, 452 aa, synthetic construct
MKAAIYIRVSTREQVENYSIQAQTEKLTALCRSKDWDVYDIFIDGGYSGSNMNRPALNEMLSKLHEIDAVVVYRLDRLSRSQRDTITLIEEYFLKNNVEFVSLSETLDTSSPFGRAMIGILSVFAQLERETIRDRMVMGKIKRIEAGLPLTTAKGRTFGYDVIDTKLYINEEEAKQLQLIYDIFEEEQSITFLQKRLKKLGFKVHTYNRYNNWLTNDLYCGYVSYKDKVHVKGIHEPIISEEQFYRVQEIFTRMGKNPNMNRDSASLLSNLVVCSKCGLGFVHRRKDAMSRDKKYHYRYYSCKTYKHIHELEKCGNKIWRADKLEELVINRVNNYSLASRNVDKEDELNSLNEKLRTEHAKKKRLFDLYINGSYEVSELDSMMSDIDAQISYYESQIEANEELKKDKRIQENLAHLATVDFDSLEFREKQLYLKSLINKIYIDGEQVTIEWL

SEQ ID NO: 6362 - protein, 452 aa, synthetic construct
MKAAIYIRVSTREQVENYSIQAQTEKLTALCRSKGWDVHDIFIDGGYSGSNMNRPALNEMLSKLHEIDAVVVYRLDRLSRSQRDTITLIEEYFLKNNVEFVSLSETLDTSSPFGRAMIGILSVFAQLERETIRDRMVMGKIKRIEAGLPLTTAKGRTFGYDVIDTKLYINEEEARQLQLIYDIFEEVQSITFLQKRLKKLGFKVRTYNRYNNWLTNDLYCGYVSYKDKVHVKGIHEPIISEEQFYRVQEIFTRMGKNPNMNRDSASLLNNLVVCSKCGLGFVHRRKDIMSRGKKYHYRYYSCKTYKHIHELEKCGNKIWRADKLEELVINRVNSYSLASRNVDKEDELDSLNEKLRTEHAKKKRLFDLYINGSYEVSELDSMMNDIDAQINYYESQIAANEELKKSKKIQENLADLATVDFDGLGFREKQLYLKSLINKIYIDGEQVTIEWL

SEQ ID NO: 6363 - protein, 469 aa, synthetic construct
MSYTTPVRAAVYLRISEDRSGEQLGVARQREDCLKLCGQRKWVPVEYLDNDVSASTGKRRPAYEQMLADITAGKIAAVVAWDLDRLHRRPIELEAFMSLADEKRLALATVAGDVDLATPQGRLVARLKGSVAAHETEHKKARQRRAARQKAERGHPNWSKAFGYLPGPNGPEPDPRTAPLVRQAYADILAGASLGDVCRRWNDAGAFTITGRPWTTTTLSKFLRKPRNAGLRAYKGARYGPVDRDAIVGKAQWSPLVDEATFWAAQAVLDAPGRAPGRKSVRRHLLTGLVGCGKCGNHLAGSYRTDGRVVYVCKTCHGVTILADNIEPILYHIVAERLAMPNAVDLLRREIYDAAEAETTRLVLETLYGELDRLAVERAEGLLTARQVKISTDIVNAKITKLRAHQQDQERLRVLDGIPLGTPQVAGVIAELSPNRFRAVLDVLAEVVVQPVGKSGRIFNPERVRVNWR

SEQ ID NO: 6364 - protein, 485 aa, synthetic construct
MTKKVAIYTRVSTTNQAEEGFSIDEQIDRLTKYAEAMGWQVSDTYTDAGISGARLERPAMQRLINDIEDKAFDTVLVYKLDRLSRSVRDTLYLVKDVFTKNKIDFISLNESIDTSSAMGSLFLTILSAINEFERENIKERMTMGKLGRAKSGKSMMWTKTAFGYCHNRKTGILEIVPLQATIVEQIFTDYLSGISLTKLRDKLNESGHIGKDIPWSYRTLRQTLDNPVYCGYIKFKGSLFEGMHKPIIPYETYLKVQRELEERQQQTYERNNNPRPFQAKYMLSGMARCGYCGAPLRIVLGHKRKDGSRTMKYHCANRFPRKTKGITEYNDNKKCDSGTYDLSNLENTVIANLIGLQENNDSLLKIINGNNQPILDTSGFKKQISQIDRKIQKNSDLYLNDFITMDELKDRTDSLQAEKKLLEAKISENKFNDSTDVFELVKTQLGSIPINDLSYDNKKKIVNNLVSKVDVTADNVDIIFKFQLA

SEQ ID NO: 6365 - protein, 469 aa, synthetic construct
MSYTTPVRAAVYLRISEDRSGEQLGVARQREDCLKLCGQRKWVPVEYLDNDVSASTGKRRPAYEQMLADITAGKIAAVVAWDLDRLHRRPVELEAFMSLADEKRLALATVAGDVDLATPQGRLVARLKGCVAAHETEHKKARQRRAARQKAERGYPNWSKAFGYLPGPNGPEPDPRTAPLVKRAYADILAGASLGDVCRQWNDAGAFTITGRPWTTTTLSKFLRKPRNAGLRAYKGARYGPVDRDAIVGKAQWSPLVDEGTFWAAQAVLDAPGRAPGRKSVRRHLLTGLAGCGKCGNHLAGSCRTDGRVVYVCKACHGVSILAVNIEPILYHIVAERLAKPDAVDLLRREIHDAAEAETVRLELETLYGELDRLAVERAEGLLTARQVKISTDIVNAKITKLQARQLDQERLRVLDGIPLGTPQVAGMIAELSPDRFRAVLDVLAEVVVQPVGKSGRIFNPERVQVNWR

SEQ ID NO: 6366 - protein, 485 aa, synthetic construct
MTKKVAIYTRVSTTNQAEEGFSIDEQIDRLTKYAEAMGWQVSDTYTDAGLSGAKLERPAMQRLINDIENKAFDTVLVYKLDRLSRSVGDTLYLVKDVFTKNKIDFISLNESIDTSSAMGSLFLTILSAINEFERENIKERMTMGKLGRAKSGKSMMWTKTAFGYYHNRKTGILEIVPLQATIVEQIFTDYLSGISLTKLRDKLNEGGHIGKDIPWSYRTLRQTLDNPVYCGYIKFKDSLFKGMHKPIIPYETYLKVQKELEERQQQTYERNNNPRPFQAKYMLSGMARCGYCGAPLRIVLGHKRKDGSRTMKYHCANRFPRKTKGITVYNDNKKCDSGTYDLSNLENTVIDNLIGFQENNDSLLKIINGNNQPIPDTSSLKKQISQIDKKIQKNSDLYLNDFITMDELKDRTDSLQAEKKLLKAKIGESKRNDSTDVFELVKAQLGSIPINELSYDNKKKIVNNLVSKVDVTADNVDIIFKFQLT

SEQ ID NO: 6367 - protein, 485 aa, synthetic construct
MTKKVAIYTRVSTTNQAEGGFSIDEQIDRLTKYAEAMGWQVSDTYTDAGLSGAKLERPAMQRLINDIENKAFDTVLVYKLDRLSRSVRDTLYLVRDVFTKNKIDFISLNESIDTSSAMGSLFLTILSAINEFERENIKERMTMGKLGRAKSGKSMMWTKTAFGYYHNRKTGILEIVPLQATIVEQIFTDYLSGISLTKLRDKLNESGHIGKDIPWSYRTLRQTLDNPVYCGYIKFKDSLFEGMHQPIIPYETYLKVQKELEERQQQAYERNNNPRPFQAKYMLSGMARCGYCGAPLRVVLGHRRKDGSRTMKYHCANRFPRKTRGVTVYNDNKKCDSGTYDLSNLENTVIDNLIGLQENDDSLLKIINGNNQPFLDTSSLKKQINQIDKKIQKNSDLYLNDFITMDELKDRTDSLQAEKRLLKAKISENKFNDRTDVFELVKTQLGSTPINELSYDNKKKIVNNLVSKVDVTADNVEIIFKFQLA

SEQ ID NO: 6368 - protein, 452 aa, synthetic construct
MKAAIYIRVSTREQVENYSIQAQTEKLTALCRSKDWDVYDVFIDGGYSGSNMNRPALNEMLSKLHEIDAVVVYRLDRLSRSQRDTITLIEEYFLKNNVEFVSLSETLDTSSPFGRAMIGILSVFAQLERETIRDRMVMGKIKRIEAGLPLTTAKGRTFGYDVIDTKLYINEEEAKQLRLIYDIFEEEQSITFLQRRLKELGFKVRTYNRYNNWLTNDLYCGYVSYKDKVRVKGIHEPIISEEQFYRVQEIFARMGKNPNMNRGSASLLNNLVVCSKCGLGFVHRRKDIMSRGKKYHYRYYSCKTYKHIHELEKCGNKIWRADKLEELIINRVNNYSLASRNVDKEDELDSLNEKLKIGRAKKKRLFDLYINGRYEVSELDSMMNDIDAQINYYESQIEANEELKKNKQIQENLANLATVDFDSLEFREKQRYLKSLIDKIYVDGEQVTIEWL

SEQ ID NO: 6369 - protein, 452 aa, synthetic construct
MKAAIYIRVSTQEQVENYSIQAQTEKLTALCRSKDWDVYDIFIDGGYSGSNMNRPALNEMLSKLHEIDAVVVYRLDRLSRSQRDTITLIEEYFLKNNVEFVSLSETLDTSSPFGRAMIGILSVFAQLERETIRDRMVMGKIKRIEAGLPLTTAKGRTFGYDVIDTKLYINEEEAKQLRLIYDIFEEEQSITFLQKRLKELGFKVRTYSRYNNWLTNDLYCGYVSYKDKVHVKGIHEPIISEEQFYRVQEIFTRMGKNPNMNRDSASLLNNLVVCSRCGLGFVHRRKDTVSRGKKYHYRYYSCKTYKHIHELEKCGNKIWRADRLEELIINRVNNYSFASRNVDKEGELDSLSEKLKIEHAKKKRLFDLYINGSYEVSELDSMMSDIDARINYYESQIEANEELKKNKKIQENLANLATVDYDSLEFREKQLYLKSLINKIYIDGELVTIEWL

SEQ ID NO: 6370 - protein, 485 aa, synthetic construct
MTKKVAIYTRVSTTNQAEEGFSIDEQVDRLTKYAEAMGWQVSDTYTDAGFSGAKLERPAMQRLINDIENKAFDTVLVYKLDRLSRSVRDTLYLVKDVFTKNKIDFISLNESIDTSSAMGSLFLTILSAINEFERENIKERMTMGKLGRAKSGKSMMWTKTAFGYYHNRKTGILEIVPLQATIVEQIFTDYLSGLSLTKLRDKLNGSGHIGKDIPWSYRTLRQTLDNPVYCGYIKFKDSLFEGMHKPIIPYETYLKVQEELEERQQQTYERNNNPRPFQAKYMLSGMARCGYCGAPLRIVLGHKRKDGSRTMKYHCANRFPRKTKGVTVYNDNKKCDSGTYDLSNLENTVIDNLIGFQENNDSLLKIINGDNQPIPDTSSFKKRISQIDKKIQKNSDLYLNDFITMDELKDRTDSLQAEKKLLEAKISENKFNDSTDVFELVKTQLGSIPINELSYDNKKKIVNNLVSKVDVTADNVDIIFKFQLA

SEQ ID NO: 6371 - protein, 452 aa, synthetic construct
MKAAIYIRVSTQEQVENYSIQAQTEKLTALCRSKDWDVYDIFIDGGYSGSNMNRPALNEMLSKLHEIDAVVVYRLDRLSRSQRDTTTLIEEYFLKNNVEFVSLSETLDTSSPFGRAMIGILSVFAQLERETIRDRMVMGKIKRIEAGLPLTTAKGRTFGYDVIDTKLYINKEEAKQLQLIYDIFEEERSITLLQKRLKKLGFKVRTYNRYNNWLTNDLYCGYVSYKDKVHVRGIHEPIISEEQFYRVQEIFTRMGKNPNMNRDSASLLNNLVVCSKCGLGFVHRSKDTMCRGKKYHYRYYSCKTYKHTHELEKCGNKTWRADKLEELVINRVNNYSFASRNADKEDELVSLNEKLKIEHAKKKRLFDLYINGSYEVSELDGMMNDIDAQINYYESQIAANEGLRKNKKIQENLADLATVDFDSLGFREKQLYLKSLINKIYIDGEQVTIEWL

SEQ ID NO: 6372 - protein, 485 aa, synthetic construct
MTKKVAIYTRVSTTNQAEEGFSIDEQVDRLTKYAEAMGWQVSDTYTDAGLSGAKLERPAMQRLINDIEYKAFDTVLVYKLDRLSRSVRDTLYLVKDVFTKNKIDFISLNESIDTSSAMGSLFLTILSAINEFERENIKERMTMGKLGRAKSGKSMMWTKTAFGYYHNRKTGILEIVPLQATIVEQIFTDYLSGISLTKLRDKLNESGHIGKDIPWSYRTLRQTLDNPVYCGYIKFKGSLFEGMHKPIIPYETYLRVQKELEERQQQTYERNNNPRPFQAEYMLSGMARCGYCGAPLKIVLGHKRKDGSRTMKYHCANRFPRKTKGVTVYNDNKKCDSGAYDLSNLENTVIGSLIGFQENSDSLLKIINGNNQPILDTSSFEKQISQIDKKIQKNSDLYLNDFITMDELKDRTDSLQAEKELLKAKISENKFNDSTDVFELVKTQLGSIPINELSYDNKKKIVNNLVSKVDVTADNVDIIFKFQLA

SEQ ID NO: 6373 - protein, 452 aa, synthetic construct
MKAAIYIRVSTHEQVANYSIQAQTEKLTALCRSKDWDVYDIFIDGGYSGSNMNRPALNEMLSKLHEIDAVVVYRLDRLSRSQRDTTTLIEEYFLKNNVEFVSLSETLDTSSPFGRAMIGILSVFAQLERETIRDRMVMGKIKRIEAGLPLTTAKGRTFGYDVIDTKLYINEEEAKHLQLIYDIFEEEQSITFLQKRLKKLGFKVRTYNRYNNWLTNDLYCGYVSYKDKVHVKGIHEPIISEEQFYRVQEIFTRMGKNPNMNRDSASLLNNLVVCSKCGLGFVHRRKDTTSGGKKYHYRYYSCKTYKHTHELEKCGNKTWRADKLEELIINRVNNYSFASRNVDKEGELDSLNEKLKIEHAKKRRLFDLYINGSYEVSELDSMMNDIDAQISYYESQIEANEELKKNKKIQENLANLATVDFDSLEFREKQLYLKSLINKIYIDGEQVTIEWL

SEQ ID NO: 6374 - protein, 485 aa, synthetic construct
MTRKVAIYTRVSTTNQAEEGFSIDEQVDRLTKYAEAMGWQVGDTYTDAGFSGAKLERPAMQRLINDIENKAFDTVLVYKLDRLSRSVRDTLYLVKDVFTKNKIDFISLGESIDTSSAMGSLFLTILSAINEFERENIKERMTMGKLGRAKSGKSMMWTKTAFGYYHNRKTGILEIVPLQATIVEQIFTDYLSGISLTKLRDKLNESGHIGKDIPWSYRTLRQTLDNPVYCGYIKFKGSLFEGMHRPIIPYETYLKVQKELEERQQQAYKRNNNPRPFQAKYMLSGRARCGYCGAPLKIVLGHKRKDGSRTMKYHCANRFPRKTKGVTVYDDNKKCDSGTYDLINLENTVIDNLIGFQENDDSLLKIINGNNQPILDTSSLKEQISQIDKKIQKNSDLYLNDFITMDELKDRTDSLQAEKKLLEAKISENKFNDSTDVFELVKTQLGSIPINELSYDNKKKIVNNLVSKVDVTADSVGIIFKFQLA

SEQ ID NO: 6375 - protein, 469 aa, synthetic construct
MCYTTPVRAAVYLRISEDRSGEQLGVARQREDCLKLCDQRKWVPVEYLDNDVSASTGKRRPAYEQMLADITAGKIAAVVAWDLDRLHRRPIELEAFMSLADERRLALATVAGDVDLATPQGRLVARLKGSVAAHETEHKKARQRRAARQKAERGHPNWSKAFGYLPGPNGPEPDPRTAPLVKQAYADILAGASLGDVCRQWNDAGAFTITGRPWTATTLSKFLRKPRNAGLRAYRGARYGPVDRAAIVGKAQWSPLVDEATFWAAQAVLDAPGRAPGRKSVRRHLLTGLAGCGKCGNHLAGSYRTDGRVVYVCKACHGVAILADNIEPILYHIVAERLAMPNAVDLLRREIHDAAEAEAIRLELETLYGVLDRLAVERAEGLLTARQVKISTDIVNAKITKLQARQLDQERLRVLDSIPLGTPQVAGVIAELSPNRFRAVLDVLAEVVVQPVGKSGRIFNPERVRVNWR

SEQ ID NO: 6376 - protein, 452 aa, synthetic construct
MKAAIYIRVSTQEQVGNYSIQAQTEKLTALCRSKDWDVYDIFIDGGYSGSNMNRPALNEMLSKLHEIDAVVVYRLDRLSRSQRDTTTLIEEYFLKNNVEFVSLSETLDTSSPFGRAMIGILSVFAQLERETIRDRMVMGKIKRIEAGLPLTTAKGRTFGYDVIDTKLYINEEEAKQLRLIYDIFEEEQSITSLQKRLKKLGFKVRAYNRYNNWLTNDLYCGYVSYKDKVHVKGIHEPIISEEQFYRVQEIFTRMGKNPNTNRGSASLLNNLVVCSKCGLGFVHRRKDTMSGGKKYHYRYYSCKTYKHTHELEKCGNKTWRADKLEELIINRVNSYSFASRNVDKEDELDSLNEKLKIELAKRKRLFDLYINGSYEVGELDSMMNDIDAQINYYESQIEANEELRKNKKIQENLADLATVDFDSLEFREKRLYLKSLINKIYIDGEQVTIEWL

SEQ ID NO: 6377 - protein, 452 aa, synthetic construct
MKAAIYIRVSTREQVENYSIQAQTEKLTALCRSKDWDVYDIFIDGGYSGSNMNRPALNEMLSKLHEIDAVVVYRLDRLSRSQRDTITLIEEYFLKTNVEFVSLSETLDTSSPFGRAMIGILSVFAQLERETIRERMVMGKIKRIEAGLPLTTAKGRTFGYDVIDTKLYINEEEAKQLQLIYDIFEEEQSITSLQKRLKELGFKVRTYNRYNNWLTNDLYCGYVSYKDKVHVKGIHEPIISEEQFYRVQEIFTRMGKNPNMNRDSASLLNNLVVCSKCGLGFVHRRKDAMSRDKKYHYRYYSCKTYKHIHELEKCGNKIWRADKLEELVINRVNNYSLASRNVDKEDELDSLNEKLRTEHAKKKRLFDLYINGSYEVSELDSLMNDIDAQINYYESQIEANEELKKNKKIQENLAHLATVDFDSLEFREKQLYLKGLINKIYIDGEQVTIEWL

SEQ ID NO: 6378 - protein, 485 aa, synthetic construct
MTKKVAIYTRVSTTNQAEEGFSIDEQIDRLTKYAEAMGWQVSDTYTDAGLSGAKLERPAMQRLINDIEDKAFDTVLVYKLDRLSRSVRDTLYLVKDVFTKNKIDFISLNESIDTSSAMGSLFLTILSAINEFERENIKERMTMGKLGRAKSGKSMMWTKTAFGYHHNRKTGILEIVPLQATIVEQIFTDYLSGISLTKLRDKLNESGHIGKDIPWSYRTLRQTLDNPVYCGYIKFKDSLFEGMHKPIIPYETYQKVQKELVERQQQTYERNNNPRPFQAKYMLSGMARCGYCGAPLRIVLGRKRKDGSRTMKYHCANRFPRKTRGVTVYNDNKKCESGTYDLSNLENTVIDNLIGFQENNDSLLKIINGNNQPILDTSSFKKRISQIDKKIQKNSDLYLNDFITMGELKNRTDSLQAEKKLLEAKISENKFNDSTDVFELVKTQLGGIPINELSYDNKKKIVNNLVSKVDVTADNVDIIFKFQLA

SEQ ID NO: 6379 - protein, 485 aa, synthetic construct
MTKKVAIYTRVSTTTQTEEGFSIDEQIDRLTKYAEAMGWQVSDTYTDAGYSGAKLKRPAMQRLINGIENKAFDTVLVYKLDRLSRSVRDTLYLVKDVFTKNKIDFISLSESIDTSSAMGSLFLTILSAINEFERENIKERMTMGKLGRAKSGKSMMWTKTAFGYYHNRKTGILEIVPPQATIVEQIFTDYLSGISLTKLRDKLNENGHIGKDIPWSYRTLRQTLDNPVYCGYIKFKGSLFEGMHKPIIPYETYLKVQKELEERQQQTYERNNNPRPFQAKYMLSGMARCGYCGAPLKVVLGHKRKDGSRTMKYHCANRFPRKTKGVTVYNDNRKCDSGTYDLSNLENTVIDNLIGFQENNDSLLKIINGSNQPILDTSSFKEQISQIDKKIQKNSNLYLNDFITMDELKDRTDSLQAEKRLLEAKISENKFNDRTDVFELVKTQLGSIPINELSYDNRKKIVNNLVSKVDVTADNVDIIFKFQLA

SEQ ID NO: 6380 - protein, 452 aa, synthetic construct
MKAAIYIRVSTREQVENYSIQAQTEKLTALCRSKDWDVYDIFIDGGYSGSNMNRPALNEMLSKLHEIDAVVVYRLDRLSRSQRDTITLIEEYFLKNNVEFVSLSETLDTSSPFGRAMIGILSVFAQLERETIRDRMVMGKIKRIEAGLPLTTAKGRTFGYDVIDTKLYINEEEAKQLQLIYDIFEEEQSITFLQKRLKELGFKVRSYNRYNNWLTNDLYCGYVSYKDKVHVKGIHEPIISEEQFYRVQEIFTRMGKNPNMNRDSASLLSNLVVCSKCGLGFVHRRKDTMSRGKKYHYRYYSCRTYKHTHELEKCGNKIWRADKLEELIINRVSNYSFASRNVDKEDELDSLNEKLRIEHAKKKRLFDLYINGSYEVSELDSMMNDIDAQINYYESQIEANEELKKNRKIRENLASLATVDFDSLEFREKQLYLKSLINKIYIDGEQVTVEWL

SEQ ID NO: 6381 - protein, 485 aa, synthetic construct
MTKKVAIYTRVSTTNQAEEGFSIDEQIDRLTKYAEAMGWQVSDTYTDAGFSGAKLERPAMQRLINDIENKAFDTVLVYKLDRLSRSVRDTLYLVKDVFTKNKIDFISLNESINTSSAMGSLFLTILSAINEFERENIKERMTMGKLGRAKSGKSMMWTKTAFGYYHNRKTGILEIVPLQATIVEQIFTDYLSGISLTKLRDKLNESGHIGKDIPWSYRTLRQTLDNPVYCGYIKFKGSLFEGMHKPIIPYETYLKVQKELEERQQQTYGRNNNPRPFQAKYMLSGMARCGYCGAPLRIVLGHKRKDGSRTMKYHCANRFPRKTKGVTVYNDNKKCDSGTYDLSNLENTVIDNLIGFQENNDRLLKIINGNDQPILDTSSFKKQISQIDKKIQKNSDLYLNDFITMDELKDRTDSLQAEKKLLEAKISENKFNDSTDVFELVKTQLGSIPINELSYDNKKRIVNSLVSKVDVTADNVDIVFKFQLA

SEQ ID NO: 6382 - protein, 452 aa, synthetic construct
MKAAIYIRVSTREQVENYSIQAQTEKLTALCRSKDWDVYDIFIDGGYSGSNMNRPALNEMLSKLHEIDAVVVYRLDRLSRSQRDTITLIEEYFLRNNVEFVSLSETLDTSSPFGRAMIGILSVFAQLERETIRDRMVMGKIKRIEAGLPLTTAKGRTFGYDVIDTKLYINEEEAKQLQLIYDIFEEEQSITLLQKRLKKLGFKVRTYNRYNSWLTNDLYCGYVSYKDKVHVKGIHEPIISEEQFYRVQEIFTRMGKNPNMNRDSASLLNNLVVCSKCGLGFVHRRKDTMSRGKKYRYRYYSCKTYKHTHELEKCGNKIWRADKLEELIINRVNNYSFASRNVDKEDELDSLNEKLKIEHEKKKRLFDLYINGSYEVSELDCMMNDIDAQINYYESQIEANEELKKDKRIQESLANLATVDYDSLEFREKQLYLKSLINKIYIDGEQVTIEWL

SEQ ID NO: 6383 - protein, 485 aa, synthetic construct
MTKKVAIYTRVSTTSQAEEGFSIDEQIDRLTKYAEAMGWQVSDTYTDAGSSGAKLERPAMQRLISDIESKAFDTVLVYKLDRLSRSVRDTLYLVKDVFTKNKIDFISLNESIDTSSAMGSLFLTILSAINEFERENIKERMTMGKLGRAKSGKSMMWTKTAFGYYHNRKTGILEIVPLQATIVEQIFTDYLSGISLTKLRDKLNESGHIGKDIPWSYRTLRQTLDNPVYCGYIKFKDSLFVGMHKPIIPYETYLKVQKELEERQQQTYERNNNPRPFQAKYMLSGMARCGYCGAPLRIVLGHKRKDGSRTMKYHCANRFLRKTKGITVYNDNKKCDSGAYDLSNLENTVIDNLIGFQENNDSLLKIINGNNQPILDTSSFKKQISQIDKKIQKNSDLYLNDFITMDELKDRTDSLQAEKKLLEAKISENKLNDSTDVFELVKTQLGSIPINELSYDNKKKIVNNLVSKVDVTADNVDIIFKFQLA

SEQ ID NO: 6384 - protein, 485 aa, synthetic construct
MTKKVAIYTRVSTTSQAEEGFSIDEQIDRLTKYAEAMGWQVSDTYTDAGLSGAKLERPAMQRLINDIENKAFDTVLVYKLDRLSRSVRDTLYLVKDVFTKNRIDFISLNESIDTSSAMGSLFLTILSAINEFERENIKERMTMGKLGRAKSGKSMMWTKTAFGYYHNRKTGILEIVPLQATIVEQIFTDYLSGISLTKLRDKLNESGHIGKDIPWSYRTLRQTLDNPVYCGYIKFKDSLFEGMHKPIIPYETYLKVQKELEERQQQTYERNHNPRPFQAKYMLSGMARCGYCGAPLKIVLGHKRKDGSRTMKYHCANRFPRKTKGVTVHNGNKKCDSGTYDLSNLENTVIDSLIGFQENNDSLLKIINGNNQPILDTNSLKKQISQIDKKIQKNSDLYLNDFITMDELKDRTDGLQAEKELLKAKISENKFNDSTDVFELVKTQLGSTPINELSYDNKKKIVNNLVSKVDVTVDNVDIIFKFQLA

SEQ ID NO: 6385 - protein, 452 aa, synthetic construct
MKAAIYIRVSTREQVENYSIQAQTEKLTALCRSKDWDVYDIFIDGGYSGSNMNRPALNEMLSKLHEIDAVVVYRLDRLSRSQRDTITLIEEYFLKNNVEFVSLSETLDTSSPFGRAMIGILSVFAQLERETIRDRMVMGKIKRIEAGLPLTTAKGRTFGYDVIDTKLYINEEEAGQLRLIYDIFEEEQSITFLQKRLKKLGFKVRSYNRYNSWLTNDLYCGYVSYKDKVHVKGIHEPIISEEQFYRVQEIFTRMGKNPNMNRDSASLLNNLVVCSKCGLGFVHRRKDTVSRGKKYHYRYYSCKTYKHIHELEKCGNKIWRADKLEELIINRVNNYSLASRNVDKEDELDSLNEKLKIEHAKKRRLFDLYINGSYEAGELDSMMNDIDAQINYYESQIRAREELEKSKKIQENLADLATVDFDGLGFREKQLYLKSLINKIYIDGEQVTIEWL

SEQ ID NO: 6386 - protein, 485 aa, synthetic construct
MTKKVAIYTRVSTTNQAEEGSSIGEQIDRLTKYAEAMGWQVSDTYTDAGFSGAKLVRPAMQRLINDIENKAFDTVLVYKLDRLSRSVRDTLYLVKDVFTKNKIDFISLNECIDTSSAMGSLFLTILSAINEFERENIKERMTMGKLGRAKSGKSMMWTRTAFGYYHNRKTGILEIVPLQATIVEQIFTDYLSGISLTRLRDKLNESGHIGKDIPWSYRTLRQTLDNPVYCGYIKFKDSLFEGLHKPIIPYETYLKVQKELEERQQQTYERNNNPRPFQAKYMLSGMARCGYCGAPLRIVLGHKRKDGSRTMKYHCANRFPRKTKGVTVYNDNKKCDSGTYDLSNLENTVIDNLIGFQENSDSLLKIINGNNQPIQDTSSFKEQISQIDKKIQKNSDLYLNDFITMDELKDRTDSLQAEKKLLKAKISENKFNDSTDVFELVKTQLGSIPINELSYDNKKKIVNNLVSKVDVTADDVVIIFKFQLA

SEQ ID NO: 6387 - protein, 469 aa, synthetic construct
MSYTTPVRAAVYLRISEDRSGEQLGIARQREDCLELCGQRKWVPVEYLDNDVSASTGKRRPAYEQMLADITAGKIAAVVAWDLDRLHRRPIELEAFMSLADEKRLALATVAGDVDLATPQGRLVARLKGCVAAHETEHKKARQRRAARQKAERGHPNWSKAFGYLPGPNGPEPDPRTAPLVKQAYADILAGASLGDVCRQWNGAGAFTITGRPWTTTALSKFLRKPRNAGLRAYKGARYGPVDRDAIVGKAQWSPLVDEATFWAAQTVLDAPGRAPGRKSVRRHLLTGLAGCGKCGNRLAGSYRTDGRVVYVCKACHGVAILADNIVPILYHVVAERLAMPDAVDLLRREIHDAAEAETIRLELETLYGELDRLAVERAEGLLTARQVKISTDIVTAKIAKLRARQLDQERLRVFDGIPLGTPQVAGTIAELSPDRFRAVLDVLAEVVVQPVGKSGRIFSPERVQVNWR

SEQ ID NO: 6388 - protein, 485 aa, synthetic construct
MTKKVAIYTRVSTTNQAEEGFSIDEQVDRLTRYAEAMGWQVSDTYTDAGISGAKLERPAMQRLINDIENKAFDTVLVYKLDRLSRSVRDTLYLVKDVFTKNKIDFISLNESIDTSSAMGSLFLTILSAINEFERENIKERMTMGKLGRAKSGKSMMWTKTAFGYYHNRKTGILEIVPLQATIVEQIFTDYLSGISLTKLRDKLNESGHIGKDIPWSYRTLRQTLDNPVYCGYIKFKGSLFEGMHKPIIPYETYLKVQKDLEERQQQTYERNNNPRPFQAKYMLSGVARCGYCGAPLRIVLGHKRKDGSRTMKYHCANRFPRKTKGVTVYNDNKKCDSGTYDVSNLENTVIDNLIGFQENNDSLLRVINGNNQPILDTSSFKEQISQIDKKIRKNSDLYLNDFITMDELKDRTDSLQAEKKLLKAKISENKFNDSTDVFELVKTQLGSIPINELSYDSKKKIVNNLVSKVDVTADNVDIIFKFQLA

SEQ ID NO: 6389 - protein, 469 aa, synthetic construct
MSYTTPVRAAVYLRISEDRSGEQLGVARQREDCLKLCGQRRWVPVEYLDNDVSASTGKRRPAYEQMLADITAGKIAAVVAWDLDRLHRRPVELEAFMSLADEKRLALATVAGDVDLATPQGRLVARLKGCVAAHETEHKKARQRRAARQKAERGHPNWSKAFGYLPGPNGPEPDPRTAPLVKQAYADILAGASLGDVCRQWNDAGAFTITGRPWTTATLSKFLRKPRNAGLRAYKGARYGPVDRNAIVGKARWSPLVDEATFWAAQAVLDAPGRAPGRKSVRRHLLTGLAGCGKCGNHLAGSYRTDGRVVYVCKACHGVAILADNIEPILYRIVAERLAMPDAVDLLRREFHDAAEAETIRLELETLYGELDRLAVERAEGLLTARQVKISTDIVNAKITKLQARQQDQERLRVLDGIPLGTPQVAGVIAELSPDRFRAVLDALAVVAVQPVGKGGKTSNPERVQVNWR

SEQ ID NO: 6390 - protein, 469 aa, synthetic construct
MSYTTPVRAAVYLRISEDRSGEQLGVARQREDCLKLCGQRKWVPVEYLDNDVSASTGKRRPAYEQMLADITAGKIAAVVAWDLDRLHRRPVELEAFMSLADEKRLALATVAGDVDLATPQGRLVARLKGSVAAHETEHKKARQRRAARQKAERGHPNWSKAFGYLPGPNGPEPDPRTAPLVKQAYADILAGASLGDVCRQWNDAGAFTITGRPWTTTTLSKFLRKPRNAGLRAYKGARYGPVDRDAIVGKAQWSPLVDEATFWAAQAVLDAPGRAPGRKSVRRHLLTGLAGCGKCGNHLAGSYRTDGRVVYVCKACHGVAILADNIEPILYHIVAERLAMPDAADLLRREIHDAAEAETIRLKLETLYGELDRMAVERAEGLLTARQVKISTDIVNAKITKLQARQLDQERLRVLDGIPLGTPLVAGMIAELSPDRFRAVLDVLVEVVVQPVGKSGRISNPERVQVNWR

SEQ ID NO: 6391 - protein, 469 aa, synthetic construct
MSYTTPVRAAVYLRISEDRSGEQLGVARQREDCLKLCGQRKWVPVEYLDNDVSASTGKRRPAYEQMLADITAGKIAAVVAWDLDRLHRRPVELEAFMSLADEKRLALATVAGDVDLATPQGRLVARLKGVVAAHETEHKKARQRRAARQKAERGHPNWSKAFGYLPGPNGPEPDPRSAPLVKQAYADILAGASLGDVCRQWNDAGAFTITGKPWTTTTLSKFLRKPRNAGLRAYKGARYGPVDRDAIVGKAQWSPLVDEATFWAAQAVLDAPGRAPGRKSVRRHLLTGLAGCGKCGNHLAGSYRTDGRVVYVCKACHGVAILADNIEPVLYHIVAERLAMPDAVDLLRREAHDAAEAETIRLELETLYGELDRLAVERAEGLLTARQVKISTDIVNAKITKLQARQLDQERLRVFDGIPLGTPQVAGMIAELSPDRFRAVLDVLAEVVVQPVGKSGRIFNPERVQVNWR

SEQ ID NO: 6392 - protein, 452 aa, synthetic construct
MKAAIYIRVSTREQVENYSIQAQSEKLTALCRSKDWDVYDIFIDGGYSGSNMNRPALNEMLSKLHEIDAVVVYRLDRLSRSQRDTITLIEEYFLKNNVEFVSLSETLDTSSPFGRAMIGILSVFAQLERETIRDRMVMGKIKRIEAGLPLTTAKGRTFGYDVIDTKLYINEEEARQLQLVYDIFEEEQSITFLQKRLKKLGFKVCTYNRYNNWLTNDLYCGYVSYKDKVHAKGIHEPIISEEQFYRVQEIFTRMGKNPNMNRDSASLLNNLVVCSKCGLGFVHRRKDTTSRGKKYHYRYYSCKTYKHIHELEKCGNKIWRADKLEELVINRVNNYSFASRNVDKVDELDSLNEKLKIEHAKKKRLFELYINGSYEVSELDSMMNDIDAQINYYESQIEANEELKKNKKIQENLADLAAVDFDSLEFREKQLYLKSLINKIYIDGEQVTIEWL

SEQ ID NO: 6393 - protein, 485 aa, synthetic construct
MTKKVAIYTRVSTTNQAEEGFSIDEQIDRLTKYAEAMGWQVSDTYTDAGFSGAKLERPAMQRLINDVENKAFDTVLVYKLDRLSRSVRDTLYLVKDVFTKNKVDFISLNESINTSSAMGSLFLTILSAINEFERENIIERMTMGKLGRAKSGKSMMWTKTAFGYYHNRKTGILEIVPLQAAIVEQIFTDYLSGISLAKLRDKLNESGHIGKDIPWSYRTLRQTLDNPVYCGYIKFKDSLFEGMHKPIIPYETYLKVQKELEERQRQTYERNNNPRPFQAKYMLSGMARCGYCGAPLRIVLGHKRKDGSRTMRYHCANRFPRKTKGVTVYNDNKKCDSGTYDLSNLETTVIDNLIGLQENNDSLLKIINGNNQPILDTSSFKKQISQIDKKIQKNSDLYLNDFITMDELKGRTDVLQAEKKLLKAEISGNKFNDSTDVFELVKTQLGSAPINELSYDDKKKIVNNLVSRVDVTADSVDIIFKFQLA

SEQ ID NO: 6394 - protein, 452 aa, synthetic construct
MKAAIYIRVSTREQVENYSIQAQTEKLTALCRSKDWDVYDIFIDGGYSGSNMNRPALNEMLSKLHEIDAVVVYRLDRLSRSQRDTITLIEEYFLKNNVEFVSLSETLDTSSPFGRAMIGILSVFAQLERETIRDRMVMGKIKRIEAGLPLTTAKGRTFGYDVIDTKLYINEEEAKQLQLIYDIFEEEQSITFLQRRLKELGLKVRTYNRYNNWLTNDLYCGYVSYKDKVHVKGIHEPIISEEQFYRVQEIFARMGKNPNMNRDSASLLSSLVVCSKCGLGFVHRRKDTTSRGKKYHYRYYSCKTYKHTHELEKCGNKIWRADKLEELIINRVNNYSFASRNVDKEDELDSLNEKLKIEHAKKKRLFDLYINGSYEVSELDSMLSDIDAQINYYESQIEAIEELKRNEKIQENLANLATVDYDSLEFREKQLYLKSLINKIYIDGEQVTIEWL

SEQ ID NO: 6395 - protein, 452 aa, synthetic construct
MKAAIYIRVSTREQVENYSIQAQTEKLTALCRSKDWDVYDIFIDGGYSGSNMNRPALNEMLRKLHEIDAVVVYRLDRLSRSQRDTITLIEEYFLKNNVEFVSLSETLDTSSPFGRAMIGILSVFAQLERETIRDRLVMGKIKRVEAGLPLTTAKGRTFGYDVIDSKLYINEEEAKQLQLIYDIFEEEQSITFLQKRLKKLGFKVRAYSRYNNWLTNDLYCGYVSYKDKVHVKGIHEPIISEEQFYRVQEIFTRMGKSPNMYRDSASLLNNLVVCSKCGLGFVHRRKDTTSRGKRYHYRYYSCKTYKHTHELEKCGNKIWRADKLEELIINRVNNYSFASRNADKEDELDSLSEKLKIEHAKKKRLFDLYINGSYEVSELDSLMNDIDAQINYYESQIEANEELKKNKKIQENLADLATVDYDSLEFREKQLYLKSLINKIYIDGEQVTIEWL

SEQ ID NO: 6396 - protein, 485 aa, synthetic construct
MTKKVAIYTRVSTTNQAEEGFSIDEQIDRLTKYAEAMGWQVSDTYTDAGFSGAKLERPAMQRLINDIENKAFDTVLVYKLDRLSRSVRDTLYLVKDVFTKNKIDFISLSESIDTSSAMGSLFLTILSAINEFERENIKERMTMGKLGRAKSGKSMMWTKTAFGYYHNRKTGILEIVPLQATIVEQIFTDYLSGISLTKLRDKLNESGHIGKDIPWSYRTLRQTLDNPVYCGYIKFKDSLFEGMHKAIIPYETYLKVQKELEERQQQTYERNNNPRPFQAKYMLSGMARCGYCGAPLRIVLGHKRKDGSRTMKYHCANRFPRKAKGVTVYNDNKKCDSGTYDLSNLENTVIDNLIGLQENNGSLLKIINGNGQPILDTSSFKKQISQIDKKIQKNSDLYLNDFITMDELKDRTDSLLAEKKQLKAKISEDKFNDSTDVFELVKTQLGSIPINELSYDDKKKIVNNLVSKVDVTADNVDIIFKFQLA

SEQ ID NO: 6397 - protein, 469 aa, synthetic construct; identical to SEQ ID NO: 1875

SEQ ID NO: 6398 - protein, 452 aa, synthetic construct
MKAAIYIRVSTREQVENYSIQAQTEKLTALCRSKDWDVYDIFIDGGYSGSNMNRPALNEMLSRLHEIDAVVVYRLDRLSRSQRDTITLIEEYFLRNNVEFVSLSETLDTSSPFGRAMIGILSVFAQLERETIRDRMVMGKIKRIEAGLPLTTAKGRTFGYDVIDTKLYINEEEAKQLRLIYDIFEEEQSITFLQRRLKELGFKVRTYNRYNNWLTNDLYCGYVSYKDKVHVKGIHEPIISEEQFYRVQEIFNRMGKNPNMNRDSASLLNNLVVCSKCGLGFVHRRKDAMSRDKKYHYRYYSCKTYKHIHELEKCGNKIWRADKLEELIINRVNNYSLASRNVDKEDELDSLNEKLKIEHAKKKRLFDLYINGSYEVSELDSMMNDIDAQISYYESQIEANEELKKNKKIQENLAHLATVDFDSLEFREKQLYLKSLINKIYIDGEQVTIEWL

SEQ ID NO: 6399 - protein, 452 aa, synthetic construct
MKAAIYIRVSTQEQVENYSIQAQTEKLTALCRSKDWDVYDIFIDGGYSGSNMNRPALNEMLSKLHEIDAVVVYRLDRLSRSQRDTTTLIEEYFLKNNVEFVSLSETLDTSSPFGRAMIGILSVFAQLERETIRDRMVMGKIKRIEAGLPLTTAKGRTFGYDVIDTKLYINEEEAKQLQLIYDIFEEEQSITSLQKRLKKLGFKVRTYNRYNSWLTNDLYCGYVSYKDKVHVKGIHEPIISEEQFYRVQEIFTRMGKKPNMNRDSASLLSNLVVCSKCGLGFVHRSKDTMSRGKKYHYRYYSCKTYKHAHELEKCGNKIWRADKLEELIINRVNNYSFVSRNVDKEDELDSLNEKLKIEHAKKRRLFDLYINGGYEVSELDSMMNDIDAQINYYESQIEANEELKKNKKIQEDLADLATVDFDSLEFREKQLYLKSLINKIYIDGEQVTIEWL

SEQ ID NO: 6400 - protein, 485 aa, synthetic construct
MTKKVAIYTRVSTTNQAEEGFSIDEQVDRLTKYAEAMGWQVSDTYTDAGLSGAKLERPAMQRLINDIENKAFDAVLVYKLDRLSRSVRDTLYLVKDVFTKNKIDFISLNESIDTSSAMGSLFLTILSAINEFERENIKERMTMGKLGRAKSGKSMMWTKTAFGYYHNRKTGILEIVPLQASIVEQIFTDYLSGISLTKLRDKLNESGHIGKDIPWSYRTLRQTLDNPVYCGYIKFKDSLFEGMHKPIIPYETYLKVQKELKERQQQTYERNNNPRPFQAKYMLSGMARCGYCGAPLRIVLGHKRKDGSRTMKYHCANRFPRKTKGITVYNDNKKCDSGTYDLSNLENTVIDNLIGFQENNDSLLKIINGNNQPTLDTSSFKKRISQIDKKIQKNSDLYLNDFITMDELKSRTESLQAEKKLLEAKISENKFNDSTDVFELVKTQLGSIPINELSYDNKKKIVNNLVSKVDVTADNVDIIFKFQLA

SEQ ID NO: 6401 - protein, 485 aa, synthetic construct; identical to SEQ ID NO: 6031

SEQ ID NO: 6402 - protein, 485 aa, synthetic construct
MTKKVAIYTRVSTTNQAEEGFSIDEQIDRLAKYAEAMGWQVSDTYTDAGLSGAKLERPAMQRLINDIENKAFDTVLVYKLDRLSRSVRDTLYLVKDVFTKNKIDFISLNESIDTSSAMGSLFLTILSAINEFERENIKERMTMGKLGRAKSGKSMMWTKTAFGYYHNRKTGILEIVPLQATIVEQIFTDYLSGISLTKLRDKLNESGHIGKDIPWSYRTLRQTLDNPVYCGYIKFKGSLFEGMHKPIIPYETYLKVQKELEERQQQAYERNNNPRPFQAKYMLSGMARCGYCGAPLKIVLGHKRKDGSRTMKYHCANRFPRKTKGITAYNDNKKCDSGTYDLSNLENTVIDNLVGFQENNDSLLKIINGSNQPILDTSSLKKQISQIDKKIQKNSDLYLNDFITMDELKDRTDSLQAEKKLLEAKIYENKFNDRTDVFELVKTQLGSIPINELSYDNKKKIVNNLVSKVDVTADNVDIIFKFQLA

SEQ ID NO: 6403 - protein, 485 aa, synthetic construct
MTKKVAIYTRVSTTNQAEEGFSIDEQIDRLTKYAEAMGWQVSDTYTDAGLSGAKLERPAMQRLINDIENKAFDTVLVYKLDRLSRSVRDTLYLVKDVFTKNKIDFISLNESIDTSSAMGSLFLTILSAINEFERENIKERMTMGKLGRAKSGKSMMWTKTAFGYYHNRKTGILEIVPPQAAIVEQIFTDYLSGISLTKLRDKLNESGHIGKDIPWSYRTLRQTLDNPVYCGYIKFKGSLFEGMHKPIIPYETYLKVQKELEERQQQTYVRNNNPRPFQAKYMLSGVARCGYCGAPLRIVLGHKRKDGSRTMKYHCANRFPRKTKGVTVYNDNKKCDSGTYDLSNLENTVIDNLIGFQENNDSLLEIIDGNNQPILDTSSFKKQISQIDKKIQKNSDLYLNDFITMDELKDRTDSLQAEKKLLKAKISENKFNDSADVFELVKTQLGSVPINELSYDNKKKIVNSLVSKVDVTADNVDIIFKFQLA

SEQ ID NO: 6404 - protein, 452 aa, synthetic construct
MKAAIYIRVSTREQVENYSIQAQTEKLTALCRSKDWDVYDIFTDGGYSGSNMNRPALNEMLSKLHEIDAVVVYRLDRLSRSQRDTITLIEEYFLKNNVEFVSLSETLDTSSPFGRAMIGILSVFAQLERETIRDRMVMGKIKRIEAGLPLTTAKGRTFGYDVVDTKLYINEEEAKQLRLIYDIFEEVQSITLLQKRLKKLGFKVRTYNRYNNWLTNDLYCGYVSYKDKVHVKGIHEPIISEEQFYRVQEIFTRMGKNPNMNRGSASLLNSLVVCSKCGLGFVHRRKDIMSHGKKYHYRYYSCKTYKHIHELEKCGNKIWRADKLEELIINRVNNYSIASRNADKEDELDSLNEKLKIEHAKKKRLFELYINGSYEVSELDSMMNDIDAQINYYESQIEVNEEQRKDKKIRENLADLATVDFDSLEFREKQLYLKSLINKIYIDGEQVTIEWL

SEQ ID NO: 6405 - protein, 485 aa, synthetic construct
MTKKVAIYTRVSTTNQAEEGFSIDEQIDRLTKYAEAMGWQVSDTYTDAGLSGAKLERPAMQRLINDIENKAFDTVLVYKLDRLSRSVRDTLYLVKDVFTKNKIDFISLNESIDTSSAMGSLFLTILSAINEFERENIKERMTMGKLGRAKSGKSMMWTKTAFGYYHNRKTGILEVVPLQATIVEQIFTDYLSGISLTKLRDKLNESGHVGKDIPWSYRTLRQTLENPVYCGYIKFKGSLFEGMHKPIIPYETYLKVQKELEERQQQTYERNNNPRPFQAKYMLSGMARCGYCGAPLRIVLGRKRKDGSRTMKYHCANRFPRKTKGITVYNDNKKCDSGTYDLNNLENTVIDNLIGFQENNDSLLKIINGNNQPILDTSSFKKQISQIDKKIQKNSDLYLNDFITMDELRDRTDSLQAEKKLLKAKISENKFNDSTDVFELVRTQLGSIPINELSYDNKKKIVNNLVSKVDVTADNVDIIFKFQLA

SEQ ID NO: 6406 - protein, 484 aa, synthetic construct
MTKKVAIYTRVSTTNQAEEGFSIDEIDRLTKYAEAMGWQVSDTYTDAGFSGAKLERPAMQRLTSDIENKAFDTVLVYKLDRLSRSVRDTLYLVKDVFTKNKIDFISLNECIDTSSAMGSLFLTILSAINEFERENIKERMTMGKLGRAKSGKSMMWTKTAFGYYHNRKTGILEIVPLQATIVEQIFTDYLSGISLTKLRDKLNESGHIGKDIPWSYRTLRQTLDNPVYCGYIKFKDSLFEGMHKPIIPYETYLKVQKELEERQQQTYERNNNPRPFQAKYMLSGMARCGYCGAPLRIVLGHKRKDGSRTMKYHCANRFPRRTKGVTVYNDNKKCDSGTYDLSYLEDTVIDNLIGFQENNDSLLKIINGNNQPILDTSSLKKQISQIDKKIQKNSDLYLNDFITMDELKDRTDSLQAEKKLLEAKISENKSNDSTDVFELVKTQLGSIPINELSYDNKKKIVNNLVSKVDVTADNVDIIFKFQLA

SEQ ID NO: 6407 - protein, 485 aa, synthetic construct
MTKKVAIYTRVSTTNQAEEGFSIDEQIDRLTKYAEAMGWQVSDTYTDAGLSGAKLERPAMQRLINDIENKAFDTVLVYKLDRLSRSVRDTLYLVKDVFTKNKIDFISLNESIDTSSAMGSLFLTILSAINEFERENIKERMTMGKLGRAKSGKSMMWTKTAFGYCHNRKTGVLEIVPLQATIVEQIFTDYLSGISLTKLRDKLNESGHIGKDIPWSYRTLRQTLDNPVYCGYIKFKDSLFEGMHKPIIPHETYLKVQKELEERQQQAYGRNNNPRPFQAKYMLSGMARCGYCGAPLKIVLGRKRKDGSRTMKYHCANRFPRKTKGITVYNDNKKCDSGTYDLSNLENTVIDYLIGFQENNDSLLRIINSNNQPILDTSSFKKQISQIVKKIQKNSDLYLNDFITMDELKDRIDSLQAEKKLLEAKISENKFNDSTDVFELVKTQLGSIPINELSYDNKKRIVNNLVSKVDVTADSVDIIFKFQLA

SEQ ID NO: 6408 - protein, 485 aa, synthetic construct
MTKKVAIYTRVSTTTQAEEGFSIDEQIDRLTKYAEAMGWQVSDTYTDAGFSGAKLERPAMQRLINDIENKAFDTVLVYKLDRLSRSVRDTLHLVKDVFTKNKIDFISLNESIDTSSAMGSLFLTILSAINEFERENIKERMTMGKLGRAKSGKSMMWTKTAFGYHHNRKTGILEIVPLQASIVEQIFTDYLSGISLTKLRDKLNESGHIGKDIPWSYRTLRQTLDNPVYCGYIKFKDSLFEGMHKPIIPYETYLKVQKELEERQQQAYERNNNPRPFQAKYMLSGMARCGYCGAPLRIVLGRKRKDGSRTMKYHCTNRFPRKAKGVTVYNDNKKCDSGSYDLSNLENTVIGNLIGFQENNDSLLKIINGNNQPILDVSSFKKQISQIDKKIQKNSDLYLNDFITMDELKDRTDSLQAEKKLLKAKISENKFNDSTDVFELVKTQLGSIPINELSYDNKKKIVNNLVSKVDVTADNVDIIFKFQLA

SEQ ID NO: 6409 - protein, 485 aa, synthetic construct
MTKKVAIYTRVSTTNQAEEGFSIDEQIDRLTKYAEAMGWQVSGTYTDAGFSGAKLERPAMQRLINDIENKAFDTVLVYKLDRLSRSVRDTLYLVKEVFTKNKIDFISLNESIDTSSAMGSLFLTILSAINEFERENIKERMTMGKLGRAKSGKSMMWTKTAFGYYHNRKTGILEIVPLQATIVEQIFTDYLSGISLTKLRDKLNESGHIGKDIPWSYRTLRQTLDNPVYCGYIKFKDSLFEGMHKPIIPYETYLKVQKELEERQQQTYERNNNPRPFQAKYMLSGMARCGYCGAPLKIVLGRKRKDGSRTMKYHCANRFPRKTKGITVYNGNKKCDSGSYDLSNLENTVIDNLIGFQESNDSLLKIINGNNQPILDTSSFEKQISQIDKKIQKNSDLYLNDFITMDELKDRTDSLQAEKKLLKAKISENKFNDSTDVFELVKTQLGSIPINELSYDNKKKIVNNLVSKVDVTADNVDIIFKFQLA

SEQ ID NO: 6410 - protein, 452 aa, synthetic construct
MKAAIYIRVSTREQVENYSIQAQTEKLIALCRSKDWDVYDIFIDGGYSGSNMNRPALNEMLSKLHEIDAVVVYRLDRLSRSQRDTITLIEEYFLKNNVEFVSLSETLDTSSPFGRAMIGILSVFAQLERETIRDRMVMGKIKRIEAGLPLTTAKGRTFGYDVIDTKLYINEEEARQLRLIYDIFEEEQSITFLQKRLKKLGFKVRTYSRYNNWLTNDLYCGYVSYKDKVHVKGIHEPIISEEQFYRVQEIFARMGKNPNMNRDSASLLNSLVVCSKCGLGFVHRRKDTTSRGKKYHYRYYSCKTYKHTHELEKCGNKIWRADKLEELIINRVNNYSFASRNVDKEDELDGLNEKLEIEHAKKKRLFDLYINGSYEVSELDSMMSDIEAQINYYESQIEADEELKKSKKIQENLANLATVDYDSLEFREKQLYLKSLINKIYIDGEQVTIEWL

SEQ ID NO: 6411 - protein, 485 aa, synthetic construct
MTKKVAIYTRVSTTNQAEEGFSIDEQIDRLTKYAEAMGWQVSDTYTDAGLSGAKLERPAMQRLINDIENKAFDTVLVYKLDRLSRSVRDTLYLVKDVFTKNKIDFISLNESIDTSSAMGSLFLTILSAINEFERENIKERMTMGKLGRAKSGKSMMWTKTAFGYYHNRKTGILEIVPLQATIVEQIFTDYLSGISLTKLRDKLNESGHIGKDIPWSYRTLRQTLDNPVYCGYIKFKGSLFEGMHKPIIPYETYLKVQKELEERQQQTYERNNNPRPFQAKYMLSGMARCGYCGAPLRIVLGHKRKDGSRTMKYHCANRFPRRTKGVTVYNDNKKCNSGTYDLSSLESTVIDNLIGFQENNDSLLKIINGDNRLILDTSSFRKQISQIDKKIQRNSDLYLNDFITMDELKDRTDSLQAEKKLLKAKISENKLNDSTDVFELVKTQLGSIPINELSYDNKKKIVNNLVSKVDVTADNVDIIFKFQLA

SEQ ID NO: 6412 - protein, 485 aa, synthetic construct
MTKKVAIYTRVSTTNQAEEGFSIDEQVDRLTKYAEAMGWQVCDTYTDAGLSGAKLERPAMQRLISDIETKAFDTVLVYKLDRLSRSVRDTLYLVKDVFTKNKIDFISLNESIDTSSAMGSLFLTILSAINEFERENIKERMTMGKLGRAKSGKSMMWSKTAFGYYHNRKTGILEIVPLQATIVEQIFTDYLSGISLTKLRDKLNESGHIGKDIPWSYRTLRQTLDNPVYCGYIKFKDSLFEGMHKPIIPYETYLKVQKELEERQQQAYERNNNPRPFQAKYMLSGMARCGYCGAPLRIVLGHKRKEGSRTMKYHCANRFPRKTKGITVYNDNKKCDSGTYDLSNLENTVIDNLIGFQENSDSLLKIINGNNQPILDTSSFKKQISQIDKKIQKNSDLYLNDFITMDELKERTDSLQAEKKLLEAKISGNKFNDSTDVFELVKTQLGSIPINELSYDCKKKIVNNLVSKVDVTADNVDIIFKFQLA

SEQ ID NO: 6413 - protein, 485 aa, synthetic construct
MIKKVAIYTRVSTTNQAEEGFSIDEQIDRLTKYAEAMGWQVSDTYTDAGCSGAKLERPAMQRLINDIENKAFDTVLVYKLDRLSRSVRDTLYLVKDVFTKNKIDFISLNESIDTSSAMGSLFLTILSAINEFERENIKERMTMGKLGRAKSGKSMMWTKTAFGYYHNRKTGILEIVPLQATIVEQIFTDYLSGVSLTKLRDKLNESGHIGKDIPWSYRTLRQTLDNPVYCGYIKFKGSLFEGMHTPIIPYETYLKVQKELEERQQQTYERNNNPRPFQAKYMLSGMARCGYCGAPLRIVLGHKRKDGSRTMKYHCANRFPRKTKGITVYNDNKKCDSGTYDLSNLENTVIDNLIGFQENNDSLLRIINGNNQPILDTSSFKKQISQIDKKIQKNSDLYLNDFITMGELRDRTDSLQAEKKLLEAKISENKSNDSTDVFELVKTQLGSIPINELSYDNKKKIVNNLVSKVDVTADNVDIIFKFQLA

SEQ ID NO: 6414 - protein, 485 aa, synthetic construct
MTKKVAIYTRVSTTNQAEEGFSIDEQTDRLTKYAEAMGWQVSDTYTDAGFSGAKLERPAMQRLINDIENKAFDTVLVYKLDRLSRSVRDTLYLVKDVFTKNKIDFISLNESINTCSAMGSLFLTILSAINEFERENIKERMTMGKLGRAKSGKSMMWTKTAFGYYHNHKTGILEIVPPQATIVEQIFTDYLSGISLTKLRDKLNESGHIGKDTPWSYRTLRQTLDNPVYCGYIKFKDSLFEGMHEPIIPYETYLKVQKELEERQQQTYERNNNPRPFQAKYMLSGMARCGYCGAPLRIVLGHKRKDGSRTKRYHCANRFPRKTKGVTVYNDNKKCDSGTYDLSNLENAVIDSLIGFQENNDSLLKIINGNNQPILDTSSFKKQIGQIDKRIQKNSDLYLNDFITMDELKDRTDSLQAEKKLLKTRISENKFNDSTDVFELVKAQLGSIPINELSYDNKKKIVNNLVSKVDVTADNVDIIFKFQLA

SEQ ID NO: 6415 - protein, 485 aa, synthetic construct
MTKKVAIYTRVSTTNQAEEGFSIDEQIDRLTKYAEAMGWQVSDTYTDAGFSGAKLERPAMQRLINDIENKAFDTVLVYKLDRLSRSVRDTLYLVKDVFTKNRIDFISLNESIDTSSAMGSLFLTILSAINEFERENIKERMTMGKLGRAKSGKSMMWTKTAFGYYHNRKTGILEIVPLQATIVEQIFTDYLSGISLTKLRDKLNESGHIGKDIPWSYRTLRQTLDNPVYCGYIKFKDSLFEGMHKPIIPYETYLRVQKELEERQRQAYERNNNPRPFQAKYMLSGMARCGYCGAPLRIVLGHKRKDGSRTMKYHCANRFPRKTKGVTVYNDNKKCDSGTYDLSNLENTVIDNLIGFQENNDSLLKIINGNNQPILDTSSLKKQISQIDKKIQKNSDLYLNDFITMDELKDRTDSLQAEKKLLKAKISESEFNDSTDVFELVKTQLGSIPINELSYDNKKKIVNNLVSKVDVTADNVDIIFKFQLA

SEQ ID NO: 6416 - protein, 452 aa, synthetic construct
MKAAIYIRVSTREQVENYSIQAQTEKLTALCRSKDWDVYDIFIDGGYSGGSMNRPALSEMLSKLHEIDAVVVYRLDRLSRSQRDTITLIEEYFLKSNVEFVSLSETLDTSSPFGRAMIGILSVFAQLERETIRDRMVMGKIKRIEAGLPLTTAKGRTFGYDVIDTKLYINEEEARQLQLIYDIFEEEQSITFLQKRLKKLGFKVRTYSCYNNWLTNDLYCGYVSYKDKVHVKGIHEPIISEEQFYRVQEIFTRMGKNPNMNRDSASLLNNLVVCSKCGLGFVHRRKDTTSRGKKYHYRYYSCKTYKHTHELERCGNKIWRADKLEELIINRVNNYSSASRNVDKEDELDSLNEKLKIEHAKRKRLFDLYINGSYEVSELDSMMNDIDAQISYYESQIEANEELKKNKKIQENLADLATVDYDSLEFREKQLYLKSLINKIYIDGEQVTIEWL

SEQ ID NO: 6417 - protein, 452 aa, synthetic construct
MKAAIYIRVSTREQVENYSIQAQTEKLTALCRSKDWDVYDIFIDGGYSGSNMNRPALNEMLSKLHEIDAVVVYRLDRLSRSQRDTITLIEEYFLKNNVEFVSLSETLDTSSPFGRAMIGILSVFAQLERETIRDRMVMGKIKRIEAGLPLTTAKGRTFGYDVIDTKLHINEEEAKQLRLIYDIFEEVQSITFLQKRLKKLGFKVRTYNRYNNWLTNDLYCGYVSYKDKVHVKGIHEPIISEEQFYRVQEIFTRMGKNPNMNRDSASLLNNLVVCSKCGLSFVHRRKEAVSRDKKYHYRYYSCKTYKHIHELEKCGNKIWRADKLEELVINRVNNYSVASRNVDKEDELDSLNEKLRIEHAKKKRLFDLYINGSYEVSELDSMMNDIDAQINYYEGRIKANEELRKNKKIQGNLADLATVDFDSLEFREKQLFLKSLINKIYIDGEQVTIEWL

SEQ ID NO: 6418 - protein, 452 aa, synthetic construct
MKAAIYIRVSTQEQVENYSIQAQTEKLTALCRSKDWDVYDIFIDGGYSGSNMNRPALNEMLSKLHEIDAVVVYRLDRLSRSQRDTTTLIEEYFLKNNVEFVSLSETLDTSSPFGRAMIGILSVFAQLERETIRDRMVMGKIKRIEAGLPLTTAKGRTFGYDVIDTKLYINEEEAKQLRLIYDIFEEEQSITSLQKRLKKLGFKVRTYNRYNNWLTNDLYCGYVSYKDKVHVKGIHEPIISEEQFYRVQEIFTRMGKNPNMNRDSASLLSNLVVCSKCGLGFVHRSKDTMSRGKKYHYRYYSCKTYKHTHELEKCGNKTWRADKLEELIINRVNNYSFASRNVDKEDELDSLNEKLKIEHAKKKRLFDLYINGSYEVSELDSMMNDIDAQINYYESQIEANEELKKNKKIQENLADLATVDFDSLGFREKQLYLKSLINKIYIDGEQVTIEWL

SEQ ID NO: 6419 - protein, 469 aa, synthetic construct
MSYTTPVRAAVYLRISEDRSGEQLGVARQREDCLKLCGQRKWAPVEYLDNDVSASTGKRRPAYEQMLADITAGKIAAVVAWDLDRLHRRPMELEAFMSLADEKRLALATVAGDVDLATPQGRLVARLKGSVAAHETEHKKARQRRAARQKAERGLPNWSRAFGYLPGPNGPEPDPRTAPLVKQAYADILAGASLGDVCRQWNDAGVLTITGRPWTATTLSKFLRKPRNAGLRAYKGARYGPVDRDAIVGKAQWSPLVDEATFWAAQAVLDAPGRAPGRKSVRRHLLTGLAGCGKCGNHLAGSYRTDGKVVYVCKACHGVAILADNIEPILYHIVAERLAMPDAVDLLRREIHDAAEAETIRLELETLYGELDRLAVERAEGLLTARQVRISTDIVNAKITKLQARQLDQERLRVLDGIPLGTPQVAGMIAELSPDRFRAVLDVLVEVVVQPVGKSGRIFNPERVQVNWR

SEQ ID NO: 6420 - protein, 452 aa, synthetic construct
MKAAIYIRVSTQEQVENYSIQAQTEKLTALCRSKDWDVYDIFVDGGYSGSNMNRPALNEMLSKLHEIDAVVVYRLDRLSRSQRDTTTLIEEYFLKNNVEFVSLSETLDTSSPFGRAMIGILSVFAQLERETIRDRMVMGKIKRIEAGLPLTTAKGRTFGYDVIDTKLYINEEEAKQLQLIYDIFEEEQSITSLQKRLKKLGFKVRTYNRYNSWLTNDLYCGYVSYKDKVHVKGIHEPIISEEQFYRVQEIFARMGKNPNMNRDNASLLSNLVVCSKCGLGFVHRSKDTMSRGKKYHYRYYSCKTYKHTHELEKCGNKTWRADKLEELIINRVNNCSFASRNADKEDELDSLSEKLKIEHAKKKRLFDLYINGSYEVSELDSMMNDIDAQINYYESQIEANEELKKNKKIRENPADLATVDFDSLEFREKQLYLKSLISKIYIDGEQVTIEWL

SEQ ID NO: 6421 - protein, 485 aa, synthetic construct
MTKKVAIYTRVSTTNQAEEGFSIDEQIDRLTKYAEAMGWQVSDTYTDAGFSGAKLGRPAMQRLINDIENKAFDTVLVYKLDRLSRSVRDTLHLVKDVFTKNKIDFISLNESIDTSSAMGSLFLTILSAINEFERENIKERMTMGKLGRAKSGKSMMWTKTAFGYYHNRKTGILEIVPLQATIVEQIFTDYLSGISLTKLRDKLNESGHIGKDIPWSYRTLRQTLDNPVYCGYIKFKDSLFEGMHKPIIPYETYLKVQKELEERQQQTYERNNNPRPFQAKYMLSGMARCGYCGAPLRIVLGHKRKDGSRSMKYHCANRFPRKTKGVTVYNDNKKCDSGTYDLSNLENTVIDNLTGFQEDNDSLLKIINGNNQPIQDTSSFKKQISQIDKKIQKNSDLYLNDFITMDELKDRTDSLQAEKKLLRAKISENKFNDSSDVFELVKTQLGSIPINELSYDDKKKIVNNLVSKVDVTADNVDITFKFQLA

SEQ ID NO: 6422 - protein, 452 aa, synthetic construct
MKAAIYIRVSTREQVENYSIQAQTEKLTALCRSKDWDVYDIFIDGGYSGSNMNRPALNKMLSKLHEIDAVVVYRLDRLSRSQRDTITLIEEYFLKNNVEFVSLSETLDTSSPFGRAMIGILSVFAQLERETIRDRMVMGKIKRVEAGLPLTTAKGRTFGYDVIDTKLYINEEEAKQLQLIYDIFEEEQSITFLQKRLKKLGFKVRTYSCYNNWLTNDLYCGYVSYKDKVHVKGIHEPIISEEQFYRVQEIFTRMGKNPNMNRDSASLLNNLVVCGKCGLGFVHRRKDTMGRGKKYHYRYYSCKTYKHTHELEKCGNKIWRADKLEDLIINRVNNYSFASRNADKEDELDILNEKLRIEHAKKKRLFDLYINGSYEVSELDSMMNDIDAQINYYESQIEANEELKKNKKIQENLANLATVDFDSLEFREKQLYLKSLINKIYIDGEQVTIEWL

SEQ ID NO: 6423 - protein, 452 aa, synthetic construct
MKAAIYIRVSTQEQVGNYSIQAQTEKLTALCRSKDWDVYDIFIDGGYSGSNMNRPALNEMLSKLHEIDAVVVYRLDRLSRSQRDTTTLIEEYFLKNNVEFVSLSETLDTSSPFGRAMIGILSVFAQLERETIRDRMVMGKIKRIEAGLPLTTAKGRTFGYDVIDTKLYINEEEAKQLQLIYDIFEEEQSITFLQKRLKKLGFKVRTYNRYNSWLTNDLYCGYVSYKDKVHVKGIHEPIISEEQFYRVQEIFTRMGKNPNMNRDSASLLNNLVVCSKCGLSFVHRSKDTMCRGKKYHYRYYSCRTYKHTHELEKCGNKTWRADKLEELIINSVNNYSFASRDVDKEDELDSLNEKLKIEHAKRKRLFDLYINGSYEVSELDSMMSDIDAQINYYESRIEANEELKRNKKIQENLAGLAAVDFASLEFREKQLYLKSLINKIYIDGEQVTIEWL

SEQ ID NO: 6424 - protein, 452 aa, synthetic construct
MKAAIYIRVSTREQVENYSIQAQTEKLTALCRSKDWDVYDIFIDGGYSGSNMNRPALNEMLSKLHEIDAVVVYRLDRLSRSQRDTITLIEEYFLKNNVEFVSLSETLDTSSPFGRAMIGILSVFAQLERETIRDRMVMGKIKRIEAGLPLTTAKGRTFGYDVIDTKLYINEEEAKQLQLIYDIFEEEQSITFLQKRLKKLGFKVRSYNRYNNWLTNDLYCGYVSYKDKVHVKGIHEPIISEEQFYRVQEIFTRTGKNPNMNRDSASLLNNLVVCSKCGLGFVHRRKDTMSRGKKYQYRYYSCKTYKHTHELEKCGNKIWRADKLEELIINRVNNYSFASRNVDKEDELDSLNEKLKIEHAKKKRLFNLYINGSYEVSELDSMMNDIDAQINYYESQIETNEELKKSKKIQESLANLATVDYDSLEFREKQLYLKSLINKIYIDGEQVTIEWL

SEQ ID NO: 6425 - protein, 485 aa, synthetic construct
MTKKVAIYTRVSTTNQAEEGFSIDEQIDRLTKYAEAMGWQVSDTYTDAGFSGAKLERPAMQRLINDIENKAFDTVLVYKLDRLSRSVRDTLYLVKDVFTKNKIDFISLNESINTSSAMGSLFLTILSAINEFERENIKERMTMGKLGRAKSGKSMMWTKTAFGYYHNRKTGILEIVPLQATIVEQIFTDYLSGISLTKLRDKLNESGHIGKDIPWSYRTLRQTLDNPVYCGYIKFKDSLFEGMHKPIIPYETYLKVQKELEERQQQTYERNNNPRPFQAKYMLSGMARCGYCGAPLRIVLGHKRKDGSRTMKYHCANRFPRRTKGVTVYNDNKKCDSGTYDLSDLENTVIDILVGFQENNASLLKIINGNNQPILDTSSFKKQISQIDKKIQKNSDLYLNDFITMDELKDRIDSLQAEKKLLKAKISENKFNDSTDVFELVKTQLGSIPINELSYDNKKKIVNNLVSKVDVTADNVDIIFKFQQA

SEQ ID NO: 6426 - protein, 452 aa, synthetic construct
MKAAIYIRVSTREQVENYSIQAQTEKLTALCRSKDWDVYDIFIDGGYSGSNMNRPALNEMLSKLHEIDAVVVYRLDRLSRSQRDTITLIEEYFLKNNVEFVSLSETLDTSSPFGRAMIGILSVFAQLERETIRDRMVMGKIKRIEAGLPLTTAKGRTFGYDVIDTKLYTNEEEAKQLQLIYDIFEEEQSITLLQKRLKKLGFKVRTYSRYSNWLTNDLYCGYVSYKDKVHVKGIHEPIISEEQFQRVQEIFARMGKNPNMNRDSASLLSNLVVCSKCGLGFVHRRKDTTSRGKKYHYRYYSCKTYKHTHELEKCGNKIWRADKLEELIINRVNNYSFTSRNVDKEDELDSLNEKLKIEHAKKKRLFDLYINGSCEGSELDSMINDIDAQINYYESQIEANEELKRNKKIQENLANLATVDYDSLEFREKQLYLKSLINKIYIDGEQVTIEWL

SEQ ID NO: 6427 - protein, 469 aa, synthetic construct
MSYTTPVRAAVYLRISEDRSGEQLGVARQREDCLKLCGQRKWVPVEYLDNDVSASTGKRRPAYEQMLADITAGKIAAVVAWDLDRLHRRPIELEAFMSLADEKRLALATVAGDVDLATPQGRLVARLKGCVAAHETEHKKARQRRAARQKAERGLPNWSKAFGYLPGPNGPEPDPRTAPLVKRAYADILAGASLGDVCRQWNDAGAFTITGRPWTTTTLSKFLRKPRNAGLRAYKGARYGPVDRDAIVGKAQWSPLVDEATFWAAQAVLDAPGRAPGRKSVRRHLLTGLAGCGKCGNHLAGSYRTDGRVVYVCRACHGVAILAENIEPILYHTVAERLAMPDAVDLLRRETHDAAEAETIRLELEALYGELDRLAVERAEGLLTARQVKISTVIVNAKITKLQACQLDQERLRVFDGIPLGTPQVAGMIAGLSPDRFRAVLDVLAEVVVRPVGKRGRIFNPERVQVNWR

SEQ ID NO: 6428 - protein, 452 aa, synthetic construct
MKAAIYIRVSTREQVENYSIQAQTEKLTALCRSKGWDVYDIFIDGGYSGSNMNRPALNEMLSKLHEIDAVVVYRLDRLSRSQRDTITLIEEYFLKNNVEFVSLSETLDTSSPFGRAMIGILSVFAQLERETIRDRMVMGKIKRIEAGLPLTTAKGRTFGYDVIDTKLYINEEEAKQLRLIYDIFEEEQSITFLQKRLKKLGFKVRTYNRYNNWLTNDLYCGYVSYKDKVHVKGIHEPIISEEQFYRVQEIFTRMGKNPNMNRDSASLLNNLVVCSKCGLGFVHRRKDAMSRDKKYHYRYYSCKTYKHIHELEKCGNKIWRADRLEELIINRVINYSIASRNADKEDELDSLNEKLKIEHAKKRRLFELYINGSYEMSELDSMMNDIDAQINYYESQIEANKELKKNKRIQENLADLATVDFDSLEFREKQLYLKSLVNKIYIDGEQVTIEWL

SEQ ID NO: 6429 - protein, 485 aa, synthetic construct
MTKKVAIYTRVSTTNQAEEGFSIDEQIDRLAKYAEAMGWQVSDTYTDAGFSGAKLERPAMQRLINDIENKAFDTVLVYKLDRLSRSVRDTLYLVKEVFTKNKIDFISLNESIDTSSAMGSLFLTILSAINEFERENIKERMTMGKLGRAKSGKSMMWTKTAFGYYHNRKTGILEIVPLQATIVEQIFTDYLSGISLTKLRDKLNESGHIGKDIPWSYRTLRQTLDNPVYCGYIKFKDSLFEGMHKPIIPYETYLKVQKELEERQQQAYERNNNPRPFQAKYMLSGMARCGYCGAPLRIVLGHKRKDGSRTMKYRCANRFPRKTKGVTVYNDNKKCDSGTYDLSNLENTVIDILVGFQENNDSLLKIINGNNQPILDTSSLKKQISQIDKKIQKISDLYLNDFITMDELKDRTDSLRAEKKLLEAKISEDKFNDSTDVFELVKTQLGSIPINELGYDNKKKIVNNLVSKVDVTADDVDIIFKFQLA

SEQ ID NO: 6430 - protein, 452 aa, synthetic construct
MKAAIYIRVSTREQVENYSIQAQIEKLTALCRSKDWDVYDIFIDGGYSGSNMNRPALNEMLSKLHEIDAVVVYRLDRLSRSQRDTITLIEEYFLKNNVEFVSLSETLDTSSPFGRAMIGILSVFAQLERETIRDRMVMGKIKRVEAGLPLTTAKGRTFGYDVIDTKLYINEEEAKQLQLIYDIFEEEQSITFLQKRLKKLGFKVRTYNCYNNWLTNDLYCGYVSYKDKVHVKGIHEPIISEEQFYRVQEIFTRMGKNPNMNRDSASLLNNLVVCGKCGLGFVHRRKDAMSRDKKYHYRYYSCKTYKHIHELEKCGNKIWRADKLEELIVNRVNNYSFASRNADKEDELDSLNEKLKIEHTKKKRLFDLYINGSFEVSELDSMMNDIDAQISYYESQIEASEELRKNKRIQENLAHLATVDFDSLEFREKQLYLKSLINKIYIDGEQVTIEWL

SEQ ID NO: 6431 - protein, 452 aa, synthetic construct
MKAAIYIRVSTQEQVENYSIQAQTEKLTALCRSKDWDVYDIFVDGGYSGSHMNRPALNEMLSKLHEIDAVVVYRLDRLSRSQRDTTTLIEEYFLKNNVEFVSLSETLDTSSPFGRAMIGILSVFAQLERETIRDRMVMGKIKRIEAGLPLTTAKGRTFGYDVIDTKLYINEEEAKQLQLIYDIFEEEQSITSLQKRLKKLGFKVRTYNRYNNWLTNDLYCGYVSYKDKVHVKGIHEPIISEEQFYRVQEIFTRMGKNPNMNRDSASLLNNLVVCSKCGLGFVHRSKDTMCRGKKYHYRYYSCKTYKHTHELEKCGNKTWRADKLEELIISRVNNYSFASRSVDKEDEPDSLNEKLKIEHAKRKRLFDLYINGSYEASELDSMMNDIDTQINYYESQIEANEELKKNKKIQEDLADLATVDFDSLEFREKQLYLKSLINKIYIDGDQVTIEWL

SEQ ID NO: 6432 - protein, 485 aa, synthetic construct
MTKKVAIYTRVSTTNQAEEGFSIDEQIDRLAKYAEAMGWQVSDTYTDAGFSGAELERPAMQRLINDIETKAFDTVLVYKLDRLSRSVRDTLYLVKDVFTKNKIDFVSLSESIDTSSAMGSLFLTILSAINEFERENIKERMTMGKLGRAKSGKSMMWTKTAFGYYHNRKTGILEIAPLQATIVEQIFTDYLSGISLTRLRDKLNESGHIGKDIPWSYRTLRQTLDNPVYCGYIKFKDSLFEGMHKPIIPYETYLKVQKELEERQQQAYERNNNPRPFQAKYMLSGMARCGYCGAPLRIVLGHKRKDGSRTMKYHCANRFPRKTKGVTVYNDNKKCDSGTYGLSNLENAVIDHLIGFQENNDSLLKIINGNNQPILDTSSLKKQISQIDKKIQKNSDLYLNDFITMDELKDRTDSLQAEKKLLKARISENKFNDSTDVFELVKTQLGSIPINELSYDNKKKIVNNLVSKVDVTADNVDIIFKFQLA

SEQ ID NO: 6433 - protein, 452 aa, synthetic construct
MKAAIYIRVSTREQVENYSIQAQTEKLTALCRSKDWDVYDIFVDGGYSGSNMNRPALNEMLSKLHEIDAVVVYRLDRLSRSQRDTITLIEEYFLKNNVEFVSLSETLDTSSPFGRAMIGILSVFAQLERETIRDRMVMGKIKRIEAGLPLTTAKGRTFGYDVIDAKLYINEEEAKQLQLIYDIFEEEQSITSLQKRLKKLGFKVRTYNRYNDWLTNDLYCGYVSYKDRVHVKGIHEPIISEEQFYRVQEIFTRMGKNPNMNRDSASLLNNLVVCGKCGLGFVHRRKDTMSRGRKYHYRYYSCKTYKHTHELEKCGNKIWRADKLEELIINRVNNYSIASRNMDKEDELDSLNEKLKIEHAKKKRLFDLYINGSYEVSELDSMMNDIDAQISYFESQIVAYEELKKDKKIQENLADLATVDFSSLEFREKQLYLKSLINKIYIDGEQVTIEWL

SEQ ID NO: 6434 - protein, 485 aa, synthetic construct
MTRKVAIYTRVSTTNQAEEGFSIDEQIDRLTKYAEAMGWQVSDTYTDAGFSGAKLERPAMQRLINDIENKAFDTVLVYKLDRLSRSVRDTLHLVKDVFTKNKIDFISLNESIDTSSAMGSLFLTILSAINEFERENIKERMTMGKLGRAKSGKSMMWTKTAFGYYHNRKTGILEIVPLQAAIVEQIFTDYLSGISLTKLRDKLNESGHIGKDIPWSYRTLRQTLDNPVYCGYIKFKDSLFEGMHKPIIPYETYLKVQKELEERQQQTYERNNNPRPFQAKYMLSGMARCGYCGAPLRIVLGHKRKDGSRTMKYHCANRFPRKTKGVTVYNDNKKCDSGTYDLNNLETTVIDNLIGLQENNDSLLKIINGNNQPFLDTSSFKKQISQIDKKIQKNSDLYLNDFITMDELKDRTGSLQAEKKLLKAKISESKFNDSTDVFELVKTQLGSIPINELSYDNKKKIVNNLVSKVDVTADNVDIIFKFQLA

SEQ ID NO: 6435 - protein, 452 aa, synthetic construct
MKAAIYIRVSTREQVENYSIQAQTEKLTALCRSKDWDVYDIFIDGGYSGSNMNRPALNEMLSKLHEIDAVVVYRLDRLSRSQRDTITLIEEYFLKNNVEFVSLSETLDTSSPFGRAMIGILSVFAQLERETIRDRMVMGKIKRIEAGLPLTTAKGRTFGYDVIDTKLYINEEEAKQLQLIYDIFEEEQSITFLQKRLKKLGFKVRTYNRYNNWLTNDLYCGYVSYKDKVHVRGIHEPIISEEQFYRVQEIFTRMGKNPNMNRDSASLLNNLVVCSKCGLGFVHRRKDAMSRDKKYHYRYYSCKTYKHIHELDKCGNKIWRADKLEELIINRVNNYSLASRNVDKEDELDSLNEKLKIEHAKKKRLFDLYINGSYEMSELDSMMNDIDAQINYYESQIGANEELRKNKKIQENLANLATVDFDSLEFREKQLYLKSLINKIYIDGEQVTIEWL

SEQ ID NO: 6436 - protein, 485 aa, synthetic construct
MTRKVAIYTRVSTTNQAEEGFSIDEQIDRLTKYAEAMGWQVSDTYTDAGLSGAKLERPAMQRLINDIENKAFDTVLVYKLDRLSRSVRDTLYLVKDVFTKNKIDFISLNESIDTSSAMGSLFLTILSAINEFERENIKERMTMGKLGRARSGKSMMWTKTAFGYYHNRKTGILEIVPLQAAIVEQIFTDYLSGISLTKLRDKLNESGHIGKDIPWSYRTLRQTLDNPVYCGYIKFKDSLFEGMHKPIIPYETYLKVQKELEERQQQTYERNNNPRPFQAKYMLSGMARCGYCGAPLRIALGRKRKDGSRTMKYHCANRFPRKTKGVTVYNDNKKCDSGTYDLSNLENAVIDNLIGFQENNDSLLKIINGNNQPIQDTSSFKKQISQIDKKIQKNSDLYLNDFITMDELKDRTDSLLAEKKLLKAKISENKFSDSTDVFELVKTQLGSIPINELSYDNKKKIVNNLVSKVDVTADNVDIIFKFQLA

SEQ ID NO: 6437 - protein, 452 aa, synthetic construct
MKAAIYIRVSTQEQVENYSIQAQTEKLTALCRSKDWDVYDIFIDGGYSGSNMNRPALNEMLSKLHEIDAVVVYRLDRLSRSQRDTTTLIEEYFLKNNVEFVSLSETLDTSSPFGRAMIGILSVFAQLERETIRDRMVMGKIKRIEAGLPLTTAKGRTFGYDVIDTKLYINEEEAKQLQLIYDIFEEEQSITSLQKRLKKLGFKVRAYNRYNNWLTNDLYCGYVSYKDKVRVKGIHEPIISEEQFYRVQEIFTRMGKNPNINRDSASLLNNLVVCSKCGLGFVHRSKDTMSRGKKYHYRYYSCKTYKHTHELEKCGNKTWRADKLEELIISRVNNYSFASRSVDKEDELDSLNEKLKIEHAKKKRLFDLYINGSYEVSELDSMMNDIDAQINYYESQIEANEELKENKKIQENLAELATVDFDSLEFREKQLYLKSLINKIYIDGEQVTIEWL

SEQ ID NO: 6438 - protein, 485 aa, synthetic construct
MTKKVAIYTRVSTTNQAEEGFSIDEQIDRLTKYAEAMGWQVSDAYTDAGFSGAKLERPAMQRLINDIENKAFDTVLVYKLDRLSRSVRDTLYLVKDVFTKNKIVFISLNESIDTSSAMGSLFLTILSAINEFERENIKERMTMGKLGRAKSGKSMMWTKTAFGYYHNRKTGILEIVPLQAAIVEQIFTDYLSGISLTKLRDKLNESGHTGKDIPWSYRTLRQTLGNPVYCGYIKFKDSLFEGMHKPIIPYETYLKVQKELEKRQQQAYGRNNNPRPFQTKYMLSGMARCGYCGAPLKIVLGHKRKDGSRTMKYHCANRFPRKTKGVTVYNDNKKCDSGTYDLSNLENTVIDYLTSLQENNDSLLKIINGNNQPILDTSSFKKQISQIDKKIQKNSDLYLNDFITMDELKDRTDSLQAEKKLLKAKISENKFNDSTDVFELVKTQLGSIPINELSYDNKKRIVNNLVSKVDVTADNVDIIFKFQLA

SEQ ID NO: 6439 - protein, 452 aa, synthetic construct
MKAAIYIRVSTREQVENYSIQAQTEKLTALCRSKGWDVYDIFIDGGYSGSNMNRPALNEMLSKLHEIDAVVVYRLDRLSRSQRDTITLIEEYFLKNNVEFVSLSETLDTSSPFGRAMIGILSVFAQLERETIRDRMVMGKIKRIEAGLPLTTAKGRTFGYDVIDTKLYINEEEAKQLRLIYDIFEEEQSITVLQKRLKKLGFKVRTYSCYNNWLTNDLYCGYVSYKDKVHVKGIHEPIISEEQFYRVQEIFTRMGKNPNMNRDSASLLNNLVVCSKCGLGFVHRRKDTTSRGRKYHYRYYSCKTYKHTHELEKCGNKIWRADKLEELIINRVNNYSVASRNVDKEDELDSLNEKLKVEHAKKKRLFDLYVNGSYEVSELDSIMNGIDAQINYYESQIEANEELRKNKKIQENLADLATVDYDSLEFREKQLYLKSLINKIYIDGEQVTIEWL

SEQ ID NO: 6440 - protein, 452 aa, synthetic construct
MKAAIYIRVSTREQVENYSIQAQTEKLTALCRSKDWDVYDIFIDGGYSGSNMNRPALNEMLSKLHEIDAVVVYRLDRLSRSQRDTITLIEEYFLKNNVEFVSLSETLDTSSPFGRAMIGILSVFAQLERETIRDRMVMGKIKRIEAGLPLTTAKGRTFGYDVIDTKLYINEEEAKQLQLIYDIFEEEQSITFLQKRLKKLGLKVRTYNRYNNWLTNDLYCGYVSYKDKVHVKGIHEPIISEEQFYRVQEIFTRMGKNPNMNRDSASLLNNLVVCGKCGLGFVHRRKDAMSRDKKYHYRYYSCKTYKHIHELEKCGNKIWRADKLEELVINRVNSYSLASRNVDKEDELDSLNEKLRTEHAKKKRLFDLYINGSYEVSELDSMMNDIDARISYYESQIEANEELKKNKKIQENLAHLATVDFDSLEFREKQLYLKSLINKIYIDGEQVTIEWL

SEQ ID NO: 6441 - protein, 452 aa, synthetic construct
MKAAIYIRVSTREQVENYSIQAQTEKLTALCRSKDWDVYDIFVDGGYSGSNMNRPALNEMLSRLHEIDAVVVYRLDRLSRSQRDTITLIEEYFLKNDVEFVSLSETLDTSSPFGRAMIGILSVFAQLERETIRDRMVMGKIKRIEAGLPLVTAKGRTFGYDVIDTKLYINEEEAKQLQLIYDIFEEEQSITFLQKRLKKLGFKVHTYNRYNNWLTNDLYCGYVSYKDKVHVKGIHEPIISEEQFYRVQEIFTRMGKNPNMNRDSASLLSNLVVCSKCGLGFVHRRKDAMSRDKKYHYRYYSCKTYKHIHELEKCGNKIWRADELEELVINRVNSYSVASRNVDKEDELGSLNEKLKIEHAKKKRLFDLYINGSYEVSELDSMMNDIDAQINHYESQIEANEELKKNKKIQENLAYLATVDFDSLEFREKQLYLKSLINKIYIDGEQVTIEWL

SEQ ID NO: 6442 - protein, 452 aa, synthetic construct
MKAAIYIRVSTREQVENYSIQAQTEKLTALCRSKDWDVYDIFIDGGYSGSNMNRPALNEMLSKLHEIDAVVVYRLDRLSRSQRDTITLIEEYFLKNNVEFVSLSETLDTSSPFGRAMIGILSVFAQLERETIRDRMVMGKIKRIEAGLPLTTAKGRTFGYDVIDTKLYINEEEAKQLRLIYDIFEEEQSITFLQKRLKKLGFKVRTYNRYNNWLTNDLYCGYVSYKDKVHVKGIHEPIISEEQFYRVQEIFTRMGKNPNMNRDSASLLNNLVVCSKCGLGFVHRRKDAMSRDKKYHYRYYSCKTYKHIHELEKCGNKIWRADKLEELIINRVNSYSLAGRNVGKEDELDSLNEKLKIEHAKKKRLFDLYINGSYEVSELDSMMNDIDARINCYESQIEANEELKKNRKIQENLAYLATVDFDSLEFREKQLYLKSLINKIYIDGEQVTIEWL

SEQ ID NO: 6443 - protein, 452 aa, synthetic construct
MKAAIYIRVSTREQVENYSIQAQTEKLTALCRSKDWDVYDIFIDGGYSGSNMNRPALNEMLNKLHEIDAVVVYRLDRLSRSQRDTITLIEEYFLKNNVEFVSLSETLDTSSPFGRAMIGILSVFAQLERETIRDRMVMGKIKRIEAGLPLTTAKGRTFGYDVIDTKLYINEEEAKQLQLIYDIFEEEQSITSLQKRLKKLGFKVHTYNRYNNWLTNDLYCGYVSYKDKVHVKGIHEPIISEEQFYRVQEIFTRMGKSPNMNRDSASLLNNLVVCSKCGLGFVHRRKDAMSRDKKYHYRYYSCKTYKHIHELEKCGNKIWRADELEELIISRVSNYSFASRNADKEDELDSLNERLKTEHAKKRRLFDLYINGGYEVSELDSMMNDIDAQINYYESQIEANEELKKNKKIQENLAYLATVDFDSLEFREKQLYLKSLINKIYIDGEQVTIEWL

SEQ ID NO: 6444 - protein, 452 aa, synthetic construct
MKAAIYIRVSTREQVENYSIQAQTEKLTALCRSKDWDVYDIFIDGGYSGSNMNRPALNEMLNKLHEIDAVVVYRLDRLSRSQRDTITLIEEYFLKNNVEFVSLSETLDTSSPFGRAMIGILSVFAQLERETIRDRMVMGKIKRIEAGLPLTTAKGRTFGYDVIDTRLYINEEEAKQLQLIYDIFEEEQSITSLQKRLKKLGFKVHTYNRYNNWLTNDLYCGYVSYKDKVRVKGIHEPIISEEQFYRVQEIFARMGKNPNMNRDSASLLNNLVVCSRCGLGFVHRRKDIMSRGKKYHYRYYSCKTYKHIHELEKCGNKIWRADKLEELIINRVNNYSLASRNVDKEDELDSLNEKLKIEHAKKKRLFDLYINGSYEVSELDSMMNDIDAQINYYESQIEANEGQKKNKKVQENLAYLATVDYDCLEFREKQLYLKSLINKIYIDGEQVTIEWL

SEQ ID NO: 6445 - protein, 452 aa, synthetic construct
MKAAIYIRVSTREQVENYSIQAQTEKLAALCRSKDWDVYDIFIDGGYSGSNMNRPALNEMLSKLHEIDAVVVYRLDRLSRSQRDTITLIEEYFLKNNVEFVSLSETLDTSSPFGRAMIGILSVFAQLERETIRDRMVMGKIKRIEAGLPLTTAKGRTFGYDVIDTKLYINEEEAKQLQLIYDIFEEEQSITFLQKRLKKLGFKVRTYSRYNSWLTNDLYCGYVSYKDKVRVKGIHEPIISEEQFYRVQEIFTRMGKNPNMNRDSASLLNNLVVCSKCGLGFVHRRKDTKSRGKKYHYRYYSCKTYKHTHELEKCGNKIWRADKLEELIISRVNNYSFASRNVDKTEELDSLNEKLKVEHAKKKRLFDLYINGSYNVSELDSMMNDIDAQINYYESQIEASEELKKSKKVQENLANLATVDYDSLEFREKQLYLKSLINKIYIDGEQVTIEWL

SEQ ID NO: 6446 - protein, 485 aa, synthetic construct
MTKKVAIYTRVSTTNQAEEGFSIDEQIDRLTKYAEAMGWQVSDTYTDAGFSGAKLERPAMQRLLNDIENKAFDTVLVYKLDRLSRSVRDTLYLVKDVFTKNKIDFISLNESINTSSAMGSLFLTILSAINEFERENIKERMTMGKLGRAKSGKSMMWTKTAFGYYHNRKTGILEIVPLQATIVEQIFTDYLSGISLTKLRDKLNESGHIGKDIPWSYRTLRQTLDNPVYCGYIKFKDSLFEGMHKPIIPYETYLRVQKELEERQRQTYERNNNPRPFQAKYMLSGMARCGYCGAPLRIVLGHKRKDGSRTMKYHCANRFPHKTKGVTVYNDNKKCDSGTYDLSSLENTVIDNLIGFQENNDSLLKIINGNNQPILDTSSFKKQISQIDKKIQKNSDLYLNDFITMDELRDRTNSLQAEKKLLEAKISENKFNDSIDVFELVKTQLGSIPINELSYDSKKKIVNNLVSKVDVTADSVDIIFKFQLA

SEQ ID NO: 6447 - protein, 452 aa, synthetic construct
MKAAIYIRVSTQEQVGNYSIQAQTEKLTALCRSKDWDVYDIFIDGGYSGSNMNRPALNEMLSKLHEIDAVVVYRLDRLSRSQRDTTTLIEEYFLKNNVEFVSLSETLDTSSPFGRAMIGILSVFAQLERETIRDRMVMGKIKRIEAGLPLTTAKGRTFGYDVIDTKLYINEEEAKQLRLIYDIFEEEQSITSLQKRLKKLGFKVRTYNRYSKWLTNDLYCGYVSYKDKVHVKGIHEPIISEEQFYRVQEIFTRMGKNPNMNRDSASLLNSLVVCSKCGLSFVHRSKDTMSRGKKYHYRYYSCKTYKHTHELEKCGNKTWRADKLEELIIDRVNNYSFASRNVDKEDELNSLNEKLKIEHAKKKRLFDLYINGSYEVSELDSMMNDIDAQINYYESRIEANEELKKNKKIQENLADLATVDFDSLEFREKQLYLRSLINKIYIDGEQVTIEWL

SEQ ID NO: 6448 - protein, 452 aa, synthetic construct
MKAAIYIRVSTQEQVGNYSIQAQTEKLTALCRSKDWDVYDIFVDGGYSGSNMNRPALNEMLSKLHVIDAVVVYRLDRLSRSQRDTTTLIEEYFLKNNVEFVSLSETLDTSSPFGRAMIGILSVFAQLERETIRDRMVMGKIKRIEAGLPLTTAKGRTFGYDVIDTKLYINEEEAKQLRLIYDIFEEEQSITSLQKRLKKLGFKVRTYNRYNNWLTNDLYCGYVSYKDKVHVKGIHEPIISEEQFYRVQEIFTRMGKNPNVNRDSASLLNSLVVCSKCGLSFVHRSKDTVSRGKKYHYRYYSCKTYKHTHELEKCGNKIWRADKLEELIINRVNNYSFASRNVDKEDELDSLSEKLKIEHAKKRRLFDLYINGSYEVSELDSMMNDIDAQINYYESQIEAIEGLKKNRKIQANLADLAAVDFDSLEFREKQLYLKSLINKIYIDGEQVTIEWL

SEQ ID NO: 6449 - protein, 452 aa, synthetic construct
MKAAIYIRVSTREQVENYSIQAQTEKLTALCRSKDWDVYDIFIDGGYSGSNMNRPALNEMLNKLHEIDAVVVYRLDRLSRSQRDTITLIEEYFLKNNVEFVSLSETLDTSSPFGRAMIGILSVFAQLERETIRDRMVMGKIKRIEAGLPLTTAKGRTFGYDVIDTKLYINEEEAKQLQLIYDIFEEEQSITFLQKRLKKLGFKVHTYNRYNNWLTNDLYCGYVSYKDKVHVKGVHEPIISEEQFYRVQEIFTRMGKNPNMNRDSASLLNNLVVCSKCGLGFVHRRKDATSRDKKYHYRYYSCKTYKHIHELEKCGNKIWRADKLEELIISRVNNYSLASRNVDKEDELDSLNERLKIEHAKKKRLFDLYINGRYEVSELDSMMNDIDAQINYYESQTEANEELKKNKKIQENLADLATVDFDSLGFREKQLYLKSLINKIYIDGEQVTIEWL

SEQ ID NO: 6450 - protein, 485 aa, synthetic construct
MTKKVAIYTRVSTTNQAEEGFSIDEQIDRLTKYADAMGWQVSDTYTDAGFSGAKLERPAMQRLINDIENKAFDTVLVYKLDRLSRSVRDTLYLVKDVFTKNKIDFISLNECIDTSSAMGSLFLTILSAINEFERENIKERMTMGKLGRARSGKSMMWTKTAFGYYHNRKTGILEIVPLQATIVEQIFTDYLSGISLTKLRDKLNESGHIGKDIPWSYRTLRQTLDNPVYCGYIKFKGSLFEGTHKPIIPYETYLKVQKELEERQQQAYERNNNPRPFQAKYMLSGMARCGYCGAPLRIVLGHKRKDGSRTMKYHCANRFPRKTKGVTVYNDNKKCDSGTYDLSNLENAVIDNLIGFQENSDSLLEIINGNNQPILDTSSFKKQISQIDKKIQKNSDLYLNDFITMDELKARTDSLQAEKKLLRAKISENKFNDSTGVFELVKTQLGSIPINELSYDNKKKIVNNLVSKVDVTADNVDIIFKFQLV

SEQ ID NO: 6451 - protein, 452 aa, synthetic construct
MKAAIYIRVSTREQVENYSIQAQTEKLTALCRSKDWDVYDIFVDGGYSGSNMNRPALNEMLSKLHEIDAVVVYRLDRLSRSQRDTITLIEEYFLKNNVEFVSLSETLDTSSPFGRAMIGVLSVFAQLERETIRDRMVMGKIKRIEAGLPLTTAKGRTFGYDVIDTKLYINEEEAKQLQLIYDIFEEEQSITFLQKRLKRLGFKVRTYNRYNSWLTNDLYCGYVSYKDKVHVKGIHEPIISEEQFYRVQEIFTRMGKSPNMNRGSASLLNNLVVCSKCGLGFVHRRKDTMSRGKKYHYRYYSCKTYKHTHELEKCGNKIWRADKLEELIINRVNNYSFASRDVDKEDELDSLDEKLKIEQAKRKRLFDLYINGSYNVSELDSMMNDIDAQINYYESQIEANGELRKNKKIQENLADLATVDFDSLEFREKQLYLKSLINKIYIDGEQVTIEWL

SEQ ID NO: 6452 - protein, 452 aa, synthetic construct
MKAAIYIRVSTREQVENYSIQAQTEKLTALCRSKDWDVYDIFIDGGYSGSNMNRPALNEMLSKLHEIDAVVVYRLDRLSRSQRDTITLIEEYFLKNNVEFVSLSETLDTSSPFGRAMIGILSVFAQLERETIRDRMVMGKIKRIEAGLPLTTAKGRTFGYDVIDTKLYINEEEAKQLRLIYDIFEEVQSITFLQKRLKKLGFKVRTYNRYNNWLTNDLYCGYVSYKDKVHVKGIHEPIISEEQFYRVQEIFTRMGKNPNMNRDSASLLNNLVVCGKCGLSFVHRRKDAMSRDKKYHYRYYSCKTYKHIHELEKCGNKIWRADKLEELIINRVNNFSLASRNVDKEDELDSLNEKLRIEHAKKKRLFDLYINGSYEVSELDSMMSDIDAQINYYESQIGANEGLKKDKKVQENLAELATVDFDSLEFREKQLYLKSLINKIYIDGEQVTIEWL

SEQ ID NO: 6453 - protein, 469 aa, synthetic construct
MSYTTPVRAAVYLRISEDRSGEQLGVARQREDCLKLCGQRKWVPVEYLDNDVSASTGKRRPAYEQMLADITAGKIAAVVAWDLDRLHRRPTELEAFMSLADEKCLALATVAGDVDLATPQGRLVARLKGCVAAHETEHKKARQRRAARQKAERGHPNWSKAFGYLPGPNGPEPDPRTAPLVKQAYADILAGASLGDVCRQWNDAGALTITGRPWTTTTLSKFLRKPRNAGLRAYKGARYGPVDRDAIVGKAQWSPLVDEVTFWAAQAVLDAPGRAPGRKSVRRHLLTGLAGCGKCGKHLAGSYRTDGRVVYVCKACHGVAILADHIEPILYHIVAERLAMPDAVDLLRREIHDAAEAETIRLELETLYGELDRLAVERAEGLLTARQVKISTDIVNAKITKLQARQLDQERLRVFDGIPLGTPRVAGMIAELSPDRFRAVLDVLAEVVVQPVGKSGRVFNPERVQVNWR

SEQ ID NO: 6454 - protein, 469 aa, synthetic construct
MSYTTPVRAAVYLRISEDRSGEQLGVARQREDCLELCDQRKWVPVEYLDNDVSASTGKRRPAYERMLADITAGKIAAVVAWDLDRLHRRPTELEAFMSLADEKRLALATVAGDVDLATPQGRLVARLKGSVAAHETEHKKARQRRAARQKAERGYPNWSKAFGYLPGPNGPEPDPRTAPLVKQAYADILAGASLGDVCRQWNDAGAFTITGRPWTTTTLSKFLRKPRNAGLRAYKGARYGPVDRDAIVGKARWSPLVDEATFWAAQAVLDAPGRAPGRKSVRRHLLTGLAGCGKCGNHLAGSYRTDGRVVYVCKACHGIAILADNIEPILYHIMAERLAMPDAVGLLRREIHDAAEAETIRLELEALYDELDRLAVERAEGLLTARQVKISTDVVNAKITKLQARQLDQERLRVFDGIPLGTPQVAGMIAELSPDRFRAVLDVLAEVVVQPVGKSGRIFNPERVQVNWR

SEQ ID NO: 6455 - protein, 485 aa, synthetic construct
MTKKVAIYTRVSTTNQAEEGFSIDEQIDRLTKYAEAMGWQVSDTYTDAGFSGAKLERPAMRRLINDIENKAFDAVLVYKLDRLSRSVRDTLHLVKDVFTKNKIDFVSLNESIDTSSAMGSLFLTILSAINEFERENIKERMTMGKLGRAKSGKSMMWSKTAFGYHHNRKTGILEIVPLQATIVEQIFTDYLSGISLTKLRDKLNESGHIGKDIPWSYRTLRQTLDNPVYCGYIKFKGSLFEGMHKPIIPYETYLKVQKELEERQQQTYERNNNPRPFQAKYMLSGMARCGYCGAPLKIVLGRKRKDGSRTMKYHCANRFPRKTKGVTVYNDNKKCDSGAYDLSNLENTVIDNLIGFQENNDSLLKIINGNNQPVLDTSSFKKQISQIDKKIQKNSDLYLNDFITMDELKDRTDSLQAEKKLLKAKISENRFNDCTDVFGLVKTQLGSIPINELSYDNKKKIVNNLVSKVDVTADNVDIIFKFQLA

SEQ ID NO: 6456 - protein, 485 aa, synthetic construct
MTKKVAIYTRVSTTNQAEEGFSIDEQIDRLTKYAEAMGWQVSDTYTDAGLSGAKLERPAMQRLINDIGNKAFDTVLVYKLDRLSRSVRDTLYLVKDVFTKNKIDFISLNESIDTSSAMGSLFLTILSAINEFERENIKERMTMGKLGRAKSGKCMMWTKTAFGYYHNRKTGILEIVPLQATIVEQIFTDYLSGISLTKLRDKLNESGHIGKDIPWSYRTLRQTLDNPVYCGYIKFKGSLFEGMHKPIIPYETYLKVQKELEERQQQTYERNNNPRPFQAKYMLSGVARCGYCGAPLRIVLGHKRKDGSRTMKYHCANRFPRKTKGVTVYNNNKKCDSGTYDLSNLENTVIDNLIGFQENSDSLLKIINGNNQPILDTSSFERQISQIDKKIQKNSDLYLNDFITMDELKDRTDSLQAEKELLKAKISENKFNDSTDVFELVKTQLGSTPINELSYDNKKKIVNNLVSKVDVTADNVDIIFKFQLA

SEQ ID NO: 6457 - protein, 485 aa, synthetic construct
MTKKVAIYTRVSTTNQAEEGFSIDEQIDRLTKYAEAMGWQVSDTYTDAGFSGAKLERPAMQRLINDIENKAFDTVLVYKLDRLSRSVRDTLYLVKDVFTKNKIDFISLNESINTSSAMGSLFLTILSAINEFERENIKERMTMGKLGRAKSGKSMMWTKTAFGYYHNRKTGILEIVPQQAAIVEQIFTDYLSGISLTKLRDKLNESGHIGKDIPWSYRTLRQTLDNPVYCGYIKFKDSLFEGMHKPIIPYETYLKVQKELEERQQQTCERNNNPRPFQAKYMLSGMARCGYCGAPLKIVLGHKRKDGSRTMKYHCANRFPRKTKGVTVYNDNKKCDSGTYDLSNLENTVINNLIGFQENNDSLLKIINGSNQPILDTSSFKKQISQIDKEIQKNSDLYLNDFITMDELKDRTDSLQAEKKLLKAKISENKCDDSTDVFELVKTQLGSIPINELSYDNKKKIVNNLVSKVDVTADNVDIIFKFQLA

SEQ ID NO: 6458 - protein, 452 aa, synthetic construct
MKAAIYIRVSTREQVENYSIQAQTEKLTALCRSKDWDVYDIFIDGGYSGGNMNRPALNEMLNKLHEIDAVVVYRLDRLSRSQRDTITLIEEYFLKNNVEFVSLSETLDTSSPFGRAMIGILSVFAQLERETIRDRMVMGKIKRIEAGLPLTTAKGRTFGYDVIDTKLYINEEEAKQLQLIYDVFEEEQSITLLQKRLKKLGFKVRSYSRYNNWLTNDLYCGYVSYKDKVHVKGIHEPIISEEQFYRVQEIFTRMGKNPNMNRASASLLNNLVVCSKCGLGFVHRRKDAMSRDKKYHYRYYSCKTYKHIHELEKCGNKIWRADKLEELVINRVSNYSLAGRDVDKEDELDSLNEKLKTEHAKKKRLFDLYINGSYEVSELDSMMNDIDAQINYYESQIEANEELKKNKKIQENLAHLATVDFDSLEFREKQRYLKSLINKIYIDGEQVTIEWL

SEQ ID NO: 6459 - protein, 485 aa, synthetic construct
MTKKVAIYTRVSTTNQAEEGFSIDEQIDRLTKYAEAMGWQVSDTYTDAGFSGAKLERPAMQRLINDIENKAFDTVLVYKLDRLSRSVRDTLYLVKDVFTKNKIDFISLSESIDTSSAMGSLFLTILSAINEFERENIKERMTMGKLGRAKSGKSMMWTKTAFGYYHNRKTGILEIVPLQATIVEQIFTDYLGGISLTKLRDKLNESGHIGKDIPWSYRTLRQTLDNPVYCGYIKFKDSLFEGMHKPIIPYETYLKVQKELEERQRQTYERNNNPRPFQAKYMLSGMARCGYCGAPLRIVLGHKRKDGSRTMKYHCANRFPRKTKGVTVYNDNKKCDSGTYDLSSLENTVIDSLIGFQENNDSLLKTINGNNQPILDTSSFKKQISQIDKKIQKNSDLYLNDFITMDELKDRTDSLQAEKKLLKAKISENRFNDSTDVFELVKTQLGSIPINELSYDNKKKIVNNLVSKVDVTADKVDIIFKFQLA

SEQ ID NO: 6460 - protein, 485 aa, synthetic construct
MAKKVAIYTRVSTTNQAEEGFSIDEQIDRLTKYAEAMGWRVSDTYTDAGSSGAKLERPAMQRLINDIENKAFDTVLVYKLDRLSRSVRDTLYLVKDVFTKNKIDFISLNESIDTSSAMGSLFLTILSAINEFERENIKERMTMGKLGRAKSGKSMMWTKTAFGYYHNRETGILEIVPLQAAIVEQIFADYLSGISLTKLRDKLNESGHIGKDIPWSYRTLRQTLDNPVYCGYIKFKDSLFEGMHEPIIPYETYLRVQKELEERQQQTYGRNNSPRPFQAKYMLSGMARCGYCGAPLRIVLGHKRKDGSRTMKYHCANRFPRKTKGVTVYNDNKKCDSGTYDLSNLENTVIDNLIGFQENNDSLLKIINGNSQPIPDTSSFKKQISQIDKKIQKNSDLYLNDFITMDELKDRTDSLQAEKKLLKAKISENKFNDSTDVFELVKTQLGSIPINELSYDNKKKIVNNLVSKVDVTADSVDIIFKFQLA

SEQ ID NO: 6461 - protein, 485 aa, synthetic construct
MTKKVAIYTRVSTTNQAEEGFSIDEQIDRLTKYAEAMGWQVSDTYTDAGFSGAKLERPAMQRLINDIESEAFDTVLVYKLDRLSRSVRDTLYLVKDVFTKNKIDFISLNESINTSSAMGSLFLTILSAINEFERENIKERMTMGKLGRAKSGKSMMWTKTAFGYYHNRKTGILEIVPQQATIVEQIFTDYLSGISLTKLRDKLNESGHIGKDIPWSYRTLRQTLDNPVYCGYTKFRGSLFEGMHKPIIPYETYLKVQKELEERQQRAYERNNNPRPFQAKYMLSGMARCGYCGAPLRIVLGLKRKDGSRTMKYHCANRFPRKTKGVTVYNDNKKCDSGTYDLSNLENTVIDNLIGFQENNDSLLKIINGNNQPILDTSSFKKQISQIDKKIQKISDLYLNDFITMDELKDRTDSLQTEKKLLKAKISEDKFNDSADVFELVKTQLGSIPINELSYDNKKRIVNNLVSKVDVTADNVDIIFKFQLA

SEQ ID NO: 6462 - protein, 452 aa, synthetic construct
MKAAIYIRVSTREQVENYSIQAQAEKLTALCRSKDWDVYDIFIDGGYSGSNMNRPALNEMLSKLHEIDAVVVYRLDRLSRSQRDTITLIEEYFLKNNVEFVSLSETLDTSSPFGRAMIGILSVFAQLERETIRDRMVMGKIKRIEAGLPLTTAKGRTFGYDVIDTKLYINEEEAKQLRLIYDIFEEEQSITLLQKRLKKLGFKVRTYSRYNSWLTNDLYCGYVSYKDKVHVKGIHEPIISEEQFYRVQEIFTRMGKNPNMNRDSASLLNNLVVCSKCGLGFVHRRKDTMSRGKKYHYRYYSCKTYKHIHELEKCGNKIWRADKLEELIINCVNNYSFASRNVDKEDELDSLNEKLKIEHAKKKRLFDLYISGSYEVSELDCMMNDIDAQINYYESQIEANEELKKYKKIQENLAYLATVDFDSLEFREKQLYLKSLINKIYIDGEQVTIEWL

SEQ ID NO: 6463 - protein, 485 aa, synthetic construct
MTKKVAIYTRVSTTNQAEEGFSIDEQIDRLTKYAEAMGWQVSDTYTDAGISGAKLERPAMQRLINDIENKAFDTVLVYKLDRLSRSVRDTLYLVKDVFAKNKIDFISLNESIDTSSAMGSLFLTILSAINEFERENIKERMTMGKLGRAKSGKSMMWTKTAFGYYHNRKTGILEIVPLQATIVEQIFTDYLSGISLTKLRDKLNESGHIGKDIPWSYRTLRQTLDNPVYCGYIKFKDSLFEGMHKPIIPYETYLKVQKELEERQQQTYERNNNPRPFQAKYMLSGMARCGYCGAPLRIVLGHKRKDGSRTMKYHCANRFPRKTKGVTVYNDNKKCDSGTYDLSDLENTVIDNLIGFQENNDSLLKIINGNSQPIPDTSSFKEQISQVDKKIQKNSDLYLNDFITMDELKDRTDSLQAEKKLLKAKTSENKFNDSTDVFELVKTQLGSIPINELSYDNKKKIVNNLVSKVDVTADSVDIIFKFQLA

SEQ ID NO: 6464 - protein, 452 aa, synthetic construct
MKAAIYIRVSTREQVENYSIQAQTEKLTALCRSKDWDVYDIFIDGGYSGSNMNRPALNEMLSKLHEIDAVVVYRLDRLSRSQRDTITLIEEYFLKNNVEFVSLSETLDTSSPFGRAMIGILSVFAQLERETIRDRMVMGKIKRIEAGLPLTTAKGRTFGYDVIDTKLYINEDEAKQLQLIYDIFEEERSITFLQKRLKKLGFKVRTYNRYNNWLTNDLYCGYVSYKDKVHVKGIHEPIISEEQFYRVQEIFTRMGKNPNMNRDSASLLNNLVVCSKCGLGFVHRRKDAMSRDKKYHYRYYSCKTYKHIHELEKCGNKIWRADKLEELIINRVNDYSIASRNADKEDELDSLSEKLKIEHAKKKRLFDLYINGSYKVSELDSMMNDIDAQISYYESQIEANEELKKNKKIQEDLADLATVDFDSLEFREKQLYLKSLINKIYIDGEQVTIEWL

SEQ ID NO: 6465 - protein, 469 aa, synthetic construct
MCYTTPVRAAVYLRISEDRSGEQLGVARQREDCLKLCDQRKWVPVEYLDNDVSASTGKRRPAYEQMLADITAGKIAAVVAWDLDRLHRRPIELEAFMSLADEKRLALATVAGDVDLATPQGRLVARLKGSVAAHETEHKKARQRRAARQKAERGHPNWSKAFGYLPGPNGPEPDPRTAPLVKQAYADILAGASLGDVCRRWNDAGAFTITGRLWTTTTLSKFLRKPRNAGLRAYKGARYGPVDRDAIVGKAQWSPLVDEATFWAAQAVLDAPGRAPGRKSVRRHLLTGLAGCGKCGNHLAGSYRTDGRVVYVCKACYGVAILADNIEPILYHIVAERLAMPDAVGLLRREIHDAGEAETIRLELETLYGELDRLAVERAEGLLTARQVKISTDIVNAKITKLQARQQDQERLRVFGGIPLGTPQVAGIIAELSPDRFRAVLDVLAEVVVQPVGKSGRIFNPERVQVNWR

SEQ ID NO: 6466 - protein, 452 aa, synthetic construct
MKAAIYIRVSTREQVENYSIQAQTEKLTALCRSKDWDVYDIFIDGGYSGSNMNRPALNEMLGKLHEIDAVVVYRLDRLSRSQRDTITLIEEYFLKNNVEFVSLSETLDTSSPFGRAMIGILSVFAQLERETIRDRMVMGKIKRVEAGLPLTTAKGRTFGYDVVDTKLYINEEEAKQLQLIYDIFEEEQSITSLQKRLKKLGFKVRTYNRYNNWLTNDLYCGYVSYKDKVHVKGIHEPIISEEQFYRVQEIFTRMGKNPNMNRDSASLLNNLVVCSKCGQGFVHRRKDTMSRGKRYHYRYYSCRTYKHIHELEKCGNKIWRADKLEELIINRVNNYSLASRNVDKEDELDGLNEKLKIEHAKKKRLFDLYINGSYEVSELDSMMNDIDAQINYYESQIEVNEELKRNKKIQENLANLATVDYDSLEFREKQLYLKGLINKIYIDGEQVTIEWL

SEQ ID NO: 6467 - protein, 452 aa, synthetic construct
MKAAIYIRVSTREQVENYSIQAQTEKLTALCRSKDWDVYDIFIDGGYSGSNMNRPALNEMLSKLHEIDAVVVYRLDRLSRSQRDTITLIEEYFLKNNVEFVSLSETLDTSSPFGRAMIGILSVFAQLERETIRDRMVMGKIKRIEAGLPLTTAKGRTFGYDVIDTKLYINEEEAKQLRLIYDIFEEEQSITFLQKRLKKLGFKVRTYNRYNNWLTNDLYCGYVSYKDKVHVKGIHEPIISEEQFYRVQEIFTRMGKNPNMNRDSASLLNNLVVCSKCGLGFVHRRKDTMSRGKRYHYRYYSCKTYKHIHELERCGNKIWRADKLEELIINRVNNYSFASRNVDKEDELDSLNEKLKIEHAKKKRLFDLYINGSFEVSELDSMMDDIDAQINYYESQIEASEELKKNKKFQENLANLATMDYDSLEFREKRLYLKSLINKIYIDGEQVTIEWL

SEQ ID NO: 6468 - protein, 452 aa, synthetic construct
MKAAIYIRVSTREQVENYSIQAQTEKLTALCRSKDWDVYDIFIDGGYSGSNMNRPALNEMLSKLHEIDAVVVYRLDRLSRSQRDTITLIEEYFLKNNVEFVSLSETLDTSSPFGRAMIGILSVFAQLERETIRDRMVMGKIKRIEAGLPLTTAKGRTFGYDVIDTKLYINEEEAKQLQLIYDIFEEEQSITFLQKRLKELGFKVRTYNRYNNWLTNDLYCGYVSYKDKVHVKGIHEPIISEEQFYRVQEIFARMGKNPNMNRDSASLLNNLVECSKCGLGFVHRRKDIMSHGKKYHYRYYSCKTYKHIHELEKCGNKIWRADELEELIINRVNNYSLASRNVDKEDELDSLSEKLKIEHAKKKRLFDLYVNGSYEVSELDSMMNDIDAQISYYESQIEANEELKKNKKIQESLAYLATVDFDSLEFREKQLYLKSLINKIYIDGEQVTIEWL

SEQ ID NO: 6469 - protein, 452 aa, synthetic construct
MKAAIYIRVSTREQVENYSIQAQTEKLTALCRSKDWDVYDVFIDGGYSGSNMNRPALNEMLSKLHEIDAVVVYRLDRLSRSQRDTITLIEEYFLKNNVEFVSLSETLDTSSPFGRAMIGILSVFAQLERETIRDRMVMGKIKRIEAGLPLTTAKGRTFGYDVIDTKLYINEEEAKQLQLIYDIFEEEQSITSLQKRLKELGFKVRTYNRYNNWLTNDLYCGYVSYKDKVHVKGIHEPIISEEQFYRVQEIFTRMGKNPNMNRGSASLLNNLVVCSKCGLGFVHRRKDAMSRDKKYHYRYYSCKTYKHIHELEKCGNKIWRADKLEELIIDRVNNYSFASRNVDKEDELDSLNEKLKIEHAKRRRLLDLYINGSYEVSELDSMMNDIDAQINYYERQIEANEELKRNKKIQENLADLATVDFDSLEFREKQLYLKSLINKIYIDGEQVTIEWL

SEQ ID NO: 6470 - protein, 452 aa, synthetic construct
MKAAIYIRVSTQEQVGNYSIQAQTEKLTALCRSKGWDVYDIFIDGGYSGSNMNRPALNEMLSKLHEIDAVVVYRLDRLSRSQRDTTTLIEEYFLKNNVEFVSLSETLDTSSPFGRAMIGILSVFAQLERETIRDRMVMGKIKRIEAGLPLTTAKGRTFGYDVIDTKLYINEEEAKQLQLIYDIFEEEQSITLLQKRLRKLGFKVRTYNRYNSWLTNDLYCGYVSYKDKVHVKGIHEPIISEEQFYRVQEIFTRMGKNPNMNRDSASLLSNLVVCSKCGLGFVHRSKDTMSRGKKYHYRYYSCKTYKHAHELEKCGNKTWRADKLEELIISRVNNYSFASRNVDKEDELDSLNEKLKIEHAKKKRLFDLYINGSYEVSELDSMMNDIDAQINYYESQIEANEELKKNKKIQENLADLAAVDFDSLEFREKQLYLKSLINKIYIDGEQVTIEWL

SEQ ID NO: 6471 - protein, 452 aa, synthetic construct
MKAAIYIRVSTQEQVENYSIQAQTEKLTALCRSKDWDVYDIFIDGGYSGSNMNRPALNEMLSKLHEIDAVVVYRLDRLSRSQRDTTTLIEEYFLKNNVEFVSLSETLDTSSPFGRAMIGILSVFAQLERETIRDRMVMGKIKRIEAGLPLTTAKGRTFGYDVIDTKLYINEEEAKQLQLIYDIFEEEQSITSLQKRLKKLGFKVRTYNRYNNWLTNDLYCGYVSYKDKVHVKGIHEPIISEEQFYRVQEIFTRMGKNPNINRDSASLLNNLVVCSKCGLGFVHRSKDTMSRGKKYHYRYYSCKTYKHTHELEKCGNKIWRADKLEELIINRVNNYSFASRNVDKEGELDSLNEKLKIEHAKKKRLFDLYINGSCEMSELDSVMNDIDARINYYESQIEANEELKKNRRIRENLADLATVDFDSLEFREKQLYLKSLINKIYIDGEQVTIEWL

SEQ ID NO: 6472 - protein, 469 aa, synthetic construct
MSYTTPVRAAVYLRISEDRSGEQLGVARQREDCLKLCGQRKWVPVEYLDNDASASTGKRRPAYEQMLADITAGKIAAVVAWDLDRLHRRPVELEAFMSLADEKRLALATVAGDIDLATPQGRLVARMKGCVAAHETEHKKARQRRAARQKAERGLPNWSKAFGYLPGPNGPEPDPRTAPLVKQAYADILAGASLGDVCRQWNDAGAPTITGRPWTTTTLSKFLRKPRNAGLRAYKGARYGPVDRDAIVGRAQWSPLVDEATFWAAQAVLDAPGRAPGRKSVRRHLLTGLAGCGKCGNHLAGSYRTDGRVVYVCKACHGVSILADNIEPILYHIVAERLAMPDAVGLLRREIHDAAEAEIIRLELETLYGELDRLAVERAEGLLTARQVKISTDIVNAKITELQARQLDQERLRVLDGIPLGTPQVAGMIAELSPDRFRAVLDVLAEVVVQPVGKSGRIFNPERVQVNWR

SEQ ID NO: 6473 - protein, 485 aa, synthetic construct
MTKKVAIYTRVSTTNQAEEGFSIDEQIDRLTKYAEAMGWQVSDTYTDAGLSGAKLERPAMQRLINDIENKAFDTVLVYKLDRLSRSVRDTLYLVKDVFTKNKIDFISLNESIDTSSAMGGLFLTILSAINEFERENIKERMTMGKLGRAKSGKSMMWTKAAFGYYHNRNTGILEIVPLQATIVEQIFTDYLSGISLTKLRDKLNESGHIGKDIPWSYRTLRQTLDNPVYCGYIKFKDSLFEGLHKPIIPYETYLKVQKELEERQQQTYERNNNPRPFQAKYMLSGMARCGYCGAPLRIVLGHKRKDGSRTMKYHCTNRFPRRTKGATVYNDNKKCDSGTYDLSNLENTVIDNLIGFQENNDSLLKIINGNNQPVLDTSSFKEQISQIDKKIQKNSDLYLNDFITMDELKDRTDSLQAEKKLLKAKISENEFNDSTDVFELVKTQLGSIPINELSYDNKKKIVNNLVSKVDVTADNVDIIFKFQLA

SEQ ID NO: 6474 - protein, 452 aa, synthetic construct
MKAAIYIRVSTREQVENYSIQAQTEKLTALCRSKDWDVYDIFIDGGYSGSNMNRPALNEMLSKLHEIDAVVVYRLDRLSRSQRDTITLIEEYFLKNNVEFVSLSETLDTSSPFGRAMIGILSVFAQLERETIRDRMVMGKIKRVEAGLPLTTAKGRTFGYDVIDTKLYINEGEAKQLQLIYDIFEEEQSITFLQKRLKKLGFKVRTYNRYNNWLTNDLYCGYVSYKDKVHVKGIHEPIISEEQFYRVQEIFTRMGKSPNMNRDSASLLNNLVVCSKCGLGFVHRRKDTMSRGKKYHYRYYSCKTYKHTHELEKCGNKIWRADKLEELIIDRVNNYSLASRNVDKEDELDSLNEKLKIEHAKKKRLFDLYINGSYEVSELDCMMSDIDAQINYYESQIEANEELKKNKKIQENLANLATVDYDSLEFREKQLYLKSLINKIYIDGEQVTIEWL

SEQ ID NO: 6475 - protein, 452 aa, synthetic construct
MKAAIYIRVSTREQVENYSIQAQTEKLTALCRSKGWDVYDIFIDGGYSGSNMNRPALNEMLSKLHEIDAVAVYRLDRLSRSQRDTITLIEEHFLKNNVEFVSLSETLDTSSPFGRAMIGILSVFAQLERETIRDRMVMGKIKRIEAGLPLTTAKGRTFGYDVIDTKLYINEEEAKQLQLIYDIFEEEQSITFLQKRLKKLGFKVRTYNRYNNWLTNDLYCGYVSYKDKVHVKGIHEPIISEEQFYRVQEIFARMGKNPNMNRDSASLLSNLVVCGKCGLGFVHRRKDAMSRDKKYHYRYYSCKTYKHIHELEKCGNKIWRADKLEELIINRVNNYSLASRNVDKEDELDSLNEKLKIEHAKKRRLFDLYINGSYEVSELDSMMSDIDAQINYYESQIEANEELKKSKKTQENLAYLAAVDFDSLEFREKQLYLKSLINKIYIDGEQVTIEWL

SEQ ID NO: 6476 - protein, 452 aa, synthetic construct
MKAAIYIRVSTREQVENYSIQAQTEKLTALCRSKDWDVYDIFIDGGYSGSNMNRPALNEMLSKLHEIDAVVVYRLDRLSRSQRDTITLIEEYFLKNNVEFVSLSETLDTSSPFGRAMIGILSVFAQLERETIRDRMVMGKIKRIEAGLPLTTARGRTFGYDVVDTKLYINEEEAKQLRLIYDIFEEEQSITFLQKRLKKLGFKVRTYNRYNNWLTNDLYCGYVSYKDKVHVKGIHEPIISEEQFYRVQEIFTRMGKNPNMNRDSVSLLSNLVVCSKCGLGFVHRRKDTTSRGKKYHYRYYSCKTYKHTHELEKCGNKIWRADKLEELIINRVNNYSLASRNVDKGDELDSLNEKLEIEHAKKKRLFDLYINGSYEVSELDSMMNDIDALINYYENQIEANEELKKNKKIQENLADLAAVDFDSLEFREKQLYLKSLINKIYIDGEQVTIEWL

SEQ ID NO: 6477 - protein, 452 aa, synthetic construct
MKAAIYIRVSTREQVENYSIQAQTERLTALCRSKDWDVYDIFIDGGYSGSNMNRPALNEMLSKLHEIDAVVVYRLDRLSRSQRDTITLIEEYFLKNNVEFVSLSETLDTSSPFGRAMIGILSVFAQLERETIRDRMVMGKIKRIEAGLPLTTAKGRTFGYDVIDTKLYINEEEAKQLRLIYDIFEEEQSITSLQKRLKELGFKVRTYNRYNSWLTNDLYCGYVSYKDKVHVKGIHEPIISEEQFYRVQEIFTRMGKNPNMNRDSASLLNNLVVCSKCGLGFVHRRKDTVSRGKKYHYRYYSCKTYKHIHELEKCGNKIWRADKLEELIINRVNNYSFVNRNVDKEDELDSLNEKLKIEHAKKKRLFDLYINGSYEVSELDSMMNDIDAQISYYESQIEANEELRKNKKIQENLANLATVDYDSLEFRVKQLYLKSLINKIYIDGEQVTIEWL

SEQ ID NO: 6478 - protein, 452 aa, synthetic construct
MKAAIYIRVSTQEQVGNYSIQAQTEKLTALCRSKDWDVYDIFIDGGYSGSNMNRPALNEMLSKLHEIDAVVVYRLDRLSRSQRDTTTLIEEYFLKNNVEFVSLSETLDTSSPFGRAMIGILSVFAQLERETIRDRTVMGKIKRIEAGLPLTTAKGRTFGYDVIDTKLYINEEEAKQLQLIYDIFEEEQSITSLQKRLKKLGFKVRTYNRYNNWLTNDLYCGYVSYKDKVHVKGIHEPIISEEQFYRVQEIFTRMGKNPNMNRNSASLLNNLVVCSKCGLGFVHRRKDTMSGGKKYHYRYYSCKTYKHTHELEKCGNKTWRADKLEELIINRVNNYSFASRNVGKEDELDSLNEKLKIEHAKKKRLFDLYINGSYEVSELDSMMNDIDAQINYYESQIVANEELKKNKKIQEGLANLATVDFDSLEFREKQLYLKSLINKIYIDGEQVTIEWL

SEQ ID NO: 6479 - protein, 452 aa, synthetic construct
MKAAIYIRVSTREQVENYSIQAQTEKLTALCRSKDWDVFDIFIDGGYSGSNMNRPALNEMLSKLHEIDAVVVYRLDRLSRSQRDTITLIEEHFLKNNVEFVSLSETLDTSSPFGRAMIGILSVFAQLERETIRDRMVMGKIKRIEAGLPLTTAKGRTFGYDVIDTKLYINEEEARQLRLIYDIFEEEQSITSLQKRLKKLGFKVRTYNRYSNWLTNDLYCGYVSYKDKVHVKGIHEPIISEEQFCRVQEIFTRMGKNPNMNRDSASLLNSLVVCSKCGLGFVHRRKDTMSRGKKYHYRYYSCKTYKHTHELEKCGNKIWRADKLEELIIERVNNYSFASRNADKDDELYSLNEKLKIEHAKKKRLFDLYINGSYEVSELDSMMYDIDAQINYYERQIEANEELKKTKKIQENLANLATVDYDSLEFREKQLYLKSLINKIYIDGEQVTIEWL

SEQ ID NO: 6480 - protein, 452 aa, synthetic construct
MKAAIYIRVSTREQVENYSIQAQTEKLTALCRSKDWDVYDIFIDGGYSGSNMNRPALNEMLSKLHEIDAVVVYRLDRLSRSQRDTITLIEEYFLKNNVEFVSLSETLDTSSPFGRAMIGILSVFAQLERETIRDRMVMGKIKRIEAGLPLTTAKGRTFGYDVIDTKLYINEEEAEQLRLIYDIFEEEQSITFLQKRLKKLGFKVHSYNRYNNWLTNDLYCGYVSYKDKVHVKGIHEPIISEEQFYRVQEIFTRMGKNPNMNRDSASLLNNLVVCSKCGLGFVHRRKDAMSRSKKYHYRYYSCKTYKHIHELEKCGNKIWRADKLEELIINRVNNYSLASRNVDKEDELDSLNEKLKIEHAKKKRLFDLYINGCYDVSELDSMMCDIDAQINYYESQIEANEELKKSKRIQESLANLATVDFDSLEFREKQLYLKSLINKIYIDGEQVTIEWL

SEQ ID NO: 6481 - protein, 485 aa, synthetic construct
MTKKVAIYTRVSTTNQAEEGFSIDEQIDRLTKYAEAMGWQVSDTYTDAGFSGAKLERPAMQRLINDIEDKAFDTVLVYKLDRLSRSVRDTLYLVREVFTKNKIDFISLNESIDTSSAMGSLFLTILSAINEFERENIKERMTMGKLGRAKSGKSMMWTKTAFGYYHNRKTGILEIVPLQATIVEQIFTDYLSGISLTKLRDKLNESGHIGKDIPWSYRTLRQTLDNPVYCGYIKFKDSLFEGMHKPIIPYETYLKVQKELEERQQQTYERNNNPRPFQAKYMLSGMARCGYCGAPLRIVLGHKRKDGSRTMKYHCANRFPRKTKGVTVYNDNKKCNSGTYDLSNLENTVIDYLIGFQENNDSLLKVINGNNQPILDTSSLKKQISQIDKKIQKNSDLYLNDFITMDELKDRTDRLQAEKKLLKAKISENKFNDSTDVFELVKTQLGSIPINELSYANRKKIVNNLVSKVDVTADNVDIIFKFQLA

SEQ ID NO: 6482 - protein, 485 aa, synthetic construct
MTKKVAIYTRVSTTNQAEEGFSIDEQIDRLTKYAEVMGWQVSDTYTDAGFSGAKLERPAMQRLINDIENKAFDTVLVYKLDRLSRSVRDTLYLVKDVFTKNKIDFISLNESINTSSAMGSLFLTILSAINEFERENIKERMAMGKLGRAKSGKSMMWTKTAFGYCHNRKTGILEIVPLQATIVEQIFTDYLSGISLTKLRDKLNESGHIGKDIPWSYRTLRQTLDNPVYCGYIKFKDNLFEGMHKPIIPYETYLKVQKELEERQQQTYERNNNPRPFQAKYMLSGMARCGYCGAPLRIVLGHTRKDGSRTMKYHCANRFPRKTKGVTVYNDNKKCDSGTYDLSNLENTVIDILIDFQENNDSLLKIINGNNQPVLDTSSFKEQIGRIDKEIQKNSDLYLNGFITMDELKDRTDSLQAEKKLLKAKISENKCDDGTDVFELVKTQLGSIPINELSYDNKKKIVSNLVSKVDVTADNVDIIFKFQLA

SEQ ID NO: 6483 - protein, 452 aa, synthetic construct
MKAAIYIRVSTREQVENYSIQAQTEKLTALCRSKDWDVYDIFIDGGYSGSNMNRPALNEMLSKLHEIDAVVVYRLDRLSRSQRDTITLIEEYFLKNNVEFVSLSETLDTSSPFGRAMIGILSVFAQLERETIRDRMVMGKIKRIEAGLPLTTAKGRTFGYDVIDTKLYINEEEAKQLQLIYDIFEEEQSITLLQKRLKKLGFKVRTYSRYNNWLTNDLYCGYVSYKDKVHVKGIHEPIISEEQFYRVQEIFARMGKNPNMNRDSASLLNSLVVCSKCGLGFVHRRKDTMSRGKKYHYRYYSCKTYKHTHELEKCGNKIWRADKLEELIINRVNNYSFASRNVDKEDGLDSLNKKLKIEHAKRKRLFDLYINGSYNVSELDSMMSDIDAQINYYESQIKANEELKKNRKIQENLADLATADFDSLEFREKQLYLKSLINKIYIDGEQVTIEWL

SEQ ID NO: 6484 - protein, 485 aa, synthetic construct
MTKKVAIYTRVSTTNQAEEGFSIDEQIDRLTKYAEAMGWQVSDTYTDAGLSGAKLERPAMQRLINDVENKAFDTVLVYKLDRLSRSVRDTLYLVKDVFTKNKIDFISLNESIDTSSAMGSLFLTILSAINEFERENIKERMTMGKLGRAKSGKSMMWTKTAFGYYHNRKTGILEIVPPQATIVEQIFTDYLSGISLTKLRDKLNESGHIGKDIPWSYRTLRQTLDNPVYCGYIKFKDSLFEGMHKPIIPYETYLKVQKELEERQQQTYERNNNPRPFQAKYMLSGMARCGYCGAPLRVVLGHKRKDGSRTMKYHCTNRFPRKTKGVTVYNDNKKCGSGAYDLSNLENTVIDSLIGFQENSDSLLKIINGNNQPILDTSSFEKQISQIDKKIQKNNDLYLNDFITMDELKNRTDSLQAEKKLLKAKISENRLNDSTDVFELVKTQLGSIPISELSYDNKKKIVNNLVSKVDVTADNVDIIFKFQLA

SEQ ID NO: 6485 - protein, 485 aa, synthetic construct
MTRKVAIYTRVSTANQAEEGFSIDEQIDRLTKYAEAMGWQVSDTYTDAGFSGAKLERPAMQRLINDIENKAFDTVLVYKLDRLSRSVRDTLYLVKDVFTKNKIDFISLNESIDTSSAMGSLFLTILSAINEFERENIKERMTMGKLGRAKSGKSMMWTKTAFGYYHNRKTGILEIVPLQATIVEQIFTDYLSGTSLSKLRDKLNESGHIGKDIPWSYRTLRQTLDNPVYCGYIKFKDSLFEGMHKPIIPYETYLKVQKELEERQQQTYERNNNPRPFQAKYMLSGVARCGYCGAPLRIVLGHKRKDGSRTMKYHCANRFPRKTKGITVYNDNKKCDSGTYDLGNLENTVIDNLIGFQENNDSLLKIINGNNQPILDTSSFKKQISQIDKKIQKNSDLYLNDFITMDELRDRTDSLQAKKKLLEAKISENKFNDSTDVFELVKTQLGSIPINELSYDNKKKIVNDLVSKVDVTADNVDIIFKFQLA

SEQ ID NO: 6486 - protein, 469 aa, synthetic construct
MSYTTPVCAAVYLRISEDRSGEQLGVARQREDCLKLCDQRKWVPVEYLDNDVSASTGKRRPAYEQMLADITAGKIAAVVAWDLDRLHRRPIELEAFMSLADEKRLALATVAGDIDLATPQGRLVARLKASVAAHETEHKKARQRRAARQKAERGHPNWSKAFGYLPGPNGPEPDPRTAPLVKQAYADILAGAGLGDVCRQWNGAGAFTITGRPWTTTTLSKFLRKPRNAGLRAYKGARYGPVDRDAIVGKAQWSPLVDEATFWAAQAVLDAPGRAPGRKSVRRHLLTGLAGCGKCGNHLAGSYRTDGRVVYVCKACHGIAILADNIEPILYHIVAERLAMPDAVELLRREFHDAAEADTIRLELETLYGELDRLAVERAEGLLTARQVKISTDIVNAKITKLQARQLDQDRLRVFDGIPLGTPQVAGTIAELSPDRFRAVLGVLAEVVVQPVGKSGRIFNPERVQVNWR

SEQ ID NO: 6487 - protein, 452 aa, synthetic construct
MKAAIYIRVSTQEQVGNYSIQAQTEKLTALCRSKDWDVYDIFIDGGYSGSNMNRPALNEMLSKLHEIDAVVVYRLDRLSRSQRDTTTLIEEYFLKNNVEFVSLSETLDTSSPFGRAMIGILSVFAQLERETIRDRMVMGKIKRIEAGLPLTTAKGRTFGYDVIDTKLYINEEEAKQLQLIYDIFEEEQSITSLQKRLKKLGFKVRTYNRYSNWLTNDLYCGYVSYKDKVHVKGIHEPIISEEQFYRVQEIFTRMGKNPNMNRDSASLLNNLVVCSKCGLGFVHRSKDTMCRGKKYHYRYYSCKTYKHTHELEKCGNKTWRADKLEELIISRVNNYSFASRNVDKEDELDSLNEKLKIEHAKKKRLFDLYINGSYEVSELDSMMNDIDARINYYESQIEANEELKKNKKIQEYLADLATVDFDSLGFREKQLYLKSLINKIYIDGEQVTIDWL

SEQ ID NO: 6488 - protein, 452 aa, synthetic construct
MKAAIYIRVSTREQVENYSIQAQTEKLTALCRSKGWDVYDIFVDGGYSGSNMNRPSLNEMLSKLHEIDAVVVYRLDRLSRSQRDTITLIEEYFLKNNVEFVSLSETLDTSSPFGRAMIGILSVFAQLERETIRDRMVMGKIKRIEAGLPLTTAKGRTFGYDVIDTKLYINEEEAKQLQLIYDIFEEVQSITFLQKRLKKLGFKVRTYNRYNNWLTNDLYCGYVSYRDKVHVKGIHEPIISEEQFYRVQEIFTRMGKNPNMNRDSASLLNNLVVCSKCGLGFVHRRKDTVSRGKKYHYRYYSCKTYKHTHELEKCGNKIWRADKLEELIINRVNNYSFASRTVDKEDELDSLNEKLKIEHAKKKRLFDLYINGSYEMGELDSMMNDIDAQINCYESQIEANEELKKNKKIQENLANLATVDYDSLEFREKQLYLKSLINKIYIDGEQVTIEWL

SEQ ID NO: 6489 - protein, 469 aa, synthetic construct
MCYTTPVRAAVYLRISEDRSGEQLGVARQREDCLKLCGQRNWVPVEYLDNDVSASTGKRRPAYEQMLADITAGKIAAVVAWDLDRLHRRPIELEAFMSLADEKRLALATVAGDVDLATPQGRLVARLKGSVAAHETEHKKARQRRAARQKAERGYPNWSKAFGYLPGPNGPEPDPRTAPLVEQAYADILAGASLGDVCRQWNDVGAFTITGRPWTTTTLSKFLRKPRNAGLRAYKGARYGPVDRDAIVGKAQWSPLVDEATFWAAQAVLDAPGRAPGRKSVRRHLLTGLAGCGKCGNHLAGSYRTDGRVVYVCKACHGVAILADNIEPILYHIVAERLAMPDAVDLMRREFHDAAEAEAIRLELETLYGELDRLAVERAEGLLTARQVKISTDIVDAKITKLQAHQLDQERLRVLDGIPLGTPQVAGMIAELSPDRFRAVLDVLAEVVVQPVGKGGRIFNPERVQVNWR

SEQ ID NO: 6490 - protein, 485 aa, synthetic construct
MTKKVAIYTRVSTTNQAEEGFSIDEQVDRLTKYAEAMGWQVSDTYTDAGFSGAKLGRPAMQRLINDIENKSFDTVLVYKLDRLSRSVRDTLYLVKDVFTKNKIDFISLNESIDTSSAMGSLFLTILSAINEFERENIKERMAMGKLGRAKSGKSMMWTKTAFGYYHNRKTGILEIVPLQATIVEQIFTDYLSGISLTKLRDKLNESGHIGKDIPWSYRTLRQTLDNPVYCGYIKFKDSLFEGMHKPIIPYETYLKVQKELEERQQQTYERNNNPRPFQAKYMLSGMARCGYCGAPLRIVLGHKRKDGSRTMRYHCANRFPRKTKGVTVYNDNKKCNSGTYDLSNLENTVIDSLIGFQENNDSLLKIINGSNQPILDTSSFKKQISQIDKKIQRNGDLYLNDFITMDELKVRTDSLQAEKKLLKAKISENKFNDGTDVFELVKTQLGSIPINELSYDSKKKIVNNLVSKVDVTADNVDIIFKFQLA

SEQ ID NO: 6491 - protein, 485 aa, synthetic construct
MTKKVAIYTRVSTTNQAEEGFSIDEQIDRLTKYAEAMGWQVSDAYTDAGFSGAKLERPAMQRLINDIENKAFDTVLVYKLDRLSRSVRDTLYLVKDVFTKNKIDFISLNESINTSSAMGSLFLTILSAINEFERENIKERMTMGKLGRAKSGKSMMWTKTAFGYYHNRKTGILEIVPLQATIVEQIFTDYLSGISLTKLRDKLNESGHIGKDIPWSYRTLRRTLDNPVYCGYIKFKDSLFEGMHKPIIPYETYLKVQKELEERQQQTYERNNNPRPFQAKYMLSGMARCGYCGAPLRIVLGHKRKDGSRTMKYHCENRFPRKTRGVTVYNDNKKCDSGTYDLSNLESTVIDNLIGFQENNDSLLKIINGNNQPILDTSSFEKQISQIDKKIQKNSDLYLNDFITMDELRVRTDSLQAEKKLLKARINENKFNDSTDVFELVKTQLGSVPINELSYDDKKKIVNNLVSKVDVTADNVDIIFKFQLA

SEQ ID NO: 6492 - protein, 452 aa, synthetic construct
MKAAIYIRVSTREQVENYSIQAQTEKLTALCRSKDWDVYDIFIDGGYSGSNMNRPALNEMLSRLHEIDAVVVYRLDRLSRSQRDTITLIEEYFLKNNVEFVSLSETLDTSSPFGRAMIGILSVFAQLERETIRDRMVMGKIKRIEAGLPLTTAKGRTFGYDVIDTKLYINEEEARQLRLIYDIFEEEQSITFLQKRLKKLGFKVRTYSCYNNWLTNDLYCGYVSYKDKVHVKGIHEPIISEEQFYRVQEIFARMGKNPNMNHDSASLLNSLVVCSRCGLGFVHRRKDTTSRGKKYHYRYYSCKTYKHVHELEKCGNKIWRADKLEELIINRVNNYSFASRNVDKEDELDSLNEKLKIEHAKKRRLFDLYINGSYEVSELDSMMDDIDAQINYYEGQIEANEELKKNKKIQENLANLASVDYDSLEFREKQLYLKSLINKIYIDGEQVTVEWL

SEQ ID NO: 6493 - protein, 485 aa, synthetic construct
MTKKVAIYTRVSTTNQAEEGFSIDEQIDRLTKYAEAMGWRVSDTYTDAGFSGAKLERPAMQRLINDIENKAFDTVLVHKLDRLSRSVRDTLYLVKDVFTKNKIDFISLSECIDTSSAMGSLFLTILSAINEFERENIKERMTMGKLGRAKSGKSMMWTKTAFGYYHNRKTGILEIVPLQATIVEQIFTDYLSGISLTKLRDKLNESGHIGKDIPWSYRTLRQTLDNPVYCGYIKFKDSLFEGMHKPIIPYETYLKVQKELEERQQQAYERNNNPRPFQAKYMLSGVARCGYCGAPLRIVLGHKRKDGSRTMKYHCADRYPRKTKGVTVYNDNKKCDSGTYDLNNLESTVIDNLIGLQENSDSLLKIINGNNQPILDTSSIEKQISQIDEKIQKNSDLYLNDFITMDELKDRTDSLQAEKKLLKAKISENKFNDSADVFELVKTRLGSIPINELSYDNKKKIVNNLVSKVDVTADNVDIIFKFQLT

SEQ ID NO: 6494 - protein, 485 aa, synthetic construct
MTKKVAIYTRVSTTNQAEEGFSIDEQIDRLTKYAEAMGWQVSDTYTDAGFSGAKLERPAMQRLINDIENKAFDTVLVYKLDRLSRSVRDTLYLVKDVFTKNKIDFISLSESIDTSSVMGSLFLTILSAINEFERENIKERMTMGKLGRAKSGKSMMWTKTAFGYYHNRKTGILEIVPLQATIVEQIFTDYLSGISLTKLRDKLNESGHIGKDIPWSYRTLRQTLDNPVYCGYIKFKDSLFEGMHKPIIPYETYLKVQRELEERQQQTYERNNNPRPFQAKYMLSGMARCGYCGAPLRIVLGHKRKDGSRTMKYHCANRFPRKTKGVTVYNDNKECDSGTYDLSNLENTVIDNLIGLQENNDSLLEIINGNNQPILDTSSFKEQISQIDKKIQKISDLYLNDFITMDELKDRTDSLQAEKKLLKAKISENKSSDSTDVFELVKTQLGSTPINELNYDDKKKIVNNLVSKVDVTADSVDIIFKFQLA

SEQ ID NO: 6495 - protein, 485 aa, synthetic construct
MTKKVAIYTRVSTTNQAEEGFSIDEQIDRLTKYAEAMGWQVSDTYTDAGFSGAKLERPAMQRLINDIENKAFDTVLVYKLDRLSRSVRDTLYLVKDVFTKNKIDFISLNESINTSSAMGSLFLTILSAINEFERENIKERMTMGKLGRAKSGKSMMWTKTAFGYYHNRKTGILEVVPLQATIVEQIFTDYLSGISLTKLRDKLNESGHIGKDIPWSYRTLRQTLGNPVYCGYIKFKDRLFEGMHKPIIPYETYLKAQKELEERQQQTYERNNNPRPFQAKYMLSGMARCGYCGAPLKIVLGHKRKDGSRTMKYHCANRFPRKTKGVTVYNDNEKCDSGTYDLSNLENTVIDNLIGLQEDYDSLLKIIDGNNQPILDTSSFNEQISQIDKKIQKNSDLYLNDFITMDELRDRTDSLQAEKKLLKAKISENKLNDSTDVFELVKTQLGSIPINELSYDNRKKIVNNLVSKVDVTADNVDIIFKFQLA

SEQ ID NO: 6496 - protein, 452 aa, synthetic construct
MKAAIYIRVSTREQVENYSIQAQTEKLTALCRSKDWDVYDIFIDGGYSGSNMNRPALNEMLSKLHEIDAVVVYRLDRLSRSQRDTITLIEEYFLKNSVEFVSLSETLDTSSPFGRAMIGILSVFAQLERETIRDRMVMGKIKRIEAGLPLTTAKGRTFGYDVVDTKLYINEEEAKQLQLIYDIFEEEQSITFLQKRLKKLGFKVRTYNRYNSWLTNDLYCGYVSYKDKVHVKGIHEPIISEEQFYRVQEIFTRMGKNPNMNRDSASLLNNLVVCSKCGLGFVHRRKDTMSRGKKYHYRYYSCKTYKHTHELERCGNKIWRADKLEELIINRVNNYSFASRNVDKEDELDSLNKKLKIEHAKKKRLFELYINGSYEVSELDSMMNDIDAQINYYESQIEASEELKKNKKIQENLAYLATVDFDSLEFREKQLYLKSLINKIYIDGEQVTIEWL

SEQ ID NO: 6497 - protein, 452 aa, synthetic construct
MKAAIYIRVSTREQVENYSIQAQTEKLTALCRSKDWDVYDIFIDGGYSGSNMNRPALNEMLSKLHEIDAVVVYRLDRLSRSQRDTITLIEEYFLKNNVEFVSLSETLDTSSPFGRAMIGILSVFAQLERETIRDRMVMGKIKRIEAGLPLTTAKGRTFGYDVIDTKLYINEEEAKQLQLIYDIFEEEQSITSLQKRLKKLGFKVRSYNRYNNWLTNDLYCGYVSYKDKVHVKGIHEPIISEEQFYRVQEIFTRMGKDPNMNRDSASLLNNLVVCSKCGLGFVHRRKDAMSRDKKYRYRYYSCKTYKHIHELEKCGNKIWRADKLEELIISRVNNYSLAIRNVDKEDVLDSLNGKLKTEHAKKKRLFDLYINGNYEVSELDSMMNDIDAQINYYEGQIEANEELKKNKKIQEDLAELAAVDFDSLEFREKQQYLKSLINKIYIDGEQVTIEWL

SEQ ID NO: 6498 - protein, 452 aa, synthetic construct
MKAAIYIRVSTREQVENYSIQAQTEKLTALCRSKDWDVYDIFIDGGYSGSNMNRPALSEMLSKLHEIDAVVVYRLDRLSRSQRDTITLIEEYFLKNNVEFVSLSETLDTSSPFGRAMIGILSVFAQLERETIRDRMVMGKIKRIEAGLPLTTAKGRTFGYDVIDTKLYINEEEAKHLQLVYDIFEEEQSITFLQKRLKKLGSKVRTYSRYNSWLTNDLYCGYVSYKDKVHVKGIHEPIISEEQFYRVQEIFARMGRNPNMNRDSASLLNNLVVCSKCGLGFVHRRKDTTSRGKKYHYRYYSCKTYKHTHELEKCGNKIWRADKLEELIINRVNNYSLARRNVDKEDELDSLNEKLKIEHAKKKRLFDLYINGSYEVSELDSMMNDIDAQINYYESQIEANEELKKNKKIQENLADLATVDFGSLEFREKQLYLKSLISKIYIDGEQVTIEWL

SEQ ID NO: 6499 - protein, 452 aa, synthetic construct
MRAAIYIRVSTREQVENYSIQAQTEKLTALCRSKDWDVYDIFIDGGYSGSNMNRPALNEMLSKLHEIDAVVVYRLDRLSRSQRDTITLIEEYFLKNNVEFVSLSETLDTSSPFGRAMIGILSVFAQLERETIRDRMVMGKIKRIEAGLPLTTAKGRTFGYDVIDTKLYINEEEARQLQLIYDIFEEEQSITSLQKRLKKLGFKVRTYNRYNNWLTNDLYCGYVSYKDKVHVKGIHEPIISEEQFYRVQEIFTRMGKNPNMNRESASLLNNLVVCSKCGLGFVHRRKDTMSRGKKYRYRYYSCKTYKHIHELEKCGNKIWRADKLEELIINRVNNYSLTSRNVDKEDELDSLNEKLKFEHAKKKRLFDLYINGSYEVSELDSMMNDIDAQINYYESQIEANEELKKNKKIQENLANLATVDYDSLEFHEKQLYLKSLINKIYIDGEQVTIEWL

SEQ ID NO: 6500 - protein, 452 aa, synthetic construct
MKAAIYIRVSTREQVENYSIQAQTEKLTALCRSKDWDVYDIFIDGGYSGSNMNRPALNEMLSKLHEVDAVVVYRLDRLSRSQRDTITLIEEYFLKNNVEFVSLSETLDTSSPFGRAMIGILSVFAQLERETIRDRMVMGKIKRIEAGLPLTTAKGRTFGYDVIDTKLYINEEEAKQLQLIYDIFEEEQSITFLQKRLKKLGFKVRTYNRYNNWLTNDLYCGYVSYKDKVHVRGIHEPIISEEQFNRVQEIFARMGKNPNMNRGSASLLNNLVVCSKCGLGFVHRRKDIMSHGKKYHYRYYSCKTYKHIHELEKCGNKIWRADKLEELIINRVSNYSLASRNVDKEDELDSLNEKLKMEHAKKKRLFDLYINGSYEVSELDSMMGDIDAQISYYESQIEANEKLKKDKKIQENLADLATVDFDNLEFREKQLYLKSLINKIYIDGGQVTIEWL

SEQ ID NO: 6501 - protein, 485 aa, synthetic construct
MTKKVAIYTRVSTTNQAEEGFSIDEQTDRLTKYAEAMGWQVSDTYTDAGFSGAKLERPAMQRLINDIENKAFDTVLVYKLDRLSRSVRDTLYLVKDVFTKNKIDFISLNESINTSSAMGSLFLTILSAINEFERENIKERMTMGKLGRAKSGKSMMWTKTAFGYYHNRKTGILEIVPLQATIVEQIFTDYLSGISLTKLRDKLNESGHIGKGIPWSYRALRQILDNPVYCGYIKFKDSLFEGMHKPIIPYETYLKVQKELEERQQQTYERNNNPRPFQAKYMLSGMARCGYCGAPLKIVLGHKRKDGSRTMKYHCANRFPRKTKGVTVYNDNKKCNSGTYDLSNLENTVIDNLIGLQENNDSLLKIINGNNQPILDTSSFKKQISQIDKKIQKNSDLYLNDFITMDELKDRTDSLQAEKKLLKAKISENKFNDSTDVFELVKTQLGSIPINELSYDNKKKIVNNLVSRVDVTAENVDIIFKFQLA

SEQ ID NO: 6502 - protein, 452 aa, synthetic construct
MKAAIYIRVSTREQVENYSIQAQTEKLTALCRSKDWDVYDIFIDGGYSGSNMNRPALNEMLSKLHEIDAVVVYRLDRLSRSQRDTITLIEEYFLKNNVEFVSLSETLDTSSPFGRAMIGILSVFAQLERETIRDRMVMGKIKRIEAGLPLTTAKGRTFGYDVIDTRLYINEEEAKQLRLIYDIFEEEQSITFLQKRLKKLGFKVRTYNCYNNWLTNVLYCGYVSYKDKVHVKGIHEPIISEEQFYRVQEIFTRMGKNPNMNRDSASLLNNLVVCSKCGLGFVHRRKDTTSRGKKYHYRYYSCKTYKHIHELEKCGNKIWRADKLEELIINRVNNHSFASRNVDKEDELDSLNEKLRIEHAKRKRLFDLYINGSYGVSELDSVMNDIDAQINYYESQIEANEELKKNKKIQENLANLATVDYDSLEFREKQLYLKSLINKIYIDGEQVTIEWL

SEQ ID NO: 6503 - protein, 485 aa, synthetic construct
MTKKVAIYTRVSTANQAEEGFSVDEQIDRLTKYAEAMGWQVSDTYTDAGFSGAKLERPAMQRLINDIENKAFDTVLVYKLDRLSRSVRDTLYLVKDVFTKNKIDFISLNESIDTSSAMGSLFLTILSAINEFERENIKERMTMGKLGRAKSGKSMMWTKTAFGYYHNRETGILEIVPLQATIVEQIFTDYLSGISLTKLRDKLNESGHIGKDIPWSYRTLRQTLDNPVYCGYIKFKDSLFEGMHKPIIPYETYLKVQKELEERQQQTYERNNNPRPFQAKYILSGMARCGYCGAPLRIVLGHKRKDGSRTMKYHCANRFPRKTKGVTVYNDNKKCDSGTYDLSNLENTVIDNLIGFQENSDSLLKIINGNNQPILDTSSFKEQISQIDKKIQKNSDLYLNDFITMDELKDRTDRLQAEKKLLKAKISENKFNDSTDVFELVKTQLGSIPINELSYDNKKKIVNNLVSKVDVTADNVDIIFKFQLA

SEQ ID NO: 6504 - protein, 452 aa, synthetic construct
MKAAIYIRVSTREQVENYSIQAQTEKLTALCRSKDWDVYDIFIDGGYSGSNMNRPALNEMLSKLHEIDAVVVYRLDRLSRSQRDTITLIEEYFLKNNVEFVSLSETLDTSSPFGRAMIGILSVFAQLERETIRDRMVMGKIKRVEAGLPLTTAKGRTFGYDVIDTKLYINEEEAKQLQLIYDIFEEEQSITFLQKRLKKLGFKVHTYNRYNNWLTNDLYCGYVSYKDKVHVKGIHEPIISEEQFQRVQEIFTRMGKNPNMNRDSASLLSNLVVCSKCGLGFVHRRKDTMSRGKKYHYRYYSCKTYKHIHELEKCGNKIWRADKLEELIINRVNNYSFASRNVDKEDELDSLNEKLKIEHAKKKRLFDLYINGSYEVSELDSMMNDIDARINYYESQVEANEELKKNKKTQENLANLATVDYDSLEFREKQLYLKSLINKIYIDGEQVTIEWL

SEQ ID NO: 6505 - protein, 469 aa, synthetic construct
MCYTTPVRAAVYLRISEDRSGEQLGVARQREDCLELCCQRKWVPVEYLDNDVSASTGKRRPAYEQMLADITAGKIAAVVAWDLDRLHRRPIELEAFMSLADEKRLALATVAGDVDLATPQGRLVARLKGSVAAHETEHKKARQRRAARQKAERGHPNWSKAFGYLPGPSGPEPDPRTAPLVKQAYADILAGASLGDVCRQWNDAGALTITGRPWTTTTLSKFLRKPRNAGLRAYKGARYGPVDRDAIVGKAQWSPLVDEATFWAAQAVLDAPGRAPGRKSVRRHLLTGLAGCGKCGNHLAGSYRTDGKVVYVCKACHGIAILADNIEPILYHIVAERLAMPDAVDLLRREIHDAAEAETIRLELETLYGELDRLAVERAEGLLTARQVKISTDIVNAKITKLQARQQDQERLRVFEGIPLGTPQVAGTIAELSPDRFRAVLDVLAEVVVQPVGKSGRIFNPERVQVNWR

SEQ ID NO: 6506 - protein, 452 aa, synthetic construct
MKAAIYIRVSTREQVENYSIQAQTEKLTALCRSKDWDVYDIFIDGGYSGSNMNRPALNEMLSKLHEIDAVVVYRLDRLSRSQRDTITLIEEYFLKNNVEFVSLSETLDTSSPFGRAMIGILSVFAQLERETIRDRMVMGKIKRIEAGLPLTTAKGRTFGYDVVDTKLYINEGEAKQLQLIYDIFEEEQSITLLQKRLKKLGFKVRTYNRYNSWLTNDLYCGYVSYKDKVHVKGIHEPIISEEQFYRVQEIFTRMGKNPNMNRDSASLLNNLVVCSKCGLGFVHRRKDTMSRGKKYHYRYYSCKTYKHIHELEKCGNKIWRADKLEELIINRVNNHSIASRNVDKEDELDSLNEKLKIEHAKKKRLFDLYINGSYEVSELDSMMNDIDAQISYYESQIEANEELKKNKKIQENLADLTTVDYDSLEFREKQLYLKSLISKIYIDGEQVTIEWL

SEQ ID NO: 6507 - protein, 469 aa, synthetic construct
MCYITPVRAAVYLRISEDRSGEQLGVARQREDCLKLCDQRKWVPVEYLDNDVSASTGKRRPAYEQMLADITAGKIAAVVAWDLDRLHRRPIELEAFMSLADEKRLALATVAGDVDLATPQGRLVARLKGSVAAHETEHKKARQRRAARQKAERGYPNWSKAFGYLPGPNGPEPDPRTAPLVKQAYADILAGASLGDVCRQWNDAGALTITGRPWTTTTLSKFLRKPRNAGLRAYKGARYGPVDRDAIVGKAQWSPLVDEVTFWAAQAVLDAPGRAPGRKSVRRHLLTGLAGCGKCGNHLAGSYRTDGRVVYVCKACHGVAILADNIEPILYHIVAERLAMPDAVDLLRREVHDAAEAEAIRLELGTLYGELDRLAVERAEGLLTARQVKISTDIVNAKITKLQACRLDQERLRVFDGIPLGTPQVAGMIAELSPDRFRAVLGVLAEVVVQPVGKGGRIFNPERVQVNWR

SEQ ID NO: 6508 - protein, 485 aa, synthetic construct
MTKKVAIYTRVSTTNQAEEGFSIDEQIDRLTKYAEAMGWQVSDTYTDAGLSGAKLERPAMQRLINDIENKAFDTVLVYKLDRLSRSVRDTLYLVKDVFTKNKIDFISLNECIDTSSAMGSLFLTILSAINEFERENIKERMTMGKLGRAKSGKSMMWTKTAFGYYHNRKTGILEIVPLQATIVEQIFTDYLSGISLTKLRDKLNESGHIGKDIPWSYRTLRQTLDNPVYCGYIKFKDSLFEGMHKPIIPYETYLKVQKELEERQQQTYERNNNPRPFQAKYMLSGMARCGYCGAPLRIVLGHKRKDGSRTMKYHCANRFPRKTKGVTVYNDNKKCDSGTYDLSNLENTVIDNLIGFQENNDSLLKTINGNNQPMLDTSSFKEQISQIDKKIQKNSDLYLNDFITMDELRDRTDSLQAEKKLLEAKISENKFNDSTDVFELVKTQLGSIPINELSYENKKKIVNNLVSKVDVTADNVDIIFKFQPA

SEQ ID NO: 6509 - protein, 452 aa, synthetic construct
MKAAIYIRVSTREQVENYSIQAQTEKLTALCRSKDWDVYDIFIDGGYSGSNMNRPALNEMLSKLHEIDAVVVYRLDRLSRSQRDTITLIEEYFLKNNVEFVSLSETLDTSSPFGRAMIGILSVFAQLERETIRDRMVMGKIKRIEAGLPLTTAKGRTFGYDVIDTKLYINEEEAKQLQLIYDIFEEERSITFLQKRLKKLGCKVRTYNCYNNWLTNDLYCGYVSYKDKVHVKGVHEPIISEEQFYRVQEIFTRMGKNPNMNRDSASLLNNLVVCSKCGLGFVHRRKDTTSRGKKYHYRYYSCKTYKHTHELEKCGNKIWRADKLEELIINRVSNYNFVRRSVDKEDELDSLNEKLKIEHAKRKRLFNLYINGNYEVSELDSMMNDIDAQINYYESQIEANGELKKNKKIQENLADLATVDYDSLEFREKQLYLKSLINKIYIDGEQVTIEWL

SEQ ID NO: 6510 - protein, 485 aa, synthetic construct
MTKKVAIYTRVSTTNQAEEGFSIDEQIDRLTKYAEAMGWQVSDTYTDAGFSGAKLERPAMQRLINDIETKAFDTVLVYKLDRLSRSVRDTLHLVKEVFTKNKIDFISLNESIDTSSAMGSLFLTILSAINEFERENIKERMTMGKLGRAKSGKSMMWTKTAFGYYHNRKTGILEIVPLQATIVEQIFTDYLSGISLTKLRDKLNESGHIGKDIPWSYRTLRQTLDNPVYCGYIKFKDSLFEGMHKPIIPYETYLKVQKELDERQQQTYERNNNPRPFQAKYMLSGMARCGYCGAPLRIVLGHKRKDGSRTMKYHCANRFPRKTKGVTVYNDNKKCDSGTYDLNNLENTVIDILIGFQENNESLLKIINGSNRPTLDTSSFKKQISQIDKKIRKNSDLYLNDFITMDELKDRTDSLQAEKKLLKAKISENNFNDSTDVFELVKTQLGSIPINELSYDDKKKIVNNLVSKVDVTADNVDIIFKFQLA

SEQ ID NO: 6511 - protein, 485 aa, synthetic construct
MTKKVAIYTRVSTTNQAEEGFSIDEQIDRLTKYAEAMGWQVSDTYTDAGVSGAKLERPAMQRLINDIENKAFDTVLVYKLDRLSRSVRDTLYLVKDVFTKNKIDFISLNESIDTSSAMGSLFLTILSAVNEFERENIKERMTMGKLGRAKSGKSMMWTKTAFGYYHNRKTGILEIVPLQATIVEQIFTDYLSGISLTKLRDKLNESGHIGKDIPWSYRTLRQTLDNPVYCGYIKFKDSLFEGMHKPIIPYETYLRVQKELEERQRQAYERNNNPRPFQAKYMLSGIARCGYCGAPLRIVLGRKRKDGSRTMKYHCANRFPRKTKGVTVYNDNKKCDSGTYDLSNLENTVIDNLIGFQENNDSQLKIINGNNQPMLDTSSFEKRISQIDKKIQKNSDLYLNDFITMDELKDRTDSLRAEKKLLKAKISENKFNDSTDVFELVKTQLGSIPIDELSYDDKKKIVNNLVSKVDVTADNVDIIFKFQLA

SEQ ID NO: 6512 - protein, 452 aa, synthetic construct
MKAAIYIRVSTREQVENYSIQAQTEKLTALCRSKGWDVYDIFIDGGYSGSNMNRPALNEMLSKLHEIDAVVVYRLDRLSRSQRDTITLIEEYFLKNNVEFVSLSETLDTSSPFGRAMIGILSVFAQLERETIRDRMVMGKIKRIEAGLPLTTAKGRTFGYDVIDTKLHINEEEAKQLQLIYDIFEEEQSITFLQKRLKKLGFKVRTYNCYNNWLTNDLYCGYVSYKDKVHVKGIHEPIISEEQFYRVQEIFARMGKNPNMNRDSASLLNNLVVCGKCGLGFVHRRKDAMSRDKKYHYRYYSCKTYKHIHELEKCGNKIWRADELEELIINRVNNYSLASRNVDKEDGLDSLNEKLKIEHAKKKRLFDLYLNGSYEVSELDSMMNDIDAQISYYESQIEANEELKKNKKIQENLAELATVDFDSLEFREKQLYLKSLINKIYIDGEQVTIEWL

SEQ ID NO: 6513 - protein, 485 aa, synthetic construct
MTKKVAIYTRVSTTNQAEEGFSIDEQIDRLTKYAEAMGWQVCDTYTDAGLSGAKLERPAMQRLINDIENKAFDTVLVYKLDRLSRSVRDTLYLVKDVFTKNKIDFISLNESIDTSSAMGSLFLTILSAINEFERENIKERMTMGKLGRAKSGKSMMWTRTAFGYHHNRKTGILEIVPLQATIVEQIFTDYLSGISLTKLRDKLNESGHIGKDIPWSYRTLRQTLDNPVYCGYIKFKDSLFKGMHKPIIPYETYLKVQKELEERQQQTYERNNNPRPFQAKYMLSGMARCGYCGAPLKIVLGHKRKDGSRTMKYHCANRFPRKTKGVTVHNDNKKCDSGTYDLRNLENAVIDNLIGFQENNDSLLKIINGNNQPILDSSSFKKQISQIDKKIQKNSDLYLNDFITMDELKDRTDSLQAEKKLLEAKISENKFNDSTDVFELVKTQLGSIPINELSYDNKKKIVNNLVSKVDVTADNVDIIFKFQLA

SEQ ID NO: 6514 - protein, 485 aa, synthetic construct
MTKKVAIYTRVSTTNQAEEGFSIDEQIDRLTKYAEAMGWQVSDTYTDAGLSGAKLERPAMQRLINDIENKAFDTVLVYKLDRLSRSVRDTLYLVKDVFTKNKIDFISLNESIDTSSAMGSLFLTILSAINEFERENIKERMTMGKLGRAKSGKSMMWTKTAFGYYHNRKTGILEIVPLQATVVEQIFTDYLSGISLTKLRDKLNESGHIGKDIPWSYRTLRQTLDNPVYCGYIKFKDSLFEGMHKPIIPYETYLKVQKELEERQQQTYERNNNPRPFQAKYMLSGMARCGYCGAPLRIVLGHKRKDGSRSMKYHCANRFPRKTKGVTVYNGNRKCDSGTYDLSNLENTVIDNLIGFQESNDSLLKVINGNNQPILDTSSFKKQISQIDKKIQKNSDLYLNDFITMDELKDRTDSLQAEKKLLKAKISENKFNDSADVFELVKTQLGSIPINELSYDNKKKIVNSLVSKVDVTADNVDIIFKFQLA

SEQ ID NO: 6515 - protein, 452 aa, synthetic construct
MKAAIYIRVSTQEQVENYSIQAQTEKLTALCRSKGWDVYDIFIDGGYSGGNMNRPALNEMLSKLHEIDAVVVYRLDRLSRSQRDTITLIEEYFLKNNVEFVSLSETLDTSSPFGRAMIGILSVFAQLERETIRDRMVMGKIKRIEAGLPLTTAKGRTFGYDVIDTKLYINEEEAKQLQLIYDIFEEEQSITSLQKRLKKLGFKVRTYNRYNSWLTNDLYCGYVSYKDKVHVRGIHEPIISEEQFYRVQEIFTRMGKNPNMNRVSASLLNNLVVCSKCGLGFVHRRKDTMSRGKKYHYRYYSCKTYKHTHELEKCGNKIWRADKLEELIINRVNDYSFASRNVDKAEELDSLNEKLKVEHAKKKRLFDLYINGSYNVSELDSMMNDIDAQINYYESQIEANEGLKKDKKIQESLANLATVDYDSLEFREKRLYLKSLINKIYIDGEQVTIEWL

SEQ ID NO: 6516 - protein, 469 aa, synthetic construct
MSYTTPVRAAVYLRISEDRSGEQLGVARQREDCLKLCGQRKWVPVEYLDNDVSASTGKRRPAYEQMLADITAGKIAAVVAWDLDRLHRRPVELEAFMSLADEKRLALATVAGDVDLATPQGRLVARLKGCVAAHETEHKKARQRRAARQKAERGHPNWSKAFGYLPGPNGPEPDPRTAPLVKQAYADILAGASLGDVCRQWNDAGAFTITGRPWTTATLSKFLRKPRNAGLRAYKGARYGPVDRDAIVGKAQWGPLVDEATFWAAQAVLDAPGRAPGRKSVRRHLLTGLAGCGKCGNHLAGSHRTDGQIVYVCKACHGVSILAVNIEPILYRIVAERLAMPDAVDLLRREIHDAAEAETIRLELETLYGELDRLAVERAEGLLTARQVKIGTDIVNAKITKLQACQLDQERLRVLDGIPLGTPQVAGMIAELSPDRFRAVLDVLAEVVVQPVGKSGRIFNPERVQVNWR

SEQ ID NO: 6517 - protein, 485 aa, synthetic construct
MTKKVAIYTRVSTTNQAEEGFSIGEQIDRLTKYAEAMGWQVSDTYTDAGFSGARLERPAMQRLINDIENEAFDTVLVYKLDRLSRSVRDTLYLVKDVFTKNKIDFISLNESINTSSAMGSLFLTILSAINEFERENIKERMTMGKLGRAKSGKSMMWTKAAFGYYHNRKTGILEIVPLQATIVEQIFTDYLSGISLTKLRDKLNESGHIGKDIPWSYRTLRQTLDNPVYCGYIKFKGSLFEGMHKPIIPYETYLKAQKELEERQQQTYERNNNPRPFQAKYMLSGMARCGYCGAPLRIVLGHKRKDGSRTMKYHCANRFPRKTKGVTVYNDNKKCDSGTYDLSNLENTVIDNLIGFQENNDSLLKIINGNNQPMLDTSSFKEQISQIDIKIQKNSDLYLNGFITMDELKDRTDSLQAEKRLLKAKIDENKFNDSTDVFELVKTQLGSIPINELSYDNKKKIVNNLVSKVDVTADNVDIIFKFQLA

SEQ ID NO: 6518 - protein, 452 aa, synthetic construct
MKAAIYIRVSTREQVENYSIQAQTERLTALCRSKDWDVYDIFIDGGYSGSNMNRPALNEMLSKLHEIDAVVVYRLDRLSRSQRDTITLIEEYFLKNNVEFVSLSETLDTSSPFGRAMIGILSVFAQLERETIRDRMVMGKIKRIEAGLPLTTAKGRTFGYDVIDTKLYINEEEAKQLQLIYDIFEEEQSITFLQKRLKKLGYKVRTYNRYISWLTNDLYCGYVSYKDKVHVKGIHEPIISEEQFYRVQEIFTRMGKNPNMNRDSASLLNNLVVCSKCGLGFVHRRKDTMSRGKKYHYRYYSCKTYKHTHELEKCGNKIWRADKLEELIIDRVNSYSFASRNVDKEDELDSLNEKLKIEHAKKKRLFDLYINGSYEVSELDCMMNEIDAQINYYESQIEANEELKKDKKIQENLANLATVDYDSLEFRKKQLYLKSLINKIYIDGEQVTIEWL

SEQ ID NO: 6519 - protein, 452 aa, synthetic construct
MKAAIYIRVSTREQVENYSIQAQTEKLTALCRSKDWDVYDIFIDGGYSGSNVNRPALNEMLSKLHEIDAVVVYRLDRLSRSQRDTITLIEEYFLKNNVEFVSLSETLDTSSPFGRAMIGILSVFAQLERETIRDRMVMGKIKRIEAGLPLTTAKGRTFGYDVIDTKLYINEEEAKQLRLVYDIFEEEQSITLLQKRLKKLGFKVRTYNRYNNWLTNDLYCGYVSYKDKVHVKGIHEPIISEEQFNRVQEIFTRMGKNPNMNRASASLLNNLVVCGKCGLGFVHRRKDAMSRDKKYHYRYYSCKTYKHIHELEKCGNKIWRADKLEDLIIDRVNSYSLVSRNVDKEDELDSLNEKLKIEHAKKKRLFDLYINGNYEVSELDSMMNDIDAQINYYEGQIEANEELKKNKKIQENLAYLATVDFDSLEFREKQLYLKSLINKIYIDGEQVTIEWL

SEQ ID NO: 6520 - protein, 469 aa, synthetic construct
MSYTTPVRAAVYLRISEDRSGEQLGVARQREDCLKLCGQRKWVPVEYLDNDVSASTGKRRPAYEQMLADITAGKIGAVVAWDLDRLHRRPVELEAFMSLADEKRLALATVAGDVDLATPQGRLVARLKGCVAAHETEHKKARQRRAARQKAERGLPNWSKAFGYLPGPNGPEPDSRTAPLVKQAYADILAGASLGDVCRQWNDAGAFTITGRPWTTTTLSKFLRKPRNAGLRAYKGARYGPVDRDAIVGKAQWSPLVDEATFWAAQAVLDAPGRAPGRKSVRRHLLTGLAGCGKCGNHLAGSYRTDGRVVYVCKACHGVSILAVNIEPILYHIVAERLAMPDAVDLLRREIHDAAEAETIRLELETLYGELDRLAVERAEGLLTARQVKISTDIVNAKITELQARQLDRERLRVFDGIPLGTPQVAGMIAELSPDRFRAVLDVLAEVVVQPVGKSGRISNPGRVQVNWR

SEQ ID NO: 6521 - protein, 452 aa, synthetic construct
MKAAIYIRVSTQEQVENYSIQAQTEKLTALCRSKDWDVYDIFIDGGYSGSNMNRPALNEMLSKLHEIDAVVVYRLDRLSRSQRDTTTLIEEYFLKNNVEFVSLSETLDTSSPFGRAMIGILSVFAQLERETIRDRMVMGKIKRIEAGLPLTTAKGRTFGYDVIDTKLYINEEEAKQLQLIYDIFEEEQSITSLQKRLKKLGFKVRTYNRYNSWLTNDLYCGYVSYKDKVHVKGIHEPIISEEQFYRVQEIFTRMGKSPNMNRDSASLLNNLVVCSKCGLGFVHRRKDTMSRGRKYHYRYYSCKTYKHTHELEKCGNKTWRADKLEELVINRVNNYSFASRNVDKEDELDSLNEKLKAEHAKRKRLFDLYINGSYEVSELDSMMNDIDAQINYYESQIEANEELKKNREIQENLADLATRDFDSLEFREKQLYLKSLINKIYIDGEQVTIEWL

SEQ ID NO: 6522 - protein, 485 aa, synthetic construct
MTKKVAIYTRVSTTNQAEEGFSIDEQIDRLTKYAEAMGWQVSGTYTDAGCSGAKLERPAMQRLINDVENKAFDTVLVYKLDRLSRSVRDTLYLVKDVFTKNKIDFISLNESIDTSSAMGSLFLTILSAINEFERENIKERMTMGKLGRAKSGKSMMWTKTAFGYYHNRKTGILEIVPLQAAIVEQIFTDYLSGISLTKLRDKLNESGHIGKDIPWSYRTLRQTLDNPVYCGYIKFKDSLFKGMHKPIIPYETYLKVQKELEERRQQTYERNNNPRPFQAKYMLSGIARCGYCGAPLKIVLGRKRKDGSRTMKYHCANRFPRKTKGITVYNDNKKCDSGTYDLSNLENTVIDNLIGFQENNDSLLKIINGNNQPILDTSSFEKQISQIDKKIQKISDLYLNDFITMDELKARTDSLQAEKKLLKAKISEDRFNDSTDVFELVKTQLGSIPINELSYDNKRKIVNNLVSKVDVTADNVNIIFKFQLA

SEQ ID NO: 6523 - protein, 452 aa, synthetic construct
MKAAIYIRVSTQEQVENYSIQAQTEKLTALCRSKDWDVYDIFIDGGYSGSNMNRPALNEMLSKLHEIDAVVVYRLDRLSRSQRDTTTLIEEYFLKNNVEFVSLSETLDTSSPFGRAMIGILSVFAQLERETIRDRMVMGKIKRIEAGLPLTTAKGRTFGYDVIDTKLYINEEEAKQLQLIYDIFEEERSITSLQKRLKKLGFKVRTYNRYNNWLTNDLYCGYVSYKDKVHVKGIHEPIISEEQFYRVQEIFTRMGKNPNMNRDSASLLSNLVVCSKCGLGFVHRSKDTMSRGKKYHYRYYSCKTYKHTHELEKCGNKTWRADKLEELIISRVNNYSFASRSVDKEDELDSLNEKLKTEHAKKKRLFDLYINGSYEVSELDSMMNDIDAQINYYESQIEANEELKKNKKIQENLADLATVDFDSLEFREKQLYLKSLINKIYIDGEQVTIEWL

SEQ ID NO: 6524 - protein, 485 aa, synthetic construct
MTKKVAIYTRVSTTNQAEEGFSIDEQIDRLTRYAEAMGWQVSDTYTDAGFSGARLVRPAMQRLINDIENKAFDTVLVYKLDRLSRSVRDTLYLVKDVFTKNKIDFISLSESIDTSSAMGSLFLTILSAINEFERENIKERMTMGKLGRAKSGKSMMWTKTAFGYYHNRKTGVLEIVPLQATIVEQIFTDYLSGISLTKLRDKLNESGHIGKDIPWSYRTLRQTLDNPVYCGYIKFKDSLFEGMHKPIIPYETYLKVQKELEERQQQTYERNNNPRPFQAKYMLSGMARCGYCGAPLRIVLGHKRKDGSRTMKYHCANRFPRRTKGITVYNDNKKCDSGTYDLSNLENTVIDNLIGFQEDNDSLLKIINGNNQPILDTSSFKKQISQIDEKIQKNSDLYLNGFITMDELKDRTDSLQAEKKLLKAKISENKFNDSTDVFELVKTQLGSIPINELSYDNKKKIVNNLVSKVDVTADNVDIIFKFQLA

SEQ ID NO: 6525 - protein, 452 aa, synthetic construct
MKAAIYIRVSTREQVENYSIQAQTEKLTALCRSKDWDVYDIFIDGGYSGSNMNRPALNEMLSKLHEIDAVVVYRLDRLSRSQRDTITLIEEYFLKNNVEFVSLSETLDTSSPFGRAMIGILSVFAQLERETIRDRMVMGKIKRVEAGLPLTTAKGRTFGYDVIDTKLYINEEEAKQLQLIYDIFEEEQSITFLQKRLKKLGLKVRTYSRYNNWLTNDLYCGYVSYKDKVHVKGIHEPIISEEQFYRVQEIFTRMGKDPNMNRDSASLLNGLVVCSKCGLGFVHRRKDTTSRGKKYHYRYYSCKTYKHTHELEKCGNKIWRADKLEGLIINRVNNYSFASRNADKEDELDSLNEKLEIEHAKKRRLFDLYINGSYELSELDSMMNDIDAQINYYGSQIEANEELKRNKKIQENLANLATVDYDSLEFREKQLYLKSLINKIYIDGELVTIEWL

SEQ ID NO: 6526 - protein, 469 aa, synthetic construct
MSYTTPVRAAVYLRISEDRSGEQLGVARQREDCLKLCDQRKWVPVEYLDNDVSASTGRRRPAYEQMLADITAGKIAAVVAWDLDRLHRRPIELEAFMSLADEKRLALATVAGDVDLATPQGRLVARLKGSVAAHETEHKKARQRRAARQKAERGHPNWCKAFGYLPGPNGPEPDPRIAPLVKQAYADILAGASLGDVCRQWNDAGAFTITGRPWATTTLSKFLRKPRNAGLRAYKGARYGPVDRDAIVGKAQWSPLVDEATFWAAQAVLDAPGRAPGRKSVRRHLLTGLAGCGKCGNHLAGSYRTDGRVVYVCKACHGVAILADNIEPILYHIVAERLAMPNAVDLLRCGIHDAAEAETIRLELETLYGELDRLAVERAEGLLTARQVKISTDIVSVKITKLQAHQLDQERLRVFDGIPLGTPQVADAIAELSPDRFRAVLDVLAEVVVQPVGKGGRIFNPERVQVNWR

SEQ ID NO: 6527 - protein, 469 aa, synthetic construct
MSYTTPVRAAVYLRISEDRSGEQLGVARQREDCLELCDQRKWVPVEYLDNDVSASTGKRRPAYEQMLADITAGKIAAVVAWDLDRLHRRPVELEAFMSLADEKRLALATVAGDVDLATPQGRLVARLKGSVAAHETEHKKARQRRAARQKAERGLPNWSKAFGYLPGPNGPEPDPRTAPLVKQAYADILAGASLGDVCRQWNDAGAFTITGRPWTTTTLSKFLRKPRNAGLRAYKGARYGPVDRDAIVGKAQWSPLVDETTFWAAQAVLDAPGRAPGRKSVRRHLLTGLAGCGKCGNHLAGSYRTDGRVVYVCKTCHGVAILADSIEPILYHIVAERLAMPDAVDLLRREIHDVAEAETIRLELETLYGELDCLAVERAEGLLTARQVKISTDIVNAKITKLQARQLDQKRLRVFDGIPLGTPQVAGMIAELSPDRFRAVLDVLAEVVVQPVGKGGRTFNPERVQVNWR

SEQ ID NO: 6528 - protein, 485 aa, synthetic construct
MTKKVAIYTRVSTTNQAEEGFSIDEQIDRLTKYAEAMGWQVSDTYTDAGSSGAKLERPAMQRLVNDIENKAFDTVLVYKLDRLSRSVRDTLYLVKDVFTKNKIDFISLNESIDTSSAMGSLFLTILSAINEFERENIKERMTMGKLGRAKSGKSMMWTKTAFGYYHNRNTGILEIVPLQATIVEQIFTDYLSGISLTKLRDKLNESGHIGKDIPWSYRTLRQTLGNPVYCGYIKFKDSLFEGMHKPIIPYETYLKVQKELEERQQQAYKRNNNPRPFQAKYMLSGMARCGYCGAPLKVVLGHKRKDGSRTMKYHCANRFPRKTKGITVYNDNKKCDSGTYDLSGLENTVIDNLIGFQENNDSLLKIINSNNQPILDTSSFEKQISQIDKKIQKNSDLYLNDFITMDELKARTDSLQAERKLLKAKVSENKFIDSTDVFELVKTQLGSIPINELSYDNKKKIVNNLVSKVDVTADNVDIIFKFQLA

SEQ ID NO: 6529 - protein, 452 aa, synthetic construct
MKAAIYVRVSTREQVENYSIQAQTEKLTALCRSKDWDVYDIFIDGGYSGSNMNRPALNEMLSKLHEIDAVVVYRLDRLSRSQRDTITLIEEYFLKNNVEFVSLSETLDTSSPFGRAMIGILSVFAQLERETIRDRMVMGKIKRIEAGLPLTTAKGRTFGYDVIDTKLYINEEEARQLQLIYDIFEEERSITFLQKRLKKLGFKVRTYNRYNNWLTNDLYCGYVSYKDKVHVKGIHEPIISEEQFYRVQEIFARMGKNPNMNRDSASLLNNLVVCSKCGLGFVHRRKDTKSRGKKYHYRYYSCKTYKHIHELEKCGNKIWRADRLEELIINRVNNYSLASRSVDKEDELDSLNEKLRVEHAKKKRLFDLYINGSYNVSELDSMMNDIDAQINYYESQIEANEELKKNKKIQENLADLATVDFDSLEFREKQQYLRSLINKIYIDGEQVTIEWL

SEQ ID NO: 6530 - protein, 452 aa, synthetic construct
MKAAIYIRVSTREQVENYSIQAQTEKLTALCRSKDWDVYDIFIDGGYSGSNMNRPALNEMLSKLHEIDAVVVYRLDRLSRSQRDTITLIEEYFLKNNVEFVSLSETLDTSSPFGRAMIGILSVFAQLERETIRDRMVMGKIKRVEAGLPLTTAKGRTFGYDVIDTKLYINEEEARQLRLIYDIFEEEQSIAFLQKRLKKLGFKVRTYNRYNNWLTNDLYCGYVSYKDKVHVKGIHEPIISEEQFRRVQEIFTRTGKNPNVNRDSASLLNNLVVCSKCGLGFVHRRKDTMSRGKKYHYRYYSCKTYKHTHELEKCGNKIWRADKLEELIINRVNNYSFASRNVDKEDELDSLNEKLKIEHARKKRLFDLYINGSYEVSELDSMMNDVDAQINYYESQIEANEELKKSKKVQENLASLATVDYDSLEFREKQLYLKSLINKIYIDGDQVTIEWL

SEQ ID NO: 6531 - protein, 452 aa, synthetic construct
MKAAIYIRVSTREQVENYSIQAQTEKLTALCRSKDWDVYDIFIDGGYSGSNMNRPALNEMLSKLHEIDAVVVYRLDRLSRSQRDTITLIEEYFLKNNVEFVSLSETLDTSSPFGRAMIGILSVFAQLERETIRDRMVMGKIKRIEAGLPLTTAKGRTFGYDVIDTKLYINEEEAKQLQLIYDIFEEEQSITFLQKRLKKLGFKVRSYNRYSNWLTNDLYCGYVSYKDKVHVKGIHEPIISEEQFYRVQEIFTRMGKNPNMNRDSASLLNNLVVCSKCGLSFVHRRKDAVSRDKKYHYRYYSCKTYKHIHELEKCGNKIWRADKLEELIINRVNDYSLASRNVDKEDELDSLNEKLRVEHAKKKRLFDLYINGSYEVSELDSMMNDIDAQINYYESQIEANEELKKNKKIQENLAYLATVDFASLEFREKQLYLKSLINKIYIDGEQVTIEWL

SEQ ID NO: 6532 - protein, 485 aa, synthetic construct
MTKKVAIYTRVSTTNQAEEGFSIDEQIDRLTKYAEAMGWRVSDTYTDAGFSGAKLVRPAMQRLINDIENKAFDTVLVYKLDRLSRSARDTLYLVKDVFTKNKIDFISLNEGIDTSSAMGSLFLTILSAINEFERENIKERMTMGKLGRAKSGKSMMWTKTAFGYYHNRKTGILEIVPLQATIVEQIFTDYLSGISLTKLRDKLNESGHIGKDIPWSYRTLRQTLDNPVYCGYIKFKDSLFEGMHKPIIPYETYLKVQKELEERQQQTYERNNNPRPFQAKYMLSGMARCGYCGAPLRIVLGHKRRDGSRTMKYHCANRFPRKTKGVTVYNDNKKCDSGTYDLSNLENTVIGNLIGFQENNDSLLKIINGNNQPILDTSCLKKQISQIDKKIQKNSDLYLNDFITLDELKERTDSLQVEKKLLKAKISENKFNDSTDVFELVKTQLGSIPINELSYDNKKKIVNNLVSKVDVTADNVDIIFKFQLA

SEQ ID NO: 6533 - protein, 485 aa, synthetic construct
MTKKVAIYTRVSTTNQAEEGFSIDEQIDRLTKYAEAMGWQVSDTYTDAGFSGAKLERPAMQRLINDIENKAFDTVLVYKLDRLSRSVRDTLYLVKDVFTKNKIDFISLNESINTSSAMGSLFLTILSAINEFERENIKERMTMGKLGRAKSGKSMMWTKTAFGYYHNRKTGILEIVPLQATIVEQIFTDYLSGISLTKLRDKLNESGHIGKDIPWSYRTLRQTLDNPVYCGYIKFKDSLFEGMHKPIIPYETYLKVQKELGERQQQTYERNNNPRPFQAKYMLSGMARCGYCGAPLRVVLGHKRKDGSRTMKYHCANRFPRRTKGVTVYNDNKKCDSGTYDLSNLENTVIDNLIGFQENNDSLLKIINGNNQPILDTSSFKKQISQIDKKIQKNSDLYLNDFITMDELKDRTDSLQAEKKLLKAKISENKFNDSTDVFELVKTQLGSTPINELSYDDKKKIVNNLVSKVDVTADNVDIIFKFQLA

SEQ ID NO: 6534 - protein, 452 aa, synthetic construct
MKAAIYIRVSTREQVENYSIQAQTEKLTALCRSKDWDVYDIFIDGGYSGSNMNRPALNEMLSKLHEIDAVVVYRLDRLSRSQRDTITLIEEYFLKNNVEFVSLSETLDTSSPFGRAMIGILSVFAQLERETIRDRMVMGKIKRVEAGLPLTTAKGRTFGYDVIDTKLYINEEEAKQLQLIYDIFEEEQSITSLQKRLKKLGFKVRTYNRYINWLTNDLYCGYVSYKDKVHVKGIHEPIVSEEQFCRVQEIFTRMGKNPNMNRDSASLLNNLVVCSKCGLGFVHRRKDTTSRGKKYHYRYYSCKTYKHTHELEKCGNKIWRADKLEELIINRVNNYSFASRSVDKAEELDSLNEKLKVEHAKKKRLFDLYINGSYNVSELDSMMNDIDAQINYYESQIGAYEKLKKNKRIQGNLADLATVDFDSLEFREKQLYLKSLINKIYIDGEQVTIEWL

SEQ ID NO: 6535 - protein, 469 aa, synthetic construct
MCYTTPVRAAVYLRISEDRSGEQLGVARQREDCLKLCDQRKWVPVEYLDNDVSASTGKRRPAYEQMLADITAGKIAAVVAWDLDRLHRRPIELEAFMSLADEKRLALATVAGDVDLATPQGRLVARLKGSVAAHETEHKKARQRRAARQKAERGHPNWSKAFGYLPGPNGPEPDPRTAPLVKQAYANILAGASLGDVCRQWNDAGAFTITGRPWTTTTLSKFLRKPRNAGLRAYKGARYGPVDRDAIVGKAQWSPLVDEATFWAAQAVLDAPGRAPGRKSVRRHLLTGLAGCGKCGNHLAGSYRTDGKVVYVCKACHGVAILADNIEPILYHIVAERLATPDAVDLLRRGIHDAAEAETIRLELETLYGELDRLAAERAEGLLTGRQVKISTDIVNAKITKLQARQLDQERLRVFDGIPLGTPQVAGMIAELSPDRFRAVLDVLAEVVVQPVGKSGRIFNPERVQVNWR

SEQ ID NO: 6536 - protein, 452 aa, synthetic construct
MKAAIYIRVSTQEQVENYSIQAQTEKLTALCRSKDWDVYDIFIDGGYSGSNMNRPALNEMLSKLHEIDAVVVYRLDRLSRSQRDTTTLIEEYFLKNNVEFVSLSETLDTSSPFGRAMIGILSVFAQLERETIRDRMVMGKIKRIEAGLPLTTAKGRTFGYDVIDTKLYINEEEAKQLRLIYDIFEEEQSITSLQKRLKGLGFKVRTYNRYNNWLTNDLYCGYVSYKDKVHVKGIHEPIISEEQFYRVQEIFARMGKKPNMNRDSASLLNNLVVCSKCGLGFVHRSKDTMSRGKKYHYRYYSCKTYKHTHELEKCGNKTWRADKLEELVINRVNNYSFASRNVDKEDVLDGLNEKLKIEHARKKRLFDLYINGSYEVSELDSMMNDIDAQINYYESQIEASEELKKNKKIQENLAELATVDFDSLEFREKQLYLKSLINKIYIDGEQVTIEWL

SEQ ID NO: 6537 - protein, 452 aa, synthetic construct
MKAAIYIRVSTQEQVGNYSIQAQTEKLTALCRSKDWDVYNIFIDGGYSGSNTNRPALNEMLSKLHEIDAVVVYRLDRLSRSQRDTTTLIEEYFLKNDVEFVSLSETLDTSSPFGRAMIGILSVFAQLERETIRDRMVMGKIKRIEAGLPLTTAKGRTFGYDVIDTKLYINEEEARQLRLIYDIFEEEQSITSLQKRLKKLGFKVRTYNRYHNWLTNDLYCGYVSYKDKVHVKGIHEPIISEEQFYRVQEIFTRMGKNPNMNRDSASLLSNLVVCSKCGLGFVHRRKDTMSRGKKYHYRYYSCKTYKHTHELEKCGNKTWRADKLEELIINRVNDYSFASRDVDKEDELDSLNEKLKTERAKKKRLFDLYINGGYEVSELDSMMSDIDAQIDYYESQIEAKEELRKNRKIQENLAGLATVDFDSLEFREKQLYLKSLINKIYIDGEQVTIEWL

SEQ ID NO: 6538 - protein, 485 aa, synthetic construct
MTKKVAIYTRVSTTNQAEEGFSIDEQIDRLTKYAEAMGWQVSDTYTDAGSSGAKLERPAMQRLINDIENKAFDTVLVYKLDRLSRSVRDTLYLVKDVFTKNKIDFISLNESIDTSSAMGSLFLTILSAINEFERENIKERMTMGKLGRAKSGKSMMWTRTAFGYYHNRKTGILEIVPLQATIVEQIFTDYLSGISLTKLRDKLNESGHIGKDIPWSYRTLRQTLDNPVYCGYIKFKGSLFEGMHKPIIPYETYLKVQKELEERQQQTYERNNNPRPFQAKYMLSGMARCGYCGAPLKIVLGHKRKDGSRTMKYHCANRFPRKTKGVTVYNDNKKCDSGTYDLSNLESTVIDSLIGFQENNDSLLKIINGNNRPILDTSSLKKQISQIDKKIQKNSDLYLNDFITMDELKDRTDSLQAEKKLLRAKISENKFNDSTDVFELVKTQLGSIPINELSYDNKKKIVNNLVSKVDVTADNVDIIFKFQLA

SEQ ID NO: 6539 - protein, 452 aa, synthetic construct
MKAAIYIRVSTREQVENYSIQAQTEKLTALCRSKDWDVYDIFVDGGYSGSNMNRPALNEMLSKLHEIDAVVVYRLDRLSRSQRDTITLIEEYFLKNNVEFVSLSETLDTSSPFGRAMIGILSVFAQLERETIRDRMVMGKIKRIEAGLPLTTAKGRTFGYDVVDTKLYINEEEAKQLRLIYDIFEEEQSITFLQKRLKELGFKVHTYNRYSNWLTNDLYCGYVSYKDKVHVKGIHEPIISEEQFYRVQEIFTRMGKNPNMNRDSASLLSNLVVCSKCGLGFVHRRKDTTSRGKKYHYRYYSCKTYKHIHELERCGNKIWRADKLEELIINRVNNYSFASRNVDKEDELDSLNEKLRIEHAKKKRLFDLYINGSYDVSELDSMMNDIDGQINYYESQIEANEELKKNKKIQENLAAPATVDFDSLEFREKQLYLKSLINKIYIDGEQVTIEWL

SEQ ID NO: 6540 - protein, 452 aa, synthetic construct
MKAAIYIRVSTREQVENYSIQAQTEKLTALCRSKDWDVYDIFIDGGYSGSNMNRPALNEMLSKLHEIDAVVVYRLDRLSRSQRDTITLIEEYFLKNNVEFVSLSETLDTSSPFGRAMIGILSVFAQLERETIRDRMVMGKIKRIEAGLPLTTAKGRTFGYDVIDTKLYINEEEAKQLQLIYDIFEEEQSITFLQKRLKELGFKVRTYNRYNNWLTNDLYCGYVSYKDKVHVKGIHEPIISEEQFYRVQEIFTRMGKNPNMNRDSASLLNNLVVCSKCGLGFVHRRKDTTSRGKKYQYRYYSCKTYKHTHELEKCGNKIWRADKLEELIINRVNNYSFASRNVDKEDELDSLNEKLKIEHAKKKRLFDLYINGSYEVSELDSMMNDIDAQINYYESQIEANEELRKNKKIQENLADLATVDFDSLEFREKQLYLKSLINKIYIDGEQVTIEWL

SEQ ID NO: 6541 - protein, 452 aa, synthetic construct
MKAAIYIRVSTQEQVGNYSIQAQTEKLTALCRSKDWDVYDIFIDGGYSGSNMNRPALNEMLSKLHEIDAVVVYRLDRLSRSQRDTTTLIEEYFLKNNVEFVSLSETLDTSSPFGRAMIGILSVFAQLERETIRDRMVMGKIKRIEAGLPLTTAKGRTFGYDVIDTKLYVNEEEAKQLQLIYDIFEEEQSITSLQKRLKKLGFKVRTYNRYNNWLTNDLYCGYVSYKDKVHVKGIHEPIISEEQFYRVQEIFTRMGKNPNMNRDSASLLSNLVVCSKCGLGFVHRSKDTRSRGKKYHYRYYSCKTYKHTHELEKCGNKTWRADKLEELIINRVNNYSFAGRNMVKEDELDSLNEKLKIEHAKKKRLFDLYINGSYEVSELDSMMNDIDAQINYYESQIEASEELKKNKKIQENLADLAAVDFDSLEFREKQLYLKGLISKIYIDGERVTIEWL

SEQ ID NO: 6542 - protein, 452 aa, synthetic construct
MKAAIYIRVSTQEQVGNYSIQAQTEKLTALCRSKDWDVYDIFIDGGYSGSNMNRPALNEMLSKLHEIDAVVVYRLDRLSRSQRDTITLVEEYFLKNNVEFVSLSETLDTSSPFGRAMIGILSVFAQLERETIRDRMVMGKIKRIEAGLPLTTAKGRTFGYDVIDTKLYINKEEAEQLQLIYDIFEEEQSITFLQKRLKKLGFKVRTYNRYNNWLTNDLYCGYVSYKDKVHVKGIHEPIISEEQFYRVQEIFTRMGKKPNMNRDSASLLNNLVVCSKCGLGFVHRSKDTMSRGKKYHYRYYSCKTYKHTHELEKCGNKIWRADKLEELIINRVNSYSSASRNVDKEDELDSLNEKLKIEHAKRKRLFDLYINGSYEVSELDSMMNDIDAQINYYESRIEANEELRKNKKIRENLADLATVDFESLEFREKQLYLKSLINKIYIDGEQVTIEWL

SEQ ID NO: 6543 - protein, 485 aa, synthetic construct
MTKKVAIYTRVSTTNQAEEGFSIDEQIDRLTKYAEAMGWRVSDTYTDAGFSGAKLERPAMQRLINDIENKAFDTVLVYKLDRLSRSVRDTLYLVKDVFTKSKIDFISLNENINTSSAMGSLFLTILSAINEFERENIKERMTMGKLGRARSGKSMMWAKTAFGYYHNRKTGILEIVPLQATIVEQIFTDYLSGISLTKLRDKLNESGHIGKDIPWSYRALRQTLDNPVYCGYIKFKDSLFEGMHKPIIPYETYLKVQKELEERQQQTYERNNNPRPFQAKYMLSGMVRCGYCGAPLRIVLGHRRKDGSRTMKYHCANRFPRKTKGVTVYNDNKKCDSGTYDLNNLENTVIDNLTGFQENNDSLLKIINGNNQPILDTSSFKKQISQIDKKIQKNSDLYLNDFITMSELKDRTDSLQAEKKLLEAKISENKFNDSTDVFELVKTQLGSIPINELSYDNKKKIVNNLVSKVDVTADNVDIIFKFQLA

SEQ ID NO: 6544 - protein, 452 aa, synthetic construct
MKAAIYIRVSTREQVENYSIQAQTEKLTALCRSKDWDVYDIFIDGGYSGSNMNRPALNEMLSRLHEIDAVVVYRLDRLSRSQRDTITLIEEYFLKNNVEFVSLSETLDTSSPFGRAMIGILSVFAQLERETIRDRMVMGKIKRIEAGLPLTTAKGRTFGYDVIDTKLYINEEEARQLQLIYDIFEEEQSITFLQKRLKELGFKVRTYNCYNNWLTNDLYCGYVSYKDKVHVKGIHEPIISEEQFYRVQEIFTRMGKNPNMNRDSASLLNNLVVCSKCGRGFVHRRKDAKSRDKKYHYRYYSCKTYKHIHELEKCGNKIWRADELEELIINRVNNYSLASRNVDKEDGLDSLNEKLKIEHAKKKRLFDLYLNGSYEVSELDSMMNDIDAQINYYESQIEASKELKKNRKIQENLADLATVDFDSLEFREKQRYLKSLINKIYIDGEQVTIEWL

SEQ ID NO: 6545 - protein, 485 aa, synthetic construct
MTRKVAIYTRVSTTNQAEEGFSIDEQIDRLTKYAEAMGWQVSDTYTDAGFSGAKLERPAMQRLINDIENKAFDTVLVYKLDRLSRSVRDTLYLVKDVFTKNRIDFISLSESIDTSSAMGSLFLTILSAINEFERENIKERMTMGKLGRAKSGKSMMWTKTAFGYYHNRKTGILEIVPLQATIVKQIFTDYLGGISLTKLRDKLNESGHIGKDIPWSYRTLRQTLDNPVYCGYIKFKDSLFEGMHKPIIPYETYLKVQKELEERQQQAYERNNNPRPFQAKYMLSGMARCGYCGAPLRIVLGHKRKDGSRTMKYHCANRFPRKTKGVTVYNDNKKCDSGTYDLSNLENTVIDSLIGFQENNDSLLKIINGNNQPILDASSFKKQISQIDKKIQKNSDLYLNDFITMDELKDRTDSLLAEKKLLKAKISENKFNDSTDVFELVKTQLGGIPINELSYDNKKKIVNNLVSKVDVTADNVDIIFKFQLA

SEQ ID NO: 6546 - protein, 452 aa, synthetic construct
MKAAIYIRVSTREQVENYSIQAQTEKLTALCRSKDWDVYDIFIDGGYSGSNMNRPALNEMLSKLHEIDAVVVYRLDRLSRSQRDTITLIEEYFLKSSVEFVSLSETLDTSSPFGRAMIGILSVFAQLERETIRDRMVMGKIKRIEAGLPLTTAKGRTFGYDVIDTKLYINEEEAKQLRLIYDIFEEEQSITFLQKRLKKLGFKVRTYNRYNNWLTNDLYCGYVSYKDKVHVKGIHEPIISEEQFYRVQEIFARMGKNPNMNRDSASLLNNLVVCSKCGLGFVHRRKDAMSRDKKYHYRYYSCKTYKHIHELEKCGNKIWRADRLEELIINRVNNYSLASRNVDKEDKLDSLNEKLKIEHAKKRRLFDLYINGSYEVSELDSMMSDIDAQINYYESQIEANEELKKNKKIQENLAHLATVDFDSLEFREKQLYLKSLIDKIYIDGEQVTIEWL

SEQ ID NO: 6547 - protein, 452 aa, synthetic construct
MKAAIYIRVSTREQVENYSIQAQTEKLTALCRSKDWDVYDIFIDGGYSGSNMNRPALNEMLSKLHEIDAVVVYRLDRLSRSQRDTITLIEEYFLKNNVEFVSLSETLDTSSPFGRAMIGILSVFAQLERETIRDRMVMGKIKRVEAGLPLTTAKGRTFGYDVIDTKLYINEEEAKQLQLIYDIFEEEQSITSLQKRLKKLGFKVRTYSCYNNWLTNDLYCGYVSYEDKVHVKGIHEPIISEEQFYRVQEIFTRMGKNPNMNRDSASLLNNLVVCSKCGLGFVHRRKDTMSRGKKYHYRYYSCKTYKHTHELEKCGNKIWRADKLEELIISRVNNYSFASRNADKEDELDSLNKKLKIEHAKKKRLFDLYINGSYEVSELDCMMNDINAQINYYESQIEANEELKKDKKIQESLANLAAVDYDSLEFREKQLYLKSLINKIYIDGEQVTIEWL

SEQ ID NO: 6548 - protein, 452 aa, synthetic construct
MKAAIYIRVSTREQVENYSIQAQTEKLTALCRSKDWDVYGIFIDGGYSGSNMNRPALNEMLSKLHEIDAVVVYRLDRLSRSQRDTITLIEEYFLKNNVEFVSLSETLDTSSPFGRAMIGILSVFAQLERETIRDRMVMGKIKRVEAGLPLTTAKGRTFGYDVVDTKLYINEEEAKQLQLIYDIFEEEQSITFLQKRLKKLGFKVHTYNRYNNWLTNDLYCGYVSYKDKVHVKGIHEPIISEEQFYRVQEIFARMGKNPNMNRGSASLLNNLVVCSKCGLGFVHRRKDTMSRGKKYHYRYYSCKTYKHIHELEKCGNKIWRADKLEELIINRVNNYSFASRNMDNEDELDGLNEKLKIEHAKKKRLFDLYISGSYEVSELDSLMNDIDAQINYYESQIRANEELKKNKKIRENLADLATVDFDSLEFREKQLYLKSLINKIYIDGEQVTIEWL

SEQ ID NO: 6549 - protein, 485 aa, synthetic construct
MTKKVAIYTRVSTTSQAEEGFSIDEQIDRLTKYAEAMGWQVSDTYTDAGFSGAKLERPAMQRLINDIENKAFDTVLVYKLDRLSRSVRDTLYLVKDVFTKNKIDFISLNESINTSSAMGSLFLTILSAINEFERENIKERMTMGKLGRAKSGKSMMWTKTAFGYYHNRKTGVLEIVPLQATIVEQIFTDYLSGISLTELRDKLNESGHIGKDIPWSYRTLRQTLDNPVYCGYIKFKDSLFEGMHKPIIPYETYLKVQKELEERQQQTYERNNNPRPFQAKYMLSGMARCGYCGAPLRVVLGHKRKDGSRTMKYHCANRFPRKTKGVTVYNDNKKCNSGTYDLSNLENTVIDNLIGLQEDNDSLLKIINGNNQPILDTSSFKKQISQIDKKIRNNSDLYLNDFITMDELKDRTDSLRAEKKLLKAKISENKFNDSTDVFELVKTQLGSIPINELSYDNKKKIVNNLVSKVDVTADNVDIIFKFQLA

SEQ ID NO: 6550 - protein, 452 aa, synthetic construct
MKAAIYIRVSTREQVENYSIQAQTEKLTALCRSKDWDVYDIFIDGGYSGSNMNRPALNEMLSKLHEIDAVVVYRLDRLSRSQRDTITLIEEYFLKNNVEFVSLSETLDTSSPFGRAMIGILSVFAQLERETIRDRMVMGKIKRIEAGLPLTTAKGRTFGYDVIDTKLYINEEEAKQLQLIYDIFEEEQSITFLQKRLKKLGFKVRTYNCYSNWLTNDLYCGYVSYKDKVHVKGIHEPIISEEQFYRVQEIFTRMGKNPNMNRDSASLLNNLVVCSKCGLGFVHRRKDAMSRDKKYHYRYYSCKTYKHIHELEKCGNKIWRADKLEELIINRVNNYSLASRNVDKEDGLDSLNEKLKIEHAKKKRLFDLYLNGSYEVSELESMMYDIDAQIGYYESQIEANEALKKSKKIQENLANLATVDFDSLEFREKQLYLKSLINKIYIDGEQVTIEWL

SEQ ID NO: 6551 - protein, 452 aa, synthetic construct
MKAAIYIRVSTREQVENYSIQAQTEKLTALCRSKDWDVYDIFIDGGYSGSNMNRPALNEMLSKLHEIDAVVVYRLDRLSRSQRDTVTLIEEYFLKNNVEFVSLSETLDTSSPFGRAMIGILSVFAQLERETIRDRMVMGKIKRIEAGLPLTTAKGRTFGYDVVDTKLYINEEEAKQLQLIYDIFEEEQSITFLQKRLKKLGFKVRTYNRYNSWLTNDLYCGYVSYKDKVHVKGIHEPIISEEQFCRVQEIFTRMGKNPNMNRDSASLLNNLVVCSKCGLGFVHRRKDTISRGKKYHYRYYSCKTYKHTHELEKCGNKIWRADKLEELIINRVNNYSFASRNVDKEDELDSLNEKLKIEHAKKKRLFDLYINGSYEVSELDSMMNNIDAQINYYESQIEANEELKKNKKIQENLANLATVDYNSLEFREKQLYLKSLINKIYIDGEQVTIEWL

SEQ ID NO: 6552 - protein, 452 aa, synthetic construct
MKAAIYIRVSTREQVENYSIQAQTEKLTALCRSKDWDVYDIFVDGGYSGSNMNRPALSEMLSKLHEIDAVVVYRLDRLSRSQRDTITLIEEYFLKNNVEFVSLSETLDTSSPFGRAMIGILSVFAQLERETIRDRVVMGKIKRIEAGLPLTTAKGRTFGYDVIDTKLYVNEEEAKQLQLIYDIFEEEQSITLLQKRLKKLGFKVRTYSRYNNWLTNDLYCGYVSYKDKVHVKGIHEPIISEEQFYRVQEIFTRMGKNPNMNRDSASLLNNLVVCSKCGLGFVHRRKDTTSRGKKYHYRYYSCKTYKHIHELERCGNKIWRADKLEELIINRVNNYNFANRSVDKADELDSLNEKLKIEHAKKRRLFDLYINGSYNVSELDSMMNDIDAQINYYESQIEANEGLKKNKKIQENLAGPATADFDSLEFREKQLYLRSLINKIYIDGEQVTIEWL

SEQ ID NO: 6553 - protein, 452 aa, synthetic construct
MKAAIYIRVSTREQVENYSIQAQTEKLTALCRSKDWDVYDIFIDGGYSGSNMNRPALNEMLSKLHEIDAVVVYRLDRLSRSQRDTITLIEEYFLKNNVEFVSLSETLDTSSPFGRAMIGILSVFAQLERETIRDRMVMGKIKRIEAGLPLTTAKGRTFGYDVVDTKLYINEEEAKQLRLIYDIFEEEQSITSLQKRLKKLGFKVRTYNRYNNWLTNDLYCGYVSYKDKVHVKGIHEPIISEEQFHRVQEIFARMGKNPNMNRGSASLLNNLVVCSKCGLGFVHRRKDAMSRDKKYHYRYYSCKTYKHIHELEKCGNKIWRADKLEELVINRVNNYSFASRNADKEDELDSLNEKLKVEHAKKKRLFDLYISGRYEVSELDSMMNDIDAQINYYESQIKASEELKKSKKIQENLADLATVDFDSLEFREKQLYLKSLINKIYIDGEQVTIEWL

SEQ ID NO: 6554 - protein, 469 aa, synthetic construct
MCYTTPVRAAVYLRISEDRSGEQLGVARQREDCLKLCGQRKWVPVEYLDNDVSASTGKRRPAYEQMLADITAGKIAAVVAWDLDRLHRRPVELEAFMSLADEKRLALATVAGDVDLATPQGRLVARLKGSVAAHETEHKKARQRRAARQKAERGYPNWSKAFGYLPGPNGPEPDPRTAPLVKQAYADILAGASLGDVCRQWNDAGAFTITGRPWTTTTLSKFLRKPRNAGLRAYKGARYGPVDRDAIVGKARWSPLVDEATFWAAQAVLDAPGRAPGRKSVRRHLLTGLAGCGKCGNHLAGSYRTDGRVVYVCKACHGVAILADNIEPILYHIVAERLAMPDAVDLLRREIHDAAEAETIRLGLETLYGELDRLAVERAEGLLTARQVKISTDIVNAKITKLQACQQDQERLRVLDGIPLGTPQVAGKIAELSPDRFRAVLGVLAEVVVQPVGKSGGIFNPERVRVNWR

SEQ ID NO: 6555 - protein, 486 aa, synthetic construct
MTKKVAIYTRVSTTNQAEEGFSIDEQIDRLTKYAEAMGWQVSDTYTDAGFSGAKLERPAMQRLINDIENKAFDTVLVYKLDRLSRSVRDTLYLVKDVFTKNKIDFISLSESIDTSSAMGSLFLTILSAINEFERENIKERMTMGKLGRAKSGKSMMWTKTAFGYYHNRKTGILEIVPLQATIVEQIFTDYLSGISLTKLRDKLNESGHIGKDIPWSYRALRQTLDNPVYCGYIKFKDSLFEGMHKPIIPYETFLKVQRELEERQQQTYERNNNPRPFQAKYMLSGMARCGYCGAPLRIVLGHKRKDGSRTMKYHCANRFPRKTKGITVYNDNKRCDSGTYDLSDLENTVIDNLTGFQENNDSLLKIINGNNQPILDTSSFKKQISQIDKKIQKNSDLYLNDFITMDELKDRTDSLQAEKKLLKAKISEDKFNDSTDVFELVKTQLGSIPISELSYDNKKKIVNNLVSKVDVTADNVDIIFKFQLAQ

SEQ ID NO: 6556 - protein, 485 aa, synthetic construct
MTKKVAIYTRVSTTNQAEEGFSIDEQVDRLTKYAEAMGWQVSDTYTDAGFSGAKLERPAMRRLIDDIENKAFDTVLVYKLDRLSRSVRDTLYLVKDVFTKNKIDFISLSESIDTSSAMGSLFLTILSAINEFERENIKERMTMGKLGRAKSGKSMMWTKTAFGYYHNRKTGILEIVPLQATIVEQIFTDYLSGISLTKLRDKLNESGHIGKDIPWSYRTLRQTLDNPVYCGYIKFKDSLFEGMHKPIIPYETYLKVQKELEVRQQQTYERNNNPRPFQAKYMLSGMARCGYCGAPLKIVLGHKRKDGSRTMKYHCANRFPRKTKGVTVYNDNKKCDSGTYDLSNLENTVIDSLIGFQENNDSLLRTINGNNQPILDTSSFKKQISQIDKKIQKNSDLYLDDFITMDELKARTDSLQAEKKLLKAKISENEFNDSTDVFELVKTQLGSVPINELSYDNKKKIVNNLVSKVDVTADNVDIIFKFQLA

SEQ ID NO: 6557 - protein, 452 aa, synthetic construct
MKAAIYIRVSTREQVENYSIQAQTEKLTALCRSKDWDVYDIFIDGGYSGSNMNRPALNEMLSKLHEIDAVVVYRLDRLSRSQRDTITLIEEYFLKNDVEFVSLSETLDTSSPFGRAMIGILSVFAQLERETIRDRMVMGKIKRIEAGLPLTTAKGRTFGYDVIDTKLYINEEEAKQLQLIYDIFEEERSITFLQKRLKKLGFKVRTYNRYTNWLTNDLYCGYVSYKDKVHVKGIHEPIISEEQFHRVQEIFARVGKNPNMNRDSASLLNNLVVCSKCGLGFVHRRKDTTSRGKKYHYRYYSCKTYKHIHELEKCGNKIWRADKLEELVISRVNDYSFASRNVDKEDELDSLNEKLKIEHAKKKRLVDLYINGSYEVSELDSMMSDIDAQINYYESQIEANEELKKNKKIQENLANLATVDYDSLEFREKQLYLKSLINKIYIDGEQVTIEWL

SEQ ID NO: 6558 - protein, 452 aa, synthetic construct
MKAAIYIRVSTQEQVENYSIQAQTEKLTALCRSKDWDVYDIFIDGGYSGSNMNRPALNEMLSKLHEIDAVVVYRLDRLSRSQRDTITLIEEYFLKHNVEFVSLSETLDTSSPFGRAMIGILSVFAQLERETIRDRMVMGKIKRVGAGLPLTTAKGRTFGYDVIDTKLYINEEEAKQLQLIYDIFEEEQSITFLQKRLKKLGFKVRTYNRYSNWLTNDLYCGYVSYKDEVHVKGIHEPIISEEQFYRVQEIFTRMGKSPNMNRDSASLLNNLVVCSKCGLGFVHRRKDTISRGKKYRYRYYSCKTYKHTHELEKCGNKIWRADKLEELIINRVNNYSFASRNVDKEDELDSLNEKLKIEHAKKKRLFDLYINGSYEVSELDSMMNDIDAQIDYYESQIEANEELKKNKKIQENLADLATVDFGSLEFREKQLYLKSLINKIYIDGEQVTIEWL

SEQ ID NO: 6559 - protein, 452 aa, synthetic construct
MKAAIYIRVSTREQVENYSIQAQTERLTALCRSKDWDVYDIFIDGGYSGSNMNRPALNEMLSKLHEIDAVVVYRLDRLSRSQRDTITLIEEYFLKNNVEFVSLSETLDTSSPFGRAMIGILSVFAQLERETIRDRMVMGKIKRIEAGLPLTTAKGRTFGYDVIDTKLYVNEEEAKQLQLIYDIFEEEQSITLLQKRLKKLGFKVRTYSRYNNWLTNDLYCGYVSYKDKVHVKGIHEPIISEEQFYRVQEIFARMGKNPNMNRDSASLLNSLVVCSKCGLGFVHRRKDTMSRGKKYHYRYYSCKTYKHTHELEKCGNKIWRADKLEELVISLVNNYSLASRNVDKEDELDSLNERLKVEHAKRKRLFDLYINGSYEVSELDSMMKDIDAQINYYESQIEANEGLKKNKKIQENLADLATVDFESLEFREKQLYLKGLINKIYIDGEQVTIEWL

SEQ ID NO: 6560 - protein, 469 aa, synthetic construct
MSYTTPVRAAVYLRISEDRSGEQLGVARQREDCLKLCGQRKWVPVEYLDNDVSASTGKRRPAYEQMLADITAGKIAAVVAWDLDRLHRRPIELEAFMSLADEKRLALATVAGDVDLATPQGRLVARLKGCVAAHETEHKKARQRRAARQKAERGHPNWSKAFGYLPGPNGPEPDPRTAPLVKQAYADILAGASLGDVCRQWNDAGAFTITGRPWSTTTLSKFLRKPRNAGLRAYKGARYGPVDRDAIVGKAQWSPLVDEATFWAAQAVLDAPGRAPGRKSVRRHLLTGLAGCGKCGNHLAGSYRTDGRVVYVCKACHGIAILADNIEPILYHIVAERLAMPDAVDLLHREIHDAAEAETIRLQLETLYGELDRLAVERAEGLLTARQVKISTDIVNAKIAKLQARQLDQGRLRVLDGIPLGTPQVAGVIAELSPDRFRAVLDVLAEVVVQPVGKSGRIFNPERVQVNWR

SEQ ID NO: 6561 - protein, 486 aa, synthetic construct
MTKKVAIYTRVSTTSQAEEGFSIDEQIDRLTKYTEAMGWQVSDTYTDAGFSGAKLERPAMQRLINDIENKAFDTVLVYKLDRLSRSVRDTLYLVKDVLTKNKIDFISLSESIDTSSAMGSLFLTILSAINEFERENIKERMTMGKLGRAKSGKSMMWTKTAFGYYHNRKTGILEIVPQQATIVEQIFTDYLSGISLTKLRDKLNESGHIGKDIPWSYRTLRQTLDNPVYCGYIKFKGSLFEGMHKPIIPYETYLKVQKELEERQQQAYERNNNPRPFQAKYMLSGMARCGYCGAPLRIVLGHKRKDGSRAMKYHCANRFPRKTKGVTVYNDNKKCDSGAYDLSNLENTVIDNLIGFQENSDSLLKIINGNNQPILDTISLKKQISQIDKKIQKNSDLYLNDFITMDELRDRTDSLQAEKKLLKARISENKFNDSTDVFELVKTQLGSISINELSYDNKKKIVNNLVSKVDVTADNVDIIFKFQLAY

SEQ ID NO: 6562 - protein, 469 aa, synthetic construct
MSYTTLVRAAVYLRISEDRSGEQLGVARQREDCLKLCDQRKWVPVEYLDNDVSASTGRHRPAYEQMLADITAGKIAAVVAWDLDRLHRRPIELEAFMSLADEKRLALATVAGDVDLATPQGRLVARLKASVAAHETEHKKARQRRAARQKAERGYPNWSKAFGYLPGPNGPEPDPRTAPLVKQAYADILAGASLGDVCRQWNDAGAFTITGRPWTTTALSKFLRKPRNAGLRAYKGARYGPVDRDAIVGKAQWSPLVDEATFWAAQAVLDAPGRAPGRKSVRRHLLTGLAGCGKCGNHLAGSYRTDGRVVYVCKACHGVAILADNIEPILYHTVAERLAMPDAVDLLRREIHDVAEAETIRLELETLYGELDRLAVERAEGLLTARQVKISTDIVNAKITKLQARQLDQERLRVFDGVPLGAPQVAGMIAELSPDRFRAVLDVLAEVVVQPVGKSGRIFNPERVQVNWR

SEQ ID NO: 6563 - protein, 469 aa, synthetic construct
MSYTTPVRAAVYLRISEDRSGEQLGVARQREDCLKLCGQRKWVPVEYLDNDVSASTGKRRPAYEQMLADIAAGKIAAVVAWDLDRLHRRPIELEAFMSLADEKRLALATVAGDVDLATPQGRLVARLKGSVAAHETEHKKARQRRAARQKAERGLPNWSKAFGYLPGPNGPEPDPRTAPLVKQAYADILAGASLGDVCRQWNGAGALTITGRPWTTTTLSKFLRKPRNAGLRAYKGARYGPVDRDAIVGKAQWSPLVDEATFWAAQAVLDAPGRAPGRKSVRRHLLTGLAGCGKCGNHLAGSYRTDGRVAYVCKACHGIAILADSIEPILYRIVAERLTMPDAADLLRREIHDAAEAETIRLGLETLYGELDRLAVERAEGLLTARQVKISTDIVNAKITKLQARQLDQERLRVLDGIPLGTPQAAGMIAELSPDRFRAVLDVLAEVVVQPVGKSGKVFNPERVQVNWR

SEQ ID NO: 6564 - protein, 452 aa, synthetic construct
MKAAIYIRVSTQEQVGNYSIQAQTEKLTALCRSKGWDVYDIFIDGGYSGSNMNRPALSEMLSKLHEIDAVVVYRLDRLSRSQRDTTTLIEEYFLKNNVEFVSLSETLDTSSPFGRAMIGILSVFAQLERETIRDRMVMGKIKRIEAGLPLTTAKGRTFGYDVIDTKLYINDEEARQLQLIYDIFEEEQSITLLQKRLKKLGFKVRTYNRYSNWLTNDLYCGYVSYKDKVHVKGIHEPIISEEQFYRVQEIFTRMGKNPNTNRDSASLLNNLVVCSKCGLGFVHRSKDTMSRGKKYHYRYYSCKTYKHTHELEKCGNKTWRADKLEELIINRVNDYSFTSRNVDKEDELDSLNEKLKVEHAKKKRLFDLYINGSYEVSELDSMMNDIDAQIDYYESQIEANEELKKDKKIQENLADLATVDFGSLEFREKQLYLKSLISKIYIDGDQVTIEWL

SEQ ID NO: 6565 - protein, 452 aa, synthetic construct
MKAAIYIRVSTQEQVGNYSIQAQTEKLTALCRSKDWDVYDIFIDGGYSGSNMNRPALNEMLSKLHEIDAVVVYRLDRLSRSQRDTTTLIEEYFLKNNVEFVSLSETLDTSSPFGRAMIGILSVFAQLERETIRDRMVMGKIKRIEAGLPLTTAKGRTFGYDVIDTKLYINEEEAKQLRLIYDIFEEEQSITFLQKRLKKLGFKVRAYNRYNNWLTNDLYCGYVSYKDKVHVKGIHEPIISEEQFYRVQEIFTRMGKNPNMSRDSASLLNNLVVCSKCGLSFVHRSKDTMSRGKKYHYRYYSCKTYKHTHELEKCGNKTWRADKLEELIINRVNNYSFASRNVDKEDELDSLNEKLKIEYAKKKRLFDLYINGSYEVSELDSMMNDIDAQINYYESQIAANEELKENKKIQGNLADLATVDFDSLGFREKQLYLKSLINKIYIDGEQVTIEWL

SEQ ID NO: 6566 - protein, 452 aa, synthetic construct
MKAAIYIRVSTREQVENYSIQAQTEKLTALCRSKDWGVYDIFIDGGYSGSNMNRPALNEMLSKLHEIDAVVVYRLDRLSRSQRDTITLIEEYFLKNNVEFVSLSETLDTSSPFGRAMIGILSVFAQLERETIRDRMVMGKIKRVEAGLPLTTAKGRTFGYDVIDTKLYINEEEARQLQLIYDIFEEEQSITFLQKRLKKLGFKVRTYNRYNSWLTNDLYCGYVSYKDKVHVKGIHEPIISEEQFYRVQEIFTRMGKNPNMNRDSASLLSNLVVCSKCGLGFVHRRKDTTSRGKKYHYRYYSCKTYKHIHELEKCGNKIWRADKLEELIINRVNNYSLASRNVDKEDELDSLNEKLKIEHAKKKRLFDLYINGSYEVSELDSMMNDIDAQINYYESQIEANEELKKDKKIQESLANLATVDYDSLEFREKQLYLKSLINKIYIDGEQVTIEWL

SEQ ID NO: 6567 - protein, 452 aa, synthetic construct
MKAAIYIRVSTREQVENYSIQAQTEKLTALCRSKDWDVYDIFIDGGYSGSNMNRPALNEMLSKLHEIDAVVVYRLDRLSRSQRDTITLIEEYFLKNNVEFVSLSETLDTSSPFGRAMIGILSVFAQLERETIRDRMVMGKIKRIEAGLPLTTAKGRTFGYDVIDTKLYINEEEAKQLQLIYDIFEEEQSITFLQKRLKKLGFKVRTYNRYISWLTNDLYCGYVSYKDKVHVKGIHEPIISEEQFYRVQEIFTRMGKNPNMNRDSASLLNNLVVCSKCGLGFVHRRKDTMSRGKKYHYRYYSCKTYKHTHELEKCGNKIWRADKLEELIINRVNNYSFASRNVDKEDGLDSLNEKLKIEHAKKKRLFDLYINGSYEVSELDSMMSDIDAQINYYESQIEANEELKKNKKIQENLANLATVDYDSLEFREKQLYLKSLINKIYIDGEQVTIEWL

SEQ ID NO: 6568 - protein, 485 aa, synthetic construct
MTKKVAIYTRVSTTNQAEEGFSIDEQIDRLTKYAEAMGWQVSGTYTDAGFSGAKLERPAMQRLINDIENKAFGTVLVYKLDRLSRSVRDTLYLVKDVFTKNKIDFISLNESIDTSSAMGSLFLTILSAINEFERENIKERMTMGKLGRAKSGKSMMWTKTAFGYYHNRKTGILEIVPLQAAIVEQIFTDYLSGISLTKLRDKLNESGHIGKDIPWSYRTLRQTLDNPVYCGYIKFKDSLFEGMHKPIIPYETYLKVQRELEERQQQTYERNNNPRPFQAKYMLSGMARCGYCGAPLRIVLGHKRKDGSRTMKYHCANRFPRKTKGITVYNDNKKCDSGTYDLSNLETTVIDNLIGLQENNDSLLKIINGNNQPILDTSSFKEQINQIDKKIQKNSDLYLNDFITMDELKDRTDTLQAEKKLLEAKISENKFNDSTDVFELVKTQLGSIPINELSYDNKKKIVNNLVSKVDVTADNVDIIFKFQPA

SEQ ID NO: 6569 - protein, 452 aa, synthetic construct
MKAAIYIRVSTREQVENYSIQAQTEKLTALCRSKDWDVYDIFIDGGYSGSNMNRPALNEMLSKLHEIDAVVVYRLDRLSRSQRDTITLIEEYFLKNNVEFVSLSETLDTSSPFGRAMIGILSVFAQLERETIRDRMVMGKIKRIEAGLPLTTAKGRTFGYDVIDTKLYINEEEAKQLQLIYDIFEEEQSITFLQKRLKKLGFKVCTYNRYNNWLTNDLYCGYVSYKDKVHVRGIHEPIISEEQFYRVQEIFTRMGKNPNMNRDSASLLNNLVVCSKCGLGFVHRRKDTMSRGKKYHYRYYSCKTYKHIHELEKCGNKIWRADKLEELVINRVNNYSFASRNVDKEDELDSLNEKLKIEHAKRKRLFDLHINGSYEVSELDSMMNDIDAQINYYESQIEANEELKKNKKIQENLANLATVDYDSLEFREKQLYLKSLINKIYIDGEQVTIEWL

SEQ ID NO: 6570 - protein, 452 aa, synthetic construct
MKAAIYIRVSTREQVENYSIQAQTEKLTALCRSKDWDVYDIFIDGGYSGSNMSRPALNEMLSKLHEIDAVVVYRLDRLSRSQRDTVTLIEEHFLKNNVEFVSLSETLDTSSPFGRAMIGILSVFAQLERETIRDRMVMGKIKRIEAGLPLTTAKGRTFGYDVIDTKLCTNEEEARQLRLIYDIFEEEQSITFLQRRLKKLGFKVRTYNRYHNWLTNDLYCGYVSYKDKVHVKGIHEPIISEEQFYRVQEIFTRMGKNPNMNRGSASLLNNLVVCSKCGLGFVHRRKDAMSRDKKYHYRYYSCKTYKHIHELEKCGNKIWRADKLEELIINRVNNYSLAGRNVDKEDELDSLNEKLKIEHAKKKRLFDLYINGSYEVSELDSMMSDIDAQINCYESQIEANEELKKNKRIQKNLADLATVDFDSLEFREKQLYLKSLINKIYIDGEQVTIEWL

SEQ ID NO: 6571 - protein, 485 aa, synthetic construct
MTKKVAIYTRVSTTNQAEEGFSIDEQIDRLTKYAEAMGWQVSDTYTDAGFSGAKLERPAMQRLINDIENKAFDTVLVYKLDRLSRSVRDTLYLVKDVFTKNKIDFISLNECIDTSSAMGSLFLTILSAINEFERENIKERMTMGKLGRAKSGKSMMWTKTAFGYYHNRKTGILEIVPLRATIVEQIFTDYLSGISLTKLRDKLNESGHIGKDIPWSYRTLRQTLDNPVYCGYIKFKDSLFEGMHKPIIPHETYLKVQKELEVRQQQTYERNNNPRPFQAKYMLSGMARCGYCGAPLRIVLGHKRKDGSRTMKYHCANRFPRRTKGITVYNDNKRCDSGTYDLSSLENTVIDILIGFQEDNDSLLKIINGNNQPILDTSSLEKQISQIDKKIQKNSDLYLNDFITMDELKDRTGSLQAEKKLLKAKISENKLNDSADVFELVKTQLGSIPINELSYDNKKKIVNNLVSKVDVTADNVDIIFKFQLA

SEQ ID NO: 6572 - protein, 452 aa, synthetic construct
MKAAIYIRVSTREQVENYSIQAQTEKLTALCRSKDWDVYDIFIDGGYSGSNMNRPALNEMLSKLHEIDAVVVYRLDRLSRSQRDTITLIEEYFLKNNVEFVSLSETLDTSSPFGRAMIGILSVFAQLERETIRDRMVMGKIKRIEAGLPLTTAKGRTFGYDVVDTKLYINEEEAKQLRLIYDIFEEVQSITCLQKRLKKLGFKVRTYNCYNNWLTNDLYCGYVSYKDKVHVKGIHEPIISEEQFYRVQEIFTRMGKNPNMNRDSASLLNNLVVCSKCGLGFVHRRKDTTSRGKKYHYRYYSCKTYKHIHELEKCGNKIWRADKLEELVINRVNNYSFASRDVDKEDELDSLYEKLKIEHTKKKRLFDLYINGSYEVSELDSMMNDIDAQIDYYEGQIEANEELKKNKKIQEDLTDLATVDYDSLEFREKQLYLKSLINKIYIDGEQVTIEWL

SEQ ID NO: 6573 - protein, 485 aa, synthetic construct
MTKKVAIYTRVSTTNQAEEGFSIDEQIDRLTKYAEAMGWQVSDTYTDAGSSGAKLERPAMQRLINDIENKTFDTVLVYKLDRLSRSVRDTLYLVKDVFTKNKIDFISLNESIDTSSAMGSLFLTILSAINEFERENIKERMTMGRLGRAKSGKSMMWTKTAFGYYHNRKTGILEIVPLQATIVEQIFTDYLSGISLTKLRDKLNESGHIGKDIPWSYRTLRQTLDNPVYCGYIKFKDSLFEGMHKPIIPYETYLKVQKELEERQQQTYERNNNPRPFQAKYMLSGKARCGYCGAPLRIVLGHRRKDGSRTMKYHCANRFPRKTKGVTAYNDNKKCDSGTYDLSNLENTVIDYLIGFQENNDSLLKIIVGNNQPILDTSSFKKQISQIDKKIQKNSDLYLNDFITMDELKDRTDSLQAEKRLLEAKISENKFNDSTDVFELVKAQLGSIPINELSYDNKKKIVNNLVSKVDVTADSVDIIFKFQPA

SEQ ID NO: 6574 - protein, 452 aa, synthetic construct
MKAAIYIRVSTQEQVGNYSIQAQTEKLTALCRSKGWDVYDIFIDGGYSGSNMNRPALNEMLSRLHEIDAVVVYRLDRLSRSQRDTTTLIEEYFLKNNVEFVSLSETLDTSSPFGRAMIGILSVFAQLERETIRDRMMMGKIKRIEAGLPLTTAKGRTFGYDVIDTKLYINEEEAKQLQLIYDIFEEEQSITSLQKRLKKLGFKVRTYNRYNNWLTNDLYCGYVSYKDKVHVKGIHEPIISEEQFYRVQEIFARMGKNPNMNRASASLLGNLVVCSKCGLGFVHRSKDTMSRGKKYHYRYYSCKTYKHTHELEKCGNKTWRADILEELIINRVNNYSLVSRNVDKEDELDSLNEKLKIEHAKKKRLFDLYINGSYEVSELDSMMNDIDAQINYYESQIEANEKLRKNKKIQENLADLATADFDSLEFREKRLYLKSLINKIYIDGEQVTIEWL

SEQ ID NO: 6575 - protein, 452 aa, synthetic construct
MKAAIYIRVSTQEQVENYSIQAQTEKLTALCRSKDWDVYDIFIDGGYSGSNMNRPALNEMLSKLHEIDAVVVYRLDRLSRSQRDTTTLIEEYFLKNNVEFVSLSETLDTSSPFGRAMIGILSVFAQLERETIRDRMVMGKIKRIEAGLPLTTAKGRTFGYDVIDTKLYINEEEAKQLRLIYDIFEEEQSITSLQKRLKKLGFKVRTYNRYNNWLTNDLYCGYVSYKDKVHVKGIHEPIISEEQFFRVQEIFTRMGKNSNMNRGSASLLNNLVVCSKCGLSFVHRSKDTMIRGKKYHYRYYSCKTYKHTHELEKCGNKTWRADKLEELIIYRVNNYSFASHNVDKEDELDSLNEKLKIEHAKKRRLFDLYINGSYEVSELDSMMNDIDAQINYYESQIEANEELRKNKKIQENLADLAAVDFDSLEFREKRLYLKSLINKIYIDGEQVTIEWL

SEQ ID NO: 6576 - protein, 485 aa, synthetic construct
MTKKVAIYTRVSTTNQAEEGFSIDEQIDRLTKYAEAMGWRVSDTYTDAGSSGAKLERPAMQRLINDIENKVFDTVLVYKLDRLSRSVRDTLYLVKDVFTKNKIDFISLNESIDTSSAMGSLFLTILSAINEFERENIKERMTMGKLGRAKGGKSMMWTKTAFGYYHNRKTGILEIVPLQATIVKQIFTDYLSGISLTKLRDKLNESGHIGKDIPWSYRTLRQTLDNPVYCGYIKFKGSLFEGMHKPIIPYETYLKVQKELEKRQQQTYERNNNPRPFQAKYMLSGMARCGYCGAPLRIVLGHKRKDGSRTMKYHCANRFPRKTKGITVYNDNKKCDSGAYDLSNLENTVVDNLVGLQENNDCLLKIINGNNQPILDTSSFKKQISQIDEKIQKNSDLYLNDFITMDELKDRTDSLQAEKKLLKAKISENESNGSSDVFERVKTQLGSIPINELSYDNKKKIVNSLVSKVDVTADNVDIIFKFQLA

SEQ ID NO: 6577 - protein, 452 aa, synthetic construct
MKAAIYIRVSTQEQVGNYSIQAQTEKLTALCRSKDWDVYDIFIDGGYSGSNMNRPALNEMLSKLHEIDAVVVYRLDRLSRSQRDTTTLIEEYFLKNNVEFVSLSETLDTSSPFGRAMIGILSVFAQLERETIRDRMVMGKIKRIEAGLPLTTAKGRTFGYDVIDTKLYINEEEAKQLRLIYDIFEEEQSITFLQKRLKKLGLKVHTYNRYNNWLTNDLYCGYVSYKDKVHVKGIHEPIISEEQFYRVQEIFTRMGKKPNMNRDSASLLNNLVVCSKCGLGFVHRSKDTMSRGKKYHYRYYSCKTYKHTHELEKCGNKTWRADKLEELIINRVNDYSFASRNVDKEDELDSLSEKLETERAKKKRLFDLYINGSYGVSELDSMMNDIDAQINYYESQIKANEELRKNRKIQENLADLATVDFDSLEFREKQLYLKSLINKIYIDGEQVTIEWL

SEQ ID NO: 6578 - protein, 452 aa, synthetic construct
MKAAIYIRVSTREQVENYSIQAQTEKLTALCRSKDWDVYDIFVDGGYSGSNMNRPALNEMLSKLHEIDAVVVYRLDRLSRSQRDTITLIEEYFLKNNVEFVSLSETLDTSSPFGRAMIGILSVFAQLERETIRDRMVMGKIKRIEAGLPLTTAKGRTFGYDVIDTKLYINEEEAKQLQLIYDIFEEVQSITFLQKRLKKLGFKVRPYNRYNNWLTNDLYCGYVSYKDKVHVKGIHEPIISEEQFYRVQEIFTRMGRNPNMNRDSASLLNNLVVCSKCGLGFVHRRKDIMSRGKKYHYRYYSCKTYKHIHELEKCGNKIWRADKLEELIISRVNSYSFASRNADKEDELDSLNEKLKAEHAKKRRLFDLYINGSYEVSELDSMMNDIDAQINYYESQIEANEELKKNKKIQENLAYLATVDFDSLEFREKQLYLKSLINKIYIDGEQVTIEWL

SEQ ID NO: 6579 - protein, 452 aa, synthetic construct
MKAAIYIRVSTREQVENYSIQAQTEKLTALCRSKDWDVYDIFIDGGCSGSNMNRPALNEMLSKLHEIDAVVVYRLDRLSRSQRDTITLIEEYFLKNNVEFVSLSETLDTSSPFGRAMIGILSVFAQLERETIRDRMVMGKIKRIEAGLPLTTAKGRTFGYDVIDTKLYINEEEAKQLRLIYDIFEEEQSITFLQKRLKKLGFKVRTYNCYNNWLTNDLYCGYVSYKDKVHVKGIHEPIISEEQFYRVQEIFTRMGKNPNMNRDSASLLNNLVVCSKCGLGFVHRRKDTTSRGKKYRYRYYSCKTYKHTHELEKCGNKIWRADKLEELIINRVNNYSLASRNVDREDELDGLNEKLKIEHAKKKRLLDLYINGSYEVSELDSVMNDIDAQINYYESQIEANEELRRGKKIQENLANLATVDFDSLEFREKQLYLKSLINKIYIDGEQVTIEWL

SEQ ID NO: 6580 - protein, 469 aa, synthetic construct
MSYTTPVRAAVYLRISEDRSGEQLGVARQREDCLKLCDQRKWVPVEYLDNDVSASTGKRRPAYEQMLADITAGKIGAVVAWDLDRLHRRPVELEAFMSLADEKRLALATVAGDVDLATPQGRLVARLKGCVAAHETEHKKARQRRAARQKAERGHPNWSKAFGYLPGPNGPEPDPRTAPLVKQAYADILAGASLGDVCRQWNDAGAFTITDRPWSTTTLSKFLRKPRNAGLRAYKGARYGPVDRDAIVGKAQWSPLVDEATFWAAQAVLDAPGRAPGRKSVRRHLLTGLAGCGKCGNHLAGSCRTDGRVVYVCKACHGVAILADNIEPILYHIVAERLAMPDAVDLLRREIRDAAEAEAIRLELETLYGELDRLAVERAEGLLTARQVKISTDIVNAKITKLQARQLDQERLRVFNGIPLGTPQVAGVIAELSPDRFRAVLDVLAEVVVQPVGKGGRIFSPERVQVNWR

SEQ ID NO: 6581 - protein, 485 aa, synthetic construct
MTKKVAIYTRVSTTNQAEEGFSIDEQVDRLTKYAEAMGWQVSGTYTDAGFSGAKLERPAMQRLINDIENKAFDTVLVYKLDRLSRSVRDTLYLVKEVFTKNKIDFISLNESIDTSSAMGSLFLTILSAINEFERENIKERMTMGKLGRAKSGKSMMWTKTAFGYYHNRKTGILEVVPLQATIVEQIFTDYLSGISLTKLRDKLNESGHIGKDIPWSYRTLRQTLDNPVYCGYIKFKDSLFEGMHKPIIPYETYLKVQKELEERQQQTYERNNNPRPFQAKYMLSGMARCGYCGAPLRIVLGHKRKDGSRTMKYHCANRFPRKTKGVTVYNDNKKCDSGTYDLSNLENAVIDILIGFQENNDSLLKIINGNNQPILDTSSFKKRISQIDKKIQKNSELYLNDFITMDELKDRTDSLQAEKKLLKAKISENKFNDSTDVFELVKTQLGSIPINELSYDNKKKIVNNLVSKVDVTADNVDIIFKFQLA

SEQ ID NO: 6582 - protein, 469 aa, synthetic construct
MSYTTPVRAAVYLRISEDRSGEQLGVARQREDCLKLCGQRKWVPVEYLDNDVSASTGKRRPAYEQMLADIAAGKIAAVVAWDLDRLHRRPVELEAFMSLADEKRLALATVAGDVDLATPQGRLVARLKGSVAAHETEHKKARQRRAARQKAERGLPNWSKAFGYLPGPNGPEPDPRTAPLVKQAYADILAGASLGDVCRQWNDAGALTITGRPWTTTTLSKFLRKPRNAGLRAYKGARYGPVDRDAIVGKAQWSPLVDEATFWAAQAVLDAPGRAPGRKSVRRHLLTGLAGCGKCGNHLAGSYRTDGQIVYVCKACHGVSILAVNIEPFLYHIVAERLAMPNAVDLLRREIHDAAEAETIRLELEALYGELDRLAVERAEGLLTARQVKISTDIVNAKITKLQARQLDQERLRVFDGIPLGTPQVAGMIAELSPDRFRAVLDVLAEVVVQPVGKSGRILNPERVQVNWR

SEQ ID NO: 6583 - protein, 469 aa, synthetic construct
MSYTAPVRAAVYLRISEDRSGEQLGVARQREDCLKLCGQRKWAPVEYLDNDVSASTGKRRPAYEQMLADITAGKIAAVVAWDLDRLHRRPIELEAFMSLADEKHLALATVAGDVDLATPQGRLVARLKGSVAAHETEHKKARQRRAARQKAERGLPNWSKAFGYLPGPNGPEPDPRTAPLVKQAYADILAGASLGDVCRRWNDAGAFTITGRPWTTTTLSKFLRKPRNAGLRAYKGARYGPVDRNTIVGKAQWSPLVDEATFWAAQAVLDAPGRAPGRKSVRRHLLTGLAGCGKCGNHLAGSYRTDGRVVYVCKACHGVAILADNIEPILYHIVTERLAMPDAVDLLRREIHDAAEAETIRLELETLYGELDRLAVERAEGLLTARQVKISTDIVNAKITKLQARQLDQERLRVFDGIPLGTPQVAGMIAELSPDRFRAVLDVLAEVVVQPVGKGSRIFNPERVQVNWR

SEQ ID NO: 6584 - protein, 452 aa, synthetic construct
MKAAIYIRVSTREQVENYSIQAQTEKLTALCRSKDWDVYDIFIDGGYSGSNMNRPALNEMLNKLHEIDAVVVYRLDRLSRSQRDTITLIEEYFLKNNVEFVSLSETLDTSSPFGRAMIGILSVFAQLERETIRDRMVMGKIKRIEAGLPLTTAKGRTFGYDVIDTKLYINEEEAKQLQLIYDIFEEEQSITFLQKRLKKLGFRVRTYNRYNNWLTNDLYCGYVSYKDKVHVKGIHEPIISEEQFHRVQEIFARMGKNPNMNRGSASLLNNLVVCSKCGLGFVHRRKDAMSRDKKYHYRYYSCKTYKHIHELEKCGNKIWRADELEELVINRVNSYSVASRNVDKEDELGSLNEKLKIEHAKKKRLLDLYINGSYEVSELDSMMNDIDAQINYYESQIEANEELKKSKKIQENLAHLATVDFDSLEFREKQLYLKSLINKIYIDGEQVTIEWL

SEQ ID NO: 6585 - protein, 452 aa, synthetic construct
MKAAIYIRVSTQEQVENYSIQAQTEKLTALCRSKDWDVYDIFIDGGYSGSNMNRPALNEMLSKLHEIDAVVVYRLDRLSRSQRDTTTLIEEYFLKNNVEFVSLSETLDTSSPFGRAMIGILSVFAQLERETIRDRMMMGKIKRIEAGLPLTTAKGRTFGYDVIDTKLYINEEEAKQLRLIYDIFEEERSITSLQKRLKKLGFKVRTYNRYNSWLTNDLYCGYVSYKDKVHVKGIHEPIISEEQFYRVQEIFTRMGKNPNMNRDSASLLSNLVVCSKCGLGFVHRRKDTMSRGKKYHYRYYSCKTYKHTHELERCGNKTWRADKLEELIINRVNNYSFASRNADKEDELDSLNEKLKTEHARKKRLFDLYINGGYEVSELDSMMNDIDAQINYYGNQIEANEEQKKNRKIQENLADLATVDFDSLEFREKQLYLKSLINKIYIDGEQVTIEWL

SEQ ID NO: 6586 - protein, 452 aa, synthetic construct
MKAAIYIRVSTREQVENYSIHAQTEKLTALCRSKGWDVYDIFIDGGYSGSNMNRPALNEMLSKLHEIDAVVVYRLDRLSRSQRDTITLIEEYFLKNNVEFVSLSETLDTSSPFGRAMIGILSVFAQLERETIRDRMVMGKIKRIEAGLPLTTAKGRTFGYDVIDTKLYINEEEAKQLRLVYDIFEEEQSITSLQKRLKELGFKIRTYNRYNNWLTNDLYCGYVSYKDKVHVKGIHEPIISEEQFYRVQEIFTRMGKNPNMNRDSASLLNNLVVCSKCGRGFVHRRKDAKSRDKKYHYRYYSCKTYKHIHELEKCGNKIWRADKLEELIINRVNNYSLAGRNVDKEDELDSLNEKLKTEHAKKKRLFDLYINGSYEVSELDSMMSDIDAQINYYESQIEAKEELKKNKKIQENLADLATVDYDSLEFREKQLYLKSLINKIYIDGEQVIIEWL

SEQ ID NO: 6587 - protein, 452 aa, synthetic construct
MKAAIYIRVSTREQVENYSIQAQTEKLTALCRSKDWDVYDIFIDGGYSGSNMNRPALNEMLSKLHEIDAVVVYRLDRLSRSQRDTITLIEEYFLKNNVEFVSLSETLDTSSPFGRAMIGILSVFAQLERETIRDRMVMGKIKRVEAGLPLTTARGRTFGYDVIDTKLYINEEEAKQLQLIYDIFEEEQSITFLQKRLKNLGFKVRSYNRYNNWLTNDLYCGYVSYKDKVHVKGIHEPIISEEQFYRVQEIFTRMGKNPNVNRDSASLLNNLVVCSKCGLGFVHRRKDTMSRGKKYHYRYYSCKTYKHTHELEKCGNKIWRADKLEELIINRVNNYGLARRNVDKEDELDSLNEKLKIEHARKKRLFDLYINGSYEVGELDSMMNDIDAQINYYESQIEANEELKKSKKIQENLANLATVDFDSLEFREKQLYLKSLINKIYIDGEQVTIEWL

SEQ ID NO: 6588 - protein, 485 aa, synthetic construct
MTRKVAIYTRVSTTNQAEEGFSIGEQIDRLTKYAEAMGWQVCDTYTDAGFSGAKLERPAMQRLINDIENKAFDTVLVYKLDRLSRSVRDTLYLVKEVFTKNKIDFISLNESIDTSSAMGSLFLTILSAINEFERENIKERMTMGKLGRAKSGKSMMWTKTAFGYYHNRKTGILEIVPLQATIVEQIFTDYLSGISLTKLRDKLNESGHIGKDIPWSYRTLRQTLDNPVYCGYIKFKDSLFRGMHRPIIPYETYLKVQKELEVRQQQTYERNNNPRPFQAKYMLSGMARCGYCGAPLKIVLGHKRKDGSRTMKYHCANRFPRKTKGITVYNDNKKCDSGAYDLSNLENTVIDNLIGFQENNDSLLKIINGNNQPILDTSSFKKQISQIDKKIQKNSDLYLNDFITMDELRDRTDSLQAEKKLLKAKIGENKFSDSTDVFELVKTQLGGIPINELSYDDKKKIVNNLVGKVDVTADNVDIIFKFQLA

SEQ ID NO: 6589 - protein, 485 aa, synthetic construct
MTKKVAIYTRVSTTNQAEEGFSIDEQTDRLTKYAEAMGWQVSDTYTDAGFSGAKLERPAMQRLINDIENKAFDTVLVYKLDRLSRSVRDTLYLVKEVFTKNKIDFISLSESIDTSSAMGSLFLTILSAINEFERENIKERMTMGKLGRAKSGKSMMWAKTAFGYYHNRKTGILETVPLQATIVEQIFTDYLSGISLTKLRDKLNESGHIGKDIPWSYRTLRQTLDNPVYCGYIKFKGSLFEGMHKPIIPYETYLKVQKELEERQQQTYERNNNPRPFQAKYMLSGMARCGYCGAPLKIVLGHKRKDGSRTMKYHCANRFPRKTKGVTVYNDNKKCDSGTYDLNNLENTVIDNLIGFQENNDSLLKIINGNNQPILDTSSFKKQISQIDKKIQKNSDLYLNGFITMDELKDRTDSLQAEKKLLKAKIGENKSIDNTDVFELVKTQLGSIPINELSYDNKKKIVNDLVSKVDVTADNVDIIFKFQLA

SEQ ID NO: 6590 - protein, 452 aa, synthetic construct
MKAAIYIRVSTREQVENYSIQAQTEKLTALCRSKDWDVYDIFIDGGYSGSNMNRPALNEMLSKLHEIDAVVVYRLDRLSRSQRDTITLIEEYFLKNNVEFVSLSETLDTSSPFGRAMIGILSVFAQLERETIRDRMVMGKIKRIEAGLPLTTAKGRTFGYDVIDTKLYINEEEAKQLQLIYDIFEEEQSITFLQKRLKKLGFKVRSYNRYNNWLTNDLYCGYVSYKDKVRVKGIHEPIISEEQFYRVQEIFTRMGKNPNMNRDSASLLNNLVVCSKCGLGFVHRRKDIMSRGKKYHYRYYSCKTYKHIHELEKCGNKIWRADKLEELIINRVNDYSLASRNVDKEGELDSLNEKLKNEHAKKKRLFDLYINGSYEVSELDSMMSDIDAQISNYESQIEANEELKKNKKIRENLADLATVDFDSLEFREKQRYLKSLINKIYIDGEQVTIEWL

SEQ ID NO: 6591 - protein, 452 aa, synthetic construct
MKAAIYIRVSTREQVENYSIQAQTEKLTALCRSKDWDVYDIFIDGGYSGSNMNRPALNEMLSKLHEIDAVVVYRLDRLSRSQRDTITLIEEYFLKNNVEFVSLSETLDTSSPFGRAMIGILSVFAQLERETIRDRMVMGKIKRIEAGLPLTTAKGRTFGYDVIDTKLYINEEEARQLRLIYDIFEEEQSITFLQKRLKKLGFKVRTYNRYNNWLTNDLYCGYVSYKDKVHVKGIHEPIISEEQFYRVQEIFARMGKSPNMNRDSASLLNSLVVCGKCGLGFVHRRKDIMSRGKKYHYRYYSCKTYKHIHELEKCGNKIWRADKLEELIINRVSNYSLAGRNVDKEDELDSLNEKLKIEHAKKKRLFELYINGRYEVSELDSMMNDIDAQINYYESQIEANEELKKNKKIQENLAELAAVDFDSLEFRKKQLYLKSLINKIYIDGEQVTIEWL

SEQ ID NO: 6592 - protein, 452 aa, synthetic construct
MKAAIYIRVSTREQVENYSIQAQTEKLTALCRSKDWDVYDIFIDGGYSGSNMNRPALNEMLSKLHEIDAVVVYRLDRLSRSQRDTITLIEEYFLKNNVEFVSLSETLDTSSPFGRAMIGILSVFAQLERETIRDRMVMGKIRRIEAGLPLTTAKGRTFGYDVIDTKLYINEEEAKQLRLIYDIFEEEQSITFLQKRLKKLGFKVRTYNRYNNWLTNDLYCGYVSYKDKVHVKGIHEPIISEEQFYRVQEIFTRMGKNPNMNRDSASLLNNLVVCSKCGLGFVHRRKDAMSRDKKYHYRYYSCKTYKHIHELEKCGNRIWRADELEELVINRVNSYSVASRNVDKEDELDSLNEKLKIEHAKKKRLFDLYINGSYEVSELDSVMNDINAQISYYESQIEANEELRKNKKIQENLANLATVDFDSLEFREKQLYLKSLINKIYIDGEQVTIEWL

SEQ ID NO: 6593 - protein, 452 aa, synthetic construct
MKAAIYIRVSTREQVENYSIQAQTEKLTALCRSKDWDVYDIFIDGGYSGSNMNRPALNKMLSKLHEIDAVVVYRLDRLSRSQRDTITLIEEYFLKNNVEFVSLSETLDTSSPFGRAMIGILSVFAQLERETIRDRMVMGKIKRIEAGLPLTTAKGRTFGYDVIDTKLYINEGEAKHLQLIYDIFEEEQSITFLQKRLKKLGFKVRTYNRYNNWLTNDLYCGYVSYKDKVHVKGIHEPIISEEQFYRVQEIFAHMGKNPNMNRDSASLLNNLVVCSKCGLGFVHRRKDAKSRDKKYHYRYYSCKTYKHIHELEKCGNKIWRADRLEELIINRVNNYSLASRNVDKEDELDSLNERLKIEHAKKKRLFELYINGSYEVSELDSMMSDIDAQINYYEGQIEANEKLKKNKKIQENLAYLPTVDFDSLEFREKQLYLKSLINKIYIDGEQVTIEWL

SEQ ID NO: 6594 - protein, 485 aa, synthetic construct
MTKKVAIYTRVSTTNQAEEGFSIDEQIDRLTKYAEAMGWQVSDTYTDAGLSGANLGRPAMQRLINDIENKAFDAVLVYKLDRLSRSVRDTLHLVKDVFTKNKIDFISLNESIDTSSAMGSLFLTILSAINEFERENIKERMAMGKLGRAKSGKSMMWTKTAFGYYHNRKTGILEIVPLQATIVEQIFTDYLSGTSLTKLRDKLNESGHIGKDIPWSYRTLRQTLGNPVYCGYIKFKDSLFEGMHKPIIPYETYLKVQKELEKRQQQTYERNNNPRPFQAKYMLSGMARCGYCGAPLRIVLGHKRKDGSRTMKYHCANRFPRKTKGVTVYNDNKKCDSGTYDLSNLENTVIDNLIGFQENNDSLLKIINDNNQPILDTSSLKKQISQIDKKIQRNSDLYLNDFITMDELKDRTDSLQAEKKLLEAKISENKFNDSTDVFELVKTQLGSIPINELNYDDKKKIVNNLVSKVDVTADNVDIIFKFQLA

SEQ ID NO: 6595 - protein, 485 aa, synthetic construct
MTKKVAIYTRVSTTNQAEEGFSIDEQIDRLTKYVEAMGWQVSDTYTDAGFSGAKLERPAMQRLINDIENKAFDTVLVYKLDRLSRSVRDTLHLVKDVFTRNKIDFISLNESIDTSSAMGSLFLTILSAINEFERENIKERMTMGKLGRAKSGKSMMWTKTAFGYYHNRKTGILEIVPLQATIVEQIFTDYLSGISLTKLRDKLNESGHIGKDIPWSYRTLRQTLDNPVYCGYIKFKGSLFEGMHKPIIPYETYLKVQKELEERQQQTYERNNNPRPFQAKYMLSGMARCGYCGAPLKIVLGHKRKDGGRTMKYHCANRFPRKTKGVTVYNDNKKCDSGTYDLSNLENTVIDNLIGFQENNDSLLKIINGNNQPILDTSSLKKQISQIDKKIQKNSDLYLNDFITMDELKDRTDSLQAEKKLLEAKISENKFNDSIDVFELVKTQLGSIPINELSYDNKKKIVNNLVSKVDVTADNVDIIFKFQLA

SEQ ID NO: 6596 - protein, 452 aa, synthetic construct
MKAAIYIRVSTREQVENYSIQAQTERLTALCRSKDWDVYDIFIDGGYSGSNMNRPALNEMLSKLHEIDAVVVYRLDRLSRSQRDTITLIEEYFLKNNVEFVSLSETLDTSSPFGRAMIGILSVFAQLERETIRDRMVMGKIKRVEAGLPLTTAKGRTFGYDVIDTRLYINEEEAKQLQLIYDIFEEEQSITFLQKRLKKLGFKVRTYSRYNNWLTNDLYCGYVSYKDKVHVKGIHEPIISEEQFHRVQEIFTRMGKNPNMNRDSASLLSNLVVCSKCGLGFVHRRKDTMSRGKKYHYRYYSCKTYKHIYELEKCGNKIWRADKLEELIINRVNNYSLASRNADKEDELDSLNEKLKIEHAKKKRLFDLYINGNYEVSELDSMMNGIDAQINYYESQIEANEELKKNKKIRESLANLATVDYDSLEFREKQLYLKSLINKIYIDGEQVTIEWL

SEQ ID NO: 6597 - protein, 452 aa, synthetic construct
MKAAIYIRVSTREQVENYSIQAQTEKLTALCRSKDWDVYDIFIDGGYSGSNMNRPALNEMLSKLHEIDAVVVYRLDRLSRSQRDTITLIEEYFLKNNVEFVSLSETLDTSSPFGRAMIGILSVFAQLERETIRDRMVMGKIKRIEAGLPQTTAKGRTFGYDVVDTRLYINEEEAKQLRLIYDIFEEEQSITSLQKRLKKLGFKVRTYSRYSNWLTNDLYCGYVSYKDKVHVKGIHEPIISEEQFYRVQEIFTRMGRNPNMNRDSASLLNSLVVCSKCGLGFVHRRKDTTSHGKKYHYRYYSCKTYKHIHELEKCGNKIWRADKLEELIINRVNSYSFASRNVDKEDELDSLNEKLKIEHAKKKRLFDLYINGSYEVSELDSMMNDIDAQINYYESQVEANEELKKNKKIQENLADLATVDYDSLEFREKQLYLKSLINKIYIDGEQVTIEWL

SEQ ID NO: 6598 - protein, 452 aa, synthetic construct
MKAAIYIRVSTREQVENYSIQAQTEKLTALCRSKDWDVYDIFIDGGYSGSNMNRPALNEMLSKLHEIDAVVVYRLDRLSRSQRDTITLIEEYFLKNNVEFVSLSETLDTSSPFGRAMIGILSVFAQLERETIRDRMVMGKIKRIEAGLPLTTAKGRTFGYDVIDTKLCINEEEAKQLRLIYDIFEEEQSITFLQKRLKKLGFKVRTYNRYNNWLTNDLYCGYVSYKDKVHVKGIHEPIISEEQFYRVQEIFTRMGKNPNMNRDSASLLNNLVVCSKCGLGFVHRRKDAMSRDKKYHYRYYSCKTYKHIHELEKCGNKIWRADKLEELIINRVNNYSFASRNADKEDELDSLNEKLKIEHAKKKRLFDLYISGSYEVSELDSMMKDIDAQINYYESQIEANEELRKNKKIQETLADLATVDFDSLEFRERQLYLKSLINKIYIDGEQVTIEWL

SEQ ID NO: 6599 - protein, 485 aa, synthetic construct
MTKKVAIYTRVSTANQAEEGFSIDEQIDRLTKYAEAMGWQVSNTYTDAGFSGAKLERPAMQRLINDIGNKAFDTVLVYKLDRLSRSVRDTLYLVKDVFTKNKIDFISLNESIDTSSAMGSLFLTILSAINEFERENIKERMTMGKLGRAKSGKSMMWTKTAFGYYHNRKTGILEIVPLQATIVEQIFTDYLSGISLTKLRDKLNESGHIGKDIPWSYRTLRQTLDNPVYCGYIKFKDSLFEGMHKPIIPYETYLKVQKELEDRQQQTYERNNNPRPFQAKYMLSGMARCGYCGAPLRIVLGHKRKDGSRTMKYHCANRFPRKTKGVTVYNDNKKCDSGTYDLSNLENTVIDSLIGFQENNDSLLKIINGNDQPILDTSSFKDQVSQIDKKIQKNSDLYLNDFITMDELKDRTDSLQAEKKLLEAKISENKFNDSTDVFELVRTQLGSIPINELSYDNKKKIVNNLVSKVDVTADNVDIIFKFQLA

SEQ ID NO: 6600 - protein, 452 aa, synthetic construct
MKAAIYIRVSTQEQVGNYSIQAQTEKLTALCRSKDWDVYDIFIDGGYSGSNMNRPALNEMLSKLHEIDAVVVYRLDRLSRSQRDTTTLIEEYFLKNNVEFVSLSETLDTSSPFGRAMIGILSVFAQLERETIRDRMVMGKIKRIEAGLPLTTAKGRTFGYDVIDTKLYINEEEAKQLRLIYDIFEEEQSITSLQKRLKKLGFKVRTYNRYNNWLTNDLYCGYVSYKDKVHVKGIHEPIISEEQFYRVQEIFTRMGKNPNMSRDSASLLNNLVVCSKCGLSFVHRSKDTMSRGKKYHYRYYSCKTYKHTHELEKCGNKTWRADKLEELIINRVNNYGFASRSVDKEDELDSLNEKLKIEHAKKKRLFDLYINSSYEVSELDSMMNDIDAQINYYESRIEANEELKKNKKTQENLADLAAVDFDSLEFREKRLYLKSLINKIYIDGEQVTIEWL

SEQ ID NO: 6601 - protein, 452 aa, synthetic construct
MKAAIYIRVSTQEQVENYSIQAQTEKLTALCRSKDWDVYDIFVDGGYSGSNMNRPALNEMLSKLHEIDAVVVYRLDRLSRSQRDTITLIEEYFLKNNVEFVSLSETLDTSSPFGRAMIGILSVFAQLERETIRDRMVMGKIKRVEAGLPLTTAKGRTFGYDVIDTKLYINEEEAKQLQLIYDIFEEERSITFLQKRLKKLGFKVRTYNRYNNWLTNDLYCGYVSYKDKVHVKGIHEPIISEEQFHRVQEIFTRMGKNPNMNRDSASLLNGLVVCSKCGLGFVHRRKDTTSRGKKYHYRYYSCKTYKHIHELEKCGNTIWRADKLEELIINRVNNYSFASRNADKEDELDSLNEKLEIEHAKRKRLLDLYINGSYDVSELDSMMSNIDAQINYYESQIGANEELRKNKKIQENLADLATVDFDSLEFREKQLYLKSLINKIYIDGEQVTIEWL

SEQ ID NO: 6602 - protein, 469 aa, synthetic construct
MSYTTPVRAAVYLRISEDRSGEQLGVARQREDCLKLCGQHKWVPVEYLDNDVSASTGKRRPAYEQMLADIAAGKIAAVVAWDLDRLHRRPIELEAFMSLADEKRLALATVAGDVDLATPQGRLVARLKGSVAAHETEHKKARQRRAARQKAERGLPNWSKAFGYLPGPNGPEPDPRTAPLVKQAYADILAGASLGDVCRQWNDAGAFTITGRPWTTTTLSKFLRKPRNAGLRAYKGARYGPVDRDAIVGKAQWSPLVEEATFWAAQAVLDAPGRAPGRKSVRRHLLTGLAGCGKCGNHLAGSYRTDGRVVYVCKACHGVAILADNIEPILYHIVAERLAMPDAVDLLRREIHDAVEAETIHLELETLYVELDRLAVERAEGLLTARQVKISTDIVNAKITKLQARQLDQERLRVFDGIPLGTPQVAGMIAELSPDRFRAVLDVLAEVVVQPVGKSGRIFNPERVQVNWR

SEQ ID NO: 6603 - protein, 485 aa, synthetic construct
MTKKVAIYTRVSTTNQAEEGFSIDEQIDRLTKYAEAMGWQVSDTYTDAGFSGAKLERPAMQRLINDIENKAFDTVLVYKLDRLSRSVRDTLHLVKDVFTKNKIDFISLSESIDTSSAMGSLFLTILSAINEFERENIKERMTMGKLGRAKSGKSMMWTKTAFGYYHNRKTGILEIVPLQATIVEQIFTDYLSGISLTKLRDKLNESGHIGKDIPWSHRTLRQTLDNPVYCGYIKFKDSLFEGMHKPIIPYETYLKVQKELEERQQRTYERNNNPRPFQAKYMLSGMARCGYCGAPLRIVLGHKRKDGSRTMKYHCANRFPRKTKGVTVYNDNKKCDSGSYDLSNLENTVIDNLIGFQKNNDSLLKIINGNNQPILDTSSFKEQISQIDKKIQKNSDLYLNDFITMDELKDRTDSLQAEKKLLKAKISENKFNDSTDVFELVKTQLGSIPINELSYENKKKIVNNLVSKVDVTADNVDIIFKFQLA

SEQ ID NO: 6604 - protein, 452 aa, synthetic construct
MKAAIYIRVSTREQVENYSIQAQTEKLTALCRSKDWDVYDIFIDGGYSGSNMNRPALNEMLSKLHEIDAVVVYRLDRLSRSQRDTITLIEEYFLKNNVEFVSLSETLDTSSPFGRAMIGILSVFAQLERETIRDRMVMGKIKRIEAGLPLTTAKGRTFGYDVIDTKLYINEEEAKQLQLIYDIFEEEQSITFLQKRLKKLGFKVRTYSRYNNWLTNDLYCGYVSYKDRVHVKGIHEPIISEEQFYRVQEIFARMGKNPNMNRDSASLLNNLVVCSKCGLGFVHRRKDTMSRGKRYHYRYYSCKTYKHTHELEKCGNKIWRADKLEELVINRVNNYSFASRNVDKEDELDSLNEKLKVEHAKKKRLFDLYINGSYNVSELDSMMNDIDAQINYYVSQIEANEELKKNKKIQENLADLATVDFDSLEFREKQLYLKSLINKIYIDGEQVTIEWL

SEQ ID NO: 6605 - protein, 469 aa, synthetic construct
MSYTIPVRAAVYLRISEDRSGEQLGVARQREDCLKLCGQRKWVPVEYLDNDVSASTGKRRPAYEQMLADITAGKIAAVVAWDLDRLHRRPIELEAFMCLADEKRLALATVAGDVDLATPQGRLVARLKGSVAAHETEHKKARQRRAARQKAERGLPNWSKAFGYLPGPNGPEPDPRTAPLVKQAYADILAGASLGDVCRQWNDAGAFTITGRPWATTTLSKFLRKPRNAGLRAYKGARYGPVDRDAIVGKAQWSPLVDEATFWAAQAVLDAPGRAPGRKSVRRHILTGLAGCGKCGNHLAGSYRTDGRVVYVCKACYGVAILADNIEPILYHIVAERLAMPDAADLLRREIHDAAEAETIRLELETLYGELDRLAVERAEGLLTARQVKISTDIVNAKITKLQARQLDQERLRVFDGIPLGTPQVAGVIAELSPDRFRAVLDVLAEVVVQPVGKSGRIFNPERVQVNWR

SEQ ID NO: 6606 - protein, 452 aa, synthetic construct
MKAAIYIRVSTREQVENYSIQAQTERLTALCRSKDWDVYDIFVDGGYSGSNMNRPALNEMLSKLHEIDAVVVYRLDRLSRSQRDTITLIEEYFLKNNVEFVSLSETLDTSSPFGRAMIGILSVFAQLERETIRDRMVMGKIKRIEAGLPLTTAKGRTFGYDVIDTKLYINEEEAKQLRLIYDIFEEEQSITFLQKRLKKLGFKVRTYNRYNDWLTNDLYCGYVSYKDKVHVKGIHEPIISEEQFCRVQEIFTRMGKNPNMNRDSASLLNNLVVCSKCGLGFVHRRKDTMSRGKKYHYRYYSCKTYKHIHELEKCGNKIWRADKLEELIINRVNNYSFAGRDMDKEDELDNLNEKLKVEHAKKKRLFDLYINGSYEMSELDSMMNDINAQINYYESQIGANEELKKSKKVQENLANLATVDYDSLEFREKQLYLKSLINKIYIDGEQVTIEWL

SEQ ID NO: 6607 - protein, 452 aa, synthetic construct
MKAAIYIRVSTQEQVGNYSIQAQTEKLTALCRSKDWDVYDIFVDGGYSGSNMNRPALNEMLSKLHEIDAVVVYRLDRLSRSQRDTTTLIEEYFLKNNVEFVSLSETLDTSSPFGRAMIGILSVFAQLERETIRDRMVMGKIKRIEAGLPLTTAKGRTFGYDVIDTKLYINKEEAKQLQLIYDIFEEEQSITSLQKRLKKLGFKVRTYNRYNNWLTNDLYCGYVSYKDKVHVKGIHEPIISEEQFYRVQEIFTRMGKNPNMNRDNASLLSNLVVCSKCGLGFVHRSKDTMSRGKKYHYRYYSCKTYKHTHELEKCGNKTWRADKLEELIINRVNNYSFAGRNVDKEGELDSLNEKLKVEHAKKKRLFDLYINGSYEVSELDNMMNDIDAQINYYESQIEANEGLKKDKKIQENLAGLATVDFDSLEFREKQLYLKSLINKIYVDGEQVTIEWL

SEQ ID NO: 6608 - protein, 486 aa, synthetic construct
MTKKVAIYTRVSTTNQAEEGFSIDEQTDRLTKYAEAMGWQVSDTYTDAGFSGAKLERPAMQRLINDIENKAFDTVLVYKLDRLSRSVRDTLYLVKDVFTKSKIDFISLNESIDTSSAMGSLFLTILSAINEFERENIKERMTMGKLGRAKSGKSMMWTKTAFGYYHNRKTGILEIVPLQATIVEQIFTDYLSGISLTKLRDKLNESGHIGKDIPWSYRTLRQTLDNPVYCGYIKFKGSLFEGIHKPIIPYETYLKVQKELEERQQQTYERNNNPRPFQAKYMLSGMARCGYCGAPLRIVLGHKRKDGSRTMKYRCANRFPRKAKGVTVYNDNKKCDSGTYDLSNLENIVIDNLIGFQENNDSLLKIINGNNQPILDTSSLKKQISQIDKKIQKNSELYLNDFITMDELKDRTDSLQAEKKLLKAEISENKLNDSTDVFELVKTQLGSIPINELSYDNKKKIVNSLVSKVDVTADNVNIIFKFQLAS

SEQ ID NO: 6609 - protein, 452 aa, synthetic construct
MKAAIYIRVSTREQVENYSIQAQTEKLTALCRSKGWDVYDIFIDGGYSGSNMNRPALNEMLSKLHEIDAVVVYRLDRLSRSQRDTITLIEEYFLKNNVEFVSLSETLDTSSPFGRAMIGILSVFAQLERETIRDRMVMGKIKRIEAGLPLTTAKGRTFGYDVIDTKLYINEEEAKQLQLIYDIFEEEQSITSLQKRLKELGFKVRTYNRYNNWLTNDLYCGYVSYKDKVHVKGIHEPIISEEQFYRVQEIFTRMGKNPNMNRDSASLLNNLVVCGKCGLGFVHRRKDAMSRDKKYHYRYYSCKTYKHIHELEKCGNKIWRADKLEELIINRVNNYSLASRNVDKEDELDCLNEKLKIEHAKKRRLFDLYINGSYEVSELDSMMNDIDAQINYYESQIEANEELKKNKKIQENLAYLATVDFDSLEFREKQLYLKSLINKIYIDGEQVTIEWL

SEQ ID NO: 6610 - protein, 470 aa, synthetic construct
MSYTTPVRAAVYLRISEDRSGEQLGVARQREDCLRLCDQRKWVPVEYLDNDVSASTGKRRPAYEQMLADITAGKIAAVVAWDLDRLHRRPIELEAFMSLADEKRLALATVAGDVDLATPQGRLVARLKGSVAAHETEHKKARQRRAARQKAERGHPNWSKAFGYLPGPNGPEPDPRTAPLVRQAYADILAGASLGDVCRQWNDANAFTITGRPWTTTALSKFLRKPRNAGLRAYKGARYGPVDRDAIVGKAQWSPLVDEATFWAAQAVLDAPGRAPGRKSVRRHLLTGLAGCGKCGSHLAGSYRTDGKVVYVCKACHGVAILADNIEPALYHIVAGRLAMPDAVDLLRREIHDAAEAETIRLELETLYGELDRLAVERAEGLLTARQVKIGTDIVNAKITKLQARQLDQERLRVFDGIPLGTPQVADTIAELSPDRFRAVLDVLAEVVVQPVGKSGRVFNPERVQVNWRS

SEQ ID NO: 6611 - protein, 452 aa, synthetic construct
MKAAIYIRVSTREQVENYSIQAQTEKLTALCRSKDWDVYDIFIDGGYSGSNMDRPALNEMLSKLHEIDAVVVYRLDRLSRSQRDTITLIEEYFLRNNVEFVSLSETLDTSSPFGRAMIGILSVFAQLERETIRDRMVMGKIKRIEAGLPLTTAKGRTFGYDVIDTKLYINEEEAKQLQLIYDIFEEEQSITFLQKRLKKLGFKVRTYNRYNNWLTNDLYCGYVSYKDKVHVKGIHEPIISEEQFYRVQEIFARMGKNPNMNRDSASLLNNLVVCSKCGLSFVHRRKDAMSRDKKYHYRYYSCKTYKHIHELEKCGNKIWRADKLEELIINRVNSYSLVSRNVDKEDELDSLNEKLRIEHAKKKRLFDLYINGSYEVSELDSLVSDIDAQISNYESQIEANEELKRNKKIQENLANLATVDFDSLEFREKQLYLKSLINKIYIDGEQVTIEWL

SEQ ID NO: 6612 - protein, 485 aa, synthetic construct
MTKKVAIYTRVSTTNQAEEGFSIDEQIDRLTKYAEAMGWQVSGTYTDAGLSGAKLERPAMQRLINDIENKAFDTVLVYKLDRLSRSVRDTLYLVKDVFTKNKIDFISLSESIDTSSATGSLFLTILSAINEFERENIKERMTMGKLGRAKSGKSMMWTRTAFGYHHNRETGILEIVPLQATIVEQIFTDYLSGISLTKLRDKLNESGHIGKDIPWSYRTLRQTLDNPVYCGYIKFKDSLFEGMHKPIIPYETYLKVQKELEERQQQTYERNNNPRPFQAKYMLSGMARCGYCGAPLRIVLGHKRKDGSRTMKYHCANRFLRKTKGVTVYNDSKKCDSGTYDLSNLENTVIDNLISFQEDNDSLLRIINGNNQPTLDTSSFKEQISQIDRKIQKNSDLYLNDFITMDELKDRTDSLQAEKGLLKAKISEDKLNDSTDVFELVKTQLGSIPINELSYDDKKKIVNNLVSKVGVTADNVDIIFKFQLA

SEQ ID NO: 6613 - protein, 452 aa, synthetic construct
MKAAIYIRVSTREQVENYSIQAQTEKLTALCRSKDWDVYDIFIDGGYSGSNMNRPALNEMLSQLHEIDAVVVYRLDRLSRSQRDTITLIEEYFLKNNVEFVSLSETLDTSSPFGRAMIGILSAFAQLERETIRDRMVMGKIKRIEAGLPLTTAKGRTFGYDVIDTKLYINEEEAKQLQLIYDIFEEEQSITSLQRRLKKLGFKVHTYSRYNNWLTNDLYCGYVSYKDKVHVRGIHEPIISEEQFYRVQEIFTRMGKSPNMNRDSASLLSSLVVCSKCGLGFVHRRKDTMSRGKKYHYRYYSCKTYKHAHELEKCGNKIWRADKLEELIINRVNDYSLAGRNVDKEDELDSLNEKLKIEHAKKKRLFELYINGSYEVSELDSMMNDIDTQINYYESQIEANEELKKDKKIQEGLANLATVDYDSLEFREKQLYLKSLINKIYIDGEQVTIEWL

SEQ ID NO: 6614 - protein, 452 aa, synthetic construct
MKAAIYIRVSTREQVENYSIQAQTERLTALCRSKGWDVYDIFIDGGYSGSNMNRPALNEMLSKLHEIDAVVVYRLDRLSRSQRDTITLIEEYFLKNNVEFVSLSETLDTSSPFGRAMIGILSVFAQLERETIRDRMVMGKIKRVEAGLPLTTAKGRTFGYDVIDTKLYINEEEAKQLRLIYDIFEEEQSITFLQKRLKKLGFKVRTYNCYNNWLTNDLYCGYVSYKDKVRVKGIHEPIISEGQFYRVQEIFTRMGKNPNMNRDSASLLNSLVVCSKCGLGFVHRRKDTTNRGKKYHYRYYSCKTYKHIHELEKCGNKIWRADKLEELVINRVNNYSLVSRNVDKEDELDSLNEKLKIEHAKKRRLFDLYINGSYEVSELDSMMNDVDAQINYYESQIEANEELKKNKKIQEDLVDLATVDFDSLEFREKQLYLKSLISKIYIDGEQVTIEWL

SEQ ID NO: 6615 - protein, 452 aa, synthetic construct
MKAAIYIRVSTQEQVENYSIQAQTEKLTALCRSKDWDVYDIFVDGGYSGSNMDRPALNEMLSKLHEIDAVVVYRLDRLSRSQRDTTTLIEEYFLKNNVEFVSLSETLDTSSPFGRAMIGILSVFAQLERETIRDRMVMGKIKRIEAGLPLTTAKGRTFGYDVIDSKLYINEEEAKQLQLIYDIFEEEQSITLLQKRLKKLGFKVRSYNRYNSWLTNDLYCGYVSYKDEVHVKGIHEPIISEEQFYRVQEIFTRMGKSPNMNRDSASLLNNLVVCSKCGLSFVHRSKDTMSRGKKYHYRYYSCKTYKHTHELEKCGNKTWRADKLEELIINRVNNYSFASRNVDKEDELNSLNERLKIEHAKKKRLFDLYINGSYEVSELDSMMSDIDAQISYYESQIEANKELKKNKKIQENLADLATVDFDGLEFREKQLYLKSLINKIYIDGEQVTIEWL

SEQ ID NO: 6616 - protein, 485 aa, synthetic construct
MTKKVAIYTRVSTTNQAEEGFSIDEQIDRLTKYAEAMGWQVSDTYTDAGFSGAKLERPAMQRLINDIENKAFDTVLVYKLDRLSRSVRDTLYLVKDVFTKNKIDFISLNESIDTSSAMGSLFLTILSAINEFERENIKERMTMGKLGRAKSGKSMMWTKTAFGYYHNRKTGILEVVPLQATIVEQIFTDYLSGISLTKLRDKLNESGHIGKDIPWSYRTLRQTLDNPVYCGYIKFKDSLFEGMHKPIIPYETYLKVQKELEERQQQTYERNNNPRPFQAKYMLSGMARCGYCGAPLKIVLGHKRKDGSRTMKYHCANRFPRKTKGVTVYNDNKKCDSGTYDLSNLENTVIDNLIGFQEDNDSLLKIINGNNQPILDTSSFKEQINQIDKKIQKNSDLYLNDFITMDELKDRTDSLQAEKKLLKAKISENKFNDSTDVFELMKAQLGSIPINELSYDNKKKIVNNLVSKVDVTADNVDIIFKFQLA

SEQ ID NO: 6617 - protein, 452 aa, synthetic construct
MKAAIYIRVSTREQVENYSIQAQTEKLTALCRSKGWDVYDIFIDGGYSGSNMNRPALNEMLSKLHEIDAVVVYRLDRLSRSQRDTITLIEEYFLKNNVEFVSLSETLDTSSPFGRAMIGILSVFAQLERETIRDRMVMGKIKRVEAGLPLTTAKGRTFGYDVIDTKLYINEEEAKQLQLIYDIFEEEQSITFLQKRLKKLGFKVRTYNCYNSWLTNDLYCGYVSYKDKVHVKGIHEPIISEEQFYRVQEIFTRMGKNPNMNRDSASLLNNLVVCSKCGLGFVHRRKDTMSRGKKYHYRYYSCKTYKHTHELERCGNKIWRADKLEELIINRVNNYSFASRNVDKDDELDGLNEKLKVEHAKKKRLFDLYINGSYGMGELDSMMNDIDAQINYYESQIEANEGLKRNKKIQENLAELATVDFDSLEFREKQLYLKSLINKIYIDGEQVTIEWL

SEQ ID NO: 6618 - protein, 452 aa, synthetic construct
MKAAIYIRVSTREQVENYSIQAQTEKLTALCRSKDWDVYDIFIDGGYSGSNMNRPALNEMLSKLHEIDAVVVYRLDRLSRSQRDTITLIEEYFLKNNVEFVSLSETLDTSSPFGRAMIGILSVFAQLERETIRDRMVMGKIKRIEAGLPLTTAKGRTFGYDVIDTKLYINEEEAKQLQLIYDIFEEEQSITFLQKRLKKLGFKVRTYNRYNNWLTNDLYCGYVSYKDKVHVKGIHEPIISEEQFYRVQDIFTRMGKNPNMNRDSASLLNNLVVCSKCGLGFVHRRKDTVSRGKKYHYRYYSCKTYKHIHELEKCGNKIWRADKLEELIINRVNNYSLASRNVDKEDELDSLNEELKIEHAKKKRLFDLYINGSYDVSELDSMMNDIDAQINYYESQIEANEELKRNKKIQENLANLATVDYDSLEFREKQLYLKSLINKIYIDGEQVTIEWL

SEQ ID NO: 6619 - protein, 452 aa, synthetic construct
MKAAIYIRVSTQEQVGNYSIQAQTEKLTALCRSKDWDVYDIFIDGGYSGSNMNRPALNEMLSKLHEIDAVVVYRLDRLSRSQRDTTTLIEEYFLKNNVEFVSLSETLDTSSPFGRAMIGILSVFAQLERETIRDRMVMGKIKRIEAGLPLTTAKGRTFGYDVIDTKLYINEEEAKQLRLIYDIFEEERSITLLQKRLKKLGFKVRTYNRYNNWLTNDLYCGYVSYKDKVHVKGIHEPIISEEQFYRVQEIFTRMGKSPNMNRDSASLLNNLVVCSKCGLGFVHRSKDTMSRGKKYHYRYYSCKTYKHTHELEKCGNKTWRADKLEELIISRVNNYSFASRDVDKEDELDSLNEKLKIEHARKKRLFDLYINGSYGVGELDSMMNDIDAQINYYESQIEASEELKENKKIQENLADLATVDFDSLEFREKQLYLKSLINKIYIDGEQVTIEWL

SEQ ID NO: 6620 - protein, 485 aa, synthetic construct
MTRKVAIYTRVSTTNQAEEGFSIDEQIDRLTKYAEAMGWQVSDTYTDAGLSGAKLERPAMQRLINDVENKAFDTVLVYKLDRLSRSVRDTLYLVKDVFTKNKIDFISLNESIDTSSAMGSLFLTILSAINEFERENIKERMTMGKLGRAKSGKSMMWTKTAFGYYHNRKTGILEIVPQQATIVEQIFTEYLSGISLTKLRDKLNESGHIGKDIPWSYRTLRQTLDNPVYCGYIKFKGSLFEGKHKPIVPYETYLKVQEELEERQQQAYERNNNPRPFQAKYMLSGMARCGYCGAPLKIVLGHKRKDGSRTMKYHCANRFPRETKGVTVYNDNKKCDSGTYDLSSLENTVIDNLIGFQENNDSLLKIINGNNQPIQDTSGFKKQICQIDKKIQKNSDLYLNGFITMDELKDRTDSLQAEKKLLKAKISENRFNDSTDVFELVKTQLGSIPINELSYDNKKKIVNTLVSKVDVTADNVDIIFKFQLA

SEQ ID NO: 6621 - protein, 485 aa, synthetic construct
MTKKVAIYTRVSTTNQAEEGFSIDEQVDRLTKYAEAMGWQVSDTYTDAGLSGAKLERPAMQRLINDIGNKVFDTVLVYKLDRLSRSVRDTLYLVKDVFTKNKIDFISLNESIDTSSAMGSLFLTILSAINEFERENIKERMTMGKLGRAKSGKSMMWTKTAFGYYHNRKTGILEIVPLQATIVEQIFTDYLSGISLTKLRDKLNESGHIGKDIPWSYRTLRQTLDNPVYCGYIKFKDSLFEGMHKPIIPYETYLKVQKELEERQQQTYERNNNPRPFQAKYMLSGVARCGYCGAPLKIVLGRRRKDGSRTMKYHCANRFPRKTKGVTVYNDNKKCDSGTYDLSNLENTVIDNLIDFQENNDSLLKIINGNNQPILDTSSFKKQISQIDKKIQKNSDLYLNDFITMDELKDRTDSLQAEKKLLKAKISENKFNDSTDVFELVRTQLGSIPINELSYDSKKKIVNNLVSKVDVTADNVDIIFKFQLA

SEQ ID NO: 6622 - protein, 485 aa, synthetic construct
MTKKVAIYTRVSTTNQAEEGFSIDEQIDRLTKYAEAMGWQVSDTYTDAGISGAKLERPAMQRLINDIENKAFDTVLVYKLDRLSRSVRDTLYLVKDVFTKNKIDFISLNESIDTSSAMGSLFLTILSAINEFERENIKERMTMGKLGRAKSGKSMMWTKTAFGYYHNRETGILEIVPLQATIVEQIFTDYLSGISLTKLRDRLNESGHIGKDIPWSYRTLRQTLDNPVYCGYIKFKGSLFEGMHKPIIPYETYLKVQKELEERQQQAYARNNNPRPFQAKYMLSGMARCGYCGAPLRIVLGHKRKDGSRTMKYHCANRYPRKTNGVTVYNDNKKCDSGTYDLSNLENSVIDNLVGFQENNDSLLKIINGDNQPILDTSSFEKQISQIDKKIQKNSDLFLNDFITMDELKDRTDSLQAEKKLLKAKISENKFNGSTDVFELVKTQLGSIPINELSYDNKKKIVNNLVSKVDVTADNVDIIFKFQLA

SEQ ID NO: 6623 - protein, 452 aa, synthetic construct
MKAAIYIRVSTQEQVGNYSIQAQTEKLTALCRSKDWDVYDIFIDGGYSGSNMNRPALNEMLSKLHEIDAVVVYRLDRLSRSQRDTTTLIEEYFLKNNVEFVSLSETLDTSSPFGRAMIGILSVFAQLERETIRDRMVMGKIKRIEAGLPLTTAKGRTFGYDVIDTKLYINEEEAKQLQLIYDIFEEEQSITSLQKRLKKLGFKVRTYNRYNNWLTNDLYCGYVSYKDKVHVKGIHEPIISEEQFYRVQEIFARMGKNPNMNRDSASLLNNLVVCSKCGLGFVHRSKDTMSRGKKYHYRYYSCKTYKHTHELEKCGNKTWRADKLEELIISRVSNYSSASRNVDKEDELVSLNEKLSIEHAKKKRLFDLYINGGYEVSELDSMMNDIDAQINYYESQIEANEGLKKDKKIQENLADLATVDFDSLEFREKQLYLKSLINKIYIDDEQVTIEWL

SEQ ID NO: 6624 - protein, 486 aa, synthetic construct
MTKKVAIYTRVSTTNQAEEGFSIDEQIDRLTKYAEAMDWQVSDTYTDAGFSGAKLERPAMQRLINDIENKAFDTVLVYKLDRLSRSVRDTLHLVKDVFTKNKIDFISLNESIDTSSAMGSLFLTILSAINEFERENIKERMAMGKLGRAKSGKSMMWTKTAFGYYHNRKTGILEIVPLQATIVEQIFTDYLSGISLTKLRDKLNESGHIGKDIPWSYRTLRQTLGNPVYCGYIKFKDSLFEGMHKPIIPYETYLKVQKELEERQQQTYERNNNPRPFQAKYMLSGMARCGYCGAPLRIVLGHKRKDGSRTMKYHCANRFPRRTKGVTVYNDNKKCDSGTYDLSSLENTVIGNLIGFQENNDSLLKIINGNNQPILDTSSLKKQISQIDKKIQKNSDLYLNDFITMDELKDRTDGLQAEKKLLKAKISENKFNDSTDVFELVKTQLGSIPINELSYDNKKKIVNNLVSKVDVTADNVDIIFKFQLAQ

SEQ ID NO: 6625 - protein, 485 aa, synthetic construct
MTKKVAIYTRVSTTNQAEEGFSIDEQIDRLTKYAEAMGWQVSDTYTDAGLSGAKLERPAMQRLINDIENKAFDTVLVYKLDRLSRSVRDTLYLVKDVFTKNKIDFISLNESIDTSSAMGSLFLTILSAINEFERENIKERMTMGKLGRAKSGKSMMWTKTAFGYYHNRKTGILEIVPLQATIVEQIFTDYLSGISLTKLRDKLNESGHIGKDIPWSYRTLRQTLDNPVYCGYIKFKDSLFEGMHKPIIPYETYLKAQKELEERQQQTYERNNNPRPFQAKYMLSGMARCGYCGAPLKIVLGHKRKDGSRTKKYHCANRFPRKTKGVTVYNDNKKCDSGTYDLSNLENTVIDHLIGFQENNDSLLKIINGNNQPILDTSSFKEQISQIDKKIQKNSDLYLNDFITMDELKDRTDSLQAKKKLLKAKISENKFNDSTDVFELVKTQLGSIPINELSYDNKKKIVNNLVSKVDVTADNVDIIFKFQLA

SEQ ID NO: 6626 - protein, 452 aa, synthetic construct
MKAAIYIRVSTREQVENYSIQAQTEKLTALCRSKGWDVYDIFIDGGYSGSNMNRPALNEMLSKLHEIDAVVVYRLDRLSRSQRDTITLIEEYFLGNNVEFVSLSETLDTSSPFGRAMIGILSVFAQLERETIRDRMVMGKIKRVEAGLPLTTAKGRTFGYEVIDSKLYINEEEAKQLQLIYDIFEEEQSIAFLQKRLKKLGFKVRTYSCYNNWLTNDLYCGYVSYRDKVHVKGIHEPIISEEQFYRVQEIFTRMGKNPNMNRDSASLLNNLVVCSKCGLGFVHRRKDTMSRGKKYHYRYYSCKTYKHIYELEKCGNKIWRADKLEELIINRVNNYSFASRNVDKEDELDSLNEKLKIEHTKKKRLFDLYINGSYEVSELDSMMNDIDAQISYYESQIEANEELRKNKKIQENLANLATVDYDSLEFREKQLYLKSLISKIYIDGEQVTIEWL

SEQ ID NO: 6627 - protein, 485 aa, synthetic construct
MTKKVAIYTRVSTANQAEEGFSIDEQIDRLTKYVEAMGWQVSDTYTDAAFSGAKLERPAMQRLINDIENKAFDTVLVYKLDRLSRSVRDTLYLVKDVFTKNKIDFISLNESIDTSSAMGSLFLTILSAINEFERENIKERMTMGKLGRAKSGKSMMWAKTAFGYYHNRKTGILEIVPLQATIVEQIFTDYLSGISLTRLRDKLNESGHIGKDIPWSYRTLRQTLDNPVYCGYIKFKDSLFEGMHKPIIPYETYLKVQKELEERQQQTYERNNNPRPFQAKYMLSGVARCGYCGAPLKIVLGHKRKDGSRTMKYHCANRFPRKTKGITVYNDNKKCDSGTYDLGNLENTVIDNLVGLQENNDSLLRIINGNNQPILDTSSFKKQISQIDKKIQKNSDLYLNDFITMDELKDRTDSLQAEKKLLKAKISENKFNDSTDVFELVKAQLGSIPINELSYDNKKKIVNNLVSKVDVTADNVDIIFKFQLA

SEQ ID NO: 6628 - protein, 485 aa, synthetic construct
MTKKVAIYTRVSTTSQAEEGFSIDEQIDRLTKYAEAMGWQVSDTYTDAGFSGAKLERPALQRLINDIEDKAFDTVLVYKLDRLSRSVRDTLYLVKDVLTRNKIDFISLSESIDTSSAMGSLFLTILSAINEFERENIRERMTMGKLGRAKSGKSMMWTKTAFGYYHNRETGILEIVPLQATIVEQIFTDYLSGISLTKLRDKLNESGHIGKDIPWSYRTLRQTLDNPVYCGYIKFKGSLFEGMHKPIIPYETYLKVQKELEERQQRTYERNNNPRPFQAKYMLSGMARCGYCGAPLKVVLGHKRKDGSRTMKYHCANRFPRKTKGVTVYNDNKKCGSGTYDLSNLENTVIDNLISFQENNDNLLKIINGNNQPTLGASSFKKQISQIDKKIQKNSDLYLNDFITMDELKVRTDSLQAEKKLLKAKISENKYNDSADVFELVKSQLGGIPINELSYDNKKKIVNNLVSKVDVTADNVDIIFKFQLA

SEQ ID NO: 6629 - protein, 485 aa, synthetic construct
MTKKVAIYTRVSTTNQAEEGFSIDEQIDRLTKYAEAMGWQVSDTYTDAGFSGAKLERPAMQRLINDIENKAFDTVLVYKLDRLSRSVRDTLHLVKDVFTKNKIDFVSLSESIDTSSAMGSLFLTILSAINEFERENIKERMAMGKLGRAKSGKSMMWTKTAFGYYHNRKTGILEVVPLQATIVEQIFTDYLSGISLTKLRDKLNESGHIGKDIPWSYRTLRQTLDNPVYCGYIKFKGSLFEGMHKPIIPYETYLKVQKELEERQQQTYERNNNPRPFQAKYMLSGMARCGYCGAPLRIVLGHKRKDGSRTMKYHCANRFPRKTRGVTVYNDNKKCDSGTYDLSNLEDTVIDNLIGLQENNDSLLKIINGNNQPILDTSSFKEQISQIDKKIQKNSDLYLNDFITMDELKDRTDSLQAEKKLLKAKISDNKFSDGTDVFELVKTQLGSIPINELSYDNKKKIVNNLVSKVDVTADNVDIIFKFQLA

SEQ ID NO: 6630 - protein, 452 aa, synthetic construct
MKAAIYIRVSTQEQVGNYSIQAQTEKLTALCRSKDWDVYDIFVDGGYSGSNMNRPALNEMLNKLHEIDAVVVYRLDRLSRSQRDTTTLIEEYFLKNNVEFVSLSETLDTSSPFGRAMIGILSVFAQLERETIRDRMVMGKIKRIESGLPLTTAKGRTFGYDVIDTKLYINEEEAKQLQLIYDIFEEEQSITSLQKRLKKLGYKVRTYNRYNNWLTNDLYCGYVSYKDKVHVKGIHEPIISEEQFYRVQEIFTRMGKNPNMNRDSASLLNNLVVCSKCGLSFVHRSKDTMSRGKKYHYRYYSCKTYKHTHELEKCGNKTWRADKLEELVINRVNNYSFASRNVDKEDELDSLNEKLKIEHARKKRLFDLYINGSYEVSELDSMMNDIDAQINYYESQIEANKELKKNKKIQENLADLATVDFDSLEFREKQLYLKSLINKIYIDGEQVTIEWL

SEQ ID NO: 6631 - protein, 452 aa, synthetic construct
MKAAIYIRVSTREQVENYSIQAQTEKLTALCRSKDWDVYDIFIDGGYSGSSMNRPALNEMLGKLHEIDAVVVYRLDRLSRSQRDTITLIEEYFLKSNVEFVSLSETLDTSSPFGRAMIGILSVFAQLERETIRDRMVMGKIKRVEAGLPLTTAKGRTFGYDVIDTKLYINEEEAKQLQLIYDIFEEEQSITLLQKRLKKLGFRVRTYNRYHNWLTNDLYCGYVSYKDKVHVKGIHEPIISEEQFYRVQEIFTRMGRNPNMNRDSASLLSNLVVCSKCGLGFVHRRKDTMSRGKKYHYRYYSCKTYKHIHELERCGNKIWRADKLEELIVNRVNNYSFASRNVDKEDELDSLNEKLKIEHAKKKRLFDLYINGSYNVSELDSMMNDIDAQINYYESQIETNEELKKNKKIQENLADLATVDFDSLEFREKQLYLKSLINKIYIDGEQVTIEWL

SEQ ID NO: 6632 - protein, 452 aa, synthetic construct
MKAAIYIRVSTREQVENYSIQAQTEKLTALCRSKDWDVYDIFIDGGYSGSNMNRPALNEMLSKLHEIDAVVVYRLDRLSRSQRDTITLIEEYFLKNNVEFVSLSETLDTSSPFGRAMIGILSVFAQLERETIRDRMVMGKIKRIEAGLPLTTAKGRTFGYDVIDTKLCINEEEAKQLQLIYDIFEEEQSITFLQKRLKKLGFKVRTYSCYNNWLTNDLYCGYVSYKDKVHVKGIHEPIISEEQFYRVQEIFTRMCKNPNMNRDSASLLNNLVVCSKCGLGFVHRRKDTMSRGKKYHYRYYSCKTYKHIHELEKCGNKIWRADKLEELIIDRVNNYSFASRNVDKEDALGSLSEKLKIEQAKKKRLFDLYINGSYEVSELDSMMNDIDAQINYYESQIEANEELKKNKKTQENLADLATVDYDSLEFREKQLYLKSLINKIYIDGEQVTIEWL

SEQ ID NO: 6633 - protein, 469 aa, synthetic construct
MSYTTPVRAAVYLRISEDRSGEQLGVARQREDCLKLCDQRKWVPVEYLDNDVSASTGKRRPAYEQMLADITAGKIAAVVAWDLDRLHRRPVELEAFMSLADEKRLALATVAGDVDLATPQGRLVARLKGCVAAHETEHKKARQRRAARQKAERGHPNWSKAFGYLPGPNGPEPDPRTAPLVKQAYADILAGASLGDVCRQWNDAGAFTITGRPWITTTLSKFLRKPRNAGLRAYKGARYGPVDRDAIVGKAQWSPLVDEATFWAAQAVLDAPGRAPGRKSVRRHLLTGLAGCGKCGNHLAGSYRTDGRVVYVCKACHGVAILADNIEPILYHIVAERLAMPDAVDLLRRETHDAAEAETIRLELETLYGELDRLAVERAEGLLTARQVKISTDIVDAKISKLQARQLDQERLRVFDGIPLGTPQVAGMIAELSPDRFRAVLDVLAEVVVQPVGKSGRIFNPERVQVNWR

SEQ ID NO: 6634 - protein, 452 aa, synthetic construct
MKAAIYIRVSTREQVENYSIQAQTEQLTALCRSKDWDVYDIFIDGGYSGSNMNRPALNEMLSKLHEIDAVVVYRLDRLSRSQRDTITLIEEYFLKNNVEFVSLSETLDTSSPFGRAMIGILSVFAQLERETIRDRMVMGKIRRVEAGLPLTTAKGRTFGYDVIDTKLYINEEEARQLQLIYDIFEEEQSITFLQKRLKKLGFKVRTYNRYISWLTNDLYCGYVSYKDKVHVKGIHEPIISEEQFYRVQEIFTRMGKNPNMNRDSASLLSNLVVCSKCGLGFVHRRKDTMSRGKKYHYRYYSCKTYKHTHELEKCGNKIWRADKLEELIINRVNSYSLASRNVDKEDELGSLNEKLKIEHAKRKRLFDLYINGSYGVSELDSMMNDIDAQINYYESKIEANEELKKSKKIQEDLANLATVDYDSLEFREKQLYLKSLINKIYIDGEQVTIEWL

SEQ ID NO: 6635 - protein, 469 aa, synthetic construct
MSYTTPVRAAVYLRISEDRSGEQLGVARQREDCLKLCDQRKWVPVEYLDNDVSASTGKRRPAYEQMLADISAGKIAAVVAWDLDRLHRRPIELEAFMSLADEKRLALATVAGDVDLATPQGRLVARLKGSVAAHETEHKKARQRRAARQKAERGHPNWSKAFGYLPGPNGPELDPRTAPLVKQAYADILAGASLGDVCRQWNDAGAFTITGRPWATTALSKFLRKPRNAGLRTYKGARYGPVDRDAIVGKAQWSPLVDEATFWAAQAVLDAPGRAPGRKSVRRHLLTGLAGCGKCGNHLAGSYRTDGRVVYVCKACHGVAILADNIEPILYRIVAERLAMPDAVGLLRREIHDAAEAETIRLELETLYGELDNLAVERAEGLLTARQVKISTDIVNAKITKLQVRQQDQERLRVLEGIPLGTPQVAGIIAELSPDRFRAVLDALAEVVVQPVGKGGGISNPERVQVNWR

SEQ ID NO: 6636 - protein, 452 aa, synthetic construct
MKAAIYIRVSTREQVENYSIQAQAEKLTALCRSKDWDVYDIFVDGGYSGSNMNRPALNEMLSKLHEIDAVVVYRLDRLSRSQRDTITLIEEYFLKNNVEFVSLSETLDTSSPFGRAMIGILSVFAQLERETIRDRMVMGKIKRIEAGLPLTTAKGRTFGYDVIDTKLYINEEEAKQLQLIYDIFEEEQSITFLQKRLKKLGFKVRTYNCYNNWLTNDLYCGYVSYKDKVHVKGVHEPIISEEQFYRVQEIFTRMGKNPNMNRDSASLLNNLVVCGKCGLGFVHRRKDAMSRDKKYHYRYYSCKTYKHIHELEKCGNKIWRADKLEELVINRVNSYSFASRNADKEDELGSLNEKLKIEHAKKKRLFDLYINGSFGVSELDSMMNDIDAQINYYESQIEANEELKKNKKIQENLANLATVDFDSLEFREKQLYLKSLINKIYIDGEQVTIEWK

SEQ ID NO: 6637 - protein, 469 aa, synthetic construct
MSYTTPVRAAVYLRISEDRSGEQLGVARQREDCLKLCGQRKWVPVEYLDNDVSASTGKRRPAYEQMLADITAGKIAAVVAWDLDRLHRRPIELEAFMSLADEKRLALATVAGDVDLATPQGRLVARLKGSVAAHETEHKRARQRRAARQKAERGHPNWSRAFGYLPGPNGPEPDPRTALLVKQAYADILAGASLGDVCRQWNDVGAFTITGRPWTTTALSKFLRKPRNAGLRAYKGARYGPVDRDAIVSKAQWSPLVDEATFWAAQAVLDAPGRAPGRKSVRRHLLTGLAGCGKCGSHLAGSYRTDGRVVYVCKACHGVAILADNIEPILYHIVAERLAMPDAVDLLRREIHDTAEVETIRLELETLYGELDRLAVERAEGLLTARQVKISTDIVSAKITKLRAHQLDQERLRVFDGIPLGTPQVAGTIAELSPDRFRAVLDVLAEVVVQPAGKSGRIFNPERVQVNWR

SEQ ID NO: 6638 - protein, 452 aa, synthetic construct
MKAAIYIRVSTREQVENYSIQAQTEKLTALCRSKGWDVYDIFIDGGYSGSNMNRPALNEMLSKLHEIDAVVVYRLDRLSRSQRDTITLIEEYFLKNNVEFVSLSETLDTSSPFGRAMIGILSVFAQLERETIRDRMVMGKIKRIEAGLPLTTAKGRTFGYDVIDTKLYINEEEAKQLRLIYDIFEEEQSITSLQKRLKKLGFKVRTYSRYNNWLTNDLYCGYVSYKDKVHVKGIHEPIISEEQFYRVQEIFTRMGKNPNMNRDSASLLNNLVVCSKCGLGFVHRRKDAMSRDKKYHYRYYSCKTYKHIHELEKCGNKIWRADKLEELVINRVNNYSLACRDVDKEGELDSLNEKLKIEHVKKKRLFDLYINGSYEVSELDSMMGDIDAQISYYESQIEANEELKKNKKIQENLADLATVDFDSLEFREKQLYLKRLISKIYIDGEQVTIEWL

SEQ ID NO: 6639 - protein, 469 aa, synthetic construct
MSYTTPVRAAVYLRISEDRSGEQLGVARQREDCLKLCDQRKWVPVEYLDNDVSASTGKRRPAYEQMLADITAGKIAAVVAWDLDRLHRRPVELEAFMSLADEKRLALATVAGDVDLATPQGRLVARLKGSVAAHETEHKRARQRRAARQKAERGHPNWSRAFGYLPGPNGPEPDPRTAPLVKQAYADILAGASLGDVCRQWNDAGAFTITGRPWTTTTLSKFLRKPRNAGLRAYKGARYGPVDRDAIVGKAQWSPLVDEASFWAAQAVLDAPGRAPGRKSVRRHLLTGLAGCGKCGSHLAGSYRTDGRVVYVCKACHGVAILADNIEPILYHIVAERLAMPDAVDLLRHEIHDAAEAETIRLELETLYGELDRLAVERAEGLLTARQVKISTDIVNAKINKLQACQLDQERLRVFDGIPLGTPQVAGMIAELSPNRFRAVLDVLAEVVVQPVGKGGRILNPERVQVNWR

SEQ ID NO: 6640 - protein, 452 aa, synthetic construct
MKAAIYIRVSTQEQVENYSIQAQTEKLTALCRSKDWDVYDIFIDGGYSGSNMNRPALNEMLSKLHEIDAVVVYRLDRLSRSQRDTTTLIEEYFLKNNVEFVSLSETLDTSSPFGRAMIGILSVFAQLERETIRDRTVMGKIKRIEAGLPLTTAKGRTFGYDVIDTKLYINEEEAKQLRLIYDIFEEEQSITSLQKRLKKLGFKVRTYNRYNNWLTNDLYCGYVSYKDKVHVKGIHEPIISEEQFYRVQEIFTRMGKNPNMNRDSASLLSNLVVCSKCGLGYVHRSKDTMSRGKKYHYRYYSCKTYKHTHELEKCGNKTWRADKLEELIINRVNNYSFASRNADKEDVLDSLNEKLKIEHARKKRLFDLYINGGYEVSELDSMMNDIDAQINYYESQIEASEELKKNKKTQENLADLATVDFDSLEFREKQLYLKSLINKIYIDGEQVTIEWL

SEQ ID NO: 6641 - protein, 452 aa, synthetic construct
MKAAIYIRVSTQEQVGNYSIQAQTEKLTALCRSKDWDVYDIFIDGGYSGSNMNRPALNEMLSKLHEIDAVVVYRLDRLSRSQRDTTTLIEEYFLKNNVEFVSLSETLDTSSPFGRAMIGILSVFAQLERETIRDRMVMGKIKRIEAGLPLTTAKGRTFGYDVIDTKLYINEEEAKQLQLIYDIFEEEQSITSLQKRLKKLGFKVRTYNRYNNWLTNDLYCGYVSYKDKVHVKGIHEPIISEEQFYRVQEIFTRMGKNPNMNRDSASLLNNLVVCSKCGLSFVHRSKDTTSRGKKYHYRYYSCKTYKHTHELEKCGNKTWRADKLEELIINRVNNYSFASRNADKEDELDSLNEKLKIEHAKKRRLFDLYINGGYEVSELDSMMSDIDAQINYYESQIEASEELKKNKKIQENLADLATVDFDSLEFREKQLYLKSLINKIYIDGEQVTIEWL

SEQ ID NO: 6642 - protein, 469 aa, synthetic construct
MSYTTPVRAAVYLRISEDRSGEQLGVARQREDCLELCGQRKWEPVEYLDNDVSASTGKRRPAYEQMLADITAGKIAAVVAWDLDRLHRRPIELEAFMSLADEKRLALATVAGDVDLATPQGRLVARLKGSVAAHETEHKKARQRRAARQKAERGYPNWSKAFGYLPGPNGPEPDPRTAPLVKQAYADILAGASLGDVCRQWNDAGAFTITGRPWTTTALSKFLRKPRNAGLRAYKGARYGPVDRDAIVGKARWSPLVDEAIFWAAQAVLDAPGRAPGRKSVRRHLLTGLAGCGKCGNHLAGSYRTDGKVAYVCKACHGVAILADNIEPILYHIVAERLAMPDAVDLLRREIHDAAEAETIRLGLETLHGELDRLAVERAEGLLTARQVKISTDIVNAKITKLQARQLDQERLRVLDGIPLGTPQVAGVIAELSPDRFRAVLDVLAEVVVQPVGKSGRIFNPERVQVNWR

SEQ ID NO: 6643 - protein, 485 aa, synthetic construct
MTKKVAIYTRVSTTNQAEEGFSIDEQIDRLTKYAEAVGWQVSDTYTDAGFSGAKLERPAMQRLINDIENKAFDTVLVYKLDRLSRSVRDTLYLVKDVFTKNKIDFISLNESINTSSAMGSLFLTILSAINEFERENIKERMTMGKLGRAKSGKSMMWTKTAFGYYHNRKTGILEIVPLQAAIVEQIFTDYLSGISLTKLRDKLNESGHIGKDIPWSYRTLRQTLDNPVYCGYIKFKGSLFEGMHEPIIPYETYLKVQKELEERQQQTYERNNNPRPFQAKYMLSGVARCGYCGAPLRIVLGHKRKDGSRTMKYHCANRSPRKTKGVTVYNDNKKCDSGTYDLSNLENTVIDNLIGFQENNDSLLKIINGNNQPILDTSSFKNQISQIDKKIQKNSDLYLNDFITLDELKDRTDSLQAEKRLLKARISENKFNDSTDVFELVKTRLGSIPINELSYDDKKKIVNNLVSKVDVTADSVDIIFKFQLA

SEQ ID NO: 6644 - protein, 469 aa, synthetic construct
MSYTTPVRAAVYLRISEDRSGEQLGVARQREDCLKLCDQRKWMPVEYLDNDVSASTGKRRPAYEQMLADITAGRIAAVVTWDLDRLHRRPIELEAFMSLADEKHLALATVAGDVDLATPQGRLVARLKGSVAAHETEHKKARQRRAARQKAERGYPNWSRAFGYLPGPNGPEPDPRTAPLVKQAYADILAGASLGDVCRQWNDAGALTITGRPWTTTTLSKFLRKPRNAGLRAYKGARCGPVDRDAIVGKAQWSPLVDEATFWAAQAVLDAPGRAPGRKSVRRHLLTGLAGCGKCGNHLAGSYRTDGKVVYVCKACHGVAILADNVEPILYHIVAERLAAPDAVDLLRCEIHDATEAETIRLELEALHDELDRLAVERAEGLLTARQVNICTDIVNAKITKLQARQLDQERLRVFDGIPLGTPQVAGRIAELSPDRFRAVLDVLAEVVVQPVGKSGRIFNPERVQVNWR

SEQ ID NO: 6645 - protein, 485 aa, synthetic construct
MTKKVAIYTRVSTTNQAEEGFSIDEQTDRLTKYAEAMGWQVSDTYTDAGFSGAKLERPAMQRLINDIENKAFDTVLVYKLDRLSRSARDTLYLVKDVFTKNKIDFISLNESIDTSSAMGSLFLTILSAINEFERENIKERMTMGKLGRAKSGKSMMWTKTAFGYYHNRKTGILEIVPLQATIVEQIFTDYLSGISLTKLRDKLNESGHIGKDIPWSYRTLRQTLDNPVYCGYIKFKDSLFEGMHKPIIPYETYLKVQKELEERQQQAYERNNNPRPFQAKYMLSGMARCGYCGAPLRIVLGRKRKDGSRTMKYHCANRFPRKTKGVTVYNDNKKCDSGTYDLSNLEDTVVDNLIGFQEDLDSLLKIINGNNQPILDTSSLKKQISQIDKKIQKIGDLYLNDLITMDELKDRTDSLQAEKKLLEAKISENKFNDSTDVFELVKTQLGSIPINELSYDNKKRIVNNLVSKVDVTADNVDIIFKFQLA

SEQ ID NO: 6646 - protein, 452 aa, synthetic construct
MKAAIYIRVSTREQVENYSIQAQTEKLTALCRSKDWDVYDIFIDGGYSGSNMNRPALNEMLSKLHEIDAVVVYRLDRLSRSQRDTITLIEEYFLKNNVEFVSLSETLDTSSPFGRAMIGILSVFAQLERETIRDRMVMGKIKRIEAGLPLTTAKGRTFGYDVIDTKLYVNEEEAKQLQLIYDIFEEEQSITFLQRRLKKLGFKVRTYNRYNNWLTNDLYCGYVSYKDKVHVKGIHEPIISEEQFYRVQEIFTRMGKNPNMNRDSASLLSNLVVCSKCGLGFVHRRKDAMSRDKKYHYRYYSCKTYKHIHELEKCGNKIWRADKLEELIINRVNNYSLASRNVDKEDELDSLNEKLKIEHAKKKRLFDLYINGSYEVSELDSMMNDIDAQINYYESQIEANEELKKNKKIQENLADLATVDFDSLEFREKQRYLKSLINKIYIDGEQVTIEWL

SEQ ID NO: 6647 - protein, 452 aa, synthetic construct
MKAAIYIRVSTREQVENYSIQAQTEKLTALCRSKDWDVYDIFIDGGYSGSNMNRPALNEMLSKLHEIDAVVVYRLDRLSRSQRDTITLIEEYFLKNNVEFVSLSETLDTSSPFGRAMIGILSVFAQLERETIRDRMVMGKIKRIEAGLPLTTAKGRTFGYDAIDTKLYINEEEAKQLRLIYDIFEEEQSITSLQKRLKKLGFKVRAYNRYNNWLTNDLYCGYVSYKDKVHVKGIHEPIISEEQFYRVQEIFTRMGKNPNMNRDSASLLNGLVVCGKCGLSFVHRRKGTMSRGKKYHYRYYSCKTYKHTHELEKCGNKIWRADKLEELIISRVNDYSFASRNVDKGDELDSLNEKLKIEHAKRERLFDLYINGSYEVSELDSMMNDIDAQINHYESQIEANEELKKDKKTQENLADLAAVDFDSLEFREKQLYLKSLINKIYIDGEQVTIEWL

SEQ ID NO: 6648 - protein, 485 aa, synthetic construct
MTKKVAIYTRVSTTNQAEEGFSIDEQTDRLTKYAEAMGWQVSDTYTDAGFSGAKLERPAMRRLINDIKNKAFDTVLVYKLDRLSRSVHDTLYLVKDVFTKNKIDFISLNESIDTSSAMGSLFLTILSAINEFERENIKERMTMGKLGRAKSGKSMMWTKTAFGYHHNRKTGILEIVPLQATIVEQIFTDYLSGISLTKLRDKLNESGHIGKDIPWSYRTLRQTLDNPVYCGYIKFKGSLFEGMHKPIIPYETYLKVQKELEERQQQAYERNSNPRPFQAKYMLSGMARCGYCGAPLRIVLGHKRKDGSRTMKYHCANRFPRKTKGITVYNDNKKCDSGTYDLSDLENTVIDNLIGFQENNDSLLKIINGNNQPILDTSSFKEQISQIDKKIQKNSDLYLNDFITMDELKDRTDSLQAEKKLLKAKINENKFNDSTDVFELVKTQLGSIPINELSYDDKKKIVNNLVSKVDVTADNVDIIFKFQLT

SEQ ID NO: 6649 - protein, 452 aa, synthetic construct
MKAAIYIRVSTREQVENYSIQAQTEKLTALCRSKDWDVYDIFIDGGYSGSNMNRPALNEMLSKLHEIDAVVVYRLDRLSRSQRDTITLIEEYFLKNNVEFVSLSETLDTSSPFGRAMIGILSVFAQLERETIRDRMVMGKIKRIEAGLPLTTAKGRTFGYDVIDTKLYINEEEAKQLRLIYDIFEEEQSITFLQKRLKQLGFKVRTYNRYNNWLTNDLYCGYVSYKDKVHVKGIHEPIISEEQFYRVQEIFARMGKNPNMNRDSASLLNNLVVCSKCGLGFVHRRKDAMSRDKKYHYRYYSCKTYKHIHELEKCGNKIWRADKLEELIINRVNSYSLAGRNVDKEDELDSLNEKLKMEHVKKKRLFDLYINGSYEVSELDSMMNDIDAQINYYESQIEANEELKKNKRIRENLAGLATVDFDSLEFREKQLYLKSLINKIYIDGEQVTIEWL

SEQ ID NO: 6650 - protein, 485 aa, synthetic construct
MTKKVAIYTRVSTANQAEEGFSIDEQIDRLTKYAEAMGWQVSDTYTDAGLSGAKLERPAMQRLINDIENKAFDTVLVYKLDRLSRSVRDTLYLVKDVFTKNKIDFISLNESIDTSSAMGSLFLTILSAINEFERENIKERMTMGKLGRAKSGKSMMWTKTAFGYYHNRKTGILEIVPLQATIVEQIFTDYLSGISLTKLRDKLNESGHIGKDIPWSYRTLRQTLDNPVYCGYIKFKDSLFEGMHKPIIPYETYLKVQEELVVRQQQTYGRNNNPRPFQAKYMLSGMARCGYCGAPLKIVLGHKRKDGSRTMKYHCANRFPRKTKGVTVYNDNKRCDSGTYDLSNLEDTVIDSLIGFQENNDSLLKIINGNNQPIPDTSSFEKQISQIDKKIQKNSDLYLNDFITMDELKDRTDSLQAEKKLLEAKISENKFNDSTDVFELVKTQLGSIPINELSYDNKKRIVNNLVSKVDVTADNVDIIFKFQLA

SEQ ID NO: 6651 - protein, 452 aa, synthetic construct
MKAAIYIRVSTREQVENYSIQAQTEKLTALCRSKDWDVYDIFIDGGYSGSNMNRPALNEMLSKLHEIDAVVVYRLDRLSRSQRDTITLIEEYFLKNNVEFVSLSETLDTSSPFGRAMIGILSVFAQLERETIRDRMVMGKIKRVEAGLPLTTARGRTFGYDVIDTKLYINEEEAKQLQLIYDIFEEVQSITFLQKRLKKLGLKVHTYNRYNNWLTNDLYCGYVSYKDRVHVKGIHEPIISEEQFYRVQEIFTRMGKNPNMNRDSASLLSNLVECSKCGLGFVHRRKDTMSRGKKYHYRYYSCKTYKHIHELEKCGNKIWRADKLEELIINRVNNYSFASRNVDKEDELDSLNRKLKIEHAKKKRLFDLYINGSYEVSELDSMMNDIDAQINYYESQIEANEKLKKNKKIQENLANLATVDYDSLEFREKQLYLKSLINKIYIDGEQVTIEWL

SEQ ID NO: 6652 - protein, 485 aa, synthetic construct
MTKKVAIYTRVSTTNQAEEGFSIDEQVDRLTKYAEAMGWQVSDTYTDAGLSGAKLERPAMQRLINDIENKAFDTVLVYKLDRLSRSVRDTLYLVKDVFTRNKIDFISLNESIDTSSAMGSLFLTILSAINEFERENIKERMTMGKLGRAKSGKSMMWTKTAFGYYHNRKTGILEIVPLQATIVEQIFTDYLSGTSLTKLRDKLNESGHIGKDIPWSYRTLRQTLDNPVYCGYIKFKGSLFEGMHKPIIPYETYLKVQKELEERQQQTYGRNNNPRPFQAKYMLSGMARCGYCGAPLRVVLGHKRKDGSRTMKYHCANRFPRKTKGITVYNDNKKCDSGTYDLSNLENTVIDNLIGLQENNDSLLKIINGNNQPILDTSSFKKQISQIDKKIQKNSELYLNDFITMDELKDRTDSLQAEKKLLKAKISENKFNDRTDVFELVKTQLGSIPINELSYDNKKKIVNNLVSKVDVTADNVDIIFKFQLA

SEQ ID NO: 6653 - protein, 485 aa, synthetic construct
MTKKVAIYTRVSTTNQAEEGFSIDEQIDRLTKYAEAMGWQVSDTYTDAGFSGAKLERPAMQRLINDIENKAFDTVLVYKLDRLSRSVRDTLYLVKDVFTKNKIDFISLSESIDTSSAMGSLFLTILSAINEFERENIKERMTMGKLGRARSGKSMMWTKTAFGYYHNRKTGILEIVPLQAAIVEQIFTDYLSGISLTKLRDKLNESGHVGKDIPWSYRTLRQTLDNPVYCGYIKFKDGLFEGMHKPIIPYETYLKVQKELEERQQQTYERNNNPRPFQAKYMLSGMARCGYCGAPLKIVLGHKRKDGSRTMRYHCANRFPRKTKGVTVYNDNKKCDSGTYDLSNLENTVIDNLIGFQENNDSLLKIINGNNQPILDTSSFKEQISQIDKKIQKNSDLYLNDFITMEELKDRTDSLQAEKKLLKAKISENKFNDSTDVFELVKTQLGSIPINELSYDNKKKIVNNLVSKVDVTADNVDIIFKFQLA

SEQ ID NO: 6654 - protein, 469 aa, synthetic construct
MSYTTPVRAAVYLRISEDRSGEQLGVARQREDCLKLCGQRKWVPVEYLDNDVSASTGKRRPAYEQMLADITAGKIAAVVAWDLDRLHRRPVELEAFMSLADEKRLALATVAGDVDLATPQGRLVARLKGCVAAHETEHKKARQRRAARQKAERGLPNWSKAFGYLPGPNGPEPDPRTAPLVKQAYADILAGASLGDVCRQWNDAGAFTITGRPWTTTTLSKFLRKPRNAGLRAYKGARFGPVDRDAIVGKAQWSPLVDEATFWAAQAVLDAPGRAPGRKSVRRHLLTGLASCGKCGNHLAGSYRTDGRVVYVCKACHGVAILADNIEPILYRIVVERLAMPDAVDLLRREIHDAAEAETIRLELETLYGELDRLAVERAEGLLTARQVKISTDIVNAKITKLQARQLDRDRLRVLDGIPLGTPQVAGVIAELSPDRFRAVLDVLAEVVVQPVGKSGRIFNTERVQVNWR

SEQ ID NO: 6655 - protein, 452 aa, synthetic construct
MKAAIYIRVSTQEQVGNYSIQAQTEKLTALCRSKDWDVYDIFVDGGYSGSNMNRPALNEMLSKLHEIDAVVVYRLDRLSRSQRDTTTLIEEYFLKNNVEFVSLSETLDTSSPFGRAMIGILSVFAQLERETIRDRMVMGKIKRIEAGLPLTTAKGRTFGYDVIDTKLYINEEEAKQLQLIYDIFEEEQSITFLQKRLKKLGFKVRSYNRYNNWLTNDLYCGYVSYKDKVHVKGIHEPIISEEQFYRVQEIFTRKGKNPNMNRDSASLLNNLVVCSKCGLSFVHRSKDTMSRGKKYHYRYYSCKTYKHTHELEKCGNKTWRADKLEELIINRVNNYSFASRNVDKEDELDSLNEKLKIEHAKKKRLFDLYINGSYEVSELDSMMNDIDAQISYYESQIEANEELKKNKKIQENLADLATVDFDSLGFREKQLYLKGLINKIYIDGEQVTIEWL

SEQ ID NO: 6656 - protein, 485 aa, synthetic construct
MTKKVAIYTRVSTTNQAEEGFSIDEQIDRLTKYAEAMGWQVSDTYTDAGSSGAKLERPAMQRLINDIENKVFDTVLVYKLDRLSRSVRDTLYLVKDVFTKNKIDFISLNESIDTSSAMGSLFLTILSAINEFERENIKERMTMGKLGRARSGKSMMWTKTAFGYYHNRKTGILEIVPLQATIVEQIFTDYLSGISLTKLRDKLNESGHIGKDIPWSYRTLRQTLDNPVYCGYIKFKDSLFEGMHKPIIPYETYLKVQKELEERQQQTYERNNNPRPFQAKYMLSGMARCGYCGAPLRIVLGHKRKDGSRTMKYHCANRFPRKTRGVTAYNDNKKCDSGTYDLSNLENTVIDNLIGFQENNDSLLKIINGNNQPIPDTSSFKKRISQIDKKIQKNSDLYLNDFITMDELKDRTDSLQAEKKLLKAKISENKFNDSADVFKLVKTQLGSIPISELSYDDKKKIVNNLVSKVDVTADNVDVIFKFQLA

SEQ ID NO: 6657 - protein, 469 aa, synthetic construct
MSYTTPVRAAVYLRISEDRSGEQLGVARQREDCLELCAQRKWVPVEYLDNDVSASTGKRRPAYEQMLADITAGRIAAVVAWDLDRLHRRPIELEAFMSLADEKRLALATVAGDVDLATPQGRLVARLKGSVAAHETEHKKERQRRAARQKAERGYPNWSKAFGYLPGPNGPEPDPRTAPLVKQAYADILAGASLGDVCRRWNDAGAFTITGRPWTTTTLSKFLRKPRNAGLRAYKGARYGPVDRDAIVGKAQWSPLVDEATFWAAQAVLDAPGRAPGRKSVRRHLLTGLAGCGKCGNHLAGSYRTDGRVVYVCKACHGVAILADNIEPILYHIVAERLAMPDAVNLLRREIHDAAEAETIRLELEALYGELDRLAVERAEGLLTARQVKISTDIVNAKITKLQARQLDQERLRVLDGIPLGTPQVAGMIAELSPDRFRAVLDVLAEVVVQPVGKSGRIFNPERVQVNWR

SEQ ID NO: 6658 - protein, 469 aa, synthetic construct
MSYTTPVRAAVYLRISEDRSGEQLGVARQREDCLKLCDQRKWVPVEYLDNDVSASTGKRRPAYEQMLADITAGKIAAVVAWDLDRLHRRPIELEAFMSLADEKRLALATVAGDVDLATPQGRLVARLKGSVAAHETEHKRARQRRAARQKAERGYPNWSKAFGYLPGPNGPEPDPRTAPLVKQAYADILAGASLGDVCRQWNDAGAFTITGRPWTTTTLSKFLRKPRNAGLRAYKGARYGPVDRDAIVGKAQWSPLVDEATFWAAQAVLDAPGRAPGRKSVRRHLLTGLAGCGKCGNHLAGSYRTDGRVVYVCKACHGVAILADHIEPILYHIVAERIAMPDAVDLLRREIHDAAEAEAIRLELETLYGELDRLAVERAEGLLTARQVKICTDIVNAKITKLQAHQLDQERLRVLDGIPLGTPQVAGTIAELSPDRFRAVLDVLAEVVVQPVGKSGRIFNPERVQVNWR

SEQ ID NO: 6659 - protein, 452 aa, synthetic construct
MKAAIYIRVSTQEQVENYSIQAQTEKLTALCRSKDWDVYDIFIDGGYSGSNMNRPALNEMLSKLHEIDAVVVYRLDRLSRSQRDTITLIEEYFLKNNVEFVSLSETLDTSSPFGRAMIGILSVFAQLERETIRDRMVMGKIKRIEAGLPLTTAKGRTFGYDVIDTKLYVNEEEAKQLQLIYDIFEEEQSITFLQKRLKKLGFKVRTYNRYNSWLTNDLYCGYVSYKDKVHVKGIHEPIISEEQFYRVQEIFTRMGKNPNMNRDSASLLNNLVVCSKCGLGFVHRRKDTMSRGKKYHYRYYSCKTYKHIHELERCGNKIWRADKLEELIINRVNNYSVASRNVDKEDELDSRNEKLKIEHAKKKRLFDLYINGSYKVSELDSMKNDIDAQINYYESQIEANEELKKNKKIQETLADLATVDFDSLEFREKQRYLKSLINKIYIDGEQVTIEWL

SEQ ID NO: 6660 - protein, 452 aa, synthetic construct
MKAAIYIRVSTQEQVENYSIQAQTEKLTALCRSKDWDVYDIFIDGGYSGSNMNRPALNEMLSKLHEIDAVVVYRLDRLSRSQRDTTTLIEEYFLKNNVEFVSLSETLDTSSPFGRAMIGILSVFAQLERETIRDRMVMGKIKRIEAGLPLTTAKGRTFGYDVIDTKLYINEEEAKQLQLIYDIFEEEQSITSLQKRLKKLGFKVRTYNRYNNWLTNDLYCGYVSYKDKVHVKGIHEPIISEEQFYRVQEIFTRMGKSSNMNRDSASLLNNLVVCSKCGLSFVHRSKDTMSRGKKYHYRYYSCKTYKHTHELEKCGNKIWRADRLEELIINRVNNYSFASRNVDKEGELDSLNEKLKIEHAKKRRLFDLYINGSYEASELDSMMNDIDAQISYYESRIEANEELKKNKKIQENLANLATVDFDSLEFREKQLYLKSLINKIYIDGEQVTIEWL

SEQ ID NO: 6661 - protein, 452 aa, synthetic construct
MKAAIYIRVSTREQVENYSIQAQTEKLTALCRSKDWDVYDIFIDGGYSGSNMNRPALNEMLGKLHEIDAVVVYRLDRLSRSQRDTITLIEEYFLKNNVEFVSLSETLDTSSPFGRAMIGILSVFAQLERETIRDRMVMGKIKRVEAGLPLTTAKGRTFGYDVIDTKLYINEEEAKQLQLIYDIFEEEQSITFLQKRLKKLGFKVHTYNRYNNWLTNDLYCGYVSYKDKVHVKGIHEPIISEEQFYRVQEIFTRMGKNPNMNRDSASLLSGLVVCSKCGLGFVHRRKDTMCRGKKYHYRYYSCKTYKHTHELEKCGNKIWRADKLEELIINRVNNYSFASRNVDKEDELDSLNEKLKIEHAKKKRLFDLYINGSYEVSELDSMMNDIDAQINYYESQIEANEELKKNKKIQESLANLATVDYDSLEFREKQLYLKSLINKIYIDGEQVTIEWL

SEQ ID NO: 6662 - protein, 469 aa, synthetic construct
MSYTTPVRAAVYLRISEDRSGEQLGVARQREDCLKLCDQRKWVPVEYLDNDVSASAGRRRPAYEQMLADITAGKIAAVVAWDLDRLHRRPIELEAFMSLADEKRLALATVAGDVDLATPQGRLVARLKGSVAAHETEHKKARQRRAARQKAERGYPNWNKAFGYLPGPNGPEPDPRTAPLVKQAYADILAGASLGDVCRQWNDAGAFTITGRPWTTTTLSKFLRKPRNAGLRAYKGARYGPVDRDAIVGKAQWSPLVDEATFWAAQAVLDAPGRAPGRKSVRRHLLTGLAGCGKCGNHLAGSYRTDGRVVYVCKACHGVAILADNIEPILYHIVAERLAMPDAVDLLRREIHDAAEAETIRLELETLYGELDRLAVERAEGLLTARQVKISTDIVNAKIAKLQARQLDQERLRVLDGIPLGTPQVADVIAELSPDRFRAVLDVLVDVVVQPVGKGGRIFNPERVRVNWR

SEQ ID NO: 6663 - protein, 452 aa, synthetic construct
MKAAIYIRVSTREQVENYSIQAQTEKLTALCRSKDWDVYDIFIDGGYSGSNMNRPALNEMLSRLHEIDAVVVYRLDRLSRSQRDTITLIEEYFLKNNVEFVSLSEALDTSSPFGRAMIGILSVFAQLERETIRDRMVMGKIKRIEAGLPLTTAKGRTFGYDVIDTKLYINEEEAKQLQLIYDIFEEEQSITLLQKRLKKLGFKVRTYNRYNNWLTNDLYCGYVRYKDKVHVKGIHEPIISEEQFYRVQEIFTRMGKNPNMNRDSASLLNNLVVCSKCGLGFVHRRKDTTSRGKKYHYRYYSCRTYKHTHELEKCGNKIWRADKLEELIINRVNNYSFASRNVDKEDELDSLNEKLKIEHAKKKRLFDLYINGSYEVSELDSLMNDIDAQISYYESQIEENEELKKNKKIQENLANLATVDFDSLEFREKQQYLKGLINRIYIDGEQVTIEWL

SEQ ID NO: 6664 - protein, 452 aa, synthetic construct
MKAAIYIRVSTQEQVGNYSIQAQTEKLTALCRSKDWDVYDIFVDGGYSGSNMNRPALNEMLSKLHEIDAVVVYRLDRLSRSQRDTTTLIEEYFLKNNVEFVSLSETLDTSSPFGRAMIGILSVFAQLERETIRDRMVMGKIKRIEAGLPLTTAKGRTFGYDVIDTKLYINEEEAKQLQLIYDIFEEEQSITSLQKRLKKLGFKVRTYNRYNNWLTNDLYCGYVSYKDKVHVKGIHEPIISEEQFYRVQEIFTRMGKNPNMNRDSTSLLNNLVVCSKCGLGFVHRSKDTMCRGKKYHYRYYSCKTYKHTHELEKCGNKTWRADKLEELIISRVNNYSFASRSVDKEGELDSLNEKLKIEHAKKKRLFDLYINGSYEVSELDSMMNDIDAQINYYESQIEANEELRKNKKIQENLADLATVDFDSLEFREKQLYLKSLINKIYIDGEQVTIEWL

SEQ ID NO: 6665 - protein, 452 aa, synthetic construct
MKAAIYIRVSTREQVENYSIQAQTEKLTALCRSKDWDVYDVFIDGGYSGSNMNRPALNEMLSKLHEIDAVVVYRLDRLSRSQRDTITLIEEYFLKNNVEFVSLSETLDTSSPFGRAMIGILSVFAQLERETIRDRMVMGKIKRIEAGLPLTTAKGRTFGYDVIDTKLYVNEEEAKQLQLIYDIFEEEQSITSLQKRLKKLGFKVHTYNRYNNWLTNDLYCGYVSYKDKVHVKGIHEPIISEEQFYRVQEIFARMGKSPNMNRDSASLLNNLVVCSKCGLGFVHRRKDAMSRDKKYHYRYYSCKTYKHIHELEKCGNKIWRADKLEELIINRVNNYSIASRNADKEDELDSLNEKLKIEHAKKKRLFELYINGSYEVSELDSMMNDIDAQINYYEGQIEASERLRKNKKIQENLAHLATVDFDSLEFREKQLYLKSLINKIYIDGEQVTIEWL

SEQ ID NO: 6666 - protein, 452 aa, synthetic construct
MKAAIYIRVSTREQVENYSIQAQTEKLTALCRSKDWDVYDIFIDGGYSGSNMNRPALNEMLSKLHEIDAVVVYRLDRLSRSQRDTITLIEEYFLKNNVEFVSLSETLDTSSPFGRAMIGILSVFAQLERETIRDRMMMGKIKRIEAGLPLTTAKGRTFGYDVIDTKLYINEEEAKQLQLIYDIFEEEQSITFLQKRLKKLGFKVRTYSRYNSWLTNDLYCGYVSYKDKVHVKGIHEPIISEEQFYRVQEIFTRMGRNPNMNRDSASLLNNLVVCSKCGLGFVHRRKDTMSRGKKYHYRYYSCKTYKHTHELEKCGNKIWRADKLEELIINRVNDYSFASRNVDKAEELDSLNEKLKVEHAKKKRLFDLYINGSYNVSELDSMMNDIDAQINYYESQIEANEELKKDKKIQESLANLATVDYDSLEFREKQLYLKSLINKIYIDGEQVTIEWL

SEQ ID NO: 6667 - protein, 485 aa, synthetic construct
MTKKVAIYTRVSTTNQAEEGFSIDEQTDRLTKYAEAMGWQVSDTYTDAGSSGAKLERPAMQRLINDIENKAFDTVLVYKLDRLSRSVRDTLYLVKDVFTKNKIDFISLNESIDTSSAMGSLFLTILSAINEFERESIKERMTMGKLGRAKSGKSMMWTKTAFGYYHNRKTGILEIVPLQATIVEQIFTDYLSGISLTKLRDKLNESGHIGKDIPWSYRTLRQTLDNPVYCGYIKFKDSLFEGMHEPIIPYETYLKVQKELEERQQQTYERNNNPRPFQAKYMLSGMARCGYCGAPLKIVLGHKRKDGSRTMKYHCTNRFPRKTKGITVYNDNKKCDSGTYDLSNLESTVIDNLIGFQENDDSLLRIISGSNQPILDTSSFERQISQIDKKIQKNSDLYLNDFITMDELKARTDSLQAEKRLLKAKISENKFNDSTDVFELVKTQLGSIPINELSYDNKKKIVNNLVSKVDVTADNVDIIFKFQLA

SEQ ID NO: 6668 - protein, 469 aa, synthetic construct
MSYTTPVRAAVYLRISEDRSGEQLGVARQREDCLKLCGQRKWVPVEYLDNDVSASTGKRRPAYEQMLADITAGKIAAVVAWDLDRLHRRPIELEAFMSLADEKRLALATVAGDVDLATPQGRLVARLKGSVAAHETEHKKARQRRAARQKAERGHPNWSKAFGYLPGPNGPEPDPRTAPLVKQAYADILAGASLGDVCRQWNDAGAFTITGRSWTTTTLSKFLRKPRNAGLRAYKGARYGPVDRDAIVGKAQWSPLVDEATFWAAQAVLDAPGRAPGRKSVRRHLLTGLAGCGKCGSHLAGSYRTDGRVVYVCKACYGVAILADNIEPILYHIVAERLAMPDAVDLLRREIHDAAEAETIRLGLETLYGELDRLAVERAEGLLTARQVKISTDIVNAKIAELQARQLDQERLRVLGGIPLGTPQAAGMIAELSPDRFRAVLDVLAEVVVQPVGKSGRICNPERVQVNWR

SEQ ID NO: 6669 - protein, 452 aa, synthetic construct
MKAAIYIRVSTREQVGNYSIQAQTEKLTALCRSKDWDVYDIFIDGGYSGSNMNRPALNEMLSKLHEIDAVVVYRLDRLSRSQRDTITLIEEYFLKNNVEFVSLSETLDTSSPFGRAMIGILSVFAQLERETIRDRMMMGKIKRIEAGLPLTTAKGRTFGYDVIDAKLYINEEEAKQLRLIYDIFEEEQSITFLQKRLKKLGFKVRTYSRYNNWLTNDLYCGYVSYKDKVHVKGIHEPIISEEQFYRVQEIFTRMGKNPNMNRDSASLLSNLVVCSKCGLSFVHRRKDTMSRGKKYHYRYYSCKTYKHTHELEKCGNKIWRADKLEELIISRVNNYSFASRNVDKDDELDSLNEKLKIEHAKKKRLFDLYINGSYEMSELDSMMNDIDAQIDYYESRIEANEELKKNKKIQENLANLATVDYDSLGFREKQLYLKGLINKIYIDGEQVTIEWL

SEQ ID NO: 6670 - protein, 485 aa, synthetic construct
MTKRVAIYTRVSTTNQAEEGFSIDEQIDRLTKYAEAMGWQVSDTYTDAGFSGAKLERPAMQRLINDIENKAFDTVLVYKLDRLSRSVRDTLYLVKDVFTKNKIDFISLNESINTSSAMGSLFLTILSAINEFERENIKERMTMGKLGRAKSGKSMMWTKTAFGYYHNRKTGILEIVPLQATIVEQIFTDYLSGISLTKLRDKLNESGHIGKDIPWSYRTLRQTLDNPVYCGYIKFKDSLFEGMHKPIIPYETYLKVQKELEERQQQTYERNNNPRPFQARYMLSGVARCGYCGAPLRIVLGHKRRDGSRTMKYHCANRFPRKTKGVTVYNDNKKCDSGTYDLSNLENTVIDNLVGFQENNDSLLKTINGNNQPILGTSSVKKQISQIDKKIQKNSDLYLNDFITMDELKDRTDSLQAEKKLLEAKISENKFNDSTDVFELVKTQLGSIPINELSYDSKKKIVNNLVSKVDVTADNVDIIFKFQLA

SEQ ID NO: 6671 - protein, 469 aa, synthetic construct
MSYTTPVRAAVYLRISEDRSGEQLGVARQREDCLKLCGQRKWVPVEYLDNDVSASTGKRRPAYEQMLADITAGKIAAVVAWDLDRLHRRPIELEAFMSLADEKRLALATVAGDVDLATPQGRLVARLKGSVAAHETEHKKARQRRAARQKAERGHPNWSKAFGYLPGPNGPEPDPQTAPLVKQAYADILAGASLGDVCRQWNDAGAFTITGRPWTTTALSKFLRKPRNAGLREYKGARYGPVDRDAIVGKAQWSPLVDEATFWAAQAVLDAPGRAPGRKSVRRHLLTGLAGCGKCGNHLAGSYRTDGQVVYVCKACYGVAILADNIVPILYHIVAERLAMPDAVDLLRREIHDAVEAETIRLELEILYGELDRLAVERAEGLLTARQVKVSTDIVSAKITRLQARQLDQERLRVFDGIPLGTPQVAGMIAELSPDRFRAVLDVLAEVVVQPMGKRGRIFNPERVQVNWR

SEQ ID NO: 6672 - protein, 452 aa, synthetic construct
MKAAIYIRVSTREQVENYSIQAQTEKLTALCRSKDWDVYDIFIDGGYSGSNMNRPALIEMLSKLHEIDAVVVYRLDRLSRSQRDTITLIEEYFLKNNVEFVSLSETLDTSSPFGRAMIGILSVFAQLERETIRDRMVMGKIKRIEAGLPLTTARGRTFGYDVVDTKLYINEEEAKQLQLIYDIFEEEQSITFLQKRLKKLGFKVRTYNRYNNWLTNDLYCGYVSYKDKVHVKGIHEPIISEEQFHRVQEIFTRMGKNPNMNRDSASLLNNLVVCSKCGLGFVHRRKDATSRDKKYHYRYYSCKTYKHIHELEKCGNKIWRADKLEELIINRVNNYSLASRNVDKEDELDSLNEKLKIEHAKKRRLFDLYINGSYEVSELDSMMNDIDAQINYYESQIEANEELKKNKKIQESLAYLATVDFDSLEFREKQLYLKSLINKIYIDGEQVTIEWL

SEQ ID NO: 6673 - protein, 485 aa, synthetic construct
MTKKVAIYTRVSTTNQAEEGFSIDEQVDRLTKYAEAMGWQVSDTYTDAGFSGAKLERPAMQRLINDIENKAFDTVLVYKLDRLSRSVRDTLYLVKDVFTKNKIDFISLSESIDTSSAMGSLFLTILSAINEFERENIKERMTMGKLGRAKSGKSMMWTKTAFGYYHNRKTGILEVVPLQATIVEQIFTDYLSGISLTKLRDKLNESGHIGKDIPWSYRTLRQTLDNPVYCGYIKFKGSLFEGMHKPIIPYETYLKVQKELEERQQQAYERNNNPRPFQAKYMLSGMARCGYCGAPLKIVLGHKRKDGSRTMKYHCANRFPRKTKGVTVYNDNKKCDSGTYDLSNLENTVIDNLVGFQENNDSLLKIINGNNQPVLDTSSLKKQISQIDNKIRKNSDLYLNGFITMDELKDRTDSLQAEKKLLEAKASENKFNDSTDVFELVKTQLGSIPINELSYDNKKKIVNNLVSKVDVTADNVDIIFKFQLA

SEQ ID NO: 6674 - protein, 485 aa, synthetic construct
MTKKVAIYTRVSTINQAEEGFSIDEQIDRLTKYAEAMGWQVSDTYTDAGVSGAKLERPAMQRLINDIENKAFDTVLVYKLDRLSRSVRDTLYLVKDVFTKNKIDFISLNESIDTSSAMGSLFLTILSAINEFERENIKERMTMGKLGRAKSGKSMMWTKTAFGYYHNRKTGILEIVPLQATIVEQIFTDYLSGISLTKLRDKLNKSGHVGKDIPWSYRTLRQTLDNPVYCGYIKFKGSLFEGMHKPIIPYETYLKVQKELEERQQQTYERNNNPRPFQAKYMLSGMARCGYCGAPLKVVLGHKRKDGSRTMKYHCANRFPRKTKGVTVYNDNKKCDSGTYELSDLENTVIVSLIGFQENNDSLLKIINGNNQPIRDTSSFKKQISQIDKKIQKNSDLYLNDFITMDELKDRTDSLQAEKKLLKAKICENKFNDSTDVLELVKTQLGSIPINELSYDNKKKIVNNLVSKVDVTADNVDIIFKFQLA

SEQ ID NO: 6675 - protein, 469 aa, synthetic construct
MSYTTPVRAAVYLRISEDRSGEQLGVARQREDCLKLCGQRKWVPVEYLDNDVSASTGKRRPAYEQMLADITAGKIAAVVAWDLDRLHRRPIELEAFMSLADEKHLALATVAGDVDLATPQGRLVARLKGCVAAHETEHKKARQRRAARQKAERGHPNWSKAFGYLPGPDGPEPDPRTAPLVKQAYADILAGASLGDVCRQWNDAGAFTITGRPWTTTTLSKFLRKPRNAGLRAYKGARYGPVDRDAIVGKAQWSPLVDEATFWAAQAVLDAPGRAPGRKSVRRHLLTGLAGCGKCGNHLAGSYRTDGQVVYVCKACHGVSILAVNIVPILYQVVAERLTMPDAVDLLRREIHDAAEAETIRLELETLYGELDRLAVERAEGLLTARQVKISTDIVNAKITKLRARQLDQERLRVFNGIPLGTPQVAGMIAELSPDRFRAVLDVLAEVVVQPVGKGGRIFNPGRVQVNWR

SEQ ID NO: 6676 - protein, 485 aa, synthetic construct
MTKKVAIYTRVSTTNQAEEGFSIDEQIDRLTKYAEAMGWQVSDTYTDAGFSGAKLERPAMQRLINDIENKAFDTVLVYKLDRLSRSVRDTLYLVKDVFTKNKIDFISLNESIDTSSAMGSLFLTILSAINEFERENIKERMTMGKLGRAKSGKSMMWTKTAFGYYHNRKTGILEIVPLQAIIVEQIFTDYLGGISLTKLRDKLNESGHIGKDIPWSYRTLRQTLDNPVYCGYIKFKDSLFEGMHKPIISYETYLKVQKELEERQQQTYERNNNPRPFQAKYMLSGMARCGYCGAPLRIVLGHKRKDGSRTMKYHCANRFPRKTRGVTVYNDNRKCDSGTYDLSNLENTVIDNLVGFQENSDSLLKIINGNNQPILDTSSFKKQIRQIDKKIQKNSDLYLNDFITMDELKVRTDSLQAEKKLLKAKISENRFNDSTDVLELVKTQLGSIPINELSYDNKKKIVNNLVSKVDVTADNVDIIFKFQLV

SEQ ID NO: 6677 - protein, 485 aa, synthetic construct
MSKKVAIYTRVSTTNQAEEGFSIDEQIDRLTKYAEAMGWQVSDTYTDAGFSGAKLERPAMQRLINDIENKAFDTVLVYKLDRLSRSVRDTLYLVKDVFTRNKIDFISLNESIDTSGAMGSLFLTILSAINEFERENIKERMTMGKLGRAKSGKSMMWTKTAFGYYHNRKTGILEIVPLQATIVEQIFTDYLSGISLTKLRDKLNESGHIGKDIPWSYRTLRQTLDNPVYCGYIKFKDSLFEGMHKPIIPYETYLKVQKELEERQQQTYERNNNPRPFQAKYMLSGMARCGYCGAPLKIVLGHKRKDGSRTMKYHCANRFPRKTKGITVYNDNKKCDSGTYDLSNLENTVIDYLIGFQENNDSLLEIINGNNQPILDTSSFKKQISQIDKKIQKYGDLYLNDFITMDELKDRTDSLQAEKKLLKAKISENKFNDSTDVFELVKTQLGSIPINELSYDNKKKIVNDLVSKVDVTADNVDIIFKFQLV

SEQ ID NO: 6678 - protein, 452 aa, synthetic construct
MKAAIYIRVSTREQVENYSIQAQTEKLTALCHSKDWDVYDIFIDGGYSGSNMNRPALNEMLSKLHEIDAVVVYRLDRLSRSQRDTITLIEEYFLKNNVEFVSLSETLDTSSPFGRAMIGILSVFAQLERETIRDRMVMGKIKRIEAGLPLTTAKGRTFGYDVIDTKLHINEEEAKQLQLIYDIFEEEQSITCLQKRLKKLGFKVRTYNRYNNWLTNDLYCGYVSYKDKVHVRGIHEPIISEEQFYRVQEIFTRMGKNPNMNRNSASLLNNLVVCSKCGLGFVHRRKDAMSRDKKYHYRYYSCKTYKHIHELEKCGNKIWRADKLEELIINRVNSYSLVSRNVDKEDELDSLNEKLKTEHAKKKRLFDLYINGSYEVSELDSMMNDIDAQINYYESQIEANEELKKNKKIQEDLANLATVDFDSLEFREKQLYLKSLISKIYIDGEQVTIEWL

SEQ ID NO: 6679 - protein, 485 aa, synthetic construct
MTKKVAIYTRVSTTNQAEEGFSIDEQTDRLTKYAEAMGWQVSDTYTDAGFSGAKLERPAMQRLINDTENKAFDTVLVYKLDRLSRSVRDTLYLVKDVFTKNKIDFISLNESIDTSSAMGSLFLTILSAINEFERENIKERMTMGKLGRAKSGKSMMWTKTAFGYYHNRKTGILEIVPLQATIVEQIFTDYLSGISLTKLRDKLNESGHIGKDIPWSYRTLRQTLDNPVYCGYIKFKGSLFEGKHKPIIPYETYLKVQKELDERQQQTHERNNNPRPFQAKYMLSGMARCGYCGAPLKIVLGHKRKDGSRTMKYHCANRFPRKTKGVTVYNDNKKCDSGTYDLSDLENTVIDNLIGLQENSDSLLKIINGNNQPILDTSSFEKQISQIDKKIQKTNDLYLNDFITMDELKDRTDSLQAEKKLLKAKISENKFNDSTDVFELVKTQLGSIPINELSYDNKKKIVNNLVSKVDVTADNVDIIFKFQLA

SEQ ID NO: 6680 - protein, 469 aa, synthetic construct
MSYTTPVRAAVYLRISEDRSGEQLGVARQREDCLKLCGQRKWVPVEYLDNDVSASTGKRRPAYEQMLADITAGKIAAVVAWDLDRLHRRPIELEAFMSLADEKRLALATVAGDVDLATPQGRLVARLKGCVAAHETEHKKARQRRAARQKAERGHPNWSKAFGYLPGPNGPEPDPRTAPLVKQAYADILAGASLGEVCRQWNDAGAFTITGRPWTTTTLSKFLRKPRNAGLRAYKGARYGPVDRDAIVGKAQWSPLVDETTFWAAQAVLDAPGRAPGRKSVRRHLLTGLAGCGKCGNHLAGSYRTDGQIVYVCKACHGVSILAVNIEPILYHIVAERLAKPDAVDLLRREIHDAAEAETIRLELETLYGELDRLAVERAEGLLTARQVKISTDIVNAKITKLQARQLDQERLHVLDGIPLGTPQVAGMIAELSPDRFRAVLDVLAEVVVQPVGRSGRIFNPERVQVNWR

SEQ ID NO: 6681 - protein, 469 aa, synthetic construct
MSYTTPVRAAVYLRISEDRSGEQLGVARQREDCLKLCGQRKWVPVEYLDNDVSASTGKRRPAYEQMLADITAGRIAAVVAWDLDRLHRRPIELEAFMSLADEKRLALATVAGDIDLATPQGRLVARLKGSVAAHETEHKKARQRRAARQKAERGYPNWSKAFGYLPGPNGPEPDPRTAPLVKQAYADILAGASLGDVCRQWNSAGALTITGRPWTTTALSKFLRKPRNAGLRAYKGARYGPVDRDAIVGKAQWSPLVDEATFWAAQAVLDAPGRAPGRKSVRRHLLTGLAGCGKCGNHLAGSYRTDGRVVYVCKACHGVAILADNIEPILYHIVAERLAMPDAVGLLRREIHDAAEAETIRLELETLYDELDRLAVERAEGLLTARQVKISTDIVNAKITKLQACQQDQERLRVLDGIPLGTPQVAGMIAELSPDRFRAVLDVLAEVVVQPVGKSGRIFNPERVRVNWR

SEQ ID NO: 6682 - protein, 452 aa, synthetic construct
MKAAIYIRVSTQEQVENYSIQAQTEKLTALCRSKDWDVYDIFIDGGYSGSNMNRPALKEMLSKLHEIDAVVVYRLDRLSRSQRDTITLIEEYFLKNNVEFVSLSETLDTSSPFGRAMIGILSVFAQLERETIRDRMVMGKIKRIEAGLPLTTAKGRTFGYDVIDTRLYINEEEAKQLQLIYDIFEEEQSITFLQKRLKKLGFKVRTYSCYNSWLTNDLYCGYVSYKDKVHVKGIHEPIISEEQFYRVQEIFTRMGKNPNMNRDSASLLNNLVVCSKCGLGFVHRRKDTMSRGKKYHYRYYSCKTYKHIHELEKCGNKIWRADKLEELIINRVNDYSFASRNVDKEDELDSLNEKLKIEHAKKKRLFELYINGSYEVSELDSMMNDIDAQINYYESRIEANEELKENKKIQENPADLATVDFDSLEFREKQLYLKSLISKIYIDGEQVTIEWL

SEQ ID NO: 6683 - protein, 485 aa, synthetic construct
MTKKVAIYTRVSTTNQAEEGFSIDEQTDRLTKYAEAMGWQVSDTYTDAGFSGAKLERPAMQRLINDIENKAFDTVLVYKLDRLSRSVRDTLYLVKDVFTKNKIDFISLNESINTSSAMGSLFLTILSAINEFERENIKERMTMGKLGRAKSGKSMMWTKTAFGYYHNRKTGILEIVPLQATIVEQIFTDYLSGISLTKLRDKLNESGHIGKDIPWSYRTLRQTLDNPVYCGYIKFKDSLFEGMHKPIIPYETYLKVQKELEERQQQTYERNNNPRPFQAKYMLSGMARCGYCGAPLRIVLGRKRRDGSRTMKYHCANRFPRKTKGITVYNGNKKCDSGTYDLSNLENTVIDNLIGLQENDDSLLKIINGNNQPILDTSSLKDQISQIDKKIQKNSDLYLNDFITMDELKNRTDSLQAEKKQLKAKISENRFNGSTDVLELVKTQLGSIPINELSYDNKKKIVNNLVSKVDVTADNVDIIFKFQLA

SEQ ID NO: 6684 - protein, 469 aa, synthetic construct
MSYTTPVRAAVYLRISEDRSGEQLGVARQREDCLKLCDQRKWEPVEYLDNDVSASTGKRRPAYEQMLADITAGKIAAVVAWDLDRLHRRPIELEAFMSLADEKRLALATVAGDVDLATPQGRLVARLKGSVAAHETEHKKARQRRAARQKAERGHPNWSKAFGYLPGPNGPEPDPRTAPLVKQAYADILAGASLGGVCRQWNDAGAFTITGRPWTTTTLSKFLRKPRNAGLRAYKGARYGPVDRDAIVGKAQWSPLVDEATFWAAQAVLDAPGRAPGRKSVRRHLLTGLAGCGKCGSHLAGSYRTDGRVVYVCKACHGVAILADNIEPILYHIVAERLAMSDAVDLLRREIHDAAEAETIRLELETLYGELDRLAVERAEGLLTARQVKISTDIVNAKITKLQARQLDQERLRVFDGIPLGTPQVAGMIAELSPDRFRAVLDVLAEVVVQPVGKSGRIFNPERVQVNWR

SEQ ID NO: 6685 - protein, 485 aa, synthetic construct
MTKKVAIYTRVSTTNQAEEGFSIDEQIDRLTKYAEAMGWQVSDTYTDAGFSGAKLERPAMQRLINDIENEAFDTVLVYKLDRLSRSVRDTLYLVKDVFTKNKIDFISLNESINTSSAMGSLFLTILSAINEFERENIKERMTMGKLGRAKSGKSMMWTKTAFGYYHNRKTGILEIVPLQATIVEQIFTDYLSGISLTKLRDKLNESGHIGKDIPWSYRTLRQTLDNPVYCGYIKFKDSLFEGMHKPIIPYETYLKVQKELEERQQQTYERNNNPRPFQAKYMLSGMARCGYCGAPLKIVLGHKRKDGSRTMKYHCANRFPRKTKGVTVYNDNKKCDSGTYDLSNLENTVIDNLIGFQENNVSLLKIINGNNQPILDTSSFKEQISQIDKKIQKNSDLYLNDFITMDELKARTDSLQAEKKLLKAKISENKFNDSTDVFELVKTQLGSIPINELSYDNKKKIVNNLVSKVDVTADNVDIIFKFQLA

SEQ ID NO: 6686 - protein, 452 aa, synthetic construct
MKAAIYIRVSTREQVENYSIQAQTEKLTALCRSKDWDVYDIFIDGGYSGSNMNRPALSEMLSKLHEIDAVVVYRLDRLSRSQRDTITLIEEYFLKNNVEFVSLSETLDTSSPFGRAMIGILSVFAQLERETIRDRMVMGKIKRIEAGLPLTTAKGRTFGYDVIDTKLYINEEEAKQLQLIYDIFEEEQSITSLQRRLKKLGFKVRTYNRYNNWLTNDLYCGYVSYKDKVHVKGIHEPIISEEQFYRVQEIFTRMGKSPNMNRDSASLLNNLVVCGKCGLSFVHRRKDTMSRDKRYHYRYYSCKTYKHIHELEKCGNKIWRADKLEELIINRVNNYSLANRNVDKEDELDSLNEKLKIEHAKKKRLFDLYINGSYEVSELDSMMNDIDAQINYYECQIEANEELKKNKKIQENLAHLATVDFDSLEFREKQLYLKSLINKIYIDGEQVTIEWL

SEQ ID NO: 6687 - protein, 452 aa, synthetic construct
MKAAIYIRVSTREQVENYSIQAQTEKLTALCRSKGWGVYDIFIDGGYSGSNMNRPALNEMLSKLHEIDAVVVYRLDRLSRSQRDTITLIEEYFLKNNVEFVSLSETLDTSSPFGRAMIGILSVFAQLERETIRDRMVMGKIKRIEAGLPLTTAKGRTFGYDVIDTKLYINEEEAKQLQLIYNIFEEEQSITFLQKRLKKLGFKVHTYNRYNNWLTNDLYCGYVSYKDKVHVKGIHEPIISEEQFYRVQEIFTRMGKNPNMNRDSASLLNNLVVCSKCGLGFVHRRKDATSRDKKYHYRYYSCKTYKHIHELEKCGNKIWRADKLEELIINRVNNYSIASRNADKEDELDSLNEKLKIEHAKKKRLFELYINGSYEVSELDSMMNDIDAQINYYESQIEANKELKKNKKIQENLAHLATVDFDSLEFREKQLYLKSLINKIYIDGEQVTIEWL

SEQ ID NO: 6688 - protein, 485 aa, synthetic construct
MTKKVAIYTRVSTTNQAEEGFSIDEQIDRLTKYAEAMGWQVSDTYTDAGFSGAKLKRPAMQRLINDIENKAFDTVLVYKLDRLSRSVRDTLYLVKDVFTKNKIDFISLNESINTSNAMGSLFLTILSAINEFERENIKERMTMGKLGRAKSGKSMMWTKTAFGYYHNRKTGILEIVPLQAAIVEQIFTDYLSGISLTKLRDKLNESGHIGKDIPWSYRTLRQTLDNPVYCGYIKFKDSLFVGMHKPIIPYETYLKVQKELEERQQQTYERNNNPRPFQAKYMLSGVARCGHCGAPLRIVLGHKRKDGSRTKKYHCANRFPRKTKGVTVYNDNKKCDSGTYDLSNLENTVIDNLIGLQENNDSLLKIINGSNQPILDTSSFKKRISQIDKKIQKNSDLYLNDFITMDELKDRTDSLQAERKLLKARISENKFNDSTDVFELVRTQLGSIPINELSYDNKKKIVNNLVSKVDVTADNVDIIFKFQLA

SEQ ID NO: 6689 - protein, 452 aa, synthetic construct
MKAAIYIRVSTQEQVENYSIQAQTEKLTALCRSKDWDVYDIFIDGGYSGSNMNRPALNEMLSKLHEIDAVVVYRLDRLSRSQRDTITLIEEYFLKSNVEFVSLSETLDTSSPFGRAMIGILSVFAQLERETIRDRMVMGKIKRIEAGLPLTTAKGRTFGYDVIDTKLYINEEEARQLQLIYDIFEEEQSITFLQKRLKKLGYKVRTYSRYNSWLTNDLYCGYVSYKDKVHVKGIHEPIISEEQFYRVQEIFTRMGKSPNMNRDSASLLNNLVVCSKCGLGFVHRRKDTMSRGKKYHYRYYSCKTYKHTHELEKCGNKIWRADKLEELIINRVNNYSLASRNVDKEDELDSLDERLKIEHAKKKRLFDLYINGSYEVSELDSMMSDIDAQISYYESQIEANEELKRNKKIQENLANLATVDYDSLEFREKQLYLKSLINKIYIDGEQVTIEWL

SEQ ID NO: 6690 - protein, 469 aa, synthetic construct
MCYTIPVRAAVYLRISEDRSGEQLGVARQREDCLKLCDQRKWAPVEYLDNDVSASTGKRRPAYEQMLADIAAGKIAAVVAWDLDRLHRRPIELEAFMSLADEKRLALATVAGDVDLATPQGRLVARLKGSVAAHETEHKKARQRRAARQKAERGLPNWSKAFGYLPGPSGPEPDPRTAPLVKQAYADILAGASLGGVCRQWNDAGAFTITGRPWTTTTLSKFLRKPRNAGLRAYKGARYGPVDRDAIVGKAQWSPLVDEATFWAAQAVLDAPGRAPGRKSVRRHLLTGLAGCGKCGNHLAGSYRTDGKVAYVCKACHGVAIQADNIEPILYHIVAERLAMPDAVDLLRREIHDVAEAETIRLELETLYGELDRLAVERAEGLLTARQVKISTDIVNAKIAKLQARQLDQERLRVFDGIPLGTPQVADMIAELSPDRFRAVLDVLAEVVVQPVGKSGSIFNPERVQVNWR

SEQ ID NO: 6691 - protein, 469 aa, synthetic construct
MSYTTPVRAAVYLRISEDRSGEQLGVARQREDCLKLCDQRKWVPVEYLDNDVSASTGRHRPAYEQMLADITAGRIAAVVAWDLDRLHRRPIELEAFMSLADEKRLALATVAGDVDLSTPQGRLVARLKGSVAAHETEHKKARQRRAARQKAERGHPNWSKAFGYLPGPNGPEPDPRTAPLVKQAYADILAGASLGDVCRQWNDAGAFTITGRPWTTTTLSKFLRKPRNAGLRAYKGARYGPVDRNAIVGKAQWSPLVDEATFWAAQAVLDAPGRAPGRKSVRRHLLTGLAGCGKCGNHLAGSYRTDGRIVYVCKACHGVSILAVNIEPILYHIVAERLAMPDAVDLLRREIHDAAGAEAIRLELETLYGELDRLAVERAEGLLTARQVKISTDIVNAKITKLQARQLDQERLRVFDGIPLGTPQVAGMIAELSPNRFRAVLDVLAEVVVQPVGKSGRIFNPERVQVNWR

SEQ ID NO: 6692 - protein, 486 aa, synthetic construct
MTKKVAIYTRVSTTNQAEEGFSIEEQTDRLTKYAEAMGWQVSDTYTDAGFSGAKLERPAMQRLINDIENKAFDTVLVYKLDRLSRSVRDTLYLVKDVFTKNKIDFISLNESINTSSAMGSLFLTILSAINEFERENIKERMTMGKLGRAKSGKSMMWTKTAFGYHHNRKTGILEIVPLQATIVEQIFTDYLSGISLTKLRDKLNEGGHIGKDIPWSYRTLRQTLDNPVYCGYIKFKGSLFEGMHKPIIPYETYLKVQKELEERQQQTYERNNNPRPFQAKYMLSGMARCGYCGAPLKIVLGHKRKDGSRTMKYHCANRFPRKTKGITVYNDNKKCDSGTYDLSDLENTVIDNLIGFQENNDSLLEIINGNNQPILDTSSFEEQISQIDKKIQKDSDLYLNDFITMDELKDRTDSLQAEKKLLKAKISENKFNDSTDVFELVKTQLGSIPINELSYDNKKKIVNNLVSKVDVTADNVDIIFKFQLAY

SEQ ID NO: 6693 - protein, 452 aa, synthetic construct
MKAAIYIRVSTREQVENYSIQAQTEKLTALCRSKDWDVYDTFIDGGYSGSNMNRPALNEMLSKLHEIDAVVVYRLDRLSRSQRDTITLIEEYFLKNNVEFVSLSETLDTSSPFGRAMIGILSVFAQLERETIRDRMVMGKIKRIEAGLPLTTAKGRTFGYDVIDTRLYINEEEAKQLQLIYDIFEEEQSITFLQKRLKKLGFKVRTYNCYNNWLTNDLYCGYVSYKDKVHVKGIHEPIISEEQFYRVQEIFTRMGKNPNMNRDSASLLNNLVVCGKCGLGFVHRRKDAMSRGKKYHYRYYSCKTYKHIHELEKCGNKIWRADKLEELIINRVNNYSFASRNADKEDELDSLNEKLKIEHAKKRRLFDLYINGSYEVGELDSMMNDIDAQINHYGSQIEANEELRKNKKIQGNLAHLATVDFDSLEFREKQLYLKSLINKIYIDGEQVTIEWL

SEQ ID NO: 6694 - protein, 452 aa, synthetic construct
MKAAIYIRVSTHEQVANYSIQAQTEKLTALCRSKDWDVYDIFIDGGYSGSNMNRPALNEMLSKLHEIDAVVVYRLDRLSRSQRDTTTLIEEYFLKNNVEFVSLSETLDTSSPFGRAMIGILSVFAQLERETIRDRMVMGKIKRIESGLPLTTAKGRTFGYDVIDSKLYINEEEAKQLQLIYDIFEEEQSITSLQKRLKKLGFKVRTYNRYNNWLTNDLYCGYVSYKDKVHVKGIHEPIISEEQFYRVQEIFTRMGKNPNMNRDSASLLNNLVVCGKCGLSFVHRSKDTMSRGKKYHYRYYSCKTYKHTHELEKCGNKTWRADKLEELIINRVDNYSFASRNADKEDELDSLNEKLKIEHAKKKRLFDLYINGSYEVSELDSMMNDIDAQINYYESQIEANEELKKNKKIQENLADLATVDLDSLEFREKQLYLKSLINKIYIDGEQVTIEWL

SEQ ID NO: 6695 - protein, 452 aa, synthetic construct
MKAAIYIRVSTQEQMENYSIQAQTEKLTALCRSKGWDVYDIFIDGGYSGSNMNRPALNEMLSKLHEIDAVVVYRLDRLSRSQRDTTTLIEEYFLKNNVEFVSLSETLDTSSPFGRAMIGILSVFAQLERETIRDRMVMGKIKRIEAGLPLTTAKGRTFGYDVIDTKLYINEEEAKQLQLIYDIFEEEQSITFLQKRLKKLGFKVRTYNRYNNWLTNDLYCGYVSYKDKVHVKGIHEPIISEEQFYRVQEIFTRMGKNPNMNRGSASLLNNLVVCSKCGLGFVHRSKDTMSGGKKYHYRYYSCKTYKHTHELEKCGNKTWRADKLEELIINRVNNHSFASRNVDKEDELDGLDEKLKIAHAKKKRLFDLYINGSYEVSELDSMMNDIDAQINYCESQIKANEELRKNKKIQENLADLATVDFDSLEFREKQLYLKSLINKIYIDGEQVTIEWL

SEQ ID NO: 6696 - protein, 452 aa, synthetic construct
MKAAIYIRVSTREQVENYSIQAQTEKLTALCRSKDWDVYDIFIDGGYSGSNMNRPALNEMLSKLHEIDAVVVYRLDRLSRSQRDTITLIEEYFLKNNVEFVSLSETLDTSSPFGRAMIGILSVFAQLERETIRDRMVMGKIKRIEAGLPLTTAKGRTFGYDVIDTKLYINEEEAKQLQLIYDIFEEEQSITFLQKRLKKLGFKVRTYNRYNSWLTNDLYCGYVSYKDKVHVKGIHEPIISEEQFYRVQEIFTRMGKNPSMNRDSASLLNGLVVCSKCGLGFVHRRKDTTSRGKKYHYRYYSCKTYKHTHELEKCGNKIWRADKLEELIINRVNDYSSASRNVGKEDELDSLNEKLKIEHAKKRRLFDLYINGGYEVSELDSMMNDIDAQINYYESQIEANEELKRNKKTQENLADLATVDFDRLEFREKQLYLKSLINKIYIDGEQVTIEWL

SEQ ID NO: 6697 - protein, 485 aa, synthetic construct
MTKKVAIYTRVSTTNQAEEGFSIDEQIDRLTKYAEAMGWQVSDTYTDAGFSGAKLDRPAMQRLINDIENKAFDTVLVYKLDRLSRSVRDTLHLVKDVFTKNKIDFISLNESIDTSSAMGSLFLTILSAINEFERENIKERMTMGKLGRAKSGKSMMWTKTAFGYYHNRKTGILEIVPLQATIVEQIFTDYLSGISLTKLRDKLNESGHIGKDIPWSYRTLRQTLDNPVYCGYIKFKDSLFEGMHKPIIPYETYLEVQKELEERQQQTYERNNNPRPFQAKYMLSGMARCGYCGAPLRIVLGHKRKDGSRTMKYHCANRFPRKTKGVTVYNDNKKCDSGTYDLSSLENTVIDSLIGFQEDNDSLLKIINGNNQPMLDTSSFKKQISQIDKKIQKNSDLYLNDFITMDELKDRTDSLQAEKKLLKAKISENKFNDSTDVFEQVKTQLGSIPINELSYDNKKKIVNNLVSKVDVTADNVDIIFKFQLA

SEQ ID NO: 6698 - protein, 485 aa, synthetic construct
MTKKVAIYTRVSTTNQAEEGFSIDEQIDRLTKYAEAMGWQVSDTYTDAGISGAKLERPAMQRLINDIENKAFDTVLVYKLDRLSRSVRDTLYLVKDVFTKNKIDFISLSESIDTSSAMGSLFLTILSAINEFERENIRERMTMGKLGRAKSGKSMMWTKTAFGYHHNRKTGILEIVPLQATIVEQIFTDYLSGISLTKLRDKLNESGHIGKDIPWSYRTLRQTLDNPVYCGYIKFKDSLFEGMHKPIIPYETYLKVQKELEERQQQTYERNNNPRPFQAKYMLSGMARCGYCGAPLKIVLGHKRKDDSRTMKYHCANRFPRKTKGVTVYNDNKKCDSGTYDLSNLENTVIDNLIGFQENNDSLLKMINGNNQPILDTSSFEKQISQIDKKIQKNSDLYLNDFITMDELRDRTDSLQAKKRLLKVKISENKFNNSTDVFELVKAQLGSIPINELSYDNKKKIVNNLVSRVDVTADNVDIIFKFQLT

SEQ ID NO: 6699 - protein, 485 aa, synthetic construct
MTKKVAIYTRVSTTNQAEEGFSIDEQIDRLTKYAEAMGWQVSDTYTDAGFSGAKLERPAMQRLINDIENNAFDAVLVYKLDRLSRSVRDTLYLVKDVLTKNKIDFISLNESIDTSSAMGSLFLTILSAINEFERENIKERMTMGKLGRAKSGKSMMWTKTAFGYYHNRKTGILEIVPLQATIVEQIFTDYLSGISLTKLRDKLNESGHIGKDIPWSYRTLRQTLDNPVYCGYIKFKDSLFEGMHKPIIPYETYLRVQKELEERQQQTYERNNNPRPFQAKYMLSGMARCGYCGAPLRIVLGHKRKDGSRTMKYHCANRFPRKTKGVTVYNDNKKCDSGTYDLSNLEDTVIGNLISLQENNNSLLKIINGNNQPILDTSSFKKQISQIDKKIQKNSDLYLNDFITMDELRARTDSLQAEKKLLKAKISENEFNDSTDVFELVKTQLGSTPINELSYDNKKKIVNSLVCKVDVTADNVDIIFKFQLA

SEQ ID NO: 6700 - protein, 485 aa, synthetic construct
MTKKVAIYTRVSTTNQAEEGFSIDEQTDRLTKYAEAMGWQVSDTYTDAGFSGAKLERPAMQRLINDIENKTFDTVLVYKLDRLSRSVRDTLHLVKDVFTKNKIDFVSLSESIDTSSAMGNLFLTILSAINEFERENIKERMTMGKLGRAKSGRSMMWTKTAFGYYHNRETGILEVVPLQATIVEQIFTDYLSGISLTKLRDKLNESGHIGKDIPWSYRTLRQTLDNPVYCGYIKFKDSLFEGMHKPIIPYETYLKVQKELGERQQQTYERNNNPRPFQAKYMLSGMARCGYCGAPLRIVLGHKRKDGSRTMKYHCANRFPRKTKGVTVYNDNKKCDSGAYDLSNLENTVIDNLIGFQENDDSLLKVINGNNQPILDTSSLKKQISQIDKKIQKNSDLYLNDFITMDELKDRTDSLQAERKLLKAKISENKFNDSTDVFELVKTQLGSIPINELSYDNKKKIVNNLVSKVDVTADNVDIIFKFQLA

SEQ ID NO: 6701 - protein, 452 aa, synthetic construct
MKAAIYIRVSTREQVENYSIQAQTEKLTALCRSKDWDVYDIFIDGGYSGSNMNRPALNEMLNKLHEIDAVVVYRLDRLSRSQRDTITLIEEYFLKNNVEFVSLSETLDTSSPFGRAMIGILSVFAQLERETIRDRMVMGRIKRIEAGLPLTTAKGRTFGYDVIDTKLYINEEEAKQLQLIYDIFEEEQSITFLQKRLKKLGFKVHTYNRYNNWLTNDLYCGYVSYKDKVHVKGIHEPIISEEQFYRVQEIFTRMGKNPNMNRDSASLLNNLVVCSKCGLGFVHRRKGTTSRGKKYHYRYYSCKTYKHTHELEKCGNKIWRADKLEELIIDRVNNYSLASRNVDKEDELDSLNEKLKIEHAKKKRLFDLYINGSYEVSELDCMMNDIDAQINYYESQIEANEELKKNKRIQEDLAGLATVDFDSLEFREKQLYLKGLINKIYIDGEQVTIEWL

SEQ ID NO: 6702 - protein, 452 aa, synthetic construct
MKAAIYIRVSTREQVENYSIQAQTEKLTALCRSKDWDVYDIFIDGGYSGSNLNRPALNEMLSRLHEIDAVVVYRLDRLSRSQRDTITLIEEYFLKNNVEFVSLSETLDTSSPFGRAMIGILSVFAQLERETIRDRMVMGKIKRIEAGLPLTTAKGRTFGYDVIDTRLYINEEEAKQLQLIYDIFEEEQSITFLQKRLKKLGFKVHTYNRYNNWLTNDLYCGYVSYKDKVHVKGIHEPIISEEQFYRVQEIFTRMGKNPNMNRDSASLLNNLVVCSKCGLGFVHRRKDTMSRGKKYHYRYYSCKTYKHIHELEKCGNKIWRADRLEELIINRVNNHSLASRNADKEDELDSLNEKLKIEHAKKKRLFDLYINGSYEVSELDSMMNDIDAQINYYESQIEVNEELKKDKKIQESLANLATVDYDSLEFREKQLYLKSLINKIYIDGEQVTIEWL

SEQ ID NO: 6703 - protein, 485 aa, synthetic construct
MTKKVAIYTRVSTTNQAEEGFSIDEQIDRLTKYAEAMGWQVSDAYTDAGFSGAKLERPAMQRLINDIESKAFDTVLVYKLDRLSRSVRDTLYLVKDVFTKNKIDFISLNESIDTSSAMGSLFLTVLSAINEFERENIKERMTMGKLGRAKSGKSMMWTKTAFGYYHNRKTGILEIVPLQATIVEQIFTDYLSGISLTKLRDKLNESGHIGKDIPWSYRTLRQTLDNPVYCGYIKFKDSLFEGMHKPIIPYETYLKVQKELEERQQQTYERNNNPRPFQAKYMLSGMARCGYCGAPLRVVLGHKRKDGSRTMKYHCTNRFPRKTKGITVYNDNKKCDSGTYDLSNLENTVIDNLIGFQENDDSLLKIINGNSRPILDTSSFKTQISQIDKKIQKNSDLYLNDFITMDELKARTDSLQAEKKLLKAKISENKFNDSTDVFELVKTQLGSIPINDLSYDNKKKIVNNLVSKVDVTADNVDIIFKFQLA

SEQ ID NO: 6704 - protein, 469 aa, synthetic construct
MSYTTPVRAAVYLRISEDRSGEQLGVARQREDCLKLCDQRKWVPVEYLDNDVSASTGRRRPAYEQMLADITAGRIAAVVAWDLDRLHRRPIELEAFMSLADEKRLALATVAGDVDLATPQGRLVARLKGSVAAHETEHKKARQRRAARQKAERGHPNWSKAFGYLPGPNGPEPDPRTAPLVKQAYADILAGASLGDVCRQWNDAGALTITGRPWTTTALSKFLRKPRNAGLRAYKGARYGPVDRDAIVGKAQWSPLVDEATFWAAQAVLDAPGRAPGRKSVRRHLLTGLAGCGKCGNHLAGSYRTDGRVVYVCKACHGVAILADDIEPILYHIVAERLAMPDAVDLLRREIHDAAEAETIRLELETLYGELDRLAVERAEGLLTARQVKISTDIVSAKITKLQARQLDQERLRVFDGIPLGTPQVAGMIAGLSPDRFRAVLDVLAEVVVQPVGKSGRIFNPERVQVNWR

SEQ ID NO: 6705 - protein, 485 aa, synthetic construct
MTKKVAIYTRVSTANQAEEGFSIDEQIDRLTKYAGAMGWQVSDTYTDAGFSGAKLERPAMQRLINDIENKAFDAVLVYKLDRLSRSVRDTLYLVKDVFTKNKIDFISLSESIDTSSAMGSLFLTILSAINEFERENIKERMTMGKLGRAKSGKSMMWTKTAFGYYHNRKTGILEIVPPQATIVEQIFTDYLSGISLTKLRDKLNESGHIGKDIPWSYRTLRQTLDNPVYCGYIKFKGSLFEGMHKPIIPYKTYLKVQKELEERQQQTYERNNNPRPFQAKYMLSGMARCGYCGAPLRIVLGHKRKDGSRTMKYHCANRFPRKTKGVTVYNDNKKCDSGTYDLSSLENTVIDNLIGLQENNDSLLKIINGNNQPILDTSSFKKQISQIDKKIQKISDLYLNDFITMNELKDRTDSLQAEKKLLKAKISENKFNDSTDVFELVKTQLGSIPINELSYDNKKKIVNNLVSKVDVTADNVDIIFKFQLA

SEQ ID NO: 6706 - protein, 452 aa, synthetic construct
MKAAIYIRVSTREQVENYSIQAQTEKLTALCRSKDWDVYDIFIDGGYSGSNMNRPALNEMLSKLHEIDAVVVYRLDRLSRSQRDTITLIEEYFLKNNVEFVSLSETLDTSSPFGRAMIGILSVFAQLERETIRDRMVMGKIKRIEAGLPLTTAKGRTFGYDVIDTRLYINEEEAKQLQLIYDIFEEEQSITFLQKRLKRLGFKVRTYNRYNNWLTNDLYCGYVSYKDKVRVKGIHEPIISEEQFYRVQEIFTRMGKNPNMNRDSASLLNNLVVCGKCGLGFVHRRKDAASRDKKYHYRYYSCKTYKHIHELEKCGNKIWRADKLEELIINRVNNYSLASRNVDKEDELDSLNEKLKIEHAKKKRLFDLYINGSYEVSELDSMMNDIDAQINYYESQIEANEELKRNKKIQENLAYLATVDFDSLEFREKQLYLKSLINKIYIDGEQVTIEWL

SEQ ID NO: 6707 - protein, 452 aa, synthetic construct
MKAAIYIRVSTREQVENYSIQAQTEKLTALCRSKDWDVYDIFIDGGYSGSNMNRPALNEMLSKLHEIDAVVVYRLDRLSRSQRDTITLIEEYFLKNNVEFVSLSETLDTSSPFGRAMIGILSVFAQLERETIRDRMVMGKIKRVEAGLPLTTAKGRTFGYDVIDTKLYINEEEAKQLRLIYDIFEEERSITSLQKRLKKLGFRVRTYNRYNSWLTNDLYCGYVSYKDKVHVKGIHEPIISEEQFYRVQEIFTRMGKNPNMNRDSASLLNNLVVCSKCGLGFVHRRKDTTSRGKKYHYRYYSCKTYKHTHELEKCGNKIWRADKLEELIINRVNNYSSASRNADKGDELDSLNEKLKVEHAKRKRLFDLYINGNYEVSELDSMMNGIDAQINYYESQIEANEELRKNNKIQENLADLATVDYDSLEFREKQLYLKSLINKIYIDGEQVTIEWL

SEQ ID NO: 6708 - protein, 452 aa, synthetic construct
MKAAIYIRVSTQEQVENYSIQAQTEKLTALCRSKGWDVYDIFIDGGYSGSNMNRPALNEMLSRLHEIDAVVVYRLDRLSRSQRDTITLIEEYFLKNSVEFVSLSETLDTSSPFGRAMIGILSVFAQLERETIRDRMVMGKIKRIEAGLPLTTAKGRTFGYDVIDTKLYINKEEAKQLQLIYDIFEEEQSITFLQKRLKKLGFKVRTYSRYNNWLTNDLYCGYVSYKDKVHVKGIHEPIISEEQFYRVQEIFTRMGKNPNMNRDSASLLSNLVVCSKCGLGFVHRRKDTMSRGKKYHYRYYSCKTYKHTHELEKCGNKIWRADKLEELIINRVNNYSLASRNVDKEDELDSLSEKLRTEHAKKRRLFDLYINGSYGVSELDSMMNDIDAQINYYESQIEANEELKKNKRIQGNLADLATVDFDSLEFREKQRYLKSLINKIYIDGERVTIEWL

SEQ ID NO: 6709 - protein, 452 aa, synthetic construct
MKAAIYIRVSTQEQVGNYSIQAQTEKLTALCRSKDWDVYDIFIDGGYSGSNMNRPALNEMLSKLHEIDAVVVYRLDRLSRSQRDTTTLIEEYFLKNNVEFVSLSETLDTSSPFGRAMIGILSVFAQLERETIRDRMVMGKIKRIEAGLPLTTAKGRTFGYDVIDTKLYINEGEAKQLQLIYDIFEEEQSITSLQKRLKKLGFKVRTYNRYNNWLTNDLYCGYVSYKDKVHVKGIHEPIISEEQFYRVQEIFTRMGKNPNMNRDSASLLSNLVVCSKCGLGFVHRSKDTMSRGKKYHYRYYSCKTYKHTHELEKCGNKTWRADKLEELIINRVNNYSFASRNVDKEDELDSLNEKLRVEHAKRKRLFDLYINGSCEVSELDSMMNDVDAQINYYESQIEANEELKKNRKIQENLADLATVDFDSLEFREKQLYLKSLINKIYIDGEQVTIEWL

SEQ ID NO: 6710 - protein, 453 aa, synthetic construct
MKAAIYIRVSTREQVENYSIQAQTEKLTALCRSKDWDVYDIFIDGGYSGSNMNRPALNEMLSKLHEIDAVVVYRLDRLSRSQRDTITLIEEYFLKNNVEFVSLSETLDTSSPFGRAMIGILSVFAQLERETIRDRMVMGKIKRIEAGLPLTTAKGRTFGYDVIDTKLYINEEEAKQLQLIYDIFEEEQSITSLQKRLKKLGFKVRTYNRYNSWLTNDLYCGYVSYKDKVHVKGIHEPIISEEQFYRVQEIFTRMGKNPNMNRDSASLLNNLVVCSKCGLSFVHRRKDTTSRGKKYHYRYYSCKTYKHTHELEKCGNKIWRADKLEELIISRVNNYSLASRNVDKEDELDSLNEKLEIEHAKKKRLFDLYINGSYEVSGLDSMMNDIDAQINYYESQIEANEELKKNKKIQENLAGLATVDFDSLEFREKQLYLRSLINKIYIDGEQVTIEWLQ

SEQ ID NO: 6711 - protein, 452 aa, synthetic construct
MKAAIYIRVSTREQVENYSIQAQTEKLTALCRSKDWDVYDIFIDGGYSGSNMNRPALNEMLSKLHEIDAVVVYRLDRLSRSQRDTITLIEEYFLKNNVEFVSLSETLDTSSPFGRAMIGILSVFAQLERETIRDRMVMGKIKRIEAGLPLTTAKGRTFGYDVIDTKLYINKEEAKQLQLIYDIFEEEQSITFLQKRLKKLGFKVRTYNRYSNWLTNDLYCGYVSYKDKVHVKGIHEPIISEEQFYRVQEIFTRMGKNPNMNRDSASLLNNLVVCSKCGLGFVHRRKDTTSRGKKYHYRYYSCKTYKHTHELEKCGNKIWRADKLEELVINRVNNYSFASRNADKEDELASLSEKLKIEHAKKKRLFDLYINGSYEVSELDSMMNDIDAQINYYESQIEANEELKRNKKIQENLANLATVDYDSLEFREKQLYLKSLINKIYIDGELVTIEWL

SEQ ID NO: 6712 - protein, 452 aa, synthetic construct
MKAAIYIRVSTQEQVENYSIQAQTEKLTALCRSKGWDVYDIFIDGGYSGSNMNRPALNKMLSKLHEIDAVVVYRLDRLSRSQRDTTTLIEEYFLKNNVEFVSLSETLDTSSPFGRAMIGILSVFAQLERETIRDRMVMGKIKRVEAGLPLTTAKGRTFGYDVIDTKLYINEEEAKQLQLIYDIFEEEQSITFLQKRLKKLGFKVHTYNRYNNWLTNDLYCGYVSYKDKVHVKGIHEPIISEEQFYRVQEIFTRMGKNPNMNRDSASLLNNLVVCSKCGLGFVHRSKDTMSRGKKYHYRYYSCKTYKHTHELEKCGNKTWRADKLEELIINRVNNYSFASRDVDKEDELDSLNEKLKIEHAKKQRLFDLYINGSYEVSELDSMMSDIDAQINYYESQIEANEELKKSKKIQENLADLATVDFGSLEFCEKQLYLKSLINKIYIDGEQVTIEWL

SEQ ID NO: 6713 - protein, 452 aa, synthetic construct
MKAAIYIRVSTREQVENYSIQAQTEKLTALCRSKGWDVHDIFIDGGYSGSNMNRPALNEMLSKLHEIDAVVVYRLDRLSRSQRDTITLIEEYFLKNNVEFVSLSETLDTSSPFGRAMIGILSVFAQLERETIRDRMVMGKIKRIEAGLPLTTAKGRTFGYDVIDTKLYINEEEAKQLQLIYDIFEEEQSITSLQKRLKKLGFKVRTYNRYNSWLTNDLYCGYVSYKDKVHVKGIHEPIISEEQFYRVQEIFTRMGKNPNVNRDSASLLNNLVVCSKCGRGFVHRRKDTVSRGKKYHYRYYSCKTYKHIHELEKCGNKIWRADKLEELIINRVNNYSFASRNVDKGDELDSLNEELKIEHAKKRRLFDLYINGSYEVSELDSMMNDIDAQINYYESQIEANEEQKKNKKIQENLANLATVDFDSLEFREKQLYLKSLINKIYIDGEQVTIEWL

SEQ ID NO: 6714 - protein, 469 aa, synthetic construct
MSYTTPVRAAVYLRISEDRSGEQLGVARQREDCLKLCGQRKWVPVEYLDNDVSASTGKRRPAYEQMLADITAGKIAAVVAWDLDRLHRRPIELEAFMSLADEKRLALATVAGDVDLATPQGRLVARLKGSVAAHETEHKRARQCRAARQKAERGHPNWSKAFGYLPGPNGPEPDPRTAPLVKQAYADILAGASLGDVCRQWNTAGAFTITGRPWTTTALSKFLRKPRNAGLREYKGARYGPVDRDAIVGKAQWSPLVDEATFWAAQAVLDAPGRAPGRKSVRRHLLTGLAGCGKCGDHLAGSYRTDGRVVYVCKACHGVAILADNIEPILYHIVAERLAMPDAVDLLRREIHDAAEAETICLELETLYGELDRLAVDRAEGLLTARQVKISTDIVNAKITKLQARQLDQERLRVFDGIPLGTPQVAGTIAELSPDRFRAVLDVLAEVVVQPVGKSGRIFNPERVQVNWR

SEQ ID NO: 6715 - protein, 452 aa, synthetic construct
MKAAIYIRVSTREQVENYSIQAQTEKLTALCRSKDWDVYDIFIDGGYSGSNMNRPALSEMLSKLHEIDAVVVYRLDRLSRSQRDTITLIEEYFLKNNVEFVSLSETLDTSSPFGRAMIGILSVFAQLERETIRDRMVMGKIKRIEAGLPLTTAKGRTFGYDVIDTKLYINEEEAKQLQLIYDIFEEEQSITFLQKRLKKLGFKVHTYNRYNNWLTNDLYCGYVSYKDKVHVKGIHEPIISEEQFYRVQEIFARIGKNPNMNRDSASLLNSLVVCSKCGLSFVHRRKDAMGRDKKYHYRYYSCKTYKHIHELEKCGNKIWRADKLEELVINRVNNYSLANRNVDKEDELDSLNEKLKIEHAKKRRLFDLYINGSYEVSELDSMMNDIDAQINYYESQIEANEKLKKNKKFQESLADLATVDFDSLEFREKQLYLKSLINKIYIDGEQVTIEWL

SEQ ID NO: 6716 - protein, 469 aa, synthetic construct
MSYTTPVRAAVYLRISEDRSGEQLGVARQREDCLKLCDQRKWVPVEYLDNDVSASTGKRRPAYEQMLADIAAGKIAAVVAWDLDRLHRRPIELEAFMSLADEKRLALATVAGDVDLATPQGRLVARLKGSVAAHETEHKKARQRRAARQKAERGHPNWSKAFGYLPGPNGPEPDPRTAPLVKQAYADILAGASLGDVCRQWNDAGAFTITGRPWATTALSKFLRKPRNAGLRAYKGARYGPVDRDAIVGKAQWSPLVDEATFWAAQAVLDAPGRAPGRKSVRRHLLTGLAGCGKCGNHLAGSYRTDGRVVYVCKVCHGIAILADNIEPILYHIVTERLAMPDAVDLLRREIHDAAEAETIRLELETLYGELDRLAVERAEGLLTARQVKISTDIVNAKITKLQARQLDQERLRVFDGIPLGTPQVAGMIAELSPNRFRAVLDVLAEVVVQPVGKSGRIFNPERVQVNWR

SEQ ID NO: 6717 - protein, 452 aa, synthetic construct
MKAAIYIRVSTREQVENYSIQAQTEKLTALCRSKDWDVYDIFIDGGYSGSNMNRPALNEMLSKLHEIDAVVVYRLDRLSRSQRDTITLIEEYFLKNDVEFVSLSETLDTSSPFGRAMIGILSVFAQLERETIRDRMVMGKIKRIEAGLPLTTAKGRTFGYDVIDTRLYVNEEEAKQLRLIYDIFEEEQSITFLQKRLKKLGYKVRTYNRYNSWLTNDLYCGYVSYKDKVHVKGIHEPIISEEQFYRVQEIFTRMGKNPNMNRDSASLLNNLVVCSKCGLGFVHRRKDTMSRGRKYHYRYYSCKTYKHIHELEKCGNKIWRADKLEELIIDRVNNYSFAGRNVDKEDELDSLNEKLRIEHAKKKRLFDLYINGCYEVSELDSMMNDIDAQINYYESQIEANEELRKNKKIQENLANLSTVDFDSLEFREKQLYLKSLINKIYIDGEQVTIEWL

SEQ ID NO: 6718 - protein, 452 aa, synthetic construct
MKAAIYIRVSTQEQVENYSIQAQTEKLTALCRSKDWDVYDIFIDGGYSGSNMNRPALNEMLSKLHEIDAVVVYRLDRLSRSQRDTTTLIEEYFLKNNVEFVSLSETLDTSSPFGRAMIGILSVFAQLERETIRDRMVMGKIKRIEAGLPLTTAKGRTFGYDVIDTKLYINEEEAKQLQLIYDIFEEEQSITSLQKRLKKLGFKVRTYNRYNNWLTNDLYCGYVSYKDKVHVKGIHEPIISEEQFYRVQEIFTRMGKNPNMNRDSASLLSNLVVCSKCGLGFVHRSKDTMSRGKKYHYRYYSCKTYKHTHELEKCGNKTWRADKLEELIINRVSNYSFASRNVDKEDELDSLNEKLKIEHAKKKRLFDLYINGSYEVSELDSMMNDIDAQINYYGSQIEANKGLKKNKKIQENLADQAAVDFDSLEFREKQLYLKSLISKIYIDGEQVTIEWL

SEQ ID NO: 6719 - protein, 452 aa, synthetic construct
MKAAIYIRVSTREQVENYSIQAQTEKLTALCRSKDWDVYDIFIDGGYSGSNMNRPALNEMLSKLHEIDAVVVHRLDRLSRSQRDTITLIEEYFLKNNVEFVSLSETLDTSSPFGRAMIGILSVFAQLERETIRDRMVMGKIKRIEAGLPLTTAKGRTFGYDVIDTKLYINEEEAKQLQLIYDIFEEEQSITFLQKRLKKLGFKVRTYSCYNSWLTNDLYCGYVSYKDKVHVKGIHEPIISEEQFYRVQGIFTRMGKNPNMNRDSASLLNNLVVCSKCGLGFVHRRKDTMSRGKKYHYRYYSCKTYKHIHELEKCGNKIWHADKLEELIINRVKSYSLASRNADKEDELDGLNEKLKIEHAKRKRLFDLYINGSYEVGELDSMMNDIDAQINYYESQIEANEELKKNKKIQEDLANLATVDYDSLEFREKQLYLKSLINKIYIDGEQVTIEWL

SEQ ID NO: 6720 - protein, 452 aa, synthetic construct
MKAAIYIRVSTREQVENYSIQAQTEKLTALCRSKDWDVYDIFIDGGYSGSNMNRPALNEMLSKLHEIDAVVVYRLDRLSRSQRDTITLIEEYFLKNNVEFVSLSETLDTSSPFGRAMIGILSVFAQLERETIRDRMAMGKIKRIEAGLPLTTAKGRTFGYDVVDTKLYINEEEAKQLQLIYDIFEEERSITFLQKRLKKLGFKVRTYSRYNSWLTNDLYCGYVSYKDKVHVKGIHEPIISEEQFYRVQEIFTRMGKNPNMNRDSASLLSNLVVCSKCGLSFVHRRKDTTSRGKKYHYRYYSCKTYKHTHELEKCGNKIWRADKLEELIINRVNNYSFASRNVDKEDELDSLNERLKIEHAKKRRLFDLYINGSYEVSELDSMMDDIDAQINYYESQIEANEELKKNKKIRENLADLATVDFDSLEFREKQRYLKSLINKIYIDGERVTIEWL

SEQ ID NO: 6721 - protein, 452 aa, synthetic construct
MKAAIYIRVSTREQVENYSIQAQTEKLTALCRSKDWDVYDIFIDGGYSGSNMNRPALNEMLSKLHEIDAVVVYRLDRLSRSQRDTITLIEEYFLKNNVEFVSLSETLDTSSPFGRAMIGILSVFAQLERETIRDRMVMGKIKRIEAGLPLTTAKGRTFGYDVIDTELYVNEEEAKQLQLIYDIFEEEQSITSLQKRLKKLGFKVRTYSRYNNWLTNDLYCGYVSYKDKVHVKGIHEPIISEEQFYRVQEIFTRMGKNPNMNRGSASLLNNLVVCSKCGLGFVHRRKDTTSRGKKYHYRYYSCKTYKHTHELEKCGNKIWRADKLEELIINRVNSYSFASRNVDKEDELDSLNEKLKIEHAKKKRLFDLYINGSYEVSELDSMMNDIDAQINYYESQIEANEELKKNKKIRENLADLATVDYDSLEFREKQLYLKSLINKIYIDGEQVTIEWL

SEQ ID NO: 6722 - protein, 485 aa, synthetic construct
MTKKVAIYTRVSTTSQAGEGFSIDEQIDRLTKYAEAMGWQVSDTYTDAGFSGAKLVRPAMQRLINDIENKAFDTVLVYKLDRLSRSVRDTLYLVKDVFTKNKIDFISLNESIDTSSAMGSLFLTILSAINEFERENIKERMTMGKLGRAKSGKSMMWTKTAFGYYHNRETGILEIVPLQATIVEQIFTDYLSGISLTKLRDKLNESGHIGKDIPWSYRTLRQTLDNPVYCGYIKFKDSLFEGMHKPIIPYEIYLKVQKELEERQQQTYERNNNPRPFQAKYMLSGMARCGYCGAPLRIVLGHKRKDGSRTMKYHCANRFPRKTKGVTVYNDNKKCDSGTYDLSNLENTVIDNLIGFQENNDSLLKIINGNNRPVLDTSSFKRQISQIDKKIQKNSDLYLNDFITMDELKDRTDSLQAEKKLLRAKISENKFNDGTDVFELVKTQLGSIPINELSYDNKKKIVNNLVSKVDVTADNVDIIFKFQLA

SEQ ID NO: 6723 - protein, 485 aa, synthetic construct
MTKKVAIYTRVSTTNQAEEGFSIDEQIDRLTKYAEAMGWQVSDTYTDAGLSGAKLERPAMQRLINDIENKAFDTVLVYKLDRLSRSVRDTLYLVKDVFTKNKIDFISLNESIDTSSAMGSLFLTILSAINEFERENIKERMTMGKLGRAKSGKSMMWTKTAFGYYHNRKTGILEIVPLQATIVEQIFTDYLSGISLTKLRDKLNESGHVGKDIPWSYRTLRQTLDNPVYCGYIKFKDSLFEGMHKPIIPYETYLKVQKELEERQQQAYERNNNPRPFQAKYMLSGMARCGYCGAPLRIVLGRKRKDGSRTMKYHCANRFPRKTKGITVYNDNKKCDSGTYDLSNLENTVIDNLVGFQENNDSLLKIINGNNQPILDTSSFKKQISQIDKKIQRNSDLYLNDFITMDELKDRTDSLQAEKKLLKAKISENKFNDSTDVFELVKTQLGSIPINELSYDNKKKIVKNLVSKVDVTADSVDIIFKFQLA

SEQ ID NO: 6724 - protein, 452 aa, synthetic construct
MKAAIYIRVSTREQVENYSIQAQTEKLTALCRSKDWDVYDIFIDGGYSGSNMNRPALNEMLSKLHEIDAVVVYRLDRLSRSQRDTITLIEEYFLKNNVEFVSLSETLDTSSPFGRAMIGILSVFAQLERETIRDRMVMGKIKRIEAGLPLTTAKGRTFGYDVIDTKLYINEEEAKQLQLIYDIFEEEQSITFLQKRLKKLGFKVRTYNRYNNWLTNDLYCGYVSYKDKVHVKGIHEPIISEEQFYRVQEIFARMGKNPNMNRDSASLLNNLVVCGKCGLGFVHRRKDAMSRSKKYHYRYYSCKTYKHIHELEKCGNKIWRADKLEELIINRVNNYSLASRNVDKEDELDGLNEKLKIEHAKKRRLFDLYINGSYEVSELDSMMNDIDAQINYYEGQIEANEELKKNKKIQENLAYLATVDFDSLEFREKQLYLKSLINKIYIDGEQVTIEWL

SEQ ID NO: 6725 - protein, 485 aa, synthetic construct
MTKKVAIYTRVSTTNQAEEGFSIDEQIDRLTKYAEAMGWQVSDTYTDAGFSGAKLERPAMQRLINDIEYKAFDTVLVYKLDRLSRSVRDTLYLVKDVFTKNKIDFISLNESIDTSSAMGSLFLTILSAINEFERENIKERMTMGKLGRAKSGKSMMWTKTAFGYYHNRKTGILEIVPLQATIVEQIFTDYLSGISLTKLRDKLNESGHIGKDIPWSYRTLRQTLDNPVYCGYIKFKDSLFEGMHKPIIPYETYLKVQKELEERQQQTYERSNNPRPFQAKYMLSGMARCGYCGAPLRIVLGRKRKDGSRTMKYHCANRFPRKTRGITVYNDNKECDSGAYDLSNLENTVIDILVGFQENSDSLLKITNGHNQPILDTSSFKEQISQIDKKIQRNSDLYLNDLITMDELKDRTDSLQAEKKLLKAKISENKFNDSTHVFELVKTQLGSTPINELSYENKKKIVNNLVSKVDVTADNVDIIFKFQLA

SEQ ID NO: 6726 - protein, 485 aa, synthetic construct
MTKKVAIYTRVSTTNQAEEGFSIDEQIDRLTKYAEAMGWQVSDTYTDAGFSGAKLERPAMQRLINDIENKAFDTVLVYKLDRLSRSVRDTLYLVKDVFTKNKIDFISLNESIDTSSAMGSLFLTILSAINEFERENIKERMTMGKLGRAKSGKSMMWTKTAFGYYHNPKTGILEIVPLQATIVEQIFTDYLSGISLTKLRDKLNESGHIGKDIPWSYRTLRQTLDNPVYCGYIKFKDSLFEGMHRPIIPYETYLKVQKELEERQQQTYERNNNPRPFHAKYMLSGMARCGYCGAPLRIVLGHRRKDGSRTMKYHCANRFPRKTKGVTVYNDNKKCDSGSYDLSNLENTVIDNLIGFQENNDSLLKIINGNDQPILDTSSLKKQISQIDKKIQKNSELYLNDFITMDELKDRTDSLQAEKKLLKAKISENKFNDSTDVFELVKTQLGSIPINELSYDNKKKIVNSLVSKVDVTADNVDIIFKFQLA

SEQ ID NO: 6727 - protein, 452 aa, synthetic construct
MKAAIYIRVSTQEQVENYSIQAQTEKLTALCRSKDWDVYDIFIDGGYSGSNMNRPALNEMLSKLHEIDAVVVYRLDRLSRSQRDTTILIEEYFLKNNVEFVSLSETLDTSSPFGRAMIGILSVFAQLERETIRDRMVMGKIKRIEAGLPLTTAKGRTFGYDVIDTKLYINEEEARQLQLIYDIFEEEQSITSLQKRLKKLGFKVRTYNRYNNWLTNDLYCGYVSYKDKVHVKGIHEPIISEEQFYRVQEIFTRMGKNPNMNRDSASLLSNLVVCSKCGLGFVHRSKDTMSRGKKYHYRYYSCKTYKHTHELEKCGNKIWRADKLEELIINRVNSYSFASRNVDKEDELDSLNEKLKIEHAKKKRLFDLYINGSYEVSELDSMMNDIDAQINYYESRIEANEELKRNKKIQENLAGLATVDFDSLEFREKQLYLKSLINKIYIDGEQVTIEWL

SEQ ID NO: 6728 - protein, 469 aa, synthetic construct
MSYTTLVRAAVYLRISEDRSGEQLGVARQREDCLKLCAQRKWVPVEYLDNDVSASTGKRRPAYEQMLADITAGTIAAVVAWDLDRLHRRPIELEAFMSLADEKRLALATVAGDVDLATPQGRLVARLKGSVAAHETEHKKARQRRAARQKAERGLPNWSKAFGYLPGPNGPEPDPRTAPLVKQAYADILAGASLGDVCRQWNDTGAFTITGRPWTATTLSKFLRKPRNAGLRAYKGARYGPVDRDAIVGKAQWSPLVDEATFWAAQAVLDAPGRAPGRKSVRRHLLTGLAGCGKCGNHLAGSYRTDGRVVYVCKACHGVAILADNIEPILYHIVAERLAMPDAVDLLRREIHDAAEAETNRLELETLYGELDRLAVERAEGLLTARQVKISTDIVNAKITELQARQLDQERLRVFDGIPLGTPQVAGVIAGLSPDRFRAVLDVLAEVVVQPVGKSGRIFNPERVQMNWR

SEQ ID NO: 6729 - protein, 452 aa, synthetic construct
MKAAIYIRVSTQEQVGNYSIQAQTEKLTALCRSKDWDVYDIFIDGGYSGSNMNRPALNEMLSKLHEIDAVVVYRLDRLSRSQRDTTTLIEEYFLKNNVEFVSLSETLDTSSPFGRAMIGILSVFAQLERETIRDRMVMGKIKRIEAGLPLTTAKGRTFGYDVIDTKLYINEEEAKQLQLIYDIFEEEQSITLLQKRLKKLGLKVRTYNRYNNWLTNDLYCGYVSYKDKVHVRGIHEPIISEEQFYRVQEIFTRMGKNPNMNRDSASLLSNLVVCSKCGLGFVHRSKDTMSRGKKYHYRYYSCKTYKHTHELEKCGNKTWRADKLEELIINRVNNYSFASRNVDKEDELDGLNEKLKIEHAKKKRLFDLYINGSYEVSELDSMMNDIDAQINYYESQVEAKEELRKNKKIQENLADLATVDFDSLELREKQLYLKSLINKIYIDGEQVTIEWL

SEQ ID NO: 6730 - protein, 452 aa, synthetic construct
MKAAIYIRVSTQEQVGNYSIQAQTEKLTALCRSKDWDVYDIFIDGGYSGSNMNRPALNEMLSRLHEIDAVVVYRLDRLSRSQRDTTTLIEEYFLKNNVEFVSLSETLDTSSPFGRAMIGILSVFAQLERETIRDRMVMGKIKRIEAGLPLTTAKGRTFGYDVIDTKLYINEEEAKQLRLIYDIFEEEQSITSLQKRLKKLGFRVHAYNRYNNWLTNDLYCGYVSYKDKVHVKGIHEPIISEEQFYRVQEIFTRMGKNPNMNRDSASLLNSLVVCSKCGLSFVHRRKDTMSRGKKYHYRYYSCKTYKHTHELEKCGNKTWRADKLEELIINRVNNYSFASRNADKEDELDSLNEKLKIEHARKKRLFDLYINGSYEASELDSMMSDIDAQINYYEGQIEANEELKKNKKIQENLAGLATVDFDSLEFREKQLYLKSLINKIYIDGEQVTIDWL

SEQ ID NO: 6731 - protein, 452 aa, synthetic construct
MKAAIYIRVSTREQVENYSIQAQTEKLTALCRSKGWDVYDIFIDGGYSGSNMNRPALNEMLSKLHEIDAVVVYRLDRLSRSQRDTITLIEEHFLKNNVEFVSLSETLDTSSPFGRAMIGILSVFAQLERETIRDRMVMGKIKRIEAGLPLTTAKGRTFGYDVIDTKLYINEEEAKQLQLIYDIFEEEQSITFLQKRLKKLGFKVRTYNRYNNWLTNDLYCGYVSYKDKVHVKGIHEPIISEEQFYRVQEIFTRMGKSPNMNRDSASLLNNLVVCSKCGLGFVHRRKDAMSRDKKYHYRYYSCKTYKHIHELEKCGNKIWRADKLEELIINRVNNYSLASRNTGKEDELESLNEKLKIEHAKKKRLFDLYINGNYEVSELDSMMNDIDAQINYYESQIEANEELKKNKKIQENLADLATVDFDSLEFREKQLYLKSLINKIYIDGEQVTIEWL

SEQ ID NO: 6732 - protein, 452 aa, synthetic construct
MKAAIYIRVSTQEQVGNYSIQAQTEKLTALCRSKDWDVYDIFIDGGYSGSNMNRPALNEMLSKLHEIDAVVVYRLDRLSRSQRDTTTLIEEYFLKNNVEFVSLSETLDTSSPFGRAMIGILSVFAQLERETIRDRMVMGKIKRIEAGLPLTTARGRTFGYNVIDTKLYINEEEAKQLQLIYDIFEEEQSITFLQKRLKELGFKVRSYNRYNNWLTNDLYCGYVSYKDKVHVKGIHEPIISEEQFYRVQEIFTRMGKNPNMNRDSASLLNNLVVCSKCGLGFVHRSKDTMSRGKKYHYRYYSCKTYKHTHELEKCGNKTWRADKLEELIINRVNNYSFASRNVDKEDELDSLNERLKIEHAKKKRLFDLYINGSYEVSELDSMMNDIDAQINYYESRIEADEELKRNKKIQENLAGLATVDFDSLEFREKQLYLKSLIDKIYIDGEQVTIEWL

SEQ ID NO: 6733 - protein, 452 aa, synthetic construct
MKAAIYIRVSTQEQVGNYSIQAQTEKLTALCRSKDWDVYDIFVDGGYSGSNMNRPALNEMLSKLHEIDAVVVYRLDRLSRSQRDTTTLIEEYFLKNNVEFVSLSETLDTSSPFGRAMIGILSVFAQLERETIRDRMVMGKIKRIEAGLPLTTAKGRTFGYDVIDTKLYINEEEAKQLQLIYDIFEEEQSITSLQKRLKKLGFKVRTYNRYHNWLTNDLYCGYVSYKDKVHVKGIHEPIISEEQFYRVQEIFTRMGKNPNMNRDSASLLSNLVVCSKCGLGFVHRSKDTMCRGKKYHYRYYSCKTYKHTHELEKCGNKTWRADKLEELIINRVSNYSFASRNVDKEDELDSLNEKLKIEHAKKRRLFDLYIDGSYEVSELDSMMNDIDAQINYYESQIEANEELKKNKKIQENLADLATVDFDNLELREKQLYLKSLINKIYIDGEQVTIEWL

SEQ ID NO: 6734 - protein, 452 aa, synthetic construct
MKAAIYIRVSTREQVENYSIQAQTEKLTALCRSKDWDVYDIFIDGGYSGSNMNRPALNEMLSKLHEIDAVVVYRLDRLSRSQRDTITLIEEYFLKNNVEFVSLSETLDTSSPFGRAMIGILSVFAQLERETIRDRMVMGKIKRIEAGLPLTTAKGRTFGYDVVDTKLYINEEEAKQLQLIYDIFEEEQSITFLQKRLKKLGFKVRTYSCYNSWLTNDLYCGYVGYKDKVHVKGIHEPIISEEQFYRVQEIFTRMGKNPNMNRDSASLLNNLVVCSKCGLGFVHRRKDTTSRGKKYHYRYYSCKTYKHTHELEKCGNKIWRADKLEELIINRVSNYSFASRNEDKEGELDSLNEKLKIEHVKKKRLFDLYINGSYEVSELDSMMNDIDAQINYYESQIEANEELKKNKKIQENPAELATVDFDSLEFREKQLYLKSLINKIYIDGEQVTIEWL

SEQ ID NO: 6735 - protein, 452 aa, synthetic construct
MKAAIYIRVSTREQVENYSIQAQTEKLTALCRSKDWDVYDIFIDGGYSGSNMNRPALNEMLSKLHEIDAVVVYRLDRLSRSQRDTITLIEEYFLRNNVEFVSLSETLDTSSPFGRAMIGILSVFAQLERETIRDRMVMGKIKRIEAGLPLTTAKGRTFGYDVIDTKLYINEEEARQLQLIYDIFEEEQSITFLQKRLKELGFKVRTYSRYNNWLTNDLYCGYVSYKDKVHVKGIHEPIISEEQFYRVQEIFTRMGKSPNMNRGSASLLNNLVVCSKCGLGFVHRRKDTMSRGKKYHYRYYSCKTYKHIHELEKCGNKIWRADKLEELVINRMNNYSFASRNVDKEDELDSLNEKLKIEHAKKKRLFDLYINGSYEVSELDSMMNDIDAQINYYESQIEANEESRRDKKIQENLADLATVDFDSLEFHEKQLYLKSLINKIYIDGEQVTIEWL

SEQ ID NO: 6736 - protein, 452 aa, synthetic construct
MKAAIYIRVSTREQVENYSIQAQTEKLTALCRSKDWDVYDIFIDGGYSGSNMNRPALNEMLSKLHEIDAVVVYRLDRLSRSQRDTITLIEEHFLKNNVEFVSLSETLDTSSPFGRAMIGILSVFAQLERETIRDRMVMGKIKRIEAGLPLTTAKGRTFGYDVIDTKLYINEEEAKQLQLIYDIFEEEQSITFLQKRLKKLGFKVRTYNRYNNWLTNDLYCGYVSYKDKVHVRGIHEPIISEEQFYRVQEIFTRMGKNPNMNRDSASLLNNLVVCSKCGLGFVHRRKDAMSRDKKYHYRYYSCKTYKHIHELEKCGNKIWRADKLEELIISRVNNYSLASRDADKEDELNSLNEKLKIEHAKKKRLFDLYINGSYEVSELDSMMKDIDAQINYYESQIEASEELKKNKKIQENLAELATVDFDTLEFREKQLYLKSLINKIYIDGEQVTIEWL

SEQ ID NO: 6737 - protein, 486 aa, synthetic construct
MTKKVAIYTRVSTTNQAEEGFSIDEQIDRLTKYAEAMGWQVSDTYTDAGLSGAKLERPAMQRLVNDIENKAFDTVLVYKLDRLSRSVRDTLYLVKDVFTKNKIDFISLYESIDTSSATGSLFLTILSAINEFERENIKERMTMGKLGRAKSGKSMMWTKTAFGYYHNRKTGILEIVPLQATIVEQIFTDYLSGTSLTRLRDKLNESGHIGKDIPWSYRTLRQILDNPVYCGYIKFKGSLFEGMHKPIIPYETYLKVQKELEERQQQTYERNNNPRPFQAKYMLSGMARCGYCGAPLRIVLGRKRKDGSRTMKYHCANRFPRKTEGVTVYNDNKKCDSGTYDLSNLENTVIDNLIGLQENNDSLLKIINGNNQPILDTSSIEKQISQIDKKIQKNSDLYLNDFITMDELKDRTESLQAQKKLLKAKISENKFNDSTGVFELVKTQLGSIPINELSYDNKKKIVNNLVSKVDVTADNVDIIFKFQLAQ

SEQ ID NO: 6738 - protein, 485 aa, synthetic construct
MTKKVAIYTRVSTTNQAEEGFSIDEQIDRLTKYAEAMGWQVSDTYTDAGFSGAKLERPAMRRLINDIENKAIDTVLVYKLDRLSRSVRDTLHLVKDVFTKNKIDFISLSESIDTSSAMGSLFLTILSAINEFERENIKERMTMGKLGRAKSGKSMMWTKTAFGYHHNRKTGILEIVPLQATIVEQIFTDYLSGISLTKLRDKLNESGHIGKDIPWSYRTLRQTLDNPVYCGYIKFKDSLFEGMHKPIIPYETYLKVQKELEERQQQTYERNNNPRPFQAKYMLSGMARCGYCGAPLRIVLGHKRKDGSRTMKYHCANRFPRKTKGVTVYNDNKKCDSGTYDLSSLENTVIDNLIGFQENNDRLLKIINGNDQPILDTSSFKKQISQIDKKIQKNSDLYLNDFITMDELKDRTDSLQAEKKLLKAKISENKFNDSTDVFELVKTQLGSIPINELSYDNRKKIVNNLVSKVDVTADNVDIIFKFQLA

SEQ ID NO: 6739 - protein, 452 aa, synthetic construct
MKAAIYIRVSTQEQVENYSIQAQTEKLTALCRSKDWDVYDIFIDGGYSGSNMDRPALNEMLSKLHEIDAVVVYRLDRLSRSQRDTTTLIEEYFLKNNVEFVSLSETLDTSSPFGRAMIGILSVFAQLERETIRDRTVMGKIKRTEAGLPLTTAKGRTFGYDVIDTKLYINEEEAKQLQLIYDIFEEEQSITSLQKRLKKLGFKVHTYNRYNNWLTNDLYCGYVSYKDKVHVKGIHEPIISEEQFYRVQEIFTRMGKSPNINRDSASLLSNLVVCSKCGLGFVHRSKDTMSRGKKYHYRYYSCKTYKHTHELEKCGNKIWRADKLEELIINRVNNHSFVSRNVDKEDELDSLNEKLKIEHAKKKRLFDLYINGSYEVSELDSMMNDIDAQINYYESQIEANEELKKNKKIQGNLADQATVDFDSLEFREKQLYLKSLISKIYIDGEQVTIEWL

SEQ ID NO: 6740 - protein, 485 aa, synthetic construct
MTKKVAIYTRVSTINQAEEGFSIDEQIDRLTKYAEAMGWQVSDTYTDAGFSGAKLERPEMQRLINDIENKAFDTVLVYKLDRLSRSVRDTLYLVKDVFTKNKIDFISLNESINTSSAMGSLFLTILSAINEFERENIKERMTMGKLGRAKSGKSMMWSKTAFGYYHNRKTGILEIVPPQATIVEQIFTDYLSGISLTKLRDKLNESGHIGKDIPWSYRTLRQTLDNPVYCGYIKFKDSLFEGMHKPIIPYETYLKVQKELEERQQQTYMRNNNPRPFQAKYMLSGMARCGYCGAPLRIVLGHKRKDGSRTMKYHCANRFPRKTKGVTVYNDNKKCDSGTYDLSNLENTVIDNLIGFQENIDSLLKIINGNNQPILDTSSFKKQISQIDKKIQKNSDLYLNDFITMDELKDRTDSLQAEKKLLEAKISENRFNDSTDVFELVKTQLGSIPINELSYDNKKKIVNNLVSKVDVTADNVDIIFKFQLA

SEQ ID NO: 6741 - protein, 452 aa, synthetic construct
MKAAIYIRVSTREQVENYSIQAQTEKLTALCRSKDWDVYDIFIDGGYSGSNMNRPALNEMLSKLHEIDAVVVYRLDRLSRSQRDTITLIEEHFLKNNVEFVSLSETLDTSSPFGRAMIGILSVFAQLERETIRDRMVMGKIKRIEAGLPLTTAKGRTFGYDVIDTKLYINEEEAKQLRLIYDIFEEEQSITLLQRRLKKLGFKVRTYNRYNNWLTNDLYCGYVSYKDKVHVKGIHEPIISEEQFHRVQEIFARMGKNPNMNRGSASLLNNLVVCSKCGLGFVHRRKDAMSRDKKYHYRYYSCKTYKHIHELEKCGNKIWRADKLEELIIDRVNNYSLASRNVGKEDELDSLNERLRNEHAKKRRLFDLYINGSYEVSELDSMMSDIDAQINYYESQIEANEELKKNKKIQENLAHLATVDFDSLEFREKQLYLKSLINKIYIDGEQVTIEWL

SEQ ID NO: 6742 - protein, 485 aa, synthetic construct
MTKKVAIYTRVSTTNQAEEGFSIDEQIDRLTKYAEAMGWQVSDTYTDAGFSGAKLERPAMQRLINDIENKAFDTVLVYKLDRLSRSVRDTLYLVKEVFTKNKIDFISLSESIDTSSAMGSLFLTILSAINEFERENIKERMTMGKLGRAKSGKSMMWTKTAFGYYHNRKTGILEIVPLQATIVEQIFTDYLSGTSLTKLRDKLNESGHIGKDIPWSYRTLRQTLDNPVYCGYIKFKGSLFEGMHKPIIPYGTYLKVQKELEERQQQTYERNNNPRPFQAKYMLSGMARCGYCGAPLRIVLGHKRKDGSRTMKYHCANRFPRKTKGTTVYNDNKKCDSGTYDLSNLENTVIDNLMGFQENSDSLLKIINGNNQPILDTSSFKKRISQIDKKIQKNSDLYLNDFITMDELKERTDSLQAEKKQLIKKISEDKFSDSTDVFELVKTQLGSIPINELSYDNKKKIVNNLVSKVDVTADNVDIIFKFQLA

SEQ ID NO: 6743 - protein, 485 aa, synthetic construct
MTKKVAIYTRVSTTNQAEEGFSIDEQIDRLTKYAEAMGWQVSDIYTDAGFSGAKLERPAMQRLINDIENKAFDTVLVYKLDRLSRSVRDTLYLVKDVFTKNKIDFISLNESINTSSAMGSLFLTILSAINEFERENIKERMTMGKLGRAKSGKSMMWTKTAFGYYHNRKTGILEIVPLQATIVEQIFTDYLSGISLTKLRDRLNESGHIGKDIPWSYRTLRQTLDNPVYCGYIKFKGSLFEGMHKPIIPYETYLKVQKELEERQQQAYERNNNPRPFQAKYMLSGMARCGYCGAPLRIVLGHKRKDGSRTMKYHCANRFPRKTKGVTVYNDNKKCDSGTYDLSNLENTVIDNLIGFQENNDSLLRIINGNNRPILDTSSFKKQISQIDKKIQKNSDLYLNDFITMDELKDRTDSLQAEKKLLKARISENKFNDSTDVFELVRTQLGSIPINELSYDDKKKIVNNLVSKVDVTADNVDIIFKFQLV

SEQ ID NO: 6744 - protein, 452 aa, synthetic construct
MKAAIYIRVSTQEQVENYSIQAQTEKLTALCRSKDWDVYDIFIDGGYSGSNMNRPALNEMLSKLHEIDAVVVYRLDRLSRSQRDTIILIEEYFLKNNVEFVSLSETLDTSSPFGRAMIGILSVFAQLERETIRDRMVMGKIKRIEAGLPLTTAKGRTFGYDVIDTKLCINEEEAKQLRLIYDIFEEEQSITFLQKRLKKLGFKVHTYNRYNNWLTNDLYCGYVSYKDKVHVKGIHEPIISEEQFYRVQEIFTRMGKNPNMNRDSASLLNNLVVCSKCGLGFVHRRKDTMSRGKKYHYRYYSCKTYKHTHELEKCGNKIWRADKLEELIINRVNNYSFASRNVDKEDELDSLNEKLKMEHAKKRRLFGLYINGSYELSELDSMMNDIDAQINYYESQIEANEELKKNKKIQESLADLATVDFDSLEFREKQLYLKSLINKIYIDGEQVTIEWL

SEQ ID NO: 6745 - protein, 452 aa, synthetic construct
MKAAIYIRVSTREQVENYSIQAQTEKLTALCRSKDWDVYDIFVDGGYSGSNMNRPALNEMLSKLHEIDAVVVYRLDRLSRSQRDTITLIEEYFLKNNVEFVSLSETLDTSSPFGRAMIGILSVFAQLERETIRDRMVMGKIKRIEAGLPLTTAKGRTFGYDVIDTKLYINEEEAKQLQLIYDIFEEEQSITFLQKRLKKLGYKVRTYNCYNNWLTNDLYCGYVSYKDKVHVKGIHEPIISEEQFYRVQEIFTRMGKNPNMNRGSASLLNNLVVCSKCGLGFVHRRKDAMSRDKKYHYRYYSCKTYKHIHELEKCGNKIWRADKLEELIINRVNNYSLASRNVDKEDELDSLNEKLKIEHAKKKRLFDLYINGSYEVSELDSMMGDIDAQINYYEGQIEANEELRKNNKIQENLADLATVDFDSLEFREKQLYLKSLINKIYIDGEQVTIEWL

SEQ ID NO: 6746 - protein, 452 aa, synthetic construct
MKAAIYIRVSTREQVENYSIQAQTEKLTALCRSKDWDVYDIFVDGGYSGSNMNRPALNEMLSKLHEIDAVVVYRLDRLSRSQRDTITLIEEYFLKNNVEFVSLSETLDTSSPFGRAMIGILSVFAQLERETIRDRMVMGKIKRIEAGLPLTTAKGRTFGYDVIDTRLYINEEEAKQLQLIYDIFEEEQSITFLQKRLKKLGFKVRTYSCYNNWLTNDLYCGYVSYKDKVHVKGIHEPIISEGQFCRVQEIFARMGKNPNMNRDCASLLNNLVVCSKCGLGFVHRRKDTMSRGKKYHYRYYSCKTYKHIHELEKCGNKIWRADKLEELIINRVNNYSLASRNVDKEDELDSLSEKLKVEHAKKKRLFELYINGSYEVSELDSMMSDIDAQINYYESQIEANEELKKNKKIRENLADLATVDYDSLEFREKQLYLKSLINKIYIDGEQVTIEWL

SEQ ID NO: 6747 - protein, 469 aa, synthetic construct
MSYTTPVRAAVYLRISEDRSGEQLGVARQREDCLKLCGQRKWVPVEYLDNDVSASTGKRRPAYEQMLADITAGKIAAVVAWDLDRLHRRPVELEAFMSLADEKRLALATVAGDVDLATPQGRLVARLKGCVAAHETEHKKARQRRAARQKAERGLPNWSKAFGYLPGPNGPEPDPRTAPLVKQAYADILAGASLGDVCRQWNDAGALTITDRPWTTTTLSKFLRKPRNAGLRAYKGTRYGPVDRDAIVGKAQWSPLVDEATFWAAQAVLDAPGRAPGRKSVRRHLLTGLAGCGKCGNHLAGSYRTDGRVVYVCKACHGVAILADNIEPILYHIVAERLAMPDAVDLLRREIRDVAEAETIRLELETLYGELDRLAVERAEGLLTARQVKIITDIVNAKITKLQARQLDQERLRVLDGIPLGTPQVAGVIAELSPDRFRAVLDVLAEVVVQPVGKSGRIFNPERVQVNWR

SEQ ID NO: 6748 - protein, 469 aa, synthetic construct
MSYTTPVRAAVYLRISEDRSGEQLGVARQREDCLKLCDQRKWVPVEYLDNDVSASTGKRRPAYEQMLADITAGKIAAVVTWDLDRLHRRPIELEAFMSLADEKRLALATVAGDVDLATPQGRLVARLKGSVAAHETEHKKARQRRAARQKAERGYPNWNKAFGYLPGPNGPEPDPRTAPLVKQAYADILAGASLGDVCRRWNDVGAFTITGRPWTTTTLSKFLRKPRNAGLRAYKGARYGPVDRDAIVGRAQWSPLVDEATFWAAQAVLDAPGRAPGRKSVRRHLLTGLAGCGKCGNHLAGSYRTDGQVVYVCKACHGVAILADNIVPILYHIVAERLAMPDAVDLLRREIHDAAEAETIRLELETLYGELDRLAVERAEGLLTARQVKVCTDIVNAKITKLQARQLDQERLRVFDGIPLGTPQVAGMVAELSPDRFRAVLDVLAEVVVQPVGKSGRIFNPERVQVNWR

SEQ ID NO: 6749 - protein, 452 aa, synthetic construct
MKAAIYIRVSTREQVENYSIQAQTEKLTALCRSKDWDVYDIFIDGGYSGSNMNRPALNEMLSKLHEIDAVVVYRLDRLSRSQRDTITLIEEYFLKNNVEFVSLSETLDTSSPFGRAMIGILSVFAQLERETIRDRMVMGKIKRIEAGLPLTTAKGRTFGYDVIDTKLYINEEEAKQLRLIYDIFEEERSITSLQKRLKKLGFKVRSYNRYNNWLTNDLYCGYVSYKDRVHVKGIHEPIISEEQFYRVQEIFTRMGKNPNMNRDSASLLNNLVVCSKCGLGFVHRRKDIVSRGKKYHYRYYSCKTYKHIHELEKCGNKIWRADKLEELIINRVNNYSLASRNVDKEDELDSLNEKLKIEHAKKKRLFDLYINGSYEVSELDSMMNDIDAQINHYESQIEANEELKKNNKIQENLADLATVDFDSLEFREKQLYLKSLINKIYIDGEQVTIEWL

SEQ ID NO: 6750 - protein, 452 aa, synthetic construct
MKAAIYIRVSTREQVENYSIQAQTEKLTALCRSKDWDVYDIFIDGGYSGSNMNRPALNEMLSKLHEIDAVVVYRLDRLSRSQRDTITLIEEYFLKNNVEFVSLSETLDTSSPFGRAMIGILSVFAQLERETIRDRMVMGKIKRIEAGLPLTTAKGRTFGYDVIDTKLYINEEEAKQLQLIYDIFEEEQSITFLQKRLKKLGFKVRTYNRYNNWLTNDLYCGYVSYKDKVHVRGIHEPIISEEQFYRVQEIFTRMGKNPNMNRDSASLLSNLVVCSKCGLGFVHRRKDTMSRGKKYHYRYYSCKTYKHTHELEKCGNKIWRADKLEELVINRVNNYSFASRNVDKEDELDSLNEKLRIERARKKRLFDLYINGNYEVRELDSMMNDIDAQINYYESQIEANEELKRNKKIRENLADLATVDFDSLEFREKQLYLKSLINKIYIDGEQVTIEWL

SEQ ID NO: 6751 - protein, 452 aa, synthetic construct
MKAAIYIRVSTREQVENYSIQAQTEKLTALCRSKDWDVYDIFVDGGYSGSNMNRPALNEMLSKLHEIDAVVVYRLDRLSRSQRDTITLIEEYFLKNNVEFVSLSETLDTSSPFGRAMIGILSVFAQLERETIRDRMVMGKIKRIEAGLPLTTAKGRTFGYDVIDTKLYINEEEAKQLQLIYDIFEEEQSITFLQKRLKKLGFKVRTYNRYNNWLTNDLYCGYVSYKDKVHVKGIHEPIISEEQFYRVQEIFTRMGKNPNMNRGSASLLNNLVVCGKCGLGFVHRRKDAMSRGKKYHYRYYSCKTYRHIHELEKCGNKIWRADKLEELVINRVNSYSVASRNVDKEDELDSLNEKLKIEHAKKKRLFDLYINGSYEVSELDSMMNDIDAQINYYESQIEANEELRKNKKIQENLADLATVDLDSLEFREKQLYLKSLINKIYIDGEQVTIEWL

SEQ ID NO: 6752 - protein, 469 aa, synthetic construct
MSYITPVRAAVYLRISEDRSGEQLGVARQREDCLKLCGQRKWVPVEYLDNDVSASTGKRRPAYEQMLADITAGKIAAVVAWDLDRLHRRPIELEAFMSLADEKRLALATVAGDVDLATPQGRLVARLKGCVAAHETEHKKARQRRAARQKAERGHPNWSKAFGYLPGPNGPEPDPRTAPLVKQAYADILAGASLGDVCRQWNDAGAFTITGRPWTTTTLSKFLRKPRNAGLRAYKGARYGPVDRDAIVGKAQWSPLVDEATFWAAQAVLDAPGRAPGRKSVRRHLLTGLAGCGKCGNHLAGSYRTDGRVVYVCKACHGVAILADNIEPILYHIVAERLAMPDAMDLLRREVHDAAEAETIRLELETLYGELDRLAVERAEGLLTARQVKISTDIVDAKITKLQVRQLDQERLRVLDGIPLGTPQVAGMIAELSPDRFRAVLDVLAEVVVQPVGKSGRICNPERVQVNWR

SEQ ID NO: 6753 - protein, 485 aa, synthetic construct
MTKKVAIYTRVSTTNQAEEGFSIDEQIDRLTKYAEAMGWQVSDTYTDAGLSGAKLERPAMQRLINDIENKAFDTVLVYKLDRLSRSVRDTLYLVKDVFTKNKIDFISLNESIDTSSAMGSLFLTILSAINEFERENIKERMTMGKLGRAKSGKSMMWTKTAFGYYHNRKTGILEIVPLQATIVEQIFTDYLSGTSLTKLRDKLNESGHIGKDIPWSYRTLRQTLDNPVYCGYIKFKDSLFEGMHKPIIPYETYLKVQKELEERQQQTYERNNNPRPFQAKYMLSGMARCGYCGAPLKIVLGHKRKDGSRTMKYHCANRFPRKTKGVTVYNDNKKCDSGTYDLSNLENTVIDNLIGFQENNDSLLKIINGNNQPILDTSSFKEQISQIDKKIQKNSELYLNDFITMDELRDRTDSLQAEKKLLKAKTSENKFSDSTDVFELVKTQLGSIPINELSYENKKKIVNNLVSKVDVTADNVDIIFKFQLA

SEQ ID NO: 6754 - protein, 469 aa, synthetic construct
MSYTTPVRAAVYLRISEDRSGEQLGVARQREDCLKLCDQRKWVPVEYLDNDVSASTGKRRPAYEQMLADITAGKIAAVVAWDLDRLHRRPIELEAFMSLADEKRLALATVAGDVDLATPQGRLVARLKGSVAAHETEHKKARQRRAARQKAERGHPNWSKAFGYLPGPNGPEPDPRSAPLVKQAYADILAGASLGDVCRQWNDAGAFTITGRPWTTTTLSKFLRKPRNAGLRAYKGARYGPVDRDAIVGKAQWSPLVEEATFWAAQAVLDAPGRAPGRKSVRRHLLTGLAGCGKCGNHLAGSYRTDGRVVYVCKACHGVAILADNIVPILYRIVAERLAMPDAVDLLRREIHDAAEAGAIRLELEALYGELDRLAVERAEGLLTARQVKISTDIVNAKITKLQARQLDQERLRVFDGIPLGTPQVAGKIAELSPDRFRAVLDVLAEVVVQPVGKSGRVFNPERVQVNWR

SEQ ID NO: 6755 - protein, 485 aa, synthetic construct
MTKKVAIYTRVSTTNQAEEGFSIDEQIDRLTKYAEAMGWQVSDTYTDAGFSGAKLGRPAMQRLINDIENKAFDTVLVYKLDRLSRSVRDTLYLVKDVFTKNKIDFISLNESIDTSSAMGSLFLTILSAINEFERENIKERMTMGKLGRAKSGKSMMWTKTAFGYYHNRETGILEIVPLQATIVEQIFTDYLSGISLTKLRDKLNESGHIGKDIPWSYRTLRQTLDNPVYCGYIKFKDSLFEGMHKPIIPHETYLKVQKELEERQQQTYERNNNPRPFQAKYMLSGMARCGYCGAPLRIVLGRKRKDGSRTTKYHCANRFPRKTKGVTVYNDNKKCDSGTYDLSNLENTVIGTLIGFQENNDSLLKIINGNNQPIPDTSSLKKQISQIDKKIQKNSDLYLNDFITMDELKDRTDSLQAEKKLLKAKISENKSNDSTDVFELVKAQLGSIPINELSYDNKKKIVNNLVSKVDVTADNVDIIFKFQLA

SEQ ID NO: 6756 - protein, 485 aa, synthetic construct
MTRKVAIYTRVSTTNQAEEGFSIDEQIDRLTKYAEAMGWRVSDTYTDAGFSGAKLERPAMQRLINDIENKAFDTVLVYKLDRLSRSVRDTLYLVKDVFTKNKIDFISLNESINTSSAMGSLFLTILSAINEFERENIKERMTMGKLGRAKSGKSMMWTKTAFGYYHNRKTGTLEIVPLQATIVEQIFTDYLSGISLTKLRDKLNESGHIGKDIPWSYRTLRQTLDNPVYCGYIKFKGSLFEGMHKPIIPYETYLKVQKELEERQQQTYERNNNPRPFQAKYMLSGMARCGYCGAPLRIVLGHKRKDGSRTMKYHCANRFPRKTKGITVYNDDKKCDSGTYDLSNLENTVIDNLIGFQENNDSLLKIISGNNQPIQDTSSFKKQISQIDKKIQKNSDLYLNDFITMDELRDRTDSLQAEKKRLKAKISENKFNDSTDVFELVKTQLGSIPINELSYDNKKRIVNNLVSKVDVTADNVDIIFKFQLA

SEQ ID NO: 6757 - protein, 485 aa, synthetic construct
MTKKVAIYTRVSTTNQAEEGFSIDEQIDRLTKYAEAMGWQVSDTYTDAGFSGAKLERPAMQRLINDIENKAFDTVLVYKLDRLSRNVRDTLHLVKDVFTKNKIDFISLNESIDTSSAMGSLFLTILSAINEFERENIKERMTMGKLGRAKSGKSMMWTKTAFGYYHNRKTGILEIVPLQATIVEQIFTDYLSGISLTKLRDKLNESGHIGKDIPWSYRTLRQTLDNPVYCGYIKFKDSLFEGMHKPIIPYETYLKVQKELEERQQQTYERNNNPRPFQAKYMLSGMARCGYCGAPLRIVLGHKRKDGSRTMKYHCANRFPRKTKGITVYNDNKKCDSGTYDLSNLENTVIDNLIGFQENDDSLLKIINGNNQPILDTSSFKEQISQIDKKIQKNSDLYLNDFITMDELKDRTNSLQAEKKLLKAKISENKFNNSTDVFELVKTQLGSIPINELSYDNKKRIVNNLVSKVDVTADNVDIIFKFQLA

SEQ ID NO: 6758 - protein, 469 aa, synthetic construct
MSYTTLVRAAVYLRISEDRSGEQLGVARQREDCLKLCGQRKWVPVEYLDNDVSASTGKRRPAYEQMLADITAGKIAAVVAWDLDRLHRRPIELEAFMNLADEKRLALATVAGDVDLATPQGRLVARLKGCVAAHETEHKKARQRRAARQKAERGHPNWSKAFGYLPGPNGPEPDPRTAPLVKQAYADILAGASLGDVCRQWNDAGAFTITGRPWTTTTLSKFLRKPRNAGLRAYKGARYGPVDRDAIVGKAQWSPLVDEATFWAAQAVLDAPGRAPGRKSVRRHLLTGLAGCGKCGNHLAGSYRTDGRVVYVCKACHGVAILADNIEPILYHIVAERLAMPDAVDLLCREIHDAAGAETIRLELEALYGELDRLAVERAEGLLTARQVKISTDIVNAKITKLQARRLDQERLRVFDGIPLGTPQVAGMIAGLSPDRFRAVLDVLAEVVVQPVGKGGRTFNPERVQVNWR

SEQ ID NO: 6759 - protein, 452 aa, synthetic construct
MKAAIYIRVSTREQVENHSIQTQTEKLTALCRSKDWDVYDIFIDGGYSGSNMNRPALNEMLSKLHEIDAVVVYRLDRLSRSQRDTITLIEEYFLKNNVEFVSLSETLDTSSPFGRAMIGILSVFAQLERETIRDRMVMGKIRRIEAGLPLTTAKGRTFGYDVIDTKLYVNEEEAKQLQLIYDIFEEEQSITLLQKRLKKLGFKVRTYNRYNNWLTNDLYCGYVSYKDKVHVKGIHEPIISKEQFYRVQEIFTRMGKNPNMNRDSASLLNNLVVCSKCGLGFVHRRKDTTSRGKKYHYRYYSCKTYKHIHELEKCGNKIWRADKLEELIINRVNNYSFASRNVDKAEELDSLNEKLKVEHAKKKRLFDLYINGSYNVSELDSIMNDIDAQINYYESQIEANEELRRNEKIQENLAELATVDFDSLEFREKQLYLKSLINKIYIDGEQVTIEWL

SEQ ID NO: 6760 - protein, 452 aa, synthetic construct
MKAAIYIRVSTREQVENYSIQAQTEKLTALCRSKDWDVYDVFIDGGYSGSNMNRPALNEMLSKLHEIDAVVVYRLDRLSRSQRDTITLIEEYFLKNNVEFVSLSETLDTSSPFGRAMIGILSVFAQLERETIRDRMVMGKIKRIEAGLPLTTAKGRTFGYDVIDTKLYINEEEAKQLQLIYDIFEEEQSITFLQKRLRKLGFKVRSYNRYNNWLTNDLYCGYVSYKDKVHVKGIHEPIISEEQFYRVQEIFTRMGKNPNMNRDSASLLNNLVVCSKCGLGFVHRRKDTVSRGKKYHYRYYSCKTYKHIHELEKCGNKIWRADKLEELIINRVNNYSLASRNVDKVDELDSLNEKLEIEHARKKRLFDLYINGSYEVSELDSMMNDIGAQINYYESQIEANEELKRNKKIQENLAGLASVDYDSLEFREKQLYLRSLINKIYIDGEQVTIEWL

SEQ ID NO: 6761 - protein, 452 aa, synthetic construct
MKAAIYIRVSTREQVENYSIQAQTEKLTALCRSKDWDVYDIFIDGGYSGSNMNRPALNEMLGKLHEIDAVVVYRLDRLSRSQRDTITLIEEYFLKNNVEFVSLSETLDTSSPFGRAMIGILSVFAQLERETIRDRMVMGKIKRIEAGLPLTTAKGRTFGYDVIDTKLYINEEEARQLQLIYDIFEEEQSITFLQKRLKKLGFKVRTYNCYNNWLTNDLYCGYVSYKDKVHVKGIHEPIISEEQFYRVQEIFTRMGKNPNMNRDSASLLNSLVVCSKCGLGFVHRRKDTMSRGKKYHYRYYSCKTYKHTHELEKCGNKIWRADKLEELIINRVNNYSFASRNVDKAEELDSLNGKLKVEHAKKKRLFDLYINGSYNVRELDSMMNDIDAQINYYESQIEANEELKKNKKIQENLAGLATVDFDSLEFREKQLYLKSLINKIYIDGEQVTIEWL

SEQ ID NO: 6762 - protein, 452 aa, synthetic construct
MKAAIYIRVSTREQVENYSIQAQTEKLTALCRSKDWDVYDVFIDGGYSGSNMNRPALNEMLSKLHEIDAVVVYRLDRLSRSQRDTITLIEEYFLKNNVEFVSLSETLDTSSPFGRAMIGILSVFAQLERETIRDRMVMGKIKRIEAGLPLTTAKGRTFGYDVIDTKLYINEEEAKQLRLIYDIFEEEQSITFLQKRLKKLGFKVRTYNRYNNWLTNDLYCGYVSYKDKVHVKGIHEPIISEEQFYRVQEIFTRMGKNPNMNRDSASLLNNLVVCSKCGLGFVHRRKDVMSHGKKYHYRYYSCKTYKHIHELEKCGNKIWRADILEELIINRVNNYSFASRNADKEDELDSLNEKLKIEHAKKKRLFDLYINGSYEVSELDSMMNDIDAQINYYEGQIEANEELKKNKKIQENLANLATVDYDSLEFREKQLYLKSLINKIYIDGEQVTIEWL

SEQ ID NO: 6763 - protein, 485 aa, synthetic construct
MTKKVAIYTRVSTTNQAEEGFSIDEQSDRLTKYAEAMGWQVSDTYTDAGFSGAKLERPAMQRLINDIANKAFDTVLVYKLDRLSRSVRDTLYLVKDVFTKNKIDFISLNESIDTSSAMGSLFLTILSAINEFERENIKERMTMGKLGRAKSGKSMMWTKTAFGYYHNRKTGILEIVPLQATIVKQIFTDYLSGISLTKLRDKLNESGHIGKDIPWSYRTLRQTLDNPVYCGYIKFKDNLFEGRHKPIIPYETYLKVQKELGERQQQTYERNNNPRPFQAKYMLSGMACCGYCGAPLKIVLGHKRKDGSRTMKYHCANRFPRKTKGVTVYNGNKKCDSGTYDLSNLENTVIDNLIGFQEDNDSLLKIINGDNRPIPDTSSFKKQISQIDKKIQKNSDLYLNDFITMDELRDRTDGLQAEKKLLKAKISENKFNDSTDVFELVKAQLGSIPINELSYDNKKKIVNNLVSKVDVTADNVDIIFKFQLA

SEQ ID NO: 6764 - protein, 469 aa, synthetic construct
MSYTTPVRAAMYLRISEDRSGEQLGVARQREDCLKLCGQRKWVPVEYLDNDVSASTGKRRPAYEQMLADITAGKIAAVVAWDLDRLHRRPMELEAFMSLADEKRLALATVAGDVDLATPQGRLVARLKGSVAAHETEHKKARQRRAARQKAERGYPNWSKAFGYLPGPNGPEPDPRTAPLVKQAYADILAGASLGDVCRQWNDAGAFTITGRPWTTTTLSKFLRKPRNAGLRAYKGARYGPVDRDAIVGKAQWSPLVDEATFWAAQAVLDAPGRAPGRKSVRRHLLTGLAGCGKCGNHLAGSYRTDGRVVYVCKACHGVAILADNIEPILYHIVAERLAMPDAVDLLRREIHDAAEAETIHLELETLHGELDRLAVERAEGLLTARQVKISTDIVNAKITKLQARQLDRERLRVFEGIPLGTPQVAGMIAELSPDRFRAVLDVLAEVVVQPVGKSGRIFNPERVEVNWR

SEQ ID NO: 6765 - protein, 452 aa, synthetic construct
MKAAIYIRVSTREQVENYSIQAQTEKLTALCRSKDWDVYDIFVDGGYSGSNMNRPALNEMLSKLREIDAVVVYRLDRLSRSQRDTITLIEEYFLKNNVEFVSLSETLDTSSPFGRAMIGILSVFAQLERETIRDRMVMGKIKRIEAGLPLTTAKGRTFGYDVIDTKLYINEEEARQLRLIYDIFEEEQSITFLQKRLKELGFKVHTYNRYNNWLTNDLYCGYVSYKDKVHVKGIHEPIISEEQFYRVQEIFTRMGKNPNMNRDSASLLNNLVVCGRCGLGFVHRRKDAMSRDKKYHYRYYSCKTYKHIHELEKCGNKIWRADKLEELIINRVNNYSLASRNVDKEDELDSLNEKLKIEHAKKKRLFDLYINGSYEVSELDSMMNDIDAQINYYESQIEANEELKRNKKIQENLADLATVDFDSLEFREKQRYLRSLINKIYIDGEQVTIEWL

SEQ ID NO: 6766 - protein, 485 aa, synthetic construct
MTKKVAIYTRVSTTNQAEEGFSIDEQIDRLTKYAEAMGWQVGDTYTDAGFSGAKLERPAMQHLINDIENKAFDTVLVYKLDRLSRSVRDTLYLVKDVFTKNKIDFISLNESIDTSSAMGSLFLTILSAINEFERENIKERMTMGKLGRAKSGKSMMWTKTAFGYYHNRKTGILEIVPLQAAIVEQIFTDYLSGISLTKLRDKLNERGHIGKDIPWSYRTLRQTLDNPVYCGYIKFKGSLFEGMHKPIIPYETYLKVQKELEERQQQTYERNNNPRPFQAKYMLSGMARCGYCGAPLRIVLGHKRKDGSRTMKYHCANRFPRKTKGVTVYNDNKKCDSGTYDLSNLENTVIDSLIGFQENNDSLLKIINGNNQPILDTSSFEKQISQIDRKIQKNSDLYLNDFITMDELKVRTDSLQAEKRLLKAKISENKFSDSTDVFELVKTQLGSIPINELSYDNKKKIVNNLVSKVDVTADNVDIIFKFQLA

SEQ ID NO: 6767 - protein, 469 aa, synthetic construct
MSYTTPVRAAVYLRISEDRSGEQLGVARQREDCLKLCGQRKWVPVEYLDNDVSASTGKRRPAYEQMLADITAGKIAAVVAWDLDRLHRRPVELEAFMSLADEKRLALATVAGDVDLATPQGRLVARLKGCVAAHETEHKKARQRRAARQKAERGHPNWSKAFGYLPGPNGPEPDPRTAPLVKRAYADILAGASLGDVCRQWNDAGAFTITGRPWTTTTLSKFLRKPRNAGLRAYKGARYGPVDRDAIVGKAQWSPLVDEATFWAAQAVLDAPGRAPGRKSVRRHLLTGLAGCGKCGNHLAGSYRTDGQVVYVCKTCHGVSILAVNIEPILYHIVAERLAMPDAVDLLCRGIHDAAEAETIRLELETLYGELDRLAVERAEGLLTARQVKISTDIVSAKITKLQAHQLDQERLRVFDGIPLGTPRVADAIAELSPDRFRAVLDVLAEVVVQPVGKSGGISNPERVQVNWR

SEQ ID NO: 6768 - protein, 469 aa, synthetic construct
MCYTTPVRAAVYLRISEDRSGERLGVARQREDCLKLCDQRKWEPVEYLDNDVSASTGKRRPAYEQMLADITAGKVAAVVAWDLDRLHRRPIELEAFMSLADEKRLALATVAGDVDLATPQGRLVARLKGSVAAHETEHKKARQRRAARQKAERGLPNWSKAFGYLPGPNGPEPDPRTAPLVKQAYADILAGASLGDVCRQWNDVGALTITGRPWTTTTLSKFLRKPRNAGLRAYKGARYGPVDRDAIVGKAQWSPLVDEATFWAAQAVLDAPGRAPGRKSVRRHLLTGLAGCGKCGNHLAGSYRTDGKVVYVCKACHGVAILADNIEPILYHIVAGRLAMPDAVDLLRREIQDTAEAETIRLELETLYGELDRLAVERAEGLLTARQVKISTDIVNAKITKLQARQLDQERLRVFDGIPLGTPQVAGMIAGLSPDRFRAVLDVLAEVVVQPVGKSCRIFNPERVQVNWR

SEQ ID NO: 6769 - protein, 452 aa, synthetic construct
MKAAIYIRVSTQEQVGNYSIQAQTEKLTALCRSKDWDVYDIFIDGGYSGSNMNRPALNEMLSKLHEIDAVVVYRLDRLSRSQRDTTTLIEEYFLKNNVEFVSLSETLDTSSPFGRAMIGILSVFAQLERETIRDRMVMGKIKRIEAGLPLTTAKGRTFGYDVIDTKLYINEEEAKQLRLIYDIFEEERSITLLQKRLKKLGLKVRTYNRYNNWLTNDLYCGYVSYKDKVHVKGIHEPIISEEQFYRVQEIFTRMGKNPNMNRDSASLLNNLVVCSKCGLGFVHRSKDTMSGGKKYHYRYYSCKTYKHTHELEKCGNKIWRADKLEELIINRVNNYSFASRNVDKEDELDSLNEKLKFERAKKKRLFDLYINGSYEVSELDSMMNDIDAQINYYESQIEANEELKRNKKIQENLAGLATVDFDSLEFREKLLYLKSLINKIYIDGEQVTIEWL

SEQ ID NO: 6770 - protein, 452 aa, synthetic construct
MKAAIYIRVSTREQVENYSIQAQTEKLTALCRSKDWDVYDIFIDGGYSGSNMNRPALNEMLSKLHEIDAVVVYRLDRLSRSQRDTITLIEEYFLKNNVEFVSLSETLDTSSPFGRAMIGILSVFAQLERETIRDRMVMGKIKRIEAGLPLTTAKGRTFGYDVIDTKLYINEEEAKQLRLIYDIFEEERSITFLQRRLKKLGFKVRSYNRYNNWLTNDLYCGYVSYKDKVHVKGIHEPIISEEQFYRVQEIFTRMGKNPNMNRDSASLLNNLVVCGKCGLGFVHRRKDTTGRGKKYHYRYYSCRTYKHTHELEKCGNKIWRADKLEELIINRVNNYSFAGRNEGKEAELDSLNERLKIEHAKRKRLFDLYINGSYEVCELDSMMNDIDAQINYYESQIEANEELRKNKKIQENLANLATVDYDSLEFREKQLYLKSLINKIYIDGELVTIEWL

SEQ ID NO: 6771 - protein, 452 aa, synthetic construct
MKAAIYIRVSTREQVENYSIQAQTEKLTALCRSKDWDVYDIFIDGGYSGSNMNRPALNEMLSKLHEIDAVVVYRLDRLSRSQRDTITLIEEYFLKNNVEFVSLSETLDTSSPFGRAMIGILSVFAQLERETIRDRMVMGKIKRIEAGLPLTTAKGRTFGYDVIDTKLYINEEEARQLRLIYDIFEEEQSITFLQKRLKKLGFKVRTYNRYNNWLTNDLYCGYVSYKDKVHVKGIHEPIISEEQFYRVQEIFTRMGKNPNMNRDSASLLNNLVVCSKCGLGFVHRRKDAMSRDKKYHYRYYSCKTYKHIHELEKCGNKIWRADKLEELIIDRVNNYSLASRNVDKEDELDRLSEKLKIEHAKKKRLFDLYINGSYEASELDGMMNDIDAQINYYESQIEANEGLKKNKKIQENLADPATVDFDSLEFCEKQRYLKSLINKIYIDGEQVTIEWL

SEQ ID NO: 6772 - protein, 452 aa, synthetic construct
MKAAIYIRVSTREQVENYSIQAQTEKLTALCRSKDWDVYDIFIDGGYSGSNMNRPALNEMLSRLHEIDAVVVYRLDRLSRSQRDTITLIEEYFLKNNVEFVSLSETLDTSSPFGRAMIGILSVFAQLERETIRDRMVMGKIKRIEAGLPLTTAKGRTFGYDVVDTKLYINEEEAKQLQLVYDIFEEEQSITFLQKRLKKLGFKVRTYNRYNSWLTNDLYCGYVSYKDKVHVKGIHEPIISEEQFYRVQEIFTRMGKNPNMNRGSASLLNNLVVCSRCGLGFVHRRKDTMSRGKKYHYRYYSCKTYKHTHELEKCGNKIWRADKLEELIINRVNNYSFASRNVDKGDELNSLNEKLKIEHAKKKRLFDLYINGSYEVSELDSMMNDIDAQINYYESQIEANEELKKNKKIQENLANLATVDYDSLEFREKQLYLKSLINRIYIDGEQVTIEWL

SEQ ID NO: 6773 - protein, 452 aa, synthetic construct
MKAAIYIRVSTQEQVENYSIQAQTEKLTALCRSKDWDVYDIFIDGGYSGSNMNRPALNKMLSKLHEIDAVVVYRLDRLSRSQRDTTTLIEEYFLKNNVEFVSLSETLDTSSPFGRAMIGILSVFAQLERETIRDRMVMGKIKRIEAGLPLTTAKGRTFGYDVIDTKLYINEEEAKQLRLIYDIFEEEQSITFLQKRLKKLGFKVRTYNRYNNWLTNDLYCGYVSYKDKVHVKGIHEPIISEEQFYRVQEIFTRMGKNPNMNRDSASLLSNLVVCSKCGLGFVHRSKDTMSRGKKYHYRYYSCKTYKHTHELEKCGNKTWRADKLEELVINRVNNYSFASRNVDKEDELDSLNEKLKTEHAKRKRLFDLYINGSYEVSELDSMMNDIDAQINYYESQIEANEELKKNRKIQENLAGLATVDFDSLEFREKQLYLKSLINKIYIDGEQVTIEWL

SEQ ID NO: 6774 - protein, 485 aa, synthetic construct
MTKKVAIYTRVSTTNQAEEGFSIDEQIDRLTKYAEAMGWQVSDTYTDAGFSGAKLERPAMQRLINDIENKAFDTVLVYKLDRLSRSVRDTLYLVKDVFTKNKIDFVSLNESIDTSSAMGCLFLTILSAINEFERENIKERMTMGKLGRAKSGKSMMWTKTAFGYYHNRKTGILEIVPLQATIVEQIFTDYLSGISLTKLRDKLNESGHIGKDIPWSYRALRQTLDNPVYCGYIKFKDSLFEGMHKPIIPYETYLRVQKELEERQQQTYERNNNPRPFQAKYMLSGMARCGYCGAPLKIVLGHKRKDGSRTMKYHCANRFPRKTKGVTVYNDNKKCDSGTYDLSNLENTVIDNLVGFQENNDSLLKIINGNNQPILDTSSFEKQISQIDKKIQRNSDLYLNDFITMDELKDRTDSLQAEKKLLEAKISENKFNDRTDVFELAKTQLGSIPINELSYDNKKKIVNNLVSKVDVTADSVDIIFKFQLA

SEQ ID NO: 6775 - protein, 452 aa, synthetic construct
MKAAIYIRVSTREQVENYSIQAQTEKLAALCRSKDWDVYDVFIDGGYSGSNMNRPALNEMLSKLHEIDAVVVYRLDRLSRSQRDTITLIEEYFLKNNVEFVSLSETLDTSSPFGRAMIGILSVFAQLERETIRDRMVMGKIKRIEAGLPLTTAKGRTFGYDVIDTKLYINEEEAKQLQLIYDIFEEVQSITFLQKRLKKLGFKVHTYNRYNNWLTNDLYCGYVSYKDKVHVKGIHEPIISEEQFYRVQEIFTRMGKNPNMNRDSASLLNSLVVCSKCGLGFVHRRKDIMSRGKRYHYRYYSCKTYKHIHELEKCGNKIWRADKLEELIINRVNDYSVASRNVDKEDELDSLNEKLKIEHAKKRRLFDLYINGSYEVSELDSMMNDIDAQINYYESQIEANEELKKNKEIQENLAYLATVDFDSLEFREKQLYLKSLINKIYIDGEQVTIEWL

SEQ ID NO: 6776 - protein, 452 aa, synthetic construct
MKAAIYIRVSTREQVENYSIQAQTEKLTALCRSKDWDVYDIFIDGGYSGSNMNRPALNEMLSKLHEVDAVVVYRLDRLSRSQRDTITLIEEYFLKNNVEFVSLSETLDTSSPFGRAMIGILSVFAQLERETIRDRMVMGKIKRIEAGLPLTTAKGRTFGYDVIDTKLYINEEEARQLQLIYDIFEEEQSITLLQKRLKKLGFKVRTYSCYNNWLTNDLYCGYVSYKDKVHVKGIHEPIISEEQFYRVQEIFTRMGKNPNMNRDSASLLNNLVVCSKCGLGFVHRRKDTMSRGKKYHYRYYSCKTYKHIHELEKCGNKIWRADKLEELIINRVNNYSFASRNVDKAEELDSLNEKLKAEHAKKKRLFDLYINGSYEVSELDSMMNDIDAQINYYESQIEANEELKKNKKIQENLANLATVDYDSLEFREKQLYLKSLINKIYIDGEQVTIEWL

SEQ ID NO: 6777 - protein, 485 aa, synthetic construct
MTKKVAIYTRVSTTNQAEEGFSIDEQIDRLTKYAEAMGWQVSDTYTDAGISGAKLERPAMQRLINDIENETFDTVLVYKLDRLSRSVRDTLYLVKDVFTKNKIDFISLNESIDTSSAMGSLFLTILSAINEFERENIKERMTMGKLGRAKSGKSMMWTKTAFGYYHNRKTGILEIVPLQATIVEQIFTDYLSGISLTKLRDKLNESGHIGKDIPWSYRTLRQTLDNPVYCGYIKFKDSLFEGMHKPIIPYETYLKVQKELEERQQQTYERNNNPRPFQAKYMLSGMARCGYCGAPLKIVLGHKRKDGSRTMKYHCANRFPRKTRGVTVYNDNKKCDSGTYDLSNLENTVIDNLIGFQESNDSLLKIINGNNQLIPDTSSLEKQISQIDKRIQKNSDLYLNDFITMDELKDRTDSLQAEKRLLKAKISENKFNDSTDVFEQVKTQLGSVPINELSYDNKKRIVNNLVSKVDVTADNVDIIFKFQLA

SEQ ID NO: 6778 - protein, 469 aa, synthetic construct
MSYTTPVRAAVYLRISEDRSGEQLGVARQREDCLKLCDQRKWVPVEYLDNDVSASTGKRRPAYEQMLADIAAGRIAAVVAWDLDRLHRRPIELEAFMSLADEKRLALATVAGDVDLATPQGRLVARLKGSVAAHETEHKKARQRRAARQKAERGYPNWSKAFGYLPGPNGPEPDPRTAPLVKQAYADILAGASLGDVCRRWNGAGALTITGRPWTTTTLSKFLRKPRNAGLRAYKGARYGPVDRGAIVGKAQWSPLVDEATFWAAQAVLDAPGRAPGRKSVRRHLLTGLAGCGKCGNHLAGSYRTDGRVVYVCKACHGVAILADNIEPILYHIVAERLAMPDAVDLLRREIHDAAEAETIRLELETLYGELDRLAVERAEGLLTARQVKVSTDIVNAKITKLQARQLDQERLRVFDGIPLGTPQVAGVIAELSPNRFRAVLDVLAEVVVQPVGKSGRIFNPERVQVNWR

SEQ ID NO: 6779 - protein, 452 aa, synthetic construct
MKAAIYIRVSTREQVENYSIQAQTEKLTALCRSKDWDVYDIFIDGGYSGSNMNRPALNEMLSKLHEIDAVVVYRLDRLSRSQRDTITLIEEYFLKNNVEFVSLSETLDTSSPFGRAMIGILSVFAQLERETIRDRMVMGKIKRIEAGLPLTTAKGRTFGYDVIDTKLYVNEEEAKQLRLIYDIFEEEQSITFLQKRLKKLGFKVRTYSRYNSWLTNDLYCGYVSYKDRVHVKGIHEPIISEEQFYRVQEIFTRMGKNPNMNRDSASLLNNLVVCSKCGLGYVHRRKDTMSRGKKYHYRYYSCKTYKHIHELEKCGNKIWRADKLEELVINRVNNYSFASRNVDKEDGLDCLNEKLKIEHAKKRRLFDLYLSGSYEVSELDSMMNDIDAQINYYESQIEADEELKKNKKIQENLADLATVDFDSLEFREKQLYLKSLINKIYIDGEQVTIEWL

SEQ ID NO: 6780 - protein, 452 aa, synthetic construct
MKAAIYIRVSTREQVENYSIQAQTEKLTALCRSKDWDVYDIFVDGGYSGSNTNRPALNEMLSKLHEIDAVVVYRLDRLSRSQRDTITLIEEYFLKNNVEFVSLSETLDTSSPFGRAMIGILSVFAQLERETIRDRMMMGKIKRVEAGLPLTTAKGRTFGYDVIDTKLYINEEEAKQLQLIYDIFEEEQSITFLQKRLEKLGLKVHTYNRYNNWLTNDLYCGYVSYKDKVHVKGIHEPIISEEQFYRVQGIFTRMGKNPNMNRDSASLLNNLVVCSKCGLGFVHRRKDTMSRGKKYHYRYYSCKTYKHIHELEKCGNKIWRADKLEELVINRVNNYSFASRNVDKEDELASLNEKLKIEHAKKKRLFDLYINGSFEVSELDSMMNDIDVQINYYESQIEANEELKRNKKIQESLANLATVDYDSLEFREKQLYLKSLISKIYIDGEQVTIEWL

SEQ ID NO: 6781 - protein, 452 aa, synthetic construct
MKAAIYIRVSTQEQVGNYSIQAQTEKLTALCRSKDWDVYDIFIDGGYSGSNMNRPALNEMLSKLHEIDAVVVYRLDRLSRSQRDTTTLIEEYFLKNNVEFVSLSETLDTSSPFGRAMIGILSVFAQLERETIRDRMVMGKIKRVEAGLPLTTAKGRTFGYDVIDTKLYINEEEAKQLQLIYDIFEEEQSITSLQKRLKKLGFKVRTYNRYNNWLTNDLYCGYVSYKDKVHVKGIHEPIISEEQFYRVQEIFTRMGKNPNMNRDSASLLSSLVVCSKCGLGFVHRSKDTMSRGKKYHYRYYSCKTYKHTHELEKCGNKTWRADKLEELIISRVINYSFASRSVDKEDELDSLNEKLKIEHAKRKRLFDLYINGSYEVSELDSMMNDIDAQINYYESQIEANEELKENKKIQENLAEPATVDFDSLEFREKQLYLKSLINKIYIDGEQVTIEWL

SEQ ID NO: 6782 - protein, 485 aa, synthetic construct
MTKKAAIYTRVSTTNQAEEGFSIDEQVDRLTKYAEAMGWQVSDTYTDAGFSGAKLERPAMQRLINDIENKAFDTVLVYKLDRLSRSVRDTLYLVKDVFTKNKIDFISLNESIDTSSAMGSLFLTILSAINEFERENIKERMTMGKLGRAKSGKSMMWAKTAFGYCHNRKTGILEIVPLQATIVEQIFTDYLSGISLTKLRDKLNESGHIGKDIPWSYRTLRQTLDNPVYCGYIKFKDSLFEGMHKPIIPYETYLKVQRELEERQQQTYERNNNPRPFQAKYMLSGMARCGYCGAPLKIVLGHKRKDGSRTMKYHCANRFPRKTKGVTVYNDNKRCGSGTYDLSNLENTVISNLIGFQESSDSLLKIINGNNQPILDTSSFKEQISQIDKKIQKNSDLYLNDFITMDELRDRTDSLQAEKKLLKAKISENKFNDSTDVFELVRTQLGSIPINELSYDNKKKIVNNLVSKVDVTADNVDIIFKFQLA

SEQ ID NO: 6783 - protein, 485 aa, synthetic construct
MTKKVAIYTRVSTTNQAEEGFSIDEQIDRLTKYAEAMGWQVSDTYTDAGISGAKLERPAMQRLINDIENRAFDTVLVYKLDRLSRSVRDTLYLVKDVFTKNKIDFISLNESIDTSSAMGSLFLTILSAINEFERENIKERMTMGKLGRAKSGKSMMWTKTAFGYYHNRKTGILEIVPLQATIVEQIFTDYLSGISLTKLRDKLNESGHIGKDIPWSYRTLRQTLDNPVYCGYIKFKDSLFEGMHKPIIPYETYLKVQKELEERQQQTYVRNNNPRPFQAKYMLSGMARCGYCGAPLKIVLGHKRKDGSRTMKYHCANRFPRKTKGVTVYNDNKKCDSGTYDLRNLENTVIDNLIGFQENNDSLLKIINGNNQPILDTSSFKKQISQIDKKIQKNSDLYLNDFITMDELKARTDSLQAEKKLLKAKISENKFNDSTDVFELVKTQLGSIPINELSYDNKKKIVNNLVSKVDVTADNVDIIFKFQLA

SEQ ID NO: 6784 - protein, 452 aa, synthetic construct
MKAAIYIRVSTQEQVGNYSIQAQTEKLTALCRSKDWDVYDIFVDGGYSGSNMNRPALNEMLSKLHEIDAVVVYRLDRLSRSQRDTTTLIEEYFLKNNVEFVSLSETLDTSSPFGRAMIGILSVFAQLERETIRDRMVMGKIKRIEAGLPLTTAKGRTFGYDVIDTKLYINEEEAKQLQLIYDIFEEEQSITSLQKRLKKLGFKVRTYNRYNNWLTNDLYCGYVSYKDKVHVKGIHEPIISEEQFYRVQEIFTRMGKNPNMNRDSASLLSNLVVCSKCGLGFVHRSKDTMSRGKKYHYRYYSCKTYKHTHELEKCGNKTWRADKLEELIINRVNNYSFASRDVDKENELDNLNEKLKIEHAKKKRLFDLYVNGSYEASELDSMMNDIDAQINYYESLIEANKELKKNKKIQENLADLATVDFDSLEFREKQLYLKSLINKIYIDGEQVTIEWL

SEQ ID NO: 6785 - protein, 452 aa, synthetic construct
MKAAIYIRVSTREQVENYSIQAQTEKLTALCRSKDWDVYDIFIDGGYSGSNMNRPALNEMLSRLREIDAVVVYRLDRLSRSQRDTITLIEEYFLKNNVEFVSLSETLDTSSPFGRAMIGILSVFAQLERETIRDRMVMGKIKRIEAGLPQTTAKGRTFGYDVIDAKLYINEEEARQLQLIYDIFEEEQSITFLQKRLKKLGFKVRTYNRYNNWLTNDLYCGYVSYKDKVHVKGIHEPIISEEQFYRVQEIFARMGKNPNMNRDSASLLNNLVVCSKCGLGFVHRRKDAMSRDKKYHYRYYSCKTYKHIHELEKCGNKIWRADKLEELIINRVNNYSLASRNVDKEDELDSLNEKLKIEHAKKRRLFDLYINGSYEVSELDSMMNDIDAQINYYESQIEANGELKKNKKIQENLAHLATVDFDSLEFREKQLYLKSLINKIYIDGEQVTIEWL

SEQ ID NO: 6786 - protein, 452 aa, synthetic construct
MKAAIYIRVSTREQVENYSIQAQTEKLTALCRSKDWDVYDIFIDGGYSGSNMNRPALNEMLSKLHEIDAVVVYRLDRLSRSQRDTITLIEEYFLKNNVEFVSLSETLDTSSPFGRAMIGILSVFAQLERETIRDRMVMGKIKRVEAGLPLTTAKGCTFGYDVIDTKLYINEEEAKQLQLIYDIFEEEQSITSLQKRLKKLGFKVHTYNRYNSWLTNDLYCGYVSYKDKVHVRGIHEPIISEEQFYRVQEIFTRTGKNPNMNRDSASLLNNLVVCSKCGLNFVHRRKDTMSRGKKYHYRYYSCKTYKHTHELEKCGNKIWRADKLEELIINRVNNYSFASRNVDKEDELDSLNEKLKIEHAKKKRLFDLYINGSYEVSELDNMMNDIDAQINYYESQIEANEELRKNKKIQETLANLTTVDFDSLEFREKQLYLKSLINKIYIDGEQVTIEWL

SEQ ID NO: 6787 - protein, 452 aa, synthetic construct
MKAAIYIRVSTQEQVENYSIQAQTEKLTALCRSKGWDVYDIFIDGGYSGSDMNRPALNEMLCKLHEIDAVVVYRLDRLSRSQRDTITLVEEYFLKNNVEFVSLSETLDTSSPFGRAMIGVLSVFAQLERETIRDRMVMGKIKRIEAGLPLTTAKGRTFGYDVIDTKLYINEEEAKQLQLIYDIFEEEQSITFLQKRLKKLGFKVRTYSCYNNWLTNDLYCGYVSYKDKVHVKGIHEPIISEEQFYRVQEIFTRMGKNPNMSRDSASLLNNLVVCSKCGLGFVHRRKDTASRGKKYHYRYYSCKTYKHTHELEKCGNKIWRADKLEELIINRVNNYSLASRGVDKEDELDSLSEKLKIEHAKKKRLFDLYINGSYKVSELDSMMNDIDAQINYYESQIGANEELKKNRKIQESLANLATVDYDSLEFREKQLYLKSLINKIYIDGEQVTIEWL

SEQ ID NO: 6788 - protein, 485 aa, synthetic construct
MTKKVAIYTRVSTTNQAEEGFSIDEQIDRLTKYAEAMGWQVSGTYTDAGFSGAKLERPAMQRLINDIENKAFDTVLVYKLDRLSRSVRDTLYLVKDVFTKNKIDFISLNESINTSSAMGSLFLTILSAINEFERENIKERMTMGKLGRAKSGKSMMWTKTAFGYYHNRKTGILEIVPLQATIVEQIFTDYLSGISLTKLRDKLNESGHIGKDIPWSYRTLRQTLDNPVYCGYIKFKDSLFEGMHKPIIPYETYLKVQKELEERQQQTYERNNNPRPFQAKYMLSGMARCGYCGAPLRIVLGHKRKDGSRTMKYHCANRFPRKTKGVTVYNDNKKCDSGTYDLSNLEDTVIDNLIGFQEDNDSLLKIINGNNQPILDTSSFKKQISQIDKKIQKYSDLYLNDFITMDELKDRTDSLQAEKKLLKAKISGNKFNDSTDVFELVKTQLGSIPINELSYDNKKKIVNNLVSKVDVTADNVDIIFKFQLA

SEQ ID NO: 6789 - protein, 485 aa, synthetic construct
MTKKVAIYTRVSTTNQAEEGFSIDEQIDRLTKYAEAMGWQVSGTYTDAGFSGAKLERPAMQRLINDIENKAFDTVLVYKLDRLSRSVRDTLHLVKDVFTKNKIDFISLNESIDTSSAMGSLFLTILSAINEFERENIKERMTMGKLGRAKSGKSMMWTKTAFGYYHNRKTGILEIVPLQATIVEQIFTDYLSGISLTKLRDKLNESGHIGKDIPWSYRTLRQTLDNPVYCGYIKFKDSLFEGMHKPIIPYETYLKVQKDLEERQQQTYERNNNPRPFQAKYMLSGMARCGYCGAPLRIVLGHKRKDGSRTMKYHCANRFPRKTKGVTVYNDNKKCDSGTYDQSNLENTVIDNLIGFQENNDSLLKIINGNNQPILDTSSFKKQISQIDKKIQKNSDLYLNDFITMDELKDRTDSLQAEKKLLKAKISENKFNDSADVFELVKTQLGSIPINELSYDDKKKIVNNLVSKVDVTADNVDIIFKFQLA

SEQ ID NO: 6790 - protein, 452 aa, synthetic construct
MKAAIYIRVSTREQVENYSIQAQTEKLTALCRSKDWDVYDIFIDGGYSGSNMNRPALNEMLSKLHEIDAVVVYRLDRLSRSQRDTITLIEEYFLKNNAEFVSLSETLDTSSPFGRAMIGILSVFAQLERETIRDRMVMGKIKRIEAGLPLTTAKGRTFGYDVIDTKLYINEEEAKQLRLIYDIFEEEQSITSLQKRLKKLGFKVRAYNRYNNWLTNDLYCGYVSYKDKVHVKGIHEPIISEEQFYRVQEIFTRVGKNPNMNRDSASLLNNLVVCSKCGLGFVHRRKDTTSRGKKYHYRYYSCKTYKHTHELEKCGNKIWRADKLEELIINRVNNYSLASRNVDKEDELGSLNEKLKIEHAKKKRLFDLYINGSYEVSELDSMMSDIDAQISYYESQIEANEELRKSKKIQENLADLATVDFDSLEFREKQLYLKSLINKVYVDGEQVTIEWL

SEQ ID NO: 6791 - protein, 452 aa, synthetic construct
MKAAIYIRVSTREQVENYSIQAQTEKLTALCRSKDWDVYDIFIDGGYSGSNMNRPALNEMLSKLHEIDAVVVYRLDRLSRSQRDTITLIEEYFLKNNVEFVSLSETLDTSSPFGRAMIGILSVFAQLERETIRDRMVMGKIKRIEAGLPLTTAKGRTFGYNVIDTKLYINEEEARQLQLIYDIFEEEQSITSLQKRLKKLGFKVRTYSCYNNWLTNDLYCGYVSYKDKVHVKGIHEPIISEEQFYRVQEIFTRMGKNPNMNRDSASLLNNLVVCSKCGLGFVHRRKDTTSRGKKYHYRYYSCKTYKHIHELEKCGNKIWRADKLEELVINRVNNYSFASRNVDKEDELDSLNEKLKIEHAKKKRLFDLYINGSYGVSELDSMMNDIDAQINYYESQIEANEELRKNKKIQENLANLATAGYDSLEFREKQLYLKSLINKIYIDGEQVTIEWL

SEQ ID NO: 6792 - protein, 452 aa, synthetic construct
MKAAIYIRVSTREQVENYSIQAQTEKLTALCRSKDWDVYDIFIDGGYSGGNMDRPALNEMLSKLHEIDAVVVYRLDRLSRSQRDTITLIEEYFLKNNVEFVSLSETLDTSSPFGRAMIGILSVFAQLERETIRDRMVMGKIKRIEAGLPQTTAKGRTFGYDVIDTKLYINEEEAKQLQLIYDIFEEEQSITFLQKRLKKLGFKVRTYSRYNNWLTNDLYCGYVSYKDKVHVKGIHEPIISEEQFYRVQEIFTRMGKNPNVNRDSASLLNNLVVCSKCGLGFVHRRKDTTSRGKKYHYRYYSCKTYKHTHELEKCGNKIWRADKLEELIINRVNNYSFASRNVDKGDELDSLNEKLKIEHAKRKRLFDLYINGSYEVSELDSMMNDIDAQINYYESQIEANEELRKNKKIQENLADLATVDYDSLEFREKQLYLKSLINKIYIDGEQVIIEWL

SEQ ID NO: 6793 - protein, 485 aa, synthetic construct
MTKKVAIYTRVSTTNQAEEGFSIDEQIDRLTKYAEAMGWQVSDTYTDAGFSGAKLERPAMQRLINGIENKAFDTVLVYKLDRLSRSVRDTLYLVKEVFTKNKIDFISLNESIDTSSAMGSLFLTILSAINEFERENIKERMTMGKLGRAKSGKSMMWTKTAFGYYHNRKTGILEIVPLQATIVEQIFTDYLSGISLTKLRDKLNESGHIGKDIPWSYRTLRQTLDNPVYCGYIKFKGSLFEGMHKPIIPYETYLRVQKELEERQQQTYERNNNPRPFQAKYMLSGMARCGYCGAPLRIVLGHKRKDGSRTMKYHCANRFPRKTKGITVYNDNKKCDSGTYDLSNLENTVIDNLIGFQENNDSLLKIINGNNQPTLDTSSFKKRISQIDEKIQKNSDLYLNDFITMDELKDRTDSLQAEKKLLKAKISESKFNDSTDVFELVKTQLGSIPINELSYDNKKKIVNDLVSKVDVTADNVDIIFKFQLA

SEQ ID NO: 6794 - protein, 485 aa, synthetic construct
MTKKVAIYTRVSTTYQAEEGFSIDEQIDRLTKYAEAMGWQVSDTYTDAGFSGAKLERPAMQRLINDIENKAFDTVLVYKLDRLSRSVRDTLYLVKDVFTKNRIDFISLNESIDTSSAMGSLFLTILSAINEFERENIKERMTMGKLGRAKSGKSMMWTKTAFGYYHNRKTGILEIVPLQATIVEQIFTDYLSGISLTKLRDKLNESGHIGKDIPWSYRTLRQTLDNPVYCGYVKFKDSLFEGMHKPIIPYETYLKVQKELEERQQQTYERNNNPRPFQAKYMLSGMARCGYCGAPLKIVLGHRRKDGSRTMKYHCANRFPRKTKGVTVYNDNKKCDSGTYDLSNLENTVIDYLIGFQEDNDSLLKIINGNNQPILDTSSFERQISQIDKKIQKNSDQYLNDFITMDELRDRTNSLQAEKRLLKAKISENKFNDSTDVFELVKTQLGSIPINELSYDNKKRIVNNLVSKVDVTADNVDIIFKFQLA

SEQ ID NO: 6795 - protein, 485 aa, synthetic construct
MTKKVAIYTRVSTTNQAEEGFSIDEQIDRLTKYAEAMGWQVSDTYTDAGLSGAKLERPAMQRLINDIENKAFDTVLVYKLDRLSRSVRDTLYLVKDVFTKNKIDFISLNESIDTSSAMGSLFLTILSAINEFERENIKERMTMGKLGRAKSGKSMMWTKTAFGYYHNRKTGILEIVPLQATIVEQIFTDYLSGISLTKLRDKLNESGHIGKDIPWSYRTLRQTLDNPVYCGYIKFKDSLFEGMHKPIIPYETYLEVQRELGERQQQTYERNNNPRPFQAKYMLSGMARCGYCGAPLKIVLGHKRKDGSRTMKYHCANRFPRKTKGVTVYNDNKKCDSGTYDLSNLENTVIGNLTSFQVNNDSLLKIINGNKQPILDTSSFKKQISQIDKKIQKNSDLYLNDFITMDELKDRTDSLQAEKKLLKAKISENKFNDSTDVFELVKTQLGSIPINELSYDNKKKIVNNLVSKVDVTADNVDIIFKFQLA

SEQ ID NO: 6796 - protein, 485 aa, synthetic construct
MTKKVAIYTRVSTTNQAEEGFSIGEQIDRLTKYAEAMGWQVSDTYTDAGLSGAKLERPAMQRLISDIGNKAFDTVLVYKLDRLSRSVRDTLYLVKDVFTKNKIDFISLNESIDTSSAMGSLFLTILSAINEFERENIKERMTMGKLGRAKSGKSMMWTKTAFGYYHNRKTGILEIVPLQATIVEQIFTDYLSGISLTKLRDKLNESGHIGKDIPWSYRTLRQTLDNPVYCGYIKFKGSLFEGMHKPIIPYETYLKVQKELGERQQQTYERNNNPRPFQAKYMLSGIARCGYCGAPLRIVLGHKRKDGSRTMKYHCANRFPRKTKGVTVYNDNKKCDSGTYDLSNLENTVIDNLIGFQENDDSLLKVINGNNQPILDTSSFKKQINQIDKKIQKNSDLYLNDFITMDELKDRIDSLQAEKKLLRAKISENKFNDSTDVFELVKTQLGSIPISELSYDNKKKIVNNLVSKVDVTADNVDIIFKFQLA

SEQ ID NO: 6797 - protein, 485 aa, synthetic construct
MSKKVAIYTRVSTTNQAEDGFSIDEQIDRLTKYAEAMDWQVSDTYTDAGFSGAKLERPAMRRLINDIENKAFDTVLVYKLDRLSRSVRDTLYLVKDVFTKNEIDFISLNESINTSSAMGSLFLTILSAINEFERENIKERMTMGKLGRAKSGKSMMWTKTAFGYCHNRKTGILEIVPLQATIVEQIFTDYLSGISLTKLRDKLNESGHIGKDIPWSYRTLRQTLDNPVYCGYIKFKDSLFEGMHKPIIPYETYLKVQKELEERQQQTYERNNNPRPFQAKYMLSGMARCGYCGAPLRIVLGRKRKDGSRTMKYHCANRFPRKTIGITVYNDNKKCDSGTYDLSNLEDAVIDNLIGFQENNDSLQKIINGNNQPILDTSSFKKRISQIDKKIQKNSDLYLNDLITMDELKDRTDSLQAEKKLLKAKISENKFDDSTVVFELVKTQLGSIPINELSYDDKKKIVNNLVSKVVVTADNVDVIFKFQLA

SEQ ID NO: 6798 - protein, 485 aa, synthetic construct
MTKKVAIYTRVSTTNQAEEGFSIDEQVDRLTKYAEAMGWQVSDTYTDAGSSGAKLERPAMQRLINDIENKAFDTVLVYKLDRLSRSVRDTLYLVKDVFTKNKIDFISLNESIDTSSAMGSLFLTILSAINEFERENIKERMTMGKLGRARSGKSMMWTKTAFGYYHNRKTGILEIVPPQAAIVEQIFTDYLSGISLTKLRDKLNESGHIGKDIPWSYRTLRQTLDNPVYCGYIKFKDSLFEGLHKPIIPYETYLKVQKELEERQQQTYERNNNPRPFQAKYMLSGKARCGYCGAPLRIVLGHKRKDGSRTMKYHCANRFPRKTKGITVYNDNKKCDSGAYDLSNLENTVIDNLIGFQENNDSLLKIINGSNQPILDTSSFKKQISQIDEKIQKYSDLYLNDFITMDELKDRTDSLRAEKKLLKAKISENKFNDSTGVFELVKTQLGSIPINELSYGNKKKIVNSLVSKVDVTADNVDIIFKFQLA

SEQ ID NO: 6799 - protein, 452 aa, synthetic construct
MKAAIYIRVSTREQVENYSIQAQTEKLTALCRSKDWDVYDIFIDGGYSGSNMNRPALNEMLSKLHEIDAVVVYRLDRLSRSQRDTITLIEEYFLKNNVEFVSLSETLDTSSPFGRAMIGILSVFAQLERETIRDRMVMGKIKRVEAGLPLTTAKGRTFGYDVVDTKLYINEEEAKQLRLIYDIFEEEQSITLLQKRLKTLGLKVRTYSCYNNWLTNDLYCGYVSYKDKVHVKGIHEPIISEEQFYRVQEIVTRMGKNPNMNRDSASLLSNLVVCSKCGLGFVHRRKDTTSRGKKYHYRYYSCKTYKHIHELEKCGNKIWRADRLEELIINRVNNYSFAGRNEDKEDELDSLNEKLKIEHAKKKRLFDLYINGSYEVSELDSMMNDIDAQINYYESQIEANGELKKNKKIQENLANLATVDYDSLEFREKQLYLKSLINKIYIDGEQVTIEWL

SEQ ID NO: 6800 - protein, 469 aa, synthetic construct
MSYTTPVRAAVYLRISEDRSGEQLGVARQREDCLELCGQRKWVPVEYLDNDVSASTGKRRPAYEQMLADITAGKIAAVVAWDLDRLHRRPIELEAFMSLADEKRLALATVAGDVDLATPQGRLVARLKGCVAAHETEHKKARQRRAARQKAERGLPNWSKAFGYLPGPNGPEPDPRTAPLVRQAYADILAGASLGDVCRQWNGAGAFTITGRPWTTTTLSKFLRKPRNAGLRAYKGARYGPVDRDAIVGRAQWSPLVDEATFWAAQAVLDAPGRAPGRKSVRRHLLTGLAGCGKCGNHLAGSYRTDGRVVYVCKACHGVAILADNIEPILYHIVAERLAMPDAVDLLRREIHDAAEAEAIRLELETLYGELDRLAVERAEGLLTARQVKISTDIVNAKITKLQARQLDQERLRVFDGIPLGTPQVAGVIAELSPDRFRAVLDVLAEVVVQPVGKSGRIFNPERVQVNWR

SEQ ID NO: 6801 - protein, 485 aa, synthetic construct; identical to SEQ ID NO: 4027

SEQ ID NO: 6802 - protein, 452 aa, synthetic construct
MKAAIYIRVSTREQVENYSIQAQTEKLTALCRSKDWDVYDIFIDGGYSGSNMNRPALNEMLSKLHEIDAVVVYRLDRLSRSQRDTVTLIEEYFLKNNVEFVSLSETLDTSSPFGRAMIGILSVFAQLERETIRDRMVMGKIKRIEAGLPLTTAKGRTFGYDVIDTKLYINEEEAKQLQLIYDIFEEEQSITFLQKRLKKLGFKVRTYNCYNNWLTNDLYCGYVSYKDKVHVKGIHEPIISEEQFYRVQEIFTRMGKNPNMNRNSASLLNNLVVCSKCGLGFVHRRKDAMSRDKKYHYRYYSCKTYKHIHELEKCGNKIWRADKLEELIINRVNNYSLASRNVDKEDELGSLNEKLKTEHAKKKRLFDLYINGNYEVSELDSMMNDIDAQINYYESQIEANEELQKNKKIQENLAYLATVDFDSLEFREKQLYLKSLISKIYIDGEQVTIEWL

SEQ ID NO: 6803 - protein, 452 aa, synthetic construct
MKAAIYIRVSTREQVENYSIQAQTEKLTALCRSKDWDVYDIFIDGGYSGSNMNRPALNEMLSKLHEVDAVVVYRLDRLSRSQRDTITLIEEYFLENNVEFVSLSETLDTSSPFGRAMIGILSVFAQLERETIRDRMVMGKIKRIEAGLPLTTAKGRTFGYDVIDTKLYINEEEAKQLQLIYDIFEEEQSITFLQKRLKKLGFKVHTYSRYNNWLTNDLYCGYVSYKDKVHVKGIHEPIISEEQFYRVQEIFTRMGKNPNMNRDSASLLNNLVVCSKCGLGFVHRRKDAMSRDKKYHYRYYSCKTYKHIHELEKCGNKIWRADELEELIINRVNNYSLAGRNVDKEDELDSLNEKLKIEHAKKKRLFDLYINGSYEVSELDSMMSDIDAQINHYESQIEANEELRKNKRIQESLAGLATVNFDSLEFREKQLYLKSLINRIYIDGEQVTIEWL

SEQ ID NO: 6804 - protein, 452 aa, synthetic construct
MKAAIYIRVSTREQVENYSIQAQTEKLTALCRSKDWDVYDIFIDGGYSGSNMNRPALNEMLSKLHEIDAVVVYRLDRLSRSQRDTITLIEEYFLKNNVEFVSLSETLDTSSPFGRAMIGILSVFAQLERETIRDRMVMGKIKRIEAGLPLTTAKGRTFGYDVIATRLYINEEEARQLRLIYDIFEEEQSITSLQKRLKKLGFKVHTYNRYNNWLTNDLYCGYVSYKDKVHVKGIHEPIISEEQFYRVQEIFTRMGKNPNMNRDSASLLNNLVVCGKCGLGFVHRRKDAMSRSKKYHYRYYSCKTYKHIHELEKCGNKIWRADKLEELIINRVNNYSLANRNVDKEDELDSLNEKLKIEHAKKKRLFDLYINGSYEVSELDSMMNDIDAQINYYESRIEANEELKKNKKIQENLAHLATVDFDSLEFREKQLYLKSLINRIYIDGEQVTIEWL

SEQ ID NO: 6805 - protein, 452 aa, synthetic construct
MKAAIYIRVSTREQVENYSIQAQTEKLTALCRSKDWDVYDIFIDGGYSGSNMNRPALNEMLSKLHEIDAVVVYRLDRLSRSQRDTITLIEEYFLKNNVEFVSLSETLDTSSPFGRAMIGILSVFAQLERETIRDRMVMGKIKRIEAGLPLTTAKGRTFGYDVVDTKLYINEEEAKQLQLIYDIFEEEQSITFLQKRLKKLGFKVRTYSCYNNWLTNDLYCGYVSYKDKVHVKGIHEPIISEEQFYRVQEIFTRMGKNPNMNRDSASLLNNLVVCSKCGLSYVHRRKDTMSRGKRYHYRYYSCKTYKHTHELEKCGNKIWRADKLEELIINRVNNYSLASRNVDKEDELDSLNEKLKIEHAKKKRLFDLYINGSYEVSELDSMMNDIDAQISHYESQIEANEELKKSKKIQENLADLATVDYDSLEFREKQLYLKSLINKIYIDGEQVTIEWL

SEQ ID NO: 6806 - protein, 452 aa, synthetic construct
MKAAIYIRVSTREQVENYSIQAQTEKLTALCRSKDWDVYDIFIDGGYSGSNMNRPALNEMLSKLREIDAVVVYRLDRLSRSQRDTITLIEEYFLKNNVEFVSLSETLDTSSPFGRAMIGILSVFAQLERETIRDRMVMGKIKRIEAGLPLTTAKGRTFGYDVIDTKLYINEEEAKQLQLIYDIFEEEQSITFLQKRLKKLGFKVRTYNCYNNWLTNDLYCGYVSYKDKVHVKGIHEPIISEEQFYRVQEIFTRMGKNPNMNRDSASLLNNLVVCSKCGLGFVHRRKDAMSRDKKYHYRYYSCKTYKHIHELEKCGNKIWRADKLEELIINRVNNYSFASRNVDKEDELDSLNEKLKIEHAKKKRLFDLYINGSYEVSELDSVMNDIDAQINYYESRIEANEELKKDKKIQENLAYLATVDFDSLEFREKQLYLKSLINKIYIDGEQVTIEWL

SEQ ID NO: 6807 - protein, 452 aa, synthetic construct
MKAAIYIRVSTREQVENYSIQAQAEKLTALCRSKDWDVYDIFVDGGYSGSNMNRPALNEMLSKLHEIDAVVVYRLDRLSRSQRDTITLIEEYFLKNNVEFVSLSETLDTSSPFGRAMIGILSVFAQLERETIRDRMVMGKIKRIEAGLPLTTAKGRTFGYDVIDTKLYINEEEAKQLQLIYDIFEEEQSITFLQKRLKKLGFRVRTYNRYISWLTNDLYCGYVSYKDKVHVKGIHEPIISEEQFYRVQEIFTRMGKNPNMNRDSASLLNNLVVCGKCGLGFVHRRKDTTSRGKKYHYRYYSCKTYKHTHELEKCGNKIWRADKLEELIIDRVNNYSFASRNVDKEDELDSLNEKLKIEHAKKRRLFDLYINGSYEVSELDSMMSDIEAQINYYESQIEANEELKKNKKIQENLADLATVDYDSLEFREKQLYLKSLINKIYIDGEQVTIEWL

SEQ ID NO: 6808 - protein, 469 aa, synthetic construct
MSYTTPVRAAVYLRISEDRSGEQLGVARQREDCLKLCGQRKWVPVEYLDNDVSATTGKRRPAYEQMLADITAGKIAAVVAWDLDRLHRRPIELEAFMSLADEKRLALATVAGDVDLATPQGRLVARLKGCVAAHETEHKKARQRRAARQKAERGLPNWSKAFGYLPGPNGPEPDPRTAPLVKQAYADILAGASLGDVCRQWNDAGAFTITGRPWTTTTLSKFLRKPRNAGLRAYKGARYGPVDRDAIVGKAQWSPLVDEATFWAAQAVLDAPGRAPGRKSVRRHLLTGLAGCGKCGNHLAGSCRTDGQVVYVCKACHGIAILADNIEPILYHIVAERLAMPDAADLLRREVRDAAEAETIRLELETLYGELDRLAVERAEGLLTARQVKISTDIVNAKITKLRARQLDQERLRVFGGIPLGTPQVAGVIAELSPDRFRAVLDVLAEVVVRPAGKSGRIFNPERVQVNWR

SEQ ID NO: 6809 - protein, 485 aa, synthetic construct
MTKKVAIYTRVSTTNQAEEGFSIDEQIDRLTKYAEAMGWQVSDTYTDAGVSGAKLERPAMQRLINDIENKAFDTVLVYKLDRLSRSVRDTLYLVKDVFTKNKIDFISLNESIDTSSAMGSLFLTILSAINEFERENIKERMTMGKLGRAKSGKSMMWTKTAFGYYHNRKTGILEIVPLQATIVEQIFTDYLSGISLTKLRDKLNESGHIGKDIPWSYRTLRQTLDNPVYCGYIKFKGSLFEGMHKPIIPYETYLKVQKELEERQQQTYERNNNPRPFQAKYMLSGMARCGYCGAPLRIVLGHKRKDGSRTMKYHCANRFPRKTKGVTVYNGNKKCDSGTYDLSNLEDTVIDNLIGFQENNDSLLKIISGNNQPILDTSSLKKQISRIDKKIQKNSDLYLNDFITMVELKDRTDSLQAEKKLLKAKISENKINDSTDVFELVKTQLGSIPINELSYDDKKKIVNNLVSKVDVTADNVDIIFKFQLA

SEQ ID NO: 6810 - protein, 485 aa, synthetic construct
MTRKVAIYTRVSTTNQAEEGFSIDEQTDRLTKYAEAMGWQVSDTYTDAGFSGAKLERPAMQRLINDIENKAFDTVLVYKLDRLSRSVRDTLYLVKDVFTKNKIDFISLNESINTSSAMGSLFLTILSAINEFERENIKERMTMGKLGRAKSGKSMMWTKTAFGYYHNRKTGILEIVPLQATIVEQIFTDYLSGISLTKLRDKLNESGHIGKDIPWSYRTLRQTLDNPVYCGYIKFKDSLFEGMHKPIIPYETYLKVQKELEERQQQTYERNNNPRPFQAKYMLSGMARCGYCGAPLRIVLGRRRKDGSRTMKYHCANRFPRKTKGVTVYNDNKKCGSGTYDLSDLENTVIDNLIGFQENNDSLLKIINGNNQPILDSSSFKEQISQIDKKIQKNSDLYLNDFITMDELKDRTDSLQAEKKLLEAKISENKFNDSTGVLELVKTQLGSIPINELSYDNKKKIVNNLVSKVDVTADNVDIIFKFQLA

SEQ ID NO: 6811 - protein, 485 aa, synthetic construct
MTKKVAIYTRVSTTNQAEEGFSIDEQIDRLTKYAEAMGWQVSDTYTDAGFSGAKLERPAMQRLFNDIENKAFDTVLVYKLDRLSRSVRDTLYLVKEVFTKNKIDFISLNESIDTSSAMGSLFLTILSAINEFERENIKERMTMGKLGRAKSGKSMMWTKTAFGYYHNRKTGILEIVPLQATIVEQIFTDYLSGTSLTKLRDKLNESGHIGKDIPWSYRTLRQTLDNPVYCGYIKFKDSLFEGMHKPIIPYETYLKVQKELKERQQQTYERNNNPRPFQAKYMLSGMARCGYCGAPLRIVLGHKRKDGSRTMKYHCANRFPRKTKGVTMYNDNKKCDSGTYDLGNLENTVIDNLIGLQENNDSLLKIINGNNRPILDTSSFKKQISQIDKKIQKNSDLYLNDFITMDELKDRTDSLQAEKKLLKAKISENKFDDSTDVFELVKTQLGSIPINELSYDNKKKIVNNLVSKVDVTADNVDIIFKFQLA

SEQ ID NO: 6812 - protein, 452 aa, synthetic construct
MKAAVYIRVSTREQVENYSIQAQTEKLTALCRSKDWDVYDIFIDGGYSGSNMNRPALNEMLSRLHEIDAVVVYRLDRLSRSQRDTITLIEEYFLKNNVEFVSLSETLDTSSPFGRAMIGILSVFAQLERETIRDRMVMGKIKRIEAGLPLTTAKGRTFGYDVIDTKLYINEEEARQLQLIYDIFEEEQSITFLQKRLKKLGFKVRTYSCYNNWLTNDLYCGYVSYKDKVHVKGIHEPIISVEQFYRVQEIFTRMGKSPNMNRDSASLLNNLVVCSKCGLGFVHRRKDTTSRGKKYHYRYYSCKTYKHIHELEKCGNKIWRADKLEELVINRVNNYSFASRNADKEDELDSLNEKLRIEHAKKKRLFDLYINGSYEVSELDSMMNDVDAQINYYESQIEANEELKKSKKVQENLANPATVDYDSLEFREKQLYLKSLINKIYIDGEQVTIEWL

SEQ ID NO: 6813 - protein, 485 aa, synthetic construct
MTKKVAIYTRVSTTNQADEGFSIDEQIDRLTKYAEAMGWQVSDTYTDAGFSGAKLERPAMQRLINDIENKAFDTVLVYKLDRLSRSVRDTLHLVKDVFTKNKIDFISLNESIDTSSAMGSLFLTILSAINEFERENIKERMTMGKLGRAKSGKSMMWTKTAFGYYHNRKTGILEIVPLQATIVEQIFTDYLSGISLTKLRDKLNESGHIGKDIPWSYRTLRQILDNPVYCGYIKFKGSLFEGMHKPIIPYETYLKVQKELEERQQQTYERNNNPRPFQAKYMLSGVARCGYCGAPLKIVLGHKRKDGSRTMKYHCANRFPRKTKGVTVYNDNKKCDSGTYDLSSLENTVIDNLIGFQENNDSLLKIINGNNQPILDTSSLKKQISQIDKKIQKNSDLYLNDFITMDELKDRTDSLQADKKRLKAKISESKFNDSTDVFELVKTQLGSIPISELSYDDKKKIVNNLVSKVDVTADNVDIILKFQLA

SEQ ID NO: 6814 - protein, 485 aa, synthetic construct
MTKKVAIYTRVSTTNQAEEGFSIDEQIDRLTKYAEAMGWLVSDAYTDAGFSGAKLERPAMQRLINDIENKAFDTVLVYKLDRLSRSVRDTLYLVKDVFTKNKIDFISLSESIDTSSAMGSLFLTILSAINEFERENIKERMTMGKLGRAKSGKSMMWTRTAFGYYHNRKTGILEIVPLQATIVEQIFTDYLSGISLTRLRDKLNESGHIGKDIPWSYRTLRQTLDNPVYCGYIKFKDSLFEGMHKPIIPYETYLKVQKELEERQQQTYERNNNPRPFQAKYMLSGMARCGYCGAPLRIVLGHKRKDGSRTMKYHCANRFPRKAEGVTVYNDNKKCDSGTYDLSNLENTVIDILIGFQENNDSLLKIINGNNQPILDTSSFKKQISQIDKKIQKNSDLYLNDFITMDELKDRTDSLQAEKKLLKAKISENKFNDSTDVFELVKTQLGSTPINELSYDNKKKIVNNLVSKVDVTADNVDIVFKFQQA

SEQ ID NO: 6815 - protein, 452 aa, synthetic construct
MKAAIYIRVSTREQVENYSIQAQTEKLTALCRSKDWDVYDIFIDGGYSGSNMNRPALNEMLSKLHEIDAVAVYRLDRLSRSQRDTITLIEEYFLKNNVEFVSLSETLDTSSPFGRAMIGILSVFAQLERETIRDRMVMGKIKRVEAGLPLTTAKGRTFGYDVIDTRLYINEEEAKQLQLIYDIFEEEQSITLLQKRLKNLGFKVHTYNRYNNWLTNDLYCGYVSYKDKVHVKGIHEPIISEEQFYRVQEIFTRMGRNPNMNRESVSLLNNLVVCSKCGLGFVHRRKDTVSRGKKYHYRYYSCKTYKHTHELEKCGNKIWRADKLEELIINRVNNYSFASRNVDKEDELDSLNEKLKIEHARKKRLFDLYINGSYEVSELDSMMSDIDAQINYYERRIEANEELKKNEKIQENLANLATVDYDSLGFREKQLYLKSLINKIYIDGEQVTIEWL

SEQ ID NO: 6816 - protein, 452 aa, synthetic construct
MKAAIYIRVSTREQVENYSIQAQTEKLTALCRSRDWDVYDIFIDGGYSGSNMNRPALNEMLSKLHEIDAVVVYRLDRLSRSQRDTITLIEEYFLKNNVEFVSLSETLDTSSPFGRAMIGILSVFAQLERETIRDRMVMGKIKRVEAGLPLTTAKGRTFGYDVIDTKLYINEEEAKQLQLIYDIFEEEQSITFLQKRLKELGFKVRTYNRYNNWLTNDLYCGYVSYKDKVHVKGIHEPIISEEQFYRVQEIFTRMGKNPNTNRDSASLLNNLVVCSKCGLGFVHRRKDTTSRGKKYHYRYYSCKTYKHTHELERCGNKIWRADKLEELIINRVNNYSLASRNVDKEDEPDSLNEKLNIEHAKKKRLFDLYINGSYEVSELDSMMNDIDAQINYYESQIEANEELKKNKKIQENLAGLVTADFDSLEFREKQLYLKSLINKIYIDGEQVTIEWL

SEQ ID NO: 6817 - protein, 452 aa, synthetic construct
MKAAIYIRVSTREQVENYSIQAQTEKLTALCRSKDWDVYDIFIDGGYSGSNMNRPALNEMLSRLHEIDAVVVYRLDRLSRSQRDTITLIEEYFLKNNVEFVSLSETLDTSSPFGRAMIGILSVFAQLERETIRDRMVMGKIKRIEAGLPLTTAKGRTFGYDVIDTKLYINEEEARQLQLIYDIFEEEQSITLLQKRLKKLGFKVRTYSRYNNWLTNDLYCGYVSYKDKVHVKGIHEPIISEEQFYRVQEIFTRMGKNPNMNRDSASLLSNLVVCGRCGLGFVHRRKDTMSRGKKYHYRYYSCKTYKHTHELEKCGNKIWRADKLEELIINRVNNYSFAGRNVDKEDELDSLNEKLEIEHAKKKRLFELYISGSYEVSELDSMMNDIDAQINYYEGQIEANEELKKNKKIQENLADLATVDFDSLEFREKQLYLKSLINKIYIDGEQVTIEWL

SEQ ID NO: 6818 - protein, 469 aa, synthetic construct
MCYTTPVRAAVYLRISEDRSGEQLGVARQREDCLKLCDQRKWVPVEYLDNDVSASTGKRRPAYEQMLADITAGRIAAVVAWDLDRLHRRPIELEAFMSLADEKRLALATVAGDVDLATPQGRLVARLKGSVAAHETEHKKARQRRAARQKAERGHPNWSKAFGYLPGPNGPEPDPRTAPLVKQAYADILAGASLGDVCRQWNDAGAFTITGRPWTTTTLSKFLRKPRNAGLRAYKGARYGPVDRDAIVGRAQWSPLVDEATFWAAQAVLDAPGRAPGRKSVRRHLLTGLAGCGKCGNHLAGSYRTDGRVVYVCKACHGVAILADNIEPILYHIVAERLAMPDAVDLLRREIHDVAEAEIIRLELEALHGELDRLAVERAEGLLTARQVKICTDIVNAKITKLQARQQDQERLRVLGGIPLGTPQVAGTIAELSPDRFRAVLDVLAEVVVQPVGKSGRIFNPERVQVNWR

SEQ ID NO: 6819 - protein, 452 aa, synthetic construct
MKAAIYIRVSTREQVENYSIQAQTEKLTALCRSKDWDVYDIFIDGGYSGSNMNRPALNEMLSKLHEIDAVVVYRLDRLSRSQRDTITLIEEYFLKNNVEFVSLSETLDTSSPFGRAMIGILSVFAQLERETIRDRMVMGKIKRIEAGLPLTTAKGRTFGYDVIDTKLYINEEEAKQLQLIYDIFEEEQSITFLQKRLKKLGFKVRTYNHYNSWLTNDLYCGYVSYKDKVHVKGIHEPIISEEQFYRVQEIFTRMGKNPNMNRDSASLLNNLVVCSKCGLGFVHRRKDTTSRGKKYHYRYYSCKTYKHIHELEKCGNKIWRADKLEELIINRVNSYSFASRNADKEDELDSLNDKLKIEHAKKKRLFDLYINGGYEVSELDCMMNDIDAQINYYESQIEANEELKRDKKIQESLANLATVDYDSLEFREKQLYLKSLINKIYIDGEQVTIEWL

SEQ ID NO: 6820 - protein, 485 aa, synthetic construct
MTKKVAIYTRVSTTNQAEEGFSIDEQIDRLTKYAEAMGWQVSDTYTDAGFSGAKLERPAMQRLINDIENKAFDTVLVYKLDRLSRSVRDTLYLVKDVFTKNKIDFISLNESIDTSSAMGSLFLTILSAVNEFERENIKERMTMGKLGRAKSGKSMMWTKTAFGYYHNRKTGILEIVPLQATIVEQIFTDYLSGISLTKLRDKLNEGGHIGKDIPWSYRTLRQTLDNPVYCGYIKFKDSLFEGMHKPIIPYETYLKVQKELQERQQQTYERNNNPRPFQAKYMLSGMARCGYCGAPLRIVLGRKRKDGSRTMRYHCANRFPRKTKGVTVYNDNKRCDSGTYDLSNLENTVIDILIGFQENNDSLLKIINGNNQPTLDTGSFKEQISQIDKKIQKNSDLYLNDFITMDELKERTDSLQAEKKLLRAKISENKFNDSTDVFELVKTQLGSIPINELSYDNKKKVVNNLVSKVDVTADNVDIIFKFQLA

SEQ ID NO: 6821 - protein, 485 aa, synthetic construct
MTKKVAIYTRVSTTNQAEEGFSIDEQIDRLTKYAEAMGWQVSDTYTDAGFSGAKLERPAMQRLINDIENKAFDTVLVYKLDRLSRSARDTLYLVKDVFAKDKIDFISLNESIDTSSAMGSLFLTILSAINEFERENIKERMTMGKLGRAKSGKSMMWTKTAFGYYHNRETGILEIVPLQATIVEQIFTDYLSGISLTKLRDKLNESGHIGKDIPWSYRTLRQTLDNPVYCGYIKFKDSLFEGMHKPIIPYETYLKVQKELEERQQQTYERNNNPRPFQAKYMLSGMARCGYCGAPLKIVLGHKRKDGSRTMKYHCANRFPRKTKGITVYNDNKKCDSGTYDLNNLENTVIDYLIGFQENNDSLLKIINGNNQPILDTSSFKKQISQIDKKIQKNSDLYLNDFITMDELKDRTDSLQAEKELLRAKISENKLNDSTDVFELVKTQLGSVPINELSYDNKKKIVNNLVSKVDVTADSVDIIFKFQLA

SEQ ID NO: 6822 - protein, 452 aa, synthetic construct
MKAAIYIRVSTREQVENYSIQAQTEKLTALCRSKDWDVYDIFIDGGYSGSNMNRPALNEMLSKLHEIDAVVVYRLDRLSRSQRDTITLIEEYFLKNNVEFVSLSETLDTSSPFGRAMIGILSVFAQLERETIRDRMVMGKIKRIEAGLPLTTAKGRTFGYDVIDTKLYINEEEAKQLQLIYDIFEEEQSITFLQKRLKKLGLKVHTYNRYNNWLTNDLYCGYVSYKDKVHVKGIHEPIISEEQFYRVQEIFTRMGKNPNMNRDSASLLNNLVVCGKCGLGFVHRRKDAASRDKKYHYRYYSCKTYKHIHELEKCGNKIWRADKLEELIVNRVNNYSFASRNVDKEDELDSLNEKLKIEHAKKRRLFDLYINGSYEVSELDSMMNDIDAQINYYESQIEANEELKKNKKIQENLAYLATVDFDSLEFREKQLYLKSLINKIYIDGEQVTIEWL

SEQ ID NO: 6823 - protein, 485 aa, synthetic construct
MTKKVAIYTRVSTTNQAEEGFSIDEQIDRLTKYAEAMGWQVSDTYTDAGFSGAKLERPAMQRLINDIENKAFDTVLVYKLDRLSRSVRDTLHLVKDVFTKNKIDFISLNESIDTSSAMGSLFLTILSAINEFERENIKERMTMGKLGRAKSGRSMMWTKTAFGYYHNRKTGILEIVPLQATIVEQIFTNYLSGISLTKLRDKLNESGHIGKDIPWSYRTLRQTLDNPVYCGYIKFKDSLFEGMHKPIIPYETYLKVQKELEERQQQAYERNNNPRPFQAKYMLSGVARCGYCGAPLRIVLGHKRKDGSRTMKYHCANRFPRRTKGVTVYNDNKKCDSGTYDLSDLENTVIDNLIGFQENNDSLLEIINGNNQPILDTSSFKKQISQIDKKIQKNSDLYLNDFITMGELKDRTDSLQAEKRLLKAKISENKFNDSTDVFELVKTQLGSIPINELSYDNKKKIVNSLVSKVDVTADNVDIIFKFQLA

SEQ ID NO: 6824 - protein, 452 aa, synthetic construct
MKAAIYIRVSTQEQVGNYSIQAQTEKLTALCRSKDWDVYDIFVDGGYSGSNMNRPALNEMLSKLHEIDAVVVYRLDRLSRSQRDTTTLIEEYFLKNNVEFVSLSETLDTSSPFGRAMIGILSVFAQLERETIRDRMVMGKIKRVEAGLPLTTAKGRTFGYDVIDTKLYINEEEAKQLQLIYDIFEEEQSITSLQKRLKKLGFKVRTYNRYNNWLTNDLYCGYVSYKDKVHVKGIHEPIISEEQFYRVQEIFTRMGKNPNMNRDSASLLNNLVVCSKCGLSFVHRRKDTMSRGKKYHYRYYSCKTYKHTHELEKCGNKTWRADRLEELIIDRVNNYSFASRNADKENELDSLNEKQKIEHARKKRLFDLYINGSYEVSELDSMMDDIDAQINYYESQIEANEELKKNKKIQENLADLATVDFDSLEFREKQLYLKSLINKIYIDGEQVTIEWL

SEQ ID NO: 6825 - protein, 452 aa, synthetic construct
MKAAIYIRVSTREQVENYSIQAQTEKLTALCCSKDWDVYDIFIDGGYSGSNMNRPALNEMLSKLHEIDAVVVYRLDRLSRSQRDTITLIEEYFLKNNVEFVSLSETLDTSSPFGRAMIGILSVFAQLERETIRDRMVMGKIKRIEAGLPLTTAKGRTFGYDVIDTKLYINEEEAKQLQLIYDIFEEEQSITLLQKRLKNLGFKVRTYNRYNNWLTNDLYCGYVSYKDKVHVKGIHEPIISEEQFYRVQEIFTRMGKNPNMNRDSASLLNNLVVCSKCGLGFVHRRKDAMSRDKKYHYRYYSCKTYKHIHELEKCGNKIWRADKLEELIINRVNNYSIASRNADKEDELDSLNGKLKIEHAKKKRLFDLYINGSYEVSELDSMMNDIDAQINYYESQIEANEALIKNEQIQENLANLATVDFDSLEFREKQRYLKSLINKIYIDGEQVTIEWL

SEQ ID NO: 6826 - protein, 485 aa, synthetic construct
MTKKVAIYTRVSTTNQAEEGFSIDEQVDRLTKYAEAMGWQVSDTYTDAGFSGAKLERPAMQRLIIDIENKAFDTVLVYKLDRLSRSVRDTLYLVKDVFTKNKIDFISLSESIDTSSAMGSLFLTILSAINEFERENIKERMTMGKLGRAKSGKSMMWTKTAFGYYHNRKTGILEIVPLQAAIVEQIFTDYLSGISLTKLRDKLNEGGHIGKDIPWSYRTLRQTLDNPVYCGYIKFKGSLFEGMHKPIIPYETYLKVQKELEERQQQTYERNNNPRPFQAKYMLSGMARCGYCGAPLRIVLGHKRKDGSRTMKYHCANRFPRKTKGVTVYNDNKKCDSGTYDLSNLENTVIDSLVGFQEDNDSLLKIINGINQPILDTSGFIKQISQIDKKIRKNSDLYLNDFITMDELKDRTDSLQAEKKLLKAKISENKFNDSTDVFELVKTQLGSIPINELSYDNKKKLVNNLVSKVDVTADNVDIIFKFQLA

SEQ ID NO: 6827 - protein, 452 aa, synthetic construct
MKAAIYIRVSTQEQVGNYSIQAQTEKLTALCRSKDWDVYDIFIDGGYSGSNMNRPALNEMLSKLHEIDAVVVYRLDRLSRSQRDTTTLIEEYFLKNNVEFVSLSETLDTSSPFGRAMIGILSVFAQLERETIRDRMVMGKIKRIEAGLPLTTAKGRTFGYDVIDTKLYINEEEAKQLRLIYDIFEEEQSITFLQKRLKKLGFKVRTYNRYNNWLTNDLYCGYVSYKDKVHVKGIHEPIISEEQFYRVQEIFTRMGKSPNMNRDSASLLSNLVVCSKCGLGFVHRSKDTMSRGKKYHYRYYSCKTYKHTHELEKCGNKIWRADKLEELIINRVNNYSFVSRNVDKEDELDSLNEKLKIEHARKKRLFDLYINGSYEVSELDSMMNDIDAQINYYESQIEASEELKKNKKIQENLADLATVDFDSLEFREKQLYLKSLINKIYIDGEQVTIDWL

SEQ ID NO: 6828 - protein, 485 aa, synthetic construct
MTKKVAIYTRVSTTNQAEEGFSIDEQIDRLTKYAEAMGWQVSDTYTDAGFSGAKLERPAMQRLINDIENKAFDTVLVYKLDRLSRSVRDTLYLVKDVFTKNKIDFISLNECIDTSSAMGSLFLTILSAINEFERENIKERMTMGKLGRAKSGKSMMWTKTAFGYYHNRKTGILEIVPLQAIIVEQIFTDYLSGISLTKLRDKLNESGHIGKDIPWSYRTLRQTLDNPVYCGYIKFKDSLFEGMHKPIIPYETYLKVQKELVERQQQTYERNNNPRPFQAKYMLSGMARCGYCGAPLRVVLGHKRKDGSRTMKYHCANRFPRKTKGVTVYNDNKKCDSGAYDLSNLENTVIDNLIGFQENNDSLLKIINGNNQPILDTSSFRKQISQIDKKIQKNSDLYLNDFITMDELKDRTDSLQAEKKLLKAKISENRFNDSTDVFELVKTQLGSIPINELSYDNKKKIVNNLVSKVDVTSDNVDIIFKFQLA

SEQ ID NO: 6829 - protein, 469 aa, synthetic construct
MSNTTPVRAAVYLRISEDRSGEQLGVARQREDCLKLCDQRKWVPVEYLDNDVSASTGKRRPAYEQMLADITAGKIGAVVAWDLDRLHRRPIELEAFMSLADEKRLALATVAGDVDLATPQGRLVARLKGSVAAHETEHKKARQRRAARQKAERGYPNWSRAFGYLPGPNGPEPDPRTAPLVKRAYADILAGASLGDVCRQWNDAGACTITGRPWTTTTLSKFLRKPRNAGLRAYKGARYGPVDRDAIVGKAQWSPLVDEATFWAAQAVLDAPGRAPGRKSVRRHLLTGLAGCGKCGNRLAGSYRTDGRIVYVCKACHGVSILAVNIEPFLYRIVTERLATPHAVDLLRREIHDAAEAETIRLELETLYGELDRLAVERAEGLLTARQVKISTDIVNAKITKLQARQLDQERLRVFDGIPLGTPQVAGMIAELSPDRFRAVLDVLAKVVVQPVGKSGRILNPERVQVIWR

SEQ ID NO: 6830 - protein, 452 aa, synthetic construct
MKAAIYIRVSTREQVENYSIQAQTEKLTALCRSKDWDVYDIFIDGGYSGSNMNRPALNEMLSKLHEIDAVVVYRLDRLSRSQRDTITLIEEYFLKNNVEFVSLSETLDTSSPFGRAMIGILSVFAQLERETIRDRMVMGKIKRIEAGLPLTTAKGRTFGYDVIDTKLYINEEEAKQLQLIYDIFEEEQSITFLQKRLKKLGFKVRTYSCYNNWLTNDLYCGYVSYKDKVHVKGIHEPIISEEQFYRVQEIFTRMGKNPNMNRDSASLLNNLVVCGKCGLGFVHRRKDTMSRGKKYHYRYYSCKTYKHTHELEKCGNKIWRADKLEELIINRVNSYSFASRNVDKEDELDSLNEKLKIEHAKKRRLFDLYLNGSYEVSELDSMMNDIDAQINYYKSQIEANEELRKNEKIQENLADLATVDYDSLGLREKQLYLKSLISKIYIDGEQVTIEWL

SEQ ID NO: 6831 - protein, 452 aa, synthetic construct
MKAAIYIRVSTREQVENYSIQAQTEKLTALCRSKGWDVYDIFIDGGYSGSNTNRPALNEMLSKLHEIDAVVVYRLDRLSRSQRDTITLIEEYFLKNNVEFVSLSETLDTSSPFGRAMIGILSVFAQLERETIRDRMVMGKIKRIEAGLPLTTAKGRTFGYDVIDTKLYINEEEAKQLRLIYDIFEEEQSITFLQKRLKKLGFKVRTYSRYNNWLTNDLYCGYVSYKDKVHVKGIHEPIISEEQFYRVQEIFARMGKNPNTNRDSASLLNNLVVCSKCGLGFVHRRKDTMSRGKKYHYRYYSCKTYKHTHELEKCGNKIWRADKLEELIINRVNNYSFASRNVDKEDELDSLSEKLKVEHAKKKRLFELYINGSCEMGELDSMMNDIDAQINYYESQIEANEGLKRNKKIQENLADLATVDFDSLEFREKQLYLKSLINKIYIDGEQVTIEWL

SEQ ID NO: 6832 - protein, 485 aa, synthetic construct
MTKKVAIYTRVSTTNQAEEGFSIDEQIDRLTKYAEAMGWQVSDTYTDAGFSGAKLERPAMQRLINDIENKAFDTVLVYKLDRLSRSVRDTLYLVKDVFTKNKIDFISLNESIDTSSAMGSLFLTILSAINEFERENIKERMTMGKLGRARSGKSMMWTKTAFGYYHNRKTGILEIVPPQATIVEQIFTDYLSGVSLTKLRDKLNESGHIGKDIPWSYRTLRQTLDNPVYCGYIKFKDSLFEGMHKPIIPYETYLKVQKELEKRQQQTYERNNNPRPFQAKYMLSGMARCGYCGAPLKIVLGHKRKDGSRTMKYHCANRFPRRTKGVTVYNDNKKCDSGTYDLSNLESTVIDNLIGFQENNDSLLRIINGNNQPILDTSSLKKQISQIDKKIQKNSDLYLNDFITMDELKDRTDSLQAKKKLLKAKISENKFSVSTDVFELVKTQLGSIPINELSYDNKKKIVNNLVSKVDVTADSVDIVFKFQLA

SEQ ID NO: 6833 - protein, 485 aa, synthetic construct
MTKKVAIYTRVSTTNQAEEGFSIDEQIDRLTKYAEAMGWQVSDTYTDAGFSGAKLERPAMQRLINDIENKAFDTVLVYKLDRLSRSVRDTLYLVKDVFTKNKIDFISLNESIDTSSAMGSLFLTILSAINEFERENIKERMTMGKLGRAKSGKSMMWTKTAFGYYHNRKTGILEIVPLQATIVEQIFTDYLSGISLTKLRDKLNESGHIGKDIPWSYRTLRQTLDNPVYCGYIKFKDSLFEGMHKPIIPYETYLKVQKELEERQQQTYERNNNPRPFQAKYMLSGMARCGYCGAPLKIVLGRKRKDGSRTMKYHCANRFPRKTKGVTVYNDNKKCDSGTYDLSDLENTVIDNLIGLQENNDSLLKIINDNSQPILDTSSFKKQISQIDKKIQKNSDLYLNDFITMDELKDRTDSLRAEKKLLKAKISENKFNDSTDVFELVKTQLGSIPINELSYDNKKKIVNNLVSKVDVTADDVDIIFKFQLA

SEQ ID NO: 6834 - protein, 485 aa, synthetic construct
MTKKVAIYTRVSTTNQAEEGFSIDEQIDRLTKYAEVMGWQVSDTYTDAGFSGAKLERPAMQRLINDIENKAFDTVLVYKLDRLSRSVRDTLYLVKDVFTKNKIDFISLSESIDTSSAMGSLFLTILSAINEFERENIKERMTMGKLGRAKSGKSMMWTKTAFGYYHNRKTGILEIVPLQATIVEQIFTDYLSGISLTKLRDKLNESGHVGKDIPWSYRTLRQTLDNPVYCGYIKFKDSLFEGMHKPIIPYETYLRVQKELEERQQQTYERNNNPRPFQAKYMLSGMARCGYCGAPLRIVLGHKRKDGSRTMKYHCANRFPRKTKGVTVYNDNKKCDSGTYDLSNLENTVIDILIGFQENNDSLLKIINGNNQPTLDTSSFKKQISQIDKKIQKNSDLYLNDFISMDELKDRTDSLQAEKKLLKAKISENRFNDSTDVFELVKTQLGSIPINELSYDNKKKVVNNLVSKVDVTADNVDIIFKFQLA

SEQ ID NO: 6835 - protein, 485 aa, synthetic construct
MTKKVAIYTRVSTTNQAEEGFSIDEQIDRLTKYAEAMGWQVSDTYTDAGYSGAKLERPAMQRLINDIENKAFDTVLVYKLDRLSRSVRDTLYLVKDVFTKNKIDFISLNESINTSSAMGSLFLTILSAINEFERENIKERMTMGKLGRAKSGRSMMWTKTAFGYYHNRKTGILEIVPLQATIVEQIFTDYLSGISLTKLRDKLNESGHIGKDIPWSYRTLRQTLDNPVYCGYIKFKDSLFEGMHKPIIPYETYLRAQKELEERQQQTCERNNNPRPFQAKYMLSGMARCGYCGAPLRIVLGHKRKDGSRTMKYHCANRFPRKTKGVTVYNDNKKCNSGTYDLSNLEDTVIDNLIGLQENNDSLLKIINGNNQPILDTSSFKKQISQIDKKIQKNSDLYLNDLITMDELKDRTDSLQAEKKLLKAKIGENKFNDSTDVFELVKTQLGNIPINELSYDDKKKIVNNLVSKVDVTADNVDIIFKFQLA

SEQ ID NO: 6836 - protein, 452 aa, synthetic construct
MKAAIYIRVSTREQVENYSIQAQTEKLTALCRSKDWDVYDIFIDGGYSGSNMNRPALNEMLSKLHEIDAVVVYRLDRLSRSQRDTITLIEEYFLKNNVEFVSLSETLDTSNPFGRAMIGILSVFAQLERETIRDRMVMGKIKRIEAGLPLTTAKGRTFGYDVIDTKLYINEEEAKQLQLIYDIFEEEQSITSLQKRLKKLGFKVHTYNRYNNWLTNDLYCGYVSYKDKVHVKGIHEPIISEEQFYRVQEIFTRMGKNPNMNRDSASLLNNLVVCSKCGLGFVHRRKDTMSRGKKYHYRYYSCKTYKHTHELEKCGNKIWRADKLEELIISRVNNYSLASRNVDKEDELDSLNEKLKVEHAKRKRLFDLYISGSYEVSELDSMMNDIDAQINYYESQIEANEELKKDKKIQENLANLATVDYDSLEFREKQLYLKSLINKIYIDGEQVTIEWL

SEQ ID NO: 6837 - protein, 452 aa, synthetic construct
MKAAIYIRVSTQEQVGNYSIQAQTEKLTALCRSKDWDVYDIFVDGGYSGSNMNRPALNEMLSKLHEIDAVVVYRLDRLSRSQRDTTTLIEEYFLKNNVEFVSLSETLDTSSPFGRAMIGILSVFAQLERETIRDRMVMGKIKRIEAGLPLTTARGRTFGYDVIDTKLYINEEEAKQLQLIYDIFEEERSITFLQKRLKKLGFKVRTYNRYNSWLTNDLYCGYVSYKDKVHVKGIHEPIISEEQFYRVQEIFTRMGKSPNMNRDSASLLNNLVVCSKCGLGYVHRSKDTMSRGKKYHYRYYSCKTYKHTHELEKCGNKIWRADKLEELIINRVSNYSFASCSVDKEDELDSLNEKLRIEHTKKKRLFDLYINGSYEVSELDSMMNDIGAQIDYYEGQIEAIEELRKNKKIQENLADLATVDFDSLEFREKQLYLKSLINKIYIDGERVTIEWL

SEQ ID NO: 6838 - protein, 452 aa, synthetic construct
MKAAIYIRVSTREQVENYSIQAQTEKLTALCRSKDWDVYDIFIDGGYSGSNMNRPALNEMLSKLHEIDAVVVYRLDRLSRSQRDTITLIEEYFLKNNVEFVSLSETLDTSSPFGRAMIGILSVFAQLERETIRDRMVMGKIKRIEAGLPLTTAKGRTFGYDVIDTKLYINEEEAKQLQLIYDIFEEEQSITFLQRRLKKLGFKVRTYSCYNNWLTNDLYCGYVSYKDKVHVRGIHEPIISEEQFYRVQEIFTRMGKNPNMNRDSASLLNNLVVCSKCGLGFVHRRKDATSRDKKYHYRYYSCKTYKHIHELEKCGNKIWRADKLEELIINRVNDYSLASRNVDKEDELDSLNEKLKIEHAKKKRLFDLYINGGYEVSELDSMMNDIDAQINYYEGQIEASEELKKNKKIQENLAYLATVDFDSLEFREKQLYLKSLINKIYIDGEQVTIEWL

SEQ ID NO: 6839 - protein, 485 aa, synthetic construct
MTKKVAIYTRVSTTNQAEEGFSIDEQIDRLTKYAEAMGWQVSDTYTDAGFSGAKLERPAMQRLINDIENKAFDTVLVYKLDRLSRSVRDTLYLVKEVFTKNKIDFISLNESIDTSSAMGSLFLTILSAINEFERENIKERMTMGKLGRAKSGKSMMWTKTAFGYYHNRETGILEIVPLQATIVEQIFTDYLSGISLTKLRDKLNESGHIGKDIPWSYRTLRQTLDNPVYCGYIKFKDSLFEGMHKPIIPYETYLKVQKELGERQQRAYERNNNPRPFQAKYMLSGMARCGYCGAPLRIVLGHKRKDGSRTMKYHCANRFPRKTRGITVYNDNKKCDSGTYDLSNLENTVIDTLIGFQENNDSLLKIIDGNNLPILDTSSFKKQISLIDKKLQKNSDLYLNDFITMDELKDRTDSLQAEKKLLKAKISENRFNDSTDVFELVKTQLGSIPINELSYDDKKKIVNNLVSKVDVTADNVDIIFKFQLA

SEQ ID NO: 6840 - protein, 469 aa, synthetic construct
MSYTTPVRAAVYLRISEDRSGEQLGVARQREDCLKLCGQRKWVPVEYLDNDVSASTGKRRPAYEQMLADITAGKIAAVVAWDLDRLHRRPIELEAFMSLADEKRLALATVAGDVDLATPQGRLVARLKGCVAAHETEHKKARQRRAARQKAERGHPNWSKAFGYLPGPNGPEPDPRTAPLVKQAYADILAGASLGDVCRQWNDAGAFTITGRPWTATTLSKFLRKPRNAGLRAYKGARYGPVDRDAIVGKAQWSPLVDEATFWAAQAVLDAPGRAPGRKSVRRHLLTGLAGCGKCGNRLAGSYRTDGRVVYVCKACHGVAILADNIEPILYHVVAERLAMPDAVDLLRREIHDAAEAETIRLGLDTLYGELDRLAVERAEGLLTARQVKISTDIVNAKITKLQARQLDQERLRVLDGIPLGTPQVAGVIAKLSPDRFRAVLDVLAEVVVQPVGKSGRIFNPERVQVNWR

SEQ ID NO: 6841 - protein, 452 aa, synthetic construct
MKAAIYIRVSTQEQVGNYSIQAQTEKLTALCRSKDWDVYDIFIDGGYSGSNMNRPALNEMLSKLHEIDAVVVYRLDRLSRSQRDTTTLIEEYFLKNNVEFVSLSETLDTSSPFGRAMIGILSVFAQLERETIRDRMVMGKIKRIEAGLPLTTAKGRTFGYDVIDTKLYINEEEAKQLQLIYDIFEEEQSITSLQKRLKKLGFKVRTYNRYNSWLTNDLYCGYVSYKDKVHVKGIHEPIISEEQFYRVQEIFTRMGKNPNMNRDNASLLNNLVVCSKCGLGFVHRSKDTTSRGKKYHYRYYSCKTYKHTHELEKCGNKTWRADKLEELIINRVNNYSFASRNADKEDELDSLNEKLKIEHARKKRLFDLYINGSYEVSELDSMMNDIDAQINYYESQIEANEELRKNKKTQENLADLATVDFDSLEFREKQLYLKSLINKIYIDGEQVTIEWL

SEQ ID NO: 6842 - protein, 452 aa, synthetic construct
MKAAIYIRVSTQEQVENYSIQAQTEKLTALCRSKDWDVYDIFIDGGYSGSNMNRPALNEMLSKLHEIDAVVVYRLDRLSRSQRDTTTLIEEYFLKNNVEFVSLSETLDTSSPFGRAMIGILSVFAQLERETIRDRMVMGKIKRIEAGLPLTTAKGRTFGYDVIDTKLYINEEEARQLQLIYDIFEEEQSITSLQKRLKELGFKVRTYNRYNNWLTNDLYCGYVSYKDKVHVKGIHEPIISEEQFYRVQEIFTRMGKSPNMNRDSASLLNNLVVCSKCGLGFVHRSKDTMSRGKKYHYRYYSCKTYKHTHELEKCGNKTWRADKLEELIINRVNNYSFASRSVDKEDELDSLNEKLKIEHAKKRRLLDLYINGSYEVSELDSMMNDIDAQIDNYESQIEANEELKKNKKIQENLADLATVDFDSLEFREKRLYLKSLINKIYIDGEQVTIEWL

SEQ ID NO: 6843 - protein, 452 aa, synthetic construct
MKAAIYIRVSTREQVENYSIQAQTEKLIALCRSKDWDVYDIFIDGGYSGSNMNRPALNEMLSKLHEIDAVVVYRLDRLSRSQRDTITLIEEYFLKNNVEFVSLSETLDTSSPFGRAMIGILSVFAQLERETIRDRMVMGKIKRIEAGLPLTTAKGRTFGYDVIDTRLYINEEEAKQLQLIYDIFEEEQSITLLQKRLKKLGFKVHTYNRYNSWLTNDLYCGYVSYKDKVHVKGIHEPIISEEQFYRVQEIFTRMGKNPNVNRDSASLLNNLVVCSKCGLGFVHRRKDTMSRGKKYHYRYYSCKTYKHIHELEKCGNKIWRADKLEELIINRVNNYSFASRNVDKEDELDSLNEKLKIGYAKKRRLFDLYINGSYGVSELDSMMNDIDAQINYYESQIEANEELKKNKKIQEILADLVTVDFDSLEFREKQLYLKSLINKIYIDGEQVTIEWL

SEQ ID NO: 6844 - protein, 452 aa, synthetic construct
MKAAIYIRVSTREQVENYSIQAQTEKLTALCRSKGWDVYDIFIDGGYSGSNMNRPALNEMLSKLHEIDAVVVYRLDRLSRSQRDTITLIEGYFLKNNVEFVSLSETLDTSSPFGRAMIGILSVFAQLERETIRDRMVMGKIKRIEAGLPLTTAKGRTFGYDVIDTKLYINEEEAKQLRLIYDIFEEEQSITFLQKRLRKLGFKVRTYNRYNNWLTNDLYCGYVSYKDKVHVRGIHEPIISEEQFYRVQEIFTRMGKNPNMNRDSASLLNNLVVCSKCGLGFVHRRKDAMSRDKKYHYRYYSCKTYKHIHELEKCGNKIWRADKLEELIIKRVNNYSLASRNVDKEDELDSLSEKLKIEHAKKKRLFDLYINGSYEVSELDSMMNDIDAQINYYESQIEAKEELKKNKKIQENLAYLATVDFDSLGFREKQLYLKSLINKIYIDGEQVTIEWL

SEQ ID NO: 6845 - protein, 452 aa, synthetic construct
MKAAIYIRVSTREQVENYSIQAQTEKLTALCRSKDWDVYDIFIDGGYSGSNMNRPALNEMLSKLHEIDAVVVYRLDRLSRSQRDTITLIEEYFLKNNVEFVSLSETLDTSSPFGRAMIGILSVFAQLERETIRDRMVMGKIKRIEAGLPLTTAKGRTFGYDVIDTKLYINEEEAKQLQLIYDIFEEEQSITSLQKRLKKLGFKVRSYNRYSNWLTNDLYCGYVSYKDKVHVKGIHEPIISEEQFYRVQEIFTRMGKNPNMNRDSASLLSNLVVCGKCGLGFVHRRKDTMSRGKKYHYRYYSCKTYKHTHELEKCGNKIWRADKLEELIINRVNDYSLASRNADKEDELDSLNEKLKIERAKKKRLFDLYINGSYEVSELDSMMNDIDAQISYYEGQIEANEELKKNKKIQENLANLATVDYDSLKFREKQLYLKSLINKIYIDGEQVTVEWL

SEQ ID NO: 6846 - protein, 452 aa, synthetic construct
MKAAIYIRVSTREQVENYSIQAQTEKLTALCRSKDWDVYDIFIDGGYSGSNMNRPALNEMLSKLHEIDAVVVYRLDRLSRSQRDTITLIEEYFLKNNVEFVSLSETLDTSSPFGRAMIGILSVFAQLERETIRDRMVMGKIKRIEAGLPLTTAKGRTFGYDVIDTKLYINEEEAKQLRLIYDIFEEEQSITSLQKRLKKLGFKVRTYSRYSNWLTNDLYCGYVSYKDKVHVKGIHEPIISEEQFYRVREIFTRMGKNPNMNRDSASLLNNLVVCSKCGLGFVHRRKDTTSRGKKYHYRYYSCKTYKHIHELEKCGNKIWRADKLEELVINRVNNYSFASRNVDKEDELDSLNEKLKIEHAKKKRLFDLYVNGSYEASELDSMMNDIDAQINYYEGQIEANEELRRNKKIQENLADLATVDFGSLEFREKQLYLKSLINKIYIDGEQVTIEWL

SEQ ID NO: 6847 - protein, 452 aa, synthetic construct
MKAAIYIRVSTREQVENYSIQAQTEKLTALCRSKDWAVYDIFIDGGYSGSNMNRPALNEMLSKLHEIDAVVVYRLDRLSRSQRDTITLIEEYFLKNNVEFVSLSETLDTSSPFGRAMIGILSVFAQLERETIRDRMVMGKIKRIEAGLPLTTAKGRTFGYDVIDTKLYINEEEAKQLQLIYDIFEEEQSITSLQKRLKKLGFKVRTYNRYNNWLTNDLYCGYVSYKDKVHVKGIHEPIISEEQFYRVQEIFTRMGKNPNMNRDSASLLNNLVVCGKCGLGFVHRRKDAMSRDKKYHYRYYSCKTYKHIHELEKCGNKIWRADKLEELIINRVNSYSFASRNADKEDELDSLNEKLKIEHAKKKRLFDLYINGSYEVSELDSMMNDIDAQINYYESQIEANEELKKNKKIQGNLADLAAVDFDSLEFRDKQRYLKSLINKIYIDGEQVTIEWL

SEQ ID NO: 6848 - protein, 485 aa, synthetic construct
MTKKVAIYTRVSTTNQAEEGFSIDEQVDRLTKYAEAMGWQVSDTYTDAGYSGAKLERPAMQRLINDIENKAFDTVLVYKLDRLSRSVRDTLYLVKDVFTKNKIDFICLSESIDTSSAMGSLFLTILSAINEFERENIKERMTMGKLGRAKSGKSMMWTKTAFGYYHNRKTGILEIVPLQATIVEQIFTDYLSGISLTKLRDKLNESGHIGKDIPWSYRTLRQTLDNPVYCGYIKFKGSLFEGMHKPIIPYETYLKVQKELEKRQQQTYERNNNPRPFQAKYMLSGMARCGYCGAPLRIVLGHKRKDGSRTMKYHCANRFPRKTKGVTVYNDNKKCDSGAYDLSDLENTVIDNLIGFQENNDSLLRIINGNNQPILDTSSFKEQINQIDKKIQKNSDLYLNDFITMDELKGRTDSLQAEKRLLKAKISENKFNDSTDVFELVKTQLGSIPIDELSYDNKKKIVNNLVSKVDVTADNVDIIFKFQLA

SEQ ID NO: 6849 - protein, 485 aa, synthetic construct
MTKKVAIYTRVSTTNQAEEGFSIDEQIDRLTKYAEAMGWQVSDTYTDAGLSGAKLERPAMQRLINDIENKAFDTVLVYKLDRLSRSVRDTLYLVKDVFTKNKIDFVSLNESIDTSSAMGSLFLTILSAINEFERENIKERMTMGKLGRAKSGKSMMWTKTAFGYYHNRKTGILETVPLQATIVEQIFTDYLSGISLTKLRDKLNESGHIGKDIPWSYRTLRQTLDNPVYCGYIKFKDSLFEGMHKPIIPYETYLKVQKELEERQQQTYERNNNPRPFQAKYMLSGMARCGYCGAPLRIVLGHKRKDGSRTMKYHCANRFPRKTKGVTVYNDNKKCDSGTYDLRNLENTVIDILVGFQENNDSLLKIINGDNQPVLDTSSFKKQISQIDKKIQKNSDLYLNDFITMDELKDRTDSLQAEKRLLKAKISENKFCDNTDVFELVKTQLGSIPIDELSYDNKKKIVNDLVSKVDVTADNVDIIFKFQLA

SEQ ID NO: 6850 - protein, 485 aa, synthetic construct
MTKKVAIYTRVSTTNQAEEGFSIDEQVDRLTKYAEAMGWQVSDTYTDAGLSGAKLERPAMQRLISDIESKAFDTVLVYKLDRLSRSVRDTLYLVKDVFTKNKIDFISLNESIDTSSAMGSLFLTILSAINEFERENIKERMTMGKLGRAKSGKSMMWTKTAFGYYHNRKTGILEIVPLQATIVEQIFTDYLSGTSLTRLRDRLNESGHIGKDIPWSYRTLRQTLDNPVYCGYIKFKGSLFEGMHKPIIPYETYLKVQKELEERQQQTYERNNNPRPFQAKYMLSGMARCGYCGAPLRIVLGRKRKDGSRSMKYHCANRFPRKTKGVTVYNDNKKCDSGTYGLSNLENTVIDNLIGFQEDNDSLLKIINGNNQPILDTSSLKKQISQIDKKIQKNSDLYLNDFITMDELKDRTDSLQAEKKLLKAKISGNKFNDSTDVFELVKTQLGSIPINELSYDNKKKIVNNLVSKVDVTADNVDIIFKFQLA

SEQ ID NO: 6851 - protein, 485 aa, synthetic construct
MTKKVAIYTRVSTTNQAEEGFSIDEQIDRLTKYAEAMGWQVSDTYTDAGLSGAKLERPAMQRLVNDIENKAFDTVLVYKLDRLSRSVRDTLYLVKDVFTKNKIDFISLNESIDTSSAMGSLFLTILSAINEFERENIKERMTMGKLGRAKSGKSMMWTKTAFGYYHNRKTGILEIVPLQAAIVEQIFTDYLSGISLTKLRDKLNESGHIGKDIPWSYRTLRQTLDNPVYCGYIKFKGSLFEGMHKPIIPYETYLKVQKELEERQQQTYERNNNPRPFQAKYMLSGMARCGYCGAPLRIALGHKRRDGSRTMKYHCANRFPRKTKGVTVYNDNKKCDSGTYDLSNLENIVIDNLIGFQENNDGLLKIINGNNQPILDTSSLEKQISQIDKKIQKNSDLYLNDFITMDELKERTDSLQAEKELLRAKISENKFNDSTDVLELVKTQLGSIPINELSYDNKKRIVNNLVSKVDVTADSVDIIFKFQLA

SEQ ID NO: 6852 - protein, 452 aa, synthetic construct
MKAAIYIRVSTREQVENYSIQAQTEKLTALCRSKDWDVYDIFTDGGYSGSNMNRPALNEMLSKLHEIDAVVVYRLDRLSRSQRDTITLIEEYFLKNNVEFVSLSETLDTSSPFGRAMIGILSVFAQLERETIRDRMVMGKIKRIEAGLPLTTAKGRTFGYDVIDTKLYINEEEAKQLQLIYDIFEEEQSITFLQKRLKKLGFKVRTYNRYINWLTNDLYCGYVRYKDKVHVKGIHEPIISEEQFYRVQKIFTRMGKNPNMNRDSASLLSNLVVCSKCGLGFVHRRKDTMSRGKRYHYRYYSCKTYKHTHELEKCGNKIWRADKLEELVINRVNNYSFASRNVDKEDELDSLNEKLKVEHAKKKRLFDLYINGSYNVSELDSMMNDIDAQINYYVSQIEANEELKKNKKIQENLAGLATVDFDSLEFREKQLYLKSLINKIYIDGEQVTIEWL

SEQ ID NO: 6853 - protein, 469 aa, synthetic construct
MSYTTPVRAAVYLRISEDRSGEQLGVARQREDCLKLCGQRKWVPVEYLDNDVSASTGKRRPAYEQMLADITAGKIAAVVAWDLDRLHRRPIELEAFMSLADEKRLALATVAGDVDLATPQGRLVARLKGSVAAHETEHKRARQRRAARQKAERGLPNWSKAFGYLPGPNGPEPDPRTAPLVEQAYADILAGASLGDVCRQWNDAGAFTITGRPWTTTTLSKFLRKPRNAGLRAYKGARYGPVDRDAIVGKAQWGPLVDEATFWAAQAVLDAPGRAPGRKSVRRHLLTGLAGCGKCGYHLAGSYRTDGRVVYVCKACHGVAILADNIEPILYHIVAERLAMPDAVDLLRREIHDAAEAETIRLELETLYGELDRLAAERAEGLLTARQVKISTDIVNAKITKLQARQLDQERLRVFDGIPLGTPQVAGVIAELSPDRFRAVLGVLAEVVVQPVGKGGRIFNPERVQVNWR

SEQ ID NO: 6854 - protein, 485 aa, synthetic construct
MTKKVAIYTRVSTTNQAEEGFSIDEQIDRLTKYAEAMGWQVSDTYTDAGFSGAKLERPAMQRLINDIENKAFDTVLVYKLDRLSRSVRDTLYLVKDVFTKNKIDFISLNESINTSSAMGSLFLTILSAINEFERENIKERMTMGKLGRAKSGKSMMWAKTAFGYYHNRKTGILEIVPLQATIVEQIFTDYLSGISLTKLRDKLNESGHIGKDIPWSYRTLRQTLDNPVYCGYIKFKGSLFEGMHKPIIPYETFLKVQKELEERQQQTYERNNNPRPFQAKYMLSGMARCGYCGAPLRIVLGHKRKDGSRTMKYHCANRFPRKTKGVTVYNDNKKCDSGTYDLSNLENTVIDNLIGIQENNDRLLKIINGNNQPTLDTSSFKKQISQIDKKIQKNSDLYLNDFITMDELKDRTDSLQAEKKLLEAKISENKFNDSTDVFELVKTQLGSIPINELSYDNKKKIVNNLVSKVDVTADNVDIIFKFQLA

SEQ ID NO: 6855 - protein, 485 aa, synthetic construct
MTKKVAIYTRVSTTNQAEEGFSIDEQIDRLTKYAEVMGWQVSDTYTDAGFSGAKLERPAMQRLINDIENKAFDTVLVYKLDRLSRSVRDTLYLVKDVFTKNKIDFISLSESIDTSSAMGSLFLTILSAINEFERENIKERMTMGKLGRAKSGKSMMWTKTAFGYYHNRETGILEIVPLQATIVEQIFTDYLSGISLTKLRDKLNESGHIGKDIPWSYRTLRQTLDNPVYCGYIKFKDSLFEGMHKPIIPYETYLKVQKELEERQQQTYERNNNPRPFQAKYMLSGMARCGYCGAPLRIVLGHRRKDGSRTMKYHCANRFPRKTKGITVYNDNKKCDSGTYDLSNLENTVIGNLIGLQEDNDSLLKIINGNNQPIPDTGSFKKQISQIDKKIQKNSDLYLNDFITMDELKDRTDSLRAEKRLLKAKISENKFNDSTDVFELVKTQLGSTPINELSYDNKKKIVNNLVSKVDVTADNVDIIFKFQLA

SEQ ID NO: 6856 - protein, 452 aa, synthetic construct
MKAAIYIRVSTREQVENYSIQAQTEKLTALCRSKDWDVYDIFIDGGYSGSNMNRPALNEMLSKLHEIDAVVVYRLDRLSRSQRDTITLIEEYFLKNNVEFVSLSETLDTSSPFGRAMIGILSVFAQLERETIRDRMVMGKIKRIEAGLPLTTAKSRTFGYDVIDTKLYVNEEEAKQLQLIYDIFEEEQSITSLQKRLKKLGFKVRTYNRYSSWLTNDLYCGYVSYKDKVHVKGIHEPIISEEQFYRVQEIFTRMGKNPNMNRDSASLLSNLVVCSKCGLGFVHRRKDTTSRGKKYHYRYYSCKTYKHIHELEKCGNKIWRADILEELIINRVNNYSLACRNVDKEDELDSLSEKLKIEHAKKKRLFDLYINGSYEVSELDSMMNDIDARINYYGSQIEANEELKKNKKIQEDLAELATVDFDSLEFREKQLYLKSLINKIYIDGEQVTIEWL

SEQ ID NO: 6857 - protein, 485 aa, synthetic construct
MTKKVAIYTRVSTTNQAEEGFSIDEQIDRLTKYAETMGWQVSDTYTDAGSSGAKLERPAMQRLINDIENKAFDTVLVYKLDRLSRSVRDTLYLVKDVFTKNKIDFISLNESIDTSSAMGSLFLTILSAVNEFERENIKERMTMGKLGRAKSGKSMMWTKTAFGYCHNRKTGILEIVPLQAAIVEQIFTDYLSGISLTKLRDKLNESGHIGKDIPWSYRTLRQTLDNPVYCGYIKFKDSLFEGMHKPIIPYETYLKVQKELEERQQQTYERNNNPRPFQAKYMLSGMARCGYCGAPLRIVLGHKRKDGSRTMKYHCANRFPRKTKGVTVYNDNKKCDSGTYDLSNLENAVIDSLIGFQEDNDSLLKIINGNDQPILDTSSFKEQISQIDKKIQKNSDLYLNDFITMDELKDRTDSLQAEKKLLEAKISENKFNDSTDVFELVRTQLGSIPINELSYDNKKKIVNNLVSKVDVTADNVDVIFKFQLA

SEQ ID NO: 6858 - protein, 469 aa, synthetic construct
MSYTTPVRAAVYLRISEDRSGEQLGAARQREDCLKLCDQRKWVPVEYLDNDVSASTGKRRPAYEQMLADITAGKIAAVVAWDLDRLHRRPIELEAFMSLADEKRLALATVAGDVDLATPQGRLVARLKGSVAAHETEHKKARQRRAARQKAERGYPNWSKAFGYLPGPNGPEPDPRTAPLVKQAYADILAGASLGDVCRQWNDAGASTITGRPWTTTALSKFLRKPRNAGLRAYKGARYGPVDRDAIVGKAQWSPLVDEATFWAAQAVLDAPGRAPGRKSVRRHLLTGLAGCGKCGNHLAGSYRTDGKVVYVCKACHGVAILADNIEPILYHIVAERLAMPDAVDLLRREIHDAAEAETIRLELETLYGELDRLAVERAEGLLTARQVKISTDIVSAKITKLQARQLDQERLRVFDGIPLGTPQVAGMIAELSPDRFRAVIDVLAEVVVQPVGKGGRIFNPERVQVNWR

SEQ ID NO: 6859 - protein, 469 aa, synthetic construct
MSYTTPVRAAVYLRISEDRSGEQLGVARQREDCLKLCDQRKWVPVEYLDNDVSASTGKRRPAYEQMLADITAGKIAAVVAWDLDRLHRRPIELEAFMSLADEKRLALATVAGDVDLATPQGRLVARLKGSVAAHETEHKKARQRRAARQKAERGLPNWSKAFGYLPGPNGPEPDPRTAPLVKQAYADILAGASLGDVCRQWNDAGAFTITGRPWTTTTLSKFLRKPRNAGLRAYKGARYGPVDRDAIVGKAQWSPLVDEATFWAAQAVLDAPGRAPGRKSVRRHLLTGLASCGKCGNHLAGSYRTDGQIVYVCKACHGVSILAANIEPILYRIVAERLAMPDAVDLLRCEIHDAAEAETTRLELETLYGELDRLAAERAEGLLTARQVKISTDIVDAKITKLQARQLDQERLRVFDGIPLGTPQVAGMIAELSPDRFRAVLDVLAKVVVQPVGKSGRVFNPERVQVNWR

SEQ ID NO: 6860 - protein, 485 aa, synthetic construct
MTKKVAIYTRVSTTNQAEEGFSIDEQIDRLTKYAEAMGWQVSDTYTDAGLSGAKLERPAMQRLINDIENKAFDTVLVYKLDRLSRSVRDTLYLVKDVFTKNKIDFISLNESIDTSSAMGSLFLTILSAINEFERENIKERMAMGKLGRAKSGKSMMWTKTAFGYYHNRKTGILEIVPLQATIVEQIFTDYLSGISLTKLRDKLNESGHIGKDIPWSYRTLRQTLDNPVYCGYIKFKDSLFEGMHKPIIPYETYLKVQRELEERQQQTYERNNNPRPFQAKYMLSGMARCGYCGAPLKIVLGRKRKDGSRTMKYHCANRFPRKTRGVTVYNDNKRCDSGTYDLSDLENTVIDNLIGFQENNDSLLKIINGNSQPILDTSSFKEQISQIDKKIQKNSDLYLNDFITMDELKDRTDSLQAEKKLLKAKISENKFNDSTDVFELVKTQLGSIPINELSYDNKKKIVNNLVSKVDVTADNVDIIFKFQLA

SEQ ID NO: 6861 - protein, 452 aa, synthetic construct
MKAAIYIRVSTREQVENYSIQAQTEKLTALCRSKDWDVYDIFIDGGYSGSNMNRPALNKMLSKLHEIDAVVVYRLDRLSRSQRDTITLIEEYFLKNNVEFVSLSETLDTSSPFGRAMIGILSVFAQLERETIRDRMVMGKIKRIEAGLPLTTAKGRTFGYDVIDTKLYINKEEAKQLRLIYDTFEEVQSITLLQKRLKKLGFKVRTYSRYNNWLTNDLYCGYVSYKDKVHVKGIHEPIISEEQFYRVQEIFTRVGKSPNMNRDSASLLNNLVVCGKCGLGFVHRRKDTMSRGKKYHYRYYSCKTYKHTHELEKCGNKIWRADKLEELIINRVNNYSFANRNVDKEDELDSLNEKLKIEHAKKKRLFDLYINGSYEVSELDSMMNDIDAQINYYESQIEANEELKKNRKIQENLADLATVDFDNLGFREKQLYLKSLINKIYIDGEQVTIEWL

SEQ ID NO: 6862 - protein, 469 aa, synthetic construct
MCYTTPVRAAVYLRISEDRSGEQLGVARQREDCLKLCDQRKWVPVEYLDNDVSASTGKRRPAYEQMLADITAGKIAAVVAWDLDRLHRRPIELEAFMSLADEKRLALATVAGDVDLATPQGRLVARLKGSVAAHETEHKKARQRRAARQKAERGHPNWNKAFGYLPGPNGPEPDPRTAPLVKRAYADILAGASLGDVCRQWNGAGAFTITGRPWTTTTLSKFLRKPRNAGLRAYKGARYGPVDRDAIVGKAQWSPLVDEATFWAAQAVLDAPGRAPGRKSVRRHLLTGLAGCGKCGNHLAGSYRTDGRVVYVCKACHGIAILADNIEPILYHIVAERLAMPDAVDLLRREIHDAAEAETIRLELETLHGELDRLAVERAEGLLTARQVKISTDIVNAKITKLQARQLDQERLRVLDGIPLGTPQVAGMIAELSPDRFRAVLDVLAEVVVQPVGKSGGIFNPERVRVNWR

SEQ ID NO: 6863 - protein, 469 aa, synthetic construct
MSYTTPVRAAVYLRISEDRSGEQLGVARQREDCLKLCGQRKWVSVEYLDNDVSASTGKRRPAYEQMLADITAGKIAAVVAWDLDRLHRRPVELEAFMSLADEKRLALATVAGDVDLATPQGRLVARLKGCVAAHETEHKKARQRRAARQKAERGHPNWSKAFGYLPGPNGPEPDPRTAPLVKQAYADILAGASLGDVCRQWNGAGAFTITGRPWTTTALSKFLRKPRNAGLRAYKGARYGPVDRDAIVGKAQWSPLVDEATFWAAQAVLDAPGRAPGRKSVRRHLLTGLAGCGKCGNHLAGSYRTDGRVVYVCKACHGVAILADNIEPILYHIVAERLAMPDAVDLLRRETHDAAEAETTRLELETLYGELDRLAVERAEGLLTARQVKISTDIVNAKITELQARQLDQERLRVFDGFPLGTPRVAGMIAELSPDRFRAVLDVLAEVVVQPVGKSGRISNPERVQVNWR

SEQ ID NO: 6864 - protein, 452 aa, synthetic construct
MKAAIYIRVSTREQVENYSIQAQTEKLTALCRSKDWDVYDIFIDGGYSGSNMNRPALNEMLSKLHEIDAVVVYRLDRLSRSQRDTITLIEEYFLKNNVEFVSLSETLDTSSPFGRAMIGILSVFAQLERETIRDRMVMGKIKRIEAGLPLTTAKGRTFGYDVIDTKLYINKEEAKQLQLIYDIFEEERSITFLQKRLKKLGFKVHAYNRYNNWLTNDLYCGYVSYRDKVHVKGIHEPIISEEQFCRVQEIFARTGKNPNMNRDSASLLSNLVVCSKCGLGFVHRRKDTMSRGKKYHYRYYSCKTYKHTHELEKCGNKIWRADKLEELIINRVNNYSFASRNVDKEDELDSLNEKLKIEHAKRKRLFDLYINGSYEVSELDSMMNDIDAQINNYESQIEANEELKRNKKIQENLANLATVDYDSLEFREKQLYLKSLINKIYIDGEQVTIEWL

SEQ ID NO: 6865 - protein, 485 aa, synthetic construct; identical to SEQ ID NO: 695

SEQ ID NO: 6866 - protein, 469 aa, synthetic construct; identical to SEQ ID NO: 1741

SEQ ID NO: 6867 - protein, 452 aa, synthetic construct
MKAAIYIRVSTREQVENYSIQAQTEKLTALCRSKDWDVYDIFIDGGYSGSNMNRPALNEMLSKLHEIDAVVVYRLDRLSRSQRDTITLIEEYFLKNNVEFVSLSETLDTSSPFGRAMIGILSVFAQLERETIRDRMVMGKIKRIEAGLPLTTAKGRTFGYDVIDTKLYINEEEAKQLQLIYDIFEEERSITSLQKRLKKLGFKVRTYSRYYGWLTNDLYCGYVSYKDKVHVKGIHEPIISEEQFYRVQEIFTRMGKNPNMNRDSASLLNNLVVCNKCGLGFVHRRKDTISRGKKYHYRYYSCKTYKHTHELEKCGNRIWRADKLEELIINRVNDYSLASRNVDKEDELDSLNEKLKIEHAKKKRLFDLYINGSYEVSELDSMMSDIDAQINYYESQIEANEELKKNKKIQENLANLATVDYDSLEFREKQLYLKSLINKIYIDGEQVTIEWL

SEQ ID NO: 6868 - protein, 452 aa, synthetic construct
MKAAIYIRVSTREQVENFSIQAQTEKLTALCRSKDWDVYDIFIDGGYSGSNMNRPALNEMLSKLREIDAVVVYRLDRLSRSQRDTITLIEEYFLKNNVEFVSLSETLDTSSPFGRAMIGILSVFAQLERETIRDRMVMGKIKRIEAGLPLTTAKGRTFGYDVIDTKLYINEEEAKQLQLIYDIFEEEQSITFLQKRLKKLGFKVHTYNRYNNWLTNDLYCGYVSYKDKVHVKGIHEPIISEEQFYRVQEIFTRTGRNPNMNRGSASLLNNLVVCSKCGLGFVHRRKDTTSRGKKYHYRYYSCKTYKHTHELEKCGNKIWRADKLEELIINRVNNYSFASRSVDKEDELDSLNEKLKIEHAKRKRLFDLYINGSYEVSELDSMMNDIDAQINYYESQIEANEELKKNKKIQENLANLATVDYDSLEFREKQLYLKSLINKIYIDGEQVTIEWL

SEQ ID NO: 6869 - protein, 452 aa, synthetic construct
MKAAIYIRVSTREQVENYSIQAQTEKLTALCRSKDWDVYDIFVDGGYSGSNMNRPALNEMLSKLHEIDAVVVYRLDRLSRSQRDTITLIEEYFLKNNVEFVSLSETLDTSSPFGRAMIGILSVFAQLERETIRDRMVMGKIKRIEAGLPLTTAKGRTFGYDVIDTKLYINEEEAEQLRLIYDIFEEEQSITFLQKRLKKLGFKVRTYNRYNNWLTNDLYCGYVSYKDKVHVKGIHEPIISEEQFYRVQEIFTHMGKNPNVNRDSASLLNNLVVCSKCGLGFVHRRKDTMSRGKKYHYRYYSCKTYKHTHELEKCGNKIWRADKLEELIINRVNNYSFASRNVDKEDELDSLNEKLKIERAKKRRLFDLYINGSYDVSELDSMMDDIDAQINYYESQIEANEELKKNKKIQENLADLATVDFDSLGFREKQLYLKSLISKIYIDGEQVTIEWL

SEQ ID NO: 6870 - protein, 452 aa, synthetic construct
MKAAIYIRVSTREQVENYSIQAQTEKLTALCRSKDWDVYDIFIDGGYSGSNMNRPALNEMLSKLHEIDAVVVYRLDRLSRSQRDTITLIEEYFLKNNVEFVSLSETLDTSSPFGRAMIGILSVFAQLERETIRDRMVMGKIKRVEAGLPLTTAKGRTFGYDVTDTKLYINEEEAEQLRLIYDIFEEEQSITFLQKRLKKLGFKVRTYNRYSNWLTNDLYCGYVSYKDKVHVKGIHEPIISEEQFYRVQEIFTRMGKNPNMNRDSASLLNNLVVCSKCGLGFVHRRKDTTSRGKKYHYRYYSCKTYKHTHELEKCGNKIWRADKLEELIINRVNNYSLASRNVDKEGELDSLNEKLKTEHAKKKRLFDLYINGSYEVSELDSMMDDIDAQINYYESQIEANEELKRNKKIQENLADLASVDYDSLEFREKQLYLKSLINKIYIDGEQVTIEWL

SEQ ID NO: 6871 - protein, 485 aa, synthetic construct
MTKKVAIYTRVSTTNQAEEGFSIDEQIDRLTNYAEAMGWQVSDTYTDAGFSGAKLERPAMQRLINDIENEAFDTVLVYKLDRLSRSVRDTLYLVKDVFAKNKIDFVSLNESINTSSAMGSLFLTILSAINEFERENIKERMTMGKLGRAKSGKSMMWTKTAFGYYHNRKTGILEIVPLQATIVEQIFTDYLSGISLTKLRDKLNESGHIGKDIPWSYRTLRQTLGNPVYCGYIKFKDSLFEGMHKPIIPYETYLKVQKELEERQQQTYERNNNPRPFQAKYMLSGMARCGYCGAPLRIVLGHKRKDGSRTMKYHCANRFPRKTKGVTVYNDNKKCDSGTYDLSNLENTVIDNLIGFQEDNDSLLKIINGNNQPILDTSSFKKQISQIDKKIQKNSDLYLNDFITMDELKDRTDSLQAEKKLLEARISENKFNDSTDVFELVKTQLGSIPINELSYDNKKKIVNNLVSKVDVTADNVDIIFKFQLA

SEQ ID NO: 6872 - protein, 452 aa, synthetic construct
MKAAIYIRVSTQEQVENYSIQAQTEKLTALCRSKDWDVYDIFIDGGYSGSNMNRPALNEMLSKLHEIDAVVVYRLDRLSRSQRDTTTLIEEYFLKNNVEFVSLSETLDTSSPFGRAMIGILSVFAQLERETIRDRMVMGKIKRIEAGLPLTTAKGRTFGYDVIDTKLYINEEEAKQLRLIYDIFEEEQSITFLQKRLKKLGFKVRTYNRYNNWLTNDLYCGYVSYKDKVHVKGIHEPIISEEQFYRVQEIFTRMGKNPNMNRDSASLLNNLVVCSKCGLSFVHRSKDTMSRGKKYHYRYYSCKTYKHTHELEKCGNKTWRADKLEELIINRVNNYSFVSRNVDKEDELDSLNEKLRIEHAKKRRLFDLYINGSYEVSELDSMMNDIDAQINYYESQIEASEELRKNKKIQENLADLATVDFDSLEFREKQLYLKSLINKIYIDGELVTIEWL

SEQ ID NO: 6873 - protein, 469 aa, synthetic construct
MSYTTPVRAAVYLRISEDRSGEQLGVARQREDCLKLCDQRKWVPVEYLDNDVSASTGKRRPAYEQMLADIAAGKIAAVVAWDLDRLHRRQMELEAFMSLADEKRLALATVAGDVDLATPQGRLVARLKGSVAAHETEHKKARQRRAARQKAERGLPNWSKAFGYLPGPNGPEPDPRTAPLVKQAYADILAGASLGDVCRQWNDAGAFTITGRLWTTTTLSKFLRKPRNAGLRAYKGARYGPVDRDAIVGKAQWSPLVDEATFWAAQAVLDAPGRAPGRKSVRRHLLTGLAGCGKCGNRLAGSYRTDGRVVYVCKACHGVAILADNIEPILYHIVAERLAMPDAVDLLRREIHDAAEAEAIRLELETLYGELDRLAVERAEGLLTARQVKISTDIVKAKINKLQACQLDQERLRVFDGIPLGTPQVAGMIAELSPNRFRAVLDVLAEVAVQPVGKGGRILNPERVQVNWR

SEQ ID NO: 6874 - protein, 485 aa, synthetic construct
MTEKVAIYTRVSTTNQAEEGFSIDEQIDRLTKYAEAMGWQVSDTYTDAGFSGAKLERPAMQRLINDIENKAFDTVLVYKLDRLSRSVRDTLYLVKDVFTKNKIDFISLNESIDTSSAMGSLFLTILSAINEFERENIKERMTMGKLGRAKSGKSMMWTKTAFGYYHNRKTGILEIVPLQATIVEQIFTDYLSGISLTKLRDKLNESGHIGKDIPWSYRTLRQTLDNPVYCGYIKFKGSLFEGMHKPIIPYETYLKVQKELEERQQQAYERNNNPRPFQAKYMLSGMARCGYCGAPLKIVLGRKRKDGSRTMKYHCANRFPRKTKGVTVYNDNKKCDSGTYDLSNLENTVIDYLIGFQENNDSLLKIINGNNQPILDTSSFKRQISQIDKKIQKNSDLYLNDFITMDELKARTDSLQAEKKLLKAKISENKFNDSTDVFELVKTQLGSIPINELSYDNKKKIVNNLVSKVDVTADNVDIIFKFQLA

SEQ ID NO: 6875 - protein, 452 aa, synthetic construct
MKAAIYIRVSTREQVENYSIQAQTEKLTALCRSKDWDVYDIFIDGGYSGSNMNRPALNEMLSKLHEIDAVVVYRLDRLSRSQRDTITLIEEYFLKNDVEFVSLSETLDTSSPFGRAMIGILSVFAQLERETIRDRMVMGKIKRIEAGLPLTTAKGRTFGYDVIDTKLYINEEEAKQLQLIYDIFEEEQSITFLQKRLKKLGFKVRTYNRYNNWLTNDLYCGYVSYKDKVHVKGIHEPIISEEQFYRVQEIFTRMGKNPNMNRDSASLLNNLVVCSKCGLGFVHRRKDAMSRDKKYHYRYYSCKTYKHIHELEKCGNKIWRADKLEELIIDRVNNYNLASRNADKEDELGSLNERLKIEHAKKKRLFDLYINGSYEVSELDSMMKDIDAQINYYESQIEANEELKRSKRIQESLANLATVDFDSLEFREKQLYLKSLINKIYIDGEQVTIEWL

SEQ ID NO: 6876 - protein, 452 aa, synthetic construct
MKAAIYIRVSTQEQVENYSIQAQTEKLTALCRSKDWDVYDIFIDGGYSGSNMNRPALNEMLSKLHEIDAVVVYRLDRLSRSQRDTITLIEEYFLKNNVEFVSLSETLDTGSPFGRAMIGILSVFAQLERETIRDRMVMGKIKRVEAGLPLTTAKGRTFGYDVIDTKLYINEEEAKQLQLIYDIFEEEQSITFLQKRLKKLGFKVRTYSCYNSWLTNDLYCGYVSYKGEVHVKGIHEPIISEEQFYRVQEIFTRMGKNPNMNRDSASLLNNLVVCSKCGLGFVHRRKDTMSRGKKYHYRYYSCKTYKHTHELEKCGNKIWRADKLEELVIDRVNNYSFASRNVDKEDELDNLNEKLKIEHAKKKRLFDLYINGSYEVSELDSLMNDIDAQINYYESQIEANEELKKNKKIQENLANLATVDYDSLEFREKQLYLKSLVNKIYIDGEQVTIEWL

SEQ ID NO: 6877 - protein, 485 aa, synthetic construct
MTKKVAIYTRVSTTNQAEEGFSIGEQIDRLTKYAEAMGWQVSDTYTDAGFSGAKLERPAMQRLINDIENKAFDTVLVYKLDRLSRSVRDTLYLVKDVFTKNKIDFISLSESIDTSSAMGSLFLTILSAINEFERENIKERMTMGKLGRAKSGKSMMWTKTAFGYYHNRKTGILEIVPLQATIVEQIFTDYLSGISLTKLRDKLNESGHIGKDIPWSYRTLRQTLDNPVYCGYIKFKDSLFEGMHKPIIPYETYLKVQKELGERQQQTYERNNNPRPFQAKYMLSGMARCGYCGAPLRIVLGHKRKDGSRTMKYHCANRFPRKTKGVTVYNDNKKCDSGTYDLSNLENTVIDNLIGFQENSDSLLKIINGNNQPILDTSSFKKQISQIDKKIQKNSDLYLNDFITMDELKDRTDSLLAEKKLLEAKISENKFNDSTDVFGLVKAQLGSIPINELSYDNKKKIVNNLVSKVDVTADNVDIIFKFQLA

SEQ ID NO: 6878 - protein, 452 aa, synthetic construct
MKAAIYIRVSTREQVENYSIQAQTEKLTALCRSKDWDVYDIFIDGGYSGSNMNRPALNEMLSKLHEIDAVVVYRLDRLSRSQRDTITLIEEYFLKNNVEFVSLSETLDTSSPFGRAMIGILSVFAQLERETIRDRMVMGKIKRIEAGLPLTTAKGRTFGYDVIDSKLYINEEEAKQLQLIYDIFEEEQSITFLQKRLKRLGFKVRTYNRYNSWLTNDLYCGYVSYKDKVHVKGIHEPIISEEQFYRVQEIFTRMGKNPNVNRDSASLLNNLVVCSKCGLGFVHRRKDTVSRGKKYHYRYYSCKTYKHIHELEKCGNKIWRADKLEELIINRVNNYSFASRNVDKEDELDSLNEKLKIEHAKKKRLFDLYINGSYEVSELDCMMNDIDAQINYYESQIEANEEQKKDKKIQENLADLATVDFDSLEFREKQLYLKSLINKIYIDGEQVTIEWL

SEQ ID NO: 6879 - protein, 485 aa, synthetic construct
MTKKVAIYTRVSTTNQAEEGFSIDEQIDRLTKYAEAMGWQVSDTYTDAGFSGAKLERPAMQRLINDIETRAFDTVLVYKLDRLSRSVRDTLYLVKDVLTKNKIDFISLNESIDTSSAMGSLFLTILSAINEFERENIRERMTMGKLGRAKSGKSMMWTKTAFGYYHNRKTGILEIVPLQATIVEQIFTDYLSGISLTKLRDKLNESGHIGKDIPWSYRTLRQTLDNPVYCGYIKFKDSLFEGMHKPIIPYETYLKVQKELEERQQQTYERNNNPRPFQAKYMLSGMARCGYCGAPLRIVLGHRRKDGSRTMKYHCANRFPRKTKGVTVYNDNKKCDSGTYDLSNLENTVIDNLIGFQEDNDSLLKIINGNNQPILDTSSFKKQISQIDRKIQKNSDLYLNDFITMDELKDRTDSLQAEKKLLKAKISENKSNDSTGVFELVKTQLGSIPINELSYDNKKKIVNNLVSKVDVTADNVDIIFKFQLA

SEQ ID NO: 6880 - protein, 452 aa, synthetic construct
MKAAIYIRVSTQEQVENYSIQAQTERLTALCRSKDWDVYDIFIDGGYSGSNMNRPALNEMLSKLHEIDAVVVYRLDRLSRSQRDTTTLIEEYFLKNNVEFVSLSETLDTSSPFGRAMIGILSVFAQLERETIRDRMVMGKIKRIEAGLPLTTAKGRTFGYDVIDTKLYINEEEAKQLQLIYDIFEEEQSITFLQKRLKKLGLKVHTYNRYNNWLTNDLYCGYVSYKDKVHVKGIHEPIISEEQFYRVQEIFTRMGKNPNMNRDSASLLNSLVVCSKCGLGFVHRSKDTMNRGKKYHYRYYSCKTYKHTHELEKCGNKIWRADKLEELIIDRVNNYSFAIRNVDKEDELDSLNEKLRIERAKKKRLFDLYINGSYEVSELDSMMDDIDAQINYYESQIEANEELKRNKKIRENLADLATVDFDSLEFREKQLYLKSLIDKIYIDGEQVTIEWL

SEQ ID NO: 6881 - protein, 452 aa, synthetic construct; identical to SEQ ID NO: 6663

SEQ ID NO: 6882 - protein, 452 aa, synthetic construct
MKAAIYIRVSTREQVENYSIQAQTEKLTALCRSKDWDVYDIFIDGGYSGSNMNRPALNEMLSKLHEIDAVVVYRLDRLSRSQRDTITLIEEYFLKNNVEFVSLSETLDTSSPFGRAMIGILSVFAQLERETIRDRMVMGKIKRIEAGLPLTTAKGRTFGYDVIDTKLYINEEEAKQLQLIYDIFEEEQSITFLQKRLKKLGFKVRTYSRYNSWLTNDLYCGYVSYKDKVHVKGIHEPIISEEQFHRVQEIFTRMGKNPNMNRDSASLLNNLVVCSKCGLGFVHRRKDTMSRGKKYHYRYYSCKTYKHTHELEKCGNKIWRADKLEELIINRVNSYSFASRNVDKEGELDSLNEKLKIEHAKKKRLFDLYINGSYEVSELDSMMSDIDAQINYYESQIEANEELKKNKKIQENLANLATVDYDSLEFREKQLYLKSLINKIYIDGEQVTIEWL

SEQ ID NO: 6883 - protein, 452 aa, synthetic construct
MKAAIYIRVSTQEQVGNYSIQAQTEKLTALCRSKGWDVYDIFIDGGYSGSNMNRPALNEMLSKLHEIDAVVVYRLDRLSRSQRDTTTLIEEYFLKNNVEFVSLSETLDTSSPFGRAMIGILSVFAQLERETIRDRMVMGKIKRIEAGLPLTTAKGRTFGYDVIDTKLYINEEEAKQLRLIYDIFEEEQSITSLQKRLKKLGFKVRTYNRYNNWLTNDLYCGYVSYKDKVHVKGVHEPIISEEQFYRVQEIFTRMGKNPNMNRDSASLLNNLVVCSKCGLGFVHRRKDTVSGGKKYHYRYYSCKTYKHTHELEKCGNKTWRADKLEELIINRVNNYSFASRNVDKEDELDSLNEKLKTEHAKKKRLFDLYINGSYEVSELDSMMNDIDAQINYYESQIEANEELKKNKKIQENLADLAAVDFDSLEFREKQLYLKSLISKIYIDGEQVTIEWL

SEQ ID NO: 6884 - protein, 485 aa, synthetic construct; identical to SEQ ID NO: 1728

SEQ ID NO: 6885 - protein, 452 aa, synthetic construct
MKAAIYIRVSTQEQVENYSIQAQTEKLTALCRSKGWDVYDIFIDGGYSGSNMNRPALNEMLGKLHEIDAVVVYRLDRLSRSQRDTTTLIEEYFLKNNVEFVSLSETLDTSSPFGRAMIGILSVFAQLERETIRDRMVMGKIKRIEAGLPLTTAKGRTFGYDVIDTKLYINEEEAKQLQLIYDIFEEEQSITSLQKRLKKLGFKVRTYNRYNNWLTNDLYCGYVSYKDEVHVKGIHEPIISEEQFYRVQEIFTRMGKNPNVNRDSASLLSNLVVCSKCGLGFVHRSKDTMSRGKKYHYRYYSCKTYKHTHELEKCGNKTWRADKLEELIINRVSSYGFASRNVDKEDELNGLNEKLKIEHAKKKRLFDLYIDGSYEVSELDSMMNDIDARINYYESQIEANEELKKNKKIQKNLADLATVDFDSLEFREKQLYLKSLISKIYIDGEQVTIEWL

SEQ ID NO: 6886 - protein, 452 aa, synthetic construct
MKAAIYIRVSTREQVENYSIQAQTEKLTALCRSKDWDVYDIFVDGGYSGSNMNRPALNEMLSKLHEIDAVVVYRLDRLSRSQRDTITLIEEYFLKNNVEFVSLSETLDTSSPFGRAMIGILSVFAQLERETIRDRMVMGKIKRIEAGLPLTTAKGRTFGYDVIDTKLYINEEEAKQLQLIYDIFEEEQSITFLQKRLKKLGFKVRTYNCYNNWLTNDLYCGYVSYRDKVHVKGIHEPIISEEQFYRVQEIFARMGKNPNMNRDSASLLNNLVVCSKCGLGFVHRRKDTMSRGKKYHYRYYSCKTYKHIHELEKCGNKIWRADKLEELIINRVNNYSLASRNVDKEDEPDSLNEKLKTEHAKKRRLFDLYINGSYEVSELDSMMSDIDAQISYYESQIEANEELKKNKKIQESLANLATVDYDSLEFREKQLYLKSLINKIYIDGEQVTIEWL

SEQ ID NO: 6887 - protein, 469 aa, synthetic construct
MSYTTPVRAAVYLRISEDRSGEQLGVARQREDCLKLCGQRKWVPVEYLDNDVSASTGKRRPAYEQMLADITAGKVAAVVAWDLDRLHRRPIELEAFMSLADEKRLALATVAGDVDLATPQGRLVARLKGCVAAHETEHKKARQRRAARQKAERGLPNWSNAFGYLPGPNGPEPDPRTAPLVKQAYADILAGASLGDVCRRWNDAGAFTITGRPWTTTTLSKFLRKPRNAGLRAYKGARYGPVDRDAIVGKAQWSPLVDEATFWAAQAVLDAPGRAPGRKSVRRHLLTGLAGCGKCGYHLAGSHRTDGRVVYVCKACHGVAILADNIEPILYRIVAERLAMPDAVDLLRRETHDAAEAETIRLELETLYGELDRLAVERAEGLLTARQVKISTDIVNAKITKLQARQLDQERLRVFDGIPLGTPQVAGMIAELSPDRFRAVLNVLAEVVVRPVGKSGRIFSPERVQVNWR

SEQ ID NO: 6888 - protein, 452 aa, synthetic construct
MKAAIYIRVSTREQVENYSIQAQTEKLTALCRSKDWDVYDIFIDGGYSGSNMNRPALNEMLSKLHEIDAVVVYRLDRLSRSQRDTITLIEEYFLKNNVEFVSLSETLDTSSPFGRAMIGILSVFAQLERETIRDRMVMGKIKRIEAGLPLTTAKGRTFGYDVIDTKLYINEEEAKQLRLIYDIFEEEQSITSLQKRLKKLGFKVHTYNRYNNWLTNDLYCGYVSYKDKVHVKGIHEPIISEEQFYRVQEIFTRMGKNPNMNRDSASLLNNLVVCGKCGLSFVHRRKDAMSRDKKYHYRYYSCKTYKHIHELEKCGNKIWRADKLEDLIINRVNNYSLASRNVDKEDELNSLNEKLKIEHAKKKRLFDLYINGSYEVSELDSMMNDIDTQISYYESQIEANGELKKSKKIQENLANLATVDFDSLEFREKQLYLKSLINKIYIDGEQVTIEWL

SEQ ID NO: 6889 - protein, 485 aa, synthetic construct
MTKKVAIYTRVSTTNQAEEGFSIDEQIDRLTKYAEAMGWQVSDTYTDAGFSGAKLERPAMQRLINDIENKAFDTVLVYKLDRLSRSVRDTLHLVKDVFTRNKIDFISLNESIDTSSAMGSLFLTILSAINEFERENIKERMTMGKLGRAKSGKSMMWTKTAFGYYHNRKTGILEIVPLQATIVEQIFTDYLSGISLTKLRDKLNESGHIGKDIPWSYRTLRQTLDNPVYCGYIKFKDSLFEGMHKPIIPYETYLKVQKELEERQQQTYERNNNPRPFQAKYMLSGMARCGYCGAPLKIVLGRKRKDGSRTMKYHCANRFPRKTKGITVYNNNKKCDSGTYDLSNLENTVIDNLIGLQENNDSLLKIINGNNQPILDTSSFGKQISQIDKKIQKNSDLYLNDFITMDELKDRTDSLQAEKKLLKAKISENKFNGSTDVFELVKTQLGSIPINELSYDNKKKIVNNLVSKVDVTADNVDIVFKFQLA

SEQ ID NO: 6890 - protein, 469 aa, synthetic construct
MSYTTPVRAAVYLRISEDRSGEQLGVARQREDCLKLCGQRKWVPVEYLDNDVSASTGKRRPAYEQMLADITAGKIGAVVAWDLDRLHRRPVELEAFMSLADEKRLALATVAGDVDLATPQGRLVARLKGVVAAHETEHKKARQRRAARQKAERGLPNWSKAFGYLPGPNGPEPDPRTAPLVKQAYADILAGASLGDVCRQWNDAGAFTITGRPWTTTTLSKFLRKPRNAGLRAYKGARYGPVDRDAIVGKAQWSPLVDEATFWAAQAVLDAPGRAPGRKSVRRHLLTGLAGCGKCGNHLAGSYRTDGRVVYVCKACHGVAILADNIEPILYHVVAERLAMPDAVDLLRREIHDAAEAETIRLELEALYGELDRLAVERAEGLLTARQVKIGTDIVNAKITKLQTRQLDQERLRVFEGIPLGTPQVAGMIAELSPDRFRAVLDVLAEVVVRPVGKSGRIFNPERVQVNWR

SEQ ID NO: 6891 - protein, 452 aa, synthetic construct
MKAAIYIRVSTREQVENYSIQAQTEKLTALCRSKDWDVYDIFIDGGYSGSNMNRPALNEMLSKLHEIDAVVVYRLDRLSRSQRDTITLIEEYFLKNNVEFVSLSETLDTSSPFGRAMIGILSVFAQLERETIRDRMVMGKIKRIEAGLPPTTAKGRTFGYDVIDTKLYINEEEAKQLQLIYDIFEEEQSITLLQKRLKKLGFKVRTYNRYNSWLTNDLYCGYVSYKDKVHVKGIHEPIISEEQFYRVQEIFTRMGKNPNMNRDSASLLNNLVVCSKCGLGFVHRRKDTVSRGKKYHYRYYSCKTYKHIHELEKCGNKIWRADKLEELIINRVNNYSFASRNVDKEDELASLNEKLKIEHAKKRRLFDLYLKGSYEVSELDSMMNDIDAQINYYESQIEANEELKKNKKIQKNLADLATVDYDSLEFREKQLYLKSLINKIYIDGEQVTIEWL

SEQ ID NO: 6892 - protein, 485 aa, synthetic construct
MTKKVAIYTRVSTTNQAEEGFSIDEQIDRLTKYAEAMSWQVSNTYTDAGFSGAKLERPAMQRLINDIETKAFDTVLVYKLDRLSRSVRDTLYLVKDVFTKNKIDFISLNESIDTSSAMGSLFLTILSAINEFERENIKERMTMGKLGRAKSGKSMMWTKAAFGYYHNRKTGILEIVPLQATIVEQIFTDYLSGISLTKLRDKLNESGHIGKDIPWSYRTLRQTLDNPVYCGYIKFKGSLFEGMHKPIIPYETYLKVQKELEERQQQTYERNNNPRPFQAKYMLSGMARCGYCGAPLRIVLGHKRKDGSRTMKYHCANRFPRKTKGVTVYNDNKKCDSGTYDLSNLENTVIDNLIGFQENNDSLLKIINGNNQPILDTSSFKKQISQIDKKIQKISDLYLNDFITMDELRDRTDSLQAEKKLLKAKISENKFNDSTDVFELVKTQLGSIPINELSYDDKKKIVNNLVSKVDVTADNVDIIFKFQLA

SEQ ID NO: 6893 - protein, 469 aa, synthetic construct
MSYTTLVRAAVYLRISEDRSGEQLGVARQREDCLKLCGQRKWEPVEYLDNDVSASTGKRRPAYEQMLADISAGKIAAVVAWDLDRLHRRPIELEAFMSLADEKRLALATVAGDVDLATPQGRLVARLKGSVAAHETEHKKARQRRAARQKAERGHPNWSKAFGYLPGPSGPEPDPRTAPLVKQAYADILAGASLGDVCRQWNDAGAFTITGRPWTTTALSKFLRKPRNAGLRAYKGARYGPVDRDAIVGKAQWRPLVDEATFWAAQAVLDAPGRAPGRKSVRRHLLTGLAGCGKCGNHLAGSYRTDGKIVYVCKACHGVAILADNIEPILYHIVAERLAMPDAVDLLRREIHDAAEAETIRLELEALYGELDRLAVERAEGLLTARQVKISTDIMNAKITELQARQLDQERLRVFEGIPLGTPQVADMIAELSPDRFRAVLDVLAEVVVQPVGKSGRVFNPERVQVNWR

SEQ ID NO: 6894 - protein, 485 aa, synthetic construct
MTKKVAIYTRVSTANQAEEGFSIDEQIDRLTKYAEAMGWQVSDTYTDAGFSGAKLERPAMRRLINDIENKAFDTVLVYKLDRLSRSVRDTLYLVKDVFTKNKIDFISLNECIDTSSAMGSLFLTILSAINEFERENIKERMTMGKLGRAKSGKSMMWTKTAFGYYHNRKTGILEIVPLQATIVEQIFTDYLSGISLTKLRDKLNESGHIGKDIPWSYRTLRQTLDNPVYCGYIKFKDNLYEGMHKPIIPYETYLKAQKELRERQQQTYERNNNPRPFQAKYMLSGMARCGYCGAPLKIVLGHKRKDGSRTMKYHCTNRFPRKTKGVTVYNDNKKCDSGTYDLSDLENTVIDSLIGFQENNDSLLKIINGNNQPILDTSSLKKQISLIDKKIQKNSDLYLNDFITMDELKDRTDSLQAEKKLLKAKISESKFNDSADVFELVKTQLGSIPINELSYDNKKKIVNNLVSKVDVTADNVDIIFKFQLA

SEQ ID NO: 6895 - protein, 469 aa, synthetic construct
MSYTTPVRAAVYLRISEDRSGEQLGVARQREDCLKLCDQRKWVPVEYLDNDVSASTGKRRPAYEQMLADITAGKIAAVVAWDLDRLHRRPIELEAFMCLADEKRLALATVAGDVDLATPQGRLVARLKGSVAAHETEHKKARQRRAARQKAERGHPNWSRAFGYLPGPSGPEPDPRTAPLVKQAYADILAGASLGDVCRQWNDAGAFTITGRPWTTTALSKFLRKPRNAGLRAYKGARYGPVDRGAIVGKAQWSPLVDEATFWAAQAVLDAPGRAPGRKSVRRHLLTGLAGCGKCGNHLAGSYRTDGRVVYVCKACHGVAILADNIEPILYHIVAERLAMPDAMDLLRREIHDAAEAETTRLELETLYGELDRLAVERAEGLLTARQVKISTDIVNAKIAKLQARQQDQERLRVLGGIPLGTPQVAGVIAELSPDRFRAVLDVLAEVVVQPVGKSGRIFNPERVQVNWR

SEQ ID NO: 6896 - protein, 452 aa, synthetic construct
MKAAIYIRVSTREQVENYSIQAQTEKLTALCRSKDWDVYDIFIDGGYSGSNMNRPALNEMLSKLHEIDAVVVYRLDRLSRSQRDTITLIEEYFLKNDVEFVSLSETLDTSSPFGRAMIGILSVFAQLERETIRDRMVMGKIKRIEAGLPLTTAKGRTFGYDVIDTKLYINEEEAKQLQLIYDIFEEEQSITFLQKRLKKLGFKVRTYNRYISWLTNDLYCGYVSYKDKVHVKGIHEPIISEEQFYRVQEIFTRMGKNPNTNRDSASLLNNLVVCSKCGLGFVHRRKDTMSRGKKYHYRYYSCKTYKHTHELEKCGNKIWRADKLEELIINRVNNYSLTSRNVDKENELDSLNEKLKIEHAKKKRLFDLYINGSYEVGELDSMMNDIDAQINYYESQIEANEELKKDKKIRESLANLATVDYDSLEFREKQLYLKSLINKIYIDGEQVTIEWL

SEQ ID NO: 6897 - protein, 485 aa, synthetic construct
MTKKVAIYTRVSTTNQAEEGFSIDEQIDRLTKYAEAMGWQVSDTYTDAGSSGAKLERPAMQRLINDIENKAFDTVLVYKLDRLSRSVRDTLYLVKDVFTKNKIDFISLNESIDTSSAMGSLFLTILSAINEFERENIKERMTMGKLGRAKSGKSMMWAKTAFGYYHNRKTGILEIVPLQATIVEQIFTDYLSGISLTKLRDKLNESGHIGKDIPWSYRTLRQTLDNPVYCGYIKFKDGLFEGMHKPIIPYETYLKVQKELEERQQQTYERNNNPRPFQAKYMLSGMARCGYCGAPLRIVLGHKRKDGSRTMKYHCANRFPRKTKGVTVYNDNKKCDSGTYDLSNLENTVIDNLIVFQENNDSLLKIINGNNQSILDTSSLKNQISQIDKKIQKNSDLYLNDFITMDELKDRTDSLQAEKKLLEAKISENKFNDSTGVFELVKTQLGSIPINELSYDNKKRIVNNLVSKVDVTADNVDIIFKFQQA

SEQ ID NO: 6898 - protein, 452 aa, synthetic construct
MKAAIYIRVSTQEQVGNYSIQAQTEKLTALCRSKDWDVYDIFVDGGYSGSDMNRPALNEMLSKLHEIDAVVVYRLDRLSRSQRDTTTLIEEYFLKNNVEFVSLSETLDTSSPFGRAMIGILSVFAQLERETIRDRMVMGKIKRIEAGLPLTTAKGRTFGYDVIDTKLYVNEEEAKHLQLIYDIFEEEQSITFLQKRLKKLGFRVRTYNRYNNWLTNDLYCGYVSYKDKVHVKGIHEPIISEEQFYRVQEIFTRMGKNPNMNRGSASLLNNLVVCSKCGLGFVHRSKDTMCRGKKYHYRYYSCKTYKHTHELEKCGNKTWRADKLEELIINRVNNYSPASRNVDEEGELDRLDEKLKIEHAKKGRLFDLYINGSYEVGELDSMMSDIDAQINYYESQLEANEERKKNKKIQENLADLATVDFDSLEFREKQLYLKSLINKIYIDGEQVTIEWL

SEQ ID NO: 6899 - protein, 485 aa, synthetic construct
MTKKVAIYTRVSTTNQAEEGFSIDEQIDRLTKYAEAMGWQVSDTYTDAGFSGAKLERPAMQRLINDIENKAFDTVLVYKLDRLSRSARDTLYLVKEVFTKNKIDFISLNESIDTSSAMGSLFLTILSAINEFERENIKERMTMGKLGRAKSGKSMMWTKTAFGYYHNRKTGILEIVPLQATIVEQIFTDYLSGISLTKLRDKLNESGHIGKDIPWSYRALRQTLDNPVYCGYIKFKDSLFEGMHKPIIPYETYLKVQKELGERQQQTYERNNNPRPFQAKYMLSGMARCGYCGAPLRIVLGHKRKDGSRTMKYHCANRFPRKTKGVTVYNDNKKCDSGTYDLSNLENTVIDKLIGFQENNDSLLKIINGNNQPILDTSSFREQISQIDKKIQKNSDLYLNDFITMDELKDRTDSLQAEKKLLEAKISENKFNDSTDVFELVKTQLGSIPINELSYDNKKKIVNNLVSKVDVTADNVDIIFKFQLA

SEQ ID NO: 6900 - protein, 485 aa, synthetic construct; identical to SEQ ID NO: 2734

SEQ ID NO: 6901 - protein, 452 aa, synthetic construct
MKAAIYIRVSTREQVENYSIQAQTEKLTALCRSKDWDVYDVFIDGGYSGSNMNRPALNEMLSKLHEIDAVVVYRLDRLSRSQRDTITLIEEYFLKNNVEFVSLSETLDTSSPFGRAMIGILSVFAQLERETIRDRMVMGKIKRIEAGLPLTTAKGRTFGYDVIDTKLYINEEEARQLQLIYDIFEEEQSITSLQKRLKKLGFKVHTYNRYNNWLTNDLYCGYVSYKDKVHVKGIHEPIISEEQFYRVQEIFTRMGKNPNMNRDSASLLNNLVVCSKCGLGFVHRRKDAMSRDKKYHYRYYSCKTYKHIHELEKCGNKIWRADKLEELIINRVNDYSVASRNVDKEDELDSLNEKLKIEHAKKRRLFDLYINGNYEVSELDSMMSDIDAQINYYESQIEANEELKKSKKIQENLAYLAAVDFDSLEFREKQLYLKGLINKIYIDGEQVTIEWL

SEQ ID NO: 6902 - protein, 452 aa, synthetic construct
MKAAIYIRVSTREQVENYSIQAQTEKLTALCRSKDWDVYDIFIDGGYSGSNMNRPALNEMLSKLHEIDAVVVYRLDRLSRSQRDTITLIEEYFLKNNVEFVSLSETLDTSSPFGRAMIGILSVFAQLERETIRDRMVMGKIKRIEAGLPLTTAKGRTFGYDVIDTKLYINEEEAKQLQLIYDIFEEEQSITFLQKRLKELGFKVRTYNCYNNWLTNDLYCGYVSYKDKVRVKGIHEPIISEEQFYRVQEIFTRMGKSPNMNRDSASLLNNLVVCGKCGLGFVHRRKDIMSRGRKYHYRYYSCKTYKHIHELEKCGNKIWRADKLEELIINRVNNYSLASRNVDKEDELDSLNEKLRIEHAKKKRLFELYINGRYEVSELDSMMNDIDAQINYYESQIEANEELKKNKKIQENLADLATVDFDSLEFREKQLYLKSLINKIYIDGEQVTIEWL

SEQ ID NO: 6903 - protein, 452 aa, synthetic construct
MKAAIYIRVSTQEQVENYSIQAQTEKLTALCRSKDWDVYDVFVDGGYSGSNMNRPALNEMLSRLHEIDAVVVYRLDRLSRSQRDTTTLIEEYFLKNNVEFVSLSETLDTSSPFGRAMIGILSVFAQLERETIRDRMVMGKIKRIEAGLPLTTAKGRTFGYDVIDTKLYINEEEAKQLQLIYDIFEEVQSITFLQKRLKKLGFKVRTYNRYSNWLTNDLYCGYVSYKDKVHVKGIHEPIISEEQFYRVQEIFTRMGKNPNMNRDSASLLSNLVVCSKCGLGFVHRSKDTMSRGKRYHYRYYSCKTYKHTHELEKCGNKTWRADKLEELIINRVNNYSFAGRNVDKEDELDSLNEKLKIEHAKKKRLFDLYINGGYEVSELDSMMNDIDAQINHYESQIEANKELKKNKKIQENLADLATVDFDSLEFREKRLYLKGLINKIYIDGEQVTIEWL

SEQ ID NO: 6904 - protein, 452 aa, synthetic construct
MKAAIYIRVSTREQVENYSIQAQTERLTALCRSKDWDVYDIFIDGGYSGSNMNRPALNEMLSKLHEIDAVVVYRLDRLSRSQRDTITLIEEYFLKNNVEFVSLSETLDTSSPFGRAMIGILSVFAQLERETIRDRTVMGKIKRVEAGLPLTTAKGRTFGYDVVDTKLYINEEEAKQLQLIYDIFEEERSITLLQKRLKKLGFKVRTYSRYNSWLTNDLYCGYVSYKDKVHVKGIHEPIISEEQFYRVQEIFTRMGKNPNINRDSASLLNNLVVCSKCGLGFVHRRKDTMSRGKKYHYRYYSCKTYKHTHELEKCGNKIWRADKLEELIISRVNNYSFASRNVDKEDELDSLNEKLKIEHAKRRRLFDLYINGSYNVSDLDSMMNDIDAQINYYESQIEANEELKKNKKIQENLAGLATVDFDSLEFREKQLYLKSLINKIYIDGEQVTIEWL

SEQ ID NO: 6905 - protein, 452 aa, synthetic construct
MKAAIYIRVSTREQVENYSIQAQTEKLTALCRSKGWDVYDIFIDGGYSGSNMNRPALNEMLSKLHEIDAVVVYRLDRLSRSQRDTITLIEEYFLKHNVEFVSLSETLDTSSPFGRAMIGILSVFAQLERETIRDRMVMGKIRRIEAGLPLTTAKGRTFGYDVIDTKLYINEEEAKQLQLIYDIFEEEQSITFLQKRLKKLGLKVHTYNRYNNWLTNDLYCGYVSYKDKVHVKGIHEPIISEEQFYRVQEIFTRMGKNPNMNRDSASLLNSLVVCSKCGLGFVHRRKDTMSRGKKYQYRYYSCKTYKHTHELEKCGNKIWRADKLEELIINRVNSYSFASRNVDKEDELDGLDEKLKIEHAKKKRLFDLYINGSYEVSELDSMMNDIDAQINYYESQIEANEELKKSKKIQENLAGLATEDFDSLEFREKQLYLKSLINKIYIDGEQVTIEWL

SEQ ID NO: 6906 - protein, 469 aa, synthetic construct
MCYTTPVRAAVYLRISEDRSGEQLGVARQREDCLKLCDQRKWVPVEYLDNDVSASTGKRRPAYEQMLADITAGKIAAVVAWDLDRLHRRPIELEAFMSLADEKRLALATVAGDVDLATPQGRLVARLKGSVAAHETEHKRARQCRAARQKAERGHPNWSKAFGYQPGPNGPEPDPRTAPLVKQAYADILAGASLGDVCRRWNGAGAFTITGRPWTTTTLSKFLRKPRNAGLRAYKGARYGPVDRDAIVGKAQWSPLVDEATFWAAQAVLDAPGRAPGRKSVRRHLLTGLAGCGKCGNHLAGSYRTDGRVVYVCKACHGVAILADNIEPMLYHIAAERLAMPDAVDLLHRETHDAAEAETTRLELETLCGELDRLAVERAEGLLTARQVKISTDIVNAKITKLQARQLDQERLRVFDGIPLGTPQVAGKIAELSPDRFRAVLDVLAEVVVQPVGKSGRIFNPGRVQVNWR

SEQ ID NO: 6907 - protein, 485 aa, synthetic construct
MTRKVAIYTRVSTTNQAEEGFSIDEQVDRLTKYAEAMGWQVSDTYTDAGFSGAKLERPAMQRLINDIENKAFDTVLVYKLDRLSRSVRDTLYLVKDVFTKNKIDFISLNESINTSSAMGSLFLTILSAINEFERENIKERMTMGKLGRAKSGKSMMWTKTAFGYHHNRRTGILEIVPLQATIVEQIFTDYLSGISLTKLRDKLNESGHIGRDIPWSYRTLRQTLDNPVYCGYIKFKDSLYEGMHKPIIPYETYLKVQKELEERQQQAYERNNNPRPFQAKYMLSGMARCGYCGAPLRVVLGHKRKDGSRTMRYHCANRFPRKTKGVTVYNDNKKCDSGTYDLSNLENTVINNLIGFQENNDSLLKIINGNNQSILDTSSFKKQISQIDKKIQKNSDLYLNDFITMDELKDRTDSLQAEKKLLKAKISENKFNDSTDVFELVKTQLGSIPINELSYDNKKKIVNNLVSKVDVTADNVDIIFKFQLA

SEQ ID NO: 6908 - protein, 452 aa, synthetic construct
MKAAIYIRVSTQEQVGNYSIQAQTEKLTALCRSKGWDVYDIFIDGGYSGSNMNRPALNEMLNKLHEIDAVVVYRLDRLSRSQRDTTTLIEEYFLKNNVEFVSLSETLDTSSPFGRAMIGILSVFAQLERETIRDRMVMGKIKRIEAGLPLTTAKGRTFGYDVIDTKLYVNEEEAKQLRLIYDIFEEEQSITFLQKRLKKLGFKVRTYNRYNSWLTNDLYCGYVSYKDKVHVKGIHEPIISEEQFYRVQEIFTRMGKNPNMNRDSASLLNNLVVCSKCGLGFVHRSKDTMCRGKKYHYRYYSCRTYKHTHELEKCGNKTWRADKLEELIINRVNNYSFASRNADKEDELDSLNEKLKIEHARKKRLFDLYINGSYEVSELDSMMNDIDAQISYYESQIEASEELKRNKKIQENLADLATVDFDSLEFREKQLYLKSLISKIYIDGEQVTIEWL

SEQ ID NO: 6909 - protein, 452 aa, synthetic construct
MKAAIYIRVSTREQVENYSIQAQTEKLTALCRSKDWDVYDIFIDGGYSGSNMNRPALNEMLSKLHEIDAVVVYRLDRLSRSQRDTITLIEEYFLKNNVEFVSLSETLDTSSPFGRAMIGILSVFAQLERETIRDRMVMGKIKRIEAGLPLTTAKGRTFGYDVIDTKLYINEEEAKQLRLIYDIFEEEQSITFLQKRLKKLGFKVRTYNCYNNWLTNDLYCGYVSYKDKVHVKGIHEPIISEEQFYRVQEIFTRMGKSPNMNRDSASLLNNLVVCSKCGRGFVHRRKDAKSRDKKYHYRYYSCRTYKHIHELEKCGNKIWRADKLEELIINRVNSYSLASRNVDKEDELDSLNEKLKIEHAKKKRLFDLYINGSYEVSELDSMMSDIDAQINYYESQIEANEELKKNKKIQETLADLATVDFDSLEFRKKQLYLKSLINKIYVDGERVTIEWL

SEQ ID NO: 6910 - protein, 485 aa, synthetic construct
MTKKVAIYTRVSTTNQAEEGFSIDEQIDRLTKYAEAMGWQVSDTYTDAGFSGAKLERPAMQRLINDIENKVFDTVLVYKLDRLSRSVRDTLYLVKDVFTKNKIDFISLNESINTSSAMGSLFLTILSAINEFERENIKERMTMGKLGRAKSGKSMMWTKTAFGYYHNRKTGILEIVPLQATIVEQIFTDYLSGISLTKLRDKLNESGHIGKDIPWSYRTLRQTLGNPVYCGYIKFKDSLFEGMHKPIIPYETYLKVQKELEERQQQAYERSNNPRPFQAKYMLSGMARCGYCGAPLRIVLGHKRKDGSRTMKYHCANRFPRKTKGVTVYNDNKKCDSGTYDLSNLENTVIDSLIGFQENNDSLLKIINGNNQPILDTSSFKKQISQIDKKIQKNSDLYLNDFITMDELRDRTDSLQAEKKLLKAKISENKFNDSTDVFELVKTQLGSIPINELSYDNKKKIVNNLVSKVDVTADNVDIIFKFQLA

SEQ ID NO: 6911 - protein, 452 aa, synthetic construct
MKAAIYIRVSTREQVENYSIQAQTEKLTALCRSKDWDVYDIFVDGGYSGSNMNRPALNEMLSKLHEIDAVVVYRLDRLSRSQRDTVTLIEEYFLKNNVEFVSLSETLDTSSPFGRAMIGILSVFAQLERETIRDRMVMGKIKRIEAGLPLTTAKGRTFGYDVIDTKLYINEEEAKQLQLIYDIFEEEQSITSLQKRLKKLGFKVRTYNRYNNWLTNDLYCGYVSYKDKVHVKGIHEPIISEEQFYRVQEIFTRMGKNPNMNRDSASLLNGLVVCSKCGLGFVHRRKDAMSRDKKYHYRYYSCKTYKHIHELEKCGNKIWRADKLEELIINRVNNYSLASRNVDKEDELDSLNEKLRIEHAKKKRLFDLYINGGYEVSELDSMMNDIDAQINNYESQIEANEELRKNKKIQENLAHLATVDFDSLEFREKQLYLKSLINKIYIDGEQVTIEWL

SEQ ID NO: 6912 - protein, 452 aa, synthetic construct
MKAAIYIRVSTREQVENYSIQAQTEKLTALCRSKDWDVYDIFIDGGYSGSNMNRPALNEMLSKLHEIDAVVVYRLDRLSRSQRDTITLIEEYFLKNNVEFVSLSETLDTSSPFGRAMIGILSVFAQLERETIRDRMVMGKIKRIEAGLPLTTAKGRTFGYDVIDTKLYINEEEAKQLQLIYDIFEEEQSITSLQKRLKKLGFKVRTYNRYNNWLTNDLYCGYVSYKDKVHVKGIHEPIISEEQFYRVQEIFTRMGKNPNMNRDSASLLSNLVVCSKCGLGFVHRRKDTMSRGKKYHYRYYSCKTYKHTHELEKCGNKIWRADKLEELITNRVNNYSFANRNADKEDELDSLNEKLKIEHAKKKRLFDLYINGSYNVSELDSMMSDIDAQINYYESQIEANGELKKNKKIQENLADLATVDFDSLEFREKQLYLKSLINKIYIDGEQVTIEWL

SEQ ID NO: 6913 - protein, 452 aa, synthetic construct
MKAAIYIRVSTREQVENYSIQAQTEKLTALCRSKDWDVYDIFIDGGYSGSNMNRPALNEMLSKLHEIDAVVVYRLDRLSRSQRDTITLIEEYFLKNNVEFVSLSETLDTSSPFGRAMIGILSVFAQLERETIRDRMVMGKIKRIEAGLPLTTAKGRTFGYDVIDTKLYINEEEARQLQLIYDIFEEERSITFLQKRLKKLGFKVRTYNCYNNWLTNDLYCGYVSYKDKVHVKGIHEPIISEEQFYRVQEIFTRMGKNPNMNRDSASLLNNLVVCSKCGLGFVHRRKDAMSRDKKYHYRYYSCKTYKRIHELEKCGNKIWRADKLEELIINRVNSYSLVSRNVDREDELDSLNEKLKIEHAKKKRLFDLYINGSYEVSELDSMMSDIDAQINYYESRIEANEELKKNKKIQENLADLATVDFDSLEFREKQLYLKSLINKIYIDGEQVTIEWL

SEQ ID NO: 6914 - protein, 452 aa, synthetic construct
MKAAIYIRVSTREQVENYSIQAQTEKLTALCRSKDWDVYDIFIDGGYSGSNMNRPALNEMLSKLHEIDAVVVYRLDRLSRSQRDTITLIEEYFLKNNVEFVSLSETLDTSSPFGRAMIGILSVFAQLERETIRDRMVMGKIKRVEAGLPLTTAKGRTFGYDVIDTKLYINEEEAKQLRLIYDIFEEEQSITFLQKRLKKLGFKVRTYNRYNNWLTNDLYCGYVSYKDKVHVKGIHEPIISEEQFYRVQEIFTRMGKNPNMNHASASLLNNLVVCSKCGLGFVHRRKDTVSRGKKYHYRYYSCKTYKHTHELDKCGNKIWRADKLEELIINRVNNCSFASRNVDKEDELDSLNEKLKIEHAKKKRLFDLYINGSYEVSELDSMMNDIDAQINYYESQIEANEELRKNKKIQENLADLATVDFGSLEFREKQLYLKSLINKIYIDGEQVTIEWL

SEQ ID NO: 6915 - protein, 485 aa, synthetic construct
MTKKVAIYTRVSTTNQAEEGYSIDEQIDRLTKYAEAMGWQVSDTYTDAGSSGAKLERPAMRRLINDIENKAFDTVLVYKLDRLSRSVRDTLYLVKDVFTKNKIDFISLNESIDTSSAMGSLFLTILSAINEFERENIRERMTMGKLGRAKSGKSMMWTKTAFGYYHNRKTGILEIVPLQAAIVEQIFTDYLSGISLTKLRDKLNESGHVGKDIPWSYRTLRQTLDNPVYCGYIKFKGSLFEGMHKPIIPYETYLKVQKELEERQQQTYERNNNPRPFQAKYMLSGMARCGYCGAPLRVVLGHRRKDGSRTMKYHCANRFPRKTKGVTVYDDNKKCDSGTYDLSNLENTVIDNLIGLQENNDSLLKIINGNNQPILDTSGLIKQISQIDKKIQKNSDLYLNDFITMDELKDRTNSLQAEKELLKAKISENKFNDSTDVFELVRTQLGSIPINELSYDNKKKIVNNLVSKVDVTADNVDIIFKFQLA

SEQ ID NO: 6916 - protein, 452 aa, synthetic construct
MKAAIYIRVSTREQVENYSIQAQTEKLTALCRSKDWDVYDIFIDGGYSGSNMNRPALNEMLSKLHEIDAVVVYRLDRLSRSQRDTITLIEEYFLKNNVEFVSLSETLDTSSPFGRAMIGILSVFAQLERETIRDRMVMGKIKRIEAGLPLTTAKGRTFGYDVIDTRLYINEEEAKQLQLIYDIFEEEQSITFLQKRLKELGFKVHTYNRYNNWLTNDLYCGYVSYKDKVHVKGIHEPIISEEQFYRVQEIFTRMGKNPNTNRDSASLLNNLVVCSKCGLGFVHRRKDAMSRDKKYHYRYYSCKTYKHIHELEKCGNKIWRADELEELIINRVNNYSLASRNVDKEDELDSLNEKLKTEHAKKKRLFDLYINGSYEVSELDSMMNDIDAQISYYESQIEANEALIKNKKIQENLANLATVDFDSLEFREKQLYLKSLINKIYIDGEQVTIEWL

SEQ ID NO: 6917 - protein, 452 aa, synthetic construct
MKAAIYIRVSTREQVENYSIQAQTEKLTALCRSKDWDVYDIFIDGGYSGSNMNRPALNEMLSKLHEIDAVVVYRLDRLSRSQRDTITLIEEYFLKNNVEFVSLSETLDTSSPFGRAMIGILSVFAQLERETIRDRMVMGKIKRIEAGLPLTTAKGRTFGYDVIDTKLYINEEEAKQLQLIYDIFEEERSITFLQKRLKKLGFKVRTYNRYSSWLTNDLYCGYVSYKDKVHVKGIHEPIISEEQFYRVQEIFARMGKNPNMNRDSASLLNNLVVCSKCGLGFVHRRKDTMSRGKKYHYRYYSCRTYKHTHELEKCGNKIWRADKLEELIINRVNNYGFASRNVDKEDELGSLNEKLKIEHAKKRRLFDQYINGSYEVSELDSMMNDIDAQINYYESQIEASEGLKRNKKIQENLADLAAVDFDSLEFREKQLYLKSLISKIYIDGEQVTIEWL

SEQ ID NO: 6918 - protein, 485 aa, synthetic construct
MTKKVAIYTRVSTTNQAEEGFSIDEQIDRLTKYAEAMGWQVSDTYTDAGFSGAKLERPAMQRLINDIENKAFDTVLVYKLDRLSRSVRDTLYLVKDVFTKNKVDFISLNESIDTSSAMGSLFLTILSAINEFERENIKERMTMGKLGRAKSGKSMMWTKTAFGYYHNRKTGILEIVPLQATIVEQIFTDYLSGISLTKLRDKLNESGHIGKDIPWSYRTLRQTLDNPVYCGYIKFKDSLFEGLHKPIIPYETYLKVQKELEERQQQTYERNSNPRPFQAKYMLSGTARCGYCGAPLRIVLGHKRKDGSRTMKYHCANRFPRKTKGVTVYIDNKKCDSGTYDLSDLENTVIDNLIGFQENNDSLLKIINGNNQPILDTSSLKKQISQIDKKIQKNSDLYLNDFITMDELKDRTDSLQAEKKLLKAKISENKFNDSADVFELVKTQLGSIPINELSYDNKKKIVNNLVSKVDVTADNVDIIFKFQLA

SEQ ID NO: 6919 - protein, 452 aa, synthetic construct
MKAAIYIRVSTREQVENYSIQAQTEKLTALCRSKDWDVYGIFIDGGYSGSNMNRPALNEMLSKLHEIDAVVVYRLDRLSRSQRDTITLIEEYFLKNNVEFVSLSETLDTSSPFGRAMIGILSVFAQLERETIRDRMVMGKIKRIEAGLPLTTAKGRTFGYDVIDTKLYINEEEAKQLQLIYDIFEEEQSITFLQRRLKKLGFKVHTYNRYNNWLTNDLYCGYVSYKDKVHVKGIHEPIISEEQFYRVQEIFTRMGKNPNMNRDSASLLNNLVVCSKCGLGFVHRRKDTMSRGKKYHYRYYSCKTYKHIHELEKCGNKIWRADKLEELIINRVNNYSFASRNADKEDELDSLNEKLRIEHAKKKRLFDLYINGSYEVSELDSVMNDIDAQINYYESQIEANEELKRNKKIQENLAELATVDFDSLEFREKQLYLKSLINKIYIDGEQVTIEWL

SEQ ID NO: 6920 - protein, 452 aa, synthetic construct
MKAAIYIRVSTREQVENYSIQAQTEKLTALCRSKDWDVYDVFIDGGYSGSNMNRPALNEMLSKLHEIDAVVVYRLDRLSRSQRDTITLIEEYFLKNNVEFVSLSETLDTSSPFGRAMIGILSVFAQLERETIRDRMVMGKIKRIEAGLPLTTAKGRTFGYDVIDTKLYINEEEAKQLRLIYDIFEEVQSITFLQKRLKKLGFKVRTYNRYNNWLTNDLYCGYVSYKDKVHVKGIHEPIISEEQFYRVQEIFTRMGKNPNMNRDSASLLNNLVVCSKCGLGFVHRRKDAMSRDKKYHYRYYSCKTYKHIHELEKCGNKIWRADKLEELIINRVNDYSLASRNVVKEDELDSLNEKLKIEHAKKKRLFDLYINGNYEVSELDSIMSDIDAQINYYESQIEANEELKKNKRVQENLAHLATVDFDGLEFREKQLYLKSLINKIYIDGEQVTIEWL

SEQ ID NO: 6921 - protein, 485 aa, synthetic construct
MTKKVAIYTRVSTTNQAEEGFSIDEQIDRLTKYAEAMGWQVSDTYTDAGSSGAKLERPAMQRLINDIENKAFDTVLVYKLDRLSRSVRDTLYLVKDVFTKNKIDFVSLSESIDTSSAMGSLFLTILSAINEFERENIKERMSMGKLGRAKSGKSMMWTKTAFGYSHSRKTGILEIVPLQATIVEQIFTDYLSGISLTKLRDKLNESGHIGKDIPWSYRTLRQTLDNPVYCGYIKFKDSLFEGMHKPIIPYETYLKVQKELEERQQQTYERNNNPRPFQAKYMLSGMARCGYCGAPLRIVLGHKRKDGGRTMRYHCANRFPRKTKGVTVYNDNKKCDSGTYDLSNLENTVIDNLVGFQENSDSLLKIINGTNQPILDTSSLKEQISQIDKKIQKNSDLYLNDFITMDELKDRTDSLQAEKKLLKAKISENKFNDSTDVFELVKTQLGSIPINELSYDNKKKIVNNLVSKVDVTADNVDIIFKFQLA

SEQ ID NO: 6922 - protein, 452 aa, synthetic construct
MKAAIYIRVSTQEQVGNYSIQAQTEKLTALCRSKGWDVYDIFIDGGYSGSNMNRPALNEMLSKLHEIDAVVVYRLDRLSRSQRDTTTLIEEYFLKNNVEFVSLSETLDTSSPFGRAMIGILSVFAQLERETIRDRMVMGKIKRIEAGLPLTTAKGRTFGYDVIGTKLYINEEEAKQLQLIYDIFEEEQSITSLQKRLKKLGFKVRTYNRYNNWLTNDLYCGYVSYKDKVHVKGIHEPIISEEQFYRVQEIFTRMGKSPNMNRDSASLLSNLVVCSKCGLGFVHRSKDTKSRGKKYHYRYYSCKTYKHTHELEKCGNKTWRADKLEELIINRVNNYSFASRNGDKEDELDSLNEKLKIEHAKKKRLFDLYINGSYEVSELVSMMNDIDAQINYYESQIEAKEELRKNKKIQENLADLATADFDSLEFREKQLYLKSLINKIYIDGEQVTIEWL

SEQ ID NO: 6923 - protein, 452 aa, synthetic construct
MKAAIYIRVSTQEQVGNYSIQAQTEKLTALCRSKDWDVYDIFIDGGYSGSNMNRPALNEMLSKLHEVDAVVVYRLDRLSRSQRDTTTLIEEYFLKNNVEFVSLSETLDTSSPFGRAMIGILSVFAQLERETIRDRMVMGKIKRIEAGLPLTTAKGRTFGYDVIDTKLYVNEEEAKQLRLIYDIFEEVQSITSLQKRLKGLGFKVRSYNRYNNWLTNDLYCGYVSYKDEVHVKGIHEPIISEEQFYRVQEIFTRMGKNPNTNRDSASLLNNLVVCSKCGLGFVHRSKDTMSRGKKYHYRYYSCKTYKHTHELEKCGNKTWRADRLEELIINRVNNYSFASRNMAKEDELDSLNEKLKIEHAKKRRLFDLYINGSYEVSELDSMMNDIDAQINYYESQIEANEELKKNKKIQEDLADLATVDFDSLEFREKQLYLKGLINKIYIDGEQVTIEWL

SEQ ID NO: 6924 - protein, 452 aa, synthetic construct
MKAAIYIRVSTREQVENYSIQAQTEKLTALCRSKDWDVYDIFIDGGYSGSNMNRPALNEMLSKLHEIDAVVVYRLDRLSRSQRDTITLIEEYFLKNNVEFVSLSETLDTSSPFGRAMIGILSVFAQLERETIRDRMVMGKIKRIEAGLPLTTAKGRTFGYDVTDTKLYINEEEAKQLQLIYDIFEEEQSITFLQKRLKKLGFKVRSYNRYNNWLTNDLYCGYVSYKDKVHVKGIHEPIISEEQFYRVQEIFTRMGKNPNMNRDSASLLSNLVVCSKCGLSFVHRRKDTMSRGKKYHYRYYSCKTYKHPHELEKCGNKIWRADKLEELIISRVNNYSFASRNVDKEDELDSLYEKLKTEHAKKKRLFDLYLNGSYGVSELDSMTNDIDAQINYYESQIEANEELKKNKKIQENLANLATVDFDGLEFREKQLYLKSLINKIYIDGEQVTIEWL

SEQ ID NO: 6925 - protein, 452 aa, synthetic construct
MKAAIYIRVSTREQVENYSIQAQTEKLTALCRSKDWDVYDIFIDGGYSGSNMNRPALNEMLSKLHEIDAVVVYRLDRLSRSQRDTITLIEEYFLKNNVEFVSLSETLDTSSPFGRAMIGILSVFAQLERETIRDRMVMGKIKRVEAGLPLTTAKGRTFGYDVIDTKLYINEEEANQLQLIYDIFEEEQSITSLQKRLKKLGFKVRTYNRYNNWLTNDLYCGYVSYKDKVHVKGIHEPIISEEQFYRVQEIFTRMGKNPNMNRDSASLLSNLVVCSKCGLGYVHRRKDTMSRGKKYHYRYYSCKTYKHTHELEKCGNKIWRADKLEELIINRVNNYSFASRNVDKEDELDSLNEKLKIEHAKKKRLFDLYINGSYEVSELDCMMNNIDAQINYYESQIEANEELKKDKKIQESLANLATVDYDSLEFREKQLYLKSLINKIYIDGEQVTIEWL

SEQ ID NO: 6926 - protein, 485 aa, synthetic construct
MTKKVAIYTRVSTTNQAEEGFSIDEQIDRLTKYAEAMGWQVSDTYIDAGLSGAKLERPAMQRLINDIENKAFDTVLVYKLDRLSRSVRDTLYLVKDVFTKNKIDFISLNESIDTSSAMGSLFLTILSAINEFERENIKERMTMGKLGRAKSGKSMMWTKTAFGYYHNRKTGILEIVPLQATIVEQIFTDYLSGISLTKLRDKLNESGHIGKDIPWSYRTLRQTLDNPVYCGYIKFKDSLFEGMHKPIIPYETYLKVQKELEVRQQQAYERNNNPRPFQAKYMLSGMARCGYCGAPLRIVLGHRRKDGSRTMKYHCANRFPHKTKGVTVYNDNKKCDSGTYDLSNLENTVIDNLIGLQENNDSLLKIINGNNQPILDTSSFKKQISQIDKKIQKNSDLYLNDFITMDELKDRTDGLQAEKKLLKAKISENKFSDSTEVFELVKTQLGSIPINELSYDNRKKIVNNLVSKVDVTADNVDIIFKFQLA

SEQ ID NO: 6927 - protein, 469 aa, synthetic construct
MSYTTPVRAAVYLRISEDRSGEQLGVARQREDCLRLCDQRKWVPVEYLDNDVSASTGKRRPAYEQMLADITAGKIAAVVAWDLDRLHRRPIELEAFMSLADEKRLALATVAGDVDLATPQGRLVARLKGVVAAHETEHKKARQRRAARQKAERGHPNWSKAFGYLPGPNGPEPDPRTAPLVKQAYADILAGASLGDVCRQWNDAGAFTITGRPWTTTTLSKFLRKPRNAGLRAYKGARYGPVDRDAIVGKAQWSPLVDESTFWAAQAVLDAPGRAPGRKSVRRHLLTGLAGCGKCGNRLAGSYRTDGRVVYVCKACYGVAILADNIVPILYHVVAERLAMPDAVDLLRHEIHDAAEAEAIRLELEALYGELDRLAVERAEGLLTARQVKISTDIVNAKITKLQARQLDQERLRVFDGIPLGTPQVAGMIAELSPDRFRAVLDVLAEVVVQPVGKSGRIFNPERVQVNWR

SEQ ID NO: 6928 - protein, 452 aa, synthetic construct
MKAAIYIRVSTQEQVENYSIQAQTEKLTALCRSKDWDVYDIFIDGGYSGSNMNRPALNEMLSKLHEIDAVVVYRLDRLSRSQRDTITLIEEYFLKNNVEFVSLSETLDTSSPFGRAMIGILSVFAQLERETIRDRMVMGKIKRIEAGLPLTTAKGRTFGYDVIDTKLYINEEEAKQLQLIYDIFEEEQSITFLQKRLKKLGFKVRTYSRYNNWLTNDLYCGYVSYKDKVHVKGIHEPIISEEQFYRVQEIFTRMGKNPNMNRDSASLLNNLVVCSKCGLGFVHRRKDTMSRGKKYHYRYYSCKTYKHTHELEKCGNKIWRADKLEELIINRVNNYSFASRNADKEDELDSLNEKLKIEHTKKKRLFDLYINGSYEVSELDSMMNDINAQINYYESQIEANKELRKNKKIQENLADLATVDFDSLEFREKQLYLKSLINKIYIDGEQVTIEWL

SEQ ID NO: 6929 - protein, 469 aa, synthetic construct
MSYTTPVRAAVYLRISEDRSGEQLGVARQREDCLNLCDQRKWVPVEYLDNDVSASTGKRRPAYEQMMADITAGKIEAVVAWDLDRLHRRPIELEAFMSLADEKRLALATVAGDVDLATPQGRLVARLKGCVAAHETEHKKARQRRAARQKAERGHPNWSKAFGYLPGPNGPEPDPRTAPLVKQAYADILAGASLGDVCRQWNDAGAFTITGRPWTTTTLSKFLRKPRNAGLRAYKGARYGPVDRDAIVGKAQWSPLVDEATFWAAQAVLDAPGRAPGRKSVRRHLLTGLAGCGKCGNHLAGSHRTDGQVVYVCKACHGVSILAVNIEPILYHIVAERLAMPDAVDLLRREIHDAAEAETIRLELETLYGELDRLAVERAEGLLTARQVKISTDIVNAKIAKLQAHQLDQERLRVFDGIPLGTPQVAGMIAELSPNRLRAVLDVLVEVVVQPVGKSSRIFNPERVQVNWR

SEQ ID NO: 6930 - protein, 452 aa, synthetic construct
MKAAIYIRVSTREQVENYSIQAQTEKLTALCRSKDWDVYDIFIDGGYSGSNMNRPALNEMLSKLHEIDAVVVYRLDRLSRSQRDTITLIEEYFLKNNVEFVSLSETLDTSSPFGRAMIGIMSVFAQLERETIRDRMVMGKIKRIEAGLPLTTAKGRTFGYDVIDTKLYINEEEAKQLRLIYDIFEEEQSITSLQKRLKKLGFKVRTYSRYNNWLTNDLYCGYVSYKDKVHVKGIHEPIISEEQFYRVQEIFTRMGKNPNMNRDSASLLNNLVVCSKCGLGFVHRRKDTMSRGKKYHYRYYSCKTYKHIHELEKCGNKIWRADKLEELIINRVNNYSFACRNVDKEDELDSLNEKLKIEHAKKKRLFELYINGSYEVSELDSMMNDIDTQIDYYESQIEANEKLKRNKKIQENLADLASVDYDSLEFREKQLYLKSLINKIYIDGEQVTIEWL

SEQ ID NO: 6931 - protein, 452 aa, synthetic construct
MKAAIYIRVSTQEQVENYSIQAQTEKLTALCRSKGWDVYDIFIDGGYSGSNMDRPALNEMLSKLHEIDAVVVYRLDRLSRSQRDTITLIEEYFLKNNVEFVSLSETLDTSSPFGRAMIGILSVFAQLERETIRDRMVMGKIKRIEAGLPLTTAKGRTFGYDVIDTKLYINEEEAEQLQLIYDIFEEEQSITFLQKRLKKLGFKVHTYSRYNNWLTNDLYCGYVSYKDKVHVKGIHEPIISEEQFYRVQEIFTRMGKNPNMNRDSASLLNNLVVCGKCGLGFVHRRKDTLSRGKKYHYRYYSCKTYKHIHELEKCGNKIWRADKLEELIINRVNNHSFASRNVDKGDELDSLNEKLKIEHAKRKRLFDLYINGSYEVSELDSMMSDIDAQINYYESQIEANEELRKNKKIQKNLADLATVDYDSLEFREKQLYLKSLINKIYIDGEQVTIEWL

SEQ ID NO: 6932 - protein, 452 aa, synthetic construct
MKAAIYIRVSTREQVENYSIQAQTEKLIALCRSKDWDVYDIFIDGGYSGSNMNRPALNEMLGKLHEIDAVVVYRLDRLSRSQRDTITLIEEYFLKNNVEFVSLSETLDTSSPFGRAMIGILSVFAQLERETIRDRMVMGKIKRIEAGLPLTTAKGRTFGYDVIDTRLYINEEEAKQLQLIYDIFEEEQSITFLQKRLKKLGFKVRTYNCYNSWLTNDLYCGYVSYKDIVHVKGIHEPIISEEQFYRVQEIFTRMGKNPNMNRDSASLLNNLVVCSKCGLSFVHRRKDTMSRGKKYHYRYYSCKTYKHTHELEKCGNKIWRADKLEELIINRVNNYSFASRNVDKAEELDSLNEKLKVEHAKKKRLFDLYINGSYNVSELDSMMNDIDAQINYYESQIEANEGLKKNKKIQENLAGLATVDFDSLGFREKQLYLKSLINKIYIDGEQVTIEWL

SEQ ID NO: 6933 - protein, 452 aa, synthetic construct
MKAAIYIRVSTREQVENYSIQAQTEKLTALCRSKDWDVYDIFIDGGYSGSNMNRPALNEMLSKLHEIDAVVVYRLDRLSRSQRDTITLIEEHFLKNNVEFVSLSETLDTSSPFGRAMIGILSVFAQLERETIRDRMVMGKIKRIEAGLPLTTAKGRTFGYDVIDTKLYINEEEAKQLRLIYDIFEEEQSITFLQKRLKKLGFKVRTYNRYNNWLTNDLYCGYVSYKDKVHVKGIHEPIISEEQFYRVQEIFTRMGKSPNMNRDSASLLNNLVVCSKCGLGFVHRRKDAMSRDKKYHYRYYSCKTYKHIHELEKCGNKIWRADKLEELIINRVNNYSLASRNVDKEGELDSLSEKLKIEHAKKKRLFDLYINGSYEVSELDSMMNDIDAQINYYESQIEANEELKKNKKIQENLADLATVDFDSLEFREKQLYLKSLINKIYIDGEQVTIEWL

SEQ ID NO: 6934 - protein, 452 aa, synthetic construct
MKAAIYIRVSTREQVENYSIQAQTEKLTALCRSKGWDVYDIFIDGGYSGSNMNRPALNEMLSKLHEIDAVVVYRLDRLSRSQRDTITLIEEYFLKNNVEFVSLSETLDTSSPFGRAMIGILSVFAQLERETIRDRMVMGKIKRIEAGLPLTTAKGRTFGYDVIDTKLYINEEEAKQLQLIYDIFEEEQSITFLQKRLKELGFKVRTYNRYNNWLTNDLYCGYVSYKDKVHVKGIHEPIISEEQFYRVQEIFTRMGENPNMNRESASLLNNLVVCSKCGLGFVHRRKDAMSRDKKYHYRYYSCKTYKHIHELEKCGNKIWRADKLEELIINRVNNYSFASRNADKEDELDSLNEKLKIEHAKKKRLFDLYINGSYGVSELDSMMNDIDAQINYYESQIEANEELKKNRKIQENLAHLATVDFDSLEFREKQLYLKSLINKIYIDGEQVTIEWL

SEQ ID NO: 6935 - protein, 452 aa, synthetic construct
MKAAIYIRVSTREQVENYSIQAQTEKLTALCRSKDWDVYDIFIDGGYSGSNMNRPALNEMLSKLHEIDAVVVYRLDRLSRSQRDTITLIEEYFLKNNVEFVSLSETLDTSSPFGRAMIGILSVFAQLERETIRDRMVMGKIKRIEAGLPLTTAKGRTFGYDVIDTKLYINEEEAKQLRLIYDIFEEEQSITFLQKRLKKLGFKVHTYNRYSNWLTNDLYCGYVSYKDKVHVKGIHEPIISEEQFYRVQEIFTRTGKNPNMNRDSASLLNNLVVCSKCGLGFVHRRKDTMSRGKKYHYRYYSCKTYKHTHELEKCGNKIWRADKLEELVINRVNNYSFASRNVGKEDELDSLNEKLKIEHAKKKRLFDLYINGSYEVGELDSMMNDIDAQINYYESQIEANEELRKNKKIQENLADLATVDFDSLEFREKQLYLKSLINKIYIDGEQVTIEWV

SEQ ID NO: 6936 - protein, 452 aa, synthetic construct
MKAAIYIRVSTQEQVGNYSIQAQTERLTALCRSKGWDVYDIFIDGGYSGSNMNRPALNEMLSKLHEIDAVVVYRLDRLSRSQRDTTTLIEEYFLKNNVEFVSLSETLDTSSPFGRAMIGILSVFAQLERETIRDRTVMGKIKRIEAGLPLTTAKGRTFGYDVIDTKLYVNEEEAKQLRLIYDIFEEEQSITFLQKRLKKLGFKVRTYNRYNSWLTNDLYCGYVSYKDKVHVRGIHEPIISEEQFYRVQEIFTRMGKKPNMNRESASLLNNLVVCSKCGLGFVHRRKDTMCRGKKYHYRYYSCKTYKHTHELERCGNKTWRADKLEELIISRVNNYSLASRNVDKEDELDSLNEKLKIEHAKKKRLFDLYINGSYEVSELDSMMDDIDAQINYYESQIEASEELKKNKKIQENLAGLATVDFDSLEFREKQLYLKSLINKIYIDGEQVTIEWL

SEQ ID NO: 6937 - protein, 452 aa, synthetic construct
MKAAIYIRVSTREQVENYSIQAQTEKLTALCRSKDWDVYGIFIDGGYSGSNMNRPALNEMLSKLREIDAVVVYRLDRLSRSQRDTITLIEEYFLKNNVEFVSLSETLDTSSPSGRAMIGILSVFAQLERETIRDRMVMGKIKRIEAGLPLTTARGRTFGYDVIDTKLYINEEEAKQLRLIYDIFEEEQSITFLQKRLKKLGFKVRTYNRYNNWLTNDLYCGYVSYKDKVHVKGIHEPIISEEQFYRVQEIFTRMGKNPNMNRDSASLLNNLVVCSKCGLGFVHRRKDAMSRDKKYHYRYYSCKTYKHIHELEKCGNKIWRADKLEELIIKRVNNYSLASRNVDKEDELDSLSEKLKIEHAKRKRLFDLYINGSYEVSELDSMMNDIDAQISYYESQIEANEELKKDKKIQENLAYLATVDFDSLEFREKQLYLKSLINKIYIDGEQVTIEWL

SEQ ID NO: 6938 - protein, 485 aa, synthetic construct
MTRKVAIYTRVSTNNQAEEGFSIDEQTDRLTKYAEAMGWQVSDTYTDAGFSGAKLERPAMQRLINDIENKAFDTVLVYKLDRLSRSVRDTLHLVKDVFTENKIDFISLNESIDTSSAMGSLFLTILSAINEFERENIKERMTMGKLGRAKSGKSMMWTKTAFGYYHNRKTGILEVVPLQATIVEQIFTDYLSGVSLTKLRDKLNESGHIGKDIPWSYRTLRQTLDNPVYCGYIKFKDSLFEGMHKPIIPYETYLKVQKELEERQQQTYERNNNPRPFQAKYMLSGMARCGYCGAPLRIVLGHKRKDGSRTMKYHCANRFPRKTKGVTVYNDNKKCDSGTYDLSNLENTVIDNLIDFQENNNSLLKIINGNNQPILDTSSFKEQISQIDKKIQKNSDLYLNDFITMDELKDRTDSLQAEKKLLKAKISENKFNDSTDVFELVKTQLGSIPINELSYDNKKRIVNNLVSKVDVTADNVDIIFKFQLA

SEQ ID NO: 6939 - protein, 485 aa, synthetic construct
MTRKVAIYTRVSTTNQAEEGFSIDEQIDRLTKYAEAMGWQVSDTYTDAGFSGAKLGRPAMQRLISDIENKAFDTVLVYKLDRLSRSVRDTLYLVKDVFTKNKIDFISLNESIDTSSAMGSLFLTILSAINEFERENIKERMTMGKLGRAKSGKSMMWTRTAFGYYHNRKTGILEIVPLQATIVEQIFTDYLSGISLTKLRDKLNESGHIGKDIPWSYRTLRQTLDNPVYCGYIKFKDSLFEGMHKPIIPYETYLKVQRELEERQQQTYKRNNNPRPFQAKYMLSGMARCGYCGAPLRIVLGHKRKDGSRTMKYHCANRFPRKTKGVTVYNDNKKCDSGTYDLSNLESTVIDNLIGFQEDNDSLLKIINGNNQPILDTSSLKKQISQIDKKIQKNSDLYLNDFITMDELKDRTDSLQAEKKLLEAKISENKFNDSTDVFELVKTQLGSIPINELSYDNKKKIVNNLVSKVDVTADNVDIIFKFQLA

SEQ ID NO: 6940 - protein, 469 aa, synthetic construct
MSYTTPVRAAVYLRISEDRSGEQLGVARQREDCLRLCGQRKWVPVEYLDNDVSASTGKHRPAYEQMLADIIAGKIAAVVAWDLDRLHRRPVELEAFMSLADEKRLALATVAGDVDLATPQGRLVARLKGCVAAHETEHKKARQRRAARQKAERGHPNWSKAFGYLPGPNGPEPDPRTAPLVKQAYADILAGASLGDVCRQWNDAGAFTITGRPWTTTTLSKFLRKPRNAGLRAYKGARYGPVDRDAIVGKAQWSPLVDEATFWAAQAVLDAPGRAPGRKSVRRHLLTGLAGCGKCGNHLAGSYRTDGQVVYVCKACHGVAILADNIEPILYHIVAERLAMPDAVDLLRREIHDAAEAETIRLELETLYGELDRLAVERAEGLLTARQVKISTDIVSAKITKLQAHQLDQERLRVFDGIPLGTPQVADAIAELSPDRFRAVLDVLAEVVVQPVGKGGRIFNPERVQVNWR

SEQ ID NO: 6941 - protein, 452 aa, synthetic construct
MKAAIYIRVSTREQVENYSIQAQTEKLTALCRSKDWDVYDIFIDGGYSGSNMNRPALNEMLSKLHEIDAVVVYRLDRLSRSQRDTITLIEEYFLKNNVEFVSLSETLDTSSPFGRAMIGILSVFAQLERETIRERMVMGKIKRIEAGLPLTTAKGRTFGYDVIDTKLYINEDEAKQLQLIYDIFEEERSITLLQKRLRNLGFKVRTYNRYNSWLTNDLYCGYVSYKDKVHVKGIHEPIISEEQFYRVQEIFTRMGKNPNMNRDSASLLINLVVCSKCGLGFVHRRKDTTSRGKKYHYRYYSCKTYKHTHELEKCGNKIWRADKLEELIINRVNNYSLASRNVDKEDELDSLNEKLKIEHAKKKRLFDLYINGSYEVSELDSMMNDIDAQINYYESQIEANEELKKNKKIQENLANLATMDYDSLEFREKQLYLKSLISKIYIDGEQVTIEWL

SEQ ID NO: 6942 - protein, 469 aa, synthetic construct
MSYTTPVRAAVYLRISEDRSGEQLGVARQREDCLKLCDQRKWVPVEYLDNDVSASTGKRRPAYEQMLADITAGKIAAVVAWDLDRLHRRPVELEAFMSLADEKRLALATVAGDVDLATPQGRLVARLKGSVAAHETEHKKARQRRAARQKAERGHPNWSKAFGYLPGPNGPEPDPRAAPLVKQAYADILAGASLGDVCRRWNAAGAFTITGRPWTTTTLSKFLRKPRNAGLRAYKGARYGPVDRDAIVGKAQWSPLVDEATFWAAQAVLDAPGRAPGRKSVRRHLLTGLAGCGKCGNHLAGSYRTDGQVVYVCKACHGVSILAVNIEPILYHIVAERLAMPDAVDLLCREIHDAAEAETIRLELETLHGELDRLAVERAEGLLTARQVKISTDIVNAKITKLKARQLDQERLRVFDGIPLGTPQVAGMIAELSPDRFRAVLDVMAEVVVQPVGKNGRIFNPERVQVNWR

SEQ ID NO: 6943 - protein, 469 aa, synthetic construct
MSYTTPVRAAVYLRISEDRSGEQLGVARQREDCLELCGQRKWVPVEYLDNDVSASTGKRRPAYEQMLADITAGKIAAVVAWDLDRLHRRPIELEAFMSLADEKRLALATVAGDVDLATPQGRLVARLKGSVAAHETEHKKARQRRAARQKAERGLPNWSKAFGYLPGPNGPEPDPRTAPLVKQAYADILAGASLGDVCRQWNDAGAFTITGRPWTTTTLSKFLRKPRNAGLRAYKGARYGPVDRDAIVGKAQWSPLVDEATFWAAQAVLDAPGRAPGRKSVRRHLLTGLAGCGKCGNHLAGSYRTDGRVVYVCKACHGVAILADNIEPILYHIVAERLAMPNAVDLLRREIHDAAEAETIRLELEALYGELDRLAVERAEGLLTARQVKISTDIVNAKITKLQARQLDQERLRVLDGIPLGTPQVAGVIAELSPGRFRAVLDVLAEVVVRPVGKGGRIFNPERVQVNWR

SEQ ID NO: 6944 - protein, 469 aa, synthetic construct
MCYTTPVRAAVYLRISEDRSGEQLGVARQREDCLKLCDQRKWVPVEYLDNDVSASTGRRRPAYEQMLADITAGKIAAVVAWDLDRLHRRPIELEAFMSLADEKRLALATVAGDVDLATPQGRLVARLKGSVAAHETEHKKARQRRAARQKAERGHPNWSKAFGYLPGPNGPEPDPRTAPLVKQAYADILAGASLGDVCRQWNDAGAFTITGRPWTTTTLSKFLRKPRNAGLRAYKGARYGPVDREAIVGKAQWSPLVDEATFWAAQAVLDAPGRAPGRKSVRRHLLTGLAGCGKCGNHLAGSYRTDGRVVYVCKACHGVAILADNIEPILYHIVAERLAMPDAVDLLRREILDAAEAETIRLELETLHGELDSLAVERAEGLLTARQVKICTDIVNAKITKLQARQLDQERLRVLDGIPLGTPQVAGMITELSPDRFRAVLDVLAEVVVQPVGKSGRIFNPERVQVNWR

SEQ ID NO: 6945 - protein, 469 aa, synthetic construct
MSYTTPVRAAVYLRISEDRSGEQLGVARQREDCLKLCDQRKWVPVEYLDNDVSASTGKRRPAYEQMLADITAGKIAAVVAWDLDRLHRRPIELEVFMSLADEKRLALATVAGDVDLATPQGRLVARLKGSVAAHETEHKKARQRRAARQKAERGYPNWSKAFGYLPGPNGPEPDPRTAPLVKQAYADILAGASLGDVCRQWNDAGALTITGRPWTTTTLSKFLRKPRNAGLRAYKGARYGPVDRDAIVGKAQWSPLVDEATFWAAQAVLDAPGRAPGRKSVRRHLLTGLAGCGKCGNHLAGSYRTDGRVVYVCKACHGVAILADNIEPILYHIVAERLTMPDAVDLLRREIHDAAEAETIRLELETLYGELDRLAVERAEGLLTARQVKISTDIVNAKITKLQARQQDQERLRVLDGIPLGTPQVAGMIAELSPDRFRAVLDVLAEVVVQPVGKSGRIFNPERVQVNWR

SEQ ID NO: 6946 - protein, 469 aa, synthetic construct
MSYTTPVRAAVYLRVSEDRSGEQLGVARQREDCLELCGQRKWEPVEYLDNDVSASTGKRRPAYEQMLADITAGKIAAVVAWDLDRLHRRPIELEAFMSLADEKRLALATVAGDVDLATPQGRLVARLKGSVAAHETEHKKERQRRAARQKAERGYPNWSKAFGYLPGPNGPEPDPRTAPLVKRAYADILAGASLGDVCRQWNDADAFTITGRPWTTTTLSKFLRKPRNAGLRAYKGARYGPVDRDAIVGKAQWSPLVDGATFWAAQAVLDAPGRAPGRKSVRRHLLTGLAGCGKCGNHLAGSYRTDGRVVYVCKACHGVAILADNIEPILYHIVAERLAMPDAVDLLHREIHDAAEAETIRLELETLYGELDRLAVERAEGLLTARQVKISTDIVNAKITKLKARQLDQERLRVFDGIPLGTPRVAGMIAELSPNRFRAVLDVLAEVVVQPVGKSGRTFNPERVQVNWR

SEQ ID NO: 6947 - protein, 452 aa, synthetic construct
MKAAIYIRVSTREQVENYSIQAQTEKLTALCRSKDWDVYDIFIDGGYSGSNMNRPALNEMLSKLHEIDAVVVYRLDRLSRSQRDTITLIEEYFLKNNVEFVSLSETLDTSSPFGRAMIGILSVFAQLERETIRDRVVMGKIKRIEAGLPLTTAKGRTFGYDVIDTKLYINEEEAKQLQLIYDIFEEEQSITFLQKRLKKLGLKVRTYNRYNNWLTNDLYCGYVSYKDKVHVRGIHEPIISEEQFYRVQEIFTRMGKNPNMNRGSASLLNNLVVCSKCGLGFVHRRKDITSHGKKYHYRYYSCKTYKHIHELEKCGNKIWRADELEKLVINRVNSYSVASRNVDKEDELDSLNEKLKIEHAKKKRLFELYINGSYGVSELDCMMNDIDAQINYYESQIEANEELKKNKRIQENLAHLATVDFDSLEFREKQLYLKSLINKIYIDGEQVTIEWL

SEQ ID NO: 6948 - protein, 452 aa, synthetic construct
MKAAIYIRVSTREQVENYSIQAQTEKLTALCRSKDWDVYDIFIDGGYSGSNMSRPALNEMLSKLHEIDAVVVYRLDRLSRSQRDTITLIEEYFLKNNVEFVSLSETLDTSSPFGRAMIGVLSVFAQLERETIRDRMVMGKIKRIEAGLPLTTAKGRTFGYDVIDTKLYINEEEAKQLQLIYDIFEEEQSITLLQKRLKKLGFKVRTYNRYNNWLTNDLYCGYVSYKDKVRVKGIHEPIISEEQFYRVQEIFTRMGKNPNMNRDSASLLNNLVVCSKCGLGFVHRRKDTTSRGKKYHYRYYSCKTYKHIHELEKCGNKIWRADKLEELIINRVNSYSFASRNVDKEVELDSLNEKLKVEYAKKRRLFDLYINGSYEVSELDSMMNDIDAQINYYESQIEANEELRKNKKIQENLADLATVDYDSLEFREKQLYLKSLINKIYIDGEQVTIEWQ

SEQ ID NO: 6949 - protein, 452 aa, synthetic construct
MKAAIYIRVSTREQVENYSIQAQTEKLTALCRSKDWDVYDIFIDGGYSGSNMNRPALNEMLSKLHEIDAVVVYRLDRLSRSQRDTITLIEEYFLKNNVEFVSLSETLDTSSPFGRAMIGILSVFAQLERETIRDRMVMGKIKRIEAGLPLTTAKGRTFGYDVIDTKLYINEEEAKQLQLIYDIFEEEQSITFLQKRLKKLGFKVRTYSCYNSWLTNDLYCGYVSYKDKVHVKGIHEPIISEEQFYRVQEIFTRMGKNPNMNRDSASLLSNLVVCSKCGLGFVHRRKDTMSRGKKYHYRYYSCKTYKHTYELEKCGNKIWRADKLEELIINRVNNYSLASRNVDKEDELDSLNEKLKVEHAKKKRLFDLYVNGSYEVSELDSMMNDIDMQINYYESQIEANEGLKKNKKIQENLADLATVDFDSLEFRKKQLYLKSLINKIYIDGEQVTIEWL

SEQ ID NO: 6950 - protein, 485 aa, synthetic construct
MTKKVAIYTRVSTTNQAEGGFSIDEQIDRLTKYAEAMGWQVSDTYTDAGFSGAKLERPAMQRLTNDIENRAFDTVLVYKLDRLSRSVRDTLYLVKDVFTKNKIDFISLHECIDTSSAMGSLFLTILSAINEFERENIRERMTMGKLGRAKSGKSMMWTKTAFGYYHNRKTGILEIVPLQATVVEQIFTDYLSGISLTKLRDKLNESGHIGKDIPWSYRTLRQTLDNPVYCGYIKFKDSLFEGMHKPIIPYETYLKVQKELEERQQQTYERNNNPRPFQAKYMLSGMARCGYCGAPLRIVLGHKRKDGSRTMKYHCANRFPRKTKGVTVYNDNKKCDSGTYDLSNLENTVIDNLIGFQENNDSLLKIINGNNQPILDTSSFNEQISQIDKKIQKNSDLYLNDFITMDELKDRTDSLQAEKKLLKAKISENKFNNSADVFELVKTQLGNIPINELSYDNKKKIVNNLVSKVDVTADNVDIIFKFQLA

SEQ ID NO: 6951 - protein, 485 aa, synthetic construct
MTKKVAIYTRVSTTNQAEEGFSIDEQIDRLTKYAEAMGWQVSDTYTDAGLSGAKLERPAMQRLINDIENKAFDTVLVYKLDRLSRSVRDTLYLVKDVFAKNKIDFISLNESIDTSSAMGSLFLTILSAINEFERENIKERMTMGKLGRAKSGKSMMWTKTAFGYYHNRKTGILEIVPLQATIVEQIFTDYLSGISLTKLRDKLNESGHIGKDIPWSYRTLRQTLDNPVYCGYIKFKDSLFEGMHKPIIPYETYLKVQKELEERQQQAYERNNNPRPFQAKYMLSGMARCGYCGAPLRIVLGHKRKDGSRTMKYHCANRFPRKTKGDTVYNDNKKCDSGAYDLSNLENTVIDILVGFQENNDSLLKIINGNSQPILDTSSVKKQISQIDKKIRKNSDLYLNDFITMDELKDRTDSLQAEKKLLEAKISENKFNDSTDVFELVKTQLGSIPVNELSYDNKKKIVNNLVSKVDVTADNVDIIFKFQLA

SEQ ID NO: 6952 - protein, 452 aa, synthetic construct
MKAAIYIRVSTREQVENYSIQAQTEKLTALCRSKDWDVYDIFIDGGYSGSNMNRPALNEMLSKLHEIDAVVVYRLDRLSRSQRDTITLIEEYFLKNNVEFVSLSETLDTSSPFGRAMIGILSVFAQLERETIRDRMVMGKIKRIEAGLPLTTAKGRTFGYNVIDSKLYINEEEAKQLQLIYDIFEEEQSITSLQRRLKELGLKVRTYNRYNNWLTNDLYCGYVSYKDKVRVKGIHEPIISEEQFYRVQEIFTRMGKNPNMNRDSASLLNNLVVCSKCGLGFVHRRKDTASRGKKYHYRYYSCKTYKHTHELERCGNKIWRADKLEELIINHVNNYSLASRNVDKEDELDSLNEKLKIEHAKKKRLFDLYINGSYEVSELDCMMNDIDAQINYYESQIEANEELKKDKKVQESLANLATVDYDSLEFREKQLYLKSLINKIYIDGEQVTIEWL

SEQ ID NO: 6953 - protein, 469 aa, synthetic construct; identical to SEQ ID NO: 440

SEQ ID NO: 6954 - protein, 452 aa, synthetic construct
MKAAIYIRVSTREQVENYSIQAQTEKLTALCRSRDWDVYDIFIDGGYSGSNMNRPALNEMLSKLHEIDAVVVYRLDRLSRNQRDTITLVEEYFLKNNVEFVSLSETLDTSSPFGRAMIGILSVFAQLERETIRDRMVMGKIKRIEAGLPLTTAKGRTFGYDVVDTKLYINEEEAKQLQLIYDIFEEEQSITFLQKRLKKLGFKVRTYNRYNNWLTNDLYCGYVSYKDKVHVKGIHEPIISEEQFYRVQEIFTRMGRNPNMNRDSASLLSNLVVCSKCGLGFVHRRKDTTSRGKKYHYRYYSCKTYKHTHELEKCGNKIWRADKLEELIINHVNSYSRASRNVDKEDELDSLNEKLKIEHAKKKRLFDLYINGSYNVSELDSMMNDIDAQINYYESQIEANEGLKKNKKIQENLAGLATVDFDSLEFREKQLYLKSLINKIYIDGEQVTIEWL

SEQ ID NO: 6955 - protein, 452 aa, synthetic construct
MKAAIYIRVSTREQVENYSIQAQTEKLTALCRSKDWDVYDIFIDGGYSGSNMNRPALNEMLSKLHEIDAVVVYRLDRLSRSQRDTITLIEEYFLKNNVEFVSLSETLDTSSPFGRAMIGILSVFAQLERETIRDRMVMGKIKRIEAGLPLTTAKGRTFGYDVIDTKLYINEEEAKQLQLIYDIFEEEQSITLLQKRLKKLGFKVRTYNRYNNWLTNDLYCGYVSYKDKVHVKGIHEPIISEEQFYRVQEIFTRMGKNPNMNRDSASLLNSLVVCSKCGLSFVHRRKDTMSRGKKYHYRYYSCKTYKHTHELEKCGNKIWRADKLEELIINRVNNYSFASRNVDKKDELDSLNEKLKIEHAKKKRLFDLYINGSYEVSELDSMMNDIDARINYYESQVEANEELRRNKKIQENLADLATVDYDSLEFREKQLYLKSLINKIYIDGEQVTIEWL

SEQ ID NO: 6956 - protein, 452 aa, synthetic construct
MKAAIYIRVSTREQVENYSIQAQAEKLTALCRSKDWDVYDVFVDGGYSGSNMNRPALNEMLSKLHEIDAVVVYRLDRLSRSQRDTITLIEEYFLKNNVEFVSLSETLDTSSPFGRAMIGILSVFAQLERETIRDRMVMGKIKRIEAGLPLTTAKGRTFGYDVIDTKLYINEEEARQLQLIYDIFEEEQSITFLQKRLKKLGFKVRTYNCYNNWLTNDLYCGYVSYKDKVHVKGIHEPIISEEQFYRVQEIFARMGKNPNMNRDSASLLNNLVVCSKCGLGFVHRRKDIMSRGKKYHYRYYSCKTYKHIHELEKCGNKIWRADKLEELIINRVNNYSVASRNVDKEDELDSLNEKLKIEHAKKKRLFELYINGSYEVSELDGMMNDIDAQINYYESQIVANEELKKNKKIQENLANLATVDFDSLEFREKQLYLKSLINKIYIDGEQVTIEWL

SEQ ID NO: 6957 - protein, 452 aa, synthetic construct
MEAAIYIRVSTQEQVENYSIQAQTEKLTALCRSKGWDVYDIFIDGGYSGSNMNRPALNEMLSKLHEIDAVVVYRLDRLSRSQRDTITLIEEYFLKNNVEFVSLSETLDTSSPFGRAMIGILSVFAQLERETIRDRMVMGKIKRVEAGLPLTTAKGRTFGYDVIDTKLYINKEEARQLQLIYDIFEEEQSITFLQKRLKKLGCKVRTYSCYNNWLTNDLYCGYVSYKDKVHVKGIHEPIISEEQFYRVQEIFTRMGKNPNMNRDSASLLNNLVVCSKCGLGFVHRRKDTMSRGKKYHYRYYSCKTYKHIHELEKCGNKIWRADKLEELIISRVNNYSFASRNVDKEDELDSLNEKLKIEHAKKKRLFDLYINGSYEVGELDSMMIDIDVQINYYESQIEANEELKKDKKIQENLANLATVDFDSLEFREKQLYLKSLINKIYIDGEQVTIEWL

SEQ ID NO: 6958 - protein, 485 aa, synthetic construct
MTKKVAIYTRVSTTNQAEEGFSIDEQIDRLTKYAEAMGWQVSDTYTDAGFSGAKLERPAMQRLINDIENKAFDTVLVYKLDRLSRSVRDTLHLMKDVFTKNKIDFISLNESIDTSSAMGSLFLTILSAINEFERENIKERMTMGKLGRAKSGKSMMWTKTAFGYCHNRKTGILEIVPLQATIVEQIFTDYLSGISLTKLRDKLNESGHIGKDVPWSYRTLRQTLDNPVYCGYIKFKGSLFEGMHKPIIPYETYLEVQKELEERQQQTYERNNNPRPFQAKYMLSGMARCGYCGAPLRIVLGHKRKDGSRTMKYHCANRFPRKTKGVTVYNDNKKCDSGTYDLGNLENTVIDNLIGFQKNIDSLLKIINGSNQPILDTSSFKEQISQIDKKIQKNSDLYLNDFITMDELKDRTDSLQAEKKLLEAKISENKFNDSTDVFELVKTQLGSIPINELSYDNKKKVVNNLVSKVDVTADNVDIIFKFQLA

SEQ ID NO: 6959 - protein, 469 aa, synthetic construct
MSYTTPVCAAVYLRISEDRSGEQLGVARQREDCLKLCGQRKWVPVEYLDNDVSASTGKRRPAYEQMLADITAGKIAAVVAWDLDRLHRRPIELEAFMSLADEKRLALATVAGDVDLATPQGRLVARLKGCVAAHETEHKKARQRRAARQKAERGLPNWSKAFGYLPGPNGPEPDPRTAPLVKQAYADILAGASLGDVCRQWNDAGAFTITGRPWTTTVLSKFLRKPRNAGLRAYKGARYGPVDCDAIVGKAQWSPLVDEATFWAAQAVLDAPGRAPGRKSVRRHLLTGLAGCGKCGNHLAGSYRTDGRVVYVCKVCHGVSILAVNIVPILYHIVAERLAMPDAVDLLCREIHDAAGAETIRLELEALHGELDRLAVERAEGLLTARQVKISTDIVNAKITKLQARRLNQERLRVLDGIPLGTPQVAGMIAGLSPDRFRAVLDVLAEVVVQPVGKSGRIFNPERVQVNWR

SEQ ID NO: 6960 - protein, 485 aa, synthetic construct
MTKKVAIYTRVSTTNQAEEGFSIDEQIDRLTKYAEAMGWQVSGTYTDAGLSGAKLGRPAMQRLINDIENKAFDTVLVYKLDRLSRSVRDTLYLVKEVFTKNRIDFISLNESIDTSSAMGSLFLTILSAINEFERENIKERMTMGKLGRAKSGKSMMWTKTAFGYYHNRKTGVLEIVPLQAAIVEQIFTDYLSGISLTKLRDKLNESGHIGKDIPWSYRTLRQTLDNPVYCGYIKFKDSLFKGMHKPIIPYETYLKVQKELEERQQQAYERNNNPRPFQAKYMLSGMARCGYCGAPLRIVLGHKRKDGSRTMKYHCANRFPRKTKGVTVYNDNKKCDSGTYDLSNLENTVIDNLIGFQENNDSLLKIINGNNQPILDPSSLKKQISQIDKKIQKNSDLYLNDFITMDELKDRTDSLQAEKKLLKAKISENKFNDSTDVFELVKTQLGSIPINELSYDNKKKIVNNLVSKVDVTADNVDIIFKFQLA

SEQ ID NO: 6961 - protein, 485 aa, synthetic construct
MTKKVAIYTRVSTTNQAEEGFSIDEQIDRLTKYAEAMGWQVSDTYTDAGFSGAKLERPAMQRLINDIETKAFDTVLVYKLDRLSRSVRDTLYLVKDVFTKNKIDFISLNESINTSSAMGSLFLTILSAINEFERENIKERMTMGKLGRAKSGKSMMWTKTAFGYYHNRKTGILEIVPLQATIVEQIFTDYLSGISLTKLRDKLNESGHIGKDIPWSYRTLRQTLDNPVYCGYIKFKDSLFEGMHKPIIPYETYLKVQKELEERQQQTYERNNNPRPFQAKYMLSGMARCGYCGAPLRIVLGHKRKDGSRTMKYHCANRFPRKTRGITVYNDNKRCDSGTYDLNNLENTVIDSLIGFQENDDSLLKFINGNNQPILDTSSFKNQISQIDKKIQKNSDLYLNDFITMDELRDRTDSLQAEKKLLKAKISENKFNNSTDVFELVKTQLGSIPINELSYDNKKKIVNNLVSKVDVTADNVDIIFKFQLA

SEQ ID NO: 6962 - protein, 452 aa, synthetic construct; identical to SEQ ID NO: 4351

SEQ ID NO: 6963 - protein, 452 aa, synthetic construct
MKAAIYIRVSTREQVENYSIQAQTEKLTALCRSKDWDVYDIFIDGGYSGSNMNRPALNEMLSKLHEIDAVVVYRLDRLSRSQRDTITLIEEYFLKNNVEFVSLSETLDTSSPFGRAMIGILSVFAQLERETIRDRMVMGRIKRIEAGLPLTTAKGRTFGYDVIDTRLYINEEEAKQLQLIYDIFEEEQSITFLQKRLKKLGFKVRTYNRYNNWLTNDLYCGYVSYKDKVHVKGIHEPIISEEQFYRVQEIFARMGKNPNMNRDSASLLNNLVVCSRCGLGFVHRRKDAMSRGKKYHYRYYSCKTYKHIHELEKCGNKIWRADELEELIINRVNNYSLASRNADKGDELDSLNGKLKIEYAKKKRLFELYINGRYEVSELDSMMNDIDAQINYYESQIEANEEQKKNKKIQENLAYLATVDFDSLEFREKQLYLKSLINKIYIDDEQVTIEWL

SEQ ID NO: 6964 - protein, 469 aa, synthetic construct
MSYTTPVRAAVYLRISEDRSGEQLGVARQREDCLKLCGQRKWVPVEYLDNDVSASTGKRRPAYEQMLADITAGKIEAVVAWDLDRLHRRPVELEAFMSLADEKRLALATVAGDVDLATPQGRLVARLKGSVAAHETEHKKARQRRAARQKAERGYPNWSKAFGYLSGPNGPEPDPRTAPLVKQAYADILAGASLGDVCRQWNDAGAFTITGRPWTTTTLSKFLRKPRNAGLRAYKGARYGPVDRDAIVGKAQWSPLVDEATFWAAQAVLDAPGRAPGRKSVRRHLLTGLAGCGKCGYHLAGSYRTDGRVVYVCKACHGVAILADNIEPILYRIVAERLAMPDAVDLLRRETHDAAEAEAIRLELETLYAELDRLAVERAEGLLTARQVKISTDIVNAKITKLQARQLDQERLRVLDGIPLGTPRVAGMIAELSPDRFRAVLDVLAEVVVQPVGKSGRIFNPERVQVNWR

SEQ ID NO: 6965 - protein, 469 aa, synthetic construct
MCYTTPVRAAVYLRISEDRSGEQLGVARQREDCLKLCDQRNWVPVEYLDNDVSASTGKRRPAYEQMLADITAGKIAAVVAWDLDRLHRRPVELEAFMSLADEKRLALATVAGDVDLATPQGRLVARLKGSVAAHETEHKKARQRRAARQKAERGHPNWSRAFGYLPGPDGPEPDPRTAPLVKQAYADILAGASLGDVCRQWNGAGAFTITGRPWTTTALSKFLRKPRNAGLRAYKGARYGPVDRDAIVGKAQWSPLVDEATFWAAQAVLDAPGRAPGRKSVRRHLLTGLAGCGKCGNHLAGSYRTDGKVVYVCKACHGVAILAGNIEPILYHIVAERLAMPDAVDLLRREVHDAAEAETIRLELETLYGELDRLAVERAEGLLTARQVKISTDIVNAKITKLQARQLDQERLRVLDGIPLGTPQVAGMIAELSPDRFRAVLDVLAEVVVQPVGKGGRIFNPERVQVNWR

SEQ ID NO: 6966 - protein, 452 aa, synthetic construct
MKAAIYIRVSTQEQVENYSIQAQTEKLTALCRSKGWDVYDIFIDGGYSGSNMNRPALNEMLSKLHEIDAVVVYRLDRLSRSQRDTCTLIEEYFLKNNVEFVSLSEALDTSSPFGRAMIGILSVFAQLERETIRDRMVMGKIKRIEAGLPLTTAKGRTFGYDVIDTKLYINEEEAKQLQLIYDIFEEEQSITSLQKRLKKLGFKVRTYNRYNSWLTNDLYCGYVSYKDKVHVKGIHEPIISEEQFYRVQEIFTRMGKNPNMNRDSASLLSNLVVCSKCGLGFVHRSKDTMSRGKKYHYRYYSCKTYKHTHELEKCGNKTWRADKLEELIINRVNNYNFASRNVDKEDELDSLNKKLKIEHAKKKRLFDLYIHGSYEVSELDSVMNDIDAQINYYESQIEANKELKKNKKIQENLADLATVDFDSLGFREKQLYLKSLINKIYIDGERVTIEWL

SEQ ID NO: 6967 - protein, 469 aa, synthetic construct
MSYTTPVRAAVYLRISEDRSGEQLGVARQREDCLKLCGQRKWVPVEYLDNDVSASTGKRRPAYEQMLADITAGKIAAVVAWDLDRLHRRPIELEAFMSLADEKRLALATVAGDVDLATPQGRLVARLKASVAAHETEHKKARQRRAARQKAERGHPNWSKAFGYLPGPNGPEPDPRTAPLVKQAYADILAGASLGDVCRQWNDAGAFTITGRPWTTTTLSKFLRKPRNAGLRAYKGARYGPVDRDAIVGKAQWSPLVDEATFWAAQAVLDAPGRAPGRKSVRRHLLTGLAGCGKCGNHLAGSYRTDGRVVYVCKACHGVAILADNIEPILYHVVAERLAMPDAADLLRREIHDAAEAEPIRLELETLYGELDRLAVERAEGLLTARQVKISTDIVNAKIAKLQARQLDQERLRVLDGIPLGTPQVAGVIAELSPDRFRAVLDVLAEVVVQPVGKSGRIFNPERVQVNWR

SEQ ID NO: 6968 - protein, 452 aa, synthetic construct
MKAAIYIRVSTREQVENYSIQAQTEKLTALCRSKGWDVYDIFIDGGYSGSNMNRPALNEMLSKLHEIDAVVVYRLDRLSRSQRDTITLIEEYFLKNNVEFVSLSETLDTSSPFGRAMIGILSVFAQLERETIRDRMVMGKIKRIEAGLPLITAKGRTFGYDVIDTKLYINEEEARQLQLIYDIFEEERSITFLQKRLKELGFKVRTYNCYNNWLTNDLYCGYVSYKDKVHVKGIHEPIISEEQFYRVQEIFTRMGKNPNMNRDSASLLNNLVVCSKCGLGFVHRRKDSMSRDKKYHYRYYSCKTYKHIHELEKCGNKIWRADKLEELIINRVNNYSLASRNVDKEDGLDSLNEKLKVEHAKKKRLFDLYLNGSYEVSELDSMMNDIDAQINYYESQIEANEELKKNKKIQENLADLATVDFDSLEFREKQLYLKSLINKVYIDGEQVTIEWL

SEQ ID NO: 6969 - protein, 452 aa, synthetic construct
MKAAIYIRVSTREQVENYSIQAQTEKLTALCRSKDWDVYDIFIDGGYSGSNMNRPALNEMLSKLHEIDAVVVYRLDRLSRSQRDTITLIEEYFLKNNVEFVSLSETLDTSSPFGRAMIGILSVFAQLERETIRDRMVMGKIKRIEAGLPLTTAKGRTFGYDVIDTKLYINEEEAKQLQLIYDIFEEEQSITFLQKRLKKLGFKVRSYNRYNNWLTNDLYCGYVSYKDKVHVKGIHEPIISEEQFYRVQEIFTRMGKNPNMNRDSASLLNNLVVCSKCGLGFVHRRKDIMSRGKKYHYRYYSCKTYKHIHELEKCGNKIWRADKLEELIINRVNNYSFASRNVDKENELDSLNEKLKIEHAKKKRLFDLYINGSYEVSELDSMMNDIDAQINYYESQIEANEELRKNKKIQENLANLATVDFDSLEFREKQLYLKGLINKIYIDGEQVTIEWL

SEQ ID NO: 6970 - protein, 485 aa, synthetic construct
MTKKVAIYTRVSTANQAEEGFSIDEQVDRLTKYAEAMGWQVSDTYTDAGFSGAKLERPAMRRLINDIENRAFDTVLVYKLDRLSRSVRDTLYLVRDVFTKNKIDFISLNESIDTSSAMGCLFLTILSAINEFERENIKERMTMGKLGRAKSGKSMMWTKTAFGYYHNRKTGILEIVPLQATIVEQIFTDYLSGISLTKLRDKLNESGHIGKDIPWSYRTLRQTLDNPVYCGYIKFKGSLFEGMHKPIIPYETYLRVQKELEERQQQTYERNNNPRPFQAKYMLSGMARCGYCGAPLRIVLGHKRKDGSRTMKYHCTNRFPRKTKGVTVYNDNRKCDSGTYDLSSLENTVIDYLIGFQEDSDSLLKIINGNNQPILDTSSFKKQISQIDKKIQKNSDLYLNDFISMDELRDRTDSLQAEKKLLKAKISENKFNDSTDVLELVKTQLGSIPINELSYDNKKKIVNNLVSKVDVTADNVDIIFKFQLA

SEQ ID NO: 6971 - protein, 452 aa, synthetic construct
MKAAIYIRVSTREQVENYSIQAQTEKLTALCRSKDWDVYDIFIDGGYSGSNMNRPALNEMLSKLHEIDAVVVYRLDRLSRSQRDTITLIEEYFLKNNVEFVSLSETLDTSSPFGRAMIGILSVFAQLERETIRDRMVMGKIKRIEAGLPLTTAKGRTFGYDVIDTKLYINEEEARQLQLIYDIFEEEQSITFLQKRLKKLGFKVRTYNRYNNWLTNDLYCGYVSYKDKVHVKGIHEPIISEEQFYRVQEIFTRMGKNPNMNRDSASLLNNLVVCSKCGLGFVHRRKDAMSRDKKYHYRYYSCKTYKHIHELEKCGNKIWRADKLEELIINRVNNYSIASRNADKEDELDSLNEKLKIEHAKKKRLFELYINGSYEVSELDSMMNDIDAQINYYEGQIEANEELRKDKKIQENLANLATVDFDSLEFREKQLYLKSLINKIYIDGEQVTIEWL

SEQ ID NO: 6972 - protein, 485 aa, synthetic construct
MTKKVAIYTRVSTTNQAEEGFSIDEQIDRLTKYAEAMGWQVSDTYTDAGFSGAKLERPAMQRLINDIESKAFDTVLVYKLDRLSRSVRDTLYLVKEVFTKNKIDFISLNESIDTSSAMGSLFLTILSAINEFERENIKERMTMGKLGRAKSGKSMMWTKTAFGYYHNRKTGILEIVPLQATIVEQIFTDYLSGISLTKLRDKLNESGHIGKDIPWSYRTLRQTLDNPVYCGYIKFKDSLFEGMHKPIIPYETYLKVQKELEERQQQTYERNNNPRPFQAKYMLSGVARCGYCGAPLKIVPGHKRKDGSRTMKYHCANRFPRKTKGVTVYNDNKKCDSGTYDLSDLENTVIDNLIGFQENNDSLLKIINGDNQPIPDTSSFKEQISQIDKKIQKNSDLYLNDFITMDELKDRTDSLQAEKELLKAKIIENKFNDSTDVFELVKTQLGSIPINELSYDNKKKIVNSLVSKVDVTADNVDIIFKFQPA

SEQ ID NO: 6973 - protein, 469 aa, synthetic construct
MSYTTLVRAAVYLRISEDRSGEQLGVARQREDCLKLCGQRKWVPVEYLDNDVSASTGKRRPAYEQMLADITAGEIGAVVAWDLDRLHRRPIELEAFMSLADEKRLALATVAGDVDLATPQGRLVARLKGCVAAHETEHKKARQRRAARQKAERGYPNWSRAFGYLPGPNGPEPDPRTAPLVKQAYADILAGASLGDVCRQWNDAGAFTITGRPWTATTLSKFLRKPRNAGLRAYKGARYGPVDRDAIVGKAQWSPLVDEATFWAAQAVLDAPGRAPGRKSVRRHLLTGLAGCGKCGGHLAGSYRTDGRVVYVCKACHGVAILADNIEPMLYHIVAERLAMPDAVDLLRREIHDAAEAETIRPELETLYGELDRLAVERAEGLLTARQVKISTDIVYAKITKLQTRQLDQERLRVFGGIPLGTPQVAGVIAELSPDRFRAVLDVLAEVVVQPVGKSGRIFNPERVQVNWR

SEQ ID NO: 6974 - protein, 452 aa, synthetic construct
MKAAIYIRVSTREQVENYSIQAQTEKLTALCRSKDWDVYDIFVDGGYSGSNMNRPALNEMLSKLHEIDAVVVYRLDRLSRSQRDTITLIEEYFLKNNVEFVSLSETLDTSSPFGRAMIGILSVFAQLERETIRDRMVMGKIKRIEAGLPLTTAKGRTFGYDVIDTKLYINDEEAKQLQLIYDIFEEEQSITLLQKRLKKLGFRVRTYSRYNNWLTNDLYCGYVSYKDKVHVKGIHEPIISEEQFYRVQEIFARMGKNPNMNRDSASLLNNLVVCSRCGLGFVHRRKDTTSRGKKYHYRYYSCKTYKHTYELEKCGNKIWRADKLEELVINRVNNYSSASRNVDKEDELDSLNEKLKIEHAKRKRLFDLYMNGSYEVSELDSMMNDIDAQINYYEGQIEANEELKKNKKVQENLADLATVDFDSLEFREKQLYLKSLISKIYIDGEQVTIEWL

SEQ ID NO: 6975 - protein, 469 aa, synthetic construct
MSYTTPVRAAVYLRISEDRSGEQLGVARQREDCLKLCGQRKWVPVEYLDNDVSASTGKRRPAYEQMLADITAGKIAAVVAWDLDRLHRRPIELEAFMSLADEKRLALATVAGDVDLATPQGRLVARLKGSVAAHETEHKKARQRRAARQKAERGLPNWSKAFGYLPGPNGPEPDPRTAPLVKQAYADILAGASLGDVCRQWNDAGAFTITGRPWTATTLSKFLRKPRNAGLRAYKGARYGPVDRDAIVGKAQWSPLVDEATFWAAQAVLDAPGRTPGRKSVRRHLLTGLAGCGKCGNHLAGSYRTDGRVVYVCKACHGVAILADNIEPILYHIVAERLAMPDAMDLLRREIHDAAEAETIRLELETLYGELDRLAVERAEGLLTARQVKISTDIVNAKITKLQARQLDQERLRVLDGIPLGTPQVAGMIAELSPDRFRAVLDVLAEVVVQPVGKSGRTFNPERVQVNWR

SEQ ID NO: 6976 - protein, 469 aa, synthetic construct
MSYTTPVRAAVYLRISEDRSGEQLGVARQREDCLRLCDQRKWVPVEYLDNDVSASTGKRRPAYEQMLADITAGKIAAVVAWDLDRLHRRPVELEAFMNLADEKRLALATVAGDVDLATPQGRLVARLKGCVAAHETEHKKARQRRAARQKAERGHPNWSKAFGYLPGPNGPEPDPRTAPLVKQAYADILAGASLGDVCRQWNGAGAFTITGRPWTTTTLSKFLRKPRNAGLRAYKGARYGPVDRDAIVGKARWSPLVDEATFWATQAVLDAPGRAPGRKSVRRHLLTGLAGCGKCGNHLAGSYRTDGRVVYVCKACHGVAILADNIEPILYHIVAERLAMPDAVDLLRHETHDAAEAEAIRLELETLYGELDRLAVERAEGLLTARQVKISTDIVNAKIAKLQARQLDQARLRVFDGIPLGTPQVAGMIAELSPDRFRAVLDVLAEVVVQPVGKSGRTFSPERVQVNWR

SEQ ID NO: 6977 - protein, 452 aa, synthetic construct; identical to SEQ ID NO: 3961

SEQ ID NO: 6978 - protein, 485 aa, synthetic construct
MTKKVAIYTRVSTTNQAEEGFSIDEQIDRLTKYAEAMGWQVSGTYTDAGFSGAKLERPAMQRLINNIENKVFDTVLVYKLDRLSRSVRDTLYLVKDVFTKNKIDFVSLNESIDTSSAMGSLFLTILSAINEFERENIKERMTMGKLGRAKSGKSMMWTKTAFGYYHNRKTGILEIVPLQAAIVEQIFTDYLSGISLTKLRDKLNESGHIGKDIPWSYRTLRQTLDNPVYCGYIKFKDSLFEGMHKPIIPYETYLKVQKELEERQQQTYERNNNPRPFQARYMLSGMARCGYCGAPLRIVLGRKRKDGSRTMKYHCANRFPRKTKGVTVYNDNKKCDSGTYDLSNLENTVIDNLIGLQENNDSLLKIINGNNQPILDTSSLKKQISQIDKKIQKNSDLYLNDFITMDELKDRTDSLQAEKKLLKAKISENKFNDSTDVFELVKTQLGSIPINELSYDDKKKIVNNLVSKVDVTADNVDIIFKFPLA

SEQ ID NO: 6979 - protein, 485 aa, synthetic construct
MTKKVAIYTRVSTTNQAEEGFSIDEQVDRLTKYAEAMGWQVSDTYTDAGFSGAKLERPAMQRLINDIENKAFDTVLVYKLDRLSRSVRDTLYLVKDVFTKNNIDFISLNESIDTSSAMGSLFLTILSAINEFERENIKERMTMGKLGRAKSGKSMMWTKTAFGYYHNRKTGILEVVPLQAAIVEQIFTDYLSGISLTKLRDKLNESGHIGKDIPWSYRTLRQTLDNPVYCGYIKFKDSLFEGMHKPIIPYETYLKVQKELEERQRQAYERNNNPRPFQAKYMLSGMARCGYCGAPLKIVLGHKRKDGSRTMKYHCANRFPRKTKGVTVYNDNRKCDSGTYDLSNLENTVIDSLVGFQENNDSLLKIINGNNQPILDTSSFKKQISQIDKKIQKNSDLYLNDFITMDELKDRTDSLQAEKKLLEAKISENKFNDSTDVFELVKTQLGSIPIDELSYDNKKKIVNNLVSKVVVTADNVDIIFKFQLA

SEQ ID NO: 6980 - protein, 452 aa, synthetic construct
MKAAIYIRVSTREQVENYSIQAQTERLTALCRSKDWDVYDIFIDGGYSGSNMNRPALNEMLSKLHEIDAVVVYRLDRLSRSQRDTITLIEEYFLKNNVEFVSLSETLDTSSPFGRAMIGILSVFAQLERETIRDRMVMGKIKRVEAGLPLTTAKGRTFGYDVIDTKLYINEEEAKQLQLIYDIFEEEQSITFLQKRLKKLGFKVRTYNRYNSWLTNDLYCGYVSYKDKVHVKGIHEPIISEEQFYRVQEIFARMGKNPNMNRDSASLLNNLVVCSKCGLGFVHRRKDTMSRGKKYHYRYYSCKTYKHIHELEKCGNKIWRADKLEELVINRVNNYSFASCNVDKEDELDSLNEKLKIEHARKKRLFDLYINGSYEVSELDSMMNDIDAQINYYESQIEANEELKKNKKIQESLANLTTVDYDSLEFREKQRYLKSLINKIYIDGEQVTIEWL

SEQ ID NO: 6981 - protein, 452 aa, synthetic construct
MKAAIYIRVSTREQVENYSIQAQTEKLTALCRSKDWDVYDIFIDGGYSGSNMNRPALNEMLSKLHEIDAVVVYRLDRLSRSQRDTITLIEEYFLKNNVEFVSLSETLDTSSPFGRAMIGILSVFAQLERETIRDRMVMGKIKRVEAGLPLTTAKGRTFGYDVIDTKLYINEEEAKQLRLIYDIFEEEQSITFLQKRLKKLGFKVRTYNRYNDWLTNDLYCGYVSYKDKVHVKGVHEPIISEEQFYRVQEIFTRMGKNPNMNRDSASLLNNLVVCSKCGLGFVHRRKDTMSRGKKYHYRYYSCKTYKHTHELEKCGNKIWRADELEELIINRVSNYSFASRNVDKENELDSLNEKLKIEHAKKKRLFDLYINGSYEVSELDSMMNDIDAQINYYESQIEANEELKRNKKIQENLANLATVDYDSLEFREKQLYLKSLINKIYIDGEQVTIEWL

SEQ ID NO: 6982 - protein, 485 aa, synthetic construct
MTKKVAIYTRVSTTNQAEEGFSIDEQIDRLTKYAEAMGWQVSDTYTDAGSSGAKLERPAMQRLINDIENKAFDTVLVYKLDRLSRSVRDTLYLVKDVFTKNKIDFISLNESIDTSSAMGSLFLTILSAINEFERENIKERMTMGKLGRAKSGKSMMWTKTAFGYYHNRKTGILEIVPLQATIVEQIFTDYLSGISLTKLRDKLNESGHIGKDIPWSYRTLRQTLDNPVYCGYIKFKDSLFEGMHKPIIPYETYLKVQEELEKRQQQTYERNNNPRPFQAKYMLSGMARCGYCGAPLRIVLGHKRKDGSRTMKYHCANRFPRKTKGITVYNDNKKCDSGAYDLSNLENTVIDNLIGFQENNDSLLKIINGNNQPILDASSIKKQISQIDKKIRKNSELYLNDFITMDELKNRTVSLQAEKKLLEAKISENKFNDSTDVFELVKTQLGSIPINELSYDNKKKIVSNLVSKVDVTADNVDIIFKFQLA

SEQ ID NO: 6983 - protein, 469 aa, synthetic construct
MSYTTPVRAAVYLRISEDRSGEQLGVARQREDCLKLCDQRKWVPVEYLDNDVSASTGRRRPAYEQMLADITAGKIAAVVAWDLDRLHRRPMELEAFMSLADEKRLALATVAGDVDLATPQGRLVARLKGSVAAHETEHKRARQRRAARQKAERGHPNWSKAFGYLPGPNGPEPDPRTAPLVKQAYADILAGASLGDVCRQWNDAGASTITGRPWTTTTLSKFLRKPRNAGLRAYKGARYGPVDRDAIVGKAQWSPLVDEATFWAAQAVLDAPGRAPGRKSVRRHLLTGLAGCGKCGNHLAGSYRTDGKVVYVCKACHGVAILADNIEPILYHIVAERLAMPDAVDLLRREIHDAAEAETIRLELETLHGELDRLAVERAEGLLTARQVKISTDIVSAKIAKLQARQLDQERLRVFDGIPLGTSQVAGMIAELSPDRFRAVLDVLAEVVVQPVGKGGRIFNPERVRVNWR

SEQ ID NO: 6984 - protein, 485 aa, synthetic construct
MTKKVAIYTRVSTTNQAEEGFSIDEQIDRLTKYAEAMGWQVSDTYTDAGLSGAKLERPAMQRLINDIESKAFDTVLVYKLDRLSRSVRDTLYLVKDVFTKNKIDFISLSESIDTSSAMGSLFLTILSAINEFERENIKERMTMGKLGRAKSGKSMMWTKTAFGYYHNRKTGILEIVPLQATIVEQIFTDYLSGVSLTKLRDKLNESGHIGKDIPWSYRTLRQTLDNPVYCGYIKFKDSLFEGMHKPIIPYETYLNVQKELEVRQQQTYERNNNPRPFQAKYMLSGMARCGYCGAPLKIVLGHKRKDGSRTMKYHCANRFPRKTKGVTVYNDNKKCDSGTYDLSNLEDTVIDNLIGFQENNDSLLKIINGNNQPILDTSSFKEQISQIDKKIQKNSDLYLNDFITIDELKDRTDSLQAEKKLLKAKISENKFNDSTDVFELVKTQLGSIPINELSYDNKKKIVNSLVSKVDVSADNVDIIFKFQLA

SEQ ID NO: 6985 - protein, 452 aa, synthetic construct
MKAAIYIRVSTREQVENYSIQAQTEKLTALCRSKDWDVYDIFIDGGYSGSNMNRPALNEMLSKLHEIDAVVVYRLDRLSRSQRDTITLIEEYFLKNNVEFVSLSETLDTSSPFGRAMIGILSVFAQLERETIRDRMVMGKIKRIEAGLPLTTAKGRTFGYDVIDTKLYINEEEAKQLQLIYDIFEEERSITFLQKRLKKLGFKVHTYSRYNNWLTNDLYCGYVSYKDKVHVKGIHEPIISEEQFYRVQEIFTRMGKNSNMNRDSASLLNNLVVCSKCGLGFVHRRKDTVSRGKKYHYRYYSCKTYKHTHELEKCGNKIWRADKLEKLIINRVNNYSFASRNVDKEDELDSLNEKLRIEHAKKKRLFDLYINGSYEVSELDSMMDDIDAQINYYESQIEANEELKKNKKIQESLANLATVDYDRLEFREKQLYLKSLINKIYIDGEQVTIEWL

SEQ ID NO: 6986 - protein, 485 aa, synthetic construct
MTKKVAIYTRVSTTNQADEGFSIDEQIDRLTKYAEAMGWQVSDTYTDAGFSGAKLERPAIQRLINDIGNKAFDTVLVYKLDRLSRSVRDTLYLVKDVFTKSKIDFISLSESIDTSSAMGSLFLTILSAINEFERENIKERMTMGKLGRAKSGKSMMWTKTAFGYYHNRKTGILEIVPLQATIVEQIFTDYLSGISLTKLRDKLNESGHIGKDIPWSYRTLRQTLDNPVYCGYIKFKDSLFEGMHKPIIPYETYLKVQKELEERQQQTYERNNNPRPFQAKYMLSGMARCGYCGAPLRIVLGHKRKDGSRTMKYHCANRFPRKTRGITVYNDNKKCDSGTYELSNLENTVIDSLIGFQENSDSLLKIINGNNQPILDTSSFKKQISQIDKKIQKNSDLYLNDFITMDELKDRTDSLQAEKKLLEAKISENKLNDSTDVFELVKTQLGSIPINELSYDHKKKIVNNLVSKVDVTADNVDIIFKFQLA

SEQ ID NO: 6987 - protein, 452 aa, synthetic construct
MKAAIYIRVSTREQVENYSIQAQTEKLTALCRSKDWDVYDIFIDGGYSGSNMNRPALNEMLSRLHEIDAVVVYRLDRLSRSQRDTITLIEEYFLKNNVEFVSLSETLDTSSPFGRAMIGILSVFAQLERETIRDRMEMGKIKRIEAGLPLTTAKGRTFGYDVIDTKLYVNEEEAKQLQLIYDIFEEEQSITLLQKRLKKLGFKVRTYSRYNNWLTNDLYCGYVSYKDKAHVKGIHEPIISEEQFYRVQEIFTRMGKNPNMNRGSASLLNNLVVCSKCGLGFVHRRKDTMSRGKKYHYRYYSCKTYKHVHELEKCGNKIWRADKLEELIINRVNNYSLASRNVDREDELDSLNEKLKIEHAKKKRLFDLYINGNYEVSELDSMMNDIDAQINYYENQIEASEELKKNKKIQENLANLATVDYDSLEFREKQLYLKSLINKIYIDGEQVTIEWL

SEQ ID NO: 6988 - protein, 452 aa, synthetic construct
MKAAIYIRVSTQEQVGNYSIQAQTEKLTALCRSKDWDVYDIFIDGGYSGSNMNRPALNEMLSKLHEIDAVVVYRLDRLSRSQRDTITLIEEYFLKNNVEFVSLSETLDTSSPFGRAMIGILSVFAQLERETIRDRMVMGKIKRIEAGLPLTTAKGRTFGYDVIDTKLYINEEEARQLRLIYDIFEEERSITFLQKRLKKLGFKVRTYNRYNNWLTNDLYCGYVSYKDKVHVKGIHEPIISEEQFYRVQEIFTRMGKNPNMNRDSASLLNNLVVCSKCGLGFVHRRKDTVSRGKRYHYRYYSCKTYKHPHELEKCGNKIWRADKLEELIINRVNNYSVVSRNVDKEDELDSLSEKLKIEHAKKKRLFDLYINGSYEVSELDSMMNDIDAQINYYESQIEASEELKRSKKIQENLANLATVDYDSLEFREKQLYLKSLINKIYIDGEQVTIEWL

SEQ ID NO: 6989 - protein, 452 aa, synthetic construct
MKAAIYIRVSTREQVENYSIQAQTEKLTALCRSKDWDVYDIFIDGGYSGSNMNRPALNEMLSKLHEIDAVVVYRLDRLSRSQRDTITLIEEYFLKNNVEFVSLSETLDTSSPFGRAMIGILSVFAQLERETIRDRMVMGKIKRIEAGLPLTTAKGRTFGYDVIDTKLYINEEEAKQLQLIYDIFEEEQSITFLQKRLKKLGFKVHTYNRYNGWLTNDLYCGYVSYKDKVHVKGIHEPIISEEQFYRVQEIFARMGRNPNMNRDSASLLNNLVVCSKCGLGFVHRRKDTVSRGKKYHYRYYSCKTYKHTHELEKCGNKIWRADKLEELIINRVNDYSYACRNVDKEGELDSLSEKLRIEHAKKKRLFDLYINGSYEVGELDSMMSDIDAQISYYESQIEANEEQKKNKKIQENLANLATVDYDSLEFREKQLYLKSLISKIYIDGEQVTIEWL

SEQ ID NO: 6990 - protein, 452 aa, synthetic construct
MKAAIYIRVSTQEQVENYSIQAQTEKLTALCRSKDWDVYDIFIDGGYSGSNMNRPALNEMLSKLHEIDAVVVYRLDRLSRSQRDTTTLIEEYFLKNNVEFVSLSETLDTSSPFGRAMIGILSVFAQLERETIRDRMVMGKIKRIEAGLPLTTAKGRTFGYDVIDTKLYINEEEAKQLQLIYDIFEEEQSITSLQRRLKKLGFKVRTYNRYNSWLTNDLYCGYVSYKDKVHVKGIHEPIISEEQFYRVQEIFTRMGKNPNMNRDSASLLNNLVVCSKCGLGFVHRSKDTMCRGKKYHYRYYSCKTYKHTYELEKCGNKTWRADKLEELIINRVNNYSFASRNVDKEDELDSLTEKLKIEHAKKKRLFDLYINGSYEVSELDGMMSDIDAQISYYESQIEANEELRKNRKIQENLADLATVDFDSLELREKQLYLKSLINKIYIDGEQVTIEWL

SEQ ID NO: 6991 - protein, 452 aa, synthetic construct
MKAAIYIRVSTREQVENYSIQAQTEKLTALCRSKDWDVYDIFIDGGYSGSNMNRPALNEMLSKLHEIDAVVVYRLDRLSRSQRDTITLIEEYFLKNNVEFVSLSETLDTSSPFGRAMIGILSVFAQLERETIRDRMVMGKIKRIEAGLPLTTAKGRTFGYDVIDSKLYINEEEAKQLRLIYDIFEEERSITSLQKRLKKLGFKVRTYNRYNNWLTNDLYCGYVSYKDKVHVKGIHEPIISEEQFYRVQEIFTRMGKNPNMNRDSASLLNNLVVCGKCGLSFVHRRKDAMSRDKRYHYRYYSCKTYKHIHELEKCGNKIWRADKLEELIINRVNNYSLASRDVDKEDELDRLSEKLRIEHAKKRRLLDLYINGSYEVSELDSMMNDIDAQINCYESQIEANEELRKNKKIQENLADLATVDFDSLEFREKQLYLKSLINKIYIDGGQVTIEWL

SEQ ID NO: 6992 - protein, 452 aa, synthetic construct
MKAAIYIRVSTREQVENYSIQAQTEKLTALCRSKDWDVYDIFIDGGYSGSNMNRPALNEMLSKLHEIDAVVVYRLDRLSRSQRDTITLIEEYFLKNNVEFVSLCETLDTGSPFGRAMIGILSVFAQLERETIRERMVMGKIKRIEAGLPLTTAKGRTFGYDVIDAKLYINEEEAKQLQLIYDIFEEEQSITFLQKRLKKLGFKVRTYSRYNNWLTNDLYCGYVSYKDKVHVKGIHEPIISEEQFYRVQEIFTRMGKNPNMNRDSASLLNNLVVCSKCGLGFVHRRKDTMSRGKKYHYRYYSCKTYKHIHELEKCGNKIWRADKLEELIINRVSNYSLASRDVDKEDELDSLNEKLRIEHAKRKRLFDLYINGSYEVSELDSMMNDIDAQINYYESQIEANGELKKDKKIRENLANLATVDFDSLEFREKQQYLKSLINKIYIDGEQVTIEWL

SEQ ID NO: 6993 - protein, 485 aa, synthetic construct
MTRKVAIYTRVSTTNQAEEGFSIDEQIDRLTKYAEAMGWQVSDTYTDAGFSGARLERPAMQRLINDIENKAFDTVLVYKLDRLSRSVRDTLYLVKDVLTKTKIDFISLNESIDTSSAMGSLFLTILSAINEFERENIKERMTMGKLGRAKSGKSMMWTKTAFGYYHNRKTGILEIAPLQATIVEQIFTDYLSGISLTKLRDKLNESGHIGKDIPWSYRTLRQTLDNPVYCGYIKFKDSLFEGMHKPIIPYETYLKVQKELEERQQQTYERNNNPRPFQAKYMLSGMARCGYCGAPLRIVLGHKRKDGSRTMKYHCANRFPRKTKGVTVYNGNKKCDSGTYDLSHLENTVIDYLIGFQENNDSLLKIINGNNQPVLDTSSFKKQISQIDKKIQKNSDLYLNDFITMDELKDRTDSLQAEKKLLKAKISENKFNDSTDVFELVKTQLGSIPINELSYDNKKEIVNNLVSKVDVTADNVDIIFKFQLV

SEQ ID NO: 6994 - protein, 469 aa, synthetic construct
MSYTTPVRAAVYLRISEDRSGEQLGVARQREDCLELCCQRKWVPVEYLDNDVSASTGKRRPAYEQMLADITAGKIAAVVAWDLDRLHRRPIELEAFMSLADEKRLALATVAGDVDLATPQGRLVARLKGSVAAHETEHKKARQRRAARQKAERGYPNWSKAFGYLPGPNGPEPDPRTAPLVKQAYADILAGASLGDVCRQWNDAGAFTVTGRPWTTTTLSKFLRKPRNAGLRAYKGARYGPVDRDAIVGKAQWSPLVDEATFWAAQAVLDAPGRAPGRKSVRRHLLTGLAGCGKCGNHLAGSYRTDGRVVYVCKACHGVAILAENIEPMLYHIMAERLAMPDAVDLLHREIHDAVEAETVRLELETLYGDLDRLAVERAEGLLTARQVKISTDIVNAKITKLQARQLDQERLRVLDGIPLGTPQVAGMIAELSPDRFRAVLDVLAEVVVQPVGKSGRIFNPERVQVNWR

SEQ ID NO: 6995 - protein, 485 aa, synthetic construct
MTKKVAIYTRVSTTNQAEEGFSIDEQIDRLTKYAEAMGWQVSDTYTDAGHSGAKLERPAMQRLINDIEDKAFDTVLVYKLDRLSRSVRDTLYLVKDVFTKNKIDFISLNESIDTSSAMGSLFLTILSAINEFERENIKERMTMGKLGRAKSGKSMMWTKTAFGYYHNRETGILEIVPLQATIVEQIFTDYLSGISLTKLRDKLNEGGHIGKDIPWSYRTLRQTLDNPVYCGYIKFKGSLFEGMHKPIIPYETYLKVQRELEERQQQTYERNNNPRPFQAKYMLSGMARCGYCGAPLKIVLGHKRKDGSRTMKYHCANRFPRKTKGVTVYNDNKKCDSGTYDLSNLENTVIDNLIGFQENNDSLLKIINGNNQPILDTSSFKKQISQIDKKIQKNSDLYLNDFITMDELKDRTDSLQAEKKLLKAKISESRFNDSTDVFELVKTQLGSIPINELSYDNKKKIVNNLVSKVDVTADIVDIIFKFQLA

SEQ ID NO: 6996 - protein, 469 aa, synthetic construct
MSYTTPVRAAVYLRISEDRSGEQLGVARQREDCLKLCGQRKWVPVEYLDNDVSASTGKRRPAYEQMLADITAGKIAAVVAWDLDRLHRRPIELEAFMSLADEKRLALATVAGDVDLATPQGRLVARLKGCVAAHETEHKKARQRRAARQKAERGHPNWSKAFGYLPGPNGPEPDPRTAPLVKQAYADILAGASLGDVCKQWNDVGASTITGRPWTTTTLSKFLRKPRNAGLRAYKGARCGPVDRDAIVGKAQWSPLVDEATFWAAQAVLDAPGRAPGRKSVRRHLLTGLAGCGKCGNHLAGSYRTDGRVVYVCKACYGVAILADNIEPILYRIVTERLAMPDAVGLLRREIHDAAEAEPIRLGLETLYGELDRLAVERAEGLLTARQVKISTDIVNAKITKLQARQLDQERLRVFDGIPLGTPQVAGMIAELSPDRFRAVLDVLVEVVVQPVGRSGRIFNPERVQVNWR

SEQ ID NO: 6997 - protein, 485 aa, synthetic construct
MTKKVAIYTRVSTTNQAEEGFSIDEQTDRLTKYAEAMGWQVSDTYTDAGFSGAKLERPAMQRLINDIENKAFDTVLVYKLDRLSRSVRDTLYLVKDVFTKNEIDFISLNESINTSSAMGSLFLTILSAINEFERENIKERMAMGKLGRAKSGKSMMWTKTAFGYHHNRKTGILEIVPLQATIVEQIFTEYLSGISLTKLRDKLNESGHIGKDIPWSYRALRQTLDNPVYCGYIKFKDSLFEGMHKPIIPYETYLKVQKELEERQQQTYERNNNPRPFQAKYMLSGMARCGYCGAPLRIVLGHKRKDGSRTMKYHCANRFPRKTKGVTVYNDNKKCDSGTYDLSNLENTVIDNLIGFQENNDSLLRIINGNNQPILDTSSLKRQISQIDKKIQKNSDLYLNDFITTDELKDRTDSLQAEKKLLKAKIGENKFNDSTEVFELVKTQLGSIPINELSYDNKKKIVNNLVSKVDVTADNVDIIFKFQLA

SEQ ID NO: 6998 - protein, 452 aa, synthetic construct
MKAAIYIRVSTREQVENYSIQAQTEKLTALCRSKDWDVYDIFIDGGYSGSNMNRPALNEMLSKLHEIDAVVVYRLDRLSRSQRDTITLIEEYFLKNNVEFVSLSETLDTSSPFGRAMIGILSVFAQLERETIRDRMVMGKIKRIEAGLPLTTAKGRTFGYDVIDTKLYINEEEAKQLQLIYDIFEEEQSITFLQRRLKKLGFKVRTYNRYNNWLTNDLYCGYVSYKDKVHVKGIHEPIISEEQFYRVQEIFARMGKNPNMNRGSASLLNNLVVCSKCGLGFVHRRKDAMSRDKKYHYRYYSCKTYKHIHELEKCGNKIWRADKLEELIINRVNNYSFAGRNADKEDELDSLKEKLKIEHAKKKRLFDLYINGSYEVSELDSKMNDIDAQINYYESQIEANEELKKNKKIQENLAYLATVDFNSLEFREKQLYLKSLINKIYIDGEQVTIEWL

SEQ ID NO: 6999 - protein, 452 aa, synthetic construct
MKAAIYIRVSTREQVENYSIQAQTEKLTALCRSKDWDVYDIFIDGGYSGSNMNRPALNEMLGKLHEIDAVVVYRLDRLSRSQRDTITLIEEYFLKNNVEFVSLSETLDTSSPFGRAMIGILSVFAQLERETIRDRMVMGKIKRIEAGLPLTTAKGRTFGYDVIDTKLYINEEEARQLQLIYDIFEEEQSITFLQKRLRELGFKVRTYNRYSNWLTNDLYCGYVSYKDKVHVKGIHEPIISEEQFYRVQEIFARMGKNPNMNRDSASLLNNLVVCGKCGLGFVHRRKDAMSRDKKYHYRYYSCKTYKHIHELEKCGNKIWRADELEELVINRVNSYSVASRNVDKEDELDSLNEKLKIEHAKKKRLFDLYINGSYEVSELDSMMNDINAQISYYESQIEANEELRRNKKIQENLAYLATVDFDSLEFREKQLYLKSLINKIYIDGEQVTIEWL

SEQ ID NO: 7000 - protein, 485 aa, synthetic construct
MTKKVAIYTRVSTTNQAEEGFSIDEQIDRLTKYAEAMGWQVSDTYTDAGFSGAKLERPAMQRLINDIEDKAFDTVLVYKLDRLSRSVRDTLYLVKDVFTKNKIDFVSLNESIDTSSAMGSLFLTILSAINEFERENIKERMAMGKLGRAKSGKSMMWTKTAFGYYHNRKTGILEIVPLQATIVEQIFTDYLSGISLTKLRDKLNESGHIGKDIPWSYRTLRQTLDNPVYCGYIKFKGSLFEGTHKPIIPYETYLKVQKELEERQQQTYERNNNPRPFQAKYMLSGMARCGYCGAPLRIVLGHKRKDGSRTMKYHCANRFPRKTKGITVYNDNKKCDSGTYDLSNLENIVIDNLIGFQENDDSLLKVINGNNQPILDTSSFKKRISQIDKKIQKNSDLYLNDFITMDELKDRTDSLRAEKKLLKAKISENKFNDSADVFELVKTQLGSIPINELGYDNRKKIVNNLVSKVDVTADNVDIIFKFQLA

SEQ ID NO: 7001 - protein, 485 aa, synthetic construct
MTKKVAIYTRVSTTNQAEEGFSIDEQVDRLTKYAEAMGWQVSDTYTDAGLSGAKLERPAMQRLINDIENKAFDTVLVYKLDRLSRSVRDTLYLVKDVFTKNGIDFISLNESIDTSSAMGSLFLTILSAINEFERENIKERMTMGKLGRAKSGKSMMWTKTAFGYYHNRKTGILEIVPLQAAIVEQIFTDYLSGISLTKLRDKLNESGHIGKDIPWSYRTLRQTLDNPVYCGYIKFKDSLFEGMHKPIIPYETYLKVQKELEERQQLTYERNNNPRPFQAKYMLSGMARCGYCGAPLRIVLGHKRKDGSRTMKYHCANRFPRKTKGITVYNDNKKCDSGTYDLSNLENTVIDNLIGFQENNDSLLKIIDGNNQPILDTSSFKKQISHIDKKIQKNSDLYLNDFITMDELKDRTDSLQAEKKLLEAKISENKFNDSTDVFELVKTQLGSIPINELSYDNKKKIVNNLVSKVDVTADNVDIIFKFQLA

SEQ ID NO: 7002 - protein, 452 aa, synthetic construct
MKAAIYIRVSTREQVENYSIQAQTEKLTALCRSKDWDVYDIFIDGGYSGSNMNRPALNEMLSKLHEIDAVVVYRLDRLSRSQRDTITLIEEYFLKNNVEFVSLSETLDTSSPFGRAMIGILSVFAQLERETIRDRMVMGKIKRIEAGLPLTTAKGRTFGYDVIDTKLYINEEEAKQLQLIYDIFEEERSITFLQKRLKKLGFKVHTYNRYNNWLTNDLYCGYVSYKDKVHVKGIHEPIISEEQFYRVQEIFTRMGKNPNMNRDSASLLNNLVVCSKCGLGFVHRRKDAMSRDKKYHYRYYSCKTYKHIHELEKCGNKIWRADKLEELIINRVNNYSLASRNVGKEDELDSLNEKLQIEHAKKKRLFDLYINGSCEVSELDCMMNDIDAQISYYESQIEANGELRKSKKIQENLANLATVDFDSLEFREKQLYLKSLINKIYIDGEQVTIEWL

SEQ ID NO: 7003 - protein, 485 aa, synthetic construct
MTKKVAIYTRVSTTNQAEEGFSIDEQIDRLTKYAEAMGWQVSDTYTDAGLSGAKLERPAMQRLINDIEYKAFDTVLVYKLDRLSRSVRDTLYLVKDVFTKNKIDFISLNESIDTSSAMGSLFLTILSAINEFERENIKERMTMGKLGRARSGKSMMWTKTAFGYYHNRKTGILEIVPLQATIVEQIFTDYLSGISLTKLRDKLNESGHIGKDIPWSYRTLRQTLDNPVYCGYIKFKDSLFEGMHKPIIPYETYLKVQKELEERQQQTYERNNNPRPFQAKYMLSGMARCGYCGAPLRIVLGHKRKDGSRTMKYHCANRFPRKTRGVTVYNDNKKCDSGTYDLSNLESTVIDNLIGLQENNDSLLKIINGNNRPILDTSSIEKQISQIDKKIQRNSDLYLNDFITMDELKDRTDSLQAEKKLLKAKISENKFNDSTDVFELVKTQLGSIPINELSYGNKKKIVNNLVSKVDVTADNVDIIFKFQLA

SEQ ID NO: 7004 - protein, 469 aa, synthetic construct
MSYTTPVRAAVYLRISEDRSGEQLGVARQREDCLKLCGQRKWVPVEYLDNDVSASTGKRRPAYEQMLADITAGKIAAVVAWDLDRLHRRPVELEAFMSLADEKRLALATVAGDVDLATPQGRLVARLKGCVAAHETEHKKARQRRAARQKAERGHPNWSKAFGYLPGPNGPEPDPRTAPLVKQAYADILAGASLGDVCRQWNDVGALTITGRPWTTTTLSKFLRKPRNAGLRAYKGARYGPVDRDAIVGKAQWSPLVDEATFWAAQAVLDAPGRAPGRKSVRRHLLTGLAGCGKCGNHLAGSYRTDGRVVYVCKACYGIAILADNIEPILYHIVAERLAMPDAVDLLCREIHDAAEAETIRLELETLCGELDRLAVERAEGLLTARQVKISTDIVNAKITKLRARQLDQERLRVLDGIPLGTPQVAGMIAELSPDRFRAVLDVLAEVVVQPVGKRGGISDPERVQVNWR

SEQ ID NO: 7005 - protein, 485 aa, synthetic construct
MTKKVAIYTRVSTANQAEEGFSIDEQIDRLTKYAEAMGWQVSDTYTDAGLSGAKLERPAMQRLINDLENKAFDTVLVYKLDRLSRSVRDTLYLVKDVFTKNKIDFISLNESIDTSSAMGSLFLTILSAINEFERENIKERMTMGKLGRAKSGKSMMWTKTAFGYHHNRRTGILEIVPLQATIVEQIFTDYLSGISLTKLRDKLNESGHIGKDIPWSYRTLRQTLDNPVYCGYIKFKDSLFEGMHKPIIPYETYLKVQKELEERQQQTYERNNNPRPFQAKYMLSGMARCGYCGAPLRIVLGHKRKDGSRTMKYHCANRFPRKTKGITVYNDNKKCDSGTYDLSNLENTVIDNLIGFQENNDSLLKIINGNNQPILDISSFKKQISQIDKKIQKNSDLYLNDFITMDELKARTDSLQAEKKLLEAKVSENKFNDSTDVFELVKTQLGSIPINELSYDNKKKIVNNLVSKVDVTADNVDITFKFQLA

SEQ ID NO: 7006 - protein, 452 aa, synthetic construct
MKAAIYIRVSTREQVENYSIQAQTEKLTALCRSKDWDVYDIFIDGGYSGSNMNRPALNEMLSKLHEIDAVVVYRLDRLSRSQRDTITLIEEYFLKNNVEFVSLSETLDTSSPFGRAMIGILSVFAQLERETIRDRMVMGKIKRIEAGLPLTTAKGRTFGYDVIDTKLYINEEEAKQLRLIYDIFEEEQSITFLQKRLKKLGFKVRTYNRYNNWLTNDLYCGYVSYKDKVHVKGIHEPIISEEQFYRVQEIFARMGKNPNMNRDSASLLNNLVVCSKCGLGFVHRRKDAMSRDKKYHYRYYSCKTYKHTHELEKCGNKIWRADKLEELVINRVNSYSVASRNVDKEDELGSLNEKLKIEHAKKKRLFDLYINGNYEVSELDSMMNDIDAQINYYESQIEANEELKKNKKIQENLANLATVDFDSLEFREKQLYLKSLINKIYIDGEQVTIEWL

SEQ ID NO: 7007 - protein, 452 aa, synthetic construct
MKAAIYIRVSTREQVENYSIQAQTERLTALCRSKGWDVYDIFIDGGYSGSNMNRPALNEMLSKLHEIDAVVVYRLDRLSRSQRDTITLIEEYFLKNNVEFVSLSETLDTSSPFGRAMIGILSVFAQLERETIRDRMVMGKIKRIEAGLPLTTAKGRTFGYDVIDTKLYINEEEAKQLQLIYDIFEEEQSITFLQKRLKELGFKVRTYNRYNSWLTNDLYCGYVSYKDKVHVKGIHEPIISEEQFHRVQEIFTRMGKNPNMNRDSASLLNNLVVCSRCGLGFVHRRKDTMSRGKKYHYRYYSCKTYKHIHELEKCGNKIWRADKLEELIINRVNNHSIASRNVDKEDELDSLNEKLKIEHAKKKRLFGLYINGSYEVSELDSMMNDIDAQINYYESQIEANEELKKNKKIQENLANLATVDYDSLEFREKQLYLKSLISKIYIDGEQVTIEWL

SEQ ID NO: 7008 - protein, 452 aa, synthetic construct
MKAAIYIRVSTREQVENYSIQAQTEKLTALCRSKDWDVYDIFIDGGYSGSNMNRPALNEMLSKLHEIDAVVVYRLDRLSRSQRDTITLIEEYFLKNDVEFVSLSETLDTSSPFGRAMIGILSVFAQLERETIRDRMVMGKIKRVEAGLPLTTAKGRTFGYDVIDTKLYINEEEAKQLQLIYDIFEEEQSITFLQRRLKKLGFKVRTYSCYNNWLTNDLYCGYVSYKDKVHVKGIHEPIISEEQFYRVQEIFTRMGKNPNMNRGSASLLNNLVVCSKCGLGFVHRRKDIMSRGKKYHYRYYSCKTYKHIHELEKCGNKIWRADKLEELIINRVNNYSLAGRNVDKEDELDSLNEKLRAEHAKKKRLFDLYINGSYEVSELDSMMNDIDAQINYYESQIEANEELKRNKKVQENLADLATVDFDSLEFREKQLYLKSLINKIYIDGEQVTIEWL

SEQ ID NO: 7009 - protein, 485 aa, synthetic construct
MTKKVAIYTRVSTTNQAEEGFSIDEQIDRLTKYAEAMGWQVSDTYTDAGYSGAKLERPAMQRLINDIENKAFDTVLVYKLDRLSRSVRDTLHLVKDVFTKNKIDFISLNESIDTSSAMGSLFLTILSAINEFERENIKERMTMGKLGRAKSGKSMMWTKTAFGYYHNRKTGILEIVPLQATIVEQIFTDYLSGISLTKLRDKLNESGHIGKDIPWSYRTLRQTLDNPVYCGYIKFKGSLFEGMHKPIIPHETYLKVQKELEERQQQAYERNSNPRPFQAKYMLSGMARCGYCGAPLRIVLGHKRKDGSRTMRYHCANRFPRETRGVTVYNDNKKCDSGTYDLGNLENTVIDNLIGFQENNDSLLRIINGNNRSTLDTSSFKEQISQIDKKIQKNSDLYLNDFITMDELKDRTDSLQAEKKLLKAKISENKFDESTDVFELVKAQLGSIPINELSYDDKKKVVNNLVSKVDVTADNVNIIFKFQLA

SEQ ID NO: 7010 - protein, 485 aa, synthetic construct
MTKKVAIYTRVSTTNQAEEGFSIDEQIDRLTKYAEAMGWQVSDTYTDAGFSGAKLERPAMQRLINDIENKAFDTVLVYKLDRLSRSVRDTLHLVKEVFTKNKIDFISLNESIDTSSAMGSLFLTILSAINEFERENIKERMTMGKLGRAKSGKSMMWTKTAFGYYHNRKTGILEIVPLQATIVEQIFTDYLNGISLTKLRDKLNESGHIGKDIPWSYRTLRQTLGNPVYCGYIKFKGSLFEGMHKPIIPYETYLKVQKELEERQQQTYERNNNPRPFQAKYMLSGMARCGYCGAPLKIVLGHKRKDGSRTMKYHCANRFPRKTKGVTVYNDNEKCDSGTYDLSNLENTVIDNLIGFQEDNDSLLRVINGNNQPILDTNSIEKQISQIDKKILKNSDLYLNDFITMDELKDRTDSLQAEKELLKAKISENKLNDSTDVFERVKTQLGSIPINELSYDNKKRIVNNLVSKVDVTADNVDIIFKFQLA

SEQ ID NO: 7011 - protein, 452 aa, synthetic construct
MKAAIYIRVSTQEQVGNYSIQAQTEKLTALCRSKDWDVYDIFIDGGYSGSNMNRPALNEMLSKLHEIDAVVVYRLDRLSRSQRDTTTLIEEYFLKNNVEFVSLSETLDTSSPFGRAMIGILSVFAQLERETIRDRMVMGKIKRIEAGLPLTTAKGRTFGYDVIDTKLYINEEEAKQLQLIYDIFEEEQSITSLQKRLKKLGFKVRTYNRYNNWLTNDLYCGYVSYKDKVHVKGIHEPIISEEQFYRVQEIFTRMGKNPNMNRDSASLLNNLVVCSKCGLGFVHRSKDTMSRGKKYHYRYYSCKTYKHTHELEKCGNKIWRADKLEELVISRVNNYSFASCDVDKEDELDSLNEKLKIEHAKKKRLFDLYINGSYEVSELDSMMNDIDAQINYYESQIEANEELKKSKKIQENLADLATVDFDSLEFREKQQYLKSLINKIYIDGEQVTIEWL

SEQ ID NO: 7012 - protein, 452 aa, synthetic construct
MKAAIYIRVSTREQVENYSIQAQTEKLTALCCSKDWDVYDIFIDGGYSGSNMNRPALNEMLSKLHEIDAVVVYRLDRLSRSQRDTITLIEEYFLKNNVEFVSLCETLDTSSPFGRAMIGILSVFAQLERETIRDRMVMGKIKRIEAGLPLTTAKGRTFGYDVVDTKLYINEEEAKQLRLIYDIFEEEQSITFLQKRLKKLGLKVRTYSCYNNWLTNDLYCGYVSYKDKVHVKGIHEPIISEEQFHRVQEIFARMGKNPSMNRDSASLLNNLVVCSKCGLGFVHRRKDTMSRGKKYHYRYYSCKTYKHIHELDKCGNKIWRADKLEELIINRVRNYSLASRNVDKEDELDSLNEKLKIEHAKKKRLFDLYINGSYEVSELDSMMNDIDAQINYYESQIEANEELKKNEKIQENLAGLATVDFDSLEFREKQQYLKSLINKIYIDGEQVTVEWL

SEQ ID NO: 7013 - protein, 452 aa, synthetic construct
MKAAIYIRVSTREQVENYSIQAQTEKLTALCRSKDWDVYDIFIDGGYSGSNMNRPALNEMLGKLHEIDAVVVYRLDRLSRSQRDTITLIEEYFLKNNVEFVSLSETLDTSSPFGRAMIGILSVFAQLERETIRDRMVMGKIKRVEAGLPLTTAKGRTFGYDVIDTKLYINEEEAKQLRLIYDIFEEEQSITFLQKRLKKLGFKVRTYNRYNNWLTNDLYCGYVSYKDKVHVKGIHEPIISEEQFYRVQEIFARMGKNPNMNRNSASLLSNLVVCSKCGLGFVHRRKDTTSRGKKYHYRYYSCKTYKHTRELEKCGNKIWRADKLEELIINRVNNYSFANRNADKEDELDSLNEKLKIEHAKKKRLFDLYINGSYNVSELDSMMSDIDAQINYYESQIEANGELKKDKKIQENLADLATVDFDSLEFRGKQLYLKSLINKIYIDGEQVTIEWL

SEQ ID NO: 7014 - protein, 452 aa, synthetic construct
MKAAIYVRVSTREQVENYSIQAQTEKLTALCRSKDWDVYDIFIDGGYSGSNMNRPALNEMLSKLHEIDAVVVYRLDRLSRSQRDTITLIEEYFLKNNVEFVSLSETLDTSSPFGRAMIGILSVFAQLERETIRDRMVMGKIKRVEAGLPLTTAKGRTFGYDVIDTKLYINEEEAKQLQLIYDIFEEEQSITFLQKRLKKLGFKVRTYNRYKDWLTNDLYCGYVSYKDKVHVKGIHEPIISEEQFYRVQEIFTRMGKNPNMSRDSASLLNNLVVCSKCGLGFVHRRKDTMSRGKKYRYRYYSCKTYKHTHELEKCGNKIWRADELEELIINRVNNYSFASRNVDKEDELGSLNEKLKIEHAKRKRLFDLYINGSYEVSELDSMMSDIDAQINYYESQIEANEELKKNKKIQENLADLATVDFDSLGFREKQLYLKSLINKIYVDGEQVTIEWL

SEQ ID NO: 7015 - protein, 469 aa, synthetic construct
MCYTTPVRAAVYLRISEDRSGEQLGVARQREDCLKLCGQRKWVPVEYLDNDVSASTGKRRPAYEQMLADITAGKIAAVVAWDLDRLHRRPIELEAFMSLADEKRLALATVAGDVDLATPQGRLVARLKGSVAAHETEHKKARQRRAARQKAERGYPNWSKAFGYLPGPNGPEPDPRTAPLVKQAYADILAGASLGDVCRQWNAAGAFTITGRPWTTTALSKFLRKPRNAGLRAYKGARYGPVDREAIVGKAQWSPLVDEATFWAAQAVLDAPGRAPGRKSVRRHLLTGLAGCGKCGNHLAGSYRTDGKVVYVCKACHGVAILADNIEPILYHIVAERLAMPDAVDLLRRETHDAAEAETIRLELETLYDELDRLAVERAEGLLTARQVKISTDIVNAKITKLQARQLDQKRLRVFDGIPLGTPQVAGVIADLSPDRFRAVLDVLAEVVVQPVGKSGRIFNPERVQVNWR

SEQ ID NO: 7016 - protein, 485 aa, synthetic construct
MTKKVAIYTRVSTTNQAEEGFSIDEQIDRLTKYAEAMGWQVSGTYTDAGHSGAKLERPAMQRLINDIETKAFDTVLVYKLDRLSRSVRDTLYLVKDVFTKNKIDFISLNESINTSSAMGSLFLTILSAINEFERENIKERMTMGKLGRAKSGKSMMWTRTAFGYYHNRKTGILEIVPLQATIVEQIFTDYLSGISLTKLRDKLNESGHIGKDIPWSYRTLRQTLDNPVYCGYIKFKDSLFEGMHKPIIPYETYLKVQKELEERQQQTYERNNNPRPFQAKYMLSGMARCGYCGAPLRIVLGHKRKDGSRTMKYHCANRFPRKTKGVTVYNDNKKCDSGTYDLSNLENTVIDYLIGFQENNDSLLKIINGNNQPILDISSFKKQISQIGKKIQRNSDLYLNDFITMDELKDRTDSLQAEKKLLKAKISENKFKDSTDVFELAMTQLGSIPINELSYDNKKKIVNNLVSKVDVTADNVDIIFKFQLA

SEQ ID NO: 7017 - protein, 452 aa, synthetic construct
MKAAIYIRVSTREQVENYSIQAQTEKLTALCRSKDWDVYDIFIDGGYSGSNMNRPALNEMLSKLHEIDAVVVYRLDRLSRSQRDTITLIEEYFLKSNVEFVSLSETLDTSSPFGRAMIGILSVFAQLERETIRDRMVMGKIKRIEAGLPLTTAKGRTFGYDVIDTKLYINEEEAKQLRLVYDIFEEEQSITFLQKRLKKLGFKVHTYNRYNNWLTNDLYCGYVSYKDKVHVKGIHEPIISEEQFYRVQEIFARMGKNPNMNRDSASLLSNLVVCSKCGLGFVHRRKDTMSRGKKYHYRYYSCKTYKHTHELDKCGNKIWRADKLEELIINCVNSYSLASRNVDKEDELDSLNEKLKIEHAKKKRLFDLYVNGSCEVSELDSMMSDIDAQINYYESQIEANEELRKNKKIQENLADLATVDYDSLELREKQLYLKSLINKIYIDGEQVTIEWL

SEQ ID NO: 7018 - protein, 452 aa, synthetic construct
MKAAIYIRVSTREQVENYSIQAQTEKLTALCRSKDWDVYDIFVDGGYSGSNMNRPALNEMLSKLHVIDAVVVYRLDRLSRSQRDTITLIEEYFLKNNVEFVSLSETLDTSSPFGRAMIGILSVFAQLERETIRDRMVMGKIKRIEAGLPLTTAKGRTFGYDVIDTKLYINEEEAKQLRLIYDIFEEEQSITFLQKRLKKLGFKVRTYNRYNNWLTNDLYCGYVSYKDKVHVKGIHEPIISEEQFYRVQEIIARMGKNPNMNRDSASLLNNLVVCGKCGLGFVHRRKDAMSRDKRYHYRYYSCKTYKHIHELEKCGNKVWRADKLEELIINRVNNYSLASRIVDKEDELDSLNEKLKIEHAKKKRLFDLYINGSYEVSELDSMMNDIDAQINYYESRIEASEELKKNKKIQENLAYLATVDFDSLEFREKQLYLKSLINKIYIDGEQVTIEWL

SEQ ID NO: 7019 - protein, 452 aa, synthetic construct
MKAAIYIRVSTQEQVGNYSIQAQTEKLTALCRSKGWDVYDIFIDGGYSGSNMNRPALNEMLSKLHEIDAVVVYRLDRLSRSQRDTTTLIEEYFLKNNVEFVSLSETLDTSSPFGRAMIGILSVFAQLERETIRDRMVMGKIKRIEAGLPLTTAKGRTFGYDVIDTKLYINEEEAKQLQLIYDIFEEEQSITFLQKRLKKLGFKVRTYNRYNNWLTNDLYCGYVSYKDKVHVKGIHEPIISEEQFYRVQEIFTRMGKNPNMNRGSASLLNNLVVCSKCGLSFVHRSKDTMSRGKKYHYRYYSCKTYKHTHELEKCGNKIWRADKLEELIINRVNSYSFASRNVDKEDELDSLNEKLKIEHAKRKRLFDLYINGSYEVSELDSMMNDIDAQINYYESQIEANEELKKNRKIQENLADLATVDFDSLEFREKQLYLKSLINKIYIDGEQVTIEWL

SEQ ID NO: 7020 - protein, 452 aa, synthetic construct
MKAAIYIRVSTQEQVENYSIQAQTEKLTALCRSKDWDVYDIFIDGGYSGSNMNRPALNEMLSKLHEIDAVVVYRLDRLSRSQRDTTTLIEEHFLKNNVEFVSLSETLDTSSPFGRAMIGILSVFAQLERETIRDRMVMGKIKRIEAGLPLTTAKGRTFGYDVIDTKLYVNEEEAKQLRLIYDIFEEEQSITFLQKRLKKLGFKVRTYNRYNNWLTNDLYCGYVSYKDKVHVKGIHEPIISEEQFYRVQEIFARMGKNPNMNRDSASLLSNLVVCSKCGLGFVHRSKDTMSRGKKYHYRYYSCKTYKHTHELEKCGNKTWRADKLEELIINRVNNYSFASRNADKEDELDSLNEKLKIEHAKKRRLFDLYINGSYEVSELDSMMNDIDAQISYYESQIEANEELKRNKKIQGNLADLATVDFDSLEFRGKQLYLKSLINKIYIDGEQVTIEWL

SEQ ID NO: 7021 - protein, 485 aa, synthetic construct
MTRKVAIYTRVSTTNQAEEGFSIDEQIDRLTKYAEAMGWQVSDTYTDAGVSGAKLERTAMQRLINDIENKTFDTVLVYKLDRLSRSVRDTLYLVKDVFTKNKIDFISLNESIDTSSAMGSLFLTILSAINEFERENIKERMTMGKLGRAKSGKSMMWTKTAFGYYHNRKTGILEIVPLQATIVEQIFTDYLSGISLTKLRDKLNESGHIGKDIPWSYRTLRQTLDNPVYCGYIKFKGSLFEGMHKPIISHETYLKVQKELEERQQQTYERNNNPRPFQTKYMLSGMARCGYCGAPLRIVLGHKRKDGSRTMKYHCANRFPRKTKGVTVYNDNKKCDSGTYDLSSLENTVVDNLIGLQEDSDSLLKIINGNNQPILGTSSFEKQICQIDKKIQKNSDLYLNDFITMDELKDRTDSLQAEKKLLKAKISESKFNDSTDVFELVKTQLGSIPINELSYDNKKKIVDNLVSKVDVTADNVNIIFKFQLA

SEQ ID NO: 7022 - protein, 485 aa, synthetic construct
MTKKVAIYTRVSTTNQAEEGFSIDEQIDRLTKYAEAMGWQVSDTYTDAGFSGAKLERPAMQRLINDIENKAFDTVLVYKLDRLSRSVRDTLYLVKDVFTKNKIDFISLNESIDTSSAMGSLFLAILSAINEFERENIKERMTMGKLGRAKSGKSMMWTKTAFGYYHNRKTGILEIVPLQASIVEQIFTDYLSGISLTKLRDKLNESGHIGKDIPWSYRTLRQTLDNPVYCGYIKFKDSLFEGMHKPIIPYETYLKVQKELEERQQQTYERNNNPRPFQARYMLSGMARCGYCGAPLKIVLGHKRKDGSRTMKYQCANRFPRKTKGVTVYNDNKKCDSGTYDLSNLENTVIDNLIGFQENNDSLLKIINGNNQPTLDTSSFEKQISQIDKKIQKNSDLYLNDFITMDELKVRTDSLQAEKKLLKAKISENKFNGSTDVFELVKTQLGSIPINELSYDNKKRIVNNLVSKVDVTADNVDIIFKFQLA

SEQ ID NO: 7023 - protein, 485 aa, synthetic construct
MTKKVAIYTRVSTTNQAEEGFSIDEQVDRLTKYAEAMGWQVSDTYTDAGFSGAKLERPAMQRLINDIENKAFDTVLVYKLDRLSRSVRDTLYLVKDVFTKNKIDFISLNECIDTSSAMGSLFLTILSAINEFERENIKERMTMGRLGRAKSGKSMMWTKTAFGYHHNRRTGILEIVPLQATIVEQIFTDYLSGISLTKLRDKLNESGHIGKDIPWSYRTLRQTLDNPVYCGYIKFKDSLFEGMHKPIIPYETYLKVQKELEERQQQTYERNNNPRPFQAKYMLSGMARCGYCGAPLKIVLGHKRKDGSRTMKYHCTNRFPRKTKGVTVYNDNKKCDSGTYDLSNLENTVIDSLIGFQENDDCLLKIINGNNQPTLDTSSFEKQISQIDKKIQKNSDLYLNDFITMDELKVRTDSLQAEKKLLKAKISENKFNDSTDVFELVKTQLGSIPINELSYDNKKKVVDNLVSKVDVTADNVDIIFKFQLA

SEQ ID NO: 7024 - protein, 452 aa, synthetic construct
MKAAIYIRVSTREQVENYSIQAQTEKLTALCRSKDWDVYDIFIDGGYSGSDMNRPALNEMLSKLHEIDAVVVYRLDRLSRSQRDTITLIEEYFLKNNVEFVSLSETLDTSSPFGRAMIGILSVFAQLERETIRDRMVMGKIKRIEAGLPLTTAKGRTFGYDVIDTKLYINEEEAKQLQLIYDIFEEEQSITSLQKRLKKLGFRVRTYSRYNNWLTNDLYCGYVSYKDKVHVKGIHEPIISEEQFYRVQEIFTRMGKNPNMNRDSASLLNNLVVCSKCGLGFVHRRKDAMSRDKKYHYRYYSCKTYKHIHELEKCGNKIWRADKLEELIINRVNDYSVASRNVGKEDGLDSLNEKLKIEHAKKKRLFDLYINGRYEVSELDSMMNDIDAQINYYESQIEANEELRKNKEIQENLAYLAAVDFASLEFREKQLYLKSLINKIYIDGEQVTIEWL

SEQ ID NO: 7025 - protein, 469 aa, synthetic construct; identical to SEQ ID NO: 4339

SEQ ID NO: 7026 - protein, 452 aa, synthetic construct
MKAAIYIRVSTREQVENYSIQAQTEKLTALCRSKGWDVYDIFIDGGYSGSNMNRPALSEMLSKLHEIDAVVVYRLDRLSRSQRDTITLIEEYFLKNNVEFVSLSETLDTSSPFGRAMIGILSVFAQLERETIRDRMVMGKIKRIEAGLPLTTAKGRTFGYDVIDTKLHINEEEAKQLQLIYDIFEEEQSITFLQKRLKKLGLRVRTYNRYNNWLTNDLYCGYVSYKDKVHVKGIHEPIISEEQFYRVQEIFARMGKNPNMNRDSASLLSNLVVCGKCGLGFVHRRKDIMSHGKKYHYRYYSCKTYKHIHELEKCGNKIWRADKLEELIINRVNNYSLASRSVDKEDELDSLNEKLKTEHAKKKRLFDLYINGSYEVSELDSMMKDIDAQINYYESQIEANEELKKNKKIQENLAGLATVDFDSLEFREKQLYLRSLINKIYIDGEQVTIEWL

SEQ ID NO: 7027 - protein, 469 aa, synthetic construct
MCYTTPVRAAVYLRISEDRSGEQLGVARQREDCLKLCGQRKWVPVEYLDNDVSASTGKRRPAYEQMLADITAGKIAAVVAWDLDRLHRRPIELEAFMSLADEKRLALATVAGDVDLATPQGRLVARLKGCVAAHETEHKKARQRRAARQKAERGHPNWSKAFGYLPGPNGPEPDPRTAPLVKQAYADILAGASLGDVCRQWNDTGAFTITGRPWTTTTLSKFLRKPRNAGLRAYKGARYGPVDRDAIVGKAQWSPLVDEATFWAAQAVLDAPGRAPGRKSVRRHLLTGLAGCGKCGNRLAGSYRTDGRVVYVCKACHGVAILADNIEPFLYHIVAERLAMPDAVDLLRREIHDAAEAGIIRLELETLYGELDRLAVERAEGLLTARQVKISTDIVNAKITKLQVRQLDQERLRVFDGIPLGTPQVAGMIAELSPDRFRAVLDVLVEVVVQPVGKGGRISNPERVQVNWR

SEQ ID NO: 7028 - protein, 452 aa, synthetic construct
MKAAIYIRVSTREQVENYSIQAQTERLTALCRSKDWDVYDIFIDGGYSGSNMNRPALNEMLSKLHEIDAVVVYRLDRLSRSQRDTLTLIEEYFLKNSVEFVSLSETLDTSSPFGRAMIGILSVFAQLERETIRDRMVMGKVKRIEAGLPLTTAKGRTFGYDVIDTKLYINEEEAKQLQLIYDIFEEEQSITFLQKRLKKLGFKVRTYSCYNNWLTNDLYCGYVSYKDKVHVKGIHEPIISEEQFYRVQEIFTRMGKSPNMNRGSASLLNNLVVCSKCGLGFVHRRKDTTSRGKKYHYRYYSCKTYKHIHELEKCGNKIWRADKLEELIVNRVNNYSFADRNADKEDELDSLNEKLKIEHAKRKRLFDLYINGSYDVSELDSMMNDIDTQINYYESQIEANEGQKRNKKIQENLADLATVDFDSLEFREKQLYLKSLISKIYIDGEQVTIEWL

SEQ ID NO: 7029 - protein, 485 aa, synthetic construct
MTKKVAIYTRVSTTNQAEEGFSIDEQIDRLTKYAEAMGWQVSDTYTDAGFSGAKLERPAMQRLINDIENKAFDTVLVYKLDRLSRSVRDTLYLVKDVFTKNRIDFISLNESIDTSSAMGSLFLTILSAINEFERENIKERMTMGKLGRAKSGKSMMWTRTAFGYYHNRKTGILEIVPLQAAIVEQIFTDYLSGTSLTKLRDKLNESGHIGKDIPWSYRTLRQTLDNPVYCGYIKFKGSLFEGMHKPIIPYETYLKVQKELEERQQQTYARNNNPRPFQAKYMLSGMARCGYCGAPLRIVLGHKRKDGSRTMKYHCANRFPRRTKGVTVYNDNKKCDSGTYDLSDLEDTVIDNLIGFQEDNDSLLKIINGNNQPILDTSSLKKRISQIDKKIQKNSDLYLNDFITMDELKNRTDSLQAEKKLLKAKISENKFNDSTDVFELVKTQLGSIPINELSYDNKKKIVNNLVSKVDVTADNVDIIFKFQLA

SEQ ID NO: 7030 - protein, 452 aa, synthetic construct
MKAAIYIRVSTREQVENYSIQAQTEKLTALCRSKGWDVYDIFIDGGYSGSNMNRPALNEMLSKLHEIDAVVVYRLDRLSRSQRDTITLIEEYFLKNNVEFVSLSETLDTSSPFGRAMIGILSVFAQLERETIRDRMVMGKIKRIEAGLPLTTAKGRTFGYDVIDTKLYINEEEAKQLRLIYDIFEEEQSITFLQKRLKKLGFKVRTYNCYNNWLTNDLYCGYVSYKDKVHVKGIHEPIISEEQFYRVQEIFARMGKNPNMNRDSASLLNNLVVCSKCGLGFVHRRKDAMSRDKKYHYRYYSCKTYKHIHELEKCGNKIWRADKLEELIINRVNSYSLASRNVDKEDELDGLNEKLKIEHAKKKRLFDLYINGSYEVSELDSLMNDIDAQISYYESQIEANEELRKNKKIQENLADLATVDFDSLGFREKQLYLKSLINKIYIDGEQVTIEWL

SEQ ID NO: 7031 - protein, 485 aa, synthetic construct
MTKKVAIYTRVSTTNQAEEGFSIDEQIDRLTKYAEAMGWQVSDTYTDAGFSGAKLERPAMQRLINDIENRAFDTVLVYKLDRLSRSVRDTLYLVKDVFTKNKIDFISLNESINTSSAMGSLFLTILSAINEFERENIKERMTMGKLGRAKSGKSMMWTKTAFGYYHNRKTGILEIVPLQATIVEQIFTDYLSGISLTKLRDKLNESGHIGKDIPWSYRTLRQTLDNPVYCGYIKFKDSLFEGMHKPIISYETYLKVQEELEERQQQTYERNNNPRPFQAKYMLSGKARCGYCGAPLKIVLGHKRKDGSRTMKYHCANRFPRKTKGVTVYNDNKKCDSGTYDLSNLENTVIDILIGFQENNDGLLKIINGNNQPILDTSSFKKQISQIDKKIQKNSDLYLSDFITMDELKGRTDSLQAEKKLLEAKTGGNKFNDSTDVFELVKTQLGSIPINELSYDNKKKIVNNLVSKVDVTADNVDIIFKFQLA

SEQ ID NO: 7032 - protein, 469 aa, synthetic construct
MSYTTPVRAAVYLRISEDRSGEQLGVARQREDCLKLCGQRNWVPVEYLDNDVSASTGKRRPAYEQMLADITAGKIAAVVAWDLDRLHRRPIELEAFMSLADEKRLALATVAGDVDLATPQGRLVARLKGSVAAHETEHKKARQRRAAKQKAERGLPNWSKAFGYLPGPSGPEPDPRTAPLVKQAYADILAGASLGDVCRQWNDAGAFTITGRPWATTTLSKFLRKPRNAGLRAYKGARYGPVDRDAIVGKAQWSPLVEEATFWAVQAVLDAPGRAPGRKSVRRHLLTGLAGCGKCGNHLAGSYRTDGRIVYVCKACHGVAILADNIEPILYHIVAERLAMPDAVDLLRREIHDAAEAETIRLELETLYGELDRLAVERAEGLLTARQVKISTDVVNAKITKLQAHQLDQERLRVFDGIPLGTPQVAGMIAELSPDRFRAVLDVLAEVVVQPVGKSGRIFNPERVQVNWR

SEQ ID NO: 7033 - protein, 452 aa, synthetic construct
MKAAIYIRVSTREQVENFSIQAQTEKLTALCRSKDWDVYDIFIDGGYSGSNMNRPALNEMLSKLHEIDAVVVYRLDRLSRSQRDTITLIEEYFLKNNVEFVSLSETLDTSSPFGRAMIGILSVFAQLERETIRDRMVMGKIKRIEAGLPLTTAKGRTFGYDVIDTKLYINEEEAKQLQLIYDIFEEEQSITFLQKRLKKLGFKVRTYNCYSSWLTNDLYCGYVSYKDKVHVKGIHEPIISEEQFYRVQEIFTRMGKNPNMNRGSASLLNNLVVCSKCGLGFVHRRKDTMSRGKKYHYRYYSCKTYKHIHELEKCGNKIWRADKLEELIINCVNSYSFASRNVDKEDELDSLNEKLKIEHAKKKRLFDLYISGSYEVSELDGMMNDIDAQINYYESQIEANEELKKNKKIQENLADLATVDFDSLEFREKQLYLKSLINKIYIDGEQVTIEWL

SEQ ID NO: 7034 - protein, 452 aa, synthetic construct
MKAAIYIRVSTQEQVGNYSIQAQTEKLTALCRSKDWDVYDIFIDGGYSGSNMNRPALNKMLSKLHEIDAVVVYRLDRLSRSQRDTTTLIEEYFLKNNVEFVSLSETLDTSSPFGRAMIGVLSVFAQLERETIRDRMVMGKIKRIEAGLPLTTAKGRTFGYDVIDTKLYINEEEAKQLQLIYDIFEEEQSITFLQKRLKKLGFKVRTYNRYNNWLTNDLYCGYVSYKDKVHVKGIHEPIISEEQFYRVQEIFTRMGKNPNMNRDSASLLSNLVVCSKCGLGFVHRSKDTMSRGKKYHYRYYSCKTYKHTHELEKCGNKTWRADKLEELVINRVNNYSFASRNVDKEDELDSLNEKLKIEHAKKKRLFDLYINGSYEVSELDSMMNDIDAQINYYESQIEANEELKKNRKIQENLAGLATVDFDSLEFREKQLYLKSLINKIYIDGEQVTIEWL

SEQ ID NO: 7035 - protein, 452 aa, synthetic construct
MKAAIYIRVSTREQVENYSIQAQTEKLTALCRSKDWDVYDIFIDGGYSGSNMNRPALNEMLSKLHEIDAVVVYRLDRLSRSQRDTITLIEEYFLKNNVEFVSLSETLDTSSPFGRAMIGILSVFAQLERETIRDRMVMGKIKRIEAGLPLTTAKGRTFGYDVIDTKLYVNEEEAKQLQLIYDIFEEEQSITFLQKRLKKLGFKVRSYNRYNNWLTNDLYCGYVSYKDKVHVKGIHEPIISEEQFYRVQEIFTRMGKNPNMNRDSASLLNNLVVCSKCGLGFVHRRKDIMSHGKKYHYRYYSCKTYKHIHELEKCGNKIWRADRLEELIINRVNSYSLASRNVDKEDDLDSLNEKLKIEHAKKNRLFDLYINGSYEVSELDSMMSDIDAQINYYESQIEANEELKKNKKIQENLAHLATVDFDSLEFREKQLYLKSLISKIHIDGEQVTIEWL

SEQ ID NO: 7036 - protein, 469 aa, synthetic construct
MSYTTPVRAAVYLRISEDRSGEQLGVARQREDCLKLCGQHKWVPVEYLDNDVSASTGKRRPAYEQMLADITAGKIAAVVAWDLDRLHRRPIELEAFMSLADEKRLALATVAGDVDLATPQGRLVARLKGSVAAHETEHKKARQRRAARQKAERGHPNWSKAFGYLPGPNGPEPDPRTAPLVEQAYADILAGASLGDVCRQWNGAGAFTITGRPWTTTALSKFLRKPRNAGLRAYKGARYGPVDRDAIVGKAQWSPLVDETTFWAAQAVLDAPGRAPGRKSVRRHLLTGLAGCGKCGNHLSGSYRTDGQVVYVCKACHGVAILADSIEPILYHIVAERLAMPDAVDLLRREIHDAAEAETIRLELETLYGELDRLAVERAEGLLTARQVKISTDIVNAKITKLQARQLDQERLRVFDGIPLGTPQVAGMIAELSPDRFRAVLDVLAEVVVQPVGKGGRNLNPERVQVNWR

SEQ ID NO: 7037 - protein, 485 aa, synthetic construct
MTKKVAIYTRVSTTNQAEEGFSIDEQIDRLTKYAEAMGWQVSDTYTDAGLSGAKLERPAMQRLINDIENRAFDTVLVYKLDRLSRSVRDTLYLVKDVFTKNKIDFISLNECIDTSSAMGSLFLTILSAINEFERENIKERMTMGKLGRAKSGKSMMWTKTAFGYYHNRKTGILEIVPLQATIVEQIFADYLSGISLTKLRDKLNESGHIGKDIPWSYRTLRQTLDNPVYCGYIKFKDSLFEGMHKPIIPYETYLKVQKELEERQQQTYERNNNPRPFQAKYMLSGMARCGYCGAPLRIVLGHKRKDGSRTMKYHCANRFPRKTKGVTVYNGNKTCDSGTYDLSNLENTVIDNLIGLQENNDSLLKIINGNNQSILDTSSIKKQISQIDKKIQKNSDLYLNDFITMDELKDRTDSLQAEKKLLKAKISENKFNDSTDVFELVKTQLGSIPINELSYDDKKKIVNNLVSKVDVTADNVDIIFKFQLA

SEQ ID NO: 7038 - protein, 469 aa, synthetic construct
MCYTTPVRAAVYLRISEDRSGEQLGVARQREDCLKLCDQRKWVPVEYLDNDVSASAGKRRPAYEQMLADITAGKIAAVVAWDLDRLHRRPVELEAFMSLADEKRLALATVAGDVDLATPQGRLVARLKGCVAVHETEHKKARQRRAARQKAERGYPNWSKAFGYRPGPNGPEPDPRTAPLVKQAYADILAGASLGDVCRQWNDAGALTITGRPWTTTTLSKFLRKPRNAGLRAYKGARYGPVDRGAIVGKAQWSPLVDEATFWAAQAVLDAPGRAPGRKSVRRHLLTGLAGCGKCGNHLAGSYRTGGQVVYVCKACHGVSILADNIEPILYHIVAERLARPDAVDLLRREIHDAAEAETIRLELETLYGELDRLAVERAEGLLTARQVKISTDIVNAKITKLQARQLDQERLRVFGGIPLGTPQVAGMIAELSPDRFRAVLGVLAEVVVQPVGKSGRVFNPERVQVNWR

SEQ ID NO: 7039 - protein, 469 aa, synthetic construct
MSYTTPVRAAVYLRISEDRSGEQLGVARQREDCLKLCDQRKWVPVEYLDNDVSASTGKRRPAYEQMLADITTGKIAAVVAWDLDRLHRRPIELEAFMSLADERRLALATVAGDVDLATPQGRLVARLKGSVAAHETEHKKARQRRAARQKAERGHPNWSKAFGYLPGPNGPEPDPRTAPLVKQAYADILAGASLGDVCRQWNDAGAFTITGRPWTTTTLSKFLRKPRNAGLRAYKGARYGPVDRDAIVGKAQWSPLVDEATFWAAQAVLDAPGRAPGRKSVRRHLLTGLAGCGKCGNHLSGSYRADGQVVYVCKACHGVAILADNIEPILYHTVAERLAMPDAVDLLRREIHDAAEAETIRMGLETLYGELDRLAVERAEGLLTARQVKISTDIVNAKITELQARQQDQERLRVLDGIPLGTPQVAGMIAELSPDRFRAVLDVLAEVVVQPVGKGGRIFSPKRVQVNWR

SEQ ID NO: 7040 - protein, 486 aa, synthetic construct
MTKKVAIYTRVSTTNQAEEGFSIDEQIDRLTKYAEAMGWQVSDTYTDAGFSGAKLERPAMQRLINDIENKAFDTVLVYKLDRLSRSVRDTLYLVKDVFTKNKIDFISLNESINTSSAMGSLFLTILSAINEFERENIKERMTMGKLGRAKSGKSMMWTKTAFGYYHNRKTGILEIVPLQAAIVEQIFTDYLSGISLTKLRDKLNESGHIGKDIPWSYRTLRQTLDNPVYCGYIKFKDSLFEGMHKPIIPYETYLKVQRELEERQQQTYERNNNPRPFQAKYMLSGMARCGYCGAPLKIVLGHKRKDGSRTMKYHCANRFPRKTKGVTVYNDNKKCDSGTYDLSNLENTVIDNLIGLQENNDSLLKIINGNNQPILDTSSFKKQISQIDKKIQKNSDLYLNDLITMDELKARTDGLQAEKKLLEAKISENKFNDSTDVFELVRTQLGSIPINELSYDNKKKIVNNLVSKVDVTADNVDIIFKFQPAQ

SEQ ID NO: 7041 - protein, 452 aa, synthetic construct
MKAAIYIRVSTREQVENYSIQAQTEKLTALCRSKDWDVYDVFIDGGYSGSNMNRPALNEMLSKLHEIDAVVVYRLDRLSRSQRDTITLIEEYFLKNNVEFVSLSETLDTSSPFGRAMIGILSVFAQLERETIRDRMVMGKIKRIEAGLPLTTAKGRTFGYDVIDTKLYINEEEAKQLQLIYDIFEEEQSITFLQKRLKKLGFKVHTYNRYNNWLTSDLYCGYVSYKDKVHVKGIHEPIISEEQFYRVQEIFTRMGKNPNMNRDSASLLNNLVVCSKCGLGFVHRRKDAMSRDKKYHYRYYSCKTYKHIHELEKCGNKIWRADKLEELIIDRVNNYSLAGRNVDKEDELDSLNEKLKTEHAKKKRLFDLYINGSYEVSELDSMMSDIDAQISYYESQIKANEELKKNKKIQENLADLATVDFDSLEFREKQLYLKSLISRIYIDGEQVTIEWL

SEQ ID NO: 7042 - protein, 486 aa, synthetic construct
MTKKVAIYTRVSTTNQAEEGFSIDEQIDRLTKYAEAMGWQVSDTYTDAGSSGAKLERPAMQRLINDIENKAFDTVLVYKLDRLSRSVRDTLYLVKDVFTKNKIDFISLNESIDTSSAMGSLFLTILSAINEFERENIKERMTMGKLGRAKSGKSMMWTKTAFGYYHNRKTGILETVPLQATIVEQIFTDYLSGMSLTKLRDKLNESGHIGKDIPWSYRTLRQTLDNPVYCGYIKFKDSLFEGMHKPIIPYETYLKVQKELEERQQQTYKRNNNPRPFQAKYMLSGMARCGYCGAPLRIVLGHKRKDGSRTMKYHCANRFPRKTKGVTVYNDNKKCDSGTYDLSNLENTVIDNLIGFQENNDSLLKIINGNNQPIPDTGSIKKQISQIDKKIQKYSDLYLNDFITMDELKDRTDSLQAEKKLLKAKISENKFNGSTDVFELVKTQLGSIPINELSYDDKKKIVSNLVSKVDVTADNVDIIFKFQLAQ

SEQ ID NO: 7043 - protein, 452 aa, synthetic construct
MKAAIYIRVSTQEQVENYSIQAQTEKLTALCRSKGWDVYDIFIDGGYSGSNMNRPALNEMLSKLHEIDAVVVYRLDRLSRSQRDTITLIEEYFLKNSVEFVSLSETLDTSSPFGRAMIGILSVFAQLERETIRDRMVMGKIKRIEAGLPLTTAKGRTFGYDVIDTKLYINEGEAKQLQLIYDIFEEEQSITSLQKRLKKLGFKVRTYNRYSSWLTNDLYCGYVSYKDKVHVKGIHEPIISEEQFYRVQEIFTRTGKNPNMNRDSASLLNNLVVCSKCGLGFVHRRKDTMSRGKKYHYRYYSCKTYKHIHELEKCGNKIWRADKLEELIINRVNNYSIASRNVDKEDELDSLNEKLKIEHTKKKRLFDLYINGSYGVSELDSMMNDIDAQINYYESQIEANEELKKDKKIQENLAGLATVDFDSLEFREKQLYLKSLINKIYIDGEQVTIEWL

SEQ ID NO: 7044 - protein, 452 aa, synthetic construct
MKAAIYIRVSTREQVENYSIQAQTEKLTALCRSKDWDVYDIFVDGGYSGSNMNRPALNEMLSKLHEIDAVVVYRLDRLSRSQRDTITLIEEYFLKNNVEFVSLSETLDTSSPFGRAMIGILSVFAQLERETIRDRMVMGKIKRIEAGLPLTTAKGRTFGYDVIDTKLYINEGEAKQLQLIYDIFEEEQSITFLQRRLKKLGFKVRSYNRYNNWLTNDLYCGYVSYKDKVHVKGIHEPIISEEQFYRVQEIFTRMGKNPNMNRDSASLLSNLVVCSKCGLGFVHRRKDAMSRDKKYHYRYYSCKTYKHIHELEKCGNKIWRADKLEELIINRVNNYSLASRNVDKEDELDSLSERLKIEHAKKRRLLDLYINGSYEVSELDSMMNDIDAQINYYESQIEASEGLKKNEKVQENLAHLATVDFDSLEFREKQLYLKSLINKIYIDGEQVTIEWL

SEQ ID NO: 7045 - protein, 452 aa, synthetic construct
MKAAIYIRVSTREQVENYSIQAQTEKLTALCRSKDWDVYDIFIDGGYSGSNMNRPALNEMLSKLHEIDAVVVYRLDRLSRSQRDTVTLIEEYFLKNNVEFVSLSETLDTSSPFGRAMIGILSVFAQLERETIRDRMVMGKIKRIEAGLPLTTAKGRTFGYDVIDTKLYINEEEAKQLQLIYDIFEEERSITSLQKRLKELGFKVHTYSRYNNWLTNDLYCGYVSYKDKVHVKGIHEPIISEEQFYRVQEIFARMGKNPNMNRDSASLLNNLVVCSKCGLGFVHRRKDAMSRDKKYHYRYYSCKTYKHIHELEKCGNKTWRADKLEELIINRVNNYSLASRNVDKEDELDSLNEKLKIEHAKKKRLFDLYINGGYEVSELDSMMKDIDAQINYYESQIEANEELKKSKRIQENLANLATVDFDSLEFREKQLYLKSLINKIYIDGEQVTIEWL

SEQ ID NO: 7046 - protein, 452 aa, synthetic construct
MKAAIYIRVSTREQVENYSIQAQTEKLTALCRSKDWDVYDIFIDGGYSGSNMNRPALNEMLSKLHEIDAVVVYRLDRLSRSQRDTITLIEEYFLKNNVEFVSLSETLDTSSPFGRAMIGILSVFAQLERETIRDRMVMGKIKRIEAGLPLTTAKGRTFGYDVIDTKLYINEEEAKQLQLIYDIFEEEQSITFLQRRLKKLGFKVRTYNRYNNWLTNDLYCGYVSYKDKVHVKGIHEPIISEEQFYRVQEIFTRMGKNPNMNRDSASLLNNLVVCGKCGLGFVHRRKDAMSRDKKYHYRYYSCKTYKHIHELEKCGNKIWRADKLEELVINRVNDYSLASRNVDKEDELDSLNEKLKIEHAMKKRLFDLYINGSYKVSELDSMMKDIDAQINYYESQIEANEELRKNKKIQENLANLATVDFDSLEFREKQLYLKSLINKIYIDGEQVTIEWL

SEQ ID NO: 7047 - protein, 470 aa, synthetic construct
MSYTTPVRAAVYLRISEDRSGEQLGVARQREDCLKLCDQRKWVPVEYLDNDVSASTGKRRPAYEQMLADITAGKIAAVVAWDLDRLHRRPIELEAFMSLADEKRLALATVAGDVDLATPQGRLVARLKGSVAAHETEHKRARQCRAARQKAERGHPNWSKAFGYQPGPNGPEPDPRTAPLVRQAYADILAGASLGDVCRQWNDTGALTITGRPWTTTTLSKFLRKPRNAGLRAYKGARYGPVDRGAIVGKAQWSPLVDEATFWAAQAVLDAPGRAPGRKSVRRHLLTGLAGCGKCGNHLAGSYRTDGRVVYVCKACHGVAILADNIVPILYRIVAERLAMPDAADLLRREIHDAAEAETIRLELETLYGELDRLAVERAEGLLTARQVKISTDIVNAKITKLQARQQDQERLRVLDGIPLGTPQVAGMIAELSPDRFRAVLDVLAEVVVQPVGKSGRVFNPERVQVNWRQ

SEQ ID NO: 7048 - protein, 452 aa, synthetic construct
MKAAIYIRVSTREQVENYSIQAQTEKLTALCRSKGWDVYDIFIDGGYSGSNMNRPALNEMLSKLHEIDAVVVYRLDRLSRSQRDTITLIEEYFLKNNVEFVSLSETLDTSSPFGRAMIGILSVFAQLERETIRDRMVMGKIKRIEAGLPLTTAKGRTFGYDVVDTKLYINEEEAKQLRLIYDIFEEEQSITLLQKRLKKLGFKVRSYNHYNNWLTNDLYCGYVSYKDKVHVKGIHEPIISEEQFYRVQEIFTRMGKNPNMNRDSASLLNNLVVCGKCGLGFVHRRKDTMSRGKKYHYRYYSCKTYKHIHELEKCGNKIWRADKLEELVINRVNNYSFASRNVDKEDELDSLNEKLRIEHAKKKRLFDLYINGSYEVSELDSMMNDIDAQINYYESQIEANEGLKKNKKIQENLADLATVNFDSLEFREKQLYLKSLINKIYIDGEQVTIEWL

SEQ ID NO: 7049 - protein, 469 aa, synthetic construct
MNYTTPVRAAVYLRISEDRSGEQLGVARQREDCLKLCGQHKWEPVEYLDNDVSASTGKRRPAYEQMLADITAGKIAAVVAWDLDRLHRRPIELEAFMSLADEKRLALATVAGDVDLATPQGRLVARLKGCVAAHETEHKKARQRRAARQKAERGYPNWSKAFGYLPGPNGPEPDPRTAPLVKQAYANILAGASLGDVCRQWNDAGAFTITGRRWTTTTLSKFLRKPRNAGLRAYKGAPYGPVDCDAIVGKAQWSPLVDEATFWAAQAVLDAPGRAPGRKSVRRHLLTGLAGCGKCGNHLAGSYRTDGRVVYVCKTCHGVAILADNIEPILYHIVAERLAMPDAVDLLRREIHDVAEAETIRLELEALYGELDRLAVERAEGLLTARQVKISTDIVNAKITKLQARQLDQERLRVLDGIPLGTPQVAGMIAELSPDRFRAVLDVLAEVVVQPMGRSGRIFNPERVQVNWR

SEQ ID NO: 7050 - protein, 452 aa, synthetic construct
MKAAIYIRVSTREQVENYSIQAQTEKLTALCRSKDWDVYDIFIDGGYSGSNMNRPALNEMLSKLHEIDAVVVYRLDRLSRSQRDTITLIEEYFLKNNVEFVSLSETLDTSSPFGRAMIGILSVFAQLERETIRDRMVMGKIKRIEAGLPLTTAKGRTFGYDVIDTKLYINEEEAKQLQLIYDIFEEEQSITSLQKRLKELGFKVRTYNRYNNWLTNDLYCGYVSYKDKVHVKGIHEPIISEEQFYRVQEIFTRMGKNPNMNRDSASLLNNLVVCGKCGLGFVHRRKDTMSRGKKYHYRYYSCKTYKHTHELEKCGNKIWRADKLEELIINRVNNYSFASRNVAKEDELDSLNERLKIEHAKKKRLFDLYINGSYEVSELDSMMNDIDAQINYYESQIEANEKLRKNKKTQESLADLATVDFDSLGFREKQLYLKSLINKIYIDGEQVTIEWL

SEQ ID NO: 7051 - protein, 469 aa, synthetic construct
MSYTTPVRAAVYLRISEDRSGEQLGVARQREDCLKLCGQRKWVPVEYLDNDVSASTGKRRPAYEQMLADITAGKIAAVVAWDLDRLHRRPVELEAFMSLADEKRLALATVAGDVDLATPQGRLVARLKGCVAAHETEHKKARQRRAARQKAERGLPNWSKAFGYLPGPDGPEPDPRTAPLVKQAYADILAGASLGDVCRQWNDAGAFTITGRPWTTTTLSKFLRKPRNAGLRAYKGARYGPVDRDAIVGKAQWSPLVGEATFWAAQAVLDAPGRAPGRKSVRRHLLTGLAGCGKCGNHLAGSYRSDGRVVYVCKACHGVAILADNIEPILYHIVAERLAMPDAVDLLRREVHDAAEAETIRLELETLYGELDRLAVERAEGLLTARQVKISTDIVNAKITKLQARQLDQERLRVFDGIPLGTPQVAGVIAELSPDRFRAVLDALAEVVVQPVDKSGRILNPERVQVNWR

SEQ ID NO: 7052 - protein, 485 aa, synthetic construct
MTKKVAIYTRVSTTNQAEEGFSIDEQTDRLTKYAEAMGWQVSDTYTDAGFSGAKLGRPAMQRLINDIENKAFDTVLVYKLDRLSRSVRDTLYLVKDVFTKNKIDFISLNESIDTSSAMGSLFLTILSAINEFERENIKERMTMGKLGRAKSGKSMMWTKTAFGYYHNHKTGILEIVPLQATIVEQIFTDYLSGISLTKLRDKLNESGHIGKDTPWSYRTLRQTLDNPVYCGYIKFKGSLFEGMHKPIIPYETYLKVQRELEERQRQTYERNNNPRPFQAKYMLSGMARCGYCGASLRIVLGHKRKDGSRTMKYHCANRFPRKTKGVTVYNDNKKCDSGTYDLRNLENTVIDNLIGFQENNDSLLKIIIGNNQPILDTSSFKKQISQIDKKIQKNSDLYLNDFITMDELKARTDSLQAEKKLLKAKISENKYNDSADVFELVKTQLGSIPINELSYDNKKKIVNNLVSKVDVTADNVDIIFKFQLA

SEQ ID NO: 7053 - protein, 469 aa, synthetic construct; identical to SEQ ID NO: 2803

SEQ ID NO: 7054 - protein, 452 aa, synthetic construct
MKAAIYIRVSTQEQVENYSIQAQTEKLTALCRSKDWDVYDIFIDGGYSGSNMNRPALNEMLSKLHEIDAVVVYRLDRLSRSQRDTTTLIEEYFLKNNVEFVSLSETLDTSSPFGRAMIGILSVFAQLERETIRDRMVMGKIKRIEAGLPLTTAKGRTFGYDVIDTKLYINEEEAKQLRLIYDIFEEEQSITSLQKRLKKLGFKVRTYNRYSNWLTNDLYCGYVSYKDKVHVKGIHEPIISEEQFYRVQEIFTRMGKNPNMNRGSASLLNNLVVCSKCGLSFVHRRKDTMSRGKKYHYRYYSCKTYKHTHELEKCGNKTWRADRLEELIINRVNNYSFASRNADKEDELDSLNEKLKIEHARKKRLFDLYINGSYEVSELDSMMNDIDAQINYYESQIEANEELKKNKKIQENLADLATVDFDSLEFREKQLYLKSLINKIYIDGEQVTIEWL

SEQ ID NO: 7055 - protein, 485 aa, synthetic construct
MTRKVAIYTRVSTTNQAEEGFSIDEQIDRLTKYAEAMGWQVSDTYTDAGLSGAKLERPAMQRLINDIENKAFDTVLVYKLDRLSRSVRDTLYLVKDVFTKNKIDFISLNESIDTSSAMGSLFLTILSAINEFERENIKERMTMGKLGRAKSGKSMMWTKTAFGYYHNRKTGILEIVPLQATIVEQIFTDYLSGISLTKLRDKLNESGHIGKDIPWSYRTLRQTLDNPVYCGYIKFKDSLFEGMHKPIIPYETYLKVQKELEERQQQTYERNNNPRPFQAKYLLSGMARCGYCGAPLRIVLGHKRKDGSRTMKYHCANRFPRKTKGVTVYNDNKKCDSGTYDLSNLENTVIDSLVGFQEDNGSLLKIISGNNQPILDTSSLKKQISQIDKKIQKNSDLYLNDFITMDELKDRTDSLQAEKRLLKAKISENKFNDSAGVFELVKTQLGSFPINELSYDNKKKIVNNLVSKVDVTADNVDIIFKFQLA

SEQ ID NO: 7056 - protein, 469 aa, synthetic construct
MCYTTPVRAAVYLRISEDRSGEQLGVARQREDCLKLCDQRKWVPVEYLDNDVSASTGKRRPAYEQMLADITAGKIAAVVAWDLDRLHRRPIELEAFMSLADEKRLALATVAGDIDLATPQGRLVARLKASVAAHETEHKKARQRRAARQKAERGHPNWSKAFGYLPGPNGPEPDPRTAPLVRQAYADILAGASLGDVCRQWNDAGAFTITGRPWTTTTLSKFLRKPRNAGLRAYKGARYGPVDRDAIVGKAQWSPLVDEATFWAAQAVLDAPGRAPGRKSVRRHLLTGLAGCGKCGNHLAGSYRTDGRVVYVCKACHGVAILADNIEPILYHIVAERLAMPDAVDLLRREIHDAAEAETIRLELEALYGELDRLAVERAEGLLTARQVKISTDVVNTKITELQARQLDQERLRVLDGIPLGTPQVAGMIAELSPDRFRAVLDVLAEVVVQPVGKSGRVFNPERVQVNWR

SEQ ID NO: 7057 - protein, 452 aa, synthetic construct
MKAAIYIRVSTQEQVENYSIQAQTEKLTALCRSKDWDVYDIFIDGGYSGSNMNRPALNEMLSKLHEIDAVVVYRLDRLSRSQRDTTTLIEEYFLKNNVEFVSLSETLDTSSPFGRAMIGILSVFAQLERETIRDRMVMGKIKRIEAGLPLTTAKGRTFGYDVIDTKLYINEEEAKQLRLIYDIFEEEQSITFLQKRLKKLGFKVRTYNRYNSWLTNDLYCGYVSYKDKVHVKGIHEPIISEEQFYRVQEIFTRMGKNPSMNRDSASLLNNLVVCSKCGLGFVHRSKDTMSRGKKYHYRYYSCKTYKHTHELEKCGNKTWRADKLEELIISRVNNYSFASRNVDKEDELDSLNEKLKIEHAKKKRLFDLYINGSYEVSELDSMMNDIDAQINYYESQIEANEELKKNKKIQENLADLATVDFDSLGFREKQLYLKSLISKIYIDGEQVTIEWL

SEQ ID NO: 7058 - protein, 452 aa, synthetic construct
MKAAIYIRVSTREQVENYSIQAQTEKLTALCRSKDWDVYDIFIDGGYSGSNMNRPALNEMLSKLHEIDAVVVYRLDRLSRSQRDTITLIEEYFLKNDVEFVSLSETLDTSSPFGRAMIGILSVFAQLERETIRDRMVMGKIKRIEAGLPLTTAKGRTFGYDVIDTKLYINKEEAKQLQLIYDIFEEEQSITFLQRRLKKLGFKVRTYSRYYGWLTNDLYCGYVSYKDKVHVKGIHEPIISEEQFYRVQEIFTRMGKNPNMNRDSASLLSGLVVCSKCGLGFVHRRKDTMSRGKKYHYRYYSCKTYKHTHELEKCGNKIWRADKLEELIIDRVNNYSFASRNVDKEDELDSLNEKLKVEHAKKKRLFDLYISGSYEVSELDSMMNDIDAQINYYESQIEANEELRKNKKIQENLADLATVDYDSLEFREKQLYLKSLINKIYIDGEQVTIEWL

SEQ ID NO: 7059 - protein, 469 aa, synthetic construct
MSYTTLVRAAVYLRISEDRSGEQLGVARQREDCLKLCDQRKWVPVEYLDNDVSASTGKRRPAYEQMLADITAGKIAAVVAWDLDRLHRRPVELEAFMSLADEKRLALATVAGDVDLATPQGRLVARLKGSVAAHETEHKRARQRRAARQKAERGHPNWSKAFGYQPGPNGPEPDPRTAPLVKQAYADILAGASLGDVCRQWNGAGAFTITGRPWTTTTLSKFLRKPRNAGLRAYKGARYGRVDRDAIVGKAQWSPLVDEATFWAAQAVLDAPGRAPGRKSVRRHLLTGLAGCGKCGNHLAGSYRTDGRVVYVCKACHGVAILADNIEPILYHIVAERLAMPNAVDLLRREIRDAAEAETIRLELETLYGELDRLAVERAEGLLTARQVKISTDIVNAKITKLQARQLDQERLRVFDGIPLGTPQVAGVVAELSPDRFRAVLDVLAEVVVQPVGKSGRIFNPERVQVNWR

SEQ ID NO: 7060 - protein, 485 aa, synthetic construct
MTKKVAIYTRVSTTNQAEEGFSIDEQIDRLTKYAEAMGWQVGDTYTDAGFSGAKLERPAMQRLINDIESKAFDTVLVYKLDRLSRSARDTLYLVKDVFTRNKIDFISLNESIDTSSAMGSLFLTILSAINEFERENIKERMAMGKLGRAKSGKSMMWTKTAFGYYHNRKTGILEIVPLQATIVEQIFTDYLSGISLTKLRDKLNESGHIGKDIPWSYRTLRQTLDNPVYCGYIKFKDSLFEGMHKPIIPYETYLKVQKELEERQQQTYERNNNPRPFQAKYMLSGMARCGYCGAPLRIVLGHKRKDGSRTMRYHCANRFPRKTKGVTVYNDDKKCDSGTYDLSNLENTVIDNLTGLQENNDSLLKIINGNNQPILDTSSFEKQICQIDKKIRKNSDLYLNDFITMDELKDRTDSLQAEKKLLKAKISENKFNDSTDVFELVKTQLGSIPINELSYDNKKKIVNNLVSKVDVTADNVDIIFKFQLA

SEQ ID NO: 7061 - protein, 452 aa, synthetic construct
MKAAIYIRVSTQEQVENYSIQAQTEKLTALCRSKDWDVYDIFIDGGYSGSNMNRPALNEMLSKLHEIDAVVVYRLDRLSRSQRDTTTLIEEYFLKNNVEFVSLSETLDTSSPFGRAMIGILSVFAQLERETIRDRMVMGKIKRIEAGLPLTTAKGRTFGYDVIDTKLYINEEEAKQLQLIYDIFEEEQSITSLQKRLKKLGFKVRTYNRYNNWLTNDLYCGYVSYKDKVHVKGIHEPIISEEQFYRVQEIFTRMGKKPNMNRDSASLLNNLVVCSKCGLGFVHRSKDTMSRGKKYHYRYYSCKTYKHTHELEKCGNKTWRADKLEELIINRVNNYSFASRNMVKEDELDSLNEKLKIEHAKKKRLFDLYINGSYEVSELDSMMNDIDAQINYYESQIGANEELKRNKKIQENLADLATVDFDSLEFREKQLYLKSLINKIYIDGEQVTIEWL

SEQ ID NO: 7062 - protein, 452 aa, synthetic construct
MKAAIYIRVSTHEQVENYSIQAQTEKLTALCRSKGWDVYDIFIDGGYSGSNMNRPALNEMLSKLHEIDAVVVYRLDRLSRSQRDTTTLIEEHFLKNNVEFVSLSETLDTSSPFGRAMIGILSVFAQLERETIRDRMVMGKIKRIEAGLPLTTAKGRTFGYDVIDTKLYINEEEAKQLQLIYDIFEEEQSITSLQKRLKKLGFKVRAYNRYNNWLTNDLYCGYVSYKDKVHVKGIHEPIISEEQFYRVQEIFTRMGKNPNMSRDSASLLNNLVVCSKCGLGFVHRSKDTMNRGKKYHYRYYSCKTYKHAHELEKCGNKTWRADKLEELIINRVNSYSSVSRNVDKEDELDSLNEKLKIEHAKKKRLFDLYINGSYEVSDLDSMMNDIDAQINHYESQIEANEELKKNKKIQENLAGLATVDFDSLEFREKQLYLKSLINKIYIDGEQVTIEWL

SEQ ID NO: 7063 - protein, 469 aa, synthetic construct
MSYTTPVRAAVYLRISEDRSGEQLGVTRQREDCLKLCDQRKWVPVEYLDNDVSASTGKRRPAYEQMLADITAGKIAAVVAWDLDRLHRRPIELEAFMSLADEKRLALATVAGDVDLATPQGRLVARLKGSVAAHETEHKKARQRRAARQKAERGHPNWSKAFGYLPGPNGPEPDPRTAPLVKQAYADILAGASLGDVCRRWNDAGAFTITGRPWTTTTLSKFLRKPRNAGLRAYRGARYGPVDRDAIVGKAQWSPLVDEATFWAAQAVLDAPGRAPGRKSVRRHLLTGLAGCGKCGNHLAGSYRTDGRVVYVCKACHGVAILADNIVPILYRIVAERLAMPDAVDLLRREIHDAAEAETIRLELETLYGELDRLAVERAEGLLTARQVKISTDIVSAKITKLQARQLDQERLRVLDGIPLGTPQVAGMIAELSPDRFRAVLDALAEVVVQPVGKSGRIFSPERVQVSWR

SEQ ID NO: 7064 - protein, 469 aa, synthetic construct
MSYTTPVRAAVYLRISEDRSGEQLGVARQREDCLKLCDQRKWVPVEYLDNDVSASTGKRRPAYEQMLADITAGKIAAVVAWDLDRLHRRPIELEAFMSLADEKRLALATVAGDVDLATPQGRLVARLKGSVAAHETEHKKARQRRAARQKAERGLPNWSKAFGYLPGPNGPEPDPRTAPLVKQAYADILAGASLGDVCRQWNAAGAFTITGRPWTTTTLSKFLRKPRNAGLRAYKGARYGPVDRDAIVGKARWSPLVDEATFWAAQAVLDAPGRAPGRKSVRRHLLTGLAGCGKCGNHLAGSYRTDGRVVYVCKACHGVAILADNIEPILYHIVAERLAMPDAVDLLRREIHDAAEAETIRLELETLNGELDRLAVERAEGLLTARQVKISTDIVNAKITKLQARQLDQERLRVFEGVPLGTPQVAGTIAELSPDRFRAVLDVLAEVVVQPVGKGGRIFNSERVQVNWR

SEQ ID NO: 7065 - protein, 485 aa, synthetic construct
MTKKVAIYTRVSTTNQAEEGFSIDEQIDRLTKYAEAMGWQVSDTYTDAGLSGAKLERPAMRRLINDIENKAFDTVLVYKLDRLSRSVRDTLYLVKDVFTKNKIDFISLSESIDTSSAMGSLFLTILSAINEFERENIKERMTMGKLGRAKSGKSMMWTKTAFGYCHNRKTGILEIVPLQATIVEQIFTDYLSGTSLTKLRDKLNESGHIGKDIPWSYRTLRQTLDNPVYCGYIKFKDSLFEGMHKPIIPYETYLKVQKELEERQQQTYVRNNNPRPFQAKYMLSGMARCGYCGAPLRIVLGHKRKDGSRTMKYHCANRFPRKTRGITVYNDNKKCDSGTYDLSNLENAVIDNLIGFQEDSDSLLKLINGNNRPILDTSSFKKQISQIDKKIQKNSDLYLNDFITMDELKDRTDSLQAEKKLLKAKISENKFNDSTDVFELVKTQLGSIPINELSYDNKKKIVNNLVSKVDVTADNVDIIFKFQLA

SEQ ID NO: 7066 - protein, 485 aa, synthetic construct
MTKKVAIYTRVSTINQAEEGFSIDEQIDRLTKYAEAMGWQVSDTYTDAGFSGAKLERPAMQRLINDIENKAFDTVLVYKLDRLSRSVRDTLYLVKDVFTKNKIDFISLNESIDTSSAMGSLFLTILSAINEFERENIKERMTMGKLGRAKSGKSMMWTKTAFGYHHNRKTGILEIVPLQASIVEQIFTDYLSGISLTKLRDKLNESGHIGKDIPWSYRTLRQTLDNPVYCGYIKFKDSLFEGMHKPIIPYETYLKVQKELEERQQQTYERNNNPRPFQAKYMLSGMARCGYCGAPLKIVLGHKRKDGSRTMKYHCANRFPRKTKGVTVYNDNKKCDSGIYDLSNLENTVIDNLIGLQENNDCLLKIINGNNRPILDTSSFKERISQIDKKIQKNSDLYLDDFITMDELKARTDSLQAEKKLLKAKISENKFNDSTDVFELVKTQLGSIPINELSYDSKKKIVNNLVSKVDVTADNVVIIFKFQLA

SEQ ID NO: 7067 - protein, 452 aa, synthetic construct
MKAAIYIRVSTQEQVENYSIQAQTEKLTALCRSKDWDVYDIFIDGGYSGSNMNRPALNEMLSKLHEIDAVVVYRLDRLSRSQRDTTTLIEEYFLKNNVEFVSLSETLDTSSPFGRAMIGILSVFAQLERETIRDRMVMGKIKRVEAGLPLTTAKGRTFGYDVIDTKLYINEEEAKQLQLIYDIFEEEQSITSLQKRLKKLGFKVRTYNRYNNWLTNDLYCGYVSYKDKVHVKGIHEPIISEEQFYRVQEIFTRMGKNPNMNRDSASLLNSLVVCGKCGLSFVHRSKDTMSRGKKYHYRYYSCKTYKLTHELEKCGNRIWRADKLEELIINRVNNYSFASRNVDKEDELGSLNEKLKIEHAKKKRLFDLYINGSYEVSELDSMMNDIDAQISYYESQIEANGELKENKKIQENLAGLATVDFDSLEFREKQLYLKSLINKIYIDGEQVTIEWL

SEQ ID NO: 7068 - protein, 452 aa, synthetic construct
MKAAIYIRVSTREQVENYSIQAQTEKLTALCRSKDWDVYDIFIDGGYSGSNMNRPALNEMLSKLHEIDAVVVYRLDRLSRSQRDTITLIEEYFLKNSVEFVSLSETLDTSSPFGRAMIGILSVFAQLERETIRDRMVMGKIKRIEAGLPLTTAKGRTFGYDVIDTKLYINEEEAKQLQLIYDIFEEEQSITFLQRRLKKLGFKVRTYSCYNNWLTNDLYCGYVSYKDKVHVKGIHEPIISEEQFYRVQEIFTRMGKNPNMNRDSASLLNNLVVCGKCGLGFVHRRKDTTSRGKKYHYRYYSCKTYKHIHELEKCGNKIWRADKLEELIISRVGNYSLASRNADKEDELDSLNEKLRIEHAKKRRLFDLYINGSYEVSELDSMMNDIDAQINYYESQIEANEELKKNKKIREDLTDLATVDFDSLEFREKQLYLKSLINKIYIDGERVTIEWL

SEQ ID NO: 7069 - protein, 452 aa, synthetic construct
MKAAIYIRVSTREQVENYSIQAQTEKLTALCRSKDWDVYDIFIDGGYSGSNMNRPALNEMLSRLHEIDAVVVYRLDRLSRSQRDTITLIEEYFLKNNVEFVSLSETLDTSSPFGRAMIGILSVFAQLERETIRDRMMMGKIKRIEAGLPLTTAKGRTFGYDVIDTKLYINEEEARQLRLIYDIFEEEQSITSLQKRLKKLGFKVRTYSRYNNWLTNDLYCGYVSYKDKVHVKGIHEPIISEEQFYRVQEIFARMGKNPNMNRDSASLLNNLVVCSKCGLGFVHRRKDTTSRGKKYHYRYYSCKTYKHIHELEKCGNKIWRADKLEELIISRVSNFSLASRNAEKEDELDSLSEKLRIEHAKKRRLFDLYINGSYEVSELDSMMDDIDAQINYYESQIEANEELKKNKKIQESLANLATVDYDSLEFRGKQLYLRSLINKIYIDGEQVTIEWL

SEQ ID NO: 7070 - protein, 469 aa, synthetic construct
MSYTTPVRAAVYLRISEDRSGEQLGVARQREDCLKLCGQRRWVPVEYLDNDVSASTGKRRPAYEQMLADITAGKIAAVVAWDLDRLHRRPVELEAFMSLADEKRLALATVAGDVDLATPQGRLVARLKGVVAAHETEHKKARQRRAARQKAERGLPNWSKAFGYLPGPNGPEPDPRTAPLVKQAYADILAGASLGDVCRQWNDAGAFTITGRPWTTATLSKFLRKPRNAGLRAYKGARYGPVDRNAIVGKAQWGPLVDEATFWAAQAVLDAPGRAPGRKSVRRHLLTGLAGCGKCGSHLAGSYRTDGRVAYVCKACYGVAILADNIEPILYRIVTERLAMPDAVDLLRREIHDAAEAELIRLELETLYGELDRLAVERAEGLLTARQVKISTDIVNAKITKLQARQLDQERLRVFDGIPLGTPQVAGMIAELSPDRFRAVLDVLAEVVVQPVGKSGRISNPERVLVNWR

SEQ ID NO: 7071 - protein, 485 aa, synthetic construct
MTKKVAIYTRVSTTNQAEEGFSIDEQIDRLTKYAEAMGWQVSDTYTDAGFSGAKLERPAMQRLINDIENKAFDTVLVYKLDRLSRSVRDTLYLVKDVFTKNKIDFISLNECIDTSSAMGSLFLTILSAINEFERENIKERMTMGKLGRAKSGKSMMWAKTAFGYYHNRKTGILEIVPLQATIVEQIFTDYLSGISLTKLRDKLNESGHIGKDIPWSYRTLRQTLDNPVYCGYIKFKDSLFEGMHKPIIPYETYLKVQKELEERQQQTYERNNNPRPFQAKYMLSGMARCGYCGAPLRIVLGHKRKDGSRTMKYHCANRFPRKTKGVTVYNDNKKCDSGTYDLSNLENTVIDNLIGLQENNDSLLKIINGNNQPVLDTSSLERQISQIDKKIQKNSDLYLNDFITMDELKDRTDSLQAEKKLLEAKISENKFSDSTDVFELVKTQLGGIPINELSYDNKKKIVNNLVSKVDVTADSVDIIFKFQLA

SEQ ID NO: 7072 - protein, 452 aa, synthetic construct
MKAAIYIRVSTREQVENYSIQAQTEKLTALCRSKDWDVYDIFIDGGYSGSNMNRPALNEMLSKLHEIDAVVVYRLDRLSRSQRDTITLIEEYFLKNNVEFVSLSETLDTSSPFGRAMIGILSVFAQLERETIRDRMVMGKIKRIEAGLPLTTAKGRTFGYDVIDAKLYINEEEAKQLQLIYDIFEEEQSITFLQRRLKELGFKVRTYNRYNNWLTNDLYCGYVSYKDKVHVKGIHEPIISEEQFNRVQEIFTRVGKNPNMNRNSASLLNNLVVCSKCGLGFVHRRKDAMSRDKKYHYRYYSCKTYKHIHELEKCGNKIWRADKLEELIINRVNNYSLASRNVDKEDELDSLNEKLKVEHAKKKRLFELYINGRYEVSELDSMMNDIDAQINYYESQIEANEELKENKKIQENLANLATVDFDSLEFREKQLYLKSLINKIYIDGEQVTIEWL

SEQ ID NO: 7073 - protein, 485 aa, synthetic construct
MTKKVAIYTRVSTTNQAEEGFSIDEQIDHLTKYAEAMGWQVSDTYTDAGLSGAKLERPAMQRLINDIENKAFDTVLVYKLDRLSRSVRDTLYLVKDVFTKNRIDFISLNESIDTSSAMGSLFLTILSAINEFERENIKERMTMGKLGRAKSGKSMMWTKTAFGYYHNRKTGILEIVPLQATIVEQIFTDYLSGISLTKLRDKLNESGHIGKDIPWSYRTLRQTLGNPVYCGYIKFKDSLFEGMHKPIIPYETFLKVQKELEERQQQTYERNNNPRPFQAKYMLSGMARCGYCGAPLRIVLGHKRKDGSRTMKYHCANRSPRKTKGVTVYNDNKKCDSGTYDLSNLENTVIDNLIGLQENDDSLLKIINGNNQPILDTSSLKEQISQIDKKIQKNSDLYLNDLITMDELKDRTDSLQAEKKLLKAKIGENKFNDSTDMFELVKTQLGSIPINELSYDNKKKIVNNLVSKVDVTADNVDIIFKFQLT

SEQ ID NO: 7074 - protein, 485 aa, synthetic construct
MTKKVAIYTRVSTTNQAEEGFSIDEQVDRLTKYAEAMGWQVSDTYTDAGFSGAKLERPAMQRLINDIENKAFDTVLVYKLDRLSRSVRDTLYLVKDVFTKNKIDFISLNESIDTSSAMGSLFLTILSAINEFERENIKERMTMGKLGRAKSGKSMMWTKTAFGYYHNRKTGILEIVPLQATIVEQIFTDYLSGISLTKLRDKLNESGHIGKDIPWSYRTLRQTLDNPVYCGYIKFKGSLFEGMHESIIPYETYLKVQKELEERQQQTYERNNNPRPFQAKYMLSGMARCGYCGAPLRIVLGHKRKDGSRTMKYHCANRFPRRTKGVTVYNDNRKCDSGAYDLSNLENTVIDNLIGFQENNDSLLKIINDNNQPILDTSSFKEQISQIDKKIQKNSDLYLNDFITMDELKDRTDRLQAEKKLLKAKLSEDKFNDSTDVSELVRTQLGSIPINELSYDNKKKIVNNLVSKVDVTADNVDIIFKFQLA

SEQ ID NO: 7075 - protein, 452 aa, synthetic construct
MKAAIYIRVSTREQVENYSIQAQTEKLTALCRSKDWDVYDIFIDGGYSGSNMNRPALNEMLSKLHEIDAVVVYRLDRLSRSQRDTITLIEEYFLKNNVEFVSLSETLDTSSPFGRAMIGILSVFAQLERETIRDRMVMGKIKRIEAGLPLTTAKGRTFGYDVIDTKLYINEEEAKQLQLIYDIFEEEQSITLLQKRLKKLGFKVHTYNRYNNWLTNDLYCGYVSYKDKVHVKGIHEPIISEEQFYRVQEIFTRMGKNPNMNRDSASLLSNLVVCSKCGLGFVHRRKDTMSRGKKYHYRYYSCKTYKHTHELEKCGNKIWRADKLEELIIDRVNDYSFASRNVDKEDELDSLNEKLKIEHAKKRRLFDLYINGSYEVSELDGMMSDIEAQINYYESQIEANEELKKNKKIQENLANLATVDYDSLEFREKQLYLKSLINKIYIDGEQVTIEWL

SEQ ID NO: 7076 - protein, 452 aa, synthetic construct; identical to SEQ ID NO: 4841

SEQ ID NO: 7077 - protein, 452 aa, synthetic construct
MKAAIYIRVSTREQVENYSIQAQTEKLTALCRSKGWDVYDIFIDGGYSGSNMNRPALNEMLSKLHEIDAVVVYRLDRLSRSQRDTITLIEEYFLKNNVEFVSLSETLDTSSPFGRAMIGILSVFAQLERETIRDRMVMGKIKRVEAGLPLTTAKGRTFGYDVIDTKLYINEEEAKQLRLIYDIFEEEQSITFLQKRLKKLGFKVRTYNRYNNWLTNDLYCGYVSYKDKVHVKGIHEPIISEEQFYRVQEIFTRMGKNPNTNRDSASLLNNLVVCSKCGLGFVHRRKDTVSRGKKYHYRYYSCKTYKHTYELEKCGNKIWRADKLEELIINRVNNYSFASRNVDKEDELDSLNEKLKIERAKRKRLFDLYINGSYDVSVLDSMMNDIDARINYYGSQIEANEGLKRNKKIQENLAELATVDFDSLEFREKQLYLKSLINKIYIDGEQVTIEWL

SEQ ID NO: 7078 - protein, 452 aa, synthetic construct
MKAAIYIRVSTREQVENYSIQAQTEKLTALCRSKDWDVYDIFIDGGYSGSNMNRPALNEMLSKLHEIDAVVVYRLDRLSRSQRDTITLIEEYFLKNNVEFVSLSETLDTSSPFGRAMIGILSVFAQLERETIRDRMVMGKIKRIEAGLPLTTAKGRTFGYDVIDSKLYINEEEAKQLQLIYDIFEEEQSITSLQKRLKKLGFKVRTYNRYNNWLTNDLYCGYVSYKDKVHVKGIHEPIISEEQFYRVQEIFTRMGKNPNMNRDSASLLNNLVVCSRCGLGFVHRRKGTMSRGKKYHYRYYSCKTYKHTHELEKCGNKIWRADKLEELIINRVNDYSLASRNVDKEDELDSLNEKLEVEQAKKKRLFELYINGSYEVSELDSMMNDIDAQINYYESQIEANKEPKKSKKIQENLANLATVDYDSLEFREKQLYLKSLINKIYIDGEQVTIEWL

SEQ ID NO: 7079 - protein, 452 aa, synthetic construct
MKAAIYIRVSTREQVENYSIQAQTEKLTALCRSKDWDVYDIFIDGGYSGSNMNRPALNEMLSKLHEIDAVVVYRLDRLSRSQRDTITLIEEYFLKNNVEFVSLSETLDTSSPFGRAMIGILSVFAQLERETIRDRMVMGKIKRIEAGLPLTTAKGRTFGYDVIDTKLYINEEEAKQLQLIYDIFEEVQSITFLQKRLKKLGFKVHTYSRYNNWLTNDLYCGYVSYKDKVHVKGIHEPIISEEQFYRVQEIFARMGKNPNMNRDSASLLNNLVVCSKCGLGFVHRRKDTMSRGKKYHYRYYSCKTYKHTHELEKCGNKIWRADRLEELIINRVNNYSFASRNVDKEGELDGLNEKLKIEHAKKKRLFDLYINGSYGVSELDSMMSDIDAQINYYESQIEANEELKKNKKIQENLANLATVDYDSLEFREKQLYLKSLINKIYIDGEQVTIEWL

SEQ ID NO: 7080 - protein, 485 aa, synthetic construct
MTKKVAIYTRVSTTNQAEEGFSIDEQTDRLTRYAEAMGWQVSDTYTDAGFSGAKLERPAMQRLINDIENKEFDTVLVYKLDRLSRSVRDTLYLVKEVFTKNKIDFISLNESIDTSSAMGSLFLTILSAINEFERENIKERMTMGKLGRAKSGKSMMWTKTAFGYYHNRKTGILEIVPLQATIVEQIFTDYLSGISLTKLRDKLNESGHIGKDIPWSYRTLRQTLDNPVYCGYIKFKDSLFEGMHKPIIPYETYLKVQKELEERQQQTYERNNNPRPFQAKYMLSGMARCGYCGAPLRIVLGRKRKDGSRTMKYHCANRFPRNTKGITVYNDNKKCDSGTYDLGSLENIVIDNLIGFQENNDSLLKIINGNNQPILDTSSFKEQISQIDKKIQKNSDLYLNDFITMDELKDRTDSLLAEKKLLKAEISENKFDDSTDVLELVKTQLGSIPINELSYDNRKKIVNNLVSKVDVTADNVDIIFKFQLA

SEQ ID NO: 7081 - protein, 452 aa, synthetic construct
MKAAIYIRVSTQEQVGNYSIQAQTEKLTALCRSKDWDVYDIFIDGGYSGSNMNRPALNEMLSKLHEIDAVVVYRLDRLSRSQRDTTTLIEEYFLKNNVEFVSLSETLDTSSPFGRAMIGILSVFAQLERETIRDRMVMGKIKRIEAGLPLTTARGRTFGYDVIDTKLYINEEEAKQLQLIYDIFEEEQSITSLQKRLKRLGFKVRTYNRYNNWLTNDLYCGYVSYKDKVHVKGIHEPIISEEQFYRVQEIFTRMGKNPNMNRGSASLLSNLVVCSKCGLGFVHRSKDTMSRGKKYHYRYYSCKTYKHTHELEKCGNKTWRADKLEELIINRVNNYSFASRNVDKEDELDSLNEKLKIEHARKRRLFDLYINGSYEVSELNSMMNDIDAQINHYESQIEANEELKENKKIQESLADLATVDFDSLEFREKQLYLKSLINKIYIDGEQVTIEWL

SEQ ID NO: 7082 - protein, 485 aa, synthetic construct
MTKKVAIYTRVSTTNQAEEGFSIDEQIDRLTKYAEAMSWQVSDTYTDAGFSGAKLERPAMQRLINDIEYKAFDTVLVYKLDRLSRSVRDTLYLVKEVFAKNKIDFISLSESIDTSSAMGSLFLTILSAINEFERENIRERMTMGKLGRAKSGKSMMWTKTAFGYYHNRQTGILEIVPLQATIVEQIFTDYLSGISLTKLRDKLNESGHIGKDIPWSYRTLRQTLDNPVYCGYIKFKDSLFEGMHKPIIPYETYLKVQKELEERQQQAYGRNNNPRPFQAKYMLSGMARCGYCGAPLRIVLGHKRKDGSRTMKYHCANRFPRKTKGVTVYNDNKKCDSGTYELSNLENTVIDNLIGLQENNDSLLKIINGNNQPTLDTSSLKKQISQIDKKIQRNGDLYLNDFITMDELKDRTDSLQAKKKLLKAKISENKFNDGTDVFELVKAQLGSIPINELSYDNKKKIVNNLVSKVDVTADNVDIIFKFQLA

SEQ ID NO: 7083 - protein, 452 aa, synthetic construct
MKAAIYIRVSTREQVENYSIQAQTEKLTALCRSKDWDVYDIFIDGGYSGSNMNRPALNEMLSKLHEIDAVVVYRLDRLSRSQRDTITLIEEYFLKNNVEFVSLSETLDTSSPFGRAMIGILSVFAQLERETIRDRMVMGKIKRIEAGLPLTTAKGRTFGYDVIDTKLYINEEEAKQLQLIYDIFEEEQSITFLQKRLKKLGFKVRTYSRYNNWLTNDLYCGYVSYKDKVHVKGIHEPIISEEQFYRVQEIFTRMGKNPNMNRDSASLLNNLVVCSKCGLGFVHRRKDTMSRGKKYHYRYYSCKTYKHTHELEKCGNKIWRADKLEELIINRVNNYSFASRDMDKEDELDSLSEKLKIERARKKRLFDLYINGSYEVSELDSMMNDIDAQINYYESQIEANEELRKNKKIQENLADLATVDYDNLGFREKQLYLKSLINKIYIDGEQVTIEWL

SEQ ID NO: 7084 - protein, 485 aa, synthetic construct
MTKKVAIYTRVSTTNQAEEGFSIDEQIDRLTKYAEAMGWQVSDTYTDAGFSGAKLERPAMQRLINDIENKAFDTVLVYKLDRLSRSVRDTLYLVKDVFAKNKIDFISLSESIDTSSAMGSLFLTILSAINEFERENIKERMTMGKLGRAKSGKSMMWTKTAFGYYHNRKTGILEIVPLQATIVEQIFTDYLSGISLTKLRDKLNESGHIGKDIPWSYRTLRQTLDNPVYCGYIKFKDSLFEGMHKPIIPYETYLKVQKELEERQQQAYERNNNPRPFQAKYMLSGMARCGYCGAPLRIVLGRKRKDGSRTMKYHCANRFPRKTKGVTVYNDNKKCDSGTYDLSNLENTVIDDLIGLQENNDSLLKIINGNNQPILDISSFKEQISQIDKKIQKNSDLYLNDFITMDELKDRTDSLQAEKKLLKAKISENKFNDSTDVFELVKTQLGSVPINELSYDNKKKIVNNLVSKVDVTADNVDIIFKFQLA

SEQ ID NO: 7085 - protein, 452 aa, synthetic construct
MKAAIYIRVSTREQVENYSIQAQTEKLTALCRSKDWDVYDIFIDGGYSGSNMNRPALNEMLSKLHEIDAVVVYRLDRLSRSQRDTITLIEEYFLKNNVEFVSLSETLDTSSPFGRAMIGILSVFAQLERETIRDRMVMGKIKRIEAGLPLTTAKGRTFGYDVIDTKLYINEEEAKQLRLIYDIFEEEQSITSLQKRLKGLGFKVRTYNRYSNWLTNDLYCGYVSYKDKVHVKGIHEPIISEEQFYRVQEIFARMGKNPNMNRDSASLLNNLVVCSKCGLGFVHRRKDTMSRDKKYHYRYYSCKTYKHIHELEKRGNKIWRADKLEELIIDRVNNYSLASRNVDKEDELDGLNEKLKTEHARKKRLFDLYINGSYGVSELDSMMSDIDAQINYYESQIEANEELKKNKKIQEDLADLSTVDFDSLEFREKQLYLKSLINKIYIDGEQVTIEWL

SEQ ID NO: 7086 - protein, 452 aa, synthetic construct
MKAAIYIRVSTREQVENYSIQAQTERLTALCRSKDWDVYDIFIDGGYSGSNMNRPALNEMLSKLHEIDAVVVYRLDRLSRSQRDTITLIEEYFLKNNVEFVSLSETLDTSSPFGRAMIGILSVFAQLERETIRDRMVMGKIKRIEAGLPLTTAKGRTFGYDVIDSKLYINEEEAKQLQLIYDIFEEEQSITFLQKRLKKLGFKVRTYSRYNSWLTNDLYCGYVSYKDKVHVKGIHEPIISEEQFYRVQEIFTRMCKNPNMNRDSASLLNNLVVCGKCGLGFVHRRKDTMSRGKRYHYRYYSCKTYKHTHELEKCGNKIWRADKLEELVINRVNNYSFASRNVDKEDELDSLNEKLKVEHANKKRLFDLYINGSYNVSELDSMMNDIDAQINYYVSQIEANEELKKNKKIQENLAGLATVDFDSLEFREKQLYLKSLINKIYIDGEQVTIEWL

SEQ ID NO: 7087 - protein, 452 aa, synthetic construct
MKAAIYIRVSTREQVENYSIQAQTEKLTALCRSKDWDVYDIFIDGGYSGSNMNRPALNEMLSKLHEIDAVVVYRLDRLSRSQRDTITLIEEYFLKNNVEFVSLSETLDTSSPFGRAMIGILSVFAQLERETIRDRMVMGKIKRIEAGLPLTTAKGRTFGYDVIDTRLYINEEEAKQLRLIYDIFEEEQSITFLQKRLKKLGFKVHTYNRYNNWLTNDLYCGYVSYKDKVHVKGIHEPIISEEQFYRVQEIFTRMGKNPNMNRDSASLLNSLVVCSKCGLGFVHRRKDTTSRGKKYHYRYYSCKTYKHIHELEKCGNKIWRADKLEELIINRVNNYSFASRNVDKEDELGSLNEKLKIERTKKKRLFDLYINGSYEVSELDSMMNDIDAQISYYESQIEANEELKKNKKIQENLANLATVDYDSLEFREKQLYLKSLINKIYIDGEQVTIEWL

SEQ ID NO: 7088 - protein, 452 aa, synthetic construct
MKAAIYIRVSTREQVENYSIQAQTEKLTALCRSKDWDVYDIFVDGGYSGSNMNRPALNEMLSKLHEIDAVVVYRLDRLSRSQRDTITLIEEHFLKNNVEFVSLSETLDTSSPFGRAMIGILSVFAQLERETIRDRMVMGKIKRIEAGLPLTTAKGRTFGYDVIDTKLYINEEEAKQLQLIYDIFEEEQSITFLQKRLKELGFKVRTYNRYNNWLTNDLYCGYVSYKDKVHVKGIHEPIISEEQFYRVQEIFARMGKNPNMNRDSASLLNNLVVCSKCGLGFVHRRKDIMSHGKKYHYRYYSCKTYKHIHELEKCGNKIWRADKLEELIINRVNNYSLANRNVDKEDELGSLNEKLKIEHAKKKRLFDLYINGSYEVSELDSMMNDIDAQINYYESQIEANEELRKNKKIQENLAHLATVDFDSLEFREKQLYLKSLINKIYIDGEQVTIEWL

SEQ ID NO: 7089 - protein, 452 aa, synthetic construct
MKAAIYIRVSTREQVENYSIQAQTEKLTALCRSKDWDVYDIFIDGGYSGSNMNRPALNEMLSKLHEIDAVVVYRLDRLSRSQRDTITLIEEYFLKNNVEFVSLSETLDTSSPFGRAMIGILSVFAQLERETIRDRMVMGKIKRIEAGLPLTTAKGRTFGYDVIDTKLYINEEEAKQLRLIYDIFEEEQSITSLQKRLKKLGFKVRTYNRYNNWLTNDLYCGYVSYKNKVHVKGIHEPIISEEQFYRVQEIFTRMGKNPNMNRDSASLLNNLVVCSKCGLGFVHRRKDAMSRSKKYHYRYYSCKTYKHIHELEKCGNKIWRADELEELIINRVNNYSLASRNVDKEAELDSLNEKLRIEHAKKKRLFDLYINGSYEVSELDSMMNDIDAQINYYESQIEANEELKKAKKIQENLANLATVDFDSLEFREKQLYLKSLINKIYVDGEQVTIEWL

SEQ ID NO: 7090 - protein, 452 aa, synthetic construct
MKAAIYIRVSTREQVENYSIQAQTEKLTALCRSKDWDVYDIFIDGGYSGSNMNRPALNEMLSKLHEIDAVVVYRLDRLSRSQRDTITLIEEYFLKNNVEFVSLSETLDTSSPFGRAMIGILSVFAQLERETIRDRMVMGKIKRIEAGLPLTTAKGRTFGYDVIDTKLYINEEEAEQLRLIYDIFEEEQSITFLQKRLKKLGFKVRTYSRYNNWLTNDLYCGYVSYKDKVHVKGIHEPIISEEQFYRVQEIFARMGKNPNMNRDSASLLNNLVVCSKCGLGFVHRRKDTTSRGKKYHYRYYSCKTYKHIHELEKCGNKIWRADKLEELVIDRVNNYSPASRNADKEDELDSLNEKLKIEHARRRRLFDLYINGSYEVSELDSMMSDIDAQINYYESQIEANEELKKNKKIQENLANLATVDYDSLEFREKQLYLKSLINKIYIDGEQVTIEWL

SEQ ID NO: 7091 - protein, 485 aa, synthetic construct
MTKKVAIYTRVSTTNQAEEGFSIDEQIDRLTKYAEAMGWQVSDTYTDAGYSGAKLERPAMQRLINDTENKAFDTVLVYKLDRLSRSVRDTLYLVKDVFTKNKIDFISLNESIDTSSAMGSLFLTILSAINEFERENIKERMTMGKLGRAKSGKSMMWTKTAFGYYHNRKTGILEIVPLQATIVEQIFTDYLSGISLTKLRDKLNESGHIGKDIPWSYRTLRQTLDNPVYCGYIKFKDSLFEGMHKPIIPYETYLKVQKELEERQQQTYERNNNPRPFQAKYMLSGMARCGYCGAPLRIVLGHKRKDGSRTMKYHCANRFPRKTKGVTVYNDNKKCDSGTYDLSNLENTVINNLIGFQENNDSLLKIINGNNQPILDTSSFKEQISQIDKKIQKNSDLYLNDFITMEELKDRTDSLQAEKKLLKAKISESKFNDSTDVFELVKTQLGSIPINELSYDNKKKIVNNLVSKVDVTADNVDIIFKFQLA

SEQ ID NO: 7092 - protein, 452 aa, synthetic construct
MKAAIYIRVSTREQVENYSIQAQTEKLTALCRSKDWDVYDIFIDGGYSGSNMNRPALSEMLSKLHEIDAVVVYRLDRLSRSQRDTIALIEEYFLKNNVEFVSLSETLDTSSPFGRAMIGILSVFAQLERETIRDRMVMGKIKRIEAGLPLTTAKGRTFGYDVIDAKLYINEEEAKQLQLIYDIFEEEQSITFLQKRLKKLGFKVRTYNRYNNWLTNDLYCGYVSYKDKVHVKGIHEPIISEEQFYRVQEIFTRMGKNPNMNRDSASLLSNLVVCSKCGLGFVHRRKDTKSRGKKYHYRYYSCKTYKHTHELEKCGNKIWRADKLEELIINRVNNYSFASRNADKEDELDSLNEKLKIEHAKKKRLFDLYINGSYEASELDSMMNDIDAQISYYESQIEANEDLKKNKRIQESLADLATVDFDSLEFREKQLYLKSLINKIYIDGEQVTIEWL

SEQ ID NO: 7093 - protein, 452 aa, synthetic construct
MKAAIYIRVSTREQVENYSIQAQTEKLTALCRSKDWDVYDIFIDGGYSGSNMNRPALNEMLSKLHEIDAVVVYRLDRLSRSQRDTITLIEEYFLKNNVEFVSLSETLDTSSPFGRAMIGILSVFAQLERETIRDRMVLGKIKRVEAGLPLTTAKGRTFGYDVIDTKLYINEEEAKQLQLIYDIFEEEQSITSLQKRLKKLGFKVRTYNRYNSWLTNDLYCGYVSYKDKVHVKGIHEPIISEEQFYRVQEIFTRMGKNPNMNRDSASLLNNLVVCGKCGLGFVHRRKDTMSRGKKYHYRYYSCRTYKHTHELEKCGNKIWRADKLEELIINRVNNYSFASRNVDKEDELDSLNEKLKIEHAKKRRLFDLYINGSYEVSELDSMMNDIDAQINYYESQIEANEELRKNKKIQENLADLATVDYDSLEFREKQLYLKSLINKIYIDGEQVTIEWL

SEQ ID NO: 7094 - protein, 452 aa, synthetic construct
MKAAIYIRVSTQEQVGNYSIQAQTEKLTALCRSKDWDVYDIFIDGGYSGSNMNRPALNEMLSKLHEIDAVVVYRLDRLSRSQRDTTTLIEEYFLKNNVEFVSLSETLDTSSPFGRAMIGILSVFAQLERETIRDRMVMGKIKRIESGLPLTTAKGRTFGYDVIDTKLYINEEEAKQLQLIYDIFEEEQSITSLQKRLKKLGFKVRTYNRYNNWLTNDLYCGYVSYKDKVHVKGIHEPIISEEQFYRVQEIFTRMGKNPNMNRDSASLLSNLVVCSKCGLGFVHRSKDTMSRGKKYHYRYYSCKTYKHAHELEKCGNKTWRADKLEELIINRVNNYSFVSRNVDKEDELDSLNGKLKIEHAKKRRLFDLYINGNYEVSELDSMMNDIDAQINYYESQIEANEGLKKNKKIQENLADLAAVDFDSLEFREKQLYLKSLINKIYIDGEQVTIEWL

SEQ ID NO: 7095 - protein, 452 aa, synthetic construct
MKAAIYIRVSTQEQVGNYSIQAQTEKLTALCRSKDWDVYDIFVDGGYSGSNMNRPALNEMLSKLHEIDAVVVYRLDRLSRSQRDTTTLIEEYFLKNNVEFVSLSETLDTSSPFGRAMIGILSVFAQLERETIRDRMVMGKIKRIEAGLPLTTAKGRTFGYDVIDTKLYINEEEAKQLQLIYDIFEEEQSITSLQKRLKELGFKVRSYSRYNNWLTNDLYCGYVSYKDKVHVKGIHEPIISEEQFYRVQEIFTRMGKNPNMNRDSASLLSNLVVCSKCGLGFVHRSKDTMSRGKKYHYRYYSCKTYKHTHELEKCGNKTWRADKLEELIISRVNNYSSASRSVDKEDDLDSLNEKLKTEHAKKKRLFDLYINGSYEVSELDSMMNDIDAQINYYESQIEANEELKKNKKIQESLAGLATVDFDSLEFREKQLYLKSLINKIYIDGEQVTIEWL

SEQ ID NO: 7096 - protein, 452 aa, synthetic construct
MKAAIYIRVSTREQVENYSIQAQTEKLTALCRSKDWDVYDIFIDGGYSGSNMNRPALNEMLSKLHEIDAVVVYRLDRLSRSQRDTITLIEEYFLKNNVEFVSLSETLDTSSPFGRAMIGILSVFAQLERETIRDRMVMGKIKRIEAGLPLTTAKGRTFGYDVIDTKLYINEEEARQLQLIYDIFEEEQSITSLQKRLKKLGFKVRTYNRYNNWLTNDLYCGYVSYKDKVHVKGIHEPIISEEQFYRVQEIFARMGKNPNMNRDSASLLNNLVVCSKCGLGFVHRRKDTMSRGKKYHYRYYSCKTYKHTHELEKCGNKIWRADKLEELVINRVNNYSFASRNVDKEDELDSLNEKLKIERAKKKRLFDLYINGSYEVSELDSMMNDIDAQINYYESQIEANEELKKSKKIQEDLADLATVDFDSLEFREKQLYLKSLINKIYIDGEQVTIEWL

SEQ ID NO: 7097 - protein, 452 aa, synthetic construct
MKAAIYIRVSTREQVENYSIQAQTEKLTALCRSKDWDVYDIFIDGGYSGSNMNRPALNEMLSKLHEIDAVVVYRLDRLSRSQRDTITLIEEYFLKNNVEFVSLSETLDTSSPFGRAMIGILSVFAQLERETIRDRMVMGKVKRIEAGLPLTTAKGRTFGYDVIDTKLYINEEEAKQLQLIYDIFEEEQSITFLQKRLKKLGFKVRTYNRYNNWLTNDLYCGYVSYKDKVHVKGIHEPIISEEQFYRVQEIFTRMGKNPNMNRDSASLLNNLVVCSKCGLGFVHRRKDTMSRGKKYHYRYYSCKTYKHTHELEKCGNKIWRADKLEELIIDRVNNYSFASRNVDKEDELDSLNEKLKIEHAKKKRLFDLYINGSYEVSELDSMMNDIDAQINYYESQIEANEELKKNKKIQENLANLAAVDYDSLEFREKQLYLKSLINKIYIDGEQVTIEWL

SEQ ID NO: 7098 - protein, 469 aa, synthetic construct
MSYTTPVRAAVYLRISEDRSGEQLGVARQREDCLKLCDQRKWVPVEYLDNDVSASTGKRRPAYEQMLADITAGKIAAVVAWDLDRLHRRPIELEAFMSLADEKRLALATVAGDVDLATPQGRLVARLKGSVAAHETEHKKARQRRAARQKAERGHPNWSKAFGYLPGPDGPEPDPRTAPLVKQAYADILAGASLGDVCRQWNDAGAFTITGRPWTATTLSKFLRKPRNAGLRAYKGARYGPVDRDAIVGKAQWSPLVDEATFWAAQAVLDAPGRAPGRKSVRRHLLTGLAGCGKCGNHLAGSYRTDGRVVYVCKVCHGVAILADNIEPILYHVVAERLAVPDAVDLLRREIHDAAEAETIRLELETLYGELDRLAVERAEGLLTARQVKISTDIVSAKIAKLQARQLDQERLRVFDGIPLGTPQVAGMIAELSPDRFRAVLDALAEVVVQPVGKSGRIFNPERVQVNWR

SEQ ID NO: 7099 - protein, 485 aa, synthetic construct
MTKKVAIYTRVSTTNQAEEGFSIDEQIDRLTKYAEAMGWQVSDTYTDAGLSGARLERPAMQRLISDIENKAFDTVLVYKLDRLSRSVRDTLYLVKEVFTKNEIDFISLNESIDTSSAMGSLFLTILSAINEFERENIKERMTMGKLGRAKSGKSMMWTKTAFGYYHNRKTGILEIVPLQATIVEQIFTDYLSGISLTKLRDKLNESGHIGKDIPWSYRTLRQTLDNPVYCGYIKFKDSLFEGMHKPIIPYETYLKVQKELEERQQQTYGRNNNPRPFQAKYMLSGVARCGYCGAPLRVVLGHKRKDGSRTMKYHCANRFPRKTKGVTVYNDNKKCDSGTYDLSDLENTVIDNLIGFQENNDSLLKIIHGNDQPILDTSSLKKQISQIDKKIQKNSDLYLNDFITMDELKERTDSLQAEKKLLKAKISENKFNDSTDVFELVKTQLGSIPINELCYDNKKKIVNSLVSKVDVTADNVDIIYKFQLA

SEQ ID NO: 7100 - protein, 485 aa, synthetic construct
MTKKVAIYTRVSTTNQAEEGFSIDEQIDRLTKYAEAMGWQVSDTYTDAGFSGAKLERPAMLRLINDIENKAFDTVLVYKLDRLSRSVRDTLYLVKDVFTKNKIDFISLNESINTSSAMGSLFLTILSAINEFERENIKERMTMGKLGRAKSGKSMMWTKTAFGYYHNRITGILEIVPLQATIVEQIFTDYLSGISLTKLRDKLNESGHIGKDIPWSYRTLRQTLDNPVYCGYIKFKDSLFEGMHKPIIPYETYLKVQKELKERQQQTRERNNNPRPFQAKYMLSGMARCGYCGAPLRIVLGHKRKDGSRTMKYHCANRFPRKTKGVTVYNDNKKCNSGTYDLSNLENTVIDNLIGFQENDDSLLKIINGNNQPILDTSSLEKQISQIDKKIQKNSDLYLNDFITMDELKDRTDSLQAEKKLLKAKIGESKLNDSTDVFELVKTQLGSIPINELSYDNKKKIVNNLVSKVDVTANNVDIIFKFQLA

SEQ ID NO: 7101 - protein, 485 aa, synthetic construct
MTKKVAIYTRVSTTNQAEEGFSIDEQIDRLTKYAEAMGWQVSDTYTDAGSSGAKLERPAMQRLINDIEDKAFDTVLVYKLDRLSRSVRDTLYLVKDVFTKNKIDFISLNESIDTSSAMGSLFLTILSAINEFERENIKERMTMGKLGRAKSGKSMMWTKTAFGYYHNRKTGILEIVPLQATVVEQIFADYLSGTSLTKLRDKLNESGHIGKDIPWSYRTLRQTLDNPVYCGYIKFKDSLFEGMHKPIIPYETYLKVQKELEERQQQTYERNNNPRPFQAKYMLSGTARCGYCGAPLRIVLGHKRKDGSRTMKYHCANRFPRKTKGVTVYNDNKKCDSGTYDLSNLENTVIDNLIGFQENNDSLLKIINGNSQPILDTSSLEKQVSQIDKKIQKNSDLYLNDFITMDELKDRTDSLQAEKKLLKAKISENKFNDSTDVFELVKTQLGSIPINELSYDNKKKIVNNLVSKVDVTADNVDIIFKFQLA

SEQ ID NO: 7102 - protein, 485 aa, synthetic construct
MTKKVAIYTRVSTTTQAEEGFSIDEQIDRLTKYAEAMGWQVSDTYTDAGYSGAKLKRPAMQRLINGIENKAFDTVLVYKLDRLSRSVRDTLYLVKDVFTKNKIDFISLSESIDTSSAMGSLFLTILSAINEFERENIKERMTMGKLGRAKSGKSMMWTKTAFGYYHNRKTGILEIVPPQATIVEQIFTDYLSGISLTKLRDKLNENGHIGKDIPWSYRTLRQTLDNPVYCGYIKFKGSLFEGMHKPIIPYETYLKVQKELEERQQQTYERNNNPRPFQAKYMLSGMARCGYCGAPLKVVLGHKRKDGSRTMKYHCANRFPRKTKGVTVYNDNRKCDSGTYDLSNLENTVIDNLIGFQENNDSLLKIINGSNQPILDTSSFKEQISQIDKKIQKNSNLYLNDFITMDELKDRTDSLQAEKRLLEAKISENKFNDRTDVFELVKTQLGSIPINELSYDNRKKIVNNLVSKVDVTADNVDIIFKFQLA

SEQ ID NO: 7103 - protein, 452 aa, synthetic construct
MKAAIYIRVSTQEQVENYSIQAQTEKLTALCRSKDWDVYDIFIDGGYSGSNMNRPALNEMLSKLHEIDAVVVYRLDRLSRSQRDTITLIEEYFLKNNVEFVSLSETLDTSSPFGRAMIGILSVFAQLERETIRDRMVMGKIKRIEAGLPLTTAKGRTFGYDVIDTKLYINEEEARQLQLIYDIFEEEQSITFLQKRLKKLGFKVRTYNRYIGWLTNDLYCGYVSYKDKVHVKGIHEPIISEEQFYRVQEIFTRMGKNPNMNRDSASLLNNLVVCSKCGLGFVHRRKDTMSRGKKYHYRYYSCKTYKHTHELEKCGNKIWRADKLEELIINRVNNYSLASRNVDKEDELDSLDERLKIEHAKKKRLFDLYINGSYEVSELDSMMSDIDAQISYYESQIEANEELKRNKKIQENLADLATVDYDSLEFREKQLYLKSLINKIYIDGEQVTIEWL

SEQ ID NO: 7104 - protein, 452 aa, synthetic construct
MKAAIYIRVSTREQVENYSIQAQTEKLTALCRSKDWDVYDIFVDGGYSGSNMNRPALNEMLSKLHEIDAVVVYRLDRLSRSQRDTITLIEEYFLKNNVEFVSLSETLDTSSPFGRAMIGILSVFAQLERETIRDRMVMGKIKRIEAGLPLTTAKGRTFGYDVIDTKLYINEEEAKQLQLIYDIFEEEQSITFLQKRLKKLGFKVRTYNRYNNWLTNDLYCGYVSYKDKVHVKGIHEPIISEEQFYRVQEIFTRMGKNPNMNRDSASLLNNLVVCSKCGLGFVHRRKDAMSRDKKYHYRYYSCKTYKHIHELEKCGNKIWRADKLEELIISRVNNYSLASRNVDKEDELDSLNEKLKIEHAKKKRLFDLYINGSYEVSELDSMMCDIDAQINYYESQIEANEELKKNKKIQENLARLATVDYDSLEFREKQLYLKSLINKIYIDGEQVTIEWL

SEQ ID NO: 7105 - protein, 485 aa, synthetic construct
MTKKVAIYTRVSTTNQAEEGFSIDEQIDRLTKYAEAMGWQVSDTYTDAGFSGAKLERPAMQRLINDIENEVFDTVLVYKLDRLSRSVRDTLYLVKDVFTKNKIDFISLNESIDTSSAMGSLFLTILSAINEFERENIKERMTMGKLGRAKSGKSMMWTKTAFGYYHNRKTGILEIVPLQATIVEQIFTDYLSGISLTKLRDKLNEGGHIGKDIPWSYRTLRQTLDNPVYCGYIKFKGSLFEGMHKPIIPYETFLRVQKELEERQQQTYERNNNPRPFQAKYMLSGMTRCGYCGAPLRIVLGHKRKDGSRTMKYHCANRFPRKTKGITVYNDNKKCDSGTYELSNLENTVIDILTGFQENNDSLLKIINGDNQPILDTSSLKKQISQIDKKIQKNGDLYLNDLITMDELKDRTDSLRAEKKLLKARIRENKFNDSADMLELVKTQLGSIPINELSYDGKKKIVNNLVSKVDVTADYVDIIFKFQPA

SEQ ID NO: 7106 - protein, 452 aa, synthetic construct
MKAAIYIRVSTREQVENYSIQAQTEKLTALCRSKDWDVYDIFIDGGYSGSNMNRPALNEMLSKLHEIDAVVVYRLDRLSRSQRDTITLIEEYFLKNSVEFVSLSETLDTSSPFGRAMIGILSVFAQLERETIRDRMVMGKIKRIEAGLPLTTAKGRTFGYDVIDTKLYINEEEAKQLRLIYDIFEEEQSITLLQKRLKKLGFKVRTYSRYNNWLTNDLYCGYVSYKDKVHVKGIHEPIISEEQFYRVQEIFTRMGKNPNMNRNSASLLSNLVVCSKCGLGFVHRRKDTMSRGKKYHYRYYSCKTYKHTHELEKCGNKIWRADKLEELIINRVNNHSLASRNVDKEDELDRLNEKLKIEHAKKKRLFDLYINGSYEVGELDSMMNDIDVQINYYESQIEANEELKKNKKIQEDLADLATVDYDSLEFREKQLYLKSLINKIYIDGEQVTIEWL

SEQ ID NO: 7107 - protein, 485 aa, synthetic construct
MTKKVAIYTRVSTTNQAEEGFSIGEQIDRLTKYAEAMGWQVSDTYTDAGLSGAKLERPAMQRLINDIENKAFDTVLVYKLDRLSRSVRDTLYLVKDVFTKNKIDFISLSESIDTSSAMGSLFLTILSAINEFERENIKERMTMGKLGRAKSGKSMMWTRTAFGYYHNRKTGILEIVPLQATIVEQIFTDYLSGISLTKLRDKLNEGGHIGKDIPWSYRTLRQTLDNPVYCGYIKFKDSLFEGMHKPIIPYETYLKVQKELEERQQQTYERNNNPRPFQAKYMLSGIARCGYCGAPLKIVLGHKRKDGSRTMKYHCANRFPRKTKGITVYNDNKKCDSGTYDLCNLENTVIDNLIGFQESNDSLLKIINGNNQPILDTNSLKKQISQIDKKIQKNSDLYLNDFITMDELKDRTDSLQAEKKLLKAKISENKFNDNTDVFELVKTQLGSIPIHELSYDNKKKIVNNLVSRVDVTADNVDIIFKFQLA

SEQ ID NO: 7108 - protein, 469 aa, synthetic construct
MSYTTPVRAAVYLRISEDRSGEQLGVARQREDCLKLCDQRKWVPVEYLDNDVSASTGKRRPAYEQMLADIIAGKIAAVVAWDLDRLHRRPIELEAFMSLADEKRLALATVAGDVDLATPQGRLVARLKGCVAAHETEHKKARQRRAARQKAERGYPNWSKAFGYLPGPNGPVPDPRTAPLVEQAYADILAGASLGDVCRQWNDAGAFTITGRPWTTTTLSKFLRKPRNAGLRAYKGARYGPVDRDAIVGKAQWSPLVDEATFWAAQAVLDASGRAPGRKSVRRHLLTGLAGCGKCGNHLAGSYRTDGRVVYVCKACHGVAILADNIESILYHIVAERLAMPGAVDLLRREIHDAAEAETIRLELETLYGELDRLAVERAEGLLTARQVKISTDIVNAKITKLQARQLDRERLRVLDGIPLGTPQVAGVIAELSPDRFRAVLDVLAEVVVQPVGKSGGIFNPERVQVNWR

SEQ ID NO: 7109 - protein, 452 aa, synthetic construct
MKAAIYIRVSTREQVENYSIQAQTEKLTALCRSKDWDVYDIFIDGGYSGSNMDRPALNEMLSKLHEIDAVVVYRLDRLSRSQRDTITLIEEYFLKNNVEFVSLSETLDTSSPFGRAMIGILSVFAQLERETIRDRMVMGKIKRVEAGLPLTTAKGRTFGYDVIDTKLYVNEEEAKQLQLIYDIFEEEQSITFLQKRLKKLGFRVRTYNRYNSWLTNDLYCGYVSYKDKVHVKGIHEPIISEEQFYRVQEIFTRMGKNPNMNRDSASLLNNLVVCSKCGLGFVHRRKDTMSRGKKYHYRYYSCKTYKHTHELEKCGNKIWRADKLEELIINRVNNYSFASRNADKEDELDSLDEKLKIEHAKKRRLFDLYINGSYEVSELDSMMNDIDAQISYYESQIEANEELKKNKKIQENLADLATVDYDSLEFREKQLYLKSLINKIYIDGEQVTIEWL

SEQ ID NO: 7110 - protein, 485 aa, synthetic construct
MTKKVAIYTRVSTTNQAEEGFSIDEQIDRLTKYAEAMGWQVSDTYTDAGFSGAKLERPAMQRLINDIENKAFDTVLVYKLDRLSRSVRDTLYLVKDVFTKNKIDFISLNESINTSSAMGSLFLTILSAINEFERENIKERMTMGKLGRAKSGKSMMWTRTAFGYHHNRKTGILEIVPLQATIVEQIFTDYLSGISLTKLRDKLNESGHIGKDIPWSYRTLRQTLDNPVYCGYIKFKDSLFEGMHKPIIPYETYLKVQKELEERQQQAYERNNNPRPFQAKYMLSGMARCGYCGAPLKIVLGHRRKDGSRTMKYHCANRFPRKTKGVTVYDDNKKCDSGTYDLSILENSVIDILIGFQENNDSLLKIINGNNQPIPDTSSFKRQISQIDEKIQKNSDLYLNDFITMDELRARTDSLQAEKKLLKAKISENKFNDSTDVFELVKTQLGSIPINELSYDNKKRIVNNLVSKVDVTADNVDIIFKFQLA

SEQ ID NO: 7111 - protein, 485 aa, synthetic construct
MTKKVAIYTRVSTTSQVEEGFSIDEQIDRLTKYAEAMGWQVSDTYTDAGFSGAKLKRPAMQRLINDIENKAFDTVLVYKLDRLSRSVRDTLYLVKDVFTKNKIDFISLNESIDTSSAMGSLFLTILSAINEFERENIKERMTMGKLGRAKSGKSMMWTKTAFGYYHNRKTGILEIVPLQATIVEQIFTDYLSGISLTKLRDKLNESGHIGKDIPWSYRTLRQTLDNPVYCGYIKFKDSLFKGMHKPIIPYGTYQKVQKELEERQQQTYERNNNPRPFQAKYMLSGMARCGYCGAPLRIVLGHKRKDGSRTMKYHCTNRFPRKTKGVTVYNDNKKCDSGTYDLSNLENTVIDNLIGFQENNDSLLKIINGNNQPILDTSSFEKQISQIDKKIQKNSDLYLNGFITMDELKDRTDSLQAEKKLLKAKISENKFNDSTDVFELVKTQLGSIPISELSYDNKKKIVNNLVSKVDVTADNVDIIFKFQLA

SEQ ID NO: 7112 - protein, 469 aa, synthetic construct
MSYITPVRAAVYLRISEDRSGEQLGVARQREDCLKLCDQRKWVPVEYLDNDVSASTGKRRPAYEQMLADITAGKIAAVVAWDLDRLHRRPIELEAFMSLADEKRLALATVAGDVDLATPQGRLVARLKGSVAAHETEHKKARQRRAARQKAERGYPNWSKAFGYLPGPNGPEPDPRTAPLVKQAYADILAGASLGDVCRRWNDAGAPTVTGRPWTITALSKFLRKPRNAGLRAYKGARYGPVDREAIVGKAQWSPLVDETTFWAAQAVLDAPGRAPGRKSVRRHLLTGLAGCGKCGNHLAGSYRTDGRVVYVCKACHGVVILADNIEPTLYHIVAERLAMPDAVDLLRREIYDAAEAETIRLELETLYGELDRLAVERAEGLLTARQVKISTDIVNAKITKLQARQLDQERLRVFEGIPLGTPQVAGVIAELSPDRFRAVLDVLAEVVVQPVGKSGRVFNPERVQVNWR

SEQ ID NO: 7113 - protein, 485 aa, synthetic construct
MTKKVAIYTRVSTTNQAEEGFSIDEQIDRLTKYAEAMGWQVSDTYTDAGFSGAKLERPAMQRLINDIENKAFDTVLVYKLDRLSRSVRDTLYLVKDVFTKNKIDFISLNESVDTSSAMGSLFLTILSAINEFERENIKERMTMGKLGRAKSGKSMMWTKTAFGYYHNRKTGILEIVPLQATIVEQIFTDYLSGISLTKLRDKLNESGHIGKDIPWSYRTLRQTLDNPVYCGYIKFRDSLFEGMHKPIIPYETYLKVQKELEERQQQTYERNNNPRPFQAKYMLSGMARCGYCGAPLRIVLGHKRKDGSRTMKYHCANRFPRKTKGVTVHNDNKKCDSGTYDLSNLENTVIDNLIGLQENNDSLLKIINGNNQPILDTSSFEEQISQIDKKIQKNSDLYLNGFITMDELKDRTDSLQAEKKLLKAKISENKFNDSTDVFELVKTQLGSIPISELSYDNKKKIVNNLVSKVDVTADNVDIIFKFQLA

SEQ ID NO: 7114 - protein, 469 aa, synthetic construct
MSYTTPVRAAVYLRISEDRSGEQLGVARQREDCLKLCGQRKWVPVEYLDNDVSASTGKHRPAYEQMLADITAGKIAAVVAWDLDRLHRRPIELEAFMSLADEKRLALATVAGDVDLATPQGRLVARLKGCVAAHETEHKKARQRRAARQKAERGHPNWSKAFGYLPGPNGPEPDPRTAPLVKQAYADILAGASLGDVCRQWNGAGAFTITGRPWTITTLSKFLRKPRNAGLRAYKGARFGPVDRDAIVGKAQWSPLVDEATFWAAQAVLDAPGRAPGRKSVRRHLLTGLAGCGKCGNHLAGSYRTDGRVVYVCKACHGVAILADNVEPILYHIVAERLAMPDAVDLLRREVLDAAEAETIRLELETLYGELDRLAVERAEGLLTARQVKISTDIVNAKITELQARQLDQERLRVFDGIPLGTPQVAGMIAELSPDRFRAVLGVLAEVVVQPVGKSGRIFSPERVQVNWR

SEQ ID NO: 7115 - protein, 452 aa, synthetic construct
MKAAIYIRVSTREQVENYSIQAQTEKLTALCRSKDWDVYDIFVDGGYSGSNMNRPALNEMLSKLHEIDAVVVYRLDRLSRSQRDTITLIEEYFLKNNVEFVSLSETLDTSSPFGRAMIGILSVFAQLERETIRDRMVMGKIKRIEAGLPLTTARGRTFGYDVVDTKLYINEEEAKQLRLIYDIFEEEQSITFLQKRLKKLGFKVRTYNRYNNWLTNDLYCGYVSYKDKVHVKGIHEPIISEEQFYRVQEIFTRMGKNPNMNRDSASLLNNLVVCSKCGLGFVHRRKDAMSRDKKYHYRYYSCKTYKHIHELEKCGNKIWRADKLEELIIDRVNNYSLASRNVDKEDELDSLNEKLKIEHAKRKRLFDLYINGSYEVSELDSMMNDIDAQINYYESQIEASEELKKNKKIQENLAYLATVDFDSLEFREKQLYLKSLINKIYIDGEQVTIEWL

SEQ ID NO: 7116 - protein, 452 aa, synthetic construct
MKAAIYIRVSTQEQVENYSIQAQTEKLTALCRSKDWDVYDIFIDGGYSGSNMNRPALNEMLSKLHEIDAVVVYRLDRLSRSQRDTTTLIEEYFLKNNVEFVSLSETLDTSSPFGRAMIGILSVFAQLERETIRDRMVMGKIKRIEAGLPLTTAKGRTFGYDVIDTKLYINEEEAKQLRLIYDIFEEEQSITFLQKRLKELGFKVRTYNRYNNWLTNDLYCGYVSYKDKVHVKGIHEPIISEEQFYRVQEIFTRMGKNPNMNRDSASLLSNLVVCSKCGLGFVHRSKDTMCRGKKYHYRYYSCKTYKHTHELEKCGNKTWRADKLEELIISRVNNYSFASRNVYKEDELDSLNEKLKIEHAKKRRLFDLYINGSYEVSELDSMMNDIDAQINYYESQIEANEELRKNKKIQENLADLAAVDFDSLEFREKRLYLKSLINKIYIDGEQVTIEWL

SEQ ID NO: 7117 - protein, 452 aa, synthetic construct
MKAAIYIRVSTQEQVENYSIQAQTEKLTALCRSKDWDVYDIFIDGGYSGSNMNRPALNEMLSKLHEIDAVVVYRLDRLSRSQRDTTTLIEEYFLKNNVEFVSLSETLDTSSPFGRAMIGILSVFAQLERETIRDRMVMGKIKRIEAGLPLTTAKGRTFGYDVIDTKLYINEEEAKQLQLIYDIFEEEQSITSLQKRLKKLGFKVRAYNRYNNWLTNDLYCGYVSYKDKVHVKGIHEPIISEEQFYRVQEIFTRMGKNPNMNRDSASLLSNLVVCSKCGLGFVHRSKDTTSRGKKYHYRYYSCKTYKHTHELEKCGNKTWRADKLEELIINRVNNYSFASRNVDKEDELDSLNEKLKTERAKKKRLFDLYINGSYEVSELDSMMNDIDAQINYYESRIEANEELKRNKKIQEGLADLATVDFDSLEFREKQLYLKSLINKIYIDGEQVTIEWL

SEQ ID NO: 7118 - protein, 485 aa, synthetic construct
MTKKVAIYTRVSTTNQAEEGFSIDEQSDRLTKYAEAMGWQVSDTYTDAGFSGAKLERPAMQRLINDIENKAFDTVLVYKLDRLSRSVRDTLYLVKDVFTKNKIDFISLNESIDTSSAMGSLFLTILSAINEFERENIKERMTMGKLGRAKSGKSMMWTKTAFGYYHNRKTGILEIVPLQATIVEQIFSDYLSGISLTKLRDKLNESGHIGKDIPWSYRTLRQTLDNPVYCGYIKFKDSLFEGMHKPIIPYETYLKVQKELEERQQQAYERNNNPRPFQAKYMLSGMARCGYCGAPLRIVLGRKRKDGSRTMKYHCANRFPRKTKGVTVYNDNKKCDSGTYDLSNLENTVIDSLIGFQENNDSLLKIINGNNQPILDTSSFKKQISQIDKKIQKNSDLYLNDFITMDELKDRTDSLQAEKKLLEAKISENKFNDSTDVFELVKTQLGSIPINELSYDNMKKIVNNLVSKVDVTADNVDIIFKFQLA

SEQ ID NO: 7119 - protein, 485 aa, synthetic construct
MTKKVAIYTRVSTTNQAEEGFSIDEQIDRLTKYAEAMGWQVSDTYTDAGFSGAKLERPAMQRLISDIENRAFDTVLVYKLDRLSRSVRDTLYLVKDVFTKNKIDFISLNESIDTSSAMGSLFLTILSAINEFERENIKERMTMGKLGRAKSGKSMMWTKTAFGYYHNRKTGILEIVPLQATIVEQIFTDYLSGISLTKLRDKLNESGHIGKDIPWSYRTLRQTLDNPVYCGYIRFKDSLFEGMHKPIIPYETYLKVQKELEERQQQTYERNNNPRPFQAKYMLSGMARCGYCGAPLRIVLGHKRKDGSRTMKYHCANRFPRKTKGVTVYNDNKKCDSGTYDLSNLENTVIDNLIGFQENNDSLLKIINGNNQPILDTSSLKKQISQIDRKIQKNTDLYLNDFITMDELKDRTDSLQAEKKLLRAKISENKFNDSTDVFELVKTQLGSIPINELSYDNKKKIVNNLVSKVDVTADNVDIIFKFQLA

SEQ ID NO: 7120 - protein, 452 aa, synthetic construct
MKAAIYIRVSTREQVENYSIQAQTEKLTALCRSKDWDVYDIFIDGGYSGSNMNRPALNEMLSKLHEIDAVVVYRLDRLSRSQRDTITLIEEYFLKNNVEFVSLSETLDTSSPFGRAMIGILSVFAQLERETIRDRMVMGKIKRVEAGLPLTTAKGRTFGYDVIDTKLYINEEEAKQLQLIYDIFEEEQSITFLQKRLKKLGFKVRTYSRYNNWLTNDLYCGYVSYKDKVHVKGIHEPIISEEQFYRVQEIFTRMGKNPNMNRDSASLLNSLVVCSKCGLGFVHRRKDTMSRGKKYHYRYYSCKTYKHIHELEKCGNKIWRADKLEELIINRVNNYSFASRNADKEDELDSLNEKLRIEHAKKKRLFALYINGSYEVSELDSMMNDVDAQINYYESQIEANEELKKSKKVQENLANLATVDYDSLEFREKQLYLKSLINKIYIDGEQVTIEWL

SEQ ID NO: 7121 - protein, 452 aa, synthetic construct
MKAAIYIRVSTREQVENYSIQAQTEKLTALCRSKDWDVYDIFIDGGYSGSNMNRPALNEMLSKLHEIDAVVVYRLDRLSRSQRDTITLIEEYFLKNNVEFVSLSETLDTSSPFGRAMIGILSVFAQLERETIRDRMVMGKIKRIEAGLPLTTAKGRTFGYDVIDTKLYINEEEAKQLQLIYDIFEEEQSITFLQKRLKKLGFKVRTYNCYNNWLTNDLYCGYVSYKDKVHVKGIHEPIISEEQFYRVQEIFTRMGKNPNMNRDSASLLNNLVVCSKCGLSFVHRRKDAVTRDKKYHYRYYSCKTYKHIHELEKCGNKIWRADKLEELIINRVNNYSLVSRNVDKEDELDGLNEKLKIEHAKKKRLFDLYINGSYEVSELDSMMNDIDAQINYYESQIEANEELKKNKKIQENLAYLATVDFDSLEFREKQLYLKSLINKIYIDGEQVTIEWL

SEQ ID NO: 7122 - protein, 452 aa, synthetic construct
MKAAIYIRVSTREQVENYSIQAQTEKLTALCRSRDWVVYDIFIDGGYSGSNMNRPALNEMLSKLHEVDAVVVYRLDRLSRSQRDTITLIEEYFLKNNVEFVSLSETLDTSSPFGRAMIGILSVFAQLERETIRDRMVMGKIKRIEAGLPLTTAKGRTFGYDVIDTKLYINEEEAKQLRLIYDIFEEEQSITFLQKRLKKLGFKVRTYNRYISWLTNDLYCGYVSYKDKVHVKGIHEPIISEEQFYRVQEIFTRMGKNPNMNRDSASLLNNLVVCSKCGLGYVHRRKDTMSRGKKYHYRYYSCKTYKHTHELEKCGNKIWRADKLEELIISRVNNYSFASRNVDKEDELDSLNEKLKIEHAKKKRLFDLYINGSYEMSELDSMMNDIDAQIDYYESRIEANEELKKNKKIQENLAELATVDFDSLEFREKQLYLKSLINKIYIDGEQVTIEWL

SEQ ID NO: 7123 - protein, 469 aa, synthetic construct
MSYTTPVRAAVYLRISEDRSGEQLGAARQREDCLKLCDQRKWVPVEYLDNDVSASTGKRRPAYEQMLADITAGKIAAVVAWDLDRLHRRPVELEAFMSLADEKRLALATVAGDVDLATPQGRLVARLKGCVAAHETEHKKARQRRAARQKAERGLPNWSKAFGYLPGPNGPEPDPRTAPLVRQAYADILAGASLGDVCRQWNDAGAFTITGRPWTTTTLSKFLRKPRNAGLRAYKGARYGPVDRDAIVGKAQWSPLVDEATFWAAQAVLDAPGRAPGRKSVRRHLLTGLAGCGKCGNHLAGSYRTDGRIVYVCKACHGVAILADNIEPILYHIVAERLAMPDAVDLLRREIHNAAEAETIRLELETLYGELDRLAVERAEGLLTARQVKISTDIVNAKITRLQARQLDQERLRVFDGIPLGTPQVAGMIAELSPDRFRAVLDVLAEVVVQPVGKSGRMLNPERVQVNWR

SEQ ID NO: 7124 - protein, 485 aa, synthetic construct
MTKKVAIYTRVSTTNQAEEGFSIDEQTDRLTKYAEAMGWQVSDTYTDAGLSGAKLERPAMQRLINDIENKAFDTVLVYKLDRLSRSVRDTLYLVKDVFTKNKIDFISLNESIDTSSAMGSLFLTILSAINEFERENIKERMTMGKLGRAKSGKSMMWTKTAFGYYHNRKTGILEIVPLQATIVEQIFTDYLSGISLTKLRDKLNESGHIGKDIPWSYRTLRQTLDNPVYCGYIKFKDSLFEGMHKPIIPCETYLKVQKELEERQQQAYERNNNPRPFQAKYMLSGMARCGYCGAPLKIVLGHKRKDGSRTMKYHCANRFPRKTKGVTVYNDNKKCDSGTYDLSDLENTVIDSLIGFQENNDNLLKIIGGNNQSILDTSSFIEQISQIDKKIQKNSDLYLNDFITMDELKDRTDSLQAEKKLLKAKISGNKFNDRTDVFELVKTQLGSIPINELSYDNKKRIVNDLVSKVDVTADNVDIIFKFQLA

SEQ ID NO: 7125 - protein, 452 aa, synthetic construct
MKAAIYIRVSTQEQVENYSIQAQTEKLTALCRSKGWDVYDIFIDGGYSGSNMNRPALNEMLSKLHEIDAVVVYRLDRLSRSQRDTTTLIEEHFLKNNVEFVSLSETLDTSSPFGRAMIGVLSVFAQLERETIRDRMVMGKIKRIEAGLPLTTAKGRTFGYDVIDTKLYINEEEAKQLRLIYDIFEEEQSITFLQKRLKKLGFKVRTYNRYNSWLTNDLYCGYVSYKDKVHVKGIHEPIISEEQFYRVQEIFTRMGKNPNMNRDNASLLNNLVVCSKCGLGFVHRSKDTTSRGKKYHYRYYSCKTYKHTHELEKCGNKTWRADKLEELIINRVNNYSFASRNADKEDELDSLNEKLKIEHARKKRLFDLYINGSYEVSELDSMMNDIDAQINYYESQIEANEELKKNKKTQENLADLATVDFDSLEFREKQLYLKSLINKIYIDGEQVTIEWL

SEQ ID NO: 7126 - protein, 485 aa, synthetic construct
MTKKVAIYTRVSTTNQAEEGFSIDEQIDRLTKYAEAMGWQVSDTYTDAGSSGAKLERPAMQRLINDIENRAFDTVLVYKLDRLSRSVRDTLYLVKDVFTKNKIDFISLNESIDTSSVMGSLFLTILSAINEFERENIKERMTMGKLGRAKSGKSMMWTKTAFGYYHNRKTGILEIVPLQAAIVEQIFTDYLSGISLTKLRDKLNESGHIGKDIPWSYRTLRRTLDNPVYCGYIKFKDSLYEGMHKPIIPYETYLKVQKELEERQQQTYERNNNPRPFQAKYMLSGMARCGYCGAPLKIVLGHKRKDGSRTMKYHCANRLPRKTKGVTVYNDNKKCDSGTYDLSNLESTVIDYLTGFQDNNDSLLKIINGNNQPILDTSSFKEQISQIDKKIQKNSDLYLNDFITMDELKDRTDSLQAEKKLLKAKISENKFNDSTDVFELVKTQLGSIPINELSYDNKKKIVNNLVSKVDVTADNVDIIFKFQLA

SEQ ID NO: 7127 - protein, 452 aa, synthetic construct
MKAAIYIRVSTREQVENYSIQAQTEKLTALCRSKDWDVYDIFIDGGYSGSNMNRPALNEMLSKLHEIDAVVVYRLDRLSRSQRDTITLIEEYFLKNNVEFVSLSETLDTSSPFGRAMIGILSVFAQLERETIRDRMVMGKIKRIEAGLPLTTAKGRTFGYDVIDTKLYINEEEAKQLQLIYDIFEEEQSITFLQKRLKKLGFKVHTYNRYNSWLTNDLYCGYVSYKDKVHVRGIHEPIISEEQFYRVQEIFTRTGKNPNMNRDSASLLNNLVVCSKCGLNFVHRRKDTMSRGKRYHYRYYSCKTYKHIHELERCGNKIWRADKLEELVINRVNNYSFASRNVDKDDELDSLNEKLKIEHAKKKRLFDLYINGSYEVSELDSMMNDIDAQINYYESQIEANEELKKNKKIQENLADLATVDFDSLEFREKQLYLKSLINKIYIDGEQVTIEWL

SEQ ID NO: 7128 - protein, 452 aa, synthetic construct
MKAAIYIRVSTREQVENYSIQAQTEKLTALCRSKDWDVYDIFIDGGYSGSNMNRPALNEMLSKLHEIDAVVVYRLDRLSRSQRDTITLIEEYFLKNNVEFVSLSETLDTSSPFGRAMIGILSVFAQLERETIRDRMVMGKIKRIEAGLPLTTAKGRTFGYDVIDTKLYINEEEAKQLQLIYDIFEEEQSITFLQKRLKKLGFKVRTYNRYNNWLTNDLYCGYVSYKDKVHVKGIHEPIISEEQFYRVQEIFARMGRNPNMNRDSASLLSNLVVCSKCGLGFVHRRKDTTSRGKKYHYRYYSCKTYKHIHELEKCGNKIWRADKLEELIINRVNNYSFASRNVDKEDELDSLNEKLKIEHAKKKRLFDLYVNGSYEVSELDSMMNDIDAQINYYESQIEANEELKKNKRIQENLADLATADFDSLEFREKQLYLKSLINKIYIDGEQVTIEWL

SEQ ID NO: 7129 - protein, 469 aa, synthetic construct
MSYTTPVRAAVYLRISEDRSGEQLGVARQREDCLKLCDQRKWEPVEYLDNDVSASTGKRRPAYEQMLADITAGKIAAVVAWDLDRLHRRPIELEAFMSLADEKRLALATVAGDVDLATPQGRLVARLKGSVAAHETEHKKARQRRAARQKAERGHPNWSKAFGYLPGPNGPEPDPRTAPLVKQAYVDILAGASLGDVCRQWNDAGAFTITGRPWTTTTLSKFLRKPRNAGLRAYKGARYGPVDRDAIVGKAQWSPLVDEATFWAAQAVLDAPGRAPGRKSVRRHLLTGLAGCGKCGNHLAGSYRTDGRVVYVCKACHGVAILADNIEPILYHIVAERLAVPDAVDLLRREIHDAAEAETFRLELETLYGELDRLAVERAEGLLTARQVKISTDIVNAKITELRARQLDQERLRVFDGIPLGTPQVAGTIAELSPDRFRAVLDMLAEVVVQPVGKSGRIFNPERVQVNWR

SEQ ID NO: 7130 - protein, 452 aa, synthetic construct
MKAAIYIRVSTREQVENYSIQAQTEKLTALCRSKGWDVYDIFIDGGYSGSNMNRPALNEMLSKLHEIDAVVVYRLDRLSRSQRDTITLIEEYFLKNSVEFVSLSETLDTSSPFGRAMIGILSVFAQLERETIRDRMVMGKIKRIEAGLPLTTAKGRTFGYDVIDTKLYINEEEAKQLQLIYDIFEEVQSITSLQKRLKKLGLKVRTYNRYNNWLTNDLYCGYVSYKDKVHVKGIHEPIISEEQFYRVQEIFTRMGKNPNMNRDSASLLNNLVVCSKCGRGFVHRRKDAKSRDKKYHYRYYSCKTYKHIHELEKCGNKIWRADKLEELIINRVNNYSLASRNVDKEDELDSLNEKLKIEHAKKKRLFDLYINGRYEVSELDCMMNDIDAQINYYESQIEANEELKKNKKIQENLANLATVDFDSLEFREKQLYLKSLINKIYIDGEQVTIEWL

SEQ ID NO: 7131 - protein, 485 aa, synthetic construct
MTKKVAIYTRVSTTNQAEEGFSIDEQIDRLTKYAEAMGWQVSDTYTDAGFSGAKLERPAMQRLINDIENKAFDTVLVYKLDRLSRSVRDTLFLVKDVFTKNKIDFISLSESIDTSSAMGSLFLTILSAINEFERENIKERMTMGKLGRAKSGKSMMWTKTAFGYYHNRKTGILEIVPLQATIVEQIFTDYLSGISLTKLRDKLNESGHIGKDIPWSYRTLRQTLDNPVYCGYIKFKDSLFEGMHEPIIPYETYLKVQKELGERQQQTYERNNNPRPFQAKYMLSGMARCGYCGAPLRIVLGRKRKDGSRTMKYHCANRFPRKTKGVTVYNDNKKCDSGTYDLSNLENTVIDNLIGFQEDNDSLLKIINGNNRPILDTSSLKKQISQIDKKIQKNSDLYLNDFITMDELKDRTDSLQAEKKLLKAKISENKLNDSTDVFELAKTQLGSIPIDELSYDNKKRIVNNLVSKVDVTADSVDIIFKFQLA

SEQ ID NO: 7132 - protein, 485 aa, synthetic construct
MTKKVAIYTRVSTTNQAEEGFSIDEQIDRLTKYAEAMGWQVSDTYTDAGFSGAKLERPAMRRLINDIENEAFDTVLVYKLDRLSRSVRDTLYLVKDVFTKNKIDFISLSESIDTSSAMGSLFLSILSAINEFERENIKERMTMGKLGRAKSGKSMMWTKTAFGYYHNRKTGILEIVPLQATIVEQIFTDYLSGISLTKLRDKLNESGHIGKDIPWSYRTLRQILDNPVYCGYIKFKDSLFEGMHKPIIPYETYLKVQKELEERQQQTYERNNNPRPFQAKYMLSGMARCGYCGAPLRIVLGHKRKDGSRTMKYHCANRFPRKTKGVTVYNDNKKCDSGTYDLSDLENTVIDNLIGLQENNDSLLKIINGDNRPILDTSSIKKQISQIDKKIQRNSDLYLNDFITMDELRDRTDSLQAEKKLLKAKISENKFNDSTDVFELVKTQLGSIPINELSYDNKKKIVNNLVSKVDVTADNVDIIFKFQLA

SEQ ID NO: 7133 - protein, 452 aa, synthetic construct
MKAAIYIRVSTREQVENYSIQAQTEKLTALCRSKGWDVYDIFIDGGYSGSNMNRPALNEMLSRLHEIDAVVVYRLDRLSRSQRDTITLIEEYFLKNNVEFVSLSETLDTSSPFGRAMIGILSVFAQLERETIRDRMVMGKIKRIEAGLPLTTAKGRTFGYDVIDTKLYINEEEAKQLQLIYDIFEEEQSITLLQKRLKKLGFKVRTYNRYNNWLTNDLYCGYVSYKDKVHVKGIHEPIISEEQFYRVQEIFARMGKNPNMNRDSASLLNNLVVCGKCGLGFVHRRKDTMSRDKKYHYRYYSCKTYKHIHELEKCGNKIWRADKLEELIINRVNNYSLASRNVDKEGELDSLNEKLKIEHAKKRRLFDLYINGRYEVSELDSMMNDIDAQINHYESQIEANEGLRKNKKIQESLADLATVDFDSLEFREKQLYLKSLINKIYIDGEQVTIEWL

SEQ ID NO: 7134 - protein, 469 aa, synthetic construct
MSYTTPVHAAVYLRISEDRSGEQLGVARQREDCLKLCGQRKWVPVEYLDNDVSASTGKRRPAYEQMLADITAGKIAAVVAWDLDRLHRRPVELEAFMSLADEKRLALATVAGDVDLATPQGRLVARLKGVVAAHETEHKKARQRRAARQKAERGHPNWSKAFGYLPGPNGPEPDPRTAPLVKQAYADILAGASLGDVCRQWNDAGAFTVTGRPWATTALSKFLRKPRNAGLRAYKGARYGPVDRNAIVGKAQWSPLVDEATFWAAQAVLDAPGRAPGRKSVRRHLLTGLAGCGKCGNHLAGSYRTDGRVVYVCKACHGVAILADIIEPTLYHIVAERLAMPDAVDLLRREIHDAAEAETTRLELETLYSELDRLAVERAEGLLTARQVKISTDIVNAKITKLQARQLDQERLRVFNGIPLGTPQVAGVIAELSPDRFRAVLDVLAEVVVQPVGKGGRIFNPERVQVNWR

SEQ ID NO: 7135 - protein, 452 aa, synthetic construct
MKAAIYIRVSTREQVENYSIQAQTEKLTALCRSKDWDVYDIFIDGGYSGSNMNRPALNEMLSKLHEIDAVVVYRLDRLSRSQRDTITLIEEYFLKNNVEFVSLSETLDTSSPFGRAMIGILSVFAQLERETIRDRMVMGKIKRIEAGLPLTTAKGRTFGYDVIDTKLYINEEEARQLQLIYDIFEEEQSITFLQKRLKKLGFKVRTYNRYNNWLTNDLYCGYVSYKDKVHVKGIHEPIISEEQFYRVQEIFTRMGKNPNMNRGSASLLNNLVVCSKCGLGFVHRRKDATSRDKKYHYRYYSCKTYKHIHELEKCGNKIWRADKLEELIINRVNNYSLASRNVDKEDELDSLNERLKTEHAKKRRLFDLYINGSYDVGELDSMMNDIDAQINYYESQIEANEELKKNKKIQENLADLATVDFGSLEFREKQLYLKSLINKIYIDGEQVTIEWL

SEQ ID NO: 7136 - protein, 452 aa, synthetic construct
MKAAIYIRVSTQEQVENYSIQAQTEKLTALCRSKDWDVYDIFIDGGYSGSNMNRPALNEMLSKLHEIDAVVVYRLDRLSRSQRDTTTLIEEYFLKNNVEFVSLSETLDTSSPFGRAMIGILSVFAQLERETIRDRMVMGKIKRIEAGLPLTTAKGRTFGYDVIDTKLYINEEEARQLQLIYDIFEEEQSITFLQKRLKKLGFKVRTYNRYSNWLTNDLYCGYVSYKDKVHVKGIHEPIISEEQFYRVQEIFTRMGKNPNMNRDSASLLSNLVVCGKCGLGFVHRSKDTMSRGKKYHYRYYSCKTYKHTHELEKCGNKTWRADKLEELIINRVNNYSFASRNADKEDELDSLNEKLKIEHAKKRRLFDLYINGSYGVSELDSMMNDIDAQINYYESQIEANEELKKNKKIQENLADLATVDFDSLEFREKQLYLKSLINKIYIDGEQVTIEWL

SEQ ID NO: 7137 - protein, 469 aa, synthetic construct
MCYTTPVRAAVYLRISEDRSGEQLGVARQREDCLKLCDQRKWVPVEYLDNDVSASTGKRRPAYEQMLADITAGKIAAVVAWDLDRLHRRPVELEAFMSLADEKRLALATVAGDVDLATPQGRLVARLKGCVAAHETEHKKARQRRAARQKAERGYPNWSKAFGYLPGPNGPEPDPRTAPLVKQAYADILAGASLGDVCRQWNGAGAFTITGRPWTTTTLSKFLRKPRNAGLRAYKGARYGPVDRDAIVGKAQWSPLVDEATFWAAQAVLDAPGRAPGRKSVRRHLLTGLAGCGKCGNRLAGSYRTDGRVVYVCKACHGVAIRADNIEPILYHIVAERLAMPDAVDLLRREIHDATEAETIRLELETLYGELDRLAVERAEGLLTARQVKISTDIVNAKITKLQAHRLDQERLRVFDGIPLGTPQVAGTIAELSPNRFRAVLDVLAEVVVQPVGKSGRISNPERVQVNWR

SEQ ID NO: 7138 - protein, 452 aa, synthetic construct
MKAAIYIRVSTREQVENYSIQAQTEKLTALCRSKDWDVYDIFIDGGYSGSNMNRPALNEMLSRLHEIDAVVVYRLDRLSRSQRDTITLIEEYFLKNNVEFVSLSETLDTSSPFGRAMIGILSVFAQLERETIRDRMVMGKIKRIEAGLPLTTAKGRTFGYDVIDTKLYINEEEAKQLRLIYDIFEEEQSITFLQKRLKKLGFKVRTYNCYNNWLTNDLYCGYVSYKDKVHVKGIHEPIISEEQFYRVQEIFARMGKNPNMNRDSASLLNSLVVCSKCGLRFVHRRKDIVSRGKKYHYRYYSCKTYKHIHELEKCGNKIWRADKLEELIINRVNSYSLASRNVGREDELDSLNEKLKTEHAKKKRLFDLYINGSFEVGELDSMMNDIDTQISYYESRIEANEELKRNKKIPENLANLATVDFDSLEFREKQLYLKSLINKIYIDGEQVTIEWL

SEQ ID NO: 7139 - protein, 452 aa, synthetic construct; identical to SEQ ID NO: 3980

SEQ ID NO: 7140 - protein, 452 aa, synthetic construct
MKAAIYIRVSTQEQVGNYSIRAQTEKLTALCRSKDWDVYDIFIDGGYSGSNMNRPALNEMLSKLHEIDAVVVYRLDRLSRSQRDTSTLIEEYFLKNNVEFVSLSETLDTSSPFGRAMIGILSVFAQLERETIRDRMVMGKIKRIEAGLPLTTAKGRTFGYDVIDTKLYINEEEAKQLRLIYDIFEEEQSITSLQKRLKKLGFKVRTYNRYNNWLTNDLYCGYVSYKDKVHVKGIHEPIISEEQFYRVQEIFTRMGKNPNMNRNSASLLSNLVVCSKCGLGFVHRSKDTMSRGKKYHYRYYSCKTYKHTHELEKCGNKTWRADKLEELIINRVNNYSFASRSMDKEGELDSLSEKLKIEHAKKKRLFDLYINGSYEVSELDSMMNDIDAQINYYESQIAANEELKENKKIRENLADLATVDFDSLEFREKQLYLKSLINKIYIDGEQVTIEWL

SEQ ID NO: 7141 - protein, 452 aa, synthetic construct
MKAAIYIRVSTREQVENYSIQVQTEKLTALCRSKDWDVYDIFIDGGYSGSNMNRPALNEMLSKLHEIDAVVVYRLDRLSRSQRDTITLVEEYFLKNNVEFVSLSETLDTSSPFGRAMIGILSVFAQLERETIRDRMVMGKIKRIEAGLPLTTAKGRTFGYDVIDTKLYINEEEAKQLQLIYDIFEEEQSITFLQKRLKKLGFKVRTYNRYNNWLTNDLYCGYVSYKDKVHVKGIHEPIISEEQFNRVQEIFTRMGKNPNMNRDSASLLNNLVVCSKCGLGFVHRRKDTTSRGKKYHYRYYSCKTYKHTHELEKCGNKIWRADKLEELIINRVSNYSFASRNVDKEDELDSLNEKLKIEHAKRRRLFDLYINGSYEVSELDSMMYDIDAQINYYESQIEANEELKKSKKIQESLADLATVDFDSLEFREKQLYLKSLINKIYIDGEQVTIEWL

SEQ ID NO: 7142 - protein, 485 aa, synthetic construct
MTKKVAIYTRVSTTNQAEEGFSIDEQIDRLTKYAEAMGWQVSDTYTDAGFSGAKLERPAMQRLINDIENKAFDTVLVYKLDRLSRSVRDTLHLVKDVFTKNKIDFISLNESIDTSSAMGSLFLTILSAINEFERENIKERMTMGKLGRAKSGKSMMWAKTAFGYYHNRKTGILEIVPLQATIVEQIFTDYLSGISLTKLRDKLNESGHIGKDIPWSYRTLRQTLDNPVYCGYIKFKGSLFEGMHKPIIPYETFLKVQKELEERQQQTYERNNNPRPFQAKYMLSGMARCGYCGAPLRIVLGHKRKDGSRTMKYHCANRFPRKTKGVTVYNDNKKCDSGTYDLSNLENTVIDNLIGIQENNDRLLKIINGNNQPTLGTSSFKKQISQIDKKIQKNSDLYLNDFITMDELRDRTDSLQAEKKLLKAKINENKFNDSTDVFELVKTQLGSIPIDELSYDNKKKIVNNLVSKVDVTADSVDIIFKFQLA

SEQ ID NO: 7143 - protein, 485 aa, synthetic construct
MTKKVAIYTRVSTTNQAEEGFSIDEQIDRLTKYAEAMGWQVSDTYTDAGSSGAKLERPAMQRLINDIENKAFDTVLVYKLDRLSRSVRDTLYLVKDVFTKNKIDFISLNESIDTSSAMGSLFLTILSAINEFERENIKERMTMGKLGRAKSGKSMMWTKTAFGYYHNRKTGILEIVPLQATIVEQIFTDYLSGISLTKLRDKLNESGHIGKDIPWSYRTLRQTLDNPVYCGYIKFKDSLFEGMHKPIIPYETYLKVQKELEERQQQTYERNNNPRPFQAKYMLSGMARCGYCGAPLRIVLGHKRKDGGRTMKYHCANRFPRKTKGVTVYNDNKKCDSGTYDLSDLENTVIDNLIGFQENNDSLLKIINGNNQPVLDTSSFKKQISQIDKKIQKNSDLYLNDFITMGELKDRTDSLQAEKRLLKAKISENKFNDCTDVLEQVKTQLGSIPINELSYDNKKKIVNNLVSRVDVTADNVGIIFKFQLA

SEQ ID NO: 7144 - protein, 452 aa, synthetic construct
MKAAIYIRVSTREQVENYSIQAQAEKLTALCRSKDWDVYDIFIDGGYSGSNMNRPALNEMLSKLHEIDAVVVYRLDRLSRSQRDTITLIEEYFLKNNVEFVSLSETLDTSSPFGRAMIGILSVFAQLERETIRDRMVMGKIKRIEAGLPLTTAKGRTFGYDVIDTKLYINEEEARQLQLIYDIFEEERSITFLQKRLKKLGFKVRTYNCYNNWLTNDLYCGYVSYKDKVHVKGIHEPIISEEQFYRVQEIFTRMGKSPNMNRDSASLLNNLVVCGKCGLSFVHRRKDIVSHGKKYHYRYYSCKTYKHIHELEKCGNKIWRADELEELIINRVNNYSLASRNVDKEAELDSLNEKLKIEHAKKKRLFDLYINGSYEVSVLDSMMNDIDAQINYYESQIEANEELKKAKKIQENLANLATVDFDSLEFREKQLYLKSLINKIYIDGEQVTIEWL

SEQ ID NO: 7145 - protein, 452 aa, synthetic construct
MKAAIYIRVSTREQVENYSIQAQTEKLTALCHSKGWDVYDIFIDGGYSGSNMNRPALNEMLSKLYEIDAVVVYRLDRLSRSQRDTITLIEEYFLKNNVEFVSLSETLDTSSPFGRAMIGILSVFAQLERETIRDRMVMGKIKRIEAGLPLTTAKGRTFGYDVIGTKLYINEEEAKQLRLIYDIFEEEQSITFLQKRLKKLGFKVRTYNRYNNWLTNDLYCGYVSYKDKVHVKGIHEPIISEEQFYRVQEIFTRMGKNPNMNRGSASLLNNLVVCGKCGLGFVHRRKDIMSRGKKYHYRYYSCKTYKHIHELEKCGNKIWRADKLEELIINRVNNYSLANRNVDKEDELDSLNEKLRTEHAKKKRLFDLYINGSYEVSELDSMMSDIDAQINYYESQIEANGELKKNKKIQENLAYLATVDYDCLEFREKQLYLKSLINKIYIDGEQVTIEWL

SEQ ID NO: 7146 - protein, 452 aa, synthetic construct
MKAAIYIRVSTQEQVGNYSIQAQTEKLTALCRSKDWDVYDIFIDGGYSGSNMNRPALNEMLSKLHEIDAVVVYRLDRLSRSQRDTTTLIEEYFLKNNVEFVSLSETLDTSSPFGRAMIGILSVFAQLERETIRDRMVMGKIKRIEAGLPLTTAKGRTFGYDVIDTKLYINEEEAKQLQLIYDIFEEEQSITFLQKRLKKLGFKVRTYNRYNNWLTNDLYCGYVSYKDKVHVKGIHEPIISEEQFYRVQEIFTRTGKNPNMNRDSASLLNNLVVCSKCGLSFVHRSKDTMSRGKKYHYRYYSCKTYKHTHELEKCGNKTWRADKLEELIINRVNNYSFASRNVDKEDELGSLNEKLKIEHAKKKRLFDLYINGSYEVSELDSMMNDIDAQINYYESQIEANEELKKSKKIQENLADLATVDFDSLEFREKQQYLKSLINKVYIDGEQVTIEWL

SEQ ID NO: 7147 - protein, 452 aa, synthetic construct
MKAAIYIRVSTREQVENYSIQAQTEKLTALCRSKDWDVYDIFIDGGYSGSNINRPALNEMLSKLHEIDAVVVYRLDRLSRSQRDTITLIEEYFLKNNVEFVSLSETLDTSSPFGRAMIGILSVFAQLERETIRDRMVMGKIKRIEAGLPLTTAKGRTFGYDVIDTKLYINEEEAKRLQLIYDIFEEEQSITLLQKRLKKLGFKVHTYNRYNNWLTNDLYCGYVSYKDKVHVKGIHEPIISEEQFYRVQEIFARMGKNPNVNRDSASLLNGLVVCSKCGLGFVHRRKDTMSRGKKYHYRYYSCKTYKHTHELEKCGNKIWRADKLEELIINRVNNYSLVSRNVDKEDELDNLNEKLKIEHAKKKRLFDLYINGSYEVSELDSLMNDIDAQINYYGSQIEANEGLKRNKKIQESLADLATVDFDSLEFREKQLYLKSLINKIYIDGEQVTIEWL

SEQ ID NO: 7148 - protein, 469 aa, synthetic construct
MCYTTPVRAAVYLRISEDRSGDQLGVARQREDCLKLCDQRKWVPVEYLDNDVSASTGKRRPAYEQMLADITAGKIAAVVAWDLDRLHRRPIELEAFMCLADEKRLALATVAGDVDLATPQGRLVARLKGSVAAHETEHKKARQRRAARQKAERGHPNWSKAFGYLPGPNGPEPDPRTAPLVKQAYADILAGASLGDVCRQWNDAGAFTITGRPWTTTTLSKFLRKPRNAGLRAYKGARYGPVDRDAIVGKARWSPLVDEATFWAAQAVLDAPGRAPGRKSVRRHLLTGLAGCGKCGNHLAGSYRTDGRVVYVCKACHGVAILADNIEPILYHIVAERLAMPDAVDLLRREIHDAAEAETIRLELETLYGELDRLAVERAEGLLTARQVKISTDIVNAKITKLQARQLDQERLRVFDGIPLGTPQVAGMIAELSPNRFRAVLDVLAEVVVQPVGKSGRIFNPERVRVNWR

SEQ ID NO: 7149 - protein, 469 aa, synthetic construct
MSYTTPVRAAVYLRISEDRSGEQLGVARQREDCLKLCGQRKWVPVEYLDNDVSASTGKRRPAYEQMLADITAGKIAAVVAWDLDRLHRRPVELEAFMSLADERRLALATVAGDVDLATPQGRLVARLKGSVAAHETEHKKARQRRAARQKAERGLPNWSKAFGYLPGPNGPEPDPRTAPLVRQAYADILAGASLGDVCRQWNDAGALTITGRPWITTTLSKFLRKPRNAGLRAYKGARYGPVDRDAIVGKAQWSPLVDEATFWAAQAVLDAPGRAPGRKSVRRHLLTGLAGCGKCGNHLAGSYRTDGRVVYVCKACHGVAILADNIEPILYHIVAERLAMPDAVDLLRREVHDAVEAETIRLELETLYGELDRLAVERAEGLLTARQVKISTDIVGAKITKLQARQLDQERLRVFDGIPLGTPQVAGVIAELSPDRFRTVLDVLAEVVVQPVGKSGRIFNPERVQVNWR

SEQ ID NO: 7150 - protein, 485 aa, synthetic construct
MTKKVAIYTRVSTTNQAEEGFSIDEQVDRLTKYAEAMGWQVSDTYTDAGLSGAKLERPAMQRLINDIENKAFDTVLVYKLDRLSRSVRDTLYLVKDVFTKNKVDFISLNESIDTSSAMGSLFLTILSAINEFERENIKERMTMGKLGRAKSGKSMMWTKTAFGYHHNRETGILEIVPLQATIVEQIFTDYLSGISLTKLRDKLNESGHIGKDIPWSYRTLRQTLDNPVYCGYIKFKDSLFEGMHKPIIPYETYLKVQNELEERQQQTYERNNNPRPFQAKYMLSGMARCGYCGAPLRIVLGRKRKDGSRTMKYHCVNRFPRKTRGVTVYNDNKKCDSGTYDLSNLENTVIDNLIGLQENNDSLLKIINGNNQPILDTSGFKKQISQIEKKIQKNSDLYLNDFITMDELRDRTDSLQAEKKLLKAKISENRFNDSTDVFELVKTQLGSIPINELSYGDKKKIVNSLVSKVDVTADNVDIIFKFQLA

SEQ ID NO: 7151 - protein, 452 aa, synthetic construct
MKAAIYIRVSTREQVENYSIQAQTEKLTALCRSKDWDVYDIFIDGGYSGSNMNRPALNEMLSKLHEIDAVVVYRLDRLSRSQRDTITLIEEYFLKNNVEFVSLSETLDTSSPFGRAMIGILSVFAQLERETIRDRMAMGKIKRIEAGLPLTTAKGRTFGYDVIDTKLYINEEEAKQLRLIYGIFEEEQSITFLQKRLKKLGFKVHTYNRYNNWLTNDLYCGYVSYKDKVHVKGIHEPIISEEQFYRVQEIFARMGKNPNMNRDSASLLNNLVVCSKCGLGFVHRRKDAMSRDKKYHYRYYSCKTYKHIHELEKCGNKIWRADKLEELIINRVNNYSLASRNVDKEDELDGLNEKLKIEHAKKKRLFDLYINGSYEVSELDSLMNDIDAQISYYESQIEANEELRKNKKIQENLADLATVDFDSLGFREKQLYLKSLINKIYIDGEQVTIEWL

SEQ ID NO: 7152 - protein, 485 aa, synthetic construct
MTKKVAIYTRVSTTNQAEEGFSIDEQIDRLTKYAEAMGWQVSDTYTDAGISGAKLERPAMQRLINDIENKAFDTVLVYKLDRLSRSVRDTLYLVKDVFTKNKIDFISLNESIDTSSAMGSLFLTILSAINEFERENIKERMTMGKLGRAKSGKSMMWTKTAFGYYHNRKTGILEIVPLQATIVEQIFTDYLSGISLTKLRDKLNESGHIGKDIPWSYRTLRQTLDNPVYCGYIKFKDSLFEGMHKPIIPYETYLKVQKELEERQQQTYERNNNPRPFQAKYMLSGMARCGYCGAPLKIVLGHKRKDGSRTMKYHCANRFPRKTKGVTVYNDNKKCDSGTYDLSNLENAVIDYLIGFQENNDSLLKIINGNNQPILDTSSFKKQISRIDKKIQKNSDLYLNDFITMDELKDRTDSLQAEKKLLKAKISENKFNDSTDVLELVKTQLGNIPINELSYDNKKKIVNNLVGKVDVTADNVDIIFKFQLA

SEQ ID NO: 7153 - protein, 452 aa, synthetic construct
MKAAIYIRVSTREQVENYSIQAQTEKLTALCRSKDWDVYDIFIDGGYSGSNMNRPALNEMLSKLHEIDAVVVYRLDRLSRSQRDTITLIEEYFLKNNVEFVSLSETLDTSSPFGRAMIGILSVFAQLERETIRDRMVMGKIKRIEAGLPLTTAKGRTFGYDVIDTKLYINEEEAKQLQLIYDIFEEEQSITFLQKRLKELGFKVRTYNRYNNWLTNDLYCGYVSYKDKVHVKGIHEPIISEEQFYRVQEIFARMGKSPNMNRDSASLLNNLVVCSKCGLGFVHRRKDTMSRGKKYHYRYYSCKTYKHTHELEKCGNKIWRADKLEELIINRVNNYSFASRNVDKEDELDSLNEKLKIEHAKKKRLFNLYINGSYEVSELDSMMNDIDAQINYYEGQIEANEELRKNEKIQENLANLAAVDFDSLEFREKQLYLKSLINKIYIDGEQVTIEWL

SEQ ID NO: 7154 - protein, 452 aa, synthetic construct
MKAAIYIRVSTREQVENYSIQAQTEKLTALCRSKDWDVYDIFIDGGYSGSNMNRPALNEMLSKLHEIDAVVVYRLDRLSRSQRDTITLIEEYFLKNNVEFVSLSETLDTSSPFGRAMIGILSVFAQLERETIRDRMVMGKIKRIEAGLPLTTAKGRTFGYDVVDTKLYINEEEAKQLQLIYDIFEEEQSITFLQKRLKKLGFKVRTYNRYNNWLTNDLYCGYVSYKDKVHVKGIHEPIISEEQFYRVQEIFTRMGKNPNMNRDSASLLNNLVVCGKCGLGFVHRRKDAMSRDKKYHYRYYSCKTYKHIHELEKCGNKIWRADKLEELIINRANNYSLASRNADKEDELDSLNEKLKIEHAKKKRLFDLYISGSYEVSELDSMMSDIDAQINYYESQIEASGELKRNKKIQENLAYLATVDYDCLEFREKQLYLKSLINKIYIDGEQVTIEWL

SEQ ID NO: 7155 - protein, 452 aa, synthetic construct
MKAAIYIRVSTREQVENYSIQAQTEKLIALCRSKDWGVYDIFIDGGYSGSNMNRPALNEMLSKLHEIDAVVVYRLDRLSRSQRDTITLIEEYFLKNNVEFVSLSETLDTSSPFGRAMIGILSVFAQLERETIRDRMVMGKIKRIEAGLPLTTAKGRTFGYDVIDTKLYINEEEAKQLQLIYDIFEEEQSITLLQKRLKKLGYKVRTYSRYTSWLTNDLYCGYVSYKDKVHVKGIHEPIISEEQFHRVQEIFTRMGKSPNMNRDSASLLNNLVVCGKCGLGFVHRRKDTTSRGKKYHYRYYSCKTYKHTHELERCGNKIWRADRLEELIINRVNNYSFASRNVGKEDELDSLNEKLKIEHAKKKRLFDLYINGSYEVSELDCMMNDIDAQINYYESQIEANEELKKDKKIQESLANLATVDYDSLEFREKQLYLKSLINKIYIDGEQVTIEWL

SEQ ID NO: 7156 - protein, 485 aa, synthetic construct
MTKKVAIYTRVSTTNQADEGFSIDEQIDRLTKYAEAMGWRVSDTYTDAGFSGAKLKRPAMQRLINDIENKAFDTVLVYKLDRLSRSVRDTLYLVKDVFTKNKIDFISLSESIDTSSAMGSLFLTILSAINEFERENIKERMTMGKLGRAKSGKSMMWTKTAFGYYHNRKTGILEIVPLQATIVEQIFTDYLSGISLAKLRDKLNESGHIGKDIPWSYRTLRQTLDNPVYCGYIKFKGSLFEGMHKPIIPYETYLKVQRELEDRQQQTYERNDNPRPFQAKYMLSGMARCGYCGAPLRIVLGRKRKDGSRTMKYHCANRFPRKTKGVTVHNDNKKCDSGTYDLSSLENTVIDNLIGFQENHDSLLKIINSNNQPILDTSSFKKQISQIDKKIQKNSDLYLNDFITMDELKDRTDSLQAEKKLLKAKISENKFNDSTDVFELVKTQLGSIPINELSYDDKKKIVNNLVSKVDVTADNVDIIFKFQLA

SEQ ID NO: 7157 - protein, 452 aa, synthetic construct
MKAAIYIRVSTQEQVGNYSIQAQTEKLTALCRSKDWDVYDIFVDGGYSGSNMNRPALNEMLSKLHEIDAVVVYRLDRLSRSQRDTTTLIEEYFLKNNVEFVSLSETLDTSSPFGRAMIGILSVFAQLERETIRDRMVMGKIKRIEAGLPLTTAKGRTFGYDVIDTKLYINEEEAKQLRLIYDIFEEEQSITSLQKRLKKLGFKVRTYNRYSNWLTNDLYCGYVSYKDKVHVKGIHEPIISEEQFYRVQEIFTRMGKSPNMNRDSASLLNSLVVCSKCGLGFVHRSKDTMSRGKKYHYRYYSCKTYKHTHELEKCGNKTWRADKLEELIINRVNNYSFASRNVDKEDELDSLNEKLKIEHGKKKRLFDLYINGSYEVSELDSMMNDIDAQINYYESQIEAIEGLKKNKKIQENLAELATVDFDSLEFREKQLYLKSLINKIYIDGEQVTIEWL

SEQ ID NO: 7158 - protein, 452 aa, synthetic construct
MKAAIYIRVSTQEQVENYSIQAQTEKLTALCRSKDWDVYDIFIDGGYSGSNMNRPALNEMLSKLHEIDAVVVYRLDRLSRSQRDTITLIEEYFLKNNVEFVSLSETLDTSSPFGRAMIGILSVFAQLERETIRDRMVMGKIKRIEAGLPLTTAKGRTFGYDVIDTRLYINEEEAKQLQLIYDIFEEEQSITSLQKRLKKLGFTVRTYNRYNNWLTNDLYCGYVSYKDKVHVKGIHEPIISEEQFYRVQEIFTRMGKNPNMNRDSASLLNNLVVCSKCGLGFVHRRKDTVSRGKKYHYRYYSCKTYKHIHELEKCGNKIWRADKLEELVINRVNNYSIAGRNVDKEDELDSLNEKLKIEHAKRKRLFDLYIDGSYEVSELDSMMNDIDAQISYYESQIEANEELKKNKKIQENLADLATVDFDSLEFREKQLYLKSLINKIYIDGEQVTIEWL

SEQ ID NO: 7159 - protein, 485 aa, synthetic construct
MTKKVAIYTRVSTTNQAEEGFSIDEQIDRLTKYAEAMGWQVSDTYTDAGFSGAKLERPAMQRLINDIESKAFDTVLVYKLDRLSRSVRDTLHLVKDVFTKNKIDFISLNESIDTSSAMGSLFLTILSAINEFERENIKERMTMGKLGRAKSGKSMMWTKTAFGYYHNRKTGILEIVPLQATIVEQIFTDYLSGISLTKLRDKLNKSGHIGKDIPWSYRTLRQTLDNPVYCGYIKFKGSLFEGMHKPIIPYETYLKVQKELEERQQQAYERNHNPRPFQAKYMLSGVARCGYCGAPLKIVLGHKRKDGSRTMKYHCANRFPRKTKGVTVYNDNKKCDSGTYDLSSLENAVIDNLIGLQENDDSLLGIIDGNNQPILDTSSFEKRISQIDKKIQKNSDLYLNDFITMDELKDRTDSLQAEKKLLKAKISENQFNDSTDVFELVKAQLGSIPINELSYDNKKKIVNNLVSKVDVTADNVDIIFKFQLA

SEQ ID NO: 7160 - protein, 485 aa, synthetic construct
MTKKVAIYTRVSTTNQAEEGFSIDEQTDRLTKYAEAMGWQVSDTYTDAGLSGAKLERPAMQRLINDIENKAFDTVLVYKLDRLSRSVRDTLYLVKDVFTKNKIDFISLSESIDTSSAMGSLFLTILSAINEFERENIKERMTMGKLGRAKSGKSMMWTKTAFGYYHNRKTGILEIVPLQATIVEQIFTDYLSGISLTKLRDKLNESGHIGKDIPWSYRTLRQTLDNPVYCGYIKFKDSLFEGMHKPIIPYETYLKVQKELEVRQQQTYERNNNPRPFQAKYMLSGMARCGYCGAPLRIVLGRKRKDGSRTMKYHCANRFPRKTKGITVYNDNKKCDSGTYDLSNLENTVIDNLIGLQENNDSLLKIINGNNQPILDTSSFKEQISQIDKKIQKNSDLYLNDFITMDELKDRTDSLQAEKKLLKAKISENKFNDSTDVFELVKTQLGSIPINELSYDNKKKIVNNLVSKVDVTADNVDIIFKFQLA

SEQ ID NO: 7161 - protein, 469 aa, synthetic construct
MSYTTPVRAAVYLRISEDRSGEQLGVARQREDCLKLCDQRKWVPVEYLDNDVSASTGKRRPAYEQMLADISAGKIAAVVAWDLDRLHRRPIELEAFMSLADEKRLALATVAGDVDLATPQGRLVARLKGCVAAHETEHKKARQRRAARQKAERGLPNWSKAFGYLPGPNGPEPDPRTAPLVKQAYADILAGASLGDVCRQWNDAGAFTITGRPWTTTTLSKFLRKPRNAGLREYKGARYGPVDRDAIVGKAQWSPLVDEATFWAAQAVLDAPGRAPGRKSVRCHLLTGLAGCGKCGNHLAGSYRTDGRVVYVCKACHGVAILADNIEPILYHIVAERLAMPDAVDLLRREIHDAAEAETVRLELETLYGELDRLAVERAEGLLTARQVKISTDIVNAKITKLQARQQDQERLRVLGGIPLGTPQVAGMIAELSPDRFRAVLDALAEVVVQPVGKGGRIFNSERVQVNWR

SEQ ID NO: 7162 - protein, 452 aa, synthetic construct
MKAAIYIRVSTREQVVNYSIQAQTEKLTALCRSKDWDVYDIFIDGGYSGSNMNRPALNEMLSKLHEIDAVVVYRLDRLSRSQRDTITLIEEHFLKNNVEFVSLSETLDTSSPFGRAMIGILSVFAQLERETIRDRMVMGKIKRIEAGLPLTTAKGRTFGYDVIDAKLYINEEEAKQLQLIYDIFEEEQSITFLQKRLKKLGFKVRTYNCYNNWLTNDLYCGYVSYKDKVHVKGIHEPIISEEQFYRVQEIFTRVGKNPNMNRDSASLLNSLVVCSKCGLGFVHRRKDTMSRGKRYHYRYYSCKTYKHTYELEKCGNKIWRADKLEELIINRVNNYSFASRNVDKEDELDSLNEKLKIERAKKKRLFDLYINGSYEVSELDSMMNDIDAQINYYESQIEANEELKKNKKIQENLANLATVDYDSLEFREKQLYLKSLINKIYIDGEQVTIEWL

SEQ ID NO: 7163 - protein, 485 aa, synthetic construct
MTKKVAIYTRVSTTNQAEEGFSIDEQIDRLTKYAEAMGWQVSDTYTDAGFSGAKLGRPAMQRLINDIENKAFDTVLVYKLDRLSRSVRDTLYLVKDVFTKNKIDFISLSESIDTSSAMGSLFLTILSAINEFERENIKERMTMGKLGRAKSGKSMMWTKTAFGYCHNRKTGILEIVPLQATIVEQIFTDYLGGISLTKLRDKLNESGHIGKDIPWSYRTLRQTLDNPVYCGYIKFKDSLFEGMHKPIIPYETYLKVQKELEERQQQTYERNNNPRPFQAKYMLSGMARCGYCGAPLRIVLGHKRKDGSRTMKYHCANRFPRKTKGVTVYNDNKKCNSGSYDLSNLENIVIDDLVGFQESNDSLLKIINGNSQPILDTSSLKEQISQIDKKIQKNSDLYLNDFITMDELKDRTDSLQAEKELLKAKISENKFNDSTNVFELVKTQLGSTPINELSYDNKKRIVNNLVSKVDVTADNVDIIFKFQLA

SEQ ID NO: 7164 - protein, 469 aa, synthetic construct
MSYTTPVRAAVYLRISEDRSGEQLGVARQREDCLKLCDQRKWVPVEYLDNDVSASTGKRRPAYEQMLADITAGKIAAVVAWDLDRLHRRPVELEAFMSLADEKRLALATVAGDVDLATPQGRLVARLKGCVAAHETEHKKVRQRRAARQKAERGHPNWSRAFGYLPGPNGPEPDPRTAPLVKQAYADILAGASLGDVCRQWNGAGAFTITGRPWTTTTLSKFLRKPRNAGLRAYKGARYGPVDRDAIVGKAQWSPLVDEATFWAAQAVLDAPGRAPGRKSVRRHLLTGLAGCGKCGNHLAGSYRTDGQVVYVCKACYGVAILADNIVPILYHVVAERLAMPDAVDLLRHEIHDAAEAEAIRLELETLYGELDRLAVERAEGLLTARQVKISTDIVNAKITKLQARQLDQERLRVFNGIPLGTPQVAGVIAELSPDRFRAVLDVLAEVVVQPVGKGGRIFSPERVQVNWR

SEQ ID NO: 7165 - protein, 485 aa, synthetic construct
MTKKVAIYTRVSTTNQAEEGFSIDEQVDRLTKYAEAMGWQVSGTYTDAGFSGAKLERPAMQRLINDIENKAFDTVLVYKLDRLSRSVRDTLYLVKDVFTKNKIDFISLNESINTSSAMGSLFLTILSAINEFERENIKERMTMGKLGRAKSGKSMMWTKTAFGYYHNRKTGILEIVPLQATIVEQIFTDYLSGVSLTKLRDKLNESGHIGKDIPWSYRTLRQTLDNPVYCGYIKFKDSLFEGMHKPIIPYETYLKVQKELEERQQQTYERNNNPRPFQAKYMLSGMARCGYCGAPLKIVLGHKRKDGSRTMKYHCANRFPRKTKGITVYNDNKKCDSGTYDLSNLENTVIDNLIGFQENDDSLLRIINGINQPILDTSSFKKRISQIDKKIQKNSDLYLNDFITMDELKDRTDSLQAEKKLLKAKISENKSNDSTDVFELVKTQLGSIPINGLSYDDKKKIVNNLVSKVDVTADNVDIIFKFQPA

SEQ ID NO: 7166 - protein, 452 aa, synthetic construct
MKAAIYIRVSTQEQVENYSIQAQTEKLTALCRSKDWDVYDIFIDGGYSGSNMNRPALSEMLSKLHEIDAVVVYRLDRLSRSQRDTITLIEEYFLKNNVEFVSLSETLDTSSPFGRAMIGILSVFAQLERETIRDRMVMGKIKRVEAGLPLTTAKGRTFGYDVIDTKLYINEEEAKQLQLIYDIFEEEQSITSLQKRLKKLGFKVRTYNRYNNWLTNDLYCGYVSYKDKVHVKGIHEPIISEEQFYRVQEIFTHMGKNPNMNRDSASLLNNLVVCSKCGLGFVHRRKDTTSRGKKYHYRYYSCKTYKHIHELEKCGNKIWRADKLEELVIDRVNNYSIASRNVDKEDELDSLNEKLKIEHAKKKRLFDLYINGSYEVSELDSMMNDIDAQISYYESQVEANEELKKNKKIQENLAGLATVDFDSLEFREKQLYLKSLINKIYIDGEQVTIEWL

SEQ ID NO: 7167 - protein, 485 aa, synthetic construct
MTKKVAIYTRVSTTNQAEEGFSIDEQIDRLTKYAEAMGWQVSDTYTDAGISGAKLERPAMQRLINDIENKAFDTVLVYKLDRLSRSVRDTLYLVKDVFTKNKIDFISLNESIDTSSAMGSLFLTILSAINEFERENIKERMTMGKLGRAKSGKSMMWTKTAFGYHHNRETGILEIVPLQATIVEQIFTDYLSGISLTKLRDKLNESGHIGKDIPWSYRTLRQTLDNPVYCGYIKFKDSLFEGLHEPIIPYETYLKVRKELEERQQQTYERNNNPRPFQAKYMLSGMARCGYCGAPLKIVLGHKRKDGSRTMKYHCANRFPRKTRGVTVYNDNKKCDSGTYDLSNLENTVIDNLIGFQENNDSLLKIINGVNQPILDTSSFKNQISQIDKKIRRNSDLYLNGFITMDELKDRTDSLQAERKLLKAKISENKFNDSTDVFELVKTQLGSIPINELSYDNKKKIVNNLVSKVDVTADNVDIIFKFQLA

SEQ ID NO: 7168 - protein, 452 aa, synthetic construct
MKAALYIRVSTREQVENYSIQAQTEKLTALCRSKDWDVYDIFIDGGYSGSNMNRPALNEMLSKLHEIDAVVVYRLDRLSRSQRDTITLIEEYFLKNNVEFVSLSETLDTSSPFGRAMIGILSVFAQLERETIRDRMVMGKIKRIEAGLPLTTAKGRTFGYDVIDTKLYINEEEAKQLQLIYDIFEEEQSITFLQKRLKKLGYKVRTYNRYNSWLTNDLYCGYVSYKDKVHVKGIHEPIISEEQFYRVQEIFTRMGKNPNMNRDSASLLNNLVVCSKCGLGFVHRRKDTMSRGKKYHYRYYSCKTYKHIHELEKCGNKIWRADKLEELVINRVNNYSFVSRNVDKEDELDSLNEKLKIEHAKKKRLFGLYINGSYEVSELDSMMNDIDAQINYYEGQIEANEGLKKSKKIQENLADLATVDFDSLEFREKQLYLKSLINKIYIDGEQVTIEWL

SEQ ID NO: 7169 - protein, 452 aa, synthetic construct
MKAAIYIRVSTREQVENYSIQAQTEKLTALCRSKDWDVYDIFIDGGYSGSNMNRPALNEMLSKLHEIDAVVVYRLDRLSRSQRDTITLIEEYFLKNNVEFVSLSETLDTSSPFGRAMIGILSVFAQLERETIRDRMVMGKIKRVEAGLPLTTAKGRTFGYDVIDTKLYINEEEAKQLQLIYDIFEEEQSITFLQKRLKKLGFKVRTYNRYNSWLTNDLYCGYVSYKDKVHVKGIHEPIISKEQFYRVQEIFTRMGKNPNMNRDSASLLNNLVVCSKCGLGFVHRRKDTTSRGKKYHYRYYSCKTYKHTYELEKCGNKIWRADKLEELIINCVNNYSFASRNVDKEDELNSLNEKLKIEHAKKKRLFDLYINGSYEVSELDSMMNDIDAQINYYESQIEANEELKKNKKIRENLADLATVDYDSLEFREKQLYLKSLINKIYIDGEQVTIEWL

SEQ ID NO: 7170 - protein, 452 aa, synthetic construct
MKAAIYIRVSTREQVENYSIQAQTEKLTALCRSKDWDVYDIFIDGGYSGSNMNRPALNEMLSKLHEIDAVVVYRLDRLSRSQRDTITLIEEYFLKNNVEFVSLSETLDTSSPFGRAMIGILSVFAQLERETIRDRMVTGKIKRIEAGLPLTTAKGRTFGYDVIDTKLYINEEEAKQLRLIYDIFEEEQSITFLQKRLKKLGFKVRTYSRYNNWLTNDLYCGYVSYKDKVHVKGIHEPIISEEQFYRVQEIFTRMGKNPNMNRDSASLLNNLVVCSKCGLSFVHRRKDTTSRGKKYHYRYYSCKTYKHTHELEKCGNKIWRADKLEELIINRVNDHSFASRNADKEDELDSLNEKLKIEHAKKRRLFDLYLSGSYEVSELDSMMNDIDAQINYYESQIEANEELKKNKKIQENLANLATVDYDRLEFREKQLYLKSLINKIYIDGEQVTIEWL

SEQ ID NO: 7171 - protein, 452 aa, synthetic construct
MKAAIYIRVSTREQVENYSIQAQTEKLTALCRSKDWDVYDIYIDGGYSGSNMNRPALNEMLSKLHEIDAVVVYRLDRLSRSQRDTITLIEEYFLKNNVEFVSLSETLDTSSPFGRAMIGILSVFAQLERETIRDRMVMGKIKRIEAGLPLTTAKGRTFGYDVIDAKLYINEEEAKQLRLIYDIFEEEQSITFLQKRLKKLGFKVRTYNRYNNWLTNDLYCGYVSYKDKVHVKGIHEPIISEEQFYRVQEIFTRMGKNPNMNRDSASLLNNLVVCGKCGLGFVHRRKDIMSRGKKYHYRYYSCKTYKHIHELEKCGNKIWRADKLEELIINRVNNYSFASRNADKEDELDSLNEKLRAEHAKKKRLFDLYINGSYEVSELDSMMNDIDAQINYYESQIEANEELKKNKRMQENLADLATVDFDNLEFREKQLYLRSLINKIYIDGEQVTIEWL

SEQ ID NO: 7172 - protein, 452 aa, synthetic construct
MKAAIYIRVSTQEQVENYSIQAQTEKLTALCRSKDWDVYDIFVDGGYSGSNMNRPALNEMLSKLHEIDAVVVYRLDRLSRSQRDTTTLIEEYFLKNNVEFVSLSEALDTSSPFGRAMIGILSVFAQLERETIRDRMVMGKIKRIEAGLPLTTAKGRTFGYDVIDTKLYINEEEAKQLQLIYDIFEEEQSITLLQKRLKKLGFKVRTYNRYNNWLTNDLYCGYVSYKDKVHVKGIHEPIISEEQFYRVQEIFTRMGKNPNMNRDSASLLNNLVVCGKCGLSFVHRSKDTMSRGKKYHYRYYSCKTYKHTHELEKCGNKTWRADKLEELIINRVNNYSFASRNADKEDELDSLNEKLKIEHARKKRLFDLYINGSYEVSELDSMMNDIDAQINYYESQIEVSKELKKNKKIQENLADLATVDFDSLEFREKQLYLKSLINKIYIDGEQVTIEWL

SEQ ID NO: 7173 - protein, 452 aa, synthetic construct
MKAAIYIRVSTQEQVENYSIQAQTEKLTALCRSKDWDVYDIFIDGGYSGSNMNRPALNEMLSKLHEIDAVVVYRLDRLSRSQRDTTTLIEEYFLKNNVEFVSLSETLDTSSPFGRAMIGILSVFAQLERETIRDRMVMGKIKRIEAGLPLTTAKGRTFGYDVIDTKLYINEEEAKQLQLIYDIFEEEQSITLLQKRLKKLGFKVRTYNRYNNWLTNDLYCGYVSYKDKVHVKGIHEPIISEEQFYRVQEIFTRMGKNPNMNRDSASLLNNLVVCSKCGLSFVHRSKDTMSRGKKYHYRYYSCKTYKHTHELEKCGNKTWRADKLEELIINRVNNYSFASRSADKEDGLDSLNEKLKIEHAKKKRLFDLYINGNYEVSELDSMMNDIDAQINYYESQIAANEERRKNKKIQENLADLAAVDFDNLEFREKRLYLKSLINKIYIDGEQVTIEWL

SEQ ID NO: 7174 - protein, 452 aa, synthetic construct
MKAAIYIRVSTQEQVENYSIQAQTEKLTALCRSKDWDVYDIFIDGGYSGSNMNRPALNEMLSKLHEIDAVVVYRLDRLSRSQRDTTTLIEEYFLKNNVEFVSLSETLDTSSPFGRAMIGILSVFAQLERETIRDRMVMGKIKRIEAGLPLTTAKGRTFGYDVIDTKLYINEEEAKQLRLIYDIFEEEQSITSLQKRLRKLGFKVRAYNRYNNWLTNDLYCGYVSYKDKVHVKGIHEPIISEEQFYRVQEIFTRTGKNPNMNRDSASLLNNLVVCSKCGLSFVHRSKDTMSRGKKYHYRYYSCKTYKHTHELEKCGNKTWRADKLEELIINRVNNYGSASRNVDKEDELDSLNEKLKIEHAKKKRLFDLYINGSYEVSELDSMMNDIDAQINYYESQIEANDELRRNRKIQENLADLAAVDFDSLEFREKRLYLKSLINKIYIDGEQVTIEWL

SEQ ID NO: 7175 - protein, 452 aa, synthetic construct
MKAAIYIRVSTREQVENYSIQAQTEKLTALCRSKDWDVYDIFIDGGYSGSNMNRPALNEMLSKLREIDAVVVYRLDRLSRSQRDTITLIEEYFLKNNVEFVSLSETLDTSSPFGRAMIGILSVFAQLERETIRDRMVMGKIKRIEAGLPLTTAKGRTFGYDVIDTKLYVNEEEAKQLQLIYDIFEEEQSITFLQKRLKKLGFKVRTYSCYNNWLTNDLYCGYVSYKDKVHVKGIHEPIISEEQFYRVQKIFTRMGKNPNMNRDSASLLNNLVVCSKCGLGFVHRRKDAVSRDKKYHYRYYSCKTYKHIHELEKCGNKIWRADKLEELIINRVNDYSVASRNVDKKDELDSLNEKLKIEHAKKRRLFDLYINGSYEVSELDSMMNDIDAQINYYESQIEANEELKRNKKIQENLAYLATVDFDSLEFREKQLYLKSLINKIYIDGEQVTIEWL

SEQ ID NO: 7176 - protein, 452 aa, synthetic construct
MKAAIYIRVSTREQVENYSIQAQTEKLTALCRSKDWGVYDIFIDGGYSGSNMNRPALNEMLSKLHEIDAVVVYRLDRLSRSQRDTITLIEEYFLKNNVEFVSLSETLDTSSPFGRAMIGILSVFAQLERETIRDRMVMGKIKRIEAGLPLTTAKGRTFGYDVIDTRLYINEEEAKQLQLIYDIFEEEQSITFLQKRLKELGLKVRTYNRYNNWLTNDLYCGYVSYKDKVHVKGIHEPIISEEQFYRVQEIFARMGKNPNMNRDSASLLNNLVVCGKCGMGFVHRRKDAMSRDKKYHYRYYSCKTYKHIHELEKCGNKIWRADKLEELIINRVNNYSLASRNVDKEDELDSLNEKLKAEHAKKKRLFDLYINGSYEVSELDSMMNDIDAQINYYESQIEAIEELKKNKKIQENLADLATVDFDSLEFREKQLYLKSLINKIYIDGEQVTIEWL

SEQ ID NO: 7177 - protein, 469 aa, synthetic construct
MSYTTPVRAAVYLRISEDRSGEQLGVARQREDCLKLCGQRKWVPVEYLDNDVSASTGKRRPAYEQMLADITAGKIEAVVAWDLDRLHRRPVELEAFMSLADEKRLALATVAGDVDLATPQGRLVARLKASVAAHETEHKKARQRRAARQKAERGLPNWSKAFGYLPGPNGPEPDPRTAPLVKQAYADVLAGASLGDVCRQWNDAGALTITGRPWTTTTLSKFLRKPRNAGLRAYRGARYGPVDRDAIVGKAQWSPLVDEATFWAAQAVLDAPGRAPGRKSVRRHLLTGLAGCGKCGNHLAGSYRTDGRVVYVCKACHGVAILADNIEPILYHIVAERLAMPDAVDLLRRGIHDAAEAETIRLELETLYGELDRLAVERAEGLLTARQVKISTDIVNAKITKLQARQLDQERLRVLDGIPLGTPQVAGMIAELSPDRFRAVLDVLAEVVVQPVGNSSRIFNPERVQVNWR

SEQ ID NO: 7178 - protein, 452 aa, synthetic construct
MKAAIYIRVSTREQVENYSIQAQTEKLTALCRSKDWDVYDIFIDGGYSGSNMNRPALNEMLSKLHEIDAVVVYRLDRLSRSQRDTITLIEEYFLKNNVEFVSLSETLDTSSPFGRAMIGILSVFAQLERETIRDRMVMGKIKRIEAGLPLTTAKGRTFGYDVIDTKLYINEEEAKQLQLIYDIFEEEQSITFLQKRLKKLGFKVRTYNRYSNWLTNDLYCGYVSYKDKVHVKGIHEPIISEEQFYRVQEIFTRMGKNPNMNRNSASLLNNLVVCSKCGLGFVHRRKDAMSRDKKYHYRYYSCKTYKHIHELEKCGNKIWRADKLEELIINRVNDYSVASRNVDKEDELDSLNEKLKIEHAKKRRLFDLYINGSYEMSELDSMMNDIDAQINYYESQIEANEELKKNKKIQENLANLATVGFDSLEFREKQLYLKSLINKIYIDGEQVTIEWL

SEQ ID NO: 7179 - protein, 485 aa, synthetic construct
MTKKVAIYTRVSTTNQAEEGFSIDEQIDRLTKYAEAMGWRVSDTYTDAGFSGTKLERPAMQRLINDIENKAFDTVLVYKLDRLSRSVRDTLYLVKDVFTKNKIDFISLNESIDTSSAMGSLFLTILSAINEFERENIKERMTMGKLGRAKSGKSMMWTKTAFGYYHNRKTGILEIVPLQATIVEQIFADYLSGISLTKLRDKLNESGHIGKDIPWSYRTLRQTLDNPVYCGYIKFKDSLFEGMHKPIIPYETYLKVQKELEERQQQTYERNNNPRPFQAKYMLSGMARCGYCGAPLRIVLGHKRKDGSRTMKYHCANRFPRKTKGVTVYNDNKKCDSGTYDLSNLENTVIGNLVGFQESDDSLLKIINGNNQPILDTSSFKKQISQIDKKIQKNSDLYLNDFITMDELKDRTNSLQAEKKLLKAKISENKFNDSTDVFELVKTQLGSIPINELSYDNKKKIVNNLVSKVDVTADNVDIIFKFQLA

SEQ ID NO: 7180 - protein, 485 aa, synthetic construct
MTKKVAIYTRVSTTNQAEEGFSIDEQIDRLTKYAEAMGWQVSDTYTDAGSSGAKLERPAMQRLINDIENKAFDTVLVYKLDRLSRSVRDTLYLVKDVFTKNKIDFISLNESIDTSSAMGSLFLTILSAINEFERENIKERMTMGKLGRAKSGKSMMWAKTAFGYYHNRKTGILEIVPLQATIVEQIFTDYLSGISLTKLRDKLNESGHIGKDIPWSYRTLRQTLDNPVYCGYIKFKDSLFEGMHKPIIPYETYLKVQKELEERQRRTYERNNNPRPFQAKYLLSGMARCGYCGAPLRIVLGHKRKDGSRTMKYHCANRFPRKTKGVTVYNGNKKCDSGTYDLSNLENTVIDNLIGFQENNDSLLKIINGNNQPILDTSSLKKQISQIDKKIQKNSDLYLNDFITMDELKERTESLQAEKKLLKAKICENKFNDSTDVFELVKAQLGSIPINELSYDNKKKIVNNLVSKVDVTADNVDIIFKFQLA

SEQ ID NO: 7181 - protein, 485 aa, synthetic construct
MTKRVAIYTRVSTTNQAEEGFSIDEQIDRLTKYAEAMGWQVSDTYTDAGCSGAKLERPAMQRLISDIENKAFDTVLVYKLDRLSRSVRDTLYLVKDVFTKNKIDFISLNESIDTSSAMGSLFLTILSAINEFERENIKERMTMGKLGRAKSGKSMMWTKTAFGYYHNRKTGILEIVPLQATIVEQIFTDYLSGISLTKLRDKLNESGHIGKDIPWSYRTLRQTLDNPVYCGYIKFKDSLFEGMHKPIIPYETYLKVQIELEKRQQQAYERNNNPRPFQAKYMLSGMARCGYCGAPLRIVLGHKRKDGSRTMKYHCANRFPRKTKGVTVYNDNKKCDSGTYDLSNLENTVIDNLIGFQENNDSLLKIINGINQPILDTSSFKEQISQIDKKIQKNSDLYLNDFITMDELRDRTDSLQAEKRLLKAKISVNKFNDCTDVLELVKTQLGSIPINELSYDNKKKIVNNLVSKVDVTADNVDIIFKFQLA

SEQ ID NO: 7182 - protein, 485 aa, synthetic construct
MTKKVAIYTRVSTTNQAEEGFSIDEQIDRLTKYAEAMGWQVSDTYTDAGFSGAKLERPAMRRLINDIENKAFDTVLVYKLDRLSRSVRDTLYLVKDVFTKNKIDFISLNESIDTSSAMGSLFLTILSAINEFERENIKERMTMGKLGRAKSGKSMMWTKTAFGYYHNRKTGILEIVPLQATIVEQIFTDYLSGISLTKLRDKLNASGHIGKDIPWSYRTLRQTLDNPVYCGYIKFKGSLFEGMHKPIIPYETYLRVQKELEERQQQTYERNNNPRPFQAKYMLSGMARCGYCGAPLRIVLGHKRKDGSRTMKYHCANRFPRKTKGITVYNDNKKCDSGTYDLSNLENTVIDNLIGFQENNDSLLKVINGNNQPILDTSSFKKQISQIDKKIQKNSDLYLNDFITMDELKDRTDSLQAEKKLLKAKISENKYNDSTDVFELVKTQLGSVPINELSYDNKKKIVNNLVSKVDVTADNVDIIFKFQLA

SEQ ID NO: 7183 - protein, 469 aa, synthetic construct
MSYTTPVRAAVYLRISEDRSGEQLGVARQREDCLKLCDQRKWVPVEYLDNDVSASTGKRRPAYEQMLADITAGKIGAVVAWDLDRLHRRPIELEAFMSLADEKRLALATVAGDVDLATPQGRLVARLKGCVAAHETEHKKARQRRAARQKAERGLPNWSKAFGYLPGPNGPEPDPRTAPLVKQAYADILAGASLGDVCRQWNDAGAFTITGRPWTTTTLSKFLRKPRNAGLRAYKGARYGPVDRDAIVGKAQWSPLVDEATFWAAQAVLDAPGRAPGRKSVRRHLLTGLAGCGKCGNHLAGSYRTDGRVVYVCKACHGVAILADNIEPILYHTVAERLAMPDAVDLLRCEVHDAAEAETTRLELEALYGELDRLAVERAEGLLTARQVKISTDIVNAKITKLQARQLDQERLRVFNGIPLGTPQVAGVIAELSPDRFRAVLDVLAEVVVQPVGKGGRIFSPERVQVNWR

SEQ ID NO: 7184 - protein, 469 aa, synthetic construct
MSYTTPVRVAVYLRISEDRSGEQLGVARQREDCLKLCDQRKWVPVEYLDNDVSASTGKRRPAYEQMLADITAGKIAAVVAWDLDRLHRRPIELEAFMSLADEKRLALATVAGDVDLATPQGRLVARLKGSVAAHETEHKKARQRRAARQKAERGHPNWSKAFGYLPGPSGPEPDPRTAPLVKQAYADILAGASLGDVCRQWNDTGAFTITGRPWTTTTLSKFLRKPRNAGLRAYKGARYGPVDRDAIVGKAQWSPLVDEATFWAAQAVLDAPGRAPGRKSVRRHLLTGLAGCGKCGNHLAGSYRTDGRIVYVCKACHGVSILAVNIEPTLYHVVAERLAMPDAVDLLRREIHDAAEAETVRLELETLYGELDRLAVERAEGLLTARQVKISTDIVNAKIAKLQARQLDQERLRVFDGIPLGTPQVAGMIAELSPDRFRAVLDVLAEVVVQPVGKSGRIFNPERVQVNWR

SEQ ID NO: 7185 - protein, 452 aa, synthetic construct
MKAAIYIRVSTREQVENYSIQAQTEKLTALCRSKGWDVYDIFTDGGYSGSNMNRPALNEMLSKLHEIDAVVVYRLDRLSRSQRDTITLIEEYFLKNNVEFVSLSETLDTSSPFGRAMIGILSVFAQLERETIRDRMVMGKIKRIEAGLPLTTAKGRTFGYDVIDTKLYINEEEAKQLQLIYDIFEEEQSITFLQKRLKKLGFRVRTYSCYNNWLTNDLYCGYVSYKDKVRVKGIHEPIISEEQFYRVQEIFTRMGKNPNMNRDSASLLNNLVVCSKCGLGFVHRRKDTTSRGKKYHYRYYSCKTYKHIHELEKCGNKIWRADKLEELIINRVNNYSFACRNVDKDDELDSLNEKLKIEHAKKKRLFDLYINGSYEVSELDSMMNDIDAQISYYEGQIEANEELKKNKKIQENLAGLATVDFDSLEFREKQLYLKSLINKIYIDGEQVTIEWL

SEQ ID NO: 7186 - protein, 452 aa, synthetic construct
MKAAIYIRVSTREQVENYSIQAQTEKLTALCRSKDWDVYDIFIDGGYSGSNMNRPALNKMLSKLHEIDAVVVYRLDRLSRSQRDTITLIEEYFLKNNVEFVSLSETLDTSSPFGRAMIGILSVFAQLERETIRDRMVMGKIKRIEAGLPLTTAKGRTFGYDVIDTKLYINEEEAKQLQLIYDIFEEEQSITLLQKRLKKLGFKVRTYSRYNNWLTNDLYCGYVSYKDKVHVKGIHEPIISEEQFYRVQEIFTRMGKNPNMNRDSASLLNNLVVCSKCGLGFVHRRKDTTSRGKKYHYRYYSCKTYKHIHELEKCGNKIWRADKLEELIINRVNDYSFASRNVDKEDELDSLNEKLKIEHAKKKRLFDLYINGNYEVGELDSMMSEIDAQINYYESQIEANEELKKNKKIQENLADLATVDFDSLEFREKQLYLKSLISKIYIDGEQVTIEWL

SEQ ID NO: 7187 - protein, 469 aa, synthetic construct
MSYTTPVRAAVYLRISEDRSGEQLGVARQREDCLKLCSQRKWVPVEYLDNDVSASTGKRRPAYEQMLADITAGKIAAVVAWDLDRLHRRPIELEAFMSLADEKRLALATVAGDVDLATPQGRLVARLKGCVAAHETEHKKARQRRAARQKAERGHPNWSKAFGYLPGPNGPEPDPRTAPLVKQAYTDILAGASLGDVCRQWNDAGAFTITGRPWTTTTLSKFLRKPRNAGLRAYKGARYGPVDRDAIVGKAQWSPLVDEVTFWAAQAVLDAPGRAPGRKSVRRHLLTGLAGCGKCGSHLAGSYRTDGRVVYVCKACHGVAILADSIEPILYHIVAERLAMPDAVDLLRREFQDAAEAETIRLELETLYGELDRLAVERAEGLLTARQVKISTDIVNAKITKLQARQLDQERLRVLDGIPLGTPQVAGMIAELSPDRFRAVLDVLAEVVVQPVGKSGRISNPERVQVNWR

SEQ ID NO: 7188 - protein, 452 aa, synthetic construct
MKAAIYIRVSTREQVENYSIQAQTEKLTALCRSKDWEVYDIFIDGGYSGSNMNRPALNEMLSKLHEIDAVVVYRLDRLSRSQRDTITLIEEYFLKNNVEFVSLSETLDTSSPFGRAMIGILSVFAQLERETIRDRMVMGKIKRIEAGLPLTTAKGRTFGYDVIDTKLYVNEEEARQLQLIYDIFEEVQSITLLQKRLKKLGFKVRTYNRYNNWLTNDLYCGYVSYKDKVHVKGIHEPIISEEQFYRVQEIFIRMGKNPNMNRDSASLLNNLVVCSKCGLGFVHRRKDAMSRDKKYHYRYYSCKTYKHIHELEKCGNKIWRADELEELIINRVNNYSLASRNVDKEDGLDSLNEKLKIEHAKKKRLFDLYLNGSYEVSELDSMMNDIDAQISYYEGQIEANEELRKNKKIQENLADLATVDFDSLEFREKQLYLKSLINKIYIDGEQVTIEWL

SEQ ID NO: 7189 - protein, 452 aa, synthetic construct
MKAAIYIRVSTQEQVGNYSIQAQTEKLTALCRSKGWDVYDIFIDGGYSGSNMNRPALNEMLSKLHEIDAVVVYRLDRLSRSQRDTTTLIEEYFLKNNVEFVSLSETLDTSSPFGRAMIGILSVFAQLERETIRDRMVMGKIKRIEAGLPLTTAKGRTFGYDVIDTKLYINEEEAKQLQLIYDIFEEEQSITFLQKRLKKLGFKVRTYNRYNNWLTNDLYCGYVSYKDKVHVKGIHEPIISEEQFYRVQEIFTRMGKSPNMNRDSASLLSNLVVCGKCGLSFVHRSKDTVSRGKKYHYRYYSCKTYKHTHELEKCGNKTWRADKLEELIINRVNNYSFASRNVDKEGELDSLNEKLKIEHAKKRRLFDLYINGSYEVSELDSMMNDIDAQISYYESQIEANEELKKNKKVQENLANLATVDFDSLEFREKQLYLKSLINKIYIDGEQVTIGWL

SEQ ID NO: 7190 - protein, 452 aa, synthetic construct
MKAAIYIRVSTQEQVENYSIQAQTEKLTALCRSKDWDVYDIFIDGGYSGSNMNRPALNEMLSKLHEIDAVVVYRLDRLSRSQRDTTTLIEEYFLKNNVEFVSLSETLDTSSPFGRAMIGILSVFAQLERETIRDRMVMGKIKRIEAGLPLTTAKGRTFGYDVIDTKLYINEDEAKQLQLIYDIFEEEQSITSLQKRLKKLGFKVRTYNRYNSWLTNDLYCGYVSYKDKVHVKGIHEPIISEEQFYRVQEIFTRMGKNPNMNRDSASLLSNLVVCSKCGLGFVHRSKDTMSRGKKYHYRYYSCKTYKHTHELEKCGNKTWRADKLEELIISRVNNYSFASRSVDKEDELDSLNEKLKIELAKKKRLFDLYINGSYEVSELDSMMNDIDAQINYYESQIEANEELRKNKKIQENLADLATVDFDNLEFREKQLYLKSLINKIYIDGEQVTIEWL

SEQ ID NO: 7191 - protein, 485 aa, synthetic construct
MTKKVAIYTRVSTTNQAEEGFSIDEQIERLTKYAEAMGWQVSDTYTDAGFSGAKLERPAMQRLISDIENKAFDTVLVYKLDRLSRSVRDTLYLVKDVFTKNKIDFISLNESIDTSSAMGSLFLTILSAINEFERENIKERMTMGKLGRAKSGKSMMWTKTAFGYYHNRKTGILEIVPLQATIVEQIFTDYLSGISLTKLRDKLNESGHIGKDIPWSYRTLRQTLDNPVYCGYVKFKDSLFEGMHKPIIPYETYLKVQRELEERQQQTYERNNNPRPFQAKYMLSGMARCGYCGAPLRIVLGHKRKDGSRTMKYHCTNRFPRKTKGVTVYNDNKKCDSGTYDLSDLENTVIDNLIGFQENNDSLLKIINGNNQPILDTSSFKERISQIDKKIQKNSDLYLNDFITMDELKDRTDSLQAEKKLLKAKISESKFNDSTDVFELVKTQLGSIPINELSYDNKKKIVNNLVSKVDVTADNVDIIFKFQLA

SEQ ID NO: 7192 - protein, 485 aa, synthetic construct
MTKKVAIYTRVSTTNQAEEGFSIDEQIDRLTKYAEAMGWQVSDTYTDAGFSGAKLERPAMKRLINDIENKAFDTVLVYKLDRLSRSVRDTLYLVKDVFTKNKIDFISLNESINTSSAMGSLFLTILSAINEFERENIKERMTMGKLGRAKSGKSMMWTKTAFGYYHNRKTGILEIVPLQATIVEQIFTDYLSGTSLTKLRDNLNESGHIGKDIPWSYRTLRQTLDNPVYCGYIKFKDSLFEGMHKPIIPYETYLKVQRELEERQQQTYERNNNPRPFQAKYMLSGMARCGYCGAPLRIVLGHKRKDGSRTMKYHCASRFPRKTKGVTVYNDNKKCDSGTYDLSNLENTVIGNLIGLQESNDSLLKIINGNNQPILDTSSFKKQISQIDKKIQKNSDLYLNDFITMDELKGRTDSLQAEKKLLKAKISENKFNDSTDVFELVKTQLGSIPINELSYDNKKKIVNNLVSRVDVTADNVDIIFKFQLA

SEQ ID NO: 7193 - protein, 485 aa, synthetic construct
MTKKVAIYTRVSTTNQAEEGFSIDEQTDRLTKYAEAMGWQVSGTYTDAGFSGAKLERPAMQRLINDIENKAFDTVLVYKLDRLSRSVRDTLYLVKEVFTENEIDFISLNESIDTSSAMGSLFLTILSAINEFERENIRERMTMGKLGRAKSGKSMMWTKTAFGYYHNRKTGTLEIVPLQATIVEQIFTDYLSGISLTKLRDKLNESGHIGKDIPWSYRTLRQTLDNPVYCGYIKFKGSLFEGMHKPIIPYETYLKVQRELEERQQQTYERNNNPRPFQAKYMLSGMARCGYCGAPLKIVLGHKRKDGSRTMKYHCANRFPRKTKGVTVYNDNKKCDSGTYDLSNLENTVIDSLIGFQENNDSLLKIINGNNQPILDTSSFKKQISQIDKKIQKNSDLYLNDFITMDELKDRTDSLQAEKKLLKAKISENKFNDSTDVFELVKTQLGSIPINELSYDNKKKIVNNLVSEVDVTADNVDIIFKFQLA

SEQ ID NO: 7194 - protein, 452 aa, synthetic construct
MKAAIYIRVSTREQVENYSIQAQTEKLTALCRSKDWDVYDIFIDGGYSGSNMNRPALNEMLSKLHEIDAVVVYRLDRLSRSQRDTITLVEEYFLKNNVEFVSLSETLDTSSPFGRAMIGILSVFAQLERETIRDRMVMGKIKRIEAGLPLTTAKGRTFGYDVIDTKLYINEEEAKHLQLIYDIFEEEQSITFLQKRLKKLGLKVRSYNRYNNWLTNDLYCGYVSYKDKVHVKGIHEPIISEEQFYRVQEIFTRMGKNPNMNRGSASLLNNLVVCSKCGLGFVHRRKDIMSRGKKYHYRYYSCKTYKHIHELEKCGNKIWRADKLEELIINRVNNYSLASRNAGKEDELDSLNEKLKIEHAKKKRLFELYINGSYEVSELDSMMNDIDAQINYYESQIEANKELKKNKKIQENLADLATVDFDSLEFREKQLYLKSLINKIYIDGEQVTIEWL

SEQ ID NO: 7195 - protein, 452 aa, synthetic construct
MKAAIYIRVSTQEQVGNYSIQAQTEKLTALCRSKDWDVYDIFTDGGYSGSNMNRPALNEMLSKLHEIDAVVVYRLDRLSRSQRDTTTLIEEYFLKNNVEFVSLSETLDTSSPFGRAMIGILSVFAQLERETIRDRMVMGKIKRIEAGLPLTTAKGRTFGYDVIDTKLYINEEEAKQLQLIYDIFEEEQSITSLQKRLKKLGLKVRTYNRYNNWLTNDLYCGYVSYKDKVHVKGIHEPIISEEQFYRVQEIFARMGKNPNMNRDSASLLNNLVVCSKCGLGFVHRSKDTMSRGKKYHYRYYSCKTYKHTHELEKCGNKTWRADKLEELIINRVNNYSFASRNVDKDDELGSLNEKLKIEHAKKRRLFDLYINGSYEVSELDSMMNDIDAQINHYESQIEANGELRKNKKIQENPADLATVDFDSLEFREKQQYLKSLINKIYIDGEQVTIEWL

SEQ ID NO: 7196 - protein, 485 aa, synthetic construct
MTKKVAIYTRVSTTNQAEEGFSIDEQIDRLTRYAEAMGWQVSDTYTDAGFSGAKLERPAMKRLINDIENKAFDTVLVYKLDRLSRSVRDTLYLVKDVFTKNKIDFISLNESIDTSSAMGSLFLTILSAINEFERENIKERMTMGKLGRAKSGKSMMWTKTAFGYYHNRKTGILEIVPLQATIVEQIFTDYLSGISLTKLRDKLNESGHIGKDIPWSYRTLRQTLDNPVYCGYIKFKDSLFEGMHKPIIPYETFLKVQKELEERQQQTYERNNNPRPFQAKYMLSGMARCGYCGAPLRIVLGHKRKDGSRTMKYHCMNRFPRKTKGVTMYNDNKKCDSGTYDLCDLENTVIDNLVGFQENNDSLLKIINGNNQPILDTSSLKKQISQIDEKIQKNSDLYLNGFITMDELKDRTDSLQAEKRLLKAKISENRFNDSTDVFELVKTQLGSIPINELSYDNKKKIVNSLVSKVDVTADSVDIIFKFQLA

SEQ ID NO: 7197 - protein, 452 aa, synthetic construct
MKAAIYIRVSTQEQVGNYSIQAQTEKLTALCRSKDWDVYDIFVDGGYSGSNMNRPALNEMLSKLHEIDAVVVYRLDRLSRSQRDTTTLIEEYFLKNNVEFVSLSETLDTSSPFGRAMIGILSVFAQLERETIRDRMVMGKIKRIEAGLPLTTAKGRTFGYDVIDTKLYINEEEAKQLQLIYDIFEEEQSITSLQKRLKKLGFKVRTYNRYNNWLTNDLYCGYVSYKDKVHVKGIHEPIISEEQFYRVQEIFTRMGKNPNMNRDSASLLNNLVVCSKCGLSFVHRSKDTMSRGKKYHYRYYSCKTYKHTHELEKCGNKTWRADKLEELIINRVNNYSFASRNVDKEDELDSLNEKLKIEHAKKRRLFGLYINGSYEVSELDSMMNDIDAQINYYESQIEANEELRKNKKIQESLANLATVDFGSLEFREKQLYLKSLINKIYIDGEQVTIEWL

SEQ ID NO: 7198 - protein, 485 aa, synthetic construct
MTKKVAIYTRVSTTNQAEEGFSIDEQIDRLTKYAEAMGWQVSDTYTDAGSSGAKLERPAMQRLINDIENKAFDTVLVYKLDRLSRSVRDTLYLVKDVFTKNKIDFISLSESIDTSSAMGSLFLTILSAINEFERENIKERMTMGKLGRAKSGKSMMWTKTAFGYYHNRKTGTLEIVPLQATIVEQIFTDYLSGISLTKLRDKLNESGHIGKDIPWSYRTLRQTLDNPVYCGYIKFKDSLFEGMHEPIISYETYQKVQKELEERQQQTYERNNNPRPFQAKYMLSGVARCGYCGAPLRIVLGHKRKDGSRTMKYHCANRFPRKTKGITVYNDNRKCDSGTYDLGNLENAVIDNLIGFQDDNDSLLKIINGNNQPILDTSSFEEQISQIDKKIQKNSDLYLNDFITMDELEDRTDSLRAEKKLLKAKISENKFNDSTDVFELVKTQLGSIPINELSYDNKKKIVNNLVSKVDVTADYVDIIFKFQLA

SEQ ID NO: 7199 - protein, 452 aa, synthetic construct
MKAAIYIRVSTREQVENYSIQAQTEKLTALCRSKDWDVYDIFTDGGYSGSNMNRPALNEMLNKLHEIDAVVVYRLDRLSRSQRDTITLIEEYFLKNNVEFVSLSETLDTSSPFGRAMIGILSVFAQLERETIRDRMVMGKIKRIEAGLPLTTAKGRTFGYDVIDTKLYINEEEAKQLQLIYDIFEEEQSITLLQKRLKKLGFKVRTYNRYNNWLTNDLYCGYVSYKDKVRVKGIHEPIISEEQFYRVQEIFTRMGKNPNMNRDSASLLNNLVVCSKCGLGYVHRRKDAMSRDKKYHYRYYSCKTYKHIHELEKCGNKIWRADKLEELIINRVNNYSLASRNVDKEDELDSLNKKLKTEHAKKSRLFDLYINGSYEVSELDSMMHDIDAQINYYESQIEANKELKKNKKIQENLAHLATVDFDSLEFREKQLYLKSLINKIYIDGEQVTIEWL

SEQ ID NO: 7200 - protein, 452 aa, synthetic construct
MKAAIYIRVSTREQVENYSIQAQTEKLTALCRSKDWDVYDIFIDGGYSGSNMNRPALNEMLSKLHEIDAVVVYRLDRLSRSQRDTITLIEEYFLKNNVEFVSLSETLDTSSPFGRAMIGILSVFAQLERETIRDRMVMGKIKRIEAGLPLTTAKGRTFGYDVIDTKLYINEEEAKQLQLIYDIFEEEQSITLLQKRLKELGFKVRTYNRYSNWLTNDLYCGYVSYKDKVHVKGIHEPIISEEQFYRVQEIFTRMGKNPNMNRDSASLLNNLVVCSKCGLGFVHRRKDATSRDKKYHYRYYSCKTYKHIHELEKCGNKIWRADELEELIINRVNNYSLASRNVDKEDELDSLNEKLKIEHAKKKRLFDLYINGSYEVSELDSMMKDIDAQINYYESQIEANEELRRNKKIQENLAYLATVDFNSLEFREKQLYLKSLINKIYIDGEQVTIEWL

SEQ ID NO: 7201 - protein, 452 aa, synthetic construct
MKAAIYIRVSTREQVENYSIQAQTEKLTALCRSKDWDVYDIFIDGGYSGSNMNRPALNEMLSKLHEIDAVVVYRLDRLSRSQRDTITLIEEYFLKNNVEFVSLSETLDTSSPFGRAMIGILSVFAQLERETIRDRMVMGKIKRVEAGLPLTTAKGRTFGYDVIDTKLYINEEEAKQLQLIYDIFEEEQSITFLQKRLKKLGFKVRTYNRYNNWLTNDLYCGYVSYKDKVHVKGIHEPIISEEQFYRVQGIFTRMGKNPNMNRDSASLLNNLVVCSKCGLGFVHRRKDTVSRGKKYHYRYYSCKTYKHTHELEKCGNKIWRADKLEELIISRVNNYSFASRNVDKEDELDSLNEKLKIEHAKKKRLFDLYINGSYEMSELDSMMNDIDAQIDYYESRIEGNEELKRNKKIQENLADLATVDYDSLEFREKQLYLKSLINKIYIDGEQVTIEWL

SEQ ID NO: 7202 - protein, 452 aa, synthetic construct
MKAAIYIRVSTREQVENYSIQAQTEKLTALCRSKDWDVYDIFVDGGYSGSNMNRPALNEMLSKLHEIDAVVVYRLDRLSRSQRDTITLIEEYFLKNNVEFVSLSETLDTSSPFGRAMIGILSVFAQLERETIRDRMVMGKIKRIEAGLPLTTAKGRTFGYDVIDTKLYINEEEAKQLRLIYDIFEEERSITSLQRRLKELGLKVRTYNRYNSWLTNDLYCGYVSYKDKVHVKGIHEPIISEEQFYRVQEIFTRMGKNPNMNRGSASLLNNLVVCGKCGLGFVHRRKGTMSRDKKYHYRYYSCKTYKHIHELEKCGNKIWRADKLEELIINRVNNYSLASRNVDKEDELDSLNEKLKTEHAKKKRLFDLYINGHYEVSELDSMMNDIDAQINYYESQIGANGELKKNKKIQENLAYLATVDFDSLEFREKQLYLKSLINKIYIDGEQVTIEWL

SEQ ID NO: 7203 - protein, 452 aa, synthetic construct
MKAAIYIRVSTREQVENYSIQAQTEKLTALCRSKDWDVYDIFVDGGYSGSNMNRPALNEMLSKLHEIDAVVVYRLDRLSRSQRDTITLIEEYFLKNSVEFVSLSETLDTSSSFGRAMIGILSVFAQLERETIRDRMVMGKIKRVEAGLALTTAKGRTFGYDVIDTKLYINEEEARQLQLIYDIFEEEQSITFLQKRLKKLGFKVRTYNRYISWLTNDLYCGYVSYKDKVHVKGIHEPIISEEQFYRVQEIFTRMGKNPNMNRDSASLLNNLVVCSKCGLGFVHRRKDTMSRGRKYHYRYYSCKTYKHIHELEKCGNKIWRADKLEELVINRVNNYSLASRNVDKEDELDSPYEKLKIEHAKKKRLFDLYINGSYEVSELDSMMNDIDAQINYYESQIETNEELRKTKKIQENLADLATVDFDSLEFREKQLYLKSLINKIYIDGEQVTIEWL

SEQ ID NO: 7204 - protein, 452 aa, synthetic construct
MKAAIYIRVSTREQVENYSIQAQTEKLTALCRSKDWDVYDIFIDGGYSGSNMNRPALNEMLSKLHEIDAVVVYRLDRLSRSQRDTITLIEEYFLRNNVEFVSLSETLDTSSPFGRAMIGILSVFAQLERETIRDRMVMGKIKRIEAGLPLTTAKGRTFGYDVIDTKLYINEEEAEQLQLIYDIFEEEQSITFLQKRLKKLGFKVRTYSCYNNWLTNDLYCGYVSYKDKVHVKGIHEPIISEEQFYRVQEIFTRMGKNPNMNRDSASLLNNLVVCSKCGLGFVHRRKDTTSRGKKYHYRYYSCKTYKHPYELEKCGNKIWRADKLEELIINRVSNYSFASRNADKEDELDSLNEKLKIEHAKKRRLFDLYLSGSYEVSELDSMMNDIDAQINYYESRIEANEELKKDKKIQENLANLATVDYDSLEFRGKQLYLRSLINKIYIDGEQVTIEWL

SEQ ID NO: 7205 - protein, 452 aa, synthetic construct
MKAAIYIRVSTREQVENYSIQAQTEKLTALCRSKDWDVYDIFIDGGYSGSNMNRPALNEMLSKLHEIDAVVVYRLDRLSRSQRDTITLIEEYFLKNNVEFVSLSETLDTSSPFGRAMIGILSVFAQLERETIRDRMVMGKIKRIEAGLPLTTAKGRTFGYDVIDTKLYINEEEAKQLQLIYDIFEEEQSITSLQKRLKKLGFKVRTYSCYNNWLTNDLYCGYVSYKDKVHVKGIHEPIISEEQFYRVQEIFTRMGKNPNMNRDSASLLNNLVVCSKCGLGFVHRRKDTMSRGKKYHYRYYSCKTYKHIHELEKCGNKIWRADKLEELIINRVNNYSFARRNADKEDELDSLNEKLKIEHAKKKRLFDLYINGSYEVGELDSMMNDIDAQINYYESQIEANEELKKNKKIQENLADLATVDFGSLEFREKQLYLRSLINKIYIDGEQVTIEWL

SEQ ID NO: 7206 - protein, 452 aa, synthetic construct
MKAAIYIRVSTQEQVGNYSIQAQTEKLTALCRSKDWDVYDIFVDGGYSGSNMNRPALNEMLSKLHEIDAVVVYRLDRLSRSQRDTTTLIEEYFLKNNVEFVSLSETLDTSSPFGRAMIGILSVFAQLERETIRDRMVMGKIKRIEAGLPLTTAKGRTFGYDVIDTKLYINEEEAKQLQLIYDIFEEEQSITFLQKRLKKLGFKVRTYNRYNSWLTNDLYCGYVSYKDKVHVKGIHEPIISEEQFYRVQEIFTRMGKNPNMNRDSASLLNNLVVCSKCGLGFVHRSKDTMCRGKKYHYRYYSCKTYKHTHELEKCGNKTWRADKLEELIINRVNDYSFAGRNVDKEDELDGLNEKLKIEYAKKKRLFDLYINGSYEVSELDSMMSDIDAQIDYYEGQIEAIEELKKNKKIQENLADLATVDFDSLEFRERQLYLKSLINKIYIDGEQVTIEWL

SEQ ID NO: 7207 - protein, 452 aa, synthetic construct
MKAAIYIRVSTREQVENYSIQAQTEKLTALCRSKDWDVYDIFIDGGYSGSNMNRPALNEMLSKLHEIDAVVVYRLDRLSRSQRDTITLIEEYFLKNNVEFVSLSETLDTSSPFGRAMIGILSVFAQLERETIRDRMVMGKIKRIEAGLPLTTAKGRTFGYDVIDTKLYVNEEEAKQLRLIYDIFEEEQSITFLQKRLKKLGFKVRTYNRYSNWLTNDLYCGYVSYKDKVHVKGIHEPIISEEQFYRVQEIFTRMGKNPNMNRDSASLLNNLVVCGKCGLGFAHRRKDIMGRGKKYHYRYYSCKTYKHIHELEKCGNKIWRADKLEELIINRVHNYSFAGRNAGKEDELDSLNEKLKIERAKKKRLFDLYISGSYEVSELDSMMNVIDAQINYYESQIEANEELKKNKKIQENLADLATVDFDSLEFREKQRYLKSLINKIYIDGEQVTIEWL

SEQ ID NO: 7208 - protein, 485 aa, synthetic construct
MTKKVAIYTRVSTTNQAEEGFSIDEQIDRLTKYAEAMGWQVSDTYTDAGSSGAKLERPAMQRLINDIENKAFDTVLVYKLDRLSRSVRDTLYLVKDVFTKNKIDFISLNESIDTSSAMGSLFLTILSAINEFERENIKERMTMGKLGRAKSGKSMMWTKTAFGYYHNRKTGILEIVPLQATIVEQIFTDYLSGISLTKLRDKLNESGHIGKDIPWSYRTLRQTLDNPVYCGYIKFKDSLFEGMHKPIIPYETYLKVQKELEERQQQTYERNNNPRPFQAKYMLSGMARCGYCGAPLKIVLGHKRKDGSHTMRYHCANRFPRKTKGVTVYNDNKKCDSGSYDLSDLENTVIDNLIGFQENNDSLLKIINGNNQPILDTSSFKKQISQIDKKIQKNSDLYLNDFITMDELRDRTDSLQAEKKLLKAKISENKFNDSTDVFELVKAQLGSIPINELSYDNKKKIVNNLVSKVDVTADNVDIIFKFQLA

SEQ ID NO: 7209 - protein, 452 aa, synthetic construct
MKAAIYIRVSTREQVENYSIQAQTEKLTALCRSKDWDVYDIFIDGGYSGSNMNRPALNEMLSKLHEIDAVVVYRLDRLSRSQRDTITLIEEYFLKNNVEFVSLSETLDTSSPFGRAMIGILSVFAQLERETIRDRMVMGKIKRIEAGLPLTTAKGRTFGYDVIDTKLYINEEEAKQLQLIYDIFEEEQSITFLQKRLKKLGFKVRTYNCYNNWLTNDLYCGYVSYKDKVHVKGIHEPIISEEQFYRVQEIFTRMGKNPNMNRDSASLLNNLVVCSKCGLGFVHRRKDATSRDKKYHYRYYSCKTYKHIHELEKCGNKIWRADKLEELIINRVNNCSLASRNVDKEDELGSLNEKLKIEHAKKKRLFDLYINGSYEMSELDSMMSDINAQINYYESRIEANKGLRKNKKIQENPADLATVDFDSLEFREKQLYLKSLINKIYIDGEQVTIEWL

SEQ ID NO: 7210 - protein, 485 aa, synthetic construct
MTKKVAIYTRVSTTNQAEEGFSIDEQIDRLTKYAEAMGWQVSDTYTDAGLSGAKLERPAMQRLINDIENKAFDTVLVYKLDRLSRSVRDTLYLVKDVFTKNKVDFISLNESIDTSSAMGSLFLTILSAINEFERENIKERMTMGKLGRAKSGKSMMWTKTAFGYYHNRKTGILEIVPLQATIVEQIFTDYLSGISLTKLRDKLNESGHIGKDVPWSYRTLRQTLDNPVYCGYIKFKDSLFEGMHKPIIPYETYLRVQKELEERQQQTYERNNNPRPFQAKYLLSGMARCGYCGAPLRIVLGHKRKDGSRTMKYHCANRFPRKTKGVTVYNDNKKCDSGTYDLSNLENTVIDNLIGFQENNDSLLKIINGNNQPIMDTSSFKEQISQIDKKIQKNSDLYLNDFITMDELKDRTDSLQAEKKLLEAKISENKFNDSTDVFELVKTQLGSIPINELSYDNKKKIVNNLVSKVDVTADNVDIIFKFQLA

SEQ ID NO: 7211 - protein, 485 aa, synthetic construct
MTKKVAIYTRVSTTNQAEEGFSIDEQIDRLTKYAEAMGWQVSDTYTDAGFSGAKLERPAMQRLINDIEGKAFDTVLVYKLDRLSRSVRDTLYLVKDVFTKNKIDFISLNESIDTSSAMGSLFLTILSAINEFERENIKERMTMGKLGRAKSGKSMMWTKTAFGYYHNRKTGILEIVPLQATIVEQIFTDYLSGMSLTKLRDKLNESGHIGKDIPWSYRTLRQTLDNPVYCGYIKFKDSLFEGMHKPIIPYETYLKVQKELGERQQQTYERNNNPRPFQAKYMLSGMARCGYCGAPLRIVLGHKRKDGSRTMKYHCANRFPRKTKGITVYNDNKKCDSGTYDLSNLENTVIDSLMGFQENNDSLLKIINGNNQPILDTSSFKKQISQIDKKIQKNSDLYLNDFITMDELKDRTDSLQAEKRLLEAKISENKFNDSTDVFELVKTQLGSIPISELSYDNKKKIVNNLVSKVDVTADNVDIIFKFQLA

SEQ ID NO: 7212 - protein, 452 aa, synthetic construct
MKAAIYIRVSTREQVENYSIQAQTEKLTALCRSKDWDVYDIFVDGGYSGSNMNRPALNEMLSKLHEIDAVVVYRLDRLSRSQRDTITLIEEYFLKNNVEFVSLSETLDTSSPFGRAMIGILSVFAQLERETIRDRMVMGKIKRIEAGLPLTTAKGRTFGYDVIDTKLYINEEEAKQLRLIYDIFEEEQSITFLQKRLKKLGFKVRTYNRYNSWLTNDLYCGYVSYKDKVHVKGIHEPIISEEQFHRVQEIFTRMGKSPNMNRDSASLLNNLVVCSKCGLGFVHRRKDTMSRGKKYHYRYYSCKTYKHIHELEKCGNKIWRADKLEELIINRVNNYSFASRNADKEDELDSLNEKLRIEHAKKKRLFDLYINGSYEVSELDSMMNDVDAQINYYESQIEANEELKKSKKVQENLANLATVDYDSLEFREKQLYLKSLINKIYIDGEQVTIEWL

SEQ ID NO: 7213 - protein, 452 aa, synthetic construct
MKAAIYIRVSTREQVENYSIQAQTEKLTALCRSKDWDVYDIFIDGGYSGSNMNRPALNEMLSKLHEIDAVVVYRLDRLSRSQRDTITLIEEYFLKNNVEFVSLSETLDTSSPFGRAMIGILSVFAQLERETIRDRMVMGKIKRIEAGLPLTTAKGRTFGYDVIDTKLYVNEEEARQLQLIYDIFEEEQSITFLQKRLKELGFKVRTYNRYNNWLTNDLYCGYVSYKDKVHVKGIHEPIISEEQFYRVQEIFTRMGKSPNMNRGSASLLNNLVVCSKCGLGFVHRRKDIMSRGKKYHYRYYSCKTYKHIHELEKCGNKIWRADKLEELIINRVNNYSLASRNVDKEDELDSLNEKLKIEHAKKKRLFELYINGSYDMSELDSMMNDIDAQINYYESQIEANEELKKNKKIQENLAHLATVDFDSLEFREKQLYLKSLINKIYIDGEQVTIEWL

SEQ ID NO: 7214 - protein, 452 aa, synthetic construct
MKAAIYIRVSTREQVENYSIQAQTEKLTALCRSKDWDVYDIFIDGGYSGSNMNRPALNEMLSKLHEIDAVVVYRLDRLSRSQRDTITLIEEYFLKNNVEFVSLSETLDTSSPFGRAMIGILSVFAQLERETIRDRMVMGKIKRVEAGLPLTTAKGRTFGYDVIDTKLYINEEEAKQLQLIYDIFEEEQSITFLQKRLKKLGFKVRTYSRYNNWLTNDLYCGYVSYKDKVHVKGIHEPIISEEQFYRVQEIFTRMGKNPNMNRDSASLLSNLVVCSKCGLGFVHRRKDTTSRGKRYHYRYYSCKTYKHIHELEKCGNKIWRADKLEELIINRVNSYSFASRNVDKEDELDSLNEKLKIEHAKKRRLFELYINGSYEVSELDSMMNNIDAQINYYESQIEANEELRKNKKIQENLADLVTVDFDSLEFREKQLYLKSLISKIYIDGEQVTIEWL

SEQ ID NO: 7215 - protein, 452 aa, synthetic construct
MKAAIYIRVSTREQVENYSIQAQTEKLTALCRSKDWDVYDIFIDGGYSGSNMNRPALNEMLSKLHEIDAVVVYRLDRLSRSQRDTITLIEEYFLKNSVEFVSLSETLDTSSPFGRAMIGILSVFAQLERETIRDRMVMGKIKRIEAGLPLTTAKGRTFGYDVIDTKLYINEEEAKQLQLIYDIFEEEQSITSLQKRLKELGSKVRTYNRYSNWLTNDLYCGYVSYKDKVHVKGIHEPIISEEQFYRVQEIFARMGKNPNMNRDSASLLSNLVVCSKCGLGFVHRRKDTTSRGKKYHYRYYSCKTYKHTHELEKCGNKIWRADKLEELIINRVNNYSFANRNADKEDELDSLNGKLKIEHAKKKRLFDLYINGSYNVSELDSMMSDIDAQINYYESQIEANEELKKNKKIQENLADLATVDFDSLEFREKQLYLKSLINKIYIDGEQVTIEWL

SEQ ID NO: 7216 - protein, 452 aa, synthetic construct
MKAAIYIRVSTREQVENYSIQAQTEKLTALCRSKDWDVYDIFIDGGYSGSNMNRPALNEMLSKLHEIDAVVVYRLDRLSRSQRDTITLIEEYFLKNNVEFVSLSETLDTSSPFGRAMIGILSVFAQLERETIRDRMVMGKIKRIEAGLPLTTAKGRTFGYDVIDTKLYINEEEAKQLRLIYDIFEEEQSITFLQKRLKKLGFKVRTYNRYNNWLTNDLYCGYVSYKDKVHVKGIHEPIISEEQFYRVQEIFTRMGKNPNMNRDSASLLNNLVVCSKCGLGFVHRRKDAKSRDKRYHYRYYSCKTYKHIHELEKCGNKIWRADKLEELIINRVNDYSFASRNVDKEGELNSLNEKLKIEHAKKKRLFDLYINGSYGVSELDSMMSDIDAQINYYESRIEANEELRKNKKIQENLADLATVDFDSLEFREKQLYLKSLINKIYVDGEQVTIEWL

SEQ ID NO: 7217 - protein, 452 aa, synthetic construct
MKAAIYIRVSTREQVENYSIQAQTEKLTALCRSKGWDVYDIFIDGGYSGSNMNRPALNEMLSKLHEIDAVVVYRLDRLSRSQRDTITLIEEYFLKNNVEFVSLSETLDTSSPFGRAMIGILSVFAQLERETIRDRMVMGKIKRIEAGLPLTTAKGRTFGYDVIDTKLYINEEEAKQLQLIYDIFEEEQSITFLQKRLKKLGFKVRTYNRYNNWLTNDLYCGYVSYKDKVHVKGIHEPIISEEQFYRVQEIFTRMGKNPNMNRDSASLLNNLVVCSKCGLGFVHRRKDTTSRGKKYHYRYYSCKTYKHTHELEKCGNKIWRADKLEELIINRVNNYGLARRNVDKEDELGSLNEKLKIEHAKKKRLFDLYINGSYEVSELDSMMNDIDAQINYYESRIEANEELKKDKKIQESLANLATVDYDSLEFREKQLYLKSLINKIYIDGEQVTIEWL

SEQ ID NO: 7218 - protein, 469 aa, synthetic construct
MSYTTPVRAAVYLRISEDRSGEQLGVARQREDCLKLCDQRKWVPVEYLDNDVSASTGKRRPAYEQMLADITAGKIAAVVAWDLDRLHRRPIELEAFMSLADEKRLALATVAGDVDLATPQGRLVARLKGSVAAHETEHKKARQRRAARQKAERGHPNWSKAFGYLPGPNGPEPDPQTAPLVKQAYADILAGASLGDVCRQWNDAGAFTITGRPWITTTLSKFLRKPRNAGLRAYKGARYGPVDRDAIVGKAQWSPLVDEATFWAAQAVLDAPGRAPGRKSVRRHLLTGLAGCGKCGNHLAGSYRTDGRVVYVCKACHGVAILADNIEPILYHIVAERLAMPDAVDLLRRETHDAAEAETIRLELETLYGELDRLAVERAEGLLTARQVKISTDIVNAKITKLQARQLDQERLRVFDGIPLGTPQVAGVIAELSPSRFRAVLDVLAEVVVQPVGKSGRIFNPERVQVDWR

SEQ ID NO: 7219 - protein, 469 aa, synthetic construct
MSYTTPVRAAVYLRISEDRSGEQLGVARQREDCLKLCGQRRWVPVEYLDNDVSASTGKRRPAYEQMLADITAGKIAAVVTWDLDRLHRRPIELEAFMSLADEKRLALATVAGDVDLATPQGRLVARLKGCVAAHETEHKKARQRRAARQKAERGLPNWSKAFGYLPGPNGPEPDPRTAPLVKQAYADILAGASLGDVCRQWNDAGAFTITGRPWTTTTLSKFLRKPRNAGLRAYKGARYGPVDRDAIVGKAQWSPLVDEATFWAAQAVLDAPGRAPGRKSVRRHLLTGLAGCGKCGNHLAGSYRTDGRVVYVCKACHGVAILADNIEPILYHIVAERLAMPDAVDLLRREIHDAAEAETVRLELETLYSELDRLAVERAEGLLTARQVKISTDIVNAKITKLQARQLDQERLRVFAGIPLGTPQVAGMIAELSPDRFRAVLDVLAEVVVQPVGKGGGIFNPERVQVNWR

SEQ ID NO: 7220 - protein, 452 aa, synthetic construct
MKAAIYIRVSTREQVENYSIQAQTEKLTALCRSKDWDVYDIFIDGGYSGSNMNRPALNEMLSKLHEIDAVVVYRLDRLSRSQRDTITLIEEYFLKNNVEFVSLSETLDTSSPFGRAMIGILSVFAQLERETIRDRMVMGKIKRIEAGLPLTTAKGRTFGYDVIDTKLYINEEEAKQLQLIYDIFEEEQSITFLQKRLKELGFKVRTYNCYNNWLTNDLYCGYVSYKDKVHVKGIHEPIISEEQFYRVQEIFTRMGKHPNMNRDSASLLNNLVVCSKCGLGFVHRRKDTVSRGKKYHYRYYSCKTYKHIHELEKCGNKIWRADKLEELIINRVNNYSLASRNVDKEDEPDSLSEKLKIEHAKKRRLFDLYLSGSYEVSELDSMMNDIDAQINYYESQIEANEELKKNKKIQENLANLATVDYDSLEFREKQLYLKSLINKIYIDGEQVTIEWL

SEQ ID NO: 7221 - protein, 485 aa, synthetic construct
MTKKVAIYTRVSTTNQAEEGFSIDEQIDRLTKYAEAMGWQVSDTYTDAGFSGAKLERPAMQRLINDIENKAFDTVLVYKLDRLSRSVRDTLYLVKGVFTKNKIDFISLSESIDTSSAMGSLFLTILSAINEFERENIKERMTMGKLGRAKSGKSMMWTKTAFGYYHNRKTGILEIVPLQATIVEQIFTDYLSGISLTKLRDKLNEGGHIGKDIPWSYRTLRQTLDNPVYCGYIKFKDSLFEGMHKPIISYETYLKVQKELEERQQQTYERNNNPRPFQAKYMLSGMARCGYCGAPLKIVLGHKRKDGSRTMKYHCANRFPRKTKGVTVYNDNKKCDSGTYDLSNLENTVIDNLIGFQENNDRLLKIINGNNQPILDTSRFKEQISQIDKKIQKNSDLYLNDFITMDELKDRTDSLQAEKELLKAKISENKSNDSTDVFELVKTQLGSIPINELSYDNKKRIVNNLVNKVDVTADNVDIIFKFQLA

SEQ ID NO: 7222 - protein, 452 aa, synthetic construct
MKAAIYIRVSTREQVENYSIQAQTEKLTALCRSKGWDVYDIFIDGGYSGSNMNRPALNEMLSKLHEIDAVVVYRLDRLSRSQRDTITLIEEYFLKNNVEFVSLSETLDTSSPFGRAMIGILSVFAQLERETIRDRMVMGKIKRIEAGLPLTTAKGRTFGYDVIDTKLYVNEEEAKQLRLIYDIFEEEQSITSLQKRLKQLGFKVRTYNRYNNWLTNDLYCGYVSYKDKVHVKGIHEPIISEEQFYRVQEIFTRMGKNPNMNRDSASLLNNLVVCSKCGLGFVHRRKDAMSRDKKYHYRYYSCKTYKHIHELEKCGNKIWRADKLEELIIDRVNNYSIASRNADKEDELDGLNEKLKIEHAKKKRLFELYINGSYEVSELDSMMNDIDAQINYYESQIEASEELKRNKKIQENLANLATVDFDSLEFREKQLYLKSLINKIYIDGEQVTIEWL

SEQ ID NO: 7223 - protein, 485 aa, synthetic construct
MTKKVAIYTRVSTTNQAEEGFSIDEQIDRLTKYAEAMGWQVSDTYTDAGLSGAKLERPAMQRLINDIENKAFDTVLVYKLDRLSRSVRDTLYLVKDVFTKNKIDFISLNESIDTSSAMGSLFLTILSAINEFERENIKERMTMGKLGRAKSGKSMMWAKTAFGYYHNRKTGILEIVPLQATIVEQIFTDYLSGISLTKLRDKLNEGGHIGKDIPWSYRTLRQTLDNPVYCGYIKFKDSLFEGMHKPIIPYETYLKVQKELEERQQQTYERNNNPRPFQAKYMLSGMARCGYCGAPLRIVLGRKRKDGSRTMKYHCANRYPRKTKGVTVYNDNKKCDSGTYDLSNLENTVIDNLIGFQENNDSLLKIINSNNQPILDTSSLEKQISQIDKKIQKNSDLYLNDFITMDELKGRTDSLQAEKKLLKAKISENKFNDSTDVFERVKTQLGSIPINELSYDNKKKIVNNLVSKVDVTADSVDIIFKFQLA

SEQ ID NO: 7224 - protein, 452 aa, synthetic construct
MKAAIYIRVSTREQVENYSIQAQTEKLTALCRSKGWDVYDIFIDGGYSGSNMNRPALNEMLSKLHEIDAVVVYRLDRLSRSQRDTITLIEEYFLKNNVEFVSLSETLDTSSPFGRAMIGILSVFAQLERETIRDRMVMGKIKRIEAGLPLTTAKGRTFGYDVIDTKLYINEEEAKQLQLIYDIFEEEQSITSLQKRLKKLGFKVHTYNRYNNWLTNDLYCGYVSYKDKVHVKGIHEPIISEEQFYRVQEIFTRMGKNPNMNRDSASLLNNLVVCSKCGLSFVHRRKDAMSRDKKYHYRYYSCKTYKHIHELEKCGNKIWRADKLEELIINRVNNYSVASRNVDKEDELDSLNEKLKVEHAKKKRLFDLYINGSYEVSELDSMMNDIDAQISYYESQIEANEELRKNKKIQENLAHLATVDFDSLEFREKQLYLKSLINKIYIDGEQVTIEWL

SEQ ID NO: 7225 - protein, 452 aa, synthetic construct
MKAAIYIRVSTREQVENYSIQAQTEKLTALCRSKDWDVYDIFIDGGYSGSNMNRPALNEMLSKLHEIDAVVVYRLDRLSRSQRDTITLIEEYFLKNNVEFVSLSETLDTSSPFGRAMIGILSVFAQLERETIRDRMVMGKIKRIEAGLPLTTAKGRTFGYDVIDSKLYINEEEAKQLQLIYDIFEEEQSITFLQKRLKKLGFKVRSYNRYNNWLTNDLYCGYVSYKDKVHVKGIHEPIISEEQFYRVQEIFTRMGKNPNMNRDSASLLNNLVVCSKCGLGFVHRRKDAMCRDKKYHYRYYSCKTYKHIHELEKCGNKIWRADKLEELVINRVNNYSLASRNVDKEDELVSLNEKLKTEHAKKKRLFDLYINGSYEVSDLDSMMSDIDAQINYYESQIEANEELKKNKKIQENLAYLATVDFDSLEFREKQLYLKSLINKIYIDGEQVTIEWL

SEQ ID NO: 7226 - protein, 469 aa, synthetic construct
MSYTTPVRAAVYLRISEDRSGEQLGVARQREDCLKLCDQRKWVPVEYLDNDVSASTGKRRPAYEQMLADITAGKIAAVVAWDLDRLHRRPVELEAFMSLADEKRLALATVAGDVDLATPQGRLVARLKGCVAAHETEHKKARQRRAARQKAERGQPNWSKAFGYLPGPNGPEPDPRTAPLVKQAYADILAGASLGDVCSQWNDAGAFTITGRPWATTALSKFLRKPRNAGLRAYKGARYGPVDRDAIVGRAQWSPLVDEATFWAAQAVLDAPGRAPGRKSVRRHLLTGLAGCGKCGNHLAGSYRTDGQIVYVCKACHGVSILAVNIEPILYHIVAERLAMPDAVNLLRREFHDAAEAETIRLELETLYGELDRLAVERAEGLLTARQVKISTDIVSAKITKLQARQLDQERLRVLDGIPLGTPQVAGMIAELSPDRFRAVLDVLAEVVVQPVGKSGRIFNPERVQVNWR

SEQ ID NO: 7227 - protein, 452 aa, synthetic construct
MKAAIYIRVSTREQVENYSIQAQTEKLTALCRSKDWDVYDIFIDGGYSGSNMNRPALNEMLGKLHEIDAVVVYRLDRLSRSQRDTITLIEEYFLKNNVEFVSLSETLDTSSPFGRAMIGILSVFAQLERETIRDRMVMGKIKRIEAGLPLTTAKGRTFGYDVVDAKLYINEEEAKQLQLIYDIFEEEQSITFLQRRLKKLGFKVRTYSRYNSWLTNDLYCGYVSYKDKVHVKGIHEPIISEEQFYRVQEIFTRMGKNPNMNRDSASLLNNLVVCSKCGLGFVHRRKDTTSRGKKYHYRYYSCKTYKHTHELEKCGNKIWRADKLEELIINRVNDYSFASRNVDKEDELDSLNEKLKIEHAKKKRLFDLYINGSYDASELDSMMNDIDAQINYYESQIEANGELKRNKKIQENLADLATVDFDSLGFRDKQLYLKSLINKIYIDGEQVTIEWL

SEQ ID NO: 7228 - protein, 485 aa, synthetic construct
MTKKVAIYTRVSTTNQAEEGFSIDEQTDRLTKYAEAMGWQVSDTYTDAGFSGAKLERPAMQRLVNDIENKAFDTVLVYKLDRLSRSVRDTLYLVKDVFTKNKIDFISLSESIDTSSAMGGLFLTMLSAINEFERENIKERMTMGKLGRAKSGKSMMWTKTAFGYYHNRKTGILETVPLQATIVEQIFTDYLSGISLTKLRDKLNESGHIGKDIPWSYRTLRQTLDNPVYCGYIKFKDSLFEGMHKPIIPYETYLKVQKELEERQQQTYERNNNPRPFQAKYMLSGMARCGYCGAPLKIVLGHKRKDGSRTMRYHCTNRFPRKTKGATVYNDNKKCDSGTYELSNLENTVIDTLIGFQENNDSLLKIINGNNQPILDTSSFKEQISQIDKKIRKNSDLYLNDFITMDELKDRTDSLQAEKKLLKAKISENRFNDSTDVAELVKTQLGCIPINELSYDNKKKIVNNLVSKVDVTADNVDIIFKFQLA

SEQ ID NO: 7229 - protein, 485 aa, synthetic construct
MTKKVAIYTRVSTTNQAEEGFSIDEQIDRLTKYAEAMGWQVSDTYTDAGFSGAKLERPAVQRLINDIENKAFDTVLVYKLDRLSRSVRDTLYLVNDVFTKNKIDFISLNESIDTSSAMGSLFLTILSAINEFERENIKERMTMGKLGRAKSGKGMMWTKTAFGYYHNRKTGILEIVPLQATIVEQIFTDYLSGISLTKLRDKLNESGHVGKDIPWSYRTLRQTLDNPVYCGYIKFKDSLFEGMHKPIIPYETYLKVQKELEERQQQTYERNNNPRPFQAKYMLSGMARCGYCGAPLRIVLGHKRRDGSRTMKYHCANRFPRKTKGVTVYNDNKKCDSGTYDLRNLENTVIGNLIGFQENNDSLLTIINGNNQPILDTSSFKEQISLIDKKIQKNSDLYLNDFITMDELKDRTDSLQAEKKLLKAKISENECNDSTNVFELVKTQLGSIPINELSYNDKKKIVNNLVSKVDVTADNVNIIFKFQLA

SEQ ID NO: 7230 - protein, 452 aa, synthetic construct
MKAAIYIRVSTQEQVENYSIQAQTEKLTALCRSKDWDVYDIFIDGGYSGSNMNRPALNEMLSKLHEIDAVVVYRLDRLSRSQRDTTTLIEEYFLKNNVEFVSLSETLDTSSPFGRAMIGILSVFAQLERETIRDRMVMGKIKRIEAGLPLTTAKGRTFGYDVIDTKLYINEEEAKQLQLIYDIFEEEQSITFLQKRLKKLGFKVRSYNRYNNWLTNDLYCGYVSYKDKVHVKGIHEPIISEEQFYRVQEIFTRMGKSPNTNRDSASLLNNLLVCSKCGLGFVHRSKDTMSRGKKYHYRYYSCKTYKHAHELEKCGNKTWRADKLEELIISRVNNYSFASRNVDKEDELDSLNEKLKIEHAKKKRLFDLYINGSYEVSELDSMMNDIDARINYYESQIEANEELRKNKKIQENLADLATVDFDSLEFREKRLYLKSLINKIYIDGEQVTIEWL

SEQ ID NO: 7231 - protein, 452 aa, synthetic construct
MKAAIYIRVSTREQVENYSIQAQTEKLTALCRSKDWDVYDIFIDGGYSGSNMNRPALNEMLSKLHEIDAVVVYRLDRLSRSQRDTITLIEEYFLKNNVEFVSLSETLDTSSPFGRAMIGILSVFAQLERETIRDRMVMGKIKRVEAGLPLTTAKGRTFGYDVIDTKLYINEEEAKQLQLIYDIFEEEQSITFLQKRLKKLGLKVRSYSRYNNWLTNDLYCGYVSYKDKVHVKGIHEPIISEEQFYRVQEIFARMGKNPNMNRDSASLLSNLVVCSKCGLGFVHRRKDTTSRGKKYHYRYYSCKTYKHTHELEKCGNKIWRADILEELIINRVNNYSFASRNVDKEDELDSLNEKLKIEHAKKRRLFDLYINDSYEVSELDSMMRDIDAQIGYYESQIEANEELKRDKKIQENLANLATVDYDSLEFREKQLYLKSLINKIYIDGEQVTIEWL

SEQ ID NO: 7232 - protein, 469 aa, synthetic construct
MSYTTPVRAAVYLRVSEDRSGEQLGVARQREDCLKLCDQRKWVPVEYLDNDVSASTGKRRPAYEQMLADITAGKIAAVVAWDLDRLHRRPVELEAFMSLADEKRLALATVAGDVDLATAQGRLVARLKGCVAAHETEHKKARQRRAARQKAERGHPNWSKAFGYLPGPNGPEPDPRTAPLVKQAYADILAGASLGDVCRQWNDAGAFTITGRPWTTTTLSKFLRKPRNAGLRAYKGARYGPVDRDAIVGKAQWSPLVDEATFWAAQAVLDAPGRAPGRKSVRRHLLTGLAGCGKCGNHLAGSYRTDGQVAYVCKACHGVSILAVNIEPILYHVVAERLAMPDAVDLLRREIHDAAEAETIRLELETLYGELDRLAVERAEGLLTARQVKISTDIVNAKITKLQARQLDQERLRVFNGIPLGTPQVAGVIAELSPDRFRAVLDVLAEVVVQPVGKGGRIFNPERVQVNWR

SEQ ID NO: 7233 - protein, 452 aa, synthetic construct
MKAAIYIRVSTQEQVENYSIQAQTEKLTALCRSKDWDVYDIFVDGGYSGSNMNRPALNEMLSKLHEIDAVVVYRLDRLSRSQRDTTTLIEEYFLKNNVEFVSLSETLDTSSPFGRAMIGILSVFAQLERETIRDRMVMGKIKRIEAGLPLTTAKGRTFGYDVIDTKLYINEEEAKQLQLIYDIFEEEQSITSLQKRLKKLGFKVRTYNRYNNWLTNDLYCGYVSYKDKVHVKGIHEPIISEEQFYRVQEIFTRMGKNPNMNRDSASLLSNLVVCSKCGLGFVHRSKDTMSRGKKYHYRYYSCKTYKHTHELEKCGNKTWRADKLEELIINRVINYSFASRNVDKEDELDSLNEKLKIEHAKRKRLFDLYISGSYEVSELDSMMNDIDAQINYYESQIEANEELKKNKKIQENLADLATVDFDSLEFREKQLYLKSLINKIYIDGEQVTIEWL

SEQ ID NO: 7234 - protein, 452 aa, synthetic construct
MKAAIYIRVSTREQVENYSIQAQTERLTALCRSKDWDVYDIFIDGGYSGSNMNRPALNEMLSKLHEIDAVVVYRLDRLSRSQRDTITLIEEYFLKNNVEFVSLSETLDTSSPFGRAMIGILSVFAQLERETIRDRMVMGKIKRIEAGLPLTTAKGRTFGYDVIDTKLYINEEEAKQLQLIYDIFEEEQSITFLQKRLKKLGFKVRTYSRYSNWLTNDLYCGYVSYKDKVHVRGIHEPIISEEQFYRVQEILTRMGKNPNMNRDSASLLNNLVVCSKCGLGFVHRRKDTTSRGKKYHYRYYSCKTYKHIHELEKCGNKIWRADKLEELIISRVNNYSFASRNVDKEDELDSLSEKPKVEHAKKKRLFELYINGSYEVGELDSMMNDIDAQINDYENQIEANEELKKNKKIQENLANLATVDFDSLEFREKQLYLKSLINKIYIDGEQVTIEWL

SEQ ID NO: 7235 - protein, 452 aa, synthetic construct
MKAAIYIRVSTREQVENYSIQAQTEKLTALCRSKDWDVYDIFIDGGYSGSNMNRPALNEMLSKLHEIDAVVVYRLDRLSRSQRDTITLIEEYFLKNNVEFVSLSETLDTSSPFGRAMIGILSVFAQLERETIRDRMVMGKIKRVEAGLPLTTAKGRTFGYDVIDTRLYINEEEAKQLQLIYDIFEEEQSITFLQKRLKKLGFKVRTYSRYNSWLTNDLYCGYVSYKDKVHVKGIHEPIISEEQFYRVQEIFARMGRNPNMNRDSASLLNNLVVCSKCGLGFVHRRKDTTSRGKKYHYRYYSCKTYKHTHELEKCGNKIWRADKLEELIINRVNNYSFASRNVDKEDELDSLNEKLKIEHAKKKRLFDLYINGSYEVSELDSMMNDIDAQINYYESQIEANEGLKRNKKIQENLANLATVDYDSLEFREKQLYLKSLINKIYIDGEQVTIEWL

SEQ ID NO: 7236 - protein, 452 aa, synthetic construct
MKAAIYVRVSTQEQVENYSIQAQTEKLTALCRSKDWDVYDIFIDGGYSGSNMNRPALNEMLSKLHEIDAVVVYRLDRLSRSQRDTITLVEEYFLKNNVEFVSLSETLDTSSPFGRAMIGILSVFAQLERETIRDRMVMGKIKRIEAGLPLTTAKGRTFGYDVIDSKLYINEEEAKQLQLIYDIFEEEQSITFLQKRLKKLGFKVRTYNRYNSWLTNDLYCGYVSYKDKVHVKGVHEPIISEEQFYRVQEIFTRMGKNPNMNRDSASLLNNLVVCSKCGLGFVHRRKDTMSRGKKYHYRYYSCKTYKHTYELEKCGNKIWRADKLEELIINRVNNYSFASRNVDKEDELDSLNEKLKIEQAKKKRLFDLYINGSYGVSELDSMMSDIDAQINYYESQIEANEELKKNKKIQENLANLATVDYDSLEFREKQLYLKSLINKIYIDGEQVTIEWL

SEQ ID NO: 7237 - protein, 452 aa, synthetic construct
MKAAIYIRVSTREQVENYSIQAQTEKLTALCRSKDWDVYDIFIDGGYSGSNMNRPALNEMLSKLHEIDAVVVYRLDRLSRSQRDTITLIEEYFLKNNVEFVSLSETLDTSSPFGRAMIGILSVFAQLERETIRDRMVMGKIKRIEAGLPLTTAKGRTFGYDVIDTRLYINEEEAKQLRLIYDIFEEERSITFLQKRLKKLGFKVRTYNRYISWLTNDLYCGYVSYKDKVHVRGIHEPIISEEQFYRVQEIFTRMGKNPNMNRDSASLLNNLVVCSKCGLGFVHRRKDTISRGKKYHYRYYSCKTYKHIHELEKCGNKIWRADKLEELIINRVNNYSFASRNADKEDELDSLSEKLKIEHAKRKRLFELYINGSYEVSELDSMMNDIDAQISHYESQIEASEELKKNKKIQENLANLATVDYDSLEFREKQLYLKSLINKIYIDGEQVTIEWL

SEQ ID NO: 7238 - protein, 452 aa, synthetic construct
MKAAIYIRVSTREQVENYSIQAQTEKLTALCRSKGWDVYDIFIDGGYSGSNMNRPALSEMLSKLHEIEAVVVYRLDRLSRSQRDTITLIEEYFLKNNVEFVSLSETLDTSSPFGRAMIGILSVFAQLERETIRDRMVMGKIKRIEAGLPLTTAKGRTFGYDVIDTKLYINEEEAKQLRLIYDIFEEEQSITFLQKRLKKLGFKVHTYSRYNSWLTNDLYCGYVSYKDKVHVKGIHEPIISEEQFYRVQEIFTRMGKNPNMSRDSASLLNNLVVCSKCGLGFVHRRKDTTSRGKKYHYRYYSCKTYKHTHELEKCGNKIWRADRLEELIINRVNNYSFASRNVDKKDELDSLNEKLKIEHAKKKRLFDLYINGSYEVSELDSMMNGIDAQINYYESQIEANEELRKNKEIQENLANLATVDFDSLEFREKQLYLKSLINKIYIDGEQVTIEWL

SEQ ID NO: 7239 - protein, 452 aa, synthetic construct
MKAAIYIRVSTQEQVENYSIQAQTEKLTALCRSKDWDVYDIFIDGGYSGSNMNRPALNEMLSKLHEIDAVVVYRLDRLSRSQRDTTTLIEEYFLKNNVEFVSLSETLDTSSPFGRAMIGILSVFAQLERETIRDRMVMGKIKRIEAGLPLTTAKGRTFGYDVIDTKLYVNEEEAKQLQLIYDIFEEEQSITLLQKRLKELGLKVRTYNRYNNWLTNDLYCGYVSYKDKVHVKGIHEPIISEEQFYRVQEIFTRMGKNPNMNRDSASLLNNLVVCSKCGLSFVHRSKDTMSGGKKYHYRYYSCKTYKHTHELEKCGNKTWRADKLEELIINRVNNYSFASRIVDKEDELDSLNEKLKIEHAKKRRLFDLYINGSYEVSELDSMMSDIDAQINYYESQIEANEELRKNKKIQENLADLAAVDFDSLEFREKRLYLKSLINKIYIDGEQVTIEWL

SEQ ID NO: 7240 - protein, 452 aa, synthetic construct
MKAAIYIRVSTREQVENYSIQAQTEKLTALCRSKDWDVYDIFIDGGYSGSNMNRPALNEMLSKLHEIDAVVVYRLDRLSRSQRDTITLIEEYFLKNNVEFVSLSETLDTSSPFGRAMIGILSVFAQLERETIRDRMVMGKIKRIEAGLPLTTAKGRTFGYDVIDTKLYINEEEAKQLQLIYDIFEEEQSITFLQKRLKKLGFKVRTYSCYNNWLTNDLYCGYVSYKDMVHVKGIHEPIISEEQFYRVQEIFTRMGKNPNMNRDSASLLNNLVVCSKCGLGFVHRRKDTTSRGKKYHYRYYSCKTYKHTYELEKCGNKIWRADKLEELIIDRVNNYSFASRNVDKEGELDSLNEKLKIEHAKRKRLFDLYINGSYEVSELNSMMNGIDAQINHYESQIEANEELRKNKKIQENLADLATVDFDSLEFREKQLYLKSLISKIYIDGEQVTIEWL

SEQ ID NO: 7241 - protein, 485 aa, synthetic construct
MTKKVAIYTRVSTTNQAEEGFSIDEQIDRLTKYAEAMGWQVSDTYTDAGFSGVKLERPAMQRLINDIENKAFDTVLVYKLDRLSRSVRDTLHLVKDVFTKNKIDFISMSESIDTSSAMGSLFLTILSAINEFERENIKERMTMGKLGRAKSGKSMMWTKTAFGYYHNRKTGILEIVPLQATIVEQIFTDYLSGISLTKLRDKLNESGHIGKDIPWSYRTLRQTLDNPVYCGYIKFKDSLFEGMHKPIIPYETYLRVQKELEERQQQTYARNNNPRPFQAKYMLSGMARCGYCGAPLRIVLGHKRKDGSRTMKYHCANRFPRKTKGVTVYNDNKKCDSGTYDLSNLENTVIDSLIGFQENNDSLLKIINGNNQPILDTSSFKEQISQIDKKIQKNSDLYLNDFITMDELKDRTDSLQAEKKLLKAKISENKFNDSTDVFELVKTQLGSIPINELSYDNKKKIVNNLVSKVDVTADNVDIIFKFQLA

SEQ ID NO: 7242 - protein, 452 aa, synthetic construct
MKAAIYIRVSTREQVENYSIQAQTEKLTALCRSKDWDVYDIFIDGGYSGSNMNRPALNEMLGKLHEIDAVVVYRLDRLSRSQRDTITLIEEYFLKNNVEFVSLSETLDTSSPFGRAMIGILSVFAQLERETIRERMVMGKIKRIEAGLPLTTARGRTFGYDVIDSKLYINEEEAKQLQLIYDIFEEEQSITFLQKRLKKLGFKVRTYSRYNSWLTNDLYCGYVSYKDKVHVKGIHEPIISEEQFYRVQEIFTRMGKNPNTNRDSASLLNNLVVCGKCGLGFVHRRKDTMSRGKKYHYRYYSCKTFKHIHELEKCGNKIWRADKLEELIINRVNDYSFASRNMDKEDELDSLNEKLKIEHAKKKRLFDLYINGSYEVSELDSMMNDIDAQINYYESQIEANEELKKNKKIRENLADLATVDFDSLEFREKQLYLKSLINKIYIDGEQVTIEWL

SEQ ID NO: 7243 - protein, 452 aa, synthetic construct
MKAAIYIRVSTQEQVGNYSIQAQTEKLTALCRSKDWDVYDIFIDGGYSGSNMNRPALNEMLSKLHEIDAVVVYRLDRLSRSQRDTTTLIEEYFLKNNVEFVSLSETLDTSSPFGRAMIGILSVFAQLERETIRDRMVMGKIKRIEAGLPLTTAKGRTFGYDVIDTKLYINEEEAKQLQLIYDIFEEEQSITSLQKRLKKLGFKVRTYNRYNNWLTNDLYCGYVSYKDKVHVKGIHEPIISEEQFYRVQEIFTRMGKNPNMNRDSASLLNNLVVCSKCGLGFVHRSKDTMSRGKKYHYRYYSCKTYKHTHELEKCGNKTWRADKLEELIINRVNNYGFASRNADKENELDSLNEKLKIEHAKKKRLFDLYINGSYEVSELDSMMNDIDAQINYYESQIEANEELRKNKKIRENLADLATVDLDSLEFREKQLYLKSLINKIYIDGEQVTIEWL

SEQ ID NO: 7244 - protein, 452 aa, synthetic construct
MKAAIYIRVSTREQVENYSIQAQTEKLTALCRSKDWDVYDIFIDGGYSGSNMNRPALNEMLSKLHEIDAVVVYRLDRLSRSQRDTITLIEEYFLKNNVEFVSLSETLDTSSPFGRAMIGILSVFAQLERETIRDRMVMGRIKRIEAGLPLTTAKGRTFGYDVIDTKLYINEEEAKQLQLIYDIFEEEQSITFLQKRLKKLGFKVRTYSRYNNWLTNDLYCGYVSYKDKVHVKGIHEPIISEEQFYRVQEIFTRMGKNPNMNRDSASLLNNLVVCSKCGLGFVHRRKDTMSRGKKYHYRYYSCKTYKHTHELEKCGNKIWRADKLEELIINRVNNYSLASRNVDKEDELDSLNEKLKIEHAKKKRLFDLYINGSYEVSELDSMMNDIDAQINYYESQIEANEELKKDKKIQESLANLATVDYDSLEFREKQLYLKSLINKIYIDGEQVTIEWL

SEQ ID NO: 7245 - protein, 469 aa, synthetic construct
MCYTTPVRAAVYLRISEDRSGEQLGVARQREDCLKLCDQRKWVPVEYLDNDVSASTGKRRPAYEQMLADITADKIAAVVAWDLDRLHRRPIELEAFMSLADEKRLALATVAGDVDLATPQGRLVARLKGSVAAHETEHKKARQRRAARQKAERGHPNWSKAFGYLPGPNGPEPDPRTAPLVEQAYTDILAGASLGDVCRQWNAEGAFTITGRPWTTTTLSKFLRKPRNAGLRAYKGARYGPVDRDAIVGKAQWSPLVDEATFWAAQAVLDAPGRAPGRKSVRRHLLTGLAGCGKCGNHLAGSYRTDGRVVYVCKACHGVAILADNIVPILYHIVAERLAMPDAVDLLRREIHDGGEAETIRLELETLYGELDRLAAERAEGLLTARQVKISTDIVNAKIAKLQARQLDQERLRVFGGIPLGTPQVACVVAELSPDRFRAVLDVLAEVIVQPVGKSGRVFNPERVQVNWR

SEQ ID NO: 7246 - protein, 453 aa, synthetic construct
MKAAIYIRVSTQEQVGNYSIQAQTEKLTALCRSKDWDVYDIFVDGGYSGSNMNRPALNEMLSKLHEIDAVVVYRLDRLSRSQRDTTTLIEEYFLKNNVEFVSLSETLDTSSPFGRAMIGILSVFAQLERETIRDRMVMGKIKRIEAGLPLTTAKGRTFGYDVIDTKLYINEEEAKQLQLIYDIFEEEQSITSLQKRLKKLGFKVRTYNRYNNWLTNDLYCGYVSYKDKVHVKGIHEPIISEEQFYRVQEIFTRTGKNPNMNRDSASLLNNLVVCSKCGLSFVHRSKDTMSGGKKYHYRYYSCKTYKHTHELEKCGNKTWRADKLEELIINRVNNYSLASRDVVREDELDSLSEKLKIEHAKRKRLFDLYINGSYEVSELDSMMNDIDAQINYYESQIEANEELRKNRKIQENLADLATVDFDGLEFRDKQLYLRSLINKIYIDGEQVTIEWLQ

SEQ ID NO: 7247 - protein, 452 aa, synthetic construct
MKAAIYIRVSTQEQAGNYSIQAQTEKLTALCRSKDWDVYDIFTDGGYSGSNMNRPALNEMLSKLHEIDAVVVYRLDRLSRSQRDTTTLIEEYFLKNNVEFVSLSETLDTSSPFGRAMIGILSVFAQLERETIRDRTVMGKIKRIEAGLPLTTAKGRTFGYDVIDTRLYINEEEAKQLQLIYDIFEEEQSITSLQKRLKKLGFKVRTYNRYNNWLTNDLYCGYVSYKDKVHVKGIHEPIISEEQFYRVQEIFTRMGKNPNMNRDSASLLNNLVVCSKCGLGFVHRSKDTMGRGKKYHYRYYSCKTYKHTHELEKCGNKTWRADKLEELIINRVNNYSFASRNVDKEDELDSLSEKLKLEHAKKRRLFDLYINGSYEVSELDSMMNDIDAQINHYESQIEANGELKENKKIQENLADLATVDFDSLEFREKQLYLKSLINKIYIDGEQVTIEWL

SEQ ID NO: 7248 - protein, 452 aa, synthetic construct
MKAAIYIRVSTREQVENYSIQAQTEKLTALCRSKDWDVYDIFIDGGYSGSNMNRPALNKMLSKLHEIDAVVVYRLDRLSRSQRDTITLIEEYFLKNNVEFVSLSETLDTSSPFGRAMIGILSVFAQLERETIRDRMVMGRIKRIEAGLPLTTAKGRTFGYDVIDTKLYINEEEAKQLQLIYDIFEEEQSITFLQKRLKKLGFKVRSYNRYNNWLTNDLYCGYVSYKDKVHVKGIHEPIISEEQFYRVQEIFTRMGKNPNMNRGSASLLNSLVVCSKCGLGFVHRRKDTMSRGKKYHYRYYSCKTYKHIHELEKCGNKIWRADKLEELIINRVNNYSLASRDVDKEDELDSLSEKLKVEHAKKKRLFELYINGSYEMGELDSMMNDIDAQINYYEGQIEASEELKKNKKIQENLAELATVDFDSLEFREKQLYLKSLINKIYIDGEQVTIEWL

SEQ ID NO: 7249 - protein, 485 aa, synthetic construct
MTKKVAIYTRVSTTNQAEEGFSIDEQVDRLTKYAEAMGWQVSDTYTDAGFSGAKLERPAMQRLINDIENKAFDTVLVYKLDRLSRSVRDTLYLVKDVFTKNKIDFISLNECIDTSSAMGSLFLTILSAINEFERENIKERMTMGKLGRAKSGKSMMWTKTAFGYYHNRKTGILEIVPLQATIVEQIFTDYLSGISLTKLRDKLNESGHIGKDIPWSYRTLRQTLDNPVYCGYIKFKDSLFEGMHKPIIPYETYLKVQKELEERQQQAYARNNNPRPFQAKYMLSGMARCGYCGAPLRIVLGHKRKDGSRTMKYHCANRFPRKTKGVTVYNDNKKCDSGTYDLSNLENTVIDSLIGFQESNDSLLKTINGNNQPILDTSSFKKQISQIDEKIQKNSDLYLNDFITMDELKDRTDSLQAEKKLLKAKISENKFNDSTNVFELVKAQLGSIPINELSYDSKKKIVNNLVSKVDVTADNVDIVFKFQLA

SEQ ID NO: 7250 - protein, 485 aa, synthetic construct
MTKKVAIYTRVSTTNQAEEGFSIDEQIDRLTKYAEAMGWQVCDTYTDAGSSGAKLERPAMQRLINDIENKAFDTVLVYKLDRLSRSVRDTLYLVKDVFTKNKIDFISLNESIDTSSAMGSLFLTILSAVNEFERENIKERMTMGKLGRAKSGKSMMWTKTAFGYYHNRKTGILEIVPLQATIVEQIFTDYLSGISLTKLRDKLNESGHIGKDIPWSYRTLRQTLDNPVYCGYIKFKDSLFEGMHKPIIPYETYLKVQKELEERQQQTYERNNNPRPFQAKYMLSGMARCGYCGAPLKIVLGHKRKDGSRTMKYHCANRFPRKTKGVTVYNDNKKCDSGTYDLSNLENTVIDNLIGFQENDDSLLKIINGNNQPILDTSSFKKQISQIDKKIQKNSDLYLNDFITMDELKDRTDCLQAEKKLLEAKISENKFNDSTDVFELVKTQLGGIPINELSYDNKKKIVNSLVSKVDVTADSVDIIFKFQLA

SEQ ID NO: 7251 - protein, 469 aa, synthetic construct
MSYTTPVRAAVYLRISEDRSGEQLGVARQREDCLKLCGQRKWVPVEYLDNDVSASTGKRRPAYEQMLADITAGKIAAVVAWDLDRLHRRPVELEAFMSLADEKRLALATVAGDVDLATPQGRLVARLKGCVAAHETEHKKARQRRAARQKAERGHPNWSKAFGYLPGPNGPEPDPRTAPLVKQAYADILAGASLGDVCRQWNDAGAFTITGRPWTTTALSKFLRKPRNAGLREYKGARYGPVDRDAIVGKAQWRPLVDEATFWAAQAVLDAPGRAPGRKSVRRHLLTGLAGCGKCGDHLAGSYRTDGRVVYVCKACYGIAILADNIEPILYHIVAERLAMPDAVELLCREIHDAAEAETIRLELETLCGELDRLAVERAEGLLTARQVKISTDIVNAKITKLRARQLDQERLRVLDGIPLGTPQVAGMIAELSPDRFRAVLDVLAEVVVQPVGKRGGISDPERVQVNWR

SEQ ID NO: 7252 - protein, 469 aa, synthetic construct
MCYTTPVRAAVYLRISEDRSGEQLGVARQREDCLKLCDQRKWVPVEYLDNDVSASTGKRRPAYEQMLADITAGKIAAVVAWDLDRLHRRPIELEAFMSLADEKRLALATVAGDVDLATPQGRLVARLKGCVAAHETEHKKARQRRAARQKAERGHPNWSKAFGYLPGPNGPEPDPRTAPLVKQAYADILAGASLGDVCRQWNDAGAFTITGRPWTTTALSKFLRKPRNAGLRAYKGARYGPVDRDAIVGKAQWSPLVDEATFWAAQAVLDAPGRAPGRKSVRRHLLTGLAGCGKCGNHLAGSYRADGRVVYVCKACHGVAILADNIEPILYHIVAERLAMPDAEDLFRREIHDAAEAETIRLELEALYGELDRLAVERAEGLLTARQVKVSTDVVNAKITELQARQLDQERLRVLDGIPLGTPQVAGMIAELSPDRFRAVLDVLAEVVVQPVSKSGRIFNPERVQVNWR

SEQ ID NO: 7253 - protein, 452 aa, synthetic construct
MKAAIYIRVSTREQVENYSIQAQTEKLTALCRSKDWDVYDIFIDGGYSGSNMNRPALNEMLSKLHEIDAVVVYRLDRLSRSQRDTITLIEEYFLKNNVEFVSLSETLDTSSPFGRAMIGILSVFAQLERETIRDRMVMGKIKRIEAGLPLTTAKGRTFGYDVIDAKLYINEEEAKQLQLIYDIFEEEQSITFLQKRLKKLGFRVRTYSCYNNWLTNDLYCGYVSYKDKVHVKGIHEPIISEEQFYRVQEIFTRMGKNPNMNRDSASLLNSLVVCSRCGLGFVHRRKGTMSRGKKYHYRYYSCKTYKHIHELEKCGNKIWRADKLEELIINRVSNYSFASRNVDKEDELDSLNEKLKIEHAKKRRLFDLYINGSYEVSELDSMMNDIDAQINYYESQIVANEELKKNKKIQENLAYLATVDFNTLEFREKQLYLKSLINKIYIDGEQVTIEWL

SEQ ID NO: 7254 - protein, 452 aa, synthetic construct
MKAAIYIRVSTQEQVGNYSIQAQTEKLTALCRSKDWDVYDIFVDGGYSGSNMNRPALNEMLSKLHEIDAVVVYRLDRLSRSQRDTTTLIEEYFLKNNVEFVSLSETLDTSSPFGRAMIGILSVFAQLERETIRDRMVMGKIKRIEAGLPLTTAKGRTFGYDVIDTKLYINEEEAKQLQLIYDIFEEEQSITSLQKRLKKLGFKVRTYNRYNSWLTNDLYCGYVSYKDKVHVKGIHEPIISEEQFHRVQEIFTRMGRNPNMNRDSASLLSNLVVCSKCGLGFVHRSKDTVSRGKKYHYRYYSCKTYKHTHELEKCGNKIWRADKLEELIINRVNNYSFASRNVDKEGELDSLNEKLKIERAKKKRLFDLYINGGYEVSELDSMMSDIDAQINYYESQIEANEELRKNKKIQENLADLATVDFDSLEFREKQLYLKSLINKIYIDGEQVTIEWL

SEQ ID NO: 7255 - protein, 485 aa, synthetic construct
MTKKVAIYTRVSTTNQAEEGFSIDEQIDRLTKYAEAMGWQVSDTYTDAGFSGAKLERPAMQRLINDIENKAFDTVLVYKLDRLSRSVRDTLYLVKDVFTKNKIDFISLNESIDTSSAMGSLFLTILSAINEFERENIKERMTMGKLGRAKSGKSMMWTKTAFGYYHNRKTGILEIVPLQATIVEQIFTDYLSGISLTKLRDKLNESGHIGKDIPWSYRTLRQTLDNPVYCGYIKFKDSLFEGMHKPIIPYETFLEVQKELEERQQQTYERNNNPRPFQAKYMLSGMARCGYCGAPLKIVLGHKRKDGSRTMKYHCANRFPRKTKGATVYNDNKKCDSGTYDLSDLENTVIDNLIGFQENNDSLLKIINGHNQPILDTSSFKRRISQIDKKIQKNSDLYLNDFITMDELKDRTDSLQAEKKLLKAKISENKFNDSTDVFELVKTQLGSIPINELSYDNKKKIVNNLVSKVDVTADNVDIIFKFQLA

SEQ ID NO: 7256 - protein, 485 aa, synthetic construct
MTKKVAIYTRVSTTNQAEEGFSIDEQIDRLTKYAEAMGWQVSDTYTDAGFSGAKLGRPEMQRLINDIENKAFDTVLVYKLDRLSRSVRDTLYLVKDVFTKNKIDFISLSESIDTSSAMGSLFLTILSAINEFERENIKERMTMGKLGRAKSGKSMMWTKTAFGYYHNRKTGILEIVPLQATIVEQIFTDYLSGISLTKLRDKLNESGHIGKDIPWSYRTLRQTLDNPVYCGYIKFKGSLFEGMHKPIIPYETYLKVQKELKERQQQAYERNNNPRPFQAKYMLSGMARCGYCGAPLRIVLGRRRKDGSRTMKYHCANRFPRKTKGVTVYNDNKKCDSGTYDLSNLENTVIDNLIGFQEDNDSLLKIINGNNQPTLDTSSFKKQISQIDKKIQKNSDLYLNDFITMGELKDRTDSLQAEKRLLKAKISENKFNDSTDVLELVKTQLGSTPINELSYDNKKKIVNNLVSKVDVTADSVDIIFKFQLA

SEQ ID NO: 7257 - protein, 452 aa, synthetic construct
MKAAIYIRVSTREQVENYSIQAQTEKLTALCRSKGWDVYDIFIDGGYSGSNMNRPALNEMLSKLHEIDAVVVYRLDRLSRSQRDTITLIEEYFLKNNVEFVSLSETLDTSSPFGRAMIGILSVFAQLERETIRDRMVMGKIKRIEAGLPLTTAKGRTFGYDVIDTKLYVNEEEAKQLQLIYDIFEEEQSITFLQKRLKKLGFKVRTYSCYNNWLTNDLYCGYVSYKDKVHVRGIHEPIVSEEQFYRVQEIFARMGKNPNMNRDSASLLNNLVVCSKCGLGFVHRRKDAMSRDKKYHYRYYSCKTYKHIHELEKCGNKIWRADKLEELVINRVNNYSLACRDVDKEGEPDSLNEKLKIEHAKKKRLFDLYINGSYEVSELDSMMGDIDAQISYYESQIEANEELKKNKKIQENLADLAAVDFDSLEFREKQLYLKRLINKIYIDGEQVTIEWL

SEQ ID NO: 7258 - protein, 452 aa, synthetic construct
MKAAIYIRVSTREQVENYSIQAQTEKLTALCRSKDWDVYDIFIDGGYSGSNMNRPALNGMLSKLHEIDAVVVYRLDRLSRSQRDTITLIEEYFLKNNVEFVSLSETLDTSSPFGRAMIGILSVFAQLERETIRDRMVMGKIKRIEAGLPLTTAKGRTFGYDVIDTKLYINEEEAKQLQLIYDIFEEEQSITFLQKRLKKLGFKVHTYNRYNNWLTNDLYCGYVSYKDKVHVKGIHEPIISEEQFHRVQEIFARMGKNPNMNRDSASLLNNLVVCSKCGLGFVHRRKDTVSRGKKYHYRYYSCKTYKHIHELEKCGNKIWRADKLEELIINRVNNYSFASRNVDKEDELDSLNEKLKTEHAKKKRLFDLYINGSYEVSELDSMMNDIDAQINHYESQIEANEELKKNKKIQENLADLATVDFDSLEFREKQLYLKSLINKIYIDGEQVTIEWL

SEQ ID NO: 7259 - protein, 485 aa, synthetic construct
MTRKVAIYTRVSTTNQAEEGFSIDEQTDRLTKYAKAMGWQVSDTYTDAGSSGAKLERPAMQRLINDIENKAFDTVLVYKLDRLSRSVRDTLYLVKDVFTKNKIDFISLNESIDTSSAMGSLFLTILSAINEFERENIKERMTMGKLGRAKSGKSMMWTKTAFGYYHNRKTGILEIVPLQATIVEQIFTDYLSGISLTKLRDKLNESGHIGKDIPWSYRTLRQTLDNPVYCGYIKFKGSLFEGVHKPIIPYETYLKVQKELEERQQQTYERNNNPRPFQAKYMLSGMARCGYCGAPLKIVLGHKRKDGSRTMKYHCANRFPRKTRGVTVYNDNKKCDSGTYDLSNLENTVIDKLIGFQENNDSLLKIIGGNNQPIPDTSSFKKQISQIDKKIQKNSDLYLNDFITMDELKDRTDRLQAEKKLLKAKISENKFNDSTDVFEQVKTQLGSIPINELSYDNKKKVVNNLVSKVDVTADNVDIIFKFQLA

SEQ ID NO: 7260 - protein, 452 aa, synthetic construct
MKAAIYIRVSTREQVENYSIQAQTEKLTALCRSKDWDVYDVFIDGGYSGSNMNRPALNEMLSKLHEIDAVVVYRLDRLSRSQRDTITLIEEYFLKNNVEFVSLSETLDTSSPFGRAMIGILSVFAQLERETIRDRMVMGKIKRIEAGLPLTTAKGRTFGYDVIDTKLYINEEEAKQLQLIYDIFEEEQSITFLQKRLKKLGFKVRTYNRYSNWLTNDLYCGYVSYKDKVHVKGIHEPIISEEQFYRVQEIFTRMGKNPNMNRDSASLLNNLVVCGKCGLGFVHRRKDAMSRDKKYHYRYYSCKTYKHIHELEKCGNKIWRADKLEELIIDRVNNYSLVSRNVDKEDELDSLNEKLKTEHAKKKRLFDLYINGSYEVSELDSMMNDIDAQINYYESQIEANGELKKNKKIQENLANLATVDFDSLEFREKQLYLKSLINKIYIDGEQVTIEWL

SEQ ID NO: 7261 - protein, 485 aa, synthetic construct
MTKKVAIYTRVSTTNQAEEGFSIDEQIDRLTKYAEAMGWQVSDTYTDAGLSGAKLERPAMQRLINDIENKAFDTVLVYKLDRLSRSVRDTLYLVKDVFTKNKIDFISLNESIDTSSAMGSLFLTILSAINEFERENIKERMTMGKLGRAKSGKSMMWTKTAFGYYHNRKTGILEIVPLQATIVEQIFTDYLSGISLTKLRDKLNESGHIGKDIPWSYRTLRQTLDNPVYCGYIKFKDSLFEGMHKPIIPYETYLKVQKELEERQQQTYERNNNPRPFQAKYMLSGMARCGYCGAPLRVVLGHKRKDGSRTMKYHCANRFPRKTKGVTVYNDNKKCDSGTYDLSNLENTVIDNLIGFQENNDSLLKIINGNNQPILDTSSLKKQISRIDKKIQKNSDLYLNDFITMDELKDRTDSLQAEKKLLKAKISEDKFNDSTDVFELVKTQLGSIPINELSYDNKKKIVNNLVSKVDVTADSVDIIFKFQLA

SEQ ID NO: 7262 - protein, 452 aa, synthetic construct
MKAAIYIRVSTREQVENYSIQAQTERLTALCRSKDWDVYDIFIDGGYSGSNMNRPALNEMLSKLHEIDAVVVYRLDRLSRSQRDTITLIEEYFLKNNVEFVSLSETLDTSSPFGRAMIGILSVFAQLERETIRDRTVMGKIKRVEAGLPLTTAKGRTFGYDVIDTKLYINEEEAEQLQLIYDIFEEEQSITFLQKRLKKLGFKVRTYSRYNNWLTNDLYCGYVSYKDKVHVKGIHEPIISEEQFYRVQEIFTRMGKNPNMNRDSASLLNNLVVCSKCGLGFVHRRKDTVSRGKKYHYRYYSCKTYKHIHELEKCGNKIWRADKLEELIISRVNNYSFAGRNADKEDELDSLNEKLKIEHAKKKRLFDLYINGSYEVCELDSMMNDIDAQINYYESQIEADEELKRNKKIQENLANLATVDYDSLEFREKQLYLKSLINKIYIDGEQVTIEWL

SEQ ID NO: 7263 - protein, 485 aa, synthetic construct
MTRKVAIYTRVSTTNQAEEGFSIDEQIDRLTKYAEAMGWQVSDTYTDAGLSGAKLERPAMQRLINDIENKAFDTVLVYKLDRLSRSVRDTLYLVKDVFTKNKIDFISLNESIDTSSAMGSLFLTILSAINEFERENIKERMTMGKLGRAKSGKSMMWTKTAFGYYHNRKTGILEIVPLQATIVEQIFTDYLSGISLTKLRDKLNESGHIGKDIPWSYRTLRQTLDNPVYCGYIKFKGSLFEGMHKPIIPYETYLKVQKELEDRQQQAYERNNNPRPFQAKYMLSGMARCGYCGAPLRIVLGHKRKDGSRTMKYHCANRFPRKTKGVTVYNDNKKCDSGTYDVSNLENTVIDNLIGFQENNDSLLKIINGNNQPILDTSSFKKLISQIDKKIQKNSDLYLNDFITMDELRGHTDSLQAEKKLLKAKISENKFNDSTDVFELVKTQLGSIPINELSYDDKKKIVNSLVSKVDVTADNVDIIFKFQLA

SEQ ID NO: 7264 - protein, 452 aa, synthetic construct
MKAAIYIRVSTQDQVENYSIQAQTEKLTALCRSKDWDVYDIFIDGGYSGSNMNRPALNEMLSKLHEIDAVVVYRLDRLSRSQRDTTTLIEEYFLKNNVEFVSLSETLDTSSPFGRAMIGILSVFAQLERETIRDRMVMGKIKRIEAGLPLTTAKGRTFGYDVIGTKLYINEEEARQLQLIYDIFEEEQSITSLQKRLKELGFKVRSYNRYNSWLTNDLYCGYVRYKDKVHVKGIHEPIISEEQFYRVQEIFTRMGKSPNVNRDSASLLNNLVVCSKCGRGFVHRSKDTMSRGKKYHYRYYSCKTYKHTHELEKCGNKTWRADKLEELIINRVNNYSFASRNADKEDELDSLNEKLKIEHAKKKRLFDLYINGSYEVGELDNMMNDIDAQINYYESQIEANEELKKNKKIQENLADLATVDFDSLEFREKQLYLKGLINKIYIDGEQVTIEWL

SEQ ID NO: 7265 - protein, 452 aa, synthetic construct
MKAAIYIRVSTREQVENYSIQAQTEKLTALCRSKDWDVYDIFIDGGYSGSNMNRPALNEMLSKLHEIDAVVVYRLDRLSRSQRDTITLIEEYFLKNNVEFVSLSETLDTSSPFGRAMIGILSVFAQLERETIRDRMVMGKIKRIEAGLPLTTAKGRTFGYDVIDTKLYINEEEAKQLQLIYDIFEEEQSITSLQKRLKKLGFKVRTYNRYNNWLTNDLYCGYVSYKDRVHVKGIHEPIISEEQFYRVQEIFTRMGRNPNMNRDSASLLNNLVVCGKCGLGFVHRRKDAMGRDKKYHYRYYSCKTYKHIHELEKCGNKIWRADKLEELIINRVNSYSLVSRNVDKEDELDSLNEKLEIEHAKKKRLFDLYINGSYEVSELDSMMSDIDAQINYYEGQIEANKELRKNKKIQENLADLATVDFDSLEFREKQLYLKSLINKIYIDGEQVTIEWL

SEQ ID NO: 7266 - protein, 485 aa, synthetic construct
MTKKVAIYTRVSTTNQAEEGFSIDEQIDRLTKYAEAMGWQVSDTYTDAGLSGAKLERPAMQRLINDIENKAFDTVLVYKLDRLSRSVRDTLYLVKDVFTKNKIDFISLNESIDTGSAMGSLFLTILSAINEFERENIKERMAMGKLGRAKSGKSMMWSKTAFGYYHNRKTGILEIVPLQATIVEQIFADYLSGISLTKLRDKLNESGHIGKDIPWSYRTLRQTLDNPVYCGYIKFKDSLFVGMHKPIIPYETYLKVQKELEERQQQTYERNNNPRPFQAEYMLSGMARCGYCGAPLRIVLGHKRKDGSRTMKYHCANRFPRKTKGVTVYNDNRKCDSGTYDLSSLENTVIDNLIGFQENNDSLLKIINGSSQPILDTSSLKEQISQIDKKIQKNSDLYLNDFITMDELKDRTDSLQAEKKLLEAKISENKFNDSTDVFELVKTQLGSIPINELSYDNKKKIVNNLVSKVDVTADNVDIIFKFQLA

SEQ ID NO: 7267 - protein, 485 aa, synthetic construct
MTKKVAIYTRVSTTNQAEEGFSIDEQIDRLTKYAEAMGWQVSDTYTDAGLSGAKLERPAMQRLINDIENKAFDTVLVYKLDRLSRSVRDTLYLVKDVFTKNKIDFISLSESIDTSSAMGSLFLTILSAINEFERENIKERMTMGKLGRAKSGKSMMWTKTAFGYYHNRKTGILEIVPQQATIVEQIFTDYLSGISLTKLRDKLNESGHIGKDIPWSYRTLRQTLDNPVYCGYIKFKDSLFEGMHKPIIPYETYLKVQKELEVRQQQTYERNNNPRPFQAKYMLSGMARCGYCGAPLRIVLGHKRKDGNHTLKYHCANRFPRKTKGVTVYNDNKKCDSGTYDLSNLENTVIDILIGFQENNDSLLKIINGNNQPILDTSSFKEQISQIDKRIQKNSDLYLNDFITMDELKDRTDSLQAEKKLLKAKISENKFNDRTDVFELVKTQLGSIPINELSYDNKKKIVNNLVSKVDVTADNVDIIFKFQLA

SEQ ID NO: 7268 - protein, 452 aa, synthetic construct
MKAAIYIRVSTREQVENYSIQAQTEKLTALCRSKDWDVYDIFIDGGYSGSNMNRPALNEMLSRLHEIDAVVVYRLDRLSRSQRDTITLIEEYFLKNNVEFVSLSETLDTSSPFGRAMIGILSVFAQLERETIRDRMVMGKIKRVEAGLPLTTAKGRTFGYDVIDTKLYINEEEAKQLQLIYDIFEEERSITFLQKRLKKLGFKVRTYSCYNNWLTNDLYCGYVSYKDKVHVKGIHEPIISEEQFYRVQEIFACMGKNPNMNRDSASLLNNLVVCGKCGLGFVHRRKDATSRDKKYHYRYYSCKTYKHIHELDKCGNKIWRADKLEELIINRVNNYSLVSRNVDKEDELDSLNEKLKIEHAKKKRLFDLYINGSYEMSELDSMMNDIDAQINYYESQIEANEELKKNKKIQENLAHLATVDFDSLEFREKQLYLKSLINKIYIDGEQVTIEWQ

SEQ ID NO: 7269 - protein, 452 aa, synthetic construct
MKAAIYIRVSTQEQVGNYSIQAQTEKLTALCRSKDWDVYDIFIDGGYSGSNMNRPALNEMLSKLHEIDAVVVYRLDRLSRSQRDTTTLIEEYFLKNNVEFVSLSETLDTSSPFGRAMIGVLSVFAQLERETIRDRMVMGKIKRIEAGLPLTTAKGRTFGYDVIDTKLYINEEEAKQLQLIYDIFEEEQSITFLQKRLKKLGFKVRTYNRYNSWLTNDLYCGYVSYKDKVHVKGIHEPIISEEQFYRVQEIFTRMGKNPNMNRDSASLLNNLVVCSKCGLGFVHRSKDTMCRGKKYHYRYYSCKTYKHTHELEKCGNKTWRADKLEELIINRVNNYSFASRNVDKEDELDSLNERLKIEHAKKKRLFDLYINGSYEVSDLDSMMNDIDAQINHYESQIEANEELKKNKKIQENLADLATVDFDSLEFREKQLYLKSLISKIYIDGEQVTIEWL

SEQ ID NO: 7270 - protein, 485 aa, synthetic construct
MTKKVAIYTRVSTTNQAEEGFSIDEQIDRLTKYAEAMGWQVSDTYTDAGFSGAKLERPAMQRLINDIENKAFDTVLVYKLDRLSRSVRDTLYLVKDVFTKNKIDFISLNESIDTSSAMGSLFLTILSAINEFERENIKERMTMGKLGRAKSGKSMMWTKTAFGYYHNRKTGILEIVPLQATIVEQIFTDYLSGISLTKLRDKLNESGHIGKDIPWSYRTLRQTLDNPVYCGYIKFKDSLFEGMHKPIIPFETYLKVQKELEERQQQTYERNNNPRPFQAKYMLSGMARCGYCGAPLRIVLGRKRKDGSRTMKYHCANRFPRKTKGVTVYNDNKKCDSGTYDLSNLENTVIDNLIGFQENNDSLLKIINGNNQPVLDTSSFKKQISLIGKKIQKNSDLYLNDFITMDELKDRTDSLQAEKKLLEAKISENKFNDSTDVLELVRTQLGSIPINELSYDDKKKIVNNLVSKVDVTADNVDIIFKFQLA

SEQ ID NO: 7271 - protein, 452 aa, synthetic construct
MKAAIYIRVSTREQVENYSIQAQTEKLIALCRSKDWDVYDIFIDGGYSGSNMNRPALNEMLSKLHEIDAVVVYRLDRLSRSQRDTITLIEEYFLKNDVEFVSLSETLDTSSPFGRAIIGILSVFAQLERETIRDRMVMGKIKRIEAGLPLTTAKGRTFGYDVIDTKLYINEEEAKQLQLIYDIFEEERSITSLQKRLKKLGFKVRTYSCYNNWLTNDLYCGYVSYKDKVHVKGIHEPIISEEQFYRVQEIFTRMGKNPNMNRDSTSLLNNLVVCSKCGLSFVHRRKEAMGRDKKYHYRYYSCKTYKHIHELEKCGNKIWRADKLEELVINRVNNYSLASRNVDKEDELDSLNEKLKIEHAKKKRLFDLYINGSYEVSELDSMMNDIDAQINYYESQIEANEGLKKNKKIQENLANLATVDFDSLEFREKQLYLKSLINRIYIDGEQVSIEWL

SEQ ID NO: 7272 - protein, 452 aa, synthetic construct
MKAAIYIRVSTQEQVGNYSIQAQTDKLTALCRSKGWDVYDIFIDGGYSGSNMNRPALNEMLSKLHEIDAVVVYRLDRLSRSQRDTTTLIEEYFLKNDVEFVSLSETLDTSSPFGRAMIGILSVFAQLERETIRDRMVMGKIKRIEAGLPLTTAKGRTFGYDVIDTKLYINEEEAKQLQLIYDIFEEEQSITSLQKRLKKLGFKVRTYNRYNNWLTNDLYCGYVSYKDKVHVKGIHEPIISEEQFYRVQEIFTRMGKKPNMNRDSASLLNNLVVCSKCGLGFVHRSKDTMSRGKKYHYRYYSCKTYKHTHELEKCGNKIWRADKLEELIINRVNSYSFASRNVDKEDELDSLNEKLKIEHAKRKRLFDLYINGSFEVSELDSMMNDIDAQINYYESQIEANEELKKNKKIQGNLADLATVDFDSLEFREKQLYLKSLIDKIYIDGEQVTIEWL

SEQ ID NO: 7273 - protein, 452 aa, synthetic construct
MKAAIYIRVSTREQVENYSIQAQTEKLTALCRSKDWDVYDIFIDGGYSGSNMNRPALNEMLSKLDEIDAVVVYRLDRLSRSQRDTVTLIEEYFLKNNVEFVSLSETLDTSSPFGRAMIGILSVFAQLERETIRDRMVMGKIKRIEAGLPLTTAKGRTFGYDVIGTKLYINEEEAKQLQLIYDIFEEEQSITLLQKRLKKLGFKVRTYNRYNSWLTNDLYCGYVSYKDKVHVKGIHEPIISEEQFYRVQEIFTRMGKNPNMNRESASLLSNLVVCSKCGLGFVHRRKDTMSRGKKYHYRYYSCKTYKHTHELEKCGNKIWRADKLEELVISRVNNHSFASRNADKEDELDSLNEKLKIEHTKKKRLFGLYINGSYEVSELDSMMNDIDAQISYYESQIEANEELKKNKKIQENLANLATVDYDSLEFREKQLYLKSLINKIYIDGEQVTIEWL

SEQ ID NO: 7274 - protein, 469 aa, synthetic construct
MSYTTPVRAAVYLRISEDRSGEQLGVARQREDCLKLCGQRKWVPVEYLDNDVSASTGKRRPAYEQMLADITAGKIAAVVAWDLDRLHRRPIELEAFMSLADEKRLALATVAGDIDLATPQGRLVARLKGSVAAHETEHKKARQRRAARQKAERGHPNWSKAFGYLPGPNGPEPDPRTAPLVKQAYADILAGASLGDVCRQWNDAGAFTITGRPWTTTTLSKFLRKPRNAGLRAYKGARYGPVDRDAIVGKAQWSPLVDEATFWAAQAVLDAPGRAPGRKSVRRHLLTGLAGCGKCGNHLAGSYRTDGRVVYVCKACHGVAILADNIEPILYHSVAERLAMPDAVDLLRGEIHDAAEAETIRLELETLYGELDRLAVERAEGLLTARQVKISTDVVNAKITKLQARQLDQVRLRVFDGIPLGTPQVAGMIAELSPDRFRAVLDVLAEVVVQPVGKGGRIFNPERVQVNWR

SEQ ID NO: 7275 - protein, 452 aa, synthetic construct
MKAAIYIRVSTQEQVENYSIQAQTEKLTALCRSKDWDVYDIFIDGGYSGSNMNRPALNEMLSKLHEIDAVVVYRLDRLSRSQRDTTTLIEEYFLKNNVEFVSLSETLDTSSPFGRAMIGILSVFAQLERETIRDRMVMGKIKRIEAGLPLTTAKGRTFGYDVIDTRLYINEEEAKQLQLIYDIFEEEQSITFLQKRLKKLGFKVRTYNRYNNWLTNDLYCGYVSYKDKVHVKGIHEPIISEEQFYRVQEIFTRMGKNPNMNRDSASLLSNLVVCSKCGLGFVHRSKDTMSRGKKYHYRYYSCKTYKHTHELEKCGNKTWRADKLEELIISRVNNYSFASRNMDKEDELDSLNEKLRTEHAKKKRLFDLYINGSYEVSELDSMMGDIDAQINYYEGQIEANEELKKNKKIQENLADLATVDFDSLEFREKQLYLKSLINKIYIDGEQVTIEWL

SEQ ID NO: 7276 - protein, 452 aa, synthetic construct
MKAAIYIRVSTREQVENYSIQAQTERLTALCRSKDWDVYDIFIDGGYSGSNMNRPALNEMLSKLHEIDAVVVYRLDRLSRSQRDTITLIEEYFLKNNVEFVSLSETLDTSSPFGRAMIGVLSVFAQLERETIRDRMVMGKIKRVEAGLPLTTAIGRTFGYDVIDTKLYINEEEAKQLQLIYDIFEEEQSITFLQKRLKKLGFKVRSYNRYNNWLTNDLYCGYVSYKDKVHVKGIHEPIISEEQFYRVQEIFTRMGKNPNMNRDSASLLNNLVVCSKCGLGFVHRRKDTMSRGKKYHYRYYSCKTYKHTHELEKCGNKIWRADKLEELIISRVNNYSFASRNVDKEDELDSLNEKLKIEHAKRKRLFDLYINGSYNVSELDSMMNDIDAQINYYESQIEANEELKKDKKIQENLAGLATVDFDSLEFREKQLYLKSLINKIYIDGEQVTIEWL

SEQ ID NO: 7277 - protein, 469 aa, synthetic construct
MSYTTPVRAAVYLRISEDRSGEQLGVARQREDCLKLCDQRKWVPVEYLDNDVSASTGKRRPAYEQMLADITAGKIAAVVAWDLDRLHRRPVELEAFMSLADEKRLALATVAGDVDLATPQGRLVARLKGCVAAHETEHKKARQRRAARQKAERGYPNWSKAFGYLPGPSGPEPDPRTAPLVKQAYADILAGASLGDVCRQWNDAGAFTITGRPWTTTTLSKFLRKPRNAGLRAYKGARYGPADRDAIVGKAQWSPLVDEATFWAAQAVLDAPGRAPGRKSMRRHLLTGLAGCGKCGNHLAGSYRTDGQITYVCKACHGVSILAVNIEPILYHIVAERLAMPDAVDLLRRETHGAAEAETIRLELETLYGELDRLAVERAEGLLTARQVKISTDIVNAKITKLQARQLDQERLRVFDGIPLGTPQVAGAIAELSPDRFRAVLDVLAEVVVQPVGKGGKTFNPERVQVNWR

SEQ ID NO: 7278 - protein, 452 aa, synthetic construct
MKAAIYIRVSTREQVENYSIQAQTEKLTALCRSKDWDVYDIFTDGGYSGSNMNRPALNEMLSKLHEIDAVVVYRLDRLSRSQRDTITLVEEYFLKNNVEFVSLSETLDTSSPFGRAMIGILSVFAQLERETIRDRMVMGKIKRVEAGLPLTTAKGRTFGYDVIDTKLYINEEEARQLQLIYDIFEEEQSITFLQRRLKKLGFKVRTYNRYISWLTNDLYCGYVSYKDKVHVKGIHEPIISEEQFYRVQEIFTRMGKNPNMNRDSASLLSNLVVCSKCGLGFVHRRKDTMSRGKKYHYRYYSCKTFKHTHELEKCGNKIWRADKLEELIINRVNNYSFASRDVDREDELDSLDEKLKIEHAKKKRLFDLYTNGSYEVSELDSMMSDIDAQISYYESQIEANEELKKNKKIQENLASLETVDFDSLEFREKQLYLKSLINKIYIDGEQVTIEWL

SEQ ID NO: 7279 - protein, 452 aa, synthetic construct
MKAAIYIRVSTREQVENYSIQAQTEKLTALCRSKDWDVYDIFIDGGYSGSNMNRPALNEMLSKLHEIDAVVVYRLDRLSRSQRDTITLIEEYFLKNNVEFVSLSETLDTSSPFGRAMIGILSVFAQLERETIRDRMVMGKIKRIEAGLPLTTAKGRTFGYDVIDTKLYINEEEAKQLQLIYDIFEEEQSITFLQKRLKRLGFKVHTYNRYNNWLTNDLYCGYVSYKDKVHVKGIHEPIISEEQFYRVQEIFTRMGKNPNMNRDSASLLNNLVVCSKCGLGFVHRRKDAMGRDKKYHYRYYSCKTYKHIHELEKCGNKIWRADKLEELIINRVNNYSLASRNVDKEDELDSLNEKLKIEHAKKKRLFDLYINGSYEVSELDSMMNDIDAQINYYESQIEANEELKKNKKIQENLAYLATVDFDSLEFREKQLYLKSLINKIYIDGEQVTIEWL

SEQ ID NO: 7280 - protein, 485 aa, synthetic construct
MTKKVAIYTRVSTTNQAEEGFSIDEQIDRLTKYAEAMGWQVSDAYTDAGFSGAKLERPAMQRLINDIEDKAFDTVLVYKLDRLSRSVRDTLYLVKDVFTKNKIDFISLNESIDTGSAMGSLFLTILSAINEFERENIKERMTMGKLGRAKSGKSMMWAKTAFGYYHNRKTGILEIVPLQATIVEQIFTDYLSGISLTKLRDKLNESGHIGKDIPWSYRTLRQTLDNPVYCGYIKFKDSLFEGMHKPIIPYETYLKVQKELEERQQQTYERNNNPRPFQAKYMLSGMARCGYCGAPLRIVLGHKRKDGSRTMKYHCANRFPRKTKGVTVYNDNRKCDSGTYDLSNLENTVIDNLIGFQENNDSLLKIINGSDQPILDTSSIKKQISQIDKKIQKNSDLYLNDFITMDELKDRTDSLQAEKKLLKAKISENKFNDSTDVFELVKTQLGSIPINELSYDNKKKIVNNLVSKVDVTADNVDIIFKFQLA

SEQ ID NO: 7281 - protein, 469 aa, synthetic construct
MCYTTPVRAAVYLRISEDRSGEQLGVARQREDCLKLCDQRKWVPVEYLDNDVSASTGKRRPAYEQMLADITAGKIAAVVAWDLDRLHRRPIELEAFMRLADEKRLALATVAGDVDLATPQGRLVARLKGCVAAHETEHKKARQRRAARQKAERGHPNWSKAFGYLPGPNGPVPDPRTAPLVKQAYADILAGASLGDVCRQWNAAGAFTITGRPWTTTTLSKFLRKPRNAGLRAYKGARYGPADRDAIVGKARWSPLVDEATFWAAQAVLDAPGRAPGRKSVRRHLLTGLAGCGKCGNHLAGSYRTDGRVVYVCKACHGVAILADNIEPILYHIVAERLAMPDAVDLLRREIHDAAEAETVRLELETLYGELDRLAVERAEGLLTARQVKISTDIVNAKITKLQARQLDQERLRVLDGIPLGTPQVAGMIAELSPDRFRAVLDVLAEVVVQPVGKSGRIFNPERVQVNWR

SEQ ID NO: 7282 - protein, 452 aa, synthetic construct
MKAAIYIRVSTREQVENYSIQAQTEKLTALCRSKDWDVYDIFIDGGYSGSNMNRPALNEMLSRLHEIDAVVVYRLDRLSRSQRDTITLIEEYFLKNNVEFVSLSETLDTSSPFGRAMIGILSVFAQLERETIRDRMVMGKIKRIEAGLPLTTAKGRTFGYDVIDTKLYINEEEARQLRLIYDIFEEEQSITFLQKRLKKLGFKVRTYSCYNNWLTNGLYCGYVSYKDKVHVKGIHEPIISEEQFYRVQEIFTRMGKNPNMNRDSASLLNNLVVCSRCGLGFVHRRKDTTSRGKKYHYRYYSCKTYKHIHELEKCGNKIWRADKLEELVIDRVNNHSFASHNVDKEGELDSLNEKLKIEHAKKKRLFDLYINGSYEVSELDGMMNDIDAQINYYESQIEANEELKKNKKIQENLANLATVDYDSLEFREKQLYLKSLINKIYIDGEQVTIEWL

SEQ ID NO: 7283 - protein, 452 aa, synthetic construct
MKAAIYIRVSTREQVENYSIQAQTEKLTALCRSKGWDVYDTFIDGGYSGSNMNRPALNEMLSKLHEIDAVVVYRLDRLSRSQRDTITLIEEYFLKNNVEFVSLSETLDTSSPFGRAMIGILSVFAQLERETIRDRMVMGKIKRIEAGLPLTTAKGRTFGYDVIDTKLYINEEEAKQLRLIYDIFEEEQSITSLQKRLKKLGFKVRTYSRYNHWLTNDLYCGYVSYKDKVHVKGIHEPIISEEQFYRVQEIFTRMGKNPNMNRDSASLLSNLVVCSKCGLGFVHRRKDTTSRGKKYHYRYYSCKTYKHTHELEKCGNKIWRADKLEELIINCVNNYSFASRNVDKEDELDSLNEKLKIEHAKKRRLFDLYINGSYEVSELDSMMNDIDAQINYYESQIEANEGLKKNKKIQENLAELATVDFDNLEFREKQLYLKSLINKIYIDGEQVTIEWL

SEQ ID NO: 7284 - protein, 485 aa, synthetic construct
MTKKVAIYTRVSTTNQAEEGFSIDEQTDRLSKYAEAMGWQVSDTYTDAGFSGAKLERPAMQRLINDIENKAFDTVLVYKLDRLSRSVRDTLHLVKEVFTKNKIDFISLNESIDTSSAMGSLFLTILSAINEFERENIKERMTMGKLGRAKSGKSMMWTKTAFGYYHNRKTGILEIVPLQATIVEQIFTDYLSGISLTKLRDKLNKSGHIGKDIPWSYRTLRQTLDNPVYCGYIKFKGGLFEGMHKPIIPYETYLKVQKELEERQQQTYERNNNPRPFQAKYMLSGMARCGYCGAPLKIVLGHKRKDGSRTMKYHCANRFPRKTKGITVYNGNKKCDSGTYDLSNLENTVIGNLIGFQENNDSLLKIINGNNQPILDTSSFKEQISQIDKKIQKNSDLYLNDFITMDELKARTDSLQAEKKLLKAKISENKSNDSTDVFELVKTQLGSIPINELSYDNKKKIVNNLVSKVDVTADNVDIIFKFQLV

SEQ ID NO: 7285 - protein, 469 aa, synthetic construct
MSYTTPVRAAVYLRISEDRSGEQLGVARQREDCLKLCDQRKWVPVEYLDNDVSASTGKRRPAYEQMLVDITAGKIAAVVAWDLDRLHRRPVELEAFMSLADEKRLALATVAGDVDLATPQGRLVARLKGSVAAHETEHKKARQRRAARQKAERGYPNWSKAFGYLPGPNGPEPDPRTAPLVKRAYADILAGASLGDVCRQWNDAGAYTVTGRPWTTTTLSKFLRKPRNAGLRAYKGARYGPVDRDAIVGKAQWSPLVDEATFWAAQAVLDAPGRAPGRKSVRRHLLTGLAGCGKCGNHLAGSYRTDGKVVYVCKACHGVAILADNIEPILYHIVAERLAMPDAVGLLRREIHDVAEAETIRLELETLYGELDRLAVERAEGLLTARQVKISTDIVNGKITELQARQLDQERLRVFDGIPLGTPQVAGMIAELSPDRFRAVLDVLAEVVVQPVGKSGRIFNPKRVQVNWR

SEQ ID NO: 7286 - protein, 452 aa, synthetic construct
MKAAIYIRVSTQEQVGNYSIQAQTEKLTALCRSKDWDVYDIFVDGGYSGSNMNRPALNEMLSKLHEIDAVVVYRLDRLSRSQRDTTTLIEEYFLKNNVEFVSLSETLDTSSPFGRAMIGILSVFAQLERETIRDRMVMGKIKRIEAGLPLTTAKGRTFGYDVIDTKLYINEEEAKQLQLIYDIFEEEQSITSLQKRLKKLGFKVRTYNRYNSWLTNDLYCGYVSYKDKVHVKGIHEPIISEEQFYRVQEIFTRMGKNPNMNRDSASLLNNLVVCSKCGLGFVHRSKDTMSRGKKYHYRYYSCKTYKHTHELEKCGNKTWRADKLEELIINRVNNYSFASRNVDKEDELDSLNERLKVEHAKKKRLFDLYINGSYEVSELDSMMNDIDAQINYYESQIEANGELKKNKRIQENLADLATVDFDSLGFREKQLYLKSLISKIYIDGEQVTIEWL

SEQ ID NO: 7287 - protein, 469 aa, synthetic construct
MSYTTPVRAAVYLRISEDRSGEQLGVARQREDCLKLCGQRKWVPVEYLDNDVSASTGKRRPAYEQMLADITAGKIAAVVAWDLDRLHRRPTELEAFMSLADEKHLALATVAGDVDLATPQGRLVARLKASVAAHETEHKKARQRRAARQKAERGLPNWSKAFGYLPGPNGPEPDPRTAPLVKQAYADILAGASLGDVCRQWNDAGAFTITGRPWTTTTLSKFLRKPRNAGLRAYKGARYGPVDRDAIVGKAQWSPLVDEATFWAAQAVLDAPGRAPGRKSVRRHLLTGLAGCGKCGSHLAGSYRTDGRVVYVCKACHGIAILAENIEPILYHIVAERLAMPDAVALLRRETHDAAEAETIRLELETLYGELDRLAVERAEGLLTARQVKISTDIVNAKITKLQARQLDQERLRVFVGIPLGTPQVAGVITELSPDRFRAVLDVLAEVVVQPVGKGGRIFNPERVQVNWR

SEQ ID NO: 7288 - protein, 452 aa, synthetic construct
MKAAIYIRVSTQEQVGNYSIQAQTEKLTALCRSKDWDVYDIFVDGGYSGSNMNRPALNEMLSKLHEIDAVVVYRLDRLSRSQRDTTTLIEEYFLKNNVEFVSLSETLDTSSPFGRAMIGILSVIAQLERETIRDRMVMGKIKRIEAGLPLTTAKGRTFGYDVIDTKLYINEEEAKQLRLIYDIFEEEQSITFLQKRLKKLGFKVRTYNRYNNWLTNDLYCGYVSYKDKVHVKGIHEPIISEEQFYRVQEIFTRMGKKPNMNRDSASLLNNLVVCSKCGLGFVHRSKDTMSGGKKYHYRYYSCKTYKHTHELEKCGNKTWRADKLEELIINCVNNYSFASRNVDKEDELDSLNEKLKIEHAKKKRLFDLYINGSYEVSELDSMMNDIDAQINYYESQIEANEELKENKKVQENLAELATVDFDSLEFREKQLYLKSLINKIYIDGEQVTIEWL

SEQ ID NO: 7289 - protein, 452 aa, synthetic construct
MKAAIYIRVSTREQVENYSIQAQTEKLTALCRSKGWDVYDIFIDGGYSGSNMNRPALNEMLSKLHEIDAVVVYRLDRLSRSQRDTITLIEEYFLKNSVEFVSLSETLDTSSPFGRAMIGILSVFAQLERETIRDRMVMGKIKRIEAGLPLTTAKGRTFGYDVIDSKLYINEEEAKQLQLIYDIFEEEQSITFLQKRLKRLGFKVRTYNRYSSWLTNDLYCGYVSYKDKVHVKGIHEPIISEEQFCRVQEIFTRMGKNPNMNRDSASLLNNLVVCGKCGLGFVHRRKDTVSRGKKYHYRYYSCKTYKHTHELEKCGNKIWRADKLEELIINRVNNYSFASRNVDKEDELVSLNEKLKIEHAKKKRLFDLYINGSYEVSELDSMMNDIDAQINYYESQIEASEGLKKNKKIQENLANLATVDYDSLGFREKQLYLKGLINKIYIDGEQVTIEWL

SEQ ID NO: 7290 - protein, 485 aa, synthetic construct
MTKKVAIYTRVSTTNQAEEGFSIDEQIDRLTKYAEAMGWQVSDTYTDAGFSGAKLERPAMQRLINDIENKAFDTVLVYKLDRLSRSVRDTLYLVKDVFTKSKIDFISLSESIDTSSAMGSLFLTILSAINEFERENIKERMTMGKLGRAKSGKSMMWTKTAFGYYHNRKTGILEIVPLQATIVEQIFTDYLSGISLTKLRDKLNESGHIGKDIPWSYRTLRQTLDNPVYCGYIKFKDSLFEGMHKPIIPYETYLKVQKELEERQQQTYERNNNPRPFQAKYMLSGMARCGYCGAPLKIVLGHKRKDGSRTMKYHCANRFPRKTKGITVYNDNKKCDSGTYDLSNLENTVIDNLIGFQENNNSLLKIINDNNQPTLDASGLKKQISQIDKKIQKNSDLYLNDFITMDELKDRTDSLQAERKLLKAKISENKFNDSTDVFELVKTQLGSIPINELSYDNKKKIVNNLVSKVDVTADNVDIIFKFQLA

SEQ ID NO: 7291 - protein, 452 aa, synthetic construct
MKAAIYIRVSTQEQVGNYSIQAQTEKLTALCRSKDWDVYDIFIDGGYSGSNMNRPALNEMLSKLHEIDAVVVYRLDRLSRSQRDTTTLIEEYFLKNNVEFVSLSETLDTSSPFGRAMIGILSVFAQLERETIRDRMVMGKIKRIEAGLPLTTAKGRTFGYDVIDTKLYINEEEAKQLQLVYDIFEEEQSITSLQKRLKKLGFKVRTYNRYSSWLTNDLYCGYVSYKDKVHVKGIHEPIISEEQFYRVQEIFTRMGKNPNMNRDSASLLNNLVVCSKCGLGFVHRSKDTMSRGKKYHYRYYSCKTYKHTHELEKCGNKTWRADKLEELIINRVNNYSFASRNVDKDDELDSLNEKLKIEHAKKKRLFDLYINGSYEVSELDSMMNDIDAQINYYESQIEANEELRRNKKIQENLADLATVDFDSLGFREKQLYLKSLINKIYIDGEQVTIEWL

SEQ ID NO: 7292 - protein, 485 aa, synthetic construct
MTKKVAIYTRVSTTNQAEEGFSIDEQVDRLTKYAEAMGWQVSDTYTDAGISGAKLGRPAMQRLINDIENKAFDTVLVYKLDRLSRSVRDTLYLVKDVFTKNKIDFISLNESIDTSSAMGSLFLTILSAINEFERENIKERMTMGKLGRAKSGKSMMWTKTAFGYYHNRETGILEIVPLQATIVEQIFTDYLSGISLTKLRDKLNESGHIGKDIPWSYRTLRQTLDNPVYCGYIKFKDSLFEGMHKPIIPYETYLKVQKELEERQQQTYERNNNPRPFQAKYMLSGMARCGYCGAPLKIVLGHKRKDGSRTMKYHCANRFPRKTKGVTVYNDNKKCDSGTYDLSNLENTVIDNLIGLQENNDSLLKIINGNNRPILDTSSLEKQISQIDKKIQKNSDLYLNDFITMDELKDRTDSLQAEKKLLEAKISENKFNDSTGVFELVRTQLGSIPINELSYDNKKKIVNNLVSKVDVTADNVDIIFKFQLA

SEQ ID NO: 7293 - protein, 485 aa, synthetic construct
MTKKVAIYTRVSTTNQAEEGFSIDEQIDHLTKYAEAMGWQVSGTYTDAAFSGAKLERPAMQRLINDIENKAFDTVLVYKLDRLSRSVRDTLYLVKDVFTKNKIDFISLNESIDTSSAMGSLFLTILSAINEFERENIKERMTMGKLGRAKSGKSMMWTKTAFGYYHNRKTGILEIVPLQATIVEQIFTDYLSGISLTKLRDKLNESGHIGKDIPWSYRTLRQTLDNPVYCGYIKFKGSLFEGMHKPIIPYETYLKVQKELGERQQQTYERNNYPRPFQAKYMLSGMARCGYCGAPLRVVLGHKRKDGSRTMKYHCANRFPRKTKGVTVYNDNKKCDSGTYDLSSLENTVIESLIGFQENNDSLLKIINGNNQPILDTSSFEKQISQIDKKIQKNSDLYLNDFITMDELKDRTDSLQAEKKLLKAKISENKFNDSTDVFELVRTQLGSIPVNKLSYDDKKKIVNNLVSKVDVTADNVDIIFKFQLA

SEQ ID NO: 7294 - protein, 469 aa, synthetic construct
MSYTTPVRAAVYLRISEDRSGEQLGVARQREDCLKLCDQRKWEPVEYLDNDVSASTGKRRPAYEQMLADITAGKIAAVVAWDLDRLHRRPMELEAFMSLADEKRLALATVAGDVDLATPQGRLVARLKGSVAAHETEHKKARQRRAARQKAERGYPNWSKAFGYLPGPNGPEPDPRTAPLVKQAYADILAGASLGDVCRQWNDAGAFTITGRPWTTTTLSKFLRKPRNAGLRAYKGARYGPVDRDAIVGKAQWSPLVDEATFWAAQAVLDAPGRAPGRKSVRRHLLTGLAGCGKCGNHLAGSYRTDGRVVYVCKACHGVAILADNIEPILYHIVAERLAMPDAVDLLRCEIHDAAEAETIRLELETLYGELDRLAVERAEGLLTARQVKISTDIVSAKITKLQARQLDQERLRVFDGIPLGTPQVAGVIAGLSPDRFRAVLDVLAEVVVQPVGKSGRIFNPERVQVNWR

SEQ ID NO: 7295 - protein, 452 aa, synthetic construct
MKAAIYIRVSTREQVENYSIQAQTEKLTALCRSKDWDVYDIFIDGGYSGSNMNRPALNEMLNKLHEIDAVVVYRLDRLSRSQRDTITLIEEYFLKNNVEFVSLSETLDTSSPFGRAMIGILSVFAQLERETIRDRMVMGKIKRIEAGLPLTTAKGRTFGYDVVDTKLYINEEEAKQLQLIYDIFEEEQSITFLQKRLKKLGFKVRTYNRYNNWLTNDLYCGYVSYKDKVHVKGIHEPIISEEQFYRVQEIFTRMGKNPNMNRDSASLLNNLVVCSKCGLGFVHRRKDAMSHGKKYHYRYYSCKTYKHIHELEKCGNKIWRADKLEELIINRVNSYSLASRNVDKEDELDSLNEKLKTEHAKKKRLFDLYINGIYEVSELDSMMNDIDAQINYYESQIEANEELKKNKKIQENLADLATVDFDSLEFREKQLYLKSLINKIYIDGEQVTIEWL

SEQ ID NO: 7296 - protein, 469 aa, synthetic construct
MCYTTPMRAAVYLRISEDRSGEQLGVARQREDCLKLCDQRKWVPVEYLDNDVSASTGKRRPAYEQMLADIAAGKIAAVVAWDLDRLHRRPIELEAFMSLADGERLALATVAGDVDLATPQGRLVARLKGSVAAHETEHKRARQRRAARQKAELGHPNWSKAFGYLPGPNGPEPDPRTAPLVKQAYADILAGASLGDVCRRWNDAGAFTITGRPWTSTTLSKFLRKPRNAGLRAYKGARYGPVDRDAIVGKAQWRPLVDEATFWAAQAVLDAPGRAPGRKSVRRHLLTGLAGCGKCGNHLAGSYRTDGRVAYVCKACHGVAILADNIEPTLYHTVAERLAMPDAVDLLRCEIHDAAEAETIRLELETLYGELDRLAVERAEGLLTARQVKISTDIVNAKITKLQARQLDQERLRVFEGIPLGTLQVADVIAELSPDRFRAVLDVLAEVVVQPVGKSGRVFNPERVQVNWR

SEQ ID NO: 7297 - protein, 485 aa, synthetic construct
MTKKVAIYTRVSTTNQAEEGFSIDEQIDRLTKYAEAMGWQVSDTYTDAGSSGAKLERPAMQRLINDIENKAFDTVLVYKLDRLSRSVRDTLYLVKDVFTKNKIDFISLNENIDTSSAMGSLFLTILSAINEFERENIKERMTMGKLGRAKSGKSMMWTKTAFGYYHNRKTGILEIVPLQATIVEQIFTDYLSGISLTKLRDKLNESGHIGKDIPWSYRTLRQTLDNPVYCGYIKFKDSLFEGMHKPIIPYETYLKVQKELEERQQQTYERNNNPRPFQAKYMLSGMARCGYCGAPLKIVLGHKRKDGSRTKKYHCANRFPRKTKGVTVYNDNKKCDSGTYDLSNLENTVIDCLIGFQENNDGLLKIINGNNQPILDTSSLKKQISQIDKKIQKNSDLYLNDFITMDELKARTDSLQAEKKLLRAKISENKFNDSTDVFELVKTQLGSTPINELSYDNKKKIVNNLVSKVDVTADSVDITFKFQLA

SEQ ID NO: 7298 - protein, 452 aa, synthetic construct
MKAAIYIRVSTREQVENYSIQAQTEKLTALCRSKGWDVYDIFIDGGYSGSNMNRPALNEMLSKLHEIDAVVVYRLDRLSRSQRDTITLIEEYLLRNNVEFVSLSETLDTSSPFGRAMIGILSVFAQLERETIRDRMVMGKIKRIEAGLPLTTAKGRTFGYDVIDTKLYINEEEAKQLQLIYDIFEEEQSITFLQKRLKKLGFKVRTYNCYNNWLTNDLYCGYVSYKDKVHVKGVHEPIISEEQFCRVQEIFTRMGKNPNMNRDSASLLNNLVVCSKCGLGFVHRRKDTTSRGKKYHYRYYSCKTYKHTHELEKCGNKIWRADKLEELIINRVNNYSLVSRNVDKEDELDSLNEKLKIEHAKKRRLFELYINGSYEVSELDSMMNDIDAQINYYESQIEANEGLKKNKKIQENLAGLATVDFDSLEFREKQLYLKSLINKIYIDGEQVTIEWL

SEQ ID NO: 7299 - protein, 485 aa, synthetic construct
MTKKVAIYTRVSTTNQAEEGFSIDEQIDRLTKYAGAMGWQVSDTYTDAGFSGAKLERPAMQRLINDIENKAFDTVLVYKLDRLSRSVRDTLYLVKDVFTKNRIDFISLNESIDTSSAMGSLFLTILSAINEFERENIKERMTMGKLGRAKSGKSMMWTKTAFGYYHNRKTGILEIVPLQATIVEQIFTDYLSGISLTKLRDKLNESGHIGKDIPWSYRTLRQTLDNPVYCGYIKFKDSLFEGMHKPIIPYETYLKVQKELEERQQQTYERNNNPRPFQAKYMLSGMARCGYCGAPLRIVLGHKRKDGGRTMKYQCANRFLRKTKGVTVYNDNKKCDSGTYDLSNLENTVIDNLIGFQENNDSLLKIINGNNQPILDTSSFEEQISQIDKKIQKNSDLYLNDFITMDELKDRTDSLQAEKKLLRAKISENKFNDSTGVFELVKTQLGSVPINELSYDNKKKIVNNLVSKVDVTADNVDIIFKFQLA

SEQ ID NO: 7300 - protein, 452 aa, synthetic construct
MKAAIYIRVSTREQVENYSIQAQTEKLTALCRSKDWDVYDIFVDGGYSGSNMNRPALNEMLSKLHEIDAVVVYRLDRLSRSQRDTITLIEEYFLKNNVEFVSLSETLDTSSPFGRAMIGILSVFAQLERETIRDRMVMGKIKRIEAGLPLTTAKGRTFGYDVIDTKLYINEEEARQLQLIYDIFEEEQSITFLQKRLKKLGFKVRTYNRYISWLTNDLYCGYVSYKDKVHVKGIHEPIISEEQFYRVQEIFTRMGKSPNMNRGSASLLNNLVVCSKCGLGFVHRRKDTTSRGKKYHYRYYSCKTYKHTHELEKCGNKIWRADRLEELIINRVNNYSPASRNMDKEDELDSLNEKLKIEHAKKKRLFDLYINGSYEVSELDSMMNDIDAQINYYESQIEANEELKKNKKIQENLADLATVDFDSLEFREKQLYLKGLINKIYIDGEQVTIEWL

SEQ ID NO: 7301 - protein, 452 aa, synthetic construct
MKAAIYIRVSTQEQVENYSIQAQTEKLTALCRSKDWDVYDIFIDGGYSGSNMNRPALNEMLSKLHEIDAVVVYRLDRLSRSQRDTTTLIEEYFLKNNVEFVSLSETLDTSSPFGRAMIGILSVFAQLERETIRDRMVMGKIKRVEAGLPLTTAKGRTFGYDVIDTKLYINEEEAKQLQLIYDIFEEEQSITFLQKRLKRLGFKVRTYNRYNNWLTNDLYCGYVSYKDKVHVKGIHEPIISEEQFYRVQEIFTRMGKKPNMNRDSASLLNNLVVCSKCGLGFVHRSKDTMSRGKKYHYRYYSCKTYKHTHELEKCGNKTWRADKLEELIINRVNNYSFASRSVDKEDELDSLNEKLKIEHAKKKRLFDLYVNGSYEVSELDSVMNDIDAQINYYESRIEASEELKKDKKIQENLANLATVDFDSLEFREKQLYLKSLINKIYIDGEQVTIEWL

SEQ ID NO: 7302 - protein, 485 aa, synthetic construct
MTKRVAIYTRVSTANQAEEGFSIDEQIDRLTKYAEAMGWQVSDTYTDAGCSGAKLERPAMQRLINDIENKAFDTVLVYKLDRLSRSVRDTLYLVKDVFTKNKIDFISLNESIDTSSAMGSLFLTILSAINEFERENIKERMTMGKLGRAKSGKSMMWTKTAFGYYHNRKTGILEIVPLQATIVEQIFTDYLSGISLTKLRDKLNESGHIGKDIPWSYRTLRQTLDNPVYCGYIKFKGNLFEGMHKPIIPYETYLKVQRELEERQQQTYERNNNPRPFQAKYMLSGTARCGYCGAPLRIVLGHKRKDGSRTMKYHCANRFPRKTKGVTVYNDNKKCDSDTYDLSNLENTVIDSLIGFQENNDSLLKIINGNNQPILDTSSFKEQISRIDKKIQKNSDLYLNDFITMDELKDRTDSLQAEKKLLKAKISENKFNDSTDVFELVKTQLGSIPINELSYDNKKKIVNNLVSKVDVTADNVDIIFKFQLA

SEQ ID NO: 7303 - protein, 452 aa, synthetic construct
MKAAIYIRVSTHEQVANYSIQAQTEKLTALCRSKDWDVYDIFIDGGYSGSNMNRPALNEMLSKLHEIDAVVVYRLDRLSRSQRDTTTLIEEYFLKNNVEFVSLSETLDTSSPFGRAMIGILSVFAQLERETIRDRMVMGKIKRIEAGLPLTTAKGRTFGYDVIDTKLYINEEEAKQLQLIYDIFEEEQSITSLQKRLKKLGFKVRTYNRYNNWLTNDLYCGYVSYKDKVHVKGIHEPIISEEQFYRVQEIFTRMGKNPNMNRDSASLLSNLVVCSKCGLGFVHRSKDTMSRGKKYHYRYYSCKTYKHTHELEKCGNKTWRADKLEELIINRVNNYSFANRSVGKEDELDSLNEKLKIEHARKKRLFDLYVNGSYEVSELDSMMNDIDAQINYYESQIVANEELKKNKKIQESLANLATVDFDSLEFREKQLYLKSLINKIYIDGEQVTIEWL

SEQ ID NO: 7304 - protein, 485 aa, synthetic construct
MTKKVAIYTRVSTTNQAEEGFSIDEQIDRLTKYAEAMGWQVSDTYTDAGSSGAKLERPALQRLINDIENKAFDTVLVYKLDRLSRSVRDTLYLVKDVFTKNKIDFISLNESIDTSSAMGSLFLTILSAINEFERENIKERMTMGKLGRAKSGKSMMWTKTAFGYYHNRKTGILEIVPLQATIVEQIFTDYLSGISLTKLRDKLNESGHIGKDIPWSYRTLRQTLDNPVYCGYIKFKDSLFEGMHKPIIPYETYLKVQKELVERQQQTYERNNNPRPFQAKYMLSGMARCGYCGAPLRIVLGRKRKDGSRTMKYHCANRFPRKTKGVTVYNDNKKCDSGTYDLSNLENTVIDNLIGFQENNDSLLKLINGNNQPILDTSSFKKQISQIDKKIQKSSDLYLNDFITMDELKDRTDSLQAEKRLLKAKISENKLNDSTDVFELVKTQLGSIPINELSYDNKKKIVNNLVSKVDVTADNVDIIFKFQLA

SEQ ID NO: 7305 - protein, 452 aa, synthetic construct
MKAAIYIRVSTREQVENYSIQAQAEKLTALCRSKDWDVYDTFIDGGYSGSNMNRPALNEMLSKLHEIDAVVVYRLDRLSRSQRDTITLIEEYFLKNNVEFVSLSETLDTSSPFGRAMIGILSVFAQLERETIRDRMVMGKIKRIEAGLPLTTAKGRTFGYDVIDTKLYINEEEARQLQLIYDIFEEEQSITFLQKRLKKLGFKVHTYSRYNNWLTNDLYCGYVSYKDKVHVKGIHEPIISEEQFYRVQEIFTRMGKNPNVNRDSASLLNNLVVCSKCGLGFVHRRKDTMSRGKKYHYRYYSCKTYKHIHELEKCGNKIWRADKLEELIINRVNNYSFASRSVDKEDELDSMNEKLKIEHAKRKRLFDLYINGSYEVSELDSMMNDIDARINYYESQIEANEELKKIKKIQENLADLATVDFGSLEFREKQLYLKSLINKIYVDGEQVTIEWL

SEQ ID NO: 7306 - protein, 452 aa, synthetic construct
MKAAIYIRVSTREQVENYSIQAQTEKLTALCRSKDWDVYDIFIDGGYSGSNMNRPALNEMLSKLHEIDAVVVYRLDRLSRSQRDTITLIEEYFLKNNVEFVSLSETLDTSSPFGRAMIGILGVFAQLERETIRDRMVMGKIKRVEAGLPLTTAKGRTFGYDVIDTKLYINEEEAKQLQLIYDIFEEEQSITFLQKRLKKLGFKVRTYNRYSSWLTNDLYCGYVSYKDKVHVKGIHEPIISEEQFYRVQEIFARMGKNPNMNRDSASLLNNLVVCSKCGLGFVHRRKDTMSRGKKYHYRYYSCKTYKHIHELERCGNKIWRADKLEELIINRVNDHSFASRNVDKEDELDRLNEKLKIEHAKKKRLFDLYINGSYEVSELDGMMNVIDAQINYYESQIEANEELKKNKKIQETLADLAAVDFNSLEFREKQLYLKSLINKIYIDGEQVTIEWL

SEQ ID NO: 7307 - protein, 485 aa, synthetic construct
MTKKVAIYTRVSTTNQAEEGFSIEEQIDRLTKYAEAMGWRVSDTYTDAGSSGAKLERPAMQRLISDIGNKAFDTVLVYKLDRLSRSVRDTLYLVKDVFTKNKIDFISLNESIDTSSAMGSLFLTILSAINEFERENIKERMTMGKLGRAKSGKSMMWTKTAFGYYHNRKTGILEIVPLQAAIVEQIFTDYLSGISLTKLRDKLNESGHIGKDIPWSYRTLRQTLDNPVYCGYIKFKDSLFEGMHKPIIPYETYLKVQKELEERQQQTYERNNNPRPFQAKYMLSGMARCGYCGAPLKIVLGHKRKDGSRTMKYHCANRFPRKTEGVTVYNDNKKCDSGTYDLSNLENTVIDYLIGFQENNDSLLKIINGGNQPVLDTSSFKKQISQIDKKIQKNSDLYLNGFITMDELKGRTDSLQAEKKLLKAKISENQLNDSTDVFELVKTQLGSIPINELSYDNKKKIVNNLVSKVDVTADNVDIIFKFQLA

SEQ ID NO: 7308 - protein, 485 aa, synthetic construct
MTKKVAIYTRVSTTNQAEEGFSIDEQIDRLTKYAEAMGWQVSDTYTDAGLSGAKLERPAMQRLINDIENKAFDTVLVYKLDRLSRSVRDTLYLVKDVFTKNKIDFISLNESIDTSSAMGSLFLTILSAINEFERENIKERMTMGKLGRARSGKSMMWTKTAFGYNHNRKTGILEIVPLQATIVEQIFTDYLSGISLTKLRDKLNESGHIGKDIPWSYRTLRQTLDNPVYCGYIKFKDGLFEGMHKPIIPYETYLKVQKELEERQKQTYERNNNPRPFQAKYMLSGMARCGYCGAPLRIVLGHKRKDGSRTMKYHCANRFPRKTKGVTVYNDNKKCDSGTYDLRNLENTVIDSLIGLQENNDSLLKIINGNNQPILDTSSLKKQISQIDKKIQKNSDLYLNDFITMDELRDRTDSLQAEKRLLKAKISENKFNDSTDVFELVKTQLGSIPINELSYDNKKKIVNNLVSKVDVTADNVDITFKFQLA

SEQ ID NO: 7309 - protein, 452 aa, synthetic construct
MKAAIYIRVSTREQVENYSIQAQTEKLTALCRSKDWDVYDIFIDGGYSGSNMNRPALNEMLSKLHEIDAVVVYRLDRLSRSQRDTITLIEEYFLKNNVEFVSLSETLDTSSPFGRAMIGILSVFAQLERETIRDRMVMGKIKRIEAGLPLTTAKGRTFGYDVIDTRLYINEEEAKQLRLIYDIFEEEQSITFLQKRLKELGFKVRTYNRYNNWLTNDLYCGYVSYKDKVHVKGIHEPIISEEQFYRVQEIFTRMGKNPNMNRDSASLLNNLVVCSKCGLGFVHRRKDAMSRDKKYHYRYYSCKTYKHIHELEKCGNKIWRADKLEELIINRVNDYSLASRNVDKEDELDSLNEKLKIEHAKKKRLFDLYINGSYEVSELDSMMNDIDAQINYYESQIEANEELKKNKKIQENLAHLATVDFDSLEFREKQLYLKSLINKIYIDGEQVTIEWL

SEQ ID NO: 7310 - protein, 452 aa, synthetic construct
MKAAIYIRVSTREQVENYSIRAQTEKLTALCRSKDWDVYDIFIDGGYSGSNMNRPALNEMLSKLHEIDAVVVYRLDRLSRSQRDTITLIEEYFLKNNVEFVSLSETLDTSSPFGRAMIGILSVFAQLERETIRDRMVMGKIKRIEAGLPLTTAKGRTFGYDVIDTKLYINEEEAKQLQLIYDIFEEVQSITLLQKRLKKLGFKVRTYNRYNNWLTNDLYCGYVSYKDKVHVKGIHEPIISEEQFYRVQEIFTRMGKNPNMNRDSASLLNGLVVCGKCGLGFVHRRKDAISRGKKYHYRYYCCKTYKHIHELEKCGNKIWRADKLEELIINRVNNYSITGRNADKEDELDSLSEKLKIEHAKKKRLFELYINGSYEVSELDSMMNDIDAQINYYESQIEANEELKKNKKIQENLAYLATVEFDSLEFREKQLYLKSLINKIYIDGEQVTIEWL

SEQ ID NO: 7311 - protein, 452 aa, synthetic construct
MKAAIYIRVSTREQVENYSIQAQTEKLTALCRSKDWDVYDIFIDGGYSGSNMNRPALNEMLSKLHEIDAVVVYRLDRLSRSQRDTITLIEEYFLKNNVEFVSLSETLDTSSPFGRAMIGILSVFAQLERETIRDRMVMGKIKRVEAGLPLTTAKGRTFGYDVIDTKLYINEEEAKQLQLIYDIFEEEQSITFLQKRLKELGSKVRTYNCYNSWLTNDLYCGYVSYKDKVHVKGIHEPIISEEQFYRVQEIFARMGKNPNMNRDSASLLNSLVVCSKCGLGFVHRRKDTMSRGKKYHYRYYSCKTYKHTHELKKCGNKIWRADKLEELIINRVNDYSFASRNVDKEDELGSLNEKLRVEHAKKRRLFDLYINGSYEVSELDSMMNDIDAQINYYESQIEANEELRKNKKIQENLANLATVDYDSLEFREKQLYLKSLINKIYIDGEQVTIEWL

SEQ ID NO: 7312 - protein, 485 aa, synthetic construct
MTKKVAIYTRVSTTSQAEEGFSIDEQIDRLTKYAEAMGWQVSDTYTDAGFSGAKLERPAMQRLINDIENKAFDTVLVYKLDRLSRSVRDTLYLVKDVFTKNKIDFISLNESIDTSSAMGSLFLTILSAINEFERENIKERMTMGKLGRAKSGKSMMWTKTAFGYYHNRKTGILEIVPQQATVVEQIFTDYLSGISLTKLRDKLNESGHIGKDIPWSYRTLRQTLDNPVYCGYIKFKDSLFEGMHKPIIPYETYLKVQKELEERQRQTYERNNNPRPFQAKYMLSGMARCGYCGAPLRIVLGHKRKDGSRTMKYHCANRFPRKTKGVTVYNDNKKCDSGTYDLGNLENTVIDNLIGFQENNDSLLKIINGNSQPILDISSFEEQISQIDKKIQKNSDLYLNDFITMDELKDRTDSLQAEKKLLKAKISENKFDDSTDVFELVKTQLGSIPINELSYDNKKKIVNSLVSKVDVTADNVDIIFKFQLA

SEQ ID NO: 7313 - protein, 469 aa, synthetic construct
MSFTTPVRAAVYLRISEDRSGEQLGVARQREDCLKLCGQRKWVPVEYLDNDVSASTGKRRPAYEQMLADITAGKIAAVVAWDLDRLHRRPIELEAFMSLADEKRLALATVAGDVDLATPQGRLVARLKGCVAAHETEHKKARQRRAARQKAERGYPNWSKAFGYLSGPNGPEPDPQTAPLVKQAYADILAGASLGDVCRQWNDAGAFTITGRPWTTATLSKFLRKPRNAGLRAYKGARYGPVDRDAIVGKAQWGPLVDEATFWAAQAVLDAPGRAPGRKSVRRHLLTGLAGCGKCGYHLAGSYRTDGQIVYVCKACHGVSILADNIEPVLYHIVAERLAMPDAADLLRREIHDAAEAETIRLELETLYGELDRLAVERAEGLLTARQVKISTDIVNAKITKLQARQLDQERLRVLDGIPLGTPQVAGMIAELSPDRFRAVLDVLAEVVVQPAGKGGRIFNPERVQVNWR

SEQ ID NO: 7314 - protein, 485 aa, synthetic construct
MTKKVAIYTRVSTTNQAEEGFSIDEQIDRLTKYAEAMGWQVSDTYTDAGTSGAKLERPAMQRLINDIENKAFDTVLVYKLDRLSRSVRDTLYLVKDVFTKNKIDFISLNESIDTSSAMGSLFLTILSAINEFERENIKERMTMGKLGRAKSGKSMMWTKTAFGYNHNRKTGILEIVPLQATIVEQIFTDYLSGISLTKLRDKLNESGHIGKDIPWSYRTLRQTLDNPVYCGYIKFKGSLFEGMHKPIIPYETYLKVQKELEERQQQTYERNNNPRPFQAKYMLSGMARCGYCGAPLRVVLGHKRKDGSRTMKYHCANRFPRKTKGVTVYNDNKKCDSGTYDLSNLENTVIDNLVGLQENNDSLLKIINGNNQPILDTSSFKKQISQIDRKIQKNSDLYLNDFITMDELKDRTDSLQAEKRLLKAKISENKFNDSTDVFELVKTQLGSIPINELSYDNKKKIVNNLVSKVDVTADSVDIIFKFQLA

SEQ ID NO: 7315 - protein, 452 aa, synthetic construct
MKAAIYIRVSTQEQVENYSIQAQTEKLTALCRSKDWDVYDIFIDGGYSGSNMNRPALNEMLSKLHEIDAVVVYRLDRLSRSQRDTTTLIEEYFLKNNVEFVSLCETLDTSSPFGRAMIGILSVFAQLERETIRDRMVMGKIKRIEAGLPLTTAKGRTFGYDVIDTKLYINEEEARQLQLIYDIFEEVQSITFLQKRLKKLGFKVRTYNRYNNWLTNDLYCGYVSYKDKVHVKGIHEPIISEEQFYRVQEIFTRMGKNPNMNRDSASLLNNLVVCSKCGLGFVHRSKDTMSRGKKYHYRYYSCKTYKHTHELEKCGNKTWRADKLEELIINRVNNYSFVSRNVDKEDELESLNEKLKIERAKKKRLFDLYINGSYEVSELDSMMNDIDAQIDYYESQIEAYEELKKNKKIQESLADLATVDFDSLEFREKQLYLKSLINKIYIDGEQVTIEWL

SEQ ID NO: 7316 - protein, 452 aa, synthetic construct
MKAAIYIRVSTREQVENYSIQAQTEKLTALCRSKDWDVYDIFIDGGYSGSNMNRPALNEMLSKLHEIDAVVVYRLDRLSRSQRDTITLIEEYFLKNNVEFVSLSETLDTSSPFGRAMIGILSVFAQLERETIRDRMVMGKIKRIEAGLPLTTAKGRTFGYDVIDTKLYINEEEAKQLRLIYDIFEEVQSITFLQKRLKKLGFKVRTYNRYNNWLTNDLYCGYVSYKDKVHVKGIHEPIISEEQFYRVQEIFTRMGKNPNMNRDSASLLNNLVVCSKCGLGFVHRRKDAMSRDKKYHYRYYSCKTYKHIHELEKCGNKIWRADELEELVINRVNSYSVASRNVDKEDELDSLNEKLKIERTKKKRLFDLYINGSFEVSELDSMMNDIDAQISYYESQIEASEELEKNKRIQENLAHLATVDFDSLEFREKQLYLKSLINKIYIDGEQVTIEWL

SEQ ID NO: 7317 - protein, 469 aa, synthetic construct
MSYTTPVRAAVYLRISEDRSGEQLGVARQREDCLKLCDQRKWVPVEYLDNDVSASTGKRRPAYEQMLADITAGKIAAVVAWDLDRLHRRPIELEAFMSLADEKRLALATVAGDVDLATPQGRLVARLKGCVAAHETEHKKARQRRAARQKAERGLPNWSKAFGYLPGPNGPEPDPRTAPLVKQAYADILAGASLGDVCRQWNDTGAFTITGRPWTTTTLSKFLRKPRNAGLRAYKGARYGPVDRDAIVGKAQWSPLVDEATFWAAQAVLDAPGRAPGRKSVRRHLLTGLAGCGKCGNHLAGSYRTDGRVVYVCKACHGVAILADNIVPFLYHIVAERLAMPDAVDLLRREIHDAAEAETIRLELETLYGELDRLAVERAEGLLTARQVKISTDIANAKITKLQARQLDQERLRVFDGIPLGTPQVAGMIAKLSPDRFRAVLDVLAEVVVQPVGKSGRIFNPERVQVNWR

SEQ ID NO: 7318 - protein, 485 aa, synthetic construct
MTKKVAIYTRVSTTNQAEEGFSIDEQIDRLTKYAEAMGWQVSDTYTDAGFSGAKLERPAMQRLINDIENKAFDTVLVYKLDRLSRSVRDTLYLVKDVFTRNNIDFISLSESIDTSSAMGSLFLTILSAINEFERENIKERMTMGKLGRAKSGKSMMWTKTAFGYYHNRKTGILEIVPLQATIVEQIFTDYLSGISLTKLRDKLNESGHIGKDIPWSYRTLRQTLDNPVYCGYIKFKDSLFEGMHKPIIPHETYLRVQKELEERQQQTYERNNNPRPFQAKYMLSGMARCGYCGAPLKIVLGHKRKDGSRTMKYHCANRFPRKTKGITVYNDNKKCDSGTYDLSNLENTVIDSLIGFQENNDSLLKIINGNNQPILDTSSFKEQFSQIDKKIQKNSDLYLNDFITMDELKDRTDSLQAEKKLLKAKISENKFNDSTNVFELVKTQLGSIPINELSYDDKKKIVNNLVSKVDVTADNVDIIFKFQLA

SEQ ID NO: 7319 - protein, 485 aa, synthetic construct
MTKKVAIYTRVSTTNQAEEGFSIDEQIDRLTKYAEAMGWQVSDTYTDAGFSGAKLERPAMQRLINDIENKAFDTVLVYKLDRLSRSVRDTLYLVKDVFTKNKIDFISLNESINTSSAMGSLFLTILSAINEFERENIRERMTMGKLGRAKSGKSMMWTRTAFGYYHNRKTGILEIVPLQATIVEQIFTDYLSGISLTKLRDKLNDSGHIGKDIPWSYRTLRQTLDNPVYCGYIKFKDSLFEGLHKPIIPYETYLKAQKELEVRQQQTYERNNNPRPFQAKYMLSGMARCGYCGAPLKIVLGRKRKDGSRTMKYHCANRFPRKTKGITVYNDNKKCDSGTYDLSNLENTVIDNLIGFQENNDSLLKIINGNNQPILDTSNFKKQISQIDKKIQKNSDLYLNDFITMDELKARTDSLQAEKKLLKAKISENKFNDSTDVFELVKTQLGSIPINELSYDNKKRIVNNLVSKVDVTADNVDIIFKFQLT

SEQ ID NO: 7320 - protein, 452 aa, synthetic construct
MKAAIYIRVSTQEQVGNYSIQAQTEKLTALCRSKDWDVYDIFIDGGYSGSNMNRPALNEMLSKLHEIDAVVVYRLDRLSRSQRDTTTLIEEYFLKNNVEFVSLSETLDTSSPFGRAMIGILSVFAQLERETIRDRMVMGKIKRIEAGLPLTTAKGRTFGYDVIDTKLYINEEEAKQLQLIYDIFEEEQSITFLQKRLKKLGFKVRTYNRYNNWLTNDLYCGYVSYKDKVHVKGIHEPIISEEQFYRVQEIFTRMGKNPNMNRDSASLLNNLVVCGKCGLSFVHRSKDTTSRGKKYHYRYYSCKTYKHTHELEKCGNKIWRADKLEELIINRVNNYSFASRNVDKGDELDSLNEKLKIEHAKKKRLFDLYINGSYEVSELDSMMNDIDAQINYYESQIEANGELRKNKKIQENLAGLATVDFDSLGFREKQLYLKSLINKIYIDGEQVTIEWL

SEQ ID NO: 7321 - protein, 452 aa, synthetic construct
MKAAIYIRVSTREQVENYSIQAQTEKLTALCRSKDWDVYDIFIDGGYSGSNMNRPALNEMLSKLHEIDAVVVYRLDRLSRSQRDTITLIEEYFLKNNVEFVSLSETLDTSSPFGRAMIGILSVFAQLERETIRDRMVMGKIKRIEAGLPQTTAKGRTFGYDVIDTKLYINEEEAKQLQLIYDIFEEEQSITSLQKRLKKLGFKVRTYNCYNNWLTNDLYCGYVSYKDKVHVKGIHEPIISEEQFYRVQEIFTRMGKNPNMNRDSASLLNNLVVCSKCGLSFVHRRKDAMSRDKKYHYRYYSCKTYKHIHELEKCGNKIWRADKLEELIINRVNNYSLASRNVDKEDELDSLNEKLKIEHAKKRRLFDLYINGRHEVSELDSMMNDIDAQINYYESQIEANEELKKNKRIQENLAYLATVDFDSLEFREKQLYLKSLINKIYIDGEQVTIEWL

SEQ ID NO: 7322 - protein, 452 aa, synthetic construct
MKAAIYIRVSTQEQVGNYSIQAQTEKLTALCRSKDWDVYDIFIDGGYSGSNMNRPALNEMLSKLHEIDAVVVYRLDRLSRSQRDTTTLIEEYFLKNNVEFVSLSETLDTSSPFGRAMIGILSVFAQLERETIRDRMVMGKIKRIEAGLPLTTAKGRTFGYDVIDTKLYINEEEAKQLRLIYDIFEDEQSITSLQKRLKKLGFRVRTYNRYNNWLTNDLYCGYVSYKDKVHVKGIHEPIISEEQFYRVQEIFTRMGKNPNMNRDSASLLNNLVVCSKCGLGFVHRSKDTMSRGKKYHYRYYSCKTYKHTHELEKCGNKTWRADTLEELIINRVNNYSFASRNVDKEDELDSLNEKLKIEHAKRRRLFDLYINGSYEVSELDSMMNDIDAQINYYESQIEANEGLKKNKKIQETLADLATVDFDSLEFREKQLYLKSLISKIYIDGEQVTIEWL

SEQ ID NO: 7323 - protein, 469 aa, synthetic construct
MSYTTPVRAAVYLRISEDRSGEQLGVARQREDCLKLCDQRKWVPVEYLDNDVSASTGKRRPAYEQMLADITAGKVAAVVAWDLDRLHRRPIELEAFMSLADEKRLALATVAGDVDLATPQGRLVARLKGSVAAHETEHKKARQRRAARQKAERGHPNWSKAFGYLPGPNGPEPDPRTAPLVKQAYTDILAGASLGDVCRQWNAAGAFTITGRPWTTTTLSKFLRKPRNAGLRAYKGARYGPVDRDAIVGKAQWSPLVDEATFWAAQAVLDAPGRAPGRKSVRRHLLTGLAGCGKCGNHLAGSYRTDGRVVYVCKACHGVAILADNIEPILYHIVAERLAVPNAVDLLRREIHDAAEAETIRLELETLYGELDRLAVERAEGLLTARQVKISTDIVNAKITKLQARQLDQERLRVFDGIPLGTPQVAGMIAELSPDRFRAVLDVLAEVVVQPVGKSGRIFNPERVQVNWR

SEQ ID NO: 7324 - protein, 485 aa, synthetic construct
MTKKVAIYTRVSTTNQAEEGFSIDEQIDRLTKYAEAMGWQVSDTYTDAGSSGAKLERPAMQRLINDIENKAFDTVLVYKLDRLSRSVRDTLYLVKDVFTKNKIDFISLSESIDTSSAMGSLFLTILSAINEFERENIKERMTMGKLGRAKSGKSMMWTKTAFGYYHNRKTGILEIVPLQATIVEQIFTDYLSGISLTKLRDKLNESGHIGKDIPWSYRTLRQTLDNPVYCGYIKFKDSLFEGMHKPIIPYETYLKVQKELEERQQQTYERNNNPRPFQAKYMLSGMARCGYCGAPLRIVLGHKRKDGSRTMKYHCANRFPRKTKGVTVYNDNKKCDSGTYDLSNLENTVIGNLIGFQENNDSLLKIINGNNQPIPDTSSLKKQISQIDKKIQKNSDLYLNDFITLDELRERTDSLRAEKKLLIAKISENKFNDSTDAFELVKTQLGSIPINELSYDNKKKIVNNLVSKVDVTADSVDIIFKFQLA

SEQ ID NO: 7325 - protein, 452 aa, synthetic construct
MKAAIYIRVSTREQVENYSIQAQTEKLTALCRSKGWDVYDIFIDGGYSGSNMNRPALNEMLSKLHEIDAVVVYRLDRLSRSQRDTITLIEEYFLKNNVEFVSLSETLDTSSPFGRAMIGILSVFAQLERETIRDRMVMGKIKRIEAGLPLTTAKGRTFGYDVIDTKLYINEEEAEQLQLIYDIFEEEQSITFLQKRLKKLGLKVHTYNRYSSWLTNDLYCGYVSYKDKVHVKGIHEPIISEEQFYRVQEIFTRMGKNPNMNRDSASLLNNLVVCSKCGLGFVHRRKDTTSRGKKYHYRYYSCKTYKHTHVLEKCGNKIWRADKLEELIINRVNNYSFASRNVDKEEELDSLNEKLKIEHAKKRRLFDLYINGSYEVSELDSMMNGIDAQINYYESQIEANEELKKNKKIQENLADLATVDFDSLEFRDKQLYLKSLINKIYIDGEQVTIEWL

SEQ ID NO: 7326 - protein, 452 aa, synthetic construct
MKAAIYIRVSTREQVENYSIQAQTEKLTALCRSKDWDVYDIFIDGGYSGSNMNRPALNEMLSKLHEIDAVVVYRLDRLSRSQRDTITLIEEYFLKNNVEFVSLSETLDTSSPFGRAMIGILSVFAQLERETIRDRMVMGKIKRIEAGLPLTTAKGRTFGYDVIDTKLYINEEEAEHLRLIYDIFEEEQSITFLQKRLKKLGLKVRTYNRYSNWLTNDLYCGYVSYKDKVHVKGIHEPIISEEQFNRVQEIFTRMGKNPNMNRDSASLLSNLVVCSRCGLGFVHRRKDTMSRGKKYHYRYYSCKTYKHTHELEKCGNKIWRADKLEELIINRVNNYSFASRNVDKEDELDSLNEKLKIEHAKRKRLFDLYINGSYEVSELDSMMNDIDAQINYYESQIEANEELKKNKKIQENLANLATVDYDSLEFREKQLYLRSLINKIYIDGEQVTIEWL

SEQ ID NO: 7327 - protein, 452 aa, synthetic construct
MKAAIYIRVSTREQVENYSIQAQTEKLTALCRSKDWDVYDIFVDGGYSGSNMNRPALNEMLSKLHEIDAVVVYRLDRLSRSQRDTITLIEEYFLKNNVEFVSLSETLDTSSPFGRAMIGILSVFAQLERETIRDRMVMGKIKRIEAGLPLTTAKGRTFGYDVIDTKLYINEEEAKQLQLIYDIFEEEQSITFLQKRLKELGFKVRTYNCYNNWLTNDLYCGYVSYKDKVHVKGIHEPIISEEQFYRVQEIFTRMGKNPNMNRGSASLLNNLVVCSKCGLGFVHRRKDAMSRDKKYHYRYYSCKTYKHIHELEKCGNKIWRADKLEELIIDRVNSYSLASRNVDKEDELDGLNEKLKTEHAKRKRLFDLYINGSYEVSELDSMMSDIDAQINYYESQIEANEELKKNKKIQENLAHLATVDFDSLEFREKQLYLKSLINKIYIDGEQVTIEWL

SEQ ID NO: 7328 - protein, 469 aa, synthetic construct
MSYTTPVRAAVYLRISEDRSGEQLGVARQREDCLKLCDQRNWVPVEYLDNDVSASTGKRRPAYEQMLADITAGKIAAVVAWDLDRLHRRPVELEAFMSLADEKRLALATVAGDVDLATPQGRLVARLKASVAAHETEHKKARQRRAARQKAERGLPNWSKAFGYLPGPNGPEPDPRTAPLVKQAYADILAGASLGDVCRQWNDAGAFTITGRPWTTTTLSKFLRKPRNAGLREYKGARYGPVDRDAIVGEAQWSPLVDEATFWAAQAALDAPGRAPGRKSVRRHLLTGLAGCGKCGNHLAGSYRTDGQVVYVCKVCHGVSILAANIVSILYHIVAERLATPDAVDLLRREIHDAAEAETVRLELETLYGELDRLAVERAEGLLTARQVKISTDIVNAKITKLQARRLDQERLRVFDGIPLGTPRVAGVIAELSPDRFRAVLDVLAEVVVQPVGKSGRISNPERVQVNWR

SEQ ID NO: 7329 - protein, 485 aa, synthetic construct
MTKKVAIYTRVSTTNQAEEGFSIDEQIDRLTKYAEAMGWQVSDTYTDAGFSGAKLERPAMQRLINDIENKAFDTVLVYKLDRLSRSVRDTLYLVKDVFTKNKIGFISLNESIDTSSAMGSLFLTILSAINEFERENIKERMTMGKLGRAKSGKSMMWTKTAFGYYHNRKTGILEIVPLQATIVEQIFTDYLSGISLTKLRDKLNESGHIGKDIPWSYRTLRQTLDNPVYCGYIKFKGSLFEGMHEPIIPYETYLKVQKELEERQQQTYERNNNPRPFLAKYMLSGMARCGYCGAPLKVVLGHKRKDGSRTMKYHCANRFPRKTKGVTVYNDNKKCDSGTYDLSNLENTVIDNLIGFQENDDSLLKIINGNNQPILDTSSFKKQISQIDKKIQKNSDLYLNDFITMDELKDRTDSLQAKKKLLKAKISENKFNDSTDVFELVKTQLGSIPINELSYDNKKKIVNNLVSKVDVTADNVDIIFKFQLA

SEQ ID NO: 7330 - protein, 452 aa, synthetic construct
MKAAIYIRVSTREQVENYSIQAQTEKLTALCRSKDWDVYDIFIDGGYSGSNMNRPALNEMLSKLHEIDAVVVYRLDRLSRSQRDTITLIEEHFLKNNVEFVSLSETLDTSSPFGRAMIGILSVFAQLERETIRDRMVMGKIKRIEAGLPLTTAKGRTFGYDVIDTKLYINEEEAKQLQLIYDIFEEEQSITFLQKRLKKLGFKVRTYSCYNNWLTNDLYCGYVSYKDKVHVKGIHEPIISEEQFYRVQEIFTRMGKNPNMNRDSASLLNNLVVCGKCGLGFVHRRKDTMSRGKKYHYRYYSCKTYKHTHELEKCGNKIWRADKLEELIINRVNNYSFASRNVDKEDERDTLSEKLKVEHAKKKRLFELYINGSYEMGELDSMMNDIDAQINYYESQIEANEGLKRNKKIQENLAELATEDFDSLEFREKQLYLKSLINKIYIDGEQVTIEWL

SEQ ID NO: 7331 - protein, 452 aa, synthetic construct
MKAAIYIRVSTREQVENYSIQAQTEKLTALCRSKDWDVYDVFIDGGYSGSNMNRPALNEMLSKLHEIDAVVVYRLDRLSRSQRDTITLIEEYFLKNNVEFVSLSETLDTSSPFGRAMIGILSVFAQLERETIRDRMVMGKIKRIEAGLPLTTAKGRTFGYDVIDTRLYINEEEAKQLQLIYDIFEEEQSITFLQKRLKKLGFKVRTYNRYSNWLTNDLYCGYVSYKDRVHVKGIHEPIISEEQFYRVQEIFTRMGKNPNMNRDSASLLNNLVVCSKCGLGFVHRRKDIMSHGKKYHYRYYSCKTYKHIHELEKCGNKIWRADKLEELVINRVNNYSLASRNVDKEDELDSLNEKLKIEHAKKKRLFELYINGSYEVSELDSMMNDIDAQINYYESRIEANKELKKNKKIQENLAHLATVDFDSLEFREKQLYLKSLINKIYIDGEQVTIEWL

SEQ ID NO: 7332 - protein, 485 aa, synthetic construct
MTKKVAIYTRVSTTNQAEEGFSIDEQIDRLTKYAEAMGWQVSDTYTDAGFSGAKLERPAMQRLINDIENKAFDTVLVYKLDRLSRSVRDTLYLVKDVFTKNKIDFISLNESINTSSAMGSLFLTILSAINEFERENIKERMTMGKLGRAKSGKSMMWTKTAFGYYHNRKTGILEIVPPQATIVEQIFTDYLSGISLTKLRDKLNESGHIGKDIPWSYRTLRQTLDNPVYCGYIKFKDSLFEGMHKPIIPYETYLKVQKELEERQQQTYERNNNPRPFQAKYMLSGMARCGYCGAPLRIVLGHKRKDGSRTMKYHCANRFPRKTKGVTVYNDNKKCDSGTYDLSNLENTVIDNLIGFQENNDSLLKIINGNNQPILDTSSLKKQISQIDKKIQKNSDLYLNDFITMDELKDRTDSLQAEKKLLKAKISENKFNDSTDVFELVKTQLGSTPINELSYDNKKEIVNNLVSKVDVTADNVDIIFKFQLA

SEQ ID NO: 7333 - protein, 469 aa, synthetic construct; identical to SEQ ID NO: 6365

SEQ ID NO: 7334 - protein, 485 aa, synthetic construct
MIKKVAIYTRVSTTSQAEEGFSIDEQVDRLTKYAEVMGWQVSDTYTDAGFSGAKLERPAMQRLINDIENKAFDTVLVYKLDRLSRSVRDTLYLVKDVFTKNKIDFISLNESIDTSSAMGSLFLTILSAINEFERENIKERMTMGKLGRAKSGKSMMWTKTAFGYYHNRKTGILEIVPLQATIVEQIFTDYLSGISLTKLRDKLNESGHIGKDIPWSYRTLRQTLDNPVYCGYIKFKDSLFKGMHKPIIPYETYLKVQKELEERQQQTYERNNNPRPFQAKYMLSGMARCGYCGAPLRIVLGHKRKDGSRTMKYHCANRFPRKTKGVTVYNDNKKCDSGTYDLSNLENTVIDNLIGFQENNDSLLKIINGNNQPILDTSSLKKQISQIDKKIQKNSDLYLNDFITMDELEDRTGSLQAEKKLLRAKISENKFNDSTDVFELVKAQLGSIPINELSYDNKKKIVNNLVSKVDVTADNVDIIFKFQLA

SEQ ID NO: 7335 - protein, 452 aa, synthetic construct
MKAAIYIRVSTREQVENYSIQAQTERLTALCRSKDWDVYDIFIDGGYSGSNMNRPALNEMLSKLHEIDAVVVYRLDRLSRSQRDTITLIEEYFLKNNVEFVSLSETLDTSSPFGRAMIGILSVFAQLERETIRDRMVMGKIKRIEAGLPLTTAKGRTFGYDVIDTKLYINEEEAKQLQLIYDIFEEEQSITFLQKRLKKLGFKVRTYNCYNNWLTNDLYCGYVSYKDKVHVKGIHEPIISEEQFYRVQEIFTRMGKNPNMNRDSASLLSNLVVCSKCGLGFVHRRKDTMSRGKKYHYRYYSCKTYKHTHELEKCGNKIWRADKLEELIINRVNNYSFAGRNVDKEEELDSLNEKLKIEHAKRKRLLDLYINGSYGVSELDSMMSDIDAQINYYESQIEANEELRGNRKIQENLAGLATVDFDSLELREKQLYLKSLINKIYIDGEQVTVEWL

SEQ ID NO: 7336 - protein, 485 aa, synthetic construct
MTKKVAIYTRVSTTNQAEEGFSIDEQIDRLTKYAEAMGWQVSDTYTDAGFSGAKLERPAMQRLINDIENEAFDTVLVYKLDRLSRSVRDTLYLVKDVFTKNKIDFISLNESIDTSSAMGSLFLTILSAINEFERENIKERMTMGKLGRAKSGKSMMWTKTAFGYYHNRKTGILEIVPLQATIVEQIFTDYLSGISLTKLRDKLNESGHIGKDIPWSYRTLRQTLDNPVYCGYIKFKDSLFEGMHKPIIPYETYLKVQEELKERQQQTYERNNNPRPFQAKYMLSGMARCGYCGAPLKIVLGHKRKDGGRTMKYHCANRFPRKTKGVTVYNDNKKCDSGTYDLSNLENTVIDNLIGFQENNDSLLKIINGNNQPVLDTSSFKEQISQIDKKIQRNSDLYLNDFITMDELKDRTNSLRAEKELLKAKISENKFNDSTDVFELVKTQLGSIPINELSYDNKKKIVNNLVGKVDVTADNVDIIFKFQLV

SEQ ID NO: 7337 - protein, 485 aa, synthetic construct
MTKKVAIYTRVSTTNQAEEGFSIDEQIDRLTKYAEAMGWQVSDTYTDAGLSGAKLERPAMQRLINDIENKAFDTVLVYKLDRLSRSVRDTLYLVKDVFTKNKIDFISLNESIDTSSAMGSLFLTILSAINEFERENIKERMTMGKLGRAKSGKSMMWTKTAFGYYHNRKTGILEIVPLQATIVEQIFTDYLSGISLTKLRDKLNESGHIGKDIPWSYRTLRQTLDNPVYCGYIKFKDSLFEGMHKPIIPYETYLKVQKELEERQQQTYERNNNPRPFQAKYMLSGMARCGYCGAPLRIVLGHKRKDGSRTMKYHCANRFPRKTKGVTVYNDNKKCDSGTYDLRNLENAVIDNLIGFQENNDSLLKIINGNNQPILDTSSSKKQISQIDKKIQKNSDLYLNDLITMDELRDRTDSLQAEKKLLKAKISENKFNDSTDVLELVKTQLGSIPINELSYDNKKKIVNNLVSKVEVTADNVDIVFKFQLA

SEQ ID NO: 7338 - protein, 469 aa, synthetic construct
MSHTTPVRAAVYLRISEDRSGEQLGVARQREDCLKLCDQRKWVPVEYLDNDVSASTGKRRPAYEQMLADITAGKIAAVVAWDLDRLHRRPIELEAFMSLADEKRLALATVAGDVDLATPQGRLVARLKGSVAAHETEHKKARQRRAARQKAERGHPNWSKAFGYLPGPNGPEPDPRTAPLVKQAYADILAGASLGDVCRQWNGAGAFTVTGRPWTTTTLSKFLRKPRNAGLRAYKGARYGPVDRDAIVGEALWSPLVDEATFWAAQAVLDAPGRAPGRKSVRRHLLTGLAGCGKCGNHLAGSYRTDGRVVYVCKACHGVAILADNIEPILYHVVAERLAMPDAVDLLRREIHDAAEAETIHLELETLYGELDCLAVERAEGLLTARQVKICTDIVNAKITKLQARQQDQERLRVLDGIPLGTPQVAGMITELSPDRFRAVLDVLAEVVVQPVGKSGGVFNPERVQVNWR

SEQ ID NO: 7339 - protein, 469 aa, synthetic construct
MSYTTPVRAAVYLRISEDRSGEQLGVARQREDCLKLCGQRKWVPVEYLDNDVSASTGKRRPAYEQMLADITAGKIAAVVAWDLDRLHRRPIELEAFMSLADEKRLALATVAGDVDLATPQGRLVARLKGSVAAHETEHKKARQRRAARQKAERGYPNWSKAFGYLPGPNGPEPDPRTAPLVKQAYADILAGASLGDVCRQWNGAGAFTITGRPWTTATLSKFLRKPRNAGLRAYKGARYGPVDRDAIVGKAQWSPLVDEATFWAAQAVLDAPGRAPGRKSVRRHLLTGLAGCGKCGNHLAGSYRTDGRVVYVCKACHGVAILADNIEPILYHIVAERLAMPDAVDLLRREIHDAAEAETIRLELETLYGELDRLAVERAEGLLTARQVKISTDIVNAKITKLQARQLDQERLRVFDGIPLGTPQVAGMIAELSPNRFRAVLDVLAEVIVQPVGKSGRIFNPERVQVNWR

SEQ ID NO: 7340 - protein, 485 aa, synthetic construct
MTKKVAIYTRVSTTNQAEEGFSIDEQIDRLTKYAEAMGWQVSDTYTDAGLSGAKLERPAMQRLINDIENKAFDTVLVYKLDRLSRSVRDTLYLVKDVFTKNRIDFISLSESIDTSSAMGSLFLTILSAINEFERENIKERMTMGKLGRAKSGKSMMWTKTAFGYHHNRKTGILEIVPLQATIVEQIFTDYLSGISLTKLRDKLNESGHIGKDIPWSYRTLRQTLDNPVYCGYIKFKDSLFEGMHKPIIPYETYLKVQKELEERQQQTYERNNNPRPFQAKYMLSGMARCGYCGAPLRIVLGHKRKDGSRTMKYHCANRFPRKTKGVTVYNDNKKCDSGTYGLSNLENAVIDILIGFQENNDSLLKIINGNNQPILDTSSFKKQISQIDKKIQKNSDLYLNDFITMDELKDRTNSLQAEKKLLKAKISENKFNDSTDVFELVKTQLGSIPISELSYDNKKKIVNNLVSKVDVTADNVDIIFKFQLA

SEQ ID NO: 7341 - protein, 469 aa, synthetic construct
MSYTTPVRAAVYLRISEDRSGEQLGVARQREDCLKLCGQRKWVPVEYLDNNVSASTGKRRPAYEQMLADITAGKIAAVVAWDLDRLHRRPIELEAFMSLADEKRLALATVAGDVDLATPQGRLVARLKGSVAAHETEHKKARQRRAARQKAERGYPNWSKAFGYLPGPNGPEPDPRTAPLVKQAYAGILAGASLGDVCRQWNDAGAFTITGRPWTTTTLSKFLRKPRNAGLRAYKGARYGPVDRDAIVGKAQWSPLVDEATFWAAQAALDAPGRAPGRKSVRRHLLTGLAGCGKCGNHLAGSYRTDGRVAYVCKACHGVAILADNIEPILYHIVAERLAMPDAVDLLRREIHDVAEAETIRLELETLYGELDRLAVERAEGLLTARQVKISTDIVNAKITKLQARQLDQERLRVLDGIPLGTPQVAGVIAELSPDRFRAVLDVLAEVVVRPVGKSGRIFNPERVQVNWR

SEQ ID NO: 7342 - protein, 452 aa, synthetic construct
MKAAIYIRVSTQEQVGNYSIQAQTEKLTALCRSKDWDVYDIFIDGGYSGSNMNRPALNEMLSKLHEIDAVVVYRLDRLSRSQRDTTTLIEEYFLKNNVEFVSLSETLDTSSPFGRAMIGILSVFAQLERETIRDRMVMGKIKRIEAGLPLTTAKGRTFGYDVIDTKLYINEEEAKQLQLIYDIFEEEQSITSLQKRLKKLGFKVRTYNRYSNWLTNDLYCGYVSYKDKVHVKGIHEPIISEEQFYRVQEIFARMGKNPNMNRDSASLLSNLVVCSKCGLGFVHRSKDTMSRGKRYHYRYYSCKTYKHTHELGKCGNKTWRADKLEELIINRVNNYSFASRNVDKEDELDSLNEKLKIEHAKKKRLFDLYINGSYEVSELDSMMNDIDAQINYYESQIGANKELKKNKKIQENLADLATVDFDSLEFREKQLYLKSLINKIYIDGEQVTIEWL

SEQ ID NO: 7343 - protein, 452 aa, synthetic construct
MKAAIYIRVSTQEQVGNYSIQAQTEKLTALCRSKGWDVYDIFIDGGYSGSNMNRPALNEMLSKLHEIDAVVVYRLDRLSRSQRDTTTLIEEYFLKNDVEFVSLSETLDTSSPFGRAMIGILSVFAQLERETIRDRMVMGKIKRVEAGLPLTTAKGRTFGYDVIDTKLYINEEEAKQLQLIYDIFEEEQSITSLQKRLKKLGFKVRSYNRYNNWLTNDLYCGYVSYKDKVHVKGIHEPIISEEQFYRVQEIFTRMGKKPNTNRDSASLLNNLVVCSKCGLGFVHRSKDTMCRGKKYHYRYYSCKTYKHTHELEKCGNKTWRADKLEELIINRVNNYSFASRNVDKGDELDSLNEKLKIEHAKKKRLFDLYINGSCEVSELDSMMSDVDAQINYYESQIEANEELKKTKKIQENLADLATVDFDSLEFREKQQYLKSLISKIYIDGEQVTIEWL

SEQ ID NO: 7344 - protein, 452 aa, synthetic construct
MKAAIYIRVSTQEQVGNYSIQAQTEKLTALCRSKDWDVYDIFIDGGYSGSNMNRPALNEMLSKLHEIDAVVVYRLDRLSRSQRDTTTLIEEYFLKNNVEFVSLSETLDTSSPFGRAMIGILSVFAQLERETIRDRMVMGKIKRIEAGLPLTTAKGRTFGYDVIDTKLYINEEEARQLQLIYDIFEEEQSITFLQRRLKKLGFKVRTYNRYNNWLTNDLYCGYVSYKDEVHVKGIHEPIISEEQFYRVQEIFTRMGKNPNMNRDSASLLNNLVVCSKCGLGFVHRSKDTMSGGKKYHYRYYSCKTYKHTHELEKCGNKIWRADKLEELIINRVNNYSFAGRNVDKEDELDSLNEKLKIEHAKKKRLFDLYINGSYEVSELDSMMNDIDAQINYYESQIGANEELKKNKKVQENLADLATVDFDSLEFREKRLYLKSLINKIYIDGEQVTIEWL

SEQ ID NO: 7345 - protein, 452 aa, synthetic construct
MKAAIYIRVSTREQVENYSIQAQTEKLTALCRSKDWDVYDIFIDGGYSGSNMNRPALNEMLSKLHEIDAVVVYRLDRLSRSQRDTITLIEEFFLKNNVEFVSLSETLDTSSPFGRAMIGILSVFAQLERETIRDRMVMGKIKRTEAGLPLTTAKGRTFGYDVIDTKLYINEEEAKQLQLIYDIFEEEQSITLLQKRLKKLGFKVRTYNRYNDWLTNDLYCGYVSYKDKVHVKGIHEPIISEEQFYRVQGIFTRMGKNPNMNRDSASLLNNLVVCSKCGLGFVHRRKDTMSRGKKYHYRYYSCKTYKHIHELEKCGNKIWRADKLEELVINRVNSYSFASRNVDKEDELDSLNEKLKIEHAKKKRLFDLYINGSYNVSELDSMMNDIDAQISYYESQIEANEELKKNKKVQENLAELATVDFDSLEFREKQLYLKSLINKIYIDGEQVTIEWL

SEQ ID NO: 7346 - protein, 452 aa, synthetic construct
MKAAIYIRVSTQEQVGNYSIQAQTEKLTALCRSKDWDVYDIFIDGGYSGSNMNRPALNEMLSKLHEIDAVVVYRLDRLSRSQRDTTTLIEEYFLKNNVEFVSLSETLDTSSPFGRAMIGILSVFAQLERETIRDRMVMGKIKRIEAGLPLTTAKGRTFGYDVIDTKLYINEEEAKQLQLIYDIFEEEQSITFLQKRLKKLGFKVRTYNRYNNWLTNDLYCGYVSYKDKVHVKGIHEPIISEEQFYRVQEIFTRMGKNPNMNRDSASLLNNLVVCSKCGLGFVHRRKDTTSGGKKYHYRYYSCKTYKHTHELEKCGNKTWRADKLEELVINRVNNYSFASRNVDKEDELDSLNEKLKIEHAKKKRLFDLYINGSYEVSELDSIMNGIDAQINYYESQIEAKEELRKNKRIQENLADLATVDFDSLEFREKQLYLKSLINKIYIDGEQVTIEWL

SEQ ID NO: 7347 - protein, 469 aa, synthetic construct
MSYTTPVRAAVYLRISEDRSGEQLGVTRQREDCLNLCDQRKWVPVEYLDNDVSASTGKRRPAYEQMLADITAGKIAAVVAWDLDRLHRRPVELEAFMSLADEKRLALATVAGDVDLATPQGRLVARLKGSVAAHETEHKKARQRRAARQKAERGLPNWSKAFGYLPGPNGPEPDPRTAPLVKQAYADILAGASLGDVCRQWNGAGAFTITGRPWTTTTLSKFLRKPRNAGLRAYKGARYGPVDRDAIVGKAQWSPLVDEATFWAAQAVLDAPGRAPGRKSVRRHLLTGLAGCGKCGNHLAGSYRTDGRVVYVCKACHGIAILADNIEPILYHIVAERLAMPDAVELLRREFHDAAEADTIRLELETLYGELDRLAVERAEGLLTARQVKISTDIVNAKITKLQARQLDQDRLRVFDGIPLGTPQVAGTIAELSPDRFRAVLDVLAEVVVQPVGKSGRISSPERVQVNWR

SEQ ID NO: 7348 - protein, 452 aa, synthetic construct
MKAAIYIRVSTREQVENYSIQAQTEKLTALCRSKDWDVYDIFIDGGYSGSNMNRPALNEMLSKLHEIDAVVVYRLDRLSRSQRDTITLIEEYFLKNNVEFVSLSETLDTSSPFGRAMIGILSVFAQLERETIRDRMVMGKIKRIEAGLPLTTAKGRTFGYDVIDTKLYINEEEAKQLQLIYDIFEEEQSITFLQKRLKKLGFKVRTYNRYISWLTNDLYCGYVSYKDKVHVKGIHEPIISEEQFYRVQEIFTRMGKNPNMNRDSASLLNNLVVCSKCGLGFVHRRKDTMSRGKKYHYRYYSCKTYKHTHELEKCGNKIWRADKLEELIINRVINYSFASRNVDKEDGLDSLNEKLKIEHAKKKRLFDLYINGSYEVSELDCMMNDIDAQINYYESQIEANEELKKDKKIQESLANLATVDYDSLEFREKQLYLKSLINKIYIDDEQVTIEWL

SEQ ID NO: 7349 - protein, 452 aa, synthetic construct
MKAAIYIRVSTREQVENYSIQAQTEKLTALCRSKDWDVYDIFIDGGYSGSNMNRPALNEMLSKLHEIDAVVVYRLDRLSRSQRDTITLIEEYFLKNNVEFVSLSETLDTSSPFGRAMIGILSVFAQLERETIRDRMVMGKIKRIEAGLPLTTAKGRTFGYDVIDTKLYVNEEEAKQLQLIYDIFEEEQSITSLQKRLKKLGFKVRTYNRYNSWLTNDLYCGYVSYKDKVHVKGIHEPIISEEQFYRVQEIFTRMGKNPNINRDSASLLNNLVVCSKCGLGFVHRRKDTMSRGKKYHYRYYSCKTYKHTHELEKCGNKIWRADKLEELIINRVNNYSFASRNVDKEDELDSLNEKLKIEHAKKKRLFELYINGSYEVSELDSMMNDIDAQISYYESQIEANEELKKSKKIQENLADLATVDFDSLEFREKQLYLKSLINKIYIDGEQVTIDWL

SEQ ID NO: 7350 - protein, 485 aa, synthetic construct
MTKKVAIYTRVSTTSQAEEGFSIDEQIDRLTKYAEAMGWQVSDTYTDAGLSGAKLERPAMQRLINDIENRAFDTVLVYKLDRLSRSVRDTLYLVKDVFTKNKIDFISLNESIDTSSAMGSLFLTILSAINEFERENIKERMAMGKLGRAKSGKSMMWTKTAFGYYHNRKTDILEIVPLQATIVEQIFTDYLSGISLTKLRDKLNESGHIGKDIPWSYRTLRQTLDNPVYCGYIKFKGSLFEGMHKPIIPYETYLKVQKELEERQQQTYERNNNPRPFQAKYMLSGVARCGYCGAPLKIVLGHKRKDGSRTMKYHCANRFPRKTKGITVYNDDKKCDSGTYDLGDLENTVIDNLIGFQENNGSLLKVINGNNQPILDTSSLKKQISQIDKKIQKNSDLYLNDFITMDELKVRTDSLQAEKRLLKAKISENKFNDSADAFELVKTQLGSIPINELSYDNKKKIVNDLVSKVDVTADNVDIIFKFQLA

SEQ ID NO: 7351 - protein, 452 aa, synthetic construct
MKAAIYIRVSTQEQVGNYSIQAQTEKLTALCRSKDWDVYDIFIDGGYSGSNMNRPALNEMLSKLHEIDAVVVYRLDRLSRSQRDTTTLIEEYFLKNNVEFVSLSETLDTSSPFGRAMIGILSVFAQLERETIRDRMVMGKIKRIEAGLPLTTAKGRTFGYDVIDTKLYINEEEAKQLRLIYDIFEEEQSITFLQKRLKKLGFKVRTYNRYNSWLTNDLYCGYVSYKDKVHVKGIHEPIISEEQFYRVQEIFTRMGKNPNMNRDSASLLSNLVVCSKCGLGFVHRSKDTMSRGKKYHYRYYSCKTYKHTHELEKCGNKTWRADKLEELVINRVNNYSFANRNVDKEDVLDSLNEKLKIEHAKKKRLFDLYINGSYEVSELDSMMNDVDAQINYYESQIEANEELKKNKKILESLADLATVDFDSLEFREKQLYLKSLINKIYIDGEQVTIEWL

SEQ ID NO: 7352 - protein, 452 aa, synthetic construct
MKAAIYVRVSTREQVENYSIQAQTERLTALCRSKDWDVYDIFIDGGYSGSNMNRPALNEMLSKLHEIDAVVVYRLDRLSRSQRDTITLIEEYFLKNNVEFVSLSETLDTSSPFGRAMIGILSVFAQLERETIRDRMVMGKIKRIEAGLPLTTAKGRTFGYDVIDTKLYINEEEAKQLQLIYDIFEEEQSITSLQKRLKKLGFKVRTYSRYNNWLTNDLYCGYVSYKDKVHVKGIHEPIISEEQFYRVQEIFNRMGKNPNVNRDSASLLNNLVVCSKCGLGFVHRRKDTVSRGKKYHYRYYSCKTYKHIHELEKCGNKIWRADKLEELIINRVNNYSFASRNVDKEDELDSLNEKLKVEHAKRKRLFDLYINGSYEVSELDSMMNDIDAQINYYESQIEANEELRKNKKIQESLAGLATVDFDSLEFREKQLYLKGLINKIYIDGEQVTIEWL

SEQ ID NO: 7353 - protein, 452 aa, synthetic construct
MKAAMYIRVSTREQVENYSIQAQTERLTALCRSKGWDVYDIFIDGGYSGSNMNRPALNEMLSKLHEIDAVVVYRLDRLSRSQRDTITLIEEYFLKNNVEFVSLSETLDTSSPFGRAMIGILSVFAQLERETIRDRMVMGKIKRIEAGLPLTTAKGRTFGYDVIDTKLYINEEEAKQLRLIYDIFEEEQSITFLQRRLKRLGFKVRTYNRYHNWLTNDLYCGYVSYKDKVHVKGIHEPIISEEQFYRVQEIFTRMGKNPNMNRDSASLLNNLVVCSKCGLGFVHRRKDAMSRDKKYHYRYYSCKTYKHIHELEKCGNKIWRADKLEELIINRVNNYSVASRNVDREDELDSLNEKLKIEHAKRKRLFDLYINGSYEVSELDSMMSDIDAQINYYESRIEANEELRKNKKIQENLANLATVDFDSLEFREKQLYLKSLINKIYVDGEQVTIEWQ

SEQ ID NO: 7354 - protein, 469 aa, synthetic construct
MNHTTPVRAAVYLRISEDRSGEQLGVARQREDCLKLCDQRKWEPVEYLDNDVSASTGKRRPAYEQMLADITAGKIAAVVAWDLDRLHRRPIELEAFMSLADEKRLALATVAGDVDLATPQGRLVARLKGSVAAHETEHKKARQRRAARQKAERGHPNWSKAFGYLPGPNGPEPDPRTAPLVKQAYADILAGASLGDVCRQWNGAGAFTITGRPWTTTTLSKFLRKPRNAGLRAYRGARYGPVDRDAIVGKAQWSPLVDEATFWAAQAVLDAPGRAPGRKSVRRHLLTGLAGCGKCGNHLAGSYRTDGRVVYVCKACHGVAILADNIEPILYHIVAERLAMPDAVDLLRREIHDAAEAETIRLELETLYGELDRLAVERAEGLLTARQVKISTDIVNAKITKLQARQQDQERLRVLDGIPLGTPQVAGVVAELSPDRFRAVLDVLADVVVQPVGKSGRIFNPKRVQVNWR

SEQ ID NO: 7355 - protein, 469 aa, synthetic construct
MSYTTPVRAAVYLRISEDRSGEQLGVARQREDCLELCGQRKWVPVEYLDNDVSASTGKRRPAYEQMLADITAGRIAAVVAWDLDRLHRRPIELEAFMSLADEKRLALATVAGDVDLATPQGRLVARLKGCVAAHETEHKKARQRRAARQKAERGLPNWSKAFGYLPGPNGPEPDPRTAPLVKQAYADILAGASLGGVCRQWNDAGAFTITGRPWTTTTLSKFLRKPRNAGLRAYKGARYGPVDHDAIVGKAQWSPLVDEATFWAAQAVLDAPGRAPGRKSVRRHLLTGLAGCGKCGNHLAGSYRTDGQIVYVCKACHGVSILADNIEPILYHIVAERLAMPDAVDLLRCEIRDAAEAETIRLELEALYGELDRLAVERAEGLLTARQVKISTDIVNAKITKLQARQLDQERLRVFGGIPLGTPQVAGVIAELSPDRFRAVLDALAEVVVQPVGKGGRIFNPERVQVNWR

SEQ ID NO: 7356 - protein, 452 aa, synthetic construct
MKAAIYIRVSTQEQVENYSIQAQTEKLTALCCSKGWDVYDIFIDGGYSGSNMNRPALSEMLSKLHEIDAVVVYRLDRLSRSQRDTITLIEEYFLKNNVEFVSLSETLDTSSPFGRAMIGILSVFAQLERETIRDRMVMGKIKRIEAGLPLTTAKGRTFGYDVIDTKLYINEEEAKQLQLIYDIFEEEQSITFLQKRLKKLGFKVHTYNRYNNWLTNDLYCGYVSYKDKVHVKGIHEPIISEEQFYRVQEIFTRMGKNPNMNRDSASLLNNLVVCSKCGLSFVHRRKDTMSRGKKYHYRYYSCKTYKHIHELEKCGNKIWRADKLEELIINRVNNYSFAGRNVDKEDELDSLNEKLKIEHAKKKRLFDLYINGSYEVSELDSMMNDIDAQINYYESRIEANEELKKDKKIQESLANLATVDYDSLEFREKQLYLKSLINKIYIDGEQVTIEWL

SEQ ID NO: 7357 - protein, 485 aa, synthetic construct
MTKKVAIYTRVSTTNQAEEGFSIDEQIDRLTKYAEAMGWQVSDTYTDAGFSGAKLERPAMQRLINDIESKAFDTVLVYKLDRLSRSVRDTLYLVKDVFTKNKIDFISLNESIDTSSAMGSLFLTILSAINEFERENIKERMTMGKLGRAKSGKSMMWTKTAFGYYHNRKTGILEIVPLQATIVEQIFTDYLSGISLTKLRDKLNESGHIGKDIPWSYRTLRQTLDNPVYCGYIKFKGSLFEGMHKPIIPYETYRKVQKELEERQQQTYKRNNNPRPFQAKYMLSGMAHCGYCGAPLRIVLGHKRKDGSRIMRYHCANRFPRKTKGITVYNDNKKCDSGTYDLSDLENTVIGNLTGFQENNDSLLKIINGNNQPILDTSSFKKQISQIDRKIQRNSDLYLNDFITMGELKERTDSLQAEKKLLQAKISENKFNDSADVFELVKTQLGTIPINELSYDNKKKIVNNLVSKVDVTADNVDIVFKFQLT

SEQ ID NO: 7358 - protein, 485 aa, synthetic construct
MTKKVAIYTRVSTTNQAEEGFSIDEQIDRLTKYAEAMGWQVSDTYTDAGFSGAKLERPAMQRLINDIENKAFDTVLVYKLDRLSRSVRDTLYLVKDVFTENKIDFISLNECIDTSSAMGSLFLTILSAINEFERENIKERMTMGKLGRAKSGKSMMWTKTAFGYYHNRETGILEVVPLQATIVEQIFTDYLSGISLTKLRDKLNESGHIGKDIPWSYRTLRQTLDNPVYCGYIKFKDSLFEGMHKPIIPYETYLKVQKELEERQQQSYERNNNPRPFQAKYMLSGMARCGYCGAPLRIVLGHKRKDGSRTMKYHCANRFLRKTKGVTVYNDNKKCDSGTYDLSNLENAVIDNLIGFQENDDSLLKIINGNNQPILDTSSFKKRISQIDKKIQKNSDLYLNDFITMDELKDRTDSLQAEKKLLKARISENKFNDSTDVFELVKTQLGSIPINELSYEDKKKIVNNLVSKVDVTADNVDIIFKFQLA

SEQ ID NO: 7359 - protein, 452 aa, synthetic construct
MKAAIYIRVSTREQVENYSIQAQTEKLTALCRSKDWDVYDIFIDGGYSGSNMNRPALNEILSKLHEIDAVVVYRLDRLSRSQRDTITLIEEYFLKNNVEFVSLSETLDTSSPFGRAMIGILSVFAQLERETIRDRMVMGKIKRIEAGLPLTTAKGRTFGYDVIDSKLYINEEEAKQLQLIYDIFEEEQSITFLQKRLKKLGFKVRTYNRYSSWLTNDLYCGYVSYKDKVHVKGIHEPIISEEQFYRVQEIFARMGKNPNMNRDSASLLNNLVVCSKCGLGFVHRRKDTTSRGKKYHYRYYCCKTYKHTHELEKCGNKIWRADKLEELIINRVNNYSLARRNVDKEDELDSLNEKLKIEHAKKKRLFDLYINGSYEVSELDSMMNDIDAQISYYESQIEANEELKKDKKIQESLANLATVDYDSLEFREKQLYLKSLINKIYIDGEQVTIEWL

SEQ ID NO: 7360 - protein, 469 aa, synthetic construct
MSYITPVRAAVYLRISEDRSGEQLGVARQREDCLKLCSQRKWVPVEYLDNDVSASTGKRRPAYEQMLADITAGKIAAVVTWDLDRLHRRPVELEAFMSLADEKRLALATVAGDVDLATPQGRLVARLKGCVAAHETEHKKARQRRAARQKAERGLPNWSKAFGYLPGPNGPEPDPRTAPLVKQAYADILAGASLGDVCRQWNNAGAFTITGRPWTTTALSKFLRKPRNAGLRAYKGARYGPVDRDAIVGKAQWSPLVDEATFWAAQAVLDAPGRAPGRKSVRRHLLTGLAGCGKCGNHLAGSYRSDGRVVYVCKACHGVSILAVNIEPVLYHIVVERLAMPDAADLLRREIHDAAEAETIRLELETLYGELDRLAVERAEGLLTARQVKISTDIVNAKITKLQARQLDQERLRVFDGIPLGTPQVAGMIAELSPNRFRAVLDVLAEVVVQPVGKGGRIFNPERVQVNWR

SEQ ID NO: 7361 - protein, 469 aa, synthetic construct
MSYTTPVRAAVYLRISEDRSGEQLGVARQREDCLKLCDQRKWVPVEYLDNDVSASTGKRRPAYEQMLADITTGKIAAVVAWDLDRLHRRPIELEAFMSLADEKRLALATVAGDVDLATPQGRLVARLKGSVAAHETEHKKARQRRAARQKAERGHPNWSKAFGYLPGPNGPEPDPRTAPLVKQAYADILAGASLGDVCRQWNDAGAFTITGRPWTTTALSKFLRKPRNAGLRAYKGARYGPVDRDAIVGKAQWSPLVDEATFWAAQAVLDAPGRAPGRKSVRRHLLTGLAGCGKCGNHLAGSYRTGGRVVYVCKACHGVSILADNIEPILYHIVAERLAMPNAVNLLRREIHDAAEAETIRLELEALYGELDRLAVERAEGLLTARQVKISTDIVSAKITKLQARQLDQERLHVLDGIPLGTPQVAGMIAELSPDRFRAVLDVLAEVVVQPVGKGGRIFNPERVQVNWR

SEQ ID NO: 7362 - protein, 485 aa, synthetic construct
MTKKVAIYTRVSTTNQAEEGFSIDEQIDRLTKYAEAMGWQVSDTYTDAGFSGAKLERPAMQRLINDIENKAFDTVLVYKLDRLSRSVRDTLYLVKDVFTKNKIDFISLNESINTSSAMGSLFLTILSAINEFERENIKERMTMGKLGRAKSGKSMMWTKTAFGYYHNRKTGILEIVPLQATIVEQIFTDYLSGISLTKLRDKLNESGHIGKDIPWSYRTLRQTLDNPVYCGYIKFKDSLFEGMHKPIIPYETYLKVQKELEERQQQTYERNNNPRPFQAKYMLSGMARCGYCGAPLRIVLGHKRKDGSRTMKYHCANRFPRKTKGVTVYNDNKKCDSGTYDLSNLENTVIDNLIGFQEDNDNLLKIINGNNQPILDTSSFKKQISQIDKKIQKNSDLYLNDFITMDELKDRTDSLQAEKKLLKAKISESKFNDSTNVFELVKTQLGSIPINELSYDNKKKIVNNLVSKVDVTADNVDIIFKFQLT

SEQ ID NO: 7363 - protein, 485 aa, synthetic construct
MTKKVAIYTRVSTTNQAEEGFSIDEQIDRLTRYAEAMGWQVSDTYTDAGFSGAKLERPAMQRLINDIEDKAFDTVLVYKLDRLSRSVRDTLYLVKDVFTKNKIDFISLNESIDTSSAMGSLFLTILSAINEFERENIKERMTMGKLGRAKSGKSMMWTKTAFGYYHNRKTGILEIVPLQATIVEQIFTDYLSGISLTKLRDKLNESGHIGKDIPWSYRTLRQTLDNPVYCGYIKFKDSLYEGMHKPIISYETYLKVQKELEERQQQTYERNNNPRPFQAKYMLSGMARCGYCGAPLRIVLGHKRKDGSRTMKYHCANRFPRKTKGITVYNDNKKCDSGTYDLSNLENTVIDNLIGFQENDDSLLEIINGNNQPILGTSSFEKQISQIDKKIQKNSDLYLNDFITMDELKDRTDSLQAEKKLLIAKISENKSNDSTDVFELVKTQLGSIPINELSYDSKKKIVNNLVSKVDVTADNVNIIFKFQLA

SEQ ID NO: 7364 - protein, 452 aa, synthetic construct
MKAAIYIRVSTREQVENYSIQAQTEKLTALCRSKDWDVYDIFIDGGYSGSNMNRPALNEMLSKLHEIDAVVVYRLDRLSRSQRDTITLIEEYFLKNNVEFVSLSETLDTSSPFGRAMIGILSVFAQLERETIRDRMVMGKIKRVEAGLPLTTAKGRTFGYDVIDTKLYINGEEAKQLRLIYDIFEEEQSITFLQKRLKKLGFKVRTYSCYNSWLTNDLYCGYVSYKDKVHVKGIHEPIISEEQFYRVQEIFTRMGKNPNMNRDSASLLNNLVVCSKCGLGFVHRRKDTMSRGKKYHYRYYSCKTYKHTHELEKCGNKIWRADKLEELIIDRVNNYSFASHNADKEDELGSLNEKLKIEHAKKRRLFDLYINGSYEVSELDSMMNGIDAQINYYEGQIEAVEELKKNKKILENLADLATVDFDSLEFREKQLYLKSLINKIYIDGEQVTIEWL

SEQ ID NO: 7365 - protein, 452 aa, synthetic construct
MKAAIYIRVSTREQVENYSIQAQTEKLTALCRSKDWDVYDIFIDGGYSGSNMNRPALNEMLSKLHEIDAVVVYRLDRLSRSQRDTITLIEEYFLKNNVEFVSLSETLDTSSPFGRAMIGILSVFAQLERETIRDRMVMGKIKRIEAGLPLTTAKGRTFGYDVIDTKLYINEEEAKQLQLIYDIFEEERSITFLQKRLKELGFKVRTYNCYNNWLTNDLYCGYVSYKDKVHVRGIHEPIISEEQFYRVQEIFTRMGKNPNMNRDSASLLNNLVVCGKCGLGFVHRRKDAMGRGKKYHYRYYSCKTYKHIHELEKCGNKIWRADKLEELIINRVNNYSLAGRNVDKEDELDSLNEKLKIEHAKKKRLFDLYLNGSYEVSELDSMMNDIDAQINYYESQIEANEELKKNKKIQENLADLATVDFGSLEFREKQLYLKSLINKIYIDGEQVTIEWL

SEQ ID NO: 7366 - protein, 469 aa, synthetic construct
MSYTTPVRAAVYLRISEDRSGEQLGVARQREDCLKLCGQRKWVPVEYLDNDVSASTGKRRPAYEQMLADITAGKVAAVVAWDLDRLHRRPTELEAFMSLADEKRLALATVAGDVDLATPQGRLVARLKASVAAHETEHKKARQRRAARQKAERGYPNWSKAFGYLPGPNGPEPDPRTAPLVKQAYADILAGASLGDVCRQWNDAGAFTITGRPWTTTTLSKFLRKPRNAGLRAYKGARYGPVDRDAIVGKAQWSPLVDEATFWAAQAVLDAPGRAPGRKSVRRHLLTGLAGCGKCGNHLAGSYRTDGRVVYVCKACHGVAILADNIEPILYHIVAERLAMPDAAGLLRREIHDAAEAETIHLELETLYGELDRLAVERAEGLLTARQVKVSTDIVNTKITKLQARQLDQERLRVLDGIPLGTPQVAGTIAELSPDRFRAVLDVLAEVVVQPVGKSGRAFNPERVQVNWR

SEQ ID NO: 7367 - protein, 485 aa, synthetic construct
MTKKVAIYTRVSTTNQAEEGFSIDEQIDRLTKYAEAMGWQVSDTYTDAGFSGAKLVRPAMQRLINDIENKAFDTVLVYKLDRLSRSVRDTLYLVKDVFTKNKIDFISLNECIDTSSAMGSLFLTILSAINEFERENIKERMTMGKLGRAKSGKSMMWTKTAFGYYHNRKTGILEIVPLQATIVKQIFTDYLSGISLTKLRDKLNEGGHIGKDIPWSYRTLRQTLDNPVYCGYIKFKDSLFEGMHKPIIPYETYLKVQKELEERQQQTYERNNNPRPFQAKYMLSGMARCGYCGAPLRIVLGHKRKDGSRTMKYHCANRFPRKTKGVTVYNDNKKCDSGTYDLSNLENTVIDNLIGFQENSDSLLKIINGNNQPMLDASSFEKQISQIDKKIQKNSDLYLNDFITMDELKDRTDSLQAEKKLLKAKISENKSNDSTDVFELVKTQLGSIPINELSYDNKKKIVNNLVSKVDVTADNVDIIFKFQLA

SEQ ID NO: 7368 - protein, 452 aa, synthetic construct
MKAAIYIRVSTREQVENYSIQAQTEKLTALCRSKDWDVYDIFIDGGYSGSNMNRPALNEMLSKLHEIDAVVVYRLDRLSRSQRDTITLIEEYFLKNNVEFVSLSETLDTSSPFGRAMIGILSVFAQLERETIRDRMVMGKIKRIEAGLPLTTAKGRTFGYDVIDTKLYINEEEAKQLRLIYDIFEEEQSITSLQKRLKKLGFKVRTYSRYNSWLTNDLYCGYVSYKDKVHVKGIHEPIISEEQFYRVQEIFTRMGKNPNMNRDSASLLNNLVVCSKCGLGFVHRRKDTMSRGKKYHYRYYSCKTYKHTHELEKCGNKIWRADKLEELIINRVNNYSFASRNADKEDELDSLNEKLKIEHAKKKRLFDLYINGSYEVGELDSMMNDIDAQINYYESQIESNEELKKSKKIQENLADLATVDYDSLEFREKRLYLKSLINKIYIDGEQVTIEWL

SEQ ID NO: 7369 - protein, 452 aa, synthetic construct
MKAAIYIRVSTREQVENYSIQAQTEKLTALCRSKDWDVYDIFIDGGYSGSNMNRPALNEMLSKLHEIDAVVVYRLDRLSRSQRDTITLIEEYFLKNNVEFVSLSETLDTSSPFGRAMIGILSVFAQLERETIRDRMVMGKIKRVEAGLPLTTAKGRTFGYDVIDTKLYINEEEAKQLQLVYDIFEEEQSITFLQKRLKKLGFKVRTYNRYNNWLTNDLYCGYVSYKDKVHVKGIHEPIISEEQFYRVQEIFARMGKNPNMNRDSASLLSNLVVCSKCGLGFVHRRKDTMSRGKKYHYRYYSCKTYKHTHELEKCGNKIWRADKLEELIINRVNNYSFASRNVDKEDELDSLNEKLKIEHAKKKRLFDLYINGSYEVSELDSMMSDIDAQISYCESQIEANEELKKNKKVQESLANLATVDYDSLEFREKQLYLKSLINKIYIDGERVTIEWL

SEQ ID NO: 7370 - protein, 452 aa, synthetic construct
MKAAIYIRVSTREQVENYSIQAQTEKLTALCRSKDWDVYDIFIDGGYSGSNMNRPALNEMLSKLHEIDAVVVYRLDRLSRSQRDTITLIEEYFLKNNVEFVSLSETLDTSSPFGRAMIGILSVFAQLERETIRDRMVMGKIKRIEAGLPLTTAKGRTFGYDVIDTKLYINEEEAKQLQLIYDIFEEEQSITFLQKRLKELGFKVRTYNCYNNWLTNDLYCGYVSYKDKVHVKGVHEPIISEGQFYRVQEIFARMGKNPNMNRDSASLLNNLVVCSKCGLGFVHRRKDIMSRGKKYHYRYYSCKTYKHIHELEKCGNKIWRADKLEELIINRVNNYSLASRDVDKEDELDSLNEKLKTEHAKKKRLFDLYINGSYEVSELDSMMKGIDAQINYYESQIEANGELKRNKKIQENLAYLATVDYDCLEFREKQLYLKSLINKIYIDGEQVTIEWL

SEQ ID NO: 7371 - protein, 452 aa, synthetic construct
MKAAIYIRVSTREQVENYSIQAQTEKLTALCRSKDWDVYDVFIDGGYSGSNMNRPALNEMLSKLREIDAVVVYRLDRLSRSQRDTITLIEEYFLKNNVEFVSLSETLDTSSPFGRAMIGILSVFAQLERETIRDRMVMGKIKRIEAGLPLTTAKGRTFGYDVVDTKLYINEEEAKQLQLIYDIFEEEQSITFLQKRLKKLGFKVRSYNRYNNWLTNDLYCGYVSYKDKVHVKGIHEPIISEEQFYRVQEIFTRMGKNPNMNRDSASLLNNLVVCSKCGLGFVHRRKDAMSRDKKYHYRYYSCKTYKHIHELEKCGNKIWRADKLEELIINRVNNYSLASRNVDREDELGSLNEKLKIERAKKKRLFDLYISGSYEVSELDSMMSDIDAQINYYESQIEANEELKKNKKIQENLAHLATVDFDSLEFREKQLYLKSLINKIYIDGEQVTIEWL

SEQ ID NO: 7372 - protein, 485 aa, synthetic construct
MTKKVAIYTRVSTTNQAEEGFSIDEQIDRLTKYAEAMGWQVSDTYTDAGLSGAKLERPAMQRLINDIEDKAFDTVLVYKLDRLSRSVRDTLYLVKDVFTKNKIDFISLSESIDTSSAMGSLFLTILSAINEFERENIKERMTMGKLGRAKSGKSMMWTKTAFGYYHNRKTGILEIAPLQAAIVEQIFTDYLSGISLTKLRDKLNESGHIGKDIPWSYRTLRQILDNPVYCGYIKFKDSMFEGMHKPIIPYETYLKVQKELEERQQQTYERNNNPRPFQAKYMLSGMARCGYCGAPLKIVLGHKRKDGSRTMKYHCANRFPRKTKGVTVYNDNKKCDSGAYDLSNLENTVIDNLTGFQENNDSLLRIIDGNNQPILDTSSLKEQISQIDKKIRKNSDLYLNDFITMDELKDRTDSLQAEKKLLKAKISESKFNDSTDVFELVKTQLGSIPINELSYDNKKKIVNSLVSKVDVTADSVDIIFKFQLA

SEQ ID NO: 7373 - protein, 452 aa, synthetic construct
MKAAIYIRVSTREQVENYSIQAQTEKLTALCRSKDWDVYDTFIDGGYSGSNMDRPALNEMLSKLHEIDAVVVYRLDRLSRSQRDTITLIEEYFLKNNVEFVSLSETLDTSSPFGRAMIGILSVFAQLERETIRDRMVMGKIKRIEAGLPLTTAKGRTFGYDVIDTKLYINEEEARQLQLIYDIFEEEQSITFLQKRLKKLGFKVHTYNRYNNWLTNDLYCGYVSYKDKVHVKGIHEPIISEEQFYRVQEIFARMGKNPNMNRDSASLLNNLVVCGKCGLGFVHRRKDIMSRGKKYHYRYYSCKTYKHIHELEKCGNKIWRADKLEELIINRVNNYSLANRNVDKEDELDSLNEKLRTEHAKKKRLFDLYINGSYEVSELDSMMNDIDAQINYYESQIEANEELKRNKKIQENLAHLATVDFDNLEFREKQLYLKSLINKIYIDGEQVTIEWL

SEQ ID NO: 7374 - protein, 485 aa, synthetic construct
MTRKVAIYTRVSTTNQAEEGFSIDEQIDRLTKYAEAMGWQVSDTYTDAGFSGAKLERPAMQRLINDIEIKAFDTVLVYKLDRLSRSVRDTLYLVKDVFTKNKIDFISLNESIDTSSAMGSLFLTILSAINEFERENIKERMTMGKLGRAKSGKSMMWTRTAFGYYHNRKTGILEIVPLQATIVEQIFTDYLSGISLTKLRDKLNESGHIGKDIPWSYRTLRQTLGNPVYCGYIKFKDSLFEGMHKPIIPYETYLKVQKELEERQQQTYERNNNPRPFQAKYMLSGMARCGYCGAPLKIVLGHKRKDGSRTMKYHCANRSPRKTKGITVYNDNKKCDSGTYDLSNLENAVIDNLIGFQENNDSLLKIINGNNQPILDTSSFKKRISQIDKKIQKNSDLYLNDFITMDELKDRTDSLQAEKKLLKAKISENKFNDSTNVFELVKTQLGSIPINELSYDNKKKIVNNLVSKVDVTADNVDIIFKFQLV

SEQ ID NO: 7375 - protein, 452 aa, synthetic construct
MKAAIYIRVSTREQVENYSIQAQTEKLTALCRSKDWDVYDTFIDGGYSGSNMNRPALNEMLSKLHEIDAVVVYRLDRLSRSQRDTITLIEEYFLKNNVEFVSLSETLDTSSPFGRAMIGILSVFAQLERETIRDRMVMGKIKRIEAGLPLTTAKGRTFGYDVIDTKLYINEEEAKQLQLIYDIFEEERSITFLQKRLKKLGFKVHSYNRYNNWLTNDLYCGYVSYKDKVHVKGIHEPIISEEQFYRVQEIFTRMGKNPNMNRDSASLLNNLVVCGKCGLGFVHRRKDAISRDKKYHYRYYSCKTYKHIHELEKCGNKIWRADELEELIVNRVNNYSLASRNVDKEDELDSLNEKLKTEHAKKKRLFDLYINGSYEVSELDSMMNDIDAQIDYYESQIEANEELKRNKKIQENLANLATVDFDSLEFREKQLYLKSLINKIYIDGEQVTIEWL

SEQ ID NO: 7376 - protein, 485 aa, synthetic construct
MTRKVAIYTRVSTTNQAEEGFSIDEQIDRLTKYAEAMGWQVSDTYTDAGLSGAKLERPAMQRLINDIENKAFDTVLVYKLDRLSRSVRDTLYLVKDVFTKNKIDFISLNESIDTSSAMGSLFLTILSAINEFERENIKERMTMGKLGRAKSGKSMMWTKTAFGYYHNRKTGILEIVPLQATIVEQIFTDYLSGISLTKLRDKLNESGHIGKDIPWSYRTLRQTLDNPVYCGYIKFKDSLFEGMHKPIIPYETYLKVQKELGERQQQTYERNNNPRPFQAKYMLSGMARCGYCGAPLRIVLGHKRKDGSRTMKYHCANRFPRKTKGVTVYNDNKKCDSGTYDLCNLENTVIDNLVGFQEDNDSLLKIINSNSQPILDTSSLKEQISQIDKKIQKNSDLYLNDFITMDELKDRTDSLQAEKKLLKAKISENKFNDNADVFELVKTQLGSIPINELSYDDKKKIVNNLVSKVDVTADNVDIIFKFQLA

SEQ ID NO: 7377 - protein, 452 aa, synthetic construct
MKAAIYIRVSTREQVENYSIQAQTEKLTALCRSKDWDVYDIFIDGGYSGSNMNRPALNEMLSKLHEIDAVVVYRLDRLSRSQRDTITLIEEYFLKNNVEFVSLSETLDTSSPFGRAMIGILSVFAQLERETIRDRMVMGKIKRIEAGLPLTTAKGRTFGYDVIDTKLYINEEEAKQLQLIYDIFEEEQSITFLQKRLKELGFKVHTYNRYNNWLTNDLYCGYVSYKDKVHVKGIHEPIISEEQFYRVQEIFARMGKNPNMNRDSASLLNNLVVCSKCGLGFVHRRKDIMSRGKKYHYRYYSCKTYKHIHELEKCGNKIWRADKLEELIINRVDNYSITSRNADKEDELDSLSEKLKIEHAKKKRLFELYINGSYEVSELDSMMNDIDAQINYYEGQIGANEELRKNKKIQENLANLATVDFDSLEFREKQLYLKSLINKIYIDGEQVTIEWL

SEQ ID NO: 7378 - protein, 469 aa, synthetic construct
MSYTTPVRAAVYLRISEDRSGEQLGVARQREDCLKLCDQRKWVPVEYLDNDVSASTGKRRPAYEQMLADIAAGKIAAVVAWDLDRLHRRPVELEAFMSLADEKRLALATVAGDVDLATPQGRLVARLKGCVAAHETEHKKARQRRAARQKAERGLPNWSKAFGYLPGPNGPEPDPRTAPLVKQAYADILAGASLGDVCRQWNDAGAFTITGRPWTTTTLSKFLRKPRNAGLRAYKGARHGPVDRDAIVGKAQWSPLVDEATFWAAQAVLDAPGRAPGRKSVRRHLLTGLAGCGKCGNHLAGSYRTDGRVVYVCKSCHGVAILADNIEPILYHIVAERLAMPDAVDLLRREIHDAAEAETIRLGLETLYGELDRLAVERAEGLLTARQVKISTDIVSAKITKLQARQLDQERLRVLDGIPLGTPRVAGMIAELSPDRFRAVLGVLAEVVVQPVGKSGRIFSPERVQVNWR

SEQ ID NO: 7379 - protein, 485 aa, synthetic construct
MTKKVAIYTRVSTTNQAEEGFSIDEQIDRLTKYAEAMGWQVSDTYTDAGFSGAKLERPAMQRLINDIENKAFDTVLVYKLDRLSRSVRDTLYLVKDVFTKSKIDFISLNESIDTSSAMGSLFLTILSAINEFERENIKERMTMGKLGRAKSGKSMMWTKTAFGYYHNRKTGILEIVPLQATIVEQIFTDYLSGISLTKLRDKLNESGHIGKDIPWSYRTLRQTLDNPVYCGYIKFKDSLFEGMHKPIIPYETYLKVQKELEERQQQTYERNNNPRPFQAKYMLSGMARCGYCGAPLRIVLGHKRKDGSRTMKYHCANRFPRKTKGVTVYNDNKKCDSGTYDLSNLENTVIDNLIGFQEDNDSLLKIINGNNQPILDTSSFKKQISQIDKKIQKYSDLYLNDFITMDELKDRTDSLQAEKKLLKAKISENKFNDSTDVFELAKTQLGNIPINELSYDNKKKIVNNLVSKVDVTADNVDIIFKFQLA

SEQ ID NO: 7380 - protein, 485 aa, synthetic construct
MTKKVAIYTRVSTTNQAEEGFSIDEQIDRLTKYAEAMGWQVSDTYTDAGSSGAKLERPAMQRLINDIENKAFDTVLVYKLDRLSRSVRDTLYLVKDVFTKNKVDFISLNESIDTSSAMGSLFLTILSAINEFERENIKERMTMGKLGRAKSGKSMMWTKTAFGYYHNRKTGILEIVPPQATIVEQIFTDYLSGISLTKLRDKLNEGGHIGKDIPWSYRTLRQTLDNPVYCGYIKFKDSLFEGMHKPIIPYETYQKVQKELEERQQQTYERNNNPRPFQAKYMLSGMARCGYCGAPLRIVLGHKRKDGSRTMKYHCANRFPRKTKGVTVYNDNKKCDSGTYDLSNLENTVIDNLIGFQENNDSLLKIINGNNQPILDTSSFKEQISQIDKKIQKNSDLYLNDFITMDELKDRTDSLQVEKKLLIAKISENKFNDSTDVFELVRTQLGSIPINELSYENKKKIVNNLVSKVDVTADNVDIIFKFQLA

SEQ ID NO: 7381 - protein, 452 aa, synthetic construct
MKAAIYIRVSTQEQVENYSIQAQTEKLTALCRSKDWDVYDIFIDGGYSGSNMNRPALNEMLSKLHEIDAVVVYRLDRLSRSQRDTTTLIEEHFLKNNVEFVSLSETLDTSSPFGRAMIGILSVFAQLERETIRDRMVMGKIKRIEAGLPLTTAKGRTFGYDVIDTKLYINEEEAKQLQLIYDIFEEEQSITSLQKRLKKLGFKVRTYNRYNNWLTNDLYCGYVSYKDKVRVKGIHEPIISEEQFYRVQEIFTRMGKNPNMNRDSASLLSNLVVCSKCGLGFVHRSKDTMSRGKKYHYRYYSCKTYKHTHELEKCGNKTWRADKLEELIINRVNNYSFASRNVDKEDELDSLNERLKIEHAKKKRLFDLYINGSYEVSELDSMMNDIDAQINYYESQIEANEELRKNKKIQENLANLATVDFDSLEFREKQLYLKSLINKIYIDGEQVTIEWL

SEQ ID NO: 7382 - protein, 452 aa, synthetic construct
MKAAIYIRVSTREQVENYSIQAQTEKLTALCRSKDWDVYDIFIDGGYSGSNMDRPALNEMLSKLHEIDAVVVYRLDRLSRSQRDTITLIEEYFLKNNVEFVSLSETLDTSSPFGRAMIGILSVFAQLERETIRDRMVMGKIKRIEAGLPLTTAKGRTFGYDVIDTKLYINEEEAKQLQLIYDIFEEEQSITSLQKRLKKLGFKVRTYSRYNNWLTNDLYCGYVSYKDKVHVKGIHEPIISEEQFYRVQEIFTRMGKNPNMNRDSASLLNNLVVCSKCGLGFVHRRKDAKSRDKKYHYRYYSCKTYKHIHELEKCGNKIWRADKLEELIINRVNDYSVASRNVDKEDELDGLNEKLKIEHAKKKRLFDLYINGSYEVSELDTMMNDIDAQIDYYESQIGANEELRKNNKIQENLAYLATVDFDSLEFREKQLYLKSLINKIYIDGEQVTIEWL

SEQ ID NO: 7383 - protein, 485 aa, synthetic construct
MTRKVAIYTRVSTTNQAEEGFSIDEQIDRLTKYAEAMGWQVSDTYTDAGFSGAKLERPAMRRLINDIENKAFDTVLVYKLDRLSRSVRDTLYLVKDVFTKNKIDFISLSESIDTSSAMGSLFLTILSAINEFERENIKERMTMGKLGRAKSGKSMMWTKTAFGYYHNRKTGILEIVPLQAAIVEQIFTDYLSGISLTKLRDKLNEGGHIGKDIPWSYRTLRQTLDNPVYCGYIKFKDSLFEGMHEPIIPHETYLKVQKELEERQQQTYERNNNSRPFQAKYMLSGMARCGYCGAPLRIVLGHKRKDGSRTMKYHCANRFPRKTKGVTVYNDNKKCDSGAYDLSNLENTVIDNLIGFQENNDSLLKIISGNNQPIPDTSSFKKQISQIDKKIQKNSDLYLNDFITMDELKDRTDCLQAEKKLLKAKISENKFNDSTDVFELVKTQLGSIPINELSYDNKKKIVNNLVSKVDVTADNVDIIFKFQLA

SEQ ID NO: 7384 - protein, 452 aa, synthetic construct
MKAAIYIRVSTQEQVENYSIQAQTEKLTALCRSKDWDVYDIFIDGGYSGSNMNRPALNKMLSKLHEIDAVVVYRLDRLSRSQRDTTTLIEEYFLKNNVEFVSLSETLDTSSPFGRAMIGILGVFAQLERETIRDRMVMGKIKRIEAGLPLTTAKGRTFGYDVIDTKLYINEEEAKQLQLIYDIFEEEQSITSLQKRLKELGFKVRTYNRYNNWLTNDLYCGYVSYKDKVHVKGIHEPIISEEQFHRVQEIFTRMGKNPNMNRDSASLLSNLVVCSKCGLGFVHRSKDTMSRGKKYHYRYYSCKTYKHTHELEKCGNKTWRADKLEELIISRVNNYSFASRNVDKEDELDSLNEKLKTERAKKKRLFDLYINGSYEVSELDSMMNDIDAQINYYESQIEANEELGKNRKIQENLADLATGDFDGLEFRDKQLYLKSLINKIYIDGEQVTIEWL

SEQ ID NO: 7385 - protein, 452 aa, synthetic construct
MKAAIYIRVSTQEQVENYSIQAQTEKLTALCRSKDWDVYDIFVDGGYSGSNMNRPALNEMLSKLHEIDAVVVYRLDRLSRSQRDTTTLIEEYFLKNNVEFVSLSETLDTSSPFGRAMIGILSVFAQLERETIRDRMVMGKIKRIEAGLPLTTAKGRTFGYDVIDTKLYINEEEAKQLRLIYDVFEEEQSITSLQKRLKKLGFKVRTYNRYNNWLTNDLYCGYVSYKDKVHVKGIHEPIISEEQFYRVQEIFTRMGKNPNMNRDCASLLNNLVVCGKCGLGFVHRSKDTMSRGKKYHYRYYSCKTYKHTHELEKCGNKTWRADKLEELIINRVNNYSFASRDVDKEDELDGLNEKLKIEHAKKKRLFDLYINGSYVVSELDSMMNDIDAQINYYESQIEAKEELRKNKKIQENLADLATVDFDSLEFREKRLYLKSLISKIYIDGEQVTIEWL

SEQ ID NO: 7386 - protein, 469 aa, synthetic construct
MSYTTPVRAAVYLRISEDRSGEQLGVARQREDCLELCGQRKWVPVEYLDNDVSASTGKRRPAYEQMLADITAGKIAAVVAWDLDRLHRRPIELEAFMSLADEKRLALATVAGDVDLATPQGRLVARLKGSVAAHETEHKKARQRRAARQKAERGYPNWSKAFGYLPGPNGPEPDPRTAPLVRQAYADILAGASLGDVCRQWNDAGAFTITGRPWTTTALSKFLRKPRNAGLRAYKGARYGPVDRDAIVGKAQWSPLVDEATFWAAQAVLDAPGRAPGRKSVRRHLLTGLAGCGKCGNHLAGSYRTDGRVVYVCKACHGVVILADNIEPILYHIVAERLAMPDAVDLLRREIHDAAEAETIRLELETLYGELDRLAVERAEGLLTARQVKISTDIVNAKITKLQARQLDQERLRVFNGIPLGTPQVTGMIAELSPDRFRAVLDVLAEVVVQPVGKGGRILNPGRVQVNWR

SEQ ID NO: 7387 - protein, 485 aa, synthetic construct; identical to SEQ ID NO: 4029

SEQ ID NO: 7388 - protein, 452 aa, synthetic construct
MKAAIYIRVSTREQVENYSIQAQTEKLTALCRSKDWDVYDIFIDGGYSGSNMNRPALNEMLSKLHEIDAVVVYRLDRLSRSQRDTITLIEEYFLKNNVEFVSLSETLDTSSPFGRAMIGILSVFAQLERETIRDRMVMGKIKRIEAGLPLTTAKGRTFGYDVIDTKLYINKEEAKQLQLIYDIFEEEQSITFLQKRLKKLGFKVRTYNRYNNWLTNDLYCGYVSYKDKVHVKGIHEPIISEEQFYRVQEIFTRMGKNPNMNRDSASLLNNLVVCSKCGLGFVHRRKDIMSRGKKYHYRYYSCKTYKHIHELEKCGNKIWRADKLEELIINRVNNYSLASRNVGKEDELDSLNEKLKTEHAKKKRLFDLYINGSCEVSELDSMMNDIDAQINYYESQIEANEELKKNKKIQENLADLATVDFDSLEFREKQLYLKSLINKIYIDGEQVTIEWL

SEQ ID NO: 7389 - protein, 452 aa, synthetic construct
MKAAIYIRVSTREQVENYSIQAQTEKLTALCRSKDWDVYDIFIDGGYSGSNMNRPALNEMLSKLHEIDAVVVYRLDRLSRSQRDTITLIEEYFLKNNVEFVSLSETLDTSSPFGRAMIGILSVFAQLERETIRDRMVMGKIKRIEAGLPLTTAKGRTFGYDVIDTKLCINEEEAKQLQLIYDIFEEEQSITFLQKRLKKLGFKVRTYSCYSNWLTNDLYCGYVSYKDKVHVKGIHEPIISEEQFYRVQEIFTRMGKSPNMNRDSASLLNNLVVCCKCGLGFVHRRKDTVSRGKKYHYRYYSCKTYKHTHELEKCGNKIWRADKLEELVINRVNNYSFASRNVDKEDELNSLNEKLKIEHAKKKRLFDLYINGSYEVSVLDSMMNDIDAQINYYESQIEASEELKKNKKIQENLAGLATADFDSLEFREKQLYLKSLINKIYIDGEQVTIEWL

SEQ ID NO: 7390 - protein, 452 aa, synthetic construct
MKAAIYIRVSTREQVENYSIQAQTEKLTALCRSKDWDVYDIFIDGGYSGSNMNRPALNEMLSKLHEIDAVVVYRLDRLSRSQRDTITLIEEYFLKNNVEFVSLSETLDTSSPFGRAMIGILSVFAQLERETIRDRMVMGKIKRIEAGLPLTTAKGRTFGYDVIDTKLYINEEEAKQLRLIYDIFEEEQSITFLQKRLKKLGFKVRTYNCYNNWLTNDLYCGYVSYKDKVHVKGIHEPIISEEQFHRVQEIFARMGKNPNMNRDSASLLNNLVVCSKCGLGFVHRRKDATSRDKKYHYRYYSCKTYKHIHELEKCGNKIWRADELEELIINRVNDYSLASRNVDKEDELDSLNEKLKIEHAKKKRLFELYINGSYEVSELDSMMNDINAQINYYESQIEANEELKKNKKVQENLAYLATADFDSLEFREKQLYLKSLINKIYIDGEQVTIEWL

SEQ ID NO: 7391 - protein, 452 aa, synthetic construct
MKAAIYIRVSTQEQVGNYSIQAQTEKLTALCRSKDWDVYDIFVDGGYSGSNMNRPALNEMLSKLHEIDAVVVYRLDRLSRSQRDTTTLIEEYFLKNSVEFVSLSETLDTSSPFGRAMIGILSVFAQLERETIRDRMVMGKIKRIEAGLPLTTAKGRTFGYDVIDTKLYINEEEAKQLQLIYDIFEEEQSITFLQKRLKKLGFKVHAYNRYNNWLTNDLYCGYVSYKDKVHVKGIHEPIISEEQFYRVQEIFTRMGKNPNMSRDSASLLNNLVVCSKCGLGFVHRSKDTMNRGKKYHYRYYSCKTYKHTHELEKCGNKTWRADKLEELIINRVNNYSFAGRNVDKGDELDSLNEKLKIEHAKKKRLFDLYINGSYEVSELDSMMNDIDAQINYYESQIEASEELKKNKKIQENLADLATVDFDSLGFREKQLYLKSLINKIYIDGEQVTIEWL

SEQ ID NO: 7392 - protein, 485 aa, synthetic construct
MTKKVAIYTRVSTTNQAEEGFSIDEQIDRLTKYAEAMGWQVSDTYTDAGLSGAKLERPAMQRLINDIENKAFDTVLVYKLDRLSRSVRDTLYLVKDVFTKNKIDFISLNESIDTSSAMGSLFLTILSAINEFERENIKERMTMGKLGRAKSGKSMMWTKTAFGYYHNRETGILEIVPLQATIVEQIFTDYLSGISLTKLRDKLNESGHIGKDIPWSYRTLRQTLDNPVYCGYIKFKDSLFEGMHKPIIPYETYLKVQKELEERQQQAYERNNNPRPFQAKYMLSGMARCGYCGAPLRIVLGHKRKDGSRTMKYHCANRFPRKTKGVTVYNDNKKCNSGTYDLSSLENTVIDSLIGFQENNGSLLKIINGNNQPILDTSCIKKQISQIDKKIQKNSDLYLNDFITMDELKDRTDSLQAEKKLLKAKISENKSNDSTDVFELVKTQLGSIPINELSYDNKKKIVNNLVSKVDVTADNVDIIFKFQLA

SEQ ID NO: 7393 - protein, 452 aa, synthetic construct
MKAAIYIRVSTQEQVGNYSIQAQTEKLTALCRSKDWDVYDIFIDGGYSGSNMNRPALNEMLSKLHEIDAVVVYRLDRLSRSQRDTTTLIEEYFLKNNVEFVSLSETLDTSSPFGRAMIGILSVFAQLERETIRDRMVMGKIKRIEAGLPLTTAKGRTFGYDVIDTKLYINEEEAKQLQLIYDIFEEEQSITSLQKRLKKLGFRVRSYNRYNNWLTNDLYCGYVSYKDEVHVKGIHEPIISEEQFYRVQEIFTRMGKNPNMNRDSASLLNNLVVCSKCGLGFVHRSKDTMSRGKKYHYRYYSCKTYKHTHELEKCGNKTWRADKLEELIINRVNNYSFASRNVGKEDELDSLNEKLKIEHAKKKRLFDLYINGSYEVSELDSMMNGIDAQINYYESQIEANEELKRNKKIQENLADLATVDFDSLEFREKQLYLKSLINKIYIDGEQVTIEWL

SEQ ID NO: 7394 - protein, 452 aa, synthetic construct
MKAAIYIRVSTREQVENYSIQAQTEKLTALCRSKDWDVYDIFIDGGYSGSNMNRPALNEMLSKLHEIDAVVVYRLDRLSRSQRDTITLIEEYFLKNNVEFVSLSETLDTSSPFGRAMIGILSVFAQLERETIRDRMVMGKIKRIEAGLPLTTAKGRTFGYDVIDTKLYINEEEAKQLQLIYDIFEEEQSITFLQKRLKKLGFKVRTYNRYNNWLTNDLYCGYVSYKDKVHVKGIHEPIISEEQFYRVQEIFTRMGKNPNMNRDSASLLNSLVVCGKCGLGFVHRRKDIMSRGKKYHYRYYSCKTYKHIHELEKCGNKIWRADKLEELIINRVNNYSFAGRNADKEDELDSLKEKLKIEHAKKKRLFDLYINGSYEVSELDSMMNDIDAQINYYESQIEANEELKKNKKIQENLADLATVDFDSLEFREKQLYLKSLINKIYIDGEQVTIEWL

SEQ ID NO: 7395 - protein, 485 aa, synthetic construct
MTKKVAIYTRVSTTNQAEEGFSIDEQIDRLTKYAEAMGWQVSDTYTDAGFSGAKLERPAMQRLINDIENKAFDTVLVYKLDRLSRSVRDTLYLVKDVFTKNKIDFISLNESIDTSSAMGSLFLTILSAINEFERENVKERMTMGKLGRAKSGKSMMWTKTAFGYYHNRKTGILETVPLQATIVEQIFTDYLSGISLTKLRDKLNESGHIGKDIPWSYRTLRQTLDNPVYCGYIKFKGSLFEGMHKPIIPYETYLKVQKELEERQQQTYERNNNPRPFQAKYMLSGMARCGYCGAPLRIVLGHKRKDGSRTMKYHCTNRFPRKTKGITVYNDNKKCDSGTYDLSNLENTVIDNLIGFQENNDSLLKIINGNNQPILDTSSIEKQISQIDKKIQKNSDLYLNDLITMDELKDRTVSLQAEKKLLKAKISENKFNDSTDVFELVKTQLGIIPINELSYDNKKKIVNNLVSKVDVTADNVDIIFKFQLA

SEQ ID NO: 7396 - protein, 452 aa, synthetic construct
MKAAIYIRVSTREQVENYSIQAQTEKLTALCRSKDWDVYDIFIDGGYSGSNMNRPALNEMLSKLHEIDAVVVYRLDRLSRSQRDTITLIEEYFLKNNVEFVSLSETLDTSSPFGRAMIGILSVFAQLERETIRDRMVMGKIKRIEAGLPLTTAKGRTFGYDVIDTKLYINEEEAKQLQLIYDIFEEEQSITSLQKRLKKLGFKVRTYNRYNNWLTNDLYCGYVSYKDKVHVKGIHEPIISEEQFYRVQEIFTRMGKNPNMNRDCASLLNNLVVCSKCGLGFVHRRKDALSRDKKYHYRYYSCKTYKHIHELEKCGNKIWRADKLEELIINRVNNYSFASRNADKEDELVSLNEKLKVEHAKKKRLFDLYINGSYEVSELDSMMSDIDAQINYYESQIEANEELKKNKKIQENLAHLATVDFDSLEFREKQLYLKSLINKIYIDGEQVTIEWL

SEQ ID NO: 7397 - protein, 485 aa, synthetic construct
MTKKVAIYTRVSTTNQAEEGFSIDEQVDRLTKYAEAMGWQVSDTYTDAGVSGAKLERPAMQRLINDIENKAFDTVLVYKLDRLSRSVRDTLYLVKDVFTKNKIDFISLNESIDTSSAMGSLFLTILSAINEFERENIKERMTMGKLGRAKSGKSMMWTKTAFGYYHNRKTGILEIVPLQATIVEQIFTDYLSGISLTKLRDKLNESGHIGKDIPWSYRTLRQTLDNPVYCGYIKFKDSLFEGMHKPIISYETYLKVQKELEERQQQTYERNNNPRPFQAKYMLSGMARCGYCGAPLRIMLGHKRKDGSRTMKYHCANRFPRKTKGVAVYNDNKKCDSGTYDLSNLENTVIDNLIGFQENNDSLLKIINGNSQPILDTSSFKKQISQIDKKIQRISDLYLNDFITMDELKDRTDSLQAEKKLLKAKISENKFNDSTDVFELVKTQLGSIPINELSYDNKKKIVNNLVSKVDVTADNVDIIFKFQLA

SEQ ID NO: 7398 - protein, 452 aa, synthetic construct
MKAAIYIRVSTQEQVENYSIQAQTEKLTALCHSKDWDVYDIFVDGGYSGSNMNRPALNEMLSKLHEIDAVVVYRLDRLSRSQRDTITLVEEYFLKNNVEFVSLSETLDTSSPFGRAMIGILSVFAQLERETIRDRMVMGKIKRIEAGLPLTTAKGRTFGYDVIDTKLYINEEEAKQLRLIYDIFEEEQSITFLQKRLKKLGFKVCTYSRYNSWLTNDLYCGYVSYKDKVHVKGIHEPIISEEQFYRVQEIFTRMGKNPNMNRDSASLLNNLVVCSKCGLGFVHRRKDTKSRGKKYHYRYYSCKTYKHIHELEKCGNKIWRADKLEELIINRVNNYSFASRNMDKEDELGSLNEKLKVEHAKKKRLFDLYINGSYEVSELDSMMNDIDAQINYYKSQIEANEELEKNKKIQENLADLATVDFDSLEFREKQLYLKSLINRIYIDGEQVTIEWL

SEQ ID NO: 7399 - protein, 452 aa, synthetic construct
MKAAIYIRVSTREQVENYSIQAQTEKLTALCRSKGWDVYDIFIDGGYSGSNMNRPALNEMLGKLHEIDAVVVYRLDRLSRSQRDTITLIEEYFLKNNVEFVSLSETLDTSSPFGRAMIGILSVFAQLERETIRDRMVMGKIKRIEAGLPLTTAKGRTFGYDVIDTKLYINEEEAKQLQLIYDIFEEEQSITFLQKRLKKLGFKVRSYNRYNNWLTNDLYCGYVSYKDKVHVKGIHEPIISEEQFYRVQEIFTRMGKNPNMNRDSASLLNNLVVCSKCGLGFVHRRKDAMSRDKKYHYRYYSCKTYKHIHELEKCGNKIWRADKLEELIINRVNNYSLASRNVDKEDELDSLSEKLKIEHAKKKRLFDLYVNGSYEVSELDSMMNDIDAQINYYESQIEANEELKKNKKIQENLAYLATVDFDSLEFREKRLYLKSLISKIYIDGEQVTIEWL

SEQ ID NO: 7400 - protein, 452 aa, synthetic construct
MKAAIYIRVSTQEQVGNYSIQAQTEKLTALCRSKGWDVYDIFIDGGYSGSNMNRPALNEMLSKLHEIDAVVVYRLDRLSRSQRDTTTLIEEYFLKNNVEFVSLSETLDTSSPFGRAMIGILSVFAQLERETIRDRMVMGKIKRIEAGLPLTTAKGRTFGYDVIDTKLYINEEEARQLRLIYDIFEEEQSITSLQKRLKKLGFKVRTYNRYNNWLTNDLYCGYVSYKDKVHVKGIHEPIISEEQFYRVQEIFTRTGKNPNMNRDSASLLNNLVVCSKCGLGYVHRSKDTMSRGKKYHYRYYSCKTHKHAHELEKCGNKTWRADKLEELIINRVNNYSFASRDVDKEDELDSLNEKLEIEHAKKRRLFDLYINGSYEVSELDSMMNDIDAQINYYESQIEANEKLKKNEKIQENLADLATVDFDSLEFREKQLYLKSLINKIYIDGEQVTIEWL

SEQ ID NO: 7401 - protein, 452 aa, synthetic construct
MKAAIYIRVSTREQVENYSIQAQTEKLTALCRSKDWDVYDIFIDGGYSGSNLNRPALNEMLSKLHEIDAVVVYRLDRLSRSQRDTITLIEEYFLKNNVEFVSLSETLDTSSPFGRAMIGILSVFAQLERETIRDRMVMGKIKRIEAGLPLTTAKGRTFGYDVIDTKLYINEEEAKQLQLIYDIFEEEQSITFLQKRLKKQGFKVRTYNCYNSWLTNDLYCGYVSYKDKVHVKGIHEPIISEEQFYRVQEIFTRMGKNPNMNRDSASLLNNLVVCSKCGLGFVHRRKDIVSRGKKYHYRYYSCKTYKHIHELEKCGNKIWRADILEELIINRVNNYSLASRNVDKENELDSLNEKLKIEHAKKKRLFDLYINGSYEVSELDSMMSNIDAQINYYESRIEANEELRKNKKTQENLADLATVDFDSLEFREKQLYLKSLINKIYIDGEQVTIEWL

SEQ ID NO: 7402 - protein, 485 aa, synthetic construct
MTKKVAIYTRVSTTNQAEEGFSIDEQIDRLTKYAEAMGWRVSDTYTDAGSSGAKLERPAMQRLINDIENKAFDTVLVYKLDRLSRSVRDTLYLVKDVFTKNKIDFISLNESIDTSSAMGSLFLTILSAINEFERENIKERMTMGKLGRAKSGKSMMWTKTAFGYYHNRKTGILEIVPLQATIVEQIFTDYLSGISLTKLRDKLNESGHIGKDIPWSYRTLRQTLDNPVYCGYIKFKGSLFEGMHKPIIPYETYLKVQKELEERQQQTYERNNNPRPFQAKYMLSGMARCGYCGAPLRIVLGHKRKDGSRTMKYHCANRFPGKTRGVTVYNDNKKCDSGTYDLSNLENTVIDNLIGFQENNDSLLKIINGNNQPILDTSSFKKQISQIDKKIQKNSDLYLNDFITMDELRDRTDSLQAEKKLLEAKISENKFNDSTDVFELVKTQLGSIPINELSYDNKKKIVNNLVSKVDVTADNVDIIFKFQLA

SEQ ID NO: 7403 - protein, 469 aa, synthetic construct
MSYTTPVRAAVYLRISEDRSGEQLGVARQREDCLKLCDQRKWVPVEYLDNDVSASTGKRRPAYEQMLADITAGKIAAVVAWDLDRLHRRPIELEVFMSLADEKRLALATVAGDVDLATPQGRLVARLKGSVAAHETEHKKARQRRAARQKAERGHPNWSKAFGYLPGPNGPEPDPRTAPLVKQAYADILAGASLGDVCRQWNDAGAFTITGRPWTTTTLSKFLRKPRNAGLRAYKGARHGPVDRDAIVGKAQWSPLVDEATFWAAQAVLDAPGRAPGRKSVRRHLLTGLAGCGKCGNHLAGSYRTDGRVVYVCKACHGVAILADNIEPILYHTVAERLAMPDAVDLLRREIHDAAEAETIRLELETLYGELDRLAVERAEGLLTARQVKISTDIVNAKITRLQARQLDQERLRVFDGIPLGTPQVAGMIAELSPNRFRAVLDVLAEVVVQPVGKSGRIFNPERVQVNWR

SEQ ID NO: 7404 - protein, 452 aa, synthetic construct
MKAAIYIRVSTREQVENYSIQAQTEKLTALCRSKDWDVYDIFVDGGYSGSNMNRPALNEMLSKLHEIDAVVVYRLDRLSRSQRDTITLIEEYFLKNNVEFVSLSETLDTSSPFGRAMIGILSVFAQLERDTIRDRMVMGKIKRIEAGLPLTTAKGRTFGYDVIDTKLYINEEEAKQLQLIYDIFEEEQSITFLQKRLKKLGFKVRTYSCYNNWLTNDLYCGYVSYKDKVHVKGIHEPIISEEQFYRVQEIFTRMGKNPNMNRDSASLLSNLVVCSRCGLGFVHRRKDTTSRGKKYHYRYYSCKTYKHTHELEKCGNKIWRADKLEELIINRVNNYSLASRNVDEEDELDSLSEKLKVEHAKKKRLFDLYINGSYEVSELDSMMNDIDAQINYYESQIEASEELKRNKKIQESLANQATVDYDSLEFREKQLYLKSLINKIYIDGEQVTIEWL

SEQ ID NO: 7405 - protein, 485 aa, synthetic construct
MTKKVAIYTRVSTTNQAEEGFSIDEQIDRLTKYAEAMGWQVSDTYTDAGFSGAKLKRPAMQRLINDIENKAFDTVLVYKLDRLSRSVRDTLYLVKDVFTKNKIDFISLNECIDTSSAMGSLFLTILSAINEFERENIKERMTMGKLGRAKSGKSMMWTKTAFGYYHNRKTGILEIVPLQATIVEQIFTDYLSGISLTKLRDKLNESGHIGKDIPWSYRTLRQTLDNPVYCGYIKFKDSLFEGMHKPIIPYETYLKVQKELEERQQQTYERNNNPRPFQAKYMLSGMARCGYCGAPLKVVLGRKRKDGSRTMKYHCANRFPRKTKGITVYNDNKKCDSGTYDLSNLENTVIDNLIGFQENDDSLLKVINGNNQPVLDTSSFKEQISQIDKKIQKNSDLYLNDLITMDELKDRTDSLQAEKKLLKAKISGNKFNDSTGVFELVKTQLGSIPINELSYDNKKKIVNNLVSKVDVTADNVDIIFKFQLA

SEQ ID NO: 7406 - protein, 452 aa, synthetic construct
MKAAIYIRVSTREQVENYSIQAQTEKLTALCRSKDWDVYDIFIDGGYSGSNMNRPALNEMLSKLHEIDAVVVYRLDRLSRSQRDTITLIEEYFLKNNVEFVSLSETLDTSSPFGRAMIGILSVFAQLERETIRDRMVMGKIKRIEAGLPLTTAKGRTFGYDVIDTKLYVNEEEAKQLRLIYDIFEEEQSITFLQKRLKKLGFKVRTYNRYNNWLTNDLYCGYVSYKDKVHVKGIHEPIISEEQFYRVQEIFTRMGKNPNMNRDSASLLNNLVVCSRCGLSFVHRRKDAMGRDKKYHYRYYSCKTYKHIHELEKCGNKIWRADKLEELVINRVNNYSFASRNVDKEDELDSLNEKLKIEHAKKKRLFDLYINGSYEVSELDSMMNDIDAQINYYESQIEANEELRKNKKIQEDLAVLATVDFDSLEFREKQLYLKSLINKIYIDGEQVAIEWL

SEQ ID NO: 7407 - protein, 485 aa, synthetic construct
MTKKVAIYTRVSTTNQAEEGFSIDEQIDRLTKYAEAMGWQVSDTYTDAGLSGAKLERPAMQRLINDIENKAFDTVLVYKLDRLSRSVRDTLYLVKDVFTKNKIDFISLNESIDTSSAMGSLFLTILSAINEFERENIKERMAMGKLGRAKSGKSMMWTKTAFGYYHNRKTGILEIVPLQATIVEQIFTDYLSGISLTKLRDKLNESGHIGKDIPWSYRTLRQTLDNPVYCGYIKFKDSLFEGMHKPIIPYETYLKVQKELEERQQQTYERNNNPRPFQAKYMLSGMARCGYCGAPLRIVLGHKRKDGSRTMKYHCANRFPRKTKGITVYNDNKKCDSGTYDLSYLENTVIDNLIGFQENNDSLLKTINGNNQPILDISSFKKQISQIDKKIQKNSDLYLNDFITMDELKDRTDSLQAEKRLLKAKISENKFNDGTDVFELVKTQLGSIPINELSYDNKKKIVNNLVSKVAVTADNVDIIFKFQLA

SEQ ID NO: 7408 - protein, 485 aa, synthetic construct
MTKKVAIYTRVSTTNQAEEGFSIDEQVDRLTKYAEAMGWQVSDTYTDAGFSGAKLERPAMQRLINDIENEAFDTVLVYKLDRLSRSVRDTLYLVKEVFTKNKIDFISLNESIDTSSAMGSLFLTILSAINEFERENIKERMTMGKLGRAKSGKSMMWTKTAFGYYHNRKTGILEIVPQQATIVEQIFTDYLSGISLTKLRDKLNESGHIGKDIPWSYRTLRQTLDNPVYCGYIKFKDSLFEGMHKPIIPYETYLKVQKELEKRQQQTYERNNNPRPFQAKYMLSGIARCGYCGAPLRIVLGHKRKDGSRTMKYHCANRFPRKTKGVTVYNDNRKCDSGTYDLSNLENTVIGNLIGFQENDDSLLKIINGNNQPILDTSSFKKQISQIDKKIQKNSDLYLNDFITMEELKDRTDSLQAEKKLLKAKISENKFNDSTDVFELVKTQLGSIPINELSYDNKKKIVNNLVSKVDVTADNVGIIFKFQLA

SEQ ID NO: 7409 - protein, 452 aa, synthetic construct
MKAAIYIRVSTQEQVGNYSIQAQTEKLTALCRSKDWDVYDIFVDGGYSGSNMNRPALNEMLSKLHEIDAVVVYRLDRLSRSQRDTTTLIEEYFLKNNVEFVSLSETLDTSSPFGRAMIGILSVFAQLERETIRDRMVMGKIKRIEAGLPLTTAKGRTFGYDVIDTKLYINEEEAKQLQLIYDIFEEEQSITSLQKRLKKLGFKVRTYNRYNNWLTNDLYCGYVSYKDKVHVKGIHEPIISEEQFYRVQEIFTRMGKKPNMNRDSASLLNNLVVCSKCGLGFVHRSKDTMSRGKKYHYRYYSCKTYKHTHELEKCGNKIWRADKLEELIINRVNNYSFASRNVDREDELGSLNEKLKIEHAKRKRLFDLYINGSYEVSALDSMMNDIDAQINYYESQIEANEELKKNKKIQENLADLATVDFDSLEFREKQLYLKSLINKIYIDGEQVTIEWL

SEQ ID NO: 7410 - protein, 452 aa, synthetic construct
MKAAIYIRVSTQEQVENYSIQAQTEKLTALCRSKDWDVYDIFVDGGYSGSNMNRPALNEMLSKLHEIDAVVVYRLDRLSRSQRDTTTLIEEYFLKNNVEFVSLSETLDTSSPFGRAMIGILSVFAQLERETIRDRMVMGKIKRIEAGLPLTTAKGRTFGYDVIDTKLYINEEEAKQLRLIYDIFEEEQSITSLQKRLKKLGFKVRTYNRYNSWLTNDLYCGYVSYKDKVHVKGIHEPIISEEQFYRVQEIFTRMGKNPNMNRDSASLLNNLVVCSKCGLSFVHRSKDTTSRGKKYHYRYYSCKTYKHTHELEKCGNKTWRADKLEELIINRVNNYSFASRNADKEDELDSLNEKLKIEHAKKKRLFDLYINGSYEVGELDNMMNDIDAQINYYESQIEANEELRRNKKIQESLADLATVDFDSLEFREKQLYLRSLINKIYIDGEQVTIEWL

SEQ ID NO: 7411 - protein, 452 aa, synthetic construct
MKAAIYIRVSTREQVENYSIQAQTEKLTALCRSKDWDVYDIFIDGGYSGSNMNRPALNEMLSKLHEIDAVVVYRLDRLSRSQRDTITLIEEYFLRNNVEFVSLSETLDTSSPFGRAMIGILSVFAQLERETIRDRMVMGKIKRIEAGLPLTTAKGRTFGYDVIDTKLYINEEEAKQLQLIYDIFEEEQSITFLQRRLKKLGYEVRTYNRYNNWLTNDLYCGYVSYKDKVHVKGIHEPIISEEQFYRVQEIFTRMGKNPNMNRDSASLLNNLVVCSKCGLGFVHRRKDIMSRGKKYHYRYYSCKTYKHIHELEKCGNKIWRADKLEELVINRVNNYSLAGRNVDKEDELDSLNEKLKIEHAKKKRLFDLYINGSYEVSELDSMMSDIDAQINCYESQIEANEELKKNKKIQENLADLATVDFDSLEFREKQLYLKSLINKIYIDGEQVTIEWL

SEQ ID NO: 7412 - protein, 469 aa, synthetic construct
MSYTTTVRAAVYLRISEDRSGEQLGVARQREDCLKLCDKRKWVPVEYLDNDVSASTGKRRPAYEQMLADITAGKIAAVVAWDLDRLHRRPIELEAFMCLADEKRLALATVAGDVDLATPQGRLVARLKGSVAAHETEHKKARQRRAARQKAERGLPNWSKAFGYLPGPNGPEPDPRTAPLVKQAYADILAGASLGDVCRQWNDAGAFTITGRPWTTTTLSKFLRKPRNAGLRAYKGARYGPVDRDAIVGKARWSPLVDEATFWAAQAVLDAPGRAPGRKSVRRHLLTALAGCGKCGNHLAGSYRTDGRVVYVCKACHGVAILADHIEPILYRIVAERLAMPDAVGLLRREIHDTAEAETIRLELETLHGELDRLAVERAEGLLTARQVKISTDIVNAKITKLQARQLDQERLRVFEGIPLGTPQVAGMIAELSPDRFRAVLDVLAEVVVQPVGKGGRIFNPERVQVNWR

SEQ ID NO: 7413 - protein, 452 aa, synthetic construct
MKAAIYIRVSTQEQVGNYSIQAQTEKLTALCRSKDWDVYDIFIDGGYSGSNLNRPALNEMLSKLHEIDAVVVYRLDRLSRSQRDTTTLIEEYFLKNNVEFVSLSETLDTSSPFGRAMIGILSVFAQLERETIRDRMVMGKIKRIEAGLPLTTAKGRTFGYDVIDTKLYINEEEAKQLRLVYDIFEEEQSITSLQKRLKKLGFRVRTYNRYNNWLTNDLYCGYVSYKDKVHVKGIHEPIISEEQFYRVQEIFTRTGKNPNMNRNSASLLNNLVVCSKCGLGFVHRSKDTMSRGKKYHYRYYSCKTYKHTHELEKCGNKTWRADKLEELIINRVNNYSFASRNVDKEDELDGLNEKLKIEHAKKKRLFDLYINGSYEVSELDSMMNDIDAQISYYESQIVASEELRKNKKTQENLADLATVDFDSLEFREKQLYLKSLINKIYIDGEQVTIDWL

SEQ ID NO: 7414 - protein, 452 aa, synthetic construct
MKAAIYIRVSTREQVENYSIQAQTEKLTALCRSKDWDVYDIFIDGGYSGSNMNRPALNEMLSKLHEIDAVVVYRLDRLSRSQRDTITLIEEYFLKNSVEFVSLSETLDTSSPFGRAMIGILSVFAQLERETIRDRMVMGKIKRIEAGLPLTTAKGRTFGYDVIDTKLYINEEEAKQLQLIYDIFEEEQSITFLQKRLKKLGFKVHTYNRYHNWLTNDLYCGYVSYKDKVHVKGIHEPIISEEQFYRVQEIFTRMGKNPNVNRDSASLLNNLVVCSKCGLGFVHRRKDTMSRGKKYHYRYYSCKTYKHIHELEKCGNKIWRADKLEELIINRVNNYSFASRNVDKEDELDSLNEKLKAEHAKKKRLFDLYINGSYEVSELDSMMNDIDAQISYYESRIEANEGLKKDKKIQENLANLATMDYDSLEFREKQLYLKSLINKIYIDGEQVTIEWL

SEQ ID NO: 7415 - protein, 452 aa, synthetic construct
MKAAIYIRVSTREQVENYSIQAQTEKLTALCRSKDWDVYDIFIDGGYSGSNMNRPALNEMLSKLHEIDAVVVYRLDRLSRSQRDTITLIEEYFLKNNVEFVSLSETLDTSSPFGRAMIGILSVFAQLERETIRDRMVMGKIKRIEAGLPLTTAKGRTFGYDVIDTKLYINEEEAKQLQLIYDIFEEEQSITFLQKRLKKLGFKVRTYSCYSSWLTNDLYCGYVSYKDKVHVKGVHEPIISEEQFYRVQETFARMGKNPNMNRDSASLLNNLVVCSKCGLGFVHRRKDTVSRGKKYHYRYYSCKTYKHIHELEKCGNKIWRADKLEELIIDRVNNYSFASRNVDKEDELDSLNEKLKIEHAKRKRLFDLYISGGYEVSELDSMVNDIDAQISYYESQIEANGELKKDEKIQENLANLATVDFDSLEFREKQLYLKSLINKIYIDGEQVTIEWL

SEQ ID NO: 7416 - protein, 485 aa, synthetic construct
MTKKVAIYTRVSTTNQAEEGFSIDEQIDRLTKYAEAMGWQVCDTYTDAGLSGAKLERPAMQRLINDIENKAFDTVLVYKLDRLSRSVRDTLYLVKDVFTKNKIDFISLNESINTSSAMGSLFLTILSAINEFERENIKERMTMGKLGRAKSGKSMMWTKTAFGYYHNRKTGILEIVPLQATIVEQIFTDYLSGISLTKLRDKLNESGHIGKDIPWSYRTLRQTLDNPVYCGYIKFKDSLFEGMHKPIISYETYLKVQKELEERQQQTYERNNNPRPFQAKYMLSGMARCGYCGAPLRIVLGHKRKDGSRTMKYHCANRFPRKTKGVTVYNDNIKCDSGTYDLSDLENTVIDNLIGFQEDNDSLLSLINGNNQPILDTSSLKKQISQIDKKIQKNSDLYLNDLITMDELKDRTDSLQAEKKLLKAKISENKFNDSTDVFELVKTQLGSIPINELSYDNKKKIVNDLVSKVDVTADNVDIVFKFQLA

SEQ ID NO: 7417 - protein, 452 aa, synthetic construct
MKAAIYIRVSTQEQVGNYSIQAQTEKLTALCRSKDWDVYDIFIDGGYSGSNMNRPALNEMLSKLHEIDAVVVYRLDRLSRSQRDTTTLIEEYFLKNNVEFVSLSETLDTSSPFGRAMIGILSVFAQLERETIRDRMVMGKIKRIEAGLPLTTAKGRTFGYDVIDTKLYINEEEAKQLQLIYDIFEEEQSITSLQKRLKKLGFKVRTYNRYNNWLTNDLYCGYVSYKDKVHVKGIHEPIISEEQFHRVQEIFARMGKNPNMNRDNASLLSNLVVCSKCGLGFVHRSKDTISRGKKYHYRYYSCKTYKHTHELEKCGNKTWRADKLEELIINRVNSYSFASRNADKEGELDSLNEKLKIEHARKKRLFDLYINGSCEVSELDSMMSDIDAQINYYERQIEANEELRRSKKIQENLADLATVDFDSLEFREKQLYLKSLINKIYIDGEQVTIEWL

SEQ ID NO: 7418 - protein, 485 aa, synthetic construct
MTKKVAIYTRVSTTNQAEEGFSIDEQIDRLTKYAEAMGWQVSDTYTDAGYSGAKLERPAMRRLINDIENKAFDAVLVYKLDRLSRSVRDTLYLAKEVFTKNKIDFISLNESIDTSSAMGSLFLTILSAINEFERENIKERMTMGKLGRAKSGKSMMWTKTAFGYYHNRKTGILEIVPLQATIVEQIFTDYLSGISLTKLRDKLNGSGHIGKDIPWSYRTLRQTLDNPVYCGYIKFKDSLFKGMHKPIIPYETYLKVQKELEERQQQAYERNNNPRPFQARYMLSGTARCGYCGAPLKIVLGHKRKDGSRTMKYHCANRFPRKTKGVTVYNDNKKCDSGTYDLSNLENTVIDNLIGFQENNDSLLKIINGNNQPILDTSSFKKQISQIDKKIQKNSDLYLNDFITMDELKDRTDSLQAEKKLLKAKISENKFNDSTDVFEQVKTQLGSIPINELSYDNKKRIVNNLVSKVDVTADNVDIIFKFQLA

SEQ ID NO: 7419 - protein, 452 aa, synthetic construct
MKAAIYIRVSTREQVENYSIQAQTEKLTALCRSKDWDVYDIFIDGGYSGSNMNRPALNEMLSKLHEIDAVVVYRLDRLSRSQRDTITLIEEYFLKNNVEFVSLSETLDTSSPFGRAMIGILSVFAQLERETIRDRMVMGKIKRIEAGLPLTTAKGRTFGYDVIDTKLYINEEEAKQLQLIYDIFEEEQSITFLQKRLKKLGFKVHTYNRYNNWLTNDLYCGYVSYKDKVRVKGIHEPIISEEQFYRVQEIFTRMGKNPNMNRDSASLLNNLVVCSKCGLGFVHRRKDAMSRDKKYHYRYYSCKTYKHIHELEKCGNKIWRADKLEELIINRVNNYSFASRNADKEDELDSLNEKLRIEHAKKRRLFDLYINGSYEVSELDSMMSDIDAQINYYESQIEANEELKKNKKIQGNLAELATVDFDSLEFREKQLYLKSLINKIYIDGEQVTIEWL

SEQ ID NO: 7420 - protein, 452 aa, synthetic construct
MKAAIYIRVSTREQVENYSIQAQTEKLTALCRSKDWDVYDIFIDGGYSGSNMNRPALNEMLSKLHEIDAVVVYRLDRLSRSQRDTITLIEEYFLKNNVEFVSLSETLDTSSPFGRAMIGILSVFAQLERETIRDRMVMGKIKRIEAGLPLTTAKGRTFGYDVIDTKLYINEGEAKQLQLIYDIFEEEQSITFLQKRLKKLGFKVRTYNCYNNWLTNDLYCGYVSYKDKVHVKGIHEPIISEEQFHRVQEIFTRMGKNPNMNRDSASLLNNLVVCSKCGLGFVHRRKDTMSRGKKYHYRYYSCKTYKHIHELEKCGNKIWRADRLEELIIDRVNNYSFASRNVDKEDELDSLNEKLRIEHAKKKRLFELYINGSYEMGELDSMMNDIDAQINYYESQIEANEGLKRNKKIQEILAELATVDFDSLEFREKQLYLKSLINKIYIDGEQVTIEWL

SEQ ID NO: 7421 - protein, 452 aa, synthetic construct
MKAAIYIRVSTQEQVENYSIQAQTEKLTALCRSKDWDVYDIFIDGGYSGSNMNRPALNEMLSKLHEIDAVVVYRLDRLSRSQRDTITLIEEYFLKNNVEFVSLSETLDTSSPFGRAMIGILSVFAQLERETIRDRMVMGKIKRIEAGLPLTTAKGRTFGYDVIDTKLYVNEEEAKQLQLIYDIFEEEQSITFLQKRLKKLGFKVRTYGCYNSWLTNDLYCGYVSYKDKVHVKGIHEPIISEEQFYRVQEIFTRMGKNPNMNRDSASLLSSLVVCSKCGLGFVHRRKDTMSRGKKYHYRYYSCKTYKHTHELEKCGNKIWRADRLEELIVNRVTNYSSAGRNVDKEDELDSLNEKLKIEHAKKKRLFDLYINGSYEVSELDSMMSDIDAQINYYESQIEANEGLKKNKKIQENLADLATVDFDSLEFREKQLYLKSLINKIYIDGEQVTIEWL

SEQ ID NO: 7422 - protein, 452 aa, synthetic construct
MKAAIYIRVSTREQVENYSIQAQTEKLTALCHSKDWDVYDIFIDGGYSGSNMNRPALNEMLSKLHEIDAVVVYRLDRLSRSQRDTITLIEEYFLKNNVEFVSLSETLDTSSSFGRAMIGILSVFAQLERETIRDRMVMGKIKRIEAGLPLTTAKGRTFGYDVVDTKLYINEEEAKQLQLIYDIFEEEQSITSLQKRLKKLGFKVHTYNRYNNWLTNDLYCGYVSYKDKVHVKGIHEPIISEEQFHRVQEIFARMGKNPNMNRDSASLLNNLVVCSKCGLGFVHRRKDAMSRDKKYHYRYYSCKTYKHIHELEKCGNKIWRADKLEELIIDRVNSYSLVSRNVDKEDELDSLNEKLKIEHAKKKRLFDLYINGNYEVSELDSMMNDIDAQINYYESQIEANEELKKSKKIQENLAYLAAVDFDSLEFREKQLYLKSLINKIYIDGEQVTIEWL

SEQ ID NO: 7423 - protein, 485 aa, synthetic construct
MTKKVAIYTRVSTTNQAEEGFSIDEQIDRLTKYAEAMGWQVSNTYTDAGYSGAKLERPAMQRLINDIESKAFDTVLVYKLDRLSRSVRDTLHLVKDVFTKNKIDFISLNESIDTSSAMGSLFLTILSAINEFERENIKERMTMGKLGRAKSGKSMMWTKTAFGYYHNRKTGILEIVPLQATIVEQIFTDYLSGISLTKLRDKLNESGHIGKDIPWSYRTLRQTLDNPVYCGYIKFKDNLFEGMHKPIIPYETYLRVQKELEGRQQQTYERNNNPRPFQAKYMLSGMARCGYCGAPLKIVLGRKRKDGSRTMKYHCANRFPRKTKGITVYNNNKKCDSGTYDLSTLENTVIDNLIGFQENNDSLPKIINGNNQPILDTSSFKEQISQIDKKIQKNSDLYLNDFITMDELKARTDSLQAEKKLLKAKISENKFNDSTDVFELVKTQLGSIPINELSYDNKKKIVNNLVSKVDVTADSVDIIFKFQLA

SEQ ID NO: 7424 - protein, 452 aa, synthetic construct
MKAAIYIRVSTREQVENYSIQAQTEKLTALCRSKDWDVYDIFIDGGYSGSNMDRPALNEMLSKLHEIDAVVVYRLDRLSRSQRDTITLIEEYFLKNNVEFVSLSETLDTSSPFGRAMIGILSVFAQLERETIRDRMVMGKIKRIEAGLPLTTAKGRTFGYDVIGTKLYINEEEAKQLQLIYDIFEEEQSITFLQKRLKRLGFKVHTYNRYNNWLTNDLYCGYVSYKDKVHVKGIHEPIISEEQFYRVQEIFTRMGKNPNMNRDSASLLNNLVVCSKCGLGFVHRRKDTTSRGKKYHYRYYSCKTYKHIHELERCGNKIWRADKLEELIINRVNNYSFASRNADKEDELDSLNERLKTEHAKKKRLFDLYINGSYEVSELDSMMNDIDAQISYYESRIEANEELRKDKKIQENLANLATVDFDGLEFREKQLYLKSLINKIYIDGEQVTIEWL

SEQ ID NO: 7425 - protein, 469 aa, synthetic construct
MSYTTPVRAAVYLRISEDRSGEQLGVARQREDCLKLCDQRKWVPVEYLDNDVSASTGKRRPAYEQMLADITAGKIAAVVAWDLDRLHRRPIELEAFMSLADEKRLALATVAGDVDLATPQGRLVARLKGSVAAHETEHKKARQRRAARQKAERGYPNWSRAFGYLPGPNGPEPDPRTAPLVKQAYADILAGASLGDVCRQWNDAGASTITGRPWTTTTLSKFLRKPRNAGLRAYRGAHYGPVDRDAIVGKAQWSPLVDEATFWAAQAVLDAPGRAPGRKSVRRHLLTGLAGCGKCGHHLAGSYRTDGRVVYVCKACHGVSILADNIEPILYHIVAERLATPGAVDLLRREIHDAAEAETIRLELETLYGELDRLAVERAEGLLTARQVKISTDIVNAKITKLQARQLDQERLRVFDGIPLGTPRVAGMIAELSPDRFRAVLDVLAEVVVQPVGKSGRIFNPERVQVTWR

SEQ ID NO: 7426 - protein, 485 aa, synthetic construct
MTKKVAIYSRVSTTNQAEEGFSIDEQIDRLTKYAEAMGWQVSDTYTDAGVSGAKLERPAMQRLINDIENKAFDTVLVYKLDRLSRSVRDTLYLVKDVFTKNKIDFISLNESIDTSSAMGSLFLTILSAINEFERENIKERMTMGKLGRAKSGKSMMWTKTAFGYYHNRKTGILEIVPLQATIVEQIFADYLSGISLTKLRDKLNEGGHIGKDIPWSYRTLRQTLDNPVYCGYIKFKDSLFEGTHKPIIPYETYLKVQKELEERQQQTYERNNNPRPFQAKYMLSGMARCGYCGAPLRIVLGHKRRDGSRTMKYHCANRFPRKTKGVTVYNDNKKCDSGTYDLCNLENTVIDNLIGFQEDNDSLLKIINGHNQPILDTSSLKKQISQIDKKIQKNSDLYLNDFITMDELKDRTDSLQAEKKLLKAKISENKFNDSTGVFELVKTQLGSIPINELSYDNKKKIVNNLVSKVDVTADNVDIIFKFQLA

SEQ ID NO: 7427 - protein, 485 aa, synthetic construct
MTKKVAIYTRVSTTNQAEEGFSIDEQIDRLTKYAEAMGWQVSDTYTDAGFSGAKLERPAMQRLINDIENKAFDTVLVYKLDRLSRSVRDTLYLVKDVFTKNKIDFISLSESIDTSSAMGSLFLTILSAINEFERENIKERMTMGKLGRAKSGKSMMWTKTAFGYYHNRKTGILEIVPLQATIVEQIFTDYLSGISLTKLRDKLNESGHIGKDIPWSYRTLRQTLDNPVYCGYIKFKGSLFEGMHKPIIPYETYLKVQKELEERQRQTYERNNNPRPFQAKYMLSGMARCGYCGAPLRIVLGRKRKDGSRTMKYHCANRFPRKTKGVTVYNDNKKCDSGTYDLSNLENTVIDNLIGFQENNDSLLKIINGNNQPILDTSSFKEQISQIDKKIQKNSDLYLNDFITMDELKDRTDSLQAEKKLLKARFSVNKFNDSTDVFELVKTQLGSIPINELSYDNKKKIVNNLVSKVDVTADNVDIIFKFQLA

SEQ ID NO: 7428 - protein, 452 aa, synthetic construct
MKAAIYIRVSTREQVENYSIQAQTEKLTALCRSKDWDVYDIFIDGGYSGSNMNRPALNEMLSKLHGIDAVVVYRLDRLSRSQRDTITLIEEYFLKNNVEFVSLSETLDTSSPFGRAMIGILSVFAQLERETIRDRMVMGKIKRIEAGLPLTTAKGRTFGYDVIDTKLYINEEEAKQLQLIYDIFEEEQSITFLQKRLKELGFKVRTYNCYNNWLTNDLYCGYVSYKDKVHVKGIHEPIISEEQFYRVQEIFTRMGKNPNMNRDSASLLNNLVVCSKCGLGFVHRRKDIMSRGKKYHYRYYSCKTYKHIHELEKCGNKIWRADKLEELVINRVNSYSLVSRNVDKEDELDSLNRELKVEHAKKKRLFDLYINGSYEVSELDSMMSDIDAQINYYESQIEANEELKKNKKIQGNLAYLATVDFDSLEFREKQLYLKSLINKIYIDGEQVTIEWL

SEQ ID NO: 7429 - protein, 469 aa, synthetic construct
MSYTTPVRAAVYLRISEDRSGEQLGVARQREDCLKLCDQRKWVPVEYLDNDVSASTGKRRPAYEQMLADIAAGKIAAVVAWDLDRLHRRPIELEAFMSLADVKRLALATVAGDVDLATPQGRLVARLKGSVAAHETEHKKARQRRAARQKAERGYPNWSKAFGYLPGPNGPEPDPRTAPLVKQAYADILAGASLGDVCRQWNDAGAFTITGRQWTTTTLSKFLRKPRNAGLRAYKGARYGPVDRDAIVGKAQWSPLVDEATFWAAQAVLDAPGRAPGRKSVRRHLLTGLARCGKCGNHLAGSYRTDGRVVYVCKACHGVTILADNIEPILYHIVAERLAMPDAVDLLRREIHDMAEAETIRLELETLYGELDRLAVERAEGLLTARQVKISTDIVNAKITKLQSRQLDQERLRVLDGIPLGTPQVAGVIAELSPDRFRAVLDVLAEVVVQPVGKSGRTFNPERVQVNWR

SEQ ID NO: 7430 - protein, 485 aa, synthetic construct
MTKKVAIYTRVSTTNQAEEGFSIDEQTDRLTKYAEAMGWQVSDTYTDAGFSGAKLERPAMQRLINDIENKAFDTVLVYKLDRLSRSVRDTLYLVKDVFTKNKIDFISLNESINTSSAMGSLFLTILSAINEFERENIKERMTMGKLGRAKSGKSMMWTKTAFGYYHNRKTGILEIVPLQATIVEQIFTDYLSGISLTKLRDKLNESGHVGKDIPWSYRTLRQTLDNPVYCGYIKFKDSLFEGMHKPIIPYETYLKVQKELEERQQQTCERNNNPRPFQAKYMLSGMARCGYCGAPLKIVLGHKRKDGSRTMKYHCANRFPRKTKGVTAYNDNKKCDSGTYDLGNLESTVIDSLLRFQENNDSLLKIINGNNQPILDTSSFKTQISRIDKKIQRISDLYLNDFITMDELKDRTDSLRAEKKRLKAKISENKFSDSTDVFELVKTQLGSIPINELSYDNKKKIVNNLVSKVDVTADNVDIIFKFQLT

SEQ ID NO: 7431 - protein, 452 aa, synthetic construct
MKAAIYIRVSTREQVENYSIQAQTEKLTALCRSKDWDVYDIFIDGGYSGSNMNRPALNEMLSKLHEIDAVVVYRLDRLSRSQRDTITLIEEYFLKNNVEFVSLSETLDTSSPFGRAMIGILSVFAQLERETIRDRMVMGKIKRIEAGLPLTTAKGRTFGYDVIDTKLYINEEEAKQLQLIYDIFEEEQSITFLQKRLKKLGFKVRTYNRYNSWLTNDLYCGYVSYKDKVHVKGVHEPIISEEQFYRVQEIFTRMGKNPNMNRDSASLLNNLVVCSKCGLGFVHRRKDTVSRGKKYHYRYYSCKTYKHTHELEKCGNKIWRADKLEELIINRVNNYSFASRNVGKAEELDSLNEKLEVEHAKKKRLFDLYINGSYNVSELDSMMNDIDAQINYYENQIEANEELEKNEKIQESLADLATVDFDSLEFREKQLYLKSLINKIYIDGEQVTIEWL

SEQ ID NO: 7432 - protein, 452 aa, synthetic construct
MKAAIYIRVSTREQVENYSIQAQTEKLTALCRSKDWDVYDIFIDGGYSGSNMNRPALNEMLSKLHEIDAVVVYRLDRLSRSQRDTITLIEEYFLKNNVEFVSLSETLDTSSPFGRAMIGILSVFAQLERETIRDRMVMGKIKRIEAGLPLTTAKGRTFGYDVIDTKLYINEEEAKQLQLIYDIFEEVQSITFLQKRLKNLGFKVRTYSRYNSWLTNDLYCGYVSYKDKVHVKGIHEPIISEEQFYRVQEIFTRMGKNPNMNRDSASLLNNLVVCSKCGLGFVHRHKDTTSRGKKYHYRYYSCKTYKHIHELEKCGNKIWRADKLEELIINRVHNYSLASRDVDKEDELDSLNEKLKIERAKKKRLFDLYINGSYEVSELDSMMSDIDAQINYYEGQIEANEELKRNKKIQENLANLATVDYDSLELREKQLYLKSLINKIYIDGEQVTIEWL

SEQ ID NO: 7433 - protein, 452 aa, synthetic construct
MKAAIYIRVSTREQVENYSIQAQTEKLTALCRSKDWDVYDIFIDGGYSGSNMNRPALNEMLSKLHEIDAVVVYRLDRLSRSQRDTITLIEEYFLKNNVEFVSLSETLDTSSPFGRAMIGILSVFAQLERETIRDRMVMGKIKRIEAGLPLTTAKGRTFGYDVIDTKLYINEEEAKQLQLIYDIFEEEQSITSLQKRLKKLGFKVRTYNRYNNWLTNDLYCGYVSYKDKVHVKGIHEPIISEEQFYRVQEIFARMGKNPNMNRDSASLLNNLVVCSKCGLGFVHRRKDTTSRGKKYHYRYYSCKTYKHTYELEKCGNKIWRADKLEELIIDRVNNYSFASRNVDKEDELDSLNEKLRIEHAKKKRLFDLYINGSYEVSELDSMMNDIDAQINYYESQIEASEELKKDKKIQESLANLATVDYDSLEFREKQLYLKSLINKIYIDGEQVTIEWL

SEQ ID NO: 7434 - protein, 469 aa, synthetic construct
MNYTTPVRAAVYLRISEDRSGEQLGVARQREDCLKLCDQRKWVPVEYLDNDVSASTGKRRPAYEQMLADITAGKVAAVVAWDLDRLHRRPMELEAFMSLADEKRLALATVAGDVDLATPQGRLVARLKGSVAAHETEHKKARQRRAARQKAERGYPNWSRAFGYLPGPNGPEPDPRTAPLVKQAYADILAGASLGDVCRRWNDAGAFTITGRPWTTTTLSKFLRKPRNAGLRAYKGARYGPVDRDAIVGKAQWSPLVDEATFWAAQAVLDAPGRAPGRKSVRRHLLTGLAGCGKCGNHLAGSYRTDGRVVYVCKACHGVAILAENIEPILYHIVAERLAMPDAVDLLRREIHDAAEAEAIRLELETLYGELDHLAVERAEGLLTARQVKISTDIVNAKITKLQARQLDQERLRVFDGIPLGTPQVAGVIAELSPNRFRAVLDVLAEVVVQPVGKGGRIFNPERVQVNWR

SEQ ID NO: 7435 - protein, 485 aa, synthetic construct
MTKKVAIYTRVSTTNQAEEGFSIDEQTDRLTKYAEAMGWQVSDTYTDAGFSGAKLERPAMQRLINDIENKAFDTVLVYKLDRLSRSVRDTLYLVKDVFTKNKIDFISLNESINTSSAMGSLFLTILSAINEFERENIKERMTMGKLGRAKSGKSMMWTKTAFGYYHNRETGVLEIVPLQATIVEQIFTDYLSGISLTKLRDKLNESGHIGKDIPWSYRTLRQTLDNPVYCGYIKFKGSLFEGMHKPIIPYETYLKVQKELEERQQQTYERNNNPRPFQAKYMLSGMARCGYCGAPLRIVLGHKRKDGSRTMKYHCANRFPRKTKGITVYNDNKKCDSGTYDLDGLENTVIDNLIAFQENNDSLLKIINGNNQPILDTSNFRKQISQIDKKIQKNSDLYLNDYITMDELKDRTDSLQAEKKLLEAKISENKFNDSTDVFELVKTQLGSIPINELSYDNKKKIVNNLVSKVDVTAGSVDIIFKFQLA

SEQ ID NO: 7436 - protein, 452 aa, synthetic construct
MKAAIYIRVSTREQVENYSIQAQTEKLTALCRSKDWDVYDIFIDGGYSGSNMNRPALNEMLSKLHEIDAVVVYRLDRLSRSQRDTITLIEEYFLKNNVEFVSLSETLDTSSPFGRAMIGILSVFAQLERETIRDRMVMGKIKRVEAGLPLTTAKGRTFGYDVIDTKLYINEEEARQLQLIYDIFEEEQSITFLQKRLKKLGFKVRTYSCYNNWLTNDLYCGYVSYKDKVHVKGIHEPIISEEQFYRVQEIFTRMGKNPNMNRDSASLLNNLVVCSKCGLGFVHRRKDTMSRGKKYHYRYYSCKTYKHTHELEKCGNKIWRADKLEELIINRVNSYSFASRNVDKEDELDSLNEKLKIEHAKKKRLFDLYTNGSYEVSELDGMMSDIDAQINYYESQIEANEELKKDKKIQESLANLATVDYDSLEFREKQLYLKSLINKIYIDGEQVTIEWL

SEQ ID NO: 7437 - protein, 485 aa, synthetic construct
MTKKVAIYTRVSTTNQAEEGFSIDEQIDRLTKYAEAMGWQVSDTYTDAGCSGAKLDRPAMRRLINDIENKAFDTVLVYKLDRLSRSVRDTLHLVKDVFTQNKIDFISLSESIDTSSAMGSLFLTILSAINEFERENIKERMTMGKLGRAKSGKSMMWTKTAFGYYHNRKTGILEIVPLQATIVEQIFTDYLSGISLTKLRDKLNESGHIGKDIPWSYRTLRQTLDNPVYCGYIKFKDSLFEGMHKPIIPYETYLKVQKELEERQQQAYERNNNPRPFQAKYMLSGMARCGYCGAPLKIVLGHKRKDGSRTMKYHCANRFPRKTKGITVYNDNKKCDSGTYDLSDLENTVIDNLVGFQENNDSLLKIINGNNQPILDTSSFKKQISQIDKKIRKNSDLYLNDFITMDELKDRTDSLQAEKRLLRAKISENKFNDSSDVFELVKTQLGSIPINELSYDDRKKIVNNLVSKVDVTADNVDIIFKFQLA

SEQ ID NO: 7438 - protein, 452 aa, synthetic construct
MKAAIYIRVSTREQVENYSIQAQTERLTALCRSKDWDVYDIFIDGGYSGSNMNRPALNEMLSKLHEIDAVVVYRLDRLSRSQRDTITLVEEYFLKNNVEFVSLSETLDTSSPFGRAMIGILSVFAQLERETIRDRMVMGKIKRVEAGLPLTTAKGRTFGYDVIDTKLYINEEEAKQLQLIYDIFEEEQSITFLQRRLKKLGFKVRTYNRYNSWLTNDLYCGYVSYKDKVHVKGIHEPIISEEQFYRVQEIFARMGKNPNMNRGSASLLNNLVVCSKCGLGFVHRRKDTMSRGKRYHYRYYSCKTYKHTHELEKCGNKIWRADKLEELVINRVDDYSFACRNVDKEDELDSLNEKLRIEHAKKKRLFDLYINGSYEVSELDSMMNDIDAQINYYESQIEANEELKKNKKIQENLANLATVDYDSLEFREKQLYLKSLINKIYIDGEQVTIEWL

SEQ ID NO: 7439 - protein, 452 aa, synthetic construct
MKAAIYIRVSTQEQVENYSIQAQTEKLTALCRSKDWDVYDIFIDGGYSGSNMNRPALNEMLSKLHEIDAVVVYRLDRLSRSQRDTTTLIEEYFLKNNVEFVSLSETLDTSSPFGRAMIGILSVFAQLERETIRDRMVMGKIKRIEAGLPLTTAKGRTFGYDVIDTRLYINEEEAKQLQLIYDIFEEVQSITLLQKRLKKLGFKVRTYNRYSNWLTNDLYCGYVSYKDKVHVKGIHEPIIGEEQFYRVQEIFTRMGKNPNMNRDSASLLNNLVVCSKCGLGFVHRSKDTMSRGKKYHYRYYSCKTYKHTHVLEKCGNKTWRADKLEELIINRVNNYSFASRNADKEDELDSLNEKLKIEHAKKKRLFDLYINGSYEVGELDSMMNDIDAQINYYESQIEANEELKKNKKMQKNLADLATVDFDSLEFREKQLYLKSLISKIYIDGEQVTIEWL

SEQ ID NO: 7440 - protein, 452 aa, synthetic construct
MKAAIYIRVSTREQVENYSIQAQTEKLTALCRSKDWDVYDIFIDGGYSGSNMNRPALNEMLSKLHEIDAVVVYRLDRLSRSQRDTITLIEEYFLKNNVEFVSLSETLDTSSPFGRAMIGILSVFAQLERETIRDRMVMGKIKRVEAGLPLTTAKGRTFGYDVIDTKLYINEEEAKQLQLIYDIFEEEQSITFLQKRLKRLGFKVRTYNCYNSWLTNDLYCGYVSYKDKVHVKGIHEPIISEEQFYRVQEIFTRMGKNPNMNRGSASLLNNLVMCSKCGLGFVHRRKDTMSRGKKYHYRYYSCKTYKHTHELEKCGNKIWRADKLEELIINRVNNYSFASRNVDKEDELDSLNEKLKIEHAKKKRLFDLYINGSYEVGELDSMMNDIDAQINYYESQIEANEELKKSKKVQENLANLATVDYDSLEFREKQLYLRSLINKIYIDGEQVTIEWL

SEQ ID NO: 7441 - protein, 485 aa, synthetic construct
MTKKVAIYTRVSTTNQAEEGFSIDEQIDRLTKYAEAMGWQVSDTYTDAGSSGAKLERPAMQRLINDIENKAFDTVLVYKLDRLSRSVRDTLYLVKDVFTKNKIDFISLNESIDTSSAMGSLFLTILSAINEFERENIKERMAMGKLGRAKSGKSMMWTKTAFGYYHNRKTGILEIVPLQATIVEQIFTDYLSGTSLTKLRDKLNESGHIGKDIPWSYRTLRQTLDNPVYCGYIKFKGSLFEGMHKPIIPYETYLKVQKELEERQRQAYERNNNPRPFQAKYMLSGVARCGYCGAPLRIVLGHKRKDGSRTMKYHCANRFPRKTKGVTVYNDNKKCDSGTYNLSSLENTVIDNLIGFQENNDSLLKIINGNNRPILDTSSFKKQISQIDKKIQKNSDLYLNDFITMDELKDRTDSLQAEKKLLKAKISENKFNDSTDVFELVKTQLGSIPINELSYDNKKKIVNNLVSKVGVTADNVDIIFKFQLT

SEQ ID NO: 7442 - protein, 485 aa, synthetic construct
MTKKVAIYTRVSTTNQAEEGFSIDEQTDRLTKYAEAMGWQVSDTYTDAGISGAKLERPAMQRLINDIENKAFDTVLVYKLDRLSRSVRDTLYLVKDVFTKNKIDFISLNESIDTSSAMGSLFLTILSAINEFERENIKERMTMGKLGRAKSGKSMMWTKTAFGYYHNRKTGILEIVPLQATIVEQIFTDYLSGISLTKLRDKLNESGHIGKDIPWSYRTLRQTLDNPVYCGYIKFKDSLFEGMHKPIIPYETYLKVQKELEERQQQTYERNNNPRPFQAKYMLSGMARCGYCGAPLRIVLGHKRKDGSRTMKYHCANRFPRKTKGITVYNDNKKCDSGTYDLSNLENTVIDNLIGFQENNDSLLKIINGNNQPILDTSSFKKQISQIDKKIQKNSDLYLNDFITMDELKERTDSLQAEKKLLKAKISENKFNDSTGVFELVKTQLGSIPINELSYDNKKKIVNSLVSKVDVTADNVDIIFKFQLT

SEQ ID NO: 7443 - protein, 452 aa, synthetic construct
MKAAIYIRVSTQEQVGNYSIQAQTEKLTALCRSKGWDVYDIFIDGGYSGSNMNRPALNEMLSKLHEIDAVVVYRLDRLSRSQRDTTTLIEEYFLKNNVEFVSLSETLDTSSPFGRAMIGILSVFAQLERETIRDRMVMGKIKRIEAGLPLTTAKGRTFGYDVIDTKLYINEEEAKQLRLIYDIFEEEQSITSLQKRLKKLGFKVRAYNRYNNWLTNDLYCGYVSYKDKVHVKGIHEPIISEEQFHRVQEIFTRMGKNPNMNRDSASLLNNLVVCSKCGLSFVHRSKDTMSRGKKYHYRYYSCKTYKHTHELEKCGNKTWRADKLEELIINRVNNYSFASRNVDKEDELDSLNEKLKIEHAKRKRLFDLYINGSYEVSELDSMMNDIDARINYYESQIEANEELKKSKKIQENLADLATVDFDGLGFREKQLYLKSLINKIYIDGERVTIEWL

SEQ ID NO: 7444 - protein, 485 aa, synthetic construct
MTKKVAIYTRVSTTNQAEEGFSIDEQIDRLTKYAEAMGWQVSDTYTDAGLSGAKLERPAMQRLINDIENKVFDTVLVYKLDRLSRSVRDTLYLVKDVFTKNKIDFISLNESIDTSSAMGSLFLTILSAINEFERENIKERMSMGKLGRAKSGKSMMWTKTAFGYCHNRKTGVLEIVPLQATIVEQIFTDYLSGISLTKLRDKLNESGHIGKDIPWSYRTLRQTLDNPVYCGYIKFKDSLFEGMHKPIIPYETYLKVQKELGERQQQTYERNNNPRPFQAKYMLSGMARCGYCGAPLKIVLGHKRKDGSRTMKYHCANRFPRKTKGITVYNDNKKCDSGTYDLSNLENTVIDNLIGFQENNDSLVKIINDNNQPILDTSSLKEQISQIDKKIQKNSDLYLNDFITMDELKDRTDSLQAEKKLLKAKISENEFNDGTDVFELVKTQLGSIPINELSYDDKKKIVNNLVSKVDVTADNVDIIFKFRLA

SEQ ID NO: 7445 - protein, 452 aa, synthetic construct
MKAAIYIRVSTREQVENYSIQAQTEKLTALCRSKDWDVYDIFIDGGYSGSNMNRPALNEMLSKLHEIDAVVVYRLDRLSRSQRDTITLIEEYFLKNNVEFVSLSETLDTSSPFGRAMIGILSVFAQLERETIRDRMVMGKIKRIEAGLPLTTAKGRTFGYDVIDTKLYINEEEAKQLQLIYDIFEEEQSITFLQKRLKKLGFKVRSYNRYSNWLTNDLYCGYVSYKDKVHVKGIHEPIISEEQFYRVQEIFARMGKNPNMNRDSASLLNNLVVCSKCGLSFVHRRKDAMGRDKKYHYRYYSCKTYKHIHELEKCGNKIWRADELEELIINRVNNYSLASRNVDKEDELDSLNEKLKTEHAKKKRLFDLYINGSYEVSELDSMMNDIDAQISYYESQIEANEALIKNKKIQENLANLATVDFDSLEFREKQLYLKSLINKIYIDGEQVTIKWL

SEQ ID NO: 7446 - protein, 485 aa, synthetic construct
MTKKVAIYTRVSTTNQAVEGFSIDEQIDRLTKYAEAMGWQVSDTYTDAGFSGAKLERPAMQRLINDIENKAFDTVLVYKLDRLSRSVRDTLYLVKDVFTKNKIDFISLNECIDTSSAMGSLFLTILSAINEFERENVKERMSMGKLGRAKSGKSMMWTKTAFGYYHNRKTGILEIVPLQATIVEQIFTDYLSGISLTKLRDKLNESGHIGKDIPWSYRTLRQTLENPVYCGYIKFKDSLFEGMHKPIIPYETYLKVQKELEERQQQTYERNNNPRPFQAKYMLSGMARCGYCGAPLKIVLGHKRKDGSRTMKYHCANRFPRKTKGVTVYNDSKKCDSGTYDLSNLENTVIDNLIGFQENDDSLLEVINGSKQPILDTNSFKEQISQIDRRIQKNSDLYLNDFITMDELKGRTDSLQAEKKLLKAKISENKFNDSTDVFELVKTQLGSIPINELSYDNKKKIVNNLVSKVDVTADNVDIIFKFQLA

SEQ ID NO: 7447 - protein, 469 aa, synthetic construct
MSYTTPVRAAVYLRISEDRSGEQLGVARQREDCLKLCGQRKWVPVEYLDNDVSASTGKRRPAYEQMLADITAGKIAAVVAWDLDRLHRRPVELEAFMSLADEKRLALATVAGDVDLATPQGRLVARLKGCVAAHETEHKKARQRRAARQKAERGYPNWSRAFGYLPGPNGPEPDPRTAPLVKQAYADILAGASLGDVCRQWNDAGAFTITGRPWTTATLSKFLRKPRNAGLRAYKGARYGPVDRDAIVGKAQWSPLVDEGTFWAAQAVLDAPGRAPGRKSVRRHLLTGLAGCGKCGNHLAGSCRTDGRVVYVCKSCHGVAILADNIEPFLYRIVTERLAMPHAVDLLRREVHDAAEAETIRLELETLYGELDRLAVERAEGLLTARQVKISTDVVNAKITELQARRLDQERLRVFDGIPLGTPQVAGMIAELSPNRFRAVLDVLAEVVVQPVGRRSRIFNPERVQVNWR

SEQ ID NO: 7448 - protein, 469 aa, synthetic construct
MNYTTPVRAAVYLRISEDRSGEQLGVARQREDCLKLCGQRKWVPVEYLDNDVSASTGKRRPAYEQMLADITAGKIAAVVAWDLDRLHRRPIELEAFMSLADEKRLALATVAGDVDLATPQGRLVARLKGSVAAHETEHKKARQRRAARQKAERGYPNWSKAFGYLPGPNGPEPDPRTAPLVKQAYADILAGASLGDVCRQWNDAGAFTITGRPWTTTTLSKFLRKPRNAGLRAYKGARYGPVDRAAIVGKAQWSPLVDEATFWAAQAVLNAPGRTPGRKSVRRHLLTGLAGCGKCGHHLAGNHRTDGRVVYVCKACHGVTILADNIEPILYHIVVERLAMPDAVDLLRREIHDAAEAETIRLELETLHGELDRLAVERAEGLLTARQVKISTDIVSAKITKLQARQQDQERLRVLDGIPLGTPQVAGMIAELSPDRFRAVLDVLAEVVVQPVGKGGRIFNPERVQVNWR

SEQ ID NO: 7449 - protein, 469 aa, synthetic construct
MSYTTPVRAAVYLRISEDRSGEQLGVARQREDCLKLCDQRKWVPVEYLDNDVSASTGKRRPAYEQMLADITAGKIAAVVAWDLDRLHRRPIELEAFMSLADEKRLALATVAGDVDLATPQGRLVARLKGSVAAHETEHKKARQRRAARQKAERGHPNWSKAFGYLPGPNGPEPDPGTAPLVKQAYADILAGVSLGDVCRQWNAAGAFTITGRPWTTTTLSKFLRKPRNAGLRAYKGARYGPVDRDAIVGKAQWSPLVDEVTFWAAQAVLDAPGRAPGRRSVRRHLLTGLAGCGKCGNHLAGSYRTDGRVVYVCKACHGVAILADNIEPILYHIVAERLAMPDAVDLLRREIHDAAEAETIRLELETLYSELDRLAVERAEGLLTARQVKISTDIVNAKITKLQARQLDQERLRVFDGIPLGTPQVAGMIAELSPNRFRAVLDVLAEVVVQPVGKSGRIFNPERVQVNWR

SEQ ID NO: 7450 - protein, 469 aa, synthetic construct
MCYTTPVRAAVYLRISEDRSGEQLGVARQREDCLKLCDQRKWVPVEYLDNDVSASTGRRRPAYEQMLADITAGKIAAVVAWDLDRLHRRPIELEAFMSLADGKRLALATVAGDVDLATPQGRLVARLKGSVAAHETEHKKARQRRAARQKAERGLPNWSKAFGYLPGPNGPEPDPRTAPLVKQAYADILAGASLGDVCRQWNDAGAFTITGRLWTTTALSKFLRKPRNAGLRAYKGARYGPVDRDAIVGRAQWSPLVDEATFWAAQAVLDAPGRAPGRKSVRRHLLTGLAGCGKCGNHLAGSYRTDGQVVYVCKACHGVAILADNIEPILYHIVAERLAMPDAVDLLRREIHDATEAETIRLELETLYDELDRLAVERAEGLLTARQVKISTDIVNAKITKLQARQLDQERLRVFDGIPLGTPQVAGMIAELSPNRFRAVLGVLAEVVVQPVGKSGRIFNPERVQVNWR

SEQ ID NO: 7451 - protein, 452 aa, synthetic construct
MKAAIYIRVSTREQVENYSIQAQTEKLTALCRSKDWDVYDIFIDGGYSGSNMNRPALNEMLSKLHEIDAVVVYRLDRLSRSQRDTITLIEEYFLKNNVEFVSLCETLDTSSPFGRAMIGILSVFAQLERETIRDRMVMGKIKRIEAGLPLTTAKGRTFGYDVTDTRLYINEEEAKQLQLIYDIFEEEQSITFLQKRLKKLGFKVRTYNCYNNWLTNDLYCGYVSYKDKVHVKGIHEPIISEEQFYRVQEIFARMGKNPNMNRDSASLLNNLVVCSRCGLGFVHRRKDTMSRGKKYHYRYYSCKTYKHTHELEKCGNKIWRADKLEELIISRVNNYSLASRSVDKEDELDSLNEKLKIEHAKKKRLFDLYINGSYEVSELDSMMSDIDAQINYYEGRIKANEELKKSKKIQENLANLATVDYDSLEFREKQLYLKSLINKIYIDGEQVTIEWL

SEQ ID NO: 7452 - protein, 452 aa, synthetic construct
MKAAIYIRVSTQEQVGNYSIQAQTEKLTALCRSKDWDVYDIFIDGGYSGSNMNRPALNEMLSKLHEIDAVVVYRLDRLSRSQRDTTTLIEEYFLKNNVEFVSLSETLDTSSPFGRAMIGILSVFAQLERETIRDRMVMGKIKRIESGLPLTTAKGRTFGYDVIDTKLYINEEEAKQLQLVYDIFEEEQSITSLQKRLKKLGFKVRTYNCYNNWLTNDLYCGYVSYKDKVHVKGIHEPIISEEQFYRVQEIFTRMGKDPNMNRDSASLLSNLVVCSKCGLGFVHRSKDTMSRGKKYHYRYYSCKTYKHTHELEKCGNKTWRADKLEELIINRVNNYSFASRNMDKEGELDSLNEKLKIEHAKKKRLFDLYINGSYEVSELDSMMNDIDAQINYYESQIEANEELKKNKKIQENLANLATVDYDSLEFREKQLYLKSLINKIYIDGEQVTIEWL

SEQ ID NO: 7453 - protein, 485 aa, synthetic construct
MTKKVAIYTRVSTTNQAEEGFSIDEQTDRLAKYAEAMGWQVSDTYTDAGFSGAKLERPAMQRLINDIENKAFDTVLVYKLDRLSRSVRDTLHLVKDVFTKNKIDFISLSESIDTSSAMGSLFLTILSAINEFERENIKERMAMGKLGRAKSGKSMMWTKTAFGYYHDRKTGILEIVPLQATIVEQIFTDYLSGISLTKLRDKLNESGHIGKDIPWSYRTLRQTLDNPVYCGYIKFKDSLFEGMHKPIIPYETYLKVQKELEERQQQTYERNNNPRPFQAKYMLSGMARCGYCGAPLRIVLGHKRKDGSRTMKYHCANRFPRKTKGVTVYNDNKKCDSSTYDLSNLENTVIDNLIGFQENNDSLLKIISGNNQPILDTSSFERQISQIDKKIQKNSDLYLNDFITMDELKDRIDSLQAEKKLLKAKISENKFNDSTDVFELVKAQLGSIPINELSYDNKKKIVNNLVSKVDVTADNVDIIFKFQLA

SEQ ID NO: 7454 - protein, 452 aa, synthetic construct
MKAAIYIRVSTQEQVGNYSIQAQTEKLTALCRSKDWDVYDIFIDGGYSGSNMNRPALNEMLSKLHEIDAVVVYRLDRLSRSQRDTTTLIEEYFLKNNVEFVSLSETLDTSSPFGRAMIGILSVFAQLERETIRDRMVMGKIKRIEAGLPLTTAKGRTFGYDVIDTKLYINEEEARQLQLIYDIFEEEQSITSLQKRLKKLGFKVRTYNRYNNWLTNDLYCGYVSYKDKVHVKGIHEPIISEEQFYRVQEIFTRTGKNPNMNRDSASLLNNLVVCSKCGLGFVHRSKDTVSRGKKYHYRYYSCKTYKHTHELEKCGNKTWRADKLEELIINRVNNYSFASRNVDKEDELDSLNEKLEIEHAKKRRLFDLYINGSYEVSELDSMMNDIDAQINYYESQIEANEELKKNKKIQENLADLATVDFDSLEFREKQLYLKSLINKIYIDGEQVTIEWL

SEQ ID NO: 7455 - protein, 469 aa, synthetic construct
MSYTTPVRAAVYLRISEDRSGEQLGVARQREDCLKLCGQRNWVPVEYLDNDVSASTGRRRPAYEQMLADITAGKIAAVVAWDLDRLHRRPIELEAFMSLADEKRLALATVAGDVDLATPQGRLVARLKGSVAAHETEHKKARQRRAARQKAERGYPNWSKAFGYLPGPNGPEPDPRTAPLVKQAYADILAGASLGDVCRQWNGGGALTITGRPWTTTTLSKFLRKPRNAGLRAYKGARYGPVDRDAIVGKAQWSPLVDEATFWAAQAVLDAPGRAPGRKSVRRHLLTGLAGCGKCGNHLAGSYRTDGRVVYVCKACHGVTILADNIEPILYHIVAERLAMPDAVDLLRREVHDAAEAETIRLELETLYGELDRLAVERAEGLLTARQVKISTDIVNAKITKLQARQLDQERLRVFDGIPLGTPQVAGMIAELSPDRFRAVLDVLAEVVVRPVGKGGRTFSPERVQVNWR

SEQ ID NO: 7456 - protein, 452 aa, synthetic construct
MKAAIYIRVSTQEQVGNYSIQAQTEKLTALCRSKGWDVYDIFIDGGYSGSNMNRPALNEMLSKLHEIDAVVVYRLDRLSRSQRDTTTLIEEYFLKNNVEFVSLCETLDTSSPFGRAMIGILSVFAQLERETIRDRMVMGKIKRIEAGLPLTTAKGRTFGYDVIDTKLYINEEEAKQLRLIYDIFEEEQSITSLQKRLKKLGFKVRTYNRYNNWLTNDLYCGYVSYKDKVHVKGIHEPIISEEQFYRVQEIFTRMGKNPNMNRDSASLLSNLVVCSKCGLGFVHRSKDTMSRGKKYHYRYYSCKTYKHTHELEKCGNKTWRADKLEELIINRVNNYSFASRNVDKEDELDSLNEKLRVEHAKKKRLFDLYINGSYEVSELDSMMSDIDAQINHYESQIEANEKLKKNKKIQENLADLAAVDFDSLEFREKQQYLKSLINKIYIDGEQVTIEWL

SEQ ID NO: 7457 - protein, 452 aa, synthetic construct
MKAAIYIRVSTQEQVGNYSIQAQTEKLTALCRSKDWDVYDVFVDGGYSGSNMNRPALNEMLSKLHEIDAVVVYRLDRLSRSQRDTTTLIEEYFLKNNVEFVSLSETLDTSSPFGRAMIGILSVFAQLERETIRDRMVMGKIKRIEAGLPLTTAKGRTFGYDVIDTKLYINEEEAKQLRLIYDIFEEEQSITFLQKRLKKLGFKVRTYNRYNNWLTNDLYCGYVSYKDKVHVKGIHEPIISEEQFYRVQEIFTRMGKNPNMNRDSASLLNNLVVCSKCGLGYVHRSKDTMSRGKKYHYRYYSCKTYKHTHELEKCGNKIWRADKLEELIINRVNNYSFASRNVDKEDELDSLNERLKIEHAKKKRLFDLYINGGYEVSELDSMMSDIDAQINYYESQIEASEELKKNRKIQENLADLATVDFDSLEFREKQLYLKSLISKIYIDGEQVTIEWL

SEQ ID NO: 7458 - protein, 452 aa, synthetic construct
MKAAIYIRVSTREQVENYSIQAQTEKLTALCRSKDWDVYDIFIDGGYSGSNMNRPALDEMLSKLHEIDAVVVYRLDRLSRSQRDTITLIEEHFLKNNVEFVSLSETLDTSSPFGRAMIGILSVFAQLERETIRDRMVMGKIKRIEAGLPLTTARGRTFGYDVIDTKLYINEEEAKQLQLVYDIFEEEQSITSLQKRLKKLGFKVRTYSRYNNWLTNDLYCGYVSYKDKVHVKGIHEPIISEEQFYRVQEIFTRMGKGPNMNRDSASLLNNLVVCSKCGLGFVHRRKDTMSRGKKYHYRYYSCKTYKHTHELEKCGNKIWRADKLEELIINRVNNHSFASRNADKEDELDSLNEKLKIEHAKKKRLFDLYINGSYEVSELDCMMNDIDAQINYYESRIEANEELKKDKKIQESLANLATVDYDSLEFREKQLYLKSLINKIYIDGEQVTIEWL

SEQ ID NO: 7459 - protein, 469 aa, synthetic construct
MSHTTPVRAAVYLRISEDRSGEQLGVARQREDCLKLCDQRKWVPVEYLDNDVSASTGKHRPAYEQMLADITAGKIAAVVAWDLDRLHRRPIELEAFMSLADGKRLALATVAGDVDLATPQGRLVARLKGSVAAHETEHKKARQRRAARQKAERGHPNWSKAFGYLPGPNGPEPDPRTAPLVKQAYADILAGASLGDVCRQWNDAGAFTITGRPWTTTTLSKFLRKPRNAGLRAYKGARYGPVDRDAIVGKAQWSPLVDGAIFWAAQAVLDAPGRAPGRKSVRRHLLTGLAGCGKCGNHLAGSYRTDGRVVYVCKACYGVAILADNIEPILYHIVAERLAMPDAVGLLRREIHDAAEAETIRLELETLYDELDRLAVERAEGLLTARQVKISTDIVNAKIAKLQARQLDQERLRVFDGVPLGTPQVAGMIAELSPDRFRAVLDVLAEVVVQPVGKGGRIFNPERVQVNWR

SEQ ID NO: 7460 - protein, 452 aa, synthetic construct
MKAAIYIRVSTREQVENYSIQAQTEKLTALCRSKDWDVYDIFIDGGYSGSNMNRPALNEMLSKLHEIDAVVVYRLDRLSRSQRDTITLIEEYFLKNNVEFVSLSETLDTSSPFGRAMIGILSVFAQLERETIRDRMVMGKIKRIEAGLPLTTAKGRTFGYDVIDTKLYINEEEAKQLQLIYDIFEEVQSITFLQKRLKKLGFKVHTYSRYNDWLTNDLYCGYVSYKDKVHVKGIHEPIISEEQFYRVQEIFTRMGKNPNMNRDSASLLNNLVVCSKCGLGFVHRRKDTVSRGKKYHYRYYSCKTYKHIHELEKCGNKIWRADKLEELIINRVNNYSFASRNVDKGDELDSLNEKLKIEHAKKKRLFDLYINGSYEVSELDSMMSDIDAQINYYESQTEANEELKKNKKIQENLANLATVDYDSLEFREKQLYLKSLINKIYIDGEQVTIEWL

SEQ ID NO: 7461 - protein, 452 aa, synthetic construct
MKAAIYIRVSTQEQVGNYSIQAQTEKLTALCRSKDWDVYDIFVDGGYSGSNMNRPALNEMLSKLHEIDAVVVYRLDRLSRSQRDTTTLIEEYFLKNNVEFVSLSETLDTSSPFGRAMIGILSVFAQLERETIRDRMVMGKIKRIEAGLPLTTAKGRTFGYDVIDTKLYINEEEAKQLQLIYDIFEEEQSITSLQKRLKKLGFKVRTYNRYNNWLTNDLYCGYVSYKDKVRVKGIHEPIISEEQFYRVQEIFTRMGKNPNMNRDSASLLNNLVVCSKCGLGFVHRSKDTMSRGKKYHYRYYSCKTYKHTHELEKCGNKTWRADKLEELIINRVNNYSFASRNVDKEDELDGLNEKLKIEHAKKKRLFDLYTNGSYEVSELDSMMSDIDAQINYYESQIEANEELKKTKKIQENLADLATVDFDSLEFREKQRYLKSLINKIYIDGEQVTIEWL

SEQ ID NO: 7462 - protein, 469 aa, synthetic construct
MSNTTPVRAAVYLRISEDRSGEQLGVARQREDCLKLCGQRKWVPVEYLDNDVSASTGKRRPAYEQMLADIAAGRIAAVVAWDLDRLHRRPIELEAFMSLADEKRLALATVAGDVDLATPQGRLVARLKGSVAAHETEHKKARQRRAARQKAERGLPNWSKAFGYLPGPNGPEPDPRIAPLVKQAYADILAGASLGDVCRQWNDAGAFTITDRPWTTTTLSKFLRKPRNAGLRAYKGARYGPVDRDAIVGKAQWSPLVDEATFWAAQAVLDAPGRAPGRKSVRRHLLTGLAGCGKCGNHLAGSYRTDGQVVYVCKACYGVAILADNIVPILYHVVAERLAMPDAVDLLRHEIHDAAEAEAIRLELETLYGELDRLAVERAEGLLTARQVKISTDIVNAKITKLQARQLDQERLRVFNGIPLGTPQVAGVIAELSPDRFRAVLDVLAEVVVQPVDRSGRNFNPERVRVNWR

SEQ ID NO: 7463 - protein, 452 aa, synthetic construct
MKAAIYIRVSTREQVENYSIQAQTEKLTALCRSKDWDVYDIFIDGGYSGSNMNRPALNEMLSKLHEIDAVVVYRLDRLSRSQRDTITLIEEYFLKNNVEFVSLSETLDTSSPFGRAMIGILSVFAQLERETIRDRMVMGKIKRIEAGLPLTTAKGRTFGYDVIDTKLYINEEEAKQLQLIYDIFEEEQSITFLQKRLKKLGFKVRTYNRYSNWLTNDLYCGYVSYKDKVHVKGIHEPIISEEQFYRVQEIFTRMGKNPNMNRDSASLLNNLVVCSKCGLGFVHRRKDTMSRGKKYHYRYYSCKTYKHTHELEKCGNKIWRADKLEELIINRVNNYSFASRNVDKEDELDSLNKKLKIEHAKKKRLFDLYINGSYEMSELDSMMNDIDAQIDYYESRIEANEELKKNKKIQENLANLATVDYDSLGFREKQLYLKGLINKIYIDGEQVTIEWL

SEQ ID NO: 7464 - protein, 452 aa, synthetic construct
MKAAIYIRVSTQEQVENYSIQAQTDKLTALCRSKDWDVYDIFIDGGYSGSNMNRPALNEMLSKLHEIDAVVVYRLDRLSRSQRDTTTLIEEYFLKNNVEFVSLSETLDTSSPFGRAMIGILSVFAQLERETIRDRTVMGKIKRIEAGLPLTTAKGRTFGYDVIDTKLYINEEEAKQLQLIYDIFEEEQSITSLQKRLKKLGFKVRTYNRYNNWLTNDLYCGYVSYKDKVHVKGIHEPIISEEQFYRVQEIFTRMGKNPNMNRDSASLLNNLVECSKCGLGFVHRSKDTMSRGKKYHYRYYSCKTYKHTHELEKCGNKTWRADKLEELIINRVNNYSFASRNVDKEGELDSLNEKLKIEHAKKRRLFDLYINGSYEVSELDSMMNDIDAQISYYESQIEANEELKKNKKIQENLANLATVDFDSLEFREKQLYLKSLINKIYIDGEQVTIEWL

SEQ ID NO: 7465 - protein, 469 aa, synthetic construct
MSYTTPVRAAVYLRISEDRSGEQLGVARQREDCLKLCDQRKWVPVEYLDNDVSASTGKRRPAYEQMLADITAGKIAAVVAWDLDRLHRRPVELEAFMSLADEKRLALATVAGDVDLATPQGRLVARLKGCVAAHETEHKKARQRRAARQKAERGHPNWSKAFGYLPGPNGPEPDPRTAPLVEQAYADILAGASLGDVCRQWNDAGAFTITGRPWTTTTLSKFLRKPRNAGLRAYKGARYGPVDRDAIVGKAQWSPLVDEATFWAAQAVLDAPGRAPGRKSVRRHLLTGLAGCGKCGNHLAGSCRTDGRVVYVCKACHGVAILADNIEPILYHIVAERLAMPDAVGLLRREIHDAAEAETIRLELETLYGELDRLAVERAEGLLTARQVKISTDIVNAKITGLQARQLDQERLRVFDGIPLGTPQVAGMIAELSPDRFRAVLDVLAEVVVQPVGKSGRIFNPERVQVNWR

SEQ ID NO: 7466 - protein, 452 aa, synthetic construct
MKAAIYIRVSTREQVENYSIQAQTEKLTALCRSKDWDVYDTFIDGGYSGSNMNRPALNEMLSKLHEIDAVVVYRLDRLSRSQRDTITLIEEYFLKNNVEFVSLSETLDTSSPFGRAMIGILSVFAQLERETIRDRMVMGKIKRIEAGLPLTTAKGRTFGYDVIDTKLYVNEEEAKQLQLIYDIFEEEQSITSLQRRLKKLGFKVRTYNRYNNWLTNDLYCGYVSYKDKVHVRGIHEPIISEEQFYRVQEIFTRMGKNPNMNRDSASLLNNLVVCSKCGLGFVHRRKDAMSRDKKYHYRYYSCKTYKHIHELEKCGNKIWRADELEELIINRVNNYSLASRNVDKEDGLDSLNEKLKIEHAKKKRLFDLYLNGSYEVSELDSMMNDIDAQISYYEGQIEANEALIKSKKIQENLANLATVDFDSLEFREKQLYLKSLINKIYVDGEQVTIEWL

SEQ ID NO: 7467 - protein, 485 aa, synthetic construct
MTKKVAIYTRVSTTNQAEEGFSIDEQIDRLTKYAEAMGWQVSDAYTDAGYSGAKLERPAMQRLINDIENKAFDTVLVYKLDRLSRSVRDTLYLVKDVFTKNKIDFISLNESIDTSSAMGSLFLTILSAINEFERENIKERMTMGKLGRAKSGKSMMWTKTAFGYYHNRETGILEIVPLQATIVEQIFTDYLSGISLTKLRDKLNESGHIGKDIPWSYRTLRQTLDNPVYCGYIKFKDSLFEGMHKPIIPYETYLRVQRELGERQQQTYERNNNPRPFQAKYMLSGMARCGYCGAPLRIVLGRKRKDGSRTMKYHCANRFPRKTKGVTVYNDNKKCDSGTYDLSNLENTVIDNLIGLQENNDSLLKIINGNNQPILDTGSFEKQISQIDKKIQKNSDLYLNDFITMDELKDRTDSLQAEKKLLKAKISENKFSDSTDVFELVKTQLGSIPINELSYDNKKKIVNSLVSKVDVTADNVDIIFKFQLA

SEQ ID NO: 7468 - protein, 452 aa, synthetic construct
MKAAIYIRVSTREQVENYSIQAQTEKLTALCRSKDWDVYDIFIDGGYSGSNMNRPALNEMLSKLHEIDAVVVYRLDRLSRSQRDTITLIEEYFLKNNVEFVSLSETLDTSSPFGRAMIGILSVFAQLERETIRDRMVMGKIKRVEAGLPLTTAKGRTFGYDVIDTKLYINEEEAKQLQLIYDIFEEVQSITFLQKRLKKLGFKVRTYNRYNNWLTNDLYCGYVSYKDKVHVKGIHEPIISEEQFYRVQEIFTRMGKNPNMNRGSASLLNNLVVCSKCGLGFVHRRKDTTSRGKKYHYRYYSCKTYKHTHELEKCGNKIWRADKLEELIINRVNSYSFASRNVDKAEELDSLNEKLKVEHAKKKRLFDLYISGSYNVSELDSMMNDIDAQINYYESQIEANEELKKGKKIQENLAGLATVDFDSLGFREKQLYLKSLINKIYIDGEQVTIEWL

SEQ ID NO: 7469 - protein, 485 aa, synthetic construct
MTKKVAIYTRVSTTNQAEEGFSIDEQIDRLTKYAEAMGWQVSDTYTDAGLSGAKLERPAMQRLINDIENKAFDTVLVYKLDRLSRSVRDTLYLVKDVFTKNKIDFISLNESIDTSSAMGSLFLTILSAINEFERENIKERMTMGKLGRARSGKSMMWTKTAFGYYHNRKTGILEIVPQQATIVEQIFTEYLSGTSLTKLRDKLNESGHIGKDIPWSYRTLRQTLDNPVYCGYIKFKDSLFEGMHKPIIPYETYLKVQKELEERQQQTYERNNNPRPFQAKYMLSGMARCGYCGAPLKIVLGHKRKDGSRTMKYHCANRFPRKTKGVTVYNDNKKCDSGIYDLCNLENAVIDNLIGFQENDDSLLKIINGNNQPILDTSSFKKRISRIDKKIQKNCDLYLSDFITMDELRDRTDGLQAEKKLLKAKISESKFNDSTDVLELVKTQLGSIPINELSYDNKKKIVNNLVSKVDVTADNVDIIFKFQLA

SEQ ID NO: 7470 - protein, 452 aa, synthetic construct
MKAAIYIRVSTREQVENYSIQAQTERLTALCRSKDWDVYDIFIDGGYSGSNMNRPALNEMLSKLHEIDAVVVYRLDRLSRSQRDTITLIEEYFLKNNVEFVSLSETLDTSSPFGRAMIGILSVFAQLERETIRDRMVMGKIKRIEAGLPLTTAKGRTFGYDVIDTKLYINEEEAKQLQLIYDIFEEERSITFLQKRLKKLGFKVRTYNCYNNWLTNDLYCGYVSYKDKVHVKGIHEPIISEEQFNRVQEIFTRMGKNPNMNRDSASLLNNLVVCSKCGLSFVHRRKDAMGRDKKYHYRYYSCKTYKHIHELEKCGNKIWRADKLEELIINRVNDYSFASRNVDKEDELDSLNEKLKIEHAKKKRLFDLYINGSYEVSELDSMMNDIDAQINYYESQIEANEELKKNKKIQENLAYLATVDFDSLEFREKQLYLKSLINKIYIDGEQVTIEWL

SEQ ID NO: 7471 - protein, 485 aa, synthetic construct
MTKKVAIYTRVSTANQAEEGFSIDEQIDRLTKYAEAMGWQVSDTYTDAGFSGAKLERPAMQRLINDIENKAFDTVLVYKLDRLSRSVRDTLYLVKDVFTKNKIDFISLNESIDTSSAMGSLFLTILSAINEFERENIKERMTMGKLGRAKSGKSMMWTRTAFGYYHNRKTGILEIVPLQATIVEQIFTDYLSGISLTKLRDKLNESGHIGKDIPWSYRTLRQTLDNPVYCGYIKFKDSLFEGMHKPIIPYETYLKVQKELEERQQQTYERNNNPRPFQAKYMLSGMARCGYCGAPLKIVLGHKRKDGSRTMKYHCANRFPRKTKGVTVYNDNKKCDSGTYDLSNLENTVIDNLIGLQENNDSLLKIINGNNQPVLDTSSFKKQISQIDKKIQKNSDLYLNDFITMDELKDRTDSLQAEKRLLKAKISETKSNDSTDVFELVKTQLGSIPINELSYDNKKKIVNNLVSKVDVTADNVDIIFKFQLA

SEQ ID NO: 7472 - protein, 452 aa, synthetic construct
MKAAIYIRVSTREQVENYSIQAQTEKLTALCRSKDWDVYDIFVDGGYSGSNMNRPALNEMLSKLHEIDAVVVYRLDRLSRSQRDTITLIEEYFLKNNVEFVSLSETLDTSSPFGRAMIGILSVFAQLERETIRDRMVMGKIKRIEAGLPLTTAKGRTFGYDVIDTKLYINEEEAKQLQLIYDIFEEEQSITFLQKRLKELGFKVRTYNRYNNWLTNDLYCGYVSYKDKVHVKGIHEPIISEEQFYRVQEIFTRMGKNPNMNRDSASLLNNLVVCGKCGLGFVHRRKGIMSRGKKYHYRYYSCKTYKHIHELEKCGNKIWRADKLEELIINRVNDYSLASRNVDKEDELDSLNEKLKIERAKKKRLFDLYINGSYEVSELDSMMNNIDAQINYYESQIEANEELKKDKKIQENLAHLATVDFDSLEFREKQLYLKSLISKIYIDGEQVTIEWL

SEQ ID NO: 7473 - protein, 469 aa, synthetic construct
MSYTTPVRAAVYLRISEDRSGEQLGVARQREDCLKLCDQRKWVPVEYLDNDVSASTGKRRPAYEQMLADITAGKIAAVVAWDLDRLHRRPIELEAFMCLADEKRLALATVAGDVDLATPQGRLVARLKGSVAAHETEHKKARQRRAARQKAERGYPNWSKAFGYLPGPNGPEPDPRTAPLVKQAYADILAGASLGDVCRQWNGAGAFTITGRPWTTTTLSKFLRKPRNAGLRAYKGARYGPVDRNAIVGKAQWSPLVDEATFWAAQAVLDAPGRAPGRKSVRRHLLTGLAGCGKCGNHLAGSCRTDGRVVYVCKACHGVAILADNIEPILYHIVAERLAMPDAVDLLRREIHDAAEAETIRLELETLYGELDCLAVERAEGLLTARQVKISTDIVNAKIAKLQARQLDQERLRVLDGIPLGTPQVASMIAVLSPDRFRAVLDVLAEVVVQPVGKSGRIFNPERVRVNWR

SEQ ID NO: 7474 - protein, 452 aa, synthetic construct
MKAAIYIRVSTREQVENYSIQAQTERLTALCRSKDWDVYDIFIDGGYSGSNMNRPALNEMLSKLHEIDAVVVYRLDRLSRSQRDTITLIEEYFLKNNVEFVSLSETLDTSSPFGRAMIGILSVFAQLERETIRDRMVMGKIKRIEAGLPLTTAKGRTFGYDVIDTKLYINEEEAKQLQLIYDIFEEEQSITSLQKRLKKLGFKVRTYSRYNSWLTNDLYCGYVSYKDKVHVKGIHEPIISEEQFYRVQEIFTRMGKNPNMNRDSASLLSNLVVCSKCGLGFVHRRKDTMSRGKKYHYRYYSCKTYKHTHELEKCGNKIWRADKLEELIISRVNNYCFASRNVDKEDELDSLNEKLKIEHAKRRRLFDLYTNGSYNVSELDSMMNDIDAQINYYESQIEANEERRKNKKIQENLADLATVDYDNLGFREKQLYLKSLINKIYIDGEQVTIEWL

SEQ ID NO: 7475 - protein, 469 aa, synthetic construct
MCYTTPVRAAVYLRISEDRSGEQLGVARQREDCLKLCDQRKWVPVEYLDNDVSASTGKRRPAYEQMLADITAGKIAAVVAWDLDRLHRRPVELEAFMCLADEKRLALATVAGDVDLATPQGRLVARLKGSVAAHETEHKKARQRRAARQKAERGYPNWSKAFGYLPGPNGPEPDPRTAPLVKQAYADILAGASLGDVCRQWNGAGAFTITGRPWTTTALSKFLRKPRNAGLRAYKGARYGPVDRDAIVGKAQWSPLVDEATFWAAQAVLDAPGRAPGRKSVRRHLLTGLAGCGKCGNHLAGSYRTDGKVVYVCKACHGVAILADNIEPILYHIVAERLAMPDAVDLLRRETHDVAEAETIRLELDALYGELDRLAVERAEGLLTARQVKICTDIVNAKITKLQARQLDQERLRVLDGIPLGTPQVAGMIEELSPDRFRAVLDVLAEVVVQPVGKGGRIFNPERVQVNWR

SEQ ID NO: 7476 - protein, 452 aa, synthetic construct
MKAAIYIRVSTQEQVENYSIQAQTEKLTALCRSKDWDVYDIFIDGGYSGSNMNRPALNEMLSKLHEIDAVAVYRLDRLSRSQRDTITLIEEYFLKNNVEFVSLSETLDTSSPFGRAMIGILSVFAQLERETIRDRTVMGKIKRIEAGLPLTTAKGRTFGYDVIDTKLYINEEEAKQLQLIYDIFEEEQSITFLQKRLKKLGFKVRTYSRYNDWLTNDLYCGYVSYKDKVHVKGIHEPIISEEQFHRVQEIFARMGKNPNMNRDSASLLNNLVVCSKCGLGFVHRRKDTTSRGKKYHYRYYSCKTYKHIHELEKCGNKIWRADKLEELIINRVNYYSLASRNMDKEDELDSLNEKLRTEHAKKKRLFDLYINGSYEVSELDSMMNDIDAQINYYESQIEANEELKKNKKIQENLANLATVDYDSLEFREKQLYLKSLINKIYIDGEQVTIEWL

SEQ ID NO: 7477 - protein, 452 aa, synthetic construct
MKAAIYIRVSTREQVENYSIQAQTEKLTALCRSKDWDVYDIFIDGGYSGSNMNRPALNEMLSKLHEIDAVVVYRLDRLSRSQRDTITLIEEYFLKNNVEFVSLSETLDTSSPFGRAMIGILSVFAQLERETIRDRMVMGKIKRVEAGLPLTTAKGRTFGYDVIDTKLYINEEEAKQLQLIYDIFEEEQSITSLQKRLKKLGFKVRTYSCYNNWLTNDLYCGYVSYKDKVHVKGIHEPIISEEQFYRVQEIFARMGKNPNMNRDSASLLNNLVMCSKCGLGFVHRRKDTMSRGKKYHYRYYSCKTYKHIHELERCGNKIWRADELEELIINRVNNYSFASRNVDKEDELDSLNEKLRIEHAKKKRLFDLYINGSYEVSELDSMMNDIDAQINYYESQIEANEELKRNKKVQENLANLATVDYDSLEFREKQLYLKSLINKIYIDGEQVTIEWL

SEQ ID NO: 7478 - protein, 452 aa, synthetic construct
MKAAIYIRVSTREQVENYSIQVQTEKLTALCRSKDWDVYDIFIDGGYSGSNMNRPALNEMLSKLHEIDAVVVYRLDRLSRSQRDTITLIEEYFLKNNVEFVSLSETLDTGSPFGRAMIGILSVFAQLERETIRDRMVMGKIKRIEAGLPLTTAKGRTFGYDVIDTKLYINEEEAKQLRLIYDIFEEEQSITFLQRRLKELGFKVRTYSRYNSWLTNDLYCGYVSYKDKVRVKGIHEPIISEEQFYRVQEIFTRMGKDPNMNRDSASLLNNLVVCSKCGLSFVHRRKDTMSRGKKYHYRYYSCKTYKHIHELEKCGNKIWRADKLEELVINRVNNYSFAGRNADKEDELDSLNEKLKIEHAKKKRLFDLYVSGSYVVSELDSMMNDIDAQINYYESQIEANEELKKNKKTQENLADLATVDFDSLEFREKQLYLKSLINKIYIDGEQVTIEWL

SEQ ID NO: 7479 - protein, 469 aa, synthetic construct
MSYTTPVRAAVYLRISEDRSGEQLGVARQREDCLKLCGQRKWVPVEYLDNDVSASTGKRRPAYEQMLADITAGKIAAVVAWDLDRLHRRPIELEAFMSLADEKRLALATVAGDVDLATPQGRLVARLKGSVAAHETEHKKARQRRAARQKAERGYPNWSKAFGYLPGPNGPEPDPRTAPLVKQAYADILAGASLGDVCRQWNDAGAFTITGRPWTTTTLSKFLRKPRNAGLRAYKGARYGPVDRDAIVGKAQWSPLVDETTFWAAQAVLDAPGRAPGRKSVRRHLLTGLAGCGKCGNHLSGSYRTDGRVVYVCKACHGVAILADNIEPILYHIVAERLAMPDAVDLLHREIHDAAGAETIRLELETLRGELDRLAVERAEGLLTARQVKISTDIVNAKITKLQARQLDQERLRVFDGIPLGTPQVAGMIAELSPNRFRAVLDVLAEVVVQPVGKSGRIFNLERVQVNWR

SEQ ID NO: 7480 - protein, 452 aa, synthetic construct
MKAAIYIRVSTREQVENYSIQAQTEKLTALCRSKDWGVYDIFIDGGYSGSNMNRPALNEMLSKLHEIDAVVVYRLDRLSRSQRDTITLIEEYFLKNNVEFVSLSETLDTSSPFGRAMIGILSVFAQLERETIRDRMVMGKIKRIEAGLPLTTAKGRTFGYDVIDTKLYINEEEAKQLRLIYDIFEEEQSITFLQKRLKELGFKVRTYSCYNNWLTNDLYCGYVSYKDKVHVKGIHEPIISEEQFYRVQEIFTRMGKNPNMNRDSASLLNNLVVCSRCGLGFVHRRKDTMSRGKKYHYRYYSCKTYKHTHELEKCGNKIWRADKLEELIINRVNNYSFASRNADKEDELDSLNEKLKVEHAKKKRLFDLYTNGSYEVSELDSMMDDIDAQINYYKSQIEANEELKKNKKIQENLANLATMDYDSLEFREKQLYLKSLINKIYIDGEQVTIEWL

SEQ ID NO: 7481 - protein, 485 aa, synthetic construct
MTKKVAIYTRVSTTNQAEEGFSIDEQIDRLTKYAEAMGWQVSDTYTDAGFSGAKLERPAMQRLINDIENKAFDTVLVYKLDRLSRSVRDTLHLVKDVFTRNKIDLISLNESIDTSSTMGSLFLTILSAINEFERENIKERMTMGKLGRAKSGKSMMWTKTAFGYYHNRKTGILEIVPLQATIVEQIFTDYLSGISLTKLRDKLNESGHIGKDIPWSYRTLRQTLDNPVYCGYIKFKDSLFEGMHKPIIPYETYLKVQKELEERQQQTYECNNNPRPFRAKYMLSGMARCGYCGAPLRIVLGHKRKDGSRTMKYHCANRFPRKTKGVTVYNDNKRCDSGTYDLGNLENTVIDNLIGFQENNDSLLKIINGNNQPILDTSSFKEQISQIDKKIQKNTDLYLNDFITMDELKDRTDSLQAEKKLLKAKISENKFNDSTDVFELVRTQLGSIPINELCYDDKKRIVNNLVSKVDVTADNVDIIFKFQLA

SEQ ID NO: 7482 - protein, 485 aa, synthetic construct
MTKKVAIYTRVSTTNQAEEGFSIDEQIDRLTKYAEAMGWQVSDTYTDAGSSGAKLERPAMQRLINDIENKAFDTVLVHKLDRLSRSVRDTLYLVKDVFTKNKIDFISLNESIDTSSAMGSLFLTILSAINEFERENIKERMTMGKLGRAKSGKSMMWTKTAFGYYHNRKTGILEIVPLQATIVEQIFTDYLSGISLTKLRDKLNESGHIGKDIPWSYRTLRQTLDNPVYCGYIKFKDSLFEGTHKPIIPYETYLKVQKELGERQQQTYERNNNPRPFQAKYMLSGMARCGYCGAPLRIVLGHKRKDGSRAMKYHCANRFPRKTKGVTVYNDNKKCDSGTYDLSDLENTVIDNLIGFQENNDSLLKIINGNNQPILDTSSFKKQISQIDKKIQKNSDLYLNDFITMDELKDRTDSLQAEKKLLKAKISENKFNDSTDVFELVKTQLGSIPINELSYDNKKKIVNNLVSKVDVTADNVDIIFKFQLA

SEQ ID NO: 7483 - protein, 452 aa, synthetic construct
MKAAIYIRVSTQEQVGNYSIQAQTEKLTALCRSKDWDVYDIFIDGGYSGSNMNRPALNEMLSKLHEIDAVVVYRLDRLSRSQRDTTTLIEEYFLKNNVEFVSLSETLDTSSPFGRAMIGILSVFAQLERETIRDRMVMGKIKRIEAGLPLTTAKGRTFGYDVIDTKLYINEEEAKQLQLIYDIFEEEQSITSLQKRLKKLGFKVRTYNRYSNWLTNDLYCGYVSYKDKVHVKGIHEPIISEEQFYRVQEIFTRMGKNPNMNRDSASLLNSLVVCSKCGLSFVHRSKDTMSRGKKYHYRYYSCKTYKHTHELEKCGNKTWRADKLEELIINRVNNYSFASRNVDKEDELDGLNEKLKIEHAKKKRLFDLYINGSYEVSELDSMMNDIDAQISCYESQIEANEELKKNRKVQENLADLATVDFDSLEFREKQLYLKSLINKIYIDGEQVTIEWL

SEQ ID NO: 7484 - protein, 485 aa, synthetic construct
MTKKVAIYTRVSTTNQAEEGFSIDEQIDRLTKYAEAMGWQVSDTYTDAGVSGAKLERPAMQRLINDIENKAFDTVLVYKLDRLSRSVRDTLYLVKDVFTKNKIDFISLNESIDTSSAMGSLFLTILSAINEFERENIKERMTMGKLGRAKSGKSMMWTKTAFGYYHNRKTGILEIVPLQATIVEQIFTDYLSGISLTKLRDKLNESGHIGKDIPWSYRTLRQTLDNPVYCGYIKFKDSLFEGMHKPIIPYETYLKVQKELEERQQQTYERNNNPRPFQAKYMLSGMARCGYCGAPLKIVLGHKRKDGSRTMKYHCANRFPRKTKGVTVYNDNKKCDSGTYDLRNLENTVIDNLIGFQENNDSLLKIINGNNQPILDTSSFKEQISQIDKKIQKNSDLYLNDFITMDELKDRTDSLQAEKKLLKAKISENKFDDSTDVFELVKTQLGSIPINELSYDNKKKIVNNLVSKVDVTADNVDIIFKFQLA

SEQ ID NO: 7485 - protein, 452 aa, synthetic construct
MKAAIYIRVSTREQVENYSIQAQTEKLTALCRSKDWDVYDIFVDGGYSGSNMNRPALNEMLSKLHEIDAVVVYRLDRLSRSQRDTITLIEEYFLKNNVVFVSLSETLDTSSPFGRAMIGILSVFAQLERETIRDRMVMGKIKRIEAGLPLTTAKGRTFGYDVIGTKLYINEEEAKQLQLIYDIFEEEQSITLLQKRLKNLGFKVRTYSRYNSWLTNDLYCGYVSYKDKVRVKGIHEPIISEEQFYRVQEIFARMGKNPNMNRDSASLLNNLVVCSKCGLGFVHRRKDTKSRGKKYHYRYYSCKTYKHTYELEKCGNKIWRADKLEELIINRVSNYSLASRNVDKEDELDSLNEKLKIEHAKKKRLFDLYINGSYEVSELDSLMNDIDAQINYYESQIEANEELKKNKKIQESLAGLATVDFDSLEFREKQLYLKSLINKIYIDGEQVTIEWL

SEQ ID NO: 7486 - protein, 452 aa, synthetic construct
MKAAIYIRVSTQEQVGNYSIQAQTEKLTALCRSKGWDVYDIFIDGGYSGSNMNRPALNEMLSKLHEIDAVVVYRLDRLSRSQRDTTTLIEEYFLKNHVEFVSLSETLDTSSPFGRAMIGILSVFAQLERETIRDRMVMGKIKRIEAGLPLTTAKGRTFGYDVIDTKLYINEEEARQLQLIYDIFEEEQSITSLQKRLKKLGFKVRTYNRYNNWLTNDLYCGYVSYKDKVHVKGIHEPIISEEQFYRVQEIFTRMGKNPNTNRDSASLLNNLVVCSKCGLGFVHRSKDTMSRGKKYHYRYYSCKTYKHTHELEKCGNKTWRADKLEELIINRVNNYSFASRNVDKEDELDSLNEKLKIEHAKKKRLFDLYINGSYGVSELDSMMNDIDAQINYYESQIEANEELKENKKIQENLAELATVDFDSLEFREKQLYLKSLINKIYIDGEQVTIEWL

SEQ ID NO: 7487 - protein, 469 aa, synthetic construct
MSYTTPVRAAVYLRISEDRSGEQLGVARQREDCLKLCDQRKWVPVEYLDNDVSASTGKRRPAYEQMLADVTAGKIAAVVAWDLDRLHRRPVELEAFMSLADEKRLALATVAGDVDLATPQGRLVARLKGSVAAHETEHKKARQRRAARQKAERGYPNWSKAFGYLPGPNGPEPDPRTAPLVKQAYADILAGASLGDVCRQWNNAGAFTITGRPWTTTALSKFLRKPRNAGLRAYKGARYGPVDRDAIVGKAQWSPLVDEATFWAAQAVLDAPGRAPGRKSVRRHLLTGLAGCGKCGNHLAGSYRTDGRVVYVCKACHGVAILADNIEPILYHIVAERLAMPDAVGLLRREVHDAAEAETIRLELETLYGELDRLAVERAEGLLTARQVKISTNIVNAKITKLQARQLDQERLRVFDGIPLGTPQVAGMIAELSPDRFRAVLDVLAEVVVQPVGKSGRVFNPERVQMNWR

SEQ ID NO: 7488 - protein, 452 aa, synthetic construct
MKAAIYIRVSTREQVENYSIQAQTEKLTALCRSKDWDVYDVFVDGGYSGSNMNRPALNEMLSKLHEIDAVVVYRLDRLSRSQRDTITLIEEHFLKNNVEFVSLSETLDTSSPFGRAMIGILSVFAQLERETIRDRMVMGKIKRIEAGLPLTTAKGRTFGYDVIDTKLYINEEEAKQLRLIYDIFEEVQSITSLQKRLKQLGFKVRTYNRYNNWLTNDLYCGYVSYKDKVHVKGIHEPIISEEQFYRVQEIFTRMGKNPNMNRDSASLLNNLVVCSKCGLGFVHRRKDAMSRDKKYHYRYYSCKTYKHIHELEKCGNKIWRADKLEELIIDRVNSYSIASRNADKEDELDSLNEKLKIEHAKKKRLFELYINGSYEVSELDSMMSDIDAQINYYESQIEANEELKKNEKIQENLAHLATVDFDSLEFREKQLYLRSLINKIYIDGEQVTIEWL

SEQ ID NO: 7489 - protein, 452 aa, synthetic construct
MKAAIYIRVSTREQVENYSIQAQTEKLTALCRSKDWDVYDIFIDGGYSGSNMNRPALNEMLSKLHEIDAVVVYRLDRLSRSQRDTITLIEEYFLKNNVEFVSLSETLDTSSPFGRAMIGILSVFAQLERETIRDRMVMGKIKRIEAGLPLTTAKGRTFGYDVIDTKLYINEEEAKQLQLIYDIFEEVQSITSLQKRLRKLGFKVRTYNRYSNWLTNDLYCGYVSYKDKVHVKGIHEPIISEEQFYRVQEIFTRMGKNPNMNRDSASLLNNLVVCSKCGLGFVHRRKDTMSRDKKYHYRYYSCKTYKHIHELEKCGNKIWRADELEELIINRVNDYSLASRNVDKEDELDSLNEKLKIEHAKKKRLFDLYINGSYEVSELDSMMNDIDAQINYYESRIEANEELKKNKKIQENLAYLATVDFDSLEFREKQLYLKSLINKIYIDGEQVTIEWL

SEQ ID NO: 7490 - protein, 452 aa, synthetic construct
MKAAIYIRVSTREQVENYSIQAQTEKLTALCRSKGWDVYDIFIDGGYSGSNMNRPALNEMLSKLHEIDAVVVYRLDRLSRSQRDTITLIEEYFLKNNVEFVSLSETLDTSSPFGRAMIGILSVFAQLERETIRDRMVMGKIKRIEAGLPLTTAKGRTFGYDVIDTKLYINEEEAKQLRLIYDIFEEEQSITFLQKRLKKLGFKVRTYNRYNNWLTNDLYCGYVSYKDKVHVKGIHVPIISEEQFYRVQEIFTRMGKNPNMNRDSASLLNNLVVCGKCGLGFVHRRKDAASRDKKYHYRYYSCKTYKHIHELEKCGNKIWRADKLEELIINRVNNYSFASRNAGKEDELDSLNEKLRTEHAKKKRLFDLYINGSYEVSELDSMMNDIDAQINYYESQIEANEELKKNKKIQETLADLATVDFDSLEFREKQLYLKSLINKIYIDGEQVTIEWL

SEQ ID NO: 7491 - protein, 452 aa, synthetic construct
MKAAIYIRVSTREQVENYSIQAQTEKLTALCRSKDWDVYDIFIDGGYSGSNMNRPALNEMLSKLHEIDAVVVYRLDRLSRSQRDTITLIEEYFLKNSVEFVSLSETLDTSSPFGRAMIGILSVFAQLERETIRDRMVMGKIKRTEAGLPLTTAKGRTFGYDVVDTKLYINEEEAKQLRLIYDIFEEEQSITFLQKRLKKLGFKVRTYSCYNNWLTNDLYCGYVSYKDKVHVKGIHEPIISEEQFRRVQEIFTRMGKNPNMNRDSASLLNNLVVCSKCGLGFVHRRKDTMSRGKKYHYRYYSCKTYKQTYELEKCGNKIWRADKLEELIIDRVNNYSLASRNVNKEDELDSLNEKLRIEHAKKKRLFDLYINGSYEVSELDSMMNDIDAQINYYESQIEANEELKKNKKIQANLADLATVDFDSLEFREKQRYLKSLINKIYIDGEQVTIEWL

SEQ ID NO: 7492 - protein, 452 aa, synthetic construct
MKAAIYIRVSTREQVENYSIRAQTERLTALCRSKDWDVYDIFIDGGYSGSNMNRPALNEMLSKLHEIDAVVVYRLDRLSRSQRDTITLIEEYFLKNNVEFVSLSETLDTSSPFGRAMIGILSVFAQLERETIRDRMVMGKIKRIEAGLPLTTAKGRTFGYDVIDTRLYINEEEAKQLRLIYDIFEEEQSITFLQKRLKKLGFKVHTYNRYNNWLTNDLYCGYVNYRDKVHVKGIHEPIISEEQFYRVQEIFTRMGKNPNMNRDSASLLNNLVVCSKCGLGFVHRRKDTTSRGKKYHYRYYSCKTYKHTHELEKCGNKIWRADKLEELIVNRVNNYSFASRNVDKAVELDSLNEKLKVEHAKKKRLFDLYINGGYNVSELDSMMDDIDAQINYYESQIEANEGLRKNKKIQENLAGLATVDFDSLEFREKQLYLKSLINKIYIDGEQVTIEWL

SEQ ID NO: 7493 - protein, 452 aa, synthetic construct
MKAAIYIRVSTREQVENYSIQAQTEKLTALCRSKDWGVYDIFIDGGYSGSNMNRPALNEMLSKLHEIDAVVVYRLDRLSRSQRDTITLIEEYFLKNNVEFVSLSETLDTSSPFGRAMIGILSVFAQLERETIRDRMVMGKIKRVEAGLPLTTAKGRTFGYDVIDTKLYINEEEAEQLRLIYDIFEEEQSITLLQKRLKKLGFKVHTYNRYSNWLTNDLYCGYVSYKDKVHVKGIHEPIISEEQFYRVQEIFTRMGKNPNMNRDSASLLNNLVVCSKCGLSFVHRRKDTMSRGKKYHYRYYSCKTYKHPHELEKCGNKIWRADKLEELIISRVNNYSFASRNVDKEDELDSLYEKLKTEHAKKERLFDLYLNGSYEVSELDSMMNDIDAQINYYESQIGANEELKKNKKIQENLAYLATVDFDSLEFREKQLYLKSLINKIYIDGEQVTIEWL

SEQ ID NO: 7494 - protein, 452 aa, synthetic construct
MKAAIYIRVSTREQVENYSIQAQTEKLTALCRSKDWDVYDIFIDGGYSGSNMNRPALNEMLSKLHEIDAVVVYRLDRLSRSQRDTITLIEEYFLKNNVEFVSLSETLDTSSPFGRAMIGILSVFAQLERETIRDRMVMGKIKRVEAGLPLTTAKGRTFGYDVIDTKLYINEEEAKQLQLIYDIFEEEQSITFLQKRLKRLGFKVRTYSCYNSWLTNDLYCGYVSYKDKVHVKGIHEPIISEEQFYRVQEIFTRMGKNPNMNRDSASLLNNLVVCSKCGLGFVHRRKDTMSRGKKYHYRYYSCKTYKHTHELEKCGNKIWRADKLEELIINRVNNYSLASRNVDKEDELDSLNEKLKIEHAKKKRLLDLYINGSYDVSELDSMMSDIDAQINYYESQIGANEELKRSKKIRENLADLATVDFDSLEFREKQLYLKSLINKIYIDGELVTIEWL

SEQ ID NO: 7495 - protein, 469 aa, synthetic construct
MSYTTPVRAAVYLRISEDRSGEQLGVARQREDCLKLCDQRKWVPVEYLDNDVSASTGKHRPAYEQMLADITAGKIAAVVAWDLDRLHRRPIELEAFMSLADEKRLALATVAGDVDLATPQGRLVARLKGSVAAHETEHKKARQRRAARQKAERGHPNWSKAFGYLPGPNGPEPDPRTAPLVKQAYADILAGASLGDVCRQWNDAGALTITGRPWATTTLSKFLRKPRNAGLRAYKGARYGPVDRDAIVGKAQWSPLVDETTFWAAQAVLDAPGRAPGRKSVRRHLLTGLAGCGKCGNHLAGSYRTDGRVVYVCKACHGVAILADNIEPILYHIVAERLAMPDAVDLLRREIHDAAEAETIRLELETLYGELDRLAVERAEGLLTARQVKISTDIVNAKITKLQAHQLDQERLRVLDGIPLGTPQVAGTIAELSPDRFRAVLDVLAEVVVQPVGKRGRIFNPERVQVNWR

SEQ ID NO: 7496 - protein, 452 aa, synthetic construct
MKAAIYIRVSTREQVENYSIQAQTEKLTALCRSKDWDVYDIFIDGGYSGSNMNRPALNEMLSKLHEIDAVVVYRLDRLSRSQRDTITLIEEHFLKNNVEFVSLSETLDTSSPFGRAMIGILSVFAQLERETIRDRMVMGKIKRIEAGLPLTTAKGRTFGYDVIDTKLYINEEEAKQLRLIYDIFEEEQSITFLQKRLKKLGFKVRTYNRYNNWLTNDLYCGYVSYKDKVHVKGIHEPIISEEQFYRVQEIFTRMGKNPNMNRDSASLLNNLVVCSKCGLGFVHRRKDTTSRGKKYHYRYYSCKTYKHTHELEKCGNKIWRADKLEELIINRVNNYSFASRNVGKEDELDSLNEKLKTEHAKKKRLFDLYINGSYEVSELDSMMNDIDAQINYYESQIEANGGLKKNKKVQENLANLATVDYDSLEFREKQLYLKSLINKIYIDGEQVTIEWL

SEQ ID NO: 7497 - protein, 452 aa, synthetic construct; identical to SEQ ID NO: 4733

SEQ ID NO: 7498 - protein, 485 aa, synthetic construct
MTKKVAIYTRVSTTNQAEEGFSIDEQIDRLTKYAEAMGWQVSGTYTDAGFSGAKLERPAMQRLINDIENKAFDTVLVYKLDRLSRSVRDTLYLVKDVFTKNKIDFISLSESIDTSSAMGSLFLTILSAINEFERENIKERMTMGKLGRAKSGKSMMWTKTAFGYYHNRKTGILEIVPLQATIVEQIFTDYLSGISLTKLRDKLNESGHIGKDIPWSYRTLRQTLDNPVYCGYIKFKDSLFEGMHKPIIPYETYLKVQKELEERQQQTYERNNNPRPFQAKYMLSGMARCGYCGAPLRIVLGHKRKDGSRTMKYHCANRFPRKTKGITVYNDNKKCDSGTYDLSSLENTVIDNLIGLQETNDSLLKIINGNNQPILDTSSLKKQISQIDKKIQKNSDLYLNDFITMDELRDRTDSLQAEKKLLEAKISENKFNDSTDVFELVKTQLGSIPINELSYDNKKKIVNNLVSKVDVTADSVDIIFKFQPA

SEQ ID NO: 7499 - protein, 452 aa, synthetic construct
MKAAIYIRVSTREQVENYSIQAQTEKLTALCRSKDWDVYDIFIDGGYSGSNMNRPALNEMLSRLHEIDAVVVYRLDRLSRSQRDTITLIEEYFLKNNVEFVSLSETLDTSSPFGRAMIGILSVFAQLERETIRDRMVMGKIKRIEAGLPLTTAKGRTFGYDVVDTKLYINEEEAKQLQLIYDIFEEEQSITFLQKRLKKLGFKVRTYSCYNNWLTNDLYCGYVSYKDKVHVKGIHEPIISEEQFYRVQEIFARMGKNPNMNRDSASLLNNLVVCSKCGLGFVHRRKDTTSRGKKYHYRYYSCKTYKHIHELEKCGNKIWRADKLEELIISRVNNYSFASRNVDKGDELDSLSEKLKIEHAKKKRLFDLYINGSYEVSELDSMMNDIDAQINYYESQIGANEESRRNKKIQENLADLATVDFDSLEFHEKQLYLRSLINKIYIDGEQVTIEWL

SEQ ID NO: 7500 - protein, 452 aa, synthetic construct
MKAAIYIRVSTQEQVGNYSIQAQTEKLTALCRSKGWDVYDIFIDGGYSGSNMNRPALNEMLSKLHEIDAVVVYRLDRLSRSQRDTTTLIEEYFLKNNVEFVSLSETLDTSSPFGRAMIGILSVFAQLERETIRDRMVMGKIKRIEAGLPLTTAKGRTFGYDVIDTKLYINEEEAEQLQLIYDIFEEEQSITSLQKRLKKLGFKVRTYNRYHNWLTNDLYCGYVSYKDKVHVKGIHEPIISEEQFYRVQEIFTRMGKNPNMNRASASLLSNLVVCSKCGLGFVHRSKDTMSRGKRYHYRYYSCKTYKHTHELEKCGNKIWRADKLEELIINRVNNYSFASRNVDKVDELDSLNEKLRVEHAKKKRLFDLYINGSYEVSELDSMMSDIDAQINYYESRIEANEELKKNKKIQENLADLATVDFDSLEFREKQLYLKSLINKIYIDGEQVTIEWL

SEQ ID NO: 7501 - protein, 485 aa, synthetic construct
MTKKVAIYTRVSTTNQAEEGFSIDEQIDRLTKYAETMGWQVSDTYTDAGLSGAKLERPAMQRLINDIENKAFDTVLVYKLDRLSRSVRDTLYLVKDVFTKNKIDFISLNESIDTSSAMGSLFLTILSAINEFERENIKERMTMGKLGRAKSGKSMMWTKTAFGYYHNRESGILEIVPLQAAIVERIFTDYLSGISLSKLRDKLNESGHIGKDIPWSYRTLRQTLDNPVYCGYIKFKDSLFEGMHKPIIPYETYLKVQKELEERQQQTYERNNNPRPFQAKYMLSGMARCGYCGAPLRIVLGRKRKNGSRTMKYHCANRFPRKTRGVTVYNDNKKCDSGTYDLNNLENTVIDNLIGFQENNDSLLKIINGNDQPILDTSCLKKQISQIDKKIQKNSELYLNDFITMDELKDRTDSLQAEKKLLKAKISENKFNDSTDVFELVKTQLGSIPINELSYDNKKKIVNNLVSKVDVTADNVDIIFKFQLA

SEQ ID NO: 7502 - protein, 452 aa, synthetic construct
MKAAIYIRVSTREQVENYSIQAQTERLTALCRSKDWDVYDIFIDGGYSGSNMNRPALNEMLSKLHEIDAVVVYRLDRLSRSQRDTITLIEEYFLKNNVEFVSLSETLDTSSPFGRAMIGILSVFAQLERETIRDRMVMGKIKRIEAGLPLTTAKGRTFGYDVIDTKLYINEEEAKQLQLIYDIFEEEQSITSLQKRLKKLGFKVRTYNRYINWLTNDLYCGYVSYKDKVHVKGIHEPIISEEQFYRVQEIFTRMGKNPNMNRDSASLLNNLVVCGKCGLGFVHRRKDTMSRGKKYRYRYYSCKTYKHIHELEKCGNKIWRADKLEELIINRVNNYSLAGRDVDKEDELDSLNEKLKTEHAKKRRLFDLYINGSYEVSELDSMMNDIDAQINYYESQIEANVELKKNKKIQENLAGLATVDFDSLGFREKQLYLKSLINKIYIDGEQVTIEWL

SEQ ID NO: 7503 - protein, 485 aa, synthetic construct
MTKKVAIYTRVSTTNQAEEGFSIDEQINRLTKYAEAMGWQVSDTYTDAGFSGAKLERPAMQRLINDIENKAFDTVLVYKLDRLSRSVRDTLYLVKDVFTKNKIDFISLNESIDTSSAMGSLFLTILSAINEFERENIKERMTMGKLGRAKSGKSMMWAKTAFGYYHNRKTGILEIVPLQATIVERIFTDYLSGISLTKLRDKLNESGHIGKDIPWSYRTLRQTLDNPVYCGYIKFKGSLFEGMHKPIIPYETYLKVQKELEERQQQTYERNNNPRPFQAKYMLSGMARCGYCGAPLKIVLGHKRKDGSRTMKYHCANRFPRKTKGVTVYNDNKKCDSGTYDLSNLENTVIDNLTGFQEDNDSLLKIINGNNQPVPDTSSFKRQISQIDKKIQKNSDLYLNDFITMDELKDRTDSLQAKKKLLKAKISENKFNDSTDVFELVKTQLGSIPINELSYDNKKKIVNNLVSKVDVTADNVDIIFKFQLA

SEQ ID NO: 7504 - protein, 485 aa, synthetic construct
MTKKVAIYTRVSTTNQAEEGFSIDEQTDRLTKYAEAMGWQVSDTYTDAGFSGAKLERPAMQRLINDIENKAFDTVLVYRLDRLSRSVRDTLYLVKEVFTKNKIDFISLNESIDTSSAMGSLFLTILSAINEFERENIRERMTMGKLGRAKSGKSMMWTKTAFGYYHNRKTGILEIVPLQATIVEQIFTDYLSGISLTKLRDKLNESGHIGKDIPWSYRTLRQTLDNPVYCGYIKFKGSLFEGMHKPIIPYETYLKVQKELEKRQQQTYERNNNPRPFQAKYMLSGMARCGYCGAPLRIVLGHKRKDGSRTMKYHCANRFPRKTKGVTVFNDNKKCDSGTYDLSNLENTVIDILIGFQENSDSLLKIINGNNQPILDTSSFKEQISQIDKKIQKNSDLYLNDFITMDELKVRTDSLQAEKKLLKAKISENKFNDSTDVFELVKTQLGSIPINELSYDNKKKIVNNLVSKVDVTADNVNIIFKFQLA

SEQ ID NO: 7505 - protein, 452 aa, synthetic construct
MKAAIYIRVSTQEQVENYSIQAQTEKLTALCRSKDWDVYDIFIDGGYSGSNMNRPALNEMLSKLHEIDAVVVYRLDRLSRSQRDTTTLIEEYFLKNNVEFVSLSETLDTSSPFGRAMIGILSVFAQLERETIRDRMVMGKIKRIEAGLPLTTAKGRTFGYDVIDTRLYINEEEAKQLQLIYDIFEEEQSITSLQKRLKKLGFKVRAYNRYNNWLTNDLYCGYVSYKDKVHVKGIHEPIISEEQFYRVQEILTRMGKNPNMNRDSASLLSNLVVCSKCGLGFVHRSKDTMSRGKKYHYRYYSCKTYKHTHELEKCGNKTWRADKLEELIINRVNDYSFASRNADKEGELDSLNEKLKIEHAKKKRLFDLYINGSYEVSELDSMMNDIDAQINYYESQIEANEELKKNKKIQETLADLATVDFDSLEFREKQLYLKSLISKIYIDGEQVTIEWL

SEQ ID NO: 7506 - protein, 452 aa, synthetic construct
MKAAIYIRVSTQEQVENYSIQAQTEKLTALCRSKDWDVYDIFIDGGYSGSNMNRPALNEMLSKLHEIDAVVVYRLDRLSRSQRDTITLIEEYFLKNNVEFVSLSETLDTSSPFGRAMIGILSVFAQLERETIRDRMVMGKIKRVEAGLPLTTAKGRTFGYDVIDTKLYINEEEAKQLRLIYDIFEEEQSITFLQKRLEKLGFKVRTYNRYNSWLTNDLYCGYVSYKDKVHVKGIHEPIISEEQFYRVQEIFTRRGKNPNMNRGSASLLNNLVVCSKCGLGFVHRRKDTMSRGKKYHYRYYSCKTYKHIHELEKCGNKIWRADRLEELIINRVNNYSLASRNADKEDELDSLNEKLKIEHAKKKRLFDLYINGSYEVSELDCMMNDIDAQINYYESQIEASEELKKDKKIQESLANLATVDYDSLEFREKQLYLKSLINKIYIDGEQVTIEWL

SEQ ID NO: 7507 - protein, 485 aa, synthetic construct
MTKKVAIYTRVSTTNQAEEGFSIDEQIDRLTKYAEAMGWQVSGTYTDAGFSGAKLERPAMQRLINDIENKAFDTVLVYKLDRLTRSVRDTLYLVKDVFTKNKIDFISLDESIDTSSAMGSLFLTILSAINEFERENIKERMTMGKLGRAKSGKSMMWTKTAFGYYHNRKTGILEIVPLQATIVEQIFTDYLSGISLTKLRDKLNESGHIGKDIPWSYRTLRQTLDNPVYCGYIKFKDSLFEGMHKPIIPYETYLKVQKELEERQQQTYARNNNPRPFQAKYMLSGMARCGYCGAPLRIVLGHKRKDGSRTMKYHCANRFPRKTKGVTVYNDNKKCDSGTYDLSNLENTVIDNLIGFQENNDSLLKIINSSNQPTLDTSSLKEQISQIDKKIQKNSDLYLNDFITMDELKDRTDSLQAEKELLKAKISENKFIDSTDVFELVKTQLGSIPINELSYDNKKKIVNNLVSKVDVTADNVDIIFKFQLA

SEQ ID NO: 7508 - protein, 452 aa, synthetic construct
MKAAIYIRVSTREQVENYSIQAQTEKLTALCLSKDWDVYDIFIDGGYSGSNMNRPALNEMLSKLHEIDAVVVYRLDRLSRSQRDTITLIEEYFLKNNVEFVSLSETLDTSSPFGRAMIGILSVFAQLERETIRDRMVMGKIKRIEAGLPLTTAKGRTFGYDVIDSKLYINEEEAKQLQLIYDIFEEEQSITFLQKRLKKLGFKVRTYNRYNNWLTNDLYCGYVSYKDIVHVKGIHEPIISEEQFYRVQEIFSRMGKNPNMNRGSASLLNNLVVCSKCGLGFVHRRKDTKSRGKKYHYRYYSCKTYKHTHELEKCGNKIWRADELEELIINRVNNYSLASRNVDKEDELDSLNEKLKIEHARKKRLFDLYINGNYEVSELDSMMSDIDAQISYYESRIEANEELKKNKKIQENLANLATVDYDSLEFREKQLYLKSLINKIYIDGEQVTIEWL

SEQ ID NO: 7509 - protein, 452 aa, synthetic construct
MKAAIYIRVSTQEQVENYSIQAQTEKLTALCRSKDWDVYDIFIDGGYSGSNMNRPALNEMLGKLHEIDAVVVYRLDRLSRSQRDTITLIEEYFLKNNVEFVSLSETLDTSSPFGRAMIGILSVFAQLERETIRDRMVMGKIKRIEAGLPLTTAKGRTFGYDVIDTKLYINEEEAKQLQLIYDIFEEEQSITSLQKRLKKLGFKVRTYSRYSNWLTNDLYCGYVSYKDKVHVKGIHEPIISEEQFCRVQEIFTRMGKNPNMNRDSASLLNNLVVCSKCGLGFVHRRKDTMSRGKKYHYRYYSCKTYKHTHELEKCGNKIWRADKLEELIINRVNNYSFASRNVGKEDELDSLNEKLKIEHAKKKRLFDLYINGSYEVSELDSMMNDIDAQINYYESQIEANEELKKNKKIQENLAGLATVDFDSLEFREKQLYLKSLINKIYIDGERVTIEWL

SEQ ID NO: 7510 - protein, 452 aa, synthetic construct
MKAAIYIRVSTQEQVGNYSIQAQTEKLTALCRSKDWDVYDIFIDGGYSGSNMNRPALNEMLSKLHEIDAVVVYRLDRLSRSQRDTTTLIEEYFLKNNVEFVSLSETLDTSSPFGRAMIGILSVFAQLERETIRDRMVMGKIKRIEAGLPLTTAKGRTFGYDVIDTKLYINEEEAKQLQLIYDIFEEEQSITFLQKRLKKLGFKVHTYNRYNSWLTNDLYCGYVSYKDKVHVKGIHEPIISEEQFYRVQEIFTRMGKNPNMNRDSASLLSNLVVCSKCGLGFVHRSKDTMSRGKKYHYRYYSCKTYKHTHELEKCGNKTWRADELEELIINRVSNYSFASRNADKEDELDSLNEKLKIEHAKKKRLFDLYINGSYEVSELDSMMNDIDAQINYYESQIEASEELKRNKKIQENLADLATVDFDSLEFREKQLYLKSLINKIYIDGEQVTIEWL

SEQ ID NO: 7511 - protein, 452 aa, synthetic construct
MKAAIYIRVSTQEQVGNYSIQAQTEKLTALCRSKDWDVYDIFIDGGYSGSNMNRPALNEMLSKLHEIDAVVVYRLDRLSRSQRDTTTLIEEYFLKNNVEFVSLSETLDTSSPFGRAMIGILSVFAQLERETIRDRMVMGKIKRIESGLPLTTAKGRTFGYDVIDTKLYVNEEEAKQLQLIYDIFEEERSITFLQKRLKKLGFKVHTYNRYNNWLTNDLYCGYVSYKDKVHVKGIHEPIISEEQFYRVQEIFTRMGKNPNMNRDSASLLSNLVVCSKCGLGFVHRSKDTMSRGKKYHYRYYSCKTYKHTHELEKCGNKTWRADKLEELIINRVNNHSFASRNVDKEDELDSLNEKLKIEHAKKRRLFDLYINGSYEVSELDSMMNDIDAQINHYGSQIEATEELRGNKKIQENLADLATVDFDSLEFREKQLYLKSLINKIYVDGEQVTIEWL

SEQ ID NO: 7512 - protein, 485 aa, synthetic construct
MTRKVAIYTRVSTTNQAEEGFSIDEQTDRLTKYAEAMGWQVSDTYTDAGFSGAKLERPAMQRLINDIENKAFDTVLVYKLDRLSRSVRDTLYLVKDVFTKNKIDFISLNESIDTSSAMGSLFLTILSAINEFERENIKERMTMGKLGRAKSGKSMMWTKTAFGYYHNRKTGILEIVPLQATIVEQIFTDYLSGISLTKLRDKLNESGHIGKDIPWSYRTLRQTLDNPVYCGYIKFKDSLFEGMHTPIIPYETYLRVQKELEERQQQTYERNNNPRPFQAKYMLSGMARCGYCGAPLKIVLGHKRKDGSRTTKYHCANRFPRKTKGVTVYNDNKKCDSGTYDLSNLENTVIDSLIGFQENNDSLLKIINGNNQPILDTSSLKKQISQIDKKIQKNSDLYLNDFITMDELRDRTDSLRAEKRLLKAKISENKFNDSTDVFELVKTQLGSIPINELNYDHKKKIVNNLVSKVDVTADNVDIIFKFQLA

SEQ ID NO: 7513 - protein, 452 aa, synthetic construct
MKAAIYIRVSTREQVENYSIQAQTEKLTALCRSKGWDVYDIFIDGGYSGSNMNRPALNEMLSKLHEIDAVVVYRLDRLSRSQRDTITLIEEYFLKNNVEFVSLSETLDTSSPFGRAMIGILSVFAQLERETIRDRMVMGKIKRIEAGLPLTTAKGRTFGYDVIDTKLYINEEEAKQLQLIYDIFEEEQSITFLQKRLKKLGFKVRTYNRYNNWLTNDLYCGYVSYKDKVHVKGIHEPIISEEQFYRVQEIFTRMGKNPNMNRGSASLLNNLVVCSKCGLGFVHRRKDIMSRGKKYHYRYYSCKTYKHIHELEKCGNKIWRADKLEELIINRVNSYSLVSRNVDKEDELDSLNEKLKIEHAKKKRLFELYINGSYEVSELDSMMNDIDAQINYYESQIEANEELKKNEKIQETLADLATVDYDNLEFREKQLYLKSLINKIYIDGEQVTIEWL

SEQ ID NO: 7514 - protein, 485 aa, synthetic construct
MTKKVAIYTRVSTTNQAEEGFSIDEQIDRLTKYAEAMGWQVSDTYTDAGFSGAKLERPAMRRLINDIENKAFDTVLVYKLDRLSRSVRDTLHLVKDVFTKNKIDFISLNESIDTSSAMGSLFLTILSAINEFERENIKERMTMGKLGRAKSGKSMMWTKTAFGYYHNRKTGILEIVPLQATIVEQIFTDYLSGISLTKLRDKLNESGHIGKDIPWSYRTLRQTLDNPVYCGYIKFKDSLFEGMHKPIIPYETYLKVQKELEERQQQTYERNNNPRPFQAKYMLSGMARCGYCGAPLRIVLGHKRKDGSRTMKYHCVNRSPRETKGVTVYNDNKKCDSGTYDLSNLENTVIGNLIGFQEDNDSLLKIINGSNQPILDTSSFKKQISQIDKKIQKNSDLYLNGFITMDELKDRTDSLQAEKKLLKAKISENKFNDSTDVFELVKTQLGSIPINELSYDDKKKIVNNLVSKVDVTADNVDIIFKFQLA

SEQ ID NO: 7515 - protein, 452 aa, synthetic construct
MKAAIYIRVSTREQVENYSIQAQTEKLTALCRSRDWDVYDIFIDGGYSGSNMNRPALNKMLSRLHEIDAVVVYRLDRLSRSQRDTITLIEEYFLKNNVEFVSLSETLDTSSPFGRAMIGILSVFAQLERETIRDRMVMGKIKRIEAGLPLTTAKGRTFGYDVIDTRLYINEEEAKQLQLIYDIFEEEQSITFLQKRLKKLGFKVRTYSCYNNWLTNDLYCGYVSYKDKVHVKGIHEPIISEEQFYRVQEIFARMGKNPNMNRDSASLLNNLVVCSKCGLGFVHRRKDIMSRGKKYHYRYYSCKTYKHIHELEKCGNKIWRADKLEELIINRVNNYSVASRNVDKEDELDSLNEKLKIEHAKKKRLFDLYINGSYEVSELDSMMSDIDAQINYYESRIEANEELRKNKKIQENLADLATVDFDSLEFREKQLYLKSLINKIYIDGEQVTIEWL

SEQ ID NO: 7516 - protein, 452 aa, synthetic construct
MKAAIYIRVSTREQVENYSIQAQTEKLTALCRSKDWDVYDIFIDGGYSGSNMNRPALNEMLSKLHEIDAVVVYRLDRLSRSQRDTITLIEEYFLKNSVEFVSLSETLDTSSPFGRAMIGILSVFAQLERETIRDRMVMGKIKRVEAGLPLTTAKGRTFGYDVIDTKLYTNEEEAKQLRLIYDIFEEEQSITFLQKRLKKLGFKVHTYSRYNNWLTNDLYCGYVSYKDKVHVRGIHEPIISEEQFYRVQEIFTRMGKNPNMNRDSASLLNSLVVCSKCGLGFVHRRKDTMSRGKKYHYRYYSCKTYKHIHELERCGNKIWRADKLEELIINRVNNYSFASRNVDKEDELDSLNEKLKIEHAKKKRLFDLYINGRYEVSELDSMMSDIDAQINYYESQIEANEELKKDKKIQESLANLATVDYDSLEFREKQLYLKSLINKIYIDGEQVTIEWL

SEQ ID NO: 7517 - protein, 469 aa, synthetic construct
MCYTTPVRAAVYLRISEDRSGEQLGVARQREDCLKLCGQRKWVPVEYLDNDVSASTGKRRPAYEQMLADITAGKIAAVVAWDLDRLHRRPIELEAFMCLADEKRLALATVAGDVDLATPQGRLVARLKGSVAAHETEHKKARQRRAARQKAERGYPNWSKAFGYLPGPNGPEPDPRTAPLVKQAYADILAGASLGDVCRRWNDAGAFTITGRPWTTTALSKFLRKPRNAGLRAYKGARYGPVDRDAIVSKAQWSPIVDEATFWAAQAVLDAPGRAPGRKSVRRHLLTGLAGCGKCGNHLAGSYRTDGRVVYVCKACHGVAILADNIEPILYHIVAERLAMPDAVGLLRREIRDAAEAETIRLELETLYDELDRLAVERAEGLLTARQVKISTDIVNAKIAKLQARQQDQERLRVLDGIPLGTPQVAGVIAELSPDRFRAVLDALAEVVVQPVGKGGRIFNPERVQVNWR

SEQ ID NO: 7518 - protein, 485 aa, synthetic construct
MTKKVAIYTRVSTTNQAEEGFSIDEQIDRLTKYAEAMGWQVSDTYTDAGLSGAKLERPAMQRLINDIESKVFDTVLVYKLDRLSRSVRDTLYLVKDVFTKNKIDFISLNESIDTSSAMGSLFLTILSAINEFERENIKERMTMGKLGRAKSGKSMMWTKTAFGYYHNRKTGILGIVPLQATIVEQIFTDYLSGISLTKLRDKLNESGHIGKDIPWSYRTLRQTLDNPVYCGYIKFKGSLFEGMHKPIIPYETFLKVQKELEERQQQTYERNNNPRPFQAKYMLSGMARCGYCGAPLKIVLGHKRKDGSRTTKYHCANRFPRKTKGVTVYNDNKKCDSGTYDLSYLENTVIDSLVGFQENNDSLLEIINGDNQPILDTSSFKKQISRIDKKIQKNSDLYLNDFITMDELRDRTNSLQAEKKLLKAKISETKFNDSTDVFELVKTQLGSIPINELSYENKKKIVNNLVSKVDVTADDVDIIFKFQLA

SEQ ID NO: 7519 - protein, 452 aa, synthetic construct
MKAAIYIRVSTQEQVGNYSIQAQTEKLTALCRSKDWDVYDIFIDGGYSGSNMNRPALNEMLSKLHEIDAVVVYRLDRLSRSQRDTTTLIEEYFLKNNVEFVSLSETLDTSSPFGRAMIGILSVFAQLERETIRDRMVMGKIKRIEAGLPLTTAKGRTFGYDVIDTKLYINEEEAKQLRLIYDIFEEEQSITFLQKRLKKLGFKVRTYNRYNSWLTNDLYCGYVSYKDKVHVKGIHEPIISEEQFYRVQEIFTRMGKNPNMNRDSASLLSNLVVCSKCGLGFVHRSKDTMSRGKKYHYRYYSCKTYKHTHELEKCGNKIWRADKLEELIINRVNNYSFASRNADKENELDSLNEKLKIEHARKKRLFDLYINGGYEVSELDSMMNDIDAQINYYESQIEASEELKKNKKIQENLADLATVDFDSLEFREKQLYLKSLINKIYIDGEQVTIEWL

SEQ ID NO: 7520 - protein, 452 aa, synthetic construct
MKAAIYIRVSTQEQVGNYSIQAQTEKLTALCRSKDWDVYDIFVDGGYSGSNMNRPALNEMLSKLHEIDAVVVYRLDRLSRSQRDTTTLIEEYFLKNNVEFVSLSETLDTSSPFGRAMIGILSVFAQLERETIRDRMVMGKIKRIEAGLPLTTAKGRTFGYDVIDTKLYINEEEAKQLQLIYDIFEEEQSITSLQKRLKKLGFRVRTYNRYNNWLTNDLYCGYVSYKDKVHVKGIHEPIISEEQFYRVQEIFTRMGKNPNMNRDSASLLNNLVVCSKCGLGFVHRSKDTMCRGKKYHYRYYSCKTYKHTHELEKCGNKTWRADKLEELIINRVNNYSFASRNMDKEDELDSLNEKLKIEHAKKKRLFDLYISGSYEASELDSMMNDIDAQISYYESQIEANEELRRNKKIQEDLADLATVDFVSLEFREKRLYLKSLINKIYIDGEQVTIEWL

SEQ ID NO: 7521 - protein, 452 aa, synthetic construct
MKAAIYIRVSTREQVENYSIQAQTEKLTALCRSKDWDVYDIFIDGGYSGSNMNRPALNEMLSRLHEIDAVVVYRLDRLSRSQRDTITLIEEYFLKNNVEFVSLSETLDTSSPFGRAMIGILSVFAQLERETIRDRMVMGKIKRIEAGLPLTTAKGRTFGYDVIGTKLYINEEEAKQLRLIYDIFEEEQSITFLQKRLKKLGFKVRTYNRYNNWLTNDLYCGYVSYKDKVHVKGIHEPIISEEQFYRVQEIFTRMGKNPNMNRDSASLLNGLVVCSKCGLGFVHRRKDAMSRDKKYHYRYYSCKTYKHIHELEKCGNKIWRADKLEELIINRVNSYSLANRNVDKEDELDSLNEKLKIEHAKKKRLFELYINGSYEASELDSMMNDIDAQINYYESQIEANEELKKNKKIQEDLADLATVDFDSLEFREKQLYLKSLINKIYIDGEQVTIEWL

SEQ ID NO: 7522 - protein, 485 aa, synthetic construct
MTKKVAIYTRVSTTNQAEEGFSIDEQVDRLTKYAEAMGWQVSDTYTDAGFSGAKLERPAMQRLINDIENKAFDTVLVYKLDRLSRSVRDTLHLVKEVFTKNEIDFISLSESIDTSSAMGSLFLTILSAINEFERENIKERMTMGKLGRARSGKSMMWTKTAFGYYHNRKTGILEIVPLQATIVEQIFTDYLSGISLTKLRDKLNESGHIGKDIPWSYRTLRQTLDNPVYCGYIKFKDSLFEGMHKPIIPYETYLKVQKELEERQQQTYEHNNNPRPFQAKYMLSGMARCGYCGAPLRIVLGHKRKDGSRTMKYHCANRFPRKTKGVTVYNDNKKCDSGTYDLRNLENTVIDNLVDFQENNDSLLKIINGNNQPILDTSSFKEQISQIDKKIQKNSDLYLNDFITMDELKDRTDSLRAEKKLLKAKISENKFNDSTGVFELVKTQLGSIPISELSYDNKKKIVNNLVSKVDVTADNVDIIFKFQLA

SEQ ID NO: 7523 - protein, 469 aa, synthetic construct
MSYTTPVRAAVYLRISEDRSGEQLGVARQREDCLKLCDQRKWVPVEYLDNDVSASTGKRRPAYEQMLADITAGKIAAVVAWDLDRLHRRPIELEAFMSLADEKRLALATVAGDVDLATPQGRLVARLKGCVAVHETEHKKARQRRAARQKAERGHPNWSKAFGYLPGPNGPEPDPRTAPLVKQAYADILAGASLGDVCRRWNDAGAFTITGRPWTTATLSKFLRKSRNAGLRAYKGARYGPVDRDAIVGKAQWSPLVDEATFWAAQAVLDAPGRAPGRKSVRRHLLTGLAGCGKCGNHLAGSYRTDGRVVYVCKACHGVAILADNIEPILYHIVAERLAMPDAVDLLRREIHDAAEAGTIRLELETLYGELDRLAVERAEGLLTARQVKISTDIVNAKITKLQARQLDQERLRVFDGIPLGTPQVAGMIAELSPDRFRAVLDVLAEVVVQPVGKNGRIFNPERVQVNWR

SEQ ID NO: 7524 - protein, 452 aa, synthetic construct
MKAAIYIRVSTREQVENYSIQAQTEKLTALCRSKDWDVYDIFIDGGYSGSNMNRPALNEMLSKLHEIDAVVVYRLDRLSRSQRDTITLIEEYFLKNNVEFVSLSETLDTSSPFGRAMIGILSVFAQLERETIRDRMVMGKIKRIEAGLPLTTAKGRTFGYDVIDTKLYINEEEAKQLQLIYDIFEEEQSITFLQKRLKKLGFKVRTYNRYNNWLTNDLYCGYVSYKDKVHVKGIHEPIISEEQFYRVQEIFTRMGKNPNMNRGSASLLNNLVVCGKCGLGFVHRRKDAMSRDKKYHYRYYSCKTYKHIHELEKCGNKIWRADKLEELIINRVNNYSLASRNADKEDELDGLYEKLKTEHAKKKRLFDLYINGSYEVSELDGMMNDIDAQINYYESQIEANEELKKNKKIQENLAYLATVDFDSLEFREKQRYLKSLINKIYVDGEQVTIEWL

SEQ ID NO: 7525 - protein, 485 aa, synthetic construct
MTKKVAIYTRVSTINQAEEGFSIDEQIDRLTKYAEAMGWQVSDTYTDAGLSGAKLERPAMQRLINDIENKAFDTVLVYKLDRLSRSVRDTLYLVKDVFTRNKIDFISLNESIDTSSAMGSLFLTILSAINEFERENIKERMTMGKLGRAKSGKSMMWTKTAFGYYHNRKTGILEIVPLQATIVEQIFTDYLSGISLTKLRDKLNESGHIGKDIPWSYRTLRQTLDNPVYCGYIKFKDSLFEGMHKPIIPYETYLKVQKELEERQQQTYERNNNPRPFQAKYMLSGMARCGYCGAPLRIVLGHKRKDGSRTMKYHCANRFPRKTKGVTVYNDNKKCDSGTYDLSNLESTVIDSLIGFQENNDSLLKIINGNNQPILDTSSFKKQISQIDKKIQKNSDLYLNDFITMDELKDRTDSLQAEKKLLKAKISESKFNDSTNVFELVKAQLGSIPINELSYDSKKKIVNNLVSKVDVTADNVDIIFKFQLA

SEQ ID NO: 7526 - protein, 452 aa, synthetic construct
MKAAIYIRVSTREQVENYSIRAQTEKLTALCRSKDWDVYDIFIDGGYSGSNLNRPALNEMLSKLHEIDAVVVYRLDRLSRSQRDTITLIEEYFLKNDVEFVSLSETLDTSSPFGRAMIGILSVFAQLERETIRDRMVMGKIKRVEAGLPLTTAKGRTFGYDVIDTKLYINEEEAKQLQLIYDIFEEERSITFLQRRLKKLGFKVHTYNRYNNWLTNDLYCGYVSYKDKVHVKGIHEPIISEEQFYRVQEIFTRMGKNPNMNRDSASLLNNLVVCSKCGLGFVHRRKDTVSRGKKYHYRYYSCKTYKHIHELERCGNKIWRADKLEELIISRVNNYSFASRNVDKEDELDSLHEKLKIEHARRKRLFDLYINGSYEVSELDSMMNDIDAQINYYESQIEANEELKKDKKIQENLAELATVDFDSLEFREKQLYLKSLINKIYIDGEQVTIEWL

SEQ ID NO: 7527 - protein, 452 aa, synthetic construct
MKAAIYIRVSTREQVENYSIQAQTEKLTALCRSKDWDVYDIFIDGGYSGSNMNRPALNEMLSKLHEIDAVVVYRLDRLSRSQRDTITLIEEYFLKNDVEFVSLSETLDTSSPFGRAMIGILSVFAQLERETIRDRMVMGKIKRIEAGLPLTTAKGRTFGYDVIDTKLYINEEEAKQLQLIYDIFEEEQSITFLQKRLKKLGFKVRTYNRYNNWLTNDLYCGYVSYKDKVHVKGIHEPIISEEQFYRVQEIFTRMGKNPNMNRESASLLNNLVVCSKCGLGFVHRRKDAMSRDKKYHYRYYSCKTYKHIHELEKCGNKIWRADKLEELIINRVNDYSIASRNADKEDELDSLNEKLKIEHAKKKRLFELYINGSYEVSELDSMMNDIDAQINYYESRIEANKELKKNKKIQENLADLATVDFDSLEFREKQLYLKSLINKIYIDGEQVTIEWL

SEQ ID NO: 7528 - protein, 469 aa, synthetic construct
MSYTTPVRAAVYLRISEDRSGEQLGAARQREDCLKLCVQRKWVPVEYLDNDVSASTGKRRPAYEQMLADITAGKIAAVVTWDLDRLHRRPIELEAFMSLADEKRLALATVAGDVDLATPQGRLVARLKGCVAAHETEHKKARQRRAARQKAERGLPNWSKAFGYLPGPNGPEPDPRTAPLVEQAYADILAGASLGDVCRQWNDAGAFTITGRPWTTTTLSKFLRKPRNAGLRAYKGARYGPVDRDAIVGKAQWSPLVDEAIFWAAQAVLDAPGRAPGRKSVRRHLLTGLAGCGKCGNHLAGSYRTDGRVVYVCKACHGVAILADIIEPILYHIVAERLAMPDAVDLLRREIHDAAEAETICLELETLYGELDRLAVERAEGLLTARQVKICTDIVNVKITRLQARQLDQERLHVLGGIPLGTPQVAGVIAELSPDRLRAVLDVLAEVVVQPVGKSGRIFNPERVQVNWR

SEQ ID NO: 7529 - protein, 469 aa, synthetic construct
MNYTTPVRAAVYLRISEDRSGEQLGVARQREDCLRLCDQHKWEPVEYLDNDVSASTGRRRPAYEQMLADITAGKIAAVVAWDLDRLHRRPIELEAFMSLADEKRLALATVAGDIDLATPQGRLVARLKGSVAAHETEHKKARQRRAARQKAERGLPNWSKAFGYLPGPNGPEPDPRTAPLVKQAYADILAGASLGDVCRQWNDAGAFTITGRPWTTTTLSKFLRKPRNAGLRAYKGARYGPADRDAIVGKAQWSPLVDEAAFWAAQAVLDAPGRAPGRKSVRRHLLTGLAGCGKCGNHLAGSYRTDGRVVYVCKACHGVAILADNIEPILYHIVAERLAMPGAVGLLRREIHDAAEAETIRLELETLYGELDRLAVERAEGLLTARQVKISTDIVNAKITKLQARQLDQERLRVLDGIPLGTPQVAGVIAELSPDRFRAVLDVLAEVVVQPVGKGGRIFSPERVQVNWR

SEQ ID NO: 7530 - protein, 452 aa, synthetic construct
MKAAIYIRVSTREQVENYSIQAQTEKLTALCRSKDWDVYDIFIDGGYSGSNMNRPALNEMLSKLHKIDAVVVYRLDRLSRSQRDTITLIEEYFLKNNVEFVSLSETLDTSSPFGRAMIGILSVFAQLERETIRDRMEMGKIKRIEAGLPLTTAKGRTFGYDVIDTKLYINEEEAKQLQLIYDIFEEEQSITFLQKRLKKLGFKVRTYSRYNNWLTNDLYCGYVSYKDKVHVKGIHEPIISEEQFYRVQEIFTRMGKNPNMNRDSASLLNNLVVCSKCGLGFVHRRKDTTSRGKKYHYRYYSCKTYKHTHELDKCGNKIWRADKLEELIINRVNNYSFAGRNVDKEDELDSLNEKLKIEHAKKKRLFDLYINGSYEVSELDSMMSDIDAQISYYESQIEANKELKKNEKVQENLADLATVDFDSLEFREKQLYLKSLINKIYIDGEQVAIEWL

SEQ ID NO: 7531 - protein, 452 aa, synthetic construct
MKAAIYIRVSTREQVENYSIQAQTEKLTALCRSKDWDVYDIFIDGGYSGSNMNRPALNEMLSKLHEIDAVVVYRLDRLSRSQRDTITLIEEYFLKNNVEFVSLSETLDTSSPFGRAMIGILSVFAQLEREAIRDRMVMGKIKRIEAGLPLTTAKGRTFGYDVIDTKLYINEEEAKQLQLIYDIFEEEQSITFLQKRLKKLGFKVRAYNRYYNWLTNDLYCGYVSYKDKVHVKGIHEPIISEEQFYRVQEIFTRMGKNPNTNRDSASLLNNLVVCSKCGLGFVHRRKDTMSRGKKYHYRYYSCKTYKHTHELEKCGNRIWRADKLEELIINRVNNYSFASHNEDKEDELDSLNEKLKIERAKRKRLFDLYINGSYNVSELDSMMNDIDAQINYYESQVEANEELKKNKKIQENLAGLATVDFGSLEFREKQLYLKSLINKIYIDGEQVTIEWL

SEQ ID NO: 7532 - protein, 452 aa, synthetic construct
MKAAIYIRVSTQEQVGNYSIQAQTEKLTALCRSKDWDVYDIFIDGGYSGSNMNRPALNEMLSKLHEIDAVVVYRLDRLSRSQRDTTTLIEEYFLKNNVEFVSLSETLDTSSPFGRAMIGILSVFAQLERETIRDRMVMGKIKRIEAGLPLTTAKGRTFGYDVIDTKLYINEEEARQLQLIYDIFEEEQSITSLQKRLKKLGFRVRTYNRYNNWLTNDLYCGYVSYKDVVHVKGIHEPIISEEQFCRVQEIFTRMGKNPNMNRDNASLLNNLVVCSKCGLSFVHRSKDTTSRGKKYHYRYYSCKTYKHTHELEKCGNKTWRADKLEELIINRVNDYSFASRNADEEGELGSLNEKLKIEHAKKKRLFDLYINGSYEVSELDSMMNDIDAQINYYESQIEAKEELKKNKKIQENLADLATVDFNSLEFREKQLYLRSLINKIYIDGEQVTIEWL

SEQ ID NO: 7533 - protein, 485 aa, synthetic construct
MTKRVAIYTRVSTTNQAEEGFSIDEQIDRLTKYAEAMGWQVSDTYTDVGSSGAKLERPAMQRLINDIENKAFDTVLVYKLDRLSRSVRDTLYLVKDVFAKNKIDFISLNESIDTSSAMGSLFLTILSAINEFERENIKERMTMGKLGRARSGKSMMWTKTAFGYYHNRKTGILEVVPLQATIVEQIFTDYLSGISLTKLRDKLNESGHVGKDIPWSYRTLRQTLDNPVYCGYIKFKDSLFEGMHKPIIPYETYLKVQKELEERQLQTYERNNNPRPFQAKYMLSGMARCGYCGAPLRIVLGHKRKDGSRTMKYHCANRFPRKTKGVTVYNDNKKCDSGTYDLSNLENTVIDNLIGLQENNDSLLKIINGNNQPILDTSSFKEQISQIDKKIQKNSDLYLNDLITMDELKDRTDSLQAKKKLLKAKISENKFNDSTDVFELVRTQLGSIPINELSYDDKKKIVNNLVSKVDVTADNVDIIFKFQRA

SEQ ID NO: 7534 - protein, 469 aa, synthetic construct
MSYTTPVRAAVYLRISEDRSGEQLGVARQREDCLKLCGQRKWVPVEYLDNDVSASTGKRRPAYEQMLADITAGKIAAVVAWDLDRLHRRPIELEAFMSLADEKRLALATVAGDVDLATPQGRLVARLKASVAVHETEHKKARQRRAARQKAERGLPNWSKAFGYLPGPNGPEPDPRTAPLVKQAYADILAGASLGDVCRQWNDAGAFTITGRPWTTTTLSKFLRKPRNAGLRAYKGARYGPVDRDAIVGKAQWSPLVDEATFWAAQAVLDAPGRAPGRKSVRRHLLTGLAGCGKCGNHLAGSYRTDGRVVYVCKACHGIAILADNIEPILYHIVAERLAMPDAVDLLRRETHDAAEAETIRLELETLYGELDCLAVERAEGLLTARQVKISTDIVNAKITKLQARQQDQERLRVLDGIPLGTPQVAGMIAELSPDRFRAVLDVLAEVVVQPVGKSGKISNPERVQVNWR

SEQ ID NO: 7535 - protein, 452 aa, synthetic construct
MKAAIYIRVSTREQVENYSIQAQTEKLTALCRSKDWDVYDIFVDGGCSGSNMNRPALNEMLSKLHEIDAVVVYRLDRLSRSQRDTITLIEEYFLKNNVEFVSLSETLDTSSPFGRAMIGILGVFAQLERETIRDRMVMGKIKRIEAGLPLTTAKGRTFGYDVIDTKLYINEEEAKQLQLIYDIFEEEQSITSLQKRLKKLGFKVHTYNRYNNWLTNDLYCGYVSYKDKVHVKGIHEPIISEEQFYRVQEIFTRMGKNPNMNRDSASLLNNLVVCGKCGLGFVHRRKDVMSRGKKYHYRYYSCKTYKHIHELEKCGNKIWRADKLEELIIDRVNNYSFASRNADKEDELNSLNEKLKIERAKKKRLFELYINGSYEVSELDSMMNDIDAQINYYESQIEANEELKRSKKIQENLAKLATVDFDSLEFREKQLYLKSLINKIYIDGEQVTVEWL

SEQ ID NO: 7536 - protein, 452 aa, synthetic construct
MKAAIYIRVSTQEQVGNYSIQAQTEKLTALCRSKGWDVYDIFVDGGYSGSNMNRPALNEMLSKLHEIDAVVVYRLDRLSRSQRDTTTLIEEYFLKNNVEFVSLSETLDTSSPFGRAMIGILSVFAQLERETIRDRMVMGKIKRIEAGLPLTTAKGRTFGYDVIDTKLYVNEEEAKQLQLIYDIFEEEQSITSLQKRLKKLGFKVRTYNRYNNWLTNDLYCGYVSYKDKVHVKGIHEPIISEEQFYRVQEIFTRMGKNPNMNRDSASLLSNLVVCSKCGLGFVHRSKDTMSRGKKYHYRYYSCKTYKHTHELEKCGNKTWRADKLEELIINRVSNCSFASRNVDKEDELDSLNEKLKVEHAKKKRLFDLYINGSYEVSELDSMMNDIDALIDYYEGQIEAIEELRKNKKIQENLADLATVDFDSLEFREKQLYLKSLINKIYIDGEQVTIEWL

SEQ ID NO: 7537 - protein, 452 aa, synthetic construct
MKAAIYIRVSTREQVENYSIQAQTEKLTALCRSKDWDVYDIFIDGGYSGSNMNRPALNEMLSKLHEIDAVVVYRLDRLSRSQRDTITLIEEYFLKNNVEFVSLSETLDTSSPFGRAMIGILSVFAQLERETIRDRMVMGKIKRIEAGLPLTTAKGRTFGYDVIDTKLYINEEEAKQLQLIYDIFEEEQSITSLQKRLKKLGFKVRTYSRYNDWLTNDLYCGYVSYKDKVHVKGIHEPIISEEQFYRVQEIFTRMGKNPNMNRDSASLLNNLVVCSKCGLGFVHRRKDTMSRGKKYHYRYYSCKTYKHIHELEKCGNKIWRADKLEELIINRVNNYSFASRNVDKEDELDSLNERLKIEHAKKRRLFDLYVNSSYEVSELDSMMNDIDAQINYYESQIEANEELRKNKKIQENLANLATVDYDSLEFREKQLYLKSLINKIYIDGEQVTIEWL

SEQ ID NO: 7538 - protein, 452 aa, synthetic construct
MKAAIYIRVSTQEQVGNYSIQAQTEKLTALCRSKGWDVYDIFIDGGYSGSNMNRPALNEMLSKLHEIDAVVVYRLDRLSRSQRDTATLIEEYFLKNNVEFVSLSETLDTSSPFGRAMIGILSVFAQLERETIRDRMVMGKIKRIEAGLPLTTAKGRTFGYDVIDTKLYINEEEAKQLQLIYDIFEEEQSITLLQKRLKKLGFKVRTYNRYNSWLTNDLYCGYVSYKDKVHVKGIHEPIISEEQFYRVQEIFTRMGKNPNMNRDSASLLSNLVVCSKCGLGFVHRSKDTMSRGKKYHYRYYSCKTYKHTHELEKCGNKTWRADKLEELIISRVNNYSFASRSVDEEDELDSLNEKLKIEHAKKKRLFDLYINGSYEVSELDSMMNNIDAQINYYESQIEANEELKENKEIQENLAELATVDFDSLEFREKQLYLKSLINKIYIDGEQVTIEWL

SEQ ID NO: 7539 - protein, 485 aa, synthetic construct
MTKKVAIYTRVSTTNQAEEGFSIDEQIDRLTKYAEAMGWQVSDTYTDAGSSGAKLERPAMQRLINDIENKAFDTVLVYKLDRLSRSVRDTLYLVKDVFTKNKIDFISLNESIDTSSAMGSLFLTILSAINEFERENIKERMTMGKLGRAKSGKSMMWTKTAFGYYHNRKTGILEIVPLQATIVEQIFTDYLGGISLTKLRDKLNESGHIGKDIPWSYRTLRQTLGNPVYCGYIKFKGSLFEGMHKPIIPYETYLKVQEELEERQQQTYERNNNPRPFQAKYMLSGMARCGYCGAPLRIVLGHKRKDGSRTMKYHCANRFPRKTKGITVYNDNRKCDSGTYDLSNLENTVIDNLIGFQENNDGLLKIINGNDQPILDASSLKNQISQIDKKIQKNSDLYLNDFITMDELKDRTDSLQAEKKLLKAKISENKFNDSTNVFELVKTQLGSIPINELSYDNKKKIVNNLVSKVDVTADNVDIIFKFQLA

SEQ ID NO: 7540 - protein, 452 aa, synthetic construct
MKAAIYIRVSTREQVENYSIQAQTEKLTALCRSKDWDVYDIFIDGGYSGSNMNRPALNEMLSKLHEIDAVVVYRLDRLSRSQRDTITLIEEYFLKNNVEFVSLSETLDTSSPFGRAMIGILSVFAQLERETIRDRMVMGKIKRIEAGLPLTTAKGRTFGYDVIDTKLYINEEEAKQLQLIYDIFEEEQSITFLQKRLKKLGFKVRTYNRYNNWLTNDLYCGYVSYKDKVHVRGIHEPIISEEQFYRVQEIFTRMGKNPNMNRDSASLLNNLVVCSKCGLGFVHRRKDIMSHGKKYHYRYYSCKTYKHIHELEKCGNKIWRADKLEELVINRVNNYSLASRNVDKEDELDSLNEKLKIEHAKKKRLFDLYINGSYDVSELDSMMSDIDAQINHYESQIEANEELKKSKKIQENLADLATVDFGSLEFRERQLYLKSLINKIYIDGEQVTIEWL

SEQ ID NO: 7541 - protein, 452 aa, synthetic construct
MKAAIYIRVSTREQVENYSIQAQTEKLTALCRSKGWDVYDIFVDGGYSGSNMNRPALNEMLSKLHEIDAVVVYRLDRLSRSQRDTITLIEEYFLKNNVEFVSLSETLDTSSPFGRAMIGILSVFAQLERETIRDRMVMGKIKRIEAGLPLTTAKGRTFGYDVIDTKLYINEEEAKQLQLIYDIFEEEQSITFLQKRLKKLGFKVRTYNCYNNWLTNDLYCGYVSYKDKVHVKGIHEPIISEEQFYRVQEIFTRMGKNPNMNRDSASLLNNLVVCSKCGLGFVHRRKDTMSRDKKYHYRYYSCKTYKHIHELEKCGNKIWRADKLEELIINRVNNYSLASRNTDKEDELDSLNEKLRIEHAKKERLFELYINGSYEVSELDSMMSDIDAQISYYEGQIEASEELKKNKKAQENLAHLATVDFDSLEFREKQLYLKSLINKIYIDGEQVTIEWL

SEQ ID NO: 7542 - protein, 485 aa, synthetic construct
MSKKVAIYTRVSTTNQAEEGFSIDEQIDRLTKYAEAMGWQVSDTYTDAGFSGAKLERPAMQRLINDIENKAFDTVLVYKLDRLSRSVRDTLYLVKDVFTKNKIDFISLNESIDTSSAMGSLFLTILSAINEFERENIKERMTMGKLGRAKSGKSMMWTKTAFGYYHNRKTGILEIVPLQATIVERIFTEYLSGISLTKLRDKLNESGHIGKDIPWSYRTLRQTLDNPVYCGYIKFKDSLFEGMHKPIIPYETYLKVQKELEERQQQTYERNNNPRPFQAKYMLSGMARCGYCGAPLRIVLGHKRKDGSRTMKYHCANRFPRKTKGVTVYNDNKKCDSGTYDLSSLENTVIDNLIGFQENNDSLLKIINGNNQPIPDTSSFKKQISQIDKKIQKNSDLYLNDFITMDELKDRTDSLQAEKKLLKAKISENKFNDSTDVFELVKTQLGSIPINELSYDDKKKIVNNLVSKVDVTADGVDIIFKFQLA

SEQ ID NO: 7543 - protein, 452 aa, synthetic construct
MKAAIYIRVSTREQVENYSIQAQTEKLTALCRSKDWDVYDIFIDGGYSGSNMNRPALDEMLSKLHEIDAVVVYRLDRLSRSQRDTITLIEEYFLKNNVEFVSLSETLDTSSPFGRAMIGILSVFAQLERETIRDRMVMGKIKRIEAGLPLTTAKGRTFGYDVIDTKLYINEEEAKQLQLIYDIFEEEQSITFLQKRLKKLGFKVRTYSCYNNWLTNDLYCGYVSYKDKVRVKGIHKPIISEEQFYRVQEIFTRMGKNPNMNRDSASLLNNLVVCSKCGLGFVHRRKDTMSRGKKYHYRYYSCKTYKHTHELEKCGNKIWRADKLEELIIDRVSNYSFASRNVDKEDELDSLNEKLKIEHAKKKRLFDLYINGSYEVSELDSMMNDIDAQINYYESQIEANEELKKNKKIQENLANLATVDYDSLEFREKQLYLKSLINKIYIDGEQVTIEWL

SEQ ID NO: 7544 - protein, 452 aa, synthetic construct
MKAAIYIRVSTREQVENYSIQAQTEKLTALCRSKDWDVYDIFVDGGYSGSNMNRPALNEMLSKLHEIDAVVVYRLDRLSRSQRDTITLIEEYFLKNNVEFVSLSETLDTSSPFGRAMIGILSVFAQLERETIRDRMVMGKIKRIEAGLPLTTAKGRTFGYDVIDTKLYINEEEAKQLQLIYDIFEEEQSITSLQKRLKGLGFKVRTYNRYNNWLTNDLYCGYVSYKDKVHVKGIHEPIISEEQFYRVQEIFTRMGKNPNLNRDSASLLNNLVVCGKCGLGFVHRRKDSMSRDKKYHYRYYSCKTYKHIHELEKCGNKIWRADKLEELIINRVNSYSFASRNADKEDELDSLNEKLKIEHAKRRRLFDLYINGSYEVSELDSMMSDIDAQINYYESQIEANEELRKNKKIQENLANLATVDFDSLEFREKQLYLKSLISKIYIDGEQVTIEWL

SEQ ID NO: 7545 - protein, 452 aa, synthetic construct
MKAAIYIRVSTREQVENYSIQAQTEKLTALCRSKDWDVYDIFIDGGYSGSNMNRPALNEMLSKLHEIDAVVVYRLDRLSRSQRDTITLIEEYFLKNNVEFVSLSESLDTSSPFGRAMIGILSVFAQLERETIRDRMVMGKVKRIEAGLPLTTAKGRTFGYDVIDTKLYINEEEARQLQLIYDIFEEEQSITLLQKRLKKLGFKVRTYNRYNSWLTNDLYCGYVSYKDKVHVKGIHEPIISEEQFYRVQEIFTRMGKNPNMNRDSASLLNNLVVCSKCGLGFVHRRKDTTSRGKKYHYRYYSCKTYKHIHELEKCGNKIWRADRLEELIINRVNNYSLASRSVDKEDELDSLNEKLKIEHAKKKRLFDLYINGNYEVSELDSMMNDIDAQINYYEGQIEANEELKKNKKIQENLAGLATVDFDSLEFREKQLYLKSLISKIYIDGEQVTIEWL

SEQ ID NO: 7546 - protein, 485 aa, synthetic construct
MTKKVAIYTRVSTTNQAEEGFSIDEQTDRLTKYAEAMGWQVSDTYTDAGYSGAKLERPAMQRLINDIENKAFDTVLVYKLDRLSRSVRDTLYLVKDVFTENKIDFISLSESIDTSSAMGSLFLTILSAINEFERENIKERMTMGRLGRAKSGKSMMWAKTAFGYCHNRKTGILEIVPLQATIVEQIFTDYLSGISLTKLRDKLNESGHIGKDIPWSYRTLRQTLDNPVYCGYIKFKDSLFEGMHKPIIPYETYLKVQKELEERQQQTYERNNNPRPFQAKYMLSGMARCGYCGAPLRIVLGHKRKDGSRTMKYHCANRFPRKTEGVTVYNNNKKCDSGAYDLSNLENTVIDNLIGFQENNDSLLKIINGNNKPILDTSSLKKQISQIDKKIQKNSDLYLNDFITMDELKDRTNSLRAEKKLLKAKIGENKLDDSADVFELVKTQLGSIPINELSYDNKKKIVNNLVSKVDVTADNVDIIFKFQLA

SEQ ID NO: 7547 - protein, 452 aa, synthetic construct
MKAAIYIRVSTREQVENYSIQAQTEKLTALCRSKDWDVYDIFIDGGYSGSNMNRPALNEMLSKLHEIDAVVVYRLDRLSRSQRDTITLIEEYFLKNSVEFVSLSETLDTSSPFGRAMIGILSVFAQLERETIRDRMVMGKIKRIEAGLPLTTAKGRTFGYDVIDTKLYINEEEAKQLRLIYDIFEEEQSITFLQKRLKKLGFKVRTYNRYSNWLTNDLYCGYVSYKDKVHVKGIHEPIISEEQFYRVQEIFTRMGKNPNMNRDSASLLNNLVVCSKCGLGFVHRRKDTVSRGKKYRYRYYSCKTYKHIHELEKCGNKIWRADKLEELIINRVNNYSFASRNVDKEDELDSLNEKLKIEHTKKKRLLGLYINGSYEVSELDSMMNDIDAHINYYESQIEANEELKKNKKIQENLANLASVDYDSLEFREKQLYLKSLINKIYIDGEQVTIEWL

SEQ ID NO: 7548 - protein, 452 aa, synthetic construct
MKAAIYIRVSTREQVENYSIQAQTEKLTALCRSKDWDVYDIFIDGGYSGSNMNRPALNEMLSKLHEIDAVVVYRLDRLSRSQRDTITLIEEYFLKNNVEFVSLSETLDTSSPFGRAMIGILSVFAQLERETIRDRMVMGKIKRIEAGLPLTTAKGRTFGYDVIDTKLYINEEEAKQLRLIYDIFEEEQSITFLQKRLKKLGFKVRTYNRYNNWLTNDLYCGYVSYKDKVHVKGIHEPIISEEQFYRVQEIFTRMGKNPNMNRDSASLLNNLVVCGKCGLGFVHRRKDAMSRDKKYHYRYYSCKTYKHIHELEKCGNKIWRADKLEELVINRVNDYSLASRNVDKEGELDSLNEKLKIEHAKRKRLFDLYINGRYEVSELDCMMNDIDAQINYYESQIEANGEPKKNKKIQENLAHLATVDFDSLGFREKQLYLKSLINKIYIDGEQVTIEWL

SEQ ID NO: 7549 - protein, 452 aa, synthetic construct
MKAAIYIRVSTREQVENYSIQAQTERLTALCRSKDWDVYDIFVDGGYSGSNMNRPALNEMLSKLHEIDAVVVYRLDRLSRSQRDTITLIEEYFLKNDVEFVSLSETLDTSSPFGRAMIGILSVFAQLERETIRDRMVMGKIKRIEAGLPLTTAKGRTFGYDVIDTKLYINEEEAKQLQLIYDIFEEEQSITFLQKRLKKLGFKVHTYNRYNNWLTNDLYCGYVSYKDKVHVKGIHEPIISEEQFYRVQEIFTRMGRNPNMNRDSASLLNNLVVCSKCGLGFVHRRKDTMSRGKKYHYRYYSCKTYKHIHELERCGNKIWRADKLEELIINRVNNYSFASRNVGKEDELDSLNEKLKIEHAKKRRLFDLYINGGYEVSELDSMMNDIDAQINYYESQIEANEELKRNKKIQENLANLATMDYDSLEFREKQLYLKSLINKIYIDGEQVTIEWL

SEQ ID NO: 7550 - protein, 469 aa, synthetic construct
MSYTTPVRAAVYLRISEDRSGEQLGVARQREDCLKLCDQRKWVPVEYLDNDVSASTGKRRPAYEQMLADITAGNIAAVVAWDLDRLHRRPMELEAFMSLADEKRLALATVAGDVDLATPQGRLVARLKGSVAAHETEHKKARQRRAARQKAERGYPNWSKAFGYLPGPNGPEPDPRTAPLVEQAYADILAGASLGDVCRQWNDAGAFTITGRPWTTTTLSKFLRKPRNAGLRAYKGARYGPVDRDAIVGKAQWSPLVDEATFWAAQAVLDAPGRAPGRKSVRRHLLTGLAGCGKCGNHLAGSYRTDGRVVYVCKACYGVAILADNIEPILYRIVAERLAMPDAVDLLRREIHDAAEAETIRLELETLYGELDRLAVERAEGLLTARQVKISTDIVNAKITKLQACQLDQERLRVLDGIPLGTPQVAGMIAELSPDRFRAVLDVLAEVVVQPVGKSGRIFNPERVQVNWR

SEQ ID NO: 7551 - protein, 485 aa, synthetic construct
MTKKVAIYTRVSTINQAEEGFSIDEQIDRLTKYAEAMGWQVSDTYTDAGFSGAKLERPAMQRLINDIENKAFDTVLVYKLDRLSRSVRDTLYLVKDVFTKNKIDFISLNESIDTSSAMGSLFLAILSAINEFERENIKERMTMGKLGRAKSGKSMMWTKTAFGYYHNRKTGILEIVPPQATIVEQIFTDYLSGISLTKLRDKLNESGHIGKDIPWSYRTLRQTLDNPVYCGYIKFKGSLFEGMHKPIIPYETYLEVQKELEERQQQTYERNNNPRPFQAKYMLSGMARCGYCGAPLKIVLGHKRKDGSRTMKYHCANRFPRKTKGITVYNDNKKCDSGTYDLSNLENTVIDNLIGLQENNDSLLKIINGNNQPILDTSSFKKQISQIDKKIQKNSDLYLNDFITMDELRDRTDSLQAEKKLLKAKISEDKLNDSTDVFELVKTQLGSTPINELSYDNKKKIVSNLVSKVDVTADSVDIIFKFQLA

SEQ ID NO: 7552 - protein, 452 aa, synthetic construct
MKAAIYIRVSTREQVENYSIQAQTEKLTALCRSKGWDVYDIFIDGGYSGSNMNRPALNEMLSKLHEIDAVVVYRLDRLSRSQRDTITLIEEYFLKNNVEFVSLSETLDTSSPFGRAMIGILSVFAQLERETIRDRMVMGKIKRIEAGLPLTTAKGRTFGYDVIDAKLYINEEEAKQLQLIYDIFEEEQSITFLQKRLKKLGFKVRTYSRYNSWLTNDLYCGYVSYKDKVHVKGIHEPIISEEQFYRVQEIFTRMGKNPNMNRDSASLLNNLVVCSKCGLGFVHRRKDTVSRGKKYHYRYYSCKTYKHIHELEKCGNKIWRADKLEELIINRVNNYSLASRNVDKEDGLDSLSEKLKVEHAKKKRLFELYINGSYEMGELDSMMNDIDAQINYYESQIEANEGLKRNKKIQENLANLATVDYDSLEFREKQLYLKSLINKIYIDGELVTIEWL

SEQ ID NO: 7553 - protein, 469 aa, synthetic construct
MCYTTPVRAAVYLRISEDRSGEQLGVARQREDCLKLCDQRQWVPVEYLDNDVSASTGKRRPAYEQMLADITAGKIAAVVAWDLDRLHRRPIELEAFMSLADEKRLALATVAGDVDLATPQGRLVARLKGSVAAHETEHKRARQRRAARQKAERGHPNWSKAFGYLPGPNGPEPDPRTAPLVKQAYADILAGASLGDVCRQWNDAGAFTVTGRPWTTTTLSKFLRKPRNAGLRAYKGARYGPVDRDAIVGKAQWSPLVDEATFWAAQAVLDAPGRAPGRKSVRRHLLTGLAGCGKCGNHLAGSYRADGRVVYVCKACHGVAILADNIVPILYHIVAERLAMPDAVDLLRREIHDAAEAEAIRLELETLYGELDRLAVERAEGLLTARQVKISTDIVNAKITKLQARQQDQERLRVLDGIPLGTPQVAGVIAELSPDRFRAVLDVLAEVVVQPVGKSGRIFNPERVQVNWR

SEQ ID NO: 7554 - protein, 452 aa, synthetic construct
MKAAIYIRVSTREQVENYSIQAQTEKLTALCRSKDWDVYDIFIDGGYSGSNMNRPALNEMLSKLHEIDAVVVYRLDRLSRSQRDTITLIEEYFLKNNVEFVSLSETLDTSSPFGRAMIGILSVFAQLERETIRDRMVMGKIKRIEAGLPLTTAKGRTFGYDVIDTKLYINEEEAKQLQLIYDVFEEEQSITFLQKRLKKLGFKVRTYNCYNNWLTNDLYCGYVSYKDKVHVKGIHEPIISEEQFYRVQEIFTRMGKSPNMNRDSASLLNNLVVCSKCGLGFVHRRKDTMSRGKKYHYRYYSCKTYKHIHELEKCGNKIWRADKLEELIINRVNNYSLASRNVDKGDELDSLNEKLKIEHAKKKRLFDLYINGSYEVSELDSMMNDIDAQINYYESQIEANEELKKNKKTQENLANLATVDYDSLEFREKQLYLKSLINKIYIDGEQVTIEWL

SEQ ID NO: 7555 - protein, 452 aa, synthetic construct
MKAAIYIRVSTQEQVGNYSIQAQTEKLTALCRSKDWDVYDIFIDGGYSGSNMNRPALNEMLSKLHEIDAVVVYRLDRLSRSQRDTTTLIEEYFLKNNVEFVSLSETLDTSSPFGRAMIGILSVFAQLERETIRDRMVMGKIKRIEAGLPLTTAKGRTFGYDVIDTKLYINEEEAKQLRLIYDIFEEEQSITFLQKRLKKLGLKVRTYNRYNNWLTNDLYCGYVSYKDKVHVKGIHEPIISEEQFYRVQEIFTRMGKNPNMNRDSASLLNSLVVCSKCGLSFVHRSKDTMSRGKKYHYRYYSCKSYKHTHELEKCGNKTWRADKLEELIINRVNNYSFASRNMDKEDELDSLSEKLEIEHAKKKRLFDLYINGSYEVSELDSMMNDIDAQISCYESQIEANEELRKNRKVQENLADLATVDFDSLEFREKQLYLKSLINKIYIDGEQVTIEWL

SEQ ID NO: 7556 - protein, 485 aa, synthetic construct
MTKKVAIYTRVSTTNQAEEGFSIDEQIDRLTKYAEAMGWQVSDTYTDAGFSGAKLERPAMQRLINDIENKAFDTVLVYKLDRLSRSVRDTLYLVKDVFTKNKIDFISLSESINTSSAMGSLFLTILSAINEFERENIRERMAMGKLGRAKSGKSMMWTKTAFGYYHNRKTGILEIVPLQATIVEQIFTDYLSGISLTKLRDKLNESGHIGKDIPWSYRTLRQTLDNPVYCGYIKFKDNLFEGMHKPIIPYETYLRVQKELEERQQQTYERNNNPRPFQAKYMLSGMARCGYCGAPLKIVLGHKRKDGSRTMKYHCANRFPRKTKGVTVYNDNKKCDSGTYDLSNLENTVVDSLIGFQENNDSLLKIINGNNLPILDTSSFKKQISQIDKKIQKNSDLYLNDFITMDELKDRTDSLQAEKKLLKAKISENKFNDSTDVFELVKTQLGSIPISELGYDDRKKIVNNLVSEVDVTADNVNIIFKFQLA

SEQ ID NO: 7557 - protein, 485 aa, synthetic construct
MTKKVAIYTRVSTTNQAEEGFSIDEQIDRLTRYAEAMGWQVSGTYTDAGFSGAKLKRPAMQRLINDIENKAFDTVLVYKLDRLSRSVRDTLYLVKEVFTKNKIDFISLSESIDTSSAMGSLFLTILSAINEFERENIKERMTMGKLGRAKSGKSMMWTKTAFGYYHNRKTGILEIVPLQAAIVEQIFTDYLSGTSLTKLRDKLNESGHIGKDIPWSYRTLRQTLDNPVYCGYIKFKDSLFEGMHKPIIPYETYLKVQKELEERQRQAYERNNNPRPFQAKYMLSGMARCGYCGAPLRIVLGRKRKDGSRTMKYHCANRFPRKAKGVTVYNDNKKCDSGTYDLSNLENTVIDNLIGFQENNDSLLRIINGNNQPILDTSSLKKQISQIDKKIQKNSDLYLNDFITMDELKGRTDSLRAEKELLKAKISENKFDDSTDVFELVKTQLGSIPINELSYDSKKKIVNNLVSKVDVTADNVDIIFKFQLA

SEQ ID NO: 7558 - protein, 452 aa, synthetic construct
MKAAIYIRVSTREQVENYSIQAQTEKLTALCRSKDWDLYDIFIDGGYSGSNMNRPALNEMLSKLHEIDAVVVYRLDRLSRSQRDTITLIEEYFLKNNVEFVSLSETLDTSSPFGRAMIGILSVFAQLERETIRDRMVMGKIKRIEAGLPLTTAKGRTFGYDVIDTKLYINEEEAKQLQLIYDIFEEEQSITSLQKRLKKLGFKVRTYNRYNNWLTNDLYCGYVSYKDKVHVKGIHEPIISEEQFYRVQEIFARMGRNPNMNRDSASLLNNLVVCSKCGLGFVHRRKDAMSRDKKYHYRYYSCKTYKHIHELEKCGNKIWRADKLEELIINRVNNYSLASRNVDKEDGLDSLSEKLEIEHAKKRRLFDLYINGSYEVSELDSMMNDIDAQISYYESQIEASEELKKNKKIQENLAHLATVDFDSLEFREKQLYLKSLINKIYIDGEQVTIEWL

SEQ ID NO: 7559 - protein, 452 aa, synthetic construct
MKAAIYIRVSTREQVENYSIRAQTEKLTALCRSKDWDVYDIFIDGGYSGSNMNRPALNEMLSKLHEIDAVVVYRLDRLSRSQRDTITLVEEYFLKNNVEFVSLSETLDTSSPFGRAMIGILSVFAQLERETIRDRMVMGKIKRIEAGLPLTTAKGRTFGYDVIDTKLYINEEEAKQLRLIYDIFEEEQSITFLQKRLKKLGFKVRTYNRYSNWLTNDLYCGYVSYKDKVHVKGIHEPIISEEQFYRVQEIFTRMGKNPNMNRDNASLLNNLVVCSKCGLGFVHRRKDTTSRGKKYHYRYYSCKTYKHTHELEKCGNKIWRADKLEELIINRVNNYSFASRNVDKEDELDSLNEKLKIEHAKKRRLFDLYINGSYEVSELDSMMNDIDAQINYYESQIEANEKLKKNKKIQENLADLATVDFDSLEFREKQLYLKSLINKIYIDGERVTIEWL

SEQ ID NO: 7560 - protein, 452 aa, synthetic construct
MKAAIYIRVSTREQVENYSIQAQTEKLTALCRSKDWDVYDIFIDGGYSGSNMNRPALNEMLSKLHEIDAVVVYRLDRLSRSQRDTITLIEEYFLKNNVEFVSLSETLDTSSPFGRAMIGILSVFAQLERETIRDRMVMGKIKRIEAGLPLTTAKGRTFGYDVIDTKLYINEEEAKQLQLIYDIFEEEQSITFLQRRLKKLGFKVRTYNCYNNWLTNDLYCGYVSYKDKVHVKGIHEPIISEEQFYRVQEIFTRMGKNPNMNRDSASLLNNLVVCSKCGLGFVHRRKDAMSRGKKYHYRYYSCKTYKHIHELEKCGNKIWRADKLEELIINRVNNYSIASRNADKEDELDSLNEKLKIEHAKKKRLFELYINGSYEVSELDSMMNDIDAQIDYYESQIEANEELKKNKKIQEDLAHLATVDFDSLEFREKQLYLKSLINKIYIDGEQVTIEWL

SEQ ID NO: 7561 - protein, 485 aa, synthetic construct
MTKKVAIYTRVSTTNQAEEGFSIDEQTDRLIKYAEAMGWQVSDTYTDAGFSGAKLERPAMQRLINDVENKAFDTVLVYKLDRLSRSVRDTLHLVKDVFTKNKIDFISLNESIDTSSAMGSLFLTILSAINEFERENIKERMTMGKLGRAKSGKSMMWAKTAFGYYHNRKTGILEIVPLQATIVEQIFTDYLSGISLTKLRDKLNEGGHIGKDIPWSYRTLRQTLDNPVYCGYIKFKDSLFEGMHKPIIPYETYLKVQKELAERQQQTYERNNNPRPFQAKYMLSGVARCGYCGAPLKIVLGHKRKDGSRTMKYHCANRFPRKTKGVTVYNDNKKCDSGTYDLCSLEDTVIDNLVGFQENNDSLLKIINGNNQPIPDTSSLKKQISQIDKKIQKNSDLYLNDFITMDELKDRTDSLQAEKKLLKAKISEDKFNDSTDVFELVKTQLGSIPINELSYDNKKKIVNDLVGKVDVTADNVDIIFKFQLA

SEQ ID NO: 7562 - protein, 469 aa, synthetic construct
MSYTTPVRAAVYLRISEDRSGEQLGVARQREDCLKLCGQRKWVPVEYLDNDVSASTGKRRPAYEQMLADITAGKIAAVVAWDLDRLHRRPIELEAFMSLADEKRLALATVAGDVDLATPQGRLVARLKASVAAHETEHKKARQRRAARQKAERGHPNWSKAFGYLPGPNGPEPDPRTAPLVKQAYADILAGASLGDVCRQWNDAGAFTITGRPWTTTTLSKFLRKPRNAGLRAYKGARYGPVDRDAIVGKAQWSPLVDEATFWAAQAVLDAPGRAPGRKSVRRHLLTGLAGCGKCGNHLAGSYRTDGQIVYVCKACHGVSILAVNIEPILYRIVAERLAMPDAVGLLRREIHDAAEAETIRLELETLYGELDRLAVERAEGLLTARQVKISTDIVNAKITKLQARQLDQERLRVFDGIPLGTPQVAGMIAELSPDRFRAVLDVLAEVVVRPVGKSGRIFNPERVQVNWR

SEQ ID NO: 7563 - protein, 452 aa, synthetic construct
MKAAIYIRVSTREQVENYSIQAQTEKLTALCRSKDWDVYDIFIDGGYSGSNMNRPALNEMLSKLHEIDAVVVYRLDRLSRSQRDTITLIEEYFLKNNVEFVSLSETLDTSSPFGRAMIGILSVFAQLERETIRDRMVMGKIKRVEAGLPLTTAKGRTFGYDVIDTKLYINEEEAKQLQLIYDIFEEEQSITFLQKRLKKLGLKVRTYSCYNNWLTNDLYCGYVSYKDKVHVKGIHEPIISEEQFCRVQEIFARMGKNPNMNHDSASLLNSLVVCSKCGLGFVHRRKDTVSRGKKYHYRYYSCKTYKHIHELEKCGNKIWRADKLEELIINRVNNYSLTSRNVDKEDELDSLNEKLKIEHAKKRRLFELYINGSYEVSELDSMMSDIDAQINYYESQIEANEGLKKNKKIQENLANLATVDYDSLEFREKQLYLKSLINKIYIDGEQVTIEWL

SEQ ID NO: 7564 - protein, 452 aa, synthetic construct
MKAAIYIRVSTQEQVGNYSIQAQTEKLTALCRSKDWDVYDIFIDGGYSGSNMNRPALNEMLSKLHEIDAVVVYRLDRLSRSQRDTTTLIEEYFLKNNVEFVSLSETLDTSSPFGRAMIGILSVFAQLERETIRDRMVMGKIKRIEAGLPLTTAKGRTFGYDVIDTRLYINEEEARQLQLIYDIFEEEQSITFLQKRLKKLGFKVRTYNRYNKWLTNDLYCGYVSYKDKVHVKGIHEPIISEEQFYRVQEIFTRMGKNPNMNRDSASLLSNLVVCSKCGLGFVHRSKDTMSRGKKYHYRYYSCKTYKHTHELEKCGNKTWRADKLEELIINRVNNYSFASRNVDKEGELDSLNEKLKIEHAKKRRLFDLYINGSYEVSELDSMMNDIDAQISYYESQIEANEELKKHKKIQENLANLATVDFDSLEFREKQLYLKSLINKIYIDGEQVTIEWL

SEQ ID NO: 7565 - protein, 469 aa, synthetic construct
MSYTTPVRAAVYLRISEDRSGEQLGVARQREDCLKLCGQRKWVPVEYLDNDVSASTGKRRPAYEQMLADITAGKIAAVVAWDLDRLHRRPVELEAFMSLADEKRLALATVAGDVDLATPQGRLVARLKGCVAAHETEHKKARQRRAARQKAERGLPNWSKAFGYLPGPNGPEPDPRTAPLVKQAYADILAGASLGDVCRQWNDADAFTITGRPWTTTTLSKFLRKPRNAGLRAYKGARYGPVDRDAIVGKAQWSPLVDEATFWAAQAVLDAPGRAPGRKSVRRHLLTGLASCGKCGYHLAGSYRTDGRVVYVCKACHGVAILADNIEPILYHIVAERLAMPAAVDLLCREVHDAAEAEAIRLELETLHGELDRLAVERAEGLLTARQVKISTDIVNAKITKLQARRQDQERLRVFDGIPLGTPQVAGMIAELSPDRFRAVLDVLAEVVVQPVGKGGRIFNPERVQVNWR

SEQ ID NO: 7566 - protein, 452 aa, synthetic construct
MKAAIYIRVSTREQVENYSIQAQTEKLTALCRSKDWDVYDTFIDGGYSGSNMNRPALNEMLSKLHEIDAVVVYRLDRLSRSQRDTITLIEEYFLKNNVEFVSLSETLDTSSPFGRAMIGILSVFAQLERETIRDRMVMGKIKRIEAGLPLTTAKGRTFGYDVIDTRLYINEEEAKQLQLIYDIFEEEQSITFLQKRLKKLGFKVRTYNRYNNWLTNDLYCGYVSYKDRVHVKGIHEPIISEEQFYRVQEIFTRMGKNPNMNRDSASLLNNLVVCSKCGLGFVHRRKDAMSRDKKYHYRYYSCKTYKHIHELEKCGNKIWRADKLEELIIDRVNNYSLASRNVDKEDELGSLNEKLKAEHAKKKRLFDLYINGCYEVSELDRMMNDIDAQINYYESQIEANEELKKNKKIQENLARLATVDFDSLEFREKQLYLKSLISKIYIDGEQVTIEWL

SEQ ID NO: 7567 - protein, 452 aa, synthetic construct
MKAAIYIRVSTREQVENYSIQAQIEKLAALCRSKDWDVYDIFIDGGYSGSNMNRPALNEMLGKLHEIDAVVVYRLDRLSRSQRDTITLIEEYFLKNNVEFVSLSETLDTSSPFGRAMIGILSVFAQLERETIRDRMVMGKIKRVEAGLPLTTAKGRTFGYDVIDTKLYINEEEAKQLQLIYDIFEEEQSITFLQKRLKKLGFKVRTYSCYNNWLTNDLYCGYVRYKDKVHVKGIHEPIISEEQFYRVQEIFTRMGKNPNMNRDSASLLNSLVVCSKCGLGFVHRRKDTMSRGKKYQYRYYSCKTYKHTHELEKCGNKIWRADKLEELIVNRVNNYSFASRNVDKEDELDSLNEKLKTEHAKKKRLFDLYINGSYEVSELDSMMNDIDAQINYYESQIEANEGLKKDKKVQENLADLATVDFDSLEFREKQLYLKSLINKIYIDGEQVTIEWL

SEQ ID NO: 7568 - protein, 469 aa, synthetic construct
MSYTTPVRAAVYLRISEDRSGEQLGVARQREDCLKLCGQRKWEPVEYLDNDVSASTGKRRPAYEQMLADITAGKIAAVVAWDLDRLHRRPIELEAFMSLADEKRLALATVAGDVDLATPQGRLVARLKGSVAAHETEHKKARQRRAARQKAERGLPNWSKAFGYLPGPNGPEPDPRTAPLVKQAYAGILAGASLGDVCRQWNDAGAFTITGRLWTTTTLSKFLRKPRNAGLRAYKGARYGPVDRDAIVGKAQWSPLVDEATFWAAQAVLDAPGRAPGRKSVRRHLLTGLAGCGKCGHHLAGSYRTDGRVVYVCKACHGVAILADNIEPILYHIVAERLAKPDAVDLLRREIHDAAEAETIRLELETLYGELDHLAVERAEGLLTARQVKISTDIVNAKITKLQARQLDRERLRVFEGIPLGTPQVAGMIAELSPDRFRAVLDVLAEVVVQPVGKSGRIFNPERVQVNWR

SEQ ID NO: 7569 - protein, 485 aa, synthetic construct
MTKKVAIYTRVSTTNQAEEGFSIDEQIDRLTKYAEAMGWQVSDTYTDAGLSGAKLERPAMQRLINDIENKAFDTVLVYKLDRLSRSVRDTLYLVKDVFTKNKIDFISLNESIDTSSAMGSLFLTILSAINEFERENIKERMTMGKLGRAKSGKSMMWTKTAFGYYHNRKTGILEIMPLQATIVEQIFTDYLSGISLTKLRDKLNESGHIGKDIPWSYRTLRQTLDNPVYCGYIKFKDSLFKGMHKPIIPYETYLKVQKELEERQQQTYERNNNPRPFQAKYMLSGMARCGYCGAPLRIVLGHKRKDGSRTMRYHCANRFPRKTKGVTVYNDNKKCDSGTYDLSSLENAVIDNLIGFQENNDSLLKIINGSNQPILDISSFKKQISQIDRKIQKNSDLYLNDFITMDELKDRTDSLQAEKKLLKAKISENKLNDSTDVFGLVKAQLGSIPINELSYDNKKKIVNSLVSKVDVTVDNVDIIFKFQLA

SEQ ID NO: 7570 - protein, 469 aa, synthetic construct
MSYTTPVRAAVYLRISEDRSGEQLGVARQREDCLKLCGQRKWEPVEYLDNDVSASTGKRRPAYEQMLADITAGKIAAVVAWDLDRLHRRPIELEAFMSLADEKRLALATVAGDVDLATPQGRLVARLKGSVAAHETEHKKARQRRAARQKAERGHPNWSKAFGYLPGQNGPEPDPRTAPLVKQAYADILAGASLGDVCRQWNDAGAFTITGRPWTATTLSKFLRKPRNAGLRTYKGARYGPVDRDAIVGEAQWSPLVDEAIFWAAQAVLDAPGRAPGRKSVRRHLLTGLAGCGKCGSHLAGSHRTDGKVVYVCKACHGVAILADNIEPILYHIVAERLAMPDAVDLLRREIHDTAEAETIRLELETLYGELDRLAVERAEGLLTARQVKISTDIVNAKITKLQARQLDQERLRVFDGIPLGTPQVAGVIAELSPNRFRAVLDVLAEVVVLPVGKSGRIFNPERVQVNWR

SEQ ID NO: 7571 - protein, 452 aa, synthetic construct
MKAAIYIRVSTREQVENYSIQAQTEKLTALCRSKDWDVYDIFIDGGYSGSNMNRPALNEMLSKLHEIDAVVVYRLDRLSRSQRDTITLIEEYFLKNNVEFVSLSETLDTSSPFGRAMIGILSVFAQLERETIRDRMVMGKIKRIEAGLPLTTAKGRTFGYDVIDTKLYINEEEAKQLQLIYDIFEEERSITFLQKRLKKLGFKVRSYNRYSNWLTNDLYCGYVSYKDKVHVKGIHEPIISEEQFYRVQEIFTRMGKNPNMNRDSASLLNNLVVCSKCGLGFVHRRKDTMSRGKRYHYRYYSCKTYKHIHELEKCGNKIWRADKLEELVINRVNNYSFASRNVDKEDELDSLNEKLKIEHAKKKRLFELYINGSYEMGELDSMMNDIDAQINYYESQIEANEGLKKNKKIQENLADLATVDFDSLEFREKQLYLKSLINKIYIDGEQVTIEWQ

SEQ ID NO: 7572 - protein, 485 aa, synthetic construct
MTKKVAIYTRVSTTNQAEEGFSIDEQIDRLTKYAEAMGWQVSDTYTDAGSSGAKLERPAMQRLINDIENKAFDTVLVYKLDRLSRSVRDTLYLVKDVFTKNKIDFISLNESIDTSSAMGSLFLTILSAINEFERENIKERMTMGKLGRAKSGKSMMWTKTAFGYYHNRKTGILEIVPLQATIVEQIFTDYLSGISLTKLRDKLNESGHIGKDIPWSYRTLRQTLDNPVYCGYIKFKDSLFEGMHKPIIPYETYLKVQKELEERQQQTYERNNNPRPFQAKYMLSGMARCGYCGAPLRIVLGHRRKDGSRTMKYHCANRFPRKTRGVTVYNDNKKCNSGTYDLSNLENTVIDSLIGFQENNDSLLRIINSNNQPILDTSSFKEQISQIDKKIQKNSDLYLNDFITMDELKDRTDSLQAEKKLLKARISENKFNDSTDVFELVKTQLGSIPINELSYDNKKRIVNSLVSEVDVTVDNVDIIFKFQLA

SEQ ID NO: 7573 - protein, 485 aa, synthetic construct
MTRKVAIYTRVSTTNQAEEGFSIDEQIDRLTKYAEAMGWQVSDTYTDAGFSGAKLERPAMQRLINDIENKAFDTVLVYKLDRLSRSVRDTLYLVKEVFTKSKIDFISLNESIDTSSAMGSLFLTILSAINEFERENIKERMTMGKLGRAKSGKSMMWTKTAFGYYHNRKTGILEIVPLQATIVEQIFTDYLSGISLTKLRDKLNESGHIGKDIPWSYRTLRQTLDNPVYCGYIKFKDSLFEGMHKPIVPYETYLRVQKELEERQQQTYERNNNPRPFQAKYMLSGMARCGYCGAPLRIVLGRRRKDGSRTMKYHCANRFPRKTKGVTVYNDNKKCDSGTYDLSNLENTVIDNLIGFQENNDSLLRIINGSNQPILDTSSFRERISQIDKKIQKNSDLYLNDFITMDELKDRTNSLRAEKKLLKAKISENKFNGSTDVFELVKTQLGSIPINELSYDNKKKIVNNLVSKVDVTADNVDIIFKFQLA

SEQ ID NO: 7574 - protein, 452 aa, synthetic construct
MKAAIYIRVSTQEQVGNYSIQAQTEKLTALCRSKDWDVYDIFIDGGYSGSNLNRPALNEMLSKLHEIDAVVVYRLDRLSRSQRDTTTLIEEYFLKNNVEFVSLSETLDTSSPFGRAMIGILSVFAQLERETIRDRMVMGKIKRIESGLPLTTAKGRTFGYDVIDTKLYINEEEAKQLQLIYDIFEEEQSITSLQKRLKKLGFKVRTYNRYNNWLTNDLYCGYVSYKDKVHVKGIHEPIISEEQFYRVQEIFTRTGKNPNMNRDSASLLNNLVVCSRCGLGFVHRSKDTMSRGNKYHYRYYSCKTYKHTHELEKCGNKTWRADKLEELIINRVNNYSFASRNVDKEDELDSLNKKLKIERAKKKRLFDLYINGSYEVSELDSMMNDIDAQINHYESQIEANEGLKKNRKIQENLADLATVDFDSLEFREKQLYLKSLINKIYIDGEQVTIEWL

SEQ ID NO: 7575 - protein, 485 aa, synthetic construct; identical to SEQ ID NO: 7340

SEQ ID NO: 7576 - protein, 452 aa, synthetic construct
MKAAIYIRVSTQEQVGNYSIQAQTEKLTALCRSKDWDVYDIFIDGGYSGSNMNRPALNEMLSKLHEIDAVVVYRLDRLSRSQRDTTTLIEEYFLKNNVEFVSLSETLDTSSPFGRAMIGILSVFAQLERETIRDRMVMGKIKRIEAGLPLTTAKGRTFGYDVIDTKLYINEEEAKQLRLIYDIFEEEQSITFLQKRLKKLGFKVRTYNRYNNWLTNDLYCGYVSYKDKVHVKGIHEPIISEEQFYRVQEIFARMGKNPNMNRDSASLLSNLVVCSKCGLGFVHRSKDTMSRGKKYHYRYYSCKTYKHTHELEKCGNKTWRADKLEELIINRVNNYSFASRNVDKEDELDSLSEKLETERAKKKRLLDLYINGSYEVSELDSMMNDIDAQINYYESQIEANEELRKNRKIQENLADLATVDFDSLEFREKQLYLKSLINKIYIDGEQVTIEWL

SEQ ID NO: 7577 - protein, 485 aa, synthetic construct
MTKKVAIYTRVSTTNQAEEGFSIDEQIDRLTKYAEAMGWQVSDTYTDAGFSGAKLERPAMQRLINDIENKAFDTVLVYKLDRLSRSVRDTLYLVKDVFTKNKIDFISLNESINTSSAMGSLFLTILSAINEFERENIKERMTMGKLGRAKSGKSMMWTKTAFGYYHNRKTGILEIVPLQATIVKQIFTDYLSGISLTKLRDKLNESGHIGKDIPWSYRTLRQTLDNPVYCGYIKFKDSLFEGMHKPIIPYETYLKVQKELEERQQQTYERNNNPRPFQAKYMLSGMARCGYCGAPLKIVLGHKRKDGSRTMKYHCANRFPRKTRGITVYNDNKKCDSGTYDLSNLENTVIDYLIGFQENNDRLLKIINGNNQPILDTSSFEKQISQIDKKIQKNSDLYLNDLITMDELKDRTDSLQAVKKLLKAKISENKFNDSTDVFELVKTQLGSIPINELSYDNKKKIVNNLVSRVDVTADNVDIIFKFRLA

SEQ ID NO: 7578 - protein, 452 aa, synthetic construct
MKAAIYIRVSTREQVENYSIQAQTEKLTALCRSKDWDVYDIFVDGGYSGSNMNRPALNEMLSKLHEIDAVVVYRLDRLSRSQRDTITLIEEYFLKNNVEFVSLSETLDTSSPFGRAMIGILSVFAQLERETIRDRMVMGKIKRIEAGLPLTTAKGRTFGYDVIDTKLYINEEEAKQLQLIYNIFEEEQSITLLQKRLKKLGFKVRTYNCYNNWLTNDLYCGYVSYKDKVHVKGIHEPIISEEQFYRVQGIFTRMGKSPNMNRDSASLLNNLVVCSKCGLGFVHRRKDTTSRGKKYHYRYYSCKTYKHTHELEKCGNKIWRADKLEELIINRVNNYSFASRNVDNDDELDSLNEKLKIEHAKKKRLFDLYINGSYEVSELDSMMNDIDAQINYYESQIEANEELKKNEKIQENLANLATVDYDSLEFREKQLYLKSLINKIYIDGEQVIIEWL

SEQ ID NO: 7579 - protein, 469 aa, synthetic construct; identical to SEQ ID NO: 7434

SEQ ID NO: 7580 - protein, 452 aa, synthetic construct
MKAAIYIRVSTREQVENYSIQAQTEKLTALCRSKDWDVYDIFVDGGYSGSNMDRPALNEMLSKLHEIDAVVVYRLDRLSRCQRDTITLIEEYFLKNNVEFVSLSETLDTSSPFGRAMIGILSVFAQLERETIRDRMVMGKIKRIEAGLPLTTAKGRTFGYDVIDTKLYINEEEAKQLQLIYDIFEEEQSITFLQKRLKKLGFKVRTYNCYNNWLTNDLYCGYVSYRDKVHVKGIHEPIISEEQFYRVQEIFTRTGKNPNMNRDSASLLNNLVVCSKCGLNFVHRRKDTMSRGKKYHYRYYSCKTYKHTHELEKCGNKIWRADKLEELVINRVNNYSFASRNVDKEDELDSLNEKLKIEHAKKKRLFDLYINGSYEVSELDSMMNDIDAQINYYESQIEANEELKKNKKIQENLANLATVDFDSLEFREKQLYLKSLINKIYIDGEQVTIEWL

SEQ ID NO: 7581 - protein, 452 aa, synthetic construct
MKAAIYIRVSTREQVENYSIQAQTEKLTALCRSKDWDVYDIFIDGGYSGSNMNRPALNEMLSKLHEIDAVVVYRLDRLSRSQRDTITLIEEYFLKNNVEFVSLSETLDTSSPFGRAMIGILSVFAQLERETIRDRMVMGKIKRIEAGLPLTTAKGRTFGYDVIDTKLYINEEEAKQLQLIYDIFEEEQSITFLQKRLKKLGFKVRTYSCYNNWLTNDLYCGYVSYKDKVHVKGIHEPIISEEQFHRVQEIFTRMGKNPNMNRDSASLLNSLVVCSKCGLGFVHRRKDTMSRGKKYHYRYYSCKTYKHTHELEKCGNKIWRADKLEELIINRVNNYSFASRDMDKEDELDSLNEKLKIEHVKRKRLFDLYINGSYNVSELDSMMNDIDAQINYYESQIEANEELKKNKKIQENLADLATVDFDSLEFREKQLYLKSLINKIYIDGEQVTIEWL

SEQ ID NO: 7582 - protein, 452 aa, synthetic construct
MKAAIYIRVSTREQVENYSIQAQTEKLTALCRSKDWGVYDIFVDGGYSGSNMNRPALNEMLSRLHEIDAVVVYRLDRLSRSQRDTITLIEEYFLKNNVEFVSLSETLDTSSPFGRAMIGILSVFAQLERETIRDRMVMGKIKRIEAGLPLTTAKGRTFGYDVIDTKLYINEEEAKQLQLIYDIFEEEQSITSLQKRLKKLGFKVRTYSRYTNWLTNDLYCGYVSYKDKVHVRGIHEPIISEEQFYRVQEIFTRMGKNPNMNRDSASLLNNLVVCSKCGLGFVHRRKDTTSRGKKYRYRYYSCKTYKHTHELEKCGNKIWRADKLEELIINRVNNYSLASRNVDKEDELNSLNEKLKIEHAKKRRLFDLYINGSYEVSELDSMMNDIDVQINYYESQIEANEELKKNKKIQENLADLATADFDSLEFREKQLYLKSLINKIYIDGEQVTIEWL

SEQ ID NO: 7583 - protein, 452 aa, synthetic construct
MKAAIYIRVSTREQVENYSIQAQTEKLTALCRSKDWDVYDIFIDGGYSGSNMNRPALNEMLSKLHEIDAVVVYRLDRLSRSQRDTITLIEEYFLKNNVEFVSLSETLDTSSPFGRAMIGILSVFAQLERETIRDRMVMGKIKRVEAGLPLTTAKGRTFGYDVIDTKLYINEEEAKQLQLIYDIFEEEQSITFLQKRLKKLGFKVHTYNRYSNWLTNDLYCGYVSYKDKVHVRGIHEPIISEEQFYRVQEIFTRMGKSPNMNRDSASLLNNLVVCSKCGLGFVHRRKDTMSRGKKYHYRYYSCKTYKHTHELEKCGNKIWRADKLEELIINRVNNYSLASRNVDKGDELDSLNEKLKIEHAKKRRLFDLYINGSYGVSELDSMMNDIDAQINYYESQIGANEELKKNKKIQENLADLATADFDSLEFREKQLYLKSLINKIYIDGEQVTIEWL

SEQ ID NO: 7584 - protein, 452 aa, synthetic construct
MKAAIYIRVSTREQVENYSIQAQTEKLTALCRSKDWDVYDIFIDGGYSGSNMNRPALNEMLSKLHEIDAVVVYRLDRLSRSQRDTITLIEEHFLKNNVEFVSLSETLDTSSPFGRAMIGILSVFAQLERETIRDRMVMGKIKRIEAGLPLTTAKGRTFGYDVIDTKLYINEEEAKQLQLIYDIFEEEQSITFLQKRLKKLGFKVRTYNRYNNWLTNDLYCGYVSYKDKVHVKGIHEPIISEGQFYRVQEIFTRMGKNPNMNRDSASLLNNLVVCSKCGLGFVHRRKDTTSRGKKYHYRYYSCKTYKHTHELEKCGNKIWRADKLEELIINRVNNYNFASRNVDKEGELDSLNEKLEIEHAKKKRLFDLYINGGYEVSELDSMMSDIDAQINYYESQIEANEELKKDKKIQESLANLATVDYDSLEFREKQLYLKSLINKIYIDGEQVTIEWL

SEQ ID NO: 7585 - protein, 452 aa, synthetic construct
MKAAIYIRVSTREQVENYSIQAQTEKLTALCRSKDWDVYDIFIDGGYSGSNMNRPALNEMLGKLHEIDAVVVYRLDRLSRSQRDTITLIEEYFLKNNVEFVSLSETLDTSSPFGRAMIGILSVFAQLERETIRDRMVMGKIKRIEAGLPLTTAKGRTFGYDVIDTKLYINEEEAKQLQLIYDIFEEEQSITFLQKRLKKLGFKVRTYSRYNNWLTNDLYCGYVSYKDKVHVKGIHEPIISEEQFYRVQEIFARMGKNPNMNRDSASLLNSLVVCSKCGLGFVHRRKDTTSRGKKYHYRYYSCKTYKHTHELEKCGNKIWRADKLEELIINRVNNYSFASRNADKEDELDSLIEKLKIEHAKKKRLFDLYINGSYEVSELDSMMNDIDAQINYYESQIEAHGELKKNKKIQENLADLATVDFDSLEFREKQRYLKSLINKIYIDGEQVTIEWL

SEQ ID NO: 7586 - protein, 452 aa, synthetic construct
MKAAIYIRVSTREQVENYSIQAQTEKLTALCRSKDWDVYDIFIDGGYSGSNMNRPALNEMLSKLHEIDAVVVYRLDRLSRSQRDTITLIEEYFLKNNVEFVSLSETLDTSSPFGRAMIGILSVFAQLERETIRDRMVMGKIKRIEAGLPLTTAKGRTFGYDVIDTKLYINEEEAKQLQLIYDIFEEEQSITFLQKRLKKLGFKVRTYNCYNNWLTNDLYCGYVSYKDKVHVKGIHEPIISEEQFYRVQEIFTRMSKNPNMNRESASLLNNLVVCSKCGLGFVHRRKDTVSRGKKYHYRYYSCKTYKHIHELEKCGNKIWRADKLEELIINHVNNHSLASRNVDKEDELDSLNEKLRIEHAKRKRLFDLYINSSYEVSELDSMMNDIDAQIDYYESQIEANEELKKDKKIQENLAILATVDYDSLEFREKQLYLKSLINKIYIDGEQVTIEWL

SEQ ID NO: 7587 - protein, 452 aa, synthetic construct
MKAAIYIRVSTREQVENYSIQAQTEKLTALCRSKDWDVYDIFIDGGYSGSNMNRPALNEMLSKLHEIDAVVVYRLDRLSRSQRDTITLIEEYFLKNNVEFVSLSETLDTSSPFGRAMIGILSVFAQLERETIRDRMVMGKIKRIEAGLPLTTAKGRTFGYDVIDTKLYINEEEAKQLRLIYDIFEEEQSITFLQKRLKKLGFKVRTYNRYNNWLTNDLYCGYVSYKDKVHVKGIHEPIISEEQFYRVQEIFTRMGKNPNMNRDSASLLNNLVVCGKCGLGFVHRRKDAMSRDKKYHYRYYSCKTYKHIHELEKCGNKIWRADKLEELIINRVNNYSFASRNEDKEDELDSLNEKLKIEHAKKKRLFDLYINGSYEVSELDSMMSDIDAQINHYESQIEANEELKKNKKIQENLAHLATVDFDSLGFREKQLYLKSLINKIYIDGEQVTIEWL

SEQ ID NO: 7588 - protein, 485 aa, synthetic construct; identical to SEQ ID NO: 3698

SEQ ID NO: 7589 - protein, 452 aa, synthetic construct
MKAAIYIRVSTREQVENYSIQAQTEKLTAMCRSKDWDVYDIFIDGGYSGSNMNRPALNEMLSKLHEIDAVVVYRLDRLSRSQRDTITLIEEYFLKSNVEFVSLSETLDTSSPFGRAMIGILSVFAQLERETIRDRMVMGKIKRIEAGLPLTTAKGRTFGYDVIDTKLYINEEEAKQLQLIYDIFEEEQSITFLQKRLKKLGFKVRTYNRYSNWLTNDLYCGYVSYKDKVHVKGIHEPIISEEQFYRVQEIFTRMGKNPNMNRGSASLLNNLVVCGKCGLGFVHRRKDAMSRDKKYHYRYYSCKTYKHIHELEKCGNKIWRADELEELIINRVNNYSLASRNVDKEDELDSLNEKLKIEHAKKKRLFDLYINGSYEVSELDSMMNDIDAQINHYESQIEANEELKKNKKIQENLADLATMDFDSLEFREKQLYLKSLINKIYIDGEQVTIEWL

SEQ ID NO: 7590 - protein, 452 aa, synthetic construct
MKAAIYIRVSTREQVENYSIQAQTEKLTALCRSKDWDVYDIFIDGGYSGSNMNRPALNEMLSKLHEIDAVVVYRLDRLSRSQRDTITLIEEYFLKNNVEFVSLSETLDTSSPFGRAMIGILSVFAQLERETIRDRTVMGKIKRVEAGLPLTTAKGRTFGYDVIDTKLHINEEEAKQLQLIYDIFEEEQSITFLQKRLKKLGFKVRTYNCYNNWLTNDLYCGYVSYKDKVHVKGIHEPIISEEQFYRVQEIFTRMGKNPNMNRDSASLLNNLVVCSKCGLGFVHRRKDTMSRGKKYHYRYYSCKTYKHIHELEKCGNKIWRADKLEELIINCVNNYSFASRNVDKEDELDSLNKKLKIEHAKKKRLFDLYINGSYEVSELDSMMNDIDAQINYYESQIEANEELKRNKKTQENLAGLATVDFDSLEFREKQLYLKSLINKIYIDGEQVTIEWL

SEQ ID NO: 7591 - protein, 485 aa, synthetic construct
MTKKVAIYTRVSTTNQAEEGFSIDEQIDRLTKYAEAMGWQVSDTYTDAGCSGAKLERPAMQRLINDIENKAFDTVLVYKLDRLSRSVRDTLYLVKDVFTKNKIDFISLSESIDTSSAMGSLFLTILSAINEFERENIKERMTMGKLGRAKSGKSMMWTKTAFGYYHNRKTGILEIAPLQATIVEQIFTDYLSGISLTKLRDKLNESGHIGKDIPWSYRTLRQTLDNPVYCGYIKFKDSLFEGMHKPIIPYETYLKVQKELEERQRQTYERNNNPRPFQAKYMLSGMARCGYCGAPLKIVLGHKRKDGSRTMKYHCANRFPRKTKGVTVYNDNKKCDSGTYDMSNLENIVIDNLIGFQENNDSLLRIINGNNQPILDTSSFKKQISQIDKKIQKNSDLYLNDFITMDELKDRTDSLQAEKKLLKAKISENKFNDSTDVFELVKTQLGSIPINELSYDNKKKIVNSLVCKVDVTADNVDIIFKFQLA

SEQ ID NO: 7592 - protein, 452 aa, synthetic construct
MKAAIYIRVSTQEQVGNYSIQAQTEKLTALCRSKDWDVYDIFIDGGYSGSNMNRPALNEMLSKLHEIDAVVVYRLDRLSRSQRDTTTLIEEYFLKNNVEFVSLSETLDTSSPFGRAMIGILSVFAQLERETIRDRMVMGKIKRIEAGLPLTTAKGRTFGYDVIDTKLYINEEEAKQLRLIYDIFEEEQSITSLQKRLKKLGFKVRTYNRYNNWLTNDLYCGYVSYKDKVHVKGIHEPIISEEQFYRVQEIFTRMGKKPNMNRDSASLLNNLVVCSKCGLSFVHRSKDTMSRGKKYHYRYYSCKTYKHTHELEKCGNKTWRADKLEELIINRVNNYSFASRNVDKEDELDSLNERLKIEHAKKKRLFDLYINGGYEVSELDSMMSDIDAQIDYYESRIKANEELKKNKKIQENLADLATVDFDSLEFREKQLYLKSLINKIYIDGEQVTIEWL

SEQ ID NO: 7593 - protein, 452 aa, synthetic construct
MKAAIYIRVSTREQVENYSIQAQTEKLTALCRSKDWDVYDIFIDGGYSGSNINRPALNEMLSKLHEIDAVVVYRLDRLSRSQRDTITLIEEYFLKNNVEFVSLSETLDTSSPFGRAMIGILSVFAQLERETIRDRMVMGKIKRIEAGLPLTTAKGRTFGYDVIDTKLYINEEEAKQLQLIYDIFEEVQSITSLQRRLKKLGFKVRTYSCYNNWLTNDLYCGYVSYKDKVHVKGIHEPIISEEQFYRVQEIFTRMGKNPNMNRDSASLLNNLVVCSKCGLGFVHRRKDTMSRGKKYHYRYYSCKTYKHTHELEKCGNKIWRADKLEELIINRVNNYSLASRDADKEDELDSLSEKLKVEHAKKKRLFELYINGSYEMGELDSMMNDIDAQINYYESQIEANEGLKRNRKIQENLANLATMDYDSLEFREKQLYLKSLISKIYIDGEQVTIEWL

SEQ ID NO: 7594 - protein, 452 aa, synthetic construct
MKAAIYIRVSTREQVENYSIQAQTEKLTALCRSKDWDVYDIFIDGGYSGSNMNRPALNEMLSKLHEIDAVVVYRLDRLSRSQRDTITLIEEYFLKNNVEFVSLSETLDTSSPFGRAMISILSVFAQLERETIRDRMVMGKIKRIEAGLPLTTAKGRTFGYDVIDTKLYINEEEAKQLQLIYNIFEEEQSITFLQKRLKKLGFKVRTYSCYNNWLTNDLYCGYVSYKDKVHVKGIHEPIISEEQFYRVQGIFARMGKNPNMNRDSASLLNNLVVCSKCGLGFVHRRKDTMSRGKKYHYRYYSCKTYKHTHELEKCGNKIWRADKLEELIINRVNNYSFASRNVDKEDELDSLNEKLKIEHAKKKRLFDLYINGSYEVSELDCMMNDIDAQINYYESQIEANEELKKDKKIQESLANLATVDYDSLEFREKQLYLKSLINKIYIDGEQVTIEWL

SEQ ID NO: 7595 - protein, 452 aa, synthetic construct
MKAAIYIRVSTREQVENYSIQAQTEKLTALCRSKDWDVYDIFIDGGYSGSNMNRPALNEMLSKLHEIDAVVVYRLDRLSRSQRDTITLIEEYFLKNNVEFVSLSETLDTSSPFGRAMIGILSVFAQLERETIRDRMVMGKIKRIEAGLPLTTAKGRTFGYDVIDTKLYINEEEAKQLRLIYDIFEEERSITFLQKRLKKLGFKVRTYNRYNNWLTNDLYCGYVSYKDKVHVKGIHEPIISEEQFYRVQEIFTRMGKNPNMNRGSASLLNNLVVCSKCGLGFVHRRKDIMSRGKKYHYRYYSCKTYKHIHELEKCGNKIWRADKLEELIINRVNNYSLASRNVDKEDVLGSLNEKLRIEHAKKKRLFDLYINGSYEVSELDSMMNDIDAQINYYESQVEANEEPKKSKKIQENLAYLATVDFDSLEFREKQLYLKSLINKIYIDGEQVTIEWL

SEQ ID NO: 7596 - protein, 452 aa, synthetic construct; identical to SEQ ID NO: 5453

SEQ ID NO: 7597 - protein, 469 aa, synthetic construct
MSNTIPVRAAVYLRISEDRSGEQLGVARQREDCLKLCGQRKWVPVEYLDNDVSASTGKRRPAYEQMLADITAGKIAAVVAWDLDRLHRRPIELEAFMSLADEKRLALATVAGDVDLATPQGRLVARLKGSVAAHETEHKKARQRRAARQKAERGHPNWSKAFGYLPGPNGPEPDPRTAPLVKQAYADILAGASLGDVCRRWNDAGALTITGRPWTTTTLSKFLRKPRNAGLRAYKGARYGPVDRDAIVGKAQWSPLVDEATFWAAQAVLDAPGRAPGRKSVRRHLLTGLAGCGKCGNHLAGSYRTDGRVVYVCKACHGVAILADNIEPILYRIVAERLAMPDAVDLLHREIHDAAEAETIRLELETLYGELDRLAVERAEGLLTARQVKISTDIVNAKITKLQARRLDQERLRVFDGIPLGTPQVAGMIAELSPDRFRAVLDVLAEVVVQPVGKSGRIFNPERVQVNWR

SEQ ID NO: 7598 - protein, 485 aa, synthetic construct
MTKKVAIYTRVSTTNQAEEGFSIDEQMDRLTKYAEAMGWQVSDTYTDAGFSGAKLERPAMQRLINDIENKAFDTVLVYKLDRLSRSVRDTLYLVKDVFTKNSIDFISLNESIDTSSAMGSLFLTILSAINEFERENIKERMTMGKLGRAKSGKSMMWTKTAFGYYHNRKTGILEIVPLQAAIVEQIFTDYLSGTSLTKLRDKLNESGHIGKDIPWSYRTLRQTLDNPVYCGYIKFKDSLFGGMHKPIIPYETYLKVQKELEERQQQTYERNNNPRPFQAKYMLSGMARCGYCGAPLRIVLGRKRKDGSRTMKYHCANRFPRKTKGVTVYNDNKKCDSGTYDLSDLENTVIDNLIGFQEDNDSLLKIINGNNQPTLDTSSFKEQISQIDKKIQKNSDLYLNDFITMDELKDRTDSLQAEKKLLKAKISENKFNDSTDVFELVKTQLGSIPINELSYDNKKKIVNNLVSKVDVTADNVDIIFKFQLT

SEQ ID NO: 7599 - protein, 469 aa, synthetic construct
MSYTTPVRAAVYLRISEDRSGEQLGVARQREDCLELCDQRKWVPVEYLDNDVSASTGKRRPAYERMLADIAAGKIAAVVTWDLDRLHRRPIELEAFMCLADEKRLALATVAGDVDLATPQGRLVARLKGSVAAHETEHKKARQRRAARQKAERGHPNWSKAFGYLPGPNGPEPDPRTAPLVRQAYADILAGASLGEVCRQWNGAGALTVTGRPWTTTTLSKFLRKPRNAGLRAYKGARYGPVDRNAIVGKAQWSPLVDEATFWAAQAVLDAPGRAPGRKSVRRHLLTGLAGCGKCGNHLAGSYRTDGRVVYVCKACHGVAILADNIEPILYHIVAERLAMPDAVDLLRREIHDAAEAETIRLELETLYGELDRLAVERAEGLLTARQVKISTDIVNAKITRLQAHQLDQERLRVFDGIPLGTPQVAGMIAKLSPDRFRAVLDVLAEVVVQPVGKGGRIFNPERVQVNWR

SEQ ID NO: 7600 - protein, 452 aa, synthetic construct
MKAAIYIRVSTREQVENYSIQAQTEKLTALCRSKDWDVYDIFIDGGYSGSNMNRPALNEMLSKLHEIDAVVVYRLDRLSRSQRDTITLIEEYFLKNNVEFVSLSETLDTSSPFGRAMIGILSVFAQLERETIRDRMVMGKIKRIEAGLPLTTAKGRTFGYDVIDTKLYINEEEAKQLQLIYDIFEEEQSITFLQKRLKKLGFKVRTYNRYNNWLTNDLYCGYVSYKDKVHVKGIHEPIISEEQFYRVQEIFTRMGKNPNMNRDSASLLNNLVVCSKCGLGFVHRRKDTMSRDKKYHYRYYSCKTYKHIHELEKCGNKIWRADKLEELIINRVNNYSLASRNVGKEDELDSLNEKLKIEHAKKKRLFDLYINGSYEVSELDSMMSDIDAQINYYESRIEAYEELKKNKKIQENLAALATVDFDSLEFREKQLYLKSLINKIYIDGEQVTIEWL

SEQ ID NO: 7601 - protein, 452 aa, synthetic construct
MKAAIYIRVSTQEQVENYSIQAQTEKLTALCRSKDWDVYDIFIDGGYSGSNMNRPALNEMLSKLHEIDAVVVYRLDRLSRSQRDTTTLIEEYFLKNNVEFVSLSETLDTSSPFGRAMIGILSVFAQLERETIRDRMVMGKIKRIEAGLPLTTAKGRTFGYDVIDTKLYINEEEAKQLQLIYDIFEEEQSITSLQKRLKKLGFKVRTYNRYNHWLTNDLYCGYVSYKDKVHVKGIHEPIISEEQFYRVQEIFTRMGKNPNMNRDSASLLNNLVVCSKCGLGFVHRSKDTMSRGKKYHYRYYSCKTYKHTHELEKCGNKTWRADKLEELIINRVNNYSFASRNADKEDELDSLNEELKIEHAKKRRLFDLYINGSYEVSELDSMMNDIDAQIDYYEGLIEANEELKKNKKIQENLADLAAVDFDSLEFREKQLYLKSLINKIYIDGEQVTIEWL

SEQ ID NO: 7602 - protein, 469 aa, synthetic construct
MSYTTPVRAAVYLRISEDRSGEQLGVARQREDCLKLCGQRKWVPVEYLDNDVSASTGKRRPAYEQMLADITAGKIAAVVAWDLDRLHRRPIELEAFMSLADEKRLALATVAGDVDLATPQGRLVARLKGSVAAHETEHKKARQRRAARQKAERGYPNWSKAFGYLPGPNGPEPDPRTAPLVKQAYADILAGASLGDVCRQWNDAGAFTITGRPWTTTTLSKFLRKPRNAGLRAYKGARHGPVDRDAIVGKAQWSPLVDETTFWAAQAVLDAPGRAPGRKSVRRHLLTGLAGCGKCGNHLAGSYRTDGRVVYVCKACHGVAILADNIEPILYHIVAERLAMPDAVDLLRREVHDAAEAEAIRLELETLYGELDRLAVERAEGLLTARQVKISTDIVNAKITKLQACQLDQERLRVFDGIPLGTPQVVGMIAELSPDRFRAVLDMLAEVVVQPVGKGGRIFNPERVQVNWR

SEQ ID NO: 7603 - protein, 452 aa, synthetic construct
MKAAIYIRVSTQEQVENYSIQAQTEKLTALCRSKDWDVYDIFIDGGYSGSNMNRPALNEMLSKLHEIDAVVVYRLDRLSRSQRDTTTLIEEYFLKNNVEFVSLSETLDTSSPFGRAMIGILSVFAQLERETIRDRMVMGKIKRIEAGLPLTTAKGRTFGYDVIDTKLYINEEEAKQLRLIYDIFEEEQSITSLQKRLKKLGFKVRAYNRYNNWLTNDLYCGYVSYKDKVHVKGIHEPIISEEQFYRVQEIFTRMGKNPNMSRDSASLLNNLVVCSRCGLSFVHRSKDTMSRGKRYHYRYYSCKTYKHTHELEKCGNKTWRADKLEELIINRVNNYSFASRNVDKEDELDSLNEKLKVEHAKKKRLFDLYINGSYEVSELDSMMNDIDAQINYYESQIEANEELKKNKKIQENLADLATVDFDSLGFREKQLYLKSLINKIYIDGEQVTIEWL

SEQ ID NO: 7604 - protein, 485 aa, synthetic construct
MTKKVAIYTRVSTTSQAEEGFSIDEQIDRLTKYAEAMGWQVSGTYTDAGFSGAKLERPAMQRLINDIENKVFDTVLVYKLDRLSRSVRDTLYLVKDVFTKSKIDFISLNESIDTSSAMGSLFLTILSAINEFERENIKERMTMGKLGRAKSGKSMMWTKTAFGYYHNRKTGILEIVPLQATIVEQIFTDYLSGISLTKLRDKLNESGHIGKDIPWSYRTLRQILDNPVYCGYIKFKGSLFEGMHKPIIPYETYLRVQKELEERQQQAYERNNNPRPFQAKYMLSGMARCGYCGAPLKIVLGHKRKDGSRTMKYHCANRFPRKTKGVTVYNDNKKCDSGTYDLSSLENTVIDNLIGFQENNDSLPKIINGNNQPILDISSFKRQIAQIDKKIQKNSDLYLNDFITMDELKDRTDSLQAEKKLLQAKISENKLNDSTDVFELVKTQLGSIPINELSYDNKKKLVNNLVSKVDVTADNVDITFKFQLA

SEQ ID NO: 7605 - protein, 452 aa, synthetic construct
MKAAIYIRVSTREQVENYSIQAQTEKLTALCRSKDWDVYDIFIDGGYSGSNMNRPALNEMLSKLHEIDAVVVYRLDRLSRSQRDTITLIEEYFLKNNVEFVSLSETLDTSSPFGRAMIGILSVFAQLERETIRDRMVMGKIKRIEAGLPLTTAKGRTFGYDVIDAKLYINEEEAKQLRLIYDIFEEEQSITFLQKRLKKLGFKVRTYNRYNNWLTNDLYCGYVSYKDKVHVKGIHEPIISEEQFYRVQEIFARMGKNPNMNRGSASLLNNLVVCGKCGLGFVHRRKDIVSRGKKYHYRYYSCKTYKHIHELEKCGNKIWRADKLEELVINRVNNYSFASRNADKEDELDSLNEKLKIEHAKKRRLFDLYINGSYEMSELDSTMNDIDAQINYYESQIEANEELRKNKKIQDNLAELATVDFDSLEFREKQRYLKSLINKIYIDGEQVTIEWL

SEQ ID NO: 7606 - protein, 452 aa, synthetic construct
MKAAIYIRVSTQEQVGNYSIQAQTEKLTALCRSKGWDVYDIFIDGGYSGSNMDRPALNEMLSKLHEIDAVVVYRLDRLSRSQRDTTTLIEEYFLKNNVEFVSLSETLDTSSPFGRAMIGILSVFAQLERETIRDRMVMGKIKRIEAGLPLTTAKGRTFGYDVIDTKLYINEEEAKQLRLIYDIFEEEQSITFLQKRLKKLGFKVRTYNRYNNWLTNDLYCGYVSYKDKVHVKGIHEPIISEEQFYRVQEIFTRMGKNPNMNRDSASLLNNLVVCSKCGLGFVHRSKDTMCRGRKYHYRYYSCKTYKHTHELEKCGNKTWRADKLEELIINRVNNYSLASRGVDREDELDSLNEKLKIEHAKKKRLFDLYINGSYEMSELDSMMNDIDVQINYYESQIEANEELKKNKKIRENLADLATVDFDSLEFREKQLYLKSLINKIYIDGERVTIEWL

SEQ ID NO: 7607 - protein, 452 aa, synthetic construct
MKAAIYIRVSTREQVENYSIQAQAEKLTALCRSKDWDVYDIFIDGGYSGSNMNRPALNEMLSKLHEIDAVVVYRLDRLSRSQRDTITLIEEYFLKNNVEFVSLSETLDTSSPFGRAMIGILSVFAQLERETIRDRMVMGKIKRIEAGLPLTTAKGRTFGYDVIDTKLYINEEEAKQLQLIYDIFEEEQSITFLQKRLKKLGFKVRTYNRYNNWLTNDLYCGYVSYKDKVHVKGIHEPIISEEQFYRVQEIFTRMGKNPNMNRDSASLLNNLVVCSKCGLGFVHRRKDAKSRDKRYHYRYYSCKTYKHIHELEKCGNKIWRADKLEELIINRVNNYSFASRNADKADELDSLSEKLKIEHAKKKRLFDLYVNGNYEVSELDSMMNDIDAQISYYESQIEANEELRKSKRIQENLANLATVDFDSLEFREKQLYLKSLINKIYIDGEQVTIEWL

SEQ ID NO: 7608 - protein, 452 aa, synthetic construct
MKAAIYIRVSTREQVENYSIQAQTEKLTALCRSKDWDVYDIFVDGGYSGSNMNRPALNEMLSKLHEIDAVVVYRLDRLSRSQRDTITLIEEYFLKNNVEFVSLSETLDTSSPFGRAMIGILSVFAQLERETIRDRMVMGKIKRIEAGLPLTTAKGRTFGYDVIDTKLYINEEEAKQLQLIYDIFEEERSITSLQKRLKKLGLKVRSYNRYNNWLTNDLYCGYVSYKDKVHVKGIHEPIISEEQFYRVQEIFTRMGRNPNMNRDSASLLNNLVVCSKCGLGFVHRRKDAMSRDKKYHYRYYSCKTYKHIHELEKCGNKIWRADKLEELIINRVNDYSVASRNVDKEDELNSLNEKLKIEHAKKKRLFDLYINGSYEVSELDSMMNNIDAQINCYESQIEANGELKRNKKIQENLADLATVDFDSLEFREKQLYLKSLINKIYIDGEQVTIEWL

SEQ ID NO: 7609 - protein, 485 aa, synthetic construct
MTKKVAIYTRVSTTNQAEEGFSIDEQIDRLTKYAEAMGWQVSDTYTDAGLSGAKLERPAMQRLINDIENKAFDTVLVYKLDRLSRSVRDTLYLVKDVFTKNKIDFISLTESIDTSSAMGSLFLTILSAINEFERENIKERMTMGKLGRAKSGKSMMWTKTAFGYYHNRKTGILEIVPLQATIVEQIFIDYLSGISLTKLRDKLNESGHIGKDIPWSYRTLRQTLDNPVYCGYIKFKDSLFEGMHKPIIPYETYLKVQKELEERQQQTYERNNNPRPFQAKYMLSGMARCGYCGAPLRIVLGHKRKDGSRTMKYHCANRFPRKTKGVTVYNGNKKCDSGTYDLSKLENTVIDTLIGLQENNDSLLKIINGNNQPILDTSSFKKQISQIDKKIQKNSDLYLNDFITMEELKDRTDSLQAEKKLLKAKISENKFNDSTGVFELVKTQLGSIPINELSYDNKKKIVNNLVSKVDVTADNVDIIFKFQLA

SEQ ID NO: 7610 - protein, 452 aa, synthetic construct
MKAAIYIRVSTREQVENYSIQAQTEKLTALCRSKDWDVYDIFIDGGYSGSNMNRPALNEMLSKLHEIDAVVVYRLDRLSRSQRDTITLIEEYFLKNNVEFVSLSETLDTSSPFGRAMIGILSVFAQLERETIRDRMVMGKIKRIEAGLPLTTAKGRTFGYDVIDTKLYINEEEAEQLRLIYDIFEEEQSITFLQKRLKKLGFKVRTYNRYNSWLTNDLYCGYVSYKDKVHVKGIHEPIISEEQFHRVQEIFTRMGKNPNTNRDSASLLNNLVVCSKCGLGFVHRRKDTKSRGKKYHYRYYSCKTYKHTHELEKCGNKIWRADKLEELIINRVNNYSLASRNVDKEDELDSLNEKLKIEHAKKKRLFDLYINGNYEVRELDSMMNDIDAQINHYESQIEAYEELKKNKKIQENLANLATMDYDSLEFRKKQLYLKSLINKIYIDGEQVTIEWL

SEQ ID NO: 7611 - protein, 452 aa, synthetic construct; identical to SEQ ID NO: 4997

SEQ ID NO: 7612 - protein, 452 aa, synthetic construct
MKAAIYIRVSTREQVENYSIQAQTEKLTALCRSKDWDVYDIFIDGGYSGSNMNRPALNEMLSKLHEIDAVVVYRLDRLSRSQRDTITLIEEYFLKNNVEFVSLSETLDTSSPFGRAMIGILSVFAQLERETIRDRMAMGKIKRIEAGLPLTTAKGRTFGYDVIDTKLYINEEEAKQLQLIYDIFEEEQSITFLQKRLKKLGLKVHTYNRYNNWLTNDLYCGYVSYKDKVHVKGIHEPIISEEQFYRVQEIFTRMGKNPNMNRDSASLLNNLVVCSKCGLSFVHRRKDAMGRDKKYHYRYYSCKTYKHIHELEKCGNKIWRADKLEELVINRVNSYSVASRNVDKEGELDSLNEKLKIEHAKRKRLFDLYINGSYEVSELDSMMNDIDAQINYYESQIEANEELKKNKKIQENLAYLATVDFDSLEFREKQLYLKSLINKIYIDGEQVTIEWL

SEQ ID NO: 7613 - protein, 452 aa, synthetic construct
MKAAIYIRVSTQEQVGNYSIQAQTEKLTALCRSKGWDVYDIFIDGGYSGSNMNRPALNEMLSKLHEIDAVVVYRLDRLSRSQRDTTTLIEEHFLKNNVEFVSLSETLDTSSPFGRAMIGILSVFAQLERETIRDRTVMGKIKRIEAGLPLTTAKGRTFGYDVIDTKLYINEGEAKQLQLIYDIFEEEQSITSLQKRLKKLGFKVRAYNRYSNWLTNDLYCGYVSYKDKVHVKGIHEPIISEEQFYRVQEIFTRMGKNPNMNRDSASLLNNLVVCSKCGLSFVHRSKDTMSGGKKYHYRYYSCKTYKHAHELEKCGNKTWRADKLEELIINRVNNYSFASRNMAKEDELDSLNEKLKIEHAKKKRLFDLYINGSYEMGELDNMMNDIDAQVNYYESQIEANEELRRNKKIQENLADLATVDFDSLEFREKQLYLKSLINKIYIDGEQVTIEWL

SEQ ID NO: 7614 - protein, 452 aa, synthetic construct
MKAAIYIRVSTQEQVGNYSIQAQTEKLTALCRSKDWDVYDIFIDGGYSGSNMNRPALNEMLSKLHEIDAVVVYRLDRLSRSQRDTTTLIEEYFLKNNVEFVSLSETLDTSSPFGRAMIGILSVFAQLERETIRDRMVMGKIKRIEAGLPLTTAKGRTFGYDVIDTKLYVNEEEAKQLRLIYDIFEEEQSITFLQKRLKKLGFKVRTYNRYNNWLTNDLYCGYVSYKDKVHVKGIHEPIISEEQFYRVQEIFTRMGKNPNMNRDSASLLSNLVVCSKCGLGFVHRSKDTMSRGKKYHYRYYSCKTYKHTHELEKCGNKTWRADKLEELIINRVNNYSFASRNVDKEVELDSLNEKLKIEHAKKKRLFDLYINGSYEVSELDSMMNDIDAQINHYESQIEANEELKKNKKIQENLADLATVDFDSLEFREKQLYLKSLINKIYIDGEQVTIEWL

SEQ ID NO: 7615 - protein, 452 aa, synthetic construct
MKAAIYIRVSTQEQVGNYSIQAQTEKLTALCRSKDWDVYDIFIDGGYSGSNMNRPALNEMLSKLHEIDAVVVYRLDRLSRSQRDTTTLIEEYFLKNNVEFVSLSETLDTSSPFGRAMIGILSVFAQLERETIRDRMVMGKIKRIEAGLPLTTAKGRTFGYDVIDTKLYINEEEAKQLRLIYDIFEEEQSITSLQKRLKKLGFKVRTYNRYSNWLTNDLYCGYVSYKDKVHVKGIHEPIISEEQFYRVQEIFTRMGKNPNMNRDSASLLNSLVVCSKCGLGFVHRSKDTMSHGKKYHYRYYSCKTYKHTHELEKCGNKTWRADKLEELIINRVNNYSLASRNVDKEDELDSLNGKLKIEHAKKKRLFDLYINGSYEVSELDSMMNDIDAQISYYESQIEANEELKKSKKIQENLADLATVDFDSLGFREKQLYLKSLINKIYIDGEQVTIEWL

SEQ ID NO: 7616 - protein, 485 aa, synthetic construct
MTRKVAIYTRVSTTNQAEEGFSIDEQIDRLTKYAEAMGWQVSDTYTDAGVSGAKLERPAMQRLINDIENKAFDTVLVYKLDRLSRSVRDTLYLVKDVFTKNEIDFISLNESIDTSSAMGSLFLTILSAINEFERENIKERMTMGKLGRAKSGKSMMWTKTAFGYYHNRKTGILEIVPLQATIVEQIFTDYLSGISLTKLRDKLNESGHIGKDIPWSYRTLRQTLDNPVYCGYIKFKDSLFEGMHKPIIPYETFLKVQKELEERQRQTYERNNNPRPFQAKYMLSGMARCGYCGAPLKIVLGHKRKDGSRTMKYHCANRFPRKTKGVTAYNDNKKCDSGTYVLSDLENAVIDNLIGFQENDDSLLKIIIGNNQPILDTSSFKKQISQIDKKIQKYSDLHLNDFITMDELKDRTDSLQAEKKLLEAKISENKFNDSTDVFELVKTQLGSTPINELSYDNKKKIVNNLVSKVDVTADNVDIIFKFQLV

SEQ ID NO: 7617 - protein, 452 aa, synthetic construct
MKAAIYIRVSTREQVENYSIQAQTERLTALCRSKDWDVYDIFIDGGYSGSNMNRPALNEMLSKLHEIDAVVVYRLDRLSRSQRDTITLIEEYFLKNNVEFVSLSETLDTSNPFGRAMIGILSVFAQLERETIRDRMVMGKIKRVEAGLPLTTAKGRTFGYDVIDTKLYINEEEAKQLQLIYDIFEEEQSITFLQKRLKKLGFKVRTYNRYNSWLTNDLYCGYVSYKDKVHVRGIHEPIISEEQFYRVQEIFTRMGKNPNMNRDSASLLNNLVVCSKCGLGFVHRRKDTMSRGKKYHYRYYSCKTYKHTHELEKCGNKIWRADILEELIINRVNNYSFASRNVDKEDELDSLNEKLKIEHAKKKRLFDLYINGSYEVSELDCMMNDIDAQINYYESQIEANEELKKDKKIQESLANLATVDYDSLEFREKQLYLKSLINKIYIDGEQVTIEWL

SEQ ID NO: 7618 - protein, 452 aa, synthetic construct
MKAAIYIRVSTREQVENYSIQAQTEKLTALCRSKDWDVYDIFIDGGYSGSNMNRPALIEMLSKLHEIDAVVVYRLDRLSRSQRDTITLIEEYFLKNNVEFVSLSETLDTSSPFGRAMIGILSVFAQLERETIRDRMVMGKIKRVEAGLPLTTAKGRTFGYDVVDTKLYINEEEARQLQLIYDIFEEEQSITFLQKRLKKLGYKVRTYNRYNNWLTNDLYCGYVSYKDKVHVKGIHEPIISEEQFYRVQEIFTRMGKNPNMNRDSASLLNNLVVCSKCGLGFVHRRKDTVSRGKKYHYRYYSCKTYKHSHELEKCGNKIWRADKLEELIINRVNNYSLASRNVDKEDELDSLSEKLKVEHAKKKRLFELYINGSYEMGELDSMMNDIDAQINYYESQIEANEGLRRNKKIQENLANLATVDFDSLEFREKQLYLKSLIDKIYIDGEQVTIEWL

SEQ ID NO: 7619 - protein, 452 aa, synthetic construct
MKAAIYIRVSTREQVENYSIQAQTEKLTALCRSKDWDVYDIFIDGGYSGSNMNRPALNEMLSKLHEIDAVVVYRLDRLSRSQRDTITMIEEYFLKNNVEFVSLSETLDTSSPFGRAMIGILSVFAQLERETIRDRMVMGKIKRIEAGLPLTTAKGRTFGYDVIDTKLYINEEEAKQLQLIYDIFEEEQSITFLQKRLKELGFKVRTYSRYNNWLTNDLYCGYVSYKDKVHVKGIHEPIISEEQFYRVQEIFTRMGKDPNMNRDSASLLNNLVVCSKCGLGFVHRRKDTTSRGKKYHYRYYSCKTYKHTYELEKCGNKIWRADKLEELIINRVNNYSLASRNVDKEDGLDSLNEKLKIEHAKKKRLFDLYINGSYEVSELDSVMNDIDAQISYYESQIEANEELKKNKKIQENLANLATVDYDSLEFREKQLYLKSLINKIYIDGEQVTIEWL

SEQ ID NO: 7620 - protein, 452 aa, synthetic construct
MKAAIYIRVSTREQVENYSIQAQTERLTALCRSKDWDVYDIFIDGGYSGSNMNRPALNEMLSRLHEIDAVVVYRLDRLSRSQRDTITLIEEYFLKNNVEFVSLSETLDTSSPFGRAMIGILSVFAQLERETIRDRMVMGKIKRVEAGLPLTTAKGRTFGYDVIDTKLYVNKEEAKHLQLIYDIFEEEQSITSLQKRLKKLGSKVHTYNRYNNWLTNDLYCGYVSYKDKVHVKGIHEPIISEEQFYRVQEIFTRMGKNPNMNRDSASLLNNLVVCSRCGLGFVHRRKDTTSRGKKYHYRYYSCKTYKHTHELEKCGNKIWRADKLEELIINRANNYSLASRNVDKEDELDSLSEKLKAEHAKRRRLFDLYINGSYEVSELDSMMNDIDAQINYYESQIEASEEQKKNKKIQENLADLATVDYDSLEFREKQLYLKSLINKIYIDGEQVTIEWL

SEQ ID NO: 7621 - protein, 485 aa, synthetic construct
MTKKVAIYTRVSTTNQAEEGFSIDEQVDRLTKYAEAMGWQVSDTYTDAGFSGAKLERPAMQRLINDIENKAFDTVLVYKLDRLSRSVRDTLYLVKEVFTKNKIDFISLNESIDTSSAMGSLFLTILSAINEFERENIKERMTMGKLGRAKSGKSMMWTKTAFGYYHNRKTGILEIVPLQATIVEQIFTDYLSGISLTKLRDKLNESGHIGKDIPWSYRTLRQTLDNPVYCGYIKFKDSLFEGMHKPIIPYETYLKVQKELEERQQQTYERNNNPRPFQAKYMLSGMARCGYCGAPLKIVLGRKRKDGSRTMKYHCVNRFPRKTKGVTVYNDNKKCDSGTYDLSNLENTVIDNLIGFQENNDSLLKIINGNNQPILDTSSLKRQISQIDKKIQKNSDLYLNDFITMDELKDRTDSLQAEKELLKARISENKFNDSTDVFELVKTQLGSIPINELSYDSKKKIVNNLVSKVDVTADNVDIIFKFQLA

SEQ ID NO: 7622 - protein, 485 aa, synthetic construct
MTKKVAIYTRVSTTNQAEEGFSIDEQIDRLTKYAEAMGWQVSGTYTDAGLSGAKLERPAMQRLINDIENKAFDAVLVYKLDRLSRSVRDTLYLVKDVFTKNKIDFISLNESIDTSSAMGSLFLTILSAINEFERENIKERMTMGKLGRAKSGKSMMWTKTAFGYYHNRKTGILEIVPLQATVVEQIFTDYLSGISLTKLRDKLNESGHIGKDIPWSYRTLRQTLDNPVYCGYIKFKDSLFEGMHKPIIPYETYLKVQKELEERQQQAFERNNNPRPFQAKYMLSGMARCGYCGAPLRIVLGRKRKDGSRTMKYHCANRFPRRTKGVTVYNDNKKCDSGAYDLSNLENTVIDNLMGFQENNDGLLKIINGNNQPILDTSSFKKQISQIDKKIQKNSDLYLNDFITMDELKDRTDSLQAEKRLLEAKISENKFNDSTDVFELVKTQLGSIPINELSYDNKKKIVNNLVSKVDVTADNVDIIFKFQLA

SEQ ID NO: 7623 - protein, 452 aa, synthetic construct
MKAAIYIRVSTREQVENYSIQAQTEKLTALCRSKDWDVYDIFIDGGYSGSNMNRPALNEMLSKLHEIDAVVVYRLDRLSRSQRDTITLIEEYFLKNNVEFVSLSETLDTSSPFGRAMIGILSVFAQLERETIRDRMVMGKIKRIEAGLPLTTAKGRTFGYDVIDTKLYINEEEAKQLQLIYDIFEEVQSITFLQKRLKKLGFKVRTYSCYNNWLTNDLYCGYVSYKDKVHVKGIHEPIISEEQFYRVQEIFTRMGKNPNMNRDSASLLNNLVVCSKCGLGFVHRRKDAVSRNKKYHYRYYSCKTYKHIHELEKCGNKIWRADKLEELIINRVNDYSLASRNVDKEDELDSLNEKLKIEHAKKKRLFDLYINGSYEVSELDSMMNDIDAQINYYESQIEANEELKKNKKIQENLAHLATVDFDSLEFREKQLYLKSLISKIYIDGEQVTIEWL

SEQ ID NO: 7624 - protein, 469 aa, synthetic construct
MSYTTPVRAAVYLRISEDRSGEQLGVARQREDCLKLCDQRKWVPVEYLDNDVSASTGRRRPAYEQMLADITAGKIAAVVAWDLDRLHRRPIELEAFMSLADEKRLALATVAGDVDLATPQGRLVARLKGSVAAHETEHKKARQRRAARQKAERGHPNWSKAFGYLPGPNGPEPDPRTAPLVKQAYADILAGASLGDVCRQWNGAGAFTVTGRPWTTTTLSKFLRKPRNAGLRAYKGARYGPVDRDAIVGKAQWSPLVDEATFWAAQAVLDAPGRAPGRKSVRRHLLTGLAGCGKCGNHLAGSYRTDGRVVYVCKACHGVAILADNIEPILYHIVAERLAMPDAVDLLRREIRDAAEAETIRLELETLNGELDRLAVERAEGLLTARQVKISTDIVNAKITKLQARQLDQERLRVFDGIPLGTPQVAGMIAELSPNRFRAVLDVLAEVVVQPVGKSGRIFNPERVQVNWR

SEQ ID NO: 7625 - protein, 485 aa, synthetic construct; identical to SEQ ID NO: 4575

SEQ ID NO: 7626 - protein, 485 aa, synthetic construct
MTKKVAIYTRVSTTNQAEEGFSIDEQIDRLTKYAEAMGWQVSDTYTDAGFSGAKLERPAMQRLINDIENKVFDTVLVYKLDRLSRSVRDTLYLVKDVFTKNKIDFISLNESIDTSSAMGSLFLTILSAINEFERENIKERMTMGKLGRAKSGKSMMWTKTAFGYYHNRKTGILEIVPLQATIVEQIFTDYLSGISLTKLRDKLNESGHIGKDIPWSYRTLRQTLDNPVYCGYIKFKDSLFEGMHKPIIPYETYLKVQKELEERQQQTYERNNNPRPFQAKYMLSGMARCGYCGAPLRIVLGHKRKDGSRTMKYHCANRSPRRTKGVTVYNDNKKCDSGTYDLSNLENTVIDNLIGLQGNNDSLLKIIDGNNQPILDTSSFKKQISQIDKKIQKNSDLYLNDFITMDELKDRTDSLQAEKKLLKAKISENKFNDSTDVFELVKTQLGSIPINELSYDNKKKIVNNLVSKVVVTADNVDIIFKFQLA

SEQ ID NO: 7627 - protein, 469 aa, synthetic construct
MSYTTPVRAAVYLRISEDRSGEQLGVARQREDCLKLCGQRKWVPVEYLDNDVSASTGKRRPAYEQMLADITAGKIAAVVAWDLDRLHRRPIELEAFMSLADEKRLALATVAGDVDLATPQGRLVARLKGSVAAHETEHKKARQRRAARQKAERGHPNWSKAFGYLPGPNGPEPDPRTAPLVKQAYADILAGASLGDVCRQWNAAGALTITGRPWATTTLSKFLRKPRNAGLRAYKGARYGPVDRDAIVGKAQWSPLVDEATFWAAQAVLDAPGRAPGRKSVRRHLLTGLAGCGKCGNHLAGSYRTDGKVVYVCKACHGVAILADNIEPILYRIVAERLAMPNAVDLLRREIHDAAEAEIIRLELKTLYGELDRLAVERAEGLLTARQVKVSTDIVSAKITKLQVRQQDQERLRVLEGIPLGTPQVAGMIAELSPDRFRAVLDVLAEVVVQPVGKGGRIFNPERVQVNWR

SEQ ID NO: 7628 - protein, 452 aa, synthetic construct
MKAAIYIRVSTREQVENYSIQAQTEKLTALCRSKDWDVYDIFIDGGYSGSNMNRPALNEMLSKLHEIDAVVVYRLDRLSRSQRDTITLIEEYFLKNNVEFVSLSETLDTSSPFGRAMIGILSVFAQLERETIRDRMVMGKIKRIEAGLPLTTAKGRTFGYDVIDTKLYINEEEAKQLQLIYDIFEEEQSITFLQKRLKKLGFKVRTYSCYNSWLTNDLYCGYVSYKDKVHVRGIHEPIISEEQFYRVQEIFTRMGKNPNMNRGSASLLNNLVVCGKCGLGFVHRRKDTTSRGRKYHYRYYSCKTYKHTHELEKCGNKIWRADKLEGLIINRVNNYSLASRNVDKEDELDSLNEKLKIEHAKKKRLFDLYINGSYEVGELDSMMNDIDAQINYYESQIEANEELKRNKKIQENLADLATVGFDSLEFREKQLYLKSLINKIYIDGEQVTIEWL

SEQ ID NO: 7629 - protein, 485 aa, synthetic construct
MTKKVAIYTRVSTANQAEEGFSIDEQIDRLTKYAEAMGWQVSDTYIDAGFSGAKLERPAMQRLINDIENKAFDTVLVYKLDRLSRSVRDTLYLVKDVFTKNKIDFISLNESIDTSSAMGSLFLTILSAINEFERENIKERMTMGKLGRAKSGKSMMWTKTAFGYYHNRKTGILEIVPLQAAIVEQIFTDYLSGISLTKLRDKLNESGHIGKDIPWSYRTLRQTLDNPVYCGYIKFKDSLFEGMHKPIIPYETYLRVQKELEERQQQTYERNNNPRPFQAKYMLSGMARCGYCGAPLRIVLGHKRKDGSRSMKYHCANRFPRKTKGVTVYNDNKKCDSGTYDLSNLENTVIDSLIGFQENSDSLLEIINGNNQPIPDTSSLKKQISQIDKKIQKNSNLYLNDFITMDELKDRTHNLRAEKKLLKAKISENKFNDSTDVFELVKAQLGSIPINELSYDNKKKIVNNLVSKVDVTADNVDIIFKFQLA

SEQ ID NO: 7630 - protein, 452 aa, synthetic construct
MKAAIYIRVSTREQVENFSIQAQTEKLTALCHSKDWDVYDIFIDGGYSGSNMNRPALNEMLSKLHEIDAVVVYRLDRLSRSQRDTITLVEEYFLKNNVEFVSLSETLDTSSPFGRAMIGILSVFAQLERETIRDRMVMGKIKRIEAGLPLTTAKGRTFGYDVIDTKLYINEEEAKQLQLIYDIFEEEQSITSLQKRLKKLGLKVRTYSCYNNWLTNDLYCGYVSYKDKVHVKGIHEPIISEEQFCRVQEIFARMGKNPNMNRDSASLLNNLVVCSKCGLGFVHRRKDTMSRGKKYHYRYYSCKTYKHTHELEKCGNKIWRADILEELIINRVNNYSFASRSVDKEDELNSLNEKLRIEHAKRKRLLDLYINGSYEVSELDSMMSDIDAQINYYESQIEANEELKKNKKIQENLANLATVDYDSLEFREKQLYLKSLINKIYIDGEQVTIEWL

SEQ ID NO: 7631 - protein, 452 aa, synthetic construct
MKAAIYIRVSTREQVENYSIQAQTEKLTALCRSKDWDVYDIFIDGGYSGSNMNRPALNEMLSKLHEIDAVVVYRLDRLSRSQRDTINLIEEYFLKNNVEFVSLSETLDTSSPFGRAMIGILSVFAQLERETIRDRMVMGKIKRIEAGLPLTTAKGRTFGYDVIDTKLYINEGEAKQLQLIYDIFEEEQSITLLQKRLKKLGFKVRTYSRYNNWLTNDLYCGYVSYKDKVHVKGIHEPIISEEQFYRVQEIFTRMGKNPNMNRESASLLNNLVVCSKCGLGFVHRRKDTMSRGKKYHYRYYSCKTYKHTHELEKCGNKIWRADKLEELIINRVNNYSSASRDVVKEDELDSLNEKLKIEHAKRRRLFDLYINGGYEVSELDSMMNDIDAQISYYESQIEANEELKKSKKIQENLAYLATVDFDSLEFREKQLYLKSLINKIYIDGEQVTIEWL

SEQ ID NO: 7632 - protein, 469 aa, synthetic construct
MSYTTPVRAAVYLRISEDRSGEQLGVARQREDCLKLCDQRKWVPVEYLDNDVSASTGKRRPAYEQMLADITAGKIAAVVAWDLDRLHRRPIELEAFMSLADEKRLALATVAGDVDLATPQGRLVARLKGSVAAHETEHKRARQRRAARQKAERGHPNWSKAFGYLPGPSGPEPDPRTAPLVKQAYADILAGASLGDVCRQWNDAGAFTITGRPWTTTALSKFLRKPRNAGLRAYKGARYGPVDRDAIVGKAQWSPLVDEATFWAAQAVLDAPGRAPGRKSVRRHLLTGLAGCGKCGNHLAGSYRTDGRVVYVCKACHGVAILADNIVPILYHIVAERLATPDAVDLLRREVHDAAEEETIRLELETLYGELDRLAVERAEGLLTARQVKISTDIVNAKITKLQARQLDQERLRVLDGIPLGTPQVAGMIAELSPDRFRAVLDVLAEVVVRPVGKGGRIFNPERVQVNWR

SEQ ID NO: 7633 - protein, 469 aa, synthetic construct
MCYTTPVRAAVYLRISEDRSGEQLGVARQREDCLKLCDQRKWEPVEYLDNDVSASTGKRRPAYEQMLADITAGKIAAVVAWDLDRLHRRPIELEAFMCLADEKRLALATVAGDVDLATPQGRLVARLKGSVAAHETEHKKARQRRAARQKAERGHPNWSKAFGYRPGPNGPEPDPRTAPLVKQAYADILAGASLGDVCRQWNNAGAFTITGRPWTTTTLSKFLRKPRNAGLRAYKGARYGPVDRDAIVGKAQWSPLVDEAAFWAAQAVLDAPGRAPGRKSVRRHLLTGLAGCGKCGNHLSGSYRTDGRVVYVCKACHGVAILADNIEPILYHIVAERLAKPDAVDLLRREIHDAAEAETIRLELETLYGELDRLAVERAEGLLTARQVKISTDIVNAKITKLQARQLDQERLRVLDGIPLGTPWVAGTIAELSPDRFRAVLDVLAEVVVQPVGKSGRIFNPERVQVNWR

SEQ ID NO: 7634 - protein, 452 aa, synthetic construct
MKAAIYIRVSTREQVENYSIQAQTEKLTALCRSKDWDVYDIFIDGGYSGSNMNRPALNEMLSKLHEIDAVVVYRLDRLSRSQRDTITLIEEYFLKNNVEFVSLSETLDTSSPFGRAMIGILSVFAQLERETIRDRMVMGKIKRIEAGLPLTTAKGRTFGYDVIDTKLYINEEEAKQLQLIYDIFEEEQSITFLQKRLKKLGFKVRTYNRYNNWLTNDLYCGYVSYKDKVHVKGIHEPIISEEQFNRVQEIFTRMGKNPNMNRDSASLLNNLVVCSKCGLGFVHRRKDAMSRDKKYHYRYYSCKTYKHIHELEKCGNKIWRADKLEELIINRVNNYSLASRNLVKEDELDSLNEKLKIEHAKKRRLFDLYINGSYEVSELDSMMKDIDAQINYYEGQIEANEELKKNKRIQENLANLATVDFDSLGFREKQLHLKNLINKIYIDGEQVTIEWL

SEQ ID NO: 7635 - protein, 452 aa, synthetic construct
MKAAIYIRVSTREQVENYSIQAQTEKLTALCRSKDWDVYDIFIDGGYSGSNMNRPALNEMLSKLREIDAVVVYRLDRLSRSQRDTITLIEEYFLKNNVEFVSLSETLDTSSPFGRAMIGILSVFAQLERETIRDRMVMGKIKRIEAGLPLTTAKGRTFGYDVIDTKLYINEEEAKQLQLIYDIFEEEQSITFLQKRLKKLGFKVRTYSSYNNWLTNDLYCGYVSYKDKVHVKGIHEPIISEEQFYRVQEIFTRMGKNPNMNRDSASLLNNLVVCSKCGLGFVHRRKDTTSRGKKYHYRYYSCKTYKHTHELEKCGNKIWRADKLEELIINRVNSYSVVSRNVDKEDELDSLSEKLKIEHAKKKRLFDLYINGSYEVSELDSMMNDIDAQISYYESQIEANEELEKNKKIQENLANLATVDYDSLEFREKRLYLKSLINKIYIDGEQVTIEWL

SEQ ID NO: 7636 - protein, 469 aa, synthetic construct
MSYTTLVRAAVYLRISEDRSGEQLGVARQREDCLKLCDQRKWVPVEYLDNDVSASTGKRRPAYEQMLADITAGKIAAVVAWDLDRLHRRPVELEAFMSLADEKRLALATVAGDVDLATPQGRLVARLKGCVAAHETEHKKARQRRAARQKAERGHPNWSKAFGYLPGPNGPEPDPRTAPLVKQAYADILAGASLGDVCRQWNDAGAFTITGRPWTTTTLSKFLRKPRNAGLRAYKGARYGPVDRDAIVGKAQWSPLVDEATFWAAQAVLDAPGRAPGRKSVRRHLLTGLAGCGKCGNHLAGSYRTDGQIVYVCKACHGVSILADNIEPILYHIVAERLAMPDAVDLLRREIHDAAEAETIRLELETLYGELDRLAVERAEGLLTARQVKISTDIVNAKITKLQARQLDQERLRVFDGIPLGTPQVAGVIAELSPDRFRAVLDVLAEVVVQPVSKSGRIFNPERVQVNWR

SEQ ID NO: 7637 - protein, 452 aa, synthetic construct
MKAAIYIRVSTQEQVGNYSIQAQTERLTALCRSKGWDVYDIFIDGGYSGSNMNRPALNEMLSKLHEIDAVVVYRLDRLSRSQRDTTTLIEEYFLKNNVEFVSLSETLDTSSPFGRAMIGILSVFAQLERETIRDRMVMGKIKRIEAGLPLTTAKGRTFGYDVIDTKLYINEEEAKQLQLIYDIFEEEQSITFLQKRLKKLGFKVRTYNRYNSWLTNDLYCGYVSYKDKVHVKGIHEPIISEEQFYRVQEIFTRMGKNPNMNRDSASLLNNLVVCSKCGLSFVHRSKDTMSRGKKYHYRYYSCKTYKHTHELEKCGNKTWRADKLEELIINRVNNYSFASRNVDKEDELDSLNEKLKIEHAKKRRLFDLYINGSYEVSELDSMMNDIDAQINYYESQIEANEELRKNKKIQENLADLAAVDFDSLELREKRLYLKSLISKIYIDGEQVTIEWL

SEQ ID NO: 7638 - protein, 452 aa, synthetic construct
MKAAIYIRVSTREQVENYSIQAQTEKLTALCRSKDWEVYDIFIDGGYSGSNMNRPALNEMLSKLHEIDAVVVYRLDRLSRSQRDTITLIEEYFLKNNVEFVSLSETLDTSSPFGRAMIGILSVFAQLERETIRDRMVMGKIKRIEAGLPLTTAKGRTFGYDVVDTKLYINEEEAKQLQLIYDIFEEEQSITFLQKRLKELGFKVRTYNRYNNWLTNDLYCGYVSYKDKVHVKGIHEPIISEEQFYRVQEIFTRMGKNPNMNRDSASLLNNLVVCSKCGLGFVHRRKDAMSRDKKYHYRYYSCKTYKHIHELEKCGNKIWRADKLEELIISRVNNYSSASRNADKEDELDSLNERLKIEHAKKKRLFELYVSGSYEVSELDSMMGDIDAQISYYESQIKANEELKKNKKIPENLANLATVDFDSLEFREKQLYLKSLINKIYIDGEQVTIEWL

SEQ ID NO: 7639 - protein, 452 aa, synthetic construct; identical to SEQ ID NO: 5322

SEQ ID NO: 7640 - protein, 485 aa, synthetic construct
MTKKVAIYTRVSTTNQAEEGFSIDEQVDRLTKYAEAMGWQVSDTYTDAGFSGAKLERPAMQRLINDIENKAFDTVLVYKLDRLSRSVRDTLHLVKDVFTKNKIDFISLNESIDTSSAMGSLFLTILSAINEFERENIKERMTMGKLGRAKSGKSMMWTKTAFGYYHNRKTGILEIVPLQATIVEQIFTDYLSGISLTKLRDKLNESGHIGKDIPWSYRTLRQTLDNPVYCGYIKFKDSLFEGMHKPIIPYETYLKVQKELEERQQQTYERNNNPRPFQAKYMLSGMARCGYCGTPLKIVLGHKRKDGSRTMKYHCANRFPRKTKGVTVYNDNKKCDSGTYDLSSLENTVIDNLIGFQENNDSLLKIINGNNQPILDTSSFEKQISQIDEKIQKNSDLYLNDFITMDELKDRTDSLQAEKKLLKAKISENKFNDSTDVFELVKTQLGSIPINELSYDNKKKIVNNLVSKVDVTAGNVDIIFKFQLA

SEQ ID NO: 7641 - protein, 452 aa, synthetic construct
MKAAIYIRVSTREQVENYSIQAQTEKLTALCRSKDWDVYDIFIDGGYSGSNMNRPALNEMLSKLHEIDAVVVYRLDRLSRSQRDTITLIEEYFLKNNVEFVSLSETLDTSSPFGRAMIGVLSVFAQLERETIRDRMVMGKIKRIEAGLPLTTAKGRTFGYDVIDTRLYINEEEAKQLQLIYDIFEEEQSITFLQKRLKKLGFKVHTYNRYNNWLTNDLYCGYVSYKDKVHVKGIHEPIISEEQFYRVQEIFTRMGKNPNMNRDSASLLNNLVVCSKCGLGFVHRRKDTMSRGKKYHYRYYSCKTYKHTHELEKCGNKIWRADKLEELIINRVNNYSFASRNVDKEDELGSLNEKLKIEHTKKKRLFDLYINGSYEVSELDSMMNDIDAQIRYYESQIEANEELKKNKKIQENLANLATVDYDSLEFREKQLYLKSLINKIYIDGEQVTIEWL

SEQ ID NO: 7642 - protein, 485 aa, synthetic construct
MTKKVAIYTRVSTTNQAEEGFSIDEQIDRLTKYAEAMGWQVSDTYTDAGFSGAKLERPAMQRLINDIENKAFDTVLVYKLDRLSRSVRDTLHLVKDVFTKNKIDFISLNESIDTSSAMGSLFLTILSAINEFERENIKERMTMGKLGRAKSGKSMMWTKTAFGYYHNHKTGILEIVPLQATIVEQIFTDYLSGISLTKLRDKLNESGHIGKDIPWSYRTLRQTLDNPVYCGYIKFKDSLFEGMHKPIIPYETYLKVQKELEERQQQTYERNNNPRPFQAKYMLSGTARCGYCGAPLRIVLGHKRKDGSRTMKYHCANRFPRKTKGVTVYNDNKKCDSGTYDLSNLENTVIDNLIGFQENNDSLLKIINGNNQPILDTSSFEKQISQIDKKIQKNSDLYLNDFITMDELKDRTGSLQAEKRLLKAKISENKFNDSTDVFELVKTQLGSIPINELSYDNKKKIVNNLVSKVDVTADNVDIIFKFQLA

SEQ ID NO: 7643 - protein, 485 aa, synthetic construct
MTKKVAIYTRVSTTNQAEEGFSIDEQTDRLTKYAEAMGWQVSDTYTDAGSSGAKLERPAMQRLINDIENKAFDTVLVYKLDRLSRSVRDTLYLVKDVFTKNKIDFISPSESIDTSSAMGSLFLTILSAINEFERENIKERMAMGKLGRAKSGKSMMWTKTAFGYYHNRKTGILEIVPLQATIVEQIFTDYLSGISLTKLRDKLNESGHIGKDIPWSYRTLRQTLDNPVYCGYIKFKDSLFEGKHKPIIPYETYLKVQKELEERQQQTYERNNNPRPFQAKYMLSGMARCGYCGAPLRIVLGHKRKDGSRTVKYHCANRFPRKTKGVTVYNDNKKCDSGTYDLSNLENTVIDNLIGFQENNDSLLKIIGGNNQPILDTSSFKRQISQIDKKIQKNSDLYLNDFITMDELKDRTDSLQAEKKLLEAKISENESNDSTDVFELVKAQLGSIPINELSYDNKKKVVNNLVSKVDVTADNVDIIFKFQLA

SEQ ID NO: 7644 - protein, 452 aa, synthetic construct
MKAAIYIRVSTREQVENYSIQAQTEKLTALCRSKDWDVYDIFIDGGYSGSNMNRPALNEMLSKLHEIDAVVVYRLDRLSRSQRDTITLIEEYFLKNNVEFVSLSETLDTSSPFGRAMIGILSVFAQLERETIRDRMVMGKIKRIEAGLPLTTAKGRTFGYDVIDTKLYINEEEAKQLQLIYDIFEEEQSITFLQKRLKKLGYKVHTYNRYSNWLTNDLYCGYVSYKDKVHVKGIHEPIISEEQFYRVQEIFTRMGKNPNMNCDSASLLNNLVVCSKCGLGFVHRRKDTTSRGKKYHYRYYSCKTYKHIHELEKCGNKIWRADKLEELIINRVNNYSFASRYADKEDELDSLNEKLKIEHAKKKRLFDLYINGSYEVSELDSMMNDIDAQINYYEGQIEANEELKKNKKIQESLANLATVDFGSLEFREKQLYLKSLINKIYIDGEQVTIEWL

SEQ ID NO: 7645 - protein, 452 aa, synthetic construct
MKAAIYIRVSTREQVENYSIQAQTEKLTALCRSKGWDVYDIFIDGGYSGSNMNRPALNEMLSILHEIDAVVVYRLDRLSRSQRDTITLIEEYFLKNNVEFVSLSETLDTSSPFGRAMIGILSVFAQLERETIRDRMVMGKIKRVEAGLPLTTAKGRTFGYDVIDTKLYINEEEAKQLQLIYDIFEEEQSITFLQRRLKKLGFKVRTYNCYNNWLTNDLYCGYVSYKDKVHVRGIHEPIISEEQFYRVQEIFTRMGKNPNMNRDSASLLSNLVVCSKCGLGFVHRRKDTTSRGKKYHYRYYSCKTYKHTHELEKCGNKIWRADELEELIISRVNNYSFASRNVDKEDELDSLNEKLKVEHAKKKRLFDLYINGSYEMSELDSMMNDIDAQINYYESRIEANEELKKNKKIQENLANLATVDYDSLGFREKQLYLKGLINKIYIDGEQVTIEWL

SEQ ID NO: 7646 - protein, 452 aa, synthetic construct
MKAAIYIRVSTREQVENYSIQAQTEKLTALCRSKDWDVYDIFIDGGYGGSNMNRPALNEMLSKLHEIDAVVVYRLDRLSRSQRDTITLIEEYFLKNDVEFVSLSETLDTSSPFGRAMIGILSVFAQLERETIRDRMVMGKIKRIEAGLPLTTAKGRTFGYDVIDTKLYINEEEAKQLQLIYDIFEEEQSITFLQKRLKKLGFKVRTYSCYNNWLTNDLYCGYVSYKDKVHVKGIHEPIISEEQFYRVQEIFTRTGKNPIMNRGSASLLNNLVVCSKCGLGFVHRRKDTMSRGKKYHYRYYSCKTYKHPHELEKCGNKIWRADKLEELIINRVNNYSFASRSVDKEDELDSLNEKLKIEHAKKRRLFDLYINGSYEVSELDSMMNDIDAQIDYYESQIEVNEELKKNKKIQENLANLATVNFDSLEFREKQLYLKSLINKIYIDGEQVTIEWL

SEQ ID NO: 7647 - protein, 452 aa, synthetic construct
MKAAIYIRVSTREQVENYSIQAQTEKLTALCRSKDWDVYDIFIDGGYSGSNMNRPALNEMLSKLHEIDAVVVYRLDRLSRSQRDTITLIEEYFLKNNVEFVSLSETLDTSSPFGRAMIGILSVFAQLERETIRDRMVMGKIKRVEAGLPLTTAKGRTFGYDVIDTKLYINEEEAKQLQLIYDIFEEEQSITLLQKRLKKLGFKVRTYNRYSNWLTNDLYCGYVSYKDRVHVKGIHEPIISEEQFYRVQEIFTRMGKNPNMNRDSASLLNGLVVCSKCGLGFVHRRKDTTRRGKKYHYRYYSCKTYKHIHELEKCGNKIWRADKLEELIINRVNNYSFASRNVDKEEELNSLNEKLKIEHAKKKRLFDLYINGSYEVSELGSIMNDIDAQINYYESQIEANEELKKNKKIQEDLADLATMDFDSLEFREKQLYLKSLINKIYIDGEQVTIEWL

SEQ ID NO: 7648 - protein, 452 aa, synthetic construct
MKAAIYIRVSTREQVENYSIQAQTEKLTALCRSKDWDVYDIFIDGGYSGGNMNRPALNEMLSKLHEIDAVVVYRLDRLSRSQRDTITLIEEYFLKNNVEFVSLSETLDTSSPFGRAMIGILSVFAQLERETIRDRMVMGKIKRIEAGLPLTTAKGRTFGYDVIDTKLYINEEEAKQLRLIYDIFEEEQSITFLQKRLKKLGFKVRAYNCYNNWLTNDLYCGYVSYKDKVHVKGIHEPIISEEQFYRVQEIFTRMGKNPNMNRDSASLLNNLVVCGKCGLGFVHRRKDATSRDKKYHYRYYSCKTYKHIHELEKCGNKIWRADKLEELVINRVNNYSLACRDVDKEGELDSLNEKLKIEHAKKKRLFDLYINGSYEVSELDSMMNDIDAQINYYESQIEASGELKRIKKIQENLADLATVDFDSLEFREKQLYLKSLINKIYIDGEQVTIDWL

SEQ ID NO: 7649 - protein, 452 aa, synthetic construct
MKAAIYIRVSTREQVENYSIQAQTEKLTALCRSKDWDVYDIFIDGGYSGSNMNRPALNEMLSKLHEIDAVVVYRLDRLSRSQRDTITLIEEYFLKNNVEFVSLSETLDTSSPFGRAMIGILSVFAQLERETIRDRMVMGKIKRIEAGLPLTTAKGRTFGYDVIDTRLYINEEEAKQLQLIYDIFEEVQSITFLQKRLKKLGFKVHTYNRYNNWLTNDLYCGYVSYKDKVHVKGIHEPIISEEQFYRVQEIFTRMGKNPNVNRDSASLLNNLVVCSKCGLGFVHRRKDTVSRGRKYHYRYYSCKTYKHIHELEKCGNKIWRADKLEELVINRVNNYSFASRNVDKEGELDSLNEKLKIEHARKKRLFDLYINGSYNVSELDSMMNDIDAQINHYESQIGANEELKKNKKIQENLADLATVDFDCLEFRVKQLYLKSLINKIYIDGEQVTIEWL

SEQ ID NO: 7650 - protein, 452 aa, synthetic construct
MKAAIYIRVSTQEQVGNYSIQAQTEKLTALCRSKDWDVYDIFIDGGYSGSNMNRPALNEMLSKLHEIDAVVVYRLDRLSRSQRDTTTLIEEYFLKNNVEFVSLSETLDTSSPFGRAMIGILSVFAQLERETIRDRMVMGKIKRIEAGLPLTTAKGRTFGYDVIDTRLYINEEEAKQLRLIYDIFEEEQSITFLQKRLKKLGFRVRTYSRYNNWLTNDLYCGYVSYKDKVHVKGIHEPIISEEQFYRVQEIFTRMGKSPNMNRDSASLLSNLVVCSKCGLGFVHRSKDTMSRGKKYHYRYYSCKTYKLTHELEKCGNKTWRADKLEELIINHVNNYGLAGRNVDKEDELDSLNEKLKVEHAKKKRLFDLYINGSYEVSELESMMNDIDAQINYYESQIEANEELKKDKKIQGNLADLATVDFDSLEFREKQLYLKSLISKIYIDGEQVTIEWL

SEQ ID NO: 7651 - protein, 452 aa, synthetic construct; identical to SEQ ID NO: 501

SEQ ID NO: 7652 - protein, 469 aa, synthetic construct
MCYTTPVRAAVYLRISEDRSGEQLGVARQREDCLKLCGQRKWVPVEYLDNDVSASTGKRRPAYEQMLADITAGKIAAVVAWDLDRLHRRPIELEAFMCLADEKRLALATVAGDVDLATPQGRLVARLKGSVAAHETEHKKARQRRAARQKAERGHPNWSKAFGYLPGPNGPEPDPRTAPLVKQAYADILAGASLGDVCRRWNDAGAFTITGRPWTSTTLSKFLRKPRNAGLRAYKGARYGPVDRDAIVGKAQWSPLVDEATFWAAQAVLDAPGRAPGRKSVRRHLLTGLAGCGKCGNHLAGSYRTDGRVAYVCKACHGVAILADNIEPILYHIVAERLAMPDAVDLLRREVHDAAEAEAIHLELETLYSELDRLAVERAEGLLTARQVKISTDIVNAKITKLQARRLDQERLRVFDGIPLGTPQVAGMIAELSPDRFRAVLDVLAEVVVQPVGKSGRIFNPERVQVNWR

SEQ ID NO: 7653 - protein, 452 aa, synthetic construct
MKAAIYIRVSTREQVENYSIQAQTEKLTALCRSKDWDVYDIFIDGGYSGSNMNRPALNEMLSKLHEIDAVVVYRLDRLSRSQRDTITLIEEYFLKNNVEFVSLSETLDTSSPFGRAMIGILSVFAQLERETIRDRMVMGKIKRIEAGLPLTTAKGRTFGYDVIDTKLYINEGEAKQLQLIYDIFEEEQSITSLQKRLKELGFKVRTYNRYSNWLTNDLYCGYVRYKDKVHVKGIHEPIISEEQFYRVQEIFTRMGKNPNMNRGSASLLNNLVVCSKCGLGFVHRRKDAMSRDKKYHYRYYSCKTYKHIHELEKCGNKIWRADKLEELIINRVNNYSLASRNVDKEGELDSLNEKLKIEHAKKKRLFDLYINGRYEVSELDSMMNDIDAQINYYESQIEANEELKKNKQIQENLANLATVDFDSLEFREKQRYLKSLINKIYIDGEQVTIEWL

SEQ ID NO: 7654 - protein, 452 aa, synthetic construct; identical to SEQ ID NO: 3005

SEQ ID NO: 7655 - protein, 452 aa, synthetic construct
MKAAIYIRVSTREQVENYSIQAQTEKLTALCRSKDWDVYDIFIDGGYSGSNMNRPALNEMLSKLHEIDAVVVYRLDRLSRSQRDTVTLIEEYFLKNNVEFVSLSETLDTSSPFGRAMIGILSVFAQLERETIRDRMVMGKIKRIEAGLPLTTAKGRTFGYDVIDTKLYINEEEAKQLQLTYDIFEEVQSITFLQKRLKKLGFKVRTYSRYNNWLTNDLYCGYVSYKDKVHVKGIHEPIISEEQFYRVQEIFTRMGKNPNMNRDSASLLNNLVVCSKCGLGFVHRRKDTTSRGKKYHYRYYSCKTYKHAHELEKCGNKIWRADKLEALIINRVNNYSFASRNVDKEDELDSLNEKLKIEHAKKKRLFDLYINGSYEVSELDCMMNDIDAQINYYESQIEANEELKKDKKIQESLANLATVDYDSLEFREKQLYLKSLINKIYIDGEQVTIEWL

SEQ ID NO: 7656 - protein, 485 aa, synthetic construct
MTKKVAIYTRVSTTNQAEEGFSIDEQVDRLTKYAEAMGWQVSDTYTDAGFSGAKLERPAMQRLINDIENKAFDTVLVYKLDRLSRSVRDTLYLVKHVFTKNKIDFISLNESINTSSAMGSLFLTILSAINEFERENIKERMTMGKLGRAKSGKSMMWTKTAFGYYHNRKTGILETVPLQATIVEQIFTDYLSGTSLTKLRDKLNESGHIGKDIPWSYRTLRQTLDNPVYCGYIKFKDSLFEGMHKPIIPYETYLKVQKELEVRQQQTYERNNNPRPFQAKYMLSGMARCGYCGAPLRIVLGHKRKDGSRTMKYHCANRFPRKTKGVTVYNDNKKCDSGTYDLSNLEDTVINHLIGFQEDNDSLLKIINGNNQPILDTSSFEKQISQIDKKIQKNSDLYLNDFITMDELQARTDSLQAEKKLLKAKISENKFNDSTDVFELVKTQLGSIPINELSYDNKKKIVNNLVSKVDVTADNVDIIFKFQLA

SEQ ID NO: 7657 - protein, 469 aa, synthetic construct
MCYTTPVRAAVYLRISEDRSGEQLGVARQREDCLKLCDQRKWVPVEYLDNDVSASTGKRRPAYEQMLADITAGKIAAVVAWDLDRLHRRPIELEAFMSLADEKRLALATVAGDVDLATPQGRLVARLKGSVAAHETEHKKVRQRRAARQKAERGYPNWSKAFGYLPGPIGPEPDPRTAPLVKQAYADILAGASLGDVCRQWNDAGAFTITGRPWTTTTLSKFLRKPRNAGLRAYKGARYGPVDRDAIVGKAQWSPLVDEATFWAAQAVLDAPGRAPGRKSVRRHLLTGLAGCGKCGNHLAGSYRTDGKVVYVCKACHGVSILADNIEPILYHIVAERLAMPEAVDLLRREIHDAAEAEAIRLELAALYGELDRLAVERAEGLLTARQVKISTDIVNAKIAKLQARQLDQERLRVFGGIPLGTPQVAAMIAELSPDRFRAVLDVLAVVVVQPVGKSGRIFNPERVQVSWR

SEQ ID NO: 7658 - protein, 485 aa, synthetic construct
MTKKVAVYTRVSTTNQAEEGFSIDEQVDRLTKYAEAMGWQVSDTYTDAGCSGAKLERPAMQRLINDIENKTFDTVLVYKLDRLSRSVRDTLYLVKDVFTKNKIDFISLNESIDTSSAMGSLFLTILSAINEFERENIKERMTMGKLGRAKSGKSMMWTKTAFGYYHNRKTGILEIAPLQATIVEQIFTDYLSGISLTKLRDKLNESGHIGKDIPWSYRTLRQTLDNPVYCGYIKFKDSLFEGMHKPIIPYETYLKVQKGLEERQQQTYKRNNNPRPFQAKYMLSGMARCGYCGAPLKIVLGHKRKDGSRTMKYHCANRFPRKTKGVTVYNDNKKCDSGTYDLSNLENTVIDSLIGFQENSDSLLKIINGNNQPIPDTSSFKKQISQIDKKIQKNSDLYLNDFITMDELRVRTDSLQAEKKLLKAKISENKFNDSTDVFELVKTQLGSIPINELSYDNKKKIVNNLVSKVDVTADDVDIIFKFQLA

SEQ ID NO: 7659 - protein, 469 aa, synthetic construct
MSHITPVRAAVYLRISEDRSGEQLGVARQREDCLKLCDQRKWVPVEYLDNDVSASTGKRRPAYEQMLADITAGKIAAVVAWDLDRLHRRPVELEAFMSLADERRLALATVAGDVDLATPQGRLVARLKGIVAAHETEHKKARQRRAARQKAERGHPNWSKAFGYLPGPNGPEPDPRTAPLVRRAYADILAGASLGDVCRQWNDAGAFTITGRLWTTTTLSKFLRKPRNAGLRAYKGARYGPVDRGAIVGKAQWSPLVDEATFWAAQAVLDAPGRAPGRKSVRRHLLTGLAGCGKCGNHLAGSYRTDGRVVYVCKTCHGVSILAVNIEPILYHIVAERLAMPDAVDLLRREIHDAAEAETIRLELETLYGELDRLAVERAEGLLTARQVKISTDIVNAKIAKLQARQLDQGRLRVLDGIPLGTPQVAGVIAGLGPDRFRAVLDVLAEVVVQPVSKGGRIFNPERVQVNWR

SEQ ID NO: 7660 - protein, 469 aa, synthetic construct
MSYTTPVRAAVYLRISEDRSGEQLGVARQREDCLKLCDQRKWVPVEYLDNDVSASTGKRRPAYEQMLADITAGKIAAVVTWDLDRLHRRPIELEAFMSLADEKRLALATVAGDVDLATPQGRLVARLKGSVAAHETEHKKARQRRAARQKAERGYPNWSKAFGYLPGPNGPEPDPRTAPLVKQAYADILAGASLGDVCRQWNAAGAFTITGRPWTTTTLSKFLRKPRNAGLRAYKGARYGPVDRDAIVGKAQWGPLVDEATFWAAQAVLDAPGRAPGRKSVRRHLLTGLAGCGKCGNHLAGSYRTDGRVVYVCKTCHGVAILADNIEPILYHIVAERLAMPDAVDLLRRETHDAAEAETIRLELETLYGELDRLAVERAEGLLTARQVKISTDIVSAKITKLQARQLDQERLRVFDGIPLGTPQVAGMIAELSPDRFRAVLDVLAEVVVQPVGKSGRIFNPERVQVNWR

SEQ ID NO: 7661 - protein, 485 aa, synthetic construct
MTKKVAIYTRVSTTNQAEEGFSIDEQIDCLTKYAEAMGWQVSDTYTDAGFSGAKLERPAMQRLVSDIENKAFDTVLVYKLDRLSRSVRDTLYLVKDVFTRNKIDFISLNESINTSSAMGSLFLTILSAINEFERENIKERMTMGKLGRAKSGKSMMWTKTAFGYYHNRKTGILEIVPLQATIVEQIFTDYLSGISLTKLRDKLNESGHIGKDIPWSYRTLRQTLDNPVYCGYIKFKGSLFEGMHKPIIPYETYLKAQKELEERQQQTYERNNNPRPFQAKYMLSGMARCGYCGAPLRIVLGHKRKDGSRTMKYHCANRFPRKTKGVTVYNDNKKCDSGTYDLSNLENTVIDNLIGFQENSDSLLKIINGNNQPILDTSSFKKQISQIDKKIQKNSDLYLNDFITMDELKDRTDSLLAEKKLLKAKISENKFNDSTDVFELVKTQLGSIPINELSYDNKKKIVNNLVSKVDVTADNVDIIFKFQLA

SEQ ID NO: 7662 - protein, 452 aa, synthetic construct
MKAAIYIRVSTQEQVGNYSIQAQTEKLTALCRSKGWDVYDIFIDGGYSGSNMNRPALNEMLSKLHEIDAVVVYRLDRLSRSQRDTTTLIEEYFLKNNVEFVSLSETLDTSSPFGRAMIGILSVFAQLERETIRDRMVMGKIKRIEAGLPLTTAKGRTFGYDVIDTKLYINEEEAKQLQLIYDIFEEEQSITSLQKRLKKLGFKVRTYNRYNNWLTNDLYCGYVSYKDKVHVKGIHEPIISEEQFYRVQEIFTRMGKNPNMNRDSASLLSNLVVCSKCGLGFVHRSKDTMSRGKKYHYRYYSCKTYKHTHELEKCGNKTWRADRLEELIINRVNNYSFASRNVDREGELDGLNEKLKIEHAKKKRLFDLYINGSYEVSELDSMMNDIDAQINYYESQIEAKEELSKNKKIQENLADLATVDFDSLEFREKQLYLKSLINKIYIDGEQVTIEWL

SEQ ID NO: 7663 - protein, 485 aa, synthetic construct
MTRKVAIYTRVSTTNQAEEGFSIDEQIDRLTKYVEAMGWQVSDTYTDAGFSGAKLERPAMQRLINDIESKAFDTVLVYKLDRLSRSVRDTLYLVKDVFTKNKIDFISLNESINTSSAMGSLFLTILSAINEFERENIKERMTMGKLGRAKSGKSMMWTKTAFGYNHNRKTGILEIVPLQATIVEQIFTDYLSGISLTKLRDKLNESGHIGKDIPWSYRTLRQTLDNPVYCGYIKFKDSLFEGMHKPIIPYETYLKVQKELGERQQQTYERNNNPRPFQAKYMLSGMARCGYCGAPLRIVLGHRRKDGSRTMKYHCANRFPRKTKGVTVYNDNKKCDSGTYDLSTLENIVIDNLIGFQENNDSLLKIINGNNQPILDTSSFKKQISQIDKKIQKNSDLYLNDLITMDELKDRTDSLQAEKKLLKAKISENKFNDSTGVFELVITQLGSVPINELSYDNKKKIVNNLVSKVDVTADNVDIIFKFQLA

SEQ ID NO: 7664 - protein, 469 aa, synthetic construct
MSYTTPVRAAVYLRISEDRSGEQLGVARQREDCLKLCDQRKWVPVEYLDNDVSASTGKRRPAYEQMLADITAGKIAAVVAWDLDRLHRRPIELEAFMSLADEKRLALATVAGDVDLATPQGRLVARLKGSVAAHETEHKKARQRRAARQKAERGHPNWSKAFGYLTGPNGPEPDPRTAPLVKQAYADILAGASLGDVCRQWNDAGAFTITGRPWTTTTLSKFLRKPRNAGLRAYKGARYGPVDRDAIVGKAQWSPLVDEATFWAAQAVLDAPGRAPGRKSVRRHLLTGLAGCGKCGNHLAGSYRTDGRVVYVCKACHGVAILADNIEPILYHIVAERLAMPDAVDLLRREIHDAAEAETIRLELETLYGELDRLAVERAEGLLTARQVKISTDIVSAKITKLQACQLDQERLRVLDGIPLGTPQVAGMIAELSPDRFRAVLDVLAKVVVQPVGKSSRIFNPERVQVDWR

SEQ ID NO: 7665 - protein, 485 aa, synthetic construct
MTKKVAIYTRVSTTSQAEEGFSIDEQVDRLTKYAEAMGWQVSDTYTDAGFSGAKLGRPAMQRLINDIGNKAFDTVLVYKLDRLSRSVRDTLYLVKDVLTKNKIDFISLSESIDTSSAMGSLFLTILSAINEFERENIKERMTMGKLGRAKSGKSMMWTKTAFGYYHNRKTGILEIVPLQATIVEQIFTDYLSGISLTKLRDKLNESGHIGKDIPWSYRTLRQTLDNPVYCGYIKFKDSLFEGMHKPIIPYETYLKVQKELEERQQQTYERNNNPRPFQAKYMLSGMARCGYCGAPLRIVLGRKRKDGSRTMKYHCANRFPRKTKGTTVYNDNKKCDSGTYDVSDLENTVIDNLIGFQENSDSLLKIISGDNQPILDTSSFKIQISQIDKKIQKNSDLYLNDFITMDELKDRTDSLQAEKKLLKAKISENKFNDSTDVFELVKTQLGSIPINELSYDNKKKIVNNLVSKVDVTADNVDIIFKFQLA

SEQ ID NO: 7666 - protein, 452 aa, synthetic construct
MKAAIYIRVSTREQVENYSIQAQTEKLTALCRSKGWDVYDIFIDGGYSGSNMNRPALNEMLSKLHEIDAVVVYRLDRLSRSQRDTITLIEEYFLKNNVEFVSLSETLDTSSPFGRAMIGILSVFAQLERETIRDRMVMGKIKRIEAGLPLTTAKGRTFGYDVIDTKLYINEEEAKQLQLIYDIFEEEQSITFLQKRLKELGFKVRTYNRYNNWLTNDLYCGYVSYKDKVHVKGIHEPIISEEQFYRVQEIFARMGKNPNMNRDSASLLNNLVVCSKCGLGFVHRRKDTMSRDKKYHYRYYSCKTYKHIHELEKCGNKVWRADKLEELIINRVNNYSLASRNVDKEGELDSLNEKLKIEHAKKKRLFDLYINGRYEVSELDSMMNDIDAQINYYEGQIEANEELKKNKQIQENLANLATVDFDSLEFREKQRYLKSLINKIYIDGEQVTIEWL

SEQ ID NO: 7667 - protein, 485 aa, synthetic construct; identical to SEQ ID NO: 2805

SEQ ID NO: 7668 - protein, 452 aa, synthetic construct
MKAAIYIRVSTREQVENYSIQAQTEKLTALCRSKGWDVYDIFIDGGYSGSNTNRPALNEMLGKLHEIDAVVVYRLDRLSRSQRDTITLIEEYFLENNVEFVSLSETLDTSSPFGRAMIGILSVFAQLERETIRDRMVMGKIKRIEAGLPLTTAKGRTFGYDVIDTKLYINEEEAKQLQLIYDIFEEEQSITFLQKRLKKLGFKVRTYSCYNNWLTNDLYCGYVSYKDKVHVKGVHEPIISEEQFYRVQEIFTRMGKNPNMNRDSASLLNNLVVCSKCGLGFVHRRKDAMSRDKKYHYRYYSCKTYKHIHELEKCGNKIWRADKLEELVINRVNDYSLANRNVDKEDELDSLDEKLKIEHAKKKRLFDLYINGSYEVSELDSMMNDIDARINYYESQIEANEELKKNEKIQENLAHLATVDFDSLEFREKQLYLKSLINKIYIDGEQVTIEWL

SEQ ID NO: 7669 - protein, 452 aa, synthetic construct
MKAAIYIRVSTREQVENYSIQAQTEKLTALCRSKGWDVYDIFIDGGYSGSNMNRPALNEMLSKLHEIDAVVVYRLDRLSRSQRDTVTLIEEYFLKNNVEFVSLSETLDTSSPFGRAMIGILSVFAQLERETIRDRMVMGKIKRIEAGLPLTTAKGRTFGYDVVDTKLYINEEEAKQLQLIYDIFEEEQSITLLQKRLKKLGFKVHTYNRYNSWLTNDLYCGYVSYKDKVHVKGIHEPIISEEQFYRVQEIFTRMGKNPNMNRDSASLLNNLVVCSKCGLGFVHRRKDTKSRGKKYHYRYYSCKTYKHTHELEKCGNKIWRADKLEELIINRVNNYSFANRNADKEDELDSLNEKLKIEHAKKKRLFDLYINGSYNVSELDSMMSDIDAQINYYESQIEANGELKKNKKIQENLADLATVDFDSLEFREKQLYLKSLINKVYIDGEQVTIEWL

SEQ ID NO: 7670 - protein, 485 aa, synthetic construct
MTKKVAIYTRVSTTNQAEEGFSIDEQIDRLTKYAEAMGWQVSDTYTDAGLSGAKLERPAMQRLINDIENKAFDTVLVYKLDRLSRSVRDTLYLVKDVFTKNKIDFISLNESIDTSSAMGSLFLTILSAINEFERENIKERMTMGKLGRAKSGKSMMWTKTAFGYYHNRKTGILEVVPLQATIVEQIFTDYLSGISLTKLRDKLNESGHIGKDIPWSYRTLRQTLDNPVYCGYIKFKGSLFEGMHKPIIPYETYLKVQKELEERQQQTYERNNNPRPFQAKYMLSGMARCGYCGAPLRIVLGHKRKDGSRTMKYHCTNRFPRKTKGITVYNDNKKCDSGTYDLSNLENTVIDNLIGFQENNDSLLKIINGNNQPILDTSSFKKQISQIDKKIQKNSDLYLNDFITMDELKDRTDSLQAEKKLLRAKISENKFNDSTDVFELVKTQLGSIPINELSYDDKKKIVNNLVSKVDVTADNVDIIFKFQLA

SEQ ID NO: 7671 - protein, 452 aa, synthetic construct; identical to SEQ ID NO: 6819

SEQ ID NO: 7672 - protein, 485 aa, synthetic construct
MTKKVAIYTRVSTTNQAEEGFSIDEQIDRLTKYAEVMGWQVSDTYTDAGFSGAKLGRPAMQRLINDIESKAFDTVLVYKLDRLSRSVRDTLYLVKDVFAKNKIDFISLNESINTSSAMGSLFLTILSAINEFERENIKERMTMGKLGRAKSGKSMMWTKTAFGYYHNRKTGILEIMPLQATIVEQIFTDYLSGISLTKLRDKLNESGHIGKDIPWSHRTLRQTLDNPVYCGYIKFKGSLFEGMHKPIIPYETYLKVQKELEERQQQTYERNNSPRPFQAKYMLSGMARCGYCGAPLRIVLGHKRKDGSRTMRYHCANRFPRKTKGITVYNDNKKCDSGTYDLSNLENTVIDNLIGFQENNDSLLKIINGNDQPILDTSSFEEQISQIDKKIQKNSDLYLNDFITMDELKARTDSLQAEKKLLKAKISESKLNDSTDVFELVKTQLGSIPINELSYDNKKKIVNNLVSKVDVTADNVDIIFKFQLA

SEQ ID NO: 7673 - protein, 452 aa, synthetic construct
MKAAIYIRVSTREQVENYSIQAQTEKLTALCRSKDWDVYDIFIDGGYSGSNMNRPALNEMLSKLHEIDAVVVYRLDRLSRSQRDTITLIEGYFLKNNVEFVSLSETLDTSSPFGRAMIGILSVFAQLERETIRDRMVMGKIKRIEAGLPLTTAKGRTFGYDVIDTKLYINEEEAKQLQLIYDIFEEEQSITFLQKRLKKLGFRVRTYNCYNNWLTNDLYCGYVSYKDKVHVKGIHEPIISEEQFYRVQEIFTRMGKNPNMNRDSASLLNNLVVCSKCGLGFVHRRKDATSRDKKYHYRYYSCKTYKHIHELEKCGNKIWRADKLEELIINRVNDYSLASRNVDKEDELDSLNEKLKIEHAKKKRLFDLYINGSYEVSELDSMMNDIDAQINYYESQIEVNEGLKRNKKIQENLAELATVDFDSLEFREKQLYLKSLINKIYIDGEQVTIEWL

SEQ ID NO: 7674 - protein, 469 aa, synthetic construct; identical to SEQ ID NO: 2132

SEQ ID NO: 7675 - protein, 485 aa, synthetic construct
MTRKVAIYTRVSTTNQAEEGFSIDEQIDRLTKYAEAMGWQVSDTYTDAGLSGAKLERPAMQRLINDIENKAFDTVLVYKLDRLSRSVRDTLYLVKDVFTKNKIDFISLNESIDTSSAMGSLFLTILSAINEFERENIKERMTMGKLGRAKSGKSMMWTKTAFGYYHNRKTGILEIVPQQATIVEQIFTDYLSGISLTKLRDKLNESGHIGKDIPWSYRTLRQTLDNPVYCGYIRFKDSLFEGMHKPIIPYETYLKVQKELEERQQQTYERINNPRPFQAKYMLSGMARCGYCGAPLRIVLGHKRKDGSRTMKYHCASRFPRKTKGVTVYNGNKKCDSGTYDLSKLECTVIDSLIGFQENNDSLLKIINGNNQPILDTGSFEKQISQIDKKIQKNSDLYLNDFITMDELKDRTDSLRAEKRLLKAKISKNKFNDRTDVFELVKTQLGSIPINELSYDNKKKIVNNLVSKVDVTADNVDIIFKFQLA

SEQ ID NO: 7676 - protein, 452 aa, synthetic construct
MKAAIYIRVSTQEQVENYSIQAQTEKLTALCRSKDWDVYGIFIDGGYSGSNMNRPALNEMLSKLHEIDAVVVYRLDRLSRSQRDTITLIEEYFLKNNVEFMSLSETLDTSSPFGRAMIGILSVFAQLERETIRDRMVMGKIKRIEAGLPLTTAKGRTFGYDVIDTKLYINEEEAKQLQLIYDIFEEEQSITFLQKRLKKLGFKVRTYSCYNSWLTNDLYCGYVSYKDKVHVKGVHEPIISEEQFHRVQEIFTRMGKNPNMNRDSASLLSNLVVCSKCGLGFVHRRKDTMSRGKKYHYRYYSCKTYKHTHELERCGNKIWRADKLEELIINRVNNYSFASRNAGKEDELDSLNEKLKIEHAKKKRLLDLYINGSYEVSELDGMMSDIDAQITYYESQIEANEELKRSKKIQENLANLAIVDYDSLEFREKQLYLKSLINKIYIDGEQVSIEWL

SEQ ID NO: 7677 - protein, 485 aa, synthetic construct
MTKKVAIYTRVSTTNQAEEGFSIDEQVDRLTKYAEAMGWQVSDTYTDAGFSGAKLERPAMQRLINDIENKAFDTVLVYKLDRLSRSVRDTLHLVKDVFTKNRIDFISLNESIDTSSAMGSLFLTILSAINEFERENIKERMTMGKLGRAKSGKSMMWTKTAFGYNHNRKTGILEIVPLQAAIVEQIFTDYLSGISLTKLRDKLNESGHIGKDIPWSYRTLRQTLDNPVYCGYIKFKDSLFEGMHEPIIPYETYLKVQKELEERQQQTYERNNNPRPFQAKYMLSGMARCGYCGAPLRIVLGHKRKDGSRTMKYHCANRYPRKTKGVTVYNDNKKCDSGTYDLSNLENTVIDNLIGFQVNDDSLLKIINGNDQPILDTSSLKKQISQIDKKIQKNSDLYLNDFITMDELKARTDSLQAEKELLRAKISENKFNDSTDVFELVKTQLGSIPINELSYDDKKKIVNNLVSKVDVTADDVDIIFKFQLA

SEQ ID NO: 7678 - protein, 452 aa, synthetic construct
MKAAIYIRVSTQEQVGNYSIQAQTEKLTALCRSKDWDVYDIFIDGGYSGSNMNRPALNEMLSKLHEIDAVVVYRLDRLSRSQRDTTTLIEEYFLKNNVEFVSLSETLDTSSPFGRAMIGILSVFAQLERETIRDRMVMGKIKRIEAGLPLTTAKGRTFGYDVIDTRLYINEEEAKQLRLIYDIFEEEQSITFLQKRLKKLGFKVRTYNRYNNWLTNDLYCGYVSYKDKVHVKGIHEPIISEEQFYRVQEIFTRMGKNPNMNRDSASLLNNLVVCSKCGLGFVHRSKDTMSRGKKYHYRYYSCKTYKHTHELEKCGNKTWRADKLEELIISRVNNYSFASRSADKEDGLDSLSEKLKIEHAKKKRLFDLYINGSYEVSELDSMMNDIDGQINYYESQIEANEKLKKNKKIQENLAELATVDFDSLEFREKQLYLKSLINKIYIDGEQVTIEWL

SEQ ID NO: 7679 - protein, 469 aa, synthetic construct
MSYTTPVRAAVYLRISEDRSGEQLGAARQREDCLKLCGQRKWEPVEYLDNDVSASTGKRRPAYEQMLADITAGKIAAVVAWDLDRLHRRPIELEAFMSLADEKRLALATVAGDVDLATPQGRLVARLKGSVAAHETEHKKARQRRAARQKAERGYPNWSKAFGYLPGPNGPEPDPRTAPLVKQAYADILAGASLGDVCRQWNDAGAFTITGRPWTSTTLSKFLRKPRNAGLRAYKGARYGPVDRDAIVGKAQWSPLVDEATFWAAQAVLDAPGRAPGRKSVRRHLLTGLAGCGKCGNHLAGSYRTDGRVVYVCKACHGVAILADNIEPILYHIVAERLAMPDAVNLLRREIHDAAEAETIRLELETLYGELDCLAVERAEGMLTARQVKISTDIVNAKITKLQAHQQDQERLRVLDGIPLGTPQVAGVIAELSPNRFRAVLDVLAEVVVQPVGKSGRIFNPERVQVNWR

SEQ ID NO: 7680 - protein, 452 aa, synthetic construct
MKAAIYIRVSTREQVENYSIQAQTEKLTALCRSKDWDVYDIFIDGGYSGSNMNRPALNEMLSKLHEIDAVVVYRLDRLSRSQRDTITLIEEYFLKNNVEFVSLSETLDTSSPFGRAMIGILSVFAQLERETIRDRMVMGKIKRIEAGLPLTTAKGRTFGYDVIDTKLYINEEEAKQLQLIYDIFEEERSITFLQKRLKKLGFKVRTYNRYNDWLTNDLYCGYVSYKDKVHVKGIHEPIISEEQFYRVQEIFTRMGKNPNMNRDSASLLNNLVVCSKCGLGFVHRRKDTTSRGKKYHYRYYSCKTYKHIHELEKCGNKIWRADKLEELIINRVNDYSFACRNVDKEDELDSLNEKLRIEHAKKKRLFDLYINGSYEVSELDSMMNDIDAQISYYESQIEANEEQKKNKKIQENLANLATVDYDSLEFREKQLYLKSLINKIYIDGEQVTIEWL

SEQ ID NO: 7681 - protein, 469 aa, synthetic construct
MSYTTPVRAAVYLRISEDRSGEQLGVARQREDCLKLCGQRKWVPVEYLDNDVSASTGKRRPAYEQMLADITAGKIAAVVAWDLDRLHRRPVELEAFMSLADEKRLALATVAGDVDLATPQGRLVARLKGVVAAHETEHKKARQRRAARQKAERGLPNWSKAFGYLPGPNGPAPDPRTAPLVKQAYADILAGASLGDVCRQWNDAGAFTITGRPWTTTTLSKFLRKPRNAGLRAYKGARYGPVDRDAIVGKAQWSPLVDEATFWAAQAVLDAPGRAPGRKSVRRHLLTGLAGCGKCDNHLAGSYRTDGRVVYVCKECHGVAILADNIEPILYHIVAERLAMPDAVDLLRREIHDAAEAETIRLELETLYGELDRLAVERAEGLLTARQVKVSTDIVSAKITKLQARQLDQERLRVFDGIPLGTPQVAGMIAELSPDRFRAVLDVLAEVVVQPVGKSGRISNQERVQVNWR

SEQ ID NO: 7682 - protein, 452 aa, synthetic construct
MKAAIYIRVSTREQVENYSIQAQTEKLTALCRSKDWDVYDIFIDGGYSGSNMNRPALNEMLSKLHEIDAVVVYRLDRLSRSQRDTITLIEEYLLKNNVEFVSLSETLDTSSPFGRAMIGILSVFAQLERETIRDRMVMGKIKRIEAGLPLTTAKGRTFGYDVIDTKLYINKEEAKQLQLIYDIFEEEQSITFLQKRLKKLGFKVRSYNRYSNWLTNDLYCGYVSYKDRVHVKGIHEPIISEEQFYRVQEIFTRMGKNPNMNRDSASLLNNLVVCSKCGLGFVHRRKDAMSRDKKYHYRYYSCKTYKHIHELEKCGNKIWRADKLEELIINRVNSYSLAGRNVDKEDELDSLNEKLKIEYAKKKRLFELYINGNYDVSELDSMMHDIDAQINYYESQIEANEELRKSKKIQENLAYLATVDFDSLEFREKQLYLKSLINKIYIDGEQVTIEWL

SEQ ID NO: 7683 - protein, 452 aa, synthetic construct
MKAAIYIRVSTREQVENYSIQAQTEKLTALCRSKDWDVYDIFIDGGYSGSNMNRPALNEMLSKLHKIDAVVVYRLDRLSRSQRDTITLIEEHFLKNNVEFVSLSETLDTSSPFGRAMIGILSVFAQLERETIRDRMVMGKIKRIEAGLPLTTAKGRTFGYDVIDTKLYVNEEEAKQLQLIYDIFEEEQSITFLQKRLKKLGYKVRTYNRYNNWLTNDLYCGYVSYKDKVHVKGIHEPIISEEQFYRVQEIFTRMGKNPNMNRDSASLLNNLVVCSKCGLGFVHRRKDAMSRDKKYHYRYYSCKTYKHIHELEKCGNKIWRADELEELVINRVNSYSVASRNVDKEDELDSLNEKLKTEHAKKKRLFDLYINGSYEVSELDSMMKDIDAQINYYESQIEANEELKKNKKIQENLAYLATVDFDSLEFREKQLYLKSLINKIYIDGEQVTIEWL

SEQ ID NO: 7684 - protein, 452 aa, synthetic construct
MKAAIYIRVSTQEQVGNYSIQAQTEKLTALCRSKDWDVYDIFVDGGYSGSNMNRPALNEMLSKLHEIDAVVVYRLDRLSRSQRDTTTLIEEYFLKNNVEFVSLSETLDTSSPFGRAMIGILSVFAQLERETIRDRMVMGKIKRIEAGLPLTTAKGRTFGYDVIDTKLYINEEEAKQLQLIYDIFEEEQSITFLQKRLKKLGFKVRTYNRYNSWLTNDLYCGYVSYKDKVHVKGIHEPIISEEQFYRVQEIFTRMGKNPNMNRDSASLLNNLVVCSKCGLGFVHRRKDTMSGGKKYHYRYYSCKTYKHAHELEKCGNKTWRADKLEELVINRVNNYSFASRNVDKEDELGSLNEKLKIEHAKKKRLFDLYINGSYEVSELDSMMYDIDAQINYYESQIEASEELKKNKKIQENLADLATVDFDSLEFREKQLYLKSLINKIYIDGEQVTIEWL

SEQ ID NO: 7685 - protein, 452 aa, synthetic construct
MKAAIYIRVSTQEQVGNYSIQAQTEKLTALCRSKDWDVYDIFVDGGYSGSNMNRPALNEMLSKLHEIDAVVVYRLDRLSRSQRDTTTLIEEYFLKNNVEFVSLSETLDTSSPFGRAMIGILSVFAQLERETIRDRMVMGKIKRVEAGLPLTTAKGRTFGYDVIDTKLYINEEEAKQLQLIYDIFEEEQSITFLQKRLKKLGFKVRSYNRYNNWLTNDLYCGYVSYKDKVHVRGIHEPIISEEQFYRVQEIFTRMGKNPNVNRDSASLLNNLVVCSKCGLGFVHRSKDTMSGGKKYHYRYYSCKTYKHTHELEKCGNKTWRADRLEELIINRVNNYSFASRSVDKEDELDSPNEKLKIEHARKKRLFDLYINGSYEASELDSMMNDIDAQINYYESQIEASEELKKNKKIQENLADLATVDFDSLEFREKQLYLKSLINRIYIDGEQVTIDWL

SEQ ID NO: 7686 - protein, 452 aa, synthetic construct
MKAAIYIRVSTREQVENYSIQAQTEKLTALCRSKDWDVYDIFIDGGYSGSNMNRPALNEMLSKLHEIDAVVVYRLDRLSRSQRDTITLIEEYFLKNNVEFVSLSETLDTSSPFGRAMIGILSVFAQLERETIRDRMVMGKIKRVEAGLPLTTAKGRTFGYDVIDTKLYINEEEAKQLQLIYDIFEEEQSITFLQKRLKKLGFKVRTYNCYNNWLTNDLYCGYVSYKDKVHVKGIHEPIISEGQFYRVQEIFTRMGKNPNMNRDSASLLNNLVVCSKCGLGFVHRRKDTMSRGKKYHYRYYSCKTYKHTHELEKCGNKIWRADKLEELIINRVNNYSIASRNVDKEDELDSLNEKLKIEHAKKKRLFDLYINGSYEACELDSMMNDIDAQINYYESQIEANEELKKNKKIQENLAYLATVDFDSLEFREKQLYLKSLINKIYIDGEQVTIEWL

SEQ ID NO: 7687 - protein, 452 aa, synthetic construct
MKAAIYIRVSTREQVENYSIQAQTEKLTALCRSKDWDVYDIFIDGGYSGSNLNRPALNEMLSKLHEIDAVVVYRLDRLSRSQRDTITLIEEYFLKNNVEFVSLSETLDTSSPFGRAMIGILSVFAQLERETIRDRMVMGKIKRIEAGLPLTTAKGRTFGYDVIDTKLYINEEEAKQLQLIYDIFEEEQSITFLQKRLKKLGFKVHTYNRYNNWLTNDLYCGYVSYKDKVHVKGIHEPIISEEQFYRVQEIFTRMGKNPNMNRGSASLLNNLVVCGKCGLGFVHRRKDAMSRDKKYHYRYYSCKTYKHIHELEKCGNKIWRADKLEELIINRVNNYSVASRNAGKEDELDSLNEKLKIEHAKKRRLFELYINGRYEVSELDSMMNDIDAQISYYESQIEANEELKENKKIQENLANLATVDFDSLEFREKQLYLKSLINKIYIDGEQVTIEWL

SEQ ID NO: 7688 - protein, 452 aa, synthetic construct
MKAAIYIRVSTREQVENYSIQAQTEKLTALCRSKGWDVYDIFIDGGYSGSNMNRPALNEMLSKLHEIDAVVVYRLDRLSRSQRDTITLIEEYFLKNNVEFVSLSETLDTSSPFGRAMIGILSVFAQLERETIRDRMVMGKIKRIEAGLPLTTAKGRTFGYNVIDTKLYVNEEEARQLQLIYDIFEEEQSITFLQRRLKELGFKVHTYNRYNNWLTNDLYCGYVSYKDKVHVKGIHEPIISEEQFYRVQEIFARMGKNPNMNRDSASLLNNLVVCSRCGLGFVHRRKDAMSRDKKYHYRYYSCKTYKHIHELEKCGNKIWRADKLEELIINRVNNYSFASRNVDKEDELDSLNEKLKIEHAKKRRLFDLYINGSYEVSELDSMMNDIDAQINYYESQIEAGEELKKNKRIQENLAYLATVDFDSLEFREKQLYLKSLINKIYIDGEQVTIEWL

SEQ ID NO: 7689 - protein, 452 aa, synthetic construct
MKAAIYIRVSTREQVENYSTQAQTEKLTALCRSKDWDVYDIFIDGGYSGSNMNRPALNEMLSKLHEIDAVVVYRLDRLSRSQRDTITLIEEYFLKNNVEFVSLSETLDTSSPFGRAMIGILSVFAQLERETIRDRMVMGKIKRIEAGLPLTTAKGRTFGYDVIDTQLYINEEEAKQLQLIYDIFEEERSITSLQKRLKKLGFKVRTYNRYSNWLTNDLYCGYVSYKDKVHVKGVHEPIISEEQFYRVQEIFTRMGKNPNMNRNSASLLNNLVVCSKCGLGFVHRRKDIVSRGKKYHYRYYSCKTYKHIHELEKCGNKIWRADKLEELIINRVNNYSLAGRNVDKEDELDSLNEELKIEHAKKKRLFDLYINGSYDVSELDSMMNDIDAQINYYESRIEANEELKKNKKIQENLADLATVDFDSLEFREKQLYLKSLINKIYIDGEQVTIEWL

SEQ ID NO: 7690 - protein, 452 aa, synthetic construct
MKAAIYIRVSTQEQVENYSIQAQTEKLTALCRSKDWDVYDIFIDGGYSGSNMNRPALNEMLSKLHEIDAVVVYRLDRLSRSQRDTTTLIEEYFLKNNVEFVSLSETLDTSSPFGRAMIGILSVFAQLERETIRDRMVMGKIKRIEAGLPLTTAKGRTFGYDVIDTKLYINEEEAKQLQLIYDIFEEEQSITSLQKRLKKLGFKVHTYNRYNNWLTNDLYCGYVSYKDKVHVKGIHEPIISEEQFYRVQEIFTRMGKNPNMNRDSASLLSNLVVCSKCGLGFVHRSKDTMSRGKKYHYRYYSCKTYKHTHELEKCGNKTWRADKLEELIISRVNNYSLASRNVDKEDELDSLNEKLKIEHAKKKRLFDLYINGNYEVSELDSMMNDIDAQINYYESQIEANEELKKNKKIQENLANLATVDFDSLEFREKQLYLKSLINKIYIDGEQVIIEWL

SEQ ID NO: 7691 - protein, 485 aa, synthetic construct
MTRKVAIYTRVSTTNQAEEGFSIDEQIDRLTKYAEAMGWQVSDTYTDAGLSGAKLERPAMQRLINDIENKAFDTVLVYKLDRLSRSVRDTLYLVKDVFTKNKIDFISLNESIDTSSAMGSLFLTILSAINEFERENIKERMTMGKLGRAKSGKSMMWTKTAFGYYHNRKTGILEIVPLQATIVEQIFTDYLSGISLTKLRDKLNEGGHIGKDIPWSYRTLRQTLDNPVYCGYIKFKDSLFEGMHKPIIPYETYLKVQKELEERQQQAYERNNNPRPFQAKYMLSGMARCGYCGAPLRIVLGHKRKDGSRTMKYHCANRFPRKTKGVTVYNDNKKCDSGTYDLSNLENTVIDSLIGFQENNDSLLKFINGNNQPILDASSFEKQISQIDKKIQKNSDLYLNDFITMDELKDRTDSLQAEKKLLKAKIGENKFNDSTDVFELVKTQLGSIPINELSYDNKKKIVNNLVSKVDVTADNVDIIFKFQLA

SEQ ID NO: 7692 - protein, 452 aa, synthetic construct
MKAAIYIRVSTREQVENYSIQAQTEKLTALCRSKDWDVYDIFIDGGYSGSNMNRPALNEMLSKLHEIDAVVVYRLDRLSRSQRDTITLIEEHFLKNNVEFVSLSETLDTSSPFGRAMIGILSVFAQLERETIRDRMVMGKIKRIEAGLPLTTAKGRTFGYDVIDTKLYINEEEARQLQLIYDIFEEEQSITFLQKRLKKLGFKVRTYNRYNSWLTNDLYCGYVSYKDKVHVKGIHEPIISEEQFYRVQEIFTRMGRNPNMNRDSASLLNSLVVCSKCGLGFVHRRKDTMSRGKKYHYRYYSCKTYKHTHELEKCGNKIWRADKLEELIINRVNNYSFASRNVVKEDELDSLSEKLKIEHAKKKRLFDLYINGSYEVSELDSMMNDIDAQISYYESQIEANEELKKNKKIQENLANLATVDFDSLEFREKQLYLKSLINKIYIDGEQVTIEWL

SEQ ID NO: 7693 - protein, 452 aa, synthetic construct
MKAAIYIRVSTQEQVENYSIQAQTEKLTALCRSKDWDVYDIFIDGGYSGSNMNRPALNEMLSKLHEIDAVVVYRLDRLSRSQRDTLTLIEEYFLKNNVEFVSLSETLDTSSPFGRAMIGILSVFAQLERETIRDRMAMGKIKRVEAGLPLTTAKGRTFGYDVIDTKLYINEEEAKQLQLIYDIFEEEQSITFLQKRLKKLGFKVRTYSRYNDWLTNDLYCGYVSYKDKVHVKGIHEPIISEEQFYRVQEIFTRMSRNPNVNRDSASLLNNLVVCSKCGLGFVHRRKDTTSRGKKYHYRYYSCKTYKHIHELEKCGNRIWRADKLEELIINRVNNYSLASRNADKEDEQDSLNEKLKIEHAKKKRLFDLYINGSYEVSELDSMMNDIDAQINYYESQIEANEELRKNKKIQENLVDLATVDFDSLEFREKQLYLKSLINKIYIDDEQVTIEWL

SEQ ID NO: 7694 - protein, 452 aa, synthetic construct
MKAAIYIRVSTREQVENYSIQAQTEKLTALCRSKDWDVYDIFIDGGYSGSNMNRPALNEMLSKLHEIDAVVVYRLDRLSRSQRDTITLIEEYFLKNNVEFVSLSETLDTSSPFGRAMIGILSVFAQLEHETIRDRMVMGKIKRIEAGLPLTTAKGRTFGYDVIDTKLYINEEEAKQLQLIYDIFEEERSITLLQKRLKKLGFKVRTYSRYNNWLTNDLYCGYVSYKDKVHVKGIHEPIISEEQFYRVQEIFTRMGKNPNMNRDSASLLNNLVVCSKCGLGFVHRRKDTMSRGRKYHYRYYSCKTYKHTHELEKCGNKIWRADKLEELIINRVNNYSSASRSADKEDELDSLNEKLKIEHVKKKRLFDLYINGSYEASELDSMMNDIDAQISYYESQIEANEELKKNKKIQENLANLATVDYDSLEFREKQLYLKSLINKIYIDGEQVTIEWL

SEQ ID NO: 7695 - protein, 452 aa, synthetic construct
MKAAIYIRVSTQEQVGNYSIQAQTEKLTALCRSKGWDVYDIFIDGGYSGSNMNRPALNEMLSKLHEIDAVVVYRLDRLSRSQRDTTTLIEEYFLKNNVEFVSLSETLDTSSPFGRAMIGILSVFAQLERETIRDRMVMGKIKRIEAGLPLTTAKGRTFGYNVIDTRLYINEEEAKQLQLIYDIFEEEQSITSLQKRLKKLGFKVRTYNRYNNWLTNDLYCGYVSYKDKVHVKGIHEPIISEEQFYRVQEIFTRMGKKPNMNRDSASLLNNLVVCSKCGLGFVHRSKDTMSRGKKYHYRYYSCKTYRHTHELEKCGNKTWRADKLEELIINRVNNYSFASRNVGKEDELDSLNEKLRIEHAKKKRLFDLYINGSYVVSELDSMMNDIDAQINYYESQIEAIEELKKTKKIRENLADLAAVDFDSLEFREKQLYLKSLINKIYIDGEQVTIEWL

SEQ ID NO: 7696 - protein, 469 aa, synthetic construct
MSYTTPVRAAVYLRISEDRSGEQLGVARQREDCLKLCGQRKWVPVEYLDNDVSASTGKRRPAYEQMLADITAGKIAAVVAWDLDRLHRRPIELEAFMSLADEKRLALATVAGDVDLATPQGRLVARLKGSVAAHETEHKRARQCRAARQKAERGHPNWSKAFGYLPGPNGPEPDPRTAPLVNQAYADILAGASLGDVCRQWNDADAFTITGRPWTTTALSKFLRKPRNAGLRAYKGARYGPVDRDAIVGKAQWSPLVDEATFWAAQAVLDAPGRAPGRKSVRRHLLTGLAGCGKCGNHLAGSYRTDGRVVYVCKACHGVAILADNIEPILYHIVAKRLAMPDAVDLLRREIHDAAEAETTRLGLDTLYGELDRLAVERAEGLLTARQVKISTDIVNAKIAKLLARQLDQERLRVFDGIPLGTPQAAGMIAKLSPDRFRAVLDVLAEVVVQPVGKGGRISNPERVQVSWR

SEQ ID NO: 7697 - protein, 452 aa, synthetic construct
MKAAIYIRVSTREQVENYSIQAQTEKLTALCRSKDWDVYDIFIDGGYSGSNMNRPALNEMLSKLHEIDAVVVYRLDRLSRSQRDTITLIEEYFLKNNVEFVSLSETLDTSSPFGRAMIGILSVFAQLERETIRDRMVMGKIKRIEAGLPLTTAKGRTFGYDVIDTKLYVNEEEAKQLQLIYDIFEEEQSITFLQKRLKKLGFKVHTYNRYNNWLTNDLYCGYVSYKDKVHVKGIHEPIISEEQFYRVQEIFTRMGKNPNMNRDSASLLNNLVVCSKCGLGFVHRRKDTTSRGKKYHYRYYSCKTYKHTHELEKCGNKIWRADKLEELIIDRVNNYSLASRNVDKEDELDSLNERLKIEHAKKKRLFDLYINGSYEVSELDSMMNDIDVQINYYESQIEANEELRKNKKIQENLADLATVDYDNLGFREKQLYLKSLINKIYIDGEQVIIEWL

SEQ ID NO: 7698 - protein, 452 aa, synthetic construct
MKAAIYIRVSTREQVENYSIQAQTEKLTALCRSKDWDVYDIFIDGGYSGSNVNRPALNEMLSKLHEIDAVVVYRLDRLSRSQRDTITLIEEYFLKNNVEFVSLSETLDTSSPFGRAMIGVLSVFAQLERETIRDRMVMGKIKRIEAGLPLTTAKGRTFGYDVVDTKLYINEEEAKQLQLIYDIFEEEQSITFLQKRLKKLGFKVRTYSCYNSWLTNDLYCGYVSYKDKVHVKGIHEPIISEEQFYRVQEIFTRMGKNPNMNRGSASLLNNLVVCSKCGLGFVHRRKDTMSRGKKYHYRYYSCKTYKHIHELEKCGNKIWRADKLEELIINRVNNYSIASRNVDKEDELDSLNEKLKIEHAKKKRLFDLYINGSYEVSELDSMMNDIDAQINYYESQIEANEELKKNKKIQENLANLATVDYDSLEFREKQLYLKGLINKIYIDGEQVTIEWL

SEQ ID NO: 7699 - protein, 452 aa, synthetic construct
MKAAIYIRVSTREQVENYSIQAQTEKLTALCRSKDWDVYDIFIDGGYSGSNMNRPALNEMLSKLHEIDAVVVYRLDRLSRSQRDTITLIEEYFLKNNVEFVSMSETLDTSSPFGRAMIGILSVFAQLERETIRDRMVMGKIKRIEAGLPLTTAKGRTFGYDVIDTKLYINEEEAKQLRLIYDIFEEEQSITFLQKRLKKLGFKVRAYNRYNNWLTNDLYCGYVSYKDKVHVKGIHEPIISEEQFYRVQEIFTRMGKNPSMNRDSASLLNSLVVCSKCGLGFVHRRKDTTSRGKKYHYRYYSCKTYKHIHELEKCGNKIWRADKLEELIINRVNNYSLASRNVDKEDELDSLSEKLKVEHAKKKRLFELYINGSYNVSELDSMMSDIDAQINYYESQIEANGELRKNKKIQENLADLATVDFDSLEFREKQLYLKSLINKIYIDGEQVTIEWL

SEQ ID NO: 7700 - protein, 452 aa, synthetic construct
MKAAIYIRVSTQEQVGNYSIQAQTEKLTALCRSKGWDVYDIFIDGGYSGSNMNRPALNEMLSKLHEIDAVVVYRLDRLSRSQRDTTTLIEEYFLKNNVEFVSLSETLDTSSPFGRAMIGILSVFAQLERETIRDRTVMGKIKRIEAGLPLTTAKGRTFGYDVIDTKLYINEEEAKQLRLIYDIFEEEQSITSLQKRLKKLGFKVRTYNRYNNWLTNDLYCGYVSYKDKVHVKGIHEPIISEEQFYRVQEIFTRMGKNPNMNRDSASLLSNLVVCSKCGLGFVHRSKDTMSRGRKYHYRYYSCKTYKHVHELEKCGNKTWRADKLEELIINRVNSYSFASRNMVKEDELDSLNEKLKIEHAKKKRLFDLYINGSYEVSELDSMMNDIDAQISYYESQIEANEELKKNKKIQENLANLATVDFDSLEFREKQLYLKSLINKIYIDGEQVTIEWL

SEQ ID NO: 7701 - protein, 452 aa, synthetic construct
MKAAIYIRVSTQEQVENYSIQAQTEKLTALCRSKDWDVYDIFIDGGYSGSNMNRPALNEMLSKLHEIDAVVVYRLDRLSRSQRDTITLIEEYFLKNNVEFVSLSETLDTSSPFGRAMIGILSVFAQLERETIRDRMVMGKIKRIEAGLPLTTAKGRTFGYDVIDTRLYINEEEAKQLQLIYDIFEEEQSITFLQKRLKKLGFKVRTYSRYNNWLTNDLYCGYVSYKDKVHVKGVHEPIISEEQFYRVQEIFTRMGKNPNMNRDSASLLNNLVVCSKCGLGFVHRRKDTMSRGKKYHYRYYSCKTYKHTHELEKCGNKIWRADKLEELIINRVNNYSFASRNVDKEDELDSLNEKLKIEHAKKKRLFNLYINGSYEVSELDSMMNDIDARINYYESQIEANEELKKNKKIQENLADLATVDFDSLEFREKQLYLKSLINKIYIDGEQVTIEWL

SEQ ID NO: 7702 - protein, 452 aa, synthetic construct
MKAAIYIRVSTREQVENYSIQAQTEKLTALCRSKDWDVYDIFIDGGYSGSNMNRPALNEMLSKLHEIDAVVVYRLDRLSRSQRDTITLIEEYFLKNNVEFVSLSETLDTSSPFGRAMIGILSVFAQLERETIRDRMVMGKIKRIEAGLPLTTAKGRTFGYDVIDTKLYINEEEARQLQLIYDIFEEEQSITFLQKRLKKLGFKVRTYSRYNNWLTNDLYCGYVSYKDKVHVKGIHEPIISEEQFYRVQEIFTRMGKNPNMNRDSASLLNNLVVCSKCGLGFVHRRKDTVSRGKKYHYRYYSCKTYKHIHELEKCGNKIWRADKLEELIINRVNNYSFASRTVDKEDELDSLNERLKIEHAKRRRLFDLYINGSYEVSELDSMMNDIDAQINYYESQIEANEELKKNKKIQENLTDLATVDFDSLEFREKQLYLKSLINKIYIDGEQVTIEWL

SEQ ID NO: 7703 - protein, 452 aa, synthetic construct
MKAAIYIRVSTREQVENYSIQAQTEKLTALCRSKDWDVYDIFIDGGYSGSNMNRPALNEMLSKLHEIDAVVVYRLDRLSRSQRDTITLIEEYFLKNDVEFVSLSETLDTSSPFGRAMIGILSVFAQLERETIRDRMVMGKIKRIEAGLPLTTAKGRTFGYDVIDTKLHINEEEAKQLQLIYDIFEEERSITFLQKRLKKLGFKVHTYNRYNNWLTNDLYCGYVSYKDKVHVKGIHEPIISEEQFYRVQEIFARMGKNPNMNRDSASLLSSLVVCSKCGLGFVHRRKDTTSRGKKYHYRYYSCKTYKHTHELEKCGNKIWRADKLEELIINRVNNYSFASRNVDKEDELDSLYEKLKIEHAKRKRLFDLYINGSYEVSELDGMMNDIDAQINYYEGQIEANEELKKNKRIQENLADLAAVDFDSLEFREKQLYLKSLINKIYIDGEQVTIEWL

SEQ ID NO: 7704 - protein, 452 aa, synthetic construct
MKAAIYIRVSTREQVENYSIQAQTEKLTALCRSKDWDVYDIFIDGGYSGSNMNRPALSEMLSKLHEIDAVVVYRLDRLSRSQRDTITLIEEYFLKNNVEFVSLSETLDTSSPFGRAMIGILSVFAQLERETIRDRMVMGKIKRIEAGLPLTTAKGRTFGYDVIDTKLYINEEEAKQLQLIYDIFEEEQSITFLQRRLKKLGFKVRSYNRYNNWLTNDLYCGYVSYKDKVHVRGIHEPIISEEQFYRVQEIFTRMGKNPNMNRDSASLLNNLVVCSKCGLGFVHRRKDIVSRGNKYHYRYYSCKTYKHIHELEKCGNKIWRADKLEELIISRVSNYSFASRNVDKEDELDSLNEKLKIEHAKRKRLFDLYINGSYEVSELDSMMKDIDAQINYYENQIEANEELKKNKKIQENLASLATVDFDSLEFREKQLYLKSLINKIYIDGEQVTIEWL

SEQ ID NO: 7705 - protein, 452 aa, synthetic construct
MKAAIYIRVSTREQVENYSIQAQTEKLTALCRSKDWDVYDIFIDGGYSGSNMNRPALNEMLSKLHEIDAVVVYRLDRLSRSQRDTITLIEEYFLKNNVEFVSLSETLDTSSPFGRAMIGILSVFAQLERETIRDRMVMGKIKRIEAGLPLTTARGRTFGYDVIDTKLYINEGEAKQLQLIYDIFEEEQSITFLQKRLKKLGFKVRTYNCYNNWLTNDLYCGYVSYKDKVHVKGIHEPIISEEQFYRVQEIFTRMGKNPNMNRDSASLLNNLVVCGKCGLGFVHRRKDAMSRNKKYHYRYYSCKTYKHIHELEKCGNKIWRADKLEELIINRVNNYSIASRNVDKEDELDGLNEKLKIEHAKKKRLFDLYINGSYEVSELDSMMKDIDAQINYYESQIEANEELRKNKKIQENLAELATVDFDSLEFREKQLYLKSLINKIYIDGEQVTIEWL

SEQ ID NO: 7706 - protein, 469 aa, synthetic construct
MSYTTPVRAAVYLRISEDRSGEQLGVARQREDCLKLCGQRKWVPVEYLDNDVSASTGKRRPAYEQMLADITAGKIAAVVAWDLDRLHRRPIELEAFMSLADEKRLALATVAGDVDLATPQGRLVARLKGCVAAHETEHKKARQRRAARQKAERGLPNWSKAFGYLPGPNGPEPDPRTAPLVKQAYADILAGASLGDVCRQWNDAGAFTITGRPWATTTLSKFLRKPRNAGLRAYKGARYGPVDRDAIVGRAQWSPLVDEATFWAAQAVLDAPGRAPGRKSVRRHLLTGLAGCGKCGNHLAGSYRTDGRIVYVCKACHGIAILADNIEPILYHIVAERLAMPDAVDLLHREIHDAAEAETIRLELETLYGELDRLAVERAEGLLTARQVKISTDIVNAKITKLQARQQDQERLRVLDGIPLGTPQVAGMIAELSPDRFRAVLDVLVEVVVQPVGKGGRISNPERVQVNWR

SEQ ID NO: 7707 - protein, 452 aa, synthetic construct
MKAAIYIRVSTQEQVGNYSIQAQTEKLTALCRSKDWDVYDIFIDGGYSGSNMNRPALNEMLSKLHEIDAVVVYRLDRLSRSQRDTTTLIEEYFLKNNVEFVSLSETLDTSSPFGRAMIGILSVFAQLERETIRDRMVMGKIKRIEAGLPLTTAKGRTFGYDVIDTKLYINEEEARQLQLIYDIFEEEQSITSLQKRLKKLGFKVRTYNRYNSWLTNDLYCGYVSYKDKVHVKGIHEPIISEEQFYRVQEIFTRMGKNPNMSRDSASLLNNLVVCSKCGLGFVHRSKDTMSRGKKYHYRYYSCKTYKHTHELEKCGNKTWRADKLEELIINRVNNYSFASRNVDKEDELDSLNEKLKIEHARKKRLFDLYINGSYEVSELDSMMNDIDAQINYYESQIGADEELKKNKKIQGNLAGLATVDFDSLEFREKQLYLKSLISKIYIDGEQVTIEWL

SEQ ID NO: 7708 - protein, 469 aa, synthetic construct; identical to SEQ ID NO: 197

SEQ ID NO: 7709 - protein, 485 aa, synthetic construct
MTKKVAIYTRVSTTNQAEEGFSIDEQIDRLTKYAEAMGWQVSDTYTDAGLSGAKLERPAMQRLINDIENKAFDTVLVYKLDRLSRSVRDTLYLVKDVFTKNKIDFISLNESIDTSSAMGSLFLTILSAINEFERENIKERMTMGKLGRAKSGKSMMWTKTAFGYYHNRETGILEIVPLQATIVEQIFTDYLSGISLTKLRDKLNESGHIGKDIPWSYRTLRQTLDNPVYCGYIKFKGSLFEGMHKPIIPYETYLKVQKELEERQQQTYERNNNPRPFQAKYMLSGMARCGYCGAPLRIVLGRRRKDGSRTMKYHCANRFPRKTKGVTVYNDNKKCDSGTYDLSNLENTVIDNLIGLQENNDSLLKIIIGNDQPILDTSSFKKQISQIDKKIQKNCDLYLNDFITMGELKVRTDSLQAEKKLLKAKISENKFNDSADVFELAKTQLGSIPINELSYDDKKKIVNNLVSKVDVTADNVDITFKFQLA

SEQ ID NO: 7710 - protein, 452 aa, synthetic construct
MKAAIYIRVSTREQVENYSIQAQTEKLTALCRSKDWDVYDIFIDGGYSGSNMNRPALNEMLSKLHEIDAVVVYRLDRLSRSQRDTITLIEEYFLKNNVEFVSLSETLDTSSPFGRAMIGILSVFAQLERETIRDRMVMGKIKRIEAGLPLTTAKGRTFGYDVIDTKLYINEEEAKQLQLIYDIFEEEQSITLLQKRLKKLGFKVRTYNRYNNWLTNDLYCGYVSYKDKVHVKGIHEPIISEEQFYRVQEIFTRMGKNPNMNRDSASLLNNLVVCSKCGLGFVHRRKDVMSHGKKYHYRYYSCKTYKHIHELEKCGNKIWRADKLEELIINRVNNYSFASRNVDKEDELVSLNEKLKIEHAKKKRLFDLYINGSYEVSELDSMMSDIDAQINYYESQIEANGELKKNKKIQENLAHLATVDFGSLEFREKQLYLKSLINKIYIDGEQVTIEWL

SEQ ID NO: 7711 - protein, 452 aa, synthetic construct
MKAAIYIRVSTREQVENYSIQAQTEKLTALCRSKDWDVYDIFIDGGYSGSNMNRPALNEMLSKLHEIDAVVVYRLDRLSRSQRDTITLIEEYFLKNNVEFVSLSETLDTSSPFGRAMIGILSVFAQLERETIRDRMVMGKIKRIEAGLPLTTAKGRTFGYDVIDTKLYINEEEAKQLRLIYDIFEEEQSITFLQKRLKKLGFKVRTYNRYNNWLTNDLYCGYVSYKDKVHVKGIHEPIISEEQFYRVQEIFARMGKNPNMNRDSASLLNNLVVCSKCGLGFAHRRKDAMSRDKKYHYRYYSCKTYKHIHELEKCGNKIWRADKLEELIINRVNNYSLASRNVGKEDELDSLNEKLKIEHAKKKRLFDLYINGRYEVSELDSMMNDIDAQINYYESQIEANEELKKNKQIQENLANLATVDFDSLEFREKQRYLKSLINKIYIDGEQVTIEWL

SEQ ID NO: 7712 - protein, 452 aa, synthetic construct
MKAAIYIRVSTREQVENYSIQAQTEKLTALCRSKDWDVYDIFIDGGYSGSNMNRPALNEMLSKLHEIDAVVVYRLDRLSRSQRDTITLIEEHFLKNNVEFVSLSETLDTSSPFGRAMIGILSVFAQLERETIRDRMVMGKIKRIEAGLPLTTAKGRTFGYDVIDTKLYINVEEAKQLQLIYDIFEEEQSITFLQKRLKKLGFKVRTYNRYNNWLTNDLYCGYVSYKDKVHVKGIHEPIISEEQFYRVQEIFTRMGRNPNMNRDSASLLNNLVVCSKCGLGFVHRRKDAMSRDKKYHYRYYSCKTYKHIHELEKCGNKIWRADKLEELIINRVNNYSITSRNADKEDELDSLSEKLKIEHAKKKRLFELYINGSYEVSELDSMMNVIDAQITYYEGQIEANEELRKNKKIQENLANLATVDFDSLEFREKQLYLKSLISKIYIDGEQVTIEWL

SEQ ID NO: 7713 - protein, 452 aa, synthetic construct
MKAAIYIRVSTREQVENYSIQAQTEKLTALCRSKDWDVYDIFIDGGYSGSNMNRPALNEMLSKLHEIDAVVVYRLDRLSRSQRDTITLIEEYFLKNNVEFVSLSETLDTSSPFGRAMIGILSVFAQLERETIRDRMVMGKIKRIEAGLPLTTAKGRTFGYDVIDTKLYINEEEAKQLQLIYDIFEEEQSITLLQKRLKKLGFKVRTYNRYNNWLTNDLYCGYVSYKDKVHVKGIHEPIISEEQFNRVQEIFARTGKNPNMNRGSASLLNNLVVCGKCGLGFVHRRKDAMSRDKKYHYRYYSCKTYKHIHELEKCGNKIWRADELEELIINRVNNYSLASRNVDKEDGLDSLNEKLKIEHAKKKRLFDLYLNGSYEVSELDSMMNDIDAQISYYESQIEANEALIKNKKIQENLANLATVDFDSLEFREKQLYLKSLINKIYIDDEQVTIEWL

SEQ ID NO: 7714 - protein, 469 aa, synthetic construct
MSYTTPVRAAMYLRISEDRSGEQLGVARQREDCLKLCGQRKWVPVEYLDNDVSASTGERRPAYEQMLADITAGKIAAVVAWDLDRLHRRPIELEAFMSLADEKRLALATVAGDVDLATPQGRLVARLKGCVAAHETEHKKARQRRAARQKAERGLPNWSKAFGYLPCPNGPEPDPRTAPLVKQAYADILAGASLGDVCKQWNDAGAFTITGRPWTTTTLSKFLRKPRNAGLRAYKGARYGPVDRDAIVGKAQWSPLVDEATFWAAQAVLDAPGRAPGRKSVRRHLLTGLAGCGKCGNHLAGSYRTDGRVVYVCKACHGVAILADNIEPILYHIVAERLAMPDAVDLLRRGIHDAAEAETIRLELETLYGELDRLAVERAEGLLTARQVKISTDIVNAKITKLQARQLDQERLRVFAGIPLGTPQVASVIAELSPDRFRAVLDVLAEVVVQPVGKSGRIFNPERVQVNWR

SEQ ID NO: 7715 - protein, 452 aa, synthetic construct
MKAAIYIRVSTREQVENYSIQAQTEKLTALCRSKDWDVYDVFIDGGYSGSNMNRPALNEMLSKLHEIDAVVVYRLDRLSRSQRDTITLIEEYFLKNNVEFVSLSETLDTSSPFGRAMIGILSVFAQLERETIRDRMVMGKIKRIEAGLPLTTARGRTFGYDVIDTKLYINEEEAKQLQLIYDIFEEEQSITFLQKRLKELGFKVRTYNRYNNWLTNDLYCGYVSYKDKVRVKGIHEPIISEEQFYRVQEIFTRMGKNPNMNRDSASLLNNLVVCGKCGLGFVHRRKDATSRDKKYHYRYYSCKTYKHIHELEKCGNKIWRADKLEELVINRVNNYSLASRNVDKEDELDSLNEKLKIEHAKKKRLFDLYINGSYEVSELDSMMNDIDAQINYYESQVEAKEELKKDKKIQENLADLATVDFDSLEFREKQLYLKSLISKIYIDGEQVTIEWL

SEQ ID NO: 7716 - protein, 469 aa, synthetic construct
MSYTTPVRAAVYLRISEDRSGEQLGVARQREDCLKLCDQRKWVPVEYLDNDVSASTGKRRPAYEQMLEDITAGKIAAVVAWDLDRLHRRPVELEAFMGLADEKRLALATVAGDVDLATPQGRLVARLKGSVAAHETEHKKARQRRAARQKAERGHPNWSKAFGYLPGPNGPEPDPRTAPLVKQAYADILAGASLGDVCRRWNDVGAFTITGRPWTTTTLSKFLRKPRNAGLRAYKGARYGPVDRDAIVGKAQWSPLVDEATFWAAQAVLDAPGRAPGRKSVRRHLLTGLAGCGKCGNHLAGSYRTDGRVVYVCKACHGVAILADNIEPILYHIVAERLAMPDAVDLSRREIHDVAEAETIRLELETLYGELDRLAVERAEGLLTARQVKISTDIVNAKITKLQARQLDQARLRVFDGIPLGTPQVAGVIAELSPDRFRAVLDVLAEVTVQPVGKSGRIFNPERVQVNWR

SEQ ID NO: 7717 - protein, 469 aa, synthetic construct; identical to SEQ ID NO: 4756

SEQ ID NO: 7718 - protein, 452 aa, synthetic construct
MKAAIYIRVSTQEQVGNYSIQAQTEKLTALCRSKDWDVYDIFVDGGYSGSNMNRPALNEMLSKLHEIDAVVVYRLDRLSRSQRDTTTLIEEYFLKNNVEFVSLSETLDTSSPFGRAMIGILSVFAQLERETIRDRMVMGKIKRIEAGLPLTTAKGRTFGYDVIDTKLYINEEEAKQLRLIYDIFEEEQSITLLQKRLKKLGLKVRTYNRYNNWLTNDLYCGYVSYKDKVHVKGIHEPIISEEQFYRVQEIFTRMGKNPNMNRDSASLLSNLVVCSKCGLGFVHRSKDTMSRGKKYHYRYYSCKTYKHTHELEKCGNKTWRADKLEELIINRVNNYSFASRNVDKEDELDSLNEKLKIEHAKKKRLFDLYINGSYEVSELDSMMNDIDAQINYYESQIEANEELRKNKKIQESLADLATVDFDSLEFREKQLYLKSLINKIYIDGEQVTIEWL

SEQ ID NO: 7719 - protein, 452 aa, synthetic construct
MKAAIYIRVSTREQVENYSIQAQTEKLTALCRSKDWDVYDIFIDGGYSGSNMNRPALNEMLSKLHEIDAVVVYRLDRLSRSQRDTITLIEEYFLKNNVEFVSLSETLDTSSPFGRAMIGILSVFAQLERETIRDRMVMGKIKRVEAGLPLTTAKGRTFGYDVIDTKLYINEEEAKQLQLIYDIFEEEQSITFLQKRLKRLGFKVRTYSRYSNWLTNDLYCGYVSYKDKVHVKGIHEPIISEEQFYRVQEIFTRMGKNPNMNRDSASLLNNLVVCSKCGLGFVHRRKDTMSRGKKYHYRYYSCKTYKHTHELEKCGNKIWRADKLEELIINRVNNYSLASRNVDKEDELDSLNEKLKIEHAKRKRLFDLYINGSYEVSELDSMMSDIDAQINYYESQIEANGELKKNKKVQENLANLATVDYDSLEFCEKQLYLKSLINKIYIDGEQVTIEWL

SEQ ID NO: 7720 - protein, 452 aa, synthetic construct
MKAAIYIRVSTQEQVENYSIQAQTEKLTALCRSKGWDVYDIFIDGGYSGSNMNRPALNEMLSKLHEIDAVVVYRLDRLSRSQRDTITLIEEYFLKNNVEFVSLSETLDTSSPFGRAMIGILSVFAQLERETIRDRMVMGKIKRVEAGLPLTTAKGRTFGYDVIDTKLYINEEEAKQLQLIYDIFEEEQSITFLQKRLKKLGFKVRTYNRYISWLTNDLYCGYVSYKDKVHVKGIHEPIISEEQFYRVQEIFTRMGKNPNMNRDSASLLNNLVVCSKCGLGFVHRRKDTMSRGKKYHYRYYSCKTYKHTHELEKCGNKIWRADKLEELIIDRVNNYSFASRNADKEDELDSLNEKLKIERAKKKCLFDLYINGSYEVSELDSMMNNIDAQINYYESQIEAIEELKRSKKIQENQADLATVDFDSLEFRDKQLYLKSLINKIYIDGEQVTIEWL

SEQ ID NO: 7721 - protein, 469 aa, synthetic construct
MSYTTPVRAAVYLRISEDRSGEQLGVARQREDCLKLCGQRKWVPVEYLDNDVSASTGKRRPAYEQMLADITAGKIAAVVAWDLDRLHRRPVELEAFMSLADEKRLALATVAGDADLATPQGRLVARLKGSVAAHETEHKKARQRRAARQKAERGLPNWSKAFGYLPGPNGPEPDPRTAPLVKQAYADILAGASLGDVCRQWNDAGAFTITGRPWTTTTLSKFLRKPRNAGLRAYKGARHGPVDRDAIVGKAQWSPLVDEATFWAAQAVLDAPGRAPGRKSVRRHLLTGLAGCGKCGNHLAGSYRTDGRVVYVCKACHGIAILADSIEPILYHIVAERLAMPDAVDLLRHEIHDAAEAEAIRLELETLYGELDRLAVERAEGLLTARQVKISTDIVNAKITKLQARQLDQERLRVFNGIPLGTPQVAGVIAELSPDRFRAVLGVLAEVVVQPVGKRGRIFNPERVQVNWR

SEQ ID NO: 7722 - protein, 485 aa, synthetic construct
MTKKVAIYTRVSTTNQAEEGFSIDEQIDRLTKYAVAMGWQVSDTYTDAGISGAKLERPAMQRLINDIENKAFDTVLVYKLDRLSRSVRDTLYLARDVFTKNKIDFISLNESIDTSSAMGSLFLTILSAINEFERENIKERMTMGKLGRAKSGKSMMWTKTAFGYYHNRKTGILEIVPLQATIVEQIFTDYLSGISLTKLRDKLNESGHIGKDIPWSYRTLRQTLDNPVYCGYIKFKDSLFEGMHKPIIPYETYLKVQKELEERQQQTYERNNNPRPFQAKYMLSGMARCGYCGAPLKIVLGHKRKDGSRTMKYHCANRFPRKTKGVTVYNDNKKCDSGTYDLSNLETTVVDNLIGFQENNDSLLKIINGNNQPILDTSSLKKQISQIDKKIQKNSDLYLDDFITMDELKERTDSLQAEKKLLKAKISENKFSDSTDVFELVKTQLGSIPINELSYDDKKKIVNNLVSKVDVTADNVDIIFKFQLA

SEQ ID NO: 7723 - protein, 452 aa, synthetic construct
MKAAIYIRVSTREQVENYSIQAQTEKLTALCRSKGWDVYDIFIDGGYSGGNMNRPALNEMLSKLHEIDAVVVYRLDRLSRSQRDTITLIEEYFLKNNVEFVSLSETLDTSSPFGRAMIGILSVFAQLERETIRDRMVMGKIKRIEAGLPLTTAKGRTFGYDVIDTKLYINEEEAKQLQLIYDTFEEVQSITFLQKRLKKLGFKVRTYNRYYNWLTNELYCGYVSYKDKVHVKGIHEPIISEEQFYRVQEIFTRMGKNPNMNRDSASLLNNLVVCSKCGLGFVHRRKDAMSRDKKYHYRYYSCKTYKHIHELEKCGNKIWRADKLEELIINRVNDYSLASRNADKEDELDSLNEKLKIEHAKKKRLFDLYINGSYEVSELDSMMNDIDAQINYYESQIEANEELKRNKKIQENLADLATVDFDSLEFREKQRYLKSLINKIYIDGEQVTIEWL

SEQ ID NO: 7724 - protein, 485 aa, synthetic construct; identical to SEQ ID NO: 3238

SEQ ID NO: 7725 - protein, 485 aa, synthetic construct
MTKKVAIYTRVSTANQAEEGFSIDEQIDRLTKYAEAMGWQVSDTYTDAGVSGANLERPAMQRLINDIENKAFDTVLVYKLDRLSRSVSDTLYLVKDVFTKNKIDFISLNESIDTSSAMGSLFLTILSAINEFERENIKERMTMGKLGRAKSGKSMMWTKTAFGYYHNRKTGILEIVPLQATIVEQIFTDYLSGISLTKLRDKLNESGHIGKDIPWSYRTLRQTLDNPVYCGYIKFKDSLFEGMHKPIIPYETYLKVQRELEERQQQTYERNNNPRPFQAKYMLSGMARCGYCGAPLRIVLGHKRKDGSRTMKYHCANRFPRKTKGITVYNDNKKCDSGTYDLSNLEDTVIDNLIGFQENNDSLLKIINGNNQPILDTSSFKEQISQIDKKIQKNSDLYLNDFITMDELKDRIDSLQAEKKLLKAKISENKFSDSTDVFELVKTQLGSIPINELSYDNKKKIVNNLVSKVDVTADNVDIIFKFQLA

SEQ ID NO: 7726 - protein, 485 aa, synthetic construct
MTKKVAIYTRVSTTNQAEEGFSIDEQIDRLTKYAEAMGWQVSDTYTDAGHSGAKLERPAMQRLINDIENKAFDTVLVYKLDRLSRSVRDTLYLVEDVFTKNKVDFISLNESINTSSAMGSLFLTILSAINEFERENIKERMTMGKLGRAKSGKSMMWTKAAFGYYHNRKTGILEVVPLQATIVEQIFTDYLSGISLTKLRDKLNESGHIGKDIPWSYRTLRQTLDNPVYCGYIKFKDSLFEGMHKPIIPYETYLKVQKELEERQQQTYERNNNPRPFQAKYMLSGMARCGYCGAPLRIVLGHKRKDGSRTMKYHCANRFPRKTKGVTVYNDNKKCDSGTYDLSNLENTVIDNLIGYQENDDSLLKIINGNNQPILDTSSFKKQISQIDKKIQKNSDLYLNDFITMDELKERTDSLQAEKKLLKAKISENKLNDRTDVFELVKTQLGSIPISELSYDNKKKIVNNLVSKVDVTADNVDIIFKFQLT

SEQ ID NO: 7727 - protein, 469 aa, synthetic construct
MSYTTPVRAAVYLRISEDRSGEQLGVARQREDCLKLCDQRKWVPVEYLDNDVSASTGKRRPAYEQMLADITAGRIAAVVAWDLDRLHRRPIELEAFMSLADEKRLALATVAGDVDLATPQGCLVARLKGCVAAHETEHKKARQRRAARQKAERGLPNWSKAFGYLPGPNGPEPDPRTAPLVKQAYADILAGASLGDVCRQWNGAGAFTVTGRLWTTTALSKFLRKPRNAGLRAYKGARYGPVDRDAIVGKAQWSPLVDEATFWAAQAVLDAPGRAPGRKSVRRHLLTGLAGCGKCGNHLAGSYRTDGRVVYVCKACHGVAILADNIEPILYHIVAERLAMPDAVNLLRRGVYDAAEAETTRLELETLYGELDRLAVERAEGLLTARQVKICTDIVNAKITKLLARQLDQERLRVFDGIPLGTPQVAGAIAELSPDRFRAVLDVLAEVVVQPVGKSGRIFNPERVQVNWR

SEQ ID NO: 7728 - protein, 469 aa, synthetic construct
MCYTTPVRAAVYLRISEDRSGEQLGVARQREDCLKLCGQRNWVPVEYLDNDVSASTGKRRPAYEQMLADITAGKIAAVVAWDLDRLHRRPIELEAFMSLADEKRLALATVAGDVDLATPQGRLVARLKGSVAAHETEHKKARQRRAARQKAERGYPNWSKAFGYRPGPNGPEPDPRTAPLVRQAYADILAGASLGDVCRQWNDAGAFTITGRPWTTTTLSKFLRKPRNAGLRAYRGARYGPVDRGAIVGKAQWSPLVDEATFWAAQAVLDAPGRAPGRKSVRRHLLTGLAGCGKCGNRLAGSYRTDGRIVYVCKACHGVAILADNIEPILYHIVAERLAMPDAVDLLRREIHDAAEAETIRLELETLYDELDRLAVERAEGLLTARQVKISTDIVNAKITRLQARQLDQERLRVFDGIPLGTPQVAGMIAELSPDRFRAVLDVLAEVVVQPVGKGGRIFNPERVQVNWR

SEQ ID NO: 7729 - protein, 452 aa, synthetic construct
MKAAIYIRVSTREQVENYSIQAQTEKLTALCRSKDWDVYDIFIDGGYSGSNMNRPALNEMLSKLHEIDAVVVYRLDRLSRSQRDTITLIEEYFLKNNVEFVSLSETLDTSSPFGRAMIGILSVFAQLERETIRDRMVMGKIKRIEAGLPLTTAKGRTFGYDVIDTKLYINEEEAKQLQLIYDIFEEEQSITFLQKRLKKLGYKVRTYNRYNSWLTNDLYCGYVSYKDKVHVKGIHEPIISEEQFYRVQEIFTRMGKNPNMNRGSASLLNNLVVCSKCGLGFVHRRKDTMSRGKKYHYRYYSCKTYKHTHELEKCGNKIWRADKLEELIINRVHDYSLAGRNVDKGDELDILSEKLKIEHAKKKRLFDLYINGSYEVSELDSMMNDIDAQINYYESQIGANEELKKNKKIQENLADLATADFDSLEFREKQRYLKSLINKIYIDGEQVTIEWQ

SEQ ID NO: 7730 - protein, 452 aa, synthetic construct
MKAAIYIRVSTREQVENYSIQAQTEKLTALCRSKDWDVYDIFIDGGYSGSNMNRPALNEMLSKLHEIDAVVVYRLDRLSRSQRDTITLIEEYFLKNNVEFVSLSETLDTSSPFGRAMIGILSVFAQLERETIRDRMVMGKIKRIEAGLPLTTAKGRTFGYDVIDTKLYINEEEAKQLQLIYDIFEEEQSITFLQKRLKKLGFKVRTYSCYNSWLTNDLYCGYVSYKDKVHVKGVHEPIISEEQFYRVQEIFTRMGKNPNMNRDSASLLNNLVVCSRCGLGFVHRRKDTMSRGKKYHYRYYSCKTYKHTHELEKCGNKIWRADKLEELIINRVNNYSFASRDVDKEDELDSLNEKLKVEHAKKKRLFDLYINGSYEVSELDSMMNDIDARINYYESQIEANEELKKNKKIQENLANLATVDFNSLEFREKQLYLKSLINKIYIDDEQVTIEWL

SEQ ID NO: 7731 - protein, 485 aa, synthetic construct
MTKKVAIYTRVSTTNQAEEGFSIDEQIDRLTKYAEAMGWLVSDTYTDAGFSGARLERPAMQRLINDIENKAFDTVLVYKLDRLSRSVRDTLYLVKDVFTKNKIDFISLNESINTSSAMGSLFLTILSAINEFERENIKERMTMGKLGRAKSGKSMMWTKTAFGYYHNRETGILEIVPLQATIVEQIFTDYLSGISLTKLRDKLNESGHIGKDIPWSYRTLRQTLDNPVYCGYIRFKGSLFEGMHKPIIPYETYLKVQKELEERQQQTYERNNNPRPFQAKYMLSGMARCGYCGAPLKIVLGHKRKDGSRTMKYHCANRFPRKTKGVTVYNDNKKCDSGTYDLSNLENTVIDSLIGFQENNDSLLKIINGNNQPILDTSSFKKQISQIDKKIQKNSDLYLNDFITMDELKVRTDSLQAEKKLLQAKISENKFDDSTDVFELVKTQLGSTPINELSYDNKKKIVNNLVSKVDVTADNVDIIFKFQLA

SEQ ID NO: 7732 - protein, 485 aa, synthetic construct
MTKKVAIYTRVSTTNQAEEGFSIDEQIDRLTKYAEAMGWQVSDTYTDAGFSGAKLERPAMRRLINDIENKAFDTVLVYKLDRLSRSVRDTLYLVKDVFTKNKIDFISLSESIDTSSAMGSLFLTILSAINEFERENIKERMTMGKLGRARSGKSMMWTKTAFGYHHNRKTGILEIVPLQATIVEQIFTDYLSGISLTKLRDKLNEGGHIGKDIPWSYRTLRQTLDNPVYCGYIRFKDSLFVGMHKPIIPYETYQKVQKELEVRQQQTYERNNNSRPFQAKYMLSGMARCGYCGAPLRIVLGHKRKNGSRAMKYHCANRFPRKTKGITVYNDNKKCDSGTYDLSNLENTVIDILIGFQENNDSLLKIINGNNQPIMDTSSFKKQISQIDKKIQKNSDLYLNDFITMDELKDRTDSLQAEKKLLKAKISENKFNDSTDVFELVKTQLGSIPINELSYDNKKKIVNNLVSKVDVTADNVDIIFKFQLA

SEQ ID NO: 7733 - protein, 469 aa, synthetic construct
MSYTTPVRAAVYLRISEDRSGEQLGVARQREDCLKLCDQRRWVPVEYLDNDVSASTGKRRPAYEQMLADITAGKIAAVVAWDLDRLHRRPIELEAFMSLADVKRLALATVAGDVDLATPQGRLVARLKGSVAAHETEHKRARQCRAARQKAERGHPNWSKAFGYLPGPNGPEPDPRTAPLVKQAYADILAGASLGDVCRQWNDAGAFTITGRPWTTTTLSKFLRKPRNAGLRAYKGARYGPVDRDAIVGKAQWSPLVDEATFWAAQAVLDAPGRAPGRKSVRRHLLTGLAGCGKCGNHLAGSYRTDGRVVYVCKACHGIAILADNIEPILYHIVAERLAMPDAVDLLRREIHDAAEAETIRLELETLYGELDRLAVERAEGLLTARQVKISTDIVDAKITKLQACQQDQERLRVFDGIPLGTPQVAGMIAGLSPDRFRAVLDVLAEVVVQPVGKSGRTFNPERVQVNWR

SEQ ID NO: 7734 - protein, 485 aa, synthetic construct
MTKKVAIYTRVSTTNQAEEGFSIDEQIDRLTKYAEAMGWQVSDTYTDAGFSGAKLERPAMQRLINDIENKAFDTVLVYKLDRLSRSVRDTLYLVKDVFTKNKIDFISLNESIDTSSAMGSLFLTILSAINEFERENIKERMTMGKLGRAKSGKSMMWTKTAFGYYHNRRTGILEIVPLQATIVEQIFTDYLSGISLTKLRDKLNESGHIGKDIPWSYRTLRQTLDNPVYCGYIKFKDSLFEGMHEPIIPYETYLKVQKELEERQQQTYERNSNPRPFQAKYMLSGMARCGYCGAPLRIVLGHKRKDGSRTMKYHCANRLPRKTKGVTVYNDNKKCDSGTYDLSSLENAVIDNLIGFQENNDSLLKTINGYNQPILDTSSLKKQISQIDKKIQKNGDLYLNDFITMDELKDRTDSLQAEKKLLKAKISENKFNDSTDVFELVKTQLGSIPINELSYDNKKKIVNNLVSKVDVTADNVDIIFKFQLA

SEQ ID NO: 7735 - protein, 485 aa, synthetic construct
MTKKVAIYTRVSTTNQAEEGFSIDEQVDRLTKYAEAMGWQVSDTYTDAGLSGAKLERPAMQRLINDIENKAFDTVLVYKLDRLSRSVRDTLYLVKDVFTKNKIDFISLSESIDTSSAMGSLFLTILSAINEFERENIKERMTMGKLGRAKSGKSMMWTKTAFGYYHNRKTGILEIVPLQATIVEQIFTDYLSGISLTKLRDKLNESGHIGKDIPWSYRTLRQTLDNPVYCGYIKFKGSLFEGMHKPIIPYETYLKVQKELEERQQQTYERNNNPRPFQAKYMLSGMARCGYCGAPLKIVLGHKRKDGSRTMKYHCANRFPRKTKGVTVYNDNKKCDSGTYDLSNLENTVIDSLIGFQENNDSLLKIINGNNQPILDTSSFKKQISQIDKKIQKNSDLYLNDLITMDELKDRTGSLQAEKKLLKAKISENKFNDSTDVFELVKTQLGSIPINELSYDNKKKIVNNLVSRVDVTADNVDIIFKFQLA

SEQ ID NO: 7736 - protein, 452 aa, synthetic construct
MKAAIYIRVSTQEQVGNYSIQAQTEKLTALCRSKDWDVYDIFIDGGYSGSNMNRPALNEMLSKLHEIDAVVVYRLDRLSRSQRDTTTLIEEYFLKNNVEFVSLSETLDTSSPFGRAMIGILSVFAQLERETIRDRMVMGKIKRIEAGLPLTTAKGRTFGYDVIDTKLYINEEEARQLRLIYDIFEEEQSITSLQKRLKKLGFKVRTYNRYNNWLTNDLYCGYVSYKDKVHVKGIHEPIISEEQFYRVQEIFTRMGKNPNLNRDSASLLNNLVVCSKCGLGFVHRSKDTMSRGKKYHYRYYSCKTYKHTHELEKCGNKTWRADKLEELIINRVNNYSFASRNVDKEDELDSLNEKLKIEHAKKKRLFDLYINGSYEVSELDSMMNDIDAQINYYEGQIEANKELKKNKKIQENLEDLATVDFDSLEFREKQLYLKSLISKIYIDGEQVTIDWL

SEQ ID NO: 7737 - protein, 469 aa, synthetic construct
MSYTTPVRAAVYLRISEDRSGEQLGVARQREDCLKLCDQRKWVPVEYLDNDVSASSGKRRPAYEQMLADITAGKIAAVVAWDLDRLHRRPIELEAFMSLADEKRLALATVAGDVDLATPQGRLVARLKGSVAAHETEHKKARQRRAARQKAERGYPNWSKAFGYLPGPNGPEPDPRTAPLVKQAYADILAGASLGDVCRQWNAAGAFTITGRPWTTATLSKFLRKPRNAGLRAYKGARYGPVDRDAIVGKARWSPLVDEATFWAAQAVLDAPGRAPGRKSVRRHLLTGLAGCGKCGNHLAGSYRTDGRVVYVCKACHGVSILADNIEPILYHVVAEHLAMPDAVDLLRREIHDAAEAEAIRLELETLYGELDLLAVERAEGLLTARQVKISTDIVNAKITKLQARQLDQERLRVLGGIPLGTPQVAGTIAELSPDRFRAVLDVLAEVVVQPVGKSGRIFNPERVQVNWR

SEQ ID NO: 7738 - protein, 452 aa, synthetic construct
MKAAIYIRVSTREQVENYSIQAQTEKLTALCRSKGWDVYDIFIDGGYSGSNMNRPALNEMLSKLHEIDAVVVYRLDRLSRSQRDTITLIEEYFLKNNVEFVSLSETLDTSSPFGRAMIGILSVFAQLERETIRDRMVMGKIKRIEAGLPLTTAKGRTFGYDVIDTKLYINEEEAKQLQLIYDIFEEEQSITSLQKRLKKLGFKVRTYSRYNNWLTNDLYCGYVSYKDKVHVKGIHEPIISEEQFYRVQEIFTRMGKNPNMNRDSASLLNNLVVCSKCGLGFVHRRKDAMSRDKKYHYRYYSCKTYKHIHELEKCGNKIWRADELEELIINRVNNYSLASRNADKEDELDSLNEKLKIEHAKKKRLFDLYINGSYEVSELDSMMDDIDAQIGYYESQIEANEALIKNKKIQENLANLATVDFNSLEFREKQLYLKSLINRVYIDGEQVTIEWL

SEQ ID NO: 7739 - protein, 452 aa, synthetic construct
MKAAIYIRVSTQEQVENYSIQAQTEKLTALCRSKDWDVYDIFIDGGYSGSNMNRPALNEMLSKLHEVDAVVVYRLDRLSRSQRDTITLIEEYFLKNNVEFVSLSETLDTSSPFGRAMIGILSVFAQLERETIRDRMVMGKIKRIEAGLPLTTAKGRTFGYDVIDTKLYINEEEAKQLRLIYDIFEEERSITFLQKRLKKLGFKVRTYSRYNSWLTNDLYCGYVSYKDKVHVRGIHEPIISEEQFYRVQEIFARMGKNPNMNRDSASLLNNLVVCSKCGLSFVHRRKDTTSRGKKYHYRYYSCKTYKHTHELEKCGNKIWRADKLEELIIDRVNNYGLASRNVDKEDELDSLNEKLKIEHAKKKRLFDLYINGSYEVSELDSMMNDIDAQISYYESQIEANEELKKNKKIQESLANLATVDYDSLEFREKQLYLKSLINKIYIDGEQVTIEWL

SEQ ID NO: 7740 - protein, 452 aa, synthetic construct
MKAAIYIRVSTQEQVENYSIQAQTEKLTALCRSKDWDVYDIFIDGGYSGSNMNRPALNEMLSKLHEIDAVIVYRLDRLSRSQRDTITLIEEYFLKNNVEFVSLSETLDTSSPFGRAMIGILSVFAQLERETIRDRMVMGKIKRIEAGLPLTTAKGRTFGYDVIDTKLYINEEEAKQLQLIYDIFEEEQSITFLQKRLKKLGFKVRTYNCYNNWLTNDLYCGYVSYKDKVRVKGIHEPIISEEQFYRVQEIFARMGKNPNMNRDSASLLNNLVVCSRCGLGFVHRRKDTMSRGKKYHYRYYSCKTYKHIHELEKCGNKIWRADKLEELIINRVNNYSFACRNVVREDELDSLNEKLKIELAKKKRLFDLYINGSYEVSELDSMMNDIDAQINYYESRIEANEELKKNKKIQENLANLATVDYDSLEFREKQLYLKSLINKIYIDGEQVTIEWL

SEQ ID NO: 7741 - protein, 469 aa, synthetic construct
MSYTTPVRAAVYLRISEDRSGEQLGVARQREDCLKLCGQRKWVPVEYLDNDVSASTGKRRPAYEQMLADITAGKIAAVVAWDLDRLHRRPVELEAFMSLADEKRLALATVAGDVDLATPQGRLVARLKGCVAAHETEHKKARQRRAARQKAERGLPNWSKAFGYLPGPNGPEPDPRTAPLVKQAYADILADASLGDVCRQWNDAGAFTITGRPWTTTTLSKFLRKPRNAGLRAYKGARYGPVDRDAIVGKAQWSPLVDEATFWAAQAVLDAPGRAPGRKSVRRHLLTGLAGCGKCGSHLAGSYRADGQVVYVCKACHGVSILAVNIEPILYHVVAERLAMPDAVDLLRREIRDAAEAETIRLELETLYGELDRLAVERAEGLLTARQVKISTDIVNVKITKLQARQLDQERLRVFDGIPLGTPQVAGKIAELSPDRFRAVLDVLAEVVVQPVGKSGRIFNPERVQVNWR

SEQ ID NO: 7742 - protein, 452 aa, synthetic construct
MKAAIYIRVSTREQVENYSIQAQTEKLTALCRSKDWDVYDIFIDGGYSGSNMNRPALNEMLSKLHEIDAVVVYRLDRLSRSQRDTITLIEEYFLKNNVEFVSLSETLDTSSPFGRAMIGILSVFAQLERETIRDRMVMGKIKRIEAGLPLTTAKGRTFGYDVIDTKLYINEEEAKQLQLIYDIFEEEQSITFLQKRLKILGFKVHTYNRYNSWLTNDLYCGYVSYKDKVHVKGIHEPIISEEQFYRVQEIFTRMGRNPNVNRDSASLLNNLVVCSKCGLGFVHRRKDTTSRGKKYHYRYYSCKTYKHTHELEKCGNKIWRADKLEELVINRVNNYSFASRNVGKEDELDSLNEKLKIEHAKKKRLFDLYINGSYGVSELDSMMNDIDAQINYYESQIEANEELKKNKKFQENLADLATMDFDSLEFREKQLYLKSLINKIYIDGEQVTIEWL

SEQ ID NO: 7743 - protein, 452 aa, synthetic construct
MKAAIYIRVSTREQVENYSIQAQTEKLTALCRSKDWDVYDIFIDGGYSGSNMNRPALNEMLSKLHEIDAVVVYRLDRLSRSQRDTITLIEEYFLKNNVEFVSLSETLDTSSPFGRAMIGILSVFAQLERETIRDRMVMGKIKRIEAGLPLTTAKGRTFGYDVIDTKLYINEEEAKQLQLIYDIFEEEQSITFLQKRLKKLGFKVRTYSRYNSWLTNDLYCGYVNYKDKVHVKGIHEPIISEEQFHRVQEIFTRMGKNPNMNRDSASLLNNLVVCSKCGLGFVHRRKDTTSRGKKYRYRYYSCKTYKHIHELEKCGNKIWRADKLEELIINRVNNYSLTSRNVDKEDELDSLNEKLKIEHAKKKRLFDLYINGSYEVSELDSMMNDIDAQINHYESQIEANEELKKNKKIQENLADLATVDYDSLEFREKQLYLKSLINKIYIDGEQVTIEWL

SEQ ID NO: 7744 - protein, 485 aa, synthetic construct
MTKKVAIYTRVSTTNQAEEGFSIDEQIDRLTKYAEAMGWQVSDTYTDAGFSGAKLERPAMQRLTNDIENKAFDTVLVYKLDRLSRSVRDTLYLVKDVFTKNKIDFISLNESIDTSSAMGSLFLTILSAINEFERENIKERMTMGKLGRAKSGKSMMWTKTAFGYCHNRKTGILEIVPLQATIVEQIFTDYLSGISLTKLRDKLNESGHIGKDIPWSYRTLRQTLDNPVYCGYIKFKDSLFRGMHKPIIPYETYLKVQKELEERQQQTYERNNNPRPFQAKYMLSGMARCGYCGAPLRIVLGHKRKDGSRTMKYHCANRFPRKTKGVTVYNDNIKCDSGTYDLSNLENTVVDNLIGFQENNDSLLKVINGNNQPILDTSSLERQISQIDKKIQKNSDLYLNDFITMDELKDRTESLQAEKKLLKARISENKSNDSTDVLELVKTQLGSIPINELSYDNKKKIVNNLVSKVDVTADNVDIIFKFQLA

SEQ ID NO: 7745 - protein, 485 aa, synthetic construct
MTKKVAIYTRVSTTNQAEEGFSIDEQIDRLTKYAEAMGWQVSDTYTDAGLSGAKLERPAMQRLINDIENKAFDTVLVYKLDRLSRSVRDTLYLVKDVFTKNKIDFISLNESIDTSSAMGSLFLTILSAINEFERENIKERMTMGKLGRAKSGKSMMWTKTAFGYYHNRKTGILEIVPLQATIVEQIFTDYLSGISLTKLRDKLNESGHIGKDIPWSYRTLRQTLDNPVYCGYIKFKDSLFEGMHKPIIPYETYLKVQKELEERQQQTYERNNNPRPFQAKYMLSGMARCGYCGAPLRIVLGHKRKDGSRTMKYHCANRFPRKTKGATVYNDNKKCDSGTYDLSNLENTVIDNLIGFQENNDSLLKIINGNNRPILDTSSFKKQISQIDKKIQKNSDLYLNDFITMDELKDRTDSLQAEKKLLKAKISENKFSDSTDVFELVKTQLGSIPINELSYDNKKKIVNNLVSKVDVTADNVDIIFKFQLA

SEQ ID NO: 7746 - protein, 452 aa, synthetic construct
MKAAIYIRVSTREQVENYSIQAQTERLTALCRSKDWDVYDIFIDGGYSGSNMNRPALNEMLSKLHEIDAVVVYRLDRLSRSQRDTITLIEEYFLKNNVEFVSLSETLDTSSPFGRAMIGILSVFAQLERETIRDRMVMGKIKRIEAGLPLTTAKGRTFGYDVIDSKLYINEEEARQLQLIYDIFEEEQSITSLQKRLKKLGFKVRTYSRYNNWLTNDLYCGYVSYKDKVHVKGIHEPIISEEQFYRVQEIFTRMGKNPNMNRDSASLLNNLVVCSKCGLGFVHRRKDTVSRGKKYHYRYYSCKTYKHTHELEKCGNKIWRADKLEELITNRVSNHSFASRNVDKEDGLDSLNEKLKLEHAKKKRLFDLYINGSYEVNELDSMMNDIDAQINYYESQIEANEELKKNKKIQENLADLATVDFDSLEFREKQLYLKSLISKIYIDGEQVTIEWL

SEQ ID NO: 7747 - protein, 452 aa, synthetic construct
MKAAIYIRVSTREQVENYSIQAQTEKLTALCRSKDWDVYDIFIDGGYSGSNMNRPALNEMLNKLHEIDAVVVYRLDRLSRSQRDTITLIEEYFLKNNVEFVSLSETLDTSSPFGRAMIGILSVFAQLERETIRDRMVMGKIKRIEAGLPLTTAKGRTFGYDVIDTKLYINEEEAKQLQLIYDIFEEEQSITFLQKRLKKLGFKVRTYNRYNNWLTNDLYCGYVSYKDKVHVKGIHEPIISEEQFYRVQEIFTRMGKNPSMNRDSASLLNGLVVCSKCGLGFVHRRKDTMSRGKKYHYRYYSCKTYKHIHELEKCGNKIWRADKLEELIINRVNNYSFASRNADKEDELDSLNEKLKIEHVKKKRLFDLYINGSYEVCELDSMMNDIDAQINYYESQIEANEELKKNKKIQENLADLATVDFDSLGFREKQLYLKSLINKIYIDGEQVTIEWL

SEQ ID NO: 7748 - protein, 469 aa, synthetic construct
MSYTTLVRAAVYLRISEDRSGEQLGVARQREDCLKLCDQRKWEPVEYLDNDVSASTGKRRPAYEQMLADITAGKIAAVVAWDLDRLHRRPIELEAFMSLADEKRLALATVAGDVDLATPQGRLVARLKGSVAAHETEHKKARQRRAARQKAERGHPNWSKAFGYLPGPNGPEPDPRTAPLVKQAYADILAGASLGDVCRQWNDAGAFTITGRPWTTTALSKFLRKPRNAGLRAYKGAPYGPVDRGAIVGKAQWSPLVDEATFWAAQAVLDAPGRAPGRKSVRRHLLTGLAGCGKCGNHLAGSYRTDGRVVYVCKACHGVAILADNIEPILYHIVAERLAMPDAVDLLRREIHDAAEAEAVRLELETLYGELDCLAVERAEGLLTARQVKISTDIVNAKITELQARQLDQERLRVFGGIPLGTPRVAGVIAELSPDRFRAVLDVLAEVVVQPVGKSGRIFNPERVQVNWR

SEQ ID NO: 7749 - protein, 452 aa, synthetic construct
MKAAIYIRVSTQEQVGNYSIQAQTEKLTALCRSKDWDVYDIFIDGGYSGSNMNRPALNEMLSKLHEIDAVVVYRLDRLSRSQRDTTTLIEEYFLKNNVEFVSLSETLDTSSPFGRAMIGILSVFAQLERETIRDRMVMGKIKRIEAGLPLTTAKGRTFGYDVIDTKLYINEEEAKQLQLIYDIFEEEQSITSLQKRLKKLGFKVRTYNRYNNWLTNDLYCGYVSYKDKVRVKGIHEPIISEEQFYRVQEIFTRMGKSPNMNRDSASLLNNLVVCSKCGLGFVHRRKDTTSRGKKYHYRYYSCKTYKHTHELEKCGNKTWRADKLEELIISRVSNYSFASRNADKEDELDSLNEKLKIEHARKKRLFDLYVNGSYEVSELDSMMNDIDAQINYYESQIEANEELKKNKKIQENLADLATVDFDSLEFREKQLYLKSLINKIYIDGEQVTIEWL

SEQ ID NO: 7750 - protein, 452 aa, synthetic construct
MKAAIYIRVSTREQVENYSIQAQTEKLTALCRSKGWDVYDIFIDGGYSGSNMNRPALNEMLSKLHEIDAVVVYRLDRLSRSQRDTITLIEEYFLKNNVEFVSLSETLDTSSPFGRAMIGILSVFAQLERETIRDRMVMGKIKRIEAGLPLTTAKGRTFGYDVVDTRLYINEEEAKQLQLIYDIFEEEQSITFLQKRLKKLGFKVRTYNRYNNWLTNDLYCGYVSYKDRVHVKGIHEPIISEEQFYRVQEIFTRMGKNPNVNRDSASLLNNLVVCGKCGLGFVHRRKDTMSRNKKYHYRYYSCKTYKHIHELEKCGNKIWRADKLEELVINRVNSYSLASRNVDKEDELDSLNEKLKVEHAKKKRLFDLYINGSCEMSELDSMMDDIDAQISYYESQIEANEELKKNKKIQENLAGLATVDFDSLEFREKQLYLKSLINKIYIDGEQVTIEWL

SEQ ID NO: 7751 - protein, 452 aa, synthetic construct
MKAAIYIRVSTREQVENYSIQAQTEKLTALCRSKDWDVYDIFIDGGYSGSNMNRPALNEMLSKLHEIDAVVVYRLDRLSRSQRDTITLIEEYFLKNNVEFVSLSETLDTSSPFGRAMIGILSVFAQLERETIRDRMVMGKIKRIEAGLPLTTAKGRTFGYDVIDTKLYINEEEAKQLQLIYDIFEEEQSITSLQKRLKKLGFRVRTYNRYSNWLTNDLYCGYVSYKDKVHVKGIHEPIISEEQFYRVQEIFARMGKNPNMNRDSASLLNNLVVCSKCGLGFVHRRKDTMSRGKKYHYRYYSCKTYKHIHELEKCGNKIWRADKLEELIINRVNNHSFASRNVDKEDELDSLNEKLKIEHAKKKRLFDLYINGGYEVSELDCMMNDIDAQINYYESQIKANEELKKDRKIQESLANLATVDYDSLEFREKQLYLKSLINKIYIDGEQVTIEWL

SEQ ID NO: 7752 - protein, 469 aa, synthetic construct
MCYTTPVRAAVYLRISEDRSGEQLGVARQREDCLKLCDQRKWVPVEYLDNDVSASTGKRRPAYEQMLADITAGKIAAVVAWDLDRLHRRPIELEAFMSLADEKRLALATVAGDIDLATPQGRLVARLKGSVAAHETEHKKARQRRAARQKAERGHPNWSRAFGYLPGPNGPEPDPRTAPLVKQAYADILAGASLGDVCRQWNSAGALTITGRPWTTTALSKFLRKPRNAGLRTYKGARYGPVDRDAIVGKAQWSPLVDEATFWAAQAVLDAPGRAPGRKSVRRHLLTGLAGCGKCGNHLAGSYRTDGRVVYVCKACHGIAILADNIEPILYHIVAERLAMPDAVDLLRREIHDAAEAETIRLELETLYGELDRLAVERAEGLLTARQVKISTDIVNAKITKLQAYQQDQERLRVLDGIPLGTPQVAGMIAELSPDRFRAVLDVLAEVVVRPVGKGGRIFNPERVQVNWR

SEQ ID NO: 7753 - protein, 469 aa, synthetic construct
MSYTTPVRAAVYLRISEDRSGEQLGVARQREDCLKLCDQRKWVPVEYLDNDVSASTGKRRPAYEQMLADITAGKIAAVVAWDLDRLHRRPIELEAFMSLADEKRLALATVAGDIDLATPQGRLVARLKGSVAAHETEHKKARQRRAARQKAERGHPNWSKAFGYLPGPNGPEPDPRTAPLVKQAYADILAGASLGDACRQWNDAGAFTITGRPWTTTTLSKFLRKPRNAGLRAYKGARYGPVDRDAIVGKAQWSPLVDEATFWAAQAVLDAPGRAPGRKSVRRHLLTGLAGCGKCGKHLAGSYRTDGRVVYVCKACHGVAILADNIEPILYHIVAERLAMPNAVDLLRREIHDAAEAETIRLELETLYGELDRLAVERAEGLLTARQVKISTDIVNAKITKLQARQLDQERLRVFDGIPLGTPQVAGMIAGLSPDRFRAVLDVLAEVVVQPAGKSGRIFNPERVQVNWR

SEQ ID NO: 7754 - protein, 452 aa, synthetic construct
MKAAIYIRVSTREQVENYSIQAQTEKLTALCRSKDWDVYDIFIDGGYSGSNMNRPALNEMLSKLHEIDAVVVYRLDRLSRSQRDTITLIEEYFLKNNVEFVSLSETLDTSSPFGRAMIGILSVFAQLERETIRDRMVMGKIKRVEAGLPLTTAKGRTFGYDVIDTKLYINEEEAKQLQLIYDIFEEEQSITFLQKRLKKLGFKVRTYNRYNSWLTNDLYCGYVSYKDKVHVKGIHEPIISEEQFRRVQEIFTRTGKNPNMNRDSASLLNNLVVCSKCGLGFVHRRKDTMSRGKKYHYRYYSCKTYKHIHELEKCGNKIWRADELEELIISRVNNYSFASRNVDKEDELDSLNEKLKIEHAKKKRLFDLYINGSYEMSELDSMMNDIDAQINYYESRIEANEELRKNKKIQENLANLATVDYDSLGFREKQLYLKSLINKIYIDGEQVTIEWL

SEQ ID NO: 7755 - protein, 485 aa, synthetic construct
MTKKVAIYTRVSTTNQAEEGFSIDEQIDRLTKYAEAMGWQVSDTYTDAGLSGAKLERPAMQRLINDIENKAFDTVLVYKLDRLSRSVRDTLYLVKDVFTKNKIDFISLNESIDTSSAMGSLFLTILSAINEFERENIRERMTMGKLGRAKSGKSMMWTKTAFGYYHNRKTGILEIVPLQATIVEQIFTDYLSGISLTKLRDKLNESGHIGKDIPWSYRTLRQTLGNPVYCGYIKFKGSLFEGMHKPIIPCETYLKVQKELEERQQQTYERNNNPRPFQAKYMLSGMARCGYCGAPLRIVLGHKRKDGSRTMKYHCANRFPRRTKGVTVYNDNKKCDSGTYDLSNLENAVIDNLIGFQENNDSLLKIINGSNQPILDTSSFEKRISQIDKKIQKNSDLYLNDFITMDELKDRTDSLQAEKKLLKAKISENKFNDSTDVFELVKTQLGSIPINELSYDNKKKIVNNLVNKVDVTADNVDIIFKFQLA

SEQ ID NO: 7756 - protein, 452 aa, synthetic construct
MKAAIYIRVSTREQVENYSIQAQTEKLTALCRSKDWDVYDIFIDGGYSGSNMNRPALNEMLSKLHEIDAVVVYRLDRLSRSQRDTITLIEEHFLKNNVEFVSLSETLDTSSPFGRAMIGILSVFAQLERETIRDRMVMGKIKRIEAGLPLTTARGRTFGYDVIDTKLYINEEEAKQLQLIYDIFEEEQSITFLQKRLKKLGFKVHTYNRYNNWLTNDLYCGYVSYKDKVHVRGIHEPIISEEQFYRVQEIFTRMGKNPNMNRDSASLLSNLVVCSKCGLGFVHRRKDTMSRGKKYHYRYYSCKTYKHIHELEKCGNKIWRADKLEELIISRVNNYSFASRSVDKEDELDSLDEKLKTEHAKKKRLFDLYINGSYEVSELDSMMNDIDAQISYYESQIEADEELKKNKKIQENLANLATVDYDSLEFREKQLYLKSLINKIYIDGEQVTIEWL

SEQ ID NO: 7757 - protein, 452 aa, synthetic construct
MKAAIYIRVSTREQVENYSIQAQTEKLTALCRSKDWDVYDIFIDGGYSGSNMNRPALNEMLSKLHEIDAVVVYRLDRLSRSQRDTITLIEEYFLKNNVEFVSLSETLDTSSPFGRAMIGILSVFAQLERETIRDRMVMGKIKRIEAGLPLTTAKGRTFGYDVIDTKLYVNEEEAKQLQLIYDIFEEEQSITFLQKRLKDLGFKVRTYNRYNNWLTNDLYCGYVSYKDKVHVKGIHEPIISEEQFYRVQEIFTRMGKNPNMNRDSASLLNNLVVCSKCGLGFVHRRKDIMSRGKKYHYRYYSCKTYKHIHELEKCGNKIWRADKLEELVIGRVNSYSLASRNVDKGDELDSLNKKLKVEHAKKKRLFDLYINGSYEVSELDSMMNDIDAQISYYESQIEANEELKKNKKIQENLAYLATVDFDSLEFREKQLYLKSLINKIYIDGEQVTIEWL

SEQ ID NO: 7758 - protein, 452 aa, synthetic construct
MKAAIYIRVSTQEQVENYSIQAQTEKLTALCRSKDWDVYDIFIDGGYSGSNMNRPALNEMLSKLHEIDAVVVYRLDRLSRSQRDTTTLIEEYLLKNNVEFVSLSETLDTSSPFGRAMIGILSVFAQLERETIRDRMVMGKIKRIEAGLPLTTAKGRTFGYDVIDTRLYINEGEAKQLQLIYDIFEEEQSITFLQKRLKKLGFKVHSYNRYNNWLTNDLYCGYVSYKDKVHVKGIHEPIISEEQFYRVQEIFARMGKNPNMNRDSASLLNNLVVCSKCGLGFVHRRKDTMSGGRKYHYRYYSCKTYKHTHELEKCGNKTWRADKLEELIINRVNNYSFASRNVDKDDELDSLNEKLRIEHAKKRRLFDLYINGSYEVSELDSMMNDIDAQINYYESQIEANEELRKNKKTQENLADLAAVDFDSLELREKRLYLKSLINKIYIDGEQVTIEWL

SEQ ID NO: 7759 - protein, 452 aa, synthetic construct
MKAAIYIRVSTREQVENYSIQAQTEKLTALCRSKDWDVYDIFIDGGYSGSNMNRPALNEMLSKLHEIDAVVVYRLDRLSRSQRDTITLIEEYFLKNNVEFVSLSETLDTSSPFGRAMIGILSVFAQLERETIRDRMVMGKIKRIEAGLPLTTAKGRTFGYDVIDTKLYINEEEARQLQLIYDIFEEERSITFLQKCLKKLGFKVRTYNCYNNWLTNDLYCGYVSYKDKVHVKGIHEPIISEEQFYRVQEIFTRMGKNPNMNRDSASLLNNLVVCGKCGLGFVHRRKDIMSRGKKYHYRYYSCKTYKHIHELEKCGNKIWRADKLEELIMNRVNNYSLAGRNVDKEDELDSLNEKLKIEHAKKKRLFDLYINGSYEASELDSMMNDIDAQINYYESQIEANEELKKDKKIQENLANLATVDFDSLEFREKQLYLKSLISKIYIDGEQVTIEWL

SEQ ID NO: 7760 - protein, 485 aa, synthetic construct
MTKKVAIYTRVSTTNQAEEGFSIDEQIDRLTKYAEAMGWRVSDTYTDAGFSGAKLERPAMQRLINDIENKAFDTVLVYKLDRLSRSVRDTLYLVKDVFTKNKIDFISLSESIDTSSAMGSLFLTILSAINEFERENIKERMTMGKLGRAKSGKSMMWTKTAFGYYHNRKTGILEIVPLQATIVEQIFTDYLSGISLTKLRDKLNESGHIGKDIPWSYRTLRQTLDNPVYCGYIKFKDSLFEGMHKPIIPYETYLKVQKELEERQQQTYVRNNNPRPFQAKYMLSGMARCGYCGAPLKIVLGRKRKDGSRTMKYHCANRFPRKTKGVTVYNDNKKCDSGTYDLSNLENTVIDNLIGFQKNNDDLLKIVNGNNQPILDTSSFEKQISQIDKKIQKNRDLYLNDLITMDELEERTDSLQAEKKLLKAKISENKFNDSTDVFELVKTQLGSIPINELSYDSKKKIVNNLVSKVDVTADNVDIIFKFQLA

SEQ ID NO: 7761 - protein, 452 aa, synthetic construct
MKAAIYIRVSTREQVENYSIQAQTEKLTALCRSRDWDVYDIFIDGGYSGSNMNRPALNEMLSKLHEIDAVVVYRLDRLSRSQRDTITLIEEYFLKNNVEFVSLSETLDTSSPFGRAMIGILSVFAQLERETIRDRMVMGKIKRVEAGLPLTTAKGRTFGYDVIGTKLYINEEEAEQLRLIYDIFEEEQSITFLQERLKKLGFKVHTYNRYNNWLTNDLYCGYVSYKDKVHVKGIHEPIISEEQFYRVQEIFTRMGKNPNMNRDSASLLNSLVVCSKCGLGFVHRRKDTTSRGKKYQYRYYSCKTYKHTHELEKCGNKIWRADKLEELIINRVNNYSIASRNVDKEDELDSLNEKLKIEHAKKKRLFDLYINGSYEVSELDSMMNDIDARINYYESQIEANEELKKNKKIQENLANLATVDYDSLEFREKQLYLKGLINKIYIDGEQVTIEWL

SEQ ID NO: 7762 - protein, 452 aa, synthetic construct
MKAAIYIRVSTREQVENYSIQAQTEKLTALCRSKDWEVYDIFIDGGYSGSNMNRPALNEMLGKLHEIDAVVVYRLDRLSRSQRDTITLIEEYFLKNNVEFVSLSETLDTSSPFGRAMIGILSVFAQLERETIRDRMVMGKIKRIEAGLPLTTAKGRTFGYDVIDAKLYINEEEAKQLQLIYDIFEEEQSITFLQKRLKKLGFKVRSYNRYNNWLTNDLYCGYVSYKDKVHVKGIHEPIISEEQFYRVQEIFTRMGKNPNMNRESASLLNNLVVCSKCGLGFVHRRKDAMSRDKKYHYRYYSCKTYKHIHELEKCGNKIWRADKLEELIINRVNNYSLASRDVDKEDELDSLNEKLKIEHAKKKRLFDLYINGSYEVSELDSMMSDIDAQINYYESQIEANEELKKNKKIQEDLAHLATVDFNSLEFREKQLYLKGLINKIYIDGEQVIIEWL

SEQ ID NO: 7763 - protein, 485 aa, synthetic construct
MTKKVAIYTRVSTTNQAEEGFSIDEQIDRLTKYAEAMGWQVSDTYTDAGFSGAKLERPAMRRLINDIEDKAFDTVLVYKLDRLSRSVRDTLYLVKNVFTKNKIDFISLNESIDTSSAMGSLFLTILSAINEFERENIKERMTMGKLGRAKSGKSMMWTKTAFGYHHNRKTGILEIVPLQATIVEQIFTDYLSGISLTKLRDKLNEGGHIGKDIPWSYRTLRQTLDNPVYCGYIKFKDSLFEGMHKPIIPYETYLKVQKELEERQQQTYERNNNPRPFQAKYMLSGMARCGYCGAPLKIVLGHKRKDGSRTMKYHCANRFPRKTKGVTVYNDNKKCDSGTYDLSNLENTVIDNLIGFQENNDSLLKIINGNNQPILDTSSFKKQISQIDKKIQKNSDLYLNDFITMDELKDRTDSLQAEKKLLKAKISENRFNDSTDVFELVKTQLGSIPINELSYDNKKKIVNNLVSKVVVTADNVDIIFKFQLA

SEQ ID NO: 7764 - protein, 485 aa, synthetic construct
MTKKVAIYTRVSTTNQAEEGFSVDEQIDRLTKYAEAMGWQVSDTYTDAGFSGAKLERPAMQRLINDIENKAFDTVLVYKLDRLSRSVRDTLYLVKDVFTKNKIDFISLNESIDTSSAMGSLFLTILSAINEFERENIKERMTMGKLGRAKSGKSMMWTKTAFGYYHNRKTGILEIVPLQATIVEQIFTDYLSGISLTKLRDKLNESGHIGKDIPWSYRTLRQTLDNPVYCGYIKFKGSLFEGMHKPIIPYETYLKVQKELEERQQQTYERNNNPRPFQAKYMLSGMARCGYCGAPLRIVLGHKRKDGSRTMKYHCANRFPRKTKGVTVYNDNKKCDSGTYDLSNLENTVIDNLIGFQENNDSLLKIINGDNQPILDTSSIEKQISQIDKKIQKNSDLYLNDFITMDELKDRTDSLQAEKELLKAKISENKFNDSTDVFELVKTQLGSIPINELSYDDKKKIVNNLVGEVDVTADNVDIIFKFQLA

SEQ ID NO: 7765 - protein, 469 aa, synthetic construct
MSFTTPVRAAVYLRISEDRSGEQLGVARQREDCLKLCDQRNWVPVEYLDNDVSASTGKRRPAYKQMLADITAGKIAAVVAWDLDRLHRRPIELEAFMSLADERRLALATVAGDVDLATPQGRLVARLKGSVAAHETEHKKARQRRAARQKAERGLPNWSRAFGYLPGPNGPEPDPRTAPLVKQAYADILAGASLGDVCRQWNDAGAFTITGRPWTTTALSKFLRKPRNAGLRAYKGACYGPVDRDAIVGKAQWSPLVDEATFWAAQAVLDAPGRAPGRKSVRRHLLTGLAGCGKCGNHLAGSYRTDGRVAYVCKVCHGVAILADNIEPILYHIVAERLAKPDAVVLLRREIHDAAEAETIRLELETLYGELDRLAVERAEGLLTARQVKISTDIVNAKITKLQARQLDQERLRVLDGIPLGTPQVAGTIAELSPDRFRAVLDVLAEVVVRPVGKGCRIFNPERVQVNWR

SEQ ID NO: 7766 - protein, 452 aa, synthetic construct
MKAAIYIRVSTREQVENYSIQAQTEKLTALCRSKDWDVYDIFIDGGYSGSNMNRPALNEMLGKLHEIDAVVVYRLDRLSRSQRDTITLIEEYFLKNNVEFVSLSETLDTSSPFGRAMIGILSVFAQLERETIRDRMVMGKIKRIEAGLPLTTAKGRTFGYDVIDTKLYINEEEAKQLQLIYDIFEEEQSITFLQKRLKKLGFKVRTYSCYNNWLTNDLYCGYVSYKDKVHVKGIHEPIISEEQFYRVQEIFTRMGKNPNMNRDSASLLSNLVVCSKCGLGFVHRRKDTMRRGKKYHYRYYSCKTYKHIHELEKCGNKIWRADKLEELIINRVNDYSFASRNADKEDELDSLNGKLKIEHAKKKRLFDLYINGSYEVSELDSMMNDIDAQIDYYEGQIEANEELKKNKKIQENPAELATVDFDSLEFREKQLYLKSLINKIYIDGEQVTIEWL

SEQ ID NO: 7767 - protein, 452 aa, synthetic construct
MKAAIYIRVSTQEQVGNYSIQAQTEKLTALCRSKDWDVYDIFIDGGYSGSNMNRPALNEMLSKLHEIDAVVVYRLDRLSRSQRDTTTLIEEYFLKNNVEFVSLSETLDTSSPFGRAMIGILSVFAQLERETIRDRMVMGKIKRIEAGLPLTTAKGRTFGYDVIDTKLYINEEEAKQLRLIYDIFEEEQSITFLQKRLKKLGFKVRTYNRYNNWLTNDLYCGYVSYKDKVHVKGIHEPIISEEQFYRVQEIFARMGKNPNMNRDSASLLSNLVVCSKCGLGFVHRSKDTMSRGKKYHYRYYSCKTYKHTHELEKCGNKTWRADKLEELIINRVNNYSFASRNAGKEDELDSLNEKLKIEHAKKKRLFDLYINGSYEASELDSTMNDIDAQINYYEGQIEAHEELKKNKRIQGNLADLATVDFDSLEFREKQLYLKSLINKIYIDGERVTIEWL

SEQ ID NO: 7768 - protein, 452 aa, synthetic construct
MKAAIYIRVSTREQVENYSIQAQTEKLTALCRSKDWDVYDIFIDGGYSGSNMNRPALNEMLGKLHEIDAVVVYRLDRLSRSQRDTITLIEEYFLKNNVEFVSLSETLDTSSPFGRAMIGILSVFAQLERETIRDRMVMGKIKRVEAGLPLTTAKGRTFGYDVIDTKLYINEEEAKQLQLIYDIFEEEQSITFLQKRLKKLGFKVRTYNRYSNWLTNDLYCGYVSYKDKVHVKGIHEPIISEEQFYRVQEIFTRMGKNPNMNRDSASLLNSLVVCGRCGLGFVHRRKDTMSRGKKYHYRYYSCKTYKHIHELEKCGNKIWRADKLEELIIDRVNNYSFASRNADKEDELDCLNEKLKIEHAKKKRLFDLYINGSYEVSELDSMMNDIDAQISYYESQIEANEEPKKNRRIQENLADLATVDFDSLEFREKQLHLKSLINKIYIDGEQVTIEWL

SEQ ID NO: 7769 - protein, 452 aa, synthetic construct; identical to SEQ ID NO: 4543

SEQ ID NO: 7770 - protein, 470 aa, synthetic construct
MSYTTPVRAAVYLRISEDRSGEQLGVARQREDCLKLCGQRKWVPVEYLDNDVSASTGKRRPAYEQMLADITAGKIAAVVAWDLDRLHRRPIELEAFMSLADEKHLALATVAGDVDLATPQGRLVARLKGSVAAHETEHKKARQRRAARQKAERGYPNWSKAFGYLPGPNGPEPDPRTAPLVKQAYADILAGASLGDVCRQWNDAGALTITGRPWTTTALSKFLRKPRNAGLRIYKGARYGPVDRDAIVGKAQWSPLVDEATFWAAQAVLDAPGRAPGRKSVRRHLLTGLAGCGKCGNHLAGSYRTDGRVVYVCKACHGVAILADNIEPILYQIVAERLAMPDAVDLLRREIHDAAEAETIRLELETLYGELDRLAVERAEGLLTARQVKISTDIVSAKITELQARQLDQERLRVLDGIPLGTPQVAGKIAELSPDRFRAVLNVLAEVVVQPVGKCGRIFNPERVQVSWRK

SEQ ID NO: 7771 - protein, 469 aa, synthetic construct
MSYTTPVRAAVYLRISEDRSGEQLGVARQREDCLKLCDQRKWVPVEYLDNDVSASTGKRRPAYEQMLADITAGKIAAVVAWDLDRLHRRPVELEAFMSLADEKRLALATVAGDVDLATPQGRLVARLKGCVAAHETEHKKARQRRAARQKAERGYPNWSKAFGYLPGPNGPEPDPRAAPLVKQAYTDILAGASLGDVCRQWNDAGAFTITGRPWTTTTLSKFLRKPRNAGLRAYKGARYGPVDRDAIVGKAQWSPLVDEATFWAAQAVLDAPGRAPGRKSVRRHLLTGLAGCGKCGNHLAGSYRTDGQVVYVCKVCHGVSILAVNIVPILYHIVAERLAMPDAVDLLRREIHDAAEAETIRLELETLYGELDRLAVERAEGLLTARQVKISTDIVDAKITKLQARQLDQERLRVLDGIPLGTPQVAGVIAELSPDRFRAVLDVLAEVVVQPVGKSGRISNPERVQVNWR

SEQ ID NO: 7772 - protein, 452 aa, synthetic construct
MKAAIYIRVSTREQVENYSIQAQTEKLTALCRSKGWDVYDIFIDGGYSGSNMNRPALNEMLSKLHEIDAVVVYRLDRLSRSQRDTITLIEEYFLKNNVEFVSLSETLDTSSPFGRAMIGILSVFAQLERETIRDRMVMGKIKRIEAGLPLTTAKGRTFGYDVIDTKLYINEEEAKQLRLIYDIFEEEQSITFLQKRLKKLGFKVHTYNRYNNWLTNDLYCGYVSYKDKVHVKGIHEPIISEEQFCRVQEIFTRMGKNPNMNRGSASLLNNLVVCSKCGLGFVHRRKDAVSRDKKYHYRYYSCKTYKHIHELEKCGNKIWRADELEELIISRVSNYSLASRNGDKEDELDSLNEKLKIEHAKKKRLFDLYINGSYEVSELDSMMNGIDAQINYYESQIEANVELKKNKKIQENLAHLATVDFDSLEFREKQLYLKSLINKIYVDGEQVTIEWL

SEQ ID NO: 7773 - protein, 469 aa, synthetic construct
MSYTTPVRAAVYLRISEDRSGEQLGVARQREDCLKLCGQRKWVPVEYLDNDVSASTGKRRPAYERMLADITAGKIAAVVAWDLDRLHRRPIELEAFMSLADEKRLALATVAGDVDLATPQGRLVARLKGSVAAHETEHKKARQRRAARQKAERGYPNWSKAFGYLPGPNGPEPDPRTAPLVKQAYADILAGASLGDVCRQWNDAGAFTITGRPWTTTTLSKFLRKPRNAGLRAYRGARYGPVDRDAIVGKAQWGPLVDEATFWAAQAVLDAPGRAPGRKSVRRHLLTGLAGCGKCGNHLAGSYRTDGRVVYVCKACHGVSILADIIEPILYRIAAERLAMPDAVDLLRREIQDAAEAETIRLELEILYGELDRLAVERAEGLLTARQVKISTDIVNAKITRLQARQLDQERLRVFDGIPLGTPQVAGMIAELSPDRFRAVLDVLAEVVVQPVGKSGRIFNPERVQVNWR

SEQ ID NO: 7774 - protein, 452 aa, synthetic construct
MKAAIYIRVSTQEQVENYSIQAQTEKLTALCRSRDWDVYDIFIDGGYSGCNMNRPALNEMLSKLHEIDAVVVYRLDRLSRSQRDTITMIEEYFLKNNVEFVSLSETLDTSSPFGRAMIGILSVFAQLERETIRDRMVMGKIKRIEAGLPLTTAKGRTFGYDVIDTKLYINEEEAKQLQLTYDIFEEEQSITFLQKRLKKLGFKVRTYSCYSNWLTNDLYCGYVSYKDKVHVKGIHEPIISEEQFYRVQEIFTRMGKNPNMNRDSASLLNNLVVCSKCGLGFVHRRKDTTSRGKKYHYRYYSCKTYKHTHELEKCGNKIWRADKLEELVINRVNNYSFASRNVDKEDELASLNEKLKIEHAKKKRLFDLYISGSYEVSELDSMMSDIDAQINYYESQIEANEELKRSKKIQENLANLATVDYDSLEFREKQLYLKSLINKIYIDGEQVTIEWL

SEQ ID NO: 7775 - protein, 452 aa, synthetic construct
MKAAIYIRVSTREQVENYSIQAQTEKLTALCRSKDWDVYDIFIDGGYSGSNMNRPALNEMLSKLHEIDAVVVYRLDRLSRSQRDTITLIEEYFLKNNVEFVSLSETLDTSSPFGRAMIGILSVFAQLERETIRDRMVMGKIKRIEAGLPLTTAKGRTFGYNVIDTKLYVNEEEARQLQLIYDIFEEEQSITFLQRRLKELGFKVRTYNRYNNWLTNDLYCGYVSYKDKVHVKGIHEPIISEEQFYRVQEIFARMGKNPNMNRDSASLLNNLVVCNKCGLGFVHRRKDAMSRDKKYHYRYYSCKTYKHIHELEKCGNKIWRADKLEELIINRVNNYSLASRNVDKEDELDSLNEKLKIEHAKKRRLFDLYINGSYEVSELDSMMNDIDAQINYYESRIEANKELKKNKKIQENLADLATVDFDSLEFREKRLYLKSLINKIYIDGEQVTIEWL

SEQ ID NO: 7776 - protein, 485 aa, synthetic construct
MTKKVAIYTRVSTTNQAEEGFSIDEQIDRLTKYAEAMGWQVSGTYTDAGLSGAKLERPAMQRLINDVENKAFDTVLVYKLDRLSRSVRDTLYLVKDVFTKNKIDFISLNESIDTSSAMGSLFLTILSAINEFERENIKERMTMGKLGRAKSGKSMMWTKTAFGYYHNRKTGILEIVPLQATIVEQIFTDYLSGISLTKLRDKLNEGGHIGKDIPWSYRTLRQTLDNPVYCGYIKFKGSLFEGMHKPIIPYETYLKVQKELEERQQQTYERNNNPRPFQAKYMLSGMARCGYCGAPLRIVLGHKRKDGSRTMKYHCANRFPRRTKGVTVYNDNKKCGSGTYDLSNLENTVIDYLIGFQENSDSLLKIIYGSNQPIPDTGSFEKQISQIDKKIQKNSDLYLNDFISMDELKDRTNSLQAEKKLLEAKISESKFNDSTDVFELVKTQLGSIPINELSYDNKKKIVNSLVSKVDVTADNVDIIFKFQLA

SEQ ID NO: 7777 - protein, 469 aa, synthetic construct
MSYTTPMRAAVYLRISEDRSGEQLGVARQREDCLKLCGQRKWVPVEYLDNDVSASTGKRRPAYEQMLADITAGKIAAVVAWDLDRLHRRPVELEAFMSLADEKHLALATVAGDVDLATPQGRLVARLKGCVAAHETEHKKARQRRAARQKAERGYPNWSKAFGYLPGPNGPEPDPRTAPLVKQAYADILAGASLGDVCRRWNDAGAFTITGRPWTTTTLSKFLRKPRNAGLRAYKGARYGPVDRDAIVGKAQWSPLVDEATFWAAQAVLDAPGRAPGRKSVRRHLLTGLAGCGKCGNHLAGSYRTDGRVVYVCKACHGVAILADNIEPILYHIVAERLAMPDAVDLLRREIHDAAEVETIRLKLKTLYGELDRLAVERAEGLLTARQVKISTDIVNAKISKLQARQLDQERLRVFDGIPLGTPQVAGMIAELSPDRFRAVLDVLAEVVVQPVGKSGRIFNPERVQVNWR

SEQ ID NO: 7778 - protein, 452 aa, synthetic construct
MKAAIYIRVSTREQVENYSIQAQTEKLTALCRSKDWDVYDIFIDGGYSGSNMNRPALNEMLSKLHEIDAVVVYRLDRLSRSQRDTITLIEEYFLKNNVEFVSLSETLDTSSPFGRAMIGILSVFAQLERETIRDRMVMGKIKRIEAGLPLTTAKGRTFGYDVIDTRLYINEEEAKQLRLIYDIFEEERSITSLQRRLKKLGFKVRTYNRYNNWLTNDLYCGYVSYKDKVHVKGIHEPIISEEQFYRVQEIFARMGKNPNMNRDSASLLNNLVVCGRCGLGFVHRRKDAMSHGKKYHYRYYSCKTYKHIHELEKCGNKIWRADKLEELIINRVSNYSLASRNADREDELDGLYEKLKTEHAKKKRLFDLYINGSYEVSELDGMMNDIDAQINYYESQIETNEELKRNKKIQENLADLATVDFDSLGFREKQLYLKSLISKIYIDGEQVTIEWL

SEQ ID NO: 7779 - protein, 452 aa, synthetic construct
MKAAIYIRVSTREQVENYSIQAQTEKLTALCRSKDWDVYDIFVDGGYSGSNMNRPALNEMLSKLHEIDAVVVYRLDRLSRSQRDTITLIEEYFLKNNVEFVSLSETLDTSSPFGRAMIGILSVFAQLERETIRDRMVMGKIKRIEAGLPLTTAKGRTFGYDVIDTKLYINEEEAKQLQLVYDIFEEEQSITLLQKRLKKLGFKVRTYNRYNNWLTNDLYCGYVSYKDKVHVKGIHEPIISEEQFYRVQEIFTRMGKNPNVNRDSASLLNNLVVCSKCGLGFVHRRKDTTSRGKKYHYRYYSCKTYKHIHELEKCGNKIWRADKLEELIINRVNNYSFASRNVDKEDELDSMNEKLKIEHAKRKRLFDLYINGSYEVSELDSMMNDIDARINYYESQIEANEELKKIKKIQENLADLATVDFGSLEFREKQLYLKSLINKIYVDGEQVTIEWL

SEQ ID NO: 7780 - protein, 452 aa, synthetic construct
MKAAIYIRVSTQEQVENYSIQAQTEKLTALCRSKDWDVYDIFIDGGYSGSNMNRPALNKMLSKLHEIDAVVVYRLDRLSRSQRDTITLIEEYFLRNNVEFVSLSETLDTGSPFGRAMIGILSVFAQLERETIRDRMVMGKIKRIEAGLPLTTAKGRTFGYDVIDTKLYINEEEAKQLQLIYDIFEEEQSITFLQKRLKKLGFKVRTYSRYNNWLTNDLYCGYVSYKDKVHVKGIHEPIISEEQFYRVQEIFTRMGKNPNMNRDSASLLNNLVVCSKCGLGFVHRRKDTMSRGKKYHYRYYSCKTYKHTHELEKCGNKIWRADKLEELIINRVNNYSFASRNMDKEDELDSLNEKLKIEQAKKKRLFDLYINGSYEVSELDSMMNDIDAQINYYESQIEANEELKKNKKIQENLADLATVDYDSLEFREKQLYLKSLINKIYIDGEQVTIEWL

SEQ ID NO: 7781 - protein, 452 aa, synthetic construct
MKAAIYIRVSTREQVENYSIQAQTEKLTALCRSKDWDVYDIFIDGGYSGSNMNRPALNEMLSKLHEIDAVVVYRLDRLSRSQRDTITLIEEYFLKNNVEFVSLSETLDTSSPFGRAMIGILSVFAQLERETIRDRMVMGKIKRIEAGLPLTTAKGRTFGYDVIDTKLYINEEEAKQLQLIYDIFEEEQSITFLQKRLKKLGFEVRTYNRYNNWLTNDLYCGYVSYKDKVHVKGIHEPIISEEQFYRVQEIFTRMGKYPNMNRGSASLLNNLVVCSKCGLGFVHRRKDTTSRGKKYHYRYYSCKTYKHTHELEKCGNKIWRADKLEELIINRVNNYSFASRNVDKEDELDSPDEKLKIEQATRKRLFDLYINGSYEVSELDSMMSDIDAQINYYESQIEANEELRKNKKIQKNLADLATVDYDSLEFREKQLYLKSLINKIYIDGEQVTIEWL

SEQ ID NO: 7782 - protein, 485 aa, synthetic construct
MTKKVAIYTRVSTTNQAEEGFSIDEQIDRLTKYAEAMGWQVSDTYTDAGFSGAKLERPAMQRLINDIENRAFDTVLVYKLDRLSRSVRDTLYLVKDVFTKNKIDFISLNESINTSSAMGSLFLTILSAINEFERENIKERMSMGKLGRAKSGKSMMWTKTAFGYYHNRKTGILEIVPLQATIVEQIFTDYLSGISLTKLRDKLNESGHIGKDIPWSYRTLRQTLDNPVYCGYIKFKGRLFGGMHKPIIPYETYLKVQKELGERQQQTYERNNNPRPFQAKYMLSGMARCGYCGAPLKIVLGHKRKDGSRTMKYHCANRFPRKTKGITVYNDNKKCDSGTYDLSNLENTVIDNLIGFQENNDSLLKIINGNNQPILDTSSFKKQISQIDKKIQKNSDLYLNDFITMDELKDRTDSLQAEKKLLQAKISENKVNDSTDVFELVRTQLGSIPINELSYDNKKKIVNNLVSKVDVTADNVDIIFKFQLA

SEQ ID NO: 7783 - protein, 485 aa, synthetic construct
MTKKVAIYTRVSTTNQAEEGFSIDEQIDRLTKYAEAMGWQVSDTYTDAGLSGAKLERPAMRRLINDIENKAFDTVLVYKLDRLSRSVRDTLYLVKDVFTKNKIDFISLNESIDTSSAMGSLFLTILSAINEFERENIKERMTMGKLGRAKSGKSMMWTKTAFGYYHNRKTGILEIVPPQATIVEQIFTDYLSGISLTKLRDKLNESGHIGKDIPWSYRTLRQTLGNPVYCGYIKFKDSLFGGMHKPIIPYETYLKVQKELEERQQQTYERNNNPRPFQAKYMLSGMARCGYCGAPLKVVLGHKRKDGSRTMKYHCANRFPRKTKGVTVYNDNKRCNSGTYDLSNLENTVIDNLIGFQENNDSLLKIINGNNQPILDTSSLKEQISQIDKKIQKNSDLYLNDFITMDELKERTDSLQAEKKLLKAKISENKFNDNTDVFELVKTQLGSIPINELSYDNKKKIVNNLVSKVDVTADNVDIIFKFQLA

SEQ ID NO: 7784 - protein, 452 aa, synthetic construct
MKAAIYIRVSTQEQVENYSIQAQTEKLTALCRSKDWDVYDIFIDGGYSGSNMNRPALNEMLSKLHEIDAVVVYRLDRLSRSQRDTTTLIEEYFLKNNVEFVSLSETLDTSSPFGRAMIGILSVFAQLERETIRDRMVMGKIKRIEAGLPLTTAKGRTFGYDVVDTKLYINEEEARQLRLIYDIFEEERSITSLQKRLKKLGFKVRTYNRYNSWLTNDLYCGYVSYKDKVHVRGIHEPIISEEQFYRVQEIFAHMGKNPNMNRDGASLLSNLVVCSKCGLGFVHRSKDTMSRGKKYHYRYYSCKTYKHTHELEKCGNKIWRADKLEELIINRVNNYSFASRNVDKEDELDSLDEKLKIEHAKKKRLFDLYINGGYEVSELDSMMNDIDAQINHYESQIGANEELKKTKKIQGNLADLATVDFDSLEFREKQLYLRSLINKIYIDGEQVTIEWL

SEQ ID NO: 7785 - protein, 452 aa, synthetic construct
MKAAIYIRVSTREQVENYSIQAQTEKLTALCRSKDWDVYDIFIDGGYSGSNMNRPALNEMLSKLHEIDAVVVYRLDRLSRSQRDTITLIEEYFLKNNVEFVSLSETLDTSSPFGRAMIGVLSVFAQLERETIRDRMVMGKIKRIEAGLPLTTAKGRTFGYDVIDTKLYINEEEAKQLQLIYDIFEEEQSITFLQKRLKKLGFKVHTYNRYNNWLTNDLYCGYVSYKDKVHVKGIHEPIISEEQFYRVQEIFTRMGKNPNMNRDSASLLNNLVVCSKCGLGFVHRRKDTASRGKKYHYRYYSCKTYKHTHELEKCGNKIWRADKLEELIINRVHNYSLASRNVDKEDELDSLNEKLKIEHAKKKRLFDLYINGSYNVSELDSMMSDIDAQINYYESQIEANEELKKNKKIQETLADLATVDLDSLEFREKQRYLKSLINKIYVDGEQVTIEWL

SEQ ID NO: 7786 - protein, 485 aa, synthetic construct
MTKKVAIYTRVSTTNQAEEGFSIDEQIDRLTRYAEAMGWQVSGTYTDAGFSGAKLERPAMRRLISDIENKAFDTVLVYKLDRLSRSVRDTLYLVKEVFTKNKIDFISLNESIDTSSAMGSLFLTILSAINEFERENIKERMTMGKLGRAKSGKSMMWTKTAFGYYHNRETGILEIVPLQATIVEQIFTDYLSGISLTKLRDKLNESGHIGKDIPWSYRTLRQTLDNPVYCGYIKFKDSLFEGMHKPIIPYETYLKVQKELEERQQQTYERNNNPRPFQAKYMLSGVARCGYCGAPLRIVLGHKRKDGSRTMKYHCANRFPRKTKGATVYNSNKKCDSGTYDLSNLENTVIDNLIGFQENSDSLLKIINGDNQPILDTSSFERQISQIDKKIQKNSDLYLNDFITMDELKDRTDSLQAEKKLLRAKISENKSNDSTDVFELVKTQLGSIPINELSYDNKKKIVNNLVSKVDVTADNVDIIFKFQLA

SEQ ID NO: 7787 - protein, 452 aa, synthetic construct
MKAAIYIRVSTREQVENYSIQAQTEKLTALCRSKDWDVYDIFIDGGYSGSNMNRPALNEMLSKLHEIDAVVVYRLDRLSRSQRDTITLIEEYFLKNNVEFVSLSETLDTSSPFGRAMIGILSVFAQLERETIRDRMVMGKIKRIEAGLPLTTAKGRTFGYDVIDTKLYINEGEAKQLRLIYDIFEEEQSITSLQKRLKELGFKVRTYNRYNNWLTNDLYCGYVSYKDKVHVKGIHEPIISEEQFYRVQEIFTRMGKNPNMNRNSASLLNNLVVCSKCGLGFVHRRKDAMSRDKKYHYRYYSCKTYKHIHELEKCGNKIWRADKLEELIINRVINYSLAGRNVDKEDELDSLNEKLKIEHAKKKRLFDLYISGSFEVSELDSMMNDIDAQINYYESRIEANVELKKNKKIQENLANLATVDFDSLEFREKQLYLKSLINKIYIDGEQVTIEWL

SEQ ID NO: 7788 - protein, 469 aa, synthetic construct
MSYTTPVRAAVYLRISEDRSGEQLGVARQREDCLKLCDQRKWVPVEYLDNDVSASTGKRRPAYEQMLADITAGKIAAVVAWDLDRLHRRPIELEAFMSLADEKRLALATVAGDVDLATPQGRLVARLKGCVAAHETEHKKARQRRAARQKAERGHPNWSKAFGYLPGPNGPEPDPRTAPLVKQAYADILAGASLGDVCRQWNDAGAFTITGRPWTTTTLSKFLRKPRNAGLRAYKGARYGPVDRDAIVGKAQWSPLVDEATFWAAQAVLDAPGRAPGRKSVRRHLLTGLAGCGKCGNHLAGSYRTDGRVVYVCKACHGVAILADNIEPVLYHIVAERLAMPDAVDLLRREIHDAAEAETIRLELETLYGELDRLAVERAEGLLTARQVKISTDIVNAKIAELQARLLDQERLRVFDGIPLGTPQVTGVIAELSPNRFRAVLDVLAEVVVQPVGKSGRIPNPERVQVNWR

SEQ ID NO: 7789 - protein, 452 aa, synthetic construct
MKAAIYIRVSTREQVENYSIQAQTEKLTALCRSKDWDVYDIFIDGGYSGSNMNRPALNEMLSKLHEIDAVVVYRLDRLSRSQRDTITLIEEYFLKNNVEFVSLSETLDTSSPFGRAMIGILSVFAQLERETIRDRMVMGKIKRIEAGLPLTTAKGRTFGYDVIDTKLYINEEEAKQLQLIYDIFEEEQSITFLQKRLKKLGFKVRTYNRYSNWLTNDLYCGYVSYKDKVHVKGIHEPIISEEQFYRVQEIFTRMGKNPNMNRDSASLLNNLVVCSKCGLSFVHRRKDIMSRGKRYHYRYYSCKTYKHIHELEKCGNKIWRADKLEELIINRVNNYSLASRNVDKEDELDSLNEKLKIEHAKKKRLFDLYINGSYEVSELDSMMNDIDAQINYYESQIEANEELKRNKKIQENLAYLATVDFGSLGFREKQLYLKSLIHKIYIDGEQVTIEWL

SEQ ID NO: 7790 - protein, 485 aa, synthetic construct
MTKKVAIYTRVSTTNQAEEGFSIDEQIDRLTKYAEAMGWQVSDTYTDAGFSGAKLERPAMQRLINDIENKAFDTVLVYKLDRLSRSVRDTLYLVKDVLTKNKIDFISLNESIDTSSAMGSLFLTILSAINEFERENIKERMTMGKLGRAKSGKSMMWTKTAFGYHHNRKTGILGIVPLQATIVEQIFTDYLSGISLTKLRDKLNESGHIGKDIPWSYRTLRQTLDNPVYCGYIKFKDSLFEGMHKPIIPYETYLKVQKELEERQQQAYERNNDPRPFQAKYMLSGMARCGYCGAPLRIVLGHKRKDGSRTMKYHCANRFPRKTRGVTVYNDNKKCDSGTYDLSNPENTVIDSLIGFQESNDSLLKIINGNYQPILDTSSFKKQISQIDKKIQKNSDLYLNDFITMDELKECTDSLQAEKRLLKAKISENKFNDSTDVFELVKTQLGSIPINELSYDNKKKIVNNLVGKVDVTADNVDIIFKFQLA

SEQ ID NO: 7791 - protein, 452 aa, synthetic construct
MKAAIYIRVSTREQVENYSIQAQTEKLTALCRSKDWDVYDIFIDGGYSGSNMNRPALNEMLSKLHEIDAVVVYRLDRLSRSQRDTITLIEEYFLKSNVEFVSLSETLDTSSPFGRAMIGILSVFAQLERETIRDRMVMGKIKRIEAGLPLTTAKGRTFGYDVVGTKLYINEEEAKQLQLIYDIFEEEQSITFLQKRLKRLGFKVRSYNRYNNWLTNDLYCGYVSYKDKVHVKGIHEPIISEEQFYRVQEIFTRMGKNPNMNRGSASLLNNLVVCSKCGLGFVHRRKDIMSRGKKYHYRYYSCKTYKHIHELEKCGNKIWRADKLEELIINRVNNYSTASRNADKEDELDSLNERLKTEHAKKKRLFELYINGSYEVSELDSMMNDIDAQINYYEGQIEANEELRKNKKIQENLANLATVDFDSLEFREKQLYLKSLINKIYIDGEQVTIEWL

SEQ ID NO: 7792 - protein, 452 aa, synthetic construct
MKAAIYIRVSTREQVENYSIQAQTEKLTALCRSKDWDVYDIFIDGGYSGSNMNRPALNVMLSKLHEIDAVVVYRLDRLSRSQRDTITLIEEYFLKNNVEFVSLSETLDTSSPFGRAMIGILSVFAQLERETIRDRMVMGKIKRIEAGLPLTTAKGRTFGYDVIDAKLYINEEEAKQLQLIYDIFEEEQSITSLQKRLKKLGLKVRTYSRYNGWLTNDLYCGYVSYKDKVHVKGIHEPIISEEQFYRVQEIFTRMGKNPNMNRDSASLLNNLVVCSKCGLGFVHRRKDTMSRGKKYHYRYYSCKTYKHTYELEKCGNKIWRADKLEELIISRVNNYSFASRNVDKEDELDGLNEKLRLEHAKKKRLFDLYINGSYEVSELDSMMNDIDAQINYYESQIKANEELKKNEKIQENLADLATVDYDSLEFREKQLYLKSLINKIYIDGEQVTIEWL

SEQ ID NO: 7793 - protein, 469 aa, synthetic construct
MCYTTPVRAAVYLRISEDRSGEQLGVARQREDCLKLCGQRKWVPVEYLDNDVSASTGKRRPAYEQMLADITAGKIAAVVAWDLDRLHRRPVELEAFMSLADEKRLALATVAGDVDLATPQGRLVARLKGCVAAHETEHKKARQRRAARQKAERGLPNWSKAFGYLSGPNGPEPDPRTAPLVKQAYADILAGASLGDVCRQWNDAGAFTITGRPWTTTTLSKFLRKPRNAGLRAYKGARYGPVDRDAIVGKAQWSPLVDEATFWAAQAVLDAPGRAPGRKSVRRHLLTGLAGCGKCGNHLAGSYRTDGQVVYVCKACHGVSILAVNIEPILYHIVAERLAMPDAVDLLRREIHDAAEAETIRLELETLYGELDRLAVERAEGLLTARQVKISTDIVNAKITKLQARQLDQERLRVLDGIPLGTPQVAGVIAELSPDRFRAVLDVLVEVVVQPVGKGGRIFNPERVQVNWR

SEQ ID NO: 7794 - protein, 469 aa, synthetic construct
MSYTTPVRAAVYLRISEDRSGEQLGVARQREDCLKLCDQRRWVPVEYLDNDVSASTGKRRPAYEQMLADITAGKIAAVVAWDLDRLHRRPIELEAFMSLADEKRLALATVAGDVDLATPQGRLVARLKGCVAAHETEHKKARQRRAARQKAERGHPNWSKAFGYLPGPNGPEPDPRAAPLVKQAYADILAGASLGDVCRQWNDAGAFTITGRPWTTTTLSKFLRKPRNAGLRAYKGARYGPVDRDAIVGKAQWSPLVDEATFWAAQAVLDAPGRAPGRKSVRRHLLTGLAGCGKCGNHLAGSYRTDGRVVYVCKACHGVAILADNIEPILYHIVAERLAMPDAVDLLCREIHDVAEAETIRLELETLYGELDRLAVERAEGLLTARQVKISTDIVNAKITKLQARQQDQERLRVLDGIPLGTPQVAGTIAELSPDRFRAVLDVLAEVVVQPVGKSGRVFNPERVQVNWR

SEQ ID NO: 7795 - protein, 485 aa, synthetic construct
MTKKVAIYTRVSTTNQAEEGFSIDEQIDRLTKYAEAMGWQVSDTYTDAGFSGARLERPAMQRLINDIENKAFDTVLVYKLDRLSRSVRDTLYLVKDVFTKNKIDFISLNESINTSSAMGSLFLTILSAINEFERENIKERMTMGKLGRAKSGKSMMWTKTAFGYYHNRKTGILEIVPLQATIVEQIFTDYLSGISLTKLRDKLNESGHIGKDIPWSYRTLRQTLDNPVYCGYIKFKDSLFEGMHKPIIPYETYLKVQKELEERQQQTYERNNNPRPFQAKYMLSGMARCGYCGAPLKIVLGHKRKDGSRTMKYHCANRFPRKTKGVTVYNDNKKCDSGSYDLSNLENTVIGNLIGFQENDDSLLKIINGNNQPIQDTSSFKKQISQIDKKIQKNSDLYLNDFITMDELKDRTDSLQAEKKLLKAKISENKFSDSTDVFELVKTQLGSIPINELSYDNKKKIVNNLVSKVDVTADNVDIIFKFQLA

SEQ ID NO: 7796 - protein, 485 aa, synthetic construct
MTKKVAIYTRVSTTYQAEEGFSVDEQVDRLTKYAEAMGWQVSDTYTDAGFSGAKLERPAMQRLINDIENKAFDTVLVYKLDRLSRNVRDTLYLVKDVFTKNKIDFISLNESIDTSSAMGSLFLTILSAINEFERENIKERMTMGKLGRAKSGKSMMWTKTAFGYYHNRKTGILEIVPLQATIVEQIFTDYLSGISLTKLRDKLNERGHIGKDIPWSYRTLRQTLDNPVYCGYIKFKDSLFKGMHKPIIPYETYLKVQKELEERQQQTYERNNNPRPFQAKYMLSGMARCGYCGAPLRIVLGHKRKDGSRTMKYHCANRFPRKTKGVTVYNDNKKCDSGTYDLSNLENTVIDNLIGFQENNDSLLKIINGNNQPIPDTSSFKEQISQIDKKIQKNSDLYLNDFITMDELKERTDSLQAEKKLLEAKISENKFNDSTDVFELVKTQLGSIPINELSYDNKKKIVNNLVSKVDVTADSVDIVFKFQLA

SEQ ID NO: 7797 - protein, 469 aa, synthetic construct
MSYTTPVRAAVYLRISEDRSGEQLGVARQREDCLKLCDQRKWVPVEYLDNDVSASTGKRRPAYEQMLADITAGKIAAVVAWDLDRLHRRPIELEAFMSLADEKRLALATVAGDVDLSTPQGRLVARLKGSVAAHETEHKKARQRRAARQKAERGHPNWSKAFGYLPGPNGPEPDPRTAPLVKQAYADILAGASLGDVCRQWNDAGAFTITGRPWTTTTLSKFLRKPRNAGLRAYRGARYGPVDRNTIVGKAQWSPLVDEATFWAAQAVLDAPGRAPGRKSVRRHLLTGLAGCGKCGNHLAGSYRTDGRVVYVCKACHGVAILADNIEPILYHIVAERLAMPDAVDLLRREIHDAAEAETIRLELETLYGELDRLAVERAEGLLTARQVKISTDIVNAKITKLQARQLDQERLRVFDGIPLGTPQVAGMIAKLSPNRFRAVLDVLAEVVVQPVGKRGRAFNPERVQVNWR

SEQ ID NO: 7798 - protein, 452 aa, synthetic construct
MKAAIYIRVSTREQVENYSIQAQTEKLTALCRSKDWDVYDIFIDGGYSGSNMNRPALNEMLSKLHEIDAVVVYRLDRLSRSQRDTITLIEEYFLKNNVEFVSLSETLDTSSPFGRAMIGILSVFAQLERETIRDRMVMGKIKRIEAGLPLTTAKGRTFGYDVIDTKLYINEEEAKQLQLIYDIFEEEQSITFLQKRLKKLGFKVHTYNRYNNWLTNDLYCGYVSYKDKVHVKGIHEPIISEEQFYRVQEIFTRMGKNPNMNRDSASLLNNLVVCSKCGLGFVHRRKDTTSRGKKYHYRYYSCKTYKHTHELEKCGNKIWRADKLEELIINRVNNYSFASRNVHKEDELDSLNEKLKIEHAKRKRLFDLYINGSYEVSELDSMMNDIDAQINYYESRIEANEELKKNKKIQENLANLATVDFDGLEFREKQLYLRSLINKIYIDGEQVTIEWL

SEQ ID NO: 7799 - protein, 452 aa, synthetic construct
MKAAIYIRVSTREQVENYSIQAQTEKLTALCRSKDWDVYDIFVDGGYSGSNMNRPALNEMLSKLHEIDAVVVYRLDRLSRSQRDTITLIEEYFLKNNVEFVSLSETLDTSSPFGRAMIGILSVFAQLERETIRDRMVMGKIKRIEAGLPLTTAKGRTFGYDVIDTKLYINKEEAKQLQLIYDVFEEEQSITFLQKRLKKLGFKVRSYNRYSNWLTNDLYCGYVSYKDRVHVKGIHEPIISEEQFYRVQEIFTRMGKNPNMNRESASLLNSLVVCGKCGLGFVHRRKDTMSRGKKYHYRYYSCKTYKHIHELEKCGNKIWRADKLEELIINHVNNYSLASRNVDKEDELDSLNERLKIEHARKKRLFDLYINGSYEVSELDSMMNDIDAQINYYESQIEANEELRKNKKIQENLAYLATVDFDSLEFREKQLYLKSLINKIYIDGEQVTIEWL

SEQ ID NO: 7800 - protein, 485 aa, synthetic construct
MTKKVAIYTRVSTTNQAEEGFSIDEQIDRLTKYAEAMGWQVSDTYTDAGFSGAKLERPAMQRLINDIENKAFDTVLVYKLDRLSRSVRDTLYLVKDVFTKNKIDFISLSESINTSSTTGSLFLTILSAINEFERENIKERMTMGKLGRAKSGKSMMWTKTAFGYYHDRKTGILEIVPLQATIVEQIFTDYLSGISLTKLRDKLNESGHIGKDIPWSYRTLRQTLGNPVYCGYIKFKDSLFEGMHKPIIPYETYLKVQKELEKRQQQTYERNNNPRPFQAKYMLSGMARCGYCGAPLKIVLGHKRKDGSRTMKYHCANRFPRTTKGVTVYNDNKKCDSGTYDLSNLENTVIDNLIGFQENDDSLLRIINGNNQPILDTSSFKKQISQIDKKIQKNSDLYLNDFITMDELKDRTDSLQAEKKLLEAKISENKFNDSTDVFELVKTQLGSTPINELSYDNKKKIVNNLVSKVDVTADNVDIIFKFQLA

SEQ ID NO: 7801 - protein, 469 aa, synthetic construct
MCYTTPVRAAVYLRISEDRSGEQLGVARQREDCLKLCGQRKWVPVEYLDNDVSASTGKRRPAYEQMLADITAGKIAAVVAWDLDRLHRRPIELEAFMSLADEKRLALATVAGDVDLATPQGRLVARLKGCVAAHETEHKKARQRRAARQKAERGLPNWSKAFGYLPGPNGPEPDPRTAPLVKQAYADILAGASLGDVCRQWNDAGAFTITGRPWTTTTLSKFLRKPRNAGLRAYKGARYGPVDRDAIVGKAQWSPLVDEATFWAAQAVLDAPGRAPGRKSVRRHLLTGLAGCGKCGNHLAGSYRTDGRVVYVCKACHGVSILAVNIEPILYHIVAERLAMPDAVDLLRHEIHDAAEAEAIRLELETLYGELDRLAVERAEGLLTARQVKISTDIVNAKIAKLQARQLDQGRLHVLDGIPLGTPQVAGMIAELSPDRFRAVLDVLAEVVVQPVGKGGRTFNPERVQVNWR

SEQ ID NO: 7802 - protein, 485 aa, synthetic construct
MTKKVAIYTRVSTTNQAEEGFSIDEQIDRLTKYAEAMGWQVSDTYTDAGFSGAKLERPAMQRLINDIENKAFDTVLVYKLDRLSRSVRDTLYLVKDVFTKNKIDFISLNESINTSSAMGSLFLTILSAINEFERENIKERMTMGKLGRAKSGKSMMWTKTAFGYYHNRKTGILEIVPLQATIVEQIFTDYLSGISLTKLRDKLNESGHIGKDIPWSYRTLRQTLDNPVYCGYIKFKGSLFEGMHKPIIPYETYLKVQKELEERQQQAYERNNNPRPFQAKYMLSGMARCGYCGAPLKIVLGHKRKDGSRTMKYHCANRFPRKTKGITEYNDNKKCNSGTYDLSNLENTVIDNLIGFQENNGSLLKIIDGDNQPILDTSSLKKQISQIDKKIQKNSDLYLNDFITMDELRDRTDSLQAEKELLKAKISESKFNDSTDVFELVKTQLGSIPINELSYDNKKKIVNNLVSKVDVTADNVDIIFKFQLA

SEQ ID NO: 7803 - protein, 469 aa, synthetic construct
MSYTTPVRAAVYLRISEDRSGEQLGVARQREDCLKLCDQRKWVPVEYLDNDVSASTGKRRPAYEQMLADITAGKIAAVVAWDLDRLHRRPIELEAFMGLADEKRLALATVAGDVDLATPQGRLVARLKGSVAAHETEHKKARQRRAARQKAERGYPNWSKAFGYLPGPNGPEPDPRTAPLVKQAYADILAGASLGDVCRRWNGAGAFTITGRPWTTTTLSKFLRKPRNAGLRAYRGARYGPVDRDAIVGKAQWSPLVDEATFWAAQTVLDAPGRAPGRKSVRRHLLTGLAGCGKCGNHLAGSYRTDGQVVYVCKACHGIAILADNIEPILYHIVAERLAMPDAVDLLRREIHDAAEAETIRLELETLYGELDRLAVERAEGLLTARQVKISTDIVNAKITKLQARQLDQERLRVFDGIPLGTPQVAGTIAELSPDRFRAVLDVLAEVVVQPVGKGGRIFNPERVQVNWR

SEQ ID NO: 7804 - protein, 485 aa, synthetic construct
MTKKVAIYTRVSTANQAEEGFSIDEQIDRLTKYAEAMGWQVSDTYTDAGFSGAKLERPAMQRLINDIENKAFDTVLVYKLDRLSRSVRDTLYLVREVFTKNKIDFISLSESIDTSSAMGSLFLTILSAINEFERENIKERMTMGKLGRAKSGKSMMWTKTAFGYYHNRKTGILEIVPLQATIVEQIFTDYLSGISLTKLRDKLNESGHIGKDIPWSYRTLRQTLDNPVYCGYIKFKGSLFEGMHKPIIPYETYLKVQKELEKRQQQTYERNNNPRPFQAKYMLSGMARCGYCGAPLRIVLGHKRKDGSRTMKYHCTNRFPRKTKGVTVYNDNKKCDSGTYDLGNLENTVIDNLIGFQENDDSLLKIINGNNQSILDTSSFKEQISQIDKKIQKNSDLYLNDFITMDELKDRTDSLRAEKKLLKAKISENEFNDSTDVFELVKTQLGSIPINELSYDNKKKIVNNLVSKVDVTADNVDIIFKFQLG

SEQ ID NO: 7805 - protein, 452 aa, synthetic construct
MKAAIYIRVSTREQVENYSIQAQTEKLTALCRSKDWDVYDIFVDGGYSGSNMNRPALNEMLSKLHEIDAVVVYRLDRLSRSQRDTITLIEEYFLKNNVEFVSLSETLDTSSPFGRAMIGILSVFAQLERETIRDRMVMGKIKRIEAGLPLTTAKGRTFGYDVIDTKLYINEEEAKQLQLIYDIFEEEQSITSLQKRLKKLGFKVRTYNRYNNWLTNDLYCGYVSYKDKVHAKGIHEPIISEEQFYRVQEIFARMGKNPNMNRDSASLLNNLVVCSKCGRGFVHRRKDIMSRGKEYHYRYYSCKTYKHIHELEKCGNKIWRADKLEELIINRVNNYSLACRNVGKEDELGSLNEKLKAEHAKKKRLFDLYINGSYEVSELDSMMNDIDAQINYYESQIEANEELKRNKKIQENLADLATVDFDSLEFREKQLYLKSLINKIYIDGEQVTIEWL

SEQ ID NO: 7806 - protein, 452 aa, synthetic construct
MKAAIYIRVSTREQVENYSIQAQTEKLTALCRSKDWDVYDIFIDGGYSGSNMNRPALNEMLSKLHEIDAVVVYRLDRLSRSQRDTITLIEEYFLKNNVEFVSLSETLDTSSPFGRAMIGILSVFAQLERETIRDRMVMGKIKRIEAGLPLTTAKGRTFGYDVIDTKLYINEEEAKQLRLIYDIFEEEQSITFLQKRLKKLGFKVRTYNRYNNWLTNDLYCGYVSYKDKVHVKGIHEPIISEEQFNRVQEIFTRMGKNPNMNRASASLLNNLVVCGKCGLGFVHRRKDTMSRDKKYHYRYYSCKTYKHIHELEKCGNKIWRADKLEELILNRVNNYSLASRDADKEDELDSLNEKLKIEHAKKKRLFELYISGSYEVSELDSMMSDIDAQINYYESRIEANEELKKNKKIQENLANLATVDFGSLEFREKQLYLKSLINKIYIDGEQVTIEWL

SEQ ID NO: 7807 - protein, 452 aa, synthetic construct
MKAAIYIRVSTREQVENYSIQAQTEKLTALCRSKDWDVYDIFIDGGYSGSNMNRPALNEMLSKLREIDAVVVYRLDRLSRSQRDTITLIEEYFLKNNVEFVSLSETLDTSSPFGRAMIGILSVFAQLERETIRDRMVMGKIKRIEAGLPLTTAKGRTFGYDVIDTKLYINEEEAKQLRLIYDIFEEEQSITFLQKRLKKLGYKVRTYSRYTSWLTNDLYCGYVSYKDKVHVKGIHEPIISEEQFYRVQEILTRMGKNPNMNRDSASLLNNLVVCSKCGLSFVHRRKDTTSRGKKYHYRYYSCKTYKHTHELEKCGNKIWRADKLEELIINRVNNYSFASRSVDKEDELDSLNEKLNIEHAKKKRLFDLYINGSYNVSELDSIMNDIDAQINYYESQIETNEELRKNKKIRENLADLATVDFDSLGFREKQRYLKSLINKIYIDGEQVTIEWL

SEQ ID NO: 7808 - protein, 469 aa, synthetic construct
MSYTTPVRAAVYLRISEDRSGEQLGVARQREDCLKLCGQRKWVPVEYLDNDVSASTGKRRPAYEQMLADITAGKIAAVVAWDLDRLHRRPIELEAFMSLADEKHLALATVAGDVNLATPQGRLVARLKGCVAAHETEHKKARQRRAARQKAERGLPNWSKAFGYLPGPNGPEPDPRTTPLVKQAYADILAGASLGDVCRQWNGAGAFTITGRPWTTTTLSKFLRKPRNAGLRAYKGARYGPVDRDAIVGKAQWSPLVDEATFWAAQAVLDAPGRAPGRKSVRRHLLTGLAGCGKCGNHLAGSCRADGRVVYVCKACHGVSILAVNIEPILYHIVAERLAMPDAVDLLRRETRDAAEADTIRLELETLYGELDRLAVERAEGLLTARQVKISTDIVNAKITKLQARQLDQERLRVLDGIPLGTPQVAGMIAELSPDRFRAVLDVLAEVVVQPVGKSGRVFNPKRVQVNWR

SEQ ID NO: 7809 - protein, 452 aa, synthetic construct
MKAAIYIRVSTQEQVGNYSIQAQTEKLTALCRSKDWDVYDIFIDGGYSGSNMNRPALNEMLSKLHEIDAVVVYRLDRLSRSQRDTTTLIEEYFLKNNVEFVSLSETLDTSSPFGRAMIGILSVFAQLERETIRDRMVMGKIKRIEAGLPLTTAKGRTFGYDVIDTKLYINEEEAKQLQLIYDIFEEEQSITSLQKRLKKLGFKVHTYNRYNNWLTNDLYCGYVSYKDKVHVKGIHEPIISEEQFYRVQEIFTRMGKNPNLNRDSASLLNNLVVCSKCGLGFVHRSKDTMSRGKKYHYRYYSCKTYKHTHELEKCGNKTWRADKLEELIINRVSNYSFASRNVDKEDELDSLSEKLETERAKKKRLFDLYINGSYEVSELDSRMNDIDAQINYYESQIEANEGLRKNRKIQENLADLATVDFDGLEFRDKQLYLKSLINKIYIDGEQVTIEWL

SEQ ID NO: 7810 - protein, 452 aa, synthetic construct
MKAAIYIRVSTQEQVGNYSIQAQTEKLTALCRSKDWDVYDIFIDGGYSGSNMNRPALNEMLSKLHEIDAVVVYRLDRLSRSQRDTTTLIEEYFLKNNVEFVSLSETLDTSSPFGRAMIGILSVFAQLERETIRDRMVMGKIKRIEAGLPLTTAKGRTFGYDVIDTKLYINEEEAKQLQLIYDIFEEEQSITSLQKRLKKLGFKVRTYNRYNNWLTNDLYCGYVSYKDKVHVKGIHEPIISEEQFYRVQEIFTRMGKSPNMNRDSASLLNNLVVCSKCGLSFVHRSKDTMSRGKKYHYRYYSCKTYKHTHELEKCGNKTWRADKLEELIISRVNNYSFASRSVDKEDELDSLNEKLKIEHAKKRRLFDLYINGSYEVSELDSMMNDIDAQISYYESQIEANEELKKNKKIRENLADLATVDFDNLEFREKQLYLKSLINKIYIDGEQVTIEWL

SEQ ID NO: 7811 - protein, 452 aa, synthetic construct
MKAAIYIRVSTQEQVENYSIQAQTEKLTALCRSKDWDVYDIFIDGGYSGSNMNRPALNEMLSKLHEIDAVVVYRLDRLSRSQRDTTTLIEEYFLKNNVEFVSLSETLDTSSPFGRAMIGILSVFAQLERETIRDRMVMGKIKRVEAGLPLTTAKGRTFGYDVIDTKLYINEEEAKQLQLIYDIFEEEQSITSLQKRLKKLGFKVRTYNRYSNWLTNDLYCGYVSYKDKVHVKGIHEPIISEEQFYRVQEIFTRMGKNPNMNRDSASLLSNLVVCSKCGLGFVHRSKDTMCRGKKYHYRYYSCKTYKHTHELEKCGNKIWRADKLEELIINRVNNYSFASRNVDKEDELDSLNEKLKIEHAKKKRLFDLYINGSYEVSELDSMMNDIDAQINYYESQIEASEELKKNKKIQENLADLATVDFDSLEFREKQLYLKSLINKIYIDGEQVTIEWL

SEQ ID NO: 7812 - protein, 452 aa, synthetic construct
MKAAIYIRVSTQEQVGNYSIQAQTEKLTALCRSKDWDVYDIFIDGGYSGSNMNRPALNEMLSRLHEIDAVVVYRLDRLSRSQRDTTTLIEEYFLKNNVEFVSLSETLDTSSPFGRAMIGILSVFAQLERETIRDRMVMGKIKRIEAGLPLTTAKGRTFGYDVIDTKLYVNEEEAKQLRLIYDIFEEEQSITFLQKRLKGLGFKVRSYNRYNNWLTNDLYCGYVSYKDKVHVKGIHEPIISEEQFYRVQEIFTRMGKSPNMNRDSASLLSNLVVCSKCGLGFVHRSKDTVSRGKKYHYRYYSCKTYKHTHELEKCGNKIWRADKLEELIINRVNNYSFASRNVDEEDKLDSLNEKLKIEHAKKKRLFDLYINGSYEVSELDSMMNDIDAQINYYESQIEANEGLKKNKKIQENLADLATVDFDSLEFREKQLYLKSLINKIYIDGEQVTIEWL

SEQ ID NO: 7813 - protein, 485 aa, synthetic construct
MTKKVAIYTRVSTTNQAEEGFSIDEQIDRLTKYAEAMGWQVSDTYTDAGFSGAKLERPAMQRLINDIENKAFDTVLVYKLDRLSRSVRDTLYLVKDVFTKNKIDFISLNECIDTSSAMGSLFLTILSAINEFERENIKERMTMGKLGRAKSGKSMMWTKTAFGYHHNRKTGILEIVPLQATIVEQIFTDYLSGISLTKLRDKLNESGHIGKDIPWSYRTLRQTLDNPVYCGCIKFKGSLFEGMHKPIISYETYLKVQRELEERQQQTYERNNNPRPFQAKYMLSGMARCGYCGAPLRIVLGHKRKDGSRTMKYHCANRFPRRTKGVTVYNDNKKCDSGTYDLSNLENTVIDNLISFQENNDSLLKIINGNNQPILDASSFKKQISQIDKKIQKNSDLYLNDFITMDELKDRTDSLQAEKKLLKAKISENKFNDSTDVFELVKAQLGSIPINELSYDNKKKIVNNLVSKVDVTADNVDIIFKFQPA

SEQ ID NO: 7814 - protein, 452 aa, synthetic construct
MKAAIYIRVSTQEQVENYSIQAQTEKLTALCRSKDWDVYDIFIDGGYSGSNMNRPALNEMLNKLHEIDAVVVYRLDRLSRSQRDTITLIEEYFLKNNVEFVSLSETLDTSSPFGRAMIGILSVFAQLERETIRDRMVMGKIKRVEAGLPLTTAKGRTFGYDVIDTKLYINEEEAKQLQLIYDIFEEEQSITFLQKRLKKLGFKVRTYNCYSSWLTNDLYCGYVSYKDKVHVKGIHEPIISEEQFYRVQEIFTRMGKNPNMNRDSASLLNNLVVCGKCGLGFVHRRKDTTSHGKKYHYRYYSCKTYKHTHELEKCGNKIWRADKLEELIINRVNNYSLASRSVDKEDELDSLNEKLKIEHAKKKRLFALYINGSYEVSELDSMMKDIDAQINYYESQIEANEELRKNKKIQEDLMDLATVDFDSLEFREKQLYLKSLINKIYIDGEQVTIEWL

SEQ ID NO: 7815 - protein, 452 aa, synthetic construct
MKAAIYIRVSTREQVENYSIQAQTEKLTALCRSKDWDVYDVFIDGGYSGSNMNRPALNEMLSKLHEIDAVVVYRLDRLSRSQRDTITLIEEYFLKNNVEFVSLSETLDTSSPFGRAMIGILSVFAQLERETIRERMVMGKIKRIEAGLPLTTAKGRTFGYDVIDTKLYINEEEAKQLQLIYDIFEEEQSITSLQKRLKKLGFKVRTYNRYSNWLTNDLYCGYVSYKDKVHVKGIHEPIISEEQFYRVQEIFTRMGKNPNMNRDSASLLNSLVVCSKCGLSFVHRCKDTMSRGKKYHYRYYSCKSYKHIHELEKCGNKIWRADKLEELIINRVNNYSFASRNADKDDELDSLDEKLKIEHAKKRRLFDLYINGNYEVSELDSMMNDIDAQINYYESQIEANEELKKNEKIQENLADLATVDFDSLEFREKQLYLKSLISKIYIDGEQVTIEWL

SEQ ID NO: 7816 - protein, 469 aa, synthetic construct
MSYTTPVRAAVYLRISEDRSGEQLGVARQREDCLKLCGQRKWVPVEYLDNDVSASTGKRRPAYEQMLADIAAGKIAAVVAWDLDRLHRRPVELEAFMSLADEKRLALATVAGDVDLATPQGRLVARLKGCVAAHETEHKKARQRRAARQKAERGLPNWSKAFGYLPGPNGPEPDSRTAPLVKQAYADILAGASLGDVCRQWNDAGAFTITGRPWTTTTLSKFLRKPRNAGLRAYKGARYGPVDRDAIVGKAQWSPLVDETTFWAAQAVLDAPGRAPGRKSVRRHLLTGLAGCGKCGKRLAGSYRTDGQVVYVCKACHGVAILADNIEPILYHIVAKRLAMPDAVDLLRREIHDAAEAETIRLELETLYGELDSLAVERAEGLLTARQVKISTDIVNAKITKLQARQLDQERLRVFDGIPLGTPQVAGMIAELSPNRFRAVLDVLAEVVVQPVGKGGRIFNPERVQVNWR

SEQ ID NO: 7817 - protein, 452 aa, synthetic construct
MKAAIYIRVSTQEQVGNYSIQAQTEKLTALCRSKDWDVYDIFIDGGYSGSNMNRPALNEMLSKLHEIDAVVVYRLDRLSRSQRDTTTLIEEYFLKNNVEFVSLSETLDTSSPFGRAMIGILSVFAQLERETIRDRMVMGKIKRVETGLPLTTAKGRTFGYDVIDTKLYINEEEAKQLQLIYDIFEEVQSITSLQKRLKKLGFKVRTYNRYSNWLTNDLYCGYVSYKDKVHVKGIHEPIISEEQFYRVQEIFARMGKNPNMNRDSASLLNNLVVCSKCGLGFVHRSKDTMCRGKKYHYRYYSCKTYKHTHELEKCGNKTWRADKLEELIINRVNNYSFAGRNMVKEDELDSLNEKLKTEHARKKRLFDLYINGSYEVSELDSMMSDIDAQIDYYESQIEANEELRRNKKIQENLADLATVDFDSLGFREKQLYLKSLINKIYIDGEQVTIEWL

SEQ ID NO: 7818 - protein, 485 aa, synthetic construct
MTKKVAIYTRVSTTNQAEEGFSIDEQIDRLTKYAEAMGWQVSDTYTDAGFSGAKLERPAMQRLINDIEDKAFDTVLVYKLDRLSRSVRDTLYLVKDVFTRNKIDFISLNECIDTSSAMGSLFLTILSAINEFERENIKERMTMGKLGRAKSGKSMMWTKTAFGYHHNRKTGILEIVPLQATIVEQIFTDYLSGISLTKLRDKLNESGHIGKDIPWSYRTLRQTLDNPVYCGYIKFKDSLFEGMHKPIIPYETYLKVQKELEERQQQTYERNNNPRPFQAKYMLGGVARCGYCGAPLRIVLGHKRKDGSRTMKYHCANRFPRKTKGVTVYNDNKKCDSGTYDLSDLENTVIDNLIGFQEDNESLLKIINGNNQPILDTSSFEKQISQIDKKIQKNSDLYLNDFITMDELKDRTDSLQAEKKLLKARISENKFNDSTDVFELVRTQLGSIPINELSYDNKKKIVNNLVSKVDVTADNVDIIFKFQLA

SEQ ID NO: 7819 - protein, 485 aa, synthetic construct
MTKKVAIYTRVSTTNQAEEGFSIDEQIDRLTKYAEAMGWQVSDTYTDAGFSGAKLERPAMQRLINGIENKAFDTVLVYKLDRLSRSVRDTLYLVKDVFTKNKIDFISLNECIDTSSAMGSLFLTILSAINEFERENIKERMTMGKLGRAKSGKSMMWTKTAFGYYHNRKTGILEIVPLQATIVEQIFTGYLSGISLTKLRDKLNESGHIGKDIPWSYRTLRQTLDNPVYCGYIKFKDSLFKGMHKPIIPYETYLKVQKELEERQQQTYERNNNPRPFQAKYMLSGMARCGYCGAPLRIVLGHRRKDGSRTMKYHCANRFPRKTKGVTVYNDNKKCDSGTYDLSDLENTVIDILIGLQENNDSLLKVINGNNQPILDTSSFKKQISQIDKKIQKNSELYLSDFITMDELKDRTESLQAEKKLLEAKISENKSNDSTDVFELVKTQLGSTPINELSYDNKKKIVNNLVSKVDVTADNVDIIFKFQLA

SEQ ID NO: 7820 - protein, 485 aa, synthetic construct
MTKKVAIYTRVSTTNQAEEGFSIDEQIDRLTKYAEAMGWQVSDTYTDAGFSGAKLERPAMQRLINDIENKAFDTVLVYKLDRLSRSVRDTLYLVKEVFTKNKIDFISLNESIDTSSAMGSLFLTILSAINEFERENIKERMTMGKLGRAKSGKSMMWTKTAFGYHHNRETGILEIVPLQATIVEQIFTDYLSGVSLTKLRDKLNESGHIGKDIPWSYRTLRQTLDNPVYCGYIKFKDSLFEGMHKPIISYETYLKVQKELEERQQQTYERNNNPRPFQAKYLLSGLARCGYCGAPLRIVLGHKRKDGSRTMKYHCANRFPRKTKGVTVYNDNKKCDSGTYDLSNLENTVIDDLIGFQESNDSLLKIINGNNLPIPDTSSLKKQISQIDKKIQKNSDLYLNDFITMDELKDRTDSLQAEKKLLKAKISENKFNDSTDVFELVKTQLGSIPINELSYDNKKKIVNNLVSKVDVTADNVDIIFKFQLA

SEQ ID NO: 7821 - protein, 452 aa, synthetic construct
MKAAIYIRVSTREQVENYSIQAQTEKLTALCRSKDWDVYDIFIDGGYSGSNMNRPALNEMLSKLHEIDAVVVYRLDRLSRSQRDTITLIEEYFLKNNVEFVSLSETLDTSSPFGRAMIGILSVFAQLERETIRDRMVMGKIKRIEAGLPLTTAKGRTFGYDVIDTKLYINEEEAKQLQLIYDIFEEEQSITFLQKRLKKLGFKVRSYNRYNNWLTNDLYCGYVSYKDKVHVKGIHEPIISEEQFYRVQEIFARMDKNPNMNRDSASLLSNLVVCGKCGLGFVHRRKDTMSRGKKYHYRYYSCKTYKYIHELEKCGNKIWRADKLEELIINRVNDYSFACRSVDKEDELDSLNEKLRIEHAKKKRLFDLYINGSYEVSELDSMMNDIDAQISYYESQIEANEEQKKNRKIQESLANLATVDYDSLEFREKQLYLKSLINKIYIDGEQVTIEWL

SEQ ID NO: 7822 - protein, 452 aa, synthetic construct
MKAAIYIRVSTREQVENYSIQAQTEKLTALCRSKDWDVYDIFIDGGYSGSNMNRPALNEMLSKLHEIDAVVVYRLDRLSRSQRDTITLIEEYFLKNNVEFVSLSETLDTSSPFGRAMIGILGVFAQLERETIRDRMVMGKIKRIEAGLPLTTAKGRTFGYDVIDAKLYINEEEAKQLRLIYDIFEEEQSIAFLQKRLKKLGFKVRTYNRYSNWLTNDLYCGYVSYKDKVHVKGIHEPIISEEQFYRVQEIFTRMGKNPNMNRDSASLLNNLVVCSKCGLGFVHRRKDTVSRGKKYHYRYYSCKTYKHIHELEKCGNKIWRADKLEELVINRVNNYSFASRNVDKEDELDSLNEKLKVEHAKKKRLFDLYINGSYNVSELDSMMNDIDAQINYYVSQIEANEELKKNKKIQENLAGLATVDFDSLEFREKQLYLKSLINKIYIDGEQVTIEWL

SEQ ID NO: 7823 - protein, 452 aa, synthetic construct
MKAAIYIRVSTREQVENYSIQAQTERLTALCRSKDWDVYDIFIDGGYSGSNMNRPALNEMLSKLHEIDAVVVYRLDRLSRSQRDTITLIEEYFLKNNVEFVSLSETLDTSSPFGRAMIGILSVFAQLERETIRDRTVMGKIKRVEAGLPLTTAKGRTFGYNVVDTKLYINEEEAKQLQLIYDIFEEEQSITFLQKRLKKLGFKVRSYNRYNNWLTNDLYRGYVSYKDKVHVKGIHEPIISEEQFYRVQEIFTRMGKNPNMNRDSASLLSNLVVCSKCGLSFVHRRKDTMSRGKKYHYRYYSCKTYKHTHELEKCGNKIWRADKLEELIINRVNDYSFAGRNMDKEDELDSLNEKLKTEHAKRKRLFDLYINGSYEVSELDSMMNVIDAQINYYESQIEANEELKKNKKIQENLANLATVDYDSLEFREKQLYLKSLINKIYIDGEQVTIEWL

SEQ ID NO: 7824 - protein, 469 aa, synthetic construct
MSYTTPVRAAVYLRISEDRSGEQLGVARQREDCLKLCGQRKWVPVEYLDNDVSASTGKRRPAYEQMLADITAGKIAAVVAWDLDRLHRRPIELEAFMSLADEKRLALATVAGDVDLATPQGRLVARLKGCVAAHETEHKKARQRRAARQKAERGLPNWSRAFGYLPGPNGPEPDPRTAPLVKRAYADILAGASLGDVCRQWNDAGAFTITGRPWTTTTLSKFLRKPRNAGLREYKGARYGPVDRDAIVGKAQWSPLVDEATFWAAQAVLDAPGRAPGRKSVRRHLLTGLAGCGKCGNHLAGSYRTDGRVVYVCRACHGVAILADNIEPILYHIVAERLAMSDAVDLLRREIHDAVEAETIRLELETLYGELDRLAVERAEGLLTARQVKISTDIVNAKITKLQAHQLDQERLRVFDGIPLGTPQVAGMIAELSPDRFRAVLDVLAEVVVQPVGKSSRIFNPERVQVNWR

SEQ ID NO: 7825 - protein, 452 aa, synthetic construct
MKAAIYIRVSTREQVENYSIQAQTEKLTALCRSKDWDVHDIFVDGGYSGSNMNRPALNEMLSKLHEIDAVVVYRLDRLSRSQRDTITLIEEYFLKNNVEFVSLSETLDTSSPFGRAMIGILSVFAQLERETIRDRMVMGKIKRIEAGLPLTTAKGRTFGYDVIDTKLYINEEEAKQLQLIYDIFEEEQSITFLQKRLKKLGFKVRTYNRYNNWLTNDLYCGYVSYKDKVHVKGIHEPIISEEQFYRVQEIFTRMGKNPNMNRDSASLLNSLVVCGKCGLSFVHRRKDIVSHGKKYHYRYYSCKTYKHIHELEKCGNKIWRADKLEELIINRVNNYSFASRNADKEDELDSLNEKLSIEHAKKKRLFDLYINGSYEMSELDSMMNDIDAQINYYESQIEANEELKRNKKIQENLAYLATVDFDSLEFREKQLYLKSLINKIYIDGEQVTIEWL

SEQ ID NO: 7826 - protein, 469 aa, synthetic construct
MSYTTPVRAAVYLRISEDRSGEQLGAARQREDCLELCCQRKWVPVEYLDNDVSASTGKRRPAYEQMLADIAAGKIAAVVAWDLDRLHRRPIELEAFMSLADEKRLALATVAGDVDLATPQGRLVARLKGSVAAHETEHKRARQRRAARQKAERGYPNWSKAFGYLPGPNGPEPDPRTAPLVKQAYADILAGASLGDVCRRWNDAGASTITGRPWTTTTLSKFLRKPRNAGLRTYKGARYGPVDRDAIVGKARWSPLVDEATFWAAQAVLDAPGRAPGRKSVRRHLLTGLAGCGKCGNHLAGSYRTDGRVVYVCKACHGVTILADNIEPILYNIVAERLAMPDAVDLLRREIHDAAEAEAIRLELETLYDELDRLAVERAEGLLTARQVKISTDIVNAKITKLQARHQDQERLRVLDGIPLGTPQVAGMIAELSPDRFRAVLDVLAEVVVQPVGKSGRTFNPERVQVNWR

SEQ ID NO: 7827 - protein, 452 aa, synthetic construct
MKAAIYIRVSTREQVENYSIQAQTEKLTALCRSKDWDVYDIFIDGGYSGSNMNRPALNEMLSKLHEIDAVVVYRLDRLSRSQRDTITLIEEYFLKNNVEFVSLSETLDTSSPFGRAMIGILSVFAQLERETIRDRMAMGKIKRIEAGLPLTTAKGRTFGYDVIDTKLYINEEEAKQLRLIYDIFEEERSITFLQKRLKKLGFKVRSYNRYNNWLTNDLYCGYVSYKDKVHVRGIHEPIISEEQFYRVQEIFTRMGKNPNMNRDSASLLNNLVVCSKCGLGFVHRRKDAMSRDKKYHYRYYSCKTYKHIHELEKCGNKIWRADKLEELIINRVNNYSFASRNADKEDELSSLNEKLKIEHAKKKRLFELYINGRYEVSELDGMMSDIDAQINYYESQIEANEELRKNKKIQENLANLTTVDFDSLEFREKQLYLKSLINKIYIDGEQVTIEWL

SEQ ID NO: 7828 - protein, 452 aa, synthetic construct
MKAAIYIRVSTREQVENYSIQAQTEKLTALCRSKDWDVYDIFIDGGYSGSNMNRPALNEMLSKLHEIDAVVVYRLDRLSRSQRDTITLIEEYFLKNNVEFVSLSETLDTSSPFGRAMIGILSVFAQLERETIRDRMVMGKIKRIEAGLPLTTAKGRTFGYDVIDTKLYINEEEAKQLRLIYDIFEEEQSITFLQRRLKKLGFKVRTYNRYNNWLTNDLYCGYVSYKDKVHVKGIHEPIISEEQFYRVQEIFARMGKNPNMNRDSASLLSSLVVCSKCGLRFVHRRKDIMSRGKKYHYRYYSCKTYKHIHELEKCGNKIWRADKLEELIINRVNNYSLASRNVDKEDELDSLNEKLKIEHAKKKRLFDLYINGSYEVSELDSMMNDIDAQINYYESQIGANEERKKNKKIQENLADLATVDFGSLEFREKQLYLKSLINKIYIDGEQVTIEWL

SEQ ID NO: 7829 - protein, 485 aa, synthetic construct
MTKKVAIYTRVSTTNQAEEGFSIDEQVDRLTKYAEAMGWQVSDTYTDAGFSGAKLERPAMQRLINGIENKAFDTVLVYKLDRLSRSVRDTLYLVKDVFTKNKIDFISLNECIDTSSAMGSLFLTILSAINEFERENIKERMTMGKLGRAKSGKSMMWTKTAFGYYHNRKTGILEIVPLQATIVEQIFTDYLSGISLTKLRDKLNESGHIGKDIPWSYRTLRQTLDNPVYCGYIKFKDSLFKGMHKPIIPYETYLKVQKELEERQQQTYERNNNPRPFQAKYMLSGMARCGYCGAPLRIVLGHKRKDGSRTMKYHCANRFPRKTKGVTVYNDNKKCDSGTYDLSNLENTVIDILIGLQENNDSLLKVINGNNQPILDTSSFKKQISQIDRKIQKNSELYLNDFITMDELKDRTESLQAEKKLLEAKISENKFNDSTDVFELVKTQLGSIPINELSYDNKKKIVNNLVSKADVTADNVDIIFKFQLA

SEQ ID NO: 7830 - protein, 469 aa, synthetic construct
MSYTTPVCAAVYLRISEDRSGEQLGVARQREDCLKLCDQRKWVPVEYLDNDVSASTGKRRPAYEQMLADITAGKIAAVVAWDLDRLHRRPIELEAFMSLADEKRLALATVAGDVDLATPQGRLVARLKGSVAAHETEHKKARQRRAARQKAERGYPNWSKAFGYLPGPNGPEPDPRTAPLVKQAYADILAGASLGNVCRQWNDAGAFTITGRPWTTTALSKFLRKPRNAGLREYKGARYGPVDRDAIVGKAQWSPLVDEATFWAAQAVLDAPGRAPGRKSVRRHLLTGLAGCGKCGDHLAGSYRTDGRVVYVCKACHGVAILADNIEPILYHIVAERLAMPDAVDLLRREIHDAAEAETIRLELETLYGELDRLAVERAEGLLTARQVKISTDIVNAKITKLQARQLDQERQRVLDGIPLGTPQVAGMIAELSPDRFRAVLDVLAEVVVQPVGKSGRTFNPERVQVNWR

SEQ ID NO: 7831 - protein, 485 aa, synthetic construct
MTKKVAIYTRVSTTNQAEEGFSVDEQIDRLTKYAEAMGWQVSDTYTDAGFSGAKLERPAMQRLINDIENKAFDTVLVYKLDRLSRSVRDTLYLVKDVFTKNKIDFISLNESIDTSSAMGSLFLTILSAINEFERENIKERMTMGKLGRARSGKSMMWTKTAFGYYHNRKTGILEIVPLQATIVEQIFTDYLSGTSLTKLRDKLNESGHIGKDIPWSYRTLRQTLDNPVYCGYIKFKDSLFEGMHKPIIPYETYLKVQKELEERQQQTYGRNNNPRPFQAKYMLSGMARCGYCGAPLKIVLGHKRKDGSRTMKYHCANRFPRKTKGVTVYNDNRKCDSGTYDLSSLENTVIDNLIGFQENNDSLLKIINGNSQPILDTSSFKKQISQIDKKIQKNSDLYLNDFITMDELKDRTDSLQAEKKLLKAKISESKFNDSTDVFELVKTQLGSIPINELSYDNKKKIVNNLVSKVDVTADSVDIIFKFQLA

SEQ ID NO: 7832 - protein, 485 aa, synthetic construct
MTKKVAIYTRVSTTNQAEEGFSIDEQIDRLTKYAEAMGWQVCDTYTDAGFSGAKLERPAMQRLINNIENKAFDTVLVYKLDRLSRSVRDTLHLVRDVFTKNRIDFISLNESIDTSSAMGSLFLTILSAINEFERENIKERMTMGKLGRAKSGKSMMWTKTAFGYYHNRKTGILEIVPLQATIVEQIFTDYLSGISLTKLRDKLNESGHIGKDIPWSYRTLRQTLDNPVYCGYIKFKGSLFEGMHKPIIPYEIYLKVQKELEERQQQTYERNNNPRPFQAKYMLSGMARCGYCGAPLRIVLGRKRKDGSRTMKYHCANRFPRKTKGVTVYNDNKKCDSGTYDLSNLENTVIDILIGFQENNDSLLKIINGNNQPSLDTSSIKKQISQIDKKIQKNSDLYLNDFITMDELKDRTDSLQAEKKLLKAKIGENKFNDSTDVLELVKTQLGSIPVNELSYDNKKKIVNNLVSKVDVTADNVDIIFKFQLA

SEQ ID NO: 7833 - protein, 452 aa, synthetic construct
MKAAIYIRVSTREQVENYSIQAQTEKLTALCRSKDWDVYDIFIDGGYSGSNMNRPALNEMLSKLHEIDAVVVYRLDRLSRSQRDTITLIEEYFLKNNVEFVSLSETLDTSSPFGRAMIGILSVFAQLERETIRDRMVMGKIKRIEAGLPLTTAKGRTFGYDVIDTKLYINEEEAKQLQLIYDIFEEEQSITFLQKRLKKLGFKVRTYNRYNNWLTNDLYCGYVSYKDKVHVKGIHEPIISEEQFYRVQEIFTRMGKNPNMNRDSASLLNNLVVCSKCGLGFVHRRKDAMSRDKKYHYRYYSCKTYKHIHELEKCGNKIWRADKLEELIINRVNSYSLASRNVDKEDELDSLNEKLKIEHAKKKRLLDLYINGSYDVNELDSMMNDINAQINYYESQIEANEELKKNKKIQENLADLATVDFDSLEFREKQLYLKSLINKIYIDGEQVTIEWL

SEQ ID NO: 7834 - protein, 485 aa, synthetic construct
MTRKVAIYTRVSTTNQAEEGFSIDEQIDRLTKYAEAMGWQVSGTYTDAGFSGAKLGRPAMQRLINDIENKAFDTVLVYKLDRLSRSVRDTLHLVKDVFTKNKIDFISLNESIDTSSAMGSLFLTILSAINEFERENIKERMTMGKLGRAKSGKSMMWAKTAFGYYHNRKTGILEIVPLQATIVEQIFTDYLSGISLTKLRDKLNESGHIGKDIPWSYRTLRQTLNNPVYCGYIKFKDSLFEGMHKPIIPYETYLKVQKELEERQQQTYERNNNPRPFQAKYMLSGMARCGYCGAPLRVVLGHKRKDGSRTMKYHCANRFPRKTKGVTVYNDNKKCDSGTYDLSNLESAVIDNLIGFQENNDSLLKIINGNNLPILDTSSLKKQISQIDKKIQKNSDLYLNDFITMDELKDRTDSLQAEKKLLKAKISENKFNDSTDVFELVKTQLGSIPINELSYDNKKKIVNNLVSKVDVTADNVDIIFKFQLA

SEQ ID NO: 7835 - protein, 469 aa, synthetic construct
MSYTTPVRAAVYLRISEDRSGEQLGVARQREDCLKLCDQRKWVPVEYLDNDVSASTGKRRPAYEQMLADITAGKIAAVVAWDLDRLHRRPVELEAFMSLADEKRLALATVAGDVDLATPQGRLVARLKGSVAAHETEHKKARQRRAARQKAERGHPNWSKAFGYLPGPDGPEPDPRTAPLVKQAYADILAGASLGDVCRQWNDAGALTITGRPWTTTTLSKFLRKPRNAGLRAYKGARYGPVDRDAIVGKAQWSPLVDEATFWAAQAVLDAPGRAPGRKSVRRHLLTGLAGCGKCGNHLSGSYRADGRVVYVCKACHGVAILADNIEPILYHIVAERLAMPDAVDSLRCEIHDVAEAETIRLELETLYGELDHLAVERAEGLLTARQVKICTDIVNAKITKLQARQQDQERLRVLGGIPLGTPQVAGMIAELSPDRFRAVLDVLAEVVVLPVGKSGRIFNPERVQVNWR

SEQ ID NO: 7836 - protein, 485 aa, synthetic construct; identical to SEQ ID NO: 1401

SEQ ID NO: 7837 - protein, 452 aa, synthetic construct
MKAAIYIRVSTREQVENYSIQAQTERLTALCRSKDWDVYDIFIDGGYSGSNMNRPALNEMLSKLHEIDAVVVYRLDRLSRSQRDTITLIEEYFLKNNVEFVSLSETLDTSSPFGRAMIGILSVFAQLERETIRDRMVMGKIKRIEAGLPLTTAKGRTFGYDVIDSKLYINEEEAKQLQLIYDIFEEEQSIAFLQKRLKKLGFKVRAYSRYNSWLTNDLYCGYVSYKDKVHVKGIHEPIISEEQFYRVQEIFTRMGKNPNMNRGSASLLNNLVVCSKCGLGFVHRRKDTMSRGKKYHYRYYSCKTYKHTHELEKCGNKIWRADKLEELIINRVNNYSLASRDVDKEDELDSLNEKLKIEHAKKKRLFDLYINGSYEVSELDCMMNDIDAQINYYESQIEANEGLKKNKKIQENLANLATVDYDSLEFREKRLYLKSLINKIYIDGEQVTIEWL

SEQ ID NO: 7838 - protein, 452 aa, synthetic construct
MKAAIYIRVSTREQVENYSIQAQTEKLTALCRSKDWDVYDIFIDGGYSGSNMNRPALNEMLSKLHEIDAVVVYRLDRLSRSQRDTITLIEEYFLKNNVEFVSLSETLDTSSPFGRAMIGILSVFAQLERETIRDRMVMGKIKRIEAGLPLTTAKGRTFGYDVIDTKLYINEEEAKQLQLIYDIFEEEQSITFLQKRLKKLGFKVRTYSRYNNWLTNDLYCGYVSYKDKVHVKGIHEPIISEEQFYRVQEIFTRMGRNPNMNRDSASLLNNLVVCSKCGLGFVHRRKDTMSRGKKYHYRYYSCKTYKHTHELEKCGNKIWRADKLEELIINRVNNYSFASRNVDKEDELGSLNEKLKIEHAKRKRLFDLYINGNYEVSELDSMMGDIDAQINYYESQIEANEELEKSKKIQENLANLAAVDFDSLEFREKQLYLKSLINKIYIDGEQVTIEWL

SEQ ID NO: 7839 - protein, 485 aa, synthetic construct; identical to SEQ ID NO: 4223

SEQ ID NO: 7840 - protein, 452 aa, synthetic construct
MKAAIYIRVSTREQVENYSIQAQTEKLTALCRSKDWDVYDIFIDGGYSGSNMNRPALNEMLSKLHEIDAVVVYRLDRLSRSQRDTITLIEEYFLKNNVEFVSLSETLDTSSPFGRAMIGILSVFAQLERETIRDRMVMGKIKRIEAGLPLTTAKGRTFGYDVIDTKLYINEEEARQLQLIYDIFEEERSIAFLQKRLKKLGFKVHTYNRYNNWLTNDLYCGYVSYKDKVHVKGIHEPIISEEQFYRVQEIFTRTGKNPNMNRDSASLLNNLVVCSKCGLGFVHRRKDTMRRGKKYHYRYYSCKTYKHTHELEKCGNKIWRADKLEELIINRVNNYSFASRSADKEDELDSLNEKLKIEHAKRKRLFDLYINGSYEVSELDSMMNGIDAQINYYESQIEANEELKKNKKIQENLADLATVDFDSLEFREKQLYLKSLINKIYIDGEQVTIEWL

SEQ ID NO: 7841 - protein, 452 aa, synthetic construct
MKAAIYIRVSTREQVENYSIQAQTEKLTALCRSKDWDVYDIFIDGGYSGSNMNRPALNEMLSKLHEIDAVVVYRLDRLSRSQRDTITLIEEYFLKNNVEFVSLSETLDTSSPFGRAMIGILSVFAQLERETIRDRMVMGKIKRVEAGLPLTTAKGRTFGYDVIDTKLYINEEEAKQLQLIYDIFEEEQSITFLQKRLKELGFKVRTYNCYNNWLTNDLYCGYVSYKDKVHVKGIHEPIISEEQFYRVQEIFTRMGKNPNMNRDSASLLNNLVVCSKCGLGFVHRRKDTMSRGKKYHYRYYSCKTYKHTHELEKCGNKIWRADKLEELIINRVNNYSLASRNVDKEDELDSLDERLKIEHAKKKRLFDLYINGSYEVSELDSMMSDIDAQISYYESQIEANEELKRNKKIQENLADLATVDYDSLEFREKQLYLKSLINKIYIDGEQVTIEWL

SEQ ID NO: 7842 - protein, 452 aa, synthetic construct; identical to SEQ ID NO: 6229

SEQ ID NO: 7843 - protein, 485 aa, synthetic construct
MTRKVAIYTRVSTANQAEEGFSIDEQIDRLTKYAEAMGWQVSDTYTDAGCSGAKLERPAMQRLINDIENKAFDTVLVHKLDRLSRSVRDTLYLVKDVFTKNKIDFISLNESIDTSSAMGSLFLTILSAINEFERENIKERMAMGKLGRAKSGKSMMWTKTAFGYYHNRITGILEIVPLQATIVEQIFTDYLSGISLTKLRDKLNESGHIGKDIPWSYRTLRQTLDNPVYCGYIKFKDSLFEGMHKPIIPYETYLKVQKELEGRQQQTYERNNNPRPFQAKYMLSGMARCGYCGAPLKIVLGHKRKDGSRTMKYHCANRFPRKTKGVTVYNDNKKCDSGTYDLSNLENTVIDNLIGFQENNDSLLKIINGNNQPILDTSSFKEQISQIDKKIQKNSDLYLNDFITMDELKDRTDSLRAEKRLLKAKISENKFSDSTDVFELVKTQLGSIPINELSYDNKKLIVNNLVSKVDVTADNVDIIFKFQLA

SEQ ID NO: 7844 - protein, 452 aa, synthetic construct
MKAAIYIRVSTREQVENYSIQAQTEKLTALCRSKDWDVYDIFVDGGYSGSNMNRPALNEMLSKLHEIDAVVVYRLDRLSRSQRDTITLIEEYFLKNNVEFVSLSETLDTSSPFGRAMIGILSVFAQLERETIRDRMEMGKIKRIEAGLPLTTAKGRTFGYDVIDAKLYINEEEAKQLQLIYDIFEEEQSITFLQKRLKKLGLKVRTYNRYNNWLTNDLYCGYVSYKDKVHVKGIHEPIISEEQFYRVQEIFTRMGKNPNMNRGSASLLNNLVVCSKCGLGFVHRRKDIMGRDKKYHYRYYSCKTYKHIHELEKCGNKIWRADKLEELVINRVNSYSLASRNVDKEDELDSLNEKLRTEHAKKKRLFDLYINGSFEVCELDSMMNDIDAQISYYESLIEANEELKKNKKIQENLAELATVDFDSLEFREKQLYLKSLINKIYIDGEQVTIEWL

SEQ ID NO: 7845 - protein, 469 aa, synthetic construct
MCYTTPVRAAVYLRISEDRSGEQLGVARQREDCLKLCGQRKWEPVEYLDNDVSASTGRRRPAYEQMLADITAGKIAAVVAWDLDRLHRRPIELEAFMSLADEKRLALATVAGDVDLATPQGRLVARLKGSVAAHETEHKKARQRRAARQKAGRGLPNWSKAFGYLPGPNGPEPDPRTAPLVKQAYADILAGASLGDVCRQWNDAGAFTITGRPWTTSTLSKFLRKPRNAGLRAYKGAPYGPVDRDAIVGKAQWKPLVDEATFWAAQAVLDAPGRAPGRKSVRRHLLTGLAGCGKCGNHLAGSYRTDGRVVYVCKACHGVAILADNIEPILYHIVAERLAMPDAVDLLRREIHDAAEAETIRLELETLYGELDRLAVERAEGLLTARQVKISTDIVNAKITKLQARQLDQERLRVLDGIPLGTPRVAGVIAELSPDRFRAVLDVLAEVVVQPVGKSGRVSSPERVQVNWR

SEQ ID NO: 7846 - protein, 452 aa, synthetic construct
MKAAIYIRVSTREQVENYSIQAQTEKLTALCRSKDWDVYDVFIDGGYSGSNMNRPALNEMLSKLHEIDAVVVYRLDRLSRSQRDTITLIEEYFLKNNVEFVSLSETLDTSSPFGRAMIGILSVFAQLERETIRDRMVMGKIKRIEAGLPLTTAKGRTFGYDVIDTKLYINEEEARQLRLIYDIFEEEQSITFLQKRLKKLGFKVRTYNRYNSWLTNDLYCGYVSYKDKVHVKGIHEPIISEEQFYRVQEIFARMGKNPNMNRDSASLLNNLVVCSKCGLGFVHRRKDTMSRGKKYHYRYYSCKTYKHTHELEKCGNKIWRADKLEELIVNRVNNYSLASRNVDKEDELDSLNEKLKIEHARKKRLFDLYINGSYDVSELDSMMNDIDAQINHYESQIKANEELKKNKKIQENLAELATVDYDSLEFREKQLYLKSLINKIYIDGEQVTIEWL

SEQ ID NO: 7847 - protein, 452 aa, synthetic construct
MKAAIYIRVSTREQVENYSIQAQTEKLTALCRSKGWDVFDIFIDGGYSGSNMNRPALNEMLSKLHEIDAVVVYRLDRLSRSQRDTITLIEEYFLKNNVEFVSLSETLDTSSPFGRAMIGILSVFAQLERETIRDRMVMGKIKRIEAGLPPTTAKGRTFGYDVIDTKLYINEEEAKQLQLIYDIFEEERSITSLQKRLKKLGFKVHSYNRYNNWLTNDLYCGYVSYKDKVHVKGIHEPIISEEQFYRVQEIFTRMGRNPNMNRDSASLLNNLVVCSKCGLGFVHRRKDTTSRGKKYHYRYYSCKTYKHTHELEKCGNKIWRADKLEELIINRVNNYSFASRNVDKEDELDSLNEKLKVEHAKKKRLFDLYINGSYEVSELDSMMNDIDAQISYYESRIEANEGLKKDKKIQENLANLATVDFDSLEFREKQLYLKSLINKIYIDGEQVTIEWL

SEQ ID NO: 7848 - protein, 452 aa, synthetic construct
MKAAIYIRVSTQEQVENYSIQAQTEKLTALCRSKDWDVYDIFIDGGYSGSNMNRPALNEMLSKLHEINAVVVYRLDRLSRSQRDTTTLIEEYFLKNNVEFVSLSETLDTSSPFGRAMIGILSVFAQLERETIRDRMVMGKIKRVEAGLPLTTAKGRTFGYDVIDTKLYINEEEAKQLRLIYDIFEEEQSITSLQKRLKKLGFKVRAYNRYNNWLTNDLYCGYVSYKDEVHVKGIHEPIISEEQFYRVQEIFTRMGKNPNMNRDSASLLNNLVVCSKCGLSFVHRSKDTMSRGKKYHYRYYSCKTYKHTHELEKCGNKTWRADKLEELIINRVNNYSFASRNMDKEDELDSLNEKLKIEHAKKKRLFDLYINGSYEVSELDSMMDDIDAQINYCESQIEANEGLKKNKRIQENLADLTTVDFDSLEFREKQLYLKSLISKIYIDGEQVTIEWL

SEQ ID NO: 7849 - protein, 485 aa, synthetic construct
MTKKVAIYTRVSTTNQAEEGFSIDEQIDRLTKYAEAMGWQVSDTYTDAGFSGAKLERPAMQRLINDIENKAFDTVLVYKLDRLSRSVRDTLHLVKEVFTKNKIDFISLNESIDTSSAMGSLFLTILSAINEFERENIKERMTMGKLGRAKSGKSMMWTKTAFGYYHNRKTGILEIVPLQAAIVEQIFTDYLSGISLTKLRDKLNESGHIGKDIPWSYRTLRQTLDNPVYCGYIKFKDSLFEGMHKPIIPYETYLRVQKELEERQQQTYERNNNLRPFQAKYMLSGIARCGYCGAPLRIVLGHKRKDGSRTMKYHCANRFPRKTKGVTVYNDNKKCDSGTYDLSNLENTVIDNLIGFQENSDSLLKIINGNNQPILDTSGFKKQISQIDKKIQKNGDLYLNDFITMDELKDRTDSLQAEKKLLEAKISENKFNDSTDVFELVKTQLGSIPINELSYDNKKKIVNNLVSKVDVTADNVDIIFKFQLA

SEQ ID NO: 7850 - protein, 452 aa, synthetic construct
MKAAIYIRVSTREQVENYSIQAQTEKLTALCRSKDWDVYDIFIDGGYSGSNMNRPALNEMLSKLHEIDAVVVYRLDRLSRSQRDTITLIEEYFLKNNVEFVSLSETLDTSSPFGRAMIGILSVFAQLERETIRDRMVMGKIKRVEAGLPLTTAKGRTFGYDVIDTKLYINEEEAEQLQLIYDIFEEEQSITLLQKRLKELGFKVRTYSRYSSWLTNDLYCGYVSYKDKVHVKGIHEPIISEEQFYRVQEIFARMCKNPNMNRDSASLLNNLVVCSKCGLGFVHRRKDTVSRGKKYHYRYYSCKTYKHIHELEKCGNKIWRADKLEELIINRVNNYSFASRNVDKEDELDSLNERLKIEHAKKKRLFDLYINGSYEVSELDSMMNDIDAQINYYESQIETNEELKQNKKIQENLADLATVDFDSLEFREKQLYLKGLINKIYIDGEQVTIEWL

SEQ ID NO: 7851 - protein, 485 aa, synthetic construct
MTKKVAIYTRVSTTSQAEEGFSIGEQIGRLTKYAEAMGWQVSDTYTDAGSSGAKLERPAMQRLINDIENKAFDTVLVYKLDRLSRSVRDTLYLVKDVFTKNKVDFISLNESIDTSSAMGSLFLAILSAINEFERENIKERMTMGKLGRAKSGKSMMWTKTAFGYYHNRKTGILEIVPLQATIVEQIFTDYLSGISLTKLRDKLNESGHIGKDIPWSYRTLRQTLDNPVYCGYIKFKDSLFEGMHKPIIPYETYLKVQKELEERQRQTYERNNNPRPFQAKYMLSGMARCGYCGAPLKIVLGHKRKDGSRTMKYHCANRFPRKTKGVTVYNDNKKCDSGTYDLSNLENTVIDYLIGFQENDDSLLKIINGSNQPTLDTSSIKEQISQIDKKIQRNSDLCLNDFITMDELKERTDSLQAEKKLLKAKISENKFNDNTDVFELVKTQLGSIPINELSYDNKKKIVNNLVSKVDVTADNVDIIFKFQLA

SEQ ID NO: 7852 - protein, 452 aa, synthetic construct
MKAAIYIRVSTREQVENYSIQAQTERLTALCRSKDWEVYDIFIDGGYSGSNMNRPALNEMLSKLHEIDAVVVYRLDRLSRSQRDTITLIEEYFLKNNVEFVSLSETLDTSSPFGRAMIGILSVFAQLERETIRDRMVMGKIKRIEAGLPLTTAKGRTFGYDVIDTKLYINEEEAKQLRLIYDIFEEEQSITSLQKRLKKLGFKVRTYNRYNNWLTNDLYCGYVSYKDIVHVKGIHEPIISEEQFYRVQEIFARMGKNPNMNRDSASLLNNLVVCGKCGLGFVHRRKDTVSHGRKYHYRYYSCKTYKHIHELEKCGNKIWRADELEELVINRVNSYSVASRDVDKEDELDSLNEKLKTEHAKKKRLFDLYINGSYEVGELDSMMNDINAQINYYESQIEANEELKKNKKIQENLAYLATVDFDSLEFREKQLYLKSLINKIYIDGEQVTIEWL

SEQ ID NO: 7853 - protein, 452 aa, synthetic construct
MKAAIYIRVSTREQVENYSIQAQTEKLTALCRSKDWDVYDIFIDGGYSGSNMNRPALNEMLSKLHEIDAVVVYRLDRLSRSQRDTITLIEEHFLKNNVEFVSLSETLDTSSPFGRAMIGILSVFAQLERETIRDRMVMGKIKRIEAGLPLTTAKGRTFGYDVIDTKLYINEEEAKQLQLIYDIFEEEQSITSLQKRLKKLGFKVRTYNRYNSWLTNDLYCGYVSYKDKVHAKGIHEPIISEEQFYRVQEIFTRMGKNPNMNRDSASLLNNLVVCSKCGLGFVHRRKDTMSRGKKYHYRYYSCKTYKHTHELEKCGNKIWRADKLEELIINRVNNYSIAGRNVDKEDELDSLNEKLKIEHAKRKRLFDLYINGSYNVSELDSMMNDIDAQINYYESQIEANEELKKNKKIQENLADLATVDFDSLEFREKQLYLKSLINKIYIDGEQVTIEWL

SEQ ID NO: 7854 - protein, 469 aa, synthetic construct
MSYTTPVRAAVYLRISEDRSGEQLGVARQREDCLKLCDQRKWVPVEYLDNDVSASTGKRRPAYEQMLADITAGKIAAVVAWDLDRLHRRPIELEAFMSLADEKRLALATVAGDVDLATPQGRLVARLKGSVAAHETEHKKARQRRAARQKAERGLPNWSRAFGYLPGPNGPEPDPRTAPLVKQAYADILAGASLGDVCRQWNDAGTFTITGRPWTTTTLSKFLRKPRNAGLRTYKGARYGPVDRDAIVGKAQWSPLVDEATFWAAQAVLDAPGRAPGRKSVRRHLLTGLAGCGRCGNHLAGSYRTDGRVVYVCKACHGVAILADNIEPILYHIVAERLAMPDAVGLLRREIHDAAEAETIRLELETLYGELDRLAVERAEGLLTARQVKISTDIVNAKIMKLQARQLDQERLRVLDGIPLGTPQVAGVIAELSPDRFRAVLDVLAEVVVQPVGKSSRIFNPERVQVNWR

SEQ ID NO: 7855 - protein, 452 aa, synthetic construct
MKAAIYIRVSTREQVENYSIRAQTEKLTALCRSKDWDVYDIFIDGGYSGSNMNRPALNEMLSKLHEVDAVVVYRLDRLSRSQRDTITLIEEYFLKNNVEFVSLSETLDTSSPFGRAMIGILSVFAQLERETIRDRMVMGKIKRIEAGLPLTTAKGRTFGYDVIDTKLYINEEEAKQLQLIYDIFEEEQSITFLQKRLKELGFKVRTYNCYNNWLTNDLYCGYVSYKDKVRVKGIHEPIISEEQFYRVQEIFARTGKNPNMNRDSASLLNNLVVCSKCGLGFVHRRKDAMSRDKKYHYRYYSCKTYKHIHELEKCGNKIWRADKLEELIINRVNNYSFASRNAGKENELDSLNEKLKIEHAKKKRLFDLYINGSYEVSELGSMMNDIDAQINYYESQIEASEELKKNKKIQENLANLATVDFDSLEFREKQLYLKSLINKIYIDGEQVTIEWL

SEQ ID NO: 7856 - protein, 485 aa, synthetic construct
MTKKVAIYTRVSTTNQAEEGFSIDEQIDRLTKYAEAMGWQVSDTYTDAGLSGAKLERPAMQRLINDIENKAFDTVLVYKLDRLSRSVRDTLYLVKEVFTKNKIDFVSLNESIDTSSAMGSLFLTILSAINEFERENIKERMTMGKLGRAKSGKSMMWTKTAFGYCHNRKTGILEIVPQQATIVEQIFTDYLSGISLTKLRDKLNESGHIGKDIPWSYRTLRQTLDNPVYCGYIKFKDSLFEGMHKPIIPYETYLKVQKELEERQQQTYERNNNPRPFQAKYMLSGMARCGYCGAPLKIVLGHKRKDGSRTMKYHCANRFPRKTKGVTVYNDNKKCDSGTYDLSNLENTVIDNLIGFQENDDSLLKIINGNNQPILDTSSFKEQISQIDKKIQKNSDLYLNDFITMDELKDRTDSLQAEKELLKAKISENKFNGSTDVFELVRTQLGSIPINELSYDNKKKIVNNLVSKVDVTADSVDIIFKFQLA

SEQ ID NO: 7857 - protein, 452 aa, synthetic construct
MKAAIYIRVSTREQVENYSIQAQTEKLTALCRSKDWDVYDIFIDGGYSGSNMNRPALNEMLSKLHEIDAVVVYRLDRLSRSQRDTITLIEEYFLKNNVEFVSLSETLDTSSPFGRAMIGILSVFAQLERETIRDRMVMGKIKRIEAGLPLTTAKGRTFGYDVIDTRLYINEEEAKQLRLIYDIFEEEQSITFLQKRLKKLGLKVRTYSRYNNWLTNDLYCGYVSYKDKVHVKGIHEPIISEEQFYRVQEIFTRMGKNPNMNRGSASLLNNLVVCSKCGLSFVHRRKDIVSHGKKYHYRYYSCKTYKHIHELEKCGNKIWRADKLEELVINRVNNYSLAGRNVDKGDELDSLNEKLKIEHAKKKRLFDLYINGSYDVSELDSMMNGIDAQVNYYESQIEANEELKKNKKIQENLANLATVDFDSLEFREKQLYLKSLISKIYIDGEQVTIEWL

SEQ ID NO: 7858 - protein, 452 aa, synthetic construct
MKAAIYIRVSTREQVENYSIQAQTEKLTALCRSKDWDVYDIFVDGGYSGSNMNRPALNEMLSKLHEIDAVVVYRLDRLSRSQRDTITLIEEYFLRNNVEFVSLSETLDTSSPFGRAMIGILSVFAQLERETIRDRMVMGKIKRIEAGLPLTTAKGRTFGYDVIDTKLYINEEEAKQLQLIYDIFEEVQSITSLQKRLKKLGFKVRTYNRYNNWLTNDLYCGYVSYKDKVHVKGIHEPIISEEQFYRVQEIFTRMGKNPNMNRDSASLLNNLVVCSKCGLGFVHRRKDAMSRDKKYHYRYYSCKTYKHIHELEKCGNKIWRADKLEELIINRVNNYSLANRNVDKEDVLDSLNEKLKVEHAKKKRLFDLYINGSYEVGELDSMMNDIDAQISYYESQIEANEELKKNRKIQENLANLATVDFDSLEFREKQLYLKSLINKIYIDGERVTIEWL

SEQ ID NO: 7859 - protein, 452 aa, synthetic construct
MKAAIYIRVSTQEQVGNYSIQAQTEKLTALCRSKGWDVYDIFIDGGYSGSNMNRPALNEMLSKLHEIDAVVVYRLDRLSRSQRDTTTLIEEYFLKNNVEFVSLSETLDTSSPFGRAMIGILSVFAQLERETIRDRMVMGKIKRIEAGLPLTTAKGRTFGYDVIDTKLYINEEEAKQLQLIYDIFEEVQSITFLQKRLKKLGFKVRTYNRYNNWLTNDLYCGYVSYKDKVHVKGIHEPIISEEQFYRVQEIFTRMGKNPNMNRDSASLLNNLVVCSKCGLGFVHRSKDTMSRGKKYHYRYYSCKTYKHTHELEKCGNKTWRADKLEELIINRVNNYSFASRNVDKEDELDSLSEKLETERAKRRRLFDLYINGSYEVSELDSMMNDIDAQINYYESQIEANEELRKNRKIQENLADLATVDFDGLEFRDKQLYLKSLINKIYIDGEQVTIEWL

SEQ ID NO: 7860 - protein, 452 aa, synthetic construct
MKAAIYIRVSTREQVENYSIQAQTEKLTALCRSKDWDVYDIFIDGGYSGSNMNRPALNEMLSKLHEIDAVVVYRLDRLSRSQRDTITLIEEYFLKNNVEFVSLSETLDTSSPFGRAMIGILSVFAQLERETIRDRMVMGKIKRIEAGLPLTTAKGRTFGYDVIDTKLYINEEEAKQLQLIYDIFEEEQSITFLQKRLKKLGFKVRTYNRYNNWLTNDLYCGYVSYRDKVHVKGIHEPIISEEQFYRVQEIFARMGKNPNMNRDSASLLNNLVVCSKCGLGFVHRRKDAMSRDKKYHYRYYSCKTYKHIHELEKCGNKIWRADELEELVINRVSNYSFASRNADKEDELDSLNEKLKIEHAKKKRLFNLYINGSYEVSELNSMMNDIDAQINYYESRIEANEELRKNKKIQENLADLATVDFDSLEFREKQLYLKSLISKIYIDGEQVTIEWL

SEQ ID NO: 7861 - protein, 485 aa, synthetic construct; identical to SEQ ID NO: 2738

SEQ ID NO: 7862 - protein, 452 aa, synthetic construct
MKAAIYIRVSTREQVENYSIQAQTEKLTALCRSKDWEVYDIFIDGGYSGSNMNRPALNEMLSKLHEIDAVVVYRLDRLSRSQRDTITLIEEYFLKNNVEFVSLSETLDTSSPFGRAMIGILSVFAQLERETIRDRMVMGKIKRVEAGLPLTTAKGRTFGYDVIDTKLYINEEEAKQLRLIYDIFEEEQSITFLQKRLKKLGFKVHTYSRYNNWLTNDLYCGYVSYKDKVHVKGIHEPIISEEQFYRVQEIFTRTGKNPNMNRDSASLLNNLVVCSKCGLGFVHRRKDTTSRGKKYHYRYYSCKTYKHIHELEKCGNKIWRADKLEELIINRVNNYSLTSRNVDKEDELDSLNGKLKIEHAKKKRLFDLYINGSYEVSELDSMMNDIDAQINYYESQIEANGELKKDKKIQENLAGLATVDFDSLEFREKQLYLKSLINKIYIDGEQVTIEWL

SEQ ID NO: 7863 - protein, 452 aa, synthetic construct
MKAAVYIRVSTREQVENYSIQAQTEKLTALCRSKDWDVYDIFIDGGYSGSNMNRPALNEMLSKLHEIDAVVVYRLDRLSRSQRDTITLIEEHFLKNNVEFVSLSETLDTSSPFGRAMIGILSVFAQLERETIRDRMVMGKIKRVEAGLPLTTAKGRTFGYDVIDTKLYINEEEAKQLQLVYDIFEEEQSITSLQKRLKKLGFKVRTYNRYISWLTNDLYCGYVSYKDKVHVKGIHEPIISEEQFYRVQEIFTRMGKNPNMNRGSASLLNNLVVCSKCGLGFVHRRKDTMSRGKKYHYRYYSCKTYKHTHELEKCGNKIWRADKLEELIINRVNNYSFASRNVDKEDELASLNEKLKIEHAKKKRLFDLYINGSYEVSELDSMMNDIDAQINYYESQIEANEELKRNKKIQENLANLATVDYDSLEFREKQLYLKSLINKIYIDGELVTIEWL

SEQ ID NO: 7864 - protein, 469 aa, synthetic construct
MRYTTPVRAAVYLRISEDRSGEQLGVARQREDCLKLCGQRKWVPVEYLDNDVSASTGKRRPAYEQMLADITAGKIAAVVAWDLDRLHRRPIELEAFMSLADEKRLALATVAGDVDLATPQGRLVARLKGSVAAHETEHKKARQRRAARQKAERGHPNWSKAFGYLPGPNGPEPDPRTAPLVRQAYADILAGASLGDVCRGWNDAGAFTITGRPWATTTLSKFLRKPRNAGLRAYKGARYGPVDRDAIVGKAQWSPLVDEATFWAAQAVLDAPGRAPGRKSVRRHLLTGLAGCGKCGSHLAGSYRTDGRVVYVCKACHGVAILADNIEPILYHIVAERLAMPDAVDLLRREIHDVVEAETIRLELETLYGELDRLAVERAEGLLTARQVKISTDIVGAKIAKLQARQLDQERLRVFDGIPLGTPQVAGMIAELSPDRFRAVLDVLAEVVVQPVGKGGRNFNPERVQVNWR

SEQ ID NO: 7865 - protein, 452 aa, synthetic construct
MKAAIYIRVSTREQVENYSIQAQTEKLTALCRSKDWDVYDIFIDGGYSGSNMNRPALNEMLSKLHEIDAVVVYRLDRLSRSQRDTITLIEEYFLKNNVEFVSLSETLDTSSPFGRAMIGILSVFAQLERETIRDRMVMGKIKRIEAGLPLTTAKGRTFGYDVIDTKLYINEEEAKQLQLIYDIFEEEQSITFLQKRLKKLGFKVRTYSRYNSWLTNDLYCGYVSYKDKVHVKGIHEPIISEEQFYRVQEIFTRMGKNPNMNRDSASLLNNLVVCSKCGLGFVHRRKDTMSRGKKYHYRYYSCKTYKHTHELEKCGNKIWRADKLEELIINRVNNYSFASRSVDKEDELDSLNEKLKIEHAKKKRLFDLYINGSYEVSELDSMMNDIDAQINYYESQIEANEELKKNKKIRENLADLATVDYDSLEFREKQLYLKSLINKIYIDGEQVTIEWL

SEQ ID NO: 7866 - protein, 452 aa, synthetic construct
MKAAIYIRVSTQEQVENYSIQAQTEKLTALCRSKDWDVYDIFVDGGYSGSNMNRPALNEMLSKLHEIDAVVVYRLDRLSRSQRDTTTLIEEYFLKNNVEFVSLSETLDTSSPFGRAMIGILSVFAQLERETIRDRMMMGKIKRIEAGLPLTTAKGRTFGYDVIDTKLYINEEEAKQLQLIYDIFEEEQSITLLQKRLKKLGFKVRTYNRYNNWLTNDLYCGYVSYKDKVHVKGIHEPIISEEQFYRVQEIFTRMGKNPNMNRDSASLLNNLVVCSKCGLGFVHRSKDTMSRGKKYHYRYYSCKTYKHTHELEKCGNKTWRADKLEELIINRVNNYSFASRNVDKEDELDSLSEKLKIEHAKKERLFDLYINGSYEVSKLDSMMNDIDAQINYYESQIEASEELKRNKKIQEDLAGLATVDFGSLEFREKQQYLKSLINKIYIDGEQVTIEWL

SEQ ID NO: 7867 - protein, 452 aa, synthetic construct
MKAAIYIRVSTREQVENYSIQAQAEKLTALCRSKDWDVYDIFIDGGYSGSNMNRPALNEMLSKLHEIDAVVVYRLDRLSRSQRDTITLIEEYFLKNNVEFVSLSETLDTSSPFGRAMIGILSVFAQLERETIRDRMVMGKIKRIEAGLPLTTAKGRTFGYDVIDAKLYINEEEAKQLQLIYDIFEEEQSITSLQKRLKKLGFKVHTYNRYNNWLTNDLYCGYVSYKDKVHVKGIHEPIISEEQFYRVQEIFTRMGKNPNMNRDSASLLNGLVVCSKCGLGFVHRRKDTTSSGKKYHYRYYSCKTYKHTHELEKCGNKIWRADKLEELIINRVNNYSFASRNVDKEDELDSLNEKLKIEHAKKKRLFDLYINGSYEVSELDSMMNDIDAQINYYESQIEANEGLKKSKKFQENLADPATVDFGSLEFREKQLYLKSLINKIYIDGEQVTIEWL

SEQ ID NO: 7868 - protein, 452 aa, synthetic construct; identical to SEQ ID NO: 2030

SEQ ID NO: 7869 - protein, 452 aa, synthetic construct
MKAAIYIRVSTREQVENYSIQAQTEKLTALCRSKDWDVYDIFIDGGYSGSNMNRPALNEMLSKLHEIDAVVVYRLDRLSRSQRDTITLIEEYFLKNNVEFVSLSETLDTSSPFGRAMIGILSVFAQLERETIRDRMVMGKIKRIEAGLPLTTAKGRTFGYDVIDTKLYINEEEAKQLQLIYDIFEEEQSITFLQKRLKKLGFKVRTYSRYNNWLTNDLYCGYVSYKDKVHVKGIHEPIISEEQFYRVQEIFTRMGKNPNMNRDSASLLSNLVVCSKCGLGFVHRRKDTTSRGKKYHYRYYSCKTYKHIHELEKCGNKIWRADKLEELIINRVNNYSFASRNVDKEDELDSLNEKLKIEHAKKKRLFDLYINGSYEVSELDSMMSDIDAQINYYESQIEANEELKKNEKIQENLANLASVDYDSLEFREKQLYLKSLINKIYIDGEQVTIEWL

SEQ ID NO: 7870 - protein, 452 aa, synthetic construct
MKAAIYIRVSTREQVENYSIQAQTEKLTALCRSKDWDVYDIFIDGGYSGSNMNRPALNEMLSRLHEIDAVVVYRLDRLSRSQRDTITLIEEYFLKNNVEFVSLSETLDTSSPFGRAMIGILSVFAQLERETIRDRMVMGKIKRIEAGLPLTTARGRTFGYDVIDTKLYINEEEARQLQLIYDIFEEEQSITLLQKRLKKLGFKVRTYNRYNSWLTNDLYCGYVSYKDKVHVKGIHEPIISEEQFYRVQEIFTRMGKNPNMNRDSASLLNNLVVCSKCGLGFVHRRKDTMSRGKKYHYRYYSCKTYKHTHELEKCGNKIWRADKLEELIIERVNNYSFASRNADKDDELYSLNEKLKIEHAKKKRLFDLYINGSYEVSELDSMMYDIDAQINYYERQIEANEELKKNKKIQESLANLATVDYDSLEFREKQLYLKSLINKIYVDGEQVTIEWL

SEQ ID NO: 7871 - protein, 469 aa, synthetic construct
MSYTTPVRAAVYLRISEDRSGEQLGVARQREDCLELCGQRKWVPVEYLDNDVSASTGKRRPAYEQMLADITAGKIAAVVAWDLDRLHRRPVELEAFMSLADEKRLALATVAGDVDLATPQGRLVARLKGCVAAHETEHKKARQRRAARQKAERGLPNWSKAFGYLPGPNGPEPDPRTAPLVKQAYADILAGASLGDVCRQWNDAGAFTITGRPWTTTTLSKFLRKPRNAGLRAYKGARYGPVDRDAIVGKAQWGPLVDEATFWAAQAVLDAPGRAPGRKSVRRHLLTGLAGCGKCGNHLAGSYRTDGRVVYVCKACHGVAILADNIEPILHHIVAERLAMPDAVDLLRRGIHDAAEAETIRLELETLYGELDRLAVERAEGLLTARQVKISTDIVDAKITELQARQLDQGRSRVLDGIPLGTPQVAGMIAKLSPDRFRAVLDVLAEVVVQPVGKSGRIFNPERVQVNWR

SEQ ID NO: 7872 - protein, 485 aa, synthetic construct
MTKKVAIYTRVSTTNQAEEGFSIDEQIDRLTKYAEAMGWQVSNTYTDAGISGAKLERPAMQRLINDIENEAFDTVLVYKLDRLSRSVRDTLYLVKDVFTKNKIDFISLSESIDTSSAMGSLFLTILSAINEFERENIKERMTMGKLGRAKSGKSMMWTKTAFGYYHNRKTGILEIVPLQATIVEQIFTDYLSGISLTKLRDKLNESGHIGKDIPWSYRTLRQTLDNPVYCGYIKFKNSLFEGMHKPIIPYETYLKVQKELEERQQQTYERNNNPRPFQAKYMLSGMARCGYCGAPLRIVLGHKRKDGSRTMKYHCANRFPRKTKGVTVYNDNKKCDSGTYDLRNLENTVIDNLIGFQEDNDNLLKIINGNNQPILDTSGFEKQISLIDKKIQKNSDLYLNDFITMDELKDRTDSLQAEKKLLEAKISENKFNGSTDVFELVKTQLGSIPINELSYDDKKKIVNNLVSKVDVTADNVNIIFKFQLA

SEQ ID NO: 7873 - protein, 485 aa, synthetic construct
MTKKVAIYTRVSTTNQAEEGFSIDEQIDRLTKYAEAMGWQVSDTYTDAGFSGAKLERPAMQRLINDIENKAFDTVLVYKLDRLSRSVRDTLYLVKDVFTKNKIDFISLNECIDTSSAMGSLFLTILSAINEFERENIKERMTMGKLGRAKSGKSMMWTRTAFGYYHNRKTGILEIEPLQATIVEQIFTDYLSGISLTKLRDKLNESGHIGKDIPWSYRTLRQTLDNPVYCGYIKFKGSLFEGMHKPIIPYETYLKVQKELEERQQQTYERNNNPRPFQAKYMLSGTARCGYCGAPLKIVLGHKRKDGSRTMKYHCANRFPRRTKGVTVYNDNKKCDSGTYDLSNLENTVIDNLIGFQENNDSLLKIINGSNQSTLDTSSLEERISQIDKKIQKNSDLYLNDFITMDGLKDRADSLQAEKKLLKARISENKFNDSTGVFELVKAQLGSIPINELSYDNKKKIVNNLVSKVDVTADNVDIIFKFQPA

SEQ ID NO: 7874 - protein, 469 aa, synthetic construct
MCYTTPVRAAVYLRISEDRSGEQLGVARQREDCLELCDQRKWVPVEYLDNDVSASTGRRRPAYEQMLADITAGKIAAVVAWDLDRLHRRPIELEAFMSLADEKRLALATVAGDVDLATPQGRLVARLKGSVAAHETEHKKARQRRAARQKAERGYPNWSKAFGYLPGPNGPEPDPRTAPLVKQAYADILAGASLGDVCRQWNGAGAFTITGRPWTTTTLSKFLRKPRNAGLRAYKGARYGPVDRDAIVGKAQWSPLVDEATFWAAQAVLDAPGRAPGRKSVRRHLLTGLAGCGKCGNHLAGSYRTDGRVVYVCKACHGVAILADNIEPILYHIVAERLAMPDAVALLRREIHDAAEAETIRLELETLYDELDRLAVERAEGLLTARQVKISTDIVNAKITKLQARQLDQERLRVFDGIPLGTPQVADKIAELSPDRFRAVLDVLAEVVVQPVGKSGRVFNPERVQVNWR

SEQ ID NO: 7875 - protein, 469 aa, synthetic construct
MSYTTPVRAAVYLRISEDRSGEQLGVARQREDCLKLCDQRKWVPVEYLDNDVSASTGKRRPAYEQMLVDITAGKIAAVVAWDLDRLHRRPIELEAFMSLADEKRLALATVAGDVDLATPQGRLVARLKGSVAAHETEHKKARQRRAARQKAERGYPNWSKAFGYLPGPNGPEPDPRTAPLVKQAYTDILAGASLGDVCRQWNDAGAFTITSRPWTTTTLSKFLRKPRNAGLRAYKGARYGPVDRDAIVGKAQWSPLVDEATFWAAQAVLDAPGRAPGRKSVRRHLLTGLAGCGKCGNHLAGSYRTDGRVVYVCKACHGVAILADNIEPILYHIVAERLAMPDAVDLLRRETHDAAEAEAIHLELETLYGELDRLAVERAEGLLTARQVKISTDIVNAKITELRARQLDQERLRVFDGIPLGTPQVAGMIAELSPSRFRAVLDVLAEVVVQPVGKGGRIFNPERVQVNWR

SEQ ID NO: 7876 - protein, 469 aa, synthetic construct
MSYTTPVRAAVYLRISEDRSGEQLGVARQREDCLKLCDQRKWVPVEYLDNDVSASTGKCRPAYEQMLADITAGKIAAVVAWDLDRLHRRPIELEAFMSLADEKRLALATVAGDVDLATPQGRLVARLKGSVAAHETEHKKARQRRAARQKAERGHPNWSKAFGYLPGPNGPEPDPRTAPLVKQAYADILAGASLGDVCRQWNDAGAFTITGRPWTTTTLSKFLRKPRNAGLRAYKGAPYGPVDRDAIVGKAQWNPLVDEATFWAAQAVLDAPGRAPGRKSVRRHLLTGLAGCGKCGNHLAGSYRTDGRVVYVCKACHGVAILADNIEPILYHIVAERLAMPDAVDLLRREIHDAAEAETIRLELETLYGELDCLAVERAEGLLTARQVKISTDIVNAKITKLQARQLDQERLRVLDGIPLGTPQVAGMIAELSPDRFRAVLDVLAEVVVQPVGKSGRIFNPERVQVNWR

SEQ ID NO: 7877 - protein, 452 aa, synthetic construct
MKAAIYIRVSTREQVENYSIQAQTEKLTALCRSKDWDVYDIFIDGGYSGSNMNRPALNEMLSKLHEIDAVVVYRLDRLSRSQRDTITLIEEYFLKNNVEFVSLSETLDTSSPFGRAMIGILSVFAQLERETIRDRMVMGKIKRIEAGLPLTTAKGRTFGYDVIGTKLYVNEEEAKQLQLIYDIFEEEQSITFLQKRLKKLGFKVGTYNRYSNWLTNDLYCGYVRYKDKVHVKGIHEPIISEEQFYRVQEIFTRMGKNPNMNRDSASLLNGLVVCSKCGLAFVHRRKDTTSRGKKYHYRYYSCKTYKHTHELEKCGNKIWRADKLEELIINRVNNYSFASRNVDKEDELDSLNERLKIEHAKKKRLFDLYINGSYEVSELDSMMNDIDAQISYYESQIEANEGLKKDKKIQENLANLATMDYDSLEFREKQLYLKSLISKIYIDGEQVTIEWL

SEQ ID NO: 7878 - protein, 452 aa, synthetic construct
MKAAIYIRVSTREQVENYSIQAQTEKLTALCRSKDWDVYDIFIDGGFSGSNMNRPALNEMLSKLHEIDAVVVYRLDRLSRSQRDTIILIEEYFLKNNVEFVSLSETLDTSSPFGRAMIGILSVFAQLERETIRDRMVMGKIKRIEAGLPLTTAKGRTFGYDVINTKLYINEEEAKQLQLIYDIFEEEQSITLLQKRLKKLGLKVRTYNRYNNWLTNDLYCGYVSYKDKVHVKGIHEPIISEEQFYRVQEIFARMGKNPNMNRGSASLLNNLVVCSKCGLGFVHRRKDTMSRGKKYHYRYYSCKTYKHIHELEKCGNKIWRADKLEELIINRVNNYSFASRNVDREDELDSLNEKLKIEHAKKKRLFDLYINGSYEVSELDSMVNDIDAQINYYESQIEANEELRKNKKIQENLADLATVDFDSLEFREKQLYLKSLINKIYIDGEQVTIEWL

SEQ ID NO: 7879 - protein, 469 aa, synthetic construct
MSYTTPVRAAVYLRISEDRSGEQLGVARQREDCLKLCSQRRWVPVEYLDNDVSASTGKRRPAYEQMLADITAGKIAAVVAWDLDRLHRRPVELEAFMSLADEKRLALATVAGDVDLATPQGRLVARLKGCVAAHETEHKKARQRRAARQKAERGLPNWSKAFGYLPGPNGPEPDPRTAPLVKRAYADILAGASLGDVCRRWNDAGALTITGRPWTTTTLSKFLRKPRNAGLRAYKGARYGPVDRDAIVGKAQWSPLVDEATFWAAQAVLDAPGRAPGRKSVRRHLLTGLAGCGKCGNHLAGSYRTDGQITYVCKACHGVSILADNIEPILYHIVAERLAMPDAVNLLCREIHDAAEAETIRLELETLYGELDRLAVERAEGLLTARQVKISTDIVNAKIAKLQARQLDQGRLRVLDGIPLGTPQVAGAIAELSPDRFRAVLDVLAEVVVQPVGKSGRVFNPERVQVNWR

SEQ ID NO: 7880 - protein, 485 aa, synthetic construct
MTKKVAIYTRVSTTSQAEEGFSIDEQIDRLTKYAEAMGWQVSDTYTDAGFSGAKLERPAMRRLVNDIENEAFDTVLVYKLDRLSRSVRDTLYLVKDVFTKNKIDFISLNESIDTSSAMGSLFLTILSAINEFERENIKERMTMGKLGRAKSGKSMMWTKTAFGYYHNRKTGILEIVPLQATIVEQIFTDYLSGISLTKLRDKLNESGHIGKDIPWSYRTLRQTLDNPVYCGYIKFKDSLFEGMHKPIIPYETYLKVQKELEERQRQTYERNNNPRPFQAKYMLSGMARCGYCGAPLRIVLGHKRKDGSRTMKYHCANRFPRKTKGVTVYNDNKKCDSGTYDLSNLENTVIDNLIGFQENNDSLLKIINGNNQPILDTSSFKEQISQIDKKIQKNSDLYLNDFITMDELKDRTDSLQAEKKLLKAKISESKFNNSTDVFELVKTQLGSIPINELSYDNKKKIVNDLVSKVDVTADNVDIIFKFQLA

SEQ ID NO: 7881 - protein, 469 aa, synthetic construct
MSYTTPVRAAVYLRISEDRSGEQLGVARQREDCLKLCDQREWVPVEYLDNDVSASTGKRRPAYEQMLADITAGKIAAVVAWDLDRLHRRPVELEAFMSLADEKRLALATVAGDVDLATPQGRLVARLKGCVAAHETEHKKARQRRAARQKAERGHPNWSRAFGYLPGPNGPEPDPRTAPLVKQAYADILAGASLGDVCRQWNAAGAFTITGRPWTTTALSKFLRKPRNAGLRAYKGARYGPVDRDAIVGKAQWSPLVDEATFWAAQAVLDAPGRAPGRKSVRRHLLTGLAGCGKCGNRLAGSYRTDGRVVYVCKACHGVAILADNIEPILYHIVAEHLAMPDAVDLLRCEIRDAAEAETIRLELETLYGELDRLAVERAEGLLTARQVKISTDIVNAKITKLQARQLDQERLRVFDGIPLGTPQVAGMIAELSPDRFRAVLDVLAEVVVQPVGKSGRIFNPERVQVNWR

SEQ ID NO: 7882 - protein, 452 aa, synthetic construct
MKAAIYIRVSTQEQVGNYSIQAQTEKLTALCRSKDWDVYDIFVDGGYSGSNMNRPALNEMLSKLHEIDAVVVYRLDRLSRSQRDTTTLIEEYFLKNNVEFVSLSETLDTSSPFGRAMIGILSVFAQLERETIRDRMVMGKIKRIEAGLPLTTAKGRTFGYDVIDTKLYINEEEAKQLRLIYDIFEEEQSITFLQKRLKKLGFKVRTYNRYNSWLTNDLYCGYVSYKDKVHVKGIHEPIISEEQFYRVQEIFTRMGKNPNMNRDSASLLNNLVVCSKCGLGFVHRSKDTTCRGKKYHYRYYSCKTYKHTHELEKCGNKIWRADKLEELIINRVNNYSFASRNVGKEDELDSLNEKLKIEHAKKKRLFDLYINGSYEVSELDSMMDDIDAQINYYESQIEANEGLKKDKRIRENLAGLATVDFDSLEFREKQLYLKSLINKIYIDGEQVTIEWL

SEQ ID NO: 7883 - protein, 469 aa, synthetic construct
MCYTTPVRAAVYLRISEDRSGEQLGVARQREDCLKLCDQRKWVPVEYLDNDVSASTGKRRPAYEQMLADITAGKIAAVVAWDLDRLHRRPIELEAFMSLADEKRLALATVAGDVDLATPQGRLVARLKGSVAAHETEHKRARQRRAARQKAERGHPNWSKAFGYLPGPNGPEPDPRTAPLVKQAYADILAGASLGDVCRQWNVAGAFTITGRPWTTTTLSKFLRKPRNAGLRAYKGARYGPVDRDAIVGKAQWSPLVDEATFWAAQAVLDAPGRAPGRKSVRRHLLTGLAGCGKCGNHLAGSYRTDGRVVYVCKACHGVAILADNIEPILYRIVAERLAMPDAVGLLRREIHDAAEAETIRLELETLYGELDRLAVERAEGLLTARQVKISTDIVNTKITKLQARQLDQERLRVLDGIPLGTPQVAGVIAELSPDRFRAVLDVLAEVVVQPVGKSGRIFNPKRVQVYWR

SEQ ID NO: 7884 - protein, 452 aa, synthetic construct
MKAAIYIRVSTQEQVENYSIQAQTEKLTALCRSKDWDVYDIFIDGGYSGSNMNRPALNEMLSKLHEIDAVVVYRLDRLSRSQRDTITLIEEYFLKNNVEFVSLSETLDTSSPFGRAMIGILSVFAQLERETIRDRMVMGKIKRIEAGLPLTTAKGRTFGYDVIDAKLYINEEEAKQLQLIYDIFEEEQSITFLQKRLKKLGFKVHTYNRYNNWLTNDLYCGYVSYKDKVHVKGIHEPIISEEQFYRVQEIFTRTGKNPNMNRDSASLLNNLVVCSKCGLGFVHRRKDTMSRGKKYHYRYYSCKTYKHIHELEKCGNKIWRADKLEELIINRVNNYSFASRNVAKEDELDSLNEKLKVEHAKKKRLFDLYINGSYEVSELDSMMNDIDAQINYYESQIEANEELKKNKKIQESLANLATVDYDSLEFREKQLYLKSLINKIYIDGEQVTIEWL

SEQ ID NO: 7885 - protein, 452 aa, synthetic construct
MKAAIYIRVSTREQVENYSIQAQTEKLTALCRSKDWDVYDIFIDGGYSGSNMNRPALNEMLSKLHEIDAVVVYRLDRLSRSQRDIITLIEEYFLKNNVEFVSLSETLDTSSPFGRAMIGILSVFAQLERETIRDRMVMGKIKRIEAGLPLTTAKGRTFGYDVIDTKLYINEEEARQLQLIYDIFEEEQSITFLQKRLKKLGFKVHTYNRYNNWLTNDLYCGYVSYKDKVHVKGIHEPIISEEQFYRVQEIFARMGKNPNVNRDSASLLNNLVVCSKCGLGFVHRRKDTMSRGKKYHYRYYSCKTYKHIHELEKCGNKIWRADKLEELIINRVNNYSFASRNVDKEDELDSLNEKLKIEHAKKRRLFDLYINGSYEVSELDSMMSDIDTQINYYESRIEANEELKKSKKVQENLANLATVDYDSLEFREKQLYLKSLINKIYIDGEQVTIEWL

SEQ ID NO: 7886 - protein, 469 aa, synthetic construct
MSYTTPVRAAVYLRISEDRSGEQLGVARQREDCLKLCDQRKWVPVEYLDNDVSASTGKRRPAYEQMLADIAAGKIAAVVAWDLDRLHRRPIELEAFMSLADERRLALATVAGDVDLATPQGRLVARLKGSVAAHETEHKKARQRRAARQKAERGYPNWSKAFGYLPGPNGPEPDPRTAPLVKQAYADILAGASLGDVCRQWNDAGAFTITGRSWTTTALSKFLRKPRNAGLRAYKGARYGPVDRDAIVGKAQWSPLVNEATFWAAQAVLDAPGRAPGRKSVRRHLLTGLAGCGKCGHHLAGSYRTDGRVVYVCKACYGVAILADNIEPILYHVVAERLAMPNAVDLLRREIHDAAEAETIRLELEALYDELDRLAVERAEGLLTARQVKISTDIVDAKITKLQARQLDQERLRVLDGIPLGTPQVAGMVAELSPDRFRAVLDVLAEVVVQPVGKSGRIFNPERVQVNWR

SEQ ID NO: 7887 - protein, 485 aa, synthetic construct
MTKKVAIYTRVSTTNQAEEGFSIDEQIDRLTKYAEAMGWQVSDTYTDAGVSGAKLERPAMQRLINDIENKAFDTVLVYKLDRLSRSVRDTLYLVKDVFTKNKIDFISLNESIDTSSAMGSLFLTILSAINEFERENIKERMTMGKLGRAKSGKSMMWTKTAFGYYHNRKTGILEIVPLQATIVEQIFTDYLSGISLTKLRDKLNESGHIGKEIPWSYRTLRQTLDNPVYCGYIKFKGSLFEGMHKPIISYETYLKVQKELEERQQQTYERNNNPRPFQAKYMLSGMARCGYCGAPLRIVLGHKRKDGSRTMKYHCANRFPRKTRGVTVYNDNKKCDSGTYDLSNLENVVIDNLIGFQEDDDSLLKIINGNNQPILDTSSFKNQISQIDKKIQKNSDLYLNDFITMDELKDRTDCLQAEKKLLQAKISENKFNDGTDVFELVKTQLGSIPINELSYDNKKKIVNNLVSKVDVTADNVDIIFKFQLA

SEQ ID NO: 7888 - protein, 469 aa, synthetic construct
MSYTTPVRAAVYLRISEDRSGEQLGVARQREDCLKLCGQRKWVPVEYLDNDVSASTGKRRPAYEQMLADITAGKIAAVVAWDLDRLHRRPVELEAFMSLADEKRLALATVAGDVDLATPQGRLVARLKGVVAAHETEHKKARQRRAARQKAERGHPNWSKAFGYLPGPNGPEPDPRSAPLVKQAYADILAGASLGDVCRQWNDAGAFTITRKPWTTTTLSKFLRKPRNAGLRAYKGARYGPVDRDAIVGKAQWSPLVDEATFWAAQAVLDAPGRAPGRKSVRRHLLTGLAGCGKCGNHLAGSYRTDGRVVYVCKACHGVAILADNIEPVLYHIVAERLAMPDAVDLLRREAHDAAEAETIRLELETLYGELDRLAVERAEGLLTARQVKISTDIVNAKITKLQARQLDQERLRVFDGIPLGTPQVAGMVAELSPNRFRAVLDVLAEVVVQPVGKSGKIFNPERVQVNWR

SEQ ID NO: 7889 - protein, 452 aa, synthetic construct
MKAAIYIRVSTREQVENYSIQAQTEKLTALCRSKDWDVYDIFIDGGYSGSNMNRPALNEMLSKLHEIDAVVVYRLDRLSRSQRDTITLIEEYFLKNNVEFVSLSETLDTSSPFGRAMIGILSVFAQLERETIRDRMVMGKIKRIEAGLPLTTAKGRTFGYDVIGTKLYINEEEAKQLQLIYDIFEEEQSITLLQKRLKELGLKVCTYNRYNNWLTNDLYCGYVSYKDKVHVKGIHEPIISEEQFYRVQEIFTRMGKNPNMNRDSASLLNNLVVCSKCGLGFVHRRKDTMSRGKRYHYRYYSCKTYKHIHELEKCGNKIWRADRLEELIINRVNNYSLTSRNVDKEDELDSLNEKLEIEHAKKRRLFDLYINGSYEVSELDSMMNDIDAQINYYESQIEANEKLKKNKKIQENLADLATVDFDSLEFREKQLYLKSLINKIYIDGEQVTIEWL

SEQ ID NO: 7890 - protein, 452 aa, synthetic construct
MKAAIYIRVSTREQVENYSIQAQTEKLTALCRSKDWDVYDIFTDGGYSGSNMNRPALNEMLNKLHEIDAVVVYRLDRLSRSQRDTITLIEEYFLKNNVEFVSLSETLDTSSPFGRAMIGILSVFAQLERETIRDRMVMGKIKRIEAGLPLTTAKGRTFGYDVIDTKLYINEEEAKQLQLIYDIFEEEQSITFLQKRLKKLGFKVRTYNRYNNWLTNDLYCGYVSYKDKVHVKGIHEPIISEEQFYRVQEIFTRMGKNPNMNRDSASLLNNLVVCSKCGLGFVHRRKDAMSRDKKYHYRYYSCKTYKHIHELEKCGNKIWRADKLEELIIDRVNNYSLASRNVDKEDELDSLNEKLEIEHAKKKRLFELYINGSYEVSELDSMMNDIDAQINYYESRIEANEELKKNKKIQEILANLATVDFDSLEFREKQLYLKSLINKIYIDGEQVTIEWL

SEQ ID NO: 7891 - protein, 452 aa, synthetic construct
MKAAIYIRVSTQEQVENYSIQAQTEKLTALCRSKDWDVYDIFVDGGYSGSNMNRPALNEMLSKLHEIDAVVVYRLDRLSRSQRDTTTLIEEYFLKNNVEFVSLSETLDTSSPFGRAMIGILSVFAQLERETIRDRMVMGKIKRIEAGLPLTTAKGRTFGYDVIDTKLYINEEEAKQLRLIYDIFEEVQSITFLQKRLKKLGFKVRTYNRYNNWLTNDLYCGYVSYKDKVHVKGIHEPIISEEQFYRVQEIFTRMGKNPNMNRDSASLLNNLVVCSKCGLGFVHRSKDTMSRGKKYHYRYYSCKTYKHTHELEKCGNKTWRADKLEELIISRVSNYSFASRNADKEDELDSLNEKLKIEHARKKRLFDLYINGSYEVSELDSMMNEIDAQINHYESQIEANEELKKNKKIQENLADLATVDFDSLEFREKQLYLKSLINKIYIDGEQVTIEWL

SEQ ID NO: 7892 - protein, 452 aa, synthetic construct
MKAAIYIRVSTREQVENYSIQAQTERLTALCRSKDWDVYDIFIDGGYSGSNMNRPALNEMLSKLHEIDAVVVYRLDRLSRSQRDTITLIEEYFLKNNVEFVSLSETLDTSSPFGRAMIGILSVFAQLERETIRDRMVMGKIKRIEAGLPLTTAKGRTFGYDVVDTKLYINEEEAKQLRLIYDIFEEEQSITFLQKRLKKLGFKVRTYNRYNSWLTNDLYCGYVSYKDKVHVRGIHEPIISEEQFYRVQEIFTRMGKNPNVNRDSASLLNNLVVCSKCGLGFVHRRKDTMSRGKKYHYRYYSCKTYKHTHELEKCGNKIWRADKLEELVIGRVNNYSFASRNADKEDELDSLNEKLKIEHAKKRRLFDLYINGSYEVSELDSMMNGIDAQINYYESQIEANEELKKNKKIQENLADLATVDFDSLEFRDKQLYLKSLINKIYIDGEQVTIEWL

SEQ ID NO: 7893 - protein, 452 aa, synthetic construct
MKAAIYIRVSTREQAENYSIPAQTEKLIALCHSKDWDVYDIFIDGGYSGSNMNRPALNEMLSKLHEIDAVVVYRLDRLSRSQRDTITLIEEYFLKNNVEFVSLSETLDTSSPFGRAMIGILSVFAQLERETIRDRMVMGKIKRVEAGLPLTTAKGRTFGYDVVDTKLYINEEEAKQLQLIYDIFEEEQSITFLQKRLKKLGFKVRTYNRYNNWLTNDLYCGYVSYKDKVHVKGVHEPIISEEQFYRVQEIFTRMGKNPSMNRDSASLLRNLVVCSKCGLGFVHRRKDTMSRGKKYRYRYYSCKTHKHTHELEKCGNKIWRADKLEELIIERVNNYSFASRNADKDDELYSLNEKLKIEHAKKKRLFDLYINGSYNVSELDSMMNDIDAQINYYESQIEANEELKKNKKIQENLAGLATVDFDSLEFREKQLYLKSLINKIYIDGEQVTIEWL

SEQ ID NO: 7894 - protein, 469 aa, synthetic construct
MSYTTPVRAAVYLRISEDRSGEQLGVARQREDCLKLCGQRKWVPVEYLDNDVSASTGKRRPAYEQMLADITAGKIAAVVAWDLDRLHRRPVELEAFMSLADEKRLALATVAGDVDLATPQGRLVARLKGCVAAHETEHKKARQRRAARQKAERGHPNWSKAFGYLPGPNGPEPDPRTAPLVKQAYADILAGASLGDVCRQWNDAGAFTITGRPWTTTTLSKFLRKPRNAGLRAYKGARYGPVDRDAIVGKAQWSPLVDEATFWAAQAVLDAPGRAPGRKSVRRHLLTGLAGCGKCGNHLAGSYRTDGRVVYVCKACHGVAILADNIEPILYHIVAERLAMPDAVDLLRREIHDAAEAETIRLELETLYGELDRLAVERAEGLLTARQVKISTDIVNAKITKLQARQLDQERLRVFDGIPLGTPQVAGMIAELSPDRFRAVLDVLAEVVVQPVGKSGRIFNPERVQVNWR

SEQ ID NO: 7895 - protein, 485 aa, synthetic construct
MTKKVAIYTRVSTTNQAEEGFSIDEQVDRLTKYAEAMGWQVSDTYTDAGFSGAKLERPAMQRLINDIENKAFDTVLVYKLDRLSRSVRDTLYLVKEVFAKNKIDFISLNESIDTSSAMGSLFLTILSAINEFERENIKERMTMGKLGRARSGKSMMWTKTAFGYYHNRKTGILEIVPLQATIVEQIFTDYLSGISLAKLRDKLNESGHIGKDIPWSYRTLRQTLDNPVYCGYIKFKDSLFEGMHKPIIPYETYLKVQKELEERQQQTYERNNNPRPFQAKYMLSGMARCGYCGAPLRIVLGHKRKDGSRTMKYHCANRFPRKTKGVTVYNDNKKCDSGTYDLSNLENTVIDSLIGFQENNDSLLKIINGNNQPILDTSSFKKQISQIDKKIQKNSDLYLNDFITMDELKDRTDSLQAEKKLLKAKISENKLNDSTDVFELVRTQLGGIPINELSYDNKKKIVNNLVSKVDVTADNVDIIFKFQLA

SEQ ID NO: 7896 - protein, 452 aa, synthetic construct
MKAAIYIRVSTREQVENYSIQAQTEKLTALCRSKDWDVYDIFIDGGYSGSNMNRPALNEMLSKLHEIDAVVVYRLDRLSRSQRDTITLIEEYFLKNNVEFVSLSETLDTSSPFGRAMIGILSAFAQLERETIRDRMVMGKIKRIEAGLPLTTAKGRTFGYDVIDTKLYINEEEAKQLQLIYDIFEEEQSITFLQKRLKKLGYKVRTYSRYNSWLTNDLYCGYVSYKDKVHVKGIHEPIISEEQFYRVQEIFTRMGKNPNMNRDSASLLNSLVVCSKCGLGFVHRRKDTTSRGKKYHYRYYSCKTYKHTHELEKCGNRIWRADKLEELVINRVNNYSLASRNVDKEDELDSLNEKLKIEHARKKRLFDLYINGSYEVSELDSMMNDIDAQINYYESQIEANEELKKNKKIQENLADLASVDYDSLEFREKQLYLRSLINKIYIDGEQVTIEWL

SEQ ID NO: 7897 - protein, 452 aa, synthetic construct
MKAAIYIRVSTREQVENYSIQAQTEKLTALCRSKDWDVYDIFIDGGYSGSNMNRPALNEMLGKLHEIDAVVVYRLDRLSRSQRDTITLIEEHFLKNNVEFVSLSETLDTSSPFGRAMIGILSVFAQLERETIRDRMVMGKIKRIEAGLPLTTAKGRTFGYDVIDTKLYINEEEAKHLQLIYDIFEEEQSITSLQKRLKKLGFKVRTYNRYNSWLTNDLYCGYVSYKDKVHVKGIHEPIISEEQFYRVQEIFTRMGKNPNMNRDSASLLNSLVVCGKCGLGFVHRRKDTMSRGKKYHYRYYSCKTYKHTHELEKCGNKIWRADKLEELIINRVNNYSFASRNVDKEDELDSLNEKLKIEHAKKRRLFDLYINGSYEVSELDSMMNDIDAQINYYESQIEANEELKKNKKIQENLADLATVDFDSLEFREKQLYLKSLINKIYIDGEQVTIEWL

SEQ ID NO: 7898 - protein, 452 aa, synthetic construct
MKAAIYIRVSTREQVENYSIQAQTEKLTALCRSKDWDVYDIFIDGGYSGSNMNRPALNEMLSKLHEIDAVVVYRLDRLSRSQRDTITLIEEYFLKNNVEFVSLSETLDTSSPFGRAMIGILSVFAQLERETIRDRMVMGKIKRIEAGLPLTTAKGRTFGYDVIDTKLYINEEEAKQLQLIYDIFEEEQSITFLQKRLRKLGFKVRTYNCYNNWLTNDLYCGYVSYKDKVHVKGIHEPIISEEQFYRVQEIFTRMGKNPNMNRDSASLLNNLVVCSKCGLGFVHRRKDIMSRGKKYHYRYYSCKTYKHIHELEKCGNKIWRADKLEELIIDRVNNYSLASRDADKEDELGSLNEKLKIEHAKKKRLFELYIGGSYEVSELDSMMSDIDAQISYYESQIKANEELKKNKKIQENLAHLATVDFDSLEFREKQLYLKSLINKIYIDGEQVTIEWL

SEQ ID NO: 7899 - protein, 469 aa, synthetic construct
MSYTTPVRAAVYLRISEDRSAEQLGVARQREDCLKLCDQRKWEPVEYLDNDVSASTGKRRPAYEQMLADITAGKIAAVVAWDLDRLHRRPIELEAFMSLADEKRLALATVAGDVDLATPQGRLVARLKGSVAAHETEHKKARQRRAARQKAELGHPNWSKAFGYLPGPNGPEPDPRTAPLVKQAYADILAGASLGDVCRQWNDAGAFTITGRPWTTTTLSKFLRKPRNAGLRAYKGARYGPVDRDAIVGKAQWSPLVDEATFWAAQAVLDAPGRAPGRKSVRRHLLTGLAGCGKCGNHLAGSYRADGQVVYVCKACHGVAILADNIVPILYRIVAERLAMPDAVDLLRREIHDVAEAEAIRLELETLYGELDRLAVERAEGLLTARQVKICTDIVDAKITKLRACQLDQDRLHVFDGIPLGTPQVAGMIAELSPDRFRAVLDVLAEVVVQPVGKSGRIFNPGRVQVNWR

SEQ ID NO: 7900 - protein, 452 aa, synthetic construct
MKAAIYIRVSTREQVENYSIQAQTEKLTALCRSKDWDVYDIFIDGGYSGSNMNRPALNEMLSKLHEIDAVVVYRLDRLSRSQRDTITLIEEYFLKNNVEFVSLSETLDTSSPFGRAMIGILSVFAQLERETIRDRMVMGKIKRIEAGLPLTTAKGRTFGYDVIDTKLYINEEEAKQLQLIYDIFEEERSITSLQKRLKKLGFKVRTYSRYNNWLTNDLYCGYVSYKDKVHVKGIHEPIISEEQFYRVQEIFARMGKNPNMNRDSASLLNNLVVCSKCGLGFVHRRKDTTSRGKKYHYRYYSCKTYKHTHELEKCGNKIWRADKLEELIIDRVSNYSFASRNMDKEGELDSLNEKLKLEHAKKKRLFDLYINGSYEVGVLDSMMNDIDAQINYYGSQIEASEELKKNKKIQENLADLATADFDSLGFREKQLYLKSLINKIYIDGEQVTIEWL

SEQ ID NO: 7901 - protein, 469 aa, synthetic construct
MSYTTPVRAAVYLRISEDRSGEQLGVARQREDCLKLCDQRKWVPVEYLDNDVSASTGKRRPAYEQMLADITAGKIAAVVAWDLDRLHRRPIELEAFMSLADEKRLALATVAGDVDLATPQGRLVARLKGCVAAHETEHKKARQRRAARQKAERGYPNWSKAFGYLPGPNGPEPDPRTAPLVKQAYADILAGASLGDVCRQWNDAGASTITGRPWTTTTLSKFLRKPRNAGLRTYKGARYGPVDRDAIMGKAQWSPLVDEATFWAAQAVLDAPGRAPGRKSVRRHLLTGLAGCGKCGNRLAGSYRTDGQVVYVCKACYGVAILADNIVPILYHVVAERLAMPDAVDLLRHEIHDAAEAEAIRLELETLYGELDSLAVERAEGLLTARQVKISTDTVNAKITKLQARQLDQERLRVFDGIPLGTPQVAGVIAELSPDRFRAVLDVLAEVVVQPVGKSGRIFNPERVQVNWR

SEQ ID NO: 7902 - protein, 452 aa, synthetic construct
MKAAIYIRVSTREQVENYSIQAQTEKLTALCRSKGWDVYDIFIDGGYSGSNMNRPALNEMLSKLHEIDAVVVYRLDRLSRSQRDTITLIEEHFLKNNVEFVSLSETLDTSSPFGRAMIGILSVFAQLERETIRDRMVMGKIKRIEAGLPLTTAKGRTFGYDVIDTKLYINEEEAKQLRLIYDIFEEEQSITFLQKRLKKLGFKVRTYNRYNNWLTNDLYCGYVSYKDKVHVKGIHEPIISEEQFYRVQEIFTRMGKNPNMNRGSASLLNNLVVCGKCGLGFVHRRKDAMSRDKKYHYRYYSCKTYKHIHELEKCGNKIWRADKLEELIINRVNNYSLASRNVDKEDELDSLNEKLKTEHAKKKRLFDLYINGSYEVSELDSMMKDIDAQINYYESQIEANEELKKNKKIQENLANLATVDFDSLEFREKQLYLKSLISKIYIDGEQVTIEWL

SEQ ID NO: 7903 - protein, 452 aa, synthetic construct; identical to SEQ ID NO: 4677

SEQ ID NO: 7904 - protein, 485 aa, synthetic construct; identical to SEQ ID NO: 4964

SEQ ID NO: 7905 - protein, 452 aa, synthetic construct
MKAAIYIRVSTREQVENYSIQAQAEKLTALCRSKDWDVYDTFIDGGYSGSNMNRPALNEMLSKLHEIDAVVVYRLDRLSRSQRDTITLIEEYFLKNNVEFVSLSETLDTSSPFGRAMIGILSVFAQLERETIRDRMVMGKIKRIEAGLPLTTAKGRTFGYDVIDTKLYINEEEAKQLRLIYDIFEEEQSITFLQKRLKKLGFKVHTYNRYNNWLTNDLYCGYVSYKDKVHVKGMHEPIISEEQFNRVQEIFTRMGKNPNMNRDSASLLNNLVVCSKCGLGFVHRRKDTMSRGKKYHYRYYSCKTYKHIHELEKCGNKIWRADKLEELIINRVNNYSIASRNVDKEDELDGLNEKLKIEHAKKKRLFDLYINGSYEVSELDSMMNDIDAQISYYESRIEANEEQKKNKKIQENLADLATVDFDSLGFREKQLYLKSLINKIYIDGEQVTIEWL

SEQ ID NO: 7906 - protein, 452 aa, synthetic construct
MKAAIYIRVSTREQVENYSIQAQTEKLTALCRSKDWDVYDIFIDGGYSGSNMNRPALNEMLSKLHEIDAVVVYRLDRLSRSQRDTITLIEEYFLKNNVEFVSLSETLDTSSPFGRAMIGILSVFAQLERETIRDRMVMGKIKRIEAGLPLTTAKGRTFGYDVIDTKLYINEEEAKQLRLIYDIFEEEQSITFLQKRLKELGFKVRTYNRYNNWLTNDLYCGYVSYKDKVHVKGIHEPIISEEQFYRVQEIFTRMGKNPNMNRDSASLLNNLVVCSKCGLGFVHRRKDAMSRDKKYHYRYYSCKTYKHIHELEKCGNKIWRADKLEELIINRVNNYSLTSRNVDKEDELDSLIEKLKIERAKKKRLFDLYINGSYEVSELDSMMNDIDAQINYYESRIEANEELRKNKKIQENLADLATVDFDSLEFREKQLYLKSLINKIYIDGEQVTIEWL

SEQ ID NO: 7907 - protein, 452 aa, synthetic construct
MKAAIYIRVSTQEQVGNYSIQAQTEKLTALCRSKDWDVYDIFVDGGYSGSNMNRPALNEMLSKLHEIDAVVVYRLDRLSRSQRDTTTLIEEYFLKNNVEFVSLSETLDTSSPFGRAMIGILSVFAQLERETIRDRMVMGKIKRIEAGLPLTTAKGRTFGYDVIDTKLYINEEEAKQLQLIYDIFEEEQSITFLQKRLKKLGFKVRTYNRYNNWLTNDLYCGYVSYKDKVHVKGIHEPIISEEQFYRVQEIFTRMGKNPNMNRDSASLLNNLVVCSKCGLGFVHRSKDTMCRGKKYHYRYYSCKTYKCTHELEKCGNKTWRADKLEELIINRVNNYSLASRNVDKEDELDSLNDKLKSEHAKKKRLFDLYISGSYEVSELDSMMNDIDAQINYYESQIEASEELKKNKKIQENLADLATVDFDSLEFREKQLYLKSLINKIYIDGEQVAIEWL

SEQ ID NO: 7908 - protein, 452 aa, synthetic construct
MKAAIYIRVSTREQVENYSIQAQTEKLTALCRSKDWDVYDIFIDGGYSGSNMNRPALNEMLSKLHEIDAVVVYRLDRLSRSQRDTITLIEEYFLKNNVEFVSLSETLDTSSPFGRAMIGILSVFAQLERETIRDRMVMGKIKRIEAGLPLTTAKGRTFGYDVIDTKLYINEEEAKQLQLIYDIFEEEQSITFLQKRLKKLGFKVRTYNRYNNWLTNDLYCGYVSYKDKVHVKGIHEPIISEEQFYRVQEIFARMGKNPNMNRDSASLLNNLVVCSKCGLGFVHRRKDAMSRDKKYHYRYYSCKTYKHIHELEKCGNKIWRADELEELVINRVNSYSVASRNVDKEDELGSLNEKLKIEHAKKKRLFDLYINGNYEVSELDSMMNDIDAQINYYESQVEANEELKKNKKIQENLAYLATVDFDSLEFREKQLYLKSLINKIYIDGEQVTIEWL

SEQ ID NO: 7909 - protein, 452 aa, synthetic construct
MKAAIYIRVSTQEQVENYSIQAQTEKLTALCRSKDWDVYDIFIDGGYSGSNMNRPALNEMLSKLHEIDAVVVYRLDRLSRSQRDTTTLIEEYFLKNNVEFVSLSETLDTSSPFGRAMIGILSVFAQLERETIRDRMVMGKIKRIEAGLPLTTAKGRTFGYDVIDTKLYVNEEEAKQLQLIYDIFEEEQSITSLQKRLKKLGFKVRTYNRYNNWLTNDLYCGYVSYKDKVHVKGIHEPIISEEQFYRVQEIFTRMGKNPNMNRDSESLLSNLVVCSKCGLGFVHRSKDTMSRGKKYHYRYYSCKTYKHTHELEKCGNKIWRADKLEELIINRVNNYSFASRNVDKDDELDSLNEKLKIEHAKKKRLFDLYINGSCEMSELDSMMNDIDAQINYYESQIEANEEQRRNKKIQENLADLATADFDSLEFREKQLYLRSLINKIYIDGEQVTIEWL

SEQ ID NO: 7910 - protein, 452 aa, synthetic construct
MKAAIYIRVSTREQVENYSIQAQTEKLTALCRSKDWDVYDIFIDGGYSGSNMNRPALNEMLSKLHEIDAVVVYRLDRLSRSQRDTITLIEEYFLKNDVEFVSLSETLDTSSPFGRAMIGILSVFAQLERETIRDRMVMGKIKRVEAGLPLTTAKGRTFGYDVIDTRLYINEEEAKQLRLIYDIFEEEQSITFLQKRLKELGFKVRTYNRYNDWLTNDLYCGYVSYKDKVHVKGIHEPIISEEQFYRVQEIFTRMGKNPNMNRDSASLLNNLVVCSKCGLGFVHRRKDTTSRGKKYHYRYYSCKTYKHTHELEKCGNKIWRADKLEELIVNRVNSYSFAGRNVDKEDELDSLNEKLRIELAKKKRLFDLYINGSYEVSELDSMMNDIDAQINYYESQIEANEELKKNKKIQENLANLATVDYDSLEFREKQLYLKSLINKIYIDGEQVTIEWL

SEQ ID NO: 7911 - protein, 485 aa, synthetic construct
MTKKVAIYTRVSTTNQAEEGFSIDEQIDRLTKYAEAMGWQVSDTYTDAGFSGAKLERPAMQRLINDIESKAFDTVLVYKLDRLSRSVRDTLYLVKDVFTKNKIDFISLNESINTSSAMGSLFLTILSAINEFERENIKERMTMGKLGRAKSGKSMMWTKTAFGYYHNRKTGILEIVPLQATIVEQIFTDYLSGISLTKLRDKLNESGHIGKDIPWSYRTLRQTLDNPVYCGYIKFKDSLFEGMHKPIIPYETYLKVQKELEERQQQTYERNNNPRPFQAKYMLSGMARCGYCGAPLRIVLGHKRKDGSRTMKYHCANRFPRKTKGVTVYNDNKKCDSGTYDLSNLENTVIDNLIGFQENNDSLLKIINGNNRPILDASSFKKQISQIDKKIQKNSDLYLNDFITMDELKDRTDSLQAEKKLLKAKISEDKFNDSTDVFELVKTQLGNIPINELSYDNKKKIVNNLVSKVDVTADSVDIIFKFQLA

SEQ ID NO: 7912 - protein, 452 aa, synthetic construct
MKAAIYIRVSTREQVENYSIQAQTEKLTALCRSKDWDVYDIFIDGGYSGSNMNRPALNEMLSKLHEIDAVVVYRLDRLSRSQRDTITLIEEYFLKNNVEFVSLSETLDTSSPFGRAMIGILSVFAQLERETIRDRMVMGKIKRIEAGLPLTTAKGRTFGYDVIDTKLYINEEEAKQLRLIYDIFEEEQSITFLQKRLKKLGFKVHAYNRYNNWLTNDLYCGYVGYKDKVHVKGIHEPIISEEQFYRVQEIFTRMGKNPNMNRDSASLLNNLAVCGKCGLSFVHRRKDAMSRDKKYHYRYYSCKTYKHIHELEKCGNKIWRADKLEELIINRVNNYRLASRNADKGDELDSLNEKLRNEHAKKKRLFDLYINGSYEVSELDSMMSDIDAQINYYESQIEANEELRKNKKIQEDLAHLATVDFDSLEFREKQLYLKSLINKIYIDGEQVTIEWL

SEQ ID NO: 7913 - protein, 452 aa, synthetic construct
MKAAIYIRVSTQEQVGNYSIQAQTEKLTALCRSKDWDVYDIFIDGGYSGSNMNRPALNEMLSKLHEIDAVVVYRLDRLSRSQRDTTTLIEEYFLKNNVEFVSLSETLDTSSPFGRAMIGILSVFAQLERETIRDRMVMGKIKRIEAGLPLTTAKGRTFGYDVIDTKLYINEEEAKQLRLIYDIFEEEQSITSLQKRLKKLGFKVRAYNRYNNWLTNDLYCGYVSYKDKVHVKGIHEPIISEEQFYRVQEIFTRMGKKPNMNRDSASLLNNLVVCSKCGLGFVHRSKDTMSRGKKYHYRYYSCKTYKHTHVLEKCGNKTWRADKLEELIINRVNNYSFASRNADKEDELDSLNEKLKIEHARKKRLFDLYINGSYDVSELDSMMNDIDAQINYYENQIEANEGLKKNKKIQENLADLATVDFDSLEFREKQLYLKSLINKIYIDGEQVTIEWL

SEQ ID NO: 7914 - protein, 485 aa, synthetic construct
MTKKVAIYTRVSTTNQAEEGFSIDEQIDRLTKYAEAMGWQVSDTYTDAGSSGAKLERPAMQRLINDIENKAFDTVLVYKLDRLSRSVRDTLYLVKDVFTKNKIDFISLNESIDTSSAMGSLFLTILSAINEFERENIKERMTMGKLGRAKSGKSMMWTKTAFGYYHNRKTGILEIVPLQATIVEQIFTDYLSGISLTKLRDKLNESGHIGKDIPWSYRTLRQTLDNPVYCGYIKFKDSLFEGMHKPIIPYETYLKVQKELEERQQQAYERNNNPRPFQAKYMLSGMARCGYCGAPLRIVLGHKRKDGSRTMKYHCANRFPRKTKGVTVYNDNRKCDSGTYDLRNLENTVIDNLIGFQGNNDSLLKIINGNNQPILDTSSFKEQISQIDKKIQKNSDLYLNDFITMDELKDRTDSLQAEKKLLKAKISENKFNDSTDVFELVRTQLGSIPIDELSYDDKKKIVNNLVCKVDVTADNVDIIFKFQLA

SEQ ID NO: 7915 - protein, 469 aa, synthetic construct
MSYTTPVRAAVYLRISEDRSGEQLGVARQREDCLKLCSQRRWVPVEYLDNDVSASTGKRRPAYEQMLADITAGKIAAVVAWDLDRLHRRPIELEAFMSLADEKRLALATVAGDVDLATPQGRLVARLKGSVAAHETEHKKARQRRAARQKAERGHPNWSKAFGYLPGPNGPEPDPRTAPLVKQAYADILAGASLGDVCRQWNNAGAFTITGRPWTTTTLSKFLRKPRNAGLRAYKGARYGPVDRDAIVGKARWSPLVDEATFWAAQAVLDAPGRAPGRKSVRRHLLTGLAGCGKCGHHLAGSYRTDGRVVYVCKACHGVAILAENIEPILYHIVAERLAMPDAVDLLRREIHDAAEAETIRLELETLYGELDRLAVERAEGLLTARQVKISTDIVNAKIAKLQARQLDQERLRVFDGIPLGTPQVAGMIAELSPDRFRAVLDVLAEVVVQPVGKSGRSFNPERVQVNWR

SEQ ID NO: 7916 - protein, 452 aa, synthetic construct
MKAAIYIRVSTREQVENYSIQAQTEKLTALCRSKDWDVYDIFIDGGYSGSNMNRPALNEMLSKLHEIDAVVVYRLDRLSRSQRDTITLIEEYFLKNNVEFVSLSETLDTSSPFGRAMIGILSVFAQLERETIRDRMVMGKIKRIEAGLPLTTAKGRTFGYDVIDTKLYINEEEAKQLQLIYDIFEEEQSITFLQKRLKKLGFKVRTYNRYNNWLTNDLYCGYVSYKDKVHVKGIHEPIISEEQFCRVQEIFARMGKNPNMNRDSASLLNNLVVCSKCGLGFVHRRKDTMSRGKKYHYRYYSCKTYKHIHELEKCGNKIWRADELEELIIDRVNNYSFASRNVDKEDELDSLNEKLKIERAKKRRLFDLYINGSYEVSELDGMMNDIDAQINYYESQIVANEELKRNKKIQENLADLATVDFDSLEFREKQLYLKSLINKIYIDGEQVTIEWL

SEQ ID NO: 7917 - protein, 452 aa, synthetic construct
MKAAIYIRVSTQEQVGNYSIQAQTEKLTALCRSKDWDVYDVFVDGGYSGSNMNRPALNEMLSKLHEIDAVVVYRLDRLSRSQRDTTTLIEEYFLKNNVEFVSLSETLDTSSPFGRAMIGILSVFAQLERETIRDRMVMGKIKRIEAGLPLTTAKGRTFGYDVIDTKLYINEEEARQLQLIYDIFEEEQSITFLQKRLKKLGFKVRTYNRYHNWLTNDLYCGYVSYKDKVHVKGIHEPIISEEQFYRVQEIFTRMGKNPNMNRDSASLLNNLVVCSKCGLGFVHRSKDTTSRGRKYHYRYYSCKTYKHTHELEKCGNKTWRADKLEELIINRVNNYSFASRNVDKEDELDSLNEKLKIEHAKKRRLFDLYVNGSYEVSELDSMMNDIDAQISYYESQIEANEELKKNKKIQENLAGLATVDFDSLEFREKQLYLKSLINKIYIDGEQVTIEWL

SEQ ID NO: 7918 - protein, 452 aa, synthetic construct
MKAAIYIRVSTREQVENYSIQAQTEKLTALCRSKDWDVYDIFIDGGYSGSNMNRPALNEMLSKLHEIDAVVVYRLDRLSRSQRDTITLIEEYFLKNNVEFVSLSETLDTSSPFGRAMIGILSVFAQLERETIRDRMVMGKIKRIEAGLPLTTAKGRTFGYDVIDTKLYINEEEAKQLQLIYDIFEEEQSITFLQKRLKKLGFKVRTYNRYNYWLTNDLYCGYVSYKDKVHVKGIHEPIISEEQFYRVQEIFTRMGKNPNMNRDSASLLNNLVVCSKCGLGFVHRRKDAMSRNKKYHYRYYSCKTYKHIHELEKCGNKIWRADKLEELIINRVNDYSLADRNVDKEDELDSLNEKLKIEHAKKKRLFDLYINGSYEVSELDSMMNDIDAQINYYESQIEANEELKKSKKIQENLAYLAAVDFESLEFREKQLYLKSLINKIYIDGEQVTIEWL

SEQ ID NO: 7919 - protein, 452 aa, synthetic construct
MKAAIYIRVSTQEQVGNYSIQAQTEKLTALCRSKDWDVYDIFIDGGYSGSNMNRPALNEMLSKLHEIDAVVVYRLDRLSRSQRDTTTLIEEYFLKNNVEFVSLSETLDTSSPFGRAMIGILSVFAQLERETIRDRMVMGKIKRVEAGLPLTTAKGRTFGYDVIDTKLYINEEEAKQLRLIYDIFEEEQSITSLQKRLKKLGFKVRTYNRYNNWLTNDLYCGYVSYKDKVHVKGIHEPIISEEQFYRVQEIFTRMGKNPNMNRDSASLLNNLVVCGKCGLSFVHRSKDTMSRGKKYHYRYYSCKTYKHTHELEKCGNKTWRADKLEELIINRVNNYSFASRDVDKEDELDSLNEKLKIEHAKKKRLFDLYINGSYEVSELDSMMNDIDARINYYESQIEANEELKKNKKTQENLADLATVDFDSLEFREKQLYLKSLINKIYIDGEQVTIEWL

SEQ ID NO: 7920 - protein, 452 aa, synthetic construct
MKAAIYIRVSTREQVENYSIQAQTERLTALCRSKDWDVYDIFIDGGHSGSNMNRPALNEMLSKLHEIDAVVVYRLDRLSRSQRDTITLIEEYFLKNNVEFVSLSETLDTSSPFGRAMIGILSVFAQLERETIRDRMVMGKIKRVEAGLPLTTAKGRTFGYDVIDTKLYINEEEAKQLQLVYDIFEEEQSITSLQKRLKKLGFKVHTYNRYNNWLTNDLYCGYVSYKDKVHVKGIHEPIISEEQFYRVQEIFTRMGKNPNMNRDSASLLNNLVVCSKCGLGFVHRRKDTMSRGKKYHYRYYSCKTYKHTHELEKCGNKIWRADKLEELIINRVNDYSFASRNVDKEDELDSLNEKLKIEHAKKRRLFDLYINGNYEVGELDSMMSEIDAQINYYESQIEANEELKKNKKIQENLADLATVDFDSLEFREKQLYLKSLINKIYIDGEQVTIEWL

SEQ ID NO: 7921 - protein, 452 aa, synthetic construct
MKAAIYIRVSTREQVENYSIQAQTEKLTALCRSKDWDVYDIFIDGGYSGSNMNRPALNEMLSKLHEIDAVVVYRLDRLSRSQRDTITLIEEYFLRNNVEFVSLSETLDTSSPFGRAMIGILSVFAQLERETIRDRMVMGKIKRIEAGLPLTTAKGRTFGYDVIDTKLYINEEEARQLRLIYDIFEEEQSITLLQKRLKKLGFKVRTYNRYNSWLTNDLYCGYVSYKDKVHVEGIHEPIISEEQFYRVQEIFTRMGKNSNMNRDSASLLNNLVVCSKCGLGFVHRRKDTTSRGKKYHYRYYSCKTYKHTHELEKCGNKIWRADKLEELIINRVNNYSFASRNVDKEDELDSLNEKLKIEHAKRKRLFDLYINGSYEVSELDSMMNDIDAQINYYESQIEANEELKRNKKIQENLAYLATVDYDSLEFREKQLYLKSLINKIYIDGEQVTIEWL

SEQ ID NO: 7922 - protein, 485 aa, synthetic construct
MTKKVAIYTRVSTTNQAEEGFSIDEQIDRLTKYAEAMGWQVSDTYTDAGLSGAKLERPAMQRLINDIENKAFDTVLVYKLDRLSRSVRDTLYLVKDVFTKNKIDFISLNESIDTSSAMGSLFLTILSAINEFERENIKERMTMGKLGRAKSGKSMMWTKTAFGYYHNRKTGILEIAPLQATIVEQIFTDYLSGISLTKLRDKLNEGGHIGKDLPWSYRTLRQTLDNPVYCGYIKFKGSLFEGMHKPIIPYETYLKVQKELEERQQQTYERNNNPRPFQAKYMLGGMARCGYCGAPLRIVLGRKRKDGSRTMKYHCANRFPRKTEGVTVYNDNKKCDSGTYDLSSLENAVIDNLTGLQEDDDSLLKIINGNNQLILDTSSLKKQISLIDKKIQKNSDLYLNDFITMDELRVRTNSLQAEKKLLKAKISENKFNDSTDVFELVKSQLGSIPINELSYDNKKKIVNNLVSKVDVTADNVDIIFKFQLA

SEQ ID NO: 7923 - protein, 452 aa, synthetic construct
MKAAIYIRVSTREQVENYSIQAQTEKLTALCRSKDWDVYDIFIDGGYSGSNMNRPALNEMLSKLHEIDAVVVYRLDRLSRSQRDTITLIEEYFLKNNVEFVSLSETLDTSSPFGRAMIGILSVFAQLERETIRDRMVMGKIKRIEAGLPLTTAKGRTFGYDVIDTKLYINEEEARQLQLIYDIFEEEQSITFLQKRLKKLGFKVRTYNRYNNWLTNDLYCGYVSYKDKVHVKGIHEPIISEEQFYRVQEIFTRMGKNPNMNRESASLLNNLVVCSKCGLGFVHRRKDIMSRGKKYHYRYYSCKTYKHIHELEKCGNKIWRADKLEELVINRVNNYSFASRNADKENELDSLNEKLKIEHAKKKRLFDLYINGRYEMSELDSMMKDIDAQINYYESQIEANEELRKNKKIQEDLAGLATVDFDSLEFREKQLYLKSLISKIYIDGEQVTIEWL

SEQ ID NO: 7924 - protein, 485 aa, synthetic construct
MTKKVAIYTRVSTTNQAEEGFSIDEQIDRLTKYAEAMGWQVSDTYTDAGFSGAKLVRPAMQRLINDIENKAFDTVLVYKLDRLSRSVRDTLYLVKDVFTKNKIDFISLSESIDTSSTMGSLFLTILSAINEFERENIKERMTMGKLGRAKSGKSMMWTKTAFGYYHNRKTGILEIVPLQAAIVEQIFTDYLSGISLTKLRDKLNESGHIGKDIPWSYRTLRQTLDNPVYCGYIKFKGSLFEGVHKPIIPYETYLKVQKELEERQQQTYERNNNPRPFQAKYMLSGMARCGYCGAPLRIVLGHKRKDGSRTMKYHCANRFPRKTKGVTVYNDNKKCDSGTYDLSNLENTVIDNLIGFQENNDSLLKIINGNNQPTLDTSSFKKQISQIDKKIQKNSDLYLNDFITMDELKDRTDRLRAEKKLLKAKISENKFNDSTDVFELVKTQLGSISINELSYDDKKKIVNSLVSKVDVTADNVDIIFKFQLA

SEQ ID NO: 7925 - protein, 452 aa, synthetic construct
MKAAIYIRVSTQEQVGNYSIQAQTEKLTALCRSKDWDVYDIFVDGGYSGSNMNRPALNEMLSKLHEIDAVVVYRLDRLSRSQRDTTTLIEEYFLKNNVEFVSLSETLDTSSPFGRAMIGILSVFAQLERETIRDRMVMGKIKRIEAGLPLTTARGRTFGYDVIDTKLYINEEEAKQLQLIYDIFEEEQSITSLQKRLKKLGFKVRAYNRYNNWLTNDLYCGYVSYKDKVHVKGIHEPIISEEQFYRVQEIFTRMGKNPNMSRDSASLLNNLVVCSKCGLGFVHRSKDTMSRGKKYHYRYYSCKTYKHTHELEKCGNKTWRADKLEELIINRVNNYSFASRNVDKEDELDSLNEKLKVEHAKKKRLFDLYINGSYEVSELDSMMNDIDAQIDYYESQIEANEELKKNKKIQENLADLATVDFDSLEFRGKQLYLKSLINKIYIDGEQVTIEWL

SEQ ID NO: 7926 - protein, 485 aa, synthetic construct
MTKKVAIYTRVSTTNQAEEGFSIDEQIDRLTKYAEAMGWQVSDTYTDAGLSGAKLERPAMQRLINDIENKAFDTVLVYKLDRLSRSVRDTLYLVKDVFTKNKIDFISLSESIDTSSAMGSLFLTILSAINEFERENIKERMTMGKLGRAKSGKSMMWTKTAFGYYHNRKTGVLEIVPLQATIVEQIFTDYLSGISLTKLRDKLNESGHIGKDIPWSYRTLRQTLDNPVYCGYIKFKGSLFEGMHKPIIPYETYLKVQKELEERQQQTYERNNNPRPFQAKYMLSGMARCGYCGAPLRIVLGHKRKDGSRTMKYHCANRFPRTTKGVTVYNDNKKCDSGTYDLSNLENTVIDNLIGFQENDDSLLKIINGNNQPILDTSSFKEQISQIDKKIQKNSDLYLNDFITMDELKDRTDSLQAEKKLLKAKISENEFNDSTDVFELVKTQLGSIPINELSYDNKKKIVNNLVSKVDVTADNVDIIFKFQLA

SEQ ID NO: 7927 - protein, 452 aa, synthetic construct
MKAAIYIRVSTREQVENYSIQAQAEKLTALCRSKDWDVYDVFIDGGYSGSNMNRPALNEMLSKLHEIDAVVVYRLDRLSRSQRDTITLIEEYFLKNNVEFVSLSETLDTSSPFGRAMIGILSVFAQLERETIRDRMMMGKIKRIEAGLPLITAKGRTFGYDVIDTKLYINEEEARQLQLIYDIFEEEQSITFLQKRLKKLGFKVRTYNRYNNWLTNDLYCGYVSYKDKVHVKGIHEPIISEEQFYRVQEIFTRMGKNPNMNRDSASLLNNLVVCSKCGLGFVHRRKDAASRDKKYHYRYYSCKTYKHIHELEKCGNKIWRADKLEELVINRVNNYSLASRNVDKENELDSLNEKLKIERAKRKRLFDLYINGSYEVSELDSMMNDIDAQINYYESQIEANKELKKNKKIQENLADLATVDFDSLEFREKQLYLKSLINKIYIDGEQVTIEWL

SEQ ID NO: 7928 - protein, 452 aa, synthetic construct
MKAAIYIRVSTREQVENYSIQAQTEKLTALCRSKAWDVYDIFIDGGYSGSNMNRPALNEMLSKLHEIDAVVVYRLDRLSRSQRDTITLIEEYFLKNNVEFVSLSETLDTSSPFGRAMIGILSVFAQLERETIRDRMVMGKIKRIEAGLPLTTAKGRTFGYDVIDTKLYINEEEAKQLQLIYDIFEEEQSITLLQKRLKKLGFKVHTYNRYSNWLTNDLYCGYVSYKDKVHVKGIHEPIISEEQFYRVQEIFARMGKNPNMNRDSASLLSNLVMCSRCGLGFVHRRKDTRSRGKKYHYRYYCCKTYKHTHELEKCGNKIWRADKLEELIINRVNNYSLARRNVDKEDELDSLNEKLKIEHAKKKRLFDLYINGSYNVGELDSMMNDIDAQINYYVSQIEANEELKKNKKIRENLANLATVDYDSLEFREKQLYLKSLINKIYIDGEQVTIEWL

SEQ ID NO: 7929 - protein, 485 aa, synthetic construct
MTKKVAIYTRVSTTNQAEEGFSIDEQIDRLTKYAEAMGWQVSDTYTDAGFSGAKLGRPAMQRLINDIENKAFDTVLVYKLDRLSRSVRDTLYLVKEVFTRNKIDFISLNESIDTSSAMGSLFLTILSAINEFERENIKERMTMGKLGRAKSGKSMMWAKTAFGYHHNRKTGILEIVPLQAAIVKQIFTDYLSGISLTKLRDKLNESGHIGKDIPWSYRTLRQTLDNPVYCGYIKFKNSLFKGMHKPIIPYETYLKVQKELEERQQQTYERNNNPRPFQAKYMLSGMARCGYCGAPLKIVLGHKRRDGSRTMKYHCANRFPRKTKGITVYNDNKKCDSGSYDLRNLENTVIDNLIGFQENSDSLLKIINGNSQPILDTSSFKKQISQIDKKIQKNSDLYLNDFITMDELKVRTDSLQAEKKLLKAKISENRFNDSTDVFELVKTQLGSIPINELSYDSKKKIVNILVSKVDVTADNVDIIFKFQLA

SEQ ID NO: 7930 - protein, 452 aa, synthetic construct
MKAAIYIRVSTREQVENYSIRAQTEKLTALCRSKDWAVYDIFIDGGYSGSNMNRPALNEMLSKLHEIDAVVVYRLDRLSRSQRDTITLIEEYFLKNNVEFVSLSETLDTSSPFGRAMIGILSVFAQLERETIRDRMVMGKIKRIEAGLPLTTAKGRTFGYDVIDTKLYINEEEAKQLQLIYDIFEEEQSITFLQKRLKKLGFKVHTYSRYNNWLTNDLYCGYVSYKDKVHVKGIHEPIISEEQFYRVQEILTRMGKNPNMNRDSASLLNNLVVCSRCGLGFVHRRKDTMSRGKKYHYRYYSCKTYKHIHELEKCGNKIWRADKLEELVINRVNNYSFASRNVDKEDELDSLNEKLKIEHAKRKRLFDLYINGSYEVSELDSMMNDIDAQINYYESQIEANEELKKNKKIQENLANLATVDYDGLGFREKQLYLKGLINKIYIDGEQVTIEWL

SEQ ID NO: 7931 - protein, 452 aa, synthetic construct
MKAAIYIRVSTREQVENYSIQAQTEKLTALCRSKGWDVYDIFIDGGYSGSNMNRPALNEMLSKLHEIDAVVVYRLDRLSRSQRDTITLIEEYFLKNNVEFVSLSETLDTSSPFGRAMIGILSVFAQLERETIRDRMVMGKIKRVEAGLPLTTAKGRTFGYDVIDTKLYINEEEAKQLQLIYDIFEEEQSITFLQKRLKKLGYKVRTYNRYSNWLTNDLYCGYVSYKDKVHVKGIHEPIISEEQFYRVQEIFARMGKNPNMNRDSASLLNNLVVCCKCGLGFVHRRKDAMSRDKKYHYRYYSCKTYKHIHELEKCGNKIWRADKLEELIISRVNNYSVASRNVDKEDELDSLNEKLKIEHAKKKRLFDLYINGSYGVSELDSMMSDIDAQINYYESQIEANEELKKDKKIQENLAHLATVDFDSLEFREKQLYLKSLINKIYIDGEQVTIEWL

SEQ ID NO: 7932 - protein, 452 aa, synthetic construct
MKAAIYIRVSTREQVENYSIQAQTEKLTALCRSRDWDVYDVFIDGGYSGSNMNRPALNEMLSKLHEIDAVVVYRLDRLSRNQRDTITLIEEYFLKNSVEFVSLSETLDTSSPFGRAMIGILSVFAQLERETIRDRMMMGKIKRIEAGLPLTTAKGRTFGYDVIDTKLYINEEEAKQLQLIYDIFEEEQSITFLQKRLKKLGFKVRTYSRYNNWLTNDLYCGYVSYKDKVHVKGIHEPIISEEQFYRVQEIFTRMGKNPNMNRDSASLLNNLVVCSKCGLGFVHRRKDAMSRDKKYHYRYYSCKTYKHIHELEKCGNKIWRADKLEELVINRVSNYSLANRNVDKENELDSLNEKLRIEHAKKKRLFDLYINGSYEVSELDSMMNDIDAQINYYESQIEANEELKKNKKIQESLAELAAVDFDSLEFREKQLYLKSLINKIYIDGEQVTIEWL

SEQ ID NO: 7933 - protein, 485 aa, synthetic construct
MTKKVAIYTRVSTTNQAEEGFSIDEQIDRLTKYAEAMGWQVSDTYTDAGLSGAKLERPAMQRLINDIENKAFDTVLVYKLDRLSRSVRDTLYLVKDVFTKNKIDFISLNESIDTSSAMGSLFLTILSAINEFERENIKERMTMGKLGRAKSGKSMMWTKTAFGYYHNRKTGILEIVPLQATIVEQIFTDYLSGISLTKLRDKLNESGHIGKDIPWSYRTLRQTLDNPVYCGYIKFKDSLFEGMHKPIIPYETYLKVQKELEERQQQTYERNNNPRPFQAKYMLSGMARCGYCGAPLRIVLGHKRKDGSRTMKYHCANRFPRKTKGITVYNDNKKCDSGTYDLSDLENTVIDNLIGFQENNDSLLKIINGKDQPILDTSSFKKQISQIDKKIQKNSDLYLNGFITMDELKDRTDSLQAEKKLLKAKISESKFNDSTDVFELVKAQLGSIPISELSYDNKKKLVNNLVSKVDVTADSVDIIFKFQLA

SEQ ID NO: 7934 - protein, 469 aa, synthetic construct
MSYTTPVRAAVYLRISEDRSGEQLGVARQREDCLKLCDQRKWVPVEYLDNDVSASTGKRRPAYEQMLADITAGKIAAVVAWDLDRLHRRPIELEAFMSLADEKRLALATVAGDVDLATPQGRLVARLKGSVAAHETEHKKARQRRAARQKAERGLPNWSKAFGYLPGPNGPEPDPRTAPLVKQAYADILAGASLGDVCRRWNDAGALTITGRPWTTTTLSKFLRKPRNAGLRAYKGARYGPVDRDAIVGKAQWSPLVDEATFWAAQAVLDAPGRAPGRKSVRRHLLTGLAGCGKCGNHLAGSYRTDGRVVYVCKACHGVAILADNIVPILYHIVAERLAMPDAVDLLRREIHDAAEAETIRLELETLYGELDRLAVERAEGLLTARQVKISTDIVSAKITKLQARQLDQERLRVLDGIPLGTPQVAGMIAELSPDRFRAVLDVLAEVVVQPVGKSGRIFNPERVQVNWR

SEQ ID NO: 7935 - protein, 452 aa, synthetic construct
MKAAIYIRVSTREQVENYSIQAQTERLTALCRSKDWDVYDIFIDGGYSGSNMNRPALNEMLSKLHEIDAVVVYRLDRLSRSQRDTITLIEEYFLKNSVEFVSLSETLDTSSPFGRAMIGILSVFAQLERETIRDRMVMGKIKRVEAGLPLTTAKGRTFGYDVIDTKLYINEEEAKQLQLVYDIFEEEQSITFLQKRLKKLGFKVRTYNRYNNWLTNDLYCGYVSYKDKVHVKGIHEPIISEEQFYRVQEIFTRMGKNPNMNRDSASLLNNLVVCSKCGLGFVHRRKDTMSRGKKYHYRYYSCKTYKHTHELEKCGNKIWRADKLEELIINRVNSYSFASRNVDKEDELDSLNEKLKIEHAKKKRLFDLYINGSYEVSELDSMMNDIDAQINYYASQIEANEELRKNKKIQENLADLATVDYDSLEFREKQLYLKSLINKIYIDGEQVTIEWL

SEQ ID NO: 7936 - protein, 485 aa, synthetic construct
MTRKVAIYTRVSTTNQADDGFSIDEQIDRLTKYVEAMGWQVSDTYTDAGFSGAKLERPAMQRLINDIENKAFDTVLVYKLDRLSRSVRDTLYLVKDVFTKNKIDFISLNESINTSSAMGSLFLTILSAINEFERENIKERMTMGKLGRAKSGKSMMWTKTAFGYYHNRKTGILEIVPLQASIVEQIFTDYLSGISLTKLRDKLNESGHIGKDIPWSYRTLRQTLDNPVYCGYIKFKDSLFEGMHKPIIPYETYLRVQKELEERQQQTYERNNNPRPFQAKYMLSGMARCGYCGAPLRIVLGHKRKDGSRTMKYHCANRFPRKTEGVTVYNDNKKCDSGTYDLSNLENTVIDNLIGFQENNDSLLKIINGNDQPILDTSSFEKQISQIDKKIQKNSDLYLNDFITMDELKDRTNSLQAEKKLLKAKISENKFNDSTDVFELVKTQLGSIPINELSYDSKKKIVNNLVSKVDVTADNVDIIYKFQLA

SEQ ID NO: 7937 - protein, 469 aa, synthetic construct
MSYTTPVRAAVYLRISEDRSGEQLGVARQREDCLKLCGQRKWVPVEYLDNDVSASTGKRRPAYEQMLADITAGKIAAVVAWDLDRLHRRPVELEAFMSLADEKRLALATVAGDVDLATPQGRLVARLKGCVAAHETEHKKARQRRAARQKAERGLPNWSKAFGYLPGPNGPEPDPRTAPLVEQAYAGILAGASLGDVCRQWNDAGAFTITGRPWTTTTLSKFLRKPRNAGLRAYKGARYGPVDRDAIVGKAQWSPLVDEATFWAAQAVLDAPGRAPGRKSVRRHLLTGLVGCGKCGNHLAGSHRTDGQVVYVCKACHGVAILADNIEPILYHIVAERLAMPDAVDLLRREIHDAAEAETIRLELETLYGELDRLAVERAEGLLTARQVKISTDIVNAKITKLQARQLDQERLRVLDGIPLGTPQVAGMIAELSPDRFRAVLDVLAEVVVQPVGKSGKIFNPGRVQVNWR

SEQ ID NO: 7938 - protein, 469 aa, synthetic construct
MSYTTPVRAAVYLRISEDRSGEQLGVARQREDCLKLCDQRKWVPVEYLDNDVSASTGKRRPAYEQMLADITAGKIAAVVAWDLDRLHRRPIELEAFMSLADEKRLALATVAGDVDLATPQGRLVARLKGCVAAHETEHKKARQRRAARQKAERGHPNWSKAFGYLSGTNGPEPDPRTAPLVKQAYADILAGASLGDVCRQWNDAGAFTITGRPWTTTTLSKFLRKPRNAGLRAYKGARYGPVDRDAIVGKAQWSPLVDEATFWAAQAVLDAPGRAPGRKSVRRHLLTGLAGCGKCGNHLAGSYRTDGRVVYVCKACHGVAILADNIEPILYHIVTERLAMPDAVDLLHREIHDAAEAEAIRLELETLYGELDRLAVERAEGLLTARQVKISTDIVNAKITKLQARQLDQERLRVFDGIPLGTPQVTGMIAELSPDRFRAVLDVLAEVVVQPVGKSGRIFNPERVQVNWR

SEQ ID NO: 7939 - protein, 452 aa, synthetic construct
MKAAIYIRVSTQEQVGNYSIQAQTEKLTALCRSKDWDVYDVFVDGGYSGSNMNRPALNEMLSKLHEIDAVVVYRLDRLSRSQRDTTTLIEEYFLKNNVEFVSLSETLDTSSPFGRAMIGILSVFAQLERETIRDRMVMGKIKRIEAGLPLTTAKGRTFGYDVIDTKLYINEEEAKQLRLIYDIFEEEQSITLLQKRLKKLGFKVRTYNRYNNWLTNDLYCGYVSYKDKVHVKGIHEPIISEEQFYRVQEIFTRMGKNPNMNRESASLLSNLVVCSKCGLGFVHRSKDTMCRGKKYHYRYYSCKTYKHTHELEKCGNKTWRADKLEELIINRVNNYSFASRDVDKVDELDSLNEKLRIEHAKKKRLFDLYINGSYEVSELDSMMNDIDAQINYYESQIGANEELKRNKKIQENLADLATVDFDSLELREKQLYLKSLINKIYIDGEQVTIEWL

SEQ ID NO: 7940 - protein, 485 aa, synthetic construct
MTKKVAIYTRVSTTNQAEEGFSIDEQIDRLTKYAEAMGWQVSDTYTDAGFSGAKLDRPAMQRLINDIENKAFDTVLVYKLDRLSRSARDTLYLVKDVFTRNKIDFISLNESIDTSSAMGSLFLTILSAINEFERENIKERMTMGKLGRAKSGKSMMWTKTAFGYYHNRKTGILEIVPLQAVIVEQIFTDYLSGISLTKLRDKLNESGHIGKDIPWSYRTLRQTLDNPVYCGYIKFKGSLFEGMHKPIIPYETYLKVQKELEERQQQTYERNNNPRPFQAKYMLSGMARCGYCGAPLKIVLGHKRKDGSRTMKYHCANRFPRKTRGVTVYNDNKKCDSGTYDLSNLENAVIDILIGFQENNDSLLKIINSNNQPILDTSSFKKQISQIDKKIKKNSDLYLNDFITMDELKNRADSLQAEKKLLEAKISENRFNDSTDVFELVKTQLGSIPINELSYDNKKRIVNDLVSKVDVTADNVDIIFKFQLA

SEQ ID NO: 7941 - protein, 485 aa, synthetic construct; identical to SEQ ID NO: 7426

SEQ ID NO: 7942 - protein, 469 aa, synthetic construct
MSYTTPVRAAVYLRISEDRSGEQLGVARQREDCLKLCGQRKWVPVEYLDNDVSASTGRRRPAYEQMLADITAGKIAAVVAWDLDRLHRRPVELEAFMSLADEKRLALATVAGDVDLATPQGRLVARLKGCVAAHETEHKKARQRRAARQKAERGLPNWSKAFGYLPGPSGPEPDPRTAPLVKQAYADILAGASLGDVCRQWNDTGAYTITGRPWTTTTLSKFLRKPRNAGLRAYKGARYGPVDRDAIVGKAQWSPLVDEATFWAAQAVLDAPGRAPGRKSVRRHLLTGLAGCGKCGSHLAGSHRTDGRVVYVCKECHGVAILADNIEPFLYHTVAGRLAMPDAVDLLRCEIHDAAEAETIRLELETLYGELDRLAVERAEGLLTARQVKISTDAVNAKIAKLQARQLDQGRLRVLDGIPLGTPQVAGVITGLSPDRFRAVLDVLAEVVVQPAGKGGRIFNPERVQVNWR

SEQ ID NO: 7943 - protein, 452 aa, synthetic construct
MKAAIYIRVSTREQVENYSIQAQTEKLTALCRSKNWDVYDIFIDGGYSGSNMNRPALNEMLSKLHEIDAVVVYRLDRLSRSQRDTITLIEEHFLKNNVEFVSLSETLDTSSPFGRAMIGILSVFAQLERETIRDRMVMGKIKRIEAGLPLTTAKGRTFGYDVIDTKLYINEEEAKQLQLIYDIFEEEQSITFLQKRLKKLGFKVRTYNCYNNWLTNDLYCGYVSYKDKVHVKGIHEPIISEEQFYRVQEIFTRMGRNPNMNRDSASLLNNLVVCSKCGLGFVHRRKDTVSRGKKYHYRYYSCKTYKHTHELEKCGNKIWRAGKLEELVINRVNNYSFASRNVDKEDELDSLNEKLKIEHAKKKRLFDLYINGGYEMSELDSMMNDIDAQINYYESQIEANEGLKRNKKIQENLAHLVTVDFDSLEFREKQLYLKSLINKIYIDGEQVTIEWL

SEQ ID NO: 7944 - protein, 452 aa, synthetic construct
MKAAIYIRVSTQEQVGNYSIQAQTEKLTALCRSKGWGVYDIFIDGGYSGSNMNRPALNEMLSKLHEIDAVVVYRLDRLSRSQRDTTTLIEEYFLKNNVEFVSLSETLDTSSPFGRAMIGILSVFAQLERETIRDRMVMGKIKRIEAGLPLTTAKGRTFGYDVIDTKLYINEEEAKQLRLIYDIFEEEQSITFLQKRLKKLGFKVRTYNRYNSWLTNDLYCGYVSYKDKVHVKGIHEPIISEEQFYRVQEIFTRMSKNPNMNRDSASLLSNLVVCSKCGLGFVHRSKDTMSRGKKYHYRYYSCKTYKHTHELEKCGNKTWRADKLEELVINRVNNYSFASRNVDKEDELDSLNEKLKIEHAKKKRLFDLYINGSYEVSELDGMMNDIDAQINYYESQIEANEELKKNKKIQEDLADLATVDFDSLEFREKQLYLKSLINKIYIDGEQVTIEWL

SEQ ID NO: 7945 - protein, 452 aa, synthetic construct
MKAAIYIRVSTQEQVENYSIQAQTEKLTALCRSKDWDVYDIFIDGGYSGSNMNRPALNEMLSKLHEIDAVVVYRLDRLSRSQRDTTTLIEEYFLKNNVEFVSLSETLDTSSPFGRAMIGILSVFAQLERETIRDRMVMGKIKRIEAGLPLTTAKGRTFGYDVIDTKLYINEEEAKQLQLIYDIFEEERSITSLQKRLKKLGFKVRTYNRYNSWLTNDLYCGYVSYKDKVHVKGIHEPIISEEQFYRVQEIFTRMGKNPNMNRDSTSLLNNLVVCSKCGLGFVHRRKDTMSGGKKYHYRYYSCKTYKHAHELEKCGNKTWRADKLEELIISRVSNYSFVSRNVDKEDELDSLNEKLKIEHAKKKRLFDLYINGSYEVSELDSMMNDIDAQINYYESQIEANEELKKNKKIQENLAGLATVDFDSLEFREKQLYLKSLINKIYIDGEQVTIEWL

SEQ ID NO: 7946 - protein, 452 aa, synthetic construct
MKAAIYIRVSTREQVENYSIQAQTEKLTALCRSKDWDVYDIFIDGGYSGSNMNRPALNEMLSKLHEIDAVVVYRLDRLSRSQRDTITLIEEYFLKNNVEFVSLSETLDTSSPFGRAMIGILSVFAQLERETIRDRMVMGKIKRIEAGLPLTTAKGRTFGYDVIDTKLYINEEEAKQLQLIYDIFEEEQSITSLQKRLKKLGFKVRTYSRYNSWLTNDLYCGYVSYKDRVHVKGIHEPIISEEQFYRVQEIFTRMGKNPNMNRDSASLLNNLVVCSKCGLGFVHRRKDTVSRGKKYHYRYYSCKTYKHTHELEKCGNKIWRADKLEELIINRVNNYSLASRNVDKEDELDSLNEKLKIEHAKKRRLFNLYINGSYEVSELDSMMNDIDAQINYYENQIEANEELRKNRKIQENLADLATVDFDSLEFREKQRYLKSLINKIYIDGEQVTIEWL

SEQ ID NO: 7947 - protein, 452 aa, synthetic construct
MKAAIYIRVSTQEQVGNYSIQAQTEKLTALCRSKGWDVYDIFIDGGYSGSNMNRPALNEMLSKLHEIDAVVVYRLDRLSRSQRDTTTLIEEYFLKNNVEFVSLSETLDTSSPFGRAMIGILSVFAQLERETIRDRMVMGKIKRIEAGLPLTTAKGRTFGYDVIDTKLYINEEEAKQLQLIYDIFEEEQSITSLQKRLKKLGFKVRTYNRYNNWLTNDLYCGYVSYKDKVHVKGIHEPIISEEQFYRVQEIFTRMGKNPSMNRDSASLLSNLVVCSKCGLGFVHRSKDTMSRGKKYHYRYYSCKTYKHTHELEKCGNKTWRADKLEELVINRVNNYSFASRNVDKEDELDSLNGKLEIERAKRKRLFDLYINGGYEVSELDCMMNDIDAQINYYESQIEANEELKKNKKIQENLAGLATVDFDSLEFREKQLYLKSLINKIYIDGEQVTIEWL

SEQ ID NO: 7948 - protein, 469 aa, synthetic construct
MHYTTPVRAAVYLRISEDRSGEQLGVARQREDCLKLCGQRKWVPVEYLDNDVSASTGKRRPAYEQMLADITAGKIAAVVAWDLDRLHRRPIELEAFMNLADEKRLALATVAGDVDLATPQGRLVARLKGSVAAHETEHKKARQRRAARQKAERGHPNWSKAFGYLPGPNGPEPDPRIAPLVKQAYADILAGASLGDVCRRWNNAGAFTITGRPWTTTTLSKFLRKPRNAGLRAYKGARYGPVDRDAIVGKAQWSPLVDEATFWAAQAVLDAPGRAPGRKSVRRHLLTGLVGCGKCGNHLAGSYRTDGRVVYVCKACHGVSILADNIVPILYHIVAERLAMPDAVDLLRREIHDAAEAETIRLELETLYGELDRLAVERAEGLLTARQVKISTDIVNAEITKLQARQLDQERLRVLDGIPLGTPQVAGMIAELSPDRFRAVLDVLAEVVVRPVGKSGRVSNPERVQVNWR

SEQ ID NO: 7949 - protein, 452 aa, synthetic construct
MKAAIYIRVSTREQVENYSIQAQTEKLTALCRSKDWDVYDIFIDGGYSGSNMNRPALNEMLSKLHEIDAVVVYRLDRLSRSQRDTVTLIEEYFLKNNVEFVSLCETLDTSSPFGRAMIGILSVFAQLERETIRDRMVMGKIKRIEAGLPLITAKGRTFGYDVIDTKLYINEEEAKQLQLIYDIFEEEQSITFLQKRLKKLGFKVHTYNRYNNWLTNDLYCGYVSYKDKVHVKGIHEPIISEEQFYRVQEIFTRMGKNPNMNRDSASLLNNLVVCSKCGLGFVHRRKDTMSRGKKYHYRYYSCKTYKHTHELEKCGNKIWRADKLEELIINRVNNYSFASRNGDKEDELGSLNEKLKIEHAKKKRLFELYINGSYEVGELDSMMNDIDAQINYYESQVEANEELKRSKKIQENLADLATVDFDSLEFREKQLYLKSLINKIYIDGEQVTIEWL

SEQ ID NO: 7950 - protein, 469 aa, synthetic construct
MSYTTPVRAAVYLRISEDRSGEQLGVARQREDCLKLCGQRKWVPVEYLDNDVSASTGKRRPAYEQMLADITAGKIAAVVAWDLDRLHRRPIELEAFMSLADEKRLALATVAGDVDLATPQGRLVARLKGCVAAHETEHKKARQRRAARQKAERGLPNWSKAFGYLPGPNGPEPDPRTAPLVKQAYADILAGASLGDVCRQWNDAGAFTITGRPWTTTTLSKFLRKPRNAGLRAYKGARYGPVDRDAIVGKAQWSPLVDEATFWAAQAVLDAPGRAPGRKSVRRHLLTGLAGCGKCGNHLAGSYRTDGRVVYVCKACHGVSILADIIEPILYRIVAERLAMPDAVDLLRREIHDAAEAETTRLELETLYGELDCLAVERAEGLLTARQVKISTDIVNAKITKLRARQLDQERLRVFDGIPLGTPQVAGMIAELSPDRFRAVLDVLAEVVVQPVGKSGRICNPERVQVNWR

SEQ ID NO: 7951 - protein, 452 aa, synthetic construct
MKAAIYIRVSTREQVENYSIQAQTEKLTALCRSKDWDVYDIFIDGGYSGSNMNRPALNEMLSKLHEIDAVVVYRLDRLSRSQRDTITLIEEYFLKNNVEFVSLSETLDTSSPFGRAMIGILSVFAQLERETIRDRMVMGKIKRVEAGLPLTTAKGRTFGYDVIDTRLYINEEEAKQLQLIYDIFEEEQSITFLQKRLKRLGFKVRTYNRYISWLTNDLYCGYVSYKDKVHVKGIHEPIISEEQFYRVQEIFTRMGKNPNMNRDSASLLNNLVVCSKCGLGFVHRRKDTMSRGKKYHYRYYSCKTYKHTHELEKCGNKIWRADKLEELIINRVNNYSFASRNVDKEDELDSLNEKLKIERAKKERLFDLYINGSYEVSELGSMMNDIDAQINYYESQIEANEELKKNKKIQEDLAALATVDFDSLEFREKQLYLKSLINKIYIDGEQVTIEWL

SEQ ID NO: 7952 - protein, 485 aa, synthetic construct
MTKKVAIYTRVSTTNQAEEGFSIDEQIDRLTKYAEAMGWQVSDTYTDAGFSGAKLGRPAMQRLINDIENKAFDTVLVYKLDRLSRSVRDTLYLVKDVFTKNKIDFISLNESIDTSSAMGSLFLTILSAINEFERENIKERMAMGKLGRAKSGKSMMWTKTAFGYYHNRKTGILEIVPLQATIVEQIFTDYLSGISLTKLRDKLNESGHIGKDIPWSYRTLRQTLDNPVYCGYIKFKDSLFEGMHKPIIPYETYLRVQKELEERQQQTYERNNNPRPFQAKYMLSGMARCGYCGAPLRIVLGHKRKDGSRTMKYHCANRFPRKTKGVTVYNDNKKCDSGAYDLSNLENTVIDNLIGFQENNDSLLKIINGNNQPALDTSSFEKQISLIDKKIRKNSDLYLNDFITMDELKDRTDSLRAEKKLLKAKISENKYNDSTDVFELVKAQLGSIPINELSYDNKKKIVNNLVSKVGVTADNVDIIFKFQLT

SEQ ID NO: 7953 - protein, 485 aa, synthetic construct
MTKKVAIYTRVSTTNQAEEGFSIDEQIDRLTKYAEAMGWQVSDTYTDAGFSGAKLERPAMQRLINDIENKAFDTVLVYKLDRLSRSVRDTLYLVKDVFTKNKIDFISLNESIDTSSAMGSLFLTILSAINEFERENIKERMTMGKLGRAKSGKSMMWTKTAFGYYHNCKTGILEIVPLQATIVEQIFTDYLSGISLTKLRDKLNESGHIGKDIPWSYRTLRQTLDNPVYCGYIKFKGSLFEGMHKPIIPYETYLKVQKELEERQQQTYERNNNPRPFQAKYMLSGMARCGYCGAPLRIVLGHKRKDGSRTMKYHCANRFPRKTKGVTMYNDNKKCDSGTYDLSNLENTVIDYLIGFQENNDSLLKIINGNNQPILDTSSFKKQISQIDKKIQKNTDLYLNDFITMDELKDRTDSLQAEKKLLKGRISENRFNDSTDVFELVKTQLGSTPVNELSYDNKKKIVNNLVSKVDVTADNVDIIFKFQLA

SEQ ID NO: 7954 - protein, 485 aa, synthetic construct
MTKKVAIYTRVSTTNQAEEGFSIDEQIDRLTKYAEAMGWQVSDTYTDAGLSGAKLERPAMQRLINDIENKAFDTVLVYKLDRLSRSVRDTLYLVKDVFTRNKIDFISLNESIDTSSAMGSLFLTILSAINEFERENIRERMTMGKLGRARSGKSMMWTKTAFGYYHNRKTGILEIVPLQATIVEQIFTDYLSGISLTKLRDKLNESGHIGKDIPWSYRTLRQTLDNPVYCGYIKFKGSLFEGMHKPIIPYGTYLKVQKELEERQQQTYERNNNPRPFQAKYMLSGMARCGYCGAPLKIVLGHKRKDGSRTMKYHCANRFPRKTKGITVYNDNKKCDSGTYDLSNLENTVIDNLIGFQEDNDSLLKIINGNNQPTLDTSGFKEQISQIDKKIQKNSDLYLNDFITMDELKDRTDSLQAEKKLLEAKISENKFNDSTDVFELVKTQLGSIPINELSYDNKKKIVNNLVSKVDVTADNVDIIFKFQLA

SEQ ID NO: 7955 - protein, 452 aa, synthetic construct
MKAAIYIRVSTREQVENYSIQAQTERLTALCRSKDWDVYDIFIDGGYSGSNMKRPALNEMLSKLHEIDAVVVYRLDRLSRSQRDTITLIEEYFLKNNVEFVSLSETLDTSSPFGRAMIGILSVFAQLERETIRDRMVMGKIKRIEAGLPLTTAKGRTFGYDVIDTKLYINEEEAKQLQLIYDIFEEEQSITFLQKRLKKLGFKVRTYSRYINWLTNDLYCGYVSYKDKVHVKGIHEPIISEEQFYRVQEIFTRMGKNPNMNRDSASLLNNLVVCSKCGLGFVHRRKDTVSRGKKYHYRYYSCKTYKHIHELEKCGNKIWRADKLEELIIDRVNNYSLASRNVDKEDELDSLNEKLKIEHAKKKRLFDLYINGGCEVSELDSMMSDIDAQINYYESQIEANEELKKNKKIQENLADLATVDFDSLEFREKQLYLKSLINKIYIDGEQVTIEWL

SEQ ID NO: 7956 - protein, 469 aa, synthetic construct
MSYTTPVRAAVYLRISEDRSGEQLGVARQREDCLKLCDQRKWVPVEYLDNDVSASTGKRRPAYEQMLADITAGKIAAVVAWDLDRLHRRPIELEAFMCLADEKRLALATVAGDVDLATPQGRLVARLKGSVAAHETEHKKARQRRAARQKAERGHPNWSKAFGYLPGPNGPEPDPRTAPLVKQAYADILAGASLGDVCRQWNDAGAFTITGRPWTTTTLSKFLRKPRNAGLRAYKGARYGPVDRDAIVGKAQWSPLVDEATFWAAQAVLDAPGRAPGRKSVRRHLLTGLAGCGKCGNHLAGSYRTDGRVVYVCKACHGVAILADNIEPTLYRIVAERLAMPDAVDLLRREIHDAAEAETIRVELETLYGELDRLAVERAEGLLTARQVKISTDIVNAKITKLQARQLDQERLRVFGGIPLGTPQVAGTIAELSPDRFRAVLDVLAKVVVQPVGKSGRIFNPERVQVNWR

SEQ ID NO: 7957 - protein, 485 aa, synthetic construct
MTKKVAIYTRVSTTNQAEEGFSIDEQIDRLTKYAEAMGWQVSDTYTDAGFSGAKLERPAMQRLINDIENKSFDTVLVYKLDRLSRSVRDTLYLVKEVFTKNKIDFISLSESIDTSSAMGSLFLTILSAINEFERENIKERMTMGKLGRAKSGKSMMWTKTAFGYYHNRKTGILEIVPLQATIVEQIFTDYLSGISLTKLRDKLNESGHIGKDIPWSYRTLRQTLDNPVYCGYIKFKDSLFEGMHKPIIPYETYLKVQKELEERQQQTYERNNNPRPFQAKYMLSGMARCGYCGAPLRIVLGHKRKDGSRTMKYHCANRFPRKTKGVTVYNGNKKCDSGTYDLSNLENTVIDNLIGFQENNDSLLKIINGNNQPTLDTCSFKKQVSQIDKKIQKNSDLYLNDFITMDELKDRTDSLQAEKKLLKAKISENKFNDSTDVFELVKTQLGSIPINELSYDNKKKIVNNLVSKVDVTADNVDIIFKFQLA

SEQ ID NO: 7958 - protein, 452 aa, synthetic construct
MKAAIYIRVSTREQVENYSIQAQTEKLTALCRSKDWDVYDIFIDGGYSGSNMNRPALNEMLSKLHEIDAVVVYRLDRLSRSQRDTITLIEEYFLKNNVEFVSLSETLDTSSPFGRAMIGILSVFAQLERETIRDRMVMGKIKRIEAGLPLTTAKGRTFGYDVIDTKLYINEEEAKQLQLIYDIFEEEQSITLLQKRLKRLGFKVRTYNRYKDWLTNDLYCGYVSYKDKVHVKGIHEPIISEEQFHRVQEIFTRTGKNPNMNRDSASLLNNLVVCSKCGLGFVHRRKDTMSRGKKYHYRYYSCKTYKHTHELEKCGNKIWRADKLEELIISRVSNYSFASRDVDKEDELDSLDEKLKIEQAKRKRLFDLYINGSYNVSELDSLMNDIDAQINYYESQIEANGELKKNKKIQENLADLATVDFDSLEFREKQLYLKSLINKIYIDGEQVTIEWL

SEQ ID NO: 7959 - protein, 469 aa, synthetic construct
MSYTTPVRAAVYLRISEDRSGEQLGVARQREDCLKLCDQRKWVPVEYLDNDVSASTGKRRPAYEQMLADITAGKIVAVVAWDLDRLHRRPIELEAFMSLADEKRLALATVAGDVDLATPQGRLVARLKGSVAAHETEHKKARQRRAARQKAERGHPNWSKAFGYMPGPNGPEPDPRTAPLVKQAYADILAGASLGDVCRQWNAAGAFTITGRPWTTTALSKFLRKPRNAGLRAYKGARYGPVDRDAIVGKAQWSPLVDEATFWAAQAVLDAPGRAPGRKSVRRHLLTGLAGCGKCGNHLAGSYRTDGRVVYVCKACHGVAILADNIEPILYHIVAERLAMPDAVDLLRREIHDAAEAETIRLELETLYGELDRLAVERAEGLLTARQVKISTDIVNAKITKLQARQLDQERLRVLDGIPLGTPQVAGEVAELSPDRFRAVLDVLAEVVVQPVGKSGRIFNPERVQVNWR

SEQ ID NO: 7960 - protein, 485 aa, synthetic construct
MTKKVAIYTRVSTTNQAEEGFSIDEQIDRLTKYAEAMGWQVSDTYTDAGFSGAKLGRPAMQRLINDIENKAFDTVLVYKLDRLSRSVRDTLYLVKDVFTKSKIDFISLNESIDTSSAMGSLFLTILSAINEFEREDIKERMTMGKLGRAKSGKSMMWTKTAFGYYHNRKTGILEIVPLQATIVEQIFTDYLSGISLTKLRDKLNESGHIGKDIPWSYRTLRQTLDNPVYCGYIKFKDSLFEGMHKPIIPYETYLKVQKELEERQQQTYERNNNPRPFQAKYMLSGMARCGYCGAPLRIVLGHKRKDGSRTMKYHCANRFPRKTKGVTVYNDNKKCDSGTYDLSSLENTVIDNLIGFQENNDCLLKIINGNNQPILDTSSLKKQISQIDKKIQKNSDLYLNDFITMDELKDRTDSLQAEKKLLKAKISENKFNDSTDVFELVKTQLGSIPINELSYDNKKKIVNNLVSKVDVTADNVDIIFKFQLA

SEQ ID NO: 7961 - protein, 485 aa, synthetic construct
MTKKVAIYTRVSTTNQAEEGFSIDEQVDRLTKYAEAMGWQVSDIYTDAGLSGAKLERPAMQRLINDIENKAFDTVLVYKLDRLSRSVRDTLYLVKDVFTKNKIDFISLNESIDTSSAMGSLFLTILSAINEFERENIKERMTMGKLGRAKSGKSMMWTKTAFGYYHNRKTGILEIVPLQATIVEQIFTDYLSGISLTKLRDKLNESGHIGKDIPWSYRTLRQTLDNPVYCGYIKFKGSLFEGMHKPIIPYETYLKVQKELEERQQQAYERNNNPRPFQAKYMLSGMARCGYCGAPLRIVLGHKRKDGSRTMKYHCANRFPRKTKGVTMYNDNKKCDSGTYDLSSLENIVIDNLIGIQESNDSLLKIINGNNQPILDTSSFKEQISQIDKKIQKNSDLYLNDFITMDELKDRTDSLQAEKKLLKAKISENKFNDSTDVFELVKTQLGSIPINELSYDNKKKIVNNLVSKVDVTADNVDIIFKFQLA

SEQ ID NO: 7962 - protein, 469 aa, synthetic construct
MCYTTPVRAAVYLRISEDRSGEQLGVARQREDCLKLCGQRKWVPVEYLDNDVSASTGKRRPAYEQMLADISAGKIAAVVAWDLDRLHRRPIELEAFMSLADEKRLALATVAGDVDLATPQGRLVARLKGSVAAHETEHKKARQRRAARQKAERGYPNWSKAFGYLPGPNGPEPDPRTAPLVKQAYADILAGASLGDVCRQWNDAGALTITGRLWTTTTLSKFLRKPRNAGLRAYRGARYGPVDRDAIVGKAQWSPLVDEATFWAAQAVLDAPGRAPGRKSVRRHLLTGLAGCGKCGNHLAGSYRTDGRVVYVCKACHGVAILADNIEPILYHIVAERLAMPDAADLLRREIQDAAEAETIRLELETLHGELDRLAVERAEGLLTARQVKISTDIVNAKITKLQARQLDQERLRVLDGIPLGTPQVAGVIAELSPDRFRAVLDVLAEVVVQPVGKSGRIFNPERVQVNWR

SEQ ID NO: 7963 - protein, 485 aa, synthetic construct
MTKKVAIYTRVSTTNQAEEGFSIDEQIDRLTKYAEAMGWQVSDTYTDAGFSGAKLERPAMQRLINDIENKAFDTVLVYKLDRLSRSVRDTLYLVKDVFTKNKIDFISLNECIDTSSAMGSLFLTILSAINEFERENIKERMTMGKLGRAKSGKSMMWTKTAFGYYHNRKTGILEIVPLQATIVEQIFTDYLRGISLTKLRDKLNESGHIGKDIPWSYRTLRQTLDNPVYCGYIKFKGSLFEGMHKPIIPYETYLKVQKELGERQRQTYERNNNPRPFQAKYMLSGTARCGYCGAPLRIVLGHKRKDGSRTMKYHCANRFPRKTKGITVYNDNKKCDSGTYDLSNLENTVIDYLIGFQEYNDSLLKIINGNNQPILDTSSFKKLISQIDKKIQKNSDLYLNDFITMDELKDRTNSLQAEKKLLEAKISEGKFNDSTDVFELVKTQLGSIPISELSYDDKKKIVNNLVSKVDVTADNVDIIFKFQLA

SEQ ID NO: 7964 - protein, 485 aa, synthetic construct
MTKKVAIYTRVSTTNQAEEGFSIDEQIDRLTKYAEAMGWQVSDTYTDAGFSGAKLGRPAMQRLINDIENRAFDTVLVYKLDRLSRSVRDTLYLVKDVFTKNKIDFISLNESINTSSAMGSLFLTILSAINEFERENIKERMTMGKLGRAKSGKSMMWTKTAFGYYHNRKTGILEIVPLQATIVEQIFTDYLSGISLTKLRDKLNESGHVGKDIPWSYRTLRQTLDNPVYCGYIKFKGSLFEGMHKPIIPYETYLRVQKELEERQQQTYERNNNPRPFQAKYMLSGMARCGYCGAPLKIVLGHKRKDGSRTMKYHCANRFPRKTKGVTVYNDNKKCDSGTYDLSSLENTVIDYLIGFQENNDSLLKIINGNNQPILDISSFKKQISLIDKKIQKNSDLYLNDFITMDELKDRTDSLQAEKRLLKAKISENKFNDSTDVFELVETQLGSIPINELSYDNKKKIVNNLVSKVDVTADNVDIIFKFQLT

SEQ ID NO: 7965 - protein, 452 aa, synthetic construct
MKAAIYIRVSTREQVENYSIQAQTEKLTALCRSKDWEVYDIFIDGGYSGSNMNRPALNEMLSKLHEIDAVVVYRLDRLSRSQRDTITLIEEYFLKNNVEFVSLSETLDTSSPFGRAMIGILSVFAQLERETIRDRMVMGKIKRIEAGLPLTTAKGRTFGYDVIDTKLYINEEEAKQLQLIYDIFEEEQSITFLQKRLRKLGFKVRTYSCYNNWLTNDLYCGYVSYKDKVHVKGIHEPIISEEQFYRVQEIFTRMGKNPNMNRDSASLLNNLVVCSKCGLGFVHRRKDTVSRGKKYHYRYYSCKTYKHIHELEKCGNKTWRADKLEELIINRVNNYSFASRNVDKEDELDSLNEKLKIEHTKRKRLFDLYINGSYEVSELDSMMNDIDARINYYESQIEAIEELRKSKKIQENLADLATVDYDSLEFREKQLYLKSLINKIYIDGEQVTVEWL

SEQ ID NO: 7966 - protein, 485 aa, synthetic construct
MTKKVAIYTRVSTTNQAEEGFSIDEQIDRLTKYAEAMGWQVSDTYTDAGFSGAKLERPAMRRLINDIENEAFDTVLVYKLDRLSRSVRDTLYLVKDVFTKNEIDFISLSESIDTSSAMGSLFLTILSAINEFERENIKERMTMGKLGRAKSGKSMMWTKTAFGYYHNRKTGILEIVPLQATIVEQIFTDYLSGISLTKLRDKLNESGHIGKDIPWSYRTLRQTLDNPVYCGYIKFKDSLFEGMHKPIIPYETYLKVQKELEERQQQTYERNNNPRPFQAKYMLSGMARCGYCGAPLRIVLGHKRKDGSRTMKYHCANRFPRKTKGVTVYNDNKKCDSGTYDLSNLENTVIDNLMGFQENNDSLLKIINGNNQPVLDTSSFKEQISQIDKKIQKNSDLYLNDLITMDELKDRTDSLQAEKKLLKAKISENKFYDSTGVLELVKTQLGSIPINELSYDDKKKIVNNLVSKVDVTADNVDIIFKFQLA

SEQ ID NO: 7967 - protein, 469 aa, synthetic construct
MSYTTPVRAAVYLRISEDRSGEQLGVARQREDCLKLCGQRKWVPVEYLDNDVSASTGKRRPAYEQMLADITAGKIAAVVAWDLDRLHRRPIELEAFMCLADEKRLALATVAGDVDLATPQGRLVARLKGCVAAHETEHKKARQRRAARQKAERGLPNWSKAFGYLPGPNGPEPDPRTAPLVKQAYADILAGASLGDVCRQWNDAGAVTITGRPWTTTTLSKFLRKPRNAGLRAYKGARYGPVDRDAIVGKAQWSPLVDEATFWAAQAVLDAPGRAPGRKSVRRHLLTGLAGCGKCGNHLAGSYRTDGRVVYVCKACHGIAILADNIEPILYHIVAERLAMPDAVDLLCREIHDAAGAETIRLELEALYGELDRLAVERAEGLLTARQVKISTDIVNAKITKLQARRLDQERLRVFDGIPLGTPQVAGMIAGLSPDRFRAVLGVLAEVVVQPVGKSGRIFNPERVQVNWR

SEQ ID NO: 7968 - protein, 485 aa, synthetic construct
MTKKVAIYTRVSTTNQAEEGFSIDEQIDRLTKYAEAMGWQVSDTYTDAGHSGAKLERPAMQRLINDIENKAFDTVLVYKLDRLSRSVRDTLYLVKDVFTKNKIDFISLNESIDTSSAMGSLFLTILSAINEFERENIKERMTMGKLGRAKSGKSMMWTKTAFGYYHNRKTGILEIVPLQATIVEQIFTDYLSGISLTRLRDKLNESGHIGKDIPWSYRTLRQTLDNPVYCGYIKFKGSLFEGMHKPIIPYETYLKVQKELEERQRQAYERNNNPRPFQAKYMLSGMARCGYCGAPLRIVLGHKRKDGSRTMKYHCANRFPRKTKGVTVYSDNKKCDSGTYDLSILENTVIDNLIGFQENNDSLLEIINGNNQPIQDTSSLKKQISQIDKKIQKNSDLYLNDFITMDELKDRTDSLQAEKKLLKAKISENKFNDSTDVFELVKTQLGSIPINELSYDNKKKIVNNLVSKVDVTADNVDIIFKFQLA

SEQ ID NO: 7969 - protein, 452 aa, synthetic construct
MKAAIYIRVSTREQVENYSIQAQTEKLTALCRSKDWDVYDVFIDGGYSGSNMNRPALNEMLSKLHEIDAVVVYRLDRLSRSQRDTITLIEEYFLKNNVEFVSLSETLDTSSPFGRAMIGILSVFAQLERETIRDRMVMGKIKRIEAGLPLTTAKGRTFGYDVIDTKLHINEEEAKQLQLIYDIFEEVQSITFLQKRLKKLGFKVRTYNCYNNWLTNDLYCGYVSYKDKVHTKGIHEPIISEEQFCRVQEIFTRMGKNPNMNRDSASLLSNLVVCGKCGLGFVHRRKDTMSRGKKYHYRYYSCKTYKHIHELEKCGNKIWRADKLEELIIDRVNNYSLANRNVDKADELDSLNEKLKIEHAKKRRLFDLYINGSYEVSELDSMMNDIDAQINYYENQIEANEELKKNKKIQENLAELATVDFDSLEFREKQLYLKSLISKIYIDGEQVTIEWL

SEQ ID NO: 7970 - protein, 469 aa, synthetic construct
MSYTTPVRAAVYLRISEDRSGEQLGVARQREDCLKLCGQRKWEPVEYLDNDVSASTGKRRPAYEQMLADITAGKIAAVVAWDLDRLHRRPIELEAFMSLADEKRLALATVAGDVDLATPQGRLVARLKGSVAAHETEHKKARQRRAARQKAERGHPNWSKAFGYLPGPNGPEPDPRTAPLVKQAYADILAGASLGDVCRRWNDAGAFTITGRPWTTTTLSKFLRKPRNAGLRAYKGARYGPVDRDAIVGKAQWSPLVDETTFWAAQAVLDAPGRAPGRKSVRRHLLTGLAGCGKCGNHLAGSYRTDGKVVYVCKACHGVAILADNIEPILYHIVAERLAMPDAVDLLRRGIHDAAEAETIRLELETLYGELDRLAVERAEGLLTARQVKISTDIVNAKITKLRACQLDQERLRVLDGIPLGTPQVAGMIAELSPNRFRAVLDVLAEVVVQPVGKSGRIFNPERVQVNWR

SEQ ID NO: 7971 - protein, 452 aa, synthetic construct
MKAAIYIRVSTHEQVENYSIRAQTEKLTALCRSKGWDVYDIFIDGGYSGSNMNRPALNKMLSKLQEIDAVVVYRLDRLSRSQRDTTTLIEEYFLKNNVEFVSLSETLDTSSPFGRAMIGILSVFAQLERETIRDRMVMGKIKRIEAGLPLTTAKGRTFGYDVIDTKLYINEEEAKQLQLIYDIFEEEQSITSLQKRLKKLGFKVRTYNRYNNWLTNDLYCGYVSYKDKVRVKGIHEPIISEEQFYRVQEIFTRMGKNPNMNRDSASLLSNLVVCSKCGLGFVHRSKDTMSRGKKYHYRYYSCKTYKHTHELEKCGNKTWRADKLEELIINRVNNYSFASRNVDKEDELDSLNEKLKTERAKKKRLFDLYINGSYEVSELDSMMNDIDAQINYYESQIEANEELRKNRKIQENLADLATVDFDGLEFRDKQLYLKSLINKIYIDGEQVTIEWL

SEQ ID NO: 7972 - protein, 485 aa, synthetic construct
MTRKVAIYTRVSTTNQAEEGFSIDEQIDRLTKYAEAMGWQVSDTYTDAGFSGAKLERPAMQRLINDIENKAFDTVLVYKLDRLSRSVRDTLYLVKDVFTKNKIDFISLYECIDTSSAMGSLFLTILSAINEFERENIKERMTMGKLGRAKSGKSMMWTKTAFGYYHNRRTGILEIVPLQATIVEQIFTDYLSGISLTKLRDKLNESGHIGKDIPWSYRTLRQTLDNPVYCGYIKFKGSLFEGMHKPIIPYETYLKVQKELEERQQQTYERNNNPRPFQAKYMLSGMARCGYCGAPLRIVLGRKRKDGSRTMKYHCANRFPRKTKGVTVYNDNKKCDSGTYDLSNLENTVIDNLIGFQENNDSLLKIINGNNQPILDTSSFKRQISQIDKRIQKNSDLYLNDFITMDELKDRTDSLQAEKRLLKAKISENKFSDSTGVFELVKTQLGSIPINELSYDNKKKIVNNLVSKVDVTADNVDITFKFQLA

SEQ ID NO: 7973 - protein, 452 aa, synthetic construct
MRAAIYIRVSTREQVENYSIQAQTERLTALCRSKDWDVYDIFIDGGYSGSNMNRPALNEMLSKLHEIDAVVVYRLDRLSRSQRDTITLIEEYFLKNNVEFVSLSETLDTSSPFGRAMIGILSVFAQLERETIRDRMVMGKIKRIEAGLPLTTAKGRTFGYDVIDTKLYINEEEAKQLRLIYDIFEEEQSITFLQKRLKKLGFKVRAYNRYNSWLTNDLYCGYVSYKDKVHVKGIHEPIISEEQFYRVQEIFTRMGKNPNVNRDSASLLNNLVVCSKCGLGFVHRRKDTTSRGKKYHYRYYSCKTYKHTHELEKCGNKIWRADKLEELIINRVNNYGLARRNVDKEDEPDSLNEKLKIEHAKKRRLFDLYINGSYEVSELDSMMSDIDAQINYYESQIEASEELKKNKKIQENLAGLATVDFDSLEFREKQLYLKSLINKIYIDGEQVTIEWL

SEQ ID NO: 7974 - protein, 452 aa, synthetic construct
MKAAIYIRVSTREQVENYSIQAQTEKLTALCRSKDWDVYDIFIDGGYSGSNMNRPALNEMLSKLHEIDAVVVYRLDRLSRSQRDTITLIEEYFLKNNVEFVSLSETLDTSSPFGRAMIGILSVFAQLERETIRDRMVMGKIKRIEAGLPLTTAKGRTFGYDVIDTKLYINEEEAKQLQLIYDIFEEEQSITFLQKRLKKLGFKVRTYNCYNNWLTNDLYCGYVSYKDKVHVRGIHEPIISEEQFYRVQEIFTRMGKNPNMNRDSASLLNNLVVCSKCGLGFVHRRKDTMSRGKKYHYRYYSCKTYKHIHELEKCGNKIWRADKLEELIINRVSNYSFASRNVDKEDELDSLNEKLKIEHAKKKRLFDLYINGSYEVSELDSMMNDIDAQINYYESQIEANEELKKNKKIQENLASLATVDYDSLEFREKQLYLKSLINKIYIDGELVTIEWL

SEQ ID NO: 7975 - protein, 485 aa, synthetic construct
MTKKVAIYTRVSTTNQAEEGFSIDEQIDRLTKYAEAMGWQVSDTYTDAGSSGAKLERPAMQRLINDIENKAFDTVLVYKLDRLSRSVRDTLYLVKDVFTKNKIDFISLNESIDTSSAMGSLFLTILSAINEFERENIKERMAMGKLGRAKSGKSMMWAKTAFGYYHNRKTGILEIVPPQATIVEQIFTDYLSGISLTKLRDKLNENGHIGKDIPWSYRTLRQTLDNPVYCGYIKFKDSLFEGMHKPIIPYETYLKVQKELEERQRQTYERNNNPRPFQAKYMLSGMARCGYCGAPLKIVLGHKRKDGSRTMKYHCANRFPRKTRGVTVYNDNEKCDSGTYDLSNLENTVTDNLIGFQEDNDRLLRIINGNNQPILDTSSFKERISQIDKKIQKNSDLYLNDFITMDELKDRTDSLQAEKKLLQAKISENKFNDSTDVFELVKTQLGSIPINELSYDDKKKIVNNLVSKVDVTADNVDIIFKFQQA

SEQ ID NO: 7976 - protein, 452 aa, synthetic construct
MKAAIYIRVSTREQVENYSIQAQTEKLTALCRSKDWDVYDIFIDGGYSGSNMNRPALNEMLSKLHEIDAVVVYRLDRLSRSQRDTITLIEEYFLKNNVEFVSLSETLDTSSPFGRAMIGILSVFAQLERETIRDRMVMGKIKRVEAGLPLTTAKGRTFGYDVIDTKLHINEEEAKQLQLIYDIFEEEQSITSLQKRLKKLGFKVHTYNRYNNWLTNDLYCGYVSYKDRVHVKGIHEPIISEEQFYRVQEIFTRMGKNPNMNRDSASLLNGLVVCSKCGLGFVHRRKDTTSRGKKYHYRYYSCKTFKHTHELEKCGNKIWRADKLEELIVNRVNNYSFASRNADKEDELDSLSEKLKTEHAKKKRLFDLYINGSYEVGELDCMMNDIDAQINYYEGQIEANEELKKDKKIQESLANLATVDYDSLEFREKQLYLKSLINKIYIDGEQVTIEWL

SEQ ID NO: 7977 - protein, 452 aa, synthetic construct
MKAAIYIRVSTREQVENYSIQAQTEKLTALCRSKDWDVYDIFIDGGYSGSNMNRPALNEMLSKLHEIDAVVVYRLDRLSRSQRDTITLIEEYFLKNNVEFVSLSETLDTSSPFGRAMIGILSVFAQLERETIRDRMVMGKIKRIEAGLPLTTAKGRTFGYDVVDTKLYINEEEAKQLRLIYDIFEEEQSITFLQKRLKRLGFKVRTYNRYHNWLTNDLYCGYVSYKDKVHVKGIHEPIISEEQFYRVQEIFTRMGKNPNMNRDSASLLNNLVVCSKCGLGFVHRRKDTTSRGKKYHYRYYSCKTYKHTHELERCGNKIWRADKLEELIINRVNNYSFASRNVDKGGGLDSLSEKLKIEHAKKKRLFDLYINGSYEVSELDSMMNDIDAQINYYESQIEANEERRKNKKIQENLAYLATVDFDSLEFREKQLYLKSLINKIYIDGEQVTIEWL

SEQ ID NO: 7978 - protein, 485 aa, synthetic construct
MTKKVAIYTRVSTTNQAEEGFSIDEQIDRLTKYVEAMGWQVSDTYTDAGLSGAKLERPAMQRLINDIENKAFDTVLVYKLDRLSRSVRDTLYLVKDVFTKNKIDFISLNESIDTSSAMGSLFLTILSAINEFERENIKERMTMGKLGRAKSGKSMMWTKTAFGYYHNRKTGILEIVPQQATIVEQIFTDYLSGISLTKLRDKLNESGHIGKDIPWSYRTLRQTLDNPVYCGYIKFKGSLFEGMHKPIIPYETYLKVQKELEERQQRAYERNNNPRPFQAKYMLSGMARCGYCGAPLRIVLGRNRKDGSRTMKYHCANRFPRKTKGITVYNDNKKCDSGTYDLSNLENTVIDNLIGFQENNDSLLKIINGNNQPILDTSSFKRQISQIDKKIQKNSDLYLNDFITMDELKDRTDSLRAEKELLKAKISENRFNDSTDVFELVKTQLGSIPINELSYDNKKKIVNNLVSKVDVTADNVVIIFKFQLA

SEQ ID NO: 7979 - protein, 469 aa, synthetic construct
MSYTTPVRAAVYLRISEDRSGEQLGVARQREDCLKLCGQRKWVPVEYLDNDVSASTGKRRPAYEQMLADITAGKIAAVVAWDLDRLHRRPIELEAFMSLADEKRLALATVAGDVDLATPQGRLVARLKGCVAVHETEHKKARQRRAARQKAERGYPNWSKAFGYLPGPNGPEPDPRTAPLVEQAYADILAGASLGDVCRRWNDAGAFTITGRPWTTTTLSKFLRKPRNAGLRAYKGARYGPVDRDAIVGKAQWSPLVDEATFWAAQAVLDAPGRAPGRKSVRRHLLTGLAGCGKCGNHLAGSYRTDGRVVYVCKACHGVSILADNIEPILYRIVAERLAMPDAVDLLRREIHDAAEAETIRLELEILYGELDRLAVERAEGLLTARQVKISTDIVNAKITKLRARQLDQERLRVFDGIPLGTPQVAGVIAELSPDRFRAVLDVLAEVVVQPVGKNGRIFNPERVQVNWR

SEQ ID NO: 7980 - protein, 469 aa, synthetic construct
MCYTTPVRAAVYLRISEDRSGEQLGVARQREDCLELCGQRKWVPVEYLDNDVSASTGKRRPAYEQMLADIIAGKIAAVVAWDLDRLHRRPIELEAFMSLADEKRLALATVAGDVDLATPQGRLVARLKGSVAAHETEHKKARQRRAARQKAERGYPNWSKAFGYLPGPDGPEPDPRTAPLVKQAYADILAGASLGDVCRWWNAAGAVTITGRPWTITTLSKFLRKPRNAGLRTYKGARYGPVDRDAIVGKAQWSPLVDEATFWAAQAVLDAPGRAPGRKSVRRHLLTGLAGCGKCGNHLAGSYRTDGRVVYVCKACHGVAILADNIEPILYRIVAERLAMPDAVDLLRREIHDAAEAETIRLELETLYGELDRLAVERADGLLTARQVKISTDIVNAKITKLQARQLDQERLRVFDGIPLGTPQVAGMIAELSPNRFRAVLDVLAEVVVQPVGKSGRIFNPERVQVNWR

SEQ ID NO: 7981 - protein, 485 aa, synthetic construct
MTKKVAIYTRVSTTNQAEEGFSIDEQTDRLTKYAEAMGWRVSDTYTDTGFSGAKLERPAMQRLINDIENKAFDTVLVYKLDRLSRSVRDTLYLVRDVFTKNKIDFISLSESIDTSSAMGSLFLTILSAINEFERENIKERMTMGKLGRAKSGKSMMWTRTAFGYYHNRKTGILEIVPLQATIVEQIFADYLSGISLTKLRDKLNESGHIGKDIPWSYRTLRQTLDNPVYCGYIKFKDSLFEGMHKPIIPYETYLKAQKELEERQQQTYERNNNPRPFQAKYMLSGMARCGYCGAPLRIVLGRKRKDGSRTMKYHCANRFPRKTKGVTVYNDNKKCDSGTYDLSNLENTVIDNLIGFQENSDSLLKIINGNNQPILDTSSFKEQISQIDKKIQKNSDLYLNDFITMDELKVRTDSLQAEKKLLRAKISENKFNDSTDVFELVKTQLGSIPINELSYDDKKKIVNNLVSKVDVTADNVDIIFKFQLA

SEQ ID NO: 7982 - protein, 452 aa, synthetic construct
MKAAIYIRVSTREQVENYSIQAQTEKLTALCRSKDWDVYDIFVDGGYSGSNMNRPALNEMLSKLHEIDVVVVYRLDRLSRSQRDTITLIEEYFLKNNVEFVSLSETLDTSSPFGRAMIGILSVFAQLERETIRDRMVMGKIKRVEAGLPLTTAKGRTFGYDVIDTELYINEEEAKQLRLIYDIFEEEQSITFLQKRLKRLGFKVRTYNRYNNWLTNDLYCGYVSYKDKVHVKGIHEPIISEEQFYRVQEIFARMGKNPNMNRGSASLLNNLVVCSKCGLGFVHRRKDIMSHGKRYHYRYYSCKTYKHIHELEKCGNKIWRADRLEELIINRVNSYSLASRNVDKEDELDSLNEKLKIEHAKKKRLFDLYINGNYEVSELDSMMNDIDAQINYYESQIEANEELKKNKKIQENLAHLATVDFDSLEFREKQLYLKSLINKIYIDGDQVTIEWL

SEQ ID NO: 7983 - protein, 452 aa, synthetic construct
MKAAIYIRVSTREQVENYSIQAQTEKLTALCRSKDWDVYDIFIDGGYSGSNMNRPALNEMLSKLHEIDAVVVYRLDRLSRSQRDTITLIEEYFLKNNVEFVSLSETLDTSSPFGRAMIGILSVFAQLERETIRDRMVMGKIKRIEAGLPLTTAKGRTFGYDVIDTKLYINEEEAKQLQLVYDIFEEEQSITFLQKRLKELGFKVRTYSRYNNWLTNDLYCGYVSYKDKVHVKGIHEPIISEEQFYRVQEIFTRMGKNPNMNRNSASLLNNLVVCSKCGLGFVHRRKDAMSRDKKYHYRYYSCKTYKHIHELEKCGNKIWRADKLEELIINRVNNYSFASRNAGKEDELDSLNEKLKIEHAKKRRLFELYINGRYEVSELDSMMNDIDAQINYYESQIEANEELKENKKIQENLANLATVDFDSLEFREKQLYLKSLINKIYIDGEQVTIEWL

SEQ ID NO: 7984 - protein, 469 aa, synthetic construct
MSYTTPVRAAVYLRISEDRSGEQLGVARQREDCLKLCGQRKWVPVEYLDNDVSASTGKRRPAYEQMLADITAGKIAAVVAWDLDRLHRRPIELEAFMSLADEKRLALATVAGDVDLATPQGRLVARLKGCVAAHETEHKKARQRRAARQKAERGLPNWSKAFGYLPGPNGPEPDPRTAPLVKQAYADILAGASLGDVCRQWNDAGAFTITGRPWATTALSKFLRKPRNAGLRAYKGARYGPVDRDAIVGKAQWSPLVDEATFWAAQAVLDAPGRAPGRKSVRRHLLTGLAGCGKCGNHLAGSYRTDGQIVYVCKACHGVSILAVNIEPILYHVVAERLAMPDAVDLLRREIHDAAEAETIRLELETLYGELDRLAVERAEGLLTARQVKISTDIVNARITKLRARQLDQERLRVFDGIPLGTPQVAGVIAGLSPDRFRAVLDVLAEVVVQPMGKSGRIFSPERVQVNWR

SEQ ID NO: 7985 - protein, 452 aa, synthetic construct
MKAAIYIRVSTQEQVGNYSIQAQTEKLTALCRSKDWDVYDIFIDGGYSGSNMNRPALNEMLSKLHEIDAVVVYRLDRLSRSQRDTTTLIEEYFLKNNVEFVSLSETLDTSSPFGRAMIGILSVFAQLERETIRDRMVMGKIKRIEAGLPLTTAKGRTFGYDVIDTKLYINEEEAKQLQLIYDIFEEEQSITSLQKRLKKLGFKVRTYNRYNNWLTNDLYCGYVSYKDKVHVKGIHEPIISEEQFYRVQEIFTRMGKNPNMNRDSASLLNNLVVCSKCGLSFVHRSKDTTSRGKKYHYRYYSCKTYKHAHELEKCGNKTWRADKLEELIINRVSDYSFASRNVDKEDELDSLNEKLKIEHAKKKRLFDLYINGSYEVSELDSMMNDIDAQIDYYESQIEANEELRRSKKIQENLADPATVEFDSLEFREKQLYLKSLINKIYIDGEQVTIEWL

SEQ ID NO: 7986 - protein, 452 aa, synthetic construct
MKAAIYIRVSTREQVENYSIQAQTEKLTALCRSKDWDVYDIFIDGGYSGSTMNRPALNEMLSKLHEIDAVVVYRLDRLSRSQRDTITLIEEYFLKNNVEFVSLSETLDTSSPFGRAMIGILSVFAQLERETIRDRMVMGKIKRIEAGLPLTTAKGRTFGYDVIDTKLYINEEEAKQLRLIYDIFEEEQSITFLQKRLKKLGFKVRTYSCYSNWLTNDLYCGYVSYKDKVHVKGIHEPIISEEQFYRVQGIFTRMGKNSNMNRDSASLLNNLVVCSKCGLGFVHRRKDAMSRDKKYHYRYYSCKTYKHIHELEKCGNKIWRADKLEELIINRVNNYSIASRNADKEDELDSLNEKLKIEHAKKKRLFELYINGSYEVSELDSMMNDIDAQINYYESQIEANKELKKNKKIQENLADLATVDFDSLEFREKQLYLKSLINKIYIDGEQVTIEWL

SEQ ID NO: 7987 - protein, 469 aa, synthetic construct
MSYTTPVRAAVYLRISEDRSGEQLGVARQREDCLKLCDQRKWVPVEYLDNDVSASTGKRRPAYEQMLADITAGKIAAVVAWDLDRLHRRPIELEAFMSLADEKRLALATVAGDVDLATPQGRLVARLKGSVAAHETEHKKARQRRAARQKAERGHPNWSKAFGYLPGPKGPEPDPRTAPLVKQAYADVLAGASLGDVCRRWNGLGAFTITGRPWTTTTLSKFLRKPRNAGLRAYKGARYGPVDRDAIVGKAQWSPLVDEVTFWAAQAVLDAPGRAPGRKSVRRHLLTGLAGCGKCGNRLAGSYRTDGRVVYVCKACHGVAILADNIEPILYHIVAERLAMPDAVDLLRREIHDAAEAETIRLELETLYGELDRLAVERAEGLLTARQVKISTDIVNAKITKLQARQLDQERLRVLDGIPLGTPRVAGVIAELSPDRFRAVLDVLAEVVVQPVGKSGRISNPERVQVNWR

SEQ ID NO: 7988 - protein, 452 aa, synthetic construct
MKAAIYIRVSTQEQVENYSIQAQTEKLTALCRSKDWDVYDIFIDGGYSGSNMNRPALNEMLGKLHEIDAVVVYRLDRLSRSQRDTITLIEEYFLKNNVEFVSLSETLDTSSPFGRAMIGILSVFAQLERETIRDRMVMGKIKRIEAGLPLTTAKGRTFGYDVIDTKLYINEEEAKQLQLIYDIFEEEQSITFLQKRLKKLGFKVRTYNRYNSWLTNDLYCGYVSYKDKVHVKGIHEPIISEEQFYRVQEIFTRMGKNPNMNRDSASLLNNLVVCSKCGLGFVHRRKDTMSRGKKYHYRYYSCKTYKHIHELEKCGNKIWRADRLEELIINRVNNYSLASRVADKEDELHSLNEKLKIEHAKKKRLFDLYINGSYEVSELDSMMNDIDAQINYYESQIEANEELRKNKKIQENLANLATVDYDSLEFREKQLYLKSLINKIYIDGEQVTIEWL

SEQ ID NO: 7989 - protein, 452 aa, synthetic construct
MKAAIYIRVSTQEQVGNYSIQAQTEKLTALCRSKDWDVYDIFIDGGYSGSNMNRPALNEMLSKLHEIDAVVVYRLDRLSRSQRDTTTLIEEYFLKNNVEFVSLSETLDTSSPFGRAMIGILSVFAQLERETIRDRMVMGKIKRIEAGLPLTTAKGRTFGYDVIDTKLYINEEEAKQLQLIYDIFEEEQSITSLQKRLKKLGFKVRTYNRYNNWLTNDLYCGYVSYKDKVHVKGIHEPIISEEQFYRVQEIFTRMGKNPNMNRDSASLLSNLVVCSKCGLGFVHRSKDTMSRGKKYHYRYYSCKTYKHTHELEKCGNKTWRADKLEELIINRVNNYSFASRNADKEDELDSLNEKLKIEHAKKKRLFDLYINGGYEVSELDSMMNDIDAQINYYESQIEANEELKKNRKIRENLADLATVDFDSLEFREKQQYLKSLVNKIYIDGEQVTIEWL

SEQ ID NO: 7990 - protein, 452 aa, synthetic construct
MKAAIYIRVSTREQVENYSIQAQTEKLTALCRSKDWDVYDIFIDGGYSGSNMNRPALNEMLSKLHEIDAVVVYRLDRLSRSQRDTITLIEEYFLKNNVEFVSLSETLDTSSPFGRAMIGILSVFAQLERETIRDRMVMGKIKRIEAGLPLTTAKGRTFGYDVIDAKLYINEEEAKQLRLIYDIFEEEQSITSLQKRLKKLGFKVRTYSRYNNWLTNDLYCGYVSYKDKVHVKGIHEPIISEEQFYRVQEIFTRMGKNPNMNRDSASLLNSLVVCSKCGLGFVHRRKDTMSRGKKYHYRYYSCKTYKHTHELEKCGNKIWRADKLEELIINRVNNYSFASRSVDKEDELDSLNEKLKIEHAKRRRLLDLYINGSYEVSELDSMMSDIDAQINYYESQIEANEELKKDKKIQENLANLATVDYDSLEFREKQLYLKSLINKIYIDGEQVTIEWL

SEQ ID NO: 7991 - protein, 485 aa, synthetic construct
MTKKVAIYTRVSTTNQAEEGFSIDEQIDRLAKYAEAMGWQVSDTYTDAGFSGAKLERPAMQRLINDIESKAFDTVLVYKLDRLSRSVRDTLYLVKDVFTKNKIDFICLNESIDTSSAMGSLFLTILSAINEFERENIKERMTMGKLGRAKSGKSMMWTKTAFGYYHNRKTGILEIVPLQATIVEQIFTDYLSGISLTKLRDKLNESGHIGKDIPWSYRTLRQTLDNPVYCGYIKFKDSLFEGMHKPIIPYETYLKVQKELEERQQQTYERNNNPRPFQAKYMLSGMARCGYCGAPLRIVLGHKRKDGSRTMKYHCANRFPRKTKGITVYNDNKKCDSGTYDLSDLENTVIDNLIGLQENNDSLLKIINGSNQPILDTSSFKKQISQIDEKIQKNSDLYLNDFITMDELKDRTDSLQAEKKLLKAKISENKFNDSTDVFELVKAQLGSIPINELSYDNKKKVVNDMVSKVDVTADNVDIIFKFQLA

SEQ ID NO: 7992 - protein, 452 aa, synthetic construct
MKAAIYIRVSTQEQVENYSIQAQTERLTALCRSKDWDVYDIFVDGGYSGSNMNRPALNEMLSKLHEIDAVVVYRLDRLSRSQRDTTTLIEEYFLKNNVEFVSLSETLDTSSPFGRAMIGILSVFAQLERETIRDRMVMGKIKRIEAGLPLTTAKGRTFGYDVIDTKLYINEEEAKQLRLIYDIFEEEQSITFLQKRLKKLGFKVRTYSRYNNWLTNDLYCGYVSYKDKVHVKGIHEPIISEEQFYRVQEIFTRMGKNPNMNRDSASLLNNLVVCSKCGLGFVHRRKDTISRGKKYHYRYYSCKTYKHTHELEKCGNKTWRADKLEELVINRVNNYGFASRNVDKEDELDSLYEKLKIEHAKKKRLFDLYINGSCEVSELDSMMNDVDARINYYESQIEANEELKKTKKIQENLADLATVDFDSLEFREKQQYLRSLINKIYIDGEQVTIEWL

SEQ ID NO: 7993 - protein, 469 aa, synthetic construct
MSYTTPVRAAVYLRISEDRSGEQLGVARQREDCLKLCGQRKWVPVEYLDNDVSASTGKRRPAYEQMLADITAGKIAAVVAWDLDRLHRRPIELEAFMSLADEKRLALATVAGDVDLATPQGRLIARLKGSVAAHETEHKKARQRRAARQKAERGLPNWSKAFGYLPGPNGPEPDPRTAPLVKQAYADILAGASLGDVCRQWNDAGAFTITGRPWTTTTLSKFLRKPRNAGLRAYKGARYGPVDRDAIVGKAQWSPLVDEATFWAAQAVLDAPGRAPGRKSVRRHLLTGLAGCGKCGNHLAGSYRTDGRVVYVCKACHGVSTLADIIEPILYRIVAERLAMPDAVDLLRREIHDAAEAEAIRLELETLYGELDRLAVERAEGLLTARQVKISTDIVSAKITKLQARQLDQERLRVFDGIPLGTPQVAGMIAELSPDRFRAVLDVLAEVVVQPVGKSGRVFSPERVQVNWR

SEQ ID NO: 7994 - protein, 452 aa, synthetic construct
MKAAIYIRVSTQEQVENYSIRAQTEKLTALCRSKDWDVYDIFIDGGYSGSNMNRPALNEMLSRLHEIDAVVVYRLDRLSRSQRDTITLIEEYFLKNNVEFVSLSETLDTSSPFGRAMIGILSVFAQLERETIRDRMVMGKIKRIEAGLPLTTAKGRTFGYDVIDTKLYINEEEAKQLRLIYDIFEEEQSITFLQKRLKELGLKVRTYNRYNSWLTNDLYCGYVSYKDKVHVKGIHEPIISEEQFYRVQEIFTRMGKNPNMNRDSASLLNNLVVCSKCGLGFVHRRKDTMSRGKKYHYRYYSCKTYKHAHELEKCGNKIWRADKLEELIINRAHNYSLASRNVDKEDELDSLNEKLEIEHAKKKRLFDLYINGSYEVSELDSMMNDIDAQINYYESQIEANEELKKDKKIQESLANLATVDYDSLEFREKQLYLKSLINKIYIDGEQVTIEWL

SEQ ID NO: 7995 - protein, 485 aa, synthetic construct
MTKKVAIYTRVSTTNQAEEGFSIDEQIDRLTKYAEAMGWQVSGTYTDAGLSGAKLERPAMQRLINDIENKAFDTVLVYKLDRLSRSVRDTLYLVKDVFTKNRIDFISLNESIDTSSAMGSLFLTILSAINEFERENIKERMTMGKLGRAKSGKSMMWTRTAFGYYHNRKTGILEIVPLQATIVEQIFTDYLSGISLTKLRDKLNESGHIGKDIPWSYRTLRQTLDNPVYCGYIKFKDSLFEGMHKPIIPYETYLKVQKELEERQQQAYERNNNPRPFQAKYMLSGMARCGYCGAPLKIVLGRKRKDGSRTMKYHCANRFPRKTKGVTVYNDNKKCDSGTYDLSNLENTVIDILIGFQENNDSLLKIINGNNQPILDISSFKEQISQINKKIQKNSDLYLNDFITMDELKDRTDSLQAEKKLLKAKISENKFNDSTDVFELVKTQLGSIPINELSYDNKKKIVSNLVSKVDVTADNVDIIFKFQLA

SEQ ID NO: 7996 - protein, 469 aa, synthetic construct
MSYTTPVRAAVYLRISEDRSGEQLGVARQREDCLKLCGQHKWVPVEYLDNDVSASTGKRRPAYEQMLADITAGKIAAVVAWDLDRLHRRPVELEAFMSLADEKRLALATVAGDVDLATPQGRLVARLKGCVAAHETEHKKARQRRAARQKAERGYPNWSKAFGYLPGPNGPEPDPRTAPLVKQAYADILAGASLGDVCRRWNDAGAFTITGRPWTTTTLSKFLRKPRNAGLRAYKGARYGPVDRNAIVGKAQWSPLVDEATFWAAQAVLDAPGRAPGRKSVRRHLLTGLAGCGKCGNHLAGSYRTDGQVVYVCKACHGVSILAVNIEPILYHVVAERLAMPDAVDLLRREIHDAAEAETVRLELETLYGELDRLAVERAEGLLTARQVKISTDIVNAKIAKLQARQLDQERLRVFDGIPLGTPQVAGMIAELSPDRFRAVLDVLAEVVVQPVGKSGRIFNPERVQVNWR

SEQ ID NO: 7997 - protein, 452 aa, synthetic construct
MKAAIYIRVSTREQVENYSIQAQTEKLTALCRSKDWDVYDIFIDGGYSGSNMNRPALNEMLSKLHEIDAVVVYRLDRLSRSQRDTITLIEEYFLKNNVEFVSLSETLDTSSPFGRAMIGILSVFAQLERETIRDRMVMGKIKRIEAGLPLTTAKGRTFGYDVIDTKLYINEEEAKQLQLIYDIFEEEQSITFLQKRLKKLGFKVRTYNRYNNWLTNDLYCGYVSYKDKVHVKGIHEPIISEEQFYRVQEIFTRMGKNPNMNRDSASLLNNLVVCGKCGLGFVHRRKDAMSRDKKYHYRYYSCKTYKHIHELEKCGNKIWRADKLEELVINRVNNYSLASRNVDKEDELDSLNEKLKTEHAKKKRLFDLYINGSYEVSELDSMMSDIDAQINYYESQIEANEELKKNGKIQENLANLATVDFDSLEFRDKQLYLKSLINKIYIDGEQVTIEWL

SEQ ID NO: 7998 - protein, 485 aa, synthetic construct
MTKKVAIYTRVSTTNQAEEGFSIDEQIDRLTKYAEAMGWQVSDTYTDAGFSGAKLERPAMQRLINDIENKAFDTVLVYKLDRLSRSVRDTLYLVKDVFTKNRIDFISLNESIDTSSAMGSLFLTILSAINEFERENIKERMTMGKLGRAKSGKSMMWTKTAFGYYHNRKTGILEIVPLQATIVEQIFTDYLSGISLTKLRDKLNESGHIGKDIPWSYRTLRQTLDNPVYCGYIKFKDSLFEGMHKPIIPYETYLKVQKELEERQQQTYERNNNPRPFQAKYMLSGMARCGYCGAPLRIVLGHKRKDGSRTMKYHCANRFPRKTKGVTVYNDNKKCDSGTYDLSDLENTVIDNLIGFQEDDDSLLKIINGNNQPILDTSSFEKQISQIDKKIQKNSDLYLNDFITMEELRDRTDSLQAEKKLLKAKISENKFNDSTDVFELVKTQLGSIPINELSYDNKKKIVNNLVSKVDVTADNVDIIFKFQLA

SEQ ID NO: 7999 - protein, 469 aa, synthetic construct
MCYTTPVRAAVYLRISEDRSGEQLGVARQREDCLKLCDQRKWVPVEYLDNDVSASTGKRRPAYEQMLADITAGKIAAVVAWDLDRLHRRPIELEAFMCLADEKRLALATVAGDVDLATPQGRLVARLKGSVAAHETEHKKARQRRAARQKAERGHPNWSRAFGYLPGPNGPEPDPRTAPLVKQAYADILAGASLGDVCRRWNDAGAFTITGRPWTTTTLSKFLRKPRNAGLRAYKGARYGPVDRDAIVGKAQWSPLVDEATFWAAQAVLDAPGRAPGRKSVRRHLLTGLAGCGKCGNHLAGSYRTDGRVVYVCKACHGVAILADNIEPILYHTVAERLAMPDAVDLLRREIHDTAEAETIRLELGTLYGELDRLAVERAEGLLTARQVKISTDIVNAKITKLQARQLDQDRLRVFDGIPLGTPQVAGVIAGLSPDRFRAVLDVLAEVVVQPVGKSGRIFNPERVQVNWR

SEQ ID NO: 8000 - protein, 452 aa, synthetic construct
MKAAIYIRVSTQEQVGNYSIQAQTEKLTALCRSKDWDVYDIFIDGGYGGSNMNRPALNEMLSKLHEIDAVVVYRLDRLSRSQRDTTTLIEEYFLKNNVEFVSLSETLDTSSPFGRAMIGILSVFAQLERETIRDRMVMGKIKRIEAGLPLTTAKGRTFGYDVIDTKLYINEEEAKQLQLIYDIFEEEQSITSLQKRLKKLGFKVRTYNRYNSWLTNDLYCGYVSYKDKVHVKGIHEPIISEEQFCRVQEIFTRMGKNPNMNRDSASLLGNLVVCSKCGLGFVHRSKDTMSRGKKYHYRYYSCKTYKHTHELEKCGNKTWRADKLEGLIINRVNDYSLASRNVDKEDELDSLNERLKIEHGKKKRLFDLYINGSYEVSELDSMMNDIDAQINYYESQIEANVELKKNKKIQENLADLATVDFDSLEFREKQLYLKSLINKIYIDGEQVTIEWL

SEQ ID NO: 8001 - protein, 452 aa, synthetic construct
MKAAIYIRVSTREQVENYSIQAQTEKLTALCRSKDWDVYDIFIDGGYSGSNMNRPALNEMLSKLHEIDAVVVYRLDRLSRSQRDTITLIEEYFLKNNVEFVSLSETLDTSSPFGRAMIGILSVFAQLERETIRDRMVMGKIKRIEAGLPLTTAKGRTFGYDVIDTKLYINEEEAKQLQLIYDIFEEEQSITFLQKRLKELGFKVRTYNRYNNWLTNDLYCGYVSYKDRVHVKGIHEPIISEEQFYRVQEIFTRMGKNPNMNRGSASLLNNLVVCGKCGLGFVHRRKDAMSRDKKYHYRYYSCKTYKHIHELEKCGNKIWRADKLEELIINRVNNYSLASRNVDKEDELDSLNEKLKIEHAKKRRLFDLYINGSYEASELDSMMNDIDAQINYYESQIEANEELKKNKKIQENLAYLATVDFDSLEFREKQLYLKSLINKIYIDGEQVTIEWL

SEQ ID NO: 8002 - protein, 452 aa, synthetic construct
MKAAIYIRVSTREQVENYSIQAQTEKLTALCRSKDWDVYDIFVDGGYSGSNMNRPALNEMLSKLHEIDAVVVYRLDRLSRSQRDTITLIEEYFLKNNVEFVSLSETLDTSSPFGRAMIGILSVFAQLERETIRDRMVMGKIKRIEAGLPLTTAKGRTFGYDVIDTRLYINEEEAKQLRLIYDIFEEEQSITFLQKRLKKLGFKVRTYSCYSNWLTNDLYCGYVSYKDKVHVRGIHEPIISEEQFHRVQEIFTRMGKNPNMNRGSASLLNNLVVCGKCGLGFVHRRKDIMSRGKKYHYRYYSCKTYKHIHELEKCGNKIWRADKLEELIINRVNNYSVASRNVDKEDELDSLNEKLKIEHAKKKRLFDLYINGSYEVSELDSMMNDIDAQINYYESQIEANEELKRNKKVQENLAYLATVDFDSLEFREKQLYLKSLINKIYIDGEQVTIEWL

SEQ ID NO: 8003 - protein, 469 aa, synthetic construct
MSYTTPVRAAVYLRISEDRSGEQLGVARQREDCLKLCDQRKWVPVEYLDNDVSASTGKRRPAYEQMLADITAGKIAAVVAWDLDRLHRRPIELEAFMSLADEKRLALATVAGDVDLATPQGRLVARMKGCVAAHETEHKKARQRRAARQKAERGLPNWSKAFGYLPGPNGPEPDPRTAPLVKQAYADILAGASLGDVCRQWNDAGAYTITGRPWTTTTLSKFLRKPRNAGLRAYKGARYGPVDRDAIVGKAQWSPLVDEATFWAAQAVLDAPGRAPGRKSVRRHLLTGLAGCGKCGNHLAGSYRTDGQIVYVCKACHGVSILAVNIEPILYHIVAERLAMPDAVGLLRREIHDAAEAETIRQELETLYGELDRLAVERAEGLLTARQVKISTDIVNAKIAKLQARQLDQGRLRVLDGIPLGTPQVAGVIAGLSPDRFRAVLDVLAEVVVQPVGKGGRIFNPERVRVNWR

SEQ ID NO: 8004 - protein, 469 aa, synthetic construct
MCYTTPVRAAVYLRISEDRSGEQLGVARQREDCLKLCDQRKWVPVEYLDNDVSASTGKRRPAYEQMLADITAGKIAAVVAWDLDRLHRRPIELEAFMSLADEKHLALATVAGDVDLATPQGRLVARLKGSVAAHETEHKKARQRRAARQKAERGLPNWSKAFGYLPGPNGPEPDPRTAPLVKQAYADILAGASLGDVCRQWNDAGASTITGRPWTTTTLSKFLRKPRNAGLRAYKGARYGPVDRDAIVGKAQWSPLVDEATFWAAQAVLDAPGRAPGRKSVRRHLLTGLAGCGKCGNHLAGSYRTDGKVVYVCKACHGVAILADNIEPILYRIVAERLAMPDAVDLLRRGIHDAVEAETIRLELETLYGELDRLAVERAEGLLTARQVKISTDIVNAKITKLQARQQDQERLRVLNGIPLGTPQVAGMIAELSPDRFRAVLDVLVEVVVQPVGKSGRAFNPERVQVNWR

SEQ ID NO: 8005 - protein, 469 aa, synthetic construct
MCYTTPVRAAVYLRISEDRSGEQLGVARQREDCLKLCGQRKWVPVEYLDNDVSASTGKRRPAYEQMLADITAGKIAAVVAWDLDRLHRRPIELEAFMCLADENRLALATVAGDVDLATPQGRLVARLKGSVAAHETEHKKARQRRAARQKAERGYPNWSKAFGYLPGPNGPEPDPRTAPLVKQAYADILAGASLGDVCRQWNDAGAFTITGRPWTTTTLSKFLRKPRNAGLRAYKGARYGPVDRDAIVGKAQWSPLVDEATFWAAQAVLDAPGRAPGRKSVRRHLLTGLASCGKCGNHLAGSYRTDGRVVYVCKACHGVAILADNIEPILYHIVTERLAVPGAVDLSRREIHDAAEAEAIRLELETLYGELDRLAVERAEGLLTARQVKVSTDIVNAKITKLQARQQDQERLYVLGGIPLGTPQVAGVIAELSPDRFRAVLDVLAEVVVQPVGKSGRIFNPERVQVNWR

SEQ ID NO: 8006 - protein, 469 aa, synthetic construct
MSYTTPVRAAVYLRISEDRSGEQLGVARQREDCLKLCDQRKWVPVEYLDNDVSASTGKRRPAYEQMLADITAGKIAAVVAWDLDRLHRRPIELEAFMSLADEKRLALATVAGDVDLATPQGRLVARLKGSVAAHETEHKKARQRRAARQKAERGHPNWSKAFGYLPGPNGPEPDPRTAPLVKQAYADILAGASLGDVCRQWNGAGALTITGRPWTTTTLSKFLRKPRNAGLRAYKGARYGPVDRDAIVGKAQWSPLVDEATFWAAQAVLDAPGRAPGRKSVRRHLLTGLAGCGKCGNHLAGSYRTDGRVVYVCKACHGVAILADNIEPILYHIVAERLAVPDAVDLLRREVHDAAEAETIRLELETLYGELDCLAVERAEGLLTARQVKISTDIVNAKITKLQARQLDQERLRVFDGIPLGTPQVAGMIAELSPDRFRAVLDVLAEVVVQPVGKSGRIFNPERVQVNWR

SEQ ID NO: 8007 - protein, 452 aa, synthetic construct
MKAAIYIRVSTREQVENYSIQAQTEKLTALCRSKDWDVYDIFIDGGYSGSNMNRPALNEMLSKLHEIDAVVVYRLDRLSRSQRDTITLIEEHFLRNNVEFVSLSETLDTSSPFGRAMIGILSVFAQLERETIRDRMVMGKIKRIEAGLPLTTAKGRTFGYDVIDTKLYINEEEAEQLQLIYDIFEEERSITFLQKRLKRLGFKVRTYSCYNNWLTNDLYCGYVSYKDKVHVKGIHEPIISEEQFYRVQEIFTRMGKSPNMNRDSASLLNNLVVCSKCGLGFVHRRKDIMSRGKKYHYRYYSCKTYKHIHELEKCGNKIWRADKLEELIIDRVNNYSFASRNADKEDELDSLNEKLKIEHAKKKRLFDLYINGRYEVSELDSMMSDIDAQINYYESQIEANEELKKSKRIQENLADLATVDFDSLEFREKQLYLKSLINKIYIDGEQVTIEWL

SEQ ID NO: 8008 - protein, 452 aa, synthetic construct
MKAAIYIRVSTREQVENYSIRAQTEKLTALCRSKDWDVYDIFIDGGYSGSNMNRPALNEMLSKLHEIDAVVVYRLDRLSRSQRDTITLIEEYFLKNNVEFVSLSETLDTSSPFGRAMIGILSVFAQLERETIRDRMVMGKIKRIEAGLPLTTAKGRTFGYDVIDTKLYINEEEAKQLQLIYDIFEKEQSITSLQKRLKKLGFKVRTYNRYNDWLTNDLYCGYVSYKDKVHVKGIHEPIISEEQFYRVQEIFARMGKNPNMNRDSASLLNNLVVCSRCGLGFVHRRKDTMSRGKKYHYRYYSCKTYKHIHELERCGNKIWRADKLEELIINRVNNYSFASRNVDKEDELDSLNEKLKIEHAKKKRLFELYINGSYEMGELDSMMNDIDAQINYYESQIEANEGLKRNRKIQENLAELATVDFGSLEFRERQLYLRSLINKIYIDGEQVTIEWL

SEQ ID NO: 8009 - protein, 452 aa, synthetic construct
MKAAIYIRVSTQEQVENYSIQAQTEKLTALCRSKDWDVHDIFIDGGYSGSNMNRPALNEMLSKLHEIDAVVVYRLDRLSRSQRDTITLIEEYFLKNNVEFVSLSETLDTSSPFGRAMIGILSVFAQLERETIRDRMVMGKIKRIEAGLPLTTAKGRTFGYDVIDTKLYINEEEAKQLRLIYDIFEEEQSITFLQKRLKKLGFKVRTYNRYNNWLTNDLYCGYVSYKDKVHVKGIHEPIISEEQFYRVQEIFTRMGKNPNMNRDSASLLNNLVVCSKCGLGFVHRRKDTMSRGKKYHYRYYSCKTYKHIHELEKCGNKIWRADKLEELIINRVSNYSFASRSVDKEDELDSLNEKLRIEHAKKRRLFDLYINGSYEVSELDSMMNDIDAQINYYESQIEANEELRKNKKIQENLANLATVDYDSLEFREKQLYLKSLISKIYIDGEQVTIEWL

SEQ ID NO: 8010 - protein, 469 aa, synthetic construct
MSYTTPVRAAVYLRISEDRSGEQLGVARQREDCLKLCDQRKWVPVEYLDNDVSASTGKRRPAYEQMLADITAGKIAAVVAWDLDRLHRRPVELEAFMSLADEKRLALATVAGDVDLATPQGRLVARLKGCVAAHETEHKKARQRRAARQKAERGYPNWSKAFGYLPGPNGPGPDPRTAPLVKQAYADILAGASLGDVCRQWNDAGAFTITGRPWTTTALSKFLRKPRNAGLRAYKGARYGPVDRDAIVGKAQWSPLVDEATFWAAQAVLDAPGRAPGRKSVRRHLLTGLAGCGKCGNHLAGSYRTDGRVVYVCKACHGVAILAENIEPILYHIVAERLVMPDAVDLLRREVHDAAEAETIRLELETLYGELDRLAVERAEGLLTARQVKISTDIVNAKITKLQARQLDQERLRVFDGIPLGTPQVAGMIAELSPNRFRAVLDVLAEVVVQPVGRSGRTFNPKRVQVNWR

SEQ ID NO: 8011 - protein, 452 aa, synthetic construct
MKAAIYIRVSTREQVENYSIQAQTEKLTALCRSKDWDVYDIFIDGGYSGSNMNRPALNEMLSKLHEIDAVVVYRLDRLSRSQRDTITLIEEYFLKNNVEFVSLSETLDTSSPFGRAMIGILSVFAQLERETIRDRMVMGKIKRIEAGLPLTTAKGRTFGYDVIDTKLYINEEEAKQLQLIYDIFEEEQSITSLQKRLKELGLKVRTYNRYNNWLTNDLYCGYVSYKDKVHVKGIHEPIISEEQFYRVQEIFTRMAKNPNMNRDSASLLNNLVVCSKCGLGFVHRRKDIVSRGKKYHYRYYSCKTYKHIHELEKCGNKIWRADKLEELIINRVNNYSLASRNVDKEDELDSLNEKLKVEHAKKKRLFDLYINGSFEVSELDSMMNDIDAQINYYESQLEANEELKKDKKIQENLARLATVGFDSLEFREKQLYLKSLINKIYIDGEQVTIEWL

SEQ ID NO: 8012 - protein, 452 aa, synthetic construct
MKAAIYIRVSTQEQVGNYSIQAQTEKLTALCRSKDWDVYDIFIDGGYSGSNMNRPALNKMLSKLQEIDAVVVYRLDRLSRSQRDTTTLIEEYFLKNNVEFVSLSETLDTSSPFGRAMIGILSVFAQLERETIRDRMVMGKIKRIEAGLPLTTAKGRTFGYDVIDTKLYINEEEAKQLQLIYDIFEEEQSITSLQKRMKKLGFKVRTYNRYNNWLTNDLYCGYVSYKDKVHVKGIHEPIISEEQFYRVQEIFTRMGKNPNMNRDSASLLNGLVVCSKCGLSFVHRSKDTMSRGRKYHYRYYSCKTYKHTHELEKCGNKTWRADKLEELIINRVSNYSFASRNVDKEDELDSLNEKLKIEHAKKKRLFDLYINGSYEVSELDSMMNDIDAQIDYYESQIEANEELKKNKKIQENLADLATVDFDSLEFREKQLYLKSLINKIYIDGVQVTIEWL

SEQ ID NO: 8013 - protein, 469 aa, synthetic construct
MSYTTPVRAAVYLRISEDRSGEQLGVARQREDCLELCGQRKWVPVEYLDNDVSASTDKRRPAYEQMLADITAGKIAAVVAWDLDRLHRRPIELEAFMCLADEKRLALATVAGDVDLATPQGRLVARLKGSVAAHETEHKKARQRRAARQKAERGHPNWSKAFGYLAGPNGPEPDPRTAPLVKQAYADILAGASLGEVCRQWNAAGAFTITGRPWTTTALSKFLRKPRNAGLRAYKGARYGPVDRDAIVGKAQWSPLVDEATFWAAQAVLDAPGRAPGRKSVRRHLLTGLAGCGKCGNHLAGSYRTDGRVVYVCKACHGVAILADNIEPILYRIVAERLAMPDAVHLLRREIHDAAEAETIRLGLETLYGELDRLAVERAEGLLTARQVRISTDIVNAKITKLLARQQDQERLRVLGGIPLGTPQVAGVIAELSPDRFRAVLDVLAEVVVQPVGKSGRIFNPERVQVNWR

SEQ ID NO: 8014 - protein, 469 aa, synthetic construct
MGYTTPVCAAVYLRISEDRSGEQLGVARQREDCLKLCDQRKWVPVEYLDNDVSASTDNRRPAYEQMLADITAGKIAAVVAWDLDRLHRRLTELEVFMSLADEKRLALATVAGDVDLATPQGRLVARLRGSVAAHETEHKKARQRRAARQKAERGYPNWSKAFGYLPGPNGPEPDPRTAPLVKRAYADILAGASLGDVCRQWNDAGAFTITGRPWTTTALSKFLRKPRNAGLRAYKGARYGPVDRDAIVGKAQWSPLVDEATFWAAQAVLDAPGRAPGRKSVRRHLLTGLAGCGKCGNHLAGSYRTDGRVVYVCKACHGVAILADNIEPILYHTVAERLAMPDAVDLLRREVHDAAEAETIRLELETLYGELDRLAVERAEGLLTARQVKISTDIVSAKITKLQARQLDQERLRVFDGIPLGTPQVAGMIAELSPNRFRAVLDVLAEVVVQPVGKSGRTFNPERVQVNWR

SEQ ID NO: 8015 - protein, 452 aa, synthetic construct
MKAAIYIRVSTREQVENYSIQAQTEKLTALCRSKDWDVYDVFVDGGYSGSNMNRPALNEMLSKLHEIDAVVVYRLDRLSRSQRDTITLIEEYFLKNNVEFVSLSETLDTSSPFGRAMIGILSVFAQLERETIRDRMVTGKIKRIEAGLPLTTAKGRTFGYDVIDTKLYTNEEEARQLQLIYDIFEEEQSITFLQKRLKELGFKVRTYSRYNSWLTNDLYCGYVSYKDKVHVKGIHEPIISEEQFYRVQEIFTRMGKNPNMNRDSASLLNNLVVCSKCGLGFVHRRKDTMSRGKKYRYRYYSCKTYKHTHELEKCGNKIWRADELEELIINRVNNYSFASRNVDKEDELDSLNEKLKVERAKKKRLFDLYINGSYEVSELDSMMNDIDAQINYYESQIEANEGLKKDRKIQESLANLATVDYDSLEFREKQLYLKSLINKIYIDGEQVTIEWL

SEQ ID NO: 8016 - protein, 452 aa, synthetic construct
MKAAIYIRVSTREQVENYSIQAQTEKLTALCRSKDWDVYDIFIDGGYSGSNVNRPALNEMLSKLHEIDAVVVYRLDRLSRSQRDTITLIEEHFLKNNVEFVSLSETLDTSSPFGRAMIGILSVFAQLERETIRDRMVMGKIKRVEAGLPLTTAKGRTFGYDVIDTKLYTNVEEAKQLRLIYDIFEEEQSITFLQKRLKKLGFKVRTYSCYNNWLTNDLYCGYVSYKDKVHVKGIHEPIISEEQFYRVQEIFTRMGKNPNMNRDSASLLNNLVVCSKCGLGFVHRRKDTMSRGKKYHYRYYSCKTYKHIHELEKCGNKIWRADKLEELIINRVNNYSFASRNVDKEDELDSLNEMLEIERAKKKRLFDLYINGSYEASELDSMMNDIDAQINYYESQIEANEELKKNREIQENLADLATVDYDSLEFREKQLYLKSLINKIYIDGEQVTIEWL

SEQ ID NO: 8017 - protein, 452 aa, synthetic construct
MKAAIYIRVSTQEQVENYSIQAQTEKLTALCRSKDWDVYDIFIDGGYSGSNMNRPALNEMLSKLHEIDAVVVYRLDRLSRSQRDTTTLIEEYFLKNNVEFVSLSETLDTSSPFGRAMIGILSVFAQLERETIRDRMVMGKIKRIEAGLPLTTARGRTFGYDVIDTKLYINEEEAKQLQLIYDIFEEEQSITSLQKRLKKLGFKVRAYNRYNNWLTNDLYCGYVSYKDKVHVKGIHEPIISEEQFYRVQEIFTRMGKNPNMNRDSASLLNNLVVCSKCGLGFVHRSKDTMSRGKKYHYRYYSCKTYKHTHELEKCGNKTWRADKLEELIISRVNNYSFASRSVDKEGELDSLNEKLKIEHAKKKRLFDLYINGSYEVSELDSMMNDIDAQINYYESQIEASEELKKNKKIQENLAGLATVDFDSLEFREKQLYLKSLINKIYIDGEQVTIEWL

SEQ ID NO: 8018 - protein, 469 aa, synthetic construct
MSYTTPVRAAVYLRISEDRSGEQLGVARQREDCLKLCVQRKWVPVEYLDNDVSASTGKRRPAYEQMLADITAGKIAAVVAWDLDRLHRRPIELEAFMSLADEKRLALATVAGDVDLATPQGRLVARLKGCVAAHETEHKKARQRRAARQKAERGHPNWSRAFGYLPGPNGPEPDPRTAPLVKQAYAGILAGASLGDVCRQWNDAGAFTITGRPWTTTALSKFLRKPRNAGLRAYKGARYGPVDREAIVGKAQWSPLVDEATFWAAQAVLDAPGRAPGRKSVRRHLLTGLAGCGKCGNHLAGSYRTDGRVVYVCKACHGVAILADNIEPILYHIVAERLAMPDAVDLLRREIQDATEAETIRLELGTLYGELDRLAVERAEGLLTARQVKISTDIVNAKITELQARQLDQERLRVLDGIPLGTPQVAGMIAELSPDRFRAVLDVLAEVVVQPVGKSGRIFNPGRVQVNWR

SEQ ID NO: 8019 - protein, 452 aa, synthetic construct
MKAAIYIRVSTREQVENYSIQAQTEKLTALCRSKDWDVYDIFIDGGYSGSNTNRPALNEMLSKLHEIDAVVVYRLDRLSRSQRDTITLIEEYFLKNNVEFVSLSETLDTSSPFGRAMIGILSVFAQLERETIRDRMVMGKIKRIEAGLPLTTAKGRTFGYDVIDTKLYINEGEAKQLQLIYDIFEEEQSITFLQKRLKELGFKVRTYNRYNNWLTNDLYCGYVSYKDKVHVKGIHEPIISEEQFYRVQEIFTRMGKNPNMNRDSASLLNNLVVCSKCGLGFVHRRKDTMSRDKKYHYRYYSCKTYKHIHELEKCGNKIWRADELEELIIDRVSNYSIASRNADKEDELDSLNEKLKIEHAKKRRLFDLYINGRYEVSELDSMMNDIDAQISYYESQIEANEELKKNKKIQKNLANLATVDFDSLEFREKQWYLKSLINKIYIDGEQVTIEWL

SEQ ID NO: 8020 - protein, 485 aa, synthetic construct
MTKKVAIYTRVSTTNQAEEGFSIGEQIDRLTKYAEAMGWQVSDTYTDAGFSGAKLERPAMQRLINDIENKAFDTVLVYKLDRLSRSVRDTLYLVKDVFTKNKIDFISLNESINTSSAMGSLFLTILSAINEFERENIKERMTLGKLGRAKSGKSMMWTKTAFGYYHNRKTGILEIVPLQATIVEQIFTDYLSGISLTKLRDKLNESGHIGKDIPWSYRTLRQTLDNPVYCGYIKFKDSLFEGMHKPIIPYETYLKVQKELEERQQQTYERNNNPRPFQAKYMLSGMARCGYCGAPLKIVLGRKRKDGSRTMRYHCANRFPRKTKGVTVYNDNKKCDSGTYDLSNLENTVIDNLIGFQENNDSLLKIINGNNQPIKDTSSFEKQISQIDKKIRKNGDLYLNDFITMDELKDRTDSLQAEKKLLKAKISENKFNDGTDVFELVKTQLGSIPINELSYDNKKKIVNNLVSKVDVTADNVDIIFKFQLA

SEQ ID NO: 8021 - protein, 452 aa, synthetic construct; identical to SEQ ID NO: 7203

SEQ ID NO: 8022 - protein, 452 aa, synthetic construct; identical to SEQ ID NO: 7976

SEQ ID NO: 8023 - protein, 469 aa, synthetic construct
MCYTTPMRAAVYLRISEDRSGEQLGVARQREDCLKLCDQRKWVPVEYLDNDVSASTGKRRPAYEQMLADITAGKIAAVVAWDLDRLHRRPIELEAFMSLADEKRLALATVAGDVDLATPQGRLVARLKGSVAAHETEHKKARQRRAARQKAERGLPNWSKAFGYLPGPNGPEPDPRTAPLVRQAYAGILAGASLGDVCRQWNVAGAFTITGRPWTTTTLSKFLRKPRNAGLRAYKGARYGPVDRGAIVGKAQWSPLVDEATFWAAQAVLDAPGRAPGRKSVRRHLLTGLAGCGKCGNHLAGSYRTDGRVVYVCKACHGVAILADNIEPILYHIVAERLAMPDAVDLLRREIRDAAEAETIRMELETLYGELDRLAVERAEGLLTARQVKISTDVVNAKITKLRAHQLDQERLRVFNGIPLGTPQVAGMIAELSPNRFRAVLDVLAEVVVQPVGKSGRIFNPERVQVNWR

SEQ ID NO: 8024 - protein, 452 aa, synthetic construct
MKAAIYIRVSTREQVENYSIQAQTEKLTALCRSKDWDVYDIFIDGGYSGSNMNRPALNEMLSKLHEIDAVVVYRLDRLSRSQRDTITLIEEYFLKNNVEFVSLSETLDTSSPFGRAMIGILSVFAQLERETIRDRMVMGKIKRIEAGLPLTTAKGRTFGYDVIDTKLYINEEEAEQLQLIYDIFEEEQSITFLQRRLKELGFKVRTYSCYNNWLTNDLYCGYVSYKDKVHVKGIHEPIISEEQFHRVQEIFTRMGKNPNTNRDSASLLNNLVVCSKCGLGYVHRRKDTVSRGKKYHYRYYSCKTYKHTHELEKCGNKIWRADKLEELVINRVNNYSFASRNVDKEDELGSLSEKLKIEHAKKKRLFDLYINGGYEVSELDSMMNDIDAQINYYEGQIGANEELKRNKKIQENLADLATVDFDSLGFREKQLYLKSLINKIYIDGEQVTIEWL

SEQ ID NO: 8025 - protein, 485 aa, synthetic construct
MTKKVAIYTRVSTTNQAEEGFSIDEQIDRLTKYAEAMGWQVSDTYTDAGFSGAKLERPAMQRLINDIENKAFDTVLVYKLDRLSRSVRDTLYLVKDVFTKNKIDFISLSESIDTSSAMGSLFLTILSAINEFERENIKERMTMGKLGRAKSGKSMMWAKTAFGYCHNRKTGILEIVPLQATIVEQIFTDYLSGISLTKLRDKLNESGHIGKDIPWSYRTLRQTLDNPVYCGYIKFKDSLFEGMHKPIIPYETYLKVQKELEERQQQTYERNNNPRPFQAKYMLSGMARCGYCGAPLRIVLGHKRKDGSRTMKYHCANRFPRKTKGVTVYNDNKKCDSGTYDLSNLENTVIDNLIGFQENNDSLLKIINGNNQPIQDTSSFKKQISRIDKKIQKNSDLYLNDFITMDELKNRTDSLQAEKKLLKARISESKFNDSTDVFELVRAQLGSIPINELSYDNKKKIVNNLVSKVDVTADNVDIIFKFQLA

SEQ ID NO: 8026 - protein, 452 aa, synthetic construct
MKAAIYIRVSTREQVENYSIQAQTEKLTALCRSKDWDVYDIFIDGGYSGSNMNRPALNEMLSKLHEIDAVVVYRLDRLSRSQRDTITLIEEYFLKNNVEFVSLSETLDTSSPFGRAMIGILSVFAQLERETIRDRMVMGKIKRIEAGLPLTTAKGRTFGYDVIDTRLYINEEEARQLQLIYDIFEEEQSITFLQKRLKKLGFKVRTYNRYNNWLTNDLYCGYVSYKDKVHVKGIHEPIISEEQFYRVQEIFTRMGKNPNMNRDSASLLNNLVVCGKCGLGFVHRRKDAASRDKKYHYRYYSCKTYKHIHELEKCGNKIWRADKLEELIINRVNNYSLASRNVDKEDELDSLNEKLKIEHAKKRRLFDLYINGNYEVSELDSVMNDIDAQINYYESQIEANEALIKNKKIQENLAYLATVDFDSLEFREKQLYLKSLINKIYIDGEQVTIEWL

SEQ ID NO: 8027 - protein, 452 aa, synthetic construct
MKAAIYIRVSTREQVENYSIQAQTEKLTALCRSKDWDVYDIFIDGGYSGSNMNRPALNEMLSKLHEIDAVVVYRLDRLSRSQRDTITLIEEYFLKNNVEFVSLSETLDTSSPFGRAMIGILSVFAQLERETIRDRMVMGKIKRVEAGLPLTTAKGRTFGYDVIDTKLYINEEEAKQLRLIYDIFEEEQSITFLQKRLKKLGFKVRTYNRYNNWLTNDLYCGYVSYKDKVHVKGIHEPIISEEQFYRVQEIFTRMGKNPNMNRNSASLLNSLVVCGKCGLGFVHRRKDAMSRDKKYHYRYYSCKTYKHIHELEKCGNKIWRADKLEELIINRVNSYSLASRNADKEDELDSLYEKLKIEHAKKKRLFDLYINGSYEVSELDSMMSDIDAQINYYESQIEANEELKKDKKIQENLAHLATVDFDSLEFREKQLYLKSLINKIYIDGEQVTIEWL

SEQ ID NO: 8028 - protein, 452 aa, synthetic construct
MKAAIYIRVSSREQVENYSIQAQTEKLTALCRSKGWDVYDIFIDGGYSGSNMNRPALNEMLSKLHEIDAVVVYRLDRLSRSQRDTITLIEEYFLKNNVEFVSLSETLDTSSPFGRAMIGILSVFAQLERETIRDRMVMGKIKRIEAGLPLTTAKGRTFGYDVIDTKLYINEEEAKQLQLIYDIFEEEQSITFLQKRLKKLGFKVRTYNRYHNWLTNDLYCGYVSYKDKVHVKGIHEPIISEEQFYRVQEIFTRMGKNPNMNRNSASLLNNLVVCGKCGLGFVHRRKDAMSRDKKYHYRYYSCKTYKHIHELEKCGNKIWRADKLEELIIDRVNNYSLASRNVDKEDELDSLNEKLKIEHAKKKRLLDLYINGSYEVSELDSMMNDIDAQINHYESQIVANEELRKNKRIQENLAGLATVNFDSLEFREKQLYLKSLINKIYIDGEQVTIEWL

SEQ ID NO: 8029 - protein, 452 aa, synthetic construct
MKAAIYIRVSTQEQVENYSIQAQTEKLTALCRSKDWDVYDIFIDGGYSGSNMNRPALNEMLSKLHEIDAVVVYRLDRLSRSQRDTITLIEEYFLKNNVEFVSLSETLDTSSPFGRAMIGILSVFAQLERETIRDRMVMGKIKRIEAGLPLTTAKGRTFGYDVIDTKLYINEEEAKQLQLIYDIFEEEQSITFLQRRLRKLGFKVRTYSRYNNWLTNDLYCGYVSYKDKVHVKGIHEPIISEEQFYRVQEIFTRMGKNPNMNRDSASLLNSLVVCSKCGLSFVHRRKDTMSRGKRYHYRYYSCKTYKHIHELEKCGNKIWRADKLEELIINRVNNYSFASRNVDKEDELDSLYEKLKIEHAKKKRLFDLYINGSYEVSELDSMMNDIDAQINYYESQIEANEELKKNKKIQENLANLATVDYDSLEFREKQLYLKSLINKIYIDGEQVTIEWL

SEQ ID NO: 8030 - protein, 469 aa, synthetic construct
MSYTTPVRAAVYLRISEDRSGEQLGVARQREDCLKLCGQRKWVPVEYLDNDVSASTGKRRPAYEQMLADITAGKIAAVVAWDLDRLHRRPIELEAFMSLADEKRLALATVAGDVDLATPQGRLVARLKGCVAAHETEHKKARQRRAARQKAERGLPNWSKAFGYLPGPNGPEPDPRTAPLVKQAYADILAGASLGDVCRQWNAAGAFTITGRPWTTTALSKFLRKPRNAGLRAYKGARYGPVDRDAIVGKAQWSPLVDEATFWAAQAVLDAPGRAPGRKSVRRHLLTGLAGCGKCGNHLAGSYRTDGRVVYVCKACYGIAILADNIEPILYHIVAERLAMPDAVDLLCREIHDAAEAETIRLELETLCGELDRLAVERAEGLLTARQVKISTDIVNAKITKLRARQLDQERLRVLDGIPLGTPQVAGMIAELSPDRFRAVLDVLAEVVVQPVGKRGGISDPERVQVNWR

SEQ ID NO: 8031 - protein, 452 aa, synthetic construct
MKAAIYIRVSTQEQVENYSIQAQTEKLTALCRSKDWDVYDIFIDGGYSGSNMNRPALNEMLSKLHEIDAVVVYRLDRLSRSQRDTTTLIEEYFLKNNVEFVSLSETLDTSSPFGRAMIGILSVFAQLERETIRDRMVMGKIKRIEAGLPLTTAKGRTFGYDVIDTKLYINEGEAKQLRLIYDIFEEEQSITSLQKRLKKLGFKVRTYNRYSNWLTNDLYCGYVSYKDKVHVKGIHEPIISEEQFYRVQEIFTRMGKNPNMNRDSASLLSNLVVCSKCGLGFVHRSKDTMSRGKKYHYRYYSCKTYKHTHELEKCGNKTWRADKLEELIINRVNNYSFAGRNVDKEDELDSLNEKLKIEHAKKKRLFDLYINGSYEVSELDSMMNDIDAQINHYESRIEANEELKGNKKIQENLAGLATVDFDSLEFREKQLYLRSLINKIYIDGEQVTIEWL

SEQ ID NO: 8032 - protein, 452 aa, synthetic construct
MKAAIYIRVSTREQVENYSIQAQTEKLTALCRSKDWDVYDIFIDGGYSGSNMNRPALNEMLSKLHEIDAVVVYRLDRLSRSQRDTITLIEEYFLKNNVEFVSLSETLDTSSPFGRAMIGILSVFAQLERETIRDRMVMGKIKRIEAGLPLTTAKGRTFGYDVVDTKLYINEEEAKQLQLIYDIFEEEQSITLLQKRLKQLGFKVRSYNRYNNWLTNDLYCGYVSYKDKVHVKGIHEPIISEEQFYRVQEIFTRMGKNPNMNRDSASLLNNLVVCSKCGLGFVHRRKDTMSRGKKYHYRYYSCKTYKHTHELEKCGNKIWRADKLEELIINRVNNYSFASRNVGKEDELDSLNEKLKIEQAKRKRLFDLYINGNYEVSELDSMMNDIDAQISYYESQIEASEELKKNKKIQEDLADLATVDFDSLEFREKQLYLKSLINKIYIDGEQVTIEWL

SEQ ID NO: 8033 - protein, 469 aa, synthetic construct
MSYTTPVRAAVYLRISEDRSGEQLGVARQREDCLKLCGQRKWVPVEYLDNDVSASTGKRRPAYEQMLADITAGKIAAVVAWDLDRLHRRPIELEAFMSLADEKRLALATVAGDVDLATPQGRLVARLKGCVAAHETEHKKARQRRAARQKAERGYPNWSKAFGYLPGPNGPEPDPRTAPLVKQAYADILAGASLGDVCRQWNDAGAFTITGRPWTATALSKFLRKPRNAGLRAYKGARYGPVDRDAIVGKAQWSPLVDEATFWAAQAVLDAPGRAPGRKSVRRHLLTGLAGCGKCGNHLAGSYRTDGRVVYVCKTCHGVAILADNIEPILYHIVAERLAMPDAVDLLRREIHDAAEAETIRLELEALYGELDRLAVERAEGLLTARQVKISTDIVSAKITKQQARQLDQERLRVLDGIPLGTPQVAGVIAELSPDRFRAVLDVLAEVVVQPVGKSGRISNPERVQVNWR

SEQ ID NO: 8034 - protein, 452 aa, synthetic construct
MKAAIYIRVSTQEQVENYSIRAQTEKLTALCRSKDWDVYDIFIDGGYSGSNMNRPALNEMLSKLHEIDAVVVYRLDRLSRSQRDTTTLIEEYFLKNNVEFVSLSETLDTSSPFGRAMIGILSVFAQLERETIRDRMVMGKIKRIEAGLPLTTAKGRTFGYDVIDTKLYINEEEAKQLQLIYDIFEEEQSITSLQKRLKKLGFKVRTYNRYNSWLTNDLYCGYVSYKDKVHVKGIHEPIISEEQFYRVQEIFTRMGKNPNMNRDSASLLSNLVVCSKCGLGFVHRSKDTMSRGKKYHYRYYSCKTYKHTHELEKCGNKIWRADKLEELIINRVNSYSFASRNVDKEDELDSLNEKLKTEHAKRKRLFDLYINGSYEVSELDSMMNDIDAQINYYESQIEANEELKKNKKIQENLADLATVDFDSLGFREKQLYLKSLISKIYIDGEQVTIEWL

SEQ ID NO: 8035 - protein, 485 aa, synthetic construct
MTKKVAIYTRVSTTNQAEEGFSIDEQIDRLTKYAEAMGWQVSDTYTDAGFSGAKLERPAMQRLINDIENKAFDTVLVYKLDRLSRSVRDTLYLVKDVFTKHKIDFVSLNECIDTSSAMGSLFLTILSAINEFERENIKERMTMGKLGRAKSGKSMMWTKTAFGYYHNRKTGILEIVPLQATIVKQIFTDYLSGISLTKLRDKLNESGHIGKDIPWSYRTLRQTLDNPVYCGYIKFKDSLFEGMHKPIIPYETYLKVQKELEERQQQAYERNHNPRPFQAKYMLSGMARCGYCGAPLKIVLGHKRKDGSRTMKYHCANRFPRKTKGVTVYNDNRKCDSGTYDLSNLENTVIDNLVGFQENNDSLLKIINGSNQPTPDTSSFKKQISQIDKEIQKNSDLYLNDFITMDELKDRTDSLQAEKKLLKAKISENKFNDRTDVFELVKTQLGSTPINELSYDNKMKIVNNLVSKVDVTADNVDIIFKFQLA

SEQ ID NO: 8036 - protein, 452 aa, synthetic construct
MKAAIYIRVSTREQVENYSIQAQTEKLTALCRSKGWDVYDIFVDGGYSGSNMNRPALDEMLSKLHEIDAVVVYRLDRLSRSQRDTITLIEEYFLKNNVEFVSLSETLDTSSPFGRAMIGILSVFAQLERETIRDRMVMGKIKRIEAGLPLTTAKGRTFGYDVIDAKLYINEEEAKQLQLIYDIFEEEQSITFLQKRLKKLGFKVHTYNRYNNWLTNDLYCGYVSYKDKVHVKGIHEPIISEEQFYRVQEIFTRMGKSPNMNRDSASLLNNLVVCSKCGLGFVHRRKDAMGRDKKYHYRYYSCKTYKHIHELEKCGNKIWRADKLEELIINRVNNYSFAGRNADKEDELDSLNEKLKIEHAKKKRLFDLYINGSYEVSELDSMMSDIDAQINYYESQIGANEELKKNKKIQENLANLATVDFDSLGFREKQLYLKSLINKIYIDGEQVTIEWL

SEQ ID NO: 8037 - protein, 452 aa, synthetic construct
MKAAIYIRVSTREQVENYSIQAQTEKLTALCRSKDWDVYDIFTDGGYSGSNMNRPALNEMLSKLHEIDAVVVYRLDRLSRSQRDTITLIEEYFLKNNVEFVSLSETLDTSSPFGRAMIGILSVFAQLERETIRDRMVMGKIKRIEAGLPLTTAKGRTFGYDVIDTKLYINEEEAKQLQLIYDIFEEEQSITLLQKRLKKLGFKVRTYSCYNSWLTNDLYCGYVSYKDKVHVKGIHEPIISEEQFYRVQEIFARMGKNPNMNRDSASLLNNLVVCGKCGLGFVHRRKDTMSRGKKYHYRYYSCKTYKHTHELEKCGNKIWRADKLEELIINRVNNYSFASRNVDKEDELGSLNEKLKIEHTKKKRLFDLYINGSYEVSELDSMMNDIDVQISYYESQIEANEELKKNRKIQENLANLATVDYDSLEFREKQLYLRSLINKIYIDGEQVTIEWL

SEQ ID NO: 8038 - protein, 485 aa, synthetic construct
MTKKVAIYTRVSTTNQAEEGFSIDEQTDRLTKYAEAMGWQVSNTYTDAGFSGAKLERPAMQRLINDIENKAFDTVLVYKLDRLSRSVRDTLYLVKDVFTKNEIDFISLNESINTSSAMGSLFLTILSAINEFERENIKERMTMGKLGRAKSGKSMMWTKTAFGYYHNRKTGILEIVPLQATIVEQIFTDYLSGISLTKLRDKLNESGHIGKDIPWSYRTLRQTLDNPVYCGYIKFKDSLFEGMHKPIIPYETYLKVQRELEERQQQTYERNNNPRPFQAKYMLSGMVRCGYCGAPLRVVLGHKRKDGSRTMKYHCANRFPRKTKGVTVYNDNKKCDSGTYDLSNLENTVVDYLIGFQEDNDSLLKIINGSNQPILDTSSFKKQISQIDKKIQKNSDLYLNDFITMDELKDRTDSLQAKKKLLEAKISENKLNDSTDVFELVKTQLGSIPINELSYDNKKKIVNNLVCKVDVTADNVDIIFKFQLA

SEQ ID NO: 8039 - protein, 452 aa, synthetic construct
MKAAIYIRVSTREQVENYSIQAQTEKLTALCRSKDWDVYDIFIDGGYSGSNMNRPALNEMLSKLHEIDAVVVYRLDRLSRSQRDTITLIEEYFLKNNVEFVSLSETLDTSSPFGRAMIGILSVFAQLERETIRDRMVMGKIKRIEAGLPLTTAKGRTFGYDVIDTKLYINEEEAKQLQLIYDIFEEEQSITFLQKRLKKLGFKVRTYSCYNNWLTNDLYCGYVSYKDKVHVKGIHEPIISEEQFYRVQEIFTRMGKNPNVNRDSASLLNNLVVCSKCGLGFVHRRKDTMSRGKKYHYRYYSCKTYKHTHELEKCGNKIWRADKLEELIIDRVNNYSLASRNVDKEDELNCLNEKLKIEHAKKKRLFDLYINGSYEVSELDSMMNDIDAQINYYESQIEANEELKKDKKIQENLANLATVDYDSLEFREKQLYLKSLINKIYIDGEQVTIEWL

SEQ ID NO: 8040 - protein, 469 aa, synthetic construct
MSYTTPVRAAVYLRISEDRSGEQLGVARQREDCLKLCDQRNWVPVEYLDNDVSASTGKRRPAYEQMLADITAGKIAAVVAWDLDRLHRRPIELEAFMSLADEKRLALATVAGDVDLATPQGRLVARLKGSVAAHETEHKRARQRRAARQKAERGYPNWSKAFGYLPGPNGPEPDPRTAPLVKQAYADILAGASLGDVCRQWNDAGAFTITGRPWTTTTLSRFLRKPRNAGLRAYKGARYGPVDRDAIVGKAQWSPLVDEATFWAAQAVLDAPGRAPGRKSVRRHLLTGLAGCGKCGNHLAGSHRTDGRVVYVCKACHGVAILADNIEPMLYHIVAERLAMPDAVDLLRREIHDAAEAETIRLELETLYGELDRLAVERAEGLLTARQVKISTDIVNAKITKLQACQQDQERLRVLAGIPLGTPRVAGMIAELSPDRFRAVLDVLAEVVVQPVGKGGRVFNPERVQVNWR

SEQ ID NO: 8041 - protein, 485 aa, synthetic construct
MTKKVAIYTRVSTTNQAEEGFSIDEQIDRLTKYAEAMGWQVSDTYTDAGLSGAKLERPAMQRLINDIENKAFDTVLVYKLDRLSRSVRDTLYLVKDVFTKNKIDFISLNESIDTSSAMGSLFLTILSAINEFERENIKERMTMGKLGRAKSGKSMMWTKTAFGYYHNRKTGILEIVPLQATIVEQIFTDYLSGISLTKLRDKLNESGHIGKDIPWSYRTLRQTLDNPVYCGYIKFKDSLFEGMHKPIIPYETYLKVQKELEERQQQTYERNNNPRPFQAKYMLSGMARCGYCGAPLRIVLGHKRKDGSRTMKYHCANRFPRKTKGVTVYNDNKKCDSGTYDLSNLENTVIDYLIGFQENNDSLLKIINGNNQPILDTSSLKKQIGQIDKKIQKNSDLYLNDFITMDELKERTDSLRAEKRLLEAKISVNKFNDSTDVFELVKTQLGSTPINELSYDNKKKIVNNLVSKVDVTADNVDIIFKFQLA

SEQ ID NO: 8042 - protein, 469 aa, synthetic construct
MSYTTPVRAAVYLRISEDRSGEQLGVARQREDCLKLCDQRKWVPVEYLDNDVSASTGKRRPAYEQMLADITAGKIAAVVAWDLDRLHRRPIELEAFMSLADEKRLALATVAGDVDLATPQGRLVARLKGCVAAHETEHKKARQRRAARQKAERGLPNWSKAFGYLPGPNGPEPDPRTAPLVKQAYADILAGASLGDVCRQWNDTGAFTITGRPWTTTTLSKFLRKSRNAGLRAYKGARYGPVDRDAIVGKAQWSPLVDEATFWAAQAVLDAPGRAPGRKSVRRHLLTGLAGCGKCGNHLAGSYRTDGRVVYVCKACHGVVILADNIEPILYRIVTERLAMPDAVDLLRREIHDAAEAEPIRLELETLYGELDRLAVERAEGLLTARQVKISTDIVNAKITKLQARQLDQERLRVFDGIPLGTPQVAGTIAELSPDRFRAVLDVLAEVVVQPVGKGGRIFNSERVQVNWR

SEQ ID NO: 8043 - protein, 452 aa, synthetic construct; identical to SEQ ID NO: 7017

SEQ ID NO: 8044 - protein, 452 aa, synthetic construct
MKAAIYIRVSTREQVENYSIQAQTEKLTALCRSKDWDVYDIFVDGGYSGSNMNRPALNEMLSKLHEIDAVVVYRLDRLSRSQRDTITLIEEYFLKNNVEFVSLSETLDTSSPFGRAMIGILSVFAQLERETIRDRMVMGKIKRIEAGLPLTTAKGRTFGYDVIDTKLYINEEEAKQLQLIYDIFEEEQSITFLQKRLKKLGFKVRTYNRYNNWLTNDLYCGYVSYKDKVHVKGIHEPIISEEQFYRVQEIFTRMGKNPNMNRDSASLLNGLVVCSKCGLGFVHRRKDAMSRDKKYHYRYYSCKTYKHIHELEKCGNKIWRADELEELIINRVNNYSIEGRNADKEDELDSLNEKLKIEHAKKKRLFELYISGSYEVSELDSMMNDIDAQINYYESQIEANKELKKNKKIQENLADLVTVDFDSLEFREKRLYLKSLINKIYIDGEQVTIEWL

SEQ ID NO: 8045 - protein, 485 aa, synthetic construct; identical to SEQ ID NO: 3725

SEQ ID NO: 8046 - protein, 485 aa, synthetic construct
MTKKVAIYTRVSTTNQAEEGFSIDEQIDRLTKYAEAMGWQVSDTYTDAGFSGAKLERPAMQRLINDIENKAFDTVLVYKLDRLSRSVRDTLYLVKDVFTKNKIDFISLNESIDTSSAMGSLFLTILSAINEFERENIKERMTMGKLGRAKSGKSMMWTKTAFGYYHNRKTGILEIVPLQATIVEQIFTDYLSGISLTKLRDRLNESGHIGKDIPWSYRTLRQTLDNPVYCGYIKFKDSLFEGMHKPIIPYETYLKVQKELEERQQQTYERNNNPRPFQAKYMLSGMARCGYCGAPLRIVLGHKRKDGSRTMEYHCANRFPRKTKGVTVYNDNKKCDSGTYDLSNLEDTVIDHLIGFQENNDSLLKIINGNDQPILDTSSFEEQISQIDKKIQKNSDLYLNDFITMDELKDRTDSLQAEKKLLKAKISENKFNDSADVFELVKAQLGSIPINELSYDNKKKIVNNLVSKVDVTADNVDIIFKFQLT

SEQ ID NO: 8047 - protein, 486 aa, synthetic construct
MTKKVAIYTRVSTTNQAEEGFSIDEQIDRLTKYAEAMGWQVSDTYTDAGFSGAKLERPAMLRLINDIENKAFDTVLVYKLDRLSRSVRDTLYLVKDVFTKNEIDFISLNESIDTSSAMGSLFLTILSAINEFERENIKERMTMGKLGRAKSGKSMMWTKTAFGYYHNRKTGILEIVPLQATIVEQIFTDYLSGISLTRLRDKLNESGHIGKDIPWSYRTLRQTLDNPVYCGYIKFKDSLFEGMHKPIIPYETYLKVQKELEERQRQTYERNNNPRPFQAKYMLSGMARCGYCGAPLRIVLGHKRKDGSRTMKYHCANRFPRRTKGVTVYNDNKKCDSGTYDLSNLENTVIDNLIGFQENNDSLLKIISGNNQPILDTSSLKKQISQIDKKIQKNSDLYLNDFITMDELKDRTDSLQAEKKLLKAKISENKFNDSTDVFELVKTQLGSIPINELSYDNKKKIVNSLVSKVDVTADNVDIIFKFQLAY

SEQ ID NO: 8048 - protein, 485 aa, synthetic construct
MTKKVAIYTRVSTTNQAEEGFSIDEQIDRLTKYAEAMGWQVSGTYTDAGISGAKLERPAMQRLINDIENKAFDTVLVYKLDRLSRSVRDTLYLVKDVFTKNKIDFISLNESIDTSSAMGSLFLTILSAINEFERENIKERMTMGKLGRAKSGKSMMWTKTAFGYYHNRKTGILEIVPLQATIVEQIFTDYLSGISLTKLRDKLNESGHIGKDIPWSYRTLRQTLDNPVYCGYIKFKDSLFEGMHKPIIPYETYLKVQKELEERQQQTYERNNNPRPFQAKYMLSGMARCGYCGAPLRIVLGHKRKDGSRTMKYHCANRFPRKTKGVTVYNDNKKCDSGTYDLSNLENTVIDSLIGLQENNDSLLKIINGNYQPILDTSSLKKQISQIDKKIQKNSDLYLNDFITMDELKDRTDSLQAEKKLLKAKISENKFNDSTDVFELVKTQLGSTPINELSYDNKKKIVNNLVSKVDVTADNVDIIFKFQLA

SEQ ID NO: 8049 - protein, 485 aa, synthetic construct
MTKKVAIYTRVSTANQAEEGFSIDEQIDRLTKYAEAMGWQVSDTYTDAGFSGAKLERPAMQRLINDIENKAFDTVLVYRLDRLSRSVRDTLHLVKDVFTKNKIDFISLNESINTSSAMGSLFLTILSAINEFERENIKERMTMGKLGRAKSGKSMMWAKTAFGYYHNRKTGILEIVPLQATIVEQIFTDYLSGISLTKLRDKLNESGHIGKDIPWSYRTLRQTLDNPVYCGYIKFKDSLFEGMHKPIIPYETYLKVQKELEERQQQTYERNNNPRPFQAKYMLSGMARCGYCGAPLKIVLGHKRKDGSRTMKYHCANRFPRRTKGVTVYNDNKKCDSGTYDLSNLENTVIDNLIGLQENNDSLLKIINGNNQPILDTSSFKEQISQIDKKIQKNSDLYLNDFITMDELKDRTDSLQAEKKLLKAKISENKFNDSTDVFELVKTQLGSIPINELSYGNKKKIVNNLVSKVDVTADNVDIIFKFQLA

SEQ ID NO: 8050 - protein, 452 aa, synthetic construct
MKAAIYIRVSTREQVENYSIQAQTEKLTALCRSKDWDVYDIFIDGGYSGSNMNRPALNEMLSKLHEIDAVVVYRLDRLSRSQRDTITLIEEYFLKNDVEFVSLSETLDTGSPFGRAMIGILSVFAQLERETIRDRMVMGKIKRIEAGLPLTTAKGRTFGYDVIDTKLYINKEEARQLQLIYDIFEEEQSITLLQKRLKKLGFKVRTYNRYNNWLTNDLYCGYVSYKDKVHVKGIHEPIISEEQFYRVQEIFARMGKNPNMNRDSASLLNNLVVCSKCGLGFVHRRKDAVSRDKKYHYRYYSCKTYKHIHELEKCGNKIWRADKLEELIINRVNNYSLASRNVDKDDELDSLNEKLRIEHAKKKRLFDLYINGSYEVSELDSMMSDIDARINYYESQIEANGELKKNKKIQENLANLATVDFDSLEFREKQLYLKSLINKIYIDGEQVTIEWL

SEQ ID NO: 8051 - protein, 485 aa, synthetic construct
MTKKVAIYTRVSTTNQAEEGFSIDEQIDRLTKYAEAMGWQVSDTYTDAGFSGAKLERPAMQRLINDIENKAFDTVLVYKLDRLSRSVRDTLYLVKDVFTKNKIDFISLNESINTSSAMGSLFLTILSAINEFERENIKERMTMGKLGRAKSGKSMMWTKTAFGYYHNRKTGILEIVPTQATIVEQIFTDYLSGISLTKLRDKLNESGHIGKDIPWSYRTLRQTLDNPVYCGYIKFKDSLFEGMHKPIIPYETYLRVQKELEERQQQTYERNNNPRPFQAKYMLSGMARCGYCGAPLRVVLGHKRKDGSRTMKYHCANRFPRKTKGVTVYNDNKKCDSGTYDLSNLENTVIDNLVGFQENNDSLLKIISGNNQPILDTSSFKKQISQIDKKIQKNSDLYLNDFITMDELKDRTDSLQAEKKLLEAKISENKSNDSADVFELVRTQLGSIPINELSYDNKKKIVNNLVSKVDVTVDNVDIIFKFQLT

SEQ ID NO: 8052 - protein, 452 aa, synthetic construct
MKAAIYIRVSTREQVENYSIQAQTEKLTALCRSKDWDVYDIFIDGGYSGSNMNRPALNEMLSKLHEIDAVVVYRLDRLSRSQRDTITLIEEYFLKNNVEFVSLSETLDTSSPFGRAMIGILSVFAQLERETIRDRMVMGKIKRIEAGLPLTTAKGRTFGYDVIDTKLYINEEEAKQLRLIYDIFEEEQSITFLQKRLKKLGFKVRTYNRYNNWLTNDLYCGYVSYKDKVRVKGIHEPIISEEQFYRVQEIFTRMGKNPNMNRGSASLLNNLVVCSKCGLGFVHRRKDAMSRNKKYHYRYYSCKTYKHIHELEKCGNKIWRADKLEELIINRVNNYSIASRNVDKEDELDGLNEKLKIEHAKKKRLFGLYINGSYEVSELDSMMKDIDAQINYYESQIEANEELRKNRKIQETLADLATVDFDSLEFREKQLYLKSLINKIYIDGEQVTIEWL

SEQ ID NO: 8053 - protein, 469 aa, synthetic construct
MSYTTPVRAAVYLRISEDRSGEQLGVARQREDCLKLCGQRKWEPVEYLDNDVSASTGRRRPAYEQMLADITAGKIAAVVAWDLDRLHRRPIELEAFMSLADEKRLALATVAGDVDLATPQGRLVARLKGSVAAHETEHKRARQRRAARQKAERGHPNWSKAFGYLPGPNGPEPDPRAAPLVRQAYADILAGASLGDVCRRWNDAGAFTITGRPWTTTTLSKFLRKPRNAGLRAYNGARYGPVDRDAIVGKAQWSPLVDEATFWAAQAVLDAPGRAPGRKSVRRHLLTGLAGCGKCGNHLAGGYRTDGRVVYVCKACHGVAILADNIVPILYHIVAERLAMPDAVGLLRREVHDAAEAETIRLELETLYGELDRLAVERAEGLLTARQVKISTDIVNAKITKLQARQLDQERLRVFDGIPLGTPQVAGIIAELSPDRFRAVLDVLAEVVVQPVGKSGRIFNPERVQVNWR

SEQ ID NO: 8054 - protein, 485 aa, synthetic construct
MTKKVAIYTRVSTTNQAEEGFSIDEQIDRLTKYAEAMGWQVSDTYTDAGFSGAKLERPAMQRLINDIGNKAFDTVLVYKLDRLSRSARDTLYLVKDVFTKNRIDFISLNESIDTSSAMGSLFLTILSAINEFERENIKERMTMGKLGRAKSGKSMMWTKTAFGYYHNRKTGILEIVPLQATIVEQIFTDYLSGISLTKLRDKLNESGHIGKDIPWSYRTLRQTLDNPVYCGYIKFKDSLFEGMHKPIIPYETYLKVQKELEERQQQTYERNNNPRPFQAKYMLSGMARCGYCGAPLRIVLGRKRKDGSRIMKYHCANRFPRKTKGVTVYNDNKKCDSGTYDLSNLENIVIDNLIGFQENNDSLLKIINGNNQPILDTSSFKEQISQIDKKIQKNSDLYLNDFITMDELKDRTDSLQVEKRLLKAKISENKFNDSTDVFELVKTQLGSIPINELSYDNKKKIVNNLVSKVDVTADNVDIIFKFQLA

SEQ ID NO: 8055 - protein, 452 aa, synthetic construct
MKAAIYIRVSTREQVENYSIQAQTEKLTALCRSKDWDVHDVFIDGGYSGSNMNRPALNEMLSKLHEIDAVVVYRLDRLSRSQRDTITLIEEYFLKNNVEFVSLNEALDTSSPFGRAMIGILSVFAQLERETIRDRMVMGKIKRIEAGLPLTTAKGRTFGYDVIDTKLYINEEEAKQLQLIYDIFEEEQSITSLQKRLKKLGFKVRTYNRYNNWLTNDLYCGYVSYKDKVHVKGIHEPIISEEQFYRVQEIFTRMGKNPNMNRDSASLLNNLVVCSKCGRGFVHRRKDAKGRDKKYHYRYYSCKTYKHIHELEKCGNKIWRADKLEELIINRVNNYSLASRNADKEDGLDGLNEKLKIEHAKKKRLFDLYINGSYEVSELDSMMNDINAQINYYESQIEANEELKKNKEIQENLANLATVDFDSLEFREKQRYLKSLINKIYIDGEQVTIEWL

SEQ ID NO: 8056 - protein, 452 aa, synthetic construct
MKAAIYIRVSTQEQVGNYSIQAQTEKLTALCRSKDWDVYDIFIDGGYSGSNMNRPALNEMLSKLHEIDAVVVYRLDRLSRSQRDTTTLIEEYFLKNNVEFVSLSETLDTSSPFGRAMIGILSVFAQLERETMRDRMVMGKIKRIESGLPLTTAKGRTFGYDVIDTKLYINEEEAKQLRLIYDIFEEEQSITSLQKRLKKLGFKVRTYNRYNRWLTNDLYCGYVSYKDKVHVKGIHEPIISEEQFYRVQEIFTRMGKNPNMNRDSASLLNNLVVCSKCGLGFVHRSKDTMCRGKKYHYRYYSCKTYKHTHELEKCGNKIWRADKLEELIIDRVNNYSFASRNVDKEGELDSLNEKLKIEHAKKKRLFNLYINGSYEVSELDSMMSDIDAQINYYESQIEANEELKKNKKIQENLADLATVDFDSLGFREKQQYLKSLINKIYIDGEQVTIEWL

SEQ ID NO: 8057 - protein, 452 aa, synthetic construct
MKAAIYIRVSTREQVENYSIQAQTEKLTALCRSKDWDVYDIFIDGGYSGSNMNRPALNEMLSKLHEIDAVVVYRLDRLSRSQRDTITLIEEYFLKNNVEFVSLSETLDTSSPFGRAMIGILSVFAQLERETIRDRMVMGKIKRIEAGLPLTTAKGRTFGYDVIDTKLYINEEEAEQLRLIYDIFEEERSITFLQKRLKKLGFKVRTYSRYNNWLTNDLYCGYVSYKDKVHVKGIHEPIISEEQFYRVQEIFTRMGKNPNMNRDSASLLNNLVVCSKCGLGFVHRRKDTMSRGKKYHYRYYSCKTYKHTHELEKCGNKIWRADKLEELILNRVNNYSFASRNVDKEDELDSLNEKLKIEHAKKKRLFDLYINGSYEVSELDCMMNDINAQINYYESRIEANEELKKDKKIQESLANLATVDYDSLEFREKQLYLKSLINKIYIDGEQVTIEWL

SEQ ID NO: 8058 - protein, 452 aa, synthetic construct
MKAAIYIRVSTQEQVENYSIQAQTEKLTALCRSKDWDVYDIFIDGGYSGSNMNRPALNEMLSKLHEIDAVVVYRLDRLSRSQRDTITLIEEYFLKNNVEFVSLSETLDTSSPFGRAMIGILSVFAQLERETIRDRMVMGRIKRIEAGLPLTTAKGRTFGYDVIDTKLYINEEEAKQLQLIYDIFEEEQSITFLQKRLKKLGFKVRTYNRYNSWLTNDLYCGYVSYKDKVRVKGIHEPIISEEQFYRVQEIFTRMGKNPNMNRDSASLLNGLVVCSKCGLGFVHRRKDTMSRGKKYHYRYYSCKTYKHIHELEKCGNKIWRADKLEELIINRVNNYSFASRNADKEDELDSLNEKLKIEHAKKRRLFDLYINGSYEVSELDSMMNDIDAQINYYESQIEANEELRKNKKIQENLADLATVDFDSLEFREKQQYLKSLINKIYIDGEQVTIEWL

SEQ ID NO: 8059 - protein, 452 aa, synthetic construct
MKAAIYIRVSTREQVENYSIQAQTEKLTALCRSKDWDVYDIFIDGGYSGSNMNRPALNEMLSRLHEIDAVVVYRLDRLSRSQRDTITLIEEYFLKNNVEFVSLSETLDTSSPFGRAMIGILSVFAQLERETIRDRMVMGKIKRIEAGLPLTTAKGRTFGYDVIDTKLYINEEEARQLQLIYDIFEEEQSITFLQKRLKKLGFKVRTYNRYNSWLTNDLYCGYVSYKDKVRAKGIHEPIISEEQFYRVQEIFTRMGKNPNMNRDSASLLNNLVVCGKCGLGFVHRRKDTTSRGKKYHYRYYSCKTYKHTHELEKCGNKIWRADKLEELIINRVNNYSLASRNVDKEDELDSLNEKLRIEHAKKKRLFDLYINGSYEVSELDSMMNDVDAQINYYESQIEANEELKKSKKVQENLANLATVDYDSLEFREKQLYLKSLINKIYIDGEQVTIEWL

SEQ ID NO: 8060 - protein, 485 aa, synthetic construct
MTKKVAIYTRVSTTNQAEEGFSIDEQIDRLTKYAEAMGWQVSDAYTDAGFSGAKLERPAMQRLINDIENKAFDTVLVYKLDRLSRSVRDTLYLVKEVFTKNKIDFISLSESIDTSSAMGSLFLTILSAINEFERENIRERMTMGKLGRAKSGKSMMWTKTAFGYYHNRKTGILEIVPLQATIVEQIFTDYLSGISLTKLRDKLNESGHIGKDIPWSYRTLRQTLDNPVYCGYIKFKDSLFEGMHKPIIPYETYLKVQKELEERQQQTYERNNNPRPFQAKYMLSGMARCGYCGAPLRIVLGHKRRDGSRTMKYHCANRFPRKTKGVTVYNDNKRCDSGTYDLSDLENTVIDNLIGFQENNDSLLKIINGNNRPILDTSSFKKQISQIDKKIQKNSDLYLNDFITMDELKDRTDSLQAEKKLLKAKISENKFNDSTDVFELVKTQLGSIPINELSYDNKKKIVNNLVSKVDVTADNVDVIFKFQLA

SEQ ID NO: 8061 - protein, 452 aa, synthetic construct
MKAAIYIRVSTREQVENYSIQAQTEKLTALCRSKDWDVYDIFIDGGYSGSNMNRPALNEMLSKLHEIDAVVVYRLDRLSRSQRDTITLIEEHFLKNNVEFVSLSETLDTSSPFGRAMIGILSVFAQLERETIRDRMVMGKIKRIEAGLPLTTAKGRTFGYDVIDTKLYINEEEAKQLQLIYDIFEEERSITFLQKRLKKLGFKVRTYNRYNNWLTNDLYCGYVSYKDKVHVKGIHEPIISEEQFYRVQEIFTRMGKNPNMNRDSASLLNNLVVCGKCGLGFVHRRKDAVSRDKKYHYRYYSCKTYKHIHELEKCGNKIWRADKLEELIIGRVNNYSLASRNVDKEDELGSLNEKLTAEHARKKRLFDLYINGRYEVSELDSMMNDIDAQISYYESQIEACEELKKNKKIQENLAHLATVDFDSLEFREKQLYLKSLINKIYIDGEQVTIEWL

SEQ ID NO: 8062 - protein, 452 aa, synthetic construct
MKAAIYIRVSTQEQVENYSIQAQTEKLTALCRSKDWDVYDIFIDGGYSGSNMNRPALNEMLSKLHEIDAVVVYRLDRLSRSQRDTTTLIEEYFLKNNVEFVSLSETLDTSSPFGRAMIGILSVFAQLERETIRDRMVMGKIKRIESGLPLTTAKGRTFGYDVIDTKLYINEEEAKQLQLIYDIFEEEQSITFLQKRLKKLGFKVRTYNRYSSWLTNDLYCGYVSYKDKVHVKGIHEPIISEEQFYRVQEIFTRMGKNPNMNRDSASLLNNLVVCSKCGLGFVHRSKDTRCRGKKYHYRYYSCKTYKHTHELEKCGNKTWRADKLEELIINRVNNYSFASRNADKEDELDSLNEKLKIEHARKKRLFDLYINGSYEVSELDSMMNDIDAQINYYESRIEANEELKRNKKIQEDLADLATVDFDSLEFREKQLYLKSLINKIYIDGEQVTIEWL

SEQ ID NO: 8063 - protein, 452 aa, synthetic construct
MKAAIYIRVSTQEQVENYSIQAQTEKLTALCRSKDWDVYDIFIDGGYSGSNMNRPALNEMLSKLHEIDAVVVYRLDRLSRSQRDTTTLIEEYFLKNNVEFVSLSETLDTSSPFGRAMIGILSVFAQLERETIRDRMVMGKIKRIEAGLPLTTAKGRTFGYDVIDTKLYINEEEAKQLQLIYDIFEEEQSITSLQKRLKKLGFKVRTYNRYNNWLTNDLYCGYVSYKDKVHVKGIHEPIISEEQFYRVQEIFTRMGKNPNMNRDSASLLNNLVVCSKCGLGFVHRRKDTMSRGKKYHYRYYSCKTYKHTHELEKCGNKTWRADKLEELIINRVNNHSFACRSVDKEDELDSLNEKLRIEHAKRKRLFDLYINGSYEVGELDSMMNDIDAQINYYESQVEANKELKKNKKIQENLADLATVDFDSLEFREKQLYLKSLINKIYIDGEQVTIEWL

SEQ ID NO: 8064 - protein, 485 aa, synthetic construct
MTKKVAIYTRVSTTSQAEEGFSIDEQVDRLTKYAEAMGWQVSDTYTDAGVSGAKLERPAMQRLINDIENKAFDTVLVYKLDRLSRSVRDTLYLVKDVFTRNKIDFISLNESIDTSSAMGSLFLTILSAINEFERENIKERMTMGRLGRAKSGKSMMWTKTAFGYYHNRKTGILEIVPLQAAIVEQIFTDYLSGISLTKLRDKLNESGHIGKDIPWSYRTLRQTLDNPVYCGYIKFKGSLFEGMHKPIIPYETYLKVQKELEERQQQTCERNNNPRPFQAKYMLSGMARCGYCGAPLKIVLGHKRKDGSRTMKYHCANRFPRKTKGVTVYNDNKKCDSGTYDLSNLENTVIDNLIGLQENNDSLLKIINGNNQPIRDTSSFKEQISQIDKKIQKNSDLYLNDFITMDELRDRTDSLQAEKKLLKAKISENKFNDSTGVFELVKTQLGSIPINELSYDNKKKIVNNLVSKVDVTADNVDIIFKFQLA

SEQ ID NO: 8065 - protein, 452 aa, synthetic construct
MKAAIYIRVSTREQVENYSIQAQTEKLTALCRSKDWDVYDIFIDGGYSGSNMNRPALNEMLSKLHEIDAVVVYRLDRLSRSQRDTITLIEEHFLKNNVEFVSLSETLDTSSPFGRAMIGVLSVFAQLERETIRDRMVMGKIKRIEAGLPLTTAKGRTFGYDVIDTKLYINEEEAKQLQLIYDIFEEEQSITFLQKRLKKLGFKVRTYSRYNNWLTNDLYCGYVSYKDKVHVKGIHEPIISEEQFYRVQEIFTRMGKNPNMNRDSASLLNNLVVCSKCGLGFVHRRKDTMSRGKKYHYRYYSCKTYKHTHELEKCGNKIWRADRLEELIINRVNNYSFASRNVDKDDELDSLNEKLKIEYAKKRRLFDLYISGSYEVSELDSMMSDIEAQINYYECQIEANEELKKSKKIQENLANLATVDYDSLEFREKQLYLKSLINKIYIDGEQVTIEWL

SEQ ID NO: 8066 - protein, 452 aa, synthetic construct
MKAAVYIRVSTREQVENYSIQAQTEKLTALCRSKDWDVYDIFIDGGYSGSNMNRPALNEMLSRLHEIDAVVVYRLDRLSRSQRDTITLIEEYFLKNNVEFVSLSETLDTSSPFGRAMIGILSVFAQLERETIRDRMVMGKIKRVEAGLPLTTAKGRTFGYDVVDTKLYINEEEAKQLQLIYDIFEEGQSITFLQKRLKKLGFEVHTYNRYNNWLTNDLYCGYVSYKDKVHVKGIHEPIISEEQFYRVQEIFTRMGKNPNMNRNSASLLNNLVVCSKCGLGFVHRRKDTMSRGKKYHYRYYSCKTYKHIHELEKCGNKIWRADKLEELIINRVNNYSFASRNADKEDELDSLNEKLKIEHAKKRRLFDLYINGSYEVSELDSMMNDIDAQINYYESQIEANEELKKNKKIQENLANLATVDFESLEFREKQLYLKSLINKIYIDGEQVTIEWL

SEQ ID NO: 8067 - protein, 485 aa, synthetic construct
MTQKVAIYTRVSTTNQAEEGFSIDEQIDRLTKYAEAMGWQVSDTYTDAGFSGAKLERPAMQRLINDIENKAFDTVLVYKLDRLSRSVRDTLYLVKDVFTKNKIDFISLNESIDTSSAMGSLFLTILSAINEFERENIKERMTMGKLGRAKSGKSMMWTKTAFGYYHNRKTGILEIVPLQATIVEQIFTDYLSGTSLTKLRDKLNESGHIGKDIPWSYRTLRQTLDNPVYCGYIKFKGSLFEGMHKPIIPYETYLKVQKELEERQQQTYERNSNPRPFQAKYMLSGMARCGYCGAPLRIVLGHKRKDGSRTMKYHCANRFPRKTRGVTVYNDNKKCNSGTYDLSNLENTVIDILVGFQEDNDSLLKIINGNNQPILDTSSFKEQISQIDKKIQKNSDLYLNDFITMDELKDRTDSLQAEKKLLKAKISENKFNDSPDVLELVKAQLGSIPINELSYDNKKKIVNNLVSKVDVTADNVDIIFKFQLA

SEQ ID NO: 8068 - protein, 485 aa, synthetic construct
MTKKVAIYTRVSTTNQAEEGFSIDEQIDRLAKYAEAMGWQVSDTYTDAGFSGAKLERPAMQRLINDIENKAFDTVLVYKLDRLSRSVRDTLYLVKDVFTKNKIDFISLNESIDTSSAMGSLFLTILSAINEFERENIKERMTMGKLGRAKSGKSMMWTKTAFGYYHNRKTGILEIVPLQATIVEQIFTDYLSGISLTKLRDKLNESGHIGKDIPWSYRTLRQTLDNPVYCGYIKFKDSLFEGMHKPIIPYETYLKVQKELEERQQQTYERNNNPRPFQAKYMLSGMARCGYCGAPLRIVLGHKRKDGSRTMKYHCANRFPRKTKGVTVYNNNKKCDSGTYDLSDLENTVIGNLIGFQENNDSLLKIINGNNQPILDTSGFKKQISQIDKKIQKNSDLYLNDFITMDELKDRTDSLQAEKRLLKAKISENKFNDSTGVFELVKTQLGSIPINELSYDNKKKIVNNLVSKVDVTADNVDIIFKFQLA

SEQ ID NO: 8069 - protein, 452 aa, synthetic construct
MKAAIYIRVSTREQVENYSIQAQTEKLTALCRSKDWDVYDIFIDGGYSGSNMNRPALNEMLSKLHEIDAVVVYRLDRLSRSQRDTITLIEEYFLKSNVEFVSLSETLDTSSPFGRAMIGILSVFAQLERETIRDRMVMGKIKRIEAGLPLTTAKGRTFGYDVIDTKLYINEEEAKQLQLIYDIFEEEQSITSLQKRLKKLGFKVHTYNRYNNWLTNDLYCGYVSYKDKVHVKGIHEPIISEEQFYRVQEIFTRMGKNPNMNRDSASLLNNLAVCSKCGLGFVHRRKDTMSRGKKYHYRYYSCKTYKHTHELEKCGNKIWRADKLEELIIDRVNNYSLASRNVDKKDELDSLNEKLKIEHAKRKRLFDLYINGNYEVSELDSMMNDIDARINYYESQIEANEELKKNKKIQENLADLATVDFDSLEFREKQLYLKSLINKIYIDGEQVTIEWL

SEQ ID NO: 8070 - protein, 452 aa, synthetic construct
MKAAIYIRVSTQEQVGNYSIQAQTEKLTALCRSKDWDVYDIFIDGGYSGSNMNRPALNEMLSKLHEIDAVVVYRLDRLSRSQRDTTTLIEEYFLKNNVEFVSLSETLDTSSPFGRAMIGILSVFAQLERETIRDRMVMGKIKRIEAGLPLTTAKGRTFGYDVIDTKLYINEEEAKQLQLIYDIFEEEQSITSLQKRLKKLGFRVRTYNRYSNWLTNDLYCGYVSYKDKVHVKGIHEPIISEEQFYRVQEIFTRMGKNPNTNRDSASLLSNLVVCSKCGLGFVHRSKDTMSRGKKYHYRYYSCKTYKHTHELEKCGNKTWRADKLEELIINRVNNYSFASRNVDKEDELDSLNEKLKIEHAKKRRLFDLYINGSYEVSELDSMMNDIDAQINYYESQIEANEELRRNKKIQENLADLAAVDFDSLEFREKQLYLKSLISKIYIDGEQVTIEWL

SEQ ID NO: 8071 - protein, 485 aa, synthetic construct
MTKKVAIYARVSTTNQAEEGFSIDEQIDRLTKYAEAMGWQVSDTYTDAGISGAKLERPAMQRLINDIESRAFDTVLVYKLDRLSRSVRDTLYLVKDVFTKNKIDFISLNESIDTSSAMGSLFLTILSAINEFERENIKERMTMGKLGRAKSGKSMMWTKTAFGYYHNRKTGILEIVPLQATIVEQIFTDYLSGISLTKLRDKLNESGHIGKDIPWSYRTLRQTLDNPVYCGYIKFKDSLFKGMHKPIIPYETYLKVQKELEERQQQTYERNNNPRPFQAKYMLSGMARCGYCGAPLKIVLGHKRKDGSRTMKYHCANRFPRKTKGVTVYNDNKKCDSGTYDLSNLENTVIDNLIGLQENNDSLLKIINGNNQPILDTSSFKKRISQIDKKIQKNSDLYLNDFITMDELKDRTDSLQAEKKLLKAKISENKFNDSTDVFELVKTQLGSIPINELSYDNKKKIVNNLVSKVDVTADNVDIIFKFQLA

SEQ ID NO: 8072 - protein, 452 aa, synthetic construct
MKAAIYIRVSTQEQVENYSIQAQTEKLTALCRSKDWDVYDIFIDGGYSGSNMNRPALNEMLSKLHEIDAVVVYRLDRLSRSQRDTTTLIEEYFLKNNVEFVSLSETLDTSSPFGRAMIGILSVFAQLERETIRDRMVMGKIKRIEAGLPLTTAKGRTFGYDVVDTKLYINEEEAKQLRLIYDIFEEEQSITFLQKRLKKLGFKVRTYNRYSNWLTNDLYCGYVSYKDKVHVKGIHEPIISEEQFYRVQEIFTRMGKNPNMNRDSASLLSNLVVCGKCGLGFVHRSKDTMSRGKKYHYRYYSCKTYKHTHELEKCGNKTWRADKLEELIINRVNNYSFASRNVDEEDKLDSLNEKLRIEHAKKKRLFDLYINGSYEASELDGMMSDIDAQINYYESQIEANEELKKNKKIQENLADLATVDFDSLEFREKQLYLKSLISKIYIDGEQVTIEWL

SEQ ID NO: 8073 - protein, 485 aa, synthetic construct
MTKKVAIYTRVSTTNQAEEGFSIDEQIDRLTKYAEAMGWQVSDTYTDAGLSGAKLERPAMQRLINDIENKAFDTVLVYKLDRLSRSVRDTLYLVKDVFIKNKIDFISLSESIDTGSATGSLFLTILSAINEFERENIKERMTMGKLGRAKSGKSMMWTKTAFGYYHNRKTGILEIVPLQATIVEQIFTDYLSGISLTKLRDKLNESGHIGKDIPWSYRTLRQTLDNPVYCGYIKFKGSLFKGMHKPIIPYETYLKVQKELEERQQQTYERNNNPRPFQAKYMLSGMARCGYCGAPLRIVLGHKRKDGSRTVKYHCANRFPRKTKGVTVYNDNKKCDSGTYDLSNLENTVIDSLIGFQENNDSLLKIINGNNQPILDTSSFKKQISQIDKKIQKNSDLYLNDFITMDELKDRTDSLQAEKRLLQAKISEDKFNDSTDVFELVKTQLGSIPINELSYDDKKKIVNNLVSKVDVTADNVDIIFKFQPV

SEQ ID NO: 8074 - protein, 452 aa, synthetic construct
MKAAIYIRVSTREQVENYSIQAQTEKLTALCRSKDWDVYDIFVDGGYSGSNMNRPALNEMLSKLHEIDAVVVYRLDRLSRSQRDTITLIEEYFLKNNVEFVSLSETLDTSSPFGRAMIGILSVFAQLERETIRDRMVMGKIKRIEAGLPLTTAKGRTFGYDVIDTKLYINEEEAKQLQLIYDIFEEEQSITFLQKRLKKLGFKVRTYNRYNNWLTNDLYCGYVSYKDKVHVKGIHEPIISEEQFYRVQEIFTRMGKNPNMNRDSASLLNGLVVCSKCGLGFVHRRKDTVSRGKKYHYRYYSCKTYKHTHELEKCGNKIWRADKLEELIISRVNNYSFASRDVDKGDELDSLNEKLKVEHAKKKRLFDLYINGSYEVSELDSMMNDIDAQINYYESQIEAYVERKKNKKIQENLADLATVDFDSLEFREKQLYLKSLINKIYIDGEQVTIEWL

SEQ ID NO: 8075 - protein, 452 aa, synthetic construct
MKAAIYIRVSTQEQVGNYSIQAQTEKLTALCRSKDWDVYDIFIDGGYSGSNMNRPALSEMLSKLHEIDAVVVYRLDRLSRSQRDTTTLIEEYFLKNNVEFVSLSETLDTSSPFGRAMIGILSVFAQLERETIRDRMVMGKIKRIEAGLPLTTAKGRTFGYDVIDTKLYINEEEAKQLRLIYDIFEEEQSITSLQKRLKKLGFKVCTYNRYNNWLTNDLYCGYVSYKDKVHVKGIHEPIISEEQFYRVQEIFTRMGKNPNMNRDSASLLNNLVVCSKCGLGFVHRSKDTMSRGKKYHYRYYSCKTYKHTHELEKCGNKTWRADKLEELIINRVNNYGFASRNVDKEDELDSLNEKLKIEHARKRRLFDLYINGSYEVSELNSMMNDIDAQINHYESQIEANEELKENKKIQENLADLATVDFDSLEFREKQQYLKSLINKIYIDGEQVTIEWL

SEQ ID NO: 8076 - protein, 452 aa, synthetic construct
MKAAIYIRVSTQEQVENYSIQAQTDKLTALCRSKDWDVYDIFIDGGYSGSNMNRPALNEMLSKLHEIDAVVVYRLDRLSRSQRDTTTLIEEYFLKNNVEFVSLSETLDTSSPFGRAMIGILSVFAQLERETIRDRMVMGKIKRIEAGLPLTTAKGRTFGYDVIDTKLYINEEEAKQLRLIYDIFEEVQSITSLQKRLKKLGFKVRTYNRYSNWLTNDLYCGYVSYKDKVHVKGIHEPIISEEQFYRVQEIFTRMGRNPNMNRDSASLLNNLVVCSKCGLGFVHRSKDTMSRGKKYHYRYYSCKTYKHTHELEKCGNKTWRADKLEELIINRVNNYGFASRNVDKEDELDSLNEKLKIEHAKKKRLFDLYINGSCEMSELDSMMNDIDAQINYYESQIEANEELKKNKKIQENLANLATVDFDSLEFREKQLYLKSLINKIYIDGEQVTIEWL

SEQ ID NO: 8077 - protein, 485 aa, synthetic construct
MTKKVAIYTRVSTTNQAEEGFSIDEQIDRLTKYAEAMGWQVSDTYTDAGFSGAKLERPAMQRLINDIENKAFDTVLVYKLDRLSRSVRDTLYLVKDVFTKNKIDFISLNESIDTSSAMGSLFLTILSAINEFERENIKERMTMGKLGRAKSGKSMMWTKTAFGYYHNRKTGILEIVPLQATIVEQIFTDYLSGISLTKLRDKLNESGHIGKDIPWSYRTLRQTLDNPVYCGYIKFKDSLFEGMHKPIIPYETYLKVQKELEERQQQTYERNNNPRPFQAKYMLSGMARCGYCGAPLKIVLGRKRKDGSRTMKYHCANRFPRKTKGVTVYNDNKKCDSGTYDLSSLESTVIDNLIGFQENNDSLLKIISGNNQPILDTSNFKEQISQIDKKIQKISDLYLNDFITMDELKDRTDSLQAEKKLLKAKISGNKLNDSTNVFELVKTQLGSIPINELSYDNKKKIVNNLVSKVDVTADNVDIIFKFQLA

SEQ ID NO: 8078 - protein, 485 aa, synthetic construct
MTKKVAIYTRVSTTNQAEEGFSIDEQIDRLTKYAEAMGWQVSDAYTDAGLSGAKLERPAMQRLINDIENKAFDTVLVYKLDRLSRSVRDTLYLVKDVFTKNKIDFISLNESIDTSSAMGSLFLTILSAINEFERENIKERMTMGKLGRAKSGKSMMWTKTAFGYYHNRKTGILEIVPLQATIVEQIFTDYLSGISLTKLRDKLNESGHIGKDIPWSYRTLRQTLDNPVYCGYIKFKDSLFEGMHKPIIPHETYLEVQKELEERQQQTYERNNNPRPFQAKYMLSGMARCGYCGAPLKIVLGHKRKDGSRTMKYHCANRFPRKTKGITVYNDNRRCDSGTYDLSNLENTVIDDLIGFQENIDSLLKIINGNNQPILDTSSFKRQISQIDKKIQKNTDLYLNDFITMDELKDRTDSLQAEKKLLKAKISENKLSDSTDVLELVRTRLGSIPINELSYDNKKRIVNDLVSKVDVTADNVDIIFKFQLA

SEQ ID NO: 8079 - protein, 485 aa, synthetic construct; identical to SEQ ID NO: 6191

SEQ ID NO: 8080 - protein, 485 aa, synthetic construct
MTKKVAIYTRVSTTNQAEEGFSIDEQIDRLTKYAEAMGWQVSYTYTDAGFSGAKLERPAMQRLINDIENKAFDTVLVYKLDRLSRSVRDTLYLVKDVFTKNKIDFISLNESIDTSSAMGSLFLTILSAINEFERENIKERMTMGKLGRAKSGKSMMWTKTAFGYYHNRKTGILEIVPLQATIVEQIFTDYLSGISLTKLRDKLNESGHIGKDIPWSYRTLRQTLDNPVYCGYIKFKGSLFEGMHKPIIPYETYLKVQKELEERQQQTYERNNNPRPFQAKYMLSGMARCGYCGAPLKIVLGHKRKDGSRTMKYHCANRYPRKTKGVTVYNDNKKCDSGTYDLSNLENTVIDCLIGFQENNDSLLKIINSNNQPILDTSSFKEQISQIDKKIQKNGDLYLNDFITMDELKVRTDSLQAEKKLLKAKISENKFNDSTDVFELVKAQLGSIPINELSYDYKKKIVNNLVSKVDVTADNVDIIFKFQLA

SEQ ID NO: 8081 - protein, 452 aa, synthetic construct
MKAAIYIRVSTQEQVGNYSIHAQTEKLTALCRSKDWDVYDIFIDGGYSGSNMNRPALNEMLSKLHEIDAVVVYRLDRLSRSQRDTTTLIEEYFLKNNVEFVSLSETLDTSSPFGRAMIGILSVFAQLERETIRDRMVMGKIKRIEAGLPLTTAKGRTFGYDVIDTKLYINEEEAKQLQLIYDIFEEEQSITFLQKRLKKLGFKVRTYNRYNSWLTNDLYCGYVSYKDKVHVKGIHEPIISEEQFNRVQEIFARMGKNPNMNRDSASLLNNLVVCSKCGLSFVHRSKDTMSRGKKYHYRYYSCKTYKHTHELEKCGNKTWRADKLEELIINRVSNYSFASRNVDKEDELDSLNEKLKIEHAKKKRLFDLYINGSYEVSELDSMMNDIDAQIDYYESQIEANKELKKNKKIQEDLAGLATVDFDNLEFREKQLYLKSLINKIYIDGEQVTIEWL

SEQ ID NO: 8082 - protein, 452 aa, synthetic construct
MKAAIYIRVSTQEQVGNYSIQAQTEKLTALCRSKDWDVYDIFIDGGYSGSNMNRPALNEMLSKLHEIDAVVVYRLDRLSRSQRDTTTLIEEYFLKNNVEFVSLSETLDTSSPFGRAMIGILSVFAQLERETIRDRMVMGKIKRIEAGLPLTTAKGRTFGYDVIDTKLYINEEEARQLQLIYDIFEEEQSITSLQKRLKKLGFKVRTYNRYNNWLTNDLYCGYVSYKDKVHVKGIHEPIISEEQFYRVQEIFTRTGKNPNMNRDSASLLSNLVVCSKCGLGFVHRSKDTMSGGKKYHYRYYSCKTYKHTHELERCGNKTWRADKLEELIINRVNNYSFASRNMVKEDELDSLNEKLKIEHAKKKRLFDLYINGSYEVSELDSMMNDIDAQINYYESQIGANEELKKTKKIQENLADLATVDFDGLEFREKQLYLKSLINKIYIDGEQVTIEWL

SEQ ID NO: 8083 - protein, 452 aa, synthetic construct
MKAAIYIRVSTREQVENYSIQAQTERLTALCRSKDWDVYDIFIDGGYSGSNMNRPALNEMLSKLHEIDAVVVYRLDRLSRSQRDTITLIEEYFLKNNVEFVSLTETLDTSSPFGRAMIGILSVFAQLERETIRDRMVMGKIKRVEAGLPLTTAKGRTFGYDVIDTKLYINEDEAKQLRLIYDIFEEEQSITSLQKRLKKLGLKVRTYSRYNSWLTNDLYCGYVSYKDKVHVKGIHEPIISEEQFYRVQEIFTRMGKSPNMNRDSASLLNNLVVCSKCGLGFVHRRKDTTSRGKKYHYRYYSCKTYKHTHELEKCGNKIWRADKLEELIINRVNNYSFASRNVDKAEELDSLNEKLKVEHAKKKRLFDLYINGSYNVSELDSMMNDIDAQINYYESQIEANEGLKKNKKIQENLAGLATVDFDSLEFREKQLYLKSLINKIYIDGEQVTIEWL

SEQ ID NO: 8084 - protein, 485 aa, synthetic construct
MTKKVAIYTRVSTTNQAEEGFSIDEQIDRLTKYAEVMGWQVSDTYTDAGHSGAKLGRPAMQRLINDIENKAFDTVLVYKLDRLSRSVRDTLYLVREVFTKNKIDFISLNESIDTSSAMGSLFLTILSAINEFERENIKERMTMGKLGRAKSGKSMMWTKTAFGYYHNRKTGILEIMPLQATIVEQIFTDYLSGISLTKLRDKLNESGHIGKDIPWSYRTLRQTLDNPVYCGYIKFKDSLFEGMHKPIIPYETYLKVQKELERRQQQTYERNNNPRPFQAKYMLSGMARCGYCGAPLKIVLGHKRKDGSRTMKYHCANRFPRKTKGVTVYNDNKKCDSGTYDLSSLENTVIDNLIGFQENNDSLLKIINGNNQPILDTSSLKKQISQIDKKIQKNSDLYLNDFITMDELKDRTDSLQAEKKLLKAKISENKFNDSTDVFELVKTQLGSIPINELSYDNKKKIVNNLVSKVDVTADNVDIIFKFQLA

SEQ ID NO: 8085 - protein, 469 aa, synthetic construct
MSYTTPVRAAVYLRISEDRSGEQLGVARQREDCLKLCDQRKWVPVEYLDNDVSASTGKRRPAYEQMLADITAGKIAAVVAWDLDRLHRRPIELEAFMSLADEKRLALATVAGDVDLATPQGRLVARLKGSVAAHETEHKKARQRRAARQKAERGHPNWSKAFGYLPGPNGPEPDPRTAQLVKQAYADILAGASLGDVCRQWNDAGAFTITGRPWTTTTLSKFLRKPRNAGLRAYKGARYGPVDRDAIVGKAQWSPLVDEGTFWAAQAVLDAPGRAPGRKSVRRHLLTGLAGCGKCGNHLAGSCRTDGRVVYVCKACHGVSILADNIEPILYHIVAERLAMPDAVDLLRREVHDAAEAETIRLELETLYGELDRLAVERAEGLLTARQVKISTDIVNAKITKLQARQLDQERLRVLDGIPLGTPQVAGMIAELSPDRFRAVLDVLAEVVVQPVGKSGRISNPERVQVNWR

SEQ ID NO: 8086 - protein, 485 aa, synthetic construct
MTKKVAIYTRVSTTNQAEEGFSIDEQIDRLTRYAEAMGWQVSDTYTDAGLSGAKLERPAMQRLINDIENKAFDTVLVYKLDRLSRSVRDTLYLVKDVFTKNKIDFISLSESIDTSSAMGSLFLTILSAINEFERENIKERMTMGKLGRAKSGKSMMWTKTAFGYYHNRKTGILEIVPLQATVVEQIFTDYLSGISLTKLRDKLNESGHIGKDIPWSYRTLRQTLDNPVYCGYIKFKDSLFEGMHKPIIPYETYLKVQKELEERQQQTYERNNNPRPFQAKYMLSGMARCGYCGAPLRIVLGHKRKDGSRTMKYHCANRLPRRTKGVTVYNDNKKCDSGAYDLSDLENTVIDNLIGLQENNDSLLKIINGNNQPILDTSSLKKQISQIDKKIQKNSDLYLNDFITMDELKDRTDRLQAEKKLLKAKISENKFNDSTDVFELVKTQLGSIPINELSYDNKKKIVNNLVSKVDVTADNVDIIFKFQQA

SEQ ID NO: 8087 - protein, 452 aa, synthetic construct
MKAAIYIRVSTREQVENYSIQAQTEKLTALCRSKDWDVYDIFIDGGYSGSNMNRPALNEMLSKLHEIDAVVVYRLDRLSRSQRDTITLIEEYFLKNNVEFVSLSETLDTSSPFGRAMIGILSVFAQLERETIRDRMVMGKIKRIEAGLPLTTAKGRTFGYDVIDTKLYINEEEAKQLQLIYDIFEEEQSITFLQKRLKKLGFKVRTYSRYNSWLTNDLYCGYVSYKDKVHVKGIHEPIISEEQFYRVQEIFTRMGKSPNTNRDSASLLNNLVVCSKCGLGFVHRRKDTMSRGKKYHYRYYSCKTYKHTHELEKCGNKIWRADKLEELIINRVNNYSFASRSVDKEDELDSLNEKLKIEHTKKRRLFDLYINGSYEVSELDSMMNDIDAQISYYESQTEANEELKKNKKIQENLANLATVDYDSLEFREKQLYLRSLINKIYIDGEQVTIEWL

SEQ ID NO: 8088 - protein, 452 aa, synthetic construct
MKAAIYIRVSTREQVENYSIQAQTEKLTALCRSKDWDVYDIFIDGGYSGSNMNRPALNEMLSKLHEIDAVVVYRLDRLSRSQRDTITLIEEYFLKNNVEFVSLSETLDTSSPFGRAMIGILSVFAQLERETIRDRMVMGKIKRIEAGLPLTTAKGRTFGYDVIDTKLYVNEEEARQLQLIYDIFEEEQSITFLQKRLKKLGFKVHTYNRYNNWLTNDLYCGYVSYKDKVHVKGIHEPIISEEQFYRVQEIFTRMGKNPNMNRDSASLLNNLVVCSKCGLGFVHRRKDAMSRDKKYRYRYYSCKTYKHIHELEKCGNKIWRADKLEELIINRVNSYSLASRNVDKEDELDSLNEKLKIEHAKKKRLFDLYINGNYEVSELDSMMNDIDAQINYYESQIEANEELKKNKKIQENLAYLATVDFDSLEFREKQLYLKSLINKIYIDGEQVTIEWL

SEQ ID NO: 8089 - protein, 452 aa, synthetic construct
MKAAIYIRVSTREQVENYSIKAQTEKLTALCRSKDWDVYDIFIDGGYSGSNMNRPALNEMLSKLHEIDAVVVYRLDRLSRSQRDTITLIEEYFLKNNVEFVSLSETLDTSSPFGRAMIGILGVFAQLERETIRDRMVMGKIKRIEAGLPLTTAKGRTFGYDVIDTKLYINEEEARQLQLIYDIFEEEQSITFLQKRLKKLGFKVRTYNRYSSWLTNDLYCGYVSYKDKVHVKGIHEPIISEEQFYRVQEIFTRMGKNPNMNRDSASLLNNLVVCSKCGLSFVHRRKDTMSRGKKYRYRYYSCKTYKHTHELEKCGNKIWRADKLEELIINRVNNYSFASRNVVKAEELDSLNEKLKVEHAKRKRLFDLYINGSYNVSELDSMMNDIDAQINYYESQIEANEELKKNKRIQENLADLATVDFDSLEFREKQLYLKSLINKIYIDGEQVTIEWL

SEQ ID NO: 8090 - protein, 485 aa, synthetic construct
MTKKVAIYTRVSTTNQAEEGFSIDEQIDRLTKYAEAMGWQVSDTYTDAGLSGAKLERPAMQRLINDIENKAFDTVLVYKLDRLSRSVRDTLYLVKDVFTKNKIDFISLNESIDTSSAMGSLFLTILSAINEFERENIKERMTMGKLGRAKSGKSMMWTKTAFGYYHNRKTGILEIVPLQATIVEQIFTDYLSGISLTKLRDKLNESGHIGKDIPWSYRTLRQTLDNPVYCGYIKFKDSLFEGMHKPIIPHETYLRVQKELEERQQQTYERNNNPRPFQAKYMLSGMARCGYCGAPLRIVLGHKRKDGSRTMKYHCANRFPRKTRGITVYNDNKKCDSGTYDLSNLENTVIDSLIGFQENNDSLLKIINGNNQPILDTSGLKKQISQIDRKIQKNSDLYLNDFITMDELKDRTDSLQAEKKLLKAKISENKFNDSTDVFELVKTQLGSIPINELSYDNKKKIVNNLVSKVDVTADNVDIIFKFQLA

SEQ ID NO: 8091 - protein, 452 aa, synthetic construct
MKAAIYIRVSTREQVENYSIQAQTEKLTALCRSKDWDVYDIFIDGGYSGSNMNRPALNEMLSKLHEIDAVVVYRLDRLSRSQRDTITLIEEYFLKNNVEFVSLSETLDTSSPFGRAMIGILSVFAQLERETIRDRMVMGKIKRIEAGLPLTTAKGRTFGYDVIDTKLYINEEEAKQLQLIYDIFEEEQSITSLQKRLKKLGFKVHTYNRYNNWLTNDLYCGYVSYKDKVHVKGIHEPIISEEQFYRVQEIFTRMGKNPNMNRDSASLLNNLVVCSKCGLGFVHRRKDAMSRDKKYHYRYYSCKTYKHIHELEKCGNKIWRADKLEELIINRVNNYSFASRNADKEDELDSLNEKLKIEHAKKKRLFDLYINGSYEVGELDGMMSDIDAQINYYESQIEANEELRKNKKIQENLADLATVDFDSLEFREKQLYLKSLINKIYIDGEQVTIEWL

SEQ ID NO: 8092 - protein, 452 aa, synthetic construct
MKAAIYIRVSTREQVENYSIQAQTEKLTALCRSKDWDVYDIFIDGGYSGSNMNRPALNEMLSKLHEIDAVVVYRLDRLSRSQRDTITLIEEYFLKNNVEFVSLSETLDTSSPFGRAMIGILSVFAQLERETIRDRMVMGKIKRVEAGLPLTTAKGRTFGYDVIGTKLYINEEEAKQLQLIYDIFEEEQSITFLQRRLKKLGFKVRSYNRYNNWLTNDLYCGYVSYKDKVHVKGIHEPIISEEQFYRVQEIFTRTGKNPNMNRGSASLLNNLVVCSKCGLGYVHRRKDTVSRGKKYHYRYYSCKTYKHIHELEKCGNKIWRADKLEELVINRVNNYSFASRNVDKEDELDSLNEKLKIEHAKKKRLFDLYINGSYEVSELDSMMNDIDAQINYYESQIGANEELKKNKKIQENLADLATVDFDSLEFREKQLYLKSLINKIYIDGEQVIIEWL

SEQ ID NO: 8093 - protein, 469 aa, synthetic construct
MSNTTPVRAAVYLRISEDRSGEQLGVARQREDCLKLCGQRKWVPVEYLDNDVSASTGKRRPAYEQMLADITAGKIAAVVAWDLDRLHRRPVELEAFMSLADERRLALATVAGDVDLATPQGRLVARLKGCVAAHETEHKKARQRRAARQKAERGYPNWSKAFGYLPGPNGPEPDPRTAPLVKQAYADILAGASLGDVCRQWNDAGAVTITGRPWTTTTLSKFLRKPRNAGLRAYKGARYGPVDRDAIVGKAQWSPLVDEATFWAAQAVLDAPGRAPGRKSVRRHLLTGLAGCGKCGNHLAGSYRTDGRIVYVCKACHGVAILADNIEPILYHIVAERLAMPGAADLLRREIHDAAEAETIRLELETLYGELDRLAVERAEGLLTARQVKISTDIVNAKITKLQARQLDQERLHVFDGIPLGTPQVAGMIAELSPDRFRAMLDVLAEVVVQPVGKSGRVFNPERVQVNWR

SEQ ID NO: 8094 - protein, 452 aa, synthetic construct
MKAAIYIRVSTREQVENYSIQAQTEKLTALCRSKDWDVYDIFIDGGYSGSNMNRPALNEMLSKLHEIDAVVVYRLDRLSRSQRDTIALIEEYFLKNNVEFVSLSETLDTSSPFGRAMIGILSVFAQLERETIRDRMVMGKIKRIEAGLPLTTAKGRTFGYDVIDTKLYINEEEAKQLQLIYDIFEEEQSITFLQKRLKKLGFKVRTYNRYNGWLTNDLYCGYVSYKDKVRVKGIHEPIISEEQFCRVQEIFARMGKNPNMNRDSASLLNSLVVCCKCGLGFVHRRKDTMSRGKKYHYRYYSCKTYKHTHELEKCGNKIWRADELEELIINRVNNYSLASRNVDKEGELDGLNEKLKTEHAKKKRLFELYINGSYEVGELDSMMNDIDAQINYYESQIEANEELKKNKKTQENLANLATVDYDSLEFREKQLYLKSLINKIYIDGEQVTIEWL

SEQ ID NO: 8095 - protein, 452 aa, synthetic construct
MKAAIYIRVSTREQVENYSIQAQTEKLTALCRSKDWDVYDVFIDGGYSGSNMNRPALNEMLSRLHEIDAVVVYRLDRLSRSQRDTITLIEEYFLKNNVEFVSLSETLDTSSPFGRAMIGILSVFAQLERETIRDRMVMGKIKRIEAGLPLTTAKGRTFGYDVIDTKLYINEEEAKQLQLIYDIFEEEQSITFLQRRLKKLGFKVRTYNRYNNWLTNDLYCGYVSYKDKVHVKGIHEPIISEEQFYRVQEIFTRMGKNPNMNRNSASLLNNLVVCSKCGLGFVHRRKDAMSRDKKYHYRYYSCKTYKHIHELEKCGNKIWRADKLEELIINRVNNYSFASRNADKEDELDSLNEQLKIEHAKKKRLFDLYINGSYEVSELDSMMNDIDAQINYYESQIEANEELRKNKKIQENLANLATVDFDSLEFREKQLYLKSLISKIYIDGEQVTIEWL

SEQ ID NO: 8096 - protein, 452 aa, synthetic construct
MKAAIYIRVSTREQVENYSIQAQTEKLTALCRSKDWDVYDIFIDGGYSGSNMNRPALNEMLSKLHEIDAVVVYRLDRLSRSQRDTITLIEEYFLKNNVEFVSLSETLDTSSPFGRAMIGILSVFAQLERETIRDRMVMGKIKRVEAGLPLTTAKGRTFGYDVIDTKLYINEEEAKQLQLIYDIFEEEQSITFLQKRLKKLGFKVRTYSRYNNWLTNDLYCGYVSYKDKVHVKGIHEPIISEEQFYRVQEIFTRMGKNPNMNRDSASLLNNLVVCSKCGLGFVHRRKDTMSRGKKYHYRYYSCKTYKHTHELEKCGNKIWRADILEELIINRVNNYSFASRNVDKEDELDSLNEKLKIEHAKKKRLFDLYINGSHEVSELDCMMNDIDAQINYYESQIEANEELKKDKKIQESLANLATVDYDSLEFREKQLYLKSLINKIYIDGEQVTIEWL

SEQ ID NO: 8097 - protein, 452 aa, synthetic construct
MKAAIYIRVSTREQVENYSIQAQTEKLTALCRSKDWDVYDIFIDGGYSGSNMNRPALNEMLSKLHEIDAVVVYRLDRLSRSQRDTITLIEEYFLKNNVEFVSLSETLDTSSPFGRAMIGILSVFAQLERETIRDRMVMGKIKRIEAGLPLTTAKGRTFGYDVIDTKLYINEEEAKQLQLIYDIFEEEQSITFLQKRLKKLGFKVRTYSRYNNWLTNDLYCGYVSYKDKVHVKGIHEPIISEEQFNRVQEIFTRMGKNPNMNRDSASLLNNLVVCSKCGLGFVHRRKDTMSRGKKYHYRYYSCKTYKHTHELEKCGNKIWRADKLEELIINRVNNYSSASRNVDKAVELDSLNEKLKAEHAKKKRLFDLYINGSYNVSELDSMMNDIDAQINYYESQIEANEELKKNKKIQENLADLATVDFDSLEFREKQQYLKSLINKIYIDGEQVTIEWL

SEQ ID NO: 8098 - protein, 452 aa, synthetic construct
MKAAIYIRVSTREQVENYSIQAQTEKLTALCRSKDWDVYDIFIDGGYSGSNMNRPALNEMLSKLHEIDAVVVYRLDRLSRSQRDTITLIEEYFLKNNVEFVSLSETLDTSSPFGRAMIGILSVFAQLERETIRDRMVMGKIKRIEAGLPLTTAKGRTFGYDVLDTKLYINEEEAKQLRLIYDIFEEERSITLLQKRLKKLGFKVRSYNRYNNWLTNDLYCGYVSYKDRVHVKGIHEPIISEEQFYRVQEIFTRMGKKPNMNRDSASLLNNLVVCSKCGLGFVHRRKDIVSRGKKYHYRYYSCKTYKHIHELEKCGNKIWRADKLEELIIYRVNNYSLASHNVDKEDELDGLNEKLKIEHAKRKRLFELYINGSYEVSELDSMMNDIDAQINYYESQIEANEELKKNKQIQENLAELATADFDSLEFREKQLYLKSLINKIYIDGEQVTIEWL

SEQ ID NO: 8099 - protein, 452 aa, synthetic construct
MKAAIYIRVSTQEQVENYSIQAQTEKLTALCRSKDWEVYDIFIDGGYSGSNMNRPALNEMLSKLHEIDAVVVYRLDRLSRSQRDTITLIEEYFLKNNVEFVSLSETLDTSSPFGRAMIGILSVFAQLERETIRDRMVMGKIKRIEAGLPLTTAKGRTFGYDVIDTKLYINEEEAKQLQLIYDIFEEEQSITFLQKRLKKLGFKVHTYNRYNSWLTNDLYCGYVSYKDKVHVKGIHDPIISEEQFYRVQEIFTRMGKSPNMNRDSASLLNNLVVCSKCGLGFVHRRKDTRSRGKKYHYRYYSCKTYKHTYELEKCGNKIWRADKLEELVINRVNNYSFASRNVDKEDGLNSLNEKLKIEHAKKKRLFDLYINGSYEVSELDSMMNDIDAQINYYESQIEASEELKKSKKTQENLADLATVDFDSLEFREKQLYLKSLINKIYIDGEQVIIEWL

SEQ ID NO: 8100 - protein, 485 aa, synthetic construct
MTKKVAIYTRVSTTNQAEEGFSIDEQIDRLTKYAEAMGWQVSDTYTDAGSSGAKLERPAMQRLINDIENKVFDTVLVYKLDRLSRSVRDTLYLVKDVFTRNKIDFISLNESIDTSSAMGSLFLTILSAINEFERENIKERMTMGKLGRAKSGKSMMWTKTAFGYHHNRKTGILEIVPLQATIVEQIFTDYLSGISLTKLRDKLNESGHIGKDIPWSYRTLRQTLDNPVYCGYIKFKDSLFEGMHKPIIPYETYLKVQKELEERQQQTYERNNNPRPFQAKYMLSGMARCGYCGAPLKIVLGHKRKDGSRTMKYHCANRFPRKTKGVTVYNGNKKCDSGTYDLSNLENTVIDSLIGLQENNDGLLKIINGNNQPILDTSSFREQISQIDKKIQKNSDLYLNDFITMDELKDRTDSLRAEKELLRAKISENKFNDSTDVFELVKTQLGSIPINELSYDNKKKIVNNLVSKVDVTADNVDIIFKFQLA

SEQ ID NO: 8101 - protein, 452 aa, synthetic construct
MKAAIYIRVSTREQVENYSIQAQTEKLTALCRSKDWDVYDIFIDGGYSGSNMNRPALNEMLSKLHEIDAVVVYRLDRLSRSQRDTITMIEEYFLKNNVEFVSLSETLDTSSPFGRAMIGILSVFAQLERETIRDRMVMGKIKRIEAGLPLTTAKGRTFGYDVIDTKLYINEEEAKQLQLIYDIFEEEQSITSLQKRLKKLGFKVRTYNRYNSWLTNDLYCGYVSYKDEVHVKGIHEPVISEEQFYRVQEIFTRMGKNPNMNRDSASLLNNLVVCSKCGLGFVHRRKDTTSRGKRYHYRYYSCKTYKHTHELEKCGNKIWRADKLEELIINRVNNYSFAGRDVDKEDELDSLSEKLKIERAKKRRLFDLYINGSYEVSELDSLMNDIDAQINHYESQIEASEELKKNKKIQENLAYLATVDFDSLEFREKQLYLKSLINKIYIDGEQVTIEWL

SEQ ID NO: 8102 - protein, 485 aa, synthetic construct
MTKKVAIYTRVSTTNQAEEGFSIDEQIDRLTKYAKAMSWQVSDTYTDAGFSGAKLERPAMRRLINDIENKAFDTVLVYKLDRLSRSVRDTLYLVKDVFTKNKIDFISLNESIDTSSAMGSLFLTILSAINEFERENIKERMTMGKLGRAKSGKSMMWTRTAFGYYHNRKTGILEIVPLQATIVEQIFTDYLSGISLTKLRDRLNESGHIGKDIPWSYRTLRQTLDNPVYCGYIKFKGSLFEGMHEPIIPYETYLEVQRELEERQQQTYERNNNPRPFQAKYMLSGMARCGYCGAPLKIVLGHKRKDGSRTMKYHCANRFPRRTKGVTVYNDNKKCDSGTYDLSDLENTVIDNLIGFQENNDSLLKIINGNNQPILDTSSFKKQISQIDKKIQKNSDLYLNDFITMDELKDRTDSLQAEKKLLKAKISENKFNDSTDVFELVKTQLGSIPINELSYDSKKKIVNNLVSKVDVTADNVDIIFKFQLA

SEQ ID NO: 8103 - protein, 452 aa, synthetic construct
MKAAIYVRVSTREQVENYSIQAQTEKLTALCRSKGWDVYDIFIDGGYSGSNMNRPALNEMLSKLHEIDAVVVYRLDRLSRSQRDTITLIEEYFLKNNVEFVSLSETLDTSSPFGRAMIGILSVFAQLERETIRDRMVMGKIKRVEAGLPLTTAKGRTFGYDVIGTKLYINEEEAKQLQLIYDIFEEEQSITFLQKRLKKLGFKVHTYNRYNNWLTNDLYCGYVSYKDKVHVKGIHEPIISEEQFYRVQEIFTRTGKNPNVNRDSASLLNNLVVCSKCGLGFVHRRKDTVSRGKRYHYRYYSCKTYKHTHELEKCGNKIWRADKLEELIINRVNNYSFASRNADKEDELDILNEKLRIEHAKKKRLFDLYINGSYEVSELDSMMNGIDAQINYYESQIEANEELKKNKKIQENLANLATVDFDSLEFREKQLYLKSLINKIYIDGEQVTIEWL

SEQ ID NO: 8104 - protein, 452 aa, synthetic construct
MKAAIYIRVSTQEQVGNYSIQAQTEKLTALCRSKDWVVYDIFVDGGYSGSNMNRPALNEMLSKLHEIDAVVVYRLDRLSRSQRDTTTLIEEYFLKNNVEFVSLSETLDTSSPFGRAMIGILSVFAQLERETIRDRMVMGKIKRIEAGLPLTTAKGRTFGYDVIDTKLYINEEEARQLQLIYDIFEEEQSITFLQKRLKELGYKVRSYNRYNSWLTNDLYCGYVSYKDEVHVKGIHEPIISEEQFYRVQEIFTRMGKNPNMNRDSASLLSNLVVCSKCGLGFVHRSKDTMSRGKKYHYRYYSCKTYKHTHELEKCGNKTWRADKLEELIINRVNNYSFASRDVDKGDELGSLNEKLKIEHAKRKRLFDLYINGSYEVSELDSMMNDIDAQINYYESQIKANEELKRNKKIQENLADLATVDFDSLEFREKQLYLKSLINKIYIDGEQVTIEWL

SEQ ID NO: 8105 - protein, 452 aa, synthetic construct
MKAAIYIRVSTREQVENYSIQAQTEKLTALCRSKDWDVYDIFIDGGYSGSNMNRPALNEMLSKLHEVDAVVVYRLDRLSRSQRDTITLIEEYFLKNNVEFVSLSETLDTSSPFGRAMIGILSVFAQLERETIRDRMVMGKIKRIEAGLPLTTAKGRTFGYDVIDTKLYINEEEAKQLQLIYDIFEEEQSITFLQKRLKKLGFKVRTYNRYNNWLTNDLYCGYVSYKDKVHVKGIHEPIISEEQFYRVQEIFTRMGKNPNMNRDSASLLNNLVVCSKCGLGFVHRRKDTMSRGKKYHYRYYSCKTYKHIHELEKCGNKIWRADKLEELIINRVNNYSFACRDVDKEDRLDSLNEKLKIEHAKKKRLFDLYINGNYEVSELDSMMNDIDAQINYYESQIEANEELRRNKKIQESLADLASVDYDSLEFREKQLYLKSLINKIYIDGEQVTIEWL

SEQ ID NO: 8106 - protein, 452 aa, synthetic construct
MKAAIYIRVSTREQVENYSIQAQTEKLTALCRSKGWDVYDIFIDGGYSGSNMNRPALNEMLSKLHEIDAVVVYRLDRLSRSQRDTITLIEEYFLKNNVEFVSLSETLDTSSPFGRAMIGILSVFAQLERETIRDRMVMGKIKRIEAGLPLTTAKGRTFGYDVIDTKLYINEEEAKQLQLIYDIFEEEQSITFLQKRLKKLGFKVRTYNRYNNWLTNDLYCGYVSYKDKVHVKGIHEPIISEEQFYRVQEIFTRMGKNPNMNRDSASLLNNLVVCSKCGLGFVHRRKDAMSRDKKYHYRYYSCKTYKHIHELEKCGNKIWRADKLEELIINRVNDYSFASRNADKEDELDSLNEKLKIEHAKKKRLFDLYIDGRYEVSELDNMMNDIDARINYYESQIEANEELRKNKKIQENLADLATVDFDSLGFREKQLYLKSLINKIYIDGEQVTIEWL

SEQ ID NO: 8107 - protein, 452 aa, synthetic construct
MKAAIYIRVSTREQVENYSIQAQTEKLTALCRSKGWDVYDIFIDGGYSGSNMNRPALNEMLSKLHEIDAVVVYRLDRLSRSQRDTITLIEEYFLKNNVEFVSLSETLDTSSPFGRAMIGILSVFAQLERETIRDRMVMGKIKRIEAGLPLTTAKGRTFGYDVIDTKLYINEEEAKQLQLIYDIFEEEQSITFLQKRLKKLGFKVRTYNRYNNWLTNDLYCGYVSYKDKVHVKGIHEPIISEEQFYRVQEIFTRMGKNPNVNRDSASLLNNLVVCSKCGLGFVHRRKDAMSRDKKYHYRYYSCKTYKHIHELEKCGNKIWRADKLEELIINRVNNYSLASRNVDKEDELDSLNEKLKIEHAKKRRLFDLYINGSYEVSELDSMMNDIDAQINYYESQIEANEELKKNKKIQENLAYLATVDFDSLEFREKQLYLKSLINKIYIDGEQVTIEWL

SEQ ID NO: 8108 - protein, 452 aa, synthetic construct
MKAAIYIRVSTREQVENYSIQAQTEKLTALCRSKGWDVYDIFIDGGYSGSNMNRPALNEMLSKLHEVDAVVVYRLDRLSRSQRDTITLIEEYFLKNNVEFVSLSETLDTSSPFGRAMIGILSVFAQLERETIRDRMVMGKIKRVEAGLPLTTAKGRTFGYDVIDTKLYINEEEAKQLRLIYDIFEEEQSITFLQKRLKKLGFKVRTYSCYNNWLTNDLYCGYVSYKDKVHVKGIHEPIISEEQFYRVQGIFTRMGKNPNMNRDSASLLNNLVVCSKCGLGFVHRRKDTMSRGKKYHYRYYSCKTYKHTHELEKCGNKIWRADKLEELIISRVNNYSFASRNVDKEDELDSLSEKLKIEHAKKKRLFDLYVNGSYEVSELDSMMNGIDAQIDYYESQIEANEELKKNKKIQENLTDLVTVDFDSLEFREKQLYLKSLINKIYIDDEQVTIEWL

SEQ ID NO: 8109 - protein, 485 aa, synthetic construct
MTKKVAIYTRVSTTNQAEEGFSIDEQIDRLTKYAEAMGWQVSDTYTDAGFSGAKLERPAMQRLINDIENKAFDTVLVYKLDRLSRSVRDTLYLVKDVFTKNKIDFISLNESIDTSSAMGSLFLTILSAINEFERENIKERMTMGKLGRAKSGKSMMWTKTAFGYYHNRKTGILEIVPLQATVVEQIFTDYLSGISLTKLRDKLNESGHIGKDIPWSYRTLRQTLDNPVYCGYIKFKGSLFEGMHKPIIPYETYLRVQKELEERQQQAYERNNNPRPFQAKYMLSGVARCGYCGAPLRIVLGHKRKDGSRTVKYHCANRFPRKTKGVTVYNDNKKCDSGTYDLSNLENTVIDNLVGFQENNDSLLKIINGNNQPILDTSSFEEQMSQIDKKIQKNSDLYLNDFITMDELKERTDSLQAEKKLLKAEISENKFNDSTDVFELVKTQLGSIPINELGYDNKKKIVNNLVSKVDVTADNVDIIFKFQLA

SEQ ID NO: 8110 - protein, 452 aa, synthetic construct
MKAAIYIRVSTREQVENYSIQAQTEKLTALCRSKDWDVYDIFIDGGYSGSNMNRPALNEMLSKLHEIDAVVVYRLDRLSRSQRDTITLIEEYFLKNNVEFVSLSETLDTSSPFGRAMIGILSVFAQLERETIRDRMVMGKIKRIEAGLPLTTAKGRTFGYDVIDTKLYINEEEAKQLQLIYDIFEEEQSITFLQKRLKKLGFKVRTYSRYNSWLTNDLYCGYVSYKDKVHVKGIHEPIVSEEQFCRVQEIFTRMGKNPNMNRDSASLLNNLVVCSKCGLGFVHRRKDTTSRGKKYHYRYYSCKTYKHTHELEKCGNKIWRADKLEELIINRVNNYSLASRNVDKEDELDSLNEKLKIEHAKKKRLFDLYINSSYEVSELDSMMSDIDAQINYYESQIEANEELRKNKKIQENLADLATVDYDSLEFREKQLYLKSLISKIYIDGEQVTIEWL

SEQ ID NO: 8111 - protein, 469 aa, synthetic construct
MSYTTPVRAAVYLRISEDRSGEQLGVARQREDCLKLCGQRKWVPVEYLDNDVSASTGKRRPAYEQMLADITAGRIAAVVAWDLDRLHRRPIELEAFMSLADEKRLALATVAGDVDLATPQGRLVARLKGCVAAHETEHKKARQRRAARQKAERGHPNWSKAFGYLPGPNGPEPDPRIAPLVKQAYADILAGASLGDVCRQWNDAGAFTITDRPWTTTTLSKFLRKPRNAGLRTYKGARYGPVDRDAIVGKAQWSPLVDEATFWAAQAVLDAPGRAPGRKSVRRHLLTGLAGCGKCGNHLAGSYRADGRVVYVCKACHGVAILADNIEPILYHIVAERLAMPDAVDLLRREIHDAAEAETIRLELETLYGELDRLAVERAEGLLTARQVKISTDIVNAKIIKLQARQLDQERLRVLDGIPLGTPQVAGMIAELSPDRFRAVLDVLAEVVVQPVGKSGRIFNPERVQVNWR

SEQ ID NO: 8112 - protein, 452 aa, synthetic construct
MKAAIYIRVSTREQVENYSIQAQTEKLTALCRSKDWDVYDIFVDGGYSGSNMNRPALNEMLSKLHEIDAVVVYRLDRLSRSQRDTITLIEEYFLKNNVEFVSLSETLDTSSPFGRAMIGILSVFAQLERETIRDRMVMGKIKRIEAGLPLTTAKGRTFGYDVIDTKLYINEEEAKQLQLIYDIFEEEQSITFLQKRLKKLGFKVRTYNRYNNWLTNDLYCGYVSYKDKVHVKGIHEPIISEEQFYRVQEIFTRMGKNPNMNRDSASLLNNLVVCSKCGLGFVHRRKDAMSRDKKYHYRYYSCKTYKHIHELEKCGNKIWRADKLEELIINRVNNYSLASRNVGKEDELDSLNEELKTEHAKKKRLFDLYINGHYEVSELDSMMNDIDAQINYYESQIEANEELKKNKKIRENLADLATVDFDSLEFREKQLYLKSLINKIYIDGEQVTIEWL

SEQ ID NO: 8113 - protein, 452 aa, synthetic construct
MKAAIYIRVSTREQVENYSIQAQTEKLTALCRSKGWDVYDIFIDGGYSGSNMNRPALNEMLSKLHEIDAVVVYRLDRLSRSQRDTITLIEEYFLKNNVEFVSLSETLDTSSPFGRAMIGILSVFAQLERETIRDRMVMGKIKRIEAGLPLTTAKGRTFGYDVVDTKLYINEEEAKQLQLIYDIFEEEQSITFLQKRLKKLGFKVRTYSCYNNWLTNDLYCGYVSYKDKVHVKGIHEPIISEEQFYRVQEIFTRMGKNPNMNRDSASLLNNLVVCSKCGLGFVHRRKDTTSRGKKYRYRYYSCKTYKHTHELEKCGNKIWRADKLEELIINRVNNYSFASRNVDKEDELDSLNEKLKIEHAKKKRLFDLYINGSYEVSELDCMMNDIDAQINYYESLIEANEELKKDKKIQESLANLATVDYDSLEFREKQLYLKSLINKIYIDGEQVTIEWL

SEQ ID NO: 8114 - protein, 452 aa, synthetic construct
MKAAIYIRVSTQEQVENYSIQAQTEKLTALCRSKDWDVYDIFIDGGYSGSNMNRPALNEMLSKLHEIDAVVVYRLDRLSRSQRDTTTLIEEYFLKNNVEFVSLSETLDTSSPFGRAMIGILSVFAQLERETIRDRMVMGKIKRIEAGLPLTTAKGRTFGYDVIDTKLYVNEEEAKQLRLIYDIFEEEQSITFLQKRLKKLGFKVRTYNRYNSWLTNDLYCGYVSYKDKVHVKGIHEPIISEEQFYRVQEIFTRMGKNPNMNRDSASLLSNLVVCSKCGLGFVHRSKDTMSRGKKYHYRYYSCKTYKHTHELEKCGNKTWRADKLEELVINRVNNYSFASRDVDKEDELDGLNEKLKIEYAKKKRLFDLYINGSYEVSELDSMMNDINAQINYYESQIEANEELKKTKKIQENLADLATVDFGSLEFREKQLYLKSLINKIYIDDEQVTIEWL

SEQ ID NO: 8115 - protein, 485 aa, synthetic construct
MTRKVAIYTRVSTTNQAEEGFSIDEQIDRLTKYAEAVGWQVSDTYTDAGFSGAKLERPAMRRLINDIENKAFDTVLVYKLDRLSRSVRDTLYLVKEVFTKNKIDFISLSESIDTSSAMGSLFLTILSAINEFERENIKERTTMGKLGRAKSGKSMMWTKTAFGYYHNRKTGILEIVPLQATIVEQIFTDYLSGISLTKLRDKLNESGHIGKDIPWSYRTLRQTLDNPVYCGYIKFKGSLFEGMHKPIIPYETYLKVQKELEERQQQTYERNNNPRPFQAKYMLSGMARCGYCGAPLRIVLGHKRKDGNRTMKYHCANRFPRKTKGVTVYNDNKKCDSGTYDLSDLENTVIDYLIGFQENNDSLLKIINGNNQPILDTSSFKKQISQIDKKIQKNSDLYLNDFITMDELKERTDSLQAERKLLEAKISENKFNDSTDVFELVKTQLGSIPINELSYDNKKKIVNNLVSKVDVTADNVDIIFKFQLA

SEQ ID NO: 8116 - protein, 452 aa, synthetic construct
MKAAIYIRVSTQEQVGNYSIQAQTEKLTALCRSKDWDVYDIFVDGGYSGSNMNRPALNEMLSKLHEIDAVVVYRLDRLSRSQRDTTTLIEEYFLKNNVEFVSLSETLDTSSPFGRAMIGILSVFAQLERETIRDRTVMGKIKRIEAGLPLTTAKGRTFGYDVIDTKLYINEEEAKQLQLIYDIFEEEQSITFLQKRLKELGFKVRSYNRYNNWLTNDLYCGYVSYKDKVHVKGIHEPIISEEQFYRVQEIFTRMGKNPNMNRDSASLLNNLVVCSKCGLGFVHRSKDTMCRGKKYHYRYYSCKTYKHTHELEKCGNKTWRADKLEELIINRVSNYSFASRNMDKEDELDSLNEKLQIEHAKRKRLFDLYINGSYEVSELDSMMNDIDAQINYYESQIEANEELKESKKIQENLADLAAVDFDSLGFREKQLYLKSLINKIYIDGEQVTIEWL

SEQ ID NO: 8117 - protein, 469 aa, synthetic construct
MSYTTPVRAAVYLRISEDRSGEQLGVARQREDCLKLCDQRKWVPVEYLDNDVSASTGKRRPAYEQMLADITAGKIAAVVAWDLDRLHRRPIELEAFMSLADEKRLALATAAGDVDLATPQGRLVARLKGSVAAHETEHKKARQRRAARQKAERGYPNWSKAFGYLPGPNGPEPDPRTAPLVKQAYADILAGASLGDVCRQWNDGGAFTITGRPWTTTTLSKFLRKPRNAGLRAYKGARYGPVDRDAIVGKAQWSPLVDEATFWAAQAVLDAPGRAPGRKSVRRHLLTGLAGCGKCGNHLAGSYRTDGRVVYVCKACHGVAILADNIEPILYHIVAERLAMPEAVDLLRCEIHDAAEAETIRQELETLYGELDRLAVERAEGLLTARQVKISTDIVNAKITKLQARQLDQERLRVFDGIPLGTPQVAGMIAELSPDRFRAVLDVLAEVVVQPVGKGGRIFNPERVQVNWR

SEQ ID NO: 8118 - protein, 452 aa, synthetic construct
MKAAIYIRVSTREQVENYSIQAQTEKLTALCRSKDWDVYDIFIDGGYSGSNMNRPALNEMLSKLHEIDAVVVYRLDRLSRCQRDTITLIEEYFLKNNVEFVSLSETLDTSSPFGRAMIGILSVFAQLERETIRDRMVMGKIKRIEAGLPLTTARGRTFGYDVIDTKLYINEEEAKQLQLIYDIFEEEQSITLLQKRLKKLGFKVRTYSCYNNWLTNDLYCGYVSYKDKVHVKGIHEPIISEEQFYRVQEIFTRMGKNPNMNRDSASLLNNLVVCSKCGLGFVHRRKDTMSRGKKYHYRYYSCKTYKHTYELEKCGNKIWRADKLEELIINRVNNYSFASRTVVKEDELDSLNEKLKIEHAKKKRLFDLYISGSYEVSELDSMMNDIDAQINYYESQIEANEELKKNERIQENLADLATADFDSLEFREKQRYLKSLINKIYIDGEQVTIEWL

SEQ ID NO: 8119 - protein, 452 aa, synthetic construct
MKAAIYIRVSTREQVENYSIQAQTEKLTALCRSKGWDVYDIFIDGGYSGSNTNRPALNEMLSKLHEIDAVVVYRLDRLSRSQRDTITLIEEYFLKNNVEFASLSETLDTSSPFGRAMIGILSVFAQLERETIRDRMVMGKIKRIEAGLPLTTAKGRTFGYDVIDAKLYINEEEAKQLQLIYDIFEEEQSITFLQKRLKKLGFKVRTYNRYNNWLTNDLYCGYVSYKDKVHVKGIHEPIISEEQFYRVQEIFTRMGKNPNMNRDSASLLNNLVVCSKCGLGFVHRRKDTTSRGKKYHYRYYSCKTYKHIHELEKCGNRIWRADKLEELIINRVNNYSFASRNVDKEDELDSLNEKLKIEHTKKKRLFDLYINGNYEVSELDSMMNDIDAQINYYESQIEANEELRKNKKIQENLANLATVDYDSLEFREKQLYLKSLINKIYIDGEQVIIEWL

SEQ ID NO: 8120 - protein, 452 aa, synthetic construct
MKAAIYIRVSTREQVENYSIQAQTEKLTALCRSKDWDVYDIFIDGGYSGSNMNRPALNEMLSKLHEIDAVVVYRLDRLSRSQRDTITLIEEYFLKNNVEFVSLSETLDTSSPFGRAMIGILSVFAQLERETIRDRMVMGKIKRIEAGLPLTTAKGRTFGYDVIDTKLYINEEEAKQLQLIYDIFEEERSITSLQKRLKKLGFKVRTYGRYNNWLTNDLYCGYVSYKDKVHVKGVHEPIISEEQFYRVQEIFTRMGKNPNMNRDSASLLNNLVVCSKCGLGFVHRRKDTVSRGKKYQYRYYSCKTYKHIHELEKCGNKIWRADKLEELIINRVNNYSFASRNVDKEDELDSLSEKLKIEHAKRKRLFDLYINGSYNVSELDSMMNGIDAQINYYESQIEANGELKKNKKIQENLADLATVDFDSLEFREKQLYLRSLINKIYIDGEQVTIEWL

SEQ ID NO: 8121 - protein, 452 aa, synthetic construct
MKAAIYIRVSTREQVENYSIQAQTEKLTALCRSKDWDVYDIFIDGGYSGSNMNRPALNEMLSKLHEIDAVVVYRLDRLSRSQRDTITLIEEYFLKNNVEFVSLSETLDTSSPFGRAMIGILSVFAQLERETIRDRMVMGKIKRIEAGLPLTTAKGRTFGYDVIDTKLYINEEEARQLQLIYDIFEEEQSITSLQKRLKKLGFKVRTYSRYNNWLTNDLYCGYVSYKDKVHVKGIHEPIISEEQFYRVQEIFTRMGKSPNMNRDSASLLNNLVVCSKCGLSFVHRRKDTVSRGKKYHYRYYSCKTYKHIHELEKCGNKIWRADKLEELIINRVNNYGFASRDVDKEDELNSLNEKLKIEQAKKKRLFDLYINGSSEVSELGSMMSDTDAQINYYESQIEANEELKKSKKIQESLADLATVDFDSLEFREKQLYLRSLINKIYIDGEQVTIEWL

SEQ ID NO: 8122 - protein, 485 aa, synthetic construct
MTKKVAIYTRVSTTNQAEEGFSIDEQIDRLTKYAEAMGWQVSDTYTDAGFSGAKLERPAMQRLINDIENKAFDTVLVYKLDRLSRSVRDTLYLVKDVFTKNKIDFISLNESIDTSSAMGSLFLTILSAINEFERENIKERMTMGKLGRAKSGKSMMWTKTAFGYYHNRKTGILEIVPLQAAIVEQIFTDYLSGISLTKLRDKLNESGHIGKDIPWSYRTLRQTLDNPVYCGYIKFKDSLFEGMHKPIIPYESYLKVQKELEERQQQTYERNNNPRPFQAKYMLSGMARCGYCGAPLRIVLGHKRKDGSRTMKYHCANRFPRKTKGITVYNDNKKCDSGTYDLSNLENTVIDSLIGFQEDNDSLLKIINGNNQPILDTSSFKDQISQIDKKIQKNSDLYLNDFITMDELKDRTDSLQAEKKLLKAKISENKSNDSTDVFELVKTQLGSIPINELSYDNKKKIVNNLVSKVDVTADNVDIIFKFQLA

SEQ ID NO: 8123 - protein, 485 aa, synthetic construct
MTKKVAIYTRVSTTNQAEEGFSIDEQIDRLTKYAEAMGWQVSGTYTDAGFSGAKLERPAMQRLINDIENKAFDTVLVYKLDRLSRSVRDTLYLVKDVFTENKIDFISLNESIDTSSAMGSLFLTILSAINEFERENIKERMTMGKLGRAKSGKSMMWTKTAFGYYHNRETGILEIVPLQATIVEQIFTDYLSGISLTKLRDKLNESGHIGKDIPWSYRTLRQTLDNPVYCGYIKFKDSLFEGMHKPIIPYETYLKVQKELEERQQQTYERNNNPRPFQAKYMLSGMARCGYCGAPLRIVLGHKRKDGSRTMKYHCANRFPRKTRGITVYNDNKKCDSGTYDLSDLENTVIDNLIGFQENNDSLLKIINGNNQPILDTSSFKKQISQIDKKIQKNSDLYLNDFITMDELRDRTDSLQAEKKLLEAKISENKFDDSTDVFELVKTQLGSIPINELSYDNKKKIVNNLVSKVDVTADNVDIIFKFQLA

SEQ ID NO: 8124 - protein, 485 aa, synthetic construct
MTKKVAIYTRVSTINQAEEGFSIDEQVDRLTKYAEAMGWQVSDTYTDAGFSGAKLERPAMQRLINDIENRAFDTVLVYKLDRLSRSVRDTLYLVKDVFTRNKIDFISLNESIDTSSAMGSLFLTILSAINEFERENIKERMTMGKLGRAKSGKSMMWTKTAFGYYHNRKTGILEVVPLQATIVEQIFTDYLSGISLTKLRDKLNESGHIGKDIPWSYRTLRQTLDNPVYCGYIKFKDSLFEGMHKPIIPYETYLKVQKELEERQQQTYERNNNPRPFQAKYMLSGMARCGYCGAPLRIVLGHKRKDGSRTMKYHCANRFPRKTKGVTVYNDNKKCDSGTYNLSSLENTVIGNLIGFQENDDSLLKIINGNNRPILDTSSFKEQISQIDKKIQRNSDLYLNDFITMDELKDRTDSLQAEKRLLEAKISENKFNDSADVFEQVKAQLGSIPINELSYDNKKKIVNNLVSKVDVTADNVDIIFKFQLA

SEQ ID NO: 8125 - protein, 486 aa, synthetic construct
MTKKVAIYTRVSTTNQAEEGFSIDEQIDRLTKYAEAMGWQVGDTYTDAGFSGAKLERPAMRRLINDIEIKAFDTVLVYKLDRLSRSVRDTLHLVKDVFTKNKIDFISLNESIDTSSAMGSLFLTILSAINEFERENIKERTTMGKLGRAKSGKSMMWTKTAFGYYHNRKTGILEIVPLQATIVEQIFTDYLSGISLTKLRDKLNESGHIGKDIPWSYRTLRQTLDNPVYCGYIRFKDSLFEGMHKPIIPYETYLKVQKELEERQQQTYERNNNPRPFQAKYMLSGMARCGYCGAPLRIVLGHKRKDGSRTMKYHCANRFPRKTKGVTVYNDNKKCDSGTYDLSNLENTVIDNLIGFQENDDSLLKIINGNNQPILDTSSFEKQISQIDKKIQKNSDLYLNDFITMDELKDRTDSLQAEKKLLKTKISENKFNDSTDVFELVKTQLGSIPINELSYDDKKKIVNNLVSKADVTADNVDIIFKFQLAQ

SEQ ID NO: 8126 - protein, 452 aa, synthetic construct
MKAAIYIRVSTREQVENYSIQAQTEKLTALCRSKDWDVYDIFIDGGYSGSNMNRPALNEMLSKLHEIDAVVVYRLDRLSRSQRDTITLIEEYFLKNNVEFVSLSETLDTSSPFGRAMIGILSVFAQLERETIRDRMVMGKIKRIEAGLPLTTAKGRTFGYDVIDTKLYINEEEAKQLQLIYDIFEEEQSITSLQKRLKKLGFKVRTYNRYNNWLTNDLYCGYVSYKDKVHVKGIHEPIISEEQFYRVQEIFTRMGKNPNMNRDSASLLNNLVVCSKCGLGFVHRRKDTTSRGKKYHYRYYSCKTYKHTHELEKCGNKIWRADKLEELIINRVNNYSFASRNMDKEDELDSLNEKLKIEHAKRRRLFDLYINGSYEVSELDSKMNDIDAQINYYECQIEANGELKKSKKIQENLADLATVDFDSLEFREKQLYLKSLINKIYIDGEQVTIEWL

SEQ ID NO: 8127 - protein, 469 aa, synthetic construct
MSYTTPVRAAVYLRISEDRSGEQLGVARQREDCLKLCGQRRWVPVEYLDNDVSASTGKRRPAYEQMLADITAGKIAAVVAWDLDRLHRRPIELEAFMSLADEKRLALATVAGDVDLATPQGRLVARLKGSVAAHETEHKKARQRRAARQKAERGYPNWSKAFGYLPGPNGPEPDPRTAPLVKRAYADILAGASLGDVCRQWNDAGAFTITGRPWATTTLSKFLRKPRNAGLRTYKGARYGPVDRDAIVGKAQWSPLVDEATFWAAQAVLDAPGRAPGRKSVRRHLLTGLAGCGKCGNHLAGSYRTDGRVVYVCKACHGVAILADNIEPILYHIVAERLAMPDAVDLLRREIHDAAEAETIRLELEALYGELDRLAVERAEGLLTARQVKISTDIVNAKITKLQARQLDQERLRVFDGIPLGTPQVAGMIAELSPDRFRAVLDVLAEVVVQPVGKSGRIFSPERVQVNWR

SEQ ID NO: 8128 - protein, 452 aa, synthetic construct
MKAAIYIRVSTREQVENYSIQAQTEKLTALCRSKDWDVYDIFIDGGYSGSNMNRPALNEMLSKLHEIDAVVVYRLDRLSRSQRDTITLIEEYFLKNNVEFVSLSETLDTSSPFGRAMIGILSVFAQLERETIRDRMVMGKIKRIEAGLPLTTAKGRTFGYDVIDTKLYINEEEARQLQLIYDIFEEERSITSLQKRLKKLGFKVRTYSRYNNWLTNDLYCGYVSYKDKVHVKGIHEPIISEEQFYRVQEIFTRMGKNPNMNRDSASLLNNLVVCSKCGLGFVHRRKDTMSRGKKYHYRYYSCKTYKHTHELEKCGNKIWRADILEELIINRVNNYSLASRNVDKEDELDSLNEKLRIEHAKKKRLFDLYINGSYEVSELDCMMNDIDAQINYYESQIEANEELKKDKKIQESLANLATVDYDSLEFREKQLYLKSLINKIYIDGEQVTIEWL

SEQ ID NO: 8129 - protein, 485 aa, synthetic construct
MTKKVAIYTRVSTTSQAKEGFSIDEQIDRLTKYAEAMGWQVSDTYTDAGFSGAKLERPAMQRLINDIENKAFDTVLVYKLDRLSRSVRDTLYLVKEVFTKNKIDFISLSESIDTSSAMGSLFLTILSAINEFERENIKERMTMGKLGRAKSGKSMMWTKTAFGYYHNHKTGILEIVPLQATIVEQIFTDYLSGISLTKLRDKLNESGHIGKDIPWSYRTLRQTLDNPVYCGYIKFKDSLFEGMHKPIIPYETYLRVQKELEERQQQTYERNNNPRPFQAKYMLSGMARCGYCGAPLRIVLGHKRKDGSRTMKYHCANRFPRKTKGVTVYNDNKKCDSGTYDLSNLENTVIDNLIGFQENNDSLLKIINGNNQPIPDTSSFKKQISQIDKKIQKNSDLYLNDFITMDELKDRTDSLQAEKKLLKAKISENKFNDSTDVFELVKTQLGSIPINELSYDNKKKIVNNLVSKVDVTADNVDIIFKFQLA

SEQ ID NO: 8130 - protein, 485 aa, synthetic construct
MTKKVAIYTRVSTTNQAEEGFSIDEQIDRLTKYAEAMGWQVSDTYTDAGLSGAKLERPAMQRLINDIENKAFDTVLVYKLDRLSRSVRDTLYLVRDVFTKNKIDFISLNESIDTSSAMGSLFLTILSAINEFERENIKERMTMGKLGRAKSGKSMMWTKTAFGYYHNRKTGILEIVPLQASIVEQIFTDYLSGISLTKLRDKLNESGHIGKDIPWSYRTLRQTLDNPVYCGYIKFKDSLFEGMHKPIIPYETFLKVQKELEERQQQAYERNNNPRPFQAKYMLSGMARCGYCGAPLRIVLGRRRKDGSRTMKYHCANRFPRKTKGVTVYNDNKKCDSGTYDLSSLENAVIDNLIGLQENNDSLLKIINGNNQPVLDTSSFKKQISQIDKKIQKNSDLYLNDFITMDELKERTDSLQAEKKLLIAKISENKFNDSTDVFELVKTQLGSIPINELSYDDKKKIVNNLVSKVDVTADNVDIIFKFQLA

SEQ ID NO: 8131 - protein, 469 aa, synthetic construct
MSYTTPVRAAVYLRISEDRSGEQLGVARQREDCLKLCGQRKWVPVEYLDNDVSASTGKRRPAYEQMLADITAGKIAAVVAWDLDRLHRRPIELEAFMSLADEKRLALATVAGDVDLATPQGRLVARLKASVAAHETEHKKARQRRAARQKAERGHPNWSKAFGYLPGPNGPEPDPRTAPLVRQAYADILAGASLGDVCRRWNDAGAFTITGRPWTTTTLSKFLRKPRNAGLRAYKGARYGPVDRDAIVGKALWSPLVDEATFWAAQAVLDAPGRAPGRKSVRRHLLTGLAGCGKCGNHLAGSYRTDGRVVYVCKTCHGVAILADNIEPILYHVVAERLAMPDAVDLLHREIHDAAEAETIRLELETLYGELDRLAVERAEGLLTARQVKISTDIVNAKITKLQARQLDQERLRVFDGIPLGTPQVAGMIAELSPDRFRAVLDALAEVVVQPVGKSGRIFNPERVQVNWR

SEQ ID NO: 8132 - protein, 452 aa, synthetic construct
MKAAIYIRVSTREQVENYSIQAQTEKLTALCRSKDWDVYDIFIDGGYSGSNMNRPALNEMLSKLHEIDAVVVYRLDRLSRSQRDTITLIEEYFLKNNVEFVSLSETLDTSSPFGRAMIGILSVFAQLERETIRDRMVMGKIKRIEAGLPLTTAKGRTFGYDVIDTKLYINEEEAKQLQLIYDIFEEEQSITLLQKRLKKLGFKVRTYSRYSNWLTNDLYCGYVSYKDKVHVRGIHEPIISEEQFYRVQEIFTRMGKSPNMNRGSASLLNNLVVCSKCGLGFVHRRKDTMSRGKKYHYRYYSCKTYKHTHELEKCGNKIWRADKLEELIINRVNDYSFASRNVGKEDELDSLNERLKIEHAKKKRLFDLYINGSYNVSELDSMMNDIDAQINYYESQIEASEELKKDKKIQESLANLATVDYDSLEFREKQLYLKSLINKIYIDGEQVTIEWL

SEQ ID NO: 8133 - protein, 469 aa, synthetic construct
MCYTTPVRAAVYLRISEDRSGEQLGVARQREDCLKLCDQRKWVPVEYLDNDVSASTGRRRPAYEQMLADITAGKIAAVVAWDLDRLHRRPIELEAFMSLADEKRLALATVAGDVDLATPQGRLVARLKGSVAAHETEHKKARQRRAARQKAERGYPNWSRAFGYLPGPNGPEPDPRTAPLVKQAYVDILAGASLGDVCRQWNGAGALTITGRPWTTTTLSKFLRKPRNAGLRAYKGARYGPVDRDAIVGKAQWSPLVDEATFWAAQAVLDAPGRAPGRKSVRRHLLTGLAGCGKCGNHLAGSYRTDGRVVYVCKACHGVAILADNIEPILYRIVAERLAMPDAVDLLRREILDAAEAETIRLELETLYGELDRLAVERAEGLLTARQVKISTDIVNAKITKLQARQLDQERLRVFDGIPLGTPQVAGMIAGLSPDRFRAVLDVLAEVVVQPMGKGGRIFNPERVQVNWR

SEQ ID NO: 8134 - protein, 452 aa, synthetic construct
MKAAIYIRVSTREQVENYSIQAQTEKLTALCRSKDWDVYDIFIDGGYSGSNMNRPALNEMLSKLHEIDVVVVYRLDRLSRSQRDTITLIEEYFLKNNVEFVSLSETLDTSSPFGRAMIGILSVFAQLERETIRDRMVMGKIKRIEAGLPLTTAKGRTFGYDVIDTKLYVNEEEAKQLRLIYDIFEEEQSITFLQKRLKKLGFKVRTYSRYNNWLTNDLYCGYVSYKDKVHVKGIHKPIISEEQFYRVQEIFTRMGKNPNMNRDSASLLNNLVVCSKCGLSFVHRRKDTMSRGKKYHYRYYSCKTYKHIHELEKCGNKIWRADKLEELVINRVNNYSSASRNVDKEDELDSLSEKLKIEHAKKKRLFDLYINGSYGVSELDSMMSDIDAQISYYESQIEVNEELKKDKKIQENLADLAAVDYDSLEFREKQLYLKSLINKIYIDGEQVTIEWL

SEQ ID NO: 8135 - protein, 452 aa, synthetic construct
MKAAIYIRVSTQEQVGNYSIQAQIEKLTALCRSKDWDVYDIFIDGGYSGSNMNRPALNEMLSKLHEIDAVVVYRLDRLSRSQRDTTTLIEEHFLKNNVEFVSLSETLDTSSPFGRAMIGILSVFAQLERETIRDRMVMGKIKRIEAGLPLTTAKGRTFGYDVIDTKLYINEEEAKQLQLIYDIFEEEQSITFLQKRLKKLGFKVRTYNRYNSWLTNDLYCGYVSYKDKVHVKGIHEPIISEEQFYRVQEIFTRMGKNPNMNRDSASLLSNLVVCSKCGLGFVHRSKDTMSRGKKYHYRYYSCKTYKHTHELEKCGNKTWRADKLEELIINRVNNYSFASRNVDKEGELDSLNEKLKVEHAKKERLFDLYINGSYEVSELDSMMNDIDAQINYYESQIDANEKLRKNKKIQGSLADLAAVDFDSLEFREKQLYLKSLINKIYIDGEQVTIEWL

SEQ ID NO: 8136 - protein, 452 aa, synthetic construct
MKAAIYIRVSTREQVENYSIQAQTEKLTALCRSKDWDVYDIFIDGGYSGSNMNRPALNEMLSKLHEIDAVVVYRLDRLSRSQRDTITLIEEYFLKNNVEFVSLSETLDTSSPFGRAMIGILSVFAQLERETIRDRMVMGKIKRIEAGLPLTTAKGRTFGYDVIDTKLYINEEEAKQLQLIYDIFEEEQSITFLQKRLKKLGFKVRTYNRYNSWLTNDLYCGYVSYKDKVHVKGIHEPIISEEQFYRVQEIFTRMGKNPNMNRGSASLLNNLVVCSKCGLGFVHRRKDTMSRGKKYHYRYYSCKTYKHTHELEKCGNKIWRADKLEELIINRVNNYSFASRNVDKEDELGSLYEKLKIEHAKKRRLFDLYINGSYEVSELDSMMNDIDAQINYYESQIEANEELKKNKKSQESLADLATVDFDSLEFREKQLYLKSLINKIYIDGEQVTIEWL

SEQ ID NO: 8137 - protein, 452 aa, synthetic construct
MKAAIYIRVSTQEQVGNYSIQAQTEKLTALCRSKDWDVYDIFIDGGYSGSNMNRPALNEMLSKLHEIDAVVVYRLDRLSRSQRDTTTLIEEYFLKNNVEFVSLSETLDTSSPFGRAMIGILSVFAQLERETIRDRMVMGKIKRVEAGLPLTTAKGRTFGYDVIDTKLYINEEEAKQLRLIYDIFEEEQSITSLQKRLKKLGFKVRTYNRYNNWLTNDLYCGYVSYKDKVHVKGIHEPIISEEQFYRVQEIFTRMGKNPNMNRDSASLLSNLVVCSKCGLGFVHRSKDTMSRGKKYHYRYYSCKTYKHTHELEKCGNKTWRADKLEELIINRVNNYSFASRNADKEDELDSLNEKLKIEHAKKRRLFDLYINGSYEVSELDSMMNDIDAQIDYYESLIEANEELKKNKRIQENLADLAAVDFDSLEFREKQLYLKSLINKIYIDGEQVTIEWL

SEQ ID NO: 8138 - protein, 452 aa, synthetic construct
MKAAIYIRVSTREQVENYSIQAQTEKLTALCRSKDWDVYDIFIDGGYSGSNMNRPALNEMLSKLHEIDAVVVYRLDRLSRSQRDTITLIEEYFLKNNVEFVSLSETLDTSSPFGRAMIGILSVFAQLERETIRDRMVMGKIKRIEAGLPLTTAKGRTFGYDVIDTKLYINEEEAKQLQLIYDIFEEEQSITSLQKRLKKLGFKVRTYNRYYDWLTNDLYCGYVSYKDKVHVKGIHEPIISEEQFYRVQEIFTRMGKNPNMNRDSASLLNNLVVCSKCGLGFVHRRKDTTSRGKKYHYRYYSCKTYKHIHELEKCGNKIWRADKLEELIINRVNNYSFTSRNVDKEGELDSLNEKLKIEHAKKKRLFDLYINGSYEVSELDSMMNDIDAQINYYESQIEANEELKKNKKIRENLADLATVDYDSLEFREKQLYLKSLINKIHIDGEQVTIEWL

SEQ ID NO: 8139 - protein, 452 aa, synthetic construct
MKAAIYIRVSTQEQVGNYSIQAQTEKLTALCRSKDWDVYDIFVDGGYSGSNMNRPALNEMLSKLHEIDAVVVYRLDRLSRSQRDTTTLIEEYFLKNNVEFVSLSETLDTSSPFGRAMIGILSVFAQLERETIRDRMVMGKIKRIEAGLPLTTAKGRTFGYDVIDTKLYINEEEAKQLQLIYDIFEEEQSITFLQKRLKKLGFKVRTYNRYNNWLTNDLYCGYVSYKDKVHVKGIHEPIISEEQFYRVQEIFARMGKNPNMNRESASLLSNLVVCGKCGLGFVHRSKDTMSRGKKYHYRYYSCKTYKHTHELEKCGNKTWRADKLEELIINRVNNYSFVSRNVDKEDELDSLNEKLKLEHAKKKRLFNLYINGGYEVSELDSMMNDVDAQINYYESQIEANEELKKNRKIQENLADLATVDFDSLEFREKQLYLKSLINKIYIDGEQVTIEWL

SEQ ID NO: 8140 - protein, 452 aa, synthetic construct
MKAAIYIRVSTQEQVENYSIQAQTEKLTALCRSKDWDVYDIFIDGGYSGSDVNRPALNEMLSKLHEIDAVVVYRLDRLSRSQRDTTTLIEEYFLKNNVEFVSLSETLDTSSPFGRAMIGILSVFAQLERETIRDRMVMGKIKRVEAGLPLTTAKGRTFGYDVIDTKLYINEEEAKQLQLIYDIFEEEQSITSLQKRLKKLGFKVRTYNRYSNWLTNDLYCGYVSYKDKVHVKGIHEPIISEEQFYRVQEIFTRMGKNPNMNRDNASLLNNLVVCGKCGLGFVHRSKDTMSRGKKYHYRYYSCKTYKHTHELEKCGNKTWRADKLEELIISRVNNYSSASRNVDKEDVLDSLNEKLKIEHAKRKRLFDLYINGSYEVGELDSMMNDIDAQINYYESQIEANEELKKNRKIQENLADLAAVDFDSLEFREKQLYLKSLINKIYIDGEQVTIEWL

SEQ ID NO: 8141 - protein, 485 aa, synthetic construct; identical to SEQ ID NO: 6650

SEQ ID NO: 8142 - protein, 452 aa, synthetic construct
MKAAIYIRVSTREQVENYSIQAQTEKLTALCRSKDWDVYDIFIDGGYSGSNMNRPALNEMLSKLREIDAVVVYRLDRLSRSQRDTITLIEEYFLKNNVEFVSLSETLDTSSPFGRAMIGILSVFAQLERETIRDRMVMGKIKRVEAGLPLTTAKGRTFGYDVIDTKLYINEEEAKQLQLIYDIFEEEQSITFLQKRLKKLGFKVRTYSCYNNWLTNDLYCGYVSYKDKVHVKGIHEPIISEEQFYRVQEIFTRMGKNPNMNRDSASLLNNLVVCSKCGLGFVHRRKDTMSRGKKYHYRYYSCKTYKHIHELEKCGNKIWRADKLEELIINRVNNYSFASRNVDKEDELDSLNEKLKIEHAKKKRLFDLYINGSYEVSELEGMMNDIDAQINYYESQIEANEELRRSKKIQENLADLATVDYDSLEFREKQLYLKSLINKIYIDGEQVTIEWL

SEQ ID NO: 8143 - protein, 485 aa, synthetic construct
MTKKVAIYTRVSTTNQAEEGFSIDEQIDRLTKYAEAMGWQVSDTYTDAGFSGAKLKRPAMQRLINDIENKAFDTVLVYKLDRLSRSVRDTLYLVKDVFTKNKIDFISLSESIDTSSAMGSLFLTILSAINEFERENIKERMTMGKLGRAKSGKSMMWTKTAFGYYHNRKTGILEIVPLQATIVEQIFTDYLSGISLTKLRDKLNESGHIGKDIPWSYRTLRQTLDNPVYCGYIKFKGSLFEGMHKPIIPYGTYLKVQKELEERQQQTYERNNNPRPFQAKYMLSGMARCGYCGAPLRIVLGHKRKDGSRTKKYHCANRFPCKTKGVTVYNDNKKCDSGTYDLSNLEDTVIDNLIGFQENNDSLLEVINGNNQPTLDTSSFEEQISQIDKKIQKNSDLYLNDFITMDELKDRTDSLLAEKKLLEAKISENKLNDSTDVFELVKTQLGSVPINELSYDNKKKIVNNLVSKVDVTADGVDIIFKFQLT

SEQ ID NO: 8144 - protein, 485 aa, synthetic construct
MTKKVAIYTRVSTTNQAEEGFSIDEQIDRLTKYAEAMGWQVSDTYTDAGLSGAKLERPAMQRLINDIENKAFDTVLVYKLDRLSRSVRDTLYLVKDVFTKNKIDFISLNESIDTSSAMGSLFLTILSAINEFERENIKERMTMGKLGRAKSGKSMMWTKTAFGYYHNHKTGILEIVPQQATIVEQIFTDYLSGISLTKLRDKLNESGHIGKDIPWSYRTLRQTLDNPVYCGYIKFKGSLFEGMHKPIIPYETYLKVQKELEERQQQTYERNNNPRPFQAKYMLSGMARCGYCGAPLRIVLGHKRKDGSRTMKYHCTNRSPRKTKGVTVYNDNKKCDSGTYDLSNLENTVIDNLIGFQENNDSLLKIINGNNQPILDTSSLKEQISQIDKKVRKNSDLYLNDFITMDELKDRTNSLQAEKELLKAKISENKFSDSTDVFELVKTQLGSIPINELSYDNKKKIVNNLVSKVDVTADNVDIIFKFQLA

SEQ ID NO: 8145 - protein, 485 aa, synthetic construct; identical to SEQ ID NO: 7000

SEQ ID NO: 8146 - protein, 452 aa, synthetic construct
MKAAIYIRVSTREQVENYSIQAQTEKLTALCRSKDWDVYDIFIDGGYSGSNMNRPALNEMLSKLHEIDAVVVYRLDRLSRSQRDTITLIEEYFLKNNVEFVSLSETLDTSSPFGRAMIGILSVFAQLERETIRDRMVMGKIKRIEAGLPLTTAKGRTFGYDVIDTKLYINEEEAKQLRLIYDIFEEEQSITFLQKRLKKLGFKVRTYNCYNNWLTNDLYCGYVSYKDKVHVKGIHEPIISEEQFYRVQEIFTRMGKNPNMNRDSASLLNGLVVCSKCGLGFVHRRKDTMSRGKKYHYRYYSCKTYKHTHELEKCGNKIWRADRLEELVINRVNNYSFASRNVDKEDELDSLNEKLKIEHAKKKRLFDLYINGSYEVSELDSMMSDIDAQINYYESQIEAYEELKKNKKIQENLANLATVDYDSLEFREKQLYLKSLINKIYIDGEQVTIEWL

SEQ ID NO: 8147 - protein, 469 aa, synthetic construct
MSYTTPVRAAVYLRISEDRSGEQLGVARQREDCLKLCGQRKWVPVEYLDNDVSASTGKRRPAYEQMLADITAGKIAAVVAWDLDRLHRRPIELEAFMSLADEKRLALATVTGDVDLATPQGRLVARLKGCVAAHETEHKKVRQRRAARQKAERGLPNWSKAFGYLPGPNGPEPDPRTAPLVKQAYADILAGASLGDVCRQWNDAGAFTITGRPWTTTTLSKFLRKPRNAGLRAYKGARYGPVDRDAIVGKAQWSPLVDEATFWAAQAVLDAPGRAPGRKSVRRHLLTGLAGCGKCGSHLAGSHRTDGRVVYVCKACHGVAILADNIEPILYHIVAERLAMPDAVGLLRCEIHDAAEAETVRLELETLYGELDRLAVERAEGLLTARQVKISTDIVNAKITKLQARQLDQERLRVFDGIPLGTPQVAGMIAELSPARFRAVLDVLAEVVVQPVGKSGRIFNPERVQVNWR

SEQ ID NO: 8148 - protein, 485 aa, synthetic construct
MTKKVAIYTRVSTTNQAEEGFSIDEQIDRLTRYAEAMGWQVSDTYTDAGFSGAKLERPAMQRLINGIESKAFDTVLVYKLDRLSRSVRDTLYLVKDVFTKNKIDFISLNESIDTSSAMGSLFLTILSAINEFERENIKERMTMGKLGRAKSGKSMMWTKTAFGYYHNRKTGILEIVPLQATIVEQIFTDYLSGISLTKLRDKLNGSGHIGKDIPWSYRTLRQTLDNPVYCGYIKFKDSLFKGMHKPIIPYETYLKVQKELEERQQQTYERNNNPRPFQAKYMLSGTARCGYCGAPLRVVLGHRRKDGSRTMKYHCANRFPRKTRGVTVYNDNKKCDSGTYDLSNLENTVIDNLIGLQENDDSLLKIINGNNQPFLDTSSLKKQISQIDKKIQKNSDLYLNDFITMDELKDRTDSLQAEKKLLKAKISESKLNDSTDVFELVKTQLGSVPINELSYDNKKKIVNNLVSKVDVTADNVDIIFKFQLA

SEQ ID NO: 8149 - protein, 485 aa, synthetic construct
MTKKVAIYTRVSTTNQAEEGFSIDEQIDRLTKYAEAMGWQVSDTYTDAGFSGAKLERPAMQRLINDIENKAFDTVLVYKLDRLSRSVRDTLYLVKDVFTKNKIDFISLSESINTSSAMGSLFLTILSAINEFERENIKERMTMGKLGRAKSGKSMMWTKTAFGYYHNRKTGILEIVPLQAAIVEQIFTDYLSGISLTKLRDKLNESGHIGKDIPWSYRTLRQTLDNPVYCGYIKFKDSLFEGMHKPIIPYETYLKVQKELEERQQQTYERNNNPRPFQAKYMLSGMARCGYCGAPLRIVLGHKRKDGSRTMKYHCANRFPRKTKGVTVYNDNKKCDSGTYDLSNLENTVIDNLIGFQENNDSLLKIINGNNQPILDTSSVKKQISLIDKKIQKNSDLYLNDFITMDELKDRTDSLQAEKKLLKAKISENKFNDSTDVFGLVKAQLGSIPINELSYDNKKKIVNNLVSKVDVTADNVDIIFKFQLA

SEQ ID NO: 8150 - protein, 452 aa, synthetic construct
MKAAIYIRVSTREQVENYSIQAQTEKLTALCRSKDWDVYDIFIDGGYSGSNMNRPALNEMLSKLHEIDAVVVYRLDRLSRSQRDTITLIEEYFLKNNVEFVSLSETLDTSSPFGRAMIGVLSVFAQLERETIRDRMVMGKIKRIEAGLPLTTAKGRTFGYDVIDTKLYINEEEAKQLQLIYDIFEEERSITFLQKRLKKLGFKVRTYNRYNNWLTNDLYCGYVSYKDKVRVKGIHEPIISEEQFYRVQEIFTRMGKNPNMNRGSASLLNNLVVCSKCGLGFVHRRKDTMSRDKKYHYRYYSCKTYKHIHELEKCGNKIWRADKLEELIINRVSNYSLASRNTDKEDELDSLNEKLKIEHAKKKRLFELYLNGSYEVSELDSMMSDIDAQINYYEGQIEANEELKKNKKTQENLAYLATVDFDSLEFREKQLYLKSLINKIYIDGEQVTIEWL

SEQ ID NO: 8151 - protein, 452 aa, synthetic construct
MKAAIYIRVSTREQVENYSIQAQTEKLTALCRSKDWDVYDIFVDGGYSGSNLNRPALNEMLSKLHEIDAVVVYRLDRLSRSQRDTITLIEEYFLKNDVEFVSLSETLDTSSPFGRAMIGILSVFAQLERETIRDRMVMGKIKRIEAGLPLTTAKGRTFGYDVIDTKLYINEEEAKQLQLIYDIFEEEQSITSLQKRLKKLGFKVRTYNRYNNWLTNDLYCGYVSYKDKVHVKGIHEPIISEEQFYRVQEIFTRMGKNPNMNRDSASLLNSLVVCGKCGLGFVHRRKDTTSRGKKYHYRYYSCKTYKYTYELEKCGNKIWRADKLEELIIDRVNNYSFASRNVDKEDELDSLSEKLKIEHAKKKRLFDLYINGSYEVSELDSMMSDIEAQINYYESQIEANVELKKSKKIQENLANLATVDYDSLEFREKQLYLKSLINKIYIDGEQVTIEWL

SEQ ID NO: 8152 - protein, 485 aa, synthetic construct
MTKKVAIYTRVSTTIQAEEGFSIDEQIDRLTKYAEAMDWQVSDTYTDAGFSGAKLERPAMQRLINDIGNKAFDTVLVYKLDRLSRNVRDTLYLVKEVFTKNKIDFISLNESIDTSSAMGSLFLTILSAINEFERENIKERMTMGKLGRAKSGKSMMWTKTAFGYYHNRKTGILEIVPLQATIVEQIFTDYLSGISLTKLRDKLNESGHIGKDIPWSYRTLRQTLDNPVYCGYIKFKDSLFEGMHKPIIPYETYLKVQKELEERQQQTYERNNNPRPFQAKYMLSGVARCGYCGAPLRIVLGHRRKDGSRTMEYHCANRFPRKTKGVTVYNDNKKCDSGTYDLSNLENTVIDNLIDFQENDDSLLKIINGSNQPILDTSSLKKQISQIDKKIQKNSDLYLNDFITMDELKDRTDSLQAEKKLLKAKISENKFNDSTDVFELVKTQLGSIPINELSYDNKKKIVNNLVSKVDVTADNVDIIFKFQLA

SEQ ID NO: 8153 - protein, 452 aa, synthetic construct
MKAAIYIRVSTQEQVGNYSIQAQTEKLTALCRSKDWDVYDIFIDGGYSGSNMNRPALNEMLSKLHEIDAVVVYRLDRLSRSQRDTTTLIEEHFLKNNVEFVSLSETLDTSSPFGRAMIGILSVFAQLERETIRDRMVMGKIKRIEAGLPLTTAKGRTFGYDVVDTRLYINEEEARQLQLIYDIFEEEQSITSLQKRLKKLGFEVRAYNRYSNWLTNDLYCGYVSYKDKVHVKGIHEPIISEEQFYRVQEIFTRMGKNPNMNRDSASLLNNLVVCGKCGLSFVHRSKDTMSRGKKYHYRYYSCKTYKHTHELEKCGNKTWRADKLEELIISRVNNYSFASRSVDKEDELDSLNEKLKIEHAKKKRLFDLYINGSYEVSELDSMMSDINAQINYYESQIEANEELKEDKKIQENLAELATVDFDSLEFREKQLYLKSLINKIYIDGEQVTIEWL

SEQ ID NO: 8154 - protein, 469 aa, synthetic construct
MSYTTPVRAAVYLRISEDRSGEQLGVARQREDCLKLCDQRKWVPVEYLDNDVSASTGKRRPAYEQMLADITAGKIAAVVAWDLDRLHRRPIELEAFMSLADEKRLALATVAGDVDLATPQGRLVARLKGCVAAHETEHKKARQRRAARQKAERGHPNWSKAFGYLPGPNGPEPDPRTAPLVKQAYADILAGASLGDVCRQWNDAGAFTITGRPWTTTTLSKFLRKPRNAGLRAYKGARYGPVDRDTIVGKAQWSPLVDEAIFWAAQAVLDAPGRAPGRKSVRRHLLTGLAGCGKCGNHLAGSYRTDGQVVYVCKVCHGVSILADNIEPMLYHIVVERLAMPDAVDMLRREIHDAAEAETIRLELETLYGELDRLAVERAEGLLTARQVKISTDIVNAKITKLQARQLDQERLRVFDGIPLGTPQVAGVIAELSPDRFRAVLDVLAEVVVQPVGKSGRIFNPERVQVNWR

SEQ ID NO: 8155 - protein, 452 aa, synthetic construct
MKAAIYIRVSTREQVENYSIQAQTEKLTALCRSKDWDVYDIFIDGGYSGSNMNRPALNEMLSKLHEIDAVVVYRLDRLSRSQRDTITLIEEYFLKNNVEFVSLSETLDTSSPFGRAMIGILSVFAQLERETIRDRMVMGKIKRIEAGLPLTTAKGRTFGYDVIDTKLYINEEEAKQLQLIYDIFEEEQSITFLQKRLKKLGFKVRTYNRYNNWLTNDLYCGYVSYKDKVHVKGIHEPIISEEQFYRVQEIFTRMGKNPNMNRGSASLLNNLVVCSKCGLGFVHRRKDIMSRGKKYHYRYYSCKTYKHIHELEKCGNKIWRADKLEELIINRVNDYSFAGRNAVKEEELDSLNEKLKIEHAKKKRLFDLYINGSYEVSELDSMMKDIDAQINYYESQIEANEELRKNKKIQENLADLATVDFDSLEFREKQLYLKSLINKIYIDGEQVTIEWL

SEQ ID NO: 8156 - protein, 469 aa, synthetic construct
MSYTTPVRAAVYLRISEDRSGEQLGVARQREDCLKLCDQRRWVPVEYLDNDVSASTGKRRPAYEQMLADITAGKIAAVVAWDLDRLHRRPIELEAFMSLADEKRLALATVAGDVDLATPQGRLVARLKGSVAAHETEHKKARQRRAARQKAERGYPNWSKAFGYLPGPNGPEPDPRTAPLVKQAYAGILAGASLGDVCRQWNDAGAFTITGRPWTATTLSKFLRKPRNAGLRAYKGARYGPVDRDAIVGKAQWSPLVDEATFWAAQAVLDAPGRAPGRKSVRRHLLTGLAGCGKCGNHLAGSYRTDGRVVYVCKVCHGVAILADNIEPILYHIVAERLAMPDAVDLLRREIHDAAEAETIRLELETLYGELDRLAVERAEGLLTARQVKISTDIVNAKITKLQACQQDQERLRVLEGIPLGTPQVAGAIAELSPDRFRAVLDVLAEVVVQPVGKSGRIFNPERVQVNWR

SEQ ID NO: 8157 - protein, 452 aa, synthetic construct
MKAAIYIRVSTQEQVENYSIQAQTEKLTALCRSKDWDVYDIFIDGGYSGSNMNRPALNEMLSKLHEIDAVVVYRLDRLSRSQRDTTTLIEEYFLKNNVEFVSLSETLDTSSPFGRAMIGILSVFAQLERETIRDRMVMGKIKRIEAGLPLTTAKGRTFGYDVIDTKLYINEEEAKQLQLIYDIFEEEQSITSLQKRLKKLGFRVRTYNRYNNWLTNDLYCGYVSYKDKVHVKGIHEPIISEEQFYRVQEIFTRMGKKPNVNRDSASLLNNLVVCSKCGLSFVHRSKDTMSRGKKYHYRYYSCKTYKHTHELEKCGNKTWRADKLEELIISRVNNYSFASRNVDKEDELDSLNEKLKIEHAKKKRLFDLYINGSYEVSELDSMMSDIDAQINYYESQIGAYEELKKTKKIQENLADLATVDFDSLEFREKQLYLKSLINKIYVDGEQVTIEWL

SEQ ID NO: 8158 - protein, 452 aa, synthetic construct; identical to SEQ ID NO: 8050

SEQ ID NO: 8159 - protein, 452 aa, synthetic construct
MKAAIYIRVSTQEQVGNYSIQAQTEKLTALCRSKDWDVYDIFIDGGYSGSNMDRPALSEMLSKLHEIDAVVVYRLDRLSRSQRDTTTLIEEYFLKNNVEFVSLSETLDTSSPFGRAMIGILSVFAQLERETIRDRMVMGKIKRIEAGLPLTTAKGRTFGYDVIDTKLYINEEEAKQLRLIYDIFEEEQSITSLQKRLKKLGFKVRTYNRYSSWLTNDLYCGYVSYKDKVHVKGIHEPIISEEQFYRVQEIFTRMGKNPNMNRGSASLLNNLVVCSKCGLGFVHRSKDTMSRGKKYHYRYYSCKTYKHTHELEKCGNKTWRADKLEELIINRVNNYSFASRNADKEDELDSLNEKLKIEHARKKRLFDLYINGSYEVSELDSMMNDIDAQINYYESQIEASEELKKNKKIQENLADLATVDFDSLEFREKQQYLKSLINKIYIDGEQVTIEWL

SEQ ID NO: 8160 - protein, 452 aa, synthetic construct
MKAAIYIRVSTREQVENYSIQAQTEKLTALCRSKDWDVYDIFIDGGYSGSNMNRPALNEMLSKLHEIDAVVVYRLDRLSRSQRDTITLIEEYFLKNNVEFVSLSETLDTSSPFGRAMIGILSVFAQLERETIRDRMVMGKIKRIEAGLPLTTAKGRTFGYDVIDTKLYINEGEAKQLRLIYDIFEEEQSITFLQKRLKKLGFKVRTYSRYNNWLTNDLYCGYVSYKDKVHVKGIHEPIISEEQFYRVQEIFTRMGKNPNVNRDSASLLNNLVVCSKCGLGFVHRRKDTMSRGKKYHYRYYSCKTYKHTHELEKCGNKIWRADKLEELIIDRVNNYSFASRNAGKEDELDSLNEKLKIEHAKKKRLFDLYINGSYEVSELDSMMSDIDAQINYYESQIEANVELKKNKKIQENLANLATVDYDSLEFREKQLYLKGLINKIYIDGEQVTIEWL

SEQ ID NO: 8161 - protein, 452 aa, synthetic construct
MKAAIYIRVSTREQVENYSIQAQTEKLAALCRSKNWDVYDIFVDGGYSGSNMNRPALNEMLSKLHEIDAVVVYRLDRLSRSQRDTITLIEEYFLKNNVEFVSLSETLDTSSPFGRAMIGILSVFAQLERETIRDRMVMGKIKRIEAGLPLTTAKGRTFGYDVIDTKLYINEEEAKQLRLIYDIFEEEQSITFLQKRLKKLGFKVHTYNRYNNWLTNDLYCGYVSYKDKVHVRGIHEPIISEEQFYRVQEIFTRMGKNPNMNRDSASLLNNLVVCSKCGLGFVHRRKDAMSRDKKYHYRYYSCKTYKHIHELEKCGNKIWRADKLEELIINRVNNYSLASRNVDKEDELDSLNEKLKIEHAKKKRLFDLYINGRYEMSELDSMMNDIDAQINYYESRIDANEGLKRNKKIQENLADLATVDFDSLEFREKQLYLKSLISKIYIDGEQVTIEWL

SEQ ID NO: 8162 - protein, 469 aa, synthetic construct
MCYTTPVRAAVYLRISEDRSGEQLGVARQREDCLKLCGQRKWVPVEYLDNDVSASTGKRRPAYEQMLADITAGKIAAVVAWDLDRLHRRPIELEAFMSLADEKRLALATVAGDVDLATPQGRLVARLKGSVAAHETEHKKARQRRAARQKAERGYPNWSKAFGYLPGPNGPEPDPRTAPLVKQAYADILAGASLGDVCRRWNGAGAFTITGRPWTTTTLSKFLRKPRNAGLRAYKGARYGPVDRDAIVGKAQWSPLVDEATFWAAQAVLDAPGRAPGRKSVRRHLLTGLAGCGKCGNHLAGSYRTDGRVVYVCKACHGVAILADNIEPILYHIVAERLAMPDAEDLLRREIHDTAEAEAIHLELEALYGELDRLAVERAEGLLTARQVKISTDIVSARITKLQARQQDQERLRVLDGIPLGTPQVEGVIAELSPDRFRAVLDVLAEVVVRPVGKGGRISNPERVQVNWR

SEQ ID NO: 8163 - protein, 485 aa, synthetic construct
MTKKVAIYTRVSTTNQAEEGFSIDEQIDRLTKYAEAMGWQVSDTYTDAGFSGAKLERPAMQRLINDIENKAFDTVLVYKLDRLSRSVRDTLYLVKDVFTKNKIDFISLNESINTSSAMGSLFLTILSAINEFERENIKERMTMGKLGRAKSGKSMMWTKTAFGYYHNRKTGILEIVPLQATIVEQIFTDYLSGISLTKLRDKLNESGHIGKDIPWSYRTLRQTLDNPVYCGYIKFKDSLFEGMHKPIIPYETYLKVQKELEERQQQTYERNNNPRPFQAKYMLSGMARCGYCGAPLRIVLGHKRKDGSRTMKYHCANRFPRKTKGVTVYNDNKKCDSGTYDLSNLENTVIDNLIGFQENNDSLLKIINGNNQPILDTSSFKKQISQIDKKIQKNSNLYLNDFITMDELKDRTDSLQAEKRLLKAKINENKFIDSTVVFELVKTQLGSIPINELSYDNKKKIVNNLVSKVDVTADNVDIIFKFQLA

SEQ ID NO: 8164 - protein, 469 aa, synthetic construct
MCYTTPVRAAVYLRISEDRSGEQLGVARQREDCLKLCGQRKWVPVEYLDNDVSASTGKRRPAYEQMLADITAGKIAAVVAWDLDRLHRRPIELEAFMSLADEKRLALATVAGDVDLATPQGRLVARLKGCVAAHETEHKKARQRRAARQKAERGHPNWSKAFGYLPGPNGPEPDPRTAPLVKQAYADILAGASLGGVCRQWNDAGAFTITGRPWTTATLSKFLRKPRNAGLRAYKGARYGPVDRDAIVGKAQWSPLVDEATFWAAQAVLDAPGRAPGKKSVRRHLLTGLAGCGKCGNHLAGSYRTDGRVVYVCKACHGVAILADNIEPILYHIVAERLAMPEAVDLLRRETHNAAEAETVRLELEALYGELDRLAVERAEGLLTARQVKISTDIVNAKITKLQARQLDQERLRVLDGIPLGTPQVAGMIAELSPDRFRAVLDVLAEVVVQPVGKGGRVFNPERVQVNWR

SEQ ID NO: 8165 - protein, 469 aa, synthetic construct
MSYTTPVRAAVYLRISEDRSGEQLGVARQREDCLKLCDQRKWVPVEYLDNDVSASTGKRRPAYEQMLADITAGKIAAVVAWDLDRLHRRPIELEAFMSLADEKHLALATVAGDVDLATPQGRLVARLKGSVAAHETEHKKARQRRAARQKAERGHPNWSKAFGYLPGPNGPELDPRTAPLVKQAYADILAGASLGDVCRRWNGAGAFTITGRPWTTTTLSKFLRKPRNAGLRAYKGARYGPVDRDAIVGKARWSPLVDETTFWAAQAVLDAPGRAPGRKSVRRHLLTGLAGCGKCGNHLAGSYRTDGRVVYVCKACHGVAILADNIEPILYHIVAERLAMPDAVDLLRREIHDTAEAETIRLELETLYGELDRLAVERAEGLLTARQVKISTDVVSAKITRLQARQLDQERLRVLDGIPLGTPQVASMIAELSPDRFRAVLDVLAEVVVQPVGKSGRIFNPERVQVNWR

SEQ ID NO: 8166 - protein, 485 aa, synthetic construct; identical to SEQ ID NO: 955

SEQ ID NO: 8167 - protein, 452 aa, synthetic construct
MKAAIYIRVSTREQVENYSIQAQTEKLTALCRSKDWDVYDIFIDGGYSGSNMNRPALNEMLSKLREIDAVVVYRLDRLSRSQRDTITLIEEYFLKNNVEFVSLSETLDTSSPFGRAMVGILSVFAQLERETIRDRMVMGKIKRVEAGLPLTTAKGRTFGYDVIDTKLYINEEEARQLQLIYDIFEEEQSITFLQKRLKKLGLKVRTYSRYNSWLTNDLYCGYVSYKDKVHVKGIHEPIISEEQFYRVQEIFTRMGKNPNMNRDSASLLNNLVVCSKCGLGFVHRRKDTVSRGKKYHYRYYSCKTYKHTHELEKCGNKIWRADKLEELIINRVNNYSLASRNVDKEDELDSLNEKLKIEHAKRKRLFDLYINGSYEVSELDSMMNDIDAQISYYESQIEANEELKKNRKIQENLADPATVDFDSLEFREKQLYLKSLINKIYIDGEQVTIEWL

SEQ ID NO: 8168 - protein, 452 aa, synthetic construct
MKAAIYIRVSTREQVENYSIQAQTEKLTALCRSKDWDVYDIFIDGGYSGSNMNRPALNEMLSRLHEIDAVVVYRLDRLSRSQRDTITLIEEYFLKNNVEFVSLSETLDTSSPFGRAMIGILSVFAQLERETIRDRMVMGKIKRIEAGLPLTTAKGRTFGYDVIDTKLYINEEEAKQLQLIYDIFEEEQSITFLQKRLKKLGFKVRTYSRYNDWLTNDLYCGYVSYKDKVHVKGIHEPIISEEQFYRVQEIFARMGKNPNMNRDSASLLNNLVVCSKCGLGFVHRRKDTMSRGKKYHYRYYSCKTYKHIHELEKCGNKIWRADKLEELIINRVSNYSFASRNVDKEDELDSLNEKLKIEHVKKKRLFDLYINGSYEVSELDSLMNDIDAQINYYESQIEASEELKKNKKIQENLADLATVDFDSLEFREKQLYLKSLINKIYIDGEQVTIEWL

SEQ ID NO: 8169 - protein, 485 aa, synthetic construct
MTKKVAIYTRVSTTNQAEEGFSIDEQIDRLTKYAEAMGWQVSDTYTDAGLSGAKLERPAMQRLINDIENKAFDTVLVYKLDRLSRSVRDTLYLVKDVFTKNKIDFISLNESIDTSSAMGSLFLTILSAINEFERENIKERMTMGKLGRAKSGKSMMWTKTAFGYYHNRKTGVLEIVPLQATIVEQIFTDYLSGISLTKLRDKLNESGHIGKDIPWSYRTLRQTLDNPVYCGYIKFKDSLFEGMHKPIIPYETYLKVQKELEERQQQTYERNNNPRPFQAKYMLSGMARCGYCGAPLKIVLGHKRKDGSRTMKYHCANRFPRKTKGVTVYNDNKRCDSGTYDLGNLENTVIDNLIGFQENNDSLLKIINGNNQPILDASSFKKQISQIDKKIQKNSDLYLNDFITMDELKDRTDSLQAEKKLLKAKISEDKFNDSTDVFELVKTQLGSIPINELSYDNKKKIVNNLVSKVDVTADNVDIIFKFQLA

SEQ ID NO: 8170 - protein, 485 aa, synthetic construct
MTKKVAIYTRVSTTNQAEEGFSIDEQVDRLTKYAEAMGWQVSDTYTDAGFSGAKLERPAMQRLINDIENKAFDTVLVYKLDRLSRSVRDTLYLVKDVFTKNKIDFISLNESINTSSAMGSLFLTILSAINEFERENIKERMTMGKLGRAKSGRSMMWTKTAFGYYHNRKTGILEIVPQQATIVEQIFTDYLSGISLTKLRDKLNESGHIGKDIPWSYRTLRRTLDNPVYCGYIKFKDSLFEGMHKPIIPYETYLKVQKELEERQQQTYERNNNPRPFQAKYMLSGVARCGYCGAPLKVVLGHKRKDGSRTMKYHCANRFPRKTKGVTVYNNNRKCDSGTYDLNNLESTVIDNLIGFQENNDSLLKIINGNNQPILDTSSFEKQISQIDKKIQKNSDLYLNDLITMDELRDRTDSLQVEKKLLKAKISENKFNDSTDVFELVKTQLGSIPINELSYDNKKKIVNNLVSKVDVTADNVDIIFKFQLA

SEQ ID NO: 8171 - protein, 452 aa, synthetic construct
MKAAIYIRVSTREQVENYSIQAQTEKLTALCRSKGWDVYNIFIDGGYSGSNMNRPALNEMLSKLHEIDAVVVYRLDRLSRSQRDTITLIEEYFLKNNVEFVSLSETLDTSSPFGRAMIGILSVFAQLERETIRDRMVMGKIKRVEAGLPLTTAKGRTFGYDVIDTKLYINEEEARQLQLIYDIFEEEQSITFLQKRLKKLGFKVRTYNRYNNWLTNDLYCGYVSYKDKVHVKGIHEPIISEEQFYRVQEIFTRMGKNPNMNRDSASLLNNLVVCSKCGLGFVHRRKDAMGRDKKYHYRYYSCKTYKHIHELEKCGNKIWRADKLEELIINRVNNYSFANRNADKEDELDSLNEKLKIEHAKKKRLFDLYINGSYEMSELDSMMNDIDAQINYYESQIEANEELKKNKKIRENLAYLATVGFDSLEFREKQLYLKSLINKIYIDGEQVTIEWL

SEQ ID NO: 8172 - protein, 452 aa, synthetic construct
MKAAIYIRVSTQEQVGNYSIQAQTEKLTALCRSKDWDVYDIFIDGGYSGSNMNRPALNEMLSKLHEIDAVVVYRLDRLSRSQRDTTTLIEEYFLKNNVEFVSLSETLDTSSPFGRAMIGILSVFAQLERETIRDRMVMGKIKRIEAGLPLTTAKGRTFGYDVIDTKLYINEEEAKQLQLIYDIFEEEQSITFLQKRLKKLGFKVRTYNRYSNWLTNDLYCGYVSYKDKVHVKGIHEPIISEEQFYRVQEIFTRMGKNPNMNRDNASLLSNLVVCSKCGLGFVHRSKDTMSRGKKYHYRYYSCKTYKHTHELEKCGNKTWRADKLEELIINRVNDYSFASRNVDKEDELDSLNEKLKVEHAKKKRLFDLYINGSYEVSELDSMMNDIDAQINHYESQIEANEELKKSKKIQENLADLATVDFDSLGFREKQLYLKSLINKIYIDGEQVTIEWL

SEQ ID NO: 8173 - protein, 452 aa, synthetic construct
MKAAIYIRVSTQEQVGNYSIQAQTEKLTALCRSKDWDVYDIFIDGGYSGSNLNRPALNEMLSKLHEIDAVVVYRLDRLSRSQRDTTTLIEEYFLKNNVEFVSLSETLDTSSPFGRAMIGILSVFAQLERETIRDRMVMGKVKRIEAGLPLTTAKGRTFGYDVIDTKLYINEEEAKQLRLIYDIFEEEQSITFLQKRLKKLGLKVRTYNRYNNWLTNDLYCGYVSYKDKVHVKGIHEPIISEEQFYRVQEIFTRMGKNPNMNRDSASLLNNLVVCSKCGLGFVHRSKDTMSRGKKYHYRYYSCKTYKHTHELEKCGNKTWRADKLEELIINRVNNYSFASRNVDKEDELDGLNEKLKIEHAKKRRLFDLYINGSYEVSELECMMNDIDAQINLYESQIEANEELKRNKKIQENLADLATVDFDSLEFREKRLYLKSLINKIYIDGEQVTIEWL

SEQ ID NO: 8174 - protein, 452 aa, synthetic construct
MKAAIYIRVSTREQVENYSIQAQTEKLTALCRSKDWDVYDIFIDGGYSGSNMNRPALNEMLSKLHEIDAVVVYRLDRLSRSQRDTITLIEEYFLKNNVEFVSLSETLDTSSPFGRAMIGILSVFAQLERETIRDRMVMGKIKRIEAGLPLTTAKGRTFGYDVVDTKLYINEEEAKQLQLIYDIFEEEQSITSLQKHLKKLGYKVRTYSRYNSWLTNDLYCGYVSYKDKVHVKGIHEPIISEEQFYRVQEIFTRMGKNPNMNRDSASLLSNLVVCSKCGLGFVHRRKDTTSRGKKYHYRYYSCKTYKHTHELEKCGNKIWRADKLEELIINRVDNYSFASRNVDKEDELDSLNEKLKTEHAKKRRLFDLYINGSYEVSELDSMMSDIDAQIDYYESQIEANEELKKNKKIQENLAGLATVDFDSLEFREKQLYLKSLINKIYIDGEQVTIEWL

SEQ ID NO: 8175 - protein, 469 aa, synthetic construct
MSYTTPVRAAVYLRISEDRSGEQLGVARQREDCLKLCDQRKWVPVEYLDNDVSASTGKRRPAYEQMLADITAGKIAAVVAWDLDRLHRRPVELEAFMSLADEKRLALATVAGDVDLATPQGRLVARLKGCVAAHETEHKKARQRRAARQKAERGLPNWSKAFGYLPGPNGPEPDPRTAPLVKQAYADILAGASLGDVCRQWNDAGAFTITGRPWTTTTLSKFLRKPRNAGLRAYKGVRYGPVDRDAIVGKAQWSPLVDEATFWAAQAVLDAPGRAPGRKSVRRHLLTGLAGCGKCGNHLAGSYRTDGRVVYVCKACHGVAILADNIEPILYHIVAERLAMPDAVDLLRREIHDAAEAETIRLELETLYGELDRLAVERAEGLLTARQVKISTDIVNAKITKLQARQQDQERLRVLDGIPLGTPQVAGMIAELSPDRFRAVLDVLAEVVVQPVGKSGRISNPERVQVNWR

SEQ ID NO: 8176 - protein, 452 aa, synthetic construct
MKAAIYIRVSTQEQVENYSIQAQTEKLTALCRSKDWDVYDIFIDGGYSGSNMNRPALNEMLSKLHEIDAVVVYRLDRLSRSQRDTITLVEEYFLKNNVEFVSLSETLDTSSPFGRAMIGILSVFAQLERETIRDRMVMGKIKRIEAGLPLTTAKGRTFGYDVIDTKLYINEEEAKQLRLIYDIFEEEQSITSLQKRLKKLGFRVRTYNRYNNWLTNDLYCGYVSYKDKVHVKGIHEPIISEEQFYRVQEIFTRMGENPNMNRDSASLLNNLVVCSKCGLGFVHRRKDTTSRGKKYHYRYYSCKTYKHTHELEKCGNKIWRADKLEELIISRVNNYSFASRNVDKEDELDSLNEKLKIEHAKKKRLFDLYINGSYEVSELDSMMNDIDARINYYESQIEANEEQKKDKKIQENLANLATVDYDSLEFREKQLYLKGLINKIYIDGEQVTIEWL

SEQ ID NO: 8177 - protein, 484 aa, synthetic construct
MTKKVAIYTRVSTTNQAEEGFSIDEQVDRLTKYAEAMGWVSDTYTDAGISGAKLERPAMQRLINDIENKAFDTVLVYKLDRLSRSVRDTLYLVKDVFTKNKIDFISLNESIDTSSAMGSLFLTILSAINEFERENIRERMTMGKLGRAKSGKSMMWTKTAFGYYHNRKTGILEIVPLQAAIVEQIFTDYLSGISLTKLRDKLNESGHIGKDIPWSYRTLRQTLDNPVYCGYIKFKDSLFEGKHKPIIPYETYLKVQKELGERQQQTYERNNNPRPFQAKYMLSGMARCGYCGAPLRIVLGHKRKDGSRTMKYHCANRFPRKTKGITVYNDNKKCDSGTYDLSDLENTVIDNLIGLQENNDSLLKIINGNNQPILDTNSFKEQISQIDKKIQKNSDLYLNDFITMDELKDRTDSLQAEKKLLKAKISENKFNDGTDVFELVKTQLGSIPINELSYDSKKKIVNNLVSKVDVTADNVDIIFKFQLA

SEQ ID NO: 8178 - protein, 469 aa, synthetic construct
MSYTTPVRAAVYLRISEDRSGEQLGVARQREDCLKLCGQRKWVPVEYLDNDVSASTGKRRPAYEQMLADITAGKIAAVVAWDLDRLHRRPIELEAFMSLADEKRLALATVAGDVDLATPQGRLVARLKGSVAAHETEHKKARQRRAARQKAERGLPNWSKAFGYLPGPNGPEPDPRTAPLVKQAYADILAGASLGDVCRQWNDAGAFTITGRPWTTTTLSKFLRKPRNAGLRAYKGARYGPVDRDAIVGRAQWSPLVDEATFWAAQAVLDAPGRAPGRKSVRRHLLTGLAGCGKCGNHLAGSYRTDGRVVYVCKACHGVAILADNIEPTLYHIVAERLAMPDAVDLLRREVHDAAEAETIRLELETLYGELDRLAVERAEGLLTARQVKISTDIVNAKITKLQARQLDQERLRVFDGIPLGTPQVAGMIAELSPDRFRAVLDVLAEVVVQPVGKSGRILNPERVQVNWR

SEQ ID NO: 8179 - protein, 452 aa, synthetic construct
MKAAIYIRVSTREQVENYSIQAQTEKLTALCRSKGWDVYDIFIDGGYSGSNMNRPALNEMLSKLHEIDAVVVYRLDRLSRSQRDTITLIEEYFLKNNVEFVSLSETLDTSSPFGRAMIGILSVFAQLERETIRDRMVMGKIKRIEAGLPLTTAKGRTFGYDVIDTKLYINEEEAKQLQLIYDIFEEVQSITFLQRRLKELGFKVRTYNRYNNWLTNDLYCGYVSYKDKVRVKGIHEPIISEEQFYRVQEIFTRMGKNPNMNRGSASLLNNLVVCSKCGLGFVHRRKDIVSRGKKYHYRYYSCKTYKHIHELEKCGNKIWRADKLEELIINRVNNYSVASRNVDKEDELDSLNEKLKIEHAKKKRLFDLYINGRYEVGELDSMMNDIDAQINYYESQIEANEELRKNKKIQGNLADLATVDFDSLEFREKQLYLKSLISKIYIDGEQVTIEWL

SEQ ID NO: 8180 - protein, 452 aa, synthetic construct
MKAAIYIRVSTREQVENYSIQAQTEKLTALCRSKDWDVYDIFIDGGYSGSNMNRPALNEMLSKLREIDAVVVYRLDRLSRSQRDTITLIEEYFLKNNVEFVSLSETLDTSSPFGRAMIGILSVFAQLERETIRDRMVMGKIKRIEAGLPLTTAKGRTFGYDVIDTKLYINEEEAKQLQLIYDIFEEEQSITFLQKRLKKLGFKVRTYNCYNNWLTNDLYCGYVSYKDKVHVKGIHEPIISEEQFHRVQEIFTRMGKNPNMNRDSASLLNNLVVCGKCGLGFVHRRKDAMSRDKKYHYRYYSCKTYKHIHELEKCGNKIWRADKLEELIINRVNNYSLASRNVDKEDELDSLNEKLKIEHAKKKRLFDLYINGSYEVSELDSMMNDIDAQINYYESQIEANEGLKKNKKIQENLADLATVDFDSLEFREKQLYLKSLINKIYIDGEQVTIEWL

SEQ ID NO: 8181 - protein, 452 aa, synthetic construct
MKAAIYIRVSTREQIENYSIQAQTEKLTALCRSKDWDVYDIFIDGGYSGSNMNRPALNEMLSKLHEIDAVVVYRLDRLSRSQRDTITLIEEYFLKNNVEFVSLSETLDTSSPFGRAMIGILSVFAQLERETIRDRMVMGKIKRIEAGLPLTTAKGRTFGYDVIDTKLYINEEEAKQLQLVYDIFEEEQSITFLQKRLKKLGFKVHTYNRYNNWLTNDLYCGYVSYKDKVHVKGIHEPIISEEQFYRVQEIFTRMGKNPNVNRGSASLLNNLVVCSKCGLGFVHRRKDAMSRDKKYHYRYYSCKTYKHIHELEKCGNKIWRADKLEELIINRVNNYSLASRNVDKEDELDSLNEKLKIEHAKKKRLLDLYINGSYEVSELDSVMSDIDAQITYYESQIEANEELKKNKKIQEDLAHLATVDFDSLEFREKQLYLKSLINKIYIDGEQVTIEWL

SEQ ID NO: 8182 - protein, 485 aa, synthetic construct
MTKKVAIYTRVSTTSQAEEGFSIDEQIDRLTKYAEAMGWQVSDTYTDAGFSGAKLGRPAMQRLINDIENKAFDTVLVYKLDRLSRSVRDTLYLVEDVFTKNKIDFISLNESIDTGSAMGSLFLTILSAINEFERENIKERMTMGKLGRAKSGKSMMWTKTAFGYYHNRETGILEIVPLQATIVEQIFTDYLSGISLTKLRDKLNESGHIGKDIPWSYRTLRQTLDNPVYCGYIKFKDSLFEGMHKPIIPYETYLKVQKELEERQQQTYERNNNPRPFQAKYMLSGVARCGYCGAPLRIVLGHKRKDGSRTMKYHCANRFPRKTKGVTVYNDNKKCDSGTYDLSNLENTVIGNLIGFQENNDSLLKIINGNNQPILDTSSFKKQISQIDKKVQRNSDLYLNDFITMDELRDRTDSLQAERRLLKAKISENRLNDSTDVLELVKAQLGSIPINELSYDNKKKIVNNLVSKVDVTADNVDIVFKFQLA

SEQ ID NO: 8183 - protein, 469 aa, synthetic construct; identical to SEQ ID NO: 3706

SEQ ID NO: 8184 - protein, 452 aa, synthetic construct
MKAAIYIRVSTREQVENYSIQAQTEKLTALCRSKDWDVYDIFIDGGYSGSNMNRPALNEMLSKLHEIDAVVVYRLDRLSRSQRDTITLIEEYFLKNNVEFVSLSETLDTSSPFGRAMIGILSVFAQLERETIRDRMVMGKIKRIEAGLPLTTAKGRTFGYDVIDTKLYINEEEAKQLQLIYDIFEEEQSITFLQKRLKELGFKVRTYNRYNNWLTNDLYCGYVSYKDKVHVKGIHEPIISEEQFYRVQEIFTRMGKNPNMNRGSASLLNNLVVCSKCGLGFVHRRKDAMSRDKKYHYRYYSCKTYKHIHELEKCGNKIWRADKLEELIINRVNNYSLASRNVGKEDELDSLNEKLKIEHAKKRRLFDLYINGNYEVSELDSMMNDIDAQINYYESQIEANKELRKNRKIQENLAHLATVDFDSLEFREKQLYLKSLINKIYIDGEQVTIEWL

SEQ ID NO: 8185 - protein, 485 aa, synthetic construct
MTKKVAIYTRVSTTNQAEEGFSIDEQIDRLTRYAEAMGWQVSDTYTDAGFSGAKLERPAMQRLINDIENKAFDTVLVYRLDRLSRSVRDTLYLVKDVFTKNNIDFISLNESINTSSAMGSLFLTILSAINEFERENIKERMTMGKLGRAKSGKSMMWTKTAFGYYHNRKTGILEIVPLQATIVEQIFTDYLSGVSLTKLRDKLNESGHIGKDIPWSYRTLRQTLDNPVYCGYIKFKDSLFEGMHKPIIPYETYLRVQKELEERQQQAYERNNNPRPFQAKYMLSGIARCGYCGAPLRIVLGHRRKDGSRTMKYHCANRFPRKTKGVTVYNDNKKCDSGTYDLSNLENIVIDNLIGFQENNDSLLKIINGNNQPILDTSSIKKQISQIDKKIQKISDLYLNDFITMDELKDRTDSLQAEKKLLKAKISENKFNDNTDVFELVKTRLGSIPINELSYDNKKKIVNNLVSKVDVTADNVDIIFKFQLT

SEQ ID NO: 8186 - protein, 452 aa, synthetic construct
MKAAIYIRVSTREQVENYSIQAQTERLTALCRSKDWDVYDIFIDGGYSGSNMNRPALNEMLSKLHEIDAVVVYRLDRLSRSQRDTITLIEEYFLKNNVEFVSLSETLDTSSPFGRAMIGILSVFAQLERETIRDRMVMGKIKRVEAGLPLTTAKGRTFGYDVIDTKLYINEEEAKQLQLIYDIFEEEQSITFLQKRLKKLGFKVRTYSRYNSWLTNDLYCGYVSYKDKVHVKGIHEPIISEEQFRRVQEIFTRMGKNPNVNRDSASLLSNLVVCSKCGLSFVHRRKDTMSRGKKYHYRYYSCKTYKHTHELEKCGNKIWRADKLEELIISRVNNYSLASRNVGIEDELDSLNKKLKIEHAKKKRLFDLYIDGSYEVSELDSMMNDIDAQINHYESQIEANEELKKSKKIQKNLADLATVDYDSLEFREKQLYLKSLINKIYIDGEQVTIEWL

SEQ ID NO: 8187 - protein, 452 aa, synthetic construct
MKAAIYIRVSTREQVENYSIQAQTEKLTALCRSKDWDVYDIFIDGGYSGSNMNRPALSEMLSKLHEIDAVVVYRLDRLSRSQRDTITLIEEYFLKNNVEFVSLSETLDTSSPFGRAMIGILSVFAQLERETIRDRMVMGKIKRIEAGLPLTTAKGRTFGYDVIDTKLYINEEEAKQLQLIYDIFEEEQSITFLQKRLKKLGFKVRSYNRYNNWLTNDLYCGYVSYKDKVHVKGIHEPIISEEQFYRVQEIFTRTGKNPNMNRDSASLLSNLVVCSKCGLGFVHRRKDTTSRGKKYHYRYYSCKTYKHTHELEKCGNKIWRADKLEELIINRVNNYSFANRNADKEDELDSLNEKLKIEHAKKKRLFDLYINGSYNVSELDSMMSDIDAQINYYESQIEANGELKKNKKIQENLADLATVDFDSLEFREKQLYLKSLINKIYVDGEQVTIEWL

SEQ ID NO: 8188 - protein, 485 aa, synthetic construct
MTKKVAIYTRVSTTNQAEEGFSIDEQVDRLTKYAEAMGWQVSDTYTDAGFSGAKLVRPAMQRLINDIENKAFDTVLVYKLDRLSRSVRDTLYLVKDVFTKNKIDFISLNESIDTSSAMGSLFLTILSAINEFERENIKERMTMGKLGRAKSGKSMMWAKTAFGYYHNRKTGILEIVPLQATIVEQIFTDYLSGISLTKLRDKLNEGGHIGKDIPWSYRTLRQTLDNPVYCGYIKFKDSLFEGMHKPIIPYETYLRVQKELEERQQQTYERNNNPRPFQAKYMLSGMARCGYCGAPLRIVLGRKRKDGSRTMKYHCANRFPRKTKGITVYNDNKKCDSGTYDLSSLENTVIDTLIGFQENSDSLLKIINGNNQPILDTSSFKKQISQIDKKIQKNSDLYLNDFITMGELKDRTDSLRAEKKLLIAKISENKFNGSIDVFELVKTQLGSIPINELSYDNKKKIVNNLVSKVDVTADNVDIIFKFQLA

SEQ ID NO: 8189 - protein, 452 aa, synthetic construct
MKAAIYIRVSTREQVENYSIQAQTEKLTALCRSKDWDVYDIFIDGGYSGSNMNRPALNEMLSKLHEIDAVVVYRLDRLSRSQRDTITLIEEYFLKNNVEFVSLSETLDTSSPFGRAMIGILSVFAQLERETIRDRMVMGKIKRIEAGLPLTTAKGRTFGYDVIDTKLYINEEEAKQLQLIYDIFEEEQSITFLQKRLKKLGFKVRTYSCYNNWLTNDLYCGYVSYKDKVHVKGIHEPIISEEQFYRVQEIFTRMGKNPNINRDSASLLNNLVVCSKCGLGFVHRRKDTMSRGKKYHYRYYSCKTYKHIHELEKCGNKIWRADKLEELIINRVNNYSVASRNVDIEDELDSLNEKLKIEHAKKKRLFDLYINGSYEVSELDSMMNDIDAQIDYYESQIGANEELRKNKKIQENLANLATVDYDSLEFREKQLYLKSLINKIYIDGEQVTIEWL

SEQ ID NO: 8190 - protein, 452 aa, synthetic construct
MKAAIYIRVSTREQVENYSIQAQTEKLTALCRSKDWDVYDIFIDGGYSGGNMNRPALNEMLSKLHEIDAVVVYRLDRLSRSQRDTITLIEEYFLKNNVEFVSLSETLDTSSPFGRAMIGILSVFAQLERETIRDRMVMGKIKRIEAGLPLTTAKGRTFGYDVIDTKLYINEEEAKQLQLIYDIFEEEQSITFLQKRLKKLGFKVRTYNRYNSWLTNDLYCGYVSYKDKVHVKGIHEPIISEEQFRRVQEIFTRTGKNPNMNRDSASLLNNLVVCSKCGLGFVHRRKDTMSRGKKYHYRYYSCKTYKHTHELEKCGNKIWRADKLEELIINRVNNYSFASRNVDKAEELDSLNEKLKAEHAKKKRLFDLYINGSYNVSELDSMMNDIDAQINYYESQIEANEELKKNKKIQENLAGLATVDFDSLEFREKQLYLKSLINKIYIDGEQVTIEWL

SEQ ID NO: 8191 - protein, 485 aa, synthetic construct
MTKKVAIYTRVSTTNQAEEGFSIDEQIDRLIKYAEAMGWQVSGTYTDAGFSGAKLERPAMQRLINDIENKAFDTVLVYKLDRLSRSVRDTLYLVKEVFTKNKIDFISLNESIDTSSAMGSLFLTILSAINEFERENIKERMTMGKLGRAKSGKSMMWTKTAFGYYHNRKTGILEIVPLQATIVEQIFTDYLSGISLTKLRDKLNESGHIGKDIPWSYRTLRQTLDNPVYCGYIKFKDSLFEGMHKPIIPYETYLKVQRELEERQQQAYERNNNPRPFQAKYMLSGMARCGYCGAPLRIVLGHKRKDGSRAMKYHCANRFPRKTKGVTVYNDNKKCDSGTYDLSNLENTVIDNLIGFQENNDSLLKIINGSNQPIPDTSSFEKQISQIDKKIQKNSDLYLNDFVTMDELKDRTDSLQAEKKLLKAKISENKFNDSTDVFELVRTQLGSIPINELSYDNKKKIVNNLVSKVDVTADNVDIIFKFQLA

SEQ ID NO: 8192 - protein, 452 aa, synthetic construct
MKAAIYIRVSTQEQVGNYSIQAQTEKLTALCRSKGWDVYDIFIDGGYSGSNMNRPALNEMLSKLREIDAVVVYRLDRLSRSQRDTTTLIEEYFLKNNVEFVSLSETLDTSSPFGRAMIGVLSVFAQLERETIRDRMVMGKIKRIEAGLPLTTAKGRTFGYDVIDTKLYINEEEAKQLQLIYDIFEEEQSITSLQKRLKKLGFKVRTYNRYNNWLTNDLYCGYVSYKDKVHVKGIHEPIISEEQFYRVQEIFTRMGKNPNMNRDSASLLNNLVVCSKCGLGFVHRSKDTMCRGKKYHYRYYSCKTYKHTHELEKCGNKIWRADKLEELIINRVNNYSFASRNVGKEDELDSLYEKLKIEHAKKKRLFDLYINGGYEVSELDSMMNDIDAQINYYESQIEANEELKKSKKIQENLADLATVDFDSLEFREKQLYLKSLINKIYIDGEQVTIEWL

SEQ ID NO: 8193 - protein, 452 aa, synthetic construct
MKAAIYIRVSTQEQVENYSIQAQTEKLTALCRSKDWDVYDIFIDGGYSGSNMNRPALNEMLSKLHEIDAVVVYRLDRLSRSQRDTTTLIEEYFLKNNVEFVSLSETLDTSSPFGRAMIGILSVFAQLERETIRDRTVMGKIKRIEAGLPLTTAKGRTFGYDVIDTKLYINEEEAKQLQLIYDIFEEVQSITSLQKRLKKLGFKVRTYNRYNNWLTNDLYCGYVSYKDKVHVKGIHEPIISEEQFYRVQEIFTRMGKNPNMNRDSASLLNSLVVCSKCGLGFVHRSKDTMNRGKKYHYRYYSCKTYKHTHELEKCGNKTWRADKLEELIINRVNNYSFASRNVDKEGELDSLNEKLKIEHAKKRRLFDLYINGSYEVSELDSMMNDIDVQISYYESQIEANEELKKNKKIQENLANLATVDFDSLEFREKQLYLKSLINKIYIDGEQVTIEWL

SEQ ID NO: 8194 - protein, 452 aa, synthetic construct
MKAAIYIRVSTREQVENYSIQAQTEKLTALCRSKGWDVYDIFIDGGYSGSNMNRPALNEMLSKLHEIDAVVVYRLDRLSRSQRDTITLIEEYFLKNNVEFVSLSETLDTSSPFGRAMIGILSVFAQLERETIRDRMVMGKIKRIEAGLPLTTAKGRTFGYDVIDTKLYINEEEAKQLQLIYDIFEEEQSITFLQKRLKELGFKVRTYSRYNNWLTNDLYCGYVSYKDKVHVRGIHEPIISEEQFYRVQEIFTRMGRNPNMNRDSASLLNNLVVCCKCGLSFVHRRKDTTSRGKKYHYRYYSCKTYKHTHELEKCGNKIWRADKLEELIINRVNNYSFASRNVDKEDELDSLNEKLKIEHAKKKRLFDLYINGSYEVSELDCMMNDIDAQINYYESQIEANEELKKDKKIQESLANLATVDYDSLEFREKQLYLKSLINKIYIDGEQVTIEWL

SEQ ID NO: 8195 - protein, 452 aa, synthetic construct
MKAAIYIRVSTREQVENYSIQAQTEKLTALCRSKDWDVYDIFIDGGYSGSNMNRPALNEMLNKLHEIDAVVVYRLDRLSRSQRDTITLIEEYFLKNNVEFVSLSETLDTSSPFGRAMIGILSVFAQLERETIRDRMVMGKIKRIEAGLPLTTAKGRTFGYDVIDTKLYINEEEAKQLRLIYDIFEEEQSITFLQKRLKKLGFKVRTYSCYNNWLTNDLYCGYVSYKDKVHVKGIHEPIISEEQFYRVQEIFARMGKNPNMNRDSASLLNNLVVCSKCGLGFVHRRKDAASRDKKYHYRYYSCKTYKHIHELEKCGNKIWRADKLEELIINRVNNYSLASRNVDKEDGLDSLNEKLKIEHAKKKRLFDLYINGSYEVSELDSMMNDIDAQINYYESQIEANEELKKNKKIQENLANLATVDFDSLEFREKQLYLKSLINKIYIDGEQVTIEWL

SEQ ID NO: 8196 - protein, 485 aa, synthetic construct
MTKKVAIYTRVSTTNQAEEGFSIDEQIDRLTKYAEAMGWQVSGTYTDAGLSGAKLERPAMQRLINDIENKAFDTVLVYKLDRLSRSVRDTLYLVKDVFTKNKIDFISLNESIDTSSAMGSLFLTILSAINEFERENIKERMTMGKLGRAKSGKSMMWTKTAFGYYHNRKTGILEIVPPQAAIVEQIFTDYLSGISLTKLRDKLNESGHIGKDIPWSYRTLRQTLDNPVYCGYVKFKGSLFEGMHKPIIPYETYLKVQKELEERQQQTYERNNNPRPFQAKYMLSGMARCGYCGAPLRIVLGHKRKDGSRTMKYHCANRFPRKTKGVTVYNDNKKCDSGTYDLSNLENTVIDNLIDFQENNDSLLKIINGNNQPTLDTSSFKKQISQIDKKIQKNSELYLNGFITMDELKDRTDSLQAEKKLLKAKISENKFNDSTDVFELVKSQLGSIPINELSYENKKKIVNNLVSKVDVTADNVDIIFKFQLA

SEQ ID NO: 8197 - protein, 452 aa, synthetic construct
MKAAIYIRVSTQEQVGNYSIQAQTEKLTALCRSKDWDVYDIFIDGGYSGSNMNRPALNEMLSKLHEIDAVVVYRLDRLSRSQRDTTTLIEEYFLKNNVEFVSLSETLDTSSPFGRAMIGILSVFAQLERETIRDRMVMGKIKRIEAGLPLTTAKGRTFGYDVIDTKLYINEEEAKQLQLIYDIFEEEQSITFLQKRLKKLGFKVRTYNRYNNWLTNDLYCGYVSYKDIVHVKGIHEPIISEEQFYRVQEIFTRMGKNPNMNRDSASLLNNLVVCSKCGLGFVHRSKDTMCRGKKYHYRYYSCKTYKHTHELEKCGNKTWRADKLEELIINRVNNYSFASRNVGKEDELDSLNEKLKIEHAKKKRLFDLYINGSYEVSELDSMMNDIDAQINYYESRIGANEELKKAKKIREDPADLATVDFGSLEFREKQLYLKSLINKIYIDGEQVTIEWL

SEQ ID NO: 8198 - protein, 469 aa, synthetic construct
MSYTTPVRAAVYLRISEDRSGEQLGVARQREDCLKLCDQRKWEPVEYLDNDVSASTGKRRPAYEQMLADITAGKIAAVVAWDLDRLHRRPIELEAFMSLADEKRLALATVAGDVDLATPQGRLVARLKGSVAAHETEHKKARQRRAARQKAERGHPNWSKAFGYLPGLNGPEPDPRTAPLVKQAYTDILAGASLGDVCRQWNAAGAVTITGRPWTTTTLSKFLRKPRNAGLRAYKGARYGPVDRDAIVGKAQWSPLVDEATFWAAQAVLDAPGRAPGRKSVRRHLLTGLAGCGKCGYHLAGSYRTDGRVVYVCKACHGVAILADNIEPTLYHIVAERLAMPDAVDLLRREIHDAAEAETIRLELETLHGELDRLAVERAEGLLTARQVKISTDIVDAKITKLQARQLDQERLRVFEGIPLGTPQVAGMIAELSPDRFRAVLDVLAEVVVQPVGKSGRIFSPERVQVNWR

SEQ ID NO: 8199 - protein, 485 aa, synthetic construct
MTKKVAIYTRVSTTNQAEEGFSIDEQVDRLTKYAEAMGWQVSDTYTDAGSSGAKLERPAMQRLINDIENKAFDTVLVYKLDRLSRSVRDTLYLVKDVFTKNKIDFISLNESIDTSSAMGSLFLTILSAINEFERENIKERMTMGKLGRAKSGKSMMWTKTAFGYYHNRKTGILEIVPLQATIVEQIFTDYLSGISLTKLRDKLNESGHIGKDIPWSYRTLRQTLDNPVYCGYIKFKDSLFEGMHKPIIPYETYLKVQKELEERQQQTYERNNNPRPFQAKYMLSGMARCGYCGAPLRIVLGHKRKDGSRTMKYHCTNRFPRKTKSITVYNDNKKCDSGTYDLSNLENTVIDNLVGLQENNDSLLKIINGNNQPILDTSSFEKQISQIDKKIQKNSELYLNDFITMDELKARTVSLQAEKKLLKAKISENKFNDSTDVFELVKTQLGSIPINELSYDNKKKIVNNLVSKVDVTADNVDIIFKFQLA

SEQ ID NO: 8200 - protein, 452 aa, synthetic construct
MKAAIYIRVSTREQVENYSIQAQTEKLTALCRSKDWDVYDIFIDGGYSGSNMNRPALNEMLSKLHEIDAVVVYRLDRLSRSQRDTITLIEEYFLKNNVEFVSLSETLDTSSPFGRAMIGILSVFAQLERETIRDRMVMGKIKRIEAGLPLTTAKGRTFGYDVIDTKLYINEEEAKQLQLIYDIFEEEQSITFLQKRLKKLGFKVRTYNCYNNWLTNDLYCGYVSYKDKVHVKGIHEPIISEEQFYRVQEIFTRKGKNPNMNRDSASLLNNLVVCGKCGLGFVHRRKDTVSRGKKYHYRYYSCKTYKHIHELEKCGNKTWRADKLEELIINRVNNHSFASRNVDKEDELDCLNEKLKIEHAKKRRLFDLYINGSYEVSELDSMMNDIDAQINYYESQIEANEGLKKNKKIQENLADLATMDFDSLEFREKQLYLKSLINKIYIDGEQVTIEWL

SEQ ID NO: 8201 - protein, 452 aa, synthetic construct
MKAAIYIRVSTREQVENYSIQAQTEKLTALCRSKDWDVYDVFIDGGYSGSNMNRPALNEMLSKLHEIDAVVVYRLDRLSRSQRDTITLIEEYFLKNNVEFVSLSETLDTSSPFGRAMIGILSVFAQLERETIRDRMVMGKIKRVEAGLPLTTAKGRTFGYDVIDTKLYINEEEAKQLQLIYDIFEEEQSITSLQKRLKKLGFKVRTYNCYNNWLTNDLYCGYVSYKDKVHVKGIHEPIISEEQFYRVQEIFARMGKNPNMNREGASLLNNLVVCSKCGLGFVHRRKDAMSRDKKYHYRYYSCKTYKHIHELEKCGNKIWRADKLEELIINCVNNHSLASRNVDKEDELDSLNEKLKIEHAKKKRLFDLYINGSYEVSELDSMMSDIDAQINYYESQIEANEELKKSKKIQESLAHLATVDFDSLGFREKQLYLKSLINKIYIDGEQVTIEWL

SEQ ID NO: 8202 - protein, 452 aa, synthetic construct
MKAAIYIRVSTREQVENYSIQAQTEKLTALCRSKDWDVYDIFIDGGYSGSNMNRPALNEMLSRLHEIDAVVVYRLDRLSRSQRDTITLIEEYFLKNNVEFVSLSETLDTSSPFGRAMIGILSVFAQLERETIRDRMVMGKIKRIEAGLPLTTAKGRTFGYDVIDTKLYINEEEAKQLRLIYDIFEEEQSITFLQKRLKKLGFKVRTYNRYNNWLTNDLYCGYVSYKDKVHVKGIHEPIISEEQFYRVQEIFTRMGKSPNMNRDSASLLNNLVVCSKCGLGFVHRRKDIMSRGKKYHYRYYSCKTYKHIHELEKCGNKIWRADKLEELIINRVNNYSLAGRNVDKEDELDSLNEKLKIEHAKKKRLFDLYINGGYEVSELDSMMSDIDAQINYYEGQIEANEELEKDKKIQENLAYLATVDFDSLEFREKQLYLKSLINKIYIDGEQVTIEWL

SEQ ID NO: 8203 - protein, 469 aa, synthetic construct
MSYTTPVRAAVYLRISEDRSGEQLGVARQREDCLKLCDQRKWVPVEYLDNDVSASTGKRRPAYEQMLVDITAGKIAAVVAWDLDRLHRRPIELEAFMSLADEKRLALATVAGDVDLATPQGRLVARLKGCVAAHETEHKKARQRRAARQKAERGLPNWSKAFGYLPGPNGPEPDPRTAPLVKQAYADILAGASLGDVCRQWNDAGAFTITGRPWTSTTLSKFLRKPRNAGLRAYKGARYGPVDRDAIVGKAQWSPLVDEATFWAAQAVLDAPGRAPGRKSVRRHLLTGLAGCGKCGNHLAGSYRTDGRVTYVCKACHGVAILAVNIEPILYHIVAERLAMPDAVDLLRRGIHDAAEAETIRLELETLSGELDRLAVERAEGLLTARQVKISTDIVSAKITNLQARQLDQERLRVLDGIPLGTPQVAGMIAELSPDRFRAVLDVLAEVVVQPVGKSGRVSNPERVQVNWR

SEQ ID NO: 8204 - protein, 452 aa, synthetic construct
MRAAIYIRVSTREQVENYSIQAQTEKLTALCRSKDWDVYDTFIDGGYSGSNMNRPALNEMLSKLHEIDAVVVYRLDRLSRSQRDTITLIEEYFLKNNVEFVSLSETLDTSSPFGRAMIGILSVFAQLERETIRDRMVMGKIKRIEAGLPLTTAKGRTFGYDVIDTKLYINEEEAKQLQLIYDIFEEERSITFLQKRLKELGFKVRTYNCYNNWLTNDLYCGYVSYKDKVHVKGIHEPIISEEQFYRVQEIFTRMGKNPNMNRDSASLLNNLVVCSKCGLGFVHRRKDAMSRDKKYHYRYYSCKTYKHIHELEKCGNKIWRADKLEELIINRVSNYSLASRNVDKEDELDSLNEKLKIEHAKRKRLFDLYINGRYEVSELDSMMNDIDAQINHYESQIEANEALEKSKKIQENLAHLATVDFDSLEFREKQLYLKSLINKIYIDGEQVTIEWL

SEQ ID NO: 8205 - protein, 452 aa, synthetic construct
MKAAIYIRVSTREQVENYSIQAQTEKLTALCRSKDWDVYDIFIDGGYSGSNMNRPALNEMLSKLHEIDAVVVYRLDRLSRSQRDTITLIEEYFLKNNVEFVSLSETLDTSSPFGRAMIGILSVFAQLERETIRDRMVMGKIKRIEAGLPLTTARGRTFGYDVIDTKLYINEEEAKQLQLIYDIFEEEQSITFLQKRLKKLGFKVHTYNRYNSWLTNDLYCGYVSYKDKVHVKGIHEPIISEEQFYRVQEIFARVGKNPNMNRDSASLLSNLVVCGKCGLGFVHRRKDTMSRGKRYHYRYYSCKTYKHTHELEKCGNKIWRADKLEELVINRVNNYSFASRNVDKEDELDSLNEKLKVEHAKKKRLFDLYINGSYNVSELDSMMNDIDAQINYYVSQIEANEELKKNKKIQENLAGLATVDFDSLEFREKQLYLKSLINKIYIDGEQVTIEWL

SEQ ID NO: 8206 - protein, 485 aa, synthetic construct
MTKKVAIYTRVSTTNQAEEGFSIDEQIDRLTRYAEAMGWQVSDTYTDAGVSGAKLERPAMQRLINDIENKVFDTVLVYKLDRLSRSVRDTLYLVKDVFTRNKIDFVSLNESIDTSSATGSLFLTILSAINEFERENIKERMTMGKLGRAKSGKSMMWTKTAFGYYHNRKTGILEIVPLQATIVEQIFTDYLSGISLTKLRDKLNESGHIGKDIPWSYRTLRQTLDNPVYCGYIKFKDSLFEGMHKPIIPYETYLRVQKELEERQQQTYERNNNPRPFQAKYMLSGMARCGYCGAPLRIVLGHKRKDGSRTMKYHCANRFPRKTKGVTVYNDNKKCDSGTYDLSNLENTVIDSLIGFQEDNDSLLKTINGNNQPIPDTSCFKKQISQIDKKIQKNSDLYLNDLITMDELKDRTDSLRAEKRLLEAKISGNKFNDSADVFELVKTQLGSTPINELSYDNKKKIVNNLVSKVDVTADNVDIIFKFQLA

SEQ ID NO: 8207 - protein, 452 aa, synthetic construct
MKAAIYIRVSTREQVENYSIRAQTEKLTALCRSKDWDVYDIFIDGGYSGSNMNRPALSEMLSKLHEINAVVVYRLDRLSRSQRDTITLIEEYFLKNNVEFVSLSETLDTSSPFGRAMISILSVFAQLERETIRDRMVMGKIKRIEAGLPLTTAKGRTFGYDVIDTKLYINEEEAKQLQLIYDIFEEEQSITFLQKRLKKLGFKVHTYSRYNNWLTNDLYCGYVSYKDKVHVKGIHEPIISEEQFYRVQEIFTRMGKNPNMNRDSASLLNNLVVCSKCGLGFVHRRKDTMSRGKKYHYRYYSCKTYKHTHELEKCGNKIWRADKLEELIINRVNNYSFASRNVDKEDELDSLNEKLKIEHAKKRRLFDLYINGSYEVSELDSMMSDIDAQINCYESQIGANEELRKNKRIQEKLAGLATVDFDSLEFREKQLYLKSLINKIYIDGEQVTIEWL

SEQ ID NO: 8208 - protein, 469 aa, synthetic construct
MSYTTPVRAAVYLRISEDRSGEQLGVARQREDCLKLCGQRKWVPVEYLDNDVSASTGKRRPAYEQMLADITAGNIAAVVAWDLDRLHRRPIELEAFMSLADEKRLALATVAGDVDLATPQGRLVARLKGCVAAHETEHKKARQRRAARQKAERGLPNWSKAFGYLPGPNGPEPDPRTAPLVKQAYADILAGASLGDVCRQWNGAGAFTITGRPWTTTALSKFLRKPRNAGLRAYKGARYGPVDRDAIVGKAQWSPLVDEATFWAAQAVLDAPGRAPGRKSVRRHLLTGLAGCGKCGNHLAGSCRTDGRVVYVCKACHGVSILAVNIEPILYRIVAERLAKPDAVDLLRREIHDAAEAETIRLELETLYGELDRLAVERAEGLLTARQVKISTDIVSAKITKLQARQLDQERLRVFNGIPLGTPQVAGMIAELSPDRFRAVLDVLAEVVVQPVGRGGRIFNPERVQMNWR

SEQ ID NO: 8209 - protein, 485 aa, synthetic construct
MTRKVAIYTRVSTTNQAEEGFSIDEQTDRLTKYAEAMGWQVSDTYTDAGFSGAKLERPAMQRLINDIENKAFDTVLVYKLDRLSRSVRDTLYLVKDVFAKNEIGFISLSESIDTSSAMGSLFLTILSAINEFERENIKERMTMGKLGRAKSGKSMMWTKTAFGYYHNRKTGILEIVPLQATIVEQIFTDYLSGISLTKLRDKLNESGHIGKDIPWSYRTLRQTLDNPVYCGYIKFKGSLFEGMHKPIIPHETYLKVQKELEERQQQTYERNNNPRPFQAKYMLSGMARCGYCGAPLRIVLGHKRKDGSRTMKYHCANRFPRKTKGTSVYNDNKKCDSGTYDLSNLENTVIDILIGFQENSDSLLKIINGNNQPILDTSSFKKQISLIDKKIQKNSDLYLNDFITMDELKDRTDSLQAEKKLLKAKISEDRFNDSTDVFELVKTQLGSIPINELSYDNKKKIVNDLVSKVDVTADNVDIIFKFQLA

SEQ ID NO: 8210 - protein, 452 aa, synthetic construct
MKAAIYIRVSTREQVENYSIQAQTEKLTALCRSKDWDVYDIFIDGGYSGSNMNRPALNEMLGKLHEIDAVVVYRLDRLSRSQRDTITLIEEYFLKNNVEFVSLSETLDTSSPFGRAMIGILSVFAQLERETIRDRMVMGKIKRIEAGLPLTTAKGRTFGYDVIDAKLYINEEEAKQLQLIYDIFEEEQSITFLQKRLKKLGFKVHTYNRYNNWLTNDLYCGYVSYKDKVHVKGIHEPIISEEQFYRVQEIFTRMGKNPNMNRGSASLLNNLVVCGKCGLGFVHRRKDAMSRDKKYHYRYYSCKTYKHIHELEKCGNKIWRADKLEELIINRVNNYSLASRNVDKEDELDSLNEKLKIEHAKKKRLFDLYINGRYEASELDSMMNDIDAQINYYESQIEANDELKKNKQIQENLANLATVDFDSLEFREKQRYLKSLINKIYIDGEQVTIEWL

SEQ ID NO: 8211 - protein, 452 aa, synthetic construct
MKAAIYIRVSTREQVENYSIQAQTEKLTALCRSKDWDVYDIFVDGGYSGSNMNRPALNEMLSKLHEIDAVVVYRLDRLSRSQRDTITLIEEYFLKNGVEFVSLSETLDTCSPFGRAMIGILSVFAQLERETIRDRMVMGKIKRIEAGLPLTTAKGRTFGYDVIDTKLYINEEEAKQLRLIYDIFEEEQSITFLQKRLKKLGFKVRTYNRYSNWLTNDLYCGYVSYKDKVHVKGIHEPIISEEQFYRVQEIFTRMGKNPNMNRDSASLLNNLVVCGKCGLGFVHRRKDAMSRDKKYHYRYYSCKTYKHIHELEKCGNKIWRADKLEELIINRVNNYSLASRNVDKEGELDSLNEKLKIEHVKKKRLFELYINGSYEVSELDSMMNDIDAQINYYESQIEANEELKKNKKIQENLADLATVDFDSLEFREKQLYLKSLINKIYIDGEQVTIEWL

SEQ ID NO: 8212 - protein, 485 aa, synthetic construct
MTKKVAIYTRVSTTNQAEEGFSIDEQIDRLTKYAEAMGWQVSGTYTDAGISGAKLERPAMQRLINDIENKAFDTVLVYKLDRLSRSVRDTLYLVKDVFTKNEIDFISLNESIDTSSAMGSLFLTILSAINEFERENIKERMTMGKLGRAKSGKSMMWTKTAFGYHHNRKTGILEIVPLQAAIVEQIFTDYLSGISLTKLRDKLNESGHIGKDIPWSCRTLRQTLDNPVYCGYIKFKDSLFEGMHKPIIPYETYLKVQKELEERQQQTYERNNNPRPFQAKYMLSGMARCGYCGAPLRIVLGHKRKDGSRTMKYHCANRFPRKTKGITVYNDNKKCDSGTYDLSNLENTVIDNLIGFQENNDSLLKIINGNNQPILDTSSFEKQISQIDKKIQKNSDLYLNDFITMDELRERTDSLQAEKELLRAKISENKFNDSTDVFELVKTQLGSIPINELSYDDKKKIVNNLVSKVDVTADNVDIIFKFQLA

SEQ ID NO: 8213 - protein, 469 aa, synthetic construct
MSYTTPVRAAVYLRISEDRSGEQLGVARQREDCLKLCGQRKWVPVEYLDNDVSASTGKRRPAYEQMLADITAGKIAAVVAWDLDRLHRRPIELEAFMSLADEKRLALATVAGDVDLATPQGRLVARLKGSVAAHETEHKKARQRRAARQKAERGLPNWSKAFGYLPGPSGPEPDPQTAPLVKQAYADILAGASLGEVCRQWNDAGAFTITGRPWTTTTLSKFLRKPRNAGLRAYKGARYGPVDRGAIVGKAQWSPLVDEATFWAAQAVLDAPGRAPGRKSVRRHLLTGLAGCGKCGNHLAGSYRTDGQITYVCKACHGVSILAVNIVPILYHIVAERLAMPDAVGLLRREIHDAAGAETIRLELETLYGELDRLAVERAEGLLTARQVKISTDIVNTKITKLQACQLDQERLRVFDGIPLGTPQVAGMIVELSPDRFRAVLDVLAEVVVQPVGKGGRIFNPERVQVNWR

SEQ ID NO: 8214 - protein, 452 aa, synthetic construct
MKAAIYIRVSTREQVENYSIQAQTEKLTALCRSKDWDVYDIFIDGGYSGSNMNRPALNEMLSKLREIDAVVVYRLDRLSRSQRDTITLIEEYFLKNNVEFVSLSETLDTSSPFGRAMIGILSVFAQLERETIRDRMVMGKIKRIEAGLPLTTAKGRTFGYDVIDTKLYINEEEARQLQLIYDIFEEEQSITFLQKRLKKLGFKVRTYNRYNNWLTNDLYCGYVSYKDKVHVKGIHEPIISEEQFYRVQEIFTRMGKNPNMNRDSASLLNNLVVCSKCGLGFVHRRKDAMSRDKKYHYRYYSCKTYKHIHELEKCGNKIWRADKLEELIINRVNNYSLASRNADKEDELDSLNEKLKIEHAKKKRLFDLYINGSYEVSELDSMMNDIDAQINYYESQIEANEELKKNKKIQENLAYLATVDFDSLEFREKQLYLKSLINKIYIDGEQVTIEWL

SEQ ID NO: 8215 - protein, 452 aa, synthetic construct
MKAAIYIRVSTQEQVGNYSIQAQTEKLTALCRSKGWDVYDIFIDGGYSGSNMNRPALNEMLSKLHEIDAVVVYRLDRLSRSQRDTTTLIEEYFLKNSVEFVSLSETLDTSSPFGRAMIGILSVFAQLERETIRDRMVMGKIKRIEAGLPLTTAKGRTFGYDVIDTKLYINEEEAKQLRLIYDIFEEEQSITSLQKRLKKLGFKVRTYNRYNNWLTNDLYCGYVSYKDKVHVKGIHEPIISEEQFYRVQEIFTRMGKNPNMNRDSASLLNSLVVCSKCGLGFVHRSKDTMNRGKKYHYRYYSCKTYKHTHELEKCGNKTWRADKLEELIINRVSNYSFASHSVDKEGELDGLNEKLKIEHAKKKRLFDLYINGSYEVSELDSMMNDIDAQINYYESQIEAKEELSKNKKIQENLADLATVDFDSLEFREKQLYLKSLINKIYIDGEQVTIEWL

SEQ ID NO: 8216 - protein, 485 aa, synthetic construct
MTKKVAIYTRVSTTNQAEEGFSIDEQIDRLTKYAEAMGWQVSGTYTDAGISGAKLERPAMQRLINDIENKAFDTVLVYKLDRLSRSVRDTLYLVKDVFTKNKIDFISLNESIDTSSAMGSLFLTILSAINEFERENIKERMTMGKLGRAKSGKSMMWTKTAFGYYHNRKTGILEIVPLQATIVEQIFTDYLSGISLTKLRDKLNESGHIGKDIPWSYRTLRQTLDNPVYCGYIKFKDSLFEGMHKPIIPYETYLKVQKELEERQQQTYERNNNPRPFQAKYMLSGMARCGYCGAPLKIVLGHKRKDGSRTMKYHCANRFPRKTKGVTVYNDNKKCDSGTYDLSNLETTVIDNLIGFQENNDSLLKVINGNSQPILDTSSFKKQISQIDKKIQKNSELYLNDFITMDELKARTDSLQAEKELLKAKISENKFNDSTDVFELVKTQLGSIPINELSYDNKKKIVNSLVSKVDVTADNVDIIFKFQLA

SEQ ID NO: 8217 - protein, 485 aa, synthetic construct
MTKKVAIYTRVSTTNQAEEGFSIDEQIDRLTKYAEAMGWQVSDTYTDAGFSGAKLERPAMQRLINDIENKAFDTVLVYKLDRLSRSVRDTLYLVKDVFTKNKIDFISLNESIDTSSAMGSLFLTILSAINEFERENIKERMTMGKLGRAKSGKSMMWTKTAFGYYHNRKTGILEIVPLQATIVEQIFTDYLSGISLTKLRDKLNESGHIGKDIPWSYRTLRQTLDNPVYCGYIKFKGSLFEGMHKPIIPYETYLEVQKELEKRQQQTYERNNNPRPFQAKYMLSGMARCGYCGAPLRIVLGHKRKDGSRTMKYHCANRFPRKTRGVTVYNDNKKCDSGTYNLSNLENTVIDNLIGLQENSDSLLKFVNGNNQPILDTSSFKKQISQIDKKIQKNSDLYLNDFITMDELKDRTDSLQAEKKLLIAKISENKSNDSTDVFELVKTQLGSIPINELSYDNKKKIVNNLVSKVDVTADNVDIIFKFQLA

SEQ ID NO: 8218 - protein, 452 aa, synthetic construct
MKAAIYIRVSTQEQVGNYSIQAQTEKLTALCRSKDWDVYDIFIDGGYSGSNMNRPALNEMLSKLHEIDAVVVYRLDRLSRSQRDTTTLIEEYFLKNNVEFVSLSETLDTSSPFGRAMIGILSVFAQLERETIRDRMVMGKIKRIEAGLPLTTAKGRTFGYDVIDTKLYINEEEAKQLQLIYDIFEEEQSITFLQKRLKKLGFKVRTYNRYHNWLTNDLYCGYVSYKDKVHVKGIHEPIISEEQFYRVQEIFTRMGKNPNMNRDSASLLSNLVVCSKCGLGFVHRSKDTMSRGKKYHYRYYSCKTYKHTHELEKCGNKTWRADKLEGLIINRVNNYSFASRDVDKEDELDSLNEKLKIEHARKKRLFDLYINGGYEVNELDSMMNDIDAQISYYESQIEANEELKKNKKIQENLADLATVDFDSLEFREKQLYLKSLINKIYIDGEQVTIEWL

SEQ ID NO: 8219 - protein, 485 aa, synthetic construct
MTKKVAIYTRVSTTNQAEEGFSIDEQIDRLTKYAEAMGWQVSDTYTDAGFSGAKLERPAMQRLINDIENKAFDTVLVYKLDRLSRSVRDTLYLVKDVFTKNKIDFISLNESIDTSSAMGSLFLTILSAINEFERENIKERMTMGKLGRAKSGKSMMWTKTAFGYYHNRKTGILEIVPLQATIVEQIFTDYLSGISLTKLRDKLNESGHIGKDIPWSYRTLRQTLDNPVYCGYIKFKDSLFEGMHKPIIPYETYLKVQKELEERQQQAYERNNNPRPFQAKYMLSGMARCGYCGAPLKVVLGHKRKDGSRTMKYHCANRFPRKTKGVTVYNDNKKCDSGTYDLSNLENTVIDNLIGFQENNDSLLKIINGNNQPILDTSSLKKQISQIDKKIQKNSDLYLNDFITMDELKDRTDSLQAEKKLLKAKISEDKFNDSTDVFELVKAQLGSIPINELSYDNRKKIVNNLVSKVDVTADNVDIIFKFQLA

SEQ ID NO: 8220 - protein, 485 aa, synthetic construct
MTKKVAIYTRVSTTNQAEEGFSIDEQIDRLTKYAEAMGWQVSDTYTDAGFSGAKLERPAMQRLINDIENKAFDTVLVYKLDRLSRSVRDTLHLVKDVFTKNKIDFISLNESIDTSSAMGSLFLTILSAINEFERENIKERMTMGKLGRAKSGKSMMWTKTAFGYYHNRKTGILEIVPLQATIVEQIFTDYLSGTSLTKLRDKLNESGHIGKDIPWSYRTLRQTLDNPVYCGYIKFKDSLFEGMHKPIIPYETYLRVQKELEERQQQTYERNNNPRPFQAKYMLSGMARCGYCGAPLRIVLGHKRKDGSRTMKYHCANRFPRRTKGVTVYNDNKKCDSGTYDLSNLEDTVIDNLIGFQKNNDSLLKIINGNNQPILDTSSFKEQISQIDRKIQKNSDLYLNDFITMDELRDRTDSLQAEKKLLKAKISESKFNDSTDVFELVKSQLGSIPINELSYDDKKKIVNNLVSKVDVTADNVDIIFKFQLA

SEQ ID NO: 8221 - protein, 469 aa, synthetic construct
MSYTTPVRAAVYLRISEDRSGEQLGVARQREDCLKLCDQRKWVPVEYLDNDVSASTGKRRPAYEQMLADITAGKIAAVVAWDLDRLHRRPIELEAFMSLADEKRLALATVAGDVDLATPQGRLIARLKGSVAAHETEHKKARQRRAARQKAERGHPNWSKAFGYLPGQYGPEPDPRTAPLVKQAYADILAGASLGDVCRQWNGAGAFTITGRPWTTTTLSKFLRKPRNAGLRAYKGARYGPVDRDAIVGRAQWSPLVDEATFWAAQAVLDAPGRAPGRKSVRRHLLTGLAGCGKCGNHLAGSYRADGRVVYVCKACHGIAILAENIEPILYRIVAERLAMPDAVDLLRREIHDAAEAETIRLELETLYGELDRLAVERAEGLLTARQVKISTDIVNAKITKLQARQLDQERLRVFNGVPLGTPQVAGMIAELSPDRFRAVLDVLAEVVVQPVGKSGRIFNPERVQVNWR

SEQ ID NO: 8222 - protein, 485 aa, synthetic construct
MTKKVAIYTRVSTTNQAEEGFSIDEQIDRLTKYAEAMGWQVSDTYTDAGLSGAKLERPAMQRLINDIENKAFDTVLVYKLDRLSRSVRDTLYLVKDVFTKNKIDFISLSESIDTSSAMGSLFLTILSAINEFERENIKERMTMGKLGRAKSGKSMMWTKTAFGYYHNRKTGILEIVPLQATIVEQIFTDYLSGISLTKLRDKLNESGHIGKDIPWSYRTLRQTLDNPVYCGYIKFKDSLFEGMHKPIIPYETYLKVQKELGKRQQQTYERNNNPRPFQAKYMLSGMARCGYCGAPLRIVLGHKRKDGSRTMKYHCANRFPRKTKGVTVYNDNKKCDSGTYDLSNLENTVIDNLIGFQEDNDSLLKIINGNNQPILDTSSFKEQISQIDKKIQKNSDLYLNDFITMDELKDRTDSLQAGKKLLKAKISENKFNDSTDVFELVKAQLGSIPINELSYDNKKKIVNNLVSKVDVTADNVDIIFKFQLA

SEQ ID NO: 8223 - protein, 452 aa, synthetic construct
MKAAIYIRVSTREQVENYSIQAQTEKLTALCRSKDWDVYDIFVDGGYSGSNMDRPALNEMLSKLHEIDAVVVYRLDRLSRSQRDTITLIEEYFLKNNVEFVSLSETLDTSSPFGRAMIGILSVFAQLERETIRDRMVMGKIKRIEAGLPLTTAKGRTFGYDVIDTRLYINEEEAKQLQLVYDIFEEEQSITFLQKRLKKLGFKVRTYNCYNNWLTNDLYCGYVSYKDKVHVKGIHEPIISEEQFYRVQEIFTRMGKNPNMNRGSASLLNNLVVCGKCGLGFVHRRKDIMSRGKKYHYRYYSCKTYKHIHELEKCGNKIWRADKLEELIINRVSNYSFASRNGEKEDELDSLSEKLKAEHAKRKRLFDLYTNGRYEVSELDSMMSDIDAQISYYESQIEANEELKKSKKIQENLAYLATVDFDSLEFRKKQRYLKSLINKIYIDGEQVTIEWL

SEQ ID NO: 8224 - protein, 452 aa, synthetic construct
MKAAIYIRVSTREQVENYSIQAQTEKLTALCRSKDWDVYDIFIDGGYSGSNMNRPALNEMLSKLHEIDAVVVYRLDRLSRSQRDTITLIEEYFLKNNVEFVSLSETLDTSSPFGRAMIGILSVFAQLERETIRDRMVMGKIKRIEAGLPLTTAKGRTFGYDVIDTKLYINEEEAKQLQLIYDIFEEEQSITFLQKRLKKLGFKVRTYSCYNNWLTNDLYCGYVSYKDKVHVKGIHEPIISEEQFYRVQEIFTRMGKNPNMNRDSASLLNNLVVCSKCGLGFVHRRKDTMSRGKKYHYRYYSCKTYKHTHELEKCGNKIWRADKLEELIINRVNNYSFVSRNVDKEDELDSLNEKLKIGHAKKKRLFDLYINGSYEVSELDCMMNDIDAQINYYESQIEANEELKKDKKIQESLANLATVDYDSLEFREKQLYLKSLINKIYIDGEQVTIEWL

SEQ ID NO: 8225 - protein, 485 aa, synthetic construct
MTKKVAIYTRVSTTNQAEEGFSIDEQIDRLTKYAEAMGWQVSDTYTDAGLSGAKLERPAMQRLINDIENEAFDTVLVYKLDRLSRSVRDTLYLVKDVFTKNKIDFISLNESIDTSSAMGSLFLTILSAINEFERENIKERMTMGKLGRAKSGKSMMWTKTAFGYYHNRKTGILEIVPLQATIVEQIFTDYLSGISLTKLRDKLNESGHIGKDIPWSYRTLRQTLDNPVYCGYIKFKGSLFEGMHKPIIPYETYLRVQKELEERQQQTYERNNNPRPFQAKYMLSGMARCGYCGAPLKIVLGHKRKDGSRTMKYHCANRFPRKTQGITEYNDNKKCDSGTYDLSNLENTVIDSLIGFQENNDSLLKIINGNDQPILDTSSFEKQISQIDKKIQKNSDLYLNDFITMDELKDRTDSLQAEKKLLKAKISENKFNDSADVFEQVRTQLGSIPINELSYDNKKKIVNNLVSKVDVTADNVDIIFKFQLA

SEQ ID NO: 8226 - protein, 452 aa, synthetic construct
MKAAIYIRVSTREQVENYSIQAQTEKLTALCRSKDWDVYDIFIDGGYSGSNMNRPALNEMLSKLHEIDAVVVYRLDRLSRSQRDTITLIEEYFLKNNVEFVSLSETLDTSSPFGRAMIGILSVFAQLERETIRDRMVMGKIKRIEAGLPLTTAKGRTFGYDVIDTKLYINEEEAKQLQLIYDIFEEEQSITFLQKRLKKLGFKVHTYNRYNNWLTNDLYCGYVSYKDKVHVKGIHEPIISEEQFYRVQEIFTRMGKNPNMNRESASLLSNLVVCSKCGLSFVHCRKDTMSRGKKYHYRYYSCKTYKHIHELEKCGNKIWRADKLEELIINRVNDYSFASRNADKEDELDSLNEKLEVEHAKKKRLFDLYINGSYEVSELDSMMNDIDAQINYYESQIEASEELKKNKKIQENLAVLATVDFDSLEFREKQLYLKSLINKIYIDGEQVTIEWL

SEQ ID NO: 8227 - protein, 452 aa, synthetic construct
MKAAIYIRVSTREQVENYSIQAQTEKLTALCRSKDWDVYDIFIDGGYSGSNMNRPALNEMLSKLHEIDAVVVYRLDRLSRSQRDTITLIEEYFLKNNVEFVSLSETLDTSSPFGRAMIGILSVFAQLERETIRDRMVMGKIKRIEAGLPLTTAKGRTFGYDVIDTKLYINEEEAKQLRLIYDIFEEEQSITFLQKRLKKLGFKVRTYSCYNNWLTNDLYCGYVSYKDKVRVKGIHEPIISEEQFYRVQEIFTRMGINPNMNRDSASLLNNLVVCSKCGLGFVHRRKDTMSRGKKYHYRYYSCKTYKHIHELEKCGNKIWRADKLEELIINRVNNYSLASRNVDKEDELDSLNEKLKIEHAKKKRLFDLYINGSYEVSELDSMMNDIDAQINYYESQIEANEELKKNKKIQENLANLATVDYDSLEFREKQLYLKSLINKVYIDGEQVTIEWL

SEQ ID NO: 8228 - protein, 452 aa, synthetic construct
MKAAIYIRVSTQEQVENYSIQAQTEKLTALCRSKDWDVYDIFIDGGYSGSNMNRPALNEMLSKLHEIDAVVVYRLDRLSRSQRDTTTLIEEYFLKNNVEFVSLSETLDTSSPFGRAMIGILSVFAQLERETIRDRTVMGKIKRIEAGLPLTTAKGRTFGYDVIDTKLYINEEEAKQLRLIYDIFEEEQSITSLQKRLKKLGFKVRTYNRYNNWLTNDLYCGYVSYKDKVHVKGIHEPIISEEQFYRVQEIFTRMGKNPNMNRDSASLLSNLVVCSKCGLSFVHRRKDTMSRGKKYHYRYYSCKTYKHTHELEKCGNKTWRADKLEELIINRVNNYSFASRNVDKEDELDSLNEKLKIEHAKRKRLFDLYINGGYEVSELDSMMNDIDAQINYYESQIEASGELKKNEKIQENLADLATVDFDSLEFREKQLYLKSLINKIYIDGEQVTIEWL

SEQ ID NO: 8229 - protein, 452 aa, synthetic construct
MKAAIYIRVSTREQVENYSIQAQTERLIALCRSKDWDVYDIFIDGGYSGSNMNRPALNEMLSKLHEIDAVVVYRLDRLSRSQRDTITLIEEYFLKNNVEFVSLSETLDTSSPFGRAMIGILSVFAQLERETIRDRMVMGKIKRVEAGLPLTTAKGRTFGYDVIDTKLYINEEEAKQLQLIYDTFEEERSITFLQKRLKKLGFKVRAYNRYYNWLTNDLYCGYVSYKDKVHVKGIHEPIISEEQFYRVQEIFTRMGKNPNMNRESASLLSNLVVCSKCGLGFVHRRKDTMSRGKKYHYRYYSCKTYKHTHELEKCGNKIWRADRLEELIINRVNNYSFASRNVDKEDELDSLNEKLKIEHAKKKRLFDLYINGSYEVSELDCMMNDIDAQINYYESQIEANEELKKDKKIQESLANLATVDYDSLEFREKQLYLKSLINKIYIDGEQVTIEWL

SEQ ID NO: 8230 - protein, 485 aa, synthetic construct
MTKKVAIYTRVSTTNQAEEGFSIDEQIDRLTKYAEAMGWQVSDTYTDAGFSGAKLERPAMQRLINDIETRAFDTVLVYKLDRLSRSVRDTLHLVKDVFTKNEIDFISLSESIDTSSAMGSLFLTILSAINEFERENIRERMTMGKLGRAKSGKSMMWTKTAFGYHHNRKTGILEIVPLQATIVEQIFTDYLSGISLTKLRDKLNESGHIGKDIPWSYRTLRQTLDNPVYCGYIKFKGSLFEGMHKPIIPYETYLKVQKELEERQQQTYERNNNPRPFQAKYMLSGMVRCGYCGAPLRIVLGHKRKDGSRTMKYHCANRFPRKTKGVTVYNDNKKCDSGTYDLSNLEDTVIDNLTGFQENNDSLLKIINGNNQPTLDTSGFKEQISQIDKKIQKNSDLYLNDFITMDELKDRTDSLQAEKKLLKAKISENKFSDSTDVFELVKTQLGSIPINELSYDNKKKIVNNLVSKVDVTADNVDIIFKFQLA

SEQ ID NO: 8231 - protein, 452 aa, synthetic construct
MKAAIYIRVSTREQVENYSIQAQTEKLTALCRSKDWDVYDIFIDGGYSGSSMNRPALNEMLSKLHEIDAVVVYRMDRLSRSQRDTITLIEEYFLRNNVEFVSLSETLDTSSPFGRAMIGILSVFAQLERETIRDRMVMGKIKRIEAGLPLTTAKGRTFGYDVIDTKLYINEAEAKQLQLIYDIFEEERSITSLQKRLKELGFKVRTYNRYNNWLTNDLYCGYVSYKDKVRVKGIHEPIISEEQFYRVQEIFARMGKNPNMNRDSASLLNNLVVCSKCGLGFVHRRKDTTSRGKKYHYRYYSCKTYKHIHELEKCGNKIWRADKLEELIINRVNNYSLASRNVDKEDELGSLNEKLKIEHAKKKRLFDLYINGSCEVGELDSMMNDIDAQISYYESQIEANEELKKNKKIQENLANLATVDFDSLEFREKQLYLKSLINKIYIDGEQVTIEWL

SEQ ID NO: 8232 - protein, 485 aa, synthetic construct
MTRKVAIYTRVSTTNQAEEGFSIDEQIDRLTKYAEAMGWRVSNTYTDAGFSGAKLERPAMQRLINDIENKAFDTVLVYKLDRLSRSVRDTLYLVKDVFTKNKIDFISLNESIDTSSAMGSLFLTILSAINEFERENIKERMTMGKLGRAKSGKSMMWTRTAFGYHHNRKTGILEIVPLQATIVEQIFTDYLSGISLTKLRDKLNESGHIGKDIPWSYRTLRQTLDNPVYCGYIKFKDSLFEGMHKPIIPYETYLKVQKELEERQQQAYERNNNPRPFQAKYMLSGMARCGYCGAPLRIVLGHKRKDGSRTMKYHCANRFPRKTKGVTVYNDNKKCDSGTYDLSNLENTVIDNLIGFQENNDSLLKIINGNNQPILDTSSFKKQISQIDKKIQKISDLYLNDFITMDELKDRTDSLQAEKKLLKAKIGENKLNDSTGVFELVKTQLGSIPINELSYDNKKKIVNNLVSRVDVTADNVDIIFKFQLA

SEQ ID NO: 8233 - protein, 485 aa, synthetic construct
MTKKVAIYTRVSTTNQAEEGFSIDEQIDRLTKYAEAMGWQVSDTYTDAGLSGAKLERPAMQRLINDIENKAFDTVLVYKLDRLSRSVRDTLYLVKDVFTKNKIDFISLNESIDTSSAMGSLFLTILSAINEFERENIKERMTMGKLGRAKSGKSMMWTKTAFGYYHNRKTGILEIVPLQAAIVEQIFTDYLSGISLTKLRDKLNESGHIGKDIPWSYRTLRQTLDNPVYCGYIKFKDSLFEGMHKPIIPYETYLKVQKELEERQQQTYERNNHPRPFQAKYMLSGMARCGYCGAPLRIVLGLKRKDGSRTMKYHCANRFPRKTKGVTVYNDNKKCDSGTYDLSNLENTVIDSLIGLQENNDSLLKIINGNNQPILDTSSFKKQISQIDKKIQKNSDLYLNDFITMDELKDRTDSLQAEKKLLRARISENKFNDSTDVFELVKTQLGSIPINELSYDNKKKIVNSLVSKVDVTADSVDIIFKFQLA

SEQ ID NO: 8234 - protein, 485 aa, synthetic construct
MTKKVAIYTRVSTTNQAEEGFSIDEQIDRLTKYAEAMGWQVSDTYTDAGFSGAKLERPAMQRLINDIENKAFDTVLVYKLDRLSRSVRDTLHLVKDVFTKNKIDFISLNESIDTSSAMGSLFLTILSAINEFERENIKERMTMGKLGRAKSGKSMMWTKTAFGYRHNRKTGVLEIVPLQATIVEQIFTDYLSGISLTKLRDKLNESGHIGKDIPWSYRTLRQTLDNPVYCGYIKFKDSLFEGMHKPIIPYETYLKVQKELEERQQQTYERNNNPRPFQAKYMLSGVARCGYCGAPLRIVLGRKRKDGSRTMKYHCTNRFPRKTKGVTVYNDNKKCDSGTYDLSNLENTVIDNLIGFQENNDSLLKTINGNNQPILDTSSLEKQISQIDKKIQKNSDLYLNDFITMDELKDRTDSLQAEKKLLKAKISENKFNDSADVFELVKTQLGSIPINELSYDNKKKIVNNLVSKVDVTADNVDIIFKFQLA

SEQ ID NO: 8235 - protein, 452 aa, synthetic construct
MKAAIYIRVSTQEQVGNYSIQAQTEKLTALCRSKGWDVYDIFIDGGYSGSNMNRPALNEMLSKLHEIDAVVVYRLDRLSRSQRDTTTLIEEYFLKNNVEFVSLSETLDTSSPFGRAMIGILSVFAQLERETIRDRMVMGKIKRIEAGLPLTTAKGRTFGYDVIDTKLYINEEEARQLQLIYDIFEEEQSITFLQKRLKKLGFKVHTYNRYNNWLTNDLYCGYVSYKDKVHVKGIHEPIISEEQFYRVQEIFTRMGKNPNMNRDSASLLNSLVVCSKCGLGFVHRSKDTMSRGKKYHYRYYSCKTYKHAHELEKCGNKTWRADELEELIINRVNNYSFASRNVDKVDELDSLNEKLKIEHARKKRLFDLYINGSYEVSELDSMMNDIDAQINYYESQIEANEELKKNKKIQENLADLATVDFDSLGFREKQQYLKSLINKIYIDGEQVTIEWL

SEQ ID NO: 8236 - protein, 452 aa, synthetic construct
MKAAIYIRVSTREQVENYSIQAQTEKLTALCRSKDWDVYDIFIDGGYSGSNMNRPALNEMLSKLHEIDAVVVYRLDRLSRSQRDTITLIEGYFLKNNVEFVSLSETLDTSSPFGRAMIGILSVFAQLERETIRDRMVMGKIKRIEAGLPLTTAKGRTFGYDVIDTKLYVNEEEAKQLRLIYDIFEEEQSITFLQKRLKKLGFKVRTYNRYNNWLTNDLYCGYVSYKDKVHVKGIHEPIISEEQFYRVQEIFTRMGKNPNMNRDSASLLNNLVVCSKCGLGFVHRRKDAKSRDKKYHYRYYSCKTYKHIHELEKCGNKIWRADELEELIVNRVNNYSLASRNVDKEDGLDSLNEKLKIEHAKKKRLFDLYLNGSYEVSELDSMMNDIDAQISHYESQIEANEALIKNKKIQENLANLATVDFDSLEFREKQLYLKSLINKIYIDGEQVTIEWL

SEQ ID NO: 8237 - protein, 469 aa, synthetic construct
MSYTTPVRAAVYLRISEDRSGEQLGVARQREDCLKLCDQRKWVPVEYLDNDVSASTGRRRPAYEQMLADITAGKIAAVVAWDLDRLHRRPIELEAFMSLADEKRLALATVAGDVDLATPQGRLVARLKGCVAAHETEHKKARQRRAARQKAERGHPNWSKAFGYLPGPNGPEPDPRTAPLVKQAYADILAGASLGDVCRQWNDAGAFTITGRPWTTTTLSKFLRKPRNAGLRAYKGARYGPVDRDAIVGKAQWSPLVDEATFWAAQAVLDAPGRAPGRKSVRRHLLTGLAGCGKCGNHLAGSYRTDGRVVYVCKACHGVAILADNIEPILYHIVAERLTMPDAVDLLRREIHDAAEAETIRLELETLYGELDRLAVERAEGLLTARQVKISTDIVNAKVTKLQARQLDQERLRVFDGIPLGTPQVAGVIAELSPDRFRAVLDVLAEVVVQPVGKSGGIFNPERVQVNWR

SEQ ID NO: 8238 - protein, 484 aa, synthetic construct
MTKKVAIYTRVSTTNQAEEGFSIDEQIDRLTKYAEAMGWQVSDTYTDAGLSGAKLERPAMQRLINDIENKAFDTVLVYKLDRLSRSVRDTLYLVKDVFTKNKIDFISLNESIDTSSAMGSLFLTILSAINEFERENIKERMTMGKLGRAKSGKSMMWTKTAFGYNHNRKTGILEIVPLQATIVEQIFTDYLSGISLTKLRDKLNESGHIGKDIPWSYRTLRQTLDNPVYCGYIKFKGSLFEGMHKPIIPYETYLKVQKELEERQQQTYERNNNPRPFQAKYMLSGMARCGYCGAPLRIVLGHKRKDGSRTMKYHCANRFPRKTKGVTVYNDNKKCDSGAYDLSNLENTVIDYLIGFQEDNDSLLKIINGNNQPILDTSSFKEQISQIDKKIQKNSDLYLNDFITMDELKDRTDSLQAEKKLLKAKISENKFNDSTDVFELVKTQLGSIPINELSYDNKKIVNNLVSKVDVTADNVDIIFKFQLA

SEQ ID NO: 8239 - protein, 470 aa, synthetic construct
MCYTTPVRAAVYLRISEDRSGEQLGVARQREDCLKLCDQRKWVPVEYLDNDVSASTGKRRPAYEQMLADITAGKIAAVVAWDLDRLHRRPIELEAFMSLADEKRLALATVAGDVDLATPQGRLVARLKGSVAAHETEHKKARQRRAARQKAERGYPNWSKAFGYLSGPNGPEPDPRTAPLVKQAYADILAGASLGDVCRQWNDAGALTITGRPWTTTTLSKFLRKPRNAGLRAYKGARYGPVDRDAIVGKAQWSPLVDEAIFWAAQAVLDAPGRAPGRKSVRRHLLTGLAGCGKCGNRLAGSYRTDGRVVYVCKACHGVAILADNIEPILYHIVAERLAMPDAVDLLRREVQDAAEAETIRLELETLYDELDRLAVERAEGLLTARQVKISTDIVNAKITKLQARQLDQERLRVFDGIPLGTPQVAGMIAELSPDRFRAVLDVLAEVVVQPVGKSGRTFNPERVQVNWRQ

SEQ ID NO: 8240 - protein, 452 aa, synthetic construct
MKAAIYIRVSTREQVENYSIQAQTERLTALCRSKDWDVYDIFIDGGYSGSDMNRPALSEMLSKLHEIDAVVVYRLDRLSRSQRDTITLIEEYFLKNNVEFVSLSETLDTSSPFGRAMIGILSVFAQLERETIRDRMVMGKIKRIEAGLPLTTAKGRTFGYDVIDTKLYINEEEAKQLQLIYDIFEEERSITFLQKRLKRLGFKVHTYNRYNSWLTNDLYCGYVSYKDKVHVKGIHEPIISEEQFYRVQEIFTRMGKSPNMNRGSASLLNNLVVCSKCGLGFVHRRKDTMSRGKKYHYRYYSCKTYKHIHELEKCGNKIWRADKLEELIINRVNNYSFASRNVDKEDELDSLNEKLKIEHAKKKRLFDLYINGSYEVSELDCMMNDINAQINYYESQIEANEELKKDKKIQESLANLATVDYDSLEFREKQLYLKSLINKIYIDGEQVTIEWL

SEQ ID NO: 8241 - protein, 485 aa, synthetic construct
MTKKVAIYTRVSTTNQAEEGFSIDEQIDRLTKYAEAMGWQVSDTYTDAGSSGAKLERPAMQRLINDIENKAFDTVLVYKLDRLSRSVRDTLYLVKDVFTKNKIDFISLNESIDTSSAMGSLFLTILSAINEFERENIKERMTMGKLGRAKSGKSMMWTKTAFGYHHNRETGILEIVPLQATIVEQIFTDYLSGISLTKLRDKLNESGHTGKDIPWSYRTLRQTLDNPVYCGYIKFKDSLFEGMHKPIIPYETYLKVQKELEERQQQAYERNNNPRPFQAKYMLSGMARCGYCGAPLKIVLGHKRKDGSRTMKYHCANRFPRKTKGITVYNDNKKCDSGTYDLSNLENTVIDNLIGFQENNDSLLKIINGNNQPILDTSSFKKQISQIDKKIQKNSDLYLNDFITMEELKERTDSLQAEKKLLKAKISENKFNDSTDVFELVKTQLGSIPINELSYDNKKKIVNNLVSKVDVTADNVDIIFKFQLA

SEQ ID NO: 8242 - protein, 469 aa, synthetic construct
MSYTTPVRAAVYLRISEDRSGEQLGVARQREDCLKLCDQRKWVPVEYLDNDVSASTGKRRPAYEQMLADITAGKIAAVVAWDLDRLHRRPIELEAFMSLADEKHLALATVAGDVDLATPQGRLVARLKGCVAAHETEHKKARQRRAARQKAERGHPNWSKAFGYLPGPNGPEPDPRTAPLVKQAYADILAGASLGDVCRQWNDAGAFTITGRPWTTTTLSKFLRKPRNAGLRAYKGARYGPVDRDAIVGKAQWSPLVDEATFWAAQAVLDAPGRAPGRKSVRRHLLTGLAGCGKCGNHLAGSYRTDGRVVYVCKACHGVAILADNIEPTLYHIVAERLVMPDAVDLLRRETHDAAEAEAIRLELETLYGELDRLAVERAEGLLTARQVKISTDIVSAKITELQARQLDQERLRVLDGIPLGTPQVAGMIAELSPDRFRAVLDVLAEVVVQPVGKSGRIFNPERVQVNWR

SEQ ID NO: 8243 - protein, 469 aa, synthetic construct
MCYTTPVRAAVYLRISEDRSGEQLGVARQREDCLKLCDQRKWVPVEYLDNDVSASTGKRRPAYERMLADITAGKIAAVVAWDLDRLHRRPIELEAFMSLADEKRLALATVAGDVDLATPQGRLVARLKGSVAAHETEHKKARQRRAARQKAERGHPNWSKAFGYLPGPNGPEPDPRTAPLVEQAYVDILAGASLGDVCRQWNGAGAFTITGRPWTTTTLSKFLRKPRNAGLRAYKGARHGPVDRDAIVGKAQWSPLVDEATFWAAQAVLDAPGRAPGRKSVRRHLLTGLAGCGKCGNHLAGSYRTDGRVVYVCKSCHGVAILADNIEPILYHIVAERLAMPDAVDLLRREIHDAAEAETIRLELETLYGELDLLAVERAEGLLTARQVKISTDIVNAKITKLQARQLDQERLRVFDGIPLGTPQVAGMIAELSPDRFRAVLDVLAEVVVQPVGKGSRIFNPERVQVNWR

SEQ ID NO: 8244 - protein, 485 aa, synthetic construct
MTKKVAIYTRVSTTNQAEEGFSIDEQVDRLTKYAEAMGWQVSDAYTDAGFSGAKLERPAMQRLINDIENKAFDTVLVYKLDRLSRSVRDTLYLVKDVFTENKIDFISLNECIDTSSAMGSLFLTILSAINEFERENIKERMTMGKLGRAKSGKSMMWTKTAFGYHHNRKTGILEIVPLQATIVEQIFTDYLSGISLTRLRDKLNESGHIGKDIPWSYRTLRQTLDNPVYCGYIKFKDSLFEGMHKPIVPYETYLKVQKELEERQQRAYERNNNPRPFQAKYMLSGMARCGYCGAPLKVVLGHKRKDGSRTMKYHCANRFPRKTKGVTVYNDNKKCDSGTYDLNNLENTVIDNLVGFQENNDSLLKIINGNNQSILDTSSFEKQISQIDKKIQKISDLYLNDFITMDELKDRTDSLQAEKKLLKAEISENKFNDSTDVFELVKTQLGSIPINELSYDNKKKIVNNLVSKVDVTADNVDIIFKFQLA

SEQ ID NO: 8245 - protein, 452 aa, synthetic construct
MKAAIYIRVSTQEQVGNYSIQAQTEKLTALCRSKDWDVYDIFVDGGYSGSNMNRPALSEMLSKLHEIDAVVVYRLDRLSRSQRDTTTLIEEYFLKNNVEFVSLSETLDTSSPFGRAMIGILSVFAQLERETIRDRMVMGKIKRIEAGLPLTTAKGRTFGYDVIDTKLYINEEEAKQLQLIYDIFEEEQSITSLQKRLKKLGFKVRTYNRYNNWLTNDLYCGYVSYKDKVRVKGIHEPIISEEQFYRVQEIFARMGKNPNMNRDSASLLSNLVVCSKCGLGFVHRSKDTMSRGKKYHYRYYSCKTYKHTHELEKCGNKTWRADKLEELIIDRVNNYSFAGRNVDKEDELDSLNEKLKIEHAKKKRLFDLYINGSCEMGELDSMMNDIDAQINNYESQIEANEELKKNKKIQENLADLATVDFDSLGFREKQLYLKSLINKIYIDGEQVTIEWL

SEQ ID NO: 8246 - protein, 452 aa, synthetic construct
MKAAIYIRVSTQEQVENYSIQAQTEKLTALCRSKDWDVYDIFIDGGYSGSNMNRPALNEMLSKLHEIDAVVVYRLDRLSRSQRDTTTLIEEYFLKNNVEFVSLSETLDTSSPFGRAMIGILSVFAQLERETIRDRMVMGKIKRVEAGLPLTTAKGRTFGYDVIDTKLYINEEEAKQLRLIYDIFEEEQSITLLQKRLKKLGFKVRTYNRYNNWLTNDLYCGYVSYKDKVHVKGIHEPIISEEQFYRVQEIFTRMGKNPNMNRDSASLLNNLVVCSKCGLSFVHRSKDTMSRGKKYHYRYYSCKTYKHTHELEKCGNKTWRADKLEELIINRVNSYSSASRNVDKEDELDSLNEKLEIEHAKKKRLFDLYINGSYEVGELDSMMNDIDAQINYYESLIEANEGLRKNKKIQENLADLAAVDFDSLEFREKQLYLKSLINKIYVDGEQVTIEWL

SEQ ID NO: 8247 - protein, 469 aa, synthetic construct
MCYTTPVRAAVYLRISEDRSGEQLGVARQREDCLKLCDQRKWVPVEYLDNDVSASTGKRRPAYEQMLADITAGKIAAVVAWDLDRLHRRPIELEAFMSLADEKRLALATVAGDIDLATPQGRLVARLKGSVAAHETEHKKARQRRAARQKAERGHPNWSKAFGYLPGPNGPEPDPRTAPLVKQAYADILAGASLGDVCRRWNDAGAFTITGRPWTTTTLSKFLRKPRNAGLRAYKGARYGPVDRDAIVGKAQWSPLVDEATFWAAQAVLDAPGRAPGRKSVRRHLLTGLAGCGKCGNHLAGSYRTDGRVVYVCKACHGVAILADNIEPILYHIVAERLAMPDAVGLLRREIHDAAEAETIRLELETLYGELDSLAVERAEGLLTARQVKICTDIVNAKITKLQARQLDQERLRVLDGIPLGTPQVAGMITELSPDRFRAVLDVLAEVVVQPVGKSGRIFNPERVQVNWR

SEQ ID NO: 8248 - protein, 485 aa, synthetic construct
MTKKVAIYTRVSTTNQAEEGFSIDEQIDRLTKYAEAMGWQVSDTYTDAGFSGAKLERPAMQRLINDIENKAFDTVLVYKLDRLSRSVRDTLYLVKEVFTKNKIDFISLNESIDTSSAMGSLFLTILSAINEFERETIKERMTMGKLGRAKSGKSMMWTKTAFGYYHNRKTGILEIVPLQATIVEQIFTDYLSGISLTKLRDKLNESGHIGKDIPWSYRTLRQTLDNPVYCGYIKFKDSLFEGMHKPIIPYETYLRVQKELEERQRQTYERNNNPRPFQAKYMLSGMARCGYCGAPLRIVLGHKRKDGSRTMKYHCANRFPRKTKGTTVYNDNKKCDSGTYDLSNLENIVIDNLIGFQEDNDSLLKIINGNNQPILDTSSFKEQISQIDKKIQKNSDLYLNDFITMDELKNRTDSLQAEKKLLKAKISESKFNDSTDVFELVKTQLGSIPINELSYDDKKKIVNNLVSKVDVTADNVDIIFKFQLA

SEQ ID NO: 8249 - protein, 469 aa, synthetic construct
MSYTTPVRAAVYLRISEDRSGEQLGVARQREDCLKLCGQRKWVPVEYLDNDVSASTGKRRPAYEQMLADITAGKIAAVVAWDLDRLHRRPIELEAFMSLADEKRLALATVAGDVDLATPQGRLVARLKGCVAAHETEHKKARQRRAARQKAERGLPNWSMAFGYLPGPNGPEPDPRTAPLVKQAYADILAGASLGDVCRQWNDAGAFTITGRPWTTTTLSKFLRKPRNAGLRAYKGARYGPVDRDAIVGKAQWSPLVDEATFWAAQAVLDAPGRAPGRKSVRRHLLTGLAGCGKCGNHLAGSYRTDGRVVYVCKACHGVAILAENIEPILYRIVAERLAMPDAVDLSRREIHDAAEAETIRLELETLYGELDRLAVERAEGLLTARQVKISTDIVNAKITKLQARQLDQERLRVFDGIPLGTPQVAGKIAELSPDRFRAVLDVLAEVVVQPVGKSGRIFNPERVQVNWR

SEQ ID NO: 8250 - protein, 452 aa, synthetic construct
MKAAIYIRVSTREQVENYSIQAQTERLTALCRSKDWDVYDIFIDGGYSGSNMNRPALNEMLSKLHEIDAVVVYRLDRLSRSQRDTITLIEEYFLKNNVEFVSLSETLDTSSPFGRAMIGILSVFAQLERETIRDRMVMGKIKRIEAGLPLTTAKGRTFGYDVVDTKLYINEEEAKQLQLIYDIFEEEQSITFLQKRLKKLGFKVRTYNRYNNWLTNDLYCGYVSYKDKVHVKGIHEPIISEEQFYRVQEIFARMGKNPNMNRDSASLLNNLVVCSKCGLGFVHHRKDAMSRDKKYHYRYYSCKTYKHIHELEKCGNKIWRADKLEELIINRVNNYSLANRNVDKEAELDSLSEKLKIEHAKKKRLFDLYINGSYEVSELDSMMNDIDAQINYYESRIEASEELKKNKKIQEDLADLATVDFDSLEFREKQLYLKSLINKIYIDGEQVTIEWL

SEQ ID NO: 8251 - protein, 469 aa, synthetic construct
MSYTTPVRAAVYLRISEDRSGEQLGVARQREDCLKLCGQRKWEPVEYLDNDVSASTGKRRPAYEQMLADITAGKIAAVVAWDLDRLHRRPIELEAFMSLADEKRLALATVAGDVDLATPQGRLVARLKGSVAAHETEHKKARQRRAARQKAERGHPNWSKAFGYLPGPNGPEPDPRTAPLVKQAYADILAGASLGDVCRRWNDAGAFTITGRPWTTTTLSKFLRKPRNAGLRAYKGARYGPVDRDAIVGKAQWSPLVDEATFWAAQAVLDAPGRAPGRKSVRRHLLTGLAGCGKCGSHLAGSYRTDGRVVYVCKACHGVTILADNIEPILYHIVAERLAMPDAVDLLRREIHDAAEAETIRLELETLYGELDRLAVERAEGLLTARQVKISTDIVNAKITKLQARQLDQERLRVFDGIPLGTPQVAGVIAELSPNRFRAVLDVLAEVVVQPVGKSGGIFNPERVQVNWR

SEQ ID NO: 8252 - protein, 485 aa, synthetic construct; identical to SEQ ID NO: 470

SEQ ID NO: 8253 - protein, 469 aa, synthetic construct
MSYTTPVRAAVYLRISEDRSGEQLGVARQREDCLKLCGQRKWAPVEYLDNDVSASTGKRRPAYEQMLADITAGKIAAVVAWDLDRLHRRPIELEAFMSLADEKRLALATVAGDVDLATPQGRLVARLKASVAAHETEHKKARQRRAARQKAERGLPNWSRAFGYLPGPNGPEPDPRTAPLVKQAYANILAGASLGDVCRQWNDAGAFTITGRPWTTTTLSKFLRKPRNAGLRAYKGARYGPVDRDAIVGKAQWSPLVDEATFWAAQAVLDAPGRAPGRKSVRRHLLTGLAGCGKCGNHLAGSYRTDGRVVYVCKACHGVAILADNIEPILYHIVAERLAMPDAVDLLRREIPDAAEAETIRLELETLYGELDRLAVERAEGLLTARQVKISTDIVDAKITRLQARQLDQERLRVFDGIPLGTPQVAGMIAELSPDRFRAVLDVLAEVVVQPVGKSGRIYNPERVQVNWR

SEQ ID NO: 8254 - protein, 452 aa, synthetic construct
MKAAIYIRVSTQEQVGNYSIQAQTEKLTALCRSKDWDVYDIFIDGGYSGSNMNRPALNEMLSKLHEIDAVVVYRLDRLSRSQRDTTTLIEEYFLKNNVEFVSLSETLDTSSPFGRAMIGILSVFAQLERETIRDRMVMGKIKRIEAGLPLTTAKGRTFGYDVIDTKLYINEEEAKQLRLIYDIFEEEQSITSLQKRLKKLGFKVRTYNRYNNWLTNDLYCGYVSYKDKVHVKGIHEPIISEEQFYRVQEIFTRMGKNPNMNRDSASLLNSLVVCSRCGLSFVHRCKDTMSRGKKYHYRYYSCKTYKHPHELEKCGNKTWRADKLEELIINRVSSYSFASRNVDKEDELNGLNEKLKIEHAKKKRLFDLYINGSYEVSELDNMMNDIDAQINYYESQIEANEGLKKDRKIQENLAGLATVDFDSLEFREKQLYLKSLINKIYIDGEQVTIEWL

SEQ ID NO: 8255 - protein, 485 aa, synthetic construct
MTKKVAIYTRVSTTNQAEEGFSIDEQIDRLTKYAEAMGWQVSDTYTDAGLSGAKLERPAMQRLINDIENRAFDTVLVYKLDRLSRSVRDTLYLVKDVFTKSKIDFISLNESIDTSSAMGSLFLTILSAINEFERENIKERMTMGKLGRAKSGKSMMWTKTAFGYYHNRETGILEIVPLQATIVEQIFTDYLSGISLTKLRDKLNESGHIGKDIPWSYRTLRQTLDNPVYCGYIKFKGSLFEGMHKPIIPYETYLKVQKELEERQQQTYERNNNPRPFQAKYMLSGMARCGYCGAPLKIVLGHKRKDGSRTMKYHCANRFPRKTKGVTVYNDNKKCDSGTYDLSNLESTVIDNLIGFQENNDSLLKIINSNNQPILDTSSFKKQISQIDKKIRKNSDLYLNDFITMDELKDRTDSLQAEKKLLKAKISENKFNDSTDVLELVKTQLGSIPINELSYDNKKKIVNNLVSKVDVTADNVDIIFKFQLA

SEQ ID NO: 8256 - protein, 452 aa, synthetic construct
MKAAIYIRVSTREQVENYSIQAQTEKLTALCRSKDWDVYDIFIDGGYSGSNMNRPALNEMLSKLHEIDAVVVYRLDRLSRSQRDTITLIEEYFLKNNVEFVSLSETLDTSSPFGRAMIGILSVFAQLERETIRDRMVMGKIKRIEAGLPLTTAKGRTFGYDVIDTKLFINEEEAKQLQLIYDIFEEERSITFLQKRLKKLGFKVRTYNCYNNWLTNDLYCGYVSYKDKVHVKGIHEPIISEEQFHRVQEIFTRMGKNPNMNRDSASLLNNLVVCSKCGLGFVHRRKDAMSRDKKYHYRYYSCKTYKHIHELEKCGNKIWRADKLEELIINRVNNYSLASRNVDKEDDLDSLNEKLRIEHAKKKRLFDLYINGSYEVSELDSMMSDIDAQINYYESQIEANEELKKNKKIQENLANLATVDFDSLEFREKQLYLKSLINKIYIDGEQVTIEWL

SEQ ID NO: 8257 - protein, 485 aa, synthetic construct
MTKKVAIYTRVSTTNQAEEGFSIDEQIDRLTKYAEAMGWQVSDTYTDAGLSGARLERPAMQRLINDIENKAFDTVLVYKLDRLSRSVRDTLYLVKDVFTKNKIDFISLNESIDTSSAMGSLFLTILSAINEFERENIKERMTMGKLGRAKSGKSMMWTKTAFGYYHNRKTGILEIVPLQATIVEQIFTDYLSGISLTKLRDKLNESGHIGKDIPWSYRTLRQTLDNPVYCGYIKFKGSLFEGMHKPIIPYETYLEVQKELEERQQQTYERNDNPRPFQAKYMLSGVARCGYCGAPLRIVLGHKRKDGSRAMKYHCANRFPRKTKGVTVYNDNKKCDSGTYDLSNLENAVIDNLIGFQENNDSLLKIINGNNQPILDTSSFKKQISQIDRKIQKNSDLYLNDFITMDELKDRTDSLQAEKKLLKAKISENRLNDSTDVFELVKTQLGSIPISELSYDNKKKIVNNLVSKVDVTADNVDITFKFQLA

SEQ ID NO: 8258 - protein, 469 aa, synthetic construct
MSYTTPVCAAVYLRISEDRSGEQLGVARQREDCLKLCDQRKWVPVEYLDNDVSASTGKRRPAYEQMLADITAGKIAAVVAWDLDRLHRRPIELEAFMSLADEKRLALATVAGDVDLATPQGRLVARLKGSVAAHETEHKKARQRRAARQKAERGHPNWSKAFGYLPGPNGPEPDPRTAPLVKQAYADILAGASLGDVCRRWNGAGAFTITGRPWTTTTMSKFLRKPRNAGLRAYKGARYGPVDRDAIVGKAQWSPLVDEATFWAAQAVLDAPGRAPGRKSVRRHLLTGLASCGKCGNHLAGSYRTDGKVVYVCKACHGVAILADNIEPMLYHIVAERLAMTNAVDLLRRETHDAAEAETIRLGLETLYGELDRLAVERAEGLLTAHQVKISTDIVNAKITKLQARQHDQERLRVLDGIPLGTPQVAGAIAELSPDRFRAVLDVLAEVVVQPVGKSGRIFNPERVQVNWR

SEQ ID NO: 8259 - protein, 469 aa, synthetic construct
MSYTTPVRAAVYLRISEDRSGEQLGVARQREDCLKLCDQRNWVPVEYLDNDVSASTGKRRPAYEQMLADITAGKIAAVVAWDLDRLHRRPIELEAFMSLADEKRLALATVAGDVDLATPQGRLVARLKGSVAAHETEHKKARQRRAARQKAERGHPNWSKAFGYLPGPNGPEPDPRTAPLVRQAYADILAGASLGDVCRQWNDAGAFTITGRPWATTTLSKFLRKPRNAGLRAYRGARYGPVDRDAIVGKAQWSPLVDEATFWAAQAVLDAPGRAPGRKSVRRHLLTGLAGCGKCGYHLSGSYRTDGRVVYVCKACHGVAILADNIEPILYHIVAERLAMPDAVDLLRREIRDAAEAEAIRLELETLYGELDRLAVERAEGLLTARQVKISTDIVNAKITKLQARQLDQERLRVFNGIPLGTPQVAGMIAELSPGRFRAVLDVLAEVVVQPVGKGGRIFNPERVQVNWR

SEQ ID NO: 8260 - protein, 469 aa, synthetic construct
MSYTTPVRAAVYLRISEDRSGEQLGVARQREDCLKLCGQRKWVPVEYLDNDVSASTGKRRPAYEQMLADITAGKIAAVVAWDLDRLHRRPIELEAFMSLADEKRLALATVAGDVDLATPQGRLVARLKGSVAAHETEHKKARQRRAARQKAERGYPNWSKAFGYLPGPNGPEPDPRTAPLVKQAYADILAGASLGDVCRQWNDAGAFTITGRPWTTTTLSKFLRKPRNAGLRAYKGARYGPVDRDAIVGKAQWSPLVDEATFWAAQAVLDAPGRAPGRKSVRRHLLTGLAGCGKCGNHLAGSYRTDGRVVYVCKACHGVAILADNIEPILYHIVAERLAMPDAVDLLRREIHDAAEAETIRLELETLYGELDRLAVERAEGLLTARQVKISTDIVNAKITKLQARQQDQERLRVLDGIPLGTPQVAGMIAELSPDRFRAVLDVLVEVVVQPVGKSGRIFNPERVQVNWR

SEQ ID NO: 8261 - protein, 469 aa, synthetic construct
MSYTTPARAAVYLRISEDRSGEQLGVARQREDCLKLCDQRKWVPVEYLDNDVSASTGKRRPAYEQMLADITEGKIAAVVAWDLDRLHRRPIELEAFMSLADEKRLALATVAGDVDLATPQGRLVARLKGSVAAHETEHKKARQRRAARQKAERGLPNWSKAFGYLPGPNGPEPDPRTAPLVKQAYADILAGASLGDVCRQWNAAGAFTITGRPWTATTLSKFLRKPRNAGLRAYKGARYGPVDRDAIVGKAQWSPLVDEATFWAAQAVLDAPGRAPGRKSVRRHLLTGLAGCGKCGNRLAGSYRTDGRVVYVCKACHGVAILADNIVPILYHIVAERLAMPDAVDLLRREIHDAAEAETIRLELETLHGELDSLAVERAEGLLTARQVKISTDIVNAKITKLQARQQDQERLRVLDGIPLGTPQVAGVIAELSPNRFRAVLDVLAEVVVQPVGKSGRIFNPERVQVNWR

SEQ ID NO: 8262 - protein, 485 aa, synthetic construct
MTKKVAIYTRVSTTNQAEEGFSIDEQIDRLTKYAEAMGWQVSDTYTDAGFSGAKLERPAMQRLINDIENKAFDTVLVYKLDRLSRSVRDTLYLVKDVFTKNKIDFISLSESIDTSSAMGSLFLTILSAINEFERENIKERMTMGKLGRAKSGKSMMWTKTAFGYYHNRETGTLEIVPLQATIVKQIFTDYLSGISLTKLRDKLNESGHIGKDIPWSYRTLRQTLDNPVYCGYIKFRDSLFEGMHKPIIPYETYLKVQKELEERQQQTYERNNNPRPFQAKYMLSGIARCGYCGAPLRIVLGHKRKDGGRTMKYHCANRFPRKTKGVTVYNDNKKCDSGTYDLSNLEDTVIDNLIGLQENNDSLLKIINGNNQPILDTSSFKKQISQIDKKIRKNSDLYLNDFITMDELKDRTDSLQAEKKLLKAKISENKFNDSTDVSELVKTQLGSIPINELSYDDKKKIVNNLVSKVDVTADNVNIIFKFQLA

SEQ ID NO: 8263 - protein, 485 aa, synthetic construct
MTKKVAIYTRVSTANQAEEGFSIDEQIDRLTKYAEAMGWQVSDTYTDAGISGAKLERPAMQRLINDIENKAFDTVLVYKLDRLSRSVRDTLYLVKDVFTKNKIDFISLNESIDTSSAMGSLFLTILSAINEFERENIKERMTMGKLGRAKSGKSMMWTKTAFGYYHNRKTGILEIVPLQAAIVEQIFTDYLSGISLTKLRDKLNESGHIGKDIPWSYRTLRQTLDNPVYCGYIKFKDSLFEGMHKPIIPYETYLKVQKELEERQQQTYERNNNPRPFQAKYMLSGMARCGYCGAPLRIVLGHKRKDGSRTTKYHCANRFPRKTQGITVYNDNKKCDSGTYDLSSLENTVIDNLIGLQENNDSLLKFINGNNQPILDTSSFKEQINQIDKKIQKNSDLYLNDFITMDELKDRTDSLQAEKKLLKAKISENKFNDSTDVFELVKTQLGSIPINELSYDSKKKIVNNLVSKVDVTADNVDIIFKFQLA

SEQ ID NO: 8264 - protein, 469 aa, synthetic construct
MCYTTPVRAAVYLRISEDRSGEQLGVARQREDCLKLCGQRKWVPVEYLDNDVSASTGKRRPAYEQMLADIAAGRIAAVVAWDLDRLHRRPIELEAFMSLADEKRLALATVAGDVDLATPQGRLIARLKGSVAAHETEHKKARQRRAARQKAERGHPNWSKAFGYLPGPNGPEPDPRTAPLVKQAYADILAGASLGDVCRQWNGAGAFTITGRPWTTTTLSKFLRKPRNAGLRAYKGARYGPVDRDAIVGKAQWSPLVDEATFWAAQAVLDAPGRAPGRKSVRRHLLTGLAGCGKCGNHLAGSYRADGRVVYVCKACHGVAILADNIEPILYHIVAERLAMPDAVDLLRRETHDAAEAETIRLGLETLYGELDRLAVERAEGLLTARQVKISTDIVNAKITKLRARQLDQERLRVLDGIPLGTPQVAGMIVELSPDRFRAVLDVLAEVVVQPVGKSGRIFNPERVQVNWR

SEQ ID NO: 8265 - protein, 485 aa, synthetic construct
MTKKVAIYTRVSTTNQAEEGFSIDEQIDRLTKYAEAMGWQVSDTYTDAGFSGAKLERPAMQRLINDIENKAFDTVLVYKLDRLSRSVRDTLYLVKDVFTKNKIDFISLSESIDTSSAMGSLFLTILSAINEFERENIKERMTMGKLGRAKSGKSMMWTKTAFGYYHNRKTGILEIVPLQATIVEQIFTDYLSGISLTKLRDKLNESGHIGKDIPWSYRTLRQILDNPVYCGYIKFKDSLFEGMHKPIIPYETYLKVQKELEERQQQTYERNNNPRPFQAKYMLSGMARCGYCGAPLKIVLGHKRKDGSRTMKYHCANRFPRKTKGVTVYNDNKKCDSGTYDLSNLENTVIDNLIGFQKNNDSLLKIISGNNQPILDTGSLKKQISQIDKKIQKNSDLYLNDFITMDELKDRTDSLRAEKKLLKAKISENKFNDSIEVFELVKTQLGSIPINELSYDNKKKIVNNLVSKVDVTADNVDIIFKFQLA

SEQ ID NO: 8266 - protein, 485 aa, synthetic construct
MTKKVAIYTRVSTTNQAEEGFSIDEQIDRLTKYAEAMGWQVSDTYTDAGFSGAKLERPAMRRLINDIENKAFDTVLVYKLDRLSRSVRDTLYLVKDVFTKNKIDFISLSESIDTSSAMGSLFLTILSAINEFERENIKERMTMGKLGRAKSGKSMMWTKTAFGYYHNRKTGILEIVPLQATIVEQIFTDYLSGISLTKLRDKLNESGHIGKDIPWSYRTLRQTLDNPVYCGYIKFKDNLFEGMHEPIIPYETYLKVQKELEERQQRTYKRNNNPRPFQAKYMLSGMARCGYCGAPLRIVLGHKRKDGSRTMKYHCANRFPRKTKGVTVYDDNRKCDSGTYDLSNLENIVIDNLIGFQENNDSLLKIINGNNQPILDTSSFKEQISQIDKKIQRNSDLYLNDFITMDELKDRTDSLQAEKKLLKAKISENKFNDSTDVFELVKTQLGSIPINELSYDDKKKIVNNLVSKVDVTADNVDIIFKFQLA

SEQ ID NO: 8267 - protein, 485 aa, synthetic construct
MTKKVAIYTRVSTTNQAEEGFSIDEQVDRLTKYAEAMGWQVSDTYTDAGFSGAKLERPAMRRLINDIENKAFDTVLVYKLDRLSRSVRDTLYLVKDVFTKNKIDFISLSESIDTSSAMGSLFLTILSAINEFERENIKERMTMGKLGRAKSGKSMMWTKTAFGYYHNRKTGILEIVPLQATIVEQIFTDYLSGISLTKLRDKLNESGHIGKDIPWSYRTLRQTLDNPVYCGYIKFKDSLFEGMHKPIIPYETYLKVQKELEERQQQTYERNNNPRPFQAKYMLSGMARCGYCGAPLRIVLGHKRKDGSRTMKYHCANRSPRKTNGVTVYNDNKKCDSGTYDLSYLENTVIDNLIGFQENNDSLLKIINGDNQPILDTSSFKRQISQIDKKIQKNSDLYLNDFITMDELKDRTESLQAEKKLLEAKISENKFNDSTDVFELVKTQLGSTPINELSYGNKKKIVNNLVSKVDVTADDVDIVFKFQLA

SEQ ID NO: 8268 - protein, 469 aa, synthetic construct
MSYTTPVRAAVYLRISEDRSGEQLGVARQREDCLKLCGQRKWVPVEYLDNDVSASTGKRRPAYEQMLADITAGKIAAVVAWDLDRLHRRPIELEAFMSLADEKRLALATVAGDVDLATPQGRLVARLKGSVAAHETEHKKARQRRAARQKAERGYPNWSKAFGYLPGPNGPEPDPRTAPLVKQAYADILAGASLGDVCRQWNDAGAFTITGRPWTTTTLSKFLRKPRNAGLRAYKGARYGPVDRDAIVGKAQWSPLVDEATFWAAQAVLDAPGRAPGRKSVRRHLLTGLAGCGKCGNHLAGSCRTDGRVVYVCKACHGVSILAENIEPVLYHIVAERLAMPDAADLLRRETHDAAEAETTRLELETLYGELDRLAVERAEGLLTARQVKISTDIVNAKITKLQARQLDQERLRVLDGIPLGTPQVAGTIAELSPDRFRAVLDVLAEVVVQPVGKSGRMFNPERVQVNWR

SEQ ID NO: 8269 - protein, 469 aa, synthetic construct
MSYTTPVRAAVYLRISEDRSGEQLGVARQREDCLKLCDQRKWVPVEYLDNDVSASTGKRRPAYEQMLADITAGKIAAVVAWDLDRLHRRPVELEAFMSLADEKRLALATVAGDVDLATPQGRLVARLKGCVAAHETEHKKARQRRAARQKAERGHPNWSKAFGYLPGPNGPEPDPRTAPLVKQAYADILAGASLGDVCRQWNDAGAFTITGRPWTTTTLSKFLRKPRNAGLRAYKGARYGPVDRDAIVGKAQWSPLVDEATFWAAQAVLDAPGRAPGRKSVRRHLLTGLAGCGKCGHHLAGSYRTDGRVVYVCKACHGVAILAENIEPILYHIVAERLAMPDAVDLLRREIHDTAEAETIRLELETLYGELDRLAVERAEGLLTARQVKIGTDIVNAKITKLQARQLDQERLRVFDGIPLGTPQVAGMIAELSPDRFRAVLDVLAEVVVQPAGKSGRIFNPERVQVNWR

SEQ ID NO: 8270 - protein, 485 aa, synthetic construct
MTKKVAIYTRVSTTNQAEEGFSIDEQIDRLTKYAEAMGWQVSDTYTDAGSSGAKLERPAMQRLINDIENRAFDTVLVYKLDRLSRSVRDTLYLVKDVFTKNKIDFISLSESIDTSSAMGSLFLTILSAINEFERENIKERMTMGKLGRAKSGKSMMWTRTAFGYYHNRKTGILEIVPLQATIVEQIFTDYLSGISLTKLRDKLNESGHIGKDIPWSYRTLRQTLDNPVYCGYIKFKDSLFEGMHKPIIPYETYLKVQKELEERQQQTYERNNNPRPFQAKYMLSGMARCGYCGAPLKIVLGHKRKDGSRTMKYHCANRFPRKTRGITVYNDNKRCDSGTYDLSNLENTVIDNLIGFQENNDSLLKIINGNNQPILDTSSFKEQISQIDEKIQKNSDLYLNDFITMDELKDRTDSLQAEKKLLKAKISENKFNDSTDVFELVKTQLGSIPINELSYDNKKKIVNNLVSKVDVTADNVDIIFKFQLA

SEQ ID NO: 8271 - protein, 485 aa, synthetic construct
MTKKVAIYTRVSTTNQAEEGFSIDEQIDRLTKYAEAMGWQVSDTYTDAGFSGAKLERPAMQRLINDIENKAFDTVLVYKLDRLSRSVRDTLHLVKDVFTKNKIDFISLNESIDTSSAMGSLFLTILSAINEFERENIKERMTMGKLGRAKSGKSMMWTKTAFGYYHNRKTGILEIVPLQATIVEQIFTDYLSGVSLTKLRDKLNESGHIGKDIPWSYRTLRQTLDNPVYCGYIKFKDSLFEGLHKPIIPYETYLKVQKELEERQQQTYERNNNPRPFQAKYMLSGMARCGYCGAPLRIVLGRKRKDGSRTMKYHCANRFPRRTKGVTVYNDNKKCDSGTYDLSNLENTVIDNLIGFQENNDSLLKIINGNNQPTLDTSSFEKQISRIDKKIQKNSDLYLNDFITVDELRARTDSLQAEKKLLKAKISENKFSDSTDVFELVKTQLGSIPINELSYDNKKKIVNSLVSKVDVTADNVDIIFKFQLA

SEQ ID NO: 8272 - protein, 485 aa, synthetic construct
MTKRVAIYTRVSTTNQAEEGFSIDEQIDRLTKYAEAMGWQVSDTYTDAGLSGAKLERPAMQRLINDIENKAFDTVLVYKLDRLSRSVRDTLYLVKDVFTRNKIDFISLNESIDTSSAMGSLFLTILSAINEFERENIKERMTMGKLGRAKSGKSMMWTKTAFGYYHNRKTGILEIVPLQATIVEQIFTDYLSGISLTKLRDKLNESGHIGKDIPWSYRTLRQTLDNPVYCGYIKFKDSLFEGMHKPIIPYETYLKVQKELEERQQQTYERNNNPRPFQAKYMLSGMARCGYCGAPLRIVLGHKRKDGSRTMKYHCANRFPRRTKGVTVYNDNKKCDSGTYDLSNLENTVIDNLIGFQENNDSLLKIINGDNRPILDTSSIKKQISQIDKKIQKNSDLYLNDFITMDELKDRTDSLQAEKKLLKAKIIENKFNDSTDVFELVKAQLGSIPINELSYDNKKKIVNNLVSKVDVTADNVDIIFKFQLA

SEQ ID NO: 8273 - protein, 469 aa, synthetic construct
MCYTTPVRAAVYLRISEDRSGEQLGVARQREDCLKLCGQRKWVPVEYLDNDVSASTGKRRPAYEQMLADITAGKIAAVVAWDLDRLHRRPIELEAFMSLADEKRLALATVAGDVDLATPQGRLVARLKGSVAAHETEHKKARQRRAARQKAERGLPNWSKAFGYLPGPNGPEPDPRTAPLVKQAYADILAGASLGDVCRQWNDVGAFTITGRPWTTTTLSKFLRKPRNAGLRAYKGARYGPVDRDAIVGKAQWSPLVDEATFWAAQAVLDAPGRAPGRKSVRRHLLTGLAGCGKCGNHLAGSYRTDGKVVYVCKACHGVAILADNIEPILYHIVAERLAMPDAVDLLRREIHDAAEAETIRLELETLYGELDRLAVERAEGLLTARQVKISTDIVNAKIAKLQAHQLDQERLRVFDGIPLGTPQVAGMIAELSPNRFRAVLDVLAEVVVQPVGKGGRIFNPERVQVNWR

SEQ ID NO: 8274 - protein, 469 aa, synthetic construct
MSYTTPVRAAVYLRISEDRSGEQLGVARQREDCLKLCGQRNWVPVEYLDNDVSASTGKRRPAYEQMLADITAGKIAAVVTWDLDRLHRRPVELEAFMSLADEKRLALATVAGDVDLATPQGRLVARMKGCVAAHETEHKKARQRRAARQKAERGLPNWSKAFGYLPGPNGPEPDPRTAPLVRQAYADILAGASLGDVCRQWNDAGAFTITGRPWTTTTLSKFLRKPRNAGLRAYKGARYGPVDRNAIVGKAQWSPLVDEATFWAAQAVLDAPGRAPGRKSVRRHLLTGLAGCGKCGNRLAGSYRTDGRVVYVCKACHGVAILADNIEPILYHIVAVRLAMPDAVDLLRREIHDATEAETIRLELETLYGELDRLAVERAEGLLTARQVKIGTDIVNAKITKLQIRQLDQERLRVFDGIPLGTPQVASVIAELSPDRFRAVLNVLAEVVVQPVGKSGRIFNPERVQVNWR

SEQ ID NO: 8275 - protein, 452 aa, synthetic construct
MKAAIYIRVSTREQVENYSIQAQTEKLTALCRSKDWDVYDIFIDGGYSGSNMNRPALNEMLSKLHEIDAVVVYRLDRLSRSQRDTITLIEEYFLKNNVEFVSLSETLDTSSPFGRAMIGILSVFAQLERETIRDRMVMGKIKRIEAGLPLTTAKGRTFGYDVIDTRLYVNEEEAKQLRLIYDIFEEEQSITSLQKRLKELGFRVRTYSCYNNWLTNDLYCGYVSYKDKVHVKGIHEPIISEEQFNRVQEIFTRMGKNPNMNRGSASLLNNLVVCSKCGLGFVHRRKDAMSRDKKYHYRYYSCKTYKHIHELEKCGNKIWRADKLEELIINRVNNYSVASRNVDKEDELDSLNEKLKIEHAKKKRLFDLYINGSYEVSELDSRMNGIDAQINYYESQIEANEELKKNKKIQENLADLATVDFDSLEFREKQLYLKSLINKIYIDGEQVTIEWL

SEQ ID NO: 8276 - protein, 469 aa, synthetic construct
MCYTTPVRAAVYLRISEDRSGEQLGVARQREDCLKLCGQRKWVPVEYLDNDVSASTGTRRPAYEQMLADITAGKIAAVVAWDLDRLHRRPVELEAFMSLADEKRLALATVAGDVDLATPQGRLVARLKGCVAAHETEHKKARQRRAARQKAERGHPNWSKAFGYLPGPNGPEPDPRTAPLVKQAYADILAGASLGDVCRQWNDAGAFTITGRPWTTTTLSKFLRKPRNAGLRAYKGARYGPVDRDAIVGKAQWSPLVDEATFWAAQAVLDAPGRAPGRKSVRRHLLTGLAGCGKCGNHLAGSYRTDGRVVYVCKACHGVAILAVNIEPILYHIVAERLAMPNAVDLLRREIHDAAEAETVRLELETLYGELDSLAVERAEGLLTARQVKISTDIVSAKITKLQARQLDQERLRVFNGIPLGTPQVAGVIAKLSPDRFRAVLDVLAEVVVQPVGKSGRIFNPERVQVNWR

SEQ ID NO: 8277 - protein, 485 aa, synthetic construct
MTKKVAIYTRVSTTNQAEEGFSIDEQIDRLTKYAEAMGWQVSDTYTDAGLSGAKLERPAMQRLINDIENKAFDTVLVYKLDRLSRSVRDTLYLVKDVFTKNRIDFISLNESIDTSSAMGSLFLTILSAINEFERENIKERTTMGKLGRAKSGKSMMWTKTAFGYYHNRKTGILEIVPLQATIVEQIFTDYLSGISLTKLRDKLNESGHIGKDIPWSYRTLRQTLDNPVYCGYIKFKDSLFEGMHEPIIPYETYLKAQKELEERRQQTYERNNNPRPFQAKYMLSGMARCGYCGAPLRIVLGHKRKDGSRTMKYHCANRFPRKTKGVTVYNDNKKCDSGTYDLSNLENTVIDNLVGIQENNDRLLKIINGNNQPTLDTSSFKKQISQIDKKIQKNSDLYLNDFITMDELKDRTDSLQAEKKLLEAKISENKFNDSTDVFELVKTQLGSIPINELSYDNKKKIVNNLVSKVDVTADNVDIIFKFQLA

SEQ ID NO: 8278 - protein, 452 aa, synthetic construct
MKAAIYIRVSTQEQVGNYSIQAQTEKLTALCRSKDWDVYDIFVDGGYSGSNMNRPALNEMLSKLHEIDAVVVYRLDRLSRSQRDTTTLIEEYFLKNNVEFVSLSETLDTSSPFGRAMIGILSVFAQLERETIRDRMVMGKIKRIEAGLPLTTAKGRTFGYDVIDTKLYINEEEAKQLQLIYDIFEEEQSITSLQKRLKKLGFKVRTYNRYNNWLTNDLYCGYVSYKDKVHVKGIHEPIISEEQFYRVQEIFTRMGKNPNMNRDSASLLNSLVVCSRCGLSFVHRSKDTLSRGKKYHYRYYSCKTYKHTHELEKCGNKTWRADKLEELIINRVNNYSFAGRNVDKEDELDSLNEKLKIEHAKKKRLFDLYINGSYEVSELDNMMNDIDAQINYYEGRIEANEELRRNKKIQENLADLATVDFDSLEFREKQLYLKSLINKIYIDGEQVTIEWL

SEQ ID NO: 8279 - protein, 485 aa, synthetic construct
MTKKVAIYTRVSTTSQAEEGFSIDEQIDRLTKYAEAMGWQVSGTYTDAGFSGAKLERPAMQRLINDIENKAFDTVLVYKLDRLSRSVRDTLYLVKDVFTKNKIDFISLNESIDTSSAMGSLFLTILSAINEFERENIKERMTMGKLGRAKSGKSMMWTKTAFGYHHNRKTGILEIVPLQATIVEQIFTDYLSGISLTKLRDKLNESGHIGKDIPWSYRTLRQTLDNPVYCGYIKFKGSLFEGMHKPIIPYETYLKVQKELEERQQQTYERNNNPRPFQAKYMLSGMARCGYCGAPLKIVLGHKRKDGSRTMKYHCANRFPRKTKGTTVYNDNKKCDSGTYDLSNLENTVIDNLIGFQENNDSLLRIINGNNQPILDTSSFKKQISQIDRKIQKNSDLYLNDFITMDELKDRTVSLQAERKLLEAKISESKFNDSTGVFELVKTQLGCVPINELSYDDKKKIVNNLVSKVDVTADNVDIIFKFQLA

SEQ ID NO: 8280 - protein, 469 aa, synthetic construct; identical to SEQ ID NO: 4429

SEQ ID NO: 8281 - protein, 485 aa, synthetic construct
MTKKVAIYTRVSTTNQAEEGFSIDEQVDRLTKYAEAMGWQVSDTYTDAGSSGAKLERPAMQRLINDIENKAFDTVLVYKLDRLSRSVRDTLYLVKEVFTKNKIDFISLNESIDTSSAMGSLFLTILSAINEFERENIKERMTMGKLGRAKSGKSMMWTKTAFGYYHNRKTGILEVVPLQATVVEQIFTDYLSGISLTKLRDKLNESGHIGKDIPWSYRTLRQTLDNPVYCGYIKFKDSLFEGMHKPIIPYETYLKVQKELEERQQQTYERNNNPRPFQAKYMLSGMARCGYCGAPLRIVLGRKRKDGSRTMKYHCANRFPRKTKGVTVYNDNKKCDSGTYDLSNLENTVIDNLIDFQENNDSLLKIINGNNRPILDTSSFKKQISQIDKKIQKNSDLYLNDFITMDELKSRTDSLQAEKKLLEAKISENKFNDSTDVFELVKTQLGSIPINELSYDNKKKIVNNLVSKVDVTADNVDIIFKFQLA

SEQ ID NO: 8282 - protein, 485 aa, synthetic construct
MTKKVAIYTRVSTTNQAEEGFSIDEQIDRLTKYAEAMGWQVSDTYTDAGFSGAKLERPAMQRLINDIENRAFDTVLVYKLDRLSRSARDTLYLVKDVFTKNKIDFISLNESIDTSSAMGSLFLTILSAINEFERENIKERMTMGKLGRAKSGKSMMWTKTAFGYYHNRKTGILEIVPLQATIVEQIFTDYLSGISLTKLRDKLNESGHIGKDIPWSYRTLRQTLDNPVYCGYIKFKDSLFEGMHKPIIPYETYLKVQKELEERQQQTYERNNNPRPFQAKYMLSGMARCGYCGAPLRIVLGHKRKDGSRTMKYHCTNRFPRKTKGVTVYNDNKKCDSGTYDLSNLEDTVIDTLIGFQENNDSLLKIINGNNLPILDTGSLEKQISQIDKKIQKNSDLYLNDFITVDELKDRTDSLQAEKKLLKAKISENRFNDSTDVFELVKTQLGSTPINELSYDNKKKIVNNLVSKVDVTADNVDIIFKFQLA

SEQ ID NO: 8283 - protein, 469 aa, synthetic construct
MSYTTPVRAAVYLRISEDRSGEQLGVARQREDCLKLCDQRKWVPVEYLDNDVSASTGKRRPAYEQMLADITAGKIAAVVAWDLDRLHRRPIELETFMSLADEKRLALATIAGDVDLATPQGRLVARLKGSVAAHETEHKKARQRRAARQKAERGYPNWSKAFGYLPGPSGPEPDPRTAPLVKQAYADILAGASLGDVCRQWNAAGAFTITGRPWTTTALSKFLRKPRNAGLRAYKGARYGPVDRDAIVGKAQWSPLVDEATFWAAQAVLDAPGRAPGRKSVRRHLLTGLAGCGKCGNHLAGSYRTDGRVVYVCKACHGVAILADNIEPILYHIVAERLAMPDAVDLLRREIHDAAEAETIRLELETLYGELDRLAVERAEGLLTARQVKISTDIVNAKITKLQAHQLDQERLRVLDGVPLGTPQAAGMIAELSPDRFRAVLDVLAEVVVQPVGKSGRIFNPERVQVNWR

SEQ ID NO: 8284 - protein, 469 aa, synthetic construct
MSYTTPVRAAVYLRISEDRSGEQLGVARQREDCLKLCGQRKWEPVEYLDNDVSASTGKRRPAYEQMLADITAGKIAAVVAWDLDRLHRRPIELEAFMSLADEKRLALATVAGDVDLATPQGRLVARLKGSVAAHETEHKKARQRRAARQKAERGHPNWSKAFGYLPGPNGPEPDPRTAPLVKQAYADILAGASLGDVCRRWNDAGAFTITGRPWTTTTLSKFLRKPRNAGLRAYKGARYGPVDRDAIVGKAQWSPLVDEATFWAAQAVLDAPGRAPGRKSVRRHLLTGLAGCGKCGNHLAGSYRTDGRVVYVCKTCHGVAILADNIEPILYHIVAERLAMPDAVDLLRREIHDAAEAETIRLELETLHGELDRLAVERAEGLLTARQVKISTDIVNARITKLQARQLDQERLRVLDGIPLGTPQVAGMIAELSPDRFRAVLDVLADVVVQPVGKGGRIFNPERVQVNWR

SEQ ID NO: 8285 - protein, 485 aa, synthetic construct
MTKKVAIYTRVSTTNQAEDGFSIDEQVDRLTKYAEAMGWQVSDTYTDAGFSGAKLERPAMQRLINDTENKAFDTVLVYKLDRLSRSVRDTLYLVKDVFTRNKIDFISLNESIDTSSAMGSLFLTILSAINEFERENIRERMTMGKLGRAKSGKSMMWTKTAFGYYHNRETGILEIVPLQATIVEQIFTDYLSGISLTKLRDRLNESGHIGKDIPWSYRTLRQTLDNPVYCGYIKFKDSLFEGMHKPIIPYETYLKVQKELEERQQQTYERNNNPRPFQAKYMLSGMARCGYCGAPLKIVLGHKRKDGSRTMKYHCANRFPRKTKGVTVYNDNKKCDSGTYDLSNLENTVIDNLIGFQENNDSLLKIINGSDQPILDTSNFKKQISQIDKKIQKNSDLYLNGFITMDELKVRTDSLQAEKKLLEAKISENKLNDSTDVFELAKTQLGSIPINELSYENKKKIVNNLVSKVDVTADNVDIIFKFQLA

SEQ ID NO: 8286 - protein, 485 aa, synthetic construct
MTKKVAIYTRVSTTNQAEEGFSIDEQIDRLTKYAEAMGWQVSDTYTDAGFSGAKLERPAMQRLINDIENKAFDTVLVYKLDRLSRSVRDTLYLVKNVFTKNKIDFISLNESIDTSSATGSLFLTILSAINEFERENIKERMTMGKLGRAKSGKSMMWTKTAFGYYHNRKTGILEIVPLQATIVEQIFTDYLSGISLTKLRDKLNESGHIGKDIPWSYRTLRQTLDNPVYCGYIKFKGRLFEGTHKPIIPYETYLKVQKELEERQQQTYERNNNPRPFQAKYMLSGIARCGYCGAPLRIVLGHKRKDGSRTMKYHCANRFPRETKGITVYNDNKKCDSGTYDLSNLENTVIDNLVGFQGNNDSLLKIINGNNQPILDTSSFKRQISQIDKKIQKNSDLYLNDFITMDELKDRTDSLQAEKKLLEAKISENKFNDRTDVFELVKTQLGGIPINELSYDNKKKIVNNLVSKVDVTADNVDIIFKFQLA

SEQ ID NO: 8287 - protein, 485 aa, synthetic construct
MTKKVAIYTRVSTTNQAEEGFSIDEQIDRLTKYAEAMGWQVSDTYTDAGFSGAKLERPAMQRLINDIENKAFDTVLVYKLDRLSRSVRDTLYLVKDVFTKNKIDFISLNESIDTSSAMGSLFLTILSAINEFERENIKERMTMGKLGRAKSGKSMMWTKTAFGYYHNRKTGILEIVPLQATIVEQIFTDYLSGISLTKLRDKLNESGHIGKDIPWSYRTLRQTLDNPVYCGYIKFKDSLFEGMHKPIIPYETYLKVQKELEERQQQTYERNNNPRPFQAKYMLSGMARCGYCGAPLKIVLGHKRKDGSRTMKYHCANRFPRKTKGVTVYNDNKKCDSGTYDLSNLENTVIDYLIGFQENNDSLLKIINGNNQPILDTSSFKKLISQIDKKIQKNSDLYLNDFITMDELKDRTDSLQAEKKLLKAKISENKFNDNTDVFELVKTQLGSIPINELSYDNKKNIVNNLVSKVDVTADNVDIIFKFQLA

SEQ ID NO: 8288 - protein, 452 aa, synthetic construct
MKAAIYIRVSTQEQVENYSIQAQTEKLTALCRSKDWDVYDIFVDGGYSGSNMNRPALNEMLSKLHEIDAVVVYRLDRLSRSQRDTTTLIEEYFLKNNVEFVSLSETLDTSSPFGRAMIGILSVFAQLERETIRDRMVMGKIKRIEAGLPLTTAKGRTFGYDVIDTKLYINVEEAKQLQLIYDIFEEEQSITSLQRRLKKLGFKVRTYNRYNNWLTNDLYCGYVSYKDKVHVKGIHEPIISEEQFYRVQEIFTRMGKNPNMNRDSASLLSNLVVCSKCGLGFVHRSKDTMSRGKKYHYRYYSCKTYKHTHELEKCGNKTWRADKLEELIINRVNNYSFASRNADKEDELDSLNEKLKVEHARKKRLFDLYINGSYEVSELDSMMNDIDAQINYYESQIEASEELKRNKKIQENLADLATVDFDSLGFREKQQYLKSLINKIYIDGEQVTIEWL

SEQ ID NO: 8289 - protein, 452 aa, synthetic construct
MKAAIYIRVSTREQVENYSIQAQTEKLTALCRSKDWDVYDIFIDGGYSGSNMNRPALNEMLSKLHEIDAVVVYRLDRLSRSQRDTITLIEEYFLKNNVEFVSLSETLDTSSPFGRAMIGILSVFAQLERETIRDRMVMGKIKRIEAGLPLTTAKGRTFGYDVIDTKLYINEEEAKQLQLIYDIFEEERSITFLQRRLKKLGFKVRTYNRYNNWLTNDLYCGYVSYKDKVHVKGIHEPIISEEQFYRVQEIFTRMGKNPNMNRDSASLLNNLVVCGKCGLGFVHRRKDAMSRSKKYHYRYYSCKTYKHIHELEKCGNKIWRADKLEELVINHVNNYSLASRNVDKEDELDSLNEKLKIEHARKKRLFDLYINGRYEVSELDCMMNDIDAQINYYESQIEANEELKKNKKIQENLANLATVDFDSLEFREKQLYLKSLINKIYIDGEQVTIEWL

SEQ ID NO: 8290 - protein, 485 aa, synthetic construct
MTKKVAIYTRVSTTNQAEEGFSIDEQVDRLTKYAEAMGWQVSDTYTDAGVSGAKLERPAMQRLINDIENKAFDTVLVYKLDRLSRSVRDTLYLVKDVFTKNKIDFISLNESINTSSAMGSLFLTILSAINEFERENIKERMTMGKLGRAKSGKSMMWTKTAFGYYHNRRTGILEIVPLQATIVEQIFTDYLSGISLTKLRDKLNESGHIGKDIPWSYRTLRQTLDNPVYCGYIKFKDSLFEGLHKPIIPYETYLKVQKELEERQQQTYERNNNPRPFQAKYMLSGMARCGYCGAPLRIVLGHRRKDGSRTMKYHCANRFPRKTKGVTVYNDNKKCDSGTYDLSNLENTVIDILIGFQENNDSLLKIINGNNQPILDTSSFKEQISRIDKKIQKNSDLYLNDFITMDELRDRTDSLQAEKKLLEAKISENKFNDSTDVFELVKTQLGSIPINELSYDNKKKIVNNLVSKVDVTADSVDIIFKFQLA

SEQ ID NO: 8291 - protein, 485 aa, synthetic construct
MTKKVAIYTRVSTTNQAEEGFSIDEQIDRLTKYAEAMGWQVSDTYTDAGLSGAKLERPAMQRLINDIENKAFDTVLVYKLDRLSRSVRDTLYLVKDVFTKNKIDFISLSESIDTSSAMGSLFLTILSAINEFERENIKERMTMGKLGRARSGKSMMWTKTAFGYCHNRKTGILEIVPLQAAIVEQIFTDYLSGISLTKLRDKLNESGHIGKDIPWSYRTLRQTLDNPVYCGYIKFKGSLFEGMHKPIIPYETYLKVQKELEERQQQTYERNNNPRPFQAKYMLSGMARCGYCGAPLRIVLGHKRKDGSRTMKYHCANRFPRETKGVTVYNDNRKCDSGTYDLSNLENTVIDNLIGFQENNDSLLKIINGNNQPILDTSSLKKQISQIDKKIQKNSDLYLNDFITMDELKERTDSLQAEKRLLKAKISENKFNDSTNVFELVRTQLGSIPINELSYDNKKKIVNNLVSKVDVTADNVDIIFKFQLA

SEQ ID NO: 8292 - protein, 485 aa, synthetic construct
MTKKVAIYTRVSTTNQAEEGFSIDEQIDRLTKYAEAMGWQVSDTYTDAGFSGAKLVRPAMQRLINDIENKAFDTVLVYKLDRLSRSVRDTLYLVKDVFTKNKIDFISLNESIDTSSAMGSLFLTILSAINEFERENIKERMTMGKLGRAKSGKSMMWTKTAFGYYHNCKTGILEIVPLQATIVEQIFTDYLSGISLTKLRDKLNEGGHIGKDIPWSYRTLRQTLGNPVYCGYIKFKGSLFEGMHKPIIPYETYLKVQKELEERQQQTYERNNNPRPFQAKYMLSGMARCGYCGAPLKIVLGHKRKDGSRTMKYHCANRFPRKTKGVTVYNDNKKCDSGAYDLSNLENTVIDNLIGLQENNDSLLKIINGSNQPVLDTSSFKKQISQIDKKIQKNSDLYLNDLITMDELKDRTDSLQAERKRLKAKISENKFNDSTDVFELVKTQLGSIPISELSYDNKKKIVNNLVSKVDVTADNVDIIFKFQLA

SEQ ID NO: 8293 - protein, 469 aa, synthetic construct
MCYTTPVRAAVYLRISEDRSGEQLGVARQREDCLKLCDQRKWVPVEYLDNDVSASTGKRRPAYERMLADITAGKIAAVVAWDLDRLHRRPIELEAFMSLADEKRLALATVAGDVDLATPQGRLVARLKGSVAAHETEHKKTRQRRAARQKAERGHPNWCKAFGYLPGPNGPEPDPRTAPLVKQAYAGILAGASLGDVCRQWNDAGAFTITGRPWTTTALSKFLRKPRNAGLRAYKGARYGPVDRDAIVGKAQWSPLVDEATFWAAQAVLDAPGRAPGRKSVRRHLLTGLAGCGKCGSHLSGSYRTDGRVAYVCKACHGIAILADNIEPILYHIVAERLAMPDAVDLLRREIHDAAEAEAIRLELETLHGELDRLAVERAEGLLTARQVKISTDIVSAKITNLQARQLDQERLRVFEGIPLGTPQVAGMIAELSRDRFRAVLDVLAEVVVQPVGKGGRIFNPERVRVNWR

SEQ ID NO: 8294 - protein, 485 aa, synthetic construct
MTKKVAIYTRVSTTNQAEEGFSIDEQIDRLTRYAEAMGWQVSDTYTDAGFSGVKLERPAMQRLINDIENKAFDTVLVYKLDRLSRSVRDTLHLVKDVFTKNKIDFISLNESIDTSSAMGSLFLTILSAINEFERENIKERMTMGKLGRAKSGKSMMWAKTAFGYYHNRRTGILEVVPLQATIVEQIFTDYLSGISLTKLRDKLNESGHIGRDIPWSYRTLRQTLDNPVYCGYIKFKDSLFEGMHKPIIPYEIYLKVQKELEERQQQTYERNNNPRPFQAKYMLSGMARCGYCGAPLRIVLGRKRKDGSRTMKYHCANRFPRKTKGVTVYNDNKKCDSGAYDLSDLENTVIDNLIGFQENNDSLLKIINGNDQPIQDTSSIKDQISQIDKKIQKNSDLYLNDFITMDELKDRTDSLQAEKKLLRAKISENKFNDSTDVFELVKTQLGSIPINELSYDNKKKIVNNLVSKVDVTADNVDIIFKFQLA

SEQ ID NO: 8295 - protein, 485 aa, synthetic construct
MTKKVAIYTRVSTTNQAEEGFSIEVQIDRLTKYAEAMGWQVSDTYTDAGFSGAKLERPAMQRLINDIENKAFDTVLVYKLDRLSRSVRDTLYLVKDVFTKNKIDFISLNESIDTSSAMGSLFLTILSAINEFERENIKERMTMGKLGRAKSGKSMMWTKTAFGYYHNRKTGILEIVPLQATIVEQIFTDYLSGISLTKLRDKLNESGHIGKDIPWSYRTLRQTLDNPVYCGYIKFKDSLFEGMHKPIIPYETYLKVQKELEERQQQTYERNNNPRPFQAKYMLSGMARCGYCGAPLRIVLGHKRKDGSRTMKYHCANRFPRKTKGVTVYNDNKKCDSGTYDLCNLENTVIDNLIGLQENNDSLLKIINGNNRPILDTSSFEKQISQIDKKIQKNSDLYLNDFITMDELKDRTDSLQAEKKLLKAKISENEFNDSTDVFELAKAQLGSVPINELSYDNKKKIVNNLVSKVDVTADNVDIIFKFQLA

SEQ ID NO: 8296 - protein, 452 aa, synthetic construct
MKAAIYIRVSTQEQVGNYSIQAQTEKLTALCRSKDWDVYDIFIDGGYSGSNMNRPALNEMLSKLHEIDAVVVYRLDRLSRSQRDTTTLIEEYFLKNNVEFVSLSETLDTSSPFGRAMIGILSVFAQLERETIRDRMVMGKIKRIEAGLPLTTAKGRTFGYDVIDTKLYINEEEAKQLQLIYDIFEEEQSITSLQKRLKKLGFKVRTYNRYNNWLTNDLYCGYVSYKDKVHVKGIHEPIISEEQFYRVQEIFTRMGKNPNMNRDSASLLNNLVVCSKCGLGFVHRSKDTMSHGKKYHYRYYSCKTYKHTHELEKCGNKTWRADKLEELIINRVNNHSFASRDVDKEDELDSLNEKLKIEHAKKQRLFDLYINGSYEVSELDSMMNDIDAQINYYESQIEANEELKKNKKIQENLADLATVDFDSLEFREKQLYLKSLINKIYIDGEQVTIEWL

SEQ ID NO: 8297 - protein, 485 aa, synthetic construct
MTKKVAIYTRVSTTNQAEEGFSIDEQIDRLTKYAEAMGWQVSNTYTDAGLSGAKLERPAMQRLINDIENKAFDTVLVYKLDRLSRSVRDTLYLVKDVFTKNKIDFISLNESIDTSSAMGSLFLTILSAINEFERENIKERMTMGKLGRAKSGKSMMWAKTAFGYYHNRRTGILEVVPLQAAIVEQIFTDYLSGISLTKLRDKLNESGHTGKDIPWSYRTLRQILDNPVYCGYIKFKDSLFEGMHKPIIPYETYLKVQKELEERQRQTYERNNNPRPFQAKYMLSGMARCGYCGAPLRIVLGHKRKDGSRTMKYHCANRFPRKTKGVTVYNDNKKCDSGTYDLSDLENTVIDNLIGLQENNDSLLKIINGNDQPTLDTSSLKKQISQIDKKIQKNSDLYLNDFITMDELKDRTGSLQAEKKLLKAKISENKFNDSTDVFELVKTQLGSIPINELSYDSKKKIVNNLVSKVDVTADNVDIIFKFQLA

SEQ ID NO: 8298 - protein, 485 aa, synthetic construct
MTKKVAIYTRVSTTNQAEEGFSIDEQIDRLTKYAEAMGWQVSDTYTDAGFSGAKLERPAMQRLINDIGNKAFDTVLVYKLDRLSRSVRDTLYLVKDVLTKNKIDFISLNESIDTSSAMGSLFLTILSAINEFERENIKERMAMGKLGRAKSGKSMMWTKTAFGYYHNRRTGILEIVPLQAAIVEQIFTDYLSGISLTKLRDKLNESGHIGKDIPWSYRTLRQTLDNPVYCGYIKFKDSLFEGMHKPIIPYETYLKVQKELEERQQQTYERNNNPRPFQAKYMLSGMARCGYCGAPLRIVLGHKRKDGSRTMKYHCANRFPRKTKGVTVYNDNKKCDSGTYDLSNLESTVIDYLIGFQENNDSLLKIINGSNQPILDASSFKKQISQIDRKIQKNSDLYLNDFITMDELKDRTDSLQAEKKLLKAKISEDKFNDSTDVFELVKTQLGSIPINELSYDDKKKIVNNLVSKVDVTADNVDIIFKFQLA

SEQ ID NO: 8299 - protein, 485 aa, synthetic construct
MTKKVAIYTRVSTTNQAEEGFSIDEQVDRLTKYAEAMGWQVSDTYTDAGFSGAKLERPAIQRLISDIENKAFDTVLVYKLDRLSRSVRDTLYLVKDVFTRNKIDFISLNESIDTSSAMGSLFLTILSAINEFERENIKERMTMGKLGRAKSGKSMMWTKTAFGYYHNRKTGILEIVPLQAAIVEQIFTDYLSGISLTKLRDRLNESGHIGKDIPWSYRALRQTLDNPVYCGYIKFKDSLFEGMHKPIIPYETYLKVQKELEERQQQTYERNNNPRPFQAKYMLSGMARCGYCGAPLRIVLGHKRKDGSRTMKYHCANRFPRKTKGVTVYNDNKKCDSGTYDLSNLENTVIDNLIGFQESNDSLLEIINGNNQPILDTSSLERQISQIDKKIQKNSDLYLNDFITMDELKDRTDSLQAEKKLLKAKIGENKFNDSTDVFELVKTQLGSIPINELSYDNKKKIVNNLVSKVDVTADNVVIIFKFQLA

SEQ ID NO: 8300 - protein, 485 aa, synthetic construct
MTKKVAIYTRVSTTNQAEEGFSIDEQVDRLTKYAEAMGWQVSDTYTDAGLSGAKLERPAMQRLINDIENKAFDTVLVYKLDRLSRSVRDTLYLVKDVFTKNKIDFISLSESIDTSSAMGSLFLTILSAINEFERENIKERMTMGKLGRAKSGKSMMWTKTAFGYYHNRKTGILEIVPLQATIVEQIFADYLSGISLTKLRDKLNESGHIGKDIPWSYRTLRQTLDNPVYCGYIKFKDSLFEGMHKPIIPYETYLKVQRELEERQQQTYERNNNPRPFQAKYMLSGMARCGYCGAPLRIVLGHKRKDGSRAMKYHCANRFPRKTKGVTVYNDNKKCDSGTYDLSNLENTVIDNLIGFQENNDSLLKIINGNNQPILDTSSFEKQISQIDKIIQKNSDLYLNDFITMDELRDRTDSLQAEKKLLKAKISKNKFNDSTDVFELVKTQLGSIPINELSYDNKKKIVNNLVSKVDVTADNVDIIFKFQLA

SEQ ID NO: 8301 - protein, 452 aa, synthetic construct
MKAAIYIRVSTREQVENYSIQAQTEKLTALCRSKDWDVYDIFIDGGYSGSNMNRPALNEMLSKLHEIDAVVVYRLDRLSRSQRDTITLIEEYFLRNNVEFVSLSETLDTSSPFGRAMIGILSVFAQLERETIRDRMVMGKIKRIEAGLPLTTAKGRTFGYDVIDTKLYINKEEAKQLQLIYDIFEEEQSITSLQKRLKKLGFKVRTYNRYHNWLTNDLYCGYVSYKDKVRVKGIHEPIISEEQFYRVQEIFTRMGKNPNMNRGSASLLNNLVVCSKCGLGFVHRRKDIVSRGKKYHYRYYSCKTYKHIHELEKCGNKIWRADKLEELIINRVNSYSLASRNVVKEDELDSLNEKLQIEHAKKGRLFDLYISGSYEVSELDSMMSDIDAQINYYENQIEANEELKKDKKIQENLADLATVDFDSLEFREKQLYLKSLINKIYIDGEQVTIEWL

SEQ ID NO: 8302 - protein, 485 aa, synthetic construct
MTKKVAVYTRVSTTNQAEEGFSIDEQIDRLTKYAEAMGWQVSGTYTDAGLSGAKLERPAMQRLINDIENKAFDTVLVYKLDRLSRSVRDTLYLVKDVFTKNKIDFISLNESIDTSSAMGSLFLTILSAINEFERENIKERMTMGKLGRAKSGKSMMWTKTAFGYYHNRKTGILEIVPLQATIVEQIFTDYLSGISLTKLRDKLNESGHIGKDIPWSYRTLRQTLDNPVYCGYIKFKDSLFEGMHKPIIPYETYLKVQKELEERQQQTYERNNNPRPFQAKYMLSGMARCGYCGAPLRIVLGHKRKDGSRTMKYHCANRFPRKTKGVTVYNDNKKCDSGTYDLSNLENTVIDNLIGFQENNDSLLKIINGNNQPILDTSSFKKQISQIDKKIQKNSDLYLNDFITMDELKDRTDSLQAEKKLLKAKISENKFNDSTDVFELVKTQLGSIPINELSYDNKKKIVNNLVSKVDVTADNVDIIFKFQLV

SEQ ID NO: 8303 - protein, 469 aa, synthetic construct
MSYTTPVRAAVYLRISEDRSGEQLGVARQREDCLKLCDQRKWVPVEYLDNDVSASTGKRRPAYEQMLADITAGKIAAVVAWDLDRLHRRPIELEAFMSLADEKRLALATVAGDVDLATPQGRLVARLKGCVAAHETEHKKARQRRAARQKAERGHPNWSKAFGYLPGPNGPEPDPRTAPLVKQAYADILAGASLGDVCRQWNDAGAFTITGRPWTTTTLSKFLRKPRNAGLRAYKGARYGPVDRGAIVGKAQWSPLVDEATFWAAQAVLDAPGRAPGRKSVRRHLLTGLAGCGKCGNHLAGSYRTDGRVVYVCKACHGVAILADNIEPILYHIVAERLAMPDAVDLLRREIHDAAEAETIRLELETLYGELDRLAVERAEGLLTARQVKISTDIVNAKITKLQARQLDQERLRVLDGIPLGTPQVAGMIAELSPDRFRAVLDVLAEVVVQPVGKSGRIFNPGRVQVNWR

SEQ ID NO: 8304 - protein, 485 aa, synthetic construct
MTKKVAIYTRVSTTNQAEEGFSIDEQIDRLSKYAEAMGWQVSDTYTDAGLSGAKLERPAMQRLINDIENKAFDTVLVYKLDRLSRSVRDTLYLVKDVFTKNKIDFISLNECIDTSSAMGSLFLTILSAINEFERENIKERMTMGKLGRAKSGKSMMWTKTAFGYCHNRKTGILEIVPLQATIVEQIFTDYLSGISLTKLRDKLNESGHIGKDIPWSYRTLRQTLDNPVYCGYIKFKESLFEGMHKPIIPYETYLKVQKELGERQRQTYERNNNPRPFQAKYMLSGIARCGYCGAPLRIVLGHKRKDGSRTMKYHCANRFPRKTKGVTVYNDNKKCDSGTYDLSNLENTVIDNLIGLQGNSDSLLKIINGNDQPILDTSSFKKRISQIDKEIQKNSDPYLNDFITMEELKDRTDSLQEEKKLLKAKISETKFNDSTDVFELVKTQLGSIPINELSYDNKKKVVNNLVSKVDVTADNVDIIFKFQLA

SEQ ID NO: 8305 - protein, 469 aa, synthetic construct
MSYTTPVRAAVYLRISEDRSGEQLGVARQREDCLKLCGQRKWVPVEYLDNDVSASTGKRRPAYEQMLADITAGRIAAVVAWDLDRLHRRPIELEAFMSLADEKRLALATVAGDVDLATPQGRLVARLKGSVAAHETEHKKARQRRAARQKAERGYPNWSKAFGYLPGPNGPEPDPRTAPLVKQAYADILAGASLGDVCRQWNDAGAFTITGRPWTTTTLSKFLRKPRNAGLRAYKGARYGPVDRDAIVGKAQWSPLVDEATFWAAQAVLDAPGRAPGRKSVRRHLLTGLAGCGKCGDHLAGSYRTDGRVVYVCKACHGVAILADNIEPILYHIVAERLAMPDAVDLLRREIHDTAEAETIRLELETLYGELDRLAVERAEGLLTARQVKISTDIVNAKINKLQARQLDQERLRVFDGIPLGTPQVAGTIAGLSPDRFRAVLDVLAEVVVQPVGKSGRIFNPERVQVNWR

SEQ ID NO: 8306 - protein, 485 aa, synthetic construct
MAKKVAIYTRVSTTNQAEEGFSIDEQIDRLTKYAEAMGWQVSDTYTDAGLSGAKLERPAMQRLINDIENKAFDTVLVYKLDRLSRSVRDTLYLVKDVFTKNKIDFISLSESIDTSSAMGSLFLTILSAINEFERENIKERMTMGKLGRAKSGKSMMWTKTAFGYYHNRKTGILEIVPLQATIVEQIFTDYLSGISLTKLRDKLNEGGHIGKDIPWSYRTLRQTLDNPVYCGYIKFKDSLFEGMHKPIIPYETYLKVQKELEERQQQAYERNNNPRPFQAKYMLSGMARCGYCGAPLKIVLGHKRKDGSRTMKYHCANRFPRKTKGVTVYNDNKKCDSGTYDLSNLENTVIDNLIGFQEDNDSLLKIINGNNQPIPDTSSFKKQISQVDKKIQKNSDLYLNDFITMDELKDRTDSLQAEKKLLKAKISENKFNDSTDVFELVKTQLGSIPINELSYDDKKKIVNNLVSKVDVTADNVDIIFKFQLA

SEQ ID NO: 8307 - protein, 469 aa, synthetic construct
MSYTTPVRAAVYLRISEDRSSEQLGVARQREDCLKLCGQRKWVPVEYLDNDVSASTGKRRPAYEQMLADITAGKIAAVVAWDLDRLHRRPVELEAFMSLADEKRLALATVAGDVDLATPQGRLVARLKGVVAAHETEHKKARQRRAARQKAERGHPNWSKAFGYLPGPSGPEPDPRTAPLVKQAYADILAGASLGDVCRQWNDAGAFTITGRPWTTTTLSKFLRKPRNAGLRAYKGARYGPVDRDAIVGKAQWSPLVDEATFWAAQAVLDAPGRAPGRKSVRRHLLTGLAGCGKCGNHLAGSYRADGRVVYVCKACHGVAILADNIEPILYHIVAERLAMPDAVDLLRREIHDAAEAETVRLELETLYGELDRLAVERAEGLLTARQVKISTDVVNAKITKLQACQLDQERLRVLDGIPLGTPQVAGTIAELSPDRFRTVLNVLAEVVVQPVGKSGRIFNPERVQVNWR

SEQ ID NO: 8308 - protein, 469 aa, synthetic construct
MSYTTPVRAAVYLRISEDRSGEQLGVARQREDCLKLCGQRKWVPVEYLDNDVSASTGKRRPAYEQMLADITAGKIAAVVAWDLDRLHRRPIELEAFMSLADEKRLALATVAGDVDLATPQGRLVARLKGCVAAHETEHKKARQRRAARQKAERGHPNWSKAFGYLPGPNGPEPDPRTAPLVKQAYADILAGASLGDVCRQWNDAGASTITGRPWTTTTLSKFLRKPRNAGLRAYKGARYGPVDRDAIVGKAQWSPLVDEATFWAAQAVLDAPGRAPGRKSVRRHLLTGLAGCGKCGNHLAGSYRTDGRVVYVCKACHGVAILADNIEPILYHIVVERLTMPDAVDLLRREIHDAAEAETIRLELETLYGELDRLAVERAEGLLTARQVKISTDIVNAKITRLQARQLDQERLRVFDGIPLGTPQVAGMIAELSPDRFRAVLDVLAEVVVQPVGKSGRIFNPERVQVNWR

SEQ ID NO: 8309 - protein, 452 aa, synthetic construct
MKAAIYIRVSTQEQVENYSIQAQTEKLTALCRSKDWDVYDIFIDGGYSGSNMNRPALNEMLSKLHEIDAVVVYRLDRLSRSQRDTTTLIEEYFLKNNVEFVSLSETLDTSSPFGRAMIGILSVFAQLERETIRDRMVMGKIKRIEAGLPLTTAKGRTFGYDVIDTKLYINEEEAKQLQLIYDIFEEERSITSLQKRLKKLGFKVRTYNRYNNWLTNDLYCGYVSYKDKVHVKGIHEPIISEEQFYRVQEIFTRMGKNPNMNRGSASLLNNLVVCSRCGLGFVHRRKDTMCRGKKYHYRYYSCKTYKHTHELEKCGNKIWRADKLEELIINRVNNYGLASRNVDKDDELDSLNEKLKIEHAKKRRLFDLYINGSYEVSELESMMSDIDAQINYYENQIEANEELRKNKKIQENLAYLATVDFDSLEFREKQLYLKSLINKIYIDGEQVTIEWL

SEQ ID NO: 8310 - protein, 469 aa, synthetic construct
MSYTTPVRAAVYLRISEDRSGEQLGVARQREDCLKLCDQRKWVPVEYLDNDVSASTSKRRPAYEQMLADITAGKIAAVVAWDLDRLHRRPIELEAFMSLADEKRLALATVAGDVDLATPQGRLVARLKGSVAAHETEHKRARQCRAARQKAERGHPNWSKAFGYLPGPNGPEPDPRTAPLVKQAYAGILAGASLGDVCRQWNDAGAFTITGRPWTTTTLSKFLRKPRNAGLRAYKGARYGPVDRDAIVGKAQWSPLVDEATFWAAQAVLDAPGRAPGRKSVRRHLLTGLAGCGKCGNHLAGSYRTDGRVVYVCKACHGVVILADNIEPILYHIVTERLAMPDAVDLLRREIHDAAEAETIRLELETLYGELDRLAVERAEGLLTARQVKISTDIVNAKITKLQARQLDQERLRVLGGIPLGTPQVAGMIAELSPDRFRAVLDVLAEVVVQPVGKSGRIFNPERVQVNWR

SEQ ID NO: 8311 - protein, 452 aa, synthetic construct
MKAAIYIRVSTREQVENYSIQAQTEKLTALCRSKGWDVYDTFIDGGYSGSNMNRPALNEMLSKLHEIDAVVVYRLDRLSRSQRDTITLIEEYFLKNDVEFVSLSETLDTSSPFGRAMIGILSVFAQLERETIRDRMVMGKIKRIEAGLPMTTAKGRTFGYDVIDTKLYINEEEAKQLQLIYDIFEEEQSITFLQKRLKKLGFKVRTYSRYNNWLTNDLYCGYVSYKDKVHVKGIHEPIISEEQFYRVQEIFTRTGKNPNMNRDSASLLNNLVVCGKCGLGFVHRRKDAMSRNKKYHYRYYSCKTYKHIHELEKCGNKIWRADKLEELIINRVNNYGLASRNADKEDELDSLKEKLKIEHAKKKRLFDLYINGSYEVSELDSMMNDIDAQINYYESQIEANEELKKNKKIQENLAYLATVDFDSLELREKQLYLKSLINKIYIDGEQVTIEWL

SEQ ID NO: 8312 - protein, 485 aa, synthetic construct
MTKKVAIYTRVSTTNQAEEGFSIDEQIDRLTKYAEAMGWQVSDTYTDAGFSGAKLERPAMQRLINDIENRAFDTVLVYKLDRLSRSVRDTLYLVKDVFTKNNIDFISLNESIDTSSAMGSLFLTILSAINEFERENIKERMAMGKLGRAKSGKSMMWTKTAFGYHHNRKTGILEIVPLQATIVEQIFTDYLSGISLTKLRDKLNESGHIGKDIPWSYRTLRQTLDNPVYCGYIKFKGSLFEGMHKPIIPYETYLRVQKELEERQRQTYERNNNPRPFQAKYMLSGMARCGYCGAPLRIVLGHKRKDGSRTMKYHCANRFPRKTKGITVYNDNKKCDSGTYDLSNLEDTVIDNLVGFQENNDSLLKVINGNDQPILDTSSFEKQISQIDKKIQKNSDLYLNDFITMDELKDRTDSLQAEKKLLKAKISENKFSDSTDVLELVKAQLGSIPINELSYDNKKKIVNNLVSKVDVTADNVDIIFKFQLA

SEQ ID NO: 8313 - protein, 469 aa, synthetic construct
MSYTTPVRAAVYLRISEDRSGEQLGVARQREDCLKLCDQRKWVPVEYLDNDVSASTGKRRPAYEQMLADITAGKIAAVVAWDLDRLHRRPIELEAFMSLADEKRLALATVAGDVDLATPQGRLVARLKGSVAAHETEHKKARQRRAARQKAERGHPNWSKAFGYLPGPNGPEPDPRTAPLVKQAYADILAGASLGDVCRQWNDAGALTITGRSWTTTTLSKFLRKPRNAGLRAYKGARYGPVDRDAIVGKAQWSPLVDEATFWAAQAVLDAPGRAPGRKSVRRHLLTGLAGCGKCGYHLAGSYRTDGKVVYVCKACHGVAILADNIVPILYHIVAERLAMPDAVDLLRREIRDAAEAETIRLELGTLYGELDRLAVERAEGLLTARQVKISTDIVNAKIAKLQARQLDQERLRVFDGIPLGTPQVAGVIAELSPDRFRAVLDVLAEVVVQPVGKGGKIFNPERVQVNWR

SEQ ID NO: 8314 - protein, 469 aa, synthetic construct
MSYTTPVRAAVYLRISEDRSGEQLGVARQREDCLKLCDQRKWVPVEYLDNDVSASTGKRRPAYEQMLADITAGKIAAVVAWDLDRLHRRPIELEAFMSLADEKRLALATVAGDVDLATPQGRLVARLKGSVAAHETEHKKARQRRAARQKAERGHPNWSKAFGYLPGPNGPEPDPRTAPLVKQAYADILAGASLGDVCRQWNAAGAFTITGRPWTTTTLSKFLRKPRNAGLRAYKGARYGPVDRDAIVGKAQWSPLVDEATFWAAQAVLDAPGRAPGRKSVRRHLLTGLAGCGKCGNHLAGSYRTDGKVAYVCKTCHGVAILADNIEPILYHIVAERLAMPDAVDLLRRGIRDAAEAETIRLELGTLYGELDCLAVERAEGLLTARQVKISTDIVNAKITKLQARQLDQERLRVFDGIPLGTPQVAGMIAELSPDRFRAVLDVLAEVVVQPVGKGGRIFNPERVQVNWR

SEQ ID NO: 8315 - protein, 469 aa, synthetic construct
MSYTTPVRAAVYLRISEDRSGEQLGVARQREDCLKLCDQRKWVPVEYLDNDVSASAGKRRPAYEQMLADITAGKIAAVVAWDLDRLHRRPIELEAFMSLVDEKRLALATVAGDVDLATPQGRLVARLKGSVAAHETEHKKARQRRAARQKAERGYPNWSKAFGYLPGPNGPEPDPRTAPLVKQAYADILAGASLGDVCRQWNDAGAFTITGRPWTTTTLSKFLRKPRNAGLRAYKGARYGPVDRDAIVGKAQWSPLVDEATFWAAQAVLDAPGRAPGRKSVRRHLLTGLAGCGKCGNHLAGSYRTDGRVVYVCKACHGVAILADNIEPILYHIVAERLAVPDAVDLLRREIHDAAEAETIRLELETLYGELDCLAVERAEGLLTARQVKISTDVVNAKITKLQARQLDQERLRVFDGIPLGTPQVAGMIAGLSPDRFRAVLDVLAEVVVLPVGKSGRIFNPERVQVNWR

SEQ ID NO: 8316 - protein, 485 aa, synthetic construct
MTKKVAIYTRVSTTNQAEEGFSIDEQIDRLTKYAEAMGWQVSDTYTDAGYSGAKLERPAMQRLINDIENKAFDTVLVYKLDRLSRSVRDTLYLVKDVFTKNKIDFISLNESIDTSSAMGSLFLTILSAINEFERENIKERMTMGKLGRAKSGKSMMWTKTAFGYHHNRKTGILEIVPLQAAIVEQIFTDYLSGISLTKLRDKLNESGHIGKDIPWSYRTLRQTLDNPVYCGYIKFKDSLFEGMHKPIIPYETYLKVQKELEERQQQTYERNNNPRPFQAKYMLSGMARCGYCGAPLKVVLGHKRKDGSRTMKYHCANRFPRKTKGVTVYNDNKKCDSGTYDLSNLENTVIDNLIGFQENNDSLLKIINGNSQPILETSSLKKQISQIDKKIQKNSDLYLNDFITMDELKDRTDSLQAEKKLLKAKISENKFNDSTDVFELVKTQLGSIPVNELSYDNKKKIVNNLVSKVDVTADNVDIIFKFQLA

SEQ ID NO: 8317 - protein, 485 aa, synthetic construct
MTRKVAIYTRVSTTNQAEEGFSIDEQIDRLTKYAEAMGWQVSDTYTDAGFSGAKLERPAMQRLINDIEDRAFDTVLVYKLDRLSRSVRDTLYLVKDVFTKNKIDFISLNECIDTSSAMGSLFLTILSAINEFERENIKERMTMGKLGRAKSGKSMMWTKTAFGYYHNRKTGILEIVPLQAAIVEQIFTDYLSGISLTKLRDKLNESGHIGKDIPWSYRTLRQTLDNPVYCGYIKFKDSLFEGMHKPIIPYETYLKVQKELEERQQQTYERNNNPRPFQAKYMLSGMARCGYCGAPLRIVLGHKRKDGSRTMKYHCANRFPRKTKGVTVYNDNKKCDSGTYDLSNLEDTVIDNLIGFQENDDSLLKIINGYNRPTLDTSSFKRQISQIDKKIQKNSDLYLNDFITMDELKDRTDSLQAEKKLLKAKISENKFNDSTDVFELVKTQLGSIPINELSYDNKKKIVNKLVSKVDVTADNVDIIFKFQLA

SEQ ID NO: 8318 - protein, 485 aa, synthetic construct
MTKKVAIYTRVSTTNQAEEGFSIDEQIDRLTKYAEAMGWQVSDTYTDAGSSGAKLERPAMQRLINDIENKAFDTVLVYKLDRLSRSVRDTLYLVKDVFTKNKIDFISLNESIDTSSAMGSLFLTILSAINEFERENIRERMTMGKLGRARSGKSMMWTKTAFGYYHNRETGILEIVPLQATIVEQIFTDYLSGISLTKLRDKLNESGHIGKDIPWSYRTLRQTLDNPVYCGYIKFKGSLFEGMHKPIIPHETYLKVQRELEERQQQTYERNNNPRPFQAKYMLSGMARCGYCGAPLRIVLGHKRKDGSRTMKYHCANRFPRRTKGVTVYNDNKKCDSGTYDLSNLEDTVIDILIGFQENNDSLLKIINGNNQPILDTSSLKKQISQIDKKIQKNSDLYLNDFITMDELKDRTDSLQAEKKLLKAKISENKFNDSTDVFELVKAQLGSIPINELSYDNKKKIVNNLVSKVDVTADNVDIIFKFQLA

SEQ ID NO: 8319 - protein, 452 aa, synthetic construct
MKAAIYIRVSTREQVENYSIQAQTEKLTALCRSKDWDVYDIFIDGGYSGSNMNRPALNEMLSKLHEIDAVVVYRLDRLSRSQRDTITLIEEYFLKNNVEFVSLSETLDTSSPFGRAMIGILSVFAQLERETIRDRMVMGKIKRIEAGLPLTTAKGRTFGYDVIDTKLYINEEEARQLQLIYDIFEEEQSITSLQKRLKKLGFKVRTYNRYNNWLTNDLYCGYVSYKDKVHVKGIHEPIISEEQFYRVQEIFTRMGKNPNMNRDSASLLNNLVVCSKCGLGFVHRRKDAMSRDKKYHYRYYSCKTYKHIHELEKCGNKIWRADKLEELIINRVNNYSVASRNADKEDELDSLNEKLKIEHAKKKRLFDLYINGNYEVSELDSMMNDIDAQINYYESQIEANEELKKSKKIQESLAYLATVDFDSLEFREKQLYLKSLINKIYIDGEQVTIEWL

SEQ ID NO: 8320 - protein, 469 aa, synthetic construct
MSYTTPVRAAVYLRISEDRSGEQLGVARQREDCLKLCGQRKWVPVEYLDNDVSASTGKRRPAYEQMLADITAGKIAAVVAWDLDRLHRRPVELEAFMSLADEKRLALATVAGDVDLATPQGRLVARLKGSVAAHETEHKRARQRRAARQKAERGLPNWSKAFGYLPGPNGPEPDPRTAPLVKQAYADILAGASLGDVCRQWNDAGAFTITGRPWTTTTLSKFLRRPRNAGLRAYKGARYGPVDRDAIVGKAQWSPLVDEATFWAAQAVLDAPGRAPGRKSVRRHLLTGLAGCGKCGNHLAGSYRTDGRVVYVCKACHGVAILAENIEPVLYRVVAERLATPDAVDLLRREVHDAAEAETIRLELETLYGELDRLAVERAEGLLTARQVKISTDIVNAKITKLQARQLDQERLRVFDGIPLGTPQVAGMIAELSPDRFRAVLDVLAEVVVQPVGKSGRIFNPERVQVNWR

SEQ ID NO: 8321 - protein, 485 aa, synthetic construct
MTKKVAIYTRVSTTNQAEEGFSIDEQIDRLTKYAEAMGWQVSDTCTDAGFGGAKLERPAMQRLINDIENKAFDTVLVYKLDRLSRSVRDTLYLVKEVFTKNKIDFISLNESIDTSSAMGSLFLTILSAINEFERENIKERMTMGKLGRAKSGKSMMWTKTAFGYYHNRKTGILEIVPLQATIVVQIFTDYLSGISLTKLRDKLNESGHIGKDIPWSYRTLRQTLDNPVYCGYIKFKDSLFEGMHKPIISYETYLKVQRELEERQQQTYERNNNPRPFQAKYMLSGMARCGYCGAPLRIVRGHKRKDGSRTMKYHCANRFPRKTKGVTVYNDNKKCDSGTYDLSNLENTVIDNLIGFQENNDSLLKIINGNNQTILDTSSLKEQISQIDKKIRKNSDLYLNDFITMDELKDRTDSLQAEKKLLKAKICENKFNDSTDVFELVKTQLGSIPINELSYDNKKKIVNNLVSKVDVTADSVDIIFKFQLA

SEQ ID NO: 8322 - protein, 469 aa, synthetic construct
MSYTTPVRAAVYLRISEDRSGEQLGVARQREDCLKLCGQRKWVPVEYLDNDVSASTGKRRPAYEQMLADITAGKVEAVVAWDLDRLHRRPIELEAFMSLADERRLALATVAGDVDLATPQGRLVARLKGSVAAHETEHKKARQRRAARQKAERGHPNWSKAFGYLSGPNGPEPDPRTAPLVKQAYADILAGASLGDVCRQWNGASAFTITGRPWTTTTLSKFLRKPRNAGLRAYKGARYGPVDRDAIVGKAQWSPLVDEATFWAAQAVLDAPGRAPGRKSVRRHLLTGLAGCGKCGNHLAGSYRTDGRVVYVCKACHGVAILADNIEPILYHIVAERLAMPDAVDLLRREIHDAAEAETIRLELETLYGELDRLAVERAEGLLTARQVKISTDIVDAKITKLRARQLDQERLRVFDGIPLGTPQVAGIIAELSPDRFRAVLDVLAEVVVLPAGKSGRIFNPGRVQVNWR

SEQ ID NO: 8323 - protein, 469 aa, synthetic construct
MCYTTPVRAAVYLRISEDRSGEQLGVARQREDCLKLCGQRKWVPVEYLDNDVSASTGKRRPAYEQMLADITAGKIAAVVAWDLDRLHRRPIELEAFMSLADEKRLALATVAGDVDLATPQGRLVARLKGCVAAHETEHKKARQRRAARQKAERGLPNWGKAFGYLPGPNGPEPDPRTAPLVKQAYADILAGASLGDVCRQWNGAGALTITGRPWTTTTLSKFLRKPRNAGLRAYKGARYGPVDRNAIVGKAQWSPLVDEATFWAAQAVLDAPGRAPGRKSVRRHLLTGLAGCGKCGNHLAGSYRTDGRVVYVCKACHGVAILADNIEPILYHVVAERLAMPDAVELLRREVHDAAEAETIRLELETLYGELDRLAVERAEGLLTARQVKISTDIVNAKITKLRARQLDQERLRVFDGIPLGTPQVAGIIAELSPDRFRAVLDVLAEVVVQPVGKSGRIFNPERVQVNWR

SEQ ID NO: 8324 - protein, 485 aa, synthetic construct
MTKKVAIYTRVSTTNQAEEGFSIDEQIDRLTKYAEAMGWQVSDTYTDAGFSGAKLERPAMQRLINDIENKAFDTVLVYKLDRLSRSVRDTLYLVKDVFTKNKIDFISLNESIDTSSAMGSLFLTILSAINEFERENIKERMTMGKLGRAKSGKSMMWTKTAFGYYHNRKTGILEIVPLQATIVEQIFTDYLSGISLTKLRDKLNESGHVGKDIPWSYRTLRQTLDNPVYCGYIKFKDSLFEGTHKPIIPYETYLKVQKELEERQQQAYERNNNPRPFQAKYMLSGMARCGYCGAPLKIVLGHKRKDGSRTMKYHCANRFPRKTKGVTVYNDNKKCDSGTYDLSNLENAVIDNLIGLQENNDSLLKIINGNNQPVLDTSSFRKQISQIDKIIQKNSDLYLNDFITMDELKERTDSLRAEKKLLKAKISENKFNDSTDVFELVKTQLGSIPISELSYDDQKKIVNNLVSKVDVTADNVDIIFKFQLA

SEQ ID NO: 8325 - protein, 452 aa, synthetic construct
MKAAIYIRVSTREQVENYSIQAQTEKLTALCRSKDWDVYDIFVDGGYSGSNMNRPALNEMLSKLHEIDAVVVYRLDRLSRSQRDTITLIEEYFLKNNVEFVSLSETLDTSSPFGRAMIGILSVFAQLERETIRDRMVMGKIKRIEAGLPLTTAKGRTFGYDVIDTKLYINEEEARQLQLIYDIFEEEQSITFLQKRLKKLGFKVRTYSCYNNWLTNDLYCGYVSYKDKVHVKGIHEPIISEEQFYRVQEIFTRMGKNPNMNRDSASLLNNLVVCSKCGLSFVHRRKDAVTRDKKYHYRYYSCKTYKHIHELEKCGNKIWRADKLEELIINRVNNYSLASRNVDKEDELDGLNEKLKIEHAKKKRLFDLYINGSYEVSELDSMMNDIDAQINYYESQIEANEELKKNKKIQETLAHLATVDFDSLEFREKQLYLKSLINKVYIDGEQVTIEWL

SEQ ID NO: 8326 - protein, 485 aa, synthetic construct
MTKKVAIYTRVSTTNQAEEGFSIDEQIDRLTKYAEAMGWQVSDTYTDAGFSGAKLERPAMQRLINDIENKAFDTVLVYKLDRLSRSVRDTLYLVKDVFTKNKIDFISLNESINTSSAMGSLFLTILSAINEFERENIKERMTMGKLGRAKSGKSMMWTKTAFGYYHNRKTGILEIVPLQATIVEQIFTDYLSGISLTKLRDKLNESGHIGKDIPWSYRTLRQTLDNPVYCGYIKFKGSLFGGMHKPIIPYETYLKVQKELEERQQQTYERNNNPRPFQAKYMLSGMARCGYCGAPLRIVLGHKRKDGSRTMKYHCANRFPRKTKGVTVYNDNKKCDSGTYDLSNLENTVIDSLIGFQENNESLLEIINGNNQPILDTSSFKKQISQIDKKIQKNSDLYLNDFITMDELKDRTDSLQAEKKLLKAKISESKFNDSTDVFELVKTQLGSIPINELSYDNKKKIVNNLVSKVDVTADNVDIIFKFQLA

SEQ ID NO: 8327 - protein, 469 aa, synthetic construct
MCYTTPVRAAVYLRISEDRSGEQLGVARQREDCLKLCGQRKWVPVEYLDNDVSASTGKRRPAYEQMLADITAGKIAAVVAWDLDRLHRRPIELEAFMSLADEKRLALATVAGDVDLATPQGRLVARLKGSVAAHETEHKKARQRRAARQKAERGYPNWSKAFGYLPGPNGPEPDPRTAPLVKQAYADILAGASLGDVCRRWNGAGAFTVTGRPWTTTTLSKFLRKPRNAGLRAYKGARYGPVDRDAIVGKAQWSPLVDEATFWAAQAVLDAPGRAPGRKSVRRHLLTGLAGCGKCGNHLAGSYRTDGRIVYVCKACHGVAILADNIEPILYHIVAERLAMPDAVDLLRREIHDAAEAETIRLELETLYGELDRLAVERAEGLLTARQVKISTDIVDAKITKLQARQLDQERLRVLDGIPLGTPQVAGMIAELSPDRFRAVLDVLAEVVVQPVGKSGRIFNPERVQVNWR

SEQ ID NO: 8328 - protein, 485 aa, synthetic construct
MTKKVAIYTRVSTTNQAEEGFSIDEQIDRLTKYAEAMGWQVSGTYTDAGISGAKLERPAMRRLINDIEDKAFDTVLVYKLDRLSRSVRDTLYLVKDVFTRNKIDFISLNESIDTSSAMGSLFLTILSAINEFERENIKERMTMGKLGRARSGKSMMWTKTAFGYYHNRKTGILEIVPLQATIVEQIFTDYLSGISLTKLRDKLNKSGHIGKDIPWSYRTLRQTLDNPVYCGYIKFKDSVFEGMHKPIIPYETYLKVQKELEERQQQTYERNNNPRPFQAKYMLSGMARCGYCGAPLRIVLGHKRKDGSRTMKYHCANRFPRKTKGVTVYNDNKKCDSGTYDLGNLENTVIDILIGFQENNDSLLKIINGNNQPILDASSFKEQISQIDKKIQKNSDLYLNDFITMDELRDRTDSLQAEKKLLKAKISENKFNDSTDVLELVKTQLGSIPINELSYDNKKKIVSNLVSKVDVTADNVDIIFKFQLA

SEQ ID NO: 8329 - protein, 485 aa, synthetic construct
MTKKVAIYTRVSTTNQAEEGFSIDEQTDRLSKYAEAMGWQVSDTYTDAGFSGAKLERPAMQRLISDIENKAFDTVLVYKLDRLSRSVRDTLYLVKDVFTKNKIDFISLNESIDTSSAMGSLFLTILSAVNEFERENIKERMTMGKLGRAKSGKSMMWTKTAFGYHHNRKTGILEIVPLQASIVEQIFTDYLSGISLTKLRDKLNESGHIGKDIPWSYRTLRQTLDNPVYCGYIKFKDSLFEGMHKPIIPYETYLKVQKELEERQQQTCERNNNPRPFQAKYMLSGMARCGYCGAPLKIVLGHKRKDGSRTMKYHCANRFPRKTKGVTVYNDNKKCDSGTYDLSNLENAVIDSLIGFQENNDCLLKIINGNNRPTLDTSSFEKQISQIDKKIQKNSDLYLNDFITMDELKVRTDSLQAEKKLLKAKISENKLNDSTDVFELVRTQLGSIPINELSYDNKKKIVNNLVSKVDVTADNVDIIFKFQPA

SEQ ID NO: 8330 - protein, 469 aa, synthetic construct
MSYTTPVRAAVYLRISEDRSGEQLGVARQREDCLKLCDQRKWVPVEYLDNDVSASTGKRRPAYEQMLADITAGKIAAVVAWDLDRLHRRPVELEAFMSLADEKRLALATVAGDVDLATPQGRLVARLKGSVAAHETEHKKARQRRAARQKAERGLPNWSKAFGYLPGPNGPEPDPRTAPLVKQAYADILAGASLGDVCRQWNDAGAFTITGRPWTTTTLSKFLRKPRNAGLRAYKGARYGPVDRDAIVGKAQWSPLVDEATFWAAQAVLDAPGRAPGRKSVRRHLLTGLAGCGKCGNHLAGSYRTDGRVVYVCKACHGVAILADNIEPILYHIVAERLAMPDAVDLLRREIHDAAEAETIRLELETLYGELDRLAVERAEGLLTARQVKISTDIVNAKITKLQARQLDQERLRVFNGIPLGTPRVAGMIAELSPDRFRAVLDVLAEVVVQPVGKSGRIFNPERVQVNWR

SEQ ID NO: 8331 - protein, 469 aa, synthetic construct
MSYTTPVRAAVYLRISEDRSGEQLGVARQREDCLKLCDQRKWVPVEYLDNDVSASTGKRRPAYEQMLADITAGKIAAVVAWDLDRLHRCPIELEAFMSLADEKHLALATVAGDVDLATPQGRLVARLKGSVAAHETEHKKARQRRAARQKAERGHPNWSKAFGYLPSPNGPEPDPRTAPLVRQAYADILAGASLGDVCRRWNDAGAFTITGRPWTTTTLSKFLRKPRNAGLRAYKGARYGPVDRGAIVGKAQWSPLVDEATFWAAQAVLDAPGRAPGRKSVRRHLLTGLAGCGKCGNHLAGSYRADGRVVYVCKACHGVAILADNIEPILYHAVAERLAMPDAVDLLRHEIHDAAEAETIRQELETLYGELDRLAVERAEGLLTARQVKISTDIVNAKITKLQARQLDQERLRVFGGIPLGTPQVAGMIAELSPDRFRAVLDVLAEVVVRPVGKSGSIFNPERVQVNWR

SEQ ID NO: 8332 - protein, 469 aa, synthetic construct
MSYTTPVRAAVYLRISEDRSGEQLGVARQREDCLKLCDQRKWVPVEYLDNDVSASTGKRRPAYEQMLADITAGKIAAVVAWDLDRLHRRPIELEAFMSLADEKRLALATVAGDVDLATPQGRLVARLKGSVAAHETEHKKARQRRAARQKAERGHPNWSKAFGYLPGPNGPEPDPRTAPLVKQAYADILAGASLGDVCRQWNDAGAFTITGRPWTTTTLSKFLRKPRNAGLRTYKGARYGPVDRDAIVGKAQWSPLVDEATFWAAQAVLDAPGRAPGRKSVRRHLLTGLAGCGKCGNHLAGSYRTDGRVVYVCKACHGVAILADNIEPILYHIVAERLAMPDAVDLLRREIHDAAEAETIRLELETLYGELDRLAVERAEGLLTARQVKISTDIVNAKITKLQARQLDQERLRVFDGIPLGTPQVAGMIAELSPDRFRAVLGVLAEVVVQPVGKGGRIFSPGRVHVNWR

SEQ ID NO: 8333 - protein, 469 aa, synthetic construct; identical to SEQ ID NO: 949

SEQ ID NO: 8334 - protein, 469 aa, synthetic construct
MCYTTPVRAAVYLRISEDRSGEQLGVARQREDCLKLCDQRKWVPVEYLDNDVSASTGMRRPAYEQMLADITAGKIAAVVAWDLDRLHRRPIELEAFMCLADEKRLALATVAGDVDLATPQGRLVARLKGSVAAHETEHKKARQRRAARQKAERGYPNWSKAFGYLPGPNGPEPDPRTAPLVKQAYADILAGASLGDVCRQWNDAGAFTITGRPWTATTLSKFLRKPRNAGLRAYKGARYGPVDRDAIVGRAQWSPLVDEATFWAAQAVLDAPGRAPGRKSVRRHLLTGLAGCGKCGNHLAGSYRTDGKVVYVCKACHGVAILADNIEPILYHIVAERLAMPNAVDLLRREIHDAAEAETFRLELETLYGELDRLAVERAEGLLTARQVKISTDIVNAKISKLQARQLDQERLRVLGGIPLGTPQVAGMIAELSPDRFRAVLDVLVEVVVQPVGKSGRIFNPERVQVNWR

SEQ ID NO: 8335 - protein, 485 aa, synthetic construct
MTKKVAIYTRVSTTNQAEEGFSIDEQIDRLTKYAEAMGWQVSDTYTDAGFSGAKLERPAMQRLINDIENKAFDTVLVYKLDRLSRSVRDTLHLVKDVFTKNKIDFISLNESIDTSSAMGSLFLTILSAINEFERENIKERMTMGKLGRARSGKSMMWTKTAFGYHHNRKTGILEIVPLQATIVEQIFTDYLSGISLTKLRDKLNESGHIGKDIPWSYRTLRQTLDNPVYCGYIKFKDSLFEGMHEPIIPYETYLKVQKELEERQQQAYERNNNPRPFQAKYMLSGMARCGYCGAPLRIVLGHKRKDGSRTMKYHCANRFPRKTIGVTVYNDNKKCDSGTYDLSNLENTVIDILIGFQENNDSLLKIINGNNQPILDTSSFKEQISQIDKKIQKNSDLYLNDFITMDELRDRTDSLQAEKKLLKAKISENKFNDSTDVFELVKTQLGNIPINELSYDNKKKIVNNLVSKVDVTADNVDIIFKFQLA

SEQ ID NO: 8336 - protein, 485 aa, synthetic construct
MTKKVAIYTRVSTTNQAEEGFSIDEQIDRLTKYAEAMGWQVSDTYTDAGFSGAKLERPAMQRLINDIENKAFDTVLVYKLDRLSRSVRDTLYLVKDVFTKNKIDFISLNESINTSRAMGSLFLTILSAINEFERENIKERMTMGKLGRAKSGKSMMWTKTAFGYYHNRKTGILEIVPLQAAIVEQIFTDYLSGISLTKLRDKLNESGHIGKDIPWSYRTLRQTLDNPVYCGYIKFKGSLFEGMHKPIIPYETYLKVQKELEERQQLTYERNNNPRPFQAKYMLSGMARCGYCGAPLRIVLGHRRKDGSRAMKYHCANRFPRKTKGVTVYNDNKKCDSGTYDLSNLENTVIDNLIGFQENNDSLLKVINGDNQPILDTSSFKEQISQIDKKIQKISDLYLNDFITMDELKARTDGLQAEKKLLKAKISENKFNDSTDVFELVKTQLGSIPINELSYDNKKKIVNNLVSKVDVTAGNVDIVFKFQLA

SEQ ID NO: 8337 - protein, 469 aa, synthetic construct
MCYTTPVCAAVYLRISEDRSGEQLGVARQREDCLKLCDERKWVPVEYLDNDVSASTGKRRPAYEQMLADITAGKIAAVVAWDLDRLHRRPIELEAFMSLADEKRLALATVAGDVDLATPQGRLVARLKGSVAAHETEHKKARQRRAARQKAERGHPNWCKAFGYLPGPNGPEPDPRTAPLVKQAYADILAGASLGDVCRRWNDAGAFTITGRPWTTTTLSKFLRKPRNAGLRAYKGAHYGPVDRDAIVGKAQWSPLVDEATFWAAQAVLDAPGRAPGRKSVRRHLLTGLAGCGKCGNHLAGSYRTDGRVVYVCKACHGVAILADNIEPILYHIVAERLAMPDAVDLLRREIHDAAEAETVRLELETLYGELDHLAVERAEGLLTARQVKISTDIVNAKITKLQARQLDQERLRVLDGIPLGTPQVAGMIAELSPDRFRAVLDVLAEVVVQPVGKGGRIFNPERVRVNWR

SEQ ID NO: 8338 - protein, 485 aa, synthetic construct
MTKKVAIYTRVSTTNQAEEGFSIDEQVDRLTKYAEAMGWQVSGTYTDAGLSGAKLERPAMQRLINDIENKAFDTVLVYKLDRLSRSVRDTLYLVKDVFTKNKIDFISLNESIDTSSAMGSLFLTILSAINEFERENIKERMTMGKLGRAKSGKSMMWTKTAFGYCHNRKTGILEIVPLQATIVEQIFTDYLSGISLTKLRDKLNESGHIGKDIPWSYRTLRQTLDNPVYCGYIKFKDSLFEGMHKPIIPCETYLRVQKELEERQQRAYERNNNPRPFQAKYMLSGMTRCGYCGAPLKIVLGHKRKDGSRTMKYHCANRFPRKTKGVTVYNDNKKCDSGTYDLSSLENAVIDNLIGFQENNDSLLKIINGNNQPTLDTSSLREQISQIDKKIQKNSDLYLNDFITMDELKDRTDSLQAEKKLLKAKISENKFNDSTDVFELVKTQLGSIPINELSYDNKKKIVNNLVSKVDVTADNVDIIFKFQLA

SEQ ID NO: 8339 - protein, 469 aa, synthetic construct
MSYTTPVRAAVYLRISEDRSGEQLGVARQREDCLKLCGQRKWVPVEYLDNDVSASTGKRRPAYEQMLADITAGKIAAVVAWDLDRLHRRPIELEAFMSLADEKRLALATVAGDVDLATPQGRLVARLKGVVAAHETEHKKARQRRAARQKAERGLPNWSKAFGYLPGPNGPEPDPRTAPLVKQAYADILAGASLGDVCRQWNDAGASTITGRPWTTTTLSKFLRKPRNAGLRAYKGARYGPVDRDAIVGKAQWSPLVDEATFWAAQAVLDAPGRAPGRKSVRRHLLTGLAGCGKCGNHLTGSYRTDGRVVYVCKACHGVSILAANIEPILYHIVAERLTMPDAVVLLRREIHDAAEAGTIRLELETLYGELDRLAVERAEGLLTARQVKISTDIVNAKITKLQARQQDQERLRVLDGIPLGTPQVVGVIAELSPDRFRAVLDVLAEVVVQPVGKSGRIPNPERVQVNWR

SEQ ID NO: 8340 - protein, 485 aa, synthetic construct
MTKKVAIYTRVSTTNQAEEGFSIDEQIDRLTKYAEAMGWQVSDTYTDAGFSGAKLERPAMQRLINDIENKAFDTVLVYKLDRLSRSVRDTLYLVKDVFTKNNIDFVSLNESIDTSSAMGSLFLTILSAVNEFERENIKERMTMGKLGRAKSGKSMMWTKTAFGYYHNRKTGILEIVPLQATIVEQIFTDYLSGISLTKLRDKLNESGHIGKDIPWSYRTLRQTLDNPVYCGYIKFKDSLFEGMHKPIIPYETYLKVQKELEERQQQTYERNNNPRPFQAKYMLSGMARCGYCGAPLKIVLGHKRKDGSRTMKYHCANRFPRKTKGVTVYNDNKKCDSGTYDLSSLENTVIGNLIGLQENNDGLLKIINGNNQPILDTSSFEKQISQIDKKIQKNSDLYLNDFITMDELKARTDSLQAEKKLLKAKISENKFNDSTDVFELVRTQLGSIPINELSYDNKKKIVNNLVSKVDVTADNVDIIFKFQLA

SEQ ID NO: 8341 - protein, 452 aa, synthetic construct
MKAAIYIRVSTREQVENYSIQAQTEKLTALCRSKDWDVYDIFIDGGYSGSNMNRPALDEMLSKLHEIDAVVVYRLDRLSRSQRDTITLIEEYFLKNNVEFVSLSETLDTSSPFGRAMIGILSVFAQLERETIRDRMVMGKIKRIEAGLPLTTAKGRTFGYDVIDTKLYINEEEAKQLQLIYDIFEEERSITFLQKRLKKLGFKVRTYSCYNNWLTNDLYCGYVSYKDKVHVKGIHEPIISEEQFYRVQEIFTRTGKNPNMNRGSASLLNNLVVCSKCGLGFVHRRKDTMSRGKKYHYRYYSCKTYKHTHELEKCGNKIWRADKLEELIINRVNNHSFASRNVDKEDELDSLNEKLKIEHAKKKRLFDLYINGSYEVSELDSMMIDIDAQISYYESQIEANEELERNKKIQENLADLATVDYDSLEFREKQLYLKSLINKIYIDGEQVTIEWL

SEQ ID NO: 8342 - protein, 452 aa, synthetic construct
MKAAIYIRVSTQEQVENYSIQAQTEKLTALCRSKDWDVYDIFVDGGYSGSNMNRPALNEMLSKLHEIDAVVVYRLDRLSRSQRDTTTLIEEYFLKNNVEFVSLCETLDTSSPFGRAMIGILSVFAQLERETIRDRMVMGKIKRIEAGLPLTTAKGRTFGYDVIDTKLYINEEEAKQLQLIYDIFEEVQSITFLQKRLKKLGLKVRTYNRYNNWLTNDLYCGYVSYKDKVHVKGIHEPIISEEQFYRVQEIFTRMGKNPNMNRDSASLLSNLVVCSKCGLGFVHRSKDTMSRGKKYHYRYYSCKTYKHTHELEKCGNKTWRADKLEELIINRVNNYSFASRNADKEDELDSLNEKLKIEHARKKRLFDLYISGSYEVSELDSMMNDIDAQINYYESQIEANEGLKKNKKIQENLADLATVDFDSLGFREKQLYLKSLINKIYIDGEQVTIEWL

SEQ ID NO: 8343 - protein, 452 aa, synthetic construct
MKAAIYIRVSTQEQVGNYSIQAQTEKLTALCRSKDWDVYDIFIDGGYSGSNMNRPALNEMLSKLHEIDAVVVYRLDRLSRSQRDTTTLIEEYFLKNNVEFVSLSETLDTSSPFGRAMIGILSVFAQLERETIRDRMVMGKIKRIEAGLPLTTAKGRTFGYDVIDTKLYINEEEARQLQLIYDIFEEEQSITSLQKRLKKLGFKVRAYNRYNNWLTNDLYCGYVSYKDKVHVKGIHEPIISEEQFYRVQEIFTRMGKNPNTNRDSASLLNNLVVCSKCGLGFVHRSKDTMSRGKRYHYRYYSCKTYKHTHELEKCGNKTWRADKLEELIINRVSNYSFASRNVDKEDELDGLNERLKIEHAKKRRLFDLYINGSYEVSELDSMMNDIDAQISYYESQIEANEELKKNKKIQENLANLATVDFDSLEFREKQLYLKSLINKIYIDGEQVTIEWL

SEQ ID NO: 8344 - protein, 452 aa, synthetic construct
MKAAIYIRVSTREQVENYSIQAQTEKLTALCRSKDWDVYDIFIDGGYSGSNMNRPALNEMLCKLHEIDAVVVYRLDRLSRSQRDTITLIEEYFLKNNVEFVSLSETLDTSSPFGRAMIGILSVFAQLERETIRDRMVMGKIKRVEAGLPLTTAKGRTFGYDVIDTKLYINEEEAKQLQLIYDIFEEERSITSLQKRLKRLGFKVRTYNRYTNWLTNDLYCGYVSYKDKVHVKGIHEPIISEEQFYRVQEIFTRMGKNPNMNRDSASLLNNLVVCSKCGLGFVHRRKDTMSRGKKYHYRYYSCKTYKHTHELEKCGNKIWRADKLEELIINRVNNYSVASRNVDKEDELDSLNEKLKIEHAKKKRLFDLYINGSYEVSELDSMMNDIDAQINYYESQIEANEELEKNKKIQENLANLATVDYDSLEFREKQLYLKSLINKIYIDGEQVTIEWL

SEQ ID NO: 8345 - protein, 469 aa, synthetic construct
MSYTTPVRAAVYLRISEDRSGEQLGVARQREDCLKLCGQRKWVPVEYLDNDVSASTGKRRPAYEQMLADITAGKIAAVVAWDLDRLHRRPVELEAFMSLADEKRLALATVAGDVDLATPQGRLVARLKGCVAAHETEHKKARQRRAARQKAERGHPNWSKAFGYLPGPNGPEPDPRTAPLVKQAYADILAGASLGDVCRRWNDAGAFTITGRPWTTTTLSKFLRKPRNAGLRAYKGARYGPVDRDAIVGKAQWGPLVDEATFWAAQAVLDAPGRAPGRKSVRRHLLTGLAGCGKCGNHLAGSYRTDGRVVYVCKACHGVAILADNIEPILYHIVAERLAMPDAVDLLRREIHDAAEAETIRLELETLYGELDRLAVERAEGLLTARQVKISTDIVSAKITELQTRQLDQERLRVLEGIPLGTPQVAGMIAELSPDRFRAVLDVLAEVVVQPAGKSGRIFNPERVQVNWR

SEQ ID NO: 8346 - protein, 452 aa, synthetic construct
MRAAIYIRVSTREQVENYSIQAQTEKLTALCRSKDWDVYDIFIDGGYSGSNMNRPALNEMLSKLHEIDAVVVYRLDRLSRSQRDTITLIEEYFLKNNVEFVSLSETLDTSSPFGRAMIGILSVFAQLERETIRDRMVMGKIKRIEAGLPLTTAKGRTFGYDVIDTKLYINEEEAKQLRLIYDIFEEEQSITFLQKRLKKLGFKVRTYNRYNNWLTNDLYCGYVSYKDKVHVKGIHEPIISEEQFYRVQEIFTRMGKNPNMNRGSASLLNNLVVCGKCGLGFVHRRKDAMSRDKKYHYRYYSCKTYKHIHELEKCGNKIWRADELEELIINRVNNYSLASRNVDKEDGLDSLNEKLKIEHVKKKRLFDLYLNGSYEVSELDSMMNDIDAQISYYESQIEANEALIKNKKIQENLANLATVDFDSLEFREKQLYLKSLINKIYIDGEQVTIEWL

SEQ ID NO: 8347 - protein, 452 aa, synthetic construct
MKAAIYIRVSTREQVENYSIQAQTEKLTALCRSKGWDVYDIFIDGGYSGSNMNRPALNEMLSKLHEIDAVVVYRLDRLSRSQRDTITLIEEYFLKNNVEFVSLSETLDTSSPFGRAMIGILSVFAQLERETIRDRMVMGKIKRIEAGLPLTTAKGRTFGYDVIDTKLYINEEEAKQLQLIYDIFEEEQSITFLQKRLKKLGFKVRTYNRYNNWLTNDLYCGYVSYKDKVHVKGIHEPIISEEQFYRVQEIFTRMGKNPNMNRDSASLLNNLVVCSKCGLGFVHRRKDAMSRDKKYHYRYYSCKTYKHIHELEKCGNKIWRADKLEELIINRVNSYSLVSRNVDKEDELDSLNEKLKIEHAKKKRLFDLYINGSYEVSELDSMMSDIDAQINYYESRIEANEELRKNKKIQENLADLATVDFDSLEFREKQLYLKSLINKIYIDDEQVTIEWL

SEQ ID NO: 8348 - protein, 485 aa, synthetic construct
MTKKVAIYTRVSTTNQAEEGFSIDEQIDRLTKYAEVMGWQVSDTYTDAGFSGAKLERPAMQRLINDIENKAFDTVLVYKLDRLSRSVRDTLYLVKDVFTKNKIDFISLSESIDTSSAMGSLFLTILSAINEFERENIKERMTMGKLGRAKSGKSMMWTKTAFGYYHNRKTGILEIVPLQATIVEQIFTDYLSGISLTKLRDKLNESGHIGKDIPWSYRTLRQILDNPVYCGYIRFKDSLFEGMHKPIIPYETYLKVQKELEERQQQTYERNNNPRPFQAKYMLSGMARCGYCGAPLRIVLGHKRKDGSRTMKYHCANRFPRKTRGVTVYNDNKKCDSGTYDLSNLENTVIDTLIGFQENNDSLLKIISGNNQPVLDTSSFKKQISQIDKKIQKNSDLYLNDFITIDELKERTDSLQAEKKLLKAKISEHKLNDSTDVFELVKAQLGSIPINELSYDNKKRIVNNLVSKVDVTADNVDITFKFQPA

SEQ ID NO: 8349 - protein, 469 aa, synthetic construct
MSYTTPVRAAVYLRISEDRSGDQLGVARQREDCLKLCDQRKWVPVEYLDNDVSASTGKRRPAYEQMLVDITAGKIAAVVAWDLDRLHRRPIELEAFMSLADEKRLALATVAGDVDLATPQGRLVARLKGSVAAHETEHKKARQRRAARQKAERGLPNWSKAFGYLPGPNGPEPDPRTAPLVKQAYADILAGASLGDVCRQWNDAGAFTITGRPWTTTTLSKFLRKPRNAGLRAYKGARYGPVDRDAIVGKAQWSPLVDEATFWAAQAVLDAPGRAPGRKSVRRHLLTGLAGCGKCGNHLAGSYRTDGRVVYVCKACHGVAILADIIEPILYHIVAERLAMPDAVDLLRREIRDAVEAETIRLELETLYGELDRLAVERAEGLLTARQVKISTDIVNAKITKLQAHQLDQERLRVFDGIPLGTPQVAGMIAELSPDRFRAVLDVLAEVVVQPVGKSSRIFNPERVQVNWR

SEQ ID NO: 8350 - protein, 485 aa, synthetic construct
MTKKVAIYTRVSTTNQAEEGFSVDEQIDRLTKYAEAMGWQVSDTYTDAGVSGAKLERPAMQRLINDIENKAFDTVLVYKLDRLSRSVRDTLYLVKDVFTKNKIDFISLNESIDTSSAMGSLFLTILSAINEFERENIKERMTMGKLGRAKSGKSMMWTKTAFGYYHNRKTGILEIVPLQAAIVEQIFTDYLSGISLTKLRDKLNESGHIGKDIPWSYRTLRQTLDNPVYCGYIKFKDSLFEGMHKPIIPYETYLKVQRELEERQQQTYERNNNPRPFQAKYMLSGMARCGYCGAPLRIVLGHKRKDGSRTMKYHCANRFPRKTKGITVYNDNKKCDSGTYDLSNLENTVIDILIGFQENNDSLLKIIHGNNQPILDTSSFKKQISLIDKKIQKNSDLYLNDFITMDELKDRTDSLQAEKRLLEAKISENEFSDSTDVFELVKTQLGSIPINELSYDNKKRIVNNLVSKVDVTADNVDIIFKFQLA

SEQ ID NO: 8351 - protein, 452 aa, synthetic construct
MKAAIYIRVSTQEQVENYSIQAQTEKLTALCRSKDWDVYDIFIDGGYSGSNMNRPALNEMLSKLHEIDAVVVYRLDRLSRSQRDTTTLIEEYFLKNNVEFVSLSETLDTSSPFGRAMIGILSVFAQLERETIRDRMVMGKIKRIEAGLPLTTAKGRTFGYDVIDTKLYINEEEAKQLQLIYDIFEEEQSITSLQKRLKRLGFKVRTYNRYNSWLTNDLYCGYVSYKDKVHVKGIHEPIISEEQFYRVQEIFTRMGKNPNMNRGSASLLNNLVVCSKCGLGFVHRSKDTMSGGKKYHYRYYSCKTYKHTHELEKCGNKTWRADRLEELIINRVNNYSFASRNVDEEDKLDSLNEKLKIEHAKKKRLFDLYINGSYEVSELDSTMNDIDAQINYYESQIEANEELKKNKKIQENLADLATVDFDSLEFREKQLYLKSLINKIYIDGEQVTIEWL

SEQ ID NO: 8352 - protein, 485 aa, synthetic construct
MTKKVAIYTRVSTTNQAEEGFSIDEQIDRLTKYAEAMGWQVSDTYTDAGISGAKLERPAMQRLINDIENKAFDTVLVYKLDRLSRSVRDTLYLVKDVFTKNKIDFISLSESIDTSSAMGSLFLTILSAINEFERENIKERMTMGKLGRAKSGKSMMWTKTAFGYYHNRKTGILEIVPLQATIVEQIFTDYLSGISLTKLRDKLNESGHIGKDIPWSYRTLRQTLDNPVYCGYIKFKGSLFEGMHKPIIPYETYLKVQKELEERRQQTYERNNNPRPFQAKYMLSGMARCGYCGAPLRIVLGRKRKDGSRTMKYHCANRFPRKTKGVTVYNGNKKCDSGTYDLSTLENTVIDNLIGLQENNDSLLKIINGNNQPTLDTSSFKKQISQIDKKIQKNSDLYLNDFITMDELKDRTDSLQAEKKLLKAKISENKFNDSTDVFELVKAQLGSIPINELSYDNKKKIVNNLVSKVDVTADNVDIIFKFQLA

SEQ ID NO: 8353 - protein, 452 aa, synthetic construct
MKAAIYIRVSTQEQVGNYSIQAQTEKLTALCRSKDWDVYDIFIDGGYSGSNMNRPALNEMLSKLHEIDAVVVYRLDRLSRSQRDTTTLIEEYFLKNNVEFVSLSETLDTSSPFGRAMIGILSVFAQLERETIRDRTVMGKIKRVEAGLPLTTAKGRTFGYDVIDTKLYINEEEAKQLQLIYDIFEEEQSITSLQKRLKKLGFKVRTYNRYNNWLTNDLYCGYVSYKDKVHVKGIHEPIISEEQFYRVQEIFARMGKNPNMNRASASLLSNLVVCSKCGLGFVHRSKDTMSRGKKYHYRYYSCKTYKHTHELEKCGNKTWRADKLEELIINRVNNYSFASRNADKEDELDSLNEKLKIEHAKKKRLFDLYINGSYEVGELDSMMNDIDAQINYYESQIEANEELKKNKKMQKNLADLATVDFGSLEFREKQLYLKSLINKIYIDGEQVTIEWL

SEQ ID NO: 8354 - protein, 485 aa, synthetic construct
MTKKVAIYTRVSTTSQAEEGFSIDEQTDRLTKYAEAMGWQVSDTYTDAGFSGAKLERPAMQRLINDIENKAFDTVLVYKLDRLSRSVRDTLYLVKEVFTKNKIDFISLNESIDTSSAMGSLFLTILSAINEFERENIKERMTMGKLGRAKSGKSMMWTKTAFGYYHNRKTGILEIVPLQAAIVEQIFTDYLSGISLTKLRDKLNENGHIGKDIPWSYRTLRQTLDNPVYCGYIKFKDNLFEGMHKPIIPYETYLKVQKELEERQQQTHERNNNPRPFQAKYMLSGVARCGYCGAPLKIVLGHKRKDGSRTMKYHCANRFPRKTKGVTVYNDNKKCDSGTYDLSNLENTVIDNLIGFQENNDSLLKIINGNNQPILDTSSLKKQINQIDKKIQKNSDLYLNDFITMDELKDRTDSLQAEKKLLTAKISENKFNDSTDVFELVKTQLGSIPINELSYDNKKKIVNNLVSKVDVTADDVDIIFKFQLA

SEQ ID NO: 8355 - protein, 485 aa, synthetic construct
MTRKVAIYTRVSTTNQAEEGFSIDEQIDRLTKYAEAMGWQVSDTYTDAGFSGAKLRRPAMQRLINDIENKAFDTVLVYKLDRLSRSVRDTLYLVKDVLTKNEIDFISLNESIDTSSAMGSLFLTILSAINEFERENIKERMTMGKLGRAKSGKSMMWTKTAFGYYHNRKTGILEIVPLQATIVEQIFTDYLSGISLTKLRDKLNESGHIGKDIPWSYRTLRQTLDNPVYCGYIKFKDSLFEGMHKPIIPYETYLRVQKELEERQQQTYERNNNPRPFQAKYMLSGKARCGYCGAPLRIVLGHKRKDGSRTMKYHCANRFPRKTKGVTVYNDNKKCDSGTYDLCNLENTVIDNLIGFQENNDSLLRIINGNNQPILDTSSFKEQISQIDKKIQKNSDLYLNDFITMDELKDRTDSLQAEKKLLKAKISENKINDSTDVFELVKTQLGSIPINELSYDDKKKIVNNLVSKVDVTADNVDIIFKFQLA

SEQ ID NO: 8356 - protein, 469 aa, synthetic construct
MSYTTPVRAAVYLRISEDRSGEQLGAARQREDCLELCDKRKWVPVEYLDNDVSASTGKRRPAYEQMLADITAGKIAAVVAWDLDRLHRRPIELEAFMSLADEKRLALATVAGDVDLATPQGRLVARLKGCVAAHETEHKKARQRRAARQKAERGHPNWSKAFGYLPGPNGPEPDPRTAPLVKQAYADILAGASLGDVCRQWNDAGALTITGRPWTTTTLSKFLRKPRNAGLRAYKGARYGPVDRDAIVGKAQWSPLVDEATFWAAQAVLDAPGRAPGRKSVRRHLLTGLAGCGKCGSHLAGSYRTDGRVVYVCKACYGVAILADNIEPILYRIVTERLAMPDAVDLLRREIRDAAEAEPIRLELETLYGELDRLAVERAEGLLTARQVKISTDIVNAKITKLQARQLDQERLRVFDGIPLGTPQVAGMIAELSPDRFRAVLDVLAEVVVQPVGKSGRISNPERVQVNWR

SEQ ID NO: 8357 - protein, 485 aa, synthetic construct
MTKKVAIYTRVSTTNQAVEGFSIDEQVDRLTKYAEAMGWQVSDTYTDAGFSGTKLERPAMQRLISDIGNKAFDTVLVYKLDRLSRSVRDTLYLVKDVFTENKIDFISLSESIDTSSAMGSLFLTILSAINEFERENIKERMTMGKLGRAKSGKSMMWTKTAFGYYHNRKTGVLEIVPLQATIVEQIFTDYLSGISLTKLRDKLNESGHIGKDIPWSYRTLRQTLDNPVYCGYIKFKDSLFEGMHKPIIPYETYLKVQKELEERQQQAYERNNNPRPFQAKYMLSGMARCGYCGAPLRIVLGHKRKDGSRTMKYHCANRFPRKTKGVTVYNDNKKCDSGTYDLSNLENTVIDNLIGFQENNDSLLKIINGNNQPILDTSSLRKQISQIDKKIQKNSDLYLNDFITMDELKDRTDSLQAEKKLLKAKISENKFNDSTDVFELVKTQLGSIPINELSYDNKKKIVNNLVSKVDVTADSVDIIFKFQLA

SEQ ID NO: 8358 - protein, 485 aa, synthetic construct
MTKKVAIYTRVSTTNQAEEGFSIDEQIDRLTKYAEAMGWQVSDTYTDAGFSGAKLVRPAMQRLINDIENKAFDTVLVYKLDRLSRSVRDTLYLVKDVLTKNKIDFISLNESIDTSSAMGSLFLTILSAINEFERENIKERMTMGKLGRAKSGKSMMWTKTAFGYYHNRKTGILEIVPLQAAIVEQIFTDYLSGMSLTKLRDKLNESGHIGKDIPWSYRTLRQTLDNPVYCGYIKFKGSLFEGMHKPIIPYETYLKVQKELEERQQQTYERNNNPRPFQAKYMLSGMARCGYCGAPLRIVLGHKRKDGSRTMRYHCANRFPRKTKGITVYNDNKKCDSGTYDLSSLESTVIDNLIGFQENNDSLLKTINGNNQPILDASSFKKQISQIDKKIQKNSDLYLNDFITMDELKDRTDSLQAEKKLLEAKISENKFNNSADVFELVKTQLGSIPINELSYDNKKKIVNNLVSKVNVTADNVDIIFKFQLA

SEQ ID NO: 8359 - protein, 485 aa, synthetic construct
MTKKVAIYTRVSTTSQAEEGFSIDEQIDRLTKYAEAMGWQVSDTYTDAGFSGAKLERPAMQRLINDIENKAFDTVLVYKLDRLSRSVRDTLYLVKDVFTKNKIDFISLNESINTSSAMGSLFLTILSAINEFERENIKERMTMGKLGRAKSGKSMMWTRTAFGYYHNRKTGILEIVPLQATIVEQIFTDYLSGISLTKLRDKLNESGHIGKDIPWSYRTLRQTLDNPVYCGYIKFKDSLFEGMHEPIIPYETYLKVQKELEERQQQAYERNNNPRPFQAKYMLSGMARCGYCGAPLRIVLGHKRKDGSRTMKYHCANRFPRKTKGVTVYNDNKKCDSGTYDLSNLENTVIDNLIGFQENNDSLLKIINGGNQPILDTSSFKKRINQIDKKIQKNSDLYLNDFITMDELKDRTGSLQAEKKLLEAKISENKFNDSTDVFELVKTQLGSIPINELSYDNKKKIVNNLVSKVDVTADNVDIIFKFQLA

SEQ ID NO: 8360 - protein, 469 aa, synthetic construct
MCYTTPVRAAVYLRISEDRNGEQLGVARQREDCLELCDQRKWVPVEYLDNDVSASTGKRRPAYEQMLADITAGKIAAVVAWDLDRLHRRPIELEAFMSLADEKRLALATVAGDVDLATPQGRLVARLKGSVAAHETEHKKARQRRAARQKAELGHPNWSKAFGYLPGPNGPEPDPRTAPLVKQAYADILAGASLGDVCRQWNGAGAFTITGRPWTTTALSKFLRKPRNAGLRAYKGARYGPVDRNAIVGKAQWSPLVDVATFWAAQAVLDAPGRAPGRKSVRRHLLTGLAGCGKCGNHLAGSYRTDGRVVYVCKACHGVTILADNIEPILYHIVAERLAMPDAVDLLRREIHDAAEAEAIRLELDTLYGELDCLAVERAEGLLTARQVKISTDIVNAKITKLQARQLDQERLRVFDGIPLGTPQVAGVIAELSPDRFRAVLDVLAEVVVRPVGKGGRIFNPERVQVNWR

SEQ ID NO: 8361 - protein, 485 aa, synthetic construct
MTKKVAIYTRVSTTNQAEEGFSIDEQIDRLTKYAEAMGWQVSDTYTDAGFSGAKLERPAMQRLVNDIGNKAFDTVLVYKLDRLSRCVHDTLYLVKDVFTKNKIDFISLNESIDTSSAMGSLFLTILSAINEFERENIKERMTMGKLGRAKSGKSMMWTKTAFGYYHNRKTGILEIVPLQATIVEQIFTDYLSGMSLTKLRDKLNESGHIGKDIPWSYRTLRQTLDNPVYCGYIKFKDSLFEGLHKPIIPYETYLKVQKELEERQQQTYERNNNPRPFQAKYMLSGMARCGYCGAPLKIVLGHKRKDGSRAMKYHCANRFPRKTKGVTVYNDNKKCDSGTYDLSNLENTVIDNLIGFQDNNDSLLKVINGNNQPILDTSSFEKQISQIDKKIQKNSDLYLNDFITMDELKDRTDSLQAEKERLKAKISENKFNDSTDVFELVKTQLGSIPINELSYDNKKKIVNNLVSKVDVTADNVDIIFKFQLA

SEQ ID NO: 8362 - protein, 469 aa, synthetic construct
MSYITPVRAAVYLRISEDRSGEQLGVARQREDCLKLCGQRKWVPVEYLDNDVSASTGKRRPAYEQMLADITAGKIAAVVAWDLDRLHRRPIELEAFMSLADEKRLALATVAGDVDLATPQGRLVARLKGSVAAHETEHKRARQRRAARQKAERGHPNWSKAFGYLPGPNGPEPDPRTAPLVKQAYADILAGASLGDVCRQWNDAGAFTITGRPWTTTTLSKFLRKPRNAGLRAYKGARYGPVDRDAIVGKAQWGPLVDEATFWAAQAVLDAPGRAPGRKSVRRHLLTGLAGCGKCGNHLAGSYRTDGRVVYVCKACHGIAILADNIEPILYHIVAERLAMPDAVELLRREFHDAAEADTIRLELETLYGELDRLAVERAEGLLTARQVKISTDIVNAKIAKLQARQLDQERLRVFDGIPLGTPQVAGMIAELSPDRFRAVLDVLAEVVVQPVGKSGRIFNPERVQVNWR

SEQ ID NO: 8363 - protein, 452 aa, synthetic construct
MKAAIYIRVSTREQVENYSIQAQTEKLTALCRSKDWDVYDIFIDGGYSGSNMNRPALNKMLSKLHEIDAVVVYRLDRLSRSQRDTITLIEEYFLKNNVEFVSLSETLDTSSPFGRAMIGILSVFAQLERETIRDRMVMGKIKRIEAGLPLTTAKGRTFGYDVIDTKLYINEEEAKQLQLIYDIFEEEQSITFLQKRLKKLGFKVRTYSRYNNWLTNDLYCGYVSYKDKVHVKGIHEPIISEEQFYRVQEIFTRMGKNPNMNRDSASLLNNLVVCSKCGLGFVHRRKDTTSRGKKYHYRYYSCKTYKHTHELEKCGNKIWRADKLEELIINRVNDYSFASRNVDKEDELDSLNEELKIEHAKKKRLFDLYINGSYEVSELDSMMDDIDARINYYESQIEANEELKKNKKIQENLADLATVDFDSLEFREKQLYLKSLINKIYIDGEQVTIEWL

SEQ ID NO: 8364 - protein, 452 aa, synthetic construct
MKAAIYIRVSTQEQVGNYSIQAQTEKLTALCRSKDWDVYDIFIDGGYSGSNMNRPALNEMLSKLHEIDAVVVYRLDRLSRSQRDTTTLIEEYFLKNNVEFVSLSETLDTSSPFGRAMIGILSVFAQLERETIRDRMVMGKIKRIEAGLPLTTAKGRTFGYDVVDTKLYINEEEAKQLQLIYDIFEEEQSITFLQKRLKKLGFKVRSYNRYNNWLTNDLYCGYVSYKDKVHVKGIHEPIISEEQFYRVQEIFTRMGKNPNMNRDSASLLNNLVVCSKCGLGFVHRSKDTMCRGKKYHYRYYSCKTYKHIYELEKCGNKTWRADKLEELIISRVNNYSFASRGVDKEDELDSLNEKLRIEHAKKKRLFDLYINGSYEMSELDSMMNDINAQINYYESQIEANEELKEDKKIQENLAELATVDFDSLEFREKQLYLKSLINKIYIDGEQVTIEWL

SEQ ID NO: 8365 - protein, 452 aa, synthetic construct
MKAAIYIRVSTQEQVGNYSIQAQTEKLTALCRSKDWDVYDIFIDGGYSGSNMNRPALNEMLSKLHEIDAVVVYRLDRLSRSQRDTTTLIEEYFLKNNVEFVSLSETLDTSSPFGRAMIGILSVFAQLERETIRDRMVMGKIKRIEAGLPLTTAKGRTFGYDVIDTKLYINEEEAKQLRLIYDIFEEEQSITLLQKRLKKLGFKVRTYNRYNNWLTNDLYCGYVSYKDKVHVKGIHEPIISEEQFYRVQEIFTRMGKNPNMNRDSASLLSSLVVCSKCGLGFVHRSKDTMNRGRKYHYRYYSCKTYKHTHELEKCGNKTWRADKLEELIINRVNNYSFASRNADKEDELDSLNEKLKIEHAKKRRLFDLYINGSYEVSELDSMMNDIDAQINSYESQIEANEELKKNKKIQENLADLATVDFDSLEFREKQLYLKSLINKIYIDGDQVTIEWL

SEQ ID NO: 8366 - protein, 452 aa, synthetic construct
MKAAIYIRVSTQEQVGNYSIQAQTEKLTALCRSKDWDVYDIFIDGGYSGSNMNRPALNEMLSKLHEIDAVVVYRLDRLSRSQRDTTTLIEEYFLKNNVEFVSLSETLDTSSPFGRAMIGILSVFAQLERETIRDRMVMGKIKRIEAGLPLTTAKGRTFGYDVIDTKLYINEEEAKQLQLIYDIFEEEQSITSLQKRLKKLGFKVHTYNRYNNWLTNDLYCGYVSYKDKVHVKGIHEPIISEEQFYRVQEIFTRVGKSPNMNRDSASLLSNLVVCSKCGLGFVHRSKDTMSRGKKYRYRYYSCKTYKHTHELEKCGNKTWRADKLEELIINRVNNYSFASRNVDKEGELDSLNEKLKIEHAKKRRLFDLYINGSYEVSELDSMMNDIDAQISYYESQIEANEELKKNKKIQENLANLATVDFDSLEFREKQLYLKSLINKIYIDGEQVTIEWL

SEQ ID NO: 8367 - protein, 469 aa, synthetic construct
MSYTTPVRAAVYLRISEDRSGEQLGAARQREDCLKLCDQRKWVPVEYLDNDVSASTGKRRPAYEQMLADITAGKIAAVVAWDLDRLHRRPIELEAFMSLADEKRLALATVAGDVDLATPQGRLVARLKGSVAAHETEHKKARQRRAARQKAERGHPNWSKAFGYLPGPNGPEPDPRTAPLVKQAYADILAGASLGDVCRQWNGAGALTITGRPWATTALSKFLRKPRNAGLRAYKGARYGPVDRDAIVGKARWSPLVDEATFWAAQAVLDAPGRAPGRKSVRRHLLTGLAGCGKCGNHLAGSYRTDGRVVYVCKACHGVAILADNIEPILYHIVTERLAMPDAVDLLRREIHDAAEAETIRLELETLYGELDCLAVERAEGLLTARQVKISTDIVNAKISKLQACQQDQERLRVFDGIPLGTPQVVGMIAELSPDRFRAVLDVLAEVVVQPVGKSGRIFNPERVQVNWR

SEQ ID NO: 8368 - protein, 452 aa, synthetic construct
MKAAIYIRVSTQEQVENYSIQAQTEKLTALCRSKDWDVYDIFIDGGYSGSNMNRPALNEMLSKLHEIDAVVVYRLDRLSRSQRDTTTLIEEYFLKNNVEFVSLSETLDTSSPFGRAMIGILSVFAQLERETIRDRMVMGKIKRIEAGLPLTTAKGRTFGYDVVDTRLYINEEEAKQLQLIYDIFEEEQSITSLQKRLKKLGFKVRSYNRYNNWLTNDLYCGYVSYKDKVHVKGIHEPIISEEQYYRVQEIFTRMGKNPNMNRDSASLLNSLVVCSKCGLSFVHRSKDTTSRGKKYHYRYYSCKTYKHTHELEKCGNKTWRADKLEELIINRVNNYSFASRNVDKEDELDSLNEKLKIEHAKKKRLFDLYINGSYEVSELDSMMNDIDAQINYYESQIEANEELKKNKKIQENLADLATVDFDSLEFREKQLYLKSLINKIYIDGEQVTIDWL

SEQ ID NO: 8369 - protein, 485 aa, synthetic construct
MTKKVAIYTRVSTINQAEEGFSIDEQIDRLTKYAEAMGWQVSNTYTDAGFSGAKLERPAMQRLINDIENKAFDTVLVYKLDRLTRSVRDTLYLVKDVFTKNKIDFISLNESIDTSSAMGSLFLTILSAINEFERENIKERMTMGKLGRAKSGKSMMWTKTAFGYYHNRKTGILEIVPLQATIVEQIFTDYLSGISLTKLRDKLNESGHIGKDIPWSYRTLRQTLDNPVYCGYIKFKGSLFEGMHKPIIPYETYLKVQKELEVRQQQTYERNNNPRPFQAKYMLSGMARCGYCGAPLRIVLGHKRKDGSRTMKYHCANRFPRKTKGITVYNDNKKCDSGTYDLSNLENTVIDNLIGLQENNDSLLKIINGNNQPIPDTSSFKKQISQIDKKIQKNSDLYLNDFITMDELKGRTDSLQAEKKLLEAKISENKFNDNTDVFELVKTQLGSIPINELSYDNKKKIVNSLVSKVDVTADNVDIIFKFQLA

SEQ ID NO: 8370 - protein, 469 aa, synthetic construct
MCYTTPVRAAVYLRISEDRSGEQLGVARQREDCLKLCDQRKWVPVEYLDNDVSASTGRRRPAYEQMLADITAGKIAAVVAWDLDRLHRRPIELEAFMCLADEKRLALATVAGDVDLATPQGRLVARLKGSVAAHETEHKKARQRRAARQKAERGHPNWSKAFGYLPGLNGPEPDPRTAPLVKQAYADILAGASLGDVCRQWNAAGAFTITGRPWTTTTLSKFLRKPRNAGLRAYKGARYGPVDRDAIVGKAQWSPLVDEATFWAAQAVLDAPGRAPGRKSVRRHLLTGLAGCGKCGNHLAGSYRTDGRVVYVCKACHGVAILADNIEPILYHIVAERLAMPDAVDLLRREVHDAAEAETIRLELETLYGELDRLAVERAEGLLTARQVKISTDIVNAKITKLQTRQLDQERLRVFGGIPLGTPQVAGMIAELSPDRFRAVLDVLAEVVVQPVGKGGRIFNTERVQVNWR
